(19) United States
(12) Patent Application Publication
(10) Pub. No.: US 2024/0318152 A1
(43) Pub. Date: Sep. 26, 2024

(54) P450-BM3 VARIANTS WITH IMPROVED ACTIVITY

(71) Applicant: Codexis, Inc., Redwood City, CA (US)

(72) Inventors: David Entwistle, San Carlos, CA (US); Jason Fell, Martinez, CA (US); Stephan Jenne, Foster City, CA (US); Anders Matthew Knight, Mountain View, CA (US); Simon Ng, San Francisco, CA (US); Ryan D. Reeves, Redwood City, CA (US); Zara Maxine Seibel, San Francisco, CA (US); Jonathan Vroom, South San Francisco, CA (US)

(21) Appl. No.: 18/516,054

(22) Filed: Nov. 21, 2023

Related U.S. Application Data
(60) Provisional application No. 63/491,247, filed on Mar. 20, 2023.

(51) Int. Cl. C12N 9/02

(52) U.S. Cl. CPC C12N 9/0071; C12Y 114/14001

(57) ABSTRACT

The present invention provides improved P450-BM3 variants with improved activity. In some embodiments, the P450-BM3 variants exhibit improved activity on a 1-tert-Butoxycarbonylaminocyclopentanoic acid substrate.

### CROSS-REFERENCE TO RELATED APPLICATIONS

[0001] This application claims priority under 35 U.S.C. § 119(e) to U.S. Provisional Application No. 63/491,247, filed Mar. 20, 2023 which is incorporated herein by reference in its entirety.

### FIELD OF THE INVENTION

[0002] The present invention provides improved P450-BM3 variants with improved activity. In some embodiments, the P450-BM3 variants exhibit improved activity on a 1-tert-Butoxycarbonylaminocyclopentanoic acid substrate.

### REFERENCE TO SEQUENCE LISTING, TABLE OR COMPUTER PROGRAM

[0003] The official copy of the Sequence Listing is submitted concurrently with the specification as an XML file, with a file name of “CX2-233USP2_ST26.xml”, a creation date of Mar. 17, 2023, and a size of 4,511 kilobytes. The Sequence Listing filed is part of the specification and is incorporated in its entirety by reference herein.

### BACKGROUND OF THE INVENTION

[0004] The cytochrome P450 monooxygenases (“P450s”) comprise a large group of widely-distributed heme enzymes that are ubiquitous in the natural world. Cytochrome P450-BM3 (“P450-BM3”), obtained from Bacillus megaterium (also now known as Priestia megaterium) catalyzes the NADPH-dependent hydroxylation of long-chain fatty acids, alcohols, and amides, as well as the epoxidation of unsaturated fatty acids (See e.g., Narhi and Fulco, J. Biol. Chem., 261:7160-7169 [1986]; and Capdevila et al., J. Biol. Chem., 271:2263-22671 [1996]). P450-BM3 is unique, in that the reductase (65 kDa) and monooxygenase (55 kDa) domains of the enzyme are fused and produced as a catalytically self-sufficient 120 kDa enzyme. Although these enzymes have been the subject of numerous studies, there remains a need in the art for improved P450s that exhibit high levels of enzymatic activity on various substrates, including 1-tert-Butoxycarbonylaminocyclopentanoic acid.

### SUMMARY OF THE INVENTION

[0005] The present invention provides improved P450-BM3 variants with improved activity. In some embodiments, the P450-BM3 variants exhibit improved activity on a 1-tert-Butoxycarbonylaminocyclopentanoic acid substrate. The present disclosure provides a recombinant cytochrome P450-BM3 variant having at least 80% sequence identity to a polypeptide sequence comprising the sequence set forth in SEQ ID NOs: 4, 36, 66, 72, 198, 226, 244, 286, 358, 410, 534, 734, 748, 828, 968, 984, 1160, or 1266. In some further embodiments, the recombinant cytochrome P450-BM3 variants oxidize 1-tert-Butoxycarbonylaminocyclopentanoic acid.

[0006] The present invention provides novel biocatalysts and associated methods of use for the synthesis of (tert-Butoxycarbonylamino)-cyclopentanoic acid compounds and related ketone compounds from 1-tert-Butoxycarbonylaminocyclopentanoic acid. The P450-BM3 variants of the present disclosure are engineered variants of a polypeptide (SEQ ID NO: 4), which is an engineered variant of the wild-type enzyme from Bacillus megaterium (SEQ ID NO: 2). These engineered polypeptides are capable of catalyzing the conversion of 1-tert-Butoxycarbonylaminocyclopentanoic acid to (tert-Butoxycarbonylamino)-cyclopentanoic acid products, which are useful in the production of active pharmaceutical ingredients.

[0007] The present invention provide engineered cytochrome P450-BM3 variants comprising a polypeptide sequence having at least 85%, 86%, 87%, 88%, 89%, 90%, 91%, 92%, 93%, 94%, 95%, 96%, 97%, 98%, 99% or more sequence identity to SEQ ID NO:4, 36, 66, 72, 198, 226, 244, 286, 358, 410, 534, 734, 748, 828, 968, 984, 1160, or 1266, or a functional fragment thereof, wherein the polypeptide sequence of the engineered cytochrome P450-BM3 variant comprises at least one substitution or substitution set and wherein the amino acid positions of the polypeptide sequence are numbered with reference to SEQ ID NO:4, 36, 66, 72, 198, 226, 244, 286, 358, 410, 534, 734, 748, 828, 968, 984, 1160, or 1266.

[0008] The present invention provides an engineered polypeptide comprising an amino acid sequence with at least 80%, 85%, 86%, 87%, 88%, 89%, 90%, 91%, 92%, 93%, 94%, 95%, 96%, 97%, 98%, 99% sequence identity to a reference sequence of SEQ ID NO: 4, comprising at least one substitution or one substitution set at one or more positions selected from 32/83/88, 32/83/88/176, 32/83/88/231/574, 32/83/88/574, 52/83/88, 52/83/88/105, 52/83/88/231, 52/83/88/231/433/574, 52/83/88/433, 52/83/88/433/574, 52/83/88/574, 83/88, 83/88/105, 83/88/111, 83/88/111/433, 83/88/111/574, 83/88/231, 83/88/349, 83/88/433/574, and 83/88/574, wherein the positions are numbered with reference to SEQ ID NO: 4. In some additional embodiments, the engineered polypeptide comprises at least one substitution or one substitution set selected from 32K/83A/88A, 32K/83A/88A/1761, 32K/83A/88A/231R/574T, 32K/83A/88A/574T, 52Y/83A/88A, 52Y/83A/88A/105V, 52Y/83A/88A/231R, 52Y/83A/88A/231R/433D/574T, 52Y/83A/88A/433D, 52Y/83A/88A/433D/574T, 52Y/83A/88A/574T, 83A/88A, 83A/88A/105L, 83A/88A/111Q, 83A/88A/111Q/433D, 83A/88A/111Q/574T, 83A/88A/231R, 83A/88A/349E, 83A/88A/433D/574T, and 83A/88A/574T, wherein the positions are numbered with reference to SEQ ID NO: 4. In some embodiments, the engineered polypeptide comprises at least one substitution or one substitution set selected from R32K/L83A/F88A, R32K/L83A/F88A/V1761, R32K/L83A/F88A/S231R/N574T, R32K/L83A/F88A/N574T, F52Y/L83A/F88A, F52Y/L83A/F88A/G105V, F52Y/L83A/F88A/S231R, F52Y/L83A/F88A/S231R/V433D/N574T, F52Y/L83A/F88A/V433D, F52Y/L83A/F88A/V433D/N574T, F52Y/L83A/F88A/N574T, L83A/F88A, L83A/F88A/G105L, L83A/F88A/R111Q, L83A/F88A/R111Q/V433D, L83A/F88A/R111Q/N574T, L83A/F88A/S231R, L83A/F88A/T349E, L83A/F88A/V433D/N574T, and L83A/F88A/N574T, wherein the positions are numbered with reference to SEQ ID NO: 4.

[0009] The present invention also provides an engineered polypeptide comprising an amino acid sequence with at least 80%, 85%, 86%, 87%, 88%, 89%, 90%, 91%, 92%, 93%, 94%, 95%, 96%, 97%, 98%, 99% sequence identity to a reference sequence of SEQ ID NO: 36, comprising at least one substitution or one substitution set selected from: 75, 75/374, 75/374/458/726, 75/374/726, 75/458, 75/458/726, 75/726, 111/114, 111/603/604/623/853, 111/623, 374/726, and 726, wherein the positions are numbered with reference to SEQ ID NO: 36. In some embodiments, the engineered polypeptide comprises at least one substitution or one substitution set selected from 75S, 75S/374S, 75S/374S/458L/726L, 75S/374S/726L, 75S/458L, 75S/458L/726L, 75S/726L, 111H/114G, 111H/603F/604G/623Q/853E, 111H/623Q, 374S/726L, and 726L, wherein the positions are numbered with reference to SEQ ID NO: 36. In some further embodiments, the engineered polypeptide comprises at least one substitution or one substitution set selected from A75S, A75S/E374S, A75S/E374S/G458L/Q726L, A75S/E374S/Q726L, A75S/G458L, A75S/G458L/Q726L, A75S/Q726L, R111H/K114G, R111H/E603F/A604G/S623Q/P853E, R111H/S623Q, E374S/Q726L, and Q726L, wherein the positions are numbered with reference to SEQ ID NO: 36.

[0010] The present invention also provides an engineered polypeptide comprising an amino acid sequence with at least 80%, 85%, 86%, 87%, 88%, 89%, 90%, 91%, 92%, 93%, 94%, 95%, 96%, 97%, 98%, 99% sequence identity to a reference sequence of SEQ ID NO: 66, comprising at least one substitution or one substitution set selected from: 74, 75, 83, 179, 181, 182, 186, 189, 238, 267, 268, 328, 331, 355, 358, 437, and 438, wherein the positions are numbered with reference to SEQ ID NO: 66. In some embodiments, the engineered polypeptide comprises at least one substitution or one substitution set selected from 74G, 75K, 75T, 83V, 179M, 179R, 181V, 182I, 182V, 186R, 189G, 189T, 238L, 267T, 268Q, 328S, 328V, 331F, 331M, 331T, 355V, 358T, 358V, 437G, 437S, and 438R, wherein the positions are numbered with reference to SEQ ID NO: 66. In some further embodiments, the engineered polypeptide comprises at least one substitution or one substitution set selected from Q74G, A75K, A75T, A83V, V179M, V179R, A181V, L182I, L182V, M186R, L189G, L189T, M238L, H267T, E268Q, T328S, T328V, A331F, A331M, A331T, M355V, I358T, I358V, T437G, T437S, and L438R, wherein the positions are numbered with reference to SEQ ID NO: 66.

[0011] The present invention also provides an engineered polypeptide comprising an amino acid sequence with at least 80%, 85%, 86%, 87%, 88%, 89%, 90%, 91%, 92%, 93%, 94%, 95%, 96%, 97%, 98%, 99% sequence identity to a reference sequence of SEQ ID NO: 72, comprising at least one substitution or one substitution set selected from: 74/75/83/179/189/328/331/437, 74/75/268/328/331/358/437, 74/83/268/328/331/358/437, 74/267/268/328, 75/83/179/189/331, 75/83/179/268/328/331/437, 75/83/189/267/268, 75/83/267/268/355/358/654, 75/83/268/437, 75/268/328/331/358, 83/179/182/437, 83/179/189/331/355, 83/179/328/331, 83/179/355/358/437, 83/182/189/268/328/331/355/358/437, 83/182/189/328/331, 83/182/268/328/355/358/437, 83/189/267/268/358, 83/189/268/328/331, 83/189/268/328/355/358/437, 83/189/328/331/437, 83/267/268/328/331/355/358, 83/268, 83/268/328/331, 83/268/328/331/355/358, 83/268/328/331/358, 83/268/328/331/358/437, 83/268/328/331/437, 83/268/331, 83/331, 83/331/437, 83/358/437, 179/182/268, 179/189/331/437, 179/328/331, 179/331/358, 189/267/268/437, 189/268/328, 189/268/328/331/358/437, 189/268/358, 267/268/328, 267/268/328/331/355/358, 267/268/331/355/358/437, 268, 268/328/331, 268/328/355/358, 268/331/355/358, 268/355/358/437, 268/358, and 328/331/358, wherein the positions are numbered with reference to SEQ ID NO: 72. In some embodiments, the engineered polypeptide comprises at least one substitution or one substitution set selected from 74G/75T/83V/179R/189G/328V/331T/437G, 74G/75T/268Q/328V/331T/358V/437S, 74G/83V/268Q/328S/331M/358V/437G, 74G/267T/268Q/328V, 75T/83V/179R/189G/331M, 75T/83V/179R/268Q/328V/331M/437G, 75T/83V/189G/267T/268Q, 75T/83V/267T/268Q/355V/358V/654L, 75T/83V/268Q/437G, 75T/268Q/328V/331T/358T, 83V/179R/182V/437S, 83V/179R/189G/331M/355V, 83V/179R/328V/331M, 83V/179R/355V/358V/437G, 83V/182I/189G/268Q/328V/331M/355V/358V/437G, 83V/182I/189G/328V/331M, 83V/182I/268Q/328V/355V/358V/437S, 83V/189G/267T/268Q/358T, 83V/189G/268Q/328V/331M, 83V/189G/268Q/328V/355V/358V/437G, 83V/189G/328V/331M/437G, 83V/267T/268Q/328V/331M/355V/358T, 83V/268Q, 83V/268Q/328S/331M/355V/358V, 83V/268Q/328S/331M/358T/437G, 83V/268Q/328S/331T/437G, 83V/268Q/328V/331M, 83V/268Q/328V/331M/358V, 83V/268Q/331T, 83V/331M, 83V/331T/437S, 83V/358V/437S, 179R/182I/268Q, 179R/189G/331M/437S, 179R/328V/331M, 179R/331M/358V, 189G/267T/268Q/437S, 189G/268Q/328V, 189G/268Q/328V/331T/358V/437S, 189G/268Q/358V, 267T/268Q/328V, 267T/268Q/328V/331M/355V/358T, 267T/268Q/331T/355V/358T/437S, 268Q, 268Q/328V/331M, 268Q/328V/355V/358T, 268Q/331M/355V/358V, 268Q/355V/358V/437G, 268Q/358V, and 328V/331M/358T, wherein the positions are numbered with reference to SEQ ID NO: 72. In some further embodiments, the engineered polypeptide comprises at least one substitution or one substitution set selected from Q74G/A75T/A83V/V179R/L189G/T328V/A331T/T437G, Q74G/A75T/E268Q/T328V/A331T/I358V/T437S, Q74G/A83V/E268Q/T328S/A331M/I358V/T437G, Q74G/H267T/E268Q/T328V, A75T/A83V/V179R/L189G/A331M, A75T/A83V/V179R/E268Q/T328V/A331M/T437G, A75T/A83V/L189G/H267T/E268Q, A75T/A83V/H267T/E268Q/M355V/I358V/M654L, A75T/A83V/E268Q/T437G, A75T/E268Q/T328V/A331T/I358T, A83V/V179R/L182V/T437S, A83V/V179R/L189G/A331M/M355V, A83V/V179R/T328V/A331M, A83V/V179R/M355V/I358V/T437G, A83V/L182I/L189G/E268Q/T328V/A331M/M355V/I358V/T437G, A83V/L182I/L189G/T328V/A331M, A83V/L182I/E268Q/T328V/M355V/I358V/T437S, A83V/L189G/H267T/E268Q/I358T, A83V/L189G/E268Q/T328V/A331M, A83V/L189G/E268Q/T328V/M355V/I358V/T437G, A83V/L189G/T328V/A331M/T437G, A83V/H267T/E268Q/T328V/A331M/M355V/I358T, A83V/E268Q, A83V/E268Q/T328S/A331M/M355V/I358V, A83V/E268Q/T328S/A331M/I358T/T437G, A83V/E268Q/T328S/A331T/T437G, A83V/E268Q/T328V/A331M, A83V/E268Q/T328V/A331M/I358V, A83V/E268Q/A331T, A83V/A331M, A83V/A331T/T437S, A83V/I358V/T437S, V179R/L182I/E268Q, V179R/L189G/A331M/T437S, V179R/T328V/A331M, V179R/A331M/I358V, L189G/H267T/E268Q/T437S, L189G/E268Q/T328V, L189G/E268Q/T328V/A331T/I358V/T437S, L189G/E268Q/I358V, H267T/E268Q/T328V, H267T/E268Q/T328V/A331M/M355V/I358T, H267T/E268Q/A331T/M355V/I358T/T437S, E268Q, E268Q/T328V/A331M, E268Q/T328V/M355V/I358T, E268Q/A331M/M355V/I358V, E268Q/M355V/I358V/T437G, E268Q/I358V, and T328V/A331M/I358T, wherein the positions are numbered with reference to SEQ ID NO: 72.

[0012] The present invention also provides an engineered polypeptide comprising an amino acid sequence with at least 80%, 85%, 86%, 87%, 88%, 89%, 90%, 91%, 92%, 93%, 94%, 95%, 96%, 97%, 98%, 99% sequence identity to a reference sequence of SEQ ID NO: 198, comprising at least one substitution or one substitution set selected from: 79, 213, and 257, wherein the positions are numbered with reference to SEQ ID NO: 198. In some embodiments, the engineered polypeptide comprises at least one substitution or one substitution set selected from 79I, 213V, and 257Q, wherein the positions are numbered with reference to SEQ ID NO: 198. In some further embodiments, the engineered polypeptide comprises at least one substitution or one substitution set selected from A79I, M213V, and Y257Q, wherein the positions are numbered with reference to SEQ ID NO: 198.

[0013] The present invention also provides an engineered polypeptide comprising an amino acid sequence with at least 80%, 85%, 86%, 87%, 88%, 89%, 90%, 91%, 92%, 93%, 94%, 95%, 96%, 97%, 98%, 99% sequence identity to a reference sequence of SEQ ID NO: 226, comprising at least one substitution or one substitution set selected from: 315, 320, 385, 388, 391, 398, 405, 493, 497, 502, 503, 504, 541, 542, 547, 573, 576 and 577, wherein the positions are numbered with reference to SEQ ID NO: 226.

[0014] The present invention also provides an engineered polypeptide comprising an amino acid sequence with at least 80%, 85%, 86%, 87%, 88%, 89%, 90%, 91%, 92%, 93%, 94%, 95%, 96%, 97%, 98%, 99% sequence identity to a reference sequence of SEQ ID NO: 244, comprising at least one substitution or one substitution set selected from: 75/178/213/315, 75/331/576/726, 178, 178/179/213/437/497/573/576, 178/179/573/726, 178/179/576, 178/213/573, 178/213/726, 178/437, 178/497/726, 178/576, 178/726, 179/358, 179/726, 331, 331/358/391/437, 331/497, 331/573/576, 497/573, 573, 682, 685, 699, 701, 704, 707, 708, 726, 756, 759, 794, 796, 797, 848, 851, 862, 888, 889, 999, 1003, and 1048, wherein the positions are numbered with reference to SEQ ID NO: 244. In some embodiments, the engineered polypeptide comprises at least one substitution or one substitution set selected from 75S/178V/213V/315T, 75S/331T/576V/726L, 178V, 178V/179R/213V/4375/497A/573S/576V, 178V/179R/573S/726L, 178V/179R/576V, 178V/213V/573S, 178V/213V/726L, 178V/437S, 178V/497A/726L, 178V/576V, 178V/726L, 179R/358T, 179R/726L, 331T, 331T/358T/391Y/437S, 331T/497A, 331T/573S/576V, 497A/573S, 573S, 682K, 685F, 699R, 701V, 704L, 707Y, 708C, 726L, 756Q, 759T, 794C, 796H, 796N, 797H, 848T, 851G, 851V, 862L, 888Y, 889Q, 999A, 1003W, and 1048L, wherein the positions are numbered with reference to SEQ ID NO: 244. In some further embodiments, the engineered polypeptide comprises at least one substitution or one substitution set selected from A75S/M178V/M213V/V315T, A75S/M331T/A576V/Q726L, M178V, M178V/V179R/M213V/T437S/T497A/K573S/A576V, M178V/V179R/K573S/Q726L, M178V/V179R/A576V, M178V/M213V/K573S, M178V/M213V/Q726L, M178V/T437S, M178V/T497A/Q726L, M178V/A576V, M178V/Q726L, V179R/V358T, V179R/Q726L, M331T, M331T/V358T/F391Y/T437S, M331T/T497A, M331T/K573S/A576V, T497A/K573S, K573S, T682K, L685F, D699R, L701V, 1704L, N707Y, Y708C, Q726L, L756Q, P759T, V794C, A796H, A796N, K797H, S848T, S851G, S851V, K862L, E888Y, F889Q, 1999A, G1003W, and A1048L, wherein the positions are numbered with reference to SEQ ID NO: 244.

[0015] The present invention also provides an engineered polypeptide comprising an amino acid sequence with at least 80%, 85%, 86%, 87%, 88%, 89%, 90%, 91%, 92%, 93%, 94%, 95%, 96%, 97%, 98%, 99% sequence identity to a reference sequence of SEQ ID NO: 286, comprising at least one substitution or one substitution set selected from: 75/331/701/726/851/1048, 75/331/726/999, 75/726/796/851/999, 75/1048, 87, 88/522, 89, 234, 269, 328, 330, 331, 398, 405, 408, and 411, wherein the positions are numbered with reference to SEQ ID NO: 286. In some embodiments, the engineered polypeptide comprises at least one substitution or one substitution set selected from 75S/331T/701V/726L/851V/1048L, 75S/331T/726L/999A, 75S/726L/796N/851V/999A, 75S/1048L, 871, 87V, 88S/522R, 89S, 234F, 269G, 269P, 328T, 330G, 331S, 398R, 405A, 405S, 408R, and 411G, wherein the positions are numbered with reference to SEQ ID NO: 286. In some further embodiments, the engineered polypeptide comprises at least one substitution or one substitution set selected from A75S/M331T/L701V/Q726L/S851V/A1048L, A75S/M331T/Q726L/1999A, A75S/Q726L/A796N/S851V/I999A, A75S/A1048L, L87I, L87V, A88S/G522R, T89S, L234F, T269G, T269P, V328T, P330G, M331S, Q398R, Q405A, Q405S, L408R, and A411G, wherein the positions are numbered with reference to SEQ ID NO: 286.

[0016] The present invention also provides an engineered polypeptide comprising an amino acid sequence with at least 80%, 85%, 86%, 87%, 88%, 89%, 90%, 91%, 92%, 93%, 94%, 95%, 96%, 97%, 98%, 99% sequence identity to a reference sequence of SEQ ID NO: 358, comprising at least one substitution or one substitution set selected from: 75/269/707, 269, 269/522/707, 269/522/707/1048, 522, 522/726, 522/1048, and 726/1048, wherein the positions are numbered with reference to SEQ ID NO: 358. In some embodiments, the engineered polypeptide comprises at least one substitution or one substitution set selected from 75S/269P/707Y, 269P, 269P/522G/707Y, 269P/522G/707Y/1048L, 522G, 522G/726L, 522G/1048L, and 726L/1048L, wherein the positions are numbered with reference to SEQ ID NO: 358. In some further embodiments, the engineered polypeptide comprises at least one substitution or one substitution set selected from A75S/T269P/N707Y, T269P, T269P/R522G/N707Y, T269P/R522G/N707Y/A1048L, R522G, R522G/Q726L, R522G/A1048L, and Q726L/A1048L, wherein the positions are numbered with reference to SEQ ID NO: 358.

[0017] The present invention also provides an engineered polypeptide comprising an amino acid sequence with at least 80%, 85%, 86%, 87%, 88%, 89%, 90%, 91%, 92%, 93%, 94%, 95%, 96%, 97%, 98%, 99% sequence identity to a reference sequence of SEQ ID NO: 358, comprising at least one substitution or one substitution set selected from: 77, 170, 286, 289, 462, 547, 557, 630, 646, 651, 672, 676, 692, 775, 786, 787, 788, 814, 841, 876, 877, 888, 893, 896, 924, 941, 955, 969, 973, 982, 989, 993, and 1038, wherein the positions are numbered with reference to SEQ ID NO: 358. In some embodiments, the engineered polypeptide comprises at least one substitution or one substitution set selected from 77L, 170S, 170T, 286R, 289A, 462W, 547R, 557E, 557P, 630G, 646F, 651S, 672G, 676K, 676R, 692G, 692V, 775K, 786G, 786R, 786S, 786V, 787R, 788P, 8141, 814S, 841R, 876G, 877V, 888G, 893G, 896L, 924A, 924G, 924N, 924P, 941R, 955G, 969E, 969G, 973P, 982G, 989G, 989L, 993S, and 1038Q, wherein the positions are numbered with reference to SEQ ID NO: 358. In some further embodiments, the engineered polypeptide comprises at least one substitution or one substitution set selected from K77L, Q170S, Q170T, H286R, Q289A, P462W, Q547R, A557E, A557P, N630G, Q646F, A651S, E672G, P676K, P676R, E692G, E692V, P775K, E786G, E786R, E786S, E786V, K787R, Q788P, K8141, K814S, K841R, D876G, T877V, E888G, K893G, E896L, Q924A, Q924G, Q924N, Q924P, H941R, S955G, P969E, P969G, K973P, Q982G, E989G, E989L, Q993S, and E1038Q, wherein the positions are numbered with reference to SEQ ID NO: 358.

[0018] The present invention also provides an engineered polypeptide comprising an amino acid sequence with at least 80%, 85%, 86%, 87%, 88%, 89%, 90%, 91%, 92%, 93%, 94%, 95%, 96%, 97%, 98%, 99% sequence identity to a reference sequence of SEQ ID NO: 410, comprising at least one substitution or one substitution set selected from: 158/170, 158/170/410/462/630/672/726/786/788/814/924, 158/170/410/462/726/786/814, 158/170/410/924, 158/170/630/726/786/788/814, 158/410, 158/410/462/557/969, 158/410/557/786/787, 158/410/814/924, 158/410/862, 158/462/557/630/924, 158/462/630/786/788/969, 158/557, 158/557/630/814, 158/557/726/786/788/862, 158/557/786, 158/557/786/787/788, 158/557/814/924, 158/630/786/814, 158/726, 158/786/787/788, 158/814/924, 170/410/557/786/787/814/924/989, 385, 410/462/557/630/786/787/969, 462/557/726/786/787/924, 469, 523, 550, 553, 556, 574, 613, 640, 645, 650, 652, 717, 773, 779, 795, 838, 871, 923, and 926, wherein the positions are numbered with reference to SEQ ID NO: 410. In some embodiments, the engineered polypeptide comprises at least one substitution or one substitution set selected from 158L/170T, 158L/170T/410S/462W/630G/672G/726L/786R/788P/814S/924G, 158L/170T/410S/462W/726L/786G/814S, 158L/170T/410S/924G, 158L/170T/630G/726L/786G/788P/814S, 158L/410S, 158L/410S/462W/557E/969G, 158L/410S/557P/786G/787R, 158L/410S/814S/924G, 158L/410S/862L, 158L/462W/557P/630G/924G, 158L/462W/630G/786R/788P/969G, 158L/557P, 158L/557P/630G/814S, 158L/557P/726L/786G/788P/862L, 158L/557P/786R/787R/788P, 158L/557P/786V, 158L/557P/814S/924G, 158L/630G/786S/814S, 158L/726L, 158L/786S/787R/788P, 158L/814S/924G, 170T/410S/557E/786V/787R/814S/924G/989G, 385R, 385T, 410S/462W/557P/630G/786V/787R/969G, 462W/557P/726L/786G/787R/924G, 469R, 523R, 550T, 553A, 553G, 553K, 553S, 556G, 574H, 574S, 613A, 640C, 640G, 640V, 640W, 645V, 650P, 652S, 717C, 717Q, 773A, 773G, 779G, 795A, 838W, 871M, 871N, 923A, 923L, 926K, and 926R, wherein the positions are numbered with reference to SEQ ID NO: 410. In some further embodiments, the engineered polypeptide comprises at least one substitution or one substitution set selected from G158L/Q170T, G158L/Q170T/E410S/P462W/N630G/E672G/Q726L/E786R/Q788P/K814S/Q924G, G158L/Q170T/E410S/P462W/Q726L/E786G/K814S, G158L/Q170T/E410S/Q924G, G158L/Q170T/N630G/Q726L/E786G/Q788P/K814S, G158L/E410S, G158L/E410S/P462W/A557E/P969G, G158L/E410S/A557P/E786G/K787R, G158L/E410S/K814S/Q924G, G158L/E410S/K862L, G158L/P462W/A557P/N630G/Q924G, G158L/P462W/N630G/E786R/Q788P/P969G, G158L/A557P, G158L/A557P/N630G/K814S, G158L/A557P/Q726L/E786G/Q788P/K862L, G158L/A557P/E786R/K787R/Q788P, G158L/A557P/E786V, G158L/A557P/K814S/Q924G, G158L/N630G/E786S/K814S, G158L/Q726L, G158L/E786S/K787R/Q788P, G158L/K814S/Q924G, Q170T/E410S/A557E/E786V/K787R/K814S/Q924G/E989G, A385R, A385T, E410S/P462W/A557P/N630G/E786V/K787R/P969G, P462W/A557P/Q726L/E786G/K787R/Q924G, K469R, N523R, D550T, D553A, D553G, D553K, D553S, S556G, N574H, N574S, T613A, K640C, K640G, K640V, K640W, L645V, S650P, A652S, A717C, A717Q, V773A, V773G, V779G, L795A, V838W, E871M, E871N, E923A, E923L, Q926K, and Q926R, wherein the positions are numbered with reference to SEQ ID NO: 410.

[0019] The present invention also provides an engineered polypeptide comprising an amino acid sequence with at least 80%, 85%, 86%, 87%, 88%, 89%, 90%, 91%, 92%, 93%, 94%, 95%, 96%, 97%, 98%, 99% sequence identity to a reference sequence of SEQ ID NO: 410, comprising at least one substitution or one substitution set selected from: 51/851, 460, 466, 474, 597, 600, 635, 638, 655, 663, 664, 677, 694, 696, 713, 771, 783, 789, 806, 807, 840, 842, 851, 857, 860, 878, 894, 942, 947, 960, 978, 992, 1008, 1012, 1024, and 1025, wherein the positions are numbered with reference to SEQ ID NO: 410. In some embodiments, the engineered polypeptide comprises at least one substitution or one substitution set selected from 51H/851Q, 460R, 466C, 474F, 474P, 597R, 597V, 600K, 635S, 638E, 638W, 655A, 655L, 655T, 663G, 664L, 677H, 677N, 694P, 696C, 713M, 771I, 783E, 783K, 783S, 789G, 806N, 807R, 807T, 840L, 842G, 851L, 857F, 860R, 878S, 894V, 942K, 947W, 960A, 960G, 960K, 978S, 992F, 992G, 1008C, 1012G, 1012M, 1024I, 1024L, 1025G, 1025T, and 1025W, wherein the positions are numbered with reference to SEQ ID NO: 410. In some further embodiments, the engineered polypeptide comprises at least one substitution or one substitution set selected from R51H/S851Q, P460R, Q466C, K474F, K474P, N597R, N597V, D600K, N635S, D638E, D638W, P655A, P655L, P655T, F663G, S664L, G677H, G677N, S694P, Q696C, N713M, K771I, A783E, A783K, A783S, A789G, E806N, K807R, K807T, E840L, Q842G, S851L, G857F, E860R, I878S, D894V, E942K, Q947W, T960A, T960G, T960K, H978S, D992F, D992G, P1008C, A1012G, A1012M, V1024I, V1024L, S1025G, S1025T, and S1025W, wherein the positions are numbered with reference to SEQ ID NO: 410.

[0020] The present invention also provides an engineered polypeptide comprising an amino acid sequence with at least 80%, 85%, 86%, 87%, 88%, 89%, 90%, 91%, 92%, 93%, 94%, 95%, 96%, 97%, 98%, 99% sequence identity to a reference sequence of SEQ ID NO: 544, comprising at least one substitution or one substitution set selected from: 77/179/286/410/788/888, 77/410/676/788/924, 77/557/707/888, 286/410/651/676, 286/410/707/788, 286/410/888, 286/692/786/788, 410, 410/557/676/788/888/924/993, 410/557/692/788, and 410/646/651/788, wherein the positions are numbered with reference to SEQ ID NO: 544. In some embodiments, the engineered polypeptide comprises at least one substitution or one substitution set selected from 77L/179L/286R/410S/788Q/888G, 77L/410S/676K/788Q/924N, 77L/557P/707Y/888G, 286R/410S/651S/676K, 286R/410S/707Y/788Q, 286R/410S/888G, 286R/692V/786R/788Q, 410S, 410S/557P/676K/788Q/888G/924N/993S, 410S/557P/692V/788Q, and 410S/646F/651S/788Q, wherein the positions are numbered with reference to SEQ ID NO: 544. In some further embodiments, the engineered polypeptide comprises at least one substitution or one substitution set selected from K77L/V179L/H286R/E410S/P788Q/E888G, K77L/E410S/P676K/P788Q/Q924N, K77L/A557P/N707Y/E888G, H286R/E410S/A651S/P676K, H286R/E410S/N707Y/P788Q, H286R/E410S/E888G, H286R/E692V/G786R/P788Q, E410S, E410S/A557P/P676K/P788Q/E888G/Q924N/Q993S, E410S/A557P/E692V/P788Q, and E410S/Q646F/A651S/P788Q, wherein the positions are numbered with reference to SEQ ID NO: 544.

[0021] The present invention also provides an engineered polypeptide comprising an amino acid sequence with at least 80%, 85%, 86%, 87%, 88%, 89%, 90%, 91%, 92%, 93%, 94%, 95%, 96%, 97%, 98%, 99% sequence identity to a reference sequence of SEQ ID NO: 734, comprising at least one substitution or one substitution set selected from: 24, 53, 75, 78, 82, 88, 150, 180, 183, 257, 270, 410/497/557/576/814, 410/497/573/576, 410/497/814, 410/557/924, 437, and 497/557, wherein the positions are numbered with reference to SEQ ID NO: 734. In some embodiments, the engineered polypeptide comprises at least one substitution or one substitution set selected from 24R, 24S, 53V, 75G, 78E, 82I, 88G, 88T, 88V, 150G, 180G, 183S, 257G, 257H, 257N, 257W, 270I, 270V, 410E/497A/557P/576V/814K, 410E/497A/573S/576V, 410E/497A/814K, 410E/557P/924G, 437N, 437V, and 497A/557P, wherein the positions are numbered with reference to SEQ ID NO: 734. In some further embodiments, the engineered polypeptide comprises at least one substitution or one substitution set selected from D24R, D24S, L53V, A75G, F78E, F82I, S88G, S88T, S88V, T150G, R180G, D183S, Q257G, Q257H, Q257N, Q257W, T270I, T270V, S410E/T497A/A557P/A576V/S814K, S410E/T497A/K573S/A576V, S410E/T497A/S814K, S410E/A557P/Q924G, S437N, S437V, and T497A/A557P, wherein the positions are numbered with reference to SEQ ID NO: 734.

[0022] The present invention also provides an engineered polypeptide comprising an amino acid sequence with at least 80%, 85%, 86%, 87%, 88%, 89%, 90%, 91%, 92%, 93%, 94%, 95%, 96%, 97%, 98%, 99% sequence identity to a reference sequence of SEQ ID NO: 748, comprising at least one substitution or one substitution set selected from: 75, 75/82/180/257/437, 75/82/257/268, 75/82/257/556/640, 75/82/257/773, 75/82/437, 75/180/183/257/268/270/385/437/556/613/652/923, 75/180/257/268/270/437/556/574/652, 75/180/574/795, 75/257/613, 75/257/640, 75/556/773, 75/574, 75/613, 82/613, 180/437/773/795, and 257/613/773/795, wherein the positions are numbered with reference to SEQ ID NO: 748. In some embodiments, the engineered polypeptide comprises at least one substitution or one substitution set selected from 75G, 75G/82I/180G/257G/437N, 75G/82I/257G/268T, 75G/82I/257H/773A, 75G/82I/257N/556G/640G, 75G/82I/437N, 75G/180G/183S/257N/268T/270I/385R/437N/556G/613A/652S/923A, 75G/180G/257N/268T/270I/437V/556G/574S/652S, 75G/180G/574S/795A, 75G/257N/613A, 75G/257N/640W, 75G/556G/773A, 75G/574S, 75G/613A, 82I/613A, 180G/437N/773A/795A, and 257H/613A/773A/795A, wherein the positions are numbered with reference to SEQ ID NO: 748. In some further embodiments, the engineered polypeptide comprises at least one substitution or one substitution set selected from A75G, A75G/F82I/R180G/Q257G/S437N, A75G/F82I/Q257G/Q268T, A75G/F82I/Q257H/V773A, A75G/F82I/Q257N/S556G/K640G, A75G/F82I/S437N, A75G/R180G/D183S/Q257N/Q268T/T270I/A385R/S437N/S556G/T613A/A652S/E923A, A75G/R180G/Q257N/Q268T/T270I/S437V/S556G/N574S/A652S, A75G/R180G/N574S/L795A, A75G/Q257N/T613A, A75G/Q257N/K640W, A75G/S556G/V773A, A75G/N574S, A75G/T613A, F82I/T613A, R180G/S437N/V773A/L795A, and Q257H/T613A/V773A/L795A, wherein the positions are numbered with reference to SEQ ID NO: 748.

[0023] The present invention also provides an engineered polypeptide comprising an amino acid sequence with at least 80%, 85%, 86%, 87%, 88%, 89%, 90%, 91%, 92%, 93%, 94%, 95%, 96%, 97%, 98%, 99% sequence identity to a reference sequence of SEQ ID NO: 748, comprising at least one substitution or one substitution set selected from: 45, 102, 106, 110, 111, 114, 127, 191, 193, 194, 196, 196/853, 198, 202, 203, 206, 210, 226, 232, 236, 237, 244, 245, 248, 254, 256, and 347, wherein the positions are numbered with reference to SEQ ID NO: 748. In some embodiments, the engineered polypeptide comprises at least one substitution or one substitution set selected from 45E, 102A, 102L, 106V, 110F, 110L, 110V, 111L, 111R, 111W, 114H, 114M, 114Q, 114R, 127M, 191S, 193K, 194T, 196Q/853L, 196W, 198S, 202Q, 203G, 206R, 210R, 210T, 226N, 232R, 236G, 236S, 237N, 237R, 244G, 244R, 244Y, 245A, 245G, 245L, 245M, 245N, 245Q, 245R, 245S, 245T, 245V, 245W, 248M, 248R, 254L, 256K, 347E, 347K, and 347S, wherein the positions are numbered with reference to SEQ ID NO: 748. In some further embodiments, the engineered polypeptide comprises at least one substitution or one substitution set selected from A45E, N102A, N102L, P106V, Q110F, Q110L, Q110V, H111L, H111R, H111W, G114H, G114M, G114Q, G114R, L127M, R191S, N193K, P194T, D196Q/P853L, D196W, A198S, N202Q, K203G, C206R, I210R, I210T, A226N, H232R, T236G, T236S, Q237N, Q237R, P244G, P244R, P244Y, E245A, E245G, E245L, E245M, E245N, E245Q, E245R, E245S, E245T, E245V, E245W, E248M, E248R, N254L, R256K, P347E, P347K, and P347S, wherein the positions are numbered with reference to SEQ ID NO: 748.

[0024] The present invention also provides an engineered polypeptide comprising an amino acid sequence with at least 80%, 85%, 86%, 87%, 88%, 89%, 90%, 91%, 92%, 93%, 94%, 95%, 96%, 97%, 98%, 99% sequence identity to a reference sequence of SEQ ID NO: 828, comprising at least one substitution or one substitution set selected from: 22/75/717/720/779/1004, 22/550/826, 22/616/717/1004, 22/717/795/799/826, 550/616/717/779, 550/640/717, 550/717/795/799/800, 616/717/720/799, 640, 717, 717/720/779/1004, 717/779/799/800/1004, 717/1004, 720/779, 779/1004, 800/1004, and 826/1004, wherein the positions are numbered with reference to SEQ ID NO: 828. In some embodiments, the engineered polypeptide comprises at least one substitution or one substitution set selected from 22D/75A/717C/720L/779F/1004I, 22D/550T/826G, 22D/616L/717I/1004I, 22D/717Q/795V/799I/826G, 550T/616L/717I/779F, 550T/640D/717I, 550T/717C/795V/799I/800Y, 616L/717G/720L/799I, 640V, 717C, 717G/720L/779F/1004I, 717G/1004I, 717Q/779F/799I/800Y/1004I, 717Q/1004I, 720L/779F, 779F/1004I, 800Y/1004I, and 826G/1004I, wherein the positions are numbered with reference to SEQ ID NO: 828. In some further embodiments, the engineered polypeptide comprises at least one substitution or one substitution set selected from N22D/G75A/A717C/G720L/V779F/S1004I, N22D/D550T/R826G, N22D/E616L/A717I/S1004I, N22D/A717Q/L795V/L799I/R826G, D550T/E616L/A717I/V779F, D550T/K640D/A717I, D550T/A717C/L795V/L799I/T800Y, E616L/A717G/G720L/L799I, K640V, A717C, A717G/G720L/V779F/S1004I, A717G/S1004I, A717Q/V779F/L799I/T800Y/S1004I, A717Q/S1004I, G720L/V779F, V779F/S1004I, T800Y/S1004I, and R826G/S1004I, wherein the positions are numbered with reference to SEQ ID NO: 828.

[0025] The present invention also provides an engineered polypeptide comprising an amino acid sequence with at least 80%, 85%, 86%, 87%, 88%, 89%, 90%, 91%, 92%, 93%, 94%, 95%, 96%, 97%, 98%, 99% sequence identity to a reference sequence of SEQ ID NO: 968, comprising at least one substitution or one substitution set selected from: 3, 118/446, 132, 230, 285, 290, 292, 293, 295, 296, 300, 303, 305, 307, 366, 371, 372, 381, 382, 415, 417, 418, 424, 427, 432, 433, 446, 447, 455, 463, 465, 468, 473, 473/790, 478, 480, 481, 506, 600/635/713/771/1025, 600/840/960, 635/636/793/840, 635/638/793/823/960, 635/713/1025, 635/771/894, 636/638/793/851, 638/663/793/840, 713, 771, 786/840/960, 793/840, 807, 840/960, 851/1024/1025, 851/1025, 960, and 1025, wherein the positions are numbered with reference to SEQ ID NO: 968. In some embodiments, the engineered polypeptide comprises at least one substitution or one substitution set selected from 3D, 3W, 118T/446L, 132M, 132V, 230D, 230V, 285G, 285S, 290S, 292S, 293R, 293T, 295S, 296G, 296Q, 300P, 303Q, 303W, 305G, 305N, 305R, 307R, 366I, 366S, 371K, 372S, 381F, 382M, 382T, 415V, 417V, 418L, 418V, 424V, 424Y, 427T, 432V, 433D, 433K, 433L, 433R, 446S, 447L, 455R, 463A, 463V, 465Q, 468F, 473L/790H, 473R, 478S, 480W, 481L, 506D, 506V, 600K/635S/713M/771I/1025G, 600K/840L/960L, 635S/636G/793T/840L, 635S/638G/793T/823A/960L, 635S/713M/1025T, 635S/771I/894V, 636M/638G/793T/851L, 638G/663R/793T/8405, 713M, 771I, 786A/8405/960L, 793T/840L, 807R, 840L/960L, 851L/1024I/1025T, 851L/1025T, 960L, 1025T, and 1025W, wherein the positions are numbered with reference to SEQ ID NO: 968. In some further embodiments, the engineered polypeptide comprises at least one substitution or one substitution set selected from I3D, I3W, A118T/V446L, E132M, E132V, Q230D, Q230V, P285G, P285S, K290S, A292S, E293R, E293T, A295S, A296G, A296Q, V300P, V303Q, V303W, S305G, S305N, S305R, K307R, T366I, T366S, D371K, V372S, E381F, N382M, N382T, L415V, M417V, M418L, M418V, F424V, F424Y, H427T, L432V, V433D, V433K, V433L, V433R, V446S, V447L, P455R, S463A, S463V, E465Q, A468F, K473L/Y790H, K473R, A478S, N480W, T481L, M506D, M506V, D600K/N635S/N713M/K771I/S1025G, D600K/E840L/T960L, N635S/S636G/Q793T/E840L, N635S/D638G/Q793T/P823A/T960L, N635S/N713M/S1025T, N635S/K771I/D894V, S636M/D638G/Q793T/S851L, D638G/F663R/Q793T/E840S, N713M, K771I, G786A/E840S/T960L, Q793T/E840L, K807R, E840L/T960L, S851L/V1024I/S1025T, S851L/S1025T, T960L, 51025T, and S1025W, wherein the positions are numbered with reference to SEQ ID NO: 968.

[0026] The present invention also provides an engineered polypeptide comprising an amino acid sequence with at least 80%, 85%, 86%, 87%, 88%, 89%, 90%, 91%, 92%, 93%, 94%, 95%, 96%, 97%, 98%, 99% sequence identity to a reference sequence of SEQ ID NO: 984, comprising at least one substitution or one substitution set selected from: 45, 45/111/226/347, 45/853, 110/114, 111, 111/127/226/244, 111/194/244/347/853, 111/194/347, 111/194/347/853, 111/210, 111/210/347/853, 111/226, 111/226/244/347, 111/226/853/969, 111/244, 111/244/853, 111/347/853, 111/853, 114, 114/245, 127/210/244, 127/210/244/853, 127/210/347/853, 127/244, 127/347, 194/853, 210/853, 226/236/244/347/853, 236/244, 237, 237/245, 244/853, and 245, wherein the positions are numbered with reference to SEQ ID NO: 984. In some embodiments, the engineered polypeptide comprises at least one substitution or one substitution set selected from 45E, 45E/111R/226N/347S, 45E/853L, 110L/114Q, 11 IL, 111L/127M/226N/244Y, 111L/210T, 111L/244R, 111L/244Y/853L, 111L/853L, 111R/127M/226N/244Y, 111R/194T/244Y/347S/853L, 111R/194T/347S, 111R/194T/347S/853L, 111R/210T/347S/853L, 111R/226N, 111R/226N/244Y/347S, 111R/347E/853L, 111R/853L, 111W, 111W/226N/853L/969S, 114Q, 114Q/245V, 127M/210T/244Y, 127M/210T/244Y/853L, 127M/210T/347E/853L, 127M/244Y, 127M/347E, 194T/853L, 210T/853L, 226N/236G/244Y/347S/853L, 236G/244Y, 237R, 237R/245V, 244Y/853L, 245S, and 245V, wherein the positions are numbered with reference to SEQ ID NO: 984. In some further embodiments, the engineered polypeptide comprises at least one substitution or one substitution set selected from A45E, A45E/H111R/A226N/P347S, A45E/P853L, Q110L/G114Q, H111L, H111 L/L127M/A226N/P244Y, H111L/I210T, H111 L/P244R, H111 L/P244Y/P853L, H111 L/P853L, H111R/L127M/A226N/P244Y, H111R/P194T/P244Y/P347S/P853L, H111R/P194T/P347S, H111R/P194T/P347S/P853L, H111R/1210T/P347S/P853L, H11R/A226N, H111R/A226N/P244Y/P347S, H11R/P347E/P853L, H111R/P853L, H11W, H111W/A226N/P853L/P969S, G114Q, G114Q/E245V, L127M/I210T/P244Y, L127M/1210T/P244Y/P853L, L127M/1210T/P347E/P853L, L127M/P244Y, L127M/P347E, P194T/P853L, 1210T/P853L, A226N/T236G/P244Y/P347S/P853L, T236G/P244Y, Q237R, Q237R/E245V, P244Y/P853L, E245S, and E245V, wherein the positions are numbered with reference to SEQ ID NO: 984.

[0027] The present invention also provides an engineered polypeptide comprising an amino acid sequence with at least 80%, 85%, 86%, 87%, 88%, 89%, 90%, 91%, 92%, 93%, 94%, 95%, 96%, 97%, 98%, 99% sequence identity to a reference sequence of SEQ ID NO: 984, comprising at least one substitution or one substitution set selected from: 518, 518/652, 519, 562, 563, 584/724, 586, 616, 618, 619, 621, 623, 628, 640, 653, and 666, wherein the positions are numbered with reference to SEQ ID NO: 984. In some embodiments, the engineered polypeptide comprises at least one substitution or one substitution set selected from 518G, 518N/652S, 518S, 518T, 519L, 562P, 563L, 563S, 584G/724P, 586V, 616V, 618G, 618L, 619G, 619R, 621T, 623P, 628S, 640L, 653A, 653R, 653T, and 666R, wherein the positions are numbered with reference to SEQ ID NO: 984. In some further embodiments, the engineered polypeptide comprises at least one substitution or one substitution set selected from D518G, D518N/A652S, D518S, D518T, S519L, G562P, V563L, V563S, A584G/S724P, 1586V, E616V, R618G, R618L, D619G, D619R, M621T, S623P, Y628S, K640L, D653A, D653R, D653T, and N666R, wherein the positions are numbered with reference to SEQ ID NO: 984.

[0028] The present invention also provides an engineered polypeptide comprising an amino acid sequence with at least 80%, 85%, 86%, 87%, 88%, 89%, 90%, 91%, 92%, 93%, 94%, 95%, 96%, 97%, 98%, 99% sequence identity to a reference sequence of SEQ ID NO: 1160, comprising at least one substitution or one substitution set selected from: 132/366/433/463/467/793, 132/366/467/661, 132/467/468/506/793, 132/468/793, 132/1025, 183/1025/1045/1048, 290/366/433/463/467, 290/433/467/793/1025, 290/433/793, 290/793, 290/1025, 366/433, 433, 433/467/1025, 433/506/1025, 433/790, 463/793, 473, 793, and 1025, wherein the positions are numbered with reference to SEQ ID NO: 1160. In some embodiments, the engineered polypeptide comprises at least one substitution or one substitution set selected from 132G/366I/433K/463A/467K/793T, 132G/366I/467G/661D, 132G/467K/468F/506V/793T, 132G/468F/793T, 132G/1025T, 183G/1025A/1045N/1048R, 290T/366I/433K/463A/467K, 290T/433K/467K/793T/1025T, 290T/433K/793T, 290T/793T, 290T/1025T, 366I/433K, 433K, 433K/467K/1025T, 433K/506V/1025T, 433K/790H, 463A/793T, 473L, 793T, and 1025T, wherein the positions are numbered with reference to SEQ ID NO: 1160. In some further embodiments, the engineered polypeptide comprises at least one substitution or one substitution set selected from E132G/T366I/V433K/S463A/S467K/Q793T, E132G/T366I/S467G/G661D, E132G/S467K/A468F/M506V/Q793T, E132G/A468F/Q793T, E132G/S1025T, D183G/S1025A/D1045N/L1048R, K290T/T366I/V433K/S463A/S467K, K290T/V433K/S467K/Q793T/S1025T, K290T/V433K/Q793T, K290T/Q793T, K290T/S1025T, T366I/V433K, V433K, V433K/S467K/S1025T, V433K/M506V/S1025T, V433K/Y790H, S463A/Q793T, K473L, Q793T, and S1025T, wherein the positions are numbered with reference to SEQ ID NO: 1160.

[0029] The present invention also provides an engineered polypeptide comprising an amino acid sequence with at least 80%, 85%, 86%, 87%, 88%, 89%, 90%, 91%, 92%, 93%, 94%, 95%, 96%, 97%, 98%, 99% sequence identity to a reference sequence of SEQ ID NO: 1266, comprising at least one substitution or one substitution set selected from: 114/230/446/853, 114/292/293/296/463/853, 132/183/366/467/661/1025/1045/1048, 132/290/366/433/467/661/793/1025, 132/290/366/467/661/793, 132/290/366/467/661/1025, 132/366/433/467/506/661/1025, 132/366/433/467/661, 132/366/433/467/661/790, 132/366/463/467/661/793, 132/366/467/473/661, 132/366/467/661/793, 366/467/468/506/661/793, 433/463/467/661/793, 463, 463/853, 689, 720, 724, 730, 769, 780, 792, 810, 817, 824, 853, 923, 926, 939, 952, 962, 968, 974, 979, 981, 995, 1006, 1015, 1017, 1022, 1027, 1031, and 1040, wherein the positions are numbered with reference to SEQ ID NO: 1266. In some embodiments, the engineered polypeptide comprises at least one substitution or one substitution set selected from 114R/230V/446S/853L, 114R/292S/293T/296Q/463V/853L, 132E/183G/366T/467S/661G/1025A/1045N/1048R, 132E/290T/366T/433K/467K/661G/793T/1025T, 132E/290T/366T/467S/661G/793T, 132E/290T/366T/467S/661G/1025T, 132E/366T/433K/467S/506V/661G/1025T, 132E/366T/433K/467S/661G, 132E/366T/433K/467S/661G/790H, 132E/366T/463A/467S/661G/793T, 132E/366T/467S/473L/661G, 132E/366T/467S/661G/793T, 366T/467K/468F/506V/661G/793T, 433K/463A/467K/661G/793T, 463V, 463V/853L, 689G, 720Q, 724W, 730W, 769T, 780I, 792I, 792V, 810S, 817G, 824G, 853L, 923R, 923V, 926R, 939D, 952G, 962R, 968L, 974V, 979Q, 981N, 995G, 1006S, 1015L, 1017A, 1017G, 1017L, 1022S, 1022W, 1027R, 1031Q, 1040D, and 1040R, wherein the positions are numbered with reference to SEQ ID NO: 1266. In some further embodiments, the engineered polypeptide comprises at least one substitution or one substitution set selected from G114R/Q230V/V446S/P853L, G114R/A292S/E293T/A296Q/S463V/P853L, G132E/D183G/I366T/G467S/D661G/S1025A/D1045N/L1048R, G132E/K290T/I366T/V433K/G467K/D661G/Q793T/S1025T, G132E/K290T/I366T/G467S/D661G/Q793T, G132E/K290T/I366T/G467S/D661G/S1025T, G132E/I366T/V433K/G467S/M506V/D661G/S1025T, G132E/I366T/V433K/G467S/D661G, G132E/I366T/V433K/G467S/D661G/Y790H, G132E/I366T/S463A/G467S/D661G/Q793T, G132E/I366T/G467S/K473L/D661G, G132E/I366T/G467S/D661G/Q793T, I366T/G467K/A468F/M506V/D661G/Q793T, V433K/S463A/G467K/D661G/Q793T, S463V, S463V/P853L, L689G, G720Q, S724W, E730W, A769T, E780I, E792I, E792V, A810S, E817G, S824G, P853L, E923R, E923V, Q926R, S939D, N952G, H962R, M968L, T974V, V979Q, E981N, A995G, M1006S, M1015L, S1017A, S1017G, S1017L, H1022S, H1022W, A1027R, L1031Q, G1040D, and G1040R, wherein the positions are numbered with reference to SEQ ID NO: 1266.

[0030] The present invention also provides an engineered polypeptide comprising an amino acid sequence with at least 80%, 85%, 86%, 87%, 88%, 89%, 90%, 91%, 92%, 93%, 94%, 95%, 96%, 97%, 98%, 99% sequence identity to a reference sequence of SEQ ID NO: 1266, comprising at least one substitution or one substitution set selected from: 458, 518/653, 519/628, 616/619, and 653, wherein the positions are numbered with reference to SEQ ID NO: 1266. In some embodiments, the engineered polypeptide comprises at least one substitution or one substitution set selected from 458A, 518G/653A, 518G/653R, 519L/628S, 616V/619G, and 653R, wherein the positions are numbered with reference to SEQ ID NO: 1266. In some further embodiments, the engineered polypeptide comprises at least one substitution or one substitution set selected from G458A, D518G/D653A, D518G/D653R, S519L/Y628S, E616V/D619G, and D653R, wherein the positions are numbered with reference to SEQ ID NO: 1266.

[0031] In an embodiment, engineered cytochrome P450-BM3 polypeptide variants comprising a polypeptide sequence that is at least 85%, 86%, 87%, 88%, 89%, 90%, 91%, 92%, 93%, 94%, 95%, 96%, 97%, 98%, 99% or more identical to the sequence of at least one engineered cytochrome P450-BM3 variant set forth in Tables 2.1, 3.1, 4.1, 5.1, 6.1, 7.1, 8.1, 9.1, 10.1, 10.2, 11.1, 11.2, 12.1, 13.1, 14.1, 14.2, 15.1, 16.1, 17.1, 18.1, 19.1 and 19.2 are provided.

[0032] In various embodiments, the engineered cytochrome P450-BM3 variant comprises at least one improved property as compared to a wild-type Bacillus megaterium cytochrome P450-BM3 or engineered P450-BM3 variant. In some aspects, the improved property comprises improved activity on a substrate. In certain aspects, the substrate comprises 1-tert-Butoxycarbonylaminocyclopentanoic acid (Compound (1)). In some aspects, the improved property comprises improved thermostability or increased activity on a substrate after preincubation at 42.5° C. In some aspects, the improved property comprises improved stereoselectivity toward one or more diastereomer products.

[0033] The present invention provides engineered cytochrome P450-BM3 variants wherein the variant is purified. The invention also provides compositions comprising at least one engineered P450-BM3 variant.

[0034] The present invention further provides isolated recombinant polynucleotide sequences encoding the recombinant cytochrome P450-BM3 polypeptide variants provided herein. In some embodiments, the isolated recombinant polynucleotide sequence comprises SEQ ID NO: 3, 35, 65, 71, 197, 225, 243, 285, 357, 409, 533, 733, 747, 827, 967, 983, 1159, or 1265, or a functional fragment thereof. In various aspects, the polynucleotide sequence is operably linked to a control sequence. In some aspects, the polynucleotide sequence is codon-optimized. In some embodiments, the polynucleotide sequence comprises a polynucleotide sequence set forth in the odd numbered sequences of SEQ ID NOS:3-1367.

[0035] The present invention also provides expression vectors comprising at least one polynucleotide sequence provided herein. In some additional embodiments, the vector comprises at least one polynucleotide sequence that is operably linked with at least one regulatory sequence suitable for expression of the polynucleotide sequence in a suitable host cell. In some embodiments, the host cell is a prokaryotic or eukaryotic cell. In some additional embodiments, the host cell is a prokaryotic cell. In some further embodiments, the host cell is E. coli. The present invention also provides host cells comprising the vectors provided herein.

[0036] The present invention also provides methods for producing at least one recombinant cytochrome P450-BM3 variant comprising culturing the host cell provided herein under conditions such that at least one of the recombinant cytochrome P450-BM3 variants provided herein is produced by the host cell. In some additional embodiments, the methods further comprise the step of recovering at least one recombinant cytochrome P450 variant. In some aspect, the methods further comprise the step of purifying the at least one engineered cytochrome P450-BM3 variant.

### DESCRIPTION OF THE INVENTION

[0037] The present invention provides improved P450-BM3 variants with improved activity. In some embodiments, the P450-BM3 variants exhibit improved activity on 1-tert-Butoxycarbonylaminocyclopentanoic acid. P450-BM3 enzymes exhibit the highest rate of catalysis amongst P450 monooxygenases due to the efficient electron transfer between the fused reductase and heme domains (See e.g., Noble et al., Biochem. J., 339:371-379 [1999]; and Munro et al., Eur. J. Biochem., 239:403-409 [2009]). Thus, P450-BM3 is a highly desirable enzyme for the manipulation of biotechnological processes (See e.g., Sawayama et al., Chem., 15:11723-11729 [2009]; Otey et al., Biotechnol. Bioeng., 93:494-499 [2006]; Damsten et al., Biol. Interact., 171:96-107 [2008]; and Di Nardo and Gilardi, Int. J. Mol. Sci., 13:15901-15924). However, there still remains a need in the art for P450 enzymes that exhibit activity on various substrates, including 1-tert-Butoxycarbonylaminocyclopentanoic acid. The present invention provides P450-BM3 variants that have improved enzymatic activity on 1-tert-Butoxycarbonylaminocyclopentanoic acid, as compared to a parental P450-BM3 sequence (i.e., SEQ ID NO: 4, 36, 66, 72, 198, 226, 244, 286, 358, 410, 534, 734, 748, 828, 968, 984, 1160, or 1266).

[0038] In some embodiments, the present invention provides P450-BM3 variants that provide improved total percent conversion/activity for the oxidation of substrates. In some embodiments, the present invention provides P450-BM3 variants that provide improved thermostability in the oxidation of substrates. In some embodiments, the present invention provides P450-BM3 variants that provide improved stereoselectivity towards various diastereomers in the oxidation of substrates. In particular, during the development of the present invention, beneficial diversity was identified and recombined based on HTP screening results.

### Abbreviations and Definitions:

[0039] Unless defined otherwise, all technical and scientific terms used herein generally have the same meaning as commonly understood by one of ordinary skill in the art to which this invention pertains. Generally, the nomenclature used herein and the laboratory procedures of cell culture, molecular genetics, microbiology, organic chemistry, analytical chemistry and nucleic acid chemistry described below are those well-known and commonly employed in the art. Such techniques are well-known and described in numerous texts and reference works well known to those of skill in the art. Standard techniques, or modifications thereof, are used for chemical syntheses and chemical analyses. All patents, patent applications, articles and publications mentioned herein, both supra and infra, are hereby expressly incorporated herein by reference.

[0040] Although any suitable methods and materials similar or equivalent to those described herein find use in the practice of the present invention, some methods and materials are described herein. It is to be understood that this invention is not limited to the particular methodology, protocols, and reagents described, as these may vary, depending upon the context they are used by those of skill in the art. Accordingly, the terms defined immediately below are more fully described by reference to the application as a whole. All patents, patent applications, articles and publications mentioned herein, both supra and infra, are hereby expressly incorporated herein by reference.

[0041] Also, as used herein, the singular “a”, “an,” and “the” include the plural references, unless the context clearly indicates otherwise.

[0042] Numeric ranges are inclusive of the numbers defining the range. Thus, every numerical range disclosed herein is intended to encompass every narrower numerical range that falls within such broader numerical range, as if such narrower numerical ranges were all expressly written herein. It is also intended that every maximum (or minimum) numerical limitation disclosed herein includes every lower (or higher) numerical limitation, as if such lower (or higher) numerical limitations were expressly written herein.

[0043] The term “about” means an acceptable error for a particular value. In some instances, “about” means within 0.05%, 0.5%, 1.0%, or 2.0%, of a given value range. In some instances, “about” means within 1, 2, 3, or 4 standard deviations of a given value.

[0044] Furthermore, the headings provided herein are not limitations of the various aspects or embodiments of the invention which can be had by reference to the application as a whole. Accordingly, the terms defined immediately below are more fully defined by reference to the application as a whole. Nonetheless, in order to facilitate understanding of the invention, a number of terms are defined below.

[0045] Unless otherwise indicated, nucleic acids are written left to right in 5′ to 3′ orientation; amino acid sequences are written left to right in amino to carboxy orientation, respectively.

[0046] As used herein, the term “comprising” and its cognates are used in their inclusive sense (i.e., equivalent to the term “including” and its corresponding cognates).

[0047] “EC” number refers to the Enzyme Nomenclature of the Nomenclature Committee of the International Union of Biochemistry and Molecular Biology (NC-IUBMB). The IUBMB biochemical classification is a numerical classification system for enzymes based on the chemical reactions they catalyze.

[0048] “ATCC” refers to the American Type Culture Collection whose biorepository collection includes genes and strains.

[0049] “NCBI” refers to National Center for Biological Information and the sequence databases provided therein.

[0050] As used herein “cytochrome P450-BM3” and “P450-BM3” refer to the cytochrome P450 enzyme obtained from Bacillus megaterium (now also known as Priestia megaterium) that catalyzes the NADPH-dependent hydroxylation of long-chain fatty acids, alcohols, and amides, as well as the epoxidation of unsaturated fatty acids

[0051] “Protein,” “polypeptide,” and “peptide” are used interchangeably herein to denote a polymer of at least two amino acids covalently linked by an amide bond, regardless of length or post-translational modification (e.g., glycosylation or phosphorylation).

[0052] “Amino acids” are referred to herein by either their commonly known three-letter symbols or by the one-letter symbols recommended by IUPAC-IUB Biochemical Nomenclature Commission. Nucleotides, likewise, may be referred to by their commonly accepted single letter codes.

[0053] The term “engineered,” “recombinant,” “non-naturally occurring,” and “variant,” when used with reference to a cell, a polynucleotide or a polypeptide refers to a material or a material corresponding to the natural or native form of the material that has been modified in a manner that would not otherwise exist in nature or is identical thereto but produced or derived from synthetic materials and/or by manipulation using recombinant techniques.

[0054] As used herein, “wild-type” and “naturally-occurring” refer to the form found in nature. For example a wild-type polypeptide or polynucleotide sequence is a sequence present in an organism that can be isolated from a source in nature and which has not been intentionally modified by human manipulation.

[0055] “Coding sequence” refers to that part of a nucleic acid (e.g., a gene) that encodes an amino acid sequence of a protein.

[0056] The term “percent (%) sequence identity” is used herein to refer to comparisons among polynucleotides and polypeptides, and are determined by comparing two optimally aligned sequences over a comparison window, wherein the portion of the polynucleotide or polypeptide sequence in the comparison window may comprise additions or deletions (i.e., gaps) as compared to the reference sequence for optimal alignment of the two sequences. The percentage may be calculated by determining the number of positions at which the identical nucleic acid base or amino acid residue occurs in both sequences to yield the number of matched positions, dividing the number of matched positions by the total number of positions in the window of comparison and multiplying the result by 100 to yield the percentage of sequence identity. Alternatively, the percentage may be calculated by determining the number of positions at which either the identical nucleic acid base or amino acid residue occurs in both sequences or a nucleic acid base or amino acid residue is aligned with a gap to yield the number of matched positions, dividing the number of matched positions by the total number of positions in the window of comparison and multiplying the result by 100 to yield the percentage of sequence identity. Those of skill in the art appreciate that there are many established algorithms available to align two sequences. Optimal alignment of sequences for comparison can be conducted, e.g., by the local homology algorithm of Smith and Waterman (Smith and Waterman, Adv. Appl. Math., 2:482 [1981]), by the homology alignment algorithm of Needleman and Wunsch (Needleman and Wunsch, J. Mol. Biol., 48:443 [1970), by the search for similarity method of Pearson and Lipman (Pearson and Lipman, Proc. Natl. Acad. Sci. USA 85:2444 [1988]), by computerized implementations of these algorithms (e.g., GAP, BESTFIT, FASTA, and TFASTA in the GCG Wisconsin Software Package), or by visual inspection, as known in the art. Examples of algorithms that are suitable for determining percent sequence identity and sequence similarity include, but are not limited to the BLAST and BLAST 2.0 algorithms, which are described by Altschul et al. (See, Altschul et al., J. Mol. Biol., 215: 403-410 [1990]; and Altschul et al., 1977, Nucl. Acids Res., 3389-3402 [1977], respectively). Software for performing BLAST analyses is publicly available through the National Center for Biotechnology Information website. This algorithm involves first identifying high scoring sequence pairs (HSPs) by identifying short words of length W in the query sequence, which either match or satisfy some positive-valued threshold score T when aligned with a word of the same length in a database sequence. T is referred to as, the neighborhood word score threshold (See, Altschul et al, supra). These initial neighborhood word hits act as seeds for initiating searches to find longer HSPs containing them. The word hits are then extended in both directions along each sequence for as far as the cumulative alignment score can be increased. Cumulative scores are calculated using, for nucleotide sequences, the parameters M (reward score for a pair of matching residues; always >0) and N (penalty score for mismatching residues; always <0). For amino acid sequences, a scoring matrix is used to calculate the cumulative score. Extension of the word hits in each direction are halted when: the cumulative alignment score falls off by the quantity X from its maximum achieved value; the cumulative score goes to zero or below, due to the accumulation of one or more negative-scoring residue alignments; or the end of either sequence is reached. The BLAST algorithm parameters W, T, and X determine the sensitivity and speed of the alignment. The BLASTN program (for nucleotide sequences) uses as defaults a wordlength (W) of 11, an expectation (E) of 10, M=5, N=−4, and a comparison of both strands. For amino acid sequences, the BLASTP program uses as defaults a wordlength (W) of 3, an expectation (E) of 10, and the BLOSUM62 scoring matrix (See, Henikoff and Henikoff, Proc. Natl. Acad. Sci. USA 89:10915 [1989]). Exemplary determination of sequence alignment and % sequence identity can employ the BESTFIT or GAP programs in the GCG Wisconsin Software package (Accelrys, Madison WI), using default parameters provided.

[0057] “Reference sequence” refers to a defined sequence used as a basis for a sequence comparison. A reference sequence may be a subset of a larger sequence, for example, a segment of a full-length gene or polypeptide sequence. Generally, a reference sequence is at least 20 nucleotide or amino acid residues in length, at least 25 residues in length, at least 50 residues in length, at least 100 residues in length or the full length of the nucleic acid or polypeptide. Since two polynucleotides or polypeptides may each (1) comprise a sequence (i.e., a portion of the complete sequence) that is similar between the two sequences, and (2) may further comprise a sequence that is divergent between the two sequences, sequence comparisons between two (or more) polynucleotides or polypeptides are typically performed by comparing sequences of the two polynucleotides or polypeptides over a “comparison window” to identify and compare local regions of sequence similarity. In some embodiments, a “reference sequence” can be based on a primary amino acid sequence, where the reference sequence is a sequence that can have one or more changes in the primary sequence. “Comparison window” refers to a conceptual segment of at least about 20 contiguous nucleotide positions or amino acid residues wherein a sequence may be compared to a reference sequence of at least 20 contiguous nucleotides or amino acids and wherein the portion of the sequence in the comparison window may comprise additions or deletions (i.e., gaps) of 20 percent or less as compared to the reference sequence (which does not comprise additions or deletions) for optimal alignment of the two sequences. The comparison window can be longer than 20 contiguous residues, and includes, optionally 30, 40, 50, 100, or longer windows.

[0058] “Corresponding to”, “reference to” or “relative to” when used in the context of the numbering of a given amino acid or polynucleotide sequence refers to the numbering of the residues of a specified reference sequence when the given amino acid or polynucleotide sequence is compared to the reference sequence. In other words, the residue number or residue position of a given polymer is designated with respect to the reference sequence rather than by the actual numerical position of the residue within the given amino acid or polynucleotide sequence. For example, a given amino acid sequence, such as that of an engineered P450-BM3, can be aligned to a reference sequence by introducing gaps to optimize residue matches between the two sequences. In these cases, although the gaps are present, the numbering of the residue in the given amino acid or polynucleotide sequence is made with respect to the reference sequence to which it has been aligned.

[0059] “Amino acid difference” or “residue difference” refers to a difference in the amino acid residue at a position of a polypeptide sequence relative to the amino acid residue at a corresponding position in a reference sequence. The positions of amino acid differences generally are referred to herein as “Xn,” where n refers to the corresponding position in the reference sequence upon which the residue difference is based. For example, a “residue difference at position X93 as compared to SEQ ID NO:2” refers to a difference of the amino acid residue at the polypeptide position corresponding to position 93 of SEQ ID NO:2. Thus, if the reference polypeptide of SEQ ID NO:2 has a serine at position 93, then a “residue difference at position X93 as compared to SEQ ID NO:2” an amino acid substitution of any residue other than serine at the position of the polypeptide corresponding to position 93 of SEQ ID NO:2. In most instances herein, the specific amino acid residue difference at a position is indicated as “XnY” where “Xn” specified the corresponding position as described above, and “Y” is the single letter identifier of the amino acid found in the engineered polypeptide (i.e., the different residue than in the reference polypeptide). In some instances (e.g., in Tables 2.1, 3.1, 4.1, 5.1, 6.1, 7.1, 8.1, 9.1, 10.1, 10.2, 11.1, 11.2, 12.1, 13.1, 14.1, 14.2, 15.1, 16.1, 17.1, 17.2, 18.1, 19.1, and 19.2), the present disclosure also provides specific amino acid differences denoted by the conventional notation “AnB”, where A is the single letter identifier of the residue in the reference sequence, “n” is the number of the residue position in the reference sequence, and B is the single letter identifier of the residue substitution in the sequence of the engineered polypeptide. In some instances, a polypeptide of the present disclosure can include one or more amino acid residue differences relative to a reference sequence, which is indicated by a list of the specified positions where residue differences are present relative to the reference sequence. In some embodiments, where more than one amino acid can be used in a specific residue position of a polypeptide, the various amino acid residues that can be used are separated by a “/” (e.g., X307H/X307P or X307H/P). The present application includes engineered polypeptide sequences comprising one or more amino acid differences that include either/or both conservative and non-conservative amino acid substitutions.

[0060] “Conservative amino acid substitution” refers to a substitution of a residue with a different residue having a similar side chain, and thus typically involves substitution of the amino acid in the polypeptide with amino acids within the same or similar defined class of amino acids. By way of example and not limitation, an amino acid with an aliphatic side chain may be substituted with another aliphatic amino acid (e.g., alanine, valine, leucine, and isoleucine); an amino acid with hydroxyl side chain is substituted with another amino acid with a hydroxyl side chain (e.g., serine and threonine); an amino acid having an aromatic side chain is substituted with another amino acid having an aromatic side chain (e.g., phenylalanine, tyrosine, tryptophan, and histidine); an amino acid with a basic side chain is substituted with another amino acid with a basic side chain (e.g., lysine and arginine); an amino acid with an acidic side chain is substituted with another amino acid with an acidic side chain (e.g., aspartic acid or glutamic acid); and/or a hydrophobic or hydrophilic amino acid is replaced with another hydrophobic or hydrophilic amino acid, respectively.

[0061] “Non-conservative substitution” refers to substitution of an amino acid in the polypeptide with an amino acid with significantly differing side chain properties. Non-conservative substitutions may use amino acids between, rather than within, the defined groups and affects (a) the structure of the peptide backbone in the area of the substitution (e.g., proline for glycine) (b) the charge or hydrophobicity, or (c) the bulk of the side chain. By way of example and not limitation, an exemplary non-conservative substitution can be an acidic amino acid substituted with a basic or aliphatic amino acid; an aromatic amino acid substituted with a small amino acid; and a hydrophilic amino acid substituted with a hydrophobic amino acid.

[0062] “Deletion” refers to modification to the polypeptide by removal of one or more amino acids from the reference polypeptide. Deletions can comprise removal of 1 or more amino acids, 2 or more amino acids, 5 or more amino acids, 10 or more amino acids, 15 or more amino acids, or 20 or more amino acids, up to 10% of the total number of amino acids, or up to 20% of the total number of amino acids making up the reference enzyme while retaining enzymatic activity and/or retaining the improved properties of an engineered P450-BM3 enzyme. Deletions can be directed to the internal portions and/or terminal portions of the polypeptide. In various embodiments, the deletion can comprise a continuous segment or can be discontinuous.

[0063] “Insertion” refers to modification to the polypeptide by addition of one or more amino acids from the reference polypeptide. Insertions can be in the internal portions of the polypeptide, or to the carboxy or amino terminus. Insertions as used herein include fusion proteins as is known in the art. The insertion can be a contiguous segment of amino acids or separated by one or more of the amino acids in the naturally occurring polypeptide.

[0064] A “functional fragment” or a “biologically active fragment” used interchangeably herein refers to a polypeptide that has an amino-terminal and/or carboxy-terminal deletion(s) and/or internal deletions, but where the remaining amino acid sequence is identical to the corresponding positions in the sequence to which it is being compared (e.g., a full-length engineered P450-BM3 of the present invention) and that retains substantially all of the activity of the full-length polypeptide.

[0065] “Isolated polypeptide” refers to a polypeptide which is substantially separated from other contaminants that naturally accompany it, e.g., protein, lipids, and polynucleotides. The term embraces polypeptides which have been removed or purified from their naturally-occurring environment or expression system (e.g., host cell or in vitro synthesis). The recombinant P450-BM3 polypeptides may be present within a cell, present in the cellular medium, or prepared in various forms, such as lysates or isolated preparations. As such, in some embodiments, the recombinant P450-BM3 polypeptides can be an isolated polypeptide.

[0066] “Substantially pure polypeptide” refers to a composition in which the polypeptide species is the predominant species present (i.e., on a molar or weight basis it is more abundant than any other individual macromolecular species in the composition), and is generally a substantially purified composition when the object species comprises at least about 50 percent of the macromolecular species present by mole or % weight. However, in some embodiments, the composition comprising P450-BM3 comprises P450-BM3 that this less than 50% pure (e.g., about 10%, about 20%, about 30%, about 40%, or about 50%) Generally, a substantially pure P450-BM3 composition comprises about 60% or more, about 70% or more, about 80% or more, about 90% or more, about 95% or more, and about 98% or more of all macromolecular species by mole or % weight present in the composition. In some embodiments, the object species is purified to essential homogeneity (i.e., contaminant species cannot be detected in the composition by conventional detection methods) wherein the composition consists essentially of a single macromolecular species. Solvent species, small molecules (<500 Daltons), and elemental ion species are not considered macromolecular species. In some embodiments, the isolated recombinant P450-BM3 polypeptides are substantially pure polypeptide compositions.

[0067] “Improved enzyme property” refers to an engineered P450-BM3 polypeptide that exhibits an improvement in any enzyme property as compared to a reference P450-BM3 polypeptide and/or a wild-type P450-BM3 polypeptide or another engineered P450-BM3 polypeptide. Improved properties include but are not limited to such properties as increased protein expression, increased thermoactivity, increased thermostability, increased pH activity, increased stability, increased enzymatic activity, increased substrate specificity or affinity, increased specific activity, increased resistance to substrate or end-product inhibition, increased chemical stability, improved stereoselectivity, improved chemoselectivity, improved solvent stability, increased tolerance to acidic pH, increased tolerance to proteolytic activity (i.e., reduced sensitivity to proteolysis), reduced aggregation, increased solubility, and altered temperature profile.

[0068] “Increased enzymatic activity” or “enhanced catalytic activity” refers to an improved property of the engineered P450-BM3 polypeptides, which can be represented by an increase in specific activity (e.g., product produced/time/weight protein) or an increase in percent conversion of the substrate to the product (e.g., percent conversion of starting amount of substrate to product in a specified time period using a specified amount of P450-BM3) as compared to the reference P450-BM3 enzyme. Exemplary methods to determine enzyme activity are provided in the Examples. Any property relating to enzyme activity may be affected, including the classical enzyme properties of Kₘ, Vₘₐₓ or k_{cat}, changes of which can lead to increased enzymatic activity. Improvements in enzyme activity can be from about 1.1 fold the enzymatic activity of the corresponding wild-type enzyme, to as much as 2-fold, 5-fold, 10-fold, 20-fold, 25-fold, 50-fold, 75-fold, 100-fold, 150-fold, 200-fold or more enzymatic activity than the naturally occurring P450-BM3 or another engineered P450-BM3 from which the P450-BM3 polypeptides were derived.

[0069] “Conversion” refers to the enzymatic conversion (or biotransformation) of a substrate(s) to the corresponding product(s). “Percent conversion” refers to the percent of the substrate that is converted to the product within a period of time under specified conditions. Thus, the “enzymatic activity” or “activity” of a P450-BM3 polypeptide can be expressed as “percent conversion” of the substrate to the product in a specific period of time.

[0070] Enzymes with “generalist properties” (or “generalist enzymes”) refer to enzymes that exhibit improved activity for a wide range of substrates, as compared to a parental sequence. Generalist enzymes do not necessarily demonstrate improved activity for every possible substrate. In particular, the present invention provides P450-BM3 variants with generalist properties, in that they demonstrate similar or improved activity relative to the parental gene for a wide range of sterically and electronically diverse substrates. In addition, the generalist enzymes provided herein were engineered to be improved across a wide range of diverse API-like molecules to increase the production of metabolites/products.

[0071] “Hybridization stringency” relates to hybridization conditions, such as washing conditions, in the hybridization of nucleic acids. Generally, hybridization reactions are performed under conditions of lower stringency, followed by washes of varying but higher stringency. The term “moderately stringent hybridization” refers to conditions that permit target-DNA to bind a complementary nucleic acid that has about 60% identity, preferably about 75% identity, about 85% identity to the target DNA, with greater than about 90% identity to target-polynucleotide. Exemplary moderately stringent conditions are conditions equivalent to hybridization in 50% formamide, 5×Denhart's solution, 5×SSPE, 0.2% SDS at 42° C., followed by washing in 0.2×SSPE, 0.2% SDS, at 42° C. “High stringency hybridization” refers generally to conditions that are about 10° C. or less from the thermal melting temperature T, as determined under the solution condition for a defined polynucleotide sequence. In some embodiments, a high stringency condition refers to conditions that permit hybridization of only those nucleic acid sequences that form stable hybrids in 0.018M NaCl at 65° C. (i.e., if a hybrid is not stable in 0.018M NaCl at 65° C., it will not be stable under high stringency conditions, as contemplated herein). High stringency conditions can be provided, for example, by hybridization in conditions equivalent to 50% formamide, 5×Denhart's solution, 5×SSPE, 0.2% SDS at 42° C., followed by washing in 0.1×SSPE, and 0.1% SDS at 65° C. Another high stringency condition is hybridizing in conditions equivalent to hybridizing in 5×SSC containing 0.1% (w:v) SDS at 65° C. and washing in 0.1×SSC containing 0.1% SDS at 65° C. Other high stringency hybridization conditions, as well as moderately stringent conditions, are described in the references cited above.

[0072] “Codon optimized” refers to changes in the codons of the polynucleotide encoding a protein to those preferentially used in a particular organism such that the encoded protein is more efficiently expressed in the organism of interest. Although the genetic code is degenerate in that most amino acids are represented by several codons, called “synonyms” or “synonymous” codons, it is well known that codon usage by particular organisms is nonrandom and biased towards particular codon triplets. This codon usage bias may be higher in reference to a given gene, genes of common function or ancestral origin, highly expressed proteins versus low copy number proteins, and the aggregate protein coding regions of an organism's genome. In some embodiments, the polynucleotides encoding the P450-BM3 enzymes may be codon optimized for optimal production from the host organism selected for expression.

[0073] “Control sequence” refers herein to include all components, which are necessary or advantageous for the expression of a polynucleotide and/or polypeptide of the present application. Each control sequence may be native or foreign to the nucleic acid sequence encoding the polypeptide. Such control sequences include, but are not limited to, a leader, polyadenylation sequence, propeptide sequence, promoter sequence, signal peptide sequence, initiation sequence and transcription terminator. At a minimum, the control sequences include a promoter, and transcriptional and translational stop signals. The control sequences may be provided with linkers for the purpose of introducing specific restriction sites facilitating ligation of the control sequences with the coding region of the nucleic acid sequence encoding a polypeptide.

[0074] “Operably linked” is defined herein as a configuration in which a control sequence is appropriately placed (i.e., in a functional relationship) at a position relative to a polynucleotide of interest such that the control sequence directs or regulates the expression of the polynucleotide and/or polypeptide of interest.

[0075] “Promoter sequence” refers to a nucleic acid sequence that is recognized by a host cell for expression of a polynucleotide of interest, such as a coding sequence. The promoter sequence contains transcriptional control sequences, which mediate the expression of a polynucleotide of interest. The promoter may be any nucleic acid sequence which shows transcriptional activity in the host cell of choice including mutant, truncated, and hybrid promoters, and may be obtained from genes encoding extracellular or intracellular polypeptides either homologous or heterologous to the host cell.

[0076] “Suitable reaction conditions” refers to those conditions in the enzymatic conversion reaction solution (e.g., ranges of enzyme loading, substrate loading, temperature, pH, buffers, co-solvents, etc.) under which a P450-BM3 polypeptide of the present application is capable of converting a substrate to the desired product compound, Exemplary “suitable reaction conditions” are provided in the present application and illustrated by the Examples. “Loading”, such as in “compound loading” or “enzyme loading” refers to the concentration or amount of a component in a reaction mixture at the start of the reaction. “Substrate” in the context of an enzymatic conversion reaction process refers to the compound or molecule acted on by the P450-BM3 polypeptide. “Product” in the context of an enzymatic conversion process refers to the compound or molecule resulting from the action of the P450-BM3 polypeptide on a substrate.

[0077] As used herein the term “culturing” refers to the growing of a population of microbial cells under any suitable conditions (e.g., using a liquid, gel or solid medium).

[0078] Recombinant polypeptides can be produced using any suitable methods known in the art. Genes encoding the wild-type polypeptide of interest can be cloned in vectors, such as plasmids, and expressed in desired hosts, such as E. coli, etc. Variants of recombinant polypeptides can be generated by various methods known in the art. Indeed, there are a wide variety of different mutagenesis techniques well known to those skilled in the art. In addition, mutagenesis kits are also available from many commercial molecular biology suppliers. Methods are available to make specific substitutions at defined amino acids (site-directed), specific or random mutations in a localized region of the gene (regio-specific), or random mutagenesis over the entire gene (e.g., saturation mutagenesis). Numerous suitable methods are known to those in the art to generate enzyme variants, including but not limited to site-directed mutagenesis of single-stranded DNA or double-stranded DNA using PCR, cassette mutagenesis, gene synthesis, error-prone PCR, shuffling, and chemical saturation mutagenesis, or any other suitable method known in the art. Non-limiting examples of methods used for DNA and protein engineering are provided in the following patents: U.S. Pat. Nos. 6,117,679; 6,420,175; 6,376,246; 6,586,182; 7,747,391; 7,747,393; 7,783,428; and 8,383,346. After the variants are produced, they can be screened for any desired property (e.g., high or increased activity, or low or reduced activity, increased thermal activity, increased thermal stability, and/or acidic pH stability, etc.). In some embodiments, “recombinant P450-BM3 polypeptides” (also referred to herein as “engineered P450-BM3 polypeptides,” “variant P450-BM3 enzymes,” and “P450-BM3 variants”) find use.

[0079] As used herein, a “vector” is a DNA construct for introducing a DNA sequence into a cell. In some embodiments, the vector is an expression vector that is operably linked to a suitable control sequence capable of effecting the expression in a suitable host of the polypeptide encoded in the DNA sequence. In some embodiments, an “expression vector” has a promoter sequence operably linked to the DNA sequence (e.g., transgene) to drive expression in a host cell, and in some embodiments, also comprises a transcription terminator sequence.

[0080] As used herein, the term “expression” includes any step involved in the production of the polypeptide including, but not limited to, transcription, post-transcriptional modification, translation, and post-translational modification. In some embodiments, the term also encompasses secretion of the polypeptide from a cell.

[0081] As used herein, the term “produces” refers to the production of proteins and/or other compounds by cells. It is intended that the term encompass any step involved in the production of polypeptides including, but not limited to, transcription, post-transcriptional modification, translation, and post-translational modification. In some embodiments, the term also encompasses secretion of the polypeptide from a cell.

[0082] As used herein, an amino acid or nucleotide sequence (e.g., a promoter sequence, signal peptide, terminator sequence, etc.) is “heterologous” to another sequence with which it is operably linked if the two sequences are not associated in nature.

[0083] As used herein, the terms “host cell” and “host strain” refer to suitable hosts for expression vectors comprising DNA provided herein (e.g., the polynucleotides encoding the P450-BM3 variants). In some embodiments, the host cells are prokaryotic or eukaryotic cells that have been transformed or transfected with vectors constructed using recombinant DNA techniques as known in the art.

[0084] The term “analogue” means a polypeptide having more than 70% sequence identity but less than 100% sequence identity (e.g., more than 75%, 78%, 80%, 83%, 85%, 88%, 90%, 91%, 92%, 93%, 94%, 95%, 96%, 97%, 98%, 99% sequence identity) with a reference polypeptide. In some embodiments, analogues mean polypeptides that contain one or more non-naturally occurring amino acid residues including, but not limited, to homoarginine, ornithine and norvaline, as well as naturally occurring amino acids. In some embodiments, analogues also include one or more D-amino acid residues and non-peptide linkages between two or more amino acid residues.

[0085] The term “effective amount” means an amount sufficient to produce the desired result. One of general skill in the art may determine what the effective amount by using routine experimentation.

[0086] The terms “isolated” and “purified” are used to refer to a molecule (e.g., an isolated nucleic acid, polypeptide, etc.) or other component that is removed from at least one other component with which it is naturally associated. The term “purified” does not require absolute purity, rather it is intended as a relative definition.

### Engineered P450-BM3 Polypeptides:

[0087] The present invention provides improved P450-BM3 variants with improved activity on 1-tert-Butoxycarbonylaminocyclopentanoic acid.

[0088] In some embodiments, the present disclosure provides P450-BM3 variants with improved monooxygenase activity towards 1-tert-Butoxycarbonylaminocyclopentanoic acid (Compound (1)) and increased conversion to the product of 1-(tert-Butoxycarbonylamino)-3-hydroxycyclopentanoic acid (Compound (2)) and/or 1-(tert-Butoxycarbonylamino)-3-oxocyclopentanoic acid (Compound (3)), as compared to the starting polypeptide, as depicted in Scheme 1.

[chemical structure]

[0089] In some embodiments, the monooxygenase (also referred to as oxidase) reaction uses NADPH as a cofactor, which is recycled from NADP+ by a glucose dehydrogenase (GDH-105, Codexis, Inc.) as depicted above, in Scheme 1. However, the use of the GDH recycling system can cause a downward shift in reaction pH. In some embodiments, a phosphite dehydrogenase (PDH-102, Codexis, Inc.) is used for cofactor recycling, as depicted, below, in Scheme 2.

[chemical structure]

[0090] The P450-BM3 variants of the present disclosure produce the four diastereoisomers of Compound (2) depicted below in Scheme 3. Additionally, hydroxylation has also been observed at position 4, yielding additional diastereomers represented as Compound (4), below in Scheme 3.

[chemical structure]

[0091] In some embodiments, the engineered P450-BM3 polypeptides of the present disclosure are regioselective for hydroxylation at the 2 position as compared to a reference P450-BM3 polypeptide. In some embodiments, the engineered P450-BM3 polypeptides of the present disclosure are stereoselective for the (1R,3S)-2 and/or (1R,3R)-2 diastereoisomers as compared to a reference P450-BM3 polypeptide.

[0092] In some embodiments, the engineered P450-BM3 polypeptides of the present disclosure may produce ketone products from the substrate of Compound (1), as depicted below, in Scheme 4.

[chemical structure]

[0093] In some embodiments, the engineered P450-BM3 polypeptides of the present disclosure are regioselective for oxidation to a ketone at the 3 position as compared to a reference P450-BM3 polypeptide.

[0094] The present invention provides exemplary engineered P450-BM3 polypeptides having P450-BM3 activity (i.e., P450-BM3 variants). The Examples provide Tables showing sequence structural information correlating specific amino acid sequence features with the functional activity of the engineered P450-BM3 polypeptides. This structure-function correlation information is provided in the form of specific amino acid residues differences relative to a reference engineered polypeptide, as indicated in the Examples. The Examples further provide experimentally determined activity data for the exemplary engineered P450-BM3 polypeptides.

[0095] In some embodiments, the engineered P450-BM3 polypeptides of the invention having P450-BM3 activity comprise: a) an amino acid sequence having at least 80% sequence identity to reference sequence SEQ ID NO: 4, 36, 66, 72, 198, 226, 244, 286, 358, 410, 534, 734, 748, 828, 968, 984, 1160, or 1266; b) an amino acid residue difference as compared to SEQ ID NO: 4, 36, 66, 72, 198, 226, 244, 286, 358, 410, 534, 734, 748, 828, 968, 984, 1160, or 1266 at one or more amino acid positions; and c) which exhibits an improved property selected from i) enhanced catalytic activity, ii) increased thermostability, iii) increased tolerance to acidic pH, iv) reduced aggregation, v) increased activity on 1-tert-Butoxycarbonylaminocyclopentanoic acid substrates, vi) increased solubility, vii) increased regioselectivity, or viii) increased selectivity toward the desired chiral product or a combination of any of i), ii), iii), iv), v), vi), vii), or viii), as compared to the reference sequence.

[0096] In some embodiments the engineered P450-BM3 which exhibits an improved property has at least about 85%, at least about 88%, at least about 90%, at least about 91%, at least about 92%, at least about 93%, at least about 94%, at least about 95%, at least about 96%, at least about 97%, at least about 98%, at least about 99%, or at about 100% amino acid sequence identity with SEQ ID NO: 4, 36, 66, 72, 198, 226, 244, 286, 358, 410, 534, 734, 748, 828, 968, 984, 1160, or 1266, and an amino acid residue difference as compared to SEQ ID NO: 4, 36, 66, 72, 198, 226, 244, 286, 358, 410, 534, 734, 748, 828, 968, 984, 1160, or 1266, at one or more amino acid positions (such as at 1, 2, 3, 4, 5, 6, 7, 8, 9, 10, 11, 12, 14, 15, 20 or more amino acid positions compared to SEQ ID NO: 4, 36, 66, 72, 198, 226, 244, 286, 358, 410, 534, 734, 748, 828, 968, 984, 1160, or 1266, or a sequence having at least 85%, at least 88%, at least 90%, at least 91%, at least 92%, at least 93%, at least 94%, at least 95%, at least 96%, at least 97%, at least 98%, at least 99% or greater amino acid sequence identity with SEQ ID NO: 4, 36, 66, 72, 198, 226, 244, 286, 358, 410, 534, 734, 748, 828, 968, 984, 1160, or 1266). In some embodiments, the residue difference as compared to SEQ ID NO: 4, 36, 66, 72, 198, 226, 244, 286, 358, 410, 534, 734, 748, 828, 968, 984, 1160, or 1266, at one or more positions will include at least 1, 2, 3, 4, 5, 6, 7, 8, 9, 10 or more conservative amino acid substitutions. In some embodiments, the engineered P450-BM3 polypeptide is a polypeptide listed in any of Tables 2.1, 3.1, 4.1, 5.1, 6.1, 7.1, 8.1, 9.1, 10.1, 10.2, 11.1, 11.2, 12.1, 13.1, 14.1, 14.2, 15.1, 16.1, 17.1, 17.2, 18.1, 19.1, and 19.2.

[0097] In some embodiments the engineered P450-BM3 which exhibits an improved property has at least 85%, at least 88%, at least 90%, at least 91%, at least 92%, at least 93%, at least 94%, at least 95%, at least 96%, at least 97%, at least 98%, or at least 99% amino acid sequence identity with SEQ ID NO: 4, 36, 66, 72, 198, 226, 244, 286, 358, 410, 534, 734, 748, 828, 968, 984, 1160, or 1266.

[0098] In some embodiments, the engineered P450-BM3 polypeptides of the present disclosure comprise an amino acid sequence having at least 85%, 90%, 95%, or 99% sequence identity to a reference sequence of SEQ ID NO: 4, 36, 66, 72, 198, 226, 244, 286, 358, 410, 534, 734, 748, 828, 968, 984, 1160, or 1266 and an amino acid residue difference as compared to SEQ ID NO: 4, 36, 66, 72, 198, 226, 244, 286, 358, 410, 534, 734, 748, 828, 968, 984, 1160, or 1266 at one or more amino acid positions, wherein said engineered P450-BM3 polypeptide converts 1-tert-Butoxycarbonylaminocyclopentanoic acid (Compound (1)) to the product of 1-(tert-Butoxycarbonylamino)-3-hydroxycyclopentanoic acid (Compound (2)) and/or 1-(tert-Butoxycarbonylamino)-3-oxocyclopentanoic acid (Compound (3)), as compared to the starting polypeptide with at least 1.5 fold, 2.0 fold, 5.0 fold, 10.0 fold, 50.0 fold, 100.0 fold, 200.0 fold, 300.0 fold, 400.0 fold or 500.0 fold the activity of a reference engineered P450-BM3 polypeptide of SEQ ID NO: 4, 36, 66, 72, 198, 226, 244, 286, 358, 410, 534, 734, 748, 828, 968, 984, 1160, or 1266.

[0099] In some embodiments, the engineered P450-BM3 polypeptides of the present disclosure comprise an amino acid sequence having at least 85%, 90%, 95%, or 99% sequence identity to a reference sequence of SEQ ID NO: 4, 36, 66, 72, 198, 226, 244, 286, 358, 410, 534, 734, 748, 828, 968, 984, 1160, or 1266 and an amino acid residue difference as compared to SEQ ID NO: 4, 36, 66, 72, 198, 226, 244, 286, 358, 410, 534, 734, 748, 828, 968, 984, 1160, or 1266 at one or more amino acid positions, wherein said engineered P450-BM3 polypeptide converts 1-tert-Butoxycarbonylaminocyclopentanoic acid (Compound (1)) to the product of 1-(tert-Butoxycarbonylamino)-3-hydroxycyclopentanoic acid (Compound (2)) and/or 1-(tert-Butoxycarbonylamino)-3-oxocyclopentanoic acid (Compound (3)) with increased thermostability or increased activity after preincubation at an increased temperature (such as 42.5° C.) as compared to a reference engineered P450-BM3 polypeptide of SEQ ID NO: 4, 36, 66, 72, 198, 226, 244, 286, 358, 410, 534, 734, 748, 828, 968, 984, 1160, or 1266.

[0100] In some embodiments, the engineered P450-BM3 polypeptides of the present disclosure comprise an amino acid sequence having at least 85%, 90%, 95%, or 99% sequence identity to a reference sequence of SEQ ID NO: 4, 36, 66, 72, 198, 226, 244, 286, 358, 410, 534, 734, 748, 828, 968, 984, 1160, or 1266 and an amino acid residue difference as compared to SEQ ID NO: 4, 36, 66, 72, 198, 226, 244, 286, 358, 410, 534, 734, 748, 828, 968, 984, 1160, or 1266 at one or more amino acid positions, wherein said engineered P450-BM3 polypeptide converts 1-tert-Butoxycarbonylaminocyclopentanoic acid (Compound (1)) to the product of 1-(tert-Butoxycarbonylamino)-3-hydroxycyclopentanoic acid (Compound (2)) and/or 1-(tert-Butoxycarbonylamino)-3-oxocyclopentanoic acid (Compound (3)) with at least 5%, 20%, 30%, 50%, 75%, 80%, or 90% enantiomeric excess for Compound (2) or Compound (3), as compared to a reference engineered P450-BM3 polypeptide of SEQ ID NO: 4, 36, 66, 72, 198, 226, 244, 286, 358, 410, 534, 734, 748, 828, 968, 984, 1160, or 1266.

[0101] In some embodiments, the engineered P450-BM3 polypeptide comprises a functional fragment of an engineered P450-BM3 polypeptide encompassed by the invention. Functional fragments have at least 95%, 96%, 97%, 98%, or 99% of the activity of the engineered P450-BM3 polypeptide from which is derived (i.e., the parent engineered P450-BM3). A functional fragment comprises at least 90%, 91%, 92%, 93%, 94%, 95%, 96%, 97%, 98% and even 99% of the parent sequence of the engineered P450-BM3. In some embodiments the functional fragment is truncated by less than 5, less than 10, less than 15, less than 10, less than 25, less than 30, less than 35, less than 40, less than 45, and less than 50 amino acids.

### Methods of Using the Engineered P450-BM3 Polypeptides Enzymes:

[0102] In some embodiments, the engineered P450-BM3 polypeptides of the invention having P450-BM3 activity comprise: a) an amino acid sequence having at least 85% sequence identity to reference sequence SEQ ID NO: 4, 36, 66, 72, 198, 226, 244, 286, 358, 410, 534, 734, 748, 828, 968, 984, 1160, or 1266, or a fragment thereof; b) an amino acid residue difference as compared to SEQ ID NO: 4, 36, 66, 72, 198, 226, 244, 286, 358, 410, 534, 734, 748, 828, 968, 984, 1160, or 1266, at one or more amino acid positions; and c) which exhibits improved activity, as compared to SEQ ID NO: 4, 36, 66, 72, 198, 226, 244, 286, 358, 410, 534, 734, 748, 828, 968, 984, 1160, or 1266.

[0103] In some embodiments, the engineered P450-BM3 that exhibits improved activity has at least 85%, at least 88%, at least 90%, at least 91%, at least 92%, at least 93%, at least 94%, at least 95%, at least 96%, at least 97%, at least 98%, at least 99% or greater amino acid sequence identity with SEQ ID NO: 4, 36, 66, 72, 198, 226, 244, 286, 358, 410, 534, 734, 748, 828, 968, 984, 1160, or 1266, and an amino acid residue difference as compared to SEQ ID NO: 4, 36, 66, 72, 198, 226, 244, 286, 358, 410, 534, 734, 748, 828, 968, 984, 1160, or 1266, at one or more amino acid positions (such as at 1, 2, 3, 4, 5, 6, 7, 8, 9, 10, 11, 12, 14, 15, 20 or more amino acid positions compared to SEQ ID NO: 4, 36, 66, 72, 198, 226, 244, 286, 358, 410, 534, 734, 748, 828, 968, 984, 1160, or 1266, or a sequence having at least 85%, at least 88%, at least 90%, at least 91%, at least 92%, at least 93%, at least 94%, at least 95%, at least 96%, at least 97%, at least 98%, at least 99% or greater amino acid sequence identity with SEQ ID NO: 4, 36, 66, 72, 198, 226, 244, 286, 358, 410, 534, 734, 748, 828, 968, 984, 1160, or 1266.

[0104] In some embodiments, when all other assay conditions are essentially the same, the engineered P450-BM3 polypeptide has improved activity as compared to a reference P450-BM3 polypeptide. In some embodiments this activity can be measured under conditions that monitor enzymatic activity using any suitable assay system to assess the maximum activity of the enzyme (e.g., the k_{cat}). In other embodiments this activity can be measured under substrate concentrations resulting in one-half, one-fifth, one-tenth or less of maximal activity. Under either method of analysis, the engineered polypeptide has improved activity levels about 1.0 fold, 1.5-fold, 2-fold, 5-fold, 10-fold, 20-fold, 25-fold, 50-fold, 75-fold, 100-fold, or more of the enzymatic activity of the reference P450-BM3 In some embodiments, the engineered P450-BM3 polypeptide having improved activity as compared to a reference P450-BM3 when measured by any standard assay, including, but not limited to the assays described in the Examples.

[0105] In some embodiments, the engineered P450-BM3 polypeptides described herein find use in processes for converting 1-tert-Butoxycarbonylaminocyclopentanoic acid (Compound (1)) to the product of 1-(tert-Butoxycarbonylamino)-3-hydroxycyclopentanoic acid (Compound (2)) and/or 1-(tert-Butoxycarbonylamino)-3-oxocyclopentanoic acid (Compound (3)). Generally, the process for performing the monooxygenation reaction comprises contacting or incubating the substrate compound in presence of a co-substrate, such as NADP+, with an engineered P450-BM3 polypeptide of the invention under reaction conditions suitable for formation of the hydroxylated product, as shown in Scheme 1 and Scheme 2, above.

[0106] In the embodiments provided herein and illustrated in the Examples, various ranges of suitable reaction conditions that can be used in the processes, include but are not limited to, substrate loading, reductant, recycling system, pH, temperature, buffer, solvent system, polypeptide loading, and reaction time. Further suitable reaction conditions for carrying out the process for biocatalytic conversion of substrate compounds to product compounds using an engineered P450-BM3 polypeptide described herein can be readily optimized in view of the guidance provided herein by routine experimentation that includes, but is not limited to, contacting the engineered P450-BM3 polypeptide and substrate compound under experimental reaction conditions of concentration, pH, temperature, and solvent conditions, and detecting the product compound.

[0107] Suitable reaction conditions using the engineered P450-BM3 polypeptides typically comprise a NADP+co-substrate, which is used stoichiometrically in the monooxygenation reaction. Generally, the co-substrate for engineered P450-BM3 polypeptide is NADP+. Other reductants that are capable of serving as co-substrates for engineered P450-BM3 polypeptides can be used. In some embodiments, the suitable reaction conditions can comprise a co-substrate concentration, particularly NADP+ of about 0.0005 M to about 2 M, 0.01 M to about 2 M, 0.1 M to about 2 M, 0.2 M to about 2 M, about 0.5 M to about 2 M, or about 1 M to about 2 M. In some embodiments, the reaction conditions comprise a co-substrate concentration of about 0.0001 M, 0.001 M, 0.01 M, 0.1 M, 0.2 M, 0.3 M, 0.4 M, 0.5 M, 0.6 M, 0.7 M, 0.8 M, 1 M, 1.5 M, or 2 M, depending on desired conversion. In some embodiments, additional co-substrate can be added during the reaction. In some embodiments, an NADP+ recycling system can be used in the reaction.

[0108] Substrate compound in the reaction mixtures can be varied, taking into consideration, for example, the desired amount of product compound, the effect of substrate concentration on enzyme activity, stability of enzyme under reaction conditions, and the percent conversion of substrate to product. In some embodiments, the suitable reaction conditions comprise a substrate compound loading of at least about 0.5 to about 200 g/L, 1 to about 200 g/L, 5 to about 150 g/L, about 10 to about 100 g/L, 20 to about 100 g/L or about 50 to about 100 g/L. In some embodiments, the suitable reaction conditions comprise a substrate compound loading of at least about 0.5 g/L, at least about 1 g/L, at least about 5 g/L, at least about 10 g/L, at least about 15 g/L, at least about 20 g/L, at least about 30 g/L, at least about 50 g/L, at least about 75 g/L, at least about 100 g/L, at least about 150 g/L or at least about 200 g/L, or even greater.

[0109] In carrying out the engineered P450-BM3 mediated processes described herein, the engineered polypeptide may be added to the reaction mixture in the form of a purified enzyme, partially purified enzyme, whole cells transformed with gene(s) encoding the enzyme, as cell extracts and/or lysates of such cells, and/or as an enzyme immobilized on a solid support. Whole cells transformed with gene(s) encoding the engineered P450-BM3 enzyme or cell extracts, lysates thereof, and isolated enzymes may be employed in a variety of different forms, including solid (e.g., lyophilized, spray-dried, and the like) or semisolid (e.g., a crude paste). The cell extracts or cell lysates may be partially purified by precipitation (ammonium sulfate, polyethyleneimine, heat treatment or the like, followed by a desalting procedure prior to lyophilization (e.g., ultrafiltration, dialysis, etc.). Any of the enzyme preparations (including whole cell preparations) may be stabilized by crosslinking using known crosslinking agents, such as, for example, glutaraldehyde or immobilization to a solid phase (e.g., Eupergit C, and the like).

[0110] The gene(s) encoding the engineered P450-BM3 polypeptides can be transformed into host cells separately or together into the same host cell. For example, in some embodiments one set of host cells can be transformed with gene(s) encoding one engineered P450-BM3 polypeptide and another set can be transformed with gene(s) encoding another engineered P450-BM3 polypeptide. Both sets of transformed cells can be utilized together in the reaction mixture in the form of whole cells, or in the form of lysates or extracts derived therefrom. In other embodiments, a host cell can be transformed with gene(s) encoding multiple engineered P450-BM3 polypeptides. In some embodiments the engineered polypeptides can be expressed in the form of secreted polypeptides, and the culture medium containing the secreted polypeptides can be used for the P450-BM3 reaction.

[0111] In some embodiments, the improved activity and/or selectivity of the engineered P450-BM3 polypeptides disclosed herein provides for processes wherein higher percentage conversion can be achieved with lower concentrations of the engineered polypeptide. In some embodiments of the process, the suitable reaction conditions comprise an engineered polypeptide amount of about 0.03% (w/w), 0.05% (w/w), 0.1% (w/w), 0.15% (w/w), 0.2% (w/w), 0.3% (w/w), 0.4% (w/w), 0.5% (w/w), 1% (w/w), 2% (w/w), 5% (w/w), 10% (w/w), 20% (w/w) or more, depending on the substrate compound loading and desired conversion.

[0112] In some embodiments, the engineered polypeptide is present at about 0.01 g/L to about 40 g/L; about 0.05 g/L to about 15 g/L; about 0.1 g/L to about 10 g/L; about 1 g/L to about 8 g/L; about 0.5 g/L to about 10 g/L; about 1 g/L to about 10 g/L; about 0.1 g/L to about 5 g/L; about 0.5 g/L to about 5 g/L; or about 0.1 g/L to about 2 g/L. In some embodiments, the engineered P450-BM3 polypeptide is present at about 0.01 g/L, 0.05 g/L, 0.1 g/L, 0.2 g/L, 0.5 g/L, 1 g/L, 2 g/L, 5 g/L, 10 g/L, 15 g/L, 20 g/L, 40 g/L or more.

[0113] During the course of the reaction, the pH of the reaction mixture may change. The pH of the reaction mixture may be maintained at a desired pH or within a desired pH range. This may be done by the addition of an acid or a base, before and/or during the course of the reaction. Alternatively, the pH may be controlled by using a buffer. Accordingly, in some embodiments, the reaction condition comprises a buffer. Suitable buffers to maintain desired pH ranges are known in the art and include, by way of example and not limitation, potassium phosphate, borate, phosphate, 2-(N-morpholino)ethanesulfonic acid (MES), 3-(N-morpholino)propanesulfonic acid (MOPS), acetate, triethanolamine, and 2-amino-2-hydroxymethyl-propane-1,3-diol (Tris), and the like. In some embodiments, the buffer is potassium phosphate. In some embodiments of the process, the suitable reaction conditions comprise a buffer concentration of from about 0.01 to about 0.5 M, 0.05 to about 0.4 M, 0.1 to about 0.3 M, or about 0.1 to about 0.2 M. In some embodiments, the reaction condition comprises a buffer concentration of about 0.01, 0.02, 0.03, 0.04, 0.05, 0.07, 0.1, 0.12, 0.14, 0.16, 0.18, 0.2, 0.3, 0.4 M, or 0.5M.

[0114] In some embodiments, the reaction conditions comprise a solvent. Any suitable solvent may be used. In some embodiments, the solvent comprises acetonitrile or DMSO. In some embodiments, the reaction conditions comprise a solvent concentration of 2%, 5%, 20%, 15%, 20%, 25%, or 30%.

[0115] In the embodiments of the process, the reaction conditions can comprise a suitable pH. The desired pH or desired pH range can be maintained by use of an acid or base, an appropriate buffer, or a combination of buffering and acid or base addition. The pH of the reaction mixture can be controlled before and/or during the course of the reaction. In some embodiments, the suitable reaction conditions comprise a solution pH from about 4 to about 10, pH from about 5 to about 10, pH from about 5 to about 9, pH from about 6 to about 9, pH from about 6 to about 8. In some embodiments, the reaction conditions comprise a solution pH of about 4, 4.5, 5, 5.5, 6, 6.5, 7, 7.5, 8, 8.5, 9, 9.5, or 10.

[0116] In the embodiments of the processes herein, a suitable temperature can be used for the reaction conditions, for example, taking into consideration the increase in reaction rate at higher temperatures, and the activity of the enzyme during the reaction time period. Accordingly, in some embodiments, the suitable reaction conditions comprise a temperature of about 10° C. to about 60° C., about 10° C. to about 55° C., about 15° C. to about 60° C., about 20° C. to about 60° C., about 20° C. to about 55° C., about 25° C. to about 55° C., or about 30° C. to about 50° C. In some embodiments, the suitable reaction conditions comprise a temperature of about 10° C., 15° C., 20° C., 25° C., 30° C., 35° C., 40° C., 45° C., 50° C., 55° C., or 60° C. In some embodiments, the temperature during the enzymatic reaction can be maintained at a specific temperature throughout the course of the reaction. In some embodiments, the temperature during the enzymatic reaction can be adjusted over a temperature profile during the course of the reaction.

[0117] In some embodiments, the reaction conditions can comprise a surfactant for stabilizing or enhancing the reaction. Surfactants can comprise non-ionic, cationic, anionic and/or amphiphilic surfactants. Exemplary surfactants, include by way of example and not limitation, nonyl phenoxypolyethoxylethanol (NP40), Triton X-100, polyoxyethylene-stearylamine, cetyltrimethylammonium bromide, sodium oleylamidosulfate, polyoxyethylene-sorbitanmonostearate, hexadecyldimethylamine, etc. Any surfactant that may stabilize or enhance the reaction may be employed. The concentration of the surfactant to be employed in the reaction may be generally from 0.1 to 50 mg/ml, particularly from 1 to 20 mg/ml.

[0118] In some embodiments, the reaction conditions can include an antifoam agent, which aids in reducing or preventing formation of foam in the reaction solution, such as when the reaction solutions are mixed or sparged. Anti-foam agents include non-polar oils (e.g., minerals, silicones, etc.), polar oils (e.g., fatty acids, alkyl amines, alkyl amides, alkyl sulfates, etc.), and hydrophobic (e.g., treated silica, polypropylene, etc.), some of which also function as surfactants. Exemplary anti-foam agents include, Y-30® (Dow Corning), poly-glycol copolymers, oxy/ethoxylated alcohols, and polydimethylsiloxanes. In some embodiments, the anti-foam can be present at about 0.001% (v/v) to about 5% (v/v), about 0.01% (v/v) to about 5% (v/v), about 0.1% (v/v) to about 5% (v/v), or about 0.1% (v/v) to about 2% (v/v). In some embodiments, the anti-foam agent can be present at about 0.001% (v/v), about 0.01% (v/v), about 0.1% (v/v), about 0.5% (v/v), about 1% (v/v), about 2% (v/v), about 3% (v/v), about 4% (v/v), or about 5% (v/v) or more as desirable to promote the reaction.

[0119] The quantities of reactants used in the monooxygenase reaction will generally vary depending on the quantities of product desired, and concomitantly the amount of indanone substrate employed. Those having ordinary skill in the art will readily understand how to vary these quantities to tailor them to the desired level of productivity and scale of production.

[0120] In some embodiments, the order of addition of reactants is not critical. The reactants may be added together at the same time to a solvent (e.g., monophasic solvent, biphasic aqueous co-solvent system, and the like), or alternatively, some of the reactants may be added separately, and some together at different time points. For example, the cofactor, co-substrate, engineered P450-BM3 enzyme, and substrate may be added first to the solvent.

[0121] The solid reactants (e.g., enzyme, salts, etc.) may be provided to the reaction in a variety of different forms, including powder (e.g., lyophilized, spray dried, and the like), solution, emulsion, suspension, and the like. The reactants can be readily lyophilized or spray dried using methods and equipment that are known to those having ordinary skill in the art. For example, the protein solution can be frozen at −80° C. in small aliquots, then added to a pre-chilled lyophilization chamber, followed by the application of a vacuum.

[0122] For improved mixing efficiency when an aqueous co-solvent system is used, the engineered P450-BM3 polypeptide, and cofactor may be added and mixed into the aqueous phase first. The organic phase may then be added and mixed in, followed by addition of the substrate and co-substrate. Alternatively, the substrate may be premixed in the organic phase, prior to addition to the aqueous phase.

[0123] The monooxygenation process is generally allowed to proceed until further conversion of substrate to product does not change significantly with reaction time (e.g., less than 10% of substrate being converted, or less than 5% of substrate being converted). In some embodiments, the reaction is allowed to proceed until there is complete or near complete conversion of substrate to product. Transformation of substrate to product can be monitored using known methods by detecting substrate and/or product, with or without derivatization. Suitable analytical methods include gas chromatography, HPLC, MS, and the like.

[0124] In further embodiments of the processes for converting substrate compound to product compound using the engineered P450-BM3 polypeptides, the suitable reaction conditions can comprise an initial substrate loading to the reaction solution which is then contacted by the polypeptide. This reaction solution is then further supplemented with additional substrate compound as a continuous or batchwise addition over time at a rate of at least about 1 g/L/h, at least about 2 g/L/h, at least about 4 g/L/h, at least about 6 g/L/h, or higher. Thus, according to these suitable reaction conditions, polypeptide is added to a solution having an initial substrate loading of at least about 20 g/L, 30 g/L, or 40 g/L. This addition of polypeptide is then followed by continuous addition of further substrate to the solution at a rate of about 2 g/L/h, 4 g/L/h, or 6 g/L/h until a much higher final substrate loading of at least about 30 g/L, 40 g/L, 50 g/L, 60 g/L, 70 g/L, 100 g/L, 150 g/L, 200 g/L or more, is reached. Accordingly, in some embodiments of the process, the suitable reaction conditions comprise addition of the polypeptide to a solution having an initial substrate loading of at least about 20 g/L, 30 g/L, or 40 g/L followed by addition of further substrate to the solution at a rate of about 2 g/L/h, 4 g/L/h, or 6 g/L/h until a final substrate loading of at least about 30 g/L, 40 g/L, 50 g/L, 60 g/L, 70 g/L, 100 g/L or more, is reached. This substrate supplementation reaction condition allows for higher substrate loadings to be achieved while maintaining high rates of conversion of substrate to product of at least about 50%, 60%, 70%, 80%, 90% or greater conversion of substrate.

[0125] In some embodiments, a recycling system is used to recycle NADPH to NADP+. In some embodiments, the recycling system comprises glucose dehydrogenase and glucose. In some embodiments, the recycling system comprises phosphite dehydrogenase and phosphite.

[0126] In some embodiments of the processes, the reaction using an engineered P450-BM3 polypeptide comprises the following suitable reaction conditions: (a) substrate loading at about 1-25 g/L; (b) about 1-40 g/L of the engineered polypeptide; (c) 0.25-1 g/L NADP+; (d) a pH of about 7-9; (e) 5%-20% solvent (acetonitrile or DMSO)0% we didn't use a co-solvent; (h) temperature of about 20-30° C.; and (i) reaction time of about 20 hrs.

[0127] In some embodiments of the processes, the reaction using an engineered P450-BM3 polypeptide comprises the following suitable reaction conditions: (a) substrate loading at about 10 g/L; (b) about 1.0-5.0 g/L of the engineered polypeptide; (c) 1 g/LNADP+; (d) a pH of about 8; (e) 0% DMSO; (f) temperature of about 30° C.; and (g) reaction time of about 20 hrs.

[0128] In some embodiments, additional reaction components or additional techniques are carried out to supplement the reaction conditions. These can include taking measures to stabilize or prevent inactivation of the enzyme, reduce product inhibition, shift reaction equilibrium to product formation.

[0129] In further embodiments, any of the above described process for the conversion of substrate compound to product compound can further comprise one or more steps selected from: extraction; isolation; purification; and crystallization of product compound. Methods, techniques, and protocols for extracting, isolating, purifying, and/or crystallizing the product from biocatalytic reaction mixtures produced by the above disclosed processes are known to the ordinary artisan and/or accessed through routine experimentation. Additionally, illustrative methods are provided in the Examples below.

[0130] Various features and embodiments of the invention are illustrated in the following representative examples, which are intended to be illustrative, and not limiting.

[0131] In light of the guidance provided herein, it is further contemplated that any of the exemplary engineered polypeptides can be used as the starting amino acid sequence for synthesizing other engineered P450-BM3 polypeptides, for example by subsequent rounds of evolution by adding new combinations of various amino acid differences from other polypeptides and other residue positions described herein. Further improvements may be generated by including amino acid differences at residue positions that had been maintained as unchanged throughout earlier rounds of evolution.

### Polynucleotides Encoding Engineered Polypeptides, Expression Vectors and Host Cells:

[0132] The present invention provides polynucleotides encoding the engineered P450-BM3 polypeptides described herein. In some embodiments, the polynucleotides are operatively linked to one or more heterologous regulatory sequences that control gene expression to create a recombinant polynucleotide capable of expressing the polypeptide. Expression constructs containing a heterologous polynucleotide encoding the engineered P450-BM3 polypeptides can be introduced into appropriate host cells to express the corresponding P450-BM3 polypeptide.

[0133] As will be apparent to the skilled artisan, availability of a protein sequence and the knowledge of the codons corresponding to the various amino acids provide a description of all the polynucleotides capable of encoding the subject polypeptides. The degeneracy of the genetic code, where the same amino acids are encoded by alternative or synonymous codons, allows an extremely large number of nucleic acids to be made, all of which encode the engineered P450-BM3 polypeptide. Thus, having knowledge of a particular amino acid sequence, those skilled in the art could make any number of different nucleic acids by simply modifying the sequence of one or more codons in a way which does not change the amino acid sequence of the protein. In this regard, the present invention specifically contemplates each and every possible variation of polynucleotides that could be made encoding the polypeptides described herein by selecting combinations based on the possible codon choices, and all such variations are to be considered specifically disclosed for any polypeptide described herein, including the variants provided in Tables 2.1, 3.1, 4.1, 5.1, 6.1, 7.1, 8.1, 9.1, 10.1, 10.2, 11.1, 11.2, 12.1, 13.1, 14.1, 14.2, 15.1, 16.1, 17.1, 17.2, 18.1, 19.1, and 19.2, as well as SEQ ID NOS: 4, 36, 66, 72, 198, 226, 244, 286, 358, 410, 534, 734, 748, 828, 968, 984, 1160, and 1266.

[0134] In various embodiments, the codons are preferably selected to fit the host cell in which the protein is being produced. For example, preferred codons used in bacteria are used for expression in bacteria. Consequently, codon optimized polynucleotides encoding the engineered P450-BM3 polypeptides contain preferred codons at about 40%, 50%, 60%, 70%, 80%, or greater than 90% of codon positions of the full length coding region.

[0135] In some embodiments, as described above, the polynucleotide encodes an engineered polypeptide having P450-BM3 activity with the properties disclosed herein, wherein the polypeptide comprises an amino acid sequence having at least 80%, 85%, 86%, 87%, 88%, 89%, 90%, 91%, 92%, 93%, 94%, 95%, 96%, 97%, 98%, 99% or more identity to a reference sequence (e.g., SEQ ID NO: 4, 36, 66, 72, 198, 226, 244, 286, 358, 410, 534, 734, 748, 828, 968, 984, 1160, or 1266), or the amino acid sequence of any variant as disclosed in any of Tables 2.1, 3.1, 4.1, 5.1, 6.1, 7.1, 8.1, 9.1, 10.1, 10.2, 11.1, 11.2, 12.1, 13.1, 14.1, 14.2, 15.1, 16.1, 17.1, 17.2, 18.1, 19.1, and 19.2, and one or more residue differences as compared to the reference polypeptide of SEQ ID NO: 4, 36, 66, 72, 198, 226, 244, 286, 358, 410, 534, 734, 748, 828, 968, 984, 1160, or 1266, or the amino acid sequence of any variant as disclosed in any of Tables 2.1, 3.1, 4.1, 5.1, 6.1, 7.1, 8.1, 9.1, 10.1, 10.2, 11.1, 11.2, 12.1, 13.1, 14.1, 14.2, 15.1, 16.1, 17.1, 17.2, 18.1, 19.1, and 19.2 (for example 1, 2, 3, 4, 5, 6, 7, 8, 9, 10 or more amino acid residue positions). In some embodiments, the reference sequence is selected from SEQ ID NO: 4, 36, 66, 72, 198, 226, 244, 286, 358, 410, 534, 734, 748, 828, 968, 984, 1160, or 1266.

[0136] In some embodiments, the polynucleotides are capable of hybridizing under highly stringent conditions to a reference polynucleotide sequence selected from SEQ ID NO: 3, 35, 65, 71, 197, 225, 243, 285, 357, 409, 533, 733, 747, 827, 967, 983, 1159, or 1265, or a complement thereof, or a polynucleotide sequence encoding any of the variant P450-BM3 polypeptides provided herein. In some embodiments, the polynucleotide capable of hybridizing under highly stringent conditions encodes a P450-BM3 polypeptide comprising an amino acid sequence that has one or more residue differences as compared to SEQ ID NO: 4, 36, 66, 72, 198, 226, 244, 286, 358, 410, 534, 734, 748, 828, 968, 984, 1160, or 1266.

[0137] In some embodiments, the polynucleotides are capable of hybridizing under highly stringent conditions to a reference polynucleotide sequence selected from any polynucleotide sequence provided herein, or a complement thereof, or a polynucleotide sequence encoding any of the variant enzyme polypeptides provided herein. In some embodiments, the polynucleotide capable of hybridizing under highly stringent conditions encodes an enzyme polypeptide comprising an amino acid sequence that has one or more residue differences as compared to a reference sequence.

[0138] In some embodiments, an isolated polynucleotide encoding any of the engineered enzyme polypeptides herein is manipulated in a variety of ways to facilitate expression of the enzyme polypeptide. In some embodiments, the polynucleotides encoding the enzyme polypeptides comprise expression vectors where one or more control sequences is present to regulate the expression of the enzyme polynucleotides and/or polypeptides. Manipulation of the isolated polynucleotide prior to its insertion into a vector may be desirable or necessary depending on the expression vector utilized. Techniques for modifying polynucleotides and nucleic acid sequences utilizing recombinant DNA methods are well known in the art. In some embodiments, the control sequences include among others, promoters, leader sequences, polyadenylation sequences, propeptide sequences, signal peptide sequences, and transcription terminators. In some embodiments, suitable promoters are selected based on the host cells selection. For bacterial host cells, suitable promoters for directing transcription of the nucleic acid constructs of the present disclosure, include, but are not limited to promoters obtained from the E. coli lac operon, Streptomyces coelicolor agarase gene (dagA), Bacillus subtilis levansucrase gene (sacB), Bacillus licheniformis alpha-amylase gene (amyL), Bacillus stearothermophilus maltogenic amylase gene (amyM), Bacillus amyloliquefaciens alpha-amylase gene (amyQ), Bacillus licheniformis penicillinase gene (penP), Bacillus subtilis xy1A and xy1B genes, and prokaryotic beta-lactamase gene (See e.g., Villa-Kamaroff et al., Proc. Natl Acad. Sci. USA 75: 3727-3731 [1978]), as well as the tac promoter (See e.g., DeBoer et al., Proc. Natl Acad. Sci. USA 80: 21-25 [1983]). Exemplary promoters for filamentous fungal host cells, include, but are not limited to promoters obtained from the genes for Aspergillus oryzae TAKA amylase, Rhizomucor miehei aspartic proteinase, Aspergillus niger neutral alpha-amylase, Aspergillus niger acid stable alpha-amylase, Aspergillus niger or Aspergillus awamori glucoamylase (glaA), Rhizomucor miehei lipase, Aspergillus oryzae alkaline protease, Aspergillus oryzae triose phosphate isomerase, Aspergillus nidulans acetamidase, and Fusarium oxysporum trypsin-like protease (See e.g., WO 96/00787), as well as the NA2-tpi promoter (a hybrid of the promoters from the genes for Aspergillus niger neutral alpha-amylase and Aspergillus oryzae triose phosphate isomerase), and mutant, truncated, and hybrid promoters thereof. Exemplary yeast cell promoters can be from the genes for Saccharomyces cerevisiae enolase (ENO-1), Saccharomyces cerevisiae galactokinase (GAL1), Saccharomyces cerevisiae alcohol dehydrogenase/glyceraldehyde-3-phosphate dehydrogenase (ADH2/GAP), and Saccharomyces cerevisiae 3-phosphoglycerate kinase. Other useful promoters for yeast host cells are known in the art (See e.g., Romanos et al., Yeast 8:423-488 [1992]).

[0139] In some embodiments, the control sequence is also a suitable transcription terminator sequence (i.e., a sequence recognized by a host cell to terminate transcription). In some embodiments, the terminator sequence is operably linked to the 3′ terminus of the nucleic acid sequence encoding the enzyme polypeptide. Any suitable terminator which is functional in the host cell of choice finds use in the present invention. Exemplary transcription terminators for filamentous fungal host cells can be obtained from the genes for Aspergillus oryzae TAKA amylase, Aspergillus niger glucoamylase, Aspergillus nidulans anthranilate synthase, Aspergillus niger alpha-glucosidase, and Fusarium oxysporum trypsin-like protease. Exemplary terminators for yeast host cells can be obtained from the genes for Saccharomyces cerevisiae enolase, Saccharomyces cerevisiae cytochrome C (CYC1), and Saccharomyces cerevisiae glyceraldehyde-3-phosphate dehydrogenase. Other useful terminators for yeast host cells are known in the art (See e.g., Romanos et al., supra).

[0140] In some embodiments, the control sequence is also a suitable leader sequence (i.e., a non-translated region of an mRNA that is important for translation by the host cell). In some embodiments, the leader sequence is operably linked to the 5′ terminus of the nucleic acid sequence encoding the enzyme polypeptide. Any suitable leader sequence that is functional in the host cell of choice finds use in the present invention. Exemplary leaders for filamentous fungal host cells are obtained from the genes for Aspergillus oryzae TAKA amylase, and Aspergillus nidulans triose phosphate isomerase. Suitable leaders for yeast host cells are obtained from the genes for Saccharomyces cerevisiae enolase (ENO-1), Saccharomyces cerevisiae 3-phosphoglycerate kinase, Saccharomyces cerevisiae alpha-factor, and Saccharomyces cerevisiae alcohol dehydrogenase/glyceraldehyde-3-phosphate dehydrogenase (ADH2/GAP).

[0141] In some embodiments, the control sequence is also a polyadenylation sequence (i.e., a sequence operably linked to the 3′ terminus of the nucleic acid sequence and which, when transcribed, is recognized by the host cell as a signal to add polyadenosine residues to transcribed mRNA). Any suitable polyadenylation sequence which is functional in the host cell of choice finds use in the present invention. Exemplary polyadenylation sequences for filamentous fungal host cells include, but are not limited to the genes for Aspergillus oryzae TAKA amylase, Aspergillus niger glucoamylase, Aspergillus nidulans anthranilate synthase, Fusarium oxysporum trypsin-like protease, and Aspergillus niger alpha-glucosidase. Useful polyadenylation sequences for yeast host cells are known (See e.g., Guo and Sherman, Mol. Cell. Bio., 15:5983-5990 [1995]).

[0142] In some embodiments, the control sequence is also a signal peptide (i.e., a coding region that codes for an amino acid sequence linked to the amino terminus of a polypeptide and directs the encoded polypeptide into the cell's secretory pathway). In some embodiments, the 5′ end of the coding sequence of the nucleic acid sequence inherently contains a signal peptide coding region naturally linked in translation reading frame with the segment of the coding region that encodes the secreted polypeptide. Alternatively, in some embodiments, the 5′ end of the coding sequence contains a signal peptide coding region that is foreign to the coding sequence. Any suitable signal peptide coding region which directs the expressed polypeptide into the secretory pathway of a host cell of choice finds use for expression of the engineered polypeptide(s). Effective signal peptide coding regions for bacterial host cells are the signal peptide coding regions that include, but are not limited to those obtained from the genes for Bacillus NC1B 11837 maltogenic amylase, Bacillus stearothermophilus alpha-amylase, Bacillus licheniformis subtilisin, Bacillus licheniformis beta-lactamase, Bacillus stearothermophilus neutral proteases (nprT, nprS, nprM), and Bacillus subtilis prsA. Further signal peptides are known in the art (See e.g., Simonen and Palva, Microbiol. Rev., 57:109-137 [1993]). In some embodiments, effective signal peptide coding regions for filamentous fungal host cells include, but are not limited to the signal peptide coding regions obtained from the genes for Aspergillus oryzae TAKA amylase, Aspergillus niger neutral amylase, Aspergillus niger glucoamylase, Rhizomucor miehei aspartic proteinase, Humicola insolens cellulase, and Humicola lanuginosa lipase. Useful signal peptides for yeast host cells include, but are not limited to those from the genes for Saccharomyces cerevisiae alpha-factor and Saccharomyces cerevisiae invertase.

[0143] In some embodiments, the control sequence is also a propeptide coding region that codes for an amino acid sequence positioned at the amino terminus of a polypeptide. The resultant polypeptide is referred to as a “proenzyme,” “propolypeptide,” or “zymogen.” A propolypeptide can be converted to a mature active polypeptide by catalytic or autocatalytic cleavage of the propeptide from the propolypeptide. The propeptide coding region may be obtained from any suitable source, including, but not limited to the genes for Bacillus subtilis alkaline protease (aprE), Bacillus subtilis neutral protease (nprT), Saccharomyces cerevisiae alpha-factor, Rhizomucor miehei aspartic proteinase, and Myceliophthora thermophila lactase (See e.g., WO 95/33836). Where both signal peptide and propeptide regions are present at the amino terminus of a polypeptide, the propeptide region is positioned next to the amino terminus of a polypeptide and the signal peptide region is positioned next to the amino terminus of the propeptide region.

[0144] In some embodiments, regulatory sequences are also utilized. These sequences facilitate the regulation of the expression of the polypeptide relative to the growth of the host cell. Examples of regulatory systems are those that cause the expression of the gene to be turned on or off in response to a chemical or physical stimulus, including the presence of a regulatory compound. In prokaryotic host cells, suitable regulatory sequences include, but are not limited to the lac, tac, and trp operator systems. In yeast host cells, suitable regulatory systems include, but are not limited to the ADH2 system or GAL1 system. In filamentous fungi, suitable regulatory sequences include, but are not limited to the TAKA alpha-amylase promoter, Aspergillus niger glucoamylase promoter, and Aspergillus oryzae glucoamylase promoter.

[0145] In another aspect, the present invention is directed to a recombinant expression vector comprising a polynucleotide encoding an engineered enzyme polypeptide, and one or more expression regulating regions such as a promoter and a terminator, a replication origin, etc., depending on the type of hosts into which they are to be introduced. In some embodiments, the various nucleic acid and control sequences described herein are joined together to produce recombinant expression vectors which include one or more convenient restriction sites to allow for insertion or substitution of the nucleic acid sequence encoding the enzyme polypeptide at such sites. Alternatively, in some embodiments, the nucleic acid sequence of the present invention is expressed by inserting the nucleic acid sequence or a nucleic acid construct comprising the sequence into an appropriate vector for expression. In some embodiments involving the creation of the expression vector, the coding sequence is located in the vector so that the coding sequence is operably linked with the appropriate control sequences for expression.

[0146] The recombinant expression vector may be any suitable vector (e.g., a plasmid or virus), that can be conveniently subjected to recombinant DNA procedures and bring about the expression of the enzyme polynucleotide sequence. The choice of the vector typically depends on the compatibility of the vector with the host cell into which the vector is to be introduced. The vectors may be linear or closed circular plasmids.

[0147] In some embodiments, the expression vector is an autonomously replicating vector (i.e., a vector that exists as an extra-chromosomal entity, the replication of which is independent of chromosomal replication, such as a plasmid, an extra-chromosomal element, a minichromosome, or an artificial chromosome). The vector may contain any means for assuring self-replication. In some alternative embodiments, the vector is one in which, when introduced into the host cell, it is integrated into the genome and replicated together with the chromosome(s) into which it has been integrated. Furthermore, in some embodiments, a single vector or plasmid, or two or more vectors or plasmids which together contain the total DNA to be introduced into the genome of the host cell, and/or a transposon is utilized.

[0148] In some embodiments, the expression vector contains one or more selectable markers, which permit easy selection of transformed cells. A “selectable marker” is a gene, the product of which provides for biocide or viral resistance, resistance to heavy metals, prototrophy to auxotrophs, and the like. Examples of bacterial selectable markers include, but are not limited to the dal genes from Bacillus subtilis or Bacillus licheniformis, or markers, which confer antibiotic resistance such as ampicillin, kanamycin, chloramphenicol or tetracycline resistance. Suitable markers for yeast host cells include, but are not limited to ADE2, HIS3, LEU2, LYS2, MET3, TRP1, and URA3. Selectable markers for use in filamentous fungal host cells include, but are not limited to, amdS (acetamidase; e.g., from A. nidulans or A. orzyae), argB (ornithine carbamoyltransferases), bar (phosphinothricin acetyltransferase; e.g., from S. hygroscopicus), hph (hygromycin phosphotransferase), niaD (nitrate reductase), pyrG (orotidine-5′-phosphate decarboxylase; e.g., from A. nidulans or A. orzyae), sC (sulfate adenyltransferase), and trpC (anthranilate synthase), as well as equivalents thereof.

[0149] In another aspect, the present invention provides a host cell comprising at least one polynucleotide encoding at least one engineered enzyme polypeptide of the present invention, the polynucleotide(s) being operatively linked to one or more control sequences for expression of the engineered enzyme enzyme(s) in the host cell. Host cells suitable for use in expressing the polypeptides encoded by the expression vectors of the present invention are well known in the art and include but are not limited to, bacterial cells, such as E. coli, Vibrio fluvialis, Streptomyces and Salmonella typhimurium cells; fungal cells, such as yeast cells (e.g., Saccharomyces cerevisiae or Pichia pastoris (ATCC Accession No. 201178)); insect cells such as Drosophila S2 and Spodoptera Sf9 cells; animal cells such as CHO, COS, BHK, 293, and Bowes melanoma cells; and plant cells. Exemplary host cells also include various Escherichia coli strains (e.g., W3110 (AfhuA) and BL21). Examples of bacterial selectable markers include, but are not limited to the dal genes from Bacillus subtilis or Bacillus lichenformis, or markers, which confer antibiotic resistance such as ampicillin, kanamycin, chloramphenicol, and/or tetracycline resistance.

[0150] In some embodiments, the expression vectors of the present invention contain an element(s) that permits integration of the vector into the host cell's genome or autonomous replication of the vector in the cell independent of the genome. In some embodiments involving integration into the host cell genome, the vectors rely on the nucleic acid sequence encoding the polypeptide or any other element of the vector for integration of the vector into the genome by homologous or nonhomologous recombination.

[0151] In some alternative embodiments, the expression vectors contain additional nucleic acid sequences for directing integration by homologous recombination into the genome of the host cell. The additional nucleic acid sequences enable the vector to be integrated into the host cell genome at a precise location(s) in the chromosome(s). To increase the likelihood of integration at a precise location, the integrational elements preferably contain a sufficient number of nucleotides, such as 100 to 10,000 base pairs, preferably 400 to 10,000 base pairs, and most preferably 800 to 10,000 base pairs, which are highly homologous with the corresponding target sequence to enhance the probability of homologous recombination. The integrational elements may be any sequence that is homologous with the target sequence in the genome of the host cell. Furthermore, the integrational elements may be non-encoding or encoding nucleic acid sequences. On the other hand, the vector may be integrated into the genome of the host cell by non-homologous recombination.

[0152] For autonomous replication, the vector may further comprise an origin of replication enabling the vector to replicate autonomously in the host cell in question. Examples of bacterial origins of replication are P15A on or the origins of replication of plasmids pBR322, pUC19, pACYC177 (which plasmid has the P15A ori), or pACYC184 permitting replication in E. coli, and pUB110, pE194, or pTA1060 permitting replication in Bacillus. Examples of origins of replication for use in a yeast host cell are the 2 micron origin of replication, ARS1, ARS4, the combination of ARS1 and CEN3, and the combination of ARS4 and CEN6. The origin of replication may be one having a mutation which makes its functioning temperature-sensitive in the host cell (See e.g., Ehrlich, Proc. Natl. Acad. Sci. USA 75:1433 [1978]).

[0153] In some embodiments, more than one copy of a nucleic acid sequence of the present invention is inserted into the host cell to increase production of the gene product. An increase in the copy number of the nucleic acid sequence can be obtained by integrating at least one additional copy of the sequence into the host cell genome or by including an amplifiable selectable marker gene with the nucleic acid sequence where cells containing amplified copies of the selectable marker gene, and thereby additional copies of the nucleic acid sequence, can be selected for by cultivating the cells in the presence of the appropriate selectable agent.

[0154] Many of the expression vectors for use in the present invention are commercially available. Suitable commercial expression vectors include, but are not limited to the p3xFLAGTM™ expression vectors (Sigma-Aldrich Chemicals), which include a CMV promoter and hGH polyadenylation site for expression in mammalian host cells and a pBR322 origin of replication and ampicillin resistance markers for amplification in E. coli. Other suitable expression vectors include, but are not limited to pBluescriptII SK(−) and pBK-CMV (Stratagene), and plasmids derived from pBR322 (Gibco BRL), pUC (Gibco BRL), pREP4, pCEP4 (Invitrogen) or pPoly (See e.g., Lathe et al., Gene 57:193-201 [1987]).

[0155] Thus, in some embodiments, a vector comprising a sequence encoding at least one variant engineered P450-BM3 polypeptide is transformed into a host cell in order to allow propagation of the vector and expression of the variant engineered P450-BM3 polypeptide(s). In some embodiments, the variant engineered P450-BM3 polypeptides are post-translationally modified to remove the signal peptide and, in some cases, may be cleaved after secretion. In some embodiments, the transformed host cell described above is cultured in a suitable nutrient medium under conditions permitting the expression of the variant engineered P450-BM3 polypeptide(s). Any suitable medium useful for culturing the host cells finds use in the present invention, including, but not limited to minimal or complex media containing appropriate supplements. In some embodiments, host cells are grown in HTP media. Suitable media are available from various commercial suppliers or may be prepared according to published recipes (e.g., in catalogues of the American Type Culture Collection).

[0156] In another aspect, the present invention provides host cells comprising a polynucleotide encoding an improved engineered P450-BM3 polypeptide provided herein, the polynucleotide being operatively linked to one or more control sequences for expression of the engineered P450-BM3 polypeptide in the host cell. Host cells for use in expressing the engineered P450-BM3 polypeptides encoded by the expression vectors of the present invention are well known in the art and include but are not limited to, bacterial cells, such as E. coli, Bacillus megaterium, Lactobacillus kefir, Streptomyces and Salmonella typhimurium cells; fungal cells, such as yeast cells (e.g., Saccharomyces cerevisiae or Pichia pastoris (ATCC Accession No. 201178)); insect cells such as Drosophila S2 and Spodoptera Sf9 cells; animal cells such as CHO, COS, BHK, 293, and Bowes melanoma cells; and plant cells. Appropriate culture media and growth conditions for the above-described host cells are well known in the art.

[0157] Polynucleotides for expression of the engineered P450-BM3 polypeptide may be introduced into cells by various methods known in the art. Techniques include among others, electroporation, biolistic particle bombardment, liposome mediated transfection, calcium chloride transfection, and protoplast fusion. Various methods for introducing polynucleotides into cells are known to those skilled in the art.

[0158] In some embodiments, the host cell is a eukaryotic cell. Suitable eukaryotic host cells include, but are not limited to, fungal cells, algal cells, insect cells, and plant cells. Suitable fungal host cells include, but are not limited to, Ascomycota, Basidiomycota, Deuteromycota, Zygomycota, Fungi imperfecti. In some embodiments, the fungal host cells are yeast cells and filamentous fungal cells. The filamentous fungal host cells of the present invention include all filamentous forms of the subdivision Eumycotina and Oomycota. Filamentous fungi are characterized by a vegetative mycelium with a cell wall composed of chitin, cellulose and other complex polysaccharides. The filamentous fungal host cells of the present invention are morphologically distinct from yeast.

[0159] In some embodiments of the present invention, the filamentous fungal host cells are of any suitable genus and species, including, but not limited to Achlya, Acremonium, Aspergillus, Aureobasidium, Bjerkandera, Ceriporiopsis, Cephalosporium, Chrysosporium, Cochliobolus, Corynascus, Cryphonectria, Cryptococcus, Coprinus, Coriolus, Diplodia, Endothia, Fusarium, Gibberella, Gliocladium, Humicola, Hypocrea, Myceliophthora, Mucor, Neurospora, Penicillium, Podospora, Phlebia, Piromyces, Pyricularia, Rhizomucor, Rhizopus, Schizophyllum, Scytalidium, Sporotrichum, Talaromyces, Thermoascus, Thielavia, Trametes, Tolypocladium, Trichoderma, Verticillium, and/or Volvariella, and/or teleomorphs, or anamorphs, and synonyms, basionyms, or taxonomic equivalents thereof.

[0160] In some embodiments of the present invention, the host cell is a yeast cell, including but not limited to cells of Candida, Hansenula, Saccharomyces, Schizosaccharomyces, Pichia, Kluyveromyces, or Yarrowia species. In some embodiments of the present invention, the yeast cell is Hansenula polymorpha, Saccharomyces cerevisiae, Saccharomyces carlsbergensis, Saccharomyces diastaticus, Saccharomyces norbensis, Saccharomyces kluyveri, Schizosaccharomyces pombe, Pichia pastoris, Pichia finlandica, Pichia trehalophila, Pichia kodamae, Pichia membranaefaciens, Pichia opuntiae, Pichia thermotolerans, Pichia salictaria, Pichia quercuum, Pichia pijperi, Pichia stipitis, Pichia methanolica, Pichia angusta, Kluyveromyces lactis, Candida albicans, or Yarrowia lipolytica.

[0161] In some embodiments of the invention, the host cell is an algal cell such as Chlamydomonas (e.g., C. reinhardtii) and Phormidium (P. sp. ATCC29409).

[0162] In some other embodiments, the host cell is a prokaryotic cell. Suitable prokaryotic cells include, but are not limited to Gram-positive, Gram-negative and Gram-variable bacterial cells. Any suitable bacterial organism finds use in the present invention, including but not limited to Agrobacterium, Alicyclobacillus, Anabaena, Anacystis, Acinetobacter, Acidothermus, Arthrobacter, Azobacter, Bacillus, Bifidobacterium, Brevibacterium, Butyrivibrio, Buchnera, Campestris, Campylobacter, Clostridium, Corynebacterium, Chromatium, Coprococcus, Escherichia, Enterococcus, Enterobacter, Erwinia, Fusobacterium, Faecalibacterium, Francisella, Flavobacterium, Geobacillus, Haemophilus, Helicobacter, Klebsiella, Lactobacillus, Lactococcus, Ilyobacter, Micrococcus, Microbacterium, Mesorhizobium, Methylobacterium, Methylobacterium, Mycobacterium, Neisseria, Pantoea, Pseudomonas, Prochlorococcus, Rhodobacter, Rhodopseudomonas, Rhodopseudomonas, Roseburia, Rhodospirillum, Rhodococcus, Scenedesmus, Streptomyces, Streptococcus, Synecoccus, Saccharomonospora, Staphylococcus, Serratia, Salmonella, Shigella, Thermoanaerobacterium, Tropheryma, Tularensis, Temecula, Thermosynechococcus, Thermococcus, Ureaplasma, Xanthomonas, Xylella, Yersinia and Zymomonas. In some embodiments, the host cell is a species of Agrobacterium, Acinetobacter, Azobacter, Bacillus, Bifidobacterium, Buchnera, Geobacillus, Campylobacter, Clostridium, Corynebacterium, Escherichia, Enterococcus, Erwinia, Flavobacterium, Lactobacillus, Lactococcus, Pantoea, Pseudomonas, Staphylococcus, Salmonella, Streptococcus, Streptomyces, or Zymomonas. In some embodiments, the bacterial host strain is non-pathogenic to humans. In some embodiments the bacterial host strain is an industrial strain. Numerous bacterial industrial strains are known and suitable in the present invention. In some embodiments of the present invention, the bacterial host cell is an Agrobacterium species (e.g., A. radiobacter, A. rhizogenes, and A. rubi). In some embodiments of the present invention, the bacterial host cell is an Arthrobacter species (e.g., A. aurescens, A. citreus, A. globiformis, A. hydrocarboglutamicus, A. mysorens, A. nicotianae, A. paraffineus, A. protophonniae, A. roseoparqffinus, A. sulfureus, and A. ureafaciens). In some embodiments of the present invention, the bacterial host cell is a Bacillus species (e.g., B. thuringensis, B. anthracis, B. megaterium, B. subtilis, B. lentus, B. circulans, B. pumilus, B. lautus, B.coagulans, B. brevis, B. firmus, B. alkaophius, B. licheniformis, B. clausii, B. stearothermophilus, B. halodurans, and B. amyloliquefaciens). In some embodiments, the host cell is an industrial Bacillus strain including but not limited to B. subtilis, B. pumilus, B. licheniformis, B. megaterium, B. clausii, B. stearothermophilus, or B. amyloliquefaciens. In some embodiments, the Bacillus host cells are B. subtilis, B. licheniformis, B. megaterium, B. stearothermophilus, and/or B. amyloliquefaciens. In some embodiments, the bacterial host cell is a Clostridium species (e.g., C. acetobutylicum, C. tetani E88, C. lituseburense, C. saccharobutylicum, C. perfringens, and C. beijerinckii). In some embodiments, the bacterial host cell is a Corynebacterium species (e.g., C. glutamicum and C. acetoacidophilum). In some embodiments the bacterial host cell is an Escherichia species (e.g., E. coli). In some embodiments, the host cell is Escherichia coli W3110. In some embodiments, the bacterial host cell is an Erwinia species (e.g., E. uredovora, E. carotovora, E. ananas, E. herbicola, E. punctata, and E. terreus). In some embodiments, the bacterial host cell is a Pantoea species (e.g., P. citrea, and P. agglomerans). In some embodiments the bacterial host cell is a Pseudomonas species (e.g., P. putida, P. aeruginosa, P. mevalonii, and P. sp. D-01 10). In some embodiments, the bacterial host cell is a Streptococcus species (e.g., S. equisimiles, S. pyogenes, and S. uberis). In some embodiments, the bacterial host cell is a Streptomyces species (e.g., S. ambofaciens, S. achromogenes, S. avermitilis, S. coelicolor, S. aureofaciens, S. aureus, S. fungicidicus, S. griseus, and S. lividans). In some embodiments, the bacterial host cell is a Zymomonas species (e.g., Z. mobilis, and Z. lipolytica).

[0163] Many prokaryotic and eukaryotic strains that find use in the present invention are readily available to the public from a number of culture collections such as American Type Culture Collection (ATCC), Deutsche Sammlung von Mikroorganismen und Zellkulturen GmbH (DSM), Centraalbureau Voor Schimmelcultures (CBS), and Agricultural Research Service Patent Culture Collection, Northern Regional Research Center (NRRL).

[0164] In some embodiments, host cells are genetically modified to have characteristics that improve protein secretion, protein stability and/or other properties desirable for expression and/or secretion of a protein. Genetic modification can be achieved by genetic engineering techniques and/or classical microbiological techniques (e.g., chemical or UV mutagenesis and subsequent selection). Indeed, in some embodiments, combinations of recombinant modification and classical selection techniques are used to produce the host cells. Using recombinant technology, nucleic acid molecules can be introduced, deleted, inhibited or modified, in a manner that results in increased yields of engineered P450-BM3 variant(s) within the host cell and/or in the culture medium. For example, knockout of Alp1 function results in a cell that is protease deficient, and knockout of pyr5 function results in a cell with a pyrimidine deficient phenotype. In one genetic engineering approach, homologous recombination is used to induce targeted gene modifications by specifically targeting a gene in vivo to suppress expression of the encoded protein. In alternative approaches, siRNA, antisense and/or ribozyme technology find use in inhibiting gene expression. A variety of methods are known in the art for reducing expression of protein in cells, including, but not limited to deletion of all or part of the gene encoding the protein and site-specific mutagenesis to disrupt expression or activity of the gene product. (See e.g., Chaveroche et al., Nucl. Acids Res., 28:22 e97 [2000]; Cho et al., Molec. Plant Microbe Interact., 19:7-15 [2006]; Maruyama and Kitamoto, Biotechnol Lett., 30:1811-1817 [2008]; Takahashi et al., Mol. Gen. Genom., 272: 344-352 [2004]; and You et al., Arch. Microbiol.,191:615-622 [2009], all of which are incorporated by reference herein). Random mutagenesis, followed by screening for desired mutations also finds use (See e.g., Combier et al., FEMS Microbiol. Lett., 220:141-8 [2003]; and Firon et al., Eukary. Cell 2:247-55 [2003], both of which are incorporated by reference).

[0165] Introduction of a vector or DNA construct into a host cell can be accomplished using any suitable method known in the art, including but not limited to calcium phosphate transfection, DEAE-dextran mediated transfection, PEG-mediated transformation, electroporation, or other common techniques known in the art. In some embodiments, the Escherichia coli expression vector pCK100900i (See, U.S. Pat. No. 9,714,437, which is hereby incorporated by reference) finds use.

[0166] In some embodiments, the engineered host cells (i.e., “recombinant host cells”) of the present invention are cultured in conventional nutrient media modified as appropriate for activating promoters, selecting transformants, or amplifying the engineered P450-BM3 polynucleotide. Culture conditions, such as temperature, pH and the like, are those previously used with the host cell selected for expression, and are well-known to those skilled in the art. As noted, many standard references and texts are available for the culture and production of many cells, including cells of bacterial, plant, animal (especially mammalian) and archaebacterial origin.

[0167] In some embodiments, cells expressing the variant engineered P450-BM3 polypeptides of the invention are grown under batch or continuous fermentations conditions. Classical “batch fermentation” is a closed system, wherein the compositions of the medium is set at the beginning of the fermentation and is not subject to artificial alternations during the fermentation. A variation of the batch system is a “fed-batch fermentation” which also finds use in the present invention. In this variation, the substrate is added in increments as the fermentation progresses. Fed-batch systems are useful when catabolite repression is likely to inhibit the metabolism of the cells and where it is desirable to have limited amounts of substrate in the medium. Batch and fed-batch fermentations are common and well known in the art. “Continuous fermentation” is an open system where a defined fermentation medium is added continuously to a bioreactor and an equal amount of conditioned medium is removed simultaneously for processing. Continuous fermentation generally maintains the cultures at a constant high density where cells are primarily in log phase growth. Continuous fermentation systems strive to maintain steady state growth conditions. Methods for modulating nutrients and growth factors for continuous fermentation processes as well as techniques for maximizing the rate of product formation are well known in the art of industrial microbiology.

[0168] In some embodiments of the present invention, cell-free transcription/translation systems find use in producing variant engineered P450-BM3 polypeptides(s). Several systems are commercially available, and the methods are well-known to those skilled in the art.

[0169] The present invention provides methods of making variant engineered P450-BM3 polypeptides or biologically active fragments thereof. In some embodiments, the method comprises: providing a host cell transformed with a polynucleotide encoding an amino acid sequence that comprises at least about 70% (or at least about 75%, at least about 80%, at least about 85%, at least about 90%, at least about 95%, at least about 96%, at least about 97%, at least about 98%, or at least about 99%) sequence identity to SEQ ID NO: 4, 36, 66, 72, 198, 226, 244, 286, 358, 410, 534, 734, 748, 828, 968, 984, 1160, or 1266, and comprising at least one mutation as provided herein; culturing the transformed host cell in a culture medium under conditions in which the host cell expresses the encoded variant engineered P450-BM3 polypeptide; and optionally recovering or isolating the expressed variant engineered P450-BM3 polypeptide, and/or recovering or isolating the culture medium containing the expressed variant engineered P450-BM3 polypeptide. In some embodiments, the methods further provide optionally lysing the transformed host cells after expressing the encoded engineered P450-BM3 polypeptide and optionally recovering and/or isolating the expressed variant engineered P450-BM3 polypeptide from the cell lysate. The present invention further provides methods of making a variant engineered P450-BM3 polypeptide comprising cultivating a host cell transformed with a variant engineered P450-BM3 polypeptide under conditions suitable for the production of the variant engineered P450-BM3 polypeptides and recovering the engineered P450-BM3 polypeptide. Typically, recovery or isolation of the engineered P450-BM3 polypeptide is from the host cell culture medium, the host cell or both, using protein recovery techniques that are well known in the art, including those described herein. In some embodiments, host cells are harvested by centrifugation, disrupted by physical or chemical means, and the resulting crude extract retained for further purification. Microbial cells employed in expression of proteins can be disrupted by any convenient method, including, but not limited to freeze-thaw cycling, sonication, mechanical disruption, and/or use of cell lysing agents, as well as many other suitable methods well known to those skilled in the art.

[0170] Engineered P450-BM3 polypeptides expressed in a host cell can be recovered from the cells and/or the culture medium using any one or more of the techniques known in the art for protein purification, including, among others, lysozyme treatment, sonication, filtration, salting-out, ultra-centrifugation, and chromatography. Suitable solutions for lysing and the high efficiency extraction of proteins from bacteria, such as E. coli, are commercially available under the trade name CelLytic B™ (Sigma-Aldrich). Thus, in some embodiments, the resulting polypeptide is recovered/isolated and optionally purified by any of a number of methods known in the art. For example, in some embodiments, the polypeptide is isolated from the nutrient medium by conventional procedures including, but not limited to, centrifugation, filtration, extraction, spray-drying, evaporation, chromatography (e.g., ion exchange, affinity, hydrophobic interaction, chromatofocusing, and size exclusion), or precipitation. In some embodiments, protein refolding steps are used, as desired, in completing the configuration of the mature protein. In addition, in some embodiments, high performance liquid chromatography (HPLC) is employed in the final purification steps. For example, in some embodiments, methods known in the art, find use in the present invention (See e.g., Parry et al., Biochem. J., 353:117 [2001]; and Hong et al., Appl. Microbiol. Biotechnol., 73:1331 [2007], both of which are incorporated herein by reference). Indeed, any suitable purification methods known in the art find use in the present invention.

[0171] Chromatographic techniques for isolation of the engineered P450-BM3 polypeptides include, but are not limited to reverse phase chromatography, high performance liquid chromatography, ion exchange chromatography, gel electrophoresis, and affinity chromatography. Conditions for purifying a particular enzyme will depend, in part, on factors such as net charge, hydrophobicity, hydrophilicity, molecular weight, molecular shape, etc., are known to those skilled in the art.

[0172] In some embodiments, affinity techniques find use in isolating the improved engineered P450-BM3 polypeptides. For affinity chromatography purification, any antibody which specifically binds the engineered P450-BM3 polypeptide may be used. For the production of antibodies, various host animals, including but not limited to rabbits, mice, rats, etc., may be immunized by injection with the engineered P450-BM3 polypeptide. The engineered P450-BM3 polypeptide may be attached to a suitable carrier, such as BSA, by means of a side chain functional group or linkers attached to a side chain functional group. Various adjuvants may be used to increase the immunological response, depending on the host species, including but not limited to Freund's (complete and incomplete), mineral gels such as aluminum hydroxide, surface active substances such as lysolecithin, pluronic polyols, polyanions, peptides, oil emulsions, keyhole limpet hemocyanin, dinitrophenol, and potentially useful human adjuvants such as BCG (Bacillus Calmette Guerin) and Corynebacterium parvum.

[0173] In some embodiments, the engineered P450-BM3 polypeptides are prepared and used in the form of cells expressing the enzymes, as crude extracts, or as isolated or purified preparations. In some embodiments, the engineered P450-BM3 polypeptides are prepared as lyophilisates, in powder form (e.g., acetone powders), or prepared as enzyme solutions. In some embodiments, the engineered P450-BM3 polypeptides are in the form of substantially pure preparations.

[0174] In some embodiments, the engineered P450-BM3 polypeptides are attached to any suitable solid substrate. Solid substrates include but are not limited to a solid phase, surface, and/or membrane. Solid supports include, but are not limited to organic polymers such as polystyrene, polyethylene, polypropylene, polyfluoroethylene, polyethyleneoxy, and polyacrylamide, as well as co-polymers and grafts thereof. A solid support can also be inorganic, such as glass, silica, controlled pore glass (CPG), reverse phase silica or metal, such as gold or platinum. The configuration of the substrate can be in the form of beads, spheres, particles, granules, a gel, a membrane or a surface. Surfaces can be planar, substantially planar, or non-planar. Solid supports can be porous or non-porous, and can have swelling or non-swelling characteristics. A solid support can be configured in the form of a well, depression, or other container, vessel, feature, or location. A plurality of supports can be configured on an array at various locations, addressable for robotic delivery of reagents, or by detection methods and/or instruments.

[0175] In some embodiments, immunological methods are used to purify engineered P450-BM3 polypeptides variants. In one approach, antibody raised against a wild-type or engineered P450-BM3 polypeptide (e.g., against a polypeptide comprising any of SEQ ID NO: 4, 36, 66, 72, 198, 226, 244, 286, 358, 410, 534, 734, 748, 828, 968, 984, 1160, or 1266, and/or a variant thereof, and/or an immunogenic fragment thereof) using conventional methods is immobilized on beads, mixed with cell culture media under conditions in which the variant engineered P450-BM3 is bound, and precipitated. In a related approach, immunochromatography finds use.

[0176] In some embodiments, the variant engineered P450-BM3s are expressed as a fusion protein including a non-enzyme portion. In some embodiments, the variant engineered P450-BM3 polypeptide sequence is fused to a purification facilitating domain. As used herein, the term “purification facilitating domain” refers to a domain that mediates purification of the polypeptide to which it is fused. Suitable purification domains include, but are not limited to metal chelating peptides, histidine-tryptophan modules that allow purification on immobilized metals, a sequence which binds glutathione (e.g., GST), a hemagglutinin (HA) tag (corresponding to an epitope derived from the influenza hemagglutinin protein; See e.g., Wilson et al., Cell 37:767 [1984]), maltose binding protein sequences, the FLAG epitope utilized in the FLAGS extension/affinity purification system (e.g., the system available from Immunex Corp), and the like. One expression vector contemplated for use in the compositions and methods described herein provides for expression of a fusion protein comprising a polypeptide of the invention fused to a polyhistidine region separated by an enterokinase cleavage site. The histidine residues facilitate purification on IMIAC (immobilized metal ion affinity chromatography; See e.g., Porath et al., Prot. Exp. Purif., 3:263-281 [1992]) while the enterokinase cleavage site provides a means for separating the variant engineered P450-BM3 polypeptide from the fusion protein. pGEX vectors (Promega) may also be used to express foreign polypeptides as fusion proteins with glutathione S-transferase (GST). In general, such fusion proteins are soluble and can easily be purified from lysed cells by adsorption to ligand-agarose beads (e.g., glutathione-agarose in the case of GST-fusions) followed by elution in the presence of free ligand.

[0177] Accordingly, in another aspect, the present invention provides methods of producing the engineered enzyme polypeptides, where the methods comprise culturing a host cell capable of expressing a polynucleotide encoding the engineered enzyme polypeptide under conditions suitable for expression of the polypeptide. In some embodiments, the methods further comprise the steps of isolating and/or purifying the enzyme polypeptides, as described herein.

[0178] Appropriate culture media and growth conditions for host cells are well known in the art. It is contemplated that any suitable method for introducing polynucleotides for expression of the enzyme polypeptides into cells will find use in the present invention. Suitable techniques include, but are not limited to electroporation, biolistic particle bombardment, liposome mediated transfection, calcium chloride transfection, and protoplast fusion.

[0179] The engineered P450-BM3 with the properties disclosed herein can be obtained by subjecting the polynucleotide encoding the naturally occurring or engineered P450-BM3 polypeptide to mutagenesis and/or directed evolution methods known in the art, and as described herein. An exemplary directed evolution technique is mutagenesis and/or DNA shuffling (See e.g., Stemmer, Proc. Natl. Acad. Sci. USA 91:10747-10751 [1994]; WO 95/22625; WO 97/0078; WO 97/35966; WO 98/27230; WO 00/42651; WO 01/75767 and U.S. Pat. No. 6,537,746). Other directed evolution procedures that can be used include, among others, staggered extension process (StEP), in vitro recombination (See e.g., Zhao et al., Nat. Biotechnol., 16:258-261 [1998]), mutagenic PCR (See e.g., Caldwell et al., PCR Methods Appl., 3:S136-S140 [1994]), and cassette mutagenesis (See e.g., Black et al., Proc. Natl. Acad. Sci. USA 93:3525-3529 [1996]).

[0180] For example, mutagenesis and directed evolution methods can be readily applied to polynucleotides to generate variant libraries that can be expressed, screened, and assayed. Mutagenesis and directed evolution methods are well known in the art (See e.g., U.S. Pat. Nos. 5,605,793, 5,811,238, 5,830,721, 5,834,252, 5,837,458, 5,928,905, 6,096,548, 6,117,679, 6,132,970, 6,165,793, 6,180,406, 6,251,674, 6,265,201, 6,277,638, 6,287,861, 6,287,862, 6,291,242, 6,297,053, 6,303,344, 6,309,883, 6,319,713, 6,319,714, 6,323,030, 6,326,204, 6,335,160, 6,335,198, 6,344,356, 6,352,859, 6,355,484, 6,358,740, 6,358,742, 6,365,377, 6,365,408, 6,368,861, 6,372,497, 6,337,186, 6,376,246, 6,379,964, 6,387,702, 6,391,552, 6,391,640, 6,395,547, 6,406,855, 6,406,910, 6,413,745, 6,413,774, 6,420,175, 6,423,542, 6,426,224, 6,436,675, 6,444,468, 6,455,253, 6,479,652, 6,482,647, 6,483,011, 6,484,105, 6,489,146, 6,500,617, 6,500,639, 6,506,602, 6,506,603, 6,518,065, 6,519,065, 6,521,453, 6,528,311, 6,537,746, 6,573,098, 6,576,467, 6,579,678, 6,586,182, 6,602,986, 6,605,430, 6,613,514, 6,653,072, 6,686,515, 6,703,240, 6,716,631, 6,825,001, 6,902,922, 6,917,882, 6,946,296, 6,961,664, 6,995,017, 7,024,312, 7,058,515, 7,105,297, 7,148,054, 7,220,566, 7,288,375, 7,384,387, 7,421,347, 7,430,477, 7,462,469, 7,534,564, 7,620,500, 7,620,502, 7,629,170, 7,702,464, 7,747,391, 7,747,393, 7,751,986, 7,776,598, 7,783,428, 7,795,030, 7,853,410, 7,868,138, 7,783,428, 7,873,477, 7,873,499, 7,904,249, 7,957,912, 7,981,614, 8,014,961, 8,029,988, 8,048,674, 8,058,001, 8,076,138, 8,108,150, 8,170,806, 8,224,580, 8,377,681, 8,383,346, 8,457,903, 8,504,498, 8,589,085, 8,762,066, 8,768,871, 9,593,326, 9,665,694, 9,684,771, and all related US, as well as PCT and non-US counterparts; Ling et al., Anal. Biochem., 254(2):157-78 [1997]; Dale et al., Meth. Mol. Biol., 57:369-74 [1996]; Smith, Ann. Rev. Genet., 19:423-462 [1985]; Botstein et al., Science, 229:1193-1201 [1985]; Carter, Biochem. J., 237:1-7 [1986]; Kramer et al., Cell, 38:879-887 [1984]; Wells et al., Gene, 34:315-323 [1985]; Minshull et al., Curr. Op. Chem. Biol., 3:284-290 [1999]; Christians et al., Nat. Biotechnol., 17:259-264 [1999]; Crameri et al., Nature, 391:288-291 [1998]; Crameri, et al., Nat. Biotechnol., 15:436-438 [1997]; Zhang et al., Proc. Nat. Acad. Sci. U.S.A., 94:4504-4509 [1997]; Crameri et al., Nat. Biotechnol., 14:315-319 [1996]; Stemmer, Nature, 370:389-391 [1994]; Stemmer, Proc. Nat. Acad. Sci. USA, 91:10747-10751 [1994]; WO 95/22625; WO 97/0078; WO 97/35966; WO 98/27230; WO 00/42651; WO 01/75767; and WO 2009/152336, all of which are incorporated herein by reference).

[0181] In some embodiments, the enzyme clones obtained following mutagenesis treatment are screened by subjecting the enzymes to a defined temperature (or other assay conditions, such as testing the enzyme's activity on Compound (1)) and measuring the amount of enzyme activity remaining after heat treatments or other assay conditions. Clones containing a polynucleotide encoding a P450-BM3 polypeptide are then sequenced to identify the nucleotide sequence changes (if any), and used to express the enzyme in a host cell. Measuring enzyme activity from the expression libraries can be performed using any suitable method known in the art (e.g., standard biochemistry techniques, such as HPLC analysis).

[0182] For engineered polypeptides of known sequence, the polynucleotides encoding the enzyme can be prepared by standard solid-phase methods, according to known synthetic methods. In some embodiments, fragments of up to about 100 bases can be individually synthesized, then joined (e.g., by enzymatic or chemical ligation methods, or polymerase mediated methods) to form any desired continuous sequence. For example, polynucleotides and oligonucleotides disclosed herein can be prepared by chemical synthesis using the classical phosphoramidite method (See e.g., Beaucage et al., Tetra. Lett., 22:1859-69 [1981]; and Matthes et al., EMBO J., 3:801-05 [1984]), as it is typically practiced in automated synthetic methods. According to the phosphoramidite method, oligonucleotides are synthesized (e.g., in an automatic DNA synthesizer), purified, annealed, ligated and cloned in appropriate vectors.

[0183] Accordingly, in some embodiments, a method for preparing the engineered P450-BM3 polypeptide can comprise: (a) synthesizing a polynucleotide encoding a polypeptide comprising greater than 85% identity to an amino acid sequence selected from the amino acid sequence of any variant provided in any of Tables 2.1, 3.1, 4.1, 5.1, 6.1, 7.1, 8.1, 9.1, 10.1, 10.2, 11.1, 11.2, 12.1, 13.1, 14.1, 14.2, 15.1, 16.1, 17.1, 17.2, 18.1, 19.1, and 19.2, as well as SEQ ID NO: 4, 36, 66, 72, 198, 226, 244, 286, 358, 410, 534, 734, 748, 828, 968, 984, 1160, or 1266, and (b) expressing the P450-BM3 polypeptide encoded by the polynucleotide. In some embodiments of the method, the amino acid sequence encoded by the polynucleotide can optionally have one or several (e.g., up to 3, 4, 5, or up to 10) amino acid residue deletions, insertions and/or substitutions. In some embodiments, the amino acid sequence has optionally 1-2, 1-3, 1-4, 1-5, 1-6, 1-7, 1-8, 1-9, 1-10, 1-15, 1-20, 1-21, 1-22, 1-23, 1-24, 1-25, 1-30, 1-35, 1-40, 1-45, or 1-50 amino acid residue deletions, insertions and/or substitutions. In some embodiments, the amino acid sequence has optionally 1, 2, 3, 4, 5, 6, 7, 8, 9, 10, 11, 12, 13, 14, 15, 16, 17, 18, 19, 20, 21, 22, 23, 24, 25, 30, 30, 35, 40, 45, or 50 amino acid residue deletions, insertions and/or substitutions. In some embodiments, the amino acid sequence has optionally 1, 2, 3, 4, 5, 6, 7, 8, 9, 10, 11, 12, 13, 14, 15, 16, 18, 20, 21, 22, 23, 24, or 25 amino acid residue deletions, insertions and/or substitutions. In some embodiments, the substitutions can be conservative or non-conservative substitutions.

[0184] The foregoing and other aspects of the invention may be better understood in connection with the following non-limiting examples. The examples are provided for illustrative purposes only and are not intended to limit the scope of the present invention in any way.

### EXPERIMENTAL

[0185] The following Examples, including experiments and results achieved, are provided for illustrative purposes only and are not to be construed as limiting the present invention.

[0186] In the experimental disclosure below, the following abbreviations apply: ppm (parts per million); M (molar); mM (millimolar), uM and μM (micromolar); nM (nanomolar); mol (moles); gm and g (gram); mg (milligrams); ug and μg (micrograms); L and 1 (liter); ml and mL (milliliter); cm (centimeters); mm (millimeters); um and μm (micrometers); sec. (seconds); min(s) (minute(s)); h(s) and hr(s) (hour(s)); U (units); MW (molecular weight); rpm (rotations per minute); ° C. (degrees Celsius); CDS (coding sequence); DNA (deoxyribonucleic acid); RNA (ribonucleic acid); NA (nucleic acid; polynucleotide); AA (amino acid; polypeptide); E. coli W3110 (commonly used laboratory E. coli strain, available from the Coli Genetic Stock Center [CGSC], New Haven, CT); HPLC (high pressure liquid chromatography); SDS-PAGE (sodium dodecyl sulfate polyacrylamide gel electrophoresis); PES (polyethersulfone); CFSE (carboxyfluorescein succinimidyl ester); IPTG (isopropyl beta-D-1-thiogalactopyranoside); PMBS (polymyxin B sulfate); NADPH (nicotinamide adenine dinucleotide phosphate); GDH (glucose dehydrogenase); TON (turnover number); FIOPC (fold improvement over positive control); TON (turnover number); ESI (electrospray ionization); LB (Luria broth);TB (terrific broth); MeOH (methanol); Athens Research (Athens Research Technology, Athens, GA); ProSpec (ProSpec Tany Technogene, East Brunswick, NJ); Sigma-Aldrich (Sigma-Aldrich, St. Louis, MO); Ram Scientific (Ram Scientific, Inc., Yonkers, NY); Pall Corp. (Pall, Corp., Pt. Washington, NY); Millipore (Millipore, Corp., Billerica MA); Difco (Difco Laboratories, BD Diagnostic Systems, Detroit, MI); Molecular Devices (Molecular Devices, LLC, Sunnyvale, CA); Kuhner (Adolf Kuhner, AG, Basel, Switzerland); Cambridge Isotope Laboratories, (Cambridge Isotope Laboratories, Inc., Tewksbury, MA); Applied Biosystems (Applied Biosystems, part of Life Technologies, Corp., Grand Island, NY), Agilent (Agilent Technologies, Inc., Santa Clara, CA); Thermo Scientific (part of Thermo Fisher Scientific, Waltham, MA); Fisher (Fisher Scientific, Waltham, MA); Corning (Corning, Inc., Palo Alto, CA); Waters (Waters Corp., Milford, MA); GE Healthcare (GE Healthcare Bio-Sciences, Piscataway, NJ); Pierce (Pierce Biotechnology (now part of Thermo Fisher Scientific), Rockford, IL); Phenomenex (Phenomenex, Inc., Torrance, CA); Optimal (Optimal Biotech Group, Belmont, CA); and Bio-Rad (Bio-Rad Laboratories, Hercules, CA).

### Example 1

Production of Engineered Polypeptides in pCK110900

[0187] The polynucleotide (SEQ ID NO: 3) encoding the polypeptide having monooxygenase activity (SEQ ID NO: 4), was cloned into the pCK110900 vector system (See e.g., U.S. Pat. No. 9,714,437, which is hereby incorporated by reference in its entirety) and subsequently expressed in E. coli W3110fhuA under the control of the lac promoter. This polynucleotide, and associated polypeptide, were derived from a previously engineered Bacillus megaterium variant (see U.S. Appln. No. 63/384,746.)

[0188] In a 96-well format, single colonies were picked and grown in 190 μL LB media containing 1% glucose and 30 μg/mL CAM at 30° C., 200 rpm, and 85% humidity. Following overnight growth, 20 μL of the grown cultures were transferred into a deep-well plate containing 380 μL of TB media with 30 μg/mL CAM. The cultures were grown at 30° C., 250 rpm, and 85% humidity for approximately 2.5 hours. When the optical density (OD₆₀₀) of the cultures reached 0.4-0.6, expression of the monooxygenase gene was induced by the addition of IPTG to a final concentration of 1 mM. Following induction, growth continued for 18-20 hours at 30° C., 250 rpm with 85% humidity. Cells were harvested by centrifugation at 4,000 rpm and 4° C. for 10 minutes; the supernatant was then discarded. The cell pellets were stored at −80° C. until ready for use.

[0189] Prior to performing the assay, the cell pellets were thawed and resuspended in 200 or 300 μL of lysis buffer containing 1 g/L lysozyme, 0.5 g/L PMBS, and 0.025 μL/mL of commercial DNAse (New England BioLabs, M0303L) in 0.1 M potassium phosphate buffer, pH 8.0. The plates were agitated with medium-speed shaking for 2 hours on a microtiter plate shaker at room temperature. The plates were then centrifuged at 4,000 rpm for 10 minutes at 4° C., and the clarified supernatants were used in the HTP assay reaction described in the following examples.

[0190] Shake-flask procedures can be used to generate engineered monooxygenase shake-flask powders (SFP), which are useful for secondary screening assays and/or use in the biocatalytic processes described herein. Shake flask powder preparation of enzymes provides a more purified preparation (e.g., up to 30% of total protein) of the engineered enzyme, as compared to the cell lysate used in HTP assays and also allows for the use of more concentrated enzyme solutions. To start the culture, a 10 uL aliquot of a glycerol stock of E. coli containing a plasmid encoding an engineered polypeptide of interest was inoculated into 8 mL of LB cell culture media with 30 μg/mL CAM and 1% glucose. The culture was grown overnight (at least 16 hours) in an incubator at 30° C. with shaking at 250 rpm. The grown culture was then added to 250 mL of TB media with g/mL CAM in a 1-L shake-flask. The 250 mL culture was grown at 30° C. and 250 rpm for 3.5 hours until OD₆₀₀ reached 0.6-0.8. Expression of the monooxygenase gene was induced by the addition of IPTG to a final concentration of 1 mM, and growth was continued for an additional 18-20 hours. Cells were harvested by transferring the culture into a pre-weighed centrifuge bottle which was then centrifuged at 4,000 rpm for 10 minutes at 4° C. The supernatant was discarded, and the remaining cell pellet was weighed. In some embodiments, the cell pellet was stored at −80° C. until ready to use. For lysis, the cell pellet was resuspended in 6 mL/g wet cell weight of 25 mM potassium phosphate at pH 8.0 lysed using a 110L MICROFLUIDIZER® processor system (Microfluidics). Cell debris was removed by centrifugation at 10,000 rpm for 60 minutes at 4° C. The clarified lysate was collected, frozen at −80° C., and then lyophilized, using standard methods known in the art. Lyophilization of frozen clarified lysate provides a dry shake-flask powder comprising crude engineered polypeptide.

### Example 2

Evolution and Screening of Engineered Polypeptides Derived from SEQ ID NO: 4 for Improved Production of Compound (2)

[0191] The engineered polynucleotide (SEQ ID NO: 3) encoding the polypeptide with monooxygenase activity of SEQ ID NO: 4 was used to generate the engineered polypeptides of Table 2.1. These polypeptides displayed improved monooxygenase activity under the desired conditions e.g., the improvement in the formation of the alcohol Compound (2), from the substrate Compound (1), as compared to the starting polypeptide. The engineered polypeptides, having the amino acid sequences of even-numbered sequence identifiers were generated from the “backbone” amino acid sequence of SEQ ID NO: 4, as described below.

[0192] Directed evolution began with the polynucleotide set forth in SEQ ID NO: 3. Libraries of engineered polypeptides were generated using various techniques (e.g., saturation mutagenesis, recombination of previously identified beneficial amino acid differences) and screened using HTP assay and analysis methods that measured the polypeptides' ability to produce Compound (2).

[0193] The enzyme assays were carried out in 96-well deep-well (1.1 mL total volume) plates, in 100 μL total reaction volume per well. The reactions contained 75 v/v % of undiluted monooxygenase lysate, prepared as described in EXAMPLE 1, 1 g/L Compound (1), 1 g/L NADPH, 1 g/L GDH-105, 3.6 g/L glucose and dissolved in 100 mM potassium phosphate buffer, pH 8. The reaction plates were sealed with an aeropore seal and shaken at 600 rpm at 30° C. with 85% humidity for 18 hours.

[0194] After overnight incubation, 100 μL/well of acetonitrile was added to the reaction plates and mixed well. The plates were sealed and centrifuged at 4,000 rpm for 10 min. An aliquot of the supernatant was removed and further diluted 10-fold into 1:1 acetonitrile:water for achiral LC-MS analysis according to the method in Table 2.2.

TABLE 2.1
Activity of Monooxygenase Variants Relative to SEQ ID NO: 4

| | | FIOP (alcohol |
|---|---|---|
| | | peak area) |
| SEQ ID NO: | Amino Acid Differences (Relative to | Relative to |
| (nt/aa) | SEQ ID NO: 4) | SEQ ID NO: 4 |
| 3/4 | | 1 |
| 5/6 | L83A/F88A/N574T | +++ |
| 7/8 | R32K/L83A/F88A/N574T | +++ |
| 9/10 | L83A/F88A/R111Q/V433D | +++ |
| 11/12 | L83A/F88A/G105L | ++++ |
| 13/14 | R32K/L83A/F88A | ++++ |
| 15/16 | F52Y/L83A/F88A/V433D/N574T | +++ |
| 17/18 | L83A/F88A/T349E | ++++ |
| 19/20 | L83A/F88A/S231R | ++++ |
| 21/22 | F52Y/L83A/F88A/N574T | ++++ |
| 23/24 | R32K/L83A/F88A/V176I | +++ |
| 25/26 | F52Y/L83A/F88A/S231R/V433D/N574T | +++ |
| 27/28 | F52Y/L83A/F88A/V433D | +++ |
| 29/30 | F52Y/L83A/F88A | +++ |
| 31/32 | L83A/F88A | +++ |
| 33/34 | R32K/L83A/F88A/S231R/N574T | +++ |
| 35/36 | F52Y/L83A/F88A/G105V | +++ |
| 37/38 | F52Y/L83A/F88A/S231R | ++++ |
| 39/40 | L83A/F88A/R111Q/N574T | +++ |
| 41/42 | L83A/F88A/R111Q | +++ |
| 43/44 | L83A/F88A/V433D/N574T | +++ |

Levels of increased activity were determined relative to the reference polypeptide of SEQ ID NO: 4 and defined as follows:, “+++” >300, “++++” >500.

TABLE 2.2
Achiral HPLC-MS/MS Method Parameters

| Instrument | | Agilent 1200 series HPLC with a PAL autosampler | | | |
|---|---|---|---|---|---|
| | | and a Sciex 4000 QTRAP mass spectrometer | | | |
| Column | | Agilent Zorbax C18, 150 × 4.6 mm × 5 μm | | | |
| Mobile Phases | | A: 0.1% formic acid in water | | | |
| | | B: 0.1% formic acid in acetonitrile | | | |
| LC Gradient | | 0-0.5 min: 40% B | | | |
| | | 0.51-1.75 min: 100% B | | | |
| | | 1.76-3 min: 40% B | | | |
| Flow rate | | 1 mL/min | | | |
| Run time | | 3 min | | | |
| Column temperature | | 50° C. | | | |
| Injection volume | | 10 μL | | | |
| MS Scan Type | | MRM, positive mode | | | |
| MS Source Temperature | | 450° C. | | | |
| Ionspray voltage | | 5000 | | | |
| Ion Source Gas 1 | | 50 | | | |
| Ion Source Gas 2 | | 50 | | | |
| Declustering potential | | 40 | | | |
| Entrance potential | | 10 | | | |
| Collision cell exit potential | | 15 | | | |
| | Retention | Q1 Mass | Q3 Mass | Collision | Dwell |
| Compound | time | (Da) | (Da) | energy | Time |
| Compound (1) | 2.67 | 230.4 | 84.3 | 30 | 200 msec |
| Compound (2) | 1.73 | 246.4 | 100.4 | 30 | 200 msec |
| Compound (3) | 2.23 | 244.5 | 124.4 | 30 | 200 msec |

### Example 3

Evolution and Screening of Engineered Polypeptides Derived from SEQ ID NO: 36 for Improved Production of Compound (2)

[0195] The engineered polynucleotide (SEQ ID NO: 35) encoding the polypeptide with monooxygenase activity of SEQ ID NO: 36 was used to generate the engineered polypeptides of Table 3.1. These polypeptides displayed improved monooxygenase activity under the desired conditions e.g., the improvement in the formation of the alcohol Compound (2), from the substrate Compound (1), as compared to the starting polypeptide. The engineered polypeptides, having the amino acid sequences of even-numbered sequence identifiers were generated from the “backbone” amino acid sequence of SEQ ID NO: 36, as described below.

[0196] Directed evolution began with the polynucleotide set forth in SEQ ID NO: 35. Libraries of engineered polypeptides were generated using various techniques (e.g., saturation mutagenesis, recombination of previously identified beneficial amino acid differences) and screened using HTP assay and analysis methods that measured the polypeptides' ability to produce Compound (2).

[0197] The enzyme assays were carried out in 96-well deep-well (1.1 mL total volume) plates, in 100 μL total reaction volume per well. The reactions contained 5 v/v % of undiluted monooxygenase lysate, prepared as described in EXAMPLE 1, 5 g/L Compound (1), 1 g/L NADPH, 1 g/L GDH-105, 8 g/L glucose and dissolved in 100 mM potassium phosphate buffer, pH 8. The reaction plates were sealed with an aeropore seal and shaken at 600 rpm at 30° C. with 85% humidity for 18 hours.

[0198] After overnight incubation, 400 μL/well of acetonitrile was added to the reaction plates and mixed well. The plates were sealed and centrifuged at 4,000 rpm for 10 min. An aliquot of the supernatant was removed and further diluted 10-fold into 1:1 acetonitrile:water for achiral LC-MS analysis according to the method in Table 2.2.

TABLE 3.1
Activity of Monooxygenase Variants Relative to SEQ ID NO: 36

| | | FIOP (alcohol |
|---|---|---|
| | | peak area) |
| SEQ ID NO: | Amino Acid Differences (Relative to | Relative to |
| (nt/aa) | SEQ ID NO: 36) | SEQ ID NO: 36 |
| 45/46 | A75S/E374S/Q726L | +++ |
| 47/48 | A75S/Q726L | +++ |
| 49/50 | A75S/G458L/Q726L | ++ |
| 51/52 | A75S/E374S | +++ |
| 53/54 | A75S/G458L | +++ |
| 55/56 | A75S | ++ |
| 57/58 | Q726L | +++ |
| 59/60 | A75S/E374S/G458L/Q726L | +++ |
| 61/62 | E374S/Q726L | +++ |
| 63/64 | R111H/S623Q | ++ |
| 65/66 | R111H/K114G | + |
| 67/68 | R111H/E603F/A604G/S623Q/P853E | ++ |

Levels of increased activity were determined relative to the reference polypeptide of SEQ ID NO: 4 and defined as follows: “+” >0.9, “++” >1.1, “+++” >1.5, “++++” >3.

### Example 4

Evolution and Screening of Engineered Polypeptides Derived from SEQ ID NO: 66 for Improved Production of Compound (2)

[0199] The engineered polynucleotide (SEQ ID NO: 65) encoding the polypeptide with monooxygenase activity of SEQ ID NO: 66 was used to generate the engineered polypeptides of Table 4.1. These polypeptides displayed improved monooxygenase activity under the desired conditions e.g., the improvement in the formation of the alcohol Compound (2), from the substrate Compound (1), as compared to the starting polypeptide. The engineered polypeptides, having the amino acid sequences of even-numbered sequence identifiers were generated from the “backbone” amino acid sequence of SEQ ID NO: 66, as described below.

[0200] Directed evolution began with the polynucleotide set forth in SEQ ID NO: 65. Libraries of engineered polypeptides were generated using various techniques (e.g., saturation mutagenesis, recombination of previously identified beneficial amino acid differences) and screened using HTP assay and analysis methods that measured the polypeptides' ability to produce Compound (2).

[0201] The enzyme assays were carried out in 96-well deep-well (1.1 mL total volume) plates, in 100 μL total reaction volume per well. The reactions contained 5 v/v % of undiluted monooxygenase lysate, prepared as described in EXAMPLE 1, 5 g/L Compound (1), 1 g/L NADPH, 1 g/L GDH-105, 8 g/L glucose and dissolved in 100 mM potassium phosphate buffer, pH 8. The reaction plates were sealed with an aeropore seal and shaken at 600 rpm at 30° C. with 85% humidity for 18 hours.

[0202] After overnight incubation, 400 μL/well of acetonitrile was added to the reaction plates and mixed well. The plates were sealed and centrifuged at 4,000 rpm for 10 min. An aliquot of the supernatant was removed and further diluted 10-fold into 1:1 acetonitrile:water for achiral LC-MS analysis according to the method in Table 2.2.

TABLE 4.1
Activity of Monooxygenase Variants Relative to SEQ ID NO: 66

| | Amino Acid Differences | Alcohol FIOP |
|---|---|---|
| SEQ ID NO: | (Relative to SEQ ID | Relative to |
| (nt/aa) | NO: 66) | SEQ ID NO: 66 |
| 69/70 | T328V | +++ |
| 71/72 | L438R | ++++ |
| 73/74 | L182V | ++ |
| 75/76 | L189T | ++ |
| 77/78 | L182I | ++ |
| 79/80 | M186R | +++ |
| 81/82 | A331F | +++ |
| 83/84 | M355V | + |
| 85/86 | H267T | +++ |
| 87/88 | A75K | +++ |
| 89/90 | T328S | ++ |
| 91/92 | A331T | +++ |
| 93/94 | L189G | + |
| 95/96 | A181V | +++ |
| 97/98 | A331M | +++ |
| 99/100 | M238L | +++ |
| 101/102 | Q74G | ++ |
| 103/104 | I358T | ++ |
| 105/106 | V179M | ++ |
| 107/108 | T437S | +++ |
| 109/110 | A83V | ++ |
| 111/112 | T437G | +++ |
| 113/114 | I358V | +++ |
| 115/116 | V179R | +++ |
| 117/118 | E268Q | ++++ |
| 119/120 | A75T | ++ |

Levels of increased activity were determined relative to the reference polypeptide of SEQ ID NO: 66 and defined as follows: “+” >1, “++” >1.1, “+++” >1.5, “++++” >3.

### Example 5

Evolution and Screening of Engineered Polypeptides Derived from SEQ ID NO: 72 for Improved Production of Compounds (2) and (3)

[0203] The engineered polynucleotide (SEQ ID NO: 71) encoding the polypeptide with monooxygenase activity of SEQ ID NO: 72 was used to generate the engineered polypeptides of Table 5.1. These polypeptides displayed improved monooxygenase activity under the desired conditions e.g., the improvement in the formation of the alcohol Compound (2) and/or ketone compound (3), from the substrate Compound (1), as compared to the starting polypeptide. The engineered polypeptides, having the amino acid sequences of even-numbered sequence identifiers were generated from the “backbone” amino acid sequence of SEQ ID NO: 72, as described below.

[0204] Directed evolution began with the polynucleotide set forth in SEQ ID NO: 71. Libraries of engineered polypeptides were generated using various techniques (e.g., saturation mutagenesis, recombination of previously identified beneficial amino acid differences) and screened using HTP assay and analysis methods that measured the polypeptides' ability to produce Compound (2) or (3).

[0205] The enzyme assays were carried out in 96-well deep-well (1.1 mL total volume) plates, in 100 μL total reaction volume per well. The reactions contained 2 v/v % of undiluted monooxygenase lysate, prepared as described in EXAMPLE 1, 5 g/L Compound (1), 1 g/L NADPH, 0.1 g/L GDH-105, 8 g/L glucose and dissolved in 100 mM potassium phosphate buffer, pH 8. The reaction plates were sealed with an aeropore seal and shaken at 600 rpm at 30° C. with 85% humidity for 18 hours.

[0206] After overnight incubation, 400 μL/well of acetonitrile was added to the reaction plates and mixed well. The plates were sealed and centrifuged at 4,000 rpm for 10 min. An aliquot of the supernatant was removed and further diluted 40-fold into 1:1 acetonitrile:water for achiral LC-MS analysis.

TABLE 5.1
Activity of Monooxygenase Variants Relative to SEQ ID NO: 72

| | | | Alcohol |
|---|---|---|---|
| | | Ketone peak | peak area |
| | | area FIOP | FIOP |
| SEQ ID | | Relative to | Relative to |
| NO: | Amino Acid Differences | SEQ ID | SEQ ID |
| (nt/aa) | (Relative to SEQ ID NO: 72) | NO: 72 | NO: 72 |
| 121/122 | A83V/E268Q/T328S/A331M/ | ++ | |
| | M355V/I358V | | |
| 123/124 | A83V/L182I/E268Q/T328V/ | ++ | |
| | M355V/I358V/T437S | | |
| 125/126 | A83V/L189G/E268Q/T328V/ | ++ | +++ |
| | M355V/I358V/T437G | | |
| 127/128 | Q74G/H267T/E268Q/T328V | ++ | ++ |
| 129/130 | A83V/L182I/L189G/T328V/ | ++ | ++ |
| | A331M | | |
| 131/132 | A75T/A83V/L189G/H267T/E268Q | ++ | +++ |
| 133/134 | L189G/H267T/E268Q/T437S | ++ | +++ |
| 135/136 | A83V/V179R/T328V/A331M | +++ | ++++ |
| 137/138 | A83V/E268Q/T328S/A331M/ | +++ | +++ |
| | I358T/T437G | | |
| 139/140 | E268Q/I358V | +++ | + |
| 141/142 | E268Q/T328V/A331M | +++ | |
| 143/144 | T328V/A331M/I358T | ++ | +++ |
| 145/146 | L189G/E268Q/I358V | +++ | ++ |
| 147/148 | A83V/E268Q/A331T | +++ | +++ |
| 149/150 | A83V/V179R/M355V/I358V/T437G | ++ | +++ |
| 151/152 | Q74G/A75T/A83V/V179R/L189G/ | ++ | |
| | T328V/A331T/T437G | | |
| 153/154 | A75T/A83V/H267T/E268Q/M355V/ | +++ | ++++ |
| | I358V/M654L | | |
| 155/156 | Q74G/A75T/E268Q/T328V/A331T/ | +++ | +++ |
| | I358V/T437S | | |
| 157/158 | A83V/A331T/T437S | ++ | +++ |
| 159/160 | Q74G/A83V/E268Q/T328S/A331M/ | +++ | +++ |
| | I358V/T437G | | |
| 161/162 | A83V/E268Q | +++ | |
| 163/164 | V179R/L189G/A331M/T437S | ++ | +++ |
| 165/166 | V179R/L182I/E268Q | +++ | |
| 167/168 | L189G/E268Q/T328V/A331T/I358V/ | +++ | ++++ |
| | T437S | | |
| 169/170 | A83V/V179R/L182V/T437S | ++ | ++ |
| 171/172 | A83V/V179R/L189G/A331M/ | ++ | +++ |
| | M355V | | |
| 173/174 | A75T/A83V/V179R/L189G/A331M | ++ | +++ |
| 175/176 | A83V/L182I/L189G/E268Q/T328V/ | ++ | +++ |
| | A331M/M355V/I358V/T437G | | |
| 177/178 | A83V/A331M | ++ | +++ |
| 179/180 | A75T/E268Q/T328V/A331T/I358T | ++++ | +++ |
| 181/182 | L189G/E268Q/T328V | ++ | + |
| 183/184 | A83V/H267T/E268Q/T328V/ | +++ | +++ |
| | A331M/M355V/I358T | | |
| 185/186 | H267T/E268Q/A331T/M355V/ | +++ | +++ |
| | I358T/T437S | | |
| 187/188 | A83V/I358V/T437S | ++ | ++ |
| 189/190 | A83V/L189G/T328V/A331M/T437G | ++ | + |
| 191/192 | E268Q/T328V/M355V/I358T | +++ | ++++ |
| 193/194 | A83V/E268Q/T328V/A331M | +++ | +++ |
| 195/196 | A75T/A83V/V179R/E268Q/T328V/ | +++ | +++ |
| | A331M/T437G | | |
| 197/198 | A83V/E268Q/T328V/A331M/I358V | ++++ | ++++ |
| 199/200 | A83V/L189G/E268Q/T328V/A331M | +++ | +++ |
| 201/202 | V179R/A331M/I358V | ++ | +++ |
| 203/204 | E268Q/A331M/M355V/I358V | +++ | +++ |
| 205/206 | A83V/E268Q/T328S/A331T/T437G | +++ | +++ |
| 207/208 | A83V/L189G/H267T/E268Q/I358T | +++ | +++ |
| 209/210 | E268Q/M355V/I358V/T437G | ++ | +++ |
| 211/212 | H267T/E268Q/T328V | ++ | ++ |
| 213/214 | E268Q | ++ | |
| 215/216 | A75T/A83V/E268Q/T437G | ++ | ++ |
| 217/218 | H267T/E268Q/T328V/A331M/ | ++ | +++ |
| | M355V/I358T | | |
| 219/220 | V179R/T328V/A331M | ++ | ++++ |

Levels of increased activity for ketone peak area FIOP were determined relative to the reference polypeptide of SEQ ID NO: 72 and defined as follows: “+” >1.5, “++” >5, “+++” >10, “++++” >50.
Levels of increased activity for alcohol peak area FIOP were determined relative to the reference polypeptide of SEQ ID NO: 72 and defined as follows: “+” >1, “++” >1.15, “+++” >1.5, “++++” >3.

### Example 6

Evolution and Screening of Engineered Polypeptides Derived from SEQ ID NO: 198 for Improved Production of Compound (2)

[0207] The engineered polynucleotide (SEQ ID NO: 197) encoding the polypeptide with monooxygenase activity of SEQ ID NO: 198 was used to generate the engineered polypeptides of Table 6.1. These polypeptides displayed improved monooxygenase activity under the desired conditions e.g., the improvement in the formation of the alcohol Compound (2), from the substrate Compound (1), as compared to the starting polypeptide. The engineered polypeptides, having the amino acid sequences of even-numbered sequence identifiers were generated from the “backbone” amino acid sequence of SEQ ID NO: 198, as described below.

[0208] Directed evolution began with the polynucleotide set forth in SEQ ID NO: 197. Libraries of engineered polypeptides were generated using various techniques (e.g., saturation mutagenesis, recombination of previously identified beneficial amino acid differences) and screened using HTP assay and analysis methods that measured the polypeptides' ability to produce Compound (2).

[0209] The enzyme assays were carried out in 96-well deep-well (1.1 mL total volume) plates, in 100 μL total reaction volume per well. The reactions contained 35 v/v % of undiluted monooxygenase lysate, prepared as described in EXAMPLE 1, 10 g/L Compound (1), 1 g/L NADPH, 0.1 g/L GDH-105, 16 g/L glucose and dissolved in 100 mM potassium phosphate buffer, pH 8. The reaction plates were sealed with an aeropore seal and shaken at 600 rpm at 30° C. with 85% humidity for 18 hours.

[0210] After overnight incubation, 200 μL/well of acetonitrile was added to the reaction plates and mixed well. The plates were sealed and centrifuged at 4,000 rpm for 10 min. An aliquot of the supernatant was removed and further diluted 80-fold into 1:1 acetonitrile:water for achiral LC-MS analysis according to the method in Table 2.2.

TABLE 6.1
Activity of Monooxygenase Variants Relative to SEQ ID NO: 198

| SEQ ID NO: | Amino Acid Differences | alcohol Relative |
|---|---|---|
| (nt/aa) | (Relative to SEQ ID NO: 198) | to SEQ ID NO: 198 |
| 221/222 | A79I | + |
| 223/224 | M213V | + |
| 225/226 | Y257Q | + |

Levels of increased activity were determined relative to the reference polypeptide of SEQ ID NO: 198 and defined as follows: “+” >0.9, “++” >1.10.

### Example 7

Evolution and Screening of Engineered Polypeptides Derived from SEQ ID NO: 226 for Improved Production of Compound (2)

[0211] The engineered polynucleotide (SEQ ID NO: 225) encoding the polypeptide with monooxygenase activity of SEQ ID NO: 226 was used to generate the engineered polypeptides of Table 7.1. These polypeptides displayed improved monooxygenase activity under the desired conditions e.g., the improvement in the formation of the alcohol Compound (2), from the substrate Compound (1), as compared to the starting polypeptide. The engineered polypeptides, having the amino acid sequences of even-numbered sequence identifiers were generated from the “backbone” amino acid sequence of SEQ ID NO: 226, as described below.

[0212] Directed evolution began with the polynucleotide set forth in SEQ ID NO: 225. Libraries of engineered polypeptides were generated using various techniques (e.g., saturation mutagenesis, recombination of previously identified beneficial amino acid differences) and screened using HTP assay and analysis methods that measured the polypeptides' ability to produce Compound (2).

[0213] The enzyme assays were carried out in 96-well deep-well (1.1 mL total volume) plates, in 100 μL total reaction volume per well. The reactions contained 5 v/v % of undiluted monooxygenase lysate, prepared as described in EXAMPLE 1, 10 g/L Compound (1), 1 g/L NADPH, 0.1 g/L GDH-105, 16 g/L glucose and dissolved in 100 mM potassium phosphate buffer, pH 8. The reaction plates were sealed with an aeropore seal and shaken at 600 rpm at 30° C. with 85% humidity for 18 hours.

[0214] After overnight incubation, 400 μL/well of acetonitrile was added to the reaction plates and mixed well. The plates were sealed and centrifuged at 4,000 rpm for 10 min. An aliquot of the supernatant was removed and further diluted 80-fold into 1:1 acetonitrile:water for achiral LC-MS analysis according to the method in Table 2.2.

TABLE 7.1
Activity of Monooxygenase Variants Relative to SEQ ID NO: 226

| | | Alcohol FIOP |
|---|---|---|
| SEQ ID NO: | Amino Acid Differences (Relative | Relative to SEQ |
| (nt/aa) | to SEQ ID NO: 226) | ID NO: 226 |
| 227/228 | A502T | ++ |
| 229/230 | A385R | + |
| 231/232 | Q547V | + |
| 233/234 | V315M | + |
| 235/236 | D503G | + |
| 237/238 | V315T | +++ |
| 239/240 | A576P | + |
| 241/242 | N320F | + |
| 243/244 | A577G | +++ |
| 245/246 | A576V | +++ |
| 247/248 | I504R | ++ |
| 249/250 | Q405A | + |
| 251/252 | Q398V | ++ |
| 253/254 | P542T | + |
| 255/256 | I504T | ++ |
| 257/258 | F391Y | ++ |
| 259/260 | P541A | + |
| 261/262 | Q388L | ++ |
| 263/264 | K573S | ++ |
| 265/266 | T493W | + |
| 267/268 | T497A | + |
| 269/270 | I504W | +++ |

Levels of increased activity were determined relative to the reference polypeptide of SEQ ID NO: 226 and defined as follows: “+” >1.5, “++” >2, “+++” >3.

### Example 8

Evolution and Screening of Engineered Polypeptides Derived from SEQ ID NO: 244 for Improved Production of Compound (2)

[0215] The engineered polynucleotide (SEQ ID NO: 243) encoding the polypeptide with monooxygenase activity of SEQ ID NO: 244 was used to generate the engineered polypeptides of Table 8.1. These polypeptides displayed improved monooxygenase activity under the desired conditions e.g., the improvement in the formation of the alcohol Compound (2), from the substrate Compound (1), as compared to the starting polypeptide. The engineered polypeptides, having the amino acid sequences of even-numbered sequence identifiers were generated from the “backbone” amino acid sequence of SEQ ID NO: 244, as described below.

[0216] Directed evolution began with the polynucleotide set forth in SEQ ID NO: 243. Libraries of engineered polypeptides were generated using various techniques (e.g., saturation mutagenesis, recombination of previously identified beneficial amino acid differences) and screened using HTP assay and analysis methods that measured the polypeptides' ability to produce Compound (2).

[0217] The enzyme assays were carried out in 96-well deep-well (1.1 mL total volume) plates, in 100 μL total reaction volume per well. The reactions contained 5 v/v % of undiluted monooxygenase lysate, prepared as described in EXAMPLE 1, 10 g/L Compound (1), 1 g/L NADPH, 0.1 g/L GDH-105, 16 g/L glucose and dissolved in 100 mM potassium phosphate buffer, pH 8. The reaction plates were sealed with an aeropore seal and shaken at 600 rpm at 30° C. with 85% humidity for 18 hours.

[0218] After overnight incubation, 400 μL/well of acetonitrile was added to the reaction plates and mixed well. The plates were sealed and centrifuged at 4,000 rpm for 10 min. An aliquot of the supernatant was removed and further diluted 80-fold into 1:1 acetonitrile:water for achiral LC-MS analysis according to the method in Table 2.2.

[0219] Select variants were additionally analyzed for selectivity. The enzyme assays were carried out in 96-well deep-well (1.1 mL total volume) plates, in 100 μL total reaction volume per well. The reactions contained 40 v/v % of undiluted monooxygenase lysate, prepared as described in EXAMPLE 1, 10 g/L Compound (1), 1 g/L NADPH, 0.1 g/L GDH-105, 16 g/L glucose and dissolved in 100 mM potassium phosphate buffer, pH 8. The reaction plates were sealed with an aeropore seal and shaken at 600 rpm at 30° C. with 85% humidity for 18 hours.

[0220] After overnight incubation, 50 μL/well of a 25 uL/mL solution triethylamine in acetonitrile was added to the reaction plates, followed by 50 uL/well of 37 g/L solution 2-bromoacetophenone in acetonitrile. The plates were heat-sealed and shaken for 2 hours at 50° C. After 2 hours the plates were centrifuged for 10 minutes at 4,000 rpm. Then, the supernatant was filtered through a hydrophilic filter plate. An aliquot of the filtrate was removed and further diluted 10-fold into 1:1 acetonitrile:water for chiral LC-MS analysis according to the method described in Table 8.2.

TABLE 8.1
Activity of Monooxygenase Variants Relative to SEQ ID NO: 244

| | | % conversion | |
|---|---|---|---|
| | | to alcohol | |
| | | FIOP | |
| SEQ ID | | Relative to | % ee |
| NO: | Amino Acid Differences | SEQ ID | (alcohol, |
| (nt/aa) | (Relative to SEQ ID NO: 244) | NO: 244 | LCMS) |
| 271/272 | A75S/M178V/M213V/V315T | + | |
| 273/274 | K573S | ++ | + |
| 275/276 | M178V | +++ | |
| 277/278 | M178V/A576V | ++ | |
| 279/280 | M178V/M213V/K573S | ++ | |
| 281/282 | M178V/M213V/Q726L | ++ | |
| 283/284 | M178V/Q726L | ++++ | |
| 285/286 | M178V/T437S | ++ | + |
| 287/288 | M178V/T497A/Q726L | +++ | |
| 289/290 | M178V/V179R/A576V | ++ | + |
| 291/292 | M178V/V179R/K573S/Q726L | +++ | |
| 293/294 | M178V/V179R/M213V/T437S/ | ++ | |
| | T497A/K573S/A576V | | |
| 295/296 | M331T | ++ | |
| 297/298 | M331T/K573S/A576V | ++ | |
| 299/300 | M331T/T497A | ++ | |
| 301/302 | M331T/V358T/F391Y/T437S | ++ | |
| 303/304 | Q726L | ++ | |
| 305/306 | T497A/K573S | ++ | |
| 307/308 | V179R/Q726L | ++ | |
| 309/310 | V179R/V358T | ++ | |
| 311/312 | A75S/M331T/A576V/Q726L | + | + |
| 313/314 | L685F | + | |
| 315/316 | L756Q | + | |
| 317/318 | I999A | + | |
| 319/320 | F889Q | + | |
| 321/322 | Y708C | ++ | |
| 323/324 | T682K | ++ | |
| 325/326 | K797H | ++ | |
| 327/328 | E888Y | + | |
| 329/330 | V794C | + | |
| 331/332 | P759T | ++ | |
| 333/334 | S848T | + | |
| 335/336 | S851G | + | |
| 337/338 | G1003W | ++ | |
| 339/340 | D699R | ++ | |
| 341/342 | A796H | ++ | |
| 343/344 | I704L | ++ | |
| 345/346 | K862L | ++ | |
| 347/348 | L701V | + | |
| 349/350 | A796N | + | |
| 351/352 | N707Y | + | |
| 353/354 | S851V | + | |
| 355/356 | A1048L | + | |

Levels of increased activity were determined relative to the reference polypeptide of SEQ ID NO: 244 and defined as follows: “+” >1, “++” >1.15, “+++” >1.5, “++++” >2. Levels of enantiomeric excess are measured as % ee and defined as follows: “, “+” >20% SEQ ID NO: 244 has 16% ee as reference.

[0221] Derivatization was performed to facilitate chiral LC-MS analysis, as depicted below in Scheme 5.

[chemical structure]

TABLE 8.2
Chiral HPLC-MS/MS Method Parameters

| Instrument | Waters Acquity UPLC system equipped with a binary |
|---|---|
| | pump and TUV UV detector and 3200 Sciex QTrap Mass |
| | Spectrometer with TurbeV ion source |
| Column | OJ-3R, 4.6 × 150 mm, 3 μm |
| Mobile Phases | A: 0.1% formic acid in water |
| | B: 0.1% formic acid in acetonitrile |
| LC Gradient | 0-2 min: 20% B |
| | 2-9.4 min: 20 to 50% B |
| | 9.4-9.5 min: 50 to 100% B |
| | 9.5-11 min: 100% B |
| | 11-11.1 min: 100% B to 20% B |
| | 11.1-12 min: 20% B |
| Flow rate | 1.2 mL/min |
| Run time | 12 min |
| Column temperature | 30° C. |
| Injection volume | 10 μL |
| MS Scan Type | MRM, positive mode |
| MS Source Temperature | 550° C. |
| Ionspray voltage | 5500 |
| Ion Source Gas 1 | 50 |
| Ion Source Gas 2 | 30 |
| Declustering potential | 40 |
| Entrance potential | 10 |
| Collision cell exit potential | 3 |

| | | Q1 Mass | Q3 Mass | Collision | Dwell |
|---|---|---|---|---|---|
| Compound | Retention time | (Da) | (Da) | energy | Time |
| Compound (2) | 8.2 and 8.3 for | 364.2 | 99.8 | 30 | 200 msec |
| | desired isomers, | | | | |
| | 7.9 and 9.1 for | | | | |
| | undesired isomers | | | | |

### Example 9

Evolution and Screening of Engineered Polypeptides Derived from SEQ ID NO: 286 for Improved Production of Compound (2)

[0222] The engineered polynucleotide (SEQ ID NO: 285) encoding the polypeptide with monooxygenase activity of SEQ ID NO: 286 was used to generate the engineered polypeptides of Table 9.1. These polypeptides displayed improved monooxygenase activity under the desired conditions e.g., the improvement in the formation of the alcohol Compound (2), from the substrate Compound (1), as compared to the starting polypeptide. The engineered polypeptides, having the amino acid sequences of even-numbered sequence identifiers were generated from the “backbone” amino acid sequence of SEQ ID NO: 286, as described below.

[0223] Directed evolution began with the polynucleotide set forth in SEQ ID NO: 285. Libraries of engineered polypeptides were generated using various techniques (e.g., saturation mutagenesis, recombination of previously identified beneficial amino acid differences) and screened using HTP assay and analysis methods that measured the polypeptides' ability to produce Compound (2).

[0224] The enzyme assays were carried out in 96-well deep-well (1.1 mL total volume) plates, in 100 μL total reaction volume per well. The reactions contained 5 v/v % of undiluted monooxygenase lysate, prepared as described in EXAMPLE 1, 10 g/L Compound (1), 1 g/L NADPH, 0.1 g/L GDH-105, 16 g/L glucose and dissolved in 100 mM potassium phosphate buffer, pH 8. The reaction plates were sealed with an aeropore seal and shaken at 600 rpm at 30° C. with 85% humidity for 18 hours.

[0225] After overnight incubation, 400 μL/well of acetonitrile was added to the reaction plates and mixed well. The plates were sealed and centrifuged at 4,000 rpm for 10 min. An aliquot of the supernatant was removed and further diluted 80-fold into 1:1 acetonitrile:water for achiral LC-MS analysis according to the method described in Table 2.2.

[0226] Select variants were additionally analyzed for selectivity. The enzyme assays were carried out in 96-well deep-well (1.1 mL total volume) plates, in 100 μL total reaction volume per well. The reactions contained 40 v/v % of undiluted monooxygenase lysate, prepared as described in EXAMPLE 1, 10 g/L Compound (1), 1 g/L NADPH, 0.1 g/L GDH-105, 16 g/L glucose and dissolved in 100 mM potassium phosphate buffer, pH 8. The reaction plates were sealed with an aeropore seal and shaken at 600 rpm at 30° C. with 85% humidity for 18 hours.

[0227] After overnight incubation, 50 μL/well of a 25 uL/mL solution triethylamine in acetonitrile was added to the reaction plates, followed by 50 uL/well of 37 g/L solution 2-bromoacetophenone in acetonitrile. The plates were heat-sealed and shaken for 2 hours at 50° C. After 2 hours the plates were centrifuged for 10 minutes at 4,000 rpm. Then, the supernatant was filtered through a hydrophilic filter plate. An aliquot of the filtrate was removed and further diluted 10-fold into 1:1 acetonitrile:water for chiral LC-MS analysis according to the method described in Table 8.2.

TABLE 9.1
Activity of Monooxygenase Variants Relative to SEQ ID NO: 286

| | | FIOP, | | |
|---|---|---|---|---|
| | | activity | | |
| SEQ ID | | Relative to | | |
| NO: | Amino Acid Differences | SEQ ID | alcohol | ketone |
| (nt/aa) | (Relative to SEQ ID NO: 286) | NO: 286 | % ee | % ee |
| 357/358 | A88S/G522R | | ++ | +++ |
| 359/360 | L87V | | + | ++ |
| 361/362 | M331S | | + | |
| 363/364 | T269P | | + | +++ |
| 365/366 | T269G | | + | ++ |
| 367/368 | L87I | | + | ++ |
| 369/370 | Q405A | + | | |
| 371/372 | P330G | | + | |
| 373/374 | L234F | + | | |
| 375/376 | L408R | + | | |
| 377/378 | T89S | ++ | | |
| 379/380 | Q405S | ++ | | |
| 381/382 | Q398R | + | | |
| 383/384 | A411G | + | | |
| 385/386 | V328T | + | | |
| 387/388 | A75S/Q726L/A796N/S851V/ | + | | |
| | I999A | | | |
| 389/390 | A75S/M331T/Q726L/I999A | + | | |
| 391/392 | A75S/M331T/L701V/Q726L/ | + | | |
| | S851V/A1048L | | | |
| 393/394 | A75S/A1048L | + | | |

Levels of increased activity were determined relative to the reference polypeptide of SEQ ID NO: 286 and defined as follows: “+” >1.2, “++” >2. Levels of enantiomeric excess are measured as % ee and defined as follows: “+” >50%, “++” >78%, “+++” >90%. SEQ ID 286 has 38% ee for the alcohol and 78% ee for the ketone.

### Example 10

Evolution and Screening of Engineered Polypeptides Derived from SEQ ID NO: 358 for Improved Production of Compound (2)

[0228] The engineered polynucleotide (SEQ ID NO: 357) encoding the polypeptide with monooxygenase activity of SEQ ID NO: 358 was used to generate the engineered polypeptides of Tables 10.1 and 10.2. These polypeptides displayed improved monooxygenase activity under the desired conditions e.g., the improvement in the formation of the alcohol Compound (2), from the substrate Compound (1), as compared to the starting polypeptide. The engineered polypeptides, having the amino acid sequences of even-numbered sequence identifiers were generated from the “backbone” amino acid sequence of SEQ ID NO: 358, as described below.

[0229] Directed evolution began with the polynucleotide set forth in SEQ ID NO: 357. Libraries of engineered polypeptides were generated using various techniques (e.g., saturation mutagenesis, recombination of previously identified beneficial amino acid differences) and screened using HTP assay and analysis methods that measured the polypeptides' ability to produce Compound (2).

[0230] The enzyme assays were carried out in 96-well deep-well (1.1 mL total volume) plates, in 100 μL total reaction volume per well. The reactions contained 5 v/v % of undiluted monooxygenase lysate, prepared as described in EXAMPLE 1, 10 g/L Compound (1), 1 g/L NADPH, 0.1 g/L GDH-105, 16 g/L glucose and dissolved in 100 mM potassium phosphate buffer, pH 8. The reaction plates were sealed with an aeropore seal and shaken at 600 rpm at 30° C. with 85% humidity for 18 hours.

[0231] After overnight incubation, 400 μL/well of acetonitrile was added to the reaction plates and mixed well. The plates were sealed and centrifuged at 4,000 rpm for 10 min. An aliquot of the supernatant was removed and further diluted 80-fold into 1:1 acetonitrile:water for achiral LC-MS analysis according to the method described in Table 2.2.

[0232] Select variants were additionally analyzed for selectivity. The enzyme assays were carried out in 96-well deep-well (1.1 mL total volume) plates, in 100 μL total reaction volume per well. The reactions contained 40 v/v % of undiluted monooxygenase lysate, prepared as described in EXAMPLE 1, 10 g/L Compound (1), 1 g/L NADPH, 0.1 g/L GDH-105, 16 g/L glucose and dissolved in 100 mM potassium phosphate buffer, pH 8. The reaction plates were sealed with an aeropore seal and shaken at 600 rpm at 30° C. with 85% humidity for 18 hours.

[0233] After overnight incubation, 50 μL/well of a 25 uL/mL solution triethylamine in acetonitrile was added to the reaction plates, followed by 50 uL/well of 37 g/L solution 2-bromoacetophenone in acetonitrile. The plates were heat-sealed and shaken for 2 hours at 50° C. After 2 hours the plates were centrifuged for 10 minutes at 4,000 rpm. Then, the supernatant was filtered through a hydrophilic filter plate. An aliquot of the filtrate was removed and further diluted 10-fold into 1:1 acetonitrile:water for chiral LC-MS analysis according to the method described in Table 8.2.

TABLE 10.1
Activity of Monooxygenase Variants Relative to SEQ ID NO: 358

| | | FIOP (apparent % | |
|---|---|---|---|
| | | conversion to | |
| SEQ ID | | alcohol) Relative | |
| NO: | Amino Acid Differences | to SEQ ID | % ee |
| (nt/aa) | (Relative to SEQ ID NO: 358) | NO: 358 | (alcohol) |
| 395/396 | T269P | | ++ |
| 397/398 | R522G/Q726L | ++ | |
| 399/400 | Q726L/A1048L | +++ | + |
| 401/402 | T269P/R522G/N707Y | ++ | ++ |
| 403/404 | A75S/T269P/N707Y | + | ++ |
| 405/406 | R522G | +++ | |
| 407/408 | T269P/R522G/N707Y/A1048L | | ++ |
| 409/410 | R522G/A1048L | +++ | |

Levels of increased activity were determined relative to the reference polypeptide of SEQ ID NO: 358 and defined as follows: “+” >1 “++” >1.15, “+++” >1.5. Levels of enantiomeric excess are measured as % ee and defined as follows: >80%, “++” >90%. SEQ ID NO: 358 has 80% ee.

[0234] Analysis of other variants derived from SEQ ID NO: 357 was carried out in 96-well deep-well (1.1 mL total volume) plates, in 100 μL total reaction volume per well. The reactions contained 10 v/v % of undiluted monooxygenase lysate, prepared as described in EXAMPLE 1 and then heated to 40° C. for 2 hours, 10 g/L Compound (1), 1 g/L NADPH, 0.1 g/L GDH-105, 16 g/L glucose and dissolved in 100 mM potassium phosphate buffer, pH 8. The reaction plates were sealed with an aeropore seal and shaken at 600 rpm at 30° C. with 85% humidity for 18 hours.

[0235] After overnight incubation, 400 μL/well of acetonitrile was added to the reaction plates and mixed well. The plates were sealed and centrifuged at 4,000 rpm for 10 min. An aliquot of the supernatant was removed and further diluted 80-fold into 1:1 acetonitrile:water for achiral LC-MS analysis.

TABLE 10.2
Activity of Monooxygenase Variants Relative to SEQ ID NO: 358

| | | FIOP (apparent % |
|---|---|---|
| SEQ ID | | conversion to |
| NO: | Amino Acid Differences | alcohol) Relative to |
| (nt/aa) | (Relative to SEQ ID NO: 358) | SEQ ID NO: 358 |
| 411/412 | E1038Q | ++ |
| 413/414 | Q993S | + |
| 415/416 | E692G | + |
| 417/418 | Q924N | + |
| 419/420 | Q646F | ++ |
| 421/422 | Q788P | + |
| 423/424 | Q170T | +++ |
| 425/426 | P676R | ++ |
| 427/428 | K814I | ++ |
| 429/430 | P969E | ++++ |
| 431/432 | E888G | ++++ |
| 433/434 | E692V | ++++ |
| 435/436 | Q170S | ++++ |
| 437/438 | E786V | ++ |
| 439/440 | E786S | ++ |
| 441/442 | D876G | ++ |
| 443/444 | K814S | ++ |
| 445/446 | N630G | ++ |
| 447/448 | P676K | ++ |
| 449/450 | Q547R | ++ |
| 451/452 | P462W | ++ |
| 453/454 | E786G | ++ |
| 455/456 | A651S | ++ |
| 457/458 | E672G | ++ |
| 459/460 | K77L | ++ |
| 461/462 | K787R | +++ |
| 463/464 | A557P | ++ |
| 465/466 | K973P | + |
| 467/468 | E989G | ++ |
| 469/470 | Q924G | ++ |
| 471/472 | K893G | ++ |
| 473/474 | A557E | ++ |
| 475/476 | S955G | + |
| 477/478 | E786R | ++ |
| 479/480 | P969G | ++ |
| 481/482 | T877V | ++ |
| 483/484 | H941R | ++ |
| 485/486 | Q924P | ++ |
| 487/488 | K841R | + |
| 489/490 | Q289A | + |
| 491/492 | H286R | ++ |
| 493/494 | Q982G | ++ |
| 495/496 | E896L | ++ |
| 497/498 | E989L | +++ |
| 499/500 | P775K | +++ |
| 501/502 | Q924A | +++ |

Levels of increased activity were determined relative to the reference polypeptide of SEQ ID NO: 358 and defined as follows: “+” >1.2, “++” >1.5, “+++” >3, “++++” >5.

### Example 11

Evolution and Screening of Engineered Polypeptides Derived from SEQ ID NO: 410 for Improved Production of Compound (2)

[0236] The engineered polynucleotide (SEQ ID NO: 409) encoding the polypeptide with monooxygenase activity of SEQ ID NO: 410 was used to generate the engineered polypeptides of Tables 11.1 and 11.2. These polypeptides displayed improved monooxygenase activity under the desired conditions e.g., the improvement in the formation of the alcohol Compound (2), from the substrate Compound (1), as compared to the starting polypeptide. The engineered polypeptides, having the amino acid sequences of even-numbered sequence identifiers were generated from the “backbone” amino acid sequence of SEQ ID NO: 410, as described below.

[0237] Directed evolution began with the polynucleotide set forth in SEQ ID NO: 409. Libraries of engineered polypeptides were generated using various techniques (e.g., saturation mutagenesis, recombination of previously identified beneficial amino acid differences) and screened using HTP assay and analysis methods that measured the polypeptides' ability to produce Compound (2).

[0238] The enzyme assays were carried out in 96-well deep-well (1.1 mL total volume) plates, in 100 μL total reaction volume per well. The reactions contained 10 v/v % of undiluted monooxygenase lysate, prepared as described in EXAMPLE 1 and then heated to 42.5° C. for 2 hours, 10 g/L Compound (1), 1 g/L NADPH, 0.1 g/L GDH-105, 16 g/L glucose and dissolved in 100 mM potassium phosphate buffer, pH 8. The reaction plates were sealed with an aeropore seal and shaken at 600 rpm at 30° C. with 85% humidity for 18 hours. Some variants were also analyzed under similar conditions with 5% v/v of undiluted monooxygenase lysate, prepared as described in EXAMPLE 1 and not subject to thermal pre-incubation

[0239] After overnight incubation, 400 μL/well of acetonitrile was added to the reaction plates and mixed well. The plates were sealed and centrifuged at 4,000 rpm for 10 min. An aliquot of the supernatant was removed and further diluted 400 or 800-fold into 1:1 acetonitrile:water for achiral LC-MS analysis according to the conditions in Table 2.2.

TABLE 11.1
Activity of Monooxygenase Variants Relative to SEQ ID NO: 410

| | | FIOP | |
|---|---|---|---|
| | | (apparent | |
| | | % | |
| | | conversion | FIOP |
| | | to alcohol, | without |
| | | with | heat |
| | | thermostability | treatment |
| | | challenge at | Relative |
| | | 42.5° C.) | to |
| SEQ ID | | Relative to | SEQ ID |
| NO: | | SEQ ID | NO: |
| (nt/aa) | Amino Acid Differences (Relative to SEQ ID NO: 410) | NO: 410 | 410 |
| 503/504 | Q170T/E410S/A557E/E786V/K787R/K814S/Q924G/E989G | +++ | |
| 505/506 | G158L/Q170T | +++ | |
| 507/508 | G158L/E410S/P462W/A557E/P969G | ++++ | |
| 509/510 | G158L/Q170T/E410S/P462W/Q726L/E786G/K814S | ++++ | |
| 511/512 | G158L/E410S/A557P/E786G/K787R | +++ | |
| 513/514 | P462W/A557P/Q726L/E786G/K787R/Q924G | +++ | |
| 515/516 | G158L/E410S/K862L | ++++ | |
| 517/518 | G158L/E410S/K814S/Q924G | ++++ | |
| 519/520 | G158L/A557P/Q726L/E786G/Q788P/K862L | +++ | |
| 521/522 | G158L/A557P/N630G/K814S | +++ | |
| 523/524 | G158L/K814S/Q924G | +++ | |
| 525/526 | G158L/P462W/N630G/E786R/Q788P/P969G | +++ | |
| 527/528 | G158L/A557P/E786V | +++ | |
| 529/530 | G158L/Q726L | +++ | |
| 531/532 | G158L/Q170T/E410S/Q924G | ++++ | |
| 533/534 | G158L/A557P | +++ | |
| 535/536 | G158L/N630G/E786S/K814S | +++ | |
| 537/538 | G158L/A557P/E786R/K787R/Q788P | +++ | |
| 539/540 | G158L/P462W/A557P/N630G/Q924G | +++ | |
| 541/542 | G158L/A557P/K814S/Q924G | +++ | |
| 543/544 | G158L/Q170T/N630G/Q726L/E786G/Q788P/K814S | ++++ | |
| 545/546 | E410S/P462W/A557P/N630G/E786V/K787R/P969G | ++ | |
| 547/548 | G158L/E410S | ++++ | |
| 549/550 | G158L/Q170T/E410S/P462W/N630G/E672G/Q726L/E786R/Q788P/ | ++ | |
| | K814S/Q924G | | |
| 551/552 | G158L/E786S/K787R/Q788P | +++ | |
| 553/554 | A385R | ++ | |
| 555/556 | A652S | ++ | |
| 557/558 | A717C | | ++ |
| 559/560 | A717Q | ++ | ++ |
| 561/562 | D553A | ++ | + |
| 563/564 | D553G | ++ | + |
| 565/566 | D553S | ++ | + |
| 567/568 | E871N | ++ | |
| 569/570 | E923A | ++ | + |
| 571/572 | E923L | ++ | |
| 573/574 | K469R | ++ | + |
| 575/576 | K640C | ++ | |
| 577/578 | K640G | ++ | ++ |
| 579/580 | K640V | ++ | ++ |
| 581/582 | K640W | ++ | ++ |
| 583/584 | L645V | | ++ |
| 585/586 | L795A | ++ | ++ |
| 587/588 | N574H | ++ | |
| 589/590 | N574S | | ++ |
| 591/592 | Q926K | + | ++ |
| 593/594 | Q926R | ++ | |
| 595/596 | S556G | ++ | ++ |
| 597/598 | S650P | ++ | |
| 599/600 | V773A | ++ | |
| 601/602 | V773G | ++ | |
| 603/604 | V779G | ++ | |
| 605/606 | V838W | ++ | |
| 607/608 | A385T | ++ | |
| 609/610 | N523R | ++ | |
| 611/612 | D553K | ++ | + |
| 613/614 | D550T | ++ | ++ |
| 615/616 | E871M | ++ | + |
| 617/618 | T613A | ++ | + |

Levels of increased activity for the thermostability challenge were determined relative to the reference polypeptide of SEQ ID NO: 410 and defined as follows: “+” > 1 “++” > 1.15, “+++” > 100, “++++” > 300.
Levels of increased activity (without heat treatment) were determined relative to the reference polypeptide of SEQ ID NO: 410 and defined as follows: “+” > 1 “++” > 1.15, “+++” > 1.5

[0240] Other variants derived from SEQ ID NO: 409 were carried out in 96-well deep-well (1.1 mL total volume) plates, in 100 μL total reaction volume per well. The reactions contained 5 v/v % of undiluted monooxygenase lysate, prepared as described in EXAMPLE 1, 10 g/L Compound (1), 1 g/L NADPH, 0.25 g/L PDH-102, and dissolved in 285 mM sodium phosphite buffer, pH 8. The reaction plates were sealed with an aeropore seal and shaken at 600 rpm at 30° C. with 85% humidity for 18 hours.

[0241] These same variants were analyzed with lysate that had been heat-treated. The reactions contained 40 v/v % of monooxygenase lysate, prepared as described in EXAMPLE 1, then diluted 4-fold into 300 mM pH 8 sodium phosphite and heated to 42.5° C. for two hours, 10 g/L Compound (1), 1 g/L NADPH, 0.25 g/L PDH-102, and dissolved in 270 mM sodium phosphite buffer, pH 8. The reaction plates were sealed with an aeropore seal and shaken at 600 rpm at 30° C. with 85% humidity for 18 hours.

[0242] After overnight incubation, 400 μL/well of acetonitrile was added to the reaction plates and mixed well. The plates were sealed and centrifuged at 4,000 rpm for 10 min. An aliquot of the supernatant was removed and further diluted 800-fold into 1:1 acetonitrile:water for achiral LC-MS analysis.

TABLE 11.2
Activity of Monooxygenase Variants Relative to SEQ ID NO: 410

| | Amino Acid | | |
|---|---|---|---|
| SEQ ID | Differences | FIOP (apparent % conversion to alcohol, | FIOP without heat |
| NO: | (Relative to SEQ | with thermostability challenge at 42.5° C.) | treatment Relative |
| (nt/aa) | ID NO: 410) | Relative to SEQ ID NO: 410 | to SEQ ID NO: 410 |
| 619/620 | F663G | | ++ |
| 621/622 | E860R | | ++ |
| 623/624 | E806N | | ++ |
| 625/626 | S1025G | | ++ |
| 627/628 | T960A | | ++ |
| 629/630 | N713M | | ++ |
| 631/632 | N635S | +++ | ++ |
| 633/634 | S1025W | | ++ |
| 635/636 | A783S | | ++ |
| 637/638 | K807R | | ++ |
| 639/640 | D600K | | ++ |
| 641/642 | P655T | + | ++ |
| 643/644 | D992G | | ++ |
| 645/646 | Q842G | | ++ |
| 647/648 | D894V | | ++ |
| 649/650 | A783E | | ++ |
| 651/652 | S851L | +++ | ++ |
| 653/654 | S1025T | | ++ |
| 655/656 | V1024I | | ++ |
| 657/658 | K771I | | ++ |
| 659/660 | K474P | | ++ |
| 661/662 | G677H | | ++ |
| 663/664 | T960G | | ++ |
| 665/666 | Q696C | ++++ | ++ |
| 667/668 | E840L | ++++ | |
| 669/670 | R51H/S851Q | ++++ | |
| 671/672 | E942K | ++++ | + |
| 673/674 | S664L | ++++ | + |
| 675/676 | H978S | ++++ | |
| 677/678 | V1024L | ++++ | + |
| 679/680 | P1008C | ++++ | |
| 681/682 | Q947W | ++++ | |
| 683/684 | I878S | ++++ | |
| 685/686 | K807T | ++++ | + |
| 687/688 | G677N | ++++ | + |
| 689/690 | P655A | ++++ | |
| 691/692 | N597V | ++++ | |
| 693/694 | D638W | ++++ | |
| 695/696 | N597R | ++++ | |
| 697/698 | P655L | ++++ | |
| 699/700 | T960K | ++++ | + |
| 701/702 | P460R | ++++ | |
| 703/704 | A783K | ++++ | + |
| 705/706 | D992F | +++ | + |
| 707/708 | A1012M | +++ | |
| 709/710 | K474F | +++ | |
| 711/712 | S694P | +++ | |
| 713/714 | Q466C | +++ | |
| 715/716 | A1012G | +++ | + |
| 717/718 | D638E | +++ | |
| 719/720 | G857F | +++ | |
| 721/722 | A789G | +++ | + |

Levels of increased activity were determined relative to the reference polypeptide of SEQ ID NO: 410 and defined as follows: “+” > 1 “++” > 1.15, “+++” > 1.5, “++++” > 3

### Example 12

Evolution and Screening of Engineered Polypeptides Derived from SEQ ID NO: 544 for Improved Production of Compound (2)

[0243] The engineered polynucleotide (SEQ ID NO: 543) encoding the polypeptide with monooxygenase activity of SEQ ID NO: 544 was used to generate the engineered polypeptides of Table 12.1. These polypeptides displayed improved monooxygenase activity under the desired conditions e.g., the improvement in the formation of the alcohol Compound (2), from the substrate Compound (1), as compared to the starting polypeptide. The engineered polypeptides, having the amino acid sequences of even-numbered sequence identifiers were generated from the “backbone” amino acid sequence of SEQ ID NO: 544, as described below.

[0244] Directed evolution began with the polynucleotide set forth in SEQ ID NO: 543. Libraries of engineered polypeptides were generated using various techniques (e.g., saturation mutagenesis, recombination of previously identified beneficial amino acid differences) and screened using HTP assay and analysis methods that measured the polypeptides' ability to produce Compound (2).

[0245] The enzyme assays were carried out in 96-well deep-well (1.1 mL total volume) plates, in 100 μL total reaction volume per well. The reactions contained 40 v/v % of 4-fold diluted monooxygenase lysate, prepared as described in EXAMPLE 1 and then diluted 4-fold and heated to 46° C. for 2 hours, 10 g/L Compound (1), 1 g/L NADPH, 0.1 g/L GDH-105, 16 g/L glucose and dissolved in 100 mM potassium phosphate buffer, pH 8. The reaction plates were sealed with an aeropore seal and shaken at 600 rpm at 30° C. with 85% humidity for 18 hours.

[0246] After overnight incubation, 500 μL/well of acetonitrile was added to the reaction plates and mixed well. The plates were sealed and centrifuged at 4,000 rpm for 10 min. An aliquot of the supernatant was removed and further diluted 800-fold into 1:1 acetonitrile:water for achiral LC-MS analysis according to the conditions in Table 2.2.

TABLE 12.1
Activity of Monooxygenase Variants Relative to SEQ ID NO: 544

| SEQ ID | | |
|---|---|---|
| NO: | Amino Acid Differences (Relative to SEQ | FIOP (% conv to alc, heat treated |
| (nt/aa) | ID NO: 544) | lysate) Relative to SEQ ID NO: 544 |
| 723/724 | E410S/A557P/E692V/P788Q | +++ |
| 725/726 | H286R/E410S/A651S/P676K | +++ |
| 727/728 | H286R/E692V/G786R/P788Q | + |
| 729/730 | E410S/A557P/P676K/P788Q/E888G/Q924N/ | +++ |
| | Q993S | |
| 731/732 | E410S/Q646F/A651S/P788Q | +++ |
| 733/734 | H286R/E410S/N707Y/P788Q | ++++ |
| 735/736 | K77L/E410S/P676K/P788Q/Q924N | ++++ |
| 737/738 | K77L/A557P/N707Y/E888G | ++ |
| 739/740 | E410S | ++ |
| 741/742 | H286R/E410S/E888G | +++ |
| 743/744 | K77L/V179L/H286R/E410S/P788Q/E888G | +++ |

Levels of increased activity were determined relative to the reference polypeptide of SEQ ID NO: 544 and defined as follows: “+” >10, “+” > 50, “+++” > 200, “++++” > 400.

### Example 13

Evolution and Screening of Engineered Polypeptides Derived from SEQ ID NO: 734 for Improved Production of Compound (2)

[0247] The engineered polynucleotide (SEQ ID NO: 733) encoding the polypeptide with monooxygenase activity of SEQ ID NO: 734 was used to generate the engineered polypeptides of Table 13.1. These polypeptides displayed improved monooxygenase activity under the desired conditions e.g., the improvement in the formation of the alcohol Compound (2), from the substrate Compound (1), as compared to the starting polypeptide. The engineered polypeptides, having the amino acid sequences of even-numbered sequence identifiers were generated from the “backbone” amino acid sequence of SEQ ID NO: 734, as described below.

[0248] Directed evolution began with the polynucleotide set forth in SEQ ID NO: 734. Libraries of engineered polypeptides were generated using various techniques (e.g., saturation mutagenesis, recombination of previously identified beneficial amino acid differences) and screened using HTP assay and analysis methods that measured the polypeptides' ability to produce Compound (2).

[0249] The enzyme assays were carried out in 96-well deep-well (1.1 mL total volume) plates, in 100 μL total reaction volume per well. The reactions contained 2 v/v % and/or 50% v/v of undiluted monooxygenase lysate, prepared as described in EXAMPLE 1, 10 g/L Compound (1), 1 g/L NADPH, 0.1 g/L GDH-105, 16 g/L glucose and dissolved in 100 mM potassium phosphate buffer, pH 8. The reaction plates were sealed with an aeropore seal and shaken at 600 rpm at 30° C. with 85% humidity for 18 hours.

[0250] After overnight incubation, 400 μL/well of acetonitrile was added to the reaction plates and mixed well. The plates were sealed and centrifuged at 4,000 rpm for 10 min. An aliquot of the supernatant was removed and further diluted 400 or 800-fold into 1:1 acetonitrile:water for achiral LC-MS analysis according to the method in Table 2.2.

[0251] Select variants were additionally analyzed for selectivity. The enzyme assays were carried out in 96-well deep-well (1.1 mL total volume) plates, in 100 μL total reaction volume per well. The reactions contained 40 v/v % of undiluted monooxygenase lysate, prepared as described in EXAMPLE 1, 10 g/L Compound (1), 1 g/L NADPH, 0.1 g/L GDH-105, 16 g/L glucose and dissolved in 100 mM potassium phosphate buffer, pH 8. The reaction plates were sealed with an aeropore seal and shaken at 600 rpm at 30° C. with 85% humidity for 18 hours.

[0252] After overnight incubation, 50 μL/well of a 25 uL/mL solution triethylamine in acetonitrile was added to the reaction plates, followed by 50 uL/well of 37 g/L solution 2-bromoacetophenone in acetonitrile. The plates were heat-sealed and shaken for 2 hours at 50° C. After 2 hours the plates were centrifuged for 10 minutes at 4,000 rpm. Then, the supernatant was filtered through a hydrophilic filter plate. An aliquot of the filtrate was removed and further diluted 50-fold into 1:1 acetonitrile:water for chiral LC-MS analysis according to the method described in Table 8.2.

TABLE 13.1
Activity of Monooxygenase Variants Relative to SEQ ID NO: 734

| | | activity FIOP, | | activity FIOP, |
|---|---|---|---|---|
| SEQ ID | | 50% lysate load | | 2% lysate load |
| NO: | Amino Acid Differences (Relative | Relative to SEQ | alcohol % | Relative to SEQ |
| (nt/aa) | to SEQ ID NO: 734) | ID NO: 734 | ee | ID NO: 734 |
| 745/746 | S88T | +++ | | +++ |
| 747/748 | S88V | ++ | | +++ |
| 749/750 | S88G | | + | |
| 751/752 | S410E/A557P/Q924G | +++ | + | |
| 753/754 | T497A/A557P | ++ | | |
| 755/756 | S410E/T497A/S814K | +++ | + | |
| 757/758 | S410E/T497A/A557P/A576V/S814K | +++ | + | |
| 759/760 | S410E/T497A/K573S/A576V | +++ | + | |
| 761/762 | T270I | | | + |
| 763/764 | S437N | | | + |
| 765/766 | S437V | | | + |
| 767/768 | T270V | | | + |
| 769/770 | D24R | | | + |
| 771/772 | Q257G | | | + |
| 773/774 | Q257N | | | + |
| 775/776 | F78E | | | + |
| 777/778 | D24S | | | + |
| 779/780 | Q257H | | | ++ |
| 781/782 | L53V | | | ++ |
| 783/784 | R180G | | | ++ |
| 785/786 | Q257W | | | ++ |
| 787/788 | F82I | | | ++ |
| 789/790 | T150G | | | ++ |
| 791/792 | D183S | | | +++ |
| 793/794 | A75G | | | +++ |

Levels of increased activity were determined relative to the reference polypeptide of SEQ ID NO: 734 and defined as follows: “+” 0.9 ++” > 1.15, “+++” > 1.5. Levels of enantiomeric excess are measured as % ee and defined as follows: “ “+” > 80%. SEQ ID NO: 734 has 80% ee.

### Example 14

Evolution and Screening of Engineered Polypeptides Derived from SEQ ID NO: 748 for Improved Production of Compound (2)

[0253] The engineered polynucleotide (SEQ ID NO: 747) encoding the polypeptide with monooxygenase activity of SEQ ID NO: 748 was used to generate the engineered polypeptides of Tables 14.1 and 14.2. These polypeptides displayed improved monooxygenase activity under the desired conditions e.g., the improvement in the formation of the alcohol Compound (2), from the substrate Compound (1), as compared to the starting polypeptide. The engineered polypeptides, having the amino acid sequences of even-numbered sequence identifiers were generated from the “backbone” amino acid sequence of SEQ ID NO: 748, as described below.

[0254] Directed evolution began with the polynucleotide set forth in SEQ ID NO: 748. Libraries of engineered polypeptides were generated using various well-known techniques (e.g., saturation mutagenesis, recombination of previously identified beneficial amino acid differences) and screened using HTP assay and analysis methods that measured the polypeptides' ability to produce Compound (2).

[0255] The enzyme assays were carried out in 96-well deep-well (1.1 mL total volume) plates, in 100 μL total reaction volume per well. These variants, and all variants in further examples, were screened using phosphite dehydrogenase (PDH) and phosphite to regenerate the NADPH cofactor instead of glucose dehydrogenase (GDH) and glucose. The switch was made due to superior performance of the SFPs with under PDH conditions. The reactions contained 1 v/v % of undiluted monooxygenase lysate, prepared as described in EXAMPLE 1, 10 g/L Compound (1), 1 g/L NADPH, 0.25 g/L PDH-102, and dissolved in 500 mM sodium phosphite buffer, pH 8. The reaction plates were sealed with an aeropore seal and shaken at 600 rpm at 30° C. with 85% humidity for 18 hours.

[0256] After overnight incubation, 400 μL/well of acetonitrile was added to the reaction plates and mixed well. The plates were sealed and centrifuged at 4,000 rpm for 10 min. An aliquot of the supernatant was removed and further diluted 800-fold into 1:1 acetonitrile:water for achiral LC-MS analysis according to the conditions in Table 2.2.

TABLE 14.1
Activity of Monooxygenase Variants Relative to SEQ ID NO: 748

| | | FIOP, % |
|---|---|---|
| | | conversion to |
| SEQ ID | | alcohol, 1% |
| NO: | | lysate Relative to |
| (nt/aa) | Amino Acid Differences (Relative to SEQ ID NO: 748) | SEQ ID NO: 748 |
| 795/796 | A75G/Q257N/T613A | + |
| 797/798 | R180G/S437N/V773A/L795A | +++ |
| 799/800 | Q257H/T613A/V773A/L795A | + |
| 801/802 | A75G/F82I/Q257G/Q268T | + |
| 803/804 | A75G/Q257N/K640W | ++ |
| 805/806 | A75G/R180G/D183S/Q257N/Q268T/T270I/A385R/S437N/S556G/T613A/ | + |
| | A652S/E923A | |
| 807/808 | A75G/F82I/R180G/Q257G/S437N | + |
| 809/810 | A75G | + |
| 811/812 | A75G/F82I/Q257N/S556G/K640G | ++ |
| 813/814 | A75G/S556G/V773A | + |
| 815/816 | A75G/R180G/Q257N/Q268T/T270I/S437V/S556G/N574S/A652S | + |
| 817/818 | A75G/F82I/S437N | ++ |
| 819/820 | A75G/N574S | ++ |
| 821/822 | F82I/T613A | + |
| 823/824 | A75G/F82I/Q257H/V773A | + |
| 825/826 | A75G/R180G/N574S/L795A | ++ |
| 827/828 | A75G/T613A | +++ |

Levels of increased activity were determined relative to the reference polypeptide of SEQ ID NO: 748 and defined as follows, “+” > 1.15, “+” > 3, “+” > 5.

[0257] Other variants derived from SEQ ID NO: 747 were carried out in 96-well deep-well (1.1 mL total volume) plates, in 100 μL total reaction volume per well. The reactions contained 10 v/v % of undiluted monooxygenase lysate, prepared as described in EXAMPLE 1, 25 g/L Compound (1), 1 g/L NADPH, 0.5 g/L PDH-102, and dissolved in 450 mM sodium phosphite buffer, pH 8. The reaction plates were sealed with an aeropore seal and shaken at 600 rpm at 30° C. with 85% humidity for 18 hours.

[0258] After overnight incubation, 400 μL/well of acetonitrile was added to the reaction plates and mixed well. The plates were sealed and centrifuged at 4,000 rpm for 10 min. An aliquot of the supernatant was removed and further diluted 100-fold into 1:1 acetonitrile:water for achiral LC-MS analysis according to the conditions in Table 2.2.

TABLE 14.2
Activity of Monooxygenase Variants Relative to SEQ ID NO: 748

| SEQ ID | | |
|---|---|---|
| NO: | Amino Acid Differences (Relative | FIOP, % conversion to alcohol, 10% lysate |
| (nt/aa) | to SEQ ID NO: 748) | Relative to SEQ ID NO: 748 |
| 829/830 | Q237N | ++ |
| 831/832 | P244G | + |
| 833/834 | G114M | + |
| 835/836 | Q110V | +++ |
| 837/838 | E248M | + |
| 839/840 | N102A | ++ |
| 841/842 | P347E | + |
| 843/844 | P347S | + |
| 845/846 | C206R | ++ |
| 847/848 | P106V | + |
| 849/850 | N102L | + |
| 851/852 | D196Q/P853L | + |
| 853/854 | E245A | + |
| 855/856 | E245M | + |
| 857/858 | P244R | ++ |
| 859/860 | E245S | ++ |
| 861/862 | L127M | + |
| 863/864 | P194T | + |
| 865/866 | R191S | + |
| 867/868 | T236G | + |
| 869/870 | E245G | + |
| 871/872 | G114R | +++ |
| 873/874 | H232R | + |
| 875/876 | I210T | ++ |
| 877/878 | E245N | ++ |
| 879/880 | N193K | + |
| 881/882 | A45E | + |
| 883/884 | K203G | + |
| 885/886 | Q110L | +++ |
| 887/888 | E245R | ++ |
| 889/890 | E245T | ++ |
| 891/892 | Q237R | + |
| 893/894 | E245Q | ++ |
| 895/896 | E248R | + |
| 897/898 | E245W | ++ |
| 899/900 | R256K | + |
| 901/902 | G114H | + |
| 903/904 | Q110F | ++ |
| 905/906 | P347K | + |
| 907/908 | A226N | + |
| 909/910 | N254L | + |
| 911/912 | T236S | + |
| 913/914 | P244Y | ++ |
| 915/916 | I210R | + |
| 917/918 | E245L | ++ |
| 919/920 | H111R | + |
| 921/922 | H111L | ++ |
| 923/924 | E245V | ++ |
| 925/926 | G114Q | + |
| 927/928 | H111W | ++ |
| 929/930 | D196W | + |
| 931/932 | A198S | + |
| 933/934 | N202Q | + |

Levels of increased activity were determined relative to the reference polypeptide of SEQ ID NO: 748 and defined as follows: “+” > 1.2, “++” > 1.5, “+++” > 2.

### Example 15

Evolution and Screening of Engineered Polypeptides Derived from SEQ ID NO: 828 for Improved Production of Compound (2)

[0259] The engineered polynucleotide (SEQ ID NO: 827) encoding the polypeptide with monooxygenase activity of SEQ ID NO: 828 was used to generate the engineered polypeptides of Table 15.1. These polypeptides displayed improved monooxygenase activity under the desired conditions e.g., the improvement in the formation of the alcohol Compound (2), from the substrate Compound (1), as compared to the starting polypeptide. The engineered polypeptides, having the amino acid sequences of even-numbered sequence identifiers were generated from the “backbone” amino acid sequence of SEQ ID NO: 828, as described below.

[0260] Directed evolution began with the polynucleotide set forth in SEQ ID NO: 827. Libraries of engineered polypeptides were generated using various techniques (e.g., saturation mutagenesis, recombination of previously identified beneficial amino acid differences) and screened using HTP assay and analysis methods that measured the polypeptides' ability to produce Compound (2).

[0261] The enzyme assays were carried out in 96-well deep-well (1.1 mL total volume) plates, in 100 μL total reaction volume per well. The reactions contained 5 v/v % of undiluted monooxygenase lysate, prepared as described in EXAMPLE 1, 25 g/L Compound (1), 1 g/L NADPH, 0.5 g/L PDH-102, and dissolved in 475 mM sodium phosphite buffer, pH 8. The reaction plates were sealed with an aeropore seal and shaken at 600 rpm at 30° C. with 85% humidity for 18 hours.

[0262] After overnight incubation, 400 μL/well of acetonitrile was added to the reaction plates and mixed well. The plates were sealed and centrifuged at 4,000 rpm for 10 min. An aliquot of the supernatant was removed and further diluted 800-fold into 1:1 acetonitrile:water for achiral LC-MS analysis according to the conditions in Table 2.2.

TABLE 15.1
Activity of Monooxygenase Variants Relative to SEQ ID NO: 828

| SEQ ID | Amino Acid Differences (Relative to SEQ | FIOP, % conversion to alcohol Relative |
|---|---|---|
| NO: (nt/aa) | ID NO: 828) | to SEQ ID NO: 828 |
| 935/936 | R826G/S1004I | + |
| 937/938 | V779F/S1004I | ++ |
| 939/940 | D550T/E616L/A717I/V779F | ++ |
| 941/942 | N22D/G75A/A717C/G720L/V779F/S1004I | + |
| 943/944 | D550T/A717C/L795V/L799I/T800Y | + |
| 945/946 | E616L/A717G/G720L/L799I | + |
| 947/948 | N22D/D550T/R826G | + |
| 949/950 | A717G/S1004I | +++ |
| 951/952 | A717C | + |
| 953/954 | A717G/G720L/V779F/S1004I | ++ |
| 955/956 | A717Q/V779F/L799I/T800Y/S1004I | +++ |
| 957/958 | G720L/V779F | + |
| 959/960 | N22D/A717Q/L795V/L799I/R826G | + |
| 961/962 | N22D/E616L/A717I/S1004I | |
| 963/964 | T800Y/S1004I | ++ |
| 965/966 | K640V | ++ |
| 967/968 | A717Q/S1004I | +++ |
| 969/970 | D550T/K640D/A717I | +++ |

Levels of increased activity were determined relative to the reference polypeptide of SEQ ID NO: 828 and defined as follows: “+” > 1.2, “++” > 1.5, +++++ > 1.6.

### Example 16

Evolution and Screening of Engineered Polypeptides Derived from SEQ ID NO: 968 for Improved Production of Compound (2)

[0263] The engineered polynucleotide (SEQ ID NO: 967) encoding the polypeptide with monooxygenase activity of SEQ ID NO: 968 was used to generate the engineered polypeptides of Table 16.1. These polypeptides displayed improved monooxygenase activity under the desired conditions e.g., the improvement in the formation of the alcohol Compound (2), from the substrate Compound (1), as compared to the starting polypeptide. The engineered polypeptides, having the amino acid sequences of even-numbered sequence identifiers were generated from the “backbone” amino acid sequence of SEQ ID NO: 968, as described below.

[0264] Directed evolution began with the polynucleotide set forth in SEQ ID NO: 967. Libraries of engineered polypeptides were generated using various techniques (e.g., saturation mutagenesis, recombination of previously identified beneficial amino acid differences) and screened using HTP assay and analysis methods that measured the polypeptides' ability to produce Compound (2).

[0265] The enzyme assays were carried out in 96-well deep-well (1.1 mL total volume) plates, in 100 μL total reaction volume per well. The reactions contained 5 v/v % of undiluted monooxygenase lysate, prepared as described in EXAMPLE 1, 25 g/L Compound (1), 1 g/L NADPH, 0.5 g/L PDH-102, and dissolved in 475 mM sodium phosphite buffer, pH 8. The reaction plates were sealed with an aeropore seal and shaken at 600 rpm at 30° C. with 85% humidity for 18 hours.

[0266] After overnight incubation, 400 μL/well of acetonitrile was added to the reaction plates and mixed well. The plates were sealed and centrifuged at 4,000 rpm for 10 min. An aliquot of the supernatant was removed and further diluted 800-fold into 1:1 acetonitrile:water for achiral LC-MS analysis according to the conditions in Table 2.2.

TABLE 16.1
Activity of Monooxygenase Variants Relative to SEQ ID NO: 968

| SEQ ID | Amino Acid Differences (Relative to | FIOP, % conversion to alcohol Relative |
|---|---|---|
| NO: (nt/aa) | SEQ ID NO: 968) | to SEQ ID NO: 968 |
| 971/972 | G786A/E840S/T960L | ++ |
| 973/974 | T960L | ++ |
| 975/976 | D638G/F663R/Q793T/E840S | ++ |
| 977/978 | N635S/S636G/Q793T/E840L | ++ |
| 979/980 | E840L/T960L | ++ |
| 981/982 | N635S/D638G/Q793T/P823A/T960L | ++ |
| 983/984 | D600K/E840L/T960L | ++ |
| 985/986 | Q793T/E840L | ++ |
| 987/988 | S636M/D638G/Q793T/S851L | ++ |
| 989/990 | S851L/V1024I/S1025T | ++ |
| 991/992 | S1025W | ++ |
| 993/994 | K807R | ++ |
| 995/996 | N713M | ++ |
| 997/998 | S851L/S1025T | ++ |
| 999/1000 | K771I | ++ |
| 1001/1002 | N635S/N713M/S1025T | ++ |
| 1003/1004 | D600K/N635S/N713M/K771I/S1025G | ++ |
| 1005/1006 | S1025T | ++ |
| 1007/1008 | N635S/K771I/D894V | ++ |
| 1009/1010 | V446S | + |
| 1011/1012 | S305G | ++ |
| 1013/1014 | S305R | ++ |
| 1015/1016 | K307R | ++ |
| 1017/1018 | V300P | ++ |
| 1019/1020 | A468F | ++ |
| 1021/1022 | T366S | ++ |
| 1023/1024 | A118T/V446L | +++ |
| 1025/1026 | N382M | ++ |
| 1027/1028 | E132V | ++ |
| 1029/1030 | I3W | ++ |
| 1031/1032 | K473L/Y790H | +++ |
| 1033/1034 | P285G | ++ |
| 1035/1036 | E381F | ++ |
| 1037/1038 | L415V | ++ |
| 1039/1040 | F424Y | ++ |
| 1041/1042 | E132M | ++ |
| 1043/1044 | T366I | +++ |
| 1045/1046 | V303W | ++ |
| 1047/1048 | A295S | + |
| 1049/1050 | Q230D | + |
| 1051/1052 | V433D | ++ |
| 1053/1054 | M417V | ++ |
| 1055/1056 | E293T | ++ |
| 1057/1058 | Q230V | + |
| 1059/1060 | V303Q | ++ |
| 1061/1062 | K290S | ++ |
| 1063/1064 | A296G | ++ |
| 1065/1066 | P285S | ++ |
| 1067/1068 | D371K | ++ |
| 1069/1070 | T481L | ++ |
| 1071/1072 | A292S | + |
| 1073/1074 | A296Q | + |
| 1075/1076 | S463V | + |
| 1077/1078 | A478S | ++ |
| 1079/1080 | S463A | +++ |
| 1081/1082 | P455R | + |
| 1083/1084 | M506V | ++ |
| 1085/1086 | F424V | ++ |
| 1087/1088 | V433K | +++ |
| 1089/1090 | E293R | ++ |
| 1091/1092 | M418V | ++ |
| 1093/1094 | N382T | ++ |
| 1095/1096 | E465Q | ++ |
| 1097/1098 | V372S | ++ |
| 1099/1100 | V433L | ++ |
| 1101/1102 | M506D | ++ |
| 1103/1104 | I3D | ++ |
| 1105/1106 | V447L | ++ |
| 1107/1108 | L432V | ++ |
| 1109/1110 | N480W | ++ |
| 1111/1112 | M418L | ++ |
| 1113/1114 | H427T | ++ |
| 1115/1116 | S305N | ++ |
| 1117/1118 | K473R | ++ |
| 1119/1120 | V433R | ++ |

Levels of increased activity were determined relative to the reference polypeptide of SEQ ID NO: 968 and defined as follows: “+” > 1,”++” > 1.15, “+++” > 1.5.

### Example 17

Evolution and Screening of Engineered Polypeptides Derived from SEQ ID NO:984 for Improved Production of Compound (2)

[0267] The engineered polynucleotide (SEQ ID NO: 983) encoding the polypeptide with monooxygenase activity of SEQ ID NO: 984 was used to generate the engineered polypeptides of Tables 17.1 and 17.2. These polypeptides displayed improved monooxygenase activity under the desired conditions e.g., the improvement in the formation of the alcohol Compound (2), from the substrate Compound (1), as compared to the starting polypeptide. The engineered polypeptides, having the amino acid sequences of even-numbered sequence identifiers were generated from the “backbone” amino acid sequence of SEQ ID NO: 984 as described below.

[0268] Directed evolution began with the polynucleotide set forth in SEQ ID NO: 983. Libraries of engineered polypeptides were generated using various techniques (e.g., saturation mutagenesis, recombination of previously identified beneficial amino acid differences) and screened using HTP assay and analysis methods that measured the polypeptides' ability to produce Compound (2).

[0269] The enzyme assays were carried out in 96-well deep-well (1.1 mL total volume) plates, in 100 μL total reaction volume per well. The reactions contained 5 (Table 17.1) or 10 v/v % (Table 17.2) of undiluted monooxygenase lysate, prepared as described in EXAMPLE 1, 25 g/L Compound (1), 1 g/L NADPH, 0.5 g/L PDH-102, and dissolved in 450 mM sodium phosphite buffer, pH 8. The reaction plates were sealed with an aeropore seal and shaken at 600 rpm at 30° C. with 85% humidity for 18 hours.

[0270] After overnight incubation, 400 μL/well of acetonitrile was added to the reaction plates and mixed well. The plates were sealed and centrifuged at 4,000 rpm for 10 min. An aliquot of the supernatant was removed and further diluted 800-fold into 1:1 acetonitrile:water for achiral LC-MS analysis according to the conditions in Table 2.2.

TABLE 17.1
Activity of Monooxygenase Variants Relative to SEQ ID NO: 984

| SEQ ID | | |
|---|---|---|
| NO: | Amino Acid Differences (Relative | FIOP, % conversion to alcohol (5% lysate) |
| (nt/aa) | to SEQ ID NO: 984) | Relative to SEQ ID NO: 984 |
| 1121/1122 | Q110L/G114Q | + |
| 1123/1124 | E245V | ++ |
| 1125/1126 | Q237R | ++ |
| 1127/1128 | G114Q | + |
| 1129/1130 | E245S | ++ |
| 1131/1132 | Q237R/E245V | ++ |
| 1133/1134 | G114Q/E245V | ++ |
| 1135/1136 | A45E/P853L | ++ |
| 1137/1138 | H111R/I210T/P347S/P853L | ++ |
| 1139/1140 | H111L | ++ |
| 1141/1142 | H111L/L127M/A226N/P244Y | ++ |
| 1143/1144 | I210T/P853L | + |
| 1145/1146 | H111W/A226N/P853L/P969S | ++ |
| 1147/1148 | L127M/P347E | ++ |
| 1149/1150 | H111R/P853L | +++ |
| 1151/1152 | L127M/I210T/P244Y/P853L | +++ |
| 1153/1154 | A45E | ++ |
| 1155/1156 | L127M/I210T/P244Y | ++ |
| 1157/1158 | H111R/A226N/P244Y/P347S | ++ |
| 1159/1160 | H111R/A226N | ++ |
| 1161/1162 | H111R/P347E/P853L | ++ |
| 1163/1164 | P194T/P853L | ++ |
| 1165/1166 | H111L/I210T | + |
| 1167/1168 | H111R/P194T/P347S | + |
| 1169/1170 | H111R/L127M/A226N/P244Y | ++ |
| 1171/1172 | A226N/T236G/P244Y/P347S/P853L | ++ |
| 1173/1174 | P244Y/P853L | ++ |
| 1175/1176 | H111W | ++ |
| 1177/1178 | H111R/P194T/P244Y/P347S/P853L | ++ |
| 1179/1180 | H111L/P244R | + |
| 1181/1182 | T236G/P244Y | +++ |
| 1183/1184 | H111L/P853L | ++++ |
| 1185/1186 | H111R/P194T/P347S/P853L | + |
| 1187/1188 | L127M/I210T/P347E/P853L | +++ |
| 1189/1190 | L127M/P244Y | ++ |
| 1191/1192 | H111L/P244Y/P853L | + |
| 1193/1194 | A45E/H111R/A226N/P347S | + |

Levels of increased activity were determined relative to the reference polypeptide of SEQ ID NO: 984 and defined as follows: “+” > 1, “++” > 1.15, “+++” > 1.5, “++++” > 2.

TABLE 17.2
Activity of Monooxygenase Variants Relative to SEQ ID NO: 984

| SEQ ID | | |
|---|---|---|
| NO: | Amino Acid Differences (Relative | FIOP, % conversion to alcohol (10% lysate) |
| (nt/aa) | to SEQ ID NO: 984) | Relative to SEQ ID NO: 984 |
| 1195/1196 | D653T | + |
| 1197/1198 | M621T | + |
| 1199/1200 | G562P | + |
| 1201/1202 | V563S | + |
| 1203/1204 | N666R | + |
| 1205/1206 | K640L | + |
| 1207/1208 | D653A | + |
| 1209/1210 | D619G | + |
| 1211/1212 | D619R | + |
| 1213/1214 | D653R | + |
| 1215/1216 | S623P | + |
| 1217/1218 | Y628S | + |
| 1219/1220 | S519L | + |
| 1221/1222 | R618L | + |
| 1223/1224 | R618G | + |
| 1225/1226 | D518T | + |
| 1227/1228 | D518N/A652S | + |
| 1229/1230 | D518S | + |
| 1231/1232 | D518G | + |
| 1233/1234 | A584G/S724P | + |
| 1235/1236 | V563L | + |
| 1237/1238 | E616V | ++ |
| 1239/1240 | I586V | ++ |

Levels of increased activity were determined relative to the reference polypeptide of SEQ ID NO: 984 and defined as follows: “+” > 1.15, “++” > 1.5.

### Example 18

Evolution and Screening of Engineered Polypeptides Derived from SEQ ID NO: 1160 for Improved Production of Compound (2)

[0271] The engineered polynucleotide (SEQ ID NO: 1159) encoding the polypeptide with monooxygenase activity of SEQ ID NO: 1160 was used to generate the engineered polypeptides of Table 18.1. These polypeptides displayed improved monooxygenase activity under the desired conditions e.g., the improvement in the formation of the alcohol Compound (2), from the substrate Compound (1), as compared to the starting polypeptide. The engineered polypeptides, having the amino acid sequences of even-numbered sequence identifiers were generated from the “backbone” amino acid sequence of SEQ ID NO: 1160, as described below.

[0272] Directed evolution began with the polynucleotide set forth in SEQ ID NO: 1159. Libraries of engineered polypeptides were generated using various techniques (e.g., saturation mutagenesis, recombination of previously identified beneficial amino acid differences) and screened using HTP assay and analysis methods that measured the polypeptides' ability to produce Compound (2).

[0273] The enzyme assays were carried out in duplicate in 96-well deep-well (1.1 mL total volume) plates, in 100 μL total reaction volume per well. The reactions contained 5 v/v % of undiluted monooxygenase lysate, prepared as described in EXAMPLE 1, 25 g/L Compound (1), 1 g/L NADPH, 0.5 g/L PDH-102, and dissolved in 475 mM sodium phosphite buffer. One set of reactions was set up at pH 7.5 and the other duplicate set of reactions was set up at pH 8. The reaction plates were sealed with an aeropore seal and shaken at 600 rpm at 30° C. with 85% humidity for 18 hours.

[0274] After overnight incubation, 400 μL/well of acetonitrile was added to the reaction plates and mixed well. The plates were sealed and centrifuged at 4,000 rpm for 10 min. An aliquot of the supernatant was removed and further diluted 800-fold into 1:1 acetonitrile:water for achiral LC-MS analysis according to the conditions in Table 2.2.

TABLE 18.1
Activity of Monooxygenase Variants Relative to SEQ ID NO: 1160

| | | FIOP, pH 8.0 | FIOP, pH 7.5 |
|---|---|---|---|
| SEQ ID | Amino Acid Differences (Relative to | Relative to SEQ ID | Relative to SEQ ID |
| NO: (nt/aa) | SEQ ID NO: 1160) | NO: 1160 | NO: 1160 |
| 1241/1242 | S1025T | +++ | + |
| 1243/1244 | E132G/A468F/Q793T | ++ | |
| 1245/1246 | V433K/S467K/S1025T | +++ | + |
| 1247/1248 | E132G/T366I/V433K/S463A/S467K/Q793T | ++ | ++ |
| 1249/1250 | K290T/S1025T | ++ | ++ |
| 1251/1252 | K290T/T366I/V433K/S463A/S467K | ++ | |
| 1253/1254 | V433K | +++ | + |
| 1255/1256 | K290T/V433K/S467K/Q793T/S1025T | | ++ |
| 1257/1258 | E132G/S1025T | +++ | ++ |
| 1259/1260 | D183G/S1025A/D1045N/L1048R | + | +++ |
| 1261/1262 | V433K/Y790H | | +++ |
| 1263/1264 | K290T/V433K/Q793T | + | ++ |
| 1265/1266 | E132G/T366I/S467G/G661D | + | +++ |
| 1267/1268 | Q793T | + | + |
| 1269/1270 | E132G/S467K/A468F/M506V/Q793T | +++ | ++ |
| 1271/1272 | K473L | | +++ |
| 1273/1274 | S463A/Q793T | + | ++ |
| 1275/1276 | V433K/M506V/S1025T | + | +++ |
| 1277/1278 | K290T/Q793T | ++ | +++ |
| 1279/1280 | T366I/V433K | ++ | + |

Levels of increased activity were determined relative to the reference polypeptide of SEQ ID NO: 1160 and defined as follows: “+” > 1, “++” > 1.15, “+++” > 1.3.

### Example 19

Evolution and Screening of Engineered Polypeptides Derived from SEQ ID NO: 1266 for Improved Production of Compound (2)

[0275] The engineered polynucleotide (SEQ ID NO: 1265) encoding the polypeptide with monooxygenase activity of SEQ ID NO: 1266 was used to generate the engineered polypeptides of Tables 19.1 and 19.2. These polypeptides displayed improved monooxygenase activity under the desired conditions e.g., the improvement in the formation of the alcohol Compound (2), from the substrate Compound (1), as compared to the starting polypeptide. The engineered polypeptides, having the amino acid sequences of even-numbered sequence identifiers were generated from the “backbone” amino acid sequence of SEQ ID NO: 1266, as described below.

[0276] Directed evolution began with the polynucleotide set forth in SEQ ID NO: 1265. Libraries of engineered polypeptides were generated using various techniques (e.g., saturation mutagenesis, recombination of previously identified beneficial amino acid differences) and screened using HTP assay and analysis methods that measured the polypeptides, ability to produce Compound (2).

[0277] The enzyme assays were carried out in 96-well deep-well (1.1 mL total volume) plates, in 100 μL total reaction volume per well. The reactions contained 10 v/v % of undiluted monooxygenase lysate, prepared as described in EXAMPLE 1, 25 g/L Compound (1), 1 g/L NADP+, 0.5 g/L PDH-102, and dissolved in 450 mM sodium phosphite buffer, pH 8. The reaction plates were sealed with an aeropore seal and shaken at 600 rpm at 30° C. with 85% humidity for 18 hours.

[0278] After overnight incubation, 400 μL/well of acetonitrile was added to the reaction plates and mixed well. The plates were sealed and centrifuged at 4,000 rpm for 10 min. An aliquot of the supernatant was removed and further diluted 800-fold into 1:1 acetonitrile:water for achiral LC-MS analysis according to the conditions in Table 2.2.

TABLE 19.1
Activity of Monooxygenase Variants Relative to SEQ ID NO: 1266

| SEQ ID | | pos control fiop % conv |
|---|---|---|
| NO: | Amino Acid Differences (Relative to SEQ ID NO: | alcohol Relative to SEQ ID |
| (nt/aa) | 1266) | NO: 1266 |
| 1253/1254 | G132E/I366T/V433K/G467S/D661G | + |
| 1247/1248 | V433K/S463A/G467K/D661G/Q793T | + |
| 1249/1250 | G132E/K290T/I366T/G467S/D661G/S1025T | + |
| 1255/1256 | G132E/K290T/I366T/V433K/G467K/D661G/Q793T/S1025T | + |
| 1259/1260 | G132E/D183G/366T/G467S/D661G/S1025A/D1045N/L1048R | + |
| 1261/1262 | G132E/I366T/V433K/G467S/D661G/Y790H | + |
| 1265/1266 | | + |
| 1267/1268 | G132E/I366T/G467S/D661G/Q793T | + |
| 1269/1270 | I366T/G467K/A468F/M506V/D661G/Q793T | + |
| 1271/1272 | G132E/I366T/G467S/K473L/D661G | + |
| 1273/1274 | G132E/I366T/S463A/G467S/D661G/Q793T | + |
| 1275/1276 | G132E/I366T/V433K/G467S/M506V/D661G/S1025T | + |
| 1277/1278 | G132E/K290T/I366T/G467S/D661G/Q793T | + |
| 1281/1282 | S463V/P853L | |
| 1283/1284 | S463V | + |
| 1285/1286 | G114R/Q230V/V446S/P853L | + |
| 1287/1288 | G114R/A292S/E293T/A296Q/S463V/P853L | ++ |
| 1289/1290 | P853L | + |
| 1291/1292 | S1017G | + |
| 1293/1294 | H1022W | +++ |
| 1295/1296 | S1017L | ++ |
| 1297/1298 | E792V | ++ |
| 1299/1300 | A1027R | + |
| 1301/1302 | H1022S | + |
| 1303/1304 | L1031Q | +++ |
| 1305/1306 | E981N | + |
| 1307/1308 | Q926R | ++ |
| 1309/1310 | A769T | +++ |
| 1311/1312 | S939D | ++ |
| 1313/1314 | E923V | + |
| 1315/1316 | E792I | ++ |
| 1317/1318 | M1015L | ++ |
| 1319/1320 | S824G | ++ |
| 1321/1322 | T974V | + |
| 1323/1324 | S1017A | ++ |
| 1325/1326 | M968L | ++ |
| 1327/1328 | H962R | ++ |
| 1329/1330 | N952G | + |
| 1331/1332 | S724W | +++ |
| 1333/1334 | A810S | + |
| 1335/1336 | G1040R | ++ |
| 1337/1338 | E780I | ++ |
| 1339/1340 | E730W | ++ |
| 1341/1342 | G720Q | +++ |
| 1343/1344 | E817G | ++ |
| 1345/1346 | A995G | ++ |
| 1347/1348 | E923R | ++ |
| 1349/1350 | L689G | + |
| 1351/1352 | G1040D | +++ |
| 1353/1354 | V979Q | +++ |
| 1355/1356 | M1006S | ++++ |

Levels of increased activity were determined relative to the reference polypeptide of SEQ ID NO: 1266 and defined as follows: “+” > 1.2, “++” > 1.5, “+++” > 2, “++++” > 3.

[0279] Other variants derived from SEQ ID NO: 1265 were analyzed. The enzyme assays were carried out in 96-well deep-well (1.1 mL total volume) plates, in 100 μL total reaction volume per well. The reactions contained 40 v/v % of undiluted monooxygenase lysate, prepared as described in EXAMPLE 1, 25 g/L Compound (1), 1 g/L NADPH, 0.5 g/L PDH-102, and dissolved in 300 mM sodium phosphite buffer, pH 8. The reaction plates were sealed with an aeropore seal and shaken at 600 rpm at 30° C. with 85% humidity for 18 hours.

[0280] After overnight incubation, 400 μL/well of acetonitrile was added to the reaction plates and mixed well. The plates were sealed and centrifuged at 4,000 rpm for 10 min. An aliquot of the supernatant was removed and further diluted 400-fold into 1:1 acetonitrile:water for achiral LC-MS analysis according to the conditions in Table 2.2.

TABLE 19.2
Activity of Monooxygenase Variants Relative to SEQ ID NO: 1266

| SEQ ID | Amino Acid Differences (Relative to | FIOP, % conversion to alcohol Relative |
|---|---|---|
| NO: (nt/aa) | SEQ ID NO: 1266) | to SEQ ID NO: 1266 |
| 1357/1358 | D518G/D653A | + |
| 1359/1360 | D518G/D653R | + |
| 1361/1362 | D653R | + |
| 1363/1364 | E616V/D619G | ++ |
| 1365/1366 | G458A | + |
| 1367/1368 | S519L/Y628S | + |

Levels of increased activity were determined relative to the reference polypeptide of SEQ ID NO: 1266 and defined as follows: “+” >1.2,”++” > 1.5.

[0281] While the invention has been described with reference to the specific embodiments, various changes can be made and equivalents can be substituted to adapt to a particular situation, material, composition of matter, process, process step or steps, thereby achieving benefits of the invention without departing from the scope of what is claimed.

[0282] For all purposes in the United States of America, each and every publication and patent document cited in this disclosure is incorporated herein by reference as if each such publication or document was specifically and individually indicated to be incorporated herein by reference. Citation of publications and patent documents is not intended as an indication that any such document is pertinent prior art, nor does it constitute an admission as to its contents or date.

What is claimed is:

1. An engineered cytochrome P450-BM3 variant comprising a polypeptide sequence having at least 85%, 86%, 87%, 88%, 89%, 90%, 91%, 92%, 93%, 94%, 95%, 96%, 97%, 98%, 99%, or more sequence identity to SEQ ID NO: 36, 4, 66, 72, 198, 226, 244, 286, 358, 410, 534, 734, 748, 828, 968, 984, 1160, or 1266, or a functional fragment thereof, wherein the polypeptide sequence of said engineered cytochrome P450-BM3 variant comprises at least one substitution or substitution set and wherein the amino acid positions of said polypeptide sequence are numbered with reference to SEQ ID NO: 36, 4, 66, 72, 198, 226, 244, 286, 358, 410, 534, 734, 748, 828, 968, 984, 1160, or 1266.

2. The engineered cytochrome P450-BM3 variant of claim 1, wherein said polypeptide sequence has at least 85%, 86%, 87%, 88%, 89%, 90%, 91%, 92%, 93%, 94%, 95%, 96%, 97%, 98%, 99%, or more sequence identity to SEQ ID NO: 4, and wherein the polypeptide sequence of said engineered cytochrome P450-BM3 variant comprises at least one substitution or substitution set at one or more positions in said polypeptide sequence selected from 52/83/88/105, 32/83/88, 32/83/88/176, 32/83/88/231/574, 32/83/88/574, 52/83/88, 52/83/88/231, 52/83/88/231/433/574, 52/83/88/433, 52/83/88/433/574, 52/83/88/574, 83/88, 83/88/105, 83/88/111, 83/88/111/433, 83/88/111/574, 83/88/231, 83/88/349, 83/88/433/574, and 83/88/574, wherein the amino acid positions of said polypeptide sequence are numbered with reference to SEQ ID NO: 4.

3. The engineered cytochrome P450-BM3 variant of claim 1, wherein said polypeptide sequence has at least 85%, 86%, 87%, 88%, 89%, 90%, 91%, 92%, 93%, 94%, 95%, 96%, 97%, 98%, 99%, or more sequence identity to SEQ ID NO: 36, and wherein the polypeptide sequence of said engineered cytochrome P450-BM3 variant comprises at least one substitution or substitution set at one or more positions in said polypeptide sequence selected from 75, 75/374, 75/374/458/726, 75/374/726, 75/458, 75/458/726, 75/726, 111/114, 111/603/604/623/853, 111/623, 374/726, and 726, wherein the amino acid positions of said polypeptide sequence are numbered with reference to SEQ ID NO: 36.

4. The engineered cytochrome P450-BM3 variant of claim 1, wherein said polypeptide sequence has at least 85%, 86%, 87%, 88%, 89%, 90%, 91%, 92%, 93%, 94%, 95%, 96%, 97%, 98%, 99%, or more sequence identity to SEQ ID NO: 66, and wherein the polypeptide sequence of said engineered cytochrome P450-BM3 variant comprises at least one substitution or substitution set at one or more positions in said polypeptide sequence selected from 74, 75, 83, 179, 181, 182, 186, 189, 238, 267, 268, 328, 331, 355, 358, 437, and 438, wherein the amino acid positions of said polypeptide sequence are numbered with reference to SEQ ID NO: 66.

5. The engineered cytochrome P450-BM3 variant of claim 1, wherein said polypeptide sequence has at least 85%, 86%, 87%, 88%, 89%, 90%, 91%, 92%, 93%, 94%, 95%, 96%, 97%, 98%, 99%, or more sequence identity to SEQ ID NO: 72, and wherein the polypeptide sequence of said engineered cytochrome P450-BM3 variant comprises at least one substitution or substitution set at one or more positions in said polypeptide sequence selected from 74/75/83/179/189/328/331/437, 74/75/268/328/331/358/437, 74/83/268/328/331/358/437, 74/267/268/328, 75/83/179/189/331, 75/83/179/268/328/331/437, 75/83/189/267/268, 75/83/267/268/355/358/654, 75/83/268/437, 75/268/328/331/358, 83/179/182/437, 83/179/189/331/355, 83/179/328/331, 83/179/355/358/437, 83/182/189/268/328/331/355/358/437, 83/182/189/328/331, 83/182/268/328/355/358/437, 83/189/267/268/358, 83/189/268/328/331, 83/189/268/328/355/358/437, 83/189/328/331/437, 83/267/268/328/331/355/358, 83/268, 83/268/328/331, 83/268/328/331/355/358, 83/268/328/331/358, 83/268/328/331/358/437, 83/268/328/331/437, 83/268/331, 83/331, 83/331/437, 83/358/437, 179/182/268, 179/189/331/437, 179/328/331, 179/331/358, 189/267/268/437, 189/268/328, 189/268/328/331/358/437, 189/268/358, 267/268/328, 267/268/328/331/355/358, 267/268/331/355/358/437, 268, 268/328/331, 268/328/355/358, 268/331/355/358, 268/355/358/437, 268/358, and 328/331/358, wherein the amino acid positions of said polypeptide sequence are numbered with reference to SEQ ID NO: 72.

6. The engineered cytochrome P450-BM3 variant of claim 1, wherein said polypeptide sequence has at least 85%, 86%, 87%, 88%, 89%, 90%, 91%, 92%, 93%, 94%, 95%, 96%, 97%, 98%, 99%, or more sequence identity to SEQ ID NO: 198, and wherein the polypeptide sequence of said engineered cytochrome P450-BM3 variant comprises at least one substitution or substitution set at one or more positions in said polypeptide sequence selected from 79, 213, and 257, wherein the amino acid positions of said polypeptide sequence are numbered with reference to SEQ ID NO: 198.

7. The engineered cytochrome P450-BM3 variant of claim 1, wherein said polypeptide sequence has at least 85%, 86%, 87%, 88%, 89%, 90%, 91%, 92%, 93%, 94%, 95%, 96%, 97%, 98%, 99%, or more sequence identity to SEQ ID NO: 226, and wherein the polypeptide sequence of said engineered cytochrome P450-BM3 variant comprises at least one substitution or substitution set at one or more positions in said polypeptide sequence selected from 315, 320, 385, 388, 391, 398, 405, 493, 497, 502, 503, 504, 541, 542, 547, 573, 576, and 577, wherein the amino acid positions of said polypeptide sequence are numbered with reference to SEQ ID NO: 226.

8. The engineered cytochrome P450-BM3 variant of claim 1, wherein said polypeptide sequence has at least 85%, 86%, 87%, 88%, 89%, 90%, 91%, 92%, 93%, 94%, 95%, 96%, 97%, 98%, 99%, or more sequence identity to SEQ ID NO: 244, and wherein the polypeptide sequence of said engineered cytochrome P450-BM3 variant comprises at least one substitution or substitution set at one or more positions in said polypeptide sequence selected from 75/178/213/315, 75/331/576/726, 178, 178/179/213/437/497/573/576, 178/179/573/726, 178/179/576, 178/213/573, 178/213/726, 178/437, 178/497/726, 178/576, 178/726, 179/358, 179/726, 331, 331/358/391/437, 331/497, 331/573/576, 497/573, 573, 682, 685, 699, 701, 704, 707, 708, 726, 756, 759, 794, 796, 797, 848, 851, 862, 888, 889, 999, 1003, and 1048, wherein the amino acid positions of said polypeptide sequence are numbered with reference to SEQ ID NO: 244.

9. The engineered cytochrome P450-BM3 variant of claim 1, wherein said polypeptide sequence has at least 85%, 86%, 87%, 88%, 89%, 90%, 91%, 92%, 93%, 94%, 95%, 96%, 97%, 98%, 99%, or more sequence identity to SEQ ID NO: 286, and wherein the polypeptide sequence of said engineered cytochrome P450-BM3 variant comprises at least one substitution or substitution set at one or more positions in said polypeptide sequence selected from 75/331/701/726/851/1048, 75/331/726/999, 75/726/796/851/999, 75/1048, 87, 88/522, 89, 234, 269, 328, 330, 331, 398, 405, 408, and 411, wherein the amino acid positions of said polypeptide sequence are numbered with reference to SEQ ID NO: 286.

10. The engineered cytochrome P450-BM3 variant of claim 1, wherein said polypeptide sequence has at least 85%, 86%, 87%, 88%, 89%, 90%, 91%, 92%, 93%, 94%, 95%, 96%, 97%, 98%, 99%, or more sequence identity to SEQ ID NO: 358, and wherein the polypeptide sequence of said engineered cytochrome P450-BM3 variant comprises at least one substitution or substitution set at one or more positions in said polypeptide sequence selected from 77, 170, 286, 289, 462, 547, 557, 630, 646, 651, 672, 676, 692, 775, 786, 787, 788, 814, 841, 876, 877, 888, 893, 896, 924, 941, 955, 969, 973, 982, 989, 993, 1038, 75/269/707, 269, 269/522/707, 269/522/707/1048, 522, 522/726, 522/1048, and 726/1048, wherein the amino acid positions of said polypeptide sequence are numbered with reference to SEQ ID NO: 358.

11. The engineered cytochrome P450-BM3 variant of claim 1, wherein said polypeptide sequence has at least 85%, 86%, 87%, 88%, 89%, 90%, 91%, 92%, 93%, 94%, 95%, 96%, 97%, 98%, 99%, or more sequence identity to SEQ ID NO: 410, and wherein the polypeptide sequence of said engineered cytochrome P450-BM3 variant comprises at least one substitution or substitution set at one or more positions in said polypeptide sequence selected from 158/170, 158/170/410/462/630/672/726/786/788/814/924, 158/170/410/462/726/786/814, 158/170/410/924, 158/170/630/726/786/788/814, 158/410, 158/410/462/557/969, 158/410/557/786/787, 158/410/814/924, 158/410/862, 158/462/557/630/924, 158/462/630/786/788/969, 158/557, 158/557/630/814, 158/557/726/786/788/862, 158/557/786, 158/557/786/787/788, 158/557/814/924, 158/630/786/814, 158/726, 158/786/787/788, 158/814/924, 170/410/557/786/787/814/924/989, 385, 410/462/557/630/786/787/969, 462/557/726/786/787/924, 469, 523, 550, 553, 556, 574, 613, 640, 645, 650, 652, 717, 773, 779, 795, 838, 871, 923, 926, 51/851, 460, 466, 474, 597, 600, 635, 638, 655, 663, 664, 677, 694, 696, 713, 771, 783, 789, 806, 807, 840, 842, 851, 857, 860, 878, 894, 942, 947, 960, 978, 992, 1008, 1012, 1024, and 1025, wherein the amino acid positions of said polypeptide sequence are numbered with reference to SEQ ID NO: 410.

12. The engineered cytochrome P450-BM3 variant of claim 1, wherein said polypeptide sequence has at least 85%, 86%, 87%, 88%, 89%, 90%, 91%, 92%, 93%, 94%, 95%, 96%, 97%, 98%, 99%, or more sequence identity to SEQ ID NO: 544, and wherein the polypeptide sequence of said engineered cytochrome P450-BM3 variant comprises at least one substitution or substitution set at one or more positions in said polypeptide sequence selected from 77/179/286/410/788/888, 77/410/676/788/924, 77/557/707/888, 286/410/651/676, 286/410/707/788, 286/410/888, 286/692/786/788, 410, 410/557/676/788/888/924/993, 410/557/692/788, and 410/646/651/788, wherein the amino acid positions of said polypeptide sequence are numbered with reference to SEQ ID NO: 544.

13. The engineered cytochrome P450-BM3 variant of claim 1, wherein said polypeptide sequence has at least 85%, 86%, 87%, 88%, 89%, 90%, 91%, 92%, 93%, 94%, 95%, 96%, 97%, 98%, 99%, or more sequence identity to SEQ ID NO: 734, and wherein the polypeptide sequence of said engineered cytochrome P450-BM3 variant comprises at least one substitution or substitution set at one or more positions in said polypeptide sequence selected from 24, 53, 75, 78, 82, 88, 150, 180, 183, 257, 270, 410/497/557/576/814, 410/497/573/576, 410/497/814, 410/557/924, 437, and 497/557, wherein the amino acid positions of said polypeptide sequence are numbered with reference to SEQ ID NO: 734.

14. The engineered cytochrome P450-BM3 variant of claim 1, wherein said polypeptide sequence has at least 85%, 86%, 87%, 88%, 89%, 90%, 91%, 92%, 93%, 94%, 95%, 96%, 97%, 98%, 99%, or more sequence identity to SEQ ID NO: 748, and wherein the polypeptide sequence of said engineered cytochrome P450-BM3 variant comprises at least one substitution or substitution set at one or more positions in said polypeptide sequence selected from 75, 75/82/180/257/437, 75/82/257/268, 75/82/257/556/640, 75/82/257/773, 75/82/437, 75/180/183/257/268/270/385/437/556/613/652/923, 75/180/257/268/270/437/556/574/652, 75/180/574/795, 75/257/613, 75/257/640, 75/556/773, 75/574, 75/613, 82/613, 180/437/773/795, 257/613/773/795, 45, 102, 106, 110, 111, 114, 127, 191, 193, 194, 196, 196/853, 198, 202, 203, 206, 210, 226, 232, 236, 237, 244, 245, 248, 254, 256, and 347, wherein the amino acid positions of said polypeptide sequence are numbered with reference to SEQ ID NO: 748.

15. The engineered cytochrome P450-BM3 variant of claim 1, wherein said polypeptide sequence has at least 85%, 86%, 87%, 88%, 89%, 90%, 91%, 92%, 93%, 94%, 95%, 96%, 97%, 98%, 99%, or more sequence identity to SEQ ID NO: 828, and wherein the polypeptide sequence of said engineered cytochrome P450-BM3 variant comprises at least one substitution or substitution set at one or more positions in said polypeptide sequence selected from 22/75/717/720/779/1004, 22/550/826, 22/616/717/1004, 22/717/795/799/826, 550/616/717/779, 550/640/717, 550/717/795/799/800, 616/717/720/799, 640, 717, 717/720/779/1004, 717/779/799/800/1004, 717/1004, 720/779, 779/1004, 800/1004, and 826/1004, wherein the amino acid positions of said polypeptide sequence are numbered with reference to SEQ ID NO: 828.

16. The engineered cytochrome P450-BM3 variant of claim 1, wherein said polypeptide sequence has at least 85%, 86%, 87%, 88%, 89%, 90%, 91%, 92%, 93%, 94%, 95%, 96%, 97%, 98%, 99%, or more sequence identity to SEQ ID NO: 968, and wherein the polypeptide sequence of said engineered cytochrome P450-BM3 variant comprises at least one substitution or substitution set at one or more positions in said polypeptide sequence selected from 3, 118/446, 132, 230, 285, 290, 292, 293, 295, 296, 300, 303, 305, 307, 366, 371, 372, 381, 382, 415, 417, 418, 424, 427, 432, 433, 446, 447, 455, 463, 465, 468, 473, 473/790, 478, 480, 481, 506, 600/635/713/771/1025, 600/840/960, 635/636/793/840, 635/638/793/823/960, 635/713/1025, 635/771/894, 636/638/793/851, 638/663/793/840, 713, 771, 786/840/960, 793/840, 807, 840/960, 851/1024/1025, 851/1025, 960, and 1025, wherein the amino acid positions of said polypeptide sequence are numbered with reference to SEQ ID NO: 968.

17. The engineered cytochrome P450-BM3 variant of claim 1, wherein said polypeptide sequence has at least 85%, 86%, 87%, 88%, 89%, 90%, 91%, 92%, 93%, 94%, 95%, 96%, 97%, 98%, 99%, or more sequence identity to SEQ ID NO: 984, and wherein the polypeptide sequence of said engineered cytochrome P450-BM3 variant comprises at least one substitution or substitution set at one or more positions in said polypeptide sequence selected from 45, 45/111/226/347, 45/853, 110/114, 111, 111/127/226/244, 111/194/244/347/853, 111/194/347, 111/194/347/853, 111/210, 111/210/347/853, 111/226, 111/226/244/347, 111/226/853/969, 111/244, 111/244/853, 111/347/853, 111/853, 114, 114/245, 127/210/244, 127/210/244/853, 127/210/347/853, 127/244, 127/347, 194/853, 210/853, 226/236/244/347/853, 236/244, 237, 237/245, 244/853, 245, 518, 518/652, 519, 562, 563, 584/724, 586, 616, 618, 619, 621, 623, 628, 640, 653, and 666 wherein the amino acid positions of said polypeptide sequence are numbered with reference to SEQ ID NO: 984.

18. The engineered cytochrome P450-BM3 variant of claim 1, wherein said polypeptide sequence has at least 85%, 86%, 87%, 88%, 89%, 90%, 91%, 92%, 93%, 94%, 95%, 96%, 97%, 98%, 99%, or more sequence identity to SEQ ID NO: 1160, and wherein the polypeptide sequence of said engineered cytochrome P450-BM3 variant comprises at least one substitution or substitution set at one or more positions in said polypeptide sequence selected from 132/366/433/463/467/793, 132/366/467/661, 132/467/468/506/793, 132/468/793, 132/1025, 183/1025/1045/1048, 290/366/433/463/467, 290/433/467/793/1025, 290/433/793, 290/793, 290/1025, 366/433, 433, 433/467/1025, 433/506/1025, 433/790, 463/793, 473, 793, and 1025, wherein the amino acid positions of said polypeptide sequence are numbered with reference to SEQ ID NO: 1160.

19. The engineered cytochrome P450-BM3 variant of claim 1, wherein said polypeptide sequence has at least 85%, 86%, 87%, 88%, 89%, 90%, 91%, 92%, 93%, 94%, 95%, 96%, 97%, 98%, 99%, or more sequence identity to SEQ ID NO: 1266, and wherein the polypeptide sequence of said engineered cytochrome P450-BM3 variant comprises at least one substitution or substitution set at one or more positions in said polypeptide sequence selected from 114/230/446/853, 114/292/293/296/463/853, 132/183/366/467/661/1025/1045/1048, 132/290/366/433/467/661/793/1025, 132/290/366/467/661/793, 132/290/366/467/661/1025, 132/366/433/467/506/661/1025, 132/366/433/467/661, 132/366/433/467/661/790, 132/366/463/467/661/793, 132/366/467/473/661, 132/366/467/661/793, 366/467/468/506/661/793, 433/463/467/661/793, 463, 463/853, 689, 720, 724, 730, 769, 780, 792, 810, 817, 824, 853, 923, 926, 939, 952, 962, 968, 974, 979, 981, 995, 1006, 1015, 1017, 1022, 1027, 1031, 1040, 458, 518/653, 519/628, 616/619, and 653 wherein the amino acid positions of said polypeptide sequence are numbered with reference to SEQ ID NO: 1266.

20. The engineered cytochrome P450-BM3 variant of claim 1, wherein said engineered cytochrome P450-BM3 variant comprises a polypeptide sequence selected from the group consisting of (a) a polypeptide sequence that is at least 85%, 86%, 87%, 88%, 89%, 90%, 91%, 92%, 93%, 94%, 95%, 96%, 97%, 98%, 99% or more identical to SEQ ID NO: 4, 36, 66, 72, 198, 226, 244, 286, 358, 410, 534, 734, 748, 828, 968, 984, 1160, or 1266;
(b) a polypeptide sequence set forth in SEQ ID NO: 36, 66, 72, 198, 226, 244, 286, 358, 410, 534, 734, 748, 828, 968, 984, 1160, or 1266; and
(c) a polypeptide sequence forth in at least one of the even numbered sequences of SEQ ID NOS: 4-1368.

21. The engineered cytochrome P450-BM3 variant of claim 1, wherein said engineered cytochrome P450-BM3 variant comprises at least one improved property, as compared to a wild-type Bacillus megaterium cytochrome P450-BM3 or engineered P450-BM3 variant.

22. The engineered cytochrome P450-BM3 variant of claim 21, wherein said improved property comprises a property selected from the properties consisting of (a) an improved activity on a substrate, (b) improved thermostability, (c) increased activity on a substrate after preincubation at 42.5° C. and (d) improved stereoselectivity toward one or more diastereomer products.

23. The engineered cytochrome P450-BM3 variant of claim 22, wherein said substrate comprises 1-tert-Butoxycarbonylaminocyclopentanoic acid (Compound (1)).

24. A polynucleotide sequence encoding at least one engineered cytochrome P450-BM3 variant of claim 20, said polynucleotide sequence comprises at least 85%, 86%, 87%, 88%, 89%, 90%, 91%, 92%, 93%, 94%, 95%, 96%, 97%, 98%, 99%, or more sequence identity to SEQ ID NOS: 3, 35, 65, 71, 197, 225, 243, 285, 357, 409, 533, 733, 747, 827, 967, 983, 1159, or 1265, wherein the polynucleotide sequence of said engineered cytochrome P450-BM3 variant comprises at least one substitution at one or more positions.

25. An expression vector comprising at least one polynucleotide sequence of claim 24.

26. A host cell comprising at least one polynucleotide sequence of claim 24.

27. A method of producing an engineered cytochrome P450-BM3 variant in a host cell, comprising culturing a host cell of claim 26, under suitable conditions, such that at least one engineered cytochrome P450-BM3 variant is produced.

The application's sequence listing, which the Patent Office published only in electronic form, follows.

SEQUENCE LISTING (1368 sequences)

SEQ ID NO: 1 - DNA, 3147 bp, synthetic construct
  misc_feature 1..3147: note = wild type P450 oxidase from Bacillus megaterium
  source 1..3147: mol_type = other DNA
atgacaataaaggaaatgccgcagccgaaaacgtttggagaacttaaaaatttaccgttattaaacacagataaaccggttcaagctttgatgaaaattgcggatgaattaggagaaatctttaaattcgaggcgcctggttgtgtaacgcgctacttatcaagtcagcgtctaattaaagaagcatgcgatgaatcacgctttgataaaaacttaagtcaagcgcttaaatttgcacgtgattttgcaggagacgggttggtgacaagctggacgcatgaaataaattggaaaaaagcgcataatatcttacttccaagctttagtcagcaggcaatgaaaggctatcatgcgatgatggtcgatatcgccgtgcagcttgttcaaaagtgggagcgtctaaatgcagatgagcatattgaagtatcggaagacatgacacgtttaacgcttgatacaattggtctttgcggctttaactatcgctttaacagcttttaccgagatcagcctcatccatttattataagtatggtccgtgcactggatgaagtaatgaacaagctgcagcgagcaaatccagacgacccagcttatgatgaaaacaagcgccagtgtcaagaagatatcaaggtgatgaacgacctagtagataaaattattgcagatcgcaaagcaaggggtgaacaaagcgatgatttattaacgcagatgctaaacggaaaagatccagaaacgggtgagccgcttgatgacgggaacattagctatcaaattattacattcttaattgcgggacacgaaacaacaagtggtcttttatcatttgcgctgtatttcttagtgaaaaatccacatgtattacaaaaagtagcagaagaagcagcacgagttctagtagatcctgttccaagctacaaacaagtcaaacagcttaaatatgtcggcatggtcttaaacgaagcgctgcgcttatggccaactgctcctgcgttttccctatatgcaaaagaagatacggtgcttggaggagaatatcctttagaaaaaggcgacgaagtaatggttctgattcctcagcttcaccgtgataaaacaatttggggagacgatgtggaggagttccgtccagagcgttttgaaaatccaagtgcgattccgcagcatgcgtttaaaccgtttggaaacggtcagcgtgcgtgtatcggtcagcagttcgctcttcatgaagcaacgctggtacttggtatgatgctaaaacactttgactttgaagatcatacaaactacgagctcgatattaaagaaactttaacgttaaaacctgaaggctttgtggtaaaagcaaaatcgaaaaaaattccgcttggcggtattccttcacctagcactgaacagtctgctaaaaaagtacgcaaaaaggcagaaaacgctcataatacgccgctgcttgtgctatacggttcaaatatgggaacagctgaaggaacggcgcgtgatttagcagatattgcaatgagcaaaggatttgcaccgcaggtcgcaacgcttgattcacacgccggaaatcttccgcgcgaaggagctgtattaattgtaacggcgtcttataacggtcatccgcctgataacgcaaagcaatttgtcgactggttagaccaagcgtctgctgatgaagtaaaaggcgttcgctactccgtatttggatgcggcgataaaaactgggctactacgtatcaaaaagtgcctgcttttatcgatgaaacgcttgccgctaaaggggcagaaaacatcgctgaccgcggtgaagcagatgcaagcgacgactttgaaggcacatatgaagaatggcgtgaacatatgtggagtgacgtagcagcctactttaacctcgacattgaaaacagtgaagataataaatctactctttcacttcaatttgtcgacagcgccgcggatatgccgcttgcgaaaatgcacggtgcgttttcaacgaacgtcgtagcaagcaaagaacttcaacagccaggcagtgcacgaagcacgcgacatcttgaaattgaacttccaaaagaagcttcttatcaagaaggagatcatttaggtgttattcctcgcaactatgaaggaatagtaaaccgtgtaacagcaaggttcggcctagatgcatcacagcaaatccgtctggaagcagaagaagaaaaattagctcatttgccactcgctaaaacagtatccgtagaagagcttctgcaatacgtggagcttcaagatcctgttacgcgcacgcagcttcgcgcaatggctgctaaaacggtctgcccgccgcataaagtagagcttgaagccttgcttgaaaagcaagcctacaaagaacaagtgctggcaaaacgtttaacaatgcttgaactgcttgaaaaatacccggcgtgtgaaatgaaattcagcgaatttatcgcccttctgccaagcatacgcccgcgctattactcgatttcttcatcacctcgtgtcgatgaaaaacaagcaagcatcacggtcagcgttgtctcaggagaagcgtggagcggatatggagaatataaaggaattgcgtcgaactatcttgccgagctgcaagaaggagatacgattacgtgctttatttccacaccgcagtcagaatttacgctgccaaaagaccctgaaacgccgcttatcatggtcggaccgggaacaggcgtcgcgccgtttagaggctttgtgcaggcgcgcaaacagctaaaagaacaaggacagtcacttggagaagcacatttatacttcggctgccgttcacctcatgaagactatctgtatcaagaagagcttgaaaacgcccaaagcgaaggcatcattacgcttcataccgctttttctcgcatgccaaatcagccgaaaacatacgttcagcacgtaatggaacaagacggcaagaaattgattgaacttcttgatcaaggagcgcacttctatatttgcggagacggaagccaaatggcacctgccgttgaagcaacgcttatgaaaagctatgctgacgttcaccaagtgagtgaagcagacgctcgcttatggctgcagcagctagaagaaaaaggccgatacgcaaaagacgtgtgggctggg

SEQ ID NO: 2 - protein, 1049 aa, synthetic construct
  REGION 1..1049: note = wild type P450 oxidase from Bacillus megaterium
MTIKEMPQPKTFGELKNLPLLNTDKPVQALMKIADELGEIFKFEAPGCVTRYLSSQRLIKEACDESRFDKNLSQALKFARDFAGDGLVTSWTHEINWKKAHNILLPSFSQQAMKGYHAMMVDIAVQLVQKWERLNADEHIEVSEDMTRLTLDTIGLCGFNYRFNSFYRDQPHPFIISMVRALDEVMNKLQRANPDDPAYDENKRQCQEDIKVMNDLVDKIIADRKARGEQSDDLLTQMLNGKDPETGEPLDDGNISYQIITFLIAGHETTSGLLSFALYFLVKNPHVLQKVAEEAARVLVDPVPSYKQVKQLKYVGMVLNEALRLWPTAPAFSLYAKEDTVLGGEYPLEKGDEVMVLIPQLHRDKTIWGDDVEEFRPERFENPSAIPQHAFKPFGNGQRACIGQQFALHEATLVLGMMLKHFDFEDHTNYELDIKETLTLKPEGFVVKAKSKKIPLGGIPSPSTEQSAKKVRKKAENAHNTPLLVLYGSNMGTAEGTARDLADIAMSKGFAPQVATLDSHAGNLPREGAVLIVTASYNGHPPDNAKQFVDWLDQASADEVKGVRYSVFGCGDKNWATTYQKVPAFIDETLAAKGAENIADRGEADASDDFEGTYEEWREHMWSDVAAYFNLDIENSEDNKSTLSLQFVDSAADMPLAKMHGAFSTNVVASKELQQPGSARSTRHLEIELPKEASYQEGDHLGVIPRNYEGIVNRVTARFGLDASQQIRLEAEEEKLAHLPLAKTVSVEELLQYVELQDPVTRTQLRAMAAKTVCPPHKVELEALLEKQAYKEQVLAKRLTMLELLEKYPACEMKFSEFIALLPSIRPRYYSISSSPRVDEKQASITVSVVSGEAWSGYGEYKGIASNYLAELQEGDTITCFISTPQSEFTLPKDPETPLIMVGPGTGVAPFRGFVQARKQLKEQGQSLGEAHLYFGCRSPHEDYLYQEELENAQSEGIITLHTAFSRMPNQPKTYVQHVMEQDGKKLIELLDQGAHFYICGDGSQMAPAVEATLMKSYADVHQVSEADARLWLQQLEEKGRYAKDVWAG

SEQ ID NO: 3 - DNA, 3147 bp, synthetic construct
  misc_feature 1..3147: note = variant of P450 oxidase from Bacillus megaterium
  source 1..3147: mol_type = other DNA
atgacaattaaggaaatgcctcagcctaagacgtttggagaacttaaaaatttaccgttattaaacacagataaaccggttcaagctttgatgcgtattgcggatgaattaggagaaatctttaaattcgaggcgcctggtagcgtaacgcgctttttatcaagtcagcgtctaattaaagaagcatgcgatgaatcacgctttgataaaaacttaagtcaagcgcttaaatttgcacgtgattttcttggagacgggttatttacaagctggacgcatgaaccgaattggaaaaaagcgcataatatcttaggcccaagctttagtcagcgtgcaatgaaacgttatcatgcgatgatggtcgatatcgccgtgcagcttgttcaaaagtgggagcgtctaaatgcagatgagcatattgaagtatcggaagacatgacacgtttaacgcttgatacaattggtctttgcggctttaactatcgctttaacagcttttaccgagatcagcctcatccatttattgtgagtatggtccgtgcactggatgaagtaatgaacaagctgcagcgagcaaatccagacgacccagcttatgatgaaaacaagcgccagtgtcaagaagatatcaaggtgatgaacgactatgtagataaaattattgcagatcgcaaagcaaggggtgaacaaagccatgatttattaacgcagatgctaaacggaaaagatccagaaacgggtgagccgcttgatgacgggaacattcgttatcaaattattacattcttaattgcgggacacgaaacaacaagtggtcttttatcatttgcgctgtatttcttagtgaaaaatccacatgtattacaaaaagtagcagaagaagcagcacgagttctagtagatcctgttccaagctacaaacaagtcaaacagcttaaatatgtcggcatggtcttaaacgaagcgctgcgcttatggccaactgctcctgcgttttccctatatgcaaaagaagatacggtgcttggaggagaatatcctttaaccaaaggcgacgaagtaatggttctgattcctcagcttcaccgtgataaaacaatttggggagacgatgtggaggagttccgtccagagcgttttgaaaatccaagtgcgattccgcagcatgcgtttaaaccgtttggaaacggtcagcgtgcgtgtatcggtcagcagttcgctcttcatgaagcaacgctggtacttggtatgatgctaaaacactttgactttgaagatcatacaaactacgagctcgttattaaagaaactttaacgttaaaacctgaaggctttgtggtaaaagcaaaatcgaaaggcattccgcttggcggtattccttcacctagcactgaacagtctgctaaaaaagtacgcaaaaaggcagaaaacgctcataatacgccgctgcttgtgctatacggttcaaatgcgggaacagctgaaggaacggcgcgtgatttagcagatattgcaatgagcaaaggatttgcaccgcaggtcgcaacgcttgattcacacgccggaaatcttccgcgcgaaggagctgtattaattgtaacggcgtcttataacggtcatccgcctgataacgcaaagcaatttgtcgactggttagaccaagcgtctgctgatgaagtaaaaggcgttcgctactccgtatttggatgcggcgataaaaactgggctgcgacgtatcaaaaagtgcctgcttttatcgatgaaacgcttgccgctaaaggggcagaaaacatcgctgaccgcggtgaagcagatgcaagcgacgactttgaaggcacatatgaagaatggcgtgatcatatgtggagtgacgtagcagcctactttaacctcgacattgaaaacagtgaagataataaatctactctttcacttcaatttgtcgacagcgccgcggatatgccgcttgcgaaaatgcacggtgcgttttcaacgaacgtcgtagcaagcaaagaacttcaacagccaggcagtgcacgaagcacgcgacatcttgaaattgaacttccaaaagaagcttcttatcaagaaggagatcatttaggtgttattcctcgcaactatgaaggaatagtaaaccgtgtaacagcaaggttcggcctaagcgcatcacagcaaatccgtctggaagcagaagaagaaaaattagctcatttgccactcgctaaaacagtatccgtagaagagcttctgcaatacgtggagcttcaagatcctgttacgcgcacgcagcttcgcgcaatggctgctaaaacggtctgcccgccgcataaagtagagcttgaagccttgcttgaaaagcaagcctacaaagaacaagtgctggcaaaacgtttaacaatgcttgaactgcttgaaaaatacccggcgtgtgaaatgaaattcagcgaatttatcgcccttctgccaagcatacgcccgcgctattactcgatttcttcatcacctcgtgtcgatgaaaaacaagcaagcatcacggtcagcgttgtctcaggaccggcgtggagcggatatggagaatataaaggaattgcgtcgaactatcttgccgagctgcaagaaggagatacgattacgtgctttatttccacaccgcagtcagaatttacgctgccaaaagaccctgaaacgccgcttatcatggtcggaccgggaacaggcgtcgcgccgtttagaggctttgtgcaggcgcgcaaacagctaaaagaacaaggacagtcacttggagaagcacatttatacttcggctgccgttcacctcatgaagactatctgtatcaagaagagcttgaaaacgcccaaagcgaaggcatcattacgcttcataccgctttttctcgcatgccaaatcagccgaaaacatacgttcagcacgtaatggaacaagacggcaagaaattgattgaacttcttgatcaaggagcgcacttctatatttgcggagacggaagccaaatggcacctgccgttgaagcaacgcttatgaaaagctatgctgacgttcaccaagtgagtgaagcagacgctcgcttatggctgcagcagctagaagaaaaaggccgatacgcaaaagacgtgtgggctggg

SEQ ID NO: 4 - protein, 1049 aa, synthetic construct
  REGION 1..1049: note = variant of P450 oxidase from Bacillus megaterium
MTIKEMPQPKTFGELKNLPLLNTDKPVQALMRIADELGEIFKFEAPGSVTRFLSSQRLIKEACDESRFDKNLSQALKFARDFLGDGLFTSWTHEPNWKKAHNILGPSFSQRAMKRYHAMMVDIAVQLVQKWERLNADEHIEVSEDMTRLTLDTIGLCGFNYRFNSFYRDQPHPFIVSMVRALDEVMNKLQRANPDDPAYDENKRQCQEDIKVMNDYVDKIIADRKARGEQSHDLLTQMLNGKDPETGEPLDDGNIRYQIITFLIAGHETTSGLLSFALYFLVKNPHVLQKVAEEAARVLVDPVPSYKQVKQLKYVGMVLNEALRLWPTAPAFSLYAKEDTVLGGEYPLTKGDEVMVLIPQLHRDKTIWGDDVEEFRPERFENPSAIPQHAFKPFGNGQRACIGQQFALHEATLVLGMMLKHFDFEDHTNYELVIKETLTLKPEGFVVKAKSKGIPLGGIPSPSTEQSAKKVRKKAENAHNTPLLVLYGSNAGTAEGTARDLADIAMSKGFAPQVATLDSHAGNLPREGAVLIVTASYNGHPPDNAKQFVDWLDQASADEVKGVRYSVFGCGDKNWAATYQKVPAFIDETLAAKGAENIADRGEADASDDFEGTYEEWRDHMWSDVAAYFNLDIENSEDNKSTLSLQFVDSAADMPLAKMHGAFSTNVVASKELQQPGSARSTRHLEIELPKEASYQEGDHLGVIPRNYEGIVNRVTARFGLSASQQIRLEAEEEKLAHLPLAKTVSVEELLQYVELQDPVTRTQLRAMAAKTVCPPHKVELEALLEKQAYKEQVLAKRLTMLELLEKYPACEMKFSEFIALLPSIRPRYYSISSSPRVDEKQASITVSVVSGPAWSGYGEYKGIASNYLAELQEGDTITCFISTPQSEFTLPKDPETPLIMVGPGTGVAPFRGFVQARKQLKEQGQSLGEAHLYFGCRSPHEDYLYQEELENAQSEGIITLHTAFSRMPNQPKTYVQHVMEQDGKKLIELLDQGAHFYICGDGSQMAPAVEATLMKSYADVHQVSEADARLWLQQLEEKGRYAKDVWAG

SEQ ID NO: 5 - DNA, 3147 bp, synthetic construct
  misc_feature 1..3147: note = variant of P450 oxidase from Bacillus megaterium
  source 1..3147: mol_type = other DNA
atgacaattaaggaaatgcctcagcctaagacgtttggagaacttaaaaatttaccgttattaaacacagataaaccggttcaagctttgatgcgtattgcggatgaattaggagaaatctttaaattcgaggcgcctggtagcgtaacgcgctttttatcaagtcagcgtctaattaaagaagcatgcgatgaatcacgctttgataaaaacttaagtcaagcgcttaaatttgcacgtgattttgctggagacgggttagccacaagctggacgcatgaaccgaattggaaaaaagcgcataatatcttaggcccaagctttagtcagcgtgcaatgaaacgttatcatgcgatgatggtcgatatcgccgtgcagcttgttcaaaagtgggagcgtctaaatgcagatgagcatattgaagtatcggaagacatgacacgtttaacgcttgatacaattggtctttgcggctttaactatcgctttaacagcttttaccgagatcagcctcatccatttattgtgagtatggtccgtgcactggatgaagtaatgaacaagctgcagcgagcaaatccagacgacccagcttatgatgaaaacaagcgccagtgtcaagaagatatcaaggtgatgaacgactatgtagataaaattattgcagatcgcaaagcaaggggtgaacaaagtcatgatttattaacgcagatgctaaacggaaaagatccagaaacgggtgagccgcttgatgacgggaacattcgttatcaaattattacattcttaattgcgggacacgaaacaacaagtggtcttttatcatttgcgctgtatttcttagtgaaaaatccacatgtattacaaaaagtagcagaagaagcagcacgagttctagtagatcctgttccaagctacaaacaagtcaaacagcttaaatatgtcggcatggtcttaaacgaagcgctgcgcttatggccaactgctcctgcgttttccctatatgcaaaagaagatacggtgcttggaggagaatatcctttaacgaaaggcgacgaagtaatggttctgattcctcagcttcaccgtgataaaacaatttggggagacgatgtggaggagttccgtccagagcgttttgaaaatccaagtgcgattccgcagcatgcgtttaaaccgtttggaaacggtcagcgtgcgtgtatcggtcagcagttcgctcttcatgaagcaacgctggtacttggtatgatgctaaaacactttgactttgaagatcatacaaactacgagctcgttattaaagaaactttaacgttaaaacctgaaggctttgtggtaaaagcaaaatcgaaaggcattccgcttggcggtattccttcacctagcactgaacagtctgctaaaaaagtacgcaaaaaggcagaaaacgctcataatacgccgctgcttgtgctatacggttcaaatgcgggaacagctgaaggaacggcgcgtgatttagcagatattgcaatgagcaaaggatttgcaccgcaggtcgcaacgcttgattcacacgccggaaatcttccgcgcgaaggagctgtattaattgtaacggcgtcttataacggtcatccgcctgataacgcaaagcaatttgtcgactggttagaccaagcgtctgctgatgaagtaaaaggcgttcgctactccgtatttggatgcggcgataaaacttgggctgcgacgtatcaaaaagtgcctgcttttatcgatgaaacgcttgccgctaaaggggcagaaaacatcgctgaccgcggtgaagcagatgcaagcgacgactttgaaggcacatatgaagaatggcgtgatcatatgtggagtgacgtagcagcctactttaacctcgacattgaaaacagtgaagataataaatctactctttcacttcaatttgtcgacagcgccgcggatatgccgcttgcgaaaatgcacggtgcgttttcaacgaacgtcgtagcaagcaaagaacttcaacagccaggcagtgcacgaagcacgcgacatcttgaaattgaacttccaaaagaagcttcttatcaagaaggagatcatttaggtgttattcctcgcaactatgaaggaatagtaaaccgtgtaacagcaaggttcggcctaagcgcatcacagcaaatccgtctggaagcagaagaagaaaaattagctcatttgccactcgctaaaacagtatccgtagaagagcttctgcaatacgtggagcttcaagatcctgttacgcgcacgcagcttcgcgcaatggctgctaaaacggtctgcccgccgcataaagtagagcttgaagccttgcttgaaaagcaagcctacaaagaacaagtgctggcaaaacgtttaacaatgcttgaactgcttgaaaaatacccggcgtgtgaaatgaaattcagcgaatttatcgcccttctgccaagcatacgcccgcgctattactcgatttcttcatcacctcgtgtcgatgaaaaacaagcaagcatcacggtcagcgttgtctcaggaccggcgtggagcggatatggagaatataaaggaattgcgtcgaactatcttgccgagctgcaagaaggagatacgattacgtgctttatttccacaccgcagtcagaatttacgctgccaaaagaccctgaaacgccgcttatcatggtcggaccgggaacaggcgtcgcgccgtttagaggctttgtgcaggcgcgcaaacagctaaaagaacaaggacagtcacttggagaagcacatttatacttcggctgccgttcacctcatgaagactatctgtatcaagaagagcttgaaaacgcccaaagcgaaggcatcattacgcttcataccgctttttctcgcatgccaaatcagccgaaaacatacgttcagcacgtaatggaacaagacggcaagaaattgattgaacttcttgatcaaggagcgcacttctatatttgcggagacggaagccaaatggcacctgccgttgaagcaacgcttatgaaaagctatgctgacgttcaccaagtgagtgaagcagacgctcgcttatggctgcagcagctagaagaaaaaggccgatacgcaaaagacgtgtgggctggg

SEQ ID NO: 6 - protein, 1049 aa, synthetic construct
  REGION 1..1049: note = variant of P450 oxidase from Bacillus megaterium
MTIKEMPQPKTFGELKNLPLLNTDKPVQALMRIADELGEIFKFEAPGSVTRFLSSQRLIKEACDESRFDKNLSQALKFARDFAGDGLATSWTHEPNWKKAHNILGPSFSQRAMKRYHAMMVDIAVQLVQKWERLNADEHIEVSEDMTRLTLDTIGLCGFNYRFNSFYRDQPHPFIVSMVRALDEVMNKLQRANPDDPAYDENKRQCQEDIKVMNDYVDKIIADRKARGEQSHDLLTQMLNGKDPETGEPLDDGNIRYQIITFLIAGHETTSGLLSFALYFLVKNPHVLQKVAEEAARVLVDPVPSYKQVKQLKYVGMVLNEALRLWPTAPAFSLYAKEDTVLGGEYPLTKGDEVMVLIPQLHRDKTIWGDDVEEFRPERFENPSAIPQHAFKPFGNGQRACIGQQFALHEATLVLGMMLKHFDFEDHTNYELVIKETLTLKPEGFVVKAKSKGIPLGGIPSPSTEQSAKKVRKKAENAHNTPLLVLYGSNAGTAEGTARDLADIAMSKGFAPQVATLDSHAGNLPREGAVLIVTASYNGHPPDNAKQFVDWLDQASADEVKGVRYSVFGCGDKTWAATYQKVPAFIDETLAAKGAENIADRGEADASDDFEGTYEEWRDHMWSDVAAYFNLDIENSEDNKSTLSLQFVDSAADMPLAKMHGAFSTNVVASKELQQPGSARSTRHLEIELPKEASYQEGDHLGVIPRNYEGIVNRVTARFGLSASQQIRLEAEEEKLAHLPLAKTVSVEELLQYVELQDPVTRTQLRAMAAKTVCPPHKVELEALLEKQAYKEQVLAKRLTMLELLEKYPACEMKFSEFIALLPSIRPRYYSISSSPRVDEKQASITVSVVSGPAWSGYGEYKGIASNYLAELQEGDTITCFISTPQSEFTLPKDPETPLIMVGPGTGVAPFRGFVQARKQLKEQGQSLGEAHLYFGCRSPHEDYLYQEELENAQSEGIITLHTAFSRMPNQPKTYVQHVMEQDGKKLIELLDQGAHFYICGDGSQMAPAVEATLMKSYADVHQVSEADARLWLQQLEEKGRYAKDVWAG

SEQ ID NO: 7 - DNA, 3147 bp, synthetic construct
  misc_feature 1..3147: note = variant of P450 oxidase from Bacillus megaterium
  source 1..3147: mol_type = other DNA
atgacaattaaggaaatgcctcagcctaagacgtttggagaacttaaaaatttaccgttattaaacacagataaaccggttcaagctttgatgaaaattgcggatgaattaggagaaatctttaaattcgaggcgcctggtagcgtaacgcgctttttatcaagtcagcgtctaattaaagaagcatgcgatgaatcacgctttgataaaaacttaagtcaagcgcttaaatttgcacgtgattttgctggagacgggttagccacaagctggacgcatgaaccgaattggaaaaaagcgcataatatcttaggcccaagctttagtcagcgtgcaatgaaacgttatcatgcgatgatggtcgatatcgccgtgcagcttgttcaaaagtgggagcgtctaaatgcagatgagcatattgaagtatcggaagacatgacacgtttaacgcttgatacaattggtctttgcggctttaactatcgctttaacagcttttaccgagatcagcctcatccatttattgtgagtatggtccgtgcactggatgaagtaatgaacaagctgcagcgagcaaatccagacgacccagcttatgatgaaaacaagcgccagtgtcaagaagatatcaaggtgatgaacgactatgtagataaaattattgcagatcgcaaagcaaggggtgaacaaagtcatgatttattaacgcagatgctaaacggaaaagatccagaaacgggtgagccgcttgatgacgggaacattcgttatcaaattattacattcttaattgcgggacacgaaacaacaagtggtcttttatcatttgcgctgtatttcttagtgaaaaatccacatgtattacaaaaagtagcagaagaagcagcacgagttctagtagatcctgttccaagctacaaacaagtcaaacagcttaaatatgtcggcatggtcttaaacgaagcgctgcgcttatggccaactgctcctgcgttttccctatatgcaaaagaagatacggtgcttggaggagaatatcctttaaccaaaggcgacgaagtaatggttctgattcctcagcttcaccgtgataaaacaatttggggagacgatgtggaggagttccgtccagagcgttttgaaaatccaagtgcgattccgcagcatgcgtttaaaccgtttggaaacggtcagcgtgcgtgtatcggtcagcagttcgctcttcatgaagcaacgctggtacttggtatgatgctaaaacactttgactttgaagatcatacaaactacgagctcgttattaaagaaactttaacgttaaaacctgaaggctttgtggtaaaagcaaaatcgaaaggcattccgcttggcggtattccttcacctagcactgaacagtctgctaaaaaagtacgcaaaaaggcagaaaacgctcataatacgccgctgcttgtgctatacggttcaaatgcgggaacagctgaaggaacggcgcgtgatttagcagatattgcaatgagcaaaggatttgcaccgcaggtcgcaacgcttgattcacacgccggaaatcttccgcgcgaaggagctgtattaattgtaacggcgtcttataacggtcatccgcctgataacgcaaagcaatttgtcgactggttagaccaagcgtctgctgatgaagtaaaaggcgttcgctactccgtatttggatgcggcgataaaacttgggctgcgacgtatcaaaaagtgcctgcttttatcgatgaaacgcttgccgctaaaggggcagaaaacatcgctgaccgcggtgaagcagatgcaagcgacgactttgaaggcacatatgaagaatggcgtgatcatatgtggagtgacgtagcagcctactttaacctcgacattgaaaacagtgaagataataaatctactctttcacttcaatttgtcgacagcgccgcggatatgccgcttgcgaaaatgcacggtgcgttttcaacgaacgtcgtagcaagcaaagaacttcaacagccaggcagtgcacgaagcacgcgacatcttgaaattgaacttccaaaagaagcttcttatcaagaaggagatcatttaggtgttattcctcgcaactatgaaggaatagtaaaccgtgtaacagcaaggttcggcctaagcgcatcacagcaaatccgtctggaagcagaagaagaaaaattagctcatttgccactcgctaaaacagtatccgtagaagagcttctgcaatacgtggagcttcaagatcctgttacgcgcacgcagcttcgcgcaatggctgctaaaacggtctgcccgccgcataaagtagagcttgaagccttgcttgaaaagcaagcctacaaagaacaagtgctggcaaaacgtttaacaatgcttgaactgcttgaaaaatacccggcgtgtgaaatgaaattcagcgaatttatcgcccttctgccaagcatacgcccgcgctattactcgatttcttcatcacctcgtgtcgatgaaaaacaagcaagcatcacggtcagcgttgtctcaggaccggcgtggagcggatatggagaatataaaggaattgcgtcgaactatcttgccgagctgcaagaaggagatacgattacgtgctttatttccacaccgcagtcagaatttacgctgccaaaagaccctgaaacgccgcttatcatggtcggaccgggaacaggcgtcgcgccgtttagaggctttgtgcaggcgcgcaaacagctaaaagaacaaggacagtcacttggagaagcacatttatacttcggctgccgttcacctcatgaagactatctgtatcaagaagagcttgaaaacgcccaaagcgaaggcatcattacgcttcataccgctttttctcgcatgccaaatcagccgaaaacatacgttcagcacgtaatggaacaagacggcaagaaattgattgaacttcttgatcaaggagcgcacttctatatttgcggagacggaagccaaatggcacctgccgttgaagcaacgcttatgaaaagctatgctgacgttcaccaagtgagtgaagcagacgctcgcttatggctgcagcagctagaagaaaaaggccgatacgcaaaagacgtgtgggctggg

SEQ ID NO: 8 - protein, 1049 aa, synthetic construct
  REGION 1..1049: note = variant of P450 oxidase from Bacillus megaterium
MTIKEMPQPKTFGELKNLPLLNTDKPVQALMKIADELGEIFKFEAPGSVTRFLSSQRLIKEACDESRFDKNLSQALKFARDFAGDGLATSWTHEPNWKKAHNILGPSFSQRAMKRYHAMMVDIAVQLVQKWERLNADEHIEVSEDMTRLTLDTIGLCGFNYRFNSFYRDQPHPFIVSMVRALDEVMNKLQRANPDDPAYDENKRQCQEDIKVMNDYVDKIIADRKARGEQSHDLLTQMLNGKDPETGEPLDDGNIRYQIITFLIAGHETTSGLLSFALYFLVKNPHVLQKVAEEAARVLVDPVPSYKQVKQLKYVGMVLNEALRLWPTAPAFSLYAKEDTVLGGEYPLTKGDEVMVLIPQLHRDKTIWGDDVEEFRPERFENPSAIPQHAFKPFGNGQRACIGQQFALHEATLVLGMMLKHFDFEDHTNYELVIKETLTLKPEGFVVKAKSKGIPLGGIPSPSTEQSAKKVRKKAENAHNTPLLVLYGSNAGTAEGTARDLADIAMSKGFAPQVATLDSHAGNLPREGAVLIVTASYNGHPPDNAKQFVDWLDQASADEVKGVRYSVFGCGDKTWAATYQKVPAFIDETLAAKGAENIADRGEADASDDFEGTYEEWRDHMWSDVAAYFNLDIENSEDNKSTLSLQFVDSAADMPLAKMHGAFSTNVVASKELQQPGSARSTRHLEIELPKEASYQEGDHLGVIPRNYEGIVNRVTARFGLSASQQIRLEAEEEKLAHLPLAKTVSVEELLQYVELQDPVTRTQLRAMAAKTVCPPHKVELEALLEKQAYKEQVLAKRLTMLELLEKYPACEMKFSEFIALLPSIRPRYYSISSSPRVDEKQASITVSVVSGPAWSGYGEYKGIASNYLAELQEGDTITCFISTPQSEFTLPKDPETPLIMVGPGTGVAPFRGFVQARKQLKEQGQSLGEAHLYFGCRSPHEDYLYQEELENAQSEGIITLHTAFSRMPNQPKTYVQHVMEQDGKKLIELLDQGAHFYICGDGSQMAPAVEATLMKSYADVHQVSEADARLWLQQLEEKGRYAKDVWAG

SEQ ID NO: 9 - DNA, 3147 bp, synthetic construct
  misc_feature 1..3147: note = variant of P450 oxidase from Bacillus megaterium
  source 1..3147: mol_type = other DNA
atgacaattaaggaaatgcctcagcctaagacgtttggagaacttaaaaatttaccgttattaaacacagataaaccggttcaagctttgatgcgtattgcggatgaattaggagaaatctttaaattcgaggcgcctggtagcgtaacgcgctttttatcaagtcagcgtctaattaaagaagcatgcgatgaatcacgctttgataaaaacttaagtcaagcgcttaaatttgcacgtgattttgctggagacgggttagccacaagctggacgcatgaaccgaattggaaaaaagcgcataatatcttaggtccaagctttagtcagcaggcaatgaaacgttatcatgcgatgatggtcgatatcgccgtgcagcttgttcaaaagtgggagcgtctaaatgcagatgagcatattgaagtatcggaagacatgacacgtttaacgcttgatacaattggtctttgcggctttaactatcgctttaacagcttttaccgagatcagcctcatccatttattgtgagtatggtccgtgcactggatgaagtaatgaacaagctgcagcgagcaaatccagacgacccagcttatgatgaaaacaagcgccagtgtcaagaagatatcaaggtgatgaacgactatgtagataaaattattgcagatcgcaaagcaaggggtgaacaaagtcatgatttattaacgcagatgctaaacggaaaagatccagaaacgggtgagccgcttgatgacgggaacattcgttatcaaattattacattcttaattgcgggacacgaaacaacaagtggtcttttatcatttgcgctgtatttcttagtgaaaaatccacatgtattacaaaaagtagcagaagaagcagcacgagttctagtagatcctgttccaagctacaaacaagtcaaacagcttaaatatgtcggcatggtcttaaacgaagcgctgcgcttatggccaactgctcctgcgttttccctatatgcaaaagaagatacggtgcttggaggagaatatcctttaacgaaaggcgacgaagtaatggttctgattcctcagcttcaccgtgataaaacaatttggggagacgatgtggaggagttccgtccagagcgttttgaaaatccaagtgcgattccgcagcatgcgtttaaaccgtttggaaacggtcagcgtgcgtgtatcggtcagcagttcgctcttcatgaagcaacgctggtacttggtatgatgctaaaacactttgactttgaagatcatacaaactacgagctcgatattaaagaaactttaacgttaaaacctgaaggctttgtggtaaaagcaaaatcgaaaggtattccgcttggcggtattccttcacctagcactgaacagtctgctaaaaaagtacgcaaaaaggcagaaaacgctcataatacgccgctgcttgtgctatacggttcaaatgcgggaacagctgaaggaacggcgcgtgatttagcagatattgcaatgagcaaaggatttgcaccgcaggtcgcaacgcttgattcacacgccggaaatcttccgcgcgaaggagctgtattaattgtaacggcgtcttataacggtcatccgcctgataacgcaaagcaatttgtcgactggttagaccaagcgtctgctgatgaagtaaaaggcgttcgctactccgtatttggatgcggcgataaaaattgggctgcgacgtatcaaaaagtgcctgcttttatcgatgaaacgcttgccgctaaaggggcagaaaacatcgctgaccgcggtgaagcagatgcaagcgacgactttgaaggcacatatgaagaatggcgtgatcatatgtggagtgacgtagcagcctactttaacctcgacattgaaaacagtgaagataataaatctactctttcacttcaatttgtcgacagcgccgcggatatgccgcttgcgaaaatgcacggtgcgttttcaacgaacgtcgtagcaagcaaagaacttcaacagccaggcagtgcacgaagcacgcgacatcttgaaattgaacttccaaaagaagcttcttatcaagaaggagatcatttaggtgttattcctcgcaactatgaaggaatagtaaaccgtgtaacagcaaggttcggcctaagcgcatcacagcaaatccgtctggaagcagaagaagaaaaattagctcatttgccactcgctaaaacagtatccgtagaagagcttctgcaatacgtggagcttcaagatcctgttacgcgcacgcagcttcgcgcaatggctgctaaaacggtctgcccgccgcataaagtagagcttgaagccttgcttgaaaagcaagcctacaaagaacaagtgctggcaaaacgtttaacaatgcttgaactgcttgaaaaatacccggcgtgtgaaatgaaattcagcgaatttatcgcccttctgccaagcatacgcccgcgctattactcgatttcttcatcacctcgtgtcgatgaaaaacaagcaagcatcacggtcagcgttgtctcaggaccggcgtggagcggatatggagaatataaaggaattgcgtcgaactatcttgccgagctgcaagaaggagatacgattacgtgctttatttccacaccgcagtcagaatttacgctgccaaaagaccctgaaacgccgcttatcatggtcggaccgggaacaggcgtcgcgccgtttagaggctttgtgcaggcgcgcaaacagctaaaagaacaaggacagtcacttggagaagcacatttatacttcggctgccgttcacctcatgaagactatctgtatcaagaagagcttgaaaacgcccaaagcgaaggcatcattacgcttcataccgctttttctcgcatgccaaatcagccgaaaacatacgttcagcacgtaatggaacaagacggcaagaaattgattgaacttcttgatcaaggagcgcacttctatatttgcggagacggaagccaaatggcacctgccgttgaagcaacgcttatgaaaagctatgctgacgttcaccaagtgagtgaagcagacgctcgcttatggctgcagcagctagaagaaaaaggccgatacgcaaaagacgtgtgggctggg

SEQ ID NO: 10 - protein, 1049 aa, synthetic construct
  REGION 1..1049: note = variant of P450 oxidase from Bacillus megaterium
MTIKEMPQPKTFGELKNLPLLNTDKPVQALMRIADELGEIFKFEAPGSVTRFLSSQRLIKEACDESRFDKNLSQALKFARDFAGDGLATSWTHEPNWKKAHNILGPSFSQQAMKRYHAMMVDIAVQLVQKWERLNADEHIEVSEDMTRLTLDTIGLCGFNYRFNSFYRDQPHPFIVSMVRALDEVMNKLQRANPDDPAYDENKRQCQEDIKVMNDYVDKIIADRKARGEQSHDLLTQMLNGKDPETGEPLDDGNIRYQIITFLIAGHETTSGLLSFALYFLVKNPHVLQKVAEEAARVLVDPVPSYKQVKQLKYVGMVLNEALRLWPTAPAFSLYAKEDTVLGGEYPLTKGDEVMVLIPQLHRDKTIWGDDVEEFRPERFENPSAIPQHAFKPFGNGQRACIGQQFALHEATLVLGMMLKHFDFEDHTNYELDIKETLTLKPEGFVVKAKSKGIPLGGIPSPSTEQSAKKVRKKAENAHNTPLLVLYGSNAGTAEGTARDLADIAMSKGFAPQVATLDSHAGNLPREGAVLIVTASYNGHPPDNAKQFVDWLDQASADEVKGVRYSVFGCGDKNWAATYQKVPAFIDETLAAKGAENIADRGEADASDDFEGTYEEWRDHMWSDVAAYFNLDIENSEDNKSTLSLQFVDSAADMPLAKMHGAFSTNVVASKELQQPGSARSTRHLEIELPKEASYQEGDHLGVIPRNYEGIVNRVTARFGLSASQQIRLEAEEEKLAHLPLAKTVSVEELLQYVELQDPVTRTQLRAMAAKTVCPPHKVELEALLEKQAYKEQVLAKRLTMLELLEKYPACEMKFSEFIALLPSIRPRYYSISSSPRVDEKQASITVSVVSGPAWSGYGEYKGIASNYLAELQEGDTITCFISTPQSEFTLPKDPETPLIMVGPGTGVAPFRGFVQARKQLKEQGQSLGEAHLYFGCRSPHEDYLYQEELENAQSEGIITLHTAFSRMPNQPKTYVQHVMEQDGKKLIELLDQGAHFYICGDGSQMAPAVEATLMKSYADVHQVSEADARLWLQQLEEKGRYAKDVWAG

SEQ ID NO: 11 - DNA, 3147 bp, synthetic construct
  misc_feature 1..3147: note = variant of P450 oxidase from Bacillus megaterium
  source 1..3147: mol_type = other DNA
atgacaattaaggaaatgcctcagcctaagacgtttggagaacttaaaaatttaccgttattaaacacagataaaccggttcaagctttgatgcgtattgcggatgaattaggagaaatctttaaattcgaggcgcctggtagcgtaacgcgctttttatcaagtcagcgtctaattaaagaagcatgcgatgaatcacgctttgataaaaacttaagtcaagcgcttaaatttgcacgtgattttgctggagacgggttagccacaagctggacgcatgaaccgaattggaaaaaagcgcataatatcttactgccaagctttagtcagcgtgcaatgaaacgttatcatgcgatgatggtcgatatcgccgtgcagcttgttcaaaagtgggagcgtctaaatgcagatgagcatattgaagtatcggaagacatgacacgtttaacgcttgatacaattggtctttgcggctttaactatcgctttaacagcttttaccgagatcagcctcatccatttattgtgagtatggtccgtgcactggatgaagtaatgaacaagctgcagcgagcaaatccagacgacccagcttatgatgaaaacaagcgccagtgtcaagaagatatcaaggtgatgaacgactatgtagataaaattattgcagatcgcaaagcaaggggtgaacaaagccatgatttattaacgcagatgctaaacggaaaagatccagaaacgggtgagccgcttgatgacgggaacattcgttatcaaattattacattcttaattgcgggacacgaaacaacaagtggtcttttatcatttgcgctgtatttcttagtgaaaaatccacatgtattacaaaaagtagcagaagaagcagcacgagttctagtagatcctgttccaagctacaaacaagtcaaacagcttaaatatgtcggcatggtcttaaacgaagcgctgcgcttatggccaactgctcctgcgttttccctatatgcaaaagaagatacggtgcttggaggagaatatcctttaaccaaaggcgacgaagtaatggttctgattcctcagcttcaccgtgataaaacaatttggggagacgatgtggaggagttccgtccagagcgttttgaaaatccaagtgcgattccgcagcatgcgtttaaaccgtttggaaacggtcagcgtgcgtgtatcggtcagcagttcgctcttcatgaagcaacgctggtacttggtatgatgctaaaacactttgactttgaagatcatacaaactacgagctcgttattaaagaaactttaacgttaaaacctgaaggctttgtggtaaaagcaaaatcgaaaggcattccgcttggcggtattccttcacctagcactgaacagtctgctaaaaaagtacgcaaaaaggcagaaaacgctcataatacgccgctgcttgtgctatacggttcaaatgcgggaacagctgaaggaacggcgcgtgatttagcagatattgcaatgagcaaaggatttgcaccgcaggtcgcaacgcttgattcacacgccggaaatcttccgcgcgaaggagctgtattaattgtaacggcgtcttataacggtcatccgcctgataacgcaaagcaatttgtcgactggttagaccaagcgtctgctgatgaagtaaaaggcgttcgctactccgtatttggatgcggcgataaaaattgggctgcgacgtatcaaaaagtgcctgcttttatcgatgaaacgcttgccgctaaaggggcagaaaacatcgctgaccgcggtgaagcagatgcaagcgacgactttgaaggcacatatgaagaatggcgtgatcatatgtggagtgacgtagcagcctactttaacctcgacattgaaaacagtgaagataataaatctactctttcacttcaatttgtcgacagcgccgcggatatgccgcttgcgaaaatgcacggtgcgttttcaacgaacgtcgtagcaagcaaagaacttcaacagccaggcagtgcacgaagcacgcgacatcttgaaattgaacttccaaaagaagcttcttatcaagaaggagatcatttaggtgttattcctcgcaactatgaaggaatagtaaaccgtgtaacagcaaggttcggcctaagcgcatcacagcaaatccgtctggaagcagaagaagaaaaattagctcatttgccactcgctaaaacagtatccgtagaagagcttctgcaatacgtggagcttcaagatcctgttacgcgcacgcagcttcgcgcaatggctgctaaaacggtctgcccgccgcataaagtagagcttgaagccttgcttgaaaagcaagcctacaaagaacaagtgctggcaaaacgtttaacaatgcttgaactgcttgaaaaatacccggcgtgtgaaatgaaattcagcgaatttatcgcccttctgccaagcatacgcccgcgctattactcgatttcttcatcacctcgtgtcgatgaaaaacaagcaagcatcacggtcagcgttgtctcaggaccggcgtggagcggatatggagaatataaaggaattgcgtcgaactatcttgccgagctgcaagaaggagatacgattacgtgctttatttccacaccgcagtcagaatttacgctgccaaaagaccctgaaacgccgcttatcatggtcggaccgggaacaggcgtcgcgccgtttagaggctttgtgcaggcgcgcaaacagctaaaagaacaaggacagtcacttggagaagcacatttatacttcggctgccgttcacctcatgaagactatctgtatcaagaagagcttgaaaacgcccaaagcgaaggcatcattacgcttcataccgctttttctcgcatgccaaatcagccgaaaacatacgttcagcacgtaatggaacaagacggcaagaaattgattgaacttcttgatcaaggagcgcacttctatatttgcggagacggaagccaaatggcacctgccgttgaagcaacgcttatgaaaagctatgctgacgttcaccaagtgagtgaagcagacgctcgcttatggctgcagcagctagaagaaaaaggccgatacgcaaaagacgtgtgggctggg

SEQ ID NO: 12 - protein, 1049 aa, synthetic construct
  REGION 1..1049: note = variant of P450 oxidase from Bacillus megaterium
MTIKEMPQPKTFGELKNLPLLNTDKPVQALMRIADELGEIFKFEAPGSVTRFLSSQRLIKEACDESRFDKNLSQALKFARDFAGDGLATSWTHEPNWKKAHNILLPSFSQRAMKRYHAMMVDIAVQLVQKWERLNADEHIEVSEDMTRLTLDTIGLCGFNYRFNSFYRDQPHPFIVSMVRALDEVMNKLQRANPDDPAYDENKRQCQEDIKVMNDYVDKIIADRKARGEQSHDLLTQMLNGKDPETGEPLDDGNIRYQIITFLIAGHETTSGLLSFALYFLVKNPHVLQKVAEEAARVLVDPVPSYKQVKQLKYVGMVLNEALRLWPTAPAFSLYAKEDTVLGGEYPLTKGDEVMVLIPQLHRDKTIWGDDVEEFRPERFENPSAIPQHAFKPFGNGQRACIGQQFALHEATLVLGMMLKHFDFEDHTNYELVIKETLTLKPEGFVVKAKSKGIPLGGIPSPSTEQSAKKVRKKAENAHNTPLLVLYGSNAGTAEGTARDLADIAMSKGFAPQVATLDSHAGNLPREGAVLIVTASYNGHPPDNAKQFVDWLDQASADEVKGVRYSVFGCGDKNWAATYQKVPAFIDETLAAKGAENIADRGEADASDDFEGTYEEWRDHMWSDVAAYFNLDIENSEDNKSTLSLQFVDSAADMPLAKMHGAFSTNVVASKELQQPGSARSTRHLEIELPKEASYQEGDHLGVIPRNYEGIVNRVTARFGLSASQQIRLEAEEEKLAHLPLAKTVSVEELLQYVELQDPVTRTQLRAMAAKTVCPPHKVELEALLEKQAYKEQVLAKRLTMLELLEKYPACEMKFSEFIALLPSIRPRYYSISSSPRVDEKQASITVSVVSGPAWSGYGEYKGIASNYLAELQEGDTITCFISTPQSEFTLPKDPETPLIMVGPGTGVAPFRGFVQARKQLKEQGQSLGEAHLYFGCRSPHEDYLYQEELENAQSEGIITLHTAFSRMPNQPKTYVQHVMEQDGKKLIELLDQGAHFYICGDGSQMAPAVEATLMKSYADVHQVSEADARLWLQQLEEKGRYAKDVWAG

SEQ ID NO: 13 - DNA, 3147 bp, synthetic construct
  misc_feature 1..3147: note = variant of P450 oxidase from Bacillus megaterium
  source 1..3147: mol_type = other DNA
atgacaattaaggaaatgcctcagcctaagacgtttggagaacttaaaaatttaccgttattaaacacagataaaccggttcaagctttgatgaaaattgcggatgaattaggagaaatctttaaattcgaggcgcctggtagcgtaacgcgctttttatcaagtcagcgtctaattaaagaagcatgcgatgaatcacgctttgataaaaacttaagtcaagcgcttaaatttgcacgtgattttgctggagacgggttagccacaagctggacgcatgaaccgaattggaaaaaagcgcataatatcttaggtccaagctttagtcagcgtgcaatgaaacgttatcatgcgatgatggtcgatatcgccgtgcagcttgttcaaaagtgggagcgtctaaatgcagatgagcatattgaagtatcggaagacatgacacgtttaacgcttgatacaattggtctttgcggctttaactatcgctttaacagcttttaccgagatcagcctcatccatttattgtcagtatggtccgtgcactggatgaagtaatgaacaagctgcagcgagcaaatccagacgacccagcttatgatgaaaacaagcgccagtgtcaagaagatatcaaggtgatgaacgactatgtagataaaattattgcagatcgcaaagcaaggggtgaacaaagtcatgatttattaacgcagatgctaaacggaaaagatccagaaacgggtgagccgcttgatgacgggaacattcgttatcaaattattacattcttaattgcgggacacgaaacaacaagtggtcttttatcatttgcgctgtatttcttagtgaaaaatccacatgtattacaaaaagtagcagaagaagcagcacgagttctagtagatcctgttccaagctacaaacaagtcaaacagcttaaatatgtcggcatggtcttaaacgaagcgctgcgcttatggccaactgctcctgcgttttccctatatgcaaaagaagatacggtgcttggaggagaatatcctttaaccaaaggcgacgaagtaatggttctgattcctcagcttcaccgtgataaaacaatttggggagacgatgtggaggagttccgtccagagcgttttgaaaatccaagtgcgattccgcagcatgcgtttaaaccgtttggaaacggtcagcgtgcgtgtatcggtcagcagttcgctcttcatgaagcaacgctggtacttggtatgatgctaaaacactttgactttgaagatcatacaaactacgagctcgttattaaagaaactttaacgttaaaacctgaaggctttgtggtaaaagcaaaatcgaaaggtattccgcttggcggtattccttcacctagcactgaacagtctgctaaaaaagtacgcaaaaaggcagaaaacgctcataatacgccgctgcttgtgctatacggttcaaatgcgggaacagctgaaggaacggcgcgtgatttagcagatattgcaatgagcaaaggatttgcaccgcaggtcgcaacgcttgattcacacgccggaaatcttccgcgcgaaggagctgtattaattgtaacggcgtcttataacggtcatccgcctgataacgcaaagcaatttgtcgactggttagaccaagcgtctgctgatgaagtaaaaggcgttcgctactccgtatttggatgcggcgataaaaattgggctgcgacgtatcaaaaagtgcctgcttttatcgatgaaacgcttgccgctaaaggggcagaaaacatcgctgaccgcggtgaagcagatgcaagcgacgactttgaaggcacatatgaagaatggcgtgatcatatgtggagtgacgtagcagcctactttaacctcgacattgaaaacagtgaagataataaatctactctttcacttcaatttgtcgacagcgccgcggatatgccgcttgcgaaaatgcacggtgcgttttcaacgaacgtcgtagcaagcaaagaacttcaacagccaggcagtgcacgaagcacgcgacatcttgaaattgaacttccaaaagaagcttcttatcaagaaggagatcatttaggtgttattcctcgcaactatgaaggaatagtaaaccgtgtaacagcaaggttcggcctaagcgcatcacagcaaatccgtctggaagcagaagaagaaaaattagctcatttgccactcgctaaaacagtatccgtagaagagcttctgcaatacgtggagcttcaagatcctgttacgcgcacgcagcttcgcgcaatggctgctaaaacggtctgcccgccgcataaagtagagcttgaagccttgcttgaaaagcaagcctacaaagaacaagtgctggcaaaacgtttaacaatgcttgaactgcttgaaaaatacccggcgtgtgaaatgaaattcagcgaatttatcgcccttctgccaagcatacgcccgcgctattactcgatttcttcatcacctcgtgtcgatgaaaaacaagcaagcatcacggtcagcgttgtctcaggaccggcgtggagcggatatggagaatataaaggaattgcgtcgaactatcttgccgagctgcaagaaggagatacgattacgtgctttatttccacaccgcagtcagaatttacgctgccaaaagaccctgaaacgccgcttatcatggtcggaccgggaacaggcgtcgcgccgtttagaggctttgtgcaggcgcgcaaacagctaaaagaacaaggacagtcacttggagaagcacatttatacttcggctgccgttcacctcatgaagactatctgtatcaagaagagcttgaaaacgcccaaagcgaaggcatcattacgcttcataccgctttttctcgcatgccaaatcagccgaaaacatacgttcagcacgtaatggaacaagacggcaagaaattgattgaacttcttgatcaaggagcgcacttctatatttgcggagacggaagccaaatggcacctgccgttgaagcaacgcttatgaaaagctatgctgacgttcaccaagtgagtgaagcagacgctcgcttatggctgcagcagctagaagaaaaaggccgatacgcaaaagacgtgtgggctggg

SEQ ID NO: 14 - protein, 1049 aa, synthetic construct
  REGION 1..1049: note = variant of P450 oxidase from Bacillus megaterium
MTIKEMPQPKTFGELKNLPLLNTDKPVQALMKIADELGEIFKFEAPGSVTRFLSSQRLIKEACDESRFDKNLSQALKFARDFAGDGLATSWTHEPNWKKAHNILGPSFSQRAMKRYHAMMVDIAVQLVQKWERLNADEHIEVSEDMTRLTLDTIGLCGFNYRFNSFYRDQPHPFIVSMVRALDEVMNKLQRANPDDPAYDENKRQCQEDIKVMNDYVDKIIADRKARGEQSHDLLTQMLNGKDPETGEPLDDGNIRYQIITFLIAGHETTSGLLSFALYFLVKNPHVLQKVAEEAARVLVDPVPSYKQVKQLKYVGMVLNEALRLWPTAPAFSLYAKEDTVLGGEYPLTKGDEVMVLIPQLHRDKTIWGDDVEEFRPERFENPSAIPQHAFKPFGNGQRACIGQQFALHEATLVLGMMLKHFDFEDHTNYELVIKETLTLKPEGFVVKAKSKGIPLGGIPSPSTEQSAKKVRKKAENAHNTPLLVLYGSNAGTAEGTARDLADIAMSKGFAPQVATLDSHAGNLPREGAVLIVTASYNGHPPDNAKQFVDWLDQASADEVKGVRYSVFGCGDKNWAATYQKVPAFIDETLAAKGAENIADRGEADASDDFEGTYEEWRDHMWSDVAAYFNLDIENSEDNKSTLSLQFVDSAADMPLAKMHGAFSTNVVASKELQQPGSARSTRHLEIELPKEASYQEGDHLGVIPRNYEGIVNRVTARFGLSASQQIRLEAEEEKLAHLPLAKTVSVEELLQYVELQDPVTRTQLRAMAAKTVCPPHKVELEALLEKQAYKEQVLAKRLTMLELLEKYPACEMKFSEFIALLPSIRPRYYSISSSPRVDEKQASITVSVVSGPAWSGYGEYKGIASNYLAELQEGDTITCFISTPQSEFTLPKDPETPLIMVGPGTGVAPFRGFVQARKQLKEQGQSLGEAHLYFGCRSPHEDYLYQEELENAQSEGIITLHTAFSRMPNQPKTYVQHVMEQDGKKLIELLDQGAHFYICGDGSQMAPAVEATLMKSYADVHQVSEADARLWLQQLEEKGRYAKDVWAG

SEQ ID NO: 15 - DNA, 3147 bp, synthetic construct
  misc_feature 1..3147: note = variant of P450 oxidase from Bacillus megaterium
  source 1..3147: mol_type = other DNA
atgacaattaaggaaatgcctcagcctaagacgtttggagaacttaaaaatttaccgttattaaacacagataaaccggttcaagctttgatgcgtattgcggatgaattaggagaaatctttaaattcgaggcgcctggtagcgtaacgcgctatttatcaagtcagcgtctaattaaagaagcatgcgatgaatcacgctttgataaaaacttaagtcaagcgcttaaatttgcacgtgattttgctggagacgggttagccacaagctggacgcatgaaccgaattggaaaaaagcgcataatatcttaggtccaagctttagtcagcgtgcaatgaaacgttatcatgcgatgatggtcgatatcgccgtgcagcttgttcaaaagtgggagcgtctaaatgcagatgagcatattgaagtatcggaagacatgacacgtttaacgcttgatacaattggtctttgcggctttaactatcgctttaacagcttttaccgagatcagcctcatccatttattgtcagtatggtccgtgcactggatgaagtaatgaacaagctgcagcgagcaaatccagacgacccagcttatgatgaaaacaagcgccagtgtcaagaagatatcaaggtgatgaacgactatgtagataaaattattgcagatcgcaaagcaaggggtgaacaaagccatgatttattaacgcagatgctaaacggaaaagatccagaaacgggtgagccgcttgatgacgggaacattcgttatcaaattattacattcttaattgcgggacacgaaacaacaagtggtcttttatcatttgcgctgtatttcttagtgaaaaatccacatgtattacaaaaagtagcagaagaagcagcacgagttctagtagatcctgttccaagctacaaacaagtcaaacagcttaaatatgtcggcatggtcttaaacgaagcgctgcgcttatggccaactgctcctgcgttttccctatatgcaaaagaagatacggtgcttggaggagaatatcctttaacgaaaggcgacgaagtaatggttctgattcctcagcttcaccgtgataaaacaatttggggagacgatgtggaggagttccgtccagagcgttttgaaaatccaagtgcgattccgcagcatgcgtttaaaccgtttggaaacggtcagcgtgcgtgtatcggtcagcagttcgctcttcatgaagcaacgctggtacttggtatgatgctaaaacactttgactttgaagatcatacaaactacgagctcgatattaaagaaactttaacgttaaaacctgaaggctttgtggtaaaagcaaaatcgaaaggtattccgcttggcggtattccttcacctagcactgaacagtctgctaaaaaagtacgcaaaaaggcagaaaacgctcataatacgccgctgcttgtgctatacggttcaaatgcgggaacagctgaaggaacggcgcgtgatttagcagatattgcaatgagcaaaggatttgcaccgcaggtcgcaacgcttgattcacacgccggaaatcttccgcgcgaaggagctgtattaattgtaacggcgtcttataacggtcatccgcctgataacgcaaagcaatttgtcgactggttagaccaagcgtctgctgatgaagtaaaaggcgttcgctactccgtatttggatgcggcgataaaacttgggctgcgacgtatcaaaaagtgcctgcttttatcgatgaaacgcttgccgctaaaggggcagaaaacatcgctgaccgcggtgaagcagatgcaagcgacgactttgaaggcacatatgaagaatggcgtgatcatatgtggagtgacgtagcagcctactttaacctcgacattgaaaacagtgaagataataaatctactctttcacttcaatttgtcgacagcgccgcggatatgccgcttgcgaaaatgcacggtgcgttttcaacgaacgtcgtagcaagcaaagaacttcaacagccaggcagtgcacgaagcacgcgacatcttgaaattgaacttccaaaagaagcttcttatcaagaaggagatcatttaggtgttattcctcgcaactatgaaggaatagtaaaccgtgtaacagcaaggttcggcctaagcgcatcacagcaaatccgtctggaagcagaagaagaaaaattagctcatttgccactcgctaaaacagtatccgtagaagagcttctgcaatacgtggagcttcaagatcctgttacgcgcacgcagcttcgcgcaatggctgctaaaacggtctgcccgccgcataaagtagagcttgaagccttgcttgaaaagcaagcctacaaagaacaagtgctggcaaaacgtttaacaatgcttgaactgcttgaaaaatacccggcgtgtgaaatgaaattcagcgaatttatcgcccttctgccaagcatacgcccgcgctattactcgatttcttcatcacctcgtgtcgatgaaaaacaagcaagcatcacggtcagcgttgtctcaggaccggcgtggagcggatatggagaatataaaggaattgcgtcgaactatcttgccgagctgcaagaaggagatacgattacgtgctttatttccacaccgcagtcagaatttacgctgccaaaagaccctgaaacgccgcttatcatggtcggaccgggaacaggcgtcgcgccgtttagaggctttgtgcaggcgcgcaaacagctaaaagaacaaggacagtcacttggagaagcacatttatacttcggctgccgttcacctcatgaagactatctgtatcaagaagagcttgaaaacgcccaaagcgaaggcatcattacgcttcataccgctttttctcgcatgccaaatcagccgaaaacatacgttcagcacgtaatggaacaagacggcaagaaattgattgaacttcttgatcaaggagcgcacttctatatttgcggagacggaagccaaatggcacctgccgttgaagcaacgcttatgaaaagctatgctgacgttcaccaagtgagtgaagcagacgctcgcttatggctgcagcagctagaagaaaaaggccgatacgcaaaagacgtgtgggctggg

SEQ ID NO: 16 - protein, 1049 aa, synthetic construct
  REGION 1..1049: note = variant of P450 oxidase from Bacillus megaterium
MTIKEMPQPKTFGELKNLPLLNTDKPVQALMRIADELGEIFKFEAPGSVTRYLSSQRLIKEACDESRFDKNLSQALKFARDFAGDGLATSWTHEPNWKKAHNILGPSFSQRAMKRYHAMMVDIAVQLVQKWERLNADEHIEVSEDMTRLTLDTIGLCGFNYRFNSFYRDQPHPFIVSMVRALDEVMNKLQRANPDDPAYDENKRQCQEDIKVMNDYVDKIIADRKARGEQSHDLLTQMLNGKDPETGEPLDDGNIRYQIITFLIAGHETTSGLLSFALYFLVKNPHVLQKVAEEAARVLVDPVPSYKQVKQLKYVGMVLNEALRLWPTAPAFSLYAKEDTVLGGEYPLTKGDEVMVLIPQLHRDKTIWGDDVEEFRPERFENPSAIPQHAFKPFGNGQRACIGQQFALHEATLVLGMMLKHFDFEDHTNYELDIKETLTLKPEGFVVKAKSKGIPLGGIPSPSTEQSAKKVRKKAENAHNTPLLVLYGSNAGTAEGTARDLADIAMSKGFAPQVATLDSHAGNLPREGAVLIVTASYNGHPPDNAKQFVDWLDQASADEVKGVRYSVFGCGDKTWAATYQKVPAFIDETLAAKGAENIADRGEADASDDFEGTYEEWRDHMWSDVAAYFNLDIENSEDNKSTLSLQFVDSAADMPLAKMHGAFSTNVVASKELQQPGSARSTRHLEIELPKEASYQEGDHLGVIPRNYEGIVNRVTARFGLSASQQIRLEAEEEKLAHLPLAKTVSVEELLQYVELQDPVTRTQLRAMAAKTVCPPHKVELEALLEKQAYKEQVLAKRLTMLELLEKYPACEMKFSEFIALLPSIRPRYYSISSSPRVDEKQASITVSVVSGPAWSGYGEYKGIASNYLAELQEGDTITCFISTPQSEFTLPKDPETPLIMVGPGTGVAPFRGFVQARKQLKEQGQSLGEAHLYFGCRSPHEDYLYQEELENAQSEGIITLHTAFSRMPNQPKTYVQHVMEQDGKKLIELLDQGAHFYICGDGSQMAPAVEATLMKSYADVHQVSEADARLWLQQLEEKGRYAKDVWAG

SEQ ID NO: 17 - DNA, 3147 bp, synthetic construct
  misc_feature 1..3147: note = variant of P450 oxidase from Bacillus megaterium
  source 1..3147: mol_type = other DNA
atgacaattaaggaaatgcctcagcctaagacgtttggagaacttaaaaatttaccgttattaaacacagataaaccggttcaagctttgatgcgtattgcggatgaattaggagaaatctttaaattcgaggcgcctggtagcgtaacgcgctttttatcaagtcagcgtctaattaaagaagcatgcgatgaatcacgctttgataaaaacttaagtcaagcgcttaaatttgcacgtgattttgctggagacgggttagccacaagctggacgcatgaaccgaattggaaaaaagcgcataatatcttaggtccaagctttagtcagcgtgcaatgaaacgttatcatgcgatgatggtcgatatcgccgtgcagcttgttcaaaagtgggagcgtctaaatgcagatgagcatattgaagtatcggaagacatgacacgtttaacgcttgatacaattggtctttgcggctttaactatcgctttaacagcttttaccgagatcagcctcatccatttattgtcagtatggtccgtgcactggatgaagtaatgaacaagctgcagcgagcaaatccagacgacccagcttatgatgaaaacaagcgccagtgtcaagaagatatcaaggtgatgaacgactatgtagataaaattattgcagatcgcaaagcaaggggtgaacaaagtcatgatttattaacgcagatgctaaacggaaaagatccagaaacgggtgagccgcttgatgacgggaacattcgctatcaaattattacattcttaattgcgggacacgaaacaacaagtggtcttttatcatttgcgctgtatttcttagtgaaaaatccacatgtattacaaaaagtagcagaagaagcagcacgagttctagtagatcctgttccaagctacaaacaagtcaaacagcttaaatatgtcggcatggtcttaaacgaagcgctgcgcttatggccaactgctcctgcgttttccctatatgcaaaagaagatacggtgcttggaggagaatatcctttagagaaaggcgacgaagtaatggttctgattcctcagcttcaccgtgataaaacaatttggggagacgatgtggaggagttccgtccagagcgttttgaaaatccaagtgcgattccgcagcatgcgtttaaaccgtttggaaacggtcagcgtgcgtgtatcggtcagcagttcgctcttcatgaagcaacgctggtacttggtatgatgctaaaacactttgactttgaagatcatacaaactacgagctcgttattaaagaaactttaacgttaaaacctgaaggctttgtggtaaaagcaaaatcgaaaggtattccgcttggcggtattccttcacctagcactgaacagtctgctaaaaaagtacgcaaaaaggcagaaaacgctcataatacgccgctgcttgtgctatacggttcaaatgcgggaacagctgaaggaacggcgcgtgatttagcagatattgcaatgagcaaaggatttgcaccgcaggtcgcaacgcttgattcacacgccggaaatcttccgcgcgaaggagctgtattaattgtaacggcgtcttataacggtcatccgcctgataacgcaaagcaatttgtcgactggttagaccaagcgtctgctgatgaagtaaaaggcgttcgctactccgtatttggatgcggcgataaaaactgggctgcgacgtatcaaaaagtgcctgcttttatcgatgaaacgcttgccgctaaaggggcagaaaacatcgctgaccgcggtgaagcagatgcaagcgacgactttgaaggcacatatgaagaatggcgtgatcatatgtggagtgacgtagcagcctactttaacctcgacattgaaaacagtgaagataataaatctactctttcacttcaatttgtcgacagcgccgcggatatgccgcttgcgaaaatgcacggtgcgttttcaacgaacgtcgtagcaagcaaagaacttcaacagccaggcagtgcacgaagcacgcgacatcttgaaattgaacttccaaaagaagcttcttatcaagaaggagatcatttaggtgttattcctcgcaactatgaaggaatagtaaaccgtgtaacagcaaggttcggcctaagcgcatcacagcaaatccgtctggaagcagaagaagaaaaattagctcatttgccactcgctaaaacagtatccgtagaagagcttctgcaatacgtggagcttcaagatcctgttacgcgcacgcagcttcgcgcaatggctgctaaaacggtctgcccgccgcataaagtagagcttgaagccttgcttgaaaagcaagcctacaaagaacaagtgctggcaaaacgtttaacaatgcttgaactgcttgaaaaatacccggcgtgtgaaatgaaattcagcgaatttatcgcccttctgccaagcatacgcccgcgctattactcgatttcttcatcacctcgtgtcgatgaaaaacaagcaagcatcacggtcagcgttgtctcaggaccggcgtggagcggatatggagaatataaaggaattgcgtcgaactatcttgccgagctgcaagaaggagatacgattacgtgctttatttccacaccgcagtcagaatttacgctgccaaaagaccctgaaacgccgcttatcatggtcggaccgggaacaggcgtcgcgccgtttagaggctttgtgcaggcgcgcaaacagctaaaagaacaaggacagtcacttggagaagcacatttatacttcggctgccgttcacctcatgaagactatctgtatcaagaagagcttgaaaacgcccaaagcgaaggcatcattacgcttcataccgctttttctcgcatgccaaatcagccgaaaacatacgttcagcacgtaatggaacaagacggcaagaaattgattgaacttcttgatcaaggagcgcacttctatatttgcggagacggaagccaaatggcacctgccgttgaagcaacgcttatgaaaagctatgctgacgttcaccaagtgagtgaagcagacgctcgcttatggctgcagcagctagaagaaaaaggccgatacgcaaaagacgtgtgggctggg

SEQ ID NO: 18 - protein, 1049 aa, synthetic construct
  REGION 1..1049: note = variant of P450 oxidase from Bacillus megaterium
MTIKEMPQPKTFGELKNLPLLNTDKPVQALMRIADELGEIFKFEAPGSVTRFLSSQRLIKEACDESRFDKNLSQALKFARDFAGDGLATSWTHEPNWKKAHNILGPSFSQRAMKRYHAMMVDIAVQLVQKWERLNADEHIEVSEDMTRLTLDTIGLCGFNYRFNSFYRDQPHPFIVSMVRALDEVMNKLQRANPDDPAYDENKRQCQEDIKVMNDYVDKIIADRKARGEQSHDLLTQMLNGKDPETGEPLDDGNIRYQIITFLIAGHETTSGLLSFALYFLVKNPHVLQKVAEEAARVLVDPVPSYKQVKQLKYVGMVLNEALRLWPTAPAFSLYAKEDTVLGGEYPLEKGDEVMVLIPQLHRDKTIWGDDVEEFRPERFENPSAIPQHAFKPFGNGQRACIGQQFALHEATLVLGMMLKHFDFEDHTNYELVIKETLTLKPEGFVVKAKSKGIPLGGIPSPSTEQSAKKVRKKAENAHNTPLLVLYGSNAGTAEGTARDLADIAMSKGFAPQVATLDSHAGNLPREGAVLIVTASYNGHPPDNAKQFVDWLDQASADEVKGVRYSVFGCGDKNWAATYQKVPAFIDETLAAKGAENIADRGEADASDDFEGTYEEWRDHMWSDVAAYFNLDIENSEDNKSTLSLQFVDSAADMPLAKMHGAFSTNVVASKELQQPGSARSTRHLEIELPKEASYQEGDHLGVIPRNYEGIVNRVTARFGLSASQQIRLEAEEEKLAHLPLAKTVSVEELLQYVELQDPVTRTQLRAMAAKTVCPPHKVELEALLEKQAYKEQVLAKRLTMLELLEKYPACEMKFSEFIALLPSIRPRYYSISSSPRVDEKQASITVSVVSGPAWSGYGEYKGIASNYLAELQEGDTITCFISTPQSEFTLPKDPETPLIMVGPGTGVAPFRGFVQARKQLKEQGQSLGEAHLYFGCRSPHEDYLYQEELENAQSEGIITLHTAFSRMPNQPKTYVQHVMEQDGKKLIELLDQGAHFYICGDGSQMAPAVEATLMKSYADVHQVSEADARLWLQQLEEKGRYAKDVWAG

SEQ ID NO: 19 - DNA, 3147 bp, synthetic construct
  misc_feature 1..3147: note = variant of P450 oxidase from Bacillus megaterium
  source 1..3147: mol_type = other DNA
atgacaattaaggaaatgcctcagcctaagacgtttggagaacttaaaaatttaccgttattaaacacagataaaccggttcaagctttgatgcgtattgcggatgaattaggagaaatctttaaattcgaggcgcctggtagcgtaacgcgctttttatcaagtcagcgtctaattaaagaagcatgcgatgaatcacgctttgataaaaacttaagtcaagcgcttaaatttgcacgtgattttgctggagacgggttagccacaagctggacgcatgaaccgaattggaaaaaagcgcataatatcttaggtccaagctttagtcagcgtgcaatgaaacgttatcatgcgatgatggtcgatatcgccgtgcagcttgttcaaaagtgggagcgtctaaatgcagatgagcatattgaagtatcggaagacatgacacgtttaacgcttgatacaattggtctttgcggctttaactatcgctttaacagcttttaccgagatcagcctcatccatttattgtgagtatggtccgtgcactggatgaagtaatgaacaagctgcagcgagcaaatccagacgacccagcttatgatgaaaacaagcgccagtgtcaagaagatatcaaggtgatgaacgactatgtagataaaattattgcagatcgcaaagcaaggggtgaacaacgtcatgatttattaacgcagatgctaaacggaaaagatccagaaacgggtgagccgcttgatgacgggaacattcgttatcaaattattacattcttaattgcgggacacgaaacaacaagtggtcttttatcatttgcgctgtatttcttagtgaaaaatccacatgtattacaaaaagtagcagaagaagcagcacgagttctagtagatcctgttccaagctacaaacaagtcaaacagcttaaatatgtcggcatggtcttaaacgaagcgctgcgcttatggccaactgctcctgcgttttccctatatgcaaaagaagatacggtgcttggaggagaatatcctttaaccaaaggcgacgaagtaatggttctgattcctcagcttcaccgtgataaaacaatttggggagacgatgtggaggagttccgtccagagcgttttgaaaatccaagtgcgattccgcagcatgcgtttaaaccgtttggaaacggtcagcgtgcgtgtatcggtcagcagttcgctcttcatgaagcaacgctggtacttggtatgatgctaaaacactttgactttgaagatcatacaaactacgagctcgttattaaagaaactttaacgttaaaacctgaaggctttgtggtaaaagcaaaatcgaaaggtattccgcttggcggtattccttcacctagcactgaacagtctgctaaaaaagtacgcaaaaaggcagaaaacgctcataatacgccgctgcttgtgctatacggttcaaatgcgggaacagctgaaggaacggcgcgtgatttagcagatattgcaatgagcaaaggatttgcaccgcaggtcgcaacgcttgattcacacgccggaaatcttccgcgcgaaggagctgtattaattgtaacggcgtcttataacggtcatccgcctgataacgcaaagcaatttgtcgactggttagaccaagcgtctgctgatgaagtaaaaggcgttcgctactccgtatttggatgcggcgataaaaattgggctgcgacgtatcaaaaagtgcctgcttttatcgatgaaacgcttgccgctaaaggggcagaaaacatcgctgaccgcggtgaagcagatgcaagcgacgactttgaaggcacatatgaagaatggcgtgatcatatgtggagtgacgtagcagcctactttaacctcgacattgaaaacagtgaagataataaatctactctttcacttcaatttgtcgacagcgccgcggatatgccgcttgcgaaaatgcacggtgcgttttcaacgaacgtcgtagcaagcaaagaacttcaacagccaggcagtgcacgaagcacgcgacatcttgaaattgaacttccaaaagaagcttcttatcaagaaggagatcatttaggtgttattcctcgcaactatgaaggaatagtaaaccgtgtaacagcaaggttcggcctaagcgcatcacagcaaatccgtctggaagcagaagaagaaaaattagctcatttgccactcgctaaaacagtatccgtagaagagcttctgcaatacgtggagcttcaagatcctgttacgcgcacgcagcttcgcgcaatggctgctaaaacggtctgcccgccgcataaagtagagcttgaagccttgcttgaaaagcaagcctacaaagaacaagtgctggcaaaacgtttaacaatgcttgaactgcttgaaaaatacccggcgtgtgaaatgaaattcagcgaatttatcgcccttctgccaagcatacgcccgcgctattactcgatttcttcatcacctcgtgtcgatgaaaaacaagcaagcatcacggtcagcgttgtctcaggaccggcgtggagcggatatggagaatataaaggaattgcgtcgaactatcttgccgagctgcaagaaggagatacgattacgtgctttatttccacaccgcagtcagaatttacgctgccaaaagaccctgaaacgccgcttatcatggtcggaccgggaacaggcgtcgcgccgtttagaggctttgtgcaggcgcgcaaacagctaaaagaacaaggacagtcacttggagaagcacatttatacttcggctgccgttcacctcatgaagactatctgtatcaagaagagcttgaaaacgcccaaagcgaaggcatcattacgcttcataccgctttttctcgcatgccaaatcagccgaaaacatacgttcagcacgtaatggaacaagacggcaagaaattgattgaacttcttgatcaaggagcgcacttctatatttgcggagacggaagccaaatggcacctgccgttgaagcaacgcttatgaaaagctatgctgacgttcaccaagtgagtgaagcagacgctcgcttatggctgcagcagctagaagaaaaaggccgatacgcaaaagacgtgtgggctggg

SEQ ID NO: 20 - protein, 1049 aa, synthetic construct
  REGION 1..1049: note = variant of P450 oxidase from Bacillus megaterium
MTIKEMPQPKTFGELKNLPLLNTDKPVQALMRIADELGEIFKFEAPGSVTRFLSSQRLIKEACDESRFDKNLSQALKFARDFAGDGLATSWTHEPNWKKAHNILGPSFSQRAMKRYHAMMVDIAVQLVQKWERLNADEHIEVSEDMTRLTLDTIGLCGFNYRFNSFYRDQPHPFIVSMVRALDEVMNKLQRANPDDPAYDENKRQCQEDIKVMNDYVDKIIADRKARGEQRHDLLTQMLNGKDPETGEPLDDGNIRYQIITFLIAGHETTSGLLSFALYFLVKNPHVLQKVAEEAARVLVDPVPSYKQVKQLKYVGMVLNEALRLWPTAPAFSLYAKEDTVLGGEYPLTKGDEVMVLIPQLHRDKTIWGDDVEEFRPERFENPSAIPQHAFKPFGNGQRACIGQQFALHEATLVLGMMLKHFDFEDHTNYELVIKETLTLKPEGFVVKAKSKGIPLGGIPSPSTEQSAKKVRKKAENAHNTPLLVLYGSNAGTAEGTARDLADIAMSKGFAPQVATLDSHAGNLPREGAVLIVTASYNGHPPDNAKQFVDWLDQASADEVKGVRYSVFGCGDKNWAATYQKVPAFIDETLAAKGAENIADRGEADASDDFEGTYEEWRDHMWSDVAAYFNLDIENSEDNKSTLSLQFVDSAADMPLAKMHGAFSTNVVASKELQQPGSARSTRHLEIELPKEASYQEGDHLGVIPRNYEGIVNRVTARFGLSASQQIRLEAEEEKLAHLPLAKTVSVEELLQYVELQDPVTRTQLRAMAAKTVCPPHKVELEALLEKQAYKEQVLAKRLTMLELLEKYPACEMKFSEFIALLPSIRPRYYSISSSPRVDEKQASITVSVVSGPAWSGYGEYKGIASNYLAELQEGDTITCFISTPQSEFTLPKDPETPLIMVGPGTGVAPFRGFVQARKQLKEQGQSLGEAHLYFGCRSPHEDYLYQEELENAQSEGIITLHTAFSRMPNQPKTYVQHVMEQDGKKLIELLDQGAHFYICGDGSQMAPAVEATLMKSYADVHQVSEADARLWLQQLEEKGRYAKDVWAG

SEQ ID NO: 21 - DNA, 3147 bp, synthetic construct
  misc_feature 1..3147: note = variant of P450 oxidase from Bacillus megaterium
  source 1..3147: mol_type = other DNA
atgacaattaaggaaatgcctcagcctaagacgtttggagaacttaaaaatttaccgttattaaacacagataaaccggttcaagctttgatgcgtattgcggatgaattaggagaaatctttaaattcgaggcgcctggtagcgtaacgcgctatttatcaagtcagcgtctaattaaagaagcatgcgatgaatcacgctttgataaaaacttaagtcaagcgcttaaatttgcacgtgattttgctggagacgggttagccacaagctggacgcatgaaccgaattggaaaaaagcgcataatatcttaggcccaagctttagtcagcgtgcaatgaaacgttatcatgcgatgatggtcgatatcgccgtgcagcttgttcaaaagtgggagcgtctaaatgcagatgagcatattgaagtatcggaagacatgacacgtttaacgcttgatacaattggtctttgcggctttaactatcgctttaacagcttttaccgagatcagcctcatccatttattgtgagtatggtccgtgcactggatgaagtaatgaacaagctgcagcgagcaaatccagacgacccagcttatgatgaaaacaagcgccagtgtcaagaagatatcaaggtgatgaacgactatgtagataaaattattgcagatcgcaaagcaaggggtgaacaaagccatgatttattaacgcagatgctaaacggaaaagatccagaaacgggtgagccgcttgatgacgggaacattcgctatcaaattattacattcttaattgcgggacacgaaacaacaagtggtcttttatcatttgcgctgtatttcttagtgaaaaatccacatgtattacaaaaagtagcagaagaagcagcacgagttctagtagatcctgttccaagctacaaacaagtcaaacagcttaaatatgtcggcatggtcttaaacgaagcgctgcgcttatggccaactgctcctgcgttttccctatatgcaaaagaagatacggtgcttggaggagaatatcctttaaccaaaggcgacgaagtaatggttctgattcctcagcttcaccgtgataaaacaatttggggagacgatgtggaggagttccgtccagagcgttttgaaaatccaagtgcgattccgcagcatgcgtttaaaccgtttggaaacggtcagcgtgcgtgtatcggtcagcagttcgctcttcatgaagcaacgctggtacttggtatgatgctaaaacactttgactttgaagatcatacaaactacgagctcgttattaaagaaactttaacgttaaaacctgaaggctttgtggtaaaagcaaaatcgaaaggcattccgcttggcggtattccttcacctagcactgaacagtctgctaaaaaagtacgcaaaaaggcagaaaacgctcataatacgccgctgcttgtgctatacggttcaaatgcgggaacagctgaaggaacggcgcgtgatttagcagatattgcaatgagcaaaggatttgcaccgcaggtcgcaacgcttgattcacacgccggaaatcttccgcgcgaaggagctgtattaattgtaacggcgtcttataacggtcatccgcctgataacgcaaagcaatttgtcgactggttagaccaagcgtctgctgatgaagtaaaaggcgttcgctactccgtatttggatgcggcgataaaacttgggctgcgacgtatcaaaaagtgcctgcttttatcgatgaaacgcttgccgctaaaggggcagaaaacatcgctgaccgcggtgaagcagatgcaagcgacgactttgaaggcacatatgaagaatggcgtgatcatatgtggagtgacgtagcagcctactttaacctcgacattgaaaacagtgaagataataaatctactctttcacttcaatttgtcgacagcgccgcggatatgccgcttgcgaaaatgcacggtgcgttttcaacgaacgtcgtagcaagcaaagaacttcaacagccaggcagtgcacgaagcacgcgacatcttgaaattgaacttccaaaagaagcttcttatcaagaaggagatcatttaggtgttattcctcgcaactatgaaggaatagtaaaccgtgtaacagcaaggttcggcctaagcgcatcacagcaaatccgtctggaagcagaagaagaaaaattagctcatttgccactcgctaaaacagtatccgtagaagagcttctgcaatacgtggagcttcaagatcctgttacgcgcacgcagcttcgcgcaatggctgctaaaacggtctgcccgccgcataaagtagagcttgaagccttgcttgaaaagcaagcctacaaagaacaagtgctggcaaaacgtttaacaatgcttgaactgcttgaaaaatacccggcgtgtgaaatgaaattcagcgaatttatcgcccttctgccaagcatacgcccgcgctattactcgatttcttcatcacctcgtgtcgatgaaaaacaagcaagcatcacggtcagcgttgtctcaggaccggcgtggagcggatatggagaatataaaggaattgcgtcgaactatcttgccgagctgcaagaaggagatacgattacgtgctttatttccacaccgcagtcagaatttacgctgccaaaagaccctgaaacgccgcttatcatggtcggaccgggaacaggcgtcgcgccgtttagaggctttgtgcaggcgcgcaaacagctaaaagaacaaggacagtcacttggagaagcacatttatacttcggctgccgttcacctcatgaagactatctgtatcaagaagagcttgaaaacgcccaaagcgaaggcatcattacgcttcataccgctttttctcgcatgccaaatcagccgaaaacatacgttcagcacgtaatggaacaagacggcaagaaattgattgaacttcttgatcaaggagcgcacttctatatttgcggagacggaagccaaatggcacctgccgttgaagcaacgcttatgaaaagctatgctgacgttcaccaagtgagtgaagcagacgctcgcttatggctgcagcagctagaagaaaaaggccgatacgcaaaagacgtgtgggctggg

SEQ ID NO: 22 - protein, 1049 aa, synthetic construct
  REGION 1..1049: note = variant of P450 oxidase from Bacillus megaterium
MTIKEMPQPKTFGELKNLPLLNTDKPVQALMRIADELGEIFKFEAPGSVTRYLSSQRLIKEACDESRFDKNLSQALKFARDFAGDGLATSWTHEPNWKKAHNILGPSFSQRAMKRYHAMMVDIAVQLVQKWERLNADEHIEVSEDMTRLTLDTIGLCGFNYRFNSFYRDQPHPFIVSMVRALDEVMNKLQRANPDDPAYDENKRQCQEDIKVMNDYVDKIIADRKARGEQSHDLLTQMLNGKDPETGEPLDDGNIRYQIITFLIAGHETTSGLLSFALYFLVKNPHVLQKVAEEAARVLVDPVPSYKQVKQLKYVGMVLNEALRLWPTAPAFSLYAKEDTVLGGEYPLTKGDEVMVLIPQLHRDKTIWGDDVEEFRPERFENPSAIPQHAFKPFGNGQRACIGQQFALHEATLVLGMMLKHFDFEDHTNYELVIKETLTLKPEGFVVKAKSKGIPLGGIPSPSTEQSAKKVRKKAENAHNTPLLVLYGSNAGTAEGTARDLADIAMSKGFAPQVATLDSHAGNLPREGAVLIVTASYNGHPPDNAKQFVDWLDQASADEVKGVRYSVFGCGDKTWAATYQKVPAFIDETLAAKGAENIADRGEADASDDFEGTYEEWRDHMWSDVAAYFNLDIENSEDNKSTLSLQFVDSAADMPLAKMHGAFSTNVVASKELQQPGSARSTRHLEIELPKEASYQEGDHLGVIPRNYEGIVNRVTARFGLSASQQIRLEAEEEKLAHLPLAKTVSVEELLQYVELQDPVTRTQLRAMAAKTVCPPHKVELEALLEKQAYKEQVLAKRLTMLELLEKYPACEMKFSEFIALLPSIRPRYYSISSSPRVDEKQASITVSVVSGPAWSGYGEYKGIASNYLAELQEGDTITCFISTPQSEFTLPKDPETPLIMVGPGTGVAPFRGFVQARKQLKEQGQSLGEAHLYFGCRSPHEDYLYQEELENAQSEGIITLHTAFSRMPNQPKTYVQHVMEQDGKKLIELLDQGAHFYICGDGSQMAPAVEATLMKSYADVHQVSEADARLWLQQLEEKGRYAKDVWAG

SEQ ID NO: 23 - DNA, 3147 bp, synthetic construct
  misc_feature 1..3147: note = variant of P450 oxidase from Bacillus megaterium
  source 1..3147: mol_type = other DNA
atgacaattaaggaaatgcctcagcctaagacgtttggagaacttaaaaatttaccgttattaaacacagataaaccggttcaagctttgatgaaaattgcggatgaattaggagaaatctttaaattcgaggcgcctggtagcgtaacgcgctttttatcaagtcagcgtctaattaaagaagcatgcgatgaatcacgctttgataaaaacttaagtcaagcgcttaaatttgcacgtgattttgctggagacgggttagccacaagctggacgcatgaaccgaattggaaaaaagcgcataatatcttaggtccaagctttagtcagcgtgcaatgaaacgttatcatgcgatgatggtcgatatcgccgtgcagcttgttcaaaagtgggagcgtctaaatgcagatgagcatattgaagtatcggaagacatgacacgtttaacgcttgatacaattggtctttgcggctttaactatcgctttaacagcttttaccgagatcagcctcatccatttattatcagtatggtccgtgcactggatgaagtaatgaacaagctgcagcgagcaaatccagacgacccagcttatgatgaaaacaagcgccagtgtcaagaagatatcaaggtgatgaacgactatgtagataaaattattgcagatcgcaaagcaaggggtgaacaaagccatgatttattaacgcagatgctaaacggaaaagatccagaaacgggtgagccgcttgatgacgggaacattcgctatcaaattattacattcttaattgcgggacacgaaacaacaagtggtcttttatcatttgcgctgtatttcttagtgaaaaatccacatgtattacaaaaagtagcagaagaagcagcacgagttctagtagatcctgttccaagctacaaacaagtcaaacagcttaaatatgtcggcatggtcttaaacgaagcgctgcgcttatggccaactgctcctgcgttttccctatatgcaaaagaagatacggtgcttggaggagaatatcctttaaccaaaggcgacgaagtaatggttctgattcctcagcttcaccgtgataaaacaatttggggagacgatgtggaggagttccgtccagagcgttttgaaaatccaagtgcgattccgcagcatgcgtttaaaccgtttggaaacggtcagcgtgcgtgtatcggtcagcagttcgctcttcatgaagcaacgctggtacttggtatgatgctaaaacactttgactttgaagatcatacaaactacgagctcgttattaaagaaactttaacgttaaaacctgaaggctttgtggtaaaagcaaaatcgaaaggtattccgcttggcggtattccttcacctagcactgaacagtctgctaaaaaagtacgcaaaaaggcagaaaacgctcataatacgccgctgcttgtgctatacggttcaaatgcgggaacagctgaaggaacggcgcgtgatttagcagatattgcaatgagcaaaggatttgcaccgcaggtcgcaacgcttgattcacacgccggaaatcttccgcgcgaaggagctgtattaattgtaacggcgtcttataacggtcatccgcctgataacgcaaagcaatttgtcgactggttagaccaagcgtctgctgatgaagtaaaaggcgttcgctactccgtatttggatgcggcgataaaaattgggctgcgacgtatcaaaaagtgcctgcttttatcgatgaaacgcttgccgctaaaggggcagaaaacatcgctgaccgcggtgaagcagatgcaagcgacgactttgaaggcacatatgaagaatggcgtgatcatatgtggagtgacgtagcagcctactttaacctcgacattgaaaacagtgaagataataaatctactctttcacttcaatttgtcgacagcgccgcggatatgccgcttgcgaaaatgcacggtgcgttttcaacgaacgtcgtagcaagcaaagaacttcaacagccaggcagtgcacgaagcacgcgacatcttgaaattgaacttccaaaagaagcttcttatcaagaaggagatcatttaggtgttattcctcgcaactatgaaggaatagtaaaccgtgtaacagcaaggttcggcctaagcgcatcacagcaaatccgtctggaagcagaagaagaaaaattagctcatttgccactcgctaaaacagtatccgtagaagagcttctgcaatacgtggagcttcaagatcctgttacgcgcacgcagcttcgcgcaatggctgctaaaacggtctgcccgccgcataaagtagagcttgaagccttgcttgaaaagcaagcctacaaagaacaagtgctggcaaaacgtttaacaatgcttgaactgcttgaaaaatacccggcgtgtgaaatgaaattcagcgaatttatcgcccttctgccaagcatacgcccgcgctattactcgatttcttcatcacctcgtgtcgatgaaaaacaagcaagcatcacggtcagcgttgtctcaggaccggcgtggagcggatatggagaatataaaggaattgcgtcgaactatcttgccgagctgcaagaaggagatacgattacgtgctttatttccacaccgcagtcagaatttacgctgccaaaagaccctgaaacgccgcttatcatggtcggaccgggaacaggcgtcgcgccgtttagaggctttgtgcaggcgcgcaaacagctaaaagaacaaggacagtcacttggagaagcacatttatacttcggctgccgttcacctcatgaagactatctgtatcaagaagagcttgaaaacgcccaaagcgaaggcatcattacgcttcataccgctttttctcgcatgccaaatcagccgaaaacatacgttcagcacgtaatggaacaagacggcaagaaattgattgaacttcttgatcaaggagcgcacttctatatttgcggagacggaagccaaatggcacctgccgttgaagcaacgcttatgaaaagctatgctgacgttcaccaagtgagtgaagcagacgctcgcttatggctgcagcagctagaagaaaaaggccgatacgcaaaagacgtgtgggctggg

SEQ ID NO: 24 - protein, 1049 aa, synthetic construct
  REGION 1..1049: note = variant of P450 oxidase from Bacillus megaterium
MTIKEMPQPKTFGELKNLPLLNTDKPVQALMKIADELGEIFKFEAPGSVTRFLSSQRLIKEACDESRFDKNLSQALKFARDFAGDGLATSWTHEPNWKKAHNILGPSFSQRAMKRYHAMMVDIAVQLVQKWERLNADEHIEVSEDMTRLTLDTIGLCGFNYRFNSFYRDQPHPFIISMVRALDEVMNKLQRANPDDPAYDENKRQCQEDIKVMNDYVDKIIADRKARGEQSHDLLTQMLNGKDPETGEPLDDGNIRYQIITFLIAGHETTSGLLSFALYFLVKNPHVLQKVAEEAARVLVDPVPSYKQVKQLKYVGMVLNEALRLWPTAPAFSLYAKEDTVLGGEYPLTKGDEVMVLIPQLHRDKTIWGDDVEEFRPERFENPSAIPQHAFKPFGNGQRACIGQQFALHEATLVLGMMLKHFDFEDHTNYELVIKETLTLKPEGFVVKAKSKGIPLGGIPSPSTEQSAKKVRKKAENAHNTPLLVLYGSNAGTAEGTARDLADIAMSKGFAPQVATLDSHAGNLPREGAVLIVTASYNGHPPDNAKQFVDWLDQASADEVKGVRYSVFGCGDKNWAATYQKVPAFIDETLAAKGAENIADRGEADASDDFEGTYEEWRDHMWSDVAAYFNLDIENSEDNKSTLSLQFVDSAADMPLAKMHGAFSTNVVASKELQQPGSARSTRHLEIELPKEASYQEGDHLGVIPRNYEGIVNRVTARFGLSASQQIRLEAEEEKLAHLPLAKTVSVEELLQYVELQDPVTRTQLRAMAAKTVCPPHKVELEALLEKQAYKEQVLAKRLTMLELLEKYPACEMKFSEFIALLPSIRPRYYSISSSPRVDEKQASITVSVVSGPAWSGYGEYKGIASNYLAELQEGDTITCFISTPQSEFTLPKDPETPLIMVGPGTGVAPFRGFVQARKQLKEQGQSLGEAHLYFGCRSPHEDYLYQEELENAQSEGIITLHTAFSRMPNQPKTYVQHVMEQDGKKLIELLDQGAHFYICGDGSQMAPAVEATLMKSYADVHQVSEADARLWLQQLEEKGRYAKDVWAG

SEQ ID NO: 25 - DNA, 3147 bp, synthetic construct
  misc_feature 1..3147: note = variant of P450 oxidase from Bacillus megaterium
  source 1..3147: mol_type = other DNA
atgacaattaaggaaatgcctcagcctaagacgtttggagaacttaaaaatttaccgttattaaacacagataaaccggttcaagctttgatgcgtattgcggatgaattaggagaaatctttaaattcgaggcgcctggtagcgtaacgcgctatttatcaagtcagcgtctaattaaagaagcatgcgatgaatcacgctttgataaaaacttaagtcaagcgcttaaatttgcacgtgattttgctggagacgggttagccacaagctggacgcatgaaccgaattggaaaaaagcgcataatatcttaggcccaagctttagtcagcgtgcaatgaaacgttatcatgcgatgatggtcgatatcgccgtgcagcttgttcaaaagtgggagcgtctaaatgcagatgagcatattgaagtatcggaagacatgacacgtttaacgcttgatacaattggtctttgcggctttaactatcgctttaacagcttttaccgagatcagcctcatccatttattgtcagtatggtccgtgcactggatgaagtaatgaacaagctgcagcgagcaaatccagacgacccagcttatgatgaaaacaagcgccagtgtcaagaagatatcaaggtgatgaacgactatgtagataaaattattgcagatcgcaaagcaaggggtgaacaacgtcatgatttattaacgcagatgctaaacggaaaagatccagaaacgggtgagccgcttgatgacgggaacattcgttatcaaattattacattcttaattgcgggacacgaaacaacaagtggtcttttatcatttgcgctgtatttcttagtgaaaaatccacatgtattacaaaaagtagcagaagaagcagcacgagttctagtagatcctgttccaagctacaaacaagtcaaacagcttaaatatgtcggcatggtcttaaacgaagcgctgcgcttatggccaactgctcctgcgttttccctatatgcaaaagaagatacggtgcttggaggagaatatcctttaaccaaaggcgacgaagtaatggttctgattcctcagcttcaccgtgataaaacaatttggggagacgatgtggaggagttccgtccagagcgttttgaaaatccaagtgcgattccgcagcatgcgtttaaaccgtttggaaacggtcagcgtgcgtgtatcggtcagcagttcgctcttcatgaagcaacgctggtacttggtatgatgctaaaacactttgactttgaagatcatacaaactacgagctcgatattaaagaaactttaacgttaaaacctgaaggctttgtggtaaaagcaaaatcgaaaggcattccgcttggcggtattccttcacctagcactgaacagtctgctaaaaaagtacgcaaaaaggcagaaaacgctcataatacgccgctgcttgtgctatacggttcaaatgcgggaacagctgaaggaacggcgcgtgatttagcagatattgcaatgagcaaaggatttgcaccgcaggtcgcaacgcttgattcacacgccggaaatcttccgcgcgaaggagctgtattaattgtaacggcgtcttataacggtcatccgcctgataacgcaaagcaatttgtcgactggttagaccaagcgtctgctgatgaagtaaaaggcgttcgctactccgtatttggatgcggcgataaaacttgggctgcgacgtatcaaaaagtgcctgcttttatcgatgaaacgcttgccgctaaaggggcagaaaacatcgctgaccgcggtgaagcagatgcaagcgacgactttgaaggcacatatgaagaatggcgtgatcatatgtggagtgacgtagcagcctactttaacctcgacattgaaaacagtgaagataataaatctactctttcacttcaatttgtcgacagcgccgcggatatgccgcttgcgaaaatgcacggtgcgttttcaacgaacgtcgtagcaagcaaagaacttcaacagccaggcagtgcacgaagcacgcgacatcttgaaattgaacttccaaaagaagcttcttatcaagaaggagatcatttaggtgttattcctcgcaactatgaaggaatagtaaaccgtgtaacagcaaggttcggcctaagcgcatcacagcaaatccgtctggaagcagaagaagaaaaattagctcatttgccactcgctaaaacagtatccgtagaagagcttctgcaatacgtggagcttcaagatcctgttacgcgcacgcagcttcgcgcaatggctgctaaaacggtctgcccgccgcataaagtagagcttgaagccttgcttgaaaagcaagcctacaaagaacaagtgctggcaaaacgtttaacaatgcttgaactgcttgaaaaatacccggcgtgtgaaatgaaattcagcgaatttatcgcccttctgccaagcatacgcccgcgctattactcgatttcttcatcacctcgtgtcgatgaaaaacaagcaagcatcacggtcagcgttgtctcaggaccggcgtggagcggatatggagaatataaaggaattgcgtcgaactatcttgccgagctgcaagaaggagatacgattacgtgctttatttccacaccgcagtcagaatttacgctgccaaaagaccctgaaacgccgcttatcatggtcggaccgggaacaggcgtcgcgccgtttagaggctttgtgcaggcgcgcaaacagctaaaagaacaaggacagtcacttggagaagcacatttatacttcggctgccgttcacctcatgaagactatctgtatcaagaagagcttgaaaacgcccaaagcgaaggcatcattacgcttcataccgctttttctcgcatgccaaatcagccgaaaacatacgttcagcacgtaatggaacaagacggcaagaaattgattgaacttcttgatcaaggagcgcacttctatatttgcggagacggaagccaaatggcacctgccgttgaagcaacgcttatgaaaagctatgctgacgttcaccaagtgagtgaagcagacgctcgcttatggctgcagcagctagaagaaaaaggccgatacgcaaaagacgtgtgggctggg

SEQ ID NO: 26 - protein, 1049 aa, synthetic construct
  REGION 1..1049: note = variant of P450 oxidase from Bacillus megaterium
MTIKEMPQPKTFGELKNLPLLNTDKPVQALMRIADELGEIFKFEAPGSVTRYLSSQRLIKEACDESRFDKNLSQALKFARDFAGDGLATSWTHEPNWKKAHNILGPSFSQRAMKRYHAMMVDIAVQLVQKWERLNADEHIEVSEDMTRLTLDTIGLCGFNYRFNSFYRDQPHPFIVSMVRALDEVMNKLQRANPDDPAYDENKRQCQEDIKVMNDYVDKIIADRKARGEQRHDLLTQMLNGKDPETGEPLDDGNIRYQIITFLIAGHETTSGLLSFALYFLVKNPHVLQKVAEEAARVLVDPVPSYKQVKQLKYVGMVLNEALRLWPTAPAFSLYAKEDTVLGGEYPLTKGDEVMVLIPQLHRDKTIWGDDVEEFRPERFENPSAIPQHAFKPFGNGQRACIGQQFALHEATLVLGMMLKHFDFEDHTNYELDIKETLTLKPEGFVVKAKSKGIPLGGIPSPSTEQSAKKVRKKAENAHNTPLLVLYGSNAGTAEGTARDLADIAMSKGFAPQVATLDSHAGNLPREGAVLIVTASYNGHPPDNAKQFVDWLDQASADEVKGVRYSVFGCGDKTWAATYQKVPAFIDETLAAKGAENIADRGEADASDDFEGTYEEWRDHMWSDVAAYFNLDIENSEDNKSTLSLQFVDSAADMPLAKMHGAFSTNVVASKELQQPGSARSTRHLEIELPKEASYQEGDHLGVIPRNYEGIVNRVTARFGLSASQQIRLEAEEEKLAHLPLAKTVSVEELLQYVELQDPVTRTQLRAMAAKTVCPPHKVELEALLEKQAYKEQVLAKRLTMLELLEKYPACEMKFSEFIALLPSIRPRYYSISSSPRVDEKQASITVSVVSGPAWSGYGEYKGIASNYLAELQEGDTITCFISTPQSEFTLPKDPETPLIMVGPGTGVAPFRGFVQARKQLKEQGQSLGEAHLYFGCRSPHEDYLYQEELENAQSEGIITLHTAFSRMPNQPKTYVQHVMEQDGKKLIELLDQGAHFYICGDGSQMAPAVEATLMKSYADVHQVSEADARLWLQQLEEKGRYAKDVWAG

SEQ ID NO: 27 - DNA, 3147 bp, synthetic construct
  misc_feature 1..3147: note = variant of P450 oxidase from Bacillus megaterium
  source 1..3147: mol_type = other DNA
atgacaattaaggaaatgcctcagcctaagacgtttggagaacttaaaaatttaccgttattaaacacagataaaccggttcaagctttgatgcgtattgcggatgaattaggagaaatctttaaattcgaggcgcctggtagcgtaacgcgctatttatcaagtcagcgtctaattaaagaagcatgcgatgaatcacgctttgataaaaacttaagtcaagcgcttaaatttgcacgtgattttgctggagacgggttagccacaagctggacgcatgaaccgaattggaaaaaagcgcataatatcttaggtccaagctttagtcagcgtgcaatgaaacgttatcatgcgatgatggtcgatatcgccgtgcagcttgttcaaaagtgggagcgtctaaatgcagatgagcatattgaagtatcggaagacatgacacgtttaacgcttgatacaattggtctttgcggctttaactatcgctttaacagcttttaccgagatcagcctcatccatttattgtcagtatggtccgtgcactggatgaagtaatgaacaagctgcagcgagcaaatccagacgacccagcttatgatgaaaacaagcgccagtgtcaagaagatatcaaggtgatgaacgactatgtagataaaattattgcagatcgcaaagcaaggggtgaacaaagccatgatttattaacgcagatgctaaacggaaaagatccagaaacgggtgagccgcttgatgacgggaacattcgttatcaaattattacattcttaattgcgggacacgaaacaacaagtggtcttttatcatttgcgctgtatttcttagtgaaaaatccacatgtattacaaaaagtagcagaagaagcagcacgagttctagtagatcctgttccaagctacaaacaagtcaaacagcttaaatatgtcggcatggtcttaaacgaagcgctgcgcttatggccaactgctcctgcgttttccctatatgcaaaagaagatacggtgcttggaggagaatatcctttaaccaaaggcgacgaagtaatggttctgattcctcagcttcaccgtgataaaacaatttggggagacgatgtggaggagttccgtccagagcgttttgaaaatccaagtgcgattccgcagcatgcgtttaaaccgtttggaaacggtcagcgtgcgtgtatcggtcagcagttcgctcttcatgaagcaacgctggtacttggtatgatgctaaaacactttgactttgaagatcatacaaactacgagctcgatattaaagaaactttaacgttaaaacctgaaggctttgtggtaaaagcaaaatcgaaaggtattccgcttggcggtattccttcacctagcactgaacagtctgctaaaaaagtacgcaaaaaggcagaaaacgctcataatacgccgctgcttgtgctatacggttcaaatgcgggaacagctgaaggaacggcgcgtgatttagcagatattgcaatgagcaaaggatttgcaccgcaggtcgcaacgcttgattcacacgccggaaatcttccgcgcgaaggagctgtattaattgtaacggcgtcttataacggtcatccgcctgataacgcaaagcaatttgtcgactggttagaccaagcgtctgctgatgaagtaaaaggcgttcgctactccgtatttggatgcggcgataaaaattgggctgcgacgtatcaaaaagtgcctgcttttatcgatgaaacgcttgccgctaaaggggcagaaaacatcgctgaccgcggtgaagcagatgcaagcgacgactttgaaggcacatatgaagaatggcgtgatcatatgtggagtgacgtagcagcctactttaacctcgacattgaaaacagtgaagataataaatctactctttcacttcaatttgtcgacagcgccgcggatatgccgcttgcgaaaatgcacggtgcgttttcaacgaacgtcgtagcaagcaaagaacttcaacagccaggcagtgcacgaagcacgcgacatcttgaaattgaacttccaaaagaagcttcttatcaagaaggagatcatttaggtgttattcctcgcaactatgaaggaatagtaaaccgtgtaacagcaaggttcggcctaagcgcatcacagcaaatccgtctggaagcagaagaagaaaaattagctcatttgccactcgctaaaacagtatccgtagaagagcttctgcaatacgtggagcttcaagatcctgttacgcgcacgcagcttcgcgcaatggctgctaaaacggtctgcccgccgcataaagtagagcttgaagccttgcttgaaaagcaagcctacaaagaacaagtgctggcaaaacgtttaacaatgcttgaactgcttgaaaaatacccggcgtgtgaaatgaaattcagcgaatttatcgcccttctgccaagcatacgcccgcgctattactcgatttcttcatcacctcgtgtcgatgaaaaacaagcaagcatcacggtcagcgttgtctcaggaccggcgtggagcggatatggagaatataaaggaattgcgtcgaactatcttgccgagctgcaagaaggagatacgattacgtgctttatttccacaccgcagtcagaatttacgctgccaaaagaccctgaaacgccgcttatcatggtcggaccgggaacaggcgtcgcgccgtttagaggctttgtgcaggcgcgcaaacagctaaaagaacaaggacagtcacttggagaagcacatttatacttcggctgccgttcacctcatgaagactatctgtatcaagaagagcttgaaaacgcccaaagcgaaggcatcattacgcttcataccgctttttctcgcatgccaaatcagccgaaaacatacgttcagcacgtaatggaacaagacggcaagaaattgattgaacttcttgatcaaggagcgcacttctatatttgcggagacggaagccaaatggcacctgccgttgaagcaacgcttatgaaaagctatgctgacgttcaccaagtgagtgaagcagacgctcgcttatggctgcagcagctagaagaaaaaggccgatacgcaaaagacgtgtgggctggg

SEQ ID NO: 28 - protein, 1049 aa, synthetic construct
  REGION 1..1049: note = variant of P450 oxidase from Bacillus megaterium
MTIKEMPQPKTFGELKNLPLLNTDKPVQALMRIADELGEIFKFEAPGSVTRYLSSQRLIKEACDESRFDKNLSQALKFARDFAGDGLATSWTHEPNWKKAHNILGPSFSQRAMKRYHAMMVDIAVQLVQKWERLNADEHIEVSEDMTRLTLDTIGLCGFNYRFNSFYRDQPHPFIVSMVRALDEVMNKLQRANPDDPAYDENKRQCQEDIKVMNDYVDKIIADRKARGEQSHDLLTQMLNGKDPETGEPLDDGNIRYQIITFLIAGHETTSGLLSFALYFLVKNPHVLQKVAEEAARVLVDPVPSYKQVKQLKYVGMVLNEALRLWPTAPAFSLYAKEDTVLGGEYPLTKGDEVMVLIPQLHRDKTIWGDDVEEFRPERFENPSAIPQHAFKPFGNGQRACIGQQFALHEATLVLGMMLKHFDFEDHTNYELDIKETLTLKPEGFVVKAKSKGIPLGGIPSPSTEQSAKKVRKKAENAHNTPLLVLYGSNAGTAEGTARDLADIAMSKGFAPQVATLDSHAGNLPREGAVLIVTASYNGHPPDNAKQFVDWLDQASADEVKGVRYSVFGCGDKNWAATYQKVPAFIDETLAAKGAENIADRGEADASDDFEGTYEEWRDHMWSDVAAYFNLDIENSEDNKSTLSLQFVDSAADMPLAKMHGAFSTNVVASKELQQPGSARSTRHLEIELPKEASYQEGDHLGVIPRNYEGIVNRVTARFGLSASQQIRLEAEEEKLAHLPLAKTVSVEELLQYVELQDPVTRTQLRAMAAKTVCPPHKVELEALLEKQAYKEQVLAKRLTMLELLEKYPACEMKFSEFIALLPSIRPRYYSISSSPRVDEKQASITVSVVSGPAWSGYGEYKGIASNYLAELQEGDTITCFISTPQSEFTLPKDPETPLIMVGPGTGVAPFRGFVQARKQLKEQGQSLGEAHLYFGCRSPHEDYLYQEELENAQSEGIITLHTAFSRMPNQPKTYVQHVMEQDGKKLIELLDQGAHFYICGDGSQMAPAVEATLMKSYADVHQVSEADARLWLQQLEEKGRYAKDVWAG

SEQ ID NO: 29 - DNA, 3147 bp, synthetic construct
  misc_feature 1..3147: note = variant of P450 oxidase from Bacillus megaterium
  source 1..3147: mol_type = other DNA
atgacaattaaggaaatgcctcagcctaagacgtttggagaacttaaaaatttaccgttattaaacacagataaaccggttcaagctttgatgcgtattgcggatgaattaggagaaatctttaaattcgaggcgcctggtagcgtaacgcgctatttatcaagtcagcgtctaattaaagaagcatgcgatgaatcacgctttgataaaaacttaagtcaagcgcttaaatttgcacgtgattttgctggagacgggttagccacaagctggacgcatgaaccgaattggaaaaaagcgcataatatcttaggtccaagctttagtcagcgtgcaatgaaacgttatcatgcgatgatggtcgatatcgccgtgcagcttgttcaaaagtgggagcgtctaaatgcagatgagcatattgaagtatcggaagacatgacacgtttaacgcttgatacaattggtctttgcggctttaactatcgctttaacagcttttaccgagatcagcctcatccatttattgtgagtatggtccgtgcactggatgaagtaatgaacaagctgcagcgagcaaatccagacgacccagcttatgatgaaaacaagcgccagtgtcaagaagatatcaaggtgatgaacgactatgtagataaaattattgcagatcgcaaagcaaggggtgaacaaagtcatgatttattaacgcagatgctaaacggaaaagatccagaaacgggtgagccgcttgatgacgggaacattcgttatcaaattattacattcttaattgcgggacacgaaacaacaagtggtcttttatcatttgcgctgtatttcttagtgaaaaatccacatgtattacaaaaagtagcagaagaagcagcacgagttctagtagatcctgttccaagctacaaacaagtcaaacagcttaaatatgtcggcatggtcttaaacgaagcgctgcgcttatggccaactgctcctgcgttttccctatatgcaaaagaagatacggtgcttggaggagaatatcctttaacgaaaggcgacgaagtaatggttctgattcctcagcttcaccgtgataaaacaatttggggagacgatgtggaggagttccgtccagagcgttttgaaaatccaagtgcgattccgcagcatgcgtttaaaccgtttggaaacggtcagcgtgcgtgtatcggtcagcagttcgctcttcatgaagcaacgctggtacttggtatgatgctaaaacactttgactttgaagatcatacaaactacgagctcgttattaaagaaactttaacgttaaaacctgaaggctttgtggtaaaagcaaaatcgaaaggtattccgcttggcggtattccttcacctagcactgaacagtctgctaaaaaagtacgcaaaaaggcagaaaacgctcataatacgccgctgcttgtgctatacggttcaaatgcgggaacagctgaaggaacggcgcgtgatttagcagatattgcaatgagcaaaggatttgcaccgcaggtcgcaacgcttgattcacacgccggaaatcttccgcgcgaaggagctgtattaattgtaacggcgtcttataacggtcatccgcctgataacgcaaagcaatttgtcgactggttagaccaagcgtctgctgatgaagtaaaaggcgttcgctactccgtatttggatgcggcgataaaaattgggctgcgacgtatcaaaaagtgcctgcttttatcgatgaaacgcttgccgctaaaggggcagaaaacatcgctgaccgcggtgaagcagatgcaagcgacgactttgaaggcacatatgaagaatggcgtgatcatatgtggagtgacgtagcagcctactttaacctcgacattgaaaacagtgaagataataaatctactctttcacttcaatttgtcgacagcgccgcggatatgccgcttgcgaaaatgcacggtgcgttttcaacgaacgtcgtagcaagcaaagaacttcaacagccaggcagtgcacgaagcacgcgacatcttgaaattgaacttccaaaagaagcttcttatcaagaaggagatcatttaggtgttattcctcgcaactatgaaggaatagtaaaccgtgtaacagcaaggttcggcctaagcgcatcacagcaaatccgtctggaagcagaagaagaaaaattagctcatttgccactcgctaaaacagtatccgtagaagagcttctgcaatacgtggagcttcaagatcctgttacgcgcacgcagcttcgcgcaatggctgctaaaacggtctgcccgccgcataaagtagagcttgaagccttgcttgaaaagcaagcctacaaagaacaagtgctggcaaaacgtttaacaatgcttgaactgcttgaaaaatacccggcgtgtgaaatgaaattcagcgaatttatcgcccttctgccaagcatacgcccgcgctattactcgatttcttcatcacctcgtgtcgatgaaaaacaagcaagcatcacggtcagcgttgtctcaggaccggcgtggagcggatatggagaatataaaggaattgcgtcgaactatcttgccgagctgcaagaaggagatacgattacgtgctttatttccacaccgcagtcagaatttacgctgccaaaagaccctgaaacgccgcttatcatggtcggaccgggaacaggcgtcgcgccgtttagaggctttgtgcaggcgcgcaaacagctaaaagaacaaggacagtcacttggagaagcacatttatacttcggctgccgttcacctcatgaagactatctgtatcaagaagagcttgaaaacgcccaaagcgaaggcatcattacgcttcataccgctttttctcgcatgccaaatcagccgaaaacatacgttcagcacgtaatggaacaagacggcaagaaattgattgaacttcttgatcaaggagcgcacttctatatttgcggagacggaagccaaatggcacctgccgttgaagcaacgcttatgaaaagctatgctgacgttcaccaagtgagtgaagcagacgctcgcttatggctgcagcagctagaagaaaaaggccgatacgcaaaagacgtgtgggctggg

SEQ ID NO: 30 - protein, 1049 aa, synthetic construct
  REGION 1..1049: note = variant of P450 oxidase from Bacillus megaterium
MTIKEMPQPKTFGELKNLPLLNTDKPVQALMRIADELGEIFKFEAPGSVTRYLSSQRLIKEACDESRFDKNLSQALKFARDFAGDGLATSWTHEPNWKKAHNILGPSFSQRAMKRYHAMMVDIAVQLVQKWERLNADEHIEVSEDMTRLTLDTIGLCGFNYRFNSFYRDQPHPFIVSMVRALDEVMNKLQRANPDDPAYDENKRQCQEDIKVMNDYVDKIIADRKARGEQSHDLLTQMLNGKDPETGEPLDDGNIRYQIITFLIAGHETTSGLLSFALYFLVKNPHVLQKVAEEAARVLVDPVPSYKQVKQLKYVGMVLNEALRLWPTAPAFSLYAKEDTVLGGEYPLTKGDEVMVLIPQLHRDKTIWGDDVEEFRPERFENPSAIPQHAFKPFGNGQRACIGQQFALHEATLVLGMMLKHFDFEDHTNYELVIKETLTLKPEGFVVKAKSKGIPLGGIPSPSTEQSAKKVRKKAENAHNTPLLVLYGSNAGTAEGTARDLADIAMSKGFAPQVATLDSHAGNLPREGAVLIVTASYNGHPPDNAKQFVDWLDQASADEVKGVRYSVFGCGDKNWAATYQKVPAFIDETLAAKGAENIADRGEADASDDFEGTYEEWRDHMWSDVAAYFNLDIENSEDNKSTLSLQFVDSAADMPLAKMHGAFSTNVVASKELQQPGSARSTRHLEIELPKEASYQEGDHLGVIPRNYEGIVNRVTARFGLSASQQIRLEAEEEKLAHLPLAKTVSVEELLQYVELQDPVTRTQLRAMAAKTVCPPHKVELEALLEKQAYKEQVLAKRLTMLELLEKYPACEMKFSEFIALLPSIRPRYYSISSSPRVDEKQASITVSVVSGPAWSGYGEYKGIASNYLAELQEGDTITCFISTPQSEFTLPKDPETPLIMVGPGTGVAPFRGFVQARKQLKEQGQSLGEAHLYFGCRSPHEDYLYQEELENAQSEGIITLHTAFSRMPNQPKTYVQHVMEQDGKKLIELLDQGAHFYICGDGSQMAPAVEATLMKSYADVHQVSEADARLWLQQLEEKGRYAKDVWAG

SEQ ID NO: 31 - DNA, 3147 bp, synthetic construct
  misc_feature 1..3147: note = variant of P450 oxidase from Bacillus megaterium
  source 1..3147: mol_type = other DNA
atgacaattaaggaaatgcctcagcctaagacgtttggagaacttaaaaatttaccgttattaaacacagataaaccggttcaagctttgatgcgtattgcggatgaattaggagaaatctttaaattcgaggcgcctggtagcgtaacgcgctttttatcaagtcagcgtctaattaaagaagcatgcgatgaatcacgctttgataaaaacttaagtcaagcgcttaaatttgcacgtgattttgctggagacgggttagccacaagctggacgcatgaaccgaattggaaaaaagcgcataatatcttaggcccaagctttagtcagcgtgcaatgaaacgttatcatgcgatgatggtcgatatcgccgtgcagcttgttcaaaagtgggagcgtctaaatgcagatgagcatattgaagtatcggaagacatgacacgtttaacgcttgatacaattggtctttgcggctttaactatcgctttaacagcttttaccgagatcagcctcatccatttattgtgagtatggtccgtgcactggatgaagtaatgaacaagctgcagcgagcaaatccagacgacccagcttatgatgaaaacaagcgccagtgtcaagaagatatcaaggtgatgaacgactatgtagataaaattattgcagatcgcaaagcaaggggtgaacaaagtcatgatttattaacgcagatgctaaacggaaaagatccagaaacgggtgagccgcttgatgacgggaacattcgttatcaaattattacattcttaattgcgggacacgaaacaacaagtggtcttttatcatttgcgctgtatttcttagtgaaaaatccacatgtattacaaaaagtagcagaagaagcagcacgagttctagtagatcctgttccaagctacaaacaagtcaaacagcttaaatatgtcggcatggtcttaaacgaagcgctgcgcttatggccaactgctcctgcgttttccctatatgcaaaagaagatacggtgcttggaggagaatatcctttaaccaaaggcgacgaagtaatggttctgattcctcagcttcaccgtgataaaacaatttggggagacgatgtggaggagttccgtccagagcgttttgaaaatccaagtgcgattccgcagcatgcgtttaaaccgtttggaaacggtcagcgtgcgtgtatcggtcagcagttcgctcttcatgaagcaacgctggtacttggtatgatgctaaaacactttgactttgaagatcatacaaactacgagctcgttattaaagaaactttaacgttaaaacctgaaggctttgtggtaaaagcaaaatcgaaaggtattccgcttggcggtattccttcacctagcactgaacagtctgctaaaaaagtacgcaaaaaggcagaaaacgctcataatacgccgctgcttgtgctatacggttcaaatgcgggaacagctgaaggaacggcgcgtgatttagcagatattgcaatgagcaaaggatttgcaccgcaggtcgcaacgcttgattcacacgccggaaatcttccgcgcgaaggagctgtattaattgtaacggcgtcttataacggtcatccgcctgataacgcaaagcaatttgtcgactggttagaccaagcgtctgctgatgaagtaaaaggcgttcgctactccgtatttggatgcggcgataaaaattgggctgcgacgtatcaaaaagtgcctgcttttatcgatgaaacgcttgccgctaaaggggcagaaaacatcgctgaccgcggtgaagcagatgcaagcgacgactttgaaggcacatatgaagaatggcgtgatcatatgtggagtgacgtagcagcctactttaacctcgacattgaaaacagtgaagataataaatctactctttcacttcaatttgtcgacagcgccgcggatatgccgcttgcgaaaatgcacggtgcgttttcaacgaacgtcgtagcaagcaaagaacttcaacagccaggcagtgcacgaagcacgcgacatcttgaaattgaacttccaaaagaagcttcttatcaagaaggagatcatttaggtgttattcctcgcaactatgaaggaatagtaaaccgtgtaacagcaaggttcggcctaagcgcatcacagcaaatccgtctggaagcagaagaagaaaaattagctcatttgccactcgctaaaacagtatccgtagaagagcttctgcaatacgtggagcttcaagatcctgttacgcgcacgcagcttcgcgcaatggctgctaaaacggtctgcccgccgcataaagtagagcttgaagccttgcttgaaaagcaagcctacaaagaacaagtgctggcaaaacgtttaacaatgcttgaactgcttgaaaaatacccggcgtgtgaaatgaaattcagcgaatttatcgcccttctgccaagcatacgcccgcgctattactcgatttcttcatcacctcgtgtcgatgaaaaacaagcaagcatcacggtcagcgttgtctcaggaccggcgtggagcggatatggagaatataaaggaattgcgtcgaactatcttgccgagctgcaagaaggagatacgattacgtgctttatttccacaccgcagtcagaatttacgctgccaaaagaccctgaaacgccgcttatcatggtcggaccgggaacaggcgtcgcgccgtttagaggctttgtgcaggcgcgcaaacagctaaaagaacaaggacagtcacttggagaagcacatttatacttcggctgccgttcacctcatgaagactatctgtatcaagaagagcttgaaaacgcccaaagcgaaggcatcattacgcttcataccgctttttctcgcatgccaaatcagccgaaaacatacgttcagcacgtaatggaacaagacggcaagaaattgattgaacttcttgatcaaggagcgcacttctatatttgcggagacggaagccaaatggcacctgccgttgaagcaacgcttatgaaaagctatgctgacgttcaccaagtgagtgaagcagacgctcgcttatggctgcagcagctagaagaaaaaggccgatacgcaaaagacgtgtgggctggg

SEQ ID NO: 32 - protein, 1049 aa, synthetic construct
  REGION 1..1049: note = variant of P450 oxidase from Bacillus megaterium
MTIKEMPQPKTFGELKNLPLLNTDKPVQALMRIADELGEIFKFEAPGSVTRFLSSQRLIKEACDESRFDKNLSQALKFARDFAGDGLATSWTHEPNWKKAHNILGPSFSQRAMKRYHAMMVDIAVQLVQKWERLNADEHIEVSEDMTRLTLDTIGLCGFNYRFNSFYRDQPHPFIVSMVRALDEVMNKLQRANPDDPAYDENKRQCQEDIKVMNDYVDKIIADRKARGEQSHDLLTQMLNGKDPETGEPLDDGNIRYQIITFLIAGHETTSGLLSFALYFLVKNPHVLQKVAEEAARVLVDPVPSYKQVKQLKYVGMVLNEALRLWPTAPAFSLYAKEDTVLGGEYPLTKGDEVMVLIPQLHRDKTIWGDDVEEFRPERFENPSAIPQHAFKPFGNGQRACIGQQFALHEATLVLGMMLKHFDFEDHTNYELVIKETLTLKPEGFVVKAKSKGIPLGGIPSPSTEQSAKKVRKKAENAHNTPLLVLYGSNAGTAEGTARDLADIAMSKGFAPQVATLDSHAGNLPREGAVLIVTASYNGHPPDNAKQFVDWLDQASADEVKGVRYSVFGCGDKNWAATYQKVPAFIDETLAAKGAENIADRGEADASDDFEGTYEEWRDHMWSDVAAYFNLDIENSEDNKSTLSLQFVDSAADMPLAKMHGAFSTNVVASKELQQPGSARSTRHLEIELPKEASYQEGDHLGVIPRNYEGIVNRVTARFGLSASQQIRLEAEEEKLAHLPLAKTVSVEELLQYVELQDPVTRTQLRAMAAKTVCPPHKVELEALLEKQAYKEQVLAKRLTMLELLEKYPACEMKFSEFIALLPSIRPRYYSISSSPRVDEKQASITVSVVSGPAWSGYGEYKGIASNYLAELQEGDTITCFISTPQSEFTLPKDPETPLIMVGPGTGVAPFRGFVQARKQLKEQGQSLGEAHLYFGCRSPHEDYLYQEELENAQSEGIITLHTAFSRMPNQPKTYVQHVMEQDGKKLIELLDQGAHFYICGDGSQMAPAVEATLMKSYADVHQVSEADARLWLQQLEEKGRYAKDVWAG

SEQ ID NO: 33 - DNA, 3147 bp, synthetic construct
  misc_feature 1..3147: note = variant of P450 oxidase from Bacillus megaterium
  source 1..3147: mol_type = other DNA
atgacaattaaggaaatgcctcagcctaagacgtttggagaacttaaaaatttaccgttattaaacacagataaaccggttcaagctttgatgaaaattgcggatgaattaggagaaatctttaaattcgaggcgcctggtagcgtaacgcgctttttatcaagtcagcgtctaattaaagaagcatgcgatgaatcacgctttgataaaaacttaagtcaagcgcttaaatttgcacgtgattttgctggagacgggttagccacaagctggacgcatgaaccgaattggaaaaaagcgcataatatcttaggcccaagctttagtcagcgtgcaatgaaacgttatcatgcgatgatggtcgatatcgccgtgcagcttgttcaaaagtgggagcgtctaaatgcagatgagcatattgaagtatcggaagacatgacacgtttaacgcttgatacaattggtctttgcggctttaactatcgctttaacagcttttaccgagatcagcctcatccatttattgtgagtatggtccgtgcactggatgaagtaatgaacaagctgcagcgagcaaatccagacgacccagcttatgatgaaaacaagcgccagtgtcaagaagatatcaaggtgatgaacgactatgtagataaaattattgcagatcgcaaagcaaggggtgaacaacgtcatgatttattaacgcagatgctaaacggaaaagatccagaaacgggtgagccgcttgatgacgggaacattcgttatcaaattattacattcttaattgcgggacacgaaacaacaagtggtcttttatcatttgcgctgtatttcttagtgaaaaatccacatgtattacaaaaagtagcagaagaagcagcacgagttctagtagatcctgttccaagctacaaacaagtcaaacagcttaaatatgtcggcatggtcttaaacgaagcgctgcgcttatggccaactgctcctgcgttttccctatatgcaaaagaagatacggtgcttggaggagaatatcctttaacgaaaggcgacgaagtaatggttctgattcctcagcttcaccgtgataaaacaatttggggagacgatgtggaggagttccgtccagagcgttttgaaaatccaagtgcgattccgcagcatgcgtttaaaccgtttggaaacggtcagcgtgcgtgtatcggtcagcagttcgctcttcatgaagcaacgctggtacttggtatgatgctaaaacactttgactttgaagatcatacaaactacgagctcgttattaaagaaactttaacgttaaaacctgaaggctttgtggtaaaagcaaaatcgaaaggcattccgcttggcggtattccttcacctagcactgaacagtctgctaaaaaagtacgcaaaaaggcagaaaacgctcataatacgccgctgcttgtgctatacggttcaaatgcgggaacagctgaaggaacggcgcgtgatttagcagatattgcaatgagcaaaggatttgcaccgcaggtcgcaacgcttgattcacacgccggaaatcttccgcgcgaaggagctgtattaattgtaacggcgtcttataacggtcatccgcctgataacgcaaagcaatttgtcgactggttagaccaagcgtctgctgatgaagtaaaaggcgttcgctactccgtatttggatgcggcgataaaacttgggctgcgacgtatcaaaaagtgcctgcttttatcgatgaaacgcttgccgctaaaggggcagaaaacatcgctgaccgcggtgaagcagatgcaagcgacgactttgaaggcacatatgaagaatggcgtgatcatatgtggagtgacgtagcagcctactttaacctcgacattgaaaacagtgaagataataaatctactctttcacttcaatttgtcgacagcgccgcggatatgccgcttgcgaaaatgcacggtgcgttttcaacgaacgtcgtagcaagcaaagaacttcaacagccaggcagtgcacgaagcacgcgacatcttgaaattgaacttccaaaagaagcttcttatcaagaaggagatcatttaggtgttattcctcgcaactatgaaggaatagtaaaccgtgtaacagcaaggttcggcctaagcgcatcacagcaaatccgtctggaagcagaagaagaaaaattagctcatttgccactcgctaaaacagtatccgtagaagagcttctgcaatacgtggagcttcaagatcctgttacgcgcacgcagcttcgcgcaatggctgctaaaacggtctgcccgccgcataaagtagagcttgaagccttgcttgaaaagcaagcctacaaagaacaagtgctggcaaaacgtttaacaatgcttgaactgcttgaaaaatacccggcgtgtgaaatgaaattcagcgaatttatcgcccttctgccaagcatacgcccgcgctattactcgatttcttcatcacctcgtgtcgatgaaaaacaagcaagcatcacggtcagcgttgtctcaggaccggcgtggagcggatatggagaatataaaggaattgcgtcgaactatcttgccgagctgcaagaaggagatacgattacgtgctttatttccacaccgcagtcagaatttacgctgccaaaagaccctgaaacgccgcttatcatggtcggaccgggaacaggcgtcgcgccgtttagaggctttgtgcaggcgcgcaaacagctaaaagaacaaggacagtcacttggagaagcacatttatacttcggctgccgttcacctcatgaagactatctgtatcaagaagagcttgaaaacgcccaaagcgaaggcatcattacgcttcataccgctttttctcgcatgccaaatcagccgaaaacatacgttcagcacgtaatggaacaagacggcaagaaattgattgaacttcttgatcaaggagcgcacttctatatttgcggagacggaagccaaatggcacctgccgttgaagcaacgcttatgaaaagctatgctgacgttcaccaagtgagtgaagcagacgctcgcttatggctgcagcagctagaagaaaaaggccgatacgcaaaagacgtgtgggctggg

SEQ ID NO: 34 - protein, 1049 aa, synthetic construct
  REGION 1..1049: note = variant of P450 oxidase from Bacillus megaterium
MTIKEMPQPKTFGELKNLPLLNTDKPVQALMKIADELGEIFKFEAPGSVTRFLSSQRLIKEACDESRFDKNLSQALKFARDFAGDGLATSWTHEPNWKKAHNILGPSFSQRAMKRYHAMMVDIAVQLVQKWERLNADEHIEVSEDMTRLTLDTIGLCGFNYRFNSFYRDQPHPFIVSMVRALDEVMNKLQRANPDDPAYDENKRQCQEDIKVMNDYVDKIIADRKARGEQRHDLLTQMLNGKDPETGEPLDDGNIRYQIITFLIAGHETTSGLLSFALYFLVKNPHVLQKVAEEAARVLVDPVPSYKQVKQLKYVGMVLNEALRLWPTAPAFSLYAKEDTVLGGEYPLTKGDEVMVLIPQLHRDKTIWGDDVEEFRPERFENPSAIPQHAFKPFGNGQRACIGQQFALHEATLVLGMMLKHFDFEDHTNYELVIKETLTLKPEGFVVKAKSKGIPLGGIPSPSTEQSAKKVRKKAENAHNTPLLVLYGSNAGTAEGTARDLADIAMSKGFAPQVATLDSHAGNLPREGAVLIVTASYNGHPPDNAKQFVDWLDQASADEVKGVRYSVFGCGDKTWAATYQKVPAFIDETLAAKGAENIADRGEADASDDFEGTYEEWRDHMWSDVAAYFNLDIENSEDNKSTLSLQFVDSAADMPLAKMHGAFSTNVVASKELQQPGSARSTRHLEIELPKEASYQEGDHLGVIPRNYEGIVNRVTARFGLSASQQIRLEAEEEKLAHLPLAKTVSVEELLQYVELQDPVTRTQLRAMAAKTVCPPHKVELEALLEKQAYKEQVLAKRLTMLELLEKYPACEMKFSEFIALLPSIRPRYYSISSSPRVDEKQASITVSVVSGPAWSGYGEYKGIASNYLAELQEGDTITCFISTPQSEFTLPKDPETPLIMVGPGTGVAPFRGFVQARKQLKEQGQSLGEAHLYFGCRSPHEDYLYQEELENAQSEGIITLHTAFSRMPNQPKTYVQHVMEQDGKKLIELLDQGAHFYICGDGSQMAPAVEATLMKSYADVHQVSEADARLWLQQLEEKGRYAKDVWAG

SEQ ID NO: 35 - DNA, 3147 bp, synthetic construct
  misc_feature 1..3147: note = variant of P450 oxidase from Bacillus megaterium
  source 1..3147: mol_type = other DNA
atgacaattaaggaaatgcctcagcctaagacgtttggagaacttaaaaatttaccgttattaaacacagataaaccggttcaagctttgatgcgtattgcggatgaattaggagaaatctttaaattcgaggcgcctggtagcgtaacgcgctatttatcaagtcagcgtctaattaaagaagcatgcgatgaatcacgctttgataaaaacttaagtcaagcgcttaaatttgcacgtgattttgctggagacgggttagccacaagctggacgcatgaaccgaattggaaaaaagcgcataatatcttagttccaagctttagtcagcgtgcaatgaaacgttatcatgcgatgatggtcgatatcgccgtgcagcttgttcaaaagtgggagcgtctaaatgcagatgagcatattgaagtatcggaagacatgacacgtttaacgcttgatacaattggtctttgcggctttaactatcgctttaacagcttttaccgagatcagcctcatccatttattgtgagtatggtccgtgcactggatgaagtaatgaacaagctgcagcgagcaaatccagacgacccagcttatgatgaaaacaagcgccagtgtcaagaagatatcaaggtgatgaacgactatgtagataaaattattgcagatcgcaaagcaaggggtgaacaaagtcatgatttattaacgcagatgctaaacggaaaagatccagaaacgggtgagccgcttgatgacgggaacattcgttatcaaattattacattcttaattgcgggacacgaaacaacaagtggtcttttatcatttgcgctgtatttcttagtgaaaaatccacatgtattacaaaaagtagcagaagaagcagcacgagttctagtagatcctgttccaagctacaaacaagtcaaacagcttaaatatgtcggcatggtcttaaacgaagcgctgcgcttatggccaactgctcctgcgttttccctatatgcaaaagaagatacggtgcttggaggagaatatcctttaacgaaaggcgacgaagtaatggttctgattcctcagcttcaccgtgataaaacaatttggggagacgatgtggaggagttccgtccagagcgttttgaaaatccaagtgcgattccgcagcatgcgtttaaaccgtttggaaacggtcagcgtgcgtgtatcggtcagcagttcgctcttcatgaagcaacgctggtacttggtatgatgctaaaacactttgactttgaagatcatacaaactacgagctcgttattaaagaaactttaacgttaaaacctgaaggctttgtggtaaaagcaaaatcgaaaggcattccgcttggcggtattccttcacctagcactgaacagtctgctaaaaaagtacgcaaaaaggcagaaaacgctcataatacgccgctgcttgtgctatacggttcaaatgcgggaacagctgaaggaacggcgcgtgatttagcagatattgcaatgagcaaaggatttgcaccgcaggtcgcaacgcttgattcacacgccggaaatcttccgcgcgaaggagctgtattaattgtaacggcgtcttataacggtcatccgcctgataacgcaaagcaatttgtcgactggttagaccaagcgtctgctgatgaagtaaaaggcgttcgctactccgtatttggatgcggcgataaaaattgggctgcgacgtatcaaaaagtgcctgcttttatcgatgaaacgcttgccgctaaaggggcagaaaacatcgctgaccgcggtgaagcagatgcaagcgacgactttgaaggcacatatgaagaatggcgtgatcatatgtggagtgacgtagcagcctactttaacctcgacattgaaaacagtgaagataataaatctactctttcacttcaatttgtcgacagcgccgcggatatgccgcttgcgaaaatgcacggtgcgttttcaacgaacgtcgtagcaagcaaagaacttcaacagccaggcagtgcacgaagcacgcgacatcttgaaattgaacttccaaaagaagcttcttatcaagaaggagatcatttaggtgttattcctcgcaactatgaaggaatagtaaaccgtgtaacagcaaggttcggcctaagcgcatcacagcaaatccgtctggaagcagaagaagaaaaattagctcatttgccactcgctaaaacagtatccgtagaagagcttctgcaatacgtggagcttcaagatcctgttacgcgcacgcagcttcgcgcaatggctgctaaaacggtctgcccgccgcataaagtagagcttgaagccttgcttgaaaagcaagcctacaaagaacaagtgctggcaaaacgtttaacaatgcttgaactgcttgaaaaatacccggcgtgtgaaatgaaattcagcgaatttatcgcccttctgccaagcatacgcccgcgctattactcgatttcttcatcacctcgtgtcgatgaaaaacaagcaagcatcacggtcagcgttgtctcaggaccggcgtggagcggatatggagaatataaaggaattgcgtcgaactatcttgccgagctgcaagaaggagatacgattacgtgctttatttccacaccgcagtcagaatttacgctgccaaaagaccctgaaacgccgcttatcatggtcggaccgggaacaggcgtcgcgccgtttagaggctttgtgcaggcgcgcaaacagctaaaagaacaaggacagtcacttggagaagcacatttatacttcggctgccgttcacctcatgaagactatctgtatcaagaagagcttgaaaacgcccaaagcgaaggcatcattacgcttcataccgctttttctcgcatgccaaatcagccgaaaacatacgttcagcacgtaatggaacaagacggcaagaaattgattgaacttcttgatcaaggagcgcacttctatatttgcggagacggaagccaaatggcacctgccgttgaagcaacgcttatgaaaagctatgctgacgttcaccaagtgagtgaagcagacgctcgcttatggctgcagcagctagaagaaaaaggccgatacgcaaaagacgtgtgggctggg

SEQ ID NO: 36 - protein, 1049 aa, synthetic construct
  REGION 1..1049: note = variant of P450 oxidase from Bacillus megaterium
MTIKEMPQPKTFGELKNLPLLNTDKPVQALMRIADELGEIFKFEAPGSVTRYLSSQRLIKEACDESRFDKNLSQALKFARDFAGDGLATSWTHEPNWKKAHNILVPSFSQRAMKRYHAMMVDIAVQLVQKWERLNADEHIEVSEDMTRLTLDTIGLCGFNYRFNSFYRDQPHPFIVSMVRALDEVMNKLQRANPDDPAYDENKRQCQEDIKVMNDYVDKIIADRKARGEQSHDLLTQMLNGKDPETGEPLDDGNIRYQIITFLIAGHETTSGLLSFALYFLVKNPHVLQKVAEEAARVLVDPVPSYKQVKQLKYVGMVLNEALRLWPTAPAFSLYAKEDTVLGGEYPLTKGDEVMVLIPQLHRDKTIWGDDVEEFRPERFENPSAIPQHAFKPFGNGQRACIGQQFALHEATLVLGMMLKHFDFEDHTNYELVIKETLTLKPEGFVVKAKSKGIPLGGIPSPSTEQSAKKVRKKAENAHNTPLLVLYGSNAGTAEGTARDLADIAMSKGFAPQVATLDSHAGNLPREGAVLIVTASYNGHPPDNAKQFVDWLDQASADEVKGVRYSVFGCGDKNWAATYQKVPAFIDETLAAKGAENIADRGEADASDDFEGTYEEWRDHMWSDVAAYFNLDIENSEDNKSTLSLQFVDSAADMPLAKMHGAFSTNVVASKELQQPGSARSTRHLEIELPKEASYQEGDHLGVIPRNYEGIVNRVTARFGLSASQQIRLEAEEEKLAHLPLAKTVSVEELLQYVELQDPVTRTQLRAMAAKTVCPPHKVELEALLEKQAYKEQVLAKRLTMLELLEKYPACEMKFSEFIALLPSIRPRYYSISSSPRVDEKQASITVSVVSGPAWSGYGEYKGIASNYLAELQEGDTITCFISTPQSEFTLPKDPETPLIMVGPGTGVAPFRGFVQARKQLKEQGQSLGEAHLYFGCRSPHEDYLYQEELENAQSEGIITLHTAFSRMPNQPKTYVQHVMEQDGKKLIELLDQGAHFYICGDGSQMAPAVEATLMKSYADVHQVSEADARLWLQQLEEKGRYAKDVWAG

SEQ ID NO: 37 - DNA, 3147 bp, synthetic construct
  misc_feature 1..3147: note = variant of P450 oxidase from Bacillus megaterium
  source 1..3147: mol_type = other DNA
atgacaattaaggaaatgcctcagcctaagacgtttggagaacttaaaaatttaccgttattaaacacagataaaccggttcaagctttgatgcgtattgcggatgaattaggagaaatctttaaattcgaggcgcctggtagcgtaacgcgctatttatcaagtcagcgtctaattaaagaagcatgcgatgaatcacgctttgataaaaacttaagtcaagcgcttaaatttgcacgtgattttgctggagacgggttagccacaagctggacgcatgaaccgaattggaaaaaagcgcataatatcttaggtccaagctttagtcagcgtgcaatgaaacgttatcatgcgatgatggtcgatatcgccgtgcagcttgttcaaaagtgggagcgtctaaatgcagatgagcatattgaagtatcggaagacatgacacgtttaacgcttgatacaattggtctttgcggctttaactatcgctttaacagcttttaccgagatcagcctcatccatttattgtgagtatggtccgtgcactggatgaagtaatgaacaagctgcagcgagcaaatccagacgacccagcttatgatgaaaacaagcgccagtgtcaagaagatatcaaggtgatgaacgactatgtagataaaattattgcagatcgcaaagcaaggggtgaacaacgtcatgatttattaacgcagatgctaaacggaaaagatccagaaacgggtgagccgcttgatgacgggaacattcgttatcaaattattacattcttaattgcgggacacgaaacaacaagtggtcttttatcatttgcgctgtatttcttagtgaaaaatccacatgtattacaaaaagtagcagaagaagcagcacgagttctagtagatcctgttccaagctacaaacaagtcaaacagcttaaatatgtcggcatggtcttaaacgaagcgctgcgcttatggccaactgctcctgcgttttccctatatgcaaaagaagatacggtgcttggaggagaatatcctttaaccaaaggcgacgaagtaatggttctgattcctcagcttcaccgtgataaaacaatttggggagacgatgtggaggagttccgtccagagcgttttgaaaatccaagtgcgattccgcagcatgcgtttaaaccgtttggaaacggtcagcgtgcgtgtatcggtcagcagttcgctcttcatgaagcaacgctggtacttggtatgatgctaaaacactttgactttgaagatcatacaaactacgagctcgttattaaagaaactttaacgttaaaacctgaaggctttgtggtaaaagcaaaatcgaaaggcattccgcttggcggtattccttcacctagcactgaacagtctgctaaaaaagtacgcaaaaaggcagaaaacgctcataatacgccgctgcttgtgctatacggttcaaatgcgggaacagctgaaggaacggcgcgtgatttagcagatattgcaatgagcaaaggatttgcaccgcaggtcgcaacgcttgattcacacgccggaaatcttccgcgcgaaggagctgtattaattgtaacggcgtcttataacggtcatccgcctgataacgcaaagcaatttgtcgactggttagaccaagcgtctgctgatgaagtaaaaggcgttcgctactccgtatttggatgcggcgataaaaactgggctgcgacgtatcaaaaagtgcctgcttttatcgatgaaacgcttgccgctaaaggggcagaaaacatcgctgaccgcggtgaagcagatgcaagcgacgactttgaaggcacatatgaagaatggcgtgatcatatgtggagtgacgtagcagcctactttaacctcgacattgaaaacagtgaagataataaatctactctttcacttcaatttgtcgacagcgccgcggatatgccgcttgcgaaaatgcacggtgcgttttcaacgaacgtcgtagcaagcaaagaacttcaacagccaggcagtgcacgaagcacgcgacatcttgaaattgaacttccaaaagaagcttcttatcaagaaggagatcatttaggtgttattcctcgcaactatgaaggaatagtaaaccgtgtaacagcaaggttcggcctaagcgcatcacagcaaatccgtctggaagcagaagaagaaaaattagctcatttgccactcgctaaaacagtatccgtagaagagcttctgcaatacgtggagcttcaagatcctgttacgcgcacgcagcttcgcgcaatggctgctaaaacggtctgcccgccgcataaagtagagcttgaagccttgcttgaaaagcaagcctacaaagaacaagtgctggcaaaacgtttaacaatgcttgaactgcttgaaaaatacccggcgtgtgaaatgaaattcagcgaatttatcgcccttctgccaagcatacgcccgcgctattactcgatttcttcatcacctcgtgtcgatgaaaaacaagcaagcatcacggtcagcgttgtctcaggaccggcgtggagcggatatggagaatataaaggaattgcgtcgaactatcttgccgagctgcaagaaggagatacgattacgtgctttatttccacaccgcagtcagaatttacgctgccaaaagaccctgaaacgccgcttatcatggtcggaccgggaacaggcgtcgcgccgtttagaggctttgtgcaggcgcgcaaacagctaaaagaacaaggacagtcacttggagaagcacatttatacttcggctgccgttcacctcatgaagactatctgtatcaagaagagcttgaaaacgcccaaagcgaaggcatcattacgcttcataccgctttttctcgcatgccaaatcagccgaaaacatacgttcagcacgtaatggaacaagacggcaagaaattgattgaacttcttgatcaaggagcgcacttctatatttgcggagacggaagccaaatggcacctgccgttgaagcaacgcttatgaaaagctatgctgacgttcaccaagtgagtgaagcagacgctcgcttatggctgcagcagctagaagaaaaaggccgatacgcaaaagacgtgtgggctggg

SEQ ID NO: 38 - protein, 1049 aa, synthetic construct
  REGION 1..1049: note = variant of P450 oxidase from Bacillus megaterium
MTIKEMPQPKTFGELKNLPLLNTDKPVQALMRIADELGEIFKFEAPGSVTRYLSSQRLIKEACDESRFDKNLSQALKFARDFAGDGLATSWTHEPNWKKAHNILGPSFSQRAMKRYHAMMVDIAVQLVQKWERLNADEHIEVSEDMTRLTLDTIGLCGFNYRFNSFYRDQPHPFIVSMVRALDEVMNKLQRANPDDPAYDENKRQCQEDIKVMNDYVDKIIADRKARGEQRHDLLTQMLNGKDPETGEPLDDGNIRYQIITFLIAGHETTSGLLSFALYFLVKNPHVLQKVAEEAARVLVDPVPSYKQVKQLKYVGMVLNEALRLWPTAPAFSLYAKEDTVLGGEYPLTKGDEVMVLIPQLHRDKTIWGDDVEEFRPERFENPSAIPQHAFKPFGNGQRACIGQQFALHEATLVLGMMLKHFDFEDHTNYELVIKETLTLKPEGFVVKAKSKGIPLGGIPSPSTEQSAKKVRKKAENAHNTPLLVLYGSNAGTAEGTARDLADIAMSKGFAPQVATLDSHAGNLPREGAVLIVTASYNGHPPDNAKQFVDWLDQASADEVKGVRYSVFGCGDKNWAATYQKVPAFIDETLAAKGAENIADRGEADASDDFEGTYEEWRDHMWSDVAAYFNLDIENSEDNKSTLSLQFVDSAADMPLAKMHGAFSTNVVASKELQQPGSARSTRHLEIELPKEASYQEGDHLGVIPRNYEGIVNRVTARFGLSASQQIRLEAEEEKLAHLPLAKTVSVEELLQYVELQDPVTRTQLRAMAAKTVCPPHKVELEALLEKQAYKEQVLAKRLTMLELLEKYPACEMKFSEFIALLPSIRPRYYSISSSPRVDEKQASITVSVVSGPAWSGYGEYKGIASNYLAELQEGDTITCFISTPQSEFTLPKDPETPLIMVGPGTGVAPFRGFVQARKQLKEQGQSLGEAHLYFGCRSPHEDYLYQEELENAQSEGIITLHTAFSRMPNQPKTYVQHVMEQDGKKLIELLDQGAHFYICGDGSQMAPAVEATLMKSYADVHQVSEADARLWLQQLEEKGRYAKDVWAG

SEQ ID NO: 39 - DNA, 3147 bp, synthetic construct
  misc_feature 1..3147: note = variant of P450 oxidase from Bacillus megaterium
  source 1..3147: mol_type = other DNA
atgacaattaaggaaatgcctcagcctaagacgtttggagaacttaaaaatttaccgttattaaacacagataaaccggttcaagctttgatgcgtattgcggatgaattaggagaaatctttaaattcgaggcgcctggtagcgtaacgcgctttttatcaagtcagcgtctaattaaagaagcatgcgatgaatcacgctttgataaaaacttaagtcaagcgcttaaatttgcacgtgattttgctggagacgggttagccacaagctggacgcatgaaccgaattggaaaaaagcgcataatatcttaggcccaagctttagtcagcaggcaatgaaacgttatcatgcgatgatggtcgatatcgccgtgcagcttgttcaaaagtgggagcgtctaaatgcagatgagcatattgaagtatcggaagacatgacacgtttaacgcttgatacaattggtctttgcggctttaactatcgctttaacagcttttaccgagatcagcctcatccatttattgtgagtatggtccgtgcactggatgaagtaatgaacaagctgcagcgagcaaatccagacgacccagcttatgatgaaaacaagcgccagtgtcaagaagatatcaaggtgatgaacgactatgtagataaaattattgcagatcgcaaagcaaggggtgaacaaagccatgatttattaacgcagatgctaaacggaaaagatccagaaacgggtgagccgcttgatgacgggaacattcgttatcaaattattacattcttaattgcgggacacgaaacaacaagtggtcttttatcatttgcgctgtatttcttagtgaaaaatccacatgtattacaaaaagtagcagaagaagcagcacgagttctagtagatcctgttccaagctacaaacaagtcaaacagcttaaatatgtcggcatggtcttaaacgaagcgctgcgcttatggccaactgctcctgcgttttccctatatgcaaaagaagatacggtgcttggaggagaatatcctttaaccaaaggcgacgaagtaatggttctgattcctcagcttcaccgtgataaaacaatttggggagacgatgtggaggagttccgtccagagcgttttgaaaatccaagtgcgattccgcagcatgcgtttaaaccgtttggaaacggtcagcgtgcgtgtatcggtcagcagttcgctcttcatgaagcaacgctggtacttggtatgatgctaaaacactttgactttgaagatcatacaaactacgagctcgttattaaagaaactttaacgttaaaacctgaaggctttgtggtaaaagcaaaatcgaaaggtattccgcttggcggtattccttcacctagcactgaacagtctgctaaaaaagtacgcaaaaaggcagaaaacgctcataatacgccgctgcttgtgctatacggttcaaatgcgggaacagctgaaggaacggcgcgtgatttagcagatattgcaatgagcaaaggatttgcaccgcaggtcgcaacgcttgattcacacgccggaaatcttccgcgcgaaggagctgtattaattgtaacggcgtcttataacggtcatccgcctgataacgcaaagcaatttgtcgactggttagaccaagcgtctgctgatgaagtaaaaggcgttcgctactccgtatttggatgcggcgataaaacttgggctgcgacgtatcaaaaagtgcctgcttttatcgatgaaacgcttgccgctaaaggggcagaaaacatcgctgaccgcggtgaagcagatgcaagcgacgactttgaaggcacatatgaagaatggcgtgatcatatgtggagtgacgtagcagcctactttaacctcgacattgaaaacagtgaagataataaatctactctttcacttcaatttgtcgacagcgccgcggatatgccgcttgcgaaaatgcacggtgcgttttcaacgaacgtcgtagcaagcaaagaacttcaacagccaggcagtgcacgaagcacgcgacatcttgaaattgaacttccaaaagaagcttcttatcaagaaggagatcatttaggtgttattcctcgcaactatgaaggaatagtaaaccgtgtaacagcaaggttcggcctaagcgcatcacagcaaatccgtctggaagcagaagaagaaaaattagctcatttgccactcgctaaaacagtatccgtagaagagcttctgcaatacgtggagcttcaagatcctgttacgcgcacgcagcttcgcgcaatggctgctaaaacggtctgcccgccgcataaagtagagcttgaagccttgcttgaaaagcaagcctacaaagaacaagtgctggcaaaacgtttaacaatgcttgaactgcttgaaaaatacccggcgtgtgaaatgaaattcagcgaatttatcgcccttctgccaagcatacgcccgcgctattactcgatttcttcatcacctcgtgtcgatgaaaaacaagcaagcatcacggtcagcgttgtctcaggaccggcgtggagcggatatggagaatataaaggaattgcgtcgaactatcttgccgagctgcaagaaggagatacgattacgtgctttatttccacaccgcagtcagaatttacgctgccaaaagaccctgaaacgccgcttatcatggtcggaccgggaacaggcgtcgcgccgtttagaggctttgtgcaggcgcgcaaacagctaaaagaacaaggacagtcacttggagaagcacatttatacttcggctgccgttcacctcatgaagactatctgtatcaagaagagcttgaaaacgcccaaagcgaaggcatcattacgcttcataccgctttttctcgcatgccaaatcagccgaaaacatacgttcagcacgtaatggaacaagacggcaagaaattgattgaacttcttgatcaaggagcgcacttctatatttgcggagacggaagccaaatggcacctgccgttgaagcaacgcttatgaaaagctatgctgacgttcaccaagtgagtgaagcagacgctcgcttatggctgcagcagctagaagaaaaaggccgatacgcaaaagacgtgtgggctggg

SEQ ID NO: 40 - protein, 1049 aa, synthetic construct
  REGION 1..1049: note = variant of P450 oxidase from Bacillus megaterium
MTIKEMPQPKTFGELKNLPLLNTDKPVQALMRIADELGEIFKFEAPGSVTRFLSSQRLIKEACDESRFDKNLSQALKFARDFAGDGLATSWTHEPNWKKAHNILGPSFSQQAMKRYHAMMVDIAVQLVQKWERLNADEHIEVSEDMTRLTLDTIGLCGFNYRFNSFYRDQPHPFIVSMVRALDEVMNKLQRANPDDPAYDENKRQCQEDIKVMNDYVDKIIADRKARGEQSHDLLTQMLNGKDPETGEPLDDGNIRYQIITFLIAGHETTSGLLSFALYFLVKNPHVLQKVAEEAARVLVDPVPSYKQVKQLKYVGMVLNEALRLWPTAPAFSLYAKEDTVLGGEYPLTKGDEVMVLIPQLHRDKTIWGDDVEEFRPERFENPSAIPQHAFKPFGNGQRACIGQQFALHEATLVLGMMLKHFDFEDHTNYELVIKETLTLKPEGFVVKAKSKGIPLGGIPSPSTEQSAKKVRKKAENAHNTPLLVLYGSNAGTAEGTARDLADIAMSKGFAPQVATLDSHAGNLPREGAVLIVTASYNGHPPDNAKQFVDWLDQASADEVKGVRYSVFGCGDKTWAATYQKVPAFIDETLAAKGAENIADRGEADASDDFEGTYEEWRDHMWSDVAAYFNLDIENSEDNKSTLSLQFVDSAADMPLAKMHGAFSTNVVASKELQQPGSARSTRHLEIELPKEASYQEGDHLGVIPRNYEGIVNRVTARFGLSASQQIRLEAEEEKLAHLPLAKTVSVEELLQYVELQDPVTRTQLRAMAAKTVCPPHKVELEALLEKQAYKEQVLAKRLTMLELLEKYPACEMKFSEFIALLPSIRPRYYSISSSPRVDEKQASITVSVVSGPAWSGYGEYKGIASNYLAELQEGDTITCFISTPQSEFTLPKDPETPLIMVGPGTGVAPFRGFVQARKQLKEQGQSLGEAHLYFGCRSPHEDYLYQEELENAQSEGIITLHTAFSRMPNQPKTYVQHVMEQDGKKLIELLDQGAHFYICGDGSQMAPAVEATLMKSYADVHQVSEADARLWLQQLEEKGRYAKDVWAG

SEQ ID NO: 41 - DNA, 3147 bp, synthetic construct
  misc_feature 1..3147: note = variant of P450 oxidase from Bacillus megaterium
  source 1..3147: mol_type = other DNA
atgacaattaaggaaatgcctcagcctaagacgtttggagaacttaaaaatttaccgttattaaacacagataaaccggttcaagctttgatgcgtattgcggatgaattaggagaaatctttaaattcgaggcgcctggtagcgtaacgcgctttttatcaagtcagcgtctaattaaagaagcatgcgatgaatcacgctttgataaaaacttaagtcaagcgcttaaatttgcacgtgattttgctggagacgggttagccacaagctggacgcatgaaccgaattggaaaaaagcgcataatatcttaggtccaagctttagtcagcaggcaatgaaacgttatcatgcgatgatggtcgatatcgccgtgcagcttgttcaaaagtgggagcgtctaaatgcagatgagcatattgaagtatcggaagacatgacacgtttaacgcttgatacaattggtctttgcggctttaactatcgctttaacagcttttaccgagatcagcctcatccatttattgtcagtatggtccgtgcactggatgaagtaatgaacaagctgcagcgagcaaatccagacgacccagcttatgatgaaaacaagcgccagtgtcaagaagatatcaaggtgatgaacgactatgtagataaaattattgcagatcgcaaagcaaggggtgaacaaagccatgatttattaacgcagatgctaaacggaaaagatccagaaacgggtgagccgcttgatgacgggaacattcgttatcaaattattacattcttaattgcgggacacgaaacaacaagtggtcttttatcatttgcgctgtatttcttagtgaaaaatccacatgtattacaaaaagtagcagaagaagcagcacgagttctagtagatcctgttccaagctacaaacaagtcaaacagcttaaatatgtcggcatggtcttaaacgaagcgctgcgcttatggccaactgctcctgcgttttccctatatgcaaaagaagatacggtgcttggaggagaatatcctttaacgaaaggcgacgaagtaatggttctgattcctcagcttcaccgtgataaaacaatttggggagacgatgtggaggagttccgtccagagcgttttgaaaatccaagtgcgattccgcagcatgcgtttaaaccgtttggaaacggtcagcgtgcgtgtatcggtcagcagttcgctcttcatgaagcaacgctggtacttggtatgatgctaaaacactttgactttgaagatcatacaaactacgagctcgttattaaagaaactttaacgttaaaacctgaaggctttgtggtaaaagcaaaatcgaaaggcattccgcttggcggtattccttcacctagcactgaacagtctgctaaaaaagtacgcaaaaaggcagaaaacgctcataatacgccgctgcttgtgctatacggttcaaatgcgggaacagctgaaggaacggcgcgtgatttagcagatattgcaatgagcaaaggatttgcaccgcaggtcgcaacgcttgattcacacgccggaaatcttccgcgcgaaggagctgtattaattgtaacggcgtcttataacggtcatccgcctgataacgcaaagcaatttgtcgactggttagaccaagcgtctgctgatgaagtaaaaggcgttcgctactccgtatttggatgcggcgataaaaactgggctgcgacgtatcaaaaagtgcctgcttttatcgatgaaacgcttgccgctaaaggggcagaaaacatcgctgaccgcggtgaagcagatgcaagcgacgactttgaaggcacatatgaagaatggcgtgatcatatgtggagtgacgtagcagcctactttaacctcgacattgaaaacagtgaagataataaatctactctttcacttcaatttgtcgacagcgccgcggatatgccgcttgcgaaaatgcacggtgcgttttcaacgaacgtcgtagcaagcaaagaacttcaacagccaggcagtgcacgaagcacgcgacatcttgaaattgaacttccaaaagaagcttcttatcaagaaggagatcatttaggtgttattcctcgcaactatgaaggaatagtaaaccgtgtaacagcaaggttcggcctaagcgcatcacagcaaatccgtctggaagcagaagaagaaaaattagctcatttgccactcgctaaaacagtatccgtagaagagcttctgcaatacgtggagcttcaagatcctgttacgcgcacgcagcttcgcgcaatggctgctaaaacggtctgcccgccgcataaagtagagcttgaagccttgcttgaaaagcaagcctacaaagaacaagtgctggcaaaacgtttaacaatgcttgaactgcttgaaaaatacccggcgtgtgaaatgaaattcagcgaatttatcgcccttctgccaagcatacgcccgcgctattactcgatttcttcatcacctcgtgtcgatgaaaaacaagcaagcatcacggtcagcgttgtctcaggaccggcgtggagcggatatggagaatataaaggaattgcgtcgaactatcttgccgagctgcaagaaggagatacgattacgtgctttatttccacaccgcagtcagaatttacgctgccaaaagaccctgaaacgccgcttatcatggtcggaccgggaacaggcgtcgcgccgtttagaggctttgtgcaggcgcgcaaacagctaaaagaacaaggacagtcacttggagaagcacatttatacttcggctgccgttcacctcatgaagactatctgtatcaagaagagcttgaaaacgcccaaagcgaaggcatcattacgcttcataccgctttttctcgcatgccaaatcagccgaaaacatacgttcagcacgtaatggaacaagacggcaagaaattgattgaacttcttgatcaaggagcgcacttctatatttgcggagacggaagccaaatggcacctgccgttgaagcaacgcttatgaaaagctatgctgacgttcaccaagtgagtgaagcagacgctcgcttatggctgcagcagctagaagaaaaaggccgatacgcaaaagacgtgtgggctggg

SEQ ID NO: 42 - protein, 1049 aa, synthetic construct
  REGION 1..1049: note = variant of P450 oxidase from Bacillus megaterium
MTIKEMPQPKTFGELKNLPLLNTDKPVQALMRIADELGEIFKFEAPGSVTRFLSSQRLIKEACDESRFDKNLSQALKFARDFAGDGLATSWTHEPNWKKAHNILGPSFSQQAMKRYHAMMVDIAVQLVQKWERLNADEHIEVSEDMTRLTLDTIGLCGFNYRFNSFYRDQPHPFIVSMVRALDEVMNKLQRANPDDPAYDENKRQCQEDIKVMNDYVDKIIADRKARGEQSHDLLTQMLNGKDPETGEPLDDGNIRYQIITFLIAGHETTSGLLSFALYFLVKNPHVLQKVAEEAARVLVDPVPSYKQVKQLKYVGMVLNEALRLWPTAPAFSLYAKEDTVLGGEYPLTKGDEVMVLIPQLHRDKTIWGDDVEEFRPERFENPSAIPQHAFKPFGNGQRACIGQQFALHEATLVLGMMLKHFDFEDHTNYELVIKETLTLKPEGFVVKAKSKGIPLGGIPSPSTEQSAKKVRKKAENAHNTPLLVLYGSNAGTAEGTARDLADIAMSKGFAPQVATLDSHAGNLPREGAVLIVTASYNGHPPDNAKQFVDWLDQASADEVKGVRYSVFGCGDKNWAATYQKVPAFIDETLAAKGAENIADRGEADASDDFEGTYEEWRDHMWSDVAAYFNLDIENSEDNKSTLSLQFVDSAADMPLAKMHGAFSTNVVASKELQQPGSARSTRHLEIELPKEASYQEGDHLGVIPRNYEGIVNRVTARFGLSASQQIRLEAEEEKLAHLPLAKTVSVEELLQYVELQDPVTRTQLRAMAAKTVCPPHKVELEALLEKQAYKEQVLAKRLTMLELLEKYPACEMKFSEFIALLPSIRPRYYSISSSPRVDEKQASITVSVVSGPAWSGYGEYKGIASNYLAELQEGDTITCFISTPQSEFTLPKDPETPLIMVGPGTGVAPFRGFVQARKQLKEQGQSLGEAHLYFGCRSPHEDYLYQEELENAQSEGIITLHTAFSRMPNQPKTYVQHVMEQDGKKLIELLDQGAHFYICGDGSQMAPAVEATLMKSYADVHQVSEADARLWLQQLEEKGRYAKDVWAG

SEQ ID NO: 43 - DNA, 3147 bp, synthetic construct
  misc_feature 1..3147: note = variant of P450 oxidase from Bacillus megaterium
  source 1..3147: mol_type = other DNA
atgacaattaaggaaatgcctcagcctaagacgtttggagaacttaaaaatttaccgttattaaacacagataaaccggttcaagctttgatgcgtattgcggatgaattaggagaaatctttaaattcgaggcgcctggtagcgtaacgcgctttttatcaagtcagcgtctaattaaagaagcatgcgatgaatcacgctttgataaaaacttaagtcaagcgcttaaatttgcacgtgattttgctggagacgggttagccacaagctggacgcatgaaccgaattggaaaaaagcgcataatatcttaggtccaagctttagtcagcgtgcaatgaaacgttatcatgcgatgatggtcgatatcgccgtgcagcttgttcaaaagtgggagcgtctaaatgcagatgagcatattgaagtatcggaagacatgacacgtttaacgcttgatacaattggtctttgcggctttaactatcgctttaacagcttttaccgagatcagcctcatccatttattgtgagtatggtccgtgcactggatgaagtaatgaacaagctgcagcgagcaaatccagacgacccagcttatgatgaaaacaagcgccagtgtcaagaagatatcaaggtgatgaacgactatgtagataaaattattgcagatcgcaaagcaaggggtgaacaaagccatgatttattaacgcagatgctaaacggaaaagatccagaaacgggtgagccgcttgatgacgggaacattcgctatcaaattattacattcttaattgcgggacacgaaacaacaagtggtcttttatcatttgcgctgtatttcttagtgaaaaatccacatgtattacaaaaagtagcagaagaagcagcacgagttctagtagatcctgttccaagctacaaacaagtcaaacagcttaaatatgtcggcatggtcttaaacgaagcgctgcgcttatggccaactgctcctgcgttttccctatatgcaaaagaagatacggtgcttggaggagaatatcctttaaccaaaggcgacgaagtaatggttctgattcctcagcttcaccgtgataaaacaatttggggagacgatgtggaggagttccgtccagagcgttttgaaaatccaagtgcgattccgcagcatgcgtttaaaccgtttggaaacggtcagcgtgcgtgtatcggtcagcagttcgctcttcatgaagcaacgctggtacttggtatgatgctaaaacactttgactttgaagatcatacaaactacgagctcgatattaaagaaactttaacgttaaaacctgaaggctttgtggtaaaagcaaaatcgaaaggcattccgcttggcggtattccttcacctagcactgaacagtctgctaaaaaagtacgcaaaaaggcagaaaacgctcataatacgccgctgcttgtgctatacggttcaaatgcgggaacagctgaaggaacggcgcgtgatttagcagatattgcaatgagcaaaggatttgcaccgcaggtcgcaacgcttgattcacacgccggaaatcttccgcgcgaaggagctgtattaattgtaacggcgtcttataacggtcatccgcctgataacgcaaagcaatttgtcgactggttagaccaagcgtctgctgatgaagtaaaaggcgttcgctactccgtatttggatgcggcgataaaacttgggctgcgacgtatcaaaaagtgcctgcttttatcgatgaaacgcttgccgctaaaggggcagaaaacatcgctgaccgcggtgaagcagatgcaagcgacgactttgaaggcacatatgaagaatggcgtgatcatatgtggagtgacgtagcagcctactttaacctcgacattgaaaacagtgaagataataaatctactctttcacttcaatttgtcgacagcgccgcggatatgccgcttgcgaaaatgcacggtgcgttttcaacgaacgtcgtagcaagcaaagaacttcaacagccaggcagtgcacgaagcacgcgacatcttgaaattgaacttccaaaagaagcttcttatcaagaaggagatcatttaggtgttattcctcgcaactatgaaggaatagtaaaccgtgtaacagcaaggttcggcctaagcgcatcacagcaaatccgtctggaagcagaagaagaaaaattagctcatttgccactcgctaaaacagtatccgtagaagagcttctgcaatacgtggagcttcaagatcctgttacgcgcacgcagcttcgcgcaatggctgctaaaacggtctgcccgccgcataaagtagagcttgaagccttgcttgaaaagcaagcctacaaagaacaagtgctggcaaaacgtttaacaatgcttgaactgcttgaaaaatacccggcgtgtgaaatgaaattcagcgaatttatcgcccttctgccaagcatacgcccgcgctattactcgatttcttcatcacctcgtgtcgatgaaaaacaagcaagcatcacggtcagcgttgtctcaggaccggcgtggagcggatatggagaatataaaggaattgcgtcgaactatcttgccgagctgcaagaaggagatacgattacgtgctttatttccacaccgcagtcagaatttacgctgccaaaagaccctgaaacgccgcttatcatggtcggaccgggaacaggcgtcgcgccgtttagaggctttgtgcaggcgcgcaaacagctaaaagaacaaggacagtcacttggagaagcacatttatacttcggctgccgttcacctcatgaagactatctgtatcaagaagagcttgaaaacgcccaaagcgaaggcatcattacgcttcataccgctttttctcgcatgccaaatcagccgaaaacatacgttcagcacgtaatggaacaagacggcaagaaattgattgaacttcttgatcaaggagcgcacttctatatttgcggagacggaagccaaatggcacctgccgttgaagcaacgcttatgaaaagctatgctgacgttcaccaagtgagtgaagcagacgctcgcttatggctgcagcagctagaagaaaaaggccgatacgcaaaagacgtgtgggctggg

SEQ ID NO: 44 - protein, 1049 aa, synthetic construct
  REGION 1..1049: note = variant of P450 oxidase from Bacillus megaterium
MTIKEMPQPKTFGELKNLPLLNTDKPVQALMRIADELGEIFKFEAPGSVTRFLSSQRLIKEACDESRFDKNLSQALKFARDFAGDGLATSWTHEPNWKKAHNILGPSFSQRAMKRYHAMMVDIAVQLVQKWERLNADEHIEVSEDMTRLTLDTIGLCGFNYRFNSFYRDQPHPFIVSMVRALDEVMNKLQRANPDDPAYDENKRQCQEDIKVMNDYVDKIIADRKARGEQSHDLLTQMLNGKDPETGEPLDDGNIRYQIITFLIAGHETTSGLLSFALYFLVKNPHVLQKVAEEAARVLVDPVPSYKQVKQLKYVGMVLNEALRLWPTAPAFSLYAKEDTVLGGEYPLTKGDEVMVLIPQLHRDKTIWGDDVEEFRPERFENPSAIPQHAFKPFGNGQRACIGQQFALHEATLVLGMMLKHFDFEDHTNYELDIKETLTLKPEGFVVKAKSKGIPLGGIPSPSTEQSAKKVRKKAENAHNTPLLVLYGSNAGTAEGTARDLADIAMSKGFAPQVATLDSHAGNLPREGAVLIVTASYNGHPPDNAKQFVDWLDQASADEVKGVRYSVFGCGDKTWAATYQKVPAFIDETLAAKGAENIADRGEADASDDFEGTYEEWRDHMWSDVAAYFNLDIENSEDNKSTLSLQFVDSAADMPLAKMHGAFSTNVVASKELQQPGSARSTRHLEIELPKEASYQEGDHLGVIPRNYEGIVNRVTARFGLSASQQIRLEAEEEKLAHLPLAKTVSVEELLQYVELQDPVTRTQLRAMAAKTVCPPHKVELEALLEKQAYKEQVLAKRLTMLELLEKYPACEMKFSEFIALLPSIRPRYYSISSSPRVDEKQASITVSVVSGPAWSGYGEYKGIASNYLAELQEGDTITCFISTPQSEFTLPKDPETPLIMVGPGTGVAPFRGFVQARKQLKEQGQSLGEAHLYFGCRSPHEDYLYQEELENAQSEGIITLHTAFSRMPNQPKTYVQHVMEQDGKKLIELLDQGAHFYICGDGSQMAPAVEATLMKSYADVHQVSEADARLWLQQLEEKGRYAKDVWAG

SEQ ID NO: 45 - DNA, 3147 bp, synthetic construct
  misc_feature 1..3147: note = variant of P450 oxidase from Bacillus megaterium
  source 1..3147: mol_type = other DNA
atgacaattaaggaaatgcctcagcctaagacgtttggagaacttaaaaatttaccgttattaaacacagataaaccggttcaagctttgatgcgtattgcggatgaattaggagaaatctttaaattcgaggcgcctggtagcgtaacgcgctatttatcaagtcagcgtctaattaaagaagcatgcgatgaatcacgctttgataaaaacttaagtcaaagccttaaatttgcacgtgattttgctggagacgggttagccacaagctggacgcatgaaccgaattggaaaaaagcgcataatatcttagttccaagctttagtcagcgtgcaatgaaacgttatcatgcgatgatggtcgatatcgccgtgcagcttgttcaaaagtgggagcgtctaaatgcagatgagcatattgaagtatcggaagacatgacacgtttaacgcttgatacaattggtctttgcggctttaactatcgctttaacagcttttaccgagatcagcctcatccatttattgtgagtatggtccgtgcactggatgaagtaatgaacaagctgcagcgagcaaatccagacgacccagcttatgatgaaaacaagcgccagtgtcaagaagatatcaaggtgatgaacgactatgtagataaaattattgcagatcgcaaagcaaggggtgaacaaagtcatgatttattaacgcagatgctaaacggaaaagatccagaaacgggtgagccgcttgatgacgggaacattcgttatcaaattattacattcttaattgcgggacacgaaacaacaagtggtcttttatcatttgcgctgtatttcttagtgaaaaatccacatgtattacaaaaagtagcagaagaagcagcacgagttctagtagatcctgttccaagctacaaacaagtcaaacagcttaaatatgtcggcatggtcttaaacgaagcgctgcgcttatggccaactgctcctgcgttttccctatatgcaaaagaagatacggtgcttggaggagaatatcctttaacgaaaggcgacgaagtaatggttctgattcctcagcttcaccgtgataaaacaatttggggagacgatgtggagagtttccgtccagagcgttttgaaaatccaagtgcgattccgcagcatgcgtttaaaccgtttggaaacggtcagcgtgcgtgtatcggtcagcagttcgctcttcatgaagcaacgctggtacttggtatgatgctaaaacactttgactttgaagatcatacaaactacgagctcgttattaaagaaactttaacgttaaaacctgaaggctttgtggtaaaagcaaaatcgaaaggcattccgcttggcgggattccttcacctagcactgaacagtctgctaaaaaagtacgcaaaaaggcagaaaacgctcataatacgccgctgcttgtgctatacggttcaaatgcgggaacagctgaaggaacggcgcgtgatttagcagatattgcaatgagcaaaggatttgcaccgcaggtcgcaacgcttgattcacacgccggaaatcttccgcgcgaaggagctgtattaattgtaacggcgtcttataacggtcatccgcctgataacgcaaagcaatttgtcgactggttagaccaagcgtctgctgatgaagtaaaaggcgttcgctactccgtatttggatgcggcgataaaaattgggctgcgacgtatcaaaaagtgcctgcttttatcgatgaaacgcttgccgctaaaggggcagaaaacatcgctgaccgcggtgaagcagatgcaagcgacgactttgaaggcacatatgaagaatggcgtgatcatatgtggagtgacgtagcagcctactttaacctcgacattgaaaacagtgaagataataaatctactctttcacttcaatttgtcgacagcgccgcggatatgccgcttgcgaaaatgcacggtgcgttttcaacgaacgtcgtagcaagcaaagaacttcaacagccaggcagtgcacgaagcacgcgacatcttgaaattgaacttccaaaagaagcttcttatcaagaaggagatcatttaggtgttattcctcgcaactatgaaggaatagtaaaccgtgtaacagcaaggttcggcctaagcgcatcacagctgatccgtctggaagcagaagaagaaaaattagctcatttgccactcgctaaaacagtatccgtagaagagcttctgcaatacgtggagcttcaagatcctgttacgcgcacgcagcttcgcgcaatggctgctaaaacggtctgcccgccgcataaagtagagcttgaagccttgcttgaaaagcaagcctacaaagaacaagtgctggcaaaacgtttaacaatgcttgaactgcttgaaaaatacccggcgtgtgaaatgaaattcagcgaatttatcgcccttctgccaagcatacgcccgcgctattactcgatttcttcatcacctcgtgtcgatgaaaaacaagcaagcatcacggtcagcgttgtctcaggaccggcgtggagcggatatggagaatataaaggaattgcgtcgaactatcttgccgagctgcaagaaggagatacgattacgtgctttatttccacacctcagtcagaatttacgctgccaaaagaccctgagacgccgcttatcatggtcggaccgggaacaggcgtcgcgccgtttagaggctttgtgcaggcgcgcaaacagctaaaagaacaaggacagtcacttggagaagcacatttatacttcggctgccgttcacctcatgaagactatctgtatcaagaagagcttgaaaacgcccaaagcgaaggcatcattacgcttcataccgctttttctcgcatgccaaatcagccgaaaacatacgttcagcacgtaatggaacaagacggcaagaaattgattgaacttcttgatcaaggagcgcacttctatatttgcggagacggaagccaaatggcacctgccgttgaagcaacgcttatgaaaagctatgctgacgttcaccaagtgagtgaagcagacgctcgcttatggctgcagcagctagaagaaaaaggccgatacgcaaaagacgtgtgggctggg

SEQ ID NO: 46 - protein, 1049 aa, synthetic construct
  REGION 1..1049: note = variant of P450 oxidase from Bacillus megaterium
MTIKEMPQPKTFGELKNLPLLNTDKPVQALMRIADELGEIFKFEAPGSVTRYLSSQRLIKEACDESRFDKNLSQSLKFARDFAGDGLATSWTHEPNWKKAHNILVPSFSQRAMKRYHAMMVDIAVQLVQKWERLNADEHIEVSEDMTRLTLDTIGLCGFNYRFNSFYRDQPHPFIVSMVRALDEVMNKLQRANPDDPAYDENKRQCQEDIKVMNDYVDKIIADRKARGEQSHDLLTQMLNGKDPETGEPLDDGNIRYQIITFLIAGHETTSGLLSFALYFLVKNPHVLQKVAEEAARVLVDPVPSYKQVKQLKYVGMVLNEALRLWPTAPAFSLYAKEDTVLGGEYPLTKGDEVMVLIPQLHRDKTIWGDDVESFRPERFENPSAIPQHAFKPFGNGQRACIGQQFALHEATLVLGMMLKHFDFEDHTNYELVIKETLTLKPEGFVVKAKSKGIPLGGIPSPSTEQSAKKVRKKAENAHNTPLLVLYGSNAGTAEGTARDLADIAMSKGFAPQVATLDSHAGNLPREGAVLIVTASYNGHPPDNAKQFVDWLDQASADEVKGVRYSVFGCGDKNWAATYQKVPAFIDETLAAKGAENIADRGEADASDDFEGTYEEWRDHMWSDVAAYFNLDIENSEDNKSTLSLQFVDSAADMPLAKMHGAFSTNVVASKELQQPGSARSTRHLEIELPKEASYQEGDHLGVIPRNYEGIVNRVTARFGLSASQLIRLEAEEEKLAHLPLAKTVSVEELLQYVELQDPVTRTQLRAMAAKTVCPPHKVELEALLEKQAYKEQVLAKRLTMLELLEKYPACEMKFSEFIALLPSIRPRYYSISSSPRVDEKQASITVSVVSGPAWSGYGEYKGIASNYLAELQEGDTITCFISTPQSEFTLPKDPETPLIMVGPGTGVAPFRGFVQARKQLKEQGQSLGEAHLYFGCRSPHEDYLYQEELENAQSEGIITLHTAFSRMPNQPKTYVQHVMEQDGKKLIELLDQGAHFYICGDGSQMAPAVEATLMKSYADVHQVSEADARLWLQQLEEKGRYAKDVWAG

SEQ ID NO: 47 - DNA, 3147 bp, synthetic construct
  misc_feature 1..3147: note = variant of P450 oxidase from Bacillus megaterium
  source 1..3147: mol_type = other DNA
atgacaattaaggaaatgcctcagcctaagacgtttggagaacttaaaaatttaccgttattaaacacagataaaccggttcaagctttgatgcgtattgcggatgaattaggagaaatctttaaattcgaggcgcctggtagcgtaacgcgctatttatcaagtcagcgtctaattaaagaagcatgcgatgaatcacgctttgataaaaacttaagtcaaagccttaaatttgcacgtgattttgctggagacgggttagccacaagctggacgcatgaaccgaattggaaaaaagcgcataatatcttagttccaagctttagtcagcgtgcaatgaaacgttatcatgcgatgatggtcgatatcgccgtgcagcttgttcaaaagtgggagcgtctaaatgcagatgagcatattgaagtatcggaagacatgacacgtttaacgcttgatacaattggtctttgcggctttaactatcgctttaacagcttttaccgagatcagcctcatccatttattgtgagtatggtccgtgcactggatgaagtaatgaacaagctgcagcgagcaaatccagacgacccagcttatgatgaaaacaagcgccagtgtcaagaagatatcaaggtgatgaacgactatgtagataaaattattgcagatcgcaaagcaaggggtgaacaaagtcatgatttattaacgcagatgctaaacggaaaagatccagaaacgggtgagccgcttgatgacgggaacattcgttatcaaattattacattcttaattgcgggacacgaaacaacaagtggtcttttatcatttgcgctgtatttcttagtgaaaaatccacatgtattacaaaaagtagcagaagaagcagcacgagttctagtagatcctgttccaagctacaaacaagtcaaacagcttaaatatgtcggcatggtcttaaacgaagcgctgcgcttatggccaactgctcctgcgttttccctatatgcaaaagaagatacggtgcttggaggagaatatcctttaacgaaaggcgacgaagtaatggttctgattcctcagcttcaccgtgataaaacaatttggggagacgatgtggaggagttccgtccagagcgttttgaaaatccaagtgcgattccgcagcatgcgtttaaaccgtttggaaacggtcagcgtgcgtgtatcggtcagcagttcgctcttcatgaagcaacgctggtacttggtatgatgctaaaacactttgactttgaagatcatacaaactacgagctcgttattaaagaaactttaacgttaaaacctgaaggctttgtggtaaaagcaaaatcgaaaggcattccgcttggcgggattccttcacctagcactgaacagtctgctaaaaaagtacgcaaaaaggcagaaaacgctcataatacgccgctgcttgtgctatacggttcaaatgcgggaacagctgaaggaacggcgcgtgatttagcagatattgcaatgagcaaaggatttgcaccgcaggtcgcaacgcttgattcacacgccggaaatcttccgcgcgaaggagctgtattaattgtaacggcgtcttataacggtcatccgcctgataacgcaaagcaatttgtcgactggttagaccaagcgtctgctgatgaagtaaaaggcgttcgctactccgtatttggatgcggcgataaaaattgggctgcgacgtatcaaaaagtgcctgcttttatcgatgaaacgcttgccgctaaaggggcagaaaacatcgctgaccgcggtgaagcagatgcaagcgacgactttgaaggcacatatgaagaatggcgtgatcatatgtggagtgacgtagcagcctactttaacctcgacattgaaaacagtgaagataataaatctactctttcacttcaatttgtcgacagcgccgcggatatgccgcttgcgaaaatgcacggtgcgttttcaacgaacgtcgtagcaagcaaagaacttcaacagccaggcagtgcacgaagcacgcgacatcttgaaattgaacttccaaaagaagcttcttatcaagaaggagatcatttaggtgttattcctcgcaactatgaaggaatagtaaaccgtgtaacagcaaggttcggcctaagcgcatcacagctgatccgtctggaagcagaagaagaaaaattagctcatttgccactcgctaaaacagtatccgtagaagagcttctgcaatacgtggagcttcaagatcctgttacgcgcacgcagcttcgcgcaatggctgctaaaacggtctgcccgccgcataaagtagagcttgaagccttgcttgaaaagcaagcctacaaagaacaagtgctggcaaaacgtttaacaatgcttgaactgcttgaaaaatacccggcgtgtgaaatgaaattcagcgaatttatcgcccttctgccaagcatacgcccgcgctattactcgatttcttcatcacctcgtgtcgatgaaaaacaagcaagcatcacggtcagcgttgtctcaggaccggcgtggagcggatatggagaatataaaggaattgcgtcgaactatcttgccgagctgcaagaaggagatacgattacgtgctttatttccacaccgcagtcagaatttacgctgccaaaagaccctgaaacgccgcttatcatggtcggaccgggaacaggcgtcgcgccgtttagaggctttgtgcaggcgcgcaaacagctaaaagaacaaggacagtcacttggagaagcacatttatacttcggctgccgttcacctcatgaagactatctgtatcaagaagagcttgaaaacgcccaaagcgaaggcatcattacgcttcataccgctttttctcgcatgccaaatcagccgaaaacatacgttcagcacgtaatggaacaagacggcaagaaattgattgaacttcttgatcaaggagcgcacttctatatttgcggagacggaagccaaatggcacctgccgttgaagcaacgcttatgaaaagctatgctgacgttcaccaagtgagtgaagcagacgctcgcttatggctgcagcagctagaagaaaaaggccgatacgcaaaagacgtgtgggctggg

SEQ ID NO: 48 - protein, 1049 aa, synthetic construct
  REGION 1..1049: note = variant of P450 oxidase from Bacillus megaterium
MTIKEMPQPKTFGELKNLPLLNTDKPVQALMRIADELGEIFKFEAPGSVTRYLSSQRLIKEACDESRFDKNLSQSLKFARDFAGDGLATSWTHEPNWKKAHNILVPSFSQRAMKRYHAMMVDIAVQLVQKWERLNADEHIEVSEDMTRLTLDTIGLCGFNYRFNSFYRDQPHPFIVSMVRALDEVMNKLQRANPDDPAYDENKRQCQEDIKVMNDYVDKIIADRKARGEQSHDLLTQMLNGKDPETGEPLDDGNIRYQIITFLIAGHETTSGLLSFALYFLVKNPHVLQKVAEEAARVLVDPVPSYKQVKQLKYVGMVLNEALRLWPTAPAFSLYAKEDTVLGGEYPLTKGDEVMVLIPQLHRDKTIWGDDVEEFRPERFENPSAIPQHAFKPFGNGQRACIGQQFALHEATLVLGMMLKHFDFEDHTNYELVIKETLTLKPEGFVVKAKSKGIPLGGIPSPSTEQSAKKVRKKAENAHNTPLLVLYGSNAGTAEGTARDLADIAMSKGFAPQVATLDSHAGNLPREGAVLIVTASYNGHPPDNAKQFVDWLDQASADEVKGVRYSVFGCGDKNWAATYQKVPAFIDETLAAKGAENIADRGEADASDDFEGTYEEWRDHMWSDVAAYFNLDIENSEDNKSTLSLQFVDSAADMPLAKMHGAFSTNVVASKELQQPGSARSTRHLEIELPKEASYQEGDHLGVIPRNYEGIVNRVTARFGLSASQLIRLEAEEEKLAHLPLAKTVSVEELLQYVELQDPVTRTQLRAMAAKTVCPPHKVELEALLEKQAYKEQVLAKRLTMLELLEKYPACEMKFSEFIALLPSIRPRYYSISSSPRVDEKQASITVSVVSGPAWSGYGEYKGIASNYLAELQEGDTITCFISTPQSEFTLPKDPETPLIMVGPGTGVAPFRGFVQARKQLKEQGQSLGEAHLYFGCRSPHEDYLYQEELENAQSEGIITLHTAFSRMPNQPKTYVQHVMEQDGKKLIELLDQGAHFYICGDGSQMAPAVEATLMKSYADVHQVSEADARLWLQQLEEKGRYAKDVWAG

SEQ ID NO: 49 - DNA, 3147 bp, synthetic construct
  misc_feature 1..3147: note = variant of P450 oxidase from Bacillus megaterium
  source 1..3147: mol_type = other DNA
atgacaattaaggaaatgcctcagcctaagacgtttggagaacttaaaaatttaccgttattaaacacagataaaccggttcaagctttgatgcgtattgcggatgaattaggagaaatctttaaattcgaggcgcctggtagcgtaacgcgctatttatcaagtcagcgtctaattaaagaagcatgcgatgaatcacgctttgataaaaacttaagtcaaagccttaaatttgcacgtgattttgctggagacgggttagccacaagctggacgcatgaaccgaattggaaaaaagcgcataatatcttagttccaagctttagtcagcgtgcaatgaaacgttatcatgcgatgatggtcgatatcgccgtgcagcttgttcaaaagtgggagcgtctaaatgcagatgagcatattgaagtatcggaagacatgacacgtttaacgcttgatacaattggtctttgcggctttaactatcgctttaacagcttttaccgagatcagcctcatccatttattgtgagtatggtccgtgcactggatgaagtaatgaacaagctgcagcgagcaaatccagacgacccagcttatgatgaaaacaagcgccagtgtcaagaagatatcaaggtgatgaacgactatgtagataaaattattgcagatcgcaaagcaaggggtgaacaaagtcatgatttattaacgcagatgctaaacggaaaagatccagaaacgggtgagccgcttgatgacgggaacattcgttatcaaattattacattcttaattgcgggacacgaaacaacaagtggtcttttatcatttgcgctgtatttcttagtgaaaaatccacatgtattacaaaaagtagcagaagaagcagcacgagttctagtagatcctgttccaagctacaaacaagtcaaacagcttaaatatgtcggcatggtcttaaacgaagcgctgcgcttatggccaactgctcctgcgttttccctatatgcaaaagaagatacggtgcttggaggagaatatcctttaacgaaaggcgacgaagtaatggttctgattcctcagcttcaccgtgataaaacaatttggggagacgatgtggaggagttccgtccagagcgttttgaaaatccaagtgcgattccgcagcatgcgtttaaaccgtttggaaacggtcagcgtgcgtgtatcggtcagcagttcgctcttcatgaagcaacgctggtacttggtatgatgctaaaacactttgactttgaagatcatacaaactacgagctcgttattaaagaaactttaacgttaaaacctgaaggctttgtggtaaaagcaaaatcgaaaggcattccgcttggcctgattccttcacctagcactgaacagtctgctaaaaaagtacgcaaaaaggcagaaaacgctcataatacgccgctgcttgtgctatacggttcaaatgcgggaacagctgaaggaacggcgcgtgatttagcagatattgcaatgagcaaaggatttgcaccgcaggtcgcaacgcttgattcacacgccggaaatcttccgcgcgaaggagctgtattaattgtaacggcgtcttataacggtcatccgcctgataacgcaaagcaatttgtcgactggttagaccaagcgtctgctgatgaagtaaaaggcgttcgctactccgtatttggatgcggcgataaaaattgggctgcgacgtatcaaaaagtgcctgcttttatcgatgaaacgcttgccgctaaaggggcagaaaacatcgctgaccgcggtgaagcagatgcaagcgacgactttgaaggcacatatgaagaatggcgtgatcatatgtggagtgacgtagcagcctactttaacctcgacattgaaaacagtgaagataataaatctactctttcacttcaatttgtcgacagcgccgcggatatgccgcttgcgaaaatgcacggtgcgttttcaacgaacgtcgtagcaagcaaagaacttcaacagccaggcagtgcacgaagcacgcgacatcttgaaattgaacttccaaaagaagcttcttatcaagaaggagatcatttaggtgttattcctcgcaactatgaaggaatagtaaaccgtgtaacagcaaggttcggcctaagcgcatcacagctgatccgtctggaagcagaagaagaaaaattagctcatttgccactcgctaaaacagtatccgtagaagagcttctgcaatacgtggagcttcaagatcctgttacgcgcacgcagcttcgcgcaatggctgctaaaacggtctgcccgccgcataaagtagagcttgaagccttgcttgaaaagcaagcctacaaagaacaagtgctggcaaaacgtttaacaatgcttgaactgcttgaaaaatacccggcgtgtgaaatgaaattcagcgaatttatcgcccttctgccaagcatacgcccgcgctattactcgatttcttcatcacctcgtgtcgatgaaaaacaagcaagcatcacggtcagcgttgtctcaggaccggcgtggagcggatatggagaatataaaggaattgcgtcgaactatcttgccgagctgcaagaaggagatacgattacgtgctttatttccacaccgcagtcagaatttacgctgccaaaagaccctgagacgccgcttatcatggtcggaccgggaacaggcgtcgcgccgtttagaggctttgtgcaggcgcgcaaacagctaaaagaacaaggacagtcacttggagaagcacatttatacttcggctgccgttcacctcatgaagactatctgtatcaagaagagcttgaaaacgcccaaagcgaaggcatcattacgcttcataccgctttttctcgcatgccaaatcagccgaaaacatacgttcagcacgtaatggaacaagacggcaagaaattgattgaacttcttgatcaaggagcgcacttctatatttgcggagacggaagccaaatggcacctgccgttgaagcaacgcttatgaaaagctatgctgacgttcaccaagtgagtgaagcagacgctcgcttatggctgcagcagctagaagaaaaaggccgatacgcaaaagacgtgtgggctggg

SEQ ID NO: 50 - protein, 1049 aa, synthetic construct
  REGION 1..1049: note = variant of P450 oxidase from Bacillus megaterium
MTIKEMPQPKTFGELKNLPLLNTDKPVQALMRIADELGEIFKFEAPGSVTRYLSSQRLIKEACDESRFDKNLSQSLKFARDFAGDGLATSWTHEPNWKKAHNILVPSFSQRAMKRYHAMMVDIAVQLVQKWERLNADEHIEVSEDMTRLTLDTIGLCGFNYRFNSFYRDQPHPFIVSMVRALDEVMNKLQRANPDDPAYDENKRQCQEDIKVMNDYVDKIIADRKARGEQSHDLLTQMLNGKDPETGEPLDDGNIRYQIITFLIAGHETTSGLLSFALYFLVKNPHVLQKVAEEAARVLVDPVPSYKQVKQLKYVGMVLNEALRLWPTAPAFSLYAKEDTVLGGEYPLTKGDEVMVLIPQLHRDKTIWGDDVEEFRPERFENPSAIPQHAFKPFGNGQRACIGQQFALHEATLVLGMMLKHFDFEDHTNYELVIKETLTLKPEGFVVKAKSKGIPLGLIPSPSTEQSAKKVRKKAENAHNTPLLVLYGSNAGTAEGTARDLADIAMSKGFAPQVATLDSHAGNLPREGAVLIVTASYNGHPPDNAKQFVDWLDQASADEVKGVRYSVFGCGDKNWAATYQKVPAFIDETLAAKGAENIADRGEADASDDFEGTYEEWRDHMWSDVAAYFNLDIENSEDNKSTLSLQFVDSAADMPLAKMHGAFSTNVVASKELQQPGSARSTRHLEIELPKEASYQEGDHLGVIPRNYEGIVNRVTARFGLSASQLIRLEAEEEKLAHLPLAKTVSVEELLQYVELQDPVTRTQLRAMAAKTVCPPHKVELEALLEKQAYKEQVLAKRLTMLELLEKYPACEMKFSEFIALLPSIRPRYYSISSSPRVDEKQASITVSVVSGPAWSGYGEYKGIASNYLAELQEGDTITCFISTPQSEFTLPKDPETPLIMVGPGTGVAPFRGFVQARKQLKEQGQSLGEAHLYFGCRSPHEDYLYQEELENAQSEGIITLHTAFSRMPNQPKTYVQHVMEQDGKKLIELLDQGAHFYICGDGSQMAPAVEATLMKSYADVHQVSEADARLWLQQLEEKGRYAKDVWAG

SEQ ID NO: 51 - DNA, 3147 bp, synthetic construct
  misc_feature 1..3147: note = variant of P450 oxidase from Bacillus megaterium
  source 1..3147: mol_type = other DNA
atgacaattaaggaaatgcctcagcctaagacgtttggagaacttaaaaatttaccgttattaaacacagataaaccggttcaagctttgatgcgtattgcggatgaattaggagaaatctttaaattcgaggcgcctggtagcgtaacgcgctatttatcaagtcagcgtctaattaaagaagcatgcgatgaatcacgctttgataaaaacttaagtcaaagccttaaatttgcacgtgattttgctggagacgggttagccacaagctggacgcatgaaccgaattggaaaaaagcgcataatatcttagttccaagctttagtcagcgtgcaatgaaacgttatcatgcgatgatggtcgatatcgccgtgcagcttgttcaaaagtgggagcgtctaaatgcagatgagcatattgaagtatcggaagacatgacacgtttaacgcttgatacaattggtctttgcggctttaactatcgctttaacagcttttaccgagatcagcctcatccatttattgtgagtatggtccgtgcactggatgaagtaatgaacaagctgcagcgagcaaatccagacgacccagcttatgatgaaaacaagcgccagtgtcaagaagatatcaaggtgatgaacgactatgtagataaaattattgcagatcgcaaagcaaggggtgaacaaagtcatgatttattaacgcagatgctaaacggaaaagatccagaaacgggtgagccgcttgatgacgggaacattcgttatcaaattattacattcttaattgcgggacacgaaacaacaagtggtcttttatcatttgcgctgtatttcttagtgaaaaatccacatgtattacaaaaagtagcagaagaagcagcacgagttctagtagatcctgttccaagctacaaacaagtcaaacagcttaaatatgtcggcatggtcttaaacgaagcgctgcgcttatggccaactgctcctgcgttttccctatatgcaaaagaagatacggtgcttggaggagaatatcctttaacgaaaggcgacgaagtaatggttctgattcctcagcttcaccgtgataaaacaatttggggagacgatgtggagagtttccgtccagagcgttttgaaaatccaagtgcgattccgcagcatgcgtttaaaccgtttggaaacggtcagcgtgcgtgtatcggtcagcagttcgctcttcatgaagcaacgctggtacttggtatgatgctaaaacactttgactttgaagatcatacaaactacgagctcgttattaaagaaactttaacgttaaaacctgaaggctttgtggtaaaagcaaaatcgaaaggcattccgcttggcgggattccttcacctagcactgaacagtctgctaaaaaagtacgcaaaaaggcagaaaacgctcataatacgccgctgcttgtgctatacggttcaaatgcgggaacagctgaaggaacggcgcgtgatttagcagatattgcaatgagcaaaggatttgcaccgcaggtcgcaacgcttgattcacacgccggaaatcttccgcgcgaaggagctgtattaattgtaacggcgtcttataacggtcatccgcctgataacgcaaagcaatttgtcgactggttagaccaagcgtctgctgatgaagtaaaaggcgttcgctactccgtatttggatgcggcgataaaaattgggctgcgacgtatcaaaaagtgcctgcttttatcgatgaaacgcttgccgctaaaggggcagaaaacatcgctgaccgcggtgaagcagatgcaagcgacgactttgaaggcacatatgaagaatggcgtgatcatatgtggagtgacgtagcagcctactttaacctcgacattgaaaacagtgaagataataaatctactctttcacttcaatttgtcgacagcgccgcggatatgccgcttgcgaaaatgcacggtgcgttttcaacgaacgtcgtagcaagcaaagaacttcaacagccaggcagtgcacgaagcacgcgacatcttgaaattgaacttccaaaagaagcttcttatcaagaaggagatcatttaggtgttattcctcgcaactatgaaggaatagtaaaccgtgtaacagcaaggttcggcctaagcgcatcacagcagatccgtctggaagcagaagaagaaaaattagctcatttgccactcgctaaaacagtatccgtagaagagcttctgcaatacgtggagcttcaagatcctgttacgcgcacgcagcttcgcgcaatggctgctaaaacggtctgcccgccgcataaagtagagcttgaagccttgcttgaaaagcaagcctacaaagaacaagtgctggcaaaacgtttaacaatgcttgaactgcttgaaaaatacccggcgtgtgaaatgaaattcagcgaatttatcgcccttctgccaagcatacgcccgcgctattactcgatttcttcatcacctcgtgtcgatgaaaaacaagcaagcatcacggtcagcgttgtctcaggaccggcgtggagcggatatggagaatataaaggaattgcgtcgaactatcttgccgagctgcaagaaggagatacgattacgtgctttatttccacaccgcagtcagaatttacgctgccaaaagaccctgaaacgccgcttatcatggtcggaccgggaacaggcgtcgcgccgtttagaggctttgtgcaggcgcgcaaacagctaaaagaacaaggacagtcacttggagaagcacatttatacttcggctgccgttcacctcatgaagactatctgtatcaagaagagcttgaaaacgcccaaagcgaaggcatcattacgcttcataccgctttttctcgcatgccaaatcagccgaaaacatacgttcagcacgtaatggaacaagacggcaagaaattgattgaacttcttgatcaaggagcgcacttctatatttgcggagacggaagccaaatggcacctgccgttgaagcaacgcttatgaaaagctatgctgacgttcaccaagtgagtgaagcagacgctcgcttatggctgcagcagctagaagaaaaaggccgatacgcaaaagacgtgtgggctggg

SEQ ID NO: 52 - protein, 1049 aa, synthetic construct
  REGION 1..1049: note = variant of P450 oxidase from Bacillus megaterium
MTIKEMPQPKTFGELKNLPLLNTDKPVQALMRIADELGEIFKFEAPGSVTRYLSSQRLIKEACDESRFDKNLSQSLKFARDFAGDGLATSWTHEPNWKKAHNILVPSFSQRAMKRYHAMMVDIAVQLVQKWERLNADEHIEVSEDMTRLTLDTIGLCGFNYRFNSFYRDQPHPFIVSMVRALDEVMNKLQRANPDDPAYDENKRQCQEDIKVMNDYVDKIIADRKARGEQSHDLLTQMLNGKDPETGEPLDDGNIRYQIITFLIAGHETTSGLLSFALYFLVKNPHVLQKVAEEAARVLVDPVPSYKQVKQLKYVGMVLNEALRLWPTAPAFSLYAKEDTVLGGEYPLTKGDEVMVLIPQLHRDKTIWGDDVESFRPERFENPSAIPQHAFKPFGNGQRACIGQQFALHEATLVLGMMLKHFDFEDHTNYELVIKETLTLKPEGFVVKAKSKGIPLGGIPSPSTEQSAKKVRKKAENAHNTPLLVLYGSNAGTAEGTARDLADIAMSKGFAPQVATLDSHAGNLPREGAVLIVTASYNGHPPDNAKQFVDWLDQASADEVKGVRYSVFGCGDKNWAATYQKVPAFIDETLAAKGAENIADRGEADASDDFEGTYEEWRDHMWSDVAAYFNLDIENSEDNKSTLSLQFVDSAADMPLAKMHGAFSTNVVASKELQQPGSARSTRHLEIELPKEASYQEGDHLGVIPRNYEGIVNRVTARFGLSASQQIRLEAEEEKLAHLPLAKTVSVEELLQYVELQDPVTRTQLRAMAAKTVCPPHKVELEALLEKQAYKEQVLAKRLTMLELLEKYPACEMKFSEFIALLPSIRPRYYSISSSPRVDEKQASITVSVVSGPAWSGYGEYKGIASNYLAELQEGDTITCFISTPQSEFTLPKDPETPLIMVGPGTGVAPFRGFVQARKQLKEQGQSLGEAHLYFGCRSPHEDYLYQEELENAQSEGIITLHTAFSRMPNQPKTYVQHVMEQDGKKLIELLDQGAHFYICGDGSQMAPAVEATLMKSYADVHQVSEADARLWLQQLEEKGRYAKDVWAG

SEQ ID NO: 53 - DNA, 3147 bp, synthetic construct
  misc_feature 1..3147: note = variant of P450 oxidase from Bacillus megaterium
  source 1..3147: mol_type = other DNA
atgacaattaaggaaatgcctcagcctaagacgtttggagaacttaaaaatttaccgttattaaacacagataaaccggttcaagctttgatgcgtattgcggatgaattaggagaaatctttaaattcgaggcgcctggtagcgtaacgcgctatttatcaagtcagcgtctaattaaagaagcatgcgatgaatcacgctttgataaaaacttaagtcaaagccttaaatttgcacgtgattttgctggagacgggttagccacaagctggacgcatgaaccgaattggaaaaaagcgcataatatcttagttccaagctttagtcagcgtgcaatgaaacgttatcatgcgatgatggtcgatatcgccgtgcagcttgttcaaaagtgggagcgtctaaatgcagatgagcatattgaagtatcggaagacatgacacgtttaacgcttgatacaattggtctttgcggctttaactatcgctttaacagcttttaccgagatcagcctcatccatttattgtgagtatggtccgtgcactggatgaagtaatgaacaagctgcagcgagcaaatccagacgacccagcttatgatgaaaacaagcgccagtgtcaagaagatatcaaggtgatgaacgactatgtagataaaattattgcagatcgcaaagcaaggggtgaacaaagtcatgatttattaacgcagatgctaaacggaaaagatccagaaacgggtgagccgcttgatgacgggaacattcgttatcaaattattacattcttaattgcgggacacgaaacaacaagtggtcttttatcatttgcgctgtatttcttagtgaaaaatccacatgtattacaaaaagtagcagaagaagcagcacgagttctagtagatcctgttccaagctacaaacaagtcaaacagcttaaatatgtcggcatggtcttaaacgaagcgctgcgcttatggccaactgctcctgcgttttccctatatgcaaaagaagatacggtgcttggaggagaatatcctttaacgaaaggcgacgaagtaatggttctgattcctcagcttcaccgtgataaaacaatttggggagacgatgtggaggagttccgtccagagcgttttgaaaatccaagtgcgattccgcagcatgcgtttaaaccgtttggaaacggtcagcgtgcgtgtatcggtcagcagttcgctcttcatgaagcaacgctggtacttggtatgatgctaaaacactttgactttgaagatcatacaaactacgagctcgttattaaagaaactttaacgttaaaacctgaaggctttgtggtaaaagcaaaatcgaaaggcattccgcttggcctgattccttcacctagcactgaacagtctgctaaaaaagtacgcaaaaaggcagaaaacgctcataatacgccgctgcttgtgctatacggttcaaatgcgggaacagctgaaggaacggcgcgtgatttagcagatattgcaatgagcaaaggatttgcaccgcaggtcgcaacgcttgattcacacgccggaaatcttccgcgcgaaggagctgtattaattgtaacggcgtcttataacggtcatccgcctgataacgcaaagcaatttgtcgactggttagaccaagcgtctgctgatgaagtaaaaggcgttcgctactccgtatttggatgcggcgataaaaattgggctgcgacgtatcaaaaagtgcctgcttttatcgatgaaacgcttgccgctaaaggggcagaaaacatcgctgaccgcggtgaagcagatgcaagcgacgactttgaaggcacatatgaagaatggcgtgatcatatgtggagtgacgtagcagcctactttaacctcgacattgaaaacagtgaagataataaatctactctttcacttcaatttgtcgacagcgccgcggatatgccgcttgcgaaaatgcacggtgcgttttcaacgaacgtcgtagcaagcaaagaacttcaacagccaggcagtgcacgaagcacgcgacatcttgaaattgaacttccaaaagaagcttcttatcaagaaggagatcatttaggtgttattcctcgcaactatgaaggaatagtaaaccgtgtaacagcaaggttcggcctaagcgcatcacagcagatccgtctggaagcagaagaagaaaaattagctcatttgccactcgctaaaacagtatccgtagaagagcttctgcaatacgtggagcttcaagatcctgttacgcgcacgcagcttcgcgcaatggctgctaaaacggtctgcccgccgcataaagtagagcttgaagccttgcttgaaaagcaagcctacaaagaacaagtgctggcaaaacgtttaacaatgcttgaactgcttgaaaaatacccggcgtgtgaaatgaaattcagcgaatttatcgcccttctgccaagcatacgcccgcgctattactcgatttcttcatcacctcgtgtcgatgaaaaacaagcaagcatcacggtcagcgttgtctcaggaccggcgtggagcggatatggagaatataaaggaattgcgtcgaactatcttgccgagctgcaagaaggagatacgattacgtgctttatttccacaccgcagtcagaatttacgctgccaaaagaccctgagacgccgcttatcatggtcggaccgggaacaggcgtcgcgccgtttagaggctttgtgcaggcgcgcaaacagctaaaagaacaaggacagtcacttggagaagcacatttatacttcggctgccgttcacctcatgaagactatctgtatcaagaagagcttgaaaacgcccaaagcgaaggcatcattacgcttcataccgctttttctcgcatgccaaatcagccgaaaacatacgttcagcacgtaatggaacaagacggcaagaaattgattgaacttcttgatcaaggagcgcacttctatatttgcggagacggaagccaaatggcacctgccgttgaagcaacgcttatgaaaagctatgctgacgttcaccaagtgagtgaagcagacgctcgcttatggctgcagcagctagaagaaaaaggccgatacgcaaaagacgtgtgggctggg

SEQ ID NO: 54 - protein, 1049 aa, synthetic construct
  REGION 1..1049: note = variant of P450 oxidase from Bacillus megaterium
MTIKEMPQPKTFGELKNLPLLNTDKPVQALMRIADELGEIFKFEAPGSVTRYLSSQRLIKEACDESRFDKNLSQSLKFARDFAGDGLATSWTHEPNWKKAHNILVPSFSQRAMKRYHAMMVDIAVQLVQKWERLNADEHIEVSEDMTRLTLDTIGLCGFNYRFNSFYRDQPHPFIVSMVRALDEVMNKLQRANPDDPAYDENKRQCQEDIKVMNDYVDKIIADRKARGEQSHDLLTQMLNGKDPETGEPLDDGNIRYQIITFLIAGHETTSGLLSFALYFLVKNPHVLQKVAEEAARVLVDPVPSYKQVKQLKYVGMVLNEALRLWPTAPAFSLYAKEDTVLGGEYPLTKGDEVMVLIPQLHRDKTIWGDDVEEFRPERFENPSAIPQHAFKPFGNGQRACIGQQFALHEATLVLGMMLKHFDFEDHTNYELVIKETLTLKPEGFVVKAKSKGIPLGLIPSPSTEQSAKKVRKKAENAHNTPLLVLYGSNAGTAEGTARDLADIAMSKGFAPQVATLDSHAGNLPREGAVLIVTASYNGHPPDNAKQFVDWLDQASADEVKGVRYSVFGCGDKNWAATYQKVPAFIDETLAAKGAENIADRGEADASDDFEGTYEEWRDHMWSDVAAYFNLDIENSEDNKSTLSLQFVDSAADMPLAKMHGAFSTNVVASKELQQPGSARSTRHLEIELPKEASYQEGDHLGVIPRNYEGIVNRVTARFGLSASQQIRLEAEEEKLAHLPLAKTVSVEELLQYVELQDPVTRTQLRAMAAKTVCPPHKVELEALLEKQAYKEQVLAKRLTMLELLEKYPACEMKFSEFIALLPSIRPRYYSISSSPRVDEKQASITVSVVSGPAWSGYGEYKGIASNYLAELQEGDTITCFISTPQSEFTLPKDPETPLIMVGPGTGVAPFRGFVQARKQLKEQGQSLGEAHLYFGCRSPHEDYLYQEELENAQSEGIITLHTAFSRMPNQPKTYVQHVMEQDGKKLIELLDQGAHFYICGDGSQMAPAVEATLMKSYADVHQVSEADARLWLQQLEEKGRYAKDVWAG

SEQ ID NO: 55 - DNA, 3147 bp, synthetic construct
  misc_feature 1..3147: note = variant of P450 oxidase from Bacillus megaterium
  source 1..3147: mol_type = other DNA
atgacaattaaggaaatgcctcagcctaagacgtttggagaacttaaaaatttaccgttattaaacacagataaaccggttcaagctttgatgcgtattgcggatgaattaggagaaatctttaaattcgaggcgcctggtagcgtaacgcgctatttatcaagtcagcgtctaattaaagaagcatgcgatgaatcacgctttgataaaaacttaagtcaaagccttaaatttgcacgtgattttgctggagacgggttagccacaagctggacgcatgaaccgaattggaaaaaagcgcataatatcttagttccaagctttagtcagcgtgcaatgaaacgttatcatgcgatgatggtcgatatcgccgtgcagcttgttcaaaagtgggagcgtctaaatgcagatgagcatattgaagtatcggaagacatgacacgtttaacgcttgatacaattggtctttgcggctttaactatcgctttaacagcttttaccgagatcagcctcatccatttattgtgagtatggtccgtgcactggatgaagtaatgaacaagctgcagcgagcaaatccagacgacccagcttatgatgaaaacaagcgccagtgtcaagaagatatcaaggtgatgaacgactatgtagataaaattattgcagatcgcaaagcaaggggtgaacaaagtcatgatttattaacgcagatgctaaacggaaaagatccagaaacgggtgagccgcttgatgacgggaacattcgttatcaaattattacattcttaattgcgggacacgaaacaacaagtggtcttttatcatttgcgctgtatttcttagtgaaaaatccacatgtattacaaaaagtagcagaagaagcagcacgagttctagtagatcctgttccaagctacaaacaagtcaaacagcttaaatatgtcggcatggtcttaaacgaagcgctgcgcttatggccaactgctcctgcgttttccctatatgcaaaagaagatacggtgcttggaggagaatatcctttaacgaaaggcgacgaagtaatggttctgattcctcagcttcaccgtgataaaacaatttggggagacgatgtggaggagttccgtccagagcgttttgaaaatccaagtgcgattccgcagcatgcgtttaaaccgtttggaaacggtcagcgtgcgtgtatcggtcagcagttcgctcttcatgaagcaacgctggtacttggtatgatgctaaaacactttgactttgaagatcatacaaactacgagctcgttattaaagaaactttaacgttaaaacctgaaggctttgtggtaaaagcaaaatcgaaaggcattccgcttggcgggattccttcacctagcactgaacagtctgctaaaaaagtacgcaaaaaggcagaaaacgctcataatacgccgctgcttgtgctatacggttcaaatgcgggaacagctgaaggaacggcgcgtgatttagcagatattgcaatgagcaaaggatttgcaccgcaggtcgcaacgcttgattcacacgccggaaatcttccgcgcgaaggagctgtattaattgtaacggcgtcttataacggtcatccgcctgataacgcaaagcaatttgtcgactggttagaccaagcgtctgctgatgaagtaaaaggcgttcgctactccgtatttggatgcggcgataaaaattgggctgcgacgtatcaaaaagtgcctgcttttatcgatgaaacgcttgccgctaaaggggcagaaaacatcgctgaccgcggtgaagcagatgcaagcgacgactttgaaggcacatatgaagaatggcgtgatcatatgtggagtgacgtagcagcctactttaacctcgacattgaaaacagtgaagataataaatctactctttcacttcaatttgtcgacagcgccgcggatatgccgcttgcgaaaatgcacggtgcgttttcaacgaacgtcgtagcaagcaaagaacttcaacagccaggcagtgcacgaagcacgcgacatcttgaaattgaacttccaaaagaagcttcttatcaagaaggagatcatttaggtgttattcctcgcaactatgaaggaatagtaaaccgtgtaacagcaaggttcggcctaagcgcatcacagcagatccgtctggaagcagaagaagaaaaattagctcatttgccactcgctaaaacagtatccgtagaagagcttctgcaatacgtggagcttcaagatcctgttacgcgcacgcagcttcgcgcaatggctgctaaaacggtctgcccgccgcataaagtagagcttgaagccttgcttgaaaagcaagcctacaaagaacaagtgctggcaaaacgtttaacaatgcttgaactgcttgaaaaatacccggcgtgtgaaatgaaattcagcgaatttatcgcccttctgccaagcatacgcccgcgctattactcgatttcttcatcacctcgtgtcgatgaaaaacaagcaagcatcacggtcagcgttgtctcaggaccggcgtggagcggatatggagaatataaaggaattgcgtcgaactatcttgccgagctgcaagaaggagatacgattacgtgctttatttccacaccgcagtcagaatttacgctgccaaaagaccctgaaacgccgcttatcatggtcggaccgggaacaggcgtcgcgccgtttagaggctttgtgcaggcgcgcaaacagctaaaagaacaaggacagtcacttggagaagcacatttatacttcggctgccgttcacctcatgaagactatctgtatcaagaagagcttgaaaacgcccaaagcgaaggcatcattacgcttcataccgctttttctcgcatgccaaatcagccgaaaacatacgttcagcacgtaatggaacaagacggcaagaaattgattgaacttcttgatcaaggagcgcacttctatatttgcggagacggaagccaaatggcacctgccgttgaagcaacgcttatgaaaagctatgctgacgttcaccaagtgagtgaagcagacgctcgcttatggctgcagcagctagaagaaaaaggccgatacgcaaaagacgtgtgggctggg

SEQ ID NO: 56 - protein, 1049 aa, synthetic construct
  REGION 1..1049: note = variant of P450 oxidase from Bacillus megaterium
MTIKEMPQPKTFGELKNLPLLNTDKPVQALMRIADELGEIFKFEAPGSVTRYLSSQRLIKEACDESRFDKNLSQSLKFARDFAGDGLATSWTHEPNWKKAHNILVPSFSQRAMKRYHAMMVDIAVQLVQKWERLNADEHIEVSEDMTRLTLDTIGLCGFNYRFNSFYRDQPHPFIVSMVRALDEVMNKLQRANPDDPAYDENKRQCQEDIKVMNDYVDKIIADRKARGEQSHDLLTQMLNGKDPETGEPLDDGNIRYQIITFLIAGHETTSGLLSFALYFLVKNPHVLQKVAEEAARVLVDPVPSYKQVKQLKYVGMVLNEALRLWPTAPAFSLYAKEDTVLGGEYPLTKGDEVMVLIPQLHRDKTIWGDDVEEFRPERFENPSAIPQHAFKPFGNGQRACIGQQFALHEATLVLGMMLKHFDFEDHTNYELVIKETLTLKPEGFVVKAKSKGIPLGGIPSPSTEQSAKKVRKKAENAHNTPLLVLYGSNAGTAEGTARDLADIAMSKGFAPQVATLDSHAGNLPREGAVLIVTASYNGHPPDNAKQFVDWLDQASADEVKGVRYSVFGCGDKNWAATYQKVPAFIDETLAAKGAENIADRGEADASDDFEGTYEEWRDHMWSDVAAYFNLDIENSEDNKSTLSLQFVDSAADMPLAKMHGAFSTNVVASKELQQPGSARSTRHLEIELPKEASYQEGDHLGVIPRNYEGIVNRVTARFGLSASQQIRLEAEEEKLAHLPLAKTVSVEELLQYVELQDPVTRTQLRAMAAKTVCPPHKVELEALLEKQAYKEQVLAKRLTMLELLEKYPACEMKFSEFIALLPSIRPRYYSISSSPRVDEKQASITVSVVSGPAWSGYGEYKGIASNYLAELQEGDTITCFISTPQSEFTLPKDPETPLIMVGPGTGVAPFRGFVQARKQLKEQGQSLGEAHLYFGCRSPHEDYLYQEELENAQSEGIITLHTAFSRMPNQPKTYVQHVMEQDGKKLIELLDQGAHFYICGDGSQMAPAVEATLMKSYADVHQVSEADARLWLQQLEEKGRYAKDVWAG

SEQ ID NO: 57 - DNA, 3147 bp, synthetic construct
  misc_feature 1..3147: note = variant of P450 oxidase from Bacillus megaterium
  source 1..3147: mol_type = other DNA
atgacaattaaggaaatgcctcagcctaagacgtttggagaacttaaaaatttaccgttattaaacacagataaaccggttcaagctttgatgcgtattgcggatgaattaggagaaatctttaaattcgaggcgcctggtagcgtaacgcgctatttatcaagtcagcgtctaattaaagaagcatgcgatgaatcacgctttgataaaaacttaagtcaagcccttaaatttgcacgtgattttgctggagacgggttagccacaagctggacgcatgaaccgaattggaaaaaagcgcataatatcttagttccaagctttagtcagcgtgcaatgaaacgttatcatgcgatgatggtcgatatcgccgtgcagcttgttcaaaagtgggagcgtctaaatgcagatgagcatattgaagtatcggaagacatgacacgtttaacgcttgatacaattggtctttgcggctttaactatcgctttaacagcttttaccgagatcagcctcatccatttattgtgagtatggtccgtgcactggatgaagtaatgaacaagctgcagcgagcaaatccagacgacccagcttatgatgaaaacaagcgccagtgtcaagaagatatcaaggtgatgaacgactatgtagataaaattattgcagatcgcaaagcaaggggtgaacaaagtcatgatttattaacgcagatgctaaacggaaaagatccagaaacgggtgagccgcttgatgacgggaacattcgttatcaaattattacattcttaattgcgggacacgaaacaacaagtggtcttttatcatttgcgctgtatttcttagtgaaaaatccacatgtattacaaaaagtagcagaagaagcagcacgagttctagtagatcctgttccaagctacaaacaagtcaaacagcttaaatatgtcggcatggtcttaaacgaagcgctgcgcttatggccaactgctcctgcgttttccctatatgcaaaagaagatacggtgcttggaggagaatatcctttaacgaaaggcgacgaagtaatggttctgattcctcagcttcaccgtgataaaacaatttggggagacgatgtggaggagttccgtccagagcgttttgaaaatccaagtgcgattccgcagcatgcgtttaaaccgtttggaaacggtcagcgtgcgtgtatcggtcagcagttcgctcttcatgaagcaacgctggtacttggtatgatgctaaaacactttgactttgaagatcatacaaactacgagctcgttattaaagaaactttaacgttaaaacctgaaggctttgtggtaaaagcaaaatcgaaaggcattccgcttggcggtattccttcacctagcactgaacagtctgctaaaaaagtacgcaaaaaggcagaaaacgctcataatacgccgctgcttgtgctatacggttcaaatgcgggaacagctgaaggaacggcgcgtgatttagcagatattgcaatgagcaaaggatttgcaccgcaggtcgcaacgcttgattcacacgccggaaatcttccgcgcgaaggagctgtattaattgtaacggcgtcttataacggtcatccgcctgataacgcaaagcaatttgtcgactggttagaccaagcgtctgctgatgaagtaaaaggcgttcgctactccgtatttggatgcggcgataaaaattgggctgcgacgtatcaaaaagtgcctgcttttatcgatgaaacgcttgccgctaaaggggcagaaaacatcgctgaccgcggtgaagcagatgcaagcgacgactttgaaggcacatatgaagaatggcgtgatcatatgtggagtgacgtagcagcctactttaacctcgacattgaaaacagtgaagataataaatctactctttcacttcaatttgtcgacagcgccgcggatatgccgcttgcgaaaatgcacggtgcgttttcaacgaacgtcgtagcaagcaaagaacttcaacagccaggcagtgcacgaagcacgcgacatcttgaaattgaacttccaaaagaagcttcttatcaagaaggagatcatttaggtgttattcctcgcaactatgaaggaatagtaaaccgtgtaacagcaaggttcggcctaagcgcatcacagctgatccgtctggaagcagaagaagaaaaattagctcatttgccactcgctaaaacagtatccgtagaagagcttctgcaatacgtggagcttcaagatcctgttacgcgcacgcagcttcgcgcaatggctgctaaaacggtctgcccgccgcataaagtagagcttgaagccttgcttgaaaagcaagcctacaaagaacaagtgctggcaaaacgtttaacaatgcttgaactgcttgaaaaatacccggcgtgtgaaatgaaattcagcgaatttatcgcccttctgccaagcatacgcccgcgctattactcgatttcttcatcacctcgtgtcgatgaaaaacaagcaagcatcacggtcagcgttgtctcaggaccggcgtggagcggatatggagaatataaaggaattgcgtcgaactatcttgccgagctgcaagaaggagatacgattacgtgctttatttccacaccgcagtcagaatttacgctgccaaaagaccctgagacgccgcttatcatggtcggaccgggaacaggcgtcgcgccgtttagaggctttgtgcaggcgcgcaaacagctaaaagaacaaggacagtcacttggagaagcacatttatacttcggctgccgttcacctcatgaagactatctgtatcaagaagagcttgaaaacgcccaaagcgaaggcatcattacgcttcataccgctttttctcgcatgccaaatcagccgaaaacatacgttcagcacgtaatggaacaagacggcaagaaattgattgaacttcttgatcaaggagcgcacttctatatttgcggagacggaagccaaatggcacctgccgttgaagcaacgcttatgaaaagctatgctgacgttcaccaagtgagtgaagcagacgctcgcttatggctgcagcagctagaagaaaaaggccgatacgcaaaagacgtgtgggctggg

SEQ ID NO: 58 - protein, 1049 aa, synthetic construct
  REGION 1..1049: note = variant of P450 oxidase from Bacillus megaterium
MTIKEMPQPKTFGELKNLPLLNTDKPVQALMRIADELGEIFKFEAPGSVTRYLSSQRLIKEACDESRFDKNLSQALKFARDFAGDGLATSWTHEPNWKKAHNILVPSFSQRAMKRYHAMMVDIAVQLVQKWERLNADEHIEVSEDMTRLTLDTIGLCGFNYRFNSFYRDQPHPFIVSMVRALDEVMNKLQRANPDDPAYDENKRQCQEDIKVMNDYVDKIIADRKARGEQSHDLLTQMLNGKDPETGEPLDDGNIRYQIITFLIAGHETTSGLLSFALYFLVKNPHVLQKVAEEAARVLVDPVPSYKQVKQLKYVGMVLNEALRLWPTAPAFSLYAKEDTVLGGEYPLTKGDEVMVLIPQLHRDKTIWGDDVEEFRPERFENPSAIPQHAFKPFGNGQRACIGQQFALHEATLVLGMMLKHFDFEDHTNYELVIKETLTLKPEGFVVKAKSKGIPLGGIPSPSTEQSAKKVRKKAENAHNTPLLVLYGSNAGTAEGTARDLADIAMSKGFAPQVATLDSHAGNLPREGAVLIVTASYNGHPPDNAKQFVDWLDQASADEVKGVRYSVFGCGDKNWAATYQKVPAFIDETLAAKGAENIADRGEADASDDFEGTYEEWRDHMWSDVAAYFNLDIENSEDNKSTLSLQFVDSAADMPLAKMHGAFSTNVVASKELQQPGSARSTRHLEIELPKEASYQEGDHLGVIPRNYEGIVNRVTARFGLSASQLIRLEAEEEKLAHLPLAKTVSVEELLQYVELQDPVTRTQLRAMAAKTVCPPHKVELEALLEKQAYKEQVLAKRLTMLELLEKYPACEMKFSEFIALLPSIRPRYYSISSSPRVDEKQASITVSVVSGPAWSGYGEYKGIASNYLAELQEGDTITCFISTPQSEFTLPKDPETPLIMVGPGTGVAPFRGFVQARKQLKEQGQSLGEAHLYFGCRSPHEDYLYQEELENAQSEGIITLHTAFSRMPNQPKTYVQHVMEQDGKKLIELLDQGAHFYICGDGSQMAPAVEATLMKSYADVHQVSEADARLWLQQLEEKGRYAKDVWAG

SEQ ID NO: 59 - DNA, 3147 bp, synthetic construct
  misc_feature 1..3147: note = variant of P450 oxidase from Bacillus megaterium
  source 1..3147: mol_type = other DNA
atgacaattaaggaaatgcctcagcctaagacgtttggagaacttaaaaatttaccgttattaaacacagataaaccggttcaagctttgatgcgtattgcggatgaattaggagaaatctttaaattcgaggcgcctggtagcgtaacgcgctatttatcaagtcagcgtctaattaaagaagcatgcgatgaatcacgctttgataaaaacttaagtcaaagccttaaatttgcacgtgattttgctggagacgggttagccacaagctggacgcatgaaccgaattggaaaaaagcgcataatatcttagttccaagctttagtcagcgtgcaatgaaacgttatcatgcgatgatggtcgatatcgccgtgcagcttgttcaaaagtgggagcgtctaaatgcagatgagcatattgaagtatcggaagacatgacacgtttaacgcttgatacaattggtctttgcggctttaactatcgctttaacagcttttaccgagatcagcctcatccatttattgtgagtatggtccgtgcactggatgaagtaatgaacaagctgcagcgagcaaatccagacgacccagcttatgatgaaaacaagcgccagtgtcaagaagatatcaaggtgatgaacgactatgtagataaaattattgcagatcgcaaagcaaggggtgaacaaagtcatgatttattaacgcagatgctaaacggaaaagatccagaaacgggtgagccgcttgatgacgggaacattcgttatcaaattattacattcttaattgcgggacacgaaacaacaagtggtcttttatcatttgcgctgtatttcttagtgaaaaatccacatgtattacaaaaagtagcagaagaagcagcacgagttctagtagatcctgttccaagctacaaacaagtcaaacagcttaaatatgtcggcatggtcttaaacgaagcgctgcgcttatggccaactgctcctgcgttttccctatatgcaaaagaagatacggtgcttggaggagaatatcctttaacgaaaggcgacgaagtaatggttctgattcctcagcttcaccgtgataaaacaatttggggagacgatgtggagagtttccgtccagagcgttttgaaaatccaagtgcgattccgcagcatgcgtttaaaccgtttggaaacggtcagcgtgcgtgtatcggtcagcagttcgctcttcatgaagcaacgctggtacttggtatgatgctaaaacactttgactttgaagatcatacaaactacgagctcgttattaaagaaactttaacgttaaaacctgaaggctttgtggtaaaagcaaaatcgaaaggcattccgcttggcctgattccttcacctagcactgaacagtctgctaaaaaagtacgcaaaaaggcagaaaacgctcataatacgccgctgcttgtgctatacggttcaaatgcgggaacagctgaaggaacggcgcgtgatttagcagatattgcaatgagcaaaggatttgcaccgcaggtcgcaacgcttgattcacacgccggaaatcttccgcgcgaaggagctgtattaattgtaacggcgtcttataacggtcatccgcctgataacgcaaagcaatttgtcgactggttagaccaagcgtctgctgatgaagtaaaaggcgttcgctactccgtatttggatgcggcgataaaaattgggctgcgacgtatcaaaaagtgcctgcttttatcgatgaaacgcttgccgctaaaggggcagaaaacatcgctgaccgcggtgaagcagatgcaagcgacgactttgaaggcacatatgaagaatggcgtgatcatatgtggagtgacgtagcagcctactttaacctcgacattgaaaacagtgaagataataaatctactctttcacttcaatttgtcgacagcgccgcggatatgccgcttgcgaaaatgcacggtgcgttttcaacgaacgtcgtagcaagcaaagaacttcaacagccaggcagtgcacgaagcacgcgacatcttgaaattgaacttccaaaagaagcttcttatcaagaaggagatcatttaggtgttattcctcgcaactatgaaggaatagtaaaccgtgtaacagcaaggttcggcctaagcgcatcacagctgatccgtctggaagcagaagaagaaaaattagctcatttgccactcgctaaaacagtatccgtagaagagcttctgcaatacgtggagcttcaagatcctgttacgcgcacgcagcttcgcgcaatggctgctaaaacggtctgcccgccgcataaagtagagcttgaagccttgcttgaaaagcaagcctacaaagaacaagtgctggcaaaacgtttaacaatgcttgaactgcttgaaaaatacccggcgtgtgaaatgaaattcagcgaatttatcgcccttctgccaagcatacgcccgcgctattactcgatttcttcatcacctcgtgtcgatgaaaaacaagcaagcatcacggtcagcgttgtctcaggaccggcgtggagcggatatggagaatataaaggaattgcgtcgaactatcttgccgagctgcaagaaggagatacgattacgtgctttatttccacacctcagtcagaatttacgctgccaaaagaccctgaaacgccgcttatcatggtcggaccgggaacaggcgtcgcgccgtttagaggctttgtgcaggcgcgcaaacagctaaaagaacaaggacagtcacttggagaagcacatttatacttcggctgccgttcacctcatgaagactatctgtatcaagaagagcttgaaaacgcccaaagcgaaggcatcattacgcttcataccgctttttctcgcatgccaaatcagccgaaaacatacgttcagcacgtaatggaacaagacggcaagaaattgattgaacttcttgatcaaggagcgcacttctatatttgcggagacggaagccaaatggcacctgccgttgaagcaacgcttatgaaaagctatgctgacgttcaccaagtgagtgaagcagacgctcgcttatggctgcagcagctagaagaaaaaggccgatacgcaaaagacgtgtgggctggg

SEQ ID NO: 60 - protein, 1049 aa, synthetic construct
  REGION 1..1049: note = variant of P450 oxidase from Bacillus megaterium
MTIKEMPQPKTFGELKNLPLLNTDKPVQALMRIADELGEIFKFEAPGSVTRYLSSQRLIKEACDESRFDKNLSQSLKFARDFAGDGLATSWTHEPNWKKAHNILVPSFSQRAMKRYHAMMVDIAVQLVQKWERLNADEHIEVSEDMTRLTLDTIGLCGFNYRFNSFYRDQPHPFIVSMVRALDEVMNKLQRANPDDPAYDENKRQCQEDIKVMNDYVDKIIADRKARGEQSHDLLTQMLNGKDPETGEPLDDGNIRYQIITFLIAGHETTSGLLSFALYFLVKNPHVLQKVAEEAARVLVDPVPSYKQVKQLKYVGMVLNEALRLWPTAPAFSLYAKEDTVLGGEYPLTKGDEVMVLIPQLHRDKTIWGDDVESFRPERFENPSAIPQHAFKPFGNGQRACIGQQFALHEATLVLGMMLKHFDFEDHTNYELVIKETLTLKPEGFVVKAKSKGIPLGLIPSPSTEQSAKKVRKKAENAHNTPLLVLYGSNAGTAEGTARDLADIAMSKGFAPQVATLDSHAGNLPREGAVLIVTASYNGHPPDNAKQFVDWLDQASADEVKGVRYSVFGCGDKNWAATYQKVPAFIDETLAAKGAENIADRGEADASDDFEGTYEEWRDHMWSDVAAYFNLDIENSEDNKSTLSLQFVDSAADMPLAKMHGAFSTNVVASKELQQPGSARSTRHLEIELPKEASYQEGDHLGVIPRNYEGIVNRVTARFGLSASQLIRLEAEEEKLAHLPLAKTVSVEELLQYVELQDPVTRTQLRAMAAKTVCPPHKVELEALLEKQAYKEQVLAKRLTMLELLEKYPACEMKFSEFIALLPSIRPRYYSISSSPRVDEKQASITVSVVSGPAWSGYGEYKGIASNYLAELQEGDTITCFISTPQSEFTLPKDPETPLIMVGPGTGVAPFRGFVQARKQLKEQGQSLGEAHLYFGCRSPHEDYLYQEELENAQSEGIITLHTAFSRMPNQPKTYVQHVMEQDGKKLIELLDQGAHFYICGDGSQMAPAVEATLMKSYADVHQVSEADARLWLQQLEEKGRYAKDVWAG

SEQ ID NO: 61 - DNA, 3147 bp, synthetic construct
  misc_feature 1..3147: note = variant of P450 oxidase from Bacillus megaterium
  source 1..3147: mol_type = other DNA
atgacaattaaggaaatgcctcagcctaagacgtttggagaacttaaaaatttaccgttattaaacacagataaaccggttcaagctttgatgcgtattgcggatgaattaggagaaatctttaaattcgaggcgcctggtagcgtaacgcgctatttatcaagtcagcgtctaattaaagaagcatgcgatgaatcacgctttgataaaaacttaagtcaagcgcttaaatttgcacgtgattttgctggagacgggttagccacaagctggacgcatgaaccgaattggaaaaaagcgcataatatcttagttccaagctttagtcagcgtgcaatgaaacgttatcatgcgatgatggtcgatatcgccgtgcagcttgttcaaaagtgggagcgtctaaatgcagatgagcatattgaagtatcggaagacatgacacgtttaacgcttgatacaattggtctttgcggctttaactatcgctttaacagcttttaccgagatcagcctcatccatttattgtgagtatggtccgtgcactggatgaagtaatgaacaagctgcagcgagcaaatccagacgacccagcttatgatgaaaacaagcgccagtgtcaagaagatatcaaggtgatgaacgactatgtagataaaattattgcagatcgcaaagcaaggggtgaacaaagtcatgatttattaacgcagatgctaaacggaaaagatccagaaacgggtgagccgcttgatgacgggaacattcgttatcaaattattacattcttaattgcgggacacgaaacaacaagtggtcttttatcatttgcgctgtatttcttagtgaaaaatccacatgtattacaaaaagtagcagaagaagcagcacgagttctagtagatcctgttccaagctacaaacaagtcaaacagcttaaatatgtcggcatggtcttaaacgaagcgctgcgcttatggccaactgctcctgcgttttccctatatgcaaaagaagatacggtgcttggaggagaatatcctttaacgaaaggcgacgaagtaatggttctgattcctcagcttcaccgtgataaaacaatttggggagacgatgtggagagtttccgtccagagcgttttgaaaatccaagtgcgattccgcagcatgcgtttaaaccgtttggaaacggtcagcgtgcgtgtatcggtcagcagttcgctcttcatgaagcaacgctggtacttggtatgatgctaaaacactttgactttgaagatcatacaaactacgagctcgttattaaagaaactttaacgttaaaacctgaaggctttgtggtaaaagcaaaatcgaaaggcattccgcttggcgggattccttcacctagcactgaacagtctgctaaaaaagtacgcaaaaaggcagaaaacgctcataatacgccgctgcttgtgctatacggttcaaatgcgggaacagctgaaggaacggcgcgtgatttagcagatattgcaatgagcaaaggatttgcaccgcaggtcgcaacgcttgattcacacgccggaaatcttccgcgcgaaggagctgtattaattgtaacggcgtcttataacggtcatccgcctgataacgcaaagcaatttgtcgactggttagaccaagcgtctgctgatgaagtaaaaggcgttcgctactccgtatttggatgcggcgataaaaattgggctgcgacgtatcaaaaagtgcctgcttttatcgatgaaacgcttgccgctaaaggggcagaaaacatcgctgaccgcggtgaagcagatgcaagcgacgactttgaaggcacatatgaagaatggcgtgatcatatgtggagtgacgtagcagcctactttaacctcgacattgaaaacagtgaagataataaatctactctttcacttcaatttgtcgacagcgccgcggatatgccgcttgcgaaaatgcacggtgcgttttcaacgaacgtcgtagcaagcaaagaacttcaacagccaggcagtgcacgaagcacgcgacatcttgaaattgaacttccaaaagaagcttcttatcaagaaggagatcatttaggtgttattcctcgcaactatgaaggaatagtaaaccgtgtaacagcaaggttcggcctaagcgcatcacagctgatccgtctggaagcagaagaagaaaaattagctcatttgccactcgctaaaacagtatccgtagaagagcttctgcaatacgtggagcttcaagatcctgttacgcgcacgcagcttcgcgcaatggctgctaaaacggtctgcccgccgcataaagtagagcttgaagccttgcttgaaaagcaagcctacaaagaacaagtgctggcaaaacgtttaacaatgcttgaactgcttgaaaaatacccggcgtgtgaaatgaaattcagcgaatttatcgcccttctgccaagcatacgcccgcgctattactcgatttcttcatcacctcgtgtcgatgaaaaacaagcaagcatcacggtcagcgttgtctcaggaccggcgtggagcggatatggagaatataaaggaattgcgtcgaactatcttgccgagctgcaagaaggagatacgattacgtgctttatttccacaccgcagtcagaatttacgctgccaaaagaccctgagacgccgcttatcatggtcggaccgggaacaggcgtcgcgccgtttagaggctttgtgcaggcgcgcaaacagctaaaagaacaaggacagtcacttggagaagcacatttatacttcggctgccgttcacctcatgaagactatctgtatcaagaagagcttgaaaacgcccaaagcgaaggcatcattacgcttcataccgctttttctcgcatgccaaatcagccgaaaacatacgttcagcacgtaatggaacaagacggcaagaaattgattgaacttcttgatcaaggagcgcacttctatatttgcggagacggaagccaaatggcacctgccgttgaagcaacgcttatgaaaagctatgctgacgttcaccaagtgagtgaagcagacgctcgcttatggctgcagcagctagaagaaaaaggccgatacgcaaaagacgtgtgggctggg

SEQ ID NO: 62 - protein, 1049 aa, synthetic construct
  REGION 1..1049: note = variant of P450 oxidase from Bacillus megaterium
MTIKEMPQPKTFGELKNLPLLNTDKPVQALMRIADELGEIFKFEAPGSVTRYLSSQRLIKEACDESRFDKNLSQALKFARDFAGDGLATSWTHEPNWKKAHNILVPSFSQRAMKRYHAMMVDIAVQLVQKWERLNADEHIEVSEDMTRLTLDTIGLCGFNYRFNSFYRDQPHPFIVSMVRALDEVMNKLQRANPDDPAYDENKRQCQEDIKVMNDYVDKIIADRKARGEQSHDLLTQMLNGKDPETGEPLDDGNIRYQIITFLIAGHETTSGLLSFALYFLVKNPHVLQKVAEEAARVLVDPVPSYKQVKQLKYVGMVLNEALRLWPTAPAFSLYAKEDTVLGGEYPLTKGDEVMVLIPQLHRDKTIWGDDVESFRPERFENPSAIPQHAFKPFGNGQRACIGQQFALHEATLVLGMMLKHFDFEDHTNYELVIKETLTLKPEGFVVKAKSKGIPLGGIPSPSTEQSAKKVRKKAENAHNTPLLVLYGSNAGTAEGTARDLADIAMSKGFAPQVATLDSHAGNLPREGAVLIVTASYNGHPPDNAKQFVDWLDQASADEVKGVRYSVFGCGDKNWAATYQKVPAFIDETLAAKGAENIADRGEADASDDFEGTYEEWRDHMWSDVAAYFNLDIENSEDNKSTLSLQFVDSAADMPLAKMHGAFSTNVVASKELQQPGSARSTRHLEIELPKEASYQEGDHLGVIPRNYEGIVNRVTARFGLSASQLIRLEAEEEKLAHLPLAKTVSVEELLQYVELQDPVTRTQLRAMAAKTVCPPHKVELEALLEKQAYKEQVLAKRLTMLELLEKYPACEMKFSEFIALLPSIRPRYYSISSSPRVDEKQASITVSVVSGPAWSGYGEYKGIASNYLAELQEGDTITCFISTPQSEFTLPKDPETPLIMVGPGTGVAPFRGFVQARKQLKEQGQSLGEAHLYFGCRSPHEDYLYQEELENAQSEGIITLHTAFSRMPNQPKTYVQHVMEQDGKKLIELLDQGAHFYICGDGSQMAPAVEATLMKSYADVHQVSEADARLWLQQLEEKGRYAKDVWAG

SEQ ID NO: 63 - DNA, 3147 bp, synthetic construct
  misc_feature 1..3147: note = variant of P450 oxidase from Bacillus megaterium
  source 1..3147: mol_type = other DNA
atgacaattaaggaaatgcctcagcctaagacgtttggagaacttaaaaatttaccgttattaaacacagataaaccggttcaagctttgatgcgtattgcggatgaattaggagaaatctttaaattcgaggcgcctggtagcgtaacgcgctatttatcaagtcagcgtctaattaaagaagcatgcgatgaatcacgctttgataaaaacttaagtcaagcgcttaaatttgcacgtgattttgctggagacgggttagccacaagctggacgcatgaaccgaattggaaaaaagcgcataatatcttagttccaagctttagtcagcatgcaatgaaacgttatcatgcgatgatggtcgatatcgccgtgcagcttgttcaaaagtgggagcgtctaaatgcagatgagcatattgaagtatcggaagacatgacacgtttaacgcttgatacaattggtctttgcggctttaactatcgctttaacagcttttaccgagatcagcctcatccatttattgtgagtatggtccgtgcactggatgaagtaatgaacaagctgcagcgagcaaatccagacgacccagcttatgatgaaaacaagcgccagtgtcaagaagatatcaaggtgatgaacgactatgtagataaaattattgcagatcgcaaagcaaggggtgaacaaagtcatgatttattaacgcagatgctaaacggaaaagatccagaaacgggtgagccgcttgatgacgggaacattcgttatcaaattattacattcttaattgcgggacacgaaacaacaagtggtcttttatcatttgcgctgtatttcttagtgaaaaatccacatgtattacaaaaagtagcagaagaagcagcacgagttctagtagatcctgttccaagctacaaacaagtcaaacagcttaaatatgtcggcatggtcttaaacgaagcgctgcgcttatggccaactgcgcctgcgttttccctatatgcaaaagaagatacggtgcttggaggagaatatcctttaacgaaaggcgacgaagtaatggttctgattcctcagcttcaccgtgataaaacaatttggggagacgatgtggaggagttccgtccagagcgttttgaaaatccaagtgcgattccgcagcatgcgtttaaaccgtttggaaacggtcagcgtgcgtgtatcggtcagcagttcgctcttcatgaagcaacgctggtacttggtatgatgctaaaacactttgactttgaagatcatacaaactacgagctcgttattaaagaaactttaacgttaaaacctgaaggctttgtggtaaaagcaaaatcgaaaggcattccgcttggcggtattccttcacctagcactgaacagtctgctaaaaaagtacgcaaaaaggcagaaaacgctcataatacgccgctgcttgtgctatacggttcaaatgcgggaacagctgaaggaacggcgcgtgatttagcagatattgcaatgagcaaaggatttgcaccgcaggtcgcaacgcttgattcacacgccggaaatcttccgcgcgaaggagctgtattaattgtaacggcgtcttataacggtcatccgcctgataacgcaaagcaatttgtcgactggttagaccaagcgtctgctgatgaagtaaaaggcgttcgctactccgtatttggatgcggcgataaaaattgggctgcgacgtatcaaaaagtgcctgcttttatcgatgaaacgcttgccgctaaaggggcagaaaacatcgctgaccgcggtgaagcagatgcaagcgacgactttgaaggcacctatgaagaatggcgtgatcatatgtggcaggacgtagcagcctactttaacctcgacattgaaaacagtgaagataataaatctactctttcacttcaatttgtcgacagcgccgcggatatgccgcttgcgaaaatgcacggtgcgttttcaacgaacgtcgtagcaagcaaagaacttcaacagccaggcagtgcacgaagcacgcgacatcttgaaattgaacttccaaaagaagcttcttatcaagaaggagatcatttaggtgttattcctcgcaactatgaaggaatagtaaaccgtgtaacagcaaggttcggcctaagcgcatcacagcaaatccgtctggaagcagaagaagaaaaattagctcatttgccactcgctaaaacagtatccgtagaagagcttctgcaatacgtggagcttcaagatcctgttacgcgcacgcagcttcgcgcaatggctgctaaaacggtctgcccgccgcataaagtagagcttgaagccttgcttgaaaagcaagcctacaaagaacaagtgctggcaaaacgtttaacaatgcttgaactgcttgaaaaatacccggcgtgtgaaatgaaattcagcgaatttatcgcccttctgccaagcatacgcccgcgctattactcgatttcttcatcacctcgtgtcgatgaaaaacaagcaagcatcacggtcagcgttgtctcaggaccggcgtggagcggatatggagaatataaaggaattgcgtcgaactatcttgccgagctgcaagaaggagatacgattacgtgctttatttccacaccgcagtcagaatttacgctgccaaaagaccctgaaacgccgcttatcatggtcggaccgggaacaggcgtcgcgccgtttagaggctttgtgcaggcgcgcaaacagctaaaagaacaaggacagtcacttggagaagcacatttatacttcggctgccgttcacctcatgaagactatctgtatcaagaagagcttgaaaacgcccaaagcgaaggcatcattacgcttcataccgctttttctcgcatgccaaatcagccgaaaacatacgttcagcacgtaatggaacaagacggcaagaaattgattgaacttcttgatcaaggagcgcacttctatatttgcggagacggaagccaaatggcacctgccgttgaagcaacgcttatgaaaagctatgctgacgttcaccaagtgagtgaagcagacgctcgcttatggctgcagcagctagaagaaaaaggccgatacgcaaaagacgtgtgggctggg

SEQ ID NO: 64 - protein, 1049 aa, synthetic construct
  REGION 1..1049: note = variant of P450 oxidase from Bacillus megaterium
MTIKEMPQPKTFGELKNLPLLNTDKPVQALMRIADELGEIFKFEAPGSVTRYLSSQRLIKEACDESRFDKNLSQALKFARDFAGDGLATSWTHEPNWKKAHNILVPSFSQHAMKRYHAMMVDIAVQLVQKWERLNADEHIEVSEDMTRLTLDTIGLCGFNYRFNSFYRDQPHPFIVSMVRALDEVMNKLQRANPDDPAYDENKRQCQEDIKVMNDYVDKIIADRKARGEQSHDLLTQMLNGKDPETGEPLDDGNIRYQIITFLIAGHETTSGLLSFALYFLVKNPHVLQKVAEEAARVLVDPVPSYKQVKQLKYVGMVLNEALRLWPTAPAFSLYAKEDTVLGGEYPLTKGDEVMVLIPQLHRDKTIWGDDVEEFRPERFENPSAIPQHAFKPFGNGQRACIGQQFALHEATLVLGMMLKHFDFEDHTNYELVIKETLTLKPEGFVVKAKSKGIPLGGIPSPSTEQSAKKVRKKAENAHNTPLLVLYGSNAGTAEGTARDLADIAMSKGFAPQVATLDSHAGNLPREGAVLIVTASYNGHPPDNAKQFVDWLDQASADEVKGVRYSVFGCGDKNWAATYQKVPAFIDETLAAKGAENIADRGEADASDDFEGTYEEWRDHMWQDVAAYFNLDIENSEDNKSTLSLQFVDSAADMPLAKMHGAFSTNVVASKELQQPGSARSTRHLEIELPKEASYQEGDHLGVIPRNYEGIVNRVTARFGLSASQQIRLEAEEEKLAHLPLAKTVSVEELLQYVELQDPVTRTQLRAMAAKTVCPPHKVELEALLEKQAYKEQVLAKRLTMLELLEKYPACEMKFSEFIALLPSIRPRYYSISSSPRVDEKQASITVSVVSGPAWSGYGEYKGIASNYLAELQEGDTITCFISTPQSEFTLPKDPETPLIMVGPGTGVAPFRGFVQARKQLKEQGQSLGEAHLYFGCRSPHEDYLYQEELENAQSEGIITLHTAFSRMPNQPKTYVQHVMEQDGKKLIELLDQGAHFYICGDGSQMAPAVEATLMKSYADVHQVSEADARLWLQQLEEKGRYAKDVWAG

SEQ ID NO: 65 - DNA, 3147 bp, synthetic construct
  misc_feature 1..3147: note = variant of P450 oxidase from Bacillus megaterium
  source 1..3147: mol_type = other DNA
atgacaattaaggaaatgcctcagcctaagacgtttggagaacttaaaaatttaccgttattaaacacagataaaccggttcaagctttgatgcgtattgcggatgaattaggagaaatctttaaattcgaggcgcctggtagcgtaacgcgctatttatcaagtcagcgtctaattaaagaagcatgcgatgaatcacgctttgataaaaacttaagtcaagcgcttaaatttgcacgtgattttgctggagacgggttagccacaagctggacgcatgaaccgaattggaaaaaagcgcataatatcttagttccaagctttagtcagcatgcaatggggcgttatcatgcgatgatggtcgatatcgccgtgcagcttgttcaaaagtgggagcgtctaaatgcagatgagcatattgaagtatcggaagacatgacacgtttaacgcttgatacaattggtctttgcggctttaactatcgctttaacagcttttaccgagatcagcctcatccatttattgtgagtatggtccgtgcactggatgaagtaatgaacaagctgcagcgagcaaatccagacgacccagcttatgatgaaaacaagcgccagtgtcaagaagatatcaaggtgatgaacgactatgtagataaaattattgcagatcgcaaagcaaggggtgaacaaagtcatgatttattaacgcagatgctaaacggaaaagatccagaaacgggtgagccgcttgatgacgggaacattcgttatcaaattattacattcttaattgcgggacacgaaacaacaagtggtcttttatcatttgcgctgtatttcttagtgaaaaatccacatgtattacaaaaagtagcagaagaagcagcacgagttctagtagatcctgttccaagctacaaacaagtcaaacagcttaaatatgtcggcatggtcttaaacgaagcgctgcgcttatggccaactgcgcctgcgttttccctatatgcaaaagaagatacggtgcttggaggagaatatcctttaacgaaaggcgacgaagtaatggttctgattcctcagcttcaccgtgataaaacaatttggggagacgatgtggaggagttccgtccagagcgttttgaaaatccaagtgcgattccgcagcatgcgtttaaaccgtttggaaacggtcagcgtgcgtgtatcggtcagcagttcgctcttcatgaagcaacgctggtacttggtatgatgctaaaacactttgactttgaagatcatacaaactacgagctcgttattaaagaaactttaacgttaaaacctgaaggctttgtggtaaaagcaaaatcgaaaggcattccgcttggcggtattccttcacctagcactgaacagtctgctaaaaaagtacgcaaaaaggcagaaaacgctcataatacgccgctgcttgtgctatacggttcaaatgcgggaacagctgaaggaacggcgcgtgatttagcagatattgcaatgagcaaaggatttgcaccgcaggtcgcaacgcttgattcacacgccggaaatcttccgcgcgaaggagctgtattaattgtaacggcgtcttataacggtcatccgcctgataacgcaaagcaatttgtcgactggttagaccaagcgtctgctgatgaagtaaaaggcgttcgctactccgtatttggatgcggcgataaaaattgggctgcgacgtatcaaaaagtgcctgcttttatcgatgaaacgcttgccgctaaaggggcagaaaacatcgctgaccgcggtgaagcagatgcaagcgacgactttgaaggcacatatgaagaatggcgtgatcatatgtggagtgacgtagcagcctactttaacctcgacattgaaaacagtgaagataataaatctactctttcacttcaatttgtcgacagcgccgcggatatgccgcttgcgaaaatgcacggtgcgttttcaacgaacgtcgtagcaagcaaagaacttcaacagccaggcagtgcacgaagcacgcgacatcttgaaattgaacttccaaaagaagcttcttatcaagaaggagatcatttaggtgttattcctcgcaactatgaaggaatagtaaaccgtgtaacagcaaggttcggcctaagcgcatcacagcaaatccgtctggaagcagaagaagaaaaattagctcatttgccactcgctaaaacagtatccgtagaagagcttctgcaatacgtggagcttcaagatcctgttacgcgcacgcagcttcgcgcaatggctgctaaaacggtctgcccgccgcataaagtagagcttgaagccttgcttgaaaagcaagcctacaaagaacaagtgctggcaaaacgtttaacaatgcttgaactgcttgaaaaatacccggcgtgtgaaatgaaattcagcgaatttatcgcccttctgccaagcatacgcccgcgctattactcgatttcttcatcacctcgtgtcgatgaaaaacaagcaagcatcacggtcagcgttgtctcaggaccggcgtggagcggatatggagaatataaaggaattgcgtcgaactatcttgccgagctgcaagaaggagatacgattacgtgctttatttccacaccgcagtcagaatttacgctgccaaaagaccctgaaacgccgcttatcatggtcggaccgggaacaggcgtcgcgccgtttagaggctttgtgcaggcgcgcaaacagctaaaagaacaaggacagtcacttggagaagcacatttatacttcggctgccgttcacctcatgaagactatctgtatcaagaagagcttgaaaacgcccaaagcgaaggcatcattacgcttcataccgctttttctcgcatgccaaatcagccgaaaacatacgttcagcacgtaatggaacaagacggcaagaaattgattgaacttcttgatcaaggagcgcacttctatatttgcggagacggaagccaaatggcacctgccgttgaagcaacgcttatgaaaagctatgctgacgttcaccaagtgagtgaagcagacgctcgcttatggctgcagcagctagaagaaaaaggccgatacgcaaaagacgtgtgggctggg

SEQ ID NO: 66 - protein, 1049 aa, synthetic construct
  REGION 1..1049: note = variant of P450 oxidase from Bacillus megaterium
MTIKEMPQPKTFGELKNLPLLNTDKPVQALMRIADELGEIFKFEAPGSVTRYLSSQRLIKEACDESRFDKNLSQALKFARDFAGDGLATSWTHEPNWKKAHNILVPSFSQHAMGRYHAMMVDIAVQLVQKWERLNADEHIEVSEDMTRLTLDTIGLCGFNYRFNSFYRDQPHPFIVSMVRALDEVMNKLQRANPDDPAYDENKRQCQEDIKVMNDYVDKIIADRKARGEQSHDLLTQMLNGKDPETGEPLDDGNIRYQIITFLIAGHETTSGLLSFALYFLVKNPHVLQKVAEEAARVLVDPVPSYKQVKQLKYVGMVLNEALRLWPTAPAFSLYAKEDTVLGGEYPLTKGDEVMVLIPQLHRDKTIWGDDVEEFRPERFENPSAIPQHAFKPFGNGQRACIGQQFALHEATLVLGMMLKHFDFEDHTNYELVIKETLTLKPEGFVVKAKSKGIPLGGIPSPSTEQSAKKVRKKAENAHNTPLLVLYGSNAGTAEGTARDLADIAMSKGFAPQVATLDSHAGNLPREGAVLIVTASYNGHPPDNAKQFVDWLDQASADEVKGVRYSVFGCGDKNWAATYQKVPAFIDETLAAKGAENIADRGEADASDDFEGTYEEWRDHMWSDVAAYFNLDIENSEDNKSTLSLQFVDSAADMPLAKMHGAFSTNVVASKELQQPGSARSTRHLEIELPKEASYQEGDHLGVIPRNYEGIVNRVTARFGLSASQQIRLEAEEEKLAHLPLAKTVSVEELLQYVELQDPVTRTQLRAMAAKTVCPPHKVELEALLEKQAYKEQVLAKRLTMLELLEKYPACEMKFSEFIALLPSIRPRYYSISSSPRVDEKQASITVSVVSGPAWSGYGEYKGIASNYLAELQEGDTITCFISTPQSEFTLPKDPETPLIMVGPGTGVAPFRGFVQARKQLKEQGQSLGEAHLYFGCRSPHEDYLYQEELENAQSEGIITLHTAFSRMPNQPKTYVQHVMEQDGKKLIELLDQGAHFYICGDGSQMAPAVEATLMKSYADVHQVSEADARLWLQQLEEKGRYAKDVWAG

SEQ ID NO: 67 - DNA, 3147 bp, synthetic construct
  misc_feature 1..3147: note = variant of P450 oxidase from Bacillus megaterium
  source 1..3147: mol_type = other DNA
atgacaattaaggaaatgcctcagcctaagacgtttggagaacttaaaaatttaccgttattaaacacagataaaccggttcaagctttgatgcgtattgcggatgaattaggagaaatctttaaattcgaggcgcctggtagcgtaacgcgctatttatcaagtcagcgtctaattaaagaagcatgcgatgaatcacgctttgataaaaacttaagtcaagcgcttaaatttgcacgtgattttgctggagacgggttagccacaagctggacgcatgaaccgaattggaaaaaagcgcataatatcttagttccaagctttagtcagcatgcaatgaaacgttatcatgcgatgatggtcgatatcgccgtgcagcttgttcaaaagtgggagcgtctaaatgcagatgagcatattgaagtatcggaagacatgacacgtttaacgcttgatacaattggtctttgcggctttaactatcgctttaacagcttttaccgagatcagcctcatccatttattgtgagtatggtccgtgcactggatgaagtaatgaacaagctgcagcgagcaaatccagacgacccagcttatgatgaaaacaagcgccagtgtcaagaagatatcaaggtgatgaacgactatgtagataaaattattgcagatcgcaaagcaaggggtgaacaaagtcatgatttattaacgcagatgctaaacggaaaagatccagaaacgggtgagccgcttgatgacgggaacattcgttatcaaattattacattcttaattgcgggacacgaaacaacaagtggtcttttatcatttgcgctgtatttcttagtgaaaaatccacatgtattacaaaaagtagcagaagaagcagcacgagttctagtagatcctgttccaagctacaaacaagtcaaacagcttaaatatgtcggcatggtcttaaacgaagcgctgcgcttatggccaactgcgcctgcgttttccctatatgcaaaagaagatacggtgcttggaggagaatatcctttaacgaaaggcgacgaagtaatggttctgattcctcagcttcaccgtgataaaacaatttggggagacgatgtggaggagttccgtccagagcgttttgaaaatccaagtgcgattccgcagcatgcgtttaaaccgtttggaaacggtcagcgtgcgtgtatcggtcagcagttcgctcttcatgaagcaacgctggtacttggtatgatgctaaaacactttgactttgaagatcatacaaactacgagctcgttattaaagaaactttaacgttaaaacctgaaggctttgtggtaaaagcaaaatcgaaaggcattccgcttggcggtattccttcacctagcactgaacagtctgctaaaaaagtacgcaaaaaggcagaaaacgctcataatacgccgctgcttgtgctatacggttcaaatgcgggaacagctgaaggaacggcgcgtgatttagcagatattgcaatgagcaaaggatttgcaccgcaggtcgcaacgcttgattcacacgccggaaatcttccgcgcgaaggagctgtattaattgtaacggcgtcttataacggtcatccgcctgataacgcaaagcaatttgtcgactggttagaccaagcgtctgctgatgaagtaaaaggcgttcgctactccgtatttggatgcggcgataaaaattgggctgcgacgtatcaaaaagtgcctgcttttatcgatgaaacgcttgccgctaaaggggcagaaaacatcgctgaccgcggtttcggtgatgcaagcgacgactttgaaggcacatatgaagaatggcgtgatcatatgtggcaggacgtagcagcctactttaacctcgacattgaaaacagtgaagataataaatctactctttcacttcaatttgtcgacagcgccgcggatatgccgcttgcgaaaatgcacggtgcgttttcaacgaacgtcgtagcaagcaaagaacttcaacagccaggcagtgcacgaagcacgcgacatcttgaaattgaacttccaaaagaagcttcttatcaagaaggagatcatttaggtgttattcctcgcaactatgaaggaatagtaaaccgtgtaacagcaaggttcggcctaagcgcatcacagcaaatccgtctggaagcagaagaagaaaaattagctcatttgccactcgctaaaacagtatccgtagaagagcttctgcaatacgtggagcttcaagatcctgttacgcgcacgcagcttcgcgcaatggctgctaaaacggtctgcccgccgcataaagtagagcttgaagccttgcttgaaaagcaagcctacaaagaacaagtgctggcaaaacgtttaacaatgcttgaactgcttgaaaaatacccggcgtgtgaaatgaaattcagcgaatttatcgcccttctgccaagcatacgcccgcgctattactcgatttcttcatcacctcgtgtcgatgaaaaacaagcaagcatcacggtcagcgttgtctcaggagaagcgtggagcggatatggagaatataaaggaattgcgtcgaactatcttgccgagctgcaagaaggagatacgattacgtgctttatttccacaccgcagtcagaatttacgctgccaaaagaccctgaaacgccgcttatcatggtcggaccgggaacaggcgtcgcgccgtttagaggctttgtgcaggcgcgcaaacagctaaaagaacaaggacagtcacttggagaagcacatttatacttcggctgccgttcacctcatgaagactatctgtatcaagaagagcttgaaaacgcccaaagcgaaggcatcattacgcttcataccgctttttctcgcatgccaaatcagccgaaaacatacgttcagcacgtaatggaacaagacggcaagaaattgattgaacttcttgatcaaggagcgcacttctatatttgcggagacggaagccaaatggcacctgccgttgaagcaacgcttatgaaaagctatgctgacgttcaccaagtgagtgaagcagacgctcgcttatggctgcagcagctagaagaaaaaggccgatacgcaaaagacgtgtgggctggg

SEQ ID NO: 68 - protein, 1049 aa, synthetic construct
  REGION 1..1049: note = variant of P450 oxidase from Bacillus megaterium
MTIKEMPQPKTFGELKNLPLLNTDKPVQALMRIADELGEIFKFEAPGSVTRYLSSQRLIKEACDESRFDKNLSQALKFARDFAGDGLATSWTHEPNWKKAHNILVPSFSQHAMKRYHAMMVDIAVQLVQKWERLNADEHIEVSEDMTRLTLDTIGLCGFNYRFNSFYRDQPHPFIVSMVRALDEVMNKLQRANPDDPAYDENKRQCQEDIKVMNDYVDKIIADRKARGEQSHDLLTQMLNGKDPETGEPLDDGNIRYQIITFLIAGHETTSGLLSFALYFLVKNPHVLQKVAEEAARVLVDPVPSYKQVKQLKYVGMVLNEALRLWPTAPAFSLYAKEDTVLGGEYPLTKGDEVMVLIPQLHRDKTIWGDDVEEFRPERFENPSAIPQHAFKPFGNGQRACIGQQFALHEATLVLGMMLKHFDFEDHTNYELVIKETLTLKPEGFVVKAKSKGIPLGGIPSPSTEQSAKKVRKKAENAHNTPLLVLYGSNAGTAEGTARDLADIAMSKGFAPQVATLDSHAGNLPREGAVLIVTASYNGHPPDNAKQFVDWLDQASADEVKGVRYSVFGCGDKNWAATYQKVPAFIDETLAAKGAENIADRGFGDASDDFEGTYEEWRDHMWQDVAAYFNLDIENSEDNKSTLSLQFVDSAADMPLAKMHGAFSTNVVASKELQQPGSARSTRHLEIELPKEASYQEGDHLGVIPRNYEGIVNRVTARFGLSASQQIRLEAEEEKLAHLPLAKTVSVEELLQYVELQDPVTRTQLRAMAAKTVCPPHKVELEALLEKQAYKEQVLAKRLTMLELLEKYPACEMKFSEFIALLPSIRPRYYSISSSPRVDEKQASITVSVVSGEAWSGYGEYKGIASNYLAELQEGDTITCFISTPQSEFTLPKDPETPLIMVGPGTGVAPFRGFVQARKQLKEQGQSLGEAHLYFGCRSPHEDYLYQEELENAQSEGIITLHTAFSRMPNQPKTYVQHVMEQDGKKLIELLDQGAHFYICGDGSQMAPAVEATLMKSYADVHQVSEADARLWLQQLEEKGRYAKDVWAG

SEQ ID NO: 69 - DNA, 3147 bp, synthetic construct
  misc_feature 1..3147: note = variant of P450 oxidase from Bacillus megaterium
  source 1..3147: mol_type = other DNA
atgacaattaaggaaatgcctcagcctaagacgtttggagaacttaaaaatttaccgttattaaacacagataaaccggttcaagctttgatgcgtattgcggatgaattaggagaaatctttaaattcgaggcgcctggtagcgtaacgcgctatttatcaagtcagcgtctaattaaagaagcatgcgatgaatcacgctttgataaaaacttaagtcaagcgcttaaatttgcacgtgattttgctggagacgggttagccacaagctggacgcatgaaccgaattggaaaaaagcgcataatatcttagttccaagctttagtcagcatgcaatggggcgttatcatgcgatgatggtcgatatcgccgtgcagcttgttcaaaagtgggagcgtctaaatgcagatgagcatattgaagtatcggaagacatgacacgtttaacgcttgatacaattggtctttgcggctttaactatcgctttaacagcttttaccgagatcagcctcatccatttattgtgagtatggtccgtgcactggatgaagtaatgaacaagctgcagcgagcaaatccagacgacccagcttatgatgaaaacaagcgccagtgtcaagaagatatcaaggtgatgaacgactatgtagataaaattattgcagatcgcaaagcaaggggtgaacaaagtcatgatttattaacgcagatgctaaacggaaaagatccagaaacgggtgagccgcttgatgacgggaacattcgttatcaaattattacattcttaattgcgggacacgaaacaacaagtggtcttttatcatttgcgctgtatttcttagtgaaaaatccacatgtattacaaaaagtagcagaagaagcagcacgagttctagtagatcctgttccaagctacaaacaagtcaaacagcttaaatatgtcggcatggtcttaaacgaagcgctgcgcttatggccagtggcgcctgcgttttccctatatgcaaaagaagatacggtgcttggaggagaatatcctttaacgaaaggcgacgaagtaatggttctgattcctcagcttcaccgtgataaaacaatttggggagacgatgtggaggagttccgtccagagcgttttgaaaatccaagtgcgattccgcagcatgcgtttaaaccgtttggaaacggtcagcgtgcgtgtatcggtcagcagttcgctcttcatgaagcaacgctggtacttggtatgatgctaaaacactttgactttgaagatcatacaaactacgagctcgttattaaagaaactttaacgttaaaacctgaaggctttgtggtaaaagcaaaatcgaaaggcattccgcttggcggtattccttcacctagcactgaacagtctgctaaaaaagtacgcaaaaaggcagaaaacgctcataatacgccgctgcttgtgctatacggttcaaatgcgggaacagctgaaggaacggcgcgtgatttagcagatattgcaatgagcaaaggatttgcaccgcaggtcgcaacgcttgattcacacgccggaaatcttccgcgcgaaggagctgtattaattgtaacggcgtcttataacggtcatccgcctgataacgcaaagcaatttgtcgactggttagaccaagcgtctgctgatgaagtaaaaggcgttcgctactccgtatttggatgcggcgataaaaattgggctgcgacgtatcaaaaagtgcctgcttttatcgatgaaacgcttgccgctaaaggggcagaaaacatcgctgaccgcggtgaagcagatgcaagcgacgactttgaaggcacatatgaagaatggcgtgatcatatgtggagtgacgtagcagcctactttaacctcgacattgaaaacagtgaagataataaatctactctttcacttcaatttgtcgacagcgccgcggatatgccgcttgcgaaaatgcacggtgcgttttcaacgaacgtcgtagcaagcaaagaacttcaacagccaggcagtgcacgaagcacgcgacatcttgaaattgaacttccaaaagaagcttcttatcaagaaggagatcatttaggtgttattcctcgcaactatgaaggaatagtaaaccgtgtaacagcaaggttcggcctaagcgcatcacagcaaatccgtctggaagcagaagaagaaaaattagctcatttgccactcgctaaaacagtatccgtagaagagcttctgcaatacgtggagcttcaagatcctgttacgcgcacgcagcttcgcgcaatggctgctaaaacggtctgcccgccgcataaagtagagcttgaagccttgcttgaaaagcaagcctacaaagaacaagtgctggcaaaacgtttaacaatgcttgaactgcttgaaaaatacccggcgtgtgaaatgaaattcagcgaatttatcgcccttctgccaagcatacgcccgcgctattactcgatttcttcatcacctcgtgtcgatgaaaaacaagcaagcatcacggtcagcgttgtctcaggaccggcgtggagcggatatggagaatataaaggaattgcgtcgaactatcttgccgagctgcaagaaggagatacgattacgtgctttatttccacaccgcagtcagaatttacgctgccaaaagaccctgaaacgccgcttatcatggtcggaccgggaacaggcgtcgcgccgtttagaggctttgtgcaggcgcgcaaacagctaaaagaacaaggacagtcacttggagaagcacatttatacttcggctgccgttcacctcatgaagactatctgtatcaagaagagcttgaaaacgcccaaagcgaaggcatcattacgcttcataccgctttttctcgcatgccaaatcagccgaaaacatacgttcagcacgtaatggaacaagacggcaagaaattgattgaacttcttgatcaaggagcgcacttctatatttgcggagacggaagccaaatggcacctgccgttgaagcaacgcttatgaaaagctatgctgacgttcaccaagtgagtgaagcagacgctcgcttatggctgcagcagctagaagaaaaaggccgatacgcaaaagacgtgtgggctggg

SEQ ID NO: 70 - protein, 1049 aa, synthetic construct
  REGION 1..1049: note = variant of P450 oxidase from Bacillus megaterium
MTIKEMPQPKTFGELKNLPLLNTDKPVQALMRIADELGEIFKFEAPGSVTRYLSSQRLIKEACDESRFDKNLSQALKFARDFAGDGLATSWTHEPNWKKAHNILVPSFSQHAMGRYHAMMVDIAVQLVQKWERLNADEHIEVSEDMTRLTLDTIGLCGFNYRFNSFYRDQPHPFIVSMVRALDEVMNKLQRANPDDPAYDENKRQCQEDIKVMNDYVDKIIADRKARGEQSHDLLTQMLNGKDPETGEPLDDGNIRYQIITFLIAGHETTSGLLSFALYFLVKNPHVLQKVAEEAARVLVDPVPSYKQVKQLKYVGMVLNEALRLWPVAPAFSLYAKEDTVLGGEYPLTKGDEVMVLIPQLHRDKTIWGDDVEEFRPERFENPSAIPQHAFKPFGNGQRACIGQQFALHEATLVLGMMLKHFDFEDHTNYELVIKETLTLKPEGFVVKAKSKGIPLGGIPSPSTEQSAKKVRKKAENAHNTPLLVLYGSNAGTAEGTARDLADIAMSKGFAPQVATLDSHAGNLPREGAVLIVTASYNGHPPDNAKQFVDWLDQASADEVKGVRYSVFGCGDKNWAATYQKVPAFIDETLAAKGAENIADRGEADASDDFEGTYEEWRDHMWSDVAAYFNLDIENSEDNKSTLSLQFVDSAADMPLAKMHGAFSTNVVASKELQQPGSARSTRHLEIELPKEASYQEGDHLGVIPRNYEGIVNRVTARFGLSASQQIRLEAEEEKLAHLPLAKTVSVEELLQYVELQDPVTRTQLRAMAAKTVCPPHKVELEALLEKQAYKEQVLAKRLTMLELLEKYPACEMKFSEFIALLPSIRPRYYSISSSPRVDEKQASITVSVVSGPAWSGYGEYKGIASNYLAELQEGDTITCFISTPQSEFTLPKDPETPLIMVGPGTGVAPFRGFVQARKQLKEQGQSLGEAHLYFGCRSPHEDYLYQEELENAQSEGIITLHTAFSRMPNQPKTYVQHVMEQDGKKLIELLDQGAHFYICGDGSQMAPAVEATLMKSYADVHQVSEADARLWLQQLEEKGRYAKDVWAG

SEQ ID NO: 71 - DNA, 3147 bp, synthetic construct
  misc_feature 1..3147: note = variant of P450 oxidase from Bacillus megaterium
  source 1..3147: mol_type = other DNA
atgacaattaaggaaatgcctcagcctaagacgtttggagaacttaaaaatttaccgttattaaacacagataaaccggttcaagctttgatgcgtattgcggatgaattaggagaaatctttaaattcgaggcgcctggtagcgtaacgcgctatttatcaagtcagcgtctaattaaagaagcatgcgatgaatcacgctttgataaaaacttaagtcaagcgcttaaatttgcacgtgattttgctggagacgggttagccacaagctggacgcatgaaccgaattggaaaaaagcgcataatatcttagttccaagctttagtcagcatgcaatggggcgttatcatgcgatgatggtcgatatcgccgtgcagcttgttcaaaagtgggagcgtctaaatgcagatgagcatattgaagtatcggaagacatgacacgtttaacgcttgatacaattggtctttgcggctttaactatcgctttaacagcttttaccgagatcagcctcatccatttattgtgagtatggtccgtgcactggatgaagtaatgaacaagctgcagcgagcaaatccagacgacccagcttatgatgaaaacaagcgccagtgtcaagaagatatcaaggtgatgaacgactatgtagataaaattattgcagatcgcaaagcaaggggtgaacaaagtcatgatttattaacgcagatgctaaacggaaaagatccagaaacgggtgagccgcttgatgacgggaacattcgttatcaaattattacattcttaattgcgggacacgaaacaacaagtggtcttttatcatttgcgctgtatttcttagtgaaaaatccacatgtattacaaaaagtagcagaagaagcagcacgagttctagtagatcctgttccaagctacaaacaagtcaaacagcttaaatatgtcggcatggtcttaaacgaagcgctgcgcttatggccaactgcgcctgcgttttccctatatgcaaaagaagatacggtgcttggaggagaatatcctttaacgaaaggcgacgaagtaatggttctgattcctcagcttcaccgtgataaaacaatttggggagacgatgtggaggagttccgtccagagcgttttgaaaatccaagtgcgattccgcagcatgcgtttaaaccgtttggaaacggtcagcgtgcgtgtatcggtcagcagttcgctcttcatgaagcaacgctggtacttggtatgatgctaaaacactttgactttgaagatcatacaaactacgagctcgttattaaagaaactcggacgttaaaacctgaaggctttgtggtaaaagcaaaatcgaaaggcattccgcttggcggtattccttcacctagcactgaacagtctgctaaaaaagtacgcaaaaaggcagaaaacgctcataatacgccgctgcttgtgctatacggttcaaatgcgggaacagctgaaggaacggcgcgtgatttagcagatattgcaatgagcaaaggatttgcaccgcaggtcgcaacgcttgattcacacgccggaaatcttccgcgcgaaggagctgtattaattgtaacggcgtcttataacggtcatccgcctgataacgcaaagcaatttgtcgactggttagaccaagcgtctgctgatgaagtaaaaggcgttcgctactccgtatttggatgcggcgataaaaattgggctgcgacgtatcaaaaagtgcctgcttttatcgatgaaacgcttgccgctaaaggggcagaaaacatcgctgaccgcggtgaagcagatgcaagcgacgactttgaaggcacatatgaagaatggcgtgatcatatgtggagtgacgtagcagcctactttaacctcgacattgaaaacagtgaagataataaatctactctttcacttcaatttgtcgacagcgccgcggatatgccgcttgcgaaaatgcacggtgcgttttcaacgaacgtcgtagcaagcaaagaacttcaacagccaggcagtgcacgaagcacgcgacatcttgaaattgaacttccaaaagaagcttcttatcaagaaggagatcatttaggtgttattcctcgcaactatgaaggaatagtaaaccgtgtaacagcaaggttcggcctaagcgcatcacagcaaatccgtctggaagcagaagaagaaaaattagctcatttgccactcgctaaaacagtatccgtagaagagcttctgcaatacgtggagcttcaagatcctgttacgcgcacgcagcttcgcgcaatggctgctaaaacggtctgcccgccgcataaagtagagcttgaagccttgcttgaaaagcaagcctacaaagaacaagtgctggcaaaacgtttaacaatgcttgaactgcttgaaaaatacccggcgtgtgaaatgaaattcagcgaatttatcgcccttctgccaagcatacgcccgcgctattactcgatttcttcatcacctcgtgtcgatgaaaaacaagcaagcatcacggtcagcgttgtctcaggaccggcgtggagcggatatggagaatataaaggaattgcgtcgaactatcttgccgagctgcaagaaggagatacgattacgtgctttatttccacaccgcagtcagaatttacgctgccaaaagaccctgaaacgccgcttatcatggtcggaccgggaacaggcgtcgcgccgtttagaggctttgtgcaggcgcgcaaacagctaaaagaacaaggacagtcacttggagaagcacatttatacttcggctgccgttcacctcatgaagactatctgtatcaagaagagcttgaaaacgcccaaagcgaaggcatcattacgcttcataccgctttttctcgcatgccaaatcagccgaaaacatacgttcagcacgtaatggaacaagacggcaagaaattgattgaacttcttgatcaaggagcgcacttctatatttgcggagacggaagccaaatggcacctgccgttgaagcaacgcttatgaaaagctatgctgacgttcaccaagtgagtgaagcagacgctcgcttatggctgcagcagctagaagaaaaaggccgatacgcaaaagacgtgtgggctggg

SEQ ID NO: 72 - protein, 1049 aa, synthetic construct
  REGION 1..1049: note = variant of P450 oxidase from Bacillus megaterium
MTIKEMPQPKTFGELKNLPLLNTDKPVQALMRIADELGEIFKFEAPGSVTRYLSSQRLIKEACDESRFDKNLSQALKFARDFAGDGLATSWTHEPNWKKAHNILVPSFSQHAMGRYHAMMVDIAVQLVQKWERLNADEHIEVSEDMTRLTLDTIGLCGFNYRFNSFYRDQPHPFIVSMVRALDEVMNKLQRANPDDPAYDENKRQCQEDIKVMNDYVDKIIADRKARGEQSHDLLTQMLNGKDPETGEPLDDGNIRYQIITFLIAGHETTSGLLSFALYFLVKNPHVLQKVAEEAARVLVDPVPSYKQVKQLKYVGMVLNEALRLWPTAPAFSLYAKEDTVLGGEYPLTKGDEVMVLIPQLHRDKTIWGDDVEEFRPERFENPSAIPQHAFKPFGNGQRACIGQQFALHEATLVLGMMLKHFDFEDHTNYELVIKETRTLKPEGFVVKAKSKGIPLGGIPSPSTEQSAKKVRKKAENAHNTPLLVLYGSNAGTAEGTARDLADIAMSKGFAPQVATLDSHAGNLPREGAVLIVTASYNGHPPDNAKQFVDWLDQASADEVKGVRYSVFGCGDKNWAATYQKVPAFIDETLAAKGAENIADRGEADASDDFEGTYEEWRDHMWSDVAAYFNLDIENSEDNKSTLSLQFVDSAADMPLAKMHGAFSTNVVASKELQQPGSARSTRHLEIELPKEASYQEGDHLGVIPRNYEGIVNRVTARFGLSASQQIRLEAEEEKLAHLPLAKTVSVEELLQYVELQDPVTRTQLRAMAAKTVCPPHKVELEALLEKQAYKEQVLAKRLTMLELLEKYPACEMKFSEFIALLPSIRPRYYSISSSPRVDEKQASITVSVVSGPAWSGYGEYKGIASNYLAELQEGDTITCFISTPQSEFTLPKDPETPLIMVGPGTGVAPFRGFVQARKQLKEQGQSLGEAHLYFGCRSPHEDYLYQEELENAQSEGIITLHTAFSRMPNQPKTYVQHVMEQDGKKLIELLDQGAHFYICGDGSQMAPAVEATLMKSYADVHQVSEADARLWLQQLEEKGRYAKDVWAG

SEQ ID NO: 73 - DNA, 3147 bp, synthetic construct
  misc_feature 1..3147: note = variant of P450 oxidase from Bacillus megaterium
  source 1..3147: mol_type = other DNA
atgacaattaaggaaatgcctcagcctaagacgtttggagaacttaaaaatttaccgttattaaacacagataaaccggttcaagctttgatgcgtattgcggatgaattaggagaaatctttaaattcgaggcgcctggtagcgtaacgcgctatttatcaagtcagcgtctaattaaagaagcatgcgatgaatcacgctttgataaaaacttaagtcaagcgcttaaatttgcacgtgattttgctggagacgggttagccacaagctggacgcatgaaccgaattggaaaaaagcgcataatatcttagttccaagctttagtcagcatgcaatggggcgttatcatgcgatgatggtcgatatcgccgtgcagcttgttcaaaagtgggagcgtctaaatgcagatgagcatattgaagtatcggaagacatgacacgtttaacgcttgatacaattggtctttgcggctttaactatcgctttaacagcttttaccgagatcagcctcatccatttattgtgagtatggtccgtgcagtggatgaagtaatgaacaagctgcagcgagcaaatccagacgacccagcttatgatgaaaacaagcgccagtgtcaagaagatatcaaggtgatgaacgactatgtagataaaattattgcagatcgcaaagcaaggggtgaacaaagtcatgatttattaacgcagatgctaaacggaaaagatccagaaacgggtgagccgcttgatgacgggaacattcgttatcaaattattacattcttaattgcgggacacgaaacaacaagtggtcttttatcatttgcgctgtatttcttagtgaaaaatccacatgtattacaaaaagtagcagaagaagcagcacgagttctagtagatcctgttccaagctacaaacaagtcaaacagcttaaatatgtcggcatggtcttaaacgaagcgctgcgcttatggccaactgcgcctgcgttttccctatatgcaaaagaagatacggtgcttggaggagaatatcctttaacgaaaggcgacgaagtaatggttctgattcctcagcttcaccgtgataaaacaatttggggagacgatgtggaggagttccgtccagagcgttttgaaaatccaagtgcgattccgcagcatgcgtttaaaccgtttggaaacggtcagcgtgcgtgtatcggtcagcagttcgctcttcatgaagcaacgctggtacttggtatgatgctaaaacactttgactttgaagatcatacaaactacgagctcgttattaaagaaactttaacgttaaaacctgaaggctttgtggtaaaagcaaaatcgaaaggcattccgcttggcggtattccttcacctagcactgaacagtctgctaaaaaagtacgcaaaaaggcagaaaacgctcataatacgccgctgcttgtgctatacggttcaaatgcgggaacagctgaaggaacggcgcgtgatttagcagatattgcaatgagcaaaggatttgcaccgcaggtcgcaacgcttgattcacacgccggaaatcttccgcgcgaaggagctgtattaattgtaacggcgtcttataacggtcatccgcctgataacgcaaagcaatttgtcgactggttagaccaagcgtctgctgatgaagtaaaaggcgttcgctactccgtatttggatgcggcgataaaaattgggctgcgacgtatcaaaaagtgcctgcttttatcgatgaaacgcttgccgctaaaggggcagaaaacatcgctgaccgcggtgaagcagatgcaagcgacgactttgaaggcacatatgaagaatggcgtgatcatatgtggagtgacgtagcagcctactttaacctcgacattgaaaacagtgaagataataaatctactctttcacttcaatttgtcgacagcgccgcggatatgccgcttgcgaaaatgcacggtgcgttttcaacgaacgtcgtagcaagcaaagaacttcaacagccaggcagtgcacgaagcacgcgacatcttgaaattgaacttccaaaagaagcttcttatcaagaaggagatcatttaggtgttattcctcgcaactatgaaggaatagtaaaccgtgtaacagcaaggttcggcctaagcgcatcacagcaaatccgtctggaagcagaagaagaaaaattagctcatttgccactcgctaaaacagtatccgtagaagagcttctgcaatacgtggagcttcaagatcctgttacgcgcacgcagcttcgcgcaatggctgctaaaacggtctgcccgccgcataaagtagagcttgaagccttgcttgaaaagcaagcctacaaagaacaagtgctggcaaaacgtttaacaatgcttgaactgcttgaaaaatacccggcgtgtgaaatgaaattcagcgaatttatcgcccttctgccaagcatacgcccgcgctattactcgatttcttcatcacctcgtgtcgatgaaaaacaagcaagcatcacggtcagcgttgtctcaggaccggcgtggagcggatatggagaatataaaggaattgcgtcgaactatcttgccgagctgcaagaaggagatacgattacgtgctttatttccacaccgcagtcagaatttacgctgccaaaagaccctgaaacgccgcttatcatggtcggaccgggaacaggcgtcgcgccgtttagaggctttgtgcaggcgcgcaaacagctaaaagaacaaggacagtcacttggagaagcacatttatacttcggctgccgttcacctcatgaagactatctgtatcaagaagagcttgaaaacgcccaaagcgaaggcatcattacgcttcataccgctttttctcgcatgccaaatcagccgaaaacatacgttcagcacgtaatggaacaagacggcaagaaattgattgaacttcttgatcaaggagcgcacttctatatttgcggagacggaagccaaatggcacctgccgttgaagcaacgcttatgaaaagctatgctgacgttcaccaagtgagtgaagcagacgctcgcttatggctgcagcagctagaagaaaaaggccgatacgcaaaagacgtgtgggctggg

SEQ ID NO: 74 - protein, 1049 aa, synthetic construct
  REGION 1..1049: note = variant of P450 oxidase from Bacillus megaterium
MTIKEMPQPKTFGELKNLPLLNTDKPVQALMRIADELGEIFKFEAPGSVTRYLSSQRLIKEACDESRFDKNLSQALKFARDFAGDGLATSWTHEPNWKKAHNILVPSFSQHAMGRYHAMMVDIAVQLVQKWERLNADEHIEVSEDMTRLTLDTIGLCGFNYRFNSFYRDQPHPFIVSMVRAVDEVMNKLQRANPDDPAYDENKRQCQEDIKVMNDYVDKIIADRKARGEQSHDLLTQMLNGKDPETGEPLDDGNIRYQIITFLIAGHETTSGLLSFALYFLVKNPHVLQKVAEEAARVLVDPVPSYKQVKQLKYVGMVLNEALRLWPTAPAFSLYAKEDTVLGGEYPLTKGDEVMVLIPQLHRDKTIWGDDVEEFRPERFENPSAIPQHAFKPFGNGQRACIGQQFALHEATLVLGMMLKHFDFEDHTNYELVIKETLTLKPEGFVVKAKSKGIPLGGIPSPSTEQSAKKVRKKAENAHNTPLLVLYGSNAGTAEGTARDLADIAMSKGFAPQVATLDSHAGNLPREGAVLIVTASYNGHPPDNAKQFVDWLDQASADEVKGVRYSVFGCGDKNWAATYQKVPAFIDETLAAKGAENIADRGEADASDDFEGTYEEWRDHMWSDVAAYFNLDIENSEDNKSTLSLQFVDSAADMPLAKMHGAFSTNVVASKELQQPGSARSTRHLEIELPKEASYQEGDHLGVIPRNYEGIVNRVTARFGLSASQQIRLEAEEEKLAHLPLAKTVSVEELLQYVELQDPVTRTQLRAMAAKTVCPPHKVELEALLEKQAYKEQVLAKRLTMLELLEKYPACEMKFSEFIALLPSIRPRYYSISSSPRVDEKQASITVSVVSGPAWSGYGEYKGIASNYLAELQEGDTITCFISTPQSEFTLPKDPETPLIMVGPGTGVAPFRGFVQARKQLKEQGQSLGEAHLYFGCRSPHEDYLYQEELENAQSEGIITLHTAFSRMPNQPKTYVQHVMEQDGKKLIELLDQGAHFYICGDGSQMAPAVEATLMKSYADVHQVSEADARLWLQQLEEKGRYAKDVWAG

SEQ ID NO: 75 - DNA, 3147 bp, synthetic construct
  misc_feature 1..3147: note = variant of P450 oxidase from Bacillus megaterium
  source 1..3147: mol_type = other DNA
atgacaattaaggaaatgcctcagcctaagacgtttggagaacttaaaaatttaccgttattaaacacagataaaccggttcaagctttgatgcgtattgcggatgaattaggagaaatctttaaattcgaggcgcctggtagcgtaacgcgctatttatcaagtcagcgtctaattaaagaagcatgcgatgaatcacgctttgataaaaacttaagtcaagcgcttaaatttgcacgtgattttgctggagacgggttagccacaagctggacgcatgaaccgaattggaaaaaagcgcataatatcttagttccaagctttagtcagcatgcaatggggcgttatcatgcgatgatggtcgatatcgccgtgcagcttgttcaaaagtgggagcgtctaaatgcagatgagcatattgaagtatcggaagacatgacacgtttaacgcttgatacaattggtctttgcggctttaactatcgctttaacagcttttaccgagatcagcctcatccatttattgtgagtatggtccgtgcactggatgaagtaatgaacaagactcagcgagcaaatccagacgacccagcttatgatgaaaacaagcgccagtgtcaagaagatatcaaggtgatgaacgactatgtagataaaattattgcagatcgcaaagcaaggggtgaacaaagtcatgatttattaacgcagatgctaaacggaaaagatccagaaacgggtgagccgcttgatgacgggaacattcgttatcaaattattacattcttaattgcgggacacgaaacaacaagtggtcttttatcatttgcgctgtatttcttagtgaaaaatccacatgtattacaaaaagtagcagaagaagcagcacgagttctagtagatcctgttccaagctacaaacaagtcaaacagcttaaatatgtcggcatggtcttaaacgaagcgctgcgcttatggccaactgcgcctgcgttttccctatatgcaaaagaagatacggtgcttggaggagaatatcctttaacgaaaggcgacgaagtaatggttctgattcctcagcttcaccgtgataaaacaatttggggagacgatgtggaggagttccgtccagagcgttttgaaaatccaagtgcgattccgcagcatgcgtttaaaccgtttggaaacggtcagcgtgcgtgtatcggtcagcagttcgctcttcatgaagcaacgctggtacttggtatgatgctaaaacactttgactttgaagatcatacaaactacgagctcgttattaaagaaactttaacgttaaaacctgaaggctttgtggtaaaagcaaaatcgaaaggcattccgcttggcggtattccttcacctagcactgaacagtctgctaaaaaagtacgcaaaaaggcagaaaacgctcataatacgccgctgcttgtgctatacggttcaaatgcgggaacagctgaaggaacggcgcgtgatttagcagatattgcaatgagcaaaggatttgcaccgcaggtcgcaacgcttgattcacacgccggaaatcttccgcgcgaaggagctgtattaattgtaacggcgtcttataacggtcatccgcctgataacgcaaagcaatttgtcgactggttagaccaagcgtctgctgatgaagtaaaaggcgttcgctactccgtatttggatgcggcgataaaaattgggctgcgacgtatcaaaaagtgcctgcttttatcgatgaaacgcttgccgctaaaggggcagaaaacatcgctgaccgcggtgaagcagatgcaagcgacgactttgaaggcacatatgaagaatggcgtgatcatatgtggagtgacgtagcagcctactttaacctcgacattgaaaacagtgaagataataaatctactctttcacttcaatttgtcgacagcgccgcggatatgccgcttgcgaaaatgcacggtgcgttttcaacgaacgtcgtagcaagcaaagaacttcaacagccaggcagtgcacgaagcacgcgacatcttgaaattgaacttccaaaagaagcttcttatcaagaaggagatcatttaggtgttattcctcgcaactatgaaggaatagtaaaccgtgtaacagcaaggttcggcctaagcgcatcacagcaaatccgtctggaagcagaagaagaaaaattagctcatttgccactcgctaaaacagtatccgtagaagagcttctgcaatacgtggagcttcaagatcctgttacgcgcacgcagcttcgcgcaatggctgctaaaacggtctgcccgccgcataaagtagagcttgaagccttgcttgaaaagcaagcctacaaagaacaagtgctggcaaaacgtttaacaatgcttgaactgcttgaaaaatacccggcgtgtgaaatgaaattcagcgaatttatcgcccttctgccaagcatacgcccgcgctattactcgatttcttcatcacctcgtgtcgatgaaaaacaagcaagcatcacggtcagcgttgtctcaggaccggcgtggagcggatatggagaatataaaggaattgcgtcgaactatcttgccgagctgcaagaaggagatacgattacgtgctttatttccacaccgcagtcagaatttacgctgccaaaagaccctgaaacgccgcttatcatggtcggaccgggaacaggcgtcgcgccgtttagaggctttgtgcaggcgcgcaaacagctaaaagaacaaggacagtcacttggagaagcacatttatacttcggctgccgttcacctcatgaagactatctgtatcaagaagagcttgaaaacgcccaaagcgaaggcatcattacgcttcataccgctttttctcgcatgccaaatcagccgaaaacatacgttcagcacgtaatggaacaagacggcaagaaattgattgaacttcttgatcaaggagcgcacttctatatttgcggagacggaagccaaatggcacctgccgttgaagcaacgcttatgaaaagctatgctgacgttcaccaagtgagtgaagcagacgctcgcttatggctgcagcagctagaagaaaaaggccgatacgcaaaagacgtgtgggctggg

SEQ ID NO: 76 - protein, 1049 aa, synthetic construct
  REGION 1..1049: note = variant of P450 oxidase from Bacillus megaterium
MTIKEMPQPKTFGELKNLPLLNTDKPVQALMRIADELGEIFKFEAPGSVTRYLSSQRLIKEACDESRFDKNLSQALKFARDFAGDGLATSWTHEPNWKKAHNILVPSFSQHAMGRYHAMMVDIAVQLVQKWERLNADEHIEVSEDMTRLTLDTIGLCGFNYRFNSFYRDQPHPFIVSMVRALDEVMNKTQRANPDDPAYDENKRQCQEDIKVMNDYVDKIIADRKARGEQSHDLLTQMLNGKDPETGEPLDDGNIRYQIITFLIAGHETTSGLLSFALYFLVKNPHVLQKVAEEAARVLVDPVPSYKQVKQLKYVGMVLNEALRLWPTAPAFSLYAKEDTVLGGEYPLTKGDEVMVLIPQLHRDKTIWGDDVEEFRPERFENPSAIPQHAFKPFGNGQRACIGQQFALHEATLVLGMMLKHFDFEDHTNYELVIKETLTLKPEGFVVKAKSKGIPLGGIPSPSTEQSAKKVRKKAENAHNTPLLVLYGSNAGTAEGTARDLADIAMSKGFAPQVATLDSHAGNLPREGAVLIVTASYNGHPPDNAKQFVDWLDQASADEVKGVRYSVFGCGDKNWAATYQKVPAFIDETLAAKGAENIADRGEADASDDFEGTYEEWRDHMWSDVAAYFNLDIENSEDNKSTLSLQFVDSAADMPLAKMHGAFSTNVVASKELQQPGSARSTRHLEIELPKEASYQEGDHLGVIPRNYEGIVNRVTARFGLSASQQIRLEAEEEKLAHLPLAKTVSVEELLQYVELQDPVTRTQLRAMAAKTVCPPHKVELEALLEKQAYKEQVLAKRLTMLELLEKYPACEMKFSEFIALLPSIRPRYYSISSSPRVDEKQASITVSVVSGPAWSGYGEYKGIASNYLAELQEGDTITCFISTPQSEFTLPKDPETPLIMVGPGTGVAPFRGFVQARKQLKEQGQSLGEAHLYFGCRSPHEDYLYQEELENAQSEGIITLHTAFSRMPNQPKTYVQHVMEQDGKKLIELLDQGAHFYICGDGSQMAPAVEATLMKSYADVHQVSEADARLWLQQLEEKGRYAKDVWAG

SEQ ID NO: 77 - DNA, 3147 bp, synthetic construct
  misc_feature 1..3147: note = variant of P450 oxidase from Bacillus megaterium
  source 1..3147: mol_type = other DNA
atgacaattaaggaaatgcctcagcctaagacgtttggagaacttaaaaatttaccgttattaaacacagataaaccggttcaagctttgatgcgtattgcggatgaattaggagaaatctttaaattcgaggcgcctggtagcgtaacgcgctatttatcaagtcagcgtctaattaaagaagcatgcgatgaatcacgctttgataaaaacttaagtcaagcgcttaaatttgcacgtgattttgctggagacgggttagccacaagctggacgcatgaaccgaattggaaaaaagcgcataatatcttagttccaagctttagtcagcatgcaatggggcgttatcatgcgatgatggtcgatatcgccgtgcagcttgttcaaaagtgggagcgtctaaatgcagatgagcatattgaagtatcggaagacatgacacgtttaacgcttgatacaattggtctttgcggctttaactatcgctttaacagcttttaccgagatcagcctcatccatttattgtgagtatggtccgtgcaattgatgaagtaatgaacaagctgcagcgagcaaatccagacgacccagcttatgatgaaaacaagcgccagtgtcaagaagatatcaaggtgatgaacgactatgtagataaaattattgcagatcgcaaagcaaggggtgaacaaagtcatgatttattaacgcagatgctaaacggaaaagatccagaaacgggtgagccgcttgatgacgggaacattcgttatcaaattattacattcttaattgcgggacacgaaacaacaagtggtcttttatcatttgcgctgtatttcttagtgaaaaatccacatgtattacaaaaagtagcagaagaagcagcacgagttctagtagatcctgttccaagctacaaacaagtcaaacagcttaaatatgtcggcatggtcttaaacgaagcgctgcgcttatggccaactgcgcctgcgttttccctatatgcaaaagaagatacggtgcttggaggagaatatcctttaacgaaaggcgacgaagtaatggttctgattcctcagcttcaccgtgataaaacaatttggggagacgatgtggaggagttccgtccagagcgttttgaaaatccaagtgcgattccgcagcatgcgtttaaaccgtttggaaacggtcagcgtgcgtgtatcggtcagcagttcgctcttcatgaagcaacgctggtacttggtatgatgctaaaacactttgactttgaagatcatacaaactacgagctcgttattaaagaaactttaacgttaaaacctgaaggctttgtggtaaaagcaaaatcgaaaggcattccgcttggcggtattccttcacctagcactgaacagtctgctaaaaaagtacgcaaaaaggcagaaaacgctcataatacgccgctgcttgtgctatacggttcaaatgcgggaacagctgaaggaacggcgcgtgatttagcagatattgcaatgagcaaaggatttgcaccgcaggtcgcaacgcttgattcacacgccggaaatcttccgcgcgaaggagctgtattaattgtaacggcgtcttataacggtcatccgcctgataacgcaaagcaatttgtcgactggttagaccaagcgtctgctgatgaagtaaaaggcgttcgctactccgtatttggatgcggcgataaaaattgggctgcgacgtatcaaaaagtgcctgcttttatcgatgaaacgcttgccgctaaaggggcagaaaacatcgctgaccgcggtgaagcagatgcaagcgacgactttgaaggcacatatgaagaatggcgtgatcatatgtggagtgacgtagcagcctactttaacctcgacattgaaaacagtgaagataataaatctactctttcacttcaatttgtcgacagcgccgcggatatgccgcttgcgaaaatgcacggtgcgttttcaacgaacgtcgtagcaagcaaagaacttcaacagccaggcagtgcacgaagcacgcgacatcttgaaattgaacttccaaaagaagcttcttatcaagaaggagatcatttaggtgttattcctcgcaactatgaaggaatagtaaaccgtgtaacagcaaggttcggcctaagcgcatcacagcaaatccgtctggaagcagaagaagaaaaattagctcatttgccactcgctaaaacagtatccgtagaagagcttctgcaatacgtggagcttcaagatcctgttacgcgcacgcagcttcgcgcaatggctgctaaaacggtctgcccgccgcataaagtagagcttgaagccttgcttgaaaagcaagcctacaaagaacaagtgctggcaaaacgtttaacaatgcttgaactgcttgaaaaatacccggcgtgtgaaatgaaattcagcgaatttatcgcccttctgccaagcatacgcccgcgctattactcgatttcttcatcacctcgtgtcgatgaaaaacaagcaagcatcacggtcagcgttgtctcaggaccggcgtggagcggatatggagaatataaaggaattgcgtcgaactatcttgccgagctgcaagaaggagatacgattacgtgctttatttccacaccgcagtcagaatttacgctgccaaaagaccctgaaacgccgcttatcatggtcggaccgggaacaggcgtcgcgccgtttagaggctttgtgcaggcgcgcaaacagctaaaagaacaaggacagtcacttggagaagcacatttatacttcggctgccgttcacctcatgaagactatctgtatcaagaagagcttgaaaacgcccaaagcgaaggcatcattacgcttcataccgctttttctcgcatgccaaatcagccgaaaacatacgttcagcacgtaatggaacaagacggcaagaaattgattgaacttcttgatcaaggagcgcacttctatatttgcggagacggaagccaaatggcacctgccgttgaagcaacgcttatgaaaagctatgctgacgttcaccaagtgagtgaagcagacgctcgcttatggctgcagcagctagaagaaaaaggccgatacgcaaaagacgtgtgggctggg

SEQ ID NO: 78 - protein, 1049 aa, synthetic construct
  REGION 1..1049: note = variant of P450 oxidase from Bacillus megaterium
MTIKEMPQPKTFGELKNLPLLNTDKPVQALMRIADELGEIFKFEAPGSVTRYLSSQRLIKEACDESRFDKNLSQALKFARDFAGDGLATSWTHEPNWKKAHNILVPSFSQHAMGRYHAMMVDIAVQLVQKWERLNADEHIEVSEDMTRLTLDTIGLCGFNYRFNSFYRDQPHPFIVSMVRAIDEVMNKLQRANPDDPAYDENKRQCQEDIKVMNDYVDKIIADRKARGEQSHDLLTQMLNGKDPETGEPLDDGNIRYQIITFLIAGHETTSGLLSFALYFLVKNPHVLQKVAEEAARVLVDPVPSYKQVKQLKYVGMVLNEALRLWPTAPAFSLYAKEDTVLGGEYPLTKGDEVMVLIPQLHRDKTIWGDDVEEFRPERFENPSAIPQHAFKPFGNGQRACIGQQFALHEATLVLGMMLKHFDFEDHTNYELVIKETLTLKPEGFVVKAKSKGIPLGGIPSPSTEQSAKKVRKKAENAHNTPLLVLYGSNAGTAEGTARDLADIAMSKGFAPQVATLDSHAGNLPREGAVLIVTASYNGHPPDNAKQFVDWLDQASADEVKGVRYSVFGCGDKNWAATYQKVPAFIDETLAAKGAENIADRGEADASDDFEGTYEEWRDHMWSDVAAYFNLDIENSEDNKSTLSLQFVDSAADMPLAKMHGAFSTNVVASKELQQPGSARSTRHLEIELPKEASYQEGDHLGVIPRNYEGIVNRVTARFGLSASQQIRLEAEEEKLAHLPLAKTVSVEELLQYVELQDPVTRTQLRAMAAKTVCPPHKVELEALLEKQAYKEQVLAKRLTMLELLEKYPACEMKFSEFIALLPSIRPRYYSISSSPRVDEKQASITVSVVSGPAWSGYGEYKGIASNYLAELQEGDTITCFISTPQSEFTLPKDPETPLIMVGPGTGVAPFRGFVQARKQLKEQGQSLGEAHLYFGCRSPHEDYLYQEELENAQSEGIITLHTAFSRMPNQPKTYVQHVMEQDGKKLIELLDQGAHFYICGDGSQMAPAVEATLMKSYADVHQVSEADARLWLQQLEEKGRYAKDVWAG

SEQ ID NO: 79 - DNA, 3147 bp, synthetic construct
  misc_feature 1..3147: note = variant of P450 oxidase from Bacillus megaterium
  source 1..3147: mol_type = other DNA
atgacaattaaggaaatgcctcagcctaagacgtttggagaacttaaaaatttaccgttattaaacacagataaaccggttcaagctttgatgcgtattgcggatgaattaggagaaatctttaaattcgaggcgcctggtagcgtaacgcgctatttatcaagtcagcgtctaattaaagaagcatgcgatgaatcacgctttgataaaaacttaagtcaagcgcttaaatttgcacgtgattttgctggagacgggttagccacaagctggacgcatgaaccgaattggaaaaaagcgcataatatcttagttccaagctttagtcagcatgcaatggggcgttatcatgcgatgatggtcgatatcgccgtgcagcttgttcaaaagtgggagcgtctaaatgcagatgagcatattgaagtatcggaagacatgacacgtttaacgcttgatacaattggtctttgcggctttaactatcgctttaacagcttttaccgagatcagcctcatccatttattgtgagtatggtccgtgcactggatgaagtacggaacaagctgcagcgagcaaatccagacgacccagcttatgatgaaaacaagcgccagtgtcaagaagatatcaaggtgatgaacgactatgtagataaaattattgcagatcgcaaagcaaggggtgaacaaagtcatgatttattaacgcagatgctaaacggaaaagatccagaaacgggtgagccgcttgatgacgggaacattcgttatcaaattattacattcttaattgcgggacacgaaacaacaagtggtcttttatcatttgcgctgtatttcttagtgaaaaatccacatgtattacaaaaagtagcagaagaagcagcacgagttctagtagatcctgttccaagctacaaacaagtcaaacagcttaaatatgtcggcatggtcttaaacgaagcgctgcgcttatggccaactgcgcctgcgttttccctatatgcaaaagaagatacggtgcttggaggagaatatcctttaacgaaaggcgacgaagtaatggttctgattcctcagcttcaccgtgataaaacaatttggggagacgatgtggaggagttccgtccagagcgttttgaaaatccaagtgcgattccgcagcatgcgtttaaaccgtttggaaacggtcagcgtgcgtgtatcggtcagcagttcgctcttcatgaagcaacgctggtacttggtatgatgctaaaacactttgactttgaagatcatacaaactacgagctcgttattaaagaaactttaacgttaaaacctgaaggctttgtggtaaaagcaaaatcgaaaggcattccgcttggcggtattccttcacctagcactgaacagtctgctaaaaaagtacgcaaaaaggcagaaaacgctcataatacgccgctgcttgtgctatacggttcaaatgcgggaacagctgaaggaacggcgcgtgatttagcagatattgcaatgagcaaaggatttgcaccgcaggtcgcaacgcttgattcacacgccggaaatcttccgcgcgaaggagctgtattaattgtaacggcgtcttataacggtcatccgcctgataacgcaaagcaatttgtcgactggttagaccaagcgtctgctgatgaagtaaaaggcgttcgctactccgtatttggatgcggcgataaaaattgggctgcgacgtatcaaaaagtgcctgcttttatcgatgaaacgcttgccgctaaaggggcagaaaacatcgctgaccgcggtgaagcagatgcaagcgacgactttgaaggcacatatgaagaatggcgtgatcatatgtggagtgacgtagcagcctactttaacctcgacattgaaaacagtgaagataataaatctactctttcacttcaatttgtcgacagcgccgcggatatgccgcttgcgaaaatgcacggtgcgttttcaacgaacgtcgtagcaagcaaagaacttcaacagccaggcagtgcacgaagcacgcgacatcttgaaattgaacttccaaaagaagcttcttatcaagaaggagatcatttaggtgttattcctcgcaactatgaaggaatagtaaaccgtgtaacagcaaggttcggcctaagcgcatcacagcaaatccgtctggaagcagaagaagaaaaattagctcatttgccactcgctaaaacagtatccgtagaagagcttctgcaatacgtggagcttcaagatcctgttacgcgcacgcagcttcgcgcaatggctgctaaaacggtctgcccgccgcataaagtagagcttgaagccttgcttgaaaagcaagcctacaaagaacaagtgctggcaaaacgtttaacaatgcttgaactgcttgaaaaatacccggcgtgtgaaatgaaattcagcgaatttatcgcccttctgccaagcatacgcccgcgctattactcgatttcttcatcacctcgtgtcgatgaaaaacaagcaagcatcacggtcagcgttgtctcaggaccggcgtggagcggatatggagaatataaaggaattgcgtcgaactatcttgccgagctgcaagaaggagatacgattacgtgctttatttccacaccgcagtcagaatttacgctgccaaaagaccctgaaacgccgcttatcatggtcggaccgggaacaggcgtcgcgccgtttagaggctttgtgcaggcgcgcaaacagctaaaagaacaaggacagtcacttggagaagcacatttatacttcggctgccgttcacctcatgaagactatctgtatcaagaagagcttgaaaacgcccaaagcgaaggcatcattacgcttcataccgctttttctcgcatgccaaatcagccgaaaacatacgttcagcacgtaatggaacaagacggcaagaaattgattgaacttcttgatcaaggagcgcacttctatatttgcggagacggaagccaaatggcacctgccgttgaagcaacgcttatgaaaagctatgctgacgttcaccaagtgagtgaagcagacgctcgcttatggctgcagcagctagaagaaaaaggccgatacgcaaaagacgtgtgggctggg

SEQ ID NO: 80 - protein, 1049 aa, synthetic construct
  REGION 1..1049: note = variant of P450 oxidase from Bacillus megaterium
MTIKEMPQPKTFGELKNLPLLNTDKPVQALMRIADELGEIFKFEAPGSVTRYLSSQRLIKEACDESRFDKNLSQALKFARDFAGDGLATSWTHEPNWKKAHNILVPSFSQHAMGRYHAMMVDIAVQLVQKWERLNADEHIEVSEDMTRLTLDTIGLCGFNYRFNSFYRDQPHPFIVSMVRALDEVRNKLQRANPDDPAYDENKRQCQEDIKVMNDYVDKIIADRKARGEQSHDLLTQMLNGKDPETGEPLDDGNIRYQIITFLIAGHETTSGLLSFALYFLVKNPHVLQKVAEEAARVLVDPVPSYKQVKQLKYVGMVLNEALRLWPTAPAFSLYAKEDTVLGGEYPLTKGDEVMVLIPQLHRDKTIWGDDVEEFRPERFENPSAIPQHAFKPFGNGQRACIGQQFALHEATLVLGMMLKHFDFEDHTNYELVIKETLTLKPEGFVVKAKSKGIPLGGIPSPSTEQSAKKVRKKAENAHNTPLLVLYGSNAGTAEGTARDLADIAMSKGFAPQVATLDSHAGNLPREGAVLIVTASYNGHPPDNAKQFVDWLDQASADEVKGVRYSVFGCGDKNWAATYQKVPAFIDETLAAKGAENIADRGEADASDDFEGTYEEWRDHMWSDVAAYFNLDIENSEDNKSTLSLQFVDSAADMPLAKMHGAFSTNVVASKELQQPGSARSTRHLEIELPKEASYQEGDHLGVIPRNYEGIVNRVTARFGLSASQQIRLEAEEEKLAHLPLAKTVSVEELLQYVELQDPVTRTQLRAMAAKTVCPPHKVELEALLEKQAYKEQVLAKRLTMLELLEKYPACEMKFSEFIALLPSIRPRYYSISSSPRVDEKQASITVSVVSGPAWSGYGEYKGIASNYLAELQEGDTITCFISTPQSEFTLPKDPETPLIMVGPGTGVAPFRGFVQARKQLKEQGQSLGEAHLYFGCRSPHEDYLYQEELENAQSEGIITLHTAFSRMPNQPKTYVQHVMEQDGKKLIELLDQGAHFYICGDGSQMAPAVEATLMKSYADVHQVSEADARLWLQQLEEKGRYAKDVWAG

SEQ ID NO: 81 - DNA, 3147 bp, synthetic construct
  misc_feature 1..3147: note = variant of P450 oxidase from Bacillus megaterium
  source 1..3147: mol_type = other DNA
atgacaattaaggaaatgcctcagcctaagacgtttggagaacttaaaaatttaccgttattaaacacagataaaccggttcaagctttgatgcgtattgcggatgaattaggagaaatctttaaattcgaggcgcctggtagcgtaacgcgctatttatcaagtcagcgtctaattaaagaagcatgcgatgaatcacgctttgataaaaacttaagtcaagcgcttaaatttgcacgtgattttgctggagacgggttagccacaagctggacgcatgaaccgaattggaaaaaagcgcataatatcttagttccaagctttagtcagcatgcaatggggcgttatcatgcgatgatggtcgatatcgccgtgcagcttgttcaaaagtgggagcgtctaaatgcagatgagcatattgaagtatcggaagacatgacacgtttaacgcttgatacaattggtctttgcggctttaactatcgctttaacagcttttaccgagatcagcctcatccatttattgtgagtatggtccgtgcactggatgaagtaatgaacaagctgcagcgagcaaatccagacgacccagcttatgatgaaaacaagcgccagtgtcaagaagatatcaaggtgatgaacgactatgtagataaaattattgcagatcgcaaagcaaggggtgaacaaagtcatgatttattaacgcagatgctaaacggaaaagatccagaaacgggtgagccgcttgatgacgggaacattcgttatcaaattattacattcttaattgcgggacacgaaacaacaagtggtcttttatcatttgcgctgtatttcttagtgaaaaatccacatgtattacaaaaagtagcagaagaagcagcacgagttctagtagatcctgttccaagctacaaacaagtcaaacagcttaaatatgtcggcatggtcttaaacgaagcgctgcgcttatggccaactgcgccttttttttccctatatgcaaaagaagatacggtgcttggaggagaatatcctttaacgaaaggcgacgaagtaatggttctgattcctcagcttcaccgtgataaaacaatttggggagacgatgtggaggagttccgtccagagcgttttgaaaatccaagtgcgattccgcagcatgcgtttaaaccgtttggaaacggtcagcgtgcgtgtatcggtcagcagttcgctcttcatgaagcaacgctggtacttggtatgatgctaaaacactttgactttgaagatcatacaaactacgagctcgttattaaagaaactttaacgttaaaacctgaaggctttgtggtaaaagcaaaatcgaaaggcattccgcttggcggtattccttcacctagcactgaacagtctgctaaaaaagtacgcaaaaaggcagaaaacgctcataatacgccgctgcttgtgctatacggttcaaatgcgggaacagctgaaggaacggcgcgtgatttagcagatattgcaatgagcaaaggatttgcaccgcaggtcgcaacgcttgattcacacgccggaaatcttccgcgcgaaggagctgtattaattgtaacggcgtcttataacggtcatccgcctgataacgcaaagcaatttgtcgactggttagaccaagcgtctgctgatgaagtaaaaggcgttcgctactccgtatttggatgcggcgataaaaattgggctgcgacgtatcaaaaagtgcctgcttttatcgatgaaacgcttgccgctaaaggggcagaaaacatcgctgaccgcggtgaagcagatgcaagcgacgactttgaaggcacatatgaagaatggcgtgatcatatgtggagtgacgtagcagcctactttaacctcgacattgaaaacagtgaagataataaatctactctttcacttcaatttgtcgacagcgccgcggatatgccgcttgcgaaaatgcacggtgcgttttcaacgaacgtcgtagcaagcaaagaacttcaacagccaggcagtgcacgaagcacgcgacatcttgaaattgaacttccaaaagaagcttcttatcaagaaggagatcatttaggtgttattcctcgcaactatgaaggaatagtaaaccgtgtaacagcaaggttcggcctaagcgcatcacagcaaatccgtctggaagcagaagaagaaaaattagctcatttgccactcgctaaaacagtatccgtagaagagcttctgcaatacgtggagcttcaagatcctgttacgcgcacgcagcttcgcgcaatggctgctaaaacggtctgcccgccgcataaagtagagcttgaagccttgcttgaaaagcaagcctacaaagaacaagtgctggcaaaacgtttaacaatgcttgaactgcttgaaaaatacccggcgtgtgaaatgaaattcagcgaatttatcgcccttctgccaagcatacgcccgcgctattactcgatttcttcatcacctcgtgtcgatgaaaaacaagcaagcatcacggtcagcgttgtctcaggaccggcgtggagcggatatggagaatataaaggaattgcgtcgaactatcttgccgagctgcaagaaggagatacgattacgtgctttatttccacaccgcagtcagaatttacgctgccaaaagaccctgaaacgccgcttatcatggtcggaccgggaacaggcgtcgcgccgtttagaggctttgtgcaggcgcgcaaacagctaaaagaacaaggacagtcacttggagaagcacatttatacttcggctgccgttcacctcatgaagactatctgtatcaagaagagcttgaaaacgcccaaagcgaaggcatcattacgcttcataccgctttttctcgcatgccaaatcagccgaaaacatacgttcagcacgtaatggaacaagacggcaagaaattgattgaacttcttgatcaaggagcgcacttctatatttgcggagacggaagccaaatggcacctgccgttgaagcaacgcttatgaaaagctatgctgacgttcaccaagtgagtgaagcagacgctcgcttatggctgcagcagctagaagaaaaaggccgatacgcaaaagacgtgtgggctggg

SEQ ID NO: 82 - protein, 1049 aa, synthetic construct
  REGION 1..1049: note = variant of P450 oxidase from Bacillus megaterium
MTIKEMPQPKTFGELKNLPLLNTDKPVQALMRIADELGEIFKFEAPGSVTRYLSSQRLIKEACDESRFDKNLSQALKFARDFAGDGLATSWTHEPNWKKAHNILVPSFSQHAMGRYHAMMVDIAVQLVQKWERLNADEHIEVSEDMTRLTLDTIGLCGFNYRFNSFYRDQPHPFIVSMVRALDEVMNKLQRANPDDPAYDENKRQCQEDIKVMNDYVDKIIADRKARGEQSHDLLTQMLNGKDPETGEPLDDGNIRYQIITFLIAGHETTSGLLSFALYFLVKNPHVLQKVAEEAARVLVDPVPSYKQVKQLKYVGMVLNEALRLWPTAPFFSLYAKEDTVLGGEYPLTKGDEVMVLIPQLHRDKTIWGDDVEEFRPERFENPSAIPQHAFKPFGNGQRACIGQQFALHEATLVLGMMLKHFDFEDHTNYELVIKETLTLKPEGFVVKAKSKGIPLGGIPSPSTEQSAKKVRKKAENAHNTPLLVLYGSNAGTAEGTARDLADIAMSKGFAPQVATLDSHAGNLPREGAVLIVTASYNGHPPDNAKQFVDWLDQASADEVKGVRYSVFGCGDKNWAATYQKVPAFIDETLAAKGAENIADRGEADASDDFEGTYEEWRDHMWSDVAAYFNLDIENSEDNKSTLSLQFVDSAADMPLAKMHGAFSTNVVASKELQQPGSARSTRHLEIELPKEASYQEGDHLGVIPRNYEGIVNRVTARFGLSASQQIRLEAEEEKLAHLPLAKTVSVEELLQYVELQDPVTRTQLRAMAAKTVCPPHKVELEALLEKQAYKEQVLAKRLTMLELLEKYPACEMKFSEFIALLPSIRPRYYSISSSPRVDEKQASITVSVVSGPAWSGYGEYKGIASNYLAELQEGDTITCFISTPQSEFTLPKDPETPLIMVGPGTGVAPFRGFVQARKQLKEQGQSLGEAHLYFGCRSPHEDYLYQEELENAQSEGIITLHTAFSRMPNQPKTYVQHVMEQDGKKLIELLDQGAHFYICGDGSQMAPAVEATLMKSYADVHQVSEADARLWLQQLEEKGRYAKDVWAG

SEQ ID NO: 83 - DNA, 3147 bp, synthetic construct
  misc_feature 1..3147: note = variant of P450 oxidase from Bacillus megaterium
  source 1..3147: mol_type = other DNA
atgacaattaaggaaatgcctcagcctaagacgtttggagaacttaaaaatttaccgttattaaacacagataaaccggttcaagctttgatgcgtattgcggatgaattaggagaaatctttaaattcgaggcgcctggtagcgtaacgcgctatttatcaagtcagcgtctaattaaagaagcatgcgatgaatcacgctttgataaaaacttaagtcaagcgcttaaatttgcacgtgattttgctggagacgggttagccacaagctggacgcatgaaccgaattggaaaaaagcgcataatatcttagttccaagctttagtcagcatgcaatggggcgttatcatgcgatgatggtcgatatcgccgtgcagcttgttcaaaagtgggagcgtctaaatgcagatgagcatattgaagtatcggaagacatgacacgtttaacgcttgatacaattggtctttgcggctttaactatcgctttaacagcttttaccgagatcagcctcatccatttattgtgagtatggtccgtgcactggatgaagtaatgaacaagctgcagcgagcaaatccagacgacccagcttatgatgaaaacaagcgccagtgtcaagaagatatcaaggtgatgaacgactatgtagataaaattattgcagatcgcaaagcaaggggtgaacaaagtcatgatttattaacgcagatgctaaacggaaaagatccagaaacgggtgagccgcttgatgacgggaacattcgttatcaaattattacattcttaattgcgggacacgaaacaacaagtggtcttttatcatttgcgctgtatttcttagtgaaaaatccacatgtattacaaaaagtagcagaagaagcagcacgagttctagtagatcctgttccaagctacaaacaagtcaaacagcttaaatatgtcggcatggtcttaaacgaagcgctgcgcttatggccaactgcgcctgcgttttccctatatgcaaaagaagatacggtgcttggaggagaatatcctttaacgaaaggcgacgaagtagttgttctgattcctcagcttcaccgtgataaaacaatttggggagacgatgtggaggagttccgtccagagcgttttgaaaatccaagtgcgattccgcagcatgcgtttaaaccgtttggaaacggtcagcgtgcgtgtatcggtcagcagttcgctcttcatgaagcaacgctggtacttggtatgatgctaaaacactttgactttgaagatcatacaaactacgagctcgttattaaagaaactttaacgttaaaacctgaaggctttgtggtaaaagcaaaatcgaaaggcattccgcttggcggtattccttcacctagcactgaacagtctgctaaaaaagtacgcaaaaaggcagaaaacgctcataatacgccgctgcttgtgctatacggttcaaatgcgggaacagctgaaggaacggcgcgtgatttagcagatattgcaatgagcaaaggatttgcaccgcaggtcgcaacgcttgattcacacgccggaaatcttccgcgcgaaggagctgtattaattgtaacggcgtcttataacggtcatccgcctgataacgcaaagcaatttgtcgactggttagaccaagcgtctgctgatgaagtaaaaggcgttcgctactccgtatttggatgcggcgataaaaattgggctgcgacgtatcaaaaagtgcctgcttttatcgatgaaacgcttgccgctaaaggggcagaaaacatcgctgaccgcggtgaagcagatgcaagcgacgactttgaaggcacatatgaagaatggcgtgatcatatgtggagtgacgtagcagcctactttaacctcgacattgaaaacagtgaagataataaatctactctttcacttcaatttgtcgacagcgccgcggatatgccgcttgcgaaaatgcacggtgcgttttcaacgaacgtcgtagcaagcaaagaacttcaacagccaggcagtgcacgaagcacgcgacatcttgaaattgaacttccaaaagaagcttcttatcaagaaggagatcatttaggtgttattcctcgcaactatgaaggaatagtaaaccgtgtaacagcaaggttcggcctaagcgcatcacagcaaatccgtctggaagcagaagaagaaaaattagctcatttgccactcgctaaaacagtatccgtagaagagcttctgcaatacgtggagcttcaagatcctgttacgcgcacgcagcttcgcgcaatggctgctaaaacggtctgcccgccgcataaagtagagcttgaagccttgcttgaaaagcaagcctacaaagaacaagtgctggcaaaacgtttaacaatgcttgaactgcttgaaaaatacccggcgtgtgaaatgaaattcagcgaatttatcgcccttctgccaagcatacgcccgcgctattactcgatttcttcatcacctcgtgtcgatgaaaaacaagcaagcatcacggtcagcgttgtctcaggaccggcgtggagcggatatggagaatataaaggaattgcgtcgaactatcttgccgagctgcaagaaggagatacgattacgtgctttatttccacaccgcagtcagaatttacgctgccaaaagaccctgaaacgccgcttatcatggtcggaccgggaacaggcgtcgcgccgtttagaggctttgtgcaggcgcgcaaacagctaaaagaacaaggacagtcacttggagaagcacatttatacttcggctgccgttcacctcatgaagactatctgtatcaagaagagcttgaaaacgcccaaagcgaaggcatcattacgcttcataccgctttttctcgcatgccaaatcagccgaaaacatacgttcagcacgtaatggaacaagacggcaagaaattgattgaacttcttgatcaaggagcgcacttctatatttgcggagacggaagccaaatggcacctgccgttgaagcaacgcttatgaaaagctatgctgacgttcaccaagtgagtgaagcagacgctcgcttatggctgcagcagctagaagaaaaaggccgatacgcaaaagacgtgtgggctggg

SEQ ID NO: 84 - protein, 1049 aa, synthetic construct
  REGION 1..1049: note = variant of P450 oxidase from Bacillus megaterium
MTIKEMPQPKTFGELKNLPLLNTDKPVQALMRIADELGEIFKFEAPGSVTRYLSSQRLIKEACDESRFDKNLSQALKFARDFAGDGLATSWTHEPNWKKAHNILVPSFSQHAMGRYHAMMVDIAVQLVQKWERLNADEHIEVSEDMTRLTLDTIGLCGFNYRFNSFYRDQPHPFIVSMVRALDEVMNKLQRANPDDPAYDENKRQCQEDIKVMNDYVDKIIADRKARGEQSHDLLTQMLNGKDPETGEPLDDGNIRYQIITFLIAGHETTSGLLSFALYFLVKNPHVLQKVAEEAARVLVDPVPSYKQVKQLKYVGMVLNEALRLWPTAPAFSLYAKEDTVLGGEYPLTKGDEVVVLIPQLHRDKTIWGDDVEEFRPERFENPSAIPQHAFKPFGNGQRACIGQQFALHEATLVLGMMLKHFDFEDHTNYELVIKETLTLKPEGFVVKAKSKGIPLGGIPSPSTEQSAKKVRKKAENAHNTPLLVLYGSNAGTAEGTARDLADIAMSKGFAPQVATLDSHAGNLPREGAVLIVTASYNGHPPDNAKQFVDWLDQASADEVKGVRYSVFGCGDKNWAATYQKVPAFIDETLAAKGAENIADRGEADASDDFEGTYEEWRDHMWSDVAAYFNLDIENSEDNKSTLSLQFVDSAADMPLAKMHGAFSTNVVASKELQQPGSARSTRHLEIELPKEASYQEGDHLGVIPRNYEGIVNRVTARFGLSASQQIRLEAEEEKLAHLPLAKTVSVEELLQYVELQDPVTRTQLRAMAAKTVCPPHKVELEALLEKQAYKEQVLAKRLTMLELLEKYPACEMKFSEFIALLPSIRPRYYSISSSPRVDEKQASITVSVVSGPAWSGYGEYKGIASNYLAELQEGDTITCFISTPQSEFTLPKDPETPLIMVGPGTGVAPFRGFVQARKQLKEQGQSLGEAHLYFGCRSPHEDYLYQEELENAQSEGIITLHTAFSRMPNQPKTYVQHVMEQDGKKLIELLDQGAHFYICGDGSQMAPAVEATLMKSYADVHQVSEADARLWLQQLEEKGRYAKDVWAG

SEQ ID NO: 85 - DNA, 3147 bp, synthetic construct
  misc_feature 1..3147: note = variant of P450 oxidase from Bacillus megaterium
  source 1..3147: mol_type = other DNA
atgacaattaaggaaatgcctcagcctaagacgtttggagaacttaaaaatttaccgttattaaacacagataaaccggttcaagctttgatgcgtattgcggatgaattaggagaaatctttaaattcgaggcgcctggtagcgtaacgcgctatttatcaagtcagcgtctaattaaagaagcatgcgatgaatcacgctttgataaaaacttaagtcaagcgcttaaatttgcacgtgattttgctggagacgggttagccacaagctggacgcatgaaccgaattggaaaaaagcgcataatatcttagttccaagctttagtcagcatgcaatggggcgttatcatgcgatgatggtcgatatcgccgtgcagcttgttcaaaagtgggagcgtctaaatgcagatgagcatattgaagtatcggaagacatgacacgtttaacgcttgatacaattggtctttgcggctttaactatcgctttaacagcttttaccgagatcagcctcatccatttattgtgagtatggtccgtgcactggatgaagtaatgaacaagctgcagcgagcaaatccagacgacccagcttatgatgaaaacaagcgccagtgtcaagaagatatcaaggtgatgaacgactatgtagataaaattattgcagatcgcaaagcaaggggtgaacaaagtcatgatttattaacgcagatgctaaacggaaaagatccagaaacgggtgagccgcttgatgacgggaacattcgttatcaaattattacattcttaattgcgggaactgaaacaacaagtggtcttttatcatttgcgctgtatttcttagtgaaaaatccacatgtattacaaaaagtagcagaagaagcagcacgagttctagtagatcctgttccaagctacaaacaagtcaaacagcttaaatatgtcggcatggtcttaaacgaagcgctgcgcttatggccaactgcgcctgcgttttccctatatgcaaaagaagatacggtgcttggaggagaatatcctttaacgaaaggcgacgaagtaatggttctgattcctcagcttcaccgtgataaaacaatttggggagacgatgtggaggagttccgtccagagcgttttgaaaatccaagtgcgattccgcagcatgcgtttaaaccgtttggaaacggtcagcgtgcgtgtatcggtcagcagttcgctcttcatgaagcaacgctggtacttggtatgatgctaaaacactttgactttgaagatcatacaaactacgagctcgttattaaagaaactttaacgttaaaacctgaaggctttgtggtaaaagcaaaatcgaaaggcattccgcttggcggtattccttcacctagcactgaacagtctgctaaaaaagtacgcaaaaaggcagaaaacgctcataatacgccgctgcttgtgctatacggttcaaatgcgggaacagctgaaggaacggcgcgtgatttagcagatattgcaatgagcaaaggatttgcaccgcaggtcgcaacgcttgattcacacgccggaaatcttccgcgcgaaggagctgtattaattgtaacggcgtcttataacggtcatccgcctgataacgcaaagcaatttgtcgactggttagaccaagcgtctgctgatgaagtaaaaggcgttcgctactccgtatttggatgcggcgataaaaattgggctgcgacgtatcaaaaagtgcctgcttttatcgatgaaacgcttgccgctaaaggggcagaaaacatcgctgaccgcggtgaagcagatgcaagcgacgactttgaaggcacatatgaagaatggcgtgatcatatgtggagtgacgtagcagcctactttaacctcgacattgaaaacagtgaagataataaatctactctttcacttcaatttgtcgacagcgccgcggatatgccgcttgcgaaaatgcacggtgcgttttcaacgaacgtcgtagcaagcaaagaacttcaacagccaggcagtgcacgaagcacgcgacatcttgaaattgaacttccaaaagaagcttcttatcaagaaggagatcatttaggtgttattcctcgcaactatgaaggaatagtaaaccgtgtaacagcaaggttcggcctaagcgcatcacagcaaatccgtctggaagcagaagaagaaaaattagctcatttgccactcgctaaaacagtatccgtagaagagcttctgcaatacgtggagcttcaagatcctgttacgcgcacgcagcttcgcgcaatggctgctaaaacggtctgcccgccgcataaagtagagcttgaagccttgcttgaaaagcaagcctacaaagaacaagtgctggcaaaacgtttaacaatgcttgaactgcttgaaaaatacccggcgtgtgaaatgaaattcagcgaatttatcgcccttctgccaagcatacgcccgcgctattactcgatttcttcatcacctcgtgtcgatgaaaaacaagcaagcatcacggtcagcgttgtctcaggaccggcgtggagcggatatggagaatataaaggaattgcgtcgaactatcttgccgagctgcaagaaggagatacgattacgtgctttatttccacaccgcagtcagaatttacgctgccaaaagaccctgaaacgccgcttatcatggtcggaccgggaacaggcgtcgcgccgtttagaggctttgtgcaggcgcgcaaacagctaaaagaacaaggacagtcacttggagaagcacatttatacttcggctgccgttcacctcatgaagactatctgtatcaagaagagcttgaaaacgcccaaagcgaaggcatcattacgcttcataccgctttttctcgcatgccaaatcagccgaaaacatacgttcagcacgtaatggaacaagacggcaagaaattgattgaacttcttgatcaaggagcgcacttctatatttgcggagacggaagccaaatggcacctgccgttgaagcaacgcttatgaaaagctatgctgacgttcaccaagtgagtgaagcagacgctcgcttatggctgcagcagctagaagaaaaaggccgatacgcaaaagacgtgtgggctggg

SEQ ID NO: 86 - protein, 1049 aa, synthetic construct
  REGION 1..1049: note = variant of P450 oxidase from Bacillus megaterium
MTIKEMPQPKTFGELKNLPLLNTDKPVQALMRIADELGEIFKFEAPGSVTRYLSSQRLIKEACDESRFDKNLSQALKFARDFAGDGLATSWTHEPNWKKAHNILVPSFSQHAMGRYHAMMVDIAVQLVQKWERLNADEHIEVSEDMTRLTLDTIGLCGFNYRFNSFYRDQPHPFIVSMVRALDEVMNKLQRANPDDPAYDENKRQCQEDIKVMNDYVDKIIADRKARGEQSHDLLTQMLNGKDPETGEPLDDGNIRYQIITFLIAGTETTSGLLSFALYFLVKNPHVLQKVAEEAARVLVDPVPSYKQVKQLKYVGMVLNEALRLWPTAPAFSLYAKEDTVLGGEYPLTKGDEVMVLIPQLHRDKTIWGDDVEEFRPERFENPSAIPQHAFKPFGNGQRACIGQQFALHEATLVLGMMLKHFDFEDHTNYELVIKETLTLKPEGFVVKAKSKGIPLGGIPSPSTEQSAKKVRKKAENAHNTPLLVLYGSNAGTAEGTARDLADIAMSKGFAPQVATLDSHAGNLPREGAVLIVTASYNGHPPDNAKQFVDWLDQASADEVKGVRYSVFGCGDKNWAATYQKVPAFIDETLAAKGAENIADRGEADASDDFEGTYEEWRDHMWSDVAAYFNLDIENSEDNKSTLSLQFVDSAADMPLAKMHGAFSTNVVASKELQQPGSARSTRHLEIELPKEASYQEGDHLGVIPRNYEGIVNRVTARFGLSASQQIRLEAEEEKLAHLPLAKTVSVEELLQYVELQDPVTRTQLRAMAAKTVCPPHKVELEALLEKQAYKEQVLAKRLTMLELLEKYPACEMKFSEFIALLPSIRPRYYSISSSPRVDEKQASITVSVVSGPAWSGYGEYKGIASNYLAELQEGDTITCFISTPQSEFTLPKDPETPLIMVGPGTGVAPFRGFVQARKQLKEQGQSLGEAHLYFGCRSPHEDYLYQEELENAQSEGIITLHTAFSRMPNQPKTYVQHVMEQDGKKLIELLDQGAHFYICGDGSQMAPAVEATLMKSYADVHQVSEADARLWLQQLEEKGRYAKDVWAG

SEQ ID NO: 87 - DNA, 3147 bp, synthetic construct
  misc_feature 1..3147: note = variant of P450 oxidase from Bacillus megaterium
  source 1..3147: mol_type = other DNA
atgacaattaaggaaatgcctcagcctaagacgtttggagaacttaaaaatttaccgttattaaacacagataaaccggttcaagctttgatgcgtattgcggatgaattaggagaaatctttaaattcgaggcgcctggtagcgtaacgcgctatttatcaagtcagcgtctaattaaagaagcatgcgatgaatcacgctttgataaaaacttaagtcaaaagcttaaatttgcacgtgattttgctggagacgggttagccacaagctggacgcatgaaccgaattggaaaaaagcgcataatatcttagttccaagctttagtcagcatgcaatggggcgttatcatgcgatgatggtcgatatcgccgtgcagcttgttcaaaagtgggagcgtctaaatgcagatgagcatattgaagtatcggaagacatgacacgtttaacgcttgatacaattggtctttgcggctttaactatcgctttaacagcttttaccgagatcagcctcatccatttattgtgagtatggtccgtgcactggatgaagtaatgaacaagctgcagcgagcaaatccagacgacccagcttatgatgaaaacaagcgccagtgtcaagaagatatcaaggtgatgaacgactatgtagataaaattattgcagatcgcaaagcaaggggtgaacaaagtcatgatttattaacgcagatgctaaacggaaaagatccagaaacgggtgagccgcttgatgacgggaacattcgttatcaaattattacattcttaattgcgggacacgaaacaacaagtggtcttttatcatttgcgctgtatttcttagtgaaaaatccacatgtattacaaaaagtagcagaagaagcagcacgagttctagtagatcctgttccaagctacaaacaagtcaaacagcttaaatatgtcggcatggtcttaaacgaagcgctgcgcttatggccaactgcgcctgcgttttccctatatgcaaaagaagatacggtgcttggaggagaatatcctttaacgaaaggcgacgaagtaatggttctgattcctcagcttcaccgtgataaaacaatttggggagacgatgtggaggagttccgtccagagcgttttgaaaatccaagtgcgattccgcagcatgcgtttaaaccgtttggaaacggtcagcgtgcgtgtatcggtcagcagttcgctcttcatgaagcaacgctggtacttggtatgatgctaaaacactttgactttgaagatcatacaaactacgagctcgttattaaagaaactttaacgttaaaacctgaaggctttgtggtaaaagcaaaatcgaaaggcattccgcttggcggtattccttcacctagcactgaacagtctgctaaaaaagtacgcaaaaaggcagaaaacgctcataatacgccgctgcttgtgctatacggttcaaatgcgggaacagctgaaggaacggcgcgtgatttagcagatattgcaatgagcaaaggatttgcaccgcaggtcgcaacgcttgattcacacgccggaaatcttccgcgcgaaggagctgtattaattgtaacggcgtcttataacggtcatccgcctgataacgcaaagcaatttgtcgactggttagaccaagcgtctgctgatgaagtaaaaggcgttcgctactccgtatttggatgcggcgataaaaattgggctgcgacgtatcaaaaagtgcctgcttttatcgatgaaacgcttgccgctaaaggggcagaaaacatcgctgaccgcggtgaagcagatgcaagcgacgactttgaaggcacatatgaagaatggcgtgatcatatgtggagtgacgtagcagcctactttaacctcgacattgaaaacagtgaagataataaatctactctttcacttcaatttgtcgacagcgccgcggatatgccgcttgcgaaaatgcacggtgcgttttcaacgaacgtcgtagcaagcaaagaacttcaacagccaggcagtgcacgaagcacgcgacatcttgaaattgaacttccaaaagaagcttcttatcaagaaggagatcatttaggtgttattcctcgcaactatgaaggaatagtaaaccgtgtaacagcaaggttcggcctaagcgcatcacagcaaatccgtctggaagcagaagaagaaaaattagctcatttgccactcgctaaaacagtatccgtagaagagcttctgcaatacgtggagcttcaagatcctgttacgcgcacgcagcttcgcgcaatggctgctaaaacggtctgcccgccgcataaagtagagcttgaagccttgcttgaaaagcaagcctacaaagaacaagtgctggcaaaacgtttaacaatgcttgaactgcttgaaaaatacccggcgtgtgaaatgaaattcagcgaatttatcgcccttctgccaagcatacgcccgcgctattactcgatttcttcatcacctcgtgtcgatgaaaaacaagcaagcatcacggtcagcgttgtctcaggaccggcgtggagcggatatggagaatataaaggaattgcgtcgaactatcttgccgagctgcaagaaggagatacgattacgtgctttatttccacaccgcagtcagaatttacgctgccaaaagaccctgaaacgccgcttatcatggtcggaccgggaacaggcgtcgcgccgtttagaggctttgtgcaggcgcgcaaacagctaaaagaacaaggacagtcacttggagaagcacatttatacttcggctgccgttcacctcatgaagactatctgtatcaagaagagcttgaaaacgcccaaagcgaaggcatcattacgcttcataccgctttttctcgcatgccaaatcagccgaaaacatacgttcagcacgtaatggaacaagacggcaagaaattgattgaacttcttgatcaaggagcgcacttctatatttgcggagacggaagccaaatggcacctgccgttgaagcaacgcttatgaaaagctatgctgacgttcaccaagtgagtgaagcagacgctcgcttatggctgcagcagctagaagaaaaaggccgatacgcaaaagacgtgtgggctggg

SEQ ID NO: 88 - protein, 1049 aa, synthetic construct
  REGION 1..1049: note = variant of P450 oxidase from Bacillus megaterium
MTIKEMPQPKTFGELKNLPLLNTDKPVQALMRIADELGEIFKFEAPGSVTRYLSSQRLIKEACDESRFDKNLSQKLKFARDFAGDGLATSWTHEPNWKKAHNILVPSFSQHAMGRYHAMMVDIAVQLVQKWERLNADEHIEVSEDMTRLTLDTIGLCGFNYRFNSFYRDQPHPFIVSMVRALDEVMNKLQRANPDDPAYDENKRQCQEDIKVMNDYVDKIIADRKARGEQSHDLLTQMLNGKDPETGEPLDDGNIRYQIITFLIAGHETTSGLLSFALYFLVKNPHVLQKVAEEAARVLVDPVPSYKQVKQLKYVGMVLNEALRLWPTAPAFSLYAKEDTVLGGEYPLTKGDEVMVLIPQLHRDKTIWGDDVEEFRPERFENPSAIPQHAFKPFGNGQRACIGQQFALHEATLVLGMMLKHFDFEDHTNYELVIKETLTLKPEGFVVKAKSKGIPLGGIPSPSTEQSAKKVRKKAENAHNTPLLVLYGSNAGTAEGTARDLADIAMSKGFAPQVATLDSHAGNLPREGAVLIVTASYNGHPPDNAKQFVDWLDQASADEVKGVRYSVFGCGDKNWAATYQKVPAFIDETLAAKGAENIADRGEADASDDFEGTYEEWRDHMWSDVAAYFNLDIENSEDNKSTLSLQFVDSAADMPLAKMHGAFSTNVVASKELQQPGSARSTRHLEIELPKEASYQEGDHLGVIPRNYEGIVNRVTARFGLSASQQIRLEAEEEKLAHLPLAKTVSVEELLQYVELQDPVTRTQLRAMAAKTVCPPHKVELEALLEKQAYKEQVLAKRLTMLELLEKYPACEMKFSEFIALLPSIRPRYYSISSSPRVDEKQASITVSVVSGPAWSGYGEYKGIASNYLAELQEGDTITCFISTPQSEFTLPKDPETPLIMVGPGTGVAPFRGFVQARKQLKEQGQSLGEAHLYFGCRSPHEDYLYQEELENAQSEGIITLHTAFSRMPNQPKTYVQHVMEQDGKKLIELLDQGAHFYICGDGSQMAPAVEATLMKSYADVHQVSEADARLWLQQLEEKGRYAKDVWAG

SEQ ID NO: 89 - DNA, 3147 bp, synthetic construct
  misc_feature 1..3147: note = variant of P450 oxidase from Bacillus megaterium
  source 1..3147: mol_type = other DNA
atgacaattaaggaaatgcctcagcctaagacgtttggagaacttaaaaatttaccgttattaaacacagataaaccggttcaagctttgatgcgtattgcggatgaattaggagaaatctttaaattcgaggcgcctggtagcgtaacgcgctatttatcaagtcagcgtctaattaaagaagcatgcgatgaatcacgctttgataaaaacttaagtcaagcgcttaaatttgcacgtgattttgctggagacgggttagccacaagctggacgcatgaaccgaattggaaaaaagcgcataatatcttagttccaagctttagtcagcatgcaatggggcgttatcatgcgatgatggtcgatatcgccgtgcagcttgttcaaaagtgggagcgtctaaatgcagatgagcatattgaagtatcggaagacatgacacgtttaacgcttgatacaattggtctttgcggctttaactatcgctttaacagcttttaccgagatcagcctcatccatttattgtgagtatggtccgtgcactggatgaagtaatgaacaagctgcagcgagcaaatccagacgacccagcttatgatgaaaacaagcgccagtgtcaagaagatatcaaggtgatgaacgactatgtagataaaattattgcagatcgcaaagcaaggggtgaacaaagtcatgatttattaacgcagatgctaaacggaaaagatccagaaacgggtgagccgcttgatgacgggaacattcgttatcaaattattacattcttaattgcgggacacgaaacaacaagtggtcttttatcatttgcgctgtatttcttagtgaaaaatccacatgtattacaaaaagtagcagaagaagcagcacgagttctagtagatcctgttccaagctacaaacaagtcaaacagcttaaatatgtcggcatggtcttaaacgaagcgctgcgcttatggccaagtgcgcctgcgttttccctatatgcaaaagaagatacggtgcttggaggagaatatcctttaacgaaaggcgacgaagtaatggttctgattcctcagcttcaccgtgataaaacaatttggggagacgatgtggaggagttccgtccagagcgttttgaaaatccaagtgcgattccgcagcatgcgtttaaaccgtttggaaacggtcagcgtgcgtgtatcggtcagcagttcgctcttcatgaagcaacgctggtacttggtatgatgctaaaacactttgactttgaagatcatacaaactacgagctcgttattaaagaaactttaacgttaaaacctgaaggctttgtggtaaaagcaaaatcgaaaggcattccgcttggcggtattccttcacctagcactgaacagtctgctaaaaaagtacgcaaaaaggcagaaaacgctcataatacgccgctgcttgtgctatacggttcaaatgcgggaacagctgaaggaacggcgcgtgatttagcagatattgcaatgagcaaaggatttgcaccgcaggtcgcaacgcttgattcacacgccggaaatcttccgcgcgaaggagctgtattaattgtaacggcgtcttataacggtcatccgcctgataacgcaaagcaatttgtcgactggttagaccaagcgtctgctgatgaagtaaaaggcgttcgctactccgtatttggatgcggcgataaaaattgggctgcgacgtatcaaaaagtgcctgcttttatcgatgaaacgcttgccgctaaaggggcagaaaacatcgctgaccgcggtgaagcagatgcaagcgacgactttgaaggcacatatgaagaatggcgtgatcatatgtggagtgacgtagcagcctactttaacctcgacattgaaaacagtgaagataataaatctactctttcacttcaatttgtcgacagcgccgcggatatgccgcttgcgaaaatgcacggtgcgttttcaacgaacgtcgtagcaagcaaagaacttcaacagccaggcagtgcacgaagcacgcgacatcttgaaattgaacttccaaaagaagcttcttatcaagaaggagatcatttaggtgttattcctcgcaactatgaaggaatagtaaaccgtgtaacagcaaggttcggcctaagcgcatcacagcaaatccgtctggaagcagaagaagaaaaattagctcatttgccactcgctaaaacagtatccgtagaagagcttctgcaatacgtggagcttcaagatcctgttacgcgcacgcagcttcgcgcaatggctgctaaaacggtctgcccgccgcataaagtagagcttgaagccttgcttgaaaagcaagcctacaaagaacaagtgctggcaaaacgtttaacaatgcttgaactgcttgaaaaatacccggcgtgtgaaatgaaattcagcgaatttatcgcccttctgccaagcatacgcccgcgctattactcgatttcttcatcacctcgtgtcgatgaaaaacaagcaagcatcacggtcagcgttgtctcaggaccggcgtggagcggatatggagaatataaaggaattgcgtcgaactatcttgccgagctgcaagaaggagatacgattacgtgctttatttccacaccgcagtcagaatttacgctgccaaaagaccctgaaacgccgcttatcatggtcggaccgggaacaggcgtcgcgccgtttagaggctttgtgcaggcgcgcaaacagctaaaagaacaaggacagtcacttggagaagcacatttatacttcggctgccgttcacctcatgaagactatctgtatcaagaagagcttgaaaacgcccaaagcgaaggcatcattacgcttcataccgctttttctcgcatgccaaatcagccgaaaacatacgttcagcacgtaatggaacaagacggcaagaaattgattgaacttcttgatcaaggagcgcacttctatatttgcggagacggaagccaaatggcacctgccgttgaagcaacgcttatgaaaagctatgctgacgttcaccaagtgagtgaagcagacgctcgcttatggctgcagcagctagaagaaaaaggccgatacgcaaaagacgtgtgggctggg

SEQ ID NO: 90 - protein, 1049 aa, synthetic construct
  REGION 1..1049: note = variant of P450 oxidase from Bacillus megaterium
MTIKEMPQPKTFGELKNLPLLNTDKPVQALMRIADELGEIFKFEAPGSVTRYLSSQRLIKEACDESRFDKNLSQALKFARDFAGDGLATSWTHEPNWKKAHNILVPSFSQHAMGRYHAMMVDIAVQLVQKWERLNADEHIEVSEDMTRLTLDTIGLCGFNYRFNSFYRDQPHPFIVSMVRALDEVMNKLQRANPDDPAYDENKRQCQEDIKVMNDYVDKIIADRKARGEQSHDLLTQMLNGKDPETGEPLDDGNIRYQIITFLIAGHETTSGLLSFALYFLVKNPHVLQKVAEEAARVLVDPVPSYKQVKQLKYVGMVLNEALRLWPSAPAFSLYAKEDTVLGGEYPLTKGDEVMVLIPQLHRDKTIWGDDVEEFRPERFENPSAIPQHAFKPFGNGQRACIGQQFALHEATLVLGMMLKHFDFEDHTNYELVIKETLTLKPEGFVVKAKSKGIPLGGIPSPSTEQSAKKVRKKAENAHNTPLLVLYGSNAGTAEGTARDLADIAMSKGFAPQVATLDSHAGNLPREGAVLIVTASYNGHPPDNAKQFVDWLDQASADEVKGVRYSVFGCGDKNWAATYQKVPAFIDETLAAKGAENIADRGEADASDDFEGTYEEWRDHMWSDVAAYFNLDIENSEDNKSTLSLQFVDSAADMPLAKMHGAFSTNVVASKELQQPGSARSTRHLEIELPKEASYQEGDHLGVIPRNYEGIVNRVTARFGLSASQQIRLEAEEEKLAHLPLAKTVSVEELLQYVELQDPVTRTQLRAMAAKTVCPPHKVELEALLEKQAYKEQVLAKRLTMLELLEKYPACEMKFSEFIALLPSIRPRYYSISSSPRVDEKQASITVSVVSGPAWSGYGEYKGIASNYLAELQEGDTITCFISTPQSEFTLPKDPETPLIMVGPGTGVAPFRGFVQARKQLKEQGQSLGEAHLYFGCRSPHEDYLYQEELENAQSEGIITLHTAFSRMPNQPKTYVQHVMEQDGKKLIELLDQGAHFYICGDGSQMAPAVEATLMKSYADVHQVSEADARLWLQQLEEKGRYAKDVWAG

SEQ ID NO: 91 - DNA, 3147 bp, synthetic construct
  misc_feature 1..3147: note = variant of P450 oxidase from Bacillus megaterium
  source 1..3147: mol_type = other DNA
atgacaattaaggaaatgcctcagcctaagacgtttggagaacttaaaaatttaccgttattaaacacagataaaccggttcaagctttgatgcgtattgcggatgaattaggagaaatctttaaattcgaggcgcctggtagcgtaacgcgctatttatcaagtcagcgtctaattaaagaagcatgcgatgaatcacgctttgataaaaacttaagtcaagcgcttaaatttgcacgtgattttgctggagacgggttagccacaagctggacgcatgaaccgaattggaaaaaagcgcataatatcttagttccaagctttagtcagcatgcaatggggcgttatcatgcgatgatggtcgatatcgccgtgcagcttgttcaaaagtgggagcgtctaaatgcagatgagcatattgaagtatcggaagacatgacacgtttaacgcttgatacaattggtctttgcggctttaactatcgctttaacagcttttaccgagatcagcctcatccatttattgtgagtatggtccgtgcactggatgaagtaatgaacaagctgcagcgagcaaatccagacgacccagcttatgatgaaaacaagcgccagtgtcaagaagatatcaaggtgatgaacgactatgtagataaaattattgcagatcgcaaagcaaggggtgaacaaagtcatgatttattaacgcagatgctaaacggaaaagatccagaaacgggtgagccgcttgatgacgggaacattcgttatcaaattattacattcttaattgcgggacacgaaacaacaagtggtcttttatcatttgcgctgtatttcttagtgaaaaatccacatgtattacaaaaagtagcagaagaagcagcacgagttctagtagatcctgttccaagctacaaacaagtcaaacagcttaaatatgtcggcatggtcttaaacgaagcgctgcgcttatggccaactgcgcctacgttttccctatatgcaaaagaagatacggtgcttggaggagaatatcctttaacgaaaggcgacgaagtaatggttctgattcctcagcttcaccgtgataaaacaatttggggagacgatgtggaggagttccgtccagagcgttttgaaaatccaagtgcgattccgcagcatgcgtttaaaccgtttggaaacggtcagcgtgcgtgtatcggtcagcagttcgctcttcatgaagcaacgctggtacttggtatgatgctaaaacactttgactttgaagatcatacaaactacgagctcgttattaaagaaactttaacgttaaaacctgaaggctttgtggtaaaagcaaaatcgaaaggcattccgcttggcggtattccttcacctagcactgaacagtctgctaaaaaagtacgcaaaaaggcagaaaacgctcataatacgccgctgcttgtgctatacggttcaaatgcgggaacagctgaaggaacggcgcgtgatttagcagatattgcaatgagcaaaggatttgcaccgcaggtcgcaacgcttgattcacacgccggaaatcttccgcgcgaaggagctgtattaattgtaacggcgtcttataacggtcatccgcctgataacgcaaagcaatttgtcgactggttagaccaagcgtctgctgatgaagtaaaaggcgttcgctactccgtatttggatgcggcgataaaaattgggctgcgacgtatcaaaaagtgcctgcttttatcgatgaaacgcttgccgctaaaggggcagaaaacatcgctgaccgcggtgaagcagatgcaagcgacgactttgaaggcacatatgaagaatggcgtgatcatatgtggagtgacgtagcagcctactttaacctcgacattgaaaacagtgaagataataaatctactctttcacttcaatttgtcgacagcgccgcggatatgccgcttgcgaaaatgcacggtgcgttttcaacgaacgtcgtagcaagcaaagaacttcaacagccaggcagtgcacgaagcacgcgacatcttgaaattgaacttccaaaagaagcttcttatcaagaaggagatcatttaggtgttattcctcgcaactatgaaggaatagtaaaccgtgtaacagcaaggttcggcctaagcgcatcacagcaaatccgtctggaagcagaagaagaaaaattagctcatttgccactcgctaaaacagtatccgtagaagagcttctgcaatacgtggagcttcaagatcctgttacgcgcacgcagcttcgcgcaatggctgctaaaacggtctgcccgccgcataaagtagagcttgaagccttgcttgaaaagcaagcctacaaagaacaagtgctggcaaaacgtttaacaatgcttgaactgcttgaaaaatacccggcgtgtgaaatgaaattcagcgaatttatcgcccttctgccaagcatacgcccgcgctattactcgatttcttcatcacctcgtgtcgatgaaaaacaagcaagcatcacggtcagcgttgtctcaggaccggcgtggagcggatatggagaatataaaggaattgcgtcgaactatcttgccgagctgcaagaaggagatacgattacgtgctttatttccacaccgcagtcagaatttacgctgccaaaagaccctgaaacgccgcttatcatggtcggaccgggaacaggcgtcgcgccgtttagaggctttgtgcaggcgcgcaaacagctaaaagaacaaggacagtcacttggagaagcacatttatacttcggctgccgttcacctcatgaagactatctgtatcaagaagagcttgaaaacgcccaaagcgaaggcatcattacgcttcataccgctttttctcgcatgccaaatcagccgaaaacatacgttcagcacgtaatggaacaagacggcaagaaattgattgaacttcttgatcaaggagcgcacttctatatttgcggagacggaagccaaatggcacctgccgttgaagcaacgcttatgaaaagctatgctgacgttcaccaagtgagtgaagcagacgctcgcttatggctgcagcagctagaagaaaaaggccgatacgcaaaagacgtgtgggctggg

SEQ ID NO: 92 - protein, 1049 aa, synthetic construct
  REGION 1..1049: note = variant of P450 oxidase from Bacillus megaterium
MTIKEMPQPKTFGELKNLPLLNTDKPVQALMRIADELGEIFKFEAPGSVTRYLSSQRLIKEACDESRFDKNLSQALKFARDFAGDGLATSWTHEPNWKKAHNILVPSFSQHAMGRYHAMMVDIAVQLVQKWERLNADEHIEVSEDMTRLTLDTIGLCGFNYRFNSFYRDQPHPFIVSMVRALDEVMNKLQRANPDDPAYDENKRQCQEDIKVMNDYVDKIIADRKARGEQSHDLLTQMLNGKDPETGEPLDDGNIRYQIITFLIAGHETTSGLLSFALYFLVKNPHVLQKVAEEAARVLVDPVPSYKQVKQLKYVGMVLNEALRLWPTAPTFSLYAKEDTVLGGEYPLTKGDEVMVLIPQLHRDKTIWGDDVEEFRPERFENPSAIPQHAFKPFGNGQRACIGQQFALHEATLVLGMMLKHFDFEDHTNYELVIKETLTLKPEGFVVKAKSKGIPLGGIPSPSTEQSAKKVRKKAENAHNTPLLVLYGSNAGTAEGTARDLADIAMSKGFAPQVATLDSHAGNLPREGAVLIVTASYNGHPPDNAKQFVDWLDQASADEVKGVRYSVFGCGDKNWAATYQKVPAFIDETLAAKGAENIADRGEADASDDFEGTYEEWRDHMWSDVAAYFNLDIENSEDNKSTLSLQFVDSAADMPLAKMHGAFSTNVVASKELQQPGSARSTRHLEIELPKEASYQEGDHLGVIPRNYEGIVNRVTARFGLSASQQIRLEAEEEKLAHLPLAKTVSVEELLQYVELQDPVTRTQLRAMAAKTVCPPHKVELEALLEKQAYKEQVLAKRLTMLELLEKYPACEMKFSEFIALLPSIRPRYYSISSSPRVDEKQASITVSVVSGPAWSGYGEYKGIASNYLAELQEGDTITCFISTPQSEFTLPKDPETPLIMVGPGTGVAPFRGFVQARKQLKEQGQSLGEAHLYFGCRSPHEDYLYQEELENAQSEGIITLHTAFSRMPNQPKTYVQHVMEQDGKKLIELLDQGAHFYICGDGSQMAPAVEATLMKSYADVHQVSEADARLWLQQLEEKGRYAKDVWAG

SEQ ID NO: 93 - DNA, 3147 bp, synthetic construct
  misc_feature 1..3147: note = variant of P450 oxidase from Bacillus megaterium
  source 1..3147: mol_type = other DNA
atgacaattaaggaaatgcctcagcctaagacgtttggagaacttaaaaatttaccgttattaaacacagataaaccggttcaagctttgatgcgtattgcggatgaattaggagaaatctttaaattcgaggcgcctggtagcgtaacgcgctatttatcaagtcagcgtctaattaaagaagcatgcgatgaatcacgctttgataaaaacttaagtcaagcgcttaaatttgcacgtgattttgctggagacgggttagccacaagctggacgcatgaaccgaattggaaaaaagcgcataatatcttagttccaagctttagtcagcatgcaatggggcgttatcatgcgatgatggtcgatatcgccgtgcagcttgttcaaaagtgggagcgtctaaatgcagatgagcatattgaagtatcggaagacatgacacgtttaacgcttgatacaattggtctttgcggctttaactatcgctttaacagcttttaccgagatcagcctcatccatttattgtgagtatggtccgtgcactggatgaagtaatgaacaagggtcagcgagcaaatccagacgacccagcttatgatgaaaacaagcgccagtgtcaagaagatatcaaggtgatgaacgactatgtagataaaattattgcagatcgcaaagcaaggggtgaacaaagtcatgatttattaacgcagatgctaaacggaaaagatccagaaacgggtgagccgcttgatgacgggaacattcgttatcaaattattacattcttaattgcgggacacgaaacaacaagtggtcttttatcatttgcgctgtatttcttagtgaaaaatccacatgtattacaaaaagtagcagaagaagcagcacgagttctagtagatcctgttccaagctacaaacaagtcaaacagcttaaatatgtcggcatggtcttaaacgaagcgctgcgcttatggccaactgcgcctgcgttttccctatatgcaaaagaagatacggtgcttggaggagaatatcctttaacgaaaggcgacgaagtaatggttctgattcctcagcttcaccgtgataaaacaatttggggagacgatgtggaggagttccgtccagagcgttttgaaaatccaagtgcgattccgcagcatgcgtttaaaccgtttggaaacggtcagcgtgcgtgtatcggtcagcagttcgctcttcatgaagcaacgctggtacttggtatgatgctaaaacactttgactttgaagatcatacaaactacgagctcgttattaaagaaactttaacgttaaaacctgaaggctttgtggtaaaagcaaaatcgaaaggcattccgcttggcggtattccttcacctagcactgaacagtctgctaaaaaagtacgcaaaaaggcagaaaacgctcataatacgccgctgcttgtgctatacggttcaaatgcgggaacagctgaaggaacggcgcgtgatttagcagatattgcaatgagcaaaggatttgcaccgcaggtcgcaacgcttgattcacacgccggaaatcttccgcgcgaaggagctgtattaattgtaacggcgtcttataacggtcatccgcctgataacgcaaagcaatttgtcgactggttagaccaagcgtctgctgatgaagtaaaaggcgttcgctactccgtatttggatgcggcgataaaaattgggctgcgacgtatcaaaaagtgcctgcttttatcgatgaaacgcttgccgctaaaggggcagaaaacatcgctgaccgcggtgaagcagatgcaagcgacgactttgaaggcacatatgaagaatggcgtgatcatatgtggagtgacgtagcagcctactttaacctcgacattgaaaacagtgaagataataaatctactctttcacttcaatttgtcgacagcgccgcggatatgccgcttgcgaaaatgcacggtgcgttttcaacgaacgtcgtagcaagcaaagaacttcaacagccaggcagtgcacgaagcacgcgacatcttgaaattgaacttccaaaagaagcttcttatcaagaaggagatcatttaggtgttattcctcgcaactatgaaggaatagtaaaccgtgtaacagcaaggttcggcctaagcgcatcacagcaaatccgtctggaagcagaagaagaaaaattagctcatttgccactcgctaaaacagtatccgtagaagagcttctgcaatacgtggagcttcaagatcctgttacgcgcacgcagcttcgcgcaatggctgctaaaacggtctgcccgccgcataaagtagagcttgaagccttgcttgaaaagcaagcctacaaagaacaagtgctggcaaaacgtttaacaatgcttgaactgcttgaaaaatacccggcgtgtgaaatgaaattcagcgaatttatcgcccttctgccaagcatacgcccgcgctattactcgatttcttcatcacctcgtgtcgatgaaaaacaagcaagcatcacggtcagcgttgtctcaggaccggcgtggagcggatatggagaatataaaggaattgcgtcgaactatcttgccgagctgcaagaaggagatacgattacgtgctttatttccacaccgcagtcagaatttacgctgccaaaagaccctgaaacgccgcttatcatggtcggaccgggaacaggcgtcgcgccgtttagaggctttgtgcaggcgcgcaaacagctaaaagaacaaggacagtcacttggagaagcacatttatacttcggctgccgttcacctcatgaagactatctgtatcaagaagagcttgaaaacgcccaaagcgaaggcatcattacgcttcataccgctttttctcgcatgccaaatcagccgaaaacatacgttcagcacgtaatggaacaagacggcaagaaattgattgaacttcttgatcaaggagcgcacttctatatttgcggagacggaagccaaatggcacctgccgttgaagcaacgcttatgaaaagctatgctgacgttcaccaagtgagtgaagcagacgctcgcttatggctgcagcagctagaagaaaaaggccgatacgcaaaagacgtgtgggctggg

SEQ ID NO: 94 - protein, 1049 aa, synthetic construct
  REGION 1..1049: note = variant of P450 oxidase from Bacillus megaterium
MTIKEMPQPKTFGELKNLPLLNTDKPVQALMRIADELGEIFKFEAPGSVTRYLSSQRLIKEACDESRFDKNLSQALKFARDFAGDGLATSWTHEPNWKKAHNILVPSFSQHAMGRYHAMMVDIAVQLVQKWERLNADEHIEVSEDMTRLTLDTIGLCGFNYRFNSFYRDQPHPFIVSMVRALDEVMNKGQRANPDDPAYDENKRQCQEDIKVMNDYVDKIIADRKARGEQSHDLLTQMLNGKDPETGEPLDDGNIRYQIITFLIAGHETTSGLLSFALYFLVKNPHVLQKVAEEAARVLVDPVPSYKQVKQLKYVGMVLNEALRLWPTAPAFSLYAKEDTVLGGEYPLTKGDEVMVLIPQLHRDKTIWGDDVEEFRPERFENPSAIPQHAFKPFGNGQRACIGQQFALHEATLVLGMMLKHFDFEDHTNYELVIKETLTLKPEGFVVKAKSKGIPLGGIPSPSTEQSAKKVRKKAENAHNTPLLVLYGSNAGTAEGTARDLADIAMSKGFAPQVATLDSHAGNLPREGAVLIVTASYNGHPPDNAKQFVDWLDQASADEVKGVRYSVFGCGDKNWAATYQKVPAFIDETLAAKGAENIADRGEADASDDFEGTYEEWRDHMWSDVAAYFNLDIENSEDNKSTLSLQFVDSAADMPLAKMHGAFSTNVVASKELQQPGSARSTRHLEIELPKEASYQEGDHLGVIPRNYEGIVNRVTARFGLSASQQIRLEAEEEKLAHLPLAKTVSVEELLQYVELQDPVTRTQLRAMAAKTVCPPHKVELEALLEKQAYKEQVLAKRLTMLELLEKYPACEMKFSEFIALLPSIRPRYYSISSSPRVDEKQASITVSVVSGPAWSGYGEYKGIASNYLAELQEGDTITCFISTPQSEFTLPKDPETPLIMVGPGTGVAPFRGFVQARKQLKEQGQSLGEAHLYFGCRSPHEDYLYQEELENAQSEGIITLHTAFSRMPNQPKTYVQHVMEQDGKKLIELLDQGAHFYICGDGSQMAPAVEATLMKSYADVHQVSEADARLWLQQLEEKGRYAKDVWAG

SEQ ID NO: 95 - DNA, 3147 bp, synthetic construct
  misc_feature 1..3147: note = variant of P450 oxidase from Bacillus megaterium
  source 1..3147: mol_type = other DNA
atgacaattaaggaaatgcctcagcctaagacgtttggagaacttaaaaatttaccgttattaaacacagataaaccggttcaagctttgatgcgtattgcggatgaattaggagaaatctttaaattcgaggcgcctggtagcgtaacgcgctatttatcaagtcagcgtctaattaaagaagcatgcgatgaatcacgctttgataaaaacttaagtcaagcgcttaaatttgcacgtgattttgctggagacgggttagccacaagctggacgcatgaaccgaattggaaaaaagcgcataatatcttagttccaagctttagtcagcatgcaatggggcgttatcatgcgatgatggtcgatatcgccgtgcagcttgttcaaaagtgggagcgtctaaatgcagatgagcatattgaagtatcggaagacatgacacgtttaacgcttgatacaattggtctttgcggctttaactatcgctttaacagcttttaccgagatcagcctcatccatttattgtgagtatggtccgtgtgctggatgaagtaatgaacaagctgcagcgagcaaatccagacgacccagcttatgatgaaaacaagcgccagtgtcaagaagatatcaaggtgatgaacgactatgtagataaaattattgcagatcgcaaagcaaggggtgaacaaagtcatgatttattaacgcagatgctaaacggaaaagatccagaaacgggtgagccgcttgatgacgggaacattcgttatcaaattattacattcttaattgcgggacacgaaacaacaagtggtcttttatcatttgcgctgtatttcttagtgaaaaatccacatgtattacaaaaagtagcagaagaagcagcacgagttctagtagatcctgttccaagctacaaacaagtcaaacagcttaaatatgtcggcatggtcttaaacgaagcgctgcgcttatggccaactgcgcctgcgttttccctatatgcaaaagaagatacggtgcttggaggagaatatcctttaacgaaaggcgacgaagtaatggttctgattcctcagcttcaccgtgataaaacaatttggggagacgatgtggaggagttccgtccagagcgttttgaaaatccaagtgcgattccgcagcatgcgtttaaaccgtttggaaacggtcagcgtgcgtgtatcggtcagcagttcgctcttcatgaagcaacgctggtacttggtatgatgctaaaacactttgactttgaagatcatacaaactacgagctcgttattaaagaaactttaacgttaaaacctgaaggctttgtggtaaaagcaaaatcgaaaggcattccgcttggcggtattccttcacctagcactgaacagtctgctaaaaaagtacgcaaaaaggcagaaaacgctcataatacgccgctgcttgtgctatacggttcaaatgcgggaacagctgaaggaacggcgcgtgatttagcagatattgcaatgagcaaaggatttgcaccgcaggtcgcaacgcttgattcacacgccggaaatcttccgcgcgaaggagctgtattaattgtaacggcgtcttataacggtcatccgcctgataacgcaaagcaatttgtcgactggttagaccaagcgtctgctgatgaagtaaaaggcgttcgctactccgtatttggatgcggcgataaaaattgggctgcgacgtatcaaaaagtgcctgcttttatcgatgaaacgcttgccgctaaaggggcagaaaacatcgctgaccgcggtgaagcagatgcaagcgacgactttgaaggcacatatgaagaatggcgtgatcatatgtggagtgacgtagcagcctactttaacctcgacattgaaaacagtgaagataataaatctactctttcacttcaatttgtcgacagcgccgcggatatgccgcttgcgaaaatgcacggtgcgttttcaacgaacgtcgtagcaagcaaagaacttcaacagccaggcagtgcacgaagcacgcgacatcttgaaattgaacttccaaaagaagcttcttatcaagaaggagatcatttaggtgttattcctcgcaactatgaaggaatagtaaaccgtgtaacagcaaggttcggcctaagcgcatcacagcaaatccgtctggaagcagaagaagaaaaattagctcatttgccactcgctaaaacagtatccgtagaagagcttctgcaatacgtggagcttcaagatcctgttacgcgcacgcagcttcgcgcaatggctgctaaaacggtctgcccgccgcataaagtagagcttgaagccttgcttgaaaagcaagcctacaaagaacaagtgctggcaaaacgtttaacaatgcttgaactgcttgaaaaatacccggcgtgtgaaatgaaattcagcgaatttatcgcccttctgccaagcatacgcccgcgctattactcgatttcttcatcacctcgtgtcgatgaaaaacaagcaagcatcacggtcagcgttgtctcaggaccggcgtggagcggatatggagaatataaaggaattgcgtcgaactatcttgccgagctgcaagaaggagatacgattacgtgctttatttccacaccgcagtcagaatttacgctgccaaaagaccctgaaacgccgcttatcatggtcggaccgggaacaggcgtcgcgccgtttagaggctttgtgcaggcgcgcaaacagctaaaagaacaaggacagtcacttggagaagcacatttatacttcggctgccgttcacctcatgaagactatctgtatcaagaagagcttgaaaacgcccaaagcgaaggcatcattacgcttcataccgctttttctcgcatgccaaatcagccgaaaacatacgttcagcacgtaatggaacaagacggcaagaaattgattgaacttcttgatcaaggagcgcacttctatatttgcggagacggaagccaaatggcacctgccgttgaagcaacgcttatgaaaagctatgctgacgttcaccaagtgagtgaagcagacgctcgcttatggctgcagcagctagaagaaaaaggccgatacgcaaaagacgtgtgggctggg

SEQ ID NO: 96 - protein, 1049 aa, synthetic construct
  REGION 1..1049: note = variant of P450 oxidase from Bacillus megaterium
MTIKEMPQPKTFGELKNLPLLNTDKPVQALMRIADELGEIFKFEAPGSVTRYLSSQRLIKEACDESRFDKNLSQALKFARDFAGDGLATSWTHEPNWKKAHNILVPSFSQHAMGRYHAMMVDIAVQLVQKWERLNADEHIEVSEDMTRLTLDTIGLCGFNYRFNSFYRDQPHPFIVSMVRVLDEVMNKLQRANPDDPAYDENKRQCQEDIKVMNDYVDKIIADRKARGEQSHDLLTQMLNGKDPETGEPLDDGNIRYQIITFLIAGHETTSGLLSFALYFLVKNPHVLQKVAEEAARVLVDPVPSYKQVKQLKYVGMVLNEALRLWPTAPAFSLYAKEDTVLGGEYPLTKGDEVMVLIPQLHRDKTIWGDDVEEFRPERFENPSAIPQHAFKPFGNGQRACIGQQFALHEATLVLGMMLKHFDFEDHTNYELVIKETLTLKPEGFVVKAKSKGIPLGGIPSPSTEQSAKKVRKKAENAHNTPLLVLYGSNAGTAEGTARDLADIAMSKGFAPQVATLDSHAGNLPREGAVLIVTASYNGHPPDNAKQFVDWLDQASADEVKGVRYSVFGCGDKNWAATYQKVPAFIDETLAAKGAENIADRGEADASDDFEGTYEEWRDHMWSDVAAYFNLDIENSEDNKSTLSLQFVDSAADMPLAKMHGAFSTNVVASKELQQPGSARSTRHLEIELPKEASYQEGDHLGVIPRNYEGIVNRVTARFGLSASQQIRLEAEEEKLAHLPLAKTVSVEELLQYVELQDPVTRTQLRAMAAKTVCPPHKVELEALLEKQAYKEQVLAKRLTMLELLEKYPACEMKFSEFIALLPSIRPRYYSISSSPRVDEKQASITVSVVSGPAWSGYGEYKGIASNYLAELQEGDTITCFISTPQSEFTLPKDPETPLIMVGPGTGVAPFRGFVQARKQLKEQGQSLGEAHLYFGCRSPHEDYLYQEELENAQSEGIITLHTAFSRMPNQPKTYVQHVMEQDGKKLIELLDQGAHFYICGDGSQMAPAVEATLMKSYADVHQVSEADARLWLQQLEEKGRYAKDVWAG

SEQ ID NO: 97 - DNA, 3147 bp, synthetic construct
  misc_feature 1..3147: note = variant of P450 oxidase from Bacillus megaterium
  source 1..3147: mol_type = other DNA
atgacaattaaggaaatgcctcagcctaagacgtttggagaacttaaaaatttaccgttattaaacacagataaaccggttcaagctttgatgcgtattgcggatgaattaggagaaatctttaaattcgaggcgcctggtagcgtaacgcgctatttatcaagtcagcgtctaattaaagaagcatgcgatgaatcacgctttgataaaaacttaagtcaagcgcttaaatttgcacgtgattttgctggagacgggttagccacaagctggacgcatgaaccgaattggaaaaaagcgcataatatcttagttccaagctttagtcagcatgcaatggggcgttatcatgcgatgatggtcgatatcgccgtgcagcttgttcaaaagtgggagcgtctaaatgcagatgagcatattgaagtatcggaagacatgacacgtttaacgcttgatacaattggtctttgcggctttaactatcgctttaacagcttttaccgagatcagcctcatccatttattgtgagtatggtccgtgcactggatgaagtaatgaacaagctgcagcgagcaaatccagacgacccagcttatgatgaaaacaagcgccagtgtcaagaagatatcaaggtgatgaacgactatgtagataaaattattgcagatcgcaaagcaaggggtgaacaaagtcatgatttattaacgcagatgctaaacggaaaagatccagaaacgggtgagccgcttgatgacgggaacattcgttatcaaattattacattcttaattgcgggacacgaaacaacaagtggtcttttatcatttgcgctgtatttcttagtgaaaaatccacatgtattacaaaaagtagcagaagaagcagcacgagttctagtagatcctgttccaagctacaaacaagtcaaacagcttaaatatgtcggcatggtcttaaacgaagcgctgcgcttatggccaactgcgcctatgttttccctatatgcaaaagaagatacggtgcttggaggagaatatcctttaacgaaaggcgacgaagtaatggttctgattcctcagcttcaccgtgataaaacaatttggggagacgatgtggaggagttccgtccagagcgttttgaaaatccaagtgcgattccgcagcatgcgtttaaaccgtttggaaacggtcagcgtgcgtgtatcggtcagcagttcgctcttcatgaagcaacgctggtacttggtatgatgctaaaacactttgactttgaagatcatacaaactacgagctcgttattaaagaaactttaacgttaaaacctgaaggctttgtggtaaaagcaaaatcgaaaggcattccgcttggcggtattccttcacctagcactgaacagtctgctaaaaaagtacgcaaaaaggcagaaaacgctcataatacgccgctgcttgtgctatacggttcaaatgcgggaacagctgaaggaacggcgcgtgatttagcagatattgcaatgagcaaaggatttgcaccgcaggtcgcaacgcttgattcacacgccggaaatcttccgcgcgaaggagctgtattaattgtaacggcgtcttataacggtcatccgcctgataacgcaaagcaatttgtcgactggttagaccaagcgtctgctgatgaagtaaaaggcgttcgctactccgtatttggatgcggcgataaaaattgggctgcgacgtatcaaaaagtgcctgcttttatcgatgaaacgcttgccgctaaaggggcagaaaacatcgctgaccgcggtgaagcagatgcaagcgacgactttgaaggcacatatgaagaatggcgtgatcatatgtggagtgacgtagcagcctactttaacctcgacattgaaaacagtgaagataataaatctactctttcacttcaatttgtcgacagcgccgcggatatgccgcttgcgaaaatgcacggtgcgttttcaacgaacgtcgtagcaagcaaagaacttcaacagccaggcagtgcacgaagcacgcgacatcttgaaattgaacttccaaaagaagcttcttatcaagaaggagatcatttaggtgttattcctcgcaactatgaaggaatagtaaaccgtgtaacagcaaggttcggcctaagcgcatcacagcaaatccgtctggaagcagaagaagaaaaattagctcatttgccactcgctaaaacagtatccgtagaagagcttctgcaatacgtggagcttcaagatcctgttacgcgcacgcagcttcgcgcaatggctgctaaaacggtctgcccgccgcataaagtagagcttgaagccttgcttgaaaagcaagcctacaaagaacaagtgctggcaaaacgtttaacaatgcttgaactgcttgaaaaatacccggcgtgtgaaatgaaattcagcgaatttatcgcccttctgccaagcatacgcccgcgctattactcgatttcttcatcacctcgtgtcgatgaaaaacaagcaagcatcacggtcagcgttgtctcaggaccggcgtggagcggatatggagaatataaaggaattgcgtcgaactatcttgccgagctgcaagaaggagatacgattacgtgctttatttccacaccgcagtcagaatttacgctgccaaaagaccctgaaacgccgcttatcatggtcggaccgggaacaggcgtcgcgccgtttagaggctttgtgcaggcgcgcaaacagctaaaagaacaaggacagtcacttggagaagcacatttatacttcggctgccgttcacctcatgaagactatctgtatcaagaagagcttgaaaacgcccaaagcgaaggcatcattacgcttcataccgctttttctcgcatgccaaatcagccgaaaacatacgttcagcacgtaatggaacaagacggcaagaaattgattgaacttcttgatcaaggagcgcacttctatatttgcggagacggaagccaaatggcacctgccgttgaagcaacgcttatgaaaagctatgctgacgttcaccaagtgagtgaagcagacgctcgcttatggctgcagcagctagaagaaaaaggccgatacgcaaaagacgtgtgggctggg

SEQ ID NO: 98 - protein, 1049 aa, synthetic construct
  REGION 1..1049: note = variant of P450 oxidase from Bacillus megaterium
MTIKEMPQPKTFGELKNLPLLNTDKPVQALMRIADELGEIFKFEAPGSVTRYLSSQRLIKEACDESRFDKNLSQALKFARDFAGDGLATSWTHEPNWKKAHNILVPSFSQHAMGRYHAMMVDIAVQLVQKWERLNADEHIEVSEDMTRLTLDTIGLCGFNYRFNSFYRDQPHPFIVSMVRALDEVMNKLQRANPDDPAYDENKRQCQEDIKVMNDYVDKIIADRKARGEQSHDLLTQMLNGKDPETGEPLDDGNIRYQIITFLIAGHETTSGLLSFALYFLVKNPHVLQKVAEEAARVLVDPVPSYKQVKQLKYVGMVLNEALRLWPTAPMFSLYAKEDTVLGGEYPLTKGDEVMVLIPQLHRDKTIWGDDVEEFRPERFENPSAIPQHAFKPFGNGQRACIGQQFALHEATLVLGMMLKHFDFEDHTNYELVIKETLTLKPEGFVVKAKSKGIPLGGIPSPSTEQSAKKVRKKAENAHNTPLLVLYGSNAGTAEGTARDLADIAMSKGFAPQVATLDSHAGNLPREGAVLIVTASYNGHPPDNAKQFVDWLDQASADEVKGVRYSVFGCGDKNWAATYQKVPAFIDETLAAKGAENIADRGEADASDDFEGTYEEWRDHMWSDVAAYFNLDIENSEDNKSTLSLQFVDSAADMPLAKMHGAFSTNVVASKELQQPGSARSTRHLEIELPKEASYQEGDHLGVIPRNYEGIVNRVTARFGLSASQQIRLEAEEEKLAHLPLAKTVSVEELLQYVELQDPVTRTQLRAMAAKTVCPPHKVELEALLEKQAYKEQVLAKRLTMLELLEKYPACEMKFSEFIALLPSIRPRYYSISSSPRVDEKQASITVSVVSGPAWSGYGEYKGIASNYLAELQEGDTITCFISTPQSEFTLPKDPETPLIMVGPGTGVAPFRGFVQARKQLKEQGQSLGEAHLYFGCRSPHEDYLYQEELENAQSEGIITLHTAFSRMPNQPKTYVQHVMEQDGKKLIELLDQGAHFYICGDGSQMAPAVEATLMKSYADVHQVSEADARLWLQQLEEKGRYAKDVWAG

SEQ ID NO: 99 - DNA, 3147 bp, synthetic construct
  misc_feature 1..3147: note = variant of P450 oxidase from Bacillus megaterium
  source 1..3147: mol_type = other DNA
atgacaattaaggaaatgcctcagcctaagacgtttggagaacttaaaaatttaccgttattaaacacagataaaccggttcaagctttgatgcgtattgcggatgaattaggagaaatctttaaattcgaggcgcctggtagcgtaacgcgctatttatcaagtcagcgtctaattaaagaagcatgcgatgaatcacgctttgataaaaacttaagtcaagcgcttaaatttgcacgtgattttgctggagacgggttagccacaagctggacgcatgaaccgaattggaaaaaagcgcataatatcttagttccaagctttagtcagcatgcaatggggcgttatcatgcgatgatggtcgatatcgccgtgcagcttgttcaaaagtgggagcgtctaaatgcagatgagcatattgaagtatcggaagacatgacacgtttaacgcttgatacaattggtctttgcggctttaactatcgctttaacagcttttaccgagatcagcctcatccatttattgtgagtatggtccgtgcactggatgaagtaatgaacaagctgcagcgagcaaatccagacgacccagcttatgatgaaaacaagcgccagtgtcaagaagatatcaaggtgatgaacgactatgtagataaaattattgcagatcgcaaagcaaggggtgaacaaagtcatgatttattaacgcagctgctaaacggaaaagatccagaaacgggtgagccgcttgatgacgggaacattcgttatcaaattattacattcttaattgcgggacacgaaacaacaagtggtcttttatcatttgcgctgtatttcttagtgaaaaatccacatgtattacaaaaagtagcagaagaagcagcacgagttctagtagatcctgttccaagctacaaacaagtcaaacagcttaaatatgtcggcatggtcttaaacgaagcgctgcgcttatggccaactgcgcctgcgttttccctatatgcaaaagaagatacggtgcttggaggagaatatcctttaacgaaaggcgacgaagtaatggttctgattcctcagcttcaccgtgataaaacaatttggggagacgatgtggaggagttccgtccagagcgttttgaaaatccaagtgcgattccgcagcatgcgtttaaaccgtttggaaacggtcagcgtgcgtgtatcggtcagcagttcgctcttcatgaagcaacgctggtacttggtatgatgctaaaacactttgactttgaagatcatacaaactacgagctcgttattaaagaaactttaacgttaaaacctgaaggctttgtggtaaaagcaaaatcgaaaggcattccgcttggcggtattccttcacctagcactgaacagtctgctaaaaaagtacgcaaaaaggcagaaaacgctcataatacgccgctgcttgtgctatacggttcaaatgcgggaacagctgaaggaacggcgcgtgatttagcagatattgcaatgagcaaaggatttgcaccgcaggtcgcaacgcttgattcacacgccggaaatcttccgcgcgaaggagctgtattaattgtaacggcgtcttataacggtcatccgcctgataacgcaaagcaatttgtcgactggttagaccaagcgtctgctgatgaagtaaaaggcgttcgctactccgtatttggatgcggcgataaaaattgggctgcgacgtatcaaaaagtgcctgcttttatcgatgaaacgcttgccgctaaaggggcagaaaacatcgctgaccgcggtgaagcagatgcaagcgacgactttgaaggcacatatgaagaatggcgtgatcatatgtggagtgacgtagcagcctactttaacctcgacattgaaaacagtgaagataataaatctactctttcacttcaatttgtcgacagcgccgcggatatgccgcttgcgaaaatgcacggtgcgttttcaacgaacgtcgtagcaagcaaagaacttcaacagccaggcagtgcacgaagcacgcgacatcttgaaattgaacttccaaaagaagcttcttatcaagaaggagatcatttaggtgttattcctcgcaactatgaaggaatagtaaaccgtgtaacagcaaggttcggcctaagcgcatcacagcaaatccgtctggaagcagaagaagaaaaattagctcatttgccactcgctaaaacagtatccgtagaagagcttctgcaatacgtggagcttcaagatcctgttacgcgcacgcagcttcgcgcaatggctgctaaaacggtctgcccgccgcataaagtagagcttgaagccttgcttgaaaagcaagcctacaaagaacaagtgctggcaaaacgtttaacaatgcttgaactgcttgaaaaatacccggcgtgtgaaatgaaattcagcgaatttatcgcccttctgccaagcatacgcccgcgctattactcgatttcttcatcacctcgtgtcgatgaaaaacaagcaagcatcacggtcagcgttgtctcaggaccggcgtggagcggatatggagaatataaaggaattgcgtcgaactatcttgccgagctgcaagaaggagatacgattacgtgctttatttccacaccgcagtcagaatttacgctgccaaaagaccctgaaacgccgcttatcatggtcggaccgggaacaggcgtcgcgccgtttagaggctttgtgcaggcgcgcaaacagctaaaagaacaaggacagtcacttggagaagcacatttatacttcggctgccgttcacctcatgaagactatctgtatcaagaagagcttgaaaacgcccaaagcgaaggcatcattacgcttcataccgctttttctcgcatgccaaatcagccgaaaacatacgttcagcacgtaatggaacaagacggcaagaaattgattgaacttcttgatcaaggagcgcacttctatatttgcggagacggaagccaaatggcacctgccgttgaagcaacgcttatgaaaagctatgctgacgttcaccaagtgagtgaagcagacgctcgcttatggctgcagcagctagaagaaaaaggccgatacgcaaaagacgtgtgggctggg

SEQ ID NO: 100 - protein, 1049 aa, synthetic construct
  REGION 1..1049: note = variant of P450 oxidase from Bacillus megaterium
MTIKEMPQPKTFGELKNLPLLNTDKPVQALMRIADELGEIFKFEAPGSVTRYLSSQRLIKEACDESRFDKNLSQALKFARDFAGDGLATSWTHEPNWKKAHNILVPSFSQHAMGRYHAMMVDIAVQLVQKWERLNADEHIEVSEDMTRLTLDTIGLCGFNYRFNSFYRDQPHPFIVSMVRALDEVMNKLQRANPDDPAYDENKRQCQEDIKVMNDYVDKIIADRKARGEQSHDLLTQLLNGKDPETGEPLDDGNIRYQIITFLIAGHETTSGLLSFALYFLVKNPHVLQKVAEEAARVLVDPVPSYKQVKQLKYVGMVLNEALRLWPTAPAFSLYAKEDTVLGGEYPLTKGDEVMVLIPQLHRDKTIWGDDVEEFRPERFENPSAIPQHAFKPFGNGQRACIGQQFALHEATLVLGMMLKHFDFEDHTNYELVIKETLTLKPEGFVVKAKSKGIPLGGIPSPSTEQSAKKVRKKAENAHNTPLLVLYGSNAGTAEGTARDLADIAMSKGFAPQVATLDSHAGNLPREGAVLIVTASYNGHPPDNAKQFVDWLDQASADEVKGVRYSVFGCGDKNWAATYQKVPAFIDETLAAKGAENIADRGEADASDDFEGTYEEWRDHMWSDVAAYFNLDIENSEDNKSTLSLQFVDSAADMPLAKMHGAFSTNVVASKELQQPGSARSTRHLEIELPKEASYQEGDHLGVIPRNYEGIVNRVTARFGLSASQQIRLEAEEEKLAHLPLAKTVSVEELLQYVELQDPVTRTQLRAMAAKTVCPPHKVELEALLEKQAYKEQVLAKRLTMLELLEKYPACEMKFSEFIALLPSIRPRYYSISSSPRVDEKQASITVSVVSGPAWSGYGEYKGIASNYLAELQEGDTITCFISTPQSEFTLPKDPETPLIMVGPGTGVAPFRGFVQARKQLKEQGQSLGEAHLYFGCRSPHEDYLYQEELENAQSEGIITLHTAFSRMPNQPKTYVQHVMEQDGKKLIELLDQGAHFYICGDGSQMAPAVEATLMKSYADVHQVSEADARLWLQQLEEKGRYAKDVWAG

SEQ ID NO: 101 - DNA, 3147 bp, synthetic construct
  misc_feature 1..3147: note = variant of P450 oxidase from Bacillus megaterium
  source 1..3147: mol_type = other DNA
atgacaattaaggaaatgcctcagcctaagacgtttggagaacttaaaaatttaccgttattaaacacagataaaccggttcaagctttgatgcgtattgcggatgaattaggagaaatctttaaattcgaggcgcctggtagcgtaacgcgctatttatcaagtcagcgtctaattaaagaagcatgcgatgaatcacgctttgataaaaacttaagtggtgcgcttaaatttgcacgtgattttgctggagacgggttagccacaagctggacgcatgaaccgaattggaaaaaagcgcataatatcttagttccaagctttagtcagcatgcaatggggcgttatcatgcgatgatggtcgatatcgccgtgcagcttgttcaaaagtgggagcgtctaaatgcagatgagcatattgaagtatcggaagacatgacacgtttaacgcttgatacaattggtctttgcggctttaactatcgctttaacagcttttaccgagatcagcctcatccatttattgtgagtatggtccgtgcactggatgaagtaatgaacaagctgcagcgagcaaatccagacgacccagcttatgatgaaaacaagcgccagtgtcaagaagatatcaaggtgatgaacgactatgtagataaaattattgcagatcgcaaagcaaggggtgaacaaagtcatgatttattaacgcagatgctaaacggaaaagatccagaaacgggtgagccgcttgatgacgggaacattcgttatcaaattattacattcttaattgcgggacacgaaacaacaagtggtcttttatcatttgcgctgtatttcttagtgaaaaatccacatgtattacaaaaagtagcagaagaagcagcacgagttctagtagatcctgttccaagctacaaacaagtcaaacagcttaaatatgtcggcatggtcttaaacgaagcgctgcgcttatggccaactgcgcctgcgttttccctatatgcaaaagaagatacggtgcttggaggagaatatcctttaacgaaaggcgacgaagtaatggttctgattcctcagcttcaccgtgataaaacaatttggggagacgatgtggaggagttccgtccagagcgttttgaaaatccaagtgcgattccgcagcatgcgtttaaaccgtttggaaacggtcagcgtgcgtgtatcggtcagcagttcgctcttcatgaagcaacgctggtacttggtatgatgctaaaacactttgactttgaagatcatacaaactacgagctcgttattaaagaaactttaacgttaaaacctgaaggctttgtggtaaaagcaaaatcgaaaggcattccgcttggcggtattccttcacctagcactgaacagtctgctaaaaaagtacgcaaaaaggcagaaaacgctcataatacgccgctgcttgtgctatacggttcaaatgcgggaacagctgaaggaacggcgcgtgatttagcagatattgcaatgagcaaaggatttgcaccgcaggtcgcaacgcttgattcacacgccggaaatcttccgcgcgaaggagctgtattaattgtaacggcgtcttataacggtcatccgcctgataacgcaaagcaatttgtcgactggttagaccaagcgtctgctgatgaagtaaaaggcgttcgctactccgtatttggatgcggcgataaaaattgggctgcgacgtatcaaaaagtgcctgcttttatcgatgaaacgcttgccgctaaaggggcagaaaacatcgctgaccgcggtgaagcagatgcaagcgacgactttgaaggcacatatgaagaatggcgtgatcatatgtggagtgacgtagcagcctactttaacctcgacattgaaaacagtgaagataataaatctactctttcacttcaatttgtcgacagcgccgcggatatgccgcttgcgaaaatgcacggtgcgttttcaacgaacgtcgtagcaagcaaagaacttcaacagccaggcagtgcacgaagcacgcgacatcttgaaattgaacttccaaaagaagcttcttatcaagaaggagatcatttaggtgttattcctcgcaactatgaaggaatagtaaaccgtgtaacagcaaggttcggcctaagcgcatcacagcaaatccgtctggaagcagaagaagaaaaattagctcatttgccactcgctaaaacagtatccgtagaagagcttctgcaatacgtggagcttcaagatcctgttacgcgcacgcagcttcgcgcaatggctgctaaaacggtctgcccgccgcataaagtagagcttgaagccttgcttgaaaagcaagcctacaaagaacaagtgctggcaaaacgtttaacaatgcttgaactgcttgaaaaatacccggcgtgtgaaatgaaattcagcgaatttatcgcccttctgccaagcatacgcccgcgctattactcgatttcttcatcacctcgtgtcgatgaaaaacaagcaagcatcacggtcagcgttgtctcaggaccggcgtggagcggatatggagaatataaaggaattgcgtcgaactatcttgccgagctgcaagaaggagatacgattacgtgctttatttccacaccgcagtcagaatttacgctgccaaaagaccctgaaacgccgcttatcatggtcggaccgggaacaggcgtcgcgccgtttagaggctttgtgcaggcgcgcaaacagctaaaagaacaaggacagtcacttggagaagcacatttatacttcggctgccgttcacctcatgaagactatctgtatcaagaagagcttgaaaacgcccaaagcgaaggcatcattacgcttcataccgctttttctcgcatgccaaatcagccgaaaacatacgttcagcacgtaatggaacaagacggcaagaaattgattgaacttcttgatcaaggagcgcacttctatatttgcggagacggaagccaaatggcacctgccgttgaagcaacgcttatgaaaagctatgctgacgttcaccaagtgagtgaagcagacgctcgcttatggctgcagcagctagaagaaaaaggccgatacgcaaaagacgtgtgggctggg

SEQ ID NO: 102 - protein, 1049 aa, synthetic construct
  REGION 1..1049: note = variant of P450 oxidase from Bacillus megaterium
MTIKEMPQPKTFGELKNLPLLNTDKPVQALMRIADELGEIFKFEAPGSVTRYLSSQRLIKEACDESRFDKNLSGALKFARDFAGDGLATSWTHEPNWKKAHNILVPSFSQHAMGRYHAMMVDIAVQLVQKWERLNADEHIEVSEDMTRLTLDTIGLCGFNYRFNSFYRDQPHPFIVSMVRALDEVMNKLQRANPDDPAYDENKRQCQEDIKVMNDYVDKIIADRKARGEQSHDLLTQMLNGKDPETGEPLDDGNIRYQIITFLIAGHETTSGLLSFALYFLVKNPHVLQKVAEEAARVLVDPVPSYKQVKQLKYVGMVLNEALRLWPTAPAFSLYAKEDTVLGGEYPLTKGDEVMVLIPQLHRDKTIWGDDVEEFRPERFENPSAIPQHAFKPFGNGQRACIGQQFALHEATLVLGMMLKHFDFEDHTNYELVIKETLTLKPEGFVVKAKSKGIPLGGIPSPSTEQSAKKVRKKAENAHNTPLLVLYGSNAGTAEGTARDLADIAMSKGFAPQVATLDSHAGNLPREGAVLIVTASYNGHPPDNAKQFVDWLDQASADEVKGVRYSVFGCGDKNWAATYQKVPAFIDETLAAKGAENIADRGEADASDDFEGTYEEWRDHMWSDVAAYFNLDIENSEDNKSTLSLQFVDSAADMPLAKMHGAFSTNVVASKELQQPGSARSTRHLEIELPKEASYQEGDHLGVIPRNYEGIVNRVTARFGLSASQQIRLEAEEEKLAHLPLAKTVSVEELLQYVELQDPVTRTQLRAMAAKTVCPPHKVELEALLEKQAYKEQVLAKRLTMLELLEKYPACEMKFSEFIALLPSIRPRYYSISSSPRVDEKQASITVSVVSGPAWSGYGEYKGIASNYLAELQEGDTITCFISTPQSEFTLPKDPETPLIMVGPGTGVAPFRGFVQARKQLKEQGQSLGEAHLYFGCRSPHEDYLYQEELENAQSEGIITLHTAFSRMPNQPKTYVQHVMEQDGKKLIELLDQGAHFYICGDGSQMAPAVEATLMKSYADVHQVSEADARLWLQQLEEKGRYAKDVWAG

SEQ ID NO: 103 - DNA, 3147 bp, synthetic construct
  misc_feature 1..3147: note = variant of P450 oxidase from Bacillus megaterium
  source 1..3147: mol_type = other DNA
atgacaattaaggaaatgcctcagcctaagacgtttggagaacttaaaaatttaccgttattaaacacagataaaccggttcaagctttgatgcgtattgcggatgaattaggagaaatctttaaattcgaggcgcctggtagcgtaacgcgctatttatcaagtcagcgtctaattaaagaagcatgcgatgaatcacgctttgataaaaacttaagtcaagcgcttaaatttgcacgtgattttgctggagacgggttagccacaagctggacgcatgaaccgaattggaaaaaagcgcataatatcttagttccaagctttagtcagcatgcaatggggcgttatcatgcgatgatggtcgatatcgccgtgcagcttgttcaaaagtgggagcgtctaaatgcagatgagcatattgaagtatcggaagacatgacacgtttaacgcttgatacaattggtctttgcggctttaactatcgctttaacagcttttaccgagatcagcctcatccatttattgtgagtatggtccgtgcactggatgaagtaatgaacaagctgcagcgagcaaatccagacgacccagcttatgatgaaaacaagcgccagtgtcaagaagatatcaaggtgatgaacgactatgtagataaaattattgcagatcgcaaagcaaggggtgaacaaagtcatgatttattaacgcagatgctaaacggaaaagatccagaaacgggtgagccgcttgatgacgggaacattcgttatcaaattattacattcttaattgcgggacacgaaacaacaagtggtcttttatcatttgcgctgtatttcttagtgaaaaatccacatgtattacaaaaagtagcagaagaagcagcacgagttctagtagatcctgttccaagctacaaacaagtcaaacagcttaaatatgtcggcatggtcttaaacgaagcgctgcgcttatggccaactgcgcctgcgttttccctatatgcaaaagaagatacggtgcttggaggagaatatcctttaacgaaaggcgacgaagtaatggttctgacgcctcagcttcaccgtgataaaacaatttggggagacgatgtggaggagttccgtccagagcgttttgaaaatccaagtgcgattccgcagcatgcgtttaaaccgtttggaaacggtcagcgtgcgtgtatcggtcagcagttcgctcttcatgaagcaacgctggtacttggtatgatgctaaaacactttgactttgaagatcatacaaactacgagctcgttattaaagaaactttaacgttaaaacctgaaggctttgtggtaaaagcaaaatcgaaaggcattccgcttggcggtattccttcacctagcactgaacagtctgctaaaaaagtacgcaaaaaggcagaaaacgctcataatacgccgctgcttgtgctatacggttcaaatgcgggaacagctgaaggaacggcgcgtgatttagcagatattgcaatgagcaaaggatttgcaccgcaggtcgcaacgcttgattcacacgccggaaatcttccgcgcgaaggagctgtattaattgtaacggcgtcttataacggtcatccgcctgataacgcaaagcaatttgtcgactggttagaccaagcgtctgctgatgaagtaaaaggcgttcgctactccgtatttggatgcggcgataaaaattgggctgcgacgtatcaaaaagtgcctgcttttatcgatgaaacgcttgccgctaaaggggcagaaaacatcgctgaccgcggtgaagcagatgcaagcgacgactttgaaggcacatatgaagaatggcgtgatcatatgtggagtgacgtagcagcctactttaacctcgacattgaaaacagtgaagataataaatctactctttcacttcaatttgtcgacagcgccgcggatatgccgcttgcgaaaatgcacggtgcgttttcaacgaacgtcgtagcaagcaaagaacttcaacagccaggcagtgcacgaagcacgcgacatcttgaaattgaacttccaaaagaagcttcttatcaagaaggagatcatttaggtgttattcctcgcaactatgaaggaatagtaaaccgtgtaacagcaaggttcggcctaagcgcatcacagcaaatccgtctggaagcagaagaagaaaaattagctcatttgccactcgctaaaacagtatccgtagaagagcttctgcaatacgtggagcttcaagatcctgttacgcgcacgcagcttcgcgcaatggctgctaaaacggtctgcccgccgcataaagtagagcttgaagccttgcttgaaaagcaagcctacaaagaacaagtgctggcaaaacgtttaacaatgcttgaactgcttgaaaaatacccggcgtgtgaaatgaaattcagcgaatttatcgcccttctgccaagcatacgcccgcgctattactcgatttcttcatcacctcgtgtcgatgaaaaacaagcaagcatcacggtcagcgttgtctcaggaccggcgtggagcggatatggagaatataaaggaattgcgtcgaactatcttgccgagctgcaagaaggagatacgattacgtgctttatttccacaccgcagtcagaatttacgctgccaaaagaccctgaaacgccgcttatcatggtcggaccgggaacaggcgtcgcgccgtttagaggctttgtgcaggcgcgcaaacagctaaaagaacaaggacagtcacttggagaagcacatttatacttcggctgccgttcacctcatgaagactatctgtatcaagaagagcttgaaaacgcccaaagcgaaggcatcattacgcttcataccgctttttctcgcatgccaaatcagccgaaaacatacgttcagcacgtaatggaacaagacggcaagaaattgattgaacttcttgatcaaggagcgcacttctatatttgcggagacggaagccaaatggcacctgccgttgaagcaacgcttatgaaaagctatgctgacgttcaccaagtgagtgaagcagacgctcgcttatggctgcagcagctagaagaaaaaggccgatacgcaaaagacgtgtgggctggg

SEQ ID NO: 104 - protein, 1049 aa, synthetic construct
  REGION 1..1049: note = variant of P450 oxidase from Bacillus megaterium
MTIKEMPQPKTFGELKNLPLLNTDKPVQALMRIADELGEIFKFEAPGSVTRYLSSQRLIKEACDESRFDKNLSQALKFARDFAGDGLATSWTHEPNWKKAHNILVPSFSQHAMGRYHAMMVDIAVQLVQKWERLNADEHIEVSEDMTRLTLDTIGLCGFNYRFNSFYRDQPHPFIVSMVRALDEVMNKLQRANPDDPAYDENKRQCQEDIKVMNDYVDKIIADRKARGEQSHDLLTQMLNGKDPETGEPLDDGNIRYQIITFLIAGHETTSGLLSFALYFLVKNPHVLQKVAEEAARVLVDPVPSYKQVKQLKYVGMVLNEALRLWPTAPAFSLYAKEDTVLGGEYPLTKGDEVMVLTPQLHRDKTIWGDDVEEFRPERFENPSAIPQHAFKPFGNGQRACIGQQFALHEATLVLGMMLKHFDFEDHTNYELVIKETLTLKPEGFVVKAKSKGIPLGGIPSPSTEQSAKKVRKKAENAHNTPLLVLYGSNAGTAEGTARDLADIAMSKGFAPQVATLDSHAGNLPREGAVLIVTASYNGHPPDNAKQFVDWLDQASADEVKGVRYSVFGCGDKNWAATYQKVPAFIDETLAAKGAENIADRGEADASDDFEGTYEEWRDHMWSDVAAYFNLDIENSEDNKSTLSLQFVDSAADMPLAKMHGAFSTNVVASKELQQPGSARSTRHLEIELPKEASYQEGDHLGVIPRNYEGIVNRVTARFGLSASQQIRLEAEEEKLAHLPLAKTVSVEELLQYVELQDPVTRTQLRAMAAKTVCPPHKVELEALLEKQAYKEQVLAKRLTMLELLEKYPACEMKFSEFIALLPSIRPRYYSISSSPRVDEKQASITVSVVSGPAWSGYGEYKGIASNYLAELQEGDTITCFISTPQSEFTLPKDPETPLIMVGPGTGVAPFRGFVQARKQLKEQGQSLGEAHLYFGCRSPHEDYLYQEELENAQSEGIITLHTAFSRMPNQPKTYVQHVMEQDGKKLIELLDQGAHFYICGDGSQMAPAVEATLMKSYADVHQVSEADARLWLQQLEEKGRYAKDVWAG

SEQ ID NO: 105 - DNA, 3147 bp, synthetic construct
  misc_feature 1..3147: note = variant of P450 oxidase from Bacillus megaterium
  source 1..3147: mol_type = other DNA
atgacaattaaggaaatgcctcagcctaagacgtttggagaacttaaaaatttaccgttattaaacacagataaaccggttcaagctttgatgcgtattgcggatgaattaggagaaatctttaaattcgaggcgcctggtagcgtaacgcgctatttatcaagtcagcgtctaattaaagaagcatgcgatgaatcacgctttgataaaaacttaagtcaagcgcttaaatttgcacgtgattttgctggagacgggttagccacaagctggacgcatgaaccgaattggaaaaaagcgcataatatcttagttccaagctttagtcagcatgcaatggggcgttatcatgcgatgatggtcgatatcgccgtgcagcttgttcaaaagtgggagcgtctaaatgcagatgagcatattgaagtatcggaagacatgacacgtttaacgcttgatacaattggtctttgcggctttaactatcgctttaacagcttttaccgagatcagcctcatccatttattgtgagtatgatgcgtgcactggatgaagtaatgaacaagctgcagcgagcaaatccagacgacccagcttatgatgaaaacaagcgccagtgtcaagaagatatcaaggtgatgaacgactatgtagataaaattattgcagatcgcaaagcaaggggtgaacaaagtcatgatttattaacgcagatgctaaacggaaaagatccagaaacgggtgagccgcttgatgacgggaacattcgttatcaaattattacattcttaattgcgggacacgaaacaacaagtggtcttttatcatttgcgctgtatttcttagtgaaaaatccacatgtattacaaaaagtagcagaagaagcagcacgagttctagtagatcctgttccaagctacaaacaagtcaaacagcttaaatatgtcggcatggtcttaaacgaagcgctgcgcttatggccaactgcgcctgcgttttccctatatgcaaaagaagatacggtgcttggaggagaatatcctttaacgaaaggcgacgaagtaatggttctgattcctcagcttcaccgtgataaaacaatttggggagacgatgtggaggagttccgtccagagcgttttgaaaatccaagtgcgattccgcagcatgcgtttaaaccgtttggaaacggtcagcgtgcgtgtatcggtcagcagttcgctcttcatgaagcaacgctggtacttggtatgatgctaaaacactttgactttgaagatcatacaaactacgagctcgttattaaagaaactttaacgttaaaacctgaaggctttgtggtaaaagcaaaatcgaaaggcattccgcttggcggtattccttcacctagcactgaacagtctgctaaaaaagtacgcaaaaaggcagaaaacgctcataatacgccgctgcttgtgctatacggttcaaatgcgggaacagctgaaggaacggcgcgtgatttagcagatattgcaatgagcaaaggatttgcaccgcaggtcgcaacgcttgattcacacgccggaaatcttccgcgcgaaggagctgtattaattgtaacggcgtcttataacggtcatccgcctgataacgcaaagcaatttgtcgactggttagaccaagcgtctgctgatgaagtaaaaggcgttcgctactccgtatttggatgcggcgataaaaattgggctgcgacgtatcaaaaagtgcctgcttttatcgatgaaacgcttgccgctaaaggggcagaaaacatcgctgaccgcggtgaagcagatgcaagcgacgactttgaaggcacatatgaagaatggcgtgatcatatgtggagtgacgtagcagcctactttaacctcgacattgaaaacagtgaagataataaatctactctttcacttcaatttgtcgacagcgccgcggatatgccgcttgcgaaaatgcacggtgcgttttcaacgaacgtcgtagcaagcaaagaacttcaacagccaggcagtgcacgaagcacgcgacatcttgaaattgaacttccaaaagaagcttcttatcaagaaggagatcatttaggtgttattcctcgcaactatgaaggaatagtaaaccgtgtaacagcaaggttcggcctaagcgcatcacagcaaatccgtctggaagcagaagaagaaaaattagctcatttgccactcgctaaaacagtatccgtagaagagcttctgcaatacgtggagcttcaagatcctgttacgcgcacgcagcttcgcgcaatggctgctaaaacggtctgcccgccgcataaagtagagcttgaagccttgcttgaaaagcaagcctacaaagaacaagtgctggcaaaacgtttaacaatgcttgaactgcttgaaaaatacccggcgtgtgaaatgaaattcagcgaatttatcgcccttctgccaagcatacgcccgcgctattactcgatttcttcatcacctcgtgtcgatgaaaaacaagcaagcatcacggtcagcgttgtctcaggaccggcgtggagcggatatggagaatataaaggaattgcgtcgaactatcttgccgagctgcaagaaggagatacgattacgtgctttatttccacaccgcagtcagaatttacgctgccaaaagaccctgaaacgccgcttatcatggtcggaccgggaacaggcgtcgcgccgtttagaggctttgtgcaggcgcgcaaacagctaaaagaacaaggacagtcacttggagaagcacatttatacttcggctgccgttcacctcatgaagactatctgtatcaagaagagcttgaaaacgcccaaagcgaaggcatcattacgcttcataccgctttttctcgcatgccaaatcagccgaaaacatacgttcagcacgtaatggaacaagacggcaagaaattgattgaacttcttgatcaaggagcgcacttctatatttgcggagacggaagccaaatggcacctgccgttgaagcaacgcttatgaaaagctatgctgacgttcaccaagtgagtgaagcagacgctcgcttatggctgcagcagctagaagaaaaaggccgatacgcaaaagacgtgtgggctggg

SEQ ID NO: 106 - protein, 1049 aa, synthetic construct
  REGION 1..1049: note = variant of P450 oxidase from Bacillus megaterium
MTIKEMPQPKTFGELKNLPLLNTDKPVQALMRIADELGEIFKFEAPGSVTRYLSSQRLIKEACDESRFDKNLSQALKFARDFAGDGLATSWTHEPNWKKAHNILVPSFSQHAMGRYHAMMVDIAVQLVQKWERLNADEHIEVSEDMTRLTLDTIGLCGFNYRFNSFYRDQPHPFIVSMMRALDEVMNKLQRANPDDPAYDENKRQCQEDIKVMNDYVDKIIADRKARGEQSHDLLTQMLNGKDPETGEPLDDGNIRYQIITFLIAGHETTSGLLSFALYFLVKNPHVLQKVAEEAARVLVDPVPSYKQVKQLKYVGMVLNEALRLWPTAPAFSLYAKEDTVLGGEYPLTKGDEVMVLIPQLHRDKTIWGDDVEEFRPERFENPSAIPQHAFKPFGNGQRACIGQQFALHEATLVLGMMLKHFDFEDHTNYELVIKETLTLKPEGFVVKAKSKGIPLGGIPSPSTEQSAKKVRKKAENAHNTPLLVLYGSNAGTAEGTARDLADIAMSKGFAPQVATLDSHAGNLPREGAVLIVTASYNGHPPDNAKQFVDWLDQASADEVKGVRYSVFGCGDKNWAATYQKVPAFIDETLAAKGAENIADRGEADASDDFEGTYEEWRDHMWSDVAAYFNLDIENSEDNKSTLSLQFVDSAADMPLAKMHGAFSTNVVASKELQQPGSARSTRHLEIELPKEASYQEGDHLGVIPRNYEGIVNRVTARFGLSASQQIRLEAEEEKLAHLPLAKTVSVEELLQYVELQDPVTRTQLRAMAAKTVCPPHKVELEALLEKQAYKEQVLAKRLTMLELLEKYPACEMKFSEFIALLPSIRPRYYSISSSPRVDEKQASITVSVVSGPAWSGYGEYKGIASNYLAELQEGDTITCFISTPQSEFTLPKDPETPLIMVGPGTGVAPFRGFVQARKQLKEQGQSLGEAHLYFGCRSPHEDYLYQEELENAQSEGIITLHTAFSRMPNQPKTYVQHVMEQDGKKLIELLDQGAHFYICGDGSQMAPAVEATLMKSYADVHQVSEADARLWLQQLEEKGRYAKDVWAG

SEQ ID NO: 107 - DNA, 3147 bp, synthetic construct
  misc_feature 1..3147: note = variant of P450 oxidase from Bacillus megaterium
  source 1..3147: mol_type = other DNA
atgacaattaaggaaatgcctcagcctaagacgtttggagaacttaaaaatttaccgttattaaacacagataaaccggttcaagctttgatgcgtattgcggatgaattaggagaaatctttaaattcgaggcgcctggtagcgtaacgcgctatttatcaagtcagcgtctaattaaagaagcatgcgatgaatcacgctttgataaaaacttaagtcaagcgcttaaatttgcacgtgattttgctggagacgggttagccacaagctggacgcatgaaccgaattggaaaaaagcgcataatatcttagttccaagctttagtcagcatgcaatggggcgttatcatgcgatgatggtcgatatcgccgtgcagcttgttcaaaagtgggagcgtctaaatgcagatgagcatattgaagtatcggaagacatgacacgtttaacgcttgatacaattggtctttgcggctttaactatcgctttaacagcttttaccgagatcagcctcatccatttattgtgagtatggtccgtgcactggatgaagtaatgaacaagctgcagcgagcaaatccagacgacccagcttatgatgaaaacaagcgccagtgtcaagaagatatcaaggtgatgaacgactatgtagataaaattattgcagatcgcaaagcaaggggtgaacaaagtcatgatttattaacgcagatgctaaacggaaaagatccagaaacgggtgagccgcttgatgacgggaacattcgttatcaaattattacattcttaattgcgggacacgaaacaacaagtggtcttttatcatttgcgctgtatttcttagtgaaaaatccacatgtattacaaaaagtagcagaagaagcagcacgagttctagtagatcctgttccaagctacaaacaagtcaaacagcttaaatatgtcggcatggtcttaaacgaagcgctgcgcttatggccaactgcgcctgcgttttccctatatgcaaaagaagatacggtgcttggaggagaatatcctttaacgaaaggcgacgaagtaatggttctgattcctcagcttcaccgtgataaaacaatttggggagacgatgtggaggagttccgtccagagcgttttgaaaatccaagtgcgattccgcagcatgcgtttaaaccgtttggaaacggtcagcgtgcgtgtatcggtcagcagttcgctcttcatgaagcaacgctggtacttggtatgatgctaaaacactttgactttgaagatcatacaaactacgagctcgttattaaagaatcgttaacgttaaaacctgaaggctttgtggtaaaagcaaaatcgaaaggcattccgcttggcggtattccttcacctagcactgaacagtctgctaaaaaagtacgcaaaaaggcagaaaacgctcataatacgccgctgcttgtgctatacggttcaaatgcgggaacagctgaaggaacggcgcgtgatttagcagatattgcaatgagcaaaggatttgcaccgcaggtcgcaacgcttgattcacacgccggaaatcttccgcgcgaaggagctgtattaattgtaacggcgtcttataacggtcatccgcctgataacgcaaagcaatttgtcgactggttagaccaagcgtctgctgatgaagtaaaaggcgttcgctactccgtatttggatgcggcgataaaaattgggctgcgacgtatcaaaaagtgcctgcttttatcgatgaaacgcttgccgctaaaggggcagaaaacatcgctgaccgcggtgaagcagatgcaagcgacgactttgaaggcacatatgaagaatggcgtgatcatatgtggagtgacgtagcagcctactttaacctcgacattgaaaacagtgaagataataaatctactctttcacttcaatttgtcgacagcgccgcggatatgccgcttgcgaaaatgcacggtgcgttttcaacgaacgtcgtagcaagcaaagaacttcaacagccaggcagtgcacgaagcacgcgacatcttgaaattgaacttccaaaagaagcttcttatcaagaaggagatcatttaggtgttattcctcgcaactatgaaggaatagtaaaccgtgtaacagcaaggttcggcctaagcgcatcacagcaaatccgtctggaagcagaagaagaaaaattagctcatttgccactcgctaaaacagtatccgtagaagagcttctgcaatacgtggagcttcaagatcctgttacgcgcacgcagcttcgcgcaatggctgctaaaacggtctgcccgccgcataaagtagagcttgaagccttgcttgaaaagcaagcctacaaagaacaagtgctggcaaaacgtttaacaatgcttgaactgcttgaaaaatacccggcgtgtgaaatgaaattcagcgaatttatcgcccttctgccaagcatacgcccgcgctattactcgatttcttcatcacctcgtgtcgatgaaaaacaagcaagcatcacggtcagcgttgtctcaggaccggcgtggagcggatatggagaatataaaggaattgcgtcgaactatcttgccgagctgcaagaaggagatacgattacgtgctttatttccacaccgcagtcagaatttacgctgccaaaagaccctgaaacgccgcttatcatggtcggaccgggaacaggcgtcgcgccgtttagaggctttgtgcaggcgcgcaaacagctaaaagaacaaggacagtcacttggagaagcacatttatacttcggctgccgttcacctcatgaagactatctgtatcaagaagagcttgaaaacgcccaaagcgaaggcatcattacgcttcataccgctttttctcgcatgccaaatcagccgaaaacatacgttcagcacgtaatggaacaagacggcaagaaattgattgaacttcttgatcaaggagcgcacttctatatttgcggagacggaagccaaatggcacctgccgttgaagcaacgcttatgaaaagctatgctgacgttcaccaagtgagtgaagcagacgctcgcttatggctgcagcagctagaagaaaaaggccgatacgcaaaagacgtgtgggctggg

SEQ ID NO: 108 - protein, 1049 aa, synthetic construct
  REGION 1..1049: note = variant of P450 oxidase from Bacillus megaterium
MTIKEMPQPKTFGELKNLPLLNTDKPVQALMRIADELGEIFKFEAPGSVTRYLSSQRLIKEACDESRFDKNLSQALKFARDFAGDGLATSWTHEPNWKKAHNILVPSFSQHAMGRYHAMMVDIAVQLVQKWERLNADEHIEVSEDMTRLTLDTIGLCGFNYRFNSFYRDQPHPFIVSMVRALDEVMNKLQRANPDDPAYDENKRQCQEDIKVMNDYVDKIIADRKARGEQSHDLLTQMLNGKDPETGEPLDDGNIRYQIITFLIAGHETTSGLLSFALYFLVKNPHVLQKVAEEAARVLVDPVPSYKQVKQLKYVGMVLNEALRLWPTAPAFSLYAKEDTVLGGEYPLTKGDEVMVLIPQLHRDKTIWGDDVEEFRPERFENPSAIPQHAFKPFGNGQRACIGQQFALHEATLVLGMMLKHFDFEDHTNYELVIKESLTLKPEGFVVKAKSKGIPLGGIPSPSTEQSAKKVRKKAENAHNTPLLVLYGSNAGTAEGTARDLADIAMSKGFAPQVATLDSHAGNLPREGAVLIVTASYNGHPPDNAKQFVDWLDQASADEVKGVRYSVFGCGDKNWAATYQKVPAFIDETLAAKGAENIADRGEADASDDFEGTYEEWRDHMWSDVAAYFNLDIENSEDNKSTLSLQFVDSAADMPLAKMHGAFSTNVVASKELQQPGSARSTRHLEIELPKEASYQEGDHLGVIPRNYEGIVNRVTARFGLSASQQIRLEAEEEKLAHLPLAKTVSVEELLQYVELQDPVTRTQLRAMAAKTVCPPHKVELEALLEKQAYKEQVLAKRLTMLELLEKYPACEMKFSEFIALLPSIRPRYYSISSSPRVDEKQASITVSVVSGPAWSGYGEYKGIASNYLAELQEGDTITCFISTPQSEFTLPKDPETPLIMVGPGTGVAPFRGFVQARKQLKEQGQSLGEAHLYFGCRSPHEDYLYQEELENAQSEGIITLHTAFSRMPNQPKTYVQHVMEQDGKKLIELLDQGAHFYICGDGSQMAPAVEATLMKSYADVHQVSEADARLWLQQLEEKGRYAKDVWAG

SEQ ID NO: 109 - DNA, 3147 bp, synthetic construct
  misc_feature 1..3147: note = variant of P450 oxidase from Bacillus megaterium
  source 1..3147: mol_type = other DNA
atgacaattaaggaaatgcctcagcctaagacgtttggagaacttaaaaatttaccgttattaaacacagataaaccggttcaagctttgatgcgtattgcggatgaattaggagaaatctttaaattcgaggcgcctggtagcgtaacgcgctatttatcaagtcagcgtctaattaaagaagcatgcgatgaatcacgctttgataaaaacttaagtcaagcgcttaaatttgcacgtgattttgtgggagacgggttagccacaagctggacgcatgaaccgaattggaaaaaagcgcataatatcttagttccaagctttagtcagcatgcaatggggcgttatcatgcgatgatggtcgatatcgccgtgcagcttgttcaaaagtgggagcgtctaaatgcagatgagcatattgaagtatcggaagacatgacacgtttaacgcttgatacaattggtctttgcggctttaactatcgctttaacagcttttaccgagatcagcctcatccatttattgtgagtatggtccgtgcactggatgaagtaatgaacaagctgcagcgagcaaatccagacgacccagcttatgatgaaaacaagcgccagtgtcaagaagatatcaaggtgatgaacgactatgtagataaaattattgcagatcgcaaagcaaggggtgaacaaagtcatgatttattaacgcagatgctaaacggaaaagatccagaaacgggtgagccgcttgatgacgggaacattcgttatcaaattattacattcttaattgcgggacacgaaacaacaagtggtcttttatcatttgcgctgtatttcttagtgaaaaatccacatgtattacaaaaagtagcagaagaagcagcacgagttctagtagatcctgttccaagctacaaacaagtcaaacagcttaaatatgtcggcatggtcttaaacgaagcgctgcgcttatggccaactgcgcctgcgttttccctatatgcaaaagaagatacggtgcttggaggagaatatcctttaacgaaaggcgacgaagtaatggttctgattcctcagcttcaccgtgataaaacaatttggggagacgatgtggaggagttccgtccagagcgttttgaaaatccaagtgcgattccgcagcatgcgtttaaaccgtttggaaacggtcagcgtgcgtgtatcggtcagcagttcgctcttcatgaagcaacgctggtacttggtatgatgctaaaacactttgactttgaagatcatacaaactacgagctcgttattaaagaaactttaacgttaaaacctgaaggctttgtggtaaaagcaaaatcgaaaggcattccgcttggcggtattccttcacctagcactgaacagtctgctaaaaaagtacgcaaaaaggcagaaaacgctcataatacgccgctgcttgtgctatacggttcaaatgcgggaacagctgaaggaacggcgcgtgatttagcagatattgcaatgagcaaaggatttgcaccgcaggtcgcaacgcttgattcacacgccggaaatcttccgcgcgaaggagctgtattaattgtaacggcgtcttataacggtcatccgcctgataacgcaaagcaatttgtcgactggttagaccaagcgtctgctgatgaagtaaaaggcgttcgctactccgtatttggatgcggcgataaaaattgggctgcgacgtatcaaaaagtgcctgcttttatcgatgaaacgcttgccgctaaaggggcagaaaacatcgctgaccgcggtgaagcagatgcaagcgacgactttgaaggcacatatgaagaatggcgtgatcatatgtggagtgacgtagcagcctactttaacctcgacattgaaaacagtgaagataataaatctactctttcacttcaatttgtcgacagcgccgcggatatgccgcttgcgaaaatgcacggtgcgttttcaacgaacgtcgtagcaagcaaagaacttcaacagccaggcagtgcacgaagcacgcgacatcttgaaattgaacttccaaaagaagcttcttatcaagaaggagatcatttaggtgttattcctcgcaactatgaaggaatagtaaaccgtgtaacagcaaggttcggcctaagcgcatcacagcaaatccgtctggaagcagaagaagaaaaattagctcatttgccactcgctaaaacagtatccgtagaagagcttctgcaatacgtggagcttcaagatcctgttacgcgcacgcagcttcgcgcaatggctgctaaaacggtctgcccgccgcataaagtagagcttgaagccttgcttgaaaagcaagcctacaaagaacaagtgctggcaaaacgtttaacaatgcttgaactgcttgaaaaatacccggcgtgtgaaatgaaattcagcgaatttatcgcccttctgccaagcatacgcccgcgctattactcgatttcttcatcacctcgtgtcgatgaaaaacaagcaagcatcacggtcagcgttgtctcaggaccggcgtggagcggatatggagaatataaaggaattgcgtcgaactatcttgccgagctgcaagaaggagatacgattacgtgctttatttccacaccgcagtcagaatttacgctgccaaaagaccctgaaacgccgcttatcatggtcggaccgggaacaggcgtcgcgccgtttagaggctttgtgcaggcgcgcaaacagctaaaagaacaaggacagtcacttggagaagcacatttatacttcggctgccgttcacctcatgaagactatctgtatcaagaagagcttgaaaacgcccaaagcgaaggcatcattacgcttcataccgctttttctcgcatgccaaatcagccgaaaacatacgttcagcacgtaatggaacaagacggcaagaaattgattgaacttcttgatcaaggagcgcacttctatatttgcggagacggaagccaaatggcacctgccgttgaagcaacgcttatgaaaagctatgctgacgttcaccaagtgagtgaagcagacgctcgcttatggctgcagcagctagaagaaaaaggccgatacgcaaaagacgtgtgggctggg

SEQ ID NO: 110 - protein, 1049 aa, synthetic construct
  REGION 1..1049: note = variant of P450 oxidase from Bacillus megaterium
MTIKEMPQPKTFGELKNLPLLNTDKPVQALMRIADELGEIFKFEAPGSVTRYLSSQRLIKEACDESRFDKNLSQALKFARDFVGDGLATSWTHEPNWKKAHNILVPSFSQHAMGRYHAMMVDIAVQLVQKWERLNADEHIEVSEDMTRLTLDTIGLCGFNYRFNSFYRDQPHPFIVSMVRALDEVMNKLQRANPDDPAYDENKRQCQEDIKVMNDYVDKIIADRKARGEQSHDLLTQMLNGKDPETGEPLDDGNIRYQIITFLIAGHETTSGLLSFALYFLVKNPHVLQKVAEEAARVLVDPVPSYKQVKQLKYVGMVLNEALRLWPTAPAFSLYAKEDTVLGGEYPLTKGDEVMVLIPQLHRDKTIWGDDVEEFRPERFENPSAIPQHAFKPFGNGQRACIGQQFALHEATLVLGMMLKHFDFEDHTNYELVIKETLTLKPEGFVVKAKSKGIPLGGIPSPSTEQSAKKVRKKAENAHNTPLLVLYGSNAGTAEGTARDLADIAMSKGFAPQVATLDSHAGNLPREGAVLIVTASYNGHPPDNAKQFVDWLDQASADEVKGVRYSVFGCGDKNWAATYQKVPAFIDETLAAKGAENIADRGEADASDDFEGTYEEWRDHMWSDVAAYFNLDIENSEDNKSTLSLQFVDSAADMPLAKMHGAFSTNVVASKELQQPGSARSTRHLEIELPKEASYQEGDHLGVIPRNYEGIVNRVTARFGLSASQQIRLEAEEEKLAHLPLAKTVSVEELLQYVELQDPVTRTQLRAMAAKTVCPPHKVELEALLEKQAYKEQVLAKRLTMLELLEKYPACEMKFSEFIALLPSIRPRYYSISSSPRVDEKQASITVSVVSGPAWSGYGEYKGIASNYLAELQEGDTITCFISTPQSEFTLPKDPETPLIMVGPGTGVAPFRGFVQARKQLKEQGQSLGEAHLYFGCRSPHEDYLYQEELENAQSEGIITLHTAFSRMPNQPKTYVQHVMEQDGKKLIELLDQGAHFYICGDGSQMAPAVEATLMKSYADVHQVSEADARLWLQQLEEKGRYAKDVWAG

SEQ ID NO: 111 - DNA, 3147 bp, synthetic construct
  misc_feature 1..3147: note = variant of P450 oxidase from Bacillus megaterium
  source 1..3147: mol_type = other DNA
atgacaattaaggaaatgcctcagcctaagacgtttggagaacttaaaaatttaccgttattaaacacagataaaccggttcaagctttgatgcgtattgcggatgaattaggagaaatctttaaattcgaggcgcctggtagcgtaacgcgctatttatcaagtcagcgtctaattaaagaagcatgcgatgaatcacgctttgataaaaacttaagtcaagcgcttaaatttgcacgtgattttgctggagacgggttagccacaagctggacgcatgaaccgaattggaaaaaagcgcataatatcttagttccaagctttagtcagcatgcaatggggcgttatcatgcgatgatggtcgatatcgccgtgcagcttgttcaaaagtgggagcgtctaaatgcagatgagcatattgaagtatcggaagacatgacacgtttaacgcttgatacaattggtctttgcggctttaactatcgctttaacagcttttaccgagatcagcctcatccatttattgtgagtatggtccgtgcactggatgaagtaatgaacaagctgcagcgagcaaatccagacgacccagcttatgatgaaaacaagcgccagtgtcaagaagatatcaaggtgatgaacgactatgtagataaaattattgcagatcgcaaagcaaggggtgaacaaagtcatgatttattaacgcagatgctaaacggaaaagatccagaaacgggtgagccgcttgatgacgggaacattcgttatcaaattattacattcttaattgcgggacacgaaacaacaagtggtcttttatcatttgcgctgtatttcttagtgaaaaatccacatgtattacaaaaagtagcagaagaagcagcacgagttctagtagatcctgttccaagctacaaacaagtcaaacagcttaaatatgtcggcatggtcttaaacgaagcgctgcgcttatggccaactgcgcctgcgttttccctatatgcaaaagaagatacggtgcttggaggagaatatcctttaacgaaaggcgacgaagtaatggttctgattcctcagcttcaccgtgataaaacaatttggggagacgatgtggaggagttccgtccagagcgttttgaaaatccaagtgcgattccgcagcatgcgtttaaaccgtttggaaacggtcagcgtgcgtgtatcggtcagcagttcgctcttcatgaagcaacgctggtacttggtatgatgctaaaacactttgactttgaagatcatacaaactacgagctcgttattaaagaaggtttaacgttaaaacctgaaggctttgtggtaaaagcaaaatcgaaaggcattccgcttggcggtattccttcacctagcactgaacagtctgctaaaaaagtacgcaaaaaggcagaaaacgctcataatacgccgctgcttgtgctatacggttcaaatgcgggaacagctgaaggaacggcgcgtgatttagcagatattgcaatgagcaaaggatttgcaccgcaggtcgcaacgcttgattcacacgccggaaatcttccgcgcgaaggagctgtattaattgtaacggcgtcttataacggtcatccgcctgataacgcaaagcaatttgtcgactggttagaccaagcgtctgctgatgaagtaaaaggcgttcgctactccgtatttggatgcggcgataaaaattgggctgcgacgtatcaaaaagtgcctgcttttatcgatgaaacgcttgccgctaaaggggcagaaaacatcgctgaccgcggtgaagcagatgcaagcgacgactttgaaggcacatatgaagaatggcgtgatcatatgtggagtgacgtagcagcctactttaacctcgacattgaaaacagtgaagataataaatctactctttcacttcaatttgtcgacagcgccgcggatatgccgcttgcgaaaatgcacggtgcgttttcaacgaacgtcgtagcaagcaaagaacttcaacagccaggcagtgcacgaagcacgcgacatcttgaaattgaacttccaaaagaagcttcttatcaagaaggagatcatttaggtgttattcctcgcaactatgaaggaatagtaaaccgtgtaacagcaaggttcggcctaagcgcatcacagcaaatccgtctggaagcagaagaagaaaaattagctcatttgccactcgctaaaacagtatccgtagaagagcttctgcaatacgtggagcttcaagatcctgttacgcgcacgcagcttcgcgcaatggctgctaaaacggtctgcccgccgcataaagtagagcttgaagccttgcttgaaaagcaagcctacaaagaacaagtgctggcaaaacgtttaacaatgcttgaactgcttgaaaaatacccggcgtgtgaaatgaaattcagcgaatttatcgcccttctgccaagcatacgcccgcgctattactcgatttcttcatcacctcgtgtcgatgaaaaacaagcaagcatcacggtcagcgttgtctcaggaccggcgtggagcggatatggagaatataaaggaattgcgtcgaactatcttgccgagctgcaagaaggagatacgattacgtgctttatttccacaccgcagtcagaatttacgctgccaaaagaccctgaaacgccgcttatcatggtcggaccgggaacaggcgtcgcgccgtttagaggctttgtgcaggcgcgcaaacagctaaaagaacaaggacagtcacttggagaagcacatttatacttcggctgccgttcacctcatgaagactatctgtatcaagaagagcttgaaaacgcccaaagcgaaggcatcattacgcttcataccgctttttctcgcatgccaaatcagccgaaaacatacgttcagcacgtaatggaacaagacggcaagaaattgattgaacttcttgatcaaggagcgcacttctatatttgcggagacggaagccaaatggcacctgccgttgaagcaacgcttatgaaaagctatgctgacgttcaccaagtgagtgaagcagacgctcgcttatggctgcagcagctagaagaaaaaggccgatacgcaaaagacgtgtgggctggg

SEQ ID NO: 112 - protein, 1049 aa, synthetic construct
  REGION 1..1049: note = variant of P450 oxidase from Bacillus megaterium
MTIKEMPQPKTFGELKNLPLLNTDKPVQALMRIADELGEIFKFEAPGSVTRYLSSQRLIKEACDESRFDKNLSQALKFARDFAGDGLATSWTHEPNWKKAHNILVPSFSQHAMGRYHAMMVDIAVQLVQKWERLNADEHIEVSEDMTRLTLDTIGLCGFNYRFNSFYRDQPHPFIVSMVRALDEVMNKLQRANPDDPAYDENKRQCQEDIKVMNDYVDKIIADRKARGEQSHDLLTQMLNGKDPETGEPLDDGNIRYQIITFLIAGHETTSGLLSFALYFLVKNPHVLQKVAEEAARVLVDPVPSYKQVKQLKYVGMVLNEALRLWPTAPAFSLYAKEDTVLGGEYPLTKGDEVMVLIPQLHRDKTIWGDDVEEFRPERFENPSAIPQHAFKPFGNGQRACIGQQFALHEATLVLGMMLKHFDFEDHTNYELVIKEGLTLKPEGFVVKAKSKGIPLGGIPSPSTEQSAKKVRKKAENAHNTPLLVLYGSNAGTAEGTARDLADIAMSKGFAPQVATLDSHAGNLPREGAVLIVTASYNGHPPDNAKQFVDWLDQASADEVKGVRYSVFGCGDKNWAATYQKVPAFIDETLAAKGAENIADRGEADASDDFEGTYEEWRDHMWSDVAAYFNLDIENSEDNKSTLSLQFVDSAADMPLAKMHGAFSTNVVASKELQQPGSARSTRHLEIELPKEASYQEGDHLGVIPRNYEGIVNRVTARFGLSASQQIRLEAEEEKLAHLPLAKTVSVEELLQYVELQDPVTRTQLRAMAAKTVCPPHKVELEALLEKQAYKEQVLAKRLTMLELLEKYPACEMKFSEFIALLPSIRPRYYSISSSPRVDEKQASITVSVVSGPAWSGYGEYKGIASNYLAELQEGDTITCFISTPQSEFTLPKDPETPLIMVGPGTGVAPFRGFVQARKQLKEQGQSLGEAHLYFGCRSPHEDYLYQEELENAQSEGIITLHTAFSRMPNQPKTYVQHVMEQDGKKLIELLDQGAHFYICGDGSQMAPAVEATLMKSYADVHQVSEADARLWLQQLEEKGRYAKDVWAG

SEQ ID NO: 113 - DNA, 3147 bp, synthetic construct
  misc_feature 1..3147: note = variant of P450 oxidase from Bacillus megaterium
  source 1..3147: mol_type = other DNA
atgacaattaaggaaatgcctcagcctaagacgtttggagaacttaaaaatttaccgttattaaacacagataaaccggttcaagctttgatgcgtattgcggatgaattaggagaaatctttaaattcgaggcgcctggtagcgtaacgcgctatttatcaagtcagcgtctaattaaagaagcatgcgatgaatcacgctttgataaaaacttaagtcaagcgcttaaatttgcacgtgattttgctggagacgggttagccacaagctggacgcatgaaccgaattggaaaaaagcgcataatatcttagttccaagctttagtcagcatgcaatggggcgttatcatgcgatgatggtcgatatcgccgtgcagcttgttcaaaagtgggagcgtctaaatgcagatgagcatattgaagtatcggaagacatgacacgtttaacgcttgatacaattggtctttgcggctttaactatcgctttaacagcttttaccgagatcagcctcatccatttattgtgagtatggtccgtgcactggatgaagtaatgaacaagctgcagcgagcaaatccagacgacccagcttatgatgaaaacaagcgccagtgtcaagaagatatcaaggtgatgaacgactatgtagataaaattattgcagatcgcaaagcaaggggtgaacaaagtcatgatttattaacgcagatgctaaacggaaaagatccagaaacgggtgagccgcttgatgacgggaacattcgttatcaaattattacattcttaattgcgggacacgaaacaacaagtggtcttttatcatttgcgctgtatttcttagtgaaaaatccacatgtattacaaaaagtagcagaagaagcagcacgagttctagtagatcctgttccaagctacaaacaagtcaaacagcttaaatatgtcggcatggtcttaaacgaagcgctgcgcttatggccaactgcgcctgcgttttccctatatgcaaaagaagatacggtgcttggaggagaatatcctttaacgaaaggcgacgaagtaatggttctggtgcctcagcttcaccgtgataaaacaatttggggagacgatgtggaggagttccgtccagagcgttttgaaaatccaagtgcgattccgcagcatgcgtttaaaccgtttggaaacggtcagcgtgcgtgtatcggtcagcagttcgctcttcatgaagcaacgctggtacttggtatgatgctaaaacactttgactttgaagatcatacaaactacgagctcgttattaaagaaactttaacgttaaaacctgaaggctttgtggtaaaagcaaaatcgaaaggcattccgcttggcggtattccttcacctagcactgaacagtctgctaaaaaagtacgcaaaaaggcagaaaacgctcataatacgccgctgcttgtgctatacggttcaaatgcgggaacagctgaaggaacggcgcgtgatttagcagatattgcaatgagcaaaggatttgcaccgcaggtcgcaacgcttgattcacacgccggaaatcttccgcgcgaaggagctgtattaattgtaacggcgtcttataacggtcatccgcctgataacgcaaagcaatttgtcgactggttagaccaagcgtctgctgatgaagtaaaaggcgttcgctactccgtatttggatgcggcgataaaaattgggctgcgacgtatcaaaaagtgcctgcttttatcgatgaaacgcttgccgctaaaggggcagaaaacatcgctgaccgcggtgaagcagatgcaagcgacgactttgaaggcacatatgaagaatggcgtgatcatatgtggagtgacgtagcagcctactttaacctcgacattgaaaacagtgaagataataaatctactctttcacttcaatttgtcgacagcgccgcggatatgccgcttgcgaaaatgcacggtgcgttttcaacgaacgtcgtagcaagcaaagaacttcaacagccaggcagtgcacgaagcacgcgacatcttgaaattgaacttccaaaagaagcttcttatcaagaaggagatcatttaggtgttattcctcgcaactatgaaggaatagtaaaccgtgtaacagcaaggttcggcctaagcgcatcacagcaaatccgtctggaagcagaagaagaaaaattagctcatttgccactcgctaaaacagtatccgtagaagagcttctgcaatacgtggagcttcaagatcctgttacgcgcacgcagcttcgcgcaatggctgctaaaacggtctgcccgccgcataaagtagagcttgaagccttgcttgaaaagcaagcctacaaagaacaagtgctggcaaaacgtttaacaatgcttgaactgcttgaaaaatacccggcgtgtgaaatgaaattcagcgaatttatcgcccttctgccaagcatacgcccgcgctattactcgatttcttcatcacctcgtgtcgatgaaaaacaagcaagcatcacggtcagcgttgtctcaggaccggcgtggagcggatatggagaatataaaggaattgcgtcgaactatcttgccgagctgcaagaaggagatacgattacgtgctttatttccacaccgcagtcagaatttacgctgccaaaagaccctgaaacgccgcttatcatggtcggaccgggaacaggcgtcgcgccgtttagaggctttgtgcaggcgcgcaaacagctaaaagaacaaggacagtcacttggagaagcacatttatacttcggctgccgttcacctcatgaagactatctgtatcaagaagagcttgaaaacgcccaaagcgaaggcatcattacgcttcataccgctttttctcgcatgccaaatcagccgaaaacatacgttcagcacgtaatggaacaagacggcaagaaattgattgaacttcttgatcaaggagcgcacttctatatttgcggagacggaagccaaatggcacctgccgttgaagcaacgcttatgaaaagctatgctgacgttcaccaagtgagtgaagcagacgctcgcttatggctgcagcagctagaagaaaaaggccgatacgcaaaagacgtgtgggctggg

SEQ ID NO: 114 - protein, 1049 aa, synthetic construct
  REGION 1..1049: note = variant of P450 oxidase from Bacillus megaterium
MTIKEMPQPKTFGELKNLPLLNTDKPVQALMRIADELGEIFKFEAPGSVTRYLSSQRLIKEACDESRFDKNLSQALKFARDFAGDGLATSWTHEPNWKKAHNILVPSFSQHAMGRYHAMMVDIAVQLVQKWERLNADEHIEVSEDMTRLTLDTIGLCGFNYRFNSFYRDQPHPFIVSMVRALDEVMNKLQRANPDDPAYDENKRQCQEDIKVMNDYVDKIIADRKARGEQSHDLLTQMLNGKDPETGEPLDDGNIRYQIITFLIAGHETTSGLLSFALYFLVKNPHVLQKVAEEAARVLVDPVPSYKQVKQLKYVGMVLNEALRLWPTAPAFSLYAKEDTVLGGEYPLTKGDEVMVLVPQLHRDKTIWGDDVEEFRPERFENPSAIPQHAFKPFGNGQRACIGQQFALHEATLVLGMMLKHFDFEDHTNYELVIKETLTLKPEGFVVKAKSKGIPLGGIPSPSTEQSAKKVRKKAENAHNTPLLVLYGSNAGTAEGTARDLADIAMSKGFAPQVATLDSHAGNLPREGAVLIVTASYNGHPPDNAKQFVDWLDQASADEVKGVRYSVFGCGDKNWAATYQKVPAFIDETLAAKGAENIADRGEADASDDFEGTYEEWRDHMWSDVAAYFNLDIENSEDNKSTLSLQFVDSAADMPLAKMHGAFSTNVVASKELQQPGSARSTRHLEIELPKEASYQEGDHLGVIPRNYEGIVNRVTARFGLSASQQIRLEAEEEKLAHLPLAKTVSVEELLQYVELQDPVTRTQLRAMAAKTVCPPHKVELEALLEKQAYKEQVLAKRLTMLELLEKYPACEMKFSEFIALLPSIRPRYYSISSSPRVDEKQASITVSVVSGPAWSGYGEYKGIASNYLAELQEGDTITCFISTPQSEFTLPKDPETPLIMVGPGTGVAPFRGFVQARKQLKEQGQSLGEAHLYFGCRSPHEDYLYQEELENAQSEGIITLHTAFSRMPNQPKTYVQHVMEQDGKKLIELLDQGAHFYICGDGSQMAPAVEATLMKSYADVHQVSEADARLWLQQLEEKGRYAKDVWAG

SEQ ID NO: 115 - DNA, 3147 bp, synthetic construct
  misc_feature 1..3147: note = variant of P450 oxidase from Bacillus megaterium
  source 1..3147: mol_type = other DNA
atgacaattaaggaaatgcctcagcctaagacgtttggagaacttaaaaatttaccgttattaaacacagataaaccggttcaagctttgatgcgtattgcggatgaattaggagaaatctttaaattcgaggcgcctggtagcgtaacgcgctatttatcaagtcagcgtctaattaaagaagcatgcgatgaatcacgctttgataaaaacttaagtcaagcgcttaaatttgcacgtgattttgctggagacgggttagccacaagctggacgcatgaaccgaattggaaaaaagcgcataatatcttagttccaagctttagtcagcatgcaatggggcgttatcatgcgatgatggtcgatatcgccgtgcagcttgttcaaaagtgggagcgtctaaatgcagatgagcatattgaagtatcggaagacatgacacgtttaacgcttgatacaattggtctttgcggctttaactatcgctttaacagcttttaccgagatcagcctcatccatttattgtgagtatgcggcgtgcactggatgaagtaatgaacaagctgcagcgagcaaatccagacgacccagcttatgatgaaaacaagcgccagtgtcaagaagatatcaaggtgatgaacgactatgtagataaaattattgcagatcgcaaagcaaggggtgaacaaagtcatgatttattaacgcagatgctaaacggaaaagatccagaaacgggtgagccgcttgatgacgggaacattcgttatcaaattattacattcttaattgcgggacacgaaacaacaagtggtcttttatcatttgcgctgtatttcttagtgaaaaatccacatgtattacaaaaagtagcagaagaagcagcacgagttctagtagatcctgttccaagctacaaacaagtcaaacagcttaaatatgtcggcatggtcttaaacgaagcgctgcgcttatggccaactgcgcctgcgttttccctatatgcaaaagaagatacggtgcttggaggagaatatcctttaacgaaaggcgacgaagtaatggttctgattcctcagcttcaccgtgataaaacaatttggggagacgatgtggaggagttccgtccagagcgttttgaaaatccaagtgcgattccgcagcatgcgtttaaaccgtttggaaacggtcagcgtgcgtgtatcggtcagcagttcgctcttcatgaagcaacgctggtacttggtatgatgctaaaacactttgactttgaagatcatacaaactacgagctcgttattaaagaaactttaacgttaaaacctgaaggctttgtggtaaaagcaaaatcgaaaggcattccgcttggcggtattccttcacctagcactgaacagtctgctaaaaaagtacgcaaaaaggcagaaaacgctcataatacgccgctgcttgtgctatacggttcaaatgcgggaacagctgaaggaacggcgcgtgatttagcagatattgcaatgagcaaaggatttgcaccgcaggtcgcaacgcttgattcacacgccggaaatcttccgcgcgaaggagctgtattaattgtaacggcgtcttataacggtcatccgcctgataacgcaaagcaatttgtcgactggttagaccaagcgtctgctgatgaagtaaaaggcgttcgctactccgtatttggatgcggcgataaaaattgggctgcgacgtatcaaaaagtgcctgcttttatcgatgaaacgcttgccgctaaaggggcagaaaacatcgctgaccgcggtgaagcagatgcaagcgacgactttgaaggcacatatgaagaatggcgtgatcatatgtggagtgacgtagcagcctactttaacctcgacattgaaaacagtgaagataataaatctactctttcacttcaatttgtcgacagcgccgcggatatgccgcttgcgaaaatgcacggtgcgttttcaacgaacgtcgtagcaagcaaagaacttcaacagccaggcagtgcacgaagcacgcgacatcttgaaattgaacttccaaaagaagcttcttatcaagaaggagatcatttaggtgttattcctcgcaactatgaaggaatagtaaaccgtgtaacagcaaggttcggcctaagcgcatcacagcaaatccgtctggaagcagaagaagaaaaattagctcatttgccactcgctaaaacagtatccgtagaagagcttctgcaatacgtggagcttcaagatcctgttacgcgcacgcagcttcgcgcaatggctgctaaaacggtctgcccgccgcataaagtagagcttgaagccttgcttgaaaagcaagcctacaaagaacaagtgctggcaaaacgtttaacaatgcttgaactgcttgaaaaatacccggcgtgtgaaatgaaattcagcgaatttatcgcccttctgccaagcatacgcccgcgctattactcgatttcttcatcacctcgtgtcgatgaaaaacaagcaagcatcacggtcagcgttgtctcaggaccggcgtggagcggatatggagaatataaaggaattgcgtcgaactatcttgccgagctgcaagaaggagatacgattacgtgctttatttccacaccgcagtcagaatttacgctgccaaaagaccctgaaacgccgcttatcatggtcggaccgggaacaggcgtcgcgccgtttagaggctttgtgcaggcgcgcaaacagctaaaagaacaaggacagtcacttggagaagcacatttatacttcggctgccgttcacctcatgaagactatctgtatcaagaagagcttgaaaacgcccaaagcgaaggcatcattacgcttcataccgctttttctcgcatgccaaatcagccgaaaacatacgttcagcacgtaatggaacaagacggcaagaaattgattgaacttcttgatcaaggagcgcacttctatatttgcggagacggaagccaaatggcacctgccgttgaagcaacgcttatgaaaagctatgctgacgttcaccaagtgagtgaagcagacgctcgcttatggctgcagcagctagaagaaaaaggccgatacgcaaaagacgtgtgggctggg

SEQ ID NO: 116 - protein, 1049 aa, synthetic construct
  REGION 1..1049: note = variant of P450 oxidase from Bacillus megaterium
MTIKEMPQPKTFGELKNLPLLNTDKPVQALMRIADELGEIFKFEAPGSVTRYLSSQRLIKEACDESRFDKNLSQALKFARDFAGDGLATSWTHEPNWKKAHNILVPSFSQHAMGRYHAMMVDIAVQLVQKWERLNADEHIEVSEDMTRLTLDTIGLCGFNYRFNSFYRDQPHPFIVSMRRALDEVMNKLQRANPDDPAYDENKRQCQEDIKVMNDYVDKIIADRKARGEQSHDLLTQMLNGKDPETGEPLDDGNIRYQIITFLIAGHETTSGLLSFALYFLVKNPHVLQKVAEEAARVLVDPVPSYKQVKQLKYVGMVLNEALRLWPTAPAFSLYAKEDTVLGGEYPLTKGDEVMVLIPQLHRDKTIWGDDVEEFRPERFENPSAIPQHAFKPFGNGQRACIGQQFALHEATLVLGMMLKHFDFEDHTNYELVIKETLTLKPEGFVVKAKSKGIPLGGIPSPSTEQSAKKVRKKAENAHNTPLLVLYGSNAGTAEGTARDLADIAMSKGFAPQVATLDSHAGNLPREGAVLIVTASYNGHPPDNAKQFVDWLDQASADEVKGVRYSVFGCGDKNWAATYQKVPAFIDETLAAKGAENIADRGEADASDDFEGTYEEWRDHMWSDVAAYFNLDIENSEDNKSTLSLQFVDSAADMPLAKMHGAFSTNVVASKELQQPGSARSTRHLEIELPKEASYQEGDHLGVIPRNYEGIVNRVTARFGLSASQQIRLEAEEEKLAHLPLAKTVSVEELLQYVELQDPVTRTQLRAMAAKTVCPPHKVELEALLEKQAYKEQVLAKRLTMLELLEKYPACEMKFSEFIALLPSIRPRYYSISSSPRVDEKQASITVSVVSGPAWSGYGEYKGIASNYLAELQEGDTITCFISTPQSEFTLPKDPETPLIMVGPGTGVAPFRGFVQARKQLKEQGQSLGEAHLYFGCRSPHEDYLYQEELENAQSEGIITLHTAFSRMPNQPKTYVQHVMEQDGKKLIELLDQGAHFYICGDGSQMAPAVEATLMKSYADVHQVSEADARLWLQQLEEKGRYAKDVWAG

SEQ ID NO: 117 - DNA, 3147 bp, synthetic construct
  misc_feature 1..3147: note = variant of P450 oxidase from Bacillus megaterium
  source 1..3147: mol_type = other DNA
atgacaattaaggaaatgcctcagcctaagacgtttggagaacttaaaaatttaccgttattaaacacagataaaccggttcaagctttgatgcgtattgcggatgaattaggagaaatctttaaattcgaggcgcctggtagcgtaacgcgctatttatcaagtcagcgtctaattaaagaagcatgcgatgaatcacgctttgataaaaacttaagtcaagcgcttaaatttgcacgtgattttgctggagacgggttagccacaagctggacgcatgaaccgaattggaaaaaagcgcataatatcttagttccaagctttagtcagcatgcaatggggcgttatcatgcgatgatggtcgatatcgccgtgcagcttgttcaaaagtgggagcgtctaaatgcagatgagcatattgaagtatcggaagacatgacacgtttaacgcttgatacaattggtctttgcggctttaactatcgctttaacagcttttaccgagatcagcctcatccatttattgtgagtatggtccgtgcactggatgaagtaatgaacaagctgcagcgagcaaatccagacgacccagcttatgatgaaaacaagcgccagtgtcaagaagatatcaaggtgatgaacgactatgtagataaaattattgcagatcgcaaagcaaggggtgaacaaagtcatgatttattaacgcagatgctaaacggaaaagatccagaaacgggtgagccgcttgatgacgggaacattcgttatcaaattattacattcttaattgcgggacaccagacaacaagtggtcttttatcatttgcgctgtatttcttagtgaaaaatccacatgtattacaaaaagtagcagaagaagcagcacgagttctagtagatcctgttccaagctacaaacaagtcaaacagcttaaatatgtcggcatggtcttaaacgaagcgctgcgcttatggccaactgcgcctgcgttttccctatatgcaaaagaagatacggtgcttggaggagaatatcctttaacgaaaggcgacgaagtaatggttctgattcctcagcttcaccgtgataaaacaatttggggagacgatgtggaggagttccgtccagagcgttttgaaaatccaagtgcgattccgcagcatgcgtttaaaccgtttggaaacggtcagcgtgcgtgtatcggtcagcagttcgctcttcatgaagcaacgctggtacttggtatgatgctaaaacactttgactttgaagatcatacaaactacgagctcgttattaaagaaactttaacgttaaaacctgaaggctttgtggtaaaagcaaaatcgaaaggcattccgcttggcggtattccttcacctagcactgaacagtctgctaaaaaagtacgcaaaaaggcagaaaacgctcataatacgccgctgcttgtgctatacggttcaaatgcgggaacagctgaaggaacggcgcgtgatttagcagatattgcaatgagcaaaggatttgcaccgcaggtcgcaacgcttgattcacacgccggaaatcttccgcgcgaaggagctgtattaattgtaacggcgtcttataacggtcatccgcctgataacgcaaagcaatttgtcgactggttagaccaagcgtctgctgatgaagtaaaaggcgttcgctactccgtatttggatgcggcgataaaaattgggctgcgacgtatcaaaaagtgcctgcttttatcgatgaaacgcttgccgctaaaggggcagaaaacatcgctgaccgcggtgaagcagatgcaagcgacgactttgaaggcacatatgaagaatggcgtgatcatatgtggagtgacgtagcagcctactttaacctcgacattgaaaacagtgaagataataaatctactctttcacttcaatttgtcgacagcgccgcggatatgccgcttgcgaaaatgcacggtgcgttttcaacgaacgtcgtagcaagcaaagaacttcaacagccaggcagtgcacgaagcacgcgacatcttgaaattgaacttccaaaagaagcttcttatcaagaaggagatcatttaggtgttattcctcgcaactatgaaggaatagtaaaccgtgtaacagcaaggttcggcctaagcgcatcacagcaaatccgtctggaagcagaagaagaaaaattagctcatttgccactcgctaaaacagtatccgtagaagagcttctgcaatacgtggagcttcaagatcctgttacgcgcacgcagcttcgcgcaatggctgctaaaacggtctgcccgccgcataaagtagagcttgaagccttgcttgaaaagcaagcctacaaagaacaagtgctggcaaaacgtttaacaatgcttgaactgcttgaaaaatacccggcgtgtgaaatgaaattcagcgaatttatcgcccttctgccaagcatacgcccgcgctattactcgatttcttcatcacctcgtgtcgatgaaaaacaagcaagcatcacggtcagcgttgtctcaggaccggcgtggagcggatatggagaatataaaggaattgcgtcgaactatcttgccgagctgcaagaaggagatacgattacgtgctttatttccacaccgcagtcagaatttacgctgccaaaagaccctgaaacgccgcttatcatggtcggaccgggaacaggcgtcgcgccgtttagaggctttgtgcaggcgcgcaaacagctaaaagaacaaggacagtcacttggagaagcacatttatacttcggctgccgttcacctcatgaagactatctgtatcaagaagagcttgaaaacgcccaaagcgaaggcatcattacgcttcataccgctttttctcgcatgccaaatcagccgaaaacatacgttcagcacgtaatggaacaagacggcaagaaattgattgaacttcttgatcaaggagcgcacttctatatttgcggagacggaagccaaatggcacctgccgttgaagcaacgcttatgaaaagctatgctgacgttcaccaagtgagtgaagcagacgctcgcttatggctgcagcagctagaagaaaaaggccgatacgcaaaagacgtgtgggctggg

SEQ ID NO: 118 - protein, 1049 aa, synthetic construct
  REGION 1..1049: note = variant of P450 oxidase from Bacillus megaterium
MTIKEMPQPKTFGELKNLPLLNTDKPVQALMRIADELGEIFKFEAPGSVTRYLSSQRLIKEACDESRFDKNLSQALKFARDFAGDGLATSWTHEPNWKKAHNILVPSFSQHAMGRYHAMMVDIAVQLVQKWERLNADEHIEVSEDMTRLTLDTIGLCGFNYRFNSFYRDQPHPFIVSMVRALDEVMNKLQRANPDDPAYDENKRQCQEDIKVMNDYVDKIIADRKARGEQSHDLLTQMLNGKDPETGEPLDDGNIRYQIITFLIAGHQTTSGLLSFALYFLVKNPHVLQKVAEEAARVLVDPVPSYKQVKQLKYVGMVLNEALRLWPTAPAFSLYAKEDTVLGGEYPLTKGDEVMVLIPQLHRDKTIWGDDVEEFRPERFENPSAIPQHAFKPFGNGQRACIGQQFALHEATLVLGMMLKHFDFEDHTNYELVIKETLTLKPEGFVVKAKSKGIPLGGIPSPSTEQSAKKVRKKAENAHNTPLLVLYGSNAGTAEGTARDLADIAMSKGFAPQVATLDSHAGNLPREGAVLIVTASYNGHPPDNAKQFVDWLDQASADEVKGVRYSVFGCGDKNWAATYQKVPAFIDETLAAKGAENIADRGEADASDDFEGTYEEWRDHMWSDVAAYFNLDIENSEDNKSTLSLQFVDSAADMPLAKMHGAFSTNVVASKELQQPGSARSTRHLEIELPKEASYQEGDHLGVIPRNYEGIVNRVTARFGLSASQQIRLEAEEEKLAHLPLAKTVSVEELLQYVELQDPVTRTQLRAMAAKTVCPPHKVELEALLEKQAYKEQVLAKRLTMLELLEKYPACEMKFSEFIALLPSIRPRYYSISSSPRVDEKQASITVSVVSGPAWSGYGEYKGIASNYLAELQEGDTITCFISTPQSEFTLPKDPETPLIMVGPGTGVAPFRGFVQARKQLKEQGQSLGEAHLYFGCRSPHEDYLYQEELENAQSEGIITLHTAFSRMPNQPKTYVQHVMEQDGKKLIELLDQGAHFYICGDGSQMAPAVEATLMKSYADVHQVSEADARLWLQQLEEKGRYAKDVWAG

SEQ ID NO: 119 - DNA, 3147 bp, synthetic construct
  misc_feature 1..3147: note = variant of P450 oxidase from Bacillus megaterium
  source 1..3147: mol_type = other DNA
atgacaattaaggaaatgcctcagcctaagacgtttggagaacttaaaaatttaccgttattaaacacagataaaccggttcaagctttgatgcgtattgcggatgaattaggagaaatctttaaattcgaggcgcctggtagcgtaacgcgctatttatcaagtcagcgtctaattaaagaagcatgcgatgaatcacgctttgataaaaacttaagtcaaactcttaaatttgcacgtgattttgctggagacgggttagccacaagctggacgcatgaaccgaattggaaaaaagcgcataatatcttagttccaagctttagtcagcatgcaatggggcgttatcatgcgatgatggtcgatatcgccgtgcagcttgttcaaaagtgggagcgtctaaatgcagatgagcatattgaagtatcggaagacatgacacgtttaacgcttgatacaattggtctttgcggctttaactatcgctttaacagcttttaccgagatcagcctcatccatttattgtgagtatggtccgtgcactggatgaagtaatgaacaagctgcagcgagcaaatccagacgacccagcttatgatgaaaacaagcgccagtgtcaagaagatatcaaggtgatgaacgactatgtagataaaattattgcagatcgcaaagcaaggggtgaacaaagtcatgatttattaacgcagatgctaaacggaaaagatccagaaacgggtgagccgcttgatgacgggaacattcgttatcaaattattacattcttaattgcgggacacgaaacaacaagtggtcttttatcatttgcgctgtatttcttagtgaaaaatccacatgtattacaaaaagtagcagaagaagcagcacgagttctagtagatcctgttccaagctacaaacaagtcaaacagcttaaatatgtcggcatggtcttaaacgaagcgctgcgcttatggccaactgcgcctgcgttttccctatatgcaaaagaagatacggtgcttggaggagaatatcctttaacgaaaggcgacgaagtaatggttctgattcctcagcttcaccgtgataaaacaatttggggagacgatgtggaggagttccgtccagagcgttttgaaaatccaagtgcgattccgcagcatgcgtttaaaccgtttggaaacggtcagcgtgcgtgtatcggtcagcagttcgctcttcatgaagcaacgctggtacttggtatgatgctaaaacactttgactttgaagatcatacaaactacgagctcgttattaaagaaactttaacgttaaaacctgaaggctttgtggtaaaagcaaaatcgaaaggcattccgcttggcggtattccttcacctagcactgaacagtctgctaaaaaagtacgcaaaaaggcagaaaacgctcataatacgccgctgcttgtgctatacggttcaaatgcgggaacagctgaaggaacggcgcgtgatttagcagatattgcaatgagcaaaggatttgcaccgcaggtcgcaacgcttgattcacacgccggaaatcttccgcgcgaaggagctgtattaattgtaacggcgtcttataacggtcatccgcctgataacgcaaagcaatttgtcgactggttagaccaagcgtctgctgatgaagtaaaaggcgttcgctactccgtatttggatgcggcgataaaaattgggctgcgacgtatcaaaaagtgcctgcttttatcgatgaaacgcttgccgctaaaggggcagaaaacatcgctgaccgcggtgaagcagatgcaagcgacgactttgaaggcacatatgaagaatggcgtgatcatatgtggagtgacgtagcagcctactttaacctcgacattgaaaacagtgaagataataaatctactctttcacttcaatttgtcgacagcgccgcggatatgccgcttgcgaaaatgcacggtgcgttttcaacgaacgtcgtagcaagcaaagaacttcaacagccaggcagtgcacgaagcacgcgacatcttgaaattgaacttccaaaagaagcttcttatcaagaaggagatcatttaggtgttattcctcgcaactatgaaggaatagtaaaccgtgtaacagcaaggttcggcctaagcgcatcacagcaaatccgtctggaagcagaagaagaaaaattagctcatttgccactcgctaaaacagtatccgtagaagagcttctgcaatacgtggagcttcaagatcctgttacgcgcacgcagcttcgcgcaatggctgctaaaacggtctgcccgccgcataaagtagagcttgaagccttgcttgaaaagcaagcctacaaagaacaagtgctggcaaaacgtttaacaatgcttgaactgcttgaaaaatacccggcgtgtgaaatgaaattcagcgaatttatcgcccttctgccaagcatacgcccgcgctattactcgatttcttcatcacctcgtgtcgatgaaaaacaagcaagcatcacggtcagcgttgtctcaggaccggcgtggagcggatatggagaatataaaggaattgcgtcgaactatcttgccgagctgcaagaaggagatacgattacgtgctttatttccacaccgcagtcagaatttacgctgccaaaagaccctgaaacgccgcttatcatggtcggaccgggaacaggcgtcgcgccgtttagaggctttgtgcaggcgcgcaaacagctaaaagaacaaggacagtcacttggagaagcacatttatacttcggctgccgttcacctcatgaagactatctgtatcaagaagagcttgaaaacgcccaaagcgaaggcatcattacgcttcataccgctttttctcgcatgccaaatcagccgaaaacatacgttcagcacgtaatggaacaagacggcaagaaattgattgaacttcttgatcaaggagcgcacttctatatttgcggagacggaagccaaatggcacctgccgttgaagcaacgcttatgaaaagctatgctgacgttcaccaagtgagtgaagcagacgctcgcttatggctgcagcagctagaagaaaaaggccgatacgcaaaagacgtgtgggctggg

SEQ ID NO: 120 - protein, 1049 aa, synthetic construct
  REGION 1..1049: note = variant of P450 oxidase from Bacillus megaterium
MTIKEMPQPKTFGELKNLPLLNTDKPVQALMRIADELGEIFKFEAPGSVTRYLSSQRLIKEACDESRFDKNLSQTLKFARDFAGDGLATSWTHEPNWKKAHNILVPSFSQHAMGRYHAMMVDIAVQLVQKWERLNADEHIEVSEDMTRLTLDTIGLCGFNYRFNSFYRDQPHPFIVSMVRALDEVMNKLQRANPDDPAYDENKRQCQEDIKVMNDYVDKIIADRKARGEQSHDLLTQMLNGKDPETGEPLDDGNIRYQIITFLIAGHETTSGLLSFALYFLVKNPHVLQKVAEEAARVLVDPVPSYKQVKQLKYVGMVLNEALRLWPTAPAFSLYAKEDTVLGGEYPLTKGDEVMVLIPQLHRDKTIWGDDVEEFRPERFENPSAIPQHAFKPFGNGQRACIGQQFALHEATLVLGMMLKHFDFEDHTNYELVIKETLTLKPEGFVVKAKSKGIPLGGIPSPSTEQSAKKVRKKAENAHNTPLLVLYGSNAGTAEGTARDLADIAMSKGFAPQVATLDSHAGNLPREGAVLIVTASYNGHPPDNAKQFVDWLDQASADEVKGVRYSVFGCGDKNWAATYQKVPAFIDETLAAKGAENIADRGEADASDDFEGTYEEWRDHMWSDVAAYFNLDIENSEDNKSTLSLQFVDSAADMPLAKMHGAFSTNVVASKELQQPGSARSTRHLEIELPKEASYQEGDHLGVIPRNYEGIVNRVTARFGLSASQQIRLEAEEEKLAHLPLAKTVSVEELLQYVELQDPVTRTQLRAMAAKTVCPPHKVELEALLEKQAYKEQVLAKRLTMLELLEKYPACEMKFSEFIALLPSIRPRYYSISSSPRVDEKQASITVSVVSGPAWSGYGEYKGIASNYLAELQEGDTITCFISTPQSEFTLPKDPETPLIMVGPGTGVAPFRGFVQARKQLKEQGQSLGEAHLYFGCRSPHEDYLYQEELENAQSEGIITLHTAFSRMPNQPKTYVQHVMEQDGKKLIELLDQGAHFYICGDGSQMAPAVEATLMKSYADVHQVSEADARLWLQQLEEKGRYAKDVWAG

SEQ ID NO: 121 - DNA, 3147 bp, synthetic construct
  misc_feature 1..3147: note = variant of P450 oxidase from Bacillus megaterium
  source 1..3147: mol_type = other DNA
atgacaattaaggaaatgcctcagcctaagacgtttggagaacttaaaaatttaccgttattaaacacagataaaccggttcaagctttgatgcgtattgcggatgaattaggagaaatctttaaattcgaggcgcctggtagcgtaacgcgctatttatcaagtcagcgtctaattaaagaagcatgcgatgaatcacgctttgataaaaacttaagtcaagctcttaaatttgcacgtgattttgttggagacgggttagccacaagctggacgcatgaaccgaattggaaaaaagcgcataatatcttagttccaagctttagtcagcatgcaatggggcgttatcatgcgatgatggtcgatatcgccgtgcagcttgttcaaaagtgggagcgtctaaatgcagatgagcatattgaagtatcggaagacatgacacgtttaacgcttgatacaattggtctttgcggctttaactatcgctttaacagcttttaccgagatcagcctcatccatttattgtgagtatggtccgtgcactggatgaagtaatgaacaagctgcagcgagcaaatccagacgacccagcttatgatgaaaacaagcgccagtgtcaagaagatatcaaggtgatgaacgactatgtagataaaattattgcagatcgcaaagcaaggggtgaacaaagtcatgatttattaacgcagatgctaaacggaaaagatccagaaacgggtgagccgcttgatgacgggaacattcgttatcaaattattacattcttaattgcgggacaccaaacaacaagtggtcttttatcatttgcgctgtatttcttagtgaaaaatccacatgtattacaaaaagtagcagaagaagcagcacgagttctagtagatcctgttccaagctacaaacaagtcaaacagcttaaatatgtcggcatggtcttaaacgaagcgctgcgcttatggccatcggcgcctatgttttccctatatgcaaaagaagatacggtgcttggaggagaatatcctttaacgaaaggcgacgaagtagtggttctggtgcctcagcttcaccgtgataaaacaatttggggagacgatgtggaggagttccgtccagagcgttttgaaaatccaagtgcgattccgcagcatgcgtttaaaccgtttggaaacggtcagcgtgcgtgtatcggtcagcagttcgctcttcatgaagcaacgctggtacttggtatgatgctaaaacactttgactttgaagatcatacaaactacgagctcgttattaaagaaactcggacgttaaaacctgaaggctttgtggtaaaagcaaaatcgaaaggcattccgcttggcggtattccttcacctagcactgaacagtctgctaaaaaagtacgcaaaaaggcagaaaacgctcataatacgccgctgcttgtgctatacggttcaaatgcgggaacagctgaaggaacggcgcgtgatttagcagatattgcaatgagcaaaggatttgcaccgcaggtcgcaacgcttgattcacacgccggaaatcttccgcgcgaaggagctgtattaattgtaacggcgtcttataacggtcatccgcctgataacgcaaagcaatttgtcgactggttagaccaagcgtctgctgatgaagtaaaaggcgttcgctactccgtatttggatgcggcgataaaaattgggctgcgacgtatcaaaaagtgcctgcttttatcgatgaaacgcttgccgctaaaggggcagaaaacatcgctgaccgcggtgaagcagatgcaagcgacgactttgaaggcacatatgaagaatggcgtgatcatatgtggagtgacgtagcagcctactttaacctcgacattgaaaacagtgaagataataaatctactctttcacttcaatttgtcgacagcgccgcggatatgccgcttgcgaaaatgcacggtgcgttttcaacgaacgtcgtagcaagcaaagaacttcaacagccaggcagtgcacgaagcacgcgacatcttgaaattgaacttccaaaagaagcttcttatcaagaaggagatcatttaggtgttattcctcgcaactatgaaggaatagtaaaccgtgtaacagcaaggttcggcctaagcgcatcacagcaaatccgtctggaagcagaagaagaaaaattagctcatttgccactcgctaaaacagtatccgtagaagagcttctgcaatacgtggagcttcaagatcctgttacgcgcacgcagcttcgcgcaatggctgctaaaacggtctgcccgccgcataaagtagagcttgaagccttgcttgaaaagcaagcctacaaagaacaagtgctggcaaaacgtttaacaatgcttgaactgcttgaaaaatacccggcgtgtgaaatgaaattcagcgaatttatcgcccttctgccaagcatacgcccgcgctattactcgatttcttcatcacctcgtgtcgatgaaaaacaagcaagcatcacggtcagcgttgtctcaggaccggcgtggagcggatatggagaatataaaggaattgcgtcgaactatcttgccgagctgcaagaaggagatacgattacgtgctttatttccacaccgcagtcagaatttacgctgccaaaagaccctgaaacgccgcttatcatggtcggaccgggaacaggcgtcgcgccgtttagaggctttgtgcaggcgcgcaaacagctaaaagaacaaggacagtcacttggagaagcacatttatacttcggctgccgttcacctcatgaagactatctgtatcaagaagagcttgaaaacgcccaaagcgaaggcatcattacgcttcataccgctttttctcgcatgccaaatcagccgaaaacatacgttcagcacgtaatggaacaagacggcaagaaattgattgaacttcttgatcaaggagcgcacttctatatttgcggagacggaagccaaatggcacctgccgttgaagcaacgcttatgaaaagctatgctgacgttcaccaagtgagtgaagcagacgctcgcttatggctgcagcagctagaagaaaaaggccgatacgcaaaagacgtgtgggctggg

SEQ ID NO: 122 - protein, 1049 aa, synthetic construct
  REGION 1..1049: note = variant of P450 oxidase from Bacillus megaterium
MTIKEMPQPKTFGELKNLPLLNTDKPVQALMRIADELGEIFKFEAPGSVTRYLSSQRLIKEACDESRFDKNLSQALKFARDFVGDGLATSWTHEPNWKKAHNILVPSFSQHAMGRYHAMMVDIAVQLVQKWERLNADEHIEVSEDMTRLTLDTIGLCGFNYRFNSFYRDQPHPFIVSMVRALDEVMNKLQRANPDDPAYDENKRQCQEDIKVMNDYVDKIIADRKARGEQSHDLLTQMLNGKDPETGEPLDDGNIRYQIITFLIAGHQTTSGLLSFALYFLVKNPHVLQKVAEEAARVLVDPVPSYKQVKQLKYVGMVLNEALRLWPSAPMFSLYAKEDTVLGGEYPLTKGDEVVVLVPQLHRDKTIWGDDVEEFRPERFENPSAIPQHAFKPFGNGQRACIGQQFALHEATLVLGMMLKHFDFEDHTNYELVIKETRTLKPEGFVVKAKSKGIPLGGIPSPSTEQSAKKVRKKAENAHNTPLLVLYGSNAGTAEGTARDLADIAMSKGFAPQVATLDSHAGNLPREGAVLIVTASYNGHPPDNAKQFVDWLDQASADEVKGVRYSVFGCGDKNWAATYQKVPAFIDETLAAKGAENIADRGEADASDDFEGTYEEWRDHMWSDVAAYFNLDIENSEDNKSTLSLQFVDSAADMPLAKMHGAFSTNVVASKELQQPGSARSTRHLEIELPKEASYQEGDHLGVIPRNYEGIVNRVTARFGLSASQQIRLEAEEEKLAHLPLAKTVSVEELLQYVELQDPVTRTQLRAMAAKTVCPPHKVELEALLEKQAYKEQVLAKRLTMLELLEKYPACEMKFSEFIALLPSIRPRYYSISSSPRVDEKQASITVSVVSGPAWSGYGEYKGIASNYLAELQEGDTITCFISTPQSEFTLPKDPETPLIMVGPGTGVAPFRGFVQARKQLKEQGQSLGEAHLYFGCRSPHEDYLYQEELENAQSEGIITLHTAFSRMPNQPKTYVQHVMEQDGKKLIELLDQGAHFYICGDGSQMAPAVEATLMKSYADVHQVSEADARLWLQQLEEKGRYAKDVWAG

SEQ ID NO: 123 - DNA, 3147 bp, synthetic construct
  misc_feature 1..3147: note = variant of P450 oxidase from Bacillus megaterium
  source 1..3147: mol_type = other DNA
atgacaattaaggaaatgcctcagcctaagacgtttggagaacttaaaaatttaccgttattaaacacagataaaccggttcaagctttgatgcgtattgcggatgaattaggagaaatctttaaattcgaggcgcctggtagcgtaacgcgctatttatcaagtcagcgtctaattaaagaagcatgcgatgaatcacgctttgataaaaacttaagtcaagcgcttaaatttgcacgtgattttgttggagacgggttagccacaagctggacgcatgaaccgaattggaaaaaagcgcataatatcttagttccaagctttagtcagcatgcaatggggcgttatcatgcgatgatggtcgatatcgccgtgcagcttgttcaaaagtgggagcgtctaaatgcagatgagcatattgaagtatcggaagacatgacacgtttaacgcttgatacaattggtctttgcggctttaactatcgctttaacagcttttaccgagatcagcctcatccatttattgtgagtatggtgcgtgcaattgatgaagtaatgaacaagctgcagcgagcaaatccagacgacccagcttatgatgaaaacaagcgccagtgtcaagaagatatcaaggtgatgaacgactatgtagataaaattattgcagatcgcaaagcaaggggtgaacaaagtcatgatttattaacgcagatgctaaacggaaaagatccagaaacgggtgagccgcttgatgacgggaacattcgttatcaaattattacattcttaattgcgggacaccaaacaacaagtggtcttttatcatttgcgctgtatttcttagtgaaaaatccacatgtattacaaaaagtagcagaagaagcagcacgagttctagtagatcctgttccaagctacaaacaagtcaaacagcttaaatatgtcggcatggtcttaaacgaagcgctgcgcttatggccagtagcgcctgctttttccctatatgcaaaagaagatacggtgcttggaggagaatatcctttaacgaaaggcgacgaagtagtggttctggtgcctcagcttcaccgtgataaaacaatttggggagacgatgtggaggagttccgtccagagcgttttgaaaatccaagtgcgattccgcagcatgcgtttaaaccgtttggaaacggtcagcgtgcgtgtatcggtcagcagttcgctcttcatgaagcaacgctggtacttggtatgatgctaaaacactttgactttgaagatcatacaaactacgagctcgttattaaagaaagtcggacgttaaaacctgaaggctttgtggtaaaagcaaaatcgaaaggcattccgcttggcggtattccttcacctagcactgaacagtctgctaaaaaagtacgcaaaaaggcagaaaacgctcataatacgccgctgcttgtgctatacggttcaaatgcgggaacagctgaaggaacggcgcgtgatttagcagatattgcaatgagcaaaggatttgcaccgcaggtcgcaacgcttgattcacacgccggaaatcttccgcgcgaaggagctgtattaattgtaacggcgtcttataacggtcatccgcctgataacgcaaagcaatttgtcgactggttagaccaagcgtctgctgatgaagtaaaaggcgttcgctactccgtatttggatgcggcgataaaaattgggctgcgacgtatcaaaaagtgcctgcttttatcgatgaaacgcttgccgctaaaggggcagaaaacatcgctgaccgcggtgaagcagatgcaagcgacgactttgaaggcacatatgaagaatggcgtgatcatatgtggagtgacgtagcagcctactttaacctcgacattgaaaacagtgaagataataaatctactctttcacttcaatttgtcgacagcgccgcggatatgccgcttgcgaaaatgcacggtgcgttttcaacgaacgtcgtagcaagcaaagaacttcaacagccaggcagtgcacgaagcacgcgacatcttgaaattgaacttccaaaagaagcttcttatcaagaaggagatcatttaggtgttattcctcgcaactatgaaggaatagtaaaccgtgtaacagcaaggttcggcctaagcgcatcacagcaaatccgtctggaagcagaagaagaaaaattagctcatttgccactcgctaaaacagtatccgtagaagagcttctgcaatacgtggagcttcaagatcctgttacgcgcacgcagcttcgcgcaatggctgctaaaacggtctgcccgccgcataaagtagagcttgaagccttgcttgaaaagcaagcctacaaagaacaagtgctggcaaaacgtttaacaatgcttgaactgcttgaaaaatacccggcgtgtgaaatgaaattcagcgaatttatcgcccttctgccaagcatacgcccgcgctattactcgatttcttcatcacctcgtgtcgatgaaaaacaagcaagcatcacggtcagcgttgtctcaggaccggcgtggagcggatatggagaatataaaggaattgcgtcgaactatcttgccgagctgcaagaaggagatacgattacgtgctttatttccacaccgcagtcagaatttacgctgccaaaagaccctgaaacgccgcttatcatggtcggaccgggaacaggcgtcgcgccgtttagaggctttgtgcaggcgcgcaaacagctaaaagaacaaggacagtcacttggagaagcacatttatacttcggctgccgttcacctcatgaagactatctgtatcaagaagagcttgaaaacgcccaaagcgaaggcatcattacgcttcataccgctttttctcgcatgccaaatcagccgaaaacatacgttcagcacgtaatggaacaagacggcaagaaattgattgaacttcttgatcaaggagcgcacttctatatttgcggagacggaagccaaatggcacctgccgttgaagcaacgcttatgaaaagctatgctgacgttcaccaagtgagtgaagcagacgctcgcttatggctgcagcagctagaagaaaaaggccgatacgcaaaagacgtgtgggctggg

SEQ ID NO: 124 - protein, 1049 aa, synthetic construct
  REGION 1..1049: note = variant of P450 oxidase from Bacillus megaterium
MTIKEMPQPKTFGELKNLPLLNTDKPVQALMRIADELGEIFKFEAPGSVTRYLSSQRLIKEACDESRFDKNLSQALKFARDFVGDGLATSWTHEPNWKKAHNILVPSFSQHAMGRYHAMMVDIAVQLVQKWERLNADEHIEVSEDMTRLTLDTIGLCGFNYRFNSFYRDQPHPFIVSMVRAIDEVMNKLQRANPDDPAYDENKRQCQEDIKVMNDYVDKIIADRKARGEQSHDLLTQMLNGKDPETGEPLDDGNIRYQIITFLIAGHQTTSGLLSFALYFLVKNPHVLQKVAEEAARVLVDPVPSYKQVKQLKYVGMVLNEALRLWPVAPAFSLYAKEDTVLGGEYPLTKGDEVVVLVPQLHRDKTIWGDDVEEFRPERFENPSAIPQHAFKPFGNGQRACIGQQFALHEATLVLGMMLKHFDFEDHTNYELVIKESRTLKPEGFVVKAKSKGIPLGGIPSPSTEQSAKKVRKKAENAHNTPLLVLYGSNAGTAEGTARDLADIAMSKGFAPQVATLDSHAGNLPREGAVLIVTASYNGHPPDNAKQFVDWLDQASADEVKGVRYSVFGCGDKNWAATYQKVPAFIDETLAAKGAENIADRGEADASDDFEGTYEEWRDHMWSDVAAYFNLDIENSEDNKSTLSLQFVDSAADMPLAKMHGAFSTNVVASKELQQPGSARSTRHLEIELPKEASYQEGDHLGVIPRNYEGIVNRVTARFGLSASQQIRLEAEEEKLAHLPLAKTVSVEELLQYVELQDPVTRTQLRAMAAKTVCPPHKVELEALLEKQAYKEQVLAKRLTMLELLEKYPACEMKFSEFIALLPSIRPRYYSISSSPRVDEKQASITVSVVSGPAWSGYGEYKGIASNYLAELQEGDTITCFISTPQSEFTLPKDPETPLIMVGPGTGVAPFRGFVQARKQLKEQGQSLGEAHLYFGCRSPHEDYLYQEELENAQSEGIITLHTAFSRMPNQPKTYVQHVMEQDGKKLIELLDQGAHFYICGDGSQMAPAVEATLMKSYADVHQVSEADARLWLQQLEEKGRYAKDVWAG

SEQ ID NO: 125 - DNA, 3147 bp, synthetic construct
  misc_feature 1..3147: note = variant of P450 oxidase from Bacillus megaterium
  source 1..3147: mol_type = other DNA
atgacaattaaggaaatgcctcagcctaagacgtttggagaacttaaaaatttaccgttattaaacacagataaaccggttcaagctttgatgcgtattgcggatgaattaggagaaatctttaaattcgaggcgcctggtagcgtaacgcgctatttatcaagtcagcgtctaattaaagaagcatgcgatgaatcacgctttgataaaaacttaagtcaagcgcttaaatttgcacgtgattttgttggagacgggttagccacaagctggacgcatgaaccgaattggaaaaaagcgcataatatcttagttccaagctttagtcagcatgcaatggggcgttatcatgcgatgatggtcgatatcgccgtgcagcttgttcaaaagtgggagcgtctaaatgcagatgagcatattgaagtatcggaagacatgacacgtttaacgcttgatacaattggtctttgcggctttaactatcgctttaacagcttttaccgagatcagcctcatccatttattgtgagtatggtgcgtgcactggatgaagtaatgaacaaggggcagcgagcaaatccagacgacccagcttatgatgaaaacaagcgccagtgtcaagaagatatcaaggtgatgaacgactatgtagataaaattattgcagatcgcaaagcaaggggtgaacaaagtcatgatttattaacgcagatgctaaacggaaaagatccagaaacgggtgagccgcttgatgacgggaacattcgttatcaaattattacattcttaattgcgggacaccaaacaacaagtggtcttttatcatttgcgctgtatttcttagtgaaaaatccacatgtattacaaaaagtagcagaagaagcagcacgagttctagtagatcctgttccaagctacaaacaagtcaaacagcttaaatatgtcggcatggtcttaaacgaagcgctgcgcttatggccagtagcgcctgctttttccctatatgcaaaagaagatacggtgcttggaggagaatatcctttaacgaaaggcgacgaagtagtggttctggtgcctcagcttcaccgtgataaaacaatttggggagacgatgtggaggagttccgtccagagcgttttgaaaatccaagtgcgattccgcagcatgcgtttaaaccgtttggaaacggtcagcgtgcgtgtatcggtcagcagttcgctcttcatgaagcaacgctggtacttggtatgatgctaaaacactttgactttgaagatcatacaaactacgagctcgttattaaagaaggtcggacgttaaaacctgaaggctttgtggtaaaagcaaaatcgaaaggcattccgcttggcggtattccttcacctagcactgaacagtctgctaaaaaagtacgcaaaaaggcagaaaacgctcataatacgccgctgcttgtgctatacggttcaaatgcgggaacagctgaaggaacggcgcgtgatttagcagatattgcaatgagcaaaggatttgcaccgcaggtcgcaacgcttgattcacacgccggaaatcttccgcgcgaaggagctgtattaattgtaacggcgtcttataacggtcatccgcctgataacgcaaagcaatttgtcgactggttagaccaagcgtctgctgatgaagtaaaaggcgttcgctactccgtatttggatgcggcgataaaaattgggctgcgacgtatcaaaaagtgcctgcttttatcgatgaaacgcttgccgctaaaggggcagaaaacatcgctgaccgcggtgaagcagatgcaagcgacgactttgaaggcacatatgaagaatggcgtgatcatatgtggagtgacgtagcagcctactttaacctcgacattgaaaacagtgaagataataaatctactctttcacttcaatttgtcgacagcgccgcggatatgccgcttgcgaaaatgcacggtgcgttttcaacgaacgtcgtagcaagcaaagaacttcaacagccaggcagtgcacgaagcacgcgacatcttgaaattgaacttccaaaagaagcttcttatcaagaaggagatcatttaggtgttattcctcgcaactatgaaggaatagtaaaccgtgtaacagcaaggttcggcctaagcgcatcacagcaaatccgtctggaagcagaagaagaaaaattagctcatttgccactcgctaaaacagtatccgtagaagagcttctgcaatacgtggagcttcaagatcctgttacgcgcacgcagcttcgcgcaatggctgctaaaacggtctgcccgccgcataaagtagagcttgaagccttgcttgaaaagcaagcctacaaagaacaagtgctggcaaaacgtttaacaatgcttgaactgcttgaaaaatacccggcgtgtgaaatgaaattcagcgaatttatcgcccttctgccaagcatacgcccgcgctattactcgatttcttcatcacctcgtgtcgatgaaaaacaagcaagcatcacggtcagcgttgtctcaggaccggcgtggagcggatatggagaatataaaggaattgcgtcgaactatcttgccgagctgcaagaaggagatacgattacgtgctttatttccacaccgcagtcagaatttacgctgccaaaagaccctgaaacgccgcttatcatggtcggaccgggaacaggcgtcgcgccgtttagaggctttgtgcaggcgcgcaaacagctaaaagaacaaggacagtcacttggagaagcacatttatacttcggctgccgttcacctcatgaagactatctgtatcaagaagagcttgaaaacgcccaaagcgaaggcatcattacgcttcataccgctttttctcgcatgccaaatcagccgaaaacatacgttcagcacgtaatggaacaagacggcaagaaattgattgaacttcttgatcaaggagcgcacttctatatttgcggagacggaagccaaatggcacctgccgttgaagcaacgcttatgaaaagctatgctgacgttcaccaagtgagtgaagcagacgctcgcttatggctgcagcagctagaagaaaaaggccgatacgcaaaagacgtgtgggctggg

SEQ ID NO: 126 - protein, 1049 aa, synthetic construct
  REGION 1..1049: note = variant of P450 oxidase from Bacillus megaterium
MTIKEMPQPKTFGELKNLPLLNTDKPVQALMRIADELGEIFKFEAPGSVTRYLSSQRLIKEACDESRFDKNLSQALKFARDFVGDGLATSWTHEPNWKKAHNILVPSFSQHAMGRYHAMMVDIAVQLVQKWERLNADEHIEVSEDMTRLTLDTIGLCGFNYRFNSFYRDQPHPFIVSMVRALDEVMNKGQRANPDDPAYDENKRQCQEDIKVMNDYVDKIIADRKARGEQSHDLLTQMLNGKDPETGEPLDDGNIRYQIITFLIAGHQTTSGLLSFALYFLVKNPHVLQKVAEEAARVLVDPVPSYKQVKQLKYVGMVLNEALRLWPVAPAFSLYAKEDTVLGGEYPLTKGDEVVVLVPQLHRDKTIWGDDVEEFRPERFENPSAIPQHAFKPFGNGQRACIGQQFALHEATLVLGMMLKHFDFEDHTNYELVIKEGRTLKPEGFVVKAKSKGIPLGGIPSPSTEQSAKKVRKKAENAHNTPLLVLYGSNAGTAEGTARDLADIAMSKGFAPQVATLDSHAGNLPREGAVLIVTASYNGHPPDNAKQFVDWLDQASADEVKGVRYSVFGCGDKNWAATYQKVPAFIDETLAAKGAENIADRGEADASDDFEGTYEEWRDHMWSDVAAYFNLDIENSEDNKSTLSLQFVDSAADMPLAKMHGAFSTNVVASKELQQPGSARSTRHLEIELPKEASYQEGDHLGVIPRNYEGIVNRVTARFGLSASQQIRLEAEEEKLAHLPLAKTVSVEELLQYVELQDPVTRTQLRAMAAKTVCPPHKVELEALLEKQAYKEQVLAKRLTMLELLEKYPACEMKFSEFIALLPSIRPRYYSISSSPRVDEKQASITVSVVSGPAWSGYGEYKGIASNYLAELQEGDTITCFISTPQSEFTLPKDPETPLIMVGPGTGVAPFRGFVQARKQLKEQGQSLGEAHLYFGCRSPHEDYLYQEELENAQSEGIITLHTAFSRMPNQPKTYVQHVMEQDGKKLIELLDQGAHFYICGDGSQMAPAVEATLMKSYADVHQVSEADARLWLQQLEEKGRYAKDVWAG

SEQ ID NO: 127 - DNA, 3147 bp, synthetic construct
  misc_feature 1..3147: note = variant of P450 oxidase from Bacillus megaterium
  source 1..3147: mol_type = other DNA
atgacaattaaggaaatgcctcagcctaagacgtttggagaacttaaaaatttaccgttattaaacacagataaaccggttcaagctttgatgcgtattgcggatgaattaggagaaatctttaaattcgaggcgcctggtagcgtaacgcgctatttatcaagtcagcgtctaattaaagaagcatgcgatgaatcacgctttgataaaaacttaagtggggctcttaaatttgcacgtgattttgctggagacgggttagccacaagctggacgcatgaaccgaattggaaaaaagcgcataatatcttagttccaagctttagtcagcatgcaatggggcgttatcatgcgatgatggtcgatatcgccgtgcagcttgttcaaaagtgggagcgtctaaatgcagatgagcatattgaagtatcggaagacatgacacgtttaacgcttgatacaattggtctttgcggctttaactatcgctttaacagcttttaccgagatcagcctcatccatttattgtgagtatggtccgtgcactggatgaagtaatgaacaagctgcagcgagcaaatccagacgacccagcttatgatgaaaacaagcgccagtgtcaagaagatatcaaggtgatgaacgactatgtagataaaattattgcagatcgcaaagcaaggggtgaacaaagtcatgatttattaacgcagatgctaaacggaaaagatccagaaacgggtgagccgcttgatgacgggaacattcgttatcaaattattacattcttaattgcgggaactcaaacaacaagtggtcttttatcatttgcgctgtatttcttagtgaaaaatccacatgtattacaaaaagtagcagaagaagcagcacgagttctagtagatcctgttccaagctacaaacaagtcaaacagcttaaatatgtcggcatggtcttaaacgaagcgctgcgcttatggccagtagcgcctgctttttccctatatgcaaaagaagatacggtgcttggaggagaatatcctttaacgaaaggcgacgaagtaatggttctgattcctcagcttcaccgtgataaaacaatttggggagacgatgtggaggagttccgtccagagcgttttgaaaatccaagtgcgattccgcagcatgcgtttaaaccgtttggaaacggtcagcgtgcgtgtatcggtcagcagttcgctcttcatgaagcaacgctggtacttggtatgatgctaaaacactttgactttgaagatcatacaaactacgagctcgttattaaagaaactcggacgttaaaacctgaaggctttgtggtaaaagcaaaatcgaaaggcattccgcttggcggtattccttcacctagcactgaacagtctgctaaaaaagtacgcaaaaaggcagaaaacgctcataatacgccgctgcttgtgctatacggttcaaatgcgggaacagctgaaggaacggcgcgtgatttagcagatattgcaatgagcaaaggatttgcaccgcaggtcgcaacgcttgattcacacgccggaaatcttccgcgcgaaggagctgtattaattgtaacggcgtcttataacggtcatccgcctgataacgcaaagcaatttgtcgactggttagaccaagcgtctgctgatgaagtaaaaggcgttcgctactccgtatttggatgcggcgataaaaattgggctgcgacgtatcaaaaagtgcctgcttttatcgatgaaacgcttgccgctaaaggggcagaaaacatcgctgaccgcggtgaagcagatgcaagcgacgactttgaaggcacatatgaagaatggcgtgatcatatgtggagtgacgtagcagcctactttaacctcgacattgaaaacagtgaagataataaatctactctttcacttcaatttgtcgacagcgccgcggatatgccgcttgcgaaaatgcacggtgcgttttcaacgaacgtcgtagcaagcaaagaacttcaacagccaggcagtgcacgaagcacgcgacatcttgaaattgaacttccaaaagaagcttcttatcaagaaggagatcatttaggtgttattcctcgcaactatgaaggaatagtaaaccgtgtaacagcaaggttcggcctaagcgcatcacagcaaatccgtctggaagcagaagaagaaaaattagctcatttgccactcgctaaaacagtatccgtagaagagcttctgcaatacgtggagcttcaagatcctgttacgcgcacgcagcttcgcgcaatggctgctaaaacggtctgcccgccgcataaagtagagcttgaagccttgcttgaaaagcaagcctacaaagaacaagtgctggcaaaacgtttaacaatgcttgaactgcttgaaaaatacccggcgtgtgaaatgaaattcagcgaatttatcgcccttctgccaagcatacgcccgcgctattactcgatttcttcatcacctcgtgtcgatgaaaaacaagcaagcatcacggtcagcgttgtctcaggaccggcgtggagcggatatggagaatataaaggaattgcgtcgaactatcttgccgagctgcaagaaggagatacgattacgtgctttatttccacaccgcagtcagaatttacgctgccaaaagaccctgaaacgccgcttatcatggtcggaccgggaacaggcgtcgcgccgtttagaggctttgtgcaggcgcgcaaacagctaaaagaacaaggacagtcacttggagaagcacatttatacttcggctgccgttcacctcatgaagactatctgtatcaagaagagcttgaaaacgcccaaagcgaaggcatcattacgcttcataccgctttttctcgcatgccaaatcagccgaaaacatacgttcagcacgtaatggaacaagacggcaagaaattgattgaacttcttgatcaaggagcgcacttctatatttgcggagacggaagccaaatggcacctgccgttgaagcaacgcttatgaaaagctatgctgacgttcaccaagtgagtgaagcagacgctcgcttatggctgcagcagctagaagaaaaaggccgatacgcaaaagacgtgtgggctggg

SEQ ID NO: 128 - protein, 1049 aa, synthetic construct
  REGION 1..1049: note = variant of P450 oxidase from Bacillus megaterium
MTIKEMPQPKTFGELKNLPLLNTDKPVQALMRIADELGEIFKFEAPGSVTRYLSSQRLIKEACDESRFDKNLSGALKFARDFAGDGLATSWTHEPNWKKAHNILVPSFSQHAMGRYHAMMVDIAVQLVQKWERLNADEHIEVSEDMTRLTLDTIGLCGFNYRFNSFYRDQPHPFIVSMVRALDEVMNKLQRANPDDPAYDENKRQCQEDIKVMNDYVDKIIADRKARGEQSHDLLTQMLNGKDPETGEPLDDGNIRYQIITFLIAGTQTTSGLLSFALYFLVKNPHVLQKVAEEAARVLVDPVPSYKQVKQLKYVGMVLNEALRLWPVAPAFSLYAKEDTVLGGEYPLTKGDEVMVLIPQLHRDKTIWGDDVEEFRPERFENPSAIPQHAFKPFGNGQRACIGQQFALHEATLVLGMMLKHFDFEDHTNYELVIKETRTLKPEGFVVKAKSKGIPLGGIPSPSTEQSAKKVRKKAENAHNTPLLVLYGSNAGTAEGTARDLADIAMSKGFAPQVATLDSHAGNLPREGAVLIVTASYNGHPPDNAKQFVDWLDQASADEVKGVRYSVFGCGDKNWAATYQKVPAFIDETLAAKGAENIADRGEADASDDFEGTYEEWRDHMWSDVAAYFNLDIENSEDNKSTLSLQFVDSAADMPLAKMHGAFSTNVVASKELQQPGSARSTRHLEIELPKEASYQEGDHLGVIPRNYEGIVNRVTARFGLSASQQIRLEAEEEKLAHLPLAKTVSVEELLQYVELQDPVTRTQLRAMAAKTVCPPHKVELEALLEKQAYKEQVLAKRLTMLELLEKYPACEMKFSEFIALLPSIRPRYYSISSSPRVDEKQASITVSVVSGPAWSGYGEYKGIASNYLAELQEGDTITCFISTPQSEFTLPKDPETPLIMVGPGTGVAPFRGFVQARKQLKEQGQSLGEAHLYFGCRSPHEDYLYQEELENAQSEGIITLHTAFSRMPNQPKTYVQHVMEQDGKKLIELLDQGAHFYICGDGSQMAPAVEATLMKSYADVHQVSEADARLWLQQLEEKGRYAKDVWAG

SEQ ID NO: 129 - DNA, 3147 bp, synthetic construct
  misc_feature 1..3147: note = variant of P450 oxidase from Bacillus megaterium
  source 1..3147: mol_type = other DNA
atgacaattaaggaaatgcctcagcctaagacgtttggagaacttaaaaatttaccgttattaaacacagataaaccggttcaagctttgatgcgtattgcggatgaattaggagaaatctttaaattcgaggcgcctggtagcgtaacgcgctatttatcaagtcagcgtctaattaaagaagcatgcgatgaatcacgctttgataaaaacttaagtcaagctcttaaatttgcacgtgattttgttggagacgggttagccacaagctggacgcatgaaccgaattggaaaaaagcgcataatatcttagttccaagctttagtcagcatgcaatggggcgttatcatgcgatgatggtcgatatcgccgtgcagcttgttcaaaagtgggagcgtctaaatgcagatgagcatattgaagtatcggaagacatgacacgtttaacgcttgatacaattggtctttgcggctttaactatcgctttaacagcttttaccgagatcagcctcatccatttattgtgagtatggtgcgtgcaattgatgaagtaatgaacaaggggcagcgagcaaatccagacgacccagcttatgatgaaaacaagcgccagtgtcaagaagatatcaaggtgatgaacgactatgtagataaaattattgcagatcgcaaagcaaggggtgaacaaagtcatgatttattaacgcagatgctaaacggaaaagatccagaaacgggtgagccgcttgatgacgggaacattcgttatcaaattattacattcttaattgcgggacacgaaacaacaagtggtcttttatcatttgcgctgtatttcttagtgaaaaatccacatgtattacaaaaagtagcagaagaagcagcacgagttctagtagatcctgttccaagctacaaacaagtcaaacagcttaaatatgtcggcatggtcttaaacgaagcgctgcgcttatggccagtagcgcctatgttttccctatatgcaaaagaagatacggtgcttggaggagaatatcctttaacgaaaggcgacgaagtaatggttctgattcctcagcttcaccgtgataaaacaatttggggagacgatgtggaggagttccgtccagagcgttttgaaaatccaagtgcgattccgcagcatgcgtttaaaccgtttggaaacggtcagcgtgcgtgtatcggtcagcagttcgctcttcatgaagcaacgctggtacttggtatgatgctaaaacactttgactttgaagatcatacaaactacgagctcgttattaaagaaactcggacgttaaaacctgaaggctttgtggtaaaagcaaaatcgaaaggcattccgcttggcggtattccttcacctagcactgaacagtctgctaaaaaagtacgcaaaaaggcagaaaacgctcataatacgccgctgcttgtgctatacggttcaaatgcgggaacagctgaaggaacggcgcgtgatttagcagatattgcaatgagcaaaggatttgcaccgcaggtcgcaacgcttgattcacacgccggaaatcttccgcgcgaaggagctgtattaattgtaacggcgtcttataacggtcatccgcctgataacgcaaagcaatttgtcgactggttagaccaagcgtctgctgatgaagtaaaaggcgttcgctactccgtatttggatgcggcgataaaaattgggctgcgacgtatcaaaaagtgcctgcttttatcgatgaaacgcttgccgctaaaggggcagaaaacatcgctgaccgcggtgaagcagatgcaagcgacgactttgaaggcacatatgaagaatggcgtgatcatatgtggagtgacgtagcagcctactttaacctcgacattgaaaacagtgaagataataaatctactctttcacttcaatttgtcgacagcgccgcggatatgccgcttgcgaaaatgcacggtgcgttttcaacgaacgtcgtagcaagcaaagaacttcaacagccaggcagtgcacgaagcacgcgacatcttgaaattgaacttccaaaagaagcttcttatcaagaaggagatcatttaggtgttattcctcgcaactatgaaggaatagtaaaccgtgtaacagcaaggttcggcctaagcgcatcacagcaaatccgtctggaagcagaagaagaaaaattagctcatttgccactcgctaaaacagtatccgtagaagagcttctgcaatacgtggagcttcaagatcctgttacgcgcacgcagcttcgcgcaatggctgctaaaacggtctgcccgccgcataaagtagagcttgaagccttgcttgaaaagcaagcctacaaagaacaagtgctggcaaaacgtttaacaatgcttgaactgcttgaaaaatacccggcgtgtgaaatgaaattcagcgaatttatcgcccttctgccaagcatacgcccgcgctattactcgatttcttcatcacctcgtgtcgatgaaaaacaagcaagcatcacggtcagcgttgtctcaggaccggcgtggagcggatatggagaatataaaggaattgcgtcgaactatcttgccgagctgcaagaaggagatacgattacgtgctttatttccacaccgcagtcagaatttacgctgccaaaagaccctgaaacgccgcttatcatggtcggaccgggaacaggcgtcgcgccgtttagaggctttgtgcaggcgcgcaaacagctaaaagaacaaggacagtcacttggagaagcacatttatacttcggctgccgttcacctcatgaagactatctgtatcaagaagagcttgaaaacgcccaaagcgaaggcatcattacgcttcataccgctttttctcgcatgccaaatcagccgaaaacatacgttcagcacgtaatggaacaagacggcaagaaattgattgaacttcttgatcaaggagcgcacttctatatttgcggagacggaagccaaatggcacctgccgttgaagcaacgcttatgaaaagctatgctgacgttcaccaagtgagtgaagcagacgctcgcttatggctgcagcagctagaagaaaaaggccgatacgcaaaagacgtgtgggctggg

SEQ ID NO: 130 - protein, 1049 aa, synthetic construct
  REGION 1..1049: note = variant of P450 oxidase from Bacillus megaterium
MTIKEMPQPKTFGELKNLPLLNTDKPVQALMRIADELGEIFKFEAPGSVTRYLSSQRLIKEACDESRFDKNLSQALKFARDFVGDGLATSWTHEPNWKKAHNILVPSFSQHAMGRYHAMMVDIAVQLVQKWERLNADEHIEVSEDMTRLTLDTIGLCGFNYRFNSFYRDQPHPFIVSMVRAIDEVMNKGQRANPDDPAYDENKRQCQEDIKVMNDYVDKIIADRKARGEQSHDLLTQMLNGKDPETGEPLDDGNIRYQIITFLIAGHETTSGLLSFALYFLVKNPHVLQKVAEEAARVLVDPVPSYKQVKQLKYVGMVLNEALRLWPVAPMFSLYAKEDTVLGGEYPLTKGDEVMVLIPQLHRDKTIWGDDVEEFRPERFENPSAIPQHAFKPFGNGQRACIGQQFALHEATLVLGMMLKHFDFEDHTNYELVIKETRTLKPEGFVVKAKSKGIPLGGIPSPSTEQSAKKVRKKAENAHNTPLLVLYGSNAGTAEGTARDLADIAMSKGFAPQVATLDSHAGNLPREGAVLIVTASYNGHPPDNAKQFVDWLDQASADEVKGVRYSVFGCGDKNWAATYQKVPAFIDETLAAKGAENIADRGEADASDDFEGTYEEWRDHMWSDVAAYFNLDIENSEDNKSTLSLQFVDSAADMPLAKMHGAFSTNVVASKELQQPGSARSTRHLEIELPKEASYQEGDHLGVIPRNYEGIVNRVTARFGLSASQQIRLEAEEEKLAHLPLAKTVSVEELLQYVELQDPVTRTQLRAMAAKTVCPPHKVELEALLEKQAYKEQVLAKRLTMLELLEKYPACEMKFSEFIALLPSIRPRYYSISSSPRVDEKQASITVSVVSGPAWSGYGEYKGIASNYLAELQEGDTITCFISTPQSEFTLPKDPETPLIMVGPGTGVAPFRGFVQARKQLKEQGQSLGEAHLYFGCRSPHEDYLYQEELENAQSEGIITLHTAFSRMPNQPKTYVQHVMEQDGKKLIELLDQGAHFYICGDGSQMAPAVEATLMKSYADVHQVSEADARLWLQQLEEKGRYAKDVWAG

SEQ ID NO: 131 - DNA, 3147 bp, synthetic construct
  misc_feature 1..3147: note = variant of P450 oxidase from Bacillus megaterium
  source 1..3147: mol_type = other DNA
atgacaattaaggaaatgcctcagcctaagacgtttggagaacttaaaaatttaccgttattaaacacagataaaccggttcaagctttgatgcgtattgcggatgaattaggagaaatctttaaattcgaggcgcctggtagcgtaacgcgctatttatcaagtcagcgtctaattaaagaagcatgcgatgaatcacgctttgataaaaacttaagtcaaactcttaaatttgcacgtgattttgttggagacgggttagccacaagctggacgcatgaaccgaattggaaaaaagcgcataatatcttagttccaagctttagtcagcatgcaatggggcgttatcatgcgatgatggtcgatatcgccgtgcagcttgttcaaaagtgggagcgtctaaatgcagatgagcatattgaagtatcggaagacatgacacgtttaacgcttgatacaattggtctttgcggctttaactatcgctttaacagcttttaccgagatcagcctcatccatttattgtgagtatggtccgtgcactggatgaagtaatgaacaaggggcagcgagcaaatccagacgacccagcttatgatgaaaacaagcgccagtgtcaagaagatatcaaggtgatgaacgactatgtagataaaattattgcagatcgcaaagcaaggggtgaacaaagtcatgatttattaacgcagatgctaaacggaaaagatccagaaacgggtgagccgcttgatgacgggaacattcgttatcaaattattacattcttaattgcgggaactcaaacaacaagtggtcttttatcatttgcgctgtatttcttagtgaaaaatccacatgtattacaaaaagtagcagaagaagcagcacgagttctagtagatcctgttccaagctacaaacaagtcaaacagcttaaatatgtcggcatggtcttaaacgaagcgctgcgcttatggccaactgcgcctgcgttttccctatatgcaaaagaagatacggtgcttggaggagaatatcctttaacgaaaggcgacgaagtaatggttctgattcctcagcttcaccgtgataaaacaatttggggagacgatgtggaggagttccgtccagagcgttttgaaaatccaagtgcgattccgcagcatgcgtttaaaccgtttggaaacggtcagcgtgcgtgtatcggtcagcagttcgctcttcatgaagcaacgctggtacttggtatgatgctaaaacactttgactttgaagatcatacaaactacgagctcgttattaaagaaactcggacgttaaaacctgaaggctttgtggtaaaagcaaaatcgaaaggcattccgcttggcggtattccttcacctagcactgaacagtctgctaaaaaagtacgcaaaaaggcagaaaacgctcataatacgccgctgcttgtgctatacggttcaaatgcgggaacagctgaaggaacggcgcgtgatttagcagatattgcaatgagcaaaggatttgcaccgcaggtcgcaacgcttgattcacacgccggaaatcttccgcgcgaaggagctgtattaattgtaacggcgtcttataacggtcatccgcctgataacgcaaagcaatttgtcgactggttagaccaagcgtctgctgatgaagtaaaaggcgttcgctactccgtatttggatgcggcgataaaaattgggctgcgacgtatcaaaaagtgcctgcttttatcgatgaaacgcttgccgctaaaggggcagaaaacatcgctgaccgcggtgaagcagatgcaagcgacgactttgaaggcacatatgaagaatggcgtgatcatatgtggagtgacgtagcagcctactttaacctcgacattgaaaacagtgaagataataaatctactctttcacttcaatttgtcgacagcgccgcggatatgccgcttgcgaaaatgcacggtgcgttttcaacgaacgtcgtagcaagcaaagaacttcaacagccaggcagtgcacgaagcacgcgacatcttgaaattgaacttccaaaagaagcttcttatcaagaaggagatcatttaggtgttattcctcgcaactatgaaggaatagtaaaccgtgtaacagcaaggttcggcctaagcgcatcacagcaaatccgtctggaagcagaagaagaaaaattagctcatttgccactcgctaaaacagtatccgtagaagagcttctgcaatacgtggagcttcaagatcctgttacgcgcacgcagcttcgcgcaatggctgctaaaacggtctgcccgccgcataaagtagagcttgaagccttgcttgaaaagcaagcctacaaagaacaagtgctggcaaaacgtttaacaatgcttgaactgcttgaaaaatacccggcgtgtgaaatgaaattcagcgaatttatcgcccttctgccaagcatacgcccgcgctattactcgatttcttcatcacctcgtgtcgatgaaaaacaagcaagcatcacggtcagcgttgtctcaggaccggcgtggagcggatatggagaatataaaggaattgcgtcgaactatcttgccgagctgcaagaaggagatacgattacgtgctttatttccacaccgcagtcagaatttacgctgccaaaagaccctgaaacgccgcttatcatggtcggaccgggaacaggcgtcgcgccgtttagaggctttgtgcaggcgcgcaaacagctaaaagaacaaggacagtcacttggagaagcacatttatacttcggctgccgttcacctcatgaagactatctgtatcaagaagagcttgaaaacgcccaaagcgaaggcatcattacgcttcataccgctttttctcgcatgccaaatcagccgaaaacatacgttcagcacgtaatggaacaagacggcaagaaattgattgaacttcttgatcaaggagcgcacttctatatttgcggagacggaagccaaatggcacctgccgttgaagcaacgcttatgaaaagctatgctgacgttcaccaagtgagtgaagcagacgctcgcttatggctgcagcagctagaagaaaaaggccgatacgcaaaagacgtgtgggctggg

SEQ ID NO: 132 - protein, 1049 aa, synthetic construct
  REGION 1..1049: note = variant of P450 oxidase from Bacillus megaterium
MTIKEMPQPKTFGELKNLPLLNTDKPVQALMRIADELGEIFKFEAPGSVTRYLSSQRLIKEACDESRFDKNLSQTLKFARDFVGDGLATSWTHEPNWKKAHNILVPSFSQHAMGRYHAMMVDIAVQLVQKWERLNADEHIEVSEDMTRLTLDTIGLCGFNYRFNSFYRDQPHPFIVSMVRALDEVMNKGQRANPDDPAYDENKRQCQEDIKVMNDYVDKIIADRKARGEQSHDLLTQMLNGKDPETGEPLDDGNIRYQIITFLIAGTQTTSGLLSFALYFLVKNPHVLQKVAEEAARVLVDPVPSYKQVKQLKYVGMVLNEALRLWPTAPAFSLYAKEDTVLGGEYPLTKGDEVMVLIPQLHRDKTIWGDDVEEFRPERFENPSAIPQHAFKPFGNGQRACIGQQFALHEATLVLGMMLKHFDFEDHTNYELVIKETRTLKPEGFVVKAKSKGIPLGGIPSPSTEQSAKKVRKKAENAHNTPLLVLYGSNAGTAEGTARDLADIAMSKGFAPQVATLDSHAGNLPREGAVLIVTASYNGHPPDNAKQFVDWLDQASADEVKGVRYSVFGCGDKNWAATYQKVPAFIDETLAAKGAENIADRGEADASDDFEGTYEEWRDHMWSDVAAYFNLDIENSEDNKSTLSLQFVDSAADMPLAKMHGAFSTNVVASKELQQPGSARSTRHLEIELPKEASYQEGDHLGVIPRNYEGIVNRVTARFGLSASQQIRLEAEEEKLAHLPLAKTVSVEELLQYVELQDPVTRTQLRAMAAKTVCPPHKVELEALLEKQAYKEQVLAKRLTMLELLEKYPACEMKFSEFIALLPSIRPRYYSISSSPRVDEKQASITVSVVSGPAWSGYGEYKGIASNYLAELQEGDTITCFISTPQSEFTLPKDPETPLIMVGPGTGVAPFRGFVQARKQLKEQGQSLGEAHLYFGCRSPHEDYLYQEELENAQSEGIITLHTAFSRMPNQPKTYVQHVMEQDGKKLIELLDQGAHFYICGDGSQMAPAVEATLMKSYADVHQVSEADARLWLQQLEEKGRYAKDVWAG

SEQ ID NO: 133 - DNA, 3147 bp, synthetic construct
  misc_feature 1..3147: note = variant of P450 oxidase from Bacillus megaterium
  source 1..3147: mol_type = other DNA
atgacaattaaggaaatgcctcagcctaagacgtttggagaacttaaaaatttaccgttattaaacacagataaaccggttcaagctttgatgcgtattgcggatgaattaggagaaatctttaaattcgaggcgcctggtagcgtaacgcgctatttatcaagtcagcgtctaattaaagaagcatgcgatgaatcacgctttgataaaaacttaagtcaagctcttaaatttgcacgtgattttgctggagacgggttagccacaagctggacgcatgaaccgaattggaaaaaagcgcataatatcttagttccaagctttagtcagcatgcaatggggcgttatcatgcgatgatggtcgatatcgccgtgcagcttgttcaaaagtgggagcgtctaaatgcagatgagcatattgaagtatcggaagacatgacacgtttaacgcttgatacaattggtctttgcggctttaactatcgctttaacagcttttaccgagatcagcctcatccatttattgtgagtatggtccgtgcactggatgaagtaatgaacaaggggcagcgagcaaatccagacgacccagcttatgatgaaaacaagcgccagtgtcaagaagatatcaaggtgatgaacgactatgtagataaaattattgcagatcgcaaagcaaggggtgaacaaagtcatgatttattaacgcagatgctaaacggaaaagatccagaaacgggtgagccgcttgatgacgggaacattcgttatcaaattattacattcttaattgcgggaactcaaacaacaagtggtcttttatcatttgcgctgtatttcttagtgaaaaatccacatgtattacaaaaagtagcagaagaagcagcacgagttctagtagatcctgttccaagctacaaacaagtcaaacagcttaaatatgtcggcatggtcttaaacgaagcgctgcgcttatggccaactgcgcctgcgttttccctatatgcaaaagaagatacggtgcttggaggagaatatcctttaacgaaaggcgacgaagtaatggttctgattcctcagcttcaccgtgataaaacaatttggggagacgatgtggaggagttccgtccagagcgttttgaaaatccaagtgcgattccgcagcatgcgtttaaaccgtttggaaacggtcagcgtgcgtgtatcggtcagcagttcgctcttcatgaagcaacgctggtacttggtatgatgctaaaacactttgactttgaagatcatacaaactacgagctcgttattaaagaaagtcggacgttaaaacctgaaggctttgtggtaaaagcaaaatcgaaaggcattccgcttggcggtattccttcacctagcactgaacagtctgctaaaaaagtacgcaaaaaggcagaaaacgctcataatacgccgctgcttgtgctatacggttcaaatgcgggaacagctgaaggaacggcgcgtgatttagcagatattgcaatgagcaaaggatttgcaccgcaggtcgcaacgcttgattcacacgccggaaatcttccgcgcgaaggagctgtattaattgtaacggcgtcttataacggtcatccgcctgataacgcaaagcaatttgtcgactggttagaccaagcgtctgctgatgaagtaaaaggcgttcgctactccgtatttggatgcggcgataaaaattgggctgcgacgtatcaaaaagtgcctgcttttatcgatgaaacgcttgccgctaaaggggcagaaaacatcgctgaccgcggtgaagcagatgcaagcgacgactttgaaggcacatatgaagaatggcgtgatcatatgtggagtgacgtagcagcctactttaacctcgacattgaaaacagtgaagataataaatctactctttcacttcaatttgtcgacagcgccgcggatatgccgcttgcgaaaatgcacggtgcgttttcaacgaacgtcgtagcaagcaaagaacttcaacagccaggcagtgcacgaagcacgcgacatcttgaaattgaacttccaaaagaagcttcttatcaagaaggagatcatttaggtgttattcctcgcaactatgaaggaatagtaaaccgtgtaacagcaaggttcggcctaagcgcatcacagcaaatccgtctggaagcagaagaagaaaaattagctcatttgccactcgctaaaacagtatccgtagaagagcttctgcaatacgtggagcttcaagatcctgttacgcgcacgcagcttcgcgcaatggctgctaaaacggtctgcccgccgcataaagtagagcttgaagccttgcttgaaaagcaagcctacaaagaacaagtgctggcaaaacgtttaacaatgcttgaactgcttgaaaaatacccggcgtgtgaaatgaaattcagcgaatttatcgcccttctgccaagcatacgcccgcgctattactcgatttcttcatcacctcgtgtcgatgaaaaacaagcaagcatcacggtcagcgttgtctcaggaccggcgtggagcggatatggagaatataaaggaattgcgtcgaactatcttgccgagctgcaagaaggagatacgattacgtgctttatttccacaccgcagtcagaatttacgctgccaaaagaccctgaaacgccgcttatcatggtcggaccgggaacaggcgtcgcgccgtttagaggctttgtgcaggcgcgcaaacagctaaaagaacaaggacagtcacttggagaagcacatttatacttcggctgccgttcacctcatgaagactatctgtatcaagaagagcttgaaaacgcccaaagcgaaggcatcattacgcttcataccgctttttctcgcatgccaaatcagccgaaaacatacgttcagcacgtaatggaacaagacggcaagaaattgattgaacttcttgatcaaggagcgcacttctatatttgcggagacggaagccaaatggcacctgccgttgaagcaacgcttatgaaaagctatgctgacgttcaccaagtgagtgaagcagacgctcgcttatggctgcagcagctagaagaaaaaggccgatacgcaaaagacgtgtgggctggg

SEQ ID NO: 134 - protein, 1049 aa, synthetic construct
  REGION 1..1049: note = variant of P450 oxidase from Bacillus megaterium
MTIKEMPQPKTFGELKNLPLLNTDKPVQALMRIADELGEIFKFEAPGSVTRYLSSQRLIKEACDESRFDKNLSQALKFARDFAGDGLATSWTHEPNWKKAHNILVPSFSQHAMGRYHAMMVDIAVQLVQKWERLNADEHIEVSEDMTRLTLDTIGLCGFNYRFNSFYRDQPHPFIVSMVRALDEVMNKGQRANPDDPAYDENKRQCQEDIKVMNDYVDKIIADRKARGEQSHDLLTQMLNGKDPETGEPLDDGNIRYQIITFLIAGTQTTSGLLSFALYFLVKNPHVLQKVAEEAARVLVDPVPSYKQVKQLKYVGMVLNEALRLWPTAPAFSLYAKEDTVLGGEYPLTKGDEVMVLIPQLHRDKTIWGDDVEEFRPERFENPSAIPQHAFKPFGNGQRACIGQQFALHEATLVLGMMLKHFDFEDHTNYELVIKESRTLKPEGFVVKAKSKGIPLGGIPSPSTEQSAKKVRKKAENAHNTPLLVLYGSNAGTAEGTARDLADIAMSKGFAPQVATLDSHAGNLPREGAVLIVTASYNGHPPDNAKQFVDWLDQASADEVKGVRYSVFGCGDKNWAATYQKVPAFIDETLAAKGAENIADRGEADASDDFEGTYEEWRDHMWSDVAAYFNLDIENSEDNKSTLSLQFVDSAADMPLAKMHGAFSTNVVASKELQQPGSARSTRHLEIELPKEASYQEGDHLGVIPRNYEGIVNRVTARFGLSASQQIRLEAEEEKLAHLPLAKTVSVEELLQYVELQDPVTRTQLRAMAAKTVCPPHKVELEALLEKQAYKEQVLAKRLTMLELLEKYPACEMKFSEFIALLPSIRPRYYSISSSPRVDEKQASITVSVVSGPAWSGYGEYKGIASNYLAELQEGDTITCFISTPQSEFTLPKDPETPLIMVGPGTGVAPFRGFVQARKQLKEQGQSLGEAHLYFGCRSPHEDYLYQEELENAQSEGIITLHTAFSRMPNQPKTYVQHVMEQDGKKLIELLDQGAHFYICGDGSQMAPAVEATLMKSYADVHQVSEADARLWLQQLEEKGRYAKDVWAG

SEQ ID NO: 135 - DNA, 3147 bp, synthetic construct
  misc_feature 1..3147: note = variant of P450 oxidase from Bacillus megaterium
  source 1..3147: mol_type = other DNA
atgacaattaaggaaatgcctcagcctaagacgtttggagaacttaaaaatttaccgttattaaacacagataaaccggttcaagctttgatgcgtattgcggatgaattaggagaaatctttaaattcgaggcgcctggtagcgtaacgcgctatttatcaagtcagcgtctaattaaagaagcatgcgatgaatcacgctttgataaaaacttaagtcaagctcttaaatttgcacgtgattttgttggagacgggttagccacaagctggacgcatgaaccgaattggaaaaaagcgcataatatcttagttccaagctttagtcagcatgcaatggggcgttatcatgcgatgatggtcgatatcgccgtgcagcttgttcaaaagtgggagcgtctaaatgcagatgagcatattgaagtatcggaagacatgacacgtttaacgcttgatacaattggtctttgcggctttaactatcgctttaacagcttttaccgagatcagcctcatccatttattgtgagtatgcgccgtgcactggatgaagtaatgaacaagctgcagcgagcaaatccagacgacccagcttatgatgaaaacaagcgccagtgtcaagaagatatcaaggtgatgaacgactatgtagataaaattattgcagatcgcaaagcaaggggtgaacaaagtcatgatttattaacgcagatgctaaacggaaaagatccagaaacgggtgagccgcttgatgacgggaacattcgttatcaaattattacattcttaattgcgggacacgaaacaacaagtggtcttttatcatttgcgctgtatttcttagtgaaaaatccacatgtattacaaaaagtagcagaagaagcagcacgagttctagtagatcctgttccaagctacaaacaagtcaaacagcttaaatatgtcggcatggtcttaaacgaagcgctgcgcttatggccagtagcgcctatgttttccctatatgcaaaagaagatacggtgcttggaggagaatatcctttaacgaaaggcgacgaagtaatggttctgattcctcagcttcaccgtgataaaacaatttggggagacgatgtggaggagttccgtccagagcgttttgaaaatccaagtgcgattccgcagcatgcgtttaaaccgtttggaaacggtcagcgtgcgtgtatcggtcagcagttcgctcttcatgaagcaacgctggtacttggtatgatgctaaaacactttgactttgaagatcatacaaactacgagctcgttattaaagaaactcggacgttaaaacctgaaggctttgtggtaaaagcaaaatcgaaaggcattccgcttggcggtattccttcacctagcactgaacagtctgctaaaaaagtacgcaaaaaggcagaaaacgctcataatacgccgctgcttgtgctatacggttcaaatgcgggaacagctgaaggaacggcgcgtgatttagcagatattgcaatgagcaaaggatttgcaccgcaggtcgcaacgcttgattcacacgccggaaatcttccgcgcgaaggagctgtattaattgtaacggcgtcttataacggtcatccgcctgataacgcaaagcaatttgtcgactggttagaccaagcgtctgctgatgaagtaaaaggcgttcgctactccgtatttggatgcggcgataaaaattgggctgcgacgtatcaaaaagtgcctgcttttatcgatgaaacgcttgccgctaaaggggcagaaaacatcgctgaccgcggtgaagcagatgcaagcgacgactttgaaggcacatatgaagaatggcgtgatcatatgtggagtgacgtagcagcctactttaacctcgacattgaaaacagtgaagataataaatctactctttcacttcaatttgtcgacagcgccgcggatatgccgcttgcgaaaatgcacggtgcgttttcaacgaacgtcgtagcaagcaaagaacttcaacagccaggcagtgcacgaagcacgcgacatcttgaaattgaacttccaaaagaagcttcttatcaagaaggagatcatttaggtgttattcctcgcaactatgaaggaatagtaaaccgtgtaacagcaaggttcggcctaagcgcatcacagcaaatccgtctggaagcagaagaagaaaaattagctcatttgccactcgctaaaacagtatccgtagaagagcttctgcaatacgtggagcttcaagatcctgttacgcgcacgcagcttcgcgcaatggctgctaaaacggtctgcccgccgcataaagtagagcttgaagccttgcttgaaaagcaagcctacaaagaacaagtgctggcaaaacgtttaacaatgcttgaactgcttgaaaaatacccggcgtgtgaaatgaaattcagcgaatttatcgcccttctgccaagcatacgcccgcgctattactcgatttcttcatcacctcgtgtcgatgaaaaacaagcaagcatcacggtcagcgttgtctcaggaccggcgtggagcggatatggagaatataaaggaattgcgtcgaactatcttgccgagctgcaagaaggagatacgattacgtgctttatttccacaccgcagtcagaatttacgctgccaaaagaccctgaaacgccgcttatcatggtcggaccgggaacaggcgtcgcgccgtttagaggctttgtgcaggcgcgcaaacagctaaaagaacaaggacagtcacttggagaagcacatttatacttcggctgccgttcacctcatgaagactatctgtatcaagaagagcttgaaaacgcccaaagcgaaggcatcattacgcttcataccgctttttctcgcatgccaaatcagccgaaaacatacgttcagcacgtaatggaacaagacggcaagaaattgattgaacttcttgatcaaggagcgcacttctatatttgcggagacggaagccaaatggcacctgccgttgaagcaacgcttatgaaaagctatgctgacgttcaccaagtgagtgaagcagacgctcgcttatggctgcagcagctagaagaaaaaggccgatacgcaaaagacgtgtgggctggg

SEQ ID NO: 136 - protein, 1049 aa, synthetic construct
  REGION 1..1049: note = variant of P450 oxidase from Bacillus megaterium
MTIKEMPQPKTFGELKNLPLLNTDKPVQALMRIADELGEIFKFEAPGSVTRYLSSQRLIKEACDESRFDKNLSQALKFARDFVGDGLATSWTHEPNWKKAHNILVPSFSQHAMGRYHAMMVDIAVQLVQKWERLNADEHIEVSEDMTRLTLDTIGLCGFNYRFNSFYRDQPHPFIVSMRRALDEVMNKLQRANPDDPAYDENKRQCQEDIKVMNDYVDKIIADRKARGEQSHDLLTQMLNGKDPETGEPLDDGNIRYQIITFLIAGHETTSGLLSFALYFLVKNPHVLQKVAEEAARVLVDPVPSYKQVKQLKYVGMVLNEALRLWPVAPMFSLYAKEDTVLGGEYPLTKGDEVMVLIPQLHRDKTIWGDDVEEFRPERFENPSAIPQHAFKPFGNGQRACIGQQFALHEATLVLGMMLKHFDFEDHTNYELVIKETRTLKPEGFVVKAKSKGIPLGGIPSPSTEQSAKKVRKKAENAHNTPLLVLYGSNAGTAEGTARDLADIAMSKGFAPQVATLDSHAGNLPREGAVLIVTASYNGHPPDNAKQFVDWLDQASADEVKGVRYSVFGCGDKNWAATYQKVPAFIDETLAAKGAENIADRGEADASDDFEGTYEEWRDHMWSDVAAYFNLDIENSEDNKSTLSLQFVDSAADMPLAKMHGAFSTNVVASKELQQPGSARSTRHLEIELPKEASYQEGDHLGVIPRNYEGIVNRVTARFGLSASQQIRLEAEEEKLAHLPLAKTVSVEELLQYVELQDPVTRTQLRAMAAKTVCPPHKVELEALLEKQAYKEQVLAKRLTMLELLEKYPACEMKFSEFIALLPSIRPRYYSISSSPRVDEKQASITVSVVSGPAWSGYGEYKGIASNYLAELQEGDTITCFISTPQSEFTLPKDPETPLIMVGPGTGVAPFRGFVQARKQLKEQGQSLGEAHLYFGCRSPHEDYLYQEELENAQSEGIITLHTAFSRMPNQPKTYVQHVMEQDGKKLIELLDQGAHFYICGDGSQMAPAVEATLMKSYADVHQVSEADARLWLQQLEEKGRYAKDVWAG

SEQ ID NO: 137 - DNA, 3147 bp, synthetic construct
  misc_feature 1..3147: note = variant of P450 oxidase from Bacillus megaterium
  source 1..3147: mol_type = other DNA
atgacaattaaggaaatgcctcagcctaagacgtttggagaacttaaaaatttaccgttattaaacacagataaaccggttcaagctttgatgcgtattgcggatgaattaggagaaatctttaaattcgaggcgcctggtagcgtaacgcgctatttatcaagtcagcgtctaattaaagaagcatgcgatgaatcacgctttgataaaaacttaagtcaagcgcttaaatttgcacgtgattttgttggagacgggttagccacaagctggacgcatgaaccgaattggaaaaaagcgcataatatcttagttccaagctttagtcagcatgcaatggggcgttatcatgcgatgatggtcgatatcgccgtgcagcttgttcaaaagtgggagcgtctaaatgcagatgagcatattgaagtatcggaagacatgacacgtttaacgcttgatacaattggtctttgcggctttaactatcgctttaacagcttttaccgagatcagcctcatccatttattgtgagtatggtccgtgcactggatgaagtaatgaacaagctgcagcgagcaaatccagacgacccagcttatgatgaaaacaagcgccagtgtcaagaagatatcaaggtgatgaacgactatgtagataaaattattgcagatcgcaaagcaaggggtgaacaaagtcatgatttattaacgcagatgctaaacggaaaagatccagaaacgggtgagccgcttgatgacgggaacattcgttatcaaattattacattcttaattgcgggacaccaaacaacaagtggtcttttatcatttgcgctgtatttcttagtgaaaaatccacatgtattacaaaaagtagcagaagaagcagcacgagttctagtagatcctgttccaagctacaaacaagtcaaacagcttaaatatgtcggcatggtcttaaacgaagcgctgcgcttatggccatcggcgcctatgttttccctatatgcaaaagaagatacggtgcttggaggagaatatcctttaacgaaaggcgacgaagtaatggttctgactcctcagcttcaccgtgataaaacaatttggggagacgatgtggaggagttccgtccagagcgttttgaaaatccaagtgcgattccgcagcatgcgtttaaaccgtttggaaacggtcagcgtgcgtgtatcggtcagcagttcgctcttcatgaagcaacgctggtacttggtatgatgctaaaacactttgactttgaagatcatacaaactacgagctcgttattaaagaaggtcggacgttaaaacctgaaggctttgtggtaaaagcaaaatcgaaaggcattccgcttggcggtattccttcacctagcactgaacagtctgctaaaaaagtacgcaaaaaggcagaaaacgctcataatacgccgctgcttgtgctatacggttcaaatgcgggaacagctgaaggaacggcgcgtgatttagcagatattgcaatgagcaaaggatttgcaccgcaggtcgcaacgcttgattcacacgccggaaatcttccgcgcgaaggagctgtattaattgtaacggcgtcttataacggtcatccgcctgataacgcaaagcaatttgtcgactggttagaccaagcgtctgctgatgaagtaaaaggcgttcgctactccgtatttggatgcggcgataaaaattgggctgcgacgtatcaaaaagtgcctgcttttatcgatgaaacgcttgccgctaaaggggcagaaaacatcgctgaccgcggtgaagcagatgcaagcgacgactttgaaggcacatatgaagaatggcgtgatcatatgtggagtgacgtagcagcctactttaacctcgacattgaaaacagtgaagataataaatctactctttcacttcaatttgtcgacagcgccgcggatatgccgcttgcgaaaatgcacggtgcgttttcaacgaacgtcgtagcaagcaaagaacttcaacagccaggcagtgcacgaagcacgcgacatcttgaaattgaacttccaaaagaagcttcttatcaagaaggagatcatttaggtgttattcctcgcaactatgaaggaatagtaaaccgtgtaacagcaaggttcggcctaagcgcatcacagcaaatccgtctggaagcagaagaagaaaaattagctcatttgccactcgctaaaacagtatccgtagaagagcttctgcaatacgtggagcttcaagatcctgttacgcgcacgcagcttcgcgcaatggctgctaaaacggtctgcccgccgcataaagtagagcttgaagccttgcttgaaaagcaagcctacaaagaacaagtgctggcaaaacgtttaacaatgcttgaactgcttgaaaaatacccggcgtgtgaaatgaaattcagcgaatttatcgcccttctgccaagcatacgcccgcgctattactcgatttcttcatcacctcgtgtcgatgaaaaacaagcaagcatcacggtcagcgttgtctcaggaccggcgtggagcggatatggagaatataaaggaattgcgtcgaactatcttgccgagctgcaagaaggagatacgattacgtgctttatttccacaccgcagtcagaatttacgctgccaaaagaccctgaaacgccgcttatcatggtcggaccgggaacaggcgtcgcgccgtttagaggctttgtgcaggcgcgcaaacagctaaaagaacaaggacagtcacttggagaagcacatttatacttcggctgccgttcacctcatgaagactatctgtatcaagaagagcttgaaaacgcccaaagcgaaggcatcattacgcttcataccgctttttctcgcatgccaaatcagccgaaaacatacgttcagcacgtaatggaacaagacggcaagaaattgattgaacttcttgatcaaggagcgcacttctatatttgcggagacggaagccaaatggcacctgccgttgaagcaacgcttatgaaaagctatgctgacgttcaccaagtgagtgaagcagacgctcgcttatggctgcagcagctagaagaaaaaggccgatacgcaaaagacgtgtgggctggg

SEQ ID NO: 138 - protein, 1049 aa, synthetic construct
  REGION 1..1049: note = variant of P450 oxidase from Bacillus megaterium
MTIKEMPQPKTFGELKNLPLLNTDKPVQALMRIADELGEIFKFEAPGSVTRYLSSQRLIKEACDESRFDKNLSQALKFARDFVGDGLATSWTHEPNWKKAHNILVPSFSQHAMGRYHAMMVDIAVQLVQKWERLNADEHIEVSEDMTRLTLDTIGLCGFNYRFNSFYRDQPHPFIVSMVRALDEVMNKLQRANPDDPAYDENKRQCQEDIKVMNDYVDKIIADRKARGEQSHDLLTQMLNGKDPETGEPLDDGNIRYQIITFLIAGHQTTSGLLSFALYFLVKNPHVLQKVAEEAARVLVDPVPSYKQVKQLKYVGMVLNEALRLWPSAPMFSLYAKEDTVLGGEYPLTKGDEVMVLTPQLHRDKTIWGDDVEEFRPERFENPSAIPQHAFKPFGNGQRACIGQQFALHEATLVLGMMLKHFDFEDHTNYELVIKEGRTLKPEGFVVKAKSKGIPLGGIPSPSTEQSAKKVRKKAENAHNTPLLVLYGSNAGTAEGTARDLADIAMSKGFAPQVATLDSHAGNLPREGAVLIVTASYNGHPPDNAKQFVDWLDQASADEVKGVRYSVFGCGDKNWAATYQKVPAFIDETLAAKGAENIADRGEADASDDFEGTYEEWRDHMWSDVAAYFNLDIENSEDNKSTLSLQFVDSAADMPLAKMHGAFSTNVVASKELQQPGSARSTRHLEIELPKEASYQEGDHLGVIPRNYEGIVNRVTARFGLSASQQIRLEAEEEKLAHLPLAKTVSVEELLQYVELQDPVTRTQLRAMAAKTVCPPHKVELEALLEKQAYKEQVLAKRLTMLELLEKYPACEMKFSEFIALLPSIRPRYYSISSSPRVDEKQASITVSVVSGPAWSGYGEYKGIASNYLAELQEGDTITCFISTPQSEFTLPKDPETPLIMVGPGTGVAPFRGFVQARKQLKEQGQSLGEAHLYFGCRSPHEDYLYQEELENAQSEGIITLHTAFSRMPNQPKTYVQHVMEQDGKKLIELLDQGAHFYICGDGSQMAPAVEATLMKSYADVHQVSEADARLWLQQLEEKGRYAKDVWAG

SEQ ID NO: 139 - DNA, 3147 bp, synthetic construct
  misc_feature 1..3147: note = variant of P450 oxidase from Bacillus megaterium
  source 1..3147: mol_type = other DNA
atgacaattaaggaaatgcctcagcctaagacgtttggagaacttaaaaatttaccgttattaaacacagataaaccggttcaagctttgatgcgtattgcggatgaattaggagaaatctttaaattcgaggcgcctggtagcgtaacgcgctatttatcaagtcagcgtctaattaaagaagcatgcgatgaatcacgctttgataaaaacttaagtcaagcgcttaaatttgcacgtgattttgctggagacgggttagccacaagctggacgcatgaaccgaattggaaaaaagcgcataatatcttagttccaagctttagtcagcatgcaatggggcgttatcatgcgatgatggtcgatatcgccgtgcagcttgttcaaaagtgggagcgtctaaatgcagatgagcatattgaagtatcggaagacatgacacgtttaacgcttgatacaattggtctttgcggctttaactatcgctttaacagcttttaccgagatcagcctcatccatttattgtgagtatggtccgtgcactggatgaagtaatgaacaagctgcagcgagcaaatccagacgacccagcttatgatgaaaacaagcgccagtgtcaagaagatatcaaggtgatgaacgactatgtagataaaattattgcagatcgcaaagcaaggggtgaacaaagtcatgatttattaacgcagatgctaaacggaaaagatccagaaacgggtgagccgcttgatgacgggaacattcgttatcaaattattacattcttaattgcgggacaccaaacaacaagtggtcttttatcatttgcgctgtatttcttagtgaaaaatccacatgtattacaaaaagtagcagaagaagcagcacgagttctagtagatcctgttccaagctacaaacaagtcaaacagcttaaatatgtcggcatggtcttaaacgaagcgctgcgcttatggccaactgcgcctgcgttttccctatatgcaaaagaagatacggtgcttggaggagaatatcctttaacgaaaggcgacgaagtaatggttctggtgcctcagcttcaccgtgataaaacaatttggggagacgatgtggaggagttccgtccagagcgttttgaaaatccaagtgcgattccgcagcatgcgtttaaaccgtttggaaacggtcagcgtgcgtgtatcggtcagcagttcgctcttcatgaagcaacgctggtacttggtatgatgctaaaacactttgactttgaagatcatacaaactacgagctcgttattaaagaaactcggacgttaaaacctgaaggctttgtggtaaaagcaaaatcgaaaggcattccgcttggcggtattccttcacctagcactgaacagtctgctaaaaaagtacgcaaaaaggcagaaaacgctcataatacgccgctgcttgtgctatacggttcaaatgcgggaacagctgaaggaacggcgcgtgatttagcagatattgcaatgagcaaaggatttgcaccgcaggtcgcaacgcttgattcacacgccggaaatcttccgcgcgaaggagctgtattaattgtaacggcgtcttataacggtcatccgcctgataacgcaaagcaatttgtcgactggttagaccaagcgtctgctgatgaagtaaaaggcgttcgctactccgtatttggatgcggcgataaaaattgggctgcgacgtatcaaaaagtgcctgcttttatcgatgaaacgcttgccgctaaaggggcagaaaacatcgctgaccgcggtgaagcagatgcaagcgacgactttgaaggcacatatgaagaatggcgtgatcatatgtggagtgacgtagcagcctactttaacctcgacattgaaaacagtgaagataataaatctactctttcacttcaatttgtcgacagcgccgcggatatgccgcttgcgaaaatgcacggtgcgttttcaacgaacgtcgtagcaagcaaagaacttcaacagccaggcagtgcacgaagcacgcgacatcttgaaattgaacttccaaaagaagcttcttatcaagaaggagatcatttaggtgttattcctcgcaactatgaaggaatagtaaaccgtgtaacagcaaggttcggcctaagcgcatcacagcaaatccgtctggaagcagaagaagaaaaattagctcatttgccactcgctaaaacagtatccgtagaagagcttctgcaatacgtggagcttcaagatcctgttacgcgcacgcagcttcgcgcaatggctgctaaaacggtctgcccgccgcataaagtagagcttgaagccttgcttgaaaagcaagcctacaaagaacaagtgctggcaaaacgtttaacaatgcttgaactgcttgaaaaatacccggcgtgtgaaatgaaattcagcgaatttatcgcccttctgccaagcatacgcccgcgctattactcgatttcttcatcacctcgtgtcgatgaaaaacaagcaagcatcacggtcagcgttgtctcaggaccggcgtggagcggatatggagaatataaaggaattgcgtcgaactatcttgccgagctgcaagaaggagatacgattacgtgctttatttccacaccgcagtcagaatttacgctgccaaaagaccctgaaacgccgcttatcatggtcggaccgggaacaggcgtcgcgccgtttagaggctttgtgcaggcgcgcaaacagctaaaagaacaaggacagtcacttggagaagcacatttatacttcggctgccgttcacctcatgaagactatctgtatcaagaagagcttgaaaacgcccaaagcgaaggcatcattacgcttcataccgctttttctcgcatgccaaatcagccgaaaacatacgttcagcacgtaatggaacaagacggcaagaaattgattgaacttcttgatcaaggagcgcacttctatatttgcggagacggaagccaaatggcacctgccgttgaagcaacgcttatgaaaagctatgctgacgttcaccaagtgagtgaagcagacgctcgcttatggctgcagcagctagaagaaaaaggccgatacgcaaaagacgtgtgggctggg

SEQ ID NO: 140 - protein, 1049 aa, synthetic construct
  REGION 1..1049: note = variant of P450 oxidase from Bacillus megaterium
MTIKEMPQPKTFGELKNLPLLNTDKPVQALMRIADELGEIFKFEAPGSVTRYLSSQRLIKEACDESRFDKNLSQALKFARDFAGDGLATSWTHEPNWKKAHNILVPSFSQHAMGRYHAMMVDIAVQLVQKWERLNADEHIEVSEDMTRLTLDTIGLCGFNYRFNSFYRDQPHPFIVSMVRALDEVMNKLQRANPDDPAYDENKRQCQEDIKVMNDYVDKIIADRKARGEQSHDLLTQMLNGKDPETGEPLDDGNIRYQIITFLIAGHQTTSGLLSFALYFLVKNPHVLQKVAEEAARVLVDPVPSYKQVKQLKYVGMVLNEALRLWPTAPAFSLYAKEDTVLGGEYPLTKGDEVMVLVPQLHRDKTIWGDDVEEFRPERFENPSAIPQHAFKPFGNGQRACIGQQFALHEATLVLGMMLKHFDFEDHTNYELVIKETRTLKPEGFVVKAKSKGIPLGGIPSPSTEQSAKKVRKKAENAHNTPLLVLYGSNAGTAEGTARDLADIAMSKGFAPQVATLDSHAGNLPREGAVLIVTASYNGHPPDNAKQFVDWLDQASADEVKGVRYSVFGCGDKNWAATYQKVPAFIDETLAAKGAENIADRGEADASDDFEGTYEEWRDHMWSDVAAYFNLDIENSEDNKSTLSLQFVDSAADMPLAKMHGAFSTNVVASKELQQPGSARSTRHLEIELPKEASYQEGDHLGVIPRNYEGIVNRVTARFGLSASQQIRLEAEEEKLAHLPLAKTVSVEELLQYVELQDPVTRTQLRAMAAKTVCPPHKVELEALLEKQAYKEQVLAKRLTMLELLEKYPACEMKFSEFIALLPSIRPRYYSISSSPRVDEKQASITVSVVSGPAWSGYGEYKGIASNYLAELQEGDTITCFISTPQSEFTLPKDPETPLIMVGPGTGVAPFRGFVQARKQLKEQGQSLGEAHLYFGCRSPHEDYLYQEELENAQSEGIITLHTAFSRMPNQPKTYVQHVMEQDGKKLIELLDQGAHFYICGDGSQMAPAVEATLMKSYADVHQVSEADARLWLQQLEEKGRYAKDVWAG

SEQ ID NO: 141 - DNA, 3147 bp, synthetic construct
  misc_feature 1..3147: note = variant of P450 oxidase from Bacillus megaterium
  source 1..3147: mol_type = other DNA
atgacaattaaggaaatgcctcagcctaagacgtttggagaacttaaaaatttaccgttattaaacacagataaaccggttcaagctttgatgcgtattgcggatgaattaggagaaatctttaaattcgaggcgcctggtagcgtaacgcgctatttatcaagtcagcgtctaattaaagaagcatgcgatgaatcacgctttgataaaaacttaagtcaagcgcttaaatttgcacgtgattttgctggagacgggttagccacaagctggacgcatgaaccgaattggaaaaaagcgcataatatcttagttccaagctttagtcagcatgcaatggggcgttatcatgcgatgatggtcgatatcgccgtgcagcttgttcaaaagtgggagcgtctaaatgcagatgagcatattgaagtatcggaagacatgacacgtttaacgcttgatacaattggtctttgcggctttaactatcgctttaacagcttttaccgagatcagcctcatccatttattgtgagtatggtccgtgcactggatgaagtaatgaacaagctgcagcgagcaaatccagacgacccagcttatgatgaaaacaagcgccagtgtcaagaagatatcaaggtgatgaacgactatgtagataaaattattgcagatcgcaaagcaaggggtgaacaaagtcatgatttattaacgcagatgctaaacggaaaagatccagaaacgggtgagccgcttgatgacgggaacattcgttatcaaattattacattcttaattgcgggacaccaaacaacaagtggtcttttatcatttgcgctgtatttcttagtgaaaaatccacatgtattacaaaaagtagcagaagaagcagcacgagttctagtagatcctgttccaagctacaaacaagtcaaacagcttaaatatgtcggcatggtcttaaacgaagcgctgcgcttatggccagtagcgcctatgttttccctatatgcaaaagaagatacggtgcttggaggagaatatcctttaacgaaaggcgacgaagtaatggttctgattcctcagcttcaccgtgataaaacaatttggggagacgatgtggaggagttccgtccagagcgttttgaaaatccaagtgcgattccgcagcatgcgtttaaaccgtttggaaacggtcagcgtgcgtgtatcggtcagcagttcgctcttcatgaagcaacgctggtacttggtatgatgctaaaacactttgactttgaagatcatacaaactacgagctcgttattaaagaaactcggacgttaaaacctgaaggctttgtggtaaaagcaaaatcgaaaggcattccgcttggcggtattccttcacctagcactgaacagtctgctaaaaaagtacgcaaaaaggcagaaaacgctcataatacgccgctgcttgtgctatacggttcaaatgcgggaacagctgaaggaacggcgcgtgatttagcagatattgcaatgagcaaaggatttgcaccgcaggtcgcaacgcttgattcacacgccggaaatcttccgcgcgaaggagctgtattaattgtaacggcgtcttataacggtcatccgcctgataacgcaaagcaatttgtcgactggttagaccaagcgtctgctgatgaagtaaaaggcgttcgctactccgtatttggatgcggcgataaaaattgggctgcgacgtatcaaaaagtgcctgcttttatcgatgaaacgcttgccgctaaaggggcagaaaacatcgctgaccgcggtgaagcagatgcaagcgacgactttgaaggcacatatgaagaatggcgtgatcatatgtggagtgacgtagcagcctactttaacctcgacattgaaaacagtgaagataataaatctactctttcacttcaatttgtcgacagcgccgcggatatgccgcttgcgaaaatgcacggtgcgttttcaacgaacgtcgtagcaagcaaagaacttcaacagccaggcagtgcacgaagcacgcgacatcttgaaattgaacttccaaaagaagcttcttatcaagaaggagatcatttaggtgttattcctcgcaactatgaaggaatagtaaaccgtgtaacagcaaggttcggcctaagcgcatcacagcaaatccgtctggaagcagaagaagaaaaattagctcatttgccactcgctaaaacagtatccgtagaagagcttctgcaatacgtggagcttcaagatcctgttacgcgcacgcagcttcgcgcaatggctgctaaaacggtctgcccgccgcataaagtagagcttgaagccttgcttgaaaagcaagcctacaaagaacaagtgctggcaaaacgtttaacaatgcttgaactgcttgaaaaatacccggcgtgtgaaatgaaattcagcgaatttatcgcccttctgccaagcatacgcccgcgctattactcgatttcttcatcacctcgtgtcgatgaaaaacaagcaagcatcacggtcagcgttgtctcaggaccggcgtggagcggatatggagaatataaaggaattgcgtcgaactatcttgccgagctgcaagaaggagatacgattacgtgctttatttccacaccgcagtcagaatttacgctgccaaaagaccctgaaacgccgcttatcatggtcggaccgggaacaggcgtcgcgccgtttagaggctttgtgcaggcgcgcaaacagctaaaagaacaaggacagtcacttggagaagcacatttatacttcggctgccgttcacctcatgaagactatctgtatcaagaagagcttgaaaacgcccaaagcgaaggcatcattacgcttcataccgctttttctcgcatgccaaatcagccgaaaacatacgttcagcacgtaatggaacaagacggcaagaaattgattgaacttcttgatcaaggagcgcacttctatatttgcggagacggaagccaaatggcacctgccgttgaagcaacgcttatgaaaagctatgctgacgttcaccaagtgagtgaagcagacgctcgcttatggctgcagcagctagaagaaaaaggccgatacgcaaaagacgtgtgggctggg

SEQ ID NO: 142 - protein, 1049 aa, synthetic construct
  REGION 1..1049: note = variant of P450 oxidase from Bacillus megaterium
MTIKEMPQPKTFGELKNLPLLNTDKPVQALMRIADELGEIFKFEAPGSVTRYLSSQRLIKEACDESRFDKNLSQALKFARDFAGDGLATSWTHEPNWKKAHNILVPSFSQHAMGRYHAMMVDIAVQLVQKWERLNADEHIEVSEDMTRLTLDTIGLCGFNYRFNSFYRDQPHPFIVSMVRALDEVMNKLQRANPDDPAYDENKRQCQEDIKVMNDYVDKIIADRKARGEQSHDLLTQMLNGKDPETGEPLDDGNIRYQIITFLIAGHQTTSGLLSFALYFLVKNPHVLQKVAEEAARVLVDPVPSYKQVKQLKYVGMVLNEALRLWPVAPMFSLYAKEDTVLGGEYPLTKGDEVMVLIPQLHRDKTIWGDDVEEFRPERFENPSAIPQHAFKPFGNGQRACIGQQFALHEATLVLGMMLKHFDFEDHTNYELVIKETRTLKPEGFVVKAKSKGIPLGGIPSPSTEQSAKKVRKKAENAHNTPLLVLYGSNAGTAEGTARDLADIAMSKGFAPQVATLDSHAGNLPREGAVLIVTASYNGHPPDNAKQFVDWLDQASADEVKGVRYSVFGCGDKNWAATYQKVPAFIDETLAAKGAENIADRGEADASDDFEGTYEEWRDHMWSDVAAYFNLDIENSEDNKSTLSLQFVDSAADMPLAKMHGAFSTNVVASKELQQPGSARSTRHLEIELPKEASYQEGDHLGVIPRNYEGIVNRVTARFGLSASQQIRLEAEEEKLAHLPLAKTVSVEELLQYVELQDPVTRTQLRAMAAKTVCPPHKVELEALLEKQAYKEQVLAKRLTMLELLEKYPACEMKFSEFIALLPSIRPRYYSISSSPRVDEKQASITVSVVSGPAWSGYGEYKGIASNYLAELQEGDTITCFISTPQSEFTLPKDPETPLIMVGPGTGVAPFRGFVQARKQLKEQGQSLGEAHLYFGCRSPHEDYLYQEELENAQSEGIITLHTAFSRMPNQPKTYVQHVMEQDGKKLIELLDQGAHFYICGDGSQMAPAVEATLMKSYADVHQVSEADARLWLQQLEEKGRYAKDVWAG

SEQ ID NO: 143 - DNA, 3147 bp, synthetic construct
  misc_feature 1..3147: note = variant of P450 oxidase from Bacillus megaterium
  source 1..3147: mol_type = other DNA
atgacaattaaggaaatgcctcagcctaagacgtttggagaacttaaaaatttaccgttattaaacacagataaaccggttcaagctttgatgcgtattgcggatgaattaggagaaatctttaaattcgaggcgcctggtagcgtaacgcgctatttatcaagtcagcgtctaattaaagaagcatgcgatgaatcacgctttgataaaaacttaagtcaagcgcttaaatttgcacgtgattttgctggagacgggttagccacaagctggacgcatgaaccgaattggaaaaaagcgcataatatcttagttccaagctttagtcagcatgcaatggggcgttatcatgcgatgatggtcgatatcgccgtgcagcttgttcaaaagtgggagcgtctaaatgcagatgagcatattgaagtatcggaagacatgacacgtttaacgcttgatacaattggtctttgcggctttaactatcgctttaacagcttttaccgagatcagcctcatccatttattgtgagtatggtccgtgcactggatgaagtaatgaacaagctgcagcgagcaaatccagacgacccagcttatgatgaaaacaagcgccagtgtcaagaagatatcaaggtgatgaacgactatgtagataaaattattgcagatcgcaaagcaaggggtgaacaaagtcatgatttattaacgcagatgctaaacggaaaagatccagaaacgggtgagccgcttgatgacgggaacattcgttatcaaattattacattcttaattgcgggacacgaaacaacaagtggtcttttatcatttgcgctgtatttcttagtgaaaaatccacatgtattacaaaaagtagcagaagaagcagcacgagttctagtagatcctgttccaagctacaaacaagtcaaacagcttaaatatgtcggcatggtcttaaacgaagcgctgcgcttatggccagtagcgcctatgttttccctatatgcaaaagaagatacggtgcttggaggagaatatcctttaacgaaaggcgacgaagtaatggttctgactcctcagcttcaccgtgataaaacaatttggggagacgatgtggaggagttccgtccagagcgttttgaaaatccaagtgcgattccgcagcatgcgtttaaaccgtttggaaacggtcagcgtgcgtgtatcggtcagcagttcgctcttcatgaagcaacgctggtacttggtatgatgctaaaacactttgactttgaagatcatacaaactacgagctcgttattaaagaaactcggacgttaaaacctgaaggctttgtggtaaaagcaaaatcgaaaggcattccgcttggcggtattccttcacctagcactgaacagtctgctaaaaaagtacgcaaaaaggcagaaaacgctcataatacgccgctgcttgtgctatacggttcaaatgcgggaacagctgaaggaacggcgcgtgatttagcagatattgcaatgagcaaaggatttgcaccgcaggtcgcaacgcttgattcacacgccggaaatcttccgcgcgaaggagctgtattaattgtaacggcgtcttataacggtcatccgcctgataacgcaaagcaatttgtcgactggttagaccaagcgtctgctgatgaagtaaaaggcgttcgctactccgtatttggatgcggcgataaaaattgggctgcgacgtatcaaaaagtgcctgcttttatcgatgaaacgcttgccgctaaaggggcagaaaacatcgctgaccgcggtgaagcagatgcaagcgacgactttgaaggcacatatgaagaatggcgtgatcatatgtggagtgacgtagcagcctactttaacctcgacattgaaaacagtgaagataataaatctactctttcacttcaatttgtcgacagcgccgcggatatgccgcttgcgaaaatgcacggtgcgttttcaacgaacgtcgtagcaagcaaagaacttcaacagccaggcagtgcacgaagcacgcgacatcttgaaattgaacttccaaaagaagcttcttatcaagaaggagatcatttaggtgttattcctcgcaactatgaaggaatagtaaaccgtgtaacagcaaggttcggcctaagcgcatcacagcaaatccgtctggaagcagaagaagaaaaattagctcatttgccactcgctaaaacagtatccgtagaagagcttctgcaatacgtggagcttcaagatcctgttacgcgcacgcagcttcgcgcaatggctgctaaaacggtctgcccgccgcataaagtagagcttgaagccttgcttgaaaagcaagcctacaaagaacaagtgctggcaaaacgtttaacaatgcttgaactgcttgaaaaatacccggcgtgtgaaatgaaattcagcgaatttatcgcccttctgccaagcatacgcccgcgctattactcgatttcttcatcacctcgtgtcgatgaaaaacaagcaagcatcacggtcagcgttgtctcaggaccggcgtggagcggatatggagaatataaaggaattgcgtcgaactatcttgccgagctgcaagaaggagatacgattacgtgctttatttccacaccgcagtcagaatttacgctgccaaaagaccctgaaacgccgcttatcatggtcggaccgggaacaggcgtcgcgccgtttagaggctttgtgcaggcgcgcaaacagctaaaagaacaaggacagtcacttggagaagcacatttatacttcggctgccgttcacctcatgaagactatctgtatcaagaagagcttgaaaacgcccaaagcgaaggcatcattacgcttcataccgctttttctcgcatgccaaatcagccgaaaacatacgttcagcacgtaatggaacaagacggcaagaaattgattgaacttcttgatcaaggagcgcacttctatatttgcggagacggaagccaaatggcacctgccgttgaagcaacgcttatgaaaagctatgctgacgttcaccaagtgagtgaagcagacgctcgcttatggctgcagcagctagaagaaaaaggccgatacgcaaaagacgtgtgggctggg

SEQ ID NO: 144 - protein, 1049 aa, synthetic construct
  REGION 1..1049: note = variant of P450 oxidase from Bacillus megaterium
MTIKEMPQPKTFGELKNLPLLNTDKPVQALMRIADELGEIFKFEAPGSVTRYLSSQRLIKEACDESRFDKNLSQALKFARDFAGDGLATSWTHEPNWKKAHNILVPSFSQHAMGRYHAMMVDIAVQLVQKWERLNADEHIEVSEDMTRLTLDTIGLCGFNYRFNSFYRDQPHPFIVSMVRALDEVMNKLQRANPDDPAYDENKRQCQEDIKVMNDYVDKIIADRKARGEQSHDLLTQMLNGKDPETGEPLDDGNIRYQIITFLIAGHETTSGLLSFALYFLVKNPHVLQKVAEEAARVLVDPVPSYKQVKQLKYVGMVLNEALRLWPVAPMFSLYAKEDTVLGGEYPLTKGDEVMVLTPQLHRDKTIWGDDVEEFRPERFENPSAIPQHAFKPFGNGQRACIGQQFALHEATLVLGMMLKHFDFEDHTNYELVIKETRTLKPEGFVVKAKSKGIPLGGIPSPSTEQSAKKVRKKAENAHNTPLLVLYGSNAGTAEGTARDLADIAMSKGFAPQVATLDSHAGNLPREGAVLIVTASYNGHPPDNAKQFVDWLDQASADEVKGVRYSVFGCGDKNWAATYQKVPAFIDETLAAKGAENIADRGEADASDDFEGTYEEWRDHMWSDVAAYFNLDIENSEDNKSTLSLQFVDSAADMPLAKMHGAFSTNVVASKELQQPGSARSTRHLEIELPKEASYQEGDHLGVIPRNYEGIVNRVTARFGLSASQQIRLEAEEEKLAHLPLAKTVSVEELLQYVELQDPVTRTQLRAMAAKTVCPPHKVELEALLEKQAYKEQVLAKRLTMLELLEKYPACEMKFSEFIALLPSIRPRYYSISSSPRVDEKQASITVSVVSGPAWSGYGEYKGIASNYLAELQEGDTITCFISTPQSEFTLPKDPETPLIMVGPGTGVAPFRGFVQARKQLKEQGQSLGEAHLYFGCRSPHEDYLYQEELENAQSEGIITLHTAFSRMPNQPKTYVQHVMEQDGKKLIELLDQGAHFYICGDGSQMAPAVEATLMKSYADVHQVSEADARLWLQQLEEKGRYAKDVWAG

SEQ ID NO: 145 - DNA, 3147 bp, synthetic construct
  misc_feature 1..3147: note = variant of P450 oxidase from Bacillus megaterium
  source 1..3147: mol_type = other DNA
atgacaattaaggaaatgcctcagcctaagacgtttggagaacttaaaaatttaccgttattaaacacagataaaccggttcaagctttgatgcgtattgcggatgaattaggagaaatctttaaattcgaggcgcctggtagcgtaacgcgctatttatcaagtcagcgtctaattaaagaagcatgcgatgaatcacgctttgataaaaacttaagtcaagcgcttaaatttgcacgtgattttgctggagacgggttagccacaagctggacgcatgaaccgaattggaaaaaagcgcataatatcttagttccaagctttagtcagcatgcaatggggcgttatcatgcgatgatggtcgatatcgccgtgcagcttgttcaaaagtgggagcgtctaaatgcagatgagcatattgaagtatcggaagacatgacacgtttaacgcttgatacaattggtctttgcggctttaactatcgctttaacagcttttaccgagatcagcctcatccatttattgtgagtatggtccgtgcactggatgaagtaatgaacaaggggcagcgagcaaatccagacgacccagcttatgatgaaaacaagcgccagtgtcaagaagatatcaaggtgatgaacgactatgtagataaaattattgcagatcgcaaagcaaggggtgaacaaagtcatgatttattaacgcagatgctaaacggaaaagatccagaaacgggtgagccgcttgatgacgggaacattcgttatcaaattattacattcttaattgcgggacaccaaacaacaagtggtcttttatcatttgcgctgtatttcttagtgaaaaatccacatgtattacaaaaagtagcagaagaagcagcacgagttctagtagatcctgttccaagctacaaacaagtcaaacagcttaaatatgtcggcatggtcttaaacgaagcgctgcgcttatggccaactgcgcctgctttttccctatatgcaaaagaagatacggtgcttggaggagaatatcctttaacgaaaggcgacgaagtaatggttctggtgcctcagcttcaccgtgataaaacaatttggggagacgatgtggaggagttccgtccagagcgttttgaaaatccaagtgcgattccgcagcatgcgtttaaaccgtttggaaacggtcagcgtgcgtgtatcggtcagcagttcgctcttcatgaagcaacgctggtacttggtatgatgctaaaacactttgactttgaagatcatacaaactacgagctcgttattaaagaaactcggacgttaaaacctgaaggctttgtggtaaaagcaaaatcgaaaggcattccgcttggcggtattccttcacctagcactgaacagtctgctaaaaaagtacgcaaaaaggcagaaaacgctcataatacgccgctgcttgtgctatacggttcaaatgcgggaacagctgaaggaacggcgcgtgatttagcagatattgcaatgagcaaaggatttgcaccgcaggtcgcaacgcttgattcacacgccggaaatcttccgcgcgaaggagctgtattaattgtaacggcgtcttataacggtcatccgcctgataacgcaaagcaatttgtcgactggttagaccaagcgtctgctgatgaagtaaaaggcgttcgctactccgtatttggatgcggcgataaaaattgggctgcgacgtatcaaaaagtgcctgcttttatcgatgaaacgcttgccgctaaaggggcagaaaacatcgctgaccgcggtgaagcagatgcaagcgacgactttgaaggcacatatgaagaatggcgtgatcatatgtggagtgacgtagcagcctactttaacctcgacattgaaaacagtgaagataataaatctactctttcacttcaatttgtcgacagcgccgcggatatgccgcttgcgaaaatgcacggtgcgttttcaacgaacgtcgtagcaagcaaagaacttcaacagccaggcagtgcacgaagcacgcgacatcttgaaattgaacttccaaaagaagcttcttatcaagaaggagatcatttaggtgttattcctcgcaactatgaaggaatagtaaaccgtgtaacagcaaggttcggcctaagcgcatcacagcaaatccgtctggaagcagaagaagaaaaattagctcatttgccactcgctaaaacagtatccgtagaagagcttctgcaatacgtggagcttcaagatcctgttacgcgcacgcagcttcgcgcaatggctgctaaaacggtctgcccgccgcataaagtagagcttgaagccttgcttgaaaagcaagcctacaaagaacaagtgctggcaaaacgtttaacaatgcttgaactgcttgaaaaatacccggcgtgtgaaatgaaattcagcgaatttatcgcccttctgccaagcatacgcccgcgctattactcgatttcttcatcacctcgtgtcgatgaaaaacaagcaagcatcacggtcagcgttgtctcaggaccggcgtggagcggatatggagaatataaaggaattgcgtcgaactatcttgccgagctgcaagaaggagatacgattacgtgctttatttccacaccgcagtcagaatttacgctgccaaaagaccctgaaacgccgcttatcatggtcggaccgggaacaggcgtcgcgccgtttagaggctttgtgcaggcgcgcaaacagctaaaagaacaaggacagtcacttggagaagcacatttatacttcggctgccgttcacctcatgaagactatctgtatcaagaagagcttgaaaacgcccaaagcgaaggcatcattacgcttcataccgctttttctcgcatgccaaatcagccgaaaacatacgttcagcacgtaatggaacaagacggcaagaaattgattgaacttcttgatcaaggagcgcacttctatatttgcggagacggaagccaaatggcacctgccgttgaagcaacgcttatgaaaagctatgctgacgttcaccaagtgagtgaagcagacgctcgcttatggctgcagcagctagaagaaaaaggccgatacgcaaaagacgtgtgggctggg

SEQ ID NO: 146 - protein, 1049 aa, synthetic construct
  REGION 1..1049: note = variant of P450 oxidase from Bacillus megaterium
MTIKEMPQPKTFGELKNLPLLNTDKPVQALMRIADELGEIFKFEAPGSVTRYLSSQRLIKEACDESRFDKNLSQALKFARDFAGDGLATSWTHEPNWKKAHNILVPSFSQHAMGRYHAMMVDIAVQLVQKWERLNADEHIEVSEDMTRLTLDTIGLCGFNYRFNSFYRDQPHPFIVSMVRALDEVMNKGQRANPDDPAYDENKRQCQEDIKVMNDYVDKIIADRKARGEQSHDLLTQMLNGKDPETGEPLDDGNIRYQIITFLIAGHQTTSGLLSFALYFLVKNPHVLQKVAEEAARVLVDPVPSYKQVKQLKYVGMVLNEALRLWPTAPAFSLYAKEDTVLGGEYPLTKGDEVMVLVPQLHRDKTIWGDDVEEFRPERFENPSAIPQHAFKPFGNGQRACIGQQFALHEATLVLGMMLKHFDFEDHTNYELVIKETRTLKPEGFVVKAKSKGIPLGGIPSPSTEQSAKKVRKKAENAHNTPLLVLYGSNAGTAEGTARDLADIAMSKGFAPQVATLDSHAGNLPREGAVLIVTASYNGHPPDNAKQFVDWLDQASADEVKGVRYSVFGCGDKNWAATYQKVPAFIDETLAAKGAENIADRGEADASDDFEGTYEEWRDHMWSDVAAYFNLDIENSEDNKSTLSLQFVDSAADMPLAKMHGAFSTNVVASKELQQPGSARSTRHLEIELPKEASYQEGDHLGVIPRNYEGIVNRVTARFGLSASQQIRLEAEEEKLAHLPLAKTVSVEELLQYVELQDPVTRTQLRAMAAKTVCPPHKVELEALLEKQAYKEQVLAKRLTMLELLEKYPACEMKFSEFIALLPSIRPRYYSISSSPRVDEKQASITVSVVSGPAWSGYGEYKGIASNYLAELQEGDTITCFISTPQSEFTLPKDPETPLIMVGPGTGVAPFRGFVQARKQLKEQGQSLGEAHLYFGCRSPHEDYLYQEELENAQSEGIITLHTAFSRMPNQPKTYVQHVMEQDGKKLIELLDQGAHFYICGDGSQMAPAVEATLMKSYADVHQVSEADARLWLQQLEEKGRYAKDVWAG

SEQ ID NO: 147 - DNA, 3147 bp, synthetic construct
  misc_feature 1..3147: note = variant of P450 oxidase from Bacillus megaterium
  source 1..3147: mol_type = other DNA
atgacaattaaggaaatgcctcagcctaagacgtttggagaacttaaaaatttaccgttattaaacacagataaaccggttcaagctttgatgcgtattgcggatgaattaggagaaatctttaaattcgaggcgcctggtagcgtaacgcgctatttatcaagtcagcgtctaattaaagaagcatgcgatgaatcacgctttgataaaaacttaagtcaagcgcttaaatttgcacgtgattttgttggagacgggttagccacaagctggacgcatgaaccgaattggaaaaaagcgcataatatcttagttccaagctttagtcagcatgcaatggggcgttatcatgcgatgatggtcgatatcgccgtgcagcttgttcaaaagtgggagcgtctaaatgcagatgagcatattgaagtatcggaagacatgacacgtttaacgcttgatacaattggtctttgcggctttaactatcgctttaacagcttttaccgagatcagcctcatccatttattgtgagtatggtccgtgcactggatgaagtaatgaacaagctgcagcgagcaaatccagacgacccagcttatgatgaaaacaagcgccagtgtcaagaagatatcaaggtgatgaacgactatgtagataaaattattgcagatcgcaaagcaaggggtgaacaaagtcatgatttattaacgcagatgctaaacggaaaagatccagaaacgggtgagccgcttgatgacgggaacattcgttatcaaattattacattcttaattgcgggacaccaaacaacaagtggtcttttatcatttgcgctgtatttcttagtgaaaaatccacatgtattacaaaaagtagcagaagaagcagcacgagttctagtagatcctgttccaagctacaaacaagtcaaacagcttaaatatgtcggcatggtcttaaacgaagcgctgcgcttatggccaacggcgcctactttttccctatatgcaaaagaagatacggtgcttggaggagaatatcctttaacgaaaggcgacgaagtaatggttctgattcctcagcttcaccgtgataaaacaatttggggagacgatgtggaggagttccgtccagagcgttttgaaaatccaagtgcgattccgcagcatgcgtttaaaccgtttggaaacggtcagcgtgcgtgtatcggtcagcagttcgctcttcatgaagcaacgctggtacttggtatgatgctaaaacactttgactttgaagatcatacaaactacgagctcgttattaaagaaactcggacgttaaaacctgaaggctttgtggtaaaagcaaaatcgaaaggcattccgcttggcggtattccttcacctagcactgaacagtctgctaaaaaagtacgcaaaaaggcagaaaacgctcataatacgccgctgcttgtgctatacggttcaaatgcgggaacagctgaaggaacggcgcgtgatttagcagatattgcaatgagcaaaggatttgcaccgcaggtcgcaacgcttgattcacacgccggaaatcttccgcgcgaaggagctgtattaattgtaacggcgtcttataacggtcatccgcctgataacgcaaagcaatttgtcgactggttagaccaagcgtctgctgatgaagtaaaaggcgttcgctactccgtatttggatgcggcgataaaaattgggctgcgacgtatcaaaaagtgcctgcttttatcgatgaaacgcttgccgctaaaggggcagaaaacatcgctgaccgcggtgaagcagatgcaagcgacgactttgaaggcacatatgaagaatggcgtgatcatatgtggagtgacgtagcagcctactttaacctcgacattgaaaacagtgaagataataaatctactctttcacttcaatttgtcgacagcgccgcggatatgccgcttgcgaaaatgcacggtgcgttttcaacgaacgtcgtagcaagcaaagaacttcaacagccaggcagtgcacgaagcacgcgacatcttgaaattgaacttccaaaagaagcttcttatcaagaaggagatcatttaggtgttattcctcgcaactatgaaggaatagtaaaccgtgtaacagcaaggttcggcctaagcgcatcacagcaaatccgtctggaagcagaagaagaaaaattagctcatttgccactcgctaaaacagtatccgtagaagagcttctgcaatacgtggagcttcaagatcctgttacgcgcacgcagcttcgcgcaatggctgctaaaacggtctgcccgccgcataaagtagagcttgaagccttgcttgaaaagcaagcctacaaagaacaagtgctggcaaaacgtttaacaatgcttgaactgcttgaaaaatacccggcgtgtgaaatgaaattcagcgaatttatcgcccttctgccaagcatacgcccgcgctattactcgatttcttcatcacctcgtgtcgatgaaaaacaagcaagcatcacggtcagcgttgtctcaggaccggcgtggagcggatatggagaatataaaggaattgcgtcgaactatcttgccgagctgcaagaaggagatacgattacgtgctttatttccacaccgcagtcagaatttacgctgccaaaagaccctgaaacgccgcttatcatggtcggaccgggaacaggcgtcgcgccgtttagaggctttgtgcaggcgcgcaaacagctaaaagaacaaggacagtcacttggagaagcacatttatacttcggctgccgttcacctcatgaagactatctgtatcaagaagagcttgaaaacgcccaaagcgaaggcatcattacgcttcataccgctttttctcgcatgccaaatcagccgaaaacatacgttcagcacgtaatggaacaagacggcaagaaattgattgaacttcttgatcaaggagcgcacttctatatttgcggagacggaagccaaatggcacctgccgttgaagcaacgcttatgaaaagctatgctgacgttcaccaagtgagtgaagcagacgctcgcttatggctgcagcagctagaagaaaaaggccgatacgcaaaagacgtgtgggctggg

SEQ ID NO: 148 - protein, 1049 aa, synthetic construct
  REGION 1..1049: note = variant of P450 oxidase from Bacillus megaterium
MTIKEMPQPKTFGELKNLPLLNTDKPVQALMRIADELGEIFKFEAPGSVTRYLSSQRLIKEACDESRFDKNLSQALKFARDFVGDGLATSWTHEPNWKKAHNILVPSFSQHAMGRYHAMMVDIAVQLVQKWERLNADEHIEVSEDMTRLTLDTIGLCGFNYRFNSFYRDQPHPFIVSMVRALDEVMNKLQRANPDDPAYDENKRQCQEDIKVMNDYVDKIIADRKARGEQSHDLLTQMLNGKDPETGEPLDDGNIRYQIITFLIAGHQTTSGLLSFALYFLVKNPHVLQKVAEEAARVLVDPVPSYKQVKQLKYVGMVLNEALRLWPTAPTFSLYAKEDTVLGGEYPLTKGDEVMVLIPQLHRDKTIWGDDVEEFRPERFENPSAIPQHAFKPFGNGQRACIGQQFALHEATLVLGMMLKHFDFEDHTNYELVIKETRTLKPEGFVVKAKSKGIPLGGIPSPSTEQSAKKVRKKAENAHNTPLLVLYGSNAGTAEGTARDLADIAMSKGFAPQVATLDSHAGNLPREGAVLIVTASYNGHPPDNAKQFVDWLDQASADEVKGVRYSVFGCGDKNWAATYQKVPAFIDETLAAKGAENIADRGEADASDDFEGTYEEWRDHMWSDVAAYFNLDIENSEDNKSTLSLQFVDSAADMPLAKMHGAFSTNVVASKELQQPGSARSTRHLEIELPKEASYQEGDHLGVIPRNYEGIVNRVTARFGLSASQQIRLEAEEEKLAHLPLAKTVSVEELLQYVELQDPVTRTQLRAMAAKTVCPPHKVELEALLEKQAYKEQVLAKRLTMLELLEKYPACEMKFSEFIALLPSIRPRYYSISSSPRVDEKQASITVSVVSGPAWSGYGEYKGIASNYLAELQEGDTITCFISTPQSEFTLPKDPETPLIMVGPGTGVAPFRGFVQARKQLKEQGQSLGEAHLYFGCRSPHEDYLYQEELENAQSEGIITLHTAFSRMPNQPKTYVQHVMEQDGKKLIELLDQGAHFYICGDGSQMAPAVEATLMKSYADVHQVSEADARLWLQQLEEKGRYAKDVWAG

SEQ ID NO: 149 - DNA, 3147 bp, synthetic construct
  misc_feature 1..3147: note = variant of P450 oxidase from Bacillus megaterium
  source 1..3147: mol_type = other DNA
atgacaattaaggaaatgcctcagcctaagacgtttggagaacttaaaaatttaccgttattaaacacagataaaccggttcaagctttgatgcgtattgcggatgaattaggagaaatctttaaattcgaggcgcctggtagcgtaacgcgctatttatcaagtcagcgtctaattaaagaagcatgcgatgaatcacgctttgataaaaacttaagtcaagctcttaaatttgcacgtgattttgttggagacgggttagccacaagctggacgcatgaaccgaattggaaaaaagcgcataatatcttagttccaagctttagtcagcatgcaatggggcgttatcatgcgatgatggtcgatatcgccgtgcagcttgttcaaaagtgggagcgtctaaatgcagatgagcatattgaagtatcggaagacatgacacgtttaacgcttgatacaattggtctttgcggctttaactatcgctttaacagcttttaccgagatcagcctcatccatttattgtgagtatgcgccgtgcactggatgaagtaatgaacaagctgcagcgagcaaatccagacgacccagcttatgatgaaaacaagcgccagtgtcaagaagatatcaaggtgatgaacgactatgtagataaaattattgcagatcgcaaagcaaggggtgaacaaagtcatgatttattaacgcagatgctaaacggaaaagatccagaaacgggtgagccgcttgatgacgggaacattcgttatcaaattattacattcttaattgcgggacacgaaacaacaagtggtcttttatcatttgcgctgtatttcttagtgaaaaatccacatgtattacaaaaagtagcagaagaagcagcacgagttctagtagatcctgttccaagctacaaacaagtcaaacagcttaaatatgtcggcatggtcttaaacgaagcgctgcgcttatggccaactgcgcctgcgttttccctatatgcaaaagaagatacggtgcttggaggagaatatcctttaacgaaaggcgacgaagtagtggttctggtgcctcagcttcaccgtgataaaacaatttggggagacgatgtggaggagttccgtccagagcgttttgaaaatccaagtgcgattccgcagcatgcgtttaaaccgtttggaaacggtcagcgtgcgtgtatcggtcagcagttcgctcttcatgaagcaacgctggtacttggtatgatgctaaaacactttgactttgaagatcatacaaactacgagctcgttattaaagaaggtcggacgttaaaacctgaaggctttgtggtaaaagcaaaatcgaaaggcattccgcttggcggtattccttcacctagcactgaacagtctgctaaaaaagtacgcaaaaaggcagaaaacgctcataatacgccgctgcttgtgctatacggttcaaatgcgggaacagctgaaggaacggcgcgtgatttagcagatattgcaatgagcaaaggatttgcaccgcaggtcgcaacgcttgattcacacgccggaaatcttccgcgcgaaggagctgtattaattgtaacggcgtcttataacggtcatccgcctgataacgcaaagcaatttgtcgactggttagaccaagcgtctgctgatgaagtaaaaggcgttcgctactccgtatttggatgcggcgataaaaattgggctgcgacgtatcaaaaagtgcctgcttttatcgatgaaacgcttgccgctaaaggggcagaaaacatcgctgaccgcggtgaagcagatgcaagcgacgactttgaaggcacatatgaagaatggcgtgatcatatgtggagtgacgtagcagcctactttaacctcgacattgaaaacagtgaagataataaatctactctttcacttcaatttgtcgacagcgccgcggatatgccgcttgcgaaaatgcacggtgcgttttcaacgaacgtcgtagcaagcaaagaacttcaacagccaggcagtgcacgaagcacgcgacatcttgaaattgaacttccaaaagaagcttcttatcaagaaggagatcatttaggtgttattcctcgcaactatgaaggaatagtaaaccgtgtaacagcaaggttcggcctaagcgcatcacagcaaatccgtctggaagcagaagaagaaaaattagctcatttgccactcgctaaaacagtatccgtagaagagcttctgcaatacgtggagcttcaagatcctgttacgcgcacgcagcttcgcgcaatggctgctaaaacggtctgcccgccgcataaagtagagcttgaagccttgcttgaaaagcaagcctacaaagaacaagtgctggcaaaacgtttaacaatgcttgaactgcttgaaaaatacccggcgtgtgaaatgaaattcagcgaatttatcgcccttctgccaagcatacgcccgcgctattactcgatttcttcatcacctcgtgtcgatgaaaaacaagcaagcatcacggtcagcgttgtctcaggaccggcgtggagcggatatggagaatataaaggaattgcgtcgaactatcttgccgagctgcaagaaggagatacgattacgtgctttatttccacaccgcagtcagaatttacgctgccaaaagaccctgaaacgccgcttatcatggtcggaccgggaacaggcgtcgcgccgtttagaggctttgtgcaggcgcgcaaacagctaaaagaacaaggacagtcacttggagaagcacatttatacttcggctgccgttcacctcatgaagactatctgtatcaagaagagcttgaaaacgcccaaagcgaaggcatcattacgcttcataccgctttttctcgcatgccaaatcagccgaaaacatacgttcagcacgtaatggaacaagacggcaagaaattgattgaacttcttgatcaaggagcgcacttctatatttgcggagacggaagccaaatggcacctgccgttgaagcaacgcttatgaaaagctatgctgacgttcaccaagtgagtgaagcagacgctcgcttatggctgcagcagctagaagaaaaaggccgatacgcaaaagacgtgtgggctggg

SEQ ID NO: 150 - protein, 1049 aa, synthetic construct
  REGION 1..1049: note = variant of P450 oxidase from Bacillus megaterium
MTIKEMPQPKTFGELKNLPLLNTDKPVQALMRIADELGEIFKFEAPGSVTRYLSSQRLIKEACDESRFDKNLSQALKFARDFVGDGLATSWTHEPNWKKAHNILVPSFSQHAMGRYHAMMVDIAVQLVQKWERLNADEHIEVSEDMTRLTLDTIGLCGFNYRFNSFYRDQPHPFIVSMRRALDEVMNKLQRANPDDPAYDENKRQCQEDIKVMNDYVDKIIADRKARGEQSHDLLTQMLNGKDPETGEPLDDGNIRYQIITFLIAGHETTSGLLSFALYFLVKNPHVLQKVAEEAARVLVDPVPSYKQVKQLKYVGMVLNEALRLWPTAPAFSLYAKEDTVLGGEYPLTKGDEVVVLVPQLHRDKTIWGDDVEEFRPERFENPSAIPQHAFKPFGNGQRACIGQQFALHEATLVLGMMLKHFDFEDHTNYELVIKEGRTLKPEGFVVKAKSKGIPLGGIPSPSTEQSAKKVRKKAENAHNTPLLVLYGSNAGTAEGTARDLADIAMSKGFAPQVATLDSHAGNLPREGAVLIVTASYNGHPPDNAKQFVDWLDQASADEVKGVRYSVFGCGDKNWAATYQKVPAFIDETLAAKGAENIADRGEADASDDFEGTYEEWRDHMWSDVAAYFNLDIENSEDNKSTLSLQFVDSAADMPLAKMHGAFSTNVVASKELQQPGSARSTRHLEIELPKEASYQEGDHLGVIPRNYEGIVNRVTARFGLSASQQIRLEAEEEKLAHLPLAKTVSVEELLQYVELQDPVTRTQLRAMAAKTVCPPHKVELEALLEKQAYKEQVLAKRLTMLELLEKYPACEMKFSEFIALLPSIRPRYYSISSSPRVDEKQASITVSVVSGPAWSGYGEYKGIASNYLAELQEGDTITCFISTPQSEFTLPKDPETPLIMVGPGTGVAPFRGFVQARKQLKEQGQSLGEAHLYFGCRSPHEDYLYQEELENAQSEGIITLHTAFSRMPNQPKTYVQHVMEQDGKKLIELLDQGAHFYICGDGSQMAPAVEATLMKSYADVHQVSEADARLWLQQLEEKGRYAKDVWAG

SEQ ID NO: 151 - DNA, 3147 bp, synthetic construct
  misc_feature 1..3147: note = variant of P450 oxidase from Bacillus megaterium
  source 1..3147: mol_type = other DNA
atgacaattaaggaaatgcctcagcctaagacgtttggagaacttaaaaatttaccgttattaaacacagataaaccggttcaagctttgatgcgtattgcggatgaattaggagaaatctttaaattcgaggcgcctggtagcgtaacgcgctatttatcaagtcagcgtctaattaaagaagcatgcgatgaatcacgctttgataaaaacttaagtgggactcttaaatttgcacgtgattttgttggagacgggttagccacaagctggacgcatgaaccgaattggaaaaaagcgcataatatcttagttccaagctttagtcagcatgcaatggggcgttatcatgcgatgatggtcgatatcgccgtgcagcttgttcaaaagtgggagcgtctaaatgcagatgagcatattgaagtatcggaagacatgacacgtttaacgcttgatacaattggtctttgcggctttaactatcgctttaacagcttttaccgagatcagcctcatccatttattgtgagtatgcgccgtgcactggatgaagtaatgaacaaggggcagcgagcaaatccagacgacccagcttatgatgaaaacaagcgccagtgtcaagaagatatcaaggtgatgaacgactatgtagataaaattattgcagatcgcaaagcaaggggtgaacaaagtcatgatttattaacgcagatgctaaacggaaaagatccagaaacgggtgagccgcttgatgacgggaacattcgttatcaaattattacattcttaattgcgggacacgaaacaacaagtggtcttttatcatttgcgctgtatttcttagtgaaaaatccacatgtattacaaaaagtagcagaagaagcagcacgagttctagtagatcctgttccaagctacaaacaagtcaaacagcttaaatatgtcggcatggtcttaaacgaagcgctgcgcttatggccagtagcgcctactttttccctatatgcaaaagaagatacggtgcttggaggagaatatcctttaacgaaaggcgacgaagtaatggttctgattcctcagcttcaccgtgataaaacaatttggggagacgatgtggaggagttccgtccagagcgttttgaaaatccaagtgcgattccgcagcatgcgtttaaaccgtttggaaacggtcagcgtgcgtgtatcggtcagcagttcgctcttcatgaagcaacgctggtacttggtatgatgctaaaacactttgactttgaagatcatacaaactacgagctcgttattaaagaaggtcggacgttaaaacctgaaggctttgtggtaaaagcaaaatcgaaaggcattccgcttggcggtattccttcacctagcactgaacagtctgctaaaaaagtacgcaaaaaggcagaaaacgctcataatacgccgctgcttgtgctatacggttcaaatgcgggaacagctgaaggaacggcgcgtgatttagcagatattgcaatgagcaaaggatttgcaccgcaggtcgcaacgcttgattcacacgccggaaatcttccgcgcgaaggagctgtattaattgtaacggcgtcttataacggtcatccgcctgataacgcaaagcaatttgtcgactggttagaccaagcgtctgctgatgaagtaaaaggcgttcgctactccgtatttggatgcggcgataaaaattgggctgcgacgtatcaaaaagtgcctgcttttatcgatgaaacgcttgccgctaaaggggcagaaaacatcgctgaccgcggtgaagcagatgcaagcgacgactttgaaggcacatatgaagaatggcgtgatcatatgtggagtgacgtagcagcctactttaacctcgacattgaaaacagtgaagataataaatctactctttcacttcaatttgtcgacagcgccgcggatatgccgcttgcgaaaatgcacggtgcgttttcaacgaacgtcgtagcaagcaaagaacttcaacagccaggcagtgcacgaagcacgcgacatcttgaaattgaacttccaaaagaagcttcttatcaagaaggagatcatttaggtgttattcctcgcaactatgaaggaatagtaaaccgtgtaacagcaaggttcggcctaagcgcatcacagcaaatccgtctggaagcagaagaagaaaaattagctcatttgccactcgctaaaacagtatccgtagaagagcttctgcaatacgtggagcttcaagatcctgttacgcgcacgcagcttcgcgcaatggctgctaaaacggtctgcccgccgcataaagtagagcttgaagccttgcttgaaaagcaagcctacaaagaacaagtgctggcaaaacgtttaacaatgcttgaactgcttgaaaaatacccggcgtgtgaaatgaaattcagcgaatttatcgcccttctgccaagcatacgcccgcgctattactcgatttcttcatcacctcgtgtcgatgaaaaacaagcaagcatcacggtcagcgttgtctcaggaccggcgtggagcggatatggagaatataaaggaattgcgtcgaactatcttgccgagctgcaagaaggagatacgattacgtgctttatttccacaccgcagtcagaatttacgctgccaaaagaccctgaaacgccgcttatcatggtcggaccgggaacaggcgtcgcgccgtttagaggctttgtgcaggcgcgcaaacagctaaaagaacaaggacagtcacttggagaagcacatttatacttcggctgccgttcacctcatgaagactatctgtatcaagaagagcttgaaaacgcccaaagcgaaggcatcattacgcttcataccgctttttctcgcatgccaaatcagccgaaaacatacgttcagcacgtaatggaacaagacggcaagaaattgattgaacttcttgatcaaggagcgcacttctatatttgcggagacggaagccaaatggcacctgccgttgaagcaacgcttatgaaaagctatgctgacgttcaccaagtgagtgaagcagacgctcgcttatggctgcagcagctagaagaaaaaggccgatacgcaaaagacgtgtgggctggg

SEQ ID NO: 152 - protein, 1049 aa, synthetic construct
  REGION 1..1049: note = variant of P450 oxidase from Bacillus megaterium
MTIKEMPQPKTFGELKNLPLLNTDKPVQALMRIADELGEIFKFEAPGSVTRYLSSQRLIKEACDESRFDKNLSGTLKFARDFVGDGLATSWTHEPNWKKAHNILVPSFSQHAMGRYHAMMVDIAVQLVQKWERLNADEHIEVSEDMTRLTLDTIGLCGFNYRFNSFYRDQPHPFIVSMRRALDEVMNKGQRANPDDPAYDENKRQCQEDIKVMNDYVDKIIADRKARGEQSHDLLTQMLNGKDPETGEPLDDGNIRYQIITFLIAGHETTSGLLSFALYFLVKNPHVLQKVAEEAARVLVDPVPSYKQVKQLKYVGMVLNEALRLWPVAPTFSLYAKEDTVLGGEYPLTKGDEVMVLIPQLHRDKTIWGDDVEEFRPERFENPSAIPQHAFKPFGNGQRACIGQQFALHEATLVLGMMLKHFDFEDHTNYELVIKEGRTLKPEGFVVKAKSKGIPLGGIPSPSTEQSAKKVRKKAENAHNTPLLVLYGSNAGTAEGTARDLADIAMSKGFAPQVATLDSHAGNLPREGAVLIVTASYNGHPPDNAKQFVDWLDQASADEVKGVRYSVFGCGDKNWAATYQKVPAFIDETLAAKGAENIADRGEADASDDFEGTYEEWRDHMWSDVAAYFNLDIENSEDNKSTLSLQFVDSAADMPLAKMHGAFSTNVVASKELQQPGSARSTRHLEIELPKEASYQEGDHLGVIPRNYEGIVNRVTARFGLSASQQIRLEAEEEKLAHLPLAKTVSVEELLQYVELQDPVTRTQLRAMAAKTVCPPHKVELEALLEKQAYKEQVLAKRLTMLELLEKYPACEMKFSEFIALLPSIRPRYYSISSSPRVDEKQASITVSVVSGPAWSGYGEYKGIASNYLAELQEGDTITCFISTPQSEFTLPKDPETPLIMVGPGTGVAPFRGFVQARKQLKEQGQSLGEAHLYFGCRSPHEDYLYQEELENAQSEGIITLHTAFSRMPNQPKTYVQHVMEQDGKKLIELLDQGAHFYICGDGSQMAPAVEATLMKSYADVHQVSEADARLWLQQLEEKGRYAKDVWAG

SEQ ID NO: 153 - DNA, 3147 bp, synthetic construct
  misc_feature 1..3147: note = variant of P450 oxidase from Bacillus megaterium
  source 1..3147: mol_type = other DNA
atgacaattaaggaaatgcctcagcctaagacgtttggagaacttaaaaatttaccgttattaaacacagataaaccggttcaagctttgatgcgtattgcggatgaattaggagaaatctttaaattcgaggcgcctggtagcgtaacgcgctatttatcaagtcagcgtctaattaaagaagcatgcgatgaatcacgctttgataaaaacttaagtcaaactcttaaatttgcacgtgattttgttggagacgggttagccacaagctggacgcatgaaccgaattggaaaaaagcgcataatatcttagttccaagctttagtcagcatgcaatggggcgttatcatgcgatgatggtcgatatcgccgtgcagcttgttcaaaagtgggagcgtctaaatgcagatgagcatattgaagtatcggaagacatgacacgtttaacgcttgatacaattggtctttgcggctttaactatcgctttaacagcttttaccgagatcagcctcatccatttattgtgagtatggtccgtgcactggatgaagtaatgaacaagctgcagcgagcaaatccagacgacccagcttatgatgaaaacaagcgccagtgtcaagaagatatcaaggtgatgaacgactatgtagataaaattattgcagatcgcaaagcaaggggtgaacaaagtcatgatttattaacgcagatgctaaacggaaaagatccagaaacgggtgagccgcttgatgacgggaacattcgttatcaaattattacattcttaattgcgggaactcaaacaacaagtggtcttttatcatttgcgctgtatttcttagtgaaaaatccacatgtattacaaaaagtagcagaagaagcagcacgagttctagtagatcctgttccaagctacaaacaagtcaaacagcttaaatatgtcggcatggtcttaaacgaagcgctgcgcttatggccaactgcgcctgcgttttccctatatgcaaaagaagatacggtgcttggaggagaatatcctttaacgaaaggcgacgaagtagtggttctggtgcctcagcttcaccgtgataaaacaatttggggagacgatgtggaggagttccgtccagagcgttttgaaaatccaagtgcgattccgcagcatgcgtttaaaccgtttggaaacggtcagcgtgcgtgtatcggtcagcagttcgctcttcatgaagcaacgctggtacttggtatgatgctaaaacactttgactttgaagatcatacaaactacgagctcgttattaaagaaactcggacgttaaaacctgaaggctttgtggtaaaagcaaaatcgaaaggcattccgcttggcggtattccttcacctagcactgaacagtctgctaaaaaagtacgcaaaaaggcagaaaacgctcataatacgccgctgcttgtgctatacggttcaaatgcgggaacagctgaaggaacggcgcgtgatttagcagatattgcaatgagcaaaggatttgcaccgcaggtcgcaacgcttgattcacacgccggaaatcttccgcgcgaaggagctgtattaattgtaacggcgtcttataacggtcatccgcctgataacgcaaagcaatttgtcgactggttagaccaagcgtctgctgatgaagtaaaaggcgttcgctactccgtatttggatgcggcgataaaaattgggctgcgacgtatcaaaaagtgcctgcttttatcgatgaaacgcttgccgctaaaggggcagaaaacatcgctgaccgcggtgaagcagatgcaagcgacgactttgaaggcacatatgaagaatggcgtgatcatatgtggagtgacgtagcagcctactttaacctcgacattgaaaacagtgaagataataaatctactctttcacttcaatttgtcgacagcgccgcggatttgccgcttgcgaaaatgcacggtgcgttttcaacgaacgtcgtagcaagcaaagaacttcaacagccaggcagtgcacgaagcacgcgacatcttgaaattgaacttccaaaagaagcttcttatcaagaaggagatcatttaggtgttattcctcgcaactatgaaggaatagtaaaccgtgtaacagcaaggttcggcctaagcgcatcacagcaaatccgtctggaagcagaagaagaaaaattagctcatttgccactcgctaaaacagtatccgtagaagagcttctgcaatacgtggagcttcaagatcctgttacgcgcacgcagcttcgcgcaatggctgctaaaacggtctgcccgccgcataaagtagagcttgaagccttgcttgaaaagcaagcctacaaagaacaagtgctggcaaaacgtttaacaatgcttgaactgcttgaaaaatacccggcgtgtgaaatgaaattcagcgaatttatcgcccttctgccaagcatacgcccgcgctattactcgatttcttcatcacctcgtgtcgatgaaaaacaagcaagcatcacggtcagcgttgtctcaggaccggcgtggagcggatatggagaatataaaggaattgcgtcgaactatcttgccgagctgcaagaaggagatacgattacgtgctttatttccacaccgcagtcagaatttacgctgccaaaagaccctgaaacgccgcttatcatggtcggaccgggaacaggcgtcgcgccgtttagaggctttgtgcaggcgcgcaaacagctaaaagaacaaggacagtcacttggagaagcacatttatacttcggctgccgttcacctcatgaagactatctgtatcaagaagagcttgaaaacgcccaaagcgaaggcatcattacgcttcataccgctttttctcgcatgccaaatcagccgaaaacatacgttcagcacgtaatggaacaagacggcaagaaattgattgaacttcttgatcaaggagcgcacttctatatttgcggagacggaagccaaatggcacctgccgttgaagcaacgcttatgaaaagctatgctgacgttcaccaagtgagtgaagcagacgctcgcttatggctgcagcagctagaagaaaaaggccgatacgcaaaagacgtgtgggctggg

SEQ ID NO: 154 - protein, 1049 aa, synthetic construct
  REGION 1..1049: note = variant of P450 oxidase from Bacillus megaterium
MTIKEMPQPKTFGELKNLPLLNTDKPVQALMRIADELGEIFKFEAPGSVTRYLSSQRLIKEACDESRFDKNLSQTLKFARDFVGDGLATSWTHEPNWKKAHNILVPSFSQHAMGRYHAMMVDIAVQLVQKWERLNADEHIEVSEDMTRLTLDTIGLCGFNYRFNSFYRDQPHPFIVSMVRALDEVMNKLQRANPDDPAYDENKRQCQEDIKVMNDYVDKIIADRKARGEQSHDLLTQMLNGKDPETGEPLDDGNIRYQIITFLIAGTQTTSGLLSFALYFLVKNPHVLQKVAEEAARVLVDPVPSYKQVKQLKYVGMVLNEALRLWPTAPAFSLYAKEDTVLGGEYPLTKGDEVVVLVPQLHRDKTIWGDDVEEFRPERFENPSAIPQHAFKPFGNGQRACIGQQFALHEATLVLGMMLKHFDFEDHTNYELVIKETRTLKPEGFVVKAKSKGIPLGGIPSPSTEQSAKKVRKKAENAHNTPLLVLYGSNAGTAEGTARDLADIAMSKGFAPQVATLDSHAGNLPREGAVLIVTASYNGHPPDNAKQFVDWLDQASADEVKGVRYSVFGCGDKNWAATYQKVPAFIDETLAAKGAENIADRGEADASDDFEGTYEEWRDHMWSDVAAYFNLDIENSEDNKSTLSLQFVDSAADLPLAKMHGAFSTNVVASKELQQPGSARSTRHLEIELPKEASYQEGDHLGVIPRNYEGIVNRVTARFGLSASQQIRLEAEEEKLAHLPLAKTVSVEELLQYVELQDPVTRTQLRAMAAKTVCPPHKVELEALLEKQAYKEQVLAKRLTMLELLEKYPACEMKFSEFIALLPSIRPRYYSISSSPRVDEKQASITVSVVSGPAWSGYGEYKGIASNYLAELQEGDTITCFISTPQSEFTLPKDPETPLIMVGPGTGVAPFRGFVQARKQLKEQGQSLGEAHLYFGCRSPHEDYLYQEELENAQSEGIITLHTAFSRMPNQPKTYVQHVMEQDGKKLIELLDQGAHFYICGDGSQMAPAVEATLMKSYADVHQVSEADARLWLQQLEEKGRYAKDVWAG

SEQ ID NO: 155 - DNA, 3147 bp, synthetic construct
  misc_feature 1..3147: note = variant of P450 oxidase from Bacillus megaterium
  source 1..3147: mol_type = other DNA
atgacaattaaggaaatgcctcagcctaagacgtttggagaacttaaaaatttaccgttattaaacacagataaaccggttcaagctttgatgcgtattgcggatgaattaggagaaatctttaaattcgaggcgcctggtagcgtaacgcgctatttatcaagtcagcgtctaattaaagaagcatgcgatgaatcacgctttgataaaaacttaagtgggactcttaaatttgcacgtgattttgctggagacgggttagccacaagctggacgcatgaaccgaattggaaaaaagcgcataatatcttagttccaagctttagtcagcatgcaatggggcgttatcatgcgatgatggtcgatatcgccgtgcagcttgttcaaaagtgggagcgtctaaatgcagatgagcatattgaagtatcggaagacatgacacgtttaacgcttgatacaattggtctttgcggctttaactatcgctttaacagcttttaccgagatcagcctcatccatttattgtgagtatggtccgtgcactggatgaagtaatgaacaagctgcagcgagcaaatccagacgacccagcttatgatgaaaacaagcgccagtgtcaagaagatatcaaggtgatgaacgactatgtagataaaattattgcagatcgcaaagcaaggggtgaacaaagtcatgatttattaacgcagatgctaaacggaaaagatccagaaacgggtgagccgcttgatgacgggaacattcgttatcaaattattacattcttaattgcgggacaccaaacaacaagtggtcttttatcatttgcgctgtatttcttagtgaaaaatccacatgtattacaaaaagtagcagaagaagcagcacgagttctagtagatcctgttccaagctacaaacaagtcaaacagcttaaatatgtcggcatggtcttaaacgaagcgctgcgcttatggccagtagcgcctactttttccctatatgcaaaagaagatacggtgcttggaggagaatatcctttaacgaaaggcgacgaagtaatggttctggtgcctcagcttcaccgtgataaaacaatttggggagacgatgtggaggagttccgtccagagcgttttgaaaatccaagtgcgattccgcagcatgcgtttaaaccgtttggaaacggtcagcgtgcgtgtatcggtcagcagttcgctcttcatgaagcaacgctggtacttggtatgatgctaaaacactttgactttgaagatcatacaaactacgagctcgttattaaagaaagtcggacgttaaaacctgaaggctttgtggtaaaagcaaaatcgaaaggcattccgcttggcggtattccttcacctagcactgaacagtctgctaaaaaagtacgcaaaaaggcagaaaacgctcataatacgccgctgcttgtgctatacggttcaaatgcgggaacagctgaaggaacggcgcgtgatttagcagatattgcaatgagcaaaggatttgcaccgcaggtcgcaacgcttgattcacacgccggaaatcttccgcgcgaaggagctgtattaattgtaacggcgtcttataacggtcatccgcctgataacgcaaagcaatttgtcgactggttagaccaagcgtctgctgatgaagtaaaaggcgttcgctactccgtatttggatgcggcgataaaaattgggctgcgacgtatcaaaaagtgcctgcttttatcgatgaaacgcttgccgctaaaggggcagaaaacatcgctgaccgcggtgaagcagatgcaagcgacgactttgaaggcacatatgaagaatggcgtgatcatatgtggagtgacgtagcagcctactttaacctcgacattgaaaacagtgaagataataaatctactctttcacttcaatttgtcgacagcgccgcggatatgccgcttgcgaaaatgcacggtgcgttttcaacgaacgtcgtagcaagcaaagaacttcaacagccaggcagtgcacgaagcacgcgacatcttgaaattgaacttccaaaagaagcttcttatcaagaaggagatcatttaggtgttattcctcgcaactatgaaggaatagtaaaccgtgtaacagcaaggttcggcctaagcgcatcacagcaaatccgtctggaagcagaagaagaaaaattagctcatttgccactcgctaaaacagtatccgtagaagagcttctgcaatacgtggagcttcaagatcctgttacgcgcacgcagcttcgcgcaatggctgctaaaacggtctgcccgccgcataaagtagagcttgaagccttgcttgaaaagcaagcctacaaagaacaagtgctggcaaaacgtttaacaatgcttgaactgcttgaaaaatacccggcgtgtgaaatgaaattcagcgaatttatcgcccttctgccaagcatacgcccgcgctattactcgatttcttcatcacctcgtgtcgatgaaaaacaagcaagcatcacggtcagcgttgtctcaggaccggcgtggagcggatatggagaatataaaggaattgcgtcgaactatcttgccgagctgcaagaaggagatacgattacgtgctttatttccacaccgcagtcagaatttacgctgccaaaagaccctgaaacgccgcttatcatggtcggaccgggaacaggcgtcgcgccgtttagaggctttgtgcaggcgcgcaaacagctaaaagaacaaggacagtcacttggagaagcacatttatacttcggctgccgttcacctcatgaagactatctgtatcaagaagagcttgaaaacgcccaaagcgaaggcatcattacgcttcataccgctttttctcgcatgccaaatcagccgaaaacatacgttcagcacgtaatggaacaagacggcaagaaattgattgaacttcttgatcaaggagcgcacttctatatttgcggagacggaagccaaatggcacctgccgttgaagcaacgcttatgaaaagctatgctgacgttcaccaagtgagtgaagcagacgctcgcttatggctgcagcagctagaagaaaaaggccgatacgcaaaagacgtgtgggctggg

SEQ ID NO: 156 - protein, 1049 aa, synthetic construct
  REGION 1..1049: note = variant of P450 oxidase from Bacillus megaterium
MTIKEMPQPKTFGELKNLPLLNTDKPVQALMRIADELGEIFKFEAPGSVTRYLSSQRLIKEACDESRFDKNLSGTLKFARDFAGDGLATSWTHEPNWKKAHNILVPSFSQHAMGRYHAMMVDIAVQLVQKWERLNADEHIEVSEDMTRLTLDTIGLCGFNYRFNSFYRDQPHPFIVSMVRALDEVMNKLQRANPDDPAYDENKRQCQEDIKVMNDYVDKIIADRKARGEQSHDLLTQMLNGKDPETGEPLDDGNIRYQIITFLIAGHQTTSGLLSFALYFLVKNPHVLQKVAEEAARVLVDPVPSYKQVKQLKYVGMVLNEALRLWPVAPTFSLYAKEDTVLGGEYPLTKGDEVMVLVPQLHRDKTIWGDDVEEFRPERFENPSAIPQHAFKPFGNGQRACIGQQFALHEATLVLGMMLKHFDFEDHTNYELVIKESRTLKPEGFVVKAKSKGIPLGGIPSPSTEQSAKKVRKKAENAHNTPLLVLYGSNAGTAEGTARDLADIAMSKGFAPQVATLDSHAGNLPREGAVLIVTASYNGHPPDNAKQFVDWLDQASADEVKGVRYSVFGCGDKNWAATYQKVPAFIDETLAAKGAENIADRGEADASDDFEGTYEEWRDHMWSDVAAYFNLDIENSEDNKSTLSLQFVDSAADMPLAKMHGAFSTNVVASKELQQPGSARSTRHLEIELPKEASYQEGDHLGVIPRNYEGIVNRVTARFGLSASQQIRLEAEEEKLAHLPLAKTVSVEELLQYVELQDPVTRTQLRAMAAKTVCPPHKVELEALLEKQAYKEQVLAKRLTMLELLEKYPACEMKFSEFIALLPSIRPRYYSISSSPRVDEKQASITVSVVSGPAWSGYGEYKGIASNYLAELQEGDTITCFISTPQSEFTLPKDPETPLIMVGPGTGVAPFRGFVQARKQLKEQGQSLGEAHLYFGCRSPHEDYLYQEELENAQSEGIITLHTAFSRMPNQPKTYVQHVMEQDGKKLIELLDQGAHFYICGDGSQMAPAVEATLMKSYADVHQVSEADARLWLQQLEEKGRYAKDVWAG

SEQ ID NO: 157 - DNA, 3147 bp, synthetic construct
  misc_feature 1..3147: note = variant of P450 oxidase from Bacillus megaterium
  source 1..3147: mol_type = other DNA
atgacaattaaggaaatgcctcagcctaagacgtttggagaacttaaaaatttaccgttattaaacacagataaaccggttcaagctttgatgcgtattgcggatgaattaggagaaatctttaaattcgaggcgcctggtagcgtaacgcgctatttatcaagtcagcgtctaattaaagaagcatgcgatgaatcacgctttgataaaaacttaagtcaagcgcttaaatttgcacgtgattttgttggagacgggttagccacaagctggacgcatgaaccgaattggaaaaaagcgcataatatcttagttccaagctttagtcagcatgcaatggggcgttatcatgcgatgatggtcgatatcgccgtgcagcttgttcaaaagtgggagcgtctaaatgcagatgagcatattgaagtatcggaagacatgacacgtttaacgcttgatacaattggtctttgcggctttaactatcgctttaacagcttttaccgagatcagcctcatccatttattgtgagtatggtccgtgcactggatgaagtaatgaacaagctgcagcgagcaaatccagacgacccagcttatgatgaaaacaagcgccagtgtcaagaagatatcaaggtgatgaacgactatgtagataaaattattgcagatcgcaaagcaaggggtgaacaaagtcatgatttattaacgcagatgctaaacggaaaagatccagaaacgggtgagccgcttgatgacgggaacattcgttatcaaattattacattcttaattgcgggacacgaaacaacaagtggtcttttatcatttgcgctgtatttcttagtgaaaaatccacatgtattacaaaaagtagcagaagaagcagcacgagttctagtagatcctgttccaagctacaaacaagtcaaacagcttaaatatgtcggcatggtcttaaacgaagcgctgcgcttatggccaacggcgcctactttttccctatatgcaaaagaagatacggtgcttggaggagaatatcctttaacgaaaggcgacgaagtaatggttctgattcctcagcttcaccgtgataaaacaatttggggagacgatgtggaggagttccgtccagagcgttttgaaaatccaagtgcgattccgcagcatgcgtttaaaccgtttggaaacggtcagcgtgcgtgtatcggtcagcagttcgctcttcatgaagcaacgctggtacttggtatgatgctaaaacactttgactttgaagatcatacaaactacgagctcgttattaaagaaagtcggacgttaaaacctgaaggctttgtggtaaaagcaaaatcgaaaggcattccgcttggcggtattccttcacctagcactgaacagtctgctaaaaaagtacgcaaaaaggcagaaaacgctcataatacgccgctgcttgtgctatacggttcaaatgcgggaacagctgaaggaacggcgcgtgatttagcagatattgcaatgagcaaaggatttgcaccgcaggtcgcaacgcttgattcacacgccggaaatcttccgcgcgaaggagctgtattaattgtaacggcgtcttataacggtcatccgcctgataacgcaaagcaatttgtcgactggttagaccaagcgtctgctgatgaagtaaaaggcgttcgctactccgtatttggatgcggcgataaaaattgggctgcgacgtatcaaaaagtgcctgcttttatcgatgaaacgcttgccgctaaaggggcagaaaacatcgctgaccgcggtgaagcagatgcaagcgacgactttgaaggcacatatgaagaatggcgtgatcatatgtggagtgacgtagcagcctactttaacctcgacattgaaaacagtgaagataataaatctactctttcacttcaatttgtcgacagcgccgcggatatgccgcttgcgaaaatgcacggtgcgttttcaacgaacgtcgtagcaagcaaagaacttcaacagccaggcagtgcacgaagcacgcgacatcttgaaattgaacttccaaaagaagcttcttatcaagaaggagatcatttaggtgttattcctcgcaactatgaaggaatagtaaaccgtgtaacagcaaggttcggcctaagcgcatcacagcaaatccgtctggaagcagaagaagaaaaattagctcatttgccactcgctaaaacagtatccgtagaagagcttctgcaatacgtggagcttcaagatcctgttacgcgcacgcagcttcgcgcaatggctgctaaaacggtctgcccgccgcataaagtagagcttgaagccttgcttgaaaagcaagcctacaaagaacaagtgctggcaaaacgtttaacaatgcttgaactgcttgaaaaatacccggcgtgtgaaatgaaattcagcgaatttatcgcccttctgccaagcatacgcccgcgctattactcgatttcttcatcacctcgtgtcgatgaaaaacaagcaagcatcacggtcagcgttgtctcaggaccggcgtggagcggatatggagaatataaaggaattgcgtcgaactatcttgccgagctgcaagaaggagatacgattacgtgctttatttccacaccgcagtcagaatttacgctgccaaaagaccctgaaacgccgcttatcatggtcggaccgggaacaggcgtcgcgccgtttagaggctttgtgcaggcgcgcaaacagctaaaagaacaaggacagtcacttggagaagcacatttatacttcggctgccgttcacctcatgaagactatctgtatcaagaagagcttgaaaacgcccaaagcgaaggcatcattacgcttcataccgctttttctcgcatgccaaatcagccgaaaacatacgttcagcacgtaatggaacaagacggcaagaaattgattgaacttcttgatcaaggagcgcacttctatatttgcggagacggaagccaaatggcacctgccgttgaagcaacgcttatgaaaagctatgctgacgttcaccaagtgagtgaagcagacgctcgcttatggctgcagcagctagaagaaaaaggccgatacgcaaaagacgtgtgggctggg

SEQ ID NO: 158 - protein, 1049 aa, synthetic construct
  REGION 1..1049: note = variant of P450 oxidase from Bacillus megaterium
MTIKEMPQPKTFGELKNLPLLNTDKPVQALMRIADELGEIFKFEAPGSVTRYLSSQRLIKEACDESRFDKNLSQALKFARDFVGDGLATSWTHEPNWKKAHNILVPSFSQHAMGRYHAMMVDIAVQLVQKWERLNADEHIEVSEDMTRLTLDTIGLCGFNYRFNSFYRDQPHPFIVSMVRALDEVMNKLQRANPDDPAYDENKRQCQEDIKVMNDYVDKIIADRKARGEQSHDLLTQMLNGKDPETGEPLDDGNIRYQIITFLIAGHETTSGLLSFALYFLVKNPHVLQKVAEEAARVLVDPVPSYKQVKQLKYVGMVLNEALRLWPTAPTFSLYAKEDTVLGGEYPLTKGDEVMVLIPQLHRDKTIWGDDVEEFRPERFENPSAIPQHAFKPFGNGQRACIGQQFALHEATLVLGMMLKHFDFEDHTNYELVIKESRTLKPEGFVVKAKSKGIPLGGIPSPSTEQSAKKVRKKAENAHNTPLLVLYGSNAGTAEGTARDLADIAMSKGFAPQVATLDSHAGNLPREGAVLIVTASYNGHPPDNAKQFVDWLDQASADEVKGVRYSVFGCGDKNWAATYQKVPAFIDETLAAKGAENIADRGEADASDDFEGTYEEWRDHMWSDVAAYFNLDIENSEDNKSTLSLQFVDSAADMPLAKMHGAFSTNVVASKELQQPGSARSTRHLEIELPKEASYQEGDHLGVIPRNYEGIVNRVTARFGLSASQQIRLEAEEEKLAHLPLAKTVSVEELLQYVELQDPVTRTQLRAMAAKTVCPPHKVELEALLEKQAYKEQVLAKRLTMLELLEKYPACEMKFSEFIALLPSIRPRYYSISSSPRVDEKQASITVSVVSGPAWSGYGEYKGIASNYLAELQEGDTITCFISTPQSEFTLPKDPETPLIMVGPGTGVAPFRGFVQARKQLKEQGQSLGEAHLYFGCRSPHEDYLYQEELENAQSEGIITLHTAFSRMPNQPKTYVQHVMEQDGKKLIELLDQGAHFYICGDGSQMAPAVEATLMKSYADVHQVSEADARLWLQQLEEKGRYAKDVWAG

SEQ ID NO: 159 - DNA, 3147 bp, synthetic construct
  misc_feature 1..3147: note = variant of P450 oxidase from Bacillus megaterium
  source 1..3147: mol_type = other DNA
atgacaattaaggaaatgcctcagcctaagacgtttggagaacttaaaaatttaccgttattaaacacagataaaccggttcaagctttgatgcgtattgcggatgaattaggagaaatctttaaattcgaggcgcctggtagcgtaacgcgctatttatcaagtcagcgtctaattaaagaagcatgcgatgaatcacgctttgataaaaacttaagtggggctcttaaatttgcacgtgattttgttggagacgggttagccacaagctggacgcatgaaccgaattggaaaaaagcgcataatatcttagttccaagctttagtcagcatgcaatggggcgttatcatgcgatgatggtcgatatcgccgtgcagcttgttcaaaagtgggagcgtctaaatgcagatgagcatattgaagtatcggaagacatgacacgtttaacgcttgatacaattggtctttgcggctttaactatcgctttaacagcttttaccgagatcagcctcatccatttattgtgagtatggtccgtgcactggatgaagtaatgaacaagctgcagcgagcaaatccagacgacccagcttatgatgaaaacaagcgccagtgtcaagaagatatcaaggtgatgaacgactatgtagataaaattattgcagatcgcaaagcaaggggtgaacaaagtcatgatttattaacgcagatgctaaacggaaaagatccagaaacgggtgagccgcttgatgacgggaacattcgttatcaaattattacattcttaattgcgggacaccaaacaacaagtggtcttttatcatttgcgctgtatttcttagtgaaaaatccacatgtattacaaaaagtagcagaagaagcagcacgagttctagtagatcctgttccaagctacaaacaagtcaaacagcttaaatatgtcggcatggtcttaaacgaagcgctgcgcttatggccatcggcgcctatgttttccctatatgcaaaagaagatacggtgcttggaggagaatatcctttaacgaaaggcgacgaagtaatggttctggtgcctcagcttcaccgtgataaaacaatttggggagacgatgtggaggagttccgtccagagcgttttgaaaatccaagtgcgattccgcagcatgcgtttaaaccgtttggaaacggtcagcgtgcgtgtatcggtcagcagttcgctcttcatgaagcaacgctggtacttggtatgatgctaaaacactttgactttgaagatcatacaaactacgagctcgttattaaagaaggtcggacgttaaaacctgaaggctttgtggtaaaagcaaaatcgaaaggcattccgcttggcggtattccttcacctagcactgaacagtctgctaaaaaagtacgcaaaaaggcagaaaacgctcataatacgccgctgcttgtgctatacggttcaaatgcgggaacagctgaaggaacggcgcgtgatttagcagatattgcaatgagcaaaggatttgcaccgcaggtcgcaacgcttgattcacacgccggaaatcttccgcgcgaaggagctgtattaattgtaacggcgtcttataacggtcatccgcctgataacgcaaagcaatttgtcgactggttagaccaagcgtctgctgatgaagtaaaaggcgttcgctactccgtatttggatgcggcgataaaaattgggctgcgacgtatcaaaaagtgcctgcttttatcgatgaaacgcttgccgctaaaggggcagaaaacatcgctgaccgcggtgaagcagatgcaagcgacgactttgaaggcacatatgaagaatggcgtgatcatatgtggagtgacgtagcagcctactttaacctcgacattgaaaacagtgaagataataaatctactctttcacttcaatttgtcgacagcgccgcggatatgccgcttgcgaaaatgcacggtgcgttttcaacgaacgtcgtagcaagcaaagaacttcaacagccaggcagtgcacgaagcacgcgacatcttgaaattgaacttccaaaagaagcttcttatcaagaaggagatcatttaggtgttattcctcgcaactatgaaggaatagtaaaccgtgtaacagcaaggttcggcctaagcgcatcacagcaaatccgtctggaagcagaagaagaaaaattagctcatttgccactcgctaaaacagtatccgtagaagagcttctgcaatacgtggagcttcaagatcctgttacgcgcacgcagcttcgcgcaatggctgctaaaacggtctgcccgccgcataaagtagagcttgaagccttgcttgaaaagcaagcctacaaagaacaagtgctggcaaaacgtttaacaatgcttgaactgcttgaaaaatacccggcgtgtgaaatgaaattcagcgaatttatcgcccttctgccaagcatacgcccgcgctattactcgatttcttcatcacctcgtgtcgatgaaaaacaagcaagcatcacggtcagcgttgtctcaggaccggcgtggagcggatatggagaatataaaggaattgcgtcgaactatcttgccgagctgcaagaaggagatacgattacgtgctttatttccacaccgcagtcagaatttacgctgccaaaagaccctgaaacgccgcttatcatggtcggaccgggaacaggcgtcgcgccgtttagaggctttgtgcaggcgcgcaaacagctaaaagaacaaggacagtcacttggagaagcacatttatacttcggctgccgttcacctcatgaagactatctgtatcaagaagagcttgaaaacgcccaaagcgaaggcatcattacgcttcataccgctttttctcgcatgccaaatcagccgaaaacatacgttcagcacgtaatggaacaagacggcaagaaattgattgaacttcttgatcaaggagcgcacttctatatttgcggagacggaagccaaatggcacctgccgttgaagcaacgcttatgaaaagctatgctgacgttcaccaagtgagtgaagcagacgctcgcttatggctgcagcagctagaagaaaaaggccgatacgcaaaagacgtgtgggctggg

SEQ ID NO: 160 - protein, 1049 aa, synthetic construct
  REGION 1..1049: note = variant of P450 oxidase from Bacillus megaterium
MTIKEMPQPKTFGELKNLPLLNTDKPVQALMRIADELGEIFKFEAPGSVTRYLSSQRLIKEACDESRFDKNLSGALKFARDFVGDGLATSWTHEPNWKKAHNILVPSFSQHAMGRYHAMMVDIAVQLVQKWERLNADEHIEVSEDMTRLTLDTIGLCGFNYRFNSFYRDQPHPFIVSMVRALDEVMNKLQRANPDDPAYDENKRQCQEDIKVMNDYVDKIIADRKARGEQSHDLLTQMLNGKDPETGEPLDDGNIRYQIITFLIAGHQTTSGLLSFALYFLVKNPHVLQKVAEEAARVLVDPVPSYKQVKQLKYVGMVLNEALRLWPSAPMFSLYAKEDTVLGGEYPLTKGDEVMVLVPQLHRDKTIWGDDVEEFRPERFENPSAIPQHAFKPFGNGQRACIGQQFALHEATLVLGMMLKHFDFEDHTNYELVIKEGRTLKPEGFVVKAKSKGIPLGGIPSPSTEQSAKKVRKKAENAHNTPLLVLYGSNAGTAEGTARDLADIAMSKGFAPQVATLDSHAGNLPREGAVLIVTASYNGHPPDNAKQFVDWLDQASADEVKGVRYSVFGCGDKNWAATYQKVPAFIDETLAAKGAENIADRGEADASDDFEGTYEEWRDHMWSDVAAYFNLDIENSEDNKSTLSLQFVDSAADMPLAKMHGAFSTNVVASKELQQPGSARSTRHLEIELPKEASYQEGDHLGVIPRNYEGIVNRVTARFGLSASQQIRLEAEEEKLAHLPLAKTVSVEELLQYVELQDPVTRTQLRAMAAKTVCPPHKVELEALLEKQAYKEQVLAKRLTMLELLEKYPACEMKFSEFIALLPSIRPRYYSISSSPRVDEKQASITVSVVSGPAWSGYGEYKGIASNYLAELQEGDTITCFISTPQSEFTLPKDPETPLIMVGPGTGVAPFRGFVQARKQLKEQGQSLGEAHLYFGCRSPHEDYLYQEELENAQSEGIITLHTAFSRMPNQPKTYVQHVMEQDGKKLIELLDQGAHFYICGDGSQMAPAVEATLMKSYADVHQVSEADARLWLQQLEEKGRYAKDVWAG

SEQ ID NO: 161 - DNA, 3147 bp, synthetic construct
  misc_feature 1..3147: note = variant of P450 oxidase from Bacillus megaterium
  source 1..3147: mol_type = other DNA
atgacaattaaggaaatgcctcagcctaagacgtttggagaacttaaaaatttaccgttattaaacacagataaaccggttcaagctttgatgcgtattgcggatgaattaggagaaatctttaaattcgaggcgcctggtagcgtaacgcgctatttatcaagtcagcgtctaattaaagaagcatgcgatgaatcacgctttgataaaaacttaagtcaagcgcttaaatttgcacgtgattttgttggagacgggttagccacaagctggacgcatgaaccgaattggaaaaaagcgcataatatcttagttccaagctttagtcagcatgcaatggggcgttatcatgcgatgatggtcgatatcgccgtgcagcttgttcaaaagtgggagcgtctaaatgcagatgagcatattgaagtatcggaagacatgacacgtttaacgcttgatacaattggtctttgcggctttaactatcgctttaacagcttttaccgagatcagcctcatccatttattgtgagtatggtccgtgcactggatgaagtaatgaacaagctgcagcgagcaaatccagacgacccagcttatgatgaaaacaagcgccagtgtcaagaagatatcaaggtgatgaacgactatgtagataaaattattgcagatcgcaaagcaaggggtgaacaaagtcatgatttattaacgcagatgctaaacggaaaagatccagaaacgggtgagccgcttgatgacgggaacattcgttatcaaattattacattcttaattgcgggacaccaaacaacaagtggtcttttatcatttgcgctgtatttcttagtgaaaaatccacatgtattacaaaaagtagcagaagaagcagcacgagttctagtagatcctgttccaagctacaaacaagtcaaacagcttaaatatgtcggcatggtcttaaacgaagcgctgcgcttatggccaactgcgcctgcgttttccctatatgcaaaagaagatacggtgcttggaggagaatatcctttaacgaaaggcgacgaagtaatggttctgattcctcagcttcaccgtgataaaacaatttggggagacgatgtggaggagttccgtccagagcgttttgaaaatccaagtgcgattccgcagcatgcgtttaaaccgtttggaaacggtcagcgtgcgtgtatcggtcagcagttcgctcttcatgaagcaacgctggtacttggtatgatgctaaaacactttgactttgaagatcatacaaactacgagctcgttattaaagaaactcggacgttaaaacctgaaggctttgtggtaaaagcaaaatcgaaaggcattccgcttggcggtattccttcacctagcactgaacagtctgctaaaaaagtacgcaaaaaggcagaaaacgctcataatacgccgctgcttgtgctatacggttcaaatgcgggaacagctgaaggaacggcgcgtgatttagcagatattgcaatgagcaaaggatttgcaccgcaggtcgcaacgcttgattcacacgccggaaatcttccgcgcgaaggagctgtattaattgtaacggcgtcttataacggtcatccgcctgataacgcaaagcaatttgtcgactggttagaccaagcgtctgctgatgaagtaaaaggcgttcgctactccgtatttggatgcggcgataaaaattgggctgcgacgtatcaaaaagtgcctgcttttatcgatgaaacgcttgccgctaaaggggcagaaaacatcgctgaccgcggtgaagcagatgcaagcgacgactttgaaggcacatatgaagaatggcgtgatcatatgtggagtgacgtagcagcctactttaacctcgacattgaaaacagtgaagataataaatctactctttcacttcaatttgtcgacagcgccgcggatatgccgcttgcgaaaatgcacggtgcgttttcaacgaacgtcgtagcaagcaaagaacttcaacagccaggcagtgcacgaagcacgcgacatcttgaaattgaacttccaaaagaagcttcttatcaagaaggagatcatttaggtgttattcctcgcaactatgaaggaatagtaaaccgtgtaacagcaaggttcggcctaagcgcatcacagcaaatccgtctggaagcagaagaagaaaaattagctcatttgccactcgctaaaacagtatccgtagaagagcttctgcaatacgtggagcttcaagatcctgttacgcgcacgcagcttcgcgcaatggctgctaaaacggtctgcccgccgcataaagtagagcttgaagccttgcttgaaaagcaagcctacaaagaacaagtgctggcaaaacgtttaacaatgcttgaactgcttgaaaaatacccggcgtgtgaaatgaaattcagcgaatttatcgcccttctgccaagcatacgcccgcgctattactcgatttcttcatcacctcgtgtcgatgaaaaacaagcaagcatcacggtcagcgttgtctcaggaccggcgtggagcggatatggagaatataaaggaattgcgtcgaactatcttgccgagctgcaagaaggagatacgattacgtgctttatttccacaccgcagtcagaatttacgctgccaaaagaccctgaaacgccgcttatcatggtcggaccgggaacaggcgtcgcgccgtttagaggctttgtgcaggcgcgcaaacagctaaaagaacaaggacagtcacttggagaagcacatttatacttcggctgccgttcacctcatgaagactatctgtatcaagaagagcttgaaaacgcccaaagcgaaggcatcattacgcttcataccgctttttctcgcatgccaaatcagccgaaaacatacgttcagcacgtaatggaacaagacggcaagaaattgattgaacttcttgatcaaggagcgcacttctatatttgcggagacggaagccaaatggcacctgccgttgaagcaacgcttatgaaaagctatgctgacgttcaccaagtgagtgaagcagacgctcgcttatggctgcagcagctagaagaaaaaggccgatacgcaaaagacgtgtgggctggg

SEQ ID NO: 162 - protein, 1049 aa, synthetic construct
  REGION 1..1049: note = variant of P450 oxidase from Bacillus megaterium
MTIKEMPQPKTFGELKNLPLLNTDKPVQALMRIADELGEIFKFEAPGSVTRYLSSQRLIKEACDESRFDKNLSQALKFARDFVGDGLATSWTHEPNWKKAHNILVPSFSQHAMGRYHAMMVDIAVQLVQKWERLNADEHIEVSEDMTRLTLDTIGLCGFNYRFNSFYRDQPHPFIVSMVRALDEVMNKLQRANPDDPAYDENKRQCQEDIKVMNDYVDKIIADRKARGEQSHDLLTQMLNGKDPETGEPLDDGNIRYQIITFLIAGHQTTSGLLSFALYFLVKNPHVLQKVAEEAARVLVDPVPSYKQVKQLKYVGMVLNEALRLWPTAPAFSLYAKEDTVLGGEYPLTKGDEVMVLIPQLHRDKTIWGDDVEEFRPERFENPSAIPQHAFKPFGNGQRACIGQQFALHEATLVLGMMLKHFDFEDHTNYELVIKETRTLKPEGFVVKAKSKGIPLGGIPSPSTEQSAKKVRKKAENAHNTPLLVLYGSNAGTAEGTARDLADIAMSKGFAPQVATLDSHAGNLPREGAVLIVTASYNGHPPDNAKQFVDWLDQASADEVKGVRYSVFGCGDKNWAATYQKVPAFIDETLAAKGAENIADRGEADASDDFEGTYEEWRDHMWSDVAAYFNLDIENSEDNKSTLSLQFVDSAADMPLAKMHGAFSTNVVASKELQQPGSARSTRHLEIELPKEASYQEGDHLGVIPRNYEGIVNRVTARFGLSASQQIRLEAEEEKLAHLPLAKTVSVEELLQYVELQDPVTRTQLRAMAAKTVCPPHKVELEALLEKQAYKEQVLAKRLTMLELLEKYPACEMKFSEFIALLPSIRPRYYSISSSPRVDEKQASITVSVVSGPAWSGYGEYKGIASNYLAELQEGDTITCFISTPQSEFTLPKDPETPLIMVGPGTGVAPFRGFVQARKQLKEQGQSLGEAHLYFGCRSPHEDYLYQEELENAQSEGIITLHTAFSRMPNQPKTYVQHVMEQDGKKLIELLDQGAHFYICGDGSQMAPAVEATLMKSYADVHQVSEADARLWLQQLEEKGRYAKDVWAG

SEQ ID NO: 163 - DNA, 3147 bp, synthetic construct
  misc_feature 1..3147: note = variant of P450 oxidase from Bacillus megaterium
  source 1..3147: mol_type = other DNA
atgacaattaaggaaatgcctcagcctaagacgtttggagaacttaaaaatttaccgttattaaacacagataaaccggttcaagctttgatgcgtattgcggatgaattaggagaaatctttaaattcgaggcgcctggtagcgtaacgcgctatttatcaagtcagcgtctaattaaagaagcatgcgatgaatcacgctttgataaaaacttaagtcaagcgcttaaatttgcacgtgattttgctggagacgggttagccacaagctggacgcatgaaccgaattggaaaaaagcgcataatatcttagttccaagctttagtcagcatgcaatggggcgttatcatgcgatgatggtcgatatcgccgtgcagcttgttcaaaagtgggagcgtctaaatgcagatgagcatattgaagtatcggaagacatgacacgtttaacgcttgatacaattggtctttgcggctttaactatcgctttaacagcttttaccgagatcagcctcatccatttattgtgagtatgcgccgtgcactggatgaagtaatgaacaaggggcagcgagcaaatccagacgacccagcttatgatgaaaacaagcgccagtgtcaagaagatatcaaggtgatgaacgactatgtagataaaattattgcagatcgcaaagcaaggggtgaacaaagtcatgatttattaacgcagatgctaaacggaaaagatccagaaacgggtgagccgcttgatgacgggaacattcgttatcaaattattacattcttaattgcgggacacgaaacaacaagtggtcttttatcatttgcgctgtatttcttagtgaaaaatccacatgtattacaaaaagtagcagaagaagcagcacgagttctagtagatcctgttccaagctacaaacaagtcaaacagcttaaatatgtcggcatggtcttaaacgaagcgctgcgcttatggccaacggcgcctatgttttccctatatgcaaaagaagatacggtgcttggaggagaatatcctttaacgaaaggcgacgaagtaatggttctgattcctcagcttcaccgtgataaaacaatttggggagacgatgtggaggagttccgtccagagcgttttgaaaatccaagtgcgattccgcagcatgcgtttaaaccgtttggaaacggtcagcgtgcgtgtatcggtcagcagttcgctcttcatgaagcaacgctggtacttggtatgatgctaaaacactttgactttgaagatcatacaaactacgagctcgttattaaagaaagtcggacgttaaaacctgaaggctttgtggtaaaagcaaaatcgaaaggcattccgcttggcggtattccttcacctagcactgaacagtctgctaaaaaagtacgcaaaaaggcagaaaacgctcataatacgccgctgcttgtgctatacggttcaaatgcgggaacagctgaaggaacggcgcgtgatttagcagatattgcaatgagcaaaggatttgcaccgcaggtcgcaacgcttgattcacacgccggaaatcttccgcgcgaaggagctgtattaattgtaacggcgtcttataacggtcatccgcccgataacgcaaagcaatttgtcgactggttagaccaagcgtctgctgatgaagtaaaaggcgttcgctactccgtatttggatgcggcgataaaaattgggctgcgacgtatcaaaaagtgcctgcttttatcgatgaaacgcttgccgctaaaggggcagaaaacatcgctgaccgcggtgaagcagatgcaagcgacgactttgaaggcacatatgaagaatggcgtgatcatatgtggagtgacgtagcagcctactttaacctcgacattgaaaacagtgaagataataaatctactctttcacttcaatttgtcgacagcgccgcggatatgccgcttgcgaaaatgcacggtgcgttttcaacgaacgtcgtagcaagcaaagaacttcaacagccaggcagtgcacgaagcacgcgacatcttgaaattgaacttccaaaagaagcttcttatcaagaaggagatcatttaggtgttattcctcgcaactatgaaggaatagtaaaccgtgtaacagcaaggttcggcctaagcgcatcacagcaaatccgtctggaagcagaagaagaaaaattagctcatttgccactcgctaaaacagtatccgtagaagagcttctgcaatacgtggagcttcaagatcctgttacgcgcacgcagcttcgcgcaatggctgctaaaacggtctgcccgccgcataaagtagagcttgaagccttgcttgaaaagcaagcctacaaagaacaagtgctggcaaaacgtttaacaatgcttgaactgcttgaaaaatacccggcgtgtgaaatgaaattcagcgaatttatcgcccttctgccaagcatacgcccgcgctattactcgatttcttcatcacctcgtgtcgatgaaaaacaagcaagcatcacggtcagcgttgtctcaggaccggcgtggagcggatatggagaatataaaggaattgcgtcgaactatcttgccgagctgcaagaaggagatacgattacgtgctttatttccacaccgcagtcagaatttacgctgccaaaagaccctgaaacgccgcttatcatggtcggaccgggaacaggcgtcgcgccgtttagaggctttgtgcaggcgcgcaaacagctaaaagaacaaggacagtcacttggagaagcacatttatacttcggctgccgttcacctcatgaagactatctgtatcaagaagagcttgaaaacgcccaaagcgaaggcatcattacgcttcataccgctttttctcgcatgccaaatcagccgaaaacatacgttcagcacgtaatggaacaagacggcaagaaattgattgaacttcttgatcaaggagcgcacttctatatttgcggagacggaagccaaatggcacctgccgttgaagcaacgcttatgaaaagctatgctgacgttcaccaagtgagtgaagcagacgctcgcttatggctgcagcagctagaagaaaaaggccgatacgcaaaagacgtgtgggctggg

SEQ ID NO: 164 - protein, 1049 aa, synthetic construct
  REGION 1..1049: note = variant of P450 oxidase from Bacillus megaterium
MTIKEMPQPKTFGELKNLPLLNTDKPVQALMRIADELGEIFKFEAPGSVTRYLSSQRLIKEACDESRFDKNLSQALKFARDFAGDGLATSWTHEPNWKKAHNILVPSFSQHAMGRYHAMMVDIAVQLVQKWERLNADEHIEVSEDMTRLTLDTIGLCGFNYRFNSFYRDQPHPFIVSMRRALDEVMNKGQRANPDDPAYDENKRQCQEDIKVMNDYVDKIIADRKARGEQSHDLLTQMLNGKDPETGEPLDDGNIRYQIITFLIAGHETTSGLLSFALYFLVKNPHVLQKVAEEAARVLVDPVPSYKQVKQLKYVGMVLNEALRLWPTAPMFSLYAKEDTVLGGEYPLTKGDEVMVLIPQLHRDKTIWGDDVEEFRPERFENPSAIPQHAFKPFGNGQRACIGQQFALHEATLVLGMMLKHFDFEDHTNYELVIKESRTLKPEGFVVKAKSKGIPLGGIPSPSTEQSAKKVRKKAENAHNTPLLVLYGSNAGTAEGTARDLADIAMSKGFAPQVATLDSHAGNLPREGAVLIVTASYNGHPPDNAKQFVDWLDQASADEVKGVRYSVFGCGDKNWAATYQKVPAFIDETLAAKGAENIADRGEADASDDFEGTYEEWRDHMWSDVAAYFNLDIENSEDNKSTLSLQFVDSAADMPLAKMHGAFSTNVVASKELQQPGSARSTRHLEIELPKEASYQEGDHLGVIPRNYEGIVNRVTARFGLSASQQIRLEAEEEKLAHLPLAKTVSVEELLQYVELQDPVTRTQLRAMAAKTVCPPHKVELEALLEKQAYKEQVLAKRLTMLELLEKYPACEMKFSEFIALLPSIRPRYYSISSSPRVDEKQASITVSVVSGPAWSGYGEYKGIASNYLAELQEGDTITCFISTPQSEFTLPKDPETPLIMVGPGTGVAPFRGFVQARKQLKEQGQSLGEAHLYFGCRSPHEDYLYQEELENAQSEGIITLHTAFSRMPNQPKTYVQHVMEQDGKKLIELLDQGAHFYICGDGSQMAPAVEATLMKSYADVHQVSEADARLWLQQLEEKGRYAKDVWAG

SEQ ID NO: 165 - DNA, 3147 bp, synthetic construct
  misc_feature 1..3147: note = variant of P450 oxidase from Bacillus megaterium
  source 1..3147: mol_type = other DNA
atgacaattaaggaaatgcctcagcctaagacgtttggagaacttaaaaatttaccgttattaaacacagataaaccggttcaagctttgatgcgtattgcggatgaattaggagaaatctttaaattcgaggcgcctggtagcgtaacgcgctatttatcaagtcagcgtctaattaaagaagcatgcgatgaatcacgctttgataaaaacttaagtcaagcgcttaaatttgcacgtgattttgctggagacgggttagccacaagctggacgcatgaaccgaattggaaaaaagcgcataatatcttagttccaagctttagtcagcatgcaatggggcgttatcatgcgatgatggtcgatatcgccgtgcagcttgttcaaaagtgggagcgtctaaatgcagatgagcatattgaagtatcggaagacatgacacgtttaacgcttgatacaattggtctttgcggctttaactatcgctttaacagcttttaccgagatcagcctcatccatttattgtgagtatgcgccgtgcaattgatgaagtaatgaacaagctgcagcgagcaaatccagacgacccagcttatgatgaaaacaagcgccagtgtcaagaagatatcaaggtgatgaacgactatgtagataaaattattgcagatcgcaaagcaaggggtgaacaaagtcatgatttattaacgcagatgctaaacggaaaagatccagaaacgggtgagccgcttgatgacgggaacattcgttatcaaattattacattcttaattgcgggacaccaaacaacaagtggtcttttatcatttgcgctgtatttcttagtgaaaaatccacatgtattacaaaaagtagcagaagaagcagcacgagttctagtagatcctgttccaagctacaaacaagtcaaacagcttaaatatgtcggcatggtcttaaacgaagcgctgcgcttatggccaactgcgcctgcgttttccctatatgcaaaagaagatacggtgcttggaggagaatatcctttaacgaaaggcgacgaagtaatggttctgattcctcagcttcaccgtgataaaacaatttggggagacgatgtggaggagttccgtccagagcgttttgaaaatccaagtgcgattccgcagcatgcgtttaaaccgtttggaaacggtcagcgtgcgtgtatcggtcagcagttcgctcttcatgaagcaacgctggtacttggtatgatgctaaaacactttgactttgaagatcatacaaactacgagctcgttattaaagaaactcggacgttaaaacctgaaggctttgtggtaaaagcaaaatcgaaaggcattccgcttggcggtattccttcacctagcactgaacagtctgctaaaaaagtacgcaaaaaggcagaaaacgctcataatacgccgctgcttgtgctatacggttcaaatgcgggaacagctgaaggaacggcgcgtgatttagcagatattgcaatgagcaaaggatttgcaccgcaggtcgcaacgcttgattcacacgccggaaatcttccgcgcgaaggagctgtattaattgtaacggcgtcttataacggtcatccgcctgataacgcaaagcaatttgtcgactggttagaccaagcgtctgctgatgaagtaaaaggcgttcgctactccgtatttggatgcggcgataaaaattgggctgcgacgtatcaaaaagtgcctgcttttatcgatgaaacgcttgccgctaaaggggcagaaaacatcgctgaccgcggtgaagcagatgcaagcgacgactttgaaggcacatatgaagaatggcgtgatcatatgtggagtgacgtagcagcctactttaacctcgacattgaaaacagtgaagataataaatctactctttcacttcaatttgtcgacagcgccgcggatatgccgcttgcgaaaatgcacggtgcgttttcaacgaacgtcgtagcaagcaaagaacttcaacagccaggcagtgcacgaagcacgcgacatcttgaaattgaacttccaaaagaagcttcttatcaagaaggagatcatttaggtgttattcctcgcaactatgaaggaatagtaaaccgtgtaacagcaaggttcggcctaagcgcatcacagcaaatccgtctggaagcagaagaagaaaaattagctcatttgccactcgctaaaacagtatccgtagaagagcttctgcaatacgtggagcttcaagatcctgttacgcgcacgcagcttcgcgcaatggctgctaaaacggtctgcccgccgcataaagtagagcttgaagccttgcttgaaaagcaagcctacaaagaacaagtgctggcaaaacgtttaacaatgcttgaactgcttgaaaaatacccggcgtgtgaaatgaaattcagcgaatttatcgcccttctgccaagcatacgcccgcgctattactcgatttcttcatcacctcgtgtcgatgaaaaacaagcaagcatcacggtcagcgttgtctcaggaccggcgtggagcggatatggagaatataaaggaattgcgtcgaactatcttgccgagctgcaagaaggagatacgattacgtgctttatttccacaccgcagtcagaatttacgctgccaaaagaccctgaaacgccgcttatcatggtcggaccgggaacaggcgtcgcgccgtttagaggctttgtgcaggcgcgcaaacagctaaaagaacaaggacagtcacttggagaagcacatttatacttcggctgccgttcacctcatgaagactatctgtatcaagaagagcttgaaaacgcccaaagcgaaggcatcattacgcttcataccgctttttctcgcatgccaaatcagccgaaaacatacgttcagcacgtaatggaacaagacggcaagaaattgattgaacttcttgatcaaggagcgcacttctatatttgcggagacggaagccaaatggcacctgccgttgaagcaacgcttatgaaaagctatgctgacgttcaccaagtgagtgaagcagacgctcgcttatggctgcagcagctagaagaaaaaggccgatacgcaaaagacgtgtgggctggg

SEQ ID NO: 166 - protein, 1049 aa, synthetic construct
  REGION 1..1049: note = variant of P450 oxidase from Bacillus megaterium
MTIKEMPQPKTFGELKNLPLLNTDKPVQALMRIADELGEIFKFEAPGSVTRYLSSQRLIKEACDESRFDKNLSQALKFARDFAGDGLATSWTHEPNWKKAHNILVPSFSQHAMGRYHAMMVDIAVQLVQKWERLNADEHIEVSEDMTRLTLDTIGLCGFNYRFNSFYRDQPHPFIVSMRRAIDEVMNKLQRANPDDPAYDENKRQCQEDIKVMNDYVDKIIADRKARGEQSHDLLTQMLNGKDPETGEPLDDGNIRYQIITFLIAGHQTTSGLLSFALYFLVKNPHVLQKVAEEAARVLVDPVPSYKQVKQLKYVGMVLNEALRLWPTAPAFSLYAKEDTVLGGEYPLTKGDEVMVLIPQLHRDKTIWGDDVEEFRPERFENPSAIPQHAFKPFGNGQRACIGQQFALHEATLVLGMMLKHFDFEDHTNYELVIKETRTLKPEGFVVKAKSKGIPLGGIPSPSTEQSAKKVRKKAENAHNTPLLVLYGSNAGTAEGTARDLADIAMSKGFAPQVATLDSHAGNLPREGAVLIVTASYNGHPPDNAKQFVDWLDQASADEVKGVRYSVFGCGDKNWAATYQKVPAFIDETLAAKGAENIADRGEADASDDFEGTYEEWRDHMWSDVAAYFNLDIENSEDNKSTLSLQFVDSAADMPLAKMHGAFSTNVVASKELQQPGSARSTRHLEIELPKEASYQEGDHLGVIPRNYEGIVNRVTARFGLSASQQIRLEAEEEKLAHLPLAKTVSVEELLQYVELQDPVTRTQLRAMAAKTVCPPHKVELEALLEKQAYKEQVLAKRLTMLELLEKYPACEMKFSEFIALLPSIRPRYYSISSSPRVDEKQASITVSVVSGPAWSGYGEYKGIASNYLAELQEGDTITCFISTPQSEFTLPKDPETPLIMVGPGTGVAPFRGFVQARKQLKEQGQSLGEAHLYFGCRSPHEDYLYQEELENAQSEGIITLHTAFSRMPNQPKTYVQHVMEQDGKKLIELLDQGAHFYICGDGSQMAPAVEATLMKSYADVHQVSEADARLWLQQLEEKGRYAKDVWAG

SEQ ID NO: 167 - DNA, 3147 bp, synthetic construct
  misc_feature 1..3147: note = variant of P450 oxidase from Bacillus megaterium
  source 1..3147: mol_type = other DNA
atgacaattaaggaaatgcctcagcctaagacgtttggagaacttaaaaatttaccgttattaaacacagataaaccggttcaagctttgatgcgtattgcggatgaattaggagaaatctttaaattcgaggcgcctggtagcgtaacgcgctatttatcaagtcagcgtctaattaaagaagcatgcgatgaatcacgctttgataaaaacttaagtcaagcgcttaaatttgcacgtgattttgctggagacgggttagccacaagctggacgcatgaaccgaattggaaaaaagcgcataatatcttagttccaagctttagtcagcatgcaatggggcgttatcatgcgatgatggtcgatatcgccgtgcagcttgttcaaaagtgggagcgtctaaatgcagatgagcatattgaagtatcggaagacatgacacgtttaacgcttgatacaattggtctttgcggctttaactatcgctttaacagcttttaccgagatcagcctcatccatttattgtgagtatggtccgtgcactggatgaagtaatgaacaaggggcagcgagcaaatccagacgacccagcttatgatgaaaacaagcgccagtgtcaagaagatatcaaggtgatgaacgactatgtagataaaattattgcagatcgcaaagcaaggggtgaacaaagtcatgatttattaacgcagatgctaaacggaaaagatccagaaacgggtgagccgcttgatgacgggaacattcgttatcaaattattacattcttaattgcgggacaccaaacaacaagtggtcttttatcatttgcgctgtatttcttagtgaaaaatccacatgtattacaaaaagtagcagaagaagcagcacgagttctagtagatcctgttccaagctacaaacaagtcaaacagcttaaatatgtcggcatggtcttaaacgaagcgctgcgcttatggccagtagcgcctactttttccctatatgcaaaagaagatacggtgcttggaggagaatatcctttaacgaaaggcgacgaagtaatggttctggtgcctcagcttcaccgtgataaaacaatttggggagacgatgtggaggagttccgtccagagcgttttgaaaatccaagtgcgattccgcagcatgcgtttaaaccgtttggaaacggtcagcgtgcgtgtatcggtcagcagttcgctcttcatgaagcaacgctggtacttggtatgatgctaaaacactttgactttgaagatcatacaaactacgagctcgttattaaagaaagtcggacgttaaaacctgaaggctttgtggtaaaagcaaaatcgaaaggcattccgcttggcggtattccttcacctagcactgaacagtctgctaaaaaagtacgcaaaaaggcagaaaacgctcataatacgccgctgcttgtgctatacggttcaaatgcgggaacagctgaaggaacggcgcgtgatttagcagatattgcaatgagcaaaggatttgcaccgcaggtcgcaacgcttgattcacacgccggaaatcttccgcgcgaaggagctgtattaattgtaacggcgtcttataacggtcatccgcctgataacgcaaagcaatttgtcgactggttagaccaagcgtctgctgatgaagtaaaaggcgttcgctactccgtatttggatgcggcgataaaaattgggctgcgacgtatcaaaaagtgcctgcttttatcgatgaaacgcttgccgctaaaggggcagaaaacatcgctgaccgcggtgaagcagatgcaagcgacgactttgaaggcacatatgaagaatggcgtgatcatatgtggagtgacgtagcagcctactttaacctcgacattgaaaacagtgaagataataaatctactctttcacttcaatttgtcgacagcgccgcggatatgccgcttgcgaaaatgcacggtgcgttttcaacgaacgtcgtagcaagcaaagaacttcaacagccaggcagtgcacgaagcacgcgacatcttgaaattgaacttccaaaagaagcttcttatcaagaaggagatcatttaggtgttattcctcgcaactatgaaggaatagtaaaccgtgtaacagcaaggttcggcctaagcgcatcacagcaaatccgtctggaagcagaagaagaaaaattagctcatttgccactcgctaaaacagtatccgtagaagagcttctgcaatacgtggagcttcaagatcctgttacgcgcacgcagcttcgcgcaatggctgctaaaacggtctgcccgccgcataaagtagagcttgaagccttgcttgaaaagcaagcctacaaagaacaagtgctggcaaaacgtttaacaatgcttgaactgcttgaaaaatacccggcgtgtgaaatgaaattcagcgaatttatcgcccttctgccaagcatacgcccgcgctattactcgatttcttcatcacctcgtgtcgatgaaaaacaagcaagcatcacggtcagcgttgtctcaggaccggcgtggagcggatatggagaatataaaggaattgcgtcgaactatcttgccgagctgcaagaaggagatacgattacgtgctttatttccacaccgcagtcagaatttacgctgccaaaagaccctgaaacgccgcttatcatggtcggaccgggaacaggcgtcgcgccgtttagaggctttgtgcaggcgcgcaaacagctaaaagaacaaggacagtcacttggagaagcacatttatacttcggctgccgttcacctcatgaagactatctgtatcaagaagagcttgaaaacgcccaaagcgaaggcatcattacgcttcataccgctttttctcgcatgccaaatcagccgaaaacatacgttcagcacgtaatggaacaagacggcaagaaattgattgaacttcttgatcaaggagcgcacttctatatttgcggagacggaagccaaatggcacctgccgttgaagcaacgcttatgaaaagctatgctgacgttcaccaagtgagtgaagcagacgctcgcttatggctgcagcagctagaagaaaaaggccgatacgcaaaagacgtgtgggctggg

SEQ ID NO: 168 - protein, 1049 aa, synthetic construct
  REGION 1..1049: note = variant of P450 oxidase from Bacillus megaterium
MTIKEMPQPKTFGELKNLPLLNTDKPVQALMRIADELGEIFKFEAPGSVTRYLSSQRLIKEACDESRFDKNLSQALKFARDFAGDGLATSWTHEPNWKKAHNILVPSFSQHAMGRYHAMMVDIAVQLVQKWERLNADEHIEVSEDMTRLTLDTIGLCGFNYRFNSFYRDQPHPFIVSMVRALDEVMNKGQRANPDDPAYDENKRQCQEDIKVMNDYVDKIIADRKARGEQSHDLLTQMLNGKDPETGEPLDDGNIRYQIITFLIAGHQTTSGLLSFALYFLVKNPHVLQKVAEEAARVLVDPVPSYKQVKQLKYVGMVLNEALRLWPVAPTFSLYAKEDTVLGGEYPLTKGDEVMVLVPQLHRDKTIWGDDVEEFRPERFENPSAIPQHAFKPFGNGQRACIGQQFALHEATLVLGMMLKHFDFEDHTNYELVIKESRTLKPEGFVVKAKSKGIPLGGIPSPSTEQSAKKVRKKAENAHNTPLLVLYGSNAGTAEGTARDLADIAMSKGFAPQVATLDSHAGNLPREGAVLIVTASYNGHPPDNAKQFVDWLDQASADEVKGVRYSVFGCGDKNWAATYQKVPAFIDETLAAKGAENIADRGEADASDDFEGTYEEWRDHMWSDVAAYFNLDIENSEDNKSTLSLQFVDSAADMPLAKMHGAFSTNVVASKELQQPGSARSTRHLEIELPKEASYQEGDHLGVIPRNYEGIVNRVTARFGLSASQQIRLEAEEEKLAHLPLAKTVSVEELLQYVELQDPVTRTQLRAMAAKTVCPPHKVELEALLEKQAYKEQVLAKRLTMLELLEKYPACEMKFSEFIALLPSIRPRYYSISSSPRVDEKQASITVSVVSGPAWSGYGEYKGIASNYLAELQEGDTITCFISTPQSEFTLPKDPETPLIMVGPGTGVAPFRGFVQARKQLKEQGQSLGEAHLYFGCRSPHEDYLYQEELENAQSEGIITLHTAFSRMPNQPKTYVQHVMEQDGKKLIELLDQGAHFYICGDGSQMAPAVEATLMKSYADVHQVSEADARLWLQQLEEKGRYAKDVWAG

SEQ ID NO: 169 - DNA, 3147 bp, synthetic construct
  misc_feature 1..3147: note = variant of P450 oxidase from Bacillus megaterium
  source 1..3147: mol_type = other DNA
atgacaattaaggaaatgcctcagcctaagacgtttggagaacttaaaaatttaccgttattaaacacagataaaccggttcaagctttgatgcgtattgcggatgaattaggagaaatctttaaattcgaggcgcctggtagcgtaacgcgctatttatcaagtcagcgtctaattaaagaagcatgcgatgaatcacgctttgataaaaacttaagtcaagctcttaaatttgcacgtgattttgttggagacgggttagccacaagctggacgcatgaaccgaattggaaaaaagcgcataatatcttagttccaagctttagtcagcatgcaatggggcgttatcatgcgatgatggtcgatatcgccgtgcagcttgttcaaaagtgggagcgtctaaatgcagatgagcatattgaagtatcggaagacatgacacgtttaacgcttgatacaattggtctttgcggctttaactatcgctttaacagcttttaccgagatcagcctcatccatttattgtgagtatgcgccgtgcagttgatgaagtaatgaacaagctgcagcgagcaaatccagacgacccagcttatgatgaaaacaagcgccagtgtcaagaagatatcaaggtgatgaacgactatgtagataaaattattgcagatcgcaaagcaaggggtgaacaaagtcatgatttattaacgcagatgctaaacggaaaagatccagaaacgggtgagccgcttgatgacgggaacattcgttatcaaattattacattcttaattgcgggacacgaaacaacaagtggtcttttatcatttgcgctgtatttcttagtgaaaaatccacatgtattacaaaaagtagcagaagaagcagcacgagttctagtagatcctgttccaagctacaaacaagtcaaacagcttaaatatgtcggcatggtcttaaacgaagcgctgcgcttatggccaactgcgcctgcgttttccctatatgcaaaagaagatacggtgcttggaggagaatatcctttaacgaaaggcgacgaagtaatggttctgattcctcagcttcaccgtgataaaacaatttggggagacgatgtggaggagttccgtccagagcgttttgaaaatccaagtgcgattccgcagcatgcgtttaaaccgtttggaaacggtcagcgtgcgtgtatcggtcagcagttcgctcttcatgaagcaacgctggtacttggtatgatgctaaaacactttgactttgaagatcatacaaactacgagctcgttattaaagaaagtcggacgttaaaacctgaaggctttgtggtaaaagcaaaatcgaaaggcattccgcttggcggtattccttcacctagcactgaacagtctgctaaaaaagtacgcaaaaaggcagaaaacgctcataatacgccgctgcttgtgctatacggttcaaatgcgggaacagctgaaggaacggcgcgtgatttagcagatattgcaatgagcaaaggatttgcaccgcaggtcgcaacgcttgattcacacgccggaaatcttccgcgcgaaggagctgtattaattgtaacggcgtcttataacggtcatccgcctgataacgcaaagcaatttgtcgactggttagaccaagcgtctgctgatgaagtaaaaggcgttcgctactccgtatttggatgcggcgataaaaattgggctgcgacgtatcaaaaagtgcctgcttttatcgatgaaacgcttgccgctaaaggggcagaaaacatcgctgaccgcggtgaagcagatgcaagcgacgactttgaaggcacatatgaagaatggcgtgatcatatgtggagtgacgtagcagcctactttaacctcgacattgaaaacagtgaagataataaatctactctttcacttcaatttgtcgacagcgccgcggatatgccgcttgcgaaaatgcacggtgcgttttcaacgaacgtcgtagcaagcaaagaacttcaacagccaggcagtgcacgaagcacgcgacatcttgaaattgaacttccaaaagaagcttcttatcaagaaggagatcatttaggtgttattcctcgcaactatgaaggaatagtaaaccgtgtaacagcaaggttcggcctaagcgcatcacagcaaatccgtctggaagcagaagaagaaaaattagctcatttgccactcgctaaaacagtatccgtagaagagcttctgcaatacgtggagcttcaagatcctgttacgcgcacgcagcttcgcgcaatggctgctaaaacggtctgcccgccgcataaagtagagcttgaagccttgcttgaaaagcaagcctacaaagaacaagtgctggcaaaacgtttaacaatgcttgaactgcttgaaaaatacccggcgtgtgaaatgaaattcagcgaatttatcgcccttctgccaagcatacgcccgcgctattactcgatttcttcatcacctcgtgtcgatgaaaaacaagcaagcatcacggtcagcgttgtctcaggaccggcgtggagcggatatggagaatataaaggaattgcgtcgaactatcttgccgagctgcaagaaggagatacgattacgtgctttatttccacaccgcagtcagaatttacgctgccaaaagaccctgaaacgccgcttatcatggtcggaccgggaacaggcgtcgcgccgtttagaggctttgtgcaggcgcgcaaacagctaaaagaacaaggacagtcacttggagaagcacatttatacttcggctgccgttcacctcatgaagactatctgtatcaagaagagcttgaaaacgcccaaagcgaaggcatcattacgcttcataccgctttttctcgcatgccaaatcagccgaaaacatacgttcagcacgtaatggaacaagacggcaagaaattgattgaacttcttgatcaaggagcgcacttctatatttgcggagacggaagccaaatggcacctgccgttgaagcaacgcttatgaaaagctatgctgacgttcaccaagtgagtgaagcagacgctcgcttatggctgcagcagctagaagaaaaaggccgatacgcaaaagacgtgtgggctggg

SEQ ID NO: 170 - protein, 1049 aa, synthetic construct
  REGION 1..1049: note = variant of P450 oxidase from Bacillus megaterium
MTIKEMPQPKTFGELKNLPLLNTDKPVQALMRIADELGEIFKFEAPGSVTRYLSSQRLIKEACDESRFDKNLSQALKFARDFVGDGLATSWTHEPNWKKAHNILVPSFSQHAMGRYHAMMVDIAVQLVQKWERLNADEHIEVSEDMTRLTLDTIGLCGFNYRFNSFYRDQPHPFIVSMRRAVDEVMNKLQRANPDDPAYDENKRQCQEDIKVMNDYVDKIIADRKARGEQSHDLLTQMLNGKDPETGEPLDDGNIRYQIITFLIAGHETTSGLLSFALYFLVKNPHVLQKVAEEAARVLVDPVPSYKQVKQLKYVGMVLNEALRLWPTAPAFSLYAKEDTVLGGEYPLTKGDEVMVLIPQLHRDKTIWGDDVEEFRPERFENPSAIPQHAFKPFGNGQRACIGQQFALHEATLVLGMMLKHFDFEDHTNYELVIKESRTLKPEGFVVKAKSKGIPLGGIPSPSTEQSAKKVRKKAENAHNTPLLVLYGSNAGTAEGTARDLADIAMSKGFAPQVATLDSHAGNLPREGAVLIVTASYNGHPPDNAKQFVDWLDQASADEVKGVRYSVFGCGDKNWAATYQKVPAFIDETLAAKGAENIADRGEADASDDFEGTYEEWRDHMWSDVAAYFNLDIENSEDNKSTLSLQFVDSAADMPLAKMHGAFSTNVVASKELQQPGSARSTRHLEIELPKEASYQEGDHLGVIPRNYEGIVNRVTARFGLSASQQIRLEAEEEKLAHLPLAKTVSVEELLQYVELQDPVTRTQLRAMAAKTVCPPHKVELEALLEKQAYKEQVLAKRLTMLELLEKYPACEMKFSEFIALLPSIRPRYYSISSSPRVDEKQASITVSVVSGPAWSGYGEYKGIASNYLAELQEGDTITCFISTPQSEFTLPKDPETPLIMVGPGTGVAPFRGFVQARKQLKEQGQSLGEAHLYFGCRSPHEDYLYQEELENAQSEGIITLHTAFSRMPNQPKTYVQHVMEQDGKKLIELLDQGAHFYICGDGSQMAPAVEATLMKSYADVHQVSEADARLWLQQLEEKGRYAKDVWAG

SEQ ID NO: 171 - DNA, 3147 bp, synthetic construct
  misc_feature 1..3147: note = variant of P450 oxidase from Bacillus megaterium
  source 1..3147: mol_type = other DNA
atgacaattaaggaaatgcctcagcctaagacgtttggagaacttaaaaatttaccgttattaaacacagataaaccggttcaagctttgatgcgtattgcggatgaattaggagaaatctttaaattcgaggcgcctggtagcgtaacgcgctatttatcaagtcagcgtctaattaaagaagcatgcgatgaatcacgctttgataaaaacttaagtcaagctcttaaatttgcacgtgattttgttggagacgggttagccacaagctggacgcatgaaccgaattggaaaaaagcgcataatatcttagttccaagctttagtcagcatgcaatggggcgttatcatgcgatgatggtcgatatcgccgtgcagcttgttcaaaagtgggagcgtctaaatgcagatgagcatattgaagtatcggaagacatgacacgtttaacgcttgatacaattggtctttgcggctttaactatcgctttaacagcttttaccgagatcagcctcatccatttattgtgagtatgcgccgtgcactggatgaagtaatgaacaaggggcagcgagcaaatccagacgacccagcttatgatgaaaacaagcgccagtgtcaagaagatatcaaggtgatgaacgactatgtagataaaattattgcagatcgcaaagcaaggggtgaacaaagtcatgatttattaacgcagatgctaaacggaaaagatccagaaacgggtgagccgcttgatgacgggaacattcgttatcaaattattacattcttaattgcgggacacgaaacaacaagtggtcttttatcatttgcgctgtatttcttagtgaaaaatccacatgtattacaaaaagtagcagaagaagcagcacgagttctagtagatcctgttccaagctacaaacaagtcaaacagcttaaatatgtcggcatggtcttaaacgaagcgctgcgcttatggccaacggcgcctatgttttccctatatgcaaaagaagatacggtgcttggaggagaatatcctttaacgaaaggcgacgaagtagtggttctgattcctcagcttcaccgtgataaaacaatttggggagacgatgtggaggagttccgtccagagcgttttgaaaatccaagtgcgattccgcagcatgcgtttaaaccgtttggaaacggtcagcgtgcgtgtatcggtcagcagttcgctcttcatgaagcaacgctggtacttggtatgatgctaaaacactttgactttgaagatcatacaaactacgagctcgttattaaagaaactcggacgttaaaacctgaaggctttgtggtaaaagcaaaatcgaaaggcattccgcttggcggtattccttcacctagcactgaacagtctgctaaaaaagtacgcaaaaaggcagaaaacgctcataatacgccgctgcttgtgctatacggttcaaatgcgggaacagctgaaggaacggcgcgtgatttagcagatattgcaatgagcaaaggatttgcaccgcaggtcgcaacgcttgattcacacgccggaaatcttccgcgcgaaggagctgtattaattgtaacggcgtcttataacggtcatccgcctgataacgcaaagcaatttgtcgactggttagaccaagcgtctgctgatgaagtaaaaggcgttcgctactccgtatttggatgcggcgataaaaattgggctgcgacgtatcaaaaagtgcctgcttttatcgatgaaacgcttgccgctaaaggggcagaaaacatcgctgaccgcggtgaagcagatgcaagcgacgactttgaaggcacatatgaagaatggcgtgatcatatgtggagtgacgtagcagcctactttaacctcgacattgaaaacagtgaagataataaatctactctttcacttcaatttgtcgacagcgccgcggatatgccgcttgcgaaaatgcacggtgcgttttcaacgaacgtcgtagcaagcaaagaacttcaacagccaggcagtgcacgaagcacgcgacatcttgaaattgaacttccaaaagaagcttcttatcaagaaggagatcatttaggtgttattcctcgcaactatgaaggaatagtaaaccgtgtaacagcaaggttcggcctaagcgcatcacagcaaatccgtctggaagcagaagaagaaaaattagctcatttgccactcgctaaaacagtatccgtagaagagcttctgcaatacgtggagcttcaagatcctgttacgcgcacgcagcttcgcgcaatggctgctaaaacggtctgcccgccgcataaagtagagcttgaagccttgcttgaaaagcaagcctacaaagaacaagtgctggcaaaacgtttaacaatgcttgaactgcttgaaaaatacccggcgtgtgaaatgaaattcagcgaatttatcgcccttctgccaagcatacgcccgcgctattactcgatttcttcatcacctcgtgtcgatgaaaaacaagcaagcatcacggtcagcgttgtctcaggaccggcgtggagcggatatggagaatataaaggaattgcgtcgaactatcttgccgagctgcaagaaggagatacgattacgtgctttatttccacaccgcagtcagaatttacgctgccaaaagaccctgaaacgccgcttatcatggtcggaccgggaacaggcgtcgcgccgtttagaggctttgtgcaggcgcgcaaacagctaaaagaacaaggacagtcacttggagaagcacatttatacttcggctgccgttcacctcatgaagactatctgtatcaagaagagcttgaaaacgcccaaagcgaaggcatcattacgcttcataccgctttttctcgcatgccaaatcagccgaaaacatacgttcagcacgtaatggaacaagacggcaagaaattgattgaacttcttgatcaaggagcgcacttctatatttgcggagacggaagccaaatggcacctgccgttgaagcaacgcttatgaaaagctatgctgacgttcaccaagtgagtgaagcagacgctcgcttatggctgcagcagctagaagaaaaaggccgatacgcaaaagacgtgtgggctggg

SEQ ID NO: 172 - protein, 1049 aa, synthetic construct
  REGION 1..1049: note = variant of P450 oxidase from Bacillus megaterium
MTIKEMPQPKTFGELKNLPLLNTDKPVQALMRIADELGEIFKFEAPGSVTRYLSSQRLIKEACDESRFDKNLSQALKFARDFVGDGLATSWTHEPNWKKAHNILVPSFSQHAMGRYHAMMVDIAVQLVQKWERLNADEHIEVSEDMTRLTLDTIGLCGFNYRFNSFYRDQPHPFIVSMRRALDEVMNKGQRANPDDPAYDENKRQCQEDIKVMNDYVDKIIADRKARGEQSHDLLTQMLNGKDPETGEPLDDGNIRYQIITFLIAGHETTSGLLSFALYFLVKNPHVLQKVAEEAARVLVDPVPSYKQVKQLKYVGMVLNEALRLWPTAPMFSLYAKEDTVLGGEYPLTKGDEVVVLIPQLHRDKTIWGDDVEEFRPERFENPSAIPQHAFKPFGNGQRACIGQQFALHEATLVLGMMLKHFDFEDHTNYELVIKETRTLKPEGFVVKAKSKGIPLGGIPSPSTEQSAKKVRKKAENAHNTPLLVLYGSNAGTAEGTARDLADIAMSKGFAPQVATLDSHAGNLPREGAVLIVTASYNGHPPDNAKQFVDWLDQASADEVKGVRYSVFGCGDKNWAATYQKVPAFIDETLAAKGAENIADRGEADASDDFEGTYEEWRDHMWSDVAAYFNLDIENSEDNKSTLSLQFVDSAADMPLAKMHGAFSTNVVASKELQQPGSARSTRHLEIELPKEASYQEGDHLGVIPRNYEGIVNRVTARFGLSASQQIRLEAEEEKLAHLPLAKTVSVEELLQYVELQDPVTRTQLRAMAAKTVCPPHKVELEALLEKQAYKEQVLAKRLTMLELLEKYPACEMKFSEFIALLPSIRPRYYSISSSPRVDEKQASITVSVVSGPAWSGYGEYKGIASNYLAELQEGDTITCFISTPQSEFTLPKDPETPLIMVGPGTGVAPFRGFVQARKQLKEQGQSLGEAHLYFGCRSPHEDYLYQEELENAQSEGIITLHTAFSRMPNQPKTYVQHVMEQDGKKLIELLDQGAHFYICGDGSQMAPAVEATLMKSYADVHQVSEADARLWLQQLEEKGRYAKDVWAG

SEQ ID NO: 173 - DNA, 3147 bp, synthetic construct
  misc_feature 1..3147: note = variant of P450 oxidase from Bacillus megaterium
  source 1..3147: mol_type = other DNA
atgacaattaaggaaatgcctcagcctaagacgtttggagaacttaaaaatttaccgttattaaacacagataaaccggttcaagctttgatgcgtattgcggatgaattaggagaaatctttaaattcgaggcgcctggtagcgtaacgcgctatttatcaagtcagcgtctaattaaagaagcatgcgatgaatcacgctttgataaaaacttaagtcaaactcttaaatttgcacgtgattttgttggagacgggttagccacaagctggacgcatgaaccgaattggaaaaaagcgcataatatcttagttccaagctttagtcagcatgcaatggggcgttatcatgcgatgatggtcgatatcgccgtgcagcttgttcaaaagtgggagcgtctaaatgcagatgagcatattgaagtatcggaagacatgacacgtttaacgcttgatacaattggtctttgcggctttaactatcgctttaacagcttttaccgagatcagcctcatccatttattgtgagtatgcgccgtgcactggatgaagtaatgaacaaggggcagcgagcaaatccagacgacccagcttatgatgaaaacaagcgccagtgtcaagaagatatcaaggtgatgaacgactatgtagataaaattattgcagatcgcaaagcaaggggtgaacaaagtcatgatttattaacgcagatgctaaacggaaaagatccagaaacgggtgagccgcttgatgacgggaacattcgttatcaaattattacattcttaattgcgggacacgaaacaacaagtggtcttttatcatttgcgctgtatttcttagtgaaaaatccacatgtattacaaaaagtagcagaagaagcagcacgagttctagtagatcctgttccaagctacaaacaagtcaaacagcttaaatatgtcggcatggtcttaaacgaagcgctgcgcttatggccaacggcgcctatgttttccctatatgcaaaagaagatacggtgcttggaggagaatatcctttaacgaaaggcgacgaagtaatggttctgattcctcagcttcaccgtgataaaacaatttggggagacgatgtggaggagttccgtccagagcgttttgaaaatccaagtgcgattccgcagcatgcgtttaaaccgtttggaaacggtcagcgtgcgtgtatcggtcagcagttcgctcttcatgaagcaacgctggtacttggtatgatgctaaaacactttgactttgaagatcatacaaactacgagctcgttattaaagaaactcggacgttaaaacctgaaggctttgtggtaaaagcaaaatcgaaaggcattccgcttggcggtattccttcacctagcactgaacagtctgctaaaaaagtacgcaaaaaggcagaaaacgctcataatacgccgctgcttgtgctatacggttcaaatgcgggaacagctgaaggaacggcgcgtgatttagcagatattgcaatgagcaaaggatttgcaccgcaggtcgcaacgcttgattcacacgccggaaatcttccgcgcgaaggagctgtattaattgtaacggcgtcttataacggtcatccgcctgataacgcaaagcaatttgtcgactggttagaccaagcgtctgctgatgaagtaaaaggcgttcgctactccgtatttggatgcggcgataaaaattgggctgcgacgtatcaaaaagtgcctgcttttatcgatgaaacgcttgccgctaaaggggcagaaaacatcgctgaccgcggtgaagcagatgcaagcgacgactttgaaggcacatatgaagaatggcgtgatcatatgtggagtgacgtagcagcctactttaacctcgacattgaaaacagtgaagataataaatctactctttcacttcaatttgtcgacagcgccgcggatatgccgcttgcgaaaatgcacggtgcgttttcaacgaacgtcgtagcaagcaaagaacttcaacagccaggcagtgcacgaagcacgcgacatcttgaaattgaacttccaaaagaagcttcttatcaagaaggagatcatttaggtgttattcctcgcaactatgaaggaatagtaaaccgtgtaacagcaaggttcggcctaagcgcatcacagcaaatccgtctggaagcagaagaagaaaaattagctcatttgccactcgctaaaacagtatccgtagaagagcttctgcaatacgtggagcttcaagatcctgttacgcgcacgcagcttcgcgcaatggctgctaaaacggtctgcccgccgcataaagtagagcttgaagccttgcttgaaaagcaagcctacaaagaacaagtgctggcaaaacgtttaacaatgcttgaactgcttgaaaaatacccggcgtgtgaaatgaaattcagcgaatttatcgcccttctgccaagcatacgcccgcgctattactcgatttcttcatcacctcgtgtcgatgaaaaacaagcaagcatcacggtcagcgttgtctcaggaccggcgtggagcggatatggagaatataaaggaattgcgtcgaactatcttgccgagctgcaagaaggagatacgattacgtgctttatttccacaccgcagtcagaatttacgctgccaaaagaccctgaaacgccgcttatcatggtcggaccgggaacaggcgtcgcgccgtttagaggctttgtgcaggcgcgcaaacagctaaaagaacaaggacagtcacttggagaagcacatttatacttcggctgccgttcacctcatgaagactatctgtatcaagaagagcttgaaaacgcccaaagcgaaggcatcattacgcttcataccgctttttctcgcatgccaaatcagccgaaaacatacgttcagcacgtaatggaacaagacggcaagaaattgattgaacttcttgatcaaggagcgcacttctatatttgcggagacggaagccaaatggcacctgccgttgaagcaacgcttatgaaaagctatgctgacgttcaccaagtgagtgaagcagacgctcgcttatggctgcagcagctagaagaaaaaggccgatacgcaaaagacgtgtgggctggg

SEQ ID NO: 174 - protein, 1049 aa, synthetic construct
  REGION 1..1049: note = variant of P450 oxidase from Bacillus megaterium
MTIKEMPQPKTFGELKNLPLLNTDKPVQALMRIADELGEIFKFEAPGSVTRYLSSQRLIKEACDESRFDKNLSQTLKFARDFVGDGLATSWTHEPNWKKAHNILVPSFSQHAMGRYHAMMVDIAVQLVQKWERLNADEHIEVSEDMTRLTLDTIGLCGFNYRFNSFYRDQPHPFIVSMRRALDEVMNKGQRANPDDPAYDENKRQCQEDIKVMNDYVDKIIADRKARGEQSHDLLTQMLNGKDPETGEPLDDGNIRYQIITFLIAGHETTSGLLSFALYFLVKNPHVLQKVAEEAARVLVDPVPSYKQVKQLKYVGMVLNEALRLWPTAPMFSLYAKEDTVLGGEYPLTKGDEVMVLIPQLHRDKTIWGDDVEEFRPERFENPSAIPQHAFKPFGNGQRACIGQQFALHEATLVLGMMLKHFDFEDHTNYELVIKETRTLKPEGFVVKAKSKGIPLGGIPSPSTEQSAKKVRKKAENAHNTPLLVLYGSNAGTAEGTARDLADIAMSKGFAPQVATLDSHAGNLPREGAVLIVTASYNGHPPDNAKQFVDWLDQASADEVKGVRYSVFGCGDKNWAATYQKVPAFIDETLAAKGAENIADRGEADASDDFEGTYEEWRDHMWSDVAAYFNLDIENSEDNKSTLSLQFVDSAADMPLAKMHGAFSTNVVASKELQQPGSARSTRHLEIELPKEASYQEGDHLGVIPRNYEGIVNRVTARFGLSASQQIRLEAEEEKLAHLPLAKTVSVEELLQYVELQDPVTRTQLRAMAAKTVCPPHKVELEALLEKQAYKEQVLAKRLTMLELLEKYPACEMKFSEFIALLPSIRPRYYSISSSPRVDEKQASITVSVVSGPAWSGYGEYKGIASNYLAELQEGDTITCFISTPQSEFTLPKDPETPLIMVGPGTGVAPFRGFVQARKQLKEQGQSLGEAHLYFGCRSPHEDYLYQEELENAQSEGIITLHTAFSRMPNQPKTYVQHVMEQDGKKLIELLDQGAHFYICGDGSQMAPAVEATLMKSYADVHQVSEADARLWLQQLEEKGRYAKDVWAG

SEQ ID NO: 175 - DNA, 3147 bp, synthetic construct
  misc_feature 1..3147: note = variant of P450 oxidase from Bacillus megaterium
  source 1..3147: mol_type = other DNA
atgacaattaaggaaatgcctcagcctaagacgtttggagaacttaaaaatttaccgttattaaacacagataaaccggttcaagctttgatgcgtattgcggatgaattaggagaaatctttaaattcgaggcgcctggtagcgtaacgcgctatttatcaagtcagcgtctaattaaagaagcatgcgatgaatcacgctttgataaaaacttaagtcaagcgcttaaatttgcacgtgattttgttggagacgggttagccacaagctggacgcatgaaccgaattggaaaaaagcgcataatatcttagttccaagctttagtcagcatgcaatggggcgttatcatgcgatgatggtcgatatcgccgtgcagcttgttcaaaagtgggagcgtctaaatgcagatgagcatattgaagtatcggaagacatgacacgtttaacgcttgatacaattggtctttgcggctttaactatcgctttaacagcttttaccgagatcagcctcatccatttattgtgagtatggtgcgtgcaattgatgaagtaatgaacaaggggcagcgagcaaatccagacgacccagcttatgatgaaaacaagcgccagtgtcaagaagatatcaaggtgatgaacgactatgtagataaaattattgcagatcgcaaagcaaggggtgaacaaagtcatgatttattaacgcagatgctaaacggaaaagatccagaaacgggtgagccgcttgatgacgggaacattcgttatcaaattattacattcttaattgcgggacaccaaacaacaagtggtcttttatcatttgcgctgtatttcttagtgaaaaatccacatgtattacaaaaagtagcagaagaagcagcacgagttctagtagatcctgttccaagctacaaacaagtcaaacagcttaaatatgtcggcatggtcttaaacgaagcgctgcgcttatggccagtagcgcctatgttttccctatatgcaaaagaagatacggtgcttggaggagaatatcctttaacgaaaggcgacgaagtagtggttctggtgcctcagcttcaccgtgataaaacaatttggggagacgatgtggaggagttccgtccagagcgttttgaaaatccaagtgcgattccgcagcatgcgtttaaaccgtttggaaacggtcagcgtgcgtgtatcggtcagcagttcgctcttcatgaagcaacgctggtacttggtatgatgctaaaacactttgactttgaagatcatacaaactacgagctcgttattaaagaaggtcggacgttaaaacctgaaggctttgtggtaaaagcaaaatcgaaaggcattccgcttggcggtattccttcacctagcactgaacagtctgctaaaaaagtacgcaaaaaggcagaaaacgctcataatacgccgctgcttgtgctatacggttcaaatgcgggaacagctgaaggaacggcgcgtgatttagcagatattgcaatgagcaaaggatttgcaccgcaggtcgcaacgcttgattcacacgccggaaatcttccgcgcgaaggagctgtattaattgtaacggcgtcttataacggtcatccgcctgataacgcaaagcaatttgtcgactggttagaccaagcgtctgctgatgaagtaaaaggcgttcgctactccgtatttggatgcggcgataaaaattgggctgcgacgtatcaaaaagtgcctgcttttatcgatgaaacgcttgccgctaaaggggcagaaaacatcgctgaccgcggtgaagcagatgcaagcgacgactttgaaggcacatatgaagaatggcgtgatcatatgtggagtgacgtagcagcctactttaacctcgacattgaaaacagtgaagataataaatctactctttcacttcaatttgtcgacagcgccgcggatatgccgcttgcgaaaatgcacggtgcgttttcaacgaacgtcgtagcaagcaaagaacttcaacagccaggcagtgcacgaagcacgcgacatcttgaaattgaacttccaaaagaagcttcttatcaagaaggagatcatttaggtgttattcctcgcaactatgaaggaatagtaaaccgtgtaacagcaaggttcggcctaagcgcatcacagcaaatccgtctggaagcagaagaagaaaaattagctcatttgccactcgctaaaacagtatccgtagaagagcttctgcaatacgtggagcttcaagatcctgttacgcgcacgcagcttcgcgcaatggctgctaaaacggtctgcccgccgcataaagtagagcttgaagccttgcttgaaaagcaagcctacaaagaacaagtgctggcaaaacgtttaacaatgcttgaactgcttgaaaaatacccggcgtgtgaaatgaaattcagcgaatttatcgcccttctgccaagcatacgcccgcgctattactcgatttcttcatcacctcgtgtcgatgaaaaacaagcaagcatcacggtcagcgttgtctcaggaccggcgtggagcggatatggagaatataaaggaattgcgtcgaactatcttgccgagctgcaagaaggagatacgattacgtgctttatttccacaccgcagtcagaatttacgctgccaaaagaccctgaaacgccgcttatcatggtcggaccgggaacaggcgtcgcgccgtttagaggctttgtgcaggcgcgcaaacagctaaaagaacaaggacagtcacttggagaagcacatttatacttcggctgccgttcacctcatgaagactatctgtatcaagaagagcttgaaaacgcccaaagcgaaggcatcattacgcttcataccgctttttctcgcatgccaaatcagccgaaaacatacgttcagcacgtaatggaacaagacggcaagaaattgattgaacttcttgatcaaggagcgcacttctatatttgcggagacggaagccaaatggcacctgccgttgaagcaacgcttatgaaaagctatgctgacgttcaccaagtgagtgaagcagacgctcgcttatggctgcagcagctagaagaaaaaggccgatacgcaaaagacgtgtgggctggg

SEQ ID NO: 176 - protein, 1049 aa, synthetic construct
  REGION 1..1049: note = variant of P450 oxidase from Bacillus megaterium
MTIKEMPQPKTFGELKNLPLLNTDKPVQALMRIADELGEIFKFEAPGSVTRYLSSQRLIKEACDESRFDKNLSQALKFARDFVGDGLATSWTHEPNWKKAHNILVPSFSQHAMGRYHAMMVDIAVQLVQKWERLNADEHIEVSEDMTRLTLDTIGLCGFNYRFNSFYRDQPHPFIVSMVRAIDEVMNKGQRANPDDPAYDENKRQCQEDIKVMNDYVDKIIADRKARGEQSHDLLTQMLNGKDPETGEPLDDGNIRYQIITFLIAGHQTTSGLLSFALYFLVKNPHVLQKVAEEAARVLVDPVPSYKQVKQLKYVGMVLNEALRLWPVAPMFSLYAKEDTVLGGEYPLTKGDEVVVLVPQLHRDKTIWGDDVEEFRPERFENPSAIPQHAFKPFGNGQRACIGQQFALHEATLVLGMMLKHFDFEDHTNYELVIKEGRTLKPEGFVVKAKSKGIPLGGIPSPSTEQSAKKVRKKAENAHNTPLLVLYGSNAGTAEGTARDLADIAMSKGFAPQVATLDSHAGNLPREGAVLIVTASYNGHPPDNAKQFVDWLDQASADEVKGVRYSVFGCGDKNWAATYQKVPAFIDETLAAKGAENIADRGEADASDDFEGTYEEWRDHMWSDVAAYFNLDIENSEDNKSTLSLQFVDSAADMPLAKMHGAFSTNVVASKELQQPGSARSTRHLEIELPKEASYQEGDHLGVIPRNYEGIVNRVTARFGLSASQQIRLEAEEEKLAHLPLAKTVSVEELLQYVELQDPVTRTQLRAMAAKTVCPPHKVELEALLEKQAYKEQVLAKRLTMLELLEKYPACEMKFSEFIALLPSIRPRYYSISSSPRVDEKQASITVSVVSGPAWSGYGEYKGIASNYLAELQEGDTITCFISTPQSEFTLPKDPETPLIMVGPGTGVAPFRGFVQARKQLKEQGQSLGEAHLYFGCRSPHEDYLYQEELENAQSEGIITLHTAFSRMPNQPKTYVQHVMEQDGKKLIELLDQGAHFYICGDGSQMAPAVEATLMKSYADVHQVSEADARLWLQQLEEKGRYAKDVWAG

SEQ ID NO: 177 - DNA, 3147 bp, synthetic construct
  misc_feature 1..3147: note = variant of P450 oxidase from Bacillus megaterium
  source 1..3147: mol_type = other DNA
atgacaattaaggaaatgcctcagcctaagacgtttggagaacttaaaaatttaccgttattaaacacagataaaccggttcaagctttgatgcgtattgcggatgaattaggagaaatctttaaattcgaggcgcctggtagcgtaacgcgctatttatcaagtcagcgtctaattaaagaagcatgcgatgaatcacgctttgataaaaacttaagtcaagcgcttaaatttgcacgtgattttgttggagacgggttagccacaagctggacgcatgaaccgaattggaaaaaagcgcataatatcttagttccaagctttagtcagcatgcaatggggcgttatcatgcgatgatggtcgatatcgccgtgcagcttgttcaaaagtgggagcgtctaaatgcagatgagcatattgaagtatcggaagacatgacacgtttaacgcttgatacaattggtctttgcggctttaactatcgctttaacagcttttaccgagatcagcctcatccatttattgtgagtatggtccgtgcactggatgaagtaatgaacaagctgcagcgagcaaatccagacgacccagcttatgatgaaaacaagcgccagtgtcaagaagatatcaaggtgatgaacgactatgtagataaaattattgcagatcgcaaagcaaggggtgaacaaagtcatgatttattaacgcagatgctaaacggaaaagatccagaaacgggtgagccgcttgatgacgggaacattcgttatcaaattattacattcttaattgcgggacacgaaacaacaagtggtcttttatcatttgcgctgtatttcttagtgaaaaatccacatgtattacaaaaagtagcagaagaagcagcacgagttctagtagatcctgttccaagctacaaacaagtcaaacagcttaaatatgtcggcatggtcttaaacgaagcgctgcgcttatggccaacggcgcctatgttttccctatatgcaaaagaagatacggtgcttggaggagaatatcctttaacgaaaggcgacgaagtaatggttctgattcctcagcttcaccgtgataaaacaatttggggagacgatgtggaggagttccgtccagagcgttttgaaaatccaagtgcgattccgcagcatgcgtttaaaccgtttggaaacggtcagcgtgcgtgtatcggtcagcagttcgctcttcatgaagcaacgctggtacttggtatgatgctaaaacactttgactttgaagatcatacaaactacgagctcgttattaaagaaactcggacgttaaaacctgaaggctttgtggtaaaagcaaaatcgaaaggcattccgcttggcggtattccttcacctagcactgaacagtctgctaaaaaagtacgcaaaaaggcagaaaacgctcataatacgccgctgcttgtgctatacggttcaaatgcgggaacagctgaaggaacggcgcgtgatttagcagatattgcaatgagcaaaggatttgcaccgcaggtcgcaacgcttgattcacacgccggaaatcttccgcgcgaaggagctgtattaattgtaacggcgtcttataacggtcatccgcctgataacgcaaagcaatttgtcgactggttagaccaagcgtctgctgatgaagtaaaaggcgttcgctactccgtatttggatgcggcgataaaaattgggctgcgacgtatcaaaaagtgcctgcttttatcgatgaaacgcttgccgctaaaggggcagaaaacatcgctgaccgcggtgaagcagatgcaagcgacgactttgaaggcacatatgaagaatggcgtgatcatatgtggagtgacgtagcagcctactttaacctcgacattgaaaacagtgaagataataaatctactctttcacttcaatttgtcgacagcgccgcggatatgccgcttgcgaaaatgcacggtgcgttttcaacgaacgtcgtagcaagcaaagaacttcaacagccaggcagtgcacgaagcacgcgacatcttgaaattgaacttccaaaagaagcttcttatcaagaaggagatcatttaggtgttattcctcgcaactatgaaggaatagtaaaccgtgtaacagcaaggttcggcctaagcgcatcacagcaaatccgtctggaagcagaagaagaaaaattagctcatttgccactcgctaaaacagtatccgtagaagagcttctgcaatacgtggagcttcaagatcctgttacgcgcacgcagcttcgcgcaatggctgctaaaacggtctgcccgccgcataaagtagagcttgaagccttgcttgaaaagcaagcctacaaagaacaagtgctggcaaaacgtttaacaatgcttgaactgcttgaaaaatacccggcgtgtgaaatgaaattcagcgaatttatcgcccttctgccaagcatacgcccgcgctattactcgatttcttcatcacctcgtgtcgatgaaaaacaagcaagcatcacggtcagcgttgtctcaggaccggcgtggagcggatatggagaatataaaggaattgcgtcgaactatcttgccgagctgcaagaaggagatacgattacgtgctttatttccacaccgcagtcagaatttacgctgccaaaagaccctgaaacgccgcttatcatggtcggaccgggaacaggcgtcgcgccgtttagaggctttgtgcaggcgcgcaaacagctaaaagaacaaggacagtcacttggagaagcacatttatacttcggctgccgttcacctcatgaagactatctgtatcaagaagagcttgaaaacgcccaaagcgaaggcatcattacgcttcataccgctttttctcgcatgccaaatcagccgaaaacatacgttcagcacgtaatggaacaagacggcaagaaattgattgaacttcttgatcaaggagcgcacttctatatttgcggagacggaagccaaatggcacctgccgttgaagcaacgcttatgaaaagctatgctgacgttcaccaagtgagtgaagcagacgctcgcttatggctgcagcagctagaagaaaaaggccgatacgcaaaagacgtgtgggctggg

SEQ ID NO: 178 - protein, 1049 aa, synthetic construct
  REGION 1..1049: note = variant of P450 oxidase from Bacillus megaterium
MTIKEMPQPKTFGELKNLPLLNTDKPVQALMRIADELGEIFKFEAPGSVTRYLSSQRLIKEACDESRFDKNLSQALKFARDFVGDGLATSWTHEPNWKKAHNILVPSFSQHAMGRYHAMMVDIAVQLVQKWERLNADEHIEVSEDMTRLTLDTIGLCGFNYRFNSFYRDQPHPFIVSMVRALDEVMNKLQRANPDDPAYDENKRQCQEDIKVMNDYVDKIIADRKARGEQSHDLLTQMLNGKDPETGEPLDDGNIRYQIITFLIAGHETTSGLLSFALYFLVKNPHVLQKVAEEAARVLVDPVPSYKQVKQLKYVGMVLNEALRLWPTAPMFSLYAKEDTVLGGEYPLTKGDEVMVLIPQLHRDKTIWGDDVEEFRPERFENPSAIPQHAFKPFGNGQRACIGQQFALHEATLVLGMMLKHFDFEDHTNYELVIKETRTLKPEGFVVKAKSKGIPLGGIPSPSTEQSAKKVRKKAENAHNTPLLVLYGSNAGTAEGTARDLADIAMSKGFAPQVATLDSHAGNLPREGAVLIVTASYNGHPPDNAKQFVDWLDQASADEVKGVRYSVFGCGDKNWAATYQKVPAFIDETLAAKGAENIADRGEADASDDFEGTYEEWRDHMWSDVAAYFNLDIENSEDNKSTLSLQFVDSAADMPLAKMHGAFSTNVVASKELQQPGSARSTRHLEIELPKEASYQEGDHLGVIPRNYEGIVNRVTARFGLSASQQIRLEAEEEKLAHLPLAKTVSVEELLQYVELQDPVTRTQLRAMAAKTVCPPHKVELEALLEKQAYKEQVLAKRLTMLELLEKYPACEMKFSEFIALLPSIRPRYYSISSSPRVDEKQASITVSVVSGPAWSGYGEYKGIASNYLAELQEGDTITCFISTPQSEFTLPKDPETPLIMVGPGTGVAPFRGFVQARKQLKEQGQSLGEAHLYFGCRSPHEDYLYQEELENAQSEGIITLHTAFSRMPNQPKTYVQHVMEQDGKKLIELLDQGAHFYICGDGSQMAPAVEATLMKSYADVHQVSEADARLWLQQLEEKGRYAKDVWAG

SEQ ID NO: 179 - DNA, 3147 bp, synthetic construct
  misc_feature 1..3147: note = variant of P450 oxidase from Bacillus megaterium
  source 1..3147: mol_type = other DNA
atgacaattaaggaaatgcctcagcctaagacgtttggagaacttaaaaatttaccgttattaaacacagataaaccggttcaagctttgatgcgtattgcggatgaattaggagaaatctttaaattcgaggcgcctggtagcgtaacgcgctatttatcaagtcagcgtctaattaaagaagcatgcgatgaatcacgctttgataaaaacttaagtcaaactcttaaatttgcacgtgattttgctggagacgggttagccacaagctggacgcatgaaccgaattggaaaaaagcgcataatatcttagttccaagctttagtcagcatgcaatggggcgttatcatgcgatgatggtcgatatcgccgtgcagcttgttcaaaagtgggagcgtctaaatgcagatgagcatattgaagtatcggaagacatgacacgtttaacgcttgatacaattggtctttgcggctttaactatcgctttaacagcttttaccgagatcagcctcatccatttattgtgagtatggtccgtgcactggatgaagtaatgaacaagctgcagcgagcaaatccagacgacccagcttatgatgaaaacaagcgccagtgtcaagaagatatcaaggtgatgaacgactatgtagataaaattattgcagatcgcaaagcaaggggtgaacaaagtcatgatttattaacgcagatgctaaacggaaaagatccagaaacgggtgagccgcttgatgacgggaacattcgttatcaaattattacattcttaattgcgggacaccaaacaacaagtggtcttttatcatttgcgctgtatttcttagtgaaaaatccacatgtattacaaaaagtagcagaagaagcagcacgagttctagtagatcctgttccaagctacaaacaagtcaaacagcttaaatatgtcggcatggtcttaaacgaagcgctgcgcttatggccagtagcgcctactttttccctatatgcaaaagaagatacggtgcttggaggagaatatcctttaacgaaaggcgacgaagtaatggttctgactcctcagcttcaccgtgataaaacaatttggggagacgatgtggaggagttccgtccagagcgttttgaaaatccaagtgcgattccgcagcatgcgtttaaaccgtttggaaacggtcagcgtgcgtgtatcggtcagcagttcgctcttcatgaagcaacgctggtacttggtatgatgctaaaacactttgactttgaagatcatacaaactacgagctcgttattaaagaaactcggacgttaaaacctgaaggctttgtggtaaaagcaaaatcgaaaggcattccgcttggcggtattccttcacctagcactgaacagtctgctaaaaaagtacgcaaaaaggcagaaaacgctcataatacgccgctgcttgtgctatacggttcaaatgcgggaacagctgaaggaacggcgcgtgatttagcagatattgcaatgagcaaaggatttgcaccgcaggtcgcaacgcttgattcacacgccggaaatcttccgcgcgaaggagctgtattaattgtaacggcgtcttataacggtcatccgcctgataacgcaaagcaatttgtcgactggttagaccaagcgtctgctgatgaagtaaaaggcgttcgctactccgtatttggatgcggcgataaaaattgggctgcgacgtatcaaaaagtgcctgcttttatcgatgaaacgcttgccgctaaaggggcagaaaacatcgctgaccgcggtgaagcagatgcaagcgacgactttgaaggcacatatgaagaatggcgtgatcatatgtggagtgacgtagcagcctactttaacctcgacattgaaaacagtgaagataataaatctactctttcacttcaatttgtcgacagcgccgcggatatgccgcttgcgaaaatgcacggtgcgttttcaacgaacgtcgtagcaagcaaagaacttcaacagccaggcagtgcacgaagcacgcgacatcttgaaattgaacttccaaaagaagcttcttatcaagaaggagatcatttaggtgttattcctcgcaactatgaaggaatagtaaaccgtgtaacagcaaggttcggcctaagcgcatcacagcaaatccgtctggaagcagaagaagaaaaattagctcatttgccactcgctaaaacagtatccgtagaagagcttctgcaatacgtggagcttcaagatcctgttacgcgcacgcagcttcgcgcaatggctgctaaaacggtctgcccgccgcataaagtagagcttgaagccttgcttgaaaagcaagcctacaaagaacaagtgctggcaaaacgtttaacaatgcttgaactgcttgaaaaatacccggcgtgtgaaatgaaattcagcgaatttatcgcccttctgccaagcatacgcccgcgctattactcgatttcttcatcacctcgtgtcgatgaaaaacaagcaagcatcacggtcagcgttgtctcaggaccggcgtggagcggatatggagaatataaaggaattgcgtcgaactatcttgccgagctgcaagaaggagatacgattacgtgctttatttccacaccgcagtcagaatttacgctgccaaaagaccctgaaacgccgcttatcatggtcggaccgggaacaggcgtcgcgccgtttagaggctttgtgcaggcgcgcaaacagctaaaagaacaaggacagtcacttggagaagcacatttatacttcggctgccgttcacctcatgaagactatctgtatcaagaagagcttgaaaacgcccaaagcgaaggcatcattacgcttcataccgctttttctcgcatgccaaatcagccgaaaacatacgttcagcacgtaatggaacaagacggcaagaaattgattgaacttcttgatcaaggagcgcacttctatatttgcggagacggaagccaaatggcacctgccgttgaagcaacgcttatgaaaagctatgctgacgttcaccaagtgagtgaagcagacgctcgcttatggctgcagcagctagaagaaaaaggccgatacgcaaaagacgtgtgggctggg

SEQ ID NO: 180 - protein, 1049 aa, synthetic construct
  REGION 1..1049: note = variant of P450 oxidase from Bacillus megaterium
MTIKEMPQPKTFGELKNLPLLNTDKPVQALMRIADELGEIFKFEAPGSVTRYLSSQRLIKEACDESRFDKNLSQTLKFARDFAGDGLATSWTHEPNWKKAHNILVPSFSQHAMGRYHAMMVDIAVQLVQKWERLNADEHIEVSEDMTRLTLDTIGLCGFNYRFNSFYRDQPHPFIVSMVRALDEVMNKLQRANPDDPAYDENKRQCQEDIKVMNDYVDKIIADRKARGEQSHDLLTQMLNGKDPETGEPLDDGNIRYQIITFLIAGHQTTSGLLSFALYFLVKNPHVLQKVAEEAARVLVDPVPSYKQVKQLKYVGMVLNEALRLWPVAPTFSLYAKEDTVLGGEYPLTKGDEVMVLTPQLHRDKTIWGDDVEEFRPERFENPSAIPQHAFKPFGNGQRACIGQQFALHEATLVLGMMLKHFDFEDHTNYELVIKETRTLKPEGFVVKAKSKGIPLGGIPSPSTEQSAKKVRKKAENAHNTPLLVLYGSNAGTAEGTARDLADIAMSKGFAPQVATLDSHAGNLPREGAVLIVTASYNGHPPDNAKQFVDWLDQASADEVKGVRYSVFGCGDKNWAATYQKVPAFIDETLAAKGAENIADRGEADASDDFEGTYEEWRDHMWSDVAAYFNLDIENSEDNKSTLSLQFVDSAADMPLAKMHGAFSTNVVASKELQQPGSARSTRHLEIELPKEASYQEGDHLGVIPRNYEGIVNRVTARFGLSASQQIRLEAEEEKLAHLPLAKTVSVEELLQYVELQDPVTRTQLRAMAAKTVCPPHKVELEALLEKQAYKEQVLAKRLTMLELLEKYPACEMKFSEFIALLPSIRPRYYSISSSPRVDEKQASITVSVVSGPAWSGYGEYKGIASNYLAELQEGDTITCFISTPQSEFTLPKDPETPLIMVGPGTGVAPFRGFVQARKQLKEQGQSLGEAHLYFGCRSPHEDYLYQEELENAQSEGIITLHTAFSRMPNQPKTYVQHVMEQDGKKLIELLDQGAHFYICGDGSQMAPAVEATLMKSYADVHQVSEADARLWLQQLEEKGRYAKDVWAG

SEQ ID NO: 181 - DNA, 3147 bp, synthetic construct
  misc_feature 1..3147: note = variant of P450 oxidase from Bacillus megaterium
  source 1..3147: mol_type = other DNA
atgacaattaaggaaatgcctcagcctaagacgtttggagaacttaaaaatttaccgttattaaacacagataaaccggttcaagctttgatgcgtattgcggatgaattaggagaaatctttaaattcgaggcgcctggtagcgtaacgcgctatttatcaagtcagcgtctaattaaagaagcatgcgatgaatcacgctttgataaaaacttaagtcaagcgcttaaatttgcacgtgattttgctggagacgggttagccacaagctggacgcatgaaccgaattggaaaaaagcgcataatatcttagttccaagctttagtcagcatgcaatggggcgttatcatgcgatgatggtcgatatcgccgtgcagcttgttcaaaagtgggagcgtctaaatgcagatgagcatattgaagtatcggaagacatgacacgtttaacgcttgatacaattggtctttgcggctttaactatcgctttaacagcttttaccgagatcagcctcatccatttattgtgagtatggtccgtgcactggatgaagtaatgaacaaggggcagcgagcaaatccagacgacccagcttatgatgaaaacaagcgccagtgtcaagaagatatcaaggtgatgaacgactatgtagataaaattattgcagatcgcaaagcaaggggtgaacaaagtcatgatttattaacgcagatgctaaacggaaaagatccagaaacgggtgagccgcttgatgacgggaacattcgttatcaaattattacattcttaattgcgggacaccaaacaacaagtggtcttttatcatttgcgctgtatttcttagtgaaaaatccacatgtattacaaaaagtagcagaagaagcagcacgagttctagtagatcctgttccaagctacaaacaagtcaaacagcttaaatatgtcggcatggtcttaaacgaagcgctgcgcttatggccagtagcgcctgctttttccctatatgcaaaagaagatacggtgcttggaggagaatatcctttaacgaaaggcgacgaagtaatggttctgattcctcagcttcaccgtgataaaacaatttggggagacgatgtggaggagttccgtccagagcgttttgaaaatccaagtgcgattccgcagcatgcgtttaaaccgtttggaaacggtcagcgtgcgtgtatcggtcagcagttcgctcttcatgaagcaacgctggtacttggtatgatgctaaaacactttgactttgaagatcatacaaactacgagctcgttattaaagaaactcggacgttaaaacctgaaggctttgtggtaaaagcaaaatcgaaaggcattccgcttggcggtattccttcacctagcactgaacagtctgctaaaaaagtacgcaaaaaggcagaaaacgctcataatacgccgctgcttgtgctatacggttcaaatgcgggaacagctgaaggaacggcgcgtgatttagcagatattgcaatgagcaaaggatttgcaccgcaggtcgcaacgcttgattcacacgccggaaatcttccgcgcgaaggagctgtattaattgtaacggcgtcttataacggtcatccgcctgataacgcaaagcaatttgtcgactggttagaccaagcgtctgctgatgaagtaaaaggcgttcgctactccgtatttggatgcggcgataaaaattgggctgcgacgtatcaaaaagtgcctgcttttatcgatgaaacgcttgccgctaaaggggcagaaaacatcgctgaccgcggtgaagcagatgcaagcgacgactttgaaggcacatatgaagaatggcgtgatcatatgtggagtgacgtagcagcctactttaacctcgacattgaaaacagtgaagataataaatctactctttcacttcaatttgtcgacagcgccgcggatatgccgcttgcgaaaatgcacggtgcgttttcaacgaacgtcgtagcaagcaaagaacttcaacagccaggcagtgcacgaagcacgcgacatcttgaaattgaacttccaaaagaagcttcttatcaagaaggagatcatttaggtgttattcctcgcaactatgaaggaatagtaaaccgtgtaacagcaaggttcggcctaagcgcatcacagcaaatccgtctggaagcagaagaagaaaaattagctcatttgccactcgctaaaacagtatccgtagaagagcttctgcaatacgtggagcttcaagatcctgttacgcgcacgcagcttcgcgcaatggctgctaaaacggtctgcccgccgcataaagtagagcttgaagccttgcttgaaaagcaagcctacaaagaacaagtgctggcaaaacgtttaacaatgcttgaactgcttgaaaaatacccggcgtgtgaaatgaaattcagcgaatttatcgcccttctgccaagcatacgcccgcgctattactcgatttcttcatcacctcgtgtcgatgaaaaacaagcaagcatcacggtcagcgttgtctcaggaccggcgtggagcggatatggagaatataaaggaattgcgtcgaactatcttgccgagctgcaagaaggagatacgattacgtgctttatttccacaccgcagtcagaatttacgctgccaaaagaccctgaaacgccgcttatcatggtcggaccgggaacaggcgtcgcgccgtttagaggctttgtgcaggcgcgcaaacagctaaaagaacaaggacagtcacttggagaagcacatttatacttcggctgccgttcacctcatgaagactatctgtatcaagaagagcttgaaaacgcccaaagcgaaggcatcattacgcttcataccgctttttctcgcatgccaaatcagccgaaaacatacgttcagcacgtaatggaacaagacggcaagaaattgattgaacttcttgatcaaggagcgcacttctatatttgcggagacggaagccaaatggcacctgccgttgaagcaacgcttatgaaaagctatgctgacgttcaccaagtgagtgaagcagacgctcgcttatggctgcagcagctagaagaaaaaggccgatacgcaaaagacgtgtgggctggg

SEQ ID NO: 182 - protein, 1049 aa, synthetic construct
  REGION 1..1049: note = variant of P450 oxidase from Bacillus megaterium
MTIKEMPQPKTFGELKNLPLLNTDKPVQALMRIADELGEIFKFEAPGSVTRYLSSQRLIKEACDESRFDKNLSQALKFARDFAGDGLATSWTHEPNWKKAHNILVPSFSQHAMGRYHAMMVDIAVQLVQKWERLNADEHIEVSEDMTRLTLDTIGLCGFNYRFNSFYRDQPHPFIVSMVRALDEVMNKGQRANPDDPAYDENKRQCQEDIKVMNDYVDKIIADRKARGEQSHDLLTQMLNGKDPETGEPLDDGNIRYQIITFLIAGHQTTSGLLSFALYFLVKNPHVLQKVAEEAARVLVDPVPSYKQVKQLKYVGMVLNEALRLWPVAPAFSLYAKEDTVLGGEYPLTKGDEVMVLIPQLHRDKTIWGDDVEEFRPERFENPSAIPQHAFKPFGNGQRACIGQQFALHEATLVLGMMLKHFDFEDHTNYELVIKETRTLKPEGFVVKAKSKGIPLGGIPSPSTEQSAKKVRKKAENAHNTPLLVLYGSNAGTAEGTARDLADIAMSKGFAPQVATLDSHAGNLPREGAVLIVTASYNGHPPDNAKQFVDWLDQASADEVKGVRYSVFGCGDKNWAATYQKVPAFIDETLAAKGAENIADRGEADASDDFEGTYEEWRDHMWSDVAAYFNLDIENSEDNKSTLSLQFVDSAADMPLAKMHGAFSTNVVASKELQQPGSARSTRHLEIELPKEASYQEGDHLGVIPRNYEGIVNRVTARFGLSASQQIRLEAEEEKLAHLPLAKTVSVEELLQYVELQDPVTRTQLRAMAAKTVCPPHKVELEALLEKQAYKEQVLAKRLTMLELLEKYPACEMKFSEFIALLPSIRPRYYSISSSPRVDEKQASITVSVVSGPAWSGYGEYKGIASNYLAELQEGDTITCFISTPQSEFTLPKDPETPLIMVGPGTGVAPFRGFVQARKQLKEQGQSLGEAHLYFGCRSPHEDYLYQEELENAQSEGIITLHTAFSRMPNQPKTYVQHVMEQDGKKLIELLDQGAHFYICGDGSQMAPAVEATLMKSYADVHQVSEADARLWLQQLEEKGRYAKDVWAG

SEQ ID NO: 183 - DNA, 3147 bp, synthetic construct
  misc_feature 1..3147: note = variant of P450 oxidase from Bacillus megaterium
  source 1..3147: mol_type = other DNA
atgacaattaaggaaatgcctcagcctaagacgtttggagaacttaaaaatttaccgttattaaacacagataaaccggttcaagctttgatgcgtattgcggatgaattaggagaaatctttaaattcgaggcgcctggtagcgtaacgcgctatttatcaagtcagcgtctaattaaagaagcatgcgatgaatcacgctttgataaaaacttaagtcaagcgcttaaatttgcacgtgattttgttggagacgggttagccacaagctggacgcatgaaccgaattggaaaaaagcgcataatatcttagttccaagctttagtcagcatgcaatggggcgttatcatgcgatgatggtcgatatcgccgtgcagcttgttcaaaagtgggagcgtctaaatgcagatgagcatattgaagtatcggaagacatgacacgtttaacgcttgatacaattggtctttgcggctttaactatcgctttaacagcttttaccgagatcagcctcatccatttattgtgagtatggtccgtgcactggatgaagtaatgaacaagctgcagcgagcaaatccagacgacccagcttatgatgaaaacaagcgccagtgtcaagaagatatcaaggtgatgaacgactatgtagataaaattattgcagatcgcaaagcaaggggtgaacaaagtcatgatttattaacgcagatgctaaacggaaaagatccagaaacgggtgagccgcttgatgacgggaacattcgttatcaaattattacattcttaattgcgggaactcaaacaacaagtggtcttttatcatttgcgctgtatttcttagtgaaaaatccacatgtattacaaaaagtagcagaagaagcagcacgagttctagtagatcctgttccaagctacaaacaagtcaaacagcttaaatatgtcggcatggtcttaaacgaagcgctgcgcttatggccagtagcgcctatgttttccctatatgcaaaagaagatacggtgcttggaggagaatatcctttaacgaaaggcgacgaagtagtggttctgactcctcagcttcaccgtgataaaacaatttggggagacgatgtggaggagttccgtccagagcgttttgaaaatccaagtgcgattccgcagcatgcgtttaaaccgtttggaaacggtcagcgtgcgtgtatcggtcagcagttcgctcttcatgaagcaacgctggtacttggtatgatgctaaaacactttgactttgaagatcatacaaactacgagctcgttattaaagaaactcggacgttaaaacctgaaggctttgtggtaaaagcaaaatcgaaaggcattccgcttggcggtattccttcacctagcactgaacagtctgctaaaaaagtacgcaaaaaggcagaaaacgctcataatacgccgctgcttgtgctatacggttcaaatgcgggaacagctgaaggaacggcgcgtgatttagcagatattgcaatgagcaaaggatttgcaccgcaggtcgcaacgcttgattcacacgccggaaatcttccgcgcgaaggagctgtattaattgtaacggcgtcttataacggtcatccgcctgataacgcaaagcaatttgtcgactggttagaccaagcgtctgctgatgaagtaaaaggcgttcgctactccgtatttggatgcggcgataaaaattgggctgcgacgtatcaaaaagtgcctgcttttatcgatgaaacgcttgccgctaaaggggcagaaaacatcgctgaccgcggtgaagcagatgcaagcgacgactttgaaggcacatatgaagaatggcgtgatcatatgtggagtgacgtagcagcctactttaacctcgacattgaaaacagtgaagataataaatctactctttcacttcaatttgtcgacagcgccgcggatatgccgcttgcgaaaatgcacggtgcgttttcaacgaacgtcgtagcaagcaaagaacttcaacagccaggcagtgcacgaagcacgcgacatcttgaaattgaacttccaaaagaagcttcttatcaagaaggagatcatttaggtgttattcctcgcaactatgaaggaatagtaaaccgtgtaacagcaaggttcggcctaagcgcatcacagcaaatccgtctggaagcagaagaagaaaaattagctcatttgccactcgctaaaacagtatccgtagaagagcttctgcaatacgtggagcttcaagatcctgttacgcgcacgcagcttcgcgcaatggctgctaaaacggtctgcccgccgcataaagtagagcttgaagccttgcttgaaaagcaagcctacaaagaacaagtgctggcaaaacgtttaacaatgcttgaactgcttgaaaaatacccggcgtgtgaaatgaaattcagcgaatttatcgcccttctgccaagcatacgcccgcgctattactcgatttcttcatcacctcgtgtcgatgaaaaacaagcaagcatcacggtcagcgttgtctcaggaccggcgtggagcggatatggagaatataaaggaattgcgtcgaactatcttgccgagctgcaagaaggagatacgattacgtgctttatttccacaccgcagtcagaatttacgctgccaaaagaccctgaaacgccgcttatcatggtcggaccgggaacaggcgtcgcgccgtttagaggctttgtgcaggcgcgcaaacagctaaaagaacaaggacagtcacttggagaagcacatttatacttcggctgccgttcacctcatgaagactatctgtatcaagaagagcttgaaaacgcccaaagcgaaggcatcattacgcttcataccgctttttctcgcatgccaaatcagccgaaaacatacgttcagcacgtaatggaacaagacggcaagaaattgattgaacttcttgatcaaggagcgcacttctatatttgcggagacggaagccaaatggcacctgccgttgaagcaacgcttatgaaaagctatgctgacgttcaccaagtgagtgaagcagacgctcgcttatggctgcagcagctagaagaaaaaggccgatacgcaaaagacgtgtgggctggg

SEQ ID NO: 184 - protein, 1049 aa, synthetic construct
  REGION 1..1049: note = variant of P450 oxidase from Bacillus megaterium
MTIKEMPQPKTFGELKNLPLLNTDKPVQALMRIADELGEIFKFEAPGSVTRYLSSQRLIKEACDESRFDKNLSQALKFARDFVGDGLATSWTHEPNWKKAHNILVPSFSQHAMGRYHAMMVDIAVQLVQKWERLNADEHIEVSEDMTRLTLDTIGLCGFNYRFNSFYRDQPHPFIVSMVRALDEVMNKLQRANPDDPAYDENKRQCQEDIKVMNDYVDKIIADRKARGEQSHDLLTQMLNGKDPETGEPLDDGNIRYQIITFLIAGTQTTSGLLSFALYFLVKNPHVLQKVAEEAARVLVDPVPSYKQVKQLKYVGMVLNEALRLWPVAPMFSLYAKEDTVLGGEYPLTKGDEVVVLTPQLHRDKTIWGDDVEEFRPERFENPSAIPQHAFKPFGNGQRACIGQQFALHEATLVLGMMLKHFDFEDHTNYELVIKETRTLKPEGFVVKAKSKGIPLGGIPSPSTEQSAKKVRKKAENAHNTPLLVLYGSNAGTAEGTARDLADIAMSKGFAPQVATLDSHAGNLPREGAVLIVTASYNGHPPDNAKQFVDWLDQASADEVKGVRYSVFGCGDKNWAATYQKVPAFIDETLAAKGAENIADRGEADASDDFEGTYEEWRDHMWSDVAAYFNLDIENSEDNKSTLSLQFVDSAADMPLAKMHGAFSTNVVASKELQQPGSARSTRHLEIELPKEASYQEGDHLGVIPRNYEGIVNRVTARFGLSASQQIRLEAEEEKLAHLPLAKTVSVEELLQYVELQDPVTRTQLRAMAAKTVCPPHKVELEALLEKQAYKEQVLAKRLTMLELLEKYPACEMKFSEFIALLPSIRPRYYSISSSPRVDEKQASITVSVVSGPAWSGYGEYKGIASNYLAELQEGDTITCFISTPQSEFTLPKDPETPLIMVGPGTGVAPFRGFVQARKQLKEQGQSLGEAHLYFGCRSPHEDYLYQEELENAQSEGIITLHTAFSRMPNQPKTYVQHVMEQDGKKLIELLDQGAHFYICGDGSQMAPAVEATLMKSYADVHQVSEADARLWLQQLEEKGRYAKDVWAG

SEQ ID NO: 185 - DNA, 3147 bp, synthetic construct
  misc_feature 1..3147: note = variant of P450 oxidase from Bacillus megaterium
  source 1..3147: mol_type = other DNA
atgacaattaaggaaatgcctcagcctaagacgtttggagaacttaaaaatttaccgttattaaacacagataaaccggttcaagctttgatgcgtattgcggatgaattaggagaaatctttaaattcgaggcgcctggtagcgtaacgcgctatttatcaagtcagcgtctaattaaagaagcatgcgatgaatcacgctttgataaaaacttaagtcaagcgcttaaatttgcacgtgattttgctggagacgggttagccacaagctggacgcatgaaccgaattggaaaaaagcgcataatatcttagttccaagctttagtcagcatgcaatggggcgttatcatgcgatgatggtcgatatcgccgtgcagcttgttcaaaagtgggagcgtctaaatgcagatgagcatattgaagtatcggaagacatgacacgtttaacgcttgatacaattggtctttgcggctttaactatcgctttaacagcttttaccgagatcagcctcatccatttattgtgagtatggtccgtgcactggatgaagtaatgaacaagctgcagcgagcaaatccagacgacccagcttatgatgaaaacaagcgccagtgtcaagaagatatcaaggtgatgaacgactatgtagataaaattattgcagatcgcaaagcaaggggtgaacaaagtcatgatttattaacgcagatgctaaacggaaaagatccagaaacgggtgagccgcttgatgacgggaacattcgttatcaaattattacattcttaattgcgggaactcaaacaacaagtggtcttttatcatttgcgctgtatttcttagtgaaaaatccacatgtattacaaaaagtagcagaagaagcagcacgagttctagtagatcctgttccaagctacaaacaagtcaaacagcttaaatatgtcggcatggtcttaaacgaagcgctgcgcttatggccaacggcgcctactttttccctatatgcaaaagaagatacggtgcttggaggagaatatcctttaacgaaaggcgacgaagtagtggttctgactcctcagcttcaccgtgataaaacaatttggggagacgatgtggaggagttccgtccagagcgttttgaaaatccaagtgcgattccgcagcatgcgtttaaaccgtttggaaacggtcagcgtgcgtgtatcggtcagcagttcgctcttcatgaagcaacgctggtacttggtatgatgctaaaacactttgactttgaagatcatacaaactacgagctcgttattaaagaaagtcggacgttaaaacctgaaggctttgtggtaaaagcaaaatcgaaaggcattccgcttggcggtattccttcacctagcactgaacagtctgctaaaaaagtacgcaaaaaggcagaaaacgctcataatacgccgctgcttgtgctatacggttcaaatgcgggaacagctgaaggaacggcgcgtgatttagcagatattgcaatgagcaaaggatttgcaccgcaggtcgcaacgcttgattcacacgccggaaatcttccgcgcgaaggagctgtattaattgtaacggcgtcttataacggtcatccgcctgataacgcaaagcaatttgtcgactggttagaccaagcgtctgctgatgaagtaaaaggcgttcgctactccgtatttggatgcggcgataaaaattgggctgcgacgtatcaaaaagtgcctgcttttatcgatgaaacgcttgccgctaaaggggcagaaaacatcgctgaccgcggtgaagcagatgcaagcgacgactttgaaggcacatatgaagaatggcgtgatcatatgtggagtgacgtagcagcctactttaacctcgacattgaaaacagtgaagataataaatctactctttcacttcaatttgtcgacagcgccgcggatatgccgcttgcgaaaatgcacggtgcgttttcaacgaacgtcgtagcaagcaaagaacttcaacagccaggcagtgcacgaagcacgcgacatcttgaaattgaacttccaaaagaagcttcttatcaagaaggagatcatttaggtgttattcctcgcaactatgaaggaatagtaaaccgtgtaacagcaaggttcggcctaagcgcatcacagcaaatccgtctggaagcagaagaagaaaaattagctcatttgccactcgctaaaacagtatccgtagaagagcttctgcaatacgtggagcttcaagatcctgttacgcgcacgcagcttcgcgcaatggctgctaaaacggtctgcccgccgcataaagtagagcttgaagccttgcttgaaaagcaagcctacaaagaacaagtgctggcaaaacgtttaacaatgcttgaactgcttgaaaaatacccggcgtgtgaaatgaaattcagcgaatttatcgcccttctgccaagcatacgcccgcgctattactcgatttcttcatcacctcgtgtcgatgaaaaacaagcaagcatcacggtcagcgttgtctcaggaccggcgtggagcggatatggagaatataaaggaattgcgtcgaactatcttgccgagctgcaagaaggagatacgattacgtgctttatttccacaccgcagtcagaatttacgctgccaaaagaccctgaaacgccgcttatcatggtcggaccgggaacaggcgtcgcgccgtttagaggctttgtgcaggcgcgcaaacagctaaaagaacaaggacagtcacttggagaagcacatttatacttcggctgccgttcacctcatgaagactatctgtatcaagaagagcttgaaaacgcccaaagcgaaggcatcattacgcttcataccgctttttctcgcatgccaaatcagccgaaaacatacgttcagcacgtaatggaacaagacggcaagaaattgattgaacttcttgatcaaggagcgcacttctatatttgcggagacggaagccaaatggcacctgccgttgaagcaacgcttatgaaaagctatgctgacgttcaccaagtgagtgaagcagacgctcgcttatggctgcagcagctagaagaaaaaggccgatacgcaaaagacgtgtgggctggg

SEQ ID NO: 186 - protein, 1049 aa, synthetic construct
  REGION 1..1049: note = variant of P450 oxidase from Bacillus megaterium
MTIKEMPQPKTFGELKNLPLLNTDKPVQALMRIADELGEIFKFEAPGSVTRYLSSQRLIKEACDESRFDKNLSQALKFARDFAGDGLATSWTHEPNWKKAHNILVPSFSQHAMGRYHAMMVDIAVQLVQKWERLNADEHIEVSEDMTRLTLDTIGLCGFNYRFNSFYRDQPHPFIVSMVRALDEVMNKLQRANPDDPAYDENKRQCQEDIKVMNDYVDKIIADRKARGEQSHDLLTQMLNGKDPETGEPLDDGNIRYQIITFLIAGTQTTSGLLSFALYFLVKNPHVLQKVAEEAARVLVDPVPSYKQVKQLKYVGMVLNEALRLWPTAPTFSLYAKEDTVLGGEYPLTKGDEVVVLTPQLHRDKTIWGDDVEEFRPERFENPSAIPQHAFKPFGNGQRACIGQQFALHEATLVLGMMLKHFDFEDHTNYELVIKESRTLKPEGFVVKAKSKGIPLGGIPSPSTEQSAKKVRKKAENAHNTPLLVLYGSNAGTAEGTARDLADIAMSKGFAPQVATLDSHAGNLPREGAVLIVTASYNGHPPDNAKQFVDWLDQASADEVKGVRYSVFGCGDKNWAATYQKVPAFIDETLAAKGAENIADRGEADASDDFEGTYEEWRDHMWSDVAAYFNLDIENSEDNKSTLSLQFVDSAADMPLAKMHGAFSTNVVASKELQQPGSARSTRHLEIELPKEASYQEGDHLGVIPRNYEGIVNRVTARFGLSASQQIRLEAEEEKLAHLPLAKTVSVEELLQYVELQDPVTRTQLRAMAAKTVCPPHKVELEALLEKQAYKEQVLAKRLTMLELLEKYPACEMKFSEFIALLPSIRPRYYSISSSPRVDEKQASITVSVVSGPAWSGYGEYKGIASNYLAELQEGDTITCFISTPQSEFTLPKDPETPLIMVGPGTGVAPFRGFVQARKQLKEQGQSLGEAHLYFGCRSPHEDYLYQEELENAQSEGIITLHTAFSRMPNQPKTYVQHVMEQDGKKLIELLDQGAHFYICGDGSQMAPAVEATLMKSYADVHQVSEADARLWLQQLEEKGRYAKDVWAG

SEQ ID NO: 187 - DNA, 3147 bp, synthetic construct
  misc_feature 1..3147: note = variant of P450 oxidase from Bacillus megaterium
  source 1..3147: mol_type = other DNA
atgacaattaaggaaatgcctcagcctaagacgtttggagaacttaaaaatttaccgttattaaacacagataaaccggttcaagctttgatgcgtattgcggatgaattaggagaaatctttaaattcgaggcgcctggtagcgtaacgcgctatttatcaagtcagcgtctaattaaagaagcatgcgatgaatcacgctttgataaaaacttaagtcaagcgcttaaatttgcacgtgattttgttggagacgggttagccacaagctggacgcatgaaccgaattggaaaaaagcgcataatatcttagttccaagctttagtcagcatgcaatggggcgttatcatgcgatgatggtcgatatcgccgtgcagcttgttcaaaagtgggagcgtctaaatgcagatgagcatattgaagtatcggaagacatgacacgtttaacgcttgatacaattggtctttgcggctttaactatcgctttaacagcttttaccgagatcagcctcatccatttattgtgagtatggtccgtgcactggatgaagtaatgaacaagctgcagcgagcaaatccagacgacccagcttatgatgaaaacaagcgccagtgtcaagaagatatcaaggtgatgaacgactatgtagataaaattattgcagatcgcaaagcaaggggtgaacaaagtcatgatttattaacgcagatgctaaacggaaaagatccagaaacgggtgagccgcttgatgacgggaacattcgttatcaaattattacattcttaattgcgggacacgaaacaacaagtggtcttttatcatttgcgctgtatttcttagtgaaaaatccacatgtattacaaaaagtagcagaagaagcagcacgagttctagtagatcctgttccaagctacaaacaagtcaaacagcttaaatatgtcggcatggtcttaaacgaagcgctgcgcttatggccaactgcgcctgcgttttccctatatgcaaaagaagatacggtgcttggaggagaatatcctttaacgaaaggcgacgaagtaatggttctggtgcctcagcttcaccgtgataaaacaatttggggagacgatgtggaggagttccgtccagagcgttttgaaaatccaagtgcgattccgcagcatgcgtttaaaccgtttggaaacggtcagcgtgcgtgtatcggtcagcagttcgctcttcatgaagcaacgctggtacttggtatgatgctaaaacactttgactttgaagatcatacaaactacgagctcgttattaaagaaagtcggacgttaaaacctgaaggctttgtggtaaaagcaaaatcgaaaggcattccgcttggcggtattccttcacctagcactgaacagtctgctaaaaaagtacgcaaaaaggcagaaaacgctcataatacgccgctgcttgtgctatacggttcaaatgcgggaacagctgaaggaacggcgcgtgatttagcagatattgcaatgagcaaaggatttgcaccgcaggtcgcaacgcttgattcacacgccggaaatcttccgcgcgaaggagctgtattaattgtaacggcgtcttataacggtcatccgcctgataacgcaaagcaatttgtcgactggttagaccaagcgtctgctgatgaagtaaaaggcgttcgctactccgtatttggatgcggcgataaaaattgggctgcgacgtatcaaaaagtgcctgcttttatcgatgaaacgcttgccgctaaaggggcagaaaacatcgctgaccgcggtgaagcagatgcaagcgacgactttgaaggcacatatgaagaatggcgtgatcatatgtggagtgacgtagcagcctactttaacctcgacattgaaaacagtgaagataataaatctactctttcacttcaatttgtcgacagcgccgcggatatgccgcttgcgaaaatgcacggtgcgttttcaacgaacgtcgtagcaagcaaagaacttcaacagccaggcagtgcacgaagcacgcgacatcttgaaattgaacttccaaaagaagcttcttatcaagaaggagatcatttaggtgttattcctcgcaactatgaaggaatagtaaaccgtgtaacagcaaggttcggcctaagcgcatcacagcaaatccgtctggaagcagaagaagaaaaattagctcatttgccactcgctaaaacagtatccgtagaagagcttctgcaatacgtggagcttcaagatcctgttacgcgcacgcagcttcgcgcaatggctgctaaaacggtctgcccgccgcataaagtagagcttgaagccttgcttgaaaagcaagcctacaaagaacaagtgctggcaaaacgtttaacaatgcttgaactgcttgaaaaatacccggcgtgtgaaatgaaattcagcgaatttatcgcccttctgccaagcatacgcccgcgctattactcgatttcttcatcacctcgtgtcgatgaaaaacaagcaagcatcacggtcagcgttgtctcaggaccggcgtggagcggatatggagaatataaaggaattgcgtcgaactatcttgccgagctgcaagaaggagatacgattacgtgctttatttccacaccgcagtcagaatttacgctgccaaaagaccctgaaacgccgcttatcatggtcggaccgggaacaggcgtcgcgccgtttagaggctttgtgcaggcgcgcaaacagctaaaagaacaaggacagtcacttggagaagcacatttatacttcggctgccgttcacctcatgaagactatctgtatcaagaagagcttgaaaacgcccaaagcgaaggcatcattacgcttcataccgctttttctcgcatgccaaatcagccgaaaacatacgttcagcacgtaatggaacaagacggcaagaaattgattgaacttcttgatcaaggagcgcacttctatatttgcggagacggaagccaaatggcacctgccgttgaagcaacgcttatgaaaagctatgctgacgttcaccaagtgagtgaagcagacgctcgcttatggctgcagcagctagaagaaaaaggccgatacgcaaaagacgtgtgggctggg

SEQ ID NO: 188 - protein, 1049 aa, synthetic construct
  REGION 1..1049: note = variant of P450 oxidase from Bacillus megaterium
MTIKEMPQPKTFGELKNLPLLNTDKPVQALMRIADELGEIFKFEAPGSVTRYLSSQRLIKEACDESRFDKNLSQALKFARDFVGDGLATSWTHEPNWKKAHNILVPSFSQHAMGRYHAMMVDIAVQLVQKWERLNADEHIEVSEDMTRLTLDTIGLCGFNYRFNSFYRDQPHPFIVSMVRALDEVMNKLQRANPDDPAYDENKRQCQEDIKVMNDYVDKIIADRKARGEQSHDLLTQMLNGKDPETGEPLDDGNIRYQIITFLIAGHETTSGLLSFALYFLVKNPHVLQKVAEEAARVLVDPVPSYKQVKQLKYVGMVLNEALRLWPTAPAFSLYAKEDTVLGGEYPLTKGDEVMVLVPQLHRDKTIWGDDVEEFRPERFENPSAIPQHAFKPFGNGQRACIGQQFALHEATLVLGMMLKHFDFEDHTNYELVIKESRTLKPEGFVVKAKSKGIPLGGIPSPSTEQSAKKVRKKAENAHNTPLLVLYGSNAGTAEGTARDLADIAMSKGFAPQVATLDSHAGNLPREGAVLIVTASYNGHPPDNAKQFVDWLDQASADEVKGVRYSVFGCGDKNWAATYQKVPAFIDETLAAKGAENIADRGEADASDDFEGTYEEWRDHMWSDVAAYFNLDIENSEDNKSTLSLQFVDSAADMPLAKMHGAFSTNVVASKELQQPGSARSTRHLEIELPKEASYQEGDHLGVIPRNYEGIVNRVTARFGLSASQQIRLEAEEEKLAHLPLAKTVSVEELLQYVELQDPVTRTQLRAMAAKTVCPPHKVELEALLEKQAYKEQVLAKRLTMLELLEKYPACEMKFSEFIALLPSIRPRYYSISSSPRVDEKQASITVSVVSGPAWSGYGEYKGIASNYLAELQEGDTITCFISTPQSEFTLPKDPETPLIMVGPGTGVAPFRGFVQARKQLKEQGQSLGEAHLYFGCRSPHEDYLYQEELENAQSEGIITLHTAFSRMPNQPKTYVQHVMEQDGKKLIELLDQGAHFYICGDGSQMAPAVEATLMKSYADVHQVSEADARLWLQQLEEKGRYAKDVWAG

SEQ ID NO: 189 - DNA, 3147 bp, synthetic construct
  misc_feature 1..3147: note = variant of P450 oxidase from Bacillus megaterium
  source 1..3147: mol_type = other DNA
atgacaattaaggaaatgcctcagcctaagacgtttggagaacttaaaaatttaccgttattaaacacagataaaccggttcaagctttgatgcgtattgcggatgaattaggagaaatctttaaattcgaggcgcctggtagcgtaacgcgctatttatcaagtcagcgtctaattaaagaagcatgcgatgaatcacgctttgataaaaacttaagtcaagcgcttaaatttgcacgtgattttgttggagacgggttagccacaagctggacgcatgaaccgaattggaaaaaagcgcataatatcttagttccaagctttagtcagcatgcaatggggcgttatcatgcgatgatggtcgatatcgccgtgcagcttgttcaaaagtgggagcgtctaaatgcagatgagcatattgaagtatcggaagacatgacacgtttaacgcttgatacaattggtctttgcggctttaactatcgctttaacagcttttaccgagatcagcctcatccatttattgtgagtatggtccgtgcactggatgaagtaatgaacaaggggcagcgagcaaatccagacgacccagcttatgatgaaaacaagcgccagtgtcaagaagatatcaaggtgatgaacgactatgtagataaaattattgcagatcgcaaagcaaggggtgaacaaagtcatgatttattaacgcagatgctaaacggaaaagatccagaaacgggtgagccgcttgatgacgggaacattcgttatcaaattattacattcttaattgcgggacacgaaacaacaagtggtcttttatcatttgcgctgtatttcttagtgaaaaatccacatgtattacaaaaagtagcagaagaagcagcacgagttctagtagatcctgttccaagctacaaacaagtcaaacagcttaaatatgtcggcatggtcttaaacgaagcgctgcgcttatggccagtagcgcctatgttttccctatatgcaaaagaagatacggtgcttggaggagaatatcctttaacgaaaggcgacgaagtaatggttctgattcctcagcttcaccgtgataaaacaatttggggagacgatgtggaggagttccgtccagagcgttttgaaaatccaagtgcgattccgcagcatgcgtttaaaccgtttggaaacggtcagcgtgcgtgtatcggtcagcagttcgctcttcatgaagcaacgctggtacttggtatgatgctaaaacactttgactttgaagatcatacaaactacgagctcgttattaaagaaggtcggacgttaaaacctgaaggctttgtggtaaaagcaaaatcgaaaggcattccgcttggcggtattccttcacctagcactgaacagtctgctaaaaaagtacgcaaaaaggcagaaaacgctcataatacgccgctgcttgtgctatacggttcaaatgcgggaacagctgaaggaacggcgcgtgatttagcagatattgcaatgagcaaaggatttgcaccgcaggtcgcaacgcttgattcacacgccggaaatcttccgcgcgaaggagctgtattaattgtaacggcgtcttataacggtcatccgcctgataacgcaaagcaatttgtcgactggttagaccaagcgtctgctgatgaagtaaaaggcgttcgctactccgtatttggatgcggcgataaaaattgggctgcgacgtatcaaaaagtgcctgcttttatcgatgaaacgcttgccgctaaaggggcagaaaacatcgctgaccgcggtgaagcagatgcaagcgacgactttgaaggcacatatgaagaatggcgtgatcatatgtggagtgacgtagcagcctactttaacctcgacattgaaaacagtgaagataataaatctactctttcacttcaatttgtcgacagcgccgcggatatgccgcttgcgaaaatgcacggtgcgttttcaacgaacgtcgtagcaagcaaagaacttcaacagccaggcagtgcacgaagcacgcgacatcttgaaattgaacttccaaaagaagcttcttatcaagaaggagatcatttaggtgttattcctcgcaactatgaaggaatagtaaaccgtgtaacagcaaggttcggcctaagcgcatcacagcaaatccgtctggaagcagaagaagaaaaattagctcatttgccactcgctaaaacagtatccgtagaagagcttctgcaatacgtggagcttcaagatcctgttacgcgcacgcagcttcgcgcaatggctgctaaaacggtctgcccgccgcataaagtagagcttgaagccttgcttgaaaagcaagcctacaaagaacaagtgctggcaaaacgtttaacaatgcttgaactgcttgaaaaatacccggcgtgtgaaatgaaattcagcgaatttatcgcccttctgccaagcatacgcccgcgctattactcgatttcttcatcacctcgtgtcgatgaaaaacaagcaagcatcacggtcagcgttgtctcaggaccggcgtggagcggatatggagaatataaaggaattgcgtcgaactatcttgccgagctgcaagaaggagatacgattacgtgctttatttccacaccgcagtcagaatttacgctgccaaaagaccctgaaacgccgcttatcatggtcggaccgggaacaggcgtcgcgccgtttagaggttttgtgcaggcgcgcaaacagctaaaagaacaaggacagtcacttggagaagcacatttatacttcggctgccgttcacctcatgaagactatctgtatcaagaagagcttgaaaacgcccaaagcgaaggcatcattacgcttcataccgctttttctcgcatgccaaatcagccgaaaacatacgttcagcacgtaatggaacaagacggcaagaaattgattgaacttcttgatcaaggagcgcacttctatatttgcggagacggaagccaaatggcacctgccgttgaagcaacgcttatgaaaagctatgctgacgttcaccaagtgagtgaagcagacgctcgcttatggctgcagcagctagaagaaaaaggccgatacgcaaaagacgtgtgggctggg

SEQ ID NO: 190 - protein, 1049 aa, synthetic construct
  REGION 1..1049: note = variant of P450 oxidase from Bacillus megaterium
MTIKEMPQPKTFGELKNLPLLNTDKPVQALMRIADELGEIFKFEAPGSVTRYLSSQRLIKEACDESRFDKNLSQALKFARDFVGDGLATSWTHEPNWKKAHNILVPSFSQHAMGRYHAMMVDIAVQLVQKWERLNADEHIEVSEDMTRLTLDTIGLCGFNYRFNSFYRDQPHPFIVSMVRALDEVMNKGQRANPDDPAYDENKRQCQEDIKVMNDYVDKIIADRKARGEQSHDLLTQMLNGKDPETGEPLDDGNIRYQIITFLIAGHETTSGLLSFALYFLVKNPHVLQKVAEEAARVLVDPVPSYKQVKQLKYVGMVLNEALRLWPVAPMFSLYAKEDTVLGGEYPLTKGDEVMVLIPQLHRDKTIWGDDVEEFRPERFENPSAIPQHAFKPFGNGQRACIGQQFALHEATLVLGMMLKHFDFEDHTNYELVIKEGRTLKPEGFVVKAKSKGIPLGGIPSPSTEQSAKKVRKKAENAHNTPLLVLYGSNAGTAEGTARDLADIAMSKGFAPQVATLDSHAGNLPREGAVLIVTASYNGHPPDNAKQFVDWLDQASADEVKGVRYSVFGCGDKNWAATYQKVPAFIDETLAAKGAENIADRGEADASDDFEGTYEEWRDHMWSDVAAYFNLDIENSEDNKSTLSLQFVDSAADMPLAKMHGAFSTNVVASKELQQPGSARSTRHLEIELPKEASYQEGDHLGVIPRNYEGIVNRVTARFGLSASQQIRLEAEEEKLAHLPLAKTVSVEELLQYVELQDPVTRTQLRAMAAKTVCPPHKVELEALLEKQAYKEQVLAKRLTMLELLEKYPACEMKFSEFIALLPSIRPRYYSISSSPRVDEKQASITVSVVSGPAWSGYGEYKGIASNYLAELQEGDTITCFISTPQSEFTLPKDPETPLIMVGPGTGVAPFRGFVQARKQLKEQGQSLGEAHLYFGCRSPHEDYLYQEELENAQSEGIITLHTAFSRMPNQPKTYVQHVMEQDGKKLIELLDQGAHFYICGDGSQMAPAVEATLMKSYADVHQVSEADARLWLQQLEEKGRYAKDVWAG

SEQ ID NO: 191 - DNA, 3147 bp, synthetic construct
  misc_feature 1..3147: note = variant of P450 oxidase from Bacillus megaterium
  source 1..3147: mol_type = other DNA
atgacaattaaggaaatgcctcagcctaagacgtttggagaacttaaaaatttaccgttattaaacacagataaaccggttcaagctttgatgcgtattgcggatgaattaggagaaatctttaaattcgaggcgcctggtagcgtaacgcgctatttatcaagtcagcgtctaattaaagaagcatgcgatgaatcacgctttgataaaaacttaagtcaagcgcttaaatttgcacgtgattttgctggagacgggttagccacaagctggacgcatgaaccgaattggaaaaaagcgcataatatcttagttccaagctttagtcagcatgcaatggggcgttatcatgcgatgatggtcgatatcgccgtgcagcttgttcaaaagtgggagcgtctaaatgcagatgagcatattgaagtatcggaagacatgacacgtttaacgcttgatacaattggtctttgcggctttaactatcgctttaacagcttttaccgagatcagcctcatccatttattgtgagtatggtccgtgcactggatgaagtaatgaacaagctgcagcgagcaaatccagacgacccagcttatgatgaaaacaagcgccagtgtcaagaagatatcaaggtgatgaacgactatgtagataaaattattgcagatcgcaaagcaaggggtgaacaaagtcatgatttattaacgcagatgctaaacggaaaagatccagaaacgggtgagccgcttgatgacgggaacattcgttatcaaattattacattcttaattgcgggacaccaaacaacaagtggtcttttatcatttgcgctgtatttcttagtgaaaaatccacatgtattacaaaaagtagcagaagaagcagcacgagttctagtagatcctgttccaagctacaaacaagtcaaacagcttaaatatgtcggcatggtcttaaacgaagcgctgcgcttatggccagtagcgcctgctttttccctatatgcaaaagaagatacggtgcttggaggagaatatcctttaacgaaaggcgacgaagtagtggttctgactcctcagcttcaccgtgataaaacaatttggggagacgatgtggaggagttccgtccagagcgttttgaaaatccaagtgcgattccgcagcatgcgtttaaaccgtttggaaacggtcagcgtgcgtgtatcggtcagcagttcgctcttcatgaagcaacgctggtacttggtatgatgctaaaacactttgactttgaagatcatacaaactacgagctcgttattaaagaaactcggacgttaaaacctgaaggctttgtggtaaaagcaaaatcgaaaggcattccgcttggcggtattccttcacctagcactgaacagtctgctaaaaaagtacgcaaaaaggcagaaaacgctcataatacgccgctgcttgtgctatacggttcaaatgcgggaacagctgaaggaacggcgcgtgatttagcagatattgcaatgagcaaaggatttgcaccgcaggtcgcaacgcttgattcacacgccggaaatcttccgcgcgaaggagctgtattaattgtaacggcgtcttataacggtcatccgcctgataacgcaaagcaatttgtcgactggttagaccaagcgtctgctgatgaagtaaaaggcgttcgctactccgtatttggatgcggcgataaaaattgggctgcgacgtatcaaaaagtgcctgcttttatcgatgaaacgcttgccgctaaaggggcagaaaacatcgctgaccgcggtgaagcagatgcaagcgacgactttgaaggcacatatgaagaatggcgtgatcatatgtggagtgacgtagcagcctactttaacctcgacattgaaaacagtgaagataataaatctactctttcacttcaatttgtcgacagcgccgcggatatgccgcttgcgaaaatgcacggtgcgttttcaacgaacgtcgtagcaagcaaagaacttcaacagccaggcagtgcacgaagcacgcgacatcttgaaattgaacttccaaaagaagcttcttatcaagaaggagatcatttaggtgttattcctcgcaactatgaaggaatagtaaaccgtgtaacagcaaggttcggcctaagcgcatcacagcaaatccgtctggaagcagaagaagaaaaattagctcatttgccactcgctaaaacagtatccgtagaagagcttctgcaatacgtggagcttcaagatcctgttacgcgcacgcagcttcgcgcaatggctgctaaaacggtctgcccgccgcataaagtagagcttgaagccttgcttgaaaagcaagcctacaaagaacaagtgctggcaaaacgtttaacaatgcttgaactgcttgaaaaatacccggcgtgtgaaatgaaattcagcgaatttatcgcccttctgccaagcatacgcccgcgctattactcgatttcttcatcacctcgtgtcgatgaaaaacaagcaagcatcacggtcagcgttgtctcaggaccggcgtggagcggatatggagaatataaaggaattgcgtcgaactatcttgccgagctgcaagaaggagatacgattacgtgctttatttccacaccgcagtcagaatttacgctgccaaaagaccctgaaacgccgcttatcatggtcggaccgggaacaggcgtcgcgccgtttagaggctttgtgcaggcgcgcaaacagctaaaagaacaaggacagtcacttggagaagcacatttatacttcggctgccgttcacctcatgaagactatctgtatcaagaagagcttgaaaacgcccaaagcgaaggcatcattacgcttcataccgctttttctcgcatgccaaatcagccgaaaacatacgttcagcacgtaatggaacaagacggcaagaaattgattgaacttcttgatcaaggagcgcacttctatatttgcggagacggaagccaaatggcacctgccgttgaagcaacgcttatgaaaagctatgctgacgttcaccaagtgagtgaagcagacgctcgcttatggctgcagcagctagaagaaaaaggccgatacgcaaaagacgtgtgggctggg

SEQ ID NO: 192 - protein, 1049 aa, synthetic construct
  REGION 1..1049: note = variant of P450 oxidase from Bacillus megaterium
MTIKEMPQPKTFGELKNLPLLNTDKPVQALMRIADELGEIFKFEAPGSVTRYLSSQRLIKEACDESRFDKNLSQALKFARDFAGDGLATSWTHEPNWKKAHNILVPSFSQHAMGRYHAMMVDIAVQLVQKWERLNADEHIEVSEDMTRLTLDTIGLCGFNYRFNSFYRDQPHPFIVSMVRALDEVMNKLQRANPDDPAYDENKRQCQEDIKVMNDYVDKIIADRKARGEQSHDLLTQMLNGKDPETGEPLDDGNIRYQIITFLIAGHQTTSGLLSFALYFLVKNPHVLQKVAEEAARVLVDPVPSYKQVKQLKYVGMVLNEALRLWPVAPAFSLYAKEDTVLGGEYPLTKGDEVVVLTPQLHRDKTIWGDDVEEFRPERFENPSAIPQHAFKPFGNGQRACIGQQFALHEATLVLGMMLKHFDFEDHTNYELVIKETRTLKPEGFVVKAKSKGIPLGGIPSPSTEQSAKKVRKKAENAHNTPLLVLYGSNAGTAEGTARDLADIAMSKGFAPQVATLDSHAGNLPREGAVLIVTASYNGHPPDNAKQFVDWLDQASADEVKGVRYSVFGCGDKNWAATYQKVPAFIDETLAAKGAENIADRGEADASDDFEGTYEEWRDHMWSDVAAYFNLDIENSEDNKSTLSLQFVDSAADMPLAKMHGAFSTNVVASKELQQPGSARSTRHLEIELPKEASYQEGDHLGVIPRNYEGIVNRVTARFGLSASQQIRLEAEEEKLAHLPLAKTVSVEELLQYVELQDPVTRTQLRAMAAKTVCPPHKVELEALLEKQAYKEQVLAKRLTMLELLEKYPACEMKFSEFIALLPSIRPRYYSISSSPRVDEKQASITVSVVSGPAWSGYGEYKGIASNYLAELQEGDTITCFISTPQSEFTLPKDPETPLIMVGPGTGVAPFRGFVQARKQLKEQGQSLGEAHLYFGCRSPHEDYLYQEELENAQSEGIITLHTAFSRMPNQPKTYVQHVMEQDGKKLIELLDQGAHFYICGDGSQMAPAVEATLMKSYADVHQVSEADARLWLQQLEEKGRYAKDVWAG

SEQ ID NO: 193 - DNA, 3147 bp, synthetic construct
  misc_feature 1..3147: note = variant of P450 oxidase from Bacillus megaterium
  source 1..3147: mol_type = other DNA
atgacaattaaggaaatgcctcagcctaagacgtttggagaacttaaaaatttaccgttattaaacacagataaaccggttcaagctttgatgcgtattgcggatgaattaggagaaatctttaaattcgaggcgcctggtagcgtaacgcgctatttatcaagtcagcgtctaattaaagaagcatgcgatgaatcacgctttgataaaaacttaagtcaagctcttaaatttgcacgtgattttgttggagacgggttagccacaagctggacgcatgaaccgaattggaaaaaagcgcataatatcttagttccaagctttagtcagcatgcaatggggcgttatcatgcgatgatggtcgatatcgccgtgcagcttgttcaaaagtgggagcgtctaaatgcagatgagcatattgaagtatcggaagacatgacacgtttaacgcttgatacaattggtctttgcggctttaactatcgctttaacagcttttaccgagatcagcctcatccatttattgtgagtatggtccgtgcactggatgaagtaatgaacaagctgcagcgagcaaatccagacgacccagcttatgatgaaaacaagcgccagtgtcaagaagatatcaaggtgatgaacgactatgtagataaaattattgcagatcgcaaagcaaggggtgaacaaagtcatgatttattaacgcagatgctaaacggaaaagatccagaaacgggtgagccgcttgatgacgggaacattcgttatcaaattattacattcttaattgcgggacaccaaacaacaagtggtcttttatcatttgcgctgtatttcttagtgaaaaatccacatgtattacaaaaagtagcagaagaagcagcacgagttctagtagatcctgttccaagctacaaacaagtcaaacagcttaaatatgtcggcatggtcttaaacgaagcgctgcgcttatggccagtagcgcctatgttttccctatatgcaaaagaagatacggtgcttggaggagaatatcctttaacgaaaggcgacgaagtaatggttctgattcctcagcttcaccgtgataaaacaatttggggagacgatgtggaggagttccgtccagagcgttttgaaaatccaagtgcgattccgcagcatgcgtttaaaccgtttggaaacggtcagcgtgcgtgtatcggtcagcagttcgctcttcatgaagcaacgctggtacttggtatgatgctaaaacactttgactttgaagatcatacaaactacgagctcgttattaaagaaactcggacgttaaaacctgaaggctttgtggtaaaagcaaaatcgaaaggcattccgcttggcggtattccttcacctagcactgaacagtctgctaaaaaagtacgcaaaaaggcagaaaacgctcataatacgccgctgcttgtgctatacggttcaaatgcgggaacagctgaaggaacggcgcgtgatttagcagatattgcaatgagcaaaggatttgcaccgcaggtcgcaacgcttgattcacacgccggaaatcttccgcgcgaaggagctgtattaattgtaacggcgtcttataacggtcatccgcctgataacgcaaagcaatttgtcgactggttagaccaagcgtctgctgatgaagtaaaaggcgttcgctactccgtatttggatgcggcgataaaaattgggctgcgacgtatcaaaaagtgcctgcttttatcgatgaaacgcttgccgctaaaggggcagaaaacatcgctgaccgcggtgaagcagatgcaagcgacgactttgaaggcacatatgaagaatggcgtgatcatatgtggagtgacgtagcagcctactttaacctcgacattgaaaacagtgaagataataaatctactctttcacttcaatttgtcgacagcgccgcggatatgccgcttgcgaaaatgcacggtgcgttttcaacgaacgtcgtagcaagcaaagaacttcaacagccaggcagtgcacgaagcacgcgacatcttgaaattgaacttccaaaagaagcttcttatcaagaaggagatcatttaggtgttattcctcgcaactatgaaggaatagtaaaccgtgtaacagcaaggttcggcctaagcgcatcacagcaaatccgtctggaagcagaagaagaaaaattagctcatttgccactcgctaaaacagtatccgtagaagagcttctgcaatacgtggagcttcaagatcctgttacgcgcacgcagcttcgcgcaatggctgctaaaacggtctgcccgccgcataaagtagagcttgaagccttgcttgaaaagcaagcctacaaagaacaagtgctggcaaaacgtttaacaatgcttgaactgcttgaaaaatacccggcgtgtgaaatgaaattcagcgaatttatcgcccttctgccaagcatacgcccgcgctattactcgatttcttcatcacctcgtgtcgatgaaaaacaagcaagcatcacggtcagcgttgtctcaggaccggcgtggagcggatatggagaatataaaggaattgcgtcgaactatcttgccgagctgcaagaaggagatacgattacgtgctttatttccacaccgcagtcagaatttacgctgccaaaagaccctgaaacgccgcttatcatggtcggaccgggaacaggcgtcgcgccgtttagaggctttgtgcaggcgcgcaaacagctaaaagaacaaggacagtcacttggagaagcacatttatacttcggctgccgttcacctcatgaagactatctgtatcaagaagagcttgaaaacgcccaaagcgaaggcatcattacgcttcataccgctttttctcgcatgccaaatcagccgaaaacatacgttcagcacgtaatggaacaagacggcaagaaattgattgaacttcttgatcaaggagcgcacttctatatttgcggagacggaagccaaatggcacctgccgttgaagcaacgcttatgaaaagctatgctgacgttcaccaagtgagtgaagcagacgctcgcttatggctgcagcagctagaagaaaaaggccgatacgcaaaagacgtgtgggctggg

SEQ ID NO: 194 - protein, 1049 aa, synthetic construct
  REGION 1..1049: note = variant of P450 oxidase from Bacillus megaterium
MTIKEMPQPKTFGELKNLPLLNTDKPVQALMRIADELGEIFKFEAPGSVTRYLSSQRLIKEACDESRFDKNLSQALKFARDFVGDGLATSWTHEPNWKKAHNILVPSFSQHAMGRYHAMMVDIAVQLVQKWERLNADEHIEVSEDMTRLTLDTIGLCGFNYRFNSFYRDQPHPFIVSMVRALDEVMNKLQRANPDDPAYDENKRQCQEDIKVMNDYVDKIIADRKARGEQSHDLLTQMLNGKDPETGEPLDDGNIRYQIITFLIAGHQTTSGLLSFALYFLVKNPHVLQKVAEEAARVLVDPVPSYKQVKQLKYVGMVLNEALRLWPVAPMFSLYAKEDTVLGGEYPLTKGDEVMVLIPQLHRDKTIWGDDVEEFRPERFENPSAIPQHAFKPFGNGQRACIGQQFALHEATLVLGMMLKHFDFEDHTNYELVIKETRTLKPEGFVVKAKSKGIPLGGIPSPSTEQSAKKVRKKAENAHNTPLLVLYGSNAGTAEGTARDLADIAMSKGFAPQVATLDSHAGNLPREGAVLIVTASYNGHPPDNAKQFVDWLDQASADEVKGVRYSVFGCGDKNWAATYQKVPAFIDETLAAKGAENIADRGEADASDDFEGTYEEWRDHMWSDVAAYFNLDIENSEDNKSTLSLQFVDSAADMPLAKMHGAFSTNVVASKELQQPGSARSTRHLEIELPKEASYQEGDHLGVIPRNYEGIVNRVTARFGLSASQQIRLEAEEEKLAHLPLAKTVSVEELLQYVELQDPVTRTQLRAMAAKTVCPPHKVELEALLEKQAYKEQVLAKRLTMLELLEKYPACEMKFSEFIALLPSIRPRYYSISSSPRVDEKQASITVSVVSGPAWSGYGEYKGIASNYLAELQEGDTITCFISTPQSEFTLPKDPETPLIMVGPGTGVAPFRGFVQARKQLKEQGQSLGEAHLYFGCRSPHEDYLYQEELENAQSEGIITLHTAFSRMPNQPKTYVQHVMEQDGKKLIELLDQGAHFYICGDGSQMAPAVEATLMKSYADVHQVSEADARLWLQQLEEKGRYAKDVWAG

SEQ ID NO: 195 - DNA, 3147 bp, synthetic construct
  misc_feature 1..3147: note = variant of P450 oxidase from Bacillus megaterium
  source 1..3147: mol_type = other DNA
atgacaattaaggaaatgcctcagcctaagacgtttggagaacttaaaaatttaccgttattaaacacagataaaccggttcaagctttgatgcgtattgcggatgaattaggagaaatctttaaattcgaggcgcctggtagcgtaacgcgctatttatcaagtcagcgtctaattaaagaagcatgcgatgaatcacgctttgataaaaacttaagtcaaactcttaaatttgcacgtgattttgttggagacgggttagccacaagctggacgcatgaaccgaattggaaaaaagcgcataatatcttagttccaagctttagtcagcatgcaatggggcgttatcatgcgatgatggtcgatatcgccgtgcagcttgttcaaaagtgggagcgtctaaatgcagatgagcatattgaagtatcggaagacatgacacgtttaacgcttgatacaattggtctttgcggctttaactatcgctttaacagcttttaccgagatcagcctcatccatttattgtgagtatgcgccgtgcactggatgaagtaatgaacaagctgcagcgagcaaatccagacgacccagcttatgatgaaaacaagcgccagtgtcaagaagatatcaaggtgatgaacgactatgtagataaaattattgcagatcgcaaagcaaggggtgaacaaagtcatgatttattaacgcagatgctaaacggaaaagatccagaaacgggtgagccgcttgatgacgggaacattcgttatcaaattattacattcttaattgcgggacaccaaacaacaagtggtcttttatcatttgcgctgtatttcttagtgaaaaatccacatgtattacaaaaagtagcagaagaagcagcacgagttctagtagatcctgttccaagctacaaacaagtcaaacagcttaaatatgtcggcatggtcttaaacgaagcgctgcgcttatggccagtagcgcctatgttttccctatatgcaaaagaagatacggtgcttggaggagaatatcctttaacgaaaggcgacgaagtaatggttctgattcctcagcttcaccgtgataaaacaatttggggagacgatgtggaggagttccgtccagagcgttttgaaaatccaagtgcgattccgcagcatgcgtttaaaccgtttggaaacggtcagcgtgcgtgtatcggtcagcagttcgctcttcatgaagcaacgctggtacttggtatgatgctaaaacactttgactttgaagatcatacaaactacgagctcgttattaaagaaggtcggacgttaaaacctgaaggctttgtggtaaaagcaaaatcgaaaggcattccgcttggcggtattccttcacctagcactgaacagtctgctaaaaaagtacgcaaaaaggcagaaaacgctcataatacgccgctgcttgtgctatacggttcaaatgcgggaacagctgaaggaacggcgcgtgatttagcagatattgcaatgagcaaaggatttgcaccgcaggtcgcaacgcttgattcacacgccggaaatcttccgcgcgaaggagctgtattaattgtaacggcgtcttataacggtcatccgcctgataacgcaaagcaatttgtcgactggttagaccaagcgtctgctgatgaagtaaaaggcgttcgctactccgtatttggatgcggcgataaaaattgggctgcgacgtatcaaaaagtgcctgcttttatcgatgaaacgcttgccgctaaaggggcagaaaacatcgctgaccgcggtgaagcagatgcaagcgacgactttgaaggcacatatgaagaatggcgtgatcatatgtggagtgacgtagcagcctactttaacctcgacattgaaaacagtgaagataataaatctactctttcacttcaatttgtcgacagcgccgcggatatgccgcttgcgaaaatgcacggtgcgttttcaacgaacgtcgtagcaagcaaagaacttcaacagccaggcagtgcacgaagcacgcgacatcttgaaattgaacttccaaaagaagcttcttatcaagaaggagatcatttaggtgttattcctcgcaactatgaaggaatagtaaaccgtgtaacagcaaggttcggcctaagcgcatcacagcaaatccgtctggaagcagaagaagaaaaattagctcatttgccactcgctaaaacagtatccgtagaagagcttctgcaatacgtggagcttcaagatcctgttacgcgcacgcagcttcgcgcaatggctgctaaaacggtctgcccgccgcataaagtagagcttgaagccttgcttgaaaagcaagcctacaaagaacaagtgctggcaaaacgtttaacaatgcttgaactgcttgaaaaatacccggcgtgtgaaatgaaattcagcgaatttatcgcccttctgccaagcatacgcccgcgctattactcgatttcttcatcacctcgtgtcgatgaaaaacaagcaagcatcacggtcagcgttgtctcaggaccggcgtggagcggatatggagaatataaaggaattgcgtcgaactatcttgccgagctgcaagaaggagatacgattacgtgctttatttccacaccgcagtcagaatttacgctgccaaaagaccctgaaacgccgcttatcatggtcggaccgggaacaggcgtcgcgccgtttagaggctttgtgcaggcgcgcaaacagctaaaagaacaaggacagtcacttggagaagcacatttatacttcggctgccgttcacctcatgaagactatctgtatcaagaagagcttgaaaacgcccaaagcgaaggcatcattacgcttcataccgctttttctcgcatgccaaatcagccgaaaacatacgttcagcacgtaatggaacaagacggcaagaaattgattgaacttcttgatcaaggagcgcacttctatatttgcggagacggaagccaaatggcacctgccgttgaagcaacgcttatgaaaagctatgctgacgttcaccaagtgagtgaagcagacgctcgcttatggctgcagcagctagaagaaaaaggccgatacgcaaaagacgtgtgggctggg

SEQ ID NO: 196 - protein, 1049 aa, synthetic construct
  REGION 1..1049: note = variant of P450 oxidase from Bacillus megaterium
MTIKEMPQPKTFGELKNLPLLNTDKPVQALMRIADELGEIFKFEAPGSVTRYLSSQRLIKEACDESRFDKNLSQTLKFARDFVGDGLATSWTHEPNWKKAHNILVPSFSQHAMGRYHAMMVDIAVQLVQKWERLNADEHIEVSEDMTRLTLDTIGLCGFNYRFNSFYRDQPHPFIVSMRRALDEVMNKLQRANPDDPAYDENKRQCQEDIKVMNDYVDKIIADRKARGEQSHDLLTQMLNGKDPETGEPLDDGNIRYQIITFLIAGHQTTSGLLSFALYFLVKNPHVLQKVAEEAARVLVDPVPSYKQVKQLKYVGMVLNEALRLWPVAPMFSLYAKEDTVLGGEYPLTKGDEVMVLIPQLHRDKTIWGDDVEEFRPERFENPSAIPQHAFKPFGNGQRACIGQQFALHEATLVLGMMLKHFDFEDHTNYELVIKEGRTLKPEGFVVKAKSKGIPLGGIPSPSTEQSAKKVRKKAENAHNTPLLVLYGSNAGTAEGTARDLADIAMSKGFAPQVATLDSHAGNLPREGAVLIVTASYNGHPPDNAKQFVDWLDQASADEVKGVRYSVFGCGDKNWAATYQKVPAFIDETLAAKGAENIADRGEADASDDFEGTYEEWRDHMWSDVAAYFNLDIENSEDNKSTLSLQFVDSAADMPLAKMHGAFSTNVVASKELQQPGSARSTRHLEIELPKEASYQEGDHLGVIPRNYEGIVNRVTARFGLSASQQIRLEAEEEKLAHLPLAKTVSVEELLQYVELQDPVTRTQLRAMAAKTVCPPHKVELEALLEKQAYKEQVLAKRLTMLELLEKYPACEMKFSEFIALLPSIRPRYYSISSSPRVDEKQASITVSVVSGPAWSGYGEYKGIASNYLAELQEGDTITCFISTPQSEFTLPKDPETPLIMVGPGTGVAPFRGFVQARKQLKEQGQSLGEAHLYFGCRSPHEDYLYQEELENAQSEGIITLHTAFSRMPNQPKTYVQHVMEQDGKKLIELLDQGAHFYICGDGSQMAPAVEATLMKSYADVHQVSEADARLWLQQLEEKGRYAKDVWAG

SEQ ID NO: 197 - DNA, 3147 bp, synthetic construct
  misc_feature 1..3147: note = variant of P450 oxidase from Bacillus megaterium
  source 1..3147: mol_type = other DNA
atgacaattaaggaaatgcctcagcctaagacgtttggagaacttaaaaatttaccgttattaaacacagataaaccggttcaagctttgatgcgtattgcggatgaattaggagaaatctttaaattcgaggcgcctggtagcgtaacgcgctatttatcaagtcagcgtctaattaaagaagcatgcgatgaatcacgctttgataaaaacttaagtcaagcgcttaaatttgcacgtgattttgttggagacgggttagccacaagctggacgcatgaaccgaattggaaaaaagcgcataatatcttagttccaagctttagtcagcatgcaatggggcgttatcatgcgatgatggtcgatatcgccgtgcagcttgttcaaaagtgggagcgtctaaatgcagatgagcatattgaagtatcggaagacatgacacgtttaacgcttgatacaattggtctttgcggctttaactatcgctttaacagcttttaccgagatcagcctcatccatttattgtgagtatggtccgtgcactggatgaagtaatgaacaagctgcagcgagcaaatccagacgacccagcttatgatgaaaacaagcgccagtgtcaagaagatatcaaggtgatgaacgactatgtagataaaattattgcagatcgcaaagcaaggggtgaacaaagtcatgatttattaacgcagatgctaaacggaaaagatccagaaacgggtgagccgcttgatgacgggaacattcgttatcaaattattacattcttaattgcgggacaccaaacaacaagtggtcttttatcatttgcgctgtatttcttagtgaaaaatccacatgtattacaaaaagtagcagaagaagcagcacgagttctagtagatcctgttccaagctacaaacaagtcaaacagcttaaatatgtcggcatggtcttaaacgaagcgctgcgcttatggccagtagcgcctatgttttccctatatgcaaaagaagatacggtgcttggaggagaatatcctttaacgaaaggcgacgaagtaatggttctggtgcctcagcttcaccgtgataaaacaatttggggagacgatgtggaggagttccgtccagagcgttttgaaaatccaagtgcgattccgcagcatgcgtttaaaccgtttggaaacggtcagcgtgcgtgtatcggtcagcagttcgctcttcatgaagcaacgctggtacttggtatgatgctaaaacactttgactttgaagatcatacaaactacgagctcgttattaaagaaactcggacgttaaaacctgaaggctttgtggtaaaagcaaaatcgaaaggcattccgcttggcggtattccttcacctagcactgaacagtctgctaaaaaagtacgcaaaaaggcagaaaacgctcataatacgccgctgcttgtgctatacggttcaaatgcgggaacagctgaaggaacggcgcgtgatttagcagatattgcaatgagcaaaggatttgcaccgcaggtcgcaacgcttgattcacacgccggaaatcttccgcgcgaaggagctgtattaattgtaacggcgtcttataacggtcatccgcctgataacgcaaagcaatttgtcgactggttagaccaagcgtctgctgatgaagtaaaaggcgttcgctactccgtatttggatgcggcgataaaaattgggctgcgacgtatcaaaaagtgcctgcttttatcgatgaaacgcttgccgctaaaggggcagaaaacatcgctgaccgcggtgaagcagatgcaagcgacgactttgaaggcacatatgaagaatggcgtgatcatatgtggagtgacgtagcagcctactttaacctcgacattgaaaacagtgaagataataaatctactctttcacttcaatttgtcgacagcgccgcggatatgccgcttgcgaaaatgcacggtgcgttttcaacgaacgtcgtagcaagcaaagaacttcaacagccaggcagtgcacgaagcacgcgacatcttgaaattgaacttccaaaagaagcttcttatcaagaaggagatcatttaggtgttattcctcgcaactatgaaggaatagtaaaccgtgtaacagcaaggttcggcctaagcgcatcacagcaaatccgtctggaagcagaagaagaaaaattagctcatttgccactcgctaaaacagtatccgtagaagagcttctgcaatacgtggagcttcaagatcctgttacgcgcacgcagcttcgcgcaatggctgctaaaacggtctgcccgccgcataaagtagagcttgaagccttgcttgaaaagcaagcctacaaagaacaagtgctggcaaaacgtttaacaatgcttgaactgcttgaaaaatacccggcgtgtgaaatgaaattcagcgaatttatcgcccttctgccaagcatacgcccgcgctattactcgatttcttcatcacctcgtgtcgatgaaaaacaagcaagcatcacggtcagcgttgtctcaggaccggcgtggagcggatatggagaatataaaggaattgcgtcgaactatcttgccgagctgcaagaaggagatacgattacgtgctttatttccacaccgcagtcagaatttacgctgccaaaagaccctgaaacgccgcttatcatggtcggaccgggaacaggcgtcgcgccgtttagaggctttgtgcaggcgcgcaaacagctaaaagaacaaggacagtcacttggagaagcacatttatacttcggctgccgttcacctcatgaagactatctgtatcaagaagagcttgaaaacgcccaaagcgaaggcatcattacgcttcataccgctttttctcgcatgccaaatcagccgaaaacatacgttcagcacgtaatggaacaagacggcaagaaattgattgaacttcttgatcaaggagcgcacttctatatttgcggagacggaagccaaatggcacctgccgttgaagcaacgcttatgaaaagctatgctgacgttcaccaagtgagtgaagcagacgctcgcttatggctgcagcagctagaagaaaaaggccgatacgcaaaagacgtgtgggctggg

SEQ ID NO: 198 - protein, 1049 aa, synthetic construct
  REGION 1..1049: note = variant of P450 oxidase from Bacillus megaterium
MTIKEMPQPKTFGELKNLPLLNTDKPVQALMRIADELGEIFKFEAPGSVTRYLSSQRLIKEACDESRFDKNLSQALKFARDFVGDGLATSWTHEPNWKKAHNILVPSFSQHAMGRYHAMMVDIAVQLVQKWERLNADEHIEVSEDMTRLTLDTIGLCGFNYRFNSFYRDQPHPFIVSMVRALDEVMNKLQRANPDDPAYDENKRQCQEDIKVMNDYVDKIIADRKARGEQSHDLLTQMLNGKDPETGEPLDDGNIRYQIITFLIAGHQTTSGLLSFALYFLVKNPHVLQKVAEEAARVLVDPVPSYKQVKQLKYVGMVLNEALRLWPVAPMFSLYAKEDTVLGGEYPLTKGDEVMVLVPQLHRDKTIWGDDVEEFRPERFENPSAIPQHAFKPFGNGQRACIGQQFALHEATLVLGMMLKHFDFEDHTNYELVIKETRTLKPEGFVVKAKSKGIPLGGIPSPSTEQSAKKVRKKAENAHNTPLLVLYGSNAGTAEGTARDLADIAMSKGFAPQVATLDSHAGNLPREGAVLIVTASYNGHPPDNAKQFVDWLDQASADEVKGVRYSVFGCGDKNWAATYQKVPAFIDETLAAKGAENIADRGEADASDDFEGTYEEWRDHMWSDVAAYFNLDIENSEDNKSTLSLQFVDSAADMPLAKMHGAFSTNVVASKELQQPGSARSTRHLEIELPKEASYQEGDHLGVIPRNYEGIVNRVTARFGLSASQQIRLEAEEEKLAHLPLAKTVSVEELLQYVELQDPVTRTQLRAMAAKTVCPPHKVELEALLEKQAYKEQVLAKRLTMLELLEKYPACEMKFSEFIALLPSIRPRYYSISSSPRVDEKQASITVSVVSGPAWSGYGEYKGIASNYLAELQEGDTITCFISTPQSEFTLPKDPETPLIMVGPGTGVAPFRGFVQARKQLKEQGQSLGEAHLYFGCRSPHEDYLYQEELENAQSEGIITLHTAFSRMPNQPKTYVQHVMEQDGKKLIELLDQGAHFYICGDGSQMAPAVEATLMKSYADVHQVSEADARLWLQQLEEKGRYAKDVWAG

SEQ ID NO: 199 - DNA, 3147 bp, synthetic construct
  misc_feature 1..3147: note = variant of P450 oxidase from Bacillus megaterium
  source 1..3147: mol_type = other DNA
atgacaattaaggaaatgcctcagcctaagacgtttggagaacttaaaaatttaccgttattaaacacagataaaccggttcaagctttgatgcgtattgcggatgaattaggagaaatctttaaattcgaggcgcctggtagcgtaacgcgctatttatcaagtcagcgtctaattaaagaagcatgcgatgaatcacgctttgataaaaacttaagtcaagctcttaaatttgcacgtgattttgttggagacgggttagccacaagctggacgcatgaaccgaattggaaaaaagcgcataatatcttagttccaagctttagtcagcatgcaatggggcgttatcatgcgatgatggtcgatatcgccgtgcagcttgttcaaaagtgggagcgtctaaatgcagatgagcatattgaagtatcggaagacatgacacgtttaacgcttgatacaattggtctttgcggctttaactatcgctttaacagcttttaccgagatcagcctcatccatttattgtgagtatggtccgtgcactggatgaagtaatgaacaaggggcagcgagcaaatccagacgacccagcttatgatgaaaacaagcgccagtgtcaagaagatatcaaggtgatgaacgactatgtagataaaattattgcagatcgcaaagcaaggggtgaacaaagtcatgatttattaacgcagatgctaaacggaaaagatccagaaacgggtgagccgcttgatgacgggaacattcgttatcaaattattacattcttaattgcgggacaccaaacaacaagtggtcttttatcatttgcgctgtatttcttagtgaaaaatccacatgtattacaaaaagtagcagaagaagcagcacgagttctagtagatcctgttccaagctacaaacaagtcaaacagcttaaatatgtcggcatggtcttaaacgaagcgctgcgcttatggccagtagcgcctatgttttccctatatgcaaaagaagatacggtgcttggaggagaatatcctttaacgaaaggcgacgaagtaatggttctgattcctcagcttcaccgtgataaaacaatttggggagacgatgtggaggagttccgtccagagcgttttgaaaatccaagtgcgattccgcagcatgcgtttaaaccgtttggaaacggtcagcgtgcgtgtatcggtcagcagttcgctcttcatgaagcaacgctggtacttggtatgatgctaaaacactttgactttgaagatcatacaaactacgagctcgttattaaagaaactcggacgttaaaacctgaaggctttgtggtaaaagcaaaatcgaaaggcattccgcttggcggtattccttcacctagcactgaacagtctgctaaaaaagtacgcaaaaaggcagaaaacgctcataatacgccgctgcttgtgctatacggttcaaatgcgggaacagctgaaggaacggcgcgtgatttagcagatattgcaatgagcaaaggatttgcaccgcaggtcgcaacgcttgattcacacgccggaaatcttccgcgcgaaggagctgtattaattgtaacggcgtcttataacggtcatccgcctgataacgcaaagcaatttgtcgactggttagaccaagcgtctgctgatgaagtaaaaggcgttcgctactccgtatttggatgcggcgataaaaattgggctgcgacgtatcaaaaagtgcctgcttttatcgatgaaacgcttgccgctaaaggggcagaaaacatcgctgaccgcggtgaagcagatgcaagcgacgactttgaaggcacatatgaagaatggcgtgatcatatgtggagtgacgtagcagcctactttaacctcgacattgaaaacagtgaagataataaatctactctttcacttcaatttgtcgacagcgccgcggatatgccgcttgcgaaaatgcacggtgcgttttcaacgaacgtcgtagcaagcaaagaacttcaacagccaggcagtgcacgaagcacgcgacatcttgaaattgaacttccaaaagaagcttcttatcaagaaggagatcatttaggtgttattcctcgcaactatgaaggaatagtaaaccgtgtaacagcaaggttcggcctaagcgcatcacagcaaatccgtctggaagcagaagaagaaaaattagctcatttgccactcgctaaaacagtatccgtagaagagcttctgcaatacgtggagcttcaagatcctgttacgcgcacgcagcttcgcgcaatggctgctaaaacggtctgcccgccgcataaagtagagcttgaagccttgcttgaaaagcaagcctacaaagaacaagtgctggcaaaacgtttaacaatgcttgaactgcttgaaaaatacccggcgtgtgaaatgaaattcagcgaatttatcgcccttctgccaagcatacgcccgcgctattactcgatttcttcatcacctcgtgtcgatgaaaaacaagcaagcatcacggtcagcgttgtctcaggaccggcgtggagcggatatggagaatataaaggaattgcgtcgaactatcttgccgagctgcaagaaggagatacgattacgtgctttatttccacaccgcagtcagaatttacgctgccaaaagaccctgaaacgccgcttatcatggtcggaccgggaacaggcgtcgcgccgtttagaggctttgtgcaggcgcgcaaacagctaaaagaacaaggacagtcacttggagaagcacatttatacttcggctgccgttcacctcatgaagactatctgtatcaagaagagcttgaaaacgcccaaagcgaaggcatcattacgcttcataccgctttttctcgcatgccaaatcagccgaaaacatacgttcagcacgtaatggaacaagacggcaagaaattgattgaacttcttgatcaaggagcgcacttctatatttgcggagacggaagccaaatggcacctgccgttgaagcaacgcttatgaaaagctatgctgacgttcaccaagtgagtgaagcagacgctcgcttatggctgcagcagctagaagaaaaaggccgatacgcaaaagacgtgtgggctggg

SEQ ID NO: 200 - protein, 1049 aa, synthetic construct
  REGION 1..1049: note = variant of P450 oxidase from Bacillus megaterium
MTIKEMPQPKTFGELKNLPLLNTDKPVQALMRIADELGEIFKFEAPGSVTRYLSSQRLIKEACDESRFDKNLSQALKFARDFVGDGLATSWTHEPNWKKAHNILVPSFSQHAMGRYHAMMVDIAVQLVQKWERLNADEHIEVSEDMTRLTLDTIGLCGFNYRFNSFYRDQPHPFIVSMVRALDEVMNKGQRANPDDPAYDENKRQCQEDIKVMNDYVDKIIADRKARGEQSHDLLTQMLNGKDPETGEPLDDGNIRYQIITFLIAGHQTTSGLLSFALYFLVKNPHVLQKVAEEAARVLVDPVPSYKQVKQLKYVGMVLNEALRLWPVAPMFSLYAKEDTVLGGEYPLTKGDEVMVLIPQLHRDKTIWGDDVEEFRPERFENPSAIPQHAFKPFGNGQRACIGQQFALHEATLVLGMMLKHFDFEDHTNYELVIKETRTLKPEGFVVKAKSKGIPLGGIPSPSTEQSAKKVRKKAENAHNTPLLVLYGSNAGTAEGTARDLADIAMSKGFAPQVATLDSHAGNLPREGAVLIVTASYNGHPPDNAKQFVDWLDQASADEVKGVRYSVFGCGDKNWAATYQKVPAFIDETLAAKGAENIADRGEADASDDFEGTYEEWRDHMWSDVAAYFNLDIENSEDNKSTLSLQFVDSAADMPLAKMHGAFSTNVVASKELQQPGSARSTRHLEIELPKEASYQEGDHLGVIPRNYEGIVNRVTARFGLSASQQIRLEAEEEKLAHLPLAKTVSVEELLQYVELQDPVTRTQLRAMAAKTVCPPHKVELEALLEKQAYKEQVLAKRLTMLELLEKYPACEMKFSEFIALLPSIRPRYYSISSSPRVDEKQASITVSVVSGPAWSGYGEYKGIASNYLAELQEGDTITCFISTPQSEFTLPKDPETPLIMVGPGTGVAPFRGFVQARKQLKEQGQSLGEAHLYFGCRSPHEDYLYQEELENAQSEGIITLHTAFSRMPNQPKTYVQHVMEQDGKKLIELLDQGAHFYICGDGSQMAPAVEATLMKSYADVHQVSEADARLWLQQLEEKGRYAKDVWAG

SEQ ID NO: 201 - DNA, 3147 bp, synthetic construct
  misc_feature 1..3147: note = variant of P450 oxidase from Bacillus megaterium
  source 1..3147: mol_type = other DNA
atgacaattaaggaaatgcctcagcctaagacgtttggagaacttaaaaatttaccgttattaaacacagataaaccggttcaagctttgatgcgtattgcggatgaattaggagaaatctttaaattcgaggcgcctggtagcgtaacgcgctatttatcaagtcagcgtctaattaaagaagcatgcgatgaatcacgctttgataaaaacttaagtcaagctcttaaatttgcacgtgattttgctggagacgggttagccacaagctggacgcatgaaccgaattggaaaaaagcgcataatatcttagttccaagctttagtcagcatgcaatggggcgttatcatgcgatgatggtcgatatcgccgtgcagcttgttcaaaagtgggagcgtctaaatgcagatgagcatattgaagtatcggaagacatgacacgtttaacgcttgatacaattggtctttgcggctttaactatcgctttaacagcttttaccgagatcagcctcatccatttattgtgagtatgcgccgtgcactggatgaagtaatgaacaagctgcagcgagcaaatccagacgacccagcttatgatgaaaacaagcgccagtgtcaagaagatatcaaggtgatgaacgactatgtagataaaattattgcagatcgcaaagcaaggggtgaacaaagtcatgatttattaacgcagatgctaaacggaaaagatccagaaacgggtgagccgcttgatgacgggaacattcgttatcaaattattacattcttaattgcgggacacgaaacaacaagtggtcttttatcatttgcgctgtatttcttagtgaaaaatccacatgtattacaaaaagtagcagaagaagcagcacgagttctagtagatcctgttccaagctacaaacaagtcaaacagcttaaatatgtcggcatggtcttaaacgaagcgctgcgcttatggccaacggcgcctatgttttccctatatgcaaaagaagatacggtgcttggaggagaatatcctttaacgaaaggcgacgaagtaatggttctggtgcctcagcttcaccgtgataaaacaatttggggagacgatgtggaggagttccgtccagagcgttttgaaaatccaagtgcgattccgcagcatgcgtttaaaccgtttggaaacggtcagcgtgcgtgtatcggtcagcagttcgctcttcatgaagcaacgctggtacttggtatgatgctaaaacactttgactttgaagatcatacaaactacgagctcgttattaaagaaactcggacgttaaaacctgaaggctttgtggtaaaagcaaaatcgaaaggcattccgcttggcggtattccttcacctagcactgaacagtctgctaaaaaagtacgcaaaaaggcagaaaacgctcataatacgccgctgcttgtgctatacggttcaaatgcgggaacagctgaaggaacggcgcgtgatttagcagatattgcaatgagcaaaggatttgcaccgcaggtcgcaacgcttgattcacacgccggaaatcttccgcgcgaaggagctgtattaattgtaacggcgtcttataacggtcatccgcctgataacgcaaagcaatttgtcgactggttagaccaagcgtctgctgatgaagtaaaaggcgttcgctactccgtatttggatgcggcgataaaaattgggctgcgacgtatcaaaaagtgcctgcttttatcgatgaaacgcttgccgctaaaggggcagaaaacatcgctgaccgcggtgaagcagatgcaagcgacgactttgaaggcacatatgaagaatggcgtgatcatatgtggagtgacgtagcagcctactttaacctcgacattgaaaacagtgaagataataaatctactctttcacttcaatttgtcgacagcgccgcggatatgccgcttgcgaaaatgcacggtgcgttttcaacgaacgtcgtagcaagcaaagaacttcaacagccaggcagtgcacgaagcacgcgacatcttgaaattgaacttccaaaagaagcttcttatcaagaaggagatcatttaggtgttattcctcgcaactatgaaggaatagtaaaccgtgtaacagcaaggttcggcctaagcgcatcacagcaaatccgtctggaagcagaagaagaaaaattagctcatttgccactcgctaaaacagtatccgtagaagagcttctgcaatacgtggagcttcaagatcctgttacgcgcacgcagcttcgcgcaatggctgctaaaacggtctgcccgccgcataaagtagagcttgaagccttgcttgaaaagcaagcctacaaagaacaagtgctggcaaaacgtttaacaatgcttgaactgcttgaaaaatacccggcgtgtgaaatgaaattcagcgaatttatcgcccttctgccaagcatacgcccgcgctattactcgatttcttcatcacctcgtgtcgatgaaaaacaagcaagcatcacggtcagcgttgtctcaggaccggcgtggagcggatatggagaatataaaggaattgcgtcgaactatcttgccgagctgcaagaaggagatacgattacgtgctttatttccacaccgcagtcagaatttacgctgccaaaagaccctgaaacgccgcttatcatggtcggaccgggaacaggcgtcgcgccgtttagaggctttgtgcaggcgcgcaaacagctaaaagaacaaggacagtcacttggagaagcacatttatacttcggctgccgttcacctcatgaagactatctgtatcaagaagagcttgaaaacgcccaaagcgaaggcatcattacgcttcataccgctttttctcgcatgccaaatcagccgaaaacatacgttcagcacgtaatggaacaagacggcaagaaattgattgaacttcttgatcaaggagcgcacttctatatttgcggagacggaagccaaatggcacctgccgttgaagcaacgcttatgaaaagctatgctgacgttcaccaagtgagtgaagcagacgctcgcttatggctgcagcagctagaagaaaaaggccgatacgcaaaagacgtgtgggctggg

SEQ ID NO: 202 - protein, 1049 aa, synthetic construct
  REGION 1..1049: note = variant of P450 oxidase from Bacillus megaterium
MTIKEMPQPKTFGELKNLPLLNTDKPVQALMRIADELGEIFKFEAPGSVTRYLSSQRLIKEACDESRFDKNLSQALKFARDFAGDGLATSWTHEPNWKKAHNILVPSFSQHAMGRYHAMMVDIAVQLVQKWERLNADEHIEVSEDMTRLTLDTIGLCGFNYRFNSFYRDQPHPFIVSMRRALDEVMNKLQRANPDDPAYDENKRQCQEDIKVMNDYVDKIIADRKARGEQSHDLLTQMLNGKDPETGEPLDDGNIRYQIITFLIAGHETTSGLLSFALYFLVKNPHVLQKVAEEAARVLVDPVPSYKQVKQLKYVGMVLNEALRLWPTAPMFSLYAKEDTVLGGEYPLTKGDEVMVLVPQLHRDKTIWGDDVEEFRPERFENPSAIPQHAFKPFGNGQRACIGQQFALHEATLVLGMMLKHFDFEDHTNYELVIKETRTLKPEGFVVKAKSKGIPLGGIPSPSTEQSAKKVRKKAENAHNTPLLVLYGSNAGTAEGTARDLADIAMSKGFAPQVATLDSHAGNLPREGAVLIVTASYNGHPPDNAKQFVDWLDQASADEVKGVRYSVFGCGDKNWAATYQKVPAFIDETLAAKGAENIADRGEADASDDFEGTYEEWRDHMWSDVAAYFNLDIENSEDNKSTLSLQFVDSAADMPLAKMHGAFSTNVVASKELQQPGSARSTRHLEIELPKEASYQEGDHLGVIPRNYEGIVNRVTARFGLSASQQIRLEAEEEKLAHLPLAKTVSVEELLQYVELQDPVTRTQLRAMAAKTVCPPHKVELEALLEKQAYKEQVLAKRLTMLELLEKYPACEMKFSEFIALLPSIRPRYYSISSSPRVDEKQASITVSVVSGPAWSGYGEYKGIASNYLAELQEGDTITCFISTPQSEFTLPKDPETPLIMVGPGTGVAPFRGFVQARKQLKEQGQSLGEAHLYFGCRSPHEDYLYQEELENAQSEGIITLHTAFSRMPNQPKTYVQHVMEQDGKKLIELLDQGAHFYICGDGSQMAPAVEATLMKSYADVHQVSEADARLWLQQLEEKGRYAKDVWAG

SEQ ID NO: 203 - DNA, 3147 bp, synthetic construct
  misc_feature 1..3147: note = variant of P450 oxidase from Bacillus megaterium
  source 1..3147: mol_type = other DNA
atgacaattaaggaaatgcctcagcctaagacgtttggagaacttaaaaatttaccgttattaaacacagataaaccggttcaagctttgatgcgtattgcggatgaattaggagaaatctttaaattcgaggcgcctggtagcgtaacgcgctatttatcaagtcagcgtctaattaaagaagcatgcgatgaatcacgctttgataaaaacttaagtcaagcgcttaaatttgcacgtgattttgctggagacgggttagccacaagctggacgcatgaaccgaattggaaaaaagcgcataatatcttagttccaagctttagtcagcatgcaatggggcgttatcatgcgatgatggtcgatatcgccgtgcagcttgttcaaaagtgggagcgtctaaatgcagatgagcatattgaagtatcggaagacatgacacgtttaacgcttgatacaattggtctttgcggctttaactatcgctttaacagcttttaccgagatcagcctcatccatttattgtgagtatggtccgtgcactggatgaagtaatgaacaagctgcagcgagcaaatccagacgacccagcttatgatgaaaacaagcgccagtgtcaagaagatatcaaggtgatgaacgactatgtagataaaattattgcagatcgcaaagcaaggggtgaacaaagtcatgatttattaacgcagatgctaaacggaaaagatccagaaacgggtgagccgcttgatgacgggaacattcgttatcaaattattacattcttaattgcgggacaccaaacaacaagtggtcttttatcatttgcgctgtatttcttagtgaaaaatccacatgtattacaaaaagtagcagaagaagcagcacgagttctagtagatcctgttccaagctacaaacaagtcaaacagcttaaatatgtcggcatggtcttaaacgaagcgctgcgcttatggccaacggcgcctatgttttccctatatgcaaaagaagatacggtgcttggaggagaatatcctttaacgaaaggcgacgaagtagtggttctggtgcctcagcttcaccgtgataaaacaatttggggagacgatgtggaggagttccgtccagagcgttttgaaaatccaagtgcgattccgcagcatgcgtttaaaccgtttggaaacggtcagcgtgcgtgtatcggtcagcagttcgctcttcatgaagcaacgctggtacttggtatgatgctaaaacactttgactttgaagatcatacaaactacgagctcgttattaaagaaactcggacgttaaaacctgaaggctttgtggtaaaagcaaaatcgaaaggcattccgcttggcggtattccttcacctagcactgaacagtctgctaaaaaagtacgcaaaaaggcagaaaacgctcataatacgccgctgcttgtgctatacggttcaaatgcgggaacagctgaaggaacggcgcgtgatttagcagatattgcaatgagcaaaggatttgcaccgcaggtcgcaacgcttgattcacacgccggaaatcttccgcgcgaaggagctgtattaattgtaacggcgtcttataacggtcatccgcctgataacgcaaagcaatttgtcgactggttagaccaagcgtctgctgatgaagtaaaaggcgttcgctactccgtatttggatgcggcgataaaaattgggctgcgacgtatcaaaaagtgcctgcttttatcgatgaaacgcttgccgctaaaggggcagaaaacatcgctgaccgcggtgaagcagatgcaagcgacgactttgaaggcacatatgaagaatggcgtgatcatatgtggagtgacgtagcagcctactttaacctcgacattgaaaacagtgaagataataaatctactctttcacttcaatttgtcgacagcgccgcggatatgccgcttgcgaaaatgcacggtgcgttttcaacgaacgtcgtagcaagcaaagaacttcaacagccaggcagtgcacgaagcacgcgacatcttgaaattgaacttccaaaagaagcttcttatcaagaaggagatcatttaggtgttattcctcgcaactatgaaggaatagtaaaccgtgtaacagcaaggttcggcctaagcgcatcacagcaaatccgtctggaagcagaagaagaaaaattagctcatttgccactcgctaaaacagtatccgtagaagagcttctgcaatacgtggagcttcaagatcctgttacgcgcacgcagcttcgcgcaatggctgctaaaacggtctgcccgccgcataaagtagagcttgaagccttgcttgaaaagcaagcctacaaagaacaagtgctggcaaaacgtttaacaatgcttgaactgcttgaaaaatacccggcgtgtgaaatgaaattcagcgaatttatcgcccttctgccaagcatacgcccgcgctattactcgatttcttcatcacctcgtgtcgatgaaaaacaagcaagcatcacggtcagcgttgtctcaggaccggcgtggagcggatatggagaatataaaggaattgcgtcgaactatcttgccgagctgcaagaaggagatacgattacgtgctttatttccacaccgcagtcagaatttacgctgccaaaagaccctgaaacgccgcttatcatggtcggaccgggaacaggcgtcgcgccgtttagaggctttgtgcaggcgcgcaaacagctaaaagaacaaggacagtcacttggagaagcacatttatacttcggctgccgttcacctcatgaagactatctgtatcaagaagagcttgaaaacgcccaaagcgaaggcatcattacgcttcataccgctttttctcgcatgccaaatcagccgaaaacatacgttcagcacgtaatggaacaagacggcaagaaattgattgaacttcttgatcaaggagcgcacttctatatttgcggagacggaagccaaatggcacctgccgttgaagcaacgcttatgaaaagctatgctgacgttcaccaagtgagtgaagcagacgctcgcttatggctgcagcagctagaagaaaaaggccgatacgcaaaagacgtgtgggctggg

SEQ ID NO: 204 - protein, 1049 aa, synthetic construct
  REGION 1..1049: note = variant of P450 oxidase from Bacillus megaterium
MTIKEMPQPKTFGELKNLPLLNTDKPVQALMRIADELGEIFKFEAPGSVTRYLSSQRLIKEACDESRFDKNLSQALKFARDFAGDGLATSWTHEPNWKKAHNILVPSFSQHAMGRYHAMMVDIAVQLVQKWERLNADEHIEVSEDMTRLTLDTIGLCGFNYRFNSFYRDQPHPFIVSMVRALDEVMNKLQRANPDDPAYDENKRQCQEDIKVMNDYVDKIIADRKARGEQSHDLLTQMLNGKDPETGEPLDDGNIRYQIITFLIAGHQTTSGLLSFALYFLVKNPHVLQKVAEEAARVLVDPVPSYKQVKQLKYVGMVLNEALRLWPTAPMFSLYAKEDTVLGGEYPLTKGDEVVVLVPQLHRDKTIWGDDVEEFRPERFENPSAIPQHAFKPFGNGQRACIGQQFALHEATLVLGMMLKHFDFEDHTNYELVIKETRTLKPEGFVVKAKSKGIPLGGIPSPSTEQSAKKVRKKAENAHNTPLLVLYGSNAGTAEGTARDLADIAMSKGFAPQVATLDSHAGNLPREGAVLIVTASYNGHPPDNAKQFVDWLDQASADEVKGVRYSVFGCGDKNWAATYQKVPAFIDETLAAKGAENIADRGEADASDDFEGTYEEWRDHMWSDVAAYFNLDIENSEDNKSTLSLQFVDSAADMPLAKMHGAFSTNVVASKELQQPGSARSTRHLEIELPKEASYQEGDHLGVIPRNYEGIVNRVTARFGLSASQQIRLEAEEEKLAHLPLAKTVSVEELLQYVELQDPVTRTQLRAMAAKTVCPPHKVELEALLEKQAYKEQVLAKRLTMLELLEKYPACEMKFSEFIALLPSIRPRYYSISSSPRVDEKQASITVSVVSGPAWSGYGEYKGIASNYLAELQEGDTITCFISTPQSEFTLPKDPETPLIMVGPGTGVAPFRGFVQARKQLKEQGQSLGEAHLYFGCRSPHEDYLYQEELENAQSEGIITLHTAFSRMPNQPKTYVQHVMEQDGKKLIELLDQGAHFYICGDGSQMAPAVEATLMKSYADVHQVSEADARLWLQQLEEKGRYAKDVWAG

SEQ ID NO: 205 - DNA, 3147 bp, synthetic construct
  misc_feature 1..3147: note = variant of P450 oxidase from Bacillus megaterium
  source 1..3147: mol_type = other DNA
atgacaattaaggaaatgcctcagcctaagacgtttggagaacttaaaaatttaccgttattaaacacagataaaccggttcaagctttgatgcgtattgcggatgaattaggagaaatctttaaattcgaggcgcctggtagcgtaacgcgctatttatcaagtcagcgtctaattaaagaagcatgcgatgaatcacgctttgataaaaacttaagtcaagctcttaaatttgcacgtgattttgttggagacgggttagccacaagctggacgcatgaaccgaattggaaaaaagcgcataatatcttagttccaagctttagtcagcatgcaatggggcgttatcatgcgatgatggtcgatatcgccgtgcagcttgttcaaaagtgggagcgtctaaatgcagatgagcatattgaagtatcggaagacatgacacgtttaacgcttgatacaattggtctttgcggctttaactatcgctttaacagcttttaccgagatcagcctcatccatttattgtgagtatggtgcgtgcactggatgaagtaatgaacaagctgcagcgagcaaatccagacgacccagcttatgatgaaaacaagcgccagtgtcaagaagatatcaaggtgatgaacgactatgtagataaaattattgcagatcgcaaagcaaggggtgaacaaagtcatgatttattaacgcagatgctaaacggaaaagatccagaaacgggtgagccgcttgatgacgggaacattcgttatcaaattattacattcttaattgcgggacaccaaacaacaagtggtcttttatcatttgcgctgtatttcttagtgaaaaatccacatgtattacaaaaagtagcagaagaagcagcacgagttctagtagatcctgttccaagctacaaacaagtcaaacagcttaaatatgtcggcatggtcttaaacgaagcgctgcgcttatggccatcggcgcctactttttccctatatgcaaaagaagatacggtgcttggaggagaatatcctttaacgaaaggcgacgaagtaatggttctgattcctcagcttcaccgtgataaaacaatttggggagacgatgtggaggagttccgtccagagcgttttgaaaatccaagtgcgattccgcagcatgcgtttaaaccgtttggaaacggtcagcgtgcgtgtatcggtcagcagttcgctcttcatgaagcaacgctggtacttggtatgatgctaaaacactttgactttgaagatcatacaaactacgagctcgttattaaagaaggtcggacgttaaaacctgaaggctttgtggtaaaagcaaaatcgaaaggcattccgcttggcggtattccttcacctagcactgaacagtctgctaaaaaagtacgcaaaaaggcagaaaacgctcataatacgccgctgcttgtgctatacggttcaaatgcgggaacagctgaaggaacggcgcgtgatttagcagatattgcaatgagcaaaggatttgcaccgcaggtcgcaacgcttgattcacacgccggaaatcttccgcgcgaaggagctgtattaattgtaacggcgtcttataacggtcatccgcctgataacgcaaagcaatttgtcgactggttagaccaagcgtctgctgatgaagtaaaaggcgttcgctactccgtatttggatgcggcgataaaaattgggctgcgacgtatcaaaaagtgcctgcttttatcgatgaaacgcttgccgctaaaggggcagaaaacatcgctgaccgcggtgaagcagatgcaagcgacgactttgaaggcacatatgaagaatggcgtgatcatatgtggagtgacgtagcagcctactttaacctcgacattgaaaacagtgaagataataaatctactctttcacttcaatttgtcgacagcgccgcggatatgccgcttgcgaaaatgcacggtgcgttttcaacgaacgtcgtagcaagcaaagaacttcaacagccaggcagtgcacgaagcacgcgacatcttgaaattgaacttccaaaagaagcttcttatcaagaaggagatcatttaggtgttattcctcgcaactatgaaggaatagtaaaccgtgtaacagcaaggttcggcctaagcgcatcacagcaaatccgtctggaagcagaagaagaaaaattagctcatttgccactcgctaaaacagtatccgtagaagagcttctgcaatacgtggagcttcaagatcctgttacgcgcacgcagcttcgcgcaatggctgctaaaacggtctgcccgccgcataaagtagagcttgaagccttgcttgaaaagcaagcctacaaagaacaagtgctggcaaaacgtttaacaatgcttgaactgcttgaaaaatacccggcgtgtgaaatgaaattcagcgaatttatcgcccttctgccaagcatacgcccgcgctattactcgatttcttcatcacctcgtgtcgatgaaaaacaagcaagcatcacggtcagcgttgtctcaggaccggcgtggagcggatatggagaatataaaggaattgcgtcgaactatcttgccgagctgcaagaaggagatacgattacgtgctttatttccacaccgcagtcagaatttacgctgccaaaagaccctgaaacgccgcttatcatggtcggaccgggaacaggcgtcgcgccgtttagaggctttgtgcaggcgcgcaaacagctaaaagaacaaggacagtcacttggagaagcacatttatacttcggctgccgttcacctcatgaagactatctgtatcaagaagagcttgaaaacgcccaaagcgaaggcatcattacgcttcataccgctttttctcgcatgccaaatcagccgaaaacatacgttcagcacgtaatggaacaagacggcaagaaattgattgaacttcttgatcaaggagcgcacttctatatttgcggagacggaagccaaatggcacctgccgttgaagcaacgcttatgaaaagctatgctgacgttcaccaagtgagtgaagcagacgctcgcttatggctgcagcagctagaagaaaaaggccgatacgcaaaagacgtgtgggctggg

SEQ ID NO: 206 - protein, 1049 aa, synthetic construct
  REGION 1..1049: note = variant of P450 oxidase from Bacillus megaterium
MTIKEMPQPKTFGELKNLPLLNTDKPVQALMRIADELGEIFKFEAPGSVTRYLSSQRLIKEACDESRFDKNLSQALKFARDFVGDGLATSWTHEPNWKKAHNILVPSFSQHAMGRYHAMMVDIAVQLVQKWERLNADEHIEVSEDMTRLTLDTIGLCGFNYRFNSFYRDQPHPFIVSMVRALDEVMNKLQRANPDDPAYDENKRQCQEDIKVMNDYVDKIIADRKARGEQSHDLLTQMLNGKDPETGEPLDDGNIRYQIITFLIAGHQTTSGLLSFALYFLVKNPHVLQKVAEEAARVLVDPVPSYKQVKQLKYVGMVLNEALRLWPSAPTFSLYAKEDTVLGGEYPLTKGDEVMVLIPQLHRDKTIWGDDVEEFRPERFENPSAIPQHAFKPFGNGQRACIGQQFALHEATLVLGMMLKHFDFEDHTNYELVIKEGRTLKPEGFVVKAKSKGIPLGGIPSPSTEQSAKKVRKKAENAHNTPLLVLYGSNAGTAEGTARDLADIAMSKGFAPQVATLDSHAGNLPREGAVLIVTASYNGHPPDNAKQFVDWLDQASADEVKGVRYSVFGCGDKNWAATYQKVPAFIDETLAAKGAENIADRGEADASDDFEGTYEEWRDHMWSDVAAYFNLDIENSEDNKSTLSLQFVDSAADMPLAKMHGAFSTNVVASKELQQPGSARSTRHLEIELPKEASYQEGDHLGVIPRNYEGIVNRVTARFGLSASQQIRLEAEEEKLAHLPLAKTVSVEELLQYVELQDPVTRTQLRAMAAKTVCPPHKVELEALLEKQAYKEQVLAKRLTMLELLEKYPACEMKFSEFIALLPSIRPRYYSISSSPRVDEKQASITVSVVSGPAWSGYGEYKGIASNYLAELQEGDTITCFISTPQSEFTLPKDPETPLIMVGPGTGVAPFRGFVQARKQLKEQGQSLGEAHLYFGCRSPHEDYLYQEELENAQSEGIITLHTAFSRMPNQPKTYVQHVMEQDGKKLIELLDQGAHFYICGDGSQMAPAVEATLMKSYADVHQVSEADARLWLQQLEEKGRYAKDVWAG

SEQ ID NO: 207 - DNA, 3147 bp, synthetic construct
  misc_feature 1..3147: note = variant of P450 oxidase from Bacillus megaterium
  source 1..3147: mol_type = other DNA
atgacaattaaggaaatgcctcagcctaagacgtttggagaacttaaaaatttaccgttattaaacacagataaaccggttcaagctttgatgcgtattgcggatgaattaggagaaatctttaaattcgaggcgcctggtagcgtaacgcgctatttatcaagtcagcgtctaattaaagaagcatgcgatgaatcacgctttgataaaaacttaagtcaagcgcttaaatttgcacgtgattttgttggagacgggttagccacaagctggacgcatgaaccgaattggaaaaaagcgcataatatcttagttccaagctttagtcagcatgcaatggggcgttatcatgcgatgatggtcgatatcgccgtgcagcttgttcaaaagtgggagcgtctaaatgcagatgagcatattgaagtatcggaagacatgacacgtttaacgcttgatacaattggtctttgcggctttaactatcgctttaacagcttttaccgagatcagcctcatccatttattgtgagtatggtccgtgcactggatgaagtaatgaacaaggggcagcgagcaaatccagacgacccagcttatgatgaaaacaagcgccagtgtcaagaagatatcaaggtgatgaacgactatgtagataaaattattgcagatcgcaaagcaaggggtgaacaaagtcatgatttattaacgcagatgctaaacggaaaagatccagaaacgggtgagccgcttgatgacgggaacattcgttatcaaattattacattcttaattgcgggaactcaaacaacaagtggtcttttatcatttgcgctgtatttcttagtgaaaaatccacatgtattacaaaaagtagcagaagaagcagcacgagttctagtagatcctgttccaagctacaaacaagtcaaacagcttaaatatgtcggcatggtcttaaacgaagcgctgcgcttatggccaacggcgcctgctttttccctatatgcaaaagaagatacggtgcttggaggagaatatcctttaacgaaaggcgacgaagtaatggttctgactcctcagcttcaccgtgataaaacaatttggggagacgatgtggaggagttccgtccagagcgttttgaaaatccaagtgcgattccgcagcatgcgtttaaaccgtttggaaacggtcagcgtgcgtgtatcggtcagcagttcgctcttcatgaagcaacgctggtacttggtatgatgctaaaacactttgactttgaagatcatacaaactacgagctcgttattaaagaaactcggacgttaaaacctgaaggctttgtggtaaaagcaaaatcgaaaggcattccgcttggcggtattccttcacctagcactgaacagtctgctaaaaaagtacgcaaaaaggcagaaaacgctcataatacgccgctgcttgtgctatacggttcaaatgcgggaacagctgaaggaacggcgcgtgatttagcagatattgcaatgagcaaaggatttgcaccgcaggtcgcaacgcttgattcacacgccggaaatcttccgcgcgaaggagctgtattaattgtaacggcgtcttataacggtcatccgcctgataacgcaaagcaatttgtcgactggttagaccaagcgtctgctgatgaagtaaaaggcgttcgctactccgtatttggatgcggcgataaaaattgggctgcgacgtatcaaaaagtgcctgcttttatcgatgaaacgcttgccgctaaaggggcagaaaacatcgctgaccgcggtgaagcagatgcaagcgacgactttgaaggcacatatgaagaatggcgtgatcatatgtggagtgacgtagcagcctactttaacctcgacattgaaaacagtgaagataataaatctactctttcacttcaatttgtcgacagcgccgcggatatgccgcttgcgaaaatgcacggtgcgttttcaacgaacgtcgtagcaagcaaagaacttcaacagccaggcagtgcacgaagcacgcgacatcttgaaattgaacttccaaaagaagcttcttatcaagaaggagatcatttaggtgttattcctcgcaactatgaaggaatagtaaaccgtgtaacagcaaggttcggcctaagcgcatcacagcaaatccgtctggaagcagaagaagaaaaattagctcatttgccactcgctaaaacagtatccgtagaagagcttctgcaatacgtggagcttcaagatcctgttacgcgcacgcagcttcgcgcaatggctgctaaaacggtctgcccgccgcataaagtagagcttgaagccttgcttgaaaagcaagcctacaaagaacaagtgctggcaaaacgtttaacaatgcttgaactgcttgaaaaatacccggcgtgtgaaatgaaattcagcgaatttatcgcccttctgccaagcatacgcccgcgctattactcgatttcttcatcacctcgtgtcgatgaaaaacaagcaagcatcacggtcagcgttgtctcaggaccggcgtggagcggatatggagaatataaaggaattgcgtcgaactatcttgccgagctgcaagaaggagatacgattacgtgctttatttccacaccgcagtcagaatttacgctgccaaaagaccctgaaacgccgcttatcatggtcggaccgggaacaggcgtcgcgccgtttagaggctttgtgcaggcgcgcaaacagctaaaagaacaaggacagtcacttggagaagcacatttatacttcggctgccgttcacctcatgaagactatctgtatcaagaagagcttgaaaacgcccaaagcgaaggcatcattacgcttcataccgctttttctcgcatgccaaatcagccgaaaacatacgttcagcacgtaatggaacaagacggcaagaaattgattgaacttcttgatcaaggagcgcacttctatatttgcggagacggaagccaaatggcacctgccgttgaagcaacgcttatgaaaagctatgctgacgttcaccaagtgagtgaagcagacgctcgcttatggctgcagcagctagaagaaaaaggccgatacgcaaaagacgtgtgggctggg

SEQ ID NO: 208 - protein, 1049 aa, synthetic construct
  REGION 1..1049: note = variant of P450 oxidase from Bacillus megaterium
MTIKEMPQPKTFGELKNLPLLNTDKPVQALMRIADELGEIFKFEAPGSVTRYLSSQRLIKEACDESRFDKNLSQALKFARDFVGDGLATSWTHEPNWKKAHNILVPSFSQHAMGRYHAMMVDIAVQLVQKWERLNADEHIEVSEDMTRLTLDTIGLCGFNYRFNSFYRDQPHPFIVSMVRALDEVMNKGQRANPDDPAYDENKRQCQEDIKVMNDYVDKIIADRKARGEQSHDLLTQMLNGKDPETGEPLDDGNIRYQIITFLIAGTQTTSGLLSFALYFLVKNPHVLQKVAEEAARVLVDPVPSYKQVKQLKYVGMVLNEALRLWPTAPAFSLYAKEDTVLGGEYPLTKGDEVMVLTPQLHRDKTIWGDDVEEFRPERFENPSAIPQHAFKPFGNGQRACIGQQFALHEATLVLGMMLKHFDFEDHTNYELVIKETRTLKPEGFVVKAKSKGIPLGGIPSPSTEQSAKKVRKKAENAHNTPLLVLYGSNAGTAEGTARDLADIAMSKGFAPQVATLDSHAGNLPREGAVLIVTASYNGHPPDNAKQFVDWLDQASADEVKGVRYSVFGCGDKNWAATYQKVPAFIDETLAAKGAENIADRGEADASDDFEGTYEEWRDHMWSDVAAYFNLDIENSEDNKSTLSLQFVDSAADMPLAKMHGAFSTNVVASKELQQPGSARSTRHLEIELPKEASYQEGDHLGVIPRNYEGIVNRVTARFGLSASQQIRLEAEEEKLAHLPLAKTVSVEELLQYVELQDPVTRTQLRAMAAKTVCPPHKVELEALLEKQAYKEQVLAKRLTMLELLEKYPACEMKFSEFIALLPSIRPRYYSISSSPRVDEKQASITVSVVSGPAWSGYGEYKGIASNYLAELQEGDTITCFISTPQSEFTLPKDPETPLIMVGPGTGVAPFRGFVQARKQLKEQGQSLGEAHLYFGCRSPHEDYLYQEELENAQSEGIITLHTAFSRMPNQPKTYVQHVMEQDGKKLIELLDQGAHFYICGDGSQMAPAVEATLMKSYADVHQVSEADARLWLQQLEEKGRYAKDVWAG

SEQ ID NO: 209 - DNA, 3147 bp, synthetic construct
  misc_feature 1..3147: note = variant of P450 oxidase from Bacillus megaterium
  source 1..3147: mol_type = other DNA
atgacaattaaggaaatgcctcagcctaagacgtttggagaacttaaaaatttaccgttattaaacacagataaaccggttcaagctttgatgcgtattgcggatgaattaggagaaatctttaaattcgaggcgcctggtagcgtaacgcgctatttatcaagtcagcgtctaattaaagaagcatgcgatgaatcacgctttgataaaaacttaagtcaagcgcttaaatttgcacgtgattttgctggagacgggttagccacaagctggacgcatgaaccgaattggaaaaaagcgcataatatcttagttccaagctttagtcagcatgcaatggggcgttatcatgcgatgatggtcgatatcgccgtgcagcttgttcaaaagtgggagcgtctaaatgcagatgagcatattgaagtatcggaagacatgacacgtttaacgcttgatacaattggtctttgcggctttaactatcgctttaacagcttttaccgagatcagcctcatccatttattgtgagtatggtccgtgcactggatgaagtaatgaacaagctgcagcgagcaaatccagacgacccagcttatgatgaaaacaagcgccagtgtcaagaagatatcaaggtgatgaacgactatgtagataaaattattgcagatcgcaaagcaaggggtgaacaaagtcatgatttattaacgcagatgctaaacggaaaagatccagaaacgggtgagccgcttgatgacgggaacattcgttatcaaattattacattcttaattgcgggacaccaaacaacaagtggtcttttatcatttgcgctgtatttcttagtgaaaaatccacatgtattacaaaaagtagcagaagaagcagcacgagttctagtagatcctgttccaagctacaaacaagtcaaacagcttaaatatgtcggcatggtcttaaacgaagcgctgcgcttatggccaacggcgcctgctttttccctatatgcaaaagaagatacggtgcttggaggagaatatcctttaacgaaaggcgacgaagtagtggttctggtgcctcagcttcaccgtgataaaacaatttggggagacgatgtggaggagttccgtccagagcgttttgaaaatccaagtgcgattccgcagcatgcgtttaaaccgtttggaaacggtcagcgtgcgtgtatcggtcagcagttcgctcttcatgaagcaacgctggtacttggtatgatgctaaaacactttgactttgaagatcatacaaactacgagctcgttattaaagaaggtcggacgttaaaacctgaaggctttgtggtaaaagcaaaatcgaaaggcattccgcttggcggtattccttcacctagcactgaacagtctgctaaaaaagtacgcaaaaaggcagaaaacgctcataatacgccgctgcttgtgctatacggttcaaatgcgggaacagctgaaggaacggcgcgtgatttagcagatattgcaatgagcaaaggatttgcaccgcaggtcgcaacgcttgattcacacgccggaaatcttccgcgcgaaggagctgtattaattgtaacggcgtcttataacggtcatccgcctgataacgcaaagcaatttgtcgactggttagaccaagcgtctgctgatgaagtaaaaggcgttcgctactccgtatttggatgcggcgataaaaattgggctgcgacgtatcaaaaagtgcctgcttttatcgatgaaacgcttgccgctaaaggggcagaaaacatcgctgaccgcggtgaagcagatgcaagcgacgactttgaaggcacatatgaagaatggcgtgatcatatgtggagtgacgtagcagcctactttaacctcgacattgaaaacagtgaagataataaatctactctttcacttcaatttgtcgacagcgccgcggatatgccgcttgcgaaaatgcacggtgcgttttcaacgaacgtcgtagcaagcaaagaacttcaacagccaggcagtgcacgaagcacgcgacatcttgaaattgaacttccaaaagaagcttcttatcaagaaggagatcatttaggtgttattcctcgcaactatgaaggaatagtaaaccgtgtaacagcaaggttcggcctaagcgcatcacagcaaatccgtctggaagcagaagaagaaaaattagctcatttgccactcgctaaaacagtatccgtagaagagcttctgcaatacgtggagcttcaagatcctgttacgcgcacgcagcttcgcgcaatggctgctaaaacggtctgcccgccgcataaagtagagcttgaagccttgcttgaaaagcaagcctacaaagaacaagtgctggcaaaacgtttaacaatgcttgaactgcttgaaaaatacccggcgtgtgaaatgaaattcagcgaatttatcgcccttctgccaagcatacgcccgcgctattactcgatttcttcatcacctcgtgtcgatgaaaaacaagcaagcatcacggtcagcgttgtctcaggaccggcgtggagcggatatggagaatataaaggaattgcgtcgaactatcttgccgagctgcaagaaggagatacgattacgtgctttatttccacaccgcagtcagaatttacgctgccaaaagaccctgaaacgccgcttatcatggtcggaccgggaacaggcgtcgcgccgtttagaggctttgtgcaggcgcgcaaacagctaaaagaacaaggacagtcacttggagaagcacatttatacttcggctgccgttcacctcatgaagactatctgtatcaagaagagcttgaaaacgcccaaagcgaaggcatcattacgcttcataccgctttttctcgcatgccaaatcagccgaaaacatacgttcagcacgtaatggaacaagacggcaagaaattgattgaacttcttgatcaaggagcgcacttctatatttgcggagacggaagccaaatggcacctgccgttgaagcaacgcttatgaaaagctatgctgacgttcaccaagtgagtgaagcagacgctcgcttatggctgcagcagctagaagaaaaaggccgatacgcaaaagacgtgtgggctggg

SEQ ID NO: 210 - protein, 1049 aa, synthetic construct
  REGION 1..1049: note = variant of P450 oxidase from Bacillus megaterium
MTIKEMPQPKTFGELKNLPLLNTDKPVQALMRIADELGEIFKFEAPGSVTRYLSSQRLIKEACDESRFDKNLSQALKFARDFAGDGLATSWTHEPNWKKAHNILVPSFSQHAMGRYHAMMVDIAVQLVQKWERLNADEHIEVSEDMTRLTLDTIGLCGFNYRFNSFYRDQPHPFIVSMVRALDEVMNKLQRANPDDPAYDENKRQCQEDIKVMNDYVDKIIADRKARGEQSHDLLTQMLNGKDPETGEPLDDGNIRYQIITFLIAGHQTTSGLLSFALYFLVKNPHVLQKVAEEAARVLVDPVPSYKQVKQLKYVGMVLNEALRLWPTAPAFSLYAKEDTVLGGEYPLTKGDEVVVLVPQLHRDKTIWGDDVEEFRPERFENPSAIPQHAFKPFGNGQRACIGQQFALHEATLVLGMMLKHFDFEDHTNYELVIKEGRTLKPEGFVVKAKSKGIPLGGIPSPSTEQSAKKVRKKAENAHNTPLLVLYGSNAGTAEGTARDLADIAMSKGFAPQVATLDSHAGNLPREGAVLIVTASYNGHPPDNAKQFVDWLDQASADEVKGVRYSVFGCGDKNWAATYQKVPAFIDETLAAKGAENIADRGEADASDDFEGTYEEWRDHMWSDVAAYFNLDIENSEDNKSTLSLQFVDSAADMPLAKMHGAFSTNVVASKELQQPGSARSTRHLEIELPKEASYQEGDHLGVIPRNYEGIVNRVTARFGLSASQQIRLEAEEEKLAHLPLAKTVSVEELLQYVELQDPVTRTQLRAMAAKTVCPPHKVELEALLEKQAYKEQVLAKRLTMLELLEKYPACEMKFSEFIALLPSIRPRYYSISSSPRVDEKQASITVSVVSGPAWSGYGEYKGIASNYLAELQEGDTITCFISTPQSEFTLPKDPETPLIMVGPGTGVAPFRGFVQARKQLKEQGQSLGEAHLYFGCRSPHEDYLYQEELENAQSEGIITLHTAFSRMPNQPKTYVQHVMEQDGKKLIELLDQGAHFYICGDGSQMAPAVEATLMKSYADVHQVSEADARLWLQQLEEKGRYAKDVWAG

SEQ ID NO: 211 - DNA, 3147 bp, synthetic construct
  misc_feature 1..3147: note = variant of P450 oxidase from Bacillus megaterium
  source 1..3147: mol_type = other DNA
atgacaattaaggaaatgcctcagcctaagacgtttggagaacttaaaaatttaccgttattaaacacagataaaccggttcaagctttgatgcgtattgcggatgaattaggagaaatctttaaattcgaggcgcctggtagcgtaacgcgctatttatcaagtcagcgtctaattaaagaagcatgcgatgaatcacgctttgataaaaacttaagtcaagcgcttaaatttgcacgtgattttgctggagacgggttagccacaagctggacgcatgaaccgaattggaaaaaagcgcataatatcttagttccaagctttagtcagcatgcaatggggcgttatcatgcgatgatggtcgatatcgccgtgcagcttgttcaaaagtgggagcgtctaaatgcagatgagcatattgaagtatcggaagacatgacacgtttaacgcttgatacaattggtctttgcggctttaactatcgctttaacagcttttaccgagatcagcctcatccatttattgtgagtatggtccgtgcactggatgaagtaatgaacaagctgcagcgagcaaatccagacgacccagcttatgatgaaaacaagcgccagtgtcaagaagatatcaaggtgatgaacgactatgtagataaaattattgcagatcgcaaagcaaggggtgaacaaagtcatgatttattaacgcagatgctaaacggaaaagatccagaaacgggtgagccgcttgatgacgggaacattcgttatcaaattattacattcttaattgcgggaactcaaacaacaagtggtcttttatcatttgcgctgtatttcttagtgaaaaatccacatgtattacaaaaagtagcagaagaagcagcacgagttctagtagatcctgttccaagctacaaacaagtcaaacagcttaaatatgtcggcatggtcttaaacgaagcgctgcgcttatggccagtagcgcctgctttttccctatatgcaaaagaagatacggtgcttggaggagaatatcctttaacgaaaggcgacgaagtaatggttctgattcctcagcttcaccgtgataaaacaatttggggagacgatgtggaggagttccgtccagagcgttttgaaaatccaagtgcgattccgcagcatgcgtttaaaccgtttggaaacggtcagcgtgcgtgtatcggtcagcagttcgctcttcatgaagcaacgctggtacttggtatgatgctaaaacactttgactttgaagatcatacaaactacgagctcgttattaaagaaactcggacgttaaaacctgaaggctttgtggtaaaagcaaaatcgaaaggcattccgcttggcggtattccttcacctagcactgaacagtctgctaaaaaagtacgcaaaaaggcagaaaacgctcataatacgccgctgcttgtgctatacggttcaaatgcgggaacagctgaaggaacggcgcgtgatttagcagatattgcaatgagcaaaggatttgcaccgcaggtcgcaacgcttgattcacacgccggaaatcttccgcgcgaaggagctgtattaattgtaacggcgtcttataacggtcatccgcctgataacgcaaagcaatttgtcgactggttagaccaagcgtctgctgatgaagtaaaaggcgttcgctactccgtatttggatgcggcgataaaaattgggctgcgacgtatcaaaaagtgcctgcttttatcgatgaaacgcttgccgctaaaggggcagaaaacatcgctgaccgcggtgaagcagatgcaagcgacgactttgaaggcacatatgaagaatggcgtgatcatatgtggagtgacgtagcagcctactttaacctcgacattgaaaacagtgaagataataaatctactctttcacttcaatttgtcgacagcgccgcggatatgccgcttgcgaaaatgcacggtgcgttttcaacgaacgtcgtagcaagcaaagaacttcaacagccaggcagtgcacgaagcacgcgacatcttgaaattgaacttccaaaagaagcttcttatcaagaaggagatcatttaggtgttattcctcgcaactatgaaggaatagtaaaccgtgtaacagcaaggttcggcctaagcgcatcacagcaaatccgtctggaagcagaagaagaaaaattagctcatttgccactcgctaaaacagtatccgtagaagagcttctgcaatacgtggagcttcaagatcctgttacgcgcacgcagcttcgcgcaatggctgctaaaacggtctgcccgccgcataaagtagagcttgaagccttgcttgaaaagcaagcctacaaagaacaagtgctggcaaaacgtttaacaatgcttgaactgcttgaaaaatacccggcgtgtgaaatgaaattcagcgaatttatcgcccttctgccaagcatacgcccgcgctattactcgatttcttcatcacctcgtgtcgatgaaaaacaagcaagcatcacggtcagcgttgtctcaggaccggcgtggagcggatatggagaatataaaggaattgcgtcgaactatcttgccgagctgcaagaaggagatacgattacgtgctttatttccacaccgcagtcagaatttacgctgccaaaagaccctgaaacgccgcttatcatggtcggaccgggaacaggcgtcgcgccgtttagaggctttgtgcaggcgcgcaaacagctaaaagaacaaggacagtcacttggagaagcacatttatacttcggctgccgttcacctcatgaagactatctgtatcaagaagagcttgaaaacgcccaaagcgaaggcatcattacgcttcataccgctttttctcgcatgccaaatcagccgaaaacatacgttcagcacgtaatggaacaagacggcaagaaattgattgaacttcttgatcaaggagcgcacttctatatttgcggagacggaagccaaatggcacctgccgttgaagcaacgcttatgaaaagctatgctgacgttcaccaagtgagtgaagcagacgctcgcttatggctgcagcagctagaagaaaaaggccgatacgcaaaagacgtgtgggctggg

SEQ ID NO: 212 - protein, 1049 aa, synthetic construct
  REGION 1..1049: note = variant of P450 oxidase from Bacillus megaterium
MTIKEMPQPKTFGELKNLPLLNTDKPVQALMRIADELGEIFKFEAPGSVTRYLSSQRLIKEACDESRFDKNLSQALKFARDFAGDGLATSWTHEPNWKKAHNILVPSFSQHAMGRYHAMMVDIAVQLVQKWERLNADEHIEVSEDMTRLTLDTIGLCGFNYRFNSFYRDQPHPFIVSMVRALDEVMNKLQRANPDDPAYDENKRQCQEDIKVMNDYVDKIIADRKARGEQSHDLLTQMLNGKDPETGEPLDDGNIRYQIITFLIAGTQTTSGLLSFALYFLVKNPHVLQKVAEEAARVLVDPVPSYKQVKQLKYVGMVLNEALRLWPVAPAFSLYAKEDTVLGGEYPLTKGDEVMVLIPQLHRDKTIWGDDVEEFRPERFENPSAIPQHAFKPFGNGQRACIGQQFALHEATLVLGMMLKHFDFEDHTNYELVIKETRTLKPEGFVVKAKSKGIPLGGIPSPSTEQSAKKVRKKAENAHNTPLLVLYGSNAGTAEGTARDLADIAMSKGFAPQVATLDSHAGNLPREGAVLIVTASYNGHPPDNAKQFVDWLDQASADEVKGVRYSVFGCGDKNWAATYQKVPAFIDETLAAKGAENIADRGEADASDDFEGTYEEWRDHMWSDVAAYFNLDIENSEDNKSTLSLQFVDSAADMPLAKMHGAFSTNVVASKELQQPGSARSTRHLEIELPKEASYQEGDHLGVIPRNYEGIVNRVTARFGLSASQQIRLEAEEEKLAHLPLAKTVSVEELLQYVELQDPVTRTQLRAMAAKTVCPPHKVELEALLEKQAYKEQVLAKRLTMLELLEKYPACEMKFSEFIALLPSIRPRYYSISSSPRVDEKQASITVSVVSGPAWSGYGEYKGIASNYLAELQEGDTITCFISTPQSEFTLPKDPETPLIMVGPGTGVAPFRGFVQARKQLKEQGQSLGEAHLYFGCRSPHEDYLYQEELENAQSEGIITLHTAFSRMPNQPKTYVQHVMEQDGKKLIELLDQGAHFYICGDGSQMAPAVEATLMKSYADVHQVSEADARLWLQQLEEKGRYAKDVWAG

SEQ ID NO: 213 - DNA, 3147 bp, synthetic construct
  misc_feature 1..3147: note = variant of P450 oxidase from Bacillus megaterium
  source 1..3147: mol_type = other DNA
atgacaattaaggaaatgcctcagcctaagacgtttggagaacttaaaaatttaccgttattaaacacagataaaccggttcaagctttgatgcgtattgcggatgaattaggagaaatctttaaattcgaggcgcctggtagcgtaacgcgctatttatcaagtcagcgtctaattaaagaagcatgcgatgaatcacgctttgataaaaacttaagtcaagcgcttaaatttgcacgtgattttgctggagacgggttagccacaagctggacgcatgaaccgaattggaaaaaagcgcataatatcttagttccaagctttagtcagcatgcaatggggcgttatcatgcgatgatggtcgatatcgccgtgcagcttgttcaaaagtgggagcgtctaaatgcagatgagcatattgaagtatcggaagacatgacacgtttaacgcttgatacaattggtctttgcggctttaactatcgctttaacagcttttaccgagatcagcctcatccatttattgtgagtatggtccgtgcactggatgaagtaatgaacaagctgcagcgagcaaatccagacgacccagcttatgatgaaaacaagcgccagtgtcaagaagatatcaaggtgatgaacgactatgtagataaaattattgcagatcgcaaagcaaggggtgaacaaagtcatgatttattaacgcagatgctaaacggaaaagatccagaaacgggtgagccgcttgatgacgggaacattcgttatcaaattattacattcttaattgcgggacaccaaacaacaagtggtcttttatcatttgcgctgtatttcttagtgaaaaatccacatgtattacaaaaagtagcagaagaagcagcacgagttctagtagatcctgttccaagctacaaacaagtcaaacagcttaaatatgtcggcatggtcttaaacgaagcgctgcgcttatggccaactgcgcctgcgttttccctatatgcaaaagaagatacggtgcttggaggagaatatcctttaacgaaaggcgacgaagtaatggttctgattcctcagcttcaccgtgataaaacaatttggggagacgatgtggaggagttccgtccagagcgttttgaaaatccaagtgcgattccgcagcatgcgtttaaaccgtttggaaacggtcagcgtgcgtgtatcggtcagcagttcgctcttcatgaagcaacgctggtacttggtatgatgctaaaacactttgactttgaagatcatacaaactacgagctcgttattaaagaaactcggacgttaaaacctgaaggctttgtggtaaaagcaaaatcgaaaggcattccgcttggcggtattccttcacctagcactgaacagtctgctaaaaaagtacgcaaaaaggcagaaaacgctcataatacgccgctgcttgtgctatacggttcaaatgcgggaacagctgaaggaacggcgcgtgatttagcagatattgcaatgagcaaaggatttgcaccgcaggtcgcaacgcttgattcacacgccggaaatcttccgcgcgaaggagctgtattaattgtaacggcgtcttataacggtcatccgcctgataacgcaaagcaatttgtcgactggttagaccaagcgtctgctgatgaagtaaaaggcgttcgctactccgtatttggatgcggcgataaaaattgggctgcgacgtatcaaaaagtgcctgcttttatcgatgaaacgcttgccgctaaaggggcagaaaacatcgctgaccgcggtgaagcagatgcaagcgacgactttgaaggcacatatgaagaatggcgtgatcatatgtggagtgacgtagcagcctactttaacctcgacattgaaaacagtgaagataataaatctactctttcacttcaatttgtcgacagcgccgcggatatgccgcttgcgaaaatgcacggtgcgttttcaacgaacgtcgtagcaagcaaagaacttcaacagccaggcagtgcacgaagcacgcgacatcttgaaattgaacttccaaaagaagcttcttatcaagaaggagatcatttaggtgttattcctcgcaactatgaaggaatagtaaaccgtgtaacagcaaggttcggcctaagcgcatcacagcaaatccgtctggaagcagaagaagaaaaattagctcatttgccactcgctaaaacagtatccgtagaagagcttctgcaatacgtggagcttcaagatcctgttacgcgcacgcagcttcgcgcaatggctgctaaaacggtctgcccgccgcataaagtagagcttgaagccttgcttgaaaagcaagcctacaaagaacaagtgctggcaaaacgtttaacaatgcttgaactgcttgaaaaatacccggcgtgtgaaatgaaattcagcgaatttatcgcccttctgccaagcatacgcccgcgctattactcgatttcttcatcacctcgtgtcgatgaaaaacaagcaagcattacggtcagcgttgtctcaggaccggcgtggagcggatatggagaatataaaggaattgcgtcgaactatcttgccgagctgcaagaaggagatacgattacgtgctttatttccacaccgcagtcagaatttacgctgccaaaagaccctgaaacgccgcttatcatggtcggaccgggaacaggcgtcgcgccgtttagaggctttgtgcaggcgcgcaaacagctaaaagaacaaggacagtcacttggagaagcacatttatacttcggctgccgttcacctcatgaagactatctgtatcaagaagagcttgaaaacgcccaaagcgaaggcatcattacgcttcataccgctttttctcgcatgccaaatcagccgaaaacatacgttcagcacgtaatggaacaagacggcaagaaattgattgaacttcttgatcaaggagcgcacttctatatttgcggagacggaagccaaatggcacctgccgttgaagcaacgcttatgaaaagctatgctgacgttcaccaagtgagtgaagcagacgctcgcttatggctgcagcagctagaagaaaaaggccgatacgcaaaagacgtgtgggctggg

SEQ ID NO: 214 - protein, 1049 aa, synthetic construct
  REGION 1..1049: note = variant of P450 oxidase from Bacillus megaterium
MTIKEMPQPKTFGELKNLPLLNTDKPVQALMRIADELGEIFKFEAPGSVTRYLSSQRLIKEACDESRFDKNLSQALKFARDFAGDGLATSWTHEPNWKKAHNILVPSFSQHAMGRYHAMMVDIAVQLVQKWERLNADEHIEVSEDMTRLTLDTIGLCGFNYRFNSFYRDQPHPFIVSMVRALDEVMNKLQRANPDDPAYDENKRQCQEDIKVMNDYVDKIIADRKARGEQSHDLLTQMLNGKDPETGEPLDDGNIRYQIITFLIAGHQTTSGLLSFALYFLVKNPHVLQKVAEEAARVLVDPVPSYKQVKQLKYVGMVLNEALRLWPTAPAFSLYAKEDTVLGGEYPLTKGDEVMVLIPQLHRDKTIWGDDVEEFRPERFENPSAIPQHAFKPFGNGQRACIGQQFALHEATLVLGMMLKHFDFEDHTNYELVIKETRTLKPEGFVVKAKSKGIPLGGIPSPSTEQSAKKVRKKAENAHNTPLLVLYGSNAGTAEGTARDLADIAMSKGFAPQVATLDSHAGNLPREGAVLIVTASYNGHPPDNAKQFVDWLDQASADEVKGVRYSVFGCGDKNWAATYQKVPAFIDETLAAKGAENIADRGEADASDDFEGTYEEWRDHMWSDVAAYFNLDIENSEDNKSTLSLQFVDSAADMPLAKMHGAFSTNVVASKELQQPGSARSTRHLEIELPKEASYQEGDHLGVIPRNYEGIVNRVTARFGLSASQQIRLEAEEEKLAHLPLAKTVSVEELLQYVELQDPVTRTQLRAMAAKTVCPPHKVELEALLEKQAYKEQVLAKRLTMLELLEKYPACEMKFSEFIALLPSIRPRYYSISSSPRVDEKQASITVSVVSGPAWSGYGEYKGIASNYLAELQEGDTITCFISTPQSEFTLPKDPETPLIMVGPGTGVAPFRGFVQARKQLKEQGQSLGEAHLYFGCRSPHEDYLYQEELENAQSEGIITLHTAFSRMPNQPKTYVQHVMEQDGKKLIELLDQGAHFYICGDGSQMAPAVEATLMKSYADVHQVSEADARLWLQQLEEKGRYAKDVWAG

SEQ ID NO: 215 - DNA, 3147 bp, synthetic construct
  misc_feature 1..3147: note = variant of P450 oxidase from Bacillus megaterium
  source 1..3147: mol_type = other DNA
atgacaattaaggaaatgcctcagcctaagacgtttggagaacttaaaaatttaccgttattaaacacagataaaccggttcaagctttgatgcgtattgcggatgaattaggagaaatctttaaattcgaggcgcctggtagcgtaacgcgctatttatcaagtcagcgtctaattaaagaagcatgcgatgaatcacgctttgataaaaacttaagtcaaactcttaaatttgcacgtgattttgttggagacgggttagccacaagctggacgcatgaaccgaattggaaaaaagcgcataatatcttagttccaagctttagtcagcatgcaatggggcgttatcatgcgatgatggtcgatatcgccgtgcagcttgttcaaaagtgggagcgtctaaatgcagatgagcatattgaagtatcggaagacatgacacgtttaacgcttgatacaattggtctttgcggctttaactatcgctttaacagcttttaccgagatcagcctcatccatttattgtgagtatggtccgtgcactggatgaagtaatgaacaagctgcagcgagcaaatccagacgacccagcttatgatgaaaacaagcgccagtgtcaagaagatatcaaggtgatgaacgactatgtagataaaattattgcagatcgcaaagcaaggggtgaacaaagtcatgatttattaacgcagatgctaaacggaaaagatccagaaacgggtgagccgcttgatgacgggaacattcgttatcaaattattacattcttaattgcgggacaccaaacaacaagtggtcttttatcatttgcgctgtatttcttagtgaaaaatccacatgtattacaaaaagtagcagaagaagcagcacgagttctagtagatcctgttccaagctacaaacaagtcaaacagcttaaatatgtcggcatggtcttaaacgaagcgctgcgcttatggccaactgcgcctgcgttttccctatatgcaaaagaagatacggtgcttggaggagaatatcctttaacgaaaggcgacgaagtaatggttctgattcctcagcttcaccgtgataaaacaatttggggagacgatgtggaggagttccgtccagagcgttttgaaaatccaagtgcgattccgcagcatgcgtttaaaccgtttggaaacggtcagcgtgcgtgtatcggtcagcagttcgctcttcatgaagcaacgctggtacttggtatgatgctaaaacactttgactttgaagatcatacaaactacgagctcgttattaaagaaggtcggacgttaaaacctgaaggctttgtggtaaaagcaaaatcgaaaggcattccgcttggcggtattccttcacctagcactgaacagtctgctaaaaaagtacgcaaaaaggcagaaaacgctcataatacgccgctgcttgtgctatacggttcaaatgcgggaacagctgaaggaacggcgcgtgatttagcagatattgcaatgagcaaaggatttgcaccgcaggtcgcaacgcttgattcacacgccggaaatcttccgcgcgaaggagctgtattaattgtaacggcgtcttataacggtcatccgcctgataacgcaaagcaatttgtcgactggttagaccaagcgtctgctgatgaagtaaaaggcgttcgctactccgtatttggatgcggcgataaaaattgggctgcgacgtatcaaaaagtgcctgcttttatcgatgaaacgcttgccgctaaaggggcagaaaacatcgctgaccgcggtgaagcagatgcaagcgacgactttgaaggcacatatgaagaatggcgtgatcatatgtggagtgacgtagcagcctactttaacctcgacattgaaaacagtgaagataataaatctactctttcacttcaatttgtcgacagcgccgcggatatgccgcttgcgaaaatgcacggtgcgttttcaacgaacgtcgtagcaagcaaagaacttcaacagccaggcagtgcacgaagcacgcgacatcttgaaattgaacttccaaaagaagcttcttatcaagaaggagatcatttaggtgttattcctcgcaactatgaaggaatagtaaaccgtgtaacagcaaggttcggcctaagcgcatcacagcaaatccgtctggaagcagaagaagaaaaattagctcatttgccactcgctaaaacagtatccgtagaagagcttctgcaatacgtggagcttcaagatcctgttacgcgcacgcagcttcgcgcaatggctgctaaaacggtctgcccgccgcataaagtagagcttgaagccttgcttgaaaagcaagcctacaaagaacaagtgctggcaaaacgtttaacaatgcttgaactgcttgaaaaatacccggcgtgtgaaatgaaattcagcgaatttatcgcccttctgccaagcatacgcccgcgctattactcgatttcttcatcacctcgtgtcgatgaaaaacaagcaagcatcacggtcagcgttgtctcaggaccggcgtggagcggatatggagaatataaaggaattgcgtcgaactatcttgccgagctgcaagaaggagatacgattacgtgctttatttccacaccgcagtcagaatttacgctgccaaaagaccctgaaacgccgcttatcatggtcggaccgggaacaggcgtcgcgccgtttagaggctttgtgcaggcgcgcaaacagctaaaagaacaaggacagtcacttggagaagcacatttatacttcggctgccgttcacctcatgaagactatctgtatcaagaagagcttgaaaacgcccaaagcgaaggcatcattacgcttcataccgctttttctcgcatgccaaatcagccgaaaacatacgttcagcacgtaatggaacaagacggcaagaaattgattgaacttcttgatcaaggagcgcacttctatatttgcggagacggaagccaaatggcacctgccgttgaagcaacgcttatgaaaagctatgctgacgttcaccaagtgagtgaagcagacgctcgcttatggctgcagcagctagaagaaaaaggccgatacgcaaaagacgtgtgggctggg

SEQ ID NO: 216 - protein, 1049 aa, synthetic construct
  REGION 1..1049: note = variant of P450 oxidase from Bacillus megaterium
MTIKEMPQPKTFGELKNLPLLNTDKPVQALMRIADELGEIFKFEAPGSVTRYLSSQRLIKEACDESRFDKNLSQTLKFARDFVGDGLATSWTHEPNWKKAHNILVPSFSQHAMGRYHAMMVDIAVQLVQKWERLNADEHIEVSEDMTRLTLDTIGLCGFNYRFNSFYRDQPHPFIVSMVRALDEVMNKLQRANPDDPAYDENKRQCQEDIKVMNDYVDKIIADRKARGEQSHDLLTQMLNGKDPETGEPLDDGNIRYQIITFLIAGHQTTSGLLSFALYFLVKNPHVLQKVAEEAARVLVDPVPSYKQVKQLKYVGMVLNEALRLWPTAPAFSLYAKEDTVLGGEYPLTKGDEVMVLIPQLHRDKTIWGDDVEEFRPERFENPSAIPQHAFKPFGNGQRACIGQQFALHEATLVLGMMLKHFDFEDHTNYELVIKEGRTLKPEGFVVKAKSKGIPLGGIPSPSTEQSAKKVRKKAENAHNTPLLVLYGSNAGTAEGTARDLADIAMSKGFAPQVATLDSHAGNLPREGAVLIVTASYNGHPPDNAKQFVDWLDQASADEVKGVRYSVFGCGDKNWAATYQKVPAFIDETLAAKGAENIADRGEADASDDFEGTYEEWRDHMWSDVAAYFNLDIENSEDNKSTLSLQFVDSAADMPLAKMHGAFSTNVVASKELQQPGSARSTRHLEIELPKEASYQEGDHLGVIPRNYEGIVNRVTARFGLSASQQIRLEAEEEKLAHLPLAKTVSVEELLQYVELQDPVTRTQLRAMAAKTVCPPHKVELEALLEKQAYKEQVLAKRLTMLELLEKYPACEMKFSEFIALLPSIRPRYYSISSSPRVDEKQASITVSVVSGPAWSGYGEYKGIASNYLAELQEGDTITCFISTPQSEFTLPKDPETPLIMVGPGTGVAPFRGFVQARKQLKEQGQSLGEAHLYFGCRSPHEDYLYQEELENAQSEGIITLHTAFSRMPNQPKTYVQHVMEQDGKKLIELLDQGAHFYICGDGSQMAPAVEATLMKSYADVHQVSEADARLWLQQLEEKGRYAKDVWAG

SEQ ID NO: 217 - DNA, 3147 bp, synthetic construct
  misc_feature 1..3147: note = variant of P450 oxidase from Bacillus megaterium
  source 1..3147: mol_type = other DNA
atgacaattaaggaaatgcctcagcctaagacgtttggagaacttaaaaatttaccgttattaaacacagataaaccggttcaagctttgatgcgtattgcggatgaattaggagaaatctttaaattcgaggcgcctggtagcgtaacgcgctatttatcaagtcagcgtctaattaaagaagcatgcgatgaatcacgctttgataaaaacttaagtcaagcgcttaaatttgcacgtgattttgctggagacgggttagccacaagctggacgcatgaaccgaattggaaaaaagcgcataatatcttagttccaagctttagtcagcatgcaatggggcgttatcatgcgatgatggtcgatatcgccgtgcagcttgttcaaaagtgggagcgtctaaatgcagatgagcatattgaagtatcggaagacatgacacgtttaacgcttgatacaattggtctttgcggctttaactatcgctttaacagcttttaccgagatcagcctcatccatttattgtgagtatggtccgtgcactggatgaagtaatgaacaagctgcagcgagcaaatccagacgacccagcttatgatgaaaacaagcgccagtgtcaagaagatatcaaggtgatgaacgactatgtagataaaattattgcagatcgcaaagcaaggggtgaacaaagtcatgatttattaacgcagatgctaaacggaaaagatccagaaacgggtgagccgcttgatgacgggaacattcgttatcaaattattacattcttaattgcgggaactcaaacaacaagtggtcttttatcatttgcgctgtatttcttagtgaaaaatccacatgtattacaaaaagtagcagaagaagcagcacgagttctagtagatcctgttccaagctacaaacaagtcaaacagcttaaatatgtcggcatggtcttaaacgaagcgctgcgcttatggccagtagcgcctatgttttccctatatgcaaaagaagatacggtgcttggaggagaatatcctttaacgaaaggcgacgaagtagtggttctgactcctcagcttcaccgtgataaaacaatttggggagacgatgtggaggagttccgtccagagcgttttgaaaatccaagtgcgattccgcagcatgcgtttaaaccgtttggaaacggtcagcgtgcgtgtatcggtcagcagttcgctcttcatgaagcaacgctggtacttggtatgatgctaaaacactttgactttgaagatcatacaaactacgagctcgttattaaagaaactcggacgttaaaacctgaaggctttgtggtaaaagcaaaatcgaaaggcattccgcttggcggtattccttcacctagcactgaacagtctgctaaaaaagtacgcaaaaaggcagaaaacgctcataatacgccgctgcttgtgctatacggttcaaatgcgggaacagctgaaggaacggcgcgtgatttagcagatattgcaatgagcaaaggatttgcaccgcaggtcgcaacgcttgattcacacgccggaaatcttccgcgcgaaggagctgtattaattgtaacggcgtcttataacggtcatccgcctgataacgcaaagcaatttgtcgactggttagaccaagcgtctgctgatgaagtaaaaggcgttcgctactccgtatttggatgcggcgataaaaattgggctgcgacgtatcaaaaagtgcctgcttttatcgatgaaacgcttgccgctaaaggggcagaaaacatcgctgaccgcggtgaagcagatgcaagcgacgactttgaaggcacatatgaagaatggcgtgatcatatgtggagtgacgtagcagcctactttaacctcgacattgaaaacagtgaagataataaatctactctttcacttcaatttgtcgacagcgccgcggatatgccgcttgcgaaaatgcacggtgcgttttcaacgaacgtcgtagcaagcaaagaacttcaacagccaggcagtgcacgaagcacgcgacatcttgaaattgaacttccaaaagaagcttcttatcaagaaggagatcatttaggtgttattcctcgcaactatgaaggaatagtaaaccgtgtaacagcaaggttcggcctaagcgcatcacagcaaatccgtctggaagcagaagaagaaaaattagctcatttgccactcgctaaaacagtatccgtagaagagcttctgcaatacgtggagcttcaagatcctgttacgcgcacgcagcttcgcgcaatggctgctaaaacggtctgcccgccgcataaagtagagcttgaagccttgcttgaaaagcaagcctacaaagaacaagtgctggcaaaacgtttaacaatgcttgaactgcttgaaaaatacccggcgtgtgaaatgaaattcagcgaatttatcgcccttctgccaagcatacgcccgcgctattactcgatttcttcatcacctcgtgtcgatgaaaaacaagcaagcatcacggtcagcgttgtctcaggaccggcgtggagcggatatggagaatataaaggaattgcgtcgaactatcttgccgagctgcaagaaggagatacgattacgtgctttatttccacaccgcagtcagaatttacgctgccaaaagaccctgaaacgccgcttatcatggtcggaccgggaacaggcgtcgcgccgtttagaggctttgtgcaggcgcgcaaacagctaaaagaacaaggacagtcacttggagaagcacatttatacttcggctgccgttcacctcatgaagactatctgtatcaagaagagcttgaaaacgcccaaagcgaaggcatcattacgcttcataccgctttttctcgcatgccaaatcagccgaaaacatacgttcagcacgtaatggaacaagacggcaagaaattgattgaacttcttgatcaaggagcgcacttctatatttgcggagacggaagccaaatggcacctgccgttgaagcaacgcttatgaaaagctatgctgacgttcaccaagtgagtgaagcagacgctcgcttatggctgcagcagctagaagaaaaaggccgatacgcaaaagacgtgtgggctggg

SEQ ID NO: 218 - protein, 1049 aa, synthetic construct
  REGION 1..1049: note = variant of P450 oxidase from Bacillus megaterium
MTIKEMPQPKTFGELKNLPLLNTDKPVQALMRIADELGEIFKFEAPGSVTRYLSSQRLIKEACDESRFDKNLSQALKFARDFAGDGLATSWTHEPNWKKAHNILVPSFSQHAMGRYHAMMVDIAVQLVQKWERLNADEHIEVSEDMTRLTLDTIGLCGFNYRFNSFYRDQPHPFIVSMVRALDEVMNKLQRANPDDPAYDENKRQCQEDIKVMNDYVDKIIADRKARGEQSHDLLTQMLNGKDPETGEPLDDGNIRYQIITFLIAGTQTTSGLLSFALYFLVKNPHVLQKVAEEAARVLVDPVPSYKQVKQLKYVGMVLNEALRLWPVAPMFSLYAKEDTVLGGEYPLTKGDEVVVLTPQLHRDKTIWGDDVEEFRPERFENPSAIPQHAFKPFGNGQRACIGQQFALHEATLVLGMMLKHFDFEDHTNYELVIKETRTLKPEGFVVKAKSKGIPLGGIPSPSTEQSAKKVRKKAENAHNTPLLVLYGSNAGTAEGTARDLADIAMSKGFAPQVATLDSHAGNLPREGAVLIVTASYNGHPPDNAKQFVDWLDQASADEVKGVRYSVFGCGDKNWAATYQKVPAFIDETLAAKGAENIADRGEADASDDFEGTYEEWRDHMWSDVAAYFNLDIENSEDNKSTLSLQFVDSAADMPLAKMHGAFSTNVVASKELQQPGSARSTRHLEIELPKEASYQEGDHLGVIPRNYEGIVNRVTARFGLSASQQIRLEAEEEKLAHLPLAKTVSVEELLQYVELQDPVTRTQLRAMAAKTVCPPHKVELEALLEKQAYKEQVLAKRLTMLELLEKYPACEMKFSEFIALLPSIRPRYYSISSSPRVDEKQASITVSVVSGPAWSGYGEYKGIASNYLAELQEGDTITCFISTPQSEFTLPKDPETPLIMVGPGTGVAPFRGFVQARKQLKEQGQSLGEAHLYFGCRSPHEDYLYQEELENAQSEGIITLHTAFSRMPNQPKTYVQHVMEQDGKKLIELLDQGAHFYICGDGSQMAPAVEATLMKSYADVHQVSEADARLWLQQLEEKGRYAKDVWAG

SEQ ID NO: 219 - DNA, 3147 bp, synthetic construct
  misc_feature 1..3147: note = variant of P450 oxidase from Bacillus megaterium
  source 1..3147: mol_type = other DNA
atgacaattaaggaaatgcctcagcctaagacgtttggagaacttaaaaatttaccgttattaaacacagataaaccggttcaagctttgatgcgtattgcggatgaattaggagaaatctttaaattcgaggcgcctggtagcgtaacgcgctatttatcaagtcagcgtctaattaaagaagcatgcgatgaatcacgctttgataaaaacttaagtcaagcgcttaaatttgcacgtgattttgctggagacgggttagccacaagctggacgcatgaaccgaattggaaaaaagcgcataatatcttagttccaagctttagtcagcatgcaatggggcgttatcatgcgatgatggtcgatatcgccgtgcagcttgttcaaaagtgggagcgtctaaatgcagatgagcatattgaagtatcggaagacatgacacgtttaacgcttgatacaattggtctttgcggctttaactatcgctttaacagcttttaccgagatcagcctcatccatttattgtgagtatgcgccgtgcactggatgaagtaatgaacaagctgcagcgagcaaatccagacgacccagcttatgatgaaaacaagcgccagtgtcaagaagatatcaaggtgatgaacgactatgtagataaaattattgcagatcgcaaagcaaggggtgaacaaagtcatgatttattaacgcagatgctaaacggaaaagatccagaaacgggtgagccgcttgatgacgggaacattcgttatcaaattattacattcttaattgcgggacacgaaacaacaagtggtcttttatcatttgcgctgtatttcttagtgaaaaatccacatgtattacaaaaagtagcagaagaagcagcacgagttctagtagatcctgttccaagctacaaacaagtcaaacagcttaaatatgtcggcatggtcttaaacgaagcgctgcgcttatggccagtagcgcctatgttttccctatatgcaaaagaagatacggtgcttggaggagaatatcctttaacgaaaggcgacgaagtaatggttctgattcctcagcttcaccgtgataaaacaatttggggagacgatgtggaggagttccgtccagagcgttttgaaaatccaagtgcgattccgcagcatgcgtttaaaccgtttggaaacggtcagcgtgcgtgtatcggtcagcagttcgctcttcatgaagcaacgctggtacttggtatgatgctaaaacactttgactttgaagatcatacaaactacgagctcgttattaaagaaactcggacgttaaaacctgaaggctttgtggtaaaagcaaaatcgaaaggcattccgcttggcggtattccttcacctagcactgaacagtctgctaaaaaagtacgcaaaaaggcagaaaacgctcataatacgccgctgcttgtgctatacggttcaaatgcgggaacagctgaaggaacggcgcgtgatttagcagatattgcaatgagcaaaggatttgcaccgcaggtcgcaacgcttgattcacacgccggaaatcttccgcgcgaaggagctgtattaattgtaacggcgtcttataacggtcatccgcctgataacgcaaagcaatttgtcgactggttagaccaagcgtctgctgatgaagtaaaaggcgttcgctactccgtatttggatgcggcgataaaaattgggctgcgacgtatcaaaaagtgcctgcttttatcgatgaaacgcttgccgctaaaggggcagaaaacatcgctgaccgcggtgaagcagatgcaagcgacgactttgaaggcacatatgaagaatggcgtgatcatatgtggagtgacgtagcagcctactttaacctcgacattgaaaacagtgaagataataaatctactctttcacttcaatttgtcgacagcgccgcggatatgccgcttgcgaaaatgcacggtgcgttttcaacgaacgtcgtagcaagcaaagaacttcaacagccaggcagtgcacgaagcacgcgacatcttgaaattgaacttccaaaagaagcttcttatcaagaaggagatcatttaggtgttattcctcgcaactatgaaggaatagtaaaccgtgtaacagcaaggttcggcctaagcgcatcacagcaaatccgtctggaagcagaagaagaaaaattagctcatttgccactcgctaaaacagtatccgtagaagagcttctgcaatacgtggagcttcaagatcctgttacgcgcacgcagcttcgcgcaatggctgctaaaacggtctgcccgccgcataaagtagagcttgaagccttgcttgaaaagcaagcctacaaagaacaagtgctggcaaaacgtttaacaatgcttgaactgcttgaaaaatacccggcgtgtgaaatgaaattcagcgaatttatcgcccttctgccaagcatacgcccgcgctattactcgatttcttcatcacctcgtgtcgatgaaaaacaagcaagcatcacggtcagcgttgtctcaggaccggcgtggagcggatatggagaatataaaggaattgcgtcgaactatcttgccgagctgcaagaaggagatacgattacgtgctttatttccacaccgcagtcagaatttacgctgccaaaagaccctgaaacgccgcttatcatggtcggaccgggaacaggcgtcgcgccgtttagaggctttgtgcaggcgcgcaaacagctaaaagaacaaggacagtcacttggagaagcacatttatacttcggctgccgttcacctcatgaagactatctgtatcaagaagagcttgaaaacgcccaaagcgaaggcatcattacgcttcataccgctttttctcgcatgccaaatcagccgaaaacatacgttcagcacgtaatggaacaagacggcaagaaattgattgaacttcttgatcaaggagcgcacttctatatttgcggagacggaagccaaatggcacctgccgttgaagcaacgcttatgaaaagctatgctgacgttcaccaagtgagtgaagcagacgctcgcttatggctgcagcagctagaagaaaaaggccgatacgcaaaagacgtgtgggctggg

SEQ ID NO: 220 - protein, 1049 aa, synthetic construct
  REGION 1..1049: note = variant of P450 oxidase from Bacillus megaterium
MTIKEMPQPKTFGELKNLPLLNTDKPVQALMRIADELGEIFKFEAPGSVTRYLSSQRLIKEACDESRFDKNLSQALKFARDFAGDGLATSWTHEPNWKKAHNILVPSFSQHAMGRYHAMMVDIAVQLVQKWERLNADEHIEVSEDMTRLTLDTIGLCGFNYRFNSFYRDQPHPFIVSMRRALDEVMNKLQRANPDDPAYDENKRQCQEDIKVMNDYVDKIIADRKARGEQSHDLLTQMLNGKDPETGEPLDDGNIRYQIITFLIAGHETTSGLLSFALYFLVKNPHVLQKVAEEAARVLVDPVPSYKQVKQLKYVGMVLNEALRLWPVAPMFSLYAKEDTVLGGEYPLTKGDEVMVLIPQLHRDKTIWGDDVEEFRPERFENPSAIPQHAFKPFGNGQRACIGQQFALHEATLVLGMMLKHFDFEDHTNYELVIKETRTLKPEGFVVKAKSKGIPLGGIPSPSTEQSAKKVRKKAENAHNTPLLVLYGSNAGTAEGTARDLADIAMSKGFAPQVATLDSHAGNLPREGAVLIVTASYNGHPPDNAKQFVDWLDQASADEVKGVRYSVFGCGDKNWAATYQKVPAFIDETLAAKGAENIADRGEADASDDFEGTYEEWRDHMWSDVAAYFNLDIENSEDNKSTLSLQFVDSAADMPLAKMHGAFSTNVVASKELQQPGSARSTRHLEIELPKEASYQEGDHLGVIPRNYEGIVNRVTARFGLSASQQIRLEAEEEKLAHLPLAKTVSVEELLQYVELQDPVTRTQLRAMAAKTVCPPHKVELEALLEKQAYKEQVLAKRLTMLELLEKYPACEMKFSEFIALLPSIRPRYYSISSSPRVDEKQASITVSVVSGPAWSGYGEYKGIASNYLAELQEGDTITCFISTPQSEFTLPKDPETPLIMVGPGTGVAPFRGFVQARKQLKEQGQSLGEAHLYFGCRSPHEDYLYQEELENAQSEGIITLHTAFSRMPNQPKTYVQHVMEQDGKKLIELLDQGAHFYICGDGSQMAPAVEATLMKSYADVHQVSEADARLWLQQLEEKGRYAKDVWAG

SEQ ID NO: 221 - DNA, 3147 bp, synthetic construct
  misc_feature 1..3147: note = variant of P450 oxidase from Bacillus megaterium
  source 1..3147: mol_type = other DNA
atgacaattaaggaaatgcctcagcctaagacgtttggagaacttaaaaatttaccgttattaaacacagataaaccggttcaagctttgatgcgtattgcggatgaattaggagaaatctttaaattcgaggcgcctggtagcgtaacgcgctatttatcaagtcagcgtctaattaaagaagcatgcgatgaatcacgctttgataaaaacttaagtcaagcgcttaaatttattcgtgattttgtaggagacgggttagccacaagctggacgcatgaaccgaattggaaaaaagcgcataatatcttagttccaagctttagtcagcatgcaatggggcgttatcatgcgatgatggtcgatatcgccgtgcagcttgttcaaaagtgggagcgtctaaatgcagatgagcatattgaagtatcggaagacatgacacgtttaacgcttgatacaattggtctttgcggctttaactatcgctttaacagcttttaccgagatcagcctcatccatttattgtgagtatggtccgtgcactggatgaagtaatgaacaagctgcagcgagcaaatccagacgacccagcttatgatgaaaacaagcgccagtgtcaagaagatatcaaggtgatgaacgactatgtagataaaattattgcagatcgcaaagcaaggggtgaacaaagtcatgatttattaacgcagatgctaaacggaaaagatccagaaacgggtgagccgcttgatgacgggaacattcgttatcaaattattacattcttaattgcgggacaccaaacaacaagtggtcttttatcatttgcgctgtatttcttagtgaaaaatccacatgtattacaaaaagtagcagaagaagcagcacgagttctagtagatcctgttccaagctacaaacaagtcaaacagcttaaatatgtcggcatggtcttaaacgaagcgctgcgcttatggccagtagcgcctatgttttccctatatgcaaaagaagatacggtgcttggaggagaatatcctttaacgaaaggcgacgaagtaatggttctggtgcctcagcttcaccgtgataaaacaatttggggagacgatgtggaggagttccgtccagagcgttttgaaaatccaagtgcgattccgcagcatgcgtttaaaccgtttggaaacggtcagcgtgcgtgtatcggtcagcagttcgctcttcatgaagcaacgctggtacttggtatgatgctaaaacactttgactttgaagatcatacaaactacgagctcgttattaaagaaactcggacgttaaaacctgaaggctttgtggtaaaagcaaaatcgaaaggcattccgcttggcggtattccttcacctagcactgaacagtctgctaaaaaagtacgcaaaaaggcagaaaacgctcataatacgccgctgcttgtgctatacggttcaaatgcgggaacagctgaaggaacggcgcgtgatttagcagatattgcaatgagcaaaggatttgcaccgcaggtcgcaacgcttgattcacacgccggaaatcttccgcgcgaaggagctgtattaattgtaacggcgtcttataacggtcatccgcctgataacgcaaagcaatttgtcgactggttagaccaagcgtctgctgatgaagtaaaaggcgttcgctactccgtatttggatgcggcgataaaaattgggctgcgacgtatcaaaaagtgcctgcttttatcgatgaaacgcttgccgctaaaggggcagaaaacatcgctgaccgcggtgaagcagatgcaagcgacgactttgaaggcacatatgaagaatggcgtgatcatatgtggagtgacgtagcagcctactttaacctcgacattgaaaacagtgaagataataaatctactctttcacttcaatttgtcgacagcgccgcggatatgccgcttgcgaaaatgcacggtgcgttttcaacgaacgtcgtagcaagcaaagaacttcaacagccaggcagtgcacgaagcacgcgacatcttgaaattgaacttccaaaagaagcttcttatcaagaaggagatcatttaggtgttattcctcgcaactatgaaggaatagtaaaccgtgtaacagcaaggttcggcctaagcgcatcacagcaaatccgtctggaagcagaagaagaaaaattagctcatttgccactcgctaaaacagtatccgtagaagagcttctgcaatacgtggagcttcaagatcctgttacgcgcacgcagcttcgcgcaatggctgctaaaacggtctgcccgccgcataaagtagagcttgaagccttgcttgaaaagcaagcctacaaagaacaagtgctggcaaaacgtttaacaatgcttgaactgcttgaaaaatacccggcgtgtgaaatgaaattcagcgaatttatcgcccttctgccaagcatacgcccgcgctattactcgatttcttcatcacctcgtgtcgatgaaaaacaagcaagcatcacggtcagcgttgtctcaggaccggcgtggagcggatatggagaatataaaggaattgcgtcgaactatcttgccgagctgcaagaaggagatacgattacgtgctttatttccacaccgcagtcagaatttacgctgccaaaagaccctgaaacgccgcttatcatggtcggaccgggaacaggcgtcgcgccgtttagaggctttgtgcaggcgcgcaaacagctaaaagaacaaggacagtcacttggagaagcacatttatacttcggctgccgttcacctcatgaagactatctgtatcaagaagagcttgaaaacgcccaaagcgaaggcatcattacgcttcataccgctttttctcgcatgccaaatcagccgaaaacatacgttcagcacgtaatggaacaagacggcaagaaattgattgaacttcttgatcaaggagcgcacttctatatttgcggagacggaagccaaatggcacctgccgttgaagcaacgcttatgaaaagctatgctgacgttcaccaagtgagtgaagcagacgctcgcttatggctgcagcagctagaagaaaaaggccgatacgcaaaagacgtgtgggctggg

SEQ ID NO: 222 - protein, 1049 aa, synthetic construct
  REGION 1..1049: note = variant of P450 oxidase from Bacillus megaterium
MTIKEMPQPKTFGELKNLPLLNTDKPVQALMRIADELGEIFKFEAPGSVTRYLSSQRLIKEACDESRFDKNLSQALKFIRDFVGDGLATSWTHEPNWKKAHNILVPSFSQHAMGRYHAMMVDIAVQLVQKWERLNADEHIEVSEDMTRLTLDTIGLCGFNYRFNSFYRDQPHPFIVSMVRALDEVMNKLQRANPDDPAYDENKRQCQEDIKVMNDYVDKIIADRKARGEQSHDLLTQMLNGKDPETGEPLDDGNIRYQIITFLIAGHQTTSGLLSFALYFLVKNPHVLQKVAEEAARVLVDPVPSYKQVKQLKYVGMVLNEALRLWPVAPMFSLYAKEDTVLGGEYPLTKGDEVMVLVPQLHRDKTIWGDDVEEFRPERFENPSAIPQHAFKPFGNGQRACIGQQFALHEATLVLGMMLKHFDFEDHTNYELVIKETRTLKPEGFVVKAKSKGIPLGGIPSPSTEQSAKKVRKKAENAHNTPLLVLYGSNAGTAEGTARDLADIAMSKGFAPQVATLDSHAGNLPREGAVLIVTASYNGHPPDNAKQFVDWLDQASADEVKGVRYSVFGCGDKNWAATYQKVPAFIDETLAAKGAENIADRGEADASDDFEGTYEEWRDHMWSDVAAYFNLDIENSEDNKSTLSLQFVDSAADMPLAKMHGAFSTNVVASKELQQPGSARSTRHLEIELPKEASYQEGDHLGVIPRNYEGIVNRVTARFGLSASQQIRLEAEEEKLAHLPLAKTVSVEELLQYVELQDPVTRTQLRAMAAKTVCPPHKVELEALLEKQAYKEQVLAKRLTMLELLEKYPACEMKFSEFIALLPSIRPRYYSISSSPRVDEKQASITVSVVSGPAWSGYGEYKGIASNYLAELQEGDTITCFISTPQSEFTLPKDPETPLIMVGPGTGVAPFRGFVQARKQLKEQGQSLGEAHLYFGCRSPHEDYLYQEELENAQSEGIITLHTAFSRMPNQPKTYVQHVMEQDGKKLIELLDQGAHFYICGDGSQMAPAVEATLMKSYADVHQVSEADARLWLQQLEEKGRYAKDVWAG

SEQ ID NO: 223 - DNA, 3147 bp, synthetic construct
  misc_feature 1..3147: note = variant of P450 oxidase from Bacillus megaterium
  source 1..3147: mol_type = other DNA
atgacaattaaggaaatgcctcagcctaagacgtttggagaacttaaaaatttaccgttattaaacacagataaaccggttcaagctttgatgcgtattgcggatgaattaggagaaatctttaaattcgaggcgcctggtagcgtaacgcgctatttatcaagtcagcgtctaattaaagaagcatgcgatgaatcacgctttgataaaaacttaagtcaagcgcttaaatttgcacgtgattttgttggagacgggttagccacaagctggacgcatgaaccgaattggaaaaaagcgcataatatcttagttccaagctttagtcagcatgcaatggggcgttatcatgcgatgatggtcgatatcgccgtgcagcttgttcaaaagtgggagcgtctaaatgcagatgagcatattgaagtatcggaagacatgacacgtttaacgcttgatacaattggtctttgcggctttaactatcgctttaacagcttttaccgagatcagcctcatccatttattgtgagtatggtccgtgcactggatgaagtaatgaacaagctgcagcgagcaaatccagacgacccagcttatgatgaaaacaagcgccagtgtcaagaagatatcaaggtggtgaacgactatgtagataaaattattgcagatcgcaaagcaaggggtgaacaaagtcatgatttattaacgcagatgctaaacggaaaagatccagaaacgggtgagccgcttgatgacgggaacattcgttatcaaattattacattcttaattgcgggacaccaaacaacaagtggtcttttatcatttgcgctgtatttcttagtgaaaaatccacatgtattacaaaaagtagcagaagaagcagcacgagttctagtagatcctgttccaagctacaaacaagtcaaacagcttaaatatgtcggcatggtcttaaacgaagcgctgcgcttatggccagtagcgcctatgttttccctatatgcaaaagaagatacggtgcttggaggagaatatcctttaacgaaaggcgacgaagtaatggttctggtgcctcagcttcaccgtgataaaacaatttggggagacgatgtggaggagttccgtccagagcgttttgaaaatccaagtgcgattccgcagcatgcgtttaaaccgtttggaaacggtcagcgtgcgtgtatcggtcagcagttcgctcttcatgaagcaacgctggtacttggtatgatgctaaaacactttgactttgaagatcatacaaactacgagctcgttattaaagaaactcggacgttaaaacctgaaggctttgtggtaaaagcaaaatcgaaaggcattccgcttggcggtattccttcacctagcactgaacagtctgctaaaaaagtacgcaaaaaggcagaaaacgctcataatacgccgctgcttgtgctatacggttcaaatgcgggaacagctgaaggaacggcgcgtgatttagcagatattgcaatgagcaaaggatttgcaccgcaggtcgcaacgcttgattcacacgccggaaatcttccgcgcgaaggagctgtattaattgtaacggcgtcttataacggtcatccgcctgataacgcaaagcaatttgtcgactggttagaccaagcgtctgctgatgaagtaaaaggcgttcgctactccgtatttggatgcggcgataaaaattgggctgcgacgtatcaaaaagtgcctgcttttatcgatgaaacgcttgccgctaaaggggcagaaaacatcgctgaccgcggtgaagcagatgcaagcgacgactttgaaggcacatatgaagaatggcgtgatcatatgtggagtgacgtagcagcctactttaacctcgacattgaaaacagtgaagataataaatctactctttcacttcaatttgtcgacagcgccgcggatatgccgcttgcgaaaatgcacggtgcgttttcaacgaacgtcgtagcaagcaaagaacttcaacagccaggcagtgcacgaagcacgcgacatcttgaaattgaacttccaaaagaagcttcttatcaagaaggagatcatttaggtgttattcctcgcaactatgaaggaatagtaaaccgtgtaacagcaaggttcggcctaagcgcatcacagcaaatccgtctggaagcagaagaagaaaaattagctcatttgccactcgctaaaacagtatccgtagaagagcttctgcaatacgtggagcttcaagatcctgttacgcgcacgcagcttcgcgcaatggctgctaaaacggtctgcccgccgcataaagtagagcttgaagccttgcttgaaaagcaagcctacaaagaacaagtgctggcaaaacgtttaacaatgcttgaactgcttgaaaaatacccggcgtgtgaaatgaaattcagcgaatttatcgcccttctgccaagcatacgcccgcgctattactcgatttcttcatcacctcgtgtcgatgaaaaacaagcaagcatcacggtcagcgttgtctcaggaccggcgtggagcggatatggagaatataaaggaattgcgtcgaactatcttgccgagctgcaagaaggagatacgattacgtgctttatttccacaccgcagtcagaatttacgctgccaaaagaccctgaaacgccgcttatcatggtcggaccgggaacaggcgtcgcgccgtttagaggctttgtgcaggcgcgcaaacagctaaaagaacaaggacagtcacttggagaagcacatttatacttcggctgccgttcacctcatgaagactatctgtatcaagaagagcttgaaaacgcccaaagcgaaggcatcattacgcttcataccgctttttctcgcatgccaaatcagccgaaaacatacgttcagcacgtaatggaacaagacggcaagaaattgattgaacttcttgatcaaggagcgcacttctatatttgcggagacggaagccaaatggcacctgccgttgaagcaacgcttatgaaaagctatgctgacgttcaccaagtgagtgaagcagacgctcgcttatggctgcagcagctagaagaaaaaggccgatacgcaaaagacgtgtgggctggg

SEQ ID NO: 224 - protein, 1049 aa, synthetic construct
  REGION 1..1049: note = variant of P450 oxidase from Bacillus megaterium
MTIKEMPQPKTFGELKNLPLLNTDKPVQALMRIADELGEIFKFEAPGSVTRYLSSQRLIKEACDESRFDKNLSQALKFARDFVGDGLATSWTHEPNWKKAHNILVPSFSQHAMGRYHAMMVDIAVQLVQKWERLNADEHIEVSEDMTRLTLDTIGLCGFNYRFNSFYRDQPHPFIVSMVRALDEVMNKLQRANPDDPAYDENKRQCQEDIKVVNDYVDKIIADRKARGEQSHDLLTQMLNGKDPETGEPLDDGNIRYQIITFLIAGHQTTSGLLSFALYFLVKNPHVLQKVAEEAARVLVDPVPSYKQVKQLKYVGMVLNEALRLWPVAPMFSLYAKEDTVLGGEYPLTKGDEVMVLVPQLHRDKTIWGDDVEEFRPERFENPSAIPQHAFKPFGNGQRACIGQQFALHEATLVLGMMLKHFDFEDHTNYELVIKETRTLKPEGFVVKAKSKGIPLGGIPSPSTEQSAKKVRKKAENAHNTPLLVLYGSNAGTAEGTARDLADIAMSKGFAPQVATLDSHAGNLPREGAVLIVTASYNGHPPDNAKQFVDWLDQASADEVKGVRYSVFGCGDKNWAATYQKVPAFIDETLAAKGAENIADRGEADASDDFEGTYEEWRDHMWSDVAAYFNLDIENSEDNKSTLSLQFVDSAADMPLAKMHGAFSTNVVASKELQQPGSARSTRHLEIELPKEASYQEGDHLGVIPRNYEGIVNRVTARFGLSASQQIRLEAEEEKLAHLPLAKTVSVEELLQYVELQDPVTRTQLRAMAAKTVCPPHKVELEALLEKQAYKEQVLAKRLTMLELLEKYPACEMKFSEFIALLPSIRPRYYSISSSPRVDEKQASITVSVVSGPAWSGYGEYKGIASNYLAELQEGDTITCFISTPQSEFTLPKDPETPLIMVGPGTGVAPFRGFVQARKQLKEQGQSLGEAHLYFGCRSPHEDYLYQEELENAQSEGIITLHTAFSRMPNQPKTYVQHVMEQDGKKLIELLDQGAHFYICGDGSQMAPAVEATLMKSYADVHQVSEADARLWLQQLEEKGRYAKDVWAG

SEQ ID NO: 225 - DNA, 3147 bp, synthetic construct
  misc_feature 1..3147: note = variant of P450 oxidase from Bacillus megaterium
  source 1..3147: mol_type = other DNA
atgacaattaaggaaatgcctcagcctaagacgtttggagaacttaaaaatttaccgttattaaacacagataaaccggttcaagctttgatgcgtattgcggatgaattaggagaaatctttaaattcgaggcgcctggtagcgtaacgcgctatttatcaagtcagcgtctaattaaagaagcatgcgatgaatcacgctttgataaaaacttaagtcaagcgcttaaatttgcacgtgattttgttggagacgggttagccacaagctggacgcatgaaccgaattggaaaaaagcgcataatatcttagttccaagctttagtcagcatgcaatggggcgttatcatgcgatgatggtcgatatcgccgtgcagcttgttcaaaagtgggagcgtctaaatgcagatgagcatattgaagtatcggaagacatgacacgtttaacgcttgatacaattggtctttgcggctttaactatcgctttaacagcttttaccgagatcagcctcatccatttattgtgagtatggtccgtgcactggatgaagtaatgaacaagctgcagcgagcaaatccagacgacccagcttatgatgaaaacaagcgccagtgtcaagaagatatcaaggtgatgaacgactatgtagataaaattattgcagatcgcaaagcaaggggtgaacaaagtcatgatttattaacgcagatgctaaacggaaaagatccagaaacgggtgagccgcttgatgacgggaacattcgtcagcaaattattacattcttaattgcgggacaccaaacaacaagtggtcttttatcatttgcgctgtatttcttagtgaaaaatccacatgtattacaaaaagtagcagaagaagcagcacgagttctagtagatcctgttccaagctacaaacaagtcaaacagcttaaatatgtcggcatggtcttaaacgaagcgctgcgcttatggccagtagcgcctatgttttccctatatgcaaaagaagatacggtgcttggaggagaatatcctttaacgaaaggcgacgaagtaatggttctggtgcctcagcttcaccgtgataaaacaatttggggagacgatgtggaggagttccgtccagagcgttttgaaaatccaagtgcgattccgcagcatgcgtttaaaccgtttggaaacggtcagcgtgcgtgtatcggtcagcagttcgctcttcatgaagcaacgctggtacttggtatgatgctaaaacactttgactttgaagatcatacaaactacgagctcgttattaaagaaactcggacgttaaaacctgaaggctttgtggtaaaagcaaaatcgaaaggcattccgcttggcggtattccttcacctagcactgaacagtctgctaaaaaagtacgcaaaaaggcagaaaacgctcataatacgccgctgcttgtgctatacggttcaaatgcgggaacagctgaaggaacggcgcgtgatttagcagatattgcaatgagcaaaggatttgcaccgcaggtcgcaacgcttgattcacacgccggaaatcttccgcgcgaaggagctgtattaattgtaacggcgtcttataacggtcatccgcctgataacgcaaagcaatttgtcgactggttagaccaagcgtctgctgatgaagtaaaaggcgttcgctactccgtatttggatgcggcgataaaaattgggctgcgacgtatcaaaaagtgcctgcttttatcgatgaaacgcttgccgctaaaggggcagaaaacatcgctgaccgcggtgaagcagatgcaagcgacgactttgaaggcacatatgaagaatggcgtgatcatatgtggagtgacgtagcagcctactttaacctcgacattgaaaacagtgaagataataaatctactctttcacttcaatttgtcgacagcgccgcggatatgccgcttgcgaaaatgcacggtgcgttttcaacgaacgtcgtagcaagcaaagaacttcaacagccaggcagtgcacgaagcacgcgacatcttgaaattgaacttccaaaagaagcttcttatcaagaaggagatcatttaggtgttattcctcgcaactatgaaggaatagtaaaccgtgtaacagcaaggttcggcctaagcgcatcacagcaaatccgtctggaagcagaagaagaaaaattagctcatttgccactcgctaaaacagtatccgtagaagagcttctgcaatacgtggagcttcaagatcctgttacgcgcacgcagcttcgcgcaatggctgctaaaacggtctgcccgccgcataaagtagagcttgaagccttgcttgaaaagcaagcctacaaagaacaagtgctggcaaaacgtttaacaatgcttgaactgcttgaaaaatacccggcgtgtgaaatgaaattcagcgaatttatcgcccttctgccaagcatacgcccgcgctattactcgatttcttcatcacctcgtgtcgatgaaaaacaagcaagcatcacggtcagcgttgtctcaggaccggcgtggagcggatatggagaatataaaggaattgcgtcgaactatcttgccgagctgcaagaaggagatacgattacgtgctttatttccacaccgcagtcagaatttacgctgccaaaagaccctgaaacgccgcttatcatggtcggaccgggaacaggcgtcgcgccgtttagaggctttgtgcaggcgcgcaaacagctaaaagaacaaggacagtcacttggagaagcacatttatacttcggctgccgttcacctcatgaagactatctgtatcaagaagagcttgaaaacgcccaaagcgaaggcatcattacgcttcataccgctttttctcgcatgccaaatcagccgaaaacatacgttcagcacgtaatggaacaagacggcaagaaattgattgaacttcttgatcaaggagcgcacttctatatttgcggagacggaagccaaatggcacctgccgttgaagcaacgcttatgaaaagctatgctgacgttcaccaagtgagtgaagcagacgctcgcttatggctgcagcagctagaagaaaaaggccgatacgcaaaagacgtgtgggctggg

SEQ ID NO: 226 - protein, 1049 aa, synthetic construct
  REGION 1..1049: note = variant of P450 oxidase from Bacillus megaterium
MTIKEMPQPKTFGELKNLPLLNTDKPVQALMRIADELGEIFKFEAPGSVTRYLSSQRLIKEACDESRFDKNLSQALKFARDFVGDGLATSWTHEPNWKKAHNILVPSFSQHAMGRYHAMMVDIAVQLVQKWERLNADEHIEVSEDMTRLTLDTIGLCGFNYRFNSFYRDQPHPFIVSMVRALDEVMNKLQRANPDDPAYDENKRQCQEDIKVMNDYVDKIIADRKARGEQSHDLLTQMLNGKDPETGEPLDDGNIRQQIITFLIAGHQTTSGLLSFALYFLVKNPHVLQKVAEEAARVLVDPVPSYKQVKQLKYVGMVLNEALRLWPVAPMFSLYAKEDTVLGGEYPLTKGDEVMVLVPQLHRDKTIWGDDVEEFRPERFENPSAIPQHAFKPFGNGQRACIGQQFALHEATLVLGMMLKHFDFEDHTNYELVIKETRTLKPEGFVVKAKSKGIPLGGIPSPSTEQSAKKVRKKAENAHNTPLLVLYGSNAGTAEGTARDLADIAMSKGFAPQVATLDSHAGNLPREGAVLIVTASYNGHPPDNAKQFVDWLDQASADEVKGVRYSVFGCGDKNWAATYQKVPAFIDETLAAKGAENIADRGEADASDDFEGTYEEWRDHMWSDVAAYFNLDIENSEDNKSTLSLQFVDSAADMPLAKMHGAFSTNVVASKELQQPGSARSTRHLEIELPKEASYQEGDHLGVIPRNYEGIVNRVTARFGLSASQQIRLEAEEEKLAHLPLAKTVSVEELLQYVELQDPVTRTQLRAMAAKTVCPPHKVELEALLEKQAYKEQVLAKRLTMLELLEKYPACEMKFSEFIALLPSIRPRYYSISSSPRVDEKQASITVSVVSGPAWSGYGEYKGIASNYLAELQEGDTITCFISTPQSEFTLPKDPETPLIMVGPGTGVAPFRGFVQARKQLKEQGQSLGEAHLYFGCRSPHEDYLYQEELENAQSEGIITLHTAFSRMPNQPKTYVQHVMEQDGKKLIELLDQGAHFYICGDGSQMAPAVEATLMKSYADVHQVSEADARLWLQQLEEKGRYAKDVWAG

SEQ ID NO: 227 - DNA, 3147 bp, synthetic construct
  misc_feature 1..3147: note = variant of P450 oxidase from Bacillus megaterium
  source 1..3147: mol_type = other DNA
atgacaattaaggaaatgcctcagcctaagacgtttggagaacttaaaaatttaccgttattaaacacagataaaccggttcaagctttgatgcgtattgcggatgaattaggagaaatctttaaattcgaggcgcctggtagcgtaacgcgctatttatcaagtcagcgtctaattaaagaagcatgcgatgaatcacgctttgataaaaacttaagtcaagcgcttaaatttgcacgtgattttgttggagacgggttagccacaagctggacgcatgaaccgaattggaaaaaagcgcataatatcttagttccaagctttagtcagcatgcaatggggcgttatcatgcgatgatggtcgatatcgccgtgcagcttgttcaaaagtgggagcgtctaaatgcagatgagcatattgaagtatcggaagacatgacacgtttaacgcttgatacaattggtctttgcggctttaactatcgctttaacagcttttaccgagatcagcctcatccatttattgtgagtatggtccgtgcactggatgaagtaatgaacaagctgcagcgagcaaatccagacgacccagcttatgatgaaaacaagcgccagtgtcaagaagatatcaaggtgatgaacgactatgtagataaaattattgcagatcgcaaagcaaggggtgaacaaagtcatgatttattaacgcagatgctaaacggaaaagatccagaaacgggtgagccgcttgatgacgggaacattcgtcagcaaattattacattcttaattgcgggacaccaaacaacaagtggtcttttatcatttgcgctgtatttcttagtgaaaaatccacatgtattacaaaaagtagcagaagaagcagcacgagttctagtagatcctgttccaagctacaaacaagtcaaacagcttaaatatgtcggcatggtcttaaacgaagcgctgcgcttatggccagtagcgcctatgttttccctatatgcaaaagaagatacggtgcttggaggagaatatcctttaacgaaaggcgacgaagtaatggttctggtgcctcagcttcaccgtgataaaacaatttggggagacgatgtggaggagttccgtccagagcgttttgaaaatccaagtgcgattccgcagcatgcgtttaaaccgtttggaaacggtcagcgtgcgtgtatcggtcagcagttcgctcttcatgaagcaacgctggtacttggtatgatgctaaaacactttgactttgaagatcatacaaactacgagctcgttattaaagaaactcggacgttaaaacctgaaggctttgtggtaaaagcaaaatcgaaaggcattccgcttggcggtattccttcacctagcactgaacagtctgctaaaaaagtacgcaaaaaggcagaaaacgctcataatacgccgctgcttgtgctatacggttcaaatgcgggaacagctgaaggaacggcgcgtgatttaactgatattgcaatgagcaaaggatttgcaccgcaggtcgcaacgcttgattcacacgccggaaatcttccgcgcgaaggagctgtattaattgtaacggcgtcttataacggtcatccgcctgataacgcaaagcaatttgtcgactggttagaccaagcgtctgctgatgaagtaaaaggcgttcgctactccgtatttggatgcggcgataaaaattgggctgcgacgtatcaaaaagtgcctgcttttatcgatgaaacgcttgccgctaaaggggcagaaaacatcgctgaccgcggtgaagcagatgcaagcgacgactttgaaggcacatatgaagaatggcgtgatcatatgtggagtgacgtagcagcctactttaacctcgacattgaaaacagtgaagataataaatctactctttcacttcaatttgtcgacagcgccgcggatatgccgcttgcgaaaatgcacggtgcgttttcaacgaacgtcgtagcaagcaaagaacttcaacagccaggcagtgcacgaagcacgcgacatcttgaaattgaacttccaaaagaagcttcttatcaagaaggagatcatttaggtgttattcctcgcaactatgaaggaatagtaaaccgtgtaacagcaaggttcggcctaagcgcatcacagcaaatccgtctggaagcagaagaagaaaaattagctcatttgccactcgctaaaacagtatccgtagaagagcttctgcaatacgtggagcttcaagatcctgttacgcgcacgcagcttcgcgcaatggctgctaaaacggtctgcccgccgcataaagtagagcttgaagccttgcttgaaaagcaagcctacaaagaacaagtgctggcaaaacgtttaacaatgcttgaactgcttgaaaaatacccggcgtgtgaaatgaaattcagcgaatttatcgcccttctgccaagcatacgcccgcgctattactcgatttcttcatcgcctcgtgtcgatgaaaaacaagcaagcatcacggtcagcgttgtctcaggaccggcgtggagcggatatggagaatataaaggaattgcgtcgaactatcttgccgagctgcaagaaggagatacgattacgtgctttatttccacaccgcagtcagaatttacgctgccaaaagaccctgaaacgccgcttatcatggtcggaccgggaacaggcgtcgcgccgtttagaggctttgtgcaggcgcgcaaacagctaaaagaacaaggacagtcacttggagaagcacatttatacttcggctgccgttcacctcatgaagactatctgtatcaagaagagcttgaaaacgcccaaagcgaaggcatcattacgcttcataccgctttttctcgcatgccaaatcagccgaaaacatacgttcagcacgtaatggaacaagacggcaagaaattgattgaacttcttgatcaaggagcgcacttctatatttgcggagacggaagccaaatggcacctgccgttgaagcaacgcttatgaaaagctatgctgacgttcaccaagtgagtgaagcagacgctcgcttatggctgcagcagctagaagaaaaaggccgatacgcaaaagacgtgtgggctggg

SEQ ID NO: 228 - protein, 1049 aa, synthetic construct
  REGION 1..1049: note = variant of P450 oxidase from Bacillus megaterium
MTIKEMPQPKTFGELKNLPLLNTDKPVQALMRIADELGEIFKFEAPGSVTRYLSSQRLIKEACDESRFDKNLSQALKFARDFVGDGLATSWTHEPNWKKAHNILVPSFSQHAMGRYHAMMVDIAVQLVQKWERLNADEHIEVSEDMTRLTLDTIGLCGFNYRFNSFYRDQPHPFIVSMVRALDEVMNKLQRANPDDPAYDENKRQCQEDIKVMNDYVDKIIADRKARGEQSHDLLTQMLNGKDPETGEPLDDGNIRQQIITFLIAGHQTTSGLLSFALYFLVKNPHVLQKVAEEAARVLVDPVPSYKQVKQLKYVGMVLNEALRLWPVAPMFSLYAKEDTVLGGEYPLTKGDEVMVLVPQLHRDKTIWGDDVEEFRPERFENPSAIPQHAFKPFGNGQRACIGQQFALHEATLVLGMMLKHFDFEDHTNYELVIKETRTLKPEGFVVKAKSKGIPLGGIPSPSTEQSAKKVRKKAENAHNTPLLVLYGSNAGTAEGTARDLTDIAMSKGFAPQVATLDSHAGNLPREGAVLIVTASYNGHPPDNAKQFVDWLDQASADEVKGVRYSVFGCGDKNWAATYQKVPAFIDETLAAKGAENIADRGEADASDDFEGTYEEWRDHMWSDVAAYFNLDIENSEDNKSTLSLQFVDSAADMPLAKMHGAFSTNVVASKELQQPGSARSTRHLEIELPKEASYQEGDHLGVIPRNYEGIVNRVTARFGLSASQQIRLEAEEEKLAHLPLAKTVSVEELLQYVELQDPVTRTQLRAMAAKTVCPPHKVELEALLEKQAYKEQVLAKRLTMLELLEKYPACEMKFSEFIALLPSIRPRYYSISSSPRVDEKQASITVSVVSGPAWSGYGEYKGIASNYLAELQEGDTITCFISTPQSEFTLPKDPETPLIMVGPGTGVAPFRGFVQARKQLKEQGQSLGEAHLYFGCRSPHEDYLYQEELENAQSEGIITLHTAFSRMPNQPKTYVQHVMEQDGKKLIELLDQGAHFYICGDGSQMAPAVEATLMKSYADVHQVSEADARLWLQQLEEKGRYAKDVWAG

SEQ ID NO: 229 - DNA, 3147 bp, synthetic construct
  misc_feature 1..3147: note = variant of P450 oxidase from Bacillus megaterium
  source 1..3147: mol_type = other DNA
atgacaattaaggaaatgcctcagcctaagacgtttggagaacttaaaaatttaccgttattaaacacagataaaccggttcaagctttgatgcgtattgcggatgaattaggagaaatctttaaattcgaggcgcctggtagcgtaacgcgctatttatcaagtcagcgtctaattaaagaagcatgcgatgaatcacgctttgataaaaacttaagtcaagcgcttaaatttgcacgtgattttgttggagacgggttagccacaagctggacgcatgaaccgaattggaaaaaagcgcataatatcttagttccaagctttagtcagcatgcaatggggcgttatcatgcgatgatggtcgatatcgccgtgcagcttgttcaaaagtgggagcgtctaaatgcagatgagcatattgaagtatcggaagacatgacacgtttaacgcttgatacaattggtctttgcggctttaactatcgctttaacagcttttaccgagatcagcctcatccatttattgtgagtatggtccgtgcactggatgaagtaatgaacaagctgcagcgagcaaatccagacgacccagcttatgatgaaaacaagcgccagtgtcaagaagatatcaaggtgatgaacgactatgtagataaaattattgcagatcgcaaagcaaggggtgaacaaagtcatgatttattaacgcagatgctaaacggaaaagatccagaaacgggtgagccgcttgatgacgggaacattcgtcagcaaattattacattcttaattgcgggacaccaaacaacaagtggtcttttatcatttgcgctgtatttcttagtgaaaaatccacatgtattacaaaaagtagcagaagaagcagcacgagttctagtagatcctgttccaagctacaaacaagtcaaacagcttaaatatgtcggcatggtcttaaacgaagcgctgcgcttatggccagtagcgcctatgttttccctatatgcaaaagaagatacggtgcttggaggagaatatcctttaacgaaaggcgacgaagtaatggttctggtgcctcagcttcaccgtgataaaacaatttggggagacgatgtggaggagttccgtccagagcgttttgaaaatccaagtcggattccgcagcatgcgtttaaaccgtttggaaacggtcagcgtgcgtgtatcggtcagcagttcgctcttcatgaagcaacgctggtacttggtatgatgctaaaacactttgactttgaagatcatacaaactacgagctcgttattaaagaaactcggacgttaaaacctgaaggctttgtggtaaaagcaaaatcgaaaggcattccgcttggcggtattccttcacctagcactgaacagtctgctaaaaaagtacgcaaaaaggcagaaaacgctcataatacgccgctgcttgtgctatacggttcaaatgcgggaacagctgaaggaacggcgcgtgatttagcagatattgcaatgagcaaaggatttgcaccgcaggtcgcaacgcttgattcacacgccggaaatcttccgcgcgaaggagctgtattaattgtaacggcgtcttataacggtcatccgcctgataacgcaaagcaatttgtcgactggttagaccaagcgtctgctgatgaagtaaaaggcgttcgctactccgtatttggatgcggcgataaaaattgggctgcgacgtatcaaaaagtgcctgcttttatcgatgaaacgcttgccgctaaaggggcagaaaacatcgctgaccgcggtgaagcagatgcaagcgacgactttgaaggcacatatgaagaatggcgtgatcatatgtggagtgacgtagcagcctactttaacctcgacattgaaaacagtgaagataataaatctactctttcacttcaatttgtcgacagcgccgcggatatgccgcttgcgaaaatgcacggtgcgttttcaacgaacgtcgtagcaagcaaagaacttcaacagccaggcagtgcacgaagcacgcgacatcttgaaattgaacttccaaaagaagcttcttatcaagaaggagatcatttaggtgttattcctcgcaactatgaaggaatagtaaaccgtgtaacagcaaggttcggcctaagcgcatcacagcaaatccgtctggaagcagaagaagaaaaattagctcatttgccactcgctaaaacagtatccgtagaagagcttctgcaatacgtggagcttcaagatcctgttacgcgcacgcagcttcgcgcaatggctgctaaaacggtctgcccgccgcataaagtagagcttgaagccttgcttgaaaagcaagcctacaaagaacaagtgctggcaaaacgtttaacaatgcttgaactgcttgaaaaatacccggcgtgtgaaatgaaattcagcgaatttatcgcccttctgccaagcatacgcccgcgctattactcgatttcttcatcacctcgtgtcgatgaaaaacaagcaagcatcacggtcagcgttgtctcaggaccggcgtggagcggatatggagaatataaaggaattgcgtcgaactatcttgccgagctgcaagaaggagatacgattacgtgctttatttccacaccgcagtcagaatttacgctgccaaaagaccctgaaacgccgcttatcatggtcggaccgggaacaggcgtcgcgccgtttagaggctttgtgcaggcgcgcaaacagctaaaagaacaaggacagtcacttggagaagcacatttatacttcggctgccgttcacctcatgaagactatctgtatcaagaagagcttgaaaacgcccaaagcgaaggcatcattacgcttcataccgctttttctcgcatgccaaatcagccgaaaacatacgttcagcacgtaatggaacaagacggcaagaaattgattgaacttcttgatcaaggagcgcacttctatatttgcggagacggaagccaaatggcacctgccgttgaagcaacgcttatgaaaagctatgctgacgttcaccaagtgagtgaagcagacgctcgcttatggctgcagcagctagaagaaaaaggccgatacgcaaaagacgtgtgggctggg

SEQ ID NO: 230 - protein, 1049 aa, synthetic construct
  REGION 1..1049: note = variant of P450 oxidase from Bacillus megaterium
MTIKEMPQPKTFGELKNLPLLNTDKPVQALMRIADELGEIFKFEAPGSVTRYLSSQRLIKEACDESRFDKNLSQALKFARDFVGDGLATSWTHEPNWKKAHNILVPSFSQHAMGRYHAMMVDIAVQLVQKWERLNADEHIEVSEDMTRLTLDTIGLCGFNYRFNSFYRDQPHPFIVSMVRALDEVMNKLQRANPDDPAYDENKRQCQEDIKVMNDYVDKIIADRKARGEQSHDLLTQMLNGKDPETGEPLDDGNIRQQIITFLIAGHQTTSGLLSFALYFLVKNPHVLQKVAEEAARVLVDPVPSYKQVKQLKYVGMVLNEALRLWPVAPMFSLYAKEDTVLGGEYPLTKGDEVMVLVPQLHRDKTIWGDDVEEFRPERFENPSRIPQHAFKPFGNGQRACIGQQFALHEATLVLGMMLKHFDFEDHTNYELVIKETRTLKPEGFVVKAKSKGIPLGGIPSPSTEQSAKKVRKKAENAHNTPLLVLYGSNAGTAEGTARDLADIAMSKGFAPQVATLDSHAGNLPREGAVLIVTASYNGHPPDNAKQFVDWLDQASADEVKGVRYSVFGCGDKNWAATYQKVPAFIDETLAAKGAENIADRGEADASDDFEGTYEEWRDHMWSDVAAYFNLDIENSEDNKSTLSLQFVDSAADMPLAKMHGAFSTNVVASKELQQPGSARSTRHLEIELPKEASYQEGDHLGVIPRNYEGIVNRVTARFGLSASQQIRLEAEEEKLAHLPLAKTVSVEELLQYVELQDPVTRTQLRAMAAKTVCPPHKVELEALLEKQAYKEQVLAKRLTMLELLEKYPACEMKFSEFIALLPSIRPRYYSISSSPRVDEKQASITVSVVSGPAWSGYGEYKGIASNYLAELQEGDTITCFISTPQSEFTLPKDPETPLIMVGPGTGVAPFRGFVQARKQLKEQGQSLGEAHLYFGCRSPHEDYLYQEELENAQSEGIITLHTAFSRMPNQPKTYVQHVMEQDGKKLIELLDQGAHFYICGDGSQMAPAVEATLMKSYADVHQVSEADARLWLQQLEEKGRYAKDVWAG

SEQ ID NO: 231 - DNA, 3147 bp, synthetic construct
  misc_feature 1..3147: note = variant of P450 oxidase from Bacillus megaterium
  source 1..3147: mol_type = other DNA
atgacaattaaggaaatgcctcagcctaagacgtttggagaacttaaaaatttaccgttattaaacacagataaaccggttcaagctttgatgcgtattgcggatgaattaggagaaatctttaaattcgaggcgcctggtagcgtaacgcgctatttatcaagtcagcgtctaattaaagaagcatgcgatgaatcacgctttgataaaaacttaagtcaagcgcttaaatttgcacgtgattttgttggagacgggttagccacaagctggacgcatgaaccgaattggaaaaaagcgcataatatcttagttccaagctttagtcagcatgcaatggggcgttatcatgcgatgatggtcgatatcgccgtgcagcttgttcaaaagtgggagcgtctaaatgcagatgagcatattgaagtatcggaagacatgacacgtttaacgcttgatacaattggtctttgcggctttaactatcgctttaacagcttttaccgagatcagcctcatccatttattgtgagtatggtccgtgcactggatgaagtaatgaacaagctgcagcgagcaaatccagacgacccagcttatgatgaaaacaagcgccagtgtcaagaagatatcaaggtgatgaacgactatgtagataaaattattgcagatcgcaaagcaaggggtgaacaaagtcatgatttattaacgcagatgctaaacggaaaagatccagaaacgggtgagccgcttgatgacgggaacattcgtcagcaaattattacattcttaattgcgggacaccaaacaacaagtggtcttttatcatttgcgctgtatttcttagtgaaaaatccacatgtattacaaaaagtagcagaagaagcagcacgagttctagtagatcctgttccaagctacaaacaagtcaaacagcttaaatatgtcggcatggtcttaaacgaagcgctgcgcttatggccagtagcgcctatgttttccctatatgcaaaagaagatacggtgcttggaggagaatatcctttaacgaaaggcgacgaagtaatggttctggtgcctcagcttcaccgtgataaaacaatttggggagacgatgtggaggagttccgtccagagcgttttgaaaatccaagtgcgattccgcagcatgcgtttaaaccgtttggaaacggtcagcgtgcgtgtatcggtcagcagttcgctcttcatgaagcaacgctggtacttggtatgatgctaaaacactttgactttgaagatcatacaaactacgagctcgttattaaagaaactcggacgttaaaacctgaaggctttgtggtaaaagcaaaatcgaaaggcattccgcttggcggtattccttcacctagcactgaacagtctgctaaaaaagtacgcaaaaaggcagaaaacgctcataatacgccgctgcttgtgctatacggttcaaatgcgggaacagctgaaggaacggcgcgtgatttagcagatattgcaatgagcaaaggatttgcaccgcaggtcgcaacgcttgattcacacgccggaaatcttccgcgcgaaggagctgtattaattgtaacggcgtcttataacggtcatccgcctgataacgcaaaggtgtttgtcgactggttagaccaagcgtctgctgatgaagtaaaaggcgttcgctactccgtatttggatgcggcgataaaaattgggctgcgacgtatcaaaaagtgcctgcttttatcgatgaaacgcttgccgctaaaggggcagaaaacatcgctgaccgcggtgaagcagatgcaagcgacgactttgaaggcacatatgaagaatggcgtgatcatatgtggagtgacgtagcagcctactttaacctcgacattgaaaacagtgaagataataaatctactctttcacttcaatttgtcgacagcgccgcggatatgccgcttgcgaaaatgcacggtgcgttttcaacgaacgtcgtagcaagcaaagaacttcaacagccaggcagtgcacgaagcacgcgacatcttgaaattgaacttccaaaagaagcttcttatcaagaaggagatcatttaggtgttattcctcgcaactatgaaggaatagtaaaccgtgtaacagcaaggttcggcctaagcgcatcacagcaaatccgtctggaagcagaagaagaaaaattagctcatttgccactcgctaaaacagtatccgtagaagagcttctgcaatacgtggagcttcaagatcctgttacgcgcacgcagcttcgcgcaatggctgctaaaacggtctgcccgccgcataaagtagagcttgaagccttgcttgaaaagcaagcctacaaagaacaagtgctggcaaaacgtttaacaatgcttgaactgcttgaaaaatacccggcgtgtgaaatgaaattcagcgaatttatcgcccttctgccaagcatacgcccgcgctattactcgatttcttcatcacctcgtgtcgatgaaaaacaagcaagcatcacggtcagcgttgtctcaggaccggcgtggagcggatatggagaatataaaggaattgcgtcgaactatcttgccgagctgcaagaaggagatacgattacgtgctttatttccacaccgcagtcagaatttacgctgccaaaagaccctgaaacgccgcttatcatggtcggaccgggaacaggcgtcgcgccgtttagaggctttgtgcaggcgcgcaaacagctaaaagaacaaggacagtcacttggagaagcacatttatacttcggctgccgttcacctcatgaagactatctgtatcaagaagagcttgaaaacgcccaaagcgaaggcatcattacgcttcataccgctttttctcgcatgccaaatcagccgaaaacatacgttcagcacgtaatggaacaagacggcaagaaattgattgaacttcttgatcaaggagcgcacttctatatttgcggagacggaagccaaatggcacctgccgttgaagcaacgcttatgaaaagctatgctgacgttcaccaagtgagtgaagcagacgctcgcttatggctgcagcagctagaagaaaaaggccgatacgcaaaagacgtgtgggctggg

SEQ ID NO: 232 - protein, 1049 aa, synthetic construct
  REGION 1..1049: note = variant of P450 oxidase from Bacillus megaterium
MTIKEMPQPKTFGELKNLPLLNTDKPVQALMRIADELGEIFKFEAPGSVTRYLSSQRLIKEACDESRFDKNLSQALKFARDFVGDGLATSWTHEPNWKKAHNILVPSFSQHAMGRYHAMMVDIAVQLVQKWERLNADEHIEVSEDMTRLTLDTIGLCGFNYRFNSFYRDQPHPFIVSMVRALDEVMNKLQRANPDDPAYDENKRQCQEDIKVMNDYVDKIIADRKARGEQSHDLLTQMLNGKDPETGEPLDDGNIRQQIITFLIAGHQTTSGLLSFALYFLVKNPHVLQKVAEEAARVLVDPVPSYKQVKQLKYVGMVLNEALRLWPVAPMFSLYAKEDTVLGGEYPLTKGDEVMVLVPQLHRDKTIWGDDVEEFRPERFENPSAIPQHAFKPFGNGQRACIGQQFALHEATLVLGMMLKHFDFEDHTNYELVIKETRTLKPEGFVVKAKSKGIPLGGIPSPSTEQSAKKVRKKAENAHNTPLLVLYGSNAGTAEGTARDLADIAMSKGFAPQVATLDSHAGNLPREGAVLIVTASYNGHPPDNAKVFVDWLDQASADEVKGVRYSVFGCGDKNWAATYQKVPAFIDETLAAKGAENIADRGEADASDDFEGTYEEWRDHMWSDVAAYFNLDIENSEDNKSTLSLQFVDSAADMPLAKMHGAFSTNVVASKELQQPGSARSTRHLEIELPKEASYQEGDHLGVIPRNYEGIVNRVTARFGLSASQQIRLEAEEEKLAHLPLAKTVSVEELLQYVELQDPVTRTQLRAMAAKTVCPPHKVELEALLEKQAYKEQVLAKRLTMLELLEKYPACEMKFSEFIALLPSIRPRYYSISSSPRVDEKQASITVSVVSGPAWSGYGEYKGIASNYLAELQEGDTITCFISTPQSEFTLPKDPETPLIMVGPGTGVAPFRGFVQARKQLKEQGQSLGEAHLYFGCRSPHEDYLYQEELENAQSEGIITLHTAFSRMPNQPKTYVQHVMEQDGKKLIELLDQGAHFYICGDGSQMAPAVEATLMKSYADVHQVSEADARLWLQQLEEKGRYAKDVWAG

SEQ ID NO: 233 - DNA, 3147 bp, synthetic construct
  misc_feature 1..3147: note = variant of P450 oxidase from Bacillus megaterium
  source 1..3147: mol_type = other DNA
atgacaattaaggaaatgcctcagcctaagacgtttggagaacttaaaaatttaccgttattaaacacagataaaccggttcaagctttgatgcgtattgcggatgaattaggagaaatctttaaattcgaggcgcctggtagcgtaacgcgctatttatcaagtcagcgtctaattaaagaagcatgcgatgaatcacgctttgataaaaacttaagtcaagcgcttaaatttgcacgtgattttgttggagacgggttagccacaagctggacgcatgaaccgaattggaaaaaagcgcataatatcttagttccaagctttagtcagcatgcaatggggcgttatcatgcgatgatggtcgatatcgccgtgcagcttgttcaaaagtgggagcgtctaaatgcagatgagcatattgaagtatcggaagacatgacacgtttaacgcttgatacaattggtctttgcggctttaactatcgctttaacagcttttaccgagatcagcctcatccatttattgtgagtatggtccgtgcactggatgaagtaatgaacaagctgcagcgagcaaatccagacgacccagcttatgatgaaaacaagcgccagtgtcaagaagatatcaaggtgatgaacgactatgtagataaaattattgcagatcgcaaagcaaggggtgaacaaagtcatgatttattaacgcagatgctaaacggaaaagatccagaaacgggtgagccgcttgatgacgggaacattcgtcagcaaattattacattcttaattgcgggacaccaaacaacaagtggtcttttatcatttgcgctgtatttcttagtgaaaaatccacatgtattacaaaaagtagcagaagaagcagcacgagttctagtagatcctgttccaagctacaaacaagtcaaacagcttaaatatatgggcatggtcttaaacgaagcgctgcgcttatggccagtagcgcctatgttttccctatatgcaaaagaagatacggtgcttggaggagaatatcctttaacgaaaggcgacgaagtaatggttctggtgcctcagcttcaccgtgataaaacaatttggggagacgatgtggaggagttccgtccagagcgttttgaaaatccaagtgcgattccgcagcatgcgtttaaaccgtttggaaacggtcagcgtgcgtgtatcggtcagcagttcgctcttcatgaagcaacgctggtacttggtatgatgctaaaacactttgactttgaagatcatacaaactacgagctcgttattaaagaaactcggacgttaaaacctgaaggctttgtggtaaaagcaaaatcgaaaggcattccgcttggcggtattccttcacctagcactgaacagtctgctaaaaaagtacgcaaaaaggcagaaaacgctcataatacgccgctgcttgtgctatacggttcaaatgcgggaacagctgaaggaacggcgcgtgatttagcagatattgcaatgagcaaaggatttgcaccgcaggtcgcaacgcttgattcacacgccggaaatcttccgcgcgaaggagctgtattaattgtaacggcgtcttataacggtcatccgcctgataacgcaaagcaatttgtcgactggttagaccaagcgtctgctgatgaagtaaaaggcgttcgctactccgtatttggatgcggcgataaaaattgggctgcgacgtatcaaaaagtgcctgcttttatcgatgaaacgcttgccgctaaaggggcagaaaacatcgctgaccgcggtgaagcagatgcaagcgacgactttgaaggcacatatgaagaatggcgtgatcatatgtggagtgacgtagcagcctactttaacctcgacattgaaaacagtgaagataataaatctactctttcacttcaatttgtcgacagcgccgcggatatgccgcttgcgaaaatgcacggtgcgttttcaacgaacgtcgtagcaagcaaagaacttcaacagccaggcagtgcacgaagcacgcgacatcttgaaattgaacttccaaaagaagcttcttatcaagaaggagatcatttaggtgttattcctcgcaactatgaaggaatagtaaaccgtgtaacagcaaggttcggcctaagcgcatcacagcaaatccgtctggaagcagaagaagaaaaattagctcatttgccactcgctaaaacagtatccgtagaagagcttctgcaatacgtggagcttcaagatcctgttacgcgcacgcagcttcgcgcaatggctgctaaaacggtctgcccgccgcataaagtagagcttgaagccttgcttgaaaagcaagcctacaaagaacaagtgctggcaaaacgtttaacaatgcttgaactgcttgaaaaatacccggcgtgtgaaatgaaattcagcgaatttatcgcccttctgccaagcatacgcccgcgctattactcgatttcttcatcacctcgtgtcgatgaaaaacaagcaagcatcacggtcagcgttgtctcaggaccggcgtggagcggatatggagaatataaaggaattgcgtcgaactatcttgccgagctgcaagaaggagatacgattacgtgctttatttccacaccgcagtcagaatttacgctgccaaaagaccctgaaacgccgcttatcatggtcggaccgggaacaggcgtcgcgccgtttagaggctttgtgcaggcgcgcaaacagctaaaagaacaaggacagtcacttggagaagcacatttatacttcggctgccgttcacctcatgaagactatctgtatcaagaagagcttgaaaacgcccaaagcgaaggcatcattacgcttcataccgctttttctcgcatgccaaatcagccgaaaacatacgttcagcacgtaatggaacaagacggcaagaaattgattgaacttcttgatcaaggagcgcacttctatatttgcggagacggaagccaaatggcacctgccgttgaagcaacgcttatgaaaagctatgctgacgttcaccaagtgagtgaagcagacgctcgcttatggctgcagcagctagaagaaaaaggccgatacgcaaaagacgtgtgggctggg

SEQ ID NO: 234 - protein, 1049 aa, synthetic construct
  REGION 1..1049: note = variant of P450 oxidase from Bacillus megaterium
MTIKEMPQPKTFGELKNLPLLNTDKPVQALMRIADELGEIFKFEAPGSVTRYLSSQRLIKEACDESRFDKNLSQALKFARDFVGDGLATSWTHEPNWKKAHNILVPSFSQHAMGRYHAMMVDIAVQLVQKWERLNADEHIEVSEDMTRLTLDTIGLCGFNYRFNSFYRDQPHPFIVSMVRALDEVMNKLQRANPDDPAYDENKRQCQEDIKVMNDYVDKIIADRKARGEQSHDLLTQMLNGKDPETGEPLDDGNIRQQIITFLIAGHQTTSGLLSFALYFLVKNPHVLQKVAEEAARVLVDPVPSYKQVKQLKYMGMVLNEALRLWPVAPMFSLYAKEDTVLGGEYPLTKGDEVMVLVPQLHRDKTIWGDDVEEFRPERFENPSAIPQHAFKPFGNGQRACIGQQFALHEATLVLGMMLKHFDFEDHTNYELVIKETRTLKPEGFVVKAKSKGIPLGGIPSPSTEQSAKKVRKKAENAHNTPLLVLYGSNAGTAEGTARDLADIAMSKGFAPQVATLDSHAGNLPREGAVLIVTASYNGHPPDNAKQFVDWLDQASADEVKGVRYSVFGCGDKNWAATYQKVPAFIDETLAAKGAENIADRGEADASDDFEGTYEEWRDHMWSDVAAYFNLDIENSEDNKSTLSLQFVDSAADMPLAKMHGAFSTNVVASKELQQPGSARSTRHLEIELPKEASYQEGDHLGVIPRNYEGIVNRVTARFGLSASQQIRLEAEEEKLAHLPLAKTVSVEELLQYVELQDPVTRTQLRAMAAKTVCPPHKVELEALLEKQAYKEQVLAKRLTMLELLEKYPACEMKFSEFIALLPSIRPRYYSISSSPRVDEKQASITVSVVSGPAWSGYGEYKGIASNYLAELQEGDTITCFISTPQSEFTLPKDPETPLIMVGPGTGVAPFRGFVQARKQLKEQGQSLGEAHLYFGCRSPHEDYLYQEELENAQSEGIITLHTAFSRMPNQPKTYVQHVMEQDGKKLIELLDQGAHFYICGDGSQMAPAVEATLMKSYADVHQVSEADARLWLQQLEEKGRYAKDVWAG

SEQ ID NO: 235 - DNA, 3147 bp, synthetic construct
  misc_feature 1..3147: note = variant of P450 oxidase from Bacillus megaterium
  source 1..3147: mol_type = other DNA
atgacaattaaggaaatgcctcagcctaagacgtttggagaacttaaaaatttaccgttattaaacacagataaaccggttcaagctttgatgcgtattgcggatgaattaggagaaatctttaaattcgaggcgcctggtagcgtaacgcgctatttatcaagtcagcgtctaattaaagaagcatgcgatgaatcacgctttgataaaaacttaagtcaagcgcttaaatttgcacgtgattttgttggagacgggttagccacaagctggacgcatgaaccgaattggaaaaaagcgcataatatcttagttccaagctttagtcagcatgcaatggggcgttatcatgcgatgatggtcgatatcgccgtgcagcttgttcaaaagtgggagcgtctaaatgcagatgagcatattgaagtatcggaagacatgacacgtttaacgcttgatacaattggtctttgcggctttaactatcgctttaacagcttttaccgagatcagcctcatccatttattgtgagtatggtccgtgcactggatgaagtaatgaacaagctgcagcgagcaaatccagacgacccagcttatgatgaaaacaagcgccagtgtcaagaagatatcaaggtgatgaacgactatgtagataaaattattgcagatcgcaaagcaaggggtgaacaaagtcatgatttattaacgcagatgctaaacggaaaagatccagaaacgggtgagccgcttgatgacgggaacattcgtcagcaaattattacattcttaattgcgggacaccaaacaacaagtggtcttttatcatttgcgctgtatttcttagtgaaaaatccacatgtattacaaaaagtagcagaagaagcagcacgagttctagtagatcctgttccaagctacaaacaagtcaaacagcttaaatatgtcggcatggtcttaaacgaagcgctgcgcttatggccagtagcgcctatgttttccctatatgcaaaagaagatacggtgcttggaggagaatatcctttaacgaaaggcgacgaagtaatggttctggtgcctcagcttcaccgtgataaaacaatttggggagacgatgtggaggagttccgtccagagcgttttgaaaatccaagtgcgattccgcagcatgcgtttaaaccgtttggaaacggtcagcgtgcgtgtatcggtcagcagttcgctcttcatgaagcaacgctggtacttggtatgatgctaaaacactttgactttgaagatcatacaaactacgagctcgttattaaagaaactcggacgttaaaacctgaaggctttgtggtaaaagcaaaatcgaaaggcattccgcttggcggtattccttcacctagcactgaacagtctgctaaaaaagtacgcaaaaaggcagaaaacgctcataatacgccgctgcttgtgctatacggttcaaatgcgggaacagctgaaggaacggcgcgtgatttagcaggtattgcaatgagcaaaggatttgcaccgcaggtcgcaacgcttgattcacacgccggaaatcttccgcgcgaaggagctgtattaattgtaacggcgtcttataacggtcatccgcctgataacgcaaagcaatttgtcgactggttagaccaagcgtctgctgatgaagtaaaaggcgttcgctactccgtatttggatgcggcgataaaaattgggctgcgacgtatcaaaaagtgcctgcttttatcgatgaaacgcttgccgctaaaggggcagaaaacatcgctgaccgcggtgaagcagatgcaagcgacgactttgaaggcacatatgaagaatggcgtgatcatatgtggagtgacgtagcagcctactttaacctcgacattgaaaacagtgaagataataaatctactctttcacttcaatttgtcgacagcgccgcggatatgccgcttgcgaaaatgcacggtgcgttttcaacgaacgtcgtagcaagcaaagaacttcaacagccaggcagtgcacgaagcacgcgacatcttgaaattgaacttccaaaagaagcttcttatcaagaaggagatcatttaggtgttattcctcgcaactatgaaggaatagtaaaccgtgtaacagcaaggttcggcctaagcgcatcacagcaaatccgtctggaagcagaagaagaaaaattagctcatttgccactcgctaaaacagtatccgtagaagagcttctgcaatacgtggagcttcaagatcctgttacgcgcacgcagcttcgcgcaatggctgctaaaacggtctgcccgccgcataaagtagagcttgaagccttgcttgaaaagcaagcctacaaagaacaagtgctggcaaaacgtttaacaatgcttgaactgcttgaaaaatacccggcgtgtgaaatgaaattcagcgaatttatcgcccttctgccaagcatacgcccgcgctattactcgatttcttcatcacctcgtgtcgatgaaaaacaagcaagcatcacggtcagcgttgtctcaggaccggcgtggagcggatatggagaatataaaggaattgcgtcgaactatcttgccgagctgcaagaaggagatacgattacgtgctttatttccacaccgcagtcagaatttacgctgccaaaagaccctgaaacgccgcttatcatggtcggaccgggaacaggcgtcgcgccgtttagaggctttgtgcaggcgcgcaaacagctaaaagaacaaggacagtcacttggagaagcacatttatacttcggctgccgttcacctcatgaagactatctgtatcaagaagagcttgaaaacgcccaaagcgaaggcatcattacgcttcataccgctttttctcgcatgccaaatcagccgaaaacatacgttcagcacgtaatggaacaagacggcaagaaattgattgaacttcttgatcaaggagcgcacttctatatttgcggagacggaagccaaatggcacctgccgttgaagcaacgcttatgaaaagctatgctgacgttcaccaagtgagtgaagcagacgctcgcttatggctgcagcagctagaagaaaaaggccgatacgcaaaagacgtgtgggctggg

SEQ ID NO: 236 - protein, 1049 aa, synthetic construct
  REGION 1..1049: note = variant of P450 oxidase from Bacillus megaterium
MTIKEMPQPKTFGELKNLPLLNTDKPVQALMRIADELGEIFKFEAPGSVTRYLSSQRLIKEACDESRFDKNLSQALKFARDFVGDGLATSWTHEPNWKKAHNILVPSFSQHAMGRYHAMMVDIAVQLVQKWERLNADEHIEVSEDMTRLTLDTIGLCGFNYRFNSFYRDQPHPFIVSMVRALDEVMNKLQRANPDDPAYDENKRQCQEDIKVMNDYVDKIIADRKARGEQSHDLLTQMLNGKDPETGEPLDDGNIRQQIITFLIAGHQTTSGLLSFALYFLVKNPHVLQKVAEEAARVLVDPVPSYKQVKQLKYVGMVLNEALRLWPVAPMFSLYAKEDTVLGGEYPLTKGDEVMVLVPQLHRDKTIWGDDVEEFRPERFENPSAIPQHAFKPFGNGQRACIGQQFALHEATLVLGMMLKHFDFEDHTNYELVIKETRTLKPEGFVVKAKSKGIPLGGIPSPSTEQSAKKVRKKAENAHNTPLLVLYGSNAGTAEGTARDLAGIAMSKGFAPQVATLDSHAGNLPREGAVLIVTASYNGHPPDNAKQFVDWLDQASADEVKGVRYSVFGCGDKNWAATYQKVPAFIDETLAAKGAENIADRGEADASDDFEGTYEEWRDHMWSDVAAYFNLDIENSEDNKSTLSLQFVDSAADMPLAKMHGAFSTNVVASKELQQPGSARSTRHLEIELPKEASYQEGDHLGVIPRNYEGIVNRVTARFGLSASQQIRLEAEEEKLAHLPLAKTVSVEELLQYVELQDPVTRTQLRAMAAKTVCPPHKVELEALLEKQAYKEQVLAKRLTMLELLEKYPACEMKFSEFIALLPSIRPRYYSISSSPRVDEKQASITVSVVSGPAWSGYGEYKGIASNYLAELQEGDTITCFISTPQSEFTLPKDPETPLIMVGPGTGVAPFRGFVQARKQLKEQGQSLGEAHLYFGCRSPHEDYLYQEELENAQSEGIITLHTAFSRMPNQPKTYVQHVMEQDGKKLIELLDQGAHFYICGDGSQMAPAVEATLMKSYADVHQVSEADARLWLQQLEEKGRYAKDVWAG

SEQ ID NO: 237 - DNA, 3147 bp, synthetic construct
  misc_feature 1..3147: note = variant of P450 oxidase from Bacillus megaterium
  source 1..3147: mol_type = other DNA
atgacaattaaggaaatgcctcagcctaagacgtttggagaacttaaaaatttaccgttattaaacacagataaaccggttcaagctttgatgcgtattgcggatgaattaggagaaatctttaaattcgaggcgcctggtagcgtaacgcgctatttatcaagtcagcgtctaattaaagaagcatgcgatgaatcacgctttgataaaaacttaagtcaagcgcttaaatttgcacgtgattttgttggagacgggttagccacaagctggacgcatgaaccgaattggaaaaaagcgcataatatcttagttccaagctttagtcagcatgcaatggggcgttatcatgcgatgatggtcgatatcgccgtgcagcttgttcaaaagtgggagcgtctaaatgcagatgagcatattgaagtatcggaagacatgacacgtttaacgcttgatacaattggtctttgcggctttaactatcgctttaacagcttttaccgagatcagcctcatccatttattgtgagtatggtccgtgcactggatgaagtaatgaacaagctgcagcgagcaaatccagacgacccagcttatgatgaaaacaagcgccagtgtcaagaagatatcaaggtgatgaacgactatgtagataaaattattgcagatcgcaaagcaaggggtgaacaaagtcatgatttattaacgcagatgctaaacggaaaagatccagaaacgggtgagccgcttgatgacgggaacattcgtcagcaaattattacattcttaattgcgggacaccaaacaacaagtggtcttttatcatttgcgctgtatttcttagtgaaaaatccacatgtattacaaaaagtagcagaagaagcagcacgagttctagtagatcctgttccaagctacaaacaagtcaaacagcttaaatatactggcatggtcttaaacgaagcgctgcgcttatggccagtagcgcctatgttttccctatatgcaaaagaagatacggtgcttggaggagaatatcctttaacgaaaggcgacgaagtaatggttctggtgcctcagcttcaccgtgataaaacaatttggggagacgatgtggaggagttccgtccagagcgttttgaaaatccaagtgcgattccgcagcatgcgtttaaaccgtttggaaacggtcagcgtgcgtgtatcggtcagcagttcgctcttcatgaagcaacgctggtacttggtatgatgctaaaacactttgactttgaagatcatacaaactacgagctcgttattaaagaaactcggacgttaaaacctgaaggctttgtggtaaaagcaaaatcgaaaggcattccgcttggcggtattccttcacctagcactgaacagtctgctaaaaaagtacgcaaaaaggcagaaaacgctcataatacgccgctgcttgtgctatacggttcaaatgcgggaacagctgaaggaacggcgcgtgatttagcagatattgcaatgagcaaaggatttgcaccgcaggtcgcaacgcttgattcacacgccggaaatcttccgcgcgaaggagctgtattaattgtaacggcgtcttataacggtcatccgcctgataacgcaaagcaatttgtcgactggttagaccaagcgtctgctgatgaagtaaaaggcgttcgctactccgtatttggatgcggcgataaaaattgggctgcgacgtatcaaaaagtgcctgcttttatcgatgaaacgcttgccgctaaaggggcagaaaacatcgctgaccgcggtgaagcagatgcaagcgacgactttgaaggcacatatgaagaatggcgtgatcatatgtggagtgacgtagcagcctactttaacctcgacattgaaaacagtgaagataataaatctactctttcacttcaatttgtcgacagcgccgcggatatgccgcttgcgaaaatgcacggtgcgttttcaacgaacgtcgtagcaagcaaagaacttcaacagccaggcagtgcacgaagcacgcgacatcttgaaattgaacttccaaaagaagcttcttatcaagaaggagatcatttaggtgttattcctcgcaactatgaaggaatagtaaaccgtgtaacagcaaggttcggcctaagcgcatcacagcaaatccgtctggaagcagaagaagaaaaattagctcatttgccactcgctaaaacagtatccgtagaagagcttctgcaatacgtggagcttcaagatcctgttacgcgcacgcagcttcgcgcaatggctgctaaaacggtctgcccgccgcataaagtagagcttgaagccttgcttgaaaagcaagcctacaaagaacaagtgctggcaaaacgtttaacaatgcttgaactgcttgaaaaatacccggcgtgtgaaatgaaattcagcgaatttatcgcccttctgccaagcatacgcccgcgctattactcgatttcttcatcacctcgtgtcgatgaaaaacaagcaagcatcacggtcagcgttgtctcaggaccggcgtggagcggatatggagaatataaaggaattgcgtcgaactatcttgccgagctgcaagaaggagatacgattacgtgctttatttccacaccgcagtcagaatttacgctgccaaaagaccctgaaacgccgcttatcatggtcggaccgggaacaggcgtcgcgccgtttagaggctttgtgcaggcgcgcaaacagctaaaagaacaaggacagtcacttggagaagcacatttatacttcggctgccgttcacctcatgaagactatctgtatcaagaagagcttgaaaacgcccaaagcgaaggcatcattacgcttcataccgctttttctcgcatgccaaatcagccgaaaacatacgttcagcacgtaatggaacaagacggcaagaaattgattgaacttcttgatcaaggagcgcacttctatatttgcggagacggaagccaaatggcacctgccgttgaagcaacgcttatgaaaagctatgctgacgttcaccaagtgagtgaagcagacgctcgcttatggctgcagcagctagaagaaaaaggccgatacgcaaaagacgtgtgggctggg

SEQ ID NO: 238 - protein, 1049 aa, synthetic construct
  REGION 1..1049: note = variant of P450 oxidase from Bacillus megaterium
MTIKEMPQPKTFGELKNLPLLNTDKPVQALMRIADELGEIFKFEAPGSVTRYLSSQRLIKEACDESRFDKNLSQALKFARDFVGDGLATSWTHEPNWKKAHNILVPSFSQHAMGRYHAMMVDIAVQLVQKWERLNADEHIEVSEDMTRLTLDTIGLCGFNYRFNSFYRDQPHPFIVSMVRALDEVMNKLQRANPDDPAYDENKRQCQEDIKVMNDYVDKIIADRKARGEQSHDLLTQMLNGKDPETGEPLDDGNIRQQIITFLIAGHQTTSGLLSFALYFLVKNPHVLQKVAEEAARVLVDPVPSYKQVKQLKYTGMVLNEALRLWPVAPMFSLYAKEDTVLGGEYPLTKGDEVMVLVPQLHRDKTIWGDDVEEFRPERFENPSAIPQHAFKPFGNGQRACIGQQFALHEATLVLGMMLKHFDFEDHTNYELVIKETRTLKPEGFVVKAKSKGIPLGGIPSPSTEQSAKKVRKKAENAHNTPLLVLYGSNAGTAEGTARDLADIAMSKGFAPQVATLDSHAGNLPREGAVLIVTASYNGHPPDNAKQFVDWLDQASADEVKGVRYSVFGCGDKNWAATYQKVPAFIDETLAAKGAENIADRGEADASDDFEGTYEEWRDHMWSDVAAYFNLDIENSEDNKSTLSLQFVDSAADMPLAKMHGAFSTNVVASKELQQPGSARSTRHLEIELPKEASYQEGDHLGVIPRNYEGIVNRVTARFGLSASQQIRLEAEEEKLAHLPLAKTVSVEELLQYVELQDPVTRTQLRAMAAKTVCPPHKVELEALLEKQAYKEQVLAKRLTMLELLEKYPACEMKFSEFIALLPSIRPRYYSISSSPRVDEKQASITVSVVSGPAWSGYGEYKGIASNYLAELQEGDTITCFISTPQSEFTLPKDPETPLIMVGPGTGVAPFRGFVQARKQLKEQGQSLGEAHLYFGCRSPHEDYLYQEELENAQSEGIITLHTAFSRMPNQPKTYVQHVMEQDGKKLIELLDQGAHFYICGDGSQMAPAVEATLMKSYADVHQVSEADARLWLQQLEEKGRYAKDVWAG

SEQ ID NO: 239 - DNA, 3147 bp, synthetic construct
  misc_feature 1..3147: note = variant of P450 oxidase from Bacillus megaterium
  source 1..3147: mol_type = other DNA
atgacaattaaggaaatgcctcagcctaagacgtttggagaacttaaaaatttaccgttattaaacacagataaaccggttcaagctttgatgcgtattgcggatgaattaggagaaatctttaaattcgaggcgcctggtagcgtaacgcgctatttatcaagtcagcgtctaattaaagaagcatgcgatgaatcacgctttgataaaaacttaagtcaagcgcttaaatttgcacgtgattttgttggagacgggttagccacaagctggacgcatgaaccgaattggaaaaaagcgcataatatcttagttccaagctttagtcagcatgcaatggggcgttatcatgcgatgatggtcgatatcgccgtgcagcttgttcaaaagtgggagcgtctaaatgcagatgagcatattgaagtatcggaagacatgacacgtttaacgcttgatacaattggtctttgcggctttaactatcgctttaacagcttttaccgagatcagcctcatccatttattgtgagtatggtccgtgcactggatgaagtaatgaacaagctgcagcgagcaaatccagacgacccagcttatgatgaaaacaagcgccagtgtcaagaagatatcaaggtgatgaacgactatgtagataaaattattgcagatcgcaaagcaaggggtgaacaaagtcatgatttattaacgcagatgctaaacggaaaagatccagaaacgggtgagccgcttgatgacgggaacattcgtcagcaaattattacattcttaattgcgggacaccaaacaacaagtggtcttttatcatttgcgctgtatttcttagtgaaaaatccacatgtattacaaaaagtagcagaagaagcagcacgagttctagtagatcctgttccaagctacaaacaagtcaaacagcttaaatatgtcggcatggtcttaaacgaagcgctgcgcttatggccagtagcgcctatgttttccctatatgcaaaagaagatacggtgcttggaggagaatatcctttaacgaaaggcgacgaagtaatggttctggtgcctcagcttcaccgtgataaaacaatttggggagacgatgtggaggagttccgtccagagcgttttgaaaatccaagtgcgattccgcagcatgcgtttaaaccgtttggaaacggtcagcgtgcgtgtatcggtcagcagttcgctcttcatgaagcaacgctggtacttggtatgatgctaaaacactttgactttgaagatcatacaaactacgagctcgttattaaagaaactcggacgttaaaacctgaaggctttgtggtaaaagcaaaatcgaaaggcattccgcttggcggtattccttcacctagcactgaacagtctgctaaaaaagtacgcaaaaaggcagaaaacgctcataatacgccgctgcttgtgctatacggttcaaatgcgggaacagctgaaggaacggcgcgtgatttagcagatattgcaatgagcaaaggatttgcaccgcaggtcgcaacgcttgattcacacgccggaaatcttccgcgcgaaggagctgtattaattgtaacggcgtcttataacggtcatccgcctgataacgcaaagcaatttgtcgactggttagaccaagcgtctgctgatgaagtaaaaggcgttcgctactccgtatttggatgcggcgataaaaattggcctgcgacgtatcaaaaagtgcctgcttttatcgatgaaacgcttgccgctaaaggggcagaaaacatcgctgaccgcggtgaagcagatgcaagcgacgactttgaaggcacatatgaagaatggcgtgatcatatgtggagtgacgtagcagcctactttaacctcgacattgaaaacagtgaagataataaatctactctttcacttcaatttgtcgacagcgccgcggatatgccgcttgcgaaaatgcacggtgcgttttcaacgaacgtcgtagcaagcaaagaacttcaacagccaggcagtgcacgaagcacgcgacatcttgaaattgaacttccaaaagaagcttcttatcaagaaggagatcatttaggtgttattcctcgcaactatgaaggaatagtaaaccgtgtaacagcaaggttcggcctaagcgcatcacagcaaatccgtctggaagcagaagaagaaaaattagctcatttgccactcgctaaaacagtatccgtagaagagcttctgcaatacgtggagcttcaagatcctgttacgcgcacgcagcttcgcgcaatggctgctaaaacggtctgcccgccgcataaagtagagcttgaagccttgcttgaaaagcaagcctacaaagaacaagtgctggcaaaacgtttaacaatgcttgaactgcttgaaaaatacccggcgtgtgaaatgaaattcagcgaatttatcgcccttctgccaagcatacgcccgcgctattactcgatttcttcatcacctcgtgtcgatgaaaaacaagcaagcatcacggtcagcgttgtctcaggaccggcgtggagcggatatggagaatataaaggaattgcgtcgaactatcttgccgagctgcaagaaggagatacgattacgtgctttatttccacaccgcagtcagaatttacgctgccaaaagaccctgaaacgccgcttatcatggtcggaccgggaacaggcgtcgcgccgtttagaggctttgtgcaggcgcgcaaacagctaaaagaacaaggacagtcacttggagaagcacatttatacttcggctgccgttcacctcatgaagactatctgtatcaagaagagcttgaaaacgcccaaagcgaaggcatcattacgcttcataccgctttttctcgcatgccaaatcagccgaaaacatacgttcagcacgtaatggaacaagacggcaagaaattgattgaacttcttgatcaaggagcgcacttctatatttgcggagacggaagccaaatggcacctgccgttgaagcaacgcttatgaaaagctatgctgacgttcaccaagtgagtgaagcagacgctcgcttatggctgcagcagctagaagaaaaaggccgatacgcaaaagacgtgtgggctggg

SEQ ID NO: 240 - protein, 1049 aa, synthetic construct
  REGION 1..1049: note = variant of P450 oxidase from Bacillus megaterium
MTIKEMPQPKTFGELKNLPLLNTDKPVQALMRIADELGEIFKFEAPGSVTRYLSSQRLIKEACDESRFDKNLSQALKFARDFVGDGLATSWTHEPNWKKAHNILVPSFSQHAMGRYHAMMVDIAVQLVQKWERLNADEHIEVSEDMTRLTLDTIGLCGFNYRFNSFYRDQPHPFIVSMVRALDEVMNKLQRANPDDPAYDENKRQCQEDIKVMNDYVDKIIADRKARGEQSHDLLTQMLNGKDPETGEPLDDGNIRQQIITFLIAGHQTTSGLLSFALYFLVKNPHVLQKVAEEAARVLVDPVPSYKQVKQLKYVGMVLNEALRLWPVAPMFSLYAKEDTVLGGEYPLTKGDEVMVLVPQLHRDKTIWGDDVEEFRPERFENPSAIPQHAFKPFGNGQRACIGQQFALHEATLVLGMMLKHFDFEDHTNYELVIKETRTLKPEGFVVKAKSKGIPLGGIPSPSTEQSAKKVRKKAENAHNTPLLVLYGSNAGTAEGTARDLADIAMSKGFAPQVATLDSHAGNLPREGAVLIVTASYNGHPPDNAKQFVDWLDQASADEVKGVRYSVFGCGDKNWPATYQKVPAFIDETLAAKGAENIADRGEADASDDFEGTYEEWRDHMWSDVAAYFNLDIENSEDNKSTLSLQFVDSAADMPLAKMHGAFSTNVVASKELQQPGSARSTRHLEIELPKEASYQEGDHLGVIPRNYEGIVNRVTARFGLSASQQIRLEAEEEKLAHLPLAKTVSVEELLQYVELQDPVTRTQLRAMAAKTVCPPHKVELEALLEKQAYKEQVLAKRLTMLELLEKYPACEMKFSEFIALLPSIRPRYYSISSSPRVDEKQASITVSVVSGPAWSGYGEYKGIASNYLAELQEGDTITCFISTPQSEFTLPKDPETPLIMVGPGTGVAPFRGFVQARKQLKEQGQSLGEAHLYFGCRSPHEDYLYQEELENAQSEGIITLHTAFSRMPNQPKTYVQHVMEQDGKKLIELLDQGAHFYICGDGSQMAPAVEATLMKSYADVHQVSEADARLWLQQLEEKGRYAKDVWAG

SEQ ID NO: 241 - DNA, 3147 bp, synthetic construct
  misc_feature 1..3147: note = variant of P450 oxidase from Bacillus megaterium
  source 1..3147: mol_type = other DNA
atgacaattaaggaaatgcctcagcctaagacgtttggagaacttaaaaatttaccgttattaaacacagataaaccggttcaagctttgatgcgtattgcggatgaattaggagaaatctttaaattcgaggcgcctggtagcgtaacgcgctatttatcaagtcagcgtctaattaaagaagcatgcgatgaatcacgctttgataaaaacttaagtcaagcgcttaaatttgcacgtgattttgttggagacgggttagccacaagctggacgcatgaaccgaattggaaaaaagcgcataatatcttagttccaagctttagtcagcatgcaatggggcgttatcatgcgatgatggtcgatatcgccgtgcagcttgttcaaaagtgggagcgtctaaatgcagatgagcatattgaagtatcggaagacatgacacgtttaacgcttgatacaattggtctttgcggctttaactatcgctttaacagcttttaccgagatcagcctcatccatttattgtgagtatggtccgtgcactggatgaagtaatgaacaagctgcagcgagcaaatccagacgacccagcttatgatgaaaacaagcgccagtgtcaagaagatatcaaggtgatgaacgactatgtagataaaattattgcagatcgcaaagcaaggggtgaacaaagtcatgatttattaacgcagatgctaaacggaaaagatccagaaacgggtgagccgcttgatgacgggaacattcgtcagcaaattattacattcttaattgcgggacaccaaacaacaagtggtcttttatcatttgcgctgtatttcttagtgaaaaatccacatgtattacaaaaagtagcagaagaagcagcacgagttctagtagatcctgttccaagctacaaacaagtcaaacagcttaaatatgtcggcatggtcttatttgaagcgctgcgcttatggccagtagcgcctatgttttccctatatgcaaaagaagatacggtgcttggaggagaatatcctttaacgaaaggcgacgaagtaatggttctggtgcctcagcttcaccgtgataaaacaatttggggagacgatgtggaggagttccgtccagagcgttttgaaaatccaagtgcgattccgcagcatgcgtttaaaccgtttggaaacggtcagcgtgcgtgtatcggtcagcagttcgctcttcatgaagcaacgctggtacttggtatgatgctaaaacactttgactttgaagatcatacaaactacgagctcgttattaaagaaactcggacgttaaaacctgaaggctttgtggtaaaagcaaaatcgaaaggcattccgcttggcggtattccttcacctagcactgaacagtctgctaaaaaagtacgcaaaaaggcagaaaacgctcataatacgccgctgcttgtgctatacggttcaaatgcgggaacagctgaaggaacggcgcgtgatttagcagatattgcaatgagcaaaggatttgcaccgcaggtcgcaacgcttgattcacacgccggaaatcttccgcgcgaaggagctgtattaattgtaacggcgtcttataacggtcatccgcctgataacgcaaagcaatttgtcgactggttagaccaagcgtctgctgatgaagtaaaaggcgttcgctactccgtatttggatgcggcgataaaaattgggctgcgacgtatcaaaaagtgcctgcttttatcgatgaaacgcttgccgctaaaggggcagaaaacatcgctgaccgcggtgaagcagatgcaagcgacgactttgaaggcacatatgaagaatggcgtgatcatatgtggagtgacgtagcagcctactttaacctcgacattgaaaacagtgaagataataaatctactctttcacttcaatttgtcgacagcgccgcggatatgccgcttgcgaaaatgcacggtgcgttttcaacgaacgtcgtagcaagcaaagaacttcaacagccaggcagtgcacgaagcacgcgacatcttgaaattgaacttccaaaagaagcttcttatcaagaaggagatcatttaggtgttattcctcgcaactatgaaggaatagtaaaccgtgtaacagcaaggttcggcctaagcgcatcacagcaaatccgtctggaagcagaagaagaaaaattagctcatttgccactcgctaaaacagtatccgtagaagagcttctgcaatacgtggagcttcaagatcctgttacgcgcacgcagcttcgcgcaatggctgctaaaacggtctgcccgccgcataaagtagagcttgaagccttgcttgaaaagcaagcctacaaagaacaagtgctggcaaaacgtttaacaatgcttgaactgcttgaaaaatacccggcgtgtgaaatgaaattcagcgaatttatcgcccttctgccaagcatacgcccgcgctattactcgatttcttcatcacctcgtgtcgatgaaaaacaagcaagcatcacggtcagcgttgtctcaggaccggcgtggagcggatatggagaatataaaggaattgcgtcgaactatcttgccgagctgcaagaaggagatacgattacgtgctttatttccacaccgcagtcagaatttacgctgccaaaagaccctgaaacgccgcttatcatggtcggaccgggaacaggcgtcgcgccgtttagaggctttgtgcaggcgcgcaaacagctaaaagaacaaggacagtcacttggagaagcacatttatacttcggctgccgttcacctcatgaagactatctgtatcaagaagagcttgaaaacgcccaaagcgaaggcatcattacgcttcataccgctttttctcgcatgccaaatcagccgaaaacatacgttcagcacgtaatggaacaagacggcaagaaattgattgaacttcttgatcaaggagcgcacttctatatttgcggagacggaagccaaatggcacctgccgttgaagcaacgcttatgaaaagctatgctgacgttcaccaagtgagtgaagcagacgctcgcttatggctgcagcagctagaagaaaaaggccgatacgcaaaagacgtgtgggctggg

SEQ ID NO: 242 - protein, 1049 aa, synthetic construct
  REGION 1..1049: note = variant of P450 oxidase from Bacillus megaterium
MTIKEMPQPKTFGELKNLPLLNTDKPVQALMRIADELGEIFKFEAPGSVTRYLSSQRLIKEACDESRFDKNLSQALKFARDFVGDGLATSWTHEPNWKKAHNILVPSFSQHAMGRYHAMMVDIAVQLVQKWERLNADEHIEVSEDMTRLTLDTIGLCGFNYRFNSFYRDQPHPFIVSMVRALDEVMNKLQRANPDDPAYDENKRQCQEDIKVMNDYVDKIIADRKARGEQSHDLLTQMLNGKDPETGEPLDDGNIRQQIITFLIAGHQTTSGLLSFALYFLVKNPHVLQKVAEEAARVLVDPVPSYKQVKQLKYVGMVLFEALRLWPVAPMFSLYAKEDTVLGGEYPLTKGDEVMVLVPQLHRDKTIWGDDVEEFRPERFENPSAIPQHAFKPFGNGQRACIGQQFALHEATLVLGMMLKHFDFEDHTNYELVIKETRTLKPEGFVVKAKSKGIPLGGIPSPSTEQSAKKVRKKAENAHNTPLLVLYGSNAGTAEGTARDLADIAMSKGFAPQVATLDSHAGNLPREGAVLIVTASYNGHPPDNAKQFVDWLDQASADEVKGVRYSVFGCGDKNWAATYQKVPAFIDETLAAKGAENIADRGEADASDDFEGTYEEWRDHMWSDVAAYFNLDIENSEDNKSTLSLQFVDSAADMPLAKMHGAFSTNVVASKELQQPGSARSTRHLEIELPKEASYQEGDHLGVIPRNYEGIVNRVTARFGLSASQQIRLEAEEEKLAHLPLAKTVSVEELLQYVELQDPVTRTQLRAMAAKTVCPPHKVELEALLEKQAYKEQVLAKRLTMLELLEKYPACEMKFSEFIALLPSIRPRYYSISSSPRVDEKQASITVSVVSGPAWSGYGEYKGIASNYLAELQEGDTITCFISTPQSEFTLPKDPETPLIMVGPGTGVAPFRGFVQARKQLKEQGQSLGEAHLYFGCRSPHEDYLYQEELENAQSEGIITLHTAFSRMPNQPKTYVQHVMEQDGKKLIELLDQGAHFYICGDGSQMAPAVEATLMKSYADVHQVSEADARLWLQQLEEKGRYAKDVWAG

SEQ ID NO: 243 - DNA, 3147 bp, synthetic construct
  misc_feature 1..3147: note = variant of P450 oxidase from Bacillus megaterium
  source 1..3147: mol_type = other DNA
atgacaattaaggaaatgcctcagcctaagacgtttggagaacttaaaaatttaccgttattaaacacagataaaccggttcaagctttgatgcgtattgcggatgaattaggagaaatctttaaattcgaggcgcctggtagcgtaacgcgctatttatcaagtcagcgtctaattaaagaagcatgcgatgaatcacgctttgataaaaacttaagtcaagcgcttaaatttgcacgtgattttgttggagacgggttagccacaagctggacgcatgaaccgaattggaaaaaagcgcataatatcttagttccaagctttagtcagcatgcaatggggcgttatcatgcgatgatggtcgatatcgccgtgcagcttgttcaaaagtgggagcgtctaaatgcagatgagcatattgaagtatcggaagacatgacacgtttaacgcttgatacaattggtctttgcggctttaactatcgctttaacagcttttaccgagatcagcctcatccatttattgtgagtatggtccgtgcactggatgaagtaatgaacaagctgcagcgagcaaatccagacgacccagcttatgatgaaaacaagcgccagtgtcaagaagatatcaaggtgatgaacgactatgtagataaaattattgcagatcgcaaagcaaggggtgaacaaagtcatgatttattaacgcagatgctaaacggaaaagatccagaaacgggtgagccgcttgatgacgggaacattcgtcagcaaattattacattcttaattgcgggacaccaaacaacaagtggtcttttatcatttgcgctgtatttcttagtgaaaaatccacatgtattacaaaaagtagcagaagaagcagcacgagttctagtagatcctgttccaagctacaaacaagtcaaacagcttaaatatgtcggcatggtcttaaacgaagcgctgcgcttatggccagtagcgcctatgttttccctatatgcaaaagaagatacggtgcttggaggagaatatcctttaacgaaaggcgacgaagtaatggttctggtgcctcagcttcaccgtgataaaacaatttggggagacgatgtggaggagttccgtccagagcgttttgaaaatccaagtgcgattccgcagcatgcgtttaaaccgtttggaaacggtcagcgtgcgtgtatcggtcagcagttcgctcttcatgaagcaacgctggtacttggtatgatgctaaaacactttgactttgaagatcatacaaactacgagctcgttattaaagaaactcggacgttaaaacctgaaggctttgtggtaaaagcaaaatcgaaaggcattccgcttggcggtattccttcacctagcactgaacagtctgctaaaaaagtacgcaaaaaggcagaaaacgctcataatacgccgctgcttgtgctatacggttcaaatgcgggaacagctgaaggaacggcgcgtgatttagcagatattgcaatgagcaaaggatttgcaccgcaggtcgcaacgcttgattcacacgccggaaatcttccgcgcgaaggagctgtattaattgtaacggcgtcttataacggtcatccgcctgataacgcaaagcaatttgtcgactggttagaccaagcgtctgctgatgaagtaaaaggcgttcgctactccgtatttggatgcggcgataaaaattgggctgggacgtatcaaaaagtgcctgcttttatcgatgaaacgcttgccgctaaaggggcagaaaacatcgctgaccgcggtgaagcagatgcaagcgacgactttgaaggcacatatgaagaatggcgtgatcatatgtggagtgacgtagcagcctactttaacctcgacattgaaaacagtgaagataataaatctactctttcacttcaatttgtcgacagcgccgcggatatgccgcttgcgaaaatgcacggtgcgttttcaacgaacgtcgtagcaagcaaagaacttcaacagccaggcagtgcacgaagcacgcgacatcttgaaattgaacttccaaaagaagcttcttatcaagaaggagatcatttaggtgttattcctcgcaactatgaaggaatagtaaaccgtgtaacagcaaggttcggcctaagcgcatcacagcaaatccgtctggaagcagaagaagaaaaattagctcatttgccactcgctaaaacagtatccgtagaagagcttctgcaatacgtggagcttcaagatcctgttacgcgcacgcagcttcgcgcaatggctgctaaaacggtctgcccgccgcataaagtagagcttgaagccttgcttgaaaagcaagcctacaaagaacaagtgctggcaaaacgtttaacaatgcttgaactgcttgaaaaatacccggcgtgtgaaatgaaattcagcgaatttatcgcccttctgccaagcatacgcccgcgctattactcgatttcttcatcacctcgtgtcgatgaaaaacaagcaagcatcacggtcagcgttgtctcaggaccggcgtggagcggatatggagaatataaaggaattgcgtcgaactatcttgccgagctgcaagaaggagatacgattacgtgctttatttccacaccgcagtcagaatttacgctgccaaaagaccctgaaacgccgcttatcatggtcggaccgggaacaggcgtcgcgccgtttagaggctttgtgcaggcgcgcaaacagctaaaagaacaaggacagtcacttggagaagcacatttatacttcggctgccgttcacctcatgaagactatctgtatcaagaagagcttgaaaacgcccaaagcgaaggcatcattacgcttcataccgctttttctcgcatgccaaatcagccgaaaacatacgttcagcacgtaatggaacaagacggcaagaaattgattgaacttcttgatcaaggagcgcacttctatatttgcggagacggaagccaaatggcacctgccgttgaagcaacgcttatgaaaagctatgctgacgttcaccaagtgagtgaagcagacgctcgcttatggctgcagcagctagaagaaaaaggccgatacgcaaaagacgtgtgggctggg

SEQ ID NO: 244 - protein, 1049 aa, synthetic construct
  REGION 1..1049: note = variant of P450 oxidase from Bacillus megaterium
MTIKEMPQPKTFGELKNLPLLNTDKPVQALMRIADELGEIFKFEAPGSVTRYLSSQRLIKEACDESRFDKNLSQALKFARDFVGDGLATSWTHEPNWKKAHNILVPSFSQHAMGRYHAMMVDIAVQLVQKWERLNADEHIEVSEDMTRLTLDTIGLCGFNYRFNSFYRDQPHPFIVSMVRALDEVMNKLQRANPDDPAYDENKRQCQEDIKVMNDYVDKIIADRKARGEQSHDLLTQMLNGKDPETGEPLDDGNIRQQIITFLIAGHQTTSGLLSFALYFLVKNPHVLQKVAEEAARVLVDPVPSYKQVKQLKYVGMVLNEALRLWPVAPMFSLYAKEDTVLGGEYPLTKGDEVMVLVPQLHRDKTIWGDDVEEFRPERFENPSAIPQHAFKPFGNGQRACIGQQFALHEATLVLGMMLKHFDFEDHTNYELVIKETRTLKPEGFVVKAKSKGIPLGGIPSPSTEQSAKKVRKKAENAHNTPLLVLYGSNAGTAEGTARDLADIAMSKGFAPQVATLDSHAGNLPREGAVLIVTASYNGHPPDNAKQFVDWLDQASADEVKGVRYSVFGCGDKNWAGTYQKVPAFIDETLAAKGAENIADRGEADASDDFEGTYEEWRDHMWSDVAAYFNLDIENSEDNKSTLSLQFVDSAADMPLAKMHGAFSTNVVASKELQQPGSARSTRHLEIELPKEASYQEGDHLGVIPRNYEGIVNRVTARFGLSASQQIRLEAEEEKLAHLPLAKTVSVEELLQYVELQDPVTRTQLRAMAAKTVCPPHKVELEALLEKQAYKEQVLAKRLTMLELLEKYPACEMKFSEFIALLPSIRPRYYSISSSPRVDEKQASITVSVVSGPAWSGYGEYKGIASNYLAELQEGDTITCFISTPQSEFTLPKDPETPLIMVGPGTGVAPFRGFVQARKQLKEQGQSLGEAHLYFGCRSPHEDYLYQEELENAQSEGIITLHTAFSRMPNQPKTYVQHVMEQDGKKLIELLDQGAHFYICGDGSQMAPAVEATLMKSYADVHQVSEADARLWLQQLEEKGRYAKDVWAG

SEQ ID NO: 245 - DNA, 3147 bp, synthetic construct
  misc_feature 1..3147: note = variant of P450 oxidase from Bacillus megaterium
  source 1..3147: mol_type = other DNA
atgacaattaaggaaatgcctcagcctaagacgtttggagaacttaaaaatttaccgttattaaacacagataaaccggttcaagctttgatgcgtattgcggatgaattaggagaaatctttaaattcgaggcgcctggtagcgtaacgcgctatttatcaagtcagcgtctaattaaagaagcatgcgatgaatcacgctttgataaaaacttaagtcaagcgcttaaatttgcacgtgattttgttggagacgggttagccacaagctggacgcatgaaccgaattggaaaaaagcgcataatatcttagttccaagctttagtcagcatgcaatggggcgttatcatgcgatgatggtcgatatcgccgtgcagcttgttcaaaagtgggagcgtctaaatgcagatgagcatattgaagtatcggaagacatgacacgtttaacgcttgatacaattggtctttgcggctttaactatcgctttaacagcttttaccgagatcagcctcatccatttattgtgagtatggtccgtgcactggatgaagtaatgaacaagctgcagcgagcaaatccagacgacccagcttatgatgaaaacaagcgccagtgtcaagaagatatcaaggtgatgaacgactatgtagataaaattattgcagatcgcaaagcaaggggtgaacaaagtcatgatttattaacgcagatgctaaacggaaaagatccagaaacgggtgagccgcttgatgacgggaacattcgtcagcaaattattacattcttaattgcgggacaccaaacaacaagtggtcttttatcatttgcgctgtatttcttagtgaaaaatccacatgtattacaaaaagtagcagaagaagcagcacgagttctagtagatcctgttccaagctacaaacaagtcaaacagcttaaatatgtcggcatggtcttaaacgaagcgctgcgcttatggccagtagcgcctatgttttccctatatgcaaaagaagatacggtgcttggaggagaatatcctttaacgaaaggcgacgaagtaatggttctggtgcctcagcttcaccgtgataaaacaatttggggagacgatgtggaggagttccgtccagagcgttttgaaaatccaagtgcgattccgcagcatgcgtttaaaccgtttggaaacggtcagcgtgcgtgtatcggtcagcagttcgctcttcatgaagcaacgctggtacttggtatgatgctaaaacactttgactttgaagatcatacaaactacgagctcgttattaaagaaactcggacgttaaaacctgaaggctttgtggtaaaagcaaaatcgaaaggcattccgcttggcggtattccttcacctagcactgaacagtctgctaaaaaagtacgcaaaaaggcagaaaacgctcataatacgccgctgcttgtgctatacggttcaaatgcgggaacagctgaaggaacggcgcgtgatttagcagatattgcaatgagcaaaggatttgcaccgcaggtcgcaacgcttgattcacacgccggaaatcttccgcgcgaaggagctgtattaattgtaacggcgtcttataacggtcatccgcctgataacgcaaagcaatttgtcgactggttagaccaagcgtctgctgatgaagtaaaaggcgttcgctactccgtatttggatgcggcgataaaaattgggtggcgacgtatcaaaaagtgcctgcttttatcgatgaaacgcttgccgctaaaggggcagaaaacatcgctgaccgcggtgaagcagatgcaagcgacgactttgaaggcacatatgaagaatggcgtgatcatatgtggagtgacgtagcagcctactttaacctcgacattgaaaacagtgaagataataaatctactctttcacttcaatttgtcgacagcgccgcggatatgccgcttgcgaaaatgcacggtgcgttttcaacgaacgtcgtagcaagcaaagaacttcaacagccaggcagtgcacgaagcacgcgacatcttgaaattgaacttccaaaagaagcttcttatcaagaaggagatcatttaggtgttattcctcgcaactatgaaggaatagtaaaccgtgtaacagcaaggttcggcctaagcgcatcacagcaaatccgtctggaagcagaagaagaaaaattagctcatttgccactcgctaaaacagtatccgtagaagagcttctgcaatacgtggagcttcaagatcctgttacgcgcacgcagcttcgcgcaatggctgctaaaacggtctgcccgccgcataaagtagagcttgaagccttgcttgaaaagcaagcctacaaagaacaagtgctggcaaaacgtttaacaatgcttgaactgcttgaaaaatacccggcgtgtgaaatgaaattcagcgaatttatcgcccttctgccaagcatacgcccgcgctattactcgatttcttcatcacctcgtgtcgatgaaaaacaagcaagcatcacggtcagcgttgtctcaggaccggcgtggagcggatatggagaatataaaggaattgcgtcgaactatcttgccgagctgcaagaaggagatacgattacgtgctttatttccacaccgcagtcagaatttacgctgccaaaagaccctgaaacgccgcttatcatggtcggaccgggaacaggcgtcgcgccgtttagaggctttgtgcaggcgcgcaaacagctaaaagaacaaggacagtcacttggagaagcacatttatacttcggctgccgttcacctcatgaagactatctgtatcaagaagagcttgaaaacgcccaaagcgaaggcatcattacgcttcataccgctttttctcgcatgccaaatcagccgaaaacatacgttcagcacgtaatggaacaagacggcaagaaattgattgaacttcttgatcaaggagcgcacttctatatttgcggagacggaagccaaatggcacctgccgttgaagcaacgcttatgaaaagctatgctgacgttcaccaagtgagtgaagcagacgctcgcttatggctgcagcagctagaagaaaaaggccgatacgcaaaagacgtgtgggctggg

SEQ ID NO: 246 - protein, 1049 aa, synthetic construct
  REGION 1..1049: note = variant of P450 oxidase from Bacillus megaterium
MTIKEMPQPKTFGELKNLPLLNTDKPVQALMRIADELGEIFKFEAPGSVTRYLSSQRLIKEACDESRFDKNLSQALKFARDFVGDGLATSWTHEPNWKKAHNILVPSFSQHAMGRYHAMMVDIAVQLVQKWERLNADEHIEVSEDMTRLTLDTIGLCGFNYRFNSFYRDQPHPFIVSMVRALDEVMNKLQRANPDDPAYDENKRQCQEDIKVMNDYVDKIIADRKARGEQSHDLLTQMLNGKDPETGEPLDDGNIRQQIITFLIAGHQTTSGLLSFALYFLVKNPHVLQKVAEEAARVLVDPVPSYKQVKQLKYVGMVLNEALRLWPVAPMFSLYAKEDTVLGGEYPLTKGDEVMVLVPQLHRDKTIWGDDVEEFRPERFENPSAIPQHAFKPFGNGQRACIGQQFALHEATLVLGMMLKHFDFEDHTNYELVIKETRTLKPEGFVVKAKSKGIPLGGIPSPSTEQSAKKVRKKAENAHNTPLLVLYGSNAGTAEGTARDLADIAMSKGFAPQVATLDSHAGNLPREGAVLIVTASYNGHPPDNAKQFVDWLDQASADEVKGVRYSVFGCGDKNWVATYQKVPAFIDETLAAKGAENIADRGEADASDDFEGTYEEWRDHMWSDVAAYFNLDIENSEDNKSTLSLQFVDSAADMPLAKMHGAFSTNVVASKELQQPGSARSTRHLEIELPKEASYQEGDHLGVIPRNYEGIVNRVTARFGLSASQQIRLEAEEEKLAHLPLAKTVSVEELLQYVELQDPVTRTQLRAMAAKTVCPPHKVELEALLEKQAYKEQVLAKRLTMLELLEKYPACEMKFSEFIALLPSIRPRYYSISSSPRVDEKQASITVSVVSGPAWSGYGEYKGIASNYLAELQEGDTITCFISTPQSEFTLPKDPETPLIMVGPGTGVAPFRGFVQARKQLKEQGQSLGEAHLYFGCRSPHEDYLYQEELENAQSEGIITLHTAFSRMPNQPKTYVQHVMEQDGKKLIELLDQGAHFYICGDGSQMAPAVEATLMKSYADVHQVSEADARLWLQQLEEKGRYAKDVWAG

SEQ ID NO: 247 - DNA, 3147 bp, synthetic construct
  misc_feature 1..3147: note = variant of P450 oxidase from Bacillus megaterium
  source 1..3147: mol_type = other DNA
atgacaattaaggaaatgcctcagcctaagacgtttggagaacttaaaaatttaccgttattaaacacagataaaccggttcaagctttgatgcgtattgcggatgaattaggagaaatctttaaattcgaggcgcctggtagcgtaacgcgctatttatcaagtcagcgtctaattaaagaagcatgcgatgaatcacgctttgataaaaacttaagtcaagcgcttaaatttgcacgtgattttgttggagacgggttagccacaagctggacgcatgaaccgaattggaaaaaagcgcataatatcttagttccaagctttagtcagcatgcaatggggcgttatcatgcgatgatggtcgatatcgccgtgcagcttgttcaaaagtgggagcgtctaaatgcagatgagcatattgaagtatcggaagacatgacacgtttaacgcttgatacaattggtctttgcggctttaactatcgctttaacagcttttaccgagatcagcctcatccatttattgtgagtatggtccgtgcactggatgaagtaatgaacaagctgcagcgagcaaatccagacgacccagcttatgatgaaaacaagcgccagtgtcaagaagatatcaaggtgatgaacgactatgtagataaaattattgcagatcgcaaagcaaggggtgaacaaagtcatgatttattaacgcagatgctaaacggaaaagatccagaaacgggtgagccgcttgatgacgggaacattcgtcagcaaattattacattcttaattgcgggacaccaaacaacaagtggtcttttatcatttgcgctgtatttcttagtgaaaaatccacatgtattacaaaaagtagcagaagaagcagcacgagttctagtagatcctgttccaagctacaaacaagtcaaacagcttaaatatgtcggcatggtcttaaacgaagcgctgcgcttatggccagtagcgcctatgttttccctatatgcaaaagaagatacggtgcttggaggagaatatcctttaacgaaaggcgacgaagtaatggttctggtgcctcagcttcaccgtgataaaacaatttggggagacgatgtggaggagttccgtccagagcgttttgaaaatccaagtgcgattccgcagcatgcgtttaaaccgtttggaaacggtcagcgtgcgtgtatcggtcagcagttcgctcttcatgaagcaacgctggtacttggtatgatgctaaaacactttgactttgaagatcatacaaactacgagctcgttattaaagaaactcggacgttaaaacctgaaggctttgtggtaaaagcaaaatcgaaaggcattccgcttggcggtattccttcacctagcactgaacagtctgctaaaaaagtacgcaaaaaggcagaaaacgctcataatacgccgctgcttgtgctatacggttcaaatgcgggaacagctgaaggaacggcgcgtgatttagcagatagggcaatgagcaaaggatttgcaccgcaggtcgcaacgcttgattcacacgccggaaatcttccgcgcgaaggagctgtattaattgtaacggcgtcttataacggtcatccgcctgataacgcaaagcaatttgtcgactggttagaccaagcgtctgctgatgaagtaaaaggcgttcgctactccgtatttggatgcggcgataaaaattgggctgcgacgtatcaaaaagtgcctgcttttatcgatgaaacgcttgccgctaaaggggcagaaaacatcgctgaccgcggtgaagcagatgcaagcgacgactttgaaggcacatatgaagaatggcgtgatcatatgtggagtgacgtagcagcctactttaacctcgacattgaaaacagtgaagataataaatctactctttcacttcaatttgtcgacagcgccgcggatatgccgcttgcgaaaatgcacggtgcgttttcaacgaacgtcgtagcaagcaaagaacttcaacagccaggcagtgcacgaagcacgcgacatcttgaaattgaacttccaaaagaagcttcttatcaagaaggagatcatttaggtgttattcctcgcaactatgaaggaatagtaaaccgtgtaacagcaaggttcggcctaagcgcatcacagcaaatccgtctggaagcagaagaagaaaaattagctcatttgccactcgctaaaacagtatccgtagaagagcttctgcaatacgtggagcttcaagatcctgttacgcgcacgcagcttcgcgcaatggctgctaaaacggtctgcccgccgcataaagtagagcttgaagccttgcttgaaaagcaagcctacaaagaacaagtgctggcaaaacgtttaacaatgcttgaactgcttgaaaaatacccggcgtgtgaaatgaaattcagcgaatttatcgcccttctgccaagcatacgcccgcgctattactcgatttcttcatcacctcgtgtcgatgaaaaacaagcaagcatcacggtcagcgttgtctcaggaccggcgtggagcggatatggagaatataaaggaattgcgtcgaactatcttgccgagctgcaagaaggagatacgattacgtgctttatttccacaccgcagtcagaatttacgctgccaaaagaccctgaaacgccgcttatcatggtcggaccgggaacaggcgtcgcgccgtttagaggctttgtgcaggcgcgcaaacagctaaaagaacaaggacagtcacttggagaagcacatttatacttcggctgccgttcacctcatgaagactatctgtatcaagaagagcttgaaaacgcccaaagcgaaggcatcattacgcttcataccgctttttctcgcatgccaaatcagccgaaaacatacgttcagcacgtaatggaacaagacggcaagaaattgattgaacttcttgatcaaggagcgcacttctatatttgcggagacggaagccaaatggcacctgccgttgaagcaacgcttatgaaaagctatgctgacgttcaccaagtgagtgaagcagacgctcgcttatggctgcagcagctagaagaaaaaggccgatacgcaaaagacgtgtgggctggg

SEQ ID NO: 248 - protein, 1049 aa, synthetic construct
  REGION 1..1049: note = variant of P450 oxidase from Bacillus megaterium
MTIKEMPQPKTFGELKNLPLLNTDKPVQALMRIADELGEIFKFEAPGSVTRYLSSQRLIKEACDESRFDKNLSQALKFARDFVGDGLATSWTHEPNWKKAHNILVPSFSQHAMGRYHAMMVDIAVQLVQKWERLNADEHIEVSEDMTRLTLDTIGLCGFNYRFNSFYRDQPHPFIVSMVRALDEVMNKLQRANPDDPAYDENKRQCQEDIKVMNDYVDKIIADRKARGEQSHDLLTQMLNGKDPETGEPLDDGNIRQQIITFLIAGHQTTSGLLSFALYFLVKNPHVLQKVAEEAARVLVDPVPSYKQVKQLKYVGMVLNEALRLWPVAPMFSLYAKEDTVLGGEYPLTKGDEVMVLVPQLHRDKTIWGDDVEEFRPERFENPSAIPQHAFKPFGNGQRACIGQQFALHEATLVLGMMLKHFDFEDHTNYELVIKETRTLKPEGFVVKAKSKGIPLGGIPSPSTEQSAKKVRKKAENAHNTPLLVLYGSNAGTAEGTARDLADRAMSKGFAPQVATLDSHAGNLPREGAVLIVTASYNGHPPDNAKQFVDWLDQASADEVKGVRYSVFGCGDKNWAATYQKVPAFIDETLAAKGAENIADRGEADASDDFEGTYEEWRDHMWSDVAAYFNLDIENSEDNKSTLSLQFVDSAADMPLAKMHGAFSTNVVASKELQQPGSARSTRHLEIELPKEASYQEGDHLGVIPRNYEGIVNRVTARFGLSASQQIRLEAEEEKLAHLPLAKTVSVEELLQYVELQDPVTRTQLRAMAAKTVCPPHKVELEALLEKQAYKEQVLAKRLTMLELLEKYPACEMKFSEFIALLPSIRPRYYSISSSPRVDEKQASITVSVVSGPAWSGYGEYKGIASNYLAELQEGDTITCFISTPQSEFTLPKDPETPLIMVGPGTGVAPFRGFVQARKQLKEQGQSLGEAHLYFGCRSPHEDYLYQEELENAQSEGIITLHTAFSRMPNQPKTYVQHVMEQDGKKLIELLDQGAHFYICGDGSQMAPAVEATLMKSYADVHQVSEADARLWLQQLEEKGRYAKDVWAG

SEQ ID NO: 249 - DNA, 3147 bp, synthetic construct
  misc_feature 1..3147: note = variant of P450 oxidase from Bacillus megaterium
  source 1..3147: mol_type = other DNA
atgacaattaaggaaatgcctcagcctaagacgtttggagaacttaaaaatttaccgttattaaacacagataaaccggttcaagctttgatgcgtattgcggatgaattaggagaaatctttaaattcgaggcgcctggtagcgtaacgcgctatttatcaagtcagcgtctaattaaagaagcatgcgatgaatcacgctttgataaaaacttaagtcaagcgcttaaatttgcacgtgattttgttggagacgggttagccacaagctggacgcatgaaccgaattggaaaaaagcgcataatatcttagttccaagctttagtcagcatgcaatggggcgttatcatgcgatgatggtcgatatcgccgtgcagcttgttcaaaagtgggagcgtctaaatgcagatgagcatattgaagtatcggaagacatgacacgtttaacgcttgatacaattggtctttgcggctttaactatcgctttaacagcttttaccgagatcagcctcatccatttattgtgagtatggtccgtgcactggatgaagtaatgaacaagctgcagcgagcaaatccagacgacccagcttatgatgaaaacaagcgccagtgtcaagaagatatcaaggtgatgaacgactatgtagataaaattattgcagatcgcaaagcaaggggtgaacaaagtcatgatttattaacgcagatgctaaacggaaaagatccagaaacgggtgagccgcttgatgacgggaacattcgtcagcaaattattacattcttaattgcgggacaccaaacaacaagtggtcttttatcatttgcgctgtatttcttagtgaaaaatccacatgtattacaaaaagtagcagaagaagcagcacgagttctagtagatcctgttccaagctacaaacaagtcaaacagcttaaatatgtcggcatggtcttaaacgaagcgctgcgcttatggccagtagcgcctatgttttccctatatgcaaaagaagatacggtgcttggaggagaatatcctttaacgaaaggcgacgaagtaatggttctggtgcctcagcttcaccgtgataaaacaatttggggagacgatgtggaggagttccgtccagagcgttttgaaaatccaagtgcgattccgcagcatgcgtttaaaccgtttggaaacggtcagcgtgcgtgtatcggtcaggcgttcgctcttcatgaagcaacgctggtacttggtatgatgctaaaacactttgactttgaagatcatacaaactacgagctcgttattaaagaaactcggacgttaaaacctgaaggctttgtggtaaaagcaaaatcgaaaggcattccgcttggcggtattccttcacctagcactgaacagtctgctaaaaaagtacgcaaaaaggcagaaaacgctcataatacgccgctgcttgtgctatacggttcaaatgcgggaacagctgaaggaacggcgcgtgatttagcagatattgcaatgagcaaaggatttgcaccgcaggtcgcaacgcttgattcacacgccggaaatcttccgcgcgaaggagctgtattaattgtaacggcgtcttataacggtcatccgcctgataacgcaaagcaatttgtcgactggttagaccaagcgtctgctgatgaagtaaaaggcgttcgctactccgtatttggatgcggcgataaaaattgggctgcgacgtatcaaaaagtgcctgcttttatcgatgaaacgcttgccgctaaaggggcagaaaacatcgctgaccgcggtgaagcagatgcaagcgacgactttgaaggcacatatgaagaatggcgtgatcatatgtggagtgacgtagcagcctactttaacctcgacattgaaaacagtgaagataataaatctactctttcacttcaatttgtcgacagcgccgcggatatgccgcttgcgaaaatgcacggtgcgttttcaacgaacgtcgtagcaagcaaagaacttcaacagccaggcagtgcacgaagcacgcgacatcttgaaattgaacttccaaaagaagcttcttatcaagaaggagatcatttaggtgttattcctcgcaactatgaaggaatagtaaaccgtgtaacagcaaggttcggcctaagcgcatcacagcaaatccgtctggaagcagaagaagaaaaattagctcatttgccactcgctaaaacagtatccgtagaagagcttctgcaatacgtggagcttcaagatcctgttacgcgcacgcagcttcgcgcaatggctgctaaaacggtctgcccgccgcataaagtagagcttgaagccttgcttgaaaagcaagcctacaaagaacaagtgctggcaaaacgtttaacaatgcttgaactgcttgaaaaatacccggcgtgtgaaatgaaattcagcgaatttatcgcccttctgccaagcatacgcccgcgctattactcgatttcttcatcacctcgtgtcgatgaaaaacaagcaagcatcacggtcagcgttgtctcaggaccggcgtggagcggatatggagaatataaaggaattgcgtcgaactatcttgccgagctgcaagaaggagatacgattacgtgctttatttccacaccgcagtcagaatttacgctgccaaaagaccctgaaacgccgcttatcatggtcggaccgggaacaggcgtcgcgccgtttagaggctttgtgcaggcgcgcaaacagctaaaagaacaaggacagtcacttggagaagcacatttatacttcggctgccgttcacctcatgaagactatctgtatcaagaagagcttgaaaacgcccaaagcgaaggcatcattacgcttcataccgctttttctcgcatgccaaatcagccgaaaacatacgttcagcacgtaatggaacaagacggcaagaaattgattgaacttcttgatcaaggagcgcacttctatatttgcggagacggaagccaaatggcacctgccgttgaagcaacgcttatgaaaagctatgctgacgttcaccaagtgagtgaagcagacgctcgcttatggctgcagcagctagaagaaaaaggccgatacgcaaaagacgtgtgggctggg

SEQ ID NO: 250 - protein, 1049 aa, synthetic construct
  REGION 1..1049: note = variant of P450 oxidase from Bacillus megaterium
MTIKEMPQPKTFGELKNLPLLNTDKPVQALMRIADELGEIFKFEAPGSVTRYLSSQRLIKEACDESRFDKNLSQALKFARDFVGDGLATSWTHEPNWKKAHNILVPSFSQHAMGRYHAMMVDIAVQLVQKWERLNADEHIEVSEDMTRLTLDTIGLCGFNYRFNSFYRDQPHPFIVSMVRALDEVMNKLQRANPDDPAYDENKRQCQEDIKVMNDYVDKIIADRKARGEQSHDLLTQMLNGKDPETGEPLDDGNIRQQIITFLIAGHQTTSGLLSFALYFLVKNPHVLQKVAEEAARVLVDPVPSYKQVKQLKYVGMVLNEALRLWPVAPMFSLYAKEDTVLGGEYPLTKGDEVMVLVPQLHRDKTIWGDDVEEFRPERFENPSAIPQHAFKPFGNGQRACIGQAFALHEATLVLGMMLKHFDFEDHTNYELVIKETRTLKPEGFVVKAKSKGIPLGGIPSPSTEQSAKKVRKKAENAHNTPLLVLYGSNAGTAEGTARDLADIAMSKGFAPQVATLDSHAGNLPREGAVLIVTASYNGHPPDNAKQFVDWLDQASADEVKGVRYSVFGCGDKNWAATYQKVPAFIDETLAAKGAENIADRGEADASDDFEGTYEEWRDHMWSDVAAYFNLDIENSEDNKSTLSLQFVDSAADMPLAKMHGAFSTNVVASKELQQPGSARSTRHLEIELPKEASYQEGDHLGVIPRNYEGIVNRVTARFGLSASQQIRLEAEEEKLAHLPLAKTVSVEELLQYVELQDPVTRTQLRAMAAKTVCPPHKVELEALLEKQAYKEQVLAKRLTMLELLEKYPACEMKFSEFIALLPSIRPRYYSISSSPRVDEKQASITVSVVSGPAWSGYGEYKGIASNYLAELQEGDTITCFISTPQSEFTLPKDPETPLIMVGPGTGVAPFRGFVQARKQLKEQGQSLGEAHLYFGCRSPHEDYLYQEELENAQSEGIITLHTAFSRMPNQPKTYVQHVMEQDGKKLIELLDQGAHFYICGDGSQMAPAVEATLMKSYADVHQVSEADARLWLQQLEEKGRYAKDVWAG

SEQ ID NO: 251 - DNA, 3147 bp, synthetic construct
  misc_feature 1..3147: note = variant of P450 oxidase from Bacillus megaterium
  source 1..3147: mol_type = other DNA
atgacaattaaggaaatgcctcagcctaagacgtttggagaacttaaaaatttaccgttattaaacacagataaaccggttcaagctttgatgcgtattgcggatgaattaggagaaatctttaaattcgaggcgcctggtagcgtaacgcgctatttatcaagtcagcgtctaattaaagaagcatgcgatgaatcacgctttgataaaaacttaagtcaagcgcttaaatttgcacgtgattttgttggagacgggttagccacaagctggacgcatgaaccgaattggaaaaaagcgcataatatcttagttccaagctttagtcagcatgcaatggggcgttatcatgcgatgatggtcgatatcgccgtgcagcttgttcaaaagtgggagcgtctaaatgcagatgagcatattgaagtatcggaagacatgacacgtttaacgcttgatacaattggtctttgcggctttaactatcgctttaacagcttttaccgagatcagcctcatccatttattgtgagtatggtccgtgcactggatgaagtaatgaacaagctgcagcgagcaaatccagacgacccagcttatgatgaaaacaagcgccagtgtcaagaagatatcaaggtgatgaacgactatgtagataaaattattgcagatcgcaaagcaaggggtgaacaaagtcatgatttattaacgcagatgctaaacggaaaagatccagaaacgggtgagccgcttgatgacgggaacattcgtcagcaaattattacattcttaattgcgggacaccaaacaacaagtggtcttttatcatttgcgctgtatttcttagtgaaaaatccacatgtattacaaaaagtagcagaagaagcagcacgagttctagtagatcctgttccaagctacaaacaagtcaaacagcttaaatatgtcggcatggtcttaaacgaagcgctgcgcttatggccagtagcgcctatgttttccctatatgcaaaagaagatacggtgcttggaggagaatatcctttaacgaaaggcgacgaagtaatggttctggtgcctcagcttcaccgtgataaaacaatttggggagacgatgtggaggagttccgtccagagcgttttgaaaatccaagtgcgattccgcagcatgcgtttaaaccgtttggaaacggtgtgcgtgcgtgtatcggtcagcagttcgctcttcatgaagcaacgctggtacttggtatgatgctaaaacactttgactttgaagatcatacaaactacgagctcgttattaaagaaactcggacgttaaaacctgaaggctttgtggtaaaagcaaaatcgaaaggcattccgcttggcggtattccttcacctagcactgaacagtctgctaaaaaagtacgcaaaaaggcagaaaacgctcataatacgccgctgcttgtgctatacggttcaaatgcgggaacagctgaaggaacggcgcgtgatttagcagatattgcaatgagcaaaggatttgcaccgcaggtcgcaacgcttgattcacacgccggaaatcttccgcgcgaaggagctgtattaattgtaacggcgtcttataacggtcatccgcctgataacgcaaagcaatttgtcgactggttagaccaagcgtctgctgatgaagtaaaaggcgttcgctactccgtatttggatgcggcgataaaaattgggctgcgacgtatcaaaaagtgcctgcttttatcgatgaaacgcttgccgctaaaggggcagaaaacatcgctgaccgcggtgaagcagatgcaagcgacgactttgaaggcacatatgaagaatggcgtgatcatatgtggagtgacgtagcagcctactttaacctcgacattgaaaacagtgaagataataaatctactctttcacttcaatttgtcgacagcgccgcggatatgccgcttgcgaaaatgcacggtgcgttttcaacgaacgtcgtagcaagcaaagaacttcaacagccaggcagtgcacgaagcacgcgacatcttgaaattgaacttccaaaagaagcttcttatcaagaaggagatcatttaggtgttattcctcgcaactatgaaggaatagtaaaccgtgtaacagcaaggttcggcctaagcgcatcacagcaaatccgtctggaagcagaagaagaaaaattagctcatttgccactcgctaaaacagtatccgtagaagagcttctgcaatacgtggagcttcaagatcctgttacgcgcacgcagcttcgcgcaatggctgctaaaacggtctgcccgccgcataaagtagagcttgaagccttgcttgaaaagcaagcctacaaagaacaagtgctggcaaaacgtttaacaatgcttgaactgcttgaaaaatacccggcgtgtgaaatgaaattcagcgaatttatcgcccttctgccaagcatacgcccgcgctattactcgatttcttcatcacctcgtgtcgatgaaaaacaagcaagcatcacggtcagcgttgtctcaggaccggcgtggagcggatatggagaatataaaggaattgcgtcgaactatcttgccgagctgcaagaaggagatacgattacgtgctttatttccacaccgcagtcagaatttacgctgccaaaagaccctgaaacgccgcttatcatggtcggaccgggaacaggcgtcgcgccgtttagaggctttgtgcaggcgcgcaaacagctaaaagaacaaggacagtcacttggagaagcacatttatacttcggctgccgttcacctcatgaagactatctgtatcaagaagagcttgaaaacgcccaaagcgaaggcatcattacgcttcataccgctttttctcgcatgccaaatcagccgaaaacatacgttcagcacgtaatggaacaagacggcaagaaattgattgaacttcttgatcaaggagcgcacttctatatttgcggagacggaagccaaatggcacctgccgttgaagcaacgcttatgaaaagctatgctgacgttcaccaagtgagtgaagcagacgctcgcttatggctgcagcagctagaagaaaaaggccgatacgcaaaagacgtgtgggctggg

SEQ ID NO: 252 - protein, 1049 aa, synthetic construct
  REGION 1..1049: note = variant of P450 oxidase from Bacillus megaterium
MTIKEMPQPKTFGELKNLPLLNTDKPVQALMRIADELGEIFKFEAPGSVTRYLSSQRLIKEACDESRFDKNLSQALKFARDFVGDGLATSWTHEPNWKKAHNILVPSFSQHAMGRYHAMMVDIAVQLVQKWERLNADEHIEVSEDMTRLTLDTIGLCGFNYRFNSFYRDQPHPFIVSMVRALDEVMNKLQRANPDDPAYDENKRQCQEDIKVMNDYVDKIIADRKARGEQSHDLLTQMLNGKDPETGEPLDDGNIRQQIITFLIAGHQTTSGLLSFALYFLVKNPHVLQKVAEEAARVLVDPVPSYKQVKQLKYVGMVLNEALRLWPVAPMFSLYAKEDTVLGGEYPLTKGDEVMVLVPQLHRDKTIWGDDVEEFRPERFENPSAIPQHAFKPFGNGVRACIGQQFALHEATLVLGMMLKHFDFEDHTNYELVIKETRTLKPEGFVVKAKSKGIPLGGIPSPSTEQSAKKVRKKAENAHNTPLLVLYGSNAGTAEGTARDLADIAMSKGFAPQVATLDSHAGNLPREGAVLIVTASYNGHPPDNAKQFVDWLDQASADEVKGVRYSVFGCGDKNWAATYQKVPAFIDETLAAKGAENIADRGEADASDDFEGTYEEWRDHMWSDVAAYFNLDIENSEDNKSTLSLQFVDSAADMPLAKMHGAFSTNVVASKELQQPGSARSTRHLEIELPKEASYQEGDHLGVIPRNYEGIVNRVTARFGLSASQQIRLEAEEEKLAHLPLAKTVSVEELLQYVELQDPVTRTQLRAMAAKTVCPPHKVELEALLEKQAYKEQVLAKRLTMLELLEKYPACEMKFSEFIALLPSIRPRYYSISSSPRVDEKQASITVSVVSGPAWSGYGEYKGIASNYLAELQEGDTITCFISTPQSEFTLPKDPETPLIMVGPGTGVAPFRGFVQARKQLKEQGQSLGEAHLYFGCRSPHEDYLYQEELENAQSEGIITLHTAFSRMPNQPKTYVQHVMEQDGKKLIELLDQGAHFYICGDGSQMAPAVEATLMKSYADVHQVSEADARLWLQQLEEKGRYAKDVWAG

SEQ ID NO: 253 - DNA, 3147 bp, synthetic construct
  misc_feature 1..3147: note = variant of P450 oxidase from Bacillus megaterium
  source 1..3147: mol_type = other DNA
atgacaattaaggaaatgcctcagcctaagacgtttggagaacttaaaaatttaccgttattaaacacagataaaccggttcaagctttgatgcgtattgcggatgaattaggagaaatctttaaattcgaggcgcctggtagcgtaacgcgctatttatcaagtcagcgtctaattaaagaagcatgcgatgaatcacgctttgataaaaacttaagtcaagcgcttaaatttgcacgtgattttgttggagacgggttagccacaagctggacgcatgaaccgaattggaaaaaagcgcataatatcttagttccaagctttagtcagcatgcaatggggcgttatcatgcgatgatggtcgatatcgccgtgcagcttgttcaaaagtgggagcgtctaaatgcagatgagcatattgaagtatcggaagacatgacacgtttaacgcttgatacaattggtctttgcggctttaactatcgctttaacagcttttaccgagatcagcctcatccatttattgtgagtatggtccgtgcactggatgaagtaatgaacaagctgcagcgagcaaatccagacgacccagcttatgatgaaaacaagcgccagtgtcaagaagatatcaaggtgatgaacgactatgtagataaaattattgcagatcgcaaagcaaggggtgaacaaagtcatgatttattaacgcagatgctaaacggaaaagatccagaaacgggtgagccgcttgatgacgggaacattcgtcagcaaattattacattcttaattgcgggacaccaaacaacaagtggtcttttatcatttgcgctgtatttcttagtgaaaaatccacatgtattacaaaaagtagcagaagaagcagcacgagttctagtagatcctgttccaagctacaaacaagtcaaacagcttaaatatgtcggcatggtcttaaacgaagcgctgcgcttatggccagtagcgcctatgttttccctatatgcaaaagaagatacggtgcttggaggagaatatcctttaacgaaaggcgacgaagtaatggttctggtgcctcagcttcaccgtgataaaacaatttggggagacgatgtggaggagttccgtccagagcgttttgaaaatccaagtgcgattccgcagcatgcgtttaaaccgtttggaaacggtcagcgtgcgtgtatcggtcagcagttcgctcttcatgaagcaacgctggtacttggtatgatgctaaaacactttgactttgaagatcatacaaactacgagctcgttattaaagaaactcggacgttaaaacctgaaggctttgtggtaaaagcaaaatcgaaaggcattccgcttggcggtattccttcacctagcactgaacagtctgctaaaaaagtacgcaaaaaggcagaaaacgctcataatacgccgctgcttgtgctatacggttcaaatgcgggaacagctgaaggaacggcgcgtgatttagcagatattgcaatgagcaaaggatttgcaccgcaggtcgcaacgcttgattcacacgccggaaatcttccgcgcgaaggagctgtattaattgtaacggcgtcttataacggtcatccgacggataacgcaaagcaatttgtcgactggttagaccaagcgtctgctgatgaagtaaaaggcgttcgctactccgtatttggatgcggcgataaaaattgggctgcgacgtatcaaaaagtgcctgcttttatcgatgaaacgcttgccgctaaaggggcagaaaacatcgctgaccgcggtgaagcagatgcaagcgacgactttgaaggcacatatgaagaatggcgtgatcatatgtggagtgacgtagcagcctactttaacctcgacattgaaaacagtgaagataataaatctactctttcacttcaatttgtcgacagcgccgcggatatgccgcttgcgaaaatgcacggtgcgttttcaacgaacgtcgtagcaagcaaagaacttcaacagccaggcagtgcacgaagcacgcgacatcttgaaattgaacttccaaaagaagcttcttatcaagaaggagatcatttaggtgttattcctcgcaactatgaaggaatagtaaaccgtgtaacagcaaggttcggcctaagcgcatcacagcaaatccgtctggaagcagaagaagaaaaattagctcatttgccactcgctaaaacagtatccgtagaagagcttctgcaatacgtggagcttcaagatcctgttacgcgcacgcagcttcgcgcaatggctgctaaaacggtctgcccgccgcataaagtagagcttgaagccttgcttgaaaagcaagcctacaaagaacaagtgctggcaaaacgtttaacaatgcttgaactgcttgaaaaatacccggcgtgtgaaatgaaattcagcgaatttatcgcccttctgccaagcatacgcccgcgctattactcgatttcttcatcacctcgtgtcgatgaaaaacaagcaagcatcacggtcagcgttgtctcaggaccggcgtggagcggatatggagaatataaaggaattgcgtcgaactatcttgccgagctgcaagaaggagatacgattacgtgctttatttccacaccgcagtcagaatttacgctgccaaaagaccctgaaacgccgcttatcatggtcggaccgggaacaggcgtcgcgccgtttagaggctttgtgcaggcgcgcaaacagctaaaagaacaaggacagtcacttggagaagcacatttatacttcggctgccgttcacctcatgaagactatctgtatcaagaagagcttgaaaacgcccaaagcgaaggcatcattacgcttcataccgctttttctcgcatgccaaatcagccgaaaacatacgttcagcacgtaatggaacaagacggcaagaaattgattgaacttcttgatcaaggagcgcacttctatatttgcggagacggaagccaaatggcacctgccgttgaagcaacgcttatgaaaagctatgctgacgttcaccaagtgagtgaagcagacgctcgcttatggctgcagcagctagaagaaaaaggccgatacgcaaaagacgtgtgggctggg

SEQ ID NO: 254 - protein, 1049 aa, synthetic construct
  REGION 1..1049: note = variant of P450 oxidase from Bacillus megaterium
MTIKEMPQPKTFGELKNLPLLNTDKPVQALMRIADELGEIFKFEAPGSVTRYLSSQRLIKEACDESRFDKNLSQALKFARDFVGDGLATSWTHEPNWKKAHNILVPSFSQHAMGRYHAMMVDIAVQLVQKWERLNADEHIEVSEDMTRLTLDTIGLCGFNYRFNSFYRDQPHPFIVSMVRALDEVMNKLQRANPDDPAYDENKRQCQEDIKVMNDYVDKIIADRKARGEQSHDLLTQMLNGKDPETGEPLDDGNIRQQIITFLIAGHQTTSGLLSFALYFLVKNPHVLQKVAEEAARVLVDPVPSYKQVKQLKYVGMVLNEALRLWPVAPMFSLYAKEDTVLGGEYPLTKGDEVMVLVPQLHRDKTIWGDDVEEFRPERFENPSAIPQHAFKPFGNGQRACIGQQFALHEATLVLGMMLKHFDFEDHTNYELVIKETRTLKPEGFVVKAKSKGIPLGGIPSPSTEQSAKKVRKKAENAHNTPLLVLYGSNAGTAEGTARDLADIAMSKGFAPQVATLDSHAGNLPREGAVLIVTASYNGHPTDNAKQFVDWLDQASADEVKGVRYSVFGCGDKNWAATYQKVPAFIDETLAAKGAENIADRGEADASDDFEGTYEEWRDHMWSDVAAYFNLDIENSEDNKSTLSLQFVDSAADMPLAKMHGAFSTNVVASKELQQPGSARSTRHLEIELPKEASYQEGDHLGVIPRNYEGIVNRVTARFGLSASQQIRLEAEEEKLAHLPLAKTVSVEELLQYVELQDPVTRTQLRAMAAKTVCPPHKVELEALLEKQAYKEQVLAKRLTMLELLEKYPACEMKFSEFIALLPSIRPRYYSISSSPRVDEKQASITVSVVSGPAWSGYGEYKGIASNYLAELQEGDTITCFISTPQSEFTLPKDPETPLIMVGPGTGVAPFRGFVQARKQLKEQGQSLGEAHLYFGCRSPHEDYLYQEELENAQSEGIITLHTAFSRMPNQPKTYVQHVMEQDGKKLIELLDQGAHFYICGDGSQMAPAVEATLMKSYADVHQVSEADARLWLQQLEEKGRYAKDVWAG

SEQ ID NO: 255 - DNA, 3147 bp, synthetic construct
  misc_feature 1..3147: note = variant of P450 oxidase from Bacillus megaterium
  source 1..3147: mol_type = other DNA
atgacaattaaggaaatgcctcagcctaagacgtttggagaacttaaaaatttaccgttattaaacacagataaaccggttcaagctttgatgcgtattgcggatgaattaggagaaatctttaaattcgaggcgcctggtagcgtaacgcgctatttatcaagtcagcgtctaattaaagaagcatgcgatgaatcacgctttgataaaaacttaagtcaagcgcttaaatttgcacgtgattttgttggagacgggttagccacaagctggacgcatgaaccgaattggaaaaaagcgcataatatcttagttccaagctttagtcagcatgcaatggggcgttatcatgcgatgatggtcgatatcgccgtgcagcttgttcaaaagtgggagcgtctaaatgcagatgagcatattgaagtatcggaagacatgacacgtttaacgcttgatacaattggtctttgcggctttaactatcgctttaacagcttttaccgagatcagcctcatccatttattgtgagtatggtccgtgcactggatgaagtaatgaacaagctgcagcgagcaaatccagacgacccagcttatgatgaaaacaagcgccagtgtcaagaagatatcaaggtgatgaacgactatgtagataaaattattgcagatcgcaaagcaaggggtgaacaaagtcatgatttattaacgcagatgctaaacggaaaagatccagaaacgggtgagccgcttgatgacgggaacattcgtcagcaaattattacattcttaattgcgggacaccaaacaacaagtggtcttttatcatttgcgctgtatttcttagtgaaaaatccacatgtattacaaaaagtagcagaagaagcagcacgagttctagtagatcctgttccaagctacaaacaagtcaaacagcttaaatatgtcggcatggtcttaaacgaagcgctgcgcttatggccagtagcgcctatgttttccctatatgcaaaagaagatacggtgcttggaggagaatatcctttaacgaaaggcgacgaagtaatggttctggtgcctcagcttcaccgtgataaaacaatttggggagacgatgtggaggagttccgtccagagcgttttgaaaatccaagtgcgattccgcagcatgcgtttaaaccgtttggaaacggtcagcgtgcgtgtatcggtcagcagttcgctcttcatgaagcaacgctggtacttggtatgatgctaaaacactttgactttgaagatcatacaaactacgagctcgttattaaagaaactcggacgttaaaacctgaaggctttgtggtaaaagcaaaatcgaaaggcattccgcttggcggtattccttcacctagcactgaacagtctgctaaaaaagtacgcaaaaaggcagaaaacgctcataatacgccgctgcttgtgctatacggttcaaatgcgggaacagctgaaggaacggcgcgtgatttagcagatacggcaatgagcaaaggatttgcaccgcaggtcgcaacgcttgattcacacgccggaaatcttccgcgcgaaggagctgtattaattgtaacggcgtcttataacggtcatccgcctgataacgcaaagcaatttgtcgactggttagaccaagcgtctgctgatgaagtaaaaggcgttcgctactccgtatttggatgcggcgataaaaattgggctgcgacgtatcaaaaagtgcctgcttttatcgatgaaacgcttgccgctaaaggggcagaaaacatcgctgaccgcggtgaagcagatgcaagcgacgactttgaaggcacatatgaagaatggcgtgatcatatgtggagtgacgtagcagcctactttaacctcgacattgaaaacagtgaagataataaatctactctttcacttcaatttgtcgacagcgccgcggatatgccgcttgcgaaaatgcacggtgcgttttcaacgaacgtcgtagcaagcaaagaacttcaacagccaggcagtgcacgaagcacgcgacatcttgaaattgaacttccaaaagaagcttcttatcaagaaggagatcatttaggtgttattcctcgcaactatgaaggaatagtaaaccgtgtaacagcaaggttcggcctaagcgcatcacagcaaatccgtctggaagcagaagaagaaaaattagctcatttgccactcgctaaaacagtatccgtagaagagcttctgcaatacgtggagcttcaagatcctgttacgcgcacgcagcttcgcgcaatggctgctaaaacggtctgcccgccgcataaagtagagcttgaagccttgcttgaaaagcaagcctacaaagaacaagtgctggcaaaacgtttaacaatgcttgaactgcttgaaaaatacccggcgtgtgaaatgaaattcagcgaatttatcgcccttctgccaagcatacgcccgcgctattactcgatttcttcatcacctcgtgtcgatgaaaaacaagcaagcatcacggtcagcgttgtctcaggaccggcgtggagcggatatggagaatataaaggaattgcgtcgaactatcttgccgagctgcaagaaggagatacgattacgtgctttatttccacaccgcagtcagaatttacgctgccaaaagaccctgaaacgccgcttatcatggtcggaccgggaacaggcgtcgcgccgtttagaggctttgtgcaggcgcgcaaacagctaaaagaacaaggacagtcacttggagaagcacatttatacttcggctgccgttcacctcatgaagactatctgtatcaagaagagcttgaaaacgcccaaagcgaaggcatcattacgcttcataccgctttttctcgcatgccaaatcagccgaaaacatacgttcagcacgtaatggaacaagacggcaagaaattgattgaacttcttgatcaaggagcgcacttctatatttgcggagacggaagccaaatggcacctgccgttgaagcaacgcttatgaaaagctatgctgacgttcaccaagtgagtgaagcagacgctcgcttatggctgcagcagctagaagaaaaaggccgatacgcaaaagacgtgtgggctggg

SEQ ID NO: 256 - protein, 1049 aa, synthetic construct
  REGION 1..1049: note = variant of P450 oxidase from Bacillus megaterium
MTIKEMPQPKTFGELKNLPLLNTDKPVQALMRIADELGEIFKFEAPGSVTRYLSSQRLIKEACDESRFDKNLSQALKFARDFVGDGLATSWTHEPNWKKAHNILVPSFSQHAMGRYHAMMVDIAVQLVQKWERLNADEHIEVSEDMTRLTLDTIGLCGFNYRFNSFYRDQPHPFIVSMVRALDEVMNKLQRANPDDPAYDENKRQCQEDIKVMNDYVDKIIADRKARGEQSHDLLTQMLNGKDPETGEPLDDGNIRQQIITFLIAGHQTTSGLLSFALYFLVKNPHVLQKVAEEAARVLVDPVPSYKQVKQLKYVGMVLNEALRLWPVAPMFSLYAKEDTVLGGEYPLTKGDEVMVLVPQLHRDKTIWGDDVEEFRPERFENPSAIPQHAFKPFGNGQRACIGQQFALHEATLVLGMMLKHFDFEDHTNYELVIKETRTLKPEGFVVKAKSKGIPLGGIPSPSTEQSAKKVRKKAENAHNTPLLVLYGSNAGTAEGTARDLADTAMSKGFAPQVATLDSHAGNLPREGAVLIVTASYNGHPPDNAKQFVDWLDQASADEVKGVRYSVFGCGDKNWAATYQKVPAFIDETLAAKGAENIADRGEADASDDFEGTYEEWRDHMWSDVAAYFNLDIENSEDNKSTLSLQFVDSAADMPLAKMHGAFSTNVVASKELQQPGSARSTRHLEIELPKEASYQEGDHLGVIPRNYEGIVNRVTARFGLSASQQIRLEAEEEKLAHLPLAKTVSVEELLQYVELQDPVTRTQLRAMAAKTVCPPHKVELEALLEKQAYKEQVLAKRLTMLELLEKYPACEMKFSEFIALLPSIRPRYYSISSSPRVDEKQASITVSVVSGPAWSGYGEYKGIASNYLAELQEGDTITCFISTPQSEFTLPKDPETPLIMVGPGTGVAPFRGFVQARKQLKEQGQSLGEAHLYFGCRSPHEDYLYQEELENAQSEGIITLHTAFSRMPNQPKTYVQHVMEQDGKKLIELLDQGAHFYICGDGSQMAPAVEATLMKSYADVHQVSEADARLWLQQLEEKGRYAKDVWAG

SEQ ID NO: 257 - DNA, 3147 bp, synthetic construct
  misc_feature 1..3147: note = variant of P450 oxidase from Bacillus megaterium
  source 1..3147: mol_type = other DNA
atgacaattaaggaaatgcctcagcctaagacgtttggagaacttaaaaatttaccgttattaaacacagataaaccggttcaagctttgatgcgtattgcggatgaattaggagaaatctttaaattcgaggcgcctggtagcgtaacgcgctatttatcaagtcagcgtctaattaaagaagcatgcgatgaatcacgctttgataaaaacttaagtcaagcgcttaaatttgcacgtgattttgttggagacgggttagccacaagctggacgcatgaaccgaattggaaaaaagcgcataatatcttagttccaagctttagtcagcatgcaatggggcgttatcatgcgatgatggtcgatatcgccgtgcagcttgttcaaaagtgggagcgtctaaatgcagatgagcatattgaagtatcggaagacatgacacgtttaacgcttgatacaattggtctttgcggctttaactatcgctttaacagcttttaccgagatcagcctcatccatttattgtgagtatggtccgtgccctggatgaagtaatgaacaagctgcagcgagcaaatccagacgacccagcttatgatgaaaacaagcgccagtgtcaagaagatatcaaggtgatgaacgactatgtagataaaattattgcagatcgcaaagcaaggggtgaacaaagtcatgatttattaacgcagatgctaaacggaaaagatccagaaacgggtgagccgcttgatgacgggaacattcgtcagcaaattattacattcttaattgcgggacaccaaacaacaagtggtcttttatcatttgcgctgtatttcttagtgaaaaatccacatgtattacaaaaagtagcagaagaagcagcacgagttctagtagatcctgttccaagctacaaacaagtcaaacagcttaaatatgtcggcatggtcttaaacgaagcgctgcgcttatggccagtagcgcctatgttttccctatatgcaaaagaagatacggtgcttggaggagaatatcctttaacgaaaggcgacgaagtaatggttctggtgcctcagcttcaccgtgataaaacaatttggggagacgatgtggaggagttccgtccagagcgttttgaaaatccaagtgcgattccgcagcatgcgtataaaccgtttggaaacggtcagcgtgcgtgtatcggtcagcagttcgctcttcatgaagcaacgctggtacttggtatgatgctaaaacactttgactttgaagatcatacaaactacgagctcgttattaaagaaactcggacgttaaaacctgaaggctttgtggtaaaagcaaaatcgaaaggcattccgcttggcggtattccttcacctagcactgaacagtctgctaaaaaagtacgcaaaaaggcagaaaacgctcataatacgccgctgcttgtgctatacggttcaaatgcgggaacagctgaaggaacggcgcgtgatttagcagatattgcaatgagcaaaggatttgcaccgcaggtcgcaacgcttgattcacacgccggaaatcttccgcgcgaaggagctgtattaattgtaacggcgtcttataacggtcatccgcctgataacgcaaagcaatttgtcgactggttagaccaagcgtctgctgatgaagtaaaaggcgttcgctactccgtatttggatgcggcgataaaaattgggctgcgacgtatcaaaaagtgcctgcttttatcgatgaaacgcttgccgctaaaggggcagaaaacatcgctgaccgcggtgaagcagatgcaagcgacgactttgaaggcacatatgaagaatggcgtgatcatatgtggagtgacgtagcagcctactttaacctcgacattgaaaacagtgaagataataaatctactctttcacttcaatttgtcgacagcgccgcggatatgccgcttgcgaaaatgcacggtgcgttttcaacgaacgtcgtagcaagcaaagaacttcaacagccaggcagtgcacgaagcacgcgacatcttgaaattgaacttccaaaagaagcttcttatcaagaaggagatcatttaggtgttattcctcgcaactatgaaggaatagtaaaccgtgtaacagcaaggttcggcctaagcgcatcacagcaaatccgtctggaagcagaagaagaaaaattagctcatttgccactcgctaaaacagtatccgtagaagagcttctgcaatacgtggagcttcaagatcctgttacgcgcacgcagcttcgcgcaatggctgctaaaacggtctgcccgccgcataaagtagagcttgaagccttgcttgaaaagcaagcctacaaagaacaagtgctggcaaaacgtttaacaatgcttgaactgcttgaaaaatacccggcgtgtgaaatgaaattcagcgaatttatcgcccttctgccaagcatacgcccgcgctattactcgatttcttcatcacctcgtgtcgatgaaaaacaagcaagcatcacggtcagcgttgtctcaggaccggcgtggagcggatatggagaatataaaggaattgcgtcgaactatcttgccgagctgcaagaaggagatacgattacgtgctttatttccacaccgcagtcagaatttacgctgccaaaagaccctgaaacgccgcttatcatggtcggaccgggaacaggcgtcgcgccgtttagaggctttgtgcaggcgcgcaaacagctaaaagaacaaggacagtcacttggagaagcacatttatacttcggctgccgttcacctcatgaagactatctgtatcaagaagagcttgaaaacgcccaaagcgaaggcatcattacgcttcataccgctttttctcgcatgccaaatcagccgaaaacatacgttcagcacgtaatggaacaagacggcaagaaattgattgaacttcttgatcaaggagcgcacttctatatttgcggagacggaagccaaatggcacctgccgttgaagcaacgcttatgaaaagctatgctgacgttcaccaagtgagtgaagcagacgctcgcttatggctgcagcagctagaagaaaaaggccgatacgcaaaagacgtgtgggctggg

SEQ ID NO: 258 - protein, 1049 aa, synthetic construct
  REGION 1..1049: note = variant of P450 oxidase from Bacillus megaterium
MTIKEMPQPKTFGELKNLPLLNTDKPVQALMRIADELGEIFKFEAPGSVTRYLSSQRLIKEACDESRFDKNLSQALKFARDFVGDGLATSWTHEPNWKKAHNILVPSFSQHAMGRYHAMMVDIAVQLVQKWERLNADEHIEVSEDMTRLTLDTIGLCGFNYRFNSFYRDQPHPFIVSMVRALDEVMNKLQRANPDDPAYDENKRQCQEDIKVMNDYVDKIIADRKARGEQSHDLLTQMLNGKDPETGEPLDDGNIRQQIITFLIAGHQTTSGLLSFALYFLVKNPHVLQKVAEEAARVLVDPVPSYKQVKQLKYVGMVLNEALRLWPVAPMFSLYAKEDTVLGGEYPLTKGDEVMVLVPQLHRDKTIWGDDVEEFRPERFENPSAIPQHAYKPFGNGQRACIGQQFALHEATLVLGMMLKHFDFEDHTNYELVIKETRTLKPEGFVVKAKSKGIPLGGIPSPSTEQSAKKVRKKAENAHNTPLLVLYGSNAGTAEGTARDLADIAMSKGFAPQVATLDSHAGNLPREGAVLIVTASYNGHPPDNAKQFVDWLDQASADEVKGVRYSVFGCGDKNWAATYQKVPAFIDETLAAKGAENIADRGEADASDDFEGTYEEWRDHMWSDVAAYFNLDIENSEDNKSTLSLQFVDSAADMPLAKMHGAFSTNVVASKELQQPGSARSTRHLEIELPKEASYQEGDHLGVIPRNYEGIVNRVTARFGLSASQQIRLEAEEEKLAHLPLAKTVSVEELLQYVELQDPVTRTQLRAMAAKTVCPPHKVELEALLEKQAYKEQVLAKRLTMLELLEKYPACEMKFSEFIALLPSIRPRYYSISSSPRVDEKQASITVSVVSGPAWSGYGEYKGIASNYLAELQEGDTITCFISTPQSEFTLPKDPETPLIMVGPGTGVAPFRGFVQARKQLKEQGQSLGEAHLYFGCRSPHEDYLYQEELENAQSEGIITLHTAFSRMPNQPKTYVQHVMEQDGKKLIELLDQGAHFYICGDGSQMAPAVEATLMKSYADVHQVSEADARLWLQQLEEKGRYAKDVWAG

SEQ ID NO: 259 - DNA, 3147 bp, synthetic construct
  misc_feature 1..3147: note = variant of P450 oxidase from Bacillus megaterium
  source 1..3147: mol_type = other DNA
atgacaattaaggaaatgcctcagcctaagacgtttggagaacttaaaaatttaccgttattaaacacagataaaccggttcaagctttgatgcgtattgcggatgaattaggagaaatctttaaattcgaggcgcctggtagcgtaacgcgctatttatcaagtcagcgtctaattaaagaagcatgcgatgaatcacgctttgataaaaacttaagtcaagcgcttaaatttgcacgtgattttgttggagacgggttagccacaagctggacgcatgaaccgaattggaaaaaagcgcataatatcttagttccaagctttagtcagcatgcaatggggcgttatcatgcgatgatggtcgatatcgccgtgcagcttgttcaaaagtgggagcgtctaaatgcagatgagcatattgaagtatcggaagacatgacacgtttaacgcttgatacaattggtctttgcggctttaactatcgctttaacagcttttaccgagatcagcctcatccatttattgtgagtatggtccgtgcactggatgaagtaatgaacaagctgcagcgagcaaatccagacgacccagcttatgatgaaaacaagcgccagtgtcaagaagatatcaaggtgatgaacgactatgtagataaaattattgcagatcgcaaagcaaggggtgaacaaagtcatgatttattaacgcagatgctaaacggaaaagatccagaaacgggtgagccgcttgatgacgggaacattcgtcagcaaattattacattcttaattgcgggacaccaaacaacaagtggtcttttatcatttgcgctgtatttcttagtgaaaaatccacatgtattacaaaaagtagcagaagaagcagcacgagttctagtagatcctgttccaagctacaaacaagtcaaacagcttaaatatgtcggcatggtcttaaacgaagcgctgcgcttatggccagtagcgcctatgttttccctatatgcaaaagaagatacggtgcttggaggagaatatcctttaacgaaaggcgacgaagtaatggttctggtgcctcagcttcaccgtgataaaacaatttggggagacgatgtggaggagttccgtccagagcgttttgaaaatccaagtgcgattccgcagcatgcgtttaaaccgtttggaaacggtcagcgtgcgtgtatcggtcagcagttcgctcttcatgaagcaacgctggtacttggtatgatgctaaaacactttgactttgaagatcatacaaactacgagctcgttattaaagaaactcggacgttaaaacctgaaggctttgtggtaaaagcaaaatcgaaaggcattccgcttggcggtattccttcacctagcactgaacagtctgctaaaaaagtacgcaaaaaggcagaaaacgctcataatacgccgctgcttgtgctatacggttcaaatgcgggaacagctgaaggaacggcgcgtgatttagcagatattgcaatgagcaaaggatttgcaccgcaggtcgcaacgcttgattcacacgccggaaatcttccgcgcgaaggagctgtattaattgtaacggcgtcttataacggtcatgcgcctgataacgcaaagcaatttgtcgactggttagaccaagcgtctgctgatgaagtaaaaggcgttcgctactccgtatttggatgcggcgataaaaattgggctgcgacgtatcaaaaagtgcctgcttttatcgatgaaacgcttgccgctaaaggggcagaaaacatcgctgaccgcggtgaagcagatgcaagcgacgactttgaaggcacatatgaagaatggcgtgatcatatgtggagtgacgtagcagcctactttaacctcgacattgaaaacagtgaagataataaatctactctttcacttcaatttgtcgacagcgccgcggatatgccgcttgcgaaaatgcacggtgcgttttcaacgaacgtcgtagcaagcaaagaacttcaacagccaggcagtgcacgaagcacgcgacatcttgaaattgaacttccaaaagaagcttcttatcaagaaggagatcatttaggtgttattcctcgcaactatgaaggaatagtaaaccgtgtaacagcaaggttcggcctaagcgcatcacagcaaatccgtctggaagcagaagaagaaaaattagctcatttgccactcgctaaaacagtatccgtagaagagcttctgcaatacgtggagcttcaagatcctgttacgcgcacgcagcttcgcgcaatggctgctaaaacggtctgcccgccgcataaagtagagcttgaagccttgcttgaaaagcaagcctacaaagaacaagtgctggcaaaacgtttaacaatgcttgaactgcttgaaaaatacccggcgtgtgaaatgaaattcagcgaatttatcgcccttctgccaagcatacgcccgcgctattactcgatttcttcatcacctcgtgtcgatgaaaaacaagcaagcatcacggtcagcgttgtctcaggaccggcgtggagcggatatggagaatataaaggaattgcgtcgaactatcttgccgagctgcaagaaggagatacgattacgtgctttatttccacaccgcagtcagaatttacgctgccaaaagaccctgaaacgccgcttatcatggtcggaccgggaacaggcgtcgcgccgtttagaggctttgtgcaggcgcgcaaacagctaaaagaacaaggacagtcacttggagaagcacatttatacttcggctgccgttcacctcatgaagactatctgtatcaagaagagcttgaaaacgcccaaagcgaaggcatcattacgcttcataccgctttttctcgcatgccaaatcagccgaaaacatacgttcagcacgtaatggaacaagacggcaagaaattgattgaacttcttgatcaaggagcgcacttctatatttgcggagacggaagccaaatggcacctgccgttgaagcaacgcttatgaaaagctatgctgacgttcaccaagtgagtgaagcagacgctcgcttatggctgcagcagctagaagaaaaaggccgatacgcaaaagacgtgtgggctggg

SEQ ID NO: 260 - protein, 1049 aa, synthetic construct
  REGION 1..1049: note = variant of P450 oxidase from Bacillus megaterium
MTIKEMPQPKTFGELKNLPLLNTDKPVQALMRIADELGEIFKFEAPGSVTRYLSSQRLIKEACDESRFDKNLSQALKFARDFVGDGLATSWTHEPNWKKAHNILVPSFSQHAMGRYHAMMVDIAVQLVQKWERLNADEHIEVSEDMTRLTLDTIGLCGFNYRFNSFYRDQPHPFIVSMVRALDEVMNKLQRANPDDPAYDENKRQCQEDIKVMNDYVDKIIADRKARGEQSHDLLTQMLNGKDPETGEPLDDGNIRQQIITFLIAGHQTTSGLLSFALYFLVKNPHVLQKVAEEAARVLVDPVPSYKQVKQLKYVGMVLNEALRLWPVAPMFSLYAKEDTVLGGEYPLTKGDEVMVLVPQLHRDKTIWGDDVEEFRPERFENPSAIPQHAFKPFGNGQRACIGQQFALHEATLVLGMMLKHFDFEDHTNYELVIKETRTLKPEGFVVKAKSKGIPLGGIPSPSTEQSAKKVRKKAENAHNTPLLVLYGSNAGTAEGTARDLADIAMSKGFAPQVATLDSHAGNLPREGAVLIVTASYNGHAPDNAKQFVDWLDQASADEVKGVRYSVFGCGDKNWAATYQKVPAFIDETLAAKGAENIADRGEADASDDFEGTYEEWRDHMWSDVAAYFNLDIENSEDNKSTLSLQFVDSAADMPLAKMHGAFSTNVVASKELQQPGSARSTRHLEIELPKEASYQEGDHLGVIPRNYEGIVNRVTARFGLSASQQIRLEAEEEKLAHLPLAKTVSVEELLQYVELQDPVTRTQLRAMAAKTVCPPHKVELEALLEKQAYKEQVLAKRLTMLELLEKYPACEMKFSEFIALLPSIRPRYYSISSSPRVDEKQASITVSVVSGPAWSGYGEYKGIASNYLAELQEGDTITCFISTPQSEFTLPKDPETPLIMVGPGTGVAPFRGFVQARKQLKEQGQSLGEAHLYFGCRSPHEDYLYQEELENAQSEGIITLHTAFSRMPNQPKTYVQHVMEQDGKKLIELLDQGAHFYICGDGSQMAPAVEATLMKSYADVHQVSEADARLWLQQLEEKGRYAKDVWAG

SEQ ID NO: 261 - DNA, 3147 bp, synthetic construct
  misc_feature 1..3147: note = variant of P450 oxidase from Bacillus megaterium
  source 1..3147: mol_type = other DNA
atgacaattaaggaaatgcctcagcctaagacgtttggagaacttaaaaatttaccgttattaaacacagataaaccggttcaagctttgatgcgtattgcggatgaattaggagaaatctttaaattcgaggcgcctggtagcgtaacgcgctatttatcaagtcagcgtctaattaaagaagcatgcgatgaatcacgctttgataaaaacttaagtcaagcgcttaaatttgcacgtgattttgttggagacgggttagccacaagctggacgcatgaaccgaattggaaaaaagcgcataatatcttagttccaagctttagtcagcatgcaatggggcgttatcatgcgatgatggtcgatatcgccgtgcagcttgttcaaaagtgggagcgtctaaatgcagatgagcatattgaagtatcggaagacatgacacgtttaacgcttgatacaattggtctttgcggctttaactatcgctttaacagcttttaccgagatcagcctcatccatttattgtgagtatggtccgtgcactggatgaagtaatgaacaagctgcagcgagcaaatccagacgacccagcttatgatgaaaacaagcgccagtgtcaagaagatatcaaggtgatgaacgactatgtagataaaattattgcagatcgcaaagcaaggggtgaacaaagtcatgatttattaacgcagatgctaaacggaaaagatccagaaacgggtgagccgcttgatgacgggaacattcgtcagcaaattattacattcttaattgcgggacaccaaacaacaagtggtcttttatcatttgcgctgtatttcttagtgaaaaatccacatgtattacaaaaagtagcagaagaagcagcacgagttctagtagatcctgttccaagctacaaacaagtcaaacagcttaaatatgtcggcatggtcttaaacgaagcgctgcgcttatggccagtagcgcctatgttttccctatatgcaaaagaagatacggtgcttggaggagaatatcctttaacgaaaggcgacgaagtaatggttctggtgcctcagcttcaccgtgataaaacaatttggggagacgatgtggaggagttccgtccagagcgttttgaaaatccaagtgcgattccgcttcatgcgtttaaaccgtttggaaacggtcagcgtgcgtgtatcggtcagcagttcgctcttcatgaagcaacgctggtacttggtatgatgctaaaacactttgactttgaagatcatacaaactacgagctcgttattaaagaaactcggacgttaaaacctgaaggctttgtggtaaaagcaaaatcgaaaggcattccgcttggcggtattccttcacctagcactgaacagtctgctaaaaaagtacgcaaaaaggcagaaaacgctcataatacgccgctgcttgtgctatacggttcaaatgcgggaacagctgaaggaacggcgcgtgatttagcagatattgcaatgagcaaaggatttgcaccgcaggtcgcaacgcttgattcacacgccggaaatcttccgcgcgaaggagctgtattaattgtaacggcgtcttataacggtcatccgcctgataacgcaaagcaatttgtcgactggttagaccaagcgtctgctgatgaagtaaaaggcgttcgctactccgtatttggatgcggcgataaaaattgggctgcgacgtatcaaaaagtgcctgcttttatcgatgaaacgcttgccgctaaaggggcagaaaacatcgctgaccgcggtgaagcagatgcaagcgacgactttgaaggcacatatgaagaatggcgtgatcatatgtggagtgacgtagcagcctactttaacctcgacattgaaaacagtgaagataataaatctactctttcacttcaatttgtcgacagcgccgcggatatgccgcttgcgaaaatgcacggtgcgttttcaacgaacgtcgtagcaagcaaagaacttcaacagccaggcagtgcacgaagcacgcgacatcttgaaattgaacttccaaaagaagcttcttatcaagaaggagatcatttaggtgttattcctcgcaactatgaaggaatagtaaaccgtgtaacagcaaggttcggcctaagcgcatcacagcaaatccgtctggaagcagaagaagaaaaattagctcatttgccactcgctaaaacagtatccgtagaagagcttctgcaatacgtggagcttcaagatcctgttacgcgcacgcagcttcgcgcaatggctgctaaaacggtctgcccgccgcataaagtagagcttgaagccttgcttgaaaagcaagcctacaaagaacaagtgctggcaaaacgtttaacaatgcttgaactgcttgaaaaatacccggcgtgtgaaatgaaattcagcgaatttatcgcccttctgccaagcatacgcccgcgctattactcgatttcttcatcacctcgtgtcgatgaaaaacaagcaagcatcacggtcagcgttgtctcaggaccggcgtggagcggatatggagaatataaaggaattgcgtcgaactatcttgccgagctgcaagaaggagatacgattacgtgctttatttccacaccgcagtcagaatttacgctgccaaaagaccctgaaacgccgcttatcatggtcggaccgggaacaggcgtcgcgccgtttagaggctttgtgcaggcgcgcaaacagctaaaagaacaaggacagtcacttggagaagcacatttatacttcggctgccgttcacctcatgaagactatctgtatcaagaagagcttgaaaacgcccaaagcgaaggcatcattacgcttcataccgctttttctcgcatgccaaatcagccgaaaacatacgttcagcacgtaatggaacaagacggcaagaaattgattgaacttcttgatcaaggagcgcacttctatatttgcggagacggaagccaaatggcacctgccgttgaagcaacgcttatgaaaagctatgctgacgttcaccaagtgagtgaagcagacgctcgcttatggctgcagcagctagaagaaaaaggccgatacgcaaaagacgtgtgggctggg

SEQ ID NO: 262 - protein, 1049 aa, synthetic construct
  REGION 1..1049: note = variant of P450 oxidase from Bacillus megaterium
MTIKEMPQPKTFGELKNLPLLNTDKPVQALMRIADELGEIFKFEAPGSVTRYLSSQRLIKEACDESRFDKNLSQALKFARDFVGDGLATSWTHEPNWKKAHNILVPSFSQHAMGRYHAMMVDIAVQLVQKWERLNADEHIEVSEDMTRLTLDTIGLCGFNYRFNSFYRDQPHPFIVSMVRALDEVMNKLQRANPDDPAYDENKRQCQEDIKVMNDYVDKIIADRKARGEQSHDLLTQMLNGKDPETGEPLDDGNIRQQIITFLIAGHQTTSGLLSFALYFLVKNPHVLQKVAEEAARVLVDPVPSYKQVKQLKYVGMVLNEALRLWPVAPMFSLYAKEDTVLGGEYPLTKGDEVMVLVPQLHRDKTIWGDDVEEFRPERFENPSAIPLHAFKPFGNGQRACIGQQFALHEATLVLGMMLKHFDFEDHTNYELVIKETRTLKPEGFVVKAKSKGIPLGGIPSPSTEQSAKKVRKKAENAHNTPLLVLYGSNAGTAEGTARDLADIAMSKGFAPQVATLDSHAGNLPREGAVLIVTASYNGHPPDNAKQFVDWLDQASADEVKGVRYSVFGCGDKNWAATYQKVPAFIDETLAAKGAENIADRGEADASDDFEGTYEEWRDHMWSDVAAYFNLDIENSEDNKSTLSLQFVDSAADMPLAKMHGAFSTNVVASKELQQPGSARSTRHLEIELPKEASYQEGDHLGVIPRNYEGIVNRVTARFGLSASQQIRLEAEEEKLAHLPLAKTVSVEELLQYVELQDPVTRTQLRAMAAKTVCPPHKVELEALLEKQAYKEQVLAKRLTMLELLEKYPACEMKFSEFIALLPSIRPRYYSISSSPRVDEKQASITVSVVSGPAWSGYGEYKGIASNYLAELQEGDTITCFISTPQSEFTLPKDPETPLIMVGPGTGVAPFRGFVQARKQLKEQGQSLGEAHLYFGCRSPHEDYLYQEELENAQSEGIITLHTAFSRMPNQPKTYVQHVMEQDGKKLIELLDQGAHFYICGDGSQMAPAVEATLMKSYADVHQVSEADARLWLQQLEEKGRYAKDVWAG

SEQ ID NO: 263 - DNA, 3147 bp, synthetic construct
  misc_feature 1..3147: note = variant of P450 oxidase from Bacillus megaterium
  source 1..3147: mol_type = other DNA
atgacaattaaggaaatgcctcagcctaagacgtttggagaacttaaaaatttaccgttattaaacacagataaaccggttcaagctttgatgcgtattgcggatgaattaggagaaatctttaaattcgaggcgcctggtagcgtaacgcgctatttatcaagtcagcgtctaattaaagaagcatgcgatgaatcacgctttgataaaaacttaagtcaagcgcttaaatttgcacgtgattttgttggagacgggttagccacaagctggacgcatgaaccgaattggaaaaaagcgcataatatcttagttccaagctttagtcagcatgcaatggggcgttatcatgcgatgatggtcgatatcgccgtgcagcttgttcaaaagtgggagcgtctaaatgcagatgagcatattgaagtatcggaagacatgacacgtttaacgcttgatacaattggtctttgcggctttaactatcgctttaacagcttttaccgagatcagcctcatccatttattgtgagtatggtccgtgcactggatgaagtaatgaacaagctgcagcgagcaaatccagacgacccagcttatgatgaaaacaagcgccagtgtcaagaagatatcaaggtgatgaacgactatgtagataaaattattgcagatcgcaaagcaaggggtgaacaaagtcatgatttattaacgcagatgctaaacggaaaagatccagaaacgggtgagccgcttgatgacgggaacattcgtcagcaaattattacattcttaattgcgggacaccaaacaacaagtggtcttttatcatttgcgctgtatttcttagtgaaaaatccacatgtattacaaaaagtagcagaagaagcagcacgagttctagtagatcctgttccaagctacaaacaagtcaaacagcttaaatatgtcggcatggtcttaaacgaagcgctgcgcttatggccagtagcgcctatgttttccctatatgcaaaagaagatacggtgcttggaggagaatatcctttaacgaaaggcgacgaagtaatggttctggtgcctcagcttcaccgtgataaaacaatttggggagacgatgtggaggagttccgtccagagcgttttgaaaatccaagtgcgattccgcagcatgcgtttaaaccgtttggaaacggtcagcgtgcgtgtatcggtcagcagttcgctcttcatgaagcaacgctggtacttggtatgatgctaaaacactttgactttgaagatcatacaaactacgagctcgttattaaagaaactcggacgttaaaacctgaaggctttgtggtaaaagcaaaatcgaaaggcattccgcttggcggtattccttcacctagcactgaacagtctgctaaaaaagtacgcaaaaaggcagaaaacgctcataatacgccgctgcttgtgctatacggttcaaatgcgggaacagctgaaggaacggcgcgtgatttagcagatattgcaatgagcaaaggatttgcaccgcaggtcgcaacgcttgattcacacgccggaaatcttccgcgcgaaggagctgtattaattgtaacggcgtcttataacggtcatccgcctgataacgcaaagcaatttgtcgactggttagaccaagcgtctgctgatgaagtaaaaggcgttcgctactccgtatttggatgcggcgatagtaattgggctgcgacgtatcaaaaagtgcctgcttttatcgatgaaacgcttgccgctaaaggggcagaaaacatcgctgaccgcggtgaagcagatgcaagcgacgactttgaaggcacatatgaagaatggcgtgatcatatgtggagtgacgtagcagcctactttaacctcgacattgaaaacagtgaagataataaatctactctttcacttcaatttgtcgacagcgccgcggatatgccgcttgcgaaaatgcacggtgcgttttcaacgaacgtcgtagcaagcaaagaacttcaacagccaggcagtgcacgaagcacgcgacatcttgaaattgaacttccaaaagaagcttcttatcaagaaggagatcatttaggtgttattcctcgcaactatgaaggaatagtaaaccgtgtaacagcaaggttcggcctaagcgcatcacagcaaatccgtctggaagcagaagaagaaaaattagctcatttgccactcgctaaaacagtatccgtagaagagcttctgcaatacgtggagcttcaagatcctgttacgcgcacgcagcttcgcgcaatggctgctaaaacggtctgcccgccgcataaagtagagcttgaagccttgcttgaaaagcaagcctacaaagaacaagtgctggcaaaacgtttaacaatgcttgaactgcttgaaaaatacccggcgtgtgaaatgaaattcagcgaatttatcgcccttctgccaagcatacgcccgcgctattactcgatttcttcatcacctcgtgtcgatgaaaaacaagcaagcatcacggtcagcgttgtctcaggaccggcgtggagcggatatggagaatataaaggaattgcgtcgaactatcttgccgagctgcaagaaggagatacgattacgtgctttatttccacaccgcagtcagaatttacgctgccaaaagaccctgaaacgccgcttatcatggtcggaccgggaacaggcgtcgcgccgtttagaggctttgtgcaggcgcgcaaacagctaaaagaacaaggacagtcacttggagaagcacatttatacttcggctgccgttcacctcatgaagactatctgtatcaagaagagcttgaaaacgcccaaagcgaaggcatcattacgcttcataccgctttttctcgcatgccaaatcagccgaaaacatacgttcagcacgtaatggaacaagacggcaagaaattgattgaacttcttgatcaaggagcgcacttctatatttgcggagacggaagccaaatggcacctgccgttgaagcaacgcttatgaaaagctatgctgacgttcaccaagtgagtgaagcagacgctcgcttatggctgcagcagctagaagaaaaaggccgatacgcaaaagacgtgtgggctggg

SEQ ID NO: 264 - protein, 1049 aa, synthetic construct
  REGION 1..1049: note = variant of P450 oxidase from Bacillus megaterium
MTIKEMPQPKTFGELKNLPLLNTDKPVQALMRIADELGEIFKFEAPGSVTRYLSSQRLIKEACDESRFDKNLSQALKFARDFVGDGLATSWTHEPNWKKAHNILVPSFSQHAMGRYHAMMVDIAVQLVQKWERLNADEHIEVSEDMTRLTLDTIGLCGFNYRFNSFYRDQPHPFIVSMVRALDEVMNKLQRANPDDPAYDENKRQCQEDIKVMNDYVDKIIADRKARGEQSHDLLTQMLNGKDPETGEPLDDGNIRQQIITFLIAGHQTTSGLLSFALYFLVKNPHVLQKVAEEAARVLVDPVPSYKQVKQLKYVGMVLNEALRLWPVAPMFSLYAKEDTVLGGEYPLTKGDEVMVLVPQLHRDKTIWGDDVEEFRPERFENPSAIPQHAFKPFGNGQRACIGQQFALHEATLVLGMMLKHFDFEDHTNYELVIKETRTLKPEGFVVKAKSKGIPLGGIPSPSTEQSAKKVRKKAENAHNTPLLVLYGSNAGTAEGTARDLADIAMSKGFAPQVATLDSHAGNLPREGAVLIVTASYNGHPPDNAKQFVDWLDQASADEVKGVRYSVFGCGDSNWAATYQKVPAFIDETLAAKGAENIADRGEADASDDFEGTYEEWRDHMWSDVAAYFNLDIENSEDNKSTLSLQFVDSAADMPLAKMHGAFSTNVVASKELQQPGSARSTRHLEIELPKEASYQEGDHLGVIPRNYEGIVNRVTARFGLSASQQIRLEAEEEKLAHLPLAKTVSVEELLQYVELQDPVTRTQLRAMAAKTVCPPHKVELEALLEKQAYKEQVLAKRLTMLELLEKYPACEMKFSEFIALLPSIRPRYYSISSSPRVDEKQASITVSVVSGPAWSGYGEYKGIASNYLAELQEGDTITCFISTPQSEFTLPKDPETPLIMVGPGTGVAPFRGFVQARKQLKEQGQSLGEAHLYFGCRSPHEDYLYQEELENAQSEGIITLHTAFSRMPNQPKTYVQHVMEQDGKKLIELLDQGAHFYICGDGSQMAPAVEATLMKSYADVHQVSEADARLWLQQLEEKGRYAKDVWAG

SEQ ID NO: 265 - DNA, 3147 bp, synthetic construct
  misc_feature 1..3147: note = variant of P450 oxidase from Bacillus megaterium
  source 1..3147: mol_type = other DNA
atgacaattaaggaaatgcctcagcctaagacgtttggagaacttaaaaatttaccgttattaaacacagataaaccggttcaagctttgatgcgtattgcggatgaattaggagaaatctttaaattcgaggcgcctggtagcgtaacgcgctatttatcaagtcagcgtctaattaaagaagcatgcgatgaatcacgctttgataaaaacttaagtcaagcgcttaaatttgcacgtgattttgttggagacgggttagccacaagctggacgcatgaaccgaattggaaaaaagcgcataatatcttagttccaagctttagtcagcatgcaatggggcgttatcatgcgatgatggtcgatatcgccgtgcagcttgttcaaaagtgggagcgtctaaatgcagatgagcatattgaagtatcggaagacatgacacgtttaacgcttgatacaattggtctttgcggctttaactatcgctttaacagcttttaccgagatcagcctcatccatttattgtgagtatggtccgtgcactggatgaagtaatgaacaagctgcagcgagcaaatccagacgacccagcttatgatgaaaacaagcgccagtgtcaagaagatatcaaggtgatgaacgactatgtagataaaattattgcagatcgcaaagcaaggggtgaacaaagtcatgatttattaacgcagatgctaaacggaaaagatccagaaacgggtgagccgcttgatgacgggaacattcgtcagcaaattattacattcttaattgcgggacaccaaacaacaagtggtcttttatcatttgcgctgtatttcttagtgaaaaatccacatgtattacaaaaagtagcagaagaagcagcacgagttctagtagatcctgttccaagctacaaacaagtcaaacagcttaaatatgtcggcatggtcttaaacgaagcgctgcgcttatggccagtagcgcctatgttttccctatatgcaaaagaagatacggtgcttggaggagaatatcctttaacgaaaggcgacgaagtaatggttctggtgcctcagcttcaccgtgataaaacaatttggggagacgatgtggaggagttccgtccagagcgttttgaaaatccaagtgcgattccgcagcatgcgtttaaaccgtttggaaacggtcagcgtgcgtgtatcggtcagcagttcgctcttcatgaagcaacgctggtacttggtatgatgctaaaacactttgactttgaagatcatacaaactacgagctcgttattaaagaaactcggacgttaaaacctgaaggctttgtggtaaaagcaaaatcgaaaggcattccgcttggcggtattccttcacctagcactgaacagtctgctaaaaaagtacgcaaaaaggcagaaaacgctcataatacgccgctgcttgtgctatacggttcaaatgcgggatgggctgaaggaacggcgcgtgatttagcagatattgcaatgagcaaaggatttgcaccgcaggtcgcaacgcttgattcacacgccggaaatcttccgcgcgaaggagctgtattaattgtaacggcgtcttataacggtcatccgcctgataacgcaaagcaatttgtcgactggttagaccaagcgtctgctgatgaagtaaaaggcgttcgctactccgtatttggatgcggcgataaaaattgggctgcgacgtatcaaaaagtgcctgcttttatcgatgaaacgcttgccgctaaaggggcagaaaacatcgctgaccgcggtgaagcagatgcaagcgacgactttgaaggcacatatgaagaatggcgtgatcatatgtggagtgacgtagcagcctactttaacctcgacattgaaaacagtgaagataataaatctactctttcacttcaatttgtcgacagcgccgcggatatgccgcttgcgaaaatgcacggtgcgttttcaacgaacgtcgtagcaagcaaagaacttcaacagccaggcagtgcacgaagcacgcgacatcttgaaattgaacttccaaaagaagcttcttatcaagaaggagatcatttaggtgttattcctcgcaactatgaaggaatagtaaaccgtgtaacagcaaggttcggcctaagcgcatcacagcaaatccgtctggaagcagaagaagaaaaattagctcatttgccactcgctaaaacagtatccgtagaagagcttctgcaatacgtggagcttcaagatcctgttacgcgcacgcagcttcgcgcaatggctgctaaaacggtctgcccgccgcataaagtagagcttgaagccttgcttgaaaagcaagcctacaaagaacaagtgctggcaaaacgtttaacaatgcttgaactgcttgaaaaatacccggcgtgtgaaatgaaattcagcgaatttatcgcccttctgccaagcatacgcccgcgctattactcgatttcttcatcacctcgtgtcgatgaaaaacaagcaagcatcacggtcagcgttgtctcaggaccggcgtggagcggatatggagaatataaaggaattgcgtcgaactatcttgccgagctgcaagaaggagatacgattacgtgctttatttccacaccgcagtcagaatttacgctgccaaaagaccctgaaacgccgcttatcatggtcggaccgggaacaggcgtcgcgccgtttagaggctttgtgcaggcgcgcaaacagctaaaagaacaaggacagtcacttggagaagcacatttatacttcggctgccgttcacctcatgaagactatctgtatcaagaagagcttgaaaacgcccaaagcgaaggcatcattacgcttcataccgctttttctcgcatgccaaatcagccgaaaacatacgttcagcacgtaatggaacaagacggcaagaaattgattgaacttcttgatcaaggagcgcacttctatatttgcggagacggaagccaaatggcacctgccgttgaagcaacgcttatgaaaagctatgctgacgttcaccaagtgagtgaagcagacgctcgcttatggctgcagcagctagaagaaaaaggccgatacgcaaaagacgtgtgggctggg

SEQ ID NO: 266 - protein, 1049 aa, synthetic construct
  REGION 1..1049: note = variant of P450 oxidase from Bacillus megaterium
MTIKEMPQPKTFGELKNLPLLNTDKPVQALMRIADELGEIFKFEAPGSVTRYLSSQRLIKEACDESRFDKNLSQALKFARDFVGDGLATSWTHEPNWKKAHNILVPSFSQHAMGRYHAMMVDIAVQLVQKWERLNADEHIEVSEDMTRLTLDTIGLCGFNYRFNSFYRDQPHPFIVSMVRALDEVMNKLQRANPDDPAYDENKRQCQEDIKVMNDYVDKIIADRKARGEQSHDLLTQMLNGKDPETGEPLDDGNIRQQIITFLIAGHQTTSGLLSFALYFLVKNPHVLQKVAEEAARVLVDPVPSYKQVKQLKYVGMVLNEALRLWPVAPMFSLYAKEDTVLGGEYPLTKGDEVMVLVPQLHRDKTIWGDDVEEFRPERFENPSAIPQHAFKPFGNGQRACIGQQFALHEATLVLGMMLKHFDFEDHTNYELVIKETRTLKPEGFVVKAKSKGIPLGGIPSPSTEQSAKKVRKKAENAHNTPLLVLYGSNAGWAEGTARDLADIAMSKGFAPQVATLDSHAGNLPREGAVLIVTASYNGHPPDNAKQFVDWLDQASADEVKGVRYSVFGCGDKNWAATYQKVPAFIDETLAAKGAENIADRGEADASDDFEGTYEEWRDHMWSDVAAYFNLDIENSEDNKSTLSLQFVDSAADMPLAKMHGAFSTNVVASKELQQPGSARSTRHLEIELPKEASYQEGDHLGVIPRNYEGIVNRVTARFGLSASQQIRLEAEEEKLAHLPLAKTVSVEELLQYVELQDPVTRTQLRAMAAKTVCPPHKVELEALLEKQAYKEQVLAKRLTMLELLEKYPACEMKFSEFIALLPSIRPRYYSISSSPRVDEKQASITVSVVSGPAWSGYGEYKGIASNYLAELQEGDTITCFISTPQSEFTLPKDPETPLIMVGPGTGVAPFRGFVQARKQLKEQGQSLGEAHLYFGCRSPHEDYLYQEELENAQSEGIITLHTAFSRMPNQPKTYVQHVMEQDGKKLIELLDQGAHFYICGDGSQMAPAVEATLMKSYADVHQVSEADARLWLQQLEEKGRYAKDVWAG

SEQ ID NO: 267 - DNA, 3147 bp, synthetic construct
  misc_feature 1..3147: note = variant of P450 oxidase from Bacillus megaterium
  source 1..3147: mol_type = other DNA
atgacaattaaggaaatgcctcagcctaagacgtttggagaacttaaaaatttaccgttattaaacacagataaaccggttcaagctttgatgcgtattgcggatgaattaggagaaatctttaaattcgaggcgcctggtagcgtaacgcgctatttatcaagtcagcgtctaattaaagaagcatgcgatgaatcacgctttgataaaaacttaagtcaagcgcttaaatttgcacgtgattttgttggagacgggttagccacaagctggacgcatgaaccgaattggaaaaaagcgcataatatcttagttccaagctttagtcagcatgcaatggggcgttatcatgcgatgatggtcgatatcgccgtgcagcttgttcaaaagtgggagcgtctaaatgcagatgagcatattgaagtatcggaagacatgacacgtttaacgcttgatacaattggtctttgcggctttaactatcgctttaacagcttttaccgagatcagcctcatccatttattgtgagtatggtccgtgcactggatgaagtaatgaacaagctgcagcgagcaaatccagacgacccagcttatgatgaaaacaagcgccagtgtcaagaagatatcaaggtgatgaacgactatgtagataaaattattgcagatcgcaaagcaaggggtgaacaaagtcatgatttattaacgcagatgctaaacggaaaagatccagaaacgggtgagccgcttgatgacgggaacattcgtcagcaaattattacattcttaattgcgggacaccaaacaacaagtggtcttttatcatttgcgctgtatttcttagtgaaaaatccacatgtattacaaaaagtagcagaagaagcagcacgagttctagtagatcctgttccaagctacaaacaagtcaaacagcttaaatatgtcggcatggtcttaaacgaagcgctgcgcttatggccagtagcgcctatgttttccctatatgcaaaagaagatacggtgcttggaggagaatatcctttaacgaaaggcgacgaagtaatggttctggtgcctcagcttcaccgtgataaaacaatttggggagacgatgtggaggagttccgtccagagcgttttgaaaatccaagtgcgattccgcagcatgcgtttaaaccgtttggaaacggtcagcgtgcgtgtatcggtcagcagttcgctcttcatgaagcaacgctggtacttggtatgatgctaaaacactttgactttgaagatcatacaaactacgagctcgttattaaagaaactcggacgttaaaacctgaaggctttgtggtaaaagcaaaatcgaaaggcattccgcttggcggtattccttcacctagcactgaacagtctgctaaaaaagtacgcaaaaaggcagaaaacgctcataatacgccgctgcttgtgctatacggttcaaatgcgggaacagctgaaggagctgcgcgtgatttagcagatattgcaatgagcaaaggatttgcaccgcaggtcgcaacgcttgattcacacgccggaaatcttccgcgcgaaggagctgtattaattgtaacggcgtcttataacggtcatccgcctgataacgcaaagcaatttgtcgactggttagaccaagcgtctgctgatgaagtaaaaggcgttcgctactccgtatttggatgcggcgataaaaattgggctgcgacgtatcaaaaagtgcctgcttttatcgatgaaacgcttgccgctaaaggggcagaaaacatcgctgaccgcggtgaagcagatgcaagcgacgactttgaaggcacatatgaagaatggcgtgatcatatgtggagtgacgtagcagcctactttaacctcgacattgaaaacagtgaagataataaatctactctttcacttcaatttgtcgacagcgccgcggatatgccgcttgcgaaaatgcacggtgcgttttcaacgaacgtcgtagcaagcaaagaacttcaacagccaggcagtgcacgaagcacgcgacatcttgaaattgaacttccaaaagaagcttcttatcaagaaggagatcatttaggtgttattcctcgcaactatgaaggaatagtaaaccgtgtaacagcaaggttcggcctaagcgcatcacagcaaatccgtctggaagcagaagaagaaaaattagctcatttgccactcgctaaaacagtatccgtagaagagcttctgcaatacgtggagcttcaagatcctgttacgcgcacgcagcttcgcgcaatggctgctaaaacggtctgcccgccgcataaagtagagcttgaagccttgcttgaaaagcaagcctacaaagaacaagtgctggcaaaacgtttaacaatgcttgaactgcttgaaaaatacccggcgtgtgaaatgaaattcagcgaatttatcgcccttctgccaagcatacgcccgcgctattactcgatttcttcatcacctcgtgtcgatgaaaaacaagcaagcatcacggtcagcgttgtctcaggaccggcgtggagcggatatggagaatataaaggaattgcgtcgaactatcttgccgagctgcaagaaggagatacgattacgtgctttatttccacaccgcagtcagaatttacgctgccaaaagaccctgaaacgccgcttatcatggtcggaccgggaacaggcgtcgcgccgtttagaggctttgtgcaggcgcgcaaacagctaaaagaacaaggacagtcacttggagaagcacatttatacttcggctgccgttcacctcatgaagactatctgtatcaagaagagcttgaaaacgcccaaagcgaaggcatcattacgcttcataccgctttttctcgcatgccaaatcagccgaaaacatacgttcagcacgtaatggaacaagacggcaagaaattgattgaacttcttgatcaaggagcgcacttctatatttgcggagacggaagccaaatggcacctgccgttgaagcaacgcttatgaaaagctatgctgacgttcaccaagtgagtgaagcagacgctcgcttatggctgcagcagctagaagaaaaaggccgatacgcaaaagacgtgtgggctggg

SEQ ID NO: 268 - protein, 1049 aa, synthetic construct
  REGION 1..1049: note = variant of P450 oxidase from Bacillus megaterium
MTIKEMPQPKTFGELKNLPLLNTDKPVQALMRIADELGEIFKFEAPGSVTRYLSSQRLIKEACDESRFDKNLSQALKFARDFVGDGLATSWTHEPNWKKAHNILVPSFSQHAMGRYHAMMVDIAVQLVQKWERLNADEHIEVSEDMTRLTLDTIGLCGFNYRFNSFYRDQPHPFIVSMVRALDEVMNKLQRANPDDPAYDENKRQCQEDIKVMNDYVDKIIADRKARGEQSHDLLTQMLNGKDPETGEPLDDGNIRQQIITFLIAGHQTTSGLLSFALYFLVKNPHVLQKVAEEAARVLVDPVPSYKQVKQLKYVGMVLNEALRLWPVAPMFSLYAKEDTVLGGEYPLTKGDEVMVLVPQLHRDKTIWGDDVEEFRPERFENPSAIPQHAFKPFGNGQRACIGQQFALHEATLVLGMMLKHFDFEDHTNYELVIKETRTLKPEGFVVKAKSKGIPLGGIPSPSTEQSAKKVRKKAENAHNTPLLVLYGSNAGTAEGAARDLADIAMSKGFAPQVATLDSHAGNLPREGAVLIVTASYNGHPPDNAKQFVDWLDQASADEVKGVRYSVFGCGDKNWAATYQKVPAFIDETLAAKGAENIADRGEADASDDFEGTYEEWRDHMWSDVAAYFNLDIENSEDNKSTLSLQFVDSAADMPLAKMHGAFSTNVVASKELQQPGSARSTRHLEIELPKEASYQEGDHLGVIPRNYEGIVNRVTARFGLSASQQIRLEAEEEKLAHLPLAKTVSVEELLQYVELQDPVTRTQLRAMAAKTVCPPHKVELEALLEKQAYKEQVLAKRLTMLELLEKYPACEMKFSEFIALLPSIRPRYYSISSSPRVDEKQASITVSVVSGPAWSGYGEYKGIASNYLAELQEGDTITCFISTPQSEFTLPKDPETPLIMVGPGTGVAPFRGFVQARKQLKEQGQSLGEAHLYFGCRSPHEDYLYQEELENAQSEGIITLHTAFSRMPNQPKTYVQHVMEQDGKKLIELLDQGAHFYICGDGSQMAPAVEATLMKSYADVHQVSEADARLWLQQLEEKGRYAKDVWAG

SEQ ID NO: 269 - DNA, 3147 bp, synthetic construct
  misc_feature 1..3147: note = variant of P450 oxidase from Bacillus megaterium
  source 1..3147: mol_type = other DNA
atgacaattaaggaaatgcctcagcctaagacgtttggagaacttaaaaatttaccgttattaaacacagataaaccggttcaagctttgatgcgtattgcggatgaattaggagaaatctttaaattcgaggcgcctggtagcgtaacgcgctatttatcaagtcagcgtctaattaaagaagcatgcgatgaatcacgctttgataaaaacttaagtcaagcgcttaaatttgcacgtgattttgttggagacgggttagccacaagctggacgcatgaaccgaattggaaaaaagcgcataatatcttagttccaagctttagtcagcatgcaatggggcgttatcatgcgatgatggtcgatatcgccgtgcagcttgttcaaaagtgggagcgtctaaatgcagatgagcatattgaagtatcggaagacatgacacgtttaacgcttgatacaattggtctttgcggctttaactatcgctttaacagcttttaccgagatcagcctcatccatttattgtgagtatggtccgtgcactggatgaagtaatgaacaagctgcagcgagcaaatccagacgacccagcttatgatgaaaacaagcgccagtgtcaagaagatatcaaggtgatgaacgactatgtagataaaattattgcagatcgcaaagcaaggggtgaacaaagtcatgatttattaacgcagatgctaaacggaaaagatccagaaacgggtgagccgcttgatgacgggaacattcgtcagcaaattattacattcttaattgcgggacaccaaacaacaagtggtcttttatcatttgcgctgtatttcttagtgaaaaatccacatgtattacaaaaagtagcagaagaagcagcacgagttctagtagatcctgttccaagctacaaacaagtcaaacagcttaaatatgtcggcatggtcttaaacgaagcgctgcgcttatggccagtagcgcctatgttttccctatatgcaaaagaagatacggtgcttggaggagaatatcctttaacgaaaggcgacgaagtaatggttctggtgcctcagcttcaccgtgataaaacaatttggggagacgatgtggaggagttccgtccagagcgttttgaaaatccaagtgcgattccgcagcatgcgtttaaaccgtttggaaacggtcagcgtgcgtgtatcggtcagcagttcgctcttcatgaagcaacgctggtacttggtatgatgctaaaacactttgactttgaagatcatacaaactacgagctcgttattaaagaaactcggacgttaaaacctgaaggctttgtggtaaaagcaaaatcgaaaggcattccgcttggcggtattccttcacctagcactgaacagtctgctaaaaaagtacgcaaaaaggcagaaaacgctcataatacgccgctgcttgtgctatacggttcaaatgcgggaacagctgaaggaacggcgcgtgatttagcagattgggcaatgagcaaaggatttgcaccgcaggtcgcaacgcttgattcacacgccggaaatcttccgcgcgaaggagctgtattaattgtaacggcgtcttataacggtcatccgcctgataacgcaaagcaatttgtcgactggttagaccaagcgtctgctgatgaagtaaaaggcgttcgctactccgtatttggatgcggcgataaaaattgggctgcgacgtatcaaaaagtgcctgcttttatcgatgaaacgcttgccgctaaaggggcagaaaacatcgctgaccgcggtgaagcagatgcaagcgacgactttgaaggcacatatgaagaatggcgtgatcatatgtggagtgacgtagcagcctactttaacctcgacattgaaaacagtgaagataataaatctactctttcacttcaatttgtcgacagcgccgcggatatgccgcttgcgaaaatgcacggtgcgttttcaacgaacgtcgtagcaagcaaagaacttcaacagccaggcagtgcacgaagcacgcgacatcttgaaattgaacttccaaaagaagcttcttatcaagaaggagatcatttaggtgttattcctcgcaactatgaaggaatagtaaaccgtgtaacagcaaggttcggcctaagcgcatcacagcaaatccgtctggaagcagaagaagaaaaattagctcatttgccactcgctaaaacagtatccgtagaagagcttctgcaatacgtggagcttcaagatcctgttacgcgcacgcagcttcgcgcaatggctgctaaaacggtctgcccgccgcataaagtagagcttgaagccttgcttgaaaagcaagcctacaaagaacaagtgctggcaaaacgtttaacaatgcttgaactgcttgaaaaatacccggcgtgtgaaatgaaattcagcgaatttatcgcccttctgccaagcatacgcccgcgctattactcgatttcttcatcacctcgtgtcgatgaaaaacaagcaagcatcacggtcagcgttgtctcaggaccggcgtggagcggatatggagaatataaaggaattgcgtcgaactatcttgccgagctgcaagaaggagatacgattacgtgctttatttccacaccgcagtcagaatttacgctgccaaaagaccctgaaacgccgcttatcatggtcggaccgggaacaggcgtcgcgccgtttagaggctttgtgcaggcgcgcaaacagctaaaagaacaaggacagtcacttggagaagcacatttatacttcggctgccgttcacctcatgaagactatctgtatcaagaagagcttgaaaacgcccaaagcgaaggcatcattacgcttcataccgctttttctcgcatgccaaatcagccgaaaacatacgttcagcacgtaatggaacaagacggcaagaaattgattgaacttcttgatcaaggagcgcacttctatatttgcggagacggaagccaaatggcacctgccgttgaagcaacgcttatgaaaagctatgctgacgttcaccaagtgagtgaagcagacgctcgcttatggctgcagcagctagaagaaaaaggccgatacgcaaaagacgtgtgggctggg

SEQ ID NO: 270 - protein, 1049 aa, synthetic construct
  REGION 1..1049: note = variant of P450 oxidase from Bacillus megaterium
MTIKEMPQPKTFGELKNLPLLNTDKPVQALMRIADELGEIFKFEAPGSVTRYLSSQRLIKEACDESRFDKNLSQALKFARDFVGDGLATSWTHEPNWKKAHNILVPSFSQHAMGRYHAMMVDIAVQLVQKWERLNADEHIEVSEDMTRLTLDTIGLCGFNYRFNSFYRDQPHPFIVSMVRALDEVMNKLQRANPDDPAYDENKRQCQEDIKVMNDYVDKIIADRKARGEQSHDLLTQMLNGKDPETGEPLDDGNIRQQIITFLIAGHQTTSGLLSFALYFLVKNPHVLQKVAEEAARVLVDPVPSYKQVKQLKYVGMVLNEALRLWPVAPMFSLYAKEDTVLGGEYPLTKGDEVMVLVPQLHRDKTIWGDDVEEFRPERFENPSAIPQHAFKPFGNGQRACIGQQFALHEATLVLGMMLKHFDFEDHTNYELVIKETRTLKPEGFVVKAKSKGIPLGGIPSPSTEQSAKKVRKKAENAHNTPLLVLYGSNAGTAEGTARDLADWAMSKGFAPQVATLDSHAGNLPREGAVLIVTASYNGHPPDNAKQFVDWLDQASADEVKGVRYSVFGCGDKNWAATYQKVPAFIDETLAAKGAENIADRGEADASDDFEGTYEEWRDHMWSDVAAYFNLDIENSEDNKSTLSLQFVDSAADMPLAKMHGAFSTNVVASKELQQPGSARSTRHLEIELPKEASYQEGDHLGVIPRNYEGIVNRVTARFGLSASQQIRLEAEEEKLAHLPLAKTVSVEELLQYVELQDPVTRTQLRAMAAKTVCPPHKVELEALLEKQAYKEQVLAKRLTMLELLEKYPACEMKFSEFIALLPSIRPRYYSISSSPRVDEKQASITVSVVSGPAWSGYGEYKGIASNYLAELQEGDTITCFISTPQSEFTLPKDPETPLIMVGPGTGVAPFRGFVQARKQLKEQGQSLGEAHLYFGCRSPHEDYLYQEELENAQSEGIITLHTAFSRMPNQPKTYVQHVMEQDGKKLIELLDQGAHFYICGDGSQMAPAVEATLMKSYADVHQVSEADARLWLQQLEEKGRYAKDVWAG

SEQ ID NO: 271 - DNA, 3147 bp, synthetic construct
  misc_feature 1..3147: note = variant of P450 oxidase from Bacillus megaterium
  source 1..3147: mol_type = other DNA
atgacaattaaggaaatgcctcagcctaagacgtttggagaacttaaaaatttaccgttattaaacacagataaaccggttcaagctttgatgcgtattgcggatgaattaggagaaatctttaaattcgaggcgcctggtagcgtaacgcgctatttatcaagtcagcgtctaattaaagaagcatgcgatgaatcacgctttgataaaaacttaagtcaatcgcttaaatttgcccgtgattttgttggagacgggttagccacaagctggacgcatgaaccgaattggaaaaaagcgcataatatcttagttccaagctttagtcagcatgcaatggggcgttatcatgcgatgatggtcgatatcgccgtgcagcttgttcaaaagtgggagcgtctaaatgcagatgagcatattgaagtatcggaagacatgacacgtttaacgcttgatacaattggtctttgcggctttaactatcgctttaacagcttttaccgagatcagcctcatccatttattgtgagtgtggttcgtgcactggatgaagtaatgaacaagctgcagcgagcaaatccagacgacccagcttatgatgaaaacaagcgccagtgtcaagaagatatcaaggtggtgaacgactatgtagataaaattattgcagatcgcaaagcaaggggtgaacaaagtcatgatttattaacgcagatgctaaacggaaaagatccagaaacgggtgagccgcttgatgacgggaacattcgtcagcaaattattacattcttaattgcgggacaccaaacaacaagtggtcttttatcatttgcgctgtatttcttagtgaaaaatccacatgtattacaaaaagtagcagaagaagcagcacgagttctagtagatcctgttccaagctacaaacaagtcaaacagcttaaatatactggcatggtcttaaacgaagcgctgcgcttatggccagtagcgcctatgttttccctatatgcaaaagaagatacggtgcttggaggagaatatcctttaacgaaaggcgacgaagtaatggttctggtgcctcagcttcaccgtgataaaacaatttggggagacgatgtggaggagttccgtccagagcgttttgaaaatccaagtgcgattccgcagcatgcgtttaaaccgtttggaaacggtcagcgtgcgtgtatcggtcagcagttcgctcttcatgaagcaacgctggtacttggtatgatgctaaaacactttgactttgaagatcatacaaactacgagctcgttattaaagaaactcggacgttaaaacctgaaggctttgtggtaaaagcaaaatcgaaaggcattccgcttggcggtattccttcacctagcactgaacagtctgctaaaaaagtacgcaaaaaggcagaaaacgctcataatacgccgctgcttgtgctatacggttcaaatgcgggaacagctgaaggaacggcgcgtgatttagcagatattgcaatgagcaaaggatttgcaccgcaggtcgcaacgcttgattcacacgccggaaatcttccgcgcgaaggagctgtattaattgtaacggcgtcttataacggtcatccgcctgataacgcaaagcaatttgtcgactggttagaccaagcgtctgctgatgaagtaaaaggcgttcgctactccgtatttggatgcggcgataaaaattgggcggggacgtatcaaaaagtgcctgcttttatcgatgaaacgcttgccgctaaaggggcagaaaacatcgctgaccgcggtgaagcagatgcaagcgacgactttgaaggcacatatgaagaatggcgtgatcatatgtggagtgacgtagcagcctactttaacctcgacattgaaaacagtgaagataataaatctactctttcacttcaatttgtcgacagcgccgcggatatgccgcttgcgaaaatgcacggtgcgttttcaacgaacgtcgtagcaagcaaagaacttcaacagccaggcagtgcacgaagcacgcgacatcttgaaattgaacttccaaaagaagcttcttatcaagaaggagatcatttaggtgttattcctcgcaactatgaaggaatagtaaaccgtgtaacagcaaggttcggcctaagcgcatcacagcagatccgtctggaagcagaagaagaaaaattagctcatttgccactcgctaaaacagtatccgtagaagagcttctgcaatacgtggagcttcaagatcctgttacgcgcacgcagcttcgcgcaatggctgctaaaacggtctgcccgccgcataaagtagagcttgaagccttgcttgaaaagcaagcctacaaagaacaagtgctggcaaaacgtttaacaatgcttgaactgcttgaaaaatacccggcgtgtgaaatgaaattcagcgaatttatcgcccttctgccaagcatacgcccgcgctattactcgatttcttcatcacctcgtgtcgatgaaaaacaagcaagcatcacggtcagcgttgtctcaggaccggcgtggagcggatatggagaatataaaggaattgcgtcgaactatcttgccgagctgcaagaaggagatacgattacgtgctttatttccacaccgcagtcagaatttacgctgccaaaagaccctgaaacgccgcttatcatggtcggaccgggaacaggcgtcgcgccgtttagaggctttgtgcaggcgcgcaaacagctaaaagaacaaggacagtcacttggagaagcacatttatacttcggctgccgttcacctcatgaagactatctgtatcaagaagagcttgaaaacgcccaaagcgaaggcatcattacgcttcataccgctttttctcgcatgccaaatcagccgaaaacatacgttcagcacgtaatggaacaagacggcaagaaattgattgaacttcttgatcaaggagcgcacttctatatttgcggagacggaagccaaatggcacctgccgttgaagcaacgcttatgaaaagctatgctgacgttcaccaagtgagtgaagcagacgctcgcttatggctgcagcagctagaagaaaaaggccgatacgcaaaagacgtgtgggctggg

SEQ ID NO: 272 - protein, 1049 aa, synthetic construct
  REGION 1..1049: note = variant of P450 oxidase from Bacillus megaterium
MTIKEMPQPKTFGELKNLPLLNTDKPVQALMRIADELGEIFKFEAPGSVTRYLSSQRLIKEACDESRFDKNLSQSLKFARDFVGDGLATSWTHEPNWKKAHNILVPSFSQHAMGRYHAMMVDIAVQLVQKWERLNADEHIEVSEDMTRLTLDTIGLCGFNYRFNSFYRDQPHPFIVSVVRALDEVMNKLQRANPDDPAYDENKRQCQEDIKVVNDYVDKIIADRKARGEQSHDLLTQMLNGKDPETGEPLDDGNIRQQIITFLIAGHQTTSGLLSFALYFLVKNPHVLQKVAEEAARVLVDPVPSYKQVKQLKYTGMVLNEALRLWPVAPMFSLYAKEDTVLGGEYPLTKGDEVMVLVPQLHRDKTIWGDDVEEFRPERFENPSAIPQHAFKPFGNGQRACIGQQFALHEATLVLGMMLKHFDFEDHTNYELVIKETRTLKPEGFVVKAKSKGIPLGGIPSPSTEQSAKKVRKKAENAHNTPLLVLYGSNAGTAEGTARDLADIAMSKGFAPQVATLDSHAGNLPREGAVLIVTASYNGHPPDNAKQFVDWLDQASADEVKGVRYSVFGCGDKNWAGTYQKVPAFIDETLAAKGAENIADRGEADASDDFEGTYEEWRDHMWSDVAAYFNLDIENSEDNKSTLSLQFVDSAADMPLAKMHGAFSTNVVASKELQQPGSARSTRHLEIELPKEASYQEGDHLGVIPRNYEGIVNRVTARFGLSASQQIRLEAEEEKLAHLPLAKTVSVEELLQYVELQDPVTRTQLRAMAAKTVCPPHKVELEALLEKQAYKEQVLAKRLTMLELLEKYPACEMKFSEFIALLPSIRPRYYSISSSPRVDEKQASITVSVVSGPAWSGYGEYKGIASNYLAELQEGDTITCFISTPQSEFTLPKDPETPLIMVGPGTGVAPFRGFVQARKQLKEQGQSLGEAHLYFGCRSPHEDYLYQEELENAQSEGIITLHTAFSRMPNQPKTYVQHVMEQDGKKLIELLDQGAHFYICGDGSQMAPAVEATLMKSYADVHQVSEADARLWLQQLEEKGRYAKDVWAG

SEQ ID NO: 273 - DNA, 3147 bp, synthetic construct
  misc_feature 1..3147: note = variant of P450 oxidase from Bacillus megaterium
  source 1..3147: mol_type = other DNA
atgacaattaaggaaatgcctcagcctaagacgtttggagaacttaaaaatttaccgttattaaacacagataaaccggttcaagctttgatgcgtattgcggatgaattaggagaaatctttaaattcgaggcgcctggtagcgtaacgcgctatttatcaagtcagcgtctaattaaagaagcatgcgatgaatcacgctttgataaaaacttaagtcaagcgcttaaatttgcacgtgattttgttggagacgggttagccacaagctggacgcatgaaccgaattggaaaaaagcgcataatatcttagttccaagctttagtcagcatgcaatggggcgttatcatgcgatgatggtcgatatcgccgtgcagcttgttcaaaagtgggagcgtctaaatgcagatgagcatattgaagtatcggaagacatgacacgtttaacgcttgatacaattggtctttgcggctttaactatcgctttaacagcttttaccgagatcagcctcatccatttattgtgagtatggtccgtgcactggatgaagtaatgaacaagctgcagcgagcaaatccagacgacccagcttatgatgaaaacaagcgccagtgtcaagaagatatcaaggtgatgaacgactatgtagataaaattattgcagatcgcaaagcaaggggtgaacaaagtcatgatttattaacgcagatgctaaacggaaaagatccagaaacgggtgagccgcttgatgacgggaacattcgtcagcaaattattacattcttaattgcgggacaccaaacaacaagtggtcttttatcatttgcgctgtatttcttagtgaaaaatccacatgtattacaaaaagtagcagaagaagcagcacgagttctagtagatcctgttccaagctacaaacaagtcaaacagcttaaatatgtcggcatggtcttaaacgaagcgctgcgcttatggccagtagcgcctatgttttccctatatgcaaaagaagatacggtgcttggaggagaatatcctttaacgaaaggcgacgaagtaatggttctggtgcctcagcttcaccgtgataaaacaatttggggagacgatgtggaggagttccgtccagagcgttttgaaaatccaagtgcgattccgcagcatgcgtttaaaccgtttggaaacggtcagcgtgcgtgtatcggtcagcagttcgctcttcatgaagcaacgctggtacttggtatgatgctaaaacactttgactttgaagatcatacaaactacgagctcgttattaaagaaactcggacgttaaaacctgaaggctttgtggtaaaagcaaaatcgaaaggcattccgcttggcggtattccttcacctagcactgaacagtctgctaaaaaagtacgcaaaaaggcagaaaacgctcataatacgccgctgcttgtgctatacggttcaaatgcgggaacagctgaaggaacggcgcgtgatttagcagatattgcaatgagcaaaggatttgcaccgcaggtcgcaacgcttgattcacacgccggaaatcttccgcgcgaaggagctgtattaattgtaacggcgtcttataacggtcatccgcctgataacgcaaagcaatttgtcgactggttagaccaagcgtctgctgatgaagtaaaaggcgttcgctactccgtatttggatgcggcgatagcaattgggcggggacgtatcaaaaagtgcctgcttttatcgatgaaacgcttgccgctaaaggggcagaaaacatcgctgaccgcggtgaagcagatgcaagcgacgactttgaaggcacatatgaagaatggcgtgatcatatgtggagtgacgtagcagcctactttaacctcgacattgaaaacagtgaagataataaatctactctttcacttcaatttgtcgacagcgccgcggatatgccgcttgcgaaaatgcacggtgcgttttcaacgaacgtcgtagcaagcaaagaacttcaacagccaggcagtgcacgaagcacgcgacatcttgaaattgaacttccaaaagaagcttcttatcaagaaggagatcatttaggtgttattcctcgcaactatgaaggaatagtaaaccgtgtaacagcaaggttcggcctaagcgcatcacagcagatccgtctggaagcagaagaagaaaaattagctcatttgccactcgctaaaacagtatccgtagaagagcttctgcaatacgtggagcttcaagatcctgttacgcgcacgcagcttcgcgcaatggctgctaaaacggtctgcccgccgcataaagtagagcttgaagccttgcttgaaaagcaagcctacaaagaacaagtgctggcaaaacgtttaacaatgcttgaactgcttgaaaaatacccggcgtgtgaaatgaaattcagcgaatttatcgcccttctgccaagcatacgcccgcgctattactcgatttcttcatcacctcgtgtcgatgaaaaacaagcaagcatcacggtcagcgttgtctcaggaccggcgtggagcggatatggagaatataaaggaattgcgtcgaactatcttgccgagctgcaagaaggagatacgattacgtgctttatttccacaccgcagtcagaatttacgctgccaaaagaccctgaaacgccgcttatcatggtcggaccgggaacaggcgtcgcgccgtttagaggctttgtgcaggcgcgcaaacagctaaaagaacaaggacagtcacttggagaagcacatttatacttcggctgccgttcacctcatgaagactatctgtatcaagaagagcttgaaaacgcccaaagcgaaggcatcattacgcttcataccgctttttctcgcatgccaaatcagccgaaaacatacgttcagcacgtaatggaacaagacggcaagaaattgattgaacttcttgatcaaggagcgcacttctatatttgcggagacggaagccaaatggcacctgccgttgaagcaacgcttatgaaaagctatgctgacgttcaccaagtgagtgaagcagacgctcgcttatggctgcagcagctagaagaaaaaggccgatacgcaaaagacgtgtgggctggg

SEQ ID NO: 274 - protein, 1049 aa, synthetic construct
  REGION 1..1049: note = variant of P450 oxidase from Bacillus megaterium
MTIKEMPQPKTFGELKNLPLLNTDKPVQALMRIADELGEIFKFEAPGSVTRYLSSQRLIKEACDESRFDKNLSQALKFARDFVGDGLATSWTHEPNWKKAHNILVPSFSQHAMGRYHAMMVDIAVQLVQKWERLNADEHIEVSEDMTRLTLDTIGLCGFNYRFNSFYRDQPHPFIVSMVRALDEVMNKLQRANPDDPAYDENKRQCQEDIKVMNDYVDKIIADRKARGEQSHDLLTQMLNGKDPETGEPLDDGNIRQQIITFLIAGHQTTSGLLSFALYFLVKNPHVLQKVAEEAARVLVDPVPSYKQVKQLKYVGMVLNEALRLWPVAPMFSLYAKEDTVLGGEYPLTKGDEVMVLVPQLHRDKTIWGDDVEEFRPERFENPSAIPQHAFKPFGNGQRACIGQQFALHEATLVLGMMLKHFDFEDHTNYELVIKETRTLKPEGFVVKAKSKGIPLGGIPSPSTEQSAKKVRKKAENAHNTPLLVLYGSNAGTAEGTARDLADIAMSKGFAPQVATLDSHAGNLPREGAVLIVTASYNGHPPDNAKQFVDWLDQASADEVKGVRYSVFGCGDSNWAGTYQKVPAFIDETLAAKGAENIADRGEADASDDFEGTYEEWRDHMWSDVAAYFNLDIENSEDNKSTLSLQFVDSAADMPLAKMHGAFSTNVVASKELQQPGSARSTRHLEIELPKEASYQEGDHLGVIPRNYEGIVNRVTARFGLSASQQIRLEAEEEKLAHLPLAKTVSVEELLQYVELQDPVTRTQLRAMAAKTVCPPHKVELEALLEKQAYKEQVLAKRLTMLELLEKYPACEMKFSEFIALLPSIRPRYYSISSSPRVDEKQASITVSVVSGPAWSGYGEYKGIASNYLAELQEGDTITCFISTPQSEFTLPKDPETPLIMVGPGTGVAPFRGFVQARKQLKEQGQSLGEAHLYFGCRSPHEDYLYQEELENAQSEGIITLHTAFSRMPNQPKTYVQHVMEQDGKKLIELLDQGAHFYICGDGSQMAPAVEATLMKSYADVHQVSEADARLWLQQLEEKGRYAKDVWAG

SEQ ID NO: 275 - DNA, 3147 bp, synthetic construct
  misc_feature 1..3147: note = variant of P450 oxidase from Bacillus megaterium
  source 1..3147: mol_type = other DNA
atgacaattaaggaaatgcctcagcctaagacgtttggagaacttaaaaatttaccgttattaaacacagataaaccggttcaagctttgatgcgtattgcggatgaattaggagaaatctttaaattcgaggcgcctggtagcgtaacgcgctatttatcaagtcagcgtctaattaaagaagcatgcgatgaatcacgctttgataaaaacttaagtcaagcgcttaaatttgcccgtgattttgttggagacgggttagccacaagctggacgcatgaaccgaattggaaaaaagcgcataatatcttagttccaagctttagtcagcatgcaatggggcgttatcatgcgatgatggtcgatatcgccgtgcagcttgttcaaaagtgggagcgtctaaatgcagatgagcatattgaagtatcggaagacatgacacgtttaacgcttgatacaattggtctttgcggctttaactatcgctttaacagcttttaccgagatcagcctcatccatttattgtgagtgtggttcgtgcactggatgaagtaatgaacaagctgcagcgagcaaatccagacgacccagcttatgatgaaaacaagcgccagtgtcaagaagatatcaaggtgatgaacgactatgtagataaaattattgcagatcgcaaagcaaggggtgaacaaagtcatgatttattaacgcagatgctaaacggaaaagatccagaaacgggtgagccgcttgatgacgggaacattcgtcagcaaattattacattcttaattgcgggacaccaaacaacaagtggtcttttatcatttgcgctgtatttcttagtgaaaaatccacatgtattacaaaaagtagcagaagaagcagcacgagttctagtagatcctgttccaagctacaaacaagtcaaacagcttaaatatgtcggcatggtcttaaacgaagcgctgcgcttatggccagtagcgcctatgttttccctatatgcaaaagaagatacggtgcttggaggagaatatcctttaacgaaaggcgacgaagtaatggttctggttcctcagcttcaccgtgataaaacaatttggggagacgatgtggaggagttccgtccagagcgttttgaaaatccaagtgcgattccgcagcatgcgtttaaaccgtttggaaacggtcagcgtgcgtgtatcggtcagcagttcgctcttcatgaagcaacgctggtacttggtatgatgctaaaacactttgactttgaagatcatacaaactacgagctcgttattaaagaaacgcggacgttaaaacctgaaggctttgtggtaaaagcaaaatcgaaaggcattccgcttggcggtattccttcacctagcactgaacagtctgctaaaaaagtacgcaaaaaggcagaaaacgctcataatacgccgctgcttgtgctatacggttcaaatgcgggaacagctgaaggaacggcgcgtgatttagcagatattgcaatgagcaaaggatttgcaccgcaggtcgcaacgcttgattcacacgccggaaatcttccgcgcgaaggagctgtattaattgtaacggcgtcttataacggtcatccgcctgataacgcaaagcaatttgtcgactggttagaccaagcgtctgctgatgaagtaaaaggcgttcgctactccgtatttggatgcggcgataaaaattgggctgggacgtatcaaaaagtgcctgcttttatcgatgaaacgcttgccgctaaaggggcagaaaacatcgctgaccgcggtgaagcagatgcaagcgacgactttgaaggcacatatgaagaatggcgtgatcatatgtggagtgacgtagcagcctactttaacctcgacattgaaaacagtgaagataataaatctactctttcacttcaatttgtcgacagcgccgcggatatgccgcttgcgaaaatgcacggtgcgttttcaacgaacgtcgtagcaagcaaagaacttcaacagccaggcagtgcacgaagcacgcgacatcttgaaattgaacttccaaaagaagcttcttatcaagaaggagatcatttaggtgttattcctcgcaactatgaaggaatagtaaaccgtgtaacagcaaggttcggcctaagcgcatcacagcagatccgtctggaagcagaagaagaaaaattagctcatttgccactcgctaaaacagtatccgtagaagagcttctgcaatacgtggagcttcaagatcctgttacgcgcacgcagcttcgcgcaatggctgctaaaacggtctgcccgccgcataaagtagagcttgaagccttgcttgaaaagcaagcctacaaagaacaagtgctggcaaaacgtttaacaatgcttgaactgcttgaaaaatacccggcgtgtgaaatgaaattcagcgaatttatcgcccttctgccaagcatacgcccgcgctattactcgatttcttcatcacctcgtgtcgatgaaaaacaagcaagcatcacggtcagcgttgtctcaggaccggcgtggagcggatatggagaatataaaggaattgcgtcgaactatcttgccgagctgcaagaaggagatacgattacgtgctttatttccacaccgcagtcagaatttacgctgccaaaagaccctgaaacgccgcttatcatggtcggaccgggaacaggcgtcgcgccgtttagaggctttgtgcaggcgcgcaaacagctaaaagaacaaggacagtcacttggagaagcacatttatacttcggctgccgttcacctcatgaagactatctgtatcaagaagagcttgaaaacgcccaaagcgaaggcatcattacgcttcataccgctttttctcgcatgccaaatcagccgaaaacatacgttcagcacgtaatggaacaagacggcaagaaattgattgaacttcttgatcaaggagcgcacttctatatttgcggagacggaagccaaatggcacctgccgttgaagcaacgcttatgaaaagctatgctgacgttcaccaagtgagtgaagcagacgctcgcttatggctgcagcagctagaagaaaaaggccgatacgcaaaagacgtgtgggctggg

SEQ ID NO: 276 - protein, 1049 aa, synthetic construct
  REGION 1..1049: note = variant of P450 oxidase from Bacillus megaterium
MTIKEMPQPKTFGELKNLPLLNTDKPVQALMRIADELGEIFKFEAPGSVTRYLSSQRLIKEACDESRFDKNLSQALKFARDFVGDGLATSWTHEPNWKKAHNILVPSFSQHAMGRYHAMMVDIAVQLVQKWERLNADEHIEVSEDMTRLTLDTIGLCGFNYRFNSFYRDQPHPFIVSVVRALDEVMNKLQRANPDDPAYDENKRQCQEDIKVMNDYVDKIIADRKARGEQSHDLLTQMLNGKDPETGEPLDDGNIRQQIITFLIAGHQTTSGLLSFALYFLVKNPHVLQKVAEEAARVLVDPVPSYKQVKQLKYVGMVLNEALRLWPVAPMFSLYAKEDTVLGGEYPLTKGDEVMVLVPQLHRDKTIWGDDVEEFRPERFENPSAIPQHAFKPFGNGQRACIGQQFALHEATLVLGMMLKHFDFEDHTNYELVIKETRTLKPEGFVVKAKSKGIPLGGIPSPSTEQSAKKVRKKAENAHNTPLLVLYGSNAGTAEGTARDLADIAMSKGFAPQVATLDSHAGNLPREGAVLIVTASYNGHPPDNAKQFVDWLDQASADEVKGVRYSVFGCGDKNWAGTYQKVPAFIDETLAAKGAENIADRGEADASDDFEGTYEEWRDHMWSDVAAYFNLDIENSEDNKSTLSLQFVDSAADMPLAKMHGAFSTNVVASKELQQPGSARSTRHLEIELPKEASYQEGDHLGVIPRNYEGIVNRVTARFGLSASQQIRLEAEEEKLAHLPLAKTVSVEELLQYVELQDPVTRTQLRAMAAKTVCPPHKVELEALLEKQAYKEQVLAKRLTMLELLEKYPACEMKFSEFIALLPSIRPRYYSISSSPRVDEKQASITVSVVSGPAWSGYGEYKGIASNYLAELQEGDTITCFISTPQSEFTLPKDPETPLIMVGPGTGVAPFRGFVQARKQLKEQGQSLGEAHLYFGCRSPHEDYLYQEELENAQSEGIITLHTAFSRMPNQPKTYVQHVMEQDGKKLIELLDQGAHFYICGDGSQMAPAVEATLMKSYADVHQVSEADARLWLQQLEEKGRYAKDVWAG

SEQ ID NO: 277 - DNA, 3147 bp, synthetic construct
  misc_feature 1..3147: note = variant of P450 oxidase from Bacillus megaterium
  source 1..3147: mol_type = other DNA
atgacaattaaggaaatgcctcagcctaagacgtttggagaacttaaaaatttaccgttattaaacacagataaaccggttcaagctttgatgcgtattgcggatgaattaggagaaatctttaaattcgaggcgcctggtagcgtaacgcgctatttatcaagtcagcgtctaattaaagaagcatgcgatgaatcacgctttgataaaaacttaagtcaagcgcttaaatttgcccgtgattttgttggagacgggttagccacaagctggacgcatgaaccgaattggaaaaaagcgcataatatcttagttccaagctttagtcagcatgcaatggggcgttatcatgcgatgatggtcgatatcgccgtgcagcttgttcaaaagtgggagcgtctaaatgcagatgagcatattgaagtatcggaagacatgacacgtttaacgcttgatacaattggtctttgcggctttaactatcgctttaacagcttttaccgagatcagcctcatccatttattgtgagtgtggttcgtgcactggatgaagtaatgaacaagctgcagcgagcaaatccagacgacccagcttatgatgaaaacaagcgccagtgtcaagaagatatcaaggtgatgaacgactatgtagataaaattattgcagatcgcaaagcaaggggtgaacaaagtcatgatttattaacgcagatgctaaacggaaaagatccagaaacgggtgagccgcttgatgacgggaacattcgtcagcaaattattacattcttaattgcgggacaccaaacaacaagtggtcttttatcatttgcgctgtatttcttagtgaaaaatccacatgtattacaaaaagtagcagaagaagcagcacgagttctagtagatcctgttccaagctacaaacaagtcaaacagcttaaatatgtcggcatggtcttaaacgaagcgctgcgcttatggccagtagcgcctatgttttccctatatgcaaaagaagatacggtgcttggaggagaatatcctttaacgaaaggcgacgaagtaatggttctggtgcctcagcttcaccgtgataaaacaatttggggagacgatgtggaggagttccgtccagagcgttttgaaaatccaagtgcgattccgcagcatgcgtttaaaccgtttggaaacggtcagcgtgcgtgtatcggtcagcagttcgctcttcatgaagcaacgctggtacttggtatgatgctaaaacactttgactttgaagatcatacaaactacgagctcgttattaaagaaacgcggacgttaaaacctgaaggctttgtggtaaaagcaaaatcgaaaggcattccgcttggcggtattccttcacctagcactgaacagtctgctaaaaaagtacgcaaaaaggcagaaaacgctcataatacgccgctgcttgtgctatacggttcaaatgcgggaacggctgaaggaactgcgcgtgatttagcagatattgcaatgagcaaaggatttgcaccgcaggtcgcaacgcttgattcacacgccggaaatcttccgcgcgaaggagctgtattaattgtaacggcgtcttataacggtcatccgcctgataacgcaaagcaatttgtcgactggttagaccaagcgtctgctgatgaagtaaaaggcgttcgctactccgtatttggatgcggcgataaaaattgggtggggacgtatcaaaaagtgcctgcttttatcgatgaaacgcttgccgctaaaggggcagaaaacatcgctgaccgcggtgaagcagatgcaagcgacgactttgaaggcacatatgaagaatggcgtgatcatatgtggagtgacgtagcagcctactttaacctcgacattgaaaacagtgaagataataaatctactctttcacttcaatttgtcgacagcgccgcggatatgccgcttgcgaaaatgcacggtgcgttttcaacgaacgtcgtagcaagcaaagaacttcaacagccaggcagtgcacgaagcacgcgacatcttgaaattgaacttccaaaagaagcttcttatcaagaaggagatcatttaggtgttattcctcgcaactatgaaggaatagtaaaccgtgtaacagcaaggttcggcctaagcgcatcacagcagatccgtctggaagcagaagaagaaaaattagctcatttgccactcgctaaaacagtatccgtagaagagcttctgcaatacgtggagcttcaagatcctgttacgcgcacgcagcttcgcgcaatggctgctaaaacggtctgcccgccgcataaagtagagcttgaagccttgcttgaaaagcaagcctacaaagaacaagtgctggcaaaacgtttaacaatgcttgaactgcttgaaaaatacccggcgtgtgaaatgaaattcagcgaatttatcgcccttctgccaagcatacgcccgcgctattactcgatttcttcatcacctcgtgtcgatgaaaaacaagcaagcatcacggtcagcgttgtctcaggaccggcgtggagcggatatggagaatataaaggaattgcgtcgaactatcttgccgagctgcaagaaggagatacgattacgtgctttatttccacaccgcagtcagaatttacgctgccaaaagaccctgaaacgccgcttatcatggtcggaccgggaacaggcgtcgcgccgtttagaggctttgtgcaggcgcgcaaacagctaaaagaacaaggacagtcacttggagaagcacatttatacttcggctgccgttcacctcatgaagactatctgtatcaagaagagcttgaaaacgcccaaagcgaaggcatcattacgcttcataccgctttttctcgcatgccaaatcagccgaaaacatacgttcagcacgtaatggaacaagacggcaagaaattgattgaacttcttgatcaaggagcgcacttctatatttgcggagacggaagccaaatggcacctgccgttgaagcaacgcttatgaaaagctatgctgacgttcaccaagtgagtgaagcagacgctcgcttatggctgcagcagctagaagaaaaaggccgatacgcaaaagacgtgtgggctggg

SEQ ID NO: 278 - protein, 1049 aa, synthetic construct
  REGION 1..1049: note = variant of P450 oxidase from Bacillus megaterium
MTIKEMPQPKTFGELKNLPLLNTDKPVQALMRIADELGEIFKFEAPGSVTRYLSSQRLIKEACDESRFDKNLSQALKFARDFVGDGLATSWTHEPNWKKAHNILVPSFSQHAMGRYHAMMVDIAVQLVQKWERLNADEHIEVSEDMTRLTLDTIGLCGFNYRFNSFYRDQPHPFIVSVVRALDEVMNKLQRANPDDPAYDENKRQCQEDIKVMNDYVDKIIADRKARGEQSHDLLTQMLNGKDPETGEPLDDGNIRQQIITFLIAGHQTTSGLLSFALYFLVKNPHVLQKVAEEAARVLVDPVPSYKQVKQLKYVGMVLNEALRLWPVAPMFSLYAKEDTVLGGEYPLTKGDEVMVLVPQLHRDKTIWGDDVEEFRPERFENPSAIPQHAFKPFGNGQRACIGQQFALHEATLVLGMMLKHFDFEDHTNYELVIKETRTLKPEGFVVKAKSKGIPLGGIPSPSTEQSAKKVRKKAENAHNTPLLVLYGSNAGTAEGTARDLADIAMSKGFAPQVATLDSHAGNLPREGAVLIVTASYNGHPPDNAKQFVDWLDQASADEVKGVRYSVFGCGDKNWVGTYQKVPAFIDETLAAKGAENIADRGEADASDDFEGTYEEWRDHMWSDVAAYFNLDIENSEDNKSTLSLQFVDSAADMPLAKMHGAFSTNVVASKELQQPGSARSTRHLEIELPKEASYQEGDHLGVIPRNYEGIVNRVTARFGLSASQQIRLEAEEEKLAHLPLAKTVSVEELLQYVELQDPVTRTQLRAMAAKTVCPPHKVELEALLEKQAYKEQVLAKRLTMLELLEKYPACEMKFSEFIALLPSIRPRYYSISSSPRVDEKQASITVSVVSGPAWSGYGEYKGIASNYLAELQEGDTITCFISTPQSEFTLPKDPETPLIMVGPGTGVAPFRGFVQARKQLKEQGQSLGEAHLYFGCRSPHEDYLYQEELENAQSEGIITLHTAFSRMPNQPKTYVQHVMEQDGKKLIELLDQGAHFYICGDGSQMAPAVEATLMKSYADVHQVSEADARLWLQQLEEKGRYAKDVWAG

SEQ ID NO: 279 - DNA, 3147 bp, synthetic construct
  misc_feature 1..3147: note = variant of P450 oxidase from Bacillus megaterium
  source 1..3147: mol_type = other DNA
atgacaattaaggaaatgcctcagcctaagacgtttggagaacttaaaaatttaccgttattaaacacagataaaccggttcaagctttgatgcgtattgcggatgaattaggagaaatctttaaattcgaggcgcctggtagcgtaacgcgctatttatcaagtcagcgtctaattaaagaagcatgcgatgaatcacgctttgataaaaacttaagtcaagcgcttaaatttgcccgtgattttgttggagacgggttagccacaagctggacgcatgaaccgaattggaaaaaagcgcataatatcttagttccaagctttagtcagcatgcaatggggcgttatcatgcgatgatggtcgatatcgccgtgcagcttgttcaaaagtgggagcgtctaaatgcagatgagcatattgaagtatcggaagacatgacacgtttaacgcttgatacaattggtctttgcggctttaactatcgctttaacagcttttaccgagatcagcctcatccatttattgtgagtgtggttcgtgcactggatgaagtaatgaacaagctgcagcgagcaaatccagacgacccagcttatgatgaaaacaagcgccagtgtcaagaagatatcaaggtggtgaacgactatgtagataaaattattgcagatcgcaaagcaaggggtgaacaaagtcatgatttattaacgcagatgctaaacggaaaagatccagaaacgggtgagccgcttgatgacgggaacattcgtcagcaaattattacattcttaattgcgggacaccaaacaacaagtggtcttttatcatttgcgctgtatttcttagtgaaaaatccacatgtattacaaaaagtagcagaagaagcagcacgagttctagtagatcctgttccaagctacaaacaagtcaaacagcttaaatatgtcggcatggtcttaaacgaagcgctgcgcttatggccagtagcgcctatgttttccctatatgcaaaagaagatacggtgcttggaggagaatatcctttaacgaaaggcgacgaagtaatggttctggttcctcagcttcaccgtgataaaacaatttggggagacgatgtggaggagttccgtccagagcgttttgaaaatccaagtgcgattccgcagcatgcgtttaaaccgtttggaaacggtcagcgtgcgtgtatcggtcagcagttcgctcttcatgaagcaacgctggtacttggtatgatgctaaaacactttgactttgaagatcatacaaactacgagctcgttattaaagaaacgcggacgttaaaacctgaaggctttgtggtaaaagcaaaatcgaaaggcattccgcttggcggtattccttcacctagcactgaacagtctgctaaaaaagtacgcaaaaaggcagaaaacgctcataatacgccgctgcttgtgctatacggttcaaatgcgggaacggctgaaggaactgcgcgtgatttagcagatattgcaatgagcaaaggatttgcaccgcaggtcgcaacgcttgattcacacgccggaaatcttccgcgcgaaggagctgtattaattgtaacggcgtcttataacggtcatccgcctgataacgcaaagcaatttgtcgactggttagaccaagcgtctgctgatgaagtaaaaggcgttcgctactccgtatttggatgcggcgatagcaattgggcggggacgtatcaaaaagtgcctgcttttatcgatgaaacgcttgccgctaaaggggcagaaaacatcgctgaccgcggtgaagcagatgcaagcgacgactttgaaggcacatatgaagaatggcgtgatcatatgtggagtgacgtagcagcctactttaacctcgacattgaaaacagtgaagataataaatctactctttcacttcaatttgtcgacagcgccgcggatatgccgcttgcgaaaatgcacggtgcgttttcaacgaacgtcgtagcaagcaaagaacttcaacagccaggcagtgcacgaagcacgcgacatcttgaaattgaacttccaaaagaagcttcttatcaagaaggagatcatttaggtgttattcctcgcaactatgaaggaatagtaaaccgtgtaacagcaaggttcggcctaagcgcatcacagcaaatccgtctggaagcagaagaagaaaaattagctcatttgccactcgctaaaacagtatccgtagaagagcttctgcaatacgtggagcttcaagatcctgttacgcgcacgcagcttcgcgcaatggctgctaaaacggtctgcccgccgcataaagtagagcttgaagccttgcttgaaaagcaagcctacaaagaacaagtgctggcaaaacgtttaacaatgcttgaactgcttgaaaaatacccggcgtgtgaaatgaaattcagcgaatttatcgcccttctgccaagcatacgcccgcgctattactcgatttcttcatcacctcgtgtcgatgaaaaacaagcaagcatcacggtcagcgttgtctcaggaccggcgtggagcggatatggagaatataaaggaattgcgtcgaactatcttgccgagctgcaagaaggagatacgattacgtgctttatttccacaccgcagtcagaatttacgctgccaaaagaccctgaaacgccgcttatcatggtcggaccgggaacaggcgtcgcgccgtttagaggctttgtgcaggcgcgcaaacagctaaaagaacaaggacagtcacttggagaagcacatttatacttcggctgccgttcacctcatgaagactatctgtatcaagaagagcttgaaaacgcccaaagcgaaggcatcattacgcttcataccgctttttctcgcatgccaaatcagccgaaaacatacgttcagcacgtaatggaacaagacggcaagaaattgattgaacttcttgatcaaggagcgcacttctatatttgcggagacggaagccaaatggcacctgccgttgaagcaacgcttatgaaaagctatgctgacgttcaccaagtgagtgaagcagacgctcgcttatggctgcagcagctagaagaaaaaggccgatacgcaaaagacgtgtgggctggg

SEQ ID NO: 280 - protein, 1049 aa, synthetic construct
  REGION 1..1049: note = variant of P450 oxidase from Bacillus megaterium
MTIKEMPQPKTFGELKNLPLLNTDKPVQALMRIADELGEIFKFEAPGSVTRYLSSQRLIKEACDESRFDKNLSQALKFARDFVGDGLATSWTHEPNWKKAHNILVPSFSQHAMGRYHAMMVDIAVQLVQKWERLNADEHIEVSEDMTRLTLDTIGLCGFNYRFNSFYRDQPHPFIVSVVRALDEVMNKLQRANPDDPAYDENKRQCQEDIKVVNDYVDKIIADRKARGEQSHDLLTQMLNGKDPETGEPLDDGNIRQQIITFLIAGHQTTSGLLSFALYFLVKNPHVLQKVAEEAARVLVDPVPSYKQVKQLKYVGMVLNEALRLWPVAPMFSLYAKEDTVLGGEYPLTKGDEVMVLVPQLHRDKTIWGDDVEEFRPERFENPSAIPQHAFKPFGNGQRACIGQQFALHEATLVLGMMLKHFDFEDHTNYELVIKETRTLKPEGFVVKAKSKGIPLGGIPSPSTEQSAKKVRKKAENAHNTPLLVLYGSNAGTAEGTARDLADIAMSKGFAPQVATLDSHAGNLPREGAVLIVTASYNGHPPDNAKQFVDWLDQASADEVKGVRYSVFGCGDSNWAGTYQKVPAFIDETLAAKGAENIADRGEADASDDFEGTYEEWRDHMWSDVAAYFNLDIENSEDNKSTLSLQFVDSAADMPLAKMHGAFSTNVVASKELQQPGSARSTRHLEIELPKEASYQEGDHLGVIPRNYEGIVNRVTARFGLSASQQIRLEAEEEKLAHLPLAKTVSVEELLQYVELQDPVTRTQLRAMAAKTVCPPHKVELEALLEKQAYKEQVLAKRLTMLELLEKYPACEMKFSEFIALLPSIRPRYYSISSSPRVDEKQASITVSVVSGPAWSGYGEYKGIASNYLAELQEGDTITCFISTPQSEFTLPKDPETPLIMVGPGTGVAPFRGFVQARKQLKEQGQSLGEAHLYFGCRSPHEDYLYQEELENAQSEGIITLHTAFSRMPNQPKTYVQHVMEQDGKKLIELLDQGAHFYICGDGSQMAPAVEATLMKSYADVHQVSEADARLWLQQLEEKGRYAKDVWAG

SEQ ID NO: 281 - DNA, 3147 bp, synthetic construct
  misc_feature 1..3147: note = variant of P450 oxidase from Bacillus megaterium
  source 1..3147: mol_type = other DNA
atgacaattaaggaaatgcctcagcctaagacgtttggagaacttaaaaatttaccgttattaaacacagataaaccggttcaagctttgatgcgtattgcggatgaattaggagaaatctttaaattcgaggcgcctggtagcgtaacgcgctatttatcaagtcagcgtctaattaaagaagcatgcgatgaatcacgctttgataaaaacttaagtcaagcgcttaaatttgcccgtgattttgttggagacgggttagccacaagctggacgcatgaaccgaattggaaaaaagcgcataatatcttagttccaagctttagtcagcatgcaatggggcgttatcatgcgatgatggtcgatatcgccgtgcagcttgttcaaaagtgggagcgtctaaatgcagatgagcatattgaagtatcggaagacatgacacgtttaacgcttgatacaattggtctttgcggctttaactatcgctttaacagcttttaccgagatcagcctcatccatttattgtgagtgtggttcgtgcactggatgaagtaatgaacaagctgcagcgagcaaatccagacgacccagcttatgatgaaaacaagcgccagtgtcaagaagatatcaaggtggtgaacgactatgtagataaaattattgcagatcgcaaagcaaggggtgaacaaagtcatgatttattaacgcagatgctaaacggaaaagatccagaaacgggtgagccgcttgatgacgggaacattcgtcagcaaattattacattcttaattgcgggacaccaaacaacaagtggtcttttatcatttgcgctgtatttcttagtgaaaaatccacatgtattacaaaaagtagcagaagaagcagcacgagttctagtagatcctgttccaagctacaaacaagtcaaacagcttaaatatgtcggcatggtcttaaacgaagcgctgcgcttatggccagtagcgcctatgttttccctatatgcaaaagaagatacggtgcttggaggagaatatcctttaacgaaaggcgacgaagtaatggttctggtgcctcagcttcaccgtgataaaacaatttggggagacgatgtggaggagttccgtccagagcgttttgaaaatccaagtgcgattccgcagcatgcgtttaaaccgtttggaaacggtcagcgtgcgtgtatcggtcagcagttcgctcttcatgaagcaacgctggtacttggtatgatgctaaaacactttgactttgaagatcatacaaactacgagctcgttattaaagaaactcggacgttaaaacctgaaggctttgtggtaaaagcaaaatcgaaaggcattccgcttggcggtattccttcacctagcactgaacagtctgctaaaaaagtacgcaaaaaggcagaaaacgctcataatacgccgctgcttgtgctatacggttcaaatgcgggaacagctgaaggaacggcgcgtgatttagcagatattgcaatgagcaaaggatttgcaccgcaggtcgcaacgcttgattcacacgccggaaatcttccgcgcgaaggagctgtattaattgtaacggcgtcttataacggtcatccgcctgataacgcaaagcaatttgtcgactggttagaccaagcgtctgctgatgaagtaaaaggcgttcgctactccgtatttggatgcggcgataaaaattgggcggggacgtatcaaaaagtgcctgcttttatcgatgaaacgcttgccgctaaaggggcagaaaacatcgctgaccgcggtgaagcagatgcaagcgacgactttgaaggcacatatgaagaatggcgtgatcatatgtggagtgacgtagcagcctactttaacctcgacattgaaaacagtgaagataataaatctactctttcacttcaatttgtcgacagcgccgcggatatgccgcttgcgaaaatgcacggtgcgttttcaacgaacgtcgtagcaagcaaagaacttcaacagccaggcagtgcacgaagcacgcgacatcttgaaattgaacttccaaaagaagcttcttatcaagaaggagatcatttaggtgttattcctcgcaactatgaaggaatagtaaaccgtgtaacagcaaggttcggcctaagcgcatcacagctgatccgtctggaagcagaagaagaaaaattagctcatttgccactcgctaaaacagtatccgtagaagagcttctgcaatacgtggagcttcaagatcctgttacgcgcacgcagcttcgcgcaatggctgctaaaacggtctgcccgccgcataaagtagagcttgaagccttgcttgaaaagcaagcctacaaagaacaagtgctggcaaaacgtttaacaatgcttgaactgcttgaaaaatacccggcgtgtgaaatgaaattcagcgaatttatcgcccttctgccaagcatacgcccgcgctattactcgatttcttcatcacctcgtgtcgatgaaaaacaagcaagcatcacggtcagcgttgtctcaggaccggcgtggagcggatatggagaatataaaggaattgcgtcgaactatcttgccgagctgcaagaaggagatacgattacgtgctttatttccacaccgcagtcagaatttacgctgccaaaagaccctgaaacgccgcttatcatggtcggaccgggaacaggcgtcgcgccgtttagaggctttgtgcaggcgcgcaaacagctaaaagaacaaggacagtcacttggagaagcacatttatacttcggctgccgttcacctcatgaagactatctgtatcaagaagagcttgaaaacgcccaaagcgaaggcatcattacgcttcataccgctttttctcgcatgccaaatcagccgaaaacatacgttcagcacgtaatggaacaagacggcaagaaattgattgaacttcttgatcaaggagcgcacttctatatttgcggagacggaagccaaatggcacctgccgttgaagcaacgcttatgaaaagctatgctgacgttcaccaagtgagtgaagcagacgctcgcttatggctgcagcagctagaagaaaaaggccgatacgcaaaagacgtgtgggctggg

SEQ ID NO: 282 - protein, 1049 aa, synthetic construct
  REGION 1..1049: note = variant of P450 oxidase from Bacillus megaterium
MTIKEMPQPKTFGELKNLPLLNTDKPVQALMRIADELGEIFKFEAPGSVTRYLSSQRLIKEACDESRFDKNLSQALKFARDFVGDGLATSWTHEPNWKKAHNILVPSFSQHAMGRYHAMMVDIAVQLVQKWERLNADEHIEVSEDMTRLTLDTIGLCGFNYRFNSFYRDQPHPFIVSVVRALDEVMNKLQRANPDDPAYDENKRQCQEDIKVVNDYVDKIIADRKARGEQSHDLLTQMLNGKDPETGEPLDDGNIRQQIITFLIAGHQTTSGLLSFALYFLVKNPHVLQKVAEEAARVLVDPVPSYKQVKQLKYVGMVLNEALRLWPVAPMFSLYAKEDTVLGGEYPLTKGDEVMVLVPQLHRDKTIWGDDVEEFRPERFENPSAIPQHAFKPFGNGQRACIGQQFALHEATLVLGMMLKHFDFEDHTNYELVIKETRTLKPEGFVVKAKSKGIPLGGIPSPSTEQSAKKVRKKAENAHNTPLLVLYGSNAGTAEGTARDLADIAMSKGFAPQVATLDSHAGNLPREGAVLIVTASYNGHPPDNAKQFVDWLDQASADEVKGVRYSVFGCGDKNWAGTYQKVPAFIDETLAAKGAENIADRGEADASDDFEGTYEEWRDHMWSDVAAYFNLDIENSEDNKSTLSLQFVDSAADMPLAKMHGAFSTNVVASKELQQPGSARSTRHLEIELPKEASYQEGDHLGVIPRNYEGIVNRVTARFGLSASQLIRLEAEEEKLAHLPLAKTVSVEELLQYVELQDPVTRTQLRAMAAKTVCPPHKVELEALLEKQAYKEQVLAKRLTMLELLEKYPACEMKFSEFIALLPSIRPRYYSISSSPRVDEKQASITVSVVSGPAWSGYGEYKGIASNYLAELQEGDTITCFISTPQSEFTLPKDPETPLIMVGPGTGVAPFRGFVQARKQLKEQGQSLGEAHLYFGCRSPHEDYLYQEELENAQSEGIITLHTAFSRMPNQPKTYVQHVMEQDGKKLIELLDQGAHFYICGDGSQMAPAVEATLMKSYADVHQVSEADARLWLQQLEEKGRYAKDVWAG

SEQ ID NO: 283 - DNA, 3147 bp, synthetic construct
  misc_feature 1..3147: note = variant of P450 oxidase from Bacillus megaterium
  source 1..3147: mol_type = other DNA
atgacaattaaggaaatgcctcagcctaagacgtttggagaacttaaaaatttaccgttattaaacacagataaaccggttcaagctttgatgcgtattgcggatgaattaggagaaatctttaaattcgaggcgcctggtagcgtaacgcgctatttatcaagtcagcgtctaattaaagaagcatgcgatgaatcacgctttgataaaaacttaagtcaagcgcttaaatttgcccgtgattttgttggagacgggttagccacaagctggacgcatgaaccgaattggaaaaaagcgcataatatcttagttccaagctttagtcagcatgcaatggggcgttatcatgcgatgatggtcgatatcgccgtgcagcttgttcaaaagtgggagcgtctaaatgcagatgagcatattgaagtatcggaagacatgacacgtttaacgcttgatacaattggtctttgcggctttaactatcgctttaacagcttttaccgagatcagcctcatccatttattgtgagtgtggttcgtgcactggatgaagtaatgaacaagctgcagcgagcaaatccagacgacccagcttatgatgaaaacaagcgccagtgtcaagaagatatcaaggtgatgaacgactatgtagataaaattattgcagatcgcaaagcaaggggtgaacaaagtcatgatttattaacgcagatgctaaacggaaaagatccagaaacgggtgagccgcttgatgacgggaacattcgtcagcaaattattacattcttaattgcgggacaccaaacaacaagtggtcttttatcatttgcgctgtatttcttagtgaaaaatccacatgtattacaaaaagtagcagaagaagcagcacgagttctagtagatcctgttccaagctacaaacaagtcaaacagcttaaatatgtcggcatggtcttaaacgaagcgctgcgcttatggccagtagcgcctatgttttccctatatgcaaaagaagatacggtgcttggaggagaatatcctttaacgaaaggcgacgaagtaatggttctggtgcctcagcttcaccgtgataaaacaatttggggagacgatgtggaggagttccgtccagagcgttttgaaaatccaagtgcgattccgcagcatgcgtttaaaccgtttggaaacggtcagcgtgcgtgtatcggtcagcagttcgctcttcatgaagcaacgctggtacttggtatgatgctaaaacactttgactttgaagatcatacaaactacgagctcgttattaaagaaactcggacgttaaaacctgaaggctttgtggtaaaagcaaaatcgaaaggcattccgcttggcggtattccttcacctagcactgaacagtctgctaaaaaagtacgcaaaaaggcagaaaacgctcataatacgccgctgcttgtgctatacggttcaaatgcgggaacagctgaaggaacggcgcgtgatttagcagatattgcaatgagcaaaggatttgcaccgcaggtcgcaacgcttgattcacacgccggaaatcttccgcgcgaaggagctgtattaattgtaacggcgtcttataacggtcatccgcctgataacgcaaagcaatttgtcgactggttagaccaagcgtctgctgatgaagtaaaaggcgttcgctactccgtatttggatgcggcgataaaaattgggctgggacgtatcaaaaagtgcctgcttttatcgatgaaacgcttgccgctaaaggggcagaaaacatcgctgaccgcggtgaagcagatgcaagcgacgactttgaaggcacatatgaagaatggcgtgatcatatgtggagtgacgtagcagcctactttaacctcgacattgaaaacagtgaagataataaatctactctttcacttcaatttgtcgacagcgccgcggatatgccgcttgcgaaaatgcacggtgcgttttcaacgaacgtcgtagcaagcaaagaacttcaacagccaggcagtgcacgaagcacgcgacatcttgaaattgaacttccaaaagaagcttcttatcaagaaggagatcatttaggtgttattcctcgcaactatgaaggaatagtaaaccgtgtaacagcaaggttcggcctaagcgcatcacagctgatccgtctggaagcagaagaagaaaaattagctcatttgccactcgctaaaacagtatccgtagaagagcttctgcaatacgtggagcttcaagatcctgttacgcgcacgcagcttcgcgcaatggctgctaaaacggtctgcccgccgcataaagtagagcttgaagccttgcttgaaaagcaagcctacaaagaacaagtgctggcaaaacgtttaacaatgcttgaactgcttgaaaaatacccggcgtgtgaaatgaaattcagcgaatttatcgcccttctgccaagcatacgcccgcgctattactcgatttcttcatcacctcgtgtcgatgaaaaacaagcaagcatcacggtcagcgttgtctcaggaccggcgtggagcggatatggagaatataaaggaattgcgtcgaactatcttgccgagctgcaagaaggagatacgattacgtgctttatttccacaccgcagtcagaatttacgctgccaaaagaccctgaaacgccgcttatcatggtcggaccgggaacaggcgtcgcgccgtttagaggctttgtgcaggcgcgcaaacagctaaaagaacaaggacagtcacttggagaagcacatttatacttcggctgccgttcacctcatgaagactatctgtatcaagaagagcttgaaaacgcccaaagcgaaggcatcattacgcttcataccgctttttctcgcatgccaaatcagccgaaaacatacgttcagcacgtaatggaacaagacggcaagaaattgattgaacttcttgatcaaggagcgcacttctatatttgcggagacggaagccaaatggcacctgccgttgaagcaacgcttatgaaaagctatgctgacgttcaccaagtgagtgaagcagacgctcgcttatggctgcagcagctagaagaaaaaggccgatacgcaaaagacgtgtgggctggg

SEQ ID NO: 284 - protein, 1049 aa, synthetic construct
  REGION 1..1049: note = variant of P450 oxidase from Bacillus megaterium
MTIKEMPQPKTFGELKNLPLLNTDKPVQALMRIADELGEIFKFEAPGSVTRYLSSQRLIKEACDESRFDKNLSQALKFARDFVGDGLATSWTHEPNWKKAHNILVPSFSQHAMGRYHAMMVDIAVQLVQKWERLNADEHIEVSEDMTRLTLDTIGLCGFNYRFNSFYRDQPHPFIVSVVRALDEVMNKLQRANPDDPAYDENKRQCQEDIKVMNDYVDKIIADRKARGEQSHDLLTQMLNGKDPETGEPLDDGNIRQQIITFLIAGHQTTSGLLSFALYFLVKNPHVLQKVAEEAARVLVDPVPSYKQVKQLKYVGMVLNEALRLWPVAPMFSLYAKEDTVLGGEYPLTKGDEVMVLVPQLHRDKTIWGDDVEEFRPERFENPSAIPQHAFKPFGNGQRACIGQQFALHEATLVLGMMLKHFDFEDHTNYELVIKETRTLKPEGFVVKAKSKGIPLGGIPSPSTEQSAKKVRKKAENAHNTPLLVLYGSNAGTAEGTARDLADIAMSKGFAPQVATLDSHAGNLPREGAVLIVTASYNGHPPDNAKQFVDWLDQASADEVKGVRYSVFGCGDKNWAGTYQKVPAFIDETLAAKGAENIADRGEADASDDFEGTYEEWRDHMWSDVAAYFNLDIENSEDNKSTLSLQFVDSAADMPLAKMHGAFSTNVVASKELQQPGSARSTRHLEIELPKEASYQEGDHLGVIPRNYEGIVNRVTARFGLSASQLIRLEAEEEKLAHLPLAKTVSVEELLQYVELQDPVTRTQLRAMAAKTVCPPHKVELEALLEKQAYKEQVLAKRLTMLELLEKYPACEMKFSEFIALLPSIRPRYYSISSSPRVDEKQASITVSVVSGPAWSGYGEYKGIASNYLAELQEGDTITCFISTPQSEFTLPKDPETPLIMVGPGTGVAPFRGFVQARKQLKEQGQSLGEAHLYFGCRSPHEDYLYQEELENAQSEGIITLHTAFSRMPNQPKTYVQHVMEQDGKKLIELLDQGAHFYICGDGSQMAPAVEATLMKSYADVHQVSEADARLWLQQLEEKGRYAKDVWAG

SEQ ID NO: 285 - DNA, 3147 bp, synthetic construct
  misc_feature 1..3147: note = variant of P450 oxidase from Bacillus megaterium
  source 1..3147: mol_type = other DNA
atgacaattaaggaaatgcctcagcctaagacgtttggagaacttaaaaatttaccgttattaaacacagataaaccggttcaagctttgatgcgtattgcggatgaattaggagaaatctttaaattcgaggcgcctggtagcgtaacgcgctatttatcaagtcagcgtctaattaaagaagcatgcgatgaatcacgctttgataaaaacttaagtcaagcgcttaaatttgcacgtgattttgttggagacgggttagccacaagctggacgcatgaaccgaattggaaaaaagcgcataatatcttagttccaagctttagtcagcatgcaatggggcgttatcatgcgatgatggtcgatatcgccgtgcagcttgttcaaaagtgggagcgtctaaatgcagatgagcatattgaagtatcggaagacatgacacgtttaacgcttgatacaattggtctttgcggctttaactatcgctttaacagcttttaccgagatcagcctcatccatttattgtgagtgtggttcgtgcactggatgaagtaatgaacaagctgcagcgagcaaatccagacgacccagcttatgatgaaaacaagcgccagtgtcaagaagatatcaaggtgatgaacgactatgtagataaaattattgcagatcgcaaagcaaggggtgaacaaagtcatgatttattaacgcagatgctaaacggaaaagatccagaaacgggtgagccgcttgatgacgggaacattcgtcagcaaattattacattcttaattgcgggacaccaaacaacaagtggtcttttatcatttgcgctgtatttcttagtgaaaaatccacatgtattacaaaaagtagcagaagaagcagcacgagttctagtagatcctgttccaagctacaaacaagtcaaacagcttaaatatgttggcatggtcttaaacgaagcgctgcgcttatggccagtagcgcctatgttttccctatatgcaaaagaagatacggtgcttggaggagaatatcctttaacgaaaggcgacgaagtaatggttctggtgcctcagcttcaccgtgataaaacaatttggggagacgatgtggaggagttccgtccagagcgttttgaaaatccaagtgcgattccgcagcatgcgtttaaaccgtttggaaacggtcagcgtgcgtgtatcggtcagcagttcgctcttcatgaagcaacgctggtacttggtatgatgctaaaacactttgactttgaagatcatacaaactacgagctcgttattaaagaatcgcggacgttaaaacctgaaggctttgtggtaaaagcaaaatcgaaaggcattccgcttggcggtattccttcacctagcactgaacagtctgctaaaaaagtacgcaaaaaggcagaaaacgctcataatacgccgctgcttgtgctatacggttcaaatgcgggaacagctgaaggaacggcgcgtgatttagcagatattgcaatgagcaaaggatttgcaccgcaggtcgcaacgcttgattcacacgccggaaatcttccgcgcgaaggagctgtattaattgtaacggcgtcttataacggtcatccgcctgataacgcaaagcaatttgtcgactggttagaccaagcgtctgctgatgaagtaaaaggcgttcgctactccgtatttggatgcggcgataaaaattgggcggggacgtatcaaaaagtgcctgcttttatcgatgaaacgcttgccgctaaaggggcagaaaacatcgctgaccgcggtgaagcagatgcaagcgacgactttgaaggcacatatgaagaatggcgtgatcatatgtggagtgacgtagcagcctactttaacctcgacattgaaaacagtgaagataataaatctactctttcacttcaatttgtcgacagcgccgcggatatgccgcttgcgaaaatgcacggtgcgttttcaacgaacgtcgtagcaagcaaagaacttcaacagccaggcagtgcacgaagcacgcgacatcttgaaattgaacttccaaaagaagcttcttatcaagaaggagatcatttaggtgttattcctcgcaactatgaaggaatagtaaaccgtgtaacagcaaggttcggcctaagcgcatcacagcaaatccgtctggaagcagaagaagaaaaattagctcatttgccactcgctaaaacagtatccgtagaagagcttctgcaatacgtggagcttcaagatcctgttacgcgcacgcagcttcgcgcaatggctgctaaaacggtctgcccgccgcataaagtagagcttgaagccttgcttgaaaagcaagcctacaaagaacaagtgctggcaaaacgtttaacaatgcttgaactgcttgaaaaatacccggcgtgtgaaatgaaattcagcgaatttatcgcccttctgccaagcatacgcccgcgctattactcgatttcttcatcacctcgtgtcgatgaaaaacaagcaagcatcacggtcagcgttgtctcaggaccggcgtggagcggatatggagaatataaaggaattgcgtcgaactatcttgccgagctgcaagaaggagatacgattacgtgctttatttccacaccgcagtcagaatttacgctgccaaaagaccctgaaacgccgcttatcatggtcggaccgggaacaggcgtcgcgccgtttagaggctttgtgcaggcgcgcaaacagctaaaagaacaaggacagtcacttggagaagcacatttatacttcggctgccgttcacctcatgaagactatctgtatcaagaagagcttgaaaacgcccaaagcgaaggcatcattacgcttcataccgctttttctcgcatgccaaatcagccgaaaacatacgttcagcacgtaatggaacaagacggcaagaaattgattgaacttcttgatcaaggagcgcacttctatatttgcggagacggaagccaaatggcacctgccgttgaagcaacgcttatgaaaagctatgctgacgttcaccaagtgagtgaagcagacgctcgcttatggctgcagcagctagaagaaaaaggccgatacgcaaaagacgtgtgggctggg

SEQ ID NO: 286 - protein, 1049 aa, synthetic construct
  REGION 1..1049: note = variant of P450 oxidase from Bacillus megaterium
MTIKEMPQPKTFGELKNLPLLNTDKPVQALMRIADELGEIFKFEAPGSVTRYLSSQRLIKEACDESRFDKNLSQALKFARDFVGDGLATSWTHEPNWKKAHNILVPSFSQHAMGRYHAMMVDIAVQLVQKWERLNADEHIEVSEDMTRLTLDTIGLCGFNYRFNSFYRDQPHPFIVSVVRALDEVMNKLQRANPDDPAYDENKRQCQEDIKVMNDYVDKIIADRKARGEQSHDLLTQMLNGKDPETGEPLDDGNIRQQIITFLIAGHQTTSGLLSFALYFLVKNPHVLQKVAEEAARVLVDPVPSYKQVKQLKYVGMVLNEALRLWPVAPMFSLYAKEDTVLGGEYPLTKGDEVMVLVPQLHRDKTIWGDDVEEFRPERFENPSAIPQHAFKPFGNGQRACIGQQFALHEATLVLGMMLKHFDFEDHTNYELVIKESRTLKPEGFVVKAKSKGIPLGGIPSPSTEQSAKKVRKKAENAHNTPLLVLYGSNAGTAEGTARDLADIAMSKGFAPQVATLDSHAGNLPREGAVLIVTASYNGHPPDNAKQFVDWLDQASADEVKGVRYSVFGCGDKNWAGTYQKVPAFIDETLAAKGAENIADRGEADASDDFEGTYEEWRDHMWSDVAAYFNLDIENSEDNKSTLSLQFVDSAADMPLAKMHGAFSTNVVASKELQQPGSARSTRHLEIELPKEASYQEGDHLGVIPRNYEGIVNRVTARFGLSASQQIRLEAEEEKLAHLPLAKTVSVEELLQYVELQDPVTRTQLRAMAAKTVCPPHKVELEALLEKQAYKEQVLAKRLTMLELLEKYPACEMKFSEFIALLPSIRPRYYSISSSPRVDEKQASITVSVVSGPAWSGYGEYKGIASNYLAELQEGDTITCFISTPQSEFTLPKDPETPLIMVGPGTGVAPFRGFVQARKQLKEQGQSLGEAHLYFGCRSPHEDYLYQEELENAQSEGIITLHTAFSRMPNQPKTYVQHVMEQDGKKLIELLDQGAHFYICGDGSQMAPAVEATLMKSYADVHQVSEADARLWLQQLEEKGRYAKDVWAG

SEQ ID NO: 287 - DNA, 3147 bp, synthetic construct
  misc_feature 1..3147: note = variant of P450 oxidase from Bacillus megaterium
  source 1..3147: mol_type = other DNA
atgacaattaaggaaatgcctcagcctaagacgtttggagaacttaaaaatttaccgttattaaacacagataaaccggttcaagctttgatgcgtattgcggatgaattaggagaaatctttaaattcgaggcgcctggtagcgtaacgcgctatttatcaagtcagcgtctaattaaagaagcatgcgatgaatcacgctttgataaaaacttaagtcaagcgcttaaatttgcacgtgattttgttggagacgggttagccacaagctggacgcatgaaccgaattggaaaaaagcgcataatatcttagttccaagctttagtcagcatgcaatggggcgttatcatgcgatgatggtcgatatcgccgtgcagcttgttcaaaagtgggagcgtctaaatgcagatgagcatattgaagtatcggaagacatgacacgtttaacgcttgatacaattggtctttgcggctttaactatcgctttaacagcttttaccgagatcagcctcatccatttattgtgagtgtggttcgtgcactggatgaagtaatgaacaagctgcagcgagcaaatccagacgacccagcttatgatgaaaacaagcgccagtgtcaagaagatatcaaggtgatgaacgactatgtagataaaattattgcagatcgcaaagcaaggggtgaacaaagtcatgatttattaacgcagatgctaaacggaaaagatccagaaacgggtgagccgcttgatgacgggaacattcgtcagcaaattattacattcttaattgcgggacaccaaacaacaagtggtcttttatcatttgcgctgtatttcttagtgaaaaatccacatgtattacaaaaagtagcagaagaagcagcacgagttctagtagatcctgttccaagctacaaacaagtcaaacagcttaaatatgtcggcatggtcttaaacgaagcgctgcgcttatggccagtagcgcctatgttttccctatatgcaaaagaagatacggtgcttggaggagaatatcctttaacgaaaggcgacgaagtaatggttctggtgcctcagcttcaccgtgataaaacaatttggggagacgatgtggaggagttccgtccagagcgttttgaaaatccaagtgcgattccgcagcatgcgtttaaaccgtttggaaacggtcagcgtgcgtgtatcggtcagcagttcgctcttcatgaagcaacgctggtacttggtatgatgctaaaacactttgactttgaagatcatacaaactacgagctcgttattaaagaaactcggacgttaaaacctgaaggctttgtggtaaaagcaaaatcgaaaggcattccgcttggcggtattccttcacctagcactgaacagtctgctaaaaaagtacgcaaaaaggcagaaaacgctcataatacgccgctgcttgtgctatacggttcaaatgcgggaacggctgaaggagctgcgcgtgatttagcagatattgcaatgagcaaaggatttgcaccgcaggtcgcaacgcttgattcacacgccggaaatcttccgcgcgaaggagctgtattaattgtaacggcgtcttataacggtcatccgcctgataacgcaaagcaatttgtcgactggttagaccaagcgtctgctgatgaagtaaaaggcgttcgctactccgtatttggatgcggcgataaaaattgggctgggacgtatcaaaaagtgcctgcttttatcgatgaaacgcttgccgctaaaggggcagaaaacatcgctgaccgcggtgaagcagatgcaagcgacgactttgaaggcacatatgaagaatggcgtgatcatatgtggagtgacgtagcagcctactttaacctcgacattgaaaacagtgaagataataaatctactctttcacttcaatttgtcgacagcgccgcggatatgccgcttgcgaaaatgcacggtgcgttttcaacgaacgtcgtagcaagcaaagaacttcaacagccaggcagtgcacgaagcacgcgacatcttgaaattgaacttccaaaagaagcttcttatcaagaaggagatcatttaggtgttattcctcgcaactatgaaggaatagtaaaccgtgtaacagcaaggttcggcctaagcgcatcacagctgatccgtctggaagcagaagaagaaaaattagctcatttgccactcgctaaaacagtatccgtagaagagcttctgcaatacgtggagcttcaagatcctgttacgcgcacgcagcttcgcgcaatggctgctaaaacggtctgcccgccgcataaagtagagcttgaagccttgcttgaaaagcaagcctacaaagaacaagtgctggcaaaacgtttaacaatgcttgaactgcttgaaaaatacccggcgtgtgaaatgaaattcagcgaatttatcgcccttctgccaagcatacgcccgcgctattactcgatttcttcatcacctcgtgtcgatgaaaaacaagcaagcatcacggtcagcgttgtctcaggaccggcgtggagcggatatggagaatataaaggaattgcgtcgaactatcttgccgagctgcaagaaggagatacgattacgtgctttatttccacaccgcagtcagaatttacgctgccaaaagaccctgaaacgccgcttatcatggtcggaccgggaacaggcgtcgcgccgtttagaggctttgtgcaggcgcgcaaacagctaaaagaacaaggacagtcacttggagaagcacatttatacttcggctgccgttcacctcatgaagactatctgtatcaagaagagcttgaaaacgcccaaagcgaaggcatcattacgcttcataccgctttttctcgcatgccaaatcagccgaaaacatacgttcagcacgtaatggaacaagacggcaagaaattgattgaacttcttgatcaaggagcgcacttctatatttgcggagacggaagccaaatggcacctgccgttgaagcaacgcttatgaaaagctatgctgacgttcaccaagtgagtgaagcagacgctcgcttatggctgcagcagctagaagaaaaaggccgatacgcaaaagacgtgtgggctggg

SEQ ID NO: 288 - protein, 1049 aa, synthetic construct
  REGION 1..1049: note = variant of P450 oxidase from Bacillus megaterium
MTIKEMPQPKTFGELKNLPLLNTDKPVQALMRIADELGEIFKFEAPGSVTRYLSSQRLIKEACDESRFDKNLSQALKFARDFVGDGLATSWTHEPNWKKAHNILVPSFSQHAMGRYHAMMVDIAVQLVQKWERLNADEHIEVSEDMTRLTLDTIGLCGFNYRFNSFYRDQPHPFIVSVVRALDEVMNKLQRANPDDPAYDENKRQCQEDIKVMNDYVDKIIADRKARGEQSHDLLTQMLNGKDPETGEPLDDGNIRQQIITFLIAGHQTTSGLLSFALYFLVKNPHVLQKVAEEAARVLVDPVPSYKQVKQLKYVGMVLNEALRLWPVAPMFSLYAKEDTVLGGEYPLTKGDEVMVLVPQLHRDKTIWGDDVEEFRPERFENPSAIPQHAFKPFGNGQRACIGQQFALHEATLVLGMMLKHFDFEDHTNYELVIKETRTLKPEGFVVKAKSKGIPLGGIPSPSTEQSAKKVRKKAENAHNTPLLVLYGSNAGTAEGAARDLADIAMSKGFAPQVATLDSHAGNLPREGAVLIVTASYNGHPPDNAKQFVDWLDQASADEVKGVRYSVFGCGDKNWAGTYQKVPAFIDETLAAKGAENIADRGEADASDDFEGTYEEWRDHMWSDVAAYFNLDIENSEDNKSTLSLQFVDSAADMPLAKMHGAFSTNVVASKELQQPGSARSTRHLEIELPKEASYQEGDHLGVIPRNYEGIVNRVTARFGLSASQLIRLEAEEEKLAHLPLAKTVSVEELLQYVELQDPVTRTQLRAMAAKTVCPPHKVELEALLEKQAYKEQVLAKRLTMLELLEKYPACEMKFSEFIALLPSIRPRYYSISSSPRVDEKQASITVSVVSGPAWSGYGEYKGIASNYLAELQEGDTITCFISTPQSEFTLPKDPETPLIMVGPGTGVAPFRGFVQARKQLKEQGQSLGEAHLYFGCRSPHEDYLYQEELENAQSEGIITLHTAFSRMPNQPKTYVQHVMEQDGKKLIELLDQGAHFYICGDGSQMAPAVEATLMKSYADVHQVSEADARLWLQQLEEKGRYAKDVWAG

SEQ ID NO: 289 - DNA, 3147 bp, synthetic construct
  misc_feature 1..3147: note = variant of P450 oxidase from Bacillus megaterium
  source 1..3147: mol_type = other DNA
atgacaattaaggaaatgcctcagcctaagacgtttggagaacttaaaaatttaccgttattaaacacagataaaccggttcaagctttgatgcgtattgcggatgaattaggagaaatctttaaattcgaggcgcctggtagcgtaacgcgctatttatcaagtcagcgtctaattaaagaagcatgcgatgaatcacgctttgataaaaacttaagtcaagcgcttaaatttgcacgtgattttgttggagacgggttagccacaagctggacgcatgaaccgaattggaaaaaagcgcataatatcttagttccaagctttagtcagcatgcaatggggcgttatcatgcgatgatggtcgatatcgccgtgcagcttgttcaaaagtgggagcgtctaaatgcagatgagcatattgaagtatcggaagacatgacacgtttaacgcttgatacaattggtctttgcggctttaactatcgctttaacagcttttaccgagatcagcctcatccatttattgtgagtgtgcgccgtgcactggatgaagtaatgaacaagctgcagcgagcaaatccagacgacccagcttatgatgaaaacaagcgccagtgtcaagaagatatcaaggtgatgaacgactatgtagataaaattattgcagatcgcaaagcaaggggtgaacaaagtcatgatttattaacgcagatgctaaacggaaaagatccagaaacgggtgagccgcttgatgacgggaacattcgtcagcaaattattacattcttaattgcgggacaccaaacaacaagtggtcttttatcatttgcgctgtatttcttagtgaaaaatccacatgtattacaaaaagtagcagaagaagcagcacgagttctagtagatcctgttccaagctacaaacaagtcaaacagcttaaatatgtcggcatggtcttaaacgaagcgctgcgcttatggccagtagcgcctatgttttccctatatgcaaaagaagatacggtgcttggaggagaatatcctttaacgaaaggcgacgaagtaatggttctggtgcctcagcttcaccgtgataaaacaatttggggagacgatgtggaggagttccgtccagagcgttttgaaaatccaagtgcgattccgcagcatgcgtttaaaccgtttggaaacggtcagcgtgcgtgtatcggtcagcagttcgctcttcatgaagcaacgctggtacttggtatgatgctaaaacactttgactttgaagatcatacaaactacgagctcgttattaaagaaactcggacgttaaaacctgaaggctttgtggtaaaagcaaaatcgaaaggcattccgcttggcggtattccttcacctagcactgaacagtctgctaaaaaagtacgcaaaaaggcagaaaacgctcataatacgccgctgcttgtgctatacggttcaaatgcgggaacagctgaaggaacggcgcgtgatttagcagatattgcaatgagcaaaggatttgcaccgcaggtcgcaacgcttgattcacacgccggaaatcttccgcgcgaaggagctgtattaattgtaacggcgtcttataacggtcatccgcctgataacgcaaagcaatttgtcgactggttagaccaagcgtctgctgatgaagtaaaaggcgttcgctactccgtatttggatgcggcgataaaaattgggtggggacgtatcaaaaagtgcctgcttttatcgatgaaacgcttgccgctaaaggggcagaaaacatcgctgaccgcggtgaagcagatgcaagcgacgactttgaaggcacatatgaagaatggcgtgatcatatgtggagtgacgtagcagcctactttaacctcgacattgaaaacagtgaagataataaatctactctttcacttcaatttgtcgacagcgccgcggatatgccgcttgcgaaaatgcacggtgcgttttcaacgaacgtcgtagcaagcaaagaacttcaacagccaggcagtgcacgaagcacgcgacatcttgaaattgaacttccaaaagaagcttcttatcaagaaggagatcatttaggtgttattcctcgcaactatgaaggaatagtaaaccgtgtaacagcaaggttcggcctaagcgcatcacagcagatccgtctggaagcagaagaagaaaaattagctcatttgccactcgctaaaacagtatccgtagaagagcttctgcaatacgtggagcttcaagatcctgttacgcgcacgcagcttcgcgcaatggctgctaaaacggtctgcccgccgcataaagtagagcttgaagccttgcttgaaaagcaagcctacaaagaacaagtgctggcaaaacgtttaacaatgcttgaactgcttgaaaaatacccggcgtgtgaaatgaaattcagcgaatttatcgcccttctgccaagcatacgcccgcgctattactcgatttcttcatcacctcgtgtcgatgaaaaacaagcaagcatcacggtcagcgttgtctcaggaccggcgtggagcggatatggagaatataaaggaattgcgtcgaactatcttgccgagctgcaagaaggagatacgattacgtgctttatttccacaccgcagtcagaatttacgctgccaaaagaccctgaaacgccgcttatcatggtcggaccgggaacaggcgtcgcgccgtttagaggctttgtgcaggcgcgcaaacagctaaaagaacaaggacagtcacttggagaagcacatttatacttcggctgccgttcacctcatgaagactatctgtatcaagaagagcttgaaaacgcccaaagcgaaggcatcattacgcttcataccgctttttctcgcatgccaaatcagccgaaaacatacgttcagcacgtaatggaacaagacggcaagaaattgattgaacttcttgatcaaggagcgcacttctatatttgcggagacggaagccaaatggcacctgccgttgaagcaacgcttatgaaaagctatgctgacgttcaccaagtgagtgaagcagacgctcgcttatggctgcagcagctagaagaaaaaggccgatacgcaaaagacgtgtgggctggg

SEQ ID NO: 290 - protein, 1049 aa, synthetic construct
  REGION 1..1049: note = variant of P450 oxidase from Bacillus megaterium
MTIKEMPQPKTFGELKNLPLLNTDKPVQALMRIADELGEIFKFEAPGSVTRYLSSQRLIKEACDESRFDKNLSQALKFARDFVGDGLATSWTHEPNWKKAHNILVPSFSQHAMGRYHAMMVDIAVQLVQKWERLNADEHIEVSEDMTRLTLDTIGLCGFNYRFNSFYRDQPHPFIVSVRRALDEVMNKLQRANPDDPAYDENKRQCQEDIKVMNDYVDKIIADRKARGEQSHDLLTQMLNGKDPETGEPLDDGNIRQQIITFLIAGHQTTSGLLSFALYFLVKNPHVLQKVAEEAARVLVDPVPSYKQVKQLKYVGMVLNEALRLWPVAPMFSLYAKEDTVLGGEYPLTKGDEVMVLVPQLHRDKTIWGDDVEEFRPERFENPSAIPQHAFKPFGNGQRACIGQQFALHEATLVLGMMLKHFDFEDHTNYELVIKETRTLKPEGFVVKAKSKGIPLGGIPSPSTEQSAKKVRKKAENAHNTPLLVLYGSNAGTAEGTARDLADIAMSKGFAPQVATLDSHAGNLPREGAVLIVTASYNGHPPDNAKQFVDWLDQASADEVKGVRYSVFGCGDKNWVGTYQKVPAFIDETLAAKGAENIADRGEADASDDFEGTYEEWRDHMWSDVAAYFNLDIENSEDNKSTLSLQFVDSAADMPLAKMHGAFSTNVVASKELQQPGSARSTRHLEIELPKEASYQEGDHLGVIPRNYEGIVNRVTARFGLSASQQIRLEAEEEKLAHLPLAKTVSVEELLQYVELQDPVTRTQLRAMAAKTVCPPHKVELEALLEKQAYKEQVLAKRLTMLELLEKYPACEMKFSEFIALLPSIRPRYYSISSSPRVDEKQASITVSVVSGPAWSGYGEYKGIASNYLAELQEGDTITCFISTPQSEFTLPKDPETPLIMVGPGTGVAPFRGFVQARKQLKEQGQSLGEAHLYFGCRSPHEDYLYQEELENAQSEGIITLHTAFSRMPNQPKTYVQHVMEQDGKKLIELLDQGAHFYICGDGSQMAPAVEATLMKSYADVHQVSEADARLWLQQLEEKGRYAKDVWAG

SEQ ID NO: 291 - DNA, 3147 bp, synthetic construct
  misc_feature 1..3147: note = variant of P450 oxidase from Bacillus megaterium
  source 1..3147: mol_type = other DNA
atgacaattaaggaaatgcctcagcctaagacgtttggagaacttaaaaatttaccgttattaaacacagataaaccggttcaagctttgatgcgtattgcggatgaattaggagaaatctttaaattcgaggcgcctggtagcgtaacgcgctatttatcaagtcagcgtctaattaaagaagcatgcgatgaatcacgctttgataaaaacttaagtcaagcgcttaaatttgcccgtgattttgttggagacgggttagccacaagctggacgcatgaaccgaattggaaaaaagcgcataatatcttagttccaagctttagtcagcatgcaatggggcgttatcatgcgatgatggtcgatatcgccgtgcagcttgttcaaaagtgggagcgtctaaatgcagatgagcatattgaagtatcggaagacatgacacgtttaacgcttgatacaattggtctttgcggctttaactatcgctttaacagcttttaccgagatcagcctcatccatttattgtgagtgtgcgccgtgcactggatgaagtaatgaacaagctgcagcgagcaaatccagacgacccagcttatgatgaaaacaagcgccagtgtcaagaagatatcaaggtgatgaacgactatgtagataaaattattgcagatcgcaaagcaaggggtgaacaaagtcatgatttattaacgcagatgctaaacggaaaagatccagaaacgggtgagccgcttgatgacgggaacattcgtcagcaaattattacattcttaattgcgggacaccaaacaacaagtggtcttttatcatttgcgctgtatttcttagtgaaaaatccacatgtattacaaaaagtagcagaagaagcagcacgagttctagtagatcctgttccaagctacaaacaagtcaaacagcttaaatatgtcggcatggtcttaaacgaagcgctgcgcttatggccagtagcgcctatgttttccctatatgcaaaagaagatacggtgcttggaggagaatatcctttaacgaaaggcgacgaagtaatggttctggtgcctcagcttcaccgtgataaaacaatttggggagacgatgtggaggagttccgtccagagcgttttgaaaatccaagtgcgattccgcagcatgcgtttaaaccgtttggaaacggtcagcgtgcgtgtatcggtcagcagttcgctcttcatgaagcaacgctggtacttggtatgatgctaaaacactttgactttgaagatcatacaaactacgagctcgttattaaagaaactcggacgttaaaacctgaaggctttgtggtaaaagcaaaatcgaaaggcattccgcttggcggtattccttcacctagcactgaacagtctgctaaaaaagtacgcaaaaaggcagaaaacgctcataatacgccgctgcttgtgctatacggttcaaatgcgggaacagctgaaggaacggcgcgtgatttagcagatattgcaatgagcaaaggatttgcaccgcaggtcgcaacgcttgattcacacgccggaaatcttccgcgcgaaggagctgtattaattgtaacggcgtcttataacggtcatccgcctgataacgcaaagcaatttgtcgactggttagaccaagcgtctgctgatgaagtaaaaggcgttcgctactccgtatttggatgcggcgatagcaattgggcggggacgtatcaaaaagtgcctgcttttatcgatgaaacgcttgccgctaaaggggcagaaaacatcgctgaccgcggtgaagcagatgcaagcgacgactttgaaggcacatatgaagaatggcgtgatcatatgtggagtgacgtagcagcctactttaacctcgacattgaaaacagtgaagataataaatctactctttcacttcaatttgtcgacagcgccgcggatatgccgcttgcgaaaatgcacggtgcgttttcaacgaacgtcgtagcaagcaaagaacttcaacagccaggcagtgcacgaagcacgcgacatcttgaaattgaacttccaaaagaagcttcttatcaagaaggagatcatttaggtgttattcctcgcaactatgaaggaatagtaaaccgtgtaacagcaaggttcggcctaagcgcatcacagctgatccgtctggaagcagaagaagaaaaattagctcatttgccactcgctaaaacagtatccgtagaagagcttctgcaatacgtggagcttcaagatcctgttacgcgcacgcagcttcgcgcaatggctgctaaaacggtctgcccgccgcataaagtagagcttgaagccttgcttgaaaagcaagcctacaaagaacaagtgctggcaaaacgtttaacaatgcttgaactgcttgaaaaatacccggcgtgtgaaatgaaattcagcgaatttatcgcccttctgccaagcatacgcccgcgctattactcgatttcttcatcacctcgtgtcgatgaaaaacaagcaagcatcacggtcagcgttgtctcaggaccggcgtggagcggatatggagaatataaaggaattgcgtcgaactatcttgccgagctgcaagaaggagatacgattacgtgctttatttccacaccgcagtcagaatttacgctgccaaaagaccctgaaacgccgcttatcatggtcggaccgggaacaggcgtcgcgccgtttagaggctttgtgcaggcgcgcaaacagctaaaagaacaaggacagtcacttggagaagcacatttatacttcggctgccgttcacctcatgaagactatctgtatcaagaagagcttgaaaacgcccaaagcgaaggcatcattacgcttcataccgctttttctcgcatgccaaatcagccgaaaacatacgttcagcacgtaatggaacaagacggcaagaaattgattgaacttcttgatcaaggagcgcacttctatatttgcggagacggaagccaaatggcacctgccgttgaagcaacgcttatgaaaagctatgctgacgttcaccaagtgagtgaagcagacgctcgcttatggctgcagcagctagaagaaaaaggccgatacgcaaaagacgtgtgggctggg

SEQ ID NO: 292 - protein, 1049 aa, synthetic construct
  REGION 1..1049: note = variant of P450 oxidase from Bacillus megaterium
MTIKEMPQPKTFGELKNLPLLNTDKPVQALMRIADELGEIFKFEAPGSVTRYLSSQRLIKEACDESRFDKNLSQALKFARDFVGDGLATSWTHEPNWKKAHNILVPSFSQHAMGRYHAMMVDIAVQLVQKWERLNADEHIEVSEDMTRLTLDTIGLCGFNYRFNSFYRDQPHPFIVSVRRALDEVMNKLQRANPDDPAYDENKRQCQEDIKVMNDYVDKIIADRKARGEQSHDLLTQMLNGKDPETGEPLDDGNIRQQIITFLIAGHQTTSGLLSFALYFLVKNPHVLQKVAEEAARVLVDPVPSYKQVKQLKYVGMVLNEALRLWPVAPMFSLYAKEDTVLGGEYPLTKGDEVMVLVPQLHRDKTIWGDDVEEFRPERFENPSAIPQHAFKPFGNGQRACIGQQFALHEATLVLGMMLKHFDFEDHTNYELVIKETRTLKPEGFVVKAKSKGIPLGGIPSPSTEQSAKKVRKKAENAHNTPLLVLYGSNAGTAEGTARDLADIAMSKGFAPQVATLDSHAGNLPREGAVLIVTASYNGHPPDNAKQFVDWLDQASADEVKGVRYSVFGCGDSNWAGTYQKVPAFIDETLAAKGAENIADRGEADASDDFEGTYEEWRDHMWSDVAAYFNLDIENSEDNKSTLSLQFVDSAADMPLAKMHGAFSTNVVASKELQQPGSARSTRHLEIELPKEASYQEGDHLGVIPRNYEGIVNRVTARFGLSASQLIRLEAEEEKLAHLPLAKTVSVEELLQYVELQDPVTRTQLRAMAAKTVCPPHKVELEALLEKQAYKEQVLAKRLTMLELLEKYPACEMKFSEFIALLPSIRPRYYSISSSPRVDEKQASITVSVVSGPAWSGYGEYKGIASNYLAELQEGDTITCFISTPQSEFTLPKDPETPLIMVGPGTGVAPFRGFVQARKQLKEQGQSLGEAHLYFGCRSPHEDYLYQEELENAQSEGIITLHTAFSRMPNQPKTYVQHVMEQDGKKLIELLDQGAHFYICGDGSQMAPAVEATLMKSYADVHQVSEADARLWLQQLEEKGRYAKDVWAG

SEQ ID NO: 293 - DNA, 3147 bp, synthetic construct
  misc_feature 1..3147: note = variant of P450 oxidase from Bacillus megaterium
  source 1..3147: mol_type = other DNA
atgacaattaaggaaatgcctcagcctaagacgtttggagaacttaaaaatttaccgttattaaacacagataaaccggttcaagctttgatgcgtattgcggatgaattaggagaaatctttaaattcgaggcgcctggtagcgtaacgcgctatttatcaagtcagcgtctaattaaagaagcatgcgatgaatcacgctttgataaaaacttaagtcaagcgcttaaatttgcccgtgattttgttggagacgggttagccacaagctggacgcatgaaccgaattggaaaaaagcgcataatatcttagttccaagctttagtcagcatgcaatggggcgttatcatgcgatgatggtcgatatcgccgtgcagcttgttcaaaagtgggagcgtctaaatgcagatgagcatattgaagtatcggaagacatgacacgtttaacgcttgatacaattggtctttgcggctttaactatcgctttaacagcttttaccgagatcagcctcatccatttattgtgagtgtgcgccgtgcactggatgaagtaatgaacaagctgcagcgagcaaatccagacgacccagcttatgatgaaaacaagcgccagtgtcaagaagatatcaaggtggtgaacgactatgtagataaaattattgcagatcgcaaagcaaggggtgaacaaagtcatgatttattaacgcagatgctaaacggaaaagatccagaaacgggtgagccgcttgatgacgggaacattcgtcagcaaattattacattcttaattgcgggacaccaaacaacaagtggtcttttatcatttgcgctgtatttcttagtgaaaaatccacatgtattacaaaaagtagcagaagaagcagcacgagttctagtagatcctgttccaagctacaaacaagtcaaacagcttaaatatgttggcatggtcttaaacgaagcgctgcgcttatggccagtagcgcctatgttttccctatatgcaaaagaagatacggtgcttggaggagaatatcctttaacgaaaggcgacgaagtaatggttctggtgcctcagcttcaccgtgataaaacaatttggggagacgatgtggaggagttccgtccagagcgttttgaaaatccaagtgcgattccgcagcatgcgtttaaaccgtttggaaacggtcagcgtgcgtgtatcggtcagcagttcgctcttcatgaagcaacgctggtacttggtatgatgctaaaacactttgactttgaagatcatacaaactacgagctcgttattaaagaatcgcggacgttaaaacctgaaggctttgtggtaaaagcaaaatcgaaaggcattccgcttggcggtattccttcacctagcactgaacagtctgctaaaaaagtacgcaaaaaggcagaaaacgctcataatacgccgctgcttgtgctatacggttcaaatgcgggaacggctgaaggagctgcgcgtgatttagcagatattgcaatgagcaaaggatttgcaccgcaggtcgcaacgcttgattcacacgccggaaatcttccgcgcgaaggagctgtattaattgtaacggcgtcttataacggtcatccgcctgataacgcaaagcaatttgtcgactggttagaccaagcgtctgctgatgaagtaaaaggcgttcgctactccgtatttggatgcggcgatagcaattgggtggggacgtatcaaaaagtgcctgcttttatcgatgaaacgcttgccgctaaaggggcagaaaacatcgctgaccgcggtgaagcagatgcaagcgacgactttgaaggcacatatgaagaatggcgtgatcatatgtggagtgacgtagcagcctactttaacctcgacattgaaaacagtgaagataataaatctactctttcacttcaatttgtcgacagcgccgcggatatgccgcttgcgaaaatgcacggtgcgttttcaacgaacgtcgtagcaagcaaagaacttcaacagccaggcagtgcacgaagcacgcgacatcttgaaattgaacttccaaaagaagcttcttatcaagaaggagatcatttaggtgttattcctcgcaactatgaaggaatagtaaaccgtgtaacagcaaggttcggcctaagcgcatcacagcagatccgtctggaagcagaagaagaaaaattagctcatttgccactcgctaaaacagtatccgtagaagagcttctgcaatacgtggagcttcaagatcctgttacgcgcacgcagcttcgcgcaatggctgctaaaacggtctgcccgccgcataaagtagagcttgaagccttgcttgaaaagcaagcctacaaagaacaagtgctggcaaaacgtttaacaatgcttgaactgcttgaaaaatacccggcgtgtgaaatgaaattcagcgaatttatcgcccttctgccaagcatacgcccgcgctattactcgatttcttcatcacctcgtgtcgatgaaaaacaagcaagcatcacggtcagcgttgtctcaggaccggcgtggagcggatatggagaatataaaggaattgcgtcgaactatcttgccgagctgcaagaaggagatacgattacgtgctttatttccacaccgcagtcagaatttacgctgccaaaagaccctgaaacgccgcttatcatggtcggaccgggaacaggcgtcgcgccgtttagaggctttgtgcaggcgcgcaaacagctaaaagaacaaggacagtcacttggagaagcacatttatacttcggctgccgttcacctcatgaagactatctgtatcaagaagagcttgaaaacgcccaaagcgaaggcatcattacgcttcataccgctttttctcgcatgccaaatcagccgaaaacatacgttcagcacgtaatggaacaagacggcaagaaattgattgaacttcttgatcaaggagcgcacttctatatttgcggagacggaagccaaatggcacctgccgttgaagcaacgcttatgaaaagctatgctgacgttcaccaagtgagtgaagcagacgctcgcttatggctgcagcagctagaagaaaaaggccgatacgcaaaagacgtgtgggctggg

SEQ ID NO: 294 - protein, 1049 aa, synthetic construct
  REGION 1..1049: note = variant of P450 oxidase from Bacillus megaterium
MTIKEMPQPKTFGELKNLPLLNTDKPVQALMRIADELGEIFKFEAPGSVTRYLSSQRLIKEACDESRFDKNLSQALKFARDFVGDGLATSWTHEPNWKKAHNILVPSFSQHAMGRYHAMMVDIAVQLVQKWERLNADEHIEVSEDMTRLTLDTIGLCGFNYRFNSFYRDQPHPFIVSVRRALDEVMNKLQRANPDDPAYDENKRQCQEDIKVVNDYVDKIIADRKARGEQSHDLLTQMLNGKDPETGEPLDDGNIRQQIITFLIAGHQTTSGLLSFALYFLVKNPHVLQKVAEEAARVLVDPVPSYKQVKQLKYVGMVLNEALRLWPVAPMFSLYAKEDTVLGGEYPLTKGDEVMVLVPQLHRDKTIWGDDVEEFRPERFENPSAIPQHAFKPFGNGQRACIGQQFALHEATLVLGMMLKHFDFEDHTNYELVIKESRTLKPEGFVVKAKSKGIPLGGIPSPSTEQSAKKVRKKAENAHNTPLLVLYGSNAGTAEGAARDLADIAMSKGFAPQVATLDSHAGNLPREGAVLIVTASYNGHPPDNAKQFVDWLDQASADEVKGVRYSVFGCGDSNWVGTYQKVPAFIDETLAAKGAENIADRGEADASDDFEGTYEEWRDHMWSDVAAYFNLDIENSEDNKSTLSLQFVDSAADMPLAKMHGAFSTNVVASKELQQPGSARSTRHLEIELPKEASYQEGDHLGVIPRNYEGIVNRVTARFGLSASQQIRLEAEEEKLAHLPLAKTVSVEELLQYVELQDPVTRTQLRAMAAKTVCPPHKVELEALLEKQAYKEQVLAKRLTMLELLEKYPACEMKFSEFIALLPSIRPRYYSISSSPRVDEKQASITVSVVSGPAWSGYGEYKGIASNYLAELQEGDTITCFISTPQSEFTLPKDPETPLIMVGPGTGVAPFRGFVQARKQLKEQGQSLGEAHLYFGCRSPHEDYLYQEELENAQSEGIITLHTAFSRMPNQPKTYVQHVMEQDGKKLIELLDQGAHFYICGDGSQMAPAVEATLMKSYADVHQVSEADARLWLQQLEEKGRYAKDVWAG

SEQ ID NO: 295 - DNA, 3147 bp, synthetic construct
  misc_feature 1..3147: note = variant of P450 oxidase from Bacillus megaterium
  source 1..3147: mol_type = other DNA
atgacaattaaggaaatgcctcagcctaagacgtttggagaacttaaaaatttaccgttattaaacacagataaaccggttcaagctttgatgcgtattgcggatgaattaggagaaatctttaaattcgaggcgcctggtagcgtaacgcgctatttatcaagtcagcgtctaattaaagaagcatgcgatgaatcacgctttgataaaaacttaagtcaagcgcttaaatttgcacgtgattttgttggagacgggttagccacaagctggacgcatgaaccgaattggaaaaaagcgcataatatcttagttccaagctttagtcagcatgcaatggggcgttatcatgcgatgatggtcgatatcgccgtgcagcttgttcaaaagtgggagcgtctaaatgcagatgagcatattgaagtatcggaagacatgacacgtttaacgcttgatacaattggtctttgcggctttaactatcgctttaacagcttttaccgagatcagcctcatccatttattgtgagtatggttcgtgcactggatgaagtaatgaacaagctgcagcgagcaaatccagacgacccagcttatgatgaaaacaagcgccagtgtcaagaagatatcaaggtgatgaacgactatgtagataaaattattgcagatcgcaaagcaaggggtgaacaaagtcatgatttattaacgcagatgctaaacggaaaagatccagaaacgggtgagccgcttgatgacgggaacattcgtcagcaaattattacattcttaattgcgggacaccaaacaacaagtggtcttttatcatttgcgctgtatttcttagtgaaaaatccacatgtattacaaaaagtagcagaagaagcagcacgagttctagtagatcctgttccaagctacaaacaagtcaaacagcttaaatatgttggcatggtcttaaacgaagcgctgcgcttatggccagtagcgcctacgttttccctatatgcaaaagaagatacggtgcttggaggagaatatcctttaacgaaaggcgacgaagtaatggttctggtgcctcagcttcaccgtgataaaacaatttggggagacgatgtggaggagttccgtccagagcgttttgaaaatccaagtgcgattccgcagcatgcgtttaaaccgtttggaaacggtcagcgtgcgtgtatcggtcagcagttcgctcttcatgaagcaacgctggtacttggtatgatgctaaaacactttgactttgaagatcatacaaactacgagctcgttattaaagaaactcggacgttaaaacctgaaggctttgtggtaaaagcaaaatcgaaaggcattccgcttggcggtattccttcacctagcactgaacagtctgctaaaaaagtacgcaaaaaggcagaaaacgctcataatacgccgctgcttgtgctatacggttcaaatgcgggaacagctgaaggaacggcgcgtgatttagcagatattgcaatgagcaaaggatttgcaccgcaggtcgcaacgcttgattcacacgccggaaatcttccgcgcgaaggagctgtattaattgtaacggcgtcttataacggtcatccgcctgataacgcaaagcaatttgtcgactggttagaccaagcgtctgctgatgaagtaaaaggcgttcgctactccgtatttggatgcggcgataaaaattgggctgggacgtatcaaaaagtgcctgcttttatcgatgaaacgcttgccgctaaaggggcagaaaacatcgctgaccgcggtgaagcagatgcaagcgacgactttgaaggcacatatgaagaatggcgtgatcatatgtggagtgacgtagcagcctactttaacctcgacattgaaaacagtgaagataataaatctactctttcacttcaatttgtcgacagcgccgcggatatgccgcttgcgaaaatgcacggtgcgttttcaacgaacgtcgtagcaagcaaagaacttcaacagccaggcagtgcacgaagcacgcgacatcttgaaattgaacttccaaaagaagcttcttatcaagaaggagatcatttaggtgttattcctcgcaactatgaaggaatagtaaaccgtgtaacagcaaggttcggcctaagcgcatcacagcagatccgtctggaagcagaagaagaaaaattagctcatttgccactcgctaaaacagtatccgtagaagagcttctgcaatacgtggagcttcaagatcctgttacgcgcacgcagcttcgcgcaatggctgctaaaacggtctgcccgccgcataaagtagagcttgaagccttgcttgaaaagcaagcctacaaagaacaagtgctggcaaaacgtttaacaatgcttgaactgcttgaaaaatacccggcgtgtgaaatgaaattcagcgaatttatcgcccttctgccaagcatacgcccgcgctattactcgatttcttcatcacctcgtgtcgatgaaaaacaagcaagcatcacggtcagcgttgtctcaggaccggcgtggagcggatatggagaatataaaggaattgcgtcgaactatcttgccgagctgcaagaaggagatacgattacgtgctttatttccacaccgcagtcagaatttacgctgccaaaagaccctgaaacgccgcttatcatggtcggaccgggaacaggcgtcgcgccgtttagaggctttgtgcaggcgcgcaaacagctaaaagaacaaggacagtcacttggagaagcacatttatacttcggctgccgttcacctcatgaagactatctgtatcaagaagagcttgaaaacgcccaaagcgaaggcatcattacgcttcataccgctttttctcgcatgccaaatcagccgaaaacatacgttcagcacgtaatggaacaagacggcaagaaattgattgaacttcttgatcaaggagcgcacttctatatttgcggagacggaagccaaatggcacctgccgttgaagcaacgcttatgaaaagctatgctgacgttcaccaagtgagtgaagcagacgctcgcttatggctgcagcagctagaagaaaaaggccgatacgcaaaagacgtgtgggctggg

SEQ ID NO: 296 - protein, 1049 aa, synthetic construct
  REGION 1..1049: note = variant of P450 oxidase from Bacillus megaterium
MTIKEMPQPKTFGELKNLPLLNTDKPVQALMRIADELGEIFKFEAPGSVTRYLSSQRLIKEACDESRFDKNLSQALKFARDFVGDGLATSWTHEPNWKKAHNILVPSFSQHAMGRYHAMMVDIAVQLVQKWERLNADEHIEVSEDMTRLTLDTIGLCGFNYRFNSFYRDQPHPFIVSMVRALDEVMNKLQRANPDDPAYDENKRQCQEDIKVMNDYVDKIIADRKARGEQSHDLLTQMLNGKDPETGEPLDDGNIRQQIITFLIAGHQTTSGLLSFALYFLVKNPHVLQKVAEEAARVLVDPVPSYKQVKQLKYVGMVLNEALRLWPVAPTFSLYAKEDTVLGGEYPLTKGDEVMVLVPQLHRDKTIWGDDVEEFRPERFENPSAIPQHAFKPFGNGQRACIGQQFALHEATLVLGMMLKHFDFEDHTNYELVIKETRTLKPEGFVVKAKSKGIPLGGIPSPSTEQSAKKVRKKAENAHNTPLLVLYGSNAGTAEGTARDLADIAMSKGFAPQVATLDSHAGNLPREGAVLIVTASYNGHPPDNAKQFVDWLDQASADEVKGVRYSVFGCGDKNWAGTYQKVPAFIDETLAAKGAENIADRGEADASDDFEGTYEEWRDHMWSDVAAYFNLDIENSEDNKSTLSLQFVDSAADMPLAKMHGAFSTNVVASKELQQPGSARSTRHLEIELPKEASYQEGDHLGVIPRNYEGIVNRVTARFGLSASQQIRLEAEEEKLAHLPLAKTVSVEELLQYVELQDPVTRTQLRAMAAKTVCPPHKVELEALLEKQAYKEQVLAKRLTMLELLEKYPACEMKFSEFIALLPSIRPRYYSISSSPRVDEKQASITVSVVSGPAWSGYGEYKGIASNYLAELQEGDTITCFISTPQSEFTLPKDPETPLIMVGPGTGVAPFRGFVQARKQLKEQGQSLGEAHLYFGCRSPHEDYLYQEELENAQSEGIITLHTAFSRMPNQPKTYVQHVMEQDGKKLIELLDQGAHFYICGDGSQMAPAVEATLMKSYADVHQVSEADARLWLQQLEEKGRYAKDVWAG

SEQ ID NO: 297 - DNA, 3147 bp, synthetic construct
  misc_feature 1..3147: note = variant of P450 oxidase from Bacillus megaterium
  source 1..3147: mol_type = other DNA
atgacaattaaggaaatgcctcagcctaagacgtttggagaacttaaaaatttaccgttattaaacacagataaaccggttcaagctttgatgcgtattgcggatgaattaggagaaatctttaaattcgaggcgcctggtagcgtaacgcgctatttatcaagtcagcgtctaattaaagaagcatgcgatgaatcacgctttgataaaaacttaagtcaagcgcttaaatttgcccgtgattttgttggagacgggttagccacaagctggacgcatgaaccgaattggaaaaaagcgcataatatcttagttccaagctttagtcagcatgcaatggggcgttatcatgcgatgatggtcgatatcgccgtgcagcttgttcaaaagtgggagcgtctaaatgcagatgagcatattgaagtatcggaagacatgacacgtttaacgcttgatacaattggtctttgcggctttaactatcgctttaacagcttttaccgagatcagcctcatccatttattgtgagtatggtccgtgcactggatgaagtaatgaacaagctgcagcgagcaaatccagacgacccagcttatgatgaaaacaagcgccagtgtcaagaagatatcaaggtgatgaacgactatgtagataaaattattgcagatcgcaaagcaaggggtgaacaaagtcatgatttattaacgcagatgctaaacggaaaagatccagaaacgggtgagccgcttgatgacgggaacattcgtcagcaaattattacattcttaattgcgggacaccaaacaacaagtggtcttttatcatttgcgctgtatttcttagtgaaaaatccacatgtattacaaaaagtagcagaagaagcagcacgagttctagtagatcctgttccaagctacaaacaagtcaaacagcttaaatatgtcggcatggtcttaaacgaagcgctgcgcttatggccagtagcgcctacgttttccctatatgcaaaagaagatacggtgcttggaggagaatatcctttaacgaaaggcgacgaagtaatggttctggtgcctcagcttcaccgtgataaaacaatttggggagacgatgtggaggagttccgtccagagcgttttgaaaatccaagtgcgattccgcagcatgcgtttaaaccgtttggaaacggtcagcgtgcgtgtatcggtcagcagttcgctcttcatgaagcaacgctggtacttggtatgatgctaaaacactttgactttgaagatcatacaaactacgagctcgttattaaagaaactcggacgttaaaacctgaaggctttgtggtaaaagcaaaatcgaaaggcattccgcttggcggtattccttcacctagcactgaacagtctgctaaaaaagtacgcaaaaaggcagaaaacgctcataatacgccgctgcttgtgctatacggttcaaatgcgggaacagctgaaggaacggcgcgtgatttagcagatattgcaatgagcaaaggatttgcaccgcaggtcgcaacgcttgattcacacgccggaaatcttccgcgcgaaggagctgtattaattgtaacggcgtcttataacggtcatccgcctgataacgcaaagcaatttgtcgactggttagaccaagcgtctgctgatgaagtaaaaggcgttcgctactccgtatttggatgcggcgatagcaattgggtggggacgtatcaaaaagtgcctgcttttatcgatgaaacgcttgccgctaaaggggcagaaaacatcgctgaccgcggtgaagcagatgcaagcgacgactttgaaggcacatatgaagaatggcgtgatcatatgtggagtgacgtagcagcctactttaacctcgacattgaaaacagtgaagataataaatctactctttcacttcaatttgtcgacagcgccgcggatatgccgcttgcgaaaatgcacggtgcgttttcaacgaacgtcgtagcaagcaaagaacttcaacagccaggcagtgcacgaagcacgcgacatcttgaaattgaacttccaaaagaagcttcttatcaagaaggagatcatttaggtgttattcctcgcaactatgaaggaatagtaaaccgtgtaacagcaaggttcggcctaagcgcatcacagcagatccgtctggaagcagaagaagaaaaattagctcatttgccactcgctaaaacagtatccgtagaagagcttctgcaatacgtggagcttcaagatcctgttacgcgcacgcagcttcgcgcaatggctgctaaaacggtctgcccgccgcataaagtagagcttgaagccttgcttgaaaagcaagcctacaaagaacaagtgctggcaaaacgtttaacaatgcttgaactgcttgaaaaatacccggcgtgtgaaatgaaattcagcgaatttatcgcccttctgccaagcatacgcccgcgctattactcgatttcttcatcacctcgtgtcgatgaaaaacaagcaagcatcacggtcagcgttgtctcaggaccggcgtggagcggatatggagaatataaaggaattgcgtcgaactatcttgccgagctgcaagaaggagatacgattacgtgctttatttccacaccgcagtcagaatttacgctgccaaaagaccctgaaacgccgcttatcatggtcggaccgggaacaggcgtcgcgccgtttagaggctttgtgcaggcgcgcaaacagctaaaagaacaaggacagtcacttggagaagcacatttatacttcggctgccgttcacctcatgaagactatctgtatcaagaagagcttgaaaacgcccaaagcgaaggcatcattacgcttcataccgctttttctcgcatgccaaatcagccgaaaacatacgttcagcacgtaatggaacaagacggcaagaaattgattgaacttcttgatcaaggagcgcacttctatatttgcggagacggaagccaaatggcacctgccgttgaagcaacgcttatgaaaagctatgctgacgttcaccaagtgagtgaagcagacgctcgcttatggctgcagcagctagaagaaaaaggccgatacgcaaaagacgtgtgggctggg

SEQ ID NO: 298 - protein, 1049 aa, synthetic construct
  REGION 1..1049: note = variant of P450 oxidase from Bacillus megaterium
MTIKEMPQPKTFGELKNLPLLNTDKPVQALMRIADELGEIFKFEAPGSVTRYLSSQRLIKEACDESRFDKNLSQALKFARDFVGDGLATSWTHEPNWKKAHNILVPSFSQHAMGRYHAMMVDIAVQLVQKWERLNADEHIEVSEDMTRLTLDTIGLCGFNYRFNSFYRDQPHPFIVSMVRALDEVMNKLQRANPDDPAYDENKRQCQEDIKVMNDYVDKIIADRKARGEQSHDLLTQMLNGKDPETGEPLDDGNIRQQIITFLIAGHQTTSGLLSFALYFLVKNPHVLQKVAEEAARVLVDPVPSYKQVKQLKYVGMVLNEALRLWPVAPTFSLYAKEDTVLGGEYPLTKGDEVMVLVPQLHRDKTIWGDDVEEFRPERFENPSAIPQHAFKPFGNGQRACIGQQFALHEATLVLGMMLKHFDFEDHTNYELVIKETRTLKPEGFVVKAKSKGIPLGGIPSPSTEQSAKKVRKKAENAHNTPLLVLYGSNAGTAEGTARDLADIAMSKGFAPQVATLDSHAGNLPREGAVLIVTASYNGHPPDNAKQFVDWLDQASADEVKGVRYSVFGCGDSNWVGTYQKVPAFIDETLAAKGAENIADRGEADASDDFEGTYEEWRDHMWSDVAAYFNLDIENSEDNKSTLSLQFVDSAADMPLAKMHGAFSTNVVASKELQQPGSARSTRHLEIELPKEASYQEGDHLGVIPRNYEGIVNRVTARFGLSASQQIRLEAEEEKLAHLPLAKTVSVEELLQYVELQDPVTRTQLRAMAAKTVCPPHKVELEALLEKQAYKEQVLAKRLTMLELLEKYPACEMKFSEFIALLPSIRPRYYSISSSPRVDEKQASITVSVVSGPAWSGYGEYKGIASNYLAELQEGDTITCFISTPQSEFTLPKDPETPLIMVGPGTGVAPFRGFVQARKQLKEQGQSLGEAHLYFGCRSPHEDYLYQEELENAQSEGIITLHTAFSRMPNQPKTYVQHVMEQDGKKLIELLDQGAHFYICGDGSQMAPAVEATLMKSYADVHQVSEADARLWLQQLEEKGRYAKDVWAG

SEQ ID NO: 299 - DNA, 3147 bp, synthetic construct
  misc_feature 1..3147: note = variant of P450 oxidase from Bacillus megaterium
  source 1..3147: mol_type = other DNA
atgacaattaaggaaatgcctcagcctaagacgtttggagaacttaaaaatttaccgttattaaacacagataaaccggttcaagctttgatgcgtattgcggatgaattaggagaaatctttaaattcgaggcgcctggtagcgtaacgcgctatttatcaagtcagcgtctaattaaagaagcatgcgatgaatcacgctttgataaaaacttaagtcaagcgcttaaatttgcccgtgattttgttggagacgggttagccacaagctggacgcatgaaccgaattggaaaaaagcgcataatatcttagttccaagctttagtcagcatgcaatggggcgttatcatgcgatgatggtcgatatcgccgtgcagcttgttcaaaagtgggagcgtctaaatgcagatgagcatattgaagtatcggaagacatgacacgtttaacgcttgatacaattggtctttgcggctttaactatcgctttaacagcttttaccgagatcagcctcatccatttattgtgagtatggtccgtgcactggatgaagtaatgaacaagctgcagcgagcaaatccagacgacccagcttatgatgaaaacaagcgccagtgtcaagaagatatcaaggtgatgaacgactatgtagataaaattattgcagatcgcaaagcaaggggtgaacaaagtcatgatttattaacgcagatgctaaacggaaaagatccagaaacgggtgagccgcttgatgacgggaacattcgtcagcaaattattacattcttaattgcgggacaccaaacaacaagtggtcttttatcatttgcgctgtatttcttagtgaaaaatccacatgtattacaaaaagtagcagaagaagcagcacgagttctagtagatcctgttccaagctacaaacaagtcaaacagcttaaatatgttggcatggtcttaaacgaagcgctgcgcttatggccagtagcgcctacgttttccctatatgcaaaagaagatacggtgcttggaggagaatatcctttaacgaaaggcgacgaagtaatggttctggtgcctcagcttcaccgtgataaaacaatttggggagacgatgtggaggagttccgtccagagcgttttgaaaatccaagtgcgattccgcagcatgcgttcaaaccgtttggaaacggtcagcgtgcgtgtatcggtcagcagttcgctcttcatgaagcaacgctggtacttggtatgatgctaaaacactttgactttgaagatcatacaaactacgagctcgttattaaagaaacgcggacgttaaaacctgaaggctttgtggtaaaagcaaaatcgaaaggcattccgcttggcggtattccttcacctagcactgaacagtctgctaaaaaagtacgcaaaaaggcagaaaacgctcataatacgccgctgcttgtgctatacggttcaaatgcgggaacggctgaaggagctgcgcgtgatttagcagatattgcaatgagcaaaggatttgcaccgcaggtcgcaacgcttgattcacacgccggaaatcttccgcgcgaaggagctgtattaattgtaacggcgtcttataacggtcatccgcctgataacgcaaagcaatttgtcgactggttagaccaagcgtctgctgatgaagtaaaaggcgttcgctactccgtatttggatgcggcgataaaaattgggcggggacgtatcaaaaagtgcctgcttttatcgatgaaacgcttgccgctaaaggggcagaaaacatcgctgaccgcggtgaagcagatgcaagcgacgactttgaaggcacatatgaagaatggcgtgatcatatgtggagtgacgtagcagcctactttaacctcgacattgaaaacagtgaagataataaatctactctttcacttcaatttgtcgacagcgccgcggatatgccgcttgcgaaaatgcacggtgcgttttcaacgaacgtcgtagcaagcaaagaacttcaacagccaggcagtgcacgaagcacgcgacatcttgaaattgaacttccaaaagaagcttcttatcaagaaggagatcatttaggtgttattcctcgcaactatgaaggaatagtaaaccgtgtaacagcaaggttcggcctaagcgcatcacagcagatccgtctggaagcagaagaagaaaaattagctcatttgccactcgctaaaacagtatccgtagaagagcttctgcaatacgtggagcttcaagatcctgttacgcgcacgcagcttcgcgcaatggctgctaaaacggtctgcccgccgcataaagtagagcttgaagccttgcttgaaaagcaagcctacaaagaacaagtgctggcaaaacgtttaacaatgcttgaactgcttgaaaaatacccggcgtgtgaaatgaaattcagcgaatttatcgcccttctgccaagcatacgcccgcgctattactcgatttcttcatcacctcgtgtcgatgaaaaacaagcaagcatcacggtcagcgttgtctcaggaccggcgtggagcggatatggagaatataaaggaattgcgtcgaactatcttgccgagctgcaagaaggagatacgattacgtgctttatttccacaccgcagtcagaatttacgctgccaaaagaccctgaaacgccgcttatcatggtcggaccgggaacaggcgtcgcgccgtttagaggctttgtgcaggcgcgcaaacagctaaaagaacaaggacagtcacttggagaagcacatttatacttcggctgccgttcacctcatgaagactatctgtatcaagaagagcttgaaaacgcccaaagcgaaggcatcattacgcttcataccgctttttctcgcatgccaaatcagccgaaaacatacgttcagcacgtaatggaacaagacggcaagaaattgattgaacttcttgatcaaggagcgcacttctatatttgcggagacggaagccaaatggcacctgccgttgaagcaacgcttatgaaaagctatgctgacgttcaccaagtgagtgaagcagacgctcgcttatggctgcagcagctagaagaaaaaggccgatacgcaaaagacgtgtgggctggg

SEQ ID NO: 300 - protein, 1049 aa, synthetic construct
  REGION 1..1049: note = variant of P450 oxidase from Bacillus megaterium
MTIKEMPQPKTFGELKNLPLLNTDKPVQALMRIADELGEIFKFEAPGSVTRYLSSQRLIKEACDESRFDKNLSQALKFARDFVGDGLATSWTHEPNWKKAHNILVPSFSQHAMGRYHAMMVDIAVQLVQKWERLNADEHIEVSEDMTRLTLDTIGLCGFNYRFNSFYRDQPHPFIVSMVRALDEVMNKLQRANPDDPAYDENKRQCQEDIKVMNDYVDKIIADRKARGEQSHDLLTQMLNGKDPETGEPLDDGNIRQQIITFLIAGHQTTSGLLSFALYFLVKNPHVLQKVAEEAARVLVDPVPSYKQVKQLKYVGMVLNEALRLWPVAPTFSLYAKEDTVLGGEYPLTKGDEVMVLVPQLHRDKTIWGDDVEEFRPERFENPSAIPQHAFKPFGNGQRACIGQQFALHEATLVLGMMLKHFDFEDHTNYELVIKETRTLKPEGFVVKAKSKGIPLGGIPSPSTEQSAKKVRKKAENAHNTPLLVLYGSNAGTAEGAARDLADIAMSKGFAPQVATLDSHAGNLPREGAVLIVTASYNGHPPDNAKQFVDWLDQASADEVKGVRYSVFGCGDKNWAGTYQKVPAFIDETLAAKGAENIADRGEADASDDFEGTYEEWRDHMWSDVAAYFNLDIENSEDNKSTLSLQFVDSAADMPLAKMHGAFSTNVVASKELQQPGSARSTRHLEIELPKEASYQEGDHLGVIPRNYEGIVNRVTARFGLSASQQIRLEAEEEKLAHLPLAKTVSVEELLQYVELQDPVTRTQLRAMAAKTVCPPHKVELEALLEKQAYKEQVLAKRLTMLELLEKYPACEMKFSEFIALLPSIRPRYYSISSSPRVDEKQASITVSVVSGPAWSGYGEYKGIASNYLAELQEGDTITCFISTPQSEFTLPKDPETPLIMVGPGTGVAPFRGFVQARKQLKEQGQSLGEAHLYFGCRSPHEDYLYQEELENAQSEGIITLHTAFSRMPNQPKTYVQHVMEQDGKKLIELLDQGAHFYICGDGSQMAPAVEATLMKSYADVHQVSEADARLWLQQLEEKGRYAKDVWAG

SEQ ID NO: 301 - DNA, 3147 bp, synthetic construct
  misc_feature 1..3147: note = variant of P450 oxidase from Bacillus megaterium
  source 1..3147: mol_type = other DNA
atgacaattaaggaaatgcctcagcctaagacgtttggagaacttaaaaatttaccgttattaaacacagataaaccggttcaagctttgatgcgtattgcggatgaattaggagaaatctttaaattcgaggcgcctggtagcgtaacgcgctatttatcaagtcagcgtctaattaaagaagcatgcgatgaatcacgctttgataaaaacttaagtcaagcgcttaaatttgcccgtgattttgttggagacgggttagccacaagctggacgcatgaaccgaattggaaaaaagcgcataatatcttagttccaagctttagtcagcatgcaatggggcgttatcatgcgatgatggtcgatatcgccgtgcagcttgttcaaaagtgggagcgtctaaatgcagatgagcatattgaagtatcggaagacatgacacgtttaacgcttgatacaattggtctttgcggctttaactatcgctttaacagcttttaccgagatcagcctcatccatttattgtgagtatggtccgtgcactggatgaagtaatgaacaagctgcagcgagcaaatccagacgacccagcttatgatgaaaacaagcgccagtgtcaagaagatatcaaggtgatgaacgactatgtagataaaattattgcagatcgcaaagcaaggggtgaacaaagtcatgatttattaacgcagatgctaaacggaaaagatccagaaacgggtgagccgcttgatgacgggaacattcgtcagcaaattattacattcttaattgcgggacaccaaacaacaagtggtcttttatcatttgcgctgtatttcttagtgaaaaatccacatgtattacaaaaagtagcagaagaagcagcacgagttctagtagatcctgttccaagctacaaacaagtcaaacagcttaaatatgttggcatggtcttaaacgaagcgctgcgcttatggccagtagcgcctacgttttccctatatgcaaaagaagatacggtgcttggaggagaatatcctttaacgaaaggcgacgaagtaatggttctgactcctcagcttcaccgtgataaaacaatttggggagacgatgtggaggagttccgtccagagcgttttgaaaatccaagtgcgattccgcagcatgcgtacaaaccgtttggaaacggtcagcgtgcgtgtatcggtcagcagttcgctcttcatgaagcaacgctggtacttggtatgatgctaaaacactttgactttgaagatcatacaaactacgagctcgttattaaagaatcgcggacgttaaaacctgaaggctttgtggtaaaagcaaaatcgaaaggcattccgcttggcggtattccttcacctagcactgaacagtctgctaaaaaagtacgcaaaaaggcagaaaacgctcataatacgccgctgcttgtgctatacggttcaaatgcgggaacagctgaaggaacggcgcgtgatttagcagatattgcaatgagcaaaggatttgcaccgcaggtcgcaacgcttgattcacacgccggaaatcttccgcgcgaaggagctgtattaattgtaacggcgtcttataacggtcatccgcctgataacgcaaagcaatttgtcgactggttagaccaagcgtctgctgatgaagtaaaaggcgttcgctactccgtatttggatgcggcgataaaaattgggctgggacgtatcaaaaagtgcctgcttttatcgatgaaacgcttgccgctaaaggggcagaaaacatcgctgaccgcggtgaagcagatgcaagcgacgactttgaaggcacatatgaagaatggcgtgatcatatgtggagtgacgtagcagcctactttaacctcgacattgaaaacagtgaagataataaatctactctttcacttcaatttgtcgacagcgccgcggatatgccgcttgcgaaaatgcacggtgcgttttcaacgaacgtcgtagcaagcaaagaacttcaacagccaggcagtgcacgaagcacgcgacatcttgaaattgaacttccaaaagaagcttcttatcaagaaggagatcatttaggtgttattcctcgcaactatgaaggaatagtaaaccgtgtaacagcaaggttcggcctaagcgcatcacagcagatccgtctggaagcagaagaagaaaaattagctcatttgccactcgctaaaacagtatccgtagaagagcttctgcaatacgtggagcttcaagatcctgttacgcgcacgcagcttcgcgcaatggctgctaaaacggtctgcccgccgcataaagtagagcttgaagccttgcttgaaaagcaagcctacaaagaacaagtgctggcaaaacgtttaacaatgcttgaactgcttgaaaaatacccggcgtgtgaaatgaaattcagcgaatttatcgcccttctgccaagcatacgcccgcgctattactcgatttcttcatcacctcgtgtcgatgaaaaacaagcaagcatcacggtcagcgttgtctcaggaccggcgtggagcggatatggagaatataaaggaattgcgtcgaactatcttgccgagctgcaagaaggagatacgattacgtgctttatttccacaccgcagtcagaatttacgctgccaaaagaccctgaaacgccgcttatcatggtcggaccgggaacaggcgtcgcgccgtttagaggctttgtgcaggcgcgcaaacagctaaaagaacaaggacagtcacttggagaagcacatttatacttcggctgccgttcacctcatgaagactatctgtatcaagaagagcttgaaaacgcccaaagcgaaggcatcattacgcttcataccgctttttctcgcatgccaaatcagccgaaaacatacgttcagcacgtaatggaacaagacggcaagaaattgattgaacttcttgatcaaggagcgcacttctatatttgcggagacggaagccaaatggcacctgccgttgaagcaacgcttatgaaaagctatgctgacgttcaccaagtgagtgaagcagacgctcgcttatggctgcagcagctagaagaaaaaggccgatacgcaaaagacgtgtgggctggg

SEQ ID NO: 302 - protein, 1049 aa, synthetic construct
  REGION 1..1049: note = variant of P450 oxidase from Bacillus megaterium
MTIKEMPQPKTFGELKNLPLLNTDKPVQALMRIADELGEIFKFEAPGSVTRYLSSQRLIKEACDESRFDKNLSQALKFARDFVGDGLATSWTHEPNWKKAHNILVPSFSQHAMGRYHAMMVDIAVQLVQKWERLNADEHIEVSEDMTRLTLDTIGLCGFNYRFNSFYRDQPHPFIVSMVRALDEVMNKLQRANPDDPAYDENKRQCQEDIKVMNDYVDKIIADRKARGEQSHDLLTQMLNGKDPETGEPLDDGNIRQQIITFLIAGHQTTSGLLSFALYFLVKNPHVLQKVAEEAARVLVDPVPSYKQVKQLKYVGMVLNEALRLWPVAPTFSLYAKEDTVLGGEYPLTKGDEVMVLTPQLHRDKTIWGDDVEEFRPERFENPSAIPQHAYKPFGNGQRACIGQQFALHEATLVLGMMLKHFDFEDHTNYELVIKESRTLKPEGFVVKAKSKGIPLGGIPSPSTEQSAKKVRKKAENAHNTPLLVLYGSNAGTAEGTARDLADIAMSKGFAPQVATLDSHAGNLPREGAVLIVTASYNGHPPDNAKQFVDWLDQASADEVKGVRYSVFGCGDKNWAGTYQKVPAFIDETLAAKGAENIADRGEADASDDFEGTYEEWRDHMWSDVAAYFNLDIENSEDNKSTLSLQFVDSAADMPLAKMHGAFSTNVVASKELQQPGSARSTRHLEIELPKEASYQEGDHLGVIPRNYEGIVNRVTARFGLSASQQIRLEAEEEKLAHLPLAKTVSVEELLQYVELQDPVTRTQLRAMAAKTVCPPHKVELEALLEKQAYKEQVLAKRLTMLELLEKYPACEMKFSEFIALLPSIRPRYYSISSSPRVDEKQASITVSVVSGPAWSGYGEYKGIASNYLAELQEGDTITCFISTPQSEFTLPKDPETPLIMVGPGTGVAPFRGFVQARKQLKEQGQSLGEAHLYFGCRSPHEDYLYQEELENAQSEGIITLHTAFSRMPNQPKTYVQHVMEQDGKKLIELLDQGAHFYICGDGSQMAPAVEATLMKSYADVHQVSEADARLWLQQLEEKGRYAKDVWAG

SEQ ID NO: 303 - DNA, 3147 bp, synthetic construct
  misc_feature 1..3147: note = variant of P450 oxidase from Bacillus megaterium
  source 1..3147: mol_type = other DNA
atgacaattaaggaaatgcctcagcctaagacgtttggagaacttaaaaatttaccgttattaaacacagataaaccggttcaagctttgatgcgtattgcggatgaattaggagaaatctttaaattcgaggcgcctggtagcgtaacgcgctatttatcaagtcagcgtctaattaaagaagcatgcgatgaatcacgctttgataaaaacttaagtcaagcgcttaaatttgcacgtgattttgttggagacgggttagccacaagctggacgcatgaaccgaattggaaaaaagcgcataatatcttagttccaagctttagtcagcatgcaatggggcgttatcatgcgatgatggtcgatatcgccgtgcagcttgttcaaaagtgggagcgtctaaatgcagatgagcatattgaagtatcggaagacatgacacgtttaacgcttgatacaattggtctttgcggctttaactatcgctttaacagcttttaccgagatcagcctcatccatttattgtgagtatggtccgtgcactggatgaagtaatgaacaagctgcagcgagcaaatccagacgacccagcttatgatgaaaacaagcgccagtgtcaagaagatatcaaggtgatgaacgactatgtagataaaattattgcagatcgcaaagcaaggggtgaacaaagtcatgatttattaacgcagatgctaaacggaaaagatccagaaacgggtgagccgcttgatgacgggaacattcgtcagcaaattattacattcttaattgcgggacaccaaacaacaagtggtcttttatcatttgcgctgtatttcttagtgaaaaatccacatgtattacaaaaagtagcagaagaagcagcacgagttctagtagatcctgttccaagctacaaacaagtcaaacagcttaaatatgtcggcatggtcttaaacgaagcgctgcgcttatggccagtagcgcctatgttttccctatatgcaaaagaagatacggtgcttggaggagaatatcctttaacgaaaggcgacgaagtaatggttctggttcctcagcttcaccgtgataaaacaatttggggagacgatgtggaggagttccgtccagagcgttttgaaaatccaagtgcgattccgcagcatgcgttcaaaccgtttggaaacggtcagcgtgcgtgtatcggtcagcagttcgctcttcatgaagcaacgctggtacttggtatgatgctaaaacactttgactttgaagatcatacaaactacgagctcgttattaaagaaactcggacgttaaaacctgaaggctttgtggtaaaagcaaaatcgaaaggcattccgcttggcggtattccttcacctagcactgaacagtctgctaaaaaagtacgcaaaaaggcagaaaacgctcataatacgccgctgcttgtgctatacggttcaaatgcgggaacagctgaaggaacggcgcgtgatttagcagatattgcaatgagcaaaggatttgcaccgcaggtcgcaacgcttgattcacacgccggaaatcttccgcgcgaaggagctgtattaattgtaacggcgtcttataacggtcatccgcctgataacgcaaagcaatttgtcgactggttagaccaagcgtctgctgatgaagtaaaaggcgttcgctactccgtatttggatgcggcgataaaaattgggcggggacgtatcaaaaagtgcctgcttttatcgatgaaacgcttgccgctaaaggggcagaaaacatcgctgaccgcggtgaagcagatgcaagcgacgactttgaaggcacatatgaagaatggcgtgatcatatgtggagtgacgtagcagcctactttaacctcgacattgaaaacagtgaagataataaatctactctttcacttcaatttgtcgacagcgccgcggatatgccgcttgcgaaaatgcacggtgcgttttcaacgaacgtcgtagcaagcaaagaacttcaacagccaggcagtgcacgaagcacgcgacatcttgaaattgaacttccaaaagaagcttcttatcaagaaggagatcatttaggtgttattcctcgcaactatgaaggaatagtaaaccgtgtaacagcaaggttcggcctaagcgcatcacagctgatccgtctggaagcagaagaagaaaaattagctcatttgccactcgctaaaacagtatccgtagaagagcttctgcaatacgtggagcttcaagatcctgttacgcgcacgcagcttcgcgcaatggctgctaaaacggtctgcccgccgcataaagtagagcttgaagccttgcttgaaaagcaagcctacaaagaacaagtgctggcaaaacgtttaacaatgcttgaactgcttgaaaaatacccggcgtgtgaaatgaaattcagcgaatttatcgcccttctgccaagcatacgcccgcgctattactcgatttcttcatcacctcgtgtcgatgaaaaacaagcaagcatcacggtcagcgttgtctcaggaccggcgtggagcggatatggagaatataaaggaattgcgtcgaactatcttgccgagctgcaagaaggagatacgattacgtgctttatttccacaccgcagtcagaatttacgctgccaaaagaccctgaaacgccgcttatcatggtcggaccgggaacaggcgtcgcgccgtttagaggctttgtgcaggcgcgcaaacagctaaaagaacaaggacagtcacttggagaagcacatttatacttcggctgccgttcacctcatgaagactatctgtatcaagaagagcttgaaaacgcccaaagcgaaggcatcattacgcttcataccgctttttctcgcatgccaaatcagccgaaaacatacgttcagcacgtaatggaacaagacggcaagaaattgattgaacttcttgatcaaggagcgcacttctatatttgcggagacggaagccaaatggcacctgccgttgaagcaacgcttatgaaaagctatgctgacgttcaccaagtgagtgaagcagacgctcgcttatggctgcagcagctagaagaaaaaggccgatacgcaaaagacgtgtgggctggg

SEQ ID NO: 304 - protein, 1049 aa, synthetic construct
  REGION 1..1049: note = variant of P450 oxidase from Bacillus megaterium
MTIKEMPQPKTFGELKNLPLLNTDKPVQALMRIADELGEIFKFEAPGSVTRYLSSQRLIKEACDESRFDKNLSQALKFARDFVGDGLATSWTHEPNWKKAHNILVPSFSQHAMGRYHAMMVDIAVQLVQKWERLNADEHIEVSEDMTRLTLDTIGLCGFNYRFNSFYRDQPHPFIVSMVRALDEVMNKLQRANPDDPAYDENKRQCQEDIKVMNDYVDKIIADRKARGEQSHDLLTQMLNGKDPETGEPLDDGNIRQQIITFLIAGHQTTSGLLSFALYFLVKNPHVLQKVAEEAARVLVDPVPSYKQVKQLKYVGMVLNEALRLWPVAPMFSLYAKEDTVLGGEYPLTKGDEVMVLVPQLHRDKTIWGDDVEEFRPERFENPSAIPQHAFKPFGNGQRACIGQQFALHEATLVLGMMLKHFDFEDHTNYELVIKETRTLKPEGFVVKAKSKGIPLGGIPSPSTEQSAKKVRKKAENAHNTPLLVLYGSNAGTAEGTARDLADIAMSKGFAPQVATLDSHAGNLPREGAVLIVTASYNGHPPDNAKQFVDWLDQASADEVKGVRYSVFGCGDKNWAGTYQKVPAFIDETLAAKGAENIADRGEADASDDFEGTYEEWRDHMWSDVAAYFNLDIENSEDNKSTLSLQFVDSAADMPLAKMHGAFSTNVVASKELQQPGSARSTRHLEIELPKEASYQEGDHLGVIPRNYEGIVNRVTARFGLSASQLIRLEAEEEKLAHLPLAKTVSVEELLQYVELQDPVTRTQLRAMAAKTVCPPHKVELEALLEKQAYKEQVLAKRLTMLELLEKYPACEMKFSEFIALLPSIRPRYYSISSSPRVDEKQASITVSVVSGPAWSGYGEYKGIASNYLAELQEGDTITCFISTPQSEFTLPKDPETPLIMVGPGTGVAPFRGFVQARKQLKEQGQSLGEAHLYFGCRSPHEDYLYQEELENAQSEGIITLHTAFSRMPNQPKTYVQHVMEQDGKKLIELLDQGAHFYICGDGSQMAPAVEATLMKSYADVHQVSEADARLWLQQLEEKGRYAKDVWAG

SEQ ID NO: 305 - DNA, 3147 bp, synthetic construct
  misc_feature 1..3147: note = variant of P450 oxidase from Bacillus megaterium
  source 1..3147: mol_type = other DNA
atgacaattaaggaaatgcctcagcctaagacgtttggagaacttaaaaatttaccgttattaaacacagataaaccggttcaagctttgatgcgtattgcggatgaattaggagaaatctttaaattcgaggcgcctggtagcgtaacgcgctatttatcaagtcagcgtctaattaaagaagcatgcgatgaatcacgctttgataaaaacttaagtcaagcgcttaaatttgcccgtgattttgttggagacgggttagccacaagctggacgcatgaaccgaattggaaaaaagcgcataatatcttagttccaagctttagtcagcatgcaatggggcgttatcatgcgatgatggtcgatatcgccgtgcagcttgttcaaaagtgggagcgtctaaatgcagatgagcatattgaagtatcggaagacatgacacgtttaacgcttgatacaattggtctttgcggctttaactatcgctttaacagcttttaccgagatcagcctcatccatttattgtgagtatggtccgtgcactggatgaagtaatgaacaagctgcagcgagcaaatccagacgacccagcttatgatgaaaacaagcgccagtgtcaagaagatatcaaggtgatgaacgactatgtagataaaattattgcagatcgcaaagcaaggggtgaacaaagtcatgatttattaacgcagatgctaaacggaaaagatccagaaacgggtgagccgcttgatgacgggaacattcgtcagcaaattattacattcttaattgcgggacaccaaacaacaagtggtcttttatcatttgcgctgtatttcttagtgaaaaatccacatgtattacaaaaagtagcagaagaagcagcacgagttctagtagatcctgttccaagctacaaacaagtcaaacagcttaaatatgtcggcatggtcttaaacgaagcgctgcgcttatggccagtagcgcctatgttttccctatatgcaaaagaagatacggtgcttggaggagaatatcctttaacgaaaggcgacgaagtaatggttctggttcctcagcttcaccgtgataaaacaatttggggagacgatgtggaggagttccgtccagagcgttttgaaaatccaagtgcgattccgcagcatgcgtttaaaccgtttggaaacggtcagcgtgcgtgtatcggtcagcagttcgctcttcatgaagcaacgctggtacttggtatgatgctaaaacactttgactttgaagatcatacaaactacgagctcgttattaaagaaactcggacgttaaaacctgaaggctttgtggtaaaagcaaaatcgaaaggcattccgcttggcggtattccttcacctagcactgaacagtctgctaaaaaagtacgcaaaaaggcagaaaacgctcataatacgccgctgcttgtgctatacggttcaaatgcgggaacggctgaaggagctgcgcgtgatttagcagatattgcaatgagcaaaggatttgcaccgcaggtcgcaacgcttgattcacacgccggaaatcttccgcgcgaaggagctgtattaattgtaacggcgtcttataacggtcatccgcctgataacgcaaagcaatttgtcgactggttagaccaagcgtctgctgatgaagtaaaaggcgttcgctactccgtatttggatgcggcgatagcaattgggcggggacgtatcaaaaagtgcctgcttttatcgatgaaacgcttgccgctaaaggggcagaaaacatcgctgaccgcggtgaagcagatgcaagcgacgactttgaaggcacatatgaagaatggcgtgatcatatgtggagtgacgtagcagcctactttaacctcgacattgaaaacagtgaagataataaatctactctttcacttcaatttgtcgacagcgccgcggatatgccgcttgcgaaaatgcacggtgcgttttcaacgaacgtcgtagcaagcaaagaacttcaacagccaggcagtgcacgaagcacgcgacatcttgaaattgaacttccaaaagaagcttcttatcaagaaggagatcatttaggtgttattcctcgcaactatgaaggaatagtaaaccgtgtaacagcaaggttcggcctaagcgcatcacagcaaatccgtctggaagcagaagaagaaaaattagctcatttgccactcgctaaaacagtatccgtagaagagcttctgcaatacgtggagcttcaagatcctgttacgcgcacgcagcttcgcgcaatggctgctaaaacggtctgcccgccgcataaagtagagcttgaagccttgcttgaaaagcaagcctacaaagaacaagtgctggcaaaacgtttaacaatgcttgaactgcttgaaaaatacccggcgtgtgaaatgaaattcagcgaatttatcgcccttctgccaagcatacgcccgcgctattactcgatttcttcatcacctcgtgtcgatgaaaaacaagcaagcatcacggtcagcgttgtctcaggaccggcgtggagcggatatggagaatataaaggaattgcgtcgaactatcttgccgagctgcaagaaggagatacgattacgtgctttatttccacaccgcagtcagaatttacgctgccaaaagaccctgaaacgccgcttatcatggtcggaccgggaacaggcgtcgcgccgtttagaggctttgtgcaggcgcgcaaacagctaaaagaacaaggacagtcacttggagaagcacatttatacttcggctgccgttcacctcatgaagactatctgtatcaagaagagcttgaaaacgcccaaagcgaaggcatcattacgcttcataccgctttttctcgcatgccaaatcagccgaaaacatacgttcagcacgtaatggaacaagacggcaagaaattgattgaacttcttgatcaaggagcgcacttctatatttgcggagacggaagccaaatggcacctgccgttgaagcaacgcttatgaaaagctatgctgacgttcaccaagtgagtgaagcagacgctcgcttatggctgcagcagctagaagaaaaaggccgatacgcaaaagacgtgtgggctggg

SEQ ID NO: 306 - protein, 1049 aa, synthetic construct
  REGION 1..1049: note = variant of P450 oxidase from Bacillus megaterium
MTIKEMPQPKTFGELKNLPLLNTDKPVQALMRIADELGEIFKFEAPGSVTRYLSSQRLIKEACDESRFDKNLSQALKFARDFVGDGLATSWTHEPNWKKAHNILVPSFSQHAMGRYHAMMVDIAVQLVQKWERLNADEHIEVSEDMTRLTLDTIGLCGFNYRFNSFYRDQPHPFIVSMVRALDEVMNKLQRANPDDPAYDENKRQCQEDIKVMNDYVDKIIADRKARGEQSHDLLTQMLNGKDPETGEPLDDGNIRQQIITFLIAGHQTTSGLLSFALYFLVKNPHVLQKVAEEAARVLVDPVPSYKQVKQLKYVGMVLNEALRLWPVAPMFSLYAKEDTVLGGEYPLTKGDEVMVLVPQLHRDKTIWGDDVEEFRPERFENPSAIPQHAFKPFGNGQRACIGQQFALHEATLVLGMMLKHFDFEDHTNYELVIKETRTLKPEGFVVKAKSKGIPLGGIPSPSTEQSAKKVRKKAENAHNTPLLVLYGSNAGTAEGAARDLADIAMSKGFAPQVATLDSHAGNLPREGAVLIVTASYNGHPPDNAKQFVDWLDQASADEVKGVRYSVFGCGDSNWAGTYQKVPAFIDETLAAKGAENIADRGEADASDDFEGTYEEWRDHMWSDVAAYFNLDIENSEDNKSTLSLQFVDSAADMPLAKMHGAFSTNVVASKELQQPGSARSTRHLEIELPKEASYQEGDHLGVIPRNYEGIVNRVTARFGLSASQQIRLEAEEEKLAHLPLAKTVSVEELLQYVELQDPVTRTQLRAMAAKTVCPPHKVELEALLEKQAYKEQVLAKRLTMLELLEKYPACEMKFSEFIALLPSIRPRYYSISSSPRVDEKQASITVSVVSGPAWSGYGEYKGIASNYLAELQEGDTITCFISTPQSEFTLPKDPETPLIMVGPGTGVAPFRGFVQARKQLKEQGQSLGEAHLYFGCRSPHEDYLYQEELENAQSEGIITLHTAFSRMPNQPKTYVQHVMEQDGKKLIELLDQGAHFYICGDGSQMAPAVEATLMKSYADVHQVSEADARLWLQQLEEKGRYAKDVWAG

SEQ ID NO: 307 - DNA, 3147 bp, synthetic construct
  misc_feature 1..3147: note = variant of P450 oxidase from Bacillus megaterium
  source 1..3147: mol_type = other DNA
atgacaattaaggaaatgcctcagcctaagacgtttggagaacttaaaaatttaccgttattaaacacagataaaccggttcaagctttgatgcgtattgcggatgaattaggagaaatctttaaattcgaggcgcctggtagcgtaacgcgctatttatcaagtcagcgtctaattaaagaagcatgcgatgaatcacgctttgataaaaacttaagtcaagcgcttaaatttgcccgtgattttgttggagacgggttagccacaagctggacgcatgaaccgaattggaaaaaagcgcataatatcttagttccaagctttagtcagcatgcaatggggcgttatcatgcgatgatggtcgatatcgccgtgcagcttgttcaaaagtgggagcgtctaaatgcagatgagcatattgaagtatcggaagacatgacacgtttaacgcttgatacaattggtctttgcggctttaactatcgctttaacagcttttaccgagatcagcctcatccatttattgtgagtatgcgccgtgcactggatgaagtaatgaacaagctgcagcgagcaaatccagacgacccagcttatgatgaaaacaagcgccagtgtcaagaagatatcaaggtgatgaacgactatgtagataaaattattgcagatcgcaaagcaaggggtgaacaaagtcatgatttattaacgcagatgctaaacggaaaagatccagaaacgggtgagccgcttgatgacgggaacattcgtcagcaaattattacattcttaattgcgggacaccaaacaacaagtggtcttttatcatttgcgctgtatttcttagtgaaaaatccacatgtattacaaaaagtagcagaagaagcagcacgagttctagtagatcctgttccaagctacaaacaagtcaaacagcttaaatatgtcggcatggtcttaaacgaagcgctgcgcttatggccagtagcgcctatgttttccctatatgcaaaagaagatacggtgcttggaggagaatatcctttaacgaaaggcgacgaagtaatggttctggtgcctcagcttcaccgtgataaaacaatttggggagacgatgtggaggagttccgtccagagcgttttgaaaatccaagtgcgattccgcagcatgcgtttaaaccgtttggaaacggtcagcgtgcgtgtatcggtcagcagttcgctcttcatgaagcaacgctggtacttggtatgatgctaaaacactttgactttgaagatcatacaaactacgagctcgttattaaagaaacgcggacgttaaaacctgaaggctttgtggtaaaagcaaaatcgaaaggcattccgcttggcggtattccttcacctagcactgaacagtctgctaaaaaagtacgcaaaaaggcagaaaacgctcataatacgccgctgcttgtgctatacggttcaaatgcgggaacagctgaaggaacggcgcgtgatttagcagatattgcaatgagcaaaggatttgcaccgcaggtcgcaacgcttgattcacacgccggaaatcttccgcgcgaaggagctgtattaattgtaacggcgtcttataacggtcatccgcctgataacgcaaagcaatttgtcgactggttagaccaagcgtctgctgatgaagtaaaaggcgttcgctactccgtatttggatgcggcgataaaaattgggctgggacgtatcaaaaagtgcctgcttttatcgatgaaacgcttgccgctaaaggggcagaaaacatcgctgaccgcggtgaagcagatgcaagcgacgactttgaaggcacatatgaagaatggcgtgatcatatgtggagtgacgtagcagcctactttaacctcgacattgaaaacagtgaagataataaatctactctttcacttcaatttgtcgacagcgccgcggatatgccgcttgcgaaaatgcacggtgcgttttcaacgaacgtcgtagcaagcaaagaacttcaacagccaggcagtgcacgaagcacgcgacatcttgaaattgaacttccaaaagaagcttcttatcaagaaggagatcatttaggtgttattcctcgcaactatgaaggaatagtaaaccgtgtaacagcaaggttcggcctaagcgcatcacagctgatccgtctggaagcagaagaagaaaaattagctcatttgccactcgctaaaacagtatccgtagaagagcttctgcaatacgtggagcttcaagatcctgttacgcgcacgcagcttcgcgcaatggctgctaaaacggtctgcccgccgcataaagtagagcttgaagccttgcttgaaaagcaagcctacaaagaacaagtgctggcaaaacgtttaacaatgcttgaactgcttgaaaaatacccggcgtgtgaaatgaaattcagcgaatttatcgcccttctgccaagcatacgcccgcgctattactcgatttcttcatcacctcgtgtcgatgaaaaacaagcaagcatcacggtcagcgttgtctcaggaccggcgtggagcggatatggagaatataaaggaattgcgtcgaactatcttgccgagctgcaagaaggagatacgattacgtgctttatttccacaccgcagtcagaatttacgctgccaaaagaccctgaaacgccgcttatcatggtcggaccgggaacaggcgtcgcgccgtttagaggctttgtgcaggcgcgcaaacagctaaaagaacaaggacagtcacttggagaagcacatttatacttcggctgccgttcacctcatgaagactatctgtatcaagaagagcttgaaaacgcccaaagcgaaggcatcattacgcttcataccgctttttctcgcatgccaaatcagccgaaaacatacgttcagcacgtaatggaacaagacggcaagaaattgattgaacttcttgatcaaggagcgcacttctatatttgcggagacggaagccaaatggcacctgccgttgaagcaacgcttatgaaaagctatgctgacgttcaccaagtgagtgaagcagacgctcgcttatggctgcagcagctagaagaaaaaggccgatacgcaaaagacgtgtgggctggg

SEQ ID NO: 308 - protein, 1049 aa, synthetic construct
  REGION 1..1049: note = variant of P450 oxidase from Bacillus megaterium
MTIKEMPQPKTFGELKNLPLLNTDKPVQALMRIADELGEIFKFEAPGSVTRYLSSQRLIKEACDESRFDKNLSQALKFARDFVGDGLATSWTHEPNWKKAHNILVPSFSQHAMGRYHAMMVDIAVQLVQKWERLNADEHIEVSEDMTRLTLDTIGLCGFNYRFNSFYRDQPHPFIVSMRRALDEVMNKLQRANPDDPAYDENKRQCQEDIKVMNDYVDKIIADRKARGEQSHDLLTQMLNGKDPETGEPLDDGNIRQQIITFLIAGHQTTSGLLSFALYFLVKNPHVLQKVAEEAARVLVDPVPSYKQVKQLKYVGMVLNEALRLWPVAPMFSLYAKEDTVLGGEYPLTKGDEVMVLVPQLHRDKTIWGDDVEEFRPERFENPSAIPQHAFKPFGNGQRACIGQQFALHEATLVLGMMLKHFDFEDHTNYELVIKETRTLKPEGFVVKAKSKGIPLGGIPSPSTEQSAKKVRKKAENAHNTPLLVLYGSNAGTAEGTARDLADIAMSKGFAPQVATLDSHAGNLPREGAVLIVTASYNGHPPDNAKQFVDWLDQASADEVKGVRYSVFGCGDKNWAGTYQKVPAFIDETLAAKGAENIADRGEADASDDFEGTYEEWRDHMWSDVAAYFNLDIENSEDNKSTLSLQFVDSAADMPLAKMHGAFSTNVVASKELQQPGSARSTRHLEIELPKEASYQEGDHLGVIPRNYEGIVNRVTARFGLSASQLIRLEAEEEKLAHLPLAKTVSVEELLQYVELQDPVTRTQLRAMAAKTVCPPHKVELEALLEKQAYKEQVLAKRLTMLELLEKYPACEMKFSEFIALLPSIRPRYYSISSSPRVDEKQASITVSVVSGPAWSGYGEYKGIASNYLAELQEGDTITCFISTPQSEFTLPKDPETPLIMVGPGTGVAPFRGFVQARKQLKEQGQSLGEAHLYFGCRSPHEDYLYQEELENAQSEGIITLHTAFSRMPNQPKTYVQHVMEQDGKKLIELLDQGAHFYICGDGSQMAPAVEATLMKSYADVHQVSEADARLWLQQLEEKGRYAKDVWAG

SEQ ID NO: 309 - DNA, 3147 bp, synthetic construct
  misc_feature 1..3147: note = variant of P450 oxidase from Bacillus megaterium
  source 1..3147: mol_type = other DNA
atgacaattaaggaaatgcctcagcctaagacgtttggagaacttaaaaatttaccgttattaaacacagataaaccggttcaagctttgatgcgtattgcggatgaattaggagaaatctttaaattcgaggcgcctggtagcgtaacgcgctatttatcaagtcagcgtctaattaaagaagcatgcgatgaatcacgctttgataaaaacttaagtcaagcgcttaaatttgcacgtgattttgttggagacgggttagccacaagctggacgcatgaaccgaattggaaaaaagcgcataatatcttagttccaagctttagtcagcatgcaatggggcgttatcatgcgatgatggtcgatatcgccgtgcagcttgttcaaaagtgggagcgtctaaatgcagatgagcatattgaagtatcggaagacatgacacgtttaacgcttgatacaattggtctttgcggctttaactatcgctttaacagcttttaccgagatcagcctcatccatttattgtgagtatgcgccgtgcactggatgaagtaatgaacaagctgcagcgagcaaatccagacgacccagcttatgatgaaaacaagcgccagtgtcaagaagatatcaaggtgatgaacgactatgtagataaaattattgcagatcgcaaagcaaggggtgaacaaagtcatgatttattaacgcagatgctaaacggaaaagatccagaaacgggtgagccgcttgatgacgggaacattcgtcagcaaattattacattcttaattgcgggacaccaaacaacaagtggtcttttatcatttgcgctgtatttcttagtgaaaaatccacatgtattacaaaaagtagcagaagaagcagcacgagttctagtagatcctgttccaagctacaaacaagtcaaacagcttaaatatgttggcatggtcttaaacgaagcgctgcgcttatggccagtagcgcctatgttttccctatatgcaaaagaagatacggtgcttggaggagaatatcctttaacgaaaggcgacgaagtaatggttctgactcctcagcttcaccgtgataaaacaatttggggagacgatgtggaggagttccgtccagagcgttttgaaaatccaagtgcgattccgcagcatgcgtttaaaccgtttggaaacggtcagcgtgcgtgtatcggtcagcagttcgctcttcatgaagcaacgctggtacttggtatgatgctaaaacactttgactttgaagatcatacaaactacgagctcgttattaaagaaactcggacgttaaaacctgaaggctttgtggtaaaagcaaaatcgaaaggcattccgcttggcggtattccttcacctagcactgaacagtctgctaaaaaagtacgcaaaaaggcagaaaacgctcataatacgccgctgcttgtgctatacggttcaaatgcgggaacagctgaaggaacggcgcgtgatttagcagatattgcaatgagcaaaggatttgcaccgcaggtcgcaacgcttgattcacacgccggaaatcttccgcgcgaaggagctgtattaattgtaacggcgtcttataacggtcatccgcctgataacgcaaagcaatttgtcgactggttagaccaagcgtctgctgatgaagtaaaaggcgttcgctactccgtatttggatgcggcgataaaaattgggcggggacgtatcaaaaagtgcctgcttttatcgatgaaacgcttgccgctaaaggggcagaaaacatcgctgaccgcggtgaagcagatgcaagcgacgactttgaaggcacatatgaagaatggcgtgatcatatgtggagtgacgtagcagcctactttaacctcgacattgaaaacagtgaagataataaatctactctttcacttcaatttgtcgacagcgccgcggatatgccgcttgcgaaaatgcacggtgcgttttcaacgaacgtcgtagcaagcaaagaacttcaacagccaggcagtgcacgaagcacgcgacatcttgaaattgaacttccaaaagaagcttcttatcaagaaggagatcatttaggtgttattcctcgcaactatgaaggaatagtaaaccgtgtaacagcaaggttcggcctaagcgcatcacagcaaatccgtctggaagcagaagaagaaaaattagctcatttgccactcgctaaaacagtatccgtagaagagcttctgcaatacgtggagcttcaagatcctgttacgcgcacgcagcttcgcgcaatggctgctaaaacggtctgcccgccgcataaagtagagcttgaagccttgcttgaaaagcaagcctacaaagaacaagtgctggcaaaacgtttaacaatgcttgaactgcttgaaaaatacccggcgtgtgaaatgaaattcagcgaatttatcgcccttctgccaagcatacgcccgcgctattactcgatttcttcatcacctcgtgtcgatgaaaaacaagcaagcatcacggtcagcgttgtctcaggaccggcgtggagcggatatggagaatataaaggaattgcgtcgaactatcttgccgagctgcaagaaggagatacgattacgtgctttatttccacaccgcagtcagaatttacgctgccaaaagaccctgaaacgccgcttatcatggtcggaccgggaacaggcgtcgcgccgtttagaggctttgtgcaggcgcgcaaacagctaaaagaacaaggacagtcacttggagaagcacatttatacttcggctgccgttcacctcatgaagactatctgtatcaagaagagcttgaaaacgcccaaagcgaaggcatcattacgcttcataccgctttttctcgcatgccaaatcagccgaaaacatacgttcagcacgtaatggaacaagacggcaagaaattgattgaacttcttgatcaaggagcgcacttctatatttgcggagacggaagccaaatggcacctgccgttgaagcaacgcttatgaaaagctatgctgacgttcaccaagtgagtgaagcagacgctcgcttatggctgcagcagctagaagaaaaaggccgatacgcaaaagacgtgtgggctggg

SEQ ID NO: 310 - protein, 1049 aa, synthetic construct
  REGION 1..1049: note = variant of P450 oxidase from Bacillus megaterium
MTIKEMPQPKTFGELKNLPLLNTDKPVQALMRIADELGEIFKFEAPGSVTRYLSSQRLIKEACDESRFDKNLSQALKFARDFVGDGLATSWTHEPNWKKAHNILVPSFSQHAMGRYHAMMVDIAVQLVQKWERLNADEHIEVSEDMTRLTLDTIGLCGFNYRFNSFYRDQPHPFIVSMRRALDEVMNKLQRANPDDPAYDENKRQCQEDIKVMNDYVDKIIADRKARGEQSHDLLTQMLNGKDPETGEPLDDGNIRQQIITFLIAGHQTTSGLLSFALYFLVKNPHVLQKVAEEAARVLVDPVPSYKQVKQLKYVGMVLNEALRLWPVAPMFSLYAKEDTVLGGEYPLTKGDEVMVLTPQLHRDKTIWGDDVEEFRPERFENPSAIPQHAFKPFGNGQRACIGQQFALHEATLVLGMMLKHFDFEDHTNYELVIKETRTLKPEGFVVKAKSKGIPLGGIPSPSTEQSAKKVRKKAENAHNTPLLVLYGSNAGTAEGTARDLADIAMSKGFAPQVATLDSHAGNLPREGAVLIVTASYNGHPPDNAKQFVDWLDQASADEVKGVRYSVFGCGDKNWAGTYQKVPAFIDETLAAKGAENIADRGEADASDDFEGTYEEWRDHMWSDVAAYFNLDIENSEDNKSTLSLQFVDSAADMPLAKMHGAFSTNVVASKELQQPGSARSTRHLEIELPKEASYQEGDHLGVIPRNYEGIVNRVTARFGLSASQQIRLEAEEEKLAHLPLAKTVSVEELLQYVELQDPVTRTQLRAMAAKTVCPPHKVELEALLEKQAYKEQVLAKRLTMLELLEKYPACEMKFSEFIALLPSIRPRYYSISSSPRVDEKQASITVSVVSGPAWSGYGEYKGIASNYLAELQEGDTITCFISTPQSEFTLPKDPETPLIMVGPGTGVAPFRGFVQARKQLKEQGQSLGEAHLYFGCRSPHEDYLYQEELENAQSEGIITLHTAFSRMPNQPKTYVQHVMEQDGKKLIELLDQGAHFYICGDGSQMAPAVEATLMKSYADVHQVSEADARLWLQQLEEKGRYAKDVWAG

SEQ ID NO: 311 - DNA, 3147 bp, synthetic construct
  misc_feature 1..3147: note = variant of P450 oxidase from Bacillus megaterium
  source 1..3147: mol_type = other DNA
atgacaattaaggaaatgcctcagcctaagacgtttggagaacttaaaaatttaccgttattaaacacagataaaccggttcaagctttgatgcgtattgcggatgaattaggagaaatctttaaattcgaggcgcctggtagcgtaacgcgctatttatcaagtcagcgtctaattaaagaagcatgcgatgaatcacgctttgataaaaacttaagtcaatcgcttaaatttgcccgtgattttgttggagacgggttagccacaagctggacgcatgaaccgaattggaaaaaagcgcataatatcttagttccaagctttagtcagcatgcaatggggcgttatcatgcgatgatggtcgatatcgccgtgcagcttgttcaaaagtgggagcgtctaaatgcagatgagcatattgaagtatcggaagacatgacacgtttaacgcttgatacaattggtctttgcggctttaactatcgctttaacagcttttaccgagatcagcctcatccatttattgtgagtatggttcgtgcactggatgaagtaatgaacaagctgcagcgagcaaatccagacgacccagcttatgatgaaaacaagcgccagtgtcaagaagatatcaaggtgatgaacgactatgtagataaaattattgcagatcgcaaagcaaggggtgaacaaagtcatgatttattaacgcagatgctaaacggaaaagatccagaaacgggtgagccgcttgatgacgggaacattcgtcagcaaattattacattcttaattgcgggacaccaaacaacaagtggtcttttatcatttgcgctgtatttcttagtgaaaaatccacatgtattacaaaaagtagcagaagaagcagcacgagttctagtagatcctgttccaagctacaaacaagtcaaacagcttaaatatgtcggcatggtcttaaacgaagcgctgcgcttatggccagtagcgcctacgttttccctatatgcaaaagaagatacggtgcttggaggagaatatcctttaacgaaaggcgacgaagtaatggttctggtgcctcagcttcaccgtgataaaacaatttggggagacgatgtggaggagttccgtccagagcgttttgaaaatccaagtgcgattccgcagcatgcgtttaaaccgtttggaaacggtcagcgtgcgtgtatcggtcagcagttcgctcttcatgaagcaacgctggtacttggtatgatgctaaaacactttgactttgaagatcatacaaactacgagctcgttattaaagaaacgcggacgttaaaacctgaaggctttgtggtaaaagcaaaatcgaaaggcattccgcttggcggtattccttcacctagcactgaacagtctgctaaaaaagtacgcaaaaaggcagaaaacgctcataatacgccgctgcttgtgctatacggttcaaatgcgggaacagctgaaggaacggcgcgtgatttagcagatattgcaatgagcaaaggatttgcaccgcaggtcgcaacgcttgattcacacgccggaaatcttccgcgcgaaggagctgtattaattgtaacggcgtcttataacggtcatccgcctgataacgcaaagcaatttgtcgactggttagaccaagcgtctgctgatgaagtaaaaggcgttcgctactccgtatttggatgcggcgataaaaattgggtggggacgtatcaaaaagtgcctgcttttatcgatgaaacgcttgccgctaaaggggcagaaaacatcgctgaccgcggtgaagcagatgcaagcgacgactttgaaggcacatatgaagaatggcgtgatcatatgtggagtgacgtagcagcctactttaacctcgacattgaaaacagtgaagataataaatctactctttcacttcaatttgtcgacagcgccgcggatatgccgcttgcgaaaatgcacggtgcgttttcaacgaacgtcgtagcaagcaaagaacttcaacagccaggcagtgcacgaagcacgcgacatcttgaaattgaacttccaaaagaagcttcttatcaagaaggagatcatttaggtgttattcctcgcaactatgaaggaatagtaaaccgtgtaacagcaaggttcggcctaagcgcatcacagctgatccgtctggaagcagaagaagaaaaattagctcatttgccactcgctaaaacagtatccgtagaagagcttctgcaatacgtggagcttcaagatcctgttacgcgcacgcagcttcgcgcaatggctgctaaaacggtctgcccgccgcataaagtagagcttgaagccttgcttgaaaagcaagcctacaaagaacaagtgctggcaaaacgtttaacaatgcttgaactgcttgaaaaatacccggcgtgtgaaatgaaattcagcgaatttatcgcccttctgccaagcatacgcccgcgctattactcgatttcttcatcacctcgtgtcgatgaaaaacaagcaagcatcacggtcagcgttgtctcaggaccggcgtggagcggatatggagaatataaaggaattgcgtcgaactatcttgccgagctgcaagaaggagatacgattacgtgctttatttccacaccgcagtcagaatttacgctgccaaaagaccctgaaacgccgcttatcatggtcggaccgggaacaggcgtcgcgccgtttagaggctttgtgcaggcgcgcaaacagctaaaagaacaaggacagtcacttggagaagcacatttatacttcggctgccgttcacctcatgaagactatctgtatcaagaagagcttgaaaacgcccaaagcgaaggcatcattacgcttcataccgctttttctcgcatgccaaatcagccgaaaacatacgttcagcacgtaatggaacaagacggcaagaaattgattgaacttcttgatcaaggagcgcacttctatatttgcggagacggaagccaaatggcacctgccgttgaagcaacgcttatgaaaagctatgctgacgttcaccaagtgagtgaagcagacgctcgcttatggctgcagcagctagaagaaaaaggccgatacgcaaaagacgtgtgggctggg

SEQ ID NO: 312 - protein, 1049 aa, synthetic construct
  REGION 1..1049: note = variant of P450 oxidase from Bacillus megaterium
MTIKEMPQPKTFGELKNLPLLNTDKPVQALMRIADELGEIFKFEAPGSVTRYLSSQRLIKEACDESRFDKNLSQSLKFARDFVGDGLATSWTHEPNWKKAHNILVPSFSQHAMGRYHAMMVDIAVQLVQKWERLNADEHIEVSEDMTRLTLDTIGLCGFNYRFNSFYRDQPHPFIVSMVRALDEVMNKLQRANPDDPAYDENKRQCQEDIKVMNDYVDKIIADRKARGEQSHDLLTQMLNGKDPETGEPLDDGNIRQQIITFLIAGHQTTSGLLSFALYFLVKNPHVLQKVAEEAARVLVDPVPSYKQVKQLKYVGMVLNEALRLWPVAPTFSLYAKEDTVLGGEYPLTKGDEVMVLVPQLHRDKTIWGDDVEEFRPERFENPSAIPQHAFKPFGNGQRACIGQQFALHEATLVLGMMLKHFDFEDHTNYELVIKETRTLKPEGFVVKAKSKGIPLGGIPSPSTEQSAKKVRKKAENAHNTPLLVLYGSNAGTAEGTARDLADIAMSKGFAPQVATLDSHAGNLPREGAVLIVTASYNGHPPDNAKQFVDWLDQASADEVKGVRYSVFGCGDKNWVGTYQKVPAFIDETLAAKGAENIADRGEADASDDFEGTYEEWRDHMWSDVAAYFNLDIENSEDNKSTLSLQFVDSAADMPLAKMHGAFSTNVVASKELQQPGSARSTRHLEIELPKEASYQEGDHLGVIPRNYEGIVNRVTARFGLSASQLIRLEAEEEKLAHLPLAKTVSVEELLQYVELQDPVTRTQLRAMAAKTVCPPHKVELEALLEKQAYKEQVLAKRLTMLELLEKYPACEMKFSEFIALLPSIRPRYYSISSSPRVDEKQASITVSVVSGPAWSGYGEYKGIASNYLAELQEGDTITCFISTPQSEFTLPKDPETPLIMVGPGTGVAPFRGFVQARKQLKEQGQSLGEAHLYFGCRSPHEDYLYQEELENAQSEGIITLHTAFSRMPNQPKTYVQHVMEQDGKKLIELLDQGAHFYICGDGSQMAPAVEATLMKSYADVHQVSEADARLWLQQLEEKGRYAKDVWAG

SEQ ID NO: 313 - DNA, 3147 bp, synthetic construct
  misc_feature 1..3147: note = variant of P450 oxidase from Bacillus megaterium
  source 1..3147: mol_type = other DNA
atgacaattaaggaaatgcctcagcctaagacgtttggagaacttaaaaatttaccgttattaaacacagataaaccggttcaagctttgatgcgtattgcggatgaattaggagaaatctttaaattcgaggcgcctggtagcgtaacgcgctatttatcaagtcagcgtctaattaaagaagcatgcgatgaatcacgctttgataaaaacttaagtcaagcgcttaaatttgcacgtgattttgttggagacgggttagccacaagctggacgcatgaaccgaattggaaaaaagcgcataatatcttagttccaagctttagtcagcatgcaatggggcgttatcatgcgatgatggtcgatatcgccgtgcagcttgttcaaaagtgggagcgtctaaatgcagatgagcatattgaagtatcggaagacatgacacgtttaacgcttgatacaattggtctttgcggctttaactatcgctttaacagcttttaccgagatcagcctcatccatttattgtgagtatggtccgtgcactggatgaagtaatgaacaagctgcagcgagcaaatccagacgacccagcttatgatgaaaacaagcgccagtgtcaagaagatatcaaggtgatgaacgactatgtagataaaattattgcagatcgcaaagcaaggggtgaacaaagtcatgatttattaacgcagatgctaaacggaaaagatccagaaacgggtgagccgcttgatgacgggaacattcgtcagcaaattattacattcttaattgcgggacaccaaacaacaagtggtcttttatcatttgcgctgtatttcttagtgaaaaatccacatgtattacaaaaagtagcagaagaagcagcacgagttctagtagatcctgttccaagctacaaacaagtcaaacagcttaaatatgtcggcatggtcttaaacgaagcgctgcgcttatggccagtagcgcctatgttttccctatatgcaaaagaagatacggtgcttggaggagaatatcctttaacgaaaggcgacgaagtaatggttctggtgcctcagcttcaccgtgataaaacaatttggggagacgatgtggaggagttccgtccagagcgttttgaaaatccaagtgcgattccgcagcatgcgtttaaaccgtttggaaacggtcagcgtgcgtgtatcggtcagcagttcgctcttcatgaagcaacgctggtacttggtatgatgctaaaacactttgactttgaagatcatacaaactacgagctcgttattaaagaaactcggacgttaaaacctgaaggctttgtggtaaaagcaaaatcgaaaggcattccgcttggcggtattccttcacctagcactgaacagtctgctaaaaaagtacgcaaaaaggcagaaaacgctcataatacgccgctgcttgtgctatacggttcaaatgcgggaacagctgaaggaacggcgcgtgatttagcagatattgcaatgagcaaaggatttgcaccgcaggtcgcaacgcttgattcacacgccggaaatcttccgcgcgaaggagctgtattaattgtaacggcgtcttataacggtcatccgcctgataacgcaaagcaatttgtcgactggttagaccaagcgtctgctgatgaagtaaaaggcgttcgctactccgtatttggatgcggcgataaaaattgggctgggacgtatcaaaaagtgcctgcttttatcgatgaaacgcttgccgctaaaggggcagaaaacatcgctgaccgcggtgaagcagatgcaagcgacgactttgaaggcacatatgaagaatggcgtgatcatatgtggagtgacgtagcagcctactttaacctcgacattgaaaacagtgaagataataaatctactctttcacttcaatttgtcgacagcgccgcggatatgccgcttgcgaaaatgcacggtgcgttttcaacgaacgtcgtagcaagcaaagaacttcaacagccaggcagtgcacgaagcacgcgacattttgaaattgaacttccaaaagaagcttcttatcaagaaggagatcatttaggtgttattcctcgcaactatgaaggaatagtaaaccgtgtaacagcaaggttcggcctaagcgcatcacagcaaatccgtctggaagcagaagaagaaaaattagctcatttgccactcgctaaaacagtatccgtagaagagcttctgcaatacgtggagcttcaagatcctgttacgcgcacgcagcttcgcgcaatggctgctaaaacggtctgcccgccgcataaagtagagcttgaagccttgcttgaaaagcaagcctacaaagaacaagtgctggcaaaacgtttaacaatgcttgaactgcttgaaaaatacccggcgtgtgaaatgaaattcagcgaatttatcgcccttctgccaagcatacgcccgcgctattactcgatttcttcatcacctcgtgtcgatgaaaaacaagcaagcatcacggtcagcgttgtctcaggaccggcgtggagcggatatggagaatataaaggaattgcgtcgaactatcttgccgagctgcaagaaggagatacgattacgtgctttatttccacaccgcagtcagaatttacgctgccaaaagaccctgaaacgccgcttatcatggtcggaccgggaacaggcgtcgcgccgtttagaggctttgtgcaggcgcgcaaacagctaaaagaacaaggacagtcacttggagaagcacatttatacttcggctgccgttcacctcatgaagactatctgtatcaagaagagcttgaaaacgcccaaagcgaaggcatcattacgcttcataccgctttttctcgcatgccaaatcagccgaaaacatacgttcagcacgtaatggaacaagacggcaagaaattgattgaacttcttgatcaaggagcgcacttctatatttgcggagacggaagccaaatggcacctgccgttgaagcaacgcttatgaaaagctatgctgacgttcaccaagtgagtgaagcagacgctcgcttatggctgcagcagctagaagaaaaaggccgatacgcaaaagacgtgtgggctggg

SEQ ID NO: 314 - protein, 1049 aa, synthetic construct
  REGION 1..1049: note = variant of P450 oxidase from Bacillus megaterium
MTIKEMPQPKTFGELKNLPLLNTDKPVQALMRIADELGEIFKFEAPGSVTRYLSSQRLIKEACDESRFDKNLSQALKFARDFVGDGLATSWTHEPNWKKAHNILVPSFSQHAMGRYHAMMVDIAVQLVQKWERLNADEHIEVSEDMTRLTLDTIGLCGFNYRFNSFYRDQPHPFIVSMVRALDEVMNKLQRANPDDPAYDENKRQCQEDIKVMNDYVDKIIADRKARGEQSHDLLTQMLNGKDPETGEPLDDGNIRQQIITFLIAGHQTTSGLLSFALYFLVKNPHVLQKVAEEAARVLVDPVPSYKQVKQLKYVGMVLNEALRLWPVAPMFSLYAKEDTVLGGEYPLTKGDEVMVLVPQLHRDKTIWGDDVEEFRPERFENPSAIPQHAFKPFGNGQRACIGQQFALHEATLVLGMMLKHFDFEDHTNYELVIKETRTLKPEGFVVKAKSKGIPLGGIPSPSTEQSAKKVRKKAENAHNTPLLVLYGSNAGTAEGTARDLADIAMSKGFAPQVATLDSHAGNLPREGAVLIVTASYNGHPPDNAKQFVDWLDQASADEVKGVRYSVFGCGDKNWAGTYQKVPAFIDETLAAKGAENIADRGEADASDDFEGTYEEWRDHMWSDVAAYFNLDIENSEDNKSTLSLQFVDSAADMPLAKMHGAFSTNVVASKELQQPGSARSTRHFEIELPKEASYQEGDHLGVIPRNYEGIVNRVTARFGLSASQQIRLEAEEEKLAHLPLAKTVSVEELLQYVELQDPVTRTQLRAMAAKTVCPPHKVELEALLEKQAYKEQVLAKRLTMLELLEKYPACEMKFSEFIALLPSIRPRYYSISSSPRVDEKQASITVSVVSGPAWSGYGEYKGIASNYLAELQEGDTITCFISTPQSEFTLPKDPETPLIMVGPGTGVAPFRGFVQARKQLKEQGQSLGEAHLYFGCRSPHEDYLYQEELENAQSEGIITLHTAFSRMPNQPKTYVQHVMEQDGKKLIELLDQGAHFYICGDGSQMAPAVEATLMKSYADVHQVSEADARLWLQQLEEKGRYAKDVWAG

SEQ ID NO: 315 - DNA, 3147 bp, synthetic construct
  misc_feature 1..3147: note = variant of P450 oxidase from Bacillus megaterium
  source 1..3147: mol_type = other DNA
atgacaattaaggaaatgcctcagcctaagacgtttggagaacttaaaaatttaccgttattaaacacagataaaccggttcaagctttgatgcgtattgcggatgaattaggagaaatctttaaattcgaggcgcctggtagcgtaacgcgctatttatcaagtcagcgtctaattaaagaagcatgcgatgaatcacgctttgataaaaacttaagtcaagcgcttaaatttgcacgtgattttgttggagacgggttagccacaagctggacgcatgaaccgaattggaaaaaagcgcataatatcttagttccaagctttagtcagcatgcaatggggcgttatcatgcgatgatggtcgatatcgccgtgcagcttgttcaaaagtgggagcgtctaaatgcagatgagcatattgaagtatcggaagacatgacacgtttaacgcttgatacaattggtctttgcggctttaactatcgctttaacagcttttaccgagatcagcctcatccatttattgtgagtatggtccgtgcactggatgaagtaatgaacaagctgcagcgagcaaatccagacgacccagcttatgatgaaaacaagcgccagtgtcaagaagatatcaaggtgatgaacgactatgtagataaaattattgcagatcgcaaagcaaggggtgaacaaagtcatgatttattaacgcagatgctaaacggaaaagatccagaaacgggtgagccgcttgatgacgggaacattcgtcagcaaattattacattcttaattgcgggacaccaaacaacaagtggtcttttatcatttgcgctgtatttcttagtgaaaaatccacatgtattacaaaaagtagcagaagaagcagcacgagttctagtagatcctgttccaagctacaaacaagtcaaacagcttaaatatgtcggcatggtcttaaacgaagcgctgcgcttatggccagtagcgcctatgttttccctatatgcaaaagaagatacggtgcttggaggagaatatcctttaacgaaaggcgacgaagtaatggttctggtgcctcagcttcaccgtgataaaacaatttggggagacgatgtggaggagttccgtccagagcgttttgaaaatccaagtgcgattccgcagcatgcgtttaaaccgtttggaaacggtcagcgtgcgtgtatcggtcagcagttcgctcttcatgaagcaacgctggtacttggtatgatgctaaaacactttgactttgaagatcatacaaactacgagctcgttattaaagaaactcggacgttaaaacctgaaggctttgtggtaaaagcaaaatcgaaaggcattccgcttggcggtattccttcacctagcactgaacagtctgctaaaaaagtacgcaaaaaggcagaaaacgctcataatacgccgctgcttgtgctatacggttcaaatgcgggaacagctgaaggaacggcgcgtgatttagcagatattgcaatgagcaaaggatttgcaccgcaggtcgcaacgcttgattcacacgccggaaatcttccgcgcgaaggagctgtattaattgtaacggcgtcttataacggtcatccgcctgataacgcaaagcaatttgtcgactggttagaccaagcgtctgctgatgaagtaaaaggcgttcgctactccgtatttggatgcggcgataaaaattgggctgggacgtatcaaaaagtgcctgcttttatcgatgaaacgcttgccgctaaaggggcagaaaacatcgctgaccgcggtgaagcagatgcaagcgacgactttgaaggcacatatgaagaatggcgtgatcatatgtggagtgacgtagcagcctactttaacctcgacattgaaaacagtgaagataataaatctactctttcacttcaatttgtcgacagcgccgcggatatgccgcttgcgaaaatgcacggtgcgttttcaacgaacgtcgtagcaagcaaagaacttcaacagccaggcagtgcacgaagcacgcgacatcttgaaattgaacttccaaaagaagcttcttatcaagaaggagatcatttaggtgttattcctcgcaactatgaaggaatagtaaaccgtgtaacagcaaggttcggcctaagcgcatcacagcaaatccgtctggaagcagaagaagaaaaattagctcatttgccactcgctaaaacagtatccgtagaagagcttctgcaatacgtggagcagcaagatcctgttacgcgcacgcagcttcgcgcaatggctgctaaaacggtctgcccgccgcataaagtagagcttgaagccttgcttgaaaagcaagcctacaaagaacaagtgctggcaaaacgtttaacaatgcttgaactgcttgaaaaatacccggcgtgtgaaatgaaattcagcgaatttatcgcccttctgccaagcatacgcccgcgctattactcgatttcttcatcacctcgtgtcgatgaaaaacaagcaagcatcacggtcagcgttgtctcaggaccggcgtggagcggatatggagaatataaaggaattgcgtcgaactatcttgccgagctgcaagaaggagatacgattacgtgctttatttccacaccgcagtcagaatttacgctgccaaaagaccctgaaacgccgcttatcatggtcggaccgggaacaggcgtcgcgccgtttagaggctttgtgcaggctcgcaaacagctaaaagaacaaggacagtcacttggagaagcacatttatacttcggctgccgttcacctcatgaagactatctgtatcaagaagagcttgaaaacgcccaaagcgaaggcatcattacgcttcataccgctttttctcgcatgccaaatcagccgaaaacatacgttcagcacgtaatggaacaagacggcaagaaattgattgaacttcttgatcaaggagcgcacttctatatttgcggagacggaagccaaatggcacctgccgttgaagcaacgcttatgaaaagctatgctgacgttcaccaagtgagtgaagcagacgctcgcttatggctgcagcagctagaagaaaaaggccgatacgcaaaagacgtgtgggctggg

SEQ ID NO: 316 - protein, 1049 aa, synthetic construct
  REGION 1..1049: note = variant of P450 oxidase from Bacillus megaterium
MTIKEMPQPKTFGELKNLPLLNTDKPVQALMRIADELGEIFKFEAPGSVTRYLSSQRLIKEACDESRFDKNLSQALKFARDFVGDGLATSWTHEPNWKKAHNILVPSFSQHAMGRYHAMMVDIAVQLVQKWERLNADEHIEVSEDMTRLTLDTIGLCGFNYRFNSFYRDQPHPFIVSMVRALDEVMNKLQRANPDDPAYDENKRQCQEDIKVMNDYVDKIIADRKARGEQSHDLLTQMLNGKDPETGEPLDDGNIRQQIITFLIAGHQTTSGLLSFALYFLVKNPHVLQKVAEEAARVLVDPVPSYKQVKQLKYVGMVLNEALRLWPVAPMFSLYAKEDTVLGGEYPLTKGDEVMVLVPQLHRDKTIWGDDVEEFRPERFENPSAIPQHAFKPFGNGQRACIGQQFALHEATLVLGMMLKHFDFEDHTNYELVIKETRTLKPEGFVVKAKSKGIPLGGIPSPSTEQSAKKVRKKAENAHNTPLLVLYGSNAGTAEGTARDLADIAMSKGFAPQVATLDSHAGNLPREGAVLIVTASYNGHPPDNAKQFVDWLDQASADEVKGVRYSVFGCGDKNWAGTYQKVPAFIDETLAAKGAENIADRGEADASDDFEGTYEEWRDHMWSDVAAYFNLDIENSEDNKSTLSLQFVDSAADMPLAKMHGAFSTNVVASKELQQPGSARSTRHLEIELPKEASYQEGDHLGVIPRNYEGIVNRVTARFGLSASQQIRLEAEEEKLAHLPLAKTVSVEELLQYVEQQDPVTRTQLRAMAAKTVCPPHKVELEALLEKQAYKEQVLAKRLTMLELLEKYPACEMKFSEFIALLPSIRPRYYSISSSPRVDEKQASITVSVVSGPAWSGYGEYKGIASNYLAELQEGDTITCFISTPQSEFTLPKDPETPLIMVGPGTGVAPFRGFVQARKQLKEQGQSLGEAHLYFGCRSPHEDYLYQEELENAQSEGIITLHTAFSRMPNQPKTYVQHVMEQDGKKLIELLDQGAHFYICGDGSQMAPAVEATLMKSYADVHQVSEADARLWLQQLEEKGRYAKDVWAG

SEQ ID NO: 317 - DNA, 3147 bp, synthetic construct
  misc_feature 1..3147: note = variant of P450 oxidase from Bacillus megaterium
  source 1..3147: mol_type = other DNA
atgacaattaaggaaatgcctcagcctaagacgtttggagaacttaaaaatttaccgttattaaacacagataaaccggttcaagctttgatgcgtattgcggatgaattaggagaaatctttaaattcgaggcgcctggtagcgtaacgcgctatttatcaagtcagcgtctaattaaagaagcatgcgatgaatcacgctttgataaaaacttaagtcaagcgcttaaatttgcacgtgattttgttggagacgggttagccacaagctggacgcatgaaccgaattggaaaaaagcgcataatatcttagttccaagctttagtcagcatgcaatggggcgttatcatgcgatgatggtcgatatcgccgtgcagcttgttcaaaagtgggagcgtctaaatgcagatgagcatattgaagtatcggaagacatgacacgtttaacgcttgatacaattggtctttgcggctttaactatcgctttaacagcttttaccgagatcagcctcatccatttattgtgagtatggtccgtgcactggatgaagtaatgaacaagctgcagcgagcaaatccagacgacccagcttatgatgaaaacaagcgccagtgtcaagaagatatcaaggtgatgaacgactatgtagataaaattattgcagatcgcaaagcaaggggtgaacaaagtcatgatttattaacgcagatgctaaacggaaaagatccagaaacgggtgagccgcttgatgacgggaacattcgtcagcaaattattacattcttaattgcgggacaccaaacaacaagtggtcttttatcatttgcgctgtatttcttagtgaaaaatccacatgtattacaaaaagtagcagaagaagcagcacgagttctagtagatcctgttccaagctacaaacaagtcaaacagcttaaatatgtcggcatggtcttaaacgaagcgctgcgcttatggccagtagcgcctatgttttccctatatgcaaaagaagatacggtgcttggaggagaatatcctttaacgaaaggcgacgaagtaatggttctggtgcctcagcttcaccgtgataaaacaatttggggagacgatgtggaggagttccgtccagagcgttttgaaaatccaagtgcgattccgcagcatgcgtttaaaccgtttggaaacggtcagcgtgcgtgtatcggtcagcagttcgctcttcatgaagcaacgctggtacttggtatgatgctaaaacactttgactttgaagatcatacaaactacgagctcgttattaaagaaactcggacgttaaaacctgaaggctttgtggtaaaagcaaaatcgaaaggcattccgcttggcggtattccttcacctagcactgaacagtctgctaaaaaagtacgcaaaaaggcagaaaacgctcataatacgccgctgcttgtgctatacggttcaaatgcgggaacagctgaaggaacggcgcgtgatttagcagatattgcaatgagcaaaggatttgcaccgcaggtcgcaacgcttgattcacacgccggaaatcttccgcgcgaaggagctgtattaattgtaacggcgtcttataacggtcatccgcctgataacgcaaagcaatttgtcgactggttagaccaagcgtctgctgatgaagtaaaaggcgttcgctactccgtatttggatgcggcgataaaaattgggctgggacgtatcaaaaagtgcctgcttttatcgatgaaacgcttgccgctaaaggggcagaaaacatcgctgaccgcggtgaagcagatgcaagcgacgactttgaaggcacatatgaagaatggcgtgatcatatgtggagtgacgtagcagcctactttaacctcgacattgaaaacagtgaagataataaatctactctttcacttcaatttgtcgacagcgccgcggatatgccgcttgcgaaaatgcacggtgcgttttcaacgaacgtcgtagcaagcaaagaacttcaacagccaggcagtgcacgaagcacgcgacatcttgaaattgaacttccaaaagaagcttcttatcaagaaggagatcatttaggtgttattcctcgcaactatgaaggaatagtaaaccgtgtaacagcaaggttcggcctaagcgcatcacagcaaatccgtctggaagcagaagaagaaaaattagctcatttgccactcgctaaaacagtatccgtagaagagcttctgcaatacgtggagcttcaagatcctgttacgcgcacgcagcttcgcgcaatggctgctaaaacggtctgcccgccgcataaagtagagcttgaagccttgcttgaaaagcaagcctacaaagaacaagtgctggcaaaacgtttaacaatgcttgaactgcttgaaaaatacccggcgtgtgaaatgaaattcagcgaatttatcgcccttctgccaagcatacgcccgcgctattactcgatttcttcatcacctcgtgtcgatgaaaaacaagcaagcatcacggtcagcgttgtctcaggaccggcgtggagcggatatggagaatataaaggaattgcgtcgaactatcttgccgagctgcaagaaggagatacgattacgtgctttatttccacaccgcagtcagaatttacgctgccaaaagaccctgaaacgccgcttatcatggtcggaccgggaacaggcgtcgcgccgtttagaggctttgtgcaggcgcgcaaacagctaaaagaacaaggacagtcacttggagaagcacatttatacttcggctgccgttcacctcatgaagactatctgtatcaagaagagcttgaaaacgcccaaagcgaaggcatcattacgcttcataccgctttttctcgcatgccaaatcagccgaaaacatacgttcagcacgtaatggaacaagacggcaagaaattgattgaacttcttgatcaaggagcgcacttctatgcgtgcggagacggaagccaaatggcacctgccgttgaagcaacgcttatgaaaagctatgctgacgttcaccaagtgagtgaagcagacgctcgcttatggctgcagcagctagaagaaaaaggccgatacgcaaaagacgtgtgggctggg

SEQ ID NO: 318 - protein, 1049 aa, synthetic construct
  REGION 1..1049: note = variant of P450 oxidase from Bacillus megaterium
MTIKEMPQPKTFGELKNLPLLNTDKPVQALMRIADELGEIFKFEAPGSVTRYLSSQRLIKEACDESRFDKNLSQALKFARDFVGDGLATSWTHEPNWKKAHNILVPSFSQHAMGRYHAMMVDIAVQLVQKWERLNADEHIEVSEDMTRLTLDTIGLCGFNYRFNSFYRDQPHPFIVSMVRALDEVMNKLQRANPDDPAYDENKRQCQEDIKVMNDYVDKIIADRKARGEQSHDLLTQMLNGKDPETGEPLDDGNIRQQIITFLIAGHQTTSGLLSFALYFLVKNPHVLQKVAEEAARVLVDPVPSYKQVKQLKYVGMVLNEALRLWPVAPMFSLYAKEDTVLGGEYPLTKGDEVMVLVPQLHRDKTIWGDDVEEFRPERFENPSAIPQHAFKPFGNGQRACIGQQFALHEATLVLGMMLKHFDFEDHTNYELVIKETRTLKPEGFVVKAKSKGIPLGGIPSPSTEQSAKKVRKKAENAHNTPLLVLYGSNAGTAEGTARDLADIAMSKGFAPQVATLDSHAGNLPREGAVLIVTASYNGHPPDNAKQFVDWLDQASADEVKGVRYSVFGCGDKNWAGTYQKVPAFIDETLAAKGAENIADRGEADASDDFEGTYEEWRDHMWSDVAAYFNLDIENSEDNKSTLSLQFVDSAADMPLAKMHGAFSTNVVASKELQQPGSARSTRHLEIELPKEASYQEGDHLGVIPRNYEGIVNRVTARFGLSASQQIRLEAEEEKLAHLPLAKTVSVEELLQYVELQDPVTRTQLRAMAAKTVCPPHKVELEALLEKQAYKEQVLAKRLTMLELLEKYPACEMKFSEFIALLPSIRPRYYSISSSPRVDEKQASITVSVVSGPAWSGYGEYKGIASNYLAELQEGDTITCFISTPQSEFTLPKDPETPLIMVGPGTGVAPFRGFVQARKQLKEQGQSLGEAHLYFGCRSPHEDYLYQEELENAQSEGIITLHTAFSRMPNQPKTYVQHVMEQDGKKLIELLDQGAHFYACGDGSQMAPAVEATLMKSYADVHQVSEADARLWLQQLEEKGRYAKDVWAG

SEQ ID NO: 319 - DNA, 3147 bp, synthetic construct
  misc_feature 1..3147: note = variant of P450 oxidase from Bacillus megaterium
  source 1..3147: mol_type = other DNA
atgacaattaaggaaatgcctcagcctaagacgtttggagaacttaaaaatttaccgttattaaacacagataaaccggttcaagctttgatgcgtattgcggatgaattaggagaaatctttaaattcgaggcgcctggtagcgtaacgcgctatttatcaagtcagcgtctaattaaagaagcatgcgatgaatcacgctttgataaaaacttaagtcaagcgcttaaatttgcacgtgattttgttggagacgggttagccacaagctggacgcatgaaccgaattggaaaaaagcgcataatatcttagttccaagctttagtcagcatgcaatggggcgttatcatgcgatgatggtcgatatcgccgtgcagcttgttcaaaagtgggagcgtctaaatgcagatgagcatattgaagtatcggaagacatgacacgtttaacgcttgatacaattggtctttgcggctttaactatcgctttaacagcttttaccgagatcagcctcatccatttattgtgagtatggtccgtgcactggatgaagtaatgaacaagctgcagcgagcaaatccagacgacccagcttatgatgaaaacaagcgccagtgtcaagaagatatcaaggtgatgaacgactatgtagataaaattattgcagatcgcaaagcaaggggtgaacaaagtcatgatttattaacgcagatgctaaacggaaaagatccagaaacgggtgagccgcttgatgacgggaacattcgtcagcaaattattacattcttaattgcgggacaccaaacaacaagtggtcttttatcatttgcgctgtatttcttagtgaaaaatccacatgtattacaaaaagtagcagaagaagcagcacgagttctagtagatcctgttccaagctacaaacaagtcaaacagcttaaatatgtcggcatggtcttaaacgaagcgctgcgcttatggccagtagcgcctatgttttccctatatgcaaaagaagatacggtgcttggaggagaatatcctttaacgaaaggcgacgaagtaatggttctggtgcctcagcttcaccgtgataaaacaatttggggagacgatgtggaggagttccgtccagagcgttttgaaaatccaagtgcgattccgcagcatgcgtttaaaccgtttggaaacggtcagcgtgcgtgtatcggtcagcagttcgctcttcatgaagcaacgctggtacttggtatgatgctaaaacactttgactttgaagatcatacaaactacgagctcgttattaaagaaactcggacgttaaaacctgaaggctttgtggtaaaagcaaaatcgaaaggcattccgcttggcggtattccttcacctagcactgaacagtctgctaaaaaagtacgcaaaaaggcagaaaacgctcataatacgccgctgcttgtgctatacggttcaaatgcgggaacagctgaaggaacggcgcgtgatttagcagatattgcaatgagcaaaggatttgcaccgcaggtcgcaacgcttgattcacacgccggaaatcttccgcgcgaaggagctgtattaattgtaacggcgtcttataacggtcatccgcctgataacgcaaagcaatttgtcgactggttagaccaagcgtctgctgatgaagtaaaaggcgttcgctactccgtatttggatgcggcgataaaaattgggctgggacgtatcaaaaagtgcctgcttttatcgatgaaacgcttgccgctaaaggggcagaaaacatcgctgaccgcggtgaagcagatgcaagcgacgactttgaaggcacatatgaagaatggcgtgatcatatgtggagtgacgtagcagcctactttaacctcgacattgaaaacagtgaagataataaatctactctttcacttcaatttgtcgacagcgccgcggatatgccgcttgcgaaaatgcacggtgcgttttcaacgaacgtcgtagcaagcaaagaacttcaacagccaggcagtgcacgaagcacgcgacatcttgaaattgaacttccaaaagaagcttcttatcaagaaggagatcatttaggtgttattcctcgcaactatgaaggaatagtaaaccgtgtaacagcaaggttcggcctaagcgcatcacagcaaatccgtctggaagcagaagaagaaaaattagctcatttgccactcgctaaaacagtatccgtagaagagcttctgcaatacgtggagcttcaagatcctgttacgcgcacgcagcttcgcgcaatggctgctaaaacggtctgcccgccgcataaagtagagcttgaagccttgcttgaaaagcaagcctacaaagaacaagtgctggcaaaacgtttaacaatgcttgaactgcttgaaaaatacccggcgtgtgaaatgaaattcagcgaatttatcgcccttctgccaagcatacgcccgcgctattactcgatttcttcatcacctcgtgtcgatgaaaaacaagcaagcatcacggtcagcgttgtctcaggaccggcgtggagcggatatggagaatataaaggaattgcgtcgaactatcttgccgagctgcaagaaggagatacgattacgtgctttatttccacaccgcagtcagaacagacgctgccaaaagaccctgaaacgccgcttatcatggtcggaccgggaacaggcgtcgcgccgtttagaggctttgtgcaggcgcgcaaacagctaaaagaacaaggacagtcacttggagaagcacatttatacttcggctgccgttcacctcatgaagactatctgtatcaagaagagcttgaaaacgcccaaagcgaaggcatcattacgcttcataccgctttttctcgcatgccaaatcagccgaaaacatacgttcagcacgtaatggaacaagacggcaagaaattgattgaacttcttgatcaaggagcgcacttctatatttgcggagacggaagccaaatggcacctgccgttgaagcaacgcttatgaaaagctatgctgacgttcaccaagtgagtgaagcagacgctcgcttatggctgcagcagctagaagaaaaaggccgatacgcaaaagacgtgtgggctggg

SEQ ID NO: 320 - protein, 1049 aa, synthetic construct
  REGION 1..1049: note = variant of P450 oxidase from Bacillus megaterium
MTIKEMPQPKTFGELKNLPLLNTDKPVQALMRIADELGEIFKFEAPGSVTRYLSSQRLIKEACDESRFDKNLSQALKFARDFVGDGLATSWTHEPNWKKAHNILVPSFSQHAMGRYHAMMVDIAVQLVQKWERLNADEHIEVSEDMTRLTLDTIGLCGFNYRFNSFYRDQPHPFIVSMVRALDEVMNKLQRANPDDPAYDENKRQCQEDIKVMNDYVDKIIADRKARGEQSHDLLTQMLNGKDPETGEPLDDGNIRQQIITFLIAGHQTTSGLLSFALYFLVKNPHVLQKVAEEAARVLVDPVPSYKQVKQLKYVGMVLNEALRLWPVAPMFSLYAKEDTVLGGEYPLTKGDEVMVLVPQLHRDKTIWGDDVEEFRPERFENPSAIPQHAFKPFGNGQRACIGQQFALHEATLVLGMMLKHFDFEDHTNYELVIKETRTLKPEGFVVKAKSKGIPLGGIPSPSTEQSAKKVRKKAENAHNTPLLVLYGSNAGTAEGTARDLADIAMSKGFAPQVATLDSHAGNLPREGAVLIVTASYNGHPPDNAKQFVDWLDQASADEVKGVRYSVFGCGDKNWAGTYQKVPAFIDETLAAKGAENIADRGEADASDDFEGTYEEWRDHMWSDVAAYFNLDIENSEDNKSTLSLQFVDSAADMPLAKMHGAFSTNVVASKELQQPGSARSTRHLEIELPKEASYQEGDHLGVIPRNYEGIVNRVTARFGLSASQQIRLEAEEEKLAHLPLAKTVSVEELLQYVELQDPVTRTQLRAMAAKTVCPPHKVELEALLEKQAYKEQVLAKRLTMLELLEKYPACEMKFSEFIALLPSIRPRYYSISSSPRVDEKQASITVSVVSGPAWSGYGEYKGIASNYLAELQEGDTITCFISTPQSEQTLPKDPETPLIMVGPGTGVAPFRGFVQARKQLKEQGQSLGEAHLYFGCRSPHEDYLYQEELENAQSEGIITLHTAFSRMPNQPKTYVQHVMEQDGKKLIELLDQGAHFYICGDGSQMAPAVEATLMKSYADVHQVSEADARLWLQQLEEKGRYAKDVWAG

SEQ ID NO: 321 - DNA, 3147 bp, synthetic construct
  misc_feature 1..3147: note = variant of P450 oxidase from Bacillus megaterium
  source 1..3147: mol_type = other DNA
atgacaattaaggaaatgcctcagcctaagacgtttggagaacttaaaaatttaccgttattaaacacagataaaccggttcaagctttgatgcgtattgcggatgaattaggagaaatctttaaattcgaggcgcctggtagcgtaacgcgctatttatcaagtcagcgtctaattaaagaagcatgcgatgaatcacgctttgataaaaacttaagtcaagcgcttaaatttgcacgtgattttgttggagacgggttagccacaagctggacgcatgaaccgaattggaaaaaagcgcataatatcttagttccaagctttagtcagcatgcaatggggcgttatcatgcgatgatggtcgatatcgccgtgcagcttgttcaaaagtgggagcgtctaaatgcagatgagcatattgaagtatcggaagacatgacacgtttaacgcttgatacaattggtctttgcggctttaactatcgctttaacagcttttaccgagatcagcctcatccatttattgtgagtatggtccgtgcactggatgaagtaatgaacaagctgcagcgagcaaatccagacgacccagcttatgatgaaaacaagcgccagtgtcaagaagatatcaaggtgatgaacgactatgtagataaaattattgcagatcgcaaagcaaggggtgaacaaagtcatgatttattaacgcagatgctaaacggaaaagatccagaaacgggtgagccgcttgatgacgggaacattcgtcagcaaattattacattcttaattgcgggacaccaaacaacaagtggtcttttatcatttgcgctgtatttcttagtgaaaaatccacatgtattacaaaaagtagcagaagaagcagcacgagttctagtagatcctgttccaagctacaaacaagtcaaacagcttaaatatgtcggcatggtcttaaacgaagcgctgcgcttatggccagtagcgcctatgttttccctatatgcaaaagaagatacggtgcttggaggagaatatcctttaacgaaaggcgacgaagtaatggttctggtgcctcagcttcaccgtgataaaacaatttggggagacgatgtggaggagttccgtccagagcgttttgaaaatccaagtgcgattccgcagcatgcgtttaaaccgtttggaaacggtcagcgtgcgtgtatcggtcagcagttcgctcttcatgaagcaacgctggtacttggtatgatgctaaaacactttgactttgaagatcatacaaactacgagctcgttattaaagaaactcggacgttaaaacctgaaggctttgtggtaaaagcaaaatcgaaaggcattccgcttggcggtattccttcacctagcactgaacagtctgctaaaaaagtacgcaaaaaggcagaaaacgctcataatacgccgctgcttgtgctatacggttcaaatgcgggaacagctgaaggaacggcgcgtgatttagcagatattgcaatgagcaaaggatttgcaccgcaggtcgcaacgcttgattcacacgccggaaatcttccgcgcgaaggagctgtattaattgtaacggcgtcttataacggtcatccgcctgataacgcaaagcaatttgtcgactggttagaccaagcgtctgctgatgaagtaaaaggcgttcgctactccgtatttggatgcggcgataaaaattgggctgggacgtatcaaaaagtgcctgcttttatcgatgaaacgcttgccgctaaaggggcagaaaacatcgctgaccgcggtgaagcagatgcaagcgacgactttgaaggcacatatgaagaatggcgtgatcatatgtggagtgacgtagcagcctactttaacctcgacattgaaaacagtgaagataataaatctactctttcacttcaatttgtcgacagcgccgcggatatgccgcttgcgaaaatgcacggtgcgttttcaacgaacgtcgtagcaagcaaagaacttcaacagccaggcagtgcacgaagcacgcgacatcttgaaattgaacttccaaaagaagcttcttatcaagaaggagatcatttaggtgttattcctcgcaactgtgaaggaatagtaaaccgtgtaacagcaaggttcggcctaagcgcatcacagcaaatccgtctggaagcagaagaagaaaaattagctcatttgccactcgctaaaacagtatccgtagaagagcttctgcaatacgtggagcttcaagatcctgttacgcgcacgcagcttcgcgcaatggctgctaaaacggtctgcccgccgcataaagtagagcttgaagccttgcttgaaaagcaagcctacaaagaacaagtgctggcaaaacgtttaacaatgcttgaactgcttgaaaaatacccggcgtgtgaaatgaaattcagcgaatttatcgcccttctgccaagcatacgcccgcgctattactcgatttcttcatcacctcgtgtcgatgaaaaacaagcaagcatcacggtcagcgttgtctcaggaccggcgtggagcggatatggagaatataaaggaattgcgtcgaactatcttgccgagctgcaagaaggagatacgattacgtgctttatttccacaccgcagtcagaatttacgctgccaaaagaccctgaaacgccgcttatcatggtcggaccgggaacaggcgtcgcgccgtttagaggctttgtgcaggcgcgcaaacagctaaaagaacaaggacagtcacttggagaagcacatttatacttcggctgccgttcacctcatgaagactatctgtatcaagaagagcttgaaaacgcccaaagcgaaggcatcattacgcttcataccgctttttctcgcatgccaaatcagccgaaaacatacgttcagcacgtaatggaacaagacggcaagaaattgattgaacttcttgatcaaggagcgcacttctatatttgcggagacggaagccaaatggcacctgccgttgaagcaacgcttatgaaaagctatgctgacgttcaccaagtgagtgaagcagacgctcgcttatggctgcagcagctagaagaaaaaggccgatacgcaaaagacgtgtgggctggg

SEQ ID NO: 322 - protein, 1049 aa, synthetic construct
  REGION 1..1049: note = variant of P450 oxidase from Bacillus megaterium
MTIKEMPQPKTFGELKNLPLLNTDKPVQALMRIADELGEIFKFEAPGSVTRYLSSQRLIKEACDESRFDKNLSQALKFARDFVGDGLATSWTHEPNWKKAHNILVPSFSQHAMGRYHAMMVDIAVQLVQKWERLNADEHIEVSEDMTRLTLDTIGLCGFNYRFNSFYRDQPHPFIVSMVRALDEVMNKLQRANPDDPAYDENKRQCQEDIKVMNDYVDKIIADRKARGEQSHDLLTQMLNGKDPETGEPLDDGNIRQQIITFLIAGHQTTSGLLSFALYFLVKNPHVLQKVAEEAARVLVDPVPSYKQVKQLKYVGMVLNEALRLWPVAPMFSLYAKEDTVLGGEYPLTKGDEVMVLVPQLHRDKTIWGDDVEEFRPERFENPSAIPQHAFKPFGNGQRACIGQQFALHEATLVLGMMLKHFDFEDHTNYELVIKETRTLKPEGFVVKAKSKGIPLGGIPSPSTEQSAKKVRKKAENAHNTPLLVLYGSNAGTAEGTARDLADIAMSKGFAPQVATLDSHAGNLPREGAVLIVTASYNGHPPDNAKQFVDWLDQASADEVKGVRYSVFGCGDKNWAGTYQKVPAFIDETLAAKGAENIADRGEADASDDFEGTYEEWRDHMWSDVAAYFNLDIENSEDNKSTLSLQFVDSAADMPLAKMHGAFSTNVVASKELQQPGSARSTRHLEIELPKEASYQEGDHLGVIPRNCEGIVNRVTARFGLSASQQIRLEAEEEKLAHLPLAKTVSVEELLQYVELQDPVTRTQLRAMAAKTVCPPHKVELEALLEKQAYKEQVLAKRLTMLELLEKYPACEMKFSEFIALLPSIRPRYYSISSSPRVDEKQASITVSVVSGPAWSGYGEYKGIASNYLAELQEGDTITCFISTPQSEFTLPKDPETPLIMVGPGTGVAPFRGFVQARKQLKEQGQSLGEAHLYFGCRSPHEDYLYQEELENAQSEGIITLHTAFSRMPNQPKTYVQHVMEQDGKKLIELLDQGAHFYICGDGSQMAPAVEATLMKSYADVHQVSEADARLWLQQLEEKGRYAKDVWAG

SEQ ID NO: 323 - DNA, 3147 bp, synthetic construct
  misc_feature 1..3147: note = variant of P450 oxidase from Bacillus megaterium
  source 1..3147: mol_type = other DNA
atgacaattaaggaaatgcctcagcctaagacgtttggagaacttaaaaatttaccgttattaaacacagataaaccggttcaagctttgatgcgtattgcggatgaattaggagaaatctttaaattcgaggcgcctggtagcgtaacgcgctatttatcaagtcagcgtctaattaaagaagcatgcgatgaatcacgctttgataaaaacttaagtcaagcgcttaaatttgcacgtgattttgttggagacgggttagccacaagctggacgcatgaaccgaattggaaaaaagcgcataatatcttagttccaagctttagtcagcatgcaatggggcgttatcatgcgatgatggtcgatatcgccgtgcagcttgttcaaaagtgggagcgtctaaatgcagatgagcatattgaagtatcggaagacatgacacgtttaacgcttgatacaattggtctttgcggctttaactatcgctttaacagcttttaccgagatcagcctcatccatttattgtgagtatggtccgtgcactggatgaagtaatgaacaagctgcagcgagcaaatccagacgacccagcttatgatgaaaacaagcgccagtgtcaagaagatatcaaggtgatgaacgactatgtagataaaattattgcagatcgcaaagcaaggggtgaacaaagtcatgatttattaacgcagatgctaaacggaaaagatccagaaacgggtgagccgcttgatgacgggaacattcgtcagcaaattattacattcttaattgcgggacaccaaacaacaagtggtcttttatcatttgcgctgtatttcttagtgaaaaatccacatgtattacaaaaagtagcagaagaagcagcacgagttctagtagatcctgttccaagctacaaacaagtcaaacagcttaaatatgtcggcatggtcttaaacgaagcgctgcgcttatggccagtagcgcctatgttttccctatatgcaaaagaagatacggtgcttggaggagaatatcctttaacgaaaggcgacgaagtaatggttctggtgcctcagcttcaccgtgataaaacaatttggggagacgatgtggaggagttccgtccagagcgttttgaaaatccaagtgcgattccgcagcatgcgtttaaaccgtttggaaacggtcagcgtgcgtgtatcggtcagcagttcgctcttcatgaagcaacgctggtacttggtatgatgctaaaacactttgactttgaagatcatacaaactacgagctcgttattaaagaaactcggacgttaaaacctgaaggctttgtggtaaaagcaaaatcgaaaggcattccgcttggcggtattccttcacctagcactgaacagtctgctaaaaaagtacgcaaaaaggcagaaaacgctcataatacgccgctgcttgtgctatacggttcaaatgcgggaacagctgaaggaacggcgcgtgatttagcagatattgcaatgagcaaaggatttgcaccgcaggtcgcaacgcttgattcacacgccggaaatcttccgcgcgaaggagctgtattaattgtaacggcgtcttataacggtcatccgcctgataacgcaaagcaatttgtcgactggttagaccaagcgtctgctgatgaagtaaaaggcgttcgctactccgtatttggatgcggcgataaaaattgggctgggacgtatcaaaaagtgcctgcttttatcgatgaaacgcttgccgctaaaggggcagaaaacatcgctgaccgcggtgaagcagatgcaagcgacgactttgaaggcacatatgaagaatggcgtgatcatatgtggagtgacgtagcagcctactttaacctcgacattgaaaacagtgaagataataaatctactctttcacttcaatttgtcgacagcgccgcggatatgccgcttgcgaaaatgcacggtgcgttttcaacgaacgtcgtagcaagcaaagaacttcaacagccaggcagtgcacgaagcaagcgacatcttgaaattgaacttccaaaagaagcttcttatcaagaaggagatcatttaggtgttattcctcgcaactatgaaggaatagtaaaccgtgtaacagcaaggttcggcctaagcgcatcacagcaaatccgtctggaagcagaagaagaaaaattagctcatttgccactcgctaaaacagtatccgtagaagagcttctgcaatacgtggagcttcaagatcctgttacgcgcacgcagcttcgcgcaatggctgctaaaacggtctgcccgccgcataaagtagagcttgaagccttgcttgaaaagcaagcctacaaagaacaagtgctggcaaaacgtttaacaatgcttgaactgcttgaaaaatacccggcgtgtgaaatgaaattcagcgaatttatcgcccttctgccaagcatacgcccgcgctattactcgatttcttcatcacctcgtgtcgatgaaaaacaagcaagcatcacggtcagcgttgtctcaggaccggcgtggagcggatatggagaatataaaggaattgcgtcgaactatcttgccgagctgcaagaaggagatacgattacgtgctttatttccacaccgcagtcagaatttacgctgccaaaagaccctgaaacgccgcttatcatggtcggaccgggaacaggcgtcgcgccgtttagaggctttgtgcaggcgcgcaaacagctaaaagaacaaggacagtcacttggagaagcacatttatacttcggctgccgttcacctcatgaagactatctgtatcaagaagagcttgaaaacgcccaaagcgaaggcatcattacgcttcataccgctttttctcgcatgccaaatcagccgaaaacatacgttcagcacgtaatggaacaagacggcaagaaattgattgaacttcttgatcaaggagcgcacttctatatttgcggagacggaagccaaatggcacctgccgttgaagcaacgcttatgaaaagctatgctgacgttcaccaagtgagtgaagcagacgctcgcttatggctgcagcagctagaagaaaaaggccgatacgcaaaagacgtgtgggctggg

SEQ ID NO: 324 - protein, 1049 aa, synthetic construct
  REGION 1..1049: note = variant of P450 oxidase from Bacillus megaterium
MTIKEMPQPKTFGELKNLPLLNTDKPVQALMRIADELGEIFKFEAPGSVTRYLSSQRLIKEACDESRFDKNLSQALKFARDFVGDGLATSWTHEPNWKKAHNILVPSFSQHAMGRYHAMMVDIAVQLVQKWERLNADEHIEVSEDMTRLTLDTIGLCGFNYRFNSFYRDQPHPFIVSMVRALDEVMNKLQRANPDDPAYDENKRQCQEDIKVMNDYVDKIIADRKARGEQSHDLLTQMLNGKDPETGEPLDDGNIRQQIITFLIAGHQTTSGLLSFALYFLVKNPHVLQKVAEEAARVLVDPVPSYKQVKQLKYVGMVLNEALRLWPVAPMFSLYAKEDTVLGGEYPLTKGDEVMVLVPQLHRDKTIWGDDVEEFRPERFENPSAIPQHAFKPFGNGQRACIGQQFALHEATLVLGMMLKHFDFEDHTNYELVIKETRTLKPEGFVVKAKSKGIPLGGIPSPSTEQSAKKVRKKAENAHNTPLLVLYGSNAGTAEGTARDLADIAMSKGFAPQVATLDSHAGNLPREGAVLIVTASYNGHPPDNAKQFVDWLDQASADEVKGVRYSVFGCGDKNWAGTYQKVPAFIDETLAAKGAENIADRGEADASDDFEGTYEEWRDHMWSDVAAYFNLDIENSEDNKSTLSLQFVDSAADMPLAKMHGAFSTNVVASKELQQPGSARSKRHLEIELPKEASYQEGDHLGVIPRNYEGIVNRVTARFGLSASQQIRLEAEEEKLAHLPLAKTVSVEELLQYVELQDPVTRTQLRAMAAKTVCPPHKVELEALLEKQAYKEQVLAKRLTMLELLEKYPACEMKFSEFIALLPSIRPRYYSISSSPRVDEKQASITVSVVSGPAWSGYGEYKGIASNYLAELQEGDTITCFISTPQSEFTLPKDPETPLIMVGPGTGVAPFRGFVQARKQLKEQGQSLGEAHLYFGCRSPHEDYLYQEELENAQSEGIITLHTAFSRMPNQPKTYVQHVMEQDGKKLIELLDQGAHFYICGDGSQMAPAVEATLMKSYADVHQVSEADARLWLQQLEEKGRYAKDVWAG

SEQ ID NO: 325 - DNA, 3147 bp, synthetic construct
  misc_feature 1..3147: note = variant of P450 oxidase from Bacillus megaterium
  source 1..3147: mol_type = other DNA
atgacaattaaggaaatgcctcagcctaagacgtttggagaacttaaaaatttaccgttattaaacacagataaaccggttcaagctttgatgcgtattgcggatgaattaggagaaatctttaaattcgaggcgcctggtagcgtaacgcgctatttatcaagtcagcgtctaattaaagaagcatgcgatgaatcacgctttgataaaaacttaagtcaagcgcttaaatttgcacgtgattttgttggagacgggttagccacaagctggacgcatgaaccgaattggaaaaaagcgcataatatcttagttccaagctttagtcagcatgcaatggggcgttatcatgcgatgatggtcgatatcgccgtgcagcttgttcaaaagtgggagcgtctaaatgcagatgagcatattgaagtatcggaagacatgacacgtttaacgcttgatacaattggtctttgcggctttaactatcgctttaacagcttttaccgagatcagcctcatccatttattgtgagtatggtccgtgcactggatgaagtaatgaacaagctgcagcgagcaaatccagacgacccagcttatgatgaaaacaagcgccagtgtcaagaagatatcaaggtgatgaacgactatgtagataaaattattgcagatcgcaaagcaaggggtgaacaaagtcatgatttattaacgcagatgctaaacggaaaagatccagaaacgggtgagccgcttgatgacgggaacattcgtcagcaaattattacattcttaattgcgggacaccaaacaacaagtggtcttttatcatttgcgctgtatttcttagtgaaaaatccacatgtattacaaaaagtagcagaagaagcagcacgagttctagtagatcctgttccaagctacaaacaagtcaaacagcttaaatatgtcggcatggtcttaaacgaagcgctgcgcttatggccagtagcgcctatgttttccctatatgcaaaagaagatacggtgcttggaggagaatatcctttaacgaaaggcgacgaagtaatggttctggtgcctcagcttcaccgtgataaaacaatttggggagacgatgtggaggagttccgtccagagcgttttgaaaatccaagtgcgattccgcagcatgcgtttaaaccgtttggaaacggtcagcgtgcgtgtatcggtcagcagttcgctcttcatgaagcaacgctggtacttggtatgatgctaaaacactttgactttgaagatcatacaaactacgagctcgttattaaagaaactcggacgttaaaacctgaaggctttgtggtaaaagcaaaatcgaaaggcattccgcttggcggtattccttcacctagcactgaacagtctgctaaaaaagtacgcaaaaaggcagaaaacgctcataatacgccgctgcttgtgctatacggttcaaatgcgggaacagctgaaggaacggcgcgtgatttagcagatattgcaatgagcaaaggatttgcaccgcaggtcgcaacgcttgattcacacgccggaaatcttccgcgcgaaggagctgtattaattgtaacggcgtcttataacggtcatccgcctgataacgcaaagcaatttgtcgactggttagaccaagcgtctgctgatgaagtaaaaggcgttcgctactccgtatttggatgcggcgataaaaattgggctgggacgtatcaaaaagtgcctgcttttatcgatgaaacgcttgccgctaaaggggcagaaaacatcgctgaccgcggtgaagcagatgcaagcgacgactttgaaggcacatatgaagaatggcgtgatcatatgtggagtgacgtagcagcctactttaacctcgacattgaaaacagtgaagataataaatctactctttcacttcaatttgtcgacagcgccgcggatatgccgcttgcgaaaatgcacggtgcgttttcaacgaacgtcgtagcaagcaaagaacttcaacagccaggcagtgcacgaagcacgcgacatcttgaaattgaacttccaaaagaagcttcttatcaagaaggagatcatttaggtgttattcctcgcaactatgaaggaatagtaaaccgtgtaacagcaaggttcggcctaagcgcatcacagcaaatccgtctggaagcagaagaagaaaaattagctcatttgccactcgctaaaacagtatccgtagaagagcttctgcaatacgtggagcttcaagatcctgttacgcgcacgcagcttcgcgcaatggctgctaaaacggtctgcccgccgcataaagtagagcttgaagccttgcttgaaaagcaagcctacaaagaacaagtgctggcacatcgtttaacaatgcttgaactgcttgaaaaatacccggcgtgtgaaatgaaattcagcgaatttatcgcccttctgccaagcatacgcccgcgctattactcgatttcttcatcacctcgtgtcgatgaaaaacaagcaagcatcacggtcagcgttgtctcaggaccggcgtggagcggatatggagaatataaaggaattgcgtcgaactatcttgccgagctgcaagaaggagatacgattacgtgctttatttccacaccgcagtcagaatttacgctgccaaaagaccctgaaacgccgcttatcatggtcggaccgggaacaggcgtcgcgccgtttagaggctttgtgcaggcgcgcaaacagctaaaagaacaaggacagtcacttggagaagcacatttatacttcggctgccgttcacctcatgaagactatctgtatcaagaagagcttgaaaacgcccaaagcgaaggcatcattacgcttcataccgctttttctcgcatgccaaatcagccgaaaacatacgttcagcacgtaatggaacaagacggcaagaaattgattgaacttcttgatcaaggagcgcacttctatatttgcggagacggaagccaaatggcacctgccgttgaagcaacgcttatgaaaagctatgctgacgttcaccaagtgagtgaagcagacgctcgcttatggctgcagcagctagaagaaaaaggccgatacgcaaaagacgtgtgggctggg

SEQ ID NO: 326 - protein, 1049 aa, synthetic construct
  REGION 1..1049: note = variant of P450 oxidase from Bacillus megaterium
MTIKEMPQPKTFGELKNLPLLNTDKPVQALMRIADELGEIFKFEAPGSVTRYLSSQRLIKEACDESRFDKNLSQALKFARDFVGDGLATSWTHEPNWKKAHNILVPSFSQHAMGRYHAMMVDIAVQLVQKWERLNADEHIEVSEDMTRLTLDTIGLCGFNYRFNSFYRDQPHPFIVSMVRALDEVMNKLQRANPDDPAYDENKRQCQEDIKVMNDYVDKIIADRKARGEQSHDLLTQMLNGKDPETGEPLDDGNIRQQIITFLIAGHQTTSGLLSFALYFLVKNPHVLQKVAEEAARVLVDPVPSYKQVKQLKYVGMVLNEALRLWPVAPMFSLYAKEDTVLGGEYPLTKGDEVMVLVPQLHRDKTIWGDDVEEFRPERFENPSAIPQHAFKPFGNGQRACIGQQFALHEATLVLGMMLKHFDFEDHTNYELVIKETRTLKPEGFVVKAKSKGIPLGGIPSPSTEQSAKKVRKKAENAHNTPLLVLYGSNAGTAEGTARDLADIAMSKGFAPQVATLDSHAGNLPREGAVLIVTASYNGHPPDNAKQFVDWLDQASADEVKGVRYSVFGCGDKNWAGTYQKVPAFIDETLAAKGAENIADRGEADASDDFEGTYEEWRDHMWSDVAAYFNLDIENSEDNKSTLSLQFVDSAADMPLAKMHGAFSTNVVASKELQQPGSARSTRHLEIELPKEASYQEGDHLGVIPRNYEGIVNRVTARFGLSASQQIRLEAEEEKLAHLPLAKTVSVEELLQYVELQDPVTRTQLRAMAAKTVCPPHKVELEALLEKQAYKEQVLAHRLTMLELLEKYPACEMKFSEFIALLPSIRPRYYSISSSPRVDEKQASITVSVVSGPAWSGYGEYKGIASNYLAELQEGDTITCFISTPQSEFTLPKDPETPLIMVGPGTGVAPFRGFVQARKQLKEQGQSLGEAHLYFGCRSPHEDYLYQEELENAQSEGIITLHTAFSRMPNQPKTYVQHVMEQDGKKLIELLDQGAHFYICGDGSQMAPAVEATLMKSYADVHQVSEADARLWLQQLEEKGRYAKDVWAG

SEQ ID NO: 327 - DNA, 3147 bp, synthetic construct
  misc_feature 1..3147: note = variant of P450 oxidase from Bacillus megaterium
  source 1..3147: mol_type = other DNA
atgacaattaaggaaatgcctcagcctaagacgtttggagaacttaaaaatttaccgttattaaacacagataaaccggttcaagctttgatgcgtattgcggatgaattaggagaaatctttaaattcgaggcgcctggtagcgtaacgcgctatttatcaagtcagcgtctaattaaagaagcatgcgatgaatcacgctttgataaaaacttaagtcaagcgcttaaatttgcacgtgattttgttggagacgggttagccacaagctggacgcatgaaccgaattggaaaaaagcgcataatatcttagttccaagctttagtcagcatgcaatggggcgttatcatgcgatgatggtcgatatcgccgtgcagcttgttcaaaagtgggagcgtctaaatgcagatgagcatattgaagtatcggaagacatgacacgtttaacgcttgatacaattggtctttgcggctttaactatcgctttaacagcttttaccgagatcagcctcatccatttattgtgagtatggtccgtgcactggatgaagtaatgaacaagctgcagcgagcaaatccagacgacccagcttatgatgaaaacaagcgccagtgtcaagaagatatcaaggtgatgaacgactatgtagataaaattattgcagatcgcaaagcaaggggtgaacaaagtcatgatttattaacgcagatgctaaacggaaaagatccagaaacgggtgagccgcttgatgacgggaacattcgtcagcaaattattacattcttaattgcgggacaccaaacaacaagtggtcttttatcatttgcgctgtatttcttagtgaaaaatccacatgtattacaaaaagtagcagaagaagcagcacgagttctagtagatcctgttccaagctacaaacaagtcaaacagcttaaatatgtcggcatggtcttaaacgaagcgctgcgcttatggccagtagcgcctatgttttccctatatgcaaaagaagatacggtgcttggaggagaatatcctttaacgaaaggcgacgaagtaatggttctggtgcctcagcttcaccgtgataaaacaatttggggagacgatgtggaggagttccgtccagagcgttttgaaaatccaagtgcgattccgcagcatgcgtttaaaccgtttggaaacggtcagcgtgcgtgtatcggtcagcagttcgctcttcatgaagcaacgctggtacttggtatgatgctaaaacactttgactttgaagatcatacaaactacgagctcgttattaaagaaactcggacgttaaaacctgaaggctttgtggtaaaagcaaaatcgaaaggcattccgcttggcggtattccttcacctagcactgaacagtctgctaaaaaagtacgcaaaaaggcagaaaacgctcataatacgccgctgcttgtgctatacggttcaaatgcgggaacagctgaaggaacggcgcgtgatttagcagatattgcaatgagcaaaggatttgcaccgcaggtcgcaacgcttgattcacacgccggaaatcttccgcgcgaaggagctgtattaattgtaacggcgtcttataacggtcatccgcctgataacgcaaagcaatttgtcgactggttagaccaagcgtctgctgatgaagtaaaaggcgttcgctactccgtatttggatgcggcgataaaaattgggctgggacgtatcaaaaagtgcctgcttttatcgatgaaacgcttgccgctaaaggggcagaaaacatcgctgaccgcggtgaagcagatgcaagcgacgactttgaaggcacatatgaagaatggcgtgatcatatgtggagtgacgtagcagcctactttaacctcgacattgaaaacagtgaagataataaatctactctttcacttcaatttgtcgacagcgccgcggatatgccgcttgcgaaaatgcacggtgcgttttcaacgaacgtcgtagcaagcaaagaacttcaacagccaggcagtgcacgaagcacgcgacatcttgaaattgaacttccaaaagaagcttcttatcaagaaggagatcatttaggtgttattcctcgcaactatgaaggaatagtaaaccgtgtaacagcaaggttcggcctaagcgcatcacagcaaatccgtctggaagcagaagaagaaaaattagctcatttgccactcgctaaaacagtatccgtagaagagcttctgcaatacgtggagcttcaagatcctgttacgcgcacgcagcttcgcgcaatggctgctaaaacggtctgcccgccgcataaagtagagcttgaagccttgcttgaaaagcaagcctacaaagaacaagtgctggcaaaacgtttaacaatgcttgaactgcttgaaaaatacccggcgtgtgaaatgaaattcagcgaatttatcgcccttctgccaagcatacgcccgcgctattactcgatttcttcatcacctcgtgtcgatgaaaaacaagcaagcatcacggtcagcgttgtctcaggaccggcgtggagcggatatggagaatataaaggaattgcgtcgaactatcttgccgagctgcaagaaggagatacgattacgtgctttatttccacaccgcagtcatattttacgctgccaaaagaccctgaaacgccgcttatcatggtcggaccgggaacaggcgtcgcgccgtttagaggctttgtgcaggcgcgcaaacagctaaaagaacaaggacagtcacttggagaagcacatttatacttcggctgccgttcacctcatgaagactatctgtatcaagaagagcttgaaaacgcccaaagcgaaggcatcattacgcttcataccgctttttctcgcatgccaaatcagccgaaaacatacgttcagcacgtaatggaacaagacggcaagaaattgattgaacttcttgatcaaggagcgcacttctatatttgcggagacggaagccaaatggcacctgccgttgaagcaacgcttatgaaaagctatgctgacgttcaccaagtgagtgaagcagacgctcgcttatggctgcagcagctagaagaaaaaggccgatacgcaaaagacgtgtgggctggg

SEQ ID NO: 328 - protein, 1049 aa, synthetic construct
  REGION 1..1049: note = variant of P450 oxidase from Bacillus megaterium
MTIKEMPQPKTFGELKNLPLLNTDKPVQALMRIADELGEIFKFEAPGSVTRYLSSQRLIKEACDESRFDKNLSQALKFARDFVGDGLATSWTHEPNWKKAHNILVPSFSQHAMGRYHAMMVDIAVQLVQKWERLNADEHIEVSEDMTRLTLDTIGLCGFNYRFNSFYRDQPHPFIVSMVRALDEVMNKLQRANPDDPAYDENKRQCQEDIKVMNDYVDKIIADRKARGEQSHDLLTQMLNGKDPETGEPLDDGNIRQQIITFLIAGHQTTSGLLSFALYFLVKNPHVLQKVAEEAARVLVDPVPSYKQVKQLKYVGMVLNEALRLWPVAPMFSLYAKEDTVLGGEYPLTKGDEVMVLVPQLHRDKTIWGDDVEEFRPERFENPSAIPQHAFKPFGNGQRACIGQQFALHEATLVLGMMLKHFDFEDHTNYELVIKETRTLKPEGFVVKAKSKGIPLGGIPSPSTEQSAKKVRKKAENAHNTPLLVLYGSNAGTAEGTARDLADIAMSKGFAPQVATLDSHAGNLPREGAVLIVTASYNGHPPDNAKQFVDWLDQASADEVKGVRYSVFGCGDKNWAGTYQKVPAFIDETLAAKGAENIADRGEADASDDFEGTYEEWRDHMWSDVAAYFNLDIENSEDNKSTLSLQFVDSAADMPLAKMHGAFSTNVVASKELQQPGSARSTRHLEIELPKEASYQEGDHLGVIPRNYEGIVNRVTARFGLSASQQIRLEAEEEKLAHLPLAKTVSVEELLQYVELQDPVTRTQLRAMAAKTVCPPHKVELEALLEKQAYKEQVLAKRLTMLELLEKYPACEMKFSEFIALLPSIRPRYYSISSSPRVDEKQASITVSVVSGPAWSGYGEYKGIASNYLAELQEGDTITCFISTPQSYFTLPKDPETPLIMVGPGTGVAPFRGFVQARKQLKEQGQSLGEAHLYFGCRSPHEDYLYQEELENAQSEGIITLHTAFSRMPNQPKTYVQHVMEQDGKKLIELLDQGAHFYICGDGSQMAPAVEATLMKSYADVHQVSEADARLWLQQLEEKGRYAKDVWAG

SEQ ID NO: 329 - DNA, 3147 bp, synthetic construct
  misc_feature 1..3147: note = variant of P450 oxidase from Bacillus megaterium
  source 1..3147: mol_type = other DNA
atgacaattaaggaaatgcctcagcctaagacgtttggagaacttaaaaatttaccgttattaaacacagataaaccggttcaagctttgatgcgtattgcggatgaattaggagaaatctttaaattcgaggcgcctggtagcgtaacgcgctatttatcaagtcagcgtctaattaaagaagcatgcgatgaatcacgctttgataaaaacttaagtcaagcgcttaaatttgcacgtgattttgttggagacgggttagccacaagctggacgcatgaaccgaattggaaaaaagcgcataatatcttagttccaagctttagtcagcatgcaatggggcgttatcatgcgatgatggtcgatatcgccgtgcagcttgttcaaaagtgggagcgtctaaatgcagatgagcatattgaagtatcggaagacatgacacgtttaacgcttgatacaattggtctttgcggctttaactatcgctttaacagcttttaccgagatcagcctcatccatttattgtgagtatggtccgtgcactggatgaagtaatgaacaagctgcagcgagcaaatccagacgacccagcttatgatgaaaacaagcgccagtgtcaagaagatatcaaggtgatgaacgactatgtagataaaattattgcagatcgcaaagcaaggggtgaacaaagtcatgatttattaacgcagatgctaaacggaaaagatccagaaacgggtgagccgcttgatgacgggaacattcgtcagcaaattattacattcttaattgcgggacaccaaacaacaagtggtcttttatcatttgcgctgtatttcttagtgaaaaatccacatgtattacaaaaagtagcagaagaagcagcacgagttctagtagatcctgttccaagctacaaacaagtcaaacagcttaaatatgtcggcatggtcttaaacgaagcgctgcgcttatggccagtagcgcctatgttttccctatatgcaaaagaagatacggtgcttggaggagaatatcctttaacgaaaggcgacgaagtaatggttctggtgcctcagcttcaccgtgataaaacaatttggggagacgatgtggaggagttccgtccagagcgttttgaaaatccaagtgcgattccgcagcatgcgtttaaaccgtttggaaacggtcagcgtgcgtgtatcggtcagcagttcgctcttcatgaagcaacgctggtacttggtatgatgctaaaacactttgactttgaagatcatacaaactacgagctcgttattaaagaaactcggacgttaaaacctgaaggctttgtggtaaaagcaaaatcgaaaggcattccgcttggcggtattccttcacctagcactgaacagtctgctaaaaaagtacgcaaaaaggcagaaaacgctcataatacgccgctgcttgtgctatacggttcaaatgcgggaacagctgaaggaacggcgcgtgatttagcagatattgcaatgagcaaaggatttgcaccgcaggtcgcaacgcttgattcacacgccggaaatcttccgcgcgaaggagctgtattaattgtaacggcgtcttataacggtcatccgcctgataacgcaaagcaatttgtcgactggttagaccaagcgtctgctgatgaagtaaaaggcgttcgctactccgtatttggatgcggcgataaaaattgggctgggacgtatcaaaaagtgcctgcttttatcgatgaaacgcttgccgctaaaggggcagaaaacatcgctgaccgcggtgaagcagatgcaagcgacgactttgaaggcacatatgaagaatggcgtgatcatatgtggagtgacgtagcagcctactttaacctcgacattgaaaacagtgaagataataaatctactctttcacttcaatttgtcgacagcgccgcggatatgccgcttgcgaaaatgcacggtgcgttttcaacgaacgtcgtagcaagcaaagaacttcaacagccaggcagtgcacgaagcacgcgacatcttgaaattgaacttccaaaagaagcttcttatcaagaaggagatcatttaggtgttattcctcgcaactatgaaggaatagtaaaccgtgtaacagcaaggttcggcctaagcgcatcacagcaaatccgtctggaagcagaagaagaaaaattagctcatttgccactcgctaaaacagtatccgtagaagagcttctgcaatacgtggagcttcaagatcctgttacgcgcacgcagcttcgcgcaatggctgctaaaacggtctgcccgccgcataaagtagagcttgaagccttgcttgaaaagcaagcctacaaagaacaatgtctggcaaaacgtttaacaatgcttgaactgcttgaaaaatacccggcgtgtgaaatgaaattcagcgaatttatcgcccttctgccaagcatacgcccgcgctattactcgatttcttcatcacctcgtgtcgatgaaaaacaagcaagcatcacggtcagcgttgtctcaggaccggcgtggagcggatatggagaatataaaggaattgcgtcgaactatcttgccgagctgcaagaaggagatacgattacgtgctttatttccacaccgcagtcagaatttacgctgccaaaagaccctgaaacgccgcttatcatggtcggaccgggaacaggcgtcgcgccgtttagaggctttgtgcaggcgcgcaaacagctaaaagaacaaggacagtcacttggagaagcacatttatacttcggctgccgttcacctcatgaagactatctgtatcaagaagagcttgaaaacgcccaaagcgaaggcatcattacgcttcataccgctttttctcgcatgccaaatcagccgaaaacatacgttcagcacgtaatggaacaagacggcaagaaattgattgaacttcttgatcaaggagcgcacttctatatttgcggagacggaagccaaatggcacctgccgttgaagcaacgcttatgaaaagctatgctgacgttcaccaagtgagtgaagcagacgctcgcttatggctgcagcagctagaagaaaaaggccgatacgcaaaagacgtgtgggctggg

SEQ ID NO: 330 - protein, 1049 aa, synthetic construct
  REGION 1..1049: note = variant of P450 oxidase from Bacillus megaterium
MTIKEMPQPKTFGELKNLPLLNTDKPVQALMRIADELGEIFKFEAPGSVTRYLSSQRLIKEACDESRFDKNLSQALKFARDFVGDGLATSWTHEPNWKKAHNILVPSFSQHAMGRYHAMMVDIAVQLVQKWERLNADEHIEVSEDMTRLTLDTIGLCGFNYRFNSFYRDQPHPFIVSMVRALDEVMNKLQRANPDDPAYDENKRQCQEDIKVMNDYVDKIIADRKARGEQSHDLLTQMLNGKDPETGEPLDDGNIRQQIITFLIAGHQTTSGLLSFALYFLVKNPHVLQKVAEEAARVLVDPVPSYKQVKQLKYVGMVLNEALRLWPVAPMFSLYAKEDTVLGGEYPLTKGDEVMVLVPQLHRDKTIWGDDVEEFRPERFENPSAIPQHAFKPFGNGQRACIGQQFALHEATLVLGMMLKHFDFEDHTNYELVIKETRTLKPEGFVVKAKSKGIPLGGIPSPSTEQSAKKVRKKAENAHNTPLLVLYGSNAGTAEGTARDLADIAMSKGFAPQVATLDSHAGNLPREGAVLIVTASYNGHPPDNAKQFVDWLDQASADEVKGVRYSVFGCGDKNWAGTYQKVPAFIDETLAAKGAENIADRGEADASDDFEGTYEEWRDHMWSDVAAYFNLDIENSEDNKSTLSLQFVDSAADMPLAKMHGAFSTNVVASKELQQPGSARSTRHLEIELPKEASYQEGDHLGVIPRNYEGIVNRVTARFGLSASQQIRLEAEEEKLAHLPLAKTVSVEELLQYVELQDPVTRTQLRAMAAKTVCPPHKVELEALLEKQAYKEQCLAKRLTMLELLEKYPACEMKFSEFIALLPSIRPRYYSISSSPRVDEKQASITVSVVSGPAWSGYGEYKGIASNYLAELQEGDTITCFISTPQSEFTLPKDPETPLIMVGPGTGVAPFRGFVQARKQLKEQGQSLGEAHLYFGCRSPHEDYLYQEELENAQSEGIITLHTAFSRMPNQPKTYVQHVMEQDGKKLIELLDQGAHFYICGDGSQMAPAVEATLMKSYADVHQVSEADARLWLQQLEEKGRYAKDVWAG

SEQ ID NO: 331 - DNA, 3147 bp, synthetic construct
  misc_feature 1..3147: note = variant of P450 oxidase from Bacillus megaterium
  source 1..3147: mol_type = other DNA
atgacaattaaggaaatgcctcagcctaagacgtttggagaacttaaaaatttaccgttattaaacacagataaaccggttcaagctttgatgcgtattgcggatgaattaggagaaatctttaaattcgaggcgcctggtagcgtaacgcgctatttatcaagtcagcgtctaattaaagaagcatgcgatgaatcacgctttgataaaaacttaagtcaagcgcttaaatttgcacgtgattttgttggagacgggttagccacaagctggacgcatgaaccgaattggaaaaaagcgcataatatcttagttccaagctttagtcagcatgcaatggggcgttatcatgcgatgatggtcgatatcgccgtgcagcttgttcaaaagtgggagcgtctaaatgcagatgagcatattgaagtatcggaagacatgacacgtttaacgcttgatacaattggtctttgcggctttaactatcgctttaacagcttttaccgagatcagcctcatccatttattgtgagtatggtccgtgcactggatgaagtaatgaacaagctgcagcgagcaaatccagacgacccagcttatgatgaaaacaagcgccagtgtcaagaagatatcaaggtgatgaacgactatgtagataaaattattgcagatcgcaaagcaaggggtgaacaaagtcatgatttattaacgcagatgctaaacggaaaagatccagaaacgggtgagccgcttgatgacgggaacattcgtcagcaaattattacattcttaattgcgggacaccaaacaacaagtggtcttttatcatttgcgctgtatttcttagtgaaaaatccacatgtattacaaaaagtagcagaagaagcagcacgagttctagtagatcctgttccaagctacaaacaagtcaaacagcttaaatatgtcggcatggtcttaaacgaagcgctgcgcttatggccagtagcgcctatgttttccctatatgcaaaagaagatacggtgcttggaggagaatatcctttaacgaaaggcgacgaagtaatggttctggtgcctcagcttcaccgtgataaaacaatttggggagacgatgtggaggagttccgtccagagcgttttgaaaatccaagtgcgattccgcagcatgcgtttaaaccgtttggaaacggtcagcgtgcgtgtatcggtcagcagttcgctcttcatgaagcaacgctggtacttggtatgatgctaaaacactttgactttgaagatcatacaaactacgagctcgttattaaagaaactcggacgttaaaacctgaaggctttgtggtaaaagcaaaatcgaaaggcattccgcttggcggtattccttcacctagcactgaacagtctgctaaaaaagtacgcaaaaaggcagaaaacgctcataatacgccgctgcttgtgctatacggttcaaatgcgggaacagctgaaggaacggcgcgtgatttagcagatattgcaatgagcaaaggatttgcaccgcaggtcgcaacgcttgattcacacgccggaaatcttccgcgcgaaggagctgtattaattgtaacggcgtcttataacggtcatccgcctgataacgcaaagcaatttgtcgactggttagaccaagcgtctgctgatgaagtaaaaggcgttcgctactccgtatttggatgcggcgataaaaattgggctgggacgtatcaaaaagtgcctgcttttatcgatgaaacgcttgccgctaaaggggcagaaaacatcgctgaccgcggtgaagcagatgcaagcgacgactttgaaggcacatatgaagaatggcgtgatcatatgtggagtgacgtagcagcctactttaacctcgacattgaaaacagtgaagataataaatctactctttcacttcaatttgtcgacagcgccgcggatatgccgcttgcgaaaatgcacggtgcgttttcaacgaacgtcgtagcaagcaaagaacttcaacagccaggcagtgcacgaagcacgcgacatcttgaaattgaacttccaaaagaagcttcttatcaagaaggagatcatttaggtgttattcctcgcaactatgaaggaatagtaaaccgtgtaacagcaaggttcggcctaagcgcatcacagcaaatccgtctggaagcagaagaagaaaaattagctcatttgccactcgctaaaacagtatccgtagaagagcttctgcaatacgtggagcttcaagatacggttacgcgcacgcagcttcgcgcaatggctgctaaaacggtctgcccgccgcataaagtagagcttgaagccttgcttgaaaagcaagcctacaaagaacaagtgctggcaaaacgtttaacaatgcttgaactgcttgaaaaatacccggcgtgtgaaatgaaattcagcgaatttatcgcccttctgccaagcatacgcccgcgctattactcgatttcttcatcacctcgtgtcgatgaaaaacaagcaagcatcacggtcagcgttgtctcaggaccggcgtggagcggatatggagaatataaaggaattgcgtcgaactatcttgccgagctgcaagaaggagatacgattacgtgctttatttccacaccgcagtcagaatttacgctgccaaaagaccctgaaacgccgcttatcatggtcggaccgggaacaggcgtcgcgccgtttagaggctttgtgcaggcgcgcaaacagctaaaagaacaaggacagtcacttggagaagcacatttatacttcggctgccgttcacctcatgaagactatctgtatcaagaagagcttgaaaacgcccaaagcgaaggcatcattacgcttcataccgctttttctcgcatgccaaatcagccgaaaacatacgttcagcacgtaatggaacaagacggcaagaaattgattgaacttcttgatcaaggagcgcacttctatatttgcggagacggaagccaaatggcacctgccgttgaagcaacgcttatgaaaagctatgctgacgttcaccaagtgagtgaagcagacgctcgcttatggctgcagcagctagaagaaaaaggccgatacgcaaaagacgtgtgggctggg

SEQ ID NO: 332 - protein, 1049 aa, synthetic construct
  REGION 1..1049: note = variant of P450 oxidase from Bacillus megaterium
MTIKEMPQPKTFGELKNLPLLNTDKPVQALMRIADELGEIFKFEAPGSVTRYLSSQRLIKEACDESRFDKNLSQALKFARDFVGDGLATSWTHEPNWKKAHNILVPSFSQHAMGRYHAMMVDIAVQLVQKWERLNADEHIEVSEDMTRLTLDTIGLCGFNYRFNSFYRDQPHPFIVSMVRALDEVMNKLQRANPDDPAYDENKRQCQEDIKVMNDYVDKIIADRKARGEQSHDLLTQMLNGKDPETGEPLDDGNIRQQIITFLIAGHQTTSGLLSFALYFLVKNPHVLQKVAEEAARVLVDPVPSYKQVKQLKYVGMVLNEALRLWPVAPMFSLYAKEDTVLGGEYPLTKGDEVMVLVPQLHRDKTIWGDDVEEFRPERFENPSAIPQHAFKPFGNGQRACIGQQFALHEATLVLGMMLKHFDFEDHTNYELVIKETRTLKPEGFVVKAKSKGIPLGGIPSPSTEQSAKKVRKKAENAHNTPLLVLYGSNAGTAEGTARDLADIAMSKGFAPQVATLDSHAGNLPREGAVLIVTASYNGHPPDNAKQFVDWLDQASADEVKGVRYSVFGCGDKNWAGTYQKVPAFIDETLAAKGAENIADRGEADASDDFEGTYEEWRDHMWSDVAAYFNLDIENSEDNKSTLSLQFVDSAADMPLAKMHGAFSTNVVASKELQQPGSARSTRHLEIELPKEASYQEGDHLGVIPRNYEGIVNRVTARFGLSASQQIRLEAEEEKLAHLPLAKTVSVEELLQYVELQDTVTRTQLRAMAAKTVCPPHKVELEALLEKQAYKEQVLAKRLTMLELLEKYPACEMKFSEFIALLPSIRPRYYSISSSPRVDEKQASITVSVVSGPAWSGYGEYKGIASNYLAELQEGDTITCFISTPQSEFTLPKDPETPLIMVGPGTGVAPFRGFVQARKQLKEQGQSLGEAHLYFGCRSPHEDYLYQEELENAQSEGIITLHTAFSRMPNQPKTYVQHVMEQDGKKLIELLDQGAHFYICGDGSQMAPAVEATLMKSYADVHQVSEADARLWLQQLEEKGRYAKDVWAG

SEQ ID NO: 333 - DNA, 3147 bp, synthetic construct
  misc_feature 1..3147: note = variant of P450 oxidase from Bacillus megaterium
  source 1..3147: mol_type = other DNA
atgacaattaaggaaatgcctcagcctaagacgtttggagaacttaaaaatttaccgttattaaacacagataaaccggttcaagctttgatgcgtattgcggatgaattaggagaaatctttaaattcgaggcgcctggtagcgtaacgcgctatttatcaagtcagcgtctaattaaagaagcatgcgatgaatcacgctttgataaaaacttaagtcaagcgcttaaatttgcacgtgattttgttggagacgggttagccacaagctggacgcatgaaccgaattggaaaaaagcgcataatatcttagttccaagctttagtcagcatgcaatggggcgttatcatgcgatgatggtcgatatcgccgtgcagcttgttcaaaagtgggagcgtctaaatgcagatgagcatattgaagtatcggaagacatgacacgtttaacgcttgatacaattggtctttgcggctttaactatcgctttaacagcttttaccgagatcagcctcatccatttattgtgagtatggtccgtgcactggatgaagtaatgaacaagctgcagcgagcaaatccagacgacccagcttatgatgaaaacaagcgccagtgtcaagaagatatcaaggtgatgaacgactatgtagataaaattattgcagatcgcaaagcaaggggtgaacaaagtcatgatttattaacgcagatgctaaacggaaaagatccagaaacgggtgagccgcttgatgacgggaacattcgtcagcaaattattacattcttaattgcgggacaccaaacaacaagtggtcttttatcatttgcgctgtatttcttagtgaaaaatccacatgtattacaaaaagtagcagaagaagcagcacgagttctagtagatcctgttccaagctacaaacaagtcaaacagcttaaatatgtcggcatggtcttaaacgaagcgctgcgcttatggccagtagcgcctatgttttccctatatgcaaaagaagatacggtgcttggaggagaatatcctttaacgaaaggcgacgaagtaatggttctggtgcctcagcttcaccgtgataaaacaatttggggagacgatgtggaggagttccgtccagagcgttttgaaaatccaagtgcgattccgcagcatgcgtttaaaccgtttggaaacggtcagcgtgcgtgtatcggtcagcagttcgctcttcatgaagcaacgctggtacttggtatgatgctaaaacactttgactttgaagatcatacaaactacgagctcgttattaaagaaactcggacgttaaaacctgaaggctttgtggtaaaagcaaaatcgaaaggcattccgcttggcggtattccttcacctagcactgaacagtctgctaaaaaagtacgcaaaaaggcagaaaacgctcataatacgccgctgcttgtgctatacggttcaaatgcgggaacagctgaaggaacggcgcgtgatttagcagatattgcaatgagcaaaggatttgcaccgcaggtcgcaacgcttgattcacacgccggaaatcttccgcgcgaaggagctgtattaattgtaacggcgtcttataacggtcatccgcctgataacgcaaagcaatttgtcgactggttagaccaagcgtctgctgatgaagtaaaaggcgttcgctactccgtatttggatgcggcgataaaaattgggctgggacgtatcaaaaagtgcctgcttttatcgatgaaacgcttgccgctaaaggggcagaaaacatcgctgaccgcggtgaagcagatgcaagcgacgactttgaaggcacatatgaagaatggcgtgatcatatgtggagtgacgtagcagcctactttaacctcgacattgaaaacagtgaagataataaatctactctttcacttcaatttgtcgacagcgccgcggatatgccgcttgcgaaaatgcacggtgcgttttcaacgaacgtcgtagcaagcaaagaacttcaacagccaggcagtgcacgaagcacgcgacatcttgaaattgaacttccaaaagaagcttcttatcaagaaggagatcatttaggtgttattcctcgcaactatgaaggaatagtaaaccgtgtaacagcaaggttcggcctaagcgcatcacagcaaatccgtctggaagcagaagaagaaaaattagctcatttgccactcgctaaaacagtatccgtagaagagcttctgcaatacgtggagcttcaagatcctgttacgcgcacgcagcttcgcgcaatggctgctaaaacggtctgcccgccgcataaagtagagcttgaagccttgcttgaaaagcaagcctacaaagaacaagtgctggcaaaacgtttaacaatgcttgaactgcttgaaaaatacccggcgtgtgaaatgaaattcagcgaatttatcgcccttctgccaagcatacgcccgcgctattactcgatttcttcatcacctcgtgtcgatgaaaaacaagcaagcatcacggtcacggttgtctcaggaccggcgtggagcggatatggagaatataaaggaattgcgtcgaactatcttgccgagctgcaagaaggagatacgattacgtgctttatttccacaccgcagtcagaatttacgctgccaaaagaccctgaaacgccgcttatcatggtcggaccgggaacaggcgtcgcgccgtttagaggctttgtgcaggcgcgcaaacagctaaaagaacaaggacagtcacttggagaagcacatttatacttcggctgccgttcacctcatgaagactatctgtatcaagaagagcttgaaaacgcccaaagcgaaggcatcattacgcttcataccgctttttctcgcatgccaaatcagccgaaaacatacgttcagcacgtaatggaacaagacggcaagaaattgattgaacttcttgatcaaggagcgcacttctatatttgcggagacggaagccaaatggcacctgccgttgaagcaacgcttatgaaaagctatgctgacgttcaccaagtgagtgaagcagacgctcgcttatggctgcagcagctagaagaaaaaggccgatacgcaaaagacgtgtgggctggg

SEQ ID NO: 334 - protein, 1049 aa, synthetic construct
  REGION 1..1049: note = variant of P450 oxidase from Bacillus megaterium
MTIKEMPQPKTFGELKNLPLLNTDKPVQALMRIADELGEIFKFEAPGSVTRYLSSQRLIKEACDESRFDKNLSQALKFARDFVGDGLATSWTHEPNWKKAHNILVPSFSQHAMGRYHAMMVDIAVQLVQKWERLNADEHIEVSEDMTRLTLDTIGLCGFNYRFNSFYRDQPHPFIVSMVRALDEVMNKLQRANPDDPAYDENKRQCQEDIKVMNDYVDKIIADRKARGEQSHDLLTQMLNGKDPETGEPLDDGNIRQQIITFLIAGHQTTSGLLSFALYFLVKNPHVLQKVAEEAARVLVDPVPSYKQVKQLKYVGMVLNEALRLWPVAPMFSLYAKEDTVLGGEYPLTKGDEVMVLVPQLHRDKTIWGDDVEEFRPERFENPSAIPQHAFKPFGNGQRACIGQQFALHEATLVLGMMLKHFDFEDHTNYELVIKETRTLKPEGFVVKAKSKGIPLGGIPSPSTEQSAKKVRKKAENAHNTPLLVLYGSNAGTAEGTARDLADIAMSKGFAPQVATLDSHAGNLPREGAVLIVTASYNGHPPDNAKQFVDWLDQASADEVKGVRYSVFGCGDKNWAGTYQKVPAFIDETLAAKGAENIADRGEADASDDFEGTYEEWRDHMWSDVAAYFNLDIENSEDNKSTLSLQFVDSAADMPLAKMHGAFSTNVVASKELQQPGSARSTRHLEIELPKEASYQEGDHLGVIPRNYEGIVNRVTARFGLSASQQIRLEAEEEKLAHLPLAKTVSVEELLQYVELQDPVTRTQLRAMAAKTVCPPHKVELEALLEKQAYKEQVLAKRLTMLELLEKYPACEMKFSEFIALLPSIRPRYYSISSSPRVDEKQASITVTVVSGPAWSGYGEYKGIASNYLAELQEGDTITCFISTPQSEFTLPKDPETPLIMVGPGTGVAPFRGFVQARKQLKEQGQSLGEAHLYFGCRSPHEDYLYQEELENAQSEGIITLHTAFSRMPNQPKTYVQHVMEQDGKKLIELLDQGAHFYICGDGSQMAPAVEATLMKSYADVHQVSEADARLWLQQLEEKGRYAKDVWAG

SEQ ID NO: 335 - DNA, 3147 bp, synthetic construct
  misc_feature 1..3147: note = variant of P450 oxidase from Bacillus megaterium
  source 1..3147: mol_type = other DNA
atgacaattaaggaaatgcctcagcctaagacgtttggagaacttaaaaatttaccgttattaaacacagataaaccggttcaagctttgatgcgtattgcggatgaattaggagaaatctttaaattcgaggcgcctggtagcgtaacgcgctatttatcaagtcagcgtctaattaaagaagcatgcgatgaatcacgctttgataaaaacttaagtcaagcgcttaaatttgcacgtgattttgttggagacgggttagccacaagctggacgcatgaaccgaattggaaaaaagcgcataatatcttagttccaagctttagtcagcatgcaatggggcgttatcatgcgatgatggtcgatatcgccgtgcagcttgttcaaaagtgggagcgtctaaatgcagatgagcatattgaagtatcggaagacatgacacgtttaacgcttgatacaattggtctttgcggctttaactatcgctttaacagcttttaccgagatcagcctcatccatttattgtgagtatggtccgtgcactggatgaagtaatgaacaagctgcagcgagcaaatccagacgacccagcttatgatgaaaacaagcgccagtgtcaagaagatatcaaggtgatgaacgactatgtagataaaattattgcagatcgcaaagcaaggggtgaacaaagtcatgatttattaacgcagatgctaaacggaaaagatccagaaacgggtgagccgcttgatgacgggaacattcgtcagcaaattattacattcttaattgcgggacaccaaacaacaagtggtcttttatcatttgcgctgtatttcttagtgaaaaatccacatgtattacaaaaagtagcagaagaagcagcacgagttctagtagatcctgttccaagctacaaacaagtcaaacagcttaaatatgtcggcatggtcttaaacgaagcgctgcgcttatggccagtagcgcctatgttttccctatatgcaaaagaagatacggtgcttggaggagaatatcctttaacgaaaggcgacgaagtaatggttctggtgcctcagcttcaccgtgataaaacaatttggggagacgatgtggaggagttccgtccagagcgttttgaaaatccaagtgcgattccgcagcatgcgtttaaaccgtttggaaacggtcagcgtgcgtgtatcggtcagcagttcgctcttcatgaagcaacgctggtacttggtatgatgctaaaacactttgactttgaagatcatacaaactacgagctcgttattaaagaaactcggacgttaaaacctgaaggctttgtggtaaaagcaaaatcgaaaggcattccgcttggcggtattccttcacctagcactgaacagtctgctaaaaaagtacgcaaaaaggcagaaaacgctcataatacgccgctgcttgtgctatacggttcaaatgcgggaacagctgaaggaacggcgcgtgatttagcagatattgcaatgagcaaaggatttgcaccgcaggtcgcaacgcttgattcacacgccggaaatcttccgcgcgaaggagctgtattaattgtaacggcgtcttataacggtcatccgcctgataacgcaaagcaatttgtcgactggttagaccaagcgtctgctgatgaagtaaaaggcgttcgctactccgtatttggatgcggcgataaaaattgggctgggacgtatcaaaaagtgcctgcttttatcgatgaaacgcttgccgctaaaggggcagaaaacatcgctgaccgcggtgaagcagatgcaagcgacgactttgaaggcacatatgaagaatggcgtgatcatatgtggagtgacgtagcagcctactttaacctcgacattgaaaacagtgaagataataaatctactctttcacttcaatttgtcgacagcgccgcggatatgccgcttgcgaaaatgcacggtgcgttttcaacgaacgtcgtagcaagcaaagaacttcaacagccaggcagtgcacgaagcacgcgacatcttgaaattgaacttccaaaagaagcttcttatcaagaaggagatcatttaggtgttattcctcgcaactatgaaggaatagtaaaccgtgtaacagcaaggttcggcctaagcgcatcacagcaaatccgtctggaagcagaagaagaaaaattagctcatttgccactcgctaaaacagtatccgtagaagagcttctgcaatacgtggagcttcaagatcctgttacgcgcacgcagcttcgcgcaatggctgctaaaacggtctgcccgccgcataaagtagagcttgaagccttgcttgaaaagcaagcctacaaagaacaagtgctggcaaaacgtttaacaatgcttgaactgcttgaaaaatacccggcgtgtgaaatgaaattcagcgaatttatcgcccttctgccaagcatacgcccgcgctattactcgatttcttcatcacctcgtgtcgatgaaaaacaagcaagcatcacggtcagcgttgtcgggggaccggcgtggagcggatatggagaatataaaggaattgcgtcgaactatcttgccgagctgcaagaaggagatacgattacgtgctttatttccacaccgcagtcagaatttacgctgccaaaagaccctgaaacgccgcttatcatggtcggaccgggaacaggcgtcgcgccgtttagaggctttgtgcaggcgcgcaaacagctaaaagaacaaggacagtcacttggagaagcacatttatacttcggctgccgttcacctcatgaagactatctgtatcaagaagagcttgaaaacgcccaaagcgaaggcatcattacgcttcataccgctttttctcgcatgccaaatcagccgaaaacatacgttcagcacgtaatggaacaagacggcaagaaattgattgaacttcttgatcaaggagcgcacttctatatttgcggagacggaagccaaatggcacctgccgttgaagcaacgcttatgaaaagctatgctgacgttcaccaagtgagtgaagcagacgctcgcttatggctgcagcagctagaagaaaaaggccgatacgcaaaagacgtgtgggctggg

SEQ ID NO: 336 - protein, 1049 aa, synthetic construct
  REGION 1..1049: note = variant of P450 oxidase from Bacillus megaterium
MTIKEMPQPKTFGELKNLPLLNTDKPVQALMRIADELGEIFKFEAPGSVTRYLSSQRLIKEACDESRFDKNLSQALKFARDFVGDGLATSWTHEPNWKKAHNILVPSFSQHAMGRYHAMMVDIAVQLVQKWERLNADEHIEVSEDMTRLTLDTIGLCGFNYRFNSFYRDQPHPFIVSMVRALDEVMNKLQRANPDDPAYDENKRQCQEDIKVMNDYVDKIIADRKARGEQSHDLLTQMLNGKDPETGEPLDDGNIRQQIITFLIAGHQTTSGLLSFALYFLVKNPHVLQKVAEEAARVLVDPVPSYKQVKQLKYVGMVLNEALRLWPVAPMFSLYAKEDTVLGGEYPLTKGDEVMVLVPQLHRDKTIWGDDVEEFRPERFENPSAIPQHAFKPFGNGQRACIGQQFALHEATLVLGMMLKHFDFEDHTNYELVIKETRTLKPEGFVVKAKSKGIPLGGIPSPSTEQSAKKVRKKAENAHNTPLLVLYGSNAGTAEGTARDLADIAMSKGFAPQVATLDSHAGNLPREGAVLIVTASYNGHPPDNAKQFVDWLDQASADEVKGVRYSVFGCGDKNWAGTYQKVPAFIDETLAAKGAENIADRGEADASDDFEGTYEEWRDHMWSDVAAYFNLDIENSEDNKSTLSLQFVDSAADMPLAKMHGAFSTNVVASKELQQPGSARSTRHLEIELPKEASYQEGDHLGVIPRNYEGIVNRVTARFGLSASQQIRLEAEEEKLAHLPLAKTVSVEELLQYVELQDPVTRTQLRAMAAKTVCPPHKVELEALLEKQAYKEQVLAKRLTMLELLEKYPACEMKFSEFIALLPSIRPRYYSISSSPRVDEKQASITVSVVGGPAWSGYGEYKGIASNYLAELQEGDTITCFISTPQSEFTLPKDPETPLIMVGPGTGVAPFRGFVQARKQLKEQGQSLGEAHLYFGCRSPHEDYLYQEELENAQSEGIITLHTAFSRMPNQPKTYVQHVMEQDGKKLIELLDQGAHFYICGDGSQMAPAVEATLMKSYADVHQVSEADARLWLQQLEEKGRYAKDVWAG

SEQ ID NO: 337 - DNA, 3147 bp, synthetic construct
  misc_feature 1..3147: note = variant of P450 oxidase from Bacillus megaterium
  source 1..3147: mol_type = other DNA
atgacaattaaggaaatgcctcagcctaagacgtttggagaacttaaaaatttaccgttattaaacacagataaaccggttcaagctttgatgcgtattgcggatgaattaggagaaatctttaaattcgaggcgcctggtagcgtaacgcgctatttatcaagtcagcgtctaattaaagaagcatgcgatgaatcacgctttgataaaaacttaagtcaagcgcttaaatttgcacgtgattttgttggagacgggttagccacaagctggacgcatgaaccgaattggaaaaaagcgcataatatcttagttccaagctttagtcagcatgcaatggggcgttatcatgcgatgatggtcgatatcgccgtgcagcttgttcaaaagtgggagcgtctaaatgcagatgagcatattgaagtatcggaagacatgacacgtttaacgcttgatacaattggtctttgcggctttaactatcgctttaacagcttttaccgagatcagcctcatccatttattgtgagtatggtccgtgcactggatgaagtaatgaacaagctgcagcgagcaaatccagacgacccagcttatgatgaaaacaagcgccagtgtcaagaagatatcaaggtgatgaacgactatgtagataaaattattgcagatcgcaaagcaaggggtgaacaaagtcatgatttattaacgcagatgctaaacggaaaagatccagaaacgggtgagccgcttgatgacgggaacattcgtcagcaaattattacattcttaattgcgggacaccaaacaacaagtggtcttttatcatttgcgctgtatttcttagtgaaaaatccacatgtattacaaaaagtagcagaagaagcagcacgagttctagtagatcctgttccaagctacaaacaagtcaaacagcttaaatatgtcggcatggtcttaaacgaagcgctgcgcttatggccagtagcgcctatgttttccctatatgcaaaagaagatacggtgcttggaggagaatatcctttaacgaaaggcgacgaagtaatggttctggtgcctcagcttcaccgtgataaaacaatttggggagacgatgtggaggagttccgtccagagcgttttgaaaatccaagtgcgattccgcagcatgcgtttaaaccgtttggaaacggtcagcgtgcgtgtatcggtcagcagttcgctcttcatgaagcaacgctggtacttggtatgatgctaaaacactttgactttgaagatcatacaaactacgagctcgttattaaagaaactcggacgttaaaacctgaaggctttgtggtaaaagcaaaatcgaaaggcattccgcttggcggtattccttcacctagcactgaacagtctgctaaaaaagtacgcaaaaaggcagaaaacgctcataatacgccgctgcttgtgctatacggttcaaatgcgggaacagctgaaggaacggcgcgtgatttagcagatattgcaatgagcaaaggatttgcaccgcaggtcgcaacgcttgattcacacgccggaaatcttccgcgcgaaggagctgtattaattgtaacggcgtcttataacggtcatccgcctgataacgcaaagcaatttgtcgactggttagaccaagcgtctgctgatgaagtaaaaggcgttcgctactccgtatttggatgcggcgataaaaattgggctgggacgtatcaaaaagtgcctgcttttatcgatgaaacgcttgccgctaaaggggcagaaaacatcgctgaccgcggtgaagcagatgcaagcgacgactttgaaggcacatatgaagaatggcgtgatcatatgtggagtgacgtagcagcctactttaacctcgacattgaaaacagtgaagataataaatctactctttcacttcaatttgtcgacagcgccgcggatatgccgcttgcgaaaatgcacggtgcgttttcaacgaacgtcgtagcaagcaaagaacttcaacagccaggcagtgcacgaagcacgcgacatcttgaaattgaacttccaaaagaagcttcttatcaagaaggagatcatttaggtgttattcctcgcaactatgaaggaatagtaaaccgtgtaacagcaaggttcggcctaagcgcatcacagcaaatccgtctggaagcagaagaagaaaaattagctcatttgccactcgctaaaacagtatccgtagaagagcttctgcaatacgtggagcttcaagatcctgttacgcgcacgcagcttcgcgcaatggctgctaaaacggtctgcccgccgcataaagtagagcttgaagccttgcttgaaaagcaagcctacaaagaacaagtgctggcaaaacgtttaacaatgcttgaactgcttgaaaaatacccggcgtgtgaaatgaaattcagcgaatttatcgcccttctgccaagcatacgcccgcgctattactcgatttcttcatcacctcgtgtcgatgaaaaacaagcaagcatcacggtcagcgttgtctcaggaccggcgtggagcggatatggagaatataaaggaattgcgtcgaactatcttgccgagctgcaagaaggagatacgattacgtgctttatttccacaccgcagtcagaatttacgctgccaaaagaccctgaaacgccgcttatcatggtcggaccgggaacaggcgtcgcgccgtttagaggctttgtgcaggcgcgcaaacagctaaaagaacaaggacagtcacttggagaagcacatttatacttcggctgccgttcacctcatgaagactatctgtatcaagaagagcttgaaaacgcccaaagcgaaggcatcattacgcttcataccgctttttctcgcatgccaaatcagccgaaaacatacgttcagcacgtaatggaacaagacggcaagaaattgattgaacttcttgatcaaggagcgcacttctatatttgcggagactggagccaaatggcacctgccgttgaagcaacgcttatgaaaagctatgctgacgttcaccaagtgagtgaagcagacgctcgcttatggctgcagcagctagaagaaaaaggccgatacgcaaaagacgtgtgggctggg

SEQ ID NO: 338 - protein, 1049 aa, synthetic construct
  REGION 1..1049: note = variant of P450 oxidase from Bacillus megaterium
MTIKEMPQPKTFGELKNLPLLNTDKPVQALMRIADELGEIFKFEAPGSVTRYLSSQRLIKEACDESRFDKNLSQALKFARDFVGDGLATSWTHEPNWKKAHNILVPSFSQHAMGRYHAMMVDIAVQLVQKWERLNADEHIEVSEDMTRLTLDTIGLCGFNYRFNSFYRDQPHPFIVSMVRALDEVMNKLQRANPDDPAYDENKRQCQEDIKVMNDYVDKIIADRKARGEQSHDLLTQMLNGKDPETGEPLDDGNIRQQIITFLIAGHQTTSGLLSFALYFLVKNPHVLQKVAEEAARVLVDPVPSYKQVKQLKYVGMVLNEALRLWPVAPMFSLYAKEDTVLGGEYPLTKGDEVMVLVPQLHRDKTIWGDDVEEFRPERFENPSAIPQHAFKPFGNGQRACIGQQFALHEATLVLGMMLKHFDFEDHTNYELVIKETRTLKPEGFVVKAKSKGIPLGGIPSPSTEQSAKKVRKKAENAHNTPLLVLYGSNAGTAEGTARDLADIAMSKGFAPQVATLDSHAGNLPREGAVLIVTASYNGHPPDNAKQFVDWLDQASADEVKGVRYSVFGCGDKNWAGTYQKVPAFIDETLAAKGAENIADRGEADASDDFEGTYEEWRDHMWSDVAAYFNLDIENSEDNKSTLSLQFVDSAADMPLAKMHGAFSTNVVASKELQQPGSARSTRHLEIELPKEASYQEGDHLGVIPRNYEGIVNRVTARFGLSASQQIRLEAEEEKLAHLPLAKTVSVEELLQYVELQDPVTRTQLRAMAAKTVCPPHKVELEALLEKQAYKEQVLAKRLTMLELLEKYPACEMKFSEFIALLPSIRPRYYSISSSPRVDEKQASITVSVVSGPAWSGYGEYKGIASNYLAELQEGDTITCFISTPQSEFTLPKDPETPLIMVGPGTGVAPFRGFVQARKQLKEQGQSLGEAHLYFGCRSPHEDYLYQEELENAQSEGIITLHTAFSRMPNQPKTYVQHVMEQDGKKLIELLDQGAHFYICGDWSQMAPAVEATLMKSYADVHQVSEADARLWLQQLEEKGRYAKDVWAG

SEQ ID NO: 339 - DNA, 3147 bp, synthetic construct
  misc_feature 1..3147: note = variant of P450 oxidase from Bacillus megaterium
  source 1..3147: mol_type = other DNA
atgacaattaaggaaatgcctcagcctaagacgtttggagaacttaaaaatttaccgttattaaacacagataaaccggttcaagctttgatgcgtattgcggatgaattaggagaaatctttaaattcgaggcgcctggtagcgtaacgcgctatttatcaagtcagcgtctaattaaagaagcatgcgatgaatcacgctttgataaaaacttaagtcaagcgcttaaatttgcacgtgattttgttggagacgggttagccacaagctggacgcatgaaccgaattggaaaaaagcgcataatatcttagttccaagctttagtcagcatgcaatggggcgttatcatgcgatgatggtcgatatcgccgtgcagcttgttcaaaagtgggagcgtctaaatgcagatgagcatattgaagtatcggaagacatgacacgtttaacgcttgatacaattggtctttgcggctttaactatcgctttaacagcttttaccgagatcagcctcatccatttattgtgagtatggtccgtgcactggatgaagtaatgaacaagctgcagcgagcaaatccagacgacccagcttatgatgaaaacaagcgccagtgtcaagaagatatcaaggtgatgaacgactatgtagataaaattattgcagatcgcaaagcaaggggtgaacaaagtcatgatttattaacgcagatgctaaacggaaaagatccagaaacgggtgagccgcttgatgacgggaacattcgtcagcaaattattacattcttaattgcgggacaccaaacaacaagtggtcttttatcatttgcgctgtatttcttagtgaaaaatccacatgtattacaaaaagtagcagaagaagcagcacgagttctagtagatcctgttccaagctacaaacaagtcaaacagcttaaatatgtcggcatggtcttaaacgaagcgctgcgcttatggccagtagcgcctatgttttccctatatgcaaaagaagatacggtgcttggaggagaatatcctttaacgaaaggcgacgaagtaatggttctggtgcctcagcttcaccgtgataaaacaatttggggagacgatgtggaggagttccgtccagagcgttttgaaaatccaagtgcgattccgcagcatgcgtttaaaccgtttggaaacggtcagcgtgcgtgtatcggtcagcagttcgctcttcatgaagcaacgctggtacttggtatgatgctaaaacactttgactttgaagatcatacaaactacgagctcgttattaaagaaactcggacgttaaaacctgaaggctttgtggtaaaagcaaaatcgaaaggcattccgcttggcggtattccttcacctagcactgaacagtctgctaaaaaagtacgcaaaaaggcagaaaacgctcataatacgccgctgcttgtgctatacggttcaaatgcgggaacagctgaaggaacggcgcgtgatttagcagatattgcaatgagcaaaggatttgcaccgcaggtcgcaacgcttgattcacacgccggaaatcttccgcgcgaaggagctgtattaattgtaacggcgtcttataacggtcatccgcctgataacgcaaagcaatttgtcgactggttagaccaagcgtctgctgatgaagtaaaaggcgttcgctactccgtatttggatgcggcgataaaaattgggctgggacgtatcaaaaagtgcctgcttttatcgatgaaacgcttgccgctaaaggggcagaaaacatcgctgaccgcggtgaagcagatgcaagcgacgactttgaaggcacatatgaagaatggcgtgatcatatgtggagtgacgtagcagcctactttaacctcgacattgaaaacagtgaagataataaatctactctttcacttcaatttgtcgacagcgccgcggatatgccgcttgcgaaaatgcacggtgcgttttcaacgaacgtcgtagcaagcaaagaacttcaacagccaggcagtgcacgaagcacgcgacatcttgaaattgaacttccaaaagaagcttcttatcaagaaggaaggcatttaggtgttattcctcgcaactatgaaggaatagtaaaccgtgtaacagcaaggttcggcctaagcgcatcacagcaaatccgtctggaagcagaagaagaaaaattagctcatttgccactcgctaaaacagtatccgtagaagagcttctgcaatacgtggagcttcaagatcctgttacgcgcacgcagcttcgcgcaatggctgctaaaacggtctgcccgccgcataaagtagagcttgaagccttgcttgaaaagcaagcctacaaagaacaagtgctggcaaaacgtttaacaatgcttgaactgcttgaaaaatacccggcgtgtgaaatgaaattcagcgaatttatcgcccttctgccaagcatacgcccgcgctattactcgatttcttcatcacctcgtgtcgatgaaaaacaagcaagcatcacggtcagcgttgtctcaggaccggcgtggagcggatatggagaatataaaggaattgcgtcgaactatcttgccgagctgcaagaaggagatacgattacgtgctttatttccacaccgcagtcagaatttacgctgccaaaagaccctgaaacgccgcttatcatggtcggaccgggaacaggcgtcgcgccgtttagaggctttgtgcaggcgcgcaaacagctaaaagaacaaggacagtcacttggagaagcacatttatacttcggctgccgttcacctcatgaagactatctgtatcaagaagagcttgaaaacgcccaaagcgaaggcatcattacgcttcataccgctttttctcgcatgccaaatcagccgaaaacatacgttcagcacgtaatggaacaagacggcaagaaattgattgaacttcttgatcaaggagcgcacttctatatttgcggagacggaagccaaatggcacctgccgttgaagcaacgcttatgaaaagctatgctgacgttcaccaagtgagtgaagcagacgctcgcttatggctgcagcagctagaagaaaaaggccgatacgcaaaagacgtgtgggctggg

SEQ ID NO: 340 - protein, 1049 aa, synthetic construct
  REGION 1..1049: note = variant of P450 oxidase from Bacillus megaterium
MTIKEMPQPKTFGELKNLPLLNTDKPVQALMRIADELGEIFKFEAPGSVTRYLSSQRLIKEACDESRFDKNLSQALKFARDFVGDGLATSWTHEPNWKKAHNILVPSFSQHAMGRYHAMMVDIAVQLVQKWERLNADEHIEVSEDMTRLTLDTIGLCGFNYRFNSFYRDQPHPFIVSMVRALDEVMNKLQRANPDDPAYDENKRQCQEDIKVMNDYVDKIIADRKARGEQSHDLLTQMLNGKDPETGEPLDDGNIRQQIITFLIAGHQTTSGLLSFALYFLVKNPHVLQKVAEEAARVLVDPVPSYKQVKQLKYVGMVLNEALRLWPVAPMFSLYAKEDTVLGGEYPLTKGDEVMVLVPQLHRDKTIWGDDVEEFRPERFENPSAIPQHAFKPFGNGQRACIGQQFALHEATLVLGMMLKHFDFEDHTNYELVIKETRTLKPEGFVVKAKSKGIPLGGIPSPSTEQSAKKVRKKAENAHNTPLLVLYGSNAGTAEGTARDLADIAMSKGFAPQVATLDSHAGNLPREGAVLIVTASYNGHPPDNAKQFVDWLDQASADEVKGVRYSVFGCGDKNWAGTYQKVPAFIDETLAAKGAENIADRGEADASDDFEGTYEEWRDHMWSDVAAYFNLDIENSEDNKSTLSLQFVDSAADMPLAKMHGAFSTNVVASKELQQPGSARSTRHLEIELPKEASYQEGRHLGVIPRNYEGIVNRVTARFGLSASQQIRLEAEEEKLAHLPLAKTVSVEELLQYVELQDPVTRTQLRAMAAKTVCPPHKVELEALLEKQAYKEQVLAKRLTMLELLEKYPACEMKFSEFIALLPSIRPRYYSISSSPRVDEKQASITVSVVSGPAWSGYGEYKGIASNYLAELQEGDTITCFISTPQSEFTLPKDPETPLIMVGPGTGVAPFRGFVQARKQLKEQGQSLGEAHLYFGCRSPHEDYLYQEELENAQSEGIITLHTAFSRMPNQPKTYVQHVMEQDGKKLIELLDQGAHFYICGDGSQMAPAVEATLMKSYADVHQVSEADARLWLQQLEEKGRYAKDVWAG

SEQ ID NO: 341 - DNA, 3147 bp, synthetic construct
  misc_feature 1..3147: note = variant of P450 oxidase from Bacillus megaterium
  source 1..3147: mol_type = other DNA
atgacaattaaggaaatgcctcagcctaagacgtttggagaacttaaaaatttaccgttattaaacacagataaaccggttcaagctttgatgcgtattgcggatgaattaggagaaatctttaaattcgaggcgcctggtagcgtaacgcgctatttatcaagtcagcgtctaattaaagaagcatgcgatgaatcacgctttgataaaaacttaagtcaagcgcttaaatttgcacgtgattttgttggagacgggttagccacaagctggacgcatgaaccgaattggaaaaaagcgcataatatcttagttccaagctttagtcagcatgcaatggggcgttatcatgcgatgatggtcgatatcgccgtgcagcttgttcaaaagtgggagcgtctaaatgcagatgagcatattgaagtatcggaagacatgacacgtttaacgcttgatacaattggtctttgcggctttaactatcgctttaacagcttttaccgagatcagcctcatccatttattgtgagtatggtccgtgcactggatgaagtaatgaacaagctgcagcgagcaaatccagacgacccagcttatgatgaaaacaagcgccagtgtcaagaagatatcaaggtgatgaacgactatgtagataaaattattgcagatcgcaaagcaaggggtgaacaaagtcatgatttattaacgcagatgctaaacggaaaagatccagaaacgggtgagccgcttgatgacgggaacattcgtcagcaaattattacattcttaattgcgggacaccaaacaacaagtggtcttttatcatttgcgctgtatttcttagtgaaaaatccacatgtattacaaaaagtagcagaagaagcagcacgagttctagtagatcctgttccaagctacaaacaagtcaaacagcttaaatatgtcggcatggtcttaaacgaagcgctgcgcttatggccagtagcgcctatgttttccctatatgcaaaagaagatacggtgcttggaggagaatatcctttaacgaaaggcgacgaagtaatggttctggtgcctcagcttcaccgtgataaaacaatttggggagacgatgtggaggagttccgtccagagcgttttgaaaatccaagtgcgattccgcagcatgcgtttaaaccgtttggaaacggtcagcgtgcgtgtatcggtcagcagttcgctcttcatgaagcaacgctggtacttggtatgatgctaaaacactttgactttgaagatcatacaaactacgagctcgttattaaagaaactcggacgttaaaacctgaaggctttgtggtaaaagcaaaatcgaaaggcattccgcttggcggtattccttcacctagcactgaacagtctgctaaaaaagtacgcaaaaaggcagaaaacgctcataatacgccgctgcttgtgctatacggttcaaatgcgggaacagctgaaggaacggcgcgtgatttagcagatattgcaatgagcaaaggatttgcaccgcaggtcgcaacgcttgattcacacgccggaaatcttccgcgcgaaggagctgtattaattgtaacggcgtcttataacggtcatccgcctgataacgcaaagcaatttgtcgactggttagaccaagcgtctgctgatgaagtaaaaggcgttcgctactccgtatttggatgcggcgataaaaattgggctgggacgtatcaaaaagtgcctgcttttatcgatgaaacgcttgccgctaaaggggcagaaaacatcgctgaccgcggtgaagcagatgcaagcgacgactttgaaggcacatatgaagaatggcgtgatcatatgtggagtgacgtagcagcctactttaacctcgacattgaaaacagtgaagataataaatctactctttcacttcaatttgtcgacagcgccgcggatatgccgcttgcgaaaatgcacggtgcgttttcaacgaacgtcgtagcaagcaaagaacttcaacagccaggcagtgcacgaagcacgcgacatcttgaaattgaacttccaaaagaagcttcttatcaagaaggagatcatttaggtgttattcctcgcaactatgaaggaatagtaaaccgtgtaacagcaaggttcggcctaagcgcatcacagcaaatccgtctggaagcagaagaagaaaaattagctcatttgccactcgctaaaacagtatccgtagaagagcttctgcaatacgtggagcttcaagatcctgttacgcgcacgcagcttcgcgcaatggctgctaaaacggtctgcccgccgcataaagtagagcttgaagccttgcttgaaaagcaagcctacaaagaacaagtgctgcataaacgtttaacaatgcttgaactgcttgaaaaatacccggcgtgtgaaatgaaattcagcgaatttatcgcccttctgccaagcatacgcccgcgctattactcgatttcttcatcacctcgtgtcgatgaaaaacaagcaagcatcacggtcagcgttgtctcaggaccggcgtggagcggatatggagaatataaaggaattgcgtcgaactatcttgccgagctgcaagaaggagatacgattacgtgctttatttccacaccgcagtcagaatttacgctgccaaaagaccctgaaacgccgcttatcatggtcggaccgggaacaggcgtcgcgccgtttagaggctttgtgcaggcgcgcaaacagctaaaagaacaaggacagtcacttggagaagcacatttatacttcggctgccgttcacctcatgaagactatctgtatcaagaagagcttgaaaacgcccaaagcgaaggcatcattacgcttcataccgctttttctcgcatgccaaatcagccgaaaacatacgttcagcacgtaatggaacaagacggcaagaaattgattgaacttcttgatcaaggagcgcacttctatatttgcggagacggaagccaaatggcacctgccgttgaagcaacgcttatgaaaagctatgctgacgttcaccaagtgagtgaagcagacgctcgcttatggctgcagcagctagaagaaaaaggccgatacgcaaaagacgtgtgggctggg

SEQ ID NO: 342 - protein, 1049 aa, synthetic construct
  REGION 1..1049: note = variant of P450 oxidase from Bacillus megaterium
MTIKEMPQPKTFGELKNLPLLNTDKPVQALMRIADELGEIFKFEAPGSVTRYLSSQRLIKEACDESRFDKNLSQALKFARDFVGDGLATSWTHEPNWKKAHNILVPSFSQHAMGRYHAMMVDIAVQLVQKWERLNADEHIEVSEDMTRLTLDTIGLCGFNYRFNSFYRDQPHPFIVSMVRALDEVMNKLQRANPDDPAYDENKRQCQEDIKVMNDYVDKIIADRKARGEQSHDLLTQMLNGKDPETGEPLDDGNIRQQIITFLIAGHQTTSGLLSFALYFLVKNPHVLQKVAEEAARVLVDPVPSYKQVKQLKYVGMVLNEALRLWPVAPMFSLYAKEDTVLGGEYPLTKGDEVMVLVPQLHRDKTIWGDDVEEFRPERFENPSAIPQHAFKPFGNGQRACIGQQFALHEATLVLGMMLKHFDFEDHTNYELVIKETRTLKPEGFVVKAKSKGIPLGGIPSPSTEQSAKKVRKKAENAHNTPLLVLYGSNAGTAEGTARDLADIAMSKGFAPQVATLDSHAGNLPREGAVLIVTASYNGHPPDNAKQFVDWLDQASADEVKGVRYSVFGCGDKNWAGTYQKVPAFIDETLAAKGAENIADRGEADASDDFEGTYEEWRDHMWSDVAAYFNLDIENSEDNKSTLSLQFVDSAADMPLAKMHGAFSTNVVASKELQQPGSARSTRHLEIELPKEASYQEGDHLGVIPRNYEGIVNRVTARFGLSASQQIRLEAEEEKLAHLPLAKTVSVEELLQYVELQDPVTRTQLRAMAAKTVCPPHKVELEALLEKQAYKEQVLHKRLTMLELLEKYPACEMKFSEFIALLPSIRPRYYSISSSPRVDEKQASITVSVVSGPAWSGYGEYKGIASNYLAELQEGDTITCFISTPQSEFTLPKDPETPLIMVGPGTGVAPFRGFVQARKQLKEQGQSLGEAHLYFGCRSPHEDYLYQEELENAQSEGIITLHTAFSRMPNQPKTYVQHVMEQDGKKLIELLDQGAHFYICGDGSQMAPAVEATLMKSYADVHQVSEADARLWLQQLEEKGRYAKDVWAG

SEQ ID NO: 343 - DNA, 3147 bp, synthetic construct
  misc_feature 1..3147: note = variant of P450 oxidase from Bacillus megaterium
  source 1..3147: mol_type = other DNA
atgacaattaaggaaatgcctcagcctaagacgtttggagaacttaaaaatttaccgttattaaacacagataaaccggttcaagctttgatgcgtattgcggatgaattaggagaaatctttaaattcgaggcgcctggtagcgtaacgcgctatttatcaagtcagcgtctaattaaagaagcatgcgatgaatcacgctttgataaaaacttaagtcaagcgcttaaatttgcacgtgattttgttggagacgggttagccacaagctggacgcatgaaccgaattggaaaaaagcgcataatatcttagttccaagctttagtcagcatgcaatggggcgttatcatgcgatgatggtcgatatcgccgtgcagcttgttcaaaagtgggagcgtctaaatgcagatgagcatattgaagtatcggaagacatgacacgtttaacgcttgatacaattggtctttgcggctttaactatcgctttaacagcttttaccgagatcagcctcatccatttattgtgagtatggtccgtgcactggatgaagtaatgaacaagctgcagcgagcaaatccagacgacccagcttatgatgaaaacaagcgccagtgtcaagaagatatcaaggtgatgaacgactatgtagataaaattattgcagatcgcaaagcaaggggtgaacaaagtcatgatttattaacgcagatgctaaacggaaaagatccagaaacgggtgagccgcttgatgacgggaacattcgtcagcaaattattacattcttaattgcgggacaccaaacaacaagtggtcttttatcatttgcgctgtatttcttagtgaaaaatccacatgtattacaaaaagtagcagaagaagcagcacgagttctagtagatcctgttccaagctacaaacaagtcaaacagcttaaatatgtcggcatggtcttaaacgaagcgctgcgcttatggccagtagcgcctatgttttccctatatgcaaaagaagatacggtgcttggaggagaatatcctttaacgaaaggcgacgaagtaatggttctggtgcctcagcttcaccgtgataaaacaatttggggagacgatgtggaggagttccgtccagagcgttttgaaaatccaagtgcgattccgcagcatgcgtttaaaccgtttggaaacggtcagcgtgcgtgtatcggtcagcagttcgctcttcatgaagcaacgctggtacttggtatgatgctaaaacactttgactttgaagatcatacaaactacgagctcgttattaaagaaactcggacgttaaaacctgaaggctttgtggtaaaagcaaaatcgaaaggcattccgcttggcggtattccttcacctagcactgaacagtctgctaaaaaagtacgcaaaaaggcagaaaacgctcataatacgccgctgcttgtgctatacggttcaaatgcgggaacagctgaaggaacggcgcgtgatttagcagatattgcaatgagcaaaggatttgcaccgcaggtcgcaacgcttgattcacacgccggaaatcttccgcgcgaaggagctgtattaattgtaacggcgtcttataacggtcatccgcctgataacgcaaagcaatttgtcgactggttagaccaagcgtctgctgatgaagtaaaaggcgttcgctactccgtatttggatgcggcgataaaaattgggctgggacgtatcaaaaagtgcctgcttttatcgatgaaacgcttgccgctaaaggggcagaaaacatcgctgaccgcggtgaagcagatgcaagcgacgactttgaaggcacatatgaagaatggcgtgatcatatgtggagtgacgtagcagcctactttaacctcgacattgaaaacagtgaagataataaatctactctttcacttcaatttgtcgacagcgccgcggatatgccgcttgcgaaaatgcacggtgcgttttcaacgaacgtcgtagcaagcaaagaacttcaacagccaggcagtgcacgaagcacgcgacatcttgaaattgaacttccaaaagaagcttcttatcaagaaggagatcatttaggtgttctgcctcgcaactatgaaggaatagtaaaccgtgtaacagcaaggttcggcctaagcgcatcacagcaaatccgtctggaagcagaagaagaaaaattagctcatttgccactcgctaaaacagtatccgtagaagagcttctgcaatacgtggagcttcaagatcctgttacgcgcacgcagcttcgcgcaatggctgctaaaacggtctgcccgccgcataaagtagagcttgaagccttgcttgaaaagcaagcctacaaagaacaagtgctggcaaaacgtttaacaatgcttgaactgcttgaaaaatacccggcgtgtgaaatgaaattcagcgaatttatcgcccttctgccaagcatacgcccgcgctattactcgatttcttcatcacctcgtgtcgatgaaaaacaagcaagcatcacggtcagcgttgtctcaggaccggcgtggagcggatatggagaatataaaggaattgcgtcgaactatcttgccgagctgcaagaaggagatacgattacgtgctttatttccacaccgcagtcagaatttacgctgccaaaagaccctgaaacgccgcttatcatggtcggaccgggaacaggcgtcgcgccgtttagaggctttgtgcaggcgcgcaaacagctaaaagaacaaggacagtcacttggagaagcacatttatacttcggctgccgttcacctcatgaagactatctgtatcaagaagagcttgaaaacgcccaaagcgaaggcatcattacgcttcataccgctttttctcgcatgccaaatcagccgaaaacatacgttcagcacgtaatggaacaagacggcaagaaattgattgaacttcttgatcaaggagcgcacttctatatttgcggagacggaagccaaatggcacctgccgttgaagcaacgcttatgaaaagctatgctgacgttcaccaagtgagtgaagcagacgctcgcttatggctgcagcagctagaagaaaaaggccgatacgcaaaagacgtgtgggctggg

SEQ ID NO: 344 - protein, 1049 aa, synthetic construct
  REGION 1..1049: note = variant of P450 oxidase from Bacillus megaterium
MTIKEMPQPKTFGELKNLPLLNTDKPVQALMRIADELGEIFKFEAPGSVTRYLSSQRLIKEACDESRFDKNLSQALKFARDFVGDGLATSWTHEPNWKKAHNILVPSFSQHAMGRYHAMMVDIAVQLVQKWERLNADEHIEVSEDMTRLTLDTIGLCGFNYRFNSFYRDQPHPFIVSMVRALDEVMNKLQRANPDDPAYDENKRQCQEDIKVMNDYVDKIIADRKARGEQSHDLLTQMLNGKDPETGEPLDDGNIRQQIITFLIAGHQTTSGLLSFALYFLVKNPHVLQKVAEEAARVLVDPVPSYKQVKQLKYVGMVLNEALRLWPVAPMFSLYAKEDTVLGGEYPLTKGDEVMVLVPQLHRDKTIWGDDVEEFRPERFENPSAIPQHAFKPFGNGQRACIGQQFALHEATLVLGMMLKHFDFEDHTNYELVIKETRTLKPEGFVVKAKSKGIPLGGIPSPSTEQSAKKVRKKAENAHNTPLLVLYGSNAGTAEGTARDLADIAMSKGFAPQVATLDSHAGNLPREGAVLIVTASYNGHPPDNAKQFVDWLDQASADEVKGVRYSVFGCGDKNWAGTYQKVPAFIDETLAAKGAENIADRGEADASDDFEGTYEEWRDHMWSDVAAYFNLDIENSEDNKSTLSLQFVDSAADMPLAKMHGAFSTNVVASKELQQPGSARSTRHLEIELPKEASYQEGDHLGVLPRNYEGIVNRVTARFGLSASQQIRLEAEEEKLAHLPLAKTVSVEELLQYVELQDPVTRTQLRAMAAKTVCPPHKVELEALLEKQAYKEQVLAKRLTMLELLEKYPACEMKFSEFIALLPSIRPRYYSISSSPRVDEKQASITVSVVSGPAWSGYGEYKGIASNYLAELQEGDTITCFISTPQSEFTLPKDPETPLIMVGPGTGVAPFRGFVQARKQLKEQGQSLGEAHLYFGCRSPHEDYLYQEELENAQSEGIITLHTAFSRMPNQPKTYVQHVMEQDGKKLIELLDQGAHFYICGDGSQMAPAVEATLMKSYADVHQVSEADARLWLQQLEEKGRYAKDVWAG

SEQ ID NO: 345 - DNA, 3147 bp, synthetic construct
  misc_feature 1..3147: note = variant of P450 oxidase from Bacillus megaterium
  source 1..3147: mol_type = other DNA
atgacaattaaggaaatgcctcagcctaagacgtttggagaacttaaaaatttaccgttattaaacacagataaaccggttcaagctttgatgcgtattgcggatgaattaggagaaatctttaaattcgaggcgcctggtagcgtaacgcgctatttatcaagtcagcgtctaattaaagaagcatgcgatgaatcacgctttgataaaaacttaagtcaagcgcttaaatttgcacgtgattttgttggagacgggttagccacaagctggacgcatgaaccgaattggaaaaaagcgcataatatcttagttccaagctttagtcagcatgcaatggggcgttatcatgcgatgatggtcgatatcgccgtgcagcttgttcaaaagtgggagcgtctaaatgcagatgagcatattgaagtatcggaagacatgacacgtttaacgcttgatacaattggtctttgcggctttaactatcgctttaacagcttttaccgagatcagcctcatccatttattgtgagtatggtccgtgcactggatgaagtaatgaacaagctgcagcgagcaaatccagacgacccagcttatgatgaaaacaagcgccagtgtcaagaagatatcaaggtgatgaacgactatgtagataaaattattgcagatcgcaaagcaaggggtgaacaaagtcatgatttattaacgcagatgctaaacggaaaagatccagaaacgggtgagccgcttgatgacgggaacattcgtcagcaaattattacattcttaattgcgggacaccaaacaacaagtggtcttttatcatttgcgctgtatttcttagtgaaaaatccacatgtattacaaaaagtagcagaagaagcagcacgagttctagtagatcctgttccaagctacaaacaagtcaaacagcttaaatatgtcggcatggtcttaaacgaagcgctgcgcttatggccagtagcgcctatgttttccctatatgcaaaagaagatacggtgcttggaggagaatatcctttaacgaaaggcgacgaagtaatggttctggtgcctcagcttcaccgtgataaaacaatttggggagacgatgtggaggagttccgtccagagcgttttgaaaatccaagtgcgattccgcagcatgcgtttaaaccgtttggaaacggtcagcgtgcgtgtatcggtcagcagttcgctcttcatgaagcaacgctggtacttggtatgatgctaaaacactttgactttgaagatcatacaaactacgagctcgttattaaagaaactcggacgttaaaacctgaaggctttgtggtaaaagcaaaatcgaaaggcattccgcttggcggtattccttcacctagcactgaacagtctgctaaaaaagtacgcaaaaaggcagaaaacgctcataatacgccgctgcttgtgctatacggttcaaatgcgggaacagctgaaggaacggcgcgtgatttagcagatattgcaatgagcaaaggatttgcaccgcaggtcgcaacgcttgattcacacgccggaaatcttccgcgcgaaggagctgtattaattgtaacggcgtcttataacggtcatccgcctgataacgcaaagcaatttgtcgactggttagaccaagcgtctgctgatgaagtaaaaggcgttcgctactccgtatttggatgcggcgataaaaattgggctgggacgtatcaaaaagtgcctgcttttatcgatgaaacgcttgccgctaaaggggcagaaaacatcgctgaccgcggtgaagcagatgcaagcgacgactttgaaggcacatatgaagaatggcgtgatcatatgtggagtgacgtagcagcctactttaacctcgacattgaaaacagtgaagataataaatctactctttcacttcaatttgtcgacagcgccgcggatatgccgcttgcgaaaatgcacggtgcgttttcaacgaacgtcgtagcaagcaaagaacttcaacagccaggcagtgcacgaagcacgcgacatcttgaaattgaacttccaaaagaagcttcttatcaagaaggagatcatttaggtgttattcctcgcaactatgaaggaatagtaaaccgtgtaacagcaaggttcggcctaagcgcatcacagcaaatccgtctggaagcagaagaagaaaaattagctcatttgccactcgctaaaacagtatccgtagaagagcttctgcaatacgtggagcttcaagatcctgttacgcgcacgcagcttcgcgcaatggctgctaaaacggtctgcccgccgcataaagtagagcttgaagccttgcttgaaaagcaagcctacaaagaacaagtgctggcaaaacgtttaacaatgcttgaactgcttgaaaaatacccggcgtgtgaaatgaaattcagcgaatttatcgcccttctgccaagcatacgcccgcgctattactcgatttcttcatcacctcgtgtcgatgaaaaacaagcaagcatcacggtcagcgttgtctcaggaccggcgtggagcggatatggagaatatttgggaattgcgtcgaactatcttgccgagctgcaagaaggagatacgattacgtgctttatttccacaccgcagtcagaatttacgctgccaaaagaccctgaaacgccgcttatcatggtcggaccgggaacaggcgtcgcgccgtttagaggctttgtgcaggcgcgcaaacagctaaaagaacaaggacagtcacttggagaagcacatttatacttcggctgccgttcacctcatgaagactatctgtatcaagaagagcttgaaaacgcccaaagcgaaggcatcattacgcttcataccgctttttctcgcatgccaaatcagccgaaaacatacgttcagcacgtaatggaacaagacggcaagaaattgattgaacttcttgatcaaggagcgcacttctatatttgcggagacggaagccaaatggcacctgccgttgaagcaacgcttatgaaaagctatgctgacgttcaccaagtgagtgaagcagacgctcgcttatggctgcagcagctagaagaaaaaggccgatacgcaaaagacgtgtgggctggg

SEQ ID NO: 346 - protein, 1049 aa, synthetic construct
  REGION 1..1049: note = variant of P450 oxidase from Bacillus megaterium
MTIKEMPQPKTFGELKNLPLLNTDKPVQALMRIADELGEIFKFEAPGSVTRYLSSQRLIKEACDESRFDKNLSQALKFARDFVGDGLATSWTHEPNWKKAHNILVPSFSQHAMGRYHAMMVDIAVQLVQKWERLNADEHIEVSEDMTRLTLDTIGLCGFNYRFNSFYRDQPHPFIVSMVRALDEVMNKLQRANPDDPAYDENKRQCQEDIKVMNDYVDKIIADRKARGEQSHDLLTQMLNGKDPETGEPLDDGNIRQQIITFLIAGHQTTSGLLSFALYFLVKNPHVLQKVAEEAARVLVDPVPSYKQVKQLKYVGMVLNEALRLWPVAPMFSLYAKEDTVLGGEYPLTKGDEVMVLVPQLHRDKTIWGDDVEEFRPERFENPSAIPQHAFKPFGNGQRACIGQQFALHEATLVLGMMLKHFDFEDHTNYELVIKETRTLKPEGFVVKAKSKGIPLGGIPSPSTEQSAKKVRKKAENAHNTPLLVLYGSNAGTAEGTARDLADIAMSKGFAPQVATLDSHAGNLPREGAVLIVTASYNGHPPDNAKQFVDWLDQASADEVKGVRYSVFGCGDKNWAGTYQKVPAFIDETLAAKGAENIADRGEADASDDFEGTYEEWRDHMWSDVAAYFNLDIENSEDNKSTLSLQFVDSAADMPLAKMHGAFSTNVVASKELQQPGSARSTRHLEIELPKEASYQEGDHLGVIPRNYEGIVNRVTARFGLSASQQIRLEAEEEKLAHLPLAKTVSVEELLQYVELQDPVTRTQLRAMAAKTVCPPHKVELEALLEKQAYKEQVLAKRLTMLELLEKYPACEMKFSEFIALLPSIRPRYYSISSSPRVDEKQASITVSVVSGPAWSGYGEYLGIASNYLAELQEGDTITCFISTPQSEFTLPKDPETPLIMVGPGTGVAPFRGFVQARKQLKEQGQSLGEAHLYFGCRSPHEDYLYQEELENAQSEGIITLHTAFSRMPNQPKTYVQHVMEQDGKKLIELLDQGAHFYICGDGSQMAPAVEATLMKSYADVHQVSEADARLWLQQLEEKGRYAKDVWAG

SEQ ID NO: 347 - DNA, 3147 bp, synthetic construct
  misc_feature 1..3147: note = variant of P450 oxidase from Bacillus megaterium
  source 1..3147: mol_type = other DNA
atgacaattaaggaaatgcctcagcctaagacgtttggagaacttaaaaatttaccgttattaaacacagataaaccggttcaagctttgatgcgtattgcggatgaattaggagaaatctttaaattcgaggcgcctggtagcgtaacgcgctatttatcaagtcagcgtctaattaaagaagcatgcgatgaatcacgctttgataaaaacttaagtcaagcgcttaaatttgcacgtgattttgttggagacgggttagccacaagctggacgcatgaaccgaattggaaaaaagcgcataatatcttagttccaagctttagtcagcatgcaatggggcgttatcatgcgatgatggtcgatatcgccgtgcagcttgttcaaaagtgggagcgtctaaatgcagatgagcatattgaagtatcggaagacatgacacgtttaacgcttgatacaattggtctttgcggctttaactatcgctttaacagcttttaccgagatcagcctcatccatttattgtgagtatggtccgtgcactggatgaagtaatgaacaagctgcagcgagcaaatccagacgacccagcttatgatgaaaacaagcgccagtgtcaagaagatatcaaggtgatgaacgactatgtagataaaattattgcagatcgcaaagcaaggggtgaacaaagtcatgatttattaacgcagatgctaaacggaaaagatccagaaacgggtgagccgcttgatgacgggaacattcgtcagcaaattattacattcttaattgcgggacaccaaacaacaagtggtcttttatcatttgcgctgtatttcttagtgaaaaatccacatgtattacaaaaagtagcagaagaagcagcacgagttctagtagatcctgttccaagctacaaacaagtcaaacagcttaaatatgtcggcatggtcttaaacgaagcgctgcgcttatggccagtagcgcctatgttttccctatatgcaaaagaagatacggtgcttggaggagaatatcctttaacgaaaggcgacgaagtaatggttctggtgcctcagcttcaccgtgataaaacaatttggggagacgatgtggaggagttccgtccagagcgttttgaaaatccaagtgcgattccgcagcatgcgtttaaaccgtttggaaacggtcagcgtgcgtgtatcggtcagcagttcgctcttcatgaagcaacgctggtacttggtatgatgctaaaacactttgactttgaagatcatacaaactacgagctcgttattaaagaaactcggacgttaaaacctgaaggctttgtggtaaaagcaaaatcgaaaggcattccgcttggcggtattccttcacctagcactgaacagtctgctaaaaaagtacgcaaaaaggcagaaaacgctcataatacgccgctgcttgtgctatacggttcaaatgcgggaacagctgaaggaacggcgcgtgatttagcagatattgcaatgagcaaaggatttgcaccgcaggtcgcaacgcttgattcacacgccggaaatcttccgcgcgaaggagctgtattaattgtaacggcgtcttataacggtcatccgcctgataacgcaaagcaatttgtcgactggttagaccaagcgtctgctgatgaagtaaaaggcgttcgctactccgtatttggatgcggcgataaaaattgggctgggacgtatcaaaaagtgcctgcttttatcgatgaaacgcttgccgctaaaggggcagaaaacatcgctgaccgcggtgaagcagatgcaagcgacgactttgaaggcacatatgaagaatggcgtgatcatatgtggagtgacgtagcagcctactttaacctcgacattgaaaacagtgaagataataaatctactctttcacttcaatttgtcgacagcgccgcggatatgccgcttgcgaaaatgcacggtgcgttttcaacgaacgtcgtagcaagcaaagaacttcaacagccaggcagtgcacgaagcacgcgacatcttgaaattgaacttccaaaagaagcttcttatcaagaaggagatcatgttggtgttattcctcgcaactatgaaggaatagtaaaccgtgtaacagcaaggttcggcctaagcgcatcacagcaaatccgtctggaagcagaagaagaaaaattagctcatttgccactcgctaaaacagtatccgtagaagagcttctgcaatacgtggagcttcaagatcctgttacgcgcacgcagcttcgcgcaatggctgctaaaacggtctgcccgccgcataaagtagagcttgaagccttgcttgaaaagcaagcctacaaagaacaagtgctggcaaaacgtttaacaatgcttgaactgcttgaaaaatacccggcgtgtgaaatgaaattcagcgaatttatcgcccttctgccaagcatacgcccgcgctattactcgatttcttcatcacctcgtgtcgatgaaaaacaagcaagcatcacggtcagcgttgtctcaggaccggcgtggagcggatatggagaatataaaggaattgcgtcgaactatcttgccgagctgcaagaaggagatacgattacgtgctttatttccacaccgcagtcagaatttacgctgccaaaagaccctgaaacgccgcttatcatggtcggaccgggaacaggcgtcgcgccgtttagaggctttgtgcaggcgcgcaaacagctaaaagaacaaggacagtcacttggagaagcacatttatacttcggctgccgttcacctcatgaagactatctgtatcaagaagagcttgaaaacgcccaaagcgaaggcatcattacgcttcataccgctttttctcgcatgccaaatcagccgaaaacatacgttcagcacgtaatggaacaagacggcaagaaattgattgaacttcttgatcaaggagcgcacttctatatttgcggagacggaagccaaatggcacctgccgttgaagcaacgcttatgaaaagctatgctgacgttcaccaagtgagtgaagcagacgctcgcttatggctgcagcagctagaagaaaaaggccgatacgcaaaagacgtgtgggctggg

SEQ ID NO: 348 - protein, 1049 aa, synthetic construct
  REGION 1..1049: note = variant of P450 oxidase from Bacillus megaterium
MTIKEMPQPKTFGELKNLPLLNTDKPVQALMRIADELGEIFKFEAPGSVTRYLSSQRLIKEACDESRFDKNLSQALKFARDFVGDGLATSWTHEPNWKKAHNILVPSFSQHAMGRYHAMMVDIAVQLVQKWERLNADEHIEVSEDMTRLTLDTIGLCGFNYRFNSFYRDQPHPFIVSMVRALDEVMNKLQRANPDDPAYDENKRQCQEDIKVMNDYVDKIIADRKARGEQSHDLLTQMLNGKDPETGEPLDDGNIRQQIITFLIAGHQTTSGLLSFALYFLVKNPHVLQKVAEEAARVLVDPVPSYKQVKQLKYVGMVLNEALRLWPVAPMFSLYAKEDTVLGGEYPLTKGDEVMVLVPQLHRDKTIWGDDVEEFRPERFENPSAIPQHAFKPFGNGQRACIGQQFALHEATLVLGMMLKHFDFEDHTNYELVIKETRTLKPEGFVVKAKSKGIPLGGIPSPSTEQSAKKVRKKAENAHNTPLLVLYGSNAGTAEGTARDLADIAMSKGFAPQVATLDSHAGNLPREGAVLIVTASYNGHPPDNAKQFVDWLDQASADEVKGVRYSVFGCGDKNWAGTYQKVPAFIDETLAAKGAENIADRGEADASDDFEGTYEEWRDHMWSDVAAYFNLDIENSEDNKSTLSLQFVDSAADMPLAKMHGAFSTNVVASKELQQPGSARSTRHLEIELPKEASYQEGDHVGVIPRNYEGIVNRVTARFGLSASQQIRLEAEEEKLAHLPLAKTVSVEELLQYVELQDPVTRTQLRAMAAKTVCPPHKVELEALLEKQAYKEQVLAKRLTMLELLEKYPACEMKFSEFIALLPSIRPRYYSISSSPRVDEKQASITVSVVSGPAWSGYGEYKGIASNYLAELQEGDTITCFISTPQSEFTLPKDPETPLIMVGPGTGVAPFRGFVQARKQLKEQGQSLGEAHLYFGCRSPHEDYLYQEELENAQSEGIITLHTAFSRMPNQPKTYVQHVMEQDGKKLIELLDQGAHFYICGDGSQMAPAVEATLMKSYADVHQVSEADARLWLQQLEEKGRYAKDVWAG

SEQ ID NO: 349 - DNA, 3147 bp, synthetic construct
  misc_feature 1..3147: note = variant of P450 oxidase from Bacillus megaterium
  source 1..3147: mol_type = other DNA
atgacaattaaggaaatgcctcagcctaagacgtttggagaacttaaaaatttaccgttattaaacacagataaaccggttcaagctttgatgcgtattgcggatgaattaggagaaatctttaaattcgaggcgcctggtagcgtaacgcgctatttatcaagtcagcgtctaattaaagaagcatgcgatgaatcacgctttgataaaaacttaagtcaagcgcttaaatttgcacgtgattttgttggagacgggttagccacaagctggacgcatgaaccgaattggaaaaaagcgcataatatcttagttccaagctttagtcagcatgcaatggggcgttatcatgcgatgatggtcgatatcgccgtgcagcttgttcaaaagtgggagcgtctaaatgcagatgagcatattgaagtatcggaagacatgacacgtttaacgcttgatacaattggtctttgcggctttaactatcgctttaacagcttttaccgagatcagcctcatccatttattgtgagtatggtccgtgcactggatgaagtaatgaacaagctgcagcgagcaaatccagacgacccagcttatgatgaaaacaagcgccagtgtcaagaagatatcaaggtgatgaacgactatgtagataaaattattgcagatcgcaaagcaaggggtgaacaaagtcatgatttattaacgcagatgctaaacggaaaagatccagaaacgggtgagccgcttgatgacgggaacattcgtcagcaaattattacattcttaattgcgggacaccaaacaacaagtggtcttttatcatttgcgctgtatttcttagtgaaaaatccacatgtattacaaaaagtagcagaagaagcagcacgagttctagtagatcctgttccaagctacaaacaagtcaaacagcttaaatatgtcggcatggtcttaaacgaagcgctgcgcttatggccagtagcgcctatgttttccctatatgcaaaagaagatacggtgcttggaggagaatatcctttaacgaaaggcgacgaagtaatggttctggtgcctcagcttcaccgtgataaaacaatttggggagacgatgtggaggagttccgtccagagcgttttgaaaatccaagtgcgattccgcagcatgcgtttaaaccgtttggaaacggtcagcgtgcgtgtatcggtcagcagttcgctcttcatgaagcaacgctggtacttggtatgatgctaaaacactttgactttgaagatcatacaaactacgagctcgttattaaagaaactcggacgttaaaacctgaaggctttgtggtaaaagcaaaatcgaaaggcattccgcttggcggtattccttcacctagcactgaacagtctgctaaaaaagtacgcaaaaaggcagaaaacgctcataatacgccgctgcttgtgctatacggttcaaatgcgggaacagctgaaggaacggcgcgtgatttagcagatattgcaatgagcaaaggatttgcaccgcaggtcgcaacgcttgattcacacgccggaaatcttccgcgcgaaggagctgtattaattgtaacggcgtcttataacggtcatccgcctgataacgcaaagcaatttgtcgactggttagaccaagcgtctgctgatgaagtaaaaggcgttcgctactccgtatttggatgcggcgataaaaattgggctgggacgtatcaaaaagtgcctgcttttatcgatgaaacgcttgccgctaaaggggcagaaaacatcgctgaccgcggtgaagcagatgcaagcgacgactttgaaggcacatatgaagaatggcgtgatcatatgtggagtgacgtagcagcctactttaacctcgacattgaaaacagtgaagataataaatctactctttcacttcaatttgtcgacagcgccgcggatatgccgcttgcgaaaatgcacggtgcgttttcaacgaacgtcgtagcaagcaaagaacttcaacagccaggcagtgcacgaagcacgcgacatcttgaaattgaacttccaaaagaagcttcttatcaagaaggagatcatttaggtgttattcctcgcaactatgaaggaatagtaaaccgtgtaacagcaaggttcggcctaagcgcatcacagcaaatccgtctggaagcagaagaagaaaaattagctcatttgccactcgctaaaacagtatccgtagaagagcttctgcaatacgtggagcttcaagatcctgttacgcgcacgcagcttcgcgcaatggctgctaaaacggtctgcccgccgcataaagtagagcttgaagccttgcttgaaaagcaagcctacaaagaacaagtgctgaataaacgtttaacaatgcttgaactgcttgaaaaatacccggcgtgtgaaatgaaattcagcgaatttatcgcccttctgccaagcatacgcccgcgctattactcgatttcttcatcacctcgtgtcgatgaaaaacaagcaagcatcacggtcagcgttgtctcaggaccggcgtggagcggatatggagaatataaaggaattgcgtcgaactatcttgccgagctgcaagaaggagatacgattacgtgctttatttccacaccgcagtcagaatttacgctgccaaaagaccctgaaacgccgcttatcatggtcggaccgggaacaggcgtcgcgccgtttagaggctttgtgcaggcgcgcaaacagctaaaagaacaaggacagtcacttggagaagcacatttatacttcggctgccgttcacctcatgaagactatctgtatcaagaagagcttgaaaacgcccaaagcgaaggcatcattacgcttcataccgctttttctcgcatgccaaatcagccgaaaacatacgttcagcacgtaatggaacaagacggcaagaaattgattgaacttcttgatcaaggagcgcacttctatatttgcggagacggaagccaaatggcacctgccgttgaagcaacgcttatgaaaagctatgctgacgttcaccaagtgagtgaagcagacgctcgcttatggctgcagcagctagaagaaaaaggccgatacgcaaaagacgtgtgggctggg

SEQ ID NO: 350 - protein, 1049 aa, synthetic construct
  REGION 1..1049: note = variant of P450 oxidase from Bacillus megaterium
MTIKEMPQPKTFGELKNLPLLNTDKPVQALMRIADELGEIFKFEAPGSVTRYLSSQRLIKEACDESRFDKNLSQALKFARDFVGDGLATSWTHEPNWKKAHNILVPSFSQHAMGRYHAMMVDIAVQLVQKWERLNADEHIEVSEDMTRLTLDTIGLCGFNYRFNSFYRDQPHPFIVSMVRALDEVMNKLQRANPDDPAYDENKRQCQEDIKVMNDYVDKIIADRKARGEQSHDLLTQMLNGKDPETGEPLDDGNIRQQIITFLIAGHQTTSGLLSFALYFLVKNPHVLQKVAEEAARVLVDPVPSYKQVKQLKYVGMVLNEALRLWPVAPMFSLYAKEDTVLGGEYPLTKGDEVMVLVPQLHRDKTIWGDDVEEFRPERFENPSAIPQHAFKPFGNGQRACIGQQFALHEATLVLGMMLKHFDFEDHTNYELVIKETRTLKPEGFVVKAKSKGIPLGGIPSPSTEQSAKKVRKKAENAHNTPLLVLYGSNAGTAEGTARDLADIAMSKGFAPQVATLDSHAGNLPREGAVLIVTASYNGHPPDNAKQFVDWLDQASADEVKGVRYSVFGCGDKNWAGTYQKVPAFIDETLAAKGAENIADRGEADASDDFEGTYEEWRDHMWSDVAAYFNLDIENSEDNKSTLSLQFVDSAADMPLAKMHGAFSTNVVASKELQQPGSARSTRHLEIELPKEASYQEGDHLGVIPRNYEGIVNRVTARFGLSASQQIRLEAEEEKLAHLPLAKTVSVEELLQYVELQDPVTRTQLRAMAAKTVCPPHKVELEALLEKQAYKEQVLNKRLTMLELLEKYPACEMKFSEFIALLPSIRPRYYSISSSPRVDEKQASITVSVVSGPAWSGYGEYKGIASNYLAELQEGDTITCFISTPQSEFTLPKDPETPLIMVGPGTGVAPFRGFVQARKQLKEQGQSLGEAHLYFGCRSPHEDYLYQEELENAQSEGIITLHTAFSRMPNQPKTYVQHVMEQDGKKLIELLDQGAHFYICGDGSQMAPAVEATLMKSYADVHQVSEADARLWLQQLEEKGRYAKDVWAG

SEQ ID NO: 351 - DNA, 3147 bp, synthetic construct
  misc_feature 1..3147: note = variant of P450 oxidase from Bacillus megaterium
  source 1..3147: mol_type = other DNA
atgacaattaaggaaatgcctcagcctaagacgtttggagaacttaaaaatttaccgttattaaacacagataaaccggttcaagctttgatgcgtattgcggatgaattaggagaaatctttaaattcgaggcgcctggtagcgtaacgcgctatttatcaagtcagcgtctaattaaagaagcatgcgatgaatcacgctttgataaaaacttaagtcaagcgcttaaatttgcacgtgattttgttggagacgggttagccacaagctggacgcatgaaccgaattggaaaaaagcgcataatatcttagttccaagctttagtcagcatgcaatggggcgttatcatgcgatgatggtcgatatcgccgtgcagcttgttcaaaagtgggagcgtctaaatgcagatgagcatattgaagtatcggaagacatgacacgtttaacgcttgatacaattggtctttgcggctttaactatcgctttaacagcttttaccgagatcagcctcatccatttattgtgagtatggtccgtgcactggatgaagtaatgaacaagctgcagcgagcaaatccagacgacccagcttatgatgaaaacaagcgccagtgtcaagaagatatcaaggtgatgaacgactatgtagataaaattattgcagatcgcaaagcaaggggtgaacaaagtcatgatttattaacgcagatgctaaacggaaaagatccagaaacgggtgagccgcttgatgacgggaacattcgtcagcaaattattacattcttaattgcgggacaccaaacaacaagtggtcttttatcatttgcgctgtatttcttagtgaaaaatccacatgtattacaaaaagtagcagaagaagcagcacgagttctagtagatcctgttccaagctacaaacaagtcaaacagcttaaatatgtcggcatggtcttaaacgaagcgctgcgcttatggccagtagcgcctatgttttccctatatgcaaaagaagatacggtgcttggaggagaatatcctttaacgaaaggcgacgaagtaatggttctggtgcctcagcttcaccgtgataaaacaatttggggagacgatgtggaggagttccgtccagagcgttttgaaaatccaagtgcgattccgcagcatgcgtttaaaccgtttggaaacggtcagcgtgcgtgtatcggtcagcagttcgctcttcatgaagcaacgctggtacttggtatgatgctaaaacactttgactttgaagatcatacaaactacgagctcgttattaaagaaactcggacgttaaaacctgaaggctttgtggtaaaagcaaaatcgaaaggcattccgcttggcggtattccttcacctagcactgaacagtctgctaaaaaagtacgcaaaaaggcagaaaacgctcataatacgccgctgcttgtgctatacggttcaaatgcgggaacagctgaaggaacggcgcgtgatttagcagatattgcaatgagcaaaggatttgcaccgcaggtcgcaacgcttgattcacacgccggaaatcttccgcgcgaaggagctgtattaattgtaacggcgtcttataacggtcatccgcctgataacgcaaagcaatttgtcgactggttagaccaagcgtctgctgatgaagtaaaaggcgttcgctactccgtatttggatgcggcgataaaaattgggctgggacgtatcaaaaagtgcctgcttttatcgatgaaacgcttgccgctaaaggggcagaaaacatcgctgaccgcggtgaagcagatgcaagcgacgactttgaaggcacatatgaagaatggcgtgatcatatgtggagtgacgtagcagcctactttaacctcgacattgaaaacagtgaagataataaatctactctttcacttcaatttgtcgacagcgccgcggatatgccgcttgcgaaaatgcacggtgcgttttcaacgaacgtcgtagcaagcaaagaacttcaacagccaggcagtgcacgaagcacgcgacatcttgaaattgaacttccaaaagaagcttcttatcaagaaggagatcatttaggtgttattcctcgctattatgaaggaatagtaaaccgtgtaacagcaaggttcggcctaagcgcatcacagcaaatccgtctggaagcagaagaagaaaaattagctcatttgccactcgctaaaacagtatccgtagaagagcttctgcaatacgtggagcttcaagatcctgttacgcgcacgcagcttcgcgcaatggctgctaaaacggtctgcccgccgcataaagtagagcttgaagccttgcttgaaaagcaagcctacaaagaacaagtgctggcaaaacgtttaacaatgcttgaactgcttgaaaaatacccggcgtgtgaaatgaaattcagcgaatttatcgcccttctgccaagcatacgcccgcgctattactcgatttcttcatcacctcgtgtcgatgaaaaacaagcaagcatcacggtcagcgttgtctcaggaccggcgtggagcggatatggagaatataaaggaattgcgtcgaactatcttgccgagctgcaagaaggagatacgattacgtgctttatttccacaccgcagtcagaatttacgctgccaaaagaccctgaaacgccgcttatcatggtcggaccgggaacaggcgtcgcgccgtttagaggctttgtgcaggcgcgcaaacagctaaaagaacaaggacagtcacttggagaagcacatttatacttcggctgccgttcacctcatgaagactatctgtatcaagaagagcttgaaaacgcccaaagcgaaggcatcattacgcttcataccgctttttctcgcatgccaaatcagccgaaaacatacgttcagcacgtaatggaacaagacggcaagaaattgattgaacttcttgatcaaggagcgcacttctatatttgcggagacggaagccaaatggcacctgccgttgaagcaacgcttatgaaaagctatgctgacgttcaccaagtgagtgaagcagacgctcgcttatggctgcagcagctagaagaaaaaggccgatacgcaaaagacgtgtgggctggg

SEQ ID NO: 352 - protein, 1049 aa, synthetic construct
  REGION 1..1049: note = variant of P450 oxidase from Bacillus megaterium
MTIKEMPQPKTFGELKNLPLLNTDKPVQALMRIADELGEIFKFEAPGSVTRYLSSQRLIKEACDESRFDKNLSQALKFARDFVGDGLATSWTHEPNWKKAHNILVPSFSQHAMGRYHAMMVDIAVQLVQKWERLNADEHIEVSEDMTRLTLDTIGLCGFNYRFNSFYRDQPHPFIVSMVRALDEVMNKLQRANPDDPAYDENKRQCQEDIKVMNDYVDKIIADRKARGEQSHDLLTQMLNGKDPETGEPLDDGNIRQQIITFLIAGHQTTSGLLSFALYFLVKNPHVLQKVAEEAARVLVDPVPSYKQVKQLKYVGMVLNEALRLWPVAPMFSLYAKEDTVLGGEYPLTKGDEVMVLVPQLHRDKTIWGDDVEEFRPERFENPSAIPQHAFKPFGNGQRACIGQQFALHEATLVLGMMLKHFDFEDHTNYELVIKETRTLKPEGFVVKAKSKGIPLGGIPSPSTEQSAKKVRKKAENAHNTPLLVLYGSNAGTAEGTARDLADIAMSKGFAPQVATLDSHAGNLPREGAVLIVTASYNGHPPDNAKQFVDWLDQASADEVKGVRYSVFGCGDKNWAGTYQKVPAFIDETLAAKGAENIADRGEADASDDFEGTYEEWRDHMWSDVAAYFNLDIENSEDNKSTLSLQFVDSAADMPLAKMHGAFSTNVVASKELQQPGSARSTRHLEIELPKEASYQEGDHLGVIPRYYEGIVNRVTARFGLSASQQIRLEAEEEKLAHLPLAKTVSVEELLQYVELQDPVTRTQLRAMAAKTVCPPHKVELEALLEKQAYKEQVLAKRLTMLELLEKYPACEMKFSEFIALLPSIRPRYYSISSSPRVDEKQASITVSVVSGPAWSGYGEYKGIASNYLAELQEGDTITCFISTPQSEFTLPKDPETPLIMVGPGTGVAPFRGFVQARKQLKEQGQSLGEAHLYFGCRSPHEDYLYQEELENAQSEGIITLHTAFSRMPNQPKTYVQHVMEQDGKKLIELLDQGAHFYICGDGSQMAPAVEATLMKSYADVHQVSEADARLWLQQLEEKGRYAKDVWAG

SEQ ID NO: 353 - DNA, 3147 bp, synthetic construct
  misc_feature 1..3147: note = variant of P450 oxidase from Bacillus megaterium
  source 1..3147: mol_type = other DNA
atgacaattaaggaaatgcctcagcctaagacgtttggagaacttaaaaatttaccgttattaaacacagataaaccggttcaagctttgatgcgtattgcggatgaattaggagaaatctttaaattcgaggcgcctggtagcgtaacgcgctatttatcaagtcagcgtctaattaaagaagcatgcgatgaatcacgctttgataaaaacttaagtcaagcgcttaaatttgcacgtgattttgttggagacgggttagccacaagctggacgcatgaaccgaattggaaaaaagcgcataatatcttagttccaagctttagtcagcatgcaatggggcgttatcatgcgatgatggtcgatatcgccgtgcagcttgttcaaaagtgggagcgtctaaatgcagatgagcatattgaagtatcggaagacatgacacgtttaacgcttgatacaattggtctttgcggctttaactatcgctttaacagcttttaccgagatcagcctcatccatttattgtgagtatggtccgtgcactggatgaagtaatgaacaagctgcagcgagcaaatccagacgacccagcttatgatgaaaacaagcgccagtgtcaagaagatatcaaggtgatgaacgactatgtagataaaattattgcagatcgcaaagcaaggggtgaacaaagtcatgatttattaacgcagatgctaaacggaaaagatccagaaacgggtgagccgcttgatgacgggaacattcgtcagcaaattattacattcttaattgcgggacaccaaacaacaagtggtcttttatcatttgcgctgtatttcttagtgaaaaatccacatgtattacaaaaagtagcagaagaagcagcacgagttctagtagatcctgttccaagctacaaacaagtcaaacagcttaaatatgtcggcatggtcttaaacgaagcgctgcgcttatggccagtagcgcctatgttttccctatatgcaaaagaagatacggtgcttggaggagaatatcctttaacgaaaggcgacgaagtaatggttctggtgcctcagcttcaccgtgataaaacaatttggggagacgatgtggaggagttccgtccagagcgttttgaaaatccaagtgcgattccgcagcatgcgtttaaaccgtttggaaacggtcagcgtgcgtgtatcggtcagcagttcgctcttcatgaagcaacgctggtacttggtatgatgctaaaacactttgactttgaagatcatacaaactacgagctcgttattaaagaaactcggacgttaaaacctgaaggctttgtggtaaaagcaaaatcgaaaggcattccgcttggcggtattccttcacctagcactgaacagtctgctaaaaaagtacgcaaaaaggcagaaaacgctcataatacgccgctgcttgtgctatacggttcaaatgcgggaacagctgaaggaacggcgcgtgatttagcagatattgcaatgagcaaaggatttgcaccgcaggtcgcaacgcttgattcacacgccggaaatcttccgcgcgaaggagctgtattaattgtaacggcgtcttataacggtcatccgcctgataacgcaaagcaatttgtcgactggttagaccaagcgtctgctgatgaagtaaaaggcgttcgctactccgtatttggatgcggcgataaaaattgggctgggacgtatcaaaaagtgcctgcttttatcgatgaaacgcttgccgctaaaggggcagaaaacatcgctgaccgcggtgaagcagatgcaagcgacgactttgaaggcacatatgaagaatggcgtgatcatatgtggagtgacgtagcagcctactttaacctcgacattgaaaacagtgaagataataaatctactctttcacttcaatttgtcgacagcgccgcggatatgccgcttgcgaaaatgcacggtgcgttttcaacgaacgtcgtagcaagcaaagaacttcaacagccaggcagtgcacgaagcacgcgacatcttgaaattgaacttccaaaagaagcttcttatcaagaaggagatcatttaggtgttattcctcgcaactatgaaggaatagtaaaccgtgtaacagcaaggttcggcctaagcgcatcacagcaaatccgtctggaagcagaagaagaaaaattagctcatttgccactcgctaaaacagtatccgtagaagagcttctgcaatacgtggagcttcaagatcctgttacgcgcacgcagcttcgcgcaatggctgctaaaacggtctgcccgccgcataaagtagagcttgaagccttgcttgaaaagcaagcctacaaagaacaagtgctggcaaaacgtttaacaatgcttgaactgcttgaaaaatacccggcgtgtgaaatgaaattcagcgaatttatcgcccttctgccaagcatacgcccgcgctattactcgatttcttcatcacctcgtgtcgatgaaaaacaagcaagcatcacggtcagcgttgtcgtgggaccggcgtggagcggatatggagaatataaaggaattgcgtcgaactatcttgccgagctgcaagaaggagatacgattacgtgctttatttccacaccgcagtcagaatttacgctgccaaaagaccctgaaacgccgcttatcatggtcggaccgggaacaggcgtcgcgccgtttagaggctttgtgcaggcgcgcaaacagctaaaagaacaaggacagtcacttggagaagcacatttatacttcggctgccgttcacctcatgaagactatctgtatcaagaagagcttgaaaacgcccaaagcgaaggcatcattacgcttcataccgctttttctcgcatgccaaatcagccgaaaacatacgttcagcacgtaatggaacaagacggcaagaaattgattgaacttcttgatcaaggagcgcacttctatatttgcggagacggaagccaaatggcacctgccgttgaagcaacgcttatgaaaagctatgctgacgttcaccaagtgagtgaagcagacgctcgcttatggctgcagcagctagaagaaaaaggccgatacgcaaaagacgtgtgggctggg

SEQ ID NO: 354 - protein, 1049 aa, synthetic construct
  REGION 1..1049: note = variant of P450 oxidase from Bacillus megaterium
MTIKEMPQPKTFGELKNLPLLNTDKPVQALMRIADELGEIFKFEAPGSVTRYLSSQRLIKEACDESRFDKNLSQALKFARDFVGDGLATSWTHEPNWKKAHNILVPSFSQHAMGRYHAMMVDIAVQLVQKWERLNADEHIEVSEDMTRLTLDTIGLCGFNYRFNSFYRDQPHPFIVSMVRALDEVMNKLQRANPDDPAYDENKRQCQEDIKVMNDYVDKIIADRKARGEQSHDLLTQMLNGKDPETGEPLDDGNIRQQIITFLIAGHQTTSGLLSFALYFLVKNPHVLQKVAEEAARVLVDPVPSYKQVKQLKYVGMVLNEALRLWPVAPMFSLYAKEDTVLGGEYPLTKGDEVMVLVPQLHRDKTIWGDDVEEFRPERFENPSAIPQHAFKPFGNGQRACIGQQFALHEATLVLGMMLKHFDFEDHTNYELVIKETRTLKPEGFVVKAKSKGIPLGGIPSPSTEQSAKKVRKKAENAHNTPLLVLYGSNAGTAEGTARDLADIAMSKGFAPQVATLDSHAGNLPREGAVLIVTASYNGHPPDNAKQFVDWLDQASADEVKGVRYSVFGCGDKNWAGTYQKVPAFIDETLAAKGAENIADRGEADASDDFEGTYEEWRDHMWSDVAAYFNLDIENSEDNKSTLSLQFVDSAADMPLAKMHGAFSTNVVASKELQQPGSARSTRHLEIELPKEASYQEGDHLGVIPRNYEGIVNRVTARFGLSASQQIRLEAEEEKLAHLPLAKTVSVEELLQYVELQDPVTRTQLRAMAAKTVCPPHKVELEALLEKQAYKEQVLAKRLTMLELLEKYPACEMKFSEFIALLPSIRPRYYSISSSPRVDEKQASITVSVVVGPAWSGYGEYKGIASNYLAELQEGDTITCFISTPQSEFTLPKDPETPLIMVGPGTGVAPFRGFVQARKQLKEQGQSLGEAHLYFGCRSPHEDYLYQEELENAQSEGIITLHTAFSRMPNQPKTYVQHVMEQDGKKLIELLDQGAHFYICGDGSQMAPAVEATLMKSYADVHQVSEADARLWLQQLEEKGRYAKDVWAG

SEQ ID NO: 355 - DNA, 3147 bp, synthetic construct
  misc_feature 1..3147: note = variant of P450 oxidase from Bacillus megaterium
  source 1..3147: mol_type = other DNA
atgacaattaaggaaatgcctcagcctaagacgtttggagaacttaaaaatttaccgttattaaacacagataaaccggttcaagctttgatgcgtattgcggatgaattaggagaaatctttaaattcgaggcgcctggtagcgtaacgcgctatttatcaagtcagcgtctaattaaagaagcatgcgatgaatcacgctttgataaaaacttaagtcaagcgcttaaatttgcacgtgattttgttggagacgggttagccacaagctggacgcatgaaccgaattggaaaaaagcgcataatatcttagttccaagctttagtcagcatgcaatggggcgttatcatgcgatgatggtcgatatcgccgtgcagcttgttcaaaagtgggagcgtctaaatgcagatgagcatattgaagtatcggaagacatgacacgtttaacgcttgatacaattggtctttgcggctttaactatcgctttaacagcttttaccgagatcagcctcatccatttattgtgagtatggtccgtgcactggatgaagtaatgaacaagctgcagcgagcaaatccagacgacccagcttatgatgaaaacaagcgccagtgtcaagaagatatcaaggtgatgaacgactatgtagataaaattattgcagatcgcaaagcaaggggtgaacaaagtcatgatttattaacgcagatgctaaacggaaaagatccagaaacgggtgagccgcttgatgacgggaacattcgtcagcaaattattacattcttaattgcgggacaccaaacaacaagtggtcttttatcatttgcgctgtatttcttagtgaaaaatccacatgtattacaaaaagtagcagaagaagcagcacgagttctagtagatcctgttccaagctacaaacaagtcaaacagcttaaatatgtcggcatggtcttaaacgaagcgctgcgcttatggccagtagcgcctatgttttccctatatgcaaaagaagatacggtgcttggaggagaatatcctttaacgaaaggcgacgaagtaatggttctggtgcctcagcttcaccgtgataaaacaatttggggagacgatgtggaggagttccgtccagagcgttttgaaaatccaagtgcgattccgcagcatgcgtttaaaccgtttggaaacggtcagcgtgcgtgtatcggtcagcagttcgctcttcatgaagcaacgctggtacttggtatgatgctaaaacactttgactttgaagatcatacaaactacgagctcgttattaaagaaactcggacgttaaaacctgaaggctttgtggtaaaagcaaaatcgaaaggcattccgcttggcggtattccttcacctagcactgaacagtctgctaaaaaagtacgcaaaaaggcagaaaacgctcataatacgccgctgcttgtgctatacggttcaaatgcgggaacagctgaaggaacggcgcgtgatttagcagatattgcaatgagcaaaggatttgcaccgcaggtcgcaacgcttgattcacacgccggaaatcttccgcgcgaaggagctgtattaattgtaacggcgtcttataacggtcatccgcctgataacgcaaagcaatttgtcgactggttagaccaagcgtctgctgatgaagtaaaaggcgttcgctactccgtatttggatgcggcgataaaaattgggctgggacgtatcaaaaagtgcctgcttttatcgatgaaacgcttgccgctaaaggggcagaaaacatcgctgaccgcggtgaagcagatgcaagcgacgactttgaaggcacatatgaagaatggcgtgatcatatgtggagtgacgtagcagcctactttaacctcgacattgaaaacagtgaagataataaatctactctttcacttcaatttgtcgacagcgccgcggatatgccgcttgcgaaaatgcacggtgcgttttcaacgaacgtcgtagcaagcaaagaacttcaacagccaggcagtgcacgaagcacgcgacatcttgaaattgaacttccaaaagaagcttcttatcaagaaggagatcatttaggtgttattcctcgcaactatgaaggaatagtaaaccgtgtaacagcaaggttcggcctaagcgcatcacagcaaatccgtctggaagcagaagaagaaaaattagctcatttgccactcgctaaaacagtatccgtagaagagcttctgcaatacgtggagcttcaagatcctgttacgcgcacgcagcttcgcgcaatggctgctaaaacggtctgcccgccgcataaagtagagcttgaagccttgcttgaaaagcaagcctacaaagaacaagtgctggcaaaacgtttaacaatgcttgaactgcttgaaaaatacccggcgtgtgaaatgaaattcagcgaatttatcgcccttctgccaagcatacgcccgcgctattactcgatttcttcatcacctcgtgtcgatgaaaaacaagcaagcatcacggtcagcgttgtctcaggaccggcgtggagcggatatggagaatataaaggaattgcgtcgaactatcttgccgagctgcaagaaggagatacgattacgtgctttatttccacaccgcagtcagaatttacgctgccaaaagaccctgaaacgccgcttatcatggtcggaccgggaacaggcgtcgcgccgtttagaggctttgtgcaggcgcgcaaacagctaaaagaacaaggacagtcacttggagaagcacatttatacttcggctgccgttcacctcatgaagactatctgtatcaagaagagcttgaaaacgcccaaagcgaaggcatcattacgcttcataccgctttttctcgcatgccaaatcagccgaaaacatacgttcagcacgtaatggaacaagacggcaagaaattgattgaacttcttgatcaaggagcgcacttctatatttgcggagacggaagccaaatggcacctgccgttgaagcaacgcttatgaaaagctatgctgacgttcaccaagtgagtgaagcagacgctcgcttatggctgcagcagctagaagaaaaaggccgatacgcaaaagacgtgtggctgggg

SEQ ID NO: 356 - protein, 1049 aa, synthetic construct
  REGION 1..1049: note = variant of P450 oxidase from Bacillus megaterium
MTIKEMPQPKTFGELKNLPLLNTDKPVQALMRIADELGEIFKFEAPGSVTRYLSSQRLIKEACDESRFDKNLSQALKFARDFVGDGLATSWTHEPNWKKAHNILVPSFSQHAMGRYHAMMVDIAVQLVQKWERLNADEHIEVSEDMTRLTLDTIGLCGFNYRFNSFYRDQPHPFIVSMVRALDEVMNKLQRANPDDPAYDENKRQCQEDIKVMNDYVDKIIADRKARGEQSHDLLTQMLNGKDPETGEPLDDGNIRQQIITFLIAGHQTTSGLLSFALYFLVKNPHVLQKVAEEAARVLVDPVPSYKQVKQLKYVGMVLNEALRLWPVAPMFSLYAKEDTVLGGEYPLTKGDEVMVLVPQLHRDKTIWGDDVEEFRPERFENPSAIPQHAFKPFGNGQRACIGQQFALHEATLVLGMMLKHFDFEDHTNYELVIKETRTLKPEGFVVKAKSKGIPLGGIPSPSTEQSAKKVRKKAENAHNTPLLVLYGSNAGTAEGTARDLADIAMSKGFAPQVATLDSHAGNLPREGAVLIVTASYNGHPPDNAKQFVDWLDQASADEVKGVRYSVFGCGDKNWAGTYQKVPAFIDETLAAKGAENIADRGEADASDDFEGTYEEWRDHMWSDVAAYFNLDIENSEDNKSTLSLQFVDSAADMPLAKMHGAFSTNVVASKELQQPGSARSTRHLEIELPKEASYQEGDHLGVIPRNYEGIVNRVTARFGLSASQQIRLEAEEEKLAHLPLAKTVSVEELLQYVELQDPVTRTQLRAMAAKTVCPPHKVELEALLEKQAYKEQVLAKRLTMLELLEKYPACEMKFSEFIALLPSIRPRYYSISSSPRVDEKQASITVSVVSGPAWSGYGEYKGIASNYLAELQEGDTITCFISTPQSEFTLPKDPETPLIMVGPGTGVAPFRGFVQARKQLKEQGQSLGEAHLYFGCRSPHEDYLYQEELENAQSEGIITLHTAFSRMPNQPKTYVQHVMEQDGKKLIELLDQGAHFYICGDGSQMAPAVEATLMKSYADVHQVSEADARLWLQQLEEKGRYAKDVWLG

SEQ ID NO: 357 - DNA, 3147 bp, synthetic construct
  misc_feature 1..3147: note = variant of P450 oxidase from Bacillus megaterium
  source 1..3147: mol_type = other DNA
atgacaattaaggaaatgcctcagcctaagacgtttggagaacttaaaaatttaccgttattaaacacagataaaccggttcaagctttgatgcgtattgcggatgaattaggagaaatctttaaattcgaggcgcctggtagcgtaacgcgctatttatcaagtcagcgtctaattaaagaagcatgcgatgaatcacgctttgataaaaacttaagtcaagcgcttaaatttgcacgtgattttgttggagacgggttatctacaagctggacgcatgaaccgaattggaaaaaagcgcataatatcttagttccaagctttagtcagcatgcaatggggcgttatcatgcgatgatggtcgatatcgccgtgcagcttgttcaaaagtgggagcgtctaaatgcagatgagcatattgaagtatcggaagacatgacacgtttaacgcttgatacaattggtctttgcggctttaactatcgctttaacagcttttaccgagatcagcctcatccatttattgtgagtgtggttcgtgcactggatgaagtaatgaacaagctgcagcgagcaaatccagacgacccagcttatgatgaaaacaagcgccagtgtcaagaagatatcaaggtgatgaacgactatgtagataaaattattgcagatcgcaaagcaaggggtgaacaaagtcatgatttattaacgcagatgctaaacggaaaagatccagaaacgggtgagccgcttgatgacgggaacattcgtcagcaaattattacattcttaattgcgggacaccaaacaacaagtggtcttttatcatttgcgctgtatttcttagtgaaaaatccacatgtattacaaaaagtagcagaagaagcagcacgagttctagtagatcctgttccaagctacaaacaagtcaaacagcttaaatatgttggcatggtcttaaacgaagcgctgcgcttatggccagtagcgcctatgttttccctatatgcaaaagaagatacggtgcttggaggagaatatcctttaacgaaaggcgacgaagtaatggttctggtgcctcagcttcaccgtgataaaacaatttggggagacgatgtggaggagttccgtccagagcgttttgaaaatccaagtgcgattccgcagcatgcgtttaaaccgtttggaaacggtcagcgtgcgtgtatcggtcagcagttcgctcttcatgaagcaacgctggtacttggtatgatgctaaaacactttgactttgaagatcatacaaactacgagctcgttattaaagaatcgcggacgttaaaacctgaaggctttgtggtaaaagcaaaatcgaaaggcattccgcttggcggtattccttcacctagcactgaacagtctgctaaaaaagtacgcaaaaaggcagaaaacgctcataatacgccgctgcttgtgctatacggttcaaatgcgggaacagctgaaggaacggcgcgtgatttagcagatattgcaatgagcaaaggatttgcaccgcaggtcgcaacgcttgattcacacgccagaaatcttccgcgcgaaggagctgtattaattgtaacggcgtcttataacggtcatccgcctgataacgcaaagcaatttgtcgactggttagaccaagcgtctgctgatgaagtaaaaggcgttcgctactccgtatttggatgcggcgataaaaattgggcggggacgtatcaaaaagtgcctgcttttatcgatgaaacgcttgccgctaaaggggcagaaaacatcgctgaccgcggtgaagcagatgcaagcgacgactttgaaggcacatatgaagaatggcgtgatcatatgtggagtgacgtagcagcctactttaacctcgacattgaaaacagtgaagataataaatctactctttcacttcaatttgtcgacagcgccgcggatatgccgcttgcgaaaatgcacggtgcgttttcaacgaacgtcgtagcaagcaaagaacttcaacagccaggcagtgcacgaagcacgcgacatcttgaaattgaacttccaaaagaagcttcttatcaagaaggagatcatttaggtgttattcctcgcaactatgaaggaatagtaaaccgtgtaacagcaaggttcggcctaagcgcatcacagcaaatccgtctggaagcagaagaagaaaaattagctcatttgccactcgctaaaacagtatccgtagaagagcttctgcaatacgtggagcttcaagatcctgttacgcgcacgcagcttcgcgcaatggctgctaaaacggtctgcccgccgcataaagtagagcttgaagccttgcttgaaaagcaagcctacaaagaacaagtgctggcaaaacgtttaacaatgcttgaactgcttgaaaaatacccggcgtgtgaaatgaaattcagcgaatttatcgcccttctgccaagcatacgcccgcgctattactcgatttcttcatcacctcgtgtcgatgaaaaacaagcaagcatcacggtcagcgttgtctcaggaccggcgtggagcggatatggagaatataaaggaattgcgtcgaactatcttgccgagctgcaagaaggagatacgattacgtgctttatttccacaccgcagtcagaatttacgctgccaaaagaccctgaaacgccgcttatcatggtcggaccgggaacaggcgtcgcgccgtttagaggctttgtgcaggcgcgcaaacagctaaaagaacaaggacagtcacttggagaagcacatttatacttcggctgccgttcacctcatgaagactatctgtatcaagaagagcttgaaaacgcccaaagcgaaggcatcattacgcttcataccgctttttctcgcatgccaaatcagccgaaaacatacgttcagcacgtaatggaacaagacggcaagaaattgattgaacttcttgatcaaggagcgcacttctatatttgcggagacggaagccaaatggcacctgccgttgaagcaacgcttatgaaaagctatgctgacgttcaccaagtgagtgaagcagacgctcgcttatggctgcagcagctagaagaaaaaggccgatacgcaaaagacgtgtgggctggg

SEQ ID NO: 358 - protein, 1049 aa, synthetic construct
  REGION 1..1049: note = variant of P450 oxidase from Bacillus megaterium
MTIKEMPQPKTFGELKNLPLLNTDKPVQALMRIADELGEIFKFEAPGSVTRYLSSQRLIKEACDESRFDKNLSQALKFARDFVGDGLSTSWTHEPNWKKAHNILVPSFSQHAMGRYHAMMVDIAVQLVQKWERLNADEHIEVSEDMTRLTLDTIGLCGFNYRFNSFYRDQPHPFIVSVVRALDEVMNKLQRANPDDPAYDENKRQCQEDIKVMNDYVDKIIADRKARGEQSHDLLTQMLNGKDPETGEPLDDGNIRQQIITFLIAGHQTTSGLLSFALYFLVKNPHVLQKVAEEAARVLVDPVPSYKQVKQLKYVGMVLNEALRLWPVAPMFSLYAKEDTVLGGEYPLTKGDEVMVLVPQLHRDKTIWGDDVEEFRPERFENPSAIPQHAFKPFGNGQRACIGQQFALHEATLVLGMMLKHFDFEDHTNYELVIKESRTLKPEGFVVKAKSKGIPLGGIPSPSTEQSAKKVRKKAENAHNTPLLVLYGSNAGTAEGTARDLADIAMSKGFAPQVATLDSHARNLPREGAVLIVTASYNGHPPDNAKQFVDWLDQASADEVKGVRYSVFGCGDKNWAGTYQKVPAFIDETLAAKGAENIADRGEADASDDFEGTYEEWRDHMWSDVAAYFNLDIENSEDNKSTLSLQFVDSAADMPLAKMHGAFSTNVVASKELQQPGSARSTRHLEIELPKEASYQEGDHLGVIPRNYEGIVNRVTARFGLSASQQIRLEAEEEKLAHLPLAKTVSVEELLQYVELQDPVTRTQLRAMAAKTVCPPHKVELEALLEKQAYKEQVLAKRLTMLELLEKYPACEMKFSEFIALLPSIRPRYYSISSSPRVDEKQASITVSVVSGPAWSGYGEYKGIASNYLAELQEGDTITCFISTPQSEFTLPKDPETPLIMVGPGTGVAPFRGFVQARKQLKEQGQSLGEAHLYFGCRSPHEDYLYQEELENAQSEGIITLHTAFSRMPNQPKTYVQHVMEQDGKKLIELLDQGAHFYICGDGSQMAPAVEATLMKSYADVHQVSEADARLWLQQLEEKGRYAKDVWAG

SEQ ID NO: 359 - DNA, 3147 bp, synthetic construct
  misc_feature 1..3147: note = variant of P450 oxidase from Bacillus megaterium
  source 1..3147: mol_type = other DNA
atgacaattaaggaaatgcctcagcctaagacgtttggagaacttaaaaatttaccgttattaaacacagataaaccggttcaagctttgatgcgtattgcggatgaattaggagaaatctttaaattcgaggcgcctggtagcgtaacgcgctatttatcaagtcagcgtctaattaaagaagcatgcgatgaatcacgctttgataaaaacttaagtcaagcgcttaaatttgcacgtgattttgttggagacggggtggccacaagctggacgcatgaaccgaattggaaaaaagcgcataatatcttagttccaagctttagtcagcatgcaatggggcgttatcatgcgatgatggtcgatatcgccgtgcagcttgttcaaaagtgggagcgtctaaatgcagatgagcatattgaagtatcggaagacatgacacgtttaacgcttgatacaattggtctttgcggctttaactatcgctttaacagcttttaccgagatcagcctcatccatttattgtgagtgtggttcgtgcactggatgaagtaatgaacaagctgcagcgagcaaatccagacgacccagcttatgatgaaaacaagcgccagtgtcaagaagatatcaaggtgatgaacgactatgtagataaaattattgcagatcgcaaagcaaggggtgaacaaagtcatgatttattaacgcagatgctaaacggaaaagatccagaaacgggtgagccgcttgatgacgggaacattcgtcagcaaattattacattcttaattgcgggacaccaaacaacaagtggtcttttatcatttgcgctgtatttcttagtgaaaaatccacatgtattacaaaaagtagcagaagaagcagcacgagttctagtagatcctgttccaagctacaaacaagtcaaacagcttaaatatgttggcatggtcttaaacgaagcgctgcgcttatggccagtagcgcctatgttttccctatatgcaaaagaagatacggtgcttggaggagaatatcctttaacgaaaggcgacgaagtaatggttctggtgcctcagcttcaccgtgataaaacaatttggggagacgatgtggaggagttccgtccagagcgttttgaaaatccaagtgcgattccgcagcatgcgtttaaaccgtttggaaacggtcagcgtgcgtgtatcggtcagcagttcgctcttcatgaagcaacgctggtacttggtatgatgctaaaacactttgactttgaagatcatacaaactacgagctcgttattaaagaatcgcggacgttaaaacctgaaggctttgtggtaaaagcaaaatcgaaaggcattccgcttggcggtattccttcacctagcactgaacagtctgctaaaaaagtacgcaaaaaggcagaaaacgctcataatacgccgctgcttgtgctatacggttcaaatgcgggaacagctgaaggaacggcgcgtgatttagcagatattgcaatgagcaaaggatttgcaccgcaggtcgcaacgcttgattcacacgccggaaatcttccgcgcgaaggagctgtattaattgtaacggcgtcttataacggtcatccgcctgataacgcaaagcaatttgtcgactggttagaccaagcgtctgctgatgaagtaaaaggcgttcgctactccgtatttggatgcggcgataaaaattgggcggggacgtatcaaaaagtgcctgcttttatcgatgaaacgcttgccgctaaaggggcagaaaacatcgctgaccgcggtgaagcagatgcaagcgacgactttgaaggcacatatgaagaatggcgtgatcatatgtggagtgacgtagcagcctactttaacctcgacattgaaaacagtgaagataataaatctactctttcacttcaatttgtcgacagcgccgcggatatgccgcttgcgaaaatgcacggtgcgttttcaacgaacgtcgtagcaagcaaagaacttcaacagccaggcagtgcacgaagcacgcgacatcttgaaattgaacttccaaaagaagcttcttatcaagaaggagatcatttaggtgttattcctcgcaactatgaaggaatagtaaaccgtgtaacagcaaggttcggcctaagcgcatcacagcaaatccgtctggaagcagaagaagaaaaattagctcatttgccactcgctaaaacagtatccgtagaagagcttctgcaatacgtggagcttcaagatcctgttacgcgcacgcagcttcgcgcaatggctgctaaaacggtctgcccgccgcataaagtagagcttgaagccttgcttgaaaagcaagcctacaaagaacaagtgctggcaaaacgtttaacaatgcttgaactgcttgaaaaatacccggcgtgtgaaatgaaattcagcgaatttatcgcccttctgccaagcatacgcccgcgctattactcgatttcttcatcacctcgtgtcgatgaaaaacaagcaagcatcacggtcagcgttgtctcaggaccggcgtggagcggatatggagaatataaaggaattgcgtcgaactatcttgccgagctgcaagaaggagatacgattacgtgctttatttccacaccgcagtcagaatttacgctgccaaaagaccctgaaacgccgcttatcatggtcggaccgggaacaggcgtcgcgccgtttagaggctttgtgcaggcgcgcaaacagctaaaagaacaaggacagtcacttggagaagcacatttatacttcggctgccgttcacctcatgaagactatctgtatcaagaagagcttgaaaacgcccaaagcgaaggcatcattacgcttcataccgctttttctcgcatgccaaatcagccgaaaacatacgttcagcacgtaatggaacaagacggcaagaaattgattgaacttcttgatcaaggagcgcacttctatatttgcggagacggaagccaaatggcacctgccgttgaagcaacgcttatgaaaagctatgctgacgttcaccaagtgagtgaagcagacgctcgcttatggctgcagcagctagaagaaaaaggccgatacgcaaaagacgtgtgggctggg

SEQ ID NO: 360 - protein, 1049 aa, synthetic construct
  REGION 1..1049: note = variant of P450 oxidase from Bacillus megaterium
MTIKEMPQPKTFGELKNLPLLNTDKPVQALMRIADELGEIFKFEAPGSVTRYLSSQRLIKEACDESRFDKNLSQALKFARDFVGDGVATSWTHEPNWKKAHNILVPSFSQHAMGRYHAMMVDIAVQLVQKWERLNADEHIEVSEDMTRLTLDTIGLCGFNYRFNSFYRDQPHPFIVSVVRALDEVMNKLQRANPDDPAYDENKRQCQEDIKVMNDYVDKIIADRKARGEQSHDLLTQMLNGKDPETGEPLDDGNIRQQIITFLIAGHQTTSGLLSFALYFLVKNPHVLQKVAEEAARVLVDPVPSYKQVKQLKYVGMVLNEALRLWPVAPMFSLYAKEDTVLGGEYPLTKGDEVMVLVPQLHRDKTIWGDDVEEFRPERFENPSAIPQHAFKPFGNGQRACIGQQFALHEATLVLGMMLKHFDFEDHTNYELVIKESRTLKPEGFVVKAKSKGIPLGGIPSPSTEQSAKKVRKKAENAHNTPLLVLYGSNAGTAEGTARDLADIAMSKGFAPQVATLDSHAGNLPREGAVLIVTASYNGHPPDNAKQFVDWLDQASADEVKGVRYSVFGCGDKNWAGTYQKVPAFIDETLAAKGAENIADRGEADASDDFEGTYEEWRDHMWSDVAAYFNLDIENSEDNKSTLSLQFVDSAADMPLAKMHGAFSTNVVASKELQQPGSARSTRHLEIELPKEASYQEGDHLGVIPRNYEGIVNRVTARFGLSASQQIRLEAEEEKLAHLPLAKTVSVEELLQYVELQDPVTRTQLRAMAAKTVCPPHKVELEALLEKQAYKEQVLAKRLTMLELLEKYPACEMKFSEFIALLPSIRPRYYSISSSPRVDEKQASITVSVVSGPAWSGYGEYKGIASNYLAELQEGDTITCFISTPQSEFTLPKDPETPLIMVGPGTGVAPFRGFVQARKQLKEQGQSLGEAHLYFGCRSPHEDYLYQEELENAQSEGIITLHTAFSRMPNQPKTYVQHVMEQDGKKLIELLDQGAHFYICGDGSQMAPAVEATLMKSYADVHQVSEADARLWLQQLEEKGRYAKDVWAG

SEQ ID NO: 361 - DNA, 3147 bp, synthetic construct
  misc_feature 1..3147: note = variant of P450 oxidase from Bacillus megaterium
  source 1..3147: mol_type = other DNA
atgacaattaaggaaatgcctcagcctaagacgtttggagaacttaaaaatttaccgttattaaacacagataaaccggttcaagctttgatgcgtattgcggatgaattaggagaaatctttaaattcgaggcgcctggtagcgtaacgcgctatttatcaagtcagcgtctaattaaagaagcatgcgatgaatcacgctttgataaaaacttaagtcaagcgcttaaatttgcacgtgattttgttggagacgggttagccacaagctggacgcatgaaccgaattggaaaaaagcgcataatatcttagttccaagctttagtcagcatgcaatggggcgttatcatgcgatgatggtcgatatcgccgtgcagcttgttcaaaagtgggagcgtctaaatgcagatgagcatattgaagtatcggaagacatgacacgtttaacgcttgatacaattggtctttgcggctttaactatcgctttaacagcttttaccgagatcagcctcatccatttattgtgagtgtggttcgtgcactggatgaagtaatgaacaagctgcagcgagcaaatccagacgacccagcttatgatgaaaacaagcgccagtgtcaagaagatatcaaggtgatgaacgactatgtagataaaattattgcagatcgcaaagcaaggggtgaacaaagtcatgatttattaacgcagatgctaaacggaaaagatccagaaacgggtgagccgcttgatgacgggaacattcgtcagcaaattattacattcttaattgcgggacaccaaacaacaagtggtcttttatcatttgcgctgtatttcttagtgaaaaatccacatgtattacaaaaagtagcagaagaagcagcacgagttctagtagatcctgttccaagctacaaacaagtcaaacagcttaaatatgttggcatggtcttaaacgaagcgctgcgcttatggccagtagcgccttctttttccctatatgcaaaagaagatacggtgcttggaggagaatatcctttaacgaaaggcgacgaagtaatggttctggtgcctcagcttcaccgtgataaaacaatttggggagacgatgtggaggagttccgtccagagcgttttgaaaatccaagtgcgattccgcagcatgcgtttaaaccgtttggaaacggtcagcgtgcgtgtatcggtcagcagttcgctcttcatgaagcaacgctggtacttggtatgatgctaaaacactttgactttgaagatcatacaaactacgagctcgttattaaagaatcgcggacgttaaaacctgaaggctttgtggtaaaagcaaaatcgaaaggcattccgcttggcggtattccttcacctagcactgaacagtctgctaaaaaagtacgcaaaaaggcagaaaacgctcataatacgccgctgcttgtgctatacggttcaaatgcgggaacagctgaaggaacggcgcgtgatttagcagatattgcaatgagcaaaggatttgcaccgcaggtcgcaacgcttgattcacacgccggaaatcttccgcgcgaaggagctgtattaattgtaacggcgtcttataacggtcatccgcctgataacgcaaagcaatttgtcgactggttagaccaagcgtctgctgatgaagtaaaaggcgttcgctactccgtatttggatgcggcgataaaaattgggcggggacgtatcaaaaagtgcctgcttttatcgatgaaacgcttgccgctaaaggggcagaaaacatcgctgaccgcggtgaagcagatgcaagcgacgactttgaaggcacatatgaagaatggcgtgatcatatgtggagtgacgtagcagcctactttaacctcgacattgaaaacagtgaagataataaatctactctttcacttcaatttgtcgacagcgccgcggatatgccgcttgcgaaaatgcacggtgcgttttcaacgaacgtcgtagcaagcaaagaacttcaacagccaggcagtgcacgaagcacgcgacatcttgaaattgaacttccaaaagaagcttcttatcaagaaggagatcatttaggtgttattcctcgcaactatgaaggaatagtaaaccgtgtaacagcaaggttcggcctaagcgcatcacagcaaatccgtctggaagcagaagaagaaaaattagctcatttgccactcgctaaaacagtatccgtagaagagcttctgcaatacgtggagcttcaagatcctgttacgcgcacgcagcttcgcgcaatggctgctaaaacggtctgcccgccgcataaagtagagcttgaagccttgcttgaaaagcaagcctacaaagaacaagtgctggcaaaacgtttaacaatgcttgaactgcttgaaaaatacccggcgtgtgaaatgaaattcagcgaatttatcgcccttctgccaagcatacgcccgcgctattactcgatttcttcatcacctcgtgtcgatgaaaaacaagcaagcatcacggtcagcgttgtctcaggaccggcgtggagcggatatggagaatataaaggaattgcgtcgaactatcttgccgagctgcaagaaggagatacgattacgtgctttatttccacaccgcagtcagaatttacgctgccaaaagaccctgaaacgccgcttatcatggtcggaccgggaacaggcgtcgcgccgtttagaggctttgtgcaggcgcgcaaacagctaaaagaacaaggacagtcacttggagaagcacatttatacttcggctgccgttcacctcatgaagactatctgtatcaagaagagcttgaaaacgcccaaagcgaaggcatcattacgcttcataccgctttttctcgcatgccaaatcagccgaaaacatacgttcagcacgtaatggaacaagacggcaagaaattgattgaacttcttgatcaaggagcgcacttctatatttgcggagacggaagccaaatggcacctgccgttgaagcaacgcttatgaaaagctatgctgacgttcaccaagtgagtgaagcagacgctcgcttatggctgcagcagctagaagaaaaaggccgatacgcaaaagacgtgtgggctggg

SEQ ID NO: 362 - protein, 1049 aa, synthetic construct
  REGION 1..1049: note = variant of P450 oxidase from Bacillus megaterium
MTIKEMPQPKTFGELKNLPLLNTDKPVQALMRIADELGEIFKFEAPGSVTRYLSSQRLIKEACDESRFDKNLSQALKFARDFVGDGLATSWTHEPNWKKAHNILVPSFSQHAMGRYHAMMVDIAVQLVQKWERLNADEHIEVSEDMTRLTLDTIGLCGFNYRFNSFYRDQPHPFIVSVVRALDEVMNKLQRANPDDPAYDENKRQCQEDIKVMNDYVDKIIADRKARGEQSHDLLTQMLNGKDPETGEPLDDGNIRQQIITFLIAGHQTTSGLLSFALYFLVKNPHVLQKVAEEAARVLVDPVPSYKQVKQLKYVGMVLNEALRLWPVAPSFSLYAKEDTVLGGEYPLTKGDEVMVLVPQLHRDKTIWGDDVEEFRPERFENPSAIPQHAFKPFGNGQRACIGQQFALHEATLVLGMMLKHFDFEDHTNYELVIKESRTLKPEGFVVKAKSKGIPLGGIPSPSTEQSAKKVRKKAENAHNTPLLVLYGSNAGTAEGTARDLADIAMSKGFAPQVATLDSHAGNLPREGAVLIVTASYNGHPPDNAKQFVDWLDQASADEVKGVRYSVFGCGDKNWAGTYQKVPAFIDETLAAKGAENIADRGEADASDDFEGTYEEWRDHMWSDVAAYFNLDIENSEDNKSTLSLQFVDSAADMPLAKMHGAFSTNVVASKELQQPGSARSTRHLEIELPKEASYQEGDHLGVIPRNYEGIVNRVTARFGLSASQQIRLEAEEEKLAHLPLAKTVSVEELLQYVELQDPVTRTQLRAMAAKTVCPPHKVELEALLEKQAYKEQVLAKRLTMLELLEKYPACEMKFSEFIALLPSIRPRYYSISSSPRVDEKQASITVSVVSGPAWSGYGEYKGIASNYLAELQEGDTITCFISTPQSEFTLPKDPETPLIMVGPGTGVAPFRGFVQARKQLKEQGQSLGEAHLYFGCRSPHEDYLYQEELENAQSEGIITLHTAFSRMPNQPKTYVQHVMEQDGKKLIELLDQGAHFYICGDGSQMAPAVEATLMKSYADVHQVSEADARLWLQQLEEKGRYAKDVWAG

SEQ ID NO: 363 - DNA, 3147 bp, synthetic construct
  misc_feature 1..3147: note = variant of P450 oxidase from Bacillus megaterium
  source 1..3147: mol_type = other DNA
atgacaattaaggaaatgcctcagcctaagacgtttggagaacttaaaaatttaccgttattaaacacagataaaccggttcaagctttgatgcgtattgcggatgaattaggagaaatctttaaattcgaggcgcctggtagcgtaacgcgctatttatcaagtcagcgtctaattaaagaagcatgcgatgaatcacgctttgataaaaacttaagtcaagcgcttaaatttgcacgtgattttgttggagacgggttagccacaagctggacgcatgaaccgaattggaaaaaagcgcataatatcttagttccaagctttagtcagcatgcaatggggcgttatcatgcgatgatggtcgatatcgccgtgcagcttgttcaaaagtgggagcgtctaaatgcagatgagcatattgaagtatcggaagacatgacacgtttaacgcttgatacaattggtctttgcggctttaactatcgctttaacagcttttaccgagatcagcctcatccatttattgtgagtgtggttcgtgcactggatgaagtaatgaacaagctgcagcgagcaaatccagacgacccagcttatgatgaaaacaagcgccagtgtcaagaagatatcaaggtgatgaacgactatgtagataaaattattgcagatcgcaaagcaaggggtgaacaaagtcatgatttattaacgcagatgctaaacggaaaagatccagaaacgggtgagccgcttgatgacgggaacattcgtcagcaaattattacattcttaattgcgggacaccaacctacaagtggtcttttatcatttgcgctgtatttcttagtgaaaaatccacatgtattacaaaaagtagcagaagaagcagcacgagttctagtagatcctgttccaagctacaaacaagtcaaacagcttaaatatgttggcatggtcttaaacgaagcgctgcgcttatggccagtagcgcctatgttttccctatatgcaaaagaagatacggtgcttggaggagaatatcctttaacgaaaggcgacgaagtaatggttctggtgcctcagcttcaccgtgataaaacaatttggggagacgatgtggaggagttccgtccagagcgttttgaaaatccaagtgcgattccgcagcatgcgtttaaaccgtttggaaacggtcagcgtgcgtgtatcggtcagcagttcgctcttcatgaagcaacgctggtacttggtatgatgctaaaacactttgactttgaagatcatacaaactacgagctcgttattaaagaatcgcggacgttaaaacctgaaggctttgtggtaaaagcaaaatcgaaaggcattccgcttggcggtattccttcacctagcactgaacagtctgctaaaaaagtacgcaaaaaggcagaaaacgctcataatacgccgctgcttgtgctatacggttcaaatgcgggaacagctgaaggaacggcgcgtgatttagcagatattgcaatgagcaaaggatttgcaccgcaggtcgcaacgcttgattcacacgccggaaatcttccgcgcgaaggagctgtattaattgtaacggcgtcttataacggtcatccgcctgataacgcaaagcaatttgtcgactggttagaccaagcgtctgctgatgaagtaaaaggcgttcgctactccgtatttggatgcggcgataaaaattgggcggggacgtatcaaaaagtgcctgcttttatcgatgaaacgcttgccgctaaaggggcagaaaacatcgctgaccgcggtgaagcagatgcaagcgacgactttgaaggcacatatgaagaatggcgtgatcatatgtggagtgacgtagcagcctactttaacctcgacattgaaaacagtgaagataataaatctactctttcacttcaatttgtcgacagcgccgcggatatgccgcttgcgaaaatgcacggtgcgttttcaacgaacgtcgtagcaagcaaagaacttcaacagccaggcagtgcacgaagcacgcgacatcttgaaattgaacttccaaaagaagcttcttatcaagaaggagatcatttaggtgttattcctcgcaactatgaaggaatagtaaaccgtgtaacagcaaggttcggcctaagcgcatcacagcaaatccgtctggaagcagaagaagaaaaattagctcatttgccactcgctaaaacagtatccgtagaagagcttctgcaatacgtggagcttcaagatcctgttacgcgcacgcagcttcgcgcaatggctgctaaaacggtctgcccgccgcataaagtagagcttgaagccttgcttgaaaagcaagcctacaaagaacaagtgctggcaaaacgtttaacaatgcttgaactgcttgaaaaatacccggcgtgtgaaatgaaattcagcgaatttatcgcccttctgccaagcatacgcccgcgctattactcgatttcttcatcacctcgtgtcgatgaaaaacaagcaagcatcacggtcagcgttgtctcaggaccggcgtggagcggatatggagaatataaaggaattgcgtcgaactatcttgccgagctgcaagaaggagatacgattacgtgctttatttccacaccgcagtcagaatttacgctgccaaaagaccctgaaacgccgcttatcatggtcggaccgggaacaggcgtcgcgccgtttagaggctttgtgcaggcgcgcaaacagctaaaagaacaaggacagtcacttggagaagcacatttatacttcggctgccgttcacctcatgaagactatctgtatcaagaagagcttgaaaacgcccaaagcgaaggcatcattacgcttcataccgctttttctcgcatgccaaatcagccgaaaacatacgttcagcacgtaatggaacaagacggcaagaaattgattgaacttcttgatcaaggagcgcacttctatatttgcggagacggaagccaaatggcacctgccgttgaagcaacgcttatgaaaagctatgctgacgttcaccaagtgagtgaagcagacgctcgcttatggctgcagcagctagaagaaaaaggccgatacgcaaaagacgtgtgggctggg

SEQ ID NO: 364 - protein, 1049 aa, synthetic construct
  REGION 1..1049: note = variant of P450 oxidase from Bacillus megaterium
MTIKEMPQPKTFGELKNLPLLNTDKPVQALMRIADELGEIFKFEAPGSVTRYLSSQRLIKEACDESRFDKNLSQALKFARDFVGDGLATSWTHEPNWKKAHNILVPSFSQHAMGRYHAMMVDIAVQLVQKWERLNADEHIEVSEDMTRLTLDTIGLCGFNYRFNSFYRDQPHPFIVSVVRALDEVMNKLQRANPDDPAYDENKRQCQEDIKVMNDYVDKIIADRKARGEQSHDLLTQMLNGKDPETGEPLDDGNIRQQIITFLIAGHQPTSGLLSFALYFLVKNPHVLQKVAEEAARVLVDPVPSYKQVKQLKYVGMVLNEALRLWPVAPMFSLYAKEDTVLGGEYPLTKGDEVMVLVPQLHRDKTIWGDDVEEFRPERFENPSAIPQHAFKPFGNGQRACIGQQFALHEATLVLGMMLKHFDFEDHTNYELVIKESRTLKPEGFVVKAKSKGIPLGGIPSPSTEQSAKKVRKKAENAHNTPLLVLYGSNAGTAEGTARDLADIAMSKGFAPQVATLDSHAGNLPREGAVLIVTASYNGHPPDNAKQFVDWLDQASADEVKGVRYSVFGCGDKNWAGTYQKVPAFIDETLAAKGAENIADRGEADASDDFEGTYEEWRDHMWSDVAAYFNLDIENSEDNKSTLSLQFVDSAADMPLAKMHGAFSTNVVASKELQQPGSARSTRHLEIELPKEASYQEGDHLGVIPRNYEGIVNRVTARFGLSASQQIRLEAEEEKLAHLPLAKTVSVEELLQYVELQDPVTRTQLRAMAAKTVCPPHKVELEALLEKQAYKEQVLAKRLTMLELLEKYPACEMKFSEFIALLPSIRPRYYSISSSPRVDEKQASITVSVVSGPAWSGYGEYKGIASNYLAELQEGDTITCFISTPQSEFTLPKDPETPLIMVGPGTGVAPFRGFVQARKQLKEQGQSLGEAHLYFGCRSPHEDYLYQEELENAQSEGIITLHTAFSRMPNQPKTYVQHVMEQDGKKLIELLDQGAHFYICGDGSQMAPAVEATLMKSYADVHQVSEADARLWLQQLEEKGRYAKDVWAG

SEQ ID NO: 365 - DNA, 3147 bp, synthetic construct
  misc_feature 1..3147: note = variant of P450 oxidase from Bacillus megaterium
  source 1..3147: mol_type = other DNA
atgacaattaaggaaatgcctcagcctaagacgtttggagaacttaaaaatttaccgttattaaacacagataaaccggttcaagctttgatgcgtattgcggatgaattaggagaaatctttaaattcgaggcgcctggtagcgtaacgcgctatttatcaagtcagcgtctaattaaagaagcatgcgatgaatcacgctttgataaaaacttaagtcaagcgcttaaatttgcacgtgattttgttggagacgggttagccacaagctggacgcatgaaccgaattggaaaaaagcgcataatatcttagttccaagctttagtcagcatgcaatggggcgttatcatgcgatgatggtcgatatcgccgtgcagcttgttcaaaagtgggagcgtctaaatgcagatgagcatattgaagtatcggaagacatgacacgtttaacgcttgatacaattggtctttgcggctttaactatcgctttaacagcttttaccgagatcagcctcatccatttattgtgagtgtggttcgtgcactggatgaagtaatgaacaagctgcagcgagcaaatccagacgacccagcttatgatgaaaacaagcgccagtgtcaagaagatatcaaggtgatgaacgactatgtagataaaattattgcagatcgcaaagcaaggggtgaacaaagtcatgatttattaacgcagatgctaaacggaaaagatccagaaacgggtgagccgcttgatgacgggaacattcgtcagcaaattattacattcttaattgcgggacaccaaggtacaagtggtcttttatcatttgcgctgtatttcttagtgaaaaatccacatgtattacaaaaagtagcagaagaagcagcacgagttctagtagatcctgttccaagctacaaacaagtcaaacagcttaaatatgttggcatggtcttaaacgaagcgctgcgcttatggccagtagcgcctatgttttccctatatgcaaaagaagatacggtgcttggaggagaatatcctttaacgaaaggcgacgaagtaatggttctggtgcctcagcttcaccgtgataaaacaatttggggagacgatgtggaggagttccgtccagagcgttttgaaaatccaagtgcgattccgcagcatgcgtttaaaccgtttggaaacggtcagcgtgcgtgtatcggtcagcagttcgctcttcatgaagcaacgctggtacttggtatgatgctaaaacactttgactttgaagatcatacaaactacgagctcgttattaaagaatcgcggacgttaaaacctgaaggctttgtggtaaaagcaaaatcgaaaggcattccgcttggcggtattccttcacctagcactgaacagtctgctaaaaaagtacgcaaaaaggcagaaaacgctcataatacgccgctgcttgtgctatacggttcaaatgcgggaacagctgaaggaacggcgcgtgatttagcagatattgcaatgagcaaaggatttgcaccgcaggtcgcaacgcttgattcacacgccggaaatcttccgcgcgaaggagctgtattaattgtaacggcgtcttataacggtcatccgcctgataacgcaaagcaatttgtcgactggttagaccaagcgtctgctgatgaagtaaaaggcgttcgctactccgtatttggatgcggcgataaaaattgggcggggacgtatcaaaaagtgcctgcttttatcgatgaaacgcttgccgctaaaggggcagaaaacatcgctgaccgcggtgaagcagatgcaagcgacgactttgaaggcacatatgaagaatggcgtgatcatatgtggagtgacgtagcagcctactttaacctcgacattgaaaacagtgaagataataaatctactctttcacttcaatttgtcgacagcgccgcggatatgccgcttgcgaaaatgcacggtgcgttttcaacgaacgtcgtagcaagcaaagaacttcaacagccaggcagtgcacgaagcacgcgacatcttgaaattgaacttccaaaagaagcttcttatcaagaaggagatcatttaggtgttattcctcgcaactatgaaggaatagtaaaccgtgtaacagcaaggttcggcctaagcgcatcacagcaaatccgtctggaagcagaagaagaaaaattagctcatttgccactcgctaaaacagtatccgtagaagagcttctgcaatacgtggagcttcaagatcctgttacgcgcacgcagcttcgcgcaatggctgctaaaacggtctgcccgccgcataaagtagagcttgaagccttgcttgaaaagcaagcctacaaagaacaagtgctggcaaaacgtttaacaatgcttgaactgcttgaaaaatacccggcgtgtgaaatgaaattcagcgaatttatcgcccttctgccaagcatacgcccgcgctattactcgatttcttcatcacctcgtgtcgatgaaaaacaagcaagcatcacggtcagcgttgtctcaggaccggcgtggagcggatatggagaatataaaggaattgcgtcgaactatcttgccgagctgcaagaaggagatacgattacgtgctttatttccacaccgcagtcagaatttacgctgccaaaagaccctgaaacgccgcttatcatggtcggaccgggaacaggcgtcgcgccgtttagaggctttgtgcaggcgcgcaaacagctaaaagaacaaggacagtcacttggagaagcacatttatacttcggctgccgttcacctcatgaagactatctgtatcaagaagagcttgaaaacgcccaaagcgaaggcatcattacgcttcataccgctttttctcgcatgccaaatcagccgaaaacatacgttcagcacgtaatggaacaagacggcaagaaattgattgaacttcttgatcaaggagcgcacttctatatttgcggagacggaagccaaatggcacctgccgttgaagcaacgcttatgaaaagctatgctgacgttcaccaagtgagtgaagcagacgctcgcttatggctgcagcagctagaagaaaaaggccgatacgcaaaagacgtgtgggctggg

SEQ ID NO: 366 - protein, 1049 aa, synthetic construct
  REGION 1..1049: note = variant of P450 oxidase from Bacillus megaterium
MTIKEMPQPKTFGELKNLPLLNTDKPVQALMRIADELGEIFKFEAPGSVTRYLSSQRLIKEACDESRFDKNLSQALKFARDFVGDGLATSWTHEPNWKKAHNILVPSFSQHAMGRYHAMMVDIAVQLVQKWERLNADEHIEVSEDMTRLTLDTIGLCGFNYRFNSFYRDQPHPFIVSVVRALDEVMNKLQRANPDDPAYDENKRQCQEDIKVMNDYVDKIIADRKARGEQSHDLLTQMLNGKDPETGEPLDDGNIRQQIITFLIAGHQGTSGLLSFALYFLVKNPHVLQKVAEEAARVLVDPVPSYKQVKQLKYVGMVLNEALRLWPVAPMFSLYAKEDTVLGGEYPLTKGDEVMVLVPQLHRDKTIWGDDVEEFRPERFENPSAIPQHAFKPFGNGQRACIGQQFALHEATLVLGMMLKHFDFEDHTNYELVIKESRTLKPEGFVVKAKSKGIPLGGIPSPSTEQSAKKVRKKAENAHNTPLLVLYGSNAGTAEGTARDLADIAMSKGFAPQVATLDSHAGNLPREGAVLIVTASYNGHPPDNAKQFVDWLDQASADEVKGVRYSVFGCGDKNWAGTYQKVPAFIDETLAAKGAENIADRGEADASDDFEGTYEEWRDHMWSDVAAYFNLDIENSEDNKSTLSLQFVDSAADMPLAKMHGAFSTNVVASKELQQPGSARSTRHLEIELPKEASYQEGDHLGVIPRNYEGIVNRVTARFGLSASQQIRLEAEEEKLAHLPLAKTVSVEELLQYVELQDPVTRTQLRAMAAKTVCPPHKVELEALLEKQAYKEQVLAKRLTMLELLEKYPACEMKFSEFIALLPSIRPRYYSISSSPRVDEKQASITVSVVSGPAWSGYGEYKGIASNYLAELQEGDTITCFISTPQSEFTLPKDPETPLIMVGPGTGVAPFRGFVQARKQLKEQGQSLGEAHLYFGCRSPHEDYLYQEELENAQSEGIITLHTAFSRMPNQPKTYVQHVMEQDGKKLIELLDQGAHFYICGDGSQMAPAVEATLMKSYADVHQVSEADARLWLQQLEEKGRYAKDVWAG

SEQ ID NO: 367 - DNA, 3147 bp, synthetic construct
  misc_feature 1..3147: note = variant of P450 oxidase from Bacillus megaterium
  source 1..3147: mol_type = other DNA
atgacaattaaggaaatgcctcagcctaagacgtttggagaacttaaaaatttaccgttattaaacacagataaaccggttcaagctttgatgcgtattgcggatgaattaggagaaatctttaaattcgaggcgcctggtagcgtaacgcgctatttatcaagtcagcgtctaattaaagaagcatgcgatgaatcacgctttgataaaaacttaagtcaagcgcttaaatttgcacgtgattttgttggagacgggattgccacaagctggacgcatgaaccgaattggaaaaaagcgcataatatcttagttccaagctttagtcagcatgcaatggggcgttatcatgcgatgatggtcgatatcgccgtgcagcttgttcaaaagtgggagcgtctaaatgcagatgagcatattgaagtatcggaagacatgacacgtttaacgcttgatacaattggtctttgcggctttaactatcgctttaacagcttttaccgagatcagcctcatccatttattgtgagtgtggttcgtgcactggatgaagtaatgaacaagctgcagcgagcaaatccagacgacccagcttatgatgaaaacaagcgccagtgtcaagaagatatcaaggtgatgaacgactatgtagataaaattattgcagatcgcaaagcaaggggtgaacaaagtcatgatttattaacgcagatgctaaacggaaaagatccagaaacgggtgagccgcttgatgacgggaacattcgtcagcaaattattacattcttaattgcgggacaccaaacaacaagtggtcttttatcatttgcgctgtatttcttagtgaaaaatccacatgtattacaaaaagtagcagaagaagcagcacgagttctagtagatcctgttccaagctacaaacaagtcaaacagcttaaatatgttggcatggtcttaaacgaagcgctgcgcttatggccagtagcgcctatgttttccctatatgcaaaagaagatacggtgcttggaggagaatatcctttaacgaaaggcgacgaagtaatggttctggtgcctcagcttcaccgtgataaaacaatttggggagacgatgtggaggagttccgtccagagcgttttgaaaatccaagtgcgattccgcagcatgcgtttaaaccgtttggaaacggtcagcgtgcgtgtatcggtcagcagttcgctcttcatgaagcaacgctggtacttggtatgatgctaaaacactttgactttgaagatcatacaaactacgagctcgttattaaagaatcgcggacgttaaaacctgaaggctttgtggtaaaagcaaaatcgaaaggcattccgcttggcggtattccttcacctagcactgaacagtctgctaaaaaagtacgcaaaaaggcagaaaacgctcataatacgccgctgcttgtgctatacggttcaaatgcgggaacagctgaaggaacggcgcgtgatttagcagatattgcaatgagcaaaggatttgcaccgcaggtcgcaacgcttgattcacacgccggaaatcttccgcgcgaaggagctgtattaattgtaacggcgtcttataacggtcatccgcctgataacgcaaagcaatttgtcgactggttagaccaagcgtctgctgatgaagtaaaaggcgttcgctactccgtatttggatgcggcgataaaaattgggcggggacgtatcaaaaagtgcctgcttttatcgatgaaacgcttgccgctaaaggggcagaaaacatcgctgaccgcggtgaagcagatgcaagcgacgactttgaaggcacatatgaagaatggcgtgatcatatgtggagtgacgtagcagcctactttaacctcgacattgaaaacagtgaagataataaatctactctttcacttcaatttgtcgacagcgccgcggatatgccgcttgcgaaaatgcacggtgcgttttcaacgaacgtcgtagcaagcaaagaacttcaacagccaggcagtgcacgaagcacgcgacatcttgaaattgaacttccaaaagaagcttcttatcaagaaggagatcatttaggtgttattcctcgcaactatgaaggaatagtaaaccgtgtaacagcaaggttcggcctaagcgcatcacagcaaatccgtctggaagcagaagaagaaaaattagctcatttgccactcgctaaaacagtatccgtagaagagcttctgcaatacgtggagcttcaagatcctgttacgcgcacgcagcttcgcgcaatggctgctaaaacggtctgcccgccgcataaagtagagcttgaagccttgcttgaaaagcaagcctacaaagaacaagtgctggcaaaacgtttaacaatgcttgaactgcttgaaaaatacccggcgtgtgaaatgaaattcagcgaatttatcgcccttctgccaagcatacgcccgcgctattactcgatttcttcatcacctcgtgtcgatgaaaaacaagcaagcatcacggtcagcgttgtctcaggaccggcgtggagcggatatggagaatataaaggaattgcgtcgaactatcttgccgagctgcaagaaggagatacgattacgtgctttatttccacaccgcagtcagaatttacgctgccaaaagaccctgaaacgccgcttatcatggtcggaccgggaacaggcgtcgcgccgtttagaggctttgtgcaggcgcgcaaacagctaaaagaacaaggacagtcacttggagaagcacatttatacttcggctgccgttcacctcatgaagactatctgtatcaagaagagcttgaaaacgcccaaagcgaaggcatcattacgcttcataccgctttttctcgcatgccaaatcagccgaaaacatacgttcagcacgtaatggaacaagacggcaagaaattgattgaacttcttgatcaaggagcgcacttctatatttgcggagacggaagccaaatggcacctgccgttgaagcaacgcttatgaaaagctatgctgacgttcaccaagtgagtgaagcagacgctcgcttatggctgcagcagctagaagaaaaaggccgatacgcaaaagacgtgtgggctggg

SEQ ID NO: 368 - protein, 1049 aa, synthetic construct
  REGION 1..1049: note = variant of P450 oxidase from Bacillus megaterium
MTIKEMPQPKTFGELKNLPLLNTDKPVQALMRIADELGEIFKFEAPGSVTRYLSSQRLIKEACDESRFDKNLSQALKFARDFVGDGIATSWTHEPNWKKAHNILVPSFSQHAMGRYHAMMVDIAVQLVQKWERLNADEHIEVSEDMTRLTLDTIGLCGFNYRFNSFYRDQPHPFIVSVVRALDEVMNKLQRANPDDPAYDENKRQCQEDIKVMNDYVDKIIADRKARGEQSHDLLTQMLNGKDPETGEPLDDGNIRQQIITFLIAGHQTTSGLLSFALYFLVKNPHVLQKVAEEAARVLVDPVPSYKQVKQLKYVGMVLNEALRLWPVAPMFSLYAKEDTVLGGEYPLTKGDEVMVLVPQLHRDKTIWGDDVEEFRPERFENPSAIPQHAFKPFGNGQRACIGQQFALHEATLVLGMMLKHFDFEDHTNYELVIKESRTLKPEGFVVKAKSKGIPLGGIPSPSTEQSAKKVRKKAENAHNTPLLVLYGSNAGTAEGTARDLADIAMSKGFAPQVATLDSHAGNLPREGAVLIVTASYNGHPPDNAKQFVDWLDQASADEVKGVRYSVFGCGDKNWAGTYQKVPAFIDETLAAKGAENIADRGEADASDDFEGTYEEWRDHMWSDVAAYFNLDIENSEDNKSTLSLQFVDSAADMPLAKMHGAFSTNVVASKELQQPGSARSTRHLEIELPKEASYQEGDHLGVIPRNYEGIVNRVTARFGLSASQQIRLEAEEEKLAHLPLAKTVSVEELLQYVELQDPVTRTQLRAMAAKTVCPPHKVELEALLEKQAYKEQVLAKRLTMLELLEKYPACEMKFSEFIALLPSIRPRYYSISSSPRVDEKQASITVSVVSGPAWSGYGEYKGIASNYLAELQEGDTITCFISTPQSEFTLPKDPETPLIMVGPGTGVAPFRGFVQARKQLKEQGQSLGEAHLYFGCRSPHEDYLYQEELENAQSEGIITLHTAFSRMPNQPKTYVQHVMEQDGKKLIELLDQGAHFYICGDGSQMAPAVEATLMKSYADVHQVSEADARLWLQQLEEKGRYAKDVWAG

SEQ ID NO: 369 - DNA, 3147 bp, synthetic construct
  misc_feature 1..3147: note = variant of P450 oxidase from Bacillus megaterium
  source 1..3147: mol_type = other DNA
atgacaattaaggaaatgcctcagcctaagacgtttggagaacttaaaaatttaccgttattaaacacagataaaccggttcaagctttgatgcgtattgcggatgaattaggagaaatctttaaattcgaggcgcctggtagcgtaacgcgctatttatcaagtcagcgtctaattaaagaagcatgcgatgaatcacgctttgataaaaacttaagtcaagcgcttaaatttgcacgtgattttgttggagacgggttagccacaagctggacgcatgaaccgaattggaaaaaagcgcataatatcttagttccaagctttagtcagcatgcaatggggcgttatcatgcgatgatggtcgatatcgccgtgcagcttgttcaaaagtgggagcgtctaaatgcagatgagcatattgaagtatcggaagacatgacacgtttaacgcttgatacaattggtctttgcggctttaactatcgctttaacagcttttaccgagatcagcctcatccatttattgtgagtgtggttcgtgcactggatgaagtaatgaacaagctgcagcgagcaaatccagacgacccagcttatgatgaaaacaagcgccagtgtcaagaagatatcaaggtgatgaacgactatgtagataaaattattgcagatcgcaaagcaaggggtgaacaaagtcatgatttattaacgcagatgctaaacggaaaagatccagaaacgggtgagccgcttgatgacgggaacattcgtcagcaaattattacattcttaattgcgggacaccaaacaacaagtggtcttttatcatttgcgctgtatttcttagtgaaaaatccacatgtattacaaaaagtagcagaagaagcagcacgagttctagtagatcctgttccaagctacaaacaagtcaaacagcttaaatatgttggcatggtcttaaacgaagcgctgcgcttatggccagtagcgcctatgttttccctatatgcaaaagaagatacggtgcttggaggagaatatcctttaacgaaaggcgacgaagtaatggttctggtgcctcagcttcaccgtgataaaacaatttggggagacgatgtggaggagttccgtccagagcgttttgaaaatccaagtgcgattccgcagcatgcgtttaaaccgtttggaaacggtcagcgtgcgtgtatcggtcaggcgttcgctcttcatgaagcaacgctggtacttggtatgatgctaaaacactttgactttgaagatcatacaaactacgagctcgttattaaagaatcgcggacgttaaaacctgaaggctttgtggtaaaagcaaaatcgaaaggcattccgcttggcggtattccttcacctagcactgaacagtctgctaaaaaagtacgcaaaaaggcagaaaacgctcataatacgccgctgcttgtgctatacggttcaaatgcgggaacagctgaaggaacggcgcgtgatttagcagatattgcaatgagcaaaggatttgcaccgcaggtcgcaacgcttgattcacacgccggaaatcttccgcgcgaaggagctgtattaattgtaacggcgtcttataacggtcatccgcctgataacgcaaagcaatttgtcgactggttagaccaagcgtctgctgatgaagtaaaaggcgttcgctactccgtatttggatgcggcgataaaaattgggcggggacgtatcaaaaagtgcctgcttttatcgatgaaacgcttgccgctaaaggggcagaaaacatcgctgaccgcggtgaagcagatgcaagcgacgactttgaaggcacatatgaagaatggcgtgatcatatgtggagtgacgtagcagcctactttaacctcgacattgaaaacagtgaagataataaatctactctttcacttcaatttgtcgacagcgccgcggatatgccgcttgcgaaaatgcacggtgcgttttcaacgaacgtcgtagcaagcaaagaacttcaacagccaggcagtgcacgaagcacgcgacatcttgaaattgaacttccaaaagaagcttcttatcaagaaggagatcatttaggtgttattcctcgcaactatgaaggaatagtaaaccgtgtaacagcaaggttcggcctaagcgcatcacagcaaatccgtctggaagcagaagaagaaaaattagctcatttgccactcgctaaaacagtatccgtagaagagcttctgcaatacgtggagcttcaagatcctgttacgcgcacgcagcttcgcgcaatggctgctaaaacggtctgcccgccgcataaagtagagcttgaagccttgcttgaaaagcaagcctacaaagaacaagtgctggcaaaacgtttaacaatgcttgaactgcttgaaaaatacccggcgtgtgaaatgaaattcagcgaatttatcgcccttctgccaagcatacgcccgcgctattactcgatttcttcatcacctcgtgtcgatgaaaaacaagcaagcatcacggtcagcgttgtctcaggaccggcgtggagcggatatggagaatataaaggaattgcgtcgaactatcttgccgagctgcaagaaggagatacgattacgtgctttatttccacaccgcagtcagaatttacgctgccaaaagaccctgaaacgccgcttatcatggtcggaccgggaacaggcgtcgcgccgtttagaggctttgtgcaggcgcgcaaacagctaaaagaacaaggacagtcacttggagaagcacatttatacttcggctgccgttcacctcatgaagactatctgtatcaagaagagcttgaaaacgcccaaagcgaaggcatcattacgcttcataccgctttttctcgcatgccaaatcagccgaaaacatacgttcagcacgtaatggaacaagacggcaagaaattgattgaacttcttgatcaaggagcgcacttctatatttgcggagacggaagccaaatggcacctgccgttgaagcaacgcttatgaaaagctatgctgacgttcaccaagtgagtgaagcagacgctcgcttatggctgcagcagctagaagaaaaaggccgatacgcaaaagacgtgtgggctggg

SEQ ID NO: 370 - protein, 1049 aa, synthetic construct
  REGION 1..1049: note = variant of P450 oxidase from Bacillus megaterium
MTIKEMPQPKTFGELKNLPLLNTDKPVQALMRIADELGEIFKFEAPGSVTRYLSSQRLIKEACDESRFDKNLSQALKFARDFVGDGLATSWTHEPNWKKAHNILVPSFSQHAMGRYHAMMVDIAVQLVQKWERLNADEHIEVSEDMTRLTLDTIGLCGFNYRFNSFYRDQPHPFIVSVVRALDEVMNKLQRANPDDPAYDENKRQCQEDIKVMNDYVDKIIADRKARGEQSHDLLTQMLNGKDPETGEPLDDGNIRQQIITFLIAGHQTTSGLLSFALYFLVKNPHVLQKVAEEAARVLVDPVPSYKQVKQLKYVGMVLNEALRLWPVAPMFSLYAKEDTVLGGEYPLTKGDEVMVLVPQLHRDKTIWGDDVEEFRPERFENPSAIPQHAFKPFGNGQRACIGQAFALHEATLVLGMMLKHFDFEDHTNYELVIKESRTLKPEGFVVKAKSKGIPLGGIPSPSTEQSAKKVRKKAENAHNTPLLVLYGSNAGTAEGTARDLADIAMSKGFAPQVATLDSHAGNLPREGAVLIVTASYNGHPPDNAKQFVDWLDQASADEVKGVRYSVFGCGDKNWAGTYQKVPAFIDETLAAKGAENIADRGEADASDDFEGTYEEWRDHMWSDVAAYFNLDIENSEDNKSTLSLQFVDSAADMPLAKMHGAFSTNVVASKELQQPGSARSTRHLEIELPKEASYQEGDHLGVIPRNYEGIVNRVTARFGLSASQQIRLEAEEEKLAHLPLAKTVSVEELLQYVELQDPVTRTQLRAMAAKTVCPPHKVELEALLEKQAYKEQVLAKRLTMLELLEKYPACEMKFSEFIALLPSIRPRYYSISSSPRVDEKQASITVSVVSGPAWSGYGEYKGIASNYLAELQEGDTITCFISTPQSEFTLPKDPETPLIMVGPGTGVAPFRGFVQARKQLKEQGQSLGEAHLYFGCRSPHEDYLYQEELENAQSEGIITLHTAFSRMPNQPKTYVQHVMEQDGKKLIELLDQGAHFYICGDGSQMAPAVEATLMKSYADVHQVSEADARLWLQQLEEKGRYAKDVWAG

SEQ ID NO: 371 - DNA, 3147 bp, synthetic construct
  misc_feature 1..3147: note = variant of P450 oxidase from Bacillus megaterium
  source 1..3147: mol_type = other DNA
atgacaattaaggaaatgcctcagcctaagacgtttggagaacttaaaaatttaccgttattaaacacagataaaccggttcaagctttgatgcgtattgcggatgaattaggagaaatctttaaattcgaggcgcctggtagcgtaacgcgctatttatcaagtcagcgtctaattaaagaagcatgcgatgaatcacgctttgataaaaacttaagtcaagcgcttaaatttgcacgtgattttgttggagacgggttagccacaagctggacgcatgaaccgaattggaaaaaagcgcataatatcttagttccaagctttagtcagcatgcaatggggcgttatcatgcgatgatggtcgatatcgccgtgcagcttgttcaaaagtgggagcgtctaaatgcagatgagcatattgaagtatcggaagacatgacacgtttaacgcttgatacaattggtctttgcggctttaactatcgctttaacagcttttaccgagatcagcctcatccatttattgtgagtgtggttcgtgcactggatgaagtaatgaacaagctgcagcgagcaaatccagacgacccagcttatgatgaaaacaagcgccagtgtcaagaagatatcaaggtgatgaacgactatgtagataaaattattgcagatcgcaaagcaaggggtgaacaaagtcatgatttattaacgcagatgctaaacggaaaagatccagaaacgggtgagccgcttgatgacgggaacattcgtcagcaaattattacattcttaattgcgggacaccaaacaacaagtggtcttttatcatttgcgctgtatttcttagtgaaaaatccacatgtattacaaaaagtagcagaagaagcagcacgagttctagtagatcctgttccaagctacaaacaagtcaaacagcttaaatatgttggcatggtcttaaacgaagcgctgcgcttatggccagtagcggggatgttttccctatatgcaaaagaagatacggtgcttggaggagaatatcctttaacgaaaggcgacgaagtaatggttctggtgcctcagcttcaccgtgataaaacaatttggggagacgatgtggaggagttccgtccagagcgttttgaaaatccaagtgcgattccgcagcatgcgtttaaaccgtttggaaacggtcagcgtgcgtgtatcggtcagcagttcgctcttcatgaagcaacgctggtacttggtatgatgctaaaacactttgactttgaagatcatacaaactacgagctcgttattaaagaatcgcggacgttaaaacctgaaggctttgtggtaaaagcaaaatcgaaaggcattccgcttggcggtattccttcacctagcactgaacagtctgctaaaaaagtacgcaaaaaggcagaaaacgctcataatacgccgctgcttgtgctatacggttcaaatgcgggaacagctgaaggaacggcgcgtgatttagcagatattgcaatgagcaaaggatttgcaccgcaggtcgcaacgcttgattcacacgccggaaatcttccgcgcgaaggagctgtattaattgtaacggcgtcttataacggtcatccgcctgataacgcaaagcaatttgtcgactggttagaccaagcgtctgctgatgaagtaaaaggcgttcgctactccgtatttggatgcggcgataaaaattgggcggggacgtatcaaaaagtgcctgcttttatcgatgaaacgcttgccgctaaaggggcagaaaacatcgctgaccgcggtgaagcagatgcaagcgacgactttgaaggcacatatgaagaatggcgtgatcatatgtggagtgacgtagcagcctactttaacctcgacattgaaaacagtgaagataataaatctactctttcacttcaatttgtcgacagcgccgcggatatgccgcttgcgaaaatgcacggtgcgttttcaacgaacgtcgtagcaagcaaagaacttcaacagccaggcagtgcacgaagcacgcgacatcttgaaattgaacttccaaaagaagcttcttatcaagaaggagatcatttaggtgttattcctcgcaactatgaaggaatagtaaaccgtgtaacagcaaggttcggcctaagcgcatcacagcaaatccgtctggaagcagaagaagaaaaattagctcatttgccactcgctaaaacagtatccgtagaagagcttctgcaatacgtggagcttcaagatcctgttacgcgcacgcagcttcgcgcaatggctgctaaaacggtctgcccgccgcataaagtagagcttgaagccttgcttgaaaagcaagcctacaaagaacaagtgctggcaaaacgtttaacaatgcttgaactgcttgaaaaatacccggcgtgtgaaatgaaattcagcgaatttatcgcccttctgccaagcatacgcccgcgctattactcgatttcttcatcacctcgtgtcgatgaaaaacaagcaagcatcacggtcagcgttgtctcaggaccggcgtggagcggatatggagaatataaaggaattgcgtcgaactatcttgccgagctgcaagaaggagatacgattacgtgctttatttccacaccgcagtcagaatttacgctgccaaaagaccctgaaacgccgcttatcatggtcggaccgggaacaggcgtcgcgccgtttagaggctttgtgcaggcgcgcaaacagctaaaagaacaaggacagtcacttggagaagcacatttatacttcggctgccgttcacctcatgaagactatctgtatcaagaagagcttgaaaacgcccaaagcgaaggcatcattacgcttcataccgctttttctcgcatgccaaatcagccgaaaacatacgttcagcacgtaatggaacaagacggcaagaaattgattgaacttcttgatcaaggagcgcacttctatatttgcggagacggaagccaaatggcacctgccgttgaagcaacgcttatgaaaagctatgctgacgttcaccaagtgagtgaagcagacgctcgcttatggctgcagcagctagaagaaaaaggccgatacgcaaaagacgtgtgggctggg

SEQ ID NO: 372 - protein, 1049 aa, synthetic construct
  REGION 1..1049: note = variant of P450 oxidase from Bacillus megaterium
MTIKEMPQPKTFGELKNLPLLNTDKPVQALMRIADELGEIFKFEAPGSVTRYLSSQRLIKEACDESRFDKNLSQALKFARDFVGDGLATSWTHEPNWKKAHNILVPSFSQHAMGRYHAMMVDIAVQLVQKWERLNADEHIEVSEDMTRLTLDTIGLCGFNYRFNSFYRDQPHPFIVSVVRALDEVMNKLQRANPDDPAYDENKRQCQEDIKVMNDYVDKIIADRKARGEQSHDLLTQMLNGKDPETGEPLDDGNIRQQIITFLIAGHQTTSGLLSFALYFLVKNPHVLQKVAEEAARVLVDPVPSYKQVKQLKYVGMVLNEALRLWPVAGMFSLYAKEDTVLGGEYPLTKGDEVMVLVPQLHRDKTIWGDDVEEFRPERFENPSAIPQHAFKPFGNGQRACIGQQFALHEATLVLGMMLKHFDFEDHTNYELVIKESRTLKPEGFVVKAKSKGIPLGGIPSPSTEQSAKKVRKKAENAHNTPLLVLYGSNAGTAEGTARDLADIAMSKGFAPQVATLDSHAGNLPREGAVLIVTASYNGHPPDNAKQFVDWLDQASADEVKGVRYSVFGCGDKNWAGTYQKVPAFIDETLAAKGAENIADRGEADASDDFEGTYEEWRDHMWSDVAAYFNLDIENSEDNKSTLSLQFVDSAADMPLAKMHGAFSTNVVASKELQQPGSARSTRHLEIELPKEASYQEGDHLGVIPRNYEGIVNRVTARFGLSASQQIRLEAEEEKLAHLPLAKTVSVEELLQYVELQDPVTRTQLRAMAAKTVCPPHKVELEALLEKQAYKEQVLAKRLTMLELLEKYPACEMKFSEFIALLPSIRPRYYSISSSPRVDEKQASITVSVVSGPAWSGYGEYKGIASNYLAELQEGDTITCFISTPQSEFTLPKDPETPLIMVGPGTGVAPFRGFVQARKQLKEQGQSLGEAHLYFGCRSPHEDYLYQEELENAQSEGIITLHTAFSRMPNQPKTYVQHVMEQDGKKLIELLDQGAHFYICGDGSQMAPAVEATLMKSYADVHQVSEADARLWLQQLEEKGRYAKDVWAG

SEQ ID NO: 373 - DNA, 3147 bp, synthetic construct
  misc_feature 1..3147: note = variant of P450 oxidase from Bacillus megaterium
  source 1..3147: mol_type = other DNA
atgacaattaaggaaatgcctcagcctaagacgtttggagaacttaaaaatttaccgttattaaacacagataaaccggttcaagctttgatgcgtattgcggatgaattaggagaaatctttaaattcgaggcgcctggtagcgtaacgcgctatttatcaagtcagcgtctaattaaagaagcatgcgatgaatcacgctttgataaaaacttaagtcaagcgcttaaatttgcacgtgattttgttggagacgggttagccacaagctggacgcatgaaccgaattggaaaaaagcgcataatatcttagttccaagctttagtcagcatgcaatggggcgttatcatgcgatgatggtcgatatcgccgtgcagcttgttcaaaagtgggagcgtctaaatgcagatgagcatattgaagtatcggaagacatgacacgtttaacgcttgatacaattggtctttgcggctttaactatcgctttaacagcttttaccgagatcagcctcatccatttattgtgagtgtggttcgtgcactggatgaagtaatgaacaagctgcagcgagcaaatccagacgacccagcttatgatgaaaacaagcgccagtgtcaagaagatatcaaggtgatgaacgactatgtagataaaattattgcagatcgcaaagcaaggggtgaacaaagtcatgattttttaacgcagatgctaaacggaaaagatccagaaacgggtgagccgcttgatgacgggaacattcgtcagcaaattattacattcttaattgcgggacaccaaacaacaagtggtcttttatcatttgcgctgtatttcttagtgaaaaatccacatgtattacaaaaagtagcagaagaagcagcacgagttctagtagatcctgttccaagctacaaacaagtcaaacagcttaaatatgttggcatggtcttaaacgaagcgctgcgcttatggccagtagcgcctatgttttccctatatgcaaaagaagatacggtgcttggaggagaatatcctttaacgaaaggcgacgaagtaatggttctggtgcctcagcttcaccgtgataaaacaatttggggagacgatgtggaggagttccgtccagagcgttttgaaaatccaagtgcgattccgcagcatgcgtttaaaccgtttggaaacggtcagcgtgcgtgtatcggtcagcagttcgctcttcatgaagcaacgctggtacttggtatgatgctaaaacactttgactttgaagatcatacaaactacgagctcgttattaaagaatcgcggacgttaaaacctgaaggctttgtggtaaaagcaaaatcgaaaggcattccgcttggcggtattccttcacctagcactgaacagtctgctaaaaaagtacgcaaaaaggcagaaaacgctcataatacgccgctgcttgtgctatacggttcaaatgcgggaacagctgaaggaacggcgcgtgatttagcagatattgcaatgagcaaaggatttgcaccgcaggtcgcaacgcttgattcacacgccggaaatcttccgcgcgaaggagctgtattaattgtaacggcgtcttataacggtcatccgcctgataacgcaaagcaatttgtcgactggttagaccaagcgtctgctgatgaagtaaaaggcgttcgctactccgtatttggatgcggcgataaaaattgggcggggacgtatcaaaaagtgcctgcttttatcgatgaaacgcttgccgctaaaggggcagaaaacatcgctgaccgcggtgaagcagatgcaagcgacgactttgaaggcacatatgaagaatggcgtgatcatatgtggagtgacgtagcagcctactttaacctcgacattgaaaacagtgaagataataaatctactctttcacttcaatttgtcgacagcgccgcggatatgccgcttgcgaaaatgcacggtgcgttttcaacgaacgtcgtagcaagcaaagaacttcaacagccaggcagtgcacgaagcacgcgacatcttgaaattgaacttccaaaagaagcttcttatcaagaaggagatcatttaggtgttattcctcgcaactatgaaggaatagtaaaccgtgtaacagcaaggttcggcctaagcgcatcacagcaaatccgtctggaagcagaagaagaaaaattagctcatttgccactcgctaaaacagtatccgtagaagagcttctgcaatacgtggagcttcaagatcctgttacgcgcacgcagcttcgcgcaatggctgctaaaacggtctgcccgccgcataaagtagagcttgaagccttgcttgaaaagcaagcctacaaagaacaagtgctggcaaaacgtttaacaatgcttgaactgcttgaaaaatacccggcgtgtgaaatgaaattcagcgaatttatcgcccttctgccaagcatacgcccgcgctattactcgatttcttcatcacctcgtgtcgatgaaaaacaagcaagcatcacggtcagcgttgtctcaggaccggcgtggagcggatatggagaatataaaggaattgcgtcgaactatcttgccgagctgcaagaaggagatacgattacgtgctttatttccacaccgcagtcagaatttacgctgccaaaagaccctgaaacgccgcttatcatggtcggaccgggaacaggcgtcgcgccgtttagaggctttgtgcaggcgcgcaaacagctaaaagaacaaggacagtcacttggagaagcacatttatacttcggctgccgttcacctcatgaagactatctgtatcaagaagagcttgaaaacgcccaaagcgaaggcatcattacgcttcataccgctttttctcgcatgccaaatcagccgaaaacatacgttcagcacgtaatggaacaagacggcaagaaattgattgaacttcttgatcaaggagcgcacttctatatttgcggagacggaagccaaatggcacctgccgttgaagcaacgcttatgaaaagctatgctgacgttcaccaagtgagtgaagcagacgctcgcttatggctgcagcagctagaagaaaaaggccgatacgcaaaagacgtgtgggctggg

SEQ ID NO: 374 - protein, 1049 aa, synthetic construct
  REGION 1..1049: note = variant of P450 oxidase from Bacillus megaterium
MTIKEMPQPKTFGELKNLPLLNTDKPVQALMRIADELGEIFKFEAPGSVTRYLSSQRLIKEACDESRFDKNLSQALKFARDFVGDGLATSWTHEPNWKKAHNILVPSFSQHAMGRYHAMMVDIAVQLVQKWERLNADEHIEVSEDMTRLTLDTIGLCGFNYRFNSFYRDQPHPFIVSVVRALDEVMNKLQRANPDDPAYDENKRQCQEDIKVMNDYVDKIIADRKARGEQSHDFLTQMLNGKDPETGEPLDDGNIRQQIITFLIAGHQTTSGLLSFALYFLVKNPHVLQKVAEEAARVLVDPVPSYKQVKQLKYVGMVLNEALRLWPVAPMFSLYAKEDTVLGGEYPLTKGDEVMVLVPQLHRDKTIWGDDVEEFRPERFENPSAIPQHAFKPFGNGQRACIGQQFALHEATLVLGMMLKHFDFEDHTNYELVIKESRTLKPEGFVVKAKSKGIPLGGIPSPSTEQSAKKVRKKAENAHNTPLLVLYGSNAGTAEGTARDLADIAMSKGFAPQVATLDSHAGNLPREGAVLIVTASYNGHPPDNAKQFVDWLDQASADEVKGVRYSVFGCGDKNWAGTYQKVPAFIDETLAAKGAENIADRGEADASDDFEGTYEEWRDHMWSDVAAYFNLDIENSEDNKSTLSLQFVDSAADMPLAKMHGAFSTNVVASKELQQPGSARSTRHLEIELPKEASYQEGDHLGVIPRNYEGIVNRVTARFGLSASQQIRLEAEEEKLAHLPLAKTVSVEELLQYVELQDPVTRTQLRAMAAKTVCPPHKVELEALLEKQAYKEQVLAKRLTMLELLEKYPACEMKFSEFIALLPSIRPRYYSISSSPRVDEKQASITVSVVSGPAWSGYGEYKGIASNYLAELQEGDTITCFISTPQSEFTLPKDPETPLIMVGPGTGVAPFRGFVQARKQLKEQGQSLGEAHLYFGCRSPHEDYLYQEELENAQSEGIITLHTAFSRMPNQPKTYVQHVMEQDGKKLIELLDQGAHFYICGDGSQMAPAVEATLMKSYADVHQVSEADARLWLQQLEEKGRYAKDVWAG

SEQ ID NO: 375 - DNA, 3147 bp, synthetic construct
  misc_feature 1..3147: note = variant of P450 oxidase from Bacillus megaterium
  source 1..3147: mol_type = other DNA
atgacaattaaggaaatgcctcagcctaagacgtttggagaacttaaaaatttaccgttattaaacacagataaaccggttcaagctttgatgcgtattgcggatgaattaggagaaatctttaaattcgaggcgcctggtagcgtaacgcgctatttatcaagtcagcgtctaattaaagaagcatgcgatgaatcacgctttgataaaaacttaagtcaagcgcttaaatttgcacgtgattttgttggagacgggttagccacaagctggacgcatgaaccgaattggaaaaaagcgcataatatcttagttccaagctttagtcagcatgcaatggggcgttatcatgcgatgatggtcgatatcgccgtgcagcttgttcaaaagtgggagcgtctaaatgcagatgagcatattgaagtatcggaagacatgacacgtttaacgcttgatacaattggtctttgcggctttaactatcgctttaacagcttttaccgagatcagcctcatccatttattgtgagtgtggttcgtgcactggatgaagtaatgaacaagctgcagcgagcaaatccagacgacccagcttatgatgaaaacaagcgccagtgtcaagaagatatcaaggtgatgaacgactatgtagataaaattattgcagatcgcaaagcaaggggtgaacaaagtcatgatttattaacgcagatgctaaacggaaaagatccagaaacgggtgagccgcttgatgacgggaacattcgtcagcaaattattacattcttaattgcgggacaccaaacaacaagtggtcttttatcatttgcgctgtatttcttagtgaaaaatccacatgtattacaaaaagtagcagaagaagcagcacgagttctagtagatcctgttccaagctacaaacaagtcaaacagcttaaatatgttggcatggtcttaaacgaagcgctgcgcttatggccagtagcgcctatgttttccctatatgcaaaagaagatacggtgcttggaggagaatatcctttaacgaaaggcgacgaagtaatggttctggtgcctcagcttcaccgtgataaaacaatttggggagacgatgtggaggagttccgtccagagcgttttgaaaatccaagtgcgattccgcagcatgcgtttaaaccgtttggaaacggtcagcgtgcgtgtatcggtcagcagttcgctcggcatgaagcaacgctggtacttggtatgatgctaaaacactttgactttgaagatcatacaaactacgagctcgttattaaagaatcgcggacgttaaaacctgaaggctttgtggtaaaagcaaaatcgaaaggcattccgcttggcggtattccttcacctagcactgaacagtctgctaaaaaagtacgcaaaaaggcagaaaacgctcataatacgccgctgcttgtgctatacggttcaaatgcgggaacagctgaaggaacggcgcgtgatttagcagatattgcaatgagcaaaggatttgcaccgcaggtcgcaacgcttgattcacacgccggaaatcttccgcgcgaaggagctgtattaattgtaacggcgtcttataacggtcatccgcctgataacgcaaagcaatttgtcgactggttagaccaagcgtctgctgatgaagtaaaaggcgttcgctactccgtatttggatgcggcgataaaaattgggcggggacgtatcaaaaagtgcctgcttttatcgatgaaacgcttgccgctaaaggggcagaaaacatcgctgaccgcggtgaagcagatgcaagcgacgactttgaaggcacatatgaagaatggcgtgatcatatgtggagtgacgtagcagcctactttaacctcgacattgaaaacagtgaagataataaatctactctttcacttcaatttgtcgacagcgccgcggatatgccgcttgcgaaaatgcacggtgcgttttcaacgaacgtcgtagcaagcaaagaacttcaacagccaggcagtgcacgaagcacgcgacatcttgaaattgaacttccaaaagaagcttcttatcaagaaggagatcatttaggtgttattcctcgcaactatgaaggaatagtaaaccgtgtaacagcaaggttcggcctaagcgcatcacagcaaatccgtctggaagcagaagaagaaaaattagctcatttgccactcgctaaaacagtatccgtagaagagcttctgcaatacgtggagcttcaagatcctgttacgcgcacgcagcttcgcgcaatggctgctaaaacggtctgcccgccgcataaagtagagcttgaagccttgcttgaaaagcaagcctacaaagaacaagtgctggcaaaacgtttaacaatgcttgaactgcttgaaaaatacccggcgtgtgaaatgaaattcagcgaatttatcgcccttctgccaagcatacgcccgcgctattactcgatttcttcatcacctcgtgtcgatgaaaaacaagcaagcatcacggtcagcgttgtctcaggaccggcgtggagcggatatggagaatataaaggaattgcgtcgaactatcttgccgagctgcaagaaggagatacgattacgtgctttatttccacaccgcagtcagaatttacgctgccaaaagaccctgaaacgccgcttatcatggtcggaccgggaacaggcgtcgcgccgtttagaggctttgtgcaggcgcgcaaacagctaaaagaacaaggacagtcacttggagaagcacatttatacttcggctgccgttcacctcatgaagactatctgtatcaagaagagcttgaaaacgcccaaagcgaaggcatcattacgcttcataccgctttttctcgcatgccaaatcagccgaaaacatacgttcagcacgtaatggaacaagacggcaagaaattgattgaacttcttgatcaaggagcgcacttctatatttgcggagacggaagccaaatggcacctgccgttgaagcaacgcttatgaaaagctatgctgacgttcaccaagtgagtgaagcagacgctcgcttatggctgcagcagctagaagaaaaaggccgatacgcaaaagacgtgtgggctggg

SEQ ID NO: 376 - protein, 1049 aa, synthetic construct
  REGION 1..1049: note = variant of P450 oxidase from Bacillus megaterium
MTIKEMPQPKTFGELKNLPLLNTDKPVQALMRIADELGEIFKFEAPGSVTRYLSSQRLIKEACDESRFDKNLSQALKFARDFVGDGLATSWTHEPNWKKAHNILVPSFSQHAMGRYHAMMVDIAVQLVQKWERLNADEHIEVSEDMTRLTLDTIGLCGFNYRFNSFYRDQPHPFIVSVVRALDEVMNKLQRANPDDPAYDENKRQCQEDIKVMNDYVDKIIADRKARGEQSHDLLTQMLNGKDPETGEPLDDGNIRQQIITFLIAGHQTTSGLLSFALYFLVKNPHVLQKVAEEAARVLVDPVPSYKQVKQLKYVGMVLNEALRLWPVAPMFSLYAKEDTVLGGEYPLTKGDEVMVLVPQLHRDKTIWGDDVEEFRPERFENPSAIPQHAFKPFGNGQRACIGQQFARHEATLVLGMMLKHFDFEDHTNYELVIKESRTLKPEGFVVKAKSKGIPLGGIPSPSTEQSAKKVRKKAENAHNTPLLVLYGSNAGTAEGTARDLADIAMSKGFAPQVATLDSHAGNLPREGAVLIVTASYNGHPPDNAKQFVDWLDQASADEVKGVRYSVFGCGDKNWAGTYQKVPAFIDETLAAKGAENIADRGEADASDDFEGTYEEWRDHMWSDVAAYFNLDIENSEDNKSTLSLQFVDSAADMPLAKMHGAFSTNVVASKELQQPGSARSTRHLEIELPKEASYQEGDHLGVIPRNYEGIVNRVTARFGLSASQQIRLEAEEEKLAHLPLAKTVSVEELLQYVELQDPVTRTQLRAMAAKTVCPPHKVELEALLEKQAYKEQVLAKRLTMLELLEKYPACEMKFSEFIALLPSIRPRYYSISSSPRVDEKQASITVSVVSGPAWSGYGEYKGIASNYLAELQEGDTITCFISTPQSEFTLPKDPETPLIMVGPGTGVAPFRGFVQARKQLKEQGQSLGEAHLYFGCRSPHEDYLYQEELENAQSEGIITLHTAFSRMPNQPKTYVQHVMEQDGKKLIELLDQGAHFYICGDGSQMAPAVEATLMKSYADVHQVSEADARLWLQQLEEKGRYAKDVWAG

SEQ ID NO: 377 - DNA, 3147 bp, synthetic construct
  misc_feature 1..3147: note = variant of P450 oxidase from Bacillus megaterium
  source 1..3147: mol_type = other DNA
atgacaattaaggaaatgcctcagcctaagacgtttggagaacttaaaaatttaccgttattaaacacagataaaccggttcaagctttgatgcgtattgcggatgaattaggagaaatctttaaattcgaggcgcctggtagcgtaacgcgctatttatcaagtcagcgtctaattaaagaagcatgcgatgaatcacgctttgataaaaacttaagtcaagcgcttaaatttgcacgtgattttgttggagacgggttagcctcgagctggacgcatgaaccgaattggaaaaaagcgcataatatcttagttccaagctttagtcagcatgcaatggggcgttatcatgcgatgatggtcgatatcgccgtgcagcttgttcaaaagtgggagcgtctaaatgcagatgagcatattgaagtatcggaagacatgacacgtttaacgcttgatacaattggtctttgcggctttaactatcgctttaacagcttttaccgagatcagcctcatccatttattgtgagtgtggttcgtgcactggatgaagtaatgaacaagctgcagcgagcaaatccagacgacccagcttatgatgaaaacaagcgccagtgtcaagaagatatcaaggtgatgaacgactatgtagataaaattattgcagatcgcaaagcaaggggtgaacaaagtcatgatttattaacgcagatgctaaacggaaaagatccagaaacgggtgagccgcttgatgacgggaacattcgtcagcaaattattacattcttaattgcgggacaccaaacaacaagtggtcttttatcatttgcgctgtatttcttagtgaaaaatccacatgtattacaaaaagtagcagaagaagcagcacgagttctagtagatcctgttccaagctacaaacaagtcaaacagcttaaatatgttggcatggtcttaaacgaagcgctgcgcttatggccagtagcgcctatgttttccctatatgcaaaagaagatacggtgcttggaggagaatatcctttaacgaaaggcgacgaagtaatggttctggtgcctcagcttcaccgtgataaaacaatttggggagacgatgtggaggagttccgtccagagcgttttgaaaatccaagtgcgattccgcagcatgcgtttaaaccgtttggaaacggtcagcgtgcgtgtatcggtcagcagttcgctcttcatgaagcaacgctggtacttggtatgatgctaaaacactttgactttgaagatcatacaaactacgagctcgttattaaagaatcgcggacgttaaaacctgaaggctttgtggtaaaagcaaaatcgaaaggcattccgcttggcggtattccttcacctagcactgaacagtctgctaaaaaagtacgcaaaaaggcagaaaacgctcataatacgccgctgcttgtgctatacggttcaaatgcgggaacagctgaaggaacggcgcgtgatttagcagatattgcaatgagcaaaggatttgcaccgcaggtcgcaacgcttgattcacacgccggaaatcttccgcgcgaaggagctgtattaattgtaacggcgtcttataacggtcatccgcctgataacgcaaagcaatttgtcgactggttagaccaagcgtctgctgatgaagtaaaaggcgttcgctactccgtatttggatgcggcgataaaaattgggcggggacgtatcaaaaagtgcctgcttttatcgatgaaacgcttgccgctaaaggggcagaaaacatcgctgaccgcggtgaagcagatgcaagcgacgactttgaaggcacatatgaagaatggcgtgatcatatgtggagtgacgtagcagcctactttaacctcgacattgaaaacagtgaagataataaatctactctttcacttcaatttgtcgacagcgccgcggatatgccgcttgcgaaaatgcacggtgcgttttcaacgaacgtcgtagcaagcaaagaacttcaacagccaggcagtgcacgaagcacgcgacatcttgaaattgaacttccaaaagaagcttcttatcaagaaggagatcatttaggtgttattcctcgcaactatgaaggaatagtaaaccgtgtaacagcaaggttcggcctaagcgcatcacagcaaatccgtctggaagcagaagaagaaaaattagctcatttgccactcgctaaaacagtatccgtagaagagcttctgcaatacgtggagcttcaagatcctgttacgcgcacgcagcttcgcgcaatggctgctaaaacggtctgcccgccgcataaagtagagcttgaagccttgcttgaaaagcaagcctacaaagaacaagtgctggcaaaacgtttaacaatgcttgaactgcttgaaaaatacccggcgtgtgaaatgaaattcagcgaatttatcgcccttctgccaagcatacgcccgcgctattactcgatttcttcatcacctcgtgtcgatgaaaaacaagcaagcatcacggtcagcgttgtctcaggaccggcgtggagcggatatggagaatataaaggaattgcgtcgaactatcttgccgagctgcaagaaggagatacgattacgtgctttatttccacaccgcagtcagaatttacgctgccaaaagaccctgaaacgccgcttatcatggtcggaccgggaacaggcgtcgcgccgtttagaggctttgtgcaggcgcgcaaacagctaaaagaacaaggacagtcacttggagaagcacatttatacttcggctgccgttcacctcatgaagactatctgtatcaagaagagcttgaaaacgcccaaagcgaaggcatcattacgcttcataccgctttttctcgcatgccaaatcagccgaaaacatacgttcagcacgtaatggaacaagacggcaagaaattgattgaacttcttgatcaaggagcgcacttctatatttgcggagacggaagccaaatggcacctgccgttgaagcaacgcttatgaaaagctatgctgacgttcaccaagtgagtgaagcagacgctcgcttatggctgcagcagctagaagaaaaaggccgatacgcaaaagacgtgtgggctggg

SEQ ID NO: 378 - protein, 1049 aa, synthetic construct
  REGION 1..1049: note = variant of P450 oxidase from Bacillus megaterium
MTIKEMPQPKTFGELKNLPLLNTDKPVQALMRIADELGEIFKFEAPGSVTRYLSSQRLIKEACDESRFDKNLSQALKFARDFVGDGLASSWTHEPNWKKAHNILVPSFSQHAMGRYHAMMVDIAVQLVQKWERLNADEHIEVSEDMTRLTLDTIGLCGFNYRFNSFYRDQPHPFIVSVVRALDEVMNKLQRANPDDPAYDENKRQCQEDIKVMNDYVDKIIADRKARGEQSHDLLTQMLNGKDPETGEPLDDGNIRQQIITFLIAGHQTTSGLLSFALYFLVKNPHVLQKVAEEAARVLVDPVPSYKQVKQLKYVGMVLNEALRLWPVAPMFSLYAKEDTVLGGEYPLTKGDEVMVLVPQLHRDKTIWGDDVEEFRPERFENPSAIPQHAFKPFGNGQRACIGQQFALHEATLVLGMMLKHFDFEDHTNYELVIKESRTLKPEGFVVKAKSKGIPLGGIPSPSTEQSAKKVRKKAENAHNTPLLVLYGSNAGTAEGTARDLADIAMSKGFAPQVATLDSHAGNLPREGAVLIVTASYNGHPPDNAKQFVDWLDQASADEVKGVRYSVFGCGDKNWAGTYQKVPAFIDETLAAKGAENIADRGEADASDDFEGTYEEWRDHMWSDVAAYFNLDIENSEDNKSTLSLQFVDSAADMPLAKMHGAFSTNVVASKELQQPGSARSTRHLEIELPKEASYQEGDHLGVIPRNYEGIVNRVTARFGLSASQQIRLEAEEEKLAHLPLAKTVSVEELLQYVELQDPVTRTQLRAMAAKTVCPPHKVELEALLEKQAYKEQVLAKRLTMLELLEKYPACEMKFSEFIALLPSIRPRYYSISSSPRVDEKQASITVSVVSGPAWSGYGEYKGIASNYLAELQEGDTITCFISTPQSEFTLPKDPETPLIMVGPGTGVAPFRGFVQARKQLKEQGQSLGEAHLYFGCRSPHEDYLYQEELENAQSEGIITLHTAFSRMPNQPKTYVQHVMEQDGKKLIELLDQGAHFYICGDGSQMAPAVEATLMKSYADVHQVSEADARLWLQQLEEKGRYAKDVWAG

SEQ ID NO: 379 - DNA, 3147 bp, synthetic construct
  misc_feature 1..3147: note = variant of P450 oxidase from Bacillus megaterium
  source 1..3147: mol_type = other DNA
atgacaattaaggaaatgcctcagcctaagacgtttggagaacttaaaaatttaccgttattaaacacagataaaccggttcaagctttgatgcgtattgcggatgaattaggagaaatctttaaattcgaggcgcctggtagcgtaacgcgctatttatcaagtcagcgtctaattaaagaagcatgcgatgaatcacgctttgataaaaacttaagtcaagcgcttaaatttgcacgtgattttgttggagacgggttagccacaagctggacgcatgaaccgaattggaaaaaagcgcataatatcttagttccaagctttagtcagcatgcaatggggcgttatcatgcgatgatggtcgatatcgccgtgcagcttgttcaaaagtgggagcgtctaaatgcagatgagcatattgaagtatcggaagacatgacacgtttaacgcttgatacaattggtctttgcggctttaactatcgctttaacagcttttaccgagatcagcctcatccatttattgtgagtgtggttcgtgcactggatgaagtaatgaacaagctgcagcgagcaaatccagacgacccagcttatgatgaaaacaagcgccagtgtcaagaagatatcaaggtgatgaacgactatgtagataaaattattgcagatcgcaaagcaaggggtgaacaaagtcatgatttattaacgcagatgctaaacggaaaagatccagaaacgggtgagccgcttgatgacgggaacattcgtcagcaaattattacattcttaattgcgggacaccaaacaacaagtggtcttttatcatttgcgctgtatttcttagtgaaaaatccacatgtattacaaaaagtagcagaagaagcagcacgagttctagtagatcctgttccaagctacaaacaagtcaaacagcttaaatatgttggcatggtcttaaacgaagcgctgcgcttatggccagtagcgcctatgttttccctatatgcaaaagaagatacggtgcttggaggagaatatcctttaacgaaaggcgacgaagtaatggttctggtgcctcagcttcaccgtgataaaacaatttggggagacgatgtggaggagttccgtccagagcgttttgaaaatccaagtgcgattccgcagcatgcgtttaaaccgtttggaaacggtcagcgtgcgtgtatcggtcagagtttcgctcttcatgaagcaacgctggtacttggtatgatgctaaaacactttgactttgaagatcatacaaactacgagctcgttattaaagaatcgcggacgttaaaacctgaaggctttgtggtaaaagcaaaatcgaaaggcattccgcttggcggtattccttcacctagcactgaacagtctgctaaaaaagtacgcaaaaaggcagaaaacgctcataatacgccgctgcttgtgctatacggttcaaatgcgggaacagctgaaggaacggcgcgtgatttagcagatattgcaatgagcaaaggatttgcaccgcaggtcgcaacgcttgattcacacgccggaaatcttccgcgcgaaggagctgtattaattgtaacggcgtcttataacggtcatccgcctgataacgcaaagcaatttgtcgactggttagaccaagcgtctgctgatgaagtaaaaggcgttcgctactccgtatttggatgcggcgataaaaattgggcggggacgtatcaaaaagtgcctgcttttatcgatgaaacgcttgccgctaaaggggcagaaaacatcgctgaccgcggtgaagcagatgcaagcgacgactttgaaggcacatatgaagaatggcgtgatcatatgtggagtgacgtagcagcctactttaacctcgacattgaaaacagtgaagataataaatctactctttcacttcaatttgtcgacagcgccgcggatatgccgcttgcgaaaatgcacggtgcgttttcaacgaacgtcgtagcaagcaaagaacttcaacagccaggcagtgcacgaagcacgcgacatcttgaaattgaacttccaaaagaagcttcttatcaagaaggagatcatttaggtgttattcctcgcaactatgaaggaatagtaaaccgtgtaacagcaaggttcggcctaagcgcatcacagcaaatccgtctggaagcagaagaagaaaaattagctcatttgccactcgctaaaacagtatccgtagaagagcttctgcaatacgtggagcttcaagatcctgttacgcgcacgcagcttcgcgcaatggctgctaaaacggtctgcccgccgcataaagtagagcttgaagccttgcttgaaaagcaagcctacaaagaacaagtgctggcaaaacgtttaacaatgcttgaactgcttgaaaaatacccggcgtgtgaaatgaaattcagcgaatttatcgcccttctgccaagcatacgcccgcgctattactcgatttcttcatcacctcgtgtcgatgaaaaacaagcaagcatcacggtcagcgttgtctcaggaccggcgtggagcggatatggagaatataaaggaattgcgtcgaactatcttgccgagctgcaagaaggagatacgattacgtgctttatttccacaccgcagtcagaatttacgctgccaaaagaccctgaaacgccgcttatcatggtcggaccgggaacaggcgtcgcgccgtttagaggctttgtgcaggcgcgcaaacagctaaaagaacaaggacagtcacttggagaagcacatttatacttcggctgccgttcacctcatgaagactatctgtatcaagaagagcttgaaaacgcccaaagcgaaggcatcattacgcttcataccgctttttctcgcatgccaaatcagccgaaaacatacgttcagcacgtaatggaacaagacggcaagaaattgattgaacttcttgatcaaggagcgcacttctatatttgcggagacggaagccaaatggcacctgccgttgaagcaacgcttatgaaaagctatgctgacgttcaccaagtgagtgaagcagacgctcgcttatggctgcagcagctagaagaaaaaggccgatacgcaaaagacgtgtgggctggg

SEQ ID NO: 380 - protein, 1049 aa, synthetic construct
  REGION 1..1049: note = variant of P450 oxidase from Bacillus megaterium
MTIKEMPQPKTFGELKNLPLLNTDKPVQALMRIADELGEIFKFEAPGSVTRYLSSQRLIKEACDESRFDKNLSQALKFARDFVGDGLATSWTHEPNWKKAHNILVPSFSQHAMGRYHAMMVDIAVQLVQKWERLNADEHIEVSEDMTRLTLDTIGLCGFNYRFNSFYRDQPHPFIVSVVRALDEVMNKLQRANPDDPAYDENKRQCQEDIKVMNDYVDKIIADRKARGEQSHDLLTQMLNGKDPETGEPLDDGNIRQQIITFLIAGHQTTSGLLSFALYFLVKNPHVLQKVAEEAARVLVDPVPSYKQVKQLKYVGMVLNEALRLWPVAPMFSLYAKEDTVLGGEYPLTKGDEVMVLVPQLHRDKTIWGDDVEEFRPERFENPSAIPQHAFKPFGNGQRACIGQSFALHEATLVLGMMLKHFDFEDHTNYELVIKESRTLKPEGFVVKAKSKGIPLGGIPSPSTEQSAKKVRKKAENAHNTPLLVLYGSNAGTAEGTARDLADIAMSKGFAPQVATLDSHAGNLPREGAVLIVTASYNGHPPDNAKQFVDWLDQASADEVKGVRYSVFGCGDKNWAGTYQKVPAFIDETLAAKGAENIADRGEADASDDFEGTYEEWRDHMWSDVAAYFNLDIENSEDNKSTLSLQFVDSAADMPLAKMHGAFSTNVVASKELQQPGSARSTRHLEIELPKEASYQEGDHLGVIPRNYEGIVNRVTARFGLSASQQIRLEAEEEKLAHLPLAKTVSVEELLQYVELQDPVTRTQLRAMAAKTVCPPHKVELEALLEKQAYKEQVLAKRLTMLELLEKYPACEMKFSEFIALLPSIRPRYYSISSSPRVDEKQASITVSVVSGPAWSGYGEYKGIASNYLAELQEGDTITCFISTPQSEFTLPKDPETPLIMVGPGTGVAPFRGFVQARKQLKEQGQSLGEAHLYFGCRSPHEDYLYQEELENAQSEGIITLHTAFSRMPNQPKTYVQHVMEQDGKKLIELLDQGAHFYICGDGSQMAPAVEATLMKSYADVHQVSEADARLWLQQLEEKGRYAKDVWAG

SEQ ID NO: 381 - DNA, 3147 bp, synthetic construct
  misc_feature 1..3147: note = variant of P450 oxidase from Bacillus megaterium
  source 1..3147: mol_type = other DNA
atgacaattaaggaaatgcctcagcctaagacgtttggagaacttaaaaatttaccgttattaaacacagataaaccggttcaagctttgatgcgtattgcggatgaattaggagaaatctttaaattcgaggcgcctggtagcgtaacgcgctatttatcaagtcagcgtctaattaaagaagcatgcgatgaatcacgctttgataaaaacttaagtcaagcgcttaaatttgcacgtgattttgttggagacgggttagccacaagctggacgcatgaaccgaattggaaaaaagcgcataatatcttagttccaagctttagtcagcatgcaatggggcgttatcatgcgatgatggtcgatatcgccgtgcagcttgttcaaaagtgggagcgtctaaatgcagatgagcatattgaagtatcggaagacatgacacgtttaacgcttgatacaattggtctttgcggctttaactatcgctttaacagcttttaccgagatcagcctcatccatttattgtgagtgtggttcgtgcactggatgaagtaatgaacaagctgcagcgagcaaatccagacgacccagcttatgatgaaaacaagcgccagtgtcaagaagatatcaaggtgatgaacgactatgtagataaaattattgcagatcgcaaagcaaggggtgaacaaagtcatgatttattaacgcagatgctaaacggaaaagatccagaaacgggtgagccgcttgatgacgggaacattcgtcagcaaattattacattcttaattgcgggacaccaaacaacaagtggtcttttatcatttgcgctgtatttcttagtgaaaaatccacatgtattacaaaaagtagcagaagaagcagcacgagttctagtagatcctgttccaagctacaaacaagtcaaacagcttaaatatgttggcatggtcttaaacgaagcgctgcgcttatggccagtagcgcctatgttttccctatatgcaaaagaagatacggtgcttggaggagaatatcctttaacgaaaggcgacgaagtaatggttctggtgcctcagcttcaccgtgataaaacaatttggggagacgatgtggaggagttccgtccagagcgttttgaaaatccaagtgcgattccgcagcatgcgtttaaaccgtttggaaacggtcgtcgtgcgtgtatcggtcagcagttcgctcttcatgaagcaacgctggtacttggtatgatgctaaaacactttgactttgaagatcatacaaactacgagctcgttattaaagaatcgcggacgttaaaacctgaaggctttgtggtaaaagcaaaatcgaaaggcattccgcttggcggtattccttcacctagcactgaacagtctgctaaaaaagtacgcaaaaaggcagaaaacgctcataatacgccgctgcttgtgctatacggttcaaatgcgggaacagctgaaggaacggcgcgtgatttagcagatattgcaatgagcaaaggatttgcaccgcaggtcgcaacgcttgattcacacgccggaaatcttccgcgcgaaggagctgtattaattgtaacggcgtcttataacggtcatccgcctgataacgcaaagcaatttgtcgactggttagaccaagcgtctgctgatgaagtaaaaggcgttcgctactccgtatttggatgcggcgataaaaattgggcggggacgtatcaaaaagtgcctgcttttatcgatgaaacgcttgccgctaaaggggcagaaaacatcgctgaccgcggtgaagcagatgcaagcgacgactttgaaggcacatatgaagaatggcgtgatcatatgtggagtgacgtagcagcctactttaacctcgacattgaaaacagtgaagataataaatctactctttcacttcaatttgtcgacagcgccgcggatatgccgcttgcgaaaatgcacggtgcgttttcaacgaacgtcgtagcaagcaaagaacttcaacagccaggcagtgcacgaagcacgcgacatcttgaaattgaacttccaaaagaagcttcttatcaagaaggagatcatttaggtgttattcctcgcaactatgaaggaatagtaaaccgtgtaacagcaaggttcggcctaagcgcatcacagcaaatccgtctggaagcagaagaagaaaaattagctcatttgccactcgctaaaacagtatccgtagaagagcttctgcaatacgtggagcttcaagatcctgttacgcgcacgcagcttcgcgcaatggctgctaaaacggtctgcccgccgcataaagtagagcttgaagccttgcttgaaaagcaagcctacaaagaacaagtgctggcaaaacgtttaacaatgcttgaactgcttgaaaaatacccggcgtgtgaaatgaaattcagcgaatttatcgcccttctgccaagcatacgcccgcgctattactcgatttcttcatcacctcgtgtcgatgaaaaacaagcaagcatcacggtcagcgttgtctcaggaccggcgtggagcggatatggagaatataaaggaattgcgtcgaactatcttgccgagctgcaagaaggagatacgattacgtgctttatttccacaccgcagtcagaatttacgctgccaaaagaccctgaaacgccgcttatcatggtcggaccgggaacaggcgtcgcgccgtttagaggctttgtgcaggcgcgcaaacagctaaaagaacaaggacagtcacttggagaagcacatttatacttcggctgccgttcacctcatgaagactatctgtatcaagaagagcttgaaaacgcccaaagcgaaggcatcattacgcttcataccgctttttctcgcatgccaaatcagccgaaaacatacgttcagcacgtaatggaacaagacggcaagaaattgattgaacttcttgatcaaggagcgcacttctatatttgcggagacggaagccaaatggcacctgccgttgaagcaacgcttatgaaaagctatgctgacgttcaccaagtgagtgaagcagacgctcgcttatggctgcagcagctagaagaaaaaggccgatacgcaaaagacgtgtgggctggg

SEQ ID NO: 382 - protein, 1049 aa, synthetic construct
  REGION 1..1049: note = variant of P450 oxidase from Bacillus megaterium
MTIKEMPQPKTFGELKNLPLLNTDKPVQALMRIADELGEIFKFEAPGSVTRYLSSQRLIKEACDESRFDKNLSQALKFARDFVGDGLATSWTHEPNWKKAHNILVPSFSQHAMGRYHAMMVDIAVQLVQKWERLNADEHIEVSEDMTRLTLDTIGLCGFNYRFNSFYRDQPHPFIVSVVRALDEVMNKLQRANPDDPAYDENKRQCQEDIKVMNDYVDKIIADRKARGEQSHDLLTQMLNGKDPETGEPLDDGNIRQQIITFLIAGHQTTSGLLSFALYFLVKNPHVLQKVAEEAARVLVDPVPSYKQVKQLKYVGMVLNEALRLWPVAPMFSLYAKEDTVLGGEYPLTKGDEVMVLVPQLHRDKTIWGDDVEEFRPERFENPSAIPQHAFKPFGNGRRACIGQQFALHEATLVLGMMLKHFDFEDHTNYELVIKESRTLKPEGFVVKAKSKGIPLGGIPSPSTEQSAKKVRKKAENAHNTPLLVLYGSNAGTAEGTARDLADIAMSKGFAPQVATLDSHAGNLPREGAVLIVTASYNGHPPDNAKQFVDWLDQASADEVKGVRYSVFGCGDKNWAGTYQKVPAFIDETLAAKGAENIADRGEADASDDFEGTYEEWRDHMWSDVAAYFNLDIENSEDNKSTLSLQFVDSAADMPLAKMHGAFSTNVVASKELQQPGSARSTRHLEIELPKEASYQEGDHLGVIPRNYEGIVNRVTARFGLSASQQIRLEAEEEKLAHLPLAKTVSVEELLQYVELQDPVTRTQLRAMAAKTVCPPHKVELEALLEKQAYKEQVLAKRLTMLELLEKYPACEMKFSEFIALLPSIRPRYYSISSSPRVDEKQASITVSVVSGPAWSGYGEYKGIASNYLAELQEGDTITCFISTPQSEFTLPKDPETPLIMVGPGTGVAPFRGFVQARKQLKEQGQSLGEAHLYFGCRSPHEDYLYQEELENAQSEGIITLHTAFSRMPNQPKTYVQHVMEQDGKKLIELLDQGAHFYICGDGSQMAPAVEATLMKSYADVHQVSEADARLWLQQLEEKGRYAKDVWAG

SEQ ID NO: 383 - DNA, 3147 bp, synthetic construct
  misc_feature 1..3147: note = variant of P450 oxidase from Bacillus megaterium
  source 1..3147: mol_type = other DNA
atgacaattaaggaaatgcctcagcctaagacgtttggagaacttaaaaatttaccgttattaaacacagataaaccggttcaagctttgatgcgtattgcggatgaattaggagaaatctttaaattcgaggcgcctggtagcgtaacgcgctatttatcaagtcagcgtctaattaaagaagcatgcgatgaatcacgctttgataaaaacttaagtcaagcgcttaaatttgcacgtgattttgttggagacgggttagccacaagctggacgcatgaaccgaattggaaaaaagcgcataatatcttagttccaagctttagtcagcatgcaatggggcgttatcatgcgatgatggtcgatatcgccgtgcagcttgttcaaaagtgggagcgtctaaatgcagatgagcatattgaagtatcggaagacatgacacgtttaacgcttgatacaattggtctttgcggctttaactatcgctttaacagcttttaccgagatcagcctcatccatttattgtgagtgtggttcgtgcactggatgaagtaatgaacaagctgcagcgagcaaatccagacgacccagcttatgatgaaaacaagcgccagtgtcaagaagatatcaaggtgatgaacgactatgtagataaaattattgcagatcgcaaagcaaggggtgaacaaagtcatgatttattaacgcagatgctaaacggaaaagatccagaaacgggtgagccgcttgatgacgggaacattcgtcagcaaattattacattcttaattgcgggacaccaaacaacaagtggtcttttatcatttgcgctgtatttcttagtgaaaaatccacatgtattacaaaaagtagcagaagaagcagcacgagttctagtagatcctgttccaagctacaaacaagtcaaacagcttaaatatgttggcatggtcttaaacgaagcgctgcgcttatggccagtagcgcctatgttttccctatatgcaaaagaagatacggtgcttggaggagaatatcctttaacgaaaggcgacgaagtaatggttctggtgcctcagcttcaccgtgataaaacaatttggggagacgatgtggaggagttccgtccagagcgttttgaaaatccaagtgcgattccgcagcatgcgtttaaaccgtttggaaacggtcagcgtgcgtgtatcggtcagcagttcgctcttcatgaagggacgctggtacttggtatgatgctaaaacactttgactttgaagatcatacaaactacgagctcgttattaaagaatcgcggacgttaaaacctgaaggctttgtggtaaaagcaaaatcgaaaggcattccgcttggcggtattccttcacctagcactgaacagtctgctaaaaaagtacgcaaaaaggcagaaaacgctcataatacgccgctgcttgtgctatacggttcaaatgcgggaacagctgaaggaacggcgcgtgatttagcagatattgcaatgagcaaaggatttgcaccgcaggtcgcaacgcttgattcacacgccggaaatcttccgcgcgaaggagctgtattaattgtaacggcgtcttataacggtcatccgcctgataacgcaaagcaatttgtcgactggttagaccaagcgtctgctgatgaagtaaaaggcgttcgctactccgtatttggatgcggcgataaaaattgggcggggacgtatcaaaaagtgcctgcttttatcgatgaaacgcttgccgctaaaggggcagaaaacatcgctgaccgcggtgaagcagatgcaagcgacgactttgaaggcacatatgaagaatggcgtgatcatatgtggagtgacgtagcagcctactttaacctcgacattgaaaacagtgaagataataaatctactctttcacttcaatttgtcgacagcgccgcggatatgccgcttgcgaaaatgcacggtgcgttttcaacgaacgtcgtagcaagcaaagaacttcaacagccaggcagtgcacgaagcacgcgacatcttgaaattgaacttccaaaagaagcttcttatcaagaaggagatcatttaggtgttattcctcgcaactatgaaggaatagtaaaccgtgtaacagcaaggttcggcctaagcgcatcacagcaaatccgtctggaagcagaagaagaaaaattagctcatttgccactcgctaaaacagtatccgtagaagagcttctgcaatacgtggagcttcaagatcctgttacgcgcacgcagcttcgcgcaatggctgctaaaacggtctgcccgccgcataaagtagagcttgaagccttgcttgaaaagcaagcctacaaagaacaagtgctggcaaaacgtttaacaatgcttgaactgcttgaaaaatacccggcgtgtgaaatgaaattcagcgaatttatcgcccttctgccaagcatacgcccgcgctattactcgatttcttcatcacctcgtgtcgatgaaaaacaagcaagcatcacggtcagcgttgtctcaggaccggcgtggagcggatatggagaatataaaggaattgcgtcgaactatcttgccgagctgcaagaaggagatacgattacgtgctttatttccacaccgcagtcagaatttacgctgccaaaagaccctgaaacgccgcttatcatggtcggaccgggaacaggcgtcgcgccgtttagaggctttgtgcaggcgcgcaaacagctaaaagaacaaggacagtcacttggagaagcacatttatacttcggctgccgttcacctcatgaagactatctgtatcaagaagagcttgaaaacgcccaaagcgaaggcatcattacgcttcataccgctttttctcgcatgccaaatcagccgaaaacatacgttcagcacgtaatggaacaagacggcaagaaattgattgaacttcttgatcaaggagcgcacttctatatttgcggagacggaagccaaatggcacctgccgttgaagcaacgcttatgaaaagctatgctgacgttcaccaagtgagtgaagcagacgctcgcttatggctgcagcagctagaagaaaaaggccgatacgcaaaagacgtgtgggctggg

SEQ ID NO: 384 - protein, 1049 aa, synthetic construct
  REGION 1..1049: note = variant of P450 oxidase from Bacillus megaterium
MTIKEMPQPKTFGELKNLPLLNTDKPVQALMRIADELGEIFKFEAPGSVTRYLSSQRLIKEACDESRFDKNLSQALKFARDFVGDGLATSWTHEPNWKKAHNILVPSFSQHAMGRYHAMMVDIAVQLVQKWERLNADEHIEVSEDMTRLTLDTIGLCGFNYRFNSFYRDQPHPFIVSVVRALDEVMNKLQRANPDDPAYDENKRQCQEDIKVMNDYVDKIIADRKARGEQSHDLLTQMLNGKDPETGEPLDDGNIRQQIITFLIAGHQTTSGLLSFALYFLVKNPHVLQKVAEEAARVLVDPVPSYKQVKQLKYVGMVLNEALRLWPVAPMFSLYAKEDTVLGGEYPLTKGDEVMVLVPQLHRDKTIWGDDVEEFRPERFENPSAIPQHAFKPFGNGQRACIGQQFALHEGTLVLGMMLKHFDFEDHTNYELVIKESRTLKPEGFVVKAKSKGIPLGGIPSPSTEQSAKKVRKKAENAHNTPLLVLYGSNAGTAEGTARDLADIAMSKGFAPQVATLDSHAGNLPREGAVLIVTASYNGHPPDNAKQFVDWLDQASADEVKGVRYSVFGCGDKNWAGTYQKVPAFIDETLAAKGAENIADRGEADASDDFEGTYEEWRDHMWSDVAAYFNLDIENSEDNKSTLSLQFVDSAADMPLAKMHGAFSTNVVASKELQQPGSARSTRHLEIELPKEASYQEGDHLGVIPRNYEGIVNRVTARFGLSASQQIRLEAEEEKLAHLPLAKTVSVEELLQYVELQDPVTRTQLRAMAAKTVCPPHKVELEALLEKQAYKEQVLAKRLTMLELLEKYPACEMKFSEFIALLPSIRPRYYSISSSPRVDEKQASITVSVVSGPAWSGYGEYKGIASNYLAELQEGDTITCFISTPQSEFTLPKDPETPLIMVGPGTGVAPFRGFVQARKQLKEQGQSLGEAHLYFGCRSPHEDYLYQEELENAQSEGIITLHTAFSRMPNQPKTYVQHVMEQDGKKLIELLDQGAHFYICGDGSQMAPAVEATLMKSYADVHQVSEADARLWLQQLEEKGRYAKDVWAG

SEQ ID NO: 385 - DNA, 3147 bp, synthetic construct
  misc_feature 1..3147: note = variant of P450 oxidase from Bacillus megaterium
  source 1..3147: mol_type = other DNA
atgacaattaaggaaatgcctcagcctaagacgtttggagaacttaaaaatttaccgttattaaacacagataaaccggttcaagctttgatgcgtattgcggatgaattaggagaaatctttaaattcgaggcgcctggtagcgtaacgcgctatttatcaagtcagcgtctaattaaagaagcatgcgatgaatcacgctttgataaaaacttaagtcaagcgcttaaatttgcacgtgattttgttggagacgggttagccacaagctggacgcatgaaccgaattggaaaaaagcgcataatatcttagttccaagctttagtcagcatgcaatggggcgttatcatgcgatgatggtcgatatcgccgtgcagcttgttcaaaagtgggagcgtctaaatgcagatgagcatattgaagtatcggaagacatgacacgtttaacgcttgatacaattggtctttgcggctttaactatcgctttaacagcttttaccgagatcagcctcatccatttattgtgagtgtggttcgtgcactggatgaagtaatgaacaagctgcagcgagcaaatccagacgacccagcttatgatgaaaacaagcgccagtgtcaagaagatatcaaggtgatgaacgactatgtagataaaattattgcagatcgcaaagcaaggggtgaacaaagtcatgatttattaacgcagatgctaaacggaaaagatccagaaacgggtgagccgcttgatgacgggaacattcgtcagcaaattattacattcttaattgcgggacaccaaacaacaagtggtcttttatcatttgcgctgtatttcttagtgaaaaatccacatgtattacaaaaagtagcagaagaagcagcacgagttctagtagatcctgttccaagctacaaacaagtcaaacagcttaaatatgttggcatggtcttaaacgaagcgctgcgcttatggccaaccgcgcctatgttttccctatatgcaaaagaagatacggtgcttggaggagaatatcctttaacgaaaggcgacgaagtaatggttctggtgcctcagcttcaccgtgataaaacaatttggggagacgatgtggaggagttccgtccagagcgttttgaaaatccaagtgcgattccgcagcatgcgtttaaaccgtttggaaacggtcagcgtgcgtgtatcggtcagcagttcgctcttcatgaagcaacgctggtacttggtatgatgctaaaacactttgactttgaagatcatacaaactacgagctcgttattaaagaatcgcggacgttaaaacctgaaggctttgtggtaaaagcaaaatcgaaaggcattccgcttggcggtattccttcacctagcactgaacagtctgctaaaaaagtacgcaaaaaggcagaaaacgctcataatacgccgctgcttgtgctatacggttcaaatgcgggaacagctgaaggaacggcgcgtgatttagcagatattgcaatgagcaaaggatttgcaccgcaggtcgcaacgcttgattcacacgccggaaatcttccgcgcgaaggagctgtattaattgtaacggcgtcttataacggtcatccgcctgataacgcaaagcaatttgtcgactggttagaccaagcgtctgctgatgaagtaaaaggcgttcgctactccgtatttggatgcggcgataaaaattgggcggggacgtatcaaaaagtgcctgcttttatcgatgaaacgcttgccgctaaaggggcagaaaacatcgctgaccgcggtgaagcagatgcaagcgacgactttgaaggcacatatgaagaatggcgtgatcatatgtggagtgacgtagcagcctactttaacctcgacattgaaaacagtgaagataataaatctactctttcacttcaatttgtcgacagcgccgcggatatgccgcttgcgaaaatgcacggtgcgttttcaacgaacgtcgtagcaagcaaagaacttcaacagccaggcagtgcacgaagcacgcgacatcttgaaattgaacttccaaaagaagcttcttatcaagaaggagatcatttaggtgttattcctcgcaactatgaaggaatagtaaaccgtgtaacagcaaggttcggcctaagcgcatcacagcaaatccgtctggaagcagaagaagaaaaattagctcatttgccactcgctaaaacagtatccgtagaagagcttctgcaatacgtggagcttcaagatcctgttacgcgcacgcagcttcgcgcaatggctgctaaaacggtctgcccgccgcataaagtagagcttgaagccttgcttgaaaagcaagcctacaaagaacaagtgctggcaaaacgtttaacaatgcttgaactgcttgaaaaatacccggcgtgtgaaatgaaattcagcgaatttatcgcccttctgccaagcatacgcccgcgctattactcgatttcttcatcacctcgtgtcgatgaaaaacaagcaagcatcacggtcagcgttgtctcaggaccggcgtggagcggatatggagaatataaaggaattgcgtcgaactatcttgccgagctgcaagaaggagatacgattacgtgctttatttccacaccgcagtcagaatttacgctgccaaaagaccctgaaacgccgcttatcatggtcggaccgggaacaggcgtcgcgccgtttagaggctttgtgcaggcgcgcaaacagctaaaagaacaaggacagtcacttggagaagcacatttatacttcggctgccgttcacctcatgaagactatctgtatcaagaagagcttgaaaacgcccaaagcgaaggcatcattacgcttcataccgctttttctcgcatgccaaatcagccgaaaacatacgttcagcacgtaatggaacaagacggcaagaaattgattgaacttcttgatcaaggagcgcacttctatatttgcggagacggaagccaaatggcacctgccgttgaagcaacgcttatgaaaagctatgctgacgttcaccaagtgagtgaagcagacgctcgcttatggctgcagcagctagaagaaaaaggccgatacgcaaaagacgtgtgggctggg

SEQ ID NO: 386 - protein, 1049 aa, synthetic construct
  REGION 1..1049: note = variant of P450 oxidase from Bacillus megaterium
MTIKEMPQPKTFGELKNLPLLNTDKPVQALMRIADELGEIFKFEAPGSVTRYLSSQRLIKEACDESRFDKNLSQALKFARDFVGDGLATSWTHEPNWKKAHNILVPSFSQHAMGRYHAMMVDIAVQLVQKWERLNADEHIEVSEDMTRLTLDTIGLCGFNYRFNSFYRDQPHPFIVSVVRALDEVMNKLQRANPDDPAYDENKRQCQEDIKVMNDYVDKIIADRKARGEQSHDLLTQMLNGKDPETGEPLDDGNIRQQIITFLIAGHQTTSGLLSFALYFLVKNPHVLQKVAEEAARVLVDPVPSYKQVKQLKYVGMVLNEALRLWPTAPMFSLYAKEDTVLGGEYPLTKGDEVMVLVPQLHRDKTIWGDDVEEFRPERFENPSAIPQHAFKPFGNGQRACIGQQFALHEATLVLGMMLKHFDFEDHTNYELVIKESRTLKPEGFVVKAKSKGIPLGGIPSPSTEQSAKKVRKKAENAHNTPLLVLYGSNAGTAEGTARDLADIAMSKGFAPQVATLDSHAGNLPREGAVLIVTASYNGHPPDNAKQFVDWLDQASADEVKGVRYSVFGCGDKNWAGTYQKVPAFIDETLAAKGAENIADRGEADASDDFEGTYEEWRDHMWSDVAAYFNLDIENSEDNKSTLSLQFVDSAADMPLAKMHGAFSTNVVASKELQQPGSARSTRHLEIELPKEASYQEGDHLGVIPRNYEGIVNRVTARFGLSASQQIRLEAEEEKLAHLPLAKTVSVEELLQYVELQDPVTRTQLRAMAAKTVCPPHKVELEALLEKQAYKEQVLAKRLTMLELLEKYPACEMKFSEFIALLPSIRPRYYSISSSPRVDEKQASITVSVVSGPAWSGYGEYKGIASNYLAELQEGDTITCFISTPQSEFTLPKDPETPLIMVGPGTGVAPFRGFVQARKQLKEQGQSLGEAHLYFGCRSPHEDYLYQEELENAQSEGIITLHTAFSRMPNQPKTYVQHVMEQDGKKLIELLDQGAHFYICGDGSQMAPAVEATLMKSYADVHQVSEADARLWLQQLEEKGRYAKDVWAG

SEQ ID NO: 387 - DNA, 3147 bp, synthetic construct
  misc_feature 1..3147: note = variant of P450 oxidase from Bacillus megaterium
  source 1..3147: mol_type = other DNA
atgacaattaaggaaatgcctcagcctaagacgtttggagaacttaaaaatttaccgttattaaacacagataaaccggttcaagctttgatgcgtattgcggatgaattaggagaaatctttaaattcgaggcgcctggtagcgtaacgcgctatttatcaagtcagcgtctaattaaagaagcatgcgatgaatcacgctttgataaaaacttaagtcaatcgcttaaatttgcccgtgattttgttggagacgggttagccacaagctggacgcatgaaccgaattggaaaaaagcgcataatatcttagttccaagctttagtcagcatgcaatggggcgttatcatgcgatgatggtcgatatcgccgtgcagcttgttcaaaagtgggagcgtctaaatgcagatgagcatattgaagtatcggaagacatgacacgtttaacgcttgatacaattggtctttgcggctttaactatcgctttaacagcttttaccgagatcagcctcatccatttattgtgagtgtggttcgtgcactggatgaagtaatgaacaagctgcagcgagcaaatccagacgacccagcttatgatgaaaacaagcgccagtgtcaagaagatatcaaggtgatgaacgactatgtagataaaattattgcagatcgcaaagcaaggggtgaacaaagtcatgatttattaacgcagatgctaaacggaaaagatccagaaacgggtgagccgcttgatgacgggaacattcgtcagcaaattattacattcttaattgcgggacaccaaacaacaagtggtcttttatcatttgcgctgtatttcttagtgaaaaatccacatgtattacaaaaagtagcagaagaagcagcacgagttctagtagatcctgttccaagctacaaacaagtcaaacagcttaaatatgttggcatggtcttaaacgaagcgctgcgcttatggccagtagcgcctatgttttccctatatgcaaaagaagatacggtgcttggaggagaatatcctttaacgaaaggcgacgaagtaatggttctggtgcctcagcttcaccgtgataaaacaatttggggagacgatgtggaggagttccgtccagagcgttttgaaaatccaagtgcgattccgcagcatgcgtttaaaccgtttggaaacggtcagcgtgcgtgtatcggtcagcagttcgctcttcatgaagcaacgctggtacttggtatgatgctaaaacactttgactttgaagatcatacaaactacgagctcgttattaaagaatcgcggacgttaaaacctgaaggctttgtggtaaaagcaaaatcgaaaggcattccgcttggcggtattccttcacctagcactgaacagtctgctaaaaaagtacgcaaaaaggcagaaaacgctcataatacgccgctgcttgtgctatacggttcaaatgcgggaacagctgaaggaacggcgcgtgatttagcagatattgcaatgagcaaaggatttgcaccgcaggtcgcaacgcttgattcacacgccggaaatcttccgcgcgaaggagctgtattaattgtaacggcgtcttataacggtcatccgcctgataacgcaaagcaatttgtcgactggttagaccaagcgtctgctgatgaagtaaaaggcgttcgctactccgtatttggatgcggcgataaaaattgggcggggacgtatcaaaaagtgcctgcttttatcgatgaaacgcttgccgctaaaggggcagaaaacatcgctgaccgcggtgaagcagatgcaagcgacgactttgaaggcacatatgaagaatggcgtgatcatatgtggagtgacgtagcagcctactttaacctcgacattgaaaacagtgaagataataaatctactctttcacttcaatttgtcgacagcgccgcggatatgccgcttgcgaaaatgcacggtgcgttttcaacgaacgtcgtagcaagcaaagaacttcaacagccaggcagtgcacgaagcacgcgacatcttgaaattgaacttccaaaagaagcttcttatcaagaaggagatcatctgggtgttattcctcgcaactatgaaggaatagtaaaccgtgtaacagcaaggttcggcctaagcgcatcacagctgatccgtctggaagcagaagaagaaaaattagctcatttgccactcgctaaaacagtatccgtagaagagcttctgcaatacgtggagcttcaagatcctgttacgcgcacgcagcttcgcgcaatggctgctaaaacggtctgcccgccgcataaagtagagcttgaagccttgcttgaaaagcaagcctacaaagaacaagtgctgaataaacgtttaacaatgcttgaactgcttgaaaaatacccggcgtgtgaaatgaaattcagcgaatttatcgcccttctgccaagcatacgcccgcgctattactcgatttcttcatcacctcgtgtcgatgaaaaacaagcaagcatcacggtctcggttgtcgtgggaccggcgtggagcggatatggagaatataaaggaattgcgtcgaactatcttgccgagctgcaagaaggagatacgattacgtgctttatttccacaccgcagtcagaatttacgctgccaaaagaccctgaaacgccgcttatcatggtcggaccgggaacaggcgtcgcgccgtttagaggctttgtgcaggcgcgcaaacagctaaaagaacaaggacagtcacttggagaagcacatttatacttcggctgccgttcacctcatgaagactatctgtatcaagaagagcttgaaaacgcccaaagcgaaggcatcattacgcttcataccgctttttctcgcatgccaaatcagccgaaaacatacgttcagcacgtaatggaacaagacggcaagaaattgattgaacttcttgatcaaggagcgcacttctatgcatgcggagacggaagccaaatggcacctgccgttgaagcaacgcttatgaaaagctatgctgacgttcaccaagtgagtgaagcagacgctcgcttatggctgcagcagctagaagaaaaaggccgatacgcaaaagacgtgtgggctggg

SEQ ID NO: 388 - protein, 1049 aa, synthetic construct
  REGION 1..1049: note = variant of P450 oxidase from Bacillus megaterium
MTIKEMPQPKTFGELKNLPLLNTDKPVQALMRIADELGEIFKFEAPGSVTRYLSSQRLIKEACDESRFDKNLSQSLKFARDFVGDGLATSWTHEPNWKKAHNILVPSFSQHAMGRYHAMMVDIAVQLVQKWERLNADEHIEVSEDMTRLTLDTIGLCGFNYRFNSFYRDQPHPFIVSVVRALDEVMNKLQRANPDDPAYDENKRQCQEDIKVMNDYVDKIIADRKARGEQSHDLLTQMLNGKDPETGEPLDDGNIRQQIITFLIAGHQTTSGLLSFALYFLVKNPHVLQKVAEEAARVLVDPVPSYKQVKQLKYVGMVLNEALRLWPVAPMFSLYAKEDTVLGGEYPLTKGDEVMVLVPQLHRDKTIWGDDVEEFRPERFENPSAIPQHAFKPFGNGQRACIGQQFALHEATLVLGMMLKHFDFEDHTNYELVIKESRTLKPEGFVVKAKSKGIPLGGIPSPSTEQSAKKVRKKAENAHNTPLLVLYGSNAGTAEGTARDLADIAMSKGFAPQVATLDSHAGNLPREGAVLIVTASYNGHPPDNAKQFVDWLDQASADEVKGVRYSVFGCGDKNWAGTYQKVPAFIDETLAAKGAENIADRGEADASDDFEGTYEEWRDHMWSDVAAYFNLDIENSEDNKSTLSLQFVDSAADMPLAKMHGAFSTNVVASKELQQPGSARSTRHLEIELPKEASYQEGDHLGVIPRNYEGIVNRVTARFGLSASQLIRLEAEEEKLAHLPLAKTVSVEELLQYVELQDPVTRTQLRAMAAKTVCPPHKVELEALLEKQAYKEQVLNKRLTMLELLEKYPACEMKFSEFIALLPSIRPRYYSISSSPRVDEKQASITVSVVVGPAWSGYGEYKGIASNYLAELQEGDTITCFISTPQSEFTLPKDPETPLIMVGPGTGVAPFRGFVQARKQLKEQGQSLGEAHLYFGCRSPHEDYLYQEELENAQSEGIITLHTAFSRMPNQPKTYVQHVMEQDGKKLIELLDQGAHFYACGDGSQMAPAVEATLMKSYADVHQVSEADARLWLQQLEEKGRYAKDVWAG

SEQ ID NO: 389 - DNA, 3147 bp, synthetic construct
  misc_feature 1..3147: note = variant of P450 oxidase from Bacillus megaterium
  source 1..3147: mol_type = other DNA
atgacaattaaggaaatgcctcagcctaagacgtttggagaacttaaaaatttaccgttattaaacacagataaaccggttcaagctttgatgcgtattgcggatgaattaggagaaatctttaaattcgaggcgcctggtagcgtaacgcgctatttatcaagtcagcgtctaattaaagaagcatgcgatgaatcacgctttgataaaaacttaagtcaatcgcttaaatttgcccgtgattttgttggagacgggttagccacaagctggacgcatgaaccgaattggaaaaaagcgcataatatcttagttccaagctttagtcagcatgcaatggggcgttatcatgcgatgatggtcgatatcgccgtgcagcttgttcaaaagtgggagcgtctaaatgcagatgagcatattgaagtatcggaagacatgacacgtttaacgcttgatacaattggtctttgcggctttaactatcgctttaacagcttttaccgagatcagcctcatccatttattgtgagtgtggttcgtgcactggatgaagtaatgaacaagctgcagcgagcaaatccagacgacccagcttatgatgaaaacaagcgccagtgtcaagaagatatcaaggtgatgaacgactatgtagataaaattattgcagatcgcaaagcaaggggtgaacaaagtcatgatttattaacgcagatgctaaacggaaaagatccagaaacgggtgagccgcttgatgacgggaacattcgtcagcaaattattacattcttaattgcgggacaccaaacaacaagtggtcttttatcatttgcgctgtatttcttagtgaaaaatccacatgtattacaaaaagtagcagaagaagcagcacgagttctagtagatcctgttccaagctacaaacaagtcaaacagcttaaatatgttggcatggtcttaaacgaagcgctgcgcttatggccagtagcgcctacgttttccctatatgcaaaagaagatacggtgcttggaggagaatatcctttaacgaaaggcgacgaagtaatggttctggtgcctcagcttcaccgtgataaaacaatttggggagacgatgtggaggagttccgtccagagcgttttgaaaatccaagtgcgattccgcagcatgcgtttaaaccgtttggaaacggtcagcgtgcgtgtatcggtcagcagttcgctcttcatgaagcaacgctggtacttggtatgatgctaaaacactttgactttgaagatcatacaaactacgagctcgttattaaagaatcgcggacgttaaaacctgaaggctttgtggtaaaagcaaaatcgaaaggcattccgcttggcggtattccttcacctagcactgaacagtctgctaaaaaagtacgcaaaaaggcagaaaacgctcataatacgccgctgcttgtgctatacggttcaaatgcgggaacagctgaaggaacggcgcgtgatttagcagatattgcaatgagcaaaggatttgcaccgcaggtcgcaacgcttgattcacacgccggaaatcttccgcgcgaaggagctgtattaattgtaacggcgtcttataacggtcatccgcctgataacgcaaagcaatttgtcgactggttagaccaagcgtctgctgatgaagtaaaaggcgttcgctactccgtatttggatgcggcgataaaaattgggcggggacgtatcaaaaagtgcctgcttttatcgatgaaacgcttgccgctaaaggggcagaaaacatcgctgaccgcggtgaagcagatgcaagcgacgactttgaaggcacatatgaagaatggcgtgatcatatgtggagtgacgtagcagcctactttaacctcgacattgaaaacagtgaagataataaatctactctttcacttcaatttgtcgacagcgccgcggatatgccgcttgcgaaaatgcacggtgcgttttcaacgaacgtcgtagcaagcaaagaacttcaacagccaggcagtgcacgaagcacgcgacatcttgaaattgaacttccaaaagaagcttcttatcaagaaggagatcatttaggtgttattcctcgcaactatgaaggaatagtaaaccgtgtaacagcaaggttcggcctaagcgcatcacagctgatccgtctggaagcagaagaagaaaaattagctcatttgccactcgctaaaacagtatccgtagaagagcttctgcaatacgtggagcttcaagatcctgttacgcgcacgcagcttcgcgcaatggctgctaaaacggtctgcccgccgcataaagtagagcttgaagccttgcttgaaaagcaagcctacaaagaacaagtgctggcaaaacgtttaacaatgcttgaactgcttgaaaaatacccggcgtgtgaaatgaaattcagcgaatttatcgcccttctgccaagcatacgcccgcgctattactcgatttcttcatcacctcgtgtcgatgaaaaacaagcaagcatcacggtctcggttgtcagtggaccggcgtggagcggatatggagaatataaaggaattgcgtcgaactatcttgccgagctgcaagaaggagatacgattacgtgctttatttccacaccgcagtcagaatttacgctgccaaaagaccctgaaacgccgcttatcatggtcggaccgggaacaggcgtcgcgccgtttagaggctttgtgcaggcgcgcaaacagctaaaagaacaaggacagtcacttggagaagcacatttatacttcggctgccgttcacctcatgaagactatctgtatcaagaagagcttgaaaacgcccaaagcgaaggcatcattacgcttcataccgctttttctcgcatgccaaatcagccgaaaacatacgttcagcacgtaatggaacaagacggcaagaaattgattgaacttcttgatcaaggagcgcacttctatgcatgcggagacggaagccaaatggcacctgccgttgaagcaacgcttatgaaaagctatgctgacgttcaccaagtgagtgaagcagacgctcgcttatggctgcagcagctagaagaaaaaggccgatacgcaaaagacgtgtgggctggg

SEQ ID NO: 390 - protein, 1049 aa, synthetic construct
  REGION 1..1049: note = variant of P450 oxidase from Bacillus megaterium
MTIKEMPQPKTFGELKNLPLLNTDKPVQALMRIADELGEIFKFEAPGSVTRYLSSQRLIKEACDESRFDKNLSQSLKFARDFVGDGLATSWTHEPNWKKAHNILVPSFSQHAMGRYHAMMVDIAVQLVQKWERLNADEHIEVSEDMTRLTLDTIGLCGFNYRFNSFYRDQPHPFIVSVVRALDEVMNKLQRANPDDPAYDENKRQCQEDIKVMNDYVDKIIADRKARGEQSHDLLTQMLNGKDPETGEPLDDGNIRQQIITFLIAGHQTTSGLLSFALYFLVKNPHVLQKVAEEAARVLVDPVPSYKQVKQLKYVGMVLNEALRLWPVAPTFSLYAKEDTVLGGEYPLTKGDEVMVLVPQLHRDKTIWGDDVEEFRPERFENPSAIPQHAFKPFGNGQRACIGQQFALHEATLVLGMMLKHFDFEDHTNYELVIKESRTLKPEGFVVKAKSKGIPLGGIPSPSTEQSAKKVRKKAENAHNTPLLVLYGSNAGTAEGTARDLADIAMSKGFAPQVATLDSHAGNLPREGAVLIVTASYNGHPPDNAKQFVDWLDQASADEVKGVRYSVFGCGDKNWAGTYQKVPAFIDETLAAKGAENIADRGEADASDDFEGTYEEWRDHMWSDVAAYFNLDIENSEDNKSTLSLQFVDSAADMPLAKMHGAFSTNVVASKELQQPGSARSTRHLEIELPKEASYQEGDHLGVIPRNYEGIVNRVTARFGLSASQLIRLEAEEEKLAHLPLAKTVSVEELLQYVELQDPVTRTQLRAMAAKTVCPPHKVELEALLEKQAYKEQVLAKRLTMLELLEKYPACEMKFSEFIALLPSIRPRYYSISSSPRVDEKQASITVSVVSGPAWSGYGEYKGIASNYLAELQEGDTITCFISTPQSEFTLPKDPETPLIMVGPGTGVAPFRGFVQARKQLKEQGQSLGEAHLYFGCRSPHEDYLYQEELENAQSEGIITLHTAFSRMPNQPKTYVQHVMEQDGKKLIELLDQGAHFYACGDGSQMAPAVEATLMKSYADVHQVSEADARLWLQQLEEKGRYAKDVWAG

SEQ ID NO: 391 - DNA, 3147 bp, synthetic construct
  misc_feature 1..3147: note = variant of P450 oxidase from Bacillus megaterium
  source 1..3147: mol_type = other DNA
atgacaattaaggaaatgcctcagcctaagacgtttggagaacttaaaaatttaccgttattaaacacagataaaccggttcaagctttgatgcgtattgcggatgaattaggagaaatctttaaattcgaggcgcctggtagcgtaacgcgctatttatcaagtcagcgtctaattaaagaagcatgcgatgaatcacgctttgataaaaacttaagtcaatcgcttaaatttgcccgtgattttgttggagacgggttagccacaagctggacgcatgaaccgaattggaaaaaagcgcataatatcttagttccaagctttagtcagcatgcaatggggcgttatcatgcgatgatggtcgatatcgccgtgcagcttgttcaaaagtgggagcgtctaaatgcagatgagcatattgaagtatcggaagacatgacacgtttaacgcttgatacaattggtctttgcggctttaactatcgctttaacagcttttaccgagatcagcctcatccatttattgtgagtgtggttcgtgcactggatgaagtaatgaacaagctgcagcgagcaaatccagacgacccagcttatgatgaaaacaagcgccagtgtcaagaagatatcaaggtgatgaacgactatgtagataaaattattgcagatcgcaaagcaaggggtgaacaaagtcatgatttattaacgcagatgctaaacggaaaagatccagaaacgggtgagccgcttgatgacgggaacattcgtcagcaaattattacattcttaattgcgggacaccaaacaacaagtggtcttttatcatttgcgctgtatttcttagtgaaaaatccacatgtattacaaaaagtagcagaagaagcagcacgagttctagtagatcctgttccaagctacaaacaagtcaaacagcttaaatatgttggcatggtcttaaacgaagcgctgcgcttatggccagtagcgcctacgttttccctatatgcaaaagaagatacggtgcttggaggagaatatcctttaacgaaaggcgacgaagtaatggttctggtgcctcagcttcaccgtgataaaacaatttggggagacgatgtggaggagttccgtccagagcgttttgaaaatccaagtgcgattccgcagcatgcgtttaaaccgtttggaaacggtcagcgtgcgtgtatcggtcagcagttcgctcttcatgaagcaacgctggtacttggtatgatgctaaaacactttgactttgaagatcatacaaactacgagctcgttattaaagaatcgcggacgttaaaacctgaaggctttgtggtaaaagcaaaatcgaaaggcattccgcttggcggtattccttcacctagcactgaacagtctgctaaaaaagtacgcaaaaaggcagaaaacgctcataatacgccgctgcttgtgctatacggttcaaatgcgggaacagctgaaggaacggcgcgtgatttagcagatattgcaatgagcaaaggatttgcaccgcaggtcgcaacgcttgattcacacgccggaaatcttccgcgcgaaggagctgtattaattgtaacggcgtcttataacggtcatccgcctgataacgcaaagcaatttgtcgactggttagaccaagcgtctgctgatgaagtaaaaggcgttcgctactccgtatttggatgcggcgataaaaattgggcggggacgtatcaaaaagtgcctgcttttatcgatgaaacgcttgccgctaaaggggcagaaaacatcgctgaccgcggtgaagcagatgcaagcgacgactttgaaggcacatatgaagaatggcgtgatcatatgtggagtgacgtagcagcctactttaacctcgacattgaaaacagtgaagataataaatctactctttcacttcaatttgtcgacagcgccgcggatatgccgcttgcgaaaatgcacggtgcgttttcaacgaacgtcgtagcaagcaaagaacttcaacagccaggcagtgcacgaagcacgcgacatcttgaaattgaacttccaaaagaagcttcttatcaagaaggagatcatgtgggtgttattcctcgcaactatgaaggaatagtaaaccgtgtaacagcaaggttcggcctaagcgcatcacagctgatccgtctggaagcagaagaagaaaaattagctcatttgccactcgctaaaacagtatccgtagaagagcttctgcaatacgtggagcttcaagatcctgttacgcgcacgcagcttcgcgcaatggctgctaaaacggtctgcccgccgcataaagtagagcttgaagccttgcttgaaaagcaagcctacaaagaacaagtgctggcaaaacgtttaacaatgcttgaactgcttgaaaaatacccggcgtgtgaaatgaaattcagcgaatttatcgcccttctgccaagcatacgcccgcgctattactcgatttcttcatcacctcgtgtcgatgaaaaacaagcaagcatcacggtctcggttgtcgtgggaccggcgtggagcggatatggagaatataaaggaattgcgtcgaactatcttgccgagctgcaagaaggagatacgattacgtgctttatttccacaccgcagtcagaatttacgctgccaaaagaccctgaaacgccgcttatcatggtcggaccgggaacaggcgtcgcgccgtttagaggctttgtgcaggcgcgcaaacagctaaaagaacaaggacagtcacttggagaagcacatttatacttcggctgccgttcacctcatgaagactatctgtatcaagaagagcttgaaaacgcccaaagcgaaggcatcattacgcttcataccgctttttctcgcatgccaaatcagccgaaaacatacgttcagcacgtaatggaacaagacggcaagaaattgattgaacttcttgatcaaggagcgcacttctatatctgcggagacggaagccaaatggcacctgccgttgaagcaacgcttatgaaaagctatgctgacgttcaccaagtgagtgaagcagacgctcgcttatggctgcagcagctagaagaaaaaggccgatacgcaaaagacgtgtggctgggg

SEQ ID NO: 392 - protein, 1049 aa, synthetic construct
  REGION 1..1049: note = variant of P450 oxidase from Bacillus megaterium
MTIKEMPQPKTFGELKNLPLLNTDKPVQALMRIADELGEIFKFEAPGSVTRYLSSQRLIKEACDESRFDKNLSQSLKFARDFVGDGLATSWTHEPNWKKAHNILVPSFSQHAMGRYHAMMVDIAVQLVQKWERLNADEHIEVSEDMTRLTLDTIGLCGFNYRFNSFYRDQPHPFIVSVVRALDEVMNKLQRANPDDPAYDENKRQCQEDIKVMNDYVDKIIADRKARGEQSHDLLTQMLNGKDPETGEPLDDGNIRQQIITFLIAGHQTTSGLLSFALYFLVKNPHVLQKVAEEAARVLVDPVPSYKQVKQLKYVGMVLNEALRLWPVAPTFSLYAKEDTVLGGEYPLTKGDEVMVLVPQLHRDKTIWGDDVEEFRPERFENPSAIPQHAFKPFGNGQRACIGQQFALHEATLVLGMMLKHFDFEDHTNYELVIKESRTLKPEGFVVKAKSKGIPLGGIPSPSTEQSAKKVRKKAENAHNTPLLVLYGSNAGTAEGTARDLADIAMSKGFAPQVATLDSHAGNLPREGAVLIVTASYNGHPPDNAKQFVDWLDQASADEVKGVRYSVFGCGDKNWAGTYQKVPAFIDETLAAKGAENIADRGEADASDDFEGTYEEWRDHMWSDVAAYFNLDIENSEDNKSTLSLQFVDSAADMPLAKMHGAFSTNVVASKELQQPGSARSTRHLEIELPKEASYQEGDHVGVIPRNYEGIVNRVTARFGLSASQLIRLEAEEEKLAHLPLAKTVSVEELLQYVELQDPVTRTQLRAMAAKTVCPPHKVELEALLEKQAYKEQVLAKRLTMLELLEKYPACEMKFSEFIALLPSIRPRYYSISSSPRVDEKQASITVSVVVGPAWSGYGEYKGIASNYLAELQEGDTITCFISTPQSEFTLPKDPETPLIMVGPGTGVAPFRGFVQARKQLKEQGQSLGEAHLYFGCRSPHEDYLYQEELENAQSEGIITLHTAFSRMPNQPKTYVQHVMEQDGKKLIELLDQGAHFYICGDGSQMAPAVEATLMKSYADVHQVSEADARLWLQQLEEKGRYAKDVWLG

SEQ ID NO: 393 - DNA, 3147 bp, synthetic construct
  misc_feature 1..3147: note = variant of P450 oxidase from Bacillus megaterium
  source 1..3147: mol_type = other DNA
atgacaattaaggaaatgcctcagcctaagacgtttggagaacttaaaaatttaccgttattaaacacagataaaccggttcaagctttgatgcgtattgcggatgaattaggagaaatctttaaattcgaggcgcctggtagcgtaacgcgctatttatcaagtcagcgtctaattaaagaagcatgcgatgaatcacgctttgataaaaacttaagtcaatcgcttaaatttgcccgtgattttgttggagacgggttagccacaagctggacgcatgaaccgaattggaaaaaagcgcataatatcttagttccaagctttagtcagcatgcaatggggcgttatcatgcgatgatggtcgatatcgccgtgcagcttgttcaaaagtgggagcgtctaaatgcagatgagcatattgaagtatcggaagacatgacacgtttaacgcttgatacaattggtctttgcggctttaactatcgctttaacagcttttaccgagatcagcctcatccatttattgtgagtgtggttcgtgcactggatgaagtaatgaacaagctgcagcgagcaaatccagacgacccagcttatgatgaaaacaagcgccagtgtcaagaagatatcaaggtgatgaacgactatgtagataaaattattgcagatcgcaaagcaaggggtgaacaaagtcatgatttattaacgcagatgctaaacggaaaagatccagaaacgggtgagccgcttgatgacgggaacattcgtcagcaaattattacattcttaattgcgggacaccaaacaacaagtggtcttttatcatttgcgctgtatttcttagtgaaaaatccacatgtattacaaaaagtagcagaagaagcagcacgagttctagtagatcctgttccaagctacaaacaagtcaaacagcttaaatatgttggcatggtcttaaacgaagcgctgcgcttatggccagtagcgcctatgttttccctatatgcaaaagaagatacggtgcttggaggagaatatcctttaacgaaaggcgacgaagtaatggttctggtgcctcagcttcaccgtgataaaacaatttggggagacgatgtggaggagttccgtccagagcgttttgaaaatccaagtgcgattccgcagcatgcgtttaaaccgtttggaaacggtcagcgtgcgtgtatcggtcagcagttcgctcttcatgaagcaacgctggtacttggtatgatgctaaaacactttgactttgaagatcatacaaactacgagctcgttattaaagaatcgcggacgttaaaacctgaaggctttgtggtaaaagcaaaatcgaaaggcattccgcttggcggtattccttcacctagcactgaacagtctgctaaaaaagtacgcaaaaaggcagaaaacgctcataatacgccgctgcttgtgctatacggttcaaatgcgggaacagctgaaggaacggcgcgtgatttagcagatattgcaatgagcaaaggatttgcaccgcaggtcgcaacgcttgattcacacgccggaaatcttccgcgcgaaggagctgtattaattgtaacggcgtcttataacggtcatccgcctgataacgcaaagcaatttgtcgactggttagaccaagcgtctgctgatgaagtaaaaggcgttcgctactccgtatttggatgcggcgataaaaattgggcggggacgtatcaaaaagtgcctgcttttatcgatgaaacgcttgccgctaaaggggcagaaaacatcgctgaccgcggtgaagcagatgcaagcgacgactttgaaggcacatatgaagaatggcgtgatcatatgtggagtgacgtagcagcctactttaacctcgacattgaaaacagtgaagataataaatctactctttcacttcaatttgtcgacagcgccgcggatatgccgcttgcgaaaatgcacggtgcgttttcaacgaacgtcgtagcaagcaaagaacttcaacagccaggcagtgcacgaagcacgcgacatcttgaaattgaacttccaaaagaagcttcttatcaagaaggagatcatttaggtgttattcctcgcaactatgaaggaatagtaaaccgtgtaacagcaaggttcggcctaagcgcatcacagcaaatccgtctggaagcagaagaagaaaaattagctcatttgccactcgctaaaacagtatccgtagaagagcttctgcaatacgtggagcttcaagatcctgttacgcgcacgcagcttcgcgcaatggctgctaaaacggtctgcccgccgcataaagtagagcttgaagccttgcttgaaaagcaagcctacaaagaacaagtgctggcaaaacgtttaacaatgcttgaactgcttgaaaaatacccggcgtgtgaaatgaaattcagcgaatttatcgcccttctgccaagcatacgcccgcgctattactcgatttcttcatcacctcgtgtcgatgaaaaacaagcaagcatcacggtcagcgttgtctcaggaccggcgtggagcggatatggagaatataagggaattgcgtcgaactatcttgccgagctgcaagaaggagatacgattacgtgctttatttccacaccgcagtcagaatttacgctgccaaaagaccctgaaacgccgcttatcatggtcggaccgggaacaggcgtcgcgccgtttagaggctttgtgcaggcgcgcaaacagctaaaagaacaaggacagtcacttggagaagcacatttatacttcggctgccgttcacctcatgaagactatctgtatcaagaagagcttgaaaacgcccaaagcgaaggcatcattacgcttcataccgctttttctcgcatgccaaatcagccgaaaacatacgttcagcacgtaatggaacaagacggcaagaaattgattgaacttcttgatcaaggagcgcacttctatatctgcggagacggaagccaaatggcacctgccgttgaagcaacgcttatgaaaagctatgctgacgttcaccaagtgagtgaagcagacgctcgcttatggctgcagcagctagaagaaaaaggccgatacgcaaaagacgtgtggctgggg

SEQ ID NO: 394 - protein, 1049 aa, synthetic construct
  REGION 1..1049: note = variant of P450 oxidase from Bacillus megaterium
MTIKEMPQPKTFGELKNLPLLNTDKPVQALMRIADELGEIFKFEAPGSVTRYLSSQRLIKEACDESRFDKNLSQSLKFARDFVGDGLATSWTHEPNWKKAHNILVPSFSQHAMGRYHAMMVDIAVQLVQKWERLNADEHIEVSEDMTRLTLDTIGLCGFNYRFNSFYRDQPHPFIVSVVRALDEVMNKLQRANPDDPAYDENKRQCQEDIKVMNDYVDKIIADRKARGEQSHDLLTQMLNGKDPETGEPLDDGNIRQQIITFLIAGHQTTSGLLSFALYFLVKNPHVLQKVAEEAARVLVDPVPSYKQVKQLKYVGMVLNEALRLWPVAPMFSLYAKEDTVLGGEYPLTKGDEVMVLVPQLHRDKTIWGDDVEEFRPERFENPSAIPQHAFKPFGNGQRACIGQQFALHEATLVLGMMLKHFDFEDHTNYELVIKESRTLKPEGFVVKAKSKGIPLGGIPSPSTEQSAKKVRKKAENAHNTPLLVLYGSNAGTAEGTARDLADIAMSKGFAPQVATLDSHAGNLPREGAVLIVTASYNGHPPDNAKQFVDWLDQASADEVKGVRYSVFGCGDKNWAGTYQKVPAFIDETLAAKGAENIADRGEADASDDFEGTYEEWRDHMWSDVAAYFNLDIENSEDNKSTLSLQFVDSAADMPLAKMHGAFSTNVVASKELQQPGSARSTRHLEIELPKEASYQEGDHLGVIPRNYEGIVNRVTARFGLSASQQIRLEAEEEKLAHLPLAKTVSVEELLQYVELQDPVTRTQLRAMAAKTVCPPHKVELEALLEKQAYKEQVLAKRLTMLELLEKYPACEMKFSEFIALLPSIRPRYYSISSSPRVDEKQASITVSVVSGPAWSGYGEYKGIASNYLAELQEGDTITCFISTPQSEFTLPKDPETPLIMVGPGTGVAPFRGFVQARKQLKEQGQSLGEAHLYFGCRSPHEDYLYQEELENAQSEGIITLHTAFSRMPNQPKTYVQHVMEQDGKKLIELLDQGAHFYICGDGSQMAPAVEATLMKSYADVHQVSEADARLWLQQLEEKGRYAKDVWLG

SEQ ID NO: 395 - DNA, 3147 bp, synthetic construct
  misc_feature 1..3147: note = variant of P450 oxidase from Bacillus megaterium
  source 1..3147: mol_type = other DNA
atgacaattaaggaaatgcctcagcctaagacgtttggagaacttaaaaatttaccgttattaaacacagataaaccggttcaagctttgatgcgtattgcggatgaattaggagaaatctttaaattcgaggcgcctggtagcgtaacgcgctatttatcaagtcagcgtctaattaaagaagcatgcgatgaatcacgctttgataaaaacttaagtcaagcgcttaaatttgcacgtgattttgttggagacgggttatctacaagctggacgcatgaaccgaattggaaaaaagcgcataatatcttagttccaagctttagtcagcatgcaatggggcgttatcatgcgatgatggtcgatatcgccgtgcagcttgttcaaaagtgggagcgtctaaatgcagatgagcatattgaagtatcggaagacatgacacgtttaacgcttgatacaattggtctttgcggctttaactatcgctttaacagcttttaccgagatcagcctcatccatttattgtgagtgtggttcgtgcactggatgaagtaatgaacaagctgcagcgagcaaatccagacgacccagcttatgatgaaaacaagcgccagtgtcaagaagatatcaaggtgatgaacgactatgtagataaaattattgcagatcgcaaagcaaggggtgaacaaagtcatgatttattaacgcagatgctaaacggaaaagatccagaaacgggtgagccgcttgatgacgggaacattcgtcagcaaattattacattcttaattgcgggacaccaaccaacaagtggtcttttatcatttgcgctgtatttcttagtgaaaaatccacatgtattacaaaaagtagcagaagaagcagcacgagttctagtagatcctgttccaagctacaaacaagtcaaacagcttaaatatgttggcatggtcttaaacgaagcgctgcgcttatggccagtagcgcctatgttttccctatatgcaaaagaagatacggtgcttggaggagaatatcctttaacgaaaggcgacgaagtaatggttctggtgcctcagcttcaccgtgataaaacaatttggggagacgatgtggaggagttccgtccagagcgttttgaaaatccaagtgcgattccgcagcatgcgtttaaaccgtttggaaacggtcagcgtgcgtgtatcggtcagcagttcgctcttcatgaagcaacgctggtacttggtatgatgctaaaacactttgactttgaagatcatacaaactacgagctcgttattaaagaatcgcggacgttaaaacctgaaggctttgtggtaaaagcaaaatcgaaaggcattccgcttggcggtattccttcacctagcactgaacagtctgctaaaaaagtacgcaaaaaggcagaaaacgctcataatacgccgctgcttgtgctatacggttcaaatgcgggaacagctgaaggaacggcgcgtgatttagcagatattgcaatgagcaaaggatttgcaccgcaggtcgcaacgcttgattcacacgccagaaatcttccgcgcgaaggagctgtattaattgtaacggcgtcttataacggtcatccgcctgataacgcaaagcaatttgtcgactggttagaccaagcgtctgctgatgaagtaaaaggcgttcgctactccgtatttggatgcggcgataaaaattgggcggggacgtatcaaaaagtgcctgcttttatcgatgaaacgcttgccgctaaaggggcagaaaacatcgctgaccgcggtgaagcagatgcaagcgacgactttgaaggcacatatgaagaatggcgtgatcatatgtggagtgacgtagcagcctactttaacctcgacattgaaaacagtgaagataataaatctactctttcacttcaatttgtcgacagcgccgcggatatgccgcttgcgaaaatgcacggtgcgttttcaacgaacgtcgtagcaagcaaagaacttcaacagccaggcagtgcacgaagcacgcgacatcttgaaattgaacttccaaaagaagcttcttatcaagaaggagatcatttaggtgttattcctcgcaactatgaaggaatagtaaaccgtgtaacagcaaggttcggcctaagcgcatcacagcaaatccgtctggaagcagaagaagaaaaattagctcatttgccactcgctaaaacagtatccgtagaagagcttctgcaatacgtggagcttcaagatcctgttacgcgcacgcagcttcgcgcaatggctgctaaaacggtctgcccgccgcataaagtagagcttgaagccttgcttgaaaagcaagcctacaaagaacaagtgctggcaaaacgtttaacaatgcttgaactgcttgaaaaatacccggcgtgtgaaatgaaattcagcgaatttatcgcccttctgccaagcatacgcccgcgctattactcgatttcttcatcacctcgtgtcgatgaaaaacaagcaagcatcacggtcagcgttgtctcaggaccggcgtggagcggatatggagaatataaaggaattgcgtcgaactatcttgccgagctgcaagaaggagatacgattacgtgctttatttccacaccgcagtcagaatttacgctgccaaaagaccctgaaacgccgcttatcatggtcggaccgggaacaggcgtcgcgccgtttagaggctttgtgcaggcgcgcaaacagctaaaagaacaaggacagtcacttggagaagcacatttatacttcggctgccgttcacctcatgaagactatctgtatcaagaagagcttgaaaacgcccaaagcgaaggcatcattacgcttcataccgctttttctcgcatgccaaatcagccgaaaacatacgttcagcacgtaatggaacaagacggcaagaaattgattgaacttcttgatcaaggagcgcacttctatatttgcggagacggaagccaaatggcacctgccgttgaagcaacgcttatgaaaagctatgctgacgttcaccaagtgagtgaagcagacgctcgcttatggctgcagcagctagaagaaaaaggccgatacgcaaaagacgtgtgggctggg

SEQ ID NO: 396 - protein, 1049 aa, synthetic construct
  REGION 1..1049: note = variant of P450 oxidase from Bacillus megaterium
MTIKEMPQPKTFGELKNLPLLNTDKPVQALMRIADELGEIFKFEAPGSVTRYLSSQRLIKEACDESRFDKNLSQALKFARDFVGDGLSTSWTHEPNWKKAHNILVPSFSQHAMGRYHAMMVDIAVQLVQKWERLNADEHIEVSEDMTRLTLDTIGLCGFNYRFNSFYRDQPHPFIVSVVRALDEVMNKLQRANPDDPAYDENKRQCQEDIKVMNDYVDKIIADRKARGEQSHDLLTQMLNGKDPETGEPLDDGNIRQQIITFLIAGHQPTSGLLSFALYFLVKNPHVLQKVAEEAARVLVDPVPSYKQVKQLKYVGMVLNEALRLWPVAPMFSLYAKEDTVLGGEYPLTKGDEVMVLVPQLHRDKTIWGDDVEEFRPERFENPSAIPQHAFKPFGNGQRACIGQQFALHEATLVLGMMLKHFDFEDHTNYELVIKESRTLKPEGFVVKAKSKGIPLGGIPSPSTEQSAKKVRKKAENAHNTPLLVLYGSNAGTAEGTARDLADIAMSKGFAPQVATLDSHARNLPREGAVLIVTASYNGHPPDNAKQFVDWLDQASADEVKGVRYSVFGCGDKNWAGTYQKVPAFIDETLAAKGAENIADRGEADASDDFEGTYEEWRDHMWSDVAAYFNLDIENSEDNKSTLSLQFVDSAADMPLAKMHGAFSTNVVASKELQQPGSARSTRHLEIELPKEASYQEGDHLGVIPRNYEGIVNRVTARFGLSASQQIRLEAEEEKLAHLPLAKTVSVEELLQYVELQDPVTRTQLRAMAAKTVCPPHKVELEALLEKQAYKEQVLAKRLTMLELLEKYPACEMKFSEFIALLPSIRPRYYSISSSPRVDEKQASITVSVVSGPAWSGYGEYKGIASNYLAELQEGDTITCFISTPQSEFTLPKDPETPLIMVGPGTGVAPFRGFVQARKQLKEQGQSLGEAHLYFGCRSPHEDYLYQEELENAQSEGIITLHTAFSRMPNQPKTYVQHVMEQDGKKLIELLDQGAHFYICGDGSQMAPAVEATLMKSYADVHQVSEADARLWLQQLEEKGRYAKDVWAG

SEQ ID NO: 397 - DNA, 3147 bp, synthetic construct
  misc_feature 1..3147: note = variant of P450 oxidase from Bacillus megaterium
  source 1..3147: mol_type = other DNA
atgacaattaaggaaatgcctcagcctaagacgtttggagaacttaaaaatttaccgttattaaacacagataaaccggttcaagctttgatgcgtattgcggatgaattaggagaaatctttaaattcgaggcgcctggtagcgtaacgcgctatttatcaagtcagcgtctaattaaagaagcatgcgatgaatcacgctttgataaaaacttaagtcaagcgcttaaatttgcacgtgattttgttggagacgggttatctactagctggacgcatgaaccgaattggaaaaaagcgcataatatcttagttccaagctttagtcagcatgcaatggggcgttatcatgcgatgatggtcgatatcgccgtgcagcttgttcaaaagtgggagcgtctaaatgcagatgagcatattgaagtatcggaagacatgacacgtttaacgcttgatacaattggtctttgcggctttaactatcgctttaacagcttttaccgagatcagcctcatccatttattgtgagtgtggttcgtgcactggatgaagtaatgaacaagctgcagcgagcaaatccagacgacccagcttatgatgaaaacaagcgccagtgtcaagaagatatcaaggtgatgaacgactatgtagataaaattattgcagatcgcaaagcaaggggtgaacaaagtcatgatttattaacgcagatgctaaacggaaaagatccagaaacgggtgagccgcttgatgacgggaacattcgtcagcaaattattacattcttaattgcgggacaccaaacaacaagtggtcttttatcatttgcgctgtatttcttagtgaaaaatccacatgtattacaaaaagtagcagaagaagcagcacgagttctagtagatcctgttccaagctacaaacaagtcaaacagcttaaatatgttggcatggtcttaaacgaagcgctgcgcttatggccagtagcgcctatgttttccctatatgcaaaagaagatacggtgcttggaggagaatatcctttaacgaaaggcgacgaagtaatggttctggtgcctcagcttcaccgtgataaaacaatttggggagacgatgtggaggagttccgtccagagcgttttgaaaatccaagtgcgattccgcagcatgcgtttaaaccgtttggaaacggtcagcgtgcgtgtatcggtcagcagttcgctcttcatgaagcaacgctggtacttggtatgatgctaaaacactttgactttgaagatcatacaaactacgagctcgttattaaagaatcgcggacgttaaaacctgaaggctttgtggtaaaagcaaaatcgaaaggcattccgcttggcggtattccttcacctagcactgaacagtctgctaaaaaagtacgcaaaaaggcagaaaacgctcataatacgccgctgcttgtgctatacggttcaaatgcgggaacagctgaaggaacggcgcgtgatttagcagatattgcaatgagcaaaggatttgcaccgcaggtcgcaacgcttgattcacacgccggtaatcttccgcgcgaaggagctgtattaattgtaacggcgtcttataacggtcatccgcctgataacgcaaagcaatttgtcgactggttagaccaagcgtctgctgatgaagtaaaaggcgttcgctactccgtatttggatgcggcgataaaaattgggcggggacgtatcaaaaagtgcctgcttttatcgatgaaacgcttgccgctaaaggggcagaaaacatcgctgaccgcggtgaagcagatgcaagcgacgactttgaaggcacatatgaagaatggcgtgatcatatgtggagtgacgtagcagcctactttaacctcgacattgaaaacagtgaagataataaatctactctttcacttcaatttgtcgacagcgccgcggatatgccgcttgcgaaaatgcacggtgcgttttcaacgaacgtcgtagcaagcaaagaacttcaacagccaggcagtgcacgaagcacgcgacatcttgaaattgaacttccaaaagaagcttcttatcaagaaggagatcatttaggtgttattcctcgcaactatgaaggaatagtaaaccgtgtaacagcaaggttcggcctaagcgcatcacagctgatccgtctggaagcagaagaagaaaaattagctcatttgccactcgctaaaacagtatccgtagaagagcttctgcaatacgtggagcttcaagatcctgttacgcgcacgcagcttcgcgcaatggctgctaaaacggtctgcccgccgcataaagtagagcttgaagccttgcttgaaaagcaagcctacaaagaacaagtgctggcaaaacgtttaacaatgcttgaactgcttgaaaaatacccggcgtgtgaaatgaaattcagcgaatttatcgcccttctgccaagcatacgcccgcgctattactcgatttcttcatcacctcgtgtcgatgaaaaacaagcaagcatcacggtcagcgttgtctcaggaccggcgtggagcggatatggagaatataaaggaattgcgtcgaactatcttgccgagctgcaagaaggagatacgattacgtgctttatttccacaccgcagtcagaatttacgctgccaaaagaccctgaaacgccgcttatcatggtcggaccgggaacaggcgtcgcgccgtttagaggctttgtgcaggcgcgcaaacagctaaaagaacaaggacagtcacttggagaagcacatttatacttcggctgccgttcacctcatgaagactatctgtatcaagaagagcttgaaaacgcccaaagcgaaggcatcattacgcttcataccgctttttctcgcatgccaaatcagccgaaaacatacgttcagcacgtaatggaacaagacggcaagaaattgattgaacttcttgatcaaggagcgcacttctatatttgcggagacggaagccaaatggcacctgccgttgaagcaacgcttatgaaaagctatgctgacgttcaccaagtgagtgaagcagacgctcgcttatggctgcagcagctagaagaaaaaggccgatacgcaaaagacgtgtgggcaggg

SEQ ID NO: 398 - protein, 1049 aa, synthetic construct
  REGION 1..1049: note = variant of P450 oxidase from Bacillus megaterium
MTIKEMPQPKTFGELKNLPLLNTDKPVQALMRIADELGEIFKFEAPGSVTRYLSSQRLIKEACDESRFDKNLSQALKFARDFVGDGLSTSWTHEPNWKKAHNILVPSFSQHAMGRYHAMMVDIAVQLVQKWERLNADEHIEVSEDMTRLTLDTIGLCGFNYRFNSFYRDQPHPFIVSVVRALDEVMNKLQRANPDDPAYDENKRQCQEDIKVMNDYVDKIIADRKARGEQSHDLLTQMLNGKDPETGEPLDDGNIRQQIITFLIAGHQTTSGLLSFALYFLVKNPHVLQKVAEEAARVLVDPVPSYKQVKQLKYVGMVLNEALRLWPVAPMFSLYAKEDTVLGGEYPLTKGDEVMVLVPQLHRDKTIWGDDVEEFRPERFENPSAIPQHAFKPFGNGQRACIGQQFALHEATLVLGMMLKHFDFEDHTNYELVIKESRTLKPEGFVVKAKSKGIPLGGIPSPSTEQSAKKVRKKAENAHNTPLLVLYGSNAGTAEGTARDLADIAMSKGFAPQVATLDSHAGNLPREGAVLIVTASYNGHPPDNAKQFVDWLDQASADEVKGVRYSVFGCGDKNWAGTYQKVPAFIDETLAAKGAENIADRGEADASDDFEGTYEEWRDHMWSDVAAYFNLDIENSEDNKSTLSLQFVDSAADMPLAKMHGAFSTNVVASKELQQPGSARSTRHLEIELPKEASYQEGDHLGVIPRNYEGIVNRVTARFGLSASQLIRLEAEEEKLAHLPLAKTVSVEELLQYVELQDPVTRTQLRAMAAKTVCPPHKVELEALLEKQAYKEQVLAKRLTMLELLEKYPACEMKFSEFIALLPSIRPRYYSISSSPRVDEKQASITVSVVSGPAWSGYGEYKGIASNYLAELQEGDTITCFISTPQSEFTLPKDPETPLIMVGPGTGVAPFRGFVQARKQLKEQGQSLGEAHLYFGCRSPHEDYLYQEELENAQSEGIITLHTAFSRMPNQPKTYVQHVMEQDGKKLIELLDQGAHFYICGDGSQMAPAVEATLMKSYADVHQVSEADARLWLQQLEEKGRYAKDVWAG

SEQ ID NO: 399 - DNA, 3147 bp, synthetic construct
  misc_feature 1..3147: note = variant of P450 oxidase from Bacillus megaterium
  source 1..3147: mol_type = other DNA
atgacaattaaggaaatgcctcagcctaagacgtttggagaacttaaaaatttaccgttattaaacacagataaaccggttcaagctttgatgcgtattgcggatgaattaggagaaatctttaaattcgaggcgcctggtagcgtaacgcgctatttatcaagtcagcgtctaattaaagaagcatgcgatgaatcacgctttgataaaaacttaagtcaagcgcttaaatttgcacgtgattttgttggagacgggttatctacaagctggacgcatgaaccgaattggaaaaaagcgcataatatcttagttccaagctttagtcagcatgcaatggggcgttatcatgcgatgatggtcgatatcgccgtgcagcttgttcaaaagtgggagcgtctaaatgcagatgagcatattgaagtatcggaagacatgacacgtttaacgcttgatacaattggtctttgcggctttaactatcgctttaacagcttttaccgagatcagcctcatccatttattgtgagtgtggttcgtgcactggatgaagtaatgaacaagctgcagcgagcaaatccagacgacccagcttatgatgaaaacaagcgccagtgtcaagaagatatcaaggtgatgaacgactatgtagataaaattattgcagatcgcaaagcaaggggtgaacaaagtcatgatttattaacgcagatgctaaacggaaaagatccagaaacgggtgagccgcttgatgacgggaacattcgtcagcaaattattacattcttaattgcgggacaccaaacaacaagtggtcttttatcatttgcgctgtatttcttagtgaaaaatccacatgtattacaaaaagtagcagaagaagcagcacgagttctagtagatcctgttccaagctacaaacaagtcaaacagcttaaatatgttggcatggtcttaaacgaagcgctgcgcttatggccagtagcgcctatgttttccctatatgcaaaagaagatacggtgcttggaggagaatatcctttaacgaaaggcgacgaagtaatggttctggtgcctcagcttcaccgtgataaaacaatttggggagacgatgtggaggagttccgtccagagcgttttgaaaatccaagtgcgattccgcagcatgcgtttaaaccgtttggaaacggtcagcgtgcgtgtatcggtcagcagttcgctcttcatgaagcaacgctggtacttggtatgatgctaaaacactttgactttgaagatcatacaaactacgagctcgttattaaagaatcgcggacgttaaaacctgaaggctttgtggtaaaagcaaaatcgaaaggcattccgcttggcggtattccttcacctagcactgaacagtctgctaaaaaagtacgcaaaaaggcagaaaacgctcataatacgccgctgcttgtgctatacggttcaaatgcgggaacagctgaaggaacggcgcgtgatttagcagatattgcaatgagcaaaggatttgcaccgcaggtcgcaacgcttgattcacacgcccgtaatcttccgcgcgaaggagctgtattaattgtaacggcgtcttataacggtcatccgcctgataacgcaaagcaatttgtcgactggttagaccaagcgtctgctgatgaagtaaaaggcgttcgctactccgtatttggatgcggcgataaaaattgggcggggacgtatcaaaaagtgcctgcttttatcgatgaaacgcttgccgctaaaggggcagaaaacatcgctgaccgcggtgaagcagatgcaagcgacgactttgaaggcacatatgaagaatggcgtgatcatatgtggagtgacgtagcagcctactttaacctcgacattgaaaacagtgaagataataaatctactctttcacttcaatttgtcgacagcgccgcggatatgccgcttgcgaaaatgcacggtgcgttttcaacgaacgtcgtagcaagcaaagaacttcaacagccaggcagtgcacgaagcacgcgacatcttgaaattgaacttccaaaagaagcttcttatcaagaaggagatcatttaggtgttattcctcgcaactatgaaggaatagtaaaccgtgtaacagcaaggttcggcctaagcgcatcacagctgatccgtctggaagcagaagaagaaaaattagctcatttgccactcgctaaaacagtatccgtagaagagcttctgcaatacgtggagcttcaagatcctgttacgcgcacgcagcttcgcgcaatggctgctaaaacggtctgcccgccgcataaagtagagcttgaagccttgcttgaaaagcaagcctacaaagaacaagtgctggcaaaacgtttaacaatgcttgaactgcttgaaaaatacccggcgtgtgaaatgaaattcagcgaatttatcgcccttctgccaagcatacgcccgcgctattactcgatttcttcatcacctcgtgtcgatgaaaaacaagcaagcatcacggtcagcgttgtctcaggaccggcgtggagcggatatggagaatataaaggaattgcgtcgaactatcttgccgagctgcaagaaggagatacgattacgtgctttatttccacaccgcagtcagaatttacgctgccaaaagaccctgaaacgccgcttatcatggtcggaccgggaacaggcgtcgcgccgtttagaggctttgtgcaggcgcgcaaacagctaaaagaacaaggacagtcacttggagaagcacatttatacttcggctgccgttcacctcatgaagactatctgtatcaagaagagcttgaaaacgcccaaagcgaaggcatcattacgcttcataccgctttttctcgcatgccaaatcagccgaaaacatacgttcagcacgtaatggaacaagacggcaagaaattgattgaacttcttgatcaaggagcgcacttctatatttgcggagacggaagccaaatggcacctgccgttgaagcaacgcttatgaaaagctatgctgacgttcaccaagtgagtgaagcagacgctcgcttatggctgcagcagctagaagaaaaaggccgatacgcaaaagacgtgtggctgggg

SEQ ID NO: 400 - protein, 1049 aa, synthetic construct
  REGION 1..1049: note = variant of P450 oxidase from Bacillus megaterium
MTIKEMPQPKTFGELKNLPLLNTDKPVQALMRIADELGEIFKFEAPGSVTRYLSSQRLIKEACDESRFDKNLSQALKFARDFVGDGLSTSWTHEPNWKKAHNILVPSFSQHAMGRYHAMMVDIAVQLVQKWERLNADEHIEVSEDMTRLTLDTIGLCGFNYRFNSFYRDQPHPFIVSVVRALDEVMNKLQRANPDDPAYDENKRQCQEDIKVMNDYVDKIIADRKARGEQSHDLLTQMLNGKDPETGEPLDDGNIRQQIITFLIAGHQTTSGLLSFALYFLVKNPHVLQKVAEEAARVLVDPVPSYKQVKQLKYVGMVLNEALRLWPVAPMFSLYAKEDTVLGGEYPLTKGDEVMVLVPQLHRDKTIWGDDVEEFRPERFENPSAIPQHAFKPFGNGQRACIGQQFALHEATLVLGMMLKHFDFEDHTNYELVIKESRTLKPEGFVVKAKSKGIPLGGIPSPSTEQSAKKVRKKAENAHNTPLLVLYGSNAGTAEGTARDLADIAMSKGFAPQVATLDSHARNLPREGAVLIVTASYNGHPPDNAKQFVDWLDQASADEVKGVRYSVFGCGDKNWAGTYQKVPAFIDETLAAKGAENIADRGEADASDDFEGTYEEWRDHMWSDVAAYFNLDIENSEDNKSTLSLQFVDSAADMPLAKMHGAFSTNVVASKELQQPGSARSTRHLEIELPKEASYQEGDHLGVIPRNYEGIVNRVTARFGLSASQLIRLEAEEEKLAHLPLAKTVSVEELLQYVELQDPVTRTQLRAMAAKTVCPPHKVELEALLEKQAYKEQVLAKRLTMLELLEKYPACEMKFSEFIALLPSIRPRYYSISSSPRVDEKQASITVSVVSGPAWSGYGEYKGIASNYLAELQEGDTITCFISTPQSEFTLPKDPETPLIMVGPGTGVAPFRGFVQARKQLKEQGQSLGEAHLYFGCRSPHEDYLYQEELENAQSEGIITLHTAFSRMPNQPKTYVQHVMEQDGKKLIELLDQGAHFYICGDGSQMAPAVEATLMKSYADVHQVSEADARLWLQQLEEKGRYAKDVWLG

SEQ ID NO: 401 - DNA, 3147 bp, synthetic construct
  misc_feature 1..3147: note = variant of P450 oxidase from Bacillus megaterium
  source 1..3147: mol_type = other DNA
atgacaattaaggaaatgcctcagcctaagacgtttggagaacttaaaaatttaccgttattaaacacagataaaccggttcaagctttgatgcgtattgcggatgaattaggagaaatctttaaattcgaggcgcctggtagcgtaacgcgctatttatcaagtcagcgtctaattaaagaagcatgcgatgaatcacgctttgataaaaacttaagtcaagcgcttaaatttgcacgtgattttgttggagacgggttatctacaagctggacgcatgaaccgaattggaaaaaagcgcataatatcttagttccaagctttagtcagcatgcaatggggcgttatcatgcgatgatggtcgatatcgccgtgcagcttgttcaaaagtgggagcgtctaaatgcagatgagcatattgaagtatcggaagacatgacacgtttaacgcttgatacaattggtctttgcggctttaactatcgctttaacagcttttaccgagatcagcctcatccatttattgtgagtgtggttcgtgcactggatgaagtaatgaacaagctgcagcgagcaaatccagacgacccagcttatgatgaaaacaagcgccagtgtcaagaagatatcaaggtgatgaacgactatgtagataaaattattgcagatcgcaaagcaaggggtgaacaaagtcatgatttattaacgcagatgctaaacggaaaagatccagaaacgggtgagccgcttgatgacgggaacattcgtcagcaaattattacattcttaattgcgggacaccaaccaacaagtggtcttttatcatttgcgctgtatttcttagtgaaaaatccacatgtattacaaaaagtagcagaagaagcagcacgagttctagtagatcctgttccaagctacaaacaagtcaaacagcttaaatatgttggcatggtcttaaacgaagcgctgcgcttatggccagtagcgcctatgttttccctatatgcaaaagaagatacggtgcttggaggagaatatcctttaacgaaaggcgacgaagtaatggttctggtgcctcagcttcaccgtgataaaacaatttggggagacgatgtggaggagttccgtccagagcgttttgaaaatccaagtgcgattccgcagcatgcgtttaaaccgtttggaaacggtcagcgtgcgtgtatcggtcagcagttcgctcttcatgaagcaacgctggtacttggtatgatgctaaaacactttgactttgaagatcatacaaactacgagctcgttattaaagaatcgcggacgttaaaacctgaaggctttgtggtaaaagcaaaatcgaaaggcattccgcttggcggtattccttcacctagcactgaacagtctgctaaaaaagtacgcaaaaaggcagaaaacgctcataatacgccgctgcttgtgctatacggttcaaatgcgggaacagctgaaggaacggcgcgtgatttagcagatattgcaatgagcaaaggatttgcaccgcaggtcgcaacgcttgattcacacgccggtaatcttccgcgcgaaggagctgtattaattgtaacggcgtcttataacggtcatccgcctgataacgcaaagcaatttgtcgactggttagaccaagcgtctgctgatgaagtaaaaggcgttcgctactccgtatttggatgcggcgataaaaattgggcggggacgtatcaaaaagtgcctgcttttatcgatgaaacgcttgccgctaaaggggcagaaaacatcgctgaccgcggtgaagcagatgcaagcgacgactttgaaggcacatatgaagaatggcgtgatcatatgtggagtgacgtagcagcctactttaacctcgacattgaaaacagtgaagataataaatctactctttcacttcaatttgtcgacagcgccgcggatatgccgcttgcgaaaatgcacggtgcgttttcaacgaacgtcgtagcaagcaaagaacttcaacagccaggcagtgcacgaagcacgcgacatcttgaaattgaacttccaaaagaagcttcttatcaagaaggagatcatttaggtgttattcctcgctattatgaaggaatagtaaaccgtgtaacagcaaggttcggcctaagcgcatcacagcaaatccgtctggaagcagaagaagaaaaattagctcatttgccactcgctaaaacagtatccgtagaagagcttctgcaatacgtggagcttcaagatcctgttacgcgcacgcagcttcgcgcaatggctgctaaaacggtctgcccgccgcataaagtagagcttgaagccttgcttgaaaagcaagcctacaaagaacaagtgctggcaaaacgtttaacaatgcttgaactgcttgaaaaatacccggcgtgtgaaatgaaattcagcgaatttatcgcccttctgccaagcatacgcccgcgctattactcgatttcttcatcacctcgtgtcgatgaaaaacaagcaagcatcacggtcagcgttgtctcaggaccggcgtggagcggatatggagaatataaaggaattgcgtcgaactatcttgccgagctgcaagaaggagatacgattacgtgctttatttccacaccgcagtcagaatttacgctgccaaaagaccctgaaacgccgcttatcatggtcggaccgggaacaggcgtcgcgccgtttagaggctttgtgcaggcgcgcaaacagctaaaagaacaaggacagtcacttggagaagcacatttatacttcggctgccgttcacctcatgaagactatctgtatcaagaagagcttgaaaacgcccaaagcgaaggcatcattacgcttcataccgctttttctcgcatgccaaatcagccgaaaacatacgttcagcacgtaatggaacaagacggcaagaaattgattgaacttcttgatcaaggagcgcacttctatatttgcggagacggaagccaaatggcacctgccgttgaagcaacgcttatgaaaagctatgctgacgttcaccaagtgagtgaagcagacgctcgcttatggctgcagcagctagaagaaaaaggccgatacgcaaaagacgtgtgggcaggg

SEQ ID NO: 402 - protein, 1049 aa, synthetic construct
  REGION 1..1049: note = variant of P450 oxidase from Bacillus megaterium
MTIKEMPQPKTFGELKNLPLLNTDKPVQALMRIADELGEIFKFEAPGSVTRYLSSQRLIKEACDESRFDKNLSQALKFARDFVGDGLSTSWTHEPNWKKAHNILVPSFSQHAMGRYHAMMVDIAVQLVQKWERLNADEHIEVSEDMTRLTLDTIGLCGFNYRFNSFYRDQPHPFIVSVVRALDEVMNKLQRANPDDPAYDENKRQCQEDIKVMNDYVDKIIADRKARGEQSHDLLTQMLNGKDPETGEPLDDGNIRQQIITFLIAGHQPTSGLLSFALYFLVKNPHVLQKVAEEAARVLVDPVPSYKQVKQLKYVGMVLNEALRLWPVAPMFSLYAKEDTVLGGEYPLTKGDEVMVLVPQLHRDKTIWGDDVEEFRPERFENPSAIPQHAFKPFGNGQRACIGQQFALHEATLVLGMMLKHFDFEDHTNYELVIKESRTLKPEGFVVKAKSKGIPLGGIPSPSTEQSAKKVRKKAENAHNTPLLVLYGSNAGTAEGTARDLADIAMSKGFAPQVATLDSHAGNLPREGAVLIVTASYNGHPPDNAKQFVDWLDQASADEVKGVRYSVFGCGDKNWAGTYQKVPAFIDETLAAKGAENIADRGEADASDDFEGTYEEWRDHMWSDVAAYFNLDIENSEDNKSTLSLQFVDSAADMPLAKMHGAFSTNVVASKELQQPGSARSTRHLEIELPKEASYQEGDHLGVIPRYYEGIVNRVTARFGLSASQQIRLEAEEEKLAHLPLAKTVSVEELLQYVELQDPVTRTQLRAMAAKTVCPPHKVELEALLEKQAYKEQVLAKRLTMLELLEKYPACEMKFSEFIALLPSIRPRYYSISSSPRVDEKQASITVSVVSGPAWSGYGEYKGIASNYLAELQEGDTITCFISTPQSEFTLPKDPETPLIMVGPGTGVAPFRGFVQARKQLKEQGQSLGEAHLYFGCRSPHEDYLYQEELENAQSEGIITLHTAFSRMPNQPKTYVQHVMEQDGKKLIELLDQGAHFYICGDGSQMAPAVEATLMKSYADVHQVSEADARLWLQQLEEKGRYAKDVWAG

SEQ ID NO: 403 - DNA, 3147 bp, synthetic construct
  misc_feature 1..3147: note = variant of P450 oxidase from Bacillus megaterium
  source 1..3147: mol_type = other DNA
atgacaattaaggaaatgcctcagcctaagacgtttggagaacttaaaaatttaccgttattaaacacagataaaccggttcaagctttgatgcgtattgcggatgaattaggagaaatctttaaattcgaggcgcctggtagcgtaacgcgctatttatcaagtcagcgtctaattaaagaagcatgcgatgaatcacgctttgataaaaacttaagtcaatcgcttaaatttgcacgtgattttgttggagacgggttatcgacaagctggacgcatgaaccgaattggaaaaaagcgcataatatcttagttccaagctttagtcagcatgcaatggggcgttatcatgcgatgatggtcgatatcgccgtgcagcttgttcaaaagtgggagcgtctaaatgcagatgagcatattgaagtatcggaagacatgacacgtttaacgcttgatacaattggtctttgcggctttaactatcgctttaacagcttttaccgagatcagcctcatccatttattgtgagtgtggttcgtgcactggatgaagtaatgaacaagctgcagcgagcaaatccagacgacccagcttatgatgaaaacaagcgccagtgtcaagaagatatcaaggtgatgaacgactatgtagataaaattattgcagatcgcaaagcaaggggtgaacaaagtcatgatttattaacgcagatgctaaacggaaaagatccagaaacgggtgagccgcttgatgacgggaacattcgtcagcaaattattacattcttaattgcgggacaccaaccaacaagtggtcttttatcatttgcgctgtatttcttagtgaaaaatccacatgtattacaaaaagtagcagaagaagcagcacgagttctagtagatcctgttccaagctacaaacaagtcaaacagcttaaatatgttggcatggtcttaaacgaagcgctgcgcttatggccagtagcgcctatgttttccctatatgcaaaagaagatacggtgcttggaggagaatatcctttaacgaaaggcgacgaagtaatggttctggtgcctcagcttcaccgtgataaaacaatttggggagacgatgtggaggagttccgtccagagcgttttgaaaatccaagtgcgattccgcagcatgcgtttaaaccgtttggaaacggtcagcgtgcgtgtatcggtcagcagttcgctcttcatgaagcaacgctggtacttggtatgatgctaaaacactttgactttgaagatcatacaaactacgagctcgttattaaagaatcgcggacgttaaaacctgaaggctttgtggtaaaagcaaaatcgaaaggcattccgcttggcggtattccttcacctagcactgaacagtctgctaaaaaagtacgcaaaaaggcagaaaacgctcataatacgccgctgcttgtgctatacggttcaaatgcgggaacagctgaaggaacggcgcgtgatttagcagatattgcaatgagcaaaggatttgcaccgcaggtcgcaacgcttgattcacacgcccgtaatcttccgcgcgaaggagctgtattaattgtaacggcgtcttataacggtcatccgcctgataacgcaaagcaatttgtcgactggttagaccaagcgtctgctgatgaagtaaaaggcgttcgctactccgtatttggatgcggcgataaaaattgggcggggacgtatcaaaaagtgcctgcttttatcgatgaaacgcttgccgctaaaggggcagaaaacatcgctgaccgcggtgaagcagatgcaagcgacgactttgaaggcacatatgaagaatggcgtgatcatatgtggagtgacgtagcagcctactttaacctcgacattgaaaacagtgaagataataaatctactctttcacttcaatttgtcgacagcgccgcggatatgccgcttgcgaaaatgcacggtgcgttttcaacgaacgtcgtagcaagcaaagaacttcaacagccaggcagtgcacgaagcacgcgacatcttgaaattgaacttccaaaagaagcttcttatcaagaaggagatcatttaggtgttattcctcgctattatgaaggaatagtaaaccgtgtaacagcaaggttcggcctaagcgcatcacagcaaatccgtctggaagcagaagaagaaaaattagctcatttgccactcgctaaaacagtatccgtagaagagcttctgcaatacgtggagcttcaagatcctgttacgcgcacgcagcttcgcgcaatggctgctaaaacggtctgcccgccgcataaagtagagcttgaagccttgcttgaaaagcaagcctacaaagaacaagtgctggcaaaacgtttaacaatgcttgaactgcttgaaaaatacccggcgtgtgaaatgaaattcagcgaatttatcgcccttctgccaagcatacgcccgcgctattactcgatttcttcatcacctcgtgtcgatgaaaaacaagcaagcatcacggtcagcgttgtctcaggaccggcgtggagcggatatggagaatataaaggaattgcgtcgaactatcttgccgagctgcaagaaggagatacgattacgtgctttatttccacaccgcagtcagaatttacgctgccaaaagaccctgaaacgccgcttatcatggtcggaccgggaacaggcgtcgcgccgtttagaggctttgtgcaggcgcgcaaacagctaaaagaacaaggacagtcacttggagaagcacatttatacttcggctgccgttcacctcatgaagactatctgtatcaagaagagcttgaaaacgcccaaagcgaaggcatcattacgcttcataccgctttttctcgcatgccaaatcagccgaaaacatacgttcagcacgtaatggaacaagacggcaagaaattgattgaacttcttgatcaaggagcgcacttctatatttgcggagacggaagccaaatggcacctgccgttgaagcaacgcttatgaaaagctatgctgacgttcaccaagtgagtgaagcagacgctcgcttatggctgcagcagctagaagaaaaaggccgatacgcaaaagacgtgtgggcaggg

SEQ ID NO: 404 - protein, 1049 aa, synthetic construct
  REGION 1..1049: note = variant of P450 oxidase from Bacillus megaterium
MTIKEMPQPKTFGELKNLPLLNTDKPVQALMRIADELGEIFKFEAPGSVTRYLSSQRLIKEACDESRFDKNLSQSLKFARDFVGDGLSTSWTHEPNWKKAHNILVPSFSQHAMGRYHAMMVDIAVQLVQKWERLNADEHIEVSEDMTRLTLDTIGLCGFNYRFNSFYRDQPHPFIVSVVRALDEVMNKLQRANPDDPAYDENKRQCQEDIKVMNDYVDKIIADRKARGEQSHDLLTQMLNGKDPETGEPLDDGNIRQQIITFLIAGHQPTSGLLSFALYFLVKNPHVLQKVAEEAARVLVDPVPSYKQVKQLKYVGMVLNEALRLWPVAPMFSLYAKEDTVLGGEYPLTKGDEVMVLVPQLHRDKTIWGDDVEEFRPERFENPSAIPQHAFKPFGNGQRACIGQQFALHEATLVLGMMLKHFDFEDHTNYELVIKESRTLKPEGFVVKAKSKGIPLGGIPSPSTEQSAKKVRKKAENAHNTPLLVLYGSNAGTAEGTARDLADIAMSKGFAPQVATLDSHARNLPREGAVLIVTASYNGHPPDNAKQFVDWLDQASADEVKGVRYSVFGCGDKNWAGTYQKVPAFIDETLAAKGAENIADRGEADASDDFEGTYEEWRDHMWSDVAAYFNLDIENSEDNKSTLSLQFVDSAADMPLAKMHGAFSTNVVASKELQQPGSARSTRHLEIELPKEASYQEGDHLGVIPRYYEGIVNRVTARFGLSASQQIRLEAEEEKLAHLPLAKTVSVEELLQYVELQDPVTRTQLRAMAAKTVCPPHKVELEALLEKQAYKEQVLAKRLTMLELLEKYPACEMKFSEFIALLPSIRPRYYSISSSPRVDEKQASITVSVVSGPAWSGYGEYKGIASNYLAELQEGDTITCFISTPQSEFTLPKDPETPLIMVGPGTGVAPFRGFVQARKQLKEQGQSLGEAHLYFGCRSPHEDYLYQEELENAQSEGIITLHTAFSRMPNQPKTYVQHVMEQDGKKLIELLDQGAHFYICGDGSQMAPAVEATLMKSYADVHQVSEADARLWLQQLEEKGRYAKDVWAG

SEQ ID NO: 405 - DNA, 3147 bp, synthetic construct
  misc_feature 1..3147: note = variant of P450 oxidase from Bacillus megaterium
  source 1..3147: mol_type = other DNA
atgacaattaaggaaatgcctcagcctaagacgtttggagaacttaaaaatttaccgttattaaacacagataaaccggttcaagctttgatgcgtattgcggatgaattaggagaaatctttaaattcgaggcgcctggtagcgtaacgcgctatttatcaagtcagcgtctaattaaagaagcatgcgatgaatcacgctttgataaaaacttaagtcaagcgcttaaatttgcacgtgattttgttggagacgggctgtctacaagctggacgcatgaaccgaattggaaaaaagcgcataatatcttagttccaagctttagtcagcatgcaatggggcgttatcatgcgatgatggtcgatatcgccgtgcagcttgttcaaaagtgggagcgtctaaatgcagatgagcatattgaagtatcggaagacatgacacgtttaacgcttgatacaattggtctttgcggctttaactatcgctttaacagcttttaccgagatcagcctcatccatttattgtgagtgtggttcgtgcactggatgaagtaatgaacaagctgcagcgagcaaatccagacgacccagcttatgatgaaaacaagcgccagtgtcaagaagatatcaaggtgatgaacgactatgtagataaaattattgcagatcgcaaagcaaggggtgaacaaagtcatgatttattaacgcagatgctaaacggaaaagatccagaaacgggtgagccgcttgatgacgggaacattcgtcagcaaattattacattcttaattgcgggacaccaaacaacaagtggtcttttatcatttgcgctgtatttcttagtgaaaaatccacatgtattacaaaaagtagcagaagaagcagcacgagttctagtagatcctgttccaagctacaaacaagtcaaacagcttaaatatgttggcatggtcttaaacgaagcgctgcgcttatggccagtagcgcctatgttttccctatatgcaaaagaagatacggtgcttggaggagaatatcctttaacgaaaggcgacgaagtaatggttctggtgcctcagcttcaccgtgataaaacaatttggggagacgatgtggaggagttccgtccagagcgttttgaaaatccaagtgcgattccgcagcatgcgtttaaaccgtttggaaacggtcagcgtgcgtgtatcggtcagcagttcgctcttcatgaagcaacgctggtacttggtatgatgctaaaacactttgactttgaagatcatacaaactacgagctcgttattaaagaatcgcggacgttaaaacctgaaggctttgtggtaaaagcaaaatcgaaaggcattccgcttggcggtattccttcacctagcactgaacagtctgctaaaaaagtacgcaaaaaggcagaaaacgctcataatacgccgctgcttgtgctatacggttcaaatgcgggaacagctgaaggaacggcgcgtgatttagcagatattgcaatgagcaaaggatttgcaccgcaggtcgcaacgcttgattcacacgccggtaatcttccgcgcgaaggagctgtattaattgtaacggcgtcttataacggtcatccgcctgataacgcaaagcaatttgtcgactggttagaccaagcgtctgctgatgaagtaaaaggcgttcgctactccgtatttggatgcggcgataaaaattgggcggggacgtatcaaaaagtgcctgcttttatcgatgaaacgcttgccgctaaaggggcagaaaacatcgctgaccgcggtgaagcagatgcaagcgacgactttgaaggcacatatgaagaatggcgtgatcatatgtggagtgacgtagcagcctactttaacctcgacattgaaaacagtgaagataataaatctactctttcacttcaatttgtcgacagcgccgcggatatgccgcttgcgaaaatgcacggtgcgttttcaacgaacgtcgtagcaagcaaagaacttcaacagccaggcagtgcacgaagcacgcgacatcttgaaattgaacttccaaaagaagcttcttatcaagaaggagatcatttaggtgttattcctcgcaactatgaaggaatagtaaaccgtgtaacagcaaggttcggcctaagcgcatcacagcagatccgtctggaagcagaagaagaaaaattagctcatttgccactcgctaaaacagtatccgtagaagagcttctgcaatacgtggagcttcaagatcctgttacgcgcacgcagcttcgcgcaatggctgctaaaacggtctgcccgccgcataaagtagagcttgaagccttgcttgaaaagcaagcctacaaagaacaagtgctggcaaaacgtttaacaatgcttgaactgcttgaaaaatacccggcgtgtgaaatgaaattcagcgaatttatcgcccttctgccaagcatacgcccgcgctattactcgatttcttcatcacctcgtgtcgatgaaaaacaagcaagcatcacggtcagcgttgtctcaggaccggcgtggagcggatatggagaatataaaggaattgcgtcgaactatcttgccgagctgcaagaaggagatacgattacgtgctttatttccacaccgcagtcagaatttacgctgccaaaagaccctgaaacgccgcttatcatggtcggaccgggaacaggcgtcgcgccgtttagaggctttgtgcaggcgcgcaaacagctaaaagaacaaggacagtcacttggagaagcacatttatacttcggctgccgttcacctcatgaagactatctgtatcaagaagagcttgaaaacgcccaaagcgaaggcatcattacgcttcataccgctttttctcgcatgccaaatcagccgaaaacatacgttcagcacgtaatggaacaagacggcaagaaattgattgaacttcttgatcaaggagcgcacttctatatttgcggagacggaagccaaatggcacctgccgttgaagcaacgcttatgaaaagctatgctgacgttcaccaagtgagtgaagcagacgctcgcttatggctgcagcagctagaagaaaaaggccgatacgcaaaagacgtgtgggcaggg

SEQ ID NO: 406 - protein, 1049 aa, synthetic construct
  REGION 1..1049: note = variant of P450 oxidase from Bacillus megaterium
MTIKEMPQPKTFGELKNLPLLNTDKPVQALMRIADELGEIFKFEAPGSVTRYLSSQRLIKEACDESRFDKNLSQALKFARDFVGDGLSTSWTHEPNWKKAHNILVPSFSQHAMGRYHAMMVDIAVQLVQKWERLNADEHIEVSEDMTRLTLDTIGLCGFNYRFNSFYRDQPHPFIVSVVRALDEVMNKLQRANPDDPAYDENKRQCQEDIKVMNDYVDKIIADRKARGEQSHDLLTQMLNGKDPETGEPLDDGNIRQQIITFLIAGHQTTSGLLSFALYFLVKNPHVLQKVAEEAARVLVDPVPSYKQVKQLKYVGMVLNEALRLWPVAPMFSLYAKEDTVLGGEYPLTKGDEVMVLVPQLHRDKTIWGDDVEEFRPERFENPSAIPQHAFKPFGNGQRACIGQQFALHEATLVLGMMLKHFDFEDHTNYELVIKESRTLKPEGFVVKAKSKGIPLGGIPSPSTEQSAKKVRKKAENAHNTPLLVLYGSNAGTAEGTARDLADIAMSKGFAPQVATLDSHAGNLPREGAVLIVTASYNGHPPDNAKQFVDWLDQASADEVKGVRYSVFGCGDKNWAGTYQKVPAFIDETLAAKGAENIADRGEADASDDFEGTYEEWRDHMWSDVAAYFNLDIENSEDNKSTLSLQFVDSAADMPLAKMHGAFSTNVVASKELQQPGSARSTRHLEIELPKEASYQEGDHLGVIPRNYEGIVNRVTARFGLSASQQIRLEAEEEKLAHLPLAKTVSVEELLQYVELQDPVTRTQLRAMAAKTVCPPHKVELEALLEKQAYKEQVLAKRLTMLELLEKYPACEMKFSEFIALLPSIRPRYYSISSSPRVDEKQASITVSVVSGPAWSGYGEYKGIASNYLAELQEGDTITCFISTPQSEFTLPKDPETPLIMVGPGTGVAPFRGFVQARKQLKEQGQSLGEAHLYFGCRSPHEDYLYQEELENAQSEGIITLHTAFSRMPNQPKTYVQHVMEQDGKKLIELLDQGAHFYICGDGSQMAPAVEATLMKSYADVHQVSEADARLWLQQLEEKGRYAKDVWAG

SEQ ID NO: 407 - DNA, 3147 bp, synthetic construct
  misc_feature 1..3147: note = variant of P450 oxidase from Bacillus megaterium
  source 1..3147: mol_type = other DNA
atgacaattaaggaaatgcctcagcctaagacgtttggagaacttaaaaatttaccgttattaaacacagataaaccggttcaagctttgatgcgtattgcggatgaattaggagaaatctttaaattcgaggcgcctggtagcgtaacgcgctatttatcaagtcagcgtctaattaaagaagcatgcgatgaatcacgctttgataaaaacttaagtcaagcgcttaaatttgcacgtgattttgttggagacgggttatctacaagctggacgcatgaaccgaattggaaaaaagcgcataatatcttagttccaagctttagtcagcatgcaatggggcgttatcatgcgatgatggtcgatatcgccgtgcagcttgttcaaaagtgggagcgtctaaatgcagatgagcatattgaagtatcggaagacatgacacgtttaacgcttgatacaattggtctttgcggctttaactatcgctttaacagcttttaccgagatcagcctcatccatttattgtgagtgtggttcgtgcactggatgaagtaatgaacaagctgcagcgagcaaatccagacgacccagcttatgatgaaaacaagcgccagtgtcaagaagatatcaaggtgatgaacgactatgtagataaaattattgcagatcgcaaagcaaggggtgaacaaagtcatgatttattaacgcagatgctaaacggaaaagatccagaaacgggtgagccgcttgatgacgggaacattcgtcagcaaattattacattcttaattgcgggacaccaaccaacaagtggtcttttatcatttgcgctgtatttcttagtgaaaaatccacatgtattacaaaaagtagcagaagaagcagcacgagttctagtagatcctgttccaagctacaaacaagtcaaacagcttaaatatgttggcatggtcttaaacgaagcgctgcgcttatggccagtagcgcctatgttttccctatatgcaaaagaagatacggtgcttggaggagaatatcctttaacgaaaggcgacgaagtaatggttctggtgcctcagcttcaccgtgataaaacaatttggggagacgatgtggaggagttccgtccagagcgttttgaaaatccaagtgcgattccgcagcatgcgtttaaaccgtttggaaacggtcagcgtgcgtgtatcggtcagcagttcgctcttcatgaagcaacgctggtacttggtatgatgctaaaacactttgactttgaagatcatacaaactacgagctcgttattaaagaatcgcggacgttaaaacctgaaggctttgtggtaaaagcaaaatcgaaaggcattccgcttggcggtattccttcacctagcactgaacagtctgctaaaaaagtacgcaaaaaggcagaaaacgctcataatacgccgctgcttgtgctatacggttcaaatgcgggaacagctgaaggaacggcgcgtgatttagcagatattgcaatgagcaaaggatttgcaccgcaggtcgcaacgcttgattcacacgccggtaatcttccgcgcgaaggagctgtattaattgtaacggcgtcttataacggtcatccgcctgataacgcaaagcaatttgtcgactggttagaccaagcgtctgctgatgaagtaaaaggcgttcgctactccgtatttggatgcggcgataaaaattgggcggggacgtatcaaaaagtgcctgcttttatcgatgaaacgcttgccgctaaaggggcagaaaacatcgctgaccgcggtgaagcagatgcaagcgacgactttgaaggcacatatgaagaatggcgtgatcatatgtggagtgacgtagcagcctactttaacctcgacattgaaaacagtgaagataataaatctactctttcacttcaatttgtcgacagcgccgcggatatgccgcttgcgaaaatgcacggtgcgttttcaacgaacgtcgtagcaagcaaagaacttcaacagccaggcagtgcacgaagcacgcgacatcttgaaattgaacttccaaaagaagcttcttatcaagaaggagatcatttaggtgttattcctcgctattatgaaggaatagtaaaccgtgtaacagcaaggttcggcctaagcgcatcacagcaaatccgtctggaagcagaagaagaaaaattagctcatttgccactcgctaaaacagtatccgtagaagagcttctgcaatacgtggagcttcaagatcctgttacgcgcacgcagcttcgcgcaatggctgctaaaacggtctgcccgccgcataaagtagagcttgaagccttgcttgaaaagcaagcctacaaagaacaagtgctggcaaaacgtttaacaatgcttgaactgcttgaaaaatacccggcgtgtgaaatgaaattcagcgaatttatcgcccttctgccaagcatacgcccgcgctattactcgatttcttcatcacctcgtgtcgatgaaaaacaagcaagcatcacggtcagcgttgtctcaggaccggcgtggagcggatatggagaatataaaggaattgcgtcgaactatcttgccgagctgcaagaaggagatacgattacgtgctttatttccacaccgcagtcagaatttacgctgccaaaagaccctgaaacgccgcttatcatggtcggaccgggaacaggcgtcgcgccgtttagaggctttgtgcaggcgcgcaaacagctaaaagaacaaggacagtcacttggagaagcacatttatacttcggctgccgttcacctcatgaagactatctgtatcaagaagagcttgaaaacgcccaaagcgaaggcatcattacgcttcataccgctttttctcgcatgccaaatcagccgaaaacatacgttcagcacgtaatggaacaagacggcaagaaattgattgaacttcttgatcaaggagcgcacttctatatttgcggagacggaagccaaatggcacctgccgttgaagcaacgcttatgaaaagctatgctgacgttcaccaagtgagtgaagcagacgctcgcttatggctgcagcagctagaagaaaaaggccgatacgcaaaagacgtgtggctgggg

SEQ ID NO: 408 - protein, 1049 aa, synthetic construct
  REGION 1..1049: note = variant of P450 oxidase from Bacillus megaterium
MTIKEMPQPKTFGELKNLPLLNTDKPVQALMRIADELGEIFKFEAPGSVTRYLSSQRLIKEACDESRFDKNLSQALKFARDFVGDGLSTSWTHEPNWKKAHNILVPSFSQHAMGRYHAMMVDIAVQLVQKWERLNADEHIEVSEDMTRLTLDTIGLCGFNYRFNSFYRDQPHPFIVSVVRALDEVMNKLQRANPDDPAYDENKRQCQEDIKVMNDYVDKIIADRKARGEQSHDLLTQMLNGKDPETGEPLDDGNIRQQIITFLIAGHQPTSGLLSFALYFLVKNPHVLQKVAEEAARVLVDPVPSYKQVKQLKYVGMVLNEALRLWPVAPMFSLYAKEDTVLGGEYPLTKGDEVMVLVPQLHRDKTIWGDDVEEFRPERFENPSAIPQHAFKPFGNGQRACIGQQFALHEATLVLGMMLKHFDFEDHTNYELVIKESRTLKPEGFVVKAKSKGIPLGGIPSPSTEQSAKKVRKKAENAHNTPLLVLYGSNAGTAEGTARDLADIAMSKGFAPQVATLDSHAGNLPREGAVLIVTASYNGHPPDNAKQFVDWLDQASADEVKGVRYSVFGCGDKNWAGTYQKVPAFIDETLAAKGAENIADRGEADASDDFEGTYEEWRDHMWSDVAAYFNLDIENSEDNKSTLSLQFVDSAADMPLAKMHGAFSTNVVASKELQQPGSARSTRHLEIELPKEASYQEGDHLGVIPRYYEGIVNRVTARFGLSASQQIRLEAEEEKLAHLPLAKTVSVEELLQYVELQDPVTRTQLRAMAAKTVCPPHKVELEALLEKQAYKEQVLAKRLTMLELLEKYPACEMKFSEFIALLPSIRPRYYSISSSPRVDEKQASITVSVVSGPAWSGYGEYKGIASNYLAELQEGDTITCFISTPQSEFTLPKDPETPLIMVGPGTGVAPFRGFVQARKQLKEQGQSLGEAHLYFGCRSPHEDYLYQEELENAQSEGIITLHTAFSRMPNQPKTYVQHVMEQDGKKLIELLDQGAHFYICGDGSQMAPAVEATLMKSYADVHQVSEADARLWLQQLEEKGRYAKDVWLG

SEQ ID NO: 409 - DNA, 3147 bp, synthetic construct
  misc_feature 1..3147: note = variant of P450 oxidase from Bacillus megaterium
  source 1..3147: mol_type = other DNA
atgacaattaaggaaatgcctcagcctaagacgtttggagaacttaaaaatttaccgttattaaacacagataaaccggttcaagctttgatgcgtattgcggatgaattaggagaaatctttaaattcgaggcgcctggtagcgtaacgcgctatttatcaagtcagcgtctaattaaagaagcatgcgatgaatcacgctttgataaaaacttaagtcaagcgcttaaatttgcacgtgattttgttggagacgggctgtctacaagctggacgcatgaaccgaattggaaaaaagcgcataatatcttagttccaagctttagtcagcatgcaatggggcgttatcatgcgatgatggtcgatatcgccgtgcagcttgttcaaaagtgggagcgtctaaatgcagatgagcatattgaagtatcggaagacatgacacgtttaacgcttgatacaattggtctttgcggctttaactatcgctttaacagcttttaccgagatcagcctcatccatttattgtgagtgtggttcgtgcactggatgaagtaatgaacaagctgcagcgagcaaatccagacgacccagcttatgatgaaaacaagcgccagtgtcaagaagatatcaaggtgatgaacgactatgtagataaaattattgcagatcgcaaagcaaggggtgaacaaagtcatgatttattaacgcagatgctaaacggaaaagatccagaaacgggtgagccgcttgatgacgggaacattcgtcagcaaattattacattcttaattgcgggacaccaaacgacaagtggtcttttatcatttgcgctgtatttcttagtgaaaaatccacatgtattacaaaaagtagcagaagaagcagcacgagttctagtagatcctgttccaagctacaaacaagtcaaacagcttaaatatgttggcatggtcttaaacgaagcgctgcgcttatggccagtagcgcctatgttttccctatatgcaaaagaagatacggtgcttggaggagaatatcctttaacgaaaggcgacgaagtaatggttctggtgcctcagcttcaccgtgataaaacaatttggggagacgatgtggaggagttccgtccagagcgttttgaaaatccaagtgcgattccgcagcatgcgtttaaaccgtttggaaacggtcagcgtgcgtgtatcggtcagcagttcgctcttcatgaagcaacgctggtacttggtatgatgctaaaacactttgactttgaagatcatacaaactacgagctcgttattaaagaatcgcggacgttaaaacctgaaggctttgtggtaaaagcaaaatcgaaaggcattccgcttggcggtattccttcacctagcactgaacagtctgctaaaaaagtacgcaaaaaggcagaaaacgctcataatacgccgctgcttgtgctatacggttcaaatgcgggaacagctgaaggaacggcgcgtgatttagcagatattgcaatgagcaaaggatttgcaccgcaggtcgcaacgcttgattcacacgccggtaatcttccgcgcgaaggagctgtattaattgtaacggcgtcttataacggtcatccgcctgataacgcaaagcaatttgtcgactggttagaccaagcgtctgctgatgaagtaaaaggcgttcgctactccgtatttggatgcggcgataaaaattgggcggggacgtatcaaaaagtgcctgcttttatcgatgaaacgcttgccgctaaaggggcagaaaacatcgctgaccgcggtgaagcagatgcaagcgacgactttgaaggcacatatgaagaatggcgtgatcatatgtggagtgacgtagcagcctactttaacctcgacattgaaaacagtgaagataataaatctactctttcacttcaatttgtcgacagcgccgcggatatgccgcttgcgaaaatgcacggtgcgttttcaacgaacgtcgtagcaagcaaagaacttcaacagccaggcagtgcacgaagcacgcgacatcttgaaattgaacttccaaaagaagcttcttatcaagaaggagatcatttaggtgttattcctcgcaactatgaaggaatagtaaaccgtgtaacagcaaggttcggcctaagcgcatcacagcaaatccgtctggaagcagaagaagaaaaattagctcatttgccactcgctaaaacagtatccgtagaagagcttctgcaatacgtggagcttcaagatcctgttacgcgcacgcagcttcgcgcaatggctgctaaaacggtctgcccgccgcataaagtagagcttgaagccttgcttgaaaagcaagcctacaaagaacaagtgctggcaaaacgtttaacaatgcttgaactgcttgaaaaatacccggcgtgtgaaatgaaattcagcgaatttatcgcccttctgccaagcatacgcccgcgctattactcgatttcttcatcacctcgtgtcgatgaaaaacaagcaagcatcacggtcagcgttgtctcaggaccggcgtggagcggatatggagaatataaaggaattgcgtcgaactatcttgccgagctgcaagaaggagatacgattacgtgctttatttccacaccgcagtcagaatttacgctgccaaaagaccctgaaacgccgcttatcatggtcggaccgggaacaggcgtcgcgccgtttagaggctttgtgcaggcgcgcaaacagctaaaagaacaaggacagtcacttggagaagcacatttatacttcggctgccgttcacctcatgaagactatctgtatcaagaagagcttgaaaacgcccaaagcgaaggcatcattacgcttcataccgctttttctcgcatgccaaatcagccgaaaacatacgttcagcacgtaatggaacaagacggcaagaaattgattgaacttcttgatcaaggagcgcacttctatatttgcggagacggaagccaaatggcacctgccgttgaagcaacgcttatgaaaagctatgctgacgttcaccaagtgagtgaagcagacgctcgcttatggctgcagcagctagaagaaaaaggccgatacgcaaaagacgtgtggctgggg

SEQ ID NO: 410 - protein, 1049 aa, synthetic construct
  REGION 1..1049: note = variant of P450 oxidase from Bacillus megaterium
MTIKEMPQPKTFGELKNLPLLNTDKPVQALMRIADELGEIFKFEAPGSVTRYLSSQRLIKEACDESRFDKNLSQALKFARDFVGDGLSTSWTHEPNWKKAHNILVPSFSQHAMGRYHAMMVDIAVQLVQKWERLNADEHIEVSEDMTRLTLDTIGLCGFNYRFNSFYRDQPHPFIVSVVRALDEVMNKLQRANPDDPAYDENKRQCQEDIKVMNDYVDKIIADRKARGEQSHDLLTQMLNGKDPETGEPLDDGNIRQQIITFLIAGHQTTSGLLSFALYFLVKNPHVLQKVAEEAARVLVDPVPSYKQVKQLKYVGMVLNEALRLWPVAPMFSLYAKEDTVLGGEYPLTKGDEVMVLVPQLHRDKTIWGDDVEEFRPERFENPSAIPQHAFKPFGNGQRACIGQQFALHEATLVLGMMLKHFDFEDHTNYELVIKESRTLKPEGFVVKAKSKGIPLGGIPSPSTEQSAKKVRKKAENAHNTPLLVLYGSNAGTAEGTARDLADIAMSKGFAPQVATLDSHAGNLPREGAVLIVTASYNGHPPDNAKQFVDWLDQASADEVKGVRYSVFGCGDKNWAGTYQKVPAFIDETLAAKGAENIADRGEADASDDFEGTYEEWRDHMWSDVAAYFNLDIENSEDNKSTLSLQFVDSAADMPLAKMHGAFSTNVVASKELQQPGSARSTRHLEIELPKEASYQEGDHLGVIPRNYEGIVNRVTARFGLSASQQIRLEAEEEKLAHLPLAKTVSVEELLQYVELQDPVTRTQLRAMAAKTVCPPHKVELEALLEKQAYKEQVLAKRLTMLELLEKYPACEMKFSEFIALLPSIRPRYYSISSSPRVDEKQASITVSVVSGPAWSGYGEYKGIASNYLAELQEGDTITCFISTPQSEFTLPKDPETPLIMVGPGTGVAPFRGFVQARKQLKEQGQSLGEAHLYFGCRSPHEDYLYQEELENAQSEGIITLHTAFSRMPNQPKTYVQHVMEQDGKKLIELLDQGAHFYICGDGSQMAPAVEATLMKSYADVHQVSEADARLWLQQLEEKGRYAKDVWLG

SEQ ID NO: 411 - DNA, 3147 bp, synthetic construct
  misc_feature 1..3147: note = variant of P450 oxidase from Bacillus megaterium
  source 1..3147: mol_type = other DNA
atgacaattaaggaaatgcctcagcctaagacgtttggagaacttaaaaatttaccgttattaaacacagataaaccggttcaagctttgatgcgtattgcggatgaattaggagaaatctttaaattcgaggcgcctggtagcgtaacgcgctatttatcaagtcagcgtctaattaaagaagcatgcgatgaatcacgctttgataaaaacttaagtcaagcgcttaaatttgcacgtgattttgttggagacgggttatctacaagctggacgcatgaaccgaattggaaaaaagcgcataatatcttagttccaagctttagtcagcatgcaatggggcgttatcatgcgatgatggtcgatatcgccgtgcagcttgttcaaaagtgggagcgtctaaatgcagatgagcatattgaagtatcggaagacatgacacgtttaacgcttgatacaattggtctttgcggctttaactatcgctttaacagcttttaccgagatcagcctcatccatttattgtgagtgtggttcgtgcactggatgaagtaatgaacaagctgcagcgagcaaatccagacgacccagcttatgatgaaaacaagcgccagtgtcaagaagatatcaaggtgatgaacgactatgtagataaaattattgcagatcgcaaagcaaggggtgaacaaagtcatgatttattaacgcagatgctaaacggaaaagatccagaaacgggtgagccgcttgatgacgggaacattcgtcagcaaattattacattcttaattgcgggacaccaaacaacaagtggtcttttatcatttgcgctgtatttcttagtgaaaaatccacatgtattacaaaaagtagcagaagaagcagcacgagttctagtagatcctgttccaagctacaaacaagtcaaacagcttaaatatgttggcatggtcttaaacgaagcgctgcgcttatggccagtagcgcctatgttttccctatatgcaaaagaagatacggtgcttggaggagaatatcctttaacgaaaggcgacgaagtaatggttctggtgcctcagcttcaccgtgataaaacaatttggggagacgatgtggaggagttccgtccagagcgttttgaaaatccaagtgcgattccgcagcatgcgtttaaaccgtttggaaacggtcagcgtgcgtgtatcggtcagcagttcgctcttcatgaagcaacgctggtacttggtatgatgctaaaacactttgactttgaagatcatacaaactacgagctcgttattaaagaatcgcggacgttaaaacctgaaggctttgtggtaaaagcaaaatcgaaaggcattccgcttggcggtattccttcacctagcactgaacagtctgctaaaaaagtacgcaaaaaggcagaaaacgctcataatacgccgctgcttgtgctatacggttcaaatgcgggaacagctgaaggaacggcgcgtgatttagcagatattgcaatgagcaaaggatttgcaccgcaggtcgcaacgcttgattcacacgccagaaatcttccgcgcgaaggagctgtattaattgtaacggcgtcttataacggtcatccgcctgataacgcaaagcaatttgtcgactggttagaccaagcgtctgctgatgaagtaaaaggcgttcgctactccgtatttggatgcggcgataaaaattgggcggggacgtatcaaaaagtgcctgcttttatcgatgaaacgcttgccgctaaaggggcagaaaacatcgctgaccgcggtgaagcagatgcaagcgacgactttgaaggcacatatgaagaatggcgtgatcatatgtggagtgacgtagcagcctactttaacctcgacattgaaaacagtgaagataataaatctactctttcacttcaatttgtcgacagcgccgcggatatgccgcttgcgaaaatgcacggtgcgttttcaacgaacgtcgtagcaagcaaagaacttcaacagccaggcagtgcacgaagcacgcgacatcttgaaattgaacttccaaaagaagcttcttatcaagaaggagatcatttaggtgttattcctcgcaactatgaaggaatagtaaaccgtgtaacagcaaggttcggcctaagcgcatcacagcaaatccgtctggaagcagaagaagaaaaattagctcatttgccactcgctaaaacagtatccgtagaagagcttctgcaatacgtggagcttcaagatcctgttacgcgcacgcagcttcgcgcaatggctgctaaaacggtctgcccgccgcataaagtagagcttgaagccttgcttgaaaagcaagcctacaaagaacaagtgctggcaaaacgtttaacaatgcttgaactgcttgaaaaatacccggcgtgtgaaatgaaattcagcgaatttatcgcccttctgccaagcatacgcccgcgctattactcgatttcttcatcacctcgtgtcgatgaaaaacaagcaagcatcacggtcagcgttgtctcaggaccggcgtggagcggatatggagaatataaaggaattgcgtcgaactatcttgccgagctgcaagaaggagatacgattacgtgctttatttccacaccgcagtcagaatttacgctgccaaaagaccctgaaacgccgcttatcatggtcggaccgggaacaggcgtcgcgccgtttagaggctttgtgcaggcgcgcaaacagctaaaagaacaaggacagtcacttggagaagcacatttatacttcggctgccgttcacctcatgaagactatctgtatcaagaagagcttgaaaacgcccaaagcgaaggcatcattacgcttcataccgctttttctcgcatgccaaatcagccgaaaacatacgttcagcacgtaatggaacaagacggcaagaaattgattgaacttcttgatcaaggagcgcacttctatatttgcggagacggaagccaaatggcacctgccgttgaagcaacgcttatgaaaagctatgctgacgttcaccaagtgagtgaagcagacgctcgcttatggctgcagcagctagaacagaaaggccgatacgcaaaagacgtgtgggctggg

SEQ ID NO: 412 - protein, 1049 aa, synthetic construct
  REGION 1..1049: note = variant of P450 oxidase from Bacillus megaterium
MTIKEMPQPKTFGELKNLPLLNTDKPVQALMRIADELGEIFKFEAPGSVTRYLSSQRLIKEACDESRFDKNLSQALKFARDFVGDGLSTSWTHEPNWKKAHNILVPSFSQHAMGRYHAMMVDIAVQLVQKWERLNADEHIEVSEDMTRLTLDTIGLCGFNYRFNSFYRDQPHPFIVSVVRALDEVMNKLQRANPDDPAYDENKRQCQEDIKVMNDYVDKIIADRKARGEQSHDLLTQMLNGKDPETGEPLDDGNIRQQIITFLIAGHQTTSGLLSFALYFLVKNPHVLQKVAEEAARVLVDPVPSYKQVKQLKYVGMVLNEALRLWPVAPMFSLYAKEDTVLGGEYPLTKGDEVMVLVPQLHRDKTIWGDDVEEFRPERFENPSAIPQHAFKPFGNGQRACIGQQFALHEATLVLGMMLKHFDFEDHTNYELVIKESRTLKPEGFVVKAKSKGIPLGGIPSPSTEQSAKKVRKKAENAHNTPLLVLYGSNAGTAEGTARDLADIAMSKGFAPQVATLDSHARNLPREGAVLIVTASYNGHPPDNAKQFVDWLDQASADEVKGVRYSVFGCGDKNWAGTYQKVPAFIDETLAAKGAENIADRGEADASDDFEGTYEEWRDHMWSDVAAYFNLDIENSEDNKSTLSLQFVDSAADMPLAKMHGAFSTNVVASKELQQPGSARSTRHLEIELPKEASYQEGDHLGVIPRNYEGIVNRVTARFGLSASQQIRLEAEEEKLAHLPLAKTVSVEELLQYVELQDPVTRTQLRAMAAKTVCPPHKVELEALLEKQAYKEQVLAKRLTMLELLEKYPACEMKFSEFIALLPSIRPRYYSISSSPRVDEKQASITVSVVSGPAWSGYGEYKGIASNYLAELQEGDTITCFISTPQSEFTLPKDPETPLIMVGPGTGVAPFRGFVQARKQLKEQGQSLGEAHLYFGCRSPHEDYLYQEELENAQSEGIITLHTAFSRMPNQPKTYVQHVMEQDGKKLIELLDQGAHFYICGDGSQMAPAVEATLMKSYADVHQVSEADARLWLQQLEQKGRYAKDVWAG

SEQ ID NO: 413 - DNA, 3147 bp, synthetic construct
  misc_feature 1..3147: note = variant of P450 oxidase from Bacillus megaterium
  source 1..3147: mol_type = other DNA
atgacaattaaggaaatgcctcagcctaagacgtttggagaacttaaaaatttaccgttattaaacacagataaaccggttcaagctttgatgcgtattgcggatgaattaggagaaatctttaaattcgaggcgcctggtagcgtaacgcgctatttatcaagtcagcgtctaattaaagaagcatgcgatgaatcacgctttgataaaaacttaagtcaagcgcttaaatttgcacgtgattttgttggagacgggttatctacaagctggacgcatgaaccgaattggaaaaaagcgcataatatcttagttccaagctttagtcagcatgcaatggggcgttatcatgcgatgatggtcgatatcgccgtgcagcttgttcaaaagtgggagcgtctaaatgcagatgagcatattgaagtatcggaagacatgacacgtttaacgcttgatacaattggtctttgcggctttaactatcgctttaacagcttttaccgagatcagcctcatccatttattgtgagtgtggttcgtgcactggatgaagtaatgaacaagctgcagcgagcaaatccagacgacccagcttatgatgaaaacaagcgccagtgtcaagaagatatcaaggtgatgaacgactatgtagataaaattattgcagatcgcaaagcaaggggtgaacaaagtcatgatttattaacgcagatgctaaacggaaaagatccagaaacgggtgagccgcttgatgacgggaacattcgtcagcaaattattacattcttaattgcgggacaccaaacaacaagtggtcttttatcatttgcgctgtatttcttagtgaaaaatccacatgtattacaaaaagtagcagaagaagcagcacgagttctagtagatcctgttccaagctacaaacaagtcaaacagcttaaatatgttggcatggtcttaaacgaagcgctgcgcttatggccagtagcgcctatgttttccctatatgcaaaagaagatacggtgcttggaggagaatatcctttaacgaaaggcgacgaagtaatggttctggtgcctcagcttcaccgtgataaaacaatttggggagacgatgtggaggagttccgtccagagcgttttgaaaatccaagtgcgattccgcagcatgcgtttaaaccgtttggaaacggtcagcgtgcgtgtatcggtcagcagttcgctcttcatgaagcaacgctggtacttggtatgatgctaaaacactttgactttgaagatcatacaaactacgagctcgttattaaagaatcgcggacgttaaaacctgaaggctttgtggtaaaagcaaaatcgaaaggcattccgcttggcggtattccttcacctagcactgaacagtctgctaaaaaagtacgcaaaaaggcagaaaacgctcataatacgccgctgcttgtgctatacggttcaaatgcgggaacagctgaaggaacggcgcgtgatttagcagatattgcaatgagcaaaggatttgcaccgcaggtcgcaacgcttgattcacacgccagaaatcttccgcgcgaaggagctgtattaattgtaacggcgtcttataacggtcatccgcctgataacgcaaagcaatttgtcgactggttagaccaagcgtctgctgatgaagtaaaaggcgttcgctactccgtatttggatgcggcgataaaaattgggcggggacgtatcaaaaagtgcctgcttttatcgatgaaacgcttgccgctaaaggggcagaaaacatcgctgaccgcggtgaagcagatgcaagcgacgactttgaaggcacatatgaagaatggcgtgatcatatgtggagtgacgtagcagcctactttaacctcgacattgaaaacagtgaagataataaatctactctttcacttcaatttgtcgacagcgccgcggatatgccgcttgcgaaaatgcacggtgcgttttcaacgaacgtcgtagcaagcaaagaacttcaacagccaggcagtgcacgaagcacgcgacatcttgaaattgaacttccaaaagaagcttcttatcaagaaggagatcatttaggtgttattcctcgcaactatgaaggaatagtaaaccgtgtaacagcaaggttcggcctaagcgcatcacagcaaatccgtctggaagcagaagaagaaaaattagctcatttgccactcgctaaaacagtatccgtagaagagcttctgcaatacgtggagcttcaagatcctgttacgcgcacgcagcttcgcgcaatggctgctaaaacggtctgcccgccgcataaagtagagcttgaagccttgcttgaaaagcaagcctacaaagaacaagtgctggcaaaacgtttaacaatgcttgaactgcttgaaaaatacccggcgtgtgaaatgaaattcagcgaatttatcgcccttctgccaagcatacgcccgcgctattactcgatttcttcatcacctcgtgtcgatgaaaaacaagcaagcatcacggtcagcgttgtctcaggaccggcgtggagcggatatggagaatataaaggaattgcgtcgaactatcttgccgagctgcaagaaggagatacgattacgtgctttatttccacaccgcagtcagaatttacgctgccaaaagaccctgaaacgccgcttatcatggtcggaccgggaacaggcgtcgcgccgtttagaggctttgtgcaggcgcgcaaacagctaaaagaacaaggacagtcacttggagaagcacatttatacttcggctgccgttcacctcatgaagactatctgtatcaagaagagcttgaaaacgcccaaagcgaaggcatcattacgcttcataccgctttttctcgcatgccaaatcagccgaaaacatacgttcagcacgtaatggaacaagacggcaagaaattgattgaacttcttgattcgggagcgcacttctatatttgcggagacggaagccaaatggcacctgccgttgaagcaacgcttatgaaaagctatgctgacgttcaccaagtgagtgaagcagacgctcgcttatggctgcagcagctagaagaaaaaggccgatacgcaaaagacgtgtgggctggg

SEQ ID NO: 414 - protein, 1049 aa, synthetic construct
  REGION 1..1049: note = variant of P450 oxidase from Bacillus megaterium
MTIKEMPQPKTFGELKNLPLLNTDKPVQALMRIADELGEIFKFEAPGSVTRYLSSQRLIKEACDESRFDKNLSQALKFARDFVGDGLSTSWTHEPNWKKAHNILVPSFSQHAMGRYHAMMVDIAVQLVQKWERLNADEHIEVSEDMTRLTLDTIGLCGFNYRFNSFYRDQPHPFIVSVVRALDEVMNKLQRANPDDPAYDENKRQCQEDIKVMNDYVDKIIADRKARGEQSHDLLTQMLNGKDPETGEPLDDGNIRQQIITFLIAGHQTTSGLLSFALYFLVKNPHVLQKVAEEAARVLVDPVPSYKQVKQLKYVGMVLNEALRLWPVAPMFSLYAKEDTVLGGEYPLTKGDEVMVLVPQLHRDKTIWGDDVEEFRPERFENPSAIPQHAFKPFGNGQRACIGQQFALHEATLVLGMMLKHFDFEDHTNYELVIKESRTLKPEGFVVKAKSKGIPLGGIPSPSTEQSAKKVRKKAENAHNTPLLVLYGSNAGTAEGTARDLADIAMSKGFAPQVATLDSHARNLPREGAVLIVTASYNGHPPDNAKQFVDWLDQASADEVKGVRYSVFGCGDKNWAGTYQKVPAFIDETLAAKGAENIADRGEADASDDFEGTYEEWRDHMWSDVAAYFNLDIENSEDNKSTLSLQFVDSAADMPLAKMHGAFSTNVVASKELQQPGSARSTRHLEIELPKEASYQEGDHLGVIPRNYEGIVNRVTARFGLSASQQIRLEAEEEKLAHLPLAKTVSVEELLQYVELQDPVTRTQLRAMAAKTVCPPHKVELEALLEKQAYKEQVLAKRLTMLELLEKYPACEMKFSEFIALLPSIRPRYYSISSSPRVDEKQASITVSVVSGPAWSGYGEYKGIASNYLAELQEGDTITCFISTPQSEFTLPKDPETPLIMVGPGTGVAPFRGFVQARKQLKEQGQSLGEAHLYFGCRSPHEDYLYQEELENAQSEGIITLHTAFSRMPNQPKTYVQHVMEQDGKKLIELLDSGAHFYICGDGSQMAPAVEATLMKSYADVHQVSEADARLWLQQLEEKGRYAKDVWAG

SEQ ID NO: 415 - DNA, 3147 bp, synthetic construct
  misc_feature 1..3147: note = variant of P450 oxidase from Bacillus megaterium
  source 1..3147: mol_type = other DNA
atgacaattaaggaaatgcctcagcctaagacgtttggagaacttaaaaatttaccgttattaaacacagataaaccggttcaagctttgatgcgtattgcggatgaattaggagaaatctttaaattcgaggcgcctggtagcgtaacgcgctatttatcaagtcagcgtctaattaaagaagcatgcgatgaatcacgctttgataaaaacttaagtcaagcgcttaaatttgcacgtgattttgttggagacgggttatctacaagctggacgcatgaaccgaattggaaaaaagcgcataatatcttagttccaagctttagtcagcatgcaatggggcgttatcatgcgatgatggtcgatatcgccgtgcagcttgttcaaaagtgggagcgtctaaatgcagatgagcatattgaagtatcggaagacatgacacgtttaacgcttgatacaattggtctttgcggctttaactatcgctttaacagcttttaccgagatcagcctcatccatttattgtgagtgtggttcgtgcactggatgaagtaatgaacaagctgcagcgagcaaatccagacgacccagcttatgatgaaaacaagcgccagtgtcaagaagatatcaaggtgatgaacgactatgtagataaaattattgcagatcgcaaagcaaggggtgaacaaagtcatgatttattaacgcagatgctaaacggaaaagatccagaaacgggtgagccgcttgatgacgggaacattcgtcagcaaattattacattcttaattgcgggacaccaaacaacaagtggtcttttatcatttgcgctgtatttcttagtgaaaaatccacatgtattacaaaaagtagcagaagaagcagcacgagttctagtagatcctgttccaagctacaaacaagtcaaacagcttaaatatgttggcatggtcttaaacgaagcgctgcgcttatggccagtagcgcctatgttttccctatatgcaaaagaagatacggtgcttggaggagaatatcctttaacgaaaggcgacgaagtaatggttctggtgcctcagcttcaccgtgataaaacaatttggggagacgatgtggaggagttccgtccagagcgttttgaaaatccaagtgcgattccgcagcatgcgtttaaaccgtttggaaacggtcagcgtgcgtgtatcggtcagcagttcgctcttcatgaagcaacgctggtacttggtatgatgctaaaacactttgactttgaagatcatacaaactacgagctcgttattaaagaatcgcggacgttaaaacctgaaggctttgtggtaaaagcaaaatcgaaaggcattccgcttggcggtattccttcacctagcactgaacagtctgctaaaaaagtacgcaaaaaggcagaaaacgctcataatacgccgctgcttgtgctatacggttcaaatgcgggaacagctgaaggaacggcgcgtgatttagcagatattgcaatgagcaaaggatttgcaccgcaggtcgcaacgcttgattcacacgccagaaatcttccgcgcgaaggagctgtattaattgtaacggcgtcttataacggtcatccgcctgataacgcaaagcaatttgtcgactggttagaccaagcgtctgctgatgaagtaaaaggcgttcgctactccgtatttggatgcggcgataaaaattgggcggggacgtatcaaaaagtgcctgcttttatcgatgaaacgcttgccgctaaaggggcagaaaacatcgctgaccgcggtgaagcagatgcaagcgacgactttgaaggcacatatgaagaatggcgtgatcatatgtggagtgacgtagcagcctactttaacctcgacattgaaaacagtgaagataataaatctactctttcacttcaatttgtcgacagcgccgcggatatgccgcttgcgaaaatgcacggtgcgttttcaacgaacgtcgtagcaagcaaagaacttcaacagccaggcagtgcacgaagcacgcgacatcttgaaattgaacttccaaaaggtgcttcttatcaagaaggagatcatttaggtgttattcctcgcaactatgaaggaatagtaaaccgtgtaacagcaaggttcggcctaagcgcatcacagcaaatccgtctggaagcagaagaagaaaaattagctcatttgccactcgctaaaacagtatccgtagaagagcttctgcaatacgtggagcttcaagatcctgttacgcgcacgcagcttcgcgcaatggctgctaaaacggtctgcccgccgcataaagtagagcttgaagccttgcttgaaaagcaagcctacaaagaacaagtgctggcaaaacgtttaacaatgcttgaactgcttgaaaaatacccggcgtgtgaaatgaaattcagcgaatttatcgcccttctgccaagcatacgcccgcgctattactcgatttcttcatcacctcgtgtcgatgaaaaacaagcaagcatcacggtcagcgttgtctcaggaccggcgtggagcggatatggagaatataaaggaattgcgtcgaactatcttgccgagctgcaagaaggagatacgattacgtgctttatttccacaccgcagtcagaatttacgctgccaaaagaccctgaaacgccgcttatcatggtcggaccgggaacaggcgtcgcgccgtttagaggctttgtgcaggcgcgcaaacagctaaaagaacaaggacagtcacttggagaagcacatttatacttcggctgccgttcacctcatgaagactatctgtatcaagaagagcttgaaaacgcccaaagcgaaggcatcattacgcttcataccgctttttctcgcatgccaaatcagccgaaaacatacgttcagcacgtaatggaacaagacggcaagaaattgattgaacttcttgatcaaggagcgcacttctatatttgcggagacggaagccaaatggcacctgccgttgaagcaacgcttatgaaaagctatgctgacgttcaccaagtgagtgaagcagacgctcgcttatggctgcagcagctagaagaaaaaggccgatacgcaaaagacgtgtgggctggg

SEQ ID NO: 416 - protein, 1049 aa, synthetic construct
  REGION 1..1049: note = variant of P450 oxidase from Bacillus megaterium
MTIKEMPQPKTFGELKNLPLLNTDKPVQALMRIADELGEIFKFEAPGSVTRYLSSQRLIKEACDESRFDKNLSQALKFARDFVGDGLSTSWTHEPNWKKAHNILVPSFSQHAMGRYHAMMVDIAVQLVQKWERLNADEHIEVSEDMTRLTLDTIGLCGFNYRFNSFYRDQPHPFIVSVVRALDEVMNKLQRANPDDPAYDENKRQCQEDIKVMNDYVDKIIADRKARGEQSHDLLTQMLNGKDPETGEPLDDGNIRQQIITFLIAGHQTTSGLLSFALYFLVKNPHVLQKVAEEAARVLVDPVPSYKQVKQLKYVGMVLNEALRLWPVAPMFSLYAKEDTVLGGEYPLTKGDEVMVLVPQLHRDKTIWGDDVEEFRPERFENPSAIPQHAFKPFGNGQRACIGQQFALHEATLVLGMMLKHFDFEDHTNYELVIKESRTLKPEGFVVKAKSKGIPLGGIPSPSTEQSAKKVRKKAENAHNTPLLVLYGSNAGTAEGTARDLADIAMSKGFAPQVATLDSHARNLPREGAVLIVTASYNGHPPDNAKQFVDWLDQASADEVKGVRYSVFGCGDKNWAGTYQKVPAFIDETLAAKGAENIADRGEADASDDFEGTYEEWRDHMWSDVAAYFNLDIENSEDNKSTLSLQFVDSAADMPLAKMHGAFSTNVVASKELQQPGSARSTRHLEIELPKGASYQEGDHLGVIPRNYEGIVNRVTARFGLSASQQIRLEAEEEKLAHLPLAKTVSVEELLQYVELQDPVTRTQLRAMAAKTVCPPHKVELEALLEKQAYKEQVLAKRLTMLELLEKYPACEMKFSEFIALLPSIRPRYYSISSSPRVDEKQASITVSVVSGPAWSGYGEYKGIASNYLAELQEGDTITCFISTPQSEFTLPKDPETPLIMVGPGTGVAPFRGFVQARKQLKEQGQSLGEAHLYFGCRSPHEDYLYQEELENAQSEGIITLHTAFSRMPNQPKTYVQHVMEQDGKKLIELLDQGAHFYICGDGSQMAPAVEATLMKSYADVHQVSEADARLWLQQLEEKGRYAKDVWAG

SEQ ID NO: 417 - DNA, 3147 bp, synthetic construct
  misc_feature 1..3147: note = variant of P450 oxidase from Bacillus megaterium
  source 1..3147: mol_type = other DNA
atgacaattaaggaaatgcctcagcctaagacgtttggagaacttaaaaatttaccgttattaaacacagataaaccggttcaagctttgatgcgtattgcggatgaattaggagaaatctttaaattcgaggcgcctggtagcgtaacgcgctatttatcaagtcagcgtctaattaaagaagcatgcgatgaatcacgctttgataaaaacttaagtcaagcgcttaaatttgcacgtgattttgttggagacgggttatctacaagctggacgcatgaaccgaattggaaaaaagcgcataatatcttagttccaagctttagtcagcatgcaatggggcgttatcatgcgatgatggtcgatatcgccgtgcagcttgttcaaaagtgggagcgtctaaatgcagatgagcatattgaagtatcggaagacatgacacgtttaacgcttgatacaattggtctttgcggctttaactatcgctttaacagcttttaccgagatcagcctcatccatttattgtgagtgtggttcgtgcactggatgaagtaatgaacaagctgcagcgagcaaatccagacgacccagcttatgatgaaaacaagcgccagtgtcaagaagatatcaaggtgatgaacgactatgtagataaaattattgcagatcgcaaagcaaggggtgaacaaagtcatgatttattaacgcagatgctaaacggaaaagatccagaaacgggtgagccgcttgatgacgggaacattcgtcagcaaattattacattcttaattgcgggacaccaaacaacaagtggtcttttatcatttgcgctgtatttcttagtgaaaaatccacatgtattacaaaaagtagcagaagaagcagcacgagttctagtagatcctgttccaagctacaaacaagtcaaacagcttaaatatgttggcatggtcttaaacgaagcgctgcgcttatggccagtagcgcctatgttttccctatatgcaaaagaagatacggtgcttggaggagaatatcctttaacgaaaggcgacgaagtaatggttctggtgcctcagcttcaccgtgataaaacaatttggggagacgatgtggaggagttccgtccagagcgttttgaaaatccaagtgcgattccgcagcatgcgtttaaaccgtttggaaacggtcagcgtgcgtgtatcggtcagcagttcgctcttcatgaagcaacgctggtacttggtatgatgctaaaacactttgactttgaagatcatacaaactacgagctcgttattaaagaatcgcggacgttaaaacctgaaggctttgtggtaaaagcaaaatcgaaaggcattccgcttggcggtattccttcacctagcactgaacagtctgctaaaaaagtacgcaaaaaggcagaaaacgctcataatacgccgctgcttgtgctatacggttcaaatgcgggaacagctgaaggaacggcgcgtgatttagcagatattgcaatgagcaaaggatttgcaccgcaggtcgcaacgcttgattcacacgccagaaatcttccgcgcgaaggagctgtattaattgtaacggcgtcttataacggtcatccgcctgataacgcaaagcaatttgtcgactggttagaccaagcgtctgctgatgaagtaaaaggcgttcgctactccgtatttggatgcggcgataaaaattgggcggggacgtatcaaaaagtgcctgcttttatcgatgaaacgcttgccgctaaaggggcagaaaacatcgctgaccgcggtgaagcagatgcaagcgacgactttgaaggcacatatgaagaatggcgtgatcatatgtggagtgacgtagcagcctactttaacctcgacattgaaaacagtgaagataataaatctactctttcacttcaatttgtcgacagcgccgcggatatgccgcttgcgaaaatgcacggtgcgttttcaacgaacgtcgtagcaagcaaagaacttcaacagccaggcagtgcacgaagcacgcgacatcttgaaattgaacttccaaaagaagcttcttatcaagaaggagatcatttaggtgttattcctcgcaactatgaaggaatagtaaaccgtgtaacagcaaggttcggcctaagcgcatcacagcaaatccgtctggaagcagaagaagaaaaattagctcatttgccactcgctaaaacagtatccgtagaagagcttctgcaatacgtggagcttcaagatcctgttacgcgcacgcagcttcgcgcaatggctgctaaaacggtctgcccgccgcataaagtagagcttgaagccttgcttgaaaagcaagcctacaaagaacaagtgctggcaaaacgtttaacaatgcttgaactgcttgaaaaatacccggcgtgtgaaatgaaattcagcgaatttatcgcccttctgccaagcatacgcccgcgctattactcgatttcttcatcacctcgtgtcgatgaaaaacaagcaagcatcacggtcagcgttgtctcaggaccggcgtggagcggatatggagaatataaaggaattgcgtcgaactatcttgccgagctgcaagaaggagatacgattacgtgctttatttccacaccgcagtcagaatttacgctgccaaaagaccctgaaacgccgcttatcatggtcggaccgggaacaggcgtcgcgccgtttagaggctttgtgcaggcgcgcaaacagctaaaagaaaatggacagtcacttggagaagcacatttatacttcggctgccgttcacctcatgaagactatctgtatcaagaagagcttgaaaacgcccaaagcgaaggcatcattacgcttcataccgctttttctcgcatgccaaatcagccgaaaacatacgttcagcacgtaatggaacaagacggcaagaaattgattgaacttcttgatcaaggagcgcacttctatatttgcggagacggaagccaaatggcacctgccgttgaagcaacgcttatgaaaagctatgctgacgttcaccaagtgagtgaagcagacgctcgcttatggctgcagcagctagaagaaaaaggccgatacgcaaaagacgtgtgggctggg

SEQ ID NO: 418 - protein, 1049 aa, synthetic construct
  REGION 1..1049: note = variant of P450 oxidase from Bacillus megaterium
MTIKEMPQPKTFGELKNLPLLNTDKPVQALMRIADELGEIFKFEAPGSVTRYLSSQRLIKEACDESRFDKNLSQALKFARDFVGDGLSTSWTHEPNWKKAHNILVPSFSQHAMGRYHAMMVDIAVQLVQKWERLNADEHIEVSEDMTRLTLDTIGLCGFNYRFNSFYRDQPHPFIVSVVRALDEVMNKLQRANPDDPAYDENKRQCQEDIKVMNDYVDKIIADRKARGEQSHDLLTQMLNGKDPETGEPLDDGNIRQQIITFLIAGHQTTSGLLSFALYFLVKNPHVLQKVAEEAARVLVDPVPSYKQVKQLKYVGMVLNEALRLWPVAPMFSLYAKEDTVLGGEYPLTKGDEVMVLVPQLHRDKTIWGDDVEEFRPERFENPSAIPQHAFKPFGNGQRACIGQQFALHEATLVLGMMLKHFDFEDHTNYELVIKESRTLKPEGFVVKAKSKGIPLGGIPSPSTEQSAKKVRKKAENAHNTPLLVLYGSNAGTAEGTARDLADIAMSKGFAPQVATLDSHARNLPREGAVLIVTASYNGHPPDNAKQFVDWLDQASADEVKGVRYSVFGCGDKNWAGTYQKVPAFIDETLAAKGAENIADRGEADASDDFEGTYEEWRDHMWSDVAAYFNLDIENSEDNKSTLSLQFVDSAADMPLAKMHGAFSTNVVASKELQQPGSARSTRHLEIELPKEASYQEGDHLGVIPRNYEGIVNRVTARFGLSASQQIRLEAEEEKLAHLPLAKTVSVEELLQYVELQDPVTRTQLRAMAAKTVCPPHKVELEALLEKQAYKEQVLAKRLTMLELLEKYPACEMKFSEFIALLPSIRPRYYSISSSPRVDEKQASITVSVVSGPAWSGYGEYKGIASNYLAELQEGDTITCFISTPQSEFTLPKDPETPLIMVGPGTGVAPFRGFVQARKQLKENGQSLGEAHLYFGCRSPHEDYLYQEELENAQSEGIITLHTAFSRMPNQPKTYVQHVMEQDGKKLIELLDQGAHFYICGDGSQMAPAVEATLMKSYADVHQVSEADARLWLQQLEEKGRYAKDVWAG

SEQ ID NO: 419 - DNA, 3147 bp, synthetic construct
  misc_feature 1..3147: note = variant of P450 oxidase from Bacillus megaterium
  source 1..3147: mol_type = other DNA
atgacaattaaggaaatgcctcagcctaagacgtttggagaacttaaaaatttaccgttattaaacacagataaaccggttcaagctttgatgcgtattgcggatgaattaggagaaatctttaaattcgaggcgcctggtagcgtaacgcgctatttatcaagtcagcgtctaattaaagaagcatgcgatgaatcacgctttgataaaaacttaagtcaagcgcttaaatttgcacgtgattttgttggagacgggttatctacaagctggacgcatgaaccgaattggaaaaaagcgcataatatcttagttccaagctttagtcagcatgcaatggggcgttatcatgcgatgatggtcgatatcgccgtgcagcttgttcaaaagtgggagcgtctaaatgcagatgagcatattgaagtatcggaagacatgacacgtttaacgcttgatacaattggtctttgcggctttaactatcgctttaacagcttttaccgagatcagcctcatccatttattgtgagtgtggttcgtgcactggatgaagtaatgaacaagctgcagcgagcaaatccagacgacccagcttatgatgaaaacaagcgccagtgtcaagaagatatcaaggtgatgaacgactatgtagataaaattattgcagatcgcaaagcaaggggtgaacaaagtcatgatttattaacgcagatgctaaacggaaaagatccagaaacgggtgagccgcttgatgacgggaacattcgtcagcaaattattacattcttaattgcgggacaccaaacaacaagtggtcttttatcatttgcgctgtatttcttagtgaaaaatccacatgtattacaaaaagtagcagaagaagcagcacgagttctagtagatcctgttccaagctacaaacaagtcaaacagcttaaatatgttggcatggtcttaaacgaagcgctgcgcttatggccagtagcgcctatgttttccctatatgcaaaagaagatacggtgcttggaggagaatatcctttaacgaaaggcgacgaagtaatggttctggtgcctcagcttcaccgtgataaaacaatttggggagacgatgtggaggagttccgtccagagcgttttgaaaatccaagtgcgattccgcagcatgcgtttaaaccgtttggaaacggtcagcgtgcgtgtatcggtcagcagttcgctcttcatgaagcaacgctggtacttggtatgatgctaaaacactttgactttgaagatcatacaaactacgagctcgttattaaagaatcgcggacgttaaaacctgaaggctttgtggtaaaagcaaaatcgaaaggcattccgcttggcggtattccttcacctagcactgaacagtctgctaaaaaagtacgcaaaaaggcagaaaacgctcataatacgccgctgcttgtgctatacggttcaaatgcgggaacagctgaaggaacggcgcgtgatttagcagatattgcaatgagcaaaggatttgcaccgcaggtcgcaacgcttgattcacacgccagaaatcttccgcgcgaaggagctgtattaattgtaacggcgtcttataacggtcatccgcctgataacgcaaagcaatttgtcgactggttagaccaagcgtctgctgatgaagtaaaaggcgttcgctactccgtatttggatgcggcgataaaaattgggcggggacgtatcaaaaagtgcctgcttttatcgatgaaacgcttgccgctaaaggggcagaaaacatcgctgaccgcggtgaagcagatgcaagcgacgactttgaaggcacatatgaagaatggcgtgatcatatgtggagtgacgtagcagcctactttaacctcgacattgaaaacagtgaagataataaatctactctttcacttttttttgtcgacagcgccgcggatatgccgcttgcgaaaatgcacggtgcgttttcaacgaacgtcgtagcaagcaaagaacttcaacagccaggcagtgcacgaagcacgcgacatcttgaaattgaacttccaaaagaagcttcttatcaagaaggagatcatttaggtgttattcctcgcaactatgaaggaatagtaaaccgtgtaacagcaaggttcggcctaagcgcatcacagcaaatccgtctggaagcagaagaagaaaaattagctcatttgccactcgctaaaacagtatccgtagaagagcttctgcaatacgtggagcttcaagatcctgttacgcgcacgcagcttcgcgcaatggctgctaaaacggtctgcccgccgcataaagtagagcttgaagccttgcttgaaaagcaagcctacaaagaacaagtgctggcaaaacgtttaacaatgcttgaactgcttgaaaaatacccggcgtgtgaaatgaaattcagcgaatttatcgcccttctgccaagcatacgcccgcgctattactcgatttcttcatcacctcgtgtcgatgaaaaacaagcaagcatcacggtcagcgttgtctcaggaccggcgtggagcggatatggagaatataaaggaattgcgtcgaactatcttgccgagctgcaagaaggagatacgattacgtgctttatttccacaccgcagtcagaatttacgctgccaaaagaccctgaaacgccgcttatcatggtcggaccgggaacaggcgtcgcgccgtttagaggctttgtgcaggcgcgcaaacagctaaaagaacaaggacagtcacttggagaagcacatttatacttcggctgccgttcacctcatgaagactatctgtatcaagaagagcttgaaaacgcccaaagcgaaggcatcattacgcttcataccgctttttctcgcatgccaaatcagccgaaaacatacgttcagcacgtaatggaacaagacggcaagaaattgattgaacttcttgatcaaggagcgcacttctatatttgcggagacggaagccaaatggcacctgccgttgaagcaacgcttatgaaaagctatgctgacgttcaccaagtgagtgaagcagacgctcgcttatggctgcagcagctagaagaaaaaggccgatacgcaaaagacgtgtgggctggg

SEQ ID NO: 420 - protein, 1049 aa, synthetic construct
  REGION 1..1049: note = variant of P450 oxidase from Bacillus megaterium
MTIKEMPQPKTFGELKNLPLLNTDKPVQALMRIADELGEIFKFEAPGSVTRYLSSQRLIKEACDESRFDKNLSQALKFARDFVGDGLSTSWTHEPNWKKAHNILVPSFSQHAMGRYHAMMVDIAVQLVQKWERLNADEHIEVSEDMTRLTLDTIGLCGFNYRFNSFYRDQPHPFIVSVVRALDEVMNKLQRANPDDPAYDENKRQCQEDIKVMNDYVDKIIADRKARGEQSHDLLTQMLNGKDPETGEPLDDGNIRQQIITFLIAGHQTTSGLLSFALYFLVKNPHVLQKVAEEAARVLVDPVPSYKQVKQLKYVGMVLNEALRLWPVAPMFSLYAKEDTVLGGEYPLTKGDEVMVLVPQLHRDKTIWGDDVEEFRPERFENPSAIPQHAFKPFGNGQRACIGQQFALHEATLVLGMMLKHFDFEDHTNYELVIKESRTLKPEGFVVKAKSKGIPLGGIPSPSTEQSAKKVRKKAENAHNTPLLVLYGSNAGTAEGTARDLADIAMSKGFAPQVATLDSHARNLPREGAVLIVTASYNGHPPDNAKQFVDWLDQASADEVKGVRYSVFGCGDKNWAGTYQKVPAFIDETLAAKGAENIADRGEADASDDFEGTYEEWRDHMWSDVAAYFNLDIENSEDNKSTLSLFFVDSAADMPLAKMHGAFSTNVVASKELQQPGSARSTRHLEIELPKEASYQEGDHLGVIPRNYEGIVNRVTARFGLSASQQIRLEAEEEKLAHLPLAKTVSVEELLQYVELQDPVTRTQLRAMAAKTVCPPHKVELEALLEKQAYKEQVLAKRLTMLELLEKYPACEMKFSEFIALLPSIRPRYYSISSSPRVDEKQASITVSVVSGPAWSGYGEYKGIASNYLAELQEGDTITCFISTPQSEFTLPKDPETPLIMVGPGTGVAPFRGFVQARKQLKEQGQSLGEAHLYFGCRSPHEDYLYQEELENAQSEGIITLHTAFSRMPNQPKTYVQHVMEQDGKKLIELLDQGAHFYICGDGSQMAPAVEATLMKSYADVHQVSEADARLWLQQLEEKGRYAKDVWAG

SEQ ID NO: 421 - DNA, 3147 bp, synthetic construct
  misc_feature 1..3147: note = variant of P450 oxidase from Bacillus megaterium
  source 1..3147: mol_type = other DNA
atgacaattaaggaaatgcctcagcctaagacgtttggagaacttaaaaatttaccgttattaaacacagataaaccggttcaagctttgatgcgtattgcggatgaattaggagaaatctttaaattcgaggcgcctggtagcgtaacgcgctatttatcaagtcagcgtctaattaaagaagcatgcgatgaatcacgctttgataaaaacttaagtcaagcgcttaaatttgcacgtgattttgttggagacgggttatctacaagctggacgcatgaaccgaattggaaaaaagcgcataatatcttagttccaagctttagtcagcatgcaatggggcgttatcatgcgatgatggtcgatatcgccgtgcagcttgttcaaaagtgggagcgtctaaatgcagatgagcatattgaagtatcggaagacatgacacgtttaacgcttgatacaattggtctttgcggctttaactatcgctttaacagcttttaccgagatcagcctcatccatttattgtgagtgtggttcgtgcactggatgaagtaatgaacaagctgcagcgagcaaatccagacgacccagcttatgatgaaaacaagcgccagtgtcaagaagatatcaaggtgatgaacgactatgtagataaaattattgcagatcgcaaagcaaggggtgaacaaagtcatgatttattaacgcagatgctaaacggaaaagatccagaaacgggtgagccgcttgatgacgggaacattcgtcagcaaattattacattcttaattgcgggacaccaaacaacaagtggtcttttatcatttgcgctgtatttcttagtgaaaaatccacatgtattacaaaaagtagcagaagaagcagcacgagttctagtagatcctgttccaagctacaaacaagtcaaacagcttaaatatgttggcatggtcttaaacgaagcgctgcgcttatggccagtagcgcctatgttttccctatatgcaaaagaagatacggtgcttggaggagaatatcctttaacgaaaggcgacgaagtaatggttctggtgcctcagcttcaccgtgataaaacaatttggggagacgatgtggaggagttccgtccagagcgttttgaaaatccaagtgcgattccgcagcatgcgtttaaaccgtttggaaacggtcagcgtgcgtgtatcggtcagcagttcgctcttcatgaagcaacgctggtacttggtatgatgctaaaacactttgactttgaagatcatacaaactacgagctcgttattaaagaatcgcggacgttaaaacctgaaggctttgtggtaaaagcaaaatcgaaaggcattccgcttggcggtattccttcacctagcactgaacagtctgctaaaaaagtacgcaaaaaggcagaaaacgctcataatacgccgctgcttgtgctatacggttcaaatgcgggaacagctgaaggaacggcgcgtgatttagcagatattgcaatgagcaaaggatttgcaccgcaggtcgcaacgcttgattcacacgccagaaatcttccgcgcgaaggagctgtattaattgtaacggcgtcttataacggtcatccgcctgataacgcaaagcaatttgtcgactggttagaccaagcgtctgctgatgaagtaaaaggcgttcgctactccgtatttggatgcggcgataaaaattgggcggggacgtatcaaaaagtgcctgcttttatcgatgaaacgcttgccgctaaaggggcagaaaacatcgctgaccgcggtgaagcagatgcaagcgacgactttgaaggcacatatgaagaatggcgtgatcatatgtggagtgacgtagcagcctactttaacctcgacattgaaaacagtgaagataataaatctactctttcacttcaatttgtcgacagcgccgcggatatgccgcttgcgaaaatgcacggtgcgttttcaacgaacgtcgtagcaagcaaagaacttcaacagccaggcagtgcacgaagcacgcgacatcttgaaattgaacttccaaaagaagcttcttatcaagaaggagatcatttaggtgttattcctcgcaactatgaaggaatagtaaaccgtgtaacagcaaggttcggcctaagcgcatcacagcaaatccgtctggaagcagaagaagaaaaattagctcatttgccactcgctaaaacagtatccgtagaagagcttctgcaatacgtggagcttcaagatcctgttacgcgcacgcagcttcgcgcaatggctgctaaaacggtctgcccgccgcataaagtagagcttgaagccttgcttgaaaagccggcctacaaagaacaagtgctggcaaaacgtttaacaatgcttgaactgcttgaaaaatacccggcgtgtgaaatgaaattcagcgaatttatcgcccttctgccaagcatacgcccgcgctattactcgatttcttcatcacctcgtgtcgatgaaaaacaagcaagcatcacggtcagcgttgtctcaggaccggcgtggagcggatatggagaatataaaggaattgcgtcgaactatcttgccgagctgcaagaaggagatacgattacgtgctttatttccacaccgcagtcagaatttacgctgccaaaagaccctgaaacgccgcttatcatggtcggaccgggaacaggcgtcgcgccgtttagaggctttgtgcaggcgcgcaaacagctaaaagaacaaggacagtcacttggagaagcacatttatacttcggctgccgttcacctcatgaagactatctgtatcaagaagagcttgaaaacgcccaaagcgaaggcatcattacgcttcataccgctttttctcgcatgccaaatcagccgaaaacatacgttcagcacgtaatggaacaagacggcaagaaattgattgaacttcttgatcaaggagcgcacttctatatttgcggagacggaagccaaatggcacctgccgttgaagcaacgcttatgaaaagctatgctgacgttcaccaagtgagtgaagcagacgctcgcttatggctgcagcagctagaagaaaaaggccgatacgcaaaagacgtgtgggctggg

SEQ ID NO: 422 - protein, 1049 aa, synthetic construct
  REGION 1..1049: note = variant of P450 oxidase from Bacillus megaterium
MTIKEMPQPKTFGELKNLPLLNTDKPVQALMRIADELGEIFKFEAPGSVTRYLSSQRLIKEACDESRFDKNLSQALKFARDFVGDGLSTSWTHEPNWKKAHNILVPSFSQHAMGRYHAMMVDIAVQLVQKWERLNADEHIEVSEDMTRLTLDTIGLCGFNYRFNSFYRDQPHPFIVSVVRALDEVMNKLQRANPDDPAYDENKRQCQEDIKVMNDYVDKIIADRKARGEQSHDLLTQMLNGKDPETGEPLDDGNIRQQIITFLIAGHQTTSGLLSFALYFLVKNPHVLQKVAEEAARVLVDPVPSYKQVKQLKYVGMVLNEALRLWPVAPMFSLYAKEDTVLGGEYPLTKGDEVMVLVPQLHRDKTIWGDDVEEFRPERFENPSAIPQHAFKPFGNGQRACIGQQFALHEATLVLGMMLKHFDFEDHTNYELVIKESRTLKPEGFVVKAKSKGIPLGGIPSPSTEQSAKKVRKKAENAHNTPLLVLYGSNAGTAEGTARDLADIAMSKGFAPQVATLDSHARNLPREGAVLIVTASYNGHPPDNAKQFVDWLDQASADEVKGVRYSVFGCGDKNWAGTYQKVPAFIDETLAAKGAENIADRGEADASDDFEGTYEEWRDHMWSDVAAYFNLDIENSEDNKSTLSLQFVDSAADMPLAKMHGAFSTNVVASKELQQPGSARSTRHLEIELPKEASYQEGDHLGVIPRNYEGIVNRVTARFGLSASQQIRLEAEEEKLAHLPLAKTVSVEELLQYVELQDPVTRTQLRAMAAKTVCPPHKVELEALLEKPAYKEQVLAKRLTMLELLEKYPACEMKFSEFIALLPSIRPRYYSISSSPRVDEKQASITVSVVSGPAWSGYGEYKGIASNYLAELQEGDTITCFISTPQSEFTLPKDPETPLIMVGPGTGVAPFRGFVQARKQLKEQGQSLGEAHLYFGCRSPHEDYLYQEELENAQSEGIITLHTAFSRMPNQPKTYVQHVMEQDGKKLIELLDQGAHFYICGDGSQMAPAVEATLMKSYADVHQVSEADARLWLQQLEEKGRYAKDVWAG

SEQ ID NO: 423 - DNA, 3147 bp, synthetic construct
  misc_feature 1..3147: note = variant of P450 oxidase from Bacillus megaterium
  source 1..3147: mol_type = other DNA
atgacaattaaggaaatgcctcagcctaagacgtttggagaacttaaaaatttaccgttattaaacacagataaaccggttcaagctttgatgcgtattgcggatgaattaggagaaatctttaaattcgaggcgcctggtagcgtaacgcgctatttatcaagtcagcgtctaattaaagaagcatgcgatgaatcacgctttgataaaaacttaagtcaagcgcttaaatttgcacgtgattttgttggagacgggttatctacaagctggacgcatgaaccgaattggaaaaaagcgcataatatcttagttccaagctttagtcagcatgcaatggggcgttatcatgcgatgatggtcgatatcgccgtgcagcttgttcaaaagtgggagcgtctaaatgcagatgagcatattgaagtatcggaagacatgacacgtttaacgcttgatacaattggtctttgcggctttaactatcgctttaacagcttttaccgagatacgcctcatccatttattgtgagtgtggttcgtgcactggatgaagtaatgaacaagctgcagcgagcaaatccagacgacccagcttatgatgaaaacaagcgccagtgtcaagaagatatcaaggtgatgaacgactatgtagataaaattattgcagatcgcaaagcaaggggtgaacaaagtcatgatttattaacgcagatgctaaacggaaaagatccagaaacgggtgagccgcttgatgacgggaacattcgtcagcaaattattacattcttaattgcgggacaccaaacaacaagtggtcttttatcatttgcgctgtatttcttagtgaaaaatccacatgtattacaaaaagtagcagaagaagcagcacgagttctagtagatcctgttccaagctacaaacaagtcaaacagcttaaatatgttggcatggtcttaaacgaagcgctgcgcttatggccagtagcgcctatgttttccctatatgcaaaagaagatacggtgcttggaggagaatatcctttaacgaaaggcgacgaagtaatggttctggtgcctcagcttcaccgtgataaaacaatttggggagacgatgtggaggagttccgtccagagcgttttgaaaatccaagtgcgattccgcagcatgcgtttaaaccgtttggaaacggtcagcgtgcgtgtatcggtcagcagttcgctcttcatgaagcaacgctggtacttggtatgatgctaaaacactttgactttgaagatcatacaaactacgagctcgttattaaagaatcgcggacgttaaaacctgaaggctttgtggtaaaagcaaaatcgaaaggcattccgcttggcggtattccttcacctagcactgaacagtctgctaaaaaagtacgcaaaaaggcagaaaacgctcataatacgccgctgcttgtgctatacggttcaaatgcgggaacagctgaaggaacggcgcgtgatttagcagatattgcaatgagcaaaggatttgcaccgcaggtcgcaacgcttgattcacacgccagaaatcttccgcgcgaaggagctgtattaattgtaacggcgtcttataacggtcatccgcctgataacgcaaagcaatttgtcgactggttagaccaagcgtctgctgatgaagtaaaaggcgttcgctactccgtatttggatgcggcgataaaaattgggcggggacgtatcaaaaagtgcctgcttttatcgatgaaacgcttgccgctaaaggggcagaaaacatcgctgaccgcggtgaagcagatgcaagcgacgactttgaaggcacatatgaagaatggcgtgatcatatgtggagtgacgtagcagcctactttaacctcgacattgaaaacagtgaagataataaatctactctttcacttcaatttgtcgacagcgccgcggatatgccgcttgcgaaaatgcacggtgcgttttcaacgaacgtcgtagcaagcaaagaacttcaacagccaggcagtgcacgaagcacgcgacatcttgaaattgaacttccaaaagaagcttcttatcaagaaggagatcatttaggtgttattcctcgcaactatgaaggaatagtaaaccgtgtaacagcaaggttcggcctaagcgcatcacagcaaatccgtctggaagcagaagaagaaaaattagctcatttgccactcgctaaaacagtatccgtagaagagcttctgcaatacgtggagcttcaagatcctgttacgcgcacgcagcttcgcgcaatggctgctaaaacggtctgcccgccgcataaagtagagcttgaagccttgcttgaaaagcaagcctacaaagaacaagtgctggcaaaacgtttaacaatgcttgaactgcttgaaaaatacccggcgtgtgaaatgaaattcagcgaatttatcgcccttctgccaagcatacgcccgcgctattactcgatttcttcatcacctcgtgtcgatgaaaaacaagcaagcatcacggtcagcgttgtctcaggaccggcgtggagcggatatggagaatataaaggaattgcgtcgaactatcttgccgagctgcaagaaggagatacgattacgtgctttatttccacaccgcagtcagaatttacgctgccaaaagaccctgaaacgccgcttatcatggtcggaccgggaacaggcgtcgcgccgtttagaggctttgtgcaggcgcgcaaacagctaaaagaacaaggacagtcacttggagaagcacatttatacttcggctgccgttcacctcatgaagactatctgtatcaagaagagcttgaaaacgcccaaagcgaaggcatcattacgcttcataccgctttttctcgcatgccaaatcagccgaaaacatacgttcagcacgtaatggaacaagacggcaagaaattgattgaacttcttgatcaaggagcgcacttctatatttgcggagacggaagccaaatggcacctgccgttgaagcaacgcttatgaaaagctatgctgacgttcaccaagtgagtgaagcagacgctcgcttatggctgcagcagctagaagaaaaaggccgatacgcaaaagacgtgtgggctggg

SEQ ID NO: 424 - protein, 1049 aa, synthetic construct
  REGION 1..1049: note = variant of P450 oxidase from Bacillus megaterium
MTIKEMPQPKTFGELKNLPLLNTDKPVQALMRIADELGEIFKFEAPGSVTRYLSSQRLIKEACDESRFDKNLSQALKFARDFVGDGLSTSWTHEPNWKKAHNILVPSFSQHAMGRYHAMMVDIAVQLVQKWERLNADEHIEVSEDMTRLTLDTIGLCGFNYRFNSFYRDTPHPFIVSVVRALDEVMNKLQRANPDDPAYDENKRQCQEDIKVMNDYVDKIIADRKARGEQSHDLLTQMLNGKDPETGEPLDDGNIRQQIITFLIAGHQTTSGLLSFALYFLVKNPHVLQKVAEEAARVLVDPVPSYKQVKQLKYVGMVLNEALRLWPVAPMFSLYAKEDTVLGGEYPLTKGDEVMVLVPQLHRDKTIWGDDVEEFRPERFENPSAIPQHAFKPFGNGQRACIGQQFALHEATLVLGMMLKHFDFEDHTNYELVIKESRTLKPEGFVVKAKSKGIPLGGIPSPSTEQSAKKVRKKAENAHNTPLLVLYGSNAGTAEGTARDLADIAMSKGFAPQVATLDSHARNLPREGAVLIVTASYNGHPPDNAKQFVDWLDQASADEVKGVRYSVFGCGDKNWAGTYQKVPAFIDETLAAKGAENIADRGEADASDDFEGTYEEWRDHMWSDVAAYFNLDIENSEDNKSTLSLQFVDSAADMPLAKMHGAFSTNVVASKELQQPGSARSTRHLEIELPKEASYQEGDHLGVIPRNYEGIVNRVTARFGLSASQQIRLEAEEEKLAHLPLAKTVSVEELLQYVELQDPVTRTQLRAMAAKTVCPPHKVELEALLEKQAYKEQVLAKRLTMLELLEKYPACEMKFSEFIALLPSIRPRYYSISSSPRVDEKQASITVSVVSGPAWSGYGEYKGIASNYLAELQEGDTITCFISTPQSEFTLPKDPETPLIMVGPGTGVAPFRGFVQARKQLKEQGQSLGEAHLYFGCRSPHEDYLYQEELENAQSEGIITLHTAFSRMPNQPKTYVQHVMEQDGKKLIELLDQGAHFYICGDGSQMAPAVEATLMKSYADVHQVSEADARLWLQQLEEKGRYAKDVWAG

SEQ ID NO: 425 - DNA, 3147 bp, synthetic construct
  misc_feature 1..3147: note = variant of P450 oxidase from Bacillus megaterium
  source 1..3147: mol_type = other DNA
atgacaattaaggaaatgcctcagcctaagacgtttggagaacttaaaaatttaccgttattaaacacagataaaccggttcaagctttgatgcgtattgcggatgaattaggagaaatctttaaattcgaggcgcctggtagcgtaacgcgctatttatcaagtcagcgtctaattaaagaagcatgcgatgaatcacgctttgataaaaacttaagtcaagcgcttaaatttgcacgtgattttgttggagacgggttatctacaagctggacgcatgaaccgaattggaaaaaagcgcataatatcttagttccaagctttagtcagcatgcaatggggcgttatcatgcgatgatggtcgatatcgccgtgcagcttgttcaaaagtgggagcgtctaaatgcagatgagcatattgaagtatcggaagacatgacacgtttaacgcttgatacaattggtctttgcggctttaactatcgctttaacagcttttaccgagatcagcctcatccatttattgtgagtgtggttcgtgcactggatgaagtaatgaacaagctgcagcgagcaaatccagacgacccagcttatgatgaaaacaagcgccagtgtcaagaagatatcaaggtgatgaacgactatgtagataaaattattgcagatcgcaaagcaaggggtgaacaaagtcatgatttattaacgcagatgctaaacggaaaagatccagaaacgggtgagccgcttgatgacgggaacattcgtcagcaaattattacattcttaattgcgggacaccaaacaacaagtggtcttttatcatttgcgctgtatttcttagtgaaaaatccacatgtattacaaaaagtagcagaagaagcagcacgagttctagtagatcctgttccaagctacaaacaagtcaaacagcttaaatatgttggcatggtcttaaacgaagcgctgcgcttatggccagtagcgcctatgttttccctatatgcaaaagaagatacggtgcttggaggagaatatcctttaacgaaaggcgacgaagtaatggttctggtgcctcagcttcaccgtgataaaacaatttggggagacgatgtggaggagttccgtccagagcgttttgaaaatccaagtgcgattccgcagcatgcgtttaaaccgtttggaaacggtcagcgtgcgtgtatcggtcagcagttcgctcttcatgaagcaacgctggtacttggtatgatgctaaaacactttgactttgaagatcatacaaactacgagctcgttattaaagaatcgcggacgttaaaacctgaaggctttgtggtaaaagcaaaatcgaaaggcattccgcttggcggtattccttcacctagcactgaacagtctgctaaaaaagtacgcaaaaaggcagaaaacgctcataatacgccgctgcttgtgctatacggttcaaatgcgggaacagctgaaggaacggcgcgtgatttagcagatattgcaatgagcaaaggatttgcaccgcaggtcgcaacgcttgattcacacgccagaaatcttccgcgcgaaggagctgtattaattgtaacggcgtcttataacggtcatccgcctgataacgcaaagcaatttgtcgactggttagaccaagcgtctgctgatgaagtaaaaggcgttcgctactccgtatttggatgcggcgataaaaattgggcggggacgtatcaaaaagtgcctgcttttatcgatgaaacgcttgccgctaaaggggcagaaaacatcgctgaccgcggtgaagcagatgcaagcgacgactttgaaggcacatatgaagaatggcgtgatcatatgtggagtgacgtagcagcctactttaacctcgacattgaaaacagtgaagataataaatctactctttcacttcaatttgtcgacagcgccgcggatatgccgcttgcgaaaatgcacggtgcgttttcaacgaacgtcgtagcaagcaaagaacttcaacagaggggcagtgcacgaagcacgcgacatcttgaaattgaacttccaaaagaagcttcttatcaagaaggagatcatttaggtgttattcctcgcaactatgaaggaatagtaaaccgtgtaacagcaaggttcggcctaagcgcatcacagcaaatccgtctggaagcagaagaagaaaaattagctcatttgccactcgctaaaacagtatccgtagaagagcttctgcaatacgtggagcttcaagatcctgttacgcgcacgcagcttcgcgcaatggctgctaaaacggtctgcccgccgcataaagtagagcttgaagccttgcttgaaaagcaagcctacaaagaacaagtgctggcaaaacgtttaacaatgcttgaactgcttgaaaaatacccggcgtgtgaaatgaaattcagcgaatttatcgcccttctgccaagcatacgcccgcgctattactcgatttcttcatcacctcgtgtcgatgaaaaacaagcaagcatcacggtcagcgttgtctcaggaccggcgtggagcggatatggagaatataaaggaattgcgtcgaactatcttgccgagctgcaagaaggagatacgattacgtgctttatttccacaccgcagtcagaatttacgctgccaaaagaccctgaaacgccgcttatcatggtcggaccgggaacaggcgtcgcgccgtttagaggctttgtgcaggcgcgcaaacagctaaaagaacaaggacagtcacttggagaagcacatttatacttcggctgccgttcacctcatgaagactatctgtatcaagaagagcttgaaaacgcccaaagcgaaggcatcattacgcttcataccgctttttctcgcatgccaaatcagccgaaaacatacgttcagcacgtaatggaacaagacggcaagaaattgattgaacttcttgatcaaggagcgcacttctatatttgcggagacggaagccaaatggcacctgccgttgaagcaacgcttatgaaaagctatgctgacgttcaccaagtgagtgaagcagacgctcgcttatggctgcagcagctagaagaaaaaggccgatacgcaaaagacgtgtgggctggg

SEQ ID NO: 426 - protein, 1049 aa, synthetic construct
  REGION 1..1049: note = variant of P450 oxidase from Bacillus megaterium
MTIKEMPQPKTFGELKNLPLLNTDKPVQALMRIADELGEIFKFEAPGSVTRYLSSQRLIKEACDESRFDKNLSQALKFARDFVGDGLSTSWTHEPNWKKAHNILVPSFSQHAMGRYHAMMVDIAVQLVQKWERLNADEHIEVSEDMTRLTLDTIGLCGFNYRFNSFYRDQPHPFIVSVVRALDEVMNKLQRANPDDPAYDENKRQCQEDIKVMNDYVDKIIADRKARGEQSHDLLTQMLNGKDPETGEPLDDGNIRQQIITFLIAGHQTTSGLLSFALYFLVKNPHVLQKVAEEAARVLVDPVPSYKQVKQLKYVGMVLNEALRLWPVAPMFSLYAKEDTVLGGEYPLTKGDEVMVLVPQLHRDKTIWGDDVEEFRPERFENPSAIPQHAFKPFGNGQRACIGQQFALHEATLVLGMMLKHFDFEDHTNYELVIKESRTLKPEGFVVKAKSKGIPLGGIPSPSTEQSAKKVRKKAENAHNTPLLVLYGSNAGTAEGTARDLADIAMSKGFAPQVATLDSHARNLPREGAVLIVTASYNGHPPDNAKQFVDWLDQASADEVKGVRYSVFGCGDKNWAGTYQKVPAFIDETLAAKGAENIADRGEADASDDFEGTYEEWRDHMWSDVAAYFNLDIENSEDNKSTLSLQFVDSAADMPLAKMHGAFSTNVVASKELQQRGSARSTRHLEIELPKEASYQEGDHLGVIPRNYEGIVNRVTARFGLSASQQIRLEAEEEKLAHLPLAKTVSVEELLQYVELQDPVTRTQLRAMAAKTVCPPHKVELEALLEKQAYKEQVLAKRLTMLELLEKYPACEMKFSEFIALLPSIRPRYYSISSSPRVDEKQASITVSVVSGPAWSGYGEYKGIASNYLAELQEGDTITCFISTPQSEFTLPKDPETPLIMVGPGTGVAPFRGFVQARKQLKEQGQSLGEAHLYFGCRSPHEDYLYQEELENAQSEGIITLHTAFSRMPNQPKTYVQHVMEQDGKKLIELLDQGAHFYICGDGSQMAPAVEATLMKSYADVHQVSEADARLWLQQLEEKGRYAKDVWAG

SEQ ID NO: 427 - DNA, 3147 bp, synthetic construct
  misc_feature 1..3147: note = variant of P450 oxidase from Bacillus megaterium
  source 1..3147: mol_type = other DNA
atgacaattaaggaaatgcctcagcctaagacgtttggagaacttaaaaatttaccgttattaaacacagataaaccggttcaagctttgatgcgtattgcggatgaattaggagaaatctttaaattcgaggcgcctggtagcgtaacgcgctatttatcaagtcagcgtctaattaaagaagcatgcgatgaatcacgctttgataaaaacttaagtcaagcgcttaaatttgcacgtgattttgttggagacgggttatctacaagctggacgcatgaaccgaattggaaaaaagcgcataatatcttagttccaagctttagtcagcatgcaatggggcgttatcatgcgatgatggtcgatatcgccgtgcagcttgttcaaaagtgggagcgtctaaatgcagatgagcatattgaagtatcggaagacatgacacgtttaacgcttgatacaattggtctttgcggctttaactatcgctttaacagcttttaccgagatcagcctcatccatttattgtgagtgtggttcgtgcactggatgaagtaatgaacaagctgcagcgagcaaatccagacgacccagcttatgatgaaaacaagcgccagtgtcaagaagatatcaaggtgatgaacgactatgtagataaaattattgcagatcgcaaagcaaggggtgaacaaagtcatgatttattaacgcagatgctaaacggaaaagatccagaaacgggtgagccgcttgatgacgggaacattcgtcagcaaattattacattcttaattgcgggacaccaaacaacaagtggtcttttatcatttgcgctgtatttcttagtgaaaaatccacatgtattacaaaaagtagcagaagaagcagcacgagttctagtagatcctgttccaagctacaaacaagtcaaacagcttaaatatgttggcatggtcttaaacgaagcgctgcgcttatggccagtagcgcctatgttttccctatatgcaaaagaagatacggtgcttggaggagaatatcctttaacgaaaggcgacgaagtaatggttctggtgcctcagcttcaccgtgataaaacaatttggggagacgatgtggaggagttccgtccagagcgttttgaaaatccaagtgcgattccgcagcatgcgtttaaaccgtttggaaacggtcagcgtgcgtgtatcggtcagcagttcgctcttcatgaagcaacgctggtacttggtatgatgctaaaacactttgactttgaagatcatacaaactacgagctcgttattaaagaatcgcggacgttaaaacctgaaggctttgtggtaaaagcaaaatcgaaaggcattccgcttggcggtattccttcacctagcactgaacagtctgctaaaaaagtacgcaaaaaggcagaaaacgctcataatacgccgctgcttgtgctatacggttcaaatgcgggaacagctgaaggaacggcgcgtgatttagcagatattgcaatgagcaaaggatttgcaccgcaggtcgcaacgcttgattcacacgccagaaatcttccgcgcgaaggagctgtattaattgtaacggcgtcttataacggtcatccgcctgataacgcaaagcaatttgtcgactggttagaccaagcgtctgctgatgaagtaaaaggcgttcgctactccgtatttggatgcggcgataaaaattgggcggggacgtatcaaaaagtgcctgcttttatcgatgaaacgcttgccgctaaaggggcagaaaacatcgctgaccgcggtgaagcagatgcaagcgacgactttgaaggcacatatgaagaatggcgtgatcatatgtggagtgacgtagcagcctactttaacctcgacattgaaaacagtgaagataataaatctactctttcacttcaatttgtcgacagcgccgcggatatgccgcttgcgaaaatgcacggtgcgttttcaacgaacgtcgtagcaagcaaagaacttcaacagccaggcagtgcacgaagcacgcgacatcttgaaattgaacttccaaaagaagcttcttatcaagaaggagatcatttaggtgttattcctcgcaactatgaaggaatagtaaaccgtgtaacagcaaggttcggcctaagcgcatcacagcaaatccgtctggaagcagaagaagaaaaattagctcatttgccactcgctaaaacagtatccgtagaagagcttctgcaatacgtggagcttcaagatcctgttacgcgcacgcagcttcgcgcaatggctgctaaaacggtctgcccgccgcataaagtagagcttgaagccttgcttgaaaagcaagcctacaaagaacaagtgctggcaaaacgtttaacaatgcttgaactgcttgaaaaatacccggcgtgtgaaatgattttcagcgaatttatcgcccttctgccaagcatacgcccgcgctattactcgatttcttcatcacctcgtgtcgatgaaaaacaagcaagcatcacggtcagcgttgtctcaggaccggcgtggagcggatatggagaatataaaggaattgcgtcgaactatcttgccgagctgcaagaaggagatacgattacgtgctttatttccacaccgcagtcagaatttacgctgccaaaagaccctgaaacgccgcttatcatggtcggaccgggaacaggcgtcgcgccgtttagaggctttgtgcaggcgcgcaaacagctaaaagaacaaggacagtcacttggagaagcacatttatacttcggctgccgttcacctcatgaagactatctgtatcaagaagagcttgaaaacgcccaaagcgaaggcatcattacgcttcataccgctttttctcgcatgccaaatcagccgaaaacatacgttcagcacgtaatggaacaagacggcaagaaattgattgaacttcttgatcaaggagcgcacttctatatttgcggagacggaagccaaatggcacctgccgttgaagcaacgcttatgaaaagctatgctgacgttcaccaagtgagtgaagcagacgctcgcttatggctgcagcagctagaagaaaaaggccgatacgcaaaagacgtgtgggctggg

SEQ ID NO: 428 - protein, 1049 aa, synthetic construct
  REGION 1..1049: note = variant of P450 oxidase from Bacillus megaterium
MTIKEMPQPKTFGELKNLPLLNTDKPVQALMRIADELGEIFKFEAPGSVTRYLSSQRLIKEACDESRFDKNLSQALKFARDFVGDGLSTSWTHEPNWKKAHNILVPSFSQHAMGRYHAMMVDIAVQLVQKWERLNADEHIEVSEDMTRLTLDTIGLCGFNYRFNSFYRDQPHPFIVSVVRALDEVMNKLQRANPDDPAYDENKRQCQEDIKVMNDYVDKIIADRKARGEQSHDLLTQMLNGKDPETGEPLDDGNIRQQIITFLIAGHQTTSGLLSFALYFLVKNPHVLQKVAEEAARVLVDPVPSYKQVKQLKYVGMVLNEALRLWPVAPMFSLYAKEDTVLGGEYPLTKGDEVMVLVPQLHRDKTIWGDDVEEFRPERFENPSAIPQHAFKPFGNGQRACIGQQFALHEATLVLGMMLKHFDFEDHTNYELVIKESRTLKPEGFVVKAKSKGIPLGGIPSPSTEQSAKKVRKKAENAHNTPLLVLYGSNAGTAEGTARDLADIAMSKGFAPQVATLDSHARNLPREGAVLIVTASYNGHPPDNAKQFVDWLDQASADEVKGVRYSVFGCGDKNWAGTYQKVPAFIDETLAAKGAENIADRGEADASDDFEGTYEEWRDHMWSDVAAYFNLDIENSEDNKSTLSLQFVDSAADMPLAKMHGAFSTNVVASKELQQPGSARSTRHLEIELPKEASYQEGDHLGVIPRNYEGIVNRVTARFGLSASQQIRLEAEEEKLAHLPLAKTVSVEELLQYVELQDPVTRTQLRAMAAKTVCPPHKVELEALLEKQAYKEQVLAKRLTMLELLEKYPACEMIFSEFIALLPSIRPRYYSISSSPRVDEKQASITVSVVSGPAWSGYGEYKGIASNYLAELQEGDTITCFISTPQSEFTLPKDPETPLIMVGPGTGVAPFRGFVQARKQLKEQGQSLGEAHLYFGCRSPHEDYLYQEELENAQSEGIITLHTAFSRMPNQPKTYVQHVMEQDGKKLIELLDQGAHFYICGDGSQMAPAVEATLMKSYADVHQVSEADARLWLQQLEEKGRYAKDVWAG

SEQ ID NO: 429 - DNA, 3147 bp, synthetic construct
  misc_feature 1..3147: note = variant of P450 oxidase from Bacillus megaterium
  source 1..3147: mol_type = other DNA
atgacaattaaggaaatgcctcagcctaagacgtttggagaacttaaaaatttaccgttattaaacacagataaaccggttcaagctttgatgcgtattgcggatgaattaggagaaatctttaaattcgaggcgcctggtagcgtaacgcgctatttatcaagtcagcgtctaattaaagaagcatgcgatgaatcacgctttgataaaaacttaagtcaagcgcttaaatttgcacgtgattttgttggagacgggttatctacaagctggacgcatgaaccgaattggaaaaaagcgcataatatcttagttccaagctttagtcagcatgcaatggggcgttatcatgcgatgatggtcgatatcgccgtgcagcttgttcaaaagtgggagcgtctaaatgcagatgagcatattgaagtatcggaagacatgacacgtttaacgcttgatacaattggtctttgcggctttaactatcgctttaacagcttttaccgagatcagcctcatccatttattgtgagtgtggttcgtgcactggatgaagtaatgaacaagctgcagcgagcaaatccagacgacccagcttatgatgaaaacaagcgccagtgtcaagaagatatcaaggtgatgaacgactatgtagataaaattattgcagatcgcaaagcaaggggtgaacaaagtcatgatttattaacgcagatgctaaacggaaaagatccagaaacgggtgagccgcttgatgacgggaacattcgtcagcaaattattacattcttaattgcgggacaccaaacaacaagtggtcttttatcatttgcgctgtatttcttagtgaaaaatccacatgtattacaaaaagtagcagaagaagcagcacgagttctagtagatcctgttccaagctacaaacaagtcaaacagcttaaatatgttggcatggtcttaaacgaagcgctgcgcttatggccagtagcgcctatgttttccctatatgcaaaagaagatacggtgcttggaggagaatatcctttaacgaaaggcgacgaagtaatggttctggtgcctcagcttcaccgtgataaaacaatttggggagacgatgtggaggagttccgtccagagcgttttgaaaatccaagtgcgattccgcagcatgcgtttaaaccgtttggaaacggtcagcgtgcgtgtatcggtcagcagttcgctcttcatgaagcaacgctggtacttggtatgatgctaaaacactttgactttgaagatcatacaaactacgagctcgttattaaagaatcgcggacgttaaaacctgaaggctttgtggtaaaagcaaaatcgaaaggcattccgcttggcggtattccttcacctagcactgaacagtctgctaaaaaagtacgcaaaaaggcagaaaacgctcataatacgccgctgcttgtgctatacggttcaaatgcgggaacagctgaaggaacggcgcgtgatttagcagatattgcaatgagcaaaggatttgcaccgcaggtcgcaacgcttgattcacacgccagaaatcttccgcgcgaaggagctgtattaattgtaacggcgtcttataacggtcatccgcctgataacgcaaagcaatttgtcgactggttagaccaagcgtctgctgatgaagtaaaaggcgttcgctactccgtatttggatgcggcgataaaaattgggcggggacgtatcaaaaagtgcctgcttttatcgatgaaacgcttgccgctaaaggggcagaaaacatcgctgaccgcggtgaagcagatgcaagcgacgactttgaaggcacatatgaagaatggcgtgatcatatgtggagtgacgtagcagcctactttaacctcgacattgaaaacagtgaagataataaatctactctttcacttcaatttgtcgacagcgccgcggatatgccgcttgcgaaaatgcacggtgcgttttcaacgaacgtcgtagcaagcaaagaacttcaacagccaggcagtgcacgaagcacgcgacatcttgaaattgaacttccaaaagaagcttcttatcaagaaggagatcatttaggtgttattcctcgcaactatgaaggaatagtaaaccgtgtaacagcaaggttcggcctaagcgcatcacagcaaatccgtctggaagcagaagaagaaaaattagctcatttgccactcgctaaaacagtatccgtagaagagcttctgcaatacgtggagcttcaagatcctgttacgcgcacgcagcttcgcgcaatggctgctaaaacggtctgcccgccgcataaagtagagcttgaagccttgcttgaaaagcaagcctacaaagaacaagtgctggcaaaacgtttaacaatgcttgaactgcttgaaaaatacccggcgtgtgaaatgaaattcagcgaatttatcgcccttctgccaagcatacgcccgcgctattactcgatttcttcatcacctcgtgtcgatgaaaaacaagcaagcatcacggtcagcgttgtctcaggaccggcgtggagcggatatggagaatataaaggaattgcgtcgaactatcttgccgagctgcaagaaggagatacgattacgtgctttatttccacaccgcagtcagaatttacgctgccaaaagaccctgaaacgccgcttatcatggtcggaccgggaacaggcgtcgcgccgtttagaggctttgtgcaggcgcgcaaacagctaaaagaacaaggacagtcacttggagaagcacatttatacttcggctgccgttcacctcatgaagactatctgtatcaagaagagcttgaaaacgcccaaagcgaaggcatcattacgcttcataccgctttttctcgcatggagaatcagccgaaaacatacgttcagcacgtaatggaacaagacggcaagaaattgattgaacttcttgatcaaggagcgcacttctatatttgcggagacggaagccaaatggcacctgccgttgaagcaacgcttatgaaaagctatgctgacgttcaccaagtgagtgaagcagacgctcgcttatggctgcagcagctagaagaaaaaggccgatacgcaaaagacgtgtgggctggg

SEQ ID NO: 430 - protein, 1049 aa, synthetic construct
  REGION 1..1049: note = variant of P450 oxidase from Bacillus megaterium
MTIKEMPQPKTFGELKNLPLLNTDKPVQALMRIADELGEIFKFEAPGSVTRYLSSQRLIKEACDESRFDKNLSQALKFARDFVGDGLSTSWTHEPNWKKAHNILVPSFSQHAMGRYHAMMVDIAVQLVQKWERLNADEHIEVSEDMTRLTLDTIGLCGFNYRFNSFYRDQPHPFIVSVVRALDEVMNKLQRANPDDPAYDENKRQCQEDIKVMNDYVDKIIADRKARGEQSHDLLTQMLNGKDPETGEPLDDGNIRQQIITFLIAGHQTTSGLLSFALYFLVKNPHVLQKVAEEAARVLVDPVPSYKQVKQLKYVGMVLNEALRLWPVAPMFSLYAKEDTVLGGEYPLTKGDEVMVLVPQLHRDKTIWGDDVEEFRPERFENPSAIPQHAFKPFGNGQRACIGQQFALHEATLVLGMMLKHFDFEDHTNYELVIKESRTLKPEGFVVKAKSKGIPLGGIPSPSTEQSAKKVRKKAENAHNTPLLVLYGSNAGTAEGTARDLADIAMSKGFAPQVATLDSHARNLPREGAVLIVTASYNGHPPDNAKQFVDWLDQASADEVKGVRYSVFGCGDKNWAGTYQKVPAFIDETLAAKGAENIADRGEADASDDFEGTYEEWRDHMWSDVAAYFNLDIENSEDNKSTLSLQFVDSAADMPLAKMHGAFSTNVVASKELQQPGSARSTRHLEIELPKEASYQEGDHLGVIPRNYEGIVNRVTARFGLSASQQIRLEAEEEKLAHLPLAKTVSVEELLQYVELQDPVTRTQLRAMAAKTVCPPHKVELEALLEKQAYKEQVLAKRLTMLELLEKYPACEMKFSEFIALLPSIRPRYYSISSSPRVDEKQASITVSVVSGPAWSGYGEYKGIASNYLAELQEGDTITCFISTPQSEFTLPKDPETPLIMVGPGTGVAPFRGFVQARKQLKEQGQSLGEAHLYFGCRSPHEDYLYQEELENAQSEGIITLHTAFSRMENQPKTYVQHVMEQDGKKLIELLDQGAHFYICGDGSQMAPAVEATLMKSYADVHQVSEADARLWLQQLEEKGRYAKDVWAG

SEQ ID NO: 431 - DNA, 3147 bp, synthetic construct
  misc_feature 1..3147: note = variant of P450 oxidase from Bacillus megaterium
  source 1..3147: mol_type = other DNA
atgacaattaaggaaatgcctcagcctaagacgtttggagaacttaaaaatttaccgttattaaacacagataaaccggttcaagctttgatgcgtattgcggatgaattaggagaaatctttaaattcgaggcgcctggtagcgtaacgcgctatttatcaagtcagcgtctaattaaagaagcatgcgatgaatcacgctttgataaaaacttaagtcaagcgcttaaatttgcacgtgattttgttggagacgggttatctacaagctggacgcatgaaccgaattggaaaaaagcgcataatatcttagttccaagctttagtcagcatgcaatggggcgttatcatgcgatgatggtcgatatcgccgtgcagcttgttcaaaagtgggagcgtctaaatgcagatgagcatattgaagtatcggaagacatgacacgtttaacgcttgatacaattggtctttgcggctttaactatcgctttaacagcttttaccgagatcagcctcatccatttattgtgagtgtggttcgtgcactggatgaagtaatgaacaagctgcagcgagcaaatccagacgacccagcttatgatgaaaacaagcgccagtgtcaagaagatatcaaggtgatgaacgactatgtagataaaattattgcagatcgcaaagcaaggggtgaacaaagtcatgatttattaacgcagatgctaaacggaaaagatccagaaacgggtgagccgcttgatgacgggaacattcgtcagcaaattattacattcttaattgcgggacaccaaacaacaagtggtcttttatcatttgcgctgtatttcttagtgaaaaatccacatgtattacaaaaagtagcagaagaagcagcacgagttctagtagatcctgttccaagctacaaacaagtcaaacagcttaaatatgttggcatggtcttaaacgaagcgctgcgcttatggccagtagcgcctatgttttccctatatgcaaaagaagatacggtgcttggaggagaatatcctttaacgaaaggcgacgaagtaatggttctggtgcctcagcttcaccgtgataaaacaatttggggagacgatgtggaggagttccgtccagagcgttttgaaaatccaagtgcgattccgcagcatgcgtttaaaccgtttggaaacggtcagcgtgcgtgtatcggtcagcagttcgctcttcatgaagcaacgctggtacttggtatgatgctaaaacactttgactttgaagatcatacaaactacgagctcgttattaaagaatcgcggacgttaaaacctgaaggctttgtggtaaaagcaaaatcgaaaggcattccgcttggcggtattccttcacctagcactgaacagtctgctaaaaaagtacgcaaaaaggcagaaaacgctcataatacgccgctgcttgtgctatacggttcaaatgcgggaacagctgaaggaacggcgcgtgatttagcagatattgcaatgagcaaaggatttgcaccgcaggtcgcaacgcttgattcacacgccagaaatcttccgcgcgaaggagctgtattaattgtaacggcgtcttataacggtcatccgcctgataacgcaaagcaatttgtcgactggttagaccaagcgtctgctgatgaagtaaaaggcgttcgctactccgtatttggatgcggcgataaaaattgggcggggacgtatcaaaaagtgcctgcttttatcgatgaaacgcttgccgctaaaggggcagaaaacatcgctgaccgcggtgaagcagatgcaagcgacgactttgaaggcacatatgaagaatggcgtgatcatatgtggagtgacgtagcagcctactttaacctcgacattgaaaacagtgaagataataaatctactctttcacttcaatttgtcgacagcgccgcggatatgccgcttgcgaaaatgcacggtgcgttttcaacgaacgtcgtagcaagcaaagaacttcaacagccaggcagtgcacgaagcacgcgacatcttgaaattgaacttccaaaagaagcttcttatcaagaaggagatcatttaggtgttattcctcgcaactatgaaggaatagtaaaccgtgtaacagcaaggttcggcctaagcgcatcacagcaaatccgtctggaagcagaagaagaaaaattagctcatttgccactcgctaaaacagtatccgtagaagagcttctgcaatacgtggagcttcaagatcctgttacgcgcacgcagcttcgcgcaatggctgctaaaacggtctgcccgccgcataaagtagagcttgaagccttgcttgaaaagcaagcctacaaagaacaagtgctggcaaaacgtttaacaatgcttgaactgcttgaaaaatacccggcgtgtgaaatgaaattcagcgaatttatcgcccttctgccaagcatacgcccgcgctattactcgatttcttcatcacctcgtgtcgatgaaaaacaagcaagcatcacggtcagcgttgtctcaggaccggcgtggagcggatatggagaatataaaggaattgcgtcgaactatcttgccgagctgcaagaaggagatacgattacgtgctttatttccacaccgcagtcagggtttacgctgccaaaagaccctgaaacgccgcttatcatggtcggaccgggaacaggcgtcgcgccgtttagaggctttgtgcaggcgcgcaaacagctaaaagaacaaggacagtcacttggagaagcacatttatacttcggctgccgttcacctcatgaagactatctgtatcaagaagagcttgaaaacgcccaaagcgaaggcatcattacgcttcataccgctttttctcgcatgccaaatcagccgaaaacatacgttcagcacgtaatggaacaagacggcaagaaattgattgaacttcttgatcaaggagcgcacttctatatttgcggagacggaagccaaatggcacctgccgttgaagcaacgcttatgaaaagctatgctgacgttcaccaagtgagtgaagcagacgctcgcttatggctgcagcagctagaagaaaaaggccgatacgcaaaagacgtgtgggctggg

SEQ ID NO: 432 - protein, 1049 aa, synthetic construct
  REGION 1..1049: note = variant of P450 oxidase from Bacillus megaterium
MTIKEMPQPKTFGELKNLPLLNTDKPVQALMRIADELGEIFKFEAPGSVTRYLSSQRLIKEACDESRFDKNLSQALKFARDFVGDGLSTSWTHEPNWKKAHNILVPSFSQHAMGRYHAMMVDIAVQLVQKWERLNADEHIEVSEDMTRLTLDTIGLCGFNYRFNSFYRDQPHPFIVSVVRALDEVMNKLQRANPDDPAYDENKRQCQEDIKVMNDYVDKIIADRKARGEQSHDLLTQMLNGKDPETGEPLDDGNIRQQIITFLIAGHQTTSGLLSFALYFLVKNPHVLQKVAEEAARVLVDPVPSYKQVKQLKYVGMVLNEALRLWPVAPMFSLYAKEDTVLGGEYPLTKGDEVMVLVPQLHRDKTIWGDDVEEFRPERFENPSAIPQHAFKPFGNGQRACIGQQFALHEATLVLGMMLKHFDFEDHTNYELVIKESRTLKPEGFVVKAKSKGIPLGGIPSPSTEQSAKKVRKKAENAHNTPLLVLYGSNAGTAEGTARDLADIAMSKGFAPQVATLDSHARNLPREGAVLIVTASYNGHPPDNAKQFVDWLDQASADEVKGVRYSVFGCGDKNWAGTYQKVPAFIDETLAAKGAENIADRGEADASDDFEGTYEEWRDHMWSDVAAYFNLDIENSEDNKSTLSLQFVDSAADMPLAKMHGAFSTNVVASKELQQPGSARSTRHLEIELPKEASYQEGDHLGVIPRNYEGIVNRVTARFGLSASQQIRLEAEEEKLAHLPLAKTVSVEELLQYVELQDPVTRTQLRAMAAKTVCPPHKVELEALLEKQAYKEQVLAKRLTMLELLEKYPACEMKFSEFIALLPSIRPRYYSISSSPRVDEKQASITVSVVSGPAWSGYGEYKGIASNYLAELQEGDTITCFISTPQSGFTLPKDPETPLIMVGPGTGVAPFRGFVQARKQLKEQGQSLGEAHLYFGCRSPHEDYLYQEELENAQSEGIITLHTAFSRMPNQPKTYVQHVMEQDGKKLIELLDQGAHFYICGDGSQMAPAVEATLMKSYADVHQVSEADARLWLQQLEEKGRYAKDVWAG

SEQ ID NO: 433 - DNA, 3147 bp, synthetic construct
  misc_feature 1..3147: note = variant of P450 oxidase from Bacillus megaterium
  source 1..3147: mol_type = other DNA
atgacaattaaggaaatgcctcagcctaagacgtttggagaacttaaaaatttaccgttattaaacacagataaaccggttcaagctttgatgcgtattgcggatgaattaggagaaatctttaaattcgaggcgcctggtagcgtaacgcgctatttatcaagtcagcgtctaattaaagaagcatgcgatgaatcacgctttgataaaaacttaagtcaagcgcttaaatttgcacgtgattttgttggagacgggttatctacaagctggacgcatgaaccgaattggaaaaaagcgcataatatcttagttccaagctttagtcagcatgcaatggggcgttatcatgcgatgatggtcgatatcgccgtgcagcttgttcaaaagtgggagcgtctaaatgcagatgagcatattgaagtatcggaagacatgacacgtttaacgcttgatacaattggtctttgcggctttaactatcgctttaacagcttttaccgagatcagcctcatccatttattgtgagtgtggttcgtgcactggatgaagtaatgaacaagctgcagcgagcaaatccagacgacccagcttatgatgaaaacaagcgccagtgtcaagaagatatcaaggtgatgaacgactatgtagataaaattattgcagatcgcaaagcaaggggtgaacaaagtcatgatttattaacgcagatgctaaacggaaaagatccagaaacgggtgagccgcttgatgacgggaacattcgtcagcaaattattacattcttaattgcgggacaccaaacaacaagtggtcttttatcatttgcgctgtatttcttagtgaaaaatccacatgtattacaaaaagtagcagaagaagcagcacgagttctagtagatcctgttccaagctacaaacaagtcaaacagcttaaatatgttggcatggtcttaaacgaagcgctgcgcttatggccagtagcgcctatgttttccctatatgcaaaagaagatacggtgcttggaggagaatatcctttaacgaaaggcgacgaagtaatggttctggtgcctcagcttcaccgtgataaaacaatttggggagacgatgtggaggagttccgtccagagcgttttgaaaatccaagtgcgattccgcagcatgcgtttaaaccgtttggaaacggtcagcgtgcgtgtatcggtcagcagttcgctcttcatgaagcaacgctggtacttggtatgatgctaaaacactttgactttgaagatcatacaaactacgagctcgttattaaagaatcgcggacgttaaaacctgaaggctttgtggtaaaagcaaaatcgaaaggcattccgcttggcggtattccttcacctagcactgaacagtctgctaaaaaagtacgcaaaaaggcagaaaacgctcataatacgccgctgcttgtgctatacggttcaaatgcgggaacagctgaaggaacggcgcgtgatttagcagatattgcaatgagcaaaggatttgcaccgcaggtcgcaacgcttgattcacacgccagaaatcttccgcgcgaaggagctgtattaattgtaacggcgtcttataacggtcatccgcctgataacgcaaagcaatttgtcgactggttagaccaagcgtctgctgatgaagtaaaaggcgttcgctactccgtatttggatgcggcgataaaaattgggcggggacgtatcaaaaagtgcctgcttttatcgatgaaacgcttgccgctaaaggggcagaaaacatcgctgaccgcggtgaagcagatgcaagcgacgactttgaaggcacatatgaagaatggcgtgatcatatgtggagtgacgtagcagcctactttaacctcgacattgaaaacagtgaagataataaatctactctttcacttcaatttgtcgacagcgccgcggatatgccgcttgcgaaaatgcacggtgcgttttcaacgaacgtcgtagcaagcaaagaacttcaacagccaggcagtgcacgaagcacgcgacatcttgaaattgaacttccaaaagtggcttcttatcaagaaggagatcatttaggtgttattcctcgcaactatgaaggaatagtaaaccgtgtaacagcaaggttcggcctaagcgcatcacagcaaatccgtctggaagcagaagaagaaaaattagctcatttgccactcgctaaaacagtatccgtagaagagcttctgcaatacgtggagcttcaagatcctgttacgcgcacgcagcttcgcgcaatggctgctaaaacggtctgcccgccgcataaagtagagcttgaagccttgcttgaaaagcaagcctacaaagaacaagtgctggcaaaacgtttaacaatgcttgaactgcttgaaaaatacccggcgtgtgaaatgaaattcagcgaatttatcgcccttctgccaagcatacgcccgcgctattactcgatttcttcatcacctcgtgtcgatgaaaaacaagcaagcatcacggtcagcgttgtctcaggaccggcgtggagcggatatggagaatataaaggaattgcgtcgaactatcttgccgagctgcaagaaggagatacgattacgtgctttatttccacaccgcagtcagaatttacgctgccaaaagaccctgaaacgccgcttatcatggtcggaccgggaacaggcgtcgcgccgtttagaggctttgtgcaggcgcgcaaacagctaaaagaacaaggacagtcacttggagaagcacatttatacttcggctgccgttcacctcatgaagactatctgtatcaagaagagcttgaaaacgcccaaagcgaaggcatcattacgcttcataccgctttttctcgcatgccaaatcagccgaaaacatacgttcagcacgtaatggaacaagacggcaagaaattgattgaacttcttgatcaaggagcgcacttctatatttgcggagacggaagccaaatggcacctgccgttgaagcaacgcttatgaaaagctatgctgacgttcaccaagtgagtgaagcagacgctcgcttatggctgcagcagctagaagaaaaaggccgatacgcaaaagacgtgtgggctggg

SEQ ID NO: 434 - protein, 1049 aa, synthetic construct
  REGION 1..1049: note = variant of P450 oxidase from Bacillus megaterium
MTIKEMPQPKTFGELKNLPLLNTDKPVQALMRIADELGEIFKFEAPGSVTRYLSSQRLIKEACDESRFDKNLSQALKFARDFVGDGLSTSWTHEPNWKKAHNILVPSFSQHAMGRYHAMMVDIAVQLVQKWERLNADEHIEVSEDMTRLTLDTIGLCGFNYRFNSFYRDQPHPFIVSVVRALDEVMNKLQRANPDDPAYDENKRQCQEDIKVMNDYVDKIIADRKARGEQSHDLLTQMLNGKDPETGEPLDDGNIRQQIITFLIAGHQTTSGLLSFALYFLVKNPHVLQKVAEEAARVLVDPVPSYKQVKQLKYVGMVLNEALRLWPVAPMFSLYAKEDTVLGGEYPLTKGDEVMVLVPQLHRDKTIWGDDVEEFRPERFENPSAIPQHAFKPFGNGQRACIGQQFALHEATLVLGMMLKHFDFEDHTNYELVIKESRTLKPEGFVVKAKSKGIPLGGIPSPSTEQSAKKVRKKAENAHNTPLLVLYGSNAGTAEGTARDLADIAMSKGFAPQVATLDSHARNLPREGAVLIVTASYNGHPPDNAKQFVDWLDQASADEVKGVRYSVFGCGDKNWAGTYQKVPAFIDETLAAKGAENIADRGEADASDDFEGTYEEWRDHMWSDVAAYFNLDIENSEDNKSTLSLQFVDSAADMPLAKMHGAFSTNVVASKELQQPGSARSTRHLEIELPKVASYQEGDHLGVIPRNYEGIVNRVTARFGLSASQQIRLEAEEEKLAHLPLAKTVSVEELLQYVELQDPVTRTQLRAMAAKTVCPPHKVELEALLEKQAYKEQVLAKRLTMLELLEKYPACEMKFSEFIALLPSIRPRYYSISSSPRVDEKQASITVSVVSGPAWSGYGEYKGIASNYLAELQEGDTITCFISTPQSEFTLPKDPETPLIMVGPGTGVAPFRGFVQARKQLKEQGQSLGEAHLYFGCRSPHEDYLYQEELENAQSEGIITLHTAFSRMPNQPKTYVQHVMEQDGKKLIELLDQGAHFYICGDGSQMAPAVEATLMKSYADVHQVSEADARLWLQQLEEKGRYAKDVWAG

SEQ ID NO: 435 - DNA, 3147 bp, synthetic construct
  misc_feature 1..3147: note = variant of P450 oxidase from Bacillus megaterium
  source 1..3147: mol_type = other DNA
atgacaattaaggaaatgcctcagcctaagacgtttggagaacttaaaaatttaccgttattaaacacagataaaccggttcaagctttgatgcgtattgcggatgaattaggagaaatctttaaattcgaggcgcctggtagcgtaacgcgctatttatcaagtcagcgtctaattaaagaagcatgcgatgaatcacgctttgataaaaacttaagtcaagcgcttaaatttgcacgtgattttgttggagacgggttatctacaagctggacgcatgaaccgaattggaaaaaagcgcataatatcttagttccaagctttagtcagcatgcaatggggcgttatcatgcgatgatggtcgatatcgccgtgcagcttgttcaaaagtgggagcgtctaaatgcagatgagcatattgaagtatcggaagacatgacacgtttaacgcttgatacaattggtctttgcggctttaactatcgctttaacagcttttaccgagattcgcctcatccatttattgtgagtgtggttcgtgcactggatgaagtaatgaacaagctgcagcgagcaaatccagacgacccagcttatgatgaaaacaagcgccagtgtcaagaagatatcaaggtgatgaacgactatgtagataaaattattgcagatcgcaaagcaaggggtgaacaaagtcatgatttattaacgcagatgctaaacggaaaagatccagaaacgggtgagccgcttgatgacgggaacattcgtcagcaaattattacattcttaattgcgggacaccaaacaacaagtggtcttttatcatttgcgctgtatttcttagtgaaaaatccacatgtattacaaaaagtagcagaagaagcagcacgagttctagtagatcctgttccaagctacaaacaagtcaaacagcttaaatatgttggcatggtcttaaacgaagcgctgcgcttatggccagtagcgcctatgttttccctatatgcaaaagaagatacggtgcttggaggagaatatcctttaacgaaaggcgacgaagtaatggttctggtgcctcagcttcaccgtgataaaacaatttggggagacgatgtggaggagttccgtccagagcgttttgaaaatccaagtgcgattccgcagcatgcgtttaaaccgtttggaaacggtcagcgtgcgtgtatcggtcagcagttcgctcttcatgaagcaacgctggtacttggtatgatgctaaaacactttgactttgaagatcatacaaactacgagctcgttattaaagaatcgcggacgttaaaacctgaaggctttgtggtaaaagcaaaatcgaaaggcattccgcttggcggtattccttcacctagcactgaacagtctgctaaaaaagtacgcaaaaaggcagaaaacgctcataatacgccgctgcttgtgctatacggttcaaatgcgggaacagctgaaggaacggcgcgtgatttagcagatattgcaatgagcaaaggatttgcaccgcaggtcgcaacgcttgattcacacgccagaaatcttccgcgcgaaggagctgtattaattgtaacggcgtcttataacggtcatccgcctgataacgcaaagcaatttgtcgactggttagaccaagcgtctgctgatgaagtaaaaggcgttcgctactccgtatttggatgcggcgataaaaattgggcggggacgtatcaaaaagtgcctgcttttatcgatgaaacgcttgccgctaaaggggcagaaaacatcgctgaccgcggtgaagcagatgcaagcgacgactttgaaggcacatatgaagaatggcgtgatcatatgtggagtgacgtagcagcctactttaacctcgacattgaaaacagtgaagataataaatctactctttcacttcaatttgtcgacagcgccgcggatatgccgcttgcgaaaatgcacggtgcgttttcaacgaacgtcgtagcaagcaaagaacttcaacagccaggcagtgcacgaagcacgcgacatcttgaaattgaacttccaaaagaagcttcttatcaagaaggagatcatttaggtgttattcctcgcaactatgaaggaatagtaaaccgtgtaacagcaaggttcggcctaagcgcatcacagcaaatccgtctggaagcagaagaagaaaaattagctcatttgccactcgctaaaacagtatccgtagaagagcttctgcaatacgtggagcttcaagatcctgttacgcgcacgcagcttcgcgcaatggctgctaaaacggtctgcccgccgcataaagtagagcttgaagccttgcttgaaaagcaagcctacaaagaacaagtgctggcaaaacgtttaacaatgcttgaactgcttgaaaaatacccggcgtgtgaaatgaaattcagcgaatttatcgcccttctgccaagcatacgcccgcgctattactcgatttcttcatcacctcgtgtcgatgaaaaacaagcaagcatcacggtcagcgttgtctcaggaccggcgtggagcggatatggagaatataaaggaattgcgtcgaactatcttgccgagctgcaagaaggagatacgattacgtgctttatttccacaccgcagtcagaatttacgctgccaaaagaccctgaaacgccgcttatcatggtcggaccgggaacaggcgtcgcgccgtttagaggctttgtgcaggcgcgcaaacagctaaaagaacaaggacagtcacttggagaagcacatttatacttcggctgccgttcacctcatgaagactatctgtatcaagaagagcttgaaaacgcccaaagcgaaggcatcattacgcttcataccgctttttctcgcatgccaaatcagccgaaaacatacgttcagcacgtaatggaacaagacggcaagaaattgattgaacttcttgatcaaggagcgcacttctatatttgcggagacggaagccaaatggcacctgccgttgaagcaacgcttatgaaaagctatgctgacgttcaccaagtgagtgaagcagacgctcgcttatggctgcagcagctagaagaaaaaggccgatacgcaaaagacgtgtgggctggg

SEQ ID NO: 436 - protein, 1049 aa, synthetic construct
  REGION 1..1049: note = variant of P450 oxidase from Bacillus megaterium
MTIKEMPQPKTFGELKNLPLLNTDKPVQALMRIADELGEIFKFEAPGSVTRYLSSQRLIKEACDESRFDKNLSQALKFARDFVGDGLSTSWTHEPNWKKAHNILVPSFSQHAMGRYHAMMVDIAVQLVQKWERLNADEHIEVSEDMTRLTLDTIGLCGFNYRFNSFYRDSPHPFIVSVVRALDEVMNKLQRANPDDPAYDENKRQCQEDIKVMNDYVDKIIADRKARGEQSHDLLTQMLNGKDPETGEPLDDGNIRQQIITFLIAGHQTTSGLLSFALYFLVKNPHVLQKVAEEAARVLVDPVPSYKQVKQLKYVGMVLNEALRLWPVAPMFSLYAKEDTVLGGEYPLTKGDEVMVLVPQLHRDKTIWGDDVEEFRPERFENPSAIPQHAFKPFGNGQRACIGQQFALHEATLVLGMMLKHFDFEDHTNYELVIKESRTLKPEGFVVKAKSKGIPLGGIPSPSTEQSAKKVRKKAENAHNTPLLVLYGSNAGTAEGTARDLADIAMSKGFAPQVATLDSHARNLPREGAVLIVTASYNGHPPDNAKQFVDWLDQASADEVKGVRYSVFGCGDKNWAGTYQKVPAFIDETLAAKGAENIADRGEADASDDFEGTYEEWRDHMWSDVAAYFNLDIENSEDNKSTLSLQFVDSAADMPLAKMHGAFSTNVVASKELQQPGSARSTRHLEIELPKEASYQEGDHLGVIPRNYEGIVNRVTARFGLSASQQIRLEAEEEKLAHLPLAKTVSVEELLQYVELQDPVTRTQLRAMAAKTVCPPHKVELEALLEKQAYKEQVLAKRLTMLELLEKYPACEMKFSEFIALLPSIRPRYYSISSSPRVDEKQASITVSVVSGPAWSGYGEYKGIASNYLAELQEGDTITCFISTPQSEFTLPKDPETPLIMVGPGTGVAPFRGFVQARKQLKEQGQSLGEAHLYFGCRSPHEDYLYQEELENAQSEGIITLHTAFSRMPNQPKTYVQHVMEQDGKKLIELLDQGAHFYICGDGSQMAPAVEATLMKSYADVHQVSEADARLWLQQLEEKGRYAKDVWAG

SEQ ID NO: 437 - DNA, 3147 bp, synthetic construct
  misc_feature 1..3147: note = variant of P450 oxidase from Bacillus megaterium
  source 1..3147: mol_type = other DNA
atgacaattaaggaaatgcctcagcctaagacgtttggagaacttaaaaatttaccgttattaaacacagataaaccggttcaagctttgatgcgtattgcggatgaattaggagaaatctttaaattcgaggcgcctggtagcgtaacgcgctatttatcaagtcagcgtctaattaaagaagcatgcgatgaatcacgctttgataaaaacttaagtcaagcgcttaaatttgcacgtgattttgttggagacgggttatctacaagctggacgcatgaaccgaattggaaaaaagcgcataatatcttagttccaagctttagtcagcatgcaatggggcgttatcatgcgatgatggtcgatatcgccgtgcagcttgttcaaaagtgggagcgtctaaatgcagatgagcatattgaagtatcggaagacatgacacgtttaacgcttgatacaattggtctttgcggctttaactatcgctttaacagcttttaccgagatcagcctcatccatttattgtgagtgtggttcgtgcactggatgaagtaatgaacaagctgcagcgagcaaatccagacgacccagcttatgatgaaaacaagcgccagtgtcaagaagatatcaaggtgatgaacgactatgtagataaaattattgcagatcgcaaagcaaggggtgaacaaagtcatgatttattaacgcagatgctaaacggaaaagatccagaaacgggtgagccgcttgatgacgggaacattcgtcagcaaattattacattcttaattgcgggacaccaaacaacaagtggtcttttatcatttgcgctgtatttcttagtgaaaaatccacatgtattacaaaaagtagcagaagaagcagcacgagttctagtagatcctgttccaagctacaaacaagtcaaacagcttaaatatgttggcatggtcttaaacgaagcgctgcgcttatggccagtagcgcctatgttttccctatatgcaaaagaagatacggtgcttggaggagaatatcctttaacgaaaggcgacgaagtaatggttctggtgcctcagcttcaccgtgataaaacaatttggggagacgatgtggaggagttccgtccagagcgttttgaaaatccaagtgcgattccgcagcatgcgtttaaaccgtttggaaacggtcagcgtgcgtgtatcggtcagcagttcgctcttcatgaagcaacgctggtacttggtatgatgctaaaacactttgactttgaagatcatacaaactacgagctcgttattaaagaatcgcggacgttaaaacctgaaggctttgtggtaaaagcaaaatcgaaaggcattccgcttggcggtattccttcacctagcactgaacagtctgctaaaaaagtacgcaaaaaggcagaaaacgctcataatacgccgctgcttgtgctatacggttcaaatgcgggaacagctgaaggaacggcgcgtgatttagcagatattgcaatgagcaaaggatttgcaccgcaggtcgcaacgcttgattcacacgccagaaatcttccgcgcgaaggagctgtattaattgtaacggcgtcttataacggtcatccgcctgataacgcaaagcaatttgtcgactggttagaccaagcgtctgctgatgaagtaaaaggcgttcgctactccgtatttggatgcggcgataaaaattgggcggggacgtatcaaaaagtgcctgcttttatcgatgaaacgcttgccgctaaaggggcagaaaacatcgctgaccgcggtgaagcagatgcaagcgacgactttgaaggcacatatgaagaatggcgtgatcatatgtggagtgacgtagcagcctactttaacctcgacattgaaaacagtgaagataataaatctactctttcacttcaatttgtcgacagcgccgcggatatgccgcttgcgaaaatgcacggtgcgttttcaacgaacgtcgtagcaagcaaagaacttcaacagccaggcagtgcacgaagcacgcgacatcttgaaattgaacttccaaaagaagcttcttatcaagaaggagatcatttaggtgttattcctcgcaactatgaaggaatagtaaaccgtgtaacagcaaggttcggcctaagcgcatcacagcaaatccgtctggaagcagaagaagaaaaattagctcatttgccactcgctaaaacagtatccgtagaagagcttctgcaatacgtggagcttcaagatcctgttacgcgcacgcagcttcgcgcaatggctgctaaaacggtctgcccgccgcataaagtagagcttgaagccttgcttgttaagcaagcctacaaagaacaagtgctggcaaaacgtttaacaatgcttgaactgcttgaaaaatacccggcgtgtgaaatgaaattcagcgaatttatcgcccttctgccaagcatacgcccgcgctattactcgatttcttcatcacctcgtgtcgatgaaaaacaagcaagcatcacggtcagcgttgtctcaggaccggcgtggagcggatatggagaatataaaggaattgcgtcgaactatcttgccgagctgcaagaaggagatacgattacgtgctttatttccacaccgcagtcagaatttacgctgccaaaagaccctgaaacgccgcttatcatggtcggaccgggaacaggcgtcgcgccgtttagaggctttgtgcaggcgcgcaaacagctaaaagaacaaggacagtcacttggagaagcacatttatacttcggctgccgttcacctcatgaagactatctgtatcaagaagagcttgaaaacgcccaaagcgaaggcatcattacgcttcataccgctttttctcgcatgccaaatcagccgaaaacatacgttcagcacgtaatggaacaagacggcaagaaattgattgaacttcttgatcaaggagcgcacttctatatttgcggagacggaagccaaatggcacctgccgttgaagcaacgcttatgaaaagctatgctgacgttcaccaagtgagtgaagcagacgctcgcttatggctgcagcagctagaagaaaaaggccgatacgcaaaagacgtgtgggctggg

SEQ ID NO: 438 - protein, 1049 aa, synthetic construct
  REGION 1..1049: note = variant of P450 oxidase from Bacillus megaterium
MTIKEMPQPKTFGELKNLPLLNTDKPVQALMRIADELGEIFKFEAPGSVTRYLSSQRLIKEACDESRFDKNLSQALKFARDFVGDGLSTSWTHEPNWKKAHNILVPSFSQHAMGRYHAMMVDIAVQLVQKWERLNADEHIEVSEDMTRLTLDTIGLCGFNYRFNSFYRDQPHPFIVSVVRALDEVMNKLQRANPDDPAYDENKRQCQEDIKVMNDYVDKIIADRKARGEQSHDLLTQMLNGKDPETGEPLDDGNIRQQIITFLIAGHQTTSGLLSFALYFLVKNPHVLQKVAEEAARVLVDPVPSYKQVKQLKYVGMVLNEALRLWPVAPMFSLYAKEDTVLGGEYPLTKGDEVMVLVPQLHRDKTIWGDDVEEFRPERFENPSAIPQHAFKPFGNGQRACIGQQFALHEATLVLGMMLKHFDFEDHTNYELVIKESRTLKPEGFVVKAKSKGIPLGGIPSPSTEQSAKKVRKKAENAHNTPLLVLYGSNAGTAEGTARDLADIAMSKGFAPQVATLDSHARNLPREGAVLIVTASYNGHPPDNAKQFVDWLDQASADEVKGVRYSVFGCGDKNWAGTYQKVPAFIDETLAAKGAENIADRGEADASDDFEGTYEEWRDHMWSDVAAYFNLDIENSEDNKSTLSLQFVDSAADMPLAKMHGAFSTNVVASKELQQPGSARSTRHLEIELPKEASYQEGDHLGVIPRNYEGIVNRVTARFGLSASQQIRLEAEEEKLAHLPLAKTVSVEELLQYVELQDPVTRTQLRAMAAKTVCPPHKVELEALLVKQAYKEQVLAKRLTMLELLEKYPACEMKFSEFIALLPSIRPRYYSISSSPRVDEKQASITVSVVSGPAWSGYGEYKGIASNYLAELQEGDTITCFISTPQSEFTLPKDPETPLIMVGPGTGVAPFRGFVQARKQLKEQGQSLGEAHLYFGCRSPHEDYLYQEELENAQSEGIITLHTAFSRMPNQPKTYVQHVMEQDGKKLIELLDQGAHFYICGDGSQMAPAVEATLMKSYADVHQVSEADARLWLQQLEEKGRYAKDVWAG

SEQ ID NO: 439 - DNA, 3147 bp, synthetic construct
  misc_feature 1..3147: note = variant of P450 oxidase from Bacillus megaterium
  source 1..3147: mol_type = other DNA
atgacaattaaggaaatgcctcagcctaagacgtttggagaacttaaaaatttaccgttattaaacacagataaaccggttcaagctttgatgcgtattgcggatgaattaggagaaatctttaaattcgaggcgcctggtagcgtaacgcgctatttatcaagtcagcgtctaattaaagaagcatgcgatgaatcacgctttgataaaaacttaagtcaagcgcttaaatttgcacgtgattttgttggagacgggttatctacaagctggacgcatgaaccgaattggaaaaaagcgcataatatcttagttccaagctttagtcagcatgcaatggggcgttatcatgcgatgatggtcgatatcgccgtgcagcttgttcaaaagtgggagcgtctaaatgcagatgagcatattgaagtatcggaagacatgacacgtttaacgcttgatacaattggtctttgcggctttaactatcgctttaacagcttttaccgagatcagcctcatccatttattgtgagtgtggttcgtgcactggatgaagtaatgaacaagctgcagcgagcaaatccagacgacccagcttatgatgaaaacaagcgccagtgtcaagaagatatcaaggtgatgaacgactatgtagataaaattattgcagatcgcaaagcaaggggtgaacaaagtcatgatttattaacgcagatgctaaacggaaaagatccagaaacgggtgagccgcttgatgacgggaacattcgtcagcaaattattacattcttaattgcgggacaccaaacaacaagtggtcttttatcatttgcgctgtatttcttagtgaaaaatccacatgtattacaaaaagtagcagaagaagcagcacgagttctagtagatcctgttccaagctacaaacaagtcaaacagcttaaatatgttggcatggtcttaaacgaagcgctgcgcttatggccagtagcgcctatgttttccctatatgcaaaagaagatacggtgcttggaggagaatatcctttaacgaaaggcgacgaagtaatggttctggtgcctcagcttcaccgtgataaaacaatttggggagacgatgtggaggagttccgtccagagcgttttgaaaatccaagtgcgattccgcagcatgcgtttaaaccgtttggaaacggtcagcgtgcgtgtatcggtcagcagttcgctcttcatgaagcaacgctggtacttggtatgatgctaaaacactttgactttgaagatcatacaaactacgagctcgttattaaagaatcgcggacgttaaaacctgaaggctttgtggtaaaagcaaaatcgaaaggcattccgcttggcggtattccttcacctagcactgaacagtctgctaaaaaagtacgcaaaaaggcagaaaacgctcataatacgccgctgcttgtgctatacggttcaaatgcgggaacagctgaaggaacggcgcgtgatttagcagatattgcaatgagcaaaggatttgcaccgcaggtcgcaacgcttgattcacacgccagaaatcttccgcgcgaaggagctgtattaattgtaacggcgtcttataacggtcatccgcctgataacgcaaagcaatttgtcgactggttagaccaagcgtctgctgatgaagtaaaaggcgttcgctactccgtatttggatgcggcgataaaaattgggcggggacgtatcaaaaagtgcctgcttttatcgatgaaacgcttgccgctaaaggggcagaaaacatcgctgaccgcggtgaagcagatgcaagcgacgactttgaaggcacatatgaagaatggcgtgatcatatgtggagtgacgtagcagcctactttaacctcgacattgaaaacagtgaagataataaatctactctttcacttcaatttgtcgacagcgccgcggatatgccgcttgcgaaaatgcacggtgcgttttcaacgaacgtcgtagcaagcaaagaacttcaacagccaggcagtgcacgaagcacgcgacatcttgaaattgaacttccaaaagaagcttcttatcaagaaggagatcatttaggtgttattcctcgcaactatgaaggaatagtaaaccgtgtaacagcaaggttcggcctaagcgcatcacagcaaatccgtctggaagcagaagaagaaaaattagctcatttgccactcgctaaaacagtatccgtagaagagcttctgcaatacgtggagcttcaagatcctgttacgcgcacgcagcttcgcgcaatggctgctaaaacggtctgcccgccgcataaagtagagcttgaagccttgctttctaagcaagcctacaaagaacaagtgctggcaaaacgtttaacaatgcttgaactgcttgaaaaatacccggcgtgtgaaatgaaattcagcgaatttatcgcccttctgccaagcatacgcccgcgctattactcgatttcttcatcacctcgtgtcgatgaaaaacaagcaagcatcacggtcagcgttgtctcaggaccggcgtggagcggatatggagaatataaaggaattgcgtcgaactatcttgccgagctgcaagaaggagatacgattacgtgctttatttccacaccgcagtcagaatttacgctgccaaaagaccctgaaacgccgcttatcatggtcggaccgggaacaggcgtcgcgccgtttagaggctttgtgcaggcgcgcaaacagctaaaagaacaaggacagtcacttggagaagcacatttatacttcggctgccgttcacctcatgaagactatctgtatcaagaagagcttgaaaacgcccaaagcgaaggcatcattacgcttcataccgctttttctcgcatgccaaatcagccgaaaacatacgttcagcacgtaatggaacaagacggcaagaaattgattgaacttcttgatcaaggagcgcacttctatatttgcggagacggaagccaaatggcacctgccgttgaagcaacgcttatgaaaagctatgctgacgttcaccaagtgagtgaagcagacgctcgcttatggctgcagcagctagaagaaaaaggccgatacgcaaaagacgtgtgggctggg

SEQ ID NO: 440 - protein, 1049 aa, synthetic construct
  REGION 1..1049: note = variant of P450 oxidase from Bacillus megaterium
MTIKEMPQPKTFGELKNLPLLNTDKPVQALMRIADELGEIFKFEAPGSVTRYLSSQRLIKEACDESRFDKNLSQALKFARDFVGDGLSTSWTHEPNWKKAHNILVPSFSQHAMGRYHAMMVDIAVQLVQKWERLNADEHIEVSEDMTRLTLDTIGLCGFNYRFNSFYRDQPHPFIVSVVRALDEVMNKLQRANPDDPAYDENKRQCQEDIKVMNDYVDKIIADRKARGEQSHDLLTQMLNGKDPETGEPLDDGNIRQQIITFLIAGHQTTSGLLSFALYFLVKNPHVLQKVAEEAARVLVDPVPSYKQVKQLKYVGMVLNEALRLWPVAPMFSLYAKEDTVLGGEYPLTKGDEVMVLVPQLHRDKTIWGDDVEEFRPERFENPSAIPQHAFKPFGNGQRACIGQQFALHEATLVLGMMLKHFDFEDHTNYELVIKESRTLKPEGFVVKAKSKGIPLGGIPSPSTEQSAKKVRKKAENAHNTPLLVLYGSNAGTAEGTARDLADIAMSKGFAPQVATLDSHARNLPREGAVLIVTASYNGHPPDNAKQFVDWLDQASADEVKGVRYSVFGCGDKNWAGTYQKVPAFIDETLAAKGAENIADRGEADASDDFEGTYEEWRDHMWSDVAAYFNLDIENSEDNKSTLSLQFVDSAADMPLAKMHGAFSTNVVASKELQQPGSARSTRHLEIELPKEASYQEGDHLGVIPRNYEGIVNRVTARFGLSASQQIRLEAEEEKLAHLPLAKTVSVEELLQYVELQDPVTRTQLRAMAAKTVCPPHKVELEALLSKQAYKEQVLAKRLTMLELLEKYPACEMKFSEFIALLPSIRPRYYSISSSPRVDEKQASITVSVVSGPAWSGYGEYKGIASNYLAELQEGDTITCFISTPQSEFTLPKDPETPLIMVGPGTGVAPFRGFVQARKQLKEQGQSLGEAHLYFGCRSPHEDYLYQEELENAQSEGIITLHTAFSRMPNQPKTYVQHVMEQDGKKLIELLDQGAHFYICGDGSQMAPAVEATLMKSYADVHQVSEADARLWLQQLEEKGRYAKDVWAG

SEQ ID NO: 441 - DNA, 3147 bp, synthetic construct
  misc_feature 1..3147: note = variant of P450 oxidase from Bacillus megaterium
  source 1..3147: mol_type = other DNA
atgacaattaaggaaatgcctcagcctaagacgtttggagaacttaaaaatttaccgttattaaacacagataaaccggttcaagctttgatgcgtattgcggatgaattaggagaaatctttaaattcgaggcgcctggtagcgtaacgcgctatttatcaagtcagcgtctaattaaagaagcatgcgatgaatcacgctttgataaaaacttaagtcaagcgcttaaatttgcacgtgattttgttggagacgggttatctacaagctggacgcatgaaccgaattggaaaaaagcgcataatatcttagttccaagctttagtcagcatgcaatggggcgttatcatgcgatgatggtcgatatcgccgtgcagcttgttcaaaagtgggagcgtctaaatgcagatgagcatattgaagtatcggaagacatgacacgtttaacgcttgatacaattggtctttgcggctttaactatcgctttaacagcttttaccgagatcagcctcatccatttattgtgagtgtggttcgtgcactggatgaagtaatgaacaagctgcagcgagcaaatccagacgacccagcttatgatgaaaacaagcgccagtgtcaagaagatatcaaggtgatgaacgactatgtagataaaattattgcagatcgcaaagcaaggggtgaacaaagtcatgatttattaacgcagatgctaaacggaaaagatccagaaacgggtgagccgcttgatgacgggaacattcgtcagcaaattattacattcttaattgcgggacaccaaacaacaagtggtcttttatcatttgcgctgtatttcttagtgaaaaatccacatgtattacaaaaagtagcagaagaagcagcacgagttctagtagatcctgttccaagctacaaacaagtcaaacagcttaaatatgttggcatggtcttaaacgaagcgctgcgcttatggccagtagcgcctatgttttccctatatgcaaaagaagatacggtgcttggaggagaatatcctttaacgaaaggcgacgaagtaatggttctggtgcctcagcttcaccgtgataaaacaatttggggagacgatgtggaggagttccgtccagagcgttttgaaaatccaagtgcgattccgcagcatgcgtttaaaccgtttggaaacggtcagcgtgcgtgtatcggtcagcagttcgctcttcatgaagcaacgctggtacttggtatgatgctaaaacactttgactttgaagatcatacaaactacgagctcgttattaaagaatcgcggacgttaaaacctgaaggctttgtggtaaaagcaaaatcgaaaggcattccgcttggcggtattccttcacctagcactgaacagtctgctaaaaaagtacgcaaaaaggcagaaaacgctcataatacgccgctgcttgtgctatacggttcaaatgcgggaacagctgaaggaacggcgcgtgatttagcagatattgcaatgagcaaaggatttgcaccgcaggtcgcaacgcttgattcacacgccagaaatcttccgcgcgaaggagctgtattaattgtaacggcgtcttataacggtcatccgcctgataacgcaaagcaatttgtcgactggttagaccaagcgtctgctgatgaagtaaaaggcgttcgctactccgtatttggatgcggcgataaaaattgggcggggacgtatcaaaaagtgcctgcttttatcgatgaaacgcttgccgctaaaggggcagaaaacatcgctgaccgcggtgaagcagatgcaagcgacgactttgaaggcacatatgaagaatggcgtgatcatatgtggagtgacgtagcagcctactttaacctcgacattgaaaacagtgaagataataaatctactctttcacttcaatttgtcgacagcgccgcggatatgccgcttgcgaaaatgcacggtgcgttttcaacgaacgtcgtagcaagcaaagaacttcaacagccaggcagtgcacgaagcacgcgacatcttgaaattgaacttccaaaagaagcttcttatcaagaaggagatcatttaggtgttattcctcgcaactatgaaggaatagtaaaccgtgtaacagcaaggttcggcctaagcgcatcacagcaaatccgtctggaagcagaagaagaaaaattagctcatttgccactcgctaaaacagtatccgtagaagagcttctgcaatacgtggagcttcaagatcctgttacgcgcacgcagcttcgcgcaatggctgctaaaacggtctgcccgccgcataaagtagagcttgaagccttgcttgaaaagcaagcctacaaagaacaagtgctggcaaaacgtttaacaatgcttgaactgcttgaaaaatacccggcgtgtgaaatgaaattcagcgaatttatcgcccttctgccaagcatacgcccgcgctattactcgatttcttcatcacctcgtgtcgatgaaaaacaagcaagcatcacggtcagcgttgtctcaggaccggcgtggagcggatatggagaatataaaggaattgcgtcgaactatcttgccgagctgcaagaaggaggtacgattacgtgctttatttccacaccgcagtcagaatttacgctgccaaaagaccctgaaacgccgcttatcatggtcggaccgggaacaggcgtcgcgccgtttagaggctttgtgcaggcgcgcaaacagctaaaagaacaaggacagtcacttggagaagcacatttatacttcggctgccgttcacctcatgaagactatctgtatcaagaagagcttgaaaacgcccaaagcgaaggcatcattacgcttcataccgctttttctcgcatgccaaatcagccgaaaacatacgttcagcacgtaatggaacaagacggcaagaaattgattgaacttcttgatcaaggagcgcacttctatatttgcggagacggaagccaaatggcacctgccgttgaagcaacgcttatgaaaagctatgctgacgttcaccaagtgagtgaagcagacgctcgcttatggctgcagcagctagaagaaaaaggccgatacgcaaaagacgtgtgggctggg

SEQ ID NO: 442 - protein, 1049 aa, synthetic construct
  REGION 1..1049: note = variant of P450 oxidase from Bacillus megaterium
MTIKEMPQPKTFGELKNLPLLNTDKPVQALMRIADELGEIFKFEAPGSVTRYLSSQRLIKEACDESRFDKNLSQALKFARDFVGDGLSTSWTHEPNWKKAHNILVPSFSQHAMGRYHAMMVDIAVQLVQKWERLNADEHIEVSEDMTRLTLDTIGLCGFNYRFNSFYRDQPHPFIVSVVRALDEVMNKLQRANPDDPAYDENKRQCQEDIKVMNDYVDKIIADRKARGEQSHDLLTQMLNGKDPETGEPLDDGNIRQQIITFLIAGHQTTSGLLSFALYFLVKNPHVLQKVAEEAARVLVDPVPSYKQVKQLKYVGMVLNEALRLWPVAPMFSLYAKEDTVLGGEYPLTKGDEVMVLVPQLHRDKTIWGDDVEEFRPERFENPSAIPQHAFKPFGNGQRACIGQQFALHEATLVLGMMLKHFDFEDHTNYELVIKESRTLKPEGFVVKAKSKGIPLGGIPSPSTEQSAKKVRKKAENAHNTPLLVLYGSNAGTAEGTARDLADIAMSKGFAPQVATLDSHARNLPREGAVLIVTASYNGHPPDNAKQFVDWLDQASADEVKGVRYSVFGCGDKNWAGTYQKVPAFIDETLAAKGAENIADRGEADASDDFEGTYEEWRDHMWSDVAAYFNLDIENSEDNKSTLSLQFVDSAADMPLAKMHGAFSTNVVASKELQQPGSARSTRHLEIELPKEASYQEGDHLGVIPRNYEGIVNRVTARFGLSASQQIRLEAEEEKLAHLPLAKTVSVEELLQYVELQDPVTRTQLRAMAAKTVCPPHKVELEALLEKQAYKEQVLAKRLTMLELLEKYPACEMKFSEFIALLPSIRPRYYSISSSPRVDEKQASITVSVVSGPAWSGYGEYKGIASNYLAELQEGGTITCFISTPQSEFTLPKDPETPLIMVGPGTGVAPFRGFVQARKQLKEQGQSLGEAHLYFGCRSPHEDYLYQEELENAQSEGIITLHTAFSRMPNQPKTYVQHVMEQDGKKLIELLDQGAHFYICGDGSQMAPAVEATLMKSYADVHQVSEADARLWLQQLEEKGRYAKDVWAG

SEQ ID NO: 443 - DNA, 3147 bp, synthetic construct
  misc_feature 1..3147: note = variant of P450 oxidase from Bacillus megaterium
  source 1..3147: mol_type = other DNA
atgacaattaaggaaatgcctcagcctaagacgtttggagaacttaaaaatttaccgttattaaacacagataaaccggttcaagctttgatgcgtattgcggatgaattaggagaaatctttaaattcgaggcgcctggtagcgtaacgcgctatttatcaagtcagcgtctaattaaagaagcatgcgatgaatcacgctttgataaaaacttaagtcaagcgcttaaatttgcacgtgattttgttggagacgggttatctacaagctggacgcatgaaccgaattggaaaaaagcgcataatatcttagttccaagctttagtcagcatgcaatggggcgttatcatgcgatgatggtcgatatcgccgtgcagcttgttcaaaagtgggagcgtctaaatgcagatgagcatattgaagtatcggaagacatgacacgtttaacgcttgatacaattggtctttgcggctttaactatcgctttaacagcttttaccgagatcagcctcatccatttattgtgagtgtggttcgtgcactggatgaagtaatgaacaagctgcagcgagcaaatccagacgacccagcttatgatgaaaacaagcgccagtgtcaagaagatatcaaggtgatgaacgactatgtagataaaattattgcagatcgcaaagcaaggggtgaacaaagtcatgatttattaacgcagatgctaaacggaaaagatccagaaacgggtgagccgcttgatgacgggaacattcgtcagcaaattattacattcttaattgcgggacaccaaacaacaagtggtcttttatcatttgcgctgtatttcttagtgaaaaatccacatgtattacaaaaagtagcagaagaagcagcacgagttctagtagatcctgttccaagctacaaacaagtcaaacagcttaaatatgttggcatggtcttaaacgaagcgctgcgcttatggccagtagcgcctatgttttccctatatgcaaaagaagatacggtgcttggaggagaatatcctttaacgaaaggcgacgaagtaatggttctggtgcctcagcttcaccgtgataaaacaatttggggagacgatgtggaggagttccgtccagagcgttttgaaaatccaagtgcgattccgcagcatgcgtttaaaccgtttggaaacggtcagcgtgcgtgtatcggtcagcagttcgctcttcatgaagcaacgctggtacttggtatgatgctaaaacactttgactttgaagatcatacaaactacgagctcgttattaaagaatcgcggacgttaaaacctgaaggctttgtggtaaaagcaaaatcgaaaggcattccgcttggcggtattccttcacctagcactgaacagtctgctaaaaaagtacgcaaaaaggcagaaaacgctcataatacgccgctgcttgtgctatacggttcaaatgcgggaacagctgaaggaacggcgcgtgatttagcagatattgcaatgagcaaaggatttgcaccgcaggtcgcaacgcttgattcacacgccagaaatcttccgcgcgaaggagctgtattaattgtaacggcgtcttataacggtcatccgcctgataacgcaaagcaatttgtcgactggttagaccaagcgtctgctgatgaagtaaaaggcgttcgctactccgtatttggatgcggcgataaaaattgggcggggacgtatcaaaaagtgcctgcttttatcgatgaaacgcttgccgctaaaggggcagaaaacatcgctgaccgcggtgaagcagatgcaagcgacgactttgaaggcacatatgaagaatggcgtgatcatatgtggagtgacgtagcagcctactttaacctcgacattgaaaacagtgaagataataaatctactctttcacttcaatttgtcgacagcgccgcggatatgccgcttgcgaaaatgcacggtgcgttttcaacgaacgtcgtagcaagcaaagaacttcaacagccaggcagtgcacgaagcacgcgacatcttgaaattgaacttccaaaagaagcttcttatcaagaaggagatcatttaggtgttattcctcgcaactatgaaggaatagtaaaccgtgtaacagcaaggttcggcctaagcgcatcacagcaaatccgtctggaagcagaagaagaaaaattagctcatttgccactcgctaaaacagtatccgtagaagagcttctgcaatacgtggagcttcaagatcctgttacgcgcacgcagcttcgcgcaatggctgctaaaacggtctgcccgccgcataaagtagagcttgaagccttgcttgaaaagcaagcctacaaagaacaagtgctggcaaaacgtttaacaatgcttgaactgcttgaaaaatacccggcgtgtgaaatgagtttcagcgaatttatcgcccttctgccaagcatacgcccgcgctattactcgatttcttcatcacctcgtgtcgatgaaaaacaagcaagcatcacggtcagcgttgtctcaggaccggcgtggagcggatatggagaatataaaggaattgcgtcgaactatcttgccgagctgcaagaaggagatacgattacgtgctttatttccacaccgcagtcagaatttacgctgccaaaagaccctgaaacgccgcttatcatggtcggaccgggaacaggcgtcgcgccgtttagaggctttgtgcaggcgcgcaaacagctaaaagaacaaggacagtcacttggagaagcacatttatacttcggctgccgttcacctcatgaagactatctgtatcaagaagagcttgaaaacgcccaaagcgaaggcatcattacgcttcataccgctttttctcgcatgccaaatcagccgaaaacatacgttcagcacgtaatggaacaagacggcaagaaattgattgaacttcttgatcaaggagcgcacttctatatttgcggagacggaagccaaatggcacctgccgttgaagcaacgcttatgaaaagctatgctgacgttcaccaagtgagtgaagcagacgctcgcttatggctgcagcagctagaagaaaaaggccgatacgcaaaagacgtgtgggctggg

SEQ ID NO: 444 - protein, 1049 aa, synthetic construct
  REGION 1..1049: note = variant of P450 oxidase from Bacillus megaterium
MTIKEMPQPKTFGELKNLPLLNTDKPVQALMRIADELGEIFKFEAPGSVTRYLSSQRLIKEACDESRFDKNLSQALKFARDFVGDGLSTSWTHEPNWKKAHNILVPSFSQHAMGRYHAMMVDIAVQLVQKWERLNADEHIEVSEDMTRLTLDTIGLCGFNYRFNSFYRDQPHPFIVSVVRALDEVMNKLQRANPDDPAYDENKRQCQEDIKVMNDYVDKIIADRKARGEQSHDLLTQMLNGKDPETGEPLDDGNIRQQIITFLIAGHQTTSGLLSFALYFLVKNPHVLQKVAEEAARVLVDPVPSYKQVKQLKYVGMVLNEALRLWPVAPMFSLYAKEDTVLGGEYPLTKGDEVMVLVPQLHRDKTIWGDDVEEFRPERFENPSAIPQHAFKPFGNGQRACIGQQFALHEATLVLGMMLKHFDFEDHTNYELVIKESRTLKPEGFVVKAKSKGIPLGGIPSPSTEQSAKKVRKKAENAHNTPLLVLYGSNAGTAEGTARDLADIAMSKGFAPQVATLDSHARNLPREGAVLIVTASYNGHPPDNAKQFVDWLDQASADEVKGVRYSVFGCGDKNWAGTYQKVPAFIDETLAAKGAENIADRGEADASDDFEGTYEEWRDHMWSDVAAYFNLDIENSEDNKSTLSLQFVDSAADMPLAKMHGAFSTNVVASKELQQPGSARSTRHLEIELPKEASYQEGDHLGVIPRNYEGIVNRVTARFGLSASQQIRLEAEEEKLAHLPLAKTVSVEELLQYVELQDPVTRTQLRAMAAKTVCPPHKVELEALLEKQAYKEQVLAKRLTMLELLEKYPACEMSFSEFIALLPSIRPRYYSISSSPRVDEKQASITVSVVSGPAWSGYGEYKGIASNYLAELQEGDTITCFISTPQSEFTLPKDPETPLIMVGPGTGVAPFRGFVQARKQLKEQGQSLGEAHLYFGCRSPHEDYLYQEELENAQSEGIITLHTAFSRMPNQPKTYVQHVMEQDGKKLIELLDQGAHFYICGDGSQMAPAVEATLMKSYADVHQVSEADARLWLQQLEEKGRYAKDVWAG

SEQ ID NO: 445 - DNA, 3147 bp, synthetic construct
  misc_feature 1..3147: note = variant of P450 oxidase from Bacillus megaterium
  source 1..3147: mol_type = other DNA
atgacaattaaggaaatgcctcagcctaagacgtttggagaacttaaaaatttaccgttattaaacacagataaaccggttcaagctttgatgcgtattgcggatgaattaggagaaatctttaaattcgaggcgcctggtagcgtaacgcgctatttatcaagtcagcgtctaattaaagaagcatgcgatgaatcacgctttgataaaaacttaagtcaagcgcttaaatttgcacgtgattttgttggagacgggttatctacaagctggacgcatgaaccgaattggaaaaaagcgcataatatcttagttccaagctttagtcagcatgcaatggggcgttatcatgcgatgatggtcgatatcgccgtgcagcttgttcaaaagtgggagcgtctaaatgcagatgagcatattgaagtatcggaagacatgacacgtttaacgcttgatacaattggtctttgcggctttaactatcgctttaacagcttttaccgagatcagcctcatccatttattgtgagtgtggttcgtgcactggatgaagtaatgaacaagctgcagcgagcaaatccagacgacccagcttatgatgaaaacaagcgccagtgtcaagaagatatcaaggtgatgaacgactatgtagataaaattattgcagatcgcaaagcaaggggtgaacaaagtcatgatttattaacgcagatgctaaacggaaaagatccagaaacgggtgagccgcttgatgacgggaacattcgtcagcaaattattacattcttaattgcgggacaccaaacaacaagtggtcttttatcatttgcgctgtatttcttagtgaaaaatccacatgtattacaaaaagtagcagaagaagcagcacgagttctagtagatcctgttccaagctacaaacaagtcaaacagcttaaatatgttggcatggtcttaaacgaagcgctgcgcttatggccagtagcgcctatgttttccctatatgcaaaagaagatacggtgcttggaggagaatatcctttaacgaaaggcgacgaagtaatggttctggtgcctcagcttcaccgtgataaaacaatttggggagacgatgtggaggagttccgtccagagcgttttgaaaatccaagtgcgattccgcagcatgcgtttaaaccgtttggaaacggtcagcgtgcgtgtatcggtcagcagttcgctcttcatgaagcaacgctggtacttggtatgatgctaaaacactttgactttgaagatcatacaaactacgagctcgttattaaagaatcgcggacgttaaaacctgaaggctttgtggtaaaagcaaaatcgaaaggcattccgcttggcggtattccttcacctagcactgaacagtctgctaaaaaagtacgcaaaaaggcagaaaacgctcataatacgccgctgcttgtgctatacggttcaaatgcgggaacagctgaaggaacggcgcgtgatttagcagatattgcaatgagcaaaggatttgcaccgcaggtcgcaacgcttgattcacacgccagaaatcttccgcgcgaaggagctgtattaattgtaacggcgtcttataacggtcatccgcctgataacgcaaagcaatttgtcgactggttagaccaagcgtctgctgatgaagtaaaaggcgttcgctactccgtatttggatgcggcgataaaaattgggcggggacgtatcaaaaagtgcctgcttttatcgatgaaacgcttgccgctaaaggggcagaaaacatcgctgaccgcggtgaagcagatgcaagcgacgactttgaaggcacatatgaagaatggcgtgatcatatgtggagtgacgtagcagcctactttgggctcgacattgaaaacagtgaagataataaatctactctttcacttcaatttgtcgacagcgccgcggatatgccgcttgcgaaaatgcacggtgcgttttcaacgaacgtcgtagcaagcaaagaacttcaacagccaggcagtgcacgaagcacgcgacatcttgaaattgaacttccaaaagaagcttcttatcaagaaggagatcatttaggtgttattcctcgcaactatgaaggaatagtaaaccgtgtaacagcaaggttcggcctaagcgcatcacagcaaatccgtctggaagcagaagaagaaaaattagctcatttgccactcgctaaaacagtatccgtagaagagcttctgcaatacgtggagcttcaagatcctgttacgcgcacgcagcttcgcgcaatggctgctaaaacggtctgcccgccgcataaagtagagcttgaagccttgcttgaaaagcaagcctacaaagaacaagtgctggcaaaacgtttaacaatgcttgaactgcttgaaaaatacccggcgtgtgaaatgaaattcagcgaatttatcgcccttctgccaagcatacgcccgcgctattactcgatttcttcatcacctcgtgtcgatgaaaaacaagcaagcatcacggtcagcgttgtctcaggaccggcgtggagcggatatggagaatataaaggaattgcgtcgaactatcttgccgagctgcaagaaggagatacgattacgtgctttatttccacaccgcagtcagaatttacgctgccaaaagaccctgaaacgccgcttatcatggtcggaccgggaacaggcgtcgcgccgtttagaggctttgtgcaggcgcgcaaacagctaaaagaacaaggacagtcacttggagaagcacatttatacttcggctgccgttcacctcatgaagactatctgtatcaagaagagcttgaaaacgcccaaagcgaaggcatcattacgcttcataccgctttttctcgcatgccaaatcagccgaaaacatacgttcagcacgtaatggaacaagacggcaagaaattgattgaacttcttgatcaaggagcgcacttctatatttgcggagacggaagccaaatggcacctgccgttgaagcaacgcttatgaaaagctatgctgacgttcaccaagtgagtgaagcagacgctcgcttatggctgcagcagctagaagaaaaaggccgatacgcaaaagacgtgtgggctggg

SEQ ID NO: 446 - protein, 1049 aa, synthetic construct
  REGION 1..1049: note = variant of P450 oxidase from Bacillus megaterium
MTIKEMPQPKTFGELKNLPLLNTDKPVQALMRIADELGEIFKFEAPGSVTRYLSSQRLIKEACDESRFDKNLSQALKFARDFVGDGLSTSWTHEPNWKKAHNILVPSFSQHAMGRYHAMMVDIAVQLVQKWERLNADEHIEVSEDMTRLTLDTIGLCGFNYRFNSFYRDQPHPFIVSVVRALDEVMNKLQRANPDDPAYDENKRQCQEDIKVMNDYVDKIIADRKARGEQSHDLLTQMLNGKDPETGEPLDDGNIRQQIITFLIAGHQTTSGLLSFALYFLVKNPHVLQKVAEEAARVLVDPVPSYKQVKQLKYVGMVLNEALRLWPVAPMFSLYAKEDTVLGGEYPLTKGDEVMVLVPQLHRDKTIWGDDVEEFRPERFENPSAIPQHAFKPFGNGQRACIGQQFALHEATLVLGMMLKHFDFEDHTNYELVIKESRTLKPEGFVVKAKSKGIPLGGIPSPSTEQSAKKVRKKAENAHNTPLLVLYGSNAGTAEGTARDLADIAMSKGFAPQVATLDSHARNLPREGAVLIVTASYNGHPPDNAKQFVDWLDQASADEVKGVRYSVFGCGDKNWAGTYQKVPAFIDETLAAKGAENIADRGEADASDDFEGTYEEWRDHMWSDVAAYFGLDIENSEDNKSTLSLQFVDSAADMPLAKMHGAFSTNVVASKELQQPGSARSTRHLEIELPKEASYQEGDHLGVIPRNYEGIVNRVTARFGLSASQQIRLEAEEEKLAHLPLAKTVSVEELLQYVELQDPVTRTQLRAMAAKTVCPPHKVELEALLEKQAYKEQVLAKRLTMLELLEKYPACEMKFSEFIALLPSIRPRYYSISSSPRVDEKQASITVSVVSGPAWSGYGEYKGIASNYLAELQEGDTITCFISTPQSEFTLPKDPETPLIMVGPGTGVAPFRGFVQARKQLKEQGQSLGEAHLYFGCRSPHEDYLYQEELENAQSEGIITLHTAFSRMPNQPKTYVQHVMEQDGKKLIELLDQGAHFYICGDGSQMAPAVEATLMKSYADVHQVSEADARLWLQQLEEKGRYAKDVWAG

SEQ ID NO: 447 - DNA, 3147 bp, synthetic construct
  misc_feature 1..3147: note = variant of P450 oxidase from Bacillus megaterium
  source 1..3147: mol_type = other DNA
atgacaattaaggaaatgcctcagcctaagacgtttggagaacttaaaaatttaccgttattaaacacagataaaccggttcaagctttgatgcgtattgcggatgaattaggagaaatctttaaattcgaggcgcctggtagcgtaacgcgctatttatcaagtcagcgtctaattaaagaagcatgcgatgaatcacgctttgataaaaacttaagtcaagcgcttaaatttgcacgtgattttgttggagacgggttatctacaagctggacgcatgaaccgaattggaaaaaagcgcataatatcttagttccaagctttagtcagcatgcaatggggcgttatcatgcgatgatggtcgatatcgccgtgcagcttgttcaaaagtgggagcgtctaaatgcagatgagcatattgaagtatcggaagacatgacacgtttaacgcttgatacaattggtctttgcggctttaactatcgctttaacagcttttaccgagatcagcctcatccatttattgtgagtgtggttcgtgcactggatgaagtaatgaacaagctgcagcgagcaaatccagacgacccagcttatgatgaaaacaagcgccagtgtcaagaagatatcaaggtgatgaacgactatgtagataaaattattgcagatcgcaaagcaaggggtgaacaaagtcatgatttattaacgcagatgctaaacggaaaagatccagaaacgggtgagccgcttgatgacgggaacattcgtcagcaaattattacattcttaattgcgggacaccaaacaacaagtggtcttttatcatttgcgctgtatttcttagtgaaaaatccacatgtattacaaaaagtagcagaagaagcagcacgagttctagtagatcctgttccaagctacaaacaagtcaaacagcttaaatatgttggcatggtcttaaacgaagcgctgcgcttatggccagtagcgcctatgttttccctatatgcaaaagaagatacggtgcttggaggagaatatcctttaacgaaaggcgacgaagtaatggttctggtgcctcagcttcaccgtgataaaacaatttggggagacgatgtggaggagttccgtccagagcgttttgaaaatccaagtgcgattccgcagcatgcgtttaaaccgtttggaaacggtcagcgtgcgtgtatcggtcagcagttcgctcttcatgaagcaacgctggtacttggtatgatgctaaaacactttgactttgaagatcatacaaactacgagctcgttattaaagaatcgcggacgttaaaacctgaaggctttgtggtaaaagcaaaatcgaaaggcattccgcttggcggtattccttcacctagcactgaacagtctgctaaaaaagtacgcaaaaaggcagaaaacgctcataatacgccgctgcttgtgctatacggttcaaatgcgggaacagctgaaggaacggcgcgtgatttagcagatattgcaatgagcaaaggatttgcaccgcaggtcgcaacgcttgattcacacgccagaaatcttccgcgcgaaggagctgtattaattgtaacggcgtcttataacggtcatccgcctgataacgcaaagcaatttgtcgactggttagaccaagcgtctgctgatgaagtaaaaggcgttcgctactccgtatttggatgcggcgataaaaattgggcggggacgtatcaaaaagtgcctgcttttatcgatgaaacgcttgccgctaaaggggcagaaaacatcgctgaccgcggtgaagcagatgcaagcgacgactttgaaggcacatatgaagaatggcgtgatcatatgtggagtgacgtagcagcctactttaacctcgacattgaaaacagtgaagataataaatctactctttcacttcaatttgtcgacagcgccgcggatatgccgcttgcgaaaatgcacggtgcgttttcaacgaacgtcgtagcaagcaaagaacttcaacagaagggcagtgcacgaagcacgcgacatcttgaaattgaacttccaaaagaagcttcttatcaagaaggagatcatttaggtgttattcctcgcaactatgaaggaatagtaaaccgtgtaacagcaaggttcggcctaagcgcatcacagcaaatccgtctggaagcagaagaagaaaaattagctcatttgccactcgctaaaacagtatccgtagaagagcttctgcaatacgtggagcttcaagatcctgttacgcgcacgcagcttcgcgcaatggctgctaaaacggtctgcccgccgcataaagtagagcttgaagccttgcttgaaaagcaagcctacaaagaacaagtgctggcaaaacgtttaacaatgcttgaactgcttgaaaaatacccggcgtgtgaaatgaaattcagcgaatttatcgcccttctgccaagcatacgcccgcgctattactcgatttcttcatcacctcgtgtcgatgaaaaacaagcaagcatcacggtcagcgttgtctcaggaccggcgtggagcggatatggagaatataaaggaattgcgtcgaactatcttgccgagctgcaagaaggagatacgattacgtgctttatttccacaccgcagtcagaatttacgctgccaaaagaccctgaaacgccgcttatcatggtcggaccgggaacaggcgtcgcgccgtttagaggctttgtgcaggcgcgcaaacagctaaaagaacaaggacagtcacttggagaagcacatttatacttcggctgccgttcacctcatgaagactatctgtatcaagaagagcttgaaaacgcccaaagcgaaggcatcattacgcttcataccgctttttctcgcatgccaaatcagccgaaaacatacgttcagcacgtaatggaacaagacggcaagaaattgattgaacttcttgatcaaggagcgcacttctatatttgcggagacggaagccaaatggcacctgccgttgaagcaacgcttatgaaaagctatgctgacgttcaccaagtgagtgaagcagacgctcgcttatggctgcagcagctagaagaaaaaggccgatacgcaaaagacgtgtgggctggg

SEQ ID NO: 448 - protein, 1049 aa, synthetic construct
  REGION 1..1049: note = variant of P450 oxidase from Bacillus megaterium
MTIKEMPQPKTFGELKNLPLLNTDKPVQALMRIADELGEIFKFEAPGSVTRYLSSQRLIKEACDESRFDKNLSQALKFARDFVGDGLSTSWTHEPNWKKAHNILVPSFSQHAMGRYHAMMVDIAVQLVQKWERLNADEHIEVSEDMTRLTLDTIGLCGFNYRFNSFYRDQPHPFIVSVVRALDEVMNKLQRANPDDPAYDENKRQCQEDIKVMNDYVDKIIADRKARGEQSHDLLTQMLNGKDPETGEPLDDGNIRQQIITFLIAGHQTTSGLLSFALYFLVKNPHVLQKVAEEAARVLVDPVPSYKQVKQLKYVGMVLNEALRLWPVAPMFSLYAKEDTVLGGEYPLTKGDEVMVLVPQLHRDKTIWGDDVEEFRPERFENPSAIPQHAFKPFGNGQRACIGQQFALHEATLVLGMMLKHFDFEDHTNYELVIKESRTLKPEGFVVKAKSKGIPLGGIPSPSTEQSAKKVRKKAENAHNTPLLVLYGSNAGTAEGTARDLADIAMSKGFAPQVATLDSHARNLPREGAVLIVTASYNGHPPDNAKQFVDWLDQASADEVKGVRYSVFGCGDKNWAGTYQKVPAFIDETLAAKGAENIADRGEADASDDFEGTYEEWRDHMWSDVAAYFNLDIENSEDNKSTLSLQFVDSAADMPLAKMHGAFSTNVVASKELQQKGSARSTRHLEIELPKEASYQEGDHLGVIPRNYEGIVNRVTARFGLSASQQIRLEAEEEKLAHLPLAKTVSVEELLQYVELQDPVTRTQLRAMAAKTVCPPHKVELEALLEKQAYKEQVLAKRLTMLELLEKYPACEMKFSEFIALLPSIRPRYYSISSSPRVDEKQASITVSVVSGPAWSGYGEYKGIASNYLAELQEGDTITCFISTPQSEFTLPKDPETPLIMVGPGTGVAPFRGFVQARKQLKEQGQSLGEAHLYFGCRSPHEDYLYQEELENAQSEGIITLHTAFSRMPNQPKTYVQHVMEQDGKKLIELLDQGAHFYICGDGSQMAPAVEATLMKSYADVHQVSEADARLWLQQLEEKGRYAKDVWAG

SEQ ID NO: 449 - DNA, 3147 bp, synthetic construct
  misc_feature 1..3147: note = variant of P450 oxidase from Bacillus megaterium
  source 1..3147: mol_type = other DNA
atgacaattaaggaaatgcctcagcctaagacgtttggagaacttaaaaatttaccgttattaaacacagataaaccggttcaagctttgatgcgtattgcggatgaattaggagaaatctttaaattcgaggcgcctggtagcgtaacgcgctatttatcaagtcagcgtctaattaaagaagcatgcgatgaatcacgctttgataaaaacttaagtcaagcgcttaaatttgcacgtgattttgttggagacgggttatctacaagctggacgcatgaaccgaattggaaaaaagcgcataatatcttagttccaagctttagtcagcatgcaatggggcgttatcatgcgatgatggtcgatatcgccgtgcagcttgttcaaaagtgggagcgtctaaatgcagatgagcatattgaagtatcggaagacatgacacgtttaacgcttgatacaattggtctttgcggctttaactatcgctttaacagcttttaccgagatcagcctcatccatttattgtgagtgtggttcgtgcactggatgaagtaatgaacaagctgcagcgagcaaatccagacgacccagcttatgatgaaaacaagcgccagtgtcaagaagatatcaaggtgatgaacgactatgtagataaaattattgcagatcgcaaagcaaggggtgaacaaagtcatgatttattaacgcagatgctaaacggaaaagatccagaaacgggtgagccgcttgatgacgggaacattcgtcagcaaattattacattcttaattgcgggacaccaaacaacaagtggtcttttatcatttgcgctgtatttcttagtgaaaaatccacatgtattacaaaaagtagcagaagaagcagcacgagttctagtagatcctgttccaagctacaaacaagtcaaacagcttaaatatgttggcatggtcttaaacgaagcgctgcgcttatggccagtagcgcctatgttttccctatatgcaaaagaagatacggtgcttggaggagaatatcctttaacgaaaggcgacgaagtaatggttctggtgcctcagcttcaccgtgataaaacaatttggggagacgatgtggaggagttccgtccagagcgttttgaaaatccaagtgcgattccgcagcatgcgtttaaaccgtttggaaacggtcagcgtgcgtgtatcggtcagcagttcgctcttcatgaagcaacgctggtacttggtatgatgctaaaacactttgactttgaagatcatacaaactacgagctcgttattaaagaatcgcggacgttaaaacctgaaggctttgtggtaaaagcaaaatcgaaaggcattccgcttggcggtattccttcacctagcactgaacagtctgctaaaaaagtacgcaaaaaggcagaaaacgctcataatacgccgctgcttgtgctatacggttcaaatgcgggaacagctgaaggaacggcgcgtgatttagcagatattgcaatgagcaaaggatttgcaccgcaggtcgcaacgcttgattcacacgccagaaatcttccgcgcgaaggagctgtattaattgtaacggcgtcttataacggtcatccgcctgataacgcaaagcggtttgtcgactggttagaccaagcgtctgctgatgaagtaaaaggcgttcgctactccgtatttggatgcggcgataaaaattgggcggggacgtatcaaaaagtgcctgcttttatcgatgaaacgcttgccgctaaaggggcagaaaacatcgctgaccgcggtgaagcagatgcaagcgacgactttgaaggcacatatgaagaatggcgtgatcatatgtggagtgacgtagcagcctactttaacctcgacattgaaaacagtgaagataataaatctactctttcacttcaatttgtcgacagcgccgcggatatgccgcttgcgaaaatgcacggtgcgttttcaacgaacgtcgtagcaagcaaagaacttcaacagccaggcagtgcacgaagcacgcgacatcttgaaattgaacttccaaaagaagcttcttatcaagaaggagatcatttaggtgttattcctcgcaactatgaaggaatagtaaaccgtgtaacagcaaggttcggcctaagcgcatcacagcaaatccgtctggaagcagaagaagaaaaattagctcatttgccactcgctaaaacagtatccgtagaagagcttctgcaatacgtggagcttcaagatcctgttacgcgcacgcagcttcgcgcaatggctgctaaaacggtctgcccgccgcataaagtagagcttgaagccttgcttgaaaagcaagcctacaaagaacaagtgctggcaaaacgtttaacaatgcttgaactgcttgaaaaatacccggcgtgtgaaatgaaattcagcgaatttatcgcccttctgccaagcatacgcccgcgctattactcgatttcttcatcacctcgtgtcgatgaaaaacaagcaagcatcacggtcagcgttgtctcaggaccggcgtggagcggatatggagaatataaaggaattgcgtcgaactatcttgccgagctgcaagaaggagatacgattacgtgctttatttccacaccgcagtcagaatttacgctgccaaaagaccctgaaacgccgcttatcatggtcggaccgggaacaggcgtcgcgccgtttagaggctttgtgcaggcgcgcaaacagctaaaagaacaaggacagtcacttggagaagcacatttatacttcggctgccgttcacctcatgaagactatctgtatcaagaagagcttgaaaacgcccaaagcgaaggcatcattacgcttcataccgctttttctcgcatgccaaatcagccgaaaacatacgttcagcacgtaatggaacaagacggcaagaaattgattgaacttcttgatcaaggagcgcacttctatatttgcggagacggaagccaaatggcacctgccgttgaagcaacgcttatgaaaagctatgctgacgttcaccaagtgagtgaagcagacgctcgcttatggctgcagcagctagaagaaaaaggccgatacgcaaaagacgtgtgggctggg

SEQ ID NO: 450 - protein, 1049 aa, synthetic construct
  REGION 1..1049: note = variant of P450 oxidase from Bacillus megaterium
MTIKEMPQPKTFGELKNLPLLNTDKPVQALMRIADELGEIFKFEAPGSVTRYLSSQRLIKEACDESRFDKNLSQALKFARDFVGDGLSTSWTHEPNWKKAHNILVPSFSQHAMGRYHAMMVDIAVQLVQKWERLNADEHIEVSEDMTRLTLDTIGLCGFNYRFNSFYRDQPHPFIVSVVRALDEVMNKLQRANPDDPAYDENKRQCQEDIKVMNDYVDKIIADRKARGEQSHDLLTQMLNGKDPETGEPLDDGNIRQQIITFLIAGHQTTSGLLSFALYFLVKNPHVLQKVAEEAARVLVDPVPSYKQVKQLKYVGMVLNEALRLWPVAPMFSLYAKEDTVLGGEYPLTKGDEVMVLVPQLHRDKTIWGDDVEEFRPERFENPSAIPQHAFKPFGNGQRACIGQQFALHEATLVLGMMLKHFDFEDHTNYELVIKESRTLKPEGFVVKAKSKGIPLGGIPSPSTEQSAKKVRKKAENAHNTPLLVLYGSNAGTAEGTARDLADIAMSKGFAPQVATLDSHARNLPREGAVLIVTASYNGHPPDNAKRFVDWLDQASADEVKGVRYSVFGCGDKNWAGTYQKVPAFIDETLAAKGAENIADRGEADASDDFEGTYEEWRDHMWSDVAAYFNLDIENSEDNKSTLSLQFVDSAADMPLAKMHGAFSTNVVASKELQQPGSARSTRHLEIELPKEASYQEGDHLGVIPRNYEGIVNRVTARFGLSASQQIRLEAEEEKLAHLPLAKTVSVEELLQYVELQDPVTRTQLRAMAAKTVCPPHKVELEALLEKQAYKEQVLAKRLTMLELLEKYPACEMKFSEFIALLPSIRPRYYSISSSPRVDEKQASITVSVVSGPAWSGYGEYKGIASNYLAELQEGDTITCFISTPQSEFTLPKDPETPLIMVGPGTGVAPFRGFVQARKQLKEQGQSLGEAHLYFGCRSPHEDYLYQEELENAQSEGIITLHTAFSRMPNQPKTYVQHVMEQDGKKLIELLDQGAHFYICGDGSQMAPAVEATLMKSYADVHQVSEADARLWLQQLEEKGRYAKDVWAG

SEQ ID NO: 451 - DNA, 3147 bp, synthetic construct
  misc_feature 1..3147: note = variant of P450 oxidase from Bacillus megaterium
  source 1..3147: mol_type = other DNA
atgacaattaaggaaatgcctcagcctaagacgtttggagaacttaaaaatttaccgttattaaacacagataaaccggttcaagctttgatgcgtattgcggatgaattaggagaaatctttaaattcgaggcgcctggtagcgtaacgcgctatttatcaagtcagcgtctaattaaagaagcatgcgatgaatcacgctttgataaaaacttaagtcaagcgcttaaatttgcacgtgattttgttggagacgggttatctacaagctggacgcatgaaccgaattggaaaaaagcgcataatatcttagttccaagctttagtcagcatgcaatggggcgttatcatgcgatgatggtcgatatcgccgtgcagcttgttcaaaagtgggagcgtctaaatgcagatgagcatattgaagtatcggaagacatgacacgtttaacgcttgatacaattggtctttgcggctttaactatcgctttaacagcttttaccgagatcagcctcatccatttattgtgagtgtggttcgtgcactggatgaagtaatgaacaagctgcagcgagcaaatccagacgacccagcttatgatgaaaacaagcgccagtgtcaagaagatatcaaggtgatgaacgactatgtagataaaattattgcagatcgcaaagcaaggggtgaacaaagtcatgatttattaacgcagatgctaaacggaaaagatccagaaacgggtgagccgcttgatgacgggaacattcgtcagcaaattattacattcttaattgcgggacaccaaacaacaagtggtcttttatcatttgcgctgtatttcttagtgaaaaatccacatgtattacaaaaagtagcagaagaagcagcacgagttctagtagatcctgttccaagctacaaacaagtcaaacagcttaaatatgttggcatggtcttaaacgaagcgctgcgcttatggccagtagcgcctatgttttccctatatgcaaaagaagatacggtgcttggaggagaatatcctttaacgaaaggcgacgaagtaatggttctggtgcctcagcttcaccgtgataaaacaatttggggagacgatgtggaggagttccgtccagagcgttttgaaaatccaagtgcgattccgcagcatgcgtttaaaccgtttggaaacggtcagcgtgcgtgtatcggtcagcagttcgctcttcatgaagcaacgctggtacttggtatgatgctaaaacactttgactttgaagatcatacaaactacgagctcgttattaaagaatcgcggacgttaaaacctgaaggctttgtggtaaaagcaaaatcgaaaggcattccgcttggcggtattccttcatggagcactgaacagtctgctaaaaaagtacgcaaaaaggcagaaaacgctcataatacgccgctgcttgtgctatacggttcaaatgcgggaacagctgaaggaacggcgcgtgatttagcagatattgcaatgagcaaaggatttgcaccgcaggtcgcaacgcttgattcacacgccagaaatcttccgcgcgaaggagctgtattaattgtaacggcgtcttataacggtcatccgcctgataacgcaaagcaatttgtcgactggttagaccaagcgtctgctgatgaagtaaaaggcgttcgctactccgtatttggatgcggcgataaaaattgggcggggacgtatcaaaaagtgcctgcttttatcgatgaaacgcttgccgctaaaggggcagaaaacatcgctgaccgcggtgaagcagatgcaagcgacgactttgaaggcacatatgaagaatggcgtgatcatatgtggagtgacgtagcagcctactttaacctcgacattgaaaacagtgaagataataaatctactctttcacttcaatttgtcgacagcgccgcggatatgccgcttgcgaaaatgcacggtgcgttttcaacgaacgtcgtagcaagcaaagaacttcaacagccaggcagtgcacgaagcacgcgacatcttgaaattgaacttccaaaagaagcttcttatcaagaaggagatcatttaggtgttattcctcgcaactatgaaggaatagtaaaccgtgtaacagcaaggttcggcctaagcgcatcacagcaaatccgtctggaagcagaagaagaaaaattagctcatttgccactcgctaaaacagtatccgtagaagagcttctgcaatacgtggagcttcaagatcctgttacgcgcacgcagcttcgcgcaatggctgctaaaacggtctgcccgccgcataaagtagagcttgaagccttgcttgaaaagcaagcctacaaagaacaagtgctggcaaaacgtttaacaatgcttgaactgcttgaaaaatacccggcgtgtgaaatgaaattcagcgaatttatcgcccttctgccaagcatacgcccgcgctattactcgatttcttcatcacctcgtgtcgatgaaaaacaagcaagcatcacggtcagcgttgtctcaggaccggcgtggagcggatatggagaatataaaggaattgcgtcgaactatcttgccgagctgcaagaaggagatacgattacgtgctttatttccacaccgcagtcagaatttacgctgccaaaagaccctgaaacgccgcttatcatggtcggaccgggaacaggcgtcgcgccgtttagaggctttgtgcaggcgcgcaaacagctaaaagaacaaggacagtcacttggagaagcacatttatacttcggctgccgttcacctcatgaagactatctgtatcaagaagagcttgaaaacgcccaaagcgaaggcatcattacgcttcataccgctttttctcgcatgccaaatcagccgaaaacatacgttcagcacgtaatggaacaagacggcaagaaattgattgaacttcttgatcaaggagcgcacttctatatttgcggagacggaagccaaatggcacctgccgttgaagcaacgcttatgaaaagctatgctgacgttcaccaagtgagtgaagcagacgctcgcttatggctgcagcagctagaagaaaaaggccgatacgcaaaagacgtgtgggctggg

SEQ ID NO: 452 - protein, 1049 aa, synthetic construct
  REGION 1..1049: note = variant of P450 oxidase from Bacillus megaterium
MTIKEMPQPKTFGELKNLPLLNTDKPVQALMRIADELGEIFKFEAPGSVTRYLSSQRLIKEACDESRFDKNLSQALKFARDFVGDGLSTSWTHEPNWKKAHNILVPSFSQHAMGRYHAMMVDIAVQLVQKWERLNADEHIEVSEDMTRLTLDTIGLCGFNYRFNSFYRDQPHPFIVSVVRALDEVMNKLQRANPDDPAYDENKRQCQEDIKVMNDYVDKIIADRKARGEQSHDLLTQMLNGKDPETGEPLDDGNIRQQIITFLIAGHQTTSGLLSFALYFLVKNPHVLQKVAEEAARVLVDPVPSYKQVKQLKYVGMVLNEALRLWPVAPMFSLYAKEDTVLGGEYPLTKGDEVMVLVPQLHRDKTIWGDDVEEFRPERFENPSAIPQHAFKPFGNGQRACIGQQFALHEATLVLGMMLKHFDFEDHTNYELVIKESRTLKPEGFVVKAKSKGIPLGGIPSWSTEQSAKKVRKKAENAHNTPLLVLYGSNAGTAEGTARDLADIAMSKGFAPQVATLDSHARNLPREGAVLIVTASYNGHPPDNAKQFVDWLDQASADEVKGVRYSVFGCGDKNWAGTYQKVPAFIDETLAAKGAENIADRGEADASDDFEGTYEEWRDHMWSDVAAYFNLDIENSEDNKSTLSLQFVDSAADMPLAKMHGAFSTNVVASKELQQPGSARSTRHLEIELPKEASYQEGDHLGVIPRNYEGIVNRVTARFGLSASQQIRLEAEEEKLAHLPLAKTVSVEELLQYVELQDPVTRTQLRAMAAKTVCPPHKVELEALLEKQAYKEQVLAKRLTMLELLEKYPACEMKFSEFIALLPSIRPRYYSISSSPRVDEKQASITVSVVSGPAWSGYGEYKGIASNYLAELQEGDTITCFISTPQSEFTLPKDPETPLIMVGPGTGVAPFRGFVQARKQLKEQGQSLGEAHLYFGCRSPHEDYLYQEELENAQSEGIITLHTAFSRMPNQPKTYVQHVMEQDGKKLIELLDQGAHFYICGDGSQMAPAVEATLMKSYADVHQVSEADARLWLQQLEEKGRYAKDVWAG

SEQ ID NO: 453 - DNA, 3147 bp, synthetic construct
  misc_feature 1..3147: note = variant of P450 oxidase from Bacillus megaterium
  source 1..3147: mol_type = other DNA
atgacaattaaggaaatgcctcagcctaagacgtttggagaacttaaaaatttaccgttattaaacacagataaaccggttcaagctttgatgcgtattgcggatgaattaggagaaatctttaaattcgaggcgcctggtagcgtaacgcgctatttatcaagtcagcgtctaattaaagaagcatgcgatgaatcacgctttgataaaaacttaagtcaagcgcttaaatttgcacgtgattttgttggagacgggttatctacaagctggacgcatgaaccgaattggaaaaaagcgcataatatcttagttccaagctttagtcagcatgcaatggggcgttatcatgcgatgatggtcgatatcgccgtgcagcttgttcaaaagtgggagcgtctaaatgcagatgagcatattgaagtatcggaagacatgacacgtttaacgcttgatacaattggtctttgcggctttaactatcgctttaacagcttttaccgagatcagcctcatccatttattgtgagtgtggttcgtgcactggatgaagtaatgaacaagctgcagcgagcaaatccagacgacccagcttatgatgaaaacaagcgccagtgtcaagaagatatcaaggtgatgaacgactatgtagataaaattattgcagatcgcaaagcaaggggtgaacaaagtcatgatttattaacgcagatgctaaacggaaaagatccagaaacgggtgagccgcttgatgacgggaacattcgtcagcaaattattacattcttaattgcgggacaccaaacaacaagtggtcttttatcatttgcgctgtatttcttagtgaaaaatccacatgtattacaaaaagtagcagaagaagcagcacgagttctagtagatcctgttccaagctacaaacaagtcaaacagcttaaatatgttggcatggtcttaaacgaagcgctgcgcttatggccagtagcgcctatgttttccctatatgcaaaagaagatacggtgcttggaggagaatatcctttaacgaaaggcgacgaagtaatggttctggtgcctcagcttcaccgtgataaaacaatttggggagacgatgtggaggagttccgtccagagcgttttgaaaatccaagtgcgattccgcagcatgcgtttaaaccgtttggaaacggtcagcgtgcgtgtatcggtcagcagttcgctcttcatgaagcaacgctggtacttggtatgatgctaaaacactttgactttgaagatcatacaaactacgagctcgttattaaagaatcgcggacgttaaaacctgaaggctttgtggtaaaagcaaaatcgaaaggcattccgcttggcggtattccttcacctagcactgaacagtctgctaaaaaagtacgcaaaaaggcagaaaacgctcataatacgccgctgcttgtgctatacggttcaaatgcgggaacagctgaaggaacggcgcgtgatttagcagatattgcaatgagcaaaggatttgcaccgcaggtcgcaacgcttgattcacacgccagaaatcttccgcgcgaaggagctgtattaattgtaacggcgtcttataacggtcatccgcctgataacgcaaagcaatttgtcgactggttagaccaagcgtctgctgatgaagtaaaaggcgttcgctactccgtatttggatgcggcgataaaaattgggcggggacgtatcaaaaagtgcctgcttttatcgatgaaacgcttgccgctaaaggggcagaaaacatcgctgaccgcggtgaagcagatgcaagcgacgactttgaaggcacatatgaagaatggcgtgatcatatgtggagtgacgtagcagcctactttaacctcgacattgaaaacagtgaagataataaatctactctttcacttcaatttgtcgacagcgccgcggatatgccgcttgcgaaaatgcacggtgcgttttcaacgaacgtcgtagcaagcaaagaacttcaacagccaggcagtgcacgaagcacgcgacatcttgaaattgaacttccaaaagaagcttcttatcaagaaggagatcatttaggtgttattcctcgcaactatgaaggaatagtaaaccgtgtaacagcaaggttcggcctaagcgcatcacagcaaatccgtctggaagcagaagaagaaaaattagctcatttgccactcgctaaaacagtatccgtagaagagcttctgcaatacgtggagcttcaagatcctgttacgcgcacgcagcttcgcgcaatggctgctaaaacggtctgcccgccgcataaagtagagcttgaagccttgcttggtaagcaagcctacaaagaacaagtgctggcaaaacgtttaacaatgcttgaactgcttgaaaaatacccggcgtgtgaaatgaaattcagcgaatttatcgcccttctgccaagcatacgcccgcgctattactcgatttcttcatcacctcgtgtcgatgaaaaacaagcaagcatcacggtcagcgttgtctcaggaccggcgtggagcggatatggagaatataaaggaattgcgtcgaactatcttgccgagctgcaagaaggagatacgattacgtgctttatttccacaccgcagtcagaatttacgctgccaaaagaccctgaaacgccgcttatcatggtcggaccgggaacaggcgtcgcgccgtttagaggctttgtgcaggcgcgcaaacagctaaaagaacaaggacagtcacttggagaagcacatttatacttcggctgccgttcacctcatgaagactatctgtatcaagaagagcttgaaaacgcccaaagcgaaggcatcattacgcttcataccgctttttctcgcatgccaaatcagccgaaaacatacgttcagcacgtaatggaacaagacggcaagaaattgattgaacttcttgatcaaggagcgcacttctatatttgcggagacggaagccaaatggcacctgccgttgaagcaacgcttatgaaaagctatgctgacgttcaccaagtgagtgaagcagacgctcgcttatggctgcagcagctagaagaaaaaggccgatacgcaaaagacgtgtgggctggg

SEQ ID NO: 454 - protein, 1049 aa, synthetic construct
  REGION 1..1049: note = variant of P450 oxidase from Bacillus megaterium
MTIKEMPQPKTFGELKNLPLLNTDKPVQALMRIADELGEIFKFEAPGSVTRYLSSQRLIKEACDESRFDKNLSQALKFARDFVGDGLSTSWTHEPNWKKAHNILVPSFSQHAMGRYHAMMVDIAVQLVQKWERLNADEHIEVSEDMTRLTLDTIGLCGFNYRFNSFYRDQPHPFIVSVVRALDEVMNKLQRANPDDPAYDENKRQCQEDIKVMNDYVDKIIADRKARGEQSHDLLTQMLNGKDPETGEPLDDGNIRQQIITFLIAGHQTTSGLLSFALYFLVKNPHVLQKVAEEAARVLVDPVPSYKQVKQLKYVGMVLNEALRLWPVAPMFSLYAKEDTVLGGEYPLTKGDEVMVLVPQLHRDKTIWGDDVEEFRPERFENPSAIPQHAFKPFGNGQRACIGQQFALHEATLVLGMMLKHFDFEDHTNYELVIKESRTLKPEGFVVKAKSKGIPLGGIPSPSTEQSAKKVRKKAENAHNTPLLVLYGSNAGTAEGTARDLADIAMSKGFAPQVATLDSHARNLPREGAVLIVTASYNGHPPDNAKQFVDWLDQASADEVKGVRYSVFGCGDKNWAGTYQKVPAFIDETLAAKGAENIADRGEADASDDFEGTYEEWRDHMWSDVAAYFNLDIENSEDNKSTLSLQFVDSAADMPLAKMHGAFSTNVVASKELQQPGSARSTRHLEIELPKEASYQEGDHLGVIPRNYEGIVNRVTARFGLSASQQIRLEAEEEKLAHLPLAKTVSVEELLQYVELQDPVTRTQLRAMAAKTVCPPHKVELEALLGKQAYKEQVLAKRLTMLELLEKYPACEMKFSEFIALLPSIRPRYYSISSSPRVDEKQASITVSVVSGPAWSGYGEYKGIASNYLAELQEGDTITCFISTPQSEFTLPKDPETPLIMVGPGTGVAPFRGFVQARKQLKEQGQSLGEAHLYFGCRSPHEDYLYQEELENAQSEGIITLHTAFSRMPNQPKTYVQHVMEQDGKKLIELLDQGAHFYICGDGSQMAPAVEATLMKSYADVHQVSEADARLWLQQLEEKGRYAKDVWAG

SEQ ID NO: 455 - DNA, 3147 bp, synthetic construct
  misc_feature 1..3147: note = variant of P450 oxidase from Bacillus megaterium
  source 1..3147: mol_type = other DNA
atgacaattaaggaaatgcctcagcctaagacgtttggagaacttaaaaatttaccgttattaaacacagataaaccggttcaagctttgatgcgtattgcggatgaattaggagaaatctttaaattcgaggcgcctggtagcgtaacgcgctatttatcaagtcagcgtctaattaaagaagcatgcgatgaatcacgctttgataaaaacttaagtcaagcgcttaaatttgcacgtgattttgttggagacgggttatctacaagctggacgcatgaaccgaattggaaaaaagcgcataatatcttagttccaagctttagtcagcatgcaatggggcgttatcatgcgatgatggtcgatatcgccgtgcagcttgttcaaaagtgggagcgtctaaatgcagatgagcatattgaagtatcggaagacatgacacgtttaacgcttgatacaattggtctttgcggctttaactatcgctttaacagcttttaccgagatcagcctcatccatttattgtgagtgtggttcgtgcactggatgaagtaatgaacaagctgcagcgagcaaatccagacgacccagcttatgatgaaaacaagcgccagtgtcaagaagatatcaaggtgatgaacgactatgtagataaaattattgcagatcgcaaagcaaggggtgaacaaagtcatgatttattaacgcagatgctaaacggaaaagatccagaaacgggtgagccgcttgatgacgggaacattcgtcagcaaattattacattcttaattgcgggacaccaaacaacaagtggtcttttatcatttgcgctgtatttcttagtgaaaaatccacatgtattacaaaaagtagcagaagaagcagcacgagttctagtagatcctgttccaagctacaaacaagtcaaacagcttaaatatgttggcatggtcttaaacgaagcgctgcgcttatggccagtagcgcctatgttttccctatatgcaaaagaagatacggtgcttggaggagaatatcctttaacgaaaggcgacgaagtaatggttctggtgcctcagcttcaccgtgataaaacaatttggggagacgatgtggaggagttccgtccagagcgttttgaaaatccaagtgcgattccgcagcatgcgtttaaaccgtttggaaacggtcagcgtgcgtgtatcggtcagcagttcgctcttcatgaagcaacgctggtacttggtatgatgctaaaacactttgactttgaagatcatacaaactacgagctcgttattaaagaatcgcggacgttaaaacctgaaggctttgtggtaaaagcaaaatcgaaaggcattccgcttggcggtattccttcacctagcactgaacagtctgctaaaaaagtacgcaaaaaggcagaaaacgctcataatacgccgctgcttgtgctatacggttcaaatgcgggaacagctgaaggaacggcgcgtgatttagcagatattgcaatgagcaaaggatttgcaccgcaggtcgcaacgcttgattcacacgccagaaatcttccgcgcgaaggagctgtattaattgtaacggcgtcttataacggtcatccgcctgataacgcaaagcaatttgtcgactggttagaccaagcgtctgctgatgaagtaaaaggcgttcgctactccgtatttggatgcggcgataaaaattgggcggggacgtatcaaaaagtgcctgcttttatcgatgaaacgcttgccgctaaaggggcagaaaacatcgctgaccgcggtgaagcagatgcaagcgacgactttgaaggcacatatgaagaatggcgtgatcatatgtggagtgacgtagcagcctactttaacctcgacattgaaaacagtgaagataataaatctactctttcacttcaatttgtcgacagcagtgcggatatgccgcttgcgaaaatgcacggtgcgttttcaacgaacgtcgtagcaagcaaagaacttcaacagccaggcagtgcacgaagcacgcgacatcttgaaattgaacttccaaaagaagcttcttatcaagaaggagatcatttaggtgttattcctcgcaactatgaaggaatagtaaaccgtgtaacagcaaggttcggcctaagcgcatcacagcaaatccgtctggaagcagaagaagaaaaattagctcatttgccactcgctaaaacagtatccgtagaagagcttctgcaatacgtggagcttcaagatcctgttacgcgcacgcagcttcgcgcaatggctgctaaaacggtctgcccgccgcataaagtagagcttgaagccttgcttgaaaagcaagcctacaaagaacaagtgctggcaaaacgtttaacaatgcttgaactgcttgaaaaatacccggcgtgtgaaatgaaattcagcgaatttatcgcccttctgccaagcatacgcccgcgctattactcgatttcttcatcacctcgtgtcgatgaaaaacaagcaagcatcacggtcagcgttgtctcaggaccggcgtggagcggatatggagaatataaaggaattgcgtcgaactatcttgccgagctgcaagaaggagatacgattacgtgctttatttccacaccgcagtcagaatttacgctgccaaaagaccctgaaacgccgcttatcatggtcggaccgggaacaggcgtcgcgccgtttagaggctttgtgcaggcgcgcaaacagctaaaagaacaaggacagtcacttggagaagcacatttatacttcggctgccgttcacctcatgaagactatctgtatcaagaagagcttgaaaacgcccaaagcgaaggcatcattacgcttcataccgctttttctcgcatgccaaatcagccgaaaacatacgttcagcacgtaatggaacaagacggcaagaaattgattgaacttcttgatcaaggagcgcacttctatatttgcggagacggaagccaaatggcacctgccgttgaagcaacgcttatgaaaagctatgctgacgttcaccaagtgagtgaagcagacgctcgcttatggctgcagcagctagaagaaaaaggccgatacgcaaaagacgtgtgggctggg

SEQ ID NO: 456 - protein, 1049 aa, synthetic construct
  REGION 1..1049: note = variant of P450 oxidase from Bacillus megaterium
MTIKEMPQPKTFGELKNLPLLNTDKPVQALMRIADELGEIFKFEAPGSVTRYLSSQRLIKEACDESRFDKNLSQALKFARDFVGDGLSTSWTHEPNWKKAHNILVPSFSQHAMGRYHAMMVDIAVQLVQKWERLNADEHIEVSEDMTRLTLDTIGLCGFNYRFNSFYRDQPHPFIVSVVRALDEVMNKLQRANPDDPAYDENKRQCQEDIKVMNDYVDKIIADRKARGEQSHDLLTQMLNGKDPETGEPLDDGNIRQQIITFLIAGHQTTSGLLSFALYFLVKNPHVLQKVAEEAARVLVDPVPSYKQVKQLKYVGMVLNEALRLWPVAPMFSLYAKEDTVLGGEYPLTKGDEVMVLVPQLHRDKTIWGDDVEEFRPERFENPSAIPQHAFKPFGNGQRACIGQQFALHEATLVLGMMLKHFDFEDHTNYELVIKESRTLKPEGFVVKAKSKGIPLGGIPSPSTEQSAKKVRKKAENAHNTPLLVLYGSNAGTAEGTARDLADIAMSKGFAPQVATLDSHARNLPREGAVLIVTASYNGHPPDNAKQFVDWLDQASADEVKGVRYSVFGCGDKNWAGTYQKVPAFIDETLAAKGAENIADRGEADASDDFEGTYEEWRDHMWSDVAAYFNLDIENSEDNKSTLSLQFVDSSADMPLAKMHGAFSTNVVASKELQQPGSARSTRHLEIELPKEASYQEGDHLGVIPRNYEGIVNRVTARFGLSASQQIRLEAEEEKLAHLPLAKTVSVEELLQYVELQDPVTRTQLRAMAAKTVCPPHKVELEALLEKQAYKEQVLAKRLTMLELLEKYPACEMKFSEFIALLPSIRPRYYSISSSPRVDEKQASITVSVVSGPAWSGYGEYKGIASNYLAELQEGDTITCFISTPQSEFTLPKDPETPLIMVGPGTGVAPFRGFVQARKQLKEQGQSLGEAHLYFGCRSPHEDYLYQEELENAQSEGIITLHTAFSRMPNQPKTYVQHVMEQDGKKLIELLDQGAHFYICGDGSQMAPAVEATLMKSYADVHQVSEADARLWLQQLEEKGRYAKDVWAG

SEQ ID NO: 457 - DNA, 3147 bp, synthetic construct
  misc_feature 1..3147: note = variant of P450 oxidase from Bacillus megaterium
  source 1..3147: mol_type = other DNA
atgacaattaaggaaatgcctcagcctaagacgtttggagaacttaaaaatttaccgttattaaacacagataaaccggttcaagctttgatgcgtattgcggatgaattaggagaaatctttaaattcgaggcgcctggtagcgtaacgcgctatttatcaagtcagcgtctaattaaagaagcatgcgatgaatcacgctttgataaaaacttaagtcaagcgcttaaatttgcacgtgattttgttggagacgggttatctacaagctggacgcatgaaccgaattggaaaaaagcgcataatatcttagttccaagctttagtcagcatgcaatggggcgttatcatgcgatgatggtcgatatcgccgtgcagcttgttcaaaagtgggagcgtctaaatgcagatgagcatattgaagtatcggaagacatgacacgtttaacgcttgatacaattggtctttgcggctttaactatcgctttaacagcttttaccgagatcagcctcatccatttattgtgagtgtggttcgtgcactggatgaagtaatgaacaagctgcagcgagcaaatccagacgacccagcttatgatgaaaacaagcgccagtgtcaagaagatatcaaggtgatgaacgactatgtagataaaattattgcagatcgcaaagcaaggggtgaacaaagtcatgatttattgacgcagatgctaaacggaaaagatccagaaacgggtgagccgcttgatgacgggaacattcgtcagcaaattattacattcttaattgcgggacaccaaacaacaagtggtcttttatcatttgcgctgtatttcttagtgaaaaatccacatgtattacaaaaagtagcagaagaagcagcacgagttctagtagatcctgttccaagctacaaacaagtcaaacagcttaaatatgttggcatggtcttaaacgaagcgctgcgcttatggccagtagcgcctatgttttccctatatgcaaaagaagatacggtgcttggaggagaatatcctttaacgaaaggcgacgaagtaatggttctggtgcctcagcttcaccgtgataaaacaatttggggagacgatgtggaggagttccgtccagagcgttttgaaaatccaagtgcgattccgcagcatgcgtttaaaccgtttggaaacggtcagcgtgcgtgtatcggtcagcagttcgctcttcatgaagcaacgctggtacttggtatgatgctaaaacactttgactttgaagatcatacaaactacgagctcgttattaaagaatcgcggacgttaaaacctgaaggctttgtggtaaaagcaaaatcgaaaggcattccgcttggcggtattccttcacctagcactgaacagtctgctaaaaaagtacgcaaaaaggcagaaaacgctcataatacgccgctgcttgtgctatacggttcaaatgcgggaacagctgaaggaacggcgcgtgatttagcagatattgcaatgagcaaaggatttgcaccgcaggtcgcaacgcttgattcacacgccagaaatcttccgcgcgaaggagctgtattaattgtaacggcgtcttataacggtcatccgcctgataacgcaaagcaatttgtcgactggttagaccaagcgtctgctgatgaagtaaaaggcgttcgctactccgtatttggatgcggcgataaaaattgggcggggacgtatcaaaaagtgcctgcttttatcgatgaaacgcttgccgctaaaggggcagaaaacatcgctgaccgcggtgaagcagatgcaagcgacgactttgaaggcacatatgaagaatggcgtgatcatatgtggagtgacgtagcagcctactttaacctcgacattgaaaacagtgaagataataaatctactctttcacttcaatttgtcgacagcgccgcggatatgccgcttgcgaaaatgcacggtgcgttttcaacgaacgtcgtagcaagcaaagggcttcaacagccaggcagtgcacgaagcacgcgacatcttgaaattgaacttccaaaagaagcttcttatcaagaaggagatcatttaggtgttattcctcgcaactatgaaggaatagtaaaccgtgtaacagcaaggttcggcctaagcgcatcacagcaaatccgtctggaagcagaagaagaaaaattagctcatttgccactcgctaaaacagtatccgtagaagagcttctgcaatacgtggagcttcaagatcctgttacgcgcacgcagcttcgcgcaatggctgctaaaacggtctgcccgccgcataaagtagagcttgaagccttgcttgaaaagcaagcctacaaagaacaagtgctggcaaaacgtttaacaatgcttgaactgcttgaaaaatacccggcgtgtgaaatgaaattcagcgaatttatcgcccttctgccaagcatacgcccgcgctattactcgatttcttcatcacctcgtgtcgatgaaaaacaagcaagcatcacggtcagcgttgtctcaggaccggcgtggagcggatatggagaatataaaggaattgcgtcgaactatcttgccgagctgcaagaaggagatacgattacgtgctttatttccacaccgcagtcagaatttacgctgccaaaagaccctgaaacgccgcttatcatggtcggaccgggaacaggcgtcgcgccgtttagaggctttgtgcaggcgcgcaaacagctaaaagaacaaggacagtcacttggagaagcacatttatacttcggctgccgttcacctcatgaagactatctgtatcaagaagagcttgaaaacgcccaaagcgaaggcatcattacgcttcataccgctttttctcgcatgccaaatcagccgaaaacatacgttcagcacgtaatggaacaagacggcaagaaattgattgaacttcttgatcaaggagcgcacttctatatttgcggagacggaagccaaatggcacctgccgttgaagcaacgcttatgaaaagctatgctgacgttcaccaagtgagtgaagcagacgctcgcttatggctgcagcagctagaagaaaaaggccgatacgcaaaagacgtgtgggctggg

SEQ ID NO: 458 - protein, 1049 aa, synthetic construct
  REGION 1..1049: note = variant of P450 oxidase from Bacillus megaterium
MTIKEMPQPKTFGELKNLPLLNTDKPVQALMRIADELGEIFKFEAPGSVTRYLSSQRLIKEACDESRFDKNLSQALKFARDFVGDGLSTSWTHEPNWKKAHNILVPSFSQHAMGRYHAMMVDIAVQLVQKWERLNADEHIEVSEDMTRLTLDTIGLCGFNYRFNSFYRDQPHPFIVSVVRALDEVMNKLQRANPDDPAYDENKRQCQEDIKVMNDYVDKIIADRKARGEQSHDLLTQMLNGKDPETGEPLDDGNIRQQIITFLIAGHQTTSGLLSFALYFLVKNPHVLQKVAEEAARVLVDPVPSYKQVKQLKYVGMVLNEALRLWPVAPMFSLYAKEDTVLGGEYPLTKGDEVMVLVPQLHRDKTIWGDDVEEFRPERFENPSAIPQHAFKPFGNGQRACIGQQFALHEATLVLGMMLKHFDFEDHTNYELVIKESRTLKPEGFVVKAKSKGIPLGGIPSPSTEQSAKKVRKKAENAHNTPLLVLYGSNAGTAEGTARDLADIAMSKGFAPQVATLDSHARNLPREGAVLIVTASYNGHPPDNAKQFVDWLDQASADEVKGVRYSVFGCGDKNWAGTYQKVPAFIDETLAAKGAENIADRGEADASDDFEGTYEEWRDHMWSDVAAYFNLDIENSEDNKSTLSLQFVDSAADMPLAKMHGAFSTNVVASKGLQQPGSARSTRHLEIELPKEASYQEGDHLGVIPRNYEGIVNRVTARFGLSASQQIRLEAEEEKLAHLPLAKTVSVEELLQYVELQDPVTRTQLRAMAAKTVCPPHKVELEALLEKQAYKEQVLAKRLTMLELLEKYPACEMKFSEFIALLPSIRPRYYSISSSPRVDEKQASITVSVVSGPAWSGYGEYKGIASNYLAELQEGDTITCFISTPQSEFTLPKDPETPLIMVGPGTGVAPFRGFVQARKQLKEQGQSLGEAHLYFGCRSPHEDYLYQEELENAQSEGIITLHTAFSRMPNQPKTYVQHVMEQDGKKLIELLDQGAHFYICGDGSQMAPAVEATLMKSYADVHQVSEADARLWLQQLEEKGRYAKDVWAG

SEQ ID NO: 459 - DNA, 3147 bp, synthetic construct
  misc_feature 1..3147: note = variant of P450 oxidase from Bacillus megaterium
  source 1..3147: mol_type = other DNA
atgacaattaaggaaatgcctcagcctaagacgtttggagaacttaaaaatttaccgttattaaacacagataaaccggttcaagctttgatgcgtattgcggatgaattaggagaaatctttaaattcgaggcgcctggtagcgtaacgcgctatttatcaagtcagcgtctaattaaagaagcatgcgatgaatcacgctttgataaaaacttaagtcaagcgcttttgtttgcacgtgattttgttggagacgggttatctacaagctggacgcatgaaccgaattggaaaaaagcgcataatatcttagttccaagctttagtcagcatgcaatggggcgttatcatgcgatgatggtcgatatcgccgtgcagcttgttcaaaagtgggagcgtctaaatgcagatgagcatattgaagtatcggaagacatgacacgtttaacgcttgatacaattggtctttgcggctttaactatcgctttaacagcttttaccgagatcagcctcatccatttattgtgagtgtggttcgtgcactggatgaagtaatgaacaagctgcagcgagcaaatccagacgacccagcttatgatgaaaacaagcgccagtgtcaagaagatatcaaggtgatgaacgactatgtagataaaattattgcagatcgcaaagcaaggggtgaacaaagtcatgatttattaacgcagatgctaaacggaaaagatccagaaacgggtgagccgcttgatgacgggaacattcgtcagcaaattattacattcttaattgcgggacaccaaacaacaagtggtcttttatcatttgcgctgtatttcttagtgaaaaatccacatgtattacaaaaagtagcagaagaagcagcacgagttctagtagatcctgttccaagctacaaacaagtcaaacagcttaaatatgttggcatggtcttaaacgaagcgctgcgcttatggccagtagcgcctatgttttccctatatgcaaaagaagatacggtgcttggaggagaatatcctttaacgaaaggcgacgaagtaatggttctggtgcctcagcttcaccgtgataaaacaatttggggagacgatgtggaggagttccgtccagagcgttttgaaaatccaagtgcgattccgcagcatgcgtttaaaccgtttggaaacggtcagcgtgcgtgtatcggtcagcagttcgctcttcatgaagcaacgctggtacttggtatgatgctaaaacactttgactttgaagatcatacaaactacgagctcgttattaaagaatcgcggacgttaaaacctgaaggctttgtggtaaaagcaaaatcgaaaggcattccgcttggcggtattccttcacctagcactgaacagtctgctaaaaaagtacgcaaaaaggcagaaaacgctcataatacgccgctgcttgtgctatacggttcaaatgcgggaacagctgaaggaacggcgcgtgatttagcagatattgcaatgagcaaaggatttgcaccgcaggtcgcaacgcttgattcacacgccagaaatcttccgcgcgaaggagctgtattaattgtaacggcgtcttataacggtcatccgcctgataacgcaaagcaatttgtcgactggttagaccaagcgtctgctgatgaagtaaaaggcgttcgctactccgtatttggatgcggcgataaaaattgggcggggacgtatcaaaaagtgcctgcttttatcgatgaaacgcttgccgctaaaggggcagaaaacatcgctgaccgcggtgaagcagatgcaagcgacgactttgaaggcacatatgaagaatggcgtgatcatatgtggagtgacgtagcagcctactttaacctcgacattgaaaacagtgaagataataaatctactctttcacttcaatttgtcgacagcgccgcggatatgccgcttgcgaaaatgcacggtgcgttttcaacgaacgtcgtagcaagcaaagaacttcaacagccaggcagtgcacgaagcacgcgacatcttgaaattgaacttccaaaagaagcttcttatcaagaaggagatcatttaggtgttattcctcgcaactatgaaggaatagtaaaccgtgtaacagcaaggttcggcctaagcgcatcacagcaaatccgtctggaagcagaagaagaaaaattagctcatttgccactcgctaaaacagtatccgtagaagagcttctgcaatacgtggagcttcaagatcctgttacgcgcacgcagcttcgcgcaatggctgctaaaacggtctgcccgccgcataaagtagagcttgaagccttgcttgaaaagcaagcctacaaagaacaagtgctggcaaaacgtttaacaatgcttgaactgcttgaaaaatacccggcgtgtgaaatgaaattcagcgaatttatcgcccttctgccaagcatacgcccgcgctattactcgatttcttcatcacctcgtgtcgatgaaaaacaagcaagcatcacggtcagcgttgtctcaggaccggcgtggagcggatatggagaatataaaggaattgcgtcgaactatcttgccgagctgcaagaaggagatacgattacgtgctttatttccacaccgcagtcagaatttacgctgccaaaagaccctgaaacgccgcttatcatggtcggaccgggaacaggcgtcgcgccgtttagaggctttgtgcaggcgcgcaaacagctaaaagaacaaggacagtcacttggagaagcacatttatacttcggctgccgttcacctcatgaagactatctgtatcaagaagagcttgaaaacgcccaaagcgaaggcatcattacgcttcataccgctttttctcgcatgccaaatcagccgaaaacatacgttcagcacgtaatggaacaagacggcaagaaattgattgaacttcttgatcaaggagcgcacttctatatttgcggagacggaagccaaatggcacctgccgttgaagcaacgcttatgaaaagctatgctgacgttcaccaagtgagtgaagcagacgctcgcttatggctgcagcagctagaagaaaaaggccgatacgcaaaagacgtgtgggctggg

SEQ ID NO: 460 - protein, 1049 aa, synthetic construct
  REGION 1..1049: note = variant of P450 oxidase from Bacillus megaterium
MTIKEMPQPKTFGELKNLPLLNTDKPVQALMRIADELGEIFKFEAPGSVTRYLSSQRLIKEACDESRFDKNLSQALLFARDFVGDGLSTSWTHEPNWKKAHNILVPSFSQHAMGRYHAMMVDIAVQLVQKWERLNADEHIEVSEDMTRLTLDTIGLCGFNYRFNSFYRDQPHPFIVSVVRALDEVMNKLQRANPDDPAYDENKRQCQEDIKVMNDYVDKIIADRKARGEQSHDLLTQMLNGKDPETGEPLDDGNIRQQIITFLIAGHQTTSGLLSFALYFLVKNPHVLQKVAEEAARVLVDPVPSYKQVKQLKYVGMVLNEALRLWPVAPMFSLYAKEDTVLGGEYPLTKGDEVMVLVPQLHRDKTIWGDDVEEFRPERFENPSAIPQHAFKPFGNGQRACIGQQFALHEATLVLGMMLKHFDFEDHTNYELVIKESRTLKPEGFVVKAKSKGIPLGGIPSPSTEQSAKKVRKKAENAHNTPLLVLYGSNAGTAEGTARDLADIAMSKGFAPQVATLDSHARNLPREGAVLIVTASYNGHPPDNAKQFVDWLDQASADEVKGVRYSVFGCGDKNWAGTYQKVPAFIDETLAAKGAENIADRGEADASDDFEGTYEEWRDHMWSDVAAYFNLDIENSEDNKSTLSLQFVDSAADMPLAKMHGAFSTNVVASKELQQPGSARSTRHLEIELPKEASYQEGDHLGVIPRNYEGIVNRVTARFGLSASQQIRLEAEEEKLAHLPLAKTVSVEELLQYVELQDPVTRTQLRAMAAKTVCPPHKVELEALLEKQAYKEQVLAKRLTMLELLEKYPACEMKFSEFIALLPSIRPRYYSISSSPRVDEKQASITVSVVSGPAWSGYGEYKGIASNYLAELQEGDTITCFISTPQSEFTLPKDPETPLIMVGPGTGVAPFRGFVQARKQLKEQGQSLGEAHLYFGCRSPHEDYLYQEELENAQSEGIITLHTAFSRMPNQPKTYVQHVMEQDGKKLIELLDQGAHFYICGDGSQMAPAVEATLMKSYADVHQVSEADARLWLQQLEEKGRYAKDVWAG

SEQ ID NO: 461 - DNA, 3147 bp, synthetic construct
  misc_feature 1..3147: note = variant of P450 oxidase from Bacillus megaterium
  source 1..3147: mol_type = other DNA
atgacaattaaggaaatgcctcagcctaagacgtttggagaacttaaaaatttaccgttattaaacacagataaaccggttcaagctttgatgcgtattgcggatgaattaggagaaatctttaaattcgaggcgcctggtagcgtaacgcgctatttatcaagtcagcgtctaattaaagaagcatgcgatgaatcacgctttgataaaaacttaagtcaagcgcttaaatttgcacgtgattttgttggagacgggttatctacaagctggacgcatgaaccgaattggaaaaaagcgcataatatcttagttccaagctttagtcagcatgcaatggggcgttatcatgcgatgatggtcgatatcgccgtgcagcttgttcaaaagtgggagcgtctaaatgcagatgagcatattgaagtatcggaagacatgacacgtttaacgcttgatacaattggtctttgcggctttaactatcgctttaacagcttttaccgagatcagcctcatccatttattgtgagtgtggttcgtgcactggatgaagtaatgaacaagctgcagcgagcaaatccagacgacccagcttatgatgaaaacaagcgccagtgtcaagaagatatcaaggtgatgaacgactatgtagataaaattattgcagatcgcaaagcaaggggtgaacaaagtcatgatttattaacgcagatgctaaacggaaaagatccagaaacgggtgagccgcttgatgacgggaacattcgtcagcaaattattacattcttaattgcgggacaccaaacaacaagtggtcttttatcatttgcgctgtatttcttagtgaaaaatccacatgtattacaaaaagtagcagaagaagcagcacgagttctagtagatcctgttccaagctacaaacaagtcaaacagcttaaatatgttggcatggtcttaaacgaagcgctgcgcttatggccagtagcgcctatgttttccctatatgcaaaagaagatacggtgcttggaggagaatatcctttaacgaaaggcgacgaagtaatggttctggtgcctcagcttcaccgtgataaaacaatttggggagacgatgtggaggagttccgtccagagcgttttgaaaatccaagtgcgattccgcagcatgcgtttaaaccgtttggaaacggtcagcgtgcgtgtatcggtcagcagttcgctcttcatgaagcaacgctggtacttggtatgatgctaaaacactttgactttgaagatcatacaaactacgagctcgttattaaagaatcgcggacgttaaaacctgaaggctttgtggtaaaagcaaaatcgaaaggcattccgcttggcggtattccttcacctagcactgaacagtctgctaaaaaagtacgcaaaaaggcagaaaacgctcataatacgccgctgcttgtgctatacggttcaaatgcgggaacagctgaaggaacggcgcgtgatttagcagatattgcaatgagcaaaggatttgcaccgcaggtcgcaacgcttgattcacacgccagaaatcttccgcgcgaaggagctgtattaattgtaacggcgtcttataacggtcatccgcctgataacgcaaagcaatttgtcgactggttagaccaagcgtctgctgatgaagtaaaaggcgttcgctactccgtatttggatgcggcgataaaaattgggcggggacgtatcaaaaagtgcctgcttttatcgatgaaacgcttgccgctaaaggggcagaaaacatcgctgaccgcggtgaagcagatgcaagcgacgactttgaaggcacatatgaagaatggcgtgatcatatgtggagtgacgtagcagcctactttaacctcgacattgaaaacagtgaagataataaatctactctttcacttcaatttgtcgacagcgccgcggatatgccgcttgcgaaaatgcacggtgcgttttcaacgaacgtcgtagcaagcaaagaacttcaacagccaggcagtgcacgaagcacgcgacatcttgaaattgaacttccaaaagaagcttcttatcaagaaggagatcatttaggtgttattcctcgcaactatgaaggaatagtaaaccgtgtaacagcaaggttcggcctaagcgcatcacagcaaatccgtctggaagcagaagaagaaaaattagctcatttgccactcgctaaaacagtatccgtagaagagcttctgcaatacgtggagcttcaagatcctgttacgcgcacgcagcttcgcgcaatggctgctaaaacggtctgcccgccgcataaagtagagcttgaagccttgcttgaacggcaagcctacaaagaacaagtgctggcaaaacgtttaacaatgcttgaactgcttgaaaaatacccggcgtgtgaaatgaaattcagcgaatttatcgcccttctgccaagcatacgcccgcgctattactcgatttcttcatcacctcgtgtcgatgaaaaacaagcaagcatcacggtcagcgttgtctcaggaccggcgtggagcggatatggagaatataaaggaattgcgtcgaactatcttgccgagctgcaagaaggagatacgattacgtgctttatttccacaccgcagtcagaatttacgctgccaaaagaccctgaaacgccgcttatcatggtcggaccgggaacaggcgtcgcgccgtttagaggctttgtgcaggcgcgcaaacagctaaaagaacaaggacagtcacttggagaagcacatttatacttcggctgccgttcacctcatgaagactatctgtatcaagaagagcttgaaaacgcccaaagcgaaggcatcattacgcttcataccgctttttctcgcatgccaaatcagccgaaaacatacgttcagcacgtaatggaacaagacggcaagaaattgattgaacttcttgatcaaggagcgcacttctatatttgcggagacggaagccaaatggcacctgccgttgaagcaacgcttatgaaaagctatgctgacgttcaccaagtgagtgaagcagacgctcgcttatggctgcagcagctagaagaaaaaggccgatacgcaaaagacgtgtgggctggg

SEQ ID NO: 462 - protein, 1049 aa, synthetic construct
  REGION 1..1049: note = variant of P450 oxidase from Bacillus megaterium
MTIKEMPQPKTFGELKNLPLLNTDKPVQALMRIADELGEIFKFEAPGSVTRYLSSQRLIKEACDESRFDKNLSQALKFARDFVGDGLSTSWTHEPNWKKAHNILVPSFSQHAMGRYHAMMVDIAVQLVQKWERLNADEHIEVSEDMTRLTLDTIGLCGFNYRFNSFYRDQPHPFIVSVVRALDEVMNKLQRANPDDPAYDENKRQCQEDIKVMNDYVDKIIADRKARGEQSHDLLTQMLNGKDPETGEPLDDGNIRQQIITFLIAGHQTTSGLLSFALYFLVKNPHVLQKVAEEAARVLVDPVPSYKQVKQLKYVGMVLNEALRLWPVAPMFSLYAKEDTVLGGEYPLTKGDEVMVLVPQLHRDKTIWGDDVEEFRPERFENPSAIPQHAFKPFGNGQRACIGQQFALHEATLVLGMMLKHFDFEDHTNYELVIKESRTLKPEGFVVKAKSKGIPLGGIPSPSTEQSAKKVRKKAENAHNTPLLVLYGSNAGTAEGTARDLADIAMSKGFAPQVATLDSHARNLPREGAVLIVTASYNGHPPDNAKQFVDWLDQASADEVKGVRYSVFGCGDKNWAGTYQKVPAFIDETLAAKGAENIADRGEADASDDFEGTYEEWRDHMWSDVAAYFNLDIENSEDNKSTLSLQFVDSAADMPLAKMHGAFSTNVVASKELQQPGSARSTRHLEIELPKEASYQEGDHLGVIPRNYEGIVNRVTARFGLSASQQIRLEAEEEKLAHLPLAKTVSVEELLQYVELQDPVTRTQLRAMAAKTVCPPHKVELEALLERQAYKEQVLAKRLTMLELLEKYPACEMKFSEFIALLPSIRPRYYSISSSPRVDEKQASITVSVVSGPAWSGYGEYKGIASNYLAELQEGDTITCFISTPQSEFTLPKDPETPLIMVGPGTGVAPFRGFVQARKQLKEQGQSLGEAHLYFGCRSPHEDYLYQEELENAQSEGIITLHTAFSRMPNQPKTYVQHVMEQDGKKLIELLDQGAHFYICGDGSQMAPAVEATLMKSYADVHQVSEADARLWLQQLEEKGRYAKDVWAG

SEQ ID NO: 463 - DNA, 3147 bp, synthetic construct
  misc_feature 1..3147: note = variant of P450 oxidase from Bacillus megaterium
  source 1..3147: mol_type = other DNA
atgacaattaaggaaatgcctcagcctaagacgtttggagaacttaaaaatttaccgttattaaacacagataaaccggttcaagctttgatgcgtattgcggatgaattaggagaaatctttaaattcgaggcgcctggtagcgtaacgcgctatttatcaagtcagcgtctaattaaagaagcatgcgatgaatcacgctttgataaaaacttaagtcaagcgcttaaatttgcacgtgattttgttggagacgggttatctacaagctggacgcatgaaccgaattggaaaaaagcgcataatatcttagttccaagctttagtcagcatgcaatggggcgttatcatgcgatgatggtcgatatcgccgtgcagcttgttcaaaagtgggagcgtctaaatgcagatgagcatattgaagtatcggaagacatgacacgtttaacgcttgatacaattggtctttgcggctttaactatcgctttaacagcttttaccgagatcagcctcatccatttattgtgagtgtggttcgtgcactggatgaagtaatgaacaagctgcagcgagcaaatccagacgacccagcttatgatgaaaacaagcgccagtgtcaagaagatatcaaggtgatgaacgactatgtagataaaattattgcagatcgcaaagcaaggggtgaacaaagtcatgatttattaacgcagatgctaaacggaaaagatccagaaacgggtgagccgcttgatgacgggaacattcgtcagcaaattattacattcttaattgcgggacaccaaacaacaagtggtcttttatcatttgcgctgtatttcttagtgaaaaatccacatgtattacaaaaagtagcagaagaagcagcacgagttctagtagatcctgttccaagctacaaacaagtcaaacagcttaaatatgttggcatggtcttaaacgaagcgctgcgcttatggccagtagcgcctatgttttccctatatgcaaaagaagatacggtgcttggaggagaatatcctttaacgaaaggcgacgaagtaatggttctggtgcctcagcttcaccgtgataaaacaatttggggagacgatgtggaggagttccgtccagagcgttttgaaaatccaagtgcgattccgcagcatgcgtttaaaccgtttggaaacggtcagcgtgcgtgtatcggtcagcagttcgctcttcatgaagcaacgctggtacttggtatgatgctaaaacactttgactttgaagatcatacaaactacgagctcgttattaaagaatcgcggacgttaaaacctgaaggctttgtggtaaaagcaaaatcgaaaggcattccgcttggcggtattccttcacctagcactgaacagtctgctaaaaaagtacgcaaaaaggcagaaaacgctcataatacgccgctgcttgtgctatacggttcaaatgcgggaacagctgaaggaacggcgcgtgatttagcagatattgcaatgagcaaaggatttgcaccgcaggtcgcaacgcttgattcacacgccagaaatcttccgcgcgaaggagctgtattaattgtaacggcgtcttataacggtcatccgcctgataacgcaaagcaatttgtcgactggttagaccaagcgtctccggatgaagtaaaaggcgttcgctactccgtatttggatgcggcgataaaaattgggcggggacgtatcaaaaagtgcctgcttttatcgatgaaacgcttgccgctaaaggggcagaaaacatcgctgaccgcggtgaagcagatgcaagcgacgactttgaaggcacatatgaagaatggcgtgatcatatgtggagtgacgtagcagcctactttaacctcgacattgaaaacagtgaagataataaatctactctttcacttcaatttgtcgacagcgccgcggatatgccgcttgcgaaaatgcacggtgcgttttcaacgaacgtcgtagcaagcaaagaacttcaacagccaggcagtgcacgaagcacgcgacatcttgaaattgaacttccaaaagaagcttcttatcaagaaggagatcatttaggtgttattcctcgcaactatgaaggaatagtaaaccgtgtaacagcaaggttcggcctaagcgcatcacagcaaatccgtctggaagcagaagaagaaaaattagctcatttgccactcgctaaaacagtatccgtagaagagcttctgcaatacgtggagcttcaagatcctgttacgcgcacgcagcttcgcgcaatggctgctaaaacggtctgcccgccgcataaagtagagcttgaagccttgcttgaaaagcaagcctacaaagaacaagtgctggcaaaacgtttaacaatgcttgaactgcttgaaaaatacccggcgtgtgaaatgaaattcagcgaatttatcgcccttctgccaagcatacgcccgcgctattactcgatttcttcatcacctcgtgtcgatgaaaaacaagcaagcatcacggtcagcgttgtctcaggaccggcgtggagcggatatggagaatataaaggaattgcgtcgaactatcttgccgagctgcaagaaggagatacgattacgtgctttatttccacaccgcagtcagaatttacgctgccaaaagaccctgaaacgccgcttatcatggtcggaccgggaacaggcgtcgcgccgtttagaggctttgtgcaggcgcgcaaacagctaaaagaacaaggacagtcacttggagaagcacatttatacttcggctgccgttcacctcatgaagactatctgtatcaagaagagcttgaaaacgcccaaagcgaaggcatcattacgcttcataccgctttttctcgcatgccaaatcagccgaaaacatacgttcagcacgtaatggaacaagacggcaagaaattgattgaacttcttgatcaaggagcgcacttctatatttgcggagacggaagccaaatggcacctgccgttgaagcaacgcttatgaaaagctatgctgacgttcaccaagtgagtgaagcagacgctcgcttatggctgcagcagctagaagaaaaaggccgatacgcaaaagacgtgtgggctggg

SEQ ID NO: 464 - protein, 1049 aa, synthetic construct
  REGION 1..1049: note = variant of P450 oxidase from Bacillus megaterium
MTIKEMPQPKTFGELKNLPLLNTDKPVQALMRIADELGEIFKFEAPGSVTRYLSSQRLIKEACDESRFDKNLSQALKFARDFVGDGLSTSWTHEPNWKKAHNILVPSFSQHAMGRYHAMMVDIAVQLVQKWERLNADEHIEVSEDMTRLTLDTIGLCGFNYRFNSFYRDQPHPFIVSVVRALDEVMNKLQRANPDDPAYDENKRQCQEDIKVMNDYVDKIIADRKARGEQSHDLLTQMLNGKDPETGEPLDDGNIRQQIITFLIAGHQTTSGLLSFALYFLVKNPHVLQKVAEEAARVLVDPVPSYKQVKQLKYVGMVLNEALRLWPVAPMFSLYAKEDTVLGGEYPLTKGDEVMVLVPQLHRDKTIWGDDVEEFRPERFENPSAIPQHAFKPFGNGQRACIGQQFALHEATLVLGMMLKHFDFEDHTNYELVIKESRTLKPEGFVVKAKSKGIPLGGIPSPSTEQSAKKVRKKAENAHNTPLLVLYGSNAGTAEGTARDLADIAMSKGFAPQVATLDSHARNLPREGAVLIVTASYNGHPPDNAKQFVDWLDQASPDEVKGVRYSVFGCGDKNWAGTYQKVPAFIDETLAAKGAENIADRGEADASDDFEGTYEEWRDHMWSDVAAYFNLDIENSEDNKSTLSLQFVDSAADMPLAKMHGAFSTNVVASKELQQPGSARSTRHLEIELPKEASYQEGDHLGVIPRNYEGIVNRVTARFGLSASQQIRLEAEEEKLAHLPLAKTVSVEELLQYVELQDPVTRTQLRAMAAKTVCPPHKVELEALLEKQAYKEQVLAKRLTMLELLEKYPACEMKFSEFIALLPSIRPRYYSISSSPRVDEKQASITVSVVSGPAWSGYGEYKGIASNYLAELQEGDTITCFISTPQSEFTLPKDPETPLIMVGPGTGVAPFRGFVQARKQLKEQGQSLGEAHLYFGCRSPHEDYLYQEELENAQSEGIITLHTAFSRMPNQPKTYVQHVMEQDGKKLIELLDQGAHFYICGDGSQMAPAVEATLMKSYADVHQVSEADARLWLQQLEEKGRYAKDVWAG

SEQ ID NO: 465 - DNA, 3147 bp, synthetic construct
  misc_feature 1..3147: note = variant of P450 oxidase from Bacillus megaterium
  source 1..3147: mol_type = other DNA
atgacaattaaggaaatgcctcagcctaagacgtttggagaacttaaaaatttaccgttattaaacacagataaaccggttcaagctttgatgcgtattgcggatgaattaggagaaatctttaaattcgaggcgcctggtagcgtaacgcgctatttatcaagtcagcgtctaattaaagaagcatgcgatgaatcacgctttgataaaaacttaagtcaagcgcttaaatttgcacgtgattttgttggagacgggttatctacaagctggacgcatgaaccgaattggaaaaaagcgcataatatcttagttccaagctttagtcagcatgcaatggggcgttatcatgcgatgatggtcgatatcgccgtgcagcttgttcaaaagtgggagcgtctaaatgcagatgagcatattgaagtatcggaagacatgacacgtttaacgcttgatacaattggtctttgcggctttaactatcgctttaacagcttttaccgagatcagcctcatccatttattgtgagtgtggttcgtgcactggatgaagtaatgaacaagctgcagcgagcaaatccagacgacccagcttatgatgaaaacaagcgccagtgtcaagaagatatcaaggtgatgaacgactatgtagataaaattattgcagatcgcaaagcaaggggtgaacaaagtcatgatttattaacgcagatgctaaacggaaaagatccagaaacgggtgagccgcttgatgacgggaacattcgtcagcaaattattacattcttaattgcgggacaccaaacaacaagtggtcttttatcatttgcgctgtatttcttagtgaaaaatccacatgtattacaaaaagtagcagaagaagcagcacgagttctagtagatcctgttccaagctacaaacaagtcaaacagcttaaatatgttggcatggtcttaaacgaagcgctgcgcttatggccagtagcgcctatgttttccctatatgcaaaagaagatacggtgcttggaggagaatatcctttaacgaaaggcgacgaagtaatggttctggtgcctcagcttcaccgtgataaaacaatttggggagacgatgtggaggagttccgtccagagcgttttgaaaatccaagtgcgattccgcagcatgcgtttaaaccgtttggaaacggtcagcgtgcgtgtatcggtcagcagttcgctcttcatgaagcaacgctggtacttggtatgatgctaaaacactttgactttgaagatcatacaaactacgagctcgttattaaagaatcgcggacgttaaaacctgaaggctttgtggtaaaagcaaaatcgaaaggcattccgcttggcggtattccttcacctagcactgaacagtctgctaaaaaagtacgcaaaaaggcagaaaacgctcataatacgccgctgcttgtgctatacggttcaaatgcgggaacagctgaaggaacggcgcgtgatttagcagatattgcaatgagcaaaggatttgcaccgcaggtcgcaacgcttgattcacacgccagaaatcttccgcgcgaaggagctgtattaattgtaacggcgtcttataacggtcatccgcctgataacgcaaagcaatttgtcgactggttagaccaagcgtctgctgatgaagtaaaaggcgttcgctactccgtatttggatgcggcgataaaaattgggcggggacgtatcaaaaagtgcctgcttttatcgatgaaacgcttgccgctaaaggggcagaaaacatcgctgaccgcggtgaagcagatgcaagcgacgactttgaaggcacatatgaagaatggcgtgatcatatgtggagtgacgtagcagcctactttaacctcgacattgaaaacagtgaagataataaatctactctttcacttcaatttgtcgacagcgccgcggatatgccgcttgcgaaaatgcacggtgcgttttcaacgaacgtcgtagcaagcaaagaacttcaacagccaggcagtgcacgaagcacgcgacatcttgaaattgaacttccaaaagaagcttcttatcaagaaggagatcatttaggtgttattcctcgcaactatgaaggaatagtaaaccgtgtaacagcaaggttcggcctaagcgcatcacagcaaatccgtctggaagcagaagaagaaaaattagctcatttgccactcgctaaaacagtatccgtagaagagcttctgcaatacgtggagcttcaagatcctgttacgcgcacgcagcttcgcgcaatggctgctaaaacggtctgcccgccgcataaagtagagcttgaagccttgcttgaaaagcaagcctacaaagaacaagtgctggcaaaacgtttaacaatgcttgaactgcttgaaaaatacccggcgtgtgaaatgaaattcagcgaatttatcgcccttctgccaagcatacgcccgcgctattactcgatttcttcatcacctcgtgtcgatgaaaaacaagcaagcatcacggtcagcgttgtctcaggaccggcgtggagcggatatggagaatataaaggaattgcgtcgaactatcttgccgagctgcaagaaggagatacgattacgtgctttatttccacaccgcagtcagaatttacgctgccaaaagaccctgaaacgccgcttatcatggtcggaccgggaacaggcgtcgcgccgtttagaggctttgtgcaggcgcgcaaacagctaaaagaacaaggacagtcacttggagaagcacatttatacttcggctgccgttcacctcatgaagactatctgtatcaagaagagcttgaaaacgcccaaagcgaaggcatcattacgcttcataccgctttttctcgcatgccaaatcagccgccgacatacgttcagcacgtaatggaacaagacggcaagaaattgattgaacttcttgatcaaggagcgcacttctatatttgcggagacggaagccaaatggcacctgccgttgaagcaacgcttatgaaaagctatgctgacgttcaccaagtgagtgaagcagacgctcgcttatggctgcagcagctagaagaaaaaggccgatacgcaaaagacgtgtgggctggg

SEQ ID NO: 466 - protein, 1049 aa, synthetic construct
  REGION 1..1049: note = variant of P450 oxidase from Bacillus megaterium
MTIKEMPQPKTFGELKNLPLLNTDKPVQALMRIADELGEIFKFEAPGSVTRYLSSQRLIKEACDESRFDKNLSQALKFARDFVGDGLSTSWTHEPNWKKAHNILVPSFSQHAMGRYHAMMVDIAVQLVQKWERLNADEHIEVSEDMTRLTLDTIGLCGFNYRFNSFYRDQPHPFIVSVVRALDEVMNKLQRANPDDPAYDENKRQCQEDIKVMNDYVDKIIADRKARGEQSHDLLTQMLNGKDPETGEPLDDGNIRQQIITFLIAGHQTTSGLLSFALYFLVKNPHVLQKVAEEAARVLVDPVPSYKQVKQLKYVGMVLNEALRLWPVAPMFSLYAKEDTVLGGEYPLTKGDEVMVLVPQLHRDKTIWGDDVEEFRPERFENPSAIPQHAFKPFGNGQRACIGQQFALHEATLVLGMMLKHFDFEDHTNYELVIKESRTLKPEGFVVKAKSKGIPLGGIPSPSTEQSAKKVRKKAENAHNTPLLVLYGSNAGTAEGTARDLADIAMSKGFAPQVATLDSHARNLPREGAVLIVTASYNGHPPDNAKQFVDWLDQASADEVKGVRYSVFGCGDKNWAGTYQKVPAFIDETLAAKGAENIADRGEADASDDFEGTYEEWRDHMWSDVAAYFNLDIENSEDNKSTLSLQFVDSAADMPLAKMHGAFSTNVVASKELQQPGSARSTRHLEIELPKEASYQEGDHLGVIPRNYEGIVNRVTARFGLSASQQIRLEAEEEKLAHLPLAKTVSVEELLQYVELQDPVTRTQLRAMAAKTVCPPHKVELEALLEKQAYKEQVLAKRLTMLELLEKYPACEMKFSEFIALLPSIRPRYYSISSSPRVDEKQASITVSVVSGPAWSGYGEYKGIASNYLAELQEGDTITCFISTPQSEFTLPKDPETPLIMVGPGTGVAPFRGFVQARKQLKEQGQSLGEAHLYFGCRSPHEDYLYQEELENAQSEGIITLHTAFSRMPNQPPTYVQHVMEQDGKKLIELLDQGAHFYICGDGSQMAPAVEATLMKSYADVHQVSEADARLWLQQLEEKGRYAKDVWAG

SEQ ID NO: 467 - DNA, 3147 bp, synthetic construct
  misc_feature 1..3147: note = variant of P450 oxidase from Bacillus megaterium
  source 1..3147: mol_type = other DNA
atgacaattaaggaaatgcctcagcctaagacgtttggagaacttaaaaatttaccgttattaaacacagataaaccggttcaagctttgatgcgtattgcggatgaattaggagaaatctttaaattcgaggcgcctggtagcgtaacgcgctatttatcaagtcagcgtctaattaaagaagcatgcgatgaatcacgctttgataaaaacttaagtcaagcgcttaaatttgcacgtgattttgttggagacgggttatctacaagctggacgcatgaaccgaattggaaaaaagcgcataatatcttagttccaagctttagtcagcatgcaatggggcgttatcatgcgatgatggtcgatatcgccgtgcagcttgttcaaaagtgggagcgtctaaatgcagatgagcatattgaagtatcggaagacatgacacgtttaacgcttgatacaattggtctttgcggctttaactatcgctttaacagcttttaccgagatcagcctcatccatttattgtgagtgtggttcgtgcactggatgaagtaatgaacaagctgcagcgagcaaatccagacgacccagcttatgatgaaaacaagcgccagtgtcaagaagatatcaaggtgatgaacgactatgtagataaaattattgcagatcgcaaagcaaggggtgaacaaagtcatgatttattaacgcagatgctaaacggaaaagatccagaaacgggtgagccgcttgatgacgggaacattcgtcagcaaattattacattcttaattgcgggacaccaaacaacaagtggtcttttatcatttgcgctgtatttcttagtgaaaaatccacatgtattacaaaaagtagcagaagaagcagcacgagttctagtagatcctgttccaagctacaaacaagtcaaacagcttaaatatgttggcatggtcttaaacgaagcgctgcgcttatggccagtagcgcctatgttttccctatatgcaaaagaagatacggtgcttggaggagaatatcctttaacgaaaggcgacgaagtaatggttctggtgcctcagcttcaccgtgataaaacaatttggggagacgatgtggaggagttccgtccagagcgttttgaaaatccaagtgcgattccgcagcatgcgtttaaaccgtttggaaacggtcagcgtgcgtgtatcggtcagcagttcgctcttcatgaagcaacgctggtacttggtatgatgctaaaacactttgactttgaagatcatacaaactacgagctcgttattaaagaatcgcggacgttaaaacctgaaggctttgtggtaaaagcaaaatcgaaaggcattccgcttggcggtattccttcacctagcactgaacagtctgctaaaaaagtacgcaaaaaggcagaaaacgctcataatacgccgctgcttgtgctatacggttcaaatgcgggaacagctgaaggaacggcgcgtgatttagcagatattgcaatgagcaaaggatttgcaccgcaggtcgcaacgcttgattcacacgccagaaatcttccgcgcgaaggagctgtattaattgtaacggcgtcttataacggtcatccgcctgataacgcaaagcaatttgtcgactggttagaccaagcgtctgctgatgaagtaaaaggcgttcgctactccgtatttggatgcggcgataaaaattgggcggggacgtatcaaaaagtgcctgcttttatcgatgaaacgcttgccgctaaaggggcagaaaacatcgctgaccgcggtgaagcagatgcaagcgacgactttgaaggcacatatgaagaatggcgtgatcatatgtggagtgacgtagcagcctactttaacctcgacattgaaaacagtgaagataataaatctactctttcacttcaatttgtcgacagcgccgcggatatgccgcttgcgaaaatgcacggtgcgttttcaacgaacgtcgtagcaagcaaagaacttcaacagccaggcagtgcacgaagcacgcgacatcttgaaattgaacttccaaaagaagcttcttatcaagaaggagatcatttaggtgttattcctcgcaactatgaaggaatagtaaaccgtgtaacagcaaggttcggcctaagcgcatcacagcaaatccgtctggaagcagaagaagaaaaattagctcatttgccactcgctaaaacagtatccgtagaagagcttctgcaatacgtggagcttcaagatcctgttacgcgcacgcagcttcgcgcaatggctgctaaaacggtctgcccgccgcataaagtagagcttgaagccttgcttgaaaagcaagcctacaaagaacaagtgctggcaaaacgtttaacaatgcttgaactgcttgaaaaatacccggcgtgtgaaatgaaattcagcgaatttatcgcccttctgccaagcatacgcccgcgctattactcgatttcttcatcacctcgtgtcgatgaaaaacaagcaagcatcacggtcagcgttgtctcaggaccggcgtggagcggatatggagaatataaaggaattgcgtcgaactatcttgccgagctgcaagaaggagatacgattacgtgctttatttccacaccgcagtcagaatttacgctgccaaaagaccctgaaacgccgcttatcatggtcggaccgggaacaggcgtcgcgccgtttagaggctttgtgcaggcgcgcaaacagctaaaagaacaaggacagtcacttggagaagcacatttatacttcggctgccgttcacctcatgaagactatctgtatcaagaagagcttgaaaacgcccaaagcgaaggcatcattacgcttcataccgctttttctcgcatgccaaatcagccgaaaacatacgttcagcacgtaatggaacaagacggcaagaaattgattgggcttcttgatcaaggagcgcacttctatatttgcggagacggaagccaaatggcacctgccgttgaagcaacgcttatgaaaagctatgctgacgttcaccaagtgagtgaagcagacgctcgcttatggctgcagcagctagaagaaaaaggccgatacgcaaaagacgtgtgggctggg

SEQ ID NO: 468 - protein, 1049 aa, synthetic construct
  REGION 1..1049: note = variant of P450 oxidase from Bacillus megaterium
MTIKEMPQPKTFGELKNLPLLNTDKPVQALMRIADELGEIFKFEAPGSVTRYLSSQRLIKEACDESRFDKNLSQALKFARDFVGDGLSTSWTHEPNWKKAHNILVPSFSQHAMGRYHAMMVDIAVQLVQKWERLNADEHIEVSEDMTRLTLDTIGLCGFNYRFNSFYRDQPHPFIVSVVRALDEVMNKLQRANPDDPAYDENKRQCQEDIKVMNDYVDKIIADRKARGEQSHDLLTQMLNGKDPETGEPLDDGNIRQQIITFLIAGHQTTSGLLSFALYFLVKNPHVLQKVAEEAARVLVDPVPSYKQVKQLKYVGMVLNEALRLWPVAPMFSLYAKEDTVLGGEYPLTKGDEVMVLVPQLHRDKTIWGDDVEEFRPERFENPSAIPQHAFKPFGNGQRACIGQQFALHEATLVLGMMLKHFDFEDHTNYELVIKESRTLKPEGFVVKAKSKGIPLGGIPSPSTEQSAKKVRKKAENAHNTPLLVLYGSNAGTAEGTARDLADIAMSKGFAPQVATLDSHARNLPREGAVLIVTASYNGHPPDNAKQFVDWLDQASADEVKGVRYSVFGCGDKNWAGTYQKVPAFIDETLAAKGAENIADRGEADASDDFEGTYEEWRDHMWSDVAAYFNLDIENSEDNKSTLSLQFVDSAADMPLAKMHGAFSTNVVASKELQQPGSARSTRHLEIELPKEASYQEGDHLGVIPRNYEGIVNRVTARFGLSASQQIRLEAEEEKLAHLPLAKTVSVEELLQYVELQDPVTRTQLRAMAAKTVCPPHKVELEALLEKQAYKEQVLAKRLTMLELLEKYPACEMKFSEFIALLPSIRPRYYSISSSPRVDEKQASITVSVVSGPAWSGYGEYKGIASNYLAELQEGDTITCFISTPQSEFTLPKDPETPLIMVGPGTGVAPFRGFVQARKQLKEQGQSLGEAHLYFGCRSPHEDYLYQEELENAQSEGIITLHTAFSRMPNQPKTYVQHVMEQDGKKLIGLLDQGAHFYICGDGSQMAPAVEATLMKSYADVHQVSEADARLWLQQLEEKGRYAKDVWAG

SEQ ID NO: 469 - DNA, 3147 bp, synthetic construct
  misc_feature 1..3147: note = variant of P450 oxidase from Bacillus megaterium
  source 1..3147: mol_type = other DNA
atgacaattaaggaaatgcctcagcctaagacgtttggagaacttaaaaatttaccgttattaaacacagataaaccggttcaagctttgatgcgtattgcggatgaattaggagaaatctttaaattcgaggcgcctggtagcgtaacgcgctatttatcaagtcagcgtctaattaaagaagcatgcgatgaatcacgctttgataaaaacttaagtcaagcgcttaaatttgcacgtgattttgttggagacgggttatctacaagctggacgcatgaaccgaattggaaaaaagcgcataatatcttagttccaagctttagtcagcatgcaatggggcgttatcatgcgatgatggtcgatatcgccgtgcagcttgttcaaaagtgggagcgtctaaatgcagatgagcatattgaagtatcggaagacatgacacgtttaacgcttgatacaattggtctttgcggctttaactatcgctttaacagcttttaccgagatcagcctcatccatttattgtgagtgtggttcgtgcactggatgaagtaatgaacaagctgcagcgagcaaatccagacgacccagcttatgatgaaaacaagcgccagtgtcaagaagatatcaaggtgatgaacgactatgtagataaaattattgcagatcgcaaagcaaggggtgaacaaagtcatgatttattaacgcagatgctaaacggaaaagatccagaaacgggtgagccgcttgatgacgggaacattcgtcagcaaattattacattcttaattgcgggacaccaaacaacaagtggtcttttatcatttgcgctgtatttcttagtgaaaaatccacatgtattacaaaaagtagcagaagaagcagcacgagttctagtagatcctgttccaagctacaaacaagtcaaacagcttaaatatgttggcatggtcttaaacgaagcgctgcgcttatggccagtagcgcctatgttttccctatatgcaaaagaagatacggtgcttggaggagaatatcctttaacgaaaggcgacgaagtaatggttctggtgcctcagcttcaccgtgataaaacaatttggggagacgatgtggaggagttccgtccagagcgttttgaaaatccaagtgcgattccgcagcatgcgtttaaaccgtttggaaacggtcagcgtgcgtgtatcggtcagcagttcgctcttcatgaagcaacgctggtacttggtatgatgctaaaacactttgactttgaagatcatacaaactacgagctcgttattaaagaatcgcggacgttaaaacctgaaggctttgtggtaaaagcaaaatcgaaaggcattccgcttggcggtattccttcacctagcactgaacagtctgctaaaaaagtacgcaaaaaggcagaaaacgctcataatacgccgctgcttgtgctatacggttcaaatgcgggaacagctgaaggaacggcgcgtgatttagcagatattgcaatgagcaaaggatttgcaccgcaggtcgcaacgcttgattcacacgccagaaatcttccgcgcgaaggagctgtattaattgtaacggcgtcttataacggtcatccgcctgataacgcaaagcaatttgtcgactggttagaccaagcgtctgctgatgaagtaaaaggcgttcgctactccgtatttggatgcggcgataaaaattgggcggggacgtatcaaaaagtgcctgcttttatcgatgaaacgcttgccgctaaaggggcagaaaacatcgctgaccgcggtgaagcagatgcaagcgacgactttgaaggcacatatgaagaatggcgtgatcatatgtggagtgacgtagcagcctactttaacctcgacattgaaaacagtgaagataataaatctactctttcacttcaatttgtcgacagcgccgcggatatgccgcttgcgaaaatgcacggtgcgttttcaacgaacgtcgtagcaagcaaagaacttcaacagccaggcagtgcacgaagcacgcgacatcttgaaattgaacttccaaaagaagcttcttatcaagaaggagatcatttaggtgttattcctcgcaactatgaaggaatagtaaaccgtgtaacagcaaggttcggcctaagcgcatcacagcaaatccgtctggaagcagaagaagaaaaattagctcatttgccactcgctaaaacagtatccgtagaagagcttctgcaatacgtggagcttcaagatcctgttacgcgcacgcagcttcgcgcaatggctgctaaaacggtctgcccgccgcataaagtagagcttgaagccttgcttgaaaagcaagcctacaaagaacaagtgctggcaaaacgtttaacaatgcttgaactgcttgaaaaatacccggcgtgtgaaatgaaattcagcgaatttatcgcccttctgccaagcatacgcccgcgctattactcgatttcttcatcacctcgtgtcgatgaaaaacaagcaagcatcacggtcagcgttgtctcaggaccggcgtggagcggatatggagaatataaaggaattgcgtcgaactatcttgccgagctgcaagaaggagatacgattacgtgctttatttccacaccgcagtcagaatttacgctgccaaaagaccctgaaacgccgcttatcatggtcggaccgggaacaggcgtcgcgccgtttagaggctttgtgcaggcgcgcaaacagctaaaagaagggggacagtcacttggagaagcacatttatacttcggctgccgttcacctcatgaagactatctgtatcaagaagagcttgaaaacgcccaaagcgaaggcatcattacgcttcataccgctttttctcgcatgccaaatcagccgaaaacatacgttcagcacgtaatggaacaagacggcaagaaattgattgaacttcttgatcaaggagcgcacttctatatttgcggagacggaagccaaatggcacctgccgttgaagcaacgcttatgaaaagctatgctgacgttcaccaagtgagtgaagcagacgctcgcttatggctgcagcagctagaagaaaaaggccgatacgcaaaagacgtgtgggctggg

SEQ ID NO: 470 - protein, 1049 aa, synthetic construct
  REGION 1..1049: note = variant of P450 oxidase from Bacillus megaterium
MTIKEMPQPKTFGELKNLPLLNTDKPVQALMRIADELGEIFKFEAPGSVTRYLSSQRLIKEACDESRFDKNLSQALKFARDFVGDGLSTSWTHEPNWKKAHNILVPSFSQHAMGRYHAMMVDIAVQLVQKWERLNADEHIEVSEDMTRLTLDTIGLCGFNYRFNSFYRDQPHPFIVSVVRALDEVMNKLQRANPDDPAYDENKRQCQEDIKVMNDYVDKIIADRKARGEQSHDLLTQMLNGKDPETGEPLDDGNIRQQIITFLIAGHQTTSGLLSFALYFLVKNPHVLQKVAEEAARVLVDPVPSYKQVKQLKYVGMVLNEALRLWPVAPMFSLYAKEDTVLGGEYPLTKGDEVMVLVPQLHRDKTIWGDDVEEFRPERFENPSAIPQHAFKPFGNGQRACIGQQFALHEATLVLGMMLKHFDFEDHTNYELVIKESRTLKPEGFVVKAKSKGIPLGGIPSPSTEQSAKKVRKKAENAHNTPLLVLYGSNAGTAEGTARDLADIAMSKGFAPQVATLDSHARNLPREGAVLIVTASYNGHPPDNAKQFVDWLDQASADEVKGVRYSVFGCGDKNWAGTYQKVPAFIDETLAAKGAENIADRGEADASDDFEGTYEEWRDHMWSDVAAYFNLDIENSEDNKSTLSLQFVDSAADMPLAKMHGAFSTNVVASKELQQPGSARSTRHLEIELPKEASYQEGDHLGVIPRNYEGIVNRVTARFGLSASQQIRLEAEEEKLAHLPLAKTVSVEELLQYVELQDPVTRTQLRAMAAKTVCPPHKVELEALLEKQAYKEQVLAKRLTMLELLEKYPACEMKFSEFIALLPSIRPRYYSISSSPRVDEKQASITVSVVSGPAWSGYGEYKGIASNYLAELQEGDTITCFISTPQSEFTLPKDPETPLIMVGPGTGVAPFRGFVQARKQLKEGGQSLGEAHLYFGCRSPHEDYLYQEELENAQSEGIITLHTAFSRMPNQPKTYVQHVMEQDGKKLIELLDQGAHFYICGDGSQMAPAVEATLMKSYADVHQVSEADARLWLQQLEEKGRYAKDVWAG

SEQ ID NO: 471 - DNA, 3147 bp, synthetic construct
  misc_feature 1..3147: note = variant of P450 oxidase from Bacillus megaterium
  source 1..3147: mol_type = other DNA
atgacaattaaggaaatgcctcagcctaagacgtttggagaacttaaaaatttaccgttattaaacacagataaaccggttcaagctttgatgcgtattgcggatgaattaggagaaatctttaaattcgaggcgcctggtagcgtaacgcgctatttatcaagtcagcgtctaattaaagaagcatgcgatgaatcacgctttgataaaaacttaagtcaagcgcttaaatttgcacgtgattttgttggagacgggttatctacaagctggacgcatgaaccgaattggaaaaaagcgcataatatcttagttccaagctttagtcagcatgcaatggggcgttatcatgcgatgatggtcgatatcgccgtgcagcttgttcaaaagtgggagcgtctaaatgcagatgagcatattgaagtatcggaagacatgacacgtttaacgcttgatacaattggtctttgcggctttaactatcgctttaacagcttttaccgagatcagcctcatccatttattgtgagtgtggttcgtgcactggatgaagtaatgaacaagctgcagcgagcaaatccagacgacccagcttatgatgaaaacaagcgccagtgtcaagaagatatcaaggtgatgaacgactatgtagataaaattattgcagatcgcaaagcaaggggtgaacaaagtcatgatttattaacgcagatgctaaacggaaaagatccagaaacgggtgagccgcttgatgacgggaacattcgtcagcaaattattacattcttaattgcgggacaccaaacaacaagtggtcttttatcatttgcgctgtatttcttagtgaaaaatccacatgtattacaaaaagtagcagaagaagcagcacgagttctagtagatcctgttccaagctacaaacaagtcaaacagcttaaatatgttggcatggtcttaaacgaagcgctgcgcttatggccagtagcgcctatgttttccctatatgcaaaagaagatacggtgcttggaggagaatatcctttaacgaaaggcgacgaagtaatggttctggtgcctcagcttcaccgtgataaaacaatttggggagacgatgtggaggagttccgtccagagcgttttgaaaatccaagtgcgattccgcagcatgcgtttaaaccgtttggaaacggtcagcgtgcgtgtatcggtcagcagttcgctcttcatgaagcaacgctggtacttggtatgatgctaaaacactttgactttgaagatcatacaaactacgagctcgttattaaagaatcgcggacgttaaaacctgaaggctttgtggtaaaagcaaaatcgaaaggcattccgcttggcggtattccttcacctagcactgaacagtctgctaaaaaagtacgcaaaaaggcagaaaacgctcataatacgccgctgcttgtgctatacggttcaaatgcgggaacagctgaaggaacggcgcgtgatttagcagatattgcaatgagcaaaggatttgcaccgcaggtcgcaacgcttgattcacacgccagaaatcttccgcgcgaaggagctgtattaattgtaacggcgtcttataacggtcatccgcctgataacgcaaagcaatttgtcgactggttagaccaagcgtctgctgatgaagtaaaaggcgttcgctactccgtatttggatgcggcgataaaaattgggcggggacgtatcaaaaagtgcctgcttttatcgatgaaacgcttgccgctaaaggggcagaaaacatcgctgaccgcggtgaagcagatgcaagcgacgactttgaaggcacatatgaagaatggcgtgatcatatgtggagtgacgtagcagcctactttaacctcgacattgaaaacagtgaagataataaatctactctttcacttcaatttgtcgacagcgccgcggatatgccgcttgcgaaaatgcacggtgcgttttcaacgaacgtcgtagcaagcaaagaacttcaacagccaggcagtgcacgaagcacgcgacatcttgaaattgaacttccaaaagaagcttcttatcaagaaggagatcatttaggtgttattcctcgcaactatgaaggaatagtaaaccgtgtaacagcaaggttcggcctaagcgcatcacagcaaatccgtctggaagcagaagaagaaaaattagctcatttgccactcgctaaaacagtatccgtagaagagcttctgcaatacgtggagcttcaagatcctgttacgcgcacgcagcttcgcgcaatggctgctaaaacggtctgcccgccgcataaagtagagcttgaagccttgcttgaaaagcaagcctacaaagaacaagtgctggcaaaacgtttaacaatgcttgaactgcttgaaaaatacccggcgtgtgaaatgaaattcagcgaatttatcgcccttctgccaagcatacgcccgcgctattactcgatttcttcatcacctcgtgtcgatgaaaaacaagcaagcatcacggtcagcgttgtctcaggaccggcgtggagcggatatggagaatataaaggaattgcgtcgaactatcttgccgagctgcaagaaggagatacgattacgtgctttatttccacaccgcagtcagaatttacgctgccaggggaccctgaaacgccgcttatcatggtcggaccgggaacaggcgtcgcgccgtttagaggctttgtgcaggcgcgcaaacagctaaaagaacaaggacagtcacttggagaagcacatttatacttcggctgccgttcacctcatgaagactatctgtatcaagaagagcttgaaaacgcccaaagcgaaggcatcattacgcttcataccgctttttctcgcatgccaaatcagccgaaaacatacgttcagcacgtaatggaacaagacggcaagaaattgattgaacttcttgatcaaggagcgcacttctatatttgcggagacggaagccaaatggcacctgccgttgaagcaacgcttatgaaaagctatgctgacgttcaccaagtgagtgaagcagacgctcgcttatggctgcagcagctagaagaaaaaggccgatacgcaaaagacgtgtgggctggg

SEQ ID NO: 472 - protein, 1049 aa, synthetic construct
  REGION 1..1049: note = variant of P450 oxidase from Bacillus megaterium
MTIKEMPQPKTFGELKNLPLLNTDKPVQALMRIADELGEIFKFEAPGSVTRYLSSQRLIKEACDESRFDKNLSQALKFARDFVGDGLSTSWTHEPNWKKAHNILVPSFSQHAMGRYHAMMVDIAVQLVQKWERLNADEHIEVSEDMTRLTLDTIGLCGFNYRFNSFYRDQPHPFIVSVVRALDEVMNKLQRANPDDPAYDENKRQCQEDIKVMNDYVDKIIADRKARGEQSHDLLTQMLNGKDPETGEPLDDGNIRQQIITFLIAGHQTTSGLLSFALYFLVKNPHVLQKVAEEAARVLVDPVPSYKQVKQLKYVGMVLNEALRLWPVAPMFSLYAKEDTVLGGEYPLTKGDEVMVLVPQLHRDKTIWGDDVEEFRPERFENPSAIPQHAFKPFGNGQRACIGQQFALHEATLVLGMMLKHFDFEDHTNYELVIKESRTLKPEGFVVKAKSKGIPLGGIPSPSTEQSAKKVRKKAENAHNTPLLVLYGSNAGTAEGTARDLADIAMSKGFAPQVATLDSHARNLPREGAVLIVTASYNGHPPDNAKQFVDWLDQASADEVKGVRYSVFGCGDKNWAGTYQKVPAFIDETLAAKGAENIADRGEADASDDFEGTYEEWRDHMWSDVAAYFNLDIENSEDNKSTLSLQFVDSAADMPLAKMHGAFSTNVVASKELQQPGSARSTRHLEIELPKEASYQEGDHLGVIPRNYEGIVNRVTARFGLSASQQIRLEAEEEKLAHLPLAKTVSVEELLQYVELQDPVTRTQLRAMAAKTVCPPHKVELEALLEKQAYKEQVLAKRLTMLELLEKYPACEMKFSEFIALLPSIRPRYYSISSSPRVDEKQASITVSVVSGPAWSGYGEYKGIASNYLAELQEGDTITCFISTPQSEFTLPGDPETPLIMVGPGTGVAPFRGFVQARKQLKEQGQSLGEAHLYFGCRSPHEDYLYQEELENAQSEGIITLHTAFSRMPNQPKTYVQHVMEQDGKKLIELLDQGAHFYICGDGSQMAPAVEATLMKSYADVHQVSEADARLWLQQLEEKGRYAKDVWAG

SEQ ID NO: 473 - DNA, 3147 bp, synthetic construct
  misc_feature 1..3147: note = variant of P450 oxidase from Bacillus megaterium
  source 1..3147: mol_type = other DNA
atgacaattaaggaaatgcctcagcctaagacgtttggagaacttaaaaatttaccgttattaaacacagataaaccggttcaagctttgatgcgtattgcggatgaattaggagaaatctttaaattcgaggcgcctggtagcgtaacgcgctatttatcaagtcagcgtctaattaaagaagcatgcgatgaatcacgctttgataaaaacttaagtcaagcgcttaaatttgcacgtgattttgttggagacgggttatctacaagctggacgcatgaaccgaattggaaaaaagcgcataatatcttagttccaagctttagtcagcatgcaatggggcgttatcatgcgatgatggtcgatatcgccgtgcagcttgttcaaaagtgggagcgtctaaatgcagatgagcatattgaagtatcggaagacatgacacgtttaacgcttgatacaattggtctttgcggctttaactatcgctttaacagcttttaccgagatcagcctcatccatttattgtgagtgtggttcgtgcactggatgaagtaatgaacaagctgcagcgagcaaatccagacgacccagcttatgatgaaaacaagcgccagtgtcaagaagatatcaaggtgatgaacgactatgtagataaaattattgcagatcgcaaagcaaggggtgaacaaagtcatgatttattaacgcagatgctaaacggaaaagatccagaaacgggtgagccgcttgatgacgggaacattcgtcagcaaattattacattcttaattgcgggacaccaaacaacaagtggtcttttatcatttgcgctgtatttcttagtgaaaaatccacatgtattacaaaaagtagcagaagaagcagcacgagttctagtagatcctgttccaagctacaaacaagtcaaacagcttaaatatgttggcatggtcttaaacgaagcgctgcgcttatggccagtagcgcctatgttttccctatatgcaaaagaagatacggtgcttggaggagaatatcctttaacgaaaggcgacgaagtaatggttctggtgcctcagcttcaccgtgataaaacaatttggggagacgatgtggaggagttccgtccagagcgttttgaaaatccaagtgcgattccgcagcatgcgtttaaaccgtttggaaacggtcagcgtgcgtgtatcggtcagcagttcgctcttcatgaagcaacgctggtacttggtatgatgctaaaacactttgactttgaagatcatacaaactacgagctcgttattaaagaatcgcggacgttaaaacctgaaggctttgtggtaaaagcaaaatcgaaaggcattccgcttggcggtattccttcacctagcactgaacagtctgctaaaaaagtacgcaaaaaggcagaaaacgctcataatacgccgctgcttgtgctatacggttcaaatgcgggaacagctgaaggaacggcgcgtgatttagcagatattgcaatgagcaaaggatttgcaccgcaggtcgcaacgcttgattcacacgccagaaatcttccgcgcgaaggagctgtattaattgtaacggcgtcttataacggtcatccgcctgataacgcaaagcaatttgtcgactggttagaccaagcgtctgaggatgaagtaaaaggcgttcgctactccgtatttggatgcggcgataaaaattgggcggggacgtatcaaaaagtgcctgcttttatcgatgaaacgcttgccgctaaaggggcagaaaacatcgctgaccgcggtgaagcagatgcaagcgacgactttgaaggcacatatgaagaatggcgtgatcatatgtggagtgacgtagcagcctactttaacctcgacattgaaaacagtgaagataataaatctactctttcacttcaatttgtcgacagcgccgcggatatgccgcttgcgaaaatgcacggtgcgttttcaacgaacgtcgtagcaagcaaagaacttcaacagccaggcagtgcacgaagcacgcgacatcttgaaattgaacttccaaaagaagcttcttatcaagaaggagatcatttaggtgttattcctcgcaactatgaaggaatagtaaaccgtgtaacagcaaggttcggcctaagcgcatcacagcaaatccgtctggaagcagaagaagaaaaattagctcatttgccactcgctaaaacagtatccgtagaagagcttctgcaatacgtggagcttcaagatcctgttacgcgcacgcagcttcgcgcaatggctgctaaaacggtctgcccgccgcataaagtagagcttgaagccttgcttgaaaagcaagcctacaaagaacaagtgctggcaaaacgtttaacaatgcttgaactgcttgaaaaatacccggcgtgtgaaatgaaattcagcgaatttatcgcccttctgccaagcatacgcccgcgctattactcgatttcttcatcacctcgtgtcgatgaaaaacaagcaagcatcacggtcagcgttgtctcaggaccggcgtggagcggatatggagaatataaaggaattgcgtcgaactatcttgccgagctgcaagaaggagatacgattacgtgctttatttccacaccgcagtcagaatttacgctgccaaaagaccctgaaacgccgcttatcatggtcggaccgggaacaggcgtcgcgccgtttagaggctttgtgcaggcgcgcaaacagctaaaagaacaaggacagtcacttggagaagcacatttatacttcggctgccgttcacctcatgaagactatctgtatcaagaagagcttgaaaacgcccaaagcgaaggcatcattacgcttcataccgctttttctcgcatgccaaatcagccgaaaacatacgttcagcacgtaatggaacaagacggcaagaaattgattgaacttcttgatcaaggagcgcacttctatatttgcggagacggaagccaaatggcacctgccgttgaagcaacgcttatgaaaagctatgctgacgttcaccaagtgagtgaagcagacgctcgcttatggctgcagcagctagaagaaaaaggccgatacgcaaaagacgtgtgggctggg

SEQ ID NO: 474 - protein, 1049 aa, synthetic construct
  REGION 1..1049: note = variant of P450 oxidase from Bacillus megaterium
MTIKEMPQPKTFGELKNLPLLNTDKPVQALMRIADELGEIFKFEAPGSVTRYLSSQRLIKEACDESRFDKNLSQALKFARDFVGDGLSTSWTHEPNWKKAHNILVPSFSQHAMGRYHAMMVDIAVQLVQKWERLNADEHIEVSEDMTRLTLDTIGLCGFNYRFNSFYRDQPHPFIVSVVRALDEVMNKLQRANPDDPAYDENKRQCQEDIKVMNDYVDKIIADRKARGEQSHDLLTQMLNGKDPETGEPLDDGNIRQQIITFLIAGHQTTSGLLSFALYFLVKNPHVLQKVAEEAARVLVDPVPSYKQVKQLKYVGMVLNEALRLWPVAPMFSLYAKEDTVLGGEYPLTKGDEVMVLVPQLHRDKTIWGDDVEEFRPERFENPSAIPQHAFKPFGNGQRACIGQQFALHEATLVLGMMLKHFDFEDHTNYELVIKESRTLKPEGFVVKAKSKGIPLGGIPSPSTEQSAKKVRKKAENAHNTPLLVLYGSNAGTAEGTARDLADIAMSKGFAPQVATLDSHARNLPREGAVLIVTASYNGHPPDNAKQFVDWLDQASEDEVKGVRYSVFGCGDKNWAGTYQKVPAFIDETLAAKGAENIADRGEADASDDFEGTYEEWRDHMWSDVAAYFNLDIENSEDNKSTLSLQFVDSAADMPLAKMHGAFSTNVVASKELQQPGSARSTRHLEIELPKEASYQEGDHLGVIPRNYEGIVNRVTARFGLSASQQIRLEAEEEKLAHLPLAKTVSVEELLQYVELQDPVTRTQLRAMAAKTVCPPHKVELEALLEKQAYKEQVLAKRLTMLELLEKYPACEMKFSEFIALLPSIRPRYYSISSSPRVDEKQASITVSVVSGPAWSGYGEYKGIASNYLAELQEGDTITCFISTPQSEFTLPKDPETPLIMVGPGTGVAPFRGFVQARKQLKEQGQSLGEAHLYFGCRSPHEDYLYQEELENAQSEGIITLHTAFSRMPNQPKTYVQHVMEQDGKKLIELLDQGAHFYICGDGSQMAPAVEATLMKSYADVHQVSEADARLWLQQLEEKGRYAKDVWAG

SEQ ID NO: 475 - DNA, 3147 bp, synthetic construct
  misc_feature 1..3147: note = variant of P450 oxidase from Bacillus megaterium
  source 1..3147: mol_type = other DNA
atgacaattaaggaaatgcctcagcctaagacgtttggagaacttaaaaatttaccgttattaaacacagataaaccggttcaagctttgatgcgtattgcggatgaattaggagaaatctttaaattcgaggcgcctggtagcgtaacgcgctatttatcaagtcagcgtctaattaaagaagcatgcgatgaatcacgctttgataaaaacttaagtcaagcgcttaaatttgcacgtgattttgttggagacgggttatctacaagctggacgcatgaaccgaattggaaaaaagcgcataatatcttagttccaagctttagtcagcatgcaatggggcgttatcatgcgatgatggtcgatatcgccgtgcagcttgttcaaaagtgggagcgtctaaatgcagatgagcatattgaagtatcggaagacatgacacgtttaacgcttgatacaattggtctttgcggctttaactatcgctttaacagcttttaccgagatcagcctcatccatttattgtgagtgtggttcgtgcactggatgaagtaatgaacaagctgcagcgagcaaatccagacgacccagcttatgatgaaaacaagcgccagtgtcaagaagatatcaaggtgatgaacgactatgtagataaaattattgcagatcgcaaagcaaggggtgaacaaagtcatgatttattaacgcagatgctaaacggaaaagatccagaaacgggtgagccgcttgatgacgggaacattcgtcagcaaattattacattcttaattgcgggacaccaaacaacaagtggtcttttatcatttgcgctgtatttcttagtgaaaaatccacatgtattacaaaaagtagcagaagaagcagcacgagttctagtagatcctgttccaagctacaaacaagtcaaacagcttaaatatgttggcatggtcttaaacgaagcgctgcgcttatggccagtagcgcctatgttttccctatatgcaaaagaagatacggtgcttggaggagaatatcctttaacgaaaggcgacgaagtaatggttctggtgcctcagcttcaccgtgataaaacaatttggggagacgatgtggaggagttccgtccagagcgttttgaaaatccaagtgcgattccgcagcatgcgtttaaaccgtttggaaacggtcagcgtgcgtgtatcggtcagcagttcgctcttcatgaagcaacgctggtacttggtatgatgctaaaacactttgactttgaagatcatacaaactacgagctcgttattaaagaatcgcggacgttaaaacctgaaggctttgtggtaaaagcaaaatcgaaaggcattccgcttggcggtattccttcacctagcactgaacagtctgctaaaaaagtacgcaaaaaggcagaaaacgctcataatacgccgctgcttgtgctatacggttcaaatgcgggaacagctgaaggaacggcgcgtgatttagcagatattgcaatgagcaaaggatttgcaccgcaggtcgcaacgcttgattcacacgccagaaatcttccgcgcgaaggagctgtattaattgtaacggcgtcttataacggtcatccgcctgataacgcaaagcaatttgtcgactggttagaccaagcgtctgctgatgaagtaaaaggcgttcgctactccgtatttggatgcggcgataaaaattgggcggggacgtatcaaaaagtgcctgcttttatcgatgaaacgcttgccgctaaaggggcagaaaacatcgctgaccgcggtgaagcagatgcaagcgacgactttgaaggcacatatgaagaatggcgtgatcatatgtggagtgacgtagcagcctactttaacctcgacattgaaaacagtgaagataataaatctactctttcacttcaatttgtcgacagcgccgcggatatgccgcttgcgaaaatgcacggtgcgttttcaacgaacgtcgtagcaagcaaagaacttcaacagccaggcagtgcacgaagcacgcgacatcttgaaattgaacttccaaaagaagcttcttatcaagaaggagatcatttaggtgttattcctcgcaactatgaaggaatagtaaaccgtgtaacagcaaggttcggcctaagcgcatcacagcaaatccgtctggaagcagaagaagaaaaattagctcatttgccactcgctaaaacagtatccgtagaagagcttctgcaatacgtggagcttcaagatcctgttacgcgcacgcagcttcgcgcaatggctgctaaaacggtctgcccgccgcataaagtagagcttgaagccttgcttgaaaagcaagcctacaaagaacaagtgctggcaaaacgtttaacaatgcttgaactgcttgaaaaatacccggcgtgtgaaatgaaattcagcgaatttatcgcccttctgccaagcatacgcccgcgctattactcgatttcttcatcacctcgtgtcgatgaaaaacaagcaagcatcacggtcagcgttgtctcaggaccggcgtggagcggatatggagaatataaaggaattgcgtcgaactatcttgccgagctgcaagaaggagatacgattacgtgctttatttccacaccgcagtcagaatttacgctgccaaaagaccctgaaacgccgcttatcatggtcggaccgggaacaggcgtcgcgccgtttagaggctttgtgcaggcgcgcaaacagctaaaagaacaaggacagtcacttggagaagcacatttatacttcggctgccgttcacctcatgaagactatctgtatcaagaagagcttgaaaacgcccaaggggaaggcatcattacgcttcataccgctttttctcgcatgccaaatcagccgaaaacatacgttcagcacgtaatggaacaagacggcaagaaattgattgaacttcttgatcaaggagcgcacttctatatttgcggagacggaagccaaatggcacctgccgttgaagcaacgcttatgaaaagctatgctgacgttcaccaagtgagtgaagcagacgctcgcttatggctgcagcagctagaagaaaaaggccgatacgcaaaagacgtgtgggctggg

SEQ ID NO: 476 - protein, 1049 aa, synthetic construct
  REGION 1..1049: note = variant of P450 oxidase from Bacillus megaterium
MTIKEMPQPKTFGELKNLPLLNTDKPVQALMRIADELGEIFKFEAPGSVTRYLSSQRLIKEACDESRFDKNLSQALKFARDFVGDGLSTSWTHEPNWKKAHNILVPSFSQHAMGRYHAMMVDIAVQLVQKWERLNADEHIEVSEDMTRLTLDTIGLCGFNYRFNSFYRDQPHPFIVSVVRALDEVMNKLQRANPDDPAYDENKRQCQEDIKVMNDYVDKIIADRKARGEQSHDLLTQMLNGKDPETGEPLDDGNIRQQIITFLIAGHQTTSGLLSFALYFLVKNPHVLQKVAEEAARVLVDPVPSYKQVKQLKYVGMVLNEALRLWPVAPMFSLYAKEDTVLGGEYPLTKGDEVMVLVPQLHRDKTIWGDDVEEFRPERFENPSAIPQHAFKPFGNGQRACIGQQFALHEATLVLGMMLKHFDFEDHTNYELVIKESRTLKPEGFVVKAKSKGIPLGGIPSPSTEQSAKKVRKKAENAHNTPLLVLYGSNAGTAEGTARDLADIAMSKGFAPQVATLDSHARNLPREGAVLIVTASYNGHPPDNAKQFVDWLDQASADEVKGVRYSVFGCGDKNWAGTYQKVPAFIDETLAAKGAENIADRGEADASDDFEGTYEEWRDHMWSDVAAYFNLDIENSEDNKSTLSLQFVDSAADMPLAKMHGAFSTNVVASKELQQPGSARSTRHLEIELPKEASYQEGDHLGVIPRNYEGIVNRVTARFGLSASQQIRLEAEEEKLAHLPLAKTVSVEELLQYVELQDPVTRTQLRAMAAKTVCPPHKVELEALLEKQAYKEQVLAKRLTMLELLEKYPACEMKFSEFIALLPSIRPRYYSISSSPRVDEKQASITVSVVSGPAWSGYGEYKGIASNYLAELQEGDTITCFISTPQSEFTLPKDPETPLIMVGPGTGVAPFRGFVQARKQLKEQGQSLGEAHLYFGCRSPHEDYLYQEELENAQGEGIITLHTAFSRMPNQPKTYVQHVMEQDGKKLIELLDQGAHFYICGDGSQMAPAVEATLMKSYADVHQVSEADARLWLQQLEEKGRYAKDVWAG

SEQ ID NO: 477 - DNA, 3147 bp, synthetic construct
  misc_feature 1..3147: note = variant of P450 oxidase from Bacillus megaterium
  source 1..3147: mol_type = other DNA
atgacaattaaggaaatgcctcagcctaagacgtttggagaacttaaaaatttaccgttattaaacacagataaaccggttcaagctttgatgcgtattgcggatgaattaggagaaatctttaaattcgaggcgcctggtagcgtaacgcgctatttatcaagtcagcgtctaattaaagaagcatgcgatgaatcacgctttgataaaaacttaagtcaagcgcttaaatttgcacgtgattttgttggagacgggttatctacaagctggacgcatgaaccgaattggaaaaaagcgcataatatcttagttccaagctttagtcagcatgcaatggggcgttatcatgcgatgatggtcgatatcgccgtgcagcttgttcaaaagtgggagcgtctaaatgcagatgagcatattgaagtatcggaagacatgacacgtttaacgcttgatacaattggtctttgcggctttaactatcgctttaacagcttttaccgagatcagcctcatccatttattgtgagtgtggttcgtgcactggatgaagtaatgaacaagctgcagcgagcaaatccagacgacccagcttatgatgaaaacaagcgccagtgtcaagaagatatcaaggtgatgaacgactatgtagataaaattattgcagatcgcaaagcaaggggtgaacaaagtcatgatttattaacgcagatgctaaacggaaaagatccagaaacgggtgagccgcttgatgacgggaacattcgtcagcaaattattacattcttaattgcgggacaccaaacaacaagtggtcttttatcatttgcgctgtatttcttagtgaaaaatccacatgtattacaaaaagtagcagaagaagcagcacgagttctagtagatcctgttccaagctacaaacaagtcaaacagcttaaatatgttggcatggtcttaaacgaagcgctgcgcttatggccagtagcgcctatgttttccctatatgcaaaagaagatacggtgcttggaggagaatatcctttaacgaaaggcgacgaagtaatggttctggtgcctcagcttcaccgtgataaaacaatttggggagacgatgtggaggagttccgtccagagcgttttgaaaatccaagtgcgattccgcagcatgcgtttaaaccgtttggaaacggtcagcgtgcgtgtatcggtcagcagttcgctcttcatgaagcaacgctggtacttggtatgatgctaaaacactttgactttgaagatcatacaaactacgagctcgttattaaagaatcgcggacgttaaaacctgaaggctttgtggtaaaagcaaaatcgaaaggcattccgcttggcggtattccttcacctagcactgaacagtctgctaaaaaagtacgcaaaaaggcagaaaacgctcataatacgccgctgcttgtgctatacggttcaaatgcgggaacagctgaaggaacggcgcgtgatttagcagatattgcaatgagcaaaggatttgcaccgcaggtcgcaacgcttgattcacacgccagaaatcttccgcgcgaaggagctgtattaattgtaacggcgtcttataacggtcatccgcctgataacgcaaagcaatttgtcgactggttagaccaagcgtctgctgatgaagtaaaaggcgttcgctactccgtatttggatgcggcgataaaaattgggcggggacgtatcaaaaagtgcctgcttttatcgatgaaacgcttgccgctaaaggggcagaaaacatcgctgaccgcggtgaagcagatgcaagcgacgactttgaaggcacatatgaagaatggcgtgatcatatgtggagtgacgtagcagcctactttaacctcgacattgaaaacagtgaagataataaatctactctttcacttcaatttgtcgacagcgccgcggatatgccgcttgcgaaaatgcacggtgcgttttcaacgaacgtcgtagcaagcaaagaacttcaacagccaggcagtgcacgaagcacgcgacatcttgaaattgaacttccaaaagaagcttcttatcaagaaggagatcatttaggtgttattcctcgcaactatgaaggaatagtaaaccgtgtaacagcaaggttcggcctaagcgcatcacagcaaatccgtctggaagcagaagaagaaaaattagctcatttgccactcgctaaaacagtatccgtagaagagcttctgcaatacgtggagcttcaagatcctgttacgcgcacgcagcttcgcgcaatggctgctaaaacggtctgcccgccgcataaagtagagcttgaagccttgcttaggaagcaagcctacaaagaacaagtgctggcaaaacgtttaacaatgcttgaactgcttgaaaaatacccggcgtgtgaaatgaaattcagcgaatttatcgcccttctgccaagcatacgcccgcgctattactcgatttcttcatcacctcgtgtcgatgaaaaacaagcaagcatcacggtcagcgttgtctcaggaccggcgtggagcggatatggagaatataaaggaattgcgtcgaactatcttgccgagctgcaagaaggagatacgattacgtgctttatttccacaccgcagtcagaatttacgctgccaaaagaccctgaaacgccgcttatcatggtcggaccgggaacaggcgtcgcgccgtttagaggctttgtgcaggcgcgcaaacagctaaaagaacaaggacagtcacttggagaagcacatttatacttcggctgccgttcacctcatgaagactatctgtatcaagaagagcttgaaaacgcccaaagcgaaggcatcattacgcttcataccgctttttctcgcatgccaaatcagccgaaaacatacgttcagcacgtaatggaacaagacggcaagaaattgattgaacttcttgatcaaggagcgcacttctatatttgcggagacggaagccaaatggcacctgccgttgaagcaacgcttatgaaaagctatgctgacgttcaccaagtgagtgaagcagacgctcgcttatggctgcagcagctagaagaaaaaggccgatacgcaaaagacgtgtgggctggg

SEQ ID NO: 478 - protein, 1049 aa, synthetic construct
  REGION 1..1049: note = variant of P450 oxidase from Bacillus megaterium
MTIKEMPQPKTFGELKNLPLLNTDKPVQALMRIADELGEIFKFEAPGSVTRYLSSQRLIKEACDESRFDKNLSQALKFARDFVGDGLSTSWTHEPNWKKAHNILVPSFSQHAMGRYHAMMVDIAVQLVQKWERLNADEHIEVSEDMTRLTLDTIGLCGFNYRFNSFYRDQPHPFIVSVVRALDEVMNKLQRANPDDPAYDENKRQCQEDIKVMNDYVDKIIADRKARGEQSHDLLTQMLNGKDPETGEPLDDGNIRQQIITFLIAGHQTTSGLLSFALYFLVKNPHVLQKVAEEAARVLVDPVPSYKQVKQLKYVGMVLNEALRLWPVAPMFSLYAKEDTVLGGEYPLTKGDEVMVLVPQLHRDKTIWGDDVEEFRPERFENPSAIPQHAFKPFGNGQRACIGQQFALHEATLVLGMMLKHFDFEDHTNYELVIKESRTLKPEGFVVKAKSKGIPLGGIPSPSTEQSAKKVRKKAENAHNTPLLVLYGSNAGTAEGTARDLADIAMSKGFAPQVATLDSHARNLPREGAVLIVTASYNGHPPDNAKQFVDWLDQASADEVKGVRYSVFGCGDKNWAGTYQKVPAFIDETLAAKGAENIADRGEADASDDFEGTYEEWRDHMWSDVAAYFNLDIENSEDNKSTLSLQFVDSAADMPLAKMHGAFSTNVVASKELQQPGSARSTRHLEIELPKEASYQEGDHLGVIPRNYEGIVNRVTARFGLSASQQIRLEAEEEKLAHLPLAKTVSVEELLQYVELQDPVTRTQLRAMAAKTVCPPHKVELEALLRKQAYKEQVLAKRLTMLELLEKYPACEMKFSEFIALLPSIRPRYYSISSSPRVDEKQASITVSVVSGPAWSGYGEYKGIASNYLAELQEGDTITCFISTPQSEFTLPKDPETPLIMVGPGTGVAPFRGFVQARKQLKEQGQSLGEAHLYFGCRSPHEDYLYQEELENAQSEGIITLHTAFSRMPNQPKTYVQHVMEQDGKKLIELLDQGAHFYICGDGSQMAPAVEATLMKSYADVHQVSEADARLWLQQLEEKGRYAKDVWAG

SEQ ID NO: 479 - DNA, 3147 bp, synthetic construct
  misc_feature 1..3147: note = variant of P450 oxidase from Bacillus megaterium
  source 1..3147: mol_type = other DNA
atgacaattaaggaaatgcctcagcctaagacgtttggagaacttaaaaatttaccgttattaaacacagataaaccggttcaagctttgatgcgtattgcggatgaattaggagaaatctttaaattcgaggcgcctggtagcgtaacgcgctatttatcaagtcagcgtctaattaaagaagcatgcgatgaatcacgctttgataaaaacttaagtcaagcgcttaaatttgcacgtgattttgttggagacgggttatctacaagctggacgcatgaaccgaattggaaaaaagcgcataatatcttagttccaagctttagtcagcatgcaatggggcgttatcatgcgatgatggtcgatatcgccgtgcagcttgttcaaaagtgggagcgtctaaatgcagatgagcatattgaagtatcggaagacatgacacgtttaacgcttgatacaattggtctttgcggctttaactatcgctttaacagcttttaccgagatcagcctcatccatttattgtgagtgtggttcgtgcactggatgaagtaatgaacaagctgcagcgagcaaatccagacgacccagcttatgatgaaaacaagcgccagtgtcaagaagatatcaaggtgatgaacgactatgtagataaaattattgcagatcgcaaagcaaggggtgaacaaagtcatgatttattaacgcagatgctaaacggaaaagatccagaaacgggtgagccgcttgatgacgggaacattcgtcagcaaattattacattcttaattgcgggacaccaaacaacaagtggtcttttatcatttgcgctgtatttcttagtgaaaaatccacatgtattacaaaaagtagcagaagaagcagcacgagttctagtagatcctgttccaagctacaaacaagtcaaacagcttaaatatgttggcatggtcttaaacgaagcgctgcgcttatggccagtagcgcctatgttttccctatatgcaaaagaagatacggtgcttggaggagaatatcctttaacgaaaggcgacgaagtaatggttctggtgcctcagcttcaccgtgataaaacaatttggggagacgatgtggaggagttccgtccagagcgttttgaaaatccaagtgcgattccgcagcatgcgtttaaaccgtttggaaacggtcagcgtgcgtgtatcggtcagcagttcgctcttcatgaagcaacgctggtacttggtatgatgctaaaacactttgactttgaagatcatacaaactacgagctcgttattaaagaatcgcggacgttaaaacctgaaggctttgtggtaaaagcaaaatcgaaaggcattccgcttggcggtattccttcacctagcactgaacagtctgctaaaaaagtacgcaaaaaggcagaaaacgctcataatacgccgctgcttgtgctatacggttcaaatgcgggaacagctgaaggaacggcgcgtgatttagcagatattgcaatgagcaaaggatttgcaccgcaggtcgcaacgcttgattcacacgccagaaatcttccgcgcgaaggagctgtattaattgtaacggcgtcttataacggtcatccgcctgataacgcaaagcaatttgtcgactggttagaccaagcgtctgctgatgaagtaaaaggcgttcgctactccgtatttggatgcggcgataaaaattgggcggggacgtatcaaaaagtgcctgcttttatcgatgaaacgcttgccgctaaaggggcagaaaacatcgctgaccgcggtgaagcagatgcaagcgacgactttgaaggcacatatgaagaatggcgtgatcatatgtggagtgacgtagcagcctactttaacctcgacattgaaaacagtgaagataataaatctactctttcacttcaatttgtcgacagcgccgcggatatgccgcttgcgaaaatgcacggtgcgttttcaacgaacgtcgtagcaagcaaagaacttcaacagccaggcagtgcacgaagcacgcgacatcttgaaattgaacttccaaaagaagcttcttatcaagaaggagatcatttaggtgttattcctcgcaactatgaaggaatagtaaaccgtgtaacagcaaggttcggcctaagcgcatcacagcaaatccgtctggaagcagaagaagaaaaattagctcatttgccactcgctaaaacagtatccgtagaagagcttctgcaatacgtggagcttcaagatcctgttacgcgcacgcagcttcgcgcaatggctgctaaaacggtctgcccgccgcataaagtagagcttgaagccttgcttgaaaagcaagcctacaaagaacaagtgctggcaaaacgtttaacaatgcttgaactgcttgaaaaatacccggcgtgtgaaatgaaattcagcgaatttatcgcccttctgccaagcatacgcccgcgctattactcgatttcttcatcacctcgtgtcgatgaaaaacaagcaagcatcacggtcagcgttgtctcaggaccggcgtggagcggatatggagaatataaaggaattgcgtcgaactatcttgccgagctgcaagaaggagatacgattacgtgctttatttccacaccgcagtcagaatttacgctgccaaaagaccctgaaacgccgcttatcatggtcggaccgggaacaggcgtcgcgccgtttagaggctttgtgcaggcgcgcaaacagctaaaagaacaaggacagtcacttggagaagcacatttatacttcggctgccgttcacctcatgaagactatctgtatcaagaagagcttgaaaacgcccaaagcgaaggcatcattacgcttcataccgctttttctcgcatgggtaatcagccgaaaacatacgttcagcacgtaatggaacaagacggcaagaaattgattgaacttcttgatcaaggagcgcacttctatatttgcggagacggaagccaaatggcacctgccgttgaagcaacgcttatgaaaagctatgctgacgttcaccaagtgagtgaagcagacgctcgcttatggctgcagcagctagaagaaaaaggccgatacgcaaaagacgtgtgggctggg

SEQ ID NO: 480 - protein, 1049 aa, synthetic construct
  REGION 1..1049: note = variant of P450 oxidase from Bacillus megaterium
MTIKEMPQPKTFGELKNLPLLNTDKPVQALMRIADELGEIFKFEAPGSVTRYLSSQRLIKEACDESRFDKNLSQALKFARDFVGDGLSTSWTHEPNWKKAHNILVPSFSQHAMGRYHAMMVDIAVQLVQKWERLNADEHIEVSEDMTRLTLDTIGLCGFNYRFNSFYRDQPHPFIVSVVRALDEVMNKLQRANPDDPAYDENKRQCQEDIKVMNDYVDKIIADRKARGEQSHDLLTQMLNGKDPETGEPLDDGNIRQQIITFLIAGHQTTSGLLSFALYFLVKNPHVLQKVAEEAARVLVDPVPSYKQVKQLKYVGMVLNEALRLWPVAPMFSLYAKEDTVLGGEYPLTKGDEVMVLVPQLHRDKTIWGDDVEEFRPERFENPSAIPQHAFKPFGNGQRACIGQQFALHEATLVLGMMLKHFDFEDHTNYELVIKESRTLKPEGFVVKAKSKGIPLGGIPSPSTEQSAKKVRKKAENAHNTPLLVLYGSNAGTAEGTARDLADIAMSKGFAPQVATLDSHARNLPREGAVLIVTASYNGHPPDNAKQFVDWLDQASADEVKGVRYSVFGCGDKNWAGTYQKVPAFIDETLAAKGAENIADRGEADASDDFEGTYEEWRDHMWSDVAAYFNLDIENSEDNKSTLSLQFVDSAADMPLAKMHGAFSTNVVASKELQQPGSARSTRHLEIELPKEASYQEGDHLGVIPRNYEGIVNRVTARFGLSASQQIRLEAEEEKLAHLPLAKTVSVEELLQYVELQDPVTRTQLRAMAAKTVCPPHKVELEALLEKQAYKEQVLAKRLTMLELLEKYPACEMKFSEFIALLPSIRPRYYSISSSPRVDEKQASITVSVVSGPAWSGYGEYKGIASNYLAELQEGDTITCFISTPQSEFTLPKDPETPLIMVGPGTGVAPFRGFVQARKQLKEQGQSLGEAHLYFGCRSPHEDYLYQEELENAQSEGIITLHTAFSRMGNQPKTYVQHVMEQDGKKLIELLDQGAHFYICGDGSQMAPAVEATLMKSYADVHQVSEADARLWLQQLEEKGRYAKDVWAG

SEQ ID NO: 481 - DNA, 3147 bp, synthetic construct
  misc_feature 1..3147: note = variant of P450 oxidase from Bacillus megaterium
  source 1..3147: mol_type = other DNA
atgacaattaaggaaatgcctcagcctaagacgtttggagaacttaaaaatttaccgttattaaacacagataaaccggttcaagctttgatgcgtattgcggatgaattaggagaaatctttaaattcgaggcgcctggtagcgtaacgcgctatttatcaagtcagcgtctaattaaagaagcatgcgatgaatcacgctttgataaaaacttaagtcaagcgcttaaatttgcacgtgattttgttggagacgggttatctacaagctggacgcatgaaccgaattggaaaaaagcgcataatatcttagttccaagctttagtcagcatgcaatggggcgttatcatgcgatgatggtcgatatcgccgtgcagcttgttcaaaagtgggagcgtctaaatgcagatgagcatattgaagtatcggaagacatgacacgtttaacgcttgatacaattggtctttgcggctttaactatcgctttaacagcttttaccgagatcagcctcatccatttattgtgagtgtggttcgtgcactggatgaagtaatgaacaagctgcagcgagcaaatccagacgacccagcttatgatgaaaacaagcgccagtgtcaagaagatatcaaggtgatgaacgactatgtagataaaattattgcagatcgcaaagcaaggggtgaacaaagtcatgatttattaacgcagatgctaaacggaaaagatccagaaacgggtgagccgcttgatgacgggaacattcgtcagcaaattattacattcttaattgcgggacaccaaacaacaagtggtcttttatcatttgcgctgtatttcttagtgaaaaatccacatgtattacaaaaagtagcagaagaagcagcacgagttctagtagatcctgttccaagctacaaacaagtcaaacagcttaaatatgttggcatggtcttaaacgaagcgctgcgcttatggccagtagcgcctatgttttccctatatgcaaaagaagatacggtgcttggaggagaatatcctttaacgaaaggcgacgaagtaatggttctggtgcctcagcttcaccgtgataaaacaatttggggagacgatgtggaggagttccgtccagagcgttttgaaaatccaagtgcgattccgcagcatgcgtttaaaccgtttggaaacggtcagcgtgcgtgtatcggtcagcagttcgctcttcatgaagcaacgctggtacttggtatgatgctaaaacactttgactttgaagatcatacaaactacgagctcgttattaaagaatcgcggacgttaaaacctgaaggctttgtggtaaaagcaaaatcgaaaggcattccgcttggcggtattccttcacctagcactgaacagtctgctaaaaaagtacgcaaaaaggcagaaaacgctcataatacgccgctgcttgtgctatacggttcaaatgcgggaacagctgaaggaacggcgcgtgatttagcagatattgcaatgagcaaaggatttgcaccgcaggtcgcaacgcttgattcacacgccagaaatcttccgcgcgaaggagctgtattaattgtaacggcgtcttataacggtcatccgcctgataacgcaaagcaatttgtcgactggttagaccaagcgtctgctgatgaagtaaaaggcgttcgctactccgtatttggatgcggcgataaaaattgggcggggacgtatcaaaaagtgcctgcttttatcgatgaaacgcttgccgctaaaggggcagaaaacatcgctgaccgcggtgaagcagatgcaagcgacgactttgaaggcacatatgaagaatggcgtgatcatatgtggagtgacgtagcagcctactttaacctcgacattgaaaacagtgaagataataaatctactctttcacttcaatttgtcgacagcgccgcggatatgccgcttgcgaaaatgcacggtgcgttttcaacgaacgtcgtagcaagcaaagaacttcaacagccaggcagtgcacgaagcacgcgacatcttgaaattgaacttccaaaagaagcttcttatcaagaaggagatcatttaggtgttattcctcgcaactatgaaggaatagtaaaccgtgtaacagcaaggttcggcctaagcgcatcacagcaaatccgtctggaagcagaagaagaaaaattagctcatttgccactcgctaaaacagtatccgtagaagagcttctgcaatacgtggagcttcaagatcctgttacgcgcacgcagcttcgcgcaatggctgctaaaacggtctgcccgccgcataaagtagagcttgaagccttgcttgaaaagcaagcctacaaagaacaagtgctggcaaaacgtttaacaatgcttgaactgcttgaaaaatacccggcgtgtgaaatgaaattcagcgaatttatcgcccttctgccaagcatacgcccgcgctattactcgatttcttcatcacctcgtgtcgatgaaaaacaagcaagcatcacggtcagcgttgtctcaggaccggcgtggagcggatatggagaatataaaggaattgcgtcgaactatcttgccgagctgcaagaaggagatgtgattacgtgctttatttccacaccgcagtcagaatttacgctgccaaaagaccctgaaacgccgcttatcatggtcggaccgggaacaggcgtcgcgccgtttagaggctttgtgcaggcgcgcaaacagctaaaagaacaaggacagtcacttggagaagcacatttatacttcggctgccgttcacctcatgaagactatctgtatcaagaagagcttgaaaacgcccaaagcgaaggcatcattacgcttcataccgctttttctcgcatgccaaatcagccgaaaacatacgttcagcacgtaatggaacaagacggcaagaaattgattgaacttcttgatcaaggagcgcacttctatatttgcggagacggaagccaaatggcacctgccgttgaagcaacgcttatgaaaagctatgctgacgttcaccaagtgagtgaagcagacgctcgcttatggctgcagcagctagaagaaaaaggccgatacgcaaaagacgtgtgggctggg

SEQ ID NO: 482 - protein, 1049 aa, synthetic construct
  REGION 1..1049: note = variant of P450 oxidase from Bacillus megaterium
MTIKEMPQPKTFGELKNLPLLNTDKPVQALMRIADELGEIFKFEAPGSVTRYLSSQRLIKEACDESRFDKNLSQALKFARDFVGDGLSTSWTHEPNWKKAHNILVPSFSQHAMGRYHAMMVDIAVQLVQKWERLNADEHIEVSEDMTRLTLDTIGLCGFNYRFNSFYRDQPHPFIVSVVRALDEVMNKLQRANPDDPAYDENKRQCQEDIKVMNDYVDKIIADRKARGEQSHDLLTQMLNGKDPETGEPLDDGNIRQQIITFLIAGHQTTSGLLSFALYFLVKNPHVLQKVAEEAARVLVDPVPSYKQVKQLKYVGMVLNEALRLWPVAPMFSLYAKEDTVLGGEYPLTKGDEVMVLVPQLHRDKTIWGDDVEEFRPERFENPSAIPQHAFKPFGNGQRACIGQQFALHEATLVLGMMLKHFDFEDHTNYELVIKESRTLKPEGFVVKAKSKGIPLGGIPSPSTEQSAKKVRKKAENAHNTPLLVLYGSNAGTAEGTARDLADIAMSKGFAPQVATLDSHARNLPREGAVLIVTASYNGHPPDNAKQFVDWLDQASADEVKGVRYSVFGCGDKNWAGTYQKVPAFIDETLAAKGAENIADRGEADASDDFEGTYEEWRDHMWSDVAAYFNLDIENSEDNKSTLSLQFVDSAADMPLAKMHGAFSTNVVASKELQQPGSARSTRHLEIELPKEASYQEGDHLGVIPRNYEGIVNRVTARFGLSASQQIRLEAEEEKLAHLPLAKTVSVEELLQYVELQDPVTRTQLRAMAAKTVCPPHKVELEALLEKQAYKEQVLAKRLTMLELLEKYPACEMKFSEFIALLPSIRPRYYSISSSPRVDEKQASITVSVVSGPAWSGYGEYKGIASNYLAELQEGDVITCFISTPQSEFTLPKDPETPLIMVGPGTGVAPFRGFVQARKQLKEQGQSLGEAHLYFGCRSPHEDYLYQEELENAQSEGIITLHTAFSRMPNQPKTYVQHVMEQDGKKLIELLDQGAHFYICGDGSQMAPAVEATLMKSYADVHQVSEADARLWLQQLEEKGRYAKDVWAG

SEQ ID NO: 483 - DNA, 3147 bp, synthetic construct
  misc_feature 1..3147: note = variant of P450 oxidase from Bacillus megaterium
  source 1..3147: mol_type = other DNA
atgacaattaaggaaatgcctcagcctaagacgtttggagaacttaaaaatttaccgttattaaacacagataaaccggttcaagctttgatgcgtattgcggatgaattaggagaaatctttaaattcgaggcgcctggtagcgtaacgcgctatttatcaagtcagcgtctaattaaagaagcatgcgatgaatcacgctttgataaaaacttaagtcaagcgcttaaatttgcacgtgattttgttggagacgggttatctacaagctggacgcatgaaccgaattggaaaaaagcgcataatatcttagttccaagctttagtcagcatgcaatggggcgttatcatgcgatgatggtcgatatcgccgtgcagcttgttcaaaagtgggagcgtctaaatgcagatgagcatattgaagtatcggaagacatgacacgtttaacgcttgatacaattggtctttgcggctttaactatcgctttaacagcttttaccgagatcagcctcatccatttattgtgagtgtggttcgtgcactggatgaagtaatgaacaagctgcagcgagcaaatccagacgacccagcttatgatgaaaacaagcgccagtgtcaagaagatatcaaggtgatgaacgactatgtagataaaattattgcagatcgcaaagcaaggggtgaacaaagtcatgatttattaacgcagatgctaaacggaaaagatccagaaacgggtgagccgcttgatgacgggaacattcgtcagcaaattattacattcttaattgcgggacaccaaacaacaagtggtcttttatcatttgcgctgtatttcttagtgaaaaatccacatgtattacaaaaagtagcagaagaagcagcacgagttctagtagatcctgttccaagctacaaacaagtcaaacagcttaaatatgttggcatggtcttaaacgaagcgctgcgcttatggccagtagcgcctatgttttccctatatgcaaaagaagatacggtgcttggaggagaatatcctttaacgaaaggcgacgaagtaatggttctggtgcctcagcttcaccgtgataaaacaatttggggagacgatgtggaggagttccgtccagagcgttttgaaaatccaagtgcgattccgcagcatgcgtttaaaccgtttggaaacggtcagcgtgcgtgtatcggtcagcagttcgctcttcatgaagcaacgctggtacttggtatgatgctaaaacactttgactttgaagatcatacaaactacgagctcgttattaaagaatcgcggacgttaaaacctgaaggctttgtggtaaaagcaaaatcgaaaggcattccgcttggcggtattccttcacctagcactgaacagtctgctaaaaaagtacgcaaaaaggcagaaaacgctcataatacgccgctgcttgtgctatacggttcaaatgcgggaacagctgaaggaacggcgcgtgatttagcagatattgcaatgagcaaaggatttgcaccgcaggtcgcaacgcttgattcacacgccagaaatcttccgcgcgaaggagctgtattaattgtaacggcgtcttataacggtcatccgcctgataacgcaaagcaatttgtcgactggttagaccaagcgtctgctgatgaagtaaaaggcgttcgctactccgtatttggatgcggcgataaaaattgggcggggacgtatcaaaaagtgcctgcttttatcgatgaaacgcttgccgctaaaggggcagaaaacatcgctgaccgcggtgaagcagatgcaagcgacgactttgaaggcacatatgaagaatggcgtgatcatatgtggagtgacgtagcagcctactttaacctcgacattgaaaacagtgaagataataaatctactctttcacttcaatttgtcgacagcgccgcggatatgccgcttgcgaaaatgcacggtgcgttttcaacgaacgtcgtagcaagcaaagaacttcaacagccaggcagtgcacgaagcacgcgacatcttgaaattgaacttccaaaagaagcttcttatcaagaaggagatcatttaggtgttattcctcgcaactatgaaggaatagtaaaccgtgtaacagcaaggttcggcctaagcgcatcacagcaaatccgtctggaagcagaagaagaaaaattagctcatttgccactcgctaaaacagtatccgtagaagagcttctgcaatacgtggagcttcaagatcctgttacgcgcacgcagcttcgcgcaatggctgctaaaacggtctgcccgccgcataaagtagagcttgaagccttgcttgaaaagcaagcctacaaagaacaagtgctggcaaaacgtttaacaatgcttgaactgcttgaaaaatacccggcgtgtgaaatgaaattcagcgaatttatcgcccttctgccaagcatacgcccgcgctattactcgatttcttcatcacctcgtgtcgatgaaaaacaagcaagcatcacggtcagcgttgtctcaggaccggcgtggagcggatatggagaatataaaggaattgcgtcgaactatcttgccgagctgcaagaaggagatacgattacgtgctttatttccacaccgcagtcagaatttacgctgccaaaagaccctgaaacgccgcttatcatggtcggaccgggaacaggcgtcgcgccgtttagaggctttgtgcaggcgcgcaaacagctaaaagaacaaggacagtcacttggagaagcacatttatacttcggctgccgttcacctagggaagactatctgtatcaagaagagcttgaaaacgcccaaagcgaaggcatcattacgcttcataccgctttttctcgcatgccaaatcagccgaaaacatacgttcagcacgtaatggaacaagacggcaagaaattgattgaacttcttgatcaaggagcgcacttctatatttgcggagacggaagccaaatggcacctgccgttgaagcaacgcttatgaaaagctatgctgacgttcaccaagtgagtgaagcagacgctcgcttatggctgcagcagctagaagaaaaaggccgatacgcaaaagacgtgtgggctggg

SEQ ID NO: 484 - protein, 1049 aa, synthetic construct
  REGION 1..1049: note = variant of P450 oxidase from Bacillus megaterium
MTIKEMPQPKTFGELKNLPLLNTDKPVQALMRIADELGEIFKFEAPGSVTRYLSSQRLIKEACDESRFDKNLSQALKFARDFVGDGLSTSWTHEPNWKKAHNILVPSFSQHAMGRYHAMMVDIAVQLVQKWERLNADEHIEVSEDMTRLTLDTIGLCGFNYRFNSFYRDQPHPFIVSVVRALDEVMNKLQRANPDDPAYDENKRQCQEDIKVMNDYVDKIIADRKARGEQSHDLLTQMLNGKDPETGEPLDDGNIRQQIITFLIAGHQTTSGLLSFALYFLVKNPHVLQKVAEEAARVLVDPVPSYKQVKQLKYVGMVLNEALRLWPVAPMFSLYAKEDTVLGGEYPLTKGDEVMVLVPQLHRDKTIWGDDVEEFRPERFENPSAIPQHAFKPFGNGQRACIGQQFALHEATLVLGMMLKHFDFEDHTNYELVIKESRTLKPEGFVVKAKSKGIPLGGIPSPSTEQSAKKVRKKAENAHNTPLLVLYGSNAGTAEGTARDLADIAMSKGFAPQVATLDSHARNLPREGAVLIVTASYNGHPPDNAKQFVDWLDQASADEVKGVRYSVFGCGDKNWAGTYQKVPAFIDETLAAKGAENIADRGEADASDDFEGTYEEWRDHMWSDVAAYFNLDIENSEDNKSTLSLQFVDSAADMPLAKMHGAFSTNVVASKELQQPGSARSTRHLEIELPKEASYQEGDHLGVIPRNYEGIVNRVTARFGLSASQQIRLEAEEEKLAHLPLAKTVSVEELLQYVELQDPVTRTQLRAMAAKTVCPPHKVELEALLEKQAYKEQVLAKRLTMLELLEKYPACEMKFSEFIALLPSIRPRYYSISSSPRVDEKQASITVSVVSGPAWSGYGEYKGIASNYLAELQEGDTITCFISTPQSEFTLPKDPETPLIMVGPGTGVAPFRGFVQARKQLKEQGQSLGEAHLYFGCRSPREDYLYQEELENAQSEGIITLHTAFSRMPNQPKTYVQHVMEQDGKKLIELLDQGAHFYICGDGSQMAPAVEATLMKSYADVHQVSEADARLWLQQLEEKGRYAKDVWAG

SEQ ID NO: 485 - DNA, 3147 bp, synthetic construct
  misc_feature 1..3147: note = variant of P450 oxidase from Bacillus megaterium
  source 1..3147: mol_type = other DNA
atgacaattaaggaaatgcctcagcctaagacgtttggagaacttaaaaatttaccgttattaaacacagataaaccggttcaagctttgatgcgtattgcggatgaattaggagaaatctttaaattcgaggcgcctggtagcgtaacgcgctatttatcaagtcagcgtctaattaaagaagcatgcgatgaatcacgctttgataaaaacttaagtcaagcgcttaaatttgcacgtgattttgttggagacgggttatctacaagctggacgcatgaaccgaattggaaaaaagcgcataatatcttagttccaagctttagtcagcatgcaatggggcgttatcatgcgatgatggtcgatatcgccgtgcagcttgttcaaaagtgggagcgtctaaatgcagatgagcatattgaagtatcggaagacatgacacgtttaacgcttgatacaattggtctttgcggctttaactatcgctttaacagcttttaccgagatcagcctcatccatttattgtgagtgtggttcgtgcactggatgaagtaatgaacaagctgcagcgagcaaatccagacgacccagcttatgatgaaaacaagcgccagtgtcaagaagatatcaaggtgatgaacgactatgtagataaaattattgcagatcgcaaagcaaggggtgaacaaagtcatgatttattaacgcagatgctaaacggaaaagatccagaaacgggtgagccgcttgatgacgggaacattcgtcagcaaattattacattcttaattgcgggacaccaaacaacaagtggtcttttatcatttgcgctgtatttcttagtgaaaaatccacatgtattacaaaaagtagcagaagaagcagcacgagttctagtagatcctgttccaagctacaaacaagtcaaacagcttaaatatgttggcatggtcttaaacgaagcgctgcgcttatggccagtagcgcctatgttttccctatatgcaaaagaagatacggtgcttggaggagaatatcctttaacgaaaggcgacgaagtaatggttctggtgcctcagcttcaccgtgataaaacaatttggggagacgatgtggaggagttccgtccagagcgttttgaaaatccaagtgcgattccgcagcatgcgtttaaaccgtttggaaacggtcagcgtgcgtgtatcggtcagcagttcgctcttcatgaagcaacgctggtacttggtatgatgctaaaacactttgactttgaagatcatacaaactacgagctcgttattaaagaatcgcggacgttaaaacctgaaggctttgtggtaaaagcaaaatcgaaaggcattccgcttggcggtattccttcacctagcactgaacagtctgctaaaaaagtacgcaaaaaggcagaaaacgctcataatacgccgctgcttgtgctatacggttcaaatgcgggaacagctgaaggaacggcgcgtgatttagcagatattgcaatgagcaaaggatttgcaccgcaggtcgcaacgcttgattcacacgccagaaatcttccgcgcgaaggagctgtattaattgtaacggcgtcttataacggtcatccgcctgataacgcaaagcaatttgtcgactggttagaccaagcgtctgctgatgaagtaaaaggcgttcgctactccgtatttggatgcggcgataaaaattgggcggggacgtatcaaaaagtgcctgcttttatcgatgaaacgcttgccgctaaaggggcagaaaacatcgctgaccgcggtgaagcagatgcaagcgacgactttgaaggcacatatgaagaatggcgtgatcatatgtggagtgacgtagcagcctactttaacctcgacattgaaaacagtgaagataataaatctactctttcacttcaatttgtcgacagcgccgcggatatgccgcttgcgaaaatgcacggtgcgttttcaacgaacgtcgtagcaagcaaagaacttcaacagccaggcagtgcacgaagcacgcgacatcttgaaattgaacttccaaaagaagcttcttatcaagaaggagatcatttaggtgttattcctcgcaactatgaaggaatagtaaaccgtgtaacagcaaggttcggcctaagcgcatcacagcaaatccgtctggaagcagaagaagaaaaattagctcatttgccactcgctaaaacagtatccgtagaagagcttctgcaatacgtggagcttcaagatcctgttacgcgcacgcagcttcgcgcaatggctgctaaaacggtctgcccgccgcataaagtagagcttgaagccttgcttgaaaagcaagcctacaaagaacaagtgctggcaaaacgtttaacaatgcttgaactgcttgaaaaatacccggcgtgtgaaatgaaattcagcgaatttatcgcccttctgccaagcatacgcccgcgctattactcgatttcttcatcacctcgtgtcgatgaaaaacaagcaagcatcacggtcagcgttgtctcaggaccggcgtggagcggatatggagaatataaaggaattgcgtcgaactatcttgccgagctgcaagaaggagatacgattacgtgctttatttccacaccgcagtcagaatttacgctgccaaaagaccctgaaacgccgcttatcatggtcggaccgggaacaggcgtcgcgccgtttagaggctttgtgcaggcgcgcaaacagctaaaagaaccgggacagtcacttggagaagcacatttatacttcggctgccgttcacctcatgaagactatctgtatcaagaagagcttgaaaacgcccaaagcgaaggcatcattacgcttcataccgctttttctcgcatgccaaatcagccgaaaacatacgttcagcacgtaatggaacaagacggcaagaaattgattgaacttcttgatcaaggagcgcacttctatatttgcggagacggaagccaaatggcacctgccgttgaagcaacgcttatgaaaagctatgctgacgttcaccaagtgagtgaagcagacgctcgcttatggctgcagcagctagaagaaaaaggccgatacgcaaaagacgtgtgggctggg

SEQ ID NO: 486 - protein, 1049 aa, synthetic construct
  REGION 1..1049: note = variant of P450 oxidase from Bacillus megaterium
MTIKEMPQPKTFGELKNLPLLNTDKPVQALMRIADELGEIFKFEAPGSVTRYLSSQRLIKEACDESRFDKNLSQALKFARDFVGDGLSTSWTHEPNWKKAHNILVPSFSQHAMGRYHAMMVDIAVQLVQKWERLNADEHIEVSEDMTRLTLDTIGLCGFNYRFNSFYRDQPHPFIVSVVRALDEVMNKLQRANPDDPAYDENKRQCQEDIKVMNDYVDKIIADRKARGEQSHDLLTQMLNGKDPETGEPLDDGNIRQQIITFLIAGHQTTSGLLSFALYFLVKNPHVLQKVAEEAARVLVDPVPSYKQVKQLKYVGMVLNEALRLWPVAPMFSLYAKEDTVLGGEYPLTKGDEVMVLVPQLHRDKTIWGDDVEEFRPERFENPSAIPQHAFKPFGNGQRACIGQQFALHEATLVLGMMLKHFDFEDHTNYELVIKESRTLKPEGFVVKAKSKGIPLGGIPSPSTEQSAKKVRKKAENAHNTPLLVLYGSNAGTAEGTARDLADIAMSKGFAPQVATLDSHARNLPREGAVLIVTASYNGHPPDNAKQFVDWLDQASADEVKGVRYSVFGCGDKNWAGTYQKVPAFIDETLAAKGAENIADRGEADASDDFEGTYEEWRDHMWSDVAAYFNLDIENSEDNKSTLSLQFVDSAADMPLAKMHGAFSTNVVASKELQQPGSARSTRHLEIELPKEASYQEGDHLGVIPRNYEGIVNRVTARFGLSASQQIRLEAEEEKLAHLPLAKTVSVEELLQYVELQDPVTRTQLRAMAAKTVCPPHKVELEALLEKQAYKEQVLAKRLTMLELLEKYPACEMKFSEFIALLPSIRPRYYSISSSPRVDEKQASITVSVVSGPAWSGYGEYKGIASNYLAELQEGDTITCFISTPQSEFTLPKDPETPLIMVGPGTGVAPFRGFVQARKQLKEPGQSLGEAHLYFGCRSPHEDYLYQEELENAQSEGIITLHTAFSRMPNQPKTYVQHVMEQDGKKLIELLDQGAHFYICGDGSQMAPAVEATLMKSYADVHQVSEADARLWLQQLEEKGRYAKDVWAG

SEQ ID NO: 487 - DNA, 3147 bp, synthetic construct
  misc_feature 1..3147: note = variant of P450 oxidase from Bacillus megaterium
  source 1..3147: mol_type = other DNA
atgacaattaaggaaatgcctcagcctaagacgtttggagaacttaaaaatttaccgttattaaacacagataaaccggttcaagctttgatgcgtattgcggatgaattaggagaaatctttaaattcgaggcgcctggtagcgtaacgcgctatttatcaagtcagcgtctaattaaagaagcatgcgatgaatcacgctttgataaaaacttaagtcaagcgcttaaatttgcacgtgattttgttggagacgggttatctacaagctggacgcatgaaccgaattggaaaaaagcgcataatatcttagttccaagctttagtcagcatgcaatggggcgttatcatgcgatgatggtcgatatcgccgtgcagcttgttcaaaagtgggagcgtctaaatgcagatgagcatattgaagtatcggaagacatgacacgtttaacgcttgatacaattggtctttgcggctttaactatcgctttaacagcttttaccgagatcagcctcatccatttattgtgagtgtggttcgtgcactggatgaagtaatgaacaagctgcagcgagcaaatccagacgacccagcttatgatgaaaacaagcgccagtgtcaagaagatatcaaggtgatgaacgactatgtagataaaattattgcagatcgcaaagcaaggggtgaacaaagtcatgatttattaacgcagatgctaaacggaaaagatccagaaacgggtgagccgcttgatgacgggaacattcgtcagcaaattattacattcttaattgcgggacaccaaacaacaagtggtcttttatcatttgcgctgtatttcttagtgaaaaatccacatgtattacaaaaagtagcagaagaagcagcacgagttctagtagatcctgttccaagctacaaacaagtcaaacagcttaaatatgttggcatggtcttaaacgaagcgctgcgcttatggccagtagcgcctatgttttccctatatgcaaaagaagatacggtgcttggaggagaatatcctttaacgaaaggcgacgaagtaatggttctggtgcctcagcttcaccgtgataaaacaatttggggagacgatgtggaggagttccgtccagagcgttttgaaaatccaagtgcgattccgcagcatgcgtttaaaccgtttggaaacggtcagcgtgcgtgtatcggtcagcagttcgctcttcatgaagcaacgctggtacttggtatgatgctaaaacactttgactttgaagatcatacaaactacgagctcgttattaaagaatcgcggacgttaaaacctgaaggctttgtggtaaaagcaaaatcgaaaggcattccgcttggcggtattccttcacctagcactgaacagtctgctaaaaaagtacgcaaaaaggcagaaaacgctcataatacgccgctgcttgtgctatacggttcaaatgcgggaacagctgaaggaacggcgcgtgatttagcagatattgcaatgagcaaaggatttgcaccgcaggtcgcaacgcttgattcacacgccagaaatcttccgcgcgaaggagctgtattaattgtaacggcgtcttataacggtcatccgcctgataacgcaaagcaatttgtcgactggttagaccaagcgtctgctgatgaagtaaaaggcgttcgctactccgtatttggatgcggcgataaaaattgggcggggacgtatcaaaaagtgcctgcttttatcgatgaaacgcttgccgctaaaggggcagaaaacatcgctgaccgcggtgaagcagatgcaagcgacgactttgaaggcacatatgaagaatggcgtgatcatatgtggagtgacgtagcagcctactttaacctcgacattgaaaacagtgaagataataaatctactctttcacttcaatttgtcgacagcgccgcggatatgccgcttgcgaaaatgcacggtgcgttttcaacgaacgtcgtagcaagcaaagaacttcaacagccaggcagtgcacgaagcacgcgacatcttgaaattgaacttccaaaagaagcttcttatcaagaaggagatcatttaggtgttattcctcgcaactatgaaggaatagtaaaccgtgtaacagcaaggttcggcctaagcgcatcacagcaaatccgtctggaagcagaagaagaaaaattagctcatttgccactcgctaaaacagtatccgtagaagagcttctgcaatacgtggagcttcaagatcctgttacgcgcacgcagcttcgcgcaatggctgctaaaacggtctgcccgccgcataaagtagagcttgaagccttgcttgaaaagcaagcctacaaagaacaagtgctggcaaaacgtttaacaatgcttgaactgcttgaaaaatacccggcgtgtgaaatgaaattcagcgaatttatcgcccttctgccaagcatacgcccgcgctattactcgatttcttcatcacctcgtgtcgatgaacggcaagcaagcatcacggtcagcgttgtctcaggaccggcgtggagcggatatggagaatataaaggaattgcgtcgaactatcttgccgagctgcaagaaggagatacgattacgtgctttatttccacaccgcagtcagaatttacgctgccaaaagaccctgaaacgccgcttatcatggtcggaccgggaacaggcgtcgcgccgtttagaggctttgtgcaggcgcgcaaacagctaaaagaacaaggacagtcacttggagaagcacatttatacttcggctgccgttcacctcatgaagactatctgtatcaagaagagcttgaaaacgcccaaagcgaaggcatcattacgcttcataccgctttttctcgcatgccaaatcagccgaaaacatacgttcagcacgtaatggaacaagacggcaagaaattgattgaacttcttgatcaaggagcgcacttctatatttgcggagacggaagccaaatggcacctgccgttgaagcaacgcttatgaaaagctatgctgacgttcaccaagtgagtgaagcagacgctcgcttatggctgcagcagctagaagaaaaaggccgatacgcaaaagacgtgtgggctggg

SEQ ID NO: 488 - protein, 1049 aa, synthetic construct
  REGION 1..1049: note = variant of P450 oxidase from Bacillus megaterium
MTIKEMPQPKTFGELKNLPLLNTDKPVQALMRIADELGEIFKFEAPGSVTRYLSSQRLIKEACDESRFDKNLSQALKFARDFVGDGLSTSWTHEPNWKKAHNILVPSFSQHAMGRYHAMMVDIAVQLVQKWERLNADEHIEVSEDMTRLTLDTIGLCGFNYRFNSFYRDQPHPFIVSVVRALDEVMNKLQRANPDDPAYDENKRQCQEDIKVMNDYVDKIIADRKARGEQSHDLLTQMLNGKDPETGEPLDDGNIRQQIITFLIAGHQTTSGLLSFALYFLVKNPHVLQKVAEEAARVLVDPVPSYKQVKQLKYVGMVLNEALRLWPVAPMFSLYAKEDTVLGGEYPLTKGDEVMVLVPQLHRDKTIWGDDVEEFRPERFENPSAIPQHAFKPFGNGQRACIGQQFALHEATLVLGMMLKHFDFEDHTNYELVIKESRTLKPEGFVVKAKSKGIPLGGIPSPSTEQSAKKVRKKAENAHNTPLLVLYGSNAGTAEGTARDLADIAMSKGFAPQVATLDSHARNLPREGAVLIVTASYNGHPPDNAKQFVDWLDQASADEVKGVRYSVFGCGDKNWAGTYQKVPAFIDETLAAKGAENIADRGEADASDDFEGTYEEWRDHMWSDVAAYFNLDIENSEDNKSTLSLQFVDSAADMPLAKMHGAFSTNVVASKELQQPGSARSTRHLEIELPKEASYQEGDHLGVIPRNYEGIVNRVTARFGLSASQQIRLEAEEEKLAHLPLAKTVSVEELLQYVELQDPVTRTQLRAMAAKTVCPPHKVELEALLEKQAYKEQVLAKRLTMLELLEKYPACEMKFSEFIALLPSIRPRYYSISSSPRVDERQASITVSVVSGPAWSGYGEYKGIASNYLAELQEGDTITCFISTPQSEFTLPKDPETPLIMVGPGTGVAPFRGFVQARKQLKEQGQSLGEAHLYFGCRSPHEDYLYQEELENAQSEGIITLHTAFSRMPNQPKTYVQHVMEQDGKKLIELLDQGAHFYICGDGSQMAPAVEATLMKSYADVHQVSEADARLWLQQLEEKGRYAKDVWAG

SEQ ID NO: 489 - DNA, 3147 bp, synthetic construct
  misc_feature 1..3147: note = variant of P450 oxidase from Bacillus megaterium
  source 1..3147: mol_type = other DNA
atgacaattaaggaaatgcctcagcctaagacgtttggagaacttaaaaatttaccgttattaaacacagataaaccggttcaagctttgatgcgtattgcggatgaattaggagaaatctttaaattcgaggcgcctggtagcgtaacgcgctatttatcaagtcagcgtctaattaaagaagcatgcgatgaatcacgctttgataaaaacttaagtcaagcgcttaaatttgcacgtgattttgttggagacgggttatctacaagctggacgcatgaaccgaattggaaaaaagcgcataatatcttagttccaagctttagtcagcatgcaatggggcgttatcatgcgatgatggtcgatatcgccgtgcagcttgttcaaaagtgggagcgtctaaatgcagatgagcatattgaagtatcggaagacatgacacgtttaacgcttgatacaattggtctttgcggctttaactatcgctttaacagcttttaccgagatcagcctcatccatttattgtgagtgtggttcgtgcactggatgaagtaatgaacaagctgcagcgagcaaatccagacgacccagcttatgatgaaaacaagcgccagtgtcaagaagatatcaaggtgatgaacgactatgtagataaaattattgcagatcgcaaagcaaggggtgaacaaagtcatgatttattaacgcagatgctaaacggaaaagatccagaaacgggtgagccgcttgatgacgggaacattcgtcagcaaattattacattcttaattgcgggacaccaaacaacaagtggtcttttatcatttgcgctgtatttcttagtgaaaaatccacatgtattagcgaaagtagcagaagaagcagcacgagttctagtagatcctgttccaagctacaaacaagtcaaacagcttaaatatgttggcatggtcttaaacgaagcgctgcgcttatggccagtagcgcctatgttttccctatatgcaaaagaagatacggtgcttggaggagaatatcctttaacgaaaggcgacgaagtaatggttctggtgcctcagcttcaccgtgataaaacaatttggggagacgatgtggaggagttccgtccagagcgttttgaaaatccaagtgcgattccgcagcatgcgtttaaaccgtttggaaacggtcagcgtgcgtgtatcggtcagcagttcgctcttcatgaagcaacgctggtacttggtatgatgctaaaacactttgactttgaagatcatacaaactacgagctcgttattaaagaatcgcggacgttaaaacctgaaggctttgtggtaaaagcaaaatcgaaaggcattccgcttggcggtattccttcacctagcactgaacagtctgctaaaaaagtacgcaaaaaggcagaaaacgctcataatacgccgctgcttgtgctatacggttcaaatgcgggaacagctgaaggaacggcgcgtgatttagcagatattgcaatgagcaaaggatttgcaccgcaggtcgcaacgcttgattcacacgccagaaatcttccgcgcgaaggagctgtattaattgtaacggcgtcttataacggtcatccgcctgataacgcaaagcaatttgtcgactggttagaccaagcgtctgctgatgaagtaaaaggcgttcgctactccgtatttggatgcggcgataaaaattgggcggggacgtatcaaaaagtgcctgcttttatcgatgaaacgcttgccgctaaaggggcagaaaacatcgctgaccgcggtgaagcagatgcaagcgacgactttgaaggcacatatgaagaatggcgtgatcatatgtggagtgacgtagcagcctactttaacctcgacattgaaaacagtgaagataataaatctactctttcacttcaatttgtcgacagcgccgcggatatgccgcttgcgaaaatgcacggtgcgttttcaacgaacgtcgtagcaagcaaagaacttcaacagccaggcagtgcacgaagcacgcgacatcttgaaattgaacttccaaaagaagcttcttatcaagaaggagatcatttaggtgttattcctcgcaactatgaaggaatagtaaaccgtgtaacagcaaggttcggcctaagcgcatcacagcaaatccgtctggaagcagaagaagaaaaattagctcatttgccactcgctaaaacagtatccgtagaagagcttctgcaatacgtggagcttcaagatcctgttacgcgcacgcagcttcgcgcaatggctgctaaaacggtctgcccgccgcataaagtagagcttgaagccttgcttgaaaagcaagcctacaaagaacaagtgctggcaaaacgtttaacaatgcttgaactgcttgaaaaatacccggcgtgtgaaatgaaattcagcgaatttatcgcccttctgccaagcatacgcccgcgctattactcgatttcttcatcacctcgtgtcgatgaaaaacaagcaagcatcacggtcagcgttgtctcaggaccggcgtggagcggatatggagaatataaaggaattgcgtcgaactatcttgccgagctgcaagaaggagatacgattacgtgctttatttccacaccgcagtcagaatttacgctgccaaaagaccctgaaacgccgcttatcatggtcggaccgggaacaggcgtcgcgccgtttagaggctttgtgcaggcgcgcaaacagctaaaagaacaaggacagtcacttggagaagcacatttatacttcggctgccgttcacctcatgaagactatctgtatcaagaagagcttgaaaacgcccaaagcgaaggcatcattacgcttcataccgctttttctcgcatgccaaatcagccgaaaacatacgttcagcacgtaatggaacaagacggcaagaaattgattgaacttcttgatcaaggagcgcacttctatatttgcggagacggaagccaaatggcacctgccgttgaagcaacgcttatgaaaagctatgctgacgttcaccaagtgagtgaagcagacgctcgcttatggctgcagcagctagaagaaaaaggccgatacgcaaaagacgtgtgggctggg

SEQ ID NO: 490 - protein, 1049 aa, synthetic construct
  REGION 1..1049: note = variant of P450 oxidase from Bacillus megaterium
MTIKEMPQPKTFGELKNLPLLNTDKPVQALMRIADELGEIFKFEAPGSVTRYLSSQRLIKEACDESRFDKNLSQALKFARDFVGDGLSTSWTHEPNWKKAHNILVPSFSQHAMGRYHAMMVDIAVQLVQKWERLNADEHIEVSEDMTRLTLDTIGLCGFNYRFNSFYRDQPHPFIVSVVRALDEVMNKLQRANPDDPAYDENKRQCQEDIKVMNDYVDKIIADRKARGEQSHDLLTQMLNGKDPETGEPLDDGNIRQQIITFLIAGHQTTSGLLSFALYFLVKNPHVLAKVAEEAARVLVDPVPSYKQVKQLKYVGMVLNEALRLWPVAPMFSLYAKEDTVLGGEYPLTKGDEVMVLVPQLHRDKTIWGDDVEEFRPERFENPSAIPQHAFKPFGNGQRACIGQQFALHEATLVLGMMLKHFDFEDHTNYELVIKESRTLKPEGFVVKAKSKGIPLGGIPSPSTEQSAKKVRKKAENAHNTPLLVLYGSNAGTAEGTARDLADIAMSKGFAPQVATLDSHARNLPREGAVLIVTASYNGHPPDNAKQFVDWLDQASADEVKGVRYSVFGCGDKNWAGTYQKVPAFIDETLAAKGAENIADRGEADASDDFEGTYEEWRDHMWSDVAAYFNLDIENSEDNKSTLSLQFVDSAADMPLAKMHGAFSTNVVASKELQQPGSARSTRHLEIELPKEASYQEGDHLGVIPRNYEGIVNRVTARFGLSASQQIRLEAEEEKLAHLPLAKTVSVEELLQYVELQDPVTRTQLRAMAAKTVCPPHKVELEALLEKQAYKEQVLAKRLTMLELLEKYPACEMKFSEFIALLPSIRPRYYSISSSPRVDEKQASITVSVVSGPAWSGYGEYKGIASNYLAELQEGDTITCFISTPQSEFTLPKDPETPLIMVGPGTGVAPFRGFVQARKQLKEQGQSLGEAHLYFGCRSPHEDYLYQEELENAQSEGIITLHTAFSRMPNQPKTYVQHVMEQDGKKLIELLDQGAHFYICGDGSQMAPAVEATLMKSYADVHQVSEADARLWLQQLEEKGRYAKDVWAG

SEQ ID NO: 491 - DNA, 3147 bp, synthetic construct
  misc_feature 1..3147: note = variant of P450 oxidase from Bacillus megaterium
  source 1..3147: mol_type = other DNA
atgacaattaaggaaatgcctcagcctaagacgtttggagaacttaaaaatttaccgttattaaacacagataaaccggttcaagctttgatgcgtattgcggatgaattaggagaaatctttaaattcgaggcgcctggtagcgtaacgcgctatttatcaagtcagcgtctaattaaagaagcatgcgatgaatcacgctttgataaaaacttaagtcaagcgcttaaatttgcacgtgattttgttggagacgggttatctacaagctggacgcatgaaccgaattggaaaaaagcgcataatatcttagttccaagctttagtcagcatgcaatggggcgttatcatgcgatgatggtcgatatcgccgtgcagcttgttcaaaagtgggagcgtctaaatgcagatgagcatattgaagtatcggaagacatgacacgtttaacgcttgatacaattggtctttgcggctttaactatcgctttaacagcttttaccgagatcagcctcatccatttattgtgagtgtggttcgtgcactggatgaagtaatgaacaagctgcagcgagcaaatccagacgacccagcttatgatgaaaacaagcgccagtgtcaagaagatatcaaggtgatgaacgactatgtagataaaattattgcagatcgcaaagcaaggggtgaacaaagtcatgatttattaacgcagatgctaaacggaaaagatccagaaacgggtgagccgcttgatgacgggaacattcgtcagcaaattattacattcttaattgcgggacaccaaacaacaagtggtcttttatcatttgcgctgtatttcttagtgaaaaatccaagggtattacaaaaagtagcagaagaagcagcacgagttctagtagatcctgttccaagctacaaacaagtcaaacagcttaaatatgttggcatggtcttaaacgaagcgctgcgcttatggccagtagcgcctatgttttccctatatgcaaaagaagatacggtgcttggaggagaatatcctttaacgaaaggcgacgaagtaatggttctggtgcctcagcttcaccgtgataaaacaatttggggagacgatgtggaggagttccgtccagagcgttttgaaaatccaagtgcgattccgcagcatgcgtttaaaccgtttggaaacggtcagcgtgcgtgtatcggtcagcagttcgctcttcatgaagcaacgctggtacttggtatgatgctaaaacactttgactttgaagatcatacaaactacgagctcgttattaaagaatcgcggacgttaaaacctgaaggctttgtggtaaaagcaaaatcgaaaggcattccgcttggcggtattccttcacctagcactgaacagtctgctaaaaaagtacgcaaaaaggcagaaaacgctcataatacgccgctgcttgtgctatacggttcaaatgcgggaacagctgaaggaacggcgcgtgatttagcagatattgcaatgagcaaaggatttgcaccgcaggtcgcaacgcttgattcacacgccagaaatcttccgcgcgaaggagctgtattaattgtaacggcgtcttataacggtcatccgcctgataacgcaaagcaatttgtcgactggttagaccaagcgtctgctgatgaagtaaaaggcgttcgctactccgtatttggatgcggcgataaaaattgggcggggacgtatcaaaaagtgcctgcttttatcgatgaaacgcttgccgctaaaggggcagaaaacatcgctgaccgcggtgaagcagatgcaagcgacgactttgaaggcacatatgaagaatggcgtgatcatatgtggagtgacgtagcagcctactttaacctcgacattgaaaacagtgaagataataaatctactctttcacttcaatttgtcgacagcgccgcggatatgccgcttgcgaaaatgcacggtgcgttttcaacgaacgtcgtagcaagcaaagaacttcaacagccaggcagtgcacgaagcacgcgacatcttgaaattgaacttccaaaagaagcttcttatcaagaaggagatcatttaggtgttattcctcgcaactatgaaggaatagtaaaccgtgtaacagcaaggttcggcctaagcgcatcacagcaaatccgtctggaagcagaagaagaaaaattagctcatttgccactcgctaaaacagtatccgtagaagagcttctgcaatacgtggagcttcaagatcctgttacgcgcacgcagcttcgcgcaatggctgctaaaacggtctgcccgccgcataaagtagagcttgaagccttgcttgaaaagcaagcctacaaagaacaagtgctggcaaaacgtttaacaatgcttgaactgcttgaaaaatacccggcgtgtgaaatgaaattcagcgaatttatcgcccttctgccaagcatacgcccgcgctattactcgatttcttcatcacctcgtgtcgatgaaaaacaagcaagcatcacggtcagcgttgtctcaggaccggcgtggagcggatatggagaatataaaggaattgcgtcgaactatcttgccgagctgcaagaaggagatacgattacgtgctttatttccacaccgcagtcagaatttacgctgccaaaagaccctgaaacgccgcttatcatggtcggaccgggaacaggcgtcgcgccgtttagaggctttgtgcaggcgcgcaaacagctaaaagaacaaggacagtcacttggagaagcacatttatacttcggctgccgttcacctcatgaagactatctgtatcaagaagagcttgaaaacgcccaaagcgaaggcatcattacgcttcataccgctttttctcgcatgccaaatcagccgaaaacatacgttcagcacgtaatggaacaagacggcaagaaattgattgaacttcttgatcaaggagcgcacttctatatttgcggagacggaagccaaatggcacctgccgttgaagcaacgcttatgaaaagctatgctgacgttcaccaagtgagtgaagcagacgctcgcttatggctgcagcagctagaagaaaaaggccgatacgcaaaagacgtgtgggctggg

SEQ ID NO: 492 - protein, 1049 aa, synthetic construct
  REGION 1..1049: note = variant of P450 oxidase from Bacillus megaterium
MTIKEMPQPKTFGELKNLPLLNTDKPVQALMRIADELGEIFKFEAPGSVTRYLSSQRLIKEACDESRFDKNLSQALKFARDFVGDGLSTSWTHEPNWKKAHNILVPSFSQHAMGRYHAMMVDIAVQLVQKWERLNADEHIEVSEDMTRLTLDTIGLCGFNYRFNSFYRDQPHPFIVSVVRALDEVMNKLQRANPDDPAYDENKRQCQEDIKVMNDYVDKIIADRKARGEQSHDLLTQMLNGKDPETGEPLDDGNIRQQIITFLIAGHQTTSGLLSFALYFLVKNPRVLQKVAEEAARVLVDPVPSYKQVKQLKYVGMVLNEALRLWPVAPMFSLYAKEDTVLGGEYPLTKGDEVMVLVPQLHRDKTIWGDDVEEFRPERFENPSAIPQHAFKPFGNGQRACIGQQFALHEATLVLGMMLKHFDFEDHTNYELVIKESRTLKPEGFVVKAKSKGIPLGGIPSPSTEQSAKKVRKKAENAHNTPLLVLYGSNAGTAEGTARDLADIAMSKGFAPQVATLDSHARNLPREGAVLIVTASYNGHPPDNAKQFVDWLDQASADEVKGVRYSVFGCGDKNWAGTYQKVPAFIDETLAAKGAENIADRGEADASDDFEGTYEEWRDHMWSDVAAYFNLDIENSEDNKSTLSLQFVDSAADMPLAKMHGAFSTNVVASKELQQPGSARSTRHLEIELPKEASYQEGDHLGVIPRNYEGIVNRVTARFGLSASQQIRLEAEEEKLAHLPLAKTVSVEELLQYVELQDPVTRTQLRAMAAKTVCPPHKVELEALLEKQAYKEQVLAKRLTMLELLEKYPACEMKFSEFIALLPSIRPRYYSISSSPRVDEKQASITVSVVSGPAWSGYGEYKGIASNYLAELQEGDTITCFISTPQSEFTLPKDPETPLIMVGPGTGVAPFRGFVQARKQLKEQGQSLGEAHLYFGCRSPHEDYLYQEELENAQSEGIITLHTAFSRMPNQPKTYVQHVMEQDGKKLIELLDQGAHFYICGDGSQMAPAVEATLMKSYADVHQVSEADARLWLQQLEEKGRYAKDVWAG

SEQ ID NO: 493 - DNA, 3147 bp, synthetic construct
  misc_feature 1..3147: note = variant of P450 oxidase from Bacillus megaterium
  source 1..3147: mol_type = other DNA
atgacaattaaggaaatgcctcagcctaagacgtttggagaacttaaaaatttaccgttattaaacacagataaaccggttcaagctttgatgcgtattgcggatgaattaggagaaatctttaaattcgaggcgcctggtagcgtaacgcgctatttatcaagtcagcgtctaattaaagaagcatgcgatgaatcacgctttgataaaaacttaagtcaagcgcttaaatttgcacgtgattttgttggagacgggttatctacaagctggacgcatgaaccgaattggaaaaaagcgcataatatcttagttccaagctttagtcagcatgcaatggggcgttatcatgcgatgatggtcgatatcgccgtgcagcttgttcaaaagtgggagcgtctaaatgcagatgagcatattgaagtatcggaagacatgacacgtttaacgcttgatacaattggtctttgcggctttaactatcgctttaacagcttttaccgagatcagcctcatccatttattgtgagtgtggttcgtgcactggatgaagtaatgaacaagctgcagcgagcaaatccagacgacccagcttatgatgaaaacaagcgccagtgtcaagaagatatcaaggtgatgaacgactatgtagataaaattattgcagatcgcaaagcaaggggtgaacaaagtcatgatttattaacgcagatgctaaacggaaaagatccagaaacgggtgagccgcttgatgacgggaacattcgtcagcaaattattacattcttaattgcgggacaccaaacaacaagtggtcttttatcatttgcgctgtatttcttagtgaaaaatccacatgtattacaaaaagtagcagaagaagcagcacgagttctagtagatcctgttccaagctacaaacaagtcaaacagcttaaatatgttggcatggtcttaaacgaagcgctgcgcttatggccagtagcgcctatgttttccctatatgcaaaagaagatacggtgcttggaggagaatatcctttaacgaaaggcgacgaagtaatggttctggtgcctcagcttcaccgtgataaaacaatttggggagacgatgtggaggagttccgtccagagcgttttgaaaatccaagtgcgattccgcagcatgcgtttaaaccgtttggaaacggtcagcgtgcgtgtatcggtcagcagttcgctcttcatgaagcaacgctggtacttggtatgatgctaaaacactttgactttgaagatcatacaaactacgagctcgttattaaagaatcgcggacgttaaaacctgaaggctttgtggtaaaagcaaaatcgaaaggcattccgcttggcggtattccttcacctagcactgaacagtctgctaaaaaagtacgcaaaaaggcagaaaacgctcataatacgccgctgcttgtgctatacggttcaaatgcgggaacagctgaaggaacggcgcgtgatttagcagatattgcaatgagcaaaggatttgcaccgcaggtcgcaacgcttgattcacacgccagaaatcttccgcgcgaaggagctgtattaattgtaacggcgtcttataacggtcatccgcctgataacgcaaagcaatttgtcgactggttagaccaagcgtctgctgatgaagtaaaaggcgttcgctactccgtatttggatgcggcgataaaaattgggcggggacgtatcaaaaagtgcctgcttttatcgatgaaacgcttgccgctaaaggggcagaaaacatcgctgaccgcggtgaagcagatgcaagcgacgactttgaaggcacatatgaagaatggcgtgatcatatgtggagtgacgtagcagcctactttaacctcgacattgaaaacagtgaagataataaatctactctttcacttcaatttgtcgacagcgccgcggatatgccgcttgcgaaaatgcacggtgcgttttcaacgaacgtcgtagcaagcaaagaacttcaacagccaggcagtgcacgaagcacgcgacatcttgaaattgaacttccaaaagaagcttcttatcaagaaggagatcatttaggtgttattcctcgcaactatgaaggaatagtaaaccgtgtaacagcaaggttcggcctaagcgcatcacagcaaatccgtctggaagcagaagaagaaaaattagctcatttgccactcgctaaaacagtatccgtagaagagcttctgcaatacgtggagcttcaagatcctgttacgcgcacgcagcttcgcgcaatggctgctaaaacggtctgcccgccgcataaagtagagcttgaagccttgcttgaaaagcaagcctacaaagaacaagtgctggcaaaacgtttaacaatgcttgaactgcttgaaaaatacccggcgtgtgaaatgaaattcagcgaatttatcgcccttctgccaagcatacgcccgcgctattactcgatttcttcatcacctcgtgtcgatgaaaaacaagcaagcatcacggtcagcgttgtctcaggaccggcgtggagcggatatggagaatataaaggaattgcgtcgaactatcttgccgagctgcaagaaggagatacgattacgtgctttatttccacaccgcagtcagaatttacgctgccaaaagaccctgaaacgccgcttatcatggtcggaccgggaacaggcgtcgcgccgtttagaggctttgtgcaggcgcgcaaacagctaaaagaacaaggacagtcacttggagaagcacatttatacttcggctgccgttcacctcatgaagactatctgtatcaagaagagcttgaaaacgcccaaagcgaaggcatcattacgcttcataccgctttttctcgcatgccaaatcagccgaaaacatacgttcagcacgtaatggaaggggacggcaagaaattgattgaacttcttgatcaaggagcgcacttctatatttgcggagacggaagccaaatggcacctgccgttgaagcaacgcttatgaaaagctatgctgacgttcaccaagtgagtgaagcagacgctcgcttatggctgcagcagctagaagaaaaaggccgatacgcaaaagacgtgtgggctggg

SEQ ID NO: 494 - protein, 1049 aa, synthetic construct
  REGION 1..1049: note = variant of P450 oxidase from Bacillus megaterium
MTIKEMPQPKTFGELKNLPLLNTDKPVQALMRIADELGEIFKFEAPGSVTRYLSSQRLIKEACDESRFDKNLSQALKFARDFVGDGLSTSWTHEPNWKKAHNILVPSFSQHAMGRYHAMMVDIAVQLVQKWERLNADEHIEVSEDMTRLTLDTIGLCGFNYRFNSFYRDQPHPFIVSVVRALDEVMNKLQRANPDDPAYDENKRQCQEDIKVMNDYVDKIIADRKARGEQSHDLLTQMLNGKDPETGEPLDDGNIRQQIITFLIAGHQTTSGLLSFALYFLVKNPHVLQKVAEEAARVLVDPVPSYKQVKQLKYVGMVLNEALRLWPVAPMFSLYAKEDTVLGGEYPLTKGDEVMVLVPQLHRDKTIWGDDVEEFRPERFENPSAIPQHAFKPFGNGQRACIGQQFALHEATLVLGMMLKHFDFEDHTNYELVIKESRTLKPEGFVVKAKSKGIPLGGIPSPSTEQSAKKVRKKAENAHNTPLLVLYGSNAGTAEGTARDLADIAMSKGFAPQVATLDSHARNLPREGAVLIVTASYNGHPPDNAKQFVDWLDQASADEVKGVRYSVFGCGDKNWAGTYQKVPAFIDETLAAKGAENIADRGEADASDDFEGTYEEWRDHMWSDVAAYFNLDIENSEDNKSTLSLQFVDSAADMPLAKMHGAFSTNVVASKELQQPGSARSTRHLEIELPKEASYQEGDHLGVIPRNYEGIVNRVTARFGLSASQQIRLEAEEEKLAHLPLAKTVSVEELLQYVELQDPVTRTQLRAMAAKTVCPPHKVELEALLEKQAYKEQVLAKRLTMLELLEKYPACEMKFSEFIALLPSIRPRYYSISSSPRVDEKQASITVSVVSGPAWSGYGEYKGIASNYLAELQEGDTITCFISTPQSEFTLPKDPETPLIMVGPGTGVAPFRGFVQARKQLKEQGQSLGEAHLYFGCRSPHEDYLYQEELENAQSEGIITLHTAFSRMPNQPKTYVQHVMEGDGKKLIELLDQGAHFYICGDGSQMAPAVEATLMKSYADVHQVSEADARLWLQQLEEKGRYAKDVWAG

SEQ ID NO: 495 - DNA, 3147 bp, synthetic construct
  misc_feature 1..3147: note = variant of P450 oxidase from Bacillus megaterium
  source 1..3147: mol_type = other DNA
atgacaattaaggaaatgcctcagcctaagacgtttggagaacttaaaaatttaccgttattaaacacagataaaccggttcaagctttgatgcgtattgcggatgaattaggagaaatctttaaattcgaggcgcctggtagcgtaacgcgctatttatcaagtcagcgtctaattaaagaagcatgcgatgaatcacgctttgataaaaacttaagtcaagcgcttaaatttgcacgtgattttgttggagacgggttatctacaagctggacgcatgaaccgaattggaaaaaagcgcataatatcttagttccaagctttagtcagcatgcaatggggcgttatcatgcgatgatggtcgatatcgccgtgcagcttgttcaaaagtgggagcgtctaaatgcagatgagcatattgaagtatcggaagacatgacacgtttaacgcttgatacaattggtctttgcggctttaactatcgctttaacagcttttaccgagatcagcctcatccatttattgtgagtgtggttcgtgcactggatgaagtaatgaacaagctgcagcgagcaaatccagacgacccagcttatgatgaaaacaagcgccagtgtcaagaagatatcaaggtgatgaacgactatgtagataaaattattgcagatcgcaaagcaaggggtgaacaaagtcatgatttattaacgcagatgctaaacggaaaagatccagaaacgggtgagccgcttgatgacgggaacattcgtcagcaaattattacattcttaattgcgggacaccaaacaacaagtggtcttttatcatttgcgctgtatttcttagtgaaaaatccacatgtattacaaaaagtagcagaagaagcagcacgagttctagtagatcctgttccaagctacaaacaagtcaaacagcttaaatatgttggcatggtcttaaacgaagcgctgcgcttatggccagtagcgcctatgttttccctatatgcaaaagaagatacggtgcttggaggagaatatcctttaacgaaaggcgacgaagtaatggttctggtgcctcagcttcaccgtgataaaacaatttggggagacgatgtggaggagttccgtccagagcgttttgaaaatccaagtgcgattccgcagcatgcgtttaaaccgtttggaaacggtcagcgtgcgtgtatcggtcagcagttcgctcttcatgaagcaacgctggtacttggtatgatgctaaaacactttgactttgaagatcatacaaactacgagctcgttattaaagaatcgcggacgttaaaacctgaaggctttgtggtaaaagcaaaatcgaaaggcattccgcttggcggtattccttcacctagcactgaacagtctgctaaaaaagtacgcaaaaaggcagaaaacgctcataatacgccgctgcttgtgctatacggttcaaatgcgggaacagctgaaggaacggcgcgtgatttagcagatattgcaatgagcaaaggatttgcaccgcaggtcgcaacgcttgattcacacgccagaaatcttccgcgcgaaggagctgtattaattgtaacggcgtcttataacggtcatccgcctgataacgcaaagcaatttgtcgactggttagaccaagcgtctgctgatgaagtaaaaggcgttcgctactccgtatttggatgcggcgataaaaattgggcggggacgtatcaaaaagtgcctgcttttatcgatgaaacgcttgccgctaaaggggcagaaaacatcgctgaccgcggtgaagcagatgcaagcgacgactttgaaggcacatatgaagaatggcgtgatcatatgtggagtgacgtagcagcctactttaacctcgacattgaaaacagtgaagataataaatctactctttcacttcaatttgtcgacagcgccgcggatatgccgcttgcgaaaatgcacggtgcgttttcaacgaacgtcgtagcaagcaaagaacttcaacagccaggcagtgcacgaagcacgcgacatcttgaaattgaacttccaaaagaagcttcttatcaagaaggagatcatttaggtgttattcctcgcaactatgaaggaatagtaaaccgtgtaacagcaaggttcggcctaagcgcatcacagcaaatccgtctggaagcagaagaagaaaaattagctcatttgccactcgctaaaacagtatccgtagaagagcttctgcaatacgtggagcttcaagatcctgttacgcgcacgcagcttcgcgcaatggctgctaaaacggtctgcccgccgcataaagtagagcttgaagccttgcttgaaaagcaagcctacaaagaacaagtgctggcaaaacgtttaacaatgcttgaactgcttgaaaaatacccggcgtgtgaaatgaaattcagcgaatttatcgcccttctgccaagcatacgcccgcgctattactcgatttcttcatcacctcgtgtcgatgaaaaacaagcaagcatcacggtcagcgttgtctcaggaccggcgtggagcggatatggagaatataaaggaattgcgtcgaactatcttgccgagctgcaagaaggagatacgattacgtgctttatttccacaccgcagtcagaatttacgctgccaaaagaccctcttacgccgcttatcatggtcggaccgggaacaggcgtcgcgccgtttagaggctttgtgcaggcgcgcaaacagctaaaagaacaaggacagtcacttggagaagcacatttatacttcggctgccgttcacctcatgaagactatctgtatcaagaagagcttgaaaacgcccaaagcgaaggcatcattacgcttcataccgctttttctcgcatgccaaatcagccgaaaacatacgttcagcacgtaatggaacaagacggcaagaaattgattgaacttcttgatcaaggagcgcacttctatatttgcggagacggaagccaaatggcacctgccgttgaagcaacgcttatgaaaagctatgctgacgttcaccaagtgagtgaagcagacgctcgcttatggctgcagcagctagaagaaaaaggccgatacgcaaaagacgtgtgggctggg

SEQ ID NO: 496 - protein, 1049 aa, synthetic construct
  REGION 1..1049: note = variant of P450 oxidase from Bacillus megaterium
MTIKEMPQPKTFGELKNLPLLNTDKPVQALMRIADELGEIFKFEAPGSVTRYLSSQRLIKEACDESRFDKNLSQALKFARDFVGDGLSTSWTHEPNWKKAHNILVPSFSQHAMGRYHAMMVDIAVQLVQKWERLNADEHIEVSEDMTRLTLDTIGLCGFNYRFNSFYRDQPHPFIVSVVRALDEVMNKLQRANPDDPAYDENKRQCQEDIKVMNDYVDKIIADRKARGEQSHDLLTQMLNGKDPETGEPLDDGNIRQQIITFLIAGHQTTSGLLSFALYFLVKNPHVLQKVAEEAARVLVDPVPSYKQVKQLKYVGMVLNEALRLWPVAPMFSLYAKEDTVLGGEYPLTKGDEVMVLVPQLHRDKTIWGDDVEEFRPERFENPSAIPQHAFKPFGNGQRACIGQQFALHEATLVLGMMLKHFDFEDHTNYELVIKESRTLKPEGFVVKAKSKGIPLGGIPSPSTEQSAKKVRKKAENAHNTPLLVLYGSNAGTAEGTARDLADIAMSKGFAPQVATLDSHARNLPREGAVLIVTASYNGHPPDNAKQFVDWLDQASADEVKGVRYSVFGCGDKNWAGTYQKVPAFIDETLAAKGAENIADRGEADASDDFEGTYEEWRDHMWSDVAAYFNLDIENSEDNKSTLSLQFVDSAADMPLAKMHGAFSTNVVASKELQQPGSARSTRHLEIELPKEASYQEGDHLGVIPRNYEGIVNRVTARFGLSASQQIRLEAEEEKLAHLPLAKTVSVEELLQYVELQDPVTRTQLRAMAAKTVCPPHKVELEALLEKQAYKEQVLAKRLTMLELLEKYPACEMKFSEFIALLPSIRPRYYSISSSPRVDEKQASITVSVVSGPAWSGYGEYKGIASNYLAELQEGDTITCFISTPQSEFTLPKDPLTPLIMVGPGTGVAPFRGFVQARKQLKEQGQSLGEAHLYFGCRSPHEDYLYQEELENAQSEGIITLHTAFSRMPNQPKTYVQHVMEQDGKKLIELLDQGAHFYICGDGSQMAPAVEATLMKSYADVHQVSEADARLWLQQLEEKGRYAKDVWAG

SEQ ID NO: 497 - DNA, 3147 bp, synthetic construct
  misc_feature 1..3147: note = variant of P450 oxidase from Bacillus megaterium
  source 1..3147: mol_type = other DNA
atgacaattaaggaaatgcctcagcctaagacgtttggagaacttaaaaatttaccgttattaaacacagataaaccggttcaagctttgatgcgtattgcggatgaattaggagaaatctttaaattcgaggcgcctggtagcgtaacgcgctatttatcaagtcagcgtctaattaaagaagcatgcgatgaatcacgctttgataaaaacttaagtcaagcgcttaaatttgcacgtgattttgttggagacgggttatctacaagctggacgcatgaaccgaattggaaaaaagcgcataatatcttagttccaagctttagtcagcatgcaatggggcgttatcatgcgatgatggtcgatatcgccgtgcagcttgttcaaaagtgggagcgtctaaatgcagatgagcatattgaagtatcggaagacatgacacgtttaacgcttgatacaattggtctttgcggctttaactatcgctttaacagcttttaccgagatcagcctcatccatttattgtgagtgtggttcgtgcactggatgaagtaatgaacaagctgcagcgagcaaatccagacgacccagcttatgatgaaaacaagcgccagtgtcaagaagatatcaaggtgatgaacgactatgtagataaaattattgcagatcgcaaagcaaggggtgaacaaagtcatgatttattaacgcagatgctaaacggaaaagatccagaaacgggtgagccgcttgatgacgggaacattcgtcagcaaattattacattcttaattgcgggacaccaaacaacaagtggtcttttatcatttgcgctgtatttcttagtgaaaaatccacatgtattacaaaaagtagcagaagaagcagcacgagttctagtagatcctgttccaagctacaaacaagtcaaacagcttaaatatgttggcatggtcttaaacgaagcgctgcgcttatggccagtagcgcctatgttttccctatatgcaaaagaagatacggtgcttggaggagaatatcctttaacgaaaggcgacgaagtaatggttctggtgcctcagcttcaccgtgataaaacaatttggggagacgatgtggaggagttccgtccagagcgttttgaaaatccaagtgcgattccgcagcatgcgtttaaaccgtttggaaacggtcagcgtgcgtgtatcggtcagcagttcgctcttcatgaagcaacgctggtacttggtatgatgctaaaacactttgactttgaagatcatacaaactacgagctcgttattaaagaatcgcggacgttaaaacctgaaggctttgtggtaaaagcaaaatcgaaaggcattccgcttggcggtattccttcacctagcactgaacagtctgctaaaaaagtacgcaaaaaggcagaaaacgctcataatacgccgctgcttgtgctatacggttcaaatgcgggaacagctgaaggaacggcgcgtgatttagcagatattgcaatgagcaaaggatttgcaccgcaggtcgcaacgcttgattcacacgccagaaatcttccgcgcgaaggagctgtattaattgtaacggcgtcttataacggtcatccgcctgataacgcaaagcaatttgtcgactggttagaccaagcgtctgctgatgaagtaaaaggcgttcgctactccgtatttggatgcggcgataaaaattgggcggggacgtatcaaaaagtgcctgcttttatcgatgaaacgcttgccgctaaaggggcagaaaacatcgctgaccgcggtgaagcagatgcaagcgacgactttgaaggcacatatgaagaatggcgtgatcatatgtggagtgacgtagcagcctactttaacctcgacattgaaaacagtgaagataataaatctactctttcacttcaatttgtcgacagcgccgcggatatgccgcttgcgaaaatgcacggtgcgttttcaacgaacgtcgtagcaagcaaagaacttcaacagccaggcagtgcacgaagcacgcgacatcttgaaattgaacttccaaaagaagcttcttatcaagaaggagatcatttaggtgttattcctcgcaactatgaaggaatagtaaaccgtgtaacagcaaggttcggcctaagcgcatcacagcaaatccgtctggaagcagaagaagaaaaattagctcatttgccactcgctaaaacagtatccgtagaagagcttctgcaatacgtggagcttcaagatcctgttacgcgcacgcagcttcgcgcaatggctgctaaaacggtctgcccgccgcataaagtagagcttgaagccttgcttgaaaagcaagcctacaaagaacaagtgctggcaaaacgtttaacaatgcttgaactgcttgaaaaatacccggcgtgtgaaatgaaattcagcgaatttatcgcccttctgccaagcatacgcccgcgctattactcgatttcttcatcacctcgtgtcgatgaaaaacaagcaagcatcacggtcagcgttgtctcaggaccggcgtggagcggatatggagaatataaaggaattgcgtcgaactatcttgccgagctgcaagaaggagatacgattacgtgctttatttccacaccgcagtcagaatttacgctgccaaaagaccctgaaacgccgcttatcatggtcggaccgggaacaggcgtcgcgccgtttagaggctttgtgcaggcgcgcaaacagctaaaagaacaaggacagtcacttggagaagcacatttatacttcggctgccgttcacctcatgaagactatctgtatcaagaagagcttgaaaacgcccaaagcgaaggcatcattacgcttcataccgctttttctcgcatgccaaatcagccgaaaacatacgttcagcacgtaatggaacaagacggcaagaaattgattctgcttcttgatcaaggagcgcacttctatatttgcggagacggaagccaaatggcacctgccgttgaagcaacgcttatgaaaagctatgctgacgttcaccaagtgagtgaagcagacgctcgcttatggctgcagcagctagaagaaaaaggccgatacgcaaaagacgtgtgggctggg

SEQ ID NO: 498 - protein, 1049 aa, synthetic construct
  REGION 1..1049: note = variant of P450 oxidase from Bacillus megaterium
MTIKEMPQPKTFGELKNLPLLNTDKPVQALMRIADELGEIFKFEAPGSVTRYLSSQRLIKEACDESRFDKNLSQALKFARDFVGDGLSTSWTHEPNWKKAHNILVPSFSQHAMGRYHAMMVDIAVQLVQKWERLNADEHIEVSEDMTRLTLDTIGLCGFNYRFNSFYRDQPHPFIVSVVRALDEVMNKLQRANPDDPAYDENKRQCQEDIKVMNDYVDKIIADRKARGEQSHDLLTQMLNGKDPETGEPLDDGNIRQQIITFLIAGHQTTSGLLSFALYFLVKNPHVLQKVAEEAARVLVDPVPSYKQVKQLKYVGMVLNEALRLWPVAPMFSLYAKEDTVLGGEYPLTKGDEVMVLVPQLHRDKTIWGDDVEEFRPERFENPSAIPQHAFKPFGNGQRACIGQQFALHEATLVLGMMLKHFDFEDHTNYELVIKESRTLKPEGFVVKAKSKGIPLGGIPSPSTEQSAKKVRKKAENAHNTPLLVLYGSNAGTAEGTARDLADIAMSKGFAPQVATLDSHARNLPREGAVLIVTASYNGHPPDNAKQFVDWLDQASADEVKGVRYSVFGCGDKNWAGTYQKVPAFIDETLAAKGAENIADRGEADASDDFEGTYEEWRDHMWSDVAAYFNLDIENSEDNKSTLSLQFVDSAADMPLAKMHGAFSTNVVASKELQQPGSARSTRHLEIELPKEASYQEGDHLGVIPRNYEGIVNRVTARFGLSASQQIRLEAEEEKLAHLPLAKTVSVEELLQYVELQDPVTRTQLRAMAAKTVCPPHKVELEALLEKQAYKEQVLAKRLTMLELLEKYPACEMKFSEFIALLPSIRPRYYSISSSPRVDEKQASITVSVVSGPAWSGYGEYKGIASNYLAELQEGDTITCFISTPQSEFTLPKDPETPLIMVGPGTGVAPFRGFVQARKQLKEQGQSLGEAHLYFGCRSPHEDYLYQEELENAQSEGIITLHTAFSRMPNQPKTYVQHVMEQDGKKLILLLDQGAHFYICGDGSQMAPAVEATLMKSYADVHQVSEADARLWLQQLEEKGRYAKDVWAG

SEQ ID NO: 499 - DNA, 3147 bp, synthetic construct
  misc_feature 1..3147: note = variant of P450 oxidase from Bacillus megaterium
  source 1..3147: mol_type = other DNA
atgacaattaaggaaatgcctcagcctaagacgtttggagaacttaaaaatttaccgttattaaacacagataaaccggttcaagctttgatgcgtattgcggatgaattaggagaaatctttaaattcgaggcgcctggtagcgtaacgcgctatttatcaagtcagcgtctaattaaagaagcatgcgatgaatcacgctttgataaaaacttaagtcaagcgcttaaatttgcacgtgattttgttggagacgggttatctacaagctggacgcatgaaccgaattggaaaaaagcgcataatatcttagttccaagctttagtcagcatgcaatggggcgttatcatgcgatgatggtcgatatcgccgtgcagcttgttcaaaagtgggagcgtctaaatgcagatgagcatattgaagtatcggaagacatgacacgtttaacgcttgatacaattggtctttgcggctttaactatcgctttaacagcttttaccgagatcagcctcatccatttattgtgagtgtggttcgtgcactggatgaagtaatgaacaagctgcagcgagcaaatccagacgacccagcttatgatgaaaacaagcgccagtgtcaagaagatatcaaggtgatgaacgactatgtagataaaattattgcagatcgcaaagcaaggggtgaacaaagtcatgatttattaacgcagatgctaaacggaaaagatccagaaacgggtgagccgcttgatgacgggaacattcgtcagcaaattattacattcttaattgcgggacaccaaacaacaagtggtcttttatcatttgcgctgtatttcttagtgaaaaatccacatgtattacaaaaagtagcagaagaagcagcacgagttctagtagatcctgttccaagctacaaacaagtcaaacagcttaaatatgttggcatggtcttaaacgaagcgctgcgcttatggccagtagcgcctatgttttccctatatgcaaaagaagatacggtgcttggaggagaatatcctttaacgaaaggcgacgaagtaatggttctggtgcctcagcttcaccgtgataaaacaatttggggagacgatgtggaggagttccgtccagagcgttttgaaaatccaagtgcgattccgcagcatgcgtttaaaccgtttggaaacggtcagcgtgcgtgtatcggtcagcagttcgctcttcatgaagcaacgctggtacttggtatgatgctaaaacactttgactttgaagatcatacaaactacgagctcgttattaaagaatcgcggacgttaaaacctgaaggctttgtggtaaaagcaaaatcgaaaggcattccgcttggcggtattccttcacctagcactgaacagtctgctaaaaaagtacgcaaaaaggcagaaaacgctcataatacgccgctgcttgtgctatacggttcaaatgcgggaacagctgaaggaacggcgcgtgatttagcagatattgcaatgagcaaaggatttgcaccgcaggtcgcaacgcttgattcacacgccagaaatcttccgcgcgaaggagctgtattaattgtaacggcgtcttataacggtcatccgcctgataacgcaaagcaatttgtcgactggttagaccaagcgtctgctgatgaagtaaaaggcgttcgctactccgtatttggatgcggcgataaaaattgggcggggacgtatcaaaaagtgcctgcttttatcgatgaaacgcttgccgctaaaggggcagaaaacatcgctgaccgcggtgaagcagatgcaagcgacgactttgaaggcacatatgaagaatggcgtgatcatatgtggagtgacgtagcagcctactttaacctcgacattgaaaacagtgaagataataaatctactctttcacttcaatttgtcgacagcgccgcggatatgccgcttgcgaaaatgcacggtgcgttttcaacgaacgtcgtagcaagcaaagaacttcaacagccaggcagtgcacgaagcacgcgacatcttgaaattgaacttccaaaagaagcttcttatcaagaaggagatcatttaggtgttattcctcgcaactatgaaggaatagtaaaccgtgtaacagcaaggttcggcctaagcgcatcacagcaaatccgtctggaagcagaagaagaaaaattagctcatttgccactcgctaaaacagtatccgtagaagagcttctgcaatacgtggagcttcaagatcctgttacgcgcacgcagcttcgcgcaatggctgctaaaacggtctgcaagccgcataaagtagagcttgaagccttgcttgaaaagcaagcctacaaagaacaagtgctggcaaaacgtttaacaatgcttgaactgcttgaaaaatacccggcgtgtgaaatgaaattcagcgaatttatcgcccttctgccaagcatacgcccgcgctattactcgatttcttcatcacctcgtgtcgatgaaaaacaagcaagcatcacggtcagcgttgtctcaggaccggcgtggagcggatatggagaatataaaggaattgcgtcgaactatcttgccgagctgcaagaaggagatacgattacgtgctttatttccacaccgcagtcagaatttacgctgccaaaagaccctgaaacgccgcttatcatggtcggaccgggaacaggcgtcgcgccgtttagaggctttgtgcaggcgcgcaaacagctaaaagaacaaggacagtcacttggagaagcacatttatacttcggctgccgttcacctcatgaagactatctgtatcaagaagagcttgaaaacgcccaaagcgaaggcatcattacgcttcataccgctttttctcgcatgccaaatcagccgaaaacatacgttcagcacgtaatggaacaagacggcaagaaattgattgaacttcttgatcaaggagcgcacttctatatttgcggagacggaagccaaatggcacctgccgttgaagcaacgcttatgaaaagctatgctgacgttcaccaagtgagtgaagcagacgctcgcttatggctgcagcagctagaagaaaaaggccgatacgcaaaagacgtgtgggctggg

SEQ ID NO: 500 - protein, 1049 aa, synthetic construct
  REGION 1..1049: note = variant of P450 oxidase from Bacillus megaterium
MTIKEMPQPKTFGELKNLPLLNTDKPVQALMRIADELGEIFKFEAPGSVTRYLSSQRLIKEACDESRFDKNLSQALKFARDFVGDGLSTSWTHEPNWKKAHNILVPSFSQHAMGRYHAMMVDIAVQLVQKWERLNADEHIEVSEDMTRLTLDTIGLCGFNYRFNSFYRDQPHPFIVSVVRALDEVMNKLQRANPDDPAYDENKRQCQEDIKVMNDYVDKIIADRKARGEQSHDLLTQMLNGKDPETGEPLDDGNIRQQIITFLIAGHQTTSGLLSFALYFLVKNPHVLQKVAEEAARVLVDPVPSYKQVKQLKYVGMVLNEALRLWPVAPMFSLYAKEDTVLGGEYPLTKGDEVMVLVPQLHRDKTIWGDDVEEFRPERFENPSAIPQHAFKPFGNGQRACIGQQFALHEATLVLGMMLKHFDFEDHTNYELVIKESRTLKPEGFVVKAKSKGIPLGGIPSPSTEQSAKKVRKKAENAHNTPLLVLYGSNAGTAEGTARDLADIAMSKGFAPQVATLDSHARNLPREGAVLIVTASYNGHPPDNAKQFVDWLDQASADEVKGVRYSVFGCGDKNWAGTYQKVPAFIDETLAAKGAENIADRGEADASDDFEGTYEEWRDHMWSDVAAYFNLDIENSEDNKSTLSLQFVDSAADMPLAKMHGAFSTNVVASKELQQPGSARSTRHLEIELPKEASYQEGDHLGVIPRNYEGIVNRVTARFGLSASQQIRLEAEEEKLAHLPLAKTVSVEELLQYVELQDPVTRTQLRAMAAKTVCKPHKVELEALLEKQAYKEQVLAKRLTMLELLEKYPACEMKFSEFIALLPSIRPRYYSISSSPRVDEKQASITVSVVSGPAWSGYGEYKGIASNYLAELQEGDTITCFISTPQSEFTLPKDPETPLIMVGPGTGVAPFRGFVQARKQLKEQGQSLGEAHLYFGCRSPHEDYLYQEELENAQSEGIITLHTAFSRMPNQPKTYVQHVMEQDGKKLIELLDQGAHFYICGDGSQMAPAVEATLMKSYADVHQVSEADARLWLQQLEEKGRYAKDVWAG

SEQ ID NO: 501 - DNA, 3147 bp, synthetic construct
  misc_feature 1..3147: note = variant of P450 oxidase from Bacillus megaterium
  source 1..3147: mol_type = other DNA
atgacaattaaggaaatgcctcagcctaagacgtttggagaacttaaaaatttaccgttattaaacacagataaaccggttcaagctttgatgcgtattgcggatgaattaggagaaatctttaaattcgaggcgcctggtagcgtaacgcgctatttatcaagtcagcgtctaattaaagaagcatgcgatgaatcacgctttgataaaaacttaagtcaagcgcttaaatttgcacgtgattttgttggagacgggttatctacaagctggacgcatgaaccgaattggaaaaaagcgcataatatcttagttccaagctttagtcagcatgcaatggggcgttatcatgcgatgatggtcgatatcgccgtgcagcttgttcaaaagtgggagcgtctaaatgcagatgagcatattgaagtatcggaagacatgacacgtttaacgcttgatacaattggtctttgcggctttaactatcgctttaacagcttttaccgagatcagcctcatccatttattgtgagtgtggttcgtgcactggatgaagtaatgaacaagctgcagcgagcaaatccagacgacccagcttatgatgaaaacaagcgccagtgtcaagaagatatcaaggtgatgaacgactatgtagataaaattattgcagatcgcaaagcaaggggtgaacaaagtcatgatttattaacgcagatgctaaacggaaaagatccagaaacgggtgagccgcttgatgacgggaacattcgtcagcaaattattacattcttaattgcgggacaccaaacaacaagtggtcttttatcatttgcgctgtatttcttagtgaaaaatccacatgtattacaaaaagtagcagaagaagcagcacgagttctagtagatcctgttccaagctacaaacaagtcaaacagcttaaatatgttggcatggtcttaaacgaagcgctgcgcttatggccagtagcgcctatgttttccctatatgcaaaagaagatacggtgcttggaggagaatatcctttaacgaaaggcgacgaagtaatggttctggtgcctcagcttcaccgtgataaaacaatttggggagacgatgtggaggagttccgtccagagcgttttgaaaatccaagtgcgattccgcagcatgcgtttaaaccgtttggaaacggtcagcgtgcgtgtatcggtcagcagttcgctcttcatgaagcaacgctggtacttggtatgatgctaaaacactttgactttgaagatcatacaaactacgagctcgttattaaagaatcgcggacgttaaaacctgaaggctttgtggtaaaagcaaaatcgaaaggcattccgcttggcggtattccttcacctagcactgaacagtctgctaaaaaagtacgcaaaaaggcagaaaacgctcataatacgccgctgcttgtgctatacggttcaaatgcgggaacagctgaaggaacggcgcgtgatttagcagatattgcaatgagcaaaggatttgcaccgcaggtcgcaacgcttgattcacacgccagaaatcttccgcgcgaaggagctgtattaattgtaacggcgtcttataacggtcatccgcctgataacgcaaagcaatttgtcgactggttagaccaagcgtctgctgatgaagtaaaaggcgttcgctactccgtatttggatgcggcgataaaaattgggcggggacgtatcaaaaagtgcctgcttttatcgatgaaacgcttgccgctaaaggggcagaaaacatcgctgaccgcggtgaagcagatgcaagcgacgactttgaaggcacatatgaagaatggcgtgatcatatgtggagtgacgtagcagcctactttaacctcgacattgaaaacagtgaagataataaatctactctttcacttcaatttgtcgacagcgccgcggatatgccgcttgcgaaaatgcacggtgcgttttcaacgaacgtcgtagcaagcaaagaacttcaacagccaggcagtgcacgaagcacgcgacatcttgaaattgaacttccaaaagaagcttcttatcaagaaggagatcatttaggtgttattcctcgcaactatgaaggaatagtaaaccgtgtaacagcaaggttcggcctaagcgcatcacagcaaatccgtctggaagcagaagaagaaaaattagctcatttgccactcgctaaaacagtatccgtagaagagcttctgcaatacgtggagcttcaagatcctgttacgcgcacgcagcttcgcgcaatggctgctaaaacggtctgcccgccgcataaagtagagcttgaagccttgcttgaaaagcaagcctacaaagaacaagtgctggcaaaacgtttaacaatgcttgaactgcttgaaaaatacccggcgtgtgaaatgaaattcagcgaatttatcgcccttctgccaagcatacgcccgcgctattactcgatttcttcatcacctcgtgtcgatgaaaaacaagcaagcatcacggtcagcgttgtctcaggaccggcgtggagcggatatggagaatataaaggaattgcgtcgaactatcttgccgagctgcaagaaggagatacgattacgtgctttatttccacaccgcagtcagaatttacgctgccaaaagaccctgaaacgccgcttatcatggtcggaccgggaacaggcgtcgcgccgtttagaggctttgtgcaggcgcgcaaacagctaaaagaagcgggacagtcacttggagaagcacatttatacttcggctgccgttcacctcatgaagactatctgtatcaagaagagcttgaaaacgcccaaagcgaaggcatcattacgcttcataccgctttttctcgcatgccaaatcagccgaaaacatacgttcagcacgtaatggaacaagacggcaagaaattgattgaacttcttgatcaaggagcgcacttctatatttgcggagacggaagccaaatggcacctgccgttgaagcaacgcttatgaaaagctatgctgacgttcaccaagtgagtgaagcagacgctcgcttatggctgcagcagctagaagaaaaaggccgatacgcaaaagacgtgtgggctggg

SEQ ID NO: 502 - protein, 1049 aa, synthetic construct
  REGION 1..1049: note = variant of P450 oxidase from Bacillus megaterium
MTIKEMPQPKTFGELKNLPLLNTDKPVQALMRIADELGEIFKFEAPGSVTRYLSSQRLIKEACDESRFDKNLSQALKFARDFVGDGLSTSWTHEPNWKKAHNILVPSFSQHAMGRYHAMMVDIAVQLVQKWERLNADEHIEVSEDMTRLTLDTIGLCGFNYRFNSFYRDQPHPFIVSVVRALDEVMNKLQRANPDDPAYDENKRQCQEDIKVMNDYVDKIIADRKARGEQSHDLLTQMLNGKDPETGEPLDDGNIRQQIITFLIAGHQTTSGLLSFALYFLVKNPHVLQKVAEEAARVLVDPVPSYKQVKQLKYVGMVLNEALRLWPVAPMFSLYAKEDTVLGGEYPLTKGDEVMVLVPQLHRDKTIWGDDVEEFRPERFENPSAIPQHAFKPFGNGQRACIGQQFALHEATLVLGMMLKHFDFEDHTNYELVIKESRTLKPEGFVVKAKSKGIPLGGIPSPSTEQSAKKVRKKAENAHNTPLLVLYGSNAGTAEGTARDLADIAMSKGFAPQVATLDSHARNLPREGAVLIVTASYNGHPPDNAKQFVDWLDQASADEVKGVRYSVFGCGDKNWAGTYQKVPAFIDETLAAKGAENIADRGEADASDDFEGTYEEWRDHMWSDVAAYFNLDIENSEDNKSTLSLQFVDSAADMPLAKMHGAFSTNVVASKELQQPGSARSTRHLEIELPKEASYQEGDHLGVIPRNYEGIVNRVTARFGLSASQQIRLEAEEEKLAHLPLAKTVSVEELLQYVELQDPVTRTQLRAMAAKTVCPPHKVELEALLEKQAYKEQVLAKRLTMLELLEKYPACEMKFSEFIALLPSIRPRYYSISSSPRVDEKQASITVSVVSGPAWSGYGEYKGIASNYLAELQEGDTITCFISTPQSEFTLPKDPETPLIMVGPGTGVAPFRGFVQARKQLKEAGQSLGEAHLYFGCRSPHEDYLYQEELENAQSEGIITLHTAFSRMPNQPKTYVQHVMEQDGKKLIELLDQGAHFYICGDGSQMAPAVEATLMKSYADVHQVSEADARLWLQQLEEKGRYAKDVWAG

SEQ ID NO: 503 - DNA, 3147 bp, synthetic construct
  misc_feature 1..3147: note = variant of P450 oxidase from Bacillus megaterium
  source 1..3147: mol_type = other DNA
atgacaattaaggaaatgcctcagcctaagacgtttggagaacttaaaaatttaccgttattaaacacagataaaccggttcaagctttgatgcgtattgcggatgaattaggagaaatctttaaattcgaggcgcctggtagcgtaacgcgctatttatcaagtcagcgtctaattaaagaagcatgcgatgaatcacgctttgataaaaacttaagtcaagcgcttaaatttgcacgtgattttgttggagacgggctgtctacaagctggacgcatgaaccgaattggaaaaaagcgcataatatcttagttccaagctttagtcagcatgcaatggggcgttatcatgcgatgatggtcgatatcgccgtgcagcttgttcaaaagtgggagcgtctaaatgcagatgagcatattgaagtatcggaagacatgacacgtttaacgcttgatacaattggtctttgcgggtttaactatcgctttaacagcttttaccgagatacgcctcatccatttattgtgagtgtggttcgtgcactggatgaagtaatgaacaagctgcagcgagcaaatccagacgacccagcttatgatgaaaacaagcgccagtgtcaagaagatatcaaggtgatgaacgactatgtagataaaattattgcagatcgcaaagcaaggggtgaacaaagtcatgatttattaacgcagatgctaaacggaaaagatccagaaacgggtgagccgcttgatgacgggaacattcgtcagcaaattattacattcttaattgcgggacaccaaacgacaagtggtcttttatcatttgcgctgtatttcttagtgaaaaatccacatgtattacaaaaagtagcagaagaagcagcacgagttctagtagatcctgttccaagctacaaacaagtcaaacagcttaaatatgttggcatggtcttaaacgaagcgctgcgcttatggccagtagcgcctatgttttccctatatgcaaaagaagatacggtgcttggaggagaatatcctttaacgaaaggcgacgaagtaatggttctggtgcctcagcttcaccgtgataaaacaatttggggagacgatgtggaggagttccgtccagagcgttttgaaaatccaagtgcgattccgcagcatgcgtttaaaccgtttggaaacggtcagcgtgcgtgtatcggtcagcagttcgctcttcatagtgcaacgctggtacttggtatgatgctaaaacactttgactttgaagatcatacaaactacgagctcgttattaaagaatcgcggacgttaaaacctgaaggctttgtggtaaaagcaaaatcgaaaggcattccgcttggcggtattccttcacctagcactgaacagtctgctaaaaaagtacgcaaaaaggcagaaaacgctcataatacgccgctgcttgtgctatacggttcaaatgcgggaacagctgaaggaacggcgcgtgatttagcagatattgcaatgagcaaaggatttgcaccgcaggtcgcaacgcttgattcacacgccggtaatcttccgcgcgaaggagctgtattaattgtaacggcgtcttataacggtcatccgcctgataacgcaaagcaatttgtcgactggttagaccaagcgtctgaggatgaagtaaaaggcgttcgctactccgtatttggatgcggcgataaaaattgggcggggacgtatcaaaaagtgcctgcttttatcgatgaaacgcttgccgctaaaggggcagaaaacatcgctgaccgcggtgaagcagatgcaagcgacgactttgaaggcacatatgaagaatggcgtgatcatatgtggagtgacgtagcagcctactttaatctcgacattgaaaacagtgaagataataaatctactctttcacttcaatttgtcgacagcgccgcggatatgccgcttgcgaaaatgcacggtgcgttttcaacgaacgtcgtagcaagcaaagaacttcaacagccaggcagtgcacgaagcacgcgacatcttgaaattgaacttccaaaagaagcttcttatcaagaaggagatcatttaggtgttattcctcgcaactatgaaggaatagtaaaccgtgtaacagcaaggttcggcctaagcgcatcacagcaaatccgtctggaagcagaagaagaaaaattagctcatttgccactcgctaaaacagtatccgtagaagagcttctgcaatacgtggagcttcaagatcctgttacgcgcacgcagcttcgcgcaatggctgctaaaacggtctgcccgccgcataaagtagagcttgaagccttgcttgtgcgccaggcctacaaagaacaagtgctggcaaaacgtttaacaatgcttgaactgcttgaaaaatacccggcgtgtgaaatgagtttcagcgaatttatcgcccttctgccaagcatacgcccgcgctattactcgatttcttcatcacctcgtgtcgatgaaaaacaagcaagcatcacggtcagcgttgtctcaggaccggcgtggagcggatatggagaatataaaggaattgcgtcgaactatcttgccgagctgcaagaaggagatacgattacgtgctttatttccacaccgcagtcagaatttacgctgccaaaagaccctgaaacgccgcttatcatggtcggaccgggaacaggcgtcgcgccgtttagaggctttgtgcaggcgcgcaaacagctaaaagaaggtggacagtcacttggagaagcacatttatacttcggctgccgttcacctcatgaagactatctgtatcaagaagagcttgaaaacgcccaaagcgaaggcatcattacgcttcataccgctttttctcgcatgccaaatcagccgaaaacatacgttcagcacgtaatggaacaagacggcaagaaattgattgggcttcttgatcaaggagcgcacttctatatttgcggagacggaagccaaatggcacctgccgttgaagcaacgcttatgaaaagctatgctgacgttcaccaagtgagtgaagcagacgctcgcttatggctgcagcagctagaagaaaaaggccgatacgcaaaagacgtgtggctgggg

SEQ ID NO: 504 - protein, 1049 aa, synthetic construct
  REGION 1..1049: note = variant of P450 oxidase from Bacillus megaterium
MTIKEMPQPKTFGELKNLPLLNTDKPVQALMRIADELGEIFKFEAPGSVTRYLSSQRLIKEACDESRFDKNLSQALKFARDFVGDGLSTSWTHEPNWKKAHNILVPSFSQHAMGRYHAMMVDIAVQLVQKWERLNADEHIEVSEDMTRLTLDTIGLCGFNYRFNSFYRDTPHPFIVSVVRALDEVMNKLQRANPDDPAYDENKRQCQEDIKVMNDYVDKIIADRKARGEQSHDLLTQMLNGKDPETGEPLDDGNIRQQIITFLIAGHQTTSGLLSFALYFLVKNPHVLQKVAEEAARVLVDPVPSYKQVKQLKYVGMVLNEALRLWPVAPMFSLYAKEDTVLGGEYPLTKGDEVMVLVPQLHRDKTIWGDDVEEFRPERFENPSAIPQHAFKPFGNGQRACIGQQFALHSATLVLGMMLKHFDFEDHTNYELVIKESRTLKPEGFVVKAKSKGIPLGGIPSPSTEQSAKKVRKKAENAHNTPLLVLYGSNAGTAEGTARDLADIAMSKGFAPQVATLDSHAGNLPREGAVLIVTASYNGHPPDNAKQFVDWLDQASEDEVKGVRYSVFGCGDKNWAGTYQKVPAFIDETLAAKGAENIADRGEADASDDFEGTYEEWRDHMWSDVAAYFNLDIENSEDNKSTLSLQFVDSAADMPLAKMHGAFSTNVVASKELQQPGSARSTRHLEIELPKEASYQEGDHLGVIPRNYEGIVNRVTARFGLSASQQIRLEAEEEKLAHLPLAKTVSVEELLQYVELQDPVTRTQLRAMAAKTVCPPHKVELEALLVRQAYKEQVLAKRLTMLELLEKYPACEMSFSEFIALLPSIRPRYYSISSSPRVDEKQASITVSVVSGPAWSGYGEYKGIASNYLAELQEGDTITCFISTPQSEFTLPKDPETPLIMVGPGTGVAPFRGFVQARKQLKEGGQSLGEAHLYFGCRSPHEDYLYQEELENAQSEGIITLHTAFSRMPNQPKTYVQHVMEQDGKKLIGLLDQGAHFYICGDGSQMAPAVEATLMKSYADVHQVSEADARLWLQQLEEKGRYAKDVWLG

SEQ ID NO: 505 - DNA, 3147 bp, synthetic construct
  misc_feature 1..3147: note = variant of P450 oxidase from Bacillus megaterium
  source 1..3147: mol_type = other DNA
atgacaattaaggaaatgcctcagcctaagacgtttggagaacttaaaaatttaccgttattaaacacagataaaccggttcaagctttgatgcgtattgcggatgaattaggagaaatctttaaattcgaggcgcctggtagcgtaacgcgctatttatcaagtcagcgtctaattaaagaagcatgcgatgaatcacgctttgataaaaacttaagtcaagcgcttaaatttgcacgtgattttgttggagacgggctgtctacaagctggacgcatgaaccgaattggaaaaaagcgcataatatcttagttccaagctttagtcagcatgcaatggggcgttatcatgcgatgatggtcgatatcgccgtgcagcttgttcaaaagtgggagcgtctaaatgcagatgagcatattgaagtatcggaagacatgacacgtttaacgcttgatacaattggtctttgcctgtttaactatcgctttaacagcttttaccgagatacgcctcatccatttattgtgagtgtggttcgtgcactggatgaagtaatgaacaagctgcagcgagcaaatccagacgacccagcttatgatgaaaacaagcgccagtgtcaagaagatatcaaggtgatgaacgactatgtagataaaattattgcagatcgcaaagcaaggggtgaacaaagtcatgatttattaacgcagatgctaaacggaaaagatccagaaacgggtgagccgcttgatgacgggaacattcgtcagcaaattattacattcttaattgcgggacaccaaacgacaagtggtcttttatcatttgcgctgtatttcttagtgaaaaatccacatgtattacaaaaagtagcagaagaagcagcacgagttctagtagatcctgttccaagctacaaacaagtcaaacagcttaaatatgttggcatggtcttaaacgaagcgctgcgcttatggccagtagcgcctatgttttccctatatgcaaaagaagatacggtgcttggaggagaatatcctttaacgaaaggcgacgaagtaatggttctggtgcctcagcttcaccgtgataaaacaatttggggagacgatgtggaggagttccgtccagagcgttttgaaaatccaagtgcgattccgcagcatgcgtttaaaccgtttggaaacggtcagcgtgcgtgtatcggtcagcagttcgctcttcatgaagcaacgctggtacttggtatgatgctaaaacactttgactttgaagatcatacaaactacgagctcgttattaaagaatcgcggacgttaaaacctgaaggctttgtggtaaaagcaaaatcgaaaggcattccgcttggcggtattccttcacctagcactgaacagtctgctaaaaaagtacgcaaaaaggcagaaaacgctcataatacgccgctgcttgtgctatacggttcaaatgcgggaacagctgaaggaacggcgcgtgatttagcagatattgcaatgagcaaaggatttgcaccgcaggtcgcaacgcttgattcacacgccggtaatcttccgcgcgaaggagctgtattaattgtaacggcgtcttataacggtcatccgcctgataacgcaaagcaatttgtcgactggttagaccaagcgtctgctgatgaagtaaaaggcgttcgctactccgtatttggatgcggcgataaaaattgggcggggacgtatcaaaaagtgcctgcttttatcgatgaaacgcttgccgctaaaggggcagaaaacatcgctgaccgcggtgaagcagatgcaagcgacgactttgaaggcacatatgaagaatggcgtgatcatatgtggagtgacgtagcagcctactttaatctcgacattgaaaacagtgaagataataaatctactctttcacttcaatttgtcgacagcgccgcggatatgccgcttgcgaaaatgcacggtgcgttttcaacgaacgtcgtagcaagcaaagaacttcaacagccaggcagtgcacgaagcacgcgacatcttgaaattgaacttccaaaagaagcttcttatcaagaaggagatcatttaggtgttattcctcgcaactatgaaggaatagtaaaccgtgtaacagcaaggttcggcctaagcgcatcacagcaaatccgtctggaagcagaagaagaaaaattagctcatttgccactcgctaaaacagtatccgtagaagagcttctgcaatacgtggagcttcaagatcctgttacgcgcacgcagcttcgcgcaatggctgctaaaacggtctgcccgccgcataaagtagagcttgaagccttgcttgaaaagcaagcctacaaagaacaagtgctggcaaaacgtttaacaatgcttgaactgcttgaaaaatacccggcgtgtgaaatgaaattcagcgaatttatcgcccttctgccaagcatacgcccgcgctattactcgatttcttcatcacctcgtgtcgatgaaaaacaagcaagcatcacggtcagcgttgtctcaggaccggcgtggagcggatatggagaatataaaggaattgcgtcgaactatcttgccgagctgcaagaaggagatacgattacgtgctttatttccacaccgcagtcagaatttacgctgccaaaagaccctgaaacgccgcttatcatggtcggaccgggaacaggcgtcgcgccgtttagaggctttgtgcaggcgcgcaaacagctaaaagaacaaggacagtcacttggagaagcacatttatacttcggctgccgttcacctcatgaagactatctgtatcaagaagagcttgaaaacgcccaaagcgaaggcatcattacgcttcataccgctttttctcgcatgccaaatcagccgaaaacatacgttcagcacgtaatggaacaagacggcaagaaattgattgagcttcttgatcaaggagcgcacttctatatttgcggagacggaagccaaatggcacctgccgttgaagcaacgcttatgaaaagctatgctgacgttcaccaagtgagtgaagcagacgctcgcttatggctgcagcagctagaagaaaaaggccgatacgcaaaagacgtgtggctgggg

SEQ ID NO: 506 - protein, 1049 aa, synthetic construct
  REGION 1..1049: note = variant of P450 oxidase from Bacillus megaterium
MTIKEMPQPKTFGELKNLPLLNTDKPVQALMRIADELGEIFKFEAPGSVTRYLSSQRLIKEACDESRFDKNLSQALKFARDFVGDGLSTSWTHEPNWKKAHNILVPSFSQHAMGRYHAMMVDIAVQLVQKWERLNADEHIEVSEDMTRLTLDTIGLCLFNYRFNSFYRDTPHPFIVSVVRALDEVMNKLQRANPDDPAYDENKRQCQEDIKVMNDYVDKIIADRKARGEQSHDLLTQMLNGKDPETGEPLDDGNIRQQIITFLIAGHQTTSGLLSFALYFLVKNPHVLQKVAEEAARVLVDPVPSYKQVKQLKYVGMVLNEALRLWPVAPMFSLYAKEDTVLGGEYPLTKGDEVMVLVPQLHRDKTIWGDDVEEFRPERFENPSAIPQHAFKPFGNGQRACIGQQFALHEATLVLGMMLKHFDFEDHTNYELVIKESRTLKPEGFVVKAKSKGIPLGGIPSPSTEQSAKKVRKKAENAHNTPLLVLYGSNAGTAEGTARDLADIAMSKGFAPQVATLDSHAGNLPREGAVLIVTASYNGHPPDNAKQFVDWLDQASADEVKGVRYSVFGCGDKNWAGTYQKVPAFIDETLAAKGAENIADRGEADASDDFEGTYEEWRDHMWSDVAAYFNLDIENSEDNKSTLSLQFVDSAADMPLAKMHGAFSTNVVASKELQQPGSARSTRHLEIELPKEASYQEGDHLGVIPRNYEGIVNRVTARFGLSASQQIRLEAEEEKLAHLPLAKTVSVEELLQYVELQDPVTRTQLRAMAAKTVCPPHKVELEALLEKQAYKEQVLAKRLTMLELLEKYPACEMKFSEFIALLPSIRPRYYSISSSPRVDEKQASITVSVVSGPAWSGYGEYKGIASNYLAELQEGDTITCFISTPQSEFTLPKDPETPLIMVGPGTGVAPFRGFVQARKQLKEQGQSLGEAHLYFGCRSPHEDYLYQEELENAQSEGIITLHTAFSRMPNQPKTYVQHVMEQDGKKLIELLDQGAHFYICGDGSQMAPAVEATLMKSYADVHQVSEADARLWLQQLEEKGRYAKDVWLG

SEQ ID NO: 507 - DNA, 3147 bp, synthetic construct
  misc_feature 1..3147: note = variant of P450 oxidase from Bacillus megaterium
  source 1..3147: mol_type = other DNA
atgacaattaaggaaatgcctcagcctaagacgtttggagaacttaaaaatttaccgttattaaacacagataaaccggttcaagctttgatgcgtattgcggatgaattaggagaaatctttaaattcgaggcgcctggtagcgtaacgcgctatttatcaagtcagcgtctaattaaagaagcatgcgatgaatcacgctttgataaaaacttaagtcaagcgcttaaatttgcacgtgattttgttggagacgggctgtctacaagctggacgcatgaaccgaattggaaaaaagcgcataatatcttagttccaagctttagtcagcatgcaatggggcgttatcatgcgatgatggtcgatatcgccgtgcagcttgttcaaaagtgggagcgtctaaatgcagatgagcatattgaagtatcggaagacatgacacgtttaacgcttgatacaattggtctttgcctgtttaactatcgctttaacagcttttaccgagatcagcctcatccatttattgtgagtgtggttcgtgcactggatgaagtaatgaacaagctgcagcgagcaaatccagacgacccagcttatgatgaaaacaagcgccagtgtcaagaagatatcaaggtgatgaacgactatgtagataaaattattgcagatcgcaaagcaaggggtgaacaaagtcatgatttattaacgcagatgctaaacggaaaagatccagaaacgggtgagccgcttgatgacgggaacattcgtcagcaaattattacattcttaattgcgggacaccaaacgacaagtggtcttttatcatttgcgctgtatttcttagtgaaaaatccacatgtattacaaaaagtagcagaagaagcagcacgagttctagtagatcctgttccaagctacaaacaagtcaaacagcttaaatatgttggcatggtcttaaacgaagcgctgcgcttatggccagtagcgcctatgttttccctatatgcaaaagaagatacggtgcttggaggagaatatcctttaacgaaaggcgacgaagtaatggttctggtgcctcagcttcaccgtgataaaacaatttggggagacgatgtggaggagttccgtccagagcgttttgaaaatccaagtgcgattccgcagcatgcgtttaaaccgtttggaaacggtcagcgtgcgtgtatcggtcagcagttcgctcttcatagtgcaacgctggtacttggtatgatgctaaaacactttgactttgaagatcatacaaactacgagctcgttattaaagaatcgcggacgttaaaacctgaaggctttgtggtaaaagcaaaatcgaaaggcattccgcttggcggtattccttcatggagcactgaacagtctgctaaaaaagtacgcaaaaaggcagaaaacgctcataatacgccgctgcttgtgctatacggttcaaatgcgggaacagctgaaggaacggcgcgtgatttagcagatattgcaatgagcaaaggatttgcaccgcaggtcgcaacgcttgattcacacgccggtaatcttccgcgcgaaggagctgtattaattgtaacggcgtcttataacggtcatccgcctgataacgcaaagcaatttgtcgactggttagaccaagcgtctgaggatgaagtaaaaggcgttcgctactccgtatttggatgcggcgataaaaattgggcggggacgtatcaaaaagtgcctgcttttatcgatgaaacgcttgccgctaaaggggcagaaaacatcgctgaccgcggtgaagcagatgcaagcgacgactttgaaggcacatatgaagaatggcgtgatcatatgtggagtgacgtagcagcctactttaatctcgacattgaaaacagtgaagataataaatctactctttcacttcaatttgtcgacagcgccgcggatatgccgcttgcgaaaatgcacggtgcgttttcaacgaacgtcgtagcaagcaaagaacttcaacagccaggcagtgcacgaagcacgcgacatcttgaaattgaacttccaaaagaagcttcttatcaagaaggagatcatttaggtgttattcctcgcaactatgaaggaatagtaaaccgtgtaacagcaaggttcggcctaagcgcatcacagcaaatccgtctggaagcagaagaagaaaaattagctcatttgccactcgctaaaacagtatccgtagaagagcttctgcaatacgtggagcttcaagatcctgttacgcgcacgcagcttcgcgcaatggctgctaaaacggtctgcccgccgcataaagtagagcttgaagccttgcttgaaaagcaagcctacaaagaacaagtgctggcaaaacgtttaacaatgcttgaactgcttgaaaaatacccggcgtgtgaaatgaaattcagcgaatttatcgcccttctgccaagcatacgcccgcgctattactcgatttcttcatcacctcgtgtcgatgaaaaacaagcaagcatcacggtcagcgttgtctcaggaccggcgtggagcggatatggagaatataaaggaattgcgtcgaactatcttgccgagctgcaagaaggagatacgattacgtgctttatttccacaccgcagtcagaatttacgctgccaaaagaccctgaaacgccgcttatcatggtcggaccgggaacaggcgtcgcgccgtttagaggctttgtgcaggcgcgcaaacagctaaaagaacaaggacagtcacttggagaagcacatttatacttcggctgccgttcacctcatgaagactatctgtatcaagaagagcttgaaaacgcccaaagcgaaggcatcattacgcttcataccgctttttctcgcatggggaatcagccgaaaacatacgttcagcacgtaatggaacaagacggcaagaaattgattgaacttcttgatcaaggagcgcacttctatatttgcggagacggaagccaaatggcacctgccgttgaagcaacgcttatgaaaagctatgctgacgttcaccaagtgagtgaagcagacgctcgcttatggctgcagcagctagaagaaaaaggccgatacgcaaaagacgtgtggctgggg

SEQ ID NO: 508 - protein, 1049 aa, synthetic construct
  REGION 1..1049: note = variant of P450 oxidase from Bacillus megaterium
MTIKEMPQPKTFGELKNLPLLNTDKPVQALMRIADELGEIFKFEAPGSVTRYLSSQRLIKEACDESRFDKNLSQALKFARDFVGDGLSTSWTHEPNWKKAHNILVPSFSQHAMGRYHAMMVDIAVQLVQKWERLNADEHIEVSEDMTRLTLDTIGLCLFNYRFNSFYRDQPHPFIVSVVRALDEVMNKLQRANPDDPAYDENKRQCQEDIKVMNDYVDKIIADRKARGEQSHDLLTQMLNGKDPETGEPLDDGNIRQQIITFLIAGHQTTSGLLSFALYFLVKNPHVLQKVAEEAARVLVDPVPSYKQVKQLKYVGMVLNEALRLWPVAPMFSLYAKEDTVLGGEYPLTKGDEVMVLVPQLHRDKTIWGDDVEEFRPERFENPSAIPQHAFKPFGNGQRACIGQQFALHSATLVLGMMLKHFDFEDHTNYELVIKESRTLKPEGFVVKAKSKGIPLGGIPSWSTEQSAKKVRKKAENAHNTPLLVLYGSNAGTAEGTARDLADIAMSKGFAPQVATLDSHAGNLPREGAVLIVTASYNGHPPDNAKQFVDWLDQASEDEVKGVRYSVFGCGDKNWAGTYQKVPAFIDETLAAKGAENIADRGEADASDDFEGTYEEWRDHMWSDVAAYFNLDIENSEDNKSTLSLQFVDSAADMPLAKMHGAFSTNVVASKELQQPGSARSTRHLEIELPKEASYQEGDHLGVIPRNYEGIVNRVTARFGLSASQQIRLEAEEEKLAHLPLAKTVSVEELLQYVELQDPVTRTQLRAMAAKTVCPPHKVELEALLEKQAYKEQVLAKRLTMLELLEKYPACEMKFSEFIALLPSIRPRYYSISSSPRVDEKQASITVSVVSGPAWSGYGEYKGIASNYLAELQEGDTITCFISTPQSEFTLPKDPETPLIMVGPGTGVAPFRGFVQARKQLKEQGQSLGEAHLYFGCRSPHEDYLYQEELENAQSEGIITLHTAFSRMGNQPKTYVQHVMEQDGKKLIELLDQGAHFYICGDGSQMAPAVEATLMKSYADVHQVSEADARLWLQQLEEKGRYAKDVWLG

SEQ ID NO: 509 - DNA, 3147 bp, synthetic construct
  misc_feature 1..3147: note = variant of P450 oxidase from Bacillus megaterium
  source 1..3147: mol_type = other DNA
atgacaattaaggaaatgcctcagcctaagacgtttggagaacttaaaaatttaccgttattaaacacagataaaccggttcaagctttgatgcgtattgcggatgaattaggagaaatctttaaattcgaggcgcctggtagcgtaacgcgctatttatcaagtcagcgtctaattaaagaagcatgcgatgaatcacgctttgataaaaacttaagtcaagcgcttaaatttgcacgtgattttgttggagacgggctgtctacaagctggacgcatgaaccgaattggaaaaaagcgcataatatcttagttccaagctttagtcagcatgcaatggggcgttatcatgcgatgatggtcgatatcgccgtgcagcttgttcaaaagtgggagcgtctaaatgcagatgagcatattgaagtatcggaagacatgacacgtttaacgcttgatacaattggtctttgcctgtttaactatcgctttaacagcttttaccgagatacgcctcatccatttattgtgagtgtggttcgtgcactggatgaagtaatgaacaagctgcagcgagcaaatccagacgacccagcttatgatgaaaacaagcgccagtgtcaagaagatatcaaggtgatgaacgactatgtagataaaattattgcagatcgcaaagcaaggggtgaacaaagtcatgatttattaacgcagatgctaaacggaaaagatccagaaacgggtgagccgcttgatgacgggaacattcgtcagcaaattattacattcttaattgcgggacaccaaacgacaagtggtcttttatcatttgcgctgtatttcttagtgaaaaatccacatgtattacaaaaagtagcagaagaagcagcacgagttctagtagatcctgttccaagctacaaacaagtcaaacagcttaaatatgttggcatggtcttaaacgaagcgctgcgcttatggccagtagcgcctatgttttccctatatgcaaaagaagatacggtgcttggaggagaatatcctttaacgaaaggcgacgaagtaatggttctggtgcctcagcttcaccgtgataaaacaatttggggagacgatgtggaggagttccgtccagagcgttttgaaaatccaagtgcgattccgcagcatgcgtttaaaccgtttggaaacggtcagcgtgcgtgtatcggtcagcagttcgctcttcatagtgcaacgctggtacttggtatgatgctaaaacactttgactttgaagatcatacaaactacgagctcgttattaaagaatcgcggacgttaaaacctgaaggctttgtggtaaaagcaaaatcgaaaggcattccgcttggcggtattccttcatggagcactgaacagtctgctaaaaaagtacgcaaaaaggcagaaaacgctcataatacgccgctgcttgtgctatacggttcaaatgcgggaacagctgaaggaacggcgcgtgatttagcagatattgcaatgagcaaaggatttgcaccgcaggtcgcaacgcttgattcacacgccggtaatcttccgcgcgaaggagctgtattaattgtaacggcgtcttataacggtcatccgcctgataacgcaaagcaatttgtcgactggttagaccaagcgtctgctgatgaagtaaaaggcgttcgctactccgtatttggatgcggcgataaaaattgggcggggacgtatcaaaaagtgcctgcttttatcgatgaaacgcttgccgctaaaggggcagaaaacatcgctgaccgcggtgaagcagatgcaagcgacgactttgaaggcacatatgaagaatggcgtgatcatatgtggagtgacgtagcagcctactttaacctcgacattgaaaacagtgaagataataaatctactctttcacttcaatttgtcgacagcgccgcggatatgccgcttgcgaaaatgcacggtgcgttttcaacgaacgtcgtagcaagcaaagagcttcaacagccaggcagtgcacgaagcacgcgacatcttgaaattgaacttccaaaagaagcttcttatcaagaaggagatcatttaggtgttattcctcgcaactatgaaggaatagtaaaccgtgtaacagcaaggttcggcctaagcgcatcacagctgatccgtctggaagcagaagaagaaaaattagctcatttgccactcgctaaaacagtatccgtagaagagcttctgcaatacgtggagcttcaagatcctgttacgcgcacgcagcttcgcgcaatggctgctaaaacggtctgcccgccgcataaagtagagcttgaagccttgcttgggaaacaggcctacaaagaacaagtgctggcaaaacgtttaacaatgcttgaactgcttgaaaaatacccggcgtgtgaaatgagtttcagcgaatttatcgcccttctgccaagcatacgcccgcgctattactcgatttcttcatcacctcgtgtcgatgaaaaacaagcaagcatcacggtcagcgttgtctcaggaccggcgtggagcggatatggagaatataaaggaattgcgtcgaactatcttgccgagctgcaagaaggagatacgattacgtgctttatttccacaccgcagtcagaatttacgctgccaaaagaccctgaaacgccgcttatcatggtcggaccgggaacaggcgtcgcgccgtttagaggctttgtgcaggcgcgcaaacagctaaaagaacaaggacagtcacttggagaagcacatttatacttcggctgccgttcacctcatgaagactatctgtatcaagaagagcttgaaaacgcccaaagcgaaggcatcattacgcttcataccgctttttctcgcatgccaaatcagccgaaaacatacgttcagcacgtaatggaacaagacggcaagaaattgattgagcttcttgatcaaggagcgcacttctatatttgcggagacggaagccaaatggcacctgccgttgaagcaacgcttatgaaaagctatgctgacgttcaccaagtgagtgaagcagacgctcgcttatggctgcagcagctagaagaaaaaggccgatacgcaaaagacgtgtggctgggg

SEQ ID NO: 510 - protein, 1049 aa, synthetic construct
  REGION 1..1049: note = variant of P450 oxidase from Bacillus megaterium
MTIKEMPQPKTFGELKNLPLLNTDKPVQALMRIADELGEIFKFEAPGSVTRYLSSQRLIKEACDESRFDKNLSQALKFARDFVGDGLSTSWTHEPNWKKAHNILVPSFSQHAMGRYHAMMVDIAVQLVQKWERLNADEHIEVSEDMTRLTLDTIGLCLFNYRFNSFYRDTPHPFIVSVVRALDEVMNKLQRANPDDPAYDENKRQCQEDIKVMNDYVDKIIADRKARGEQSHDLLTQMLNGKDPETGEPLDDGNIRQQIITFLIAGHQTTSGLLSFALYFLVKNPHVLQKVAEEAARVLVDPVPSYKQVKQLKYVGMVLNEALRLWPVAPMFSLYAKEDTVLGGEYPLTKGDEVMVLVPQLHRDKTIWGDDVEEFRPERFENPSAIPQHAFKPFGNGQRACIGQQFALHSATLVLGMMLKHFDFEDHTNYELVIKESRTLKPEGFVVKAKSKGIPLGGIPSWSTEQSAKKVRKKAENAHNTPLLVLYGSNAGTAEGTARDLADIAMSKGFAPQVATLDSHAGNLPREGAVLIVTASYNGHPPDNAKQFVDWLDQASADEVKGVRYSVFGCGDKNWAGTYQKVPAFIDETLAAKGAENIADRGEADASDDFEGTYEEWRDHMWSDVAAYFNLDIENSEDNKSTLSLQFVDSAADMPLAKMHGAFSTNVVASKELQQPGSARSTRHLEIELPKEASYQEGDHLGVIPRNYEGIVNRVTARFGLSASQLIRLEAEEEKLAHLPLAKTVSVEELLQYVELQDPVTRTQLRAMAAKTVCPPHKVELEALLGKQAYKEQVLAKRLTMLELLEKYPACEMSFSEFIALLPSIRPRYYSISSSPRVDEKQASITVSVVSGPAWSGYGEYKGIASNYLAELQEGDTITCFISTPQSEFTLPKDPETPLIMVGPGTGVAPFRGFVQARKQLKEQGQSLGEAHLYFGCRSPHEDYLYQEELENAQSEGIITLHTAFSRMPNQPKTYVQHVMEQDGKKLIELLDQGAHFYICGDGSQMAPAVEATLMKSYADVHQVSEADARLWLQQLEEKGRYAKDVWLG

SEQ ID NO: 511 - DNA, 3147 bp, synthetic construct
  misc_feature 1..3147: note = variant of P450 oxidase from Bacillus megaterium
  source 1..3147: mol_type = other DNA
atgacaattaaggaaatgcctcagcctaagacgtttggagaacttaaaaatttaccgttattaaacacagataaaccggttcaagctttgatgcgtattgcggatgaattaggagaaatctttaaattcgaggcgcctggtagcgtaacgcgctatttatcaagtcagcgtctaattaaagaagcatgcgatgaatcacgctttgataaaaacttaagtcaagcgcttaaatttgcacgtgattttgttggagacgggctgtctacaagctggacgcatgaaccgaattggaaaaaagcgcataatatcttagttccaagctttagtcagcatgcaatggggcgttatcatgcgatgatggtcgatatcgccgtgcagcttgttcaaaagtgggagcgtctaaatgcagatgagcatattgaagtatcggaagacatgacacgtttaacgcttgatacaattggtctttgcctgtttaactatcgctttaacagcttttaccgagatcagcctcatccatttattgtgagtgtggttcgtgcactggatgaagtaatgaacaagctgcagcgagcaaatccagacgacccagcttatgatgaaaacaagcgccagtgtcaagaagatatcaaggtgatgaacgactatgtagataaaattattgcagatcgcaaagcaaggggtgaacaaagtcatgatttattaacgcagatgctaaacggaaaagatccagaaacgggtgagccgcttgatgacgggaacattcgtcagcaaattattacattcttaattgcgggacaccaaacgacaagtggtcttttatcatttgcgctgtatttcttagtgaaaaatccacatgtattacaaaaagtagcagaagaagcagcacgagttctagtagatcctgttccaagctacaaacaagtcaaacagcttaaatatgttggcatggtcttaaacgaagcgctgcgcttatggccagtagcgcctatgttttccctatatgcaaaagaagatacggtgcttggaggagaatatcctttaacgaaaggcgacgaagtaatggttctggtgcctcagcttcaccgtgataaaacaatttggggagacgatgtggaggagttccgtccagagcgttttgaaaatccaagtgcgattccgcagcatgcgtttaaaccgtttggaaacggtcagcgtgcgtgtatcggtcagcagttcgctcttcatagtgcaacgctggtacttggtatgatgctaaaacactttgactttgaagatcatacaaactacgagctcgttattaaagaatcgcggacgttaaaacctgaaggctttgtggtaaaagcaaaatcgaaaggcattccgcttggcggtattccttcacctagcactgaacagtctgctaaaaaagtacgcaaaaaggcagaaaacgctcataatacgccgctgcttgtgctatacggttcaaatgcgggaacagctgaaggaacggcgcgtgatttagcagatattgcaatgagcaaaggatttgcaccgcaggtcgcaacgcttgattcacacgccggtaatcttccgcgcgaaggagctgtattaattgtaacggcgtcttataacggtcatccgcctgataacgcaaagcaatttgtcgactggttagaccaagcgtctccggatgaagtaaaaggcgttcgctactccgtatttggatgcggcgataaaaattgggcggggacgtatcaaaaagtgcctgcttttatcgatgaaacgcttgccgctaaaggggcagaaaacatcgctgaccgcggtgaagcagatgcaagcgacgactttgaaggcacatatgaagaatggcgtgatcatatgtggagtgacgtagcagcctactttaacctcgacattgaaaacagtgaagataataaatctactctttcacttcaatttgtcgacagcgccgcggatatgccgcttgcgaaaatgcacggtgcgttttcaacgaacgtcgtagcaagcaaagaacttcaacagccaggcagtgcacgaagcacgcgacatcttgaaattgaacttccaaaagaagcttcttatcaagaaggagatcatttaggtgttattcctcgcaactatgaaggaatagtaaaccgtgtaacagcaaggttcggcctaagcgcatcacagcagatccgtctggaagcagaagaagaaaaattagctcatttgccactcgctaaaacagtatccgtagaagagcttctgcaatacgtggagcttcaagatcctgttacgcgcacgcagcttcgcgcaatggctgctaaaacggtctgcccgccgcataaagtagagcttgaagccttgcttgggcgccaggcctacaaagaacaagtgctggcaaaacgtttaacaatgcttgaactgcttgaaaaatacccggcgtgtgaaatgaagttcagcgaatttatcgcccttctgccaagcatacgcccgcgctattactcgatttcttcatcacctcgtgtcgatgaaaaacaagcaagcatcacggtcagcgttgtctcaggaccggcgtggagcggatatggagaatataaaggaattgcgtcgaactatcttgccgagctgcaagaaggagatacgattacgtgctttatttccacaccgcagtcagaatttacgctgccaaaagaccctgaaacgccgcttatcatggtcggaccgggaacaggcgtcgcgccgtttagaggctttgtgcaggcgcgcaaacagctaaaagaacaaggacagtcacttggagaagcacatttatacttcggctgccgttcacctcatgaagactatctgtatcaagaagagcttgaaaacgcccaaagcgaaggcatcattacgcttcataccgctttttctcgcatgccaaatcagccgaaaacatacgttcagcacgtaatggaacaagacggcaagaaattgattgaacttcttgatcaaggagcgcacttctatatttgcggagacggaagccaaatggcacctgccgttgaagcaacgcttatgaaaagctatgctgacgttcaccaagtgagtgaagcagacgctcgcttatggctgcagcagctagaagaaaaaggccgatacgcaaaagacgtgtggctgggg

SEQ ID NO: 512 - protein, 1049 aa, synthetic construct
  REGION 1..1049: note = variant of P450 oxidase from Bacillus megaterium
MTIKEMPQPKTFGELKNLPLLNTDKPVQALMRIADELGEIFKFEAPGSVTRYLSSQRLIKEACDESRFDKNLSQALKFARDFVGDGLSTSWTHEPNWKKAHNILVPSFSQHAMGRYHAMMVDIAVQLVQKWERLNADEHIEVSEDMTRLTLDTIGLCLFNYRFNSFYRDQPHPFIVSVVRALDEVMNKLQRANPDDPAYDENKRQCQEDIKVMNDYVDKIIADRKARGEQSHDLLTQMLNGKDPETGEPLDDGNIRQQIITFLIAGHQTTSGLLSFALYFLVKNPHVLQKVAEEAARVLVDPVPSYKQVKQLKYVGMVLNEALRLWPVAPMFSLYAKEDTVLGGEYPLTKGDEVMVLVPQLHRDKTIWGDDVEEFRPERFENPSAIPQHAFKPFGNGQRACIGQQFALHSATLVLGMMLKHFDFEDHTNYELVIKESRTLKPEGFVVKAKSKGIPLGGIPSPSTEQSAKKVRKKAENAHNTPLLVLYGSNAGTAEGTARDLADIAMSKGFAPQVATLDSHAGNLPREGAVLIVTASYNGHPPDNAKQFVDWLDQASPDEVKGVRYSVFGCGDKNWAGTYQKVPAFIDETLAAKGAENIADRGEADASDDFEGTYEEWRDHMWSDVAAYFNLDIENSEDNKSTLSLQFVDSAADMPLAKMHGAFSTNVVASKELQQPGSARSTRHLEIELPKEASYQEGDHLGVIPRNYEGIVNRVTARFGLSASQQIRLEAEEEKLAHLPLAKTVSVEELLQYVELQDPVTRTQLRAMAAKTVCPPHKVELEALLGRQAYKEQVLAKRLTMLELLEKYPACEMKFSEFIALLPSIRPRYYSISSSPRVDEKQASITVSVVSGPAWSGYGEYKGIASNYLAELQEGDTITCFISTPQSEFTLPKDPETPLIMVGPGTGVAPFRGFVQARKQLKEQGQSLGEAHLYFGCRSPHEDYLYQEELENAQSEGIITLHTAFSRMPNQPKTYVQHVMEQDGKKLIELLDQGAHFYICGDGSQMAPAVEATLMKSYADVHQVSEADARLWLQQLEEKGRYAKDVWLG

SEQ ID NO: 513 - DNA, 3147 bp, synthetic construct
  misc_feature 1..3147: note = variant of P450 oxidase from Bacillus megaterium
  source 1..3147: mol_type = other DNA
atgacaattaaggaaatgcctcagcctaagacgtttggagaacttaaaaatttaccgttattaaacacagataaaccggttcaagctttgatgcgtattgcggatgaattaggagaaatctttaaattcgaggcgcctggtagcgtaacgcgctatttatcaagtcagcgtctaattaaagaagcatgcgatgaatcacgctttgataaaaacttaagtcaagcgcttaaatttgcacgtgattttgttggagacgggctgtctacaagctggacgcatgaaccgaattggaaaaaagcgcataatatcttagttccaagctttagtcagcatgcaatggggcgttatcatgcgatgatggtcgatatcgccgtgcagcttgttcaaaagtgggagcgtctaaatgcagatgagcatattgaagtatcggaagacatgacacgtttaacgcttgatacaattggtctttgcgggtttaactatcgctttaacagcttttaccgagatcagcctcatccatttattgtgagtgtggttcgtgcactggatgaagtaatgaacaagctgcagcgagcaaatccagacgacccagcttatgatgaaaacaagcgccagtgtcaagaagatatcaaggtgatgaacgactatgtagataaaattattgcagatcgcaaagcaaggggtgaacaaagtcatgatttattaacgcagatgctaaacggaaaagatccagaaacgggtgagccgcttgatgacgggaacattcgtcagcaaattattacattcttaattgcgggacaccaaacgacaagtggtcttttatcatttgcgctgtatttcttagtgaaaaatccacatgtattacaaaaagtagcagaagaagcagcacgagttctagtagatcctgttccaagctacaaacaagtcaaacagcttaaatatgttggcatggtcttaaacgaagcgctgcgcttatggccagtagcgcctatgttttccctatatgcaaaagaagatacggtgcttggaggagaatatcctttaacgaaaggcgacgaagtaatggttctggtgcctcagcttcaccgtgataaaacaatttggggagacgatgtggaggagttccgtccagagcgttttgaaaatccaagtgcgattccgcagcatgcgtttaaaccgtttggaaacggtcagcgtgcgtgtatcggtcagcagttcgctcttcatgaagcaacgctggtacttggtatgatgctaaaacactttgactttgaagatcatacaaactacgagctcgttattaaagaatcgcggacgttaaaacctgaaggctttgtggtaaaagcaaaatcgaaaggcattccgcttggcggtattccttcatggagcactgaacagtctgctaaaaaagtacgcaaaaaggcagaaaacgctcataatacgccgctgcttgtgctatacggttcaaatgcgggaacagctgaaggaacggcgcgtgatttagcagatattgcaatgagcaaaggatttgcaccgcaggtcgcaacgcttgattcacacgccggtaatcttccgcgcgaaggagctgtattaattgtaacggcgtcttataacggtcatccgcctgataacgcaaagcaatttgtcgactggttagaccaagcgtctccggatgaagtaaaaggcgttcgctactccgtatttggatgcggcgataaaaattgggcggggacgtatcaaaaagtgcctgcttttatcgatgaaacgcttgccgctaaaggggcagaaaacatcgctgaccgcggtgaagcagatgcaagcgacgactttgaaggcacatatgaagaatggcgtgatcatatgtggagtgacgtagcagcctactttaatctcgacattgaaaacagtgaagataataaatctactctttcacttcaatttgtcgacagcgccgcggatatgccgcttgcgaaaatgcacggtgcgttttcaacgaacgtcgtagcaagcaaagaacttcaacagccaggcagtgcacgaagcacgcgacatcttgaaattgaacttccaaaagaagcttcttatcaagaaggagatcatttaggtgttattcctcgcaactatgaaggaatagtaaaccgtgtaacagcaaggttcggcctaagcgcatcacagctgatccgtctggaagcagaagaagaaaaattagctcatttgccactcgctaaaacagtatccgtagaagagcttctgcaatacgtggagcttcaagatcctgttacgcgcacgcagcttcgcgcaatggctgctaaaacggtctgcccgccgcataaagtagagcttgaagccttgcttgggcgccaggcctacaaagaacaagtgctggcaaaacgtttaacaatgcttgaactgcttgaaaaatacccggcgtgtgaaatgaagttcagcgaatttatcgcccttctgccaagcatacgcccgcgctattactcgatttcttcatcacctcgtgtcgatgaaaaacaagcaagcatcacggtcagcgttgtctcaggaccggcgtggagcggatatggagaatataaaggaattgcgtcgaactatcttgccgagctgcaagaaggagatacgattacgtgctttatttccacaccgcagtcagaatttacgctgccaaaagaccctgaaacgccgcttatcatggtcggaccgggaacaggcgtcgcgccgtttagaggctttgtgcaggcgcgcaaacagctaaaagaaggtggacagtcacttggagaagcacatttatacttcggctgccgttcacctcatgaagactatctgtatcaagaagagcttgaaaacgcccaaagcgaaggcatcattacgcttcataccgctttttctcgcatgccgaatcagccgaaaacatacgttcagcacgtaatggaacaagacggcaagaaattgattgaacttcttgatcaaggagcgcacttctatatttgcggagacggaagccaaatggcacctgccgttgaagcaacgcttatgaaaagctatgctgacgttcaccaagtgagtgaagcagacgctcgcttatggctgcagcagctagaagaaaaaggccgatacgcaaaagacgtgtggctgggg

SEQ ID NO: 514 - protein, 1049 aa, synthetic construct
  REGION 1..1049: note = variant of P450 oxidase from Bacillus megaterium
MTIKEMPQPKTFGELKNLPLLNTDKPVQALMRIADELGEIFKFEAPGSVTRYLSSQRLIKEACDESRFDKNLSQALKFARDFVGDGLSTSWTHEPNWKKAHNILVPSFSQHAMGRYHAMMVDIAVQLVQKWERLNADEHIEVSEDMTRLTLDTIGLCGFNYRFNSFYRDQPHPFIVSVVRALDEVMNKLQRANPDDPAYDENKRQCQEDIKVMNDYVDKIIADRKARGEQSHDLLTQMLNGKDPETGEPLDDGNIRQQIITFLIAGHQTTSGLLSFALYFLVKNPHVLQKVAEEAARVLVDPVPSYKQVKQLKYVGMVLNEALRLWPVAPMFSLYAKEDTVLGGEYPLTKGDEVMVLVPQLHRDKTIWGDDVEEFRPERFENPSAIPQHAFKPFGNGQRACIGQQFALHEATLVLGMMLKHFDFEDHTNYELVIKESRTLKPEGFVVKAKSKGIPLGGIPSWSTEQSAKKVRKKAENAHNTPLLVLYGSNAGTAEGTARDLADIAMSKGFAPQVATLDSHAGNLPREGAVLIVTASYNGHPPDNAKQFVDWLDQASPDEVKGVRYSVFGCGDKNWAGTYQKVPAFIDETLAAKGAENIADRGEADASDDFEGTYEEWRDHMWSDVAAYFNLDIENSEDNKSTLSLQFVDSAADMPLAKMHGAFSTNVVASKELQQPGSARSTRHLEIELPKEASYQEGDHLGVIPRNYEGIVNRVTARFGLSASQLIRLEAEEEKLAHLPLAKTVSVEELLQYVELQDPVTRTQLRAMAAKTVCPPHKVELEALLGRQAYKEQVLAKRLTMLELLEKYPACEMKFSEFIALLPSIRPRYYSISSSPRVDEKQASITVSVVSGPAWSGYGEYKGIASNYLAELQEGDTITCFISTPQSEFTLPKDPETPLIMVGPGTGVAPFRGFVQARKQLKEGGQSLGEAHLYFGCRSPHEDYLYQEELENAQSEGIITLHTAFSRMPNQPKTYVQHVMEQDGKKLIELLDQGAHFYICGDGSQMAPAVEATLMKSYADVHQVSEADARLWLQQLEEKGRYAKDVWLG

SEQ ID NO: 515 - DNA, 3147 bp, synthetic construct
  misc_feature 1..3147: note = variant of P450 oxidase from Bacillus megaterium
  source 1..3147: mol_type = other DNA
atgacaattaaggaaatgcctcagcctaagacgtttggagaacttaaaaatttaccgttattaaacacagataaaccggttcaagctttgatgcgtattgcggatgaattaggagaaatctttaaattcgaggcgcctggtagcgtaacgcgctatttatcaagtcagcgtctaattaaagaagcatgcgatgaatcacgctttgataaaaacttaagtcaagcgcttaaatttgcacgtgattttgttggagacgggctgtctacaagctggacgcatgaaccgaattggaaaaaagcgcataatatcttagttccaagctttagtcagcatgcaatggggcgttatcatgcgatgatggtcgatatcgccgtgcagcttgttcaaaagtgggagcgtctaaatgcagatgagcatattgaagtatcggaagacatgacacgtttaacgcttgatacaattggtctttgcctgtttaactatcgctttaacagcttttaccgagatcagcctcatccatttattgtgagtgtggttcgtgcactggatgaagtaatgaacaagctgcagcgagcaaatccagacgacccagcttatgatgaaaacaagcgccagtgtcaagaagatatcaaggtgatgaacgactatgtagataaaattattgcagatcgcaaagcaaggggtgaacaaagtcatgatttattaacgcagatgctaaacggaaaagatccagaaacgggtgagccgcttgatgacgggaacattcgtcagcaaattattacattcttaattgcgggacaccaaacgacaagtggtcttttatcatttgcgctgtatttcttagtgaaaaatccacatgtattacaaaaagtagcagaagaagcagcacgagttctagtagatcctgttccaagctacaaacaagtcaaacagcttaaatatgttggcatggtcttaaacgaagcgctgcgcttatggccagtagcgcctatgttttccctatatgcaaaagaagatacggtgcttggaggagaatatcctttaacgaaaggcgacgaagtaatggttctggtgcctcagcttcaccgtgataaaacaatttggggagacgatgtggaggagttccgtccagagcgttttgaaaatccaagtgcgattccgcagcatgcgtttaaaccgtttggaaacggtcagcgtgcgtgtatcggtcagcagttcgctcttcatagtgcaacgctggtacttggtatgatgctaaaacactttgactttgaagatcatacaaactacgagctcgttattaaagaatcgcggacgttaaaacctgaaggctttgtggtaaaagcaaaatcgaaaggcattccgcttggcggtattccttcacctagcactgaacagtctgctaaaaaagtacgcaaaaaggcagaaaacgctcataatacgccgctgcttgtgctatacggttcaaatgcgggaacagctgaaggaacggcgcgtgatttagcagatattgcaatgagcaaaggatttgcaccgcaggtcgcaacgcttgattcacacgccggtaatcttccgcgcgaaggagctgtattaattgtaacggcgtcttataacggtcatccgcctgataacgcaaagcaatttgtcgactggttagaccaagcgtctgcggatgaagtaaaaggcgttcgctactccgtatttggatgcggcgataaaaattgggcggggacgtatcaaaaagtgcctgcttttatcgatgaaacgcttgccgctaaaggggcagaaaacatcgctgaccgcggtgaagcagatgcaagcgacgactttgaaggcacatatgaagaatggcgtgatcatatgtggagtgacgtagcagcctactttaacctcgacattgaaaacagtgaagataataaatctactctttcacttcaatttgtcgacagcgccgcggatatgccgcttgcgaaaatgcacggtgcgttttcaacgaacgtcgtagcaagcaaagaacttcaacagccaggcagtgcacgaagcacgcgacatcttgaaattgaacttccaaaagaagcttcttatcaagaaggagatcatttaggtgttattcctcgcaactatgaaggaatagtaaaccgtgtaacagcaaggttcggcctaagcgcatcacagcaaatccgtctggaagcagaagaagaaaaattagctcatttgccactcgctaaaacagtatccgtagaagagcttctgcaatacgtggagcttcaagatcctgttacgcgcacgcagcttcgcgcaatggctgctaaaacggtctgcccgccgcataaagtagagcttgaagccttgcttgaaaagcaagcctacaaagaacaagtgctggcaaaacgtttaacaatgcttgaactgcttgaaaaatacccggcgtgtgaaatgaaattcagcgaatttatcgcccttctgccaagcatacgcccgcgctattactcgatttcttcatcacctcgtgtcgatgaaaaacaagcaagcatcacggtcagcgttgtctcaggaccggcgtggagcggatatggagaatatctgggaattgcgtcgaactatcttgccgagctgcaagaaggagatacgattacgtgctttatttccacaccgcagtcagaatttacgctgccaaaagaccctgaaacgccgcttatcatggtcggaccgggaacaggcgtcgcgccgtttagaggctttgtgcaggcgcgcaaacagctaaaagaacaaggacagtcacttggagaagcacatttatacttcggctgccgttcacctcatgaagactatctgtatcaagaagagcttgaaaacgcccaaagcgaaggcatcattacgcttcataccgctttttctcgcatgccgaatcagccgaaaacatacgttcagcacgtaatggaacaagacggcaagaaattgattgaacttcttgatcaaggagcgcacttctatatttgcggagacggaagccaaatggcacctgccgttgaagcaacgcttatgaaaagctatgctgacgttcaccaagtgagtgaagcagacgctcgcttatggctgcagcagctagaagaaaaaggccgatacgcaaaagacgtgtggctgggg

SEQ ID NO: 516 - protein, 1049 aa, synthetic construct
  REGION 1..1049: note = variant of P450 oxidase from Bacillus megaterium
MTIKEMPQPKTFGELKNLPLLNTDKPVQALMRIADELGEIFKFEAPGSVTRYLSSQRLIKEACDESRFDKNLSQALKFARDFVGDGLSTSWTHEPNWKKAHNILVPSFSQHAMGRYHAMMVDIAVQLVQKWERLNADEHIEVSEDMTRLTLDTIGLCLFNYRFNSFYRDQPHPFIVSVVRALDEVMNKLQRANPDDPAYDENKRQCQEDIKVMNDYVDKIIADRKARGEQSHDLLTQMLNGKDPETGEPLDDGNIRQQIITFLIAGHQTTSGLLSFALYFLVKNPHVLQKVAEEAARVLVDPVPSYKQVKQLKYVGMVLNEALRLWPVAPMFSLYAKEDTVLGGEYPLTKGDEVMVLVPQLHRDKTIWGDDVEEFRPERFENPSAIPQHAFKPFGNGQRACIGQQFALHSATLVLGMMLKHFDFEDHTNYELVIKESRTLKPEGFVVKAKSKGIPLGGIPSPSTEQSAKKVRKKAENAHNTPLLVLYGSNAGTAEGTARDLADIAMSKGFAPQVATLDSHAGNLPREGAVLIVTASYNGHPPDNAKQFVDWLDQASADEVKGVRYSVFGCGDKNWAGTYQKVPAFIDETLAAKGAENIADRGEADASDDFEGTYEEWRDHMWSDVAAYFNLDIENSEDNKSTLSLQFVDSAADMPLAKMHGAFSTNVVASKELQQPGSARSTRHLEIELPKEASYQEGDHLGVIPRNYEGIVNRVTARFGLSASQQIRLEAEEEKLAHLPLAKTVSVEELLQYVELQDPVTRTQLRAMAAKTVCPPHKVELEALLEKQAYKEQVLAKRLTMLELLEKYPACEMKFSEFIALLPSIRPRYYSISSSPRVDEKQASITVSVVSGPAWSGYGEYLGIASNYLAELQEGDTITCFISTPQSEFTLPKDPETPLIMVGPGTGVAPFRGFVQARKQLKEQGQSLGEAHLYFGCRSPHEDYLYQEELENAQSEGIITLHTAFSRMPNQPKTYVQHVMEQDGKKLIELLDQGAHFYICGDGSQMAPAVEATLMKSYADVHQVSEADARLWLQQLEEKGRYAKDVWLG

SEQ ID NO: 517 - DNA, 3147 bp, synthetic construct
  misc_feature 1..3147: note = variant of P450 oxidase from Bacillus megaterium
  source 1..3147: mol_type = other DNA
atgacaattaaggaaatgcctcagcctaagacgtttggagaacttaaaaatttaccgttattaaacacagataaaccggttcaagctttgatgcgtattgcggatgaattaggagaaatctttaaattcgaggcgcctggtagcgtaacgcgctatttatcaagtcagcgtctaattaaagaagcatgcgatgaatcacgctttgataaaaacttaagtcaagcgcttaaatttgcacgtgattttgttggagacgggctgtctacaagctggacgcatgaaccgaattggaaaaaagcgcataatatcttagttccaagctttagtcagcatgcaatggggcgttatcatgcgatgatggtcgatatcgccgtgcagcttgttcaaaagtgggagcgtctaaatgcagatgagcatattgaagtatcggaagacatgacacgtttaacgcttgatacaattggtctttgcctgtttaactatcgctttaacagcttttaccgagatcagcctcatccatttattgtgagtgtggttcgtgcactggatgaagtaatgaacaagctgcagcgagcaaatccagacgacccagcttatgatgaaaacaagcgccagtgtcaagaagatatcaaggtgatgaacgactatgtagataaaattattgcagatcgcaaagcaaggggtgaacaaagtcatgatttattaacgcagatgctaaacggaaaagatccagaaacgggtgagccgcttgatgacgggaacattcgtcagcaaattattacattcttaattgcgggacaccaaacgacaagtggtcttttatcatttgcgctgtatttcttagtgaaaaatccacatgtattacaaaaagtagcagaagaagcagcacgagttctagtagatcctgttccaagctacaaacaagtcaaacagcttaaatatgttggcatggtcttaaacgaagcgctgcgcttatggccagtagcgcctatgttttccctatatgcaaaagaagatacggtgcttggaggagaatatcctttaacgaaaggcgacgaagtaatggttctggtgcctcagcttcaccgtgataaaacaatttggggagacgatgtggaggagttccgtccagagcgttttgaaaatccaagtgcgattccgcagcatgcgtttaaaccgtttggaaacggtcagcgtgcgtgtatcggtcagcagttcgctcttcatagtgcaacgctggtacttggtatgatgctaaaacactttgactttgaagatcatacaaactacgagctcgttattaaagaatcgcggacgttaaaacctgaaggctttgtggtaaaagcaaaatcgaaaggcattccgcttggcggtattccttcaccaagcactgaacagtctgctaaaaaagtacgcaaaaaggcagaaaacgctcataatacgccgctgcttgtgctatacggttcaaatgcgggaacagctgaaggaacggcgcgtgatttagcagatattgcaatgagcaaaggatttgcaccgcaggtcgcaacgcttgattcacacgccggtaatcttccgcgcgaaggagctgtattaattgtaacggcgtcttataacggtcatccgcctgataacgcaaagcaatttgtcgactggttagaccaagcgtctgctgatgaagtaaaaggcgttcgctactccgtatttggatgcggcgataaaaattgggcggggacgtatcaaaaagtgcctgcttttatcgatgaaacgcttgccgctaaaggggcagaaaacatcgctgaccgcggtgaagcagatgcaagcgacgactttgaaggcacatatgaagaatggcgtgatcatatgtggagtgacgtagcagcctactttaatctcgacattgaaaacagtgaagataataaatctactctttcacttcaatttgtcgacagcgccgcggatatgccgcttgcgaaaatgcacggtgcgttttcaacgaacgtcgtagcaagcaaagaacttcaacagccaggcagtgcacgaagcacgcgacatcttgaaattgaacttccaaaagaagcttcttatcaagaaggagatcatttaggtgttattcctcgcaactatgaaggaatagtaaaccgtgtaacagcaaggttcggcctaagcgcatcacagcaaatccgtctggaagcagaagaagaaaaattagctcatttgccactcgctaaaacagtatccgtagaagagcttctgcaatacgtggagcttcaagatcctgttacgcgcacgcagcttcgcgcaatggctgctaaaacggtctgcccgccgcataaagtagagcttgaagccttgcttgaaaagcaagcctacaaagaacaagtgctggcaaaacgtttaacaatgcttgaactgcttgaaaaatacccggcgtgtgaaatgagtttcagcgaatttatcgcccttctgccaagcatacgcccgcgctattactcgatttcttcatcacctcgtgtcgatgaaaaacaagcaagcatcacggtcagcgttgtctcaggaccggcgtggagcggatatggagaatataaaggaattgcgtcgaactatcttgccgagctgcaagaaggagatacgattacgtgctttatttccacaccgcagtcagaatttacgctgccaaaagaccctgaaacgccgcttatcatggtcggaccgggaacaggcgtcgcgccgtttagaggctttgtgcaggcgcgcaaacagctaaaagaaggtggacagtcacttggagaagcacatttatacttcggctgccgttcacctcatgaagactatctgtatcaagaagagcttgaaaacgcccaaagcgaaggcatcattacgcttcataccgctttttctcgcatgccgaatcagccgaaaacatacgttcagcacgtaatggaacaagacggcaagaaattgattgaacttcttgatcaaggagcgcacttctatatttgcggagacggaagccaaatggcacctgccgttgaagcaacgcttatgaaaagctatgctgacgttcaccaagtgagtgaagcagacgctcgcttatggctgcagcagctagaagaaaaaggccgatacgcaaaagacgtgtggctgggg

SEQ ID NO: 518 - protein, 1049 aa, synthetic construct
  REGION 1..1049: note = variant of P450 oxidase from Bacillus megaterium
MTIKEMPQPKTFGELKNLPLLNTDKPVQALMRIADELGEIFKFEAPGSVTRYLSSQRLIKEACDESRFDKNLSQALKFARDFVGDGLSTSWTHEPNWKKAHNILVPSFSQHAMGRYHAMMVDIAVQLVQKWERLNADEHIEVSEDMTRLTLDTIGLCLFNYRFNSFYRDQPHPFIVSVVRALDEVMNKLQRANPDDPAYDENKRQCQEDIKVMNDYVDKIIADRKARGEQSHDLLTQMLNGKDPETGEPLDDGNIRQQIITFLIAGHQTTSGLLSFALYFLVKNPHVLQKVAEEAARVLVDPVPSYKQVKQLKYVGMVLNEALRLWPVAPMFSLYAKEDTVLGGEYPLTKGDEVMVLVPQLHRDKTIWGDDVEEFRPERFENPSAIPQHAFKPFGNGQRACIGQQFALHSATLVLGMMLKHFDFEDHTNYELVIKESRTLKPEGFVVKAKSKGIPLGGIPSPSTEQSAKKVRKKAENAHNTPLLVLYGSNAGTAEGTARDLADIAMSKGFAPQVATLDSHAGNLPREGAVLIVTASYNGHPPDNAKQFVDWLDQASADEVKGVRYSVFGCGDKNWAGTYQKVPAFIDETLAAKGAENIADRGEADASDDFEGTYEEWRDHMWSDVAAYFNLDIENSEDNKSTLSLQFVDSAADMPLAKMHGAFSTNVVASKELQQPGSARSTRHLEIELPKEASYQEGDHLGVIPRNYEGIVNRVTARFGLSASQQIRLEAEEEKLAHLPLAKTVSVEELLQYVELQDPVTRTQLRAMAAKTVCPPHKVELEALLEKQAYKEQVLAKRLTMLELLEKYPACEMSFSEFIALLPSIRPRYYSISSSPRVDEKQASITVSVVSGPAWSGYGEYKGIASNYLAELQEGDTITCFISTPQSEFTLPKDPETPLIMVGPGTGVAPFRGFVQARKQLKEGGQSLGEAHLYFGCRSPHEDYLYQEELENAQSEGIITLHTAFSRMPNQPKTYVQHVMEQDGKKLIELLDQGAHFYICGDGSQMAPAVEATLMKSYADVHQVSEADARLWLQQLEEKGRYAKDVWLG

SEQ ID NO: 519 - DNA, 3147 bp, synthetic construct
  misc_feature 1..3147: note = variant of P450 oxidase from Bacillus megaterium
  source 1..3147: mol_type = other DNA
atgacaattaaggaaatgcctcagcctaagacgtttggagaacttaaaaatttaccgttattaaacacagataaaccggttcaagctttgatgcgtattgcggatgaattaggagaaatctttaaattcgaggcgcctggtagcgtaacgcgctatttatcaagtcagcgtctaattaaagaagcatgcgatgaatcacgctttgataaaaacttaagtcaagcgcttaaatttgcacgtgattttgttggagacgggctgtctacaagctggacgcatgaaccgaattggaaaaaagcgcataatatcttagttccaagctttagtcagcatgcaatggggcgttatcatgcgatgatggtcgatatcgccgtgcagcttgttcaaaagtgggagcgtctaaatgcagatgagcatattgaagtatcggaagacatgacacgtttaacgcttgatacaattggtctttgcctgtttaactatcgctttaacagcttttaccgagatcagcctcatccatttattgtgagtgtggttcgtgcactggatgaagtaatgaacaagctgcagcgagcaaatccagacgacccagcttatgatgaaaacaagcgccagtgtcaagaagatatcaaggtgatgaacgactatgtagataaaattattgcagatcgcaaagcaaggggtgaacaaagtcatgatttattaacgcagatgctaaacggaaaagatccagaaacgggtgagccgcttgatgacgggaacattcgtcagcaaattattacattcttaattgcgggacaccaaacgacaagtggtcttttatcatttgcgctgtatttcttagtgaaaaatccacatgtattacaaaaagtagcagaagaagcagcacgagttctagtagatcctgttccaagctacaaacaagtcaaacagcttaaatatgttggcatggtcttaaacgaagcgctgcgcttatggccagtagcgcctatgttttccctatatgcaaaagaagatacggtgcttggaggagaatatcctttaacgaaaggcgacgaagtaatggttctggtgcctcagcttcaccgtgataaaacaatttggggagacgatgtggaggagttccgtccagagcgttttgaaaatccaagtgcgattccgcagcatgcgtttaaaccgtttggaaacggtcagcgtgcgtgtatcggtcagcagttcgctcttcatgaagcaacgctggtacttggtatgatgctaaaacactttgactttgaagatcatacaaactacgagctcgttattaaagaatcgcggacgttaaaacctgaaggctttgtggtaaaagcaaaatcgaaaggcattccgcttggcggtattccttcaccaagcactgaacagtctgctaaaaaagtacgcaaaaaggcagaaaacgctcataatacgccgctgcttgtgctatacggttcaaatgcgggaacagctgaaggaacggcgcgtgatttagcagatattgcaatgagcaaaggatttgcaccgcaggtcgcaacgcttgattcacacgccggtaatcttccgcgcgaaggagctgtattaattgtaacggcgtcttataacggtcatccgcctgataacgcaaagcaatttgtcgactggttagaccaagcgtctccggatgaagtaaaaggcgttcgctactccgtatttggatgcggcgataaaaattgggcggggacgtatcaaaaagtgcctgcttttatcgatgaaacgcttgccgctaaaggggcagaaaacatcgctgaccgcggtgaagcagatgcaagcgacgactttgaaggcacatatgaagaatggcgtgatcatatgtggagtgacgtagcagcctactttaatctcgacattgaaaacagtgaagataataaatctactctttcacttcaatttgtcgacagcgccgcggatatgccgcttgcgaaaatgcacggtgcgttttcaacgaacgtcgtagcaagcaaagaacttcaacagccaggcagtgcacgaagcacgcgacatcttgaaattgaacttccaaaagaagcttcttatcaagaaggagatcatttaggtgttattcctcgcaactatgaaggaatagtaaaccgtgtaacagcaaggttcggcctaagcgcatcacagctgatccgtctggaagcagaagaagaaaaattagctcatttgccactcgctaaaacagtatccgtagaagagcttctgcaatacgtggagcttcaagatcctgttacgcgcacgcagcttcgcgcaatggctgctaaaacggtctgcccgccgcataaagtagagcttgaagccttgcttgggaaaccggcctacaaagaacaagtgctggcaaaacgtttaacaatgcttgaactgcttgaaaaatacccggcgtgtgaaatgaaattcagcgaatttatcgcccttctgccaagcatacgcccgcgctattactcgatttcttcatcacctcgtgtcgatgaaaaacaagcaagcatcacggtcagcgttgtctcaggaccggcgtggagcggatatggagaatatctgggaattgcgtcgaactatcttgccgagctgcaagaaggagatacgattacgtgctttatttccacaccgcagtcagaatttacgctgccaaaagaccctgaaacgccgcttatcatggtcggaccgggaacaggcgtcgcgccgtttagaggctttgtgcaggcgcgcaaacagctaaaagaacaaggacagtcacttggagaagcacatttatacttcggctgccgttcacctcatgaagactatctgtatcaagaagagcttgaaaacgcccaaagcgaaggcatcattacgcttcataccgctttttctcgcatgccgaatcagccgaaaacatacgttcagcacgtaatggaacaagacggcaagaaattgattgagcttcttgatcaaggagcgcacttctatatttgcggagacggaagccaaatggcacctgccgttgaagcaacgcttatgaaaagctatgctgacgttcaccaagtgagtgaagcagacgctcgcttatggctgcagcagctagaagaaaaaggccgatacgcaaaagacgtgtggctgggg

SEQ ID NO: 520 - protein, 1049 aa, synthetic construct
  REGION 1..1049: note = variant of P450 oxidase from Bacillus megaterium
MTIKEMPQPKTFGELKNLPLLNTDKPVQALMRIADELGEIFKFEAPGSVTRYLSSQRLIKEACDESRFDKNLSQALKFARDFVGDGLSTSWTHEPNWKKAHNILVPSFSQHAMGRYHAMMVDIAVQLVQKWERLNADEHIEVSEDMTRLTLDTIGLCLFNYRFNSFYRDQPHPFIVSVVRALDEVMNKLQRANPDDPAYDENKRQCQEDIKVMNDYVDKIIADRKARGEQSHDLLTQMLNGKDPETGEPLDDGNIRQQIITFLIAGHQTTSGLLSFALYFLVKNPHVLQKVAEEAARVLVDPVPSYKQVKQLKYVGMVLNEALRLWPVAPMFSLYAKEDTVLGGEYPLTKGDEVMVLVPQLHRDKTIWGDDVEEFRPERFENPSAIPQHAFKPFGNGQRACIGQQFALHEATLVLGMMLKHFDFEDHTNYELVIKESRTLKPEGFVVKAKSKGIPLGGIPSPSTEQSAKKVRKKAENAHNTPLLVLYGSNAGTAEGTARDLADIAMSKGFAPQVATLDSHAGNLPREGAVLIVTASYNGHPPDNAKQFVDWLDQASPDEVKGVRYSVFGCGDKNWAGTYQKVPAFIDETLAAKGAENIADRGEADASDDFEGTYEEWRDHMWSDVAAYFNLDIENSEDNKSTLSLQFVDSAADMPLAKMHGAFSTNVVASKELQQPGSARSTRHLEIELPKEASYQEGDHLGVIPRNYEGIVNRVTARFGLSASQLIRLEAEEEKLAHLPLAKTVSVEELLQYVELQDPVTRTQLRAMAAKTVCPPHKVELEALLGKPAYKEQVLAKRLTMLELLEKYPACEMKFSEFIALLPSIRPRYYSISSSPRVDEKQASITVSVVSGPAWSGYGEYLGIASNYLAELQEGDTITCFISTPQSEFTLPKDPETPLIMVGPGTGVAPFRGFVQARKQLKEQGQSLGEAHLYFGCRSPHEDYLYQEELENAQSEGIITLHTAFSRMPNQPKTYVQHVMEQDGKKLIELLDQGAHFYICGDGSQMAPAVEATLMKSYADVHQVSEADARLWLQQLEEKGRYAKDVWLG

SEQ ID NO: 521 - DNA, 3147 bp, synthetic construct
  misc_feature 1..3147: note = variant of P450 oxidase from Bacillus megaterium
  source 1..3147: mol_type = other DNA
atgacaattaaggaaatgcctcagcctaagacgtttggagaacttaaaaatttaccgttattaaacacagataaaccggttcaagctttgatgcgtattgcggatgaattaggagaaatctttaaattcgaggcgcctggtagcgtaacgcgctatttatcaagtcagcgtctaattaaagaagcatgcgatgaatcacgctttgataaaaacttaagtcaagcgcttaaatttgcacgtgattttgttggagacgggctgtctacaagctggacgcatgaaccgaattggaaaaaagcgcataatatcttagttccaagctttagtcagcatgcaatggggcgttatcatgcgatgatggtcgatatcgccgtgcagcttgttcaaaagtgggagcgtctaaatgcagatgagcatattgaagtatcggaagacatgacacgtttaacgcttgatacaattggtctttgcctgtttaactatcgctttaacagcttttaccgagatcagcctcatccatttattgtgagtgtggttcgtgcactggatgaagtaatgaacaagctgcagcgagcaaatccagacgacccagcttatgatgaaaacaagcgccagtgtcaagaagatatcaaggtgatgaacgactatgtagataaaattattgcagatcgcaaagcaaggggtgaacaaagtcatgatttattaacgcagatgctaaacggaaaagatccagaaacgggtgagccgcttgatgacgggaacattcgtcagcaaattattacattcttaattgcgggacaccaaacgacaagtggtcttttatcatttgcgctgtatttcttagtgaaaaatccacatgtattacaaaaagtagcagaagaagcagcacgagttctagtagatcctgttccaagctacaaacaagtcaaacagcttaaatatgttggcatggtcttaaacgaagcgctgcgcttatggccagtagcgcctatgttttccctatatgcaaaagaagatacggtgcttggaggagaatatcctttaacgaaaggcgacgaagtaatggttctggtgcctcagcttcaccgtgataaaacaatttggggagacgatgtggaggagttccgtccagagcgttttgaaaatccaagtgcgattccgcagcatgcgtttaaaccgtttggaaacggtcagcgtgcgtgtatcggtcagcagttcgctcttcatgaagcaacgctggtacttggtatgatgctaaaacactttgactttgaagatcatacaaactacgagctcgttattaaagaatcgcggacgttaaaacctgaaggctttgtggtaaaagcaaaatcgaaaggcattccgcttggcggtattccttcacctagcactgaacagtctgctaaaaaagtacgcaaaaaggcagaaaacgctcataatacgccgctgcttgtgctatacggttcaaatgcgggaacagctgaaggaacggcgcgtgatttagcagatattgcaatgagcaaaggatttgcaccgcaggtcgcaacgcttgattcacacgccggtaatcttccgcgcgaaggagctgtattaattgtaacggcgtcttataacggtcatccgcctgataacgcaaagcaatttgtcgactggttagaccaagcgtctccggatgaagtaaaaggcgttcgctactccgtatttggatgcggcgataaaaattgggcggggacgtatcaaaaagtgcctgcttttatcgatgaaacgcttgccgctaaaggggcagaaaacatcgctgaccgcggtgaagcagatgcaagcgacgactttgaaggcacatatgaagaatggcgtgatcatatgtggagtgacgtagcagcctactttggtctcgacattgaaaacagtgaagataataaatctactctttcacttcaatttgtcgacagcgccgcggatatgccgcttgcgaaaatgcacggtgcgttttcaacgaacgtcgtagcaagcaaagaacttcaacagccaggcagtgcacgaagcacgcgacatcttgaaattgaacttccaaaagaagcttcttatcaagaaggagatcatttaggtgttattcctcgcaactatgaaggaatagtaaaccgtgtaacagcaaggttcggcctaagcgcatcacagcaaatccgtctggaagcagaagaagaaaaattagctcatttgccactcgctaaaacagtatccgtagaagagcttctgcaatacgtggagcttcaagatcctgttacgcgcacgcagcttcgcgcaatggctgctaaaacggtctgcccgccgcataaagtagagcttgaagccttgcttgaaaagcaagcctacaaagaacaagtgctggcaaaacgtttaacaatgcttgaactgcttgaaaaatacccggcgtgtgaaatgagtttcagcgaatttatcgcccttctgccaagcatacgcccgcgctattactcgatttcttcatcacctcgtgtcgatgaaaaacaagcaagcatcacggtcagcgttgtctcaggaccggcgtggagcggatatggagaatataaaggaattgcgtcgaactatcttgccgagctgcaagaaggagatacgattacgtgctttatttccacaccgcagtcagaatttacgctgccaaaagaccctgaaacgccgcttatcatggtcggaccgggaacaggcgtcgcgccgtttagaggctttgtgcaggcgcgcaaacagctaaaagaacaaggacagtcacttggagaagcacatttatacttcggctgccgttcacctcatgaagactatctgtatcaagaagagcttgaaaacgcccaaagcgaaggcatcattacgcttcataccgctttttctcgcatgccaaatcagccgaaaacatacgttcagcacgtaatggaacaagacggcaagaaattgattgaacttcttgatcaaggagcgcacttctatatttgcggagacggaagccaaatggcacctgccgttgaagcaacgcttatgaaaagctatgctgacgttcaccaagtgagtgaagcagacgctcgcttatggctgcagcagctagaagaaaaaggccgatacgcaaaagacgtgtggctgggg

SEQ ID NO: 522 - protein, 1049 aa, synthetic construct
  REGION 1..1049: note = variant of P450 oxidase from Bacillus megaterium
MTIKEMPQPKTFGELKNLPLLNTDKPVQALMRIADELGEIFKFEAPGSVTRYLSSQRLIKEACDESRFDKNLSQALKFARDFVGDGLSTSWTHEPNWKKAHNILVPSFSQHAMGRYHAMMVDIAVQLVQKWERLNADEHIEVSEDMTRLTLDTIGLCLFNYRFNSFYRDQPHPFIVSVVRALDEVMNKLQRANPDDPAYDENKRQCQEDIKVMNDYVDKIIADRKARGEQSHDLLTQMLNGKDPETGEPLDDGNIRQQIITFLIAGHQTTSGLLSFALYFLVKNPHVLQKVAEEAARVLVDPVPSYKQVKQLKYVGMVLNEALRLWPVAPMFSLYAKEDTVLGGEYPLTKGDEVMVLVPQLHRDKTIWGDDVEEFRPERFENPSAIPQHAFKPFGNGQRACIGQQFALHEATLVLGMMLKHFDFEDHTNYELVIKESRTLKPEGFVVKAKSKGIPLGGIPSPSTEQSAKKVRKKAENAHNTPLLVLYGSNAGTAEGTARDLADIAMSKGFAPQVATLDSHAGNLPREGAVLIVTASYNGHPPDNAKQFVDWLDQASPDEVKGVRYSVFGCGDKNWAGTYQKVPAFIDETLAAKGAENIADRGEADASDDFEGTYEEWRDHMWSDVAAYFGLDIENSEDNKSTLSLQFVDSAADMPLAKMHGAFSTNVVASKELQQPGSARSTRHLEIELPKEASYQEGDHLGVIPRNYEGIVNRVTARFGLSASQQIRLEAEEEKLAHLPLAKTVSVEELLQYVELQDPVTRTQLRAMAAKTVCPPHKVELEALLEKQAYKEQVLAKRLTMLELLEKYPACEMSFSEFIALLPSIRPRYYSISSSPRVDEKQASITVSVVSGPAWSGYGEYKGIASNYLAELQEGDTITCFISTPQSEFTLPKDPETPLIMVGPGTGVAPFRGFVQARKQLKEQGQSLGEAHLYFGCRSPHEDYLYQEELENAQSEGIITLHTAFSRMPNQPKTYVQHVMEQDGKKLIELLDQGAHFYICGDGSQMAPAVEATLMKSYADVHQVSEADARLWLQQLEEKGRYAKDVWLG

SEQ ID NO: 523 - DNA, 3147 bp, synthetic construct
  misc_feature 1..3147: note = variant of P450 oxidase from Bacillus megaterium
  source 1..3147: mol_type = other DNA
atgacaattaaggaaatgcctcagcctaagacgtttggagaacttaaaaatttaccgttattaaacacagataaaccggttcaagctttgatgcgtattgcggatgaattaggagaaatctttaaattcgaggcgcctggtagcgtaacgcgctatttatcaagtcagcgtctaattaaagaagcatgcgatgaatcacgctttgataaaaacttaagtcaagcgcttaaatttgcacgtgattttgttggagacgggctgtctacaagctggacgcatgaaccgaattggaaaaaagcgcataatatcttagttccaagctttagtcagcatgcaatggggcgttatcatgcgatgatggtcgatatcgccgtgcagcttgttcaaaagtgggagcgtctaaatgcagatgagcatattgaagtatcggaagacatgacacgtttaacgcttgatacaattggtctttgcctgtttaactatcgctttaacagcttttaccgagatcagcctcatccatttattgtgagtgtggttcgtgcactggatgaagtaatgaacaagctgcagcgagcaaatccagacgacccagcttatgatgaaaacaagcgccagtgtcaagaagatatcaaggtgatgaacgactatgtagataaaattattgcagatcgcaaagcaaggggtgaacaaagtcatgatttattaacgcagatgctaaacggaaaagatccagaaacgggtgagccgcttgatgacgggaacattcgtcagcaaattattacattcttaattgcgggacaccaaacgacaagtggtcttttatcatttgcgctgtatttcttagtgaaaaatccacatgtattacaaaaagtagcagaagaagcagcacgagttctagtagatcctgttccaagctacaaacaagtcaaacagcttaaatatgttggcatggtcttaaacgaagcgctgcgcttatggccagtagcgcctatgttttccctatatgcaaaagaagatacggtgcttggaggagaatatcctttaacgaaaggcgacgaagtaatggttctggtgcctcagcttcaccgtgataaaacaatttggggagacgatgtggaggagttccgtccagagcgttttgaaaatccaagtgcgattccgcagcatgcgtttaaaccgtttggaaacggtcagcgtgcgtgtatcggtcagcagttcgctcttcatgaagcaacgctggtacttggtatgatgctaaaacactttgactttgaagatcatacaaactacgagctcgttattaaagaatcgcggacgttaaaacctgaaggctttgtggtaaaagcaaaatcgaaaggcattccgcttggcggtattccttcacctagcactgaacagtctgctaaaaaagtacgcaaaaaggcagaaaacgctcataatacgccgctgcttgtgctatacggttcaaatgcgggaacagctgaaggaacggcgcgtgatttagcagatattgcaatgagcaaaggatttgcaccgcaggtcgcaacgcttgattcacacgccggtaatcttccgcgcgaaggagctgtattaattgtaacggcgtcttataacggtcatccgcctgataacgcaaagcaatttgtcgactggttagaccaagcgtctgcggatgaagtaaaaggcgttcgctactccgtatttggatgcggcgataaaaattgggcggggacgtatcaaaaagtgcctgcttttatcgatgaaacgcttgccgctaaaggggcagaaaacatcgctgaccgcggtgaagcagatgcaagcgacgactttgaaggcacatatgaagaatggcgtgatcatatgtggagtgacgtagcagcctactttaatctcgacattgaaaacagtgaagataataaatctactctttcacttcaatttgtcgacagcgccgcggatatgccgcttgcgaaaatgcacggtgcgttttcaacgaacgtcgtagcaagcaaagaacttcaacagccaggcagtgcacgaagcacgcgacatcttgaaattgaacttccaaaagaagcttcttatcaagaaggagatcatttaggtgttattcctcgcaactatgaaggaatagtaaaccgtgtaacagcaaggttcggcctaagcgcatcacagcaaatccgtctggaagcagaagaagaaaaattagctcatttgccactcgctaaaacagtatccgtagaagagcttctgcaatacgtggagcttcaagatcctgttacgcgcacgcagcttcgcgcaatggctgctaaaacggtctgcccgccgcataaagtagagcttgaagccttgcttgaaaagcaagcctacaaagaacaagtgctggcaaaacgtttaacaatgcttgaactgcttgaaaaatacccggcgtgtgaaatgagtttcagcgaatttatcgcccttctgccaagcatacgcccgcgctattactcgatttcttcatcacctcgtgtcgatgaaaaacaagcaagcatcacggtcagcgttgtctcaggaccggcgtggagcggatatggagaatataaaggaattgcgtcgaactatcttgccgagctgcaagaaggagatacgattacgtgctttatttccacaccgcagtcagaatttacgctgccaaaagaccctgaaacgccgcttatcatggtcggaccgggaacaggcgtcgcgccgtttagaggctttgtgcaggcgcgcaaacagctaaaagaaggtggacagtcacttggagaagcacatttatacttcggctgccgttcacctcatgaagactatctgtatcaagaagagcttgaaaacgcccaaagcgaaggcatcattacgcttcataccgctttttctcgcatgccgaatcagccgaaaacatacgttcagcacgtaatggaacaagacggcaagaaattgattgagcttcttgatcaaggagcgcacttctatatttgcggagacggaagccaaatggcacctgccgttgaagcaacgcttatgaaaagctatgctgacgttcaccaagtgagtgaagcagacgctcgcttatggctgcagcagctagaagaaaaaggccgatacgcaaaagacgtgtggctgggg

SEQ ID NO: 524 - protein, 1049 aa, synthetic construct
  REGION 1..1049: note = variant of P450 oxidase from Bacillus megaterium
MTIKEMPQPKTFGELKNLPLLNTDKPVQALMRIADELGEIFKFEAPGSVTRYLSSQRLIKEACDESRFDKNLSQALKFARDFVGDGLSTSWTHEPNWKKAHNILVPSFSQHAMGRYHAMMVDIAVQLVQKWERLNADEHIEVSEDMTRLTLDTIGLCLFNYRFNSFYRDQPHPFIVSVVRALDEVMNKLQRANPDDPAYDENKRQCQEDIKVMNDYVDKIIADRKARGEQSHDLLTQMLNGKDPETGEPLDDGNIRQQIITFLIAGHQTTSGLLSFALYFLVKNPHVLQKVAEEAARVLVDPVPSYKQVKQLKYVGMVLNEALRLWPVAPMFSLYAKEDTVLGGEYPLTKGDEVMVLVPQLHRDKTIWGDDVEEFRPERFENPSAIPQHAFKPFGNGQRACIGQQFALHEATLVLGMMLKHFDFEDHTNYELVIKESRTLKPEGFVVKAKSKGIPLGGIPSPSTEQSAKKVRKKAENAHNTPLLVLYGSNAGTAEGTARDLADIAMSKGFAPQVATLDSHAGNLPREGAVLIVTASYNGHPPDNAKQFVDWLDQASADEVKGVRYSVFGCGDKNWAGTYQKVPAFIDETLAAKGAENIADRGEADASDDFEGTYEEWRDHMWSDVAAYFNLDIENSEDNKSTLSLQFVDSAADMPLAKMHGAFSTNVVASKELQQPGSARSTRHLEIELPKEASYQEGDHLGVIPRNYEGIVNRVTARFGLSASQQIRLEAEEEKLAHLPLAKTVSVEELLQYVELQDPVTRTQLRAMAAKTVCPPHKVELEALLEKQAYKEQVLAKRLTMLELLEKYPACEMSFSEFIALLPSIRPRYYSISSSPRVDEKQASITVSVVSGPAWSGYGEYKGIASNYLAELQEGDTITCFISTPQSEFTLPKDPETPLIMVGPGTGVAPFRGFVQARKQLKEGGQSLGEAHLYFGCRSPHEDYLYQEELENAQSEGIITLHTAFSRMPNQPKTYVQHVMEQDGKKLIELLDQGAHFYICGDGSQMAPAVEATLMKSYADVHQVSEADARLWLQQLEEKGRYAKDVWLG

SEQ ID NO: 525 - DNA, 3147 bp, synthetic construct
  misc_feature 1..3147: note = variant of P450 oxidase from Bacillus megaterium
  source 1..3147: mol_type = other DNA
atgacaattaaggaaatgcctcagcctaagacgtttggagaacttaaaaatttaccgttattaaacacagataaaccggttcaagctttgatgcgtattgcggatgaattaggagaaatctttaaattcgaggcgcctggtagcgtaacgcgctatttatcaagtcagcgtctaattaaagaagcatgcgatgaatcacgctttgataaaaacttaagtcaagcgcttaaatttgcacgtgattttgttggagacgggctgtctacaagctggacgcatgaaccgaattggaaaaaagcgcataatatcttagttccaagctttagtcagcatgcaatggggcgttatcatgcgatgatggtcgatatcgccgtgcagcttgttcaaaagtgggagcgtctaaatgcagatgagcatattgaagtatcggaagacatgacacgtttaacgcttgatacaattggtctttgcctgtttaactatcgctttaacagcttttaccgagatcagcctcatccatttattgtgagtgtggttcgtgcactggatgaagtaatgaacaagctgcagcgagcaaatccagacgacccagcttatgatgaaaacaagcgccagtgtcaagaagatatcaaggtgatgaacgactatgtagataaaattattgcagatcgcaaagcaaggggtgaacaaagtcatgatttattaacgcagatgctaaacggaaaagatccagaaacgggtgagccgcttgatgacgggaacattcgtcagcaaattattacattcttaattgcgggacaccaaacgacaagtggtcttttatcatttgcgctgtatttcttagtgaaaaatccacatgtattacaaaaagtagcagaagaagcagcacgagttctagtagatcctgttccaagctacaaacaagtcaaacagcttaaatatgttggcatggtcttaaacgaagcgctgcgcttatggccagtagcgcctatgttttccctatatgcaaaagaagatacggtgcttggaggagaatatcctttaacgaaaggcgacgaagtaatggttctggtgcctcagcttcaccgtgataaaacaatttggggagacgatgtggaggagttccgtccagagcgttttgaaaatccaagtgcgattccgcagcatgcgtttaaaccgtttggaaacggtcagcgtgcgtgtatcggtcagcagttcgctcttcatgaagcaacgctggtacttggtatgatgctaaaacactttgactttgaagatcatacaaactacgagctcgttattaaagaatcgcggacgttaaaacctgaaggctttgtggtaaaagcaaaatcgaaaggcattccgcttggcggtattccttcatggagcactgaacagtctgctaaaaaagtacgcaaaaaggcagaaaacgctcataatacgccgctgcttgtgctatacggttcaaatgcgggaacagctgaaggaacggcgcgtgatttagcagatattgcaatgagcaaaggatttgcaccgcaggtcgcaacgcttgattcacacgccggtaatcttccgcgcgaaggagctgtattaattgtaacggcgtcttataacggtcatccgcctgataacgcaaagcaatttgtcgactggttagaccaagcgtctgcggatgaagtaaaaggcgttcgctactccgtatttggatgcggcgataaaaattgggcggggacgtatcaaaaagtgcctgcttttatcgatgaaacgcttgccgctaaaggggcagaaaacatcgctgaccgcggtgaagcagatgcaagcgacgactttgaaggcacatatgaagaatggcgtgatcatatgtggagtgacgtagcagcctactttggtctcgacattgaaaacagtgaagataataaatctactctttcacttcaatttgtcgacagcgccgcggatatgccgcttgcgaaaatgcacggtgcgttttcaacgaacgtcgtagcaagcaaagaacttcaacagccaggcagtgcacgaagcacgcgacatcttgaaattgaacttccaaaagaagcttcttatcaagaaggagatcatttaggtgttattcctcgcaactatgaaggaatagtaaaccgtgtaacagcaaggttcggcctaagcgcatcacagcaaatccgtctggaagcagaagaagaaaaattagctcatttgccactcgctaaaacagtatccgtagaagagcttctgcaatacgtggagcttcaagatcctgttacgcgcacgcagcttcgcgcaatggctgctaaaacggtctgcccgccgcataaagtagagcttgaagccttgcttcgtaaaccggcctacaaagaacaagtgctggcaaaacgtttaacaatgcttgaactgcttgaaaaatacccggcgtgtgaaatgaagttcagcgaatttatcgcccttctgccaagcatacgcccgcgctattactcgatttcttcatcacctcgtgtcgatgaaaaacaagcaagcatcacggtcagcgttgtctcaggaccggcgtggagcggatatggagaatataaaggaattgcgtcgaactatcttgccgagctgcaagaaggagatacgattacgtgctttatttccacaccgcagtcagaatttacgctgccaaaagaccctgaaacgccgcttatcatggtcggaccgggaacaggcgtcgcgccgtttagaggctttgtgcaggcgcgcaaacagctaaaagaacaaggacagtcacttggagaagcacatttatacttcggctgccgttcacctcatgaagactatctgtatcaagaagagcttgaaaacgcccaaagcgaaggcatcattacgcttcataccgctttttctcgcatggggaatcagccgaaaacatacgttcagcacgtaatggaacaagacggcaagaaattgattgaacttcttgatcaaggagcgcacttctatatttgcggagacggaagccaaatggcacctgccgttgaagcaacgcttatgaaaagctatgctgacgttcaccaagtgagtgaagcagacgctcgcttatggctgcagcagctagaagaaaaaggccgatacgcaaaagacgtgtggctgggg

SEQ ID NO: 526 - protein, 1049 aa, synthetic construct
  REGION 1..1049: note = variant of P450 oxidase from Bacillus megaterium
MTIKEMPQPKTFGELKNLPLLNTDKPVQALMRIADELGEIFKFEAPGSVTRYLSSQRLIKEACDESRFDKNLSQALKFARDFVGDGLSTSWTHEPNWKKAHNILVPSFSQHAMGRYHAMMVDIAVQLVQKWERLNADEHIEVSEDMTRLTLDTIGLCLFNYRFNSFYRDQPHPFIVSVVRALDEVMNKLQRANPDDPAYDENKRQCQEDIKVMNDYVDKIIADRKARGEQSHDLLTQMLNGKDPETGEPLDDGNIRQQIITFLIAGHQTTSGLLSFALYFLVKNPHVLQKVAEEAARVLVDPVPSYKQVKQLKYVGMVLNEALRLWPVAPMFSLYAKEDTVLGGEYPLTKGDEVMVLVPQLHRDKTIWGDDVEEFRPERFENPSAIPQHAFKPFGNGQRACIGQQFALHEATLVLGMMLKHFDFEDHTNYELVIKESRTLKPEGFVVKAKSKGIPLGGIPSWSTEQSAKKVRKKAENAHNTPLLVLYGSNAGTAEGTARDLADIAMSKGFAPQVATLDSHAGNLPREGAVLIVTASYNGHPPDNAKQFVDWLDQASADEVKGVRYSVFGCGDKNWAGTYQKVPAFIDETLAAKGAENIADRGEADASDDFEGTYEEWRDHMWSDVAAYFGLDIENSEDNKSTLSLQFVDSAADMPLAKMHGAFSTNVVASKELQQPGSARSTRHLEIELPKEASYQEGDHLGVIPRNYEGIVNRVTARFGLSASQQIRLEAEEEKLAHLPLAKTVSVEELLQYVELQDPVTRTQLRAMAAKTVCPPHKVELEALLRKPAYKEQVLAKRLTMLELLEKYPACEMKFSEFIALLPSIRPRYYSISSSPRVDEKQASITVSVVSGPAWSGYGEYKGIASNYLAELQEGDTITCFISTPQSEFTLPKDPETPLIMVGPGTGVAPFRGFVQARKQLKEQGQSLGEAHLYFGCRSPHEDYLYQEELENAQSEGIITLHTAFSRMGNQPKTYVQHVMEQDGKKLIELLDQGAHFYICGDGSQMAPAVEATLMKSYADVHQVSEADARLWLQQLEEKGRYAKDVWLG

SEQ ID NO: 527 - DNA, 3147 bp, synthetic construct
  misc_feature 1..3147: note = variant of P450 oxidase from Bacillus megaterium
  source 1..3147: mol_type = other DNA
atgacaattaaggaaatgcctcagcctaagacgtttggagaacttaaaaatttaccgttattaaacacagataaaccggttcaagctttgatgcgtattgcggatgaattaggagaaatctttaaattcgaggcgcctggtagcgtaacgcgctatttatcaagtcagcgtctaattaaagaagcatgcgatgaatcacgctttgataaaaacttaagtcaagcgcttaaatttgcacgtgattttgttggagacgggctgtctacaagctggacgcatgaaccgaattggaaaaaagcgcataatatcttagttccaagctttagtcagcatgcaatggggcgttatcatgcgatgatggtcgatatcgccgtgcagcttgttcaaaagtgggagcgtctaaatgcagatgagcatattgaagtatcggaagacatgacacgtttaacgcttgatacaattggtctttgcctgtttaactatcgctttaacagcttttaccgagatcagcctcatccatttattgtgagtgtggttcgtgcactggatgaagtaatgaacaagctgcagcgagcaaatccagacgacccagcttatgatgaaaacaagcgccagtgtcaagaagatatcaaggtgatgaacgactatgtagataaaattattgcagatcgcaaagcaaggggtgaacaaagtcatgatttattaacgcagatgctaaacggaaaagatccagaaacgggtgagccgcttgatgacgggaacattcgtcagcaaattattacattcttaattgcgggacaccaaacgacaagtggtcttttatcatttgcgctgtatttcttagtgaaaaatccacatgtattacaaaaagtagcagaagaagcagcacgagttctagtagatcctgttccaagctacaaacaagtcaaacagcttaaatatgttggcatggtcttaaacgaagcgctgcgcttatggccagtagcgcctatgttttccctatatgcaaaagaagatacggtgcttggaggagaatatcctttaacgaaaggcgacgaagtaatggttctggtgcctcagcttcaccgtgataaaacaatttggggagacgatgtggaggagttccgtccagagcgttttgaaaatccaagtgcgattccgcagcatgcgtttaaaccgtttggaaacggtcagcgtgcgtgtatcggtcagcagttcgctcttcatgaagcaacgctggtacttggtatgatgctaaaacactttgactttgaagatcatacaaactacgagctcgttattaaagaatcgcggacgttaaaacctgaaggctttgtggtaaaagcaaaatcgaaaggcattccgcttggcggtattccttcacctagcactgaacagtctgctaaaaaagtacgcaaaaaggcagaaaacgctcataatacgccgctgcttgtgctatacggttcaaatgcgggaacagctgaaggaacggcgcgtgatttagcagatattgcaatgagcaaaggatttgcaccgcaggtcgcaacgcttgattcacacgccggtaatcttccgcgcgaaggagctgtattaattgtaacggcgtcttataacggtcatccgcctgataacgcaaagcaatttgtcgactggttagaccaagcgtctccggatgaagtaaaaggcgttcgctactccgtatttggatgcggcgataaaaattgggcggggacgtatcaaaaagtgcctgcttttatcgatgaaacgcttgccgctaaaggggcagaaaacatcgctgaccgcggtgaagcagatgcaagcgacgactttgaaggcacatatgaagaatggcgtgatcatatgtggagtgacgtagcagcctactttaacctcgacattgaaaacagtgaagataataaatctactctttcacttcaatttgtcgacagcgccgcggatatgccgcttgcgaaaatgcacggtgcgttttcaacgaacgtcgtagcaagcaaagaacttcaacagccaggcagtgcacgaagcacgcgacatcttgaaattgaacttccaaaagaagcttcttatcaagaaggagatcatttaggtgttattcctcgcaactatgaaggaatagtaaaccgtgtaacagcaaggttcggcctaagcgcatcacagcaaatccgtctggaagcagaagaagaaaaattagctcatttgccactcgctaaaacagtatccgtagaagagcttctgcaatacgtggagcttcaagatcctgttacgcgcacgcagcttcgcgcaatggctgctaaaacggtctgcccgccgcataaagtagagcttgaagccttgcttgtgaaacaggcctacaaagaacaagtgctggcaaaacgtttaacaatgcttgaactgcttgaaaaatacccggcgtgtgaaatgaagttcagcgaatttatcgcccttctgccaagcatacgcccgcgctattactcgatttcttcatcacctcgtgtcgatgaaaaacaagcaagcatcacggtcagcgttgtctcaggaccggcgtggagcggatatggagaatataaaggaattgcgtcgaactatcttgccgagctgcaagaaggagatacgattacgtgctttatttccacaccgcagtcagaatttacgctgccaaaagaccctgaaacgccgcttatcatggtcggaccgggaacaggcgtcgcgccgtttagaggctttgtgcaggcgcgcaaacagctaaaagaacaaggacagtcacttggagaagcacatttatacttcggctgccgttcacctcatgaagactatctgtatcaagaagagcttgaaaacgcccaaagcgaaggcatcattacgcttcataccgctttttctcgcatgccaaatcagccgaaaacatacgttcagcacgtaatggaacaagacggcaagaaattgattgagcttcttgatcaaggagcgcacttctatatttgcggagacggaagccaaatggcacctgccgttgaagcaacgcttatgaaaagctatgctgacgttcaccaagtgagtgaagcagacgctcgcttatggctgcagcagctagaagaaaaaggccgatacgcaaaagacgtgtggctgggg

SEQ ID NO: 528 - protein, 1049 aa, synthetic construct
  REGION 1..1049: note = variant of P450 oxidase from Bacillus megaterium
MTIKEMPQPKTFGELKNLPLLNTDKPVQALMRIADELGEIFKFEAPGSVTRYLSSQRLIKEACDESRFDKNLSQALKFARDFVGDGLSTSWTHEPNWKKAHNILVPSFSQHAMGRYHAMMVDIAVQLVQKWERLNADEHIEVSEDMTRLTLDTIGLCLFNYRFNSFYRDQPHPFIVSVVRALDEVMNKLQRANPDDPAYDENKRQCQEDIKVMNDYVDKIIADRKARGEQSHDLLTQMLNGKDPETGEPLDDGNIRQQIITFLIAGHQTTSGLLSFALYFLVKNPHVLQKVAEEAARVLVDPVPSYKQVKQLKYVGMVLNEALRLWPVAPMFSLYAKEDTVLGGEYPLTKGDEVMVLVPQLHRDKTIWGDDVEEFRPERFENPSAIPQHAFKPFGNGQRACIGQQFALHEATLVLGMMLKHFDFEDHTNYELVIKESRTLKPEGFVVKAKSKGIPLGGIPSPSTEQSAKKVRKKAENAHNTPLLVLYGSNAGTAEGTARDLADIAMSKGFAPQVATLDSHAGNLPREGAVLIVTASYNGHPPDNAKQFVDWLDQASPDEVKGVRYSVFGCGDKNWAGTYQKVPAFIDETLAAKGAENIADRGEADASDDFEGTYEEWRDHMWSDVAAYFNLDIENSEDNKSTLSLQFVDSAADMPLAKMHGAFSTNVVASKELQQPGSARSTRHLEIELPKEASYQEGDHLGVIPRNYEGIVNRVTARFGLSASQQIRLEAEEEKLAHLPLAKTVSVEELLQYVELQDPVTRTQLRAMAAKTVCPPHKVELEALLVKQAYKEQVLAKRLTMLELLEKYPACEMKFSEFIALLPSIRPRYYSISSSPRVDEKQASITVSVVSGPAWSGYGEYKGIASNYLAELQEGDTITCFISTPQSEFTLPKDPETPLIMVGPGTGVAPFRGFVQARKQLKEQGQSLGEAHLYFGCRSPHEDYLYQEELENAQSEGIITLHTAFSRMPNQPKTYVQHVMEQDGKKLIELLDQGAHFYICGDGSQMAPAVEATLMKSYADVHQVSEADARLWLQQLEEKGRYAKDVWLG

SEQ ID NO: 529 - DNA, 3147 bp, synthetic construct
  misc_feature 1..3147: note = variant of P450 oxidase from Bacillus megaterium
  source 1..3147: mol_type = other DNA
atgacaattaaggaaatgcctcagcctaagacgtttggagaacttaaaaatttaccgttattaaacacagataaaccggttcaagctttgatgcgtattgcggatgaattaggagaaatctttaaattcgaggcgcctggtagcgtaacgcgctatttatcaagtcagcgtctaattaaagaagcatgcgatgaatcacgctttgataaaaacttaagtcaagcgcttaaatttgcacgtgattttgttggagacgggctgtctacaagctggacgcatgaaccgaattggaaaaaagcgcataatatcttagttccaagctttagtcagcatgcaatggggcgttatcatgcgatgatggtcgatatcgccgtgcagcttgttcaaaagtgggagcgtctaaatgcagatgagcatattgaagtatcggaagacatgacacgtttaacgcttgatacaattggtctttgcctgtttaactatcgctttaacagcttttaccgagatcagcctcatccatttattgtgagtgtggttcgtgcactggatgaagtaatgaacaagctgcagcgagcaaatccagacgacccagcttatgatgaaaacaagcgccagtgtcaagaagatatcaaggtgatgaacgactatgtagataaaattattgcagatcgcaaagcaaggggtgaacaaagtcatgatttattaacgcagatgctaaacggaaaagatccagaaacgggtgagccgcttgatgacgggaacattcgtcagcaaattattacattcttaattgcgggacaccaaacgacaagtggtcttttatcatttgcgctgtatttcttagtgaaaaatccacatgtattacaaaaagtagcagaagaagcagcacgagttctagtagatcctgttccaagctacaaacaagtcaaacagcttaaatatgttggcatggtcttaaacgaagcgctgcgcttatggccagtagcgcctatgttttccctatatgcaaaagaagatacggtgcttggaggagaatatcctttaacgaaaggcgacgaagtaatggttctggtgcctcagcttcaccgtgataaaacaatttggggagacgatgtggaggagttccgtccagagcgttttgaaaatccaagtgcgattccgcagcatgcgtttaaaccgtttggaaacggtcagcgtgcgtgtatcggtcagcagttcgctcttcatgaagcaacgctggtacttggtatgatgctaaaacactttgactttgaagatcatacaaactacgagctcgttattaaagaatcgcggacgttaaaacctgaaggctttgtggtaaaagcaaaatcgaaaggcattccgcttggcggtattccttcaccaagcactgaacagtctgctaaaaaagtacgcaaaaaggcagaaaacgctcataatacgccgctgcttgtgctatacggttcaaatgcgggaacagctgaaggaacggcgcgtgatttagcagatattgcaatgagcaaaggatttgcaccgcaggtcgcaacgcttgattcacacgccggtaatcttccgcgcgaaggagctgtattaattgtaacggcgtcttataacggtcatccgcctgataacgcaaagcaatttgtcgactggttagaccaagcgtctgctgatgaagtaaaaggcgttcgctactccgtatttggatgcggcgataaaaattgggcggggacgtatcaaaaagtgcctgcttttatcgatgaaacgcttgccgctaaaggggcagaaaacatcgctgaccgcggtgaagcagatgcaagcgacgactttgaaggcacatatgaagaatggcgtgatcatatgtggagtgacgtagcagcctactttaacctcgacattgaaaacagtgaagataataaatctactctttcacttcaatttgtcgacagcgccgcggatatgccgcttgcgaaaatgcacggtgcgttttcaacgaacgtcgtagcaagcaaagagcttcaacagccaggcagtgcacgaagcacgcgacatcttgaaattgaacttccaaaagaagcttcttatcaagaaggagatcatttaggtgttattcctcgcaactatgaaggaatagtaaaccgtgtaacagcaaggttcggcctaagcgcatcacagctgatccgtctggaagcagaagaagaaaaattagctcatttgccactcgctaaaacagtatccgtagaagagcttctgcaatacgtggagcttcaagatcctgttacgcgcacgcagcttcgcgcaatggctgctaaaacggtctgcccgccgcataaagtagagcttgaagccttgcttgaaaagcaggcctacaaagaacaagtgctggcaaaacgtttaacaatgcttgaactgcttgaaaaatacccggcgtgtgaaatgaagttcagcgaatttatcgcccttctgccaagcatacgcccgcgctattactcgatttcttcatcacctcgtgtcgatgaaaaacaagcaagcatcacggtcagcgttgtctcaggaccggcgtggagcggatatggagaatataaaggaattgcgtcgaactatcttgccgagctgcaagaaggagatacgattacgtgctttatttccacaccgcagtcagaatttacgctgccaaaagaccctgaaacgccgcttatcatggtcggaccgggaacaggcgtcgcgccgtttagaggctttgtgcaggcgcgcaaacagctaaaagaacaaggacagtcacttggagaagcacatttatacttcggctgccgttcacctcatgaagactatctgtatcaagaagagcttgaaaacgcccaaagcgaaggcatcattacgcttcataccgctttttctcgcatgccgaatcagccgaaaacatacgttcagcacgtaatggaacaagacggcaagaaattgattgaacttcttgatcaaggagcgcacttctatatttgcggagacggaagccaaatggcacctgccgttgaagcaacgcttatgaaaagctatgctgacgttcaccaagtgagtgaagcagacgctcgcttatggctgcagcagctagaagaaaaaggccgatacgcaaaagacgtgtggctgggg

SEQ ID NO: 530 - protein, 1049 aa, synthetic construct
  REGION 1..1049: note = variant of P450 oxidase from Bacillus megaterium
MTIKEMPQPKTFGELKNLPLLNTDKPVQALMRIADELGEIFKFEAPGSVTRYLSSQRLIKEACDESRFDKNLSQALKFARDFVGDGLSTSWTHEPNWKKAHNILVPSFSQHAMGRYHAMMVDIAVQLVQKWERLNADEHIEVSEDMTRLTLDTIGLCLFNYRFNSFYRDQPHPFIVSVVRALDEVMNKLQRANPDDPAYDENKRQCQEDIKVMNDYVDKIIADRKARGEQSHDLLTQMLNGKDPETGEPLDDGNIRQQIITFLIAGHQTTSGLLSFALYFLVKNPHVLQKVAEEAARVLVDPVPSYKQVKQLKYVGMVLNEALRLWPVAPMFSLYAKEDTVLGGEYPLTKGDEVMVLVPQLHRDKTIWGDDVEEFRPERFENPSAIPQHAFKPFGNGQRACIGQQFALHEATLVLGMMLKHFDFEDHTNYELVIKESRTLKPEGFVVKAKSKGIPLGGIPSPSTEQSAKKVRKKAENAHNTPLLVLYGSNAGTAEGTARDLADIAMSKGFAPQVATLDSHAGNLPREGAVLIVTASYNGHPPDNAKQFVDWLDQASADEVKGVRYSVFGCGDKNWAGTYQKVPAFIDETLAAKGAENIADRGEADASDDFEGTYEEWRDHMWSDVAAYFNLDIENSEDNKSTLSLQFVDSAADMPLAKMHGAFSTNVVASKELQQPGSARSTRHLEIELPKEASYQEGDHLGVIPRNYEGIVNRVTARFGLSASQLIRLEAEEEKLAHLPLAKTVSVEELLQYVELQDPVTRTQLRAMAAKTVCPPHKVELEALLEKQAYKEQVLAKRLTMLELLEKYPACEMKFSEFIALLPSIRPRYYSISSSPRVDEKQASITVSVVSGPAWSGYGEYKGIASNYLAELQEGDTITCFISTPQSEFTLPKDPETPLIMVGPGTGVAPFRGFVQARKQLKEQGQSLGEAHLYFGCRSPHEDYLYQEELENAQSEGIITLHTAFSRMPNQPKTYVQHVMEQDGKKLIELLDQGAHFYICGDGSQMAPAVEATLMKSYADVHQVSEADARLWLQQLEEKGRYAKDVWLG

SEQ ID NO: 531 - DNA, 3147 bp, synthetic construct
  misc_feature 1..3147: note = variant of P450 oxidase from Bacillus megaterium
  source 1..3147: mol_type = other DNA
atgacaattaaggaaatgcctcagcctaagacgtttggagaacttaaaaatttaccgttattaaacacagataaaccggttcaagctttgatgcgtattgcggatgaattaggagaaatctttaaattcgaggcgcctggtagcgtaacgcgctatttatcaagtcagcgtctaattaaagaagcatgcgatgaatcacgctttgataaaaacttaagtcaagcgcttaaatttgcacgtgattttgttggagacgggctgtctacaagctggacgcatgaaccgaattggaaaaaagcgcataatatcttagttccaagctttagtcagcatgcaatggggcgttatcatgcgatgatggtcgatatcgccgtgcagcttgttcaaaagtgggagcgtctaaatgcagatgagcatattgaagtatcggaagacatgacacgtttaacgcttgatacaattggtctttgcctgtttaactatcgctttaacagcttttaccgagatacgcctcatccatttattgtgagtgtggttcgtgcactggatgaagtaatgaacaagctgcagcgagcaaatccagacgacccagcttatgatgaaaacaagcgccagtgtcaagaagatatcaaggtgatgaacgactatgtagataaaattattgcagatcgcaaagcaaggggtgaacaaagtcatgatttattaacgcagatgctaaacggaaaagatccagaaacgggtgagccgcttgatgacgggaacattcgtcagcaaattattacattcttaattgcgggacaccaaacgacaagtggtcttttatcatttgcgctgtatttcttagtgaaaaatccacatgtattacaaaaagtagcagaagaagcagcacgagttctagtagatcctgttccaagctacaaacaagtcaaacagcttaaatatgttggcatggtcttaaacgaagcgctgcgcttatggccagtagcgcctatgttttccctatatgcaaaagaagatacggtgcttggaggagaatatcctttaacgaaaggcgacgaagtaatggttctggtgcctcagcttcaccgtgataaaacaatttggggagacgatgtggaggagttccgtccagagcgttttgaaaatccaagtgcgattccgcagcatgcgtttaaaccgtttggaaacggtcagcgtgcgtgtatcggtcagcagttcgctcttcatagtgcaacgctggtacttggtatgatgctaaaacactttgactttgaagatcatacaaactacgagctcgttattaaagaatcgcggacgttaaaacctgaaggctttgtggtaaaagcaaaatcgaaaggcattccgcttggcggtattccttcacctagcactgaacagtctgctaaaaaagtacgcaaaaaggcagaaaacgctcataatacgccgctgcttgtgctatacggttcaaatgcgggaacagctgaaggaacggcgcgtgatttagcagatattgcaatgagcaaaggatttgcaccgcaggtcgcaacgcttgattcacacgccggtaatcttccgcgcgaaggagctgtattaattgtaacggcgtcttataacggtcatccgcctgataacgcaaagcaatttgtcgactggttagaccaagcgtctgcggatgaagtaaaaggcgttcgctactccgtatttggatgcggcgataaaaattgggcggggacgtatcaaaaagtgcctgcttttatcgatgaaacgcttgccgctaaaggggcagaaaacatcgctgaccgcggtgaagcagatgcaagcgacgactttgaaggcacatatgaagaatggcgtgatcatatgtggagtgacgtagcagcctactttaatctcgacattgaaaacagtgaagataataaatctactctttcacttcaatttgtcgacagcgccgcggatatgccgcttgcgaaaatgcacggtgcgttttcaacgaacgtcgtagcaagcaaagaacttcaacagccaggcagtgcacgaagcacgcgacatcttgaaattgaacttccaaaagaagcttcttatcaagaaggagatcatttaggtgttattcctcgcaactatgaaggaatagtaaaccgtgtaacagcaaggttcggcctaagcgcatcacagcagatccgtctggaagcagaagaagaaaaattagctcatttgccactcgctaaaacagtatccgtagaagagcttctgcaatacgtggagcttcaagatcctgttacgcgcacgcagcttcgcgcaatggctgctaaaacggtctgcccgccgcataaagtagagcttgaagccttgcttgaaaagcaagcctacaaagaacaagtgctggcaaaacgtttaacaatgcttgaactgcttgaaaaatacccggcgtgtgaaatgaaattcagcgaatttatcgcccttctgccaagcatacgcccgcgctattactcgatttcttcatcacctcgtgtcgatgaaaaacaagcaagcatcacggtcagcgttgtctcaggaccggcgtggagcggatatggagaatataaaggaattgcgtcgaactatcttgccgagctgcaagaaggagatacgattacgtgctttatttccacaccgcagtcagaatttacgctgccaaaagaccctgaaacgccgcttatcatggtcggaccgggaacaggcgtcgcgccgtttagaggctttgtgcaggcgcgcaaacagctaaaagaaggtggacagtcacttggagaagcacatttatacttcggctgccgttcacctcatgaagactatctgtatcaagaagagcttgaaaacgcccaaagcgaaggcatcattacgcttcataccgctttttctcgcatgccaaatcagccgaaaacatacgttcagcacgtaatggaacaagacggcaagaaattgattgaacttcttgatcaaggagcgcacttctatatttgcggagacggaagccaaatggcacctgccgttgaagcaacgcttatgaaaagctatgctgacgttcaccaagtgagtgaagcagacgctcgcttatggctgcagcagctagaagaaaaaggccgatacgcaaaagacgtgtggctgggg

SEQ ID NO: 532 - protein, 1049 aa, synthetic construct
  REGION 1..1049: note = variant of P450 oxidase from Bacillus megaterium
MTIKEMPQPKTFGELKNLPLLNTDKPVQALMRIADELGEIFKFEAPGSVTRYLSSQRLIKEACDESRFDKNLSQALKFARDFVGDGLSTSWTHEPNWKKAHNILVPSFSQHAMGRYHAMMVDIAVQLVQKWERLNADEHIEVSEDMTRLTLDTIGLCLFNYRFNSFYRDTPHPFIVSVVRALDEVMNKLQRANPDDPAYDENKRQCQEDIKVMNDYVDKIIADRKARGEQSHDLLTQMLNGKDPETGEPLDDGNIRQQIITFLIAGHQTTSGLLSFALYFLVKNPHVLQKVAEEAARVLVDPVPSYKQVKQLKYVGMVLNEALRLWPVAPMFSLYAKEDTVLGGEYPLTKGDEVMVLVPQLHRDKTIWGDDVEEFRPERFENPSAIPQHAFKPFGNGQRACIGQQFALHSATLVLGMMLKHFDFEDHTNYELVIKESRTLKPEGFVVKAKSKGIPLGGIPSPSTEQSAKKVRKKAENAHNTPLLVLYGSNAGTAEGTARDLADIAMSKGFAPQVATLDSHAGNLPREGAVLIVTASYNGHPPDNAKQFVDWLDQASADEVKGVRYSVFGCGDKNWAGTYQKVPAFIDETLAAKGAENIADRGEADASDDFEGTYEEWRDHMWSDVAAYFNLDIENSEDNKSTLSLQFVDSAADMPLAKMHGAFSTNVVASKELQQPGSARSTRHLEIELPKEASYQEGDHLGVIPRNYEGIVNRVTARFGLSASQQIRLEAEEEKLAHLPLAKTVSVEELLQYVELQDPVTRTQLRAMAAKTVCPPHKVELEALLEKQAYKEQVLAKRLTMLELLEKYPACEMKFSEFIALLPSIRPRYYSISSSPRVDEKQASITVSVVSGPAWSGYGEYKGIASNYLAELQEGDTITCFISTPQSEFTLPKDPETPLIMVGPGTGVAPFRGFVQARKQLKEGGQSLGEAHLYFGCRSPHEDYLYQEELENAQSEGIITLHTAFSRMPNQPKTYVQHVMEQDGKKLIELLDQGAHFYICGDGSQMAPAVEATLMKSYADVHQVSEADARLWLQQLEEKGRYAKDVWLG

SEQ ID NO: 533 - DNA, 3147 bp, synthetic construct
  misc_feature 1..3147: note = variant of P450 oxidase from Bacillus megaterium
  source 1..3147: mol_type = other DNA
atgacaattaaggaaatgcctcagcctaagacgtttggagaacttaaaaatttaccgttattaaacacagataaaccggttcaagctttgatgcgtattgcggatgaattaggagaaatctttaaattcgaggcgcctggtagcgtaacgcgctatttatcaagtcagcgtctaattaaagaagcatgcgatgaatcacgctttgataaaaacttaagtcaagcgcttaaatttgcacgtgattttgttggagacgggctgtctacaagctggacgcatgaaccgaattggaaaaaagcgcataatatcttagttccaagctttagtcagcatgcaatggggcgttatcatgcgatgatggtcgatatcgccgtgcagcttgttcaaaagtgggagcgtctaaatgcagatgagcatattgaagtatcggaagacatgacacgtttaacgcttgatacaattggtctttgcctgtttaactatcgctttaacagcttttaccgagatcagcctcatccatttattgtgagtgtggttcgtgcactggatgaagtaatgaacaagctgcagcgagcaaatccagacgacccagcttatgatgaaaacaagcgccagtgtcaagaagatatcaaggtgatgaacgactatgtagataaaattattgcagatcgcaaagcaaggggtgaacaaagtcatgatttattaacgcagatgctaaacggaaaagatccagaaacgggtgagccgcttgatgacgggaacattcgtcagcaaattattacattcttaattgcgggacaccaaacgacaagtggtcttttatcatttgcgctgtatttcttagtgaaaaatccacatgtattacaaaaagtagcagaagaagcagcacgagttctagtagatcctgttccaagctacaaacaagtcaaacagcttaaatatgttggcatggtcttaaacgaagcgctgcgcttatggccagtagcgcctatgttttccctatatgcaaaagaagatacggtgcttggaggagaatatcctttaacgaaaggcgacgaagtaatggttctggtgcctcagcttcaccgtgataaaacaatttggggagacgatgtggaggagttccgtccagagcgttttgaaaatccaagtgcgattccgcagcatgcgtttaaaccgtttggaaacggtcagcgtgcgtgtatcggtcagcagttcgctcttcatgaagcaacgctggtacttggtatgatgctaaaacactttgactttgaagatcatacaaactacgagctcgttattaaagaatcgcggacgttaaaacctgaaggctttgtggtaaaagcaaaatcgaaaggcattccgcttggcggtattccttcacctagcactgaacagtctgctaaaaaagtacgcaaaaaggcagaaaacgctcataatacgccgctgcttgtgctatacggttcaaatgcgggaacagctgaaggaacggcgcgtgatttagcagatattgcaatgagcaaaggatttgcaccgcaggtcgcaacgcttgattcacacgccggtaatcttccgcgcgaaggagctgtattaattgtaacggcgtcttataacggtcatccgcctgataacgcaaagcaatttgtcgactggttagaccaagcgtctccggatgaagtaaaaggcgttcgctactccgtatttggatgcggcgataaaaattgggcggggacgtatcaaaaagtgcctgcttttatcgatgaaacgcttgccgctaaaggggcagaaaacatcgctgaccgcggtgaagcagatgcaagcgacgactttgaaggcacatatgaagaatggcgtgatcatatgtggagtgacgtagcagcctactttaacctcgacattgaaaacagtgaagataataaatctactctttcacttcaatttgtcgacagcgccgcggatatgccgcttgcgaaaatgcacggtgcgttttcaacgaacgtcgtagcaagcaaagaacttcaacagccaggcagtgcacgaagcacgcgacatcttgaaattgaacttccaaaagaagcttcttatcaagaaggagatcatttaggtgttattcctcgcaactatgaaggaatagtaaaccgtgtaacagcaaggttcggcctaagcgcatcacagcaaatccgtctggaagcagaagaagaaaaattagctcatttgccactcgctaaaacagtatccgtagaagagcttctgcaatacgtggagcttcaagatcctgttacgcgcacgcagcttcgcgcaatggctgctaaaacggtctgcccgccgcataaagtagagcttgaagccttgcttgaaaagcaagcctacaaagaacaagtgctggcaaaacgtttaacaatgcttgaactgcttgaaaaatacccggcgtgtgaaatgaagttcagcgaatttatcgcccttctgccaagcatacgcccgcgctattactcgatttcttcatcacctcgtgtcgatgaaaaacaagcaagcatcacggtcagcgttgtctcaggaccggcgtggagcggatatggagaatataaaggaattgcgtcgaactatcttgccgagctgcaagaaggagatacgattacgtgctttatttccacaccgcagtcagaatttacgctgccaaaagaccctgaaacgccgcttatcatggtcggaccgggaacaggcgtcgcgccgtttagaggctttgtgcaggcgcgcaaacagctaaaagaacaaggacagtcacttggagaagcacatttatacttcggctgccgttcacctcatgaagactatctgtatcaagaagagcttgaaaacgcccaaagcgaaggcatcattacgcttcataccgctttttctcgcatgccgaatcagccgaaaacatacgttcagcacgtaatggaacaagacggcaagaaattgattgaacttcttgatcaaggagcgcacttctatatttgcggagacggaagccaaatggcacctgccgttgaagcaacgcttatgaaaagctatgctgacgttcaccaagtgagtgaagcagacgctcgcttatggctgcagcagctagaagaaaaaggccgatacgcaaaagacgtgtggctgggg

SEQ ID NO: 534 - protein, 1049 aa, synthetic construct
  REGION 1..1049: note = variant of P450 oxidase from Bacillus megaterium
MTIKEMPQPKTFGELKNLPLLNTDKPVQALMRIADELGEIFKFEAPGSVTRYLSSQRLIKEACDESRFDKNLSQALKFARDFVGDGLSTSWTHEPNWKKAHNILVPSFSQHAMGRYHAMMVDIAVQLVQKWERLNADEHIEVSEDMTRLTLDTIGLCLFNYRFNSFYRDQPHPFIVSVVRALDEVMNKLQRANPDDPAYDENKRQCQEDIKVMNDYVDKIIADRKARGEQSHDLLTQMLNGKDPETGEPLDDGNIRQQIITFLIAGHQTTSGLLSFALYFLVKNPHVLQKVAEEAARVLVDPVPSYKQVKQLKYVGMVLNEALRLWPVAPMFSLYAKEDTVLGGEYPLTKGDEVMVLVPQLHRDKTIWGDDVEEFRPERFENPSAIPQHAFKPFGNGQRACIGQQFALHEATLVLGMMLKHFDFEDHTNYELVIKESRTLKPEGFVVKAKSKGIPLGGIPSPSTEQSAKKVRKKAENAHNTPLLVLYGSNAGTAEGTARDLADIAMSKGFAPQVATLDSHAGNLPREGAVLIVTASYNGHPPDNAKQFVDWLDQASPDEVKGVRYSVFGCGDKNWAGTYQKVPAFIDETLAAKGAENIADRGEADASDDFEGTYEEWRDHMWSDVAAYFNLDIENSEDNKSTLSLQFVDSAADMPLAKMHGAFSTNVVASKELQQPGSARSTRHLEIELPKEASYQEGDHLGVIPRNYEGIVNRVTARFGLSASQQIRLEAEEEKLAHLPLAKTVSVEELLQYVELQDPVTRTQLRAMAAKTVCPPHKVELEALLEKQAYKEQVLAKRLTMLELLEKYPACEMKFSEFIALLPSIRPRYYSISSSPRVDEKQASITVSVVSGPAWSGYGEYKGIASNYLAELQEGDTITCFISTPQSEFTLPKDPETPLIMVGPGTGVAPFRGFVQARKQLKEQGQSLGEAHLYFGCRSPHEDYLYQEELENAQSEGIITLHTAFSRMPNQPKTYVQHVMEQDGKKLIELLDQGAHFYICGDGSQMAPAVEATLMKSYADVHQVSEADARLWLQQLEEKGRYAKDVWLG

SEQ ID NO: 535 - DNA, 3147 bp, synthetic construct
  misc_feature 1..3147: note = variant of P450 oxidase from Bacillus megaterium
  source 1..3147: mol_type = other DNA
atgacaattaaggaaatgcctcagcctaagacgtttggagaacttaaaaatttaccgttattaaacacagataaaccggttcaagctttgatgcgtattgcggatgaattaggagaaatctttaaattcgaggcgcctggtagcgtaacgcgctatttatcaagtcagcgtctaattaaagaagcatgcgatgaatcacgctttgataaaaacttaagtcaagcgcttaaatttgcacgtgattttgttggagacgggctgtctacaagctggacgcatgaaccgaattggaaaaaagcgcataatatcttagttccaagctttagtcagcatgcaatggggcgttatcatgcgatgatggtcgatatcgccgtgcagcttgttcaaaagtgggagcgtctaaatgcagatgagcatattgaagtatcggaagacatgacacgtttaacgcttgatacaattggtctttgcctgtttaactatcgctttaacagcttttaccgagatcagcctcatccatttattgtgagtgtggttcgtgcactggatgaagtaatgaacaagctgcagcgagcaaatccagacgacccagcttatgatgaaaacaagcgccagtgtcaagaagatatcaaggtgatgaacgactatgtagataaaattattgcagatcgcaaagcaaggggtgaacaaagtcatgatttattaacgcagatgctaaacggaaaagatccagaaacgggtgagccgcttgatgacgggaacattcgtcagcaaattattacattcttaattgcgggacaccaaacgacaagtggtcttttatcatttgcgctgtatttcttagtgaaaaatccacatgtattacaaaaagtagcagaagaagcagcacgagttctagtagatcctgttccaagctacaaacaagtcaaacagcttaaatatgttggcatggtcttaaacgaagcgctgcgcttatggccagtagcgcctatgttttccctatatgcaaaagaagatacggtgcttggaggagaatatcctttaacgaaaggcgacgaagtaatggttctggtgcctcagcttcaccgtgataaaacaatttggggagacgatgtggaggagttccgtccagagcgttttgaaaatccaagtgcgattccgcagcatgcgtttaaaccgtttggaaacggtcagcgtgcgtgtatcggtcagcagttcgctcttcatgaagcaacgctggtacttggtatgatgctaaaacactttgactttgaagatcatacaaactacgagctcgttattaaagaatcgcggacgttaaaacctgaaggctttgtggtaaaagcaaaatcgaaaggcattccgcttggcggtattccttcaccaagcactgaacagtctgctaaaaaagtacgcaaaaaggcagaaaacgctcataatacgccgctgcttgtgctatacggttcaaatgcgggaacagctgaaggaacggcgcgtgatttagcagatattgcaatgagcaaaggatttgcaccgcaggtcgcaacgcttgattcacacgccggtaatcttccgcgcgaaggagctgtattaattgtaacggcgtcttataacggtcatccgcctgataacgcaaagcaatttgtcgactggttagaccaagcgtctgctgatgaagtaaaaggcgttcgctactccgtatttggatgcggcgataaaaattgggcggggacgtatcaaaaagtgcctgcttttatcgatgaaacgcttgccgctaaaggggcagaaaacatcgctgaccgcggtgaagcagatgcaagcgacgactttgaaggcacatatgaagaatggcgtgatcatatgtggagtgacgtagcagcctactttggtctcgacattgaaaacagtgaagataataaatctactctttcacttcaatttgtcgacagcgccgcggatatgccgcttgcgaaaatgcacggtgcgttttcaacgaacgtcgtagcaagcaaagaacttcaacagccaggcagtgcacgaagcacgcgacatcttgaaattgaacttccaaaagaagcttcttatcaagaaggagatcatttaggtgttattcctcgcaactatgaaggaatagtaaaccgtgtaacagcaaggttcggcctaagcgcatcacagcaaatccgtctggaagcagaagaagaaaaattagctcatttgccactcgctaaaacagtatccgtagaagagcttctgcaatacgtggagcttcaagatcctgttacgcgcacgcagcttcgcgcaatggctgctaaaacggtctgcccgccgcataaagtagagcttgaagccttgcttagtaaacaggcctacaaagaacaagtgctggcaaaacgtttaacaatgcttgaactgcttgaaaaatacccggcgtgtgaaatgagtttcagcgaatttatcgcccttctgccaagcatacgcccgcgctattactcgatttcttcatcacctcgtgtcgatgaaaaacaagcaagcatcacggtcagcgttgtctcaggaccggcgtggagcggatatggagaatataaaggaattgcgtcgaactatcttgccgagctgcaagaaggagatacgattacgtgctttatttccacaccgcagtcagaatttacgctgccaaaagaccctgaaacgccgcttatcatggtcggaccgggaacaggcgtcgcgccgtttagaggctttgtgcaggcgcgcaaacagctaaaagaacaaggacagtcacttggagaagcacatttatacttcggctgccgttcacctcatgaagactatctgtatcaagaagagcttgaaaacgcccaaagcgaaggcatcattacgcttcataccgctttttctcgcatgccaaatcagccgaaaacatacgttcagcacgtaatggaacaagacggcaagaaattgattgagcttcttgatcaaggagcgcacttctatatttgcggagacggaagccaaatggcacctgccgttgaagcaacgcttatgaaaagctatgctgacgttcaccaagtgagtgaagcagacgctcgcttatggctgcagcagctagaagaaaaaggccgatacgcaaaagacgtgtggctgggg

SEQ ID NO: 536 - protein, 1049 aa, synthetic construct
  REGION 1..1049: note = variant of P450 oxidase from Bacillus megaterium
MTIKEMPQPKTFGELKNLPLLNTDKPVQALMRIADELGEIFKFEAPGSVTRYLSSQRLIKEACDESRFDKNLSQALKFARDFVGDGLSTSWTHEPNWKKAHNILVPSFSQHAMGRYHAMMVDIAVQLVQKWERLNADEHIEVSEDMTRLTLDTIGLCLFNYRFNSFYRDQPHPFIVSVVRALDEVMNKLQRANPDDPAYDENKRQCQEDIKVMNDYVDKIIADRKARGEQSHDLLTQMLNGKDPETGEPLDDGNIRQQIITFLIAGHQTTSGLLSFALYFLVKNPHVLQKVAEEAARVLVDPVPSYKQVKQLKYVGMVLNEALRLWPVAPMFSLYAKEDTVLGGEYPLTKGDEVMVLVPQLHRDKTIWGDDVEEFRPERFENPSAIPQHAFKPFGNGQRACIGQQFALHEATLVLGMMLKHFDFEDHTNYELVIKESRTLKPEGFVVKAKSKGIPLGGIPSPSTEQSAKKVRKKAENAHNTPLLVLYGSNAGTAEGTARDLADIAMSKGFAPQVATLDSHAGNLPREGAVLIVTASYNGHPPDNAKQFVDWLDQASADEVKGVRYSVFGCGDKNWAGTYQKVPAFIDETLAAKGAENIADRGEADASDDFEGTYEEWRDHMWSDVAAYFGLDIENSEDNKSTLSLQFVDSAADMPLAKMHGAFSTNVVASKELQQPGSARSTRHLEIELPKEASYQEGDHLGVIPRNYEGIVNRVTARFGLSASQQIRLEAEEEKLAHLPLAKTVSVEELLQYVELQDPVTRTQLRAMAAKTVCPPHKVELEALLSKQAYKEQVLAKRLTMLELLEKYPACEMSFSEFIALLPSIRPRYYSISSSPRVDEKQASITVSVVSGPAWSGYGEYKGIASNYLAELQEGDTITCFISTPQSEFTLPKDPETPLIMVGPGTGVAPFRGFVQARKQLKEQGQSLGEAHLYFGCRSPHEDYLYQEELENAQSEGIITLHTAFSRMPNQPKTYVQHVMEQDGKKLIELLDQGAHFYICGDGSQMAPAVEATLMKSYADVHQVSEADARLWLQQLEEKGRYAKDVWLG

SEQ ID NO: 537 - DNA, 3147 bp, synthetic construct
  misc_feature 1..3147: note = variant of P450 oxidase from Bacillus megaterium
  source 1..3147: mol_type = other DNA
atgacaattaaggaaatgcctcagcctaagacgtttggagaacttaaaaatttaccgttattaaacacagataaaccggttcaagctttgatgcgtattgcggatgaattaggagaaatctttaaattcgaggcgcctggtagcgtaacgcgctatttatcaagtcagcgtctaattaaagaagcatgcgatgaatcacgctttgataaaaacttaagtcaagcgcttaaatttgcacgtgattttgttggagacgggctgtctacaagctggacgcatgaaccgaattggaaaaaagcgcataatatcttagttccaagctttagtcagcatgcaatggggcgttatcatgcgatgatggtcgatatcgccgtgcagcttgttcaaaagtgggagcgtctaaatgcagatgagcatattgaagtatcggaagacatgacacgtttaacgcttgatacaattggtctttgcctgtttaactatcgctttaacagcttttaccgagatcagcctcatccatttattgtgagtgtggttcgtgcactggatgaagtaatgaacaagctgcagcgagcaaatccagacgacccagcttatgatgaaaacaagcgccagtgtcaagaagatatcaaggtgatgaacgactatgtagataaaattattgcagatcgcaaagcaaggggtgaacaaagtcatgatttattaacgcagatgctaaacggaaaagatccagaaacgggtgagccgcttgatgacgggaacattcgtcagcaaattattacattcttaattgcgggacaccaaacgacaagtggtcttttatcatttgcgctgtatttcttagtgaaaaatccacatgtattacaaaaagtagcagaagaagcagcacgagttctagtagatcctgttccaagctacaaacaagtcaaacagcttaaatatgttggcatggtcttaaacgaagcgctgcgcttatggccagtagcgcctatgttttccctatatgcaaaagaagatacggtgcttggaggagaatatcctttaacgaaaggcgacgaagtaatggttctggtgcctcagcttcaccgtgataaaacaatttggggagacgatgtggaggagttccgtccagagcgttttgaaaatccaagtgcgattccgcagcatgcgtttaaaccgtttggaaacggtcagcgtgcgtgtatcggtcagcagttcgctcttcatgaagcaacgctggtacttggtatgatgctaaaacactttgactttgaagatcatacaaactacgagctcgttattaaagaatcgcggacgttaaaacctgaaggctttgtggtaaaagcaaaatcgaaaggcattccgcttggcggtattccttcaccaagcactgaacagtctgctaaaaaagtacgcaaaaaggcagaaaacgctcataatacgccgctgcttgtgctatacggttcaaatgcgggaacagctgaaggaacggcgcgtgatttagcagatattgcaatgagcaaaggatttgcaccgcaggtcgcaacgcttgattcacacgccggtaatcttccgcgcgaaggagctgtattaattgtaacggcgtcttataacggtcatccgcctgataacgcaaagcaatttgtcgactggttagaccaagcgtctccggatgaagtaaaaggcgttcgctactccgtatttggatgcggcgataaaaattgggcggggacgtatcaaaaagtgcctgcttttatcgatgaaacgcttgccgctaaaggggcagaaaacatcgctgaccgcggtgaagcagatgcaagcgacgactttgaaggcacatatgaagaatggcgtgatcatatgtggagtgacgtagcagcctactttaacctcgacattgaaaacagtgaagataataaatctactctttcacttcaatttgtcgacagcgccgcggatatgccgcttgcgaaaatgcacggtgcgttttcaacgaacgtcgtagcaagcaaagaacttcaacagccaggcagtgcacgaagcacgcgacatcttgaaattgaacttccaaaagaagcttcttatcaagaaggagatcatttaggtgttattcctcgcaactatgaaggaatagtaaaccgtgtaacagcaaggttcggcctaagcgcatcacagcaaatccgtctggaagcagaagaagaaaaattagctcatttgccactcgctaaaacagtatccgtagaagagcttctgcaatacgtggagcttcaagatcctgttacgcgcacgcagcttcgcgcaatggctgctaaaacggtctgcccgccgcataaagtagagcttgaagccttgcttcgtcgcccggcctacaaagaacaagtgctggcaaaacgtttaacaatgcttgaactgcttgaaaaatacccggcgtgtgaaatgaaattcagcgaatttatcgcccttctgccaagcatacgcccgcgctattactcgatttcttcatcacctcgtgtcgatgaaaaacaagcaagcatcacggtcagcgttgtctcaggaccggcgtggagcggatatggagaatataaaggaattgcgtcgaactatcttgccgagctgcaagaaggagatacgattacgtgctttatttccacaccgcagtcagaatttacgctgccaaaagaccctgaaacgccgcttatcatggtcggaccgggaacaggcgtcgcgccgtttagaggctttgtgcaggcgcgcaaacagctaaaagaacaaggacagtcacttggagaagcacatttatacttcggctgccgttcacctcatgaagactatctgtatcaagaagagcttgaaaacgcccaaagcgaaggcatcattacgcttcataccgctttttctcgcatgccgaatcagccgaaaacatacgttcagcacgtaatggaacaagacggcaagaaattgattgaacttcttgatcaaggagcgcacttctatatttgcggagacggaagccaaatggcacctgccgttgaagcaacgcttatgaaaagctatgctgacgttcaccaagtgagtgaagcagacgctcgcttatggctgcagcagctagaagaaaaaggccgatacgcaaaagacgtgtggctgggg

SEQ ID NO: 538 - protein, 1049 aa, synthetic construct
  REGION 1..1049: note = variant of P450 oxidase from Bacillus megaterium
MTIKEMPQPKTFGELKNLPLLNTDKPVQALMRIADELGEIFKFEAPGSVTRYLSSQRLIKEACDESRFDKNLSQALKFARDFVGDGLSTSWTHEPNWKKAHNILVPSFSQHAMGRYHAMMVDIAVQLVQKWERLNADEHIEVSEDMTRLTLDTIGLCLFNYRFNSFYRDQPHPFIVSVVRALDEVMNKLQRANPDDPAYDENKRQCQEDIKVMNDYVDKIIADRKARGEQSHDLLTQMLNGKDPETGEPLDDGNIRQQIITFLIAGHQTTSGLLSFALYFLVKNPHVLQKVAEEAARVLVDPVPSYKQVKQLKYVGMVLNEALRLWPVAPMFSLYAKEDTVLGGEYPLTKGDEVMVLVPQLHRDKTIWGDDVEEFRPERFENPSAIPQHAFKPFGNGQRACIGQQFALHEATLVLGMMLKHFDFEDHTNYELVIKESRTLKPEGFVVKAKSKGIPLGGIPSPSTEQSAKKVRKKAENAHNTPLLVLYGSNAGTAEGTARDLADIAMSKGFAPQVATLDSHAGNLPREGAVLIVTASYNGHPPDNAKQFVDWLDQASPDEVKGVRYSVFGCGDKNWAGTYQKVPAFIDETLAAKGAENIADRGEADASDDFEGTYEEWRDHMWSDVAAYFNLDIENSEDNKSTLSLQFVDSAADMPLAKMHGAFSTNVVASKELQQPGSARSTRHLEIELPKEASYQEGDHLGVIPRNYEGIVNRVTARFGLSASQQIRLEAEEEKLAHLPLAKTVSVEELLQYVELQDPVTRTQLRAMAAKTVCPPHKVELEALLRRPAYKEQVLAKRLTMLELLEKYPACEMKFSEFIALLPSIRPRYYSISSSPRVDEKQASITVSVVSGPAWSGYGEYKGIASNYLAELQEGDTITCFISTPQSEFTLPKDPETPLIMVGPGTGVAPFRGFVQARKQLKEQGQSLGEAHLYFGCRSPHEDYLYQEELENAQSEGIITLHTAFSRMPNQPKTYVQHVMEQDGKKLIELLDQGAHFYICGDGSQMAPAVEATLMKSYADVHQVSEADARLWLQQLEEKGRYAKDVWLG

SEQ ID NO: 539 - DNA, 3147 bp, synthetic construct
  misc_feature 1..3147: note = variant of P450 oxidase from Bacillus megaterium
  source 1..3147: mol_type = other DNA
atgacaattaaggaaatgcctcagcctaagacgtttggagaacttaaaaatttaccgttattaaacacagataaaccggttcaagctttgatgcgtattgcggatgaattaggagaaatctttaaattcgaggcgcctggtagcgtaacgcgctatttatcaagtcagcgtctaattaaagaagcatgcgatgaatcacgctttgataaaaacttaagtcaagcgcttaaatttgcacgtgattttgttggagacgggctgtctacaagctggacgcatgaaccgaattggaaaaaagcgcataatatcttagttccaagctttagtcagcatgcaatggggcgttatcatgcgatgatggtcgatatcgccgtgcagcttgttcaaaagtgggagcgtctaaatgcagatgagcatattgaagtatcggaagacatgacacgtttaacgcttgatacaattggtctttgcctgtttaactatcgctttaacagcttttaccgagatcagcctcatccatttattgtgagtgtggttcgtgcactggatgaagtaatgaacaagctgcagcgagcaaatccagacgacccagcttatgatgaaaacaagcgccagtgtcaagaagatatcaaggtgatgaacgactatgtagataaaattattgcagatcgcaaagcaaggggtgaacaaagtcatgatttattaacgcagatgctaaacggaaaagatccagaaacgggtgagccgcttgatgacgggaacattcgtcagcaaattattacattcttaattgcgggacaccaaacgacaagtggtcttttatcatttgcgctgtatttcttagtgaaaaatccacatgtattacaaaaagtagcagaagaagcagcacgagttctagtagatcctgttccaagctacaaacaagtcaaacagcttaaatatgttggcatggtcttaaacgaagcgctgcgcttatggccagtagcgcctatgttttccctatatgcaaaagaagatacggtgcttggaggagaatatcctttaacgaaaggcgacgaagtaatggttctggtgcctcagcttcaccgtgataaaacaatttggggagacgatgtggaggagttccgtccagagcgttttgaaaatccaagtgcgattccgcagcatgcgtttaaaccgtttggaaacggtcagcgtgcgtgtatcggtcagcagttcgctcttcatgaagcaacgctggtacttggtatgatgctaaaacactttgactttgaagatcatacaaactacgagctcgttattaaagaatcgcggacgttaaaacctgaaggctttgtggtaaaagcaaaatcgaaaggcattccgcttggcggtattccttcatggagcactgaacagtctgctaaaaaagtacgcaaaaaggcagaaaacgctcataatacgccgctgcttgtgctatacggttcaaatgcgggaacagctgaaggaacggcgcgtgatttagcagatattgcaatgagcaaaggatttgcaccgcaggtcgcaacgcttgattcacacgccggtaatcttccgcgcgaaggagctgtattaattgtaacggcgtcttataacggtcatccgcctgataacgcaaagcaatttgtcgactggttagaccaagcgtctccggatgaagtaaaaggcgttcgctactccgtatttggatgcggcgataaaaattgggcggggacgtatcaaaaagtgcctgcttttatcgatgaaacgcttgccgctaaaggggcagaaaacatcgctgaccgcggtgaagcagatgcaagcgacgactttgaaggcacatatgaagaatggcgtgatcatatgtggagtgacgtagcagcctactttggtctcgacattgaaaacagtgaagataataaatctactctttcacttcaatttgtcgacagcgccgcggatatgccgcttgcgaaaatgcacggtgcgttttcaacgaacgtcgtagcaagcaaagagcttcaacagccaggcagtgcacgaagcacgcgacatcttgaaattgaacttccaaaagaagcttcttatcaagaaggagatcatttaggtgttattcctcgcaactatgaaggaatagtaaaccgtgtaacagcaaggttcggcctaagcgcatcacagcaaatccgtctggaagcagaagaagaaaaattagctcatttgccactcgctaaaacagtatccgtagaagagcttctgcaatacgtggagcttcaagatcctgttacgcgcacgcagcttcgcgcaatggctgctaaaacggtctgcccgccgcataaagtagagcttgaagccttgcttgaaaagcaggcctacaaagaacaagtgctggcaaaacgtttaacaatgcttgaactgcttgaaaaatacccggcgtgtgaaatgaagttcagcgaatttatcgcccttctgccaagcatacgcccgcgctattactcgatttcttcatcacctcgtgtcgatgaaaaacaagcaagcatcacggtcagcgttgtctcaggaccggcgtggagcggatatggagaatataaaggaattgcgtcgaactatcttgccgagctgcaagaaggagatacgattacgtgctttatttccacaccgcagtcagaatttacgctgccaaaagaccctgaaacgccgcttatcatggtcggaccgggaacaggcgtcgcgccgtttagaggctttgtgcaggcgcgcaaacagctaaaagaaggtggacagtcacttggagaagcacatttatacttcggctgccgttcacctcatgaagactatctgtatcaagaagagcttgaaaacgcccaaagcgaaggcatcattacgcttcataccgctttttctcgcatgccaaatcagccgaaaacatacgttcagcacgtaatggaacaagacggcaagaaattgattgagcttcttgatcaaggagcgcacttctatatttgcggagacggaagccaaatggcacctgccgttgaagcaacgcttatgaaaagctatgctgacgttcaccaagtgagtgaagcagacgctcgcttatggctgcagcagctagaagaaaaaggccgatacgcaaaagacgtgtggctgggg

SEQ ID NO: 540 - protein, 1049 aa, synthetic construct
  REGION 1..1049: note = variant of P450 oxidase from Bacillus megaterium
MTIKEMPQPKTFGELKNLPLLNTDKPVQALMRIADELGEIFKFEAPGSVTRYLSSQRLIKEACDESRFDKNLSQALKFARDFVGDGLSTSWTHEPNWKKAHNILVPSFSQHAMGRYHAMMVDIAVQLVQKWERLNADEHIEVSEDMTRLTLDTIGLCLFNYRFNSFYRDQPHPFIVSVVRALDEVMNKLQRANPDDPAYDENKRQCQEDIKVMNDYVDKIIADRKARGEQSHDLLTQMLNGKDPETGEPLDDGNIRQQIITFLIAGHQTTSGLLSFALYFLVKNPHVLQKVAEEAARVLVDPVPSYKQVKQLKYVGMVLNEALRLWPVAPMFSLYAKEDTVLGGEYPLTKGDEVMVLVPQLHRDKTIWGDDVEEFRPERFENPSAIPQHAFKPFGNGQRACIGQQFALHEATLVLGMMLKHFDFEDHTNYELVIKESRTLKPEGFVVKAKSKGIPLGGIPSWSTEQSAKKVRKKAENAHNTPLLVLYGSNAGTAEGTARDLADIAMSKGFAPQVATLDSHAGNLPREGAVLIVTASYNGHPPDNAKQFVDWLDQASPDEVKGVRYSVFGCGDKNWAGTYQKVPAFIDETLAAKGAENIADRGEADASDDFEGTYEEWRDHMWSDVAAYFGLDIENSEDNKSTLSLQFVDSAADMPLAKMHGAFSTNVVASKELQQPGSARSTRHLEIELPKEASYQEGDHLGVIPRNYEGIVNRVTARFGLSASQQIRLEAEEEKLAHLPLAKTVSVEELLQYVELQDPVTRTQLRAMAAKTVCPPHKVELEALLEKQAYKEQVLAKRLTMLELLEKYPACEMKFSEFIALLPSIRPRYYSISSSPRVDEKQASITVSVVSGPAWSGYGEYKGIASNYLAELQEGDTITCFISTPQSEFTLPKDPETPLIMVGPGTGVAPFRGFVQARKQLKEGGQSLGEAHLYFGCRSPHEDYLYQEELENAQSEGIITLHTAFSRMPNQPKTYVQHVMEQDGKKLIELLDQGAHFYICGDGSQMAPAVEATLMKSYADVHQVSEADARLWLQQLEEKGRYAKDVWLG

SEQ ID NO: 541 - DNA, 3147 bp, synthetic construct
  misc_feature 1..3147: note = variant of P450 oxidase from Bacillus megaterium
  source 1..3147: mol_type = other DNA
atgacaattaaggaaatgcctcagcctaagacgtttggagaacttaaaaatttaccgttattaaacacagataaaccggttcaagctttgatgcgtattgcggatgaattaggagaaatctttaaattcgaggcgcctggtagcgtaacgcgctatttatcaagtcagcgtctaattaaagaagcatgcgatgaatcacgctttgataaaaacttaagtcaagcgcttaaatttgcacgtgattttgttggagacgggctgtctacaagctggacgcatgaaccgaattggaaaaaagcgcataatatcttagttccaagctttagtcagcatgcaatggggcgttatcatgcgatgatggtcgatatcgccgtgcagcttgttcaaaagtgggagcgtctaaatgcagatgagcatattgaagtatcggaagacatgacacgtttaacgcttgatacaattggtctttgcctgtttaactatcgctttaacagcttttaccgagatcagcctcatccatttattgtgagtgtggttcgtgcactggatgaagtaatgaacaagctgcagcgagcaaatccagacgacccagcttatgatgaaaacaagcgccagtgtcaagaagatatcaaggtgatgaacgactatgtagataaaattattgcagatcgcaaagcaaggggtgaacaaagtcatgatttattaacgcagatgctaaacggaaaagatccagaaacgggtgagccgcttgatgacgggaacattcgtcagcaaattattacattcttaattgcgggacaccaaacgacaagtggtcttttatcatttgcgctgtatttcttagtgaaaaatccacatgtattacaaaaagtagcagaagaagcagcacgagttctagtagatcctgttccaagctacaaacaagtcaaacagcttaaatatgttggcatggtcttaaacgaagcgctgcgcttatggccagtagcgcctatgttttccctatatgcaaaagaagatacggtgcttggaggagaatatcctttaacgaaaggcgacgaagtaatggttctggtgcctcagcttcaccgtgataaaacaatttggggagacgatgtggaggagttccgtccagagcgttttgaaaatccaagtgcgattccgcagcatgcgtttaaaccgtttggaaacggtcagcgtgcgtgtatcggtcagcagttcgctcttcatgaagcaacgctggtacttggtatgatgctaaaacactttgactttgaagatcatacaaactacgagctcgttattaaagaatcgcggacgttaaaacctgaaggctttgtggtaaaagcaaaatcgaaaggcattccgcttggcggtattccttcacctagcactgaacagtctgctaaaaaagtacgcaaaaaggcagaaaacgctcataatacgccgctgcttgtgctatacggttcaaatgcgggaacagctgaaggaacggcgcgtgatttagcagatattgcaatgagcaaaggatttgcaccgcaggtcgcaacgcttgattcacacgccggtaatcttccgcgcgaaggagctgtattaattgtaacggcgtcttataacggtcatccgcctgataacgcaaagcaatttgtcgactggttagaccaagcgtctccggatgaagtaaaaggcgttcgctactccgtatttggatgcggcgataaaaattgggcggggacgtatcaaaaagtgcctgcttttatcgatgaaacgcttgccgctaaaggggcagaaaacatcgctgaccgcggtgaagcagatgcaagcgacgactttgaaggcacatatgaagaatggcgtgatcatatgtggagtgacgtagcagcctactttaatctcgacattgaaaacagtgaagataataaatctactctttcacttcaatttgtcgacagcgccgcggatatgccgcttgcgaaaatgcacggtgcgttttcaacgaacgtcgtagcaagcaaagaacttcaacagccaggcagtgcacgaagcacgcgacatcttgaaattgaacttccaaaagaagcttcttatcaagaaggagatcatttaggtgttattcctcgcaactatgaaggaatagtaaaccgtgtaacagcaaggttcggcctaagcgcatcacagcaaatccgtctggaagcagaagaagaaaaattagctcatttgccactcgctaaaacagtatccgtagaagagcttctgcaatacgtggagcttcaagatcctgttacgcgcacgcagcttcgcgcaatggctgctaaaacggtctgcccgccgcataaagtagagcttgaagccttgcttgaaaagcaagcctacaaagaacaagtgctggcaaaacgtttaacaatgcttgaactgcttgaaaaatacccggcgtgtgaaatgagtttcagcgaatttatcgcccttctgccaagcatacgcccgcgctattactcgatttcttcatcacctcgtgtcgatgaaaaacaagcaagcatcacggtcagcgttgtctcaggaccggcgtggagcggatatggagaatataaaggaattgcgtcgaactatcttgccgagctgcaagaaggagatacgattacgtgctttatttccacaccgcagtcagaatttacgctgccaaaagaccctgaaacgccgcttatcatggtcggaccgggaacaggcgtcgcgccgtttagaggctttgtgcaggcgcgcaaacagctaaaagaaggtggacagtcacttggagaagcacatttatacttcggctgccgttcacctcatgaagactatctgtatcaagaagagcttgaaaacgcccaaagcgaaggcatcattacgcttcataccgctttttctcgcatgccgaatcagccgaaaacatacgttcagcacgtaatggaacaagacggcaagaaattgattgaacttcttgatcaaggagcgcacttctatatttgcggagacggaagccaaatggcacctgccgttgaagcaacgcttatgaaaagctatgctgacgttcaccaagtgagtgaagcagacgctcgcttatggctgcagcagctagaagaaaaaggccgatacgcaaaagacgtgtggctgggg

SEQ ID NO: 542 - protein, 1049 aa, synthetic construct
  REGION 1..1049: note = variant of P450 oxidase from Bacillus megaterium
MTIKEMPQPKTFGELKNLPLLNTDKPVQALMRIADELGEIFKFEAPGSVTRYLSSQRLIKEACDESRFDKNLSQALKFARDFVGDGLSTSWTHEPNWKKAHNILVPSFSQHAMGRYHAMMVDIAVQLVQKWERLNADEHIEVSEDMTRLTLDTIGLCLFNYRFNSFYRDQPHPFIVSVVRALDEVMNKLQRANPDDPAYDENKRQCQEDIKVMNDYVDKIIADRKARGEQSHDLLTQMLNGKDPETGEPLDDGNIRQQIITFLIAGHQTTSGLLSFALYFLVKNPHVLQKVAEEAARVLVDPVPSYKQVKQLKYVGMVLNEALRLWPVAPMFSLYAKEDTVLGGEYPLTKGDEVMVLVPQLHRDKTIWGDDVEEFRPERFENPSAIPQHAFKPFGNGQRACIGQQFALHEATLVLGMMLKHFDFEDHTNYELVIKESRTLKPEGFVVKAKSKGIPLGGIPSPSTEQSAKKVRKKAENAHNTPLLVLYGSNAGTAEGTARDLADIAMSKGFAPQVATLDSHAGNLPREGAVLIVTASYNGHPPDNAKQFVDWLDQASPDEVKGVRYSVFGCGDKNWAGTYQKVPAFIDETLAAKGAENIADRGEADASDDFEGTYEEWRDHMWSDVAAYFNLDIENSEDNKSTLSLQFVDSAADMPLAKMHGAFSTNVVASKELQQPGSARSTRHLEIELPKEASYQEGDHLGVIPRNYEGIVNRVTARFGLSASQQIRLEAEEEKLAHLPLAKTVSVEELLQYVELQDPVTRTQLRAMAAKTVCPPHKVELEALLEKQAYKEQVLAKRLTMLELLEKYPACEMSFSEFIALLPSIRPRYYSISSSPRVDEKQASITVSVVSGPAWSGYGEYKGIASNYLAELQEGDTITCFISTPQSEFTLPKDPETPLIMVGPGTGVAPFRGFVQARKQLKEGGQSLGEAHLYFGCRSPHEDYLYQEELENAQSEGIITLHTAFSRMPNQPKTYVQHVMEQDGKKLIELLDQGAHFYICGDGSQMAPAVEATLMKSYADVHQVSEADARLWLQQLEEKGRYAKDVWLG

SEQ ID NO: 543 - DNA, 3147 bp, synthetic construct
  misc_feature 1..3147: note = variant of P450 oxidase from Bacillus megaterium
  source 1..3147: mol_type = other DNA
atgacaattaaggaaatgcctcagcctaagacgtttggagaacttaaaaatttaccgttattaaacacagataaaccggttcaagctttgatgcgtattgcggatgaattaggagaaatctttaaattcgaggcgcctggtagcgtaacgcgctatttatcaagtcagcgtctaattaaagaagcatgcgatgaatcacgctttgataaaaacttaagtcaagcgcttaaatttgcacgtgattttgttggagacgggctgtctacaagctggacgcatgaaccgaattggaaaaaagcgcataatatcttagttccaagctttagtcagcatgcaatggggcgttatcatgcgatgatggtcgatatcgccgtgcagcttgttcaaaagtgggagcgtctaaatgcagatgagcatattgaagtatcggaagacatgacacgtttaacgcttgatacaattggtctttgcctgtttaactatcgctttaacagcttttaccgagatacgcctcatccatttattgtgagtgtggttcgtgcactggatgaagtaatgaacaagctgcagcgagcaaatccagacgacccagcttatgatgaaaacaagcgccagtgtcaagaagatatcaaggtgatgaacgactatgtagataaaattattgcagatcgcaaagcaaggggtgaacaaagtcatgatttattaacgcagatgctaaacggaaaagatccagaaacgggtgagccgcttgatgacgggaacattcgtcagcaaattattacattcttaattgcgggacaccaaacgacaagtggtcttttatcatttgcgctgtatttcttagtgaaaaatccacatgtattacaaaaagtagcagaagaagcagcacgagttctagtagatcctgttccaagctacaaacaagtcaaacagcttaaatatgttggcatggtcttaaacgaagcgctgcgcttatggccagtagcgcctatgttttccctatatgcaaaagaagatacggtgcttggaggagaatatcctttaacgaaaggcgacgaagtaatggttctggtgcctcagcttcaccgtgataaaacaatttggggagacgatgtggaggagttccgtccagagcgttttgaaaatccaagtgcgattccgcagcatgcgtttaaaccgtttggaaacggtcagcgtgcgtgtatcggtcagcagttcgctcttcatgaagcaacgctggtacttggtatgatgctaaaacactttgactttgaagatcatacaaactacgagctcgttattaaagaatcgcggacgttaaaacctgaaggctttgtggtaaaagcaaaatcgaaaggcattccgcttggcggtattccttcacctagcactgaacagtctgctaaaaaagtacgcaaaaaggcagaaaacgctcataatacgccgctgcttgtgctatacggttcaaatgcgggaacagctgaaggaacggcgcgtgatttagcagatattgcaatgagcaaaggatttgcaccgcaggtcgcaacgcttgattcacacgccggtaatcttccgcgcgaaggagctgtattaattgtaacggcgtcttataacggtcatccgcctgataacgcaaagcaatttgtcgactggttagaccaagcgtctgctgatgaagtaaaaggcgttcgctactccgtatttggatgcggcgataaaaattgggcggggacgtatcaaaaagtgcctgcttttatcgatgaaacgcttgccgctaaaggggcagaaaacatcgctgaccgcggtgaagcagatgcaagcgacgactttgaaggcacatatgaagaatggcgtgatcatatgtggagtgacgtagcagcctactttggtctcgacattgaaaacagtgaagataataaatctactctttcacttcaatttgtcgacagcgccgcggatatgccgcttgcgaaaatgcacggtgcgttttcaacgaacgtcgtagcaagcaaagaacttcaacagccaggcagtgcacgaagcacgcgacatcttgaaattgaacttccaaaagaagcttcttatcaagaaggagatcatttaggtgttattcctcgcaactatgaaggaatagtaaaccgtgtaacagcaaggttcggcctaagcgcatcacagctgatccgtctggaagcagaagaagaaaaattagctcatttgccactcgctaaaacagtatccgtagaagagcttctgcaatacgtggagcttcaagatcctgttacgcgcacgcagcttcgcgcaatggctgctaaaacggtctgcccgccgcataaagtagagcttgaagccttgcttgggaaaccggcctacaaagaacaagtgctggcaaaacgtttaacaatgcttgaactgcttgaaaaatacccggcgtgtgaaatgagtttcagcgaatttatcgcccttctgccaagcatacgcccgcgctattactcgatttcttcatcacctcgtgtcgatgaaaaacaagcaagcatcacggtcagcgttgtctcaggaccggcgtggagcggatatggagaatataaaggaattgcgtcgaactatcttgccgagctgcaagaaggagatacgattacgtgctttatttccacaccgcagtcagaatttacgctgccaaaagaccctgaaacgccgcttatcatggtcggaccgggaacaggcgtcgcgccgtttagaggctttgtgcaggcgcgcaaacagctaaaagaacaaggacagtcacttggagaagcacatttatacttcggctgccgttcacctcatgaagactatctgtatcaagaagagcttgaaaacgcccaaagcgaaggcatcattacgcttcataccgctttttctcgcatgccgaatcagccgaaaacatacgttcagcacgtaatggaacaagacggcaagaaattgattgaacttcttgatcaaggagcgcacttctatatttgcggagacggaagccaaatggcacctgccgttgaagcaacgcttatgaaaagctatgctgacgttcaccaagtgagtgaagcagacgctcgcttatggctgcagcagctagaagaaaaaggccgatacgcaaaagacgtgtggctgggg

SEQ ID NO: 544 - protein, 1049 aa, synthetic construct
  REGION 1..1049: note = variant of P450 oxidase from Bacillus megaterium
MTIKEMPQPKTFGELKNLPLLNTDKPVQALMRIADELGEIFKFEAPGSVTRYLSSQRLIKEACDESRFDKNLSQALKFARDFVGDGLSTSWTHEPNWKKAHNILVPSFSQHAMGRYHAMMVDIAVQLVQKWERLNADEHIEVSEDMTRLTLDTIGLCLFNYRFNSFYRDTPHPFIVSVVRALDEVMNKLQRANPDDPAYDENKRQCQEDIKVMNDYVDKIIADRKARGEQSHDLLTQMLNGKDPETGEPLDDGNIRQQIITFLIAGHQTTSGLLSFALYFLVKNPHVLQKVAEEAARVLVDPVPSYKQVKQLKYVGMVLNEALRLWPVAPMFSLYAKEDTVLGGEYPLTKGDEVMVLVPQLHRDKTIWGDDVEEFRPERFENPSAIPQHAFKPFGNGQRACIGQQFALHEATLVLGMMLKHFDFEDHTNYELVIKESRTLKPEGFVVKAKSKGIPLGGIPSPSTEQSAKKVRKKAENAHNTPLLVLYGSNAGTAEGTARDLADIAMSKGFAPQVATLDSHAGNLPREGAVLIVTASYNGHPPDNAKQFVDWLDQASADEVKGVRYSVFGCGDKNWAGTYQKVPAFIDETLAAKGAENIADRGEADASDDFEGTYEEWRDHMWSDVAAYFGLDIENSEDNKSTLSLQFVDSAADMPLAKMHGAFSTNVVASKELQQPGSARSTRHLEIELPKEASYQEGDHLGVIPRNYEGIVNRVTARFGLSASQLIRLEAEEEKLAHLPLAKTVSVEELLQYVELQDPVTRTQLRAMAAKTVCPPHKVELEALLGKPAYKEQVLAKRLTMLELLEKYPACEMSFSEFIALLPSIRPRYYSISSSPRVDEKQASITVSVVSGPAWSGYGEYKGIASNYLAELQEGDTITCFISTPQSEFTLPKDPETPLIMVGPGTGVAPFRGFVQARKQLKEQGQSLGEAHLYFGCRSPHEDYLYQEELENAQSEGIITLHTAFSRMPNQPKTYVQHVMEQDGKKLIELLDQGAHFYICGDGSQMAPAVEATLMKSYADVHQVSEADARLWLQQLEEKGRYAKDVWLG

SEQ ID NO: 545 - DNA, 3147 bp, synthetic construct
  misc_feature 1..3147: note = variant of P450 oxidase from Bacillus megaterium
  source 1..3147: mol_type = other DNA
atgacaattaaggaaatgcctcagcctaagacgtttggagaacttaaaaatttaccgttattaaacacagataaaccggttcaagctttgatgcgtattgcggatgaattaggagaaatctttaaattcgaggcgcctggtagcgtaacgcgctatttatcaagtcagcgtctaattaaagaagcatgcgatgaatcacgctttgataaaaacttaagtcaagcgcttaaatttgcacgtgattttgttggagacgggctgtctacaagctggacgcatgaaccgaattggaaaaaagcgcataatatcttagttccaagctttagtcagcatgcaatggggcgttatcatgcgatgatggtcgatatcgccgtgcagcttgttcaaaagtgggagcgtctaaatgcagatgagcatattgaagtatcggaagacatgacacgtttaacgcttgatacaattggtctttgcgggtttaactatcgctttaacagcttttaccgagatcagcctcatccatttattgtgagtgtggttcgtgcactggatgaagtaatgaacaagctgcagcgagcaaatccagacgacccagcttatgatgaaaacaagcgccagtgtcaagaagatatcaaggtgatgaacgactatgtagataaaattattgcagatcgcaaagcaaggggtgaacaaagtcatgatttattaacgcagatgctaaacggaaaagatccagaaacgggtgagccgcttgatgacgggaacattcgtcagcaaattattacattcttaattgcgggacaccaaacgacaagtggtcttttatcatttgcgctgtatttcttagtgaaaaatccacatgtattacaaaaagtagcagaagaagcagcacgagttctagtagatcctgttccaagctacaaacaagtcaaacagcttaaatatgttggcatggtcttaaacgaagcgctgcgcttatggccagtagcgcctatgttttccctatatgcaaaagaagatacggtgcttggaggagaatatcctttaacgaaaggcgacgaagtaatggttctggtgcctcagcttcaccgtgataaaacaatttggggagacgatgtggaggagttccgtccagagcgttttgaaaatccaagtgcgattccgcagcatgcgtttaaaccgtttggaaacggtcagcgtgcgtgtatcggtcagcagttcgctcttcatagtgcaacgctggtacttggtatgatgctaaaacactttgactttgaagatcatacaaactacgagctcgttattaaagaatcgcggacgttaaaacctgaaggctttgtggtaaaagcaaaatcgaaaggcattccgcttggcggtattccttcatggagcactgaacagtctgctaaaaaagtacgcaaaaaggcagaaaacgctcataatacgccgctgcttgtgctatacggttcaaatgcgggaacagctgaaggaacggcgcgtgatttagcagatattgcaatgagcaaaggatttgcaccgcaggtcgcaacgcttgattcacacgccggtaatcttccgcgcgaaggagctgtattaattgtaacggcgtcttataacggtcatccgcctgataacgcaaagcaatttgtcgactggttagaccaagcgtctccggatgaagtaaaaggcgttcgctactccgtatttggatgcggcgataaaaattgggcggggacgtatcaaaaagtgcctgcttttatcgatgaaacgcttgccgctaaaggggcagaaaacatcgctgaccgcggtgaagcagatgcaagcgacgactttgaaggcacatatgaagaatggcgtgatcatatgtggagtgacgtagcagcctactttggtctcgacattgaaaacagtgaagataataaatctactctttcacttcaatttgtcgacagcgccgcggatatgccgcttgcgaaaatgcacggtgcgttttcaacgaacgtcgtagcaagcaaagaacttcaacagccaggcagtgcacgaagcacgcgacatcttgaaattgaacttccaaaagaagcttcttatcaagaaggagatcatttaggtgttattcctcgcaactatgaaggaatagtaaaccgtgtaacagcaaggttcggcctaagcgcatcacagcagatccgtctggaagcagaagaagaaaaattagctcatttgccactcgctaaaacagtatccgtagaagagcttctgcaatacgtggagcttcaagatcctgttacgcgcacgcagcttcgcgcaatggctgctaaaacggtctgcccgccgcataaagtagagcttgaagccttgcttgtgcgccaggcctacaaagaacaagtgctggcaaaacgtttaacaatgcttgaactgcttgaaaaatacccggcgtgtgaaatgaagttcagcgaatttatcgcccttctgccaagcatacgcccgcgctattactcgatttcttcatcacctcgtgtcgatgaaaaacaagcaagcatcacggtcagcgttgtctcaggaccggcgtggagcggatatggagaatataaaggaattgcgtcgaactatcttgccgagctgcaagaaggagatacgattacgtgctttatttccacaccgcagtcagaatttacgctgccaaaagaccctgaaacgccgcttatcatggtcggaccgggaacaggcgtcgcgccgtttagaggctttgtgcaggcgcgcaaacagctaaaagaacaaggacagtcacttggagaagcacatttatacttcggctgccgttcacctcatgaagactatctgtatcaagaagagcttgaaaacgcccaaagcgaaggcatcattacgcttcataccgctttttctcgcatggggaatcagccgaaaacatacgttcagcacgtaatggaacaagacggcaagaaattgattgaacttcttgatcaaggagcgcacttctatatttgcggagacggaagccaaatggcacctgccgttgaagcaacgcttatgaaaagctatgctgacgttcaccaagtgagtgaagcagacgctcgcttatggctgcagcagctagaagaaaaaggccgatacgcaaaagacgtgtggctgggg

SEQ ID NO: 546 - protein, 1049 aa, synthetic construct
  REGION 1..1049: note = variant of P450 oxidase from Bacillus megaterium
MTIKEMPQPKTFGELKNLPLLNTDKPVQALMRIADELGEIFKFEAPGSVTRYLSSQRLIKEACDESRFDKNLSQALKFARDFVGDGLSTSWTHEPNWKKAHNILVPSFSQHAMGRYHAMMVDIAVQLVQKWERLNADEHIEVSEDMTRLTLDTIGLCGFNYRFNSFYRDQPHPFIVSVVRALDEVMNKLQRANPDDPAYDENKRQCQEDIKVMNDYVDKIIADRKARGEQSHDLLTQMLNGKDPETGEPLDDGNIRQQIITFLIAGHQTTSGLLSFALYFLVKNPHVLQKVAEEAARVLVDPVPSYKQVKQLKYVGMVLNEALRLWPVAPMFSLYAKEDTVLGGEYPLTKGDEVMVLVPQLHRDKTIWGDDVEEFRPERFENPSAIPQHAFKPFGNGQRACIGQQFALHSATLVLGMMLKHFDFEDHTNYELVIKESRTLKPEGFVVKAKSKGIPLGGIPSWSTEQSAKKVRKKAENAHNTPLLVLYGSNAGTAEGTARDLADIAMSKGFAPQVATLDSHAGNLPREGAVLIVTASYNGHPPDNAKQFVDWLDQASPDEVKGVRYSVFGCGDKNWAGTYQKVPAFIDETLAAKGAENIADRGEADASDDFEGTYEEWRDHMWSDVAAYFGLDIENSEDNKSTLSLQFVDSAADMPLAKMHGAFSTNVVASKELQQPGSARSTRHLEIELPKEASYQEGDHLGVIPRNYEGIVNRVTARFGLSASQQIRLEAEEEKLAHLPLAKTVSVEELLQYVELQDPVTRTQLRAMAAKTVCPPHKVELEALLVRQAYKEQVLAKRLTMLELLEKYPACEMKFSEFIALLPSIRPRYYSISSSPRVDEKQASITVSVVSGPAWSGYGEYKGIASNYLAELQEGDTITCFISTPQSEFTLPKDPETPLIMVGPGTGVAPFRGFVQARKQLKEQGQSLGEAHLYFGCRSPHEDYLYQEELENAQSEGIITLHTAFSRMGNQPKTYVQHVMEQDGKKLIELLDQGAHFYICGDGSQMAPAVEATLMKSYADVHQVSEADARLWLQQLEEKGRYAKDVWLG

SEQ ID NO: 547 - DNA, 3147 bp, synthetic construct
  misc_feature 1..3147: note = variant of P450 oxidase from Bacillus megaterium
  source 1..3147: mol_type = other DNA
atgacaattaaggaaatgcctcagcctaagacgtttggagaacttaaaaatttaccgttattaaacacagataaaccggttcaagctttgatgcgtattgcggatgaattaggagaaatctttaaattcgaggcgcctggtagcgtaacgcgctatttatcaagtcagcgtctaattaaagaagcatgcgatgaatcacgctttgataaaaacttaagtcaagcgcttaaatttgcacgtgattttgttggagacgggctgtctacaagctggacgcatgaaccgaattggaaaaaagcgcataatatcttagttccaagctttagtcagcatgcaatggggcgttatcatgcgatgatggtcgatatcgccgtgcagcttgttcaaaagtgggagcgtctaaatgcagatgagcatattgaagtatcggaagacatgacacgtttaacgcttgatacaattggtctttgcctgtttaactatcgctttaacagcttttaccgagatcagcctcatccatttattgtgagtgtggttcgtgcactggatgaagtaatgaacaagctgcagcgagcaaatccagacgacccagcttatgatgaaaacaagcgccagtgtcaagaagatatcaaggtgatgaacgactatgtagataaaattattgcagatcgcaaagcaaggggtgaacaaagtcatgatttattaacgcagatgctaaacggaaaagatccagaaacgggtgagccgcttgatgacgggaacattcgtcagcaaattattacattcttaattgcgggacaccaaacgacaagtggtcttttatcatttgcgctgtatttcttagtgaaaaatccacatgtattacaaaaagtagcagaagaagcagcacgagttctagtagatcctgttccaagctacaaacaagtcaaacagcttaaatatgttggcatggtcttaaacgaagcgctgcgcttatggccagtagcgcctatgttttccctatatgcaaaagaagatacggtgcttggaggagaatatcctttaacgaaaggcgacgaagtaatggttctggtgcctcagcttcaccgtgataaaacaatttggggagacgatgtggaggagttccgtccagagcgttttgaaaatccaagtgcgattccgcagcatgcgtttaaaccgtttggaaacggtcagcgtgcgtgtatcggtcagcagttcgctcttcatagtgcaacgctggtacttggtatgatgctaaaacactttgactttgaagatcatacaaactacgagctcgttattaaagaatcgcggacgttaaaacctgaaggctttgtggtaaaagcaaaatcgaaaggcattccgcttggcggtattccttcaccaagcactgaacagtctgctaaaaaagtacgcaaaaaggcagaaaacgctcataatacgccgctgcttgtgctatacggttcaaatgcgggaacagctgaaggaacggcgcgtgatttagcagatattgcaatgagcaaaggatttgcaccgcaggtcgcaacgcttgattcacacgccggtaatcttccgcgcgaaggagctgtattaattgtaacggcgtcttataacggtcatccgcctgataacgcaaagcaatttgtcgactggttagaccaagcgtctgcggatgaagtaaaaggcgttcgctactccgtatttggatgcggcgataaaaattgggcggggacgtatcaaaaagtgcctgcttttatcgatgaaacgcttgccgctaaaggggcagaaaacatcgctgaccgcggtgaagcagatgcaagcgacgactttgaaggcacatatgaagaatggcgtgatcatatgtggagtgacgtagcagcctactttaatctcgacattgaaaacagtgaagataataaatctactctttcacttcaatttgtcgacagcgccgcggatatgccgcttgcgaaaatgcacggtgcgttttcaacgaacgtcgtagcaagcaaagaacttcaacagccaggcagtgcacgaagcacgcgacatcttgaaattgaacttccaaaagaagcttcttatcaagaaggagatcatttaggtgttattcctcgcaactatgaaggaatagtaaaccgtgtaacagcaaggttcggcctaagcgcatcacagcaaatccgtctggaagcagaagaagaaaaattagctcatttgccactcgctaaaacagtatccgtagaagagcttctgcaatacgtggagcttcaagatcctgttacgcgcacgcagcttcgcgcaatggctgctaaaacggtctgcccgccgcataaagtagagcttgaagccttgcttgaaaagcaagcctacaaagaacaagtgctggcaaaacgtttaacaatgcttgaactgcttgaaaaatacccggcgtgtgaaatgaagttcagcgaatttatcgcccttctgccaagcatacgcccgcgctattactcgatttcttcatcacctcgtgtcgatgaaaaacaagcaagcatcacggtcagcgttgtctcaggaccggcgtggagcggatatggagaatataaaggaattgcgtcgaactatcttgccgagctgcaagaaggagatacgattacgtgctttatttccacaccgcagtcagaatttacgctgccaaaagaccctgaaacgccgcttatcatggtcggaccgggaacaggcgtcgcgccgtttagaggctttgtgcaggcgcgcaaacagctaaaagaacaaggacagtcacttggagaagcacatttatacttcggctgccgttcacctcatgaagactatctgtatcaagaagagcttgaaaacgcccaaagcgaaggcatcattacgcttcataccgctttttctcgcatgccaaatcagccgaaaacatacgttcagcacgtaatggaacaagacggcaagaaattgattgaacttcttgatcaaggagcgcacttctatatttgcggagacggaagccaaatggcacctgccgttgaagcaacgcttatgaaaagctatgctgacgttcaccaagtgagtgaagcagacgctcgcttatggctgcagcagctagaagaaaaaggccgatacgcaaaagacgtgtggctgggg

SEQ ID NO: 548 - protein, 1049 aa, synthetic construct
  REGION 1..1049: note = variant of P450 oxidase from Bacillus megaterium
MTIKEMPQPKTFGELKNLPLLNTDKPVQALMRIADELGEIFKFEAPGSVTRYLSSQRLIKEACDESRFDKNLSQALKFARDFVGDGLSTSWTHEPNWKKAHNILVPSFSQHAMGRYHAMMVDIAVQLVQKWERLNADEHIEVSEDMTRLTLDTIGLCLFNYRFNSFYRDQPHPFIVSVVRALDEVMNKLQRANPDDPAYDENKRQCQEDIKVMNDYVDKIIADRKARGEQSHDLLTQMLNGKDPETGEPLDDGNIRQQIITFLIAGHQTTSGLLSFALYFLVKNPHVLQKVAEEAARVLVDPVPSYKQVKQLKYVGMVLNEALRLWPVAPMFSLYAKEDTVLGGEYPLTKGDEVMVLVPQLHRDKTIWGDDVEEFRPERFENPSAIPQHAFKPFGNGQRACIGQQFALHSATLVLGMMLKHFDFEDHTNYELVIKESRTLKPEGFVVKAKSKGIPLGGIPSPSTEQSAKKVRKKAENAHNTPLLVLYGSNAGTAEGTARDLADIAMSKGFAPQVATLDSHAGNLPREGAVLIVTASYNGHPPDNAKQFVDWLDQASADEVKGVRYSVFGCGDKNWAGTYQKVPAFIDETLAAKGAENIADRGEADASDDFEGTYEEWRDHMWSDVAAYFNLDIENSEDNKSTLSLQFVDSAADMPLAKMHGAFSTNVVASKELQQPGSARSTRHLEIELPKEASYQEGDHLGVIPRNYEGIVNRVTARFGLSASQQIRLEAEEEKLAHLPLAKTVSVEELLQYVELQDPVTRTQLRAMAAKTVCPPHKVELEALLEKQAYKEQVLAKRLTMLELLEKYPACEMKFSEFIALLPSIRPRYYSISSSPRVDEKQASITVSVVSGPAWSGYGEYKGIASNYLAELQEGDTITCFISTPQSEFTLPKDPETPLIMVGPGTGVAPFRGFVQARKQLKEQGQSLGEAHLYFGCRSPHEDYLYQEELENAQSEGIITLHTAFSRMPNQPKTYVQHVMEQDGKKLIELLDQGAHFYICGDGSQMAPAVEATLMKSYADVHQVSEADARLWLQQLEEKGRYAKDVWLG

SEQ ID NO: 549 - DNA, 3147 bp, synthetic construct
  misc_feature 1..3147: note = variant of P450 oxidase from Bacillus megaterium
  source 1..3147: mol_type = other DNA
atgacaattaaggaaatgcctcagcctaagacgtttggagaacttaaaaatttaccgttattaaacacagataaaccggttcaagctttgatgcgtattgcggatgaattaggagaaatctttaaattcgaggcgcctggtagcgtaacgcgctatttatcaagtcagcgtctaattaaagaagcatgcgatgaatcacgctttgataaaaacttaagtcaagcgcttaaatttgcacgtgattttgttggagacgggctgtctacaagctggacgcatgaaccgaattggaaaaaagcgcataatatcttagttccaagctttagtcagcatgcaatggggcgttatcatgcgatgatggtcgatatcgccgtgcagcttgttcaaaagtgggagcgtctaaatgcagatgagcatattgaagtatcggaagacatgacacgtttaacgcttgatacaattggtctttgcctgtttaactatcgctttaacagcttttaccgagatacgcctcatccatttattgtgagtgtggttcgtgcactggatgaagtaatgaacaagctgcagcgagcaaatccagacgacccagcttatgatgaaaacaagcgccagtgtcaagaagatatcaaggtgatgaacgactatgtagataaaattattgcagatcgcaaagcaaggggtgaacaaagtcatgatttattaacgcagatgctaaacggaaaagatccagaaacgggtgagccgcttgatgacgggaacattcgtcagcaaattattacattcttaattgcgggacaccaaacgacaagtggtcttttatcatttgcgctgtatttcttagtgaaaaatccacatgtattacaaaaagtagcagaagaagcagcacgagttctagtagatcctgttccaagctacaaacaagtcaaacagcttaaatatgttggcatggtcttaaacgaagcgctgcgcttatggccagtagcgcctatgttttccctatatgcaaaagaagatacggtgcttggaggagaatatcctttaacgaaaggcgacgaagtaatggttctggtgcctcagcttcaccgtgataaaacaatttggggagacgatgtggaggagttccgtccagagcgttttgaaaatccaagtgcgattccgcagcatgcgtttaaaccgtttggaaacggtcagcgtgcgtgtatcggtcagcagttcgctcttcatagtgcaacgctggtacttggtatgatgctaaaacactttgactttgaagatcatacaaactacgagctcgttattaaagaatcgcggacgttaaaacctgaaggctttgtggtaaaagcaaaatcgaaaggcattccgcttggcggtattccttcatggagcactgaacagtctgctaaaaaagtacgcaaaaaggcagaaaacgctcataatacgccgctgcttgtgctatacggttcaaatgcgggaacagctgaaggaacggcgcgtgatttagcagatattgcaatgagcaaaggatttgcaccgcaggtcgcaacgcttgattcacacgccggtaatcttccgcgcgaaggagctgtattaattgtaacggcgtcttataacggtcatccgcctgataacgcaaagcaatttgtcgactggttagaccaagcgtctgcggatgaagtaaaaggcgttcgctactccgtatttggatgcggcgataaaaattgggcggggacgtatcaaaaagtgcctgcttttatcgatgaaacgcttgccgctaaaggggcagaaaacatcgctgaccgcggtgaagcagatgcaagcgacgactttgaaggcacatatgaagaatggcgtgatcatatgtggagtgacgtagcagcctactttggtctcgacattgaaaacagtgaagataataaatctactctttcacttcaatttgtcgacagcgccgcggatatgccgcttgcgaaaatgcacggtgcgttttcaacgaacgtcgtagcaagcaaagggcttcaacagccaggcagtgcacgaagcacgcgacatcttgaaattgaacttccaaaagaagcttcttatcaagaaggagatcatttaggtgttattcctcgcaactatgaaggaatagtaaaccgtgtaacagcaaggttcggcctaagcgcatcacagctgatccgtctggaagcagaagaagaaaaattagctcatttgccactcgctaaaacagtatccgtagaagagcttctgcaatacgtggagcttcaagatcctgttacgcgcacgcagcttcgcgcaatggctgctaaaacggtctgcccgccgcataaagtagagcttgaagccttgcttcgtaaaccggcctacaaagaacaagtgctggcaaaacgtttaacaatgcttgaactgcttgaaaaatacccggcgtgtgaaatgagtttcagcgaatttatcgcccttctgccaagcatacgcccgcgctattactcgatttcttcatcacctcgtgtcgatgaaaaacaagcaagcatcacggtcagcgttgtctcaggaccggcgtggagcggatatggagaatataaaggaattgcgtcgaactatcttgccgagctgcaagaaggagatacgattacgtgctttatttccacaccgcagtcagaatttacgctgccaaaagaccctgaaacgccgcttatcatggtcggaccgggaacaggcgtcgcgccgtttagaggctttgtgcaggcgcgcaaacagctaaaagaaggtggacagtcacttggagaagcacatttatacttcggctgccgttcacctcatgaagactatctgtatcaagaagagcttgaaaacgcccaaagcgaaggcatcattacgcttcataccgctttttctcgcatgccaaatcagccgaaaacatacgttcagcacgtaatggaacaagacggcaagaaattgattgagcttcttgatcaaggagcgcacttctatatttgcggagacggaagccaaatggcacctgccgttgaagcaacgcttatgaaaagctatgctgacgttcaccaagtgagtgaagcagacgctcgcttatggctgcagcagctagaagaaaaaggccgatacgcaaaagacgtgtggctgggg

SEQ ID NO: 550 - protein, 1049 aa, synthetic construct
  REGION 1..1049: note = variant of P450 oxidase from Bacillus megaterium
MTIKEMPQPKTFGELKNLPLLNTDKPVQALMRIADELGEIFKFEAPGSVTRYLSSQRLIKEACDESRFDKNLSQALKFARDFVGDGLSTSWTHEPNWKKAHNILVPSFSQHAMGRYHAMMVDIAVQLVQKWERLNADEHIEVSEDMTRLTLDTIGLCLFNYRFNSFYRDTPHPFIVSVVRALDEVMNKLQRANPDDPAYDENKRQCQEDIKVMNDYVDKIIADRKARGEQSHDLLTQMLNGKDPETGEPLDDGNIRQQIITFLIAGHQTTSGLLSFALYFLVKNPHVLQKVAEEAARVLVDPVPSYKQVKQLKYVGMVLNEALRLWPVAPMFSLYAKEDTVLGGEYPLTKGDEVMVLVPQLHRDKTIWGDDVEEFRPERFENPSAIPQHAFKPFGNGQRACIGQQFALHSATLVLGMMLKHFDFEDHTNYELVIKESRTLKPEGFVVKAKSKGIPLGGIPSWSTEQSAKKVRKKAENAHNTPLLVLYGSNAGTAEGTARDLADIAMSKGFAPQVATLDSHAGNLPREGAVLIVTASYNGHPPDNAKQFVDWLDQASADEVKGVRYSVFGCGDKNWAGTYQKVPAFIDETLAAKGAENIADRGEADASDDFEGTYEEWRDHMWSDVAAYFGLDIENSEDNKSTLSLQFVDSAADMPLAKMHGAFSTNVVASKGLQQPGSARSTRHLEIELPKEASYQEGDHLGVIPRNYEGIVNRVTARFGLSASQLIRLEAEEEKLAHLPLAKTVSVEELLQYVELQDPVTRTQLRAMAAKTVCPPHKVELEALLRKPAYKEQVLAKRLTMLELLEKYPACEMSFSEFIALLPSIRPRYYSISSSPRVDEKQASITVSVVSGPAWSGYGEYKGIASNYLAELQEGDTITCFISTPQSEFTLPKDPETPLIMVGPGTGVAPFRGFVQARKQLKEGGQSLGEAHLYFGCRSPHEDYLYQEELENAQSEGIITLHTAFSRMPNQPKTYVQHVMEQDGKKLIELLDQGAHFYICGDGSQMAPAVEATLMKSYADVHQVSEADARLWLQQLEEKGRYAKDVWLG

SEQ ID NO: 551 - DNA, 3147 bp, synthetic construct
  misc_feature 1..3147: note = variant of P450 oxidase from Bacillus megaterium
  source 1..3147: mol_type = other DNA
atgacaattaaggaaatgcctcagcctaagacgtttggagaacttaaaaatttaccgttattaaacacagataaaccggttcaagctttgatgcgtattgcggatgaattaggagaaatctttaaattcgaggcgcctggtagcgtaacgcgctatttatcaagtcagcgtctaattaaagaagcatgcgatgaatcacgctttgataaaaacttaagtcaagcgcttaaatttgcacgtgattttgttggagacgggctgtctacaagctggacgcatgaaccgaattggaaaaaagcgcataatatcttagttccaagctttagtcagcatgcaatggggcgttatcatgcgatgatggtcgatatcgccgtgcagcttgttcaaaagtgggagcgtctaaatgcagatgagcatattgaagtatcggaagacatgacacgtttaacgcttgatacaattggtctttgcctgtttaactatcgctttaacagcttttaccgagatcagcctcatccatttattgtgagtgtggttcgtgcactggatgaagtaatgaacaagctgcagcgagcaaatccagacgacccagcttatgatgaaaacaagcgccagtgtcaagaagatatcaaggtgatgaacgactatgtagataaaattattgcagatcgcaaagcaaggggtgaacaaagtcatgatttattaacgcagatgctaaacggaaaagatccagaaacgggtgagccgcttgatgacgggaacattcgtcagcaaattattacattcttaattgcgggacaccaaacgacaagtggtcttttatcatttgcgctgtatttcttagtgaaaaatccacatgtattacaaaaagtagcagaagaagcagcacgagttctagtagatcctgttccaagctacaaacaagtcaaacagcttaaatatgttggcatggtcttaaacgaagcgctgcgcttatggccagtagcgcctatgttttccctatatgcaaaagaagatacggtgcttggaggagaatatcctttaacgaaaggcgacgaagtaatggttctggtgcctcagcttcaccgtgataaaacaatttggggagacgatgtggaggagttccgtccagagcgttttgaaaatccaagtgcgattccgcagcatgcgtttaaaccgtttggaaacggtcagcgtgcgtgtatcggtcagcagttcgctcttcatgaagcaacgctggtacttggtatgatgctaaaacactttgactttgaagatcatacaaactacgagctcgttattaaagaatcgcggacgttaaaacctgaaggctttgtggtaaaagcaaaatcgaaaggcattccgcttggcggtattccttcaccaagcactgaacagtctgctaaaaaagtacgcaaaaaggcagaaaacgctcataatacgccgctgcttgtgctatacggttcaaatgcgggaacagctgaaggaacggcgcgtgatttagcagatattgcaatgagcaaaggatttgcaccgcaggtcgcaacgcttgattcacacgccggtaatcttccgcgcgaaggagctgtattaattgtaacggcgtcttataacggtcatccgcctgataacgcaaagcaatttgtcgactggttagaccaagcgtctgcggatgaagtaaaaggcgttcgctactccgtatttggatgcggcgataaaaattgggcggggacgtatcaaaaagtgcctgcttttatcgatgaaacgcttgccgctaaaggggcagaaaacatcgctgaccgcggtgaagcagatgcaagcgacgactttgaaggcacatatgaagaatggcgtgatcatatgtggagtgacgtagcagcctactttaatctcgacattgaaaacagtgaagataataaatctactctttcacttcaatttgtcgacagcgccgcggatatgccgcttgcgaaaatgcacggtgcgttttcaacgaacgtcgtagcaagcaaagaacttcaacagccaggcagtgcacgaagcacgcgacatcttgaaattgaacttccaaaagaagcttcttatcaagaaggagatcatttaggtgttattcctcgcaactatgaaggaatagtaaaccgtgtaacagcaaggttcggcctaagcgcatcacagcagatccgtctggaagcagaagaagaaaaattagctcatttgccactcgctaaaacagtatccgtagaagagcttctgcaatacgtggagcttcaagatcctgttacgcgcacgcagcttcgcgcaatggctgctaaaacggtctgcccgccgcataaagtagagcttgaagccttgcttagtcgcccggcctacaaagaacaagtgctggcaaaacgtttaacaatgcttgaactgcttgaaaaatacccggcgtgtgaaatgaagttcagcgaatttatcgcccttctgccaagcatacgcccgcgctattactcgatttcttcatcacctcgtgtcgatgaaaaacaagcaagcatcacggtcagcgttgtctcaggaccggcgtggagcggatatggagaatataaaggaattgcgtcgaactatcttgccgagctgcaagaaggagatacgattacgtgctttatttccacaccgcagtcagaatttacgctgccaaaagaccctgaaacgccgcttatcatggtcggaccgggaacaggcgtcgcgccgtttagaggctttgtgcaggcgcgcaaacagctaaaagaacaaggacagtcacttggagaagcacatttatacttcggctgccgttcacctcatgaagactatctgtatcaagaagagcttgaaaacgcccaaagcgaaggcatcattacgcttcataccgctttttctcgcatgccaaatcagccgaaaacatacgttcagcacgtaatggaacaagacggcaagaaattgattgagcttcttgatcaaggagcgcacttctatatttgcggagacggaagccaaatggcacctgccgttgaagcaacgcttatgaaaagctatgctgacgttcaccaagtgagtgaagcagacgctcgcttatggctgcagcagctagaagaaaaaggccgatacgcaaaagacgtgtggctgggg

SEQ ID NO: 552 - protein, 1049 aa, synthetic construct
  REGION 1..1049: note = variant of P450 oxidase from Bacillus megaterium
MTIKEMPQPKTFGELKNLPLLNTDKPVQALMRIADELGEIFKFEAPGSVTRYLSSQRLIKEACDESRFDKNLSQALKFARDFVGDGLSTSWTHEPNWKKAHNILVPSFSQHAMGRYHAMMVDIAVQLVQKWERLNADEHIEVSEDMTRLTLDTIGLCLFNYRFNSFYRDQPHPFIVSVVRALDEVMNKLQRANPDDPAYDENKRQCQEDIKVMNDYVDKIIADRKARGEQSHDLLTQMLNGKDPETGEPLDDGNIRQQIITFLIAGHQTTSGLLSFALYFLVKNPHVLQKVAEEAARVLVDPVPSYKQVKQLKYVGMVLNEALRLWPVAPMFSLYAKEDTVLGGEYPLTKGDEVMVLVPQLHRDKTIWGDDVEEFRPERFENPSAIPQHAFKPFGNGQRACIGQQFALHEATLVLGMMLKHFDFEDHTNYELVIKESRTLKPEGFVVKAKSKGIPLGGIPSPSTEQSAKKVRKKAENAHNTPLLVLYGSNAGTAEGTARDLADIAMSKGFAPQVATLDSHAGNLPREGAVLIVTASYNGHPPDNAKQFVDWLDQASADEVKGVRYSVFGCGDKNWAGTYQKVPAFIDETLAAKGAENIADRGEADASDDFEGTYEEWRDHMWSDVAAYFNLDIENSEDNKSTLSLQFVDSAADMPLAKMHGAFSTNVVASKELQQPGSARSTRHLEIELPKEASYQEGDHLGVIPRNYEGIVNRVTARFGLSASQQIRLEAEEEKLAHLPLAKTVSVEELLQYVELQDPVTRTQLRAMAAKTVCPPHKVELEALLSRPAYKEQVLAKRLTMLELLEKYPACEMKFSEFIALLPSIRPRYYSISSSPRVDEKQASITVSVVSGPAWSGYGEYKGIASNYLAELQEGDTITCFISTPQSEFTLPKDPETPLIMVGPGTGVAPFRGFVQARKQLKEQGQSLGEAHLYFGCRSPHEDYLYQEELENAQSEGIITLHTAFSRMPNQPKTYVQHVMEQDGKKLIELLDQGAHFYICGDGSQMAPAVEATLMKSYADVHQVSEADARLWLQQLEEKGRYAKDVWLG

SEQ ID NO: 553 - DNA, 3147 bp, synthetic construct
  misc_feature 1..3147: note = variant of P450 oxidase from Bacillus megaterium
  source 1..3147: mol_type = other DNA
atgacaattaaggaaatgcctcagcctaagacgtttggagaacttaaaaatttaccgttattaaacacagataaaccggttcaagctttgatgcgtattgcggatgaattaggagaaatctttaaattcgaggcgcctggtagcgtaacgcgctatttatcaagtcagcgtctaattaaagaagcatgcgatgaatcacgctttgataaaaacttaagtcaagcgcttaaatttgcacgtgattttgttggagacgggctgtctacaagctggacgcatgaaccgaattggaaaaaagcgcataatatcttagttccaagctttagtcagcatgcaatggggcgttatcatgcgatgatggtcgatatcgccgtgcagcttgttcaaaagtgggagcgtctaaatgcagatgagcatattgaagtatcggaagacatgacacgtttaacgcttgatacaattggtctttgcggctttaactatcgctttaacagcttttaccgagatcagcctcatccatttattgtgagtgtggttcgtgcactggatgaagtaatgaacaagctgcagcgagcaaatccagacgacccagcttatgatgaaaacaagcgccagtgtcaagaagatatcaaggtgatgaacgactatgtagataaaattattgcagatcgcaaagcaaggggtgaacaaagtcatgatttattaacgcagatgctaaacggaaaagatccagaaacgggtgagccgcttgatgacgggaacattcgtcagcaaattattacattcttaattgcgggacaccaaacgacaagtggtcttttatcatttgcgctgtatttcttagtgaaaaatccacatgtattacaaaaagtagcagaagaagcagcacgagttctagtagatcctgttccaagctacaaacaagtcaaacagcttaaatatgttggcatggtcttaaacgaagcgctgcgcttatggccagtagcgcctatgttttccctatatgcaaaagaagatacggtgcttggaggagaatatcctttaacgaaaggcgacgaagtaatggttctggtgcctcagcttcaccgtgataaaacaatttggggagacgatgtggaggagttccgtccagagcgttttgaaaatccaagtcggattccgcagcatgcgtttaaaccgtttggaaacggtcagcgtgcgtgtatcggtcagcagttcgctcttcatgaagcaacgctggtacttggtatgatgctaaaacactttgactttgaagatcatacaaactacgagctcgttattaaagaatcgcggacgttaaaacctgaaggctttgtggtaaaagcaaaatcgaaaggcattccgcttggcggtattccttcacctagcactgaacagtctgctaaaaaagtacgcaaaaaggcagaaaacgctcataatacgccgctgcttgtgctatacggttcaaatgcgggaacagctgaaggaacggcgcgtgatttagcagatattgcaatgagcaaaggatttgcaccgcaggtcgcaacgcttgattcacacgccggtaatcttccgcgcgaaggagctgtattaattgtaacggcgtcttataacggtcatccgcctgataacgcaaagcaatttgtcgactggttagaccaagcgtctgctgatgaagtaaaaggcgttcgctactccgtatttggatgcggcgataaaaattgggcggggacgtatcaaaaagtgcctgcttttatcgatgaaacgcttgccgctaaaggggcagaaaacatcgctgaccgcggtgaagcagatgcaagcgacgactttgaaggcacatatgaagaatggcgtgatcatatgtggagtgacgtagcagcctactttaacctcgacattgaaaacagtgaagataataaatctactctttcacttcaatttgtcgacagcgccgcggatatgccgcttgcgaaaatgcacggtgcgttttcaacgaacgtcgtagcaagcaaagaacttcaacagccaggcagtgcacgaagcacgcgacatcttgaaattgaacttccaaaagaagcttcttatcaagaaggagatcatttaggtgttattcctcgcaactatgaaggaatagtaaaccgtgtaacagcaaggttcggcctaagcgcatcacagcaaatccgtctggaagcagaagaagaaaaattagctcatttgccactcgctaaaacagtatccgtagaagagcttctgcaatacgtggagcttcaagatcctgttacgcgcacgcagcttcgcgcaatggctgctaaaacggtctgcccgccgcataaagtagagcttgaagccttgcttgaaaagcaagcctacaaagaacaagtgctggcaaaacgtttaacaatgcttgaactgcttgaaaaatacccggcgtgtgaaatgaaattcagcgaatttatcgcccttctgccaagcatacgcccgcgctattactcgatttcttcatcacctcgtgtcgatgaaaaacaagcaagcatcacggtcagcgttgtctcaggaccggcgtggagcggatatggagaatataaaggaattgcgtcgaactatcttgccgagctgcaagaaggagatacgattacgtgctttatttccacaccgcagtcagaatttacgctgccaaaagaccctgaaacgccgcttatcatggtcggaccgggaacaggcgtcgcgccgtttagaggctttgtgcaggcgcgcaaacagctaaaagaacaaggacagtcacttggagaagcacatttatacttcggctgccgttcacctcatgaagactatctgtatcaagaagagcttgaaaacgcccaaagcgaaggcatcattacgcttcataccgctttttctcgcatgccaaatcagccgaaaacatacgttcagcacgtaatggaacaagacggcaagaaattgattgaacttcttgatcaaggagcgcacttctatatttgcggagacggaagccaaatggcacctgccgttgaagcaacgcttatgaaaagctatgctgacgttcaccaagtgagtgaagcagacgctcgcttatggctgcagcagctagaagaaaaaggccgatacgcaaaagacgtgtggctgggg

SEQ ID NO: 554 - protein, 1049 aa, synthetic construct
  REGION 1..1049: note = variant of P450 oxidase from Bacillus megaterium
MTIKEMPQPKTFGELKNLPLLNTDKPVQALMRIADELGEIFKFEAPGSVTRYLSSQRLIKEACDESRFDKNLSQALKFARDFVGDGLSTSWTHEPNWKKAHNILVPSFSQHAMGRYHAMMVDIAVQLVQKWERLNADEHIEVSEDMTRLTLDTIGLCGFNYRFNSFYRDQPHPFIVSVVRALDEVMNKLQRANPDDPAYDENKRQCQEDIKVMNDYVDKIIADRKARGEQSHDLLTQMLNGKDPETGEPLDDGNIRQQIITFLIAGHQTTSGLLSFALYFLVKNPHVLQKVAEEAARVLVDPVPSYKQVKQLKYVGMVLNEALRLWPVAPMFSLYAKEDTVLGGEYPLTKGDEVMVLVPQLHRDKTIWGDDVEEFRPERFENPSRIPQHAFKPFGNGQRACIGQQFALHEATLVLGMMLKHFDFEDHTNYELVIKESRTLKPEGFVVKAKSKGIPLGGIPSPSTEQSAKKVRKKAENAHNTPLLVLYGSNAGTAEGTARDLADIAMSKGFAPQVATLDSHAGNLPREGAVLIVTASYNGHPPDNAKQFVDWLDQASADEVKGVRYSVFGCGDKNWAGTYQKVPAFIDETLAAKGAENIADRGEADASDDFEGTYEEWRDHMWSDVAAYFNLDIENSEDNKSTLSLQFVDSAADMPLAKMHGAFSTNVVASKELQQPGSARSTRHLEIELPKEASYQEGDHLGVIPRNYEGIVNRVTARFGLSASQQIRLEAEEEKLAHLPLAKTVSVEELLQYVELQDPVTRTQLRAMAAKTVCPPHKVELEALLEKQAYKEQVLAKRLTMLELLEKYPACEMKFSEFIALLPSIRPRYYSISSSPRVDEKQASITVSVVSGPAWSGYGEYKGIASNYLAELQEGDTITCFISTPQSEFTLPKDPETPLIMVGPGTGVAPFRGFVQARKQLKEQGQSLGEAHLYFGCRSPHEDYLYQEELENAQSEGIITLHTAFSRMPNQPKTYVQHVMEQDGKKLIELLDQGAHFYICGDGSQMAPAVEATLMKSYADVHQVSEADARLWLQQLEEKGRYAKDVWLG

SEQ ID NO: 555 - DNA, 3147 bp, synthetic construct
  misc_feature 1..3147: note = variant of P450 oxidase from Bacillus megaterium
  source 1..3147: mol_type = other DNA
atgacaattaaggaaatgcctcagcctaagacgtttggagaacttaaaaatttaccgttattaaacacagataaaccggttcaagctttgatgcgtattgcggatgaattaggagaaatctttaaattcgaggcgcctggtagcgtaacgcgctatttatcaagtcagcgtctaattaaagaagcatgcgatgaatcacgctttgataaaaacttaagtcaagcgcttaaatttgcacgtgattttgttggagacgggctgtctacaagctggacgcatgaaccgaattggaaaaaagcgcataatatcttagttccaagctttagtcagcatgcaatggggcgttatcatgcgatgatggtcgatatcgccgtgcagcttgttcaaaagtgggagcgtctaaatgcagatgagcatattgaagtatcggaagacatgacacgtttaacgcttgatacaattggtctttgcggctttaactatcgctttaacagcttttaccgagatcagcctcatccatttattgtgagtgtggttcgtgcactggatgaagtaatgaacaagctgcagcgagcaaatccagacgacccagcttatgatgaaaacaagcgccagtgtcaagaagatatcaaggtgatgaacgactatgtagataaaattattgcagatcgcaaagcaaggggtgaacaaagtcatgatttattaacgcagatgctaaacggaaaagatccagaaacgggtgagccgcttgatgacgggaacattcgtcagcaaattattacattcttaattgcgggacaccaaacgacaagtggtcttttatcatttgcgctgtatttcttagtgaaaaatccacatgtattacaaaaagtagcagaagaagcagcacgagttctagtagatcctgttccaagctacaaacaagtcaaacagcttaaatatgttggcatggtcttaaacgaagcgctgcgcttatggccagtagcgcctatgttttccctatatgcaaaagaagatacggtgcttggaggagaatatcctttaacgaaaggcgacgaagtaatggttctggtgcctcagcttcaccgtgataaaacaatttggggagacgatgtggaggagttccgtccagagcgttttgaaaatccaagtgcgattccgcagcatgcgtttaaaccgtttggaaacggtcagcgtgcgtgtatcggtcagcagttcgctcttcatgaagcaacgctggtacttggtatgatgctaaaacactttgactttgaagatcatacaaactacgagctcgttattaaagaatcgcggacgttaaaacctgaaggctttgtggtaaaagcaaaatcgaaaggcattccgcttggcggtattccttcacctagcactgaacagtctgctaaaaaagtacgcaaaaaggcagaaaacgctcataatacgccgctgcttgtgctatacggttcaaatgcgggaacagctgaaggaacggcgcgtgatttagcagatattgcaatgagcaaaggatttgcaccgcaggtcgcaacgcttgattcacacgccggtaatcttccgcgcgaaggagctgtattaattgtaacggcgtcttataacggtcatccgcctgataacgcaaagcaatttgtcgactggttagaccaagcgtctgctgatgaagtaaaaggcgttcgctactccgtatttggatgcggcgataaaaattgggcggggacgtatcaaaaagtgcctgcttttatcgatgaaacgcttgccgctaaaggggcagaaaacatcgctgaccgcggtgaagcagatgcaagcgacgactttgaaggcacatatgaagaatggcgtgatcatatgtggagtgacgtagcagcctactttaacctcgacattgaaaacagtgaagataataaatctactctttcacttcaatttgtcgacagcgcctctgatatgccgcttgcgaaaatgcacggtgcgttttcaacgaacgtcgtagcaagcaaagaacttcaacagccaggcagtgcacgaagcacgcgacatcttgaaattgaacttccaaaagaagcttcttatcaagaaggagatcatttaggtgttattcctcgcaactatgaaggaatagtaaaccgtgtaacagcaaggttcggcctaagcgcatcacagcaaatccgtctggaagcagaagaagaaaaattagctcatttgccactcgctaaaacagtatccgtagaagagcttctgcaatacgtggagcttcaagatcctgttacgcgcacgcagcttcgcgcaatggctgctaaaacggtctgcccgccgcataaagtagagcttgaagccttgcttgaaaagcaagcctacaaagaacaagtgctggcaaaacgtttaacaatgcttgaactgcttgaaaaatacccggcgtgtgaaatgaaattcagcgaatttatcgcccttctgccaagcatacgcccgcgctattactcgatttcttcatcacctcgtgtcgatgaaaaacaagcaagcatcacggtcagcgttgtctcaggaccggcgtggagcggatatggagaatataaaggaattgcgtcgaactatcttgccgagctgcaagaaggagatacgattacgtgctttatttccacaccgcagtcagaatttacgctgccaaaagaccctgaaacgccgcttatcatggtcggaccgggaacaggcgtcgcgccgtttagaggctttgtgcaggcgcgcaaacagctaaaagaacaaggacagtcacttggagaagcacatttatacttcggctgccgttcacctcatgaagactatctgtatcaagaagagcttgaaaacgcccaaagcgaaggcatcattacgcttcataccgctttttctcgcatgccaaatcagccgaaaacatacgttcagcacgtaatggaacaagacggcaagaaattgattgaacttcttgatcaaggagcgcacttctatatttgcggagacggaagccaaatggcacctgccgttgaagcaacgcttatgaaaagctatgctgacgttcaccaagtgagtgaagcagacgctcgcttatggctgcagcagctagaagaaaaaggccgatacgcaaaagacgtgtggctgggg

SEQ ID NO: 556 - protein, 1049 aa, synthetic construct
  REGION 1..1049: note = variant of P450 oxidase from Bacillus megaterium
MTIKEMPQPKTFGELKNLPLLNTDKPVQALMRIADELGEIFKFEAPGSVTRYLSSQRLIKEACDESRFDKNLSQALKFARDFVGDGLSTSWTHEPNWKKAHNILVPSFSQHAMGRYHAMMVDIAVQLVQKWERLNADEHIEVSEDMTRLTLDTIGLCGFNYRFNSFYRDQPHPFIVSVVRALDEVMNKLQRANPDDPAYDENKRQCQEDIKVMNDYVDKIIADRKARGEQSHDLLTQMLNGKDPETGEPLDDGNIRQQIITFLIAGHQTTSGLLSFALYFLVKNPHVLQKVAEEAARVLVDPVPSYKQVKQLKYVGMVLNEALRLWPVAPMFSLYAKEDTVLGGEYPLTKGDEVMVLVPQLHRDKTIWGDDVEEFRPERFENPSAIPQHAFKPFGNGQRACIGQQFALHEATLVLGMMLKHFDFEDHTNYELVIKESRTLKPEGFVVKAKSKGIPLGGIPSPSTEQSAKKVRKKAENAHNTPLLVLYGSNAGTAEGTARDLADIAMSKGFAPQVATLDSHAGNLPREGAVLIVTASYNGHPPDNAKQFVDWLDQASADEVKGVRYSVFGCGDKNWAGTYQKVPAFIDETLAAKGAENIADRGEADASDDFEGTYEEWRDHMWSDVAAYFNLDIENSEDNKSTLSLQFVDSASDMPLAKMHGAFSTNVVASKELQQPGSARSTRHLEIELPKEASYQEGDHLGVIPRNYEGIVNRVTARFGLSASQQIRLEAEEEKLAHLPLAKTVSVEELLQYVELQDPVTRTQLRAMAAKTVCPPHKVELEALLEKQAYKEQVLAKRLTMLELLEKYPACEMKFSEFIALLPSIRPRYYSISSSPRVDEKQASITVSVVSGPAWSGYGEYKGIASNYLAELQEGDTITCFISTPQSEFTLPKDPETPLIMVGPGTGVAPFRGFVQARKQLKEQGQSLGEAHLYFGCRSPHEDYLYQEELENAQSEGIITLHTAFSRMPNQPKTYVQHVMEQDGKKLIELLDQGAHFYICGDGSQMAPAVEATLMKSYADVHQVSEADARLWLQQLEEKGRYAKDVWLG

SEQ ID NO: 557 - DNA, 3147 bp, synthetic construct
  misc_feature 1..3147: note = variant of P450 oxidase from Bacillus megaterium
  source 1..3147: mol_type = other DNA
atgacaattaaggaaatgcctcagcctaagacgtttggagaacttaaaaatttaccgttattaaacacagataaaccggttcaagctttgatgcgtattgcggatgaattaggagaaatctttaaattcgaggcgcctggtagcgtaacgcgctatttatcaagtcagcgtctaattaaagaagcatgcgatgaatcacgctttgataaaaacttaagtcaagcgcttaaatttgcacgtgattttgttggagacgggctgtctacaagctggacgcatgaaccgaattggaaaaaagcgcataatatcttagttccaagctttagtcagcatgcaatggggcgttatcatgcgatgatggtcgatatcgccgtgcagcttgttcaaaagtgggagcgtctaaatgcagatgagcatattgaagtatcggaagacatgacacgtttaacgcttgatacaattggtctttgcggctttaactatcgctttaacagcttttaccgagatcagcctcatccatttattgtgagtgtggttcgtgcactggatgaagtaatgaacaagctgcagcgagcaaatccagacgacccagcttatgatgaaaacaagcgccagtgtcaagaagatatcaaggtgatgaacgactatgtagataaaattattgcagatcgcaaagcaaggggtgaacaaagtcatgatttattaacgcagatgctaaacggaaaagatccagaaacgggtgagccgcttgatgacgggaacattcgtcagcaaattattacattcttaattgcgggacaccaaacgacaagtggtcttttatcatttgcgctgtatttcttagtgaaaaatccacatgtattacaaaaagtagcagaagaagcagcacgagttctagtagatcctgttccaagctacaaacaagtcaaacagcttaaatatgttggcatggtcttaaacgaagcgctgcgcttatggccagtagcgcctatgttttccctatatgcaaaagaagatacggtgcttggaggagaatatcctttaacgaaaggcgacgaagtaatggttctggtgcctcagcttcaccgtgataaaacaatttggggagacgatgtggaggagttccgtccagagcgttttgaaaatccaagtgcgattccgcagcatgcgtttaaaccgtttggaaacggtcagcgtgcgtgtatcggtcagcagttcgctcttcatgaagcaacgctggtacttggtatgatgctaaaacactttgactttgaagatcatacaaactacgagctcgttattaaagaatcgcggacgttaaaacctgaaggctttgtggtaaaagcaaaatcgaaaggcattccgcttggcggtattccttcacctagcactgaacagtctgctaaaaaagtacgcaaaaaggcagaaaacgctcataatacgccgctgcttgtgctatacggttcaaatgcgggaacagctgaaggaacggcgcgtgatttagcagatattgcaatgagcaaaggatttgcaccgcaggtcgcaacgcttgattcacacgccggtaatcttccgcgcgaaggagctgtattaattgtaacggcgtcttataacggtcatccgcctgataacgcaaagcaatttgtcgactggttagaccaagcgtctgctgatgaagtaaaaggcgttcgctactccgtatttggatgcggcgataaaaattgggcggggacgtatcaaaaagtgcctgcttttatcgatgaaacgcttgccgctaaaggggcagaaaacatcgctgaccgcggtgaagcagatgcaagcgacgactttgaaggcacatatgaagaatggcgtgatcatatgtggagtgacgtagcagcctactttaacctcgacattgaaaacagtgaagataataaatctactctttcacttcaatttgtcgacagcgccgcggatatgccgcttgcgaaaatgcacggtgcgttttcaacgaacgtcgtagcaagcaaagaacttcaacagccaggcagtgcacgaagcacgcgacatcttgaaattgaacttccaaaagaagcttcttatcaagaaggagatcatttaggtgttattcctcgcaactatgaaggaatagtaaaccgtgtaacatgtaggttcggcctaagcgcatcacagcaaatccgtctggaagcagaagaagaaaaattagctcatttgccactcgctaaaacagtatccgtagaagagcttctgcaatacgtggagcttcaagatcctgttacgcgcacgcagcttcgcgcaatggctgctaaaacggtctgcccgccgcataaagtagagcttgaagccttgcttgaaaagcaagcctacaaagaacaagtgctggcaaaacgtttaacaatgcttgaactgcttgaaaaatacccggcgtgtgaaatgaaattcagcgaatttatcgcccttctgccaagcatacgcccgcgctattactcgatttcttcatcacctcgtgtcgatgaaaaacaagcaagcatcacggtcagcgttgtctcaggaccggcgtggagcggatatggagaatataaaggaattgcgtcgaactatcttgccgagctgcaagaaggagatacgattacgtgctttatttccacaccgcagtcagaatttacgctgccaaaagaccctgaaacgccgcttatcatggtcggaccgggaacaggcgtcgcgccgtttagaggctttgtgcaggcgcgcaaacagctaaaagaacaaggacagtcacttggagaagcacatttatacttcggctgccgttcacctcatgaagactatctgtatcaagaagagcttgaaaacgcccaaagcgaaggcatcattacgcttcataccgctttttctcgcatgccaaatcagccgaaaacatacgttcagcacgtaatggaacaagacggcaagaaattgattgaacttcttgatcaaggagcgcacttctatatttgcggagacggaagccaaatggcacctgccgttgaagcaacgcttatgaaaagctatgctgacgttcaccaagtgagtgaagcagacgctcgcttatggctgcagcagctagaagaaaaaggccgatacgcaaaagacgtgtggctgggg

SEQ ID NO: 558 - protein, 1049 aa, synthetic construct
  REGION 1..1049: note = variant of P450 oxidase from Bacillus megaterium
MTIKEMPQPKTFGELKNLPLLNTDKPVQALMRIADELGEIFKFEAPGSVTRYLSSQRLIKEACDESRFDKNLSQALKFARDFVGDGLSTSWTHEPNWKKAHNILVPSFSQHAMGRYHAMMVDIAVQLVQKWERLNADEHIEVSEDMTRLTLDTIGLCGFNYRFNSFYRDQPHPFIVSVVRALDEVMNKLQRANPDDPAYDENKRQCQEDIKVMNDYVDKIIADRKARGEQSHDLLTQMLNGKDPETGEPLDDGNIRQQIITFLIAGHQTTSGLLSFALYFLVKNPHVLQKVAEEAARVLVDPVPSYKQVKQLKYVGMVLNEALRLWPVAPMFSLYAKEDTVLGGEYPLTKGDEVMVLVPQLHRDKTIWGDDVEEFRPERFENPSAIPQHAFKPFGNGQRACIGQQFALHEATLVLGMMLKHFDFEDHTNYELVIKESRTLKPEGFVVKAKSKGIPLGGIPSPSTEQSAKKVRKKAENAHNTPLLVLYGSNAGTAEGTARDLADIAMSKGFAPQVATLDSHAGNLPREGAVLIVTASYNGHPPDNAKQFVDWLDQASADEVKGVRYSVFGCGDKNWAGTYQKVPAFIDETLAAKGAENIADRGEADASDDFEGTYEEWRDHMWSDVAAYFNLDIENSEDNKSTLSLQFVDSAADMPLAKMHGAFSTNVVASKELQQPGSARSTRHLEIELPKEASYQEGDHLGVIPRNYEGIVNRVTCRFGLSASQQIRLEAEEEKLAHLPLAKTVSVEELLQYVELQDPVTRTQLRAMAAKTVCPPHKVELEALLEKQAYKEQVLAKRLTMLELLEKYPACEMKFSEFIALLPSIRPRYYSISSSPRVDEKQASITVSVVSGPAWSGYGEYKGIASNYLAELQEGDTITCFISTPQSEFTLPKDPETPLIMVGPGTGVAPFRGFVQARKQLKEQGQSLGEAHLYFGCRSPHEDYLYQEELENAQSEGIITLHTAFSRMPNQPKTYVQHVMEQDGKKLIELLDQGAHFYICGDGSQMAPAVEATLMKSYADVHQVSEADARLWLQQLEEKGRYAKDVWLG

SEQ ID NO: 559 - DNA, 3147 bp, synthetic construct
  misc_feature 1..3147: note = variant of P450 oxidase from Bacillus megaterium
  source 1..3147: mol_type = other DNA
atgacaattaaggaaatgcctcagcctaagacgtttggagaacttaaaaatttaccgttattaaacacagataaaccggttcaagctttgatgcgtattgcggatgaattaggagaaatctttaaattcgaggcgcctggtagcgtaacgcgctatttatcaagtcagcgtctaattaaagaagcatgcgatgaatcacgctttgataaaaacttaagtcaagcgcttaaatttgcacgtgattttgttggagacgggctgtctacaagctggacgcatgaaccgaattggaaaaaagcgcataatatcttagttccaagctttagtcagcatgcaatggggcgttatcatgcgatgatggtcgatatcgccgtgcagcttgttcaaaagtgggagcgtctaaatgcagatgagcatattgaagtatcggaagacatgacacgtttaacgcttgatacaattggtctttgcggctttaactatcgctttaacagcttttaccgagatcagcctcatccatttattgtgagtgtggttcgtgcactggatgaagtaatgaacaagctgcagcgagcaaatccagacgacccagcttatgatgaaaacaagcgccagtgtcaagaagatatcaaggtgatgaacgactatgtagataaaattattgcagatcgcaaagcaaggggtgaacaaagtcatgatttattaacgcagatgctaaacggaaaagatccagaaacgggtgagccgcttgatgacgggaacattcgtcagcaaattattacattcttaattgcgggacaccaaacgacaagtggtcttttatcatttgcgctgtatttcttagtgaaaaatccacatgtattacaaaaagtagcagaagaagcagcacgagttctagtagatcctgttccaagctacaaacaagtcaaacagcttaaatatgttggcatggtcttaaacgaagcgctgcgcttatggccagtagcgcctatgttttccctatatgcaaaagaagatacggtgcttggaggagaatatcctttaacgaaaggcgacgaagtaatggttctggtgcctcagcttcaccgtgataaaacaatttggggagacgatgtggaggagttccgtccagagcgttttgaaaatccaagtgcgattccgcagcatgcgtttaaaccgtttggaaacggtcagcgtgcgtgtatcggtcagcagttcgctcttcatgaagcaacgctggtacttggtatgatgctaaaacactttgactttgaagatcatacaaactacgagctcgttattaaagaatcgcggacgttaaaacctgaaggctttgtggtaaaagcaaaatcgaaaggcattccgcttggcggtattccttcacctagcactgaacagtctgctaaaaaagtacgcaaaaaggcagaaaacgctcataatacgccgctgcttgtgctatacggttcaaatgcgggaacagctgaaggaacggcgcgtgatttagcagatattgcaatgagcaaaggatttgcaccgcaggtcgcaacgcttgattcacacgccggtaatcttccgcgcgaaggagctgtattaattgtaacggcgtcttataacggtcatccgcctgataacgcaaagcaatttgtcgactggttagaccaagcgtctgctgatgaagtaaaaggcgttcgctactccgtatttggatgcggcgataaaaattgggcggggacgtatcaaaaagtgcctgcttttatcgatgaaacgcttgccgctaaaggggcagaaaacatcgctgaccgcggtgaagcagatgcaagcgacgactttgaaggcacatatgaagaatggcgtgatcatatgtggagtgacgtagcagcctactttaacctcgacattgaaaacagtgaagataataaatctactctttcacttcaatttgtcgacagcgccgcggatatgccgcttgcgaaaatgcacggtgcgttttcaacgaacgtcgtagcaagcaaagaacttcaacagccaggcagtgcacgaagcacgcgacatcttgaaattgaacttccaaaagaagcttcttatcaagaaggagatcatttaggtgttattcctcgcaactatgaaggaatagtaaaccgtgtaacacagaggttcggcctaagcgcatcacagcaaatccgtctggaagcagaagaagaaaaattagctcatttgccactcgctaaaacagtatccgtagaagagcttctgcaatacgtggagcttcaagatcctgttacgcgcacgcagcttcgcgcaatggctgctaaaacggtctgcccgccgcataaagtagagcttgaagccttgcttgaaaagcaagcctacaaagaacaagtgctggcaaaacgtttaacaatgcttgaactgcttgaaaaatacccggcgtgtgaaatgaaattcagcgaatttatcgcccttctgccaagcatacgcccgcgctattactcgatttcttcatcacctcgtgtcgatgaaaaacaagcaagcatcacggtcagcgttgtctcaggaccggcgtggagcggatatggagaatataaaggaattgcgtcgaactatcttgccgagctgcaagaaggagatacgattacgtgctttatttccacaccgcagtcagaatttacgctgccaaaagaccctgaaacgccgcttatcatggtcggaccgggaacaggcgtcgcgccgtttagaggctttgtgcaggcgcgcaaacagctaaaagaacaaggacagtcacttggagaagcacatttatacttcggctgccgttcacctcatgaagactatctgtatcaagaagagcttgaaaacgcccaaagcgaaggcatcattacgcttcataccgctttttctcgcatgccaaatcagccgaaaacatacgttcagcacgtaatggaacaagacggcaagaaattgattgaacttcttgatcaaggagcgcacttctatatttgcggagacggaagccaaatggcacctgccgttgaagcaacgcttatgaaaagctatgctgacgttcaccaagtgagtgaagcagacgctcgcttatggctgcagcagctagaagaaaaaggccgatacgcaaaagacgtgtggctgggg

SEQ ID NO: 560 - protein, 1049 aa, synthetic construct
  REGION 1..1049: note = variant of P450 oxidase from Bacillus megaterium
MTIKEMPQPKTFGELKNLPLLNTDKPVQALMRIADELGEIFKFEAPGSVTRYLSSQRLIKEACDESRFDKNLSQALKFARDFVGDGLSTSWTHEPNWKKAHNILVPSFSQHAMGRYHAMMVDIAVQLVQKWERLNADEHIEVSEDMTRLTLDTIGLCGFNYRFNSFYRDQPHPFIVSVVRALDEVMNKLQRANPDDPAYDENKRQCQEDIKVMNDYVDKIIADRKARGEQSHDLLTQMLNGKDPETGEPLDDGNIRQQIITFLIAGHQTTSGLLSFALYFLVKNPHVLQKVAEEAARVLVDPVPSYKQVKQLKYVGMVLNEALRLWPVAPMFSLYAKEDTVLGGEYPLTKGDEVMVLVPQLHRDKTIWGDDVEEFRPERFENPSAIPQHAFKPFGNGQRACIGQQFALHEATLVLGMMLKHFDFEDHTNYELVIKESRTLKPEGFVVKAKSKGIPLGGIPSPSTEQSAKKVRKKAENAHNTPLLVLYGSNAGTAEGTARDLADIAMSKGFAPQVATLDSHAGNLPREGAVLIVTASYNGHPPDNAKQFVDWLDQASADEVKGVRYSVFGCGDKNWAGTYQKVPAFIDETLAAKGAENIADRGEADASDDFEGTYEEWRDHMWSDVAAYFNLDIENSEDNKSTLSLQFVDSAADMPLAKMHGAFSTNVVASKELQQPGSARSTRHLEIELPKEASYQEGDHLGVIPRNYEGIVNRVTQRFGLSASQQIRLEAEEEKLAHLPLAKTVSVEELLQYVELQDPVTRTQLRAMAAKTVCPPHKVELEALLEKQAYKEQVLAKRLTMLELLEKYPACEMKFSEFIALLPSIRPRYYSISSSPRVDEKQASITVSVVSGPAWSGYGEYKGIASNYLAELQEGDTITCFISTPQSEFTLPKDPETPLIMVGPGTGVAPFRGFVQARKQLKEQGQSLGEAHLYFGCRSPHEDYLYQEELENAQSEGIITLHTAFSRMPNQPKTYVQHVMEQDGKKLIELLDQGAHFYICGDGSQMAPAVEATLMKSYADVHQVSEADARLWLQQLEEKGRYAKDVWLG

SEQ ID NO: 561 - DNA, 3147 bp, synthetic construct
  misc_feature 1..3147: note = variant of P450 oxidase from Bacillus megaterium
  source 1..3147: mol_type = other DNA
atgacaattaaggaaatgcctcagcctaagacgtttggagaacttaaaaatttaccgttattaaacacagataaaccggttcaagctttgatgcgtattgcggatgaattaggagaaatctttaaattcgaggcgcctggtagcgtaacgcgctatttatcaagtcagcgtctaattaaagaagcatgcgatgaatcacgctttgataaaaacttaagtcaagcgcttaaatttgcacgtgattttgttggagacgggctgtctacaagctggacgcatgaaccgaattggaaaaaagcgcataatatcttagttccaagctttagtcagcatgcaatggggcgttatcatgcgatgatggtcgatatcgccgtgcagcttgttcaaaagtgggagcgtctaaatgcagatgagcatattgaagtatcggaagacatgacacgtttaacgcttgatacaattggtctttgcggctttaactatcgctttaacagcttttaccgagatcagcctcatccatttattgtgagtgtggttcgtgcactggatgaagtaatgaacaagctgcagcgagcaaatccagacgacccagcttatgatgaaaacaagcgccagtgtcaagaagatatcaaggtgatgaacgactatgtagataaaattattgcagatcgcaaagcaaggggtgaacaaagtcatgatttattaacgcagatgctaaacggaaaagatccagaaacgggtgagccgcttgatgacgggaacattcgtcagcaaattattacattcttaattgcgggacaccaaacgacaagtggtcttttatcatttgcgctgtatttcttagtgaaaaatccacatgtattacaaaaagtagcagaagaagcagcacgagttctagtagatcctgttccaagctacaaacaagtcaaacagcttaaatatgttggcatggtcttaaacgaagcgctgcgcttatggccagtagcgcctatgttttccctatatgcaaaagaagatacggtgcttggaggagaatatcctttaacgaaaggcgacgaagtaatggttctggtgcctcagcttcaccgtgataaaacaatttggggagacgatgtggaggagttccgtccagagcgttttgaaaatccaagtgcgattccgcagcatgcgtttaaaccgtttggaaacggtcagcgtgcgtgtatcggtcagcagttcgctcttcatgaagcaacgctggtacttggtatgatgctaaaacactttgactttgaagatcatacaaactacgagctcgttattaaagaatcgcggacgttaaaacctgaaggctttgtggtaaaagcaaaatcgaaaggcattccgcttggcggtattccttcacctagcactgaacagtctgctaaaaaagtacgcaaaaaggcagaaaacgctcataatacgccgctgcttgtgctatacggttcaaatgcgggaacagctgaaggaacggcgcgtgatttagcagatattgcaatgagcaaaggatttgcaccgcaggtcgcaacgcttgattcacacgccggtaatcttccgcgcgaaggagctgtattaattgtaacggcgtcttataacggtcatccgcctgataacgcaaagcaatttgtcgactggttagctcaagcgtctgctgatgaagtaaaaggcgttcgctactccgtatttggatgcggcgataaaaattgggcggggacgtatcaaaaagtgcctgcttttatcgatgaaacgcttgccgctaaaggggcagaaaacatcgctgaccgcggtgaagcagatgcaagcgacgactttgaaggcacatatgaagaatggcgtgatcatatgtggagtgacgtagcagcctactttaacctcgacattgaaaacagtgaagataataaatctactctttcacttcaatttgtcgacagcgccgcggatatgccgcttgcgaaaatgcacggtgcgttttcaacgaacgtcgtagcaagcaaagaacttcaacagccaggcagtgcacgaagcacgcgacatcttgaaattgaacttccaaaagaagcttcttatcaagaaggagatcatttaggtgttattcctcgcaactatgaaggaatagtaaaccgtgtaacagcaaggttcggcctaagcgcatcacagcaaatccgtctggaagcagaagaagaaaaattagctcatttgccactcgctaaaacagtatccgtagaagagcttctgcaatacgtggagcttcaagatcctgttacgcgcacgcagcttcgcgcaatggctgctaaaacggtctgcccgccgcataaagtagagcttgaagccttgcttgaaaagcaagcctacaaagaacaagtgctggcaaaacgtttaacaatgcttgaactgcttgaaaaatacccggcgtgtgaaatgaaattcagcgaatttatcgcccttctgccaagcatacgcccgcgctattactcgatttcttcatcacctcgtgtcgatgaaaaacaagcaagcatcacggtcagcgttgtctcaggaccggcgtggagcggatatggagaatataaaggaattgcgtcgaactatcttgccgagctgcaagaaggagatacgattacgtgctttatttccacaccgcagtcagaatttacgctgccaaaagaccctgaaacgccgcttatcatggtcggaccgggaacaggcgtcgcgccgtttagaggctttgtgcaggcgcgcaaacagctaaaagaacaaggacagtcacttggagaagcacatttatacttcggctgccgttcacctcatgaagactatctgtatcaagaagagcttgaaaacgcccaaagcgaaggcatcattacgcttcataccgctttttctcgcatgccaaatcagccgaaaacatacgttcagcacgtaatggaacaagacggcaagaaattgattgaacttcttgatcaaggagcgcacttctatatttgcggagacggaagccaaatggcacctgccgttgaagcaacgcttatgaaaagctatgctgacgttcaccaagtgagtgaagcagacgctcgcttatggctgcagcagctagaagaaaaaggccgatacgcaaaagacgtgtggctgggg

SEQ ID NO: 562 - protein, 1049 aa, synthetic construct
  REGION 1..1049: note = variant of P450 oxidase from Bacillus megaterium
MTIKEMPQPKTFGELKNLPLLNTDKPVQALMRIADELGEIFKFEAPGSVTRYLSSQRLIKEACDESRFDKNLSQALKFARDFVGDGLSTSWTHEPNWKKAHNILVPSFSQHAMGRYHAMMVDIAVQLVQKWERLNADEHIEVSEDMTRLTLDTIGLCGFNYRFNSFYRDQPHPFIVSVVRALDEVMNKLQRANPDDPAYDENKRQCQEDIKVMNDYVDKIIADRKARGEQSHDLLTQMLNGKDPETGEPLDDGNIRQQIITFLIAGHQTTSGLLSFALYFLVKNPHVLQKVAEEAARVLVDPVPSYKQVKQLKYVGMVLNEALRLWPVAPMFSLYAKEDTVLGGEYPLTKGDEVMVLVPQLHRDKTIWGDDVEEFRPERFENPSAIPQHAFKPFGNGQRACIGQQFALHEATLVLGMMLKHFDFEDHTNYELVIKESRTLKPEGFVVKAKSKGIPLGGIPSPSTEQSAKKVRKKAENAHNTPLLVLYGSNAGTAEGTARDLADIAMSKGFAPQVATLDSHAGNLPREGAVLIVTASYNGHPPDNAKQFVDWLAQASADEVKGVRYSVFGCGDKNWAGTYQKVPAFIDETLAAKGAENIADRGEADASDDFEGTYEEWRDHMWSDVAAYFNLDIENSEDNKSTLSLQFVDSAADMPLAKMHGAFSTNVVASKELQQPGSARSTRHLEIELPKEASYQEGDHLGVIPRNYEGIVNRVTARFGLSASQQIRLEAEEEKLAHLPLAKTVSVEELLQYVELQDPVTRTQLRAMAAKTVCPPHKVELEALLEKQAYKEQVLAKRLTMLELLEKYPACEMKFSEFIALLPSIRPRYYSISSSPRVDEKQASITVSVVSGPAWSGYGEYKGIASNYLAELQEGDTITCFISTPQSEFTLPKDPETPLIMVGPGTGVAPFRGFVQARKQLKEQGQSLGEAHLYFGCRSPHEDYLYQEELENAQSEGIITLHTAFSRMPNQPKTYVQHVMEQDGKKLIELLDQGAHFYICGDGSQMAPAVEATLMKSYADVHQVSEADARLWLQQLEEKGRYAKDVWLG

SEQ ID NO: 563 - DNA, 3147 bp, synthetic construct
  misc_feature 1..3147: note = variant of P450 oxidase from Bacillus megaterium
  source 1..3147: mol_type = other DNA
atgacaattaaggaaatgcctcagcctaagacgtttggagaacttaaaaatttaccgttattaaacacagataaaccggttcaagctttgatgcgtattgcggatgaattaggagaaatctttaaattcgaggcgcctggtagcgtaacgcgctatttatcaagtcagcgtctaattaaagaagcatgcgatgaatcacgctttgataaaaacttaagtcaagcgcttaaatttgcacgtgattttgttggagacgggctgtctacaagctggacgcatgaaccgaattggaaaaaagcgcataatatcttagttccaagctttagtcagcatgcaatggggcgttatcatgcgatgatggtcgatatcgccgtgcagcttgttcaaaagtgggagcgtctaaatgcagatgagcatattgaagtatcggaagacatgacacgtttaacgcttgatacaattggtctttgcggctttaactatcgctttaacagcttttaccgagatcagcctcatccatttattgtgagtgtggttcgtgcactggatgaagtaatgaacaagctgcagcgagcaaatccagacgacccagcttatgatgaaaacaagcgccagtgtcaagaagatatcaaggtgatgaacgactatgtagataaaattattgcagatcgcaaagcaaggggtgaacaaagtcatgatttattaacgcagatgctaaacggaaaagatccagaaacgggtgagccgcttgatgacgggaacattcgtcagcaaattattacattcttaattgcgggacaccaaacgacaagtggtcttttatcatttgcgctgtatttcttagtgaaaaatccacatgtattacaaaaagtagcagaagaagcagcacgagttctagtagatcctgttccaagctacaaacaagtcaaacagcttaaatatgttggcatggtcttaaacgaagcgctgcgcttatggccagtagcgcctatgttttccctatatgcaaaagaagatacggtgcttggaggagaatatcctttaacgaaaggcgacgaagtaatggttctggtgcctcagcttcaccgtgataaaacaatttggggagacgatgtggaggagttccgtccagagcgttttgaaaatccaagtgcgattccgcagcatgcgtttaaaccgtttggaaacggtcagcgtgcgtgtatcggtcagcagttcgctcttcatgaagcaacgctggtacttggtatgatgctaaaacactttgactttgaagatcatacaaactacgagctcgttattaaagaatcgcggacgttaaaacctgaaggctttgtggtaaaagcaaaatcgaaaggcattccgcttggcggtattccttcacctagcactgaacagtctgctaaaaaagtacgcaaaaaggcagaaaacgctcataatacgccgctgcttgtgctatacggttcaaatgcgggaacagctgaaggaacggcgcgtgatttagcagatattgcaatgagcaaaggatttgcaccgcaggtcgcaacgcttgattcacacgccggtaatcttccgcgcgaaggagctgtattaattgtaacggcgtcttataacggtcatccgcctgataacgcaaagcaatttgtcgactggttaggtcaagcgtctgctgatgaagtaaaaggcgttcgctactccgtatttggatgcggcgataaaaattgggcggggacgtatcaaaaagtgcctgcttttatcgatgaaacgcttgccgctaaaggggcagaaaacatcgctgaccgcggtgaagcagatgcaagcgacgactttgaaggcacatatgaagaatggcgtgatcatatgtggagtgacgtagcagcctactttaacctcgacattgaaaacagtgaagataataaatctactctttcacttcaatttgtcgacagcgccgcggatatgccgcttgcgaaaatgcacggtgcgttttcaacgaacgtcgtagcaagcaaagaacttcaacagccaggcagtgcacgaagcacgcgacatcttgaaattgaacttccaaaagaagcttcttatcaagaaggagatcatttaggtgttattcctcgcaactatgaaggaatagtaaaccgtgtaacagcaaggttcggcctaagcgcatcacagcaaatccgtctggaagcagaagaagaaaaattagctcatttgccactcgctaaaacagtatccgtagaagagcttctgcaatacgtggagcttcaagatcctgttacgcgcacgcagcttcgcgcaatggctgctaaaacggtctgcccgccgcataaagtagagcttgaagccttgcttgaaaagcaagcctacaaagaacaagtgctggcaaaacgtttaacaatgcttgaactgcttgaaaaatacccggcgtgtgaaatgaaattcagcgaatttatcgcccttctgccaagcatacgcccgcgctattactcgatttcttcatcacctcgtgtcgatgaaaaacaagcaagcatcacggtcagcgttgtctcaggaccggcgtggagcggatatggagaatataaaggaattgcgtcgaactatcttgccgagctgcaagaaggagatacgattacgtgctttatttccacaccgcagtcagaatttacgctgccaaaagaccctgaaacgccgcttatcatggtcggaccgggaacaggcgtcgcgccgtttagaggctttgtgcaggcgcgcaaacagctaaaagaacaaggacagtcacttggagaagcacatttatacttcggctgccgttcacctcatgaagactatctgtatcaagaagagcttgaaaacgcccaaagcgaaggcatcattacgcttcataccgctttttctcgcatgccaaatcagccgaaaacatacgttcagcacgtaatggaacaagacggcaagaaattgattgaacttcttgatcaaggagcgcacttctatatttgcggagacggaagccaaatggcacctgccgttgaagcaacgcttatgaaaagctatgctgacgttcaccaagtgagtgaagcagacgctcgcttatggctgcagcagctagaagaaaaaggccgatacgcaaaagacgtgtggctgggg

SEQ ID NO: 564 - protein, 1049 aa, synthetic construct
  REGION 1..1049: note = variant of P450 oxidase from Bacillus megaterium
MTIKEMPQPKTFGELKNLPLLNTDKPVQALMRIADELGEIFKFEAPGSVTRYLSSQRLIKEACDESRFDKNLSQALKFARDFVGDGLSTSWTHEPNWKKAHNILVPSFSQHAMGRYHAMMVDIAVQLVQKWERLNADEHIEVSEDMTRLTLDTIGLCGFNYRFNSFYRDQPHPFIVSVVRALDEVMNKLQRANPDDPAYDENKRQCQEDIKVMNDYVDKIIADRKARGEQSHDLLTQMLNGKDPETGEPLDDGNIRQQIITFLIAGHQTTSGLLSFALYFLVKNPHVLQKVAEEAARVLVDPVPSYKQVKQLKYVGMVLNEALRLWPVAPMFSLYAKEDTVLGGEYPLTKGDEVMVLVPQLHRDKTIWGDDVEEFRPERFENPSAIPQHAFKPFGNGQRACIGQQFALHEATLVLGMMLKHFDFEDHTNYELVIKESRTLKPEGFVVKAKSKGIPLGGIPSPSTEQSAKKVRKKAENAHNTPLLVLYGSNAGTAEGTARDLADIAMSKGFAPQVATLDSHAGNLPREGAVLIVTASYNGHPPDNAKQFVDWLGQASADEVKGVRYSVFGCGDKNWAGTYQKVPAFIDETLAAKGAENIADRGEADASDDFEGTYEEWRDHMWSDVAAYFNLDIENSEDNKSTLSLQFVDSAADMPLAKMHGAFSTNVVASKELQQPGSARSTRHLEIELPKEASYQEGDHLGVIPRNYEGIVNRVTARFGLSASQQIRLEAEEEKLAHLPLAKTVSVEELLQYVELQDPVTRTQLRAMAAKTVCPPHKVELEALLEKQAYKEQVLAKRLTMLELLEKYPACEMKFSEFIALLPSIRPRYYSISSSPRVDEKQASITVSVVSGPAWSGYGEYKGIASNYLAELQEGDTITCFISTPQSEFTLPKDPETPLIMVGPGTGVAPFRGFVQARKQLKEQGQSLGEAHLYFGCRSPHEDYLYQEELENAQSEGIITLHTAFSRMPNQPKTYVQHVMEQDGKKLIELLDQGAHFYICGDGSQMAPAVEATLMKSYADVHQVSEADARLWLQQLEEKGRYAKDVWLG

SEQ ID NO: 565 - DNA, 3147 bp, synthetic construct
  misc_feature 1..3147: note = variant of P450 oxidase from Bacillus megaterium
  source 1..3147: mol_type = other DNA
atgacaattaaggaaatgcctcagcctaagacgtttggagaacttaaaaatttaccgttattaaacacagataaaccggttcaagctttgatgcgtattgcggatgaattaggagaaatctttaaattcgaggcgcctggtagcgtaacgcgctatttatcaagtcagcgtctaattaaagaagcatgcgatgaatcacgctttgataaaaacttaagtcaagcgcttaaatttgcacgtgattttgttggagacgggctgtctacaagctggacgcatgaaccgaattggaaaaaagcgcataatatcttagttccaagctttagtcagcatgcaatggggcgttatcatgcgatgatggtcgatatcgccgtgcagcttgttcaaaagtgggagcgtctaaatgcagatgagcatattgaagtatcggaagacatgacacgtttaacgcttgatacaattggtctttgcggctttaactatcgctttaacagcttttaccgagatcagcctcatccatttattgtgagtgtggttcgtgcactggatgaagtaatgaacaagctgcagcgagcaaatccagacgacccagcttatgatgaaaacaagcgccagtgtcaagaagatatcaaggtgatgaacgactatgtagataaaattattgcagatcgcaaagcaaggggtgaacaaagtcatgatttattaacgcagatgctaaacggaaaagatccagaaacgggtgagccgcttgatgacgggaacattcgtcagcaaattattacattcttaattgcgggacaccaaacgacaagtggtcttttatcatttgcgctgtatttcttagtgaaaaatccacatgtattacaaaaagtagcagaagaagcagcacgagttctagtagatcctgttccaagctacaaacaagtcaaacagcttaaatatgttggcatggtcttaaacgaagcgctgcgcttatggccagtagcgcctatgttttccctatatgcaaaagaagatacggtgcttggaggagaatatcctttaacgaaaggcgacgaagtaatggttctggtgcctcagcttcaccgtgataaaacaatttggggagacgatgtggaggagttccgtccagagcgttttgaaaatccaagtgcgattccgcagcatgcgtttaaaccgtttggaaacggtcagcgtgcgtgtatcggtcagcagttcgctcttcatgaagcaacgctggtacttggtatgatgctaaaacactttgactttgaagatcatacaaactacgagctcgttattaaagaatcgcggacgttaaaacctgaaggctttgtggtaaaagcaaaatcgaaaggcattccgcttggcggtattccttcacctagcactgaacagtctgctaaaaaagtacgcaaaaaggcagaaaacgctcataatacgccgctgcttgtgctatacggttcaaatgcgggaacagctgaaggaacggcgcgtgatttagcagatattgcaatgagcaaaggatttgcaccgcaggtcgcaacgcttgattcacacgccggtaatcttccgcgcgaaggagctgtattaattgtaacggcgtcttataacggtcatccgcctgataacgcaaagcaatttgtcgactggttatctcaagcgtctgctgatgaagtaaaaggcgttcgctactccgtatttggatgcggcgataaaaattgggcggggacgtatcaaaaagtgcctgcttttatcgatgaaacgcttgccgctaaaggggcagaaaacatcgctgaccgcggtgaagcagatgcaagcgacgactttgaaggcacatatgaagaatggcgtgatcatatgtggagtgacgtagcagcctactttaacctcgacattgaaaacagtgaagataataaatctactctttcacttcaatttgtcgacagcgccgcggatatgccgcttgcgaaaatgcacggtgcgttttcaacgaacgtcgtagcaagcaaagaacttcaacagccaggcagtgcacgaagcacgcgacatcttgaaattgaacttccaaaagaagcttcttatcaagaaggagatcatttaggtgttattcctcgcaactatgaaggaatagtaaaccgtgtaacagcaaggttcggcctaagcgcatcacagcaaatccgtctggaagcagaagaagaaaaattagctcatttgccactcgctaaaacagtatccgtagaagagcttctgcaatacgtggagcttcaagatcctgttacgcgcacgcagcttcgcgcaatggctgctaaaacggtctgcccgccgcataaagtagagcttgaagccttgcttgaaaagcaagcctacaaagaacaagtgctggcaaaacgtttaacaatgcttgaactgcttgaaaaatacccggcgtgtgaaatgaaattcagcgaatttatcgcccttctgccaagcatacgcccgcgctattactcgatttcttcatcacctcgtgtcgatgaaaaacaagcaagcatcacggtcagcgttgtctcaggaccggcgtggagcggatatggagaatataaaggaattgcgtcgaactatcttgccgagctgcaagaaggagatacgattacgtgctttatttccacaccgcagtcagaatttacgctgccaaaagaccctgaaacgccgcttatcatggtcggaccgggaacaggcgtcgcgccgtttagaggctttgtgcaggcgcgcaaacagctaaaagaacaaggacagtcacttggagaagcacatttatacttcggctgccgttcacctcatgaagactatctgtatcaagaagagcttgaaaacgcccaaagcgaaggcatcattacgcttcataccgctttttctcgcatgccaaatcagccgaaaacatacgttcagcacgtaatggaacaagacggcaagaaattgattgaacttcttgatcaaggagcgcacttctatatttgcggagacggaagccaaatggcacctgccgttgaagcaacgcttatgaaaagctatgctgacgttcaccaagtgagtgaagcagacgctcgcttatggctgcagcagctagaagaaaaaggccgatacgcaaaagacgtgtggctgggg

SEQ ID NO: 566 - protein, 1049 aa, synthetic construct
  REGION 1..1049: note = variant of P450 oxidase from Bacillus megaterium
MTIKEMPQPKTFGELKNLPLLNTDKPVQALMRIADELGEIFKFEAPGSVTRYLSSQRLIKEACDESRFDKNLSQALKFARDFVGDGLSTSWTHEPNWKKAHNILVPSFSQHAMGRYHAMMVDIAVQLVQKWERLNADEHIEVSEDMTRLTLDTIGLCGFNYRFNSFYRDQPHPFIVSVVRALDEVMNKLQRANPDDPAYDENKRQCQEDIKVMNDYVDKIIADRKARGEQSHDLLTQMLNGKDPETGEPLDDGNIRQQIITFLIAGHQTTSGLLSFALYFLVKNPHVLQKVAEEAARVLVDPVPSYKQVKQLKYVGMVLNEALRLWPVAPMFSLYAKEDTVLGGEYPLTKGDEVMVLVPQLHRDKTIWGDDVEEFRPERFENPSAIPQHAFKPFGNGQRACIGQQFALHEATLVLGMMLKHFDFEDHTNYELVIKESRTLKPEGFVVKAKSKGIPLGGIPSPSTEQSAKKVRKKAENAHNTPLLVLYGSNAGTAEGTARDLADIAMSKGFAPQVATLDSHAGNLPREGAVLIVTASYNGHPPDNAKQFVDWLSQASADEVKGVRYSVFGCGDKNWAGTYQKVPAFIDETLAAKGAENIADRGEADASDDFEGTYEEWRDHMWSDVAAYFNLDIENSEDNKSTLSLQFVDSAADMPLAKMHGAFSTNVVASKELQQPGSARSTRHLEIELPKEASYQEGDHLGVIPRNYEGIVNRVTARFGLSASQQIRLEAEEEKLAHLPLAKTVSVEELLQYVELQDPVTRTQLRAMAAKTVCPPHKVELEALLEKQAYKEQVLAKRLTMLELLEKYPACEMKFSEFIALLPSIRPRYYSISSSPRVDEKQASITVSVVSGPAWSGYGEYKGIASNYLAELQEGDTITCFISTPQSEFTLPKDPETPLIMVGPGTGVAPFRGFVQARKQLKEQGQSLGEAHLYFGCRSPHEDYLYQEELENAQSEGIITLHTAFSRMPNQPKTYVQHVMEQDGKKLIELLDQGAHFYICGDGSQMAPAVEATLMKSYADVHQVSEADARLWLQQLEEKGRYAKDVWLG

SEQ ID NO: 567 - DNA, 3147 bp, synthetic construct
  misc_feature 1..3147: note = variant of P450 oxidase from Bacillus megaterium
  source 1..3147: mol_type = other DNA
atgacaattaaggaaatgcctcagcctaagacgtttggagaacttaaaaatttaccgttattaaacacagataaaccggttcaagctttgatgcgtattgcggatgaattaggagaaatctttaaattcgaggcgcctggtagcgtaacgcgctatttatcaagtcagcgtctaattaaagaagcatgcgatgaatcacgctttgataaaaacttaagtcaagcgcttaaatttgcacgtgattttgttggagacgggctgtctacaagctggacgcatgaaccgaattggaaaaaagcgcataatatcttagttccaagctttagtcagcatgcaatggggcgttatcatgcgatgatggtcgatatcgccgtgcagcttgttcaaaagtgggagcgtctaaatgcagatgagcatattgaagtatcggaagacatgacacgtttaacgcttgatacaattggtctttgcggctttaactatcgctttaacagcttttaccgagatcagcctcatccatttattgtgagtgtggttcgtgcactggatgaagtaatgaacaagctgcagcgagcaaatccagacgacccagcttatgatgaaaacaagcgccagtgtcaagaagatatcaaggtgatgaacgactatgtagataaaattattgcagatcgcaaagcaaggggtgaacaaagtcatgatttattaacgcagatgctaaacggaaaagatccagaaacgggtgagccgcttgatgacgggaacattcgtcagcaaattattacattcttaattgcgggacaccaaacgacaagtggtcttttatcatttgcgctgtatttcttagtgaaaaatccacatgtattacaaaaagtagcagaagaagcagcacgagttctagtagatcctgttccaagctacaaacaagtcaaacagcttaaatatgttggcatggtcttaaacgaagcgctgcgcttatggccagtagcgcctatgttttccctatatgcaaaagaagatacggtgcttggaggagaatatcctttaacgaaaggcgacgaagtaatggttctggtgcctcagcttcaccgtgataaaacaatttggggagacgatgtggaggagttccgtccagagcgttttgaaaatccaagtgcgattccgcagcatgcgtttaaaccgtttggaaacggtcagcgtgcgtgtatcggtcagcagttcgctcttcatgaagcaacgctggtacttggtatgatgctaaaacactttgactttgaagatcatacaaactacgagctcgttattaaagaatcgcggacgttaaaacctgaaggctttgtggtaaaagcaaaatcgaaaggcattccgcttggcggtattccttcacctagcactgaacagtctgctaaaaaagtacgcaaaaaggcagaaaacgctcataatacgccgctgcttgtgctatacggttcaaatgcgggaacagctgaaggaacggcgcgtgatttagcagatattgcaatgagcaaaggatttgcaccgcaggtcgcaacgcttgattcacacgccggtaatcttccgcgcgaaggagctgtattaattgtaacggcgtcttataacggtcatccgcctgataacgcaaagcaatttgtcgactggttagaccaagcgtctgctgatgaagtaaaaggcgttcgctactccgtatttggatgcggcgataaaaattgggcggggacgtatcaaaaagtgcctgcttttatcgatgaaacgcttgccgctaaaggggcagaaaacatcgctgaccgcggtgaagcagatgcaagcgacgactttgaaggcacatatgaagaatggcgtgatcatatgtggagtgacgtagcagcctactttaacctcgacattgaaaacagtgaagataataaatctactctttcacttcaatttgtcgacagcgccgcggatatgccgcttgcgaaaatgcacggtgcgttttcaacgaacgtcgtagcaagcaaagaacttcaacagccaggcagtgcacgaagcacgcgacatcttgaaattgaacttccaaaagaagcttcttatcaagaaggagatcatttaggtgttattcctcgcaactatgaaggaatagtaaaccgtgtaacagcaaggttcggcctaagcgcatcacagcaaatccgtctggaagcagaagaagaaaaattagctcatttgccactcgctaaaacagtatccgtagaagagcttctgcaatacgtggagcttcaagatcctgttacgcgcacgcagcttcgcgcaatggctgctaaaacggtctgcccgccgcataaagtagagcttgaagccttgcttgaaaagcaagcctacaaagaacaagtgctggcaaaacgtttaacaatgcttgaactgcttgaaaaatacccggcgtgtgaaatgaaattcagcgaatttatcgcccttctgccaagcatacgcccgcgctattactcgatttcttcatcacctcgtgtcgatgaaaaacaagcaagcatcacggtcagcgttgtctcaggaccggcgtggagcggatatggagaatataaaggaattgcgtcgaactatcttgccaatctgcaagaaggagatacgattacgtgctttatttccacaccgcagtcagaatttacgctgccaaaagaccctgaaacgccgcttatcatggtcggaccgggaacaggcgtcgcgccgtttagaggctttgtgcaggcgcgcaaacagctaaaagaacaaggacagtcacttggagaagcacatttatacttcggctgccgttcacctcatgaagactatctgtatcaagaagagcttgaaaacgcccaaagcgaaggcatcattacgcttcataccgctttttctcgcatgccaaatcagccgaaaacatacgttcagcacgtaatggaacaagacggcaagaaattgattgaacttcttgatcaaggagcgcacttctatatttgcggagacggaagccaaatggcacctgccgttgaagcaacgcttatgaaaagctatgctgacgttcaccaagtgagtgaagcagacgctcgcttatggctgcagcagctagaagaaaaaggccgatacgcaaaagacgtgtggctgggg

SEQ ID NO: 568 - protein, 1049 aa, synthetic construct
  REGION 1..1049: note = variant of P450 oxidase from Bacillus megaterium
MTIKEMPQPKTFGELKNLPLLNTDKPVQALMRIADELGEIFKFEAPGSVTRYLSSQRLIKEACDESRFDKNLSQALKFARDFVGDGLSTSWTHEPNWKKAHNILVPSFSQHAMGRYHAMMVDIAVQLVQKWERLNADEHIEVSEDMTRLTLDTIGLCGFNYRFNSFYRDQPHPFIVSVVRALDEVMNKLQRANPDDPAYDENKRQCQEDIKVMNDYVDKIIADRKARGEQSHDLLTQMLNGKDPETGEPLDDGNIRQQIITFLIAGHQTTSGLLSFALYFLVKNPHVLQKVAEEAARVLVDPVPSYKQVKQLKYVGMVLNEALRLWPVAPMFSLYAKEDTVLGGEYPLTKGDEVMVLVPQLHRDKTIWGDDVEEFRPERFENPSAIPQHAFKPFGNGQRACIGQQFALHEATLVLGMMLKHFDFEDHTNYELVIKESRTLKPEGFVVKAKSKGIPLGGIPSPSTEQSAKKVRKKAENAHNTPLLVLYGSNAGTAEGTARDLADIAMSKGFAPQVATLDSHAGNLPREGAVLIVTASYNGHPPDNAKQFVDWLDQASADEVKGVRYSVFGCGDKNWAGTYQKVPAFIDETLAAKGAENIADRGEADASDDFEGTYEEWRDHMWSDVAAYFNLDIENSEDNKSTLSLQFVDSAADMPLAKMHGAFSTNVVASKELQQPGSARSTRHLEIELPKEASYQEGDHLGVIPRNYEGIVNRVTARFGLSASQQIRLEAEEEKLAHLPLAKTVSVEELLQYVELQDPVTRTQLRAMAAKTVCPPHKVELEALLEKQAYKEQVLAKRLTMLELLEKYPACEMKFSEFIALLPSIRPRYYSISSSPRVDEKQASITVSVVSGPAWSGYGEYKGIASNYLANLQEGDTITCFISTPQSEFTLPKDPETPLIMVGPGTGVAPFRGFVQARKQLKEQGQSLGEAHLYFGCRSPHEDYLYQEELENAQSEGIITLHTAFSRMPNQPKTYVQHVMEQDGKKLIELLDQGAHFYICGDGSQMAPAVEATLMKSYADVHQVSEADARLWLQQLEEKGRYAKDVWLG

SEQ ID NO: 569 - DNA, 3147 bp, synthetic construct
  misc_feature 1..3147: note = variant of P450 oxidase from Bacillus megaterium
  source 1..3147: mol_type = other DNA
atgacaattaaggaaatgcctcagcctaagacgtttggagaacttaaaaatttaccgttattaaacacagataaaccggttcaagctttgatgcgtattgcggatgaattaggagaaatctttaaattcgaggcgcctggtagcgtaacgcgctatttatcaagtcagcgtctaattaaagaagcatgcgatgaatcacgctttgataaaaacttaagtcaagcgcttaaatttgcacgtgattttgttggagacgggctgtctacaagctggacgcatgaaccgaattggaaaaaagcgcataatatcttagttccaagctttagtcagcatgcaatggggcgttatcatgcgatgatggtcgatatcgccgtgcagcttgttcaaaagtgggagcgtctaaatgcagatgagcatattgaagtatcggaagacatgacacgtttaacgcttgatacaattggtctttgcggctttaactatcgctttaacagcttttaccgagatcagcctcatccatttattgtgagtgtggttcgtgcactggatgaagtaatgaacaagctgcagcgagcaaatccagacgacccagcttatgatgaaaacaagcgccagtgtcaagaagatatcaaggtgatgaacgactatgtagataaaattattgcagatcgcaaagcaaggggtgaacaaagtcatgatttattaacgcagatgctaaacggaaaagatccagaaacgggtgagccgcttgatgacgggaacattcgtcagcaaattattacattcttaattgcgggacaccaaacgacaagtggtcttttatcatttgcgctgtatttcttagtgaaaaatccacatgtattacaaaaagtagcagaagaagcagcacgagttctagtagatcctgttccaagctacaaacaagtcaaacagcttaaatatgttggcatggtcttaaacgaagcgctgcgcttatggccagtagcgcctatgttttccctatatgcaaaagaagatacggtgcttggaggagaatatcctttaacgaaaggcgacgaagtaatggttctggtgcctcagcttcaccgtgataaaacaatttggggagacgatgtggaggagttccgtccagagcgttttgaaaatccaagtgcgattccgcagcatgcgtttaaaccgtttggaaacggtcagcgtgcgtgtatcggtcagcagttcgctcttcatgaagcaacgctggtacttggtatgatgctaaaacactttgactttgaagatcatacaaactacgagctcgttattaaagaatcgcggacgttaaaacctgaaggctttgtggtaaaagcaaaatcgaaaggcattccgcttggcggtattccttcacctagcactgaacagtctgctaaaaaagtacgcaaaaaggcagaaaacgctcataatacgccgctgcttgtgctatacggttcaaatgcgggaacagctgaaggaacggcgcgtgatttagcagatattgcaatgagcaaaggatttgcaccgcaggtcgcaacgcttgattcacacgccggtaatcttccgcgcgaaggagctgtattaattgtaacggcgtcttataacggtcatccgcctgataacgcaaagcaatttgtcgactggttagaccaagcgtctgctgatgaagtaaaaggcgttcgctactccgtatttggatgcggcgataaaaattgggcggggacgtatcaaaaagtgcctgcttttatcgatgaaacgcttgccgctaaaggggcagaaaacatcgctgaccgcggtgaagcagatgcaagcgacgactttgaaggcacatatgaagaatggcgtgatcatatgtggagtgacgtagcagcctactttaacctcgacattgaaaacagtgaagataataaatctactctttcacttcaatttgtcgacagcgccgcggatatgccgcttgcgaaaatgcacggtgcgttttcaacgaacgtcgtagcaagcaaagaacttcaacagccaggcagtgcacgaagcacgcgacatcttgaaattgaacttccaaaagaagcttcttatcaagaaggagatcatttaggtgttattcctcgcaactatgaaggaatagtaaaccgtgtaacagcaaggttcggcctaagcgcatcacagcaaatccgtctggaagcagaagaagaaaaattagctcatttgccactcgctaaaacagtatccgtagaagagcttctgcaatacgtggagcttcaagatcctgttacgcgcacgcagcttcgcgcaatggctgctaaaacggtctgcccgccgcataaagtagagcttgaagccttgcttgaaaagcaagcctacaaagaacaagtgctggcaaaacgtttaacaatgcttgaactgcttgaaaaatacccggcgtgtgaaatgaaattcagcgaatttatcgcccttctgccaagcatacgcccgcgctattactcgatttcttcatcacctcgtgtcgatgaaaaacaagcaagcatcacggtcagcgttgtctcaggaccggcgtggagcggatatggagaatataaaggaattgcgtcgaactatcttgccgagctgcaagaaggagatacgattacgtgctttatttccacaccgcagtcagaatttacgctgccaaaagaccctgaaacgccgcttatcatggtcggaccgggaacaggcgtcgcgccgtttagaggctttgtgcaggcgcgcaaacagctaaaagctcaaggacagtcacttggagaagcacatttatacttcggctgccgttcacctcatgaagactatctgtatcaagaagagcttgaaaacgcccaaagcgaaggcatcattacgcttcataccgctttttctcgcatgccaaatcagccgaaaacatacgttcagcacgtaatggaacaagacggcaagaaattgattgaacttcttgatcaaggagcgcacttctatatttgcggagacggaagccaaatggcacctgccgttgaagcaacgcttatgaaaagctatgctgacgttcaccaagtgagtgaagcagacgctcgcttatggctgcagcagctagaagaaaaaggccgatacgcaaaagacgtgtggctgggg

SEQ ID NO: 570 - protein, 1049 aa, synthetic construct
  REGION 1..1049: note = variant of P450 oxidase from Bacillus megaterium
MTIKEMPQPKTFGELKNLPLLNTDKPVQALMRIADELGEIFKFEAPGSVTRYLSSQRLIKEACDESRFDKNLSQALKFARDFVGDGLSTSWTHEPNWKKAHNILVPSFSQHAMGRYHAMMVDIAVQLVQKWERLNADEHIEVSEDMTRLTLDTIGLCGFNYRFNSFYRDQPHPFIVSVVRALDEVMNKLQRANPDDPAYDENKRQCQEDIKVMNDYVDKIIADRKARGEQSHDLLTQMLNGKDPETGEPLDDGNIRQQIITFLIAGHQTTSGLLSFALYFLVKNPHVLQKVAEEAARVLVDPVPSYKQVKQLKYVGMVLNEALRLWPVAPMFSLYAKEDTVLGGEYPLTKGDEVMVLVPQLHRDKTIWGDDVEEFRPERFENPSAIPQHAFKPFGNGQRACIGQQFALHEATLVLGMMLKHFDFEDHTNYELVIKESRTLKPEGFVVKAKSKGIPLGGIPSPSTEQSAKKVRKKAENAHNTPLLVLYGSNAGTAEGTARDLADIAMSKGFAPQVATLDSHAGNLPREGAVLIVTASYNGHPPDNAKQFVDWLDQASADEVKGVRYSVFGCGDKNWAGTYQKVPAFIDETLAAKGAENIADRGEADASDDFEGTYEEWRDHMWSDVAAYFNLDIENSEDNKSTLSLQFVDSAADMPLAKMHGAFSTNVVASKELQQPGSARSTRHLEIELPKEASYQEGDHLGVIPRNYEGIVNRVTARFGLSASQQIRLEAEEEKLAHLPLAKTVSVEELLQYVELQDPVTRTQLRAMAAKTVCPPHKVELEALLEKQAYKEQVLAKRLTMLELLEKYPACEMKFSEFIALLPSIRPRYYSISSSPRVDEKQASITVSVVSGPAWSGYGEYKGIASNYLAELQEGDTITCFISTPQSEFTLPKDPETPLIMVGPGTGVAPFRGFVQARKQLKAQGQSLGEAHLYFGCRSPHEDYLYQEELENAQSEGIITLHTAFSRMPNQPKTYVQHVMEQDGKKLIELLDQGAHFYICGDGSQMAPAVEATLMKSYADVHQVSEADARLWLQQLEEKGRYAKDVWLG

SEQ ID NO: 571 - DNA, 3147 bp, synthetic construct
  misc_feature 1..3147: note = variant of P450 oxidase from Bacillus megaterium
  source 1..3147: mol_type = other DNA
atgacaattaaggaaatgcctcagcctaagacgtttggagaacttaaaaatttaccgttattaaacacagataaaccggttcaagctttgatgcgtattgcggatgaattaggagaaatctttaaattcgaggcgcctggtagcgtaacgcgctatttatcaagtcagcgtctaattaaagaagcatgcgatgaatcacgctttgataaaaacttaagtcaagcgcttaaatttgcacgtgattttgttggagacgggctgtctacaagctggacgcatgaaccgaattggaaaaaagcgcataatatcttagttccaagctttagtcagcatgcaatggggcgttatcatgcgatgatggtcgatatcgccgtgcagcttgttcaaaagtgggagcgtctaaatgcagatgagcatattgaagtatcggaagacatgacacgtttaacgcttgatacaattggtctttgcggctttaactatcgctttaacagcttttaccgagatcagcctcatccatttattgtgagtgtggttcgtgcactggatgaagtaatgaacaagctgcagcgagcaaatccagacgacccagcttatgatgaaaacaagcgccagtgtcaagaagatatcaaggtgatgaacgactatgtagataaaattattgcagatcgcaaagcaaggggtgaacaaagtcatgatttattaacgcagatgctaaacggaaaagatccagaaacgggtgagccgcttgatgacgggaacattcgtcagcaaattattacattcttaattgcgggacaccaaacgacaagtggtcttttatcatttgcgctgtatttcttagtgaaaaatccacatgtattacaaaaagtagcagaagaagcagcacgagttctagtagatcctgttccaagctacaaacaagtcaaacagcttaaatatgttggcatggtcttaaacgaagcgctgcgcttatggccagtagcgcctatgttttccctatatgcaaaagaagatacggtgcttggaggagaatatcctttaacgaaaggcgacgaagtaatggttctggtgcctcagcttcaccgtgataaaacaatttggggagacgatgtggaggagttccgtccagagcgttttgaaaatccaagtgcgattccgcagcatgcgtttaaaccgtttggaaacggtcagcgtgcgtgtatcggtcagcagttcgctcttcatgaagcaacgctggtacttggtatgatgctaaaacactttgactttgaagatcatacaaactacgagctcgttattaaagaatcgcggacgttaaaacctgaaggctttgtggtaaaagcaaaatcgaaaggcattccgcttggcggtattccttcacctagcactgaacagtctgctaaaaaagtacgcaaaaaggcagaaaacgctcataatacgccgctgcttgtgctatacggttcaaatgcgggaacagctgaaggaacggcgcgtgatttagcagatattgcaatgagcaaaggatttgcaccgcaggtcgcaacgcttgattcacacgccggtaatcttccgcgcgaaggagctgtattaattgtaacggcgtcttataacggtcatccgcctgataacgcaaagcaatttgtcgactggttagaccaagcgtctgctgatgaagtaaaaggcgttcgctactccgtatttggatgcggcgataaaaattgggcggggacgtatcaaaaagtgcctgcttttatcgatgaaacgcttgccgctaaaggggcagaaaacatcgctgaccgcggtgaagcagatgcaagcgacgactttgaaggcacatatgaagaatggcgtgatcatatgtggagtgacgtagcagcctactttaacctcgacattgaaaacagtgaagataataaatctactctttcacttcaatttgtcgacagcgccgcggatatgccgcttgcgaaaatgcacggtgcgttttcaacgaacgtcgtagcaagcaaagaacttcaacagccaggcagtgcacgaagcacgcgacatcttgaaattgaacttccaaaagaagcttcttatcaagaaggagatcatttaggtgttattcctcgcaactatgaaggaatagtaaaccgtgtaacagcaaggttcggcctaagcgcatcacagcaaatccgtctggaagcagaagaagaaaaattagctcatttgccactcgctaaaacagtatccgtagaagagcttctgcaatacgtggagcttcaagatcctgttacgcgcacgcagcttcgcgcaatggctgctaaaacggtctgcccgccgcataaagtagagcttgaagccttgcttgaaaagcaagcctacaaagaacaagtgctggcaaaacgtttaacaatgcttgaactgcttgaaaaatacccggcgtgtgaaatgaaattcagcgaatttatcgcccttctgccaagcatacgcccgcgctattactcgatttcttcatcacctcgtgtcgatgaaaaacaagcaagcatcacggtcagcgttgtctcaggaccggcgtggagcggatatggagaatataaaggaattgcgtcgaactatcttgccgagctgcaagaaggagatacgattacgtgctttatttccacaccgcagtcagaatttacgctgccaaaagaccctgaaacgccgcttatcatggtcggaccgggaacaggcgtcgcgccgtttagaggctttgtgcaggcgcgcaaacagctaaaactgcaaggacagtcacttggagaagcacatttatacttcggctgccgttcacctcatgaagactatctgtatcaagaagagcttgaaaacgcccaaagcgaaggcatcattacgcttcataccgctttttctcgcatgccaaatcagccgaaaacatacgttcagcacgtaatggaacaagacggcaagaaattgattgaacttcttgatcaaggagcgcacttctatatttgcggagacggaagccaaatggcacctgccgttgaagcaacgcttatgaaaagctatgctgacgttcaccaagtgagtgaagcagacgctcgcttatggctgcagcagctagaagaaaaaggccgatacgcaaaagacgtgtggctgggg

SEQ ID NO: 572 - protein, 1049 aa, synthetic construct
  REGION 1..1049: note = variant of P450 oxidase from Bacillus megaterium
MTIKEMPQPKTFGELKNLPLLNTDKPVQALMRIADELGEIFKFEAPGSVTRYLSSQRLIKEACDESRFDKNLSQALKFARDFVGDGLSTSWTHEPNWKKAHNILVPSFSQHAMGRYHAMMVDIAVQLVQKWERLNADEHIEVSEDMTRLTLDTIGLCGFNYRFNSFYRDQPHPFIVSVVRALDEVMNKLQRANPDDPAYDENKRQCQEDIKVMNDYVDKIIADRKARGEQSHDLLTQMLNGKDPETGEPLDDGNIRQQIITFLIAGHQTTSGLLSFALYFLVKNPHVLQKVAEEAARVLVDPVPSYKQVKQLKYVGMVLNEALRLWPVAPMFSLYAKEDTVLGGEYPLTKGDEVMVLVPQLHRDKTIWGDDVEEFRPERFENPSAIPQHAFKPFGNGQRACIGQQFALHEATLVLGMMLKHFDFEDHTNYELVIKESRTLKPEGFVVKAKSKGIPLGGIPSPSTEQSAKKVRKKAENAHNTPLLVLYGSNAGTAEGTARDLADIAMSKGFAPQVATLDSHAGNLPREGAVLIVTASYNGHPPDNAKQFVDWLDQASADEVKGVRYSVFGCGDKNWAGTYQKVPAFIDETLAAKGAENIADRGEADASDDFEGTYEEWRDHMWSDVAAYFNLDIENSEDNKSTLSLQFVDSAADMPLAKMHGAFSTNVVASKELQQPGSARSTRHLEIELPKEASYQEGDHLGVIPRNYEGIVNRVTARFGLSASQQIRLEAEEEKLAHLPLAKTVSVEELLQYVELQDPVTRTQLRAMAAKTVCPPHKVELEALLEKQAYKEQVLAKRLTMLELLEKYPACEMKFSEFIALLPSIRPRYYSISSSPRVDEKQASITVSVVSGPAWSGYGEYKGIASNYLAELQEGDTITCFISTPQSEFTLPKDPETPLIMVGPGTGVAPFRGFVQARKQLKLQGQSLGEAHLYFGCRSPHEDYLYQEELENAQSEGIITLHTAFSRMPNQPKTYVQHVMEQDGKKLIELLDQGAHFYICGDGSQMAPAVEATLMKSYADVHQVSEADARLWLQQLEEKGRYAKDVWLG

SEQ ID NO: 573 - DNA, 3147 bp, synthetic construct
  misc_feature 1..3147: note = variant of P450 oxidase from Bacillus megaterium
  source 1..3147: mol_type = other DNA
atgacaattaaggaaatgcctcagcctaagacgtttggagaacttaaaaatttaccgttattaaacacagataaaccggttcaagctttgatgcgtattgcggatgaattaggagaaatctttaaattcgaggcgcctggtagcgtaacgcgctatttatcaagtcagcgtctaattaaagaagcatgcgatgaatcacgctttgataaaaacttaagtcaagcgcttaaatttgcacgtgattttgttggagacgggctgtctacaagctggacgcatgaaccgaattggaaaaaagcgcataatatcttagttccaagctttagtcagcatgcaatggggcgttatcatgcgatgatggtcgatatcgccgtgcagcttgttcaaaagtgggagcgtctaaatgcagatgagcatattgaagtatcggaagacatgacacgtttaacgcttgatacaattggtctttgcggctttaactatcgctttaacagcttttaccgagatcagcctcatccatttattgtgagtgtggttcgtgcactggatgaagtaatgaacaagctgcagcgagcaaatccagacgacccagcttatgatgaaaacaagcgccagtgtcaagaagatatcaaggtgatgaacgactatgtagataaaattattgcagatcgcaaagcaaggggtgaacaaagtcatgatttattaacgcagatgctaaacggaaaagatccagaaacgggtgagccgcttgatgacgggaacattcgtcagcaaattattacattcttaattgcgggacaccaaacgacaagtggtcttttatcatttgcgctgtatttcttagtgaaaaatccacatgtattacaaaaagtagcagaagaagcagcacgagttctagtagatcctgttccaagctacaaacaagtcaaacagcttaaatatgttggcatggtcttaaacgaagcgctgcgcttatggccagtagcgcctatgttttccctatatgcaaaagaagatacggtgcttggaggagaatatcctttaacgaaaggcgacgaagtaatggttctggtgcctcagcttcaccgtgataaaacaatttggggagacgatgtggaggagttccgtccagagcgttttgaaaatccaagtgcgattccgcagcatgcgtttaaaccgtttggaaacggtcagcgtgcgtgtatcggtcagcagttcgctcttcatgaagcaacgctggtacttggtatgatgctaaaacactttgactttgaagatcatacaaactacgagctcgttattaaagaatcgcggacgttaaaacctgaaggctttgtggtaaaagcaaaatcgaaaggcattccgcttggcggtattccttcacctagcactgaacagtctgctaggaaagtacgcaaaaaggcagaaaacgctcataatacgccgctgcttgtgctatacggttcaaatgcgggaacagctgaaggaacggcgcgtgatttagcagatattgcaatgagcaaaggatttgcaccgcaggtcgcaacgcttgattcacacgccggtaatcttccgcgcgaaggagctgtattaattgtaacggcgtcttataacggtcatccgcctgataacgcaaagcaatttgtcgactggttagaccaagcgtctgctgatgaagtaaaaggcgttcgctactccgtatttggatgcggcgataaaaattgggcggggacgtatcaaaaagtgcctgcttttatcgatgaaacgcttgccgctaaaggggcagaaaacatcgctgaccgcggtgaagcagatgcaagcgacgactttgaaggcacatatgaagaatggcgtgatcatatgtggagtgacgtagcagcctactttaacctcgacattgaaaacagtgaagataataaatctactctttcacttcaatttgtcgacagcgccgcggatatgccgcttgcgaaaatgcacggtgcgttttcaacgaacgtcgtagcaagcaaagaacttcaacagccaggcagtgcacgaagcacgcgacatcttgaaattgaacttccaaaagaagcttcttatcaagaaggagatcatttaggtgttattcctcgcaactatgaaggaatagtaaaccgtgtaacagcaaggttcggcctaagcgcatcacagcaaatccgtctggaagcagaagaagaaaaattagctcatttgccactcgctaaaacagtatccgtagaagagcttctgcaatacgtggagcttcaagatcctgttacgcgcacgcagcttcgcgcaatggctgctaaaacggtctgcccgccgcataaagtagagcttgaagccttgcttgaaaagcaagcctacaaagaacaagtgctggcaaaacgtttaacaatgcttgaactgcttgaaaaatacccggcgtgtgaaatgaaattcagcgaatttatcgcccttctgccaagcatacgcccgcgctattactcgatttcttcatcacctcgtgtcgatgaaaaacaagcaagcatcacggtcagcgttgtctcaggaccggcgtggagcggatatggagaatataaaggaattgcgtcgaactatcttgccgagctgcaagaaggagatacgattacgtgctttatttccacaccgcagtcagaatttacgctgccaaaagaccctgaaacgccgcttatcatggtcggaccgggaacaggcgtcgcgccgtttagaggctttgtgcaggcgcgcaaacagctaaaagaacaaggacagtcacttggagaagcacatttatacttcggctgccgttcacctcatgaagactatctgtatcaagaagagcttgaaaacgcccaaagcgaaggcatcattacgcttcataccgctttttctcgcatgccaaatcagccgaaaacatacgttcagcacgtaatggaacaagacggcaagaaattgattgaacttcttgatcaaggagcgcacttctatatttgcggagacggaagccaaatggcacctgccgttgaagcaacgcttatgaaaagctatgctgacgttcaccaagtgagtgaagcagacgctcgcttatggctgcagcagctagaagaaaaaggccgatacgcaaaagacgtgtggctgggg

SEQ ID NO: 574 - protein, 1049 aa, synthetic construct
  REGION 1..1049: note = variant of P450 oxidase from Bacillus megaterium
MTIKEMPQPKTFGELKNLPLLNTDKPVQALMRIADELGEIFKFEAPGSVTRYLSSQRLIKEACDESRFDKNLSQALKFARDFVGDGLSTSWTHEPNWKKAHNILVPSFSQHAMGRYHAMMVDIAVQLVQKWERLNADEHIEVSEDMTRLTLDTIGLCGFNYRFNSFYRDQPHPFIVSVVRALDEVMNKLQRANPDDPAYDENKRQCQEDIKVMNDYVDKIIADRKARGEQSHDLLTQMLNGKDPETGEPLDDGNIRQQIITFLIAGHQTTSGLLSFALYFLVKNPHVLQKVAEEAARVLVDPVPSYKQVKQLKYVGMVLNEALRLWPVAPMFSLYAKEDTVLGGEYPLTKGDEVMVLVPQLHRDKTIWGDDVEEFRPERFENPSAIPQHAFKPFGNGQRACIGQQFALHEATLVLGMMLKHFDFEDHTNYELVIKESRTLKPEGFVVKAKSKGIPLGGIPSPSTEQSARKVRKKAENAHNTPLLVLYGSNAGTAEGTARDLADIAMSKGFAPQVATLDSHAGNLPREGAVLIVTASYNGHPPDNAKQFVDWLDQASADEVKGVRYSVFGCGDKNWAGTYQKVPAFIDETLAAKGAENIADRGEADASDDFEGTYEEWRDHMWSDVAAYFNLDIENSEDNKSTLSLQFVDSAADMPLAKMHGAFSTNVVASKELQQPGSARSTRHLEIELPKEASYQEGDHLGVIPRNYEGIVNRVTARFGLSASQQIRLEAEEEKLAHLPLAKTVSVEELLQYVELQDPVTRTQLRAMAAKTVCPPHKVELEALLEKQAYKEQVLAKRLTMLELLEKYPACEMKFSEFIALLPSIRPRYYSISSSPRVDEKQASITVSVVSGPAWSGYGEYKGIASNYLAELQEGDTITCFISTPQSEFTLPKDPETPLIMVGPGTGVAPFRGFVQARKQLKEQGQSLGEAHLYFGCRSPHEDYLYQEELENAQSEGIITLHTAFSRMPNQPKTYVQHVMEQDGKKLIELLDQGAHFYICGDGSQMAPAVEATLMKSYADVHQVSEADARLWLQQLEEKGRYAKDVWLG

SEQ ID NO: 575 - DNA, 3147 bp, synthetic construct
  misc_feature 1..3147: note = variant of P450 oxidase from Bacillus megaterium
  source 1..3147: mol_type = other DNA
atgacaattaaggaaatgcctcagcctaagacgtttggagaacttaaaaatttaccgttattaaacacagataaaccggttcaagctttgatgcgtattgcggatgaattaggagaaatctttaaattcgaggcgcctggtagcgtaacgcgctatttatcaagtcagcgtctaattaaagaagcatgcgatgaatcacgctttgataaaaacttaagtcaagcgcttaaatttgcacgtgattttgttggagacgggctgtctacaagctggacgcatgaaccgaattggaaaaaagcgcataatatcttagttccaagctttagtcagcatgcaatggggcgttatcatgcgatgatggtcgatatcgccgtgcagcttgttcaaaagtgggagcgtctaaatgcagatgagcatattgaagtatcggaagacatgacacgtttaacgcttgatacaattggtctttgcggctttaactatcgctttaacagcttttaccgagatcagcctcatccatttattgtgagtgtggttcgtgcactggatgaagtaatgaacaagctgcagcgagcaaatccagacgacccagcttatgatgaaaacaagcgccagtgtcaagaagatatcaaggtgatgaacgactatgtagataaaattattgcagatcgcaaagcaaggggtgaacaaagtcatgatttattaacgcagatgctaaacggaaaagatccagaaacgggtgagccgcttgatgacgggaacattcgtcagcaaattattacattcttaattgcgggacaccaaacgacaagtggtcttttatcatttgcgctgtatttcttagtgaaaaatccacatgtattacaaaaagtagcagaagaagcagcacgagttctagtagatcctgttccaagctacaaacaagtcaaacagcttaaatatgttggcatggtcttaaacgaagcgctgcgcttatggccagtagcgcctatgttttccctatatgcaaaagaagatacggtgcttggaggagaatatcctttaacgaaaggcgacgaagtaatggttctggtgcctcagcttcaccgtgataaaacaatttggggagacgatgtggaggagttccgtccagagcgttttgaaaatccaagtgcgattccgcagcatgcgtttaaaccgtttggaaacggtcagcgtgcgtgtatcggtcagcagttcgctcttcatgaagcaacgctggtacttggtatgatgctaaaacactttgactttgaagatcatacaaactacgagctcgttattaaagaatcgcggacgttaaaacctgaaggctttgtggtaaaagcaaaatcgaaaggcattccgcttggcggtattccttcacctagcactgaacagtctgctaaaaaagtacgcaaaaaggcagaaaacgctcataatacgccgctgcttgtgctatacggttcaaatgcgggaacagctgaaggaacggcgcgtgatttagcagatattgcaatgagcaaaggatttgcaccgcaggtcgcaacgcttgattcacacgccggtaatcttccgcgcgaaggagctgtattaattgtaacggcgtcttataacggtcatccgcctgataacgcaaagcaatttgtcgactggttagaccaagcgtctgctgatgaagtaaaaggcgttcgctactccgtatttggatgcggcgataaaaattgggcggggacgtatcaaaaagtgcctgcttttatcgatgaaacgcttgccgctaaaggggcagaaaacatcgctgaccgcggtgaagcagatgcaagcgacgactttgaaggcacatatgaagaatggcgtgatcatatgtggagtgacgtagcagcctactttaacctcgacattgaaaacagtgaagataattgttctactctttcacttcaatttgtcgacagcgccgcggatatgccgcttgcgaaaatgcacggtgcgttttcaacgaacgtcgtagcaagcaaagaacttcaacagccaggcagtgcacgaagcacgcgacatcttgaaattgaacttccaaaagaagcttcttatcaagaaggagatcatttaggtgttattcctcgcaactatgaaggaatagtaaaccgtgtaacagcaaggttcggcctaagcgcatcacagcaaatccgtctggaagcagaagaagaaaaattagctcatttgccactcgctaaaacagtatccgtagaagagcttctgcaatacgtggagcttcaagatcctgttacgcgcacgcagcttcgcgcaatggctgctaaaacggtctgcccgccgcataaagtagagcttgaagccttgcttgaaaagcaagcctacaaagaacaagtgctggcaaaacgtttaacaatgcttgaactgcttgaaaaatacccggcgtgtgaaatgaaattcagcgaatttatcgcccttctgccaagcatacgcccgcgctattactcgatttcttcatcacctcgtgtcgatgaaaaacaagcaagcatcacggtcagcgttgtctcaggaccggcgtggagcggatatggagaatataaaggaattgcgtcgaactatcttgccgagctgcaagaaggagatacgattacgtgctttatttccacaccgcagtcagaatttacgctgccaaaagaccctgaaacgccgcttatcatggtcggaccgggaacaggcgtcgcgccgtttagaggctttgtgcaggcgcgcaaacagctaaaagaacaaggacagtcacttggagaagcacatttatacttcggctgccgttcacctcatgaagactatctgtatcaagaagagcttgaaaacgcccaaagcgaaggcatcattacgcttcataccgctttttctcgcatgccaaatcagccgaaaacatacgttcagcacgtaatggaacaagacggcaagaaattgattgaacttcttgatcaaggagcgcacttctatatttgcggagacggaagccaaatggcacctgccgttgaagcaacgcttatgaaaagctatgctgacgttcaccaagtgagtgaagcagacgctcgcttatggctgcagcagctagaagaaaaaggccgatacgcaaaagacgtgtggctgggg

SEQ ID NO: 576 - protein, 1049 aa, synthetic construct
  REGION 1..1049: note = variant of P450 oxidase from Bacillus megaterium
MTIKEMPQPKTFGELKNLPLLNTDKPVQALMRIADELGEIFKFEAPGSVTRYLSSQRLIKEACDESRFDKNLSQALKFARDFVGDGLSTSWTHEPNWKKAHNILVPSFSQHAMGRYHAMMVDIAVQLVQKWERLNADEHIEVSEDMTRLTLDTIGLCGFNYRFNSFYRDQPHPFIVSVVRALDEVMNKLQRANPDDPAYDENKRQCQEDIKVMNDYVDKIIADRKARGEQSHDLLTQMLNGKDPETGEPLDDGNIRQQIITFLIAGHQTTSGLLSFALYFLVKNPHVLQKVAEEAARVLVDPVPSYKQVKQLKYVGMVLNEALRLWPVAPMFSLYAKEDTVLGGEYPLTKGDEVMVLVPQLHRDKTIWGDDVEEFRPERFENPSAIPQHAFKPFGNGQRACIGQQFALHEATLVLGMMLKHFDFEDHTNYELVIKESRTLKPEGFVVKAKSKGIPLGGIPSPSTEQSAKKVRKKAENAHNTPLLVLYGSNAGTAEGTARDLADIAMSKGFAPQVATLDSHAGNLPREGAVLIVTASYNGHPPDNAKQFVDWLDQASADEVKGVRYSVFGCGDKNWAGTYQKVPAFIDETLAAKGAENIADRGEADASDDFEGTYEEWRDHMWSDVAAYFNLDIENSEDNCSTLSLQFVDSAADMPLAKMHGAFSTNVVASKELQQPGSARSTRHLEIELPKEASYQEGDHLGVIPRNYEGIVNRVTARFGLSASQQIRLEAEEEKLAHLPLAKTVSVEELLQYVELQDPVTRTQLRAMAAKTVCPPHKVELEALLEKQAYKEQVLAKRLTMLELLEKYPACEMKFSEFIALLPSIRPRYYSISSSPRVDEKQASITVSVVSGPAWSGYGEYKGIASNYLAELQEGDTITCFISTPQSEFTLPKDPETPLIMVGPGTGVAPFRGFVQARKQLKEQGQSLGEAHLYFGCRSPHEDYLYQEELENAQSEGIITLHTAFSRMPNQPKTYVQHVMEQDGKKLIELLDQGAHFYICGDGSQMAPAVEATLMKSYADVHQVSEADARLWLQQLEEKGRYAKDVWLG

SEQ ID NO: 577 - DNA, 3147 bp, synthetic construct
  misc_feature 1..3147: note = variant of P450 oxidase from Bacillus megaterium
  source 1..3147: mol_type = other DNA
atgacaattaaggaaatgcctcagcctaagacgtttggagaacttaaaaatttaccgttattaaacacagataaaccggttcaagctttgatgcgtattgcggatgaattaggagaaatctttaaattcgaggcgcctggtagcgtaacgcgctatttatcaagtcagcgtctaattaaagaagcatgcgatgaatcacgctttgataaaaacttaagtcaagcgcttaaatttgcacgtgattttgttggagacgggctgtctacaagctggacgcatgaaccgaattggaaaaaagcgcataatatcttagttccaagctttagtcagcatgcaatggggcgttatcatgcgatgatggtcgatatcgccgtgcagcttgttcaaaagtgggagcgtctaaatgcagatgagcatattgaagtatcggaagacatgacacgtttaacgcttgatacaattggtctttgcggctttaactatcgctttaacagcttttaccgagatcagcctcatccatttattgtgagtgtggttcgtgcactggatgaagtaatgaacaagctgcagcgagcaaatccagacgacccagcttatgatgaaaacaagcgccagtgtcaagaagatatcaaggtgatgaacgactatgtagataaaattattgcagatcgcaaagcaaggggtgaacaaagtcatgatttattaacgcagatgctaaacggaaaagatccagaaacgggtgagccgcttgatgacgggaacattcgtcagcaaattattacattcttaattgcgggacaccaaacgacaagtggtcttttatcatttgcgctgtatttcttagtgaaaaatccacatgtattacaaaaagtagcagaagaagcagcacgagttctagtagatcctgttccaagctacaaacaagtcaaacagcttaaatatgttggcatggtcttaaacgaagcgctgcgcttatggccagtagcgcctatgttttccctatatgcaaaagaagatacggtgcttggaggagaatatcctttaacgaaaggcgacgaagtaatggttctggtgcctcagcttcaccgtgataaaacaatttggggagacgatgtggaggagttccgtccagagcgttttgaaaatccaagtgcgattccgcagcatgcgtttaaaccgtttggaaacggtcagcgtgcgtgtatcggtcagcagttcgctcttcatgaagcaacgctggtacttggtatgatgctaaaacactttgactttgaagatcatacaaactacgagctcgttattaaagaatcgcggacgttaaaacctgaaggctttgtggtaaaagcaaaatcgaaaggcattccgcttggcggtattccttcacctagcactgaacagtctgctaaaaaagtacgcaaaaaggcagaaaacgctcataatacgccgctgcttgtgctatacggttcaaatgcgggaacagctgaaggaacggcgcgtgatttagcagatattgcaatgagcaaaggatttgcaccgcaggtcgcaacgcttgattcacacgccggtaatcttccgcgcgaaggagctgtattaattgtaacggcgtcttataacggtcatccgcctgataacgcaaagcaatttgtcgactggttagaccaagcgtctgctgatgaagtaaaaggcgttcgctactccgtatttggatgcggcgataaaaattgggcggggacgtatcaaaaagtgcctgcttttatcgatgaaacgcttgccgctaaaggggcagaaaacatcgctgaccgcggtgaagcagatgcaagcgacgactttgaaggcacatatgaagaatggcgtgatcatatgtggagtgacgtagcagcctactttaacctcgacattgaaaacagtgaagataatgggtctactctttcacttcaatttgtcgacagcgccgcggatatgccgcttgcgaaaatgcacggtgcgttttcaacgaacgtcgtagcaagcaaagaacttcaacagccaggcagtgcacgaagcacgcgacatcttgaaattgaacttccaaaagaagcttcttatcaagaaggagatcatttaggtgttattcctcgcaactatgaaggaatagtaaaccgtgtaacagcaaggttcggcctaagcgcatcacagcaaatccgtctggaagcagaagaagaaaaattagctcatttgccactcgctaaaacagtatccgtagaagagcttctgcaatacgtggagcttcaagatcctgttacgcgcacgcagcttcgcgcaatggctgctaaaacggtctgcccgccgcataaagtagagcttgaagccttgcttgaaaagcaagcctacaaagaacaagtgctggcaaaacgtttaacaatgcttgaactgcttgaaaaatacccggcgtgtgaaatgaaattcagcgaatttatcgcccttctgccaagcatacgcccgcgctattactcgatttcttcatcacctcgtgtcgatgaaaaacaagcaagcatcacggtcagcgttgtctcaggaccggcgtggagcggatatggagaatataaaggaattgcgtcgaactatcttgccgagctgcaagaaggagatacgattacgtgctttatttccacaccgcagtcagaatttacgctgccaaaagaccctgaaacgccgcttatcatggtcggaccgggaacaggcgtcgcgccgtttagaggctttgtgcaggcgcgcaaacagctaaaagaacaaggacagtcacttggagaagcacatttatacttcggctgccgttcacctcatgaagactatctgtatcaagaagagcttgaaaacgcccaaagcgaaggcatcattacgcttcataccgctttttctcgcatgccaaatcagccgaaaacatacgttcagcacgtaatggaacaagacggcaagaaattgattgaacttcttgatcaaggagcgcacttctatatttgcggagacggaagccaaatggcacctgccgttgaagcaacgcttatgaaaagctatgctgacgttcaccaagtgagtgaagcagacgctcgcttatggctgcagcagctagaagaaaaaggccgatacgcaaaagacgtgtggctgggg

SEQ ID NO: 578 - protein, 1049 aa, synthetic construct
  REGION 1..1049: note = variant of P450 oxidase from Bacillus megaterium
MTIKEMPQPKTFGELKNLPLLNTDKPVQALMRIADELGEIFKFEAPGSVTRYLSSQRLIKEACDESRFDKNLSQALKFARDFVGDGLSTSWTHEPNWKKAHNILVPSFSQHAMGRYHAMMVDIAVQLVQKWERLNADEHIEVSEDMTRLTLDTIGLCGFNYRFNSFYRDQPHPFIVSVVRALDEVMNKLQRANPDDPAYDENKRQCQEDIKVMNDYVDKIIADRKARGEQSHDLLTQMLNGKDPETGEPLDDGNIRQQIITFLIAGHQTTSGLLSFALYFLVKNPHVLQKVAEEAARVLVDPVPSYKQVKQLKYVGMVLNEALRLWPVAPMFSLYAKEDTVLGGEYPLTKGDEVMVLVPQLHRDKTIWGDDVEEFRPERFENPSAIPQHAFKPFGNGQRACIGQQFALHEATLVLGMMLKHFDFEDHTNYELVIKESRTLKPEGFVVKAKSKGIPLGGIPSPSTEQSAKKVRKKAENAHNTPLLVLYGSNAGTAEGTARDLADIAMSKGFAPQVATLDSHAGNLPREGAVLIVTASYNGHPPDNAKQFVDWLDQASADEVKGVRYSVFGCGDKNWAGTYQKVPAFIDETLAAKGAENIADRGEADASDDFEGTYEEWRDHMWSDVAAYFNLDIENSEDNGSTLSLQFVDSAADMPLAKMHGAFSTNVVASKELQQPGSARSTRHLEIELPKEASYQEGDHLGVIPRNYEGIVNRVTARFGLSASQQIRLEAEEEKLAHLPLAKTVSVEELLQYVELQDPVTRTQLRAMAAKTVCPPHKVELEALLEKQAYKEQVLAKRLTMLELLEKYPACEMKFSEFIALLPSIRPRYYSISSSPRVDEKQASITVSVVSGPAWSGYGEYKGIASNYLAELQEGDTITCFISTPQSEFTLPKDPETPLIMVGPGTGVAPFRGFVQARKQLKEQGQSLGEAHLYFGCRSPHEDYLYQEELENAQSEGIITLHTAFSRMPNQPKTYVQHVMEQDGKKLIELLDQGAHFYICGDGSQMAPAVEATLMKSYADVHQVSEADARLWLQQLEEKGRYAKDVWLG

SEQ ID NO: 579 - DNA, 3147 bp, synthetic construct
  misc_feature 1..3147: note = variant of P450 oxidase from Bacillus megaterium
  source 1..3147: mol_type = other DNA
atgacaattaaggaaatgcctcagcctaagacgtttggagaacttaaaaatttaccgttattaaacacagataaaccggttcaagctttgatgcgtattgcggatgaattaggagaaatctttaaattcgaggcgcctggtagcgtaacgcgctatttatcaagtcagcgtctaattaaagaagcatgcgatgaatcacgctttgataaaaacttaagtcaagcgcttaaatttgcacgtgattttgttggagacgggctgtctacaagctggacgcatgaaccgaattggaaaaaagcgcataatatcttagttccaagctttagtcagcatgcaatggggcgttatcatgcgatgatggtcgatatcgccgtgcagcttgttcaaaagtgggagcgtctaaatgcagatgagcatattgaagtatcggaagacatgacacgtttaacgcttgatacaattggtctttgcggctttaactatcgctttaacagcttttaccgagatcagcctcatccatttattgtgagtgtggttcgtgcactggatgaagtaatgaacaagctgcagcgagcaaatccagacgacccagcttatgatgaaaacaagcgccagtgtcaagaagatatcaaggtgatgaacgactatgtagataaaattattgcagatcgcaaagcaaggggtgaacaaagtcatgatttattaacgcagatgctaaacggaaaagatccagaaacgggtgagccgcttgatgacgggaacattcgtcagcaaattattacattcttaattgcgggacaccaaacgacaagtggtcttttatcatttgcgctgtatttcttagtgaaaaatccacatgtattacaaaaagtagcagaagaagcagcacgagttctagtagatcctgttccaagctacaaacaagtcaaacagcttaaatatgttggcatggtcttaaacgaagcgctgcgcttatggccagtagcgcctatgttttccctatatgcaaaagaagatacggtgcttggaggagaatatcctttaacgaaaggcgacgaagtaatggttctggtgcctcagcttcaccgtgataaaacaatttggggagacgatgtggaggagttccgtccagagcgttttgaaaatccaagtgcgattccgcagcatgcgtttaaaccgtttggaaacggtcagcgtgcgtgtatcggtcagcagttcgctcttcatgaagcaacgctggtacttggtatgatgctaaaacactttgactttgaagatcatacaaactacgagctcgttattaaagaatcgcggacgttaaaacctgaaggctttgtggtaaaagcaaaatcgaaaggcattccgcttggcggtattccttcacctagcactgaacagtctgctaaaaaagtacgcaaaaaggcagaaaacgctcataatacgccgctgcttgtgctatacggttcaaatgcgggaacagctgaaggaacggcgcgtgatttagcagatattgcaatgagcaaaggatttgcaccgcaggtcgcaacgcttgattcacacgccggtaatcttccgcgcgaaggagctgtattaattgtaacggcgtcttataacggtcatccgcctgataacgcaaagcaatttgtcgactggttagaccaagcgtctgctgatgaagtaaaaggcgttcgctactccgtatttggatgcggcgataaaaattgggcggggacgtatcaaaaagtgcctgcttttatcgatgaaacgcttgccgctaaaggggcagaaaacatcgctgaccgcggtgaagcagatgcaagcgacgactttgaaggcacatatgaagaatggcgtgatcatatgtggagtgacgtagcagcctactttaacctcgacattgaaaacagtgaagataatgtttctactctttcacttcaatttgtcgacagcgccgcggatatgccgcttgcgaaaatgcacggtgcgttttcaacgaacgtcgtagcaagcaaagaacttcaacagccaggcagtgcacgaagcacgcgacatcttgaaattgaacttccaaaagaagcttcttatcaagaaggagatcatttaggtgttattcctcgcaactatgaaggaatagtaaaccgtgtaacagcaaggttcggcctaagcgcatcacagcaaatccgtctggaagcagaagaagaaaaattagctcatttgccactcgctaaaacagtatccgtagaagagcttctgcaatacgtggagcttcaagatcctgttacgcgcacgcagcttcgcgcaatggctgctaaaacggtctgcccgccgcataaagtagagcttgaagccttgcttgaaaagcaagcctacaaagaacaagtgctggcaaaacgtttaacaatgcttgaactgcttgaaaaatacccggcgtgtgaaatgaaattcagcgaatttatcgcccttctgccaagcatacgcccgcgctattactcgatttcttcatcacctcgtgtcgatgaaaaacaagcaagcatcacggtcagcgttgtctcaggaccggcgtggagcggatatggagaatataaaggaattgcgtcgaactatcttgccgagctgcaagaaggagatacgattacgtgctttatttccacaccgcagtcagaatttacgctgccaaaagaccctgaaacgccgcttatcatggtcggaccgggaacaggcgtcgcgccgtttagaggctttgtgcaggcgcgcaaacagctaaaagaacaaggacagtcacttggagaagcacatttatacttcggctgccgttcacctcatgaagactatctgtatcaagaagagcttgaaaacgcccaaagcgaaggcatcattacgcttcataccgctttttctcgcatgccaaatcagccgaaaacatacgttcagcacgtaatggaacaagacggcaagaaattgattgaacttcttgatcaaggagcgcacttctatatttgcggagacggaagccaaatggcacctgccgttgaagcaacgcttatgaaaagctatgctgacgttcaccaagtgagtgaagcagacgctcgcttatggctgcagcagctagaagaaaaaggccgatacgcaaaagacgtgtggctgggg

SEQ ID NO: 580 - protein, 1049 aa, synthetic construct
  REGION 1..1049: note = variant of P450 oxidase from Bacillus megaterium
MTIKEMPQPKTFGELKNLPLLNTDKPVQALMRIADELGEIFKFEAPGSVTRYLSSQRLIKEACDESRFDKNLSQALKFARDFVGDGLSTSWTHEPNWKKAHNILVPSFSQHAMGRYHAMMVDIAVQLVQKWERLNADEHIEVSEDMTRLTLDTIGLCGFNYRFNSFYRDQPHPFIVSVVRALDEVMNKLQRANPDDPAYDENKRQCQEDIKVMNDYVDKIIADRKARGEQSHDLLTQMLNGKDPETGEPLDDGNIRQQIITFLIAGHQTTSGLLSFALYFLVKNPHVLQKVAEEAARVLVDPVPSYKQVKQLKYVGMVLNEALRLWPVAPMFSLYAKEDTVLGGEYPLTKGDEVMVLVPQLHRDKTIWGDDVEEFRPERFENPSAIPQHAFKPFGNGQRACIGQQFALHEATLVLGMMLKHFDFEDHTNYELVIKESRTLKPEGFVVKAKSKGIPLGGIPSPSTEQSAKKVRKKAENAHNTPLLVLYGSNAGTAEGTARDLADIAMSKGFAPQVATLDSHAGNLPREGAVLIVTASYNGHPPDNAKQFVDWLDQASADEVKGVRYSVFGCGDKNWAGTYQKVPAFIDETLAAKGAENIADRGEADASDDFEGTYEEWRDHMWSDVAAYFNLDIENSEDNVSTLSLQFVDSAADMPLAKMHGAFSTNVVASKELQQPGSARSTRHLEIELPKEASYQEGDHLGVIPRNYEGIVNRVTARFGLSASQQIRLEAEEEKLAHLPLAKTVSVEELLQYVELQDPVTRTQLRAMAAKTVCPPHKVELEALLEKQAYKEQVLAKRLTMLELLEKYPACEMKFSEFIALLPSIRPRYYSISSSPRVDEKQASITVSVVSGPAWSGYGEYKGIASNYLAELQEGDTITCFISTPQSEFTLPKDPETPLIMVGPGTGVAPFRGFVQARKQLKEQGQSLGEAHLYFGCRSPHEDYLYQEELENAQSEGIITLHTAFSRMPNQPKTYVQHVMEQDGKKLIELLDQGAHFYICGDGSQMAPAVEATLMKSYADVHQVSEADARLWLQQLEEKGRYAKDVWLG

SEQ ID NO: 581 - DNA, 3147 bp, synthetic construct
  misc_feature 1..3147: note = variant of P450 oxidase from Bacillus megaterium
  source 1..3147: mol_type = other DNA
atgacaattaaggaaatgcctcagcctaagacgtttggagaacttaaaaatttaccgttattaaacacagataaaccggttcaagctttgatgcgtattgcggatgaattaggagaaatctttaaattcgaggcgcctggtagcgtaacgcgctatttatcaagtcagcgtctaattaaagaagcatgcgatgaatcacgctttgataaaaacttaagtcaagcgcttaaatttgcacgtgattttgttggagacgggctgtctacaagctggacgcatgaaccgaattggaaaaaagcgcataatatcttagttccaagctttagtcagcatgcaatggggcgttatcatgcgatgatggtcgatatcgccgtgcagcttgttcaaaagtgggagcgtctaaatgcagatgagcatattgaagtatcggaagacatgacacgtttaacgcttgatacaattggtctttgcggctttaactatcgctttaacagcttttaccgagatcagcctcatccatttattgtgagtgtggttcgtgcactggatgaagtaatgaacaagctgcagcgagcaaatccagacgacccagcttatgatgaaaacaagcgccagtgtcaagaagatatcaaggtgatgaacgactatgtagataaaattattgcagatcgcaaagcaaggggtgaacaaagtcatgatttattaacgcagatgctaaacggaaaagatccagaaacgggtgagccgcttgatgacgggaacattcgtcagcaaattattacattcttaattgcgggacaccaaacgacaagtggtcttttatcatttgcgctgtatttcttagtgaaaaatccacatgtattacaaaaagtagcagaagaagcagcacgagttctagtagatcctgttccaagctacaaacaagtcaaacagcttaaatatgttggcatggtcttaaacgaagcgctgcgcttatggccagtagcgcctatgttttccctatatgcaaaagaagatacggtgcttggaggagaatatcctttaacgaaaggcgacgaagtaatggttctggtgcctcagcttcaccgtgataaaacaatttggggagacgatgtggaggagttccgtccagagcgttttgaaaatccaagtgcgattccgcagcatgcgtttaaaccgtttggaaacggtcagcgtgcgtgtatcggtcagcagttcgctcttcatgaagcaacgctggtacttggtatgatgctaaaacactttgactttgaagatcatacaaactacgagctcgttattaaagaatcgcggacgttaaaacctgaaggctttgtggtaaaagcaaaatcgaaaggcattccgcttggcggtattccttcacctagcactgaacagtctgctaaaaaagtacgcaaaaaggcagaaaacgctcataatacgccgctgcttgtgctatacggttcaaatgcgggaacagctgaaggaacggcgcgtgatttagcagatattgcaatgagcaaaggatttgcaccgcaggtcgcaacgcttgattcacacgccggtaatcttccgcgcgaaggagctgtattaattgtaacggcgtcttataacggtcatccgcctgataacgcaaagcaatttgtcgactggttagaccaagcgtctgctgatgaagtaaaaggcgttcgctactccgtatttggatgcggcgataaaaattgggcggggacgtatcaaaaagtgcctgcttttatcgatgaaacgcttgccgctaaaggggcagaaaacatcgctgaccgcggtgaagcagatgcaagcgacgactttgaaggcacatatgaagaatggcgtgatcatatgtggagtgacgtagcagcctactttaacctcgacattgaaaacagtgaagataattggtctactctttcacttcaatttgtcgacagcgccgcggatatgccgcttgcgaaaatgcacggtgcgttttcaacgaacgtcgtagcaagcaaagaacttcaacagccaggcagtgcacgaagcacgcgacatcttgaaattgaacttccaaaagaagcttcttatcaagaaggagatcatttaggtgttattcctcgcaactatgaaggaatagtaaaccgtgtaacagcaaggttcggcctaagcgcatcacagcaaatccgtctggaagcagaagaagaaaaattagctcatttgccactcgctaaaacagtatccgtagaagagcttctgcaatacgtggagcttcaagatcctgttacgcgcacgcagcttcgcgcaatggctgctaaaacggtctgcccgccgcataaagtagagcttgaagccttgcttgaaaagcaagcctacaaagaacaagtgctggcaaaacgtttaacaatgcttgaactgcttgaaaaatacccggcgtgtgaaatgaaattcagcgaatttatcgcccttctgccaagcatacgcccgcgctattactcgatttcttcatcacctcgtgtcgatgaaaaacaagcaagcatcacggtcagcgttgtctcaggaccggcgtggagcggatatggagaatataaaggaattgcgtcgaactatcttgccgagctgcaagaaggagatacgattacgtgctttatttccacaccgcagtcagaatttacgctgccaaaagaccctgaaacgccgcttatcatggtcggaccgggaacaggcgtcgcgccgtttagaggctttgtgcaggcgcgcaaacagctaaaagaacaaggacagtcacttggagaagcacatttatacttcggctgccgttcacctcatgaagactatctgtatcaagaagagcttgaaaacgcccaaagcgaaggcatcattacgcttcataccgctttttctcgcatgccaaatcagccgaaaacatacgttcagcacgtaatggaacaagacggcaagaaattgattgaacttcttgatcaaggagcgcacttctatatttgcggagacggaagccaaatggcacctgccgttgaagcaacgcttatgaaaagctatgctgacgttcaccaagtgagtgaagcagacgctcgcttatggctgcagcagctagaagaaaaaggccgatacgcaaaagacgtgtggctgggg

SEQ ID NO: 582 - protein, 1049 aa, synthetic construct
  REGION 1..1049: note = variant of P450 oxidase from Bacillus megaterium
MTIKEMPQPKTFGELKNLPLLNTDKPVQALMRIADELGEIFKFEAPGSVTRYLSSQRLIKEACDESRFDKNLSQALKFARDFVGDGLSTSWTHEPNWKKAHNILVPSFSQHAMGRYHAMMVDIAVQLVQKWERLNADEHIEVSEDMTRLTLDTIGLCGFNYRFNSFYRDQPHPFIVSVVRALDEVMNKLQRANPDDPAYDENKRQCQEDIKVMNDYVDKIIADRKARGEQSHDLLTQMLNGKDPETGEPLDDGNIRQQIITFLIAGHQTTSGLLSFALYFLVKNPHVLQKVAEEAARVLVDPVPSYKQVKQLKYVGMVLNEALRLWPVAPMFSLYAKEDTVLGGEYPLTKGDEVMVLVPQLHRDKTIWGDDVEEFRPERFENPSAIPQHAFKPFGNGQRACIGQQFALHEATLVLGMMLKHFDFEDHTNYELVIKESRTLKPEGFVVKAKSKGIPLGGIPSPSTEQSAKKVRKKAENAHNTPLLVLYGSNAGTAEGTARDLADIAMSKGFAPQVATLDSHAGNLPREGAVLIVTASYNGHPPDNAKQFVDWLDQASADEVKGVRYSVFGCGDKNWAGTYQKVPAFIDETLAAKGAENIADRGEADASDDFEGTYEEWRDHMWSDVAAYFNLDIENSEDNWSTLSLQFVDSAADMPLAKMHGAFSTNVVASKELQQPGSARSTRHLEIELPKEASYQEGDHLGVIPRNYEGIVNRVTARFGLSASQQIRLEAEEEKLAHLPLAKTVSVEELLQYVELQDPVTRTQLRAMAAKTVCPPHKVELEALLEKQAYKEQVLAKRLTMLELLEKYPACEMKFSEFIALLPSIRPRYYSISSSPRVDEKQASITVSVVSGPAWSGYGEYKGIASNYLAELQEGDTITCFISTPQSEFTLPKDPETPLIMVGPGTGVAPFRGFVQARKQLKEQGQSLGEAHLYFGCRSPHEDYLYQEELENAQSEGIITLHTAFSRMPNQPKTYVQHVMEQDGKKLIELLDQGAHFYICGDGSQMAPAVEATLMKSYADVHQVSEADARLWLQQLEEKGRYAKDVWLG

SEQ ID NO: 583 - DNA, 3147 bp, synthetic construct
  misc_feature 1..3147: note = variant of P450 oxidase from Bacillus megaterium
  source 1..3147: mol_type = other DNA
atgacaattaaggaaatgcctcagcctaagacgtttggagaacttaaaaatttaccgttattaaacacagataaaccggttcaagctttgatgcgtattgcggatgaattaggagaaatctttaaattcgaggcgcctggtagcgtaacgcgctatttatcaagtcagcgtctaattaaagaagcatgcgatgaatcacgctttgataaaaacttaagtcaagcgcttaaatttgcacgtgattttgttggagacgggctgtctacaagctggacgcatgaaccgaattggaaaaaagcgcataatatcttagttccaagctttagtcagcatgcaatggggcgttatcatgcgatgatggtcgatatcgccgtgcagcttgttcaaaagtgggagcgtctaaatgcagatgagcatattgaagtatcggaagacatgacacgtttaacgcttgatacaattggtctttgcggctttaactatcgctttaacagcttttaccgagatcagcctcatccatttattgtgagtgtggttcgtgcactggatgaagtaatgaacaagctgcagcgagcaaatccagacgacccagcttatgatgaaaacaagcgccagtgtcaagaagatatcaaggtgatgaacgactatgtagataaaattattgcagatcgcaaagcaaggggtgaacaaagtcatgatttattaacgcagatgctaaacggaaaagatccagaaacgggtgagccgcttgatgacgggaacattcgtcagcaaattattacattcttaattgcgggacaccaaacgacaagtggtcttttatcatttgcgctgtatttcttagtgaaaaatccacatgtattacaaaaagtagcagaagaagcagcacgagttctagtagatcctgttccaagctacaaacaagtcaaacagcttaaatatgttggcatggtcttaaacgaagcgctgcgcttatggccagtagcgcctatgttttccctatatgcaaaagaagatacggtgcttggaggagaatatcctttaacgaaaggcgacgaagtaatggttctggtgcctcagcttcaccgtgataaaacaatttggggagacgatgtggaggagttccgtccagagcgttttgaaaatccaagtgcgattccgcagcatgcgtttaaaccgtttggaaacggtcagcgtgcgtgtatcggtcagcagttcgctcttcatgaagcaacgctggtacttggtatgatgctaaaacactttgactttgaagatcatacaaactacgagctcgttattaaagaatcgcggacgttaaaacctgaaggctttgtggtaaaagcaaaatcgaaaggcattccgcttggcggtattccttcacctagcactgaacagtctgctaaaaaagtacgcaaaaaggcagaaaacgctcataatacgccgctgcttgtgctatacggttcaaatgcgggaacagctgaaggaacggcgcgtgatttagcagatattgcaatgagcaaaggatttgcaccgcaggtcgcaacgcttgattcacacgccggtaatcttccgcgcgaaggagctgtattaattgtaacggcgtcttataacggtcatccgcctgataacgcaaagcaatttgtcgactggttagaccaagcgtctgctgatgaagtaaaaggcgttcgctactccgtatttggatgcggcgataaaaattgggcggggacgtatcaaaaagtgcctgcttttatcgatgaaacgcttgccgctaaaggggcagaaaacatcgctgaccgcggtgaagcagatgcaagcgacgactttgaaggcacatatgaagaatggcgtgatcatatgtggagtgacgtagcagcctactttaacctcgacattgaaaacagtgaagataataaatctactctttcagttcaatttgtcgacagcgccgcggatatgccgcttgcgaaaatgcacggtgcgttttcaacgaacgtcgtagcaagcaaagaacttcaacagccaggcagtgcacgaagcacgcgacatcttgaaattgaacttccaaaagaagcttcttatcaagaaggagatcatttaggtgttattcctcgcaactatgaaggaatagtaaaccgtgtaacagcaaggttcggcctaagcgcatcacagcaaatccgtctggaagcagaagaagaaaaattagctcatttgccactcgctaaaacagtatccgtagaagagcttctgcaatacgtggagcttcaagatcctgttacgcgcacgcagcttcgcgcaatggctgctaaaacggtctgcccgccgcataaagtagagcttgaagccttgcttgaaaagcaagcctacaaagaacaagtgctggcaaaacgtttaacaatgcttgaactgcttgaaaaatacccggcgtgtgaaatgaaattcagcgaatttatcgcccttctgccaagcatacgcccgcgctattactcgatttcttcatcacctcgtgtcgatgaaaaacaagcaagcatcacggtcagcgttgtctcaggaccggcgtggagcggatatggagaatataaaggaattgcgtcgaactatcttgccgagctgcaagaaggagatacgattacgtgctttatttccacaccgcagtcagaatttacgctgccaaaagaccctgaaacgccgcttatcatggtcggaccgggaacaggcgtcgcgccgtttagaggctttgtgcaggcgcgcaaacagctaaaagaacaaggacagtcacttggagaagcacatttatacttcggctgccgttcacctcatgaagactatctgtatcaagaagagcttgaaaacgcccaaagcgaaggcatcattacgcttcataccgctttttctcgcatgccaaatcagccgaaaacatacgttcagcacgtaatggaacaagacggcaagaaattgattgaacttcttgatcaaggagcgcacttctatatttgcggagacggaagccaaatggcacctgccgttgaagcaacgcttatgaaaagctatgctgacgttcaccaagtgagtgaagcagacgctcgcttatggctgcagcagctagaagaaaaaggccgatacgcaaaagacgtgtggctgggg

SEQ ID NO: 584 - protein, 1049 aa, synthetic construct
  REGION 1..1049: note = variant of P450 oxidase from Bacillus megaterium
MTIKEMPQPKTFGELKNLPLLNTDKPVQALMRIADELGEIFKFEAPGSVTRYLSSQRLIKEACDESRFDKNLSQALKFARDFVGDGLSTSWTHEPNWKKAHNILVPSFSQHAMGRYHAMMVDIAVQLVQKWERLNADEHIEVSEDMTRLTLDTIGLCGFNYRFNSFYRDQPHPFIVSVVRALDEVMNKLQRANPDDPAYDENKRQCQEDIKVMNDYVDKIIADRKARGEQSHDLLTQMLNGKDPETGEPLDDGNIRQQIITFLIAGHQTTSGLLSFALYFLVKNPHVLQKVAEEAARVLVDPVPSYKQVKQLKYVGMVLNEALRLWPVAPMFSLYAKEDTVLGGEYPLTKGDEVMVLVPQLHRDKTIWGDDVEEFRPERFENPSAIPQHAFKPFGNGQRACIGQQFALHEATLVLGMMLKHFDFEDHTNYELVIKESRTLKPEGFVVKAKSKGIPLGGIPSPSTEQSAKKVRKKAENAHNTPLLVLYGSNAGTAEGTARDLADIAMSKGFAPQVATLDSHAGNLPREGAVLIVTASYNGHPPDNAKQFVDWLDQASADEVKGVRYSVFGCGDKNWAGTYQKVPAFIDETLAAKGAENIADRGEADASDDFEGTYEEWRDHMWSDVAAYFNLDIENSEDNKSTLSVQFVDSAADMPLAKMHGAFSTNVVASKELQQPGSARSTRHLEIELPKEASYQEGDHLGVIPRNYEGIVNRVTARFGLSASQQIRLEAEEEKLAHLPLAKTVSVEELLQYVELQDPVTRTQLRAMAAKTVCPPHKVELEALLEKQAYKEQVLAKRLTMLELLEKYPACEMKFSEFIALLPSIRPRYYSISSSPRVDEKQASITVSVVSGPAWSGYGEYKGIASNYLAELQEGDTITCFISTPQSEFTLPKDPETPLIMVGPGTGVAPFRGFVQARKQLKEQGQSLGEAHLYFGCRSPHEDYLYQEELENAQSEGIITLHTAFSRMPNQPKTYVQHVMEQDGKKLIELLDQGAHFYICGDGSQMAPAVEATLMKSYADVHQVSEADARLWLQQLEEKGRYAKDVWLG

SEQ ID NO: 585 - DNA, 3147 bp, synthetic construct
  misc_feature 1..3147: note = variant of P450 oxidase from Bacillus megaterium
  source 1..3147: mol_type = other DNA
atgacaattaaggaaatgcctcagcctaagacgtttggagaacttaaaaatttaccgttattaaacacagataaaccggttcaagctttgatgcgtattgcggatgaattaggagaaatctttaaattcgaggcgcctggtagcgtaacgcgctatttatcaagtcagcgtctaattaaagaagcatgcgatgaatcacgctttgataaaaacttaagtcaagcgcttaaatttgcacgtgattttgttggagacgggctgtctacaagctggacgcatgaaccgaattggaaaaaagcgcataatatcttagttccaagctttagtcagcatgcaatggggcgttatcatgcgatgatggtcgatatcgccgtgcagcttgttcaaaagtgggagcgtctaaatgcagatgagcatattgaagtatcggaagacatgacacgtttaacgcttgatacaattggtctttgcggctttaactatcgctttaacagcttttaccgagatcagcctcatccatttattgtgagtgtggttcgtgcactggatgaagtaatgaacaagctgcagcgagcaaatccagacgacccagcttatgatgaaaacaagcgccagtgtcaagaagatatcaaggtgatgaacgactatgtagataaaattattgcagatcgcaaagcaaggggtgaacaaagtcatgatttattaacgcagatgctaaacggaaaagatccagaaacgggtgagccgcttgatgacgggaacattcgtcagcaaattattacattcttaattgcgggacaccaaacgacaagtggtcttttatcatttgcgctgtatttcttagtgaaaaatccacatgtattacaaaaagtagcagaagaagcagcacgagttctagtagatcctgttccaagctacaaacaagtcaaacagcttaaatatgttggcatggtcttaaacgaagcgctgcgcttatggccagtagcgcctatgttttccctatatgcaaaagaagatacggtgcttggaggagaatatcctttaacgaaaggcgacgaagtaatggttctggtgcctcagcttcaccgtgataaaacaatttggggagacgatgtggaggagttccgtccagagcgttttgaaaatccaagtgcgattccgcagcatgcgtttaaaccgtttggaaacggtcagcgtgcgtgtatcggtcagcagttcgctcttcatgaagcaacgctggtacttggtatgatgctaaaacactttgactttgaagatcatacaaactacgagctcgttattaaagaatcgcggacgttaaaacctgaaggctttgtggtaaaagcaaaatcgaaaggcattccgcttggcggtattccttcacctagcactgaacagtctgctaaaaaagtacgcaaaaaggcagaaaacgctcataatacgccgctgcttgtgctatacggttcaaatgcgggaacagctgaaggaacggcgcgtgatttagcagatattgcaatgagcaaaggatttgcaccgcaggtcgcaacgcttgattcacacgccggtaatcttccgcgcgaaggagctgtattaattgtaacggcgtcttataacggtcatccgcctgataacgcaaagcaatttgtcgactggttagaccaagcgtctgctgatgaagtaaaaggcgttcgctactccgtatttggatgcggcgataaaaattgggcggggacgtatcaaaaagtgcctgcttttatcgatgaaacgcttgccgctaaaggggcagaaaacatcgctgaccgcggtgaagcagatgcaagcgacgactttgaaggcacatatgaagaatggcgtgatcatatgtggagtgacgtagcagcctactttaacctcgacattgaaaacagtgaagataataaatctactctttcacttcaatttgtcgacagcgccgcggatatgccgcttgcgaaaatgcacggtgcgttttcaacgaacgtcgtagcaagcaaagaacttcaacagccaggcagtgcacgaagcacgcgacatcttgaaattgaacttccaaaagaagcttcttatcaagaaggagatcatttaggtgttattcctcgcaactatgaaggaatagtaaaccgtgtaacagcaaggttcggcctaagcgcatcacagcaaatccgtctggaagcagaagaagaaaaattagctcatttgccactcgctaaaacagtatccgtagaagagcttctgcaatacgtggagcttcaagatcctgttacgcgcacgcagcttcgcgcaatggctgctaaaacggtctgcccgccgcataaagtagagcttgaagccttgcttgaaaagcaagcctacaaagaacaagtggcggcaaaacgtttaacaatgcttgaactgcttgaaaaatacccggcgtgtgaaatgaaattcagcgaatttatcgcccttctgccaagcatacgcccgcgctattactcgatttcttcatcacctcgtgtcgatgaaaaacaagcaagcatcacggtcagcgttgtctcaggaccggcgtggagcggatatggagaatataaaggaattgcgtcgaactatcttgccgagctgcaagaaggagatacgattacgtgctttatttccacaccgcagtcagaatttacgctgccaaaagaccctgaaacgccgcttatcatggtcggaccgggaacaggcgtcgcgccgtttagaggctttgtgcaggcgcgcaaacagctaaaagaacaaggacagtcacttggagaagcacatttatacttcggctgccgttcacctcatgaagactatctgtatcaagaagagcttgaaaacgcccaaagcgaaggcatcattacgcttcataccgctttttctcgcatgccaaatcagccgaaaacatacgttcagcacgtaatggaacaagacggcaagaaattgattgaacttcttgatcaaggagcgcacttctatatttgcggagacggaagccaaatggcacctgccgttgaagcaacgcttatgaaaagctatgctgacgttcaccaagtgagtgaagcagacgctcgcttatggctgcagcagctagaagaaaaaggccgatacgcaaaagacgtgtggctgggg

SEQ ID NO: 586 - protein, 1049 aa, synthetic construct
  REGION 1..1049: note = variant of P450 oxidase from Bacillus megaterium
MTIKEMPQPKTFGELKNLPLLNTDKPVQALMRIADELGEIFKFEAPGSVTRYLSSQRLIKEACDESRFDKNLSQALKFARDFVGDGLSTSWTHEPNWKKAHNILVPSFSQHAMGRYHAMMVDIAVQLVQKWERLNADEHIEVSEDMTRLTLDTIGLCGFNYRFNSFYRDQPHPFIVSVVRALDEVMNKLQRANPDDPAYDENKRQCQEDIKVMNDYVDKIIADRKARGEQSHDLLTQMLNGKDPETGEPLDDGNIRQQIITFLIAGHQTTSGLLSFALYFLVKNPHVLQKVAEEAARVLVDPVPSYKQVKQLKYVGMVLNEALRLWPVAPMFSLYAKEDTVLGGEYPLTKGDEVMVLVPQLHRDKTIWGDDVEEFRPERFENPSAIPQHAFKPFGNGQRACIGQQFALHEATLVLGMMLKHFDFEDHTNYELVIKESRTLKPEGFVVKAKSKGIPLGGIPSPSTEQSAKKVRKKAENAHNTPLLVLYGSNAGTAEGTARDLADIAMSKGFAPQVATLDSHAGNLPREGAVLIVTASYNGHPPDNAKQFVDWLDQASADEVKGVRYSVFGCGDKNWAGTYQKVPAFIDETLAAKGAENIADRGEADASDDFEGTYEEWRDHMWSDVAAYFNLDIENSEDNKSTLSLQFVDSAADMPLAKMHGAFSTNVVASKELQQPGSARSTRHLEIELPKEASYQEGDHLGVIPRNYEGIVNRVTARFGLSASQQIRLEAEEEKLAHLPLAKTVSVEELLQYVELQDPVTRTQLRAMAAKTVCPPHKVELEALLEKQAYKEQVAAKRLTMLELLEKYPACEMKFSEFIALLPSIRPRYYSISSSPRVDEKQASITVSVVSGPAWSGYGEYKGIASNYLAELQEGDTITCFISTPQSEFTLPKDPETPLIMVGPGTGVAPFRGFVQARKQLKEQGQSLGEAHLYFGCRSPHEDYLYQEELENAQSEGIITLHTAFSRMPNQPKTYVQHVMEQDGKKLIELLDQGAHFYICGDGSQMAPAVEATLMKSYADVHQVSEADARLWLQQLEEKGRYAKDVWLG

SEQ ID NO: 587 - DNA, 3147 bp, synthetic construct
  misc_feature 1..3147: note = variant of P450 oxidase from Bacillus megaterium
  source 1..3147: mol_type = other DNA
atgacaattaaggaaatgcctcagcctaagacgtttggagaacttaaaaatttaccgttattaaacacagataaaccggttcaagctttgatgcgtattgcggatgaattaggagaaatctttaaattcgaggcgcctggtagcgtaacgcgctatttatcaagtcagcgtctaattaaagaagcatgcgatgaatcacgctttgataaaaacttaagtcaagcgcttaaatttgcacgtgattttgttggagacgggctgtctacaagctggacgcatgaaccgaattggaaaaaagcgcataatatcttagttccaagctttagtcagcatgcaatggggcgttatcatgcgatgatggtcgatatcgccgtgcagcttgttcaaaagtgggagcgtctaaatgcagatgagcatattgaagtatcggaagacatgacacgtttaacgcttgatacaattggtctttgcggctttaactatcgctttaacagcttttaccgagatcagcctcatccatttattgtgagtgtggttcgtgcactggatgaagtaatgaacaagctgcagcgagcaaatccagacgacccagcttatgatgaaaacaagcgccagtgtcaagaagatatcaaggtgatgaacgactatgtagataaaattattgcagatcgcaaagcaaggggtgaacaaagtcatgatttattaacgcagatgctaaacggaaaagatccagaaacgggtgagccgcttgatgacgggaacattcgtcagcaaattattacattcttaattgcgggacaccaaacgacaagtggtcttttatcatttgcgctgtatttcttagtgaaaaatccacatgtattacaaaaagtagcagaagaagcagcacgagttctagtagatcctgttccaagctacaaacaagtcaaacagcttaaatatgttggcatggtcttaaacgaagcgctgcgcttatggccagtagcgcctatgttttccctatatgcaaaagaagatacggtgcttggaggagaatatcctttaacgaaaggcgacgaagtaatggttctggtgcctcagcttcaccgtgataaaacaatttggggagacgatgtggaggagttccgtccagagcgttttgaaaatccaagtgcgattccgcagcatgcgtttaaaccgtttggaaacggtcagcgtgcgtgtatcggtcagcagttcgctcttcatgaagcaacgctggtacttggtatgatgctaaaacactttgactttgaagatcatacaaactacgagctcgttattaaagaatcgcggacgttaaaacctgaaggctttgtggtaaaagcaaaatcgaaaggcattccgcttggcggtattccttcacctagcactgaacagtctgctaaaaaagtacgcaaaaaggcagaaaacgctcataatacgccgctgcttgtgctatacggttcaaatgcgggaacagctgaaggaacggcgcgtgatttagcagatattgcaatgagcaaaggatttgcaccgcaggtcgcaacgcttgattcacacgccggtaatcttccgcgcgaaggagctgtattaattgtaacggcgtcttataacggtcatccgcctgataacgcaaagcaatttgtcgactggttagaccaagcgtctgctgatgaagtaaaaggcgttcgctactccgtatttggatgcggcgataaacattgggcggggacgtatcaaaaagtgcctgcttttatcgatgaaacgcttgccgctaaaggggcagaaaacatcgctgaccgcggtgaagcagatgcaagcgacgactttgaaggcacatatgaagaatggcgtgatcatatgtggagtgacgtagcagcctactttaacctcgacattgaaaacagtgaagataataaatctactctttcacttcaatttgtcgacagcgccgcggatatgccgcttgcgaaaatgcacggtgcgttttcaacgaacgtcgtagcaagcaaagaacttcaacagccaggcagtgcacgaagcacgcgacatcttgaaattgaacttccaaaagaagcttcttatcaagaaggagatcatttaggtgttattcctcgcaactatgaaggaatagtaaaccgtgtaacagcaaggttcggcctaagcgcatcacagcaaatccgtctggaagcagaagaagaaaaattagctcatttgccactcgctaaaacagtatccgtagaagagcttctgcaatacgtggagcttcaagatcctgttacgcgcacgcagcttcgcgcaatggctgctaaaacggtctgcccgccgcataaagtagagcttgaagccttgcttgaaaagcaagcctacaaagaacaagtgctggcaaaacgtttaacaatgcttgaactgcttgaaaaatacccggcgtgtgaaatgaaattcagcgaatttatcgcccttctgccaagcatacgcccgcgctattactcgatttcttcatcacctcgtgtcgatgaaaaacaagcaagcatcacggtcagcgttgtctcaggaccggcgtggagcggatatggagaatataaaggaattgcgtcgaactatcttgccgagctgcaagaaggagatacgattacgtgctttatttccacaccgcagtcagaatttacgctgccaaaagaccctgaaacgccgcttatcatggtcggaccgggaacaggcgtcgcgccgtttagaggctttgtgcaggcgcgcaaacagctaaaagaacaaggacagtcacttggagaagcacatttatacttcggctgccgttcacctcatgaagactatctgtatcaagaagagcttgaaaacgcccaaagcgaaggcatcattacgcttcataccgctttttctcgcatgccaaatcagccgaaaacatacgttcagcacgtaatggaacaagacggcaagaaattgattgaacttcttgatcaaggagcgcacttctatatttgcggagacggaagccaaatggcacctgccgttgaagcaacgcttatgaaaagctatgctgacgttcaccaagtgagtgaagcagacgctcgcttatggctgcagcagctagaagaaaaaggccgatacgcaaaagacgtgtggctgggg

SEQ ID NO: 588 - protein, 1049 aa, synthetic construct
  REGION 1..1049: note = variant of P450 oxidase from Bacillus megaterium
MTIKEMPQPKTFGELKNLPLLNTDKPVQALMRIADELGEIFKFEAPGSVTRYLSSQRLIKEACDESRFDKNLSQALKFARDFVGDGLSTSWTHEPNWKKAHNILVPSFSQHAMGRYHAMMVDIAVQLVQKWERLNADEHIEVSEDMTRLTLDTIGLCGFNYRFNSFYRDQPHPFIVSVVRALDEVMNKLQRANPDDPAYDENKRQCQEDIKVMNDYVDKIIADRKARGEQSHDLLTQMLNGKDPETGEPLDDGNIRQQIITFLIAGHQTTSGLLSFALYFLVKNPHVLQKVAEEAARVLVDPVPSYKQVKQLKYVGMVLNEALRLWPVAPMFSLYAKEDTVLGGEYPLTKGDEVMVLVPQLHRDKTIWGDDVEEFRPERFENPSAIPQHAFKPFGNGQRACIGQQFALHEATLVLGMMLKHFDFEDHTNYELVIKESRTLKPEGFVVKAKSKGIPLGGIPSPSTEQSAKKVRKKAENAHNTPLLVLYGSNAGTAEGTARDLADIAMSKGFAPQVATLDSHAGNLPREGAVLIVTASYNGHPPDNAKQFVDWLDQASADEVKGVRYSVFGCGDKHWAGTYQKVPAFIDETLAAKGAENIADRGEADASDDFEGTYEEWRDHMWSDVAAYFNLDIENSEDNKSTLSLQFVDSAADMPLAKMHGAFSTNVVASKELQQPGSARSTRHLEIELPKEASYQEGDHLGVIPRNYEGIVNRVTARFGLSASQQIRLEAEEEKLAHLPLAKTVSVEELLQYVELQDPVTRTQLRAMAAKTVCPPHKVELEALLEKQAYKEQVLAKRLTMLELLEKYPACEMKFSEFIALLPSIRPRYYSISSSPRVDEKQASITVSVVSGPAWSGYGEYKGIASNYLAELQEGDTITCFISTPQSEFTLPKDPETPLIMVGPGTGVAPFRGFVQARKQLKEQGQSLGEAHLYFGCRSPHEDYLYQEELENAQSEGIITLHTAFSRMPNQPKTYVQHVMEQDGKKLIELLDQGAHFYICGDGSQMAPAVEATLMKSYADVHQVSEADARLWLQQLEEKGRYAKDVWLG

SEQ ID NO: 589 - DNA, 3147 bp, synthetic construct
  misc_feature 1..3147: note = variant of P450 oxidase from Bacillus megaterium
  source 1..3147: mol_type = other DNA
atgacaattaaggaaatgcctcagcctaagacgtttggagaacttaaaaatttaccgttattaaacacagataaaccggttcaagctttgatgcgtattgcggatgaattaggagaaatctttaaattcgaggcgcctggtagcgtaacgcgctatttatcaagtcagcgtctaattaaagaagcatgcgatgaatcacgctttgataaaaacttaagtcaagcgcttaaatttgcacgtgattttgttggagacgggctgtctacaagctggacgcatgaaccgaattggaaaaaagcgcataatatcttagttccaagctttagtcagcatgcaatggggcgttatcatgcgatgatggtcgatatcgccgtgcagcttgttcaaaagtgggagcgtctaaatgcagatgagcatattgaagtatcggaagacatgacacgtttaacgcttgatacaattggtctttgcggctttaactatcgctttaacagcttttaccgagatcagcctcatccatttattgtgagtgtggttcgtgcactggatgaagtaatgaacaagctgcagcgagcaaatccagacgacccagcttatgatgaaaacaagcgccagtgtcaagaagatatcaaggtgatgaacgactatgtagataaaattattgcagatcgcaaagcaaggggtgaacaaagtcatgatttattaacgcagatgctaaacggaaaagatccagaaacgggtgagccgcttgatgacgggaacattcgtcagcaaattattacattcttaattgcgggacaccaaacgacaagtggtcttttatcatttgcgctgtatttcttagtgaaaaatccacatgtattacaaaaagtagcagaagaagcagcacgagttctagtagatcctgttccaagctacaaacaagtcaaacagcttaaatatgttggcatggtcttaaacgaagcgctgcgcttatggccagtagcgcctatgttttccctatatgcaaaagaagatacggtgcttggaggagaatatcctttaacgaaaggcgacgaagtaatggttctggtgcctcagcttcaccgtgataaaacaatttggggagacgatgtggaggagttccgtccagagcgttttgaaaatccaagtgcgattccgcagcatgcgtttaaaccgtttggaaacggtcagcgtgcgtgtatcggtcagcagttcgctcttcatgaagcaacgctggtacttggtatgatgctaaaacactttgactttgaagatcatacaaactacgagctcgttattaaagaatcgcggacgttaaaacctgaaggctttgtggtaaaagcaaaatcgaaaggcattccgcttggcggtattccttcacctagcactgaacagtctgctaaaaaagtacgcaaaaaggcagaaaacgctcataatacgccgctgcttgtgctatacggttcaaatgcgggaacagctgaaggaacggcgcgtgatttagcagatattgcaatgagcaaaggatttgcaccgcaggtcgcaacgcttgattcacacgccggtaatcttccgcgcgaaggagctgtattaattgtaacggcgtcttataacggtcatccgcctgataacgcaaagcaatttgtcgactggttagaccaagcgtctgctgatgaagtaaaaggcgttcgctactccgtatttggatgcggcgataaaagttgggcggggacgtatcaaaaagtgcctgcttttatcgatgaaacgcttgccgctaaaggggcagaaaacatcgctgaccgcggtgaagcagatgcaagcgacgactttgaaggcacatatgaagaatggcgtgatcatatgtggagtgacgtagcagcctactttaacctcgacattgaaaacagtgaagataataaatctactctttcacttcaatttgtcgacagcgccgcggatatgccgcttgcgaaaatgcacggtgcgttttcaacgaacgtcgtagcaagcaaagaacttcaacagccaggcagtgcacgaagcacgcgacatcttgaaattgaacttccaaaagaagcttcttatcaagaaggagatcatttaggtgttattcctcgcaactatgaaggaatagtaaaccgtgtaacagcaaggttcggcctaagcgcatcacagcaaatccgtctggaagcagaagaagaaaaattagctcatttgccactcgctaaaacagtatccgtagaagagcttctgcaatacgtggagcttcaagatcctgttacgcgcacgcagcttcgcgcaatggctgctaaaacggtctgcccgccgcataaagtagagcttgaagccttgcttgaaaagcaagcctacaaagaacaagtgctggcaaaacgtttaacaatgcttgaactgcttgaaaaatacccggcgtgtgaaatgaaattcagcgaatttatcgcccttctgccaagcatacgcccgcgctattactcgatttcttcatcacctcgtgtcgatgaaaaacaagcaagcatcacggtcagcgttgtctcaggaccggcgtggagcggatatggagaatataaaggaattgcgtcgaactatcttgccgagctgcaagaaggagatacgattacgtgctttatttccacaccgcagtcagaatttacgctgccaaaagaccctgaaacgccgcttatcatggtcggaccgggaacaggcgtcgcgccgtttagaggctttgtgcaggcgcgcaaacagctaaaagaacaaggacagtcacttggagaagcacatttatacttcggctgccgttcacctcatgaagactatctgtatcaagaagagcttgaaaacgcccaaagcgaaggcatcattacgcttcataccgctttttctcgcatgccaaatcagccgaaaacatacgttcagcacgtaatggaacaagacggcaagaaattgattgaacttcttgatcaaggagcgcacttctatatttgcggagacggaagccaaatggcacctgccgttgaagcaacgcttatgaaaagctatgctgacgttcaccaagtgagtgaagcagacgctcgcttatggctgcagcagctagaagaaaaaggccgatacgcaaaagacgtgtggctgggg

SEQ ID NO: 590 - protein, 1049 aa, synthetic construct
  REGION 1..1049: note = variant of P450 oxidase from Bacillus megaterium
MTIKEMPQPKTFGELKNLPLLNTDKPVQALMRIADELGEIFKFEAPGSVTRYLSSQRLIKEACDESRFDKNLSQALKFARDFVGDGLSTSWTHEPNWKKAHNILVPSFSQHAMGRYHAMMVDIAVQLVQKWERLNADEHIEVSEDMTRLTLDTIGLCGFNYRFNSFYRDQPHPFIVSVVRALDEVMNKLQRANPDDPAYDENKRQCQEDIKVMNDYVDKIIADRKARGEQSHDLLTQMLNGKDPETGEPLDDGNIRQQIITFLIAGHQTTSGLLSFALYFLVKNPHVLQKVAEEAARVLVDPVPSYKQVKQLKYVGMVLNEALRLWPVAPMFSLYAKEDTVLGGEYPLTKGDEVMVLVPQLHRDKTIWGDDVEEFRPERFENPSAIPQHAFKPFGNGQRACIGQQFALHEATLVLGMMLKHFDFEDHTNYELVIKESRTLKPEGFVVKAKSKGIPLGGIPSPSTEQSAKKVRKKAENAHNTPLLVLYGSNAGTAEGTARDLADIAMSKGFAPQVATLDSHAGNLPREGAVLIVTASYNGHPPDNAKQFVDWLDQASADEVKGVRYSVFGCGDKSWAGTYQKVPAFIDETLAAKGAENIADRGEADASDDFEGTYEEWRDHMWSDVAAYFNLDIENSEDNKSTLSLQFVDSAADMPLAKMHGAFSTNVVASKELQQPGSARSTRHLEIELPKEASYQEGDHLGVIPRNYEGIVNRVTARFGLSASQQIRLEAEEEKLAHLPLAKTVSVEELLQYVELQDPVTRTQLRAMAAKTVCPPHKVELEALLEKQAYKEQVLAKRLTMLELLEKYPACEMKFSEFIALLPSIRPRYYSISSSPRVDEKQASITVSVVSGPAWSGYGEYKGIASNYLAELQEGDTITCFISTPQSEFTLPKDPETPLIMVGPGTGVAPFRGFVQARKQLKEQGQSLGEAHLYFGCRSPHEDYLYQEELENAQSEGIITLHTAFSRMPNQPKTYVQHVMEQDGKKLIELLDQGAHFYICGDGSQMAPAVEATLMKSYADVHQVSEADARLWLQQLEEKGRYAKDVWLG

SEQ ID NO: 591 - DNA, 3147 bp, synthetic construct
  misc_feature 1..3147: note = variant of P450 oxidase from Bacillus megaterium
  source 1..3147: mol_type = other DNA
atgacaattaaggaaatgcctcagcctaagacgtttggagaacttaaaaatttaccgttattaaacacagataaaccggttcaagctttgatgcgtattgcggatgaattaggagaaatctttaaattcgaggcgcctggtagcgtaacgcgctatttatcaagtcagcgtctaattaaagaagcatgcgatgaatcacgctttgataaaaacttaagtcaagcgcttaaatttgcacgtgattttgttggagacgggctgtctacaagctggacgcatgaaccgaattggaaaaaagcgcataatatcttagttccaagctttagtcagcatgcaatggggcgttatcatgcgatgatggtcgatatcgccgtgcagcttgttcaaaagtgggagcgtctaaatgcagatgagcatattgaagtatcggaagacatgacacgtttaacgcttgatacaattggtctttgcggctttaactatcgctttaacagcttttaccgagatcagcctcatccatttattgtgagtgtggttcgtgcactggatgaagtaatgaacaagctgcagcgagcaaatccagacgacccagcttatgatgaaaacaagcgccagtgtcaagaagatatcaaggtgatgaacgactatgtagataaaattattgcagatcgcaaagcaaggggtgaacaaagtcatgatttattaacgcagatgctaaacggaaaagatccagaaacgggtgagccgcttgatgacgggaacattcgtcagcaaattattacattcttaattgcgggacaccaaacgacaagtggtcttttatcatttgcgctgtatttcttagtgaaaaatccacatgtattacaaaaagtagcagaagaagcagcacgagttctagtagatcctgttccaagctacaaacaagtcaaacagcttaaatatgttggcatggtcttaaacgaagcgctgcgcttatggccagtagcgcctatgttttccctatatgcaaaagaagatacggtgcttggaggagaatatcctttaacgaaaggcgacgaagtaatggttctggtgcctcagcttcaccgtgataaaacaatttggggagacgatgtggaggagttccgtccagagcgttttgaaaatccaagtgcgattccgcagcatgcgtttaaaccgtttggaaacggtcagcgtgcgtgtatcggtcagcagttcgctcttcatgaagcaacgctggtacttggtatgatgctaaaacactttgactttgaagatcatacaaactacgagctcgttattaaagaatcgcggacgttaaaacctgaaggctttgtggtaaaagcaaaatcgaaaggcattccgcttggcggtattccttcacctagcactgaacagtctgctaaaaaagtacgcaaaaaggcagaaaacgctcataatacgccgctgcttgtgctatacggttcaaatgcgggaacagctgaaggaacggcgcgtgatttagcagatattgcaatgagcaaaggatttgcaccgcaggtcgcaacgcttgattcacacgccggtaatcttccgcgcgaaggagctgtattaattgtaacggcgtcttataacggtcatccgcctgataacgcaaagcaatttgtcgactggttagaccaagcgtctgctgatgaagtaaaaggcgttcgctactccgtatttggatgcggcgataaaaattgggcggggacgtatcaaaaagtgcctgcttttatcgatgaaacgcttgccgctaaaggggcagaaaacatcgctgaccgcggtgaagcagatgcaagcgacgactttgaaggcacatatgaagaatggcgtgatcatatgtggagtgacgtagcagcctactttaacctcgacattgaaaacagtgaagataataaatctactctttcacttcaatttgtcgacagcgccgcggatatgccgcttgcgaaaatgcacggtgcgttttcaacgaacgtcgtagcaagcaaagaacttcaacagccaggcagtgcacgaagcacgcgacatcttgaaattgaacttccaaaagaagcttcttatcaagaaggagatcatttaggtgttattcctcgcaactatgaaggaatagtaaaccgtgtaacagcaaggttcggcctaagcgcatcacagcaaatccgtctggaagcagaagaagaaaaattagctcatttgccactcgctaaaacagtatccgtagaagagcttctgcaatacgtggagcttcaagatcctgttacgcgcacgcagcttcgcgcaatggctgctaaaacggtctgcccgccgcataaagtagagcttgaagccttgcttgaaaagcaagcctacaaagaacaagtgctggcaaaacgtttaacaatgcttgaactgcttgaaaaatacccggcgtgtgaaatgaaattcagcgaatttatcgcccttctgccaagcatacgcccgcgctattactcgatttcttcatcacctcgtgtcgatgaaaaacaagcaagcatcacggtcagcgttgtctcaggaccggcgtggagcggatatggagaatataaaggaattgcgtcgaactatcttgccgagctgcaagaaggagatacgattacgtgctttatttccacaccgcagtcagaatttacgctgccaaaagaccctgaaacgccgcttatcatggtcggaccgggaacaggcgtcgcgccgtttagaggctttgtgcaggcgcgcaaacagctaaaagaacaaggaaagtcacttggagaagcacatttatacttcggctgccgttcacctcatgaagactatctgtatcaagaagagcttgaaaacgcccaaagcgaaggcatcattacgcttcataccgctttttctcgcatgccaaatcagccgaaaacatacgttcagcacgtaatggaacaagacggcaagaaattgattgaacttcttgatcaaggagcgcacttctatatttgcggagacggaagccaaatggcacctgccgttgaagcaacgcttatgaaaagctatgctgacgttcaccaagtgagtgaagcagacgctcgcttatggctgcagcagctagaagaaaaaggccgatacgcaaaagacgtgtggctgggg

SEQ ID NO: 592 - protein, 1049 aa, synthetic construct
  REGION 1..1049: note = variant of P450 oxidase from Bacillus megaterium
MTIKEMPQPKTFGELKNLPLLNTDKPVQALMRIADELGEIFKFEAPGSVTRYLSSQRLIKEACDESRFDKNLSQALKFARDFVGDGLSTSWTHEPNWKKAHNILVPSFSQHAMGRYHAMMVDIAVQLVQKWERLNADEHIEVSEDMTRLTLDTIGLCGFNYRFNSFYRDQPHPFIVSVVRALDEVMNKLQRANPDDPAYDENKRQCQEDIKVMNDYVDKIIADRKARGEQSHDLLTQMLNGKDPETGEPLDDGNIRQQIITFLIAGHQTTSGLLSFALYFLVKNPHVLQKVAEEAARVLVDPVPSYKQVKQLKYVGMVLNEALRLWPVAPMFSLYAKEDTVLGGEYPLTKGDEVMVLVPQLHRDKTIWGDDVEEFRPERFENPSAIPQHAFKPFGNGQRACIGQQFALHEATLVLGMMLKHFDFEDHTNYELVIKESRTLKPEGFVVKAKSKGIPLGGIPSPSTEQSAKKVRKKAENAHNTPLLVLYGSNAGTAEGTARDLADIAMSKGFAPQVATLDSHAGNLPREGAVLIVTASYNGHPPDNAKQFVDWLDQASADEVKGVRYSVFGCGDKNWAGTYQKVPAFIDETLAAKGAENIADRGEADASDDFEGTYEEWRDHMWSDVAAYFNLDIENSEDNKSTLSLQFVDSAADMPLAKMHGAFSTNVVASKELQQPGSARSTRHLEIELPKEASYQEGDHLGVIPRNYEGIVNRVTARFGLSASQQIRLEAEEEKLAHLPLAKTVSVEELLQYVELQDPVTRTQLRAMAAKTVCPPHKVELEALLEKQAYKEQVLAKRLTMLELLEKYPACEMKFSEFIALLPSIRPRYYSISSSPRVDEKQASITVSVVSGPAWSGYGEYKGIASNYLAELQEGDTITCFISTPQSEFTLPKDPETPLIMVGPGTGVAPFRGFVQARKQLKEQGKSLGEAHLYFGCRSPHEDYLYQEELENAQSEGIITLHTAFSRMPNQPKTYVQHVMEQDGKKLIELLDQGAHFYICGDGSQMAPAVEATLMKSYADVHQVSEADARLWLQQLEEKGRYAKDVWLG

SEQ ID NO: 593 - DNA, 3147 bp, synthetic construct
  misc_feature 1..3147: note = variant of P450 oxidase from Bacillus megaterium
  source 1..3147: mol_type = other DNA
atgacaattaaggaaatgcctcagcctaagacgtttggagaacttaaaaatttaccgttattaaacacagataaaccggttcaagctttgatgcgtattgcggatgaattaggagaaatctttaaattcgaggcgcctggtagcgtaacgcgctatttatcaagtcagcgtctaattaaagaagcatgcgatgaatcacgctttgataaaaacttaagtcaagcgcttaaatttgcacgtgattttgttggagacgggctgtctacaagctggacgcatgaaccgaattggaaaaaagcgcataatatcttagttccaagctttagtcagcatgcaatggggcgttatcatgcgatgatggtcgatatcgccgtgcagcttgttcaaaagtgggagcgtctaaatgcagatgagcatattgaagtatcggaagacatgacacgtttaacgcttgatacaattggtctttgcggctttaactatcgctttaacagcttttaccgagatcagcctcatccatttattgtgagtgtggttcgtgcactggatgaagtaatgaacaagctgcagcgagcaaatccagacgacccagcttatgatgaaaacaagcgccagtgtcaagaagatatcaaggtgatgaacgactatgtagataaaattattgcagatcgcaaagcaaggggtgaacaaagtcatgatttattaacgcagatgctaaacggaaaagatccagaaacgggtgagccgcttgatgacgggaacattcgtcagcaaattattacattcttaattgcgggacaccaaacgacaagtggtcttttatcatttgcgctgtatttcttagtgaaaaatccacatgtattacaaaaagtagcagaagaagcagcacgagttctagtagatcctgttccaagctacaaacaagtcaaacagcttaaatatgttggcatggtcttaaacgaagcgctgcgcttatggccagtagcgcctatgttttccctatatgcaaaagaagatacggtgcttggaggagaatatcctttaacgaaaggcgacgaagtaatggttctggtgcctcagcttcaccgtgataaaacaatttggggagacgatgtggaggagttccgtccagagcgttttgaaaatccaagtgcgattccgcagcatgcgtttaaaccgtttggaaacggtcagcgtgcgtgtatcggtcagcagttcgctcttcatgaagcaacgctggtacttggtatgatgctaaaacactttgactttgaagatcatacaaactacgagctcgttattaaagaatcgcggacgttaaaacctgaaggctttgtggtaaaagcaaaatcgaaaggcattccgcttggcggtattccttcacctagcactgaacagtctgctaaaaaagtacgcaaaaaggcagaaaacgctcataatacgccgctgcttgtgctatacggttcaaatgcgggaacagctgaaggaacggcgcgtgatttagcagatattgcaatgagcaaaggatttgcaccgcaggtcgcaacgcttgattcacacgccggtaatcttccgcgcgaaggagctgtattaattgtaacggcgtcttataacggtcatccgcctgataacgcaaagcaatttgtcgactggttagaccaagcgtctgctgatgaagtaaaaggcgttcgctactccgtatttggatgcggcgataaaaattgggcggggacgtatcaaaaagtgcctgcttttatcgatgaaacgcttgccgctaaaggggcagaaaacatcgctgaccgcggtgaagcagatgcaagcgacgactttgaaggcacatatgaagaatggcgtgatcatatgtggagtgacgtagcagcctactttaacctcgacattgaaaacagtgaagataataaatctactctttcacttcaatttgtcgacagcgccgcggatatgccgcttgcgaaaatgcacggtgcgttttcaacgaacgtcgtagcaagcaaagaacttcaacagccaggcagtgcacgaagcacgcgacatcttgaaattgaacttccaaaagaagcttcttatcaagaaggagatcatttaggtgttattcctcgcaactatgaaggaatagtaaaccgtgtaacagcaaggttcggcctaagcgcatcacagcaaatccgtctggaagcagaagaagaaaaattagctcatttgccactcgctaaaacagtatccgtagaagagcttctgcaatacgtggagcttcaagatcctgttacgcgcacgcagcttcgcgcaatggctgctaaaacggtctgcccgccgcataaagtagagcttgaagccttgcttgaaaagcaagcctacaaagaacaagtgctggcaaaacgtttaacaatgcttgaactgcttgaaaaatacccggcgtgtgaaatgaaattcagcgaatttatcgcccttctgccaagcatacgcccgcgctattactcgatttcttcatcacctcgtgtcgatgaaaaacaagcaagcatcacggtcagcgttgtctcaggaccggcgtggagcggatatggagaatataaaggaattgcgtcgaactatcttgccgagctgcaagaaggagatacgattacgtgctttatttccacaccgcagtcagaatttacgctgccaaaagaccctgaaacgccgcttatcatggtcggaccgggaacaggcgtcgcgccgtttagaggctttgtgcaggcgcgcaaacagctaaaagaacaaggaaggtcacttggagaagcacatttatacttcggctgccgttcacctcatgaagactatctgtatcaagaagagcttgaaaacgcccaaagcgaaggcatcattacgcttcataccgctttttctcgcatgccaaatcagccgaaaacatacgttcagcacgtaatggaacaagacggcaagaaattgattgaacttcttgatcaaggagcgcacttctatatttgcggagacggaagccaaatggcacctgccgttgaagcaacgcttatgaaaagctatgctgacgttcaccaagtgagtgaagcagacgctcgcttatggctgcagcagctagaagaaaaaggccgatacgcaaaagacgtgtggctgggg

SEQ ID NO: 594 - protein, 1049 aa, synthetic construct
  REGION 1..1049: note = variant of P450 oxidase from Bacillus megaterium
MTIKEMPQPKTFGELKNLPLLNTDKPVQALMRIADELGEIFKFEAPGSVTRYLSSQRLIKEACDESRFDKNLSQALKFARDFVGDGLSTSWTHEPNWKKAHNILVPSFSQHAMGRYHAMMVDIAVQLVQKWERLNADEHIEVSEDMTRLTLDTIGLCGFNYRFNSFYRDQPHPFIVSVVRALDEVMNKLQRANPDDPAYDENKRQCQEDIKVMNDYVDKIIADRKARGEQSHDLLTQMLNGKDPETGEPLDDGNIRQQIITFLIAGHQTTSGLLSFALYFLVKNPHVLQKVAEEAARVLVDPVPSYKQVKQLKYVGMVLNEALRLWPVAPMFSLYAKEDTVLGGEYPLTKGDEVMVLVPQLHRDKTIWGDDVEEFRPERFENPSAIPQHAFKPFGNGQRACIGQQFALHEATLVLGMMLKHFDFEDHTNYELVIKESRTLKPEGFVVKAKSKGIPLGGIPSPSTEQSAKKVRKKAENAHNTPLLVLYGSNAGTAEGTARDLADIAMSKGFAPQVATLDSHAGNLPREGAVLIVTASYNGHPPDNAKQFVDWLDQASADEVKGVRYSVFGCGDKNWAGTYQKVPAFIDETLAAKGAENIADRGEADASDDFEGTYEEWRDHMWSDVAAYFNLDIENSEDNKSTLSLQFVDSAADMPLAKMHGAFSTNVVASKELQQPGSARSTRHLEIELPKEASYQEGDHLGVIPRNYEGIVNRVTARFGLSASQQIRLEAEEEKLAHLPLAKTVSVEELLQYVELQDPVTRTQLRAMAAKTVCPPHKVELEALLEKQAYKEQVLAKRLTMLELLEKYPACEMKFSEFIALLPSIRPRYYSISSSPRVDEKQASITVSVVSGPAWSGYGEYKGIASNYLAELQEGDTITCFISTPQSEFTLPKDPETPLIMVGPGTGVAPFRGFVQARKQLKEQGRSLGEAHLYFGCRSPHEDYLYQEELENAQSEGIITLHTAFSRMPNQPKTYVQHVMEQDGKKLIELLDQGAHFYICGDGSQMAPAVEATLMKSYADVHQVSEADARLWLQQLEEKGRYAKDVWLG

SEQ ID NO: 595 - DNA, 3147 bp, synthetic construct
  misc_feature 1..3147: note = variant of P450 oxidase from Bacillus megaterium
  source 1..3147: mol_type = other DNA
atgacaattaaggaaatgcctcagcctaagacgtttggagaacttaaaaatttaccgttattaaacacagataaaccggttcaagctttgatgcgtattgcggatgaattaggagaaatctttaaattcgaggcgcctggtagcgtaacgcgctatttatcaagtcagcgtctaattaaagaagcatgcgatgaatcacgctttgataaaaacttaagtcaagcgcttaaatttgcacgtgattttgttggagacgggctgtctacaagctggacgcatgaaccgaattggaaaaaagcgcataatatcttagttccaagctttagtcagcatgcaatggggcgttatcatgcgatgatggtcgatatcgccgtgcagcttgttcaaaagtgggagcgtctaaatgcagatgagcatattgaagtatcggaagacatgacacgtttaacgcttgatacaattggtctttgcggctttaactatcgctttaacagcttttaccgagatcagcctcatccatttattgtgagtgtggttcgtgcactggatgaagtaatgaacaagctgcagcgagcaaatccagacgacccagcttatgatgaaaacaagcgccagtgtcaagaagatatcaaggtgatgaacgactatgtagataaaattattgcagatcgcaaagcaaggggtgaacaaagtcatgatttattaacgcagatgctaaacggaaaagatccagaaacgggtgagccgcttgatgacgggaacattcgtcagcaaattattacattcttaattgcgggacaccaaacgacaagtggtcttttatcatttgcgctgtatttcttagtgaaaaatccacatgtattacaaaaagtagcagaagaagcagcacgagttctagtagatcctgttccaagctacaaacaagtcaaacagcttaaatatgttggcatggtcttaaacgaagcgctgcgcttatggccagtagcgcctatgttttccctatatgcaaaagaagatacggtgcttggaggagaatatcctttaacgaaaggcgacgaagtaatggttctggtgcctcagcttcaccgtgataaaacaatttggggagacgatgtggaggagttccgtccagagcgttttgaaaatccaagtgcgattccgcagcatgcgtttaaaccgtttggaaacggtcagcgtgcgtgtatcggtcagcagttcgctcttcatgaagcaacgctggtacttggtatgatgctaaaacactttgactttgaagatcatacaaactacgagctcgttattaaagaatcgcggacgttaaaacctgaaggctttgtggtaaaagcaaaatcgaaaggcattccgcttggcggtattccttcacctagcactgaacagtctgctaaaaaagtacgcaaaaaggcagaaaacgctcataatacgccgctgcttgtgctatacggttcaaatgcgggaacagctgaaggaacggcgcgtgatttagcagatattgcaatgagcaaaggatttgcaccgcaggtcgcaacgcttgattcacacgccggtaatcttccgcgcgaaggagctgtattaattgtaacggcgtcttataacggtcatccgcctgataacgcaaagcaatttgtcgactggttagaccaagcgggggctgatgaagtaaaaggcgttcgctactccgtatttggatgcggcgataaaaattgggcggggacgtatcaaaaagtgcctgcttttatcgatgaaacgcttgccgctaaaggggcagaaaacatcgctgaccgcggtgaagcagatgcaagcgacgactttgaaggcacatatgaggaatggcgtgatcatatgtggagtgacgtagcagcctactttaacctcgacattgaaaacagtgaagataataaatctactctttcacttcaatttgtcgacagcgccgcggatatgccgcttgcgaaaatgcacggtgcgttttcaacgaacgtcgtagcaagcaaagaacttcaacagccaggcagtgcacgaagcacgcgacatcttgaaattgaacttccaaaagaagcttcttatcaagaaggagatcatttaggtgttattcctcgcaactatgaaggaatagtaaaccgtgtaacagcaaggttcggcctaagcgcatcacagcaaatccgtctggaagcagaagaagaaaaattagctcatttgccactcgctaaaacagtatccgtagaagagcttctgcaatacgtggagcttcaagatcctgttacgcgcacgcagcttcgcgcaatggctgctaaaacggtctgcccgccgcataaagtagagcttgaagccttgcttgaaaagcaagcctacaaagaacaagtgctggcaaaacgtttaacaatgcttgaactgcttgaaaaatacccggcgtgtgaaatgaaattcagcgaatttatcgcccttctgccaagcatacgcccgcgctattactcgatttcttcatcacctcgtgtcgatgaaaaacaagcaagcatcacggtcagcgttgtctcaggaccggcgtggagcggatatggagaatataaaggaattgcgtcgaactatcttgccgagctgcaagaaggagatacgattacgtgctttatttccacaccgcagtcagaatttacgctgccaaaagaccctgaaacgccgcttatcatggtcggaccgggaacaggcgtcgcgccgtttagaggctttgtgcaggcgcgcaaacagctaaaagaacaaggacagtcacttggagaagcacatttatacttcggctgccgttcacctcatgaagactatctgtatcaagaagagcttgaaaacgcccaaagcgaaggcatcattacgcttcataccgctttttctcgcatgccaaatcagccgaaaacatacgttcagcacgtaatggaacaagacggcaagaaattgattgaacttcttgatcaaggagcgcacttctatatttgcggagacggaagccaaatggcacctgccgttgaagcaacgcttatgaaaagctatgctgacgttcaccaagtgagtgaagcagacgctcgcttatggctgcagcagctagaagaaaaaggccgatacgcaaaagacgtgtggctgggg

SEQ ID NO: 596 - protein, 1049 aa, synthetic construct
  REGION 1..1049: note = variant of P450 oxidase from Bacillus megaterium
MTIKEMPQPKTFGELKNLPLLNTDKPVQALMRIADELGEIFKFEAPGSVTRYLSSQRLIKEACDESRFDKNLSQALKFARDFVGDGLSTSWTHEPNWKKAHNILVPSFSQHAMGRYHAMMVDIAVQLVQKWERLNADEHIEVSEDMTRLTLDTIGLCGFNYRFNSFYRDQPHPFIVSVVRALDEVMNKLQRANPDDPAYDENKRQCQEDIKVMNDYVDKIIADRKARGEQSHDLLTQMLNGKDPETGEPLDDGNIRQQIITFLIAGHQTTSGLLSFALYFLVKNPHVLQKVAEEAARVLVDPVPSYKQVKQLKYVGMVLNEALRLWPVAPMFSLYAKEDTVLGGEYPLTKGDEVMVLVPQLHRDKTIWGDDVEEFRPERFENPSAIPQHAFKPFGNGQRACIGQQFALHEATLVLGMMLKHFDFEDHTNYELVIKESRTLKPEGFVVKAKSKGIPLGGIPSPSTEQSAKKVRKKAENAHNTPLLVLYGSNAGTAEGTARDLADIAMSKGFAPQVATLDSHAGNLPREGAVLIVTASYNGHPPDNAKQFVDWLDQAGADEVKGVRYSVFGCGDKNWAGTYQKVPAFIDETLAAKGAENIADRGEADASDDFEGTYEEWRDHMWSDVAAYFNLDIENSEDNKSTLSLQFVDSAADMPLAKMHGAFSTNVVASKELQQPGSARSTRHLEIELPKEASYQEGDHLGVIPRNYEGIVNRVTARFGLSASQQIRLEAEEEKLAHLPLAKTVSVEELLQYVELQDPVTRTQLRAMAAKTVCPPHKVELEALLEKQAYKEQVLAKRLTMLELLEKYPACEMKFSEFIALLPSIRPRYYSISSSPRVDEKQASITVSVVSGPAWSGYGEYKGIASNYLAELQEGDTITCFISTPQSEFTLPKDPETPLIMVGPGTGVAPFRGFVQARKQLKEQGQSLGEAHLYFGCRSPHEDYLYQEELENAQSEGIITLHTAFSRMPNQPKTYVQHVMEQDGKKLIELLDQGAHFYICGDGSQMAPAVEATLMKSYADVHQVSEADARLWLQQLEEKGRYAKDVWLG

SEQ ID NO: 597 - DNA, 3147 bp, synthetic construct
  misc_feature 1..3147: note = variant of P450 oxidase from Bacillus megaterium
  source 1..3147: mol_type = other DNA
atgacaattaaggaaatgcctcagcctaagacgtttggagaacttaaaaatttaccgttattaaacacagataaaccggttcaagctttgatgcgtattgcggatgaattaggagaaatctttaaattcgaggcgcctggtagcgtaacgcgctatttatcaagtcagcgtctaattaaagaagcatgcgatgaatcacgctttgataaaaacttaagtcaagcgcttaaatttgcacgtgattttgttggagacgggctgtctacaagctggacgcatgaaccgaattggaaaaaagcgcataatatcttagttccaagctttagtcagcatgcaatggggcgttatcatgcgatgatggtcgatatcgccgtgcagcttgttcaaaagtgggagcgtctaaatgcagatgagcatattgaagtatcggaagacatgacacgtttaacgcttgatacaattggtctttgcggctttaactatcgctttaacagcttttaccgagatcagcctcatccatttattgtgagtgtggttcgtgcactggatgaagtaatgaacaagctgcagcgagcaaatccagacgacccagcttatgatgaaaacaagcgccagtgtcaagaagatatcaaggtgatgaacgactatgtagataaaattattgcagatcgcaaagcaaggggtgaacaaagtcatgatttattaacgcagatgctaaacggaaaagatccagaaacgggtgagccgcttgatgacgggaacattcgtcagcaaattattacattcttaattgcgggacaccaaacgacaagtggtcttttatcatttgcgctgtatttcttagtgaaaaatccacatgtattacaaaaagtagcagaagaagcagcacgagttctagtagatcctgttccaagctacaaacaagtcaaacagcttaaatatgttggcatggtcttaaacgaagcgctgcgcttatggccagtagcgcctatgttttccctatatgcaaaagaagatacggtgcttggaggagaatatcctttaacgaaaggcgacgaagtaatggttctggtgcctcagcttcaccgtgataaaacaatttggggagacgatgtggaggagttccgtccagagcgttttgaaaatccaagtgcgattccgcagcatgcgtttaaaccgtttggaaacggtcagcgtgcgtgtatcggtcagcagttcgctcttcatgaagcaacgctggtacttggtatgatgctaaaacactttgactttgaagatcatacaaactacgagctcgttattaaagaatcgcggacgttaaaacctgaaggctttgtggtaaaagcaaaatcgaaaggcattccgcttggcggtattccttcacctagcactgaacagtctgctaaaaaagtacgcaaaaaggcagaaaacgctcataatacgccgctgcttgtgctatacggttcaaatgcgggaacagctgaaggaacggcgcgtgatttagcagatattgcaatgagcaaaggatttgcaccgcaggtcgcaacgcttgattcacacgccggtaatcttccgcgcgaaggagctgtattaattgtaacggcgtcttataacggtcatccgcctgataacgcaaagcaatttgtcgactggttagaccaagcgtctgctgatgaagtaaaaggcgttcgctactccgtatttggatgcggcgataaaaattgggcggggacgtatcaaaaagtgcctgcttttatcgatgaaacgcttgccgctaaaggggcagaaaacatcgctgaccgcggtgaagcagatgcaagcgacgactttgaaggcacatatgaagaatggcgtgatcatatgtggagtgacgtagcagcctactttaacctcgacattgaaaacagtgaagataataaatctactctttcacttcaatttgtcgacccggccgcggatatgccgcttgcgaaaatgcacggtgcgttttcaacgaacgtcgtagcaagcaaagaacttcaacagccaggcagtgcacgaagcacgcgacatcttgaaattgaacttccaaaagaagcttcttatcaagaaggagatcatttaggtgttattcctcgcaactatgaaggaatagtaaaccgtgtaacagcaaggttcggcctaagcgcatcacagcaaatccgtctggaagcagaagaagaaaaattagctcatttgccactcgctaaaacagtatccgtagaagagcttctgcaatacgtggagcttcaagatcctgttacgcgcacgcagcttcgcgcaatggctgctaaaacggtctgcccgccgcataaagtagagcttgaagccttgcttgaaaagcaagcctacaaagaacaagtgctggcaaaacgtttaacaatgcttgaactgcttgaaaaatacccggcgtgtgaaatgaaattcagcgaatttatcgcccttctgccaagcatacgcccgcgctattactcgatttcttcatcacctcgtgtcgatgaaaaacaagcaagcatcacggtcagcgttgtctcaggaccggcgtggagcggatatggagaatataaaggaattgcgtcgaactatcttgccgagctgcaagaaggagatacgattacgtgctttatttccacaccgcagtcagaatttacgctgccaaaagaccctgaaacgccgcttatcatggtcggaccgggaacaggcgtcgcgccgtttagaggctttgtgcaggcgcgcaaacagctaaaagaacaaggacagtcacttggagaagcacatttatacttcggctgccgttcacctcatgaagactatctgtatcaagaagagcttgaaaacgcccaaagcgaaggcatcattacgcttcataccgctttttctcgcatgccaaatcagccgaaaacatacgttcagcacgtaatggaacaagacggcaagaaattgattgaacttcttgatcaaggagcgcacttctatatttgcggagacggaagccaaatggcacctgccgttgaagcaacgcttatgaaaagctatgctgacgttcaccaagtgagtgaagcagacgctcgcttatggctgcagcagctagaagaaaaaggccgatacgcaaaagacgtgtggctgggg

SEQ ID NO: 598 - protein, 1049 aa, synthetic construct
  REGION 1..1049: note = variant of P450 oxidase from Bacillus megaterium
MTIKEMPQPKTFGELKNLPLLNTDKPVQALMRIADELGEIFKFEAPGSVTRYLSSQRLIKEACDESRFDKNLSQALKFARDFVGDGLSTSWTHEPNWKKAHNILVPSFSQHAMGRYHAMMVDIAVQLVQKWERLNADEHIEVSEDMTRLTLDTIGLCGFNYRFNSFYRDQPHPFIVSVVRALDEVMNKLQRANPDDPAYDENKRQCQEDIKVMNDYVDKIIADRKARGEQSHDLLTQMLNGKDPETGEPLDDGNIRQQIITFLIAGHQTTSGLLSFALYFLVKNPHVLQKVAEEAARVLVDPVPSYKQVKQLKYVGMVLNEALRLWPVAPMFSLYAKEDTVLGGEYPLTKGDEVMVLVPQLHRDKTIWGDDVEEFRPERFENPSAIPQHAFKPFGNGQRACIGQQFALHEATLVLGMMLKHFDFEDHTNYELVIKESRTLKPEGFVVKAKSKGIPLGGIPSPSTEQSAKKVRKKAENAHNTPLLVLYGSNAGTAEGTARDLADIAMSKGFAPQVATLDSHAGNLPREGAVLIVTASYNGHPPDNAKQFVDWLDQASADEVKGVRYSVFGCGDKNWAGTYQKVPAFIDETLAAKGAENIADRGEADASDDFEGTYEEWRDHMWSDVAAYFNLDIENSEDNKSTLSLQFVDPAADMPLAKMHGAFSTNVVASKELQQPGSARSTRHLEIELPKEASYQEGDHLGVIPRNYEGIVNRVTARFGLSASQQIRLEAEEEKLAHLPLAKTVSVEELLQYVELQDPVTRTQLRAMAAKTVCPPHKVELEALLEKQAYKEQVLAKRLTMLELLEKYPACEMKFSEFIALLPSIRPRYYSISSSPRVDEKQASITVSVVSGPAWSGYGEYKGIASNYLAELQEGDTITCFISTPQSEFTLPKDPETPLIMVGPGTGVAPFRGFVQARKQLKEQGQSLGEAHLYFGCRSPHEDYLYQEELENAQSEGIITLHTAFSRMPNQPKTYVQHVMEQDGKKLIELLDQGAHFYICGDGSQMAPAVEATLMKSYADVHQVSEADARLWLQQLEEKGRYAKDVWLG

SEQ ID NO: 599 - DNA, 3147 bp, synthetic construct
  misc_feature 1..3147: note = variant of P450 oxidase from Bacillus megaterium
  source 1..3147: mol_type = other DNA
atgacaattaaggaaatgcctcagcctaagacgtttggagaacttaaaaatttaccgttattaaacacagataaaccggttcaagctttgatgcgtattgcggatgaattaggagaaatctttaaattcgaggcgcctggtagcgtaacgcgctatttatcaagtcagcgtctaattaaagaagcatgcgatgaatcacgctttgataaaaacttaagtcaagcgcttaaatttgcacgtgattttgttggagacgggctgtctacaagctggacgcatgaaccgaattggaaaaaagcgcataatatcttagttccaagctttagtcagcatgcaatggggcgttatcatgcgatgatggtcgatatcgccgtgcagcttgttcaaaagtgggagcgtctaaatgcagatgagcatattgaagtatcggaagacatgacacgtttaacgcttgatacaattggtctttgcggctttaactatcgctttaacagcttttaccgagatcagcctcatccatttattgtgagtgtggttcgtgcactggatgaagtaatgaacaagctgcagcgagcaaatccagacgacccagcttatgatgaaaacaagcgccagtgtcaagaagatatcaaggtgatgaacgactatgtagataaaattattgcagatcgcaaagcaaggggtgaacaaagtcatgatttattaacgcagatgctaaacggaaaagatccagaaacgggtgagccgcttgatgacgggaacattcgtcagcaaattattacattcttaattgcgggacaccaaacgacaagtggtcttttatcatttgcgctgtatttcttagtgaaaaatccacatgtattacaaaaagtagcagaagaagcagcacgagttctagtagatcctgttccaagctacaaacaagtcaaacagcttaaatatgttggcatggtcttaaacgaagcgctgcgcttatggccagtagcgcctatgttttccctatatgcaaaagaagatacggtgcttggaggagaatatcctttaacgaaaggcgacgaagtaatggttctggtgcctcagcttcaccgtgataaaacaatttggggagacgatgtggaggagttccgtccagagcgttttgaaaatccaagtgcgattccgcagcatgcgtttaaaccgtttggaaacggtcagcgtgcgtgtatcggtcagcagttcgctcttcatgaagcaacgctggtacttggtatgatgctaaaacactttgactttgaagatcatacaaactacgagctcgttattaaagaatcgcggacgttaaaacctgaaggctttgtggtaaaagcaaaatcgaaaggcattccgcttggcggtattccttcacctagcactgaacagtctgctaaaaaagtacgcaaaaaggcagaaaacgctcataatacgccgctgcttgtgctatacggttcaaatgcgggaacagctgaaggaacggcgcgtgatttagcagatattgcaatgagcaaaggatttgcaccgcaggtcgcaacgcttgattcacacgccggtaatcttccgcgcgaaggagctgtattaattgtaacggcgtcttataacggtcatccgcctgataacgcaaagcaatttgtcgactggttagaccaagcgtctgctgatgaagtaaaaggcgttcgctactccgtatttggatgcggcgataaaaattgggcggggacgtatcaaaaagtgcctgcttttatcgatgaaacgcttgccgctaaaggggcagaaaacatcgctgaccgcggtgaagcagatgcaagcgacgactttgaaggcacatatgaagaatggcgtgatcatatgtggagtgacgtagcagcctactttaacctcgacattgaaaacagtgaagataataaatctactctttcacttcaatttgtcgacagcgccgcggatatgccgcttgcgaaaatgcacggtgcgttttcaacgaacgtcgtagcaagcaaagaacttcaacagccaggcagtgcacgaagcacgcgacatcttgaaattgaacttccaaaagaagcttcttatcaagaaggagatcatttaggtgttattcctcgcaactatgaaggaatagtaaaccgtgtaacagcaaggttcggcctaagcgcatcacagcaaatccgtctggaagcagaagaagaaaaattagctcatttgccactcgctaaaacagtatccgtagaagagcttctgcaatacgtggagcttcaagatcctgttacgcgcacgcagcttcgcgcaatggctgctaaaacggcgtgcccgccgcataaagtagagcttgaagccttgcttgaaaagcaagcctacaaagaacaagtgctggcaaaacgtttaacaatgcttgaactgcttgaaaaatacccggcgtgtgaaatgaaattcagcgaatttatcgcccttctgccaagcatacgcccgcgctattactcgatttcttcatcacctcgtgtcgatgaaaaacaagcaagcatcacggtcagcgttgtctcaggaccggcgtggagcggatatggagaatataaaggaattgcgtcgaactatcttgccgagctgcaagaaggagatacgattacgtgctttatttccacaccgcagtcagaatttacgctgccaaaagaccctgaaacgccgcttatcatggtcggaccgggaacaggcgtcgcgccgtttagaggctttgtgcaggcgcgcaaacagctaaaagaacaaggacagtcacttggagaagcacatttatacttcggctgccgttcacctcatgaagactatctgtatcaagaagagcttgaaaacgcccaaagcgaaggcatcattacgcttcataccgctttttctcgcatgccaaatcagccgaaaacatacgttcagcacgtaatggaacaagacggcaagaaattgattgaacttcttgatcaaggagcgcacttctatatttgcggagacggaagccaaatggcacctgccgttgaagcaacgcttatgaaaagctatgctgacgttcaccaagtgagtgaagcagacgctcgcttatggctgcagcagctagaagaaaaaggccgatacgcaaaagacgtgtggctgggg

SEQ ID NO: 600 - protein, 1049 aa, synthetic construct
  REGION 1..1049: note = variant of P450 oxidase from Bacillus megaterium
MTIKEMPQPKTFGELKNLPLLNTDKPVQALMRIADELGEIFKFEAPGSVTRYLSSQRLIKEACDESRFDKNLSQALKFARDFVGDGLSTSWTHEPNWKKAHNILVPSFSQHAMGRYHAMMVDIAVQLVQKWERLNADEHIEVSEDMTRLTLDTIGLCGFNYRFNSFYRDQPHPFIVSVVRALDEVMNKLQRANPDDPAYDENKRQCQEDIKVMNDYVDKIIADRKARGEQSHDLLTQMLNGKDPETGEPLDDGNIRQQIITFLIAGHQTTSGLLSFALYFLVKNPHVLQKVAEEAARVLVDPVPSYKQVKQLKYVGMVLNEALRLWPVAPMFSLYAKEDTVLGGEYPLTKGDEVMVLVPQLHRDKTIWGDDVEEFRPERFENPSAIPQHAFKPFGNGQRACIGQQFALHEATLVLGMMLKHFDFEDHTNYELVIKESRTLKPEGFVVKAKSKGIPLGGIPSPSTEQSAKKVRKKAENAHNTPLLVLYGSNAGTAEGTARDLADIAMSKGFAPQVATLDSHAGNLPREGAVLIVTASYNGHPPDNAKQFVDWLDQASADEVKGVRYSVFGCGDKNWAGTYQKVPAFIDETLAAKGAENIADRGEADASDDFEGTYEEWRDHMWSDVAAYFNLDIENSEDNKSTLSLQFVDSAADMPLAKMHGAFSTNVVASKELQQPGSARSTRHLEIELPKEASYQEGDHLGVIPRNYEGIVNRVTARFGLSASQQIRLEAEEEKLAHLPLAKTVSVEELLQYVELQDPVTRTQLRAMAAKTACPPHKVELEALLEKQAYKEQVLAKRLTMLELLEKYPACEMKFSEFIALLPSIRPRYYSISSSPRVDEKQASITVSVVSGPAWSGYGEYKGIASNYLAELQEGDTITCFISTPQSEFTLPKDPETPLIMVGPGTGVAPFRGFVQARKQLKEQGQSLGEAHLYFGCRSPHEDYLYQEELENAQSEGIITLHTAFSRMPNQPKTYVQHVMEQDGKKLIELLDQGAHFYICGDGSQMAPAVEATLMKSYADVHQVSEADARLWLQQLEEKGRYAKDVWLG

SEQ ID NO: 601 - DNA, 3147 bp, synthetic construct
  misc_feature 1..3147: note = variant of P450 oxidase from Bacillus megaterium
  source 1..3147: mol_type = other DNA
atgacaattaaggaaatgcctcagcctaagacgtttggagaacttaaaaatttaccgttattaaacacagataaaccggttcaagctttgatgcgtattgcggatgaattaggagaaatctttaaattcgaggcgcctggtagcgtaacgcgctatttatcaagtcagcgtctaattaaagaagcatgcgatgaatcacgctttgataaaaacttaagtcaagcgcttaaatttgcacgtgattttgttggagacgggctgtctacaagctggacgcatgaaccgaattggaaaaaagcgcataatatcttagttccaagctttagtcagcatgcaatggggcgttatcatgcgatgatggtcgatatcgccgtgcagcttgttcaaaagtgggagcgtctaaatgcagatgagcatattgaagtatcggaagacatgacacgtttaacgcttgatacaattggtctttgcggctttaactatcgctttaacagcttttaccgagatcagcctcatccatttattgtgagtgtggttcgtgcactggatgaagtaatgaacaagctgcagcgagcaaatccagacgacccagcttatgatgaaaacaagcgccagtgtcaagaagatatcaaggtgatgaacgactatgtagataaaattattgcagatcgcaaagcaaggggtgaacaaagtcatgatttattaacgcagatgctaaacggaaaagatccagaaacgggtgagccgcttgatgacgggaacattcgtcagcaaattattacattcttaattgcgggacaccaaacgacaagtggtcttttatcatttgcgctgtatttcttagtgaaaaatccacatgtattacaaaaagtagcagaagaagcagcacgagttctagtagatcctgttccaagctacaaacaagtcaaacagcttaaatatgttggcatggtcttaaacgaagcgctgcgcttatggccagtagcgcctatgttttccctatatgcaaaagaagatacggtgcttggaggagaatatcctttaacgaaaggcgacgaagtaatggttctggtgcctcagcttcaccgtgataaaacaatttggggagacgatgtggaggagttccgtccagagcgttttgaaaatccaagtgcgattccgcagcatgcgtttaaaccgtttggaaacggtcagcgtgcgtgtatcggtcagcagttcgctcttcatgaagcaacgctggtacttggtatgatgctaaaacactttgactttgaagatcatacaaactacgagctcgttattaaagaatcgcggacgttaaaacctgaaggctttgtggtaaaagcaaaatcgaaaggcattccgcttggcggtattccttcacctagcactgaacagtctgctaaaaaagtacgcaaaaaggcagaaaacgctcataatacgccgctgcttgtgctatacggttcaaatgcgggaacagctgaaggaacggcgcgtgatttagcagatattgcaatgagcaaaggatttgcaccgcaggtcgcaacgcttgattcacacgccggtaatcttccgcgcgaaggagctgtattaattgtaacggcgtcttataacggtcatccgcctgataacgcaaagcaatttgtcgactggttagaccaagcgtctgctgatgaagtaaaaggcgttcgctactccgtatttggatgcggcgataaaaattgggcggggacgtatcaaaaagtgcctgcttttatcgatgaaacgcttgccgctaaaggggcagaaaacatcgctgaccgcggtgaagcagatgcaagcgacgactttgaaggcacatatgaagaatggcgtgatcatatgtggagtgacgtagcagcctactttaacctcgacattgaaaacagtgaagataataaatctactctttcacttcaatttgtcgacagcgccgcggatatgccgcttgcgaaaatgcacggtgcgttttcaacgaacgtcgtagcaagcaaagaacttcaacagccaggcagtgcacgaagcacgcgacatcttgaaattgaacttccaaaagaagcttcttatcaagaaggagatcatttaggtgttattcctcgcaactatgaaggaatagtaaaccgtgtaacagcaaggttcggcctaagcgcatcacagcaaatccgtctggaagcagaagaagaaaaattagctcatttgccactcgctaaaacagtatccgtagaagagcttctgcaatacgtggagcttcaagatcctgttacgcgcacgcagcttcgcgcaatggctgctaaaacggggtgcccgccgcataaagtagagcttgaagccttgcttgaaaagcaagcctacaaagaacaagtgctggcaaaacgtttaacaatgcttgaactgcttgaaaaatacccggcgtgtgaaatgaaattcagcgaatttatcgcccttctgccaagcatacgcccgcgctattactcgatttcttcatcacctcgtgtcgatgaaaaacaagcaagcatcacggtcagcgttgtctcaggaccggcgtggagcggatatggagaatataaaggaattgcgtcgaactatcttgccgagctgcaagaaggagatacgattacgtgctttatttccacaccgcagtcagaatttacgctgccaaaagaccctgaaacgccgcttatcatggtcggaccgggaacaggcgtcgcgccgtttagaggctttgtgcaggcgcgcaaacagctaaaagaacaaggacagtcacttggagaagcacatttatacttcggctgccgttcacctcatgaagactatctgtatcaagaagagcttgaaaacgcccaaagcgaaggcatcattacgcttcataccgctttttctcgcatgccaaatcagccgaaaacatacgttcagcacgtaatggaacaagacggcaagaaattgattgaacttcttgatcaaggagcgcacttctatatttgcggagacggaagccaaatggcacctgccgttgaagcaacgcttatgaaaagctatgctgacgttcaccaagtgagtgaagcagacgctcgcttatggctgcagcagctagaagaaaaaggccgatacgcaaaagacgtgtggctgggg

SEQ ID NO: 602 - protein, 1049 aa, synthetic construct
  REGION 1..1049: note = variant of P450 oxidase from Bacillus megaterium
MTIKEMPQPKTFGELKNLPLLNTDKPVQALMRIADELGEIFKFEAPGSVTRYLSSQRLIKEACDESRFDKNLSQALKFARDFVGDGLSTSWTHEPNWKKAHNILVPSFSQHAMGRYHAMMVDIAVQLVQKWERLNADEHIEVSEDMTRLTLDTIGLCGFNYRFNSFYRDQPHPFIVSVVRALDEVMNKLQRANPDDPAYDENKRQCQEDIKVMNDYVDKIIADRKARGEQSHDLLTQMLNGKDPETGEPLDDGNIRQQIITFLIAGHQTTSGLLSFALYFLVKNPHVLQKVAEEAARVLVDPVPSYKQVKQLKYVGMVLNEALRLWPVAPMFSLYAKEDTVLGGEYPLTKGDEVMVLVPQLHRDKTIWGDDVEEFRPERFENPSAIPQHAFKPFGNGQRACIGQQFALHEATLVLGMMLKHFDFEDHTNYELVIKESRTLKPEGFVVKAKSKGIPLGGIPSPSTEQSAKKVRKKAENAHNTPLLVLYGSNAGTAEGTARDLADIAMSKGFAPQVATLDSHAGNLPREGAVLIVTASYNGHPPDNAKQFVDWLDQASADEVKGVRYSVFGCGDKNWAGTYQKVPAFIDETLAAKGAENIADRGEADASDDFEGTYEEWRDHMWSDVAAYFNLDIENSEDNKSTLSLQFVDSAADMPLAKMHGAFSTNVVASKELQQPGSARSTRHLEIELPKEASYQEGDHLGVIPRNYEGIVNRVTARFGLSASQQIRLEAEEEKLAHLPLAKTVSVEELLQYVELQDPVTRTQLRAMAAKTGCPPHKVELEALLEKQAYKEQVLAKRLTMLELLEKYPACEMKFSEFIALLPSIRPRYYSISSSPRVDEKQASITVSVVSGPAWSGYGEYKGIASNYLAELQEGDTITCFISTPQSEFTLPKDPETPLIMVGPGTGVAPFRGFVQARKQLKEQGQSLGEAHLYFGCRSPHEDYLYQEELENAQSEGIITLHTAFSRMPNQPKTYVQHVMEQDGKKLIELLDQGAHFYICGDGSQMAPAVEATLMKSYADVHQVSEADARLWLQQLEEKGRYAKDVWLG

SEQ ID NO: 603 - DNA, 3147 bp, synthetic construct
  misc_feature 1..3147: note = variant of P450 oxidase from Bacillus megaterium
  source 1..3147: mol_type = other DNA
atgacaattaaggaaatgcctcagcctaagacgtttggagaacttaaaaatttaccgttattaaacacagataaaccggttcaagctttgatgcgtattgcggatgaattaggagaaatctttaaattcgaggcgcctggtagcgtaacgcgctatttatcaagtcagcgtctaattaaagaagcatgcgatgaatcacgctttgataaaaacttaagtcaagcgcttaaatttgcacgtgattttgttggagacgggctgtctacaagctggacgcatgaaccgaattggaaaaaagcgcataatatcttagttccaagctttagtcagcatgcaatggggcgttatcatgcgatgatggtcgatatcgccgtgcagcttgttcaaaagtgggagcgtctaaatgcagatgagcatattgaagtatcggaagacatgacacgtttaacgcttgatacaattggtctttgcggctttaactatcgctttaacagcttttaccgagatcagcctcatccatttattgtgagtgtggttcgtgcactggatgaagtaatgaacaagctgcagcgagcaaatccagacgacccagcttatgatgaaaacaagcgccagtgtcaagaagatatcaaggtgatgaacgactatgtagataaaattattgcagatcgcaaagcaaggggtgaacaaagtcatgatttattaacgcagatgctaaacggaaaagatccagaaacgggtgagccgcttgatgacgggaacattcgtcagcaaattattacattcttaattgcgggacaccaaacgacaagtggtcttttatcatttgcgctgtatttcttagtgaaaaatccacatgtattacaaaaagtagcagaagaagcagcacgagttctagtagatcctgttccaagctacaaacaagtcaaacagcttaaatatgttggcatggtcttaaacgaagcgctgcgcttatggccagtagcgcctatgttttccctatatgcaaaagaagatacggtgcttggaggagaatatcctttaacgaaaggcgacgaagtaatggttctggtgcctcagcttcaccgtgataaaacaatttggggagacgatgtggaggagttccgtccagagcgttttgaaaatccaagtgcgattccgcagcatgcgtttaaaccgtttggaaacggtcagcgtgcgtgtatcggtcagcagttcgctcttcatgaagcaacgctggtacttggtatgatgctaaaacactttgactttgaagatcatacaaactacgagctcgttattaaagaatcgcggacgttaaaacctgaaggctttgtggtaaaagcaaaatcgaaaggcattccgcttggcggtattccttcacctagcactgaacagtctgctaaaaaagtacgcaaaaaggcagaaaacgctcataatacgccgctgcttgtgctatacggttcaaatgcgggaacagctgaaggaacggcgcgtgatttagcagatattgcaatgagcaaaggatttgcaccgcaggtcgcaacgcttgattcacacgccggtaatcttccgcgcgaaggagctgtattaattgtaacggcgtcttataacggtcatccgcctgataacgcaaagcaatttgtcgactggttagaccaagcgtctgctgatgaagtaaaaggcgttcgctactccgtatttggatgcggcgataaaaattgggcggggacgtatcaaaaagtgcctgcttttatcgatgaaacgcttgccgctaaaggggcagaaaacatcgctgaccgcggtgaagcagatgcaagcgacgactttgaaggcacatatgaagaatggcgtgatcatatgtggagtgacgtagcagcctactttaacctcgacattgaaaacagtgaagataataaatctactctttcacttcaatttgtcgacagcgccgcggatatgccgcttgcgaaaatgcacggtgcgttttcaacgaacgtcgtagcaagcaaagaacttcaacagccaggcagtgcacgaagcacgcgacatcttgaaattgaacttccaaaagaagcttcttatcaagaaggagatcatttaggtgttattcctcgcaactatgaaggaatagtaaaccgtgtaacagcaaggttcggcctaagcgcatcacagcaaatccgtctggaagcagaagaagaaaaattagctcatttgccactcgctaaaacagtatccgtagaagagcttctgcaatacgtggagcttcaagatcctgttacgcgcacgcagcttcgcgcaatggctgctaaaacggtctgcccgccgcataaaggggagcttgaagccttgcttgaaaagcaagcctacaaagaacaagtgctggcaaaacgtttaacaatgcttgaactgcttgaaaaatacccggcgtgtgaaatgaaattcagcgaatttatcgcccttctgccaagcatacgcccgcgctattactcgatttcttcatcacctcgtgtcgatgaaaaacaagcaagcatcacggtcagcgttgtctcaggaccggcgtggagcggatatggagaatataaaggaattgcgtcgaactatcttgccgagctgcaagaaggagatacgattacgtgctttatttccacaccgcagtcagaatttacgctgccaaaagaccctgaaacgccgcttatcatggtcggaccgggaacaggcgtcgcgccgtttagaggctttgtgcaggcgcgcaaacagctaaaagaacaaggacagtcacttggagaagcacatttatacttcggctgccgttcacctcatgaagactatctgtatcaagaagagcttgaaaacgcccaaagcgaaggcatcattacgcttcataccgctttttctcgcatgccaaatcagccgaaaacatacgttcagcacgtaatggaacaagacggcaagaaattgattgaacttcttgatcaaggagcgcacttctatatttgcggagacggaagccaaatggcacctgccgttgaagcaacgcttatgaaaagctatgctgacgttcaccaagtgagtgaagcagacgctcgcttatggctgcagcagctagaagaaaaaggccgatacgcaaaagacgtgtggctgggg

SEQ ID NO: 604 - protein, 1049 aa, synthetic construct
  REGION 1..1049: note = variant of P450 oxidase from Bacillus megaterium
MTIKEMPQPKTFGELKNLPLLNTDKPVQALMRIADELGEIFKFEAPGSVTRYLSSQRLIKEACDESRFDKNLSQALKFARDFVGDGLSTSWTHEPNWKKAHNILVPSFSQHAMGRYHAMMVDIAVQLVQKWERLNADEHIEVSEDMTRLTLDTIGLCGFNYRFNSFYRDQPHPFIVSVVRALDEVMNKLQRANPDDPAYDENKRQCQEDIKVMNDYVDKIIADRKARGEQSHDLLTQMLNGKDPETGEPLDDGNIRQQIITFLIAGHQTTSGLLSFALYFLVKNPHVLQKVAEEAARVLVDPVPSYKQVKQLKYVGMVLNEALRLWPVAPMFSLYAKEDTVLGGEYPLTKGDEVMVLVPQLHRDKTIWGDDVEEFRPERFENPSAIPQHAFKPFGNGQRACIGQQFALHEATLVLGMMLKHFDFEDHTNYELVIKESRTLKPEGFVVKAKSKGIPLGGIPSPSTEQSAKKVRKKAENAHNTPLLVLYGSNAGTAEGTARDLADIAMSKGFAPQVATLDSHAGNLPREGAVLIVTASYNGHPPDNAKQFVDWLDQASADEVKGVRYSVFGCGDKNWAGTYQKVPAFIDETLAAKGAENIADRGEADASDDFEGTYEEWRDHMWSDVAAYFNLDIENSEDNKSTLSLQFVDSAADMPLAKMHGAFSTNVVASKELQQPGSARSTRHLEIELPKEASYQEGDHLGVIPRNYEGIVNRVTARFGLSASQQIRLEAEEEKLAHLPLAKTVSVEELLQYVELQDPVTRTQLRAMAAKTVCPPHKGELEALLEKQAYKEQVLAKRLTMLELLEKYPACEMKFSEFIALLPSIRPRYYSISSSPRVDEKQASITVSVVSGPAWSGYGEYKGIASNYLAELQEGDTITCFISTPQSEFTLPKDPETPLIMVGPGTGVAPFRGFVQARKQLKEQGQSLGEAHLYFGCRSPHEDYLYQEELENAQSEGIITLHTAFSRMPNQPKTYVQHVMEQDGKKLIELLDQGAHFYICGDGSQMAPAVEATLMKSYADVHQVSEADARLWLQQLEEKGRYAKDVWLG

SEQ ID NO: 605 - DNA, 3147 bp, synthetic construct
  misc_feature 1..3147: note = variant of P450 oxidase from Bacillus megaterium
  source 1..3147: mol_type = other DNA
atgacaattaaggaaatgcctcagcctaagacgtttggagaacttaaaaatttaccgttattaaacacagataaaccggttcaagctttgatgcgtattgcggatgaattaggagaaatctttaaattcgaggcgcctggtagcgtaacgcgctatttatcaagtcagcgtctaattaaagaagcatgcgatgaatcacgctttgataaaaacttaagtcaagcgcttaaatttgcacgtgattttgttggagacgggctgtctacaagctggacgcatgaaccgaattggaaaaaagcgcataatatcttagttccaagctttagtcagcatgcaatggggcgttatcatgcgatgatggtcgatatcgccgtgcagcttgttcaaaagtgggagcgtctaaatgcagatgagcatattgaagtatcggaagacatgacacgtttaacgcttgatacaattggtctttgcggctttaactatcgctttaacagcttttaccgagatcagcctcatccatttattgtgagtgtggttcgtgcactggatgaagtaatgaacaagctgcagcgagcaaatccagacgacccagcttatgatgaaaacaagcgccagtgtcaagaagatatcaaggtgatgaacgactatgtagataaaattattgcagatcgcaaagcaaggggtgaacaaagtcatgatttattaacgcagatgctaaacggaaaagatccagaaacgggtgagccgcttgatgacgggaacattcgtcagcaaattattacattcttaattgcgggacaccaaacgacaagtggtcttttatcatttgcgctgtatttcttagtgaaaaatccacatgtattacaaaaagtagcagaagaagcagcacgagttctagtagatcctgttccaagctacaaacaagtcaaacagcttaaatatgttggcatggtcttaaacgaagcgctgcgcttatggccagtagcgcctatgttttccctatatgcaaaagaagatacggtgcttggaggagaatatcctttaacgaaaggcgacgaagtaatggttctggtgcctcagcttcaccgtgataaaacaatttggggagacgatgtggaggagttccgtccagagcgttttgaaaatccaagtgcgattccgcagcatgcgtttaaaccgtttggaaacggtcagcgtgcgtgtatcggtcagcagttcgctcttcatgaagcaacgctggtacttggtatgatgctaaaacactttgactttgaagatcatacaaactacgagctcgttattaaagaatcgcggacgttaaaacctgaaggctttgtggtaaaagcaaaatcgaaaggcattccgcttggcggtattccttcacctagcactgaacagtctgctaaaaaagtacgcaaaaaggcagaaaacgctcataatacgccgctgcttgtgctatacggttcaaatgcgggaacagctgaaggaacggcgcgtgatttagcagatattgcaatgagcaaaggatttgcaccgcaggtcgcaacgcttgattcacacgccggtaatcttccgcgcgaaggagctgtattaattgtaacggcgtcttataacggtcatccgcctgataacgcaaagcaatttgtcgactggttagaccaagcgtctgctgatgaagtaaaaggcgttcgctactccgtatttggatgcggcgataaaaattgggcggggacgtatcaaaaagtgcctgcttttatcgatgaaacgcttgccgctaaaggggcagaaaacatcgctgaccgcggtgaagcagatgcaagcgacgactttgaaggcacatatgaagaatggcgtgatcatatgtggagtgacgtagcagcctactttaacctcgacattgaaaacagtgaagataataaatctactctttcacttcaatttgtcgacagcgccgcggatatgccgcttgcgaaaatgcacggtgcgttttcaacgaacgtcgtagcaagcaaagaacttcaacagccaggcagtgcacgaagcacgcgacatcttgaaattgaacttccaaaagaagcttcttatcaagaaggagatcatttaggtgttattcctcgcaactatgaaggaatagtaaaccgtgtaacagcaaggttcggcctaagcgcatcacagcaaatccgtctggaagcagaagaagaaaaattagctcatttgccactcgctaaaacagtatccgtagaagagcttctgcaatacgtggagcttcaagatcctgttacgcgcacgcagcttcgcgcaatggctgctaaaacggtctgcccgccgcataaagtagagcttgaagccttgcttgaaaagcaagcctacaaagaacaagtgctggcaaaacgtttaacaatgcttgaactgcttgaaaaatacccggcgtgtgaaatgaaattcagcgaatttatcgcccttctgccaagcatacgcccgcgctattactcgatttcttcatcacctcgttgggatgaaaaacaagcaagcatcacggtcagcgttgtctcaggaccggcgtggagcggatatggagaatataaaggaattgcgtcgaactatcttgccgagctgcaagaaggagatacgattacgtgctttatttccacaccgcagtcagaatttacgctgccaaaagaccctgaaacgccgcttatcatggtcggaccgggaacaggcgtcgcgccgtttagaggctttgtgcaggcgcgcaaacagctaaaagaacaaggacagtcacttggagaagcacatttatacttcggctgccgttcacctcatgaagactatctgtatcaagaagagcttgaaaacgcccaaagcgaaggcatcattacgcttcataccgctttttctcgcatgccaaatcagccgaaaacatacgttcagcacgtaatggaacaagacggcaagaaattgattgaacttcttgatcaaggagcgcacttctatatttgcggagacggaagccaaatggcacctgccgttgaagcaacgcttatgaaaagctatgctgacgttcaccaagtgagtgaagcagacgctcgcttatggctgcagcagctagaagaaaaaggccgatacgcaaaagacgtgtggctgggg

SEQ ID NO: 606 - protein, 1049 aa, synthetic construct
  REGION 1..1049: note = variant of P450 oxidase from Bacillus megaterium
MTIKEMPQPKTFGELKNLPLLNTDKPVQALMRIADELGEIFKFEAPGSVTRYLSSQRLIKEACDESRFDKNLSQALKFARDFVGDGLSTSWTHEPNWKKAHNILVPSFSQHAMGRYHAMMVDIAVQLVQKWERLNADEHIEVSEDMTRLTLDTIGLCGFNYRFNSFYRDQPHPFIVSVVRALDEVMNKLQRANPDDPAYDENKRQCQEDIKVMNDYVDKIIADRKARGEQSHDLLTQMLNGKDPETGEPLDDGNIRQQIITFLIAGHQTTSGLLSFALYFLVKNPHVLQKVAEEAARVLVDPVPSYKQVKQLKYVGMVLNEALRLWPVAPMFSLYAKEDTVLGGEYPLTKGDEVMVLVPQLHRDKTIWGDDVEEFRPERFENPSAIPQHAFKPFGNGQRACIGQQFALHEATLVLGMMLKHFDFEDHTNYELVIKESRTLKPEGFVVKAKSKGIPLGGIPSPSTEQSAKKVRKKAENAHNTPLLVLYGSNAGTAEGTARDLADIAMSKGFAPQVATLDSHAGNLPREGAVLIVTASYNGHPPDNAKQFVDWLDQASADEVKGVRYSVFGCGDKNWAGTYQKVPAFIDETLAAKGAENIADRGEADASDDFEGTYEEWRDHMWSDVAAYFNLDIENSEDNKSTLSLQFVDSAADMPLAKMHGAFSTNVVASKELQQPGSARSTRHLEIELPKEASYQEGDHLGVIPRNYEGIVNRVTARFGLSASQQIRLEAEEEKLAHLPLAKTVSVEELLQYVELQDPVTRTQLRAMAAKTVCPPHKVELEALLEKQAYKEQVLAKRLTMLELLEKYPACEMKFSEFIALLPSIRPRYYSISSSPRWDEKQASITVSVVSGPAWSGYGEYKGIASNYLAELQEGDTITCFISTPQSEFTLPKDPETPLIMVGPGTGVAPFRGFVQARKQLKEQGQSLGEAHLYFGCRSPHEDYLYQEELENAQSEGIITLHTAFSRMPNQPKTYVQHVMEQDGKKLIELLDQGAHFYICGDGSQMAPAVEATLMKSYADVHQVSEADARLWLQQLEEKGRYAKDVWLG

SEQ ID NO: 607 - DNA, 3147 bp, synthetic construct
  misc_feature 1..3147: note = variant of P450 oxidase from Bacillus megaterium
  source 1..3147: mol_type = other DNA
atgacaattaaggaaatgcctcagcctaagacgtttggagaacttaaaaatttaccgttattaaacacagataaaccggttcaagctttgatgcgtattgcggatgaattaggagaaatctttaaattcgaggcgcctggtagcgtaacgcgctatttatcaagtcagcgtctaattaaagaagcatgcgatgaatcacgctttgataaaaacttaagtcaagcgcttaaatttgcacgtgattttgttggagacgggctgtctacaagctggacgcatgaaccgaattggaaaaaagcgcataatatcttagttccaagctttagtcagcatgcaatggggcgttatcatgcgatgatggtcgatatcgccgtgcagcttgttcaaaagtgggagcgtctaaatgcagatgagcatattgaagtatcggaagacatgacacgtttaacgcttgatacaattggtctttgcggctttaactatcgctttaacagcttttaccgagatcagcctcatccatttattgtgagtgtggttcgtgcactggatgaagtaatgaacaagctgcagcgagcaaatccagacgacccagcttatgatgaaaacaagcgccagtgtcaagaagatatcaaggtgatgaacgactatgtagataaaattattgcagatcgcaaagcaaggggtgaacaaagtcatgatttattaacgcagatgctaaacggaaaagatccagaaacgggtgagccgcttgatgacgggaacattcgtcagcaaattattacattcttaattgcgggacaccaaacgacaagtggtcttttatcatttgcgctgtatttcttagtgaaaaatccacatgtattacaaaaagtagcagaagaagcagcacgagttctagtagatcctgttccaagctacaaacaagtcaaacagcttaaatatgttggcatggtcttaaacgaagcgctgcgcttatggccagtagcgcctatgttttccctatatgcaaaagaagatacggtgcttggaggagaatatcctttaacgaaaggcgacgaagtaatggttctggtgcctcagcttcaccgtgataaaacaatttggggagacgatgtggaggagttccgtccagagcgttttgaaaatccaagtactattccgcagcatgcgtttaaaccgtttggaaacggtcagcgtgcgtgtatcggtcagcagttcgctcttcatgaagcaacgctggtacttggtatgatgctaaaacactttgactttgaagatcatacaaactacgagctcgttattaaagaatcgcggacgttaaaacctgaaggctttgtggtaaaagcaaaatcgaaaggcattccgcttggcggtattccttcacctagcactgaacagtctgctaaaaaagtacgcaaaaaggcagaaaacgctcataatacgccgctgcttgtgctatacggttcaaatgcgggaacagctgaaggaacggcgcgtgatttagcagatattgcaatgagcaaaggatttgcaccgcaggtcgcaacgcttgattcacacgccggtaatcttccgcgcgaaggagctgtattaattgtaacggcgtcttataacggtcatccgcctgataacgcaaagcaatttgtcgactggttagaccaagcgtctgctgatgaagtaaaaggcgttcgctactccgtatttggatgcggcgataaaaattgggcggggacgtatcaaaaagtgcctgcttttatcgatgaaacgcttgccgctaaaggggcagaaaacatcgctgaccgcggtgaagcagatgcaagcgacgactttgaaggcacatatgaagaatggcgtgatcatatgtggagtgacgtagcagcctactttaacctcgacattgaaaacagtgaagataataaatctactctttcacttcaatttgtcgacagcgccgcggatatgccgcttgcgaaaatgcacggtgcgttttcaacgaacgtcgtagcaagcaaagaacttcaacagccaggcagtgcacgaagcacgcgacatcttgaaattgaacttccaaaagaagcttcttatcaagaaggagatcatttaggtgttattcctcgcaactatgaaggaatagtaaaccgtgtaacagcaaggttcggcctaagcgcatcacagcaaatccgtctggaagcagaagaagaaaaattagctcatttgccactcgctaaaacagtatccgtagaagagcttctgcaatacgtggagcttcaagatcctgttacgcgcacgcagcttcgcgcaatggctgctaaaacggtctgcccgccgcataaagtagagcttgaagccttgcttgaaaagcaagcctacaaagaacaagtgctggcaaaacgtttaacaatgcttgaactgcttgaaaaatacccggcgtgtgaaatgaaattcagcgaatttatcgcccttctgccaagcatacgcccgcgctattactcgatttcttcatcacctcgtgtcgatgaaaaacaagcaagcatcacggtcagcgttgtctcaggaccggcgtggagcggatatggagaatataaaggaattgcgtcgaactatcttgccgagctgcaagaaggagatacgattacgtgctttatttccacaccgcagtcagaatttacgctgccaaaagaccctgaaacgccgcttatcatggtcggaccgggaacaggcgtcgcgccgtttagaggctttgtgcaggcgcgcaaacagctaaaagaacaaggacagtcacttggagaagcacatttatacttcggctgccgttcacctcatgaagactatctgtatcaagaagagcttgaaaacgcccaaagcgaaggcatcattacgcttcataccgctttttctcgcatgccaaatcagccgaaaacatacgttcagcacgtaatggaacaagacggcaagaaattgattgaacttcttgatcaaggagcgcacttctatatttgcggagacggaagccaaatggcacctgccgttgaagcaacgcttatgaaaagctatgctgacgttcaccaagtgagtgaagcagacgctcgcttatggctgcagcagctagaagaaaaaggccgatacgcaaaagacgtgtggctgggg

SEQ ID NO: 608 - protein, 1049 aa, synthetic construct
  REGION 1..1049: note = variant of P450 oxidase from Bacillus megaterium
MTIKEMPQPKTFGELKNLPLLNTDKPVQALMRIADELGEIFKFEAPGSVTRYLSSQRLIKEACDESRFDKNLSQALKFARDFVGDGLSTSWTHEPNWKKAHNILVPSFSQHAMGRYHAMMVDIAVQLVQKWERLNADEHIEVSEDMTRLTLDTIGLCGFNYRFNSFYRDQPHPFIVSVVRALDEVMNKLQRANPDDPAYDENKRQCQEDIKVMNDYVDKIIADRKARGEQSHDLLTQMLNGKDPETGEPLDDGNIRQQIITFLIAGHQTTSGLLSFALYFLVKNPHVLQKVAEEAARVLVDPVPSYKQVKQLKYVGMVLNEALRLWPVAPMFSLYAKEDTVLGGEYPLTKGDEVMVLVPQLHRDKTIWGDDVEEFRPERFENPSTIPQHAFKPFGNGQRACIGQQFALHEATLVLGMMLKHFDFEDHTNYELVIKESRTLKPEGFVVKAKSKGIPLGGIPSPSTEQSAKKVRKKAENAHNTPLLVLYGSNAGTAEGTARDLADIAMSKGFAPQVATLDSHAGNLPREGAVLIVTASYNGHPPDNAKQFVDWLDQASADEVKGVRYSVFGCGDKNWAGTYQKVPAFIDETLAAKGAENIADRGEADASDDFEGTYEEWRDHMWSDVAAYFNLDIENSEDNKSTLSLQFVDSAADMPLAKMHGAFSTNVVASKELQQPGSARSTRHLEIELPKEASYQEGDHLGVIPRNYEGIVNRVTARFGLSASQQIRLEAEEEKLAHLPLAKTVSVEELLQYVELQDPVTRTQLRAMAAKTVCPPHKVELEALLEKQAYKEQVLAKRLTMLELLEKYPACEMKFSEFIALLPSIRPRYYSISSSPRVDEKQASITVSVVSGPAWSGYGEYKGIASNYLAELQEGDTITCFISTPQSEFTLPKDPETPLIMVGPGTGVAPFRGFVQARKQLKEQGQSLGEAHLYFGCRSPHEDYLYQEELENAQSEGIITLHTAFSRMPNQPKTYVQHVMEQDGKKLIELLDQGAHFYICGDGSQMAPAVEATLMKSYADVHQVSEADARLWLQQLEEKGRYAKDVWLG

SEQ ID NO: 609 - DNA, 3147 bp, synthetic construct
  misc_feature 1..3147: note = variant of P450 oxidase from Bacillus megaterium
  source 1..3147: mol_type = other DNA
atgacaattaaggaaatgcctcagcctaagacgtttggagaacttaaaaatttaccgttattaaacacagataaaccggttcaagctttgatgcgtattgcggatgaattaggagaaatctttaaattcgaggcgcctggtagcgtaacgcgctatttatcaagtcagcgtctaattaaagaagcatgcgatgaatcacgctttgataaaaacttaagtcaagcgcttaaatttgcacgtgattttgttggagacgggctgtctacaagctggacgcatgaaccgaattggaaaaaagcgcataatatcttagttccaagctttagtcagcatgcaatggggcgttatcatgcgatgatggtcgatatcgccgtgcagcttgttcaaaagtgggagcgtctaaatgcagatgagcatattgaagtatcggaagacatgacacgtttaacgcttgatacaattggtctttgcggctttaactatcgctttaacagcttttaccgagatcagcctcatccatttattgtgagtgtggttcgtgcactggatgaagtaatgaacaagctgcagcgagcaaatccagacgacccagcttatgatgaaaacaagcgccagtgtcaagaagatatcaaggtgatgaacgactatgtagataaaattattgcagatcgcaaagcaaggggtgaacaaagtcatgatttattaacgcagatgctaaacggaaaagatccagaaacgggtgagccgcttgatgacgggaacattcgtcagcaaattattacattcttaattgcgggacaccaaacgacaagtggtcttttatcatttgcgctgtatttcttagtgaaaaatccacatgtattacaaaaagtagcagaagaagcagcacgagttctagtagatcctgttccaagctacaaacaagtcaaacagcttaaatatgttggcatggtcttaaacgaagcgctgcgcttatggccagtagcgcctatgttttccctatatgcaaaagaagatacggtgcttggaggagaatatcctttaacgaaaggcgacgaagtaatggttctggtgcctcagcttcaccgtgataaaacaatttggggagacgatgtggaggagttccgtccagagcgttttgaaaatccaagtgcgattccgcagcatgcgtttaaaccgtttggaaacggtcagcgtgcgtgtatcggtcagcagttcgctcttcatgaagcaacgctggtacttggtatgatgctaaaacactttgactttgaagatcatacaaactacgagctcgttattaaagaatcgcggacgttaaaacctgaaggctttgtggtaaaagcaaaatcgaaaggcattccgcttggcggtattccttcacctagcactgaacagtctgctaaaaaagtacgcaaaaaggcagaaaacgctcataatacgccgctgcttgtgctatacggttcaaatgcgggaacagctgaaggaacggcgcgtgatttagcagatattgcaatgagcaaaggatttgcaccgcaggtcgcaacgcttgattcacacgccggtaggcttccgcgcgaaggagctgtattaattgtaacggcgtcttataacggtcatccgcctgataacgcaaagcaatttgtcgactggttagaccaagcgtctgctgatgaagtaaaaggcgttcgctactccgtatttggatgcggcgataaaaattgggcggggacgtatcaaaaagtgcctgcttttatcgatgaaacgcttgccgctaaaggggcagaaaacatcgctgaccgcggtgaagcagatgcaagcgacgactttgaaggcacatatgaagaatggcgtgatcatatgtggagtgacgtagcagcctactttaacctcgacattgaaaacagtgaagataataaatctactctttcacttcaatttgtcgacagcgccgcggatatgccgcttgcgaaaatgcacggtgcgttttcaacgaacgtcgtagcaagcaaagaacttcaacagccaggcagtgcacgaagcacgcgacatcttgaaattgaacttccaaaagaagcttcttatcaagaaggagatcatttaggtgttattcctcgcaactatgaaggaatagtaaaccgtgtaacagcaaggttcggcctaagcgcatcacagcaaatccgtctggaagcagaagaagaaaaattagctcatttgccactcgctaaaacagtatccgtagaagagcttctgcaatacgtggagcttcaagatcctgttacgcgcacgcagcttcgcgcaatggctgctaaaacggtctgcccgccgcataaagtagagcttgaagccttgcttgaaaagcaagcctacaaagaacaagtgctggcaaaacgtttaacaatgcttgaactgcttgaaaaatacccggcgtgtgaaatgaaattcagcgaatttatcgcccttctgccaagcatacgcccgcgctattactcgatttcttcatcacctcgtgtcgatgaaaaacaagcaagcatcacggtcagcgttgtctcaggaccggcgtggagcggatatggagaatataaaggaattgcgtcgaactatcttgccgagctgcaagaaggagatacgattacgtgctttatttccacaccgcagtcagaatttacgctgccaaaagaccctgaaacgccgcttatcatggtcggaccgggaacaggcgtcgcgccgtttagaggctttgtgcaggcgcgcaaacagctaaaagaacaaggacagtcacttggagaagcacatttatacttcggctgccgttcacctcatgaagactatctgtatcaagaagagcttgaaaacgcccaaagcgaaggcatcattacgcttcataccgctttttctcgcatgccaaatcagccgaaaacatacgttcagcacgtaatggaacaagacggcaagaaattgattgaacttcttgatcaaggagcgcacttctatatttgcggagacggaagccaaatggcacctgccgttgaagcaacgcttatgaaaagctatgctgacgttcaccaagtgagtgaagcagacgctcgcttatggctgcagcagctagaagaaaaaggccgatacgcaaaagacgtgtggctgggg

SEQ ID NO: 610 - protein, 1049 aa, synthetic construct
  REGION 1..1049: note = variant of P450 oxidase from Bacillus megaterium
MTIKEMPQPKTFGELKNLPLLNTDKPVQALMRIADELGEIFKFEAPGSVTRYLSSQRLIKEACDESRFDKNLSQALKFARDFVGDGLSTSWTHEPNWKKAHNILVPSFSQHAMGRYHAMMVDIAVQLVQKWERLNADEHIEVSEDMTRLTLDTIGLCGFNYRFNSFYRDQPHPFIVSVVRALDEVMNKLQRANPDDPAYDENKRQCQEDIKVMNDYVDKIIADRKARGEQSHDLLTQMLNGKDPETGEPLDDGNIRQQIITFLIAGHQTTSGLLSFALYFLVKNPHVLQKVAEEAARVLVDPVPSYKQVKQLKYVGMVLNEALRLWPVAPMFSLYAKEDTVLGGEYPLTKGDEVMVLVPQLHRDKTIWGDDVEEFRPERFENPSAIPQHAFKPFGNGQRACIGQQFALHEATLVLGMMLKHFDFEDHTNYELVIKESRTLKPEGFVVKAKSKGIPLGGIPSPSTEQSAKKVRKKAENAHNTPLLVLYGSNAGTAEGTARDLADIAMSKGFAPQVATLDSHAGRLPREGAVLIVTASYNGHPPDNAKQFVDWLDQASADEVKGVRYSVFGCGDKNWAGTYQKVPAFIDETLAAKGAENIADRGEADASDDFEGTYEEWRDHMWSDVAAYFNLDIENSEDNKSTLSLQFVDSAADMPLAKMHGAFSTNVVASKELQQPGSARSTRHLEIELPKEASYQEGDHLGVIPRNYEGIVNRVTARFGLSASQQIRLEAEEEKLAHLPLAKTVSVEELLQYVELQDPVTRTQLRAMAAKTVCPPHKVELEALLEKQAYKEQVLAKRLTMLELLEKYPACEMKFSEFIALLPSIRPRYYSISSSPRVDEKQASITVSVVSGPAWSGYGEYKGIASNYLAELQEGDTITCFISTPQSEFTLPKDPETPLIMVGPGTGVAPFRGFVQARKQLKEQGQSLGEAHLYFGCRSPHEDYLYQEELENAQSEGIITLHTAFSRMPNQPKTYVQHVMEQDGKKLIELLDQGAHFYICGDGSQMAPAVEATLMKSYADVHQVSEADARLWLQQLEEKGRYAKDVWLG

SEQ ID NO: 611 - DNA, 3147 bp, synthetic construct
  misc_feature 1..3147: note = variant of P450 oxidase from Bacillus megaterium
  source 1..3147: mol_type = other DNA
atgacaattaaggaaatgcctcagcctaagacgtttggagaacttaaaaatttaccgttattaaacacagataaaccggttcaagctttgatgcgtattgcggatgaattaggagaaatctttaaattcgaggcgcctggtagcgtaacgcgctatttatcaagtcagcgtctaattaaagaagcatgcgatgaatcacgctttgataaaaacttaagtcaagcgcttaaatttgcacgtgattttgttggagacgggctgtctacaagctggacgcatgaaccgaattggaaaaaagcgcataatatcttagttccaagctttagtcagcatgcaatggggcgttatcatgcgatgatggtcgatatcgccgtgcagcttgttcaaaagtgggagcgtctaaatgcagatgagcatattgaagtatcggaagacatgacacgtttaacgcttgatacaattggtctttgcggctttaactatcgctttaacagcttttaccgagatcagcctcatccatttattgtgagtgtggttcgtgcactggatgaagtaatgaacaagctgcagcgagcaaatccagacgacccagcttatgatgaaaacaagcgccagtgtcaagaagatatcaaggtgatgaacgactatgtagataaaattattgcagatcgcaaagcaaggggtgaacaaagtcatgatttattaacgcagatgctaaacggaaaagatccagaaacgggtgagccgcttgatgacgggaacattcgtcagcaaattattacattcttaattgcgggacaccaaacgacaagtggtcttttatcatttgcgctgtatttcttagtgaaaaatccacatgtattacaaaaagtagcagaagaagcagcacgagttctagtagatcctgttccaagctacaaacaagtcaaacagcttaaatatgttggcatggtcttaaacgaagcgctgcgcttatggccagtagcgcctatgttttccctatatgcaaaagaagatacggtgcttggaggagaatatcctttaacgaaaggcgacgaagtaatggttctggtgcctcagcttcaccgtgataaaacaatttggggagacgatgtggaggagttccgtccagagcgttttgaaaatccaagtgcgattccgcagcatgcgtttaaaccgtttggaaacggtcagcgtgcgtgtatcggtcagcagttcgctcttcatgaagcaacgctggtacttggtatgatgctaaaacactttgactttgaagatcatacaaactacgagctcgttattaaagaatcgcggacgttaaaacctgaaggctttgtggtaaaagcaaaatcgaaaggcattccgcttggcggtattccttcacctagcactgaacagtctgctaaaaaagtacgcaaaaaggcagaaaacgctcataatacgccgctgcttgtgctatacggttcaaatgcgggaacagctgaaggaacggcgcgtgatttagcagatattgcaatgagcaaaggatttgcaccgcaggtcgcaacgcttgattcacacgccggtaatcttccgcgcgaaggagctgtattaattgtaacggcgtcttataacggtcatccgcctgataacgcaaagcaatttgtcgactggttaaagcaagcgtctgctgatgaagtaaaaggcgttcgctactccgtatttggatgcggcgataaaaattgggcggggacgtatcaaaaagtgcctgcttttatcgatgaaacgcttgccgctaaaggggcagaaaacatcgctgaccgcggtgaagcagatgcaagcgacgactttgaaggcacatatgaagaatggcgtgatcatatgtggagtgacgtagcagcctactttaacctcgacattgaaaacagtgaagataataaatctactctttcacttcaatttgtcgacagcgccgcggatatgccgcttgcgaaaatgcacggtgcgttttcaacgaacgtcgtagcaagcaaagaacttcaacagccaggcagtgcacgaagcacgcgacatcttgaaattgaacttccaaaagaagcttcttatcaagaaggagatcatttaggtgttattcctcgcaactatgaaggaatagtaaaccgtgtaacagcaaggttcggcctaagcgcatcacagcaaatccgtctggaagcagaagaagaaaaattagctcatttgccactcgctaaaacagtatccgtagaagagcttctgcaatacgtggagcttcaagatcctgttacgcgcacgcagcttcgcgcaatggctgctaaaacggtctgcccgccgcataaagtagagcttgaagccttgcttgaaaagcaagcctacaaagaacaagtgctggcaaaacgtttaacaatgcttgaactgcttgaaaaatacccggcgtgtgaaatgaaattcagcgaatttatcgcccttctgccaagcatacgcccgcgctattactcgatttcttcatcacctcgtgtcgatgaaaaacaagcaagcatcacggtcagcgttgtctcaggaccggcgtggagcggatatggagaatataaaggaattgcgtcgaactatcttgccgagctgcaagaaggagatacgattacgtgctttatttccacaccgcagtcagaatttacgctgccaaaagaccctgaaacgccgcttatcatggtcggaccgggaacaggcgtcgcgccgtttagaggctttgtgcaggcgcgcaaacagctaaaagaacaaggacagtcacttggagaagcacatttatacttcggctgccgttcacctcatgaagactatctgtatcaagaagagcttgaaaacgcccaaagcgaaggcatcattacgcttcataccgctttttctcgcatgccaaatcagccgaaaacatacgttcagcacgtaatggaacaagacggcaagaaattgattgaacttcttgatcaaggagcgcacttctatatttgcggagacggaagccaaatggcacctgccgttgaagcaacgcttatgaaaagctatgctgacgttcaccaagtgagtgaagcagacgctcgcttatggctgcagcagctagaagaaaaaggccgatacgcaaaagacgtgtggctgggg

SEQ ID NO: 612 - protein, 1049 aa, synthetic construct
  REGION 1..1049: note = variant of P450 oxidase from Bacillus megaterium
MTIKEMPQPKTFGELKNLPLLNTDKPVQALMRIADELGEIFKFEAPGSVTRYLSSQRLIKEACDESRFDKNLSQALKFARDFVGDGLSTSWTHEPNWKKAHNILVPSFSQHAMGRYHAMMVDIAVQLVQKWERLNADEHIEVSEDMTRLTLDTIGLCGFNYRFNSFYRDQPHPFIVSVVRALDEVMNKLQRANPDDPAYDENKRQCQEDIKVMNDYVDKIIADRKARGEQSHDLLTQMLNGKDPETGEPLDDGNIRQQIITFLIAGHQTTSGLLSFALYFLVKNPHVLQKVAEEAARVLVDPVPSYKQVKQLKYVGMVLNEALRLWPVAPMFSLYAKEDTVLGGEYPLTKGDEVMVLVPQLHRDKTIWGDDVEEFRPERFENPSAIPQHAFKPFGNGQRACIGQQFALHEATLVLGMMLKHFDFEDHTNYELVIKESRTLKPEGFVVKAKSKGIPLGGIPSPSTEQSAKKVRKKAENAHNTPLLVLYGSNAGTAEGTARDLADIAMSKGFAPQVATLDSHAGNLPREGAVLIVTASYNGHPPDNAKQFVDWLKQASADEVKGVRYSVFGCGDKNWAGTYQKVPAFIDETLAAKGAENIADRGEADASDDFEGTYEEWRDHMWSDVAAYFNLDIENSEDNKSTLSLQFVDSAADMPLAKMHGAFSTNVVASKELQQPGSARSTRHLEIELPKEASYQEGDHLGVIPRNYEGIVNRVTARFGLSASQQIRLEAEEEKLAHLPLAKTVSVEELLQYVELQDPVTRTQLRAMAAKTVCPPHKVELEALLEKQAYKEQVLAKRLTMLELLEKYPACEMKFSEFIALLPSIRPRYYSISSSPRVDEKQASITVSVVSGPAWSGYGEYKGIASNYLAELQEGDTITCFISTPQSEFTLPKDPETPLIMVGPGTGVAPFRGFVQARKQLKEQGQSLGEAHLYFGCRSPHEDYLYQEELENAQSEGIITLHTAFSRMPNQPKTYVQHVMEQDGKKLIELLDQGAHFYICGDGSQMAPAVEATLMKSYADVHQVSEADARLWLQQLEEKGRYAKDVWLG

SEQ ID NO: 613 - DNA, 3147 bp, synthetic construct
  misc_feature 1..3147: note = variant of P450 oxidase from Bacillus megaterium
  source 1..3147: mol_type = other DNA
atgacaattaaggaaatgcctcagcctaagacgtttggagaacttaaaaatttaccgttattaaacacagataaaccggttcaagctttgatgcgtattgcggatgaattaggagaaatctttaaattcgaggcgcctggtagcgtaacgcgctatttatcaagtcagcgtctaattaaagaagcatgcgatgaatcacgctttgataaaaacttaagtcaagcgcttaaatttgcacgtgattttgttggagacgggctgtctacaagctggacgcatgaaccgaattggaaaaaagcgcataatatcttagttccaagctttagtcagcatgcaatggggcgttatcatgcgatgatggtcgatatcgccgtgcagcttgttcaaaagtgggagcgtctaaatgcagatgagcatattgaagtatcggaagacatgacacgtttaacgcttgatacaattggtctttgcggctttaactatcgctttaacagcttttaccgagatcagcctcatccatttattgtgagtgtggttcgtgcactggatgaagtaatgaacaagctgcagcgagcaaatccagacgacccagcttatgatgaaaacaagcgccagtgtcaagaagatatcaaggtgatgaacgactatgtagataaaattattgcagatcgcaaagcaaggggtgaacaaagtcatgatttattaacgcagatgctaaacggaaaagatccagaaacgggtgagccgcttgatgacgggaacattcgtcagcaaattattacattcttaattgcgggacaccaaacgacaagtggtcttttatcatttgcgctgtatttcttagtgaaaaatccacatgtattacaaaaagtagcagaagaagcagcacgagttctagtagatcctgttccaagctacaaacaagtcaaacagcttaaatatgttggcatggtcttaaacgaagcgctgcgcttatggccagtagcgcctatgttttccctatatgcaaaagaagatacggtgcttggaggagaatatcctttaacgaaaggcgacgaagtaatggttctggtgcctcagcttcaccgtgataaaacaatttggggagacgatgtggaggagttccgtccagagcgttttgaaaatccaagtgcgattccgcagcatgcgtttaaaccgtttggaaacggtcagcgtgcgtgtatcggtcagcagttcgctcttcatgaagcaacgctggtacttggtatgatgctaaaacactttgactttgaagatcatacaaactacgagctcgttattaaagaatcgcggacgttaaaacctgaaggctttgtggtaaaagcaaaatcgaaaggcattccgcttggcggtattccttcacctagcactgaacagtctgctaaaaaagtacgcaaaaaggcagaaaacgctcataatacgccgctgcttgtgctatacggttcaaatgcgggaacagctgaaggaacggcgcgtgatttagcagatattgcaatgagcaaaggatttgcaccgcaggtcgcaacgcttgattcacacgccggtaatcttccgcgcgaaggagctgtattaattgtaacggcgtcttataacggtcatccgcctgataacgcaaagcaatttgtcacttggttagaccaagcgtctgctgatgaagtaaaaggcgttcgctactccgtatttggatgcggcgataaaaattgggcggggacgtatcaaaaagtgcctgcttttatcgatgaaacgcttgccgctaaaggggcagaaaacatcgctgaccgcggtgaagcagatgcaagcgacgactttgaaggcacatatgaagaatggcgtgatcatatgtggagtgacgtagcagcctactttaacctcgacattgaaaacagtgaagataataaatctactctttcacttcaatttgtcgacagcgccgcggatatgccgcttgcgaaaatgcacggtgcgttttcaacgaacgtcgtagcaagcaaagaacttcaacagccaggcagtgcacgaagcacgcgacatcttgaaattgaacttccaaaagaagcttcttatcaagaaggagatcatttaggtgttattcctcgcaactatgaaggaatagtaaaccgtgtaacagcaaggttcggcctaagcgcatcacagcaaatccgtctggaagcagaagaagaaaaattagctcatttgccactcgctaaaacagtatccgtagaagagcttctgcaatacgtggagcttcaagatcctgttacgcgcacgcagcttcgcgcaatggctgctaaaacggtctgcccgccgcataaagtagagcttgaagccttgcttgaaaagcaagcctacaaagaacaagtgctggcaaaacgtttaacaatgcttgaactgcttgaaaaatacccggcgtgtgaaatgaaattcagcgaatttatcgcccttctgccaagcatacgcccgcgctattactcgatttcttcatcacctcgtgtcgatgaaaaacaagcaagcatcacggtcagcgttgtctcaggaccggcgtggagcggatatggagaatataaaggaattgcgtcgaactatcttgccgagctgcaagaaggagatacgattacgtgctttatttccacaccgcagtcagaatttacgctgccaaaagaccctgaaacgccgcttatcatggtcggaccgggaacaggcgtcgcgccgtttagaggctttgtgcaggcgcgcaaacagctaaaagaacaaggacagtcacttggagaagcacatttatacttcggctgccgttcacctcatgaagactatctgtatcaagaagagcttgaaaacgcccaaagcgaaggcatcattacgcttcataccgctttttctcgcatgccaaatcagccgaaaacatacgttcagcacgtaatggaacaagacggcaagaaattgattgaacttcttgatcaaggagcgcacttctatatttgcggagacggaagccaaatggcacctgccgttgaagcaacgcttatgaaaagctatgctgacgttcaccaagtgagtgaagcagacgctcgcttatggctgcagcagctagaagaaaaaggccgatacgcaaaagacgtgtggctgggg

SEQ ID NO: 614 - protein, 1049 aa, synthetic construct
  REGION 1..1049: note = variant of P450 oxidase from Bacillus megaterium
MTIKEMPQPKTFGELKNLPLLNTDKPVQALMRIADELGEIFKFEAPGSVTRYLSSQRLIKEACDESRFDKNLSQALKFARDFVGDGLSTSWTHEPNWKKAHNILVPSFSQHAMGRYHAMMVDIAVQLVQKWERLNADEHIEVSEDMTRLTLDTIGLCGFNYRFNSFYRDQPHPFIVSVVRALDEVMNKLQRANPDDPAYDENKRQCQEDIKVMNDYVDKIIADRKARGEQSHDLLTQMLNGKDPETGEPLDDGNIRQQIITFLIAGHQTTSGLLSFALYFLVKNPHVLQKVAEEAARVLVDPVPSYKQVKQLKYVGMVLNEALRLWPVAPMFSLYAKEDTVLGGEYPLTKGDEVMVLVPQLHRDKTIWGDDVEEFRPERFENPSAIPQHAFKPFGNGQRACIGQQFALHEATLVLGMMLKHFDFEDHTNYELVIKESRTLKPEGFVVKAKSKGIPLGGIPSPSTEQSAKKVRKKAENAHNTPLLVLYGSNAGTAEGTARDLADIAMSKGFAPQVATLDSHAGNLPREGAVLIVTASYNGHPPDNAKQFVTWLDQASADEVKGVRYSVFGCGDKNWAGTYQKVPAFIDETLAAKGAENIADRGEADASDDFEGTYEEWRDHMWSDVAAYFNLDIENSEDNKSTLSLQFVDSAADMPLAKMHGAFSTNVVASKELQQPGSARSTRHLEIELPKEASYQEGDHLGVIPRNYEGIVNRVTARFGLSASQQIRLEAEEEKLAHLPLAKTVSVEELLQYVELQDPVTRTQLRAMAAKTVCPPHKVELEALLEKQAYKEQVLAKRLTMLELLEKYPACEMKFSEFIALLPSIRPRYYSISSSPRVDEKQASITVSVVSGPAWSGYGEYKGIASNYLAELQEGDTITCFISTPQSEFTLPKDPETPLIMVGPGTGVAPFRGFVQARKQLKEQGQSLGEAHLYFGCRSPHEDYLYQEELENAQSEGIITLHTAFSRMPNQPKTYVQHVMEQDGKKLIELLDQGAHFYICGDGSQMAPAVEATLMKSYADVHQVSEADARLWLQQLEEKGRYAKDVWLG

SEQ ID NO: 615 - DNA, 3147 bp, synthetic construct
  misc_feature 1..3147: note = variant of P450 oxidase from Bacillus megaterium
  source 1..3147: mol_type = other DNA
atgacaattaaggaaatgcctcagcctaagacgtttggagaacttaaaaatttaccgttattaaacacagataaaccggttcaagctttgatgcgtattgcggatgaattaggagaaatctttaaattcgaggcgcctggtagcgtaacgcgctatttatcaagtcagcgtctaattaaagaagcatgcgatgaatcacgctttgataaaaacttaagtcaagcgcttaaatttgcacgtgattttgttggagacgggctgtctacaagctggacgcatgaaccgaattggaaaaaagcgcataatatcttagttccaagctttagtcagcatgcaatggggcgttatcatgcgatgatggtcgatatcgccgtgcagcttgttcaaaagtgggagcgtctaaatgcagatgagcatattgaagtatcggaagacatgacacgtttaacgcttgatacaattggtctttgcggctttaactatcgctttaacagcttttaccgagatcagcctcatccatttattgtgagtgtggttcgtgcactggatgaagtaatgaacaagctgcagcgagcaaatccagacgacccagcttatgatgaaaacaagcgccagtgtcaagaagatatcaaggtgatgaacgactatgtagataaaattattgcagatcgcaaagcaaggggtgaacaaagtcatgatttattaacgcagatgctaaacggaaaagatccagaaacgggtgagccgcttgatgacgggaacattcgtcagcaaattattacattcttaattgcgggacaccaaacgacaagtggtcttttatcatttgcgctgtatttcttagtgaaaaatccacatgtattacaaaaagtagcagaagaagcagcacgagttctagtagatcctgttccaagctacaaacaagtcaaacagcttaaatatgttggcatggtcttaaacgaagcgctgcgcttatggccagtagcgcctatgttttccctatatgcaaaagaagatacggtgcttggaggagaatatcctttaacgaaaggcgacgaagtaatggttctggtgcctcagcttcaccgtgataaaacaatttggggagacgatgtggaggagttccgtccagagcgttttgaaaatccaagtgcgattccgcagcatgcgtttaaaccgtttggaaacggtcagcgtgcgtgtatcggtcagcagttcgctcttcatgaagcaacgctggtacttggtatgatgctaaaacactttgactttgaagatcatacaaactacgagctcgttattaaagaatcgcggacgttaaaacctgaaggctttgtggtaaaagcaaaatcgaaaggcattccgcttggcggtattccttcacctagcactgaacagtctgctaaaaaagtacgcaaaaaggcagaaaacgctcataatacgccgctgcttgtgctatacggttcaaatgcgggaacagctgaaggaacggcgcgtgatttagcagatattgcaatgagcaaaggatttgcaccgcaggtcgcaacgcttgattcacacgccggtaatcttccgcgcgaaggagctgtattaattgtaacggcgtcttataacggtcatccgcctgataacgcaaagcaatttgtcgactggttagaccaagcgtctgctgatgaagtaaaaggcgttcgctactccgtatttggatgcggcgataaaaattgggcggggacgtatcaaaaagtgcctgcttttatcgatgaaacgcttgccgctaaaggggcagaaaacatcgctgaccgcggtgaagcagatgcaagcgacgactttgaaggcacatatgaagaatggcgtgatcatatgtggagtgacgtagcagcctactttaacctcgacattgaaaacagtgaagataataaatctactctttcacttcaatttgtcgacagcgccgcggatatgccgcttgcgaaaatgcacggtgcgttttcaacgaacgtcgtagcaagcaaagaacttcaacagccaggcagtgcacgaagcacgcgacatcttgaaattgaacttccaaaagaagcttcttatcaagaaggagatcatttaggtgttattcctcgcaactatgaaggaatagtaaaccgtgtaacagcaaggttcggcctaagcgcatcacagcaaatccgtctggaagcagaagaagaaaaattagctcatttgccactcgctaaaacagtatccgtagaagagcttctgcaatacgtggagcttcaagatcctgttacgcgcacgcagcttcgcgcaatggctgctaaaacggtctgcccgccgcataaagtagagcttgaagccttgcttgaaaagcaagcctacaaagaacaagtgctggcaaaacgtttaacaatgcttgaactgcttgaaaaatacccggcgtgtgaaatgaaattcagcgaatttatcgcccttctgccaagcatacgcccgcgctattactcgatttcttcatcacctcgtgtcgatgaaaaacaagcaagcatcacggtcagcgttgtctcaggaccggcgtggagcggatatggagaatataaaggaattgcgtcgaactatcttgccatgctgcaagaaggagatacgattacgtgctttatttccacaccgcagtcagaatttacgctgccaaaagaccctgaaacgccgcttatcatggtcggaccgggaacaggcgtcgcgccgtttagaggctttgtgcaggcgcgcaaacagctaaaagaacaaggacagtcacttggagaagcacatttatacttcggctgccgttcacctcatgaagactatctgtatcaagaagagcttgaaaacgcccaaagcgaaggcatcattacgcttcataccgctttttctcgcatgccaaatcagccgaaaacatacgttcagcacgtaatggaacaagacggcaagaaattgattgaacttcttgatcaaggagcgcacttctatatttgcggagacggaagccaaatggcacctgccgttgaagcaacgcttatgaaaagctatgctgacgttcaccaagtgagtgaagcagacgctcgcttatggctgcagcagctagaagaaaaaggccgatacgcaaaagacgtgtggctgggg

SEQ ID NO: 616 - protein, 1049 aa, synthetic construct
  REGION 1..1049: note = variant of P450 oxidase from Bacillus megaterium
MTIKEMPQPKTFGELKNLPLLNTDKPVQALMRIADELGEIFKFEAPGSVTRYLSSQRLIKEACDESRFDKNLSQALKFARDFVGDGLSTSWTHEPNWKKAHNILVPSFSQHAMGRYHAMMVDIAVQLVQKWERLNADEHIEVSEDMTRLTLDTIGLCGFNYRFNSFYRDQPHPFIVSVVRALDEVMNKLQRANPDDPAYDENKRQCQEDIKVMNDYVDKIIADRKARGEQSHDLLTQMLNGKDPETGEPLDDGNIRQQIITFLIAGHQTTSGLLSFALYFLVKNPHVLQKVAEEAARVLVDPVPSYKQVKQLKYVGMVLNEALRLWPVAPMFSLYAKEDTVLGGEYPLTKGDEVMVLVPQLHRDKTIWGDDVEEFRPERFENPSAIPQHAFKPFGNGQRACIGQQFALHEATLVLGMMLKHFDFEDHTNYELVIKESRTLKPEGFVVKAKSKGIPLGGIPSPSTEQSAKKVRKKAENAHNTPLLVLYGSNAGTAEGTARDLADIAMSKGFAPQVATLDSHAGNLPREGAVLIVTASYNGHPPDNAKQFVDWLDQASADEVKGVRYSVFGCGDKNWAGTYQKVPAFIDETLAAKGAENIADRGEADASDDFEGTYEEWRDHMWSDVAAYFNLDIENSEDNKSTLSLQFVDSAADMPLAKMHGAFSTNVVASKELQQPGSARSTRHLEIELPKEASYQEGDHLGVIPRNYEGIVNRVTARFGLSASQQIRLEAEEEKLAHLPLAKTVSVEELLQYVELQDPVTRTQLRAMAAKTVCPPHKVELEALLEKQAYKEQVLAKRLTMLELLEKYPACEMKFSEFIALLPSIRPRYYSISSSPRVDEKQASITVSVVSGPAWSGYGEYKGIASNYLAMLQEGDTITCFISTPQSEFTLPKDPETPLIMVGPGTGVAPFRGFVQARKQLKEQGQSLGEAHLYFGCRSPHEDYLYQEELENAQSEGIITLHTAFSRMPNQPKTYVQHVMEQDGKKLIELLDQGAHFYICGDGSQMAPAVEATLMKSYADVHQVSEADARLWLQQLEEKGRYAKDVWLG

SEQ ID NO: 617 - DNA, 3147 bp, synthetic construct
  misc_feature 1..3147: note = variant of P450 oxidase from Bacillus megaterium
  source 1..3147: mol_type = other DNA
atgacaattaaggaaatgcctcagcctaagacgtttggagaacttaaaaatttaccgttattaaacacagataaaccggttcaagctttgatgcgtattgcggatgaattaggagaaatctttaaattcgaggcgcctggtagcgtaacgcgctatttatcaagtcagcgtctaattaaagaagcatgcgatgaatcacgctttgataaaaacttaagtcaagcgcttaaatttgcacgtgattttgttggagacgggctgtctacaagctggacgcatgaaccgaattggaaaaaagcgcataatatcttagttccaagctttagtcagcatgcaatggggcgttatcatgcgatgatggtcgatatcgccgtgcagcttgttcaaaagtgggagcgtctaaatgcagatgagcatattgaagtatcggaagacatgacacgtttaacgcttgatacaattggtctttgcggctttaactatcgctttaacagcttttaccgagatcagcctcatccatttattgtgagtgtggttcgtgcactggatgaagtaatgaacaagctgcagcgagcaaatccagacgacccagcttatgatgaaaacaagcgccagtgtcaagaagatatcaaggtgatgaacgactatgtagataaaattattgcagatcgcaaagcaaggggtgaacaaagtcatgatttattaacgcagatgctaaacggaaaagatccagaaacgggtgagccgcttgatgacgggaacattcgtcagcaaattattacattcttaattgcgggacaccaaacgacaagtggtcttttatcatttgcgctgtatttcttagtgaaaaatccacatgtattacaaaaagtagcagaagaagcagcacgagttctagtagatcctgttccaagctacaaacaagtcaaacagcttaaatatgttggcatggtcttaaacgaagcgctgcgcttatggccagtagcgcctatgttttccctatatgcaaaagaagatacggtgcttggaggagaatatcctttaacgaaaggcgacgaagtaatggttctggtgcctcagcttcaccgtgataaaacaatttggggagacgatgtggaggagttccgtccagagcgttttgaaaatccaagtgcgattccgcagcatgcgtttaaaccgtttggaaacggtcagcgtgcgtgtatcggtcagcagttcgctcttcatgaagcaacgctggtacttggtatgatgctaaaacactttgactttgaagatcatacaaactacgagctcgttattaaagaatcgcggacgttaaaacctgaaggctttgtggtaaaagcaaaatcgaaaggcattccgcttggcggtattccttcacctagcactgaacagtctgctaaaaaagtacgcaaaaaggcagaaaacgctcataatacgccgctgcttgtgctatacggttcaaatgcgggaacagctgaaggaacggcgcgtgatttagcagatattgcaatgagcaaaggatttgcaccgcaggtcgcaacgcttgattcacacgccggtaatcttccgcgcgaaggagctgtattaattgtaacggcgtcttataacggtcatccgcctgataacgcaaagcaatttgtcgactggttagaccaagcgtctgctgatgaagtaaaaggcgttcgctactccgtatttggatgcggcgataaaaattgggcggggacgtatcaaaaagtgcctgcttttatcgatgaaacgcttgccgctaaaggggcagaaaacatcgctgaccgcggtgaagcagatgcaagcgacgactttgaaggcgcgtatgaagaatggcgtgatcatatgtggagtgacgtagcagcctactttaacctcgacattgaaaacagtgaagataataaatctactctttcacttcaatttgtcgacagcgccgcggatatgccgcttgcgaaaatgcacggtgcgttttcaacgaacgtcgtagcaagcaaagaacttcaacagccaggcagtgcacgaagcacgcgacatcttgaaattgaacttccaaaagaagcttcttatcaagaaggagatcatttaggtgttattcctcgcaactatgaaggaatagtaaaccgtgtaacagcaaggttcggcctaagcgcatcacagcaaatccgtctggaagcagaagaagaaaaattagctcatttgccactcgctaaaacagtatccgtagaagagcttctgcaatacgtggagcttcaagatcctgttacgcgcacgcagcttcgcgcaatggctgctaaaacggtctgcccgccgcataaagtagagcttgaagccttgcttgaaaagcaagcctacaaagaacaagtgctggcaaaacgtttaacaatgcttgaactgcttgaaaaatacccggcgtgtgaaatgaaattcagcgaatttatcgcccttctgccaagcatacgcccgcgctattactcgatttcttcatcacctcgtgtcgatgaaaaacaagcaagcatcacggtcagcgttgtctcaggaccggcgtggagcggatatggagaatataaaggaattgcgtcgaactatcttgccgagctgcaagaaggagatacgattacgtgctttatttccacaccgcagtcagaatttacgctgccaaaagaccctgaaacgccgcttatcatggtcggaccgggaacaggcgtcgcgccgtttagaggctttgtgcaggcgcgcaaacagctaaaagaacaaggacagtcacttggagaagcacatttatacttcggctgccgttcacctcatgaagactatctgtatcaagaagagcttgaaaacgcccaaagcgaaggcatcattacgcttcataccgctttttctcgcatgccaaatcagccgaaaacatacgttcagcacgtaatggaacaagacggcaagaaattgattgaacttcttgatcaaggagcgcacttctatatttgcggagacggaagccaaatggcacctgccgttgaagcaacgcttatgaaaagctatgctgacgttcaccaagtgagtgaagcagacgctcgcttatggctgcagcagctagaagaaaaaggccgatacgcaaaagacgtgtggctgggg

SEQ ID NO: 618 - protein, 1049 aa, synthetic construct
  REGION 1..1049: note = variant of P450 oxidase from Bacillus megaterium
MTIKEMPQPKTFGELKNLPLLNTDKPVQALMRIADELGEIFKFEAPGSVTRYLSSQRLIKEACDESRFDKNLSQALKFARDFVGDGLSTSWTHEPNWKKAHNILVPSFSQHAMGRYHAMMVDIAVQLVQKWERLNADEHIEVSEDMTRLTLDTIGLCGFNYRFNSFYRDQPHPFIVSVVRALDEVMNKLQRANPDDPAYDENKRQCQEDIKVMNDYVDKIIADRKARGEQSHDLLTQMLNGKDPETGEPLDDGNIRQQIITFLIAGHQTTSGLLSFALYFLVKNPHVLQKVAEEAARVLVDPVPSYKQVKQLKYVGMVLNEALRLWPVAPMFSLYAKEDTVLGGEYPLTKGDEVMVLVPQLHRDKTIWGDDVEEFRPERFENPSAIPQHAFKPFGNGQRACIGQQFALHEATLVLGMMLKHFDFEDHTNYELVIKESRTLKPEGFVVKAKSKGIPLGGIPSPSTEQSAKKVRKKAENAHNTPLLVLYGSNAGTAEGTARDLADIAMSKGFAPQVATLDSHAGNLPREGAVLIVTASYNGHPPDNAKQFVDWLDQASADEVKGVRYSVFGCGDKNWAGTYQKVPAFIDETLAAKGAENIADRGEADASDDFEGAYEEWRDHMWSDVAAYFNLDIENSEDNKSTLSLQFVDSAADMPLAKMHGAFSTNVVASKELQQPGSARSTRHLEIELPKEASYQEGDHLGVIPRNYEGIVNRVTARFGLSASQQIRLEAEEEKLAHLPLAKTVSVEELLQYVELQDPVTRTQLRAMAAKTVCPPHKVELEALLEKQAYKEQVLAKRLTMLELLEKYPACEMKFSEFIALLPSIRPRYYSISSSPRVDEKQASITVSVVSGPAWSGYGEYKGIASNYLAELQEGDTITCFISTPQSEFTLPKDPETPLIMVGPGTGVAPFRGFVQARKQLKEQGQSLGEAHLYFGCRSPHEDYLYQEELENAQSEGIITLHTAFSRMPNQPKTYVQHVMEQDGKKLIELLDQGAHFYICGDGSQMAPAVEATLMKSYADVHQVSEADARLWLQQLEEKGRYAKDVWLG

SEQ ID NO: 619 - DNA, 3147 bp, synthetic construct
  misc_feature 1..3147: note = variant of P450 oxidase from Bacillus megaterium
  source 1..3147: mol_type = other DNA
atgacaattaaggaaatgcctcagcctaagacgtttggagaacttaaaaatttaccgttattaaacacagataaaccggttcaagctttgatgcgtattgcggatgaattaggagaaatctttaaattcgaggcgcctggtagcgtaacgcgctatttatcaagtcagcgtctaattaaagaagcatgcgatgaatcacgctttgataaaaacttaagtcaagcgcttaaatttgcacgtgattttgttggagacgggctgtctacaagctggacgcatgaaccgaattggaaaaaagcgcataatatcttagttccaagctttagtcagcatgcaatggggcgttatcatgcgatgatggtcgatatcgccgtgcagcttgttcaaaagtgggagcgtctaaatgcagatgagcatattgaagtatcggaagacatgacacgtttaacgcttgatacaattggtctttgcggctttaactatcgctttaacagcttttaccgagatcagcctcatccatttattgtgagtgtggttcgtgcactggatgaagtaatgaacaagctgcagcgagcaaatccagacgacccagcttatgatgaaaacaagcgccagtgtcaagaagatatcaaggtgatgaacgactatgtagataaaattattgcagatcgcaaagcaaggggtgaacaaagtcatgatttattaacgcagatgctaaacggaaaagatccagaaacgggtgagccgcttgatgacgggaacattcgtcagcaaattattacattcttaattgcgggacaccaaacgacaagtggtcttttatcatttgcgctgtatttcttagtgaaaaatccacatgtattacaaaaagtagcagaagaagcagcacgagttctagtagatcctgttccaagctacaaacaagtcaaacagcttaaatatgttggcatggtcttaaacgaagcgctgcgcttatggccagtagcgcctatgttttccctatatgcaaaagaagatacggtgcttggaggagaatatcctttaacgaaaggcgacgaagtaatggttctggtgcctcagcttcaccgtgataaaacaatttggggagacgatgtggaggagttccgtccagagcgttttgaaaatccaagtgcgattccgcagcatgcgtttaaaccgtttggaaacggtcagcgtgcgtgtatcggtcagcagttcgctcttcatgaagcaacactggtacttggtatgatgctaaaacactttgactttgaagatcatacaaactacgagctcgttattaaagaatcgcggacgttaaaacctgaaggctttgtggtaaaagcaaaatcgaaaggcattccgcttggcggtattccttcacctagcactgaacagtctgctaaaaaagtacgcaaaaaggcagaaaacgctcataatacgccgctgcttgtgctatacggttcaaatgcgggaacagctgaaggaacggcgcgtgatttagcagatattgcaatgagcaaaggatttgcaccgcaggtcgcaacgcttgattcacacgccggtaatcttccgcgcgaaggagctgtattaattgtaacggcgtcttataacggtcatccgcctgataacgcaaagcaatttgtcgactggttagaccaagcgtctgctgatgaagtaaaaggcgttcgctactccgtatttggatgcggcgataaaaattgggcggggacgtatcaaaaagtgcctgcttttatcgatgaaacgcttgccgctaaaggggcagaaaacatcgctgaccgcggtgaagcagatgcaagcgacgactttgaaggcacatatgaagaatggcgtgatcatatgtggagtgacgtagcagcctactttaacctcgacattgaaaacagtgaagataataaatctactctttcacttcaatttgtcgacagcgccgcggatatgccgcttgcgaaaatgcacggtgcgggttcaacgaacgtcgtagcaagcaaagaacttcaacagccaggcagtgcacgaagcacgcgacatcttgaaattgaacttccaaaagaagcttcttatcaagaaggagatcatttaggtgttattcctcgcaactatgaaggaatagtaaaccgtgtaacagcaaggttcggcctaagcgcatcacagcaaatccgtctggaagcagaagaagaaaaattagctcatttgccactcgctaaaacagtatccgtagaagagcttctgcaatacgtggagcttcaagatcctgttacgcgcacgcagcttcgcgcaatggctgctaaaacggtctgcccgccgcataaagtagagcttgaagccttgcttgaaaagcaagcctacaaagaacaagtgctggcaaaacgtttaacaatgcttgaactgcttgaaaaatacccggcgtgtgaaatgaaattcagcgaatttatcgcccttctgccaagcatacgcccgcgctattactcgatttcttcatcacctcgtgtcgatgaaaaacaagcaagcatcacggtcagcgttgtctcaggaccggcgtggagcggatatggagaatataaaggaattgcgtcgaactatcttgccgagctgcaagaaggagatacgattacgtgctttatttccacaccgcagtcagaatttacgctgccaaaagaccctgaaacgccgcttatcatggtcggaccgggaacaggcgtcgcgccgtttagaggctttgtgcaggcgcgcaaacagctaaaagaacaaggacagtcacttggagaagcacatttatacttcggctgccgttcacctcatgaagactatctgtatcaagaagagcttgaaaacgcccaaagcgaaggcatcattacgcttcataccgctttttctcgcatgccaaatcagccgaaaacatacgttcagcacgtaatggaacaagacggcaagaaattgattgaacttcttgatcaaggagcgcacttctatatttgcggagacggaagccaaatggcacctgccgttgaagcaacgcttatgaaaagctatgctgacgttcaccaagtgagtgaagcagacgctcgcttatggctgcagcagctagaagaaaaaggccgatacgcaaaagacgtgtggctgggg

SEQ ID NO: 620 - protein, 1049 aa, synthetic construct
  REGION 1..1049: note = variant of P450 oxidase from Bacillus megaterium
MTIKEMPQPKTFGELKNLPLLNTDKPVQALMRIADELGEIFKFEAPGSVTRYLSSQRLIKEACDESRFDKNLSQALKFARDFVGDGLSTSWTHEPNWKKAHNILVPSFSQHAMGRYHAMMVDIAVQLVQKWERLNADEHIEVSEDMTRLTLDTIGLCGFNYRFNSFYRDQPHPFIVSVVRALDEVMNKLQRANPDDPAYDENKRQCQEDIKVMNDYVDKIIADRKARGEQSHDLLTQMLNGKDPETGEPLDDGNIRQQIITFLIAGHQTTSGLLSFALYFLVKNPHVLQKVAEEAARVLVDPVPSYKQVKQLKYVGMVLNEALRLWPVAPMFSLYAKEDTVLGGEYPLTKGDEVMVLVPQLHRDKTIWGDDVEEFRPERFENPSAIPQHAFKPFGNGQRACIGQQFALHEATLVLGMMLKHFDFEDHTNYELVIKESRTLKPEGFVVKAKSKGIPLGGIPSPSTEQSAKKVRKKAENAHNTPLLVLYGSNAGTAEGTARDLADIAMSKGFAPQVATLDSHAGNLPREGAVLIVTASYNGHPPDNAKQFVDWLDQASADEVKGVRYSVFGCGDKNWAGTYQKVPAFIDETLAAKGAENIADRGEADASDDFEGTYEEWRDHMWSDVAAYFNLDIENSEDNKSTLSLQFVDSAADMPLAKMHGAGSTNVVASKELQQPGSARSTRHLEIELPKEASYQEGDHLGVIPRNYEGIVNRVTARFGLSASQQIRLEAEEEKLAHLPLAKTVSVEELLQYVELQDPVTRTQLRAMAAKTVCPPHKVELEALLEKQAYKEQVLAKRLTMLELLEKYPACEMKFSEFIALLPSIRPRYYSISSSPRVDEKQASITVSVVSGPAWSGYGEYKGIASNYLAELQEGDTITCFISTPQSEFTLPKDPETPLIMVGPGTGVAPFRGFVQARKQLKEQGQSLGEAHLYFGCRSPHEDYLYQEELENAQSEGIITLHTAFSRMPNQPKTYVQHVMEQDGKKLIELLDQGAHFYICGDGSQMAPAVEATLMKSYADVHQVSEADARLWLQQLEEKGRYAKDVWLG

SEQ ID NO: 621 - DNA, 3147 bp, synthetic construct
  misc_feature 1..3147: note = variant of P450 oxidase from Bacillus megaterium
  source 1..3147: mol_type = other DNA
atgacaattaaggaaatgcctcagcctaagacgtttggagaacttaaaaatttaccgttattaaacacagataaaccggttcaagctttgatgcgtattgcggatgaattaggagaaatctttaaattcgaggcgcctggtagcgtaacgcgctatttatcaagtcagcgtctaattaaagaagcatgcgatgaatcacgctttgataaaaacttaagtcaagcgcttaaatttgcacgtgattttgttggagacgggctgtctacaagctggacgcatgaaccgaattggaaaaaagcgcataatatcttagttccaagctttagtcagcatgcaatggggcgttatcatgcgatgatggtcgatatcgccgtgcagcttgttcaaaagtgggagcgtctaaatgcagatgagcatattgaagtatcggaagacatgacacgtttaacgcttgatacaattggtctttgcggctttaactatcgctttaacagcttttaccgagatcagcctcatccatttattgtgagtgtggttcgtgcactggatgaagtaatgaacaagctgcagcgagcaaatccagacgacccagcttatgatgaaaacaagcgccagtgtcaagaagatatcaaggtgatgaacgactatgtagataaaattattgcagatcgcaaagcaaggggtgaacaaagtcatgatttattaacgcagatgctaaacggaaaagatccagaaacgggtgagccgcttgatgacgggaacattcgtcagcaaattattacattcttaattgcgggacaccaaacgacaagtggtcttttatcatttgcgctgtatttcttagtgaaaaatccacatgtattacaaaaagtagcagaagaagcagcacgagttctagtagatcctgttccaagctacaaacaagtcaaacagcttaaatatgttggcatggtcttaaacgaagcgctgcgcttatggccagtagcgcctatgttttccctatatgcaaaagaagatacggtgcttggaggagaatatcctttaacgaaaggcgacgaagtaatggttctggtgcctcagcttcaccgtgataaaacaatttggggagacgatgtggaggagttccgtccagagcgttttgaaaatccaagtgcgattccgcagcatgcgtttaaaccgtttggaaacggtcagcgtgcgtgtatcggtcagcagttcgctcttcatgaagcaacgctggtacttggtatgatgctaaaacactttgactttgaagatcatacaaactacgagctcgttattaaagaatcgcggacgttaaaacctgaaggctttgtggtaaaagcaaaatcgaaaggcattccgcttggcggtattccttcacctagcactgaacagtctgctaaaaaagtacgcaaaaaggcagaaaacgctcataatacgccgctgcttgtgctatacggttcaaatgcgggaacagctgaaggaacggcgcgtgatttagcagatattgcaatgagcaaaggatttgcaccgcaggtcgcaacgcttgattcacacgccggtaatcttccgcgcgaaggagctgtattaattgtaacggcgtcttataacggtcatccgcctgataacgcaaagcaatttgtcgactggttagaccaagcgtctgctgatgaagtaaaaggcgttcgctactccgtatttggatgcggcgataaaaattgggcggggacgtatcaaaaagtgcctgcttttatcgatgaaacgcttgccgctaaaggggcagaaaacatcgctgaccgcggtgaagcagatgcaagcgacgactttgaaggcacatatgaagaatggcgtgatcatatgtggagtgacgtagcagcctactttaacctcgacattgaaaacagtgaagataataaatctactctttcacttcaatttgtcgacagcgccgcggatatgccgcttgcgaaaatgcacggtgcgttttcaacgaacgtcgtagcaagcaaagaacttcaacagccaggcagtgcacgaagcacgcgacatcttgaaattgaacttccaaaagaagcttcttatcaagaaggagatcatttaggtgttattcctcgcaactatgaaggaatagtaaaccgtgtaacagcaaggttcggcctaagcgcatcacagcaaatccgtctggaagcagaagaagaaaaattagctcatttgccactcgctaaaacagtatccgtagaagagcttctgcaatacgtggagcttcaagatcctgttacgcgcacgcagcttcgcgcaatggctgctaaaacggtctgcccgccgcataaagtagagcttgaagccttgcttgaaaagcaagcctacaaagaacaagtgctggcaaaacgtttaacaatgcttgaactgcttgaaaaatacccggcgtgtgaaatgaaattcagcgaatttatcgcccttctgccaagcatacgcccgcgctattactcgatttcttcatcacctcgtgtcgatgaaaaacaagcaagcatcacggtcagcgttgtctcaggaccggcgtggagcggatatggaaggtataaaggaattgcgtcgaactatcttgccgagctgcaagaaggagatacgattacgtgctttatttccacaccgcagtcagaatttacgctgccaaaagaccctgaaacgccgcttatcatggtcggaccgggaacaggcgtcgcgccgtttagaggctttgtgcaggcgcgcaaacagctaaaagaacaaggacagtcacttggagaagcacatttatacttcggctgccgttcacctcatgaagactatctgtatcaagaagagcttgaaaacgcccaaagcgaaggcatcattacgcttcataccgctttttctcgcatgccaaatcagccgaaaacatacgttcagcacgtaatggaacaagacggcaagaaattgattgaacttcttgatcaaggagcgcacttctatatttgcggagacggaagccaaatggcacctgccgttgaagcaacgcttatgaaaagctatgctgacgttcaccaagtgagtgaagcagacgctcgcttatggctgcagcagctagaagaaaaaggccgatacgcaaaagacgtgtggctgggg

SEQ ID NO: 622 - protein, 1049 aa, synthetic construct
  REGION 1..1049: note = variant of P450 oxidase from Bacillus megaterium
MTIKEMPQPKTFGELKNLPLLNTDKPVQALMRIADELGEIFKFEAPGSVTRYLSSQRLIKEACDESRFDKNLSQALKFARDFVGDGLSTSWTHEPNWKKAHNILVPSFSQHAMGRYHAMMVDIAVQLVQKWERLNADEHIEVSEDMTRLTLDTIGLCGFNYRFNSFYRDQPHPFIVSVVRALDEVMNKLQRANPDDPAYDENKRQCQEDIKVMNDYVDKIIADRKARGEQSHDLLTQMLNGKDPETGEPLDDGNIRQQIITFLIAGHQTTSGLLSFALYFLVKNPHVLQKVAEEAARVLVDPVPSYKQVKQLKYVGMVLNEALRLWPVAPMFSLYAKEDTVLGGEYPLTKGDEVMVLVPQLHRDKTIWGDDVEEFRPERFENPSAIPQHAFKPFGNGQRACIGQQFALHEATLVLGMMLKHFDFEDHTNYELVIKESRTLKPEGFVVKAKSKGIPLGGIPSPSTEQSAKKVRKKAENAHNTPLLVLYGSNAGTAEGTARDLADIAMSKGFAPQVATLDSHAGNLPREGAVLIVTASYNGHPPDNAKQFVDWLDQASADEVKGVRYSVFGCGDKNWAGTYQKVPAFIDETLAAKGAENIADRGEADASDDFEGTYEEWRDHMWSDVAAYFNLDIENSEDNKSTLSLQFVDSAADMPLAKMHGAFSTNVVASKELQQPGSARSTRHLEIELPKEASYQEGDHLGVIPRNYEGIVNRVTARFGLSASQQIRLEAEEEKLAHLPLAKTVSVEELLQYVELQDPVTRTQLRAMAAKTVCPPHKVELEALLEKQAYKEQVLAKRLTMLELLEKYPACEMKFSEFIALLPSIRPRYYSISSSPRVDEKQASITVSVVSGPAWSGYGRYKGIASNYLAELQEGDTITCFISTPQSEFTLPKDPETPLIMVGPGTGVAPFRGFVQARKQLKEQGQSLGEAHLYFGCRSPHEDYLYQEELENAQSEGIITLHTAFSRMPNQPKTYVQHVMEQDGKKLIELLDQGAHFYICGDGSQMAPAVEATLMKSYADVHQVSEADARLWLQQLEEKGRYAKDVWLG

SEQ ID NO: 623 - DNA, 3147 bp, synthetic construct
  misc_feature 1..3147: note = variant of P450 oxidase from Bacillus megaterium
  source 1..3147: mol_type = other DNA
atgacaattaaggaaatgcctcagcctaagacgtttggagaacttaaaaatttaccgttattaaacacagataaaccggttcaagctttgatgcgtattgcggatgaattaggagaaatctttaaattcgaggcgcctggtagcgtaacgcgctatttatcaagtcagcgtctaattaaagaagcatgcgatgaatcacgctttgataaaaacttaagtcaagcgcttaaatttgcacgtgattttgttggagacgggctgtctacaagctggacgcatgaaccgaattggaaaaaagcgcataatatcttagttccaagctttagtcagcatgcaatggggcgttatcatgcgatgatggtcgatatcgccgtgcagcttgttcaaaagtgggagcgtctaaatgcagatgagcatattgaagtatcggaagacatgacacgtttaacgcttgatacaattggtctttgcggctttaactatcgctttaacagcttttaccgagatcagcctcatccatttattgtgagtgtggttcgtgcactggatgaagtaatgaacaagctgcagcgagcaaatccagacgacccagcttatgatgaaaacaagcgccagtgtcaagaagatatcaaggtgatgaacgactatgtagataaaattattgcagatcgcaaagcaaggggtgaacaaagtcatgatttattaacgcagatgctaaacggaaaagatccagaaacgggtgagccgcttgatgacgggaacattcgtcagcaaattattacattcttaattgcgggacaccaaacgacaagtggtcttttatcatttgcgctgtatttcttagtgaaaaatccacatgtattacaaaaagtagcagaagaagcagcacgagttctagtagatcctgttccaagctacaaacaagtcaaacagcttaaatatgttggcatggtcttaaacgaagcgctgcgcttatggccagtagcgcctatgttttccctatatgcaaaagaagatacggtgcttggaggagaatatcctttaacgaaaggcgacgaagtaatggttctggtgcctcagcttcaccgtgataaaacaatttggggagacgatgtggaggagttccgtccagagcgttttgaaaatccaagtgcgattccgcagcatgcgtttaaaccgtttggaaacggtcagcgtgcgtgtatcggtcagcagttcgctcttcatgaagcaacgctggtacttggtatgatgctaaaacactttgactttgaagatcatacaaactacgagctcgttattaaagaatcgcggacgttaaaacctgaaggctttgtggtaaaagcaaaatcgaaaggcattccgcttggcggtattccttcacctagcactgaacagtctgctaaaaaagtacgcaaaaaggcagaaaacgctcataatacgccgctgcttgtgctatacggttcaaatgcgggaacagctgaaggaacggcgcgtgatttagcagatattgcaatgagcaaaggatttgcaccgcaggtcgcaacgcttgattcacacgccggtaatcttccgcgcgaaggagctgtattaattgtaacggcgtcttataacggtcatccgcctgataacgcaaagcaatttgtcgactggttagaccaagcgtctgctgatgaagtaaaaggcgttcgctactccgtatttggatgcggcgataaaaattgggcggggacgtatcaaaaagtgcctgcttttatcgatgaaacgcttgccgctaaaggggcagaaaacatcgctgaccgcggtgaagcagatgcaagcgacgactttgaaggcacatatgaagaatggcgtgatcatatgtggagtgacgtagcagcctactttaacctcgacattgaaaacagtgaagataataaatctactctttcacttcaatttgtcgacagcgccgcggatatgccgcttgcgaaaatgcacggtgcgttttcaacgaacgtcgtagcaagcaaagaacttcaacagccaggcagtgcacgaagcacgcgacatcttgaaattgaacttccaaaagaagcttcttatcaagaaggagatcatttaggtgttattcctcgcaactatgaaggaatagtaaaccgtgtaacagcaaggttcggcctaagcgcatcacagcaaatccgtctggaagcagaagaagaaaaattagctcatttgccactcgctaaaacagtatccgtagaagagcttctgcaatacgtggagcttcaagatcctgttacgcgcacgcagcttcgcgcaatggctgctaaaacggtctgcccgccgcataaagtagagcttgaagccttgcttgaaaagcaagcctacaaagaacaagtgctggcaaaacgtttaacaatgcttgaactgcttaataaatacccggcgtgtgaaatgaaattcagcgaatttatcgcccttctgccaagcatacgcccgcgctattactcgatttcttcatcacctcgtgtcgatgaaaaacaagcaagcatcacggtcagcgttgtctcaggaccggcgtggagcggatatggagaatataaaggaattgcgtcgaactatcttgccgagctgcaagaaggagatacgattacgtgctttatttccacaccgcagtcagaatttacgctgccaaaagaccctgaaacgccgcttatcatggtcggaccgggaacaggcgtcgcgccgtttagaggctttgtgcaggcgcgcaaacagctaaaagaacaaggacagtcacttggagaagcacatttatacttcggctgccgttcacctcatgaagactatctgtatcaagaagagcttgaaaacgcccaaagcgaaggcatcattacgcttcataccgctttttctcgcatgccaaatcagccgaaaacatacgttcagcacgtaatggaacaagacggcaagaaattgattgaacttcttgatcaaggagcgcacttctatatttgcggagacggaagccaaatggcacctgccgttgaagcaacgcttatgaaaagctatgctgacgttcaccaagtgagtgaagcagacgctcgcttatggctgcagcagctagaagaaaaaggccgatacgcaaaagacgtgtggctgggg

SEQ ID NO: 624 - protein, 1049 aa, synthetic construct
  REGION 1..1049: note = variant of P450 oxidase from Bacillus megaterium
MTIKEMPQPKTFGELKNLPLLNTDKPVQALMRIADELGEIFKFEAPGSVTRYLSSQRLIKEACDESRFDKNLSQALKFARDFVGDGLSTSWTHEPNWKKAHNILVPSFSQHAMGRYHAMMVDIAVQLVQKWERLNADEHIEVSEDMTRLTLDTIGLCGFNYRFNSFYRDQPHPFIVSVVRALDEVMNKLQRANPDDPAYDENKRQCQEDIKVMNDYVDKIIADRKARGEQSHDLLTQMLNGKDPETGEPLDDGNIRQQIITFLIAGHQTTSGLLSFALYFLVKNPHVLQKVAEEAARVLVDPVPSYKQVKQLKYVGMVLNEALRLWPVAPMFSLYAKEDTVLGGEYPLTKGDEVMVLVPQLHRDKTIWGDDVEEFRPERFENPSAIPQHAFKPFGNGQRACIGQQFALHEATLVLGMMLKHFDFEDHTNYELVIKESRTLKPEGFVVKAKSKGIPLGGIPSPSTEQSAKKVRKKAENAHNTPLLVLYGSNAGTAEGTARDLADIAMSKGFAPQVATLDSHAGNLPREGAVLIVTASYNGHPPDNAKQFVDWLDQASADEVKGVRYSVFGCGDKNWAGTYQKVPAFIDETLAAKGAENIADRGEADASDDFEGTYEEWRDHMWSDVAAYFNLDIENSEDNKSTLSLQFVDSAADMPLAKMHGAFSTNVVASKELQQPGSARSTRHLEIELPKEASYQEGDHLGVIPRNYEGIVNRVTARFGLSASQQIRLEAEEEKLAHLPLAKTVSVEELLQYVELQDPVTRTQLRAMAAKTVCPPHKVELEALLEKQAYKEQVLAKRLTMLELLNKYPACEMKFSEFIALLPSIRPRYYSISSSPRVDEKQASITVSVVSGPAWSGYGEYKGIASNYLAELQEGDTITCFISTPQSEFTLPKDPETPLIMVGPGTGVAPFRGFVQARKQLKEQGQSLGEAHLYFGCRSPHEDYLYQEELENAQSEGIITLHTAFSRMPNQPKTYVQHVMEQDGKKLIELLDQGAHFYICGDGSQMAPAVEATLMKSYADVHQVSEADARLWLQQLEEKGRYAKDVWLG

SEQ ID NO: 625 - DNA, 3147 bp, synthetic construct
  misc_feature 1..3147: note = variant of P450 oxidase from Bacillus megaterium
  source 1..3147: mol_type = other DNA
atgacaattaaggaaatgcctcagcctaagacgtttggagaacttaaaaatttaccgttattaaacacagataaaccggttcaagctttgatgcgtattgcggatgaattaggagaaatctttaaattcgaggcgcctggtagcgtaacgcgctatttatcaagtcagcgtctaattaaagaagcatgcgatgaatcacgctttgataaaaacttaagtcaagcgcttaaatttgcacgtgattttgttggagacgggctgtctacaagctggacgcatgaaccgaattggaaaaaagcgcataatatcttagttccaagctttagtcagcatgcaatggggcgttatcatgcgatgatggtcgatatcgccgtgcagcttgttcaaaagtgggagcgtctaaatgcagatgagcatattgaagtatcggaagacatgacacgtttaacgcttgatacaattggtctttgcggctttaactatcgctttaacagcttttaccgagatcagcctcatccatttattgtgagtgtggttcgtgcactggatgaagtaatgaacaagctgcagcgagcaaatccagacgacccagcttatgatgaaaacaagcgccagtgtcaagaagatatcaaggtgatgaacgactatgtagataaaattattgcagatcgcaaagcaaggggtgaacaaagtcatgatttattaacgcagatgctaaacggaaaagatccagaaacgggtgagccgcttgatgacgggaacattcgtcagcaaattattacattcttaattgcgggacaccaaacgacaagtggtcttttatcatttgcgctgtatttcttagtgaaaaatccacatgtattacaaaaagtagcagaagaagcagcacgagttctagtagatcctgttccaagctacaaacaagtcaaacagcttaaatatgttggcatggtcttaaacgaagcgctgcgcttatggccagtagcgcctatgttttccctatatgcaaaagaagatacggtgcttggaggagaatatcctttaacgaaaggcgacgaagtaatggttctggtgcctcagcttcaccgtgataaaacaatttggggagacgatgtggaggagttccgtccagagcgttttgaaaatccaagtgcgattccgcagcatgcgtttaaaccgtttggaaacggtcagcgtgcgtgtatcggtcagcagttcgctcttcatgaagcaacgctggtacttggtatgatgctaaaacactttgactttgaagatcatacaaactacgagctcgttattaaagaatcgcggacgttaaaacctgaaggctttgtggtaaaagcaaaatcgaaaggcattccgcttggcggtattccttcacctagcactgaacagtctgctaaaaaagtacgcaaaaaggcagaaaacgctcataatacgccgctgcttgtgctatacggttcaaatgcgggaacagctgaaggaacggcgcgtgatttagcagatattgcaatgagcaaaggatttgcaccgcaggtcgcaacgcttgattcacacgccggtaatcttccgcgcgaaggagctgtattaattgtaacggcgtcttataacggtcatccgcctgataacgcaaagcaatttgtcgactggttagaccaagcgtctgctgatgaagtaaaaggcgttcgctactccgtatttggatgcggcgataaaaattgggcggggacgtatcaaaaagtgcctgcttttatcgatgaaacgcttgccgctaaaggggcagaaaacatcgctgaccgcggtgaagcagatgcaagcgacgactttgaaggcacatatgaagaatggcgtgatcatatgtggagtgacgtagcagcctactttaacctcgacattgaaaacagtgaagataataaatctactctttcacttcaatttgtcgacagcgccgcggatatgccgcttgcgaaaatgcacggtgcgttttcaacgaacgtcgtagcaagcaaagaacttcaacagccaggcagtgcacgaagcacgcgacatcttgaaattgaacttccaaaagaagcttcttatcaagaaggagatcatttaggtgttattcctcgcaactatgaaggaatagtaaaccgtgtaacagcaaggttcggcctaagcgcatcacagcaaatccgtctggaagcagaagaagaaaaattagctcatttgccactcgctaaaacagtatccgtagaagagcttctgcaatacgtggagcttcaagatcctgttacgcgcacgcagcttcgcgcaatggctgctaaaacggtctgcccgccgcataaagtagagcttgaagccttgcttgaaaagcaagcctacaaagaacaagtgctggcaaaacgtttaacaatgcttgaactgcttgaaaaatacccggcgtgtgaaatgaaattcagcgaatttatcgcccttctgccaagcatacgcccgcgctattactcgatttcttcatcacctcgtgtcgatgaaaaacaagcaagcatcacggtcagcgttgtctcaggaccggcgtggagcggatatggagaatataaaggaattgcgtcgaactatcttgccgagctgcaagaaggagatacgattacgtgctttatttccacaccgcagtcagaatttacgctgccaaaagaccctgaaacgccgcttatcatggtcggaccgggaacaggcgtcgcgccgtttagaggctttgtgcaggcgcgcaaacagctaaaagaacaaggacagtcacttggagaagcacatttatacttcggctgccgttcacctcatgaagactatctgtatcaagaagagcttgaaaacgcccaaagcgaaggcatcattacgcttcataccgctttttctcgcatgccaaatcagccgaaaacatacgttcagcacgtaatggaacaagacggcaagaaattgattgaacttcttgatcaaggagcgcacttctatatttgcggagacggaagccaaatggcacctgccgttgaagcaacgcttatgaaaagctatgctgacgttcaccaagtgggggaagcagacgctcgcttatggctgcagcagctagaagaaaaaggccgatacgcaaaagacgtgtggctgggg

SEQ ID NO: 626 - protein, 1049 aa, synthetic construct
  REGION 1..1049: note = variant of P450 oxidase from Bacillus megaterium
MTIKEMPQPKTFGELKNLPLLNTDKPVQALMRIADELGEIFKFEAPGSVTRYLSSQRLIKEACDESRFDKNLSQALKFARDFVGDGLSTSWTHEPNWKKAHNILVPSFSQHAMGRYHAMMVDIAVQLVQKWERLNADEHIEVSEDMTRLTLDTIGLCGFNYRFNSFYRDQPHPFIVSVVRALDEVMNKLQRANPDDPAYDENKRQCQEDIKVMNDYVDKIIADRKARGEQSHDLLTQMLNGKDPETGEPLDDGNIRQQIITFLIAGHQTTSGLLSFALYFLVKNPHVLQKVAEEAARVLVDPVPSYKQVKQLKYVGMVLNEALRLWPVAPMFSLYAKEDTVLGGEYPLTKGDEVMVLVPQLHRDKTIWGDDVEEFRPERFENPSAIPQHAFKPFGNGQRACIGQQFALHEATLVLGMMLKHFDFEDHTNYELVIKESRTLKPEGFVVKAKSKGIPLGGIPSPSTEQSAKKVRKKAENAHNTPLLVLYGSNAGTAEGTARDLADIAMSKGFAPQVATLDSHAGNLPREGAVLIVTASYNGHPPDNAKQFVDWLDQASADEVKGVRYSVFGCGDKNWAGTYQKVPAFIDETLAAKGAENIADRGEADASDDFEGTYEEWRDHMWSDVAAYFNLDIENSEDNKSTLSLQFVDSAADMPLAKMHGAFSTNVVASKELQQPGSARSTRHLEIELPKEASYQEGDHLGVIPRNYEGIVNRVTARFGLSASQQIRLEAEEEKLAHLPLAKTVSVEELLQYVELQDPVTRTQLRAMAAKTVCPPHKVELEALLEKQAYKEQVLAKRLTMLELLEKYPACEMKFSEFIALLPSIRPRYYSISSSPRVDEKQASITVSVVSGPAWSGYGEYKGIASNYLAELQEGDTITCFISTPQSEFTLPKDPETPLIMVGPGTGVAPFRGFVQARKQLKEQGQSLGEAHLYFGCRSPHEDYLYQEELENAQSEGIITLHTAFSRMPNQPKTYVQHVMEQDGKKLIELLDQGAHFYICGDGSQMAPAVEATLMKSYADVHQVGEADARLWLQQLEEKGRYAKDVWLG

SEQ ID NO: 627 - DNA, 3147 bp, synthetic construct
  misc_feature 1..3147: note = variant of P450 oxidase from Bacillus megaterium
  source 1..3147: mol_type = other DNA
atgacaattaaggaaatgcctcagcctaagacgtttggagaacttaaaaatttaccgttattaaacacagataaaccggttcaagctttgatgcgtattgcggatgaattaggagaaatctttaaattcgaggcgcctggtagcgtaacgcgctatttatcaagtcagcgtctaattaaagaagcatgcgatgaatcacgctttgataaaaacttaagtcaagcgcttaaatttgcacgtgattttgttggagacgggctgtctacaagctggacgcatgaaccgaattggaaaaaagcgcataatatcttagttccaagctttagtcagcatgcaatggggcgttatcatgcgatgatggtcgatatcgccgtgcagcttgttcaaaagtgggagcgtctaaatgcagatgagcatattgaagtatcggaagacatgacacgtttaacgcttgatacaattggtctttgcggctttaactatcgctttaacagcttttaccgagatcagcctcatccatttattgtgagtgtggttcgtgcactggatgaagtaatgaacaagctgcagcgagcaaatccagacgacccagcttatgatgaaaacaagcgccagtgtcaagaagatatcaaggtgatgaacgactatgtagataaaattattgcagatcgcaaagcaaggggtgaacaaagtcatgatttattaacgcagatgctaaacggaaaagatccagaaacgggtgagccgcttgatgacgggaacattcgtcagcaaattattacattcttaattgcgggacaccaaacgacaagtggtcttttatcatttgcgctgtatttcttagtgaaaaatccacatgtattacaaaaagtagcagaagaagcagcacgagttctagtagatcctgttccaagctacaaacaagtcaaacagcttaaatatgttggcatggtcttaaacgaagcgctgcgcttatggccagtagcgcctatgttttccctatatgcaaaagaagatacggtgcttggaggagaatatcctttaacgaaaggcgacgaagtaatggttctggtgcctcagcttcaccgtgataaaacaatttggggagacgatgtggaggagttccgtccagagcgttttgaaaatccaagtgcgattccgcagcatgcgtttaaaccgtttggaaacggtcagcgtgcgtgtatcggtcagcagttcgctcttcatgaagcaacgctggtacttggtatgatgctaaaacactttgactttgaagatcatacaaactacgagctcgttattaaagaatcgcggacgttaaaacctgaaggctttgtggtaaaagcaaaatcgaaaggcattccgcttggcggtattccttcacctagcactgaacagtctgctaaaaaagtacgcaaaaaggcagaaaacgctcataatacgccgctgcttgtgctatacggttcaaatgcgggaacagctgaaggaacggcgcgtgatttagcagatattgcaatgagcaaaggatttgcaccgcaggtcgcaacgcttgattcacacgccggtaatcttccgcgcgaaggagctgtattaattgtaacggcgtcttataacggtcatccgcctgataacgcaaagcaatttgtcgactggttagaccaagcgtctgctgatgaagtaaaaggcgttcgctactccgtatttggatgcggcgataaaaattgggcggggacgtatcaaaaagtgcctgcttttatcgatgaaacgcttgccgctaaaggggcagaaaacatcgctgaccgcggtgaagcagatgcaagcgacgactttgaaggcacatatgaagaatggcgtgatcatatgtggagtgacgtagcagcctactttaacctcgacattgaaaacagtgaagataataaatctactctttcacttcaatttgtcgacagcgccgcggatatgccgcttgcgaaaatgcacggtgcgttttcaacgaacgtcgtagcaagcaaagaacttcaacagccaggcagtgcacgaagcacgcgacatcttgaaattgaacttccaaaagaagcttcttatcaagaaggagatcatttaggtgttattcctcgcaactatgaaggaatagtaaaccgtgtaacagcaaggttcggcctaagcgcatcacagcaaatccgtctggaagcagaagaagaaaaattagctcatttgccactcgctaaaacagtatccgtagaagagcttctgcaatacgtggagcttcaagatcctgttacgcgcacgcagcttcgcgcaatggctgctaaaacggtctgcccgccgcataaagtagagcttgaagccttgcttgaaaagcaagcctacaaagaacaagtgctggcaaaacgtttaacaatgcttgaactgcttgaaaaatacccggcgtgtgaaatgaaattcagcgaatttatcgcccttctgccaagcatacgcccgcgctattactcgatttcttcatcacctcgtgtcgatgaaaaacaagcaagcatcacggtcagcgttgtctcaggaccggcgtggagcggatatggagaatataaaggaattgcgtcgaactatcttgccgagctgcaagaaggagatacgattacgtgctttatttccacaccgcagtcagaatttacgctgccaaaagaccctgaaacgccgcttatcatggtcggaccgggaacaggcgtcgcgccgtttagaggctttgtgcaggcgcgcaaacagctaaaagaacaaggacagtcacttggagaagcacatttatacttcggctgccgttcacctcatgaagactatctgtatcaagaagagcttgaaaacgcccaaagcgaaggcatcattgcgcttcataccgctttttctcgcatgccaaatcagccgaaaacatacgttcagcacgtaatggaacaagacggcaagaaattgattgaacttcttgatcaaggagcgcacttctatatttgcggagacggaagccaaatggcacctgccgttgaagcaacgcttatgaaaagctatgctgacgttcaccaagtgagtgaagcagacgctcgcttatggctgcagcagctagaagaaaaaggccgatacgcaaaagacgtgtggctgggg

SEQ ID NO: 628 - protein, 1049 aa, synthetic construct
  REGION 1..1049: note = variant of P450 oxidase from Bacillus megaterium
MTIKEMPQPKTFGELKNLPLLNTDKPVQALMRIADELGEIFKFEAPGSVTRYLSSQRLIKEACDESRFDKNLSQALKFARDFVGDGLSTSWTHEPNWKKAHNILVPSFSQHAMGRYHAMMVDIAVQLVQKWERLNADEHIEVSEDMTRLTLDTIGLCGFNYRFNSFYRDQPHPFIVSVVRALDEVMNKLQRANPDDPAYDENKRQCQEDIKVMNDYVDKIIADRKARGEQSHDLLTQMLNGKDPETGEPLDDGNIRQQIITFLIAGHQTTSGLLSFALYFLVKNPHVLQKVAEEAARVLVDPVPSYKQVKQLKYVGMVLNEALRLWPVAPMFSLYAKEDTVLGGEYPLTKGDEVMVLVPQLHRDKTIWGDDVEEFRPERFENPSAIPQHAFKPFGNGQRACIGQQFALHEATLVLGMMLKHFDFEDHTNYELVIKESRTLKPEGFVVKAKSKGIPLGGIPSPSTEQSAKKVRKKAENAHNTPLLVLYGSNAGTAEGTARDLADIAMSKGFAPQVATLDSHAGNLPREGAVLIVTASYNGHPPDNAKQFVDWLDQASADEVKGVRYSVFGCGDKNWAGTYQKVPAFIDETLAAKGAENIADRGEADASDDFEGTYEEWRDHMWSDVAAYFNLDIENSEDNKSTLSLQFVDSAADMPLAKMHGAFSTNVVASKELQQPGSARSTRHLEIELPKEASYQEGDHLGVIPRNYEGIVNRVTARFGLSASQQIRLEAEEEKLAHLPLAKTVSVEELLQYVELQDPVTRTQLRAMAAKTVCPPHKVELEALLEKQAYKEQVLAKRLTMLELLEKYPACEMKFSEFIALLPSIRPRYYSISSSPRVDEKQASITVSVVSGPAWSGYGEYKGIASNYLAELQEGDTITCFISTPQSEFTLPKDPETPLIMVGPGTGVAPFRGFVQARKQLKEQGQSLGEAHLYFGCRSPHEDYLYQEELENAQSEGIIALHTAFSRMPNQPKTYVQHVMEQDGKKLIELLDQGAHFYICGDGSQMAPAVEATLMKSYADVHQVSEADARLWLQQLEEKGRYAKDVWLG

SEQ ID NO: 629 - DNA, 3147 bp, synthetic construct
  misc_feature 1..3147: note = variant of P450 oxidase from Bacillus megaterium
  source 1..3147: mol_type = other DNA
atgacaattaaggaaatgcctcagcctaagacgtttggagaacttaaaaatttaccgttattaaacacagataaaccggttcaagctttgatgcgtattgcggatgaattaggagaaatctttaaattcgaggcgcctggtagcgtaacgcgctatttatcaagtcagcgtctaattaaagaagcatgcgatgaatcacgctttgataaaaacttaagtcaagcgcttaaatttgcacgtgattttgttggagacgggctgtctacaagctggacgcatgaaccgaattggaaaaaagcgcataatatcttagttccaagctttagtcagcatgcaatggggcgttatcatgcgatgatggtcgatatcgccgtgcagcttgttcaaaagtgggagcgtctaaatgcagatgagcatattgaagtatcggaagacatgacacgtttaacgcttgatacaattggtctttgcggctttaactatcgctttaacagcttttaccgagatcagcctcatccatttattgtgagtgtggttcgtgcactggatgaagtaatgaacaagctgcagcgagcaaatccagacgacccagcttatgatgaaaacaagcgccagtgtcaagaagatatcaaggtgatgaacgactatgtagataaaattattgcagatcgcaaagcaaggggtgaacaaagtcatgatttattaacgcagatgctaaacggaaaagatccagaaacgggtgagccgcttgatgacgggaacattcgtcagcaaattattacattcttaattgcgggacaccaaacgacaagtggtcttttatcatttgcgctgtatttcttagtgaaaaatccacatgtattacaaaaagtagcagaagaagcagcacgagttctagtagatcctgttccaagctacaaacaagtcaaacagcttaaatatgttggcatggtcttaaacgaagcgctgcgcttatggccagtagcgcctatgttttccctatatgcaaaagaagatacggtgcttggaggagaatatcctttaacgaaaggcgacgaagtaatggttctggtgcctcagcttcaccgtgataaaacaatttggggagacgatgtggaggagttccgtccagagcgttttgaaaatccaagtgcgattccgcagcatgcgtttaaaccgtttggaaacggtcagcgtgcgtgtatcggtcagcagttcgctcttcatgaagcaacgctggtacttggtatgatgctaaaacactttgactttgaagatcatacaaactacgagctcgttattaaagaatcgcggacgttaaaacctgaaggctttgtggtaaaagcaaaatcgaaaggcattccgcttggcggtattccttcacctagcactgaacagtctgctaaaaaagtacgcaaaaaggcagaaaacgctcataatacgccgctgcttgtgctatacggttcaaatgcgggaacagctgaaggaacggcgcgtgatttagcagatattgcaatgagcaaaggatttgcaccgcaggtcgcaacgcttgattcacacgccggtaatcttccgcgcgaaggagctgtattaattgtaacggcgtcttataacggtcatccgcctgataacgcaaagcaatttgtcgactggttagaccaagcgtctgctgatgaagtaaaaggcgttcgctactccgtatttggatgcggcgataaaaattgggcggggacgtatcaaaaagtgcctgcttttatcgatgaaacgcttgccgctaaaggggcagaaaacatcgctgaccgcggtgaagcagatgcaagcgacgactttgaaggcacatatgaagaatggcgtgatcatatgtggagtgacgtagcagcctactttaacctcgacattgaaaacagtgaagataataaatctactctttcacttcaatttgtcgacagcgccgcggatatgccgcttgcgaaaatgcacggtgcgttttcaacgaacgtcgtagcaagcaaagaacttcaacagccaggcagtgcacgaagcacgcgacatcttgaaattgaacttccaaaagaagcttcttatcaagaaggagatcatttaggtgttattcctcgcaactatgaaggaatagtaatgcgtgtaacagcaaggttcggcctaagcgcatcacagcaaatccgtctggaagcagaagaagaaaaattagctcatttgccactcgctaaaacagtatccgtagaagagcttctgcaatacgtggagcttcaagatcctgttacgcgcacgcagcttcgcgcaatggctgctaaaacggtctgcccgccgcataaagtagagcttgaagccttgcttgaaaagcaagcctacaaagaacaagtgctggcaaaacgtttaacaatgcttgaactgcttgaaaaatacccggcgtgtgaaatgaaattcagcgaatttatcgcccttctgccaagcatacgcccgcgctattactcgatttcttcatcacctcgtgtcgatgaaaaacaagcaagcatcacggtcagcgttgtctcaggaccggcgtggagcggatatggagaatataaaggaattgcgtcgaactatcttgccgagctgcaagaaggagatacgattacgtgctttatttccacaccgcagtcagaatttacgctgccaaaagaccctgaaacgccgcttatcatggtcggaccgggaacaggcgtcgcgccgtttagaggctttgtgcaggcgcgcaaacagctaaaagaacaaggacagtcacttggagaagcacatttatacttcggctgccgttcacctcatgaagactatctgtatcaagaagagcttgaaaacgcccaaagcgaaggcatcattacgcttcataccgctttttctcgcatgccaaatcagccgaaaacatacgttcagcacgtaatggaacaagacggcaagaaattgattgaacttcttgatcaaggagcgcacttctatatttgcggagacggaagccaaatggcacctgccgttgaagcaacgcttatgaaaagctatgctgacgttcaccaagtgagtgaagcagacgctcgcttatggctgcagcagctagaagaaaaaggccgatacgcaaaagacgtgtggctgggg

SEQ ID NO: 630 - protein, 1049 aa, synthetic construct
  REGION 1..1049: note = variant of P450 oxidase from Bacillus megaterium
MTIKEMPQPKTFGELKNLPLLNTDKPVQALMRIADELGEIFKFEAPGSVTRYLSSQRLIKEACDESRFDKNLSQALKFARDFVGDGLSTSWTHEPNWKKAHNILVPSFSQHAMGRYHAMMVDIAVQLVQKWERLNADEHIEVSEDMTRLTLDTIGLCGFNYRFNSFYRDQPHPFIVSVVRALDEVMNKLQRANPDDPAYDENKRQCQEDIKVMNDYVDKIIADRKARGEQSHDLLTQMLNGKDPETGEPLDDGNIRQQIITFLIAGHQTTSGLLSFALYFLVKNPHVLQKVAEEAARVLVDPVPSYKQVKQLKYVGMVLNEALRLWPVAPMFSLYAKEDTVLGGEYPLTKGDEVMVLVPQLHRDKTIWGDDVEEFRPERFENPSAIPQHAFKPFGNGQRACIGQQFALHEATLVLGMMLKHFDFEDHTNYELVIKESRTLKPEGFVVKAKSKGIPLGGIPSPSTEQSAKKVRKKAENAHNTPLLVLYGSNAGTAEGTARDLADIAMSKGFAPQVATLDSHAGNLPREGAVLIVTASYNGHPPDNAKQFVDWLDQASADEVKGVRYSVFGCGDKNWAGTYQKVPAFIDETLAAKGAENIADRGEADASDDFEGTYEEWRDHMWSDVAAYFNLDIENSEDNKSTLSLQFVDSAADMPLAKMHGAFSTNVVASKELQQPGSARSTRHLEIELPKEASYQEGDHLGVIPRNYEGIVMRVTARFGLSASQQIRLEAEEEKLAHLPLAKTVSVEELLQYVELQDPVTRTQLRAMAAKTVCPPHKVELEALLEKQAYKEQVLAKRLTMLELLEKYPACEMKFSEFIALLPSIRPRYYSISSSPRVDEKQASITVSVVSGPAWSGYGEYKGIASNYLAELQEGDTITCFISTPQSEFTLPKDPETPLIMVGPGTGVAPFRGFVQARKQLKEQGQSLGEAHLYFGCRSPHEDYLYQEELENAQSEGIITLHTAFSRMPNQPKTYVQHVMEQDGKKLIELLDQGAHFYICGDGSQMAPAVEATLMKSYADVHQVSEADARLWLQQLEEKGRYAKDVWLG

SEQ ID NO: 631 - DNA, 3147 bp, synthetic construct
  misc_feature 1..3147: note = variant of P450 oxidase from Bacillus megaterium
  source 1..3147: mol_type = other DNA
atgacaattaaggaaatgcctcagcctaagacgtttggagaacttaaaaatttaccgttattaaacacagataaaccggttcaagctttgatgcgtattgcggatgaattaggagaaatctttaaattcgaggcgcctggtagcgtaacgcgctatttatcaagtcagcgtctaattaaagaagcatgcgatgaatcacgctttgataaaaacttaagtcaagcgcttaaatttgcacgtgattttgttggagacgggctgtctacaagctggacgcatgaaccgaattggaaaaaagcgcataatatcttagttccaagctttagtcagcatgcaatggggcgttatcatgcgatgatggtcgatatcgccgtgcagcttgttcaaaagtgggagcgtctaaatgcagatgagcatattgaagtatcggaagacatgacacgtttaacgcttgatacaattggtctttgcggctttaactatcgctttaacagcttttaccgagatcagcctcatccatttattgtgagtgtggttcgtgcactggatgaagtaatgaacaagctgcagcgagcaaatccagacgacccagcttatgatgaaaacaagcgccagtgtcaagaagatatcaaggtgatgaacgactatgtagataaaattattgcagatcgcaaagcaaggggtgaacaaagtcatgatttattaacgcagatgctaaacggaaaagatccagaaacgggtgagccgcttgatgacgggaacattcgtcagcaaattattacattcttaattgcgggacaccaaacgacaagtggtcttttatcatttgcgctgtatttcttagtgaaaaatccacatgtattacaaaaagtagcagaagaagcagcacgagttctagtagatcctgttccaagctacaaacaagtcaaacagcttaaatatgttggcatggtcttaaacgaagcgctgcgcttatggccagtagcgcctatgttttccctatatgcaaaagaagatacggtgcttggaggagaatatcctttaacgaaaggcgacgaagtaatggttctggtgcctcagcttcaccgtgataaaacaatttggggagacgatgtggaggagttccgtccagagcgttttgaaaatccaagtgcgattccgcagcatgcgtttaaaccgtttggaaacggtcagcgtgcgtgtatcggtcagcagttcgctcttcatgaagcaacgctggtacttggtatgatgctaaaacactttgactttgaagatcatacaaactacgagctcgttattaaagaatcgcggacgttaaaacctgaaggctttgtggtaaaagcaaaatcgaaaggcattccgcttggcggtattccttcacctagcactgaacagtctgctaaaaaagtacgcaaaaaggcagaaaacgctcataatacgccgctgcttgtgctatacggttcaaatgcgggaacagctgaaggaacggcgcgtgatttagcagatattgcaatgagcaaaggatttgcaccgcaggtcgcaacgcttgattcacacgccggtaatcttccgcgcgaaggagctgtattaattgtaacggcgtcttataacggtcatccgcctgataacgcaaagcaatttgtcgactggttagaccaagcgtctgctgatgaagtaaaaggcgttcgctactccgtatttggatgcggcgataaaaattgggcggggacgtatcaaaaagtgcctgcttttatcgatgaaacgcttgccgctaaaggggcagaaaacatcgctgaccgcggtgaagcagatgcaagcgacgactttgaaggcacatatgaagaatggcgtgatcatatgtggagtgacgtagcagcctactttaacctcgacattgaaagtagtgaagataataaatctactctttcacttcaatttgtcgacagcgccgcggatatgccgcttgcgaaaatgcacggtgcgttttcaacgaacgtcgtagcaagcaaagaacttcaacagccaggcagtgcacgaagcacgcgacatcttgaaattgaacttccaaaagaagcttcttatcaagaaggagatcatttaggtgttattcctcgcaactatgaaggaatagtaaaccgtgtaacagcaaggttcggcctaagcgcatcacagcaaatccgtctggaagcagaagaagaaaaattagctcatttgccactcgctaaaacagtatccgtagaagagcttctgcaatacgtggagcttcaagatcctgttacgcgcacgcagcttcgcgcaatggctgctaaaacggtctgcccgccgcataaagtagagcttgaagccttgcttgaaaagcaagcctacaaagaacaagtgctggcaaaacgtttaacaatgcttgaactgcttgaaaaatacccggcgtgtgaaatgaaattcagcgaatttatcgcccttctgccaagcatacgcccgcgctattactcgatttcttcatcacctcgtgtcgatgaaaaacaagcaagcatcacggtcagcgttgtctcaggaccggcgtggagcggatatggagaatataaaggaattgcgtcgaactatcttgccgagctgcaagaaggagatacgattacgtgctttatttccacaccgcagtcagaatttacgctgccaaaagaccctgaaacgccgcttatcatggtcggaccgggaacaggcgtcgcgccgtttagaggctttgtgcaggcgcgcaaacagctaaaagaacaaggacagtcacttggagaagcacatttatacttcggctgccgttcacctcatgaagactatctgtatcaagaagagcttgaaaacgcccaaagcgaaggcatcattacgcttcataccgctttttctcgcatgccaaatcagccgaaaacatacgttcagcacgtaatggaacaagacggcaagaaattgattgaacttcttgatcaaggagcgcacttctatatttgcggagacggaagccaaatggcacctgccgttgaagcaacgcttatgaaaagctatgctgacgttcaccaagtgagtgaagcagacgctcgcttatggctgcagcagctagaagaaaaaggccgatacgcaaaagacgtgtggctgggg

SEQ ID NO: 632 - protein, 1049 aa, synthetic construct
  REGION 1..1049: note = variant of P450 oxidase from Bacillus megaterium
MTIKEMPQPKTFGELKNLPLLNTDKPVQALMRIADELGEIFKFEAPGSVTRYLSSQRLIKEACDESRFDKNLSQALKFARDFVGDGLSTSWTHEPNWKKAHNILVPSFSQHAMGRYHAMMVDIAVQLVQKWERLNADEHIEVSEDMTRLTLDTIGLCGFNYRFNSFYRDQPHPFIVSVVRALDEVMNKLQRANPDDPAYDENKRQCQEDIKVMNDYVDKIIADRKARGEQSHDLLTQMLNGKDPETGEPLDDGNIRQQIITFLIAGHQTTSGLLSFALYFLVKNPHVLQKVAEEAARVLVDPVPSYKQVKQLKYVGMVLNEALRLWPVAPMFSLYAKEDTVLGGEYPLTKGDEVMVLVPQLHRDKTIWGDDVEEFRPERFENPSAIPQHAFKPFGNGQRACIGQQFALHEATLVLGMMLKHFDFEDHTNYELVIKESRTLKPEGFVVKAKSKGIPLGGIPSPSTEQSAKKVRKKAENAHNTPLLVLYGSNAGTAEGTARDLADIAMSKGFAPQVATLDSHAGNLPREGAVLIVTASYNGHPPDNAKQFVDWLDQASADEVKGVRYSVFGCGDKNWAGTYQKVPAFIDETLAAKGAENIADRGEADASDDFEGTYEEWRDHMWSDVAAYFNLDIESSEDNKSTLSLQFVDSAADMPLAKMHGAFSTNVVASKELQQPGSARSTRHLEIELPKEASYQEGDHLGVIPRNYEGIVNRVTARFGLSASQQIRLEAEEEKLAHLPLAKTVSVEELLQYVELQDPVTRTQLRAMAAKTVCPPHKVELEALLEKQAYKEQVLAKRLTMLELLEKYPACEMKFSEFIALLPSIRPRYYSISSSPRVDEKQASITVSVVSGPAWSGYGEYKGIASNYLAELQEGDTITCFISTPQSEFTLPKDPETPLIMVGPGTGVAPFRGFVQARKQLKEQGQSLGEAHLYFGCRSPHEDYLYQEELENAQSEGIITLHTAFSRMPNQPKTYVQHVMEQDGKKLIELLDQGAHFYICGDGSQMAPAVEATLMKSYADVHQVSEADARLWLQQLEEKGRYAKDVWLG

SEQ ID NO: 633 - DNA, 3147 bp, synthetic construct
  misc_feature 1..3147: note = variant of P450 oxidase from Bacillus megaterium
  source 1..3147: mol_type = other DNA
atgacaattaaggaaatgcctcagcctaagacgtttggagaacttaaaaatttaccgttattaaacacagataaaccggttcaagctttgatgcgtattgcggatgaattaggagaaatctttaaattcgaggcgcctggtagcgtaacgcgctatttatcaagtcagcgtctaattaaagaagcatgcgatgaatcacgctttgataaaaacttaagtcaagcgcttaaatttgcacgtgattttgttggagacgggctgtctacaagctggacgcatgaaccgaattggaaaaaagcgcataatatcttagttccaagctttagtcagcatgcaatggggcgttatcatgcgatgatggtcgatatcgccgtgcagcttgttcaaaagtgggagcgtctaaatgcagatgagcatattgaagtatcggaagacatgacacgtttaacgcttgatacaattggtctttgcggctttaactatcgctttaacagcttttaccgagatcagcctcatccatttattgtgagtgtggttcgtgcactggatgaagtaatgaacaagctgcagcgagcaaatccagacgacccagcttatgatgaaaacaagcgccagtgtcaagaagatatcaaggtgatgaacgactatgtagataaaattattgcagatcgcaaagcaaggggtgaacaaagtcatgatttattaacgcagatgctaaacggaaaagatccagaaacgggtgagccgcttgatgacgggaacattcgtcagcaaattattacattcttaattgcgggacaccaaacgacaagtggtcttttatcatttgcgctgtatttcttagtgaaaaatccacatgtattacaaaaagtagcagaagaagcagcacgagttctagtagatcctgttccaagctacaaacaagtcaaacagcttaaatatgttggcatggtcttaaacgaagcgctgcgcttatggccagtagcgcctatgttttccctatatgcaaaagaagatacggtgcttggaggagaatatcctttaacgaaaggcgacgaagtaatggttctggtgcctcagcttcaccgtgataaaacaatttggggagacgatgtggaggagttccgtccagagcgttttgaaaatccaagtgcgattccgcagcatgcgtttaaaccgtttggaaacggtcagcgtgcgtgtatcggtcagcagttcgctcttcatgaagcaacgctggtacttggtatgatgctaaaacactttgactttgaagatcatacaaactacgagctcgttattaaagaatcgcggacgttaaaacctgaaggctttgtggtaaaagcaaaatcgaaaggcattccgcttggcggtattccttcacctagcactgaacagtctgctaaaaaagtacgcaaaaaggcagaaaacgctcataatacgccgctgcttgtgctatacggttcaaatgcgggaacagctgaaggaacggcgcgtgatttagcagatattgcaatgagcaaaggatttgcaccgcaggtcgcaacgcttgattcacacgccggtaatcttccgcgcgaaggagctgtattaattgtaacggcgtcttataacggtcatccgcctgataacgcaaagcaatttgtcgactggttagaccaagcgtctgctgatgaagtaaaaggcgttcgctactccgtatttggatgcggcgataaaaattgggcggggacgtatcaaaaagtgcctgcttttatcgatgaaacgcttgccgctaaaggggcagaaaacatcgctgaccgcggtgaagcagatgcaagcgacgactttgaaggcacatatgaagaatggcgtgatcatatgtggagtgacgtagcagcctactttaacctcgacattgaaaacagtgaagataataaatctactctttcacttcaatttgtcgacagcgccgcggatatgccgcttgcgaaaatgcacggtgcgttttcaacgaacgtcgtagcaagcaaagaacttcaacagccaggcagtgcacgaagcacgcgacatcttgaaattgaacttccaaaagaagcttcttatcaagaaggagatcatttaggtgttattcctcgcaactatgaaggaatagtaaaccgtgtaacagcaaggttcggcctaagcgcatcacagcaaatccgtctggaagcagaagaagaaaaattagctcatttgccactcgctaaaacagtatccgtagaagagcttctgcaatacgtggagcttcaagatcctgttacgcgcacgcagcttcgcgcaatggctgctaaaacggtctgcccgccgcataaagtagagcttgaagccttgcttgaaaagcaagcctacaaagaacaagtgctggcaaaacgtttaacaatgcttgaactgcttgaaaaatacccggcgtgtgaaatgaaattcagcgaatttatcgcccttctgccaagcatacgcccgcgctattactcgatttcttcatcacctcgtgtcgatgaaaaacaagcaagcatcacggtcagcgttgtctcaggaccggcgtggagcggatatggagaatataaaggaattgcgtcgaactatcttgccgagctgcaagaaggagatacgattacgtgctttatttccacaccgcagtcagaatttacgctgccaaaagaccctgaaacgccgcttatcatggtcggaccgggaacaggcgtcgcgccgtttagaggctttgtgcaggcgcgcaaacagctaaaagaacaaggacagtcacttggagaagcacatttatacttcggctgccgttcacctcatgaagactatctgtatcaagaagagcttgaaaacgcccaaagcgaaggcatcattacgcttcataccgctttttctcgcatgccaaatcagccgaaaacatacgttcagcacgtaatggaacaagacggcaagaaattgattgaacttcttgatcaaggagcgcacttctatatttgcggagacggaagccaaatggcacctgccgttgaagcaacgcttatgaaaagctatgctgacgttcaccaagtgtgggaagcagacgctcgcttatggctgcagcagctagaagaaaaaggccgatacgcaaaagacgtgtggctgggg

SEQ ID NO: 634 - protein, 1049 aa, synthetic construct
  REGION 1..1049: note = variant of P450 oxidase from Bacillus megaterium
MTIKEMPQPKTFGELKNLPLLNTDKPVQALMRIADELGEIFKFEAPGSVTRYLSSQRLIKEACDESRFDKNLSQALKFARDFVGDGLSTSWTHEPNWKKAHNILVPSFSQHAMGRYHAMMVDIAVQLVQKWERLNADEHIEVSEDMTRLTLDTIGLCGFNYRFNSFYRDQPHPFIVSVVRALDEVMNKLQRANPDDPAYDENKRQCQEDIKVMNDYVDKIIADRKARGEQSHDLLTQMLNGKDPETGEPLDDGNIRQQIITFLIAGHQTTSGLLSFALYFLVKNPHVLQKVAEEAARVLVDPVPSYKQVKQLKYVGMVLNEALRLWPVAPMFSLYAKEDTVLGGEYPLTKGDEVMVLVPQLHRDKTIWGDDVEEFRPERFENPSAIPQHAFKPFGNGQRACIGQQFALHEATLVLGMMLKHFDFEDHTNYELVIKESRTLKPEGFVVKAKSKGIPLGGIPSPSTEQSAKKVRKKAENAHNTPLLVLYGSNAGTAEGTARDLADIAMSKGFAPQVATLDSHAGNLPREGAVLIVTASYNGHPPDNAKQFVDWLDQASADEVKGVRYSVFGCGDKNWAGTYQKVPAFIDETLAAKGAENIADRGEADASDDFEGTYEEWRDHMWSDVAAYFNLDIENSEDNKSTLSLQFVDSAADMPLAKMHGAFSTNVVASKELQQPGSARSTRHLEIELPKEASYQEGDHLGVIPRNYEGIVNRVTARFGLSASQQIRLEAEEEKLAHLPLAKTVSVEELLQYVELQDPVTRTQLRAMAAKTVCPPHKVELEALLEKQAYKEQVLAKRLTMLELLEKYPACEMKFSEFIALLPSIRPRYYSISSSPRVDEKQASITVSVVSGPAWSGYGEYKGIASNYLAELQEGDTITCFISTPQSEFTLPKDPETPLIMVGPGTGVAPFRGFVQARKQLKEQGQSLGEAHLYFGCRSPHEDYLYQEELENAQSEGIITLHTAFSRMPNQPKTYVQHVMEQDGKKLIELLDQGAHFYICGDGSQMAPAVEATLMKSYADVHQVWEADARLWLQQLEEKGRYAKDVWLG

SEQ ID NO: 635 - DNA, 3147 bp, synthetic construct
  misc_feature 1..3147: note = variant of P450 oxidase from Bacillus megaterium
  source 1..3147: mol_type = other DNA
atgacaattaaggaaatgcctcagcctaagacgtttggagaacttaaaaatttaccgttattaaacacagataaaccggttcaagctttgatgcgtattgcggatgaattaggagaaatctttaaattcgaggcgcctggtagcgtaacgcgctatttatcaagtcagcgtctaattaaagaagcatgcgatgaatcacgctttgataaaaacttaagtcaagcgcttaaatttgcacgtgattttgttggagacgggctgtctacaagctggacgcatgaaccgaattggaaaaaagcgcataatatcttagttccaagctttagtcagcatgcaatggggcgttatcatgcgatgatggtcgatatcgccgtgcagcttgttcaaaagtgggagcgtctaaatgcagatgagcatattgaagtatcggaagacatgacacgtttaacgcttgatacaattggtctttgcggctttaactatcgctttaacagcttttaccgagatcagcctcatccatttattgtgagtgtggttcgtgcactggatgaagtaatgaacaagctgcagcgagcaaatccagacgacccagcttatgatgaaaacaagcgccagtgtcaagaagatatcaaggtgatgaacgactatgtagataaaattattgcagatcgcaaagcaaggggtgaacaaagtcatgatttattaacgcagatgctaaacggaaaagatccagaaacgggtgagccgcttgatgacgggaacattcgtcagcaaattattacattcttaattgcgggacaccaaacgacaagtggtcttttatcatttgcgctgtatttcttagtgaaaaatccacatgtattacaaaaagtagcagaagaagcagcacgagttctagtagatcctgttccaagctacaaacaagtcaaacagcttaaatatgttggcatggtcttaaacgaagcgctgcgcttatggccagtagcgcctatgttttccctatatgcaaaagaagatacggtgcttggaggagaatatcctttaacgaaaggcgacgaagtaatggttctggtgcctcagcttcaccgtgataaaacaatttggggagacgatgtggaggagttccgtccagagcgttttgaaaatccaagtgcgattccgcagcatgcgtttaaaccgtttggaaacggtcagcgtgcgtgtatcggtcagcagttcgctcttcatgaagcaacgctggtacttggtatgatgctaaaacactttgactttgaagatcatacaaactacgagctcgttattaaagaatcgcggacgttaaaacctgaaggctttgtggtaaaagcaaaatcgaaaggcattccgcttggcggtattccttcacctagcactgaacagtctgctaaaaaagtacgcaaaaaggcagaaaacgctcataatacgccgctgcttgtgctatacggttcaaatgcgggaacagctgaaggaacggcgcgtgatttagcagatattgcaatgagcaaaggatttgcaccgcaggtcgcaacgcttgattcacacgccggtaatcttccgcgcgaaggagctgtattaattgtaacggcgtcttataacggtcatccgcctgataacgcaaagcaatttgtcgactggttagaccaagcgtctgctgatgaagtaaaaggcgttcgctactccgtatttggatgcggcgataaaaattgggcggggacgtatcaaaaagtgcctgcttttatcgatgaaacgcttgccgctaaaggggcagaaaacatcgctgaccgcggtgaagcagatgcaagcgacgactttgaaggcacatatgaagaatggcgtgatcatatgtggagtgacgtagcagcctactttaacctcgacattgaaaacagtgaagataataaatctactctttcacttcaatttgtcgacagcgccgcggatatgccgcttgcgaaaatgcacggtgcgttttcaacgaacgtcgtagcaagcaaagaacttcaacagccaggcagtgcacgaagcacgcgacatcttgaaattgaacttccaaaagaagcttcttatcaagaaggagatcatttaggtgttattcctcgcaactatgaaggaatagtaaaccgtgtaacagcaaggttcggcctaagcgcatcacagcaaatccgtctggaagcagaagaagaaaaattagctcatttgccactcgctaaaacagtatccgtagaagagcttctgcaatacgtggagcttcaagatcctgttacgcgcacgcagcttcgcgcaatggctgctaaaacggtctgcccgccgcataaagtagagcttgaatctttgcttgaaaagcaagcctacaaagaacaagtgctggcaaaacgtttaacaatgcttgaactgcttgaaaaatacccggcgtgtgaaatgaaattcagcgaatttatcgcccttctgccaagcatacgcccgcgctattactcgatttcttcatcacctcgtgtcgatgaaaaacaagcaagcatcacggtcagcgttgtctcaggaccggcgtggagcggatatggagaatataaaggaattgcgtcgaactatcttgccgagctgcaagaaggagatacgattacgtgctttatttccacaccgcagtcagaatttacgctgccaaaagaccctgaaacgccgcttatcatggtcggaccgggaacaggcgtcgcgccgtttagaggctttgtgcaggcgcgcaaacagctaaaagaacaaggacagtcacttggagaagcacatttatacttcggctgccgttcacctcatgaagactatctgtatcaagaagagcttgaaaacgcccaaagcgaaggcatcattacgcttcataccgctttttctcgcatgccaaatcagccgaaaacatacgttcagcacgtaatggaacaagacggcaagaaattgattgaacttcttgatcaaggagcgcacttctatatttgcggagacggaagccaaatggcacctgccgttgaagcaacgcttatgaaaagctatgctgacgttcaccaagtgagtgaagcagacgctcgcttatggctgcagcagctagaagaaaaaggccgatacgcaaaagacgtgtggctgggg

SEQ ID NO: 636 - protein, 1049 aa, synthetic construct
  REGION 1..1049: note = variant of P450 oxidase from Bacillus megaterium
MTIKEMPQPKTFGELKNLPLLNTDKPVQALMRIADELGEIFKFEAPGSVTRYLSSQRLIKEACDESRFDKNLSQALKFARDFVGDGLSTSWTHEPNWKKAHNILVPSFSQHAMGRYHAMMVDIAVQLVQKWERLNADEHIEVSEDMTRLTLDTIGLCGFNYRFNSFYRDQPHPFIVSVVRALDEVMNKLQRANPDDPAYDENKRQCQEDIKVMNDYVDKIIADRKARGEQSHDLLTQMLNGKDPETGEPLDDGNIRQQIITFLIAGHQTTSGLLSFALYFLVKNPHVLQKVAEEAARVLVDPVPSYKQVKQLKYVGMVLNEALRLWPVAPMFSLYAKEDTVLGGEYPLTKGDEVMVLVPQLHRDKTIWGDDVEEFRPERFENPSAIPQHAFKPFGNGQRACIGQQFALHEATLVLGMMLKHFDFEDHTNYELVIKESRTLKPEGFVVKAKSKGIPLGGIPSPSTEQSAKKVRKKAENAHNTPLLVLYGSNAGTAEGTARDLADIAMSKGFAPQVATLDSHAGNLPREGAVLIVTASYNGHPPDNAKQFVDWLDQASADEVKGVRYSVFGCGDKNWAGTYQKVPAFIDETLAAKGAENIADRGEADASDDFEGTYEEWRDHMWSDVAAYFNLDIENSEDNKSTLSLQFVDSAADMPLAKMHGAFSTNVVASKELQQPGSARSTRHLEIELPKEASYQEGDHLGVIPRNYEGIVNRVTARFGLSASQQIRLEAEEEKLAHLPLAKTVSVEELLQYVELQDPVTRTQLRAMAAKTVCPPHKVELESLLEKQAYKEQVLAKRLTMLELLEKYPACEMKFSEFIALLPSIRPRYYSISSSPRVDEKQASITVSVVSGPAWSGYGEYKGIASNYLAELQEGDTITCFISTPQSEFTLPKDPETPLIMVGPGTGVAPFRGFVQARKQLKEQGQSLGEAHLYFGCRSPHEDYLYQEELENAQSEGIITLHTAFSRMPNQPKTYVQHVMEQDGKKLIELLDQGAHFYICGDGSQMAPAVEATLMKSYADVHQVSEADARLWLQQLEEKGRYAKDVWLG

SEQ ID NO: 637 - DNA, 3147 bp, synthetic construct
  misc_feature 1..3147: note = variant of P450 oxidase from Bacillus megaterium
  source 1..3147: mol_type = other DNA
atgacaattaaggaaatgcctcagcctaagacgtttggagaacttaaaaatttaccgttattaaacacagataaaccggttcaagctttgatgcgtattgcggatgaattaggagaaatctttaaattcgaggcgcctggtagcgtaacgcgctatttatcaagtcagcgtctaattaaagaagcatgcgatgaatcacgctttgataaaaacttaagtcaagcgcttaaatttgcacgtgattttgttggagacgggctgtctacaagctggacgcatgaaccgaattggaaaaaagcgcataatatcttagttccaagctttagtcagcatgcaatggggcgttatcatgcgatgatggtcgatatcgccgtgcagcttgttcaaaagtgggagcgtctaaatgcagatgagcatattgaagtatcggaagacatgacacgtttaacgcttgatacaattggtctttgcggctttaactatcgctttaacagcttttaccgagatcagcctcatccatttattgtgagtgtggttcgtgcactggatgaagtaatgaacaagctgcagcgagcaaatccagacgacccagcttatgatgaaaacaagcgccagtgtcaagaagatatcaaggtgatgaacgactatgtagataaaattattgcagatcgcaaagcaaggggtgaacaaagtcatgatttattaacgcagatgctaaacggaaaagatccagaaacgggtgagccgcttgatgacgggaacattcgtcagcaaattattacattcttaattgcgggacaccaaacgacaagtggtcttttatcatttgcgctgtatttcttagtgaaaaatccacatgtattacaaaaagtagcagaagaagcagcacgagttctagtagatcctgttccaagctacaaacaagtcaaacagcttaaatatgttggcatggtcttaaacgaagcgctgcgcttatggccagtagcgcctatgttttccctatatgcaaaagaagatacggtgcttggaggagaatatcctttaacgaaaggcgacgaagtaatggttctggtgcctcagcttcaccgtgataaaacaatttggggagacgatgtggaggagttccgtccagagcgttttgaaaatccaagtgcgattccgcagcatgcgtttaaaccgtttggaaacggtcagcgtgcgtgtatcggtcagcagttcgctcttcatgaagcaacgctggtacttggtatgatgctaaaacactttgactttgaagatcatacaaactacgagctcgttattaaagaatcgcggacgttaaaacctgaaggctttgtggtaaaagcaaaatcgaaaggcattccgcttggcggtattccttcacctagcactgaacagtctgctaaaaaagtacgcaaaaaggcagaaaacgctcataatacgccgctgcttgtgctatacggttcaaatgcgggaacagctgaaggaacggcgcgtgatttagcagatattgcaatgagcaaaggatttgcaccgcaggtcgcaacgcttgattcacacgccggtaatcttccgcgcgaaggagctgtattaattgtaacggcgtcttataacggtcatccgcctgataacgcaaagcaatttgtcgactggttagaccaagcgtctgctgatgaagtaaaaggcgttcgctactccgtatttggatgcggcgataaaaattgggcggggacgtatcaaaaagtgcctgcttttatcgatgaaacgcttgccgctaaaggggcagaaaacatcgctgaccgcggtgaagcagatgcaagcgacgactttgaaggcacatatgaagaatggcgtgatcatatgtggagtgacgtagcagcctactttaacctcgacattgaaaacagtgaagataataaatctactctttcacttcaatttgtcgacagcgccgcggatatgccgcttgcgaaaatgcacggtgcgttttcaacgaacgtcgtagcaagcaaagaacttcaacagccaggcagtgcacgaagcacgcgacatcttgaaattgaacttccaaaagaagcttcttatcaagaaggagatcatttaggtgttattcctcgcaactatgaaggaatagtaaaccgtgtaacagcaaggttcggcctaagcgcatcacagcaaatccgtctggaagcagaagaagaaaaattagctcatttgccactcgctaaaacagtatccgtagaagagcttctgcaatacgtggagcttcaagatcctgttacgcgcacgcagcttcgcgcaatggctgctaaaacggtctgcccgccgcataaagtagagcttgaagccttgcttgaaaagcaagcctacaaagaacaagtgctggcaaaacgtttaacaatgcttgaactgcttgaacgttacccggcgtgtgaaatgaaattcagcgaatttatcgcccttctgccaagcatacgcccgcgctattactcgatttcttcatcacctcgtgtcgatgaaaaacaagcaagcatcacggtcagcgttgtctcaggaccggcgtggagcggatatggagaatataaaggaattgcgtcgaactatcttgccgagctgcaagaaggagatacgattacgtgctttatttccacaccgcagtcagaatttacgctgccaaaagaccctgaaacgccgcttatcatggtcggaccgggaacaggcgtcgcgccgtttagaggctttgtgcaggcgcgcaaacagctaaaagaacaaggacagtcacttggagaagcacatttatacttcggctgccgttcacctcatgaagactatctgtatcaagaagagcttgaaaacgcccaaagcgaaggcatcattacgcttcataccgctttttctcgcatgccaaatcagccgaaaacatacgttcagcacgtaatggaacaagacggcaagaaattgattgaacttcttgatcaaggagcgcacttctatatttgcggagacggaagccaaatggcacctgccgttgaagcaacgcttatgaaaagctatgctgacgttcaccaagtgagtgaagcagacgctcgcttatggctgcagcagctagaagaaaaaggccgatacgcaaaagacgtgtggctgggg

SEQ ID NO: 638 - protein, 1049 aa, synthetic construct
  REGION 1..1049: note = variant of P450 oxidase from Bacillus megaterium
MTIKEMPQPKTFGELKNLPLLNTDKPVQALMRIADELGEIFKFEAPGSVTRYLSSQRLIKEACDESRFDKNLSQALKFARDFVGDGLSTSWTHEPNWKKAHNILVPSFSQHAMGRYHAMMVDIAVQLVQKWERLNADEHIEVSEDMTRLTLDTIGLCGFNYRFNSFYRDQPHPFIVSVVRALDEVMNKLQRANPDDPAYDENKRQCQEDIKVMNDYVDKIIADRKARGEQSHDLLTQMLNGKDPETGEPLDDGNIRQQIITFLIAGHQTTSGLLSFALYFLVKNPHVLQKVAEEAARVLVDPVPSYKQVKQLKYVGMVLNEALRLWPVAPMFSLYAKEDTVLGGEYPLTKGDEVMVLVPQLHRDKTIWGDDVEEFRPERFENPSAIPQHAFKPFGNGQRACIGQQFALHEATLVLGMMLKHFDFEDHTNYELVIKESRTLKPEGFVVKAKSKGIPLGGIPSPSTEQSAKKVRKKAENAHNTPLLVLYGSNAGTAEGTARDLADIAMSKGFAPQVATLDSHAGNLPREGAVLIVTASYNGHPPDNAKQFVDWLDQASADEVKGVRYSVFGCGDKNWAGTYQKVPAFIDETLAAKGAENIADRGEADASDDFEGTYEEWRDHMWSDVAAYFNLDIENSEDNKSTLSLQFVDSAADMPLAKMHGAFSTNVVASKELQQPGSARSTRHLEIELPKEASYQEGDHLGVIPRNYEGIVNRVTARFGLSASQQIRLEAEEEKLAHLPLAKTVSVEELLQYVELQDPVTRTQLRAMAAKTVCPPHKVELEALLEKQAYKEQVLAKRLTMLELLERYPACEMKFSEFIALLPSIRPRYYSISSSPRVDEKQASITVSVVSGPAWSGYGEYKGIASNYLAELQEGDTITCFISTPQSEFTLPKDPETPLIMVGPGTGVAPFRGFVQARKQLKEQGQSLGEAHLYFGCRSPHEDYLYQEELENAQSEGIITLHTAFSRMPNQPKTYVQHVMEQDGKKLIELLDQGAHFYICGDGSQMAPAVEATLMKSYADVHQVSEADARLWLQQLEEKGRYAKDVWLG

SEQ ID NO: 639 - DNA, 3147 bp, synthetic construct
  misc_feature 1..3147: note = variant of P450 oxidase from Bacillus megaterium
  source 1..3147: mol_type = other DNA
atgacaattaaggaaatgcctcagcctaagacgtttggagaacttaaaaatttaccgttattaaacacagataaaccggttcaagctttgatgcgtattgcggatgaattaggagaaatctttaaattcgaggcgcctggtagcgtaacgcgctatttatcaagtcagcgtctaattaaagaagcatgcgatgaatcacgctttgataaaaacttaagtcaagcgcttaaatttgcacgtgattttgttggagacgggctgtctacaagctggacgcatgaaccgaattggaaaaaagcgcataatatcttagttccaagctttagtcagcatgcaatggggcgttatcatgcgatgatggtcgatatcgccgtgcagcttgttcaaaagtgggagcgtctaaatgcagatgagcatattgaagtatcggaagacatgacacgtttaacgcttgatacaattggtctttgcggctttaactatcgctttaacagcttttaccgagatcagcctcatccatttattgtgagtgtggttcgtgcactggatgaagtaatgaacaagctgcagcgagcaaatccagacgacccagcttatgatgaaaacaagcgccagtgtcaagaagatatcaaggtgatgaacgactatgtagataaaattattgcagatcgcaaagcaaggggtgaacaaagtcatgatttattaacgcagatgctaaacggaaaagatccagaaacgggtgagccgcttgatgacgggaacattcgtcagcaaattattacattcttaattgcgggacaccaaacgacaagtggtcttttatcatttgcgctgtatttcttagtgaaaaatccacatgtattacaaaaagtagcagaagaagcagcacgagttctagtagatcctgttccaagctacaaacaagtcaaacagcttaaatatgttggcatggtcttaaacgaagcgctgcgcttatggccagtagcgcctatgttttccctatatgcaaaagaagatacggtgcttggaggagaatatcctttaacgaaaggcgacgaagtaatggttctggtgcctcagcttcaccgtgataaaacaatttggggagacgatgtggaggagttccgtccagagcgttttgaaaatccaagtgcgattccgcagcatgcgtttaaaccgtttggaaacggtcagcgtgcgtgtatcggtcagcagttcgctcttcatgaagcaacgctggtacttggtatgatgctaaaacactttgactttgaagatcatacaaactacgagctcgttattaaagaatcgcggacgttaaaacctgaaggctttgtggtaaaagcaaaatcgaaaggcattccgcttggcggtattccttcacctagcactgaacagtctgctaaaaaagtacgcaaaaaggcagaaaacgctcataatacgccgctgcttgtgctatacggttcaaatgcgggaacagctgaaggaacggcgcgtgatttagcagatattgcaatgagcaaaggatttgcaccgcaggtcgcaacgcttgattcacacgccggtaatcttccgcgcgaaggagctgtattaattgtaacggcgtcttataacggtcatccgcctgataacgcaaagcaatttgtcgactggttagaccaagcgtctgctgatgaagtaaaaggcgttcgctactccgtatttggatgcggcgataaaaattgggcggggacgtatcaaaaagtgcctgcttttatcgatgaaacgcttgccgctaaaggggcagaaaacatcgctaagcgcggtgaagcagatgcaagcgacgactttgaaggcacatatgaagaatggcgtgatcatatgtggagtgacgtagcagcctactttaacctcgacattgaaaacagtgaagataataaatctactctttcacttcaatttgtcgacagcgccgcggatatgccgcttgcgaaaatgcacggtgcgttttcaacgaacgtcgtagcaagcaaagaacttcaacagccaggcagtgcacgaagcacgcgacatcttgaaattgaacttccaaaagaagcttcttatcaagaaggagatcatttaggtgttattcctcgcaactatgaaggaatagtaaaccgtgtaacagcaaggttcggcctaagcgcatcacagcaaatccgtctggaagcagaagaagaaaaattagctcatttgccactcgctaaaacagtatccgtagaagagcttctgcaatacgtggagcttcaagatcctgttacgcgcacgcagcttcgcgcaatggctgctaaaacggtctgcccgccgcataaagtagagcttgaagccttgcttgaaaagcaagcctacaaagaacaagtgctggcaaaacgtttaacaatgcttgaactgcttgaaaaatacccggcgtgtgaaatgaaattcagcgaatttatcgcccttctgccaagcatacgcccgcgctattactcgatttcttcatcacctcgtgtcgatgaaaaacaagcaagcatcacggtcagcgttgtctcaggaccggcgtggagcggatatggagaatataaaggaattgcgtcgaactatcttgccgagctgcaagaaggagatacgattacgtgctttatttccacaccgcagtcagaatttacgctgccaaaagaccctgaaacgccgcttatcatggtcggaccgggaacaggcgtcgcgccgtttagaggctttgtgcaggcgcgcaaacagctaaaagaacaaggacagtcacttggagaagcacatttatacttcggctgccgttcacctcatgaagactatctgtatcaagaagagcttgaaaacgcccaaagcgaaggcatcattacgcttcataccgctttttctcgcatgccaaatcagccgaaaacatacgttcagcacgtaatggaacaagacggcaagaaattgattgaacttcttgatcaaggagcgcacttctatatttgcggagacggaagccaaatggcacctgccgttgaagcaacgcttatgaaaagctatgctgacgttcaccaagtgagtgaagcagacgctcgcttatggctgcagcagctagaagaaaaaggccgatacgcaaaagacgtgtggctgggg

SEQ ID NO: 640 - protein, 1049 aa, synthetic construct
  REGION 1..1049: note = variant of P450 oxidase from Bacillus megaterium
MTIKEMPQPKTFGELKNLPLLNTDKPVQALMRIADELGEIFKFEAPGSVTRYLSSQRLIKEACDESRFDKNLSQALKFARDFVGDGLSTSWTHEPNWKKAHNILVPSFSQHAMGRYHAMMVDIAVQLVQKWERLNADEHIEVSEDMTRLTLDTIGLCGFNYRFNSFYRDQPHPFIVSVVRALDEVMNKLQRANPDDPAYDENKRQCQEDIKVMNDYVDKIIADRKARGEQSHDLLTQMLNGKDPETGEPLDDGNIRQQIITFLIAGHQTTSGLLSFALYFLVKNPHVLQKVAEEAARVLVDPVPSYKQVKQLKYVGMVLNEALRLWPVAPMFSLYAKEDTVLGGEYPLTKGDEVMVLVPQLHRDKTIWGDDVEEFRPERFENPSAIPQHAFKPFGNGQRACIGQQFALHEATLVLGMMLKHFDFEDHTNYELVIKESRTLKPEGFVVKAKSKGIPLGGIPSPSTEQSAKKVRKKAENAHNTPLLVLYGSNAGTAEGTARDLADIAMSKGFAPQVATLDSHAGNLPREGAVLIVTASYNGHPPDNAKQFVDWLDQASADEVKGVRYSVFGCGDKNWAGTYQKVPAFIDETLAAKGAENIAKRGEADASDDFEGTYEEWRDHMWSDVAAYFNLDIENSEDNKSTLSLQFVDSAADMPLAKMHGAFSTNVVASKELQQPGSARSTRHLEIELPKEASYQEGDHLGVIPRNYEGIVNRVTARFGLSASQQIRLEAEEEKLAHLPLAKTVSVEELLQYVELQDPVTRTQLRAMAAKTVCPPHKVELEALLEKQAYKEQVLAKRLTMLELLEKYPACEMKFSEFIALLPSIRPRYYSISSSPRVDEKQASITVSVVSGPAWSGYGEYKGIASNYLAELQEGDTITCFISTPQSEFTLPKDPETPLIMVGPGTGVAPFRGFVQARKQLKEQGQSLGEAHLYFGCRSPHEDYLYQEELENAQSEGIITLHTAFSRMPNQPKTYVQHVMEQDGKKLIELLDQGAHFYICGDGSQMAPAVEATLMKSYADVHQVSEADARLWLQQLEEKGRYAKDVWLG

SEQ ID NO: 641 - DNA, 3147 bp, synthetic construct
  misc_feature 1..3147: note = variant of P450 oxidase from Bacillus megaterium
  source 1..3147: mol_type = other DNA
atgacaattaaggaaatgcctcagcctaagacgtttggagaacttaaaaatttaccgttattaaacacagataaaccggttcaagctttgatgcgtattgcggatgaattaggagaaatctttaaattcgaggcgcctggtagcgtaacgcgctatttatcaagtcagcgtctaattaaagaagcatgcgatgaatcacgctttgataaaaacttaagtcaagcgcttaaatttgcacgtgattttgttggagacgggctgtctacaagctggacgcatgaaccgaattggaaaaaagcgcataatatcttagttccaagctttagtcagcatgcaatggggcgttatcatgcgatgatggtcgatatcgccgtgcagcttgttcaaaagtgggagcgtctaaatgcagatgagcatattgaagtatcggaagacatgacacgtttaacgcttgatacaattggtctttgcggctttaactatcgctttaacagcttttaccgagatcagcctcatccatttattgtgagtgtggttcgtgcactggatgaagtaatgaacaagctgcagcgagcaaatccagacgacccagcttatgatgaaaacaagcgccagtgtcaagaagatatcaaggtgatgaacgactatgtagataaaattattgcagatcgcaaagcaaggggtgaacaaagtcatgatttattaacgcagatgctaaacggaaaagatccagaaacgggtgagccgcttgatgacgggaacattcgtcagcaaattattacattcttaattgcgggacaccaaacgacaagtggtcttttatcatttgcgctgtatttcttagtgaaaaatccacatgtattacaaaaagtagcagaagaagcagcacgagttctagtagatcctgttccaagctacaaacaagtcaaacagcttaaatatgttggcatggtcttaaacgaagcgctgcgcttatggccagtagcgcctatgttttccctatatgcaaaagaagatacggtgcttggaggagaatatcctttaacgaaaggcgacgaagtaatggttctggtgcctcagcttcaccgtgataaaacaatttggggagacgatgtggaggagttccgtccagagcgttttgaaaatccaagtgcgattccgcagcatgcgtttaaaccgtttggaaacggtcagcgtgcgtgtatcggtcagcagttcgctcttcatgaagcaacgctggtacttggtatgatgctaaaacactttgactttgaagatcatacaaactacgagctcgttattaaagaatcgcggacgttaaaacctgaaggctttgtggtaaaagcaaaatcgaaaggcattccgcttggcggtattccttcacctagcactgaacagtctgctaaaaaagtacgcaaaaaggcagaaaacgctcataatacgccgctgcttgtgctatacggttcaaatgcgggaacagctgaaggaacggcgcgtgatttagcagatattgcaatgagcaaaggatttgcaccgcaggtcgcaacgcttgattcacacgccggtaatcttccgcgcgaaggagctgtattaattgtaacggcgtcttataacggtcatccgcctgataacgcaaagcaatttgtcgactggttagaccaagcgtctgctgatgaagtaaaaggcgttcgctactccgtatttggatgcggcgataaaaattgggcggggacgtatcaaaaagtgcctgcttttatcgatgaaacgcttgccgctaaaggggcagaaaacatcgctgaccgcggtgaagcagatgcaagcgacgactttgaaggcacatatgaagaatggcgtgatcatatgtggagtgacgtagcagcctactttaacctcgacattgaaaacagtgaagataataaatctactctttcacttcaatttgtcgacagcgccgcggatatgactcttgcgaaaatgcacggtgcgttttcaacgaacgtcgtagcaagcaaagaacttcaacagccaggcagtgcacgaagcacgcgacatcttgaaattgaacttccaaaagaagcttcttatcaagaaggagatcatttaggtgttattcctcgcaactatgaaggaatagtaaaccgtgtaacagcaaggttcggcctaagcgcatcacagcaaatccgtctggaagcagaagaagaaaaattagctcatttgccactcgctaaaacagtatccgtagaagagcttctgcaatacgtggagcttcaagatcctgttacgcgcacgcagcttcgcgcaatggctgctaaaacggtctgcccgccgcataaagtagagcttgaagccttgcttgaaaagcaagcctacaaagaacaagtgctggcaaaacgtttaacaatgcttgaactgcttgaaaaatacccggcgtgtgaaatgaaattcagcgaatttatcgcccttctgccaagcatacgcccgcgctattactcgatttcttcatcacctcgtgtcgatgaaaaacaagcaagcatcacggtcagcgttgtctcaggaccggcgtggagcggatatggagaatataaaggaattgcgtcgaactatcttgccgagctgcaagaaggagatacgattacgtgctttatttccacaccgcagtcagaatttacgctgccaaaagaccctgaaacgccgcttatcatggtcggaccgggaacaggcgtcgcgccgtttagaggctttgtgcaggcgcgcaaacagctaaaagaacaaggacagtcacttggagaagcacatttatacttcggctgccgttcacctcatgaagactatctgtatcaagaagagcttgaaaacgcccaaagcgaaggcatcattacgcttcataccgctttttctcgcatgccaaatcagccgaaaacatacgttcagcacgtaatggaacaagacggcaagaaattgattgaacttcttgatcaaggagcgcacttctatatttgcggagacggaagccaaatggcacctgccgttgaagcaacgcttatgaaaagctatgctgacgttcaccaagtgagtgaagcagacgctcgcttatggctgcagcagctagaagaaaaaggccgatacgcaaaagacgtgtggctgggg

SEQ ID NO: 642 - protein, 1049 aa, synthetic construct
  REGION 1..1049: note = variant of P450 oxidase from Bacillus megaterium
MTIKEMPQPKTFGELKNLPLLNTDKPVQALMRIADELGEIFKFEAPGSVTRYLSSQRLIKEACDESRFDKNLSQALKFARDFVGDGLSTSWTHEPNWKKAHNILVPSFSQHAMGRYHAMMVDIAVQLVQKWERLNADEHIEVSEDMTRLTLDTIGLCGFNYRFNSFYRDQPHPFIVSVVRALDEVMNKLQRANPDDPAYDENKRQCQEDIKVMNDYVDKIIADRKARGEQSHDLLTQMLNGKDPETGEPLDDGNIRQQIITFLIAGHQTTSGLLSFALYFLVKNPHVLQKVAEEAARVLVDPVPSYKQVKQLKYVGMVLNEALRLWPVAPMFSLYAKEDTVLGGEYPLTKGDEVMVLVPQLHRDKTIWGDDVEEFRPERFENPSAIPQHAFKPFGNGQRACIGQQFALHEATLVLGMMLKHFDFEDHTNYELVIKESRTLKPEGFVVKAKSKGIPLGGIPSPSTEQSAKKVRKKAENAHNTPLLVLYGSNAGTAEGTARDLADIAMSKGFAPQVATLDSHAGNLPREGAVLIVTASYNGHPPDNAKQFVDWLDQASADEVKGVRYSVFGCGDKNWAGTYQKVPAFIDETLAAKGAENIADRGEADASDDFEGTYEEWRDHMWSDVAAYFNLDIENSEDNKSTLSLQFVDSAADMTLAKMHGAFSTNVVASKELQQPGSARSTRHLEIELPKEASYQEGDHLGVIPRNYEGIVNRVTARFGLSASQQIRLEAEEEKLAHLPLAKTVSVEELLQYVELQDPVTRTQLRAMAAKTVCPPHKVELEALLEKQAYKEQVLAKRLTMLELLEKYPACEMKFSEFIALLPSIRPRYYSISSSPRVDEKQASITVSVVSGPAWSGYGEYKGIASNYLAELQEGDTITCFISTPQSEFTLPKDPETPLIMVGPGTGVAPFRGFVQARKQLKEQGQSLGEAHLYFGCRSPHEDYLYQEELENAQSEGIITLHTAFSRMPNQPKTYVQHVMEQDGKKLIELLDQGAHFYICGDGSQMAPAVEATLMKSYADVHQVSEADARLWLQQLEEKGRYAKDVWLG

SEQ ID NO: 643 - DNA, 3147 bp, synthetic construct
  misc_feature 1..3147: note = variant of P450 oxidase from Bacillus megaterium
  source 1..3147: mol_type = other DNA
atgacaattaaggaaatgcctcagcctaagacgtttggagaacttaaaaatttaccgttattaaacacagataaaccggttcaagctttgatgcgtattgcggatgaattaggagaaatctttaaattcgaggcgcctggtagcgtaacgcgctatttatcaagtcagcgtctaattaaagaagcatgcgatgaatcacgctttgataaaaacttaagtcaagcgcttaaatttgcacgtgattttgttggagacgggctgtctacaagctggacgcatgaaccgaattggaaaaaagcgcataatatcttagttccaagctttagtcagcatgcaatggggcgttatcatgcgatgatggtcgatatcgccgtgcagcttgttcaaaagtgggagcgtctaaatgcagatgagcatattgaagtatcggaagacatgacacgtttaacgcttgatacaattggtctttgcggctttaactatcgctttaacagcttttaccgagatcagcctcatccatttattgtgagtgtggttcgtgcactggatgaagtaatgaacaagctgcagcgagcaaatccagacgacccagcttatgatgaaaacaagcgccagtgtcaagaagatatcaaggtgatgaacgactatgtagataaaattattgcagatcgcaaagcaaggggtgaacaaagtcatgatttattaacgcagatgctaaacggaaaagatccagaaacgggtgagccgcttgatgacgggaacattcgtcagcaaattattacattcttaattgcgggacaccaaacgacaagtggtcttttatcatttgcgctgtatttcttagtgaaaaatccacatgtattacaaaaagtagcagaagaagcagcacgagttctagtagatcctgttccaagctacaaacaagtcaaacagcttaaatatgttggcatggtcttaaacgaagcgctgcgcttatggccagtagcgcctatgttttccctatatgcaaaagaagatacggtgcttggaggagaatatcctttaacgaaaggcgacgaagtaatggttctggtgcctcagcttcaccgtgataaaacaatttggggagacgatgtggaggagttccgtccagagcgttttgaaaatccaagtgcgattccgcagcatgcgtttaaaccgtttggaaacggtcagcgtgcgtgtatcggtcagcagttcgctcttcatgaagcaacgctggtacttggtatgatgctaaaacactttgactttgaagatcatacaaactacgagctcgttattaaagaatcgcggacgttaaaacctgaaggctttgtggtaaaagcaaaatcgaaaggcattccgcttggcggtattccttcacctagcactgaacagtctgctaaaaaagtacgcaaaaaggcagaaaacgctcataatacgccgctgcttgtgctatacggttcaaatgcgggaacagctgaaggaacggcgcgtgatttagcagatattgcaatgagcaaaggatttgcaccgcaggtcgcaacgcttgattcacacgccggtaatcttccgcgcgaaggagctgtattaattgtaacggcgtcttataacggtcatccgcctgataacgcaaagcaatttgtcgactggttagaccaagcgtctgctgatgaagtaaaaggcgttcgctactccgtatttggatgcggcgataaaaattgggcggggacgtatcaaaaagtgcctgcttttatcgatgaaacgcttgccgctaaaggggcagaaaacatcgctgaccgcggtgaagcagatgcaagcgacgactttgaaggcacatatgaagaatggcgtgatcatatgtggagtgacgtagcagcctactttaacctcgacattgaaaacagtgaagataataaatctactctttcacttcaatttgtcgacagcgccgcggatatgccgcttgcgaaaatgcacggtgcgttttcaacgaacgtcgtagcaagcaaagaacttcaacagccaggcagtgcacgaagcacgcgacatcttgaaattgaacttccaaaagaagcttcttatcaagaaggagatcatttaggtgttattcctcgcaactatgaaggaatagtaaaccgtgtaacagcaaggttcggcctaagcgcatcacagcaaatccgtctggaagcagaagaagaaaaattagctcatttgccactcgctaaaacagtatccgtagaagagcttctgcaatacgtggagcttcaagatcctgttacgcgcacgcagcttcgcgcaatggctgctaaaacggtctgcccgccgcataaagtagagcttgaagccttgcttgaaaagcaagcctacaaagaacaagtgctggcaaaacgtttaacaatgcttgaactgcttgaaaaatacccggcgtgtgaaatgaaattcagcgaatttatcgcccttctgccaagcatacgcccgcgctattactcgatttcttcatcacctcgtgtcgatgaaaaacaagcaagcatcacggtcagcgttgtctcaggaccggcgtggagcggatatggagaatataaaggaattgcgtcgaactatcttgccgagctgcaagaaggagatacgattacgtgctttatttccacaccgcagtcagaatttacgctgccaaaagaccctgaaacgccgcttatcatggtcggaccgggaacaggcgtcgcgccgtttagaggctttgtgcaggcgcgcaaacagctaaaagaacaaggacagtcacttggagaagcacatttatacttcggctgccgttcacctcatgaagactatctgtatcaagaagagcttgaaaacgcccaaagcgaaggcatcattacgcttcataccgctttttctcgcatgccaaatcagccgaaaacatacgttcagcacgtaatggaacaagacggcaagaaattgattgaacttcttgggcaaggagcgcacttctatatttgcggagacggaagccaaatggcacctgccgttgaagcaacgcttatgaaaagctatgctgacgttcaccaagtgagtgaagcagacgctcgcttatggctgcagcagctagaagaaaaaggccgatacgcaaaagacgtgtggctgggg

SEQ ID NO: 644 - protein, 1049 aa, synthetic construct
  REGION 1..1049: note = variant of P450 oxidase from Bacillus megaterium
MTIKEMPQPKTFGELKNLPLLNTDKPVQALMRIADELGEIFKFEAPGSVTRYLSSQRLIKEACDESRFDKNLSQALKFARDFVGDGLSTSWTHEPNWKKAHNILVPSFSQHAMGRYHAMMVDIAVQLVQKWERLNADEHIEVSEDMTRLTLDTIGLCGFNYRFNSFYRDQPHPFIVSVVRALDEVMNKLQRANPDDPAYDENKRQCQEDIKVMNDYVDKIIADRKARGEQSHDLLTQMLNGKDPETGEPLDDGNIRQQIITFLIAGHQTTSGLLSFALYFLVKNPHVLQKVAEEAARVLVDPVPSYKQVKQLKYVGMVLNEALRLWPVAPMFSLYAKEDTVLGGEYPLTKGDEVMVLVPQLHRDKTIWGDDVEEFRPERFENPSAIPQHAFKPFGNGQRACIGQQFALHEATLVLGMMLKHFDFEDHTNYELVIKESRTLKPEGFVVKAKSKGIPLGGIPSPSTEQSAKKVRKKAENAHNTPLLVLYGSNAGTAEGTARDLADIAMSKGFAPQVATLDSHAGNLPREGAVLIVTASYNGHPPDNAKQFVDWLDQASADEVKGVRYSVFGCGDKNWAGTYQKVPAFIDETLAAKGAENIADRGEADASDDFEGTYEEWRDHMWSDVAAYFNLDIENSEDNKSTLSLQFVDSAADMPLAKMHGAFSTNVVASKELQQPGSARSTRHLEIELPKEASYQEGDHLGVIPRNYEGIVNRVTARFGLSASQQIRLEAEEEKLAHLPLAKTVSVEELLQYVELQDPVTRTQLRAMAAKTVCPPHKVELEALLEKQAYKEQVLAKRLTMLELLEKYPACEMKFSEFIALLPSIRPRYYSISSSPRVDEKQASITVSVVSGPAWSGYGEYKGIASNYLAELQEGDTITCFISTPQSEFTLPKDPETPLIMVGPGTGVAPFRGFVQARKQLKEQGQSLGEAHLYFGCRSPHEDYLYQEELENAQSEGIITLHTAFSRMPNQPKTYVQHVMEQDGKKLIELLGQGAHFYICGDGSQMAPAVEATLMKSYADVHQVSEADARLWLQQLEEKGRYAKDVWLG

SEQ ID NO: 645 - DNA, 3147 bp, synthetic construct
  misc_feature 1..3147: note = variant of P450 oxidase from Bacillus megaterium
  source 1..3147: mol_type = other DNA
atgacaattaaggaaatgcctcagcctaagacgtttggagaacttaaaaatttaccgttattaaacacagataaaccggttcaagctttgatgcgtattgcggatgaattaggagaaatctttaaattcgaggcgcctggtagcgtaacgcgctatttatcaagtcagcgtctaattaaagaagcatgcgatgaatcacgctttgataaaaacttaagtcaagcgcttaaatttgcacgtgattttgttggagacgggctgtctacaagctggacgcatgaaccgaattggaaaaaagcgcataatatcttagttccaagctttagtcagcatgcaatggggcgttatcatgcgatgatggtcgatatcgccgtgcagcttgttcaaaagtgggagcgtctaaatgcagatgagcatattgaagtatcggaagacatgacacgtttaacgcttgatacaattggtctttgcggctttaactatcgctttaacagcttttaccgagatcagcctcatccatttattgtgagtgtggttcgtgcactggatgaagtaatgaacaagctgcagcgagcaaatccagacgacccagcttatgatgaaaacaagcgccagtgtcaagaagatatcaaggtgatgaacgactatgtagataaaattattgcagatcgcaaagcaaggggtgaacaaagtcatgatttattaacgcagatgctaaacggaaaagatccagaaacgggtgagccgcttgatgacgggaacattcgtcagcaaattattacattcttaattgcgggacaccaaacgacaagtggtcttttatcatttgcgctgtatttcttagtgaaaaatccacatgtattacaaaaagtagcagaagaagcagcacgagttctagtagatcctgttccaagctacaaacaagtcaaacagcttaaatatgttggcatggtcttaaacgaagcgctgcgcttatggccagtagcgcctatgttttccctatatgcaaaagaagatacggtgcttggaggagaatatcctttaacgaaaggcgacgaagtaatggttctggtgcctcagcttcaccgtgataaaacaatttggggagacgatgtggaggagttccgtccagagcgttttgaaaatccaagtgcgattccgcagcatgcgtttaaaccgtttggaaacggtcagcgtgcgtgtatcggtcagcagttcgctcttcatgaagcaacgctggtacttggtatgatgctaaaacactttgactttgaagatcatacaaactacgagctcgttattaaagaatcgcggacgttaaaacctgaaggctttgtggtaaaagcaaaatcgaaaggcattccgcttggcggtattccttcacctagcactgaacagtctgctaaaaaagtacgcaaaaaggcagaaaacgctcataatacgccgctgcttgtgctatacggttcaaatgcgggaacagctgaaggaacggcgcgtgatttagcagatattgcaatgagcaaaggatttgcaccgcaggtcgcaacgcttgattcacacgccggtaatcttccgcgcgaaggagctgtattaattgtaacggcgtcttataacggtcatccgcctgataacgcaaagcaatttgtcgactggttagaccaagcgtctgctgatgaagtaaaaggcgttcgctactccgtatttggatgcggcgataaaaattgggcggggacgtatcaaaaagtgcctgcttttatcgatgaaacgcttgccgctaaaggggcagaaaacatcgctgaccgcggtgaagcagatgcaagcgacgactttgaaggcacatatgaagaatggcgtgatcatatgtggagtgacgtagcagcctactttaacctcgacattgaaaacagtgaagataataaatctactctttcacttcaatttgtcgacagcgccgcggatatgccgcttgcgaaaatgcacggtgcgttttcaacgaacgtcgtagcaagcaaagaacttcaacagccaggcagtgcacgaagcacgcgacatcttgaaattgaacttccaaaagaagcttcttatcaagaaggagatcatttaggtgttattcctcgcaactatgaaggaatagtaaaccgtgtaacagcaaggttcggcctaagcgcatcacagcaaatccgtctggaagcagaagaagaaaaattagctcatttgccactcgctaaaacagtatccgtagaagagcttctgcaatacgtggagcttcaagatcctgttacgcgcacgcagcttcgcgcaatggctgctaaaacggtctgcccgccgcataaagtagagcttgaagccttgcttgaaaagcaagcctacaaagaacaagtgctggcaaaacgtttaacaatgcttgaactgcttgaaaaatacccggcgtgtgaaatgaaattcagcgaatttatcgcccttctgccaagcatacgcccgcgctattactcgatttcttcatcacctcgtgtcgatgaaaaaggggcaagcatcacggtcagcgttgtctcaggaccggcgtggagcggatatggagaatataaaggaattgcgtcgaactatcttgccgagctgcaagaaggagatacgattacgtgctttatttccacaccgcagtcagaatttacgctgccaaaagaccctgaaacgccgcttatcatggtcggaccgggaacaggcgtcgcgccgtttagaggctttgtgcaggcgcgcaaacagctaaaagaacaaggacagtcacttggagaagcacatttatacttcggctgccgttcacctcatgaagactatctgtatcaagaagagcttgaaaacgcccaaagcgaaggcatcattacgcttcataccgctttttctcgcatgccaaatcagccgaaaacatacgttcagcacgtaatggaacaagacggcaagaaattgattgaacttcttgatcaaggagcgcacttctatatttgcggagacggaagccaaatggcacctgccgttgaagcaacgcttatgaaaagctatgctgacgttcaccaagtgagtgaagcagacgctcgcttatggctgcagcagctagaagaaaaaggccgatacgcaaaagacgtgtggctgggg

SEQ ID NO: 646 - protein, 1049 aa, synthetic construct
  REGION 1..1049: note = variant of P450 oxidase from Bacillus megaterium
MTIKEMPQPKTFGELKNLPLLNTDKPVQALMRIADELGEIFKFEAPGSVTRYLSSQRLIKEACDESRFDKNLSQALKFARDFVGDGLSTSWTHEPNWKKAHNILVPSFSQHAMGRYHAMMVDIAVQLVQKWERLNADEHIEVSEDMTRLTLDTIGLCGFNYRFNSFYRDQPHPFIVSVVRALDEVMNKLQRANPDDPAYDENKRQCQEDIKVMNDYVDKIIADRKARGEQSHDLLTQMLNGKDPETGEPLDDGNIRQQIITFLIAGHQTTSGLLSFALYFLVKNPHVLQKVAEEAARVLVDPVPSYKQVKQLKYVGMVLNEALRLWPVAPMFSLYAKEDTVLGGEYPLTKGDEVMVLVPQLHRDKTIWGDDVEEFRPERFENPSAIPQHAFKPFGNGQRACIGQQFALHEATLVLGMMLKHFDFEDHTNYELVIKESRTLKPEGFVVKAKSKGIPLGGIPSPSTEQSAKKVRKKAENAHNTPLLVLYGSNAGTAEGTARDLADIAMSKGFAPQVATLDSHAGNLPREGAVLIVTASYNGHPPDNAKQFVDWLDQASADEVKGVRYSVFGCGDKNWAGTYQKVPAFIDETLAAKGAENIADRGEADASDDFEGTYEEWRDHMWSDVAAYFNLDIENSEDNKSTLSLQFVDSAADMPLAKMHGAFSTNVVASKELQQPGSARSTRHLEIELPKEASYQEGDHLGVIPRNYEGIVNRVTARFGLSASQQIRLEAEEEKLAHLPLAKTVSVEELLQYVELQDPVTRTQLRAMAAKTVCPPHKVELEALLEKQAYKEQVLAKRLTMLELLEKYPACEMKFSEFIALLPSIRPRYYSISSSPRVDEKGASITVSVVSGPAWSGYGEYKGIASNYLAELQEGDTITCFISTPQSEFTLPKDPETPLIMVGPGTGVAPFRGFVQARKQLKEQGQSLGEAHLYFGCRSPHEDYLYQEELENAQSEGIITLHTAFSRMPNQPKTYVQHVMEQDGKKLIELLDQGAHFYICGDGSQMAPAVEATLMKSYADVHQVSEADARLWLQQLEEKGRYAKDVWLG

SEQ ID NO: 647 - DNA, 3147 bp, synthetic construct
  misc_feature 1..3147: note = variant of P450 oxidase from Bacillus megaterium
  source 1..3147: mol_type = other DNA
atgacaattaaggaaatgcctcagcctaagacgtttggagaacttaaaaatttaccgttattaaacacagataaaccggttcaagctttgatgcgtattgcggatgaattaggagaaatctttaaattcgaggcgcctggtagcgtaacgcgctatttatcaagtcagcgtctaattaaagaagcatgcgatgaatcacgctttgataaaaacttaagtcaagcgcttaaatttgcacgtgattttgttggagacgggctgtctacaagctggacgcatgaaccgaattggaaaaaagcgcataatatcttagttccaagctttagtcagcatgcaatggggcgttatcatgcgatgatggtcgatatcgccgtgcagcttgttcaaaagtgggagcgtctaaatgcagatgagcatattgaagtatcggaagacatgacacgtttaacgcttgatacaattggtctttgcggctttaactatcgctttaacagcttttaccgagatcagcctcatccatttattgtgagtgtggttcgtgcactggatgaagtaatgaacaagctgcagcgagcaaatccagacgacccagcttatgatgaaaacaagcgccagtgtcaagaagatatcaaggtgatgaacgactatgtagataaaattattgcagatcgcaaagcaaggggtgaacaaagtcatgatttattaacgcagatgctaaacggaaaagatccagaaacgggtgagccgcttgatgacgggaacattcgtcagcaaattattacattcttaattgcgggacaccaaacgacaagtggtcttttatcatttgcgctgtatttcttagtgaaaaatccacatgtattacaaaaagtagcagaagaagcagcacgagttctagtagatcctgttccaagctacaaacaagtcaaacagcttaaatatgttggcatggtcttaaacgaagcgctgcgcttatggccagtagcgcctatgttttccctatatgcaaaagaagatacggtgcttggaggagaatatcctttaacgaaaggcgacgaagtaatggttctggtgcctcagcttcaccgtgataaaacaatttggggagacgatgtggaggagttccgtccagagcgttttgaaaatccaagtgcgattccgcagcatgcgtttaaaccgtttggaaacggtcagcgtgcgtgtatcggtcagcagttcgctcttcatgaagcaacgctggtacttggtatgatgctaaaacactttgactttgaagatcatacaaactacgagctcgttattaaagaatcgcggacgttaaaacctgaaggctttgtggtaaaagcaaaatcgaaaggcattccgcttggcggtattccttcacctagcactgaacagtctgctaaaaaagtacgcaaaaaggcagaaaacgctcataatacgccgctgcttgtgctatacggttcaaatgcgggaacagctgaaggaacggcgcgtgatttagcagatattgcaatgagcaaaggatttgcaccgcaggtcgcaacgcttgattcacacgccggtaatcttccgcgcgaaggagctgtattaattgtaacggcgtcttataacggtcatccgcctgataacgcaaagcaatttgtcgactggttagaccaagcgtctgctgatgaagtaaaaggcgttcgctactccgtatttggatgcggcgataaaaattgggcggggacgtatcaaaaagtgcctgcttttatcgatgaaacgcttgccgctaaaggggcagaaaacatcgctgaccgcggtgaagcagatgcaagcgacgactttgaaggcacatatgaagaatggcgtgatcatatgtggagtgacgtagcagcctactttaacctcgacattgaaaacagtgaagataataaatctactctttcacttcaatttgtcgacagcgccgcggatatgccgcttgcgaaaatgcacggtgcgttttcaacgaacgtcgtagcaagcaaagaacttcaacagccaggcagtgcacgaagcacgcgacatcttgaaattgaacttccaaaagaagcttcttatcaagaaggagatcatttaggtgttattcctcgcaactatgaaggaatagtaaaccgtgtaacagcaaggttcggcctaagcgcatcacagcaaatccgtctggaagcagaagaagaaaaattagctcatttgccactcgctaaaacagtatccgtagaagagcttctgcaatacgtggagcttcaagatcctgttacgcgcacgcagcttcgcgcaatggctgctaaaacggtctgcccgccgcataaagtagagcttgaagccttgcttgaaaagcaagcctacaaagaacaagtgctggcaaaacgtttaacaatgcttgaactgcttgaaaaatacccggcgtgtgaaatgaaattcagcgaatttatcgcccttctgccaagcatacgcccgcgctattactcgatttcttcatcacctcgtgtcgatgaaaaacaagcaagcatcacggtcagcgttgtctcaggaccggcgtggagcggatatggagaatataaaggaattgcgtcgaactatcttgccgagctgcaagaaggagatacgattacgtgctttatttccacaccgcagtcagaatttacgctgccaaaagtgcctgaaacgccgcttatcatggtcggaccgggaacaggcgtcgcgccgtttagaggctttgtgcaggcgcgcaaacagctaaaagaacaaggacagtcacttggagaagcacatttatacttcggctgccgttcacctcatgaagactatctgtatcaagaagagcttgaaaacgcccaaagcgaaggcatcattacgcttcataccgctttttctcgcatgccaaatcagccgaaaacatacgttcagcacgtaatggaacaagacggcaagaaattgattgaacttcttgatcaaggagcgcacttctatatttgcggagacggaagccaaatggcacctgccgttgaagcaacgcttatgaaaagctatgctgacgttcaccaagtgagtgaagcagacgctcgcttatggctgcagcagctagaagaaaaaggccgatacgcaaaagacgtgtggctgggg

SEQ ID NO: 648 - protein, 1049 aa, synthetic construct
  REGION 1..1049: note = variant of P450 oxidase from Bacillus megaterium
MTIKEMPQPKTFGELKNLPLLNTDKPVQALMRIADELGEIFKFEAPGSVTRYLSSQRLIKEACDESRFDKNLSQALKFARDFVGDGLSTSWTHEPNWKKAHNILVPSFSQHAMGRYHAMMVDIAVQLVQKWERLNADEHIEVSEDMTRLTLDTIGLCGFNYRFNSFYRDQPHPFIVSVVRALDEVMNKLQRANPDDPAYDENKRQCQEDIKVMNDYVDKIIADRKARGEQSHDLLTQMLNGKDPETGEPLDDGNIRQQIITFLIAGHQTTSGLLSFALYFLVKNPHVLQKVAEEAARVLVDPVPSYKQVKQLKYVGMVLNEALRLWPVAPMFSLYAKEDTVLGGEYPLTKGDEVMVLVPQLHRDKTIWGDDVEEFRPERFENPSAIPQHAFKPFGNGQRACIGQQFALHEATLVLGMMLKHFDFEDHTNYELVIKESRTLKPEGFVVKAKSKGIPLGGIPSPSTEQSAKKVRKKAENAHNTPLLVLYGSNAGTAEGTARDLADIAMSKGFAPQVATLDSHAGNLPREGAVLIVTASYNGHPPDNAKQFVDWLDQASADEVKGVRYSVFGCGDKNWAGTYQKVPAFIDETLAAKGAENIADRGEADASDDFEGTYEEWRDHMWSDVAAYFNLDIENSEDNKSTLSLQFVDSAADMPLAKMHGAFSTNVVASKELQQPGSARSTRHLEIELPKEASYQEGDHLGVIPRNYEGIVNRVTARFGLSASQQIRLEAEEEKLAHLPLAKTVSVEELLQYVELQDPVTRTQLRAMAAKTVCPPHKVELEALLEKQAYKEQVLAKRLTMLELLEKYPACEMKFSEFIALLPSIRPRYYSISSSPRVDEKQASITVSVVSGPAWSGYGEYKGIASNYLAELQEGDTITCFISTPQSEFTLPKVPETPLIMVGPGTGVAPFRGFVQARKQLKEQGQSLGEAHLYFGCRSPHEDYLYQEELENAQSEGIITLHTAFSRMPNQPKTYVQHVMEQDGKKLIELLDQGAHFYICGDGSQMAPAVEATLMKSYADVHQVSEADARLWLQQLEEKGRYAKDVWLG

SEQ ID NO: 649 - DNA, 3147 bp, synthetic construct
  misc_feature 1..3147: note = variant of P450 oxidase from Bacillus megaterium
  source 1..3147: mol_type = other DNA
atgacaattaaggaaatgcctcagcctaagacgtttggagaacttaaaaatttaccgttattaaacacagataaaccggttcaagctttgatgcgtattgcggatgaattaggagaaatctttaaattcgaggcgcctggtagcgtaacgcgctatttatcaagtcagcgtctaattaaagaagcatgcgatgaatcacgctttgataaaaacttaagtcaagcgcttaaatttgcacgtgattttgttggagacgggctgtctacaagctggacgcatgaaccgaattggaaaaaagcgcataatatcttagttccaagctttagtcagcatgcaatggggcgttatcatgcgatgatggtcgatatcgccgtgcagcttgttcaaaagtgggagcgtctaaatgcagatgagcatattgaagtatcggaagacatgacacgtttaacgcttgatacaattggtctttgcggctttaactatcgctttaacagcttttaccgagatcagcctcatccatttattgtgagtgtggttcgtgcactggatgaagtaatgaacaagctgcagcgagcaaatccagacgacccagcttatgatgaaaacaagcgccagtgtcaagaagatatcaaggtgatgaacgactatgtagataaaattattgcagatcgcaaagcaaggggtgaacaaagtcatgatttattaacgcagatgctaaacggaaaagatccagaaacgggtgagccgcttgatgacgggaacattcgtcagcaaattattacattcttaattgcgggacaccaaacgacaagtggtcttttatcatttgcgctgtatttcttagtgaaaaatccacatgtattacaaaaagtagcagaagaagcagcacgagttctagtagatcctgttccaagctacaaacaagtcaaacagcttaaatatgttggcatggtcttaaacgaagcgctgcgcttatggccagtagcgcctatgttttccctatatgcaaaagaagatacggtgcttggaggagaatatcctttaacgaaaggcgacgaagtaatggttctggtgcctcagcttcaccgtgataaaacaatttggggagacgatgtggaggagttccgtccagagcgttttgaaaatccaagtgcgattccgcagcatgcgtttaaaccgtttggaaacggtcagcgtgcgtgtatcggtcagcagttcgctcttcatgaagcaacgctggtacttggtatgatgctaaaacactttgactttgaagatcatacaaactacgagctcgttattaaagaatcgcggacgttaaaacctgaaggctttgtggtaaaagcaaaatcgaaaggcattccgcttggcggtattccttcacctagcactgaacagtctgctaaaaaagtacgcaaaaaggcagaaaacgctcataatacgccgctgcttgtgctatacggttcaaatgcgggaacagctgaaggaacggcgcgtgatttagcagatattgcaatgagcaaaggatttgcaccgcaggtcgcaacgcttgattcacacgccggtaatcttccgcgcgaaggagctgtattaattgtaacggcgtcttataacggtcatccgcctgataacgcaaagcaatttgtcgactggttagaccaagcgtctgctgatgaagtaaaaggcgttcgctactccgtatttggatgcggcgataaaaattgggcggggacgtatcaaaaagtgcctgcttttatcgatgaaacgcttgccgctaaaggggcagaaaacatcgctgaccgcggtgaagcagatgcaagcgacgactttgaaggcacatatgaagaatggcgtgatcatatgtggagtgacgtagcagcctactttaacctcgacattgaaaacagtgaagataataaatctactctttcacttcaatttgtcgacagcgccgcggatatgccgcttgcgaaaatgcacggtgcgttttcaacgaacgtcgtagcaagcaaagaacttcaacagccaggcagtgcacgaagcacgcgacatcttgaaattgaacttccaaaagaagcttcttatcaagaaggagatcatttaggtgttattcctcgcaactatgaaggaatagtaaaccgtgtaacagcaaggttcggcctaagcgcatcacagcaaatccgtctggaagcagaagaagaaaaattagctcatttgccactcgctaaaacagtatccgtagaagagcttctgcaatacgtggagcttcaagatcctgttacgcgcacgcagcttcgcgcaatggctgctaaaacggtctgcccgccgcataaagtagagcttgaagagttgcttgaaaagcaagcctacaaagaacaagtgctggcaaaacgtttaacaatgcttgaactgcttgaaaaatacccggcgtgtgaaatgaaattcagcgaatttatcgcccttctgccaagcatacgcccgcgctattactcgatttcttcatcacctcgtgtcgatgaaaaacaagcaagcatcacggtcagcgttgtctcaggaccggcgtggagcggatatggagaatataaaggaattgcgtcgaactatcttgccgagctgcaagaaggagatacgattacgtgctttatttccacaccgcagtcagaatttacgctgccaaaagaccctgaaacgccgcttatcatggtcggaccgggaacaggcgtcgcgccgtttagaggctttgtgcaggcgcgcaaacagctaaaagaacaaggacagtcacttggagaagcacatttatacttcggctgccgttcacctcatgaagactatctgtatcaagaagagcttgaaaacgcccaaagcgaaggcatcattacgcttcataccgctttttctcgcatgccaaatcagccgaaaacatacgttcagcacgtaatggaacaagacggcaagaaattgattgaacttcttgatcaaggagcgcacttctatatttgcggagacggaagccaaatggcacctgccgttgaagcaacgcttatgaaaagctatgctgacgttcaccaagtgagtgaagcagacgctcgcttatggctgcagcagctagaagaaaaaggccgatacgcaaaagacgtgtggctgggg

SEQ ID NO: 650 - protein, 1049 aa, synthetic construct
  REGION 1..1049: note = variant of P450 oxidase from Bacillus megaterium
MTIKEMPQPKTFGELKNLPLLNTDKPVQALMRIADELGEIFKFEAPGSVTRYLSSQRLIKEACDESRFDKNLSQALKFARDFVGDGLSTSWTHEPNWKKAHNILVPSFSQHAMGRYHAMMVDIAVQLVQKWERLNADEHIEVSEDMTRLTLDTIGLCGFNYRFNSFYRDQPHPFIVSVVRALDEVMNKLQRANPDDPAYDENKRQCQEDIKVMNDYVDKIIADRKARGEQSHDLLTQMLNGKDPETGEPLDDGNIRQQIITFLIAGHQTTSGLLSFALYFLVKNPHVLQKVAEEAARVLVDPVPSYKQVKQLKYVGMVLNEALRLWPVAPMFSLYAKEDTVLGGEYPLTKGDEVMVLVPQLHRDKTIWGDDVEEFRPERFENPSAIPQHAFKPFGNGQRACIGQQFALHEATLVLGMMLKHFDFEDHTNYELVIKESRTLKPEGFVVKAKSKGIPLGGIPSPSTEQSAKKVRKKAENAHNTPLLVLYGSNAGTAEGTARDLADIAMSKGFAPQVATLDSHAGNLPREGAVLIVTASYNGHPPDNAKQFVDWLDQASADEVKGVRYSVFGCGDKNWAGTYQKVPAFIDETLAAKGAENIADRGEADASDDFEGTYEEWRDHMWSDVAAYFNLDIENSEDNKSTLSLQFVDSAADMPLAKMHGAFSTNVVASKELQQPGSARSTRHLEIELPKEASYQEGDHLGVIPRNYEGIVNRVTARFGLSASQQIRLEAEEEKLAHLPLAKTVSVEELLQYVELQDPVTRTQLRAMAAKTVCPPHKVELEELLEKQAYKEQVLAKRLTMLELLEKYPACEMKFSEFIALLPSIRPRYYSISSSPRVDEKQASITVSVVSGPAWSGYGEYKGIASNYLAELQEGDTITCFISTPQSEFTLPKDPETPLIMVGPGTGVAPFRGFVQARKQLKEQGQSLGEAHLYFGCRSPHEDYLYQEELENAQSEGIITLHTAFSRMPNQPKTYVQHVMEQDGKKLIELLDQGAHFYICGDGSQMAPAVEATLMKSYADVHQVSEADARLWLQQLEEKGRYAKDVWLG

SEQ ID NO: 651 - DNA, 3147 bp, synthetic construct
  misc_feature 1..3147: note = variant of P450 oxidase from Bacillus megaterium
  source 1..3147: mol_type = other DNA
atgacaattaaggaaatgcctcagcctaagacgtttggagaacttaaaaatttaccgttattaaacacagataaaccggttcaagctttgatgcgtattgcggatgaattaggagaaatctttaaattcgaggcgcctggtagcgtaacgcgctatttatcaagtcagcgtctaattaaagaagcatgcgatgaatcacgctttgataaaaacttaagtcaagcgcttaaatttgcacgtgattttgttggagacgggctgtctacaagctggacgcatgaaccgaattggaaaaaagcgcataatatcttagttccaagctttagtcagcatgcaatggggcgttatcatgcgatgatggtcgatatcgccgtgcagcttgttcaaaagtgggagcgtctaaatgcagatgagcatattgaagtatcggaagacatgacacgtttaacgcttgatacaattggtctttgcggctttaactatcgctttaacagcttttaccgagatcagcctcatccatttattgtgagtgtggttcgtgcactggatgaagtaatgaacaagctgcagcgagcaaatccagacgacccagcttatgatgaaaacaagcgccagtgtcaagaagatatcaaggtgatgaacgactatgtagataaaattattgcagatcgcaaagcaaggggtgaacaaagtcatgatttattaacgcagatgctaaacggaaaagatccagaaacgggtgagccgcttgatgacgggaacattcgtcagcaaattattacattcttaattgcgggacaccaaacgacaagtggtcttttatcatttgcgctgtatttcttagtgaaaaatccacatgtattacaaaaagtagcagaagaagcagcacgagttctagtagatcctgttccaagctacaaacaagtcaaacagcttaaatatgttggcatggtcttaaacgaagcgctgcgcttatggccagtagcgcctatgttttccctatatgcaaaagaagatacggtgcttggaggagaatatcctttaacgaaaggcgacgaagtaatggttctggtgcctcagcttcaccgtgataaaacaatttggggagacgatgtggaggagttccgtccagagcgttttgaaaatccaagtgcgattccgcagcatgcgtttaaaccgtttggaaacggtcagcgtgcgtgtatcggtcagcagttcgctcttcatgaagcaacgctggtacttggtatgatgctaaaacactttgactttgaagatcatacaaactacgagctcgttattaaagaatcgcggacgttaaaacctgaaggctttgtggtaaaagcaaaatcgaaaggcattccgcttggcggtattccttcacctagcactgaacagtctgctaaaaaagtacgcaaaaaggcagaaaacgctcataatacgccgctgcttgtgctatacggttcaaatgcgggaacagctgaaggaacggcgcgtgatttagcagatattgcaatgagcaaaggatttgcaccgcaggtcgcaacgcttgattcacacgccggtaatcttccgcgcgaaggagctgtattaattgtaacggcgtcttataacggtcatccgcctgataacgcaaagcaatttgtcgactggttagaccaagcgtctgctgatgaagtaaaaggcgttcgctactccgtatttggatgcggcgataaaaattgggcggggacgtatcaaaaagtgcctgcttttatcgatgaaacgcttgccgctaaaggggcagaaaacatcgctgaccgcggtgaagcagatgcaagcgacgactttgaaggcacatatgaagaatggcgtgatcatatgtggagtgacgtagcagcctactttaacctcgacattgaaaacagtgaagataataaatctactctttcacttcaatttgtcgacagcgccgcggatatgccgcttgcgaaaatgcacggtgcgttttcaacgaacgtcgtagcaagcaaagaacttcaacagccaggcagtgcacgaagcacgcgacatcttgaaattgaacttccaaaagaagcttcttatcaagaaggagatcatttaggtgttattcctcgcaactatgaaggaatagtaaaccgtgtaacagcaaggttcggcctaagcgcatcacagcaaatccgtctggaagcagaagaagaaaaattagctcatttgccactcgctaaaacagtatccgtagaagagcttctgcaatacgtggagcttcaagatcctgttacgcgcacgcagcttcgcgcaatggctgctaaaacggtctgcccgccgcataaagtagagcttgaagccttgcttgaaaagcaagcctacaaagaacaagtgctggcaaaacgtttaacaatgcttgaactgcttgaaaaatacccggcgtgtgaaatgaaattcagcgaatttatcgcccttctgccaagcatacgcccgcgctattactcgatttcttcatcacctcgtgtcgatgaaaaacaagcaagcatcacggtcagcgttgtccttggaccggcgtggagcggatatggagaatataaaggaattgcgtcgaactatcttgccgagctgcaagaaggagatacgattacgtgctttatttccacaccgcagtcagaatttacgctgccaaaagaccctgaaacgccgcttatcatggtcggaccgggaacaggcgtcgcgccgtttagaggctttgtgcaggcgcgcaaacagctaaaagaacaaggacagtcacttggagaagcacatttatacttcggctgccgttcacctcatgaagactatctgtatcaagaagagcttgaaaacgcccaaagcgaaggcatcattacgcttcataccgctttttctcgcatgccaaatcagccgaaaacatacgttcagcacgtaatggaacaagacggcaagaaattgattgaacttcttgatcaaggagcgcacttctatatttgcggagacggaagccaaatggcacctgccgttgaagcaacgcttatgaaaagctatgctgacgttcaccaagtgagtgaagcagacgctcgcttatggctgcagcagctagaagaaaaaggccgatacgcaaaagacgtgtggctgggg

SEQ ID NO: 652 - protein, 1049 aa, synthetic construct
  REGION 1..1049: note = variant of P450 oxidase from Bacillus megaterium
MTIKEMPQPKTFGELKNLPLLNTDKPVQALMRIADELGEIFKFEAPGSVTRYLSSQRLIKEACDESRFDKNLSQALKFARDFVGDGLSTSWTHEPNWKKAHNILVPSFSQHAMGRYHAMMVDIAVQLVQKWERLNADEHIEVSEDMTRLTLDTIGLCGFNYRFNSFYRDQPHPFIVSVVRALDEVMNKLQRANPDDPAYDENKRQCQEDIKVMNDYVDKIIADRKARGEQSHDLLTQMLNGKDPETGEPLDDGNIRQQIITFLIAGHQTTSGLLSFALYFLVKNPHVLQKVAEEAARVLVDPVPSYKQVKQLKYVGMVLNEALRLWPVAPMFSLYAKEDTVLGGEYPLTKGDEVMVLVPQLHRDKTIWGDDVEEFRPERFENPSAIPQHAFKPFGNGQRACIGQQFALHEATLVLGMMLKHFDFEDHTNYELVIKESRTLKPEGFVVKAKSKGIPLGGIPSPSTEQSAKKVRKKAENAHNTPLLVLYGSNAGTAEGTARDLADIAMSKGFAPQVATLDSHAGNLPREGAVLIVTASYNGHPPDNAKQFVDWLDQASADEVKGVRYSVFGCGDKNWAGTYQKVPAFIDETLAAKGAENIADRGEADASDDFEGTYEEWRDHMWSDVAAYFNLDIENSEDNKSTLSLQFVDSAADMPLAKMHGAFSTNVVASKELQQPGSARSTRHLEIELPKEASYQEGDHLGVIPRNYEGIVNRVTARFGLSASQQIRLEAEEEKLAHLPLAKTVSVEELLQYVELQDPVTRTQLRAMAAKTVCPPHKVELEALLEKQAYKEQVLAKRLTMLELLEKYPACEMKFSEFIALLPSIRPRYYSISSSPRVDEKQASITVSVVLGPAWSGYGEYKGIASNYLAELQEGDTITCFISTPQSEFTLPKDPETPLIMVGPGTGVAPFRGFVQARKQLKEQGQSLGEAHLYFGCRSPHEDYLYQEELENAQSEGIITLHTAFSRMPNQPKTYVQHVMEQDGKKLIELLDQGAHFYICGDGSQMAPAVEATLMKSYADVHQVSEADARLWLQQLEEKGRYAKDVWLG

SEQ ID NO: 653 - DNA, 3147 bp, synthetic construct
  misc_feature 1..3147: note = variant of P450 oxidase from Bacillus megaterium
  source 1..3147: mol_type = other DNA
atgacaattaaggaaatgcctcagcctaagacgtttggagaacttaaaaatttaccgttattaaacacagataaaccggttcaagctttgatgcgtattgcggatgaattaggagaaatctttaaattcgaggcgcctggtagcgtaacgcgctatttatcaagtcagcgtctaattaaagaagcatgcgatgaatcacgctttgataaaaacttaagtcaagcgcttaaatttgcacgtgattttgttggagacgggctgtctacaagctggacgcatgaaccgaattggaaaaaagcgcataatatcttagttccaagctttagtcagcatgcaatggggcgttatcatgcgatgatggtcgatatcgccgtgcagcttgttcaaaagtgggagcgtctaaatgcagatgagcatattgaagtatcggaagacatgacacgtttaacgcttgatacaattggtctttgcggctttaactatcgctttaacagcttttaccgagatcagcctcatccatttattgtgagtgtggttcgtgcactggatgaagtaatgaacaagctgcagcgagcaaatccagacgacccagcttatgatgaaaacaagcgccagtgtcaagaagatatcaaggtgatgaacgactatgtagataaaattattgcagatcgcaaagcaaggggtgaacaaagtcatgatttattaacgcagatgctaaacggaaaagatccagaaacgggtgagccgcttgatgacgggaacattcgtcagcaaattattacattcttaattgcgggacaccaaacgacaagtggtcttttatcatttgcgctgtatttcttagtgaaaaatccacatgtattacaaaaagtagcagaagaagcagcacgagttctagtagatcctgttccaagctacaaacaagtcaaacagcttaaatatgttggcatggtcttaaacgaagcgctgcgcttatggccagtagcgcctatgttttccctatatgcaaaagaagatacggtgcttggaggagaatatcctttaacgaaaggcgacgaagtaatggttctggtgcctcagcttcaccgtgataaaacaatttggggagacgatgtggaggagttccgtccagagcgttttgaaaatccaagtgcgattccgcagcatgcgtttaaaccgtttggaaacggtcagcgtgcgtgtatcggtcagcagttcgctcttcatgaagcaacgctggtacttggtatgatgctaaaacactttgactttgaagatcatacaaactacgagctcgttattaaagaatcgcggacgttaaaacctgaaggctttgtggtaaaagcaaaatcgaaaggcattccgcttggcggtattccttcacctagcactgaacagtctgctaaaaaagtacgcaaaaaggcagaaaacgctcataatacgccgctgcttgtgctatacggttcaaatgcgggaacagctgaaggaacggcgcgtgatttagcagatattgcaatgagcaaaggatttgcaccgcaggtcgcaacgcttgattcacacgccggtaatcttccgcgcgaaggagctgtattaattgtaacggcgtcttataacggtcatccgcctgataacgcaaagcaatttgtcgactggttagaccaagcgtctgctgatgaagtaaaaggcgttcgctactccgtatttggatgcggcgataaaaattgggcggggacgtatcaaaaagtgcctgcttttatcgatgaaacgcttgccgctaaaggggcagaaaacatcgctgaccgcggtgaagcagatgcaagcgacgactttgaaggcacatatgaagaatggcgtgatcatatgtggagtgacgtagcagcctactttaacctcgacattgaaaacagtgaagataataaatctactctttcacttcaatttgtcgacagcgccgcggatatgccgcttgcgaaaatgcacggtgcgttttcaacgaacgtcgtagcaagcaaagaacttcaacagccaggcagtgcacgaagcacgcgacatcttgaaattgaacttccaaaagaagcttcttatcaagaaggagatcatttaggtgttattcctcgcaactatgaaggaatagtaaaccgtgtaacagcaaggttcggcctaagcgcatcacagcaaatccgtctggaagcagaagaagaaaaattagctcatttgccactcgctaaaacagtatccgtagaagagcttctgcaatacgtggagcttcaagatcctgttacgcgcacgcagcttcgcgcaatggctgctaaaacggtctgcccgccgcataaagtagagcttgaagccttgcttgaaaagcaagcctacaaagaacaagtgctggcaaaacgtttaacaatgcttgaactgcttgaaaaatacccggcgtgtgaaatgaaattcagcgaatttatcgcccttctgccaagcatacgcccgcgctattactcgatttcttcatcacctcgtgtcgatgaaaaacaagcaagcatcacggtcagcgttgtctcaggaccggcgtggagcggatatggagaatataaaggaattgcgtcgaactatcttgccgagctgcaagaaggagatacgattacgtgctttatttccacaccgcagtcagaatttacgctgccaaaagaccctgaaacgccgcttatcatggtcggaccgggaacaggcgtcgcgccgtttagaggctttgtgcaggcgcgcaaacagctaaaagaacaaggacagtcacttggagaagcacatttatacttcggctgccgttcacctcatgaagactatctgtatcaagaagagcttgaaaacgcccaaagcgaaggcatcattacgcttcataccgctttttctcgcatgccaaatcagccgaaaacatacgttcagcacgtaatggaacaagacggcaagaaattgattgaacttcttgatcaaggagcgcacttctatatttgcggagacggaagccaaatggcacctgccgttgaagcaacgcttatgaaaagctatgctgacgttcaccaagtgacggaagcagacgctcgcttatggctgcagcagctagaagaaaaaggccgatacgcaaaagacgtgtggctgggg

SEQ ID NO: 654 - protein, 1049 aa, synthetic construct
  REGION 1..1049: note = variant of P450 oxidase from Bacillus megaterium
MTIKEMPQPKTFGELKNLPLLNTDKPVQALMRIADELGEIFKFEAPGSVTRYLSSQRLIKEACDESRFDKNLSQALKFARDFVGDGLSTSWTHEPNWKKAHNILVPSFSQHAMGRYHAMMVDIAVQLVQKWERLNADEHIEVSEDMTRLTLDTIGLCGFNYRFNSFYRDQPHPFIVSVVRALDEVMNKLQRANPDDPAYDENKRQCQEDIKVMNDYVDKIIADRKARGEQSHDLLTQMLNGKDPETGEPLDDGNIRQQIITFLIAGHQTTSGLLSFALYFLVKNPHVLQKVAEEAARVLVDPVPSYKQVKQLKYVGMVLNEALRLWPVAPMFSLYAKEDTVLGGEYPLTKGDEVMVLVPQLHRDKTIWGDDVEEFRPERFENPSAIPQHAFKPFGNGQRACIGQQFALHEATLVLGMMLKHFDFEDHTNYELVIKESRTLKPEGFVVKAKSKGIPLGGIPSPSTEQSAKKVRKKAENAHNTPLLVLYGSNAGTAEGTARDLADIAMSKGFAPQVATLDSHAGNLPREGAVLIVTASYNGHPPDNAKQFVDWLDQASADEVKGVRYSVFGCGDKNWAGTYQKVPAFIDETLAAKGAENIADRGEADASDDFEGTYEEWRDHMWSDVAAYFNLDIENSEDNKSTLSLQFVDSAADMPLAKMHGAFSTNVVASKELQQPGSARSTRHLEIELPKEASYQEGDHLGVIPRNYEGIVNRVTARFGLSASQQIRLEAEEEKLAHLPLAKTVSVEELLQYVELQDPVTRTQLRAMAAKTVCPPHKVELEALLEKQAYKEQVLAKRLTMLELLEKYPACEMKFSEFIALLPSIRPRYYSISSSPRVDEKQASITVSVVSGPAWSGYGEYKGIASNYLAELQEGDTITCFISTPQSEFTLPKDPETPLIMVGPGTGVAPFRGFVQARKQLKEQGQSLGEAHLYFGCRSPHEDYLYQEELENAQSEGIITLHTAFSRMPNQPKTYVQHVMEQDGKKLIELLDQGAHFYICGDGSQMAPAVEATLMKSYADVHQVTEADARLWLQQLEEKGRYAKDVWLG

SEQ ID NO: 655 - DNA, 3147 bp, synthetic construct
  misc_feature 1..3147: note = variant of P450 oxidase from Bacillus megaterium
  source 1..3147: mol_type = other DNA
atgacaattaaggaaatgcctcagcctaagacgtttggagaacttaaaaatttaccgttattaaacacagataaaccggttcaagctttgatgcgtattgcggatgaattaggagaaatctttaaattcgaggcgcctggtagcgtaacgcgctatttatcaagtcagcgtctaattaaagaagcatgcgatgaatcacgctttgataaaaacttaagtcaagcgcttaaatttgcacgtgattttgttggagacgggctgtctacaagctggacgcatgaaccgaattggaaaaaagcgcataatatcttagttccaagctttagtcagcatgcaatggggcgttatcatgcgatgatggtcgatatcgccgtgcagcttgttcaaaagtgggagcgtctaaatgcagatgagcatattgaagtatcggaagacatgacacgtttaacgcttgatacaattggtctttgcggctttaactatcgctttaacagcttttaccgagatcagcctcatccatttattgtgagtgtggttcgtgcactggatgaagtaatgaacaagctgcagcgagcaaatccagacgacccagcttatgatgaaaacaagcgccagtgtcaagaagatatcaaggtgatgaacgactatgtagataaaattattgcagatcgcaaagcaaggggtgaacaaagtcatgatttattaacgcagatgctaaacggaaaagatccagaaacgggtgagccgcttgatgacgggaacattcgtcagcaaattattacattcttaattgcgggacaccaaacgacaagtggtcttttatcatttgcgctgtatttcttagtgaaaaatccacatgtattacaaaaagtagcagaagaagcagcacgagttctagtagatcctgttccaagctacaaacaagtcaaacagcttaaatatgttggcatggtcttaaacgaagcgctgcgcttatggccagtagcgcctatgttttccctatatgcaaaagaagatacggtgcttggaggagaatatcctttaacgaaaggcgacgaagtaatggttctggtgcctcagcttcaccgtgataaaacaatttggggagacgatgtggaggagttccgtccagagcgttttgaaaatccaagtgcgattccgcagcatgcgtttaaaccgtttggaaacggtcagcgtgcgtgtatcggtcagcagttcgctcttcatgaagcaacgctggtacttggtatgatgctaaaacactttgactttgaagatcatacaaactacgagctcgttattaaagaatcgcggacgttaaaacctgaaggctttgtggtaaaagcaaaatcgaaaggcattccgcttggcggtattccttcacctagcactgaacagtctgctaaaaaagtacgcaaaaaggcagaaaacgctcataatacgccgctgcttgtgctatacggttcaaatgcgggaacagctgaaggaacggcgcgtgatttagcagatattgcaatgagcaaaggatttgcaccgcaggtcgcaacgcttgattcacacgccggtaatcttccgcgcgaaggagctgtattaattgtaacggcgtcttataacggtcatccgcctgataacgcaaagcaatttgtcgactggttagaccaagcgtctgctgatgaagtaaaaggcgttcgctactccgtatttggatgcggcgataaaaattgggcggggacgtatcaaaaagtgcctgcttttatcgatgaaacgcttgccgctaaaggggcagaaaacatcgctgaccgcggtgaagcagatgcaagcgacgactttgaaggcacatatgaagaatggcgtgatcatatgtggagtgacgtagcagcctactttaacctcgacattgaaaacagtgaagataataaatctactctttcacttcaatttgtcgacagcgccgcggatatgccgcttgcgaaaatgcacggtgcgttttcaacgaacgtcgtagcaagcaaagaacttcaacagccaggcagtgcacgaagcacgcgacatcttgaaattgaacttccaaaagaagcttcttatcaagaaggagatcatttaggtgttattcctcgcaactatgaaggaatagtaaaccgtgtaacagcaaggttcggcctaagcgcatcacagcaaatccgtctggaagcagaagaagaaaaattagctcatttgccactcgctaaaacagtatccgtagaagagcttctgcaatacgtggagcttcaagatcctgttacgcgcacgcagcttcgcgcaatggctgctaaaacggtctgcccgccgcataaagtagagcttgaagccttgcttgaaaagcaagcctacaaagaacaagtgctggcaaaacgtttaacaatgcttgaactgcttgaaaaatacccggcgtgtgaaatgaaattcagcgaatttatcgcccttctgccaagcatacgcccgcgctattactcgatttcttcatcacctcgtgtcgatgaaaaacaagcaagcatcacggtcagcgttgtctcaggaccggcgtggagcggatatggagaatataaaggaattgcgtcgaactatcttgccgagctgcaagaaggagatacgattacgtgctttatttccacaccgcagtcagaatttacgctgccaaaagaccctgaaacgccgcttatcatggtcggaccgggaacaggcgtcgcgccgtttagaggctttgtgcaggcgcgcaaacagctaaaagaacaaggacagtcacttggagaagcacatttatacttcggctgccgttcacctcatgaagactatctgtatcaagaagagcttgaaaacgcccaaagcgaaggcatcattacgcttcataccgctttttctcgcatgccaaatcagccgaaaacatacgttcagcacgtaatggaacaagacggcaagaaattgattgaacttcttgatcaaggagcgcacttctatatttgcggagacggaagccaaatggcacctgccgttgaagcaacgcttatgaaaagctatgctgacgttcaccaaattagtgaagcagacgctcgcttatggctgcagcagctagaagaaaaaggccgatacgcaaaagacgtgtggctgggg

SEQ ID NO: 656 - protein, 1049 aa, synthetic construct
  REGION 1..1049: note = variant of P450 oxidase from Bacillus megaterium
MTIKEMPQPKTFGELKNLPLLNTDKPVQALMRIADELGEIFKFEAPGSVTRYLSSQRLIKEACDESRFDKNLSQALKFARDFVGDGLSTSWTHEPNWKKAHNILVPSFSQHAMGRYHAMMVDIAVQLVQKWERLNADEHIEVSEDMTRLTLDTIGLCGFNYRFNSFYRDQPHPFIVSVVRALDEVMNKLQRANPDDPAYDENKRQCQEDIKVMNDYVDKIIADRKARGEQSHDLLTQMLNGKDPETGEPLDDGNIRQQIITFLIAGHQTTSGLLSFALYFLVKNPHVLQKVAEEAARVLVDPVPSYKQVKQLKYVGMVLNEALRLWPVAPMFSLYAKEDTVLGGEYPLTKGDEVMVLVPQLHRDKTIWGDDVEEFRPERFENPSAIPQHAFKPFGNGQRACIGQQFALHEATLVLGMMLKHFDFEDHTNYELVIKESRTLKPEGFVVKAKSKGIPLGGIPSPSTEQSAKKVRKKAENAHNTPLLVLYGSNAGTAEGTARDLADIAMSKGFAPQVATLDSHAGNLPREGAVLIVTASYNGHPPDNAKQFVDWLDQASADEVKGVRYSVFGCGDKNWAGTYQKVPAFIDETLAAKGAENIADRGEADASDDFEGTYEEWRDHMWSDVAAYFNLDIENSEDNKSTLSLQFVDSAADMPLAKMHGAFSTNVVASKELQQPGSARSTRHLEIELPKEASYQEGDHLGVIPRNYEGIVNRVTARFGLSASQQIRLEAEEEKLAHLPLAKTVSVEELLQYVELQDPVTRTQLRAMAAKTVCPPHKVELEALLEKQAYKEQVLAKRLTMLELLEKYPACEMKFSEFIALLPSIRPRYYSISSSPRVDEKQASITVSVVSGPAWSGYGEYKGIASNYLAELQEGDTITCFISTPQSEFTLPKDPETPLIMVGPGTGVAPFRGFVQARKQLKEQGQSLGEAHLYFGCRSPHEDYLYQEELENAQSEGIITLHTAFSRMPNQPKTYVQHVMEQDGKKLIELLDQGAHFYICGDGSQMAPAVEATLMKSYADVHQISEADARLWLQQLEEKGRYAKDVWLG

SEQ ID NO: 657 - DNA, 3147 bp, synthetic construct
  misc_feature 1..3147: note = variant of P450 oxidase from Bacillus megaterium
  source 1..3147: mol_type = other DNA
atgacaattaaggaaatgcctcagcctaagacgtttggagaacttaaaaatttaccgttattaaacacagataaaccggttcaagctttgatgcgtattgcggatgaattaggagaaatctttaaattcgaggcgcctggtagcgtaacgcgctatttatcaagtcagcgtctaattaaagaagcatgcgatgaatcacgctttgataaaaacttaagtcaagcgcttaaatttgcacgtgattttgttggagacgggctgtctacaagctggacgcatgaaccgaattggaaaaaagcgcataatatcttagttccaagctttagtcagcatgcaatggggcgttatcatgcgatgatggtcgatatcgccgtgcagcttgttcaaaagtgggagcgtctaaatgcagatgagcatattgaagtatcggaagacatgacacgtttaacgcttgatacaattggtctttgcggctttaactatcgctttaacagcttttaccgagatcagcctcatccatttattgtgagtgtggttcgtgcactggatgaagtaatgaacaagctgcagcgagcaaatccagacgacccagcttatgatgaaaacaagcgccagtgtcaagaagatatcaaggtgatgaacgactatgtagataaaattattgcagatcgcaaagcaaggggtgaacaaagtcatgatttattaacgcagatgctaaacggaaaagatccagaaacgggtgagccgcttgatgacgggaacattcgtcagcaaattattacattcttaattgcgggacaccaaacgacaagtggtcttttatcatttgcgctgtatttcttagtgaaaaatccacatgtattacaaaaagtagcagaagaagcagcacgagttctagtagatcctgttccaagctacaaacaagtcaaacagcttaaatatgttggcatggtcttaaacgaagcgctgcgcttatggccagtagcgcctatgttttccctatatgcaaaagaagatacggtgcttggaggagaatatcctttaacgaaaggcgacgaagtaatggttctggtgcctcagcttcaccgtgataaaacaatttggggagacgatgtggaggagttccgtccagagcgttttgaaaatccaagtgcgattccgcagcatgcgtttaaaccgtttggaaacggtcagcgtgcgtgtatcggtcagcagttcgctcttcatgaagcaacgctggtacttggtatgatgctaaaacactttgactttgaagatcatacaaactacgagctcgttattaaagaatcgcggacgttaaaacctgaaggctttgtggtaaaagcaaaatcgaaaggcattccgcttggcggtattccttcacctagcactgaacagtctgctaaaaaagtacgcaaaaaggcagaaaacgctcataatacgccgctgcttgtgctatacggttcaaatgcgggaacagctgaaggaacggcgcgtgatttagcagatattgcaatgagcaaaggatttgcaccgcaggtcgcaacgcttgattcacacgccggtaatcttccgcgcgaaggagctgtattaattgtaacggcgtcttataacggtcatccgcctgataacgcaaagcaatttgtcgactggttagaccaagcgtctgctgatgaagtaaaaggcgttcgctactccgtatttggatgcggcgataaaaattgggcggggacgtatcaaaaagtgcctgcttttatcgatgaaacgcttgccgctaaaggggcagaaaacatcgctgaccgcggtgaagcagatgcaagcgacgactttgaaggcacatatgaagaatggcgtgatcatatgtggagtgacgtagcagcctactttaacctcgacattgaaaacagtgaagataataaatctactctttcacttcaatttgtcgacagcgccgcggatatgccgcttgcgaaaatgcacggtgcgttttcaacgaacgtcgtagcaagcaaagaacttcaacagccaggcagtgcacgaagcacgcgacatcttgaaattgaacttccaaaagaagcttcttatcaagaaggagatcatttaggtgttattcctcgcaactatgaaggaatagtaaaccgtgtaacagcaaggttcggcctaagcgcatcacagcaaatccgtctggaagcagaagaagaaaaattagctcatttgccactcgctaaaacagtatccgtagaagagcttctgcaatacgtggagcttcaagatcctgttacgcgcacgcagcttcgcgcaatggctgctattacggtctgcccgccgcataaagtagagcttgaagccttgcttgaaaagcaagcctacaaagaacaagtgctggcaaaacgtttaacaatgcttgaactgcttgaaaaatacccggcgtgtgaaatgaaattcagcgaatttatcgcccttctgccaagcatacgcccgcgctattactcgatttcttcatcacctcgtgtcgatgaaaaacaagcaagcatcacggtcagcgttgtctcaggaccggcgtggagcggatatggagaatataaaggaattgcgtcgaactatcttgccgagctgcaagaaggagatacgattacgtgctttatttccacaccgcagtcagaatttacgctgccaaaagaccctgaaacgccgcttatcatggtcggaccgggaacaggcgtcgcgccgtttagaggctttgtgcaggcgcgcaaacagctaaaagaacaaggacagtcacttggagaagcacatttatacttcggctgccgttcacctcatgaagactatctgtatcaagaagagcttgaaaacgcccaaagcgaaggcatcattacgcttcataccgctttttctcgcatgccaaatcagccgaaaacatacgttcagcacgtaatggaacaagacggcaagaaattgattgaacttcttgatcaaggagcgcacttctatatttgcggagacggaagccaaatggcacctgccgttgaagcaacgcttatgaaaagctatgctgacgttcaccaagtgagtgaagcagacgctcgcttatggctgcagcagctagaagaaaaaggccgatacgcaaaagacgtgtggctgggg

SEQ ID NO: 658 - protein, 1049 aa, synthetic construct
  REGION 1..1049: note = variant of P450 oxidase from Bacillus megaterium
MTIKEMPQPKTFGELKNLPLLNTDKPVQALMRIADELGEIFKFEAPGSVTRYLSSQRLIKEACDESRFDKNLSQALKFARDFVGDGLSTSWTHEPNWKKAHNILVPSFSQHAMGRYHAMMVDIAVQLVQKWERLNADEHIEVSEDMTRLTLDTIGLCGFNYRFNSFYRDQPHPFIVSVVRALDEVMNKLQRANPDDPAYDENKRQCQEDIKVMNDYVDKIIADRKARGEQSHDLLTQMLNGKDPETGEPLDDGNIRQQIITFLIAGHQTTSGLLSFALYFLVKNPHVLQKVAEEAARVLVDPVPSYKQVKQLKYVGMVLNEALRLWPVAPMFSLYAKEDTVLGGEYPLTKGDEVMVLVPQLHRDKTIWGDDVEEFRPERFENPSAIPQHAFKPFGNGQRACIGQQFALHEATLVLGMMLKHFDFEDHTNYELVIKESRTLKPEGFVVKAKSKGIPLGGIPSPSTEQSAKKVRKKAENAHNTPLLVLYGSNAGTAEGTARDLADIAMSKGFAPQVATLDSHAGNLPREGAVLIVTASYNGHPPDNAKQFVDWLDQASADEVKGVRYSVFGCGDKNWAGTYQKVPAFIDETLAAKGAENIADRGEADASDDFEGTYEEWRDHMWSDVAAYFNLDIENSEDNKSTLSLQFVDSAADMPLAKMHGAFSTNVVASKELQQPGSARSTRHLEIELPKEASYQEGDHLGVIPRNYEGIVNRVTARFGLSASQQIRLEAEEEKLAHLPLAKTVSVEELLQYVELQDPVTRTQLRAMAAITVCPPHKVELEALLEKQAYKEQVLAKRLTMLELLEKYPACEMKFSEFIALLPSIRPRYYSISSSPRVDEKQASITVSVVSGPAWSGYGEYKGIASNYLAELQEGDTITCFISTPQSEFTLPKDPETPLIMVGPGTGVAPFRGFVQARKQLKEQGQSLGEAHLYFGCRSPHEDYLYQEELENAQSEGIITLHTAFSRMPNQPKTYVQHVMEQDGKKLIELLDQGAHFYICGDGSQMAPAVEATLMKSYADVHQVSEADARLWLQQLEEKGRYAKDVWLG

SEQ ID NO: 659 - DNA, 3147 bp, synthetic construct
  misc_feature 1..3147: note = variant of P450 oxidase from Bacillus megaterium
  source 1..3147: mol_type = other DNA
atgacaattaaggaaatgcctcagcctaagacgtttggagaacttaaaaatttaccgttattaaacacagataaaccggttcaagctttgatgcgtattgcggatgaattaggagaaatctttaaattcgaggcgcctggtagcgtaacgcgctatttatcaagtcagcgtctaattaaagaagcatgcgatgaatcacgctttgataaaaacttaagtcaagcgcttaaatttgcacgtgattttgttggagacgggctgtctacaagctggacgcatgaaccgaattggaaaaaagcgcataatatcttagttccaagctttagtcagcatgcaatggggcgttatcatgcgatgatggtcgatatcgccgtgcagcttgttcaaaagtgggagcgtctaaatgcagatgagcatattgaagtatcggaagacatgacacgtttaacgcttgatacaattggtctttgcggctttaactatcgctttaacagcttttaccgagatcagcctcatccatttattgtgagtgtggttcgtgcactggatgaagtaatgaacaagctgcagcgagcaaatccagacgacccagcttatgatgaaaacaagcgccagtgtcaagaagatatcaaggtgatgaacgactatgtagataaaattattgcagatcgcaaagcaaggggtgaacaaagtcatgatttattaacgcagatgctaaacggaaaagatccagaaacgggtgagccgcttgatgacgggaacattcgtcagcaaattattacattcttaattgcgggacaccaaacgacaagtggtcttttatcatttgcgctgtatttcttagtgaaaaatccacatgtattacaaaaagtagcagaagaagcagcacgagttctagtagatcctgttccaagctacaaacaagtcaaacagcttaaatatgttggcatggtcttaaacgaagcgctgcgcttatggccagtagcgcctatgttttccctatatgcaaaagaagatacggtgcttggaggagaatatcctttaacgaaaggcgacgaagtaatggttctggtgcctcagcttcaccgtgataaaacaatttggggagacgatgtggaggagttccgtccagagcgttttgaaaatccaagtgcgattccgcagcatgcgtttaaaccgtttggaaacggtcagcgtgcgtgtatcggtcagcagttcgctcttcatgaagcaacgctggtacttggtatgatgctaaaacactttgactttgaagatcatacaaactacgagctcgttattaaagaatcgcggacgttaaaacctgaaggctttgtggtaaaagcaaaatcgaaaggcattccgcttggcggtattccttcacctagcactgaacagtctgctaaaaaagtacgcaaaccggcagaaaacgctcataatacgccgctgcttgtgctatacggttcaaatgcgggaacagctgaaggaacggcgcgtgatttagcagatattgcaatgagcaaaggatttgcaccgcaggtcgcaacgcttgattcacacgccggtaatcttccgcgcgaaggagctgtattaattgtaacggcgtcttataacggtcatccgcctgataacgcaaagcaatttgtcgactggttagaccaagcgtctgctgatgaagtaaaaggcgttcgctactccgtatttggatgcggcgataaaaattgggcggggacgtatcaaaaagtgcctgcttttatcgatgaaacgcttgccgctaaaggggcagaaaacatcgctgaccgcggtgaagcagatgcaagcgacgactttgaaggcacatatgaagaatggcgtgatcatatgtggagtgacgtagcagcctactttaacctcgacattgaaaacagtgaagataataaatctactctttcacttcaatttgtcgacagcgccgcggatatgccgcttgcgaaaatgcacggtgcgttttcaacgaacgtcgtagcaagcaaagaacttcaacagccaggcagtgcacgaagcacgcgacatcttgaaattgaacttccaaaagaagcttcttatcaagaaggagatcatttaggtgttattcctcgcaactatgaaggaatagtaaaccgtgtaacagcaaggttcggcctaagcgcatcacagcaaatccgtctggaagcagaagaagaaaaattagctcatttgccactcgctaaaacagtatccgtagaagagcttctgcaatacgtggagcttcaagatcctgttacgcgcacgcagcttcgcgcaatggctgctaaaacggtctgcccgccgcataaagtagagcttgaagccttgcttgaaaagcaagcctacaaagaacaagtgctggcaaaacgtttaacaatgcttgaactgcttgaaaaatacccggcgtgtgaaatgaaattcagcgaatttatcgcccttctgccaagcatacgcccgcgctattactcgatttcttcatcacctcgtgtcgatgaaaaacaagcaagcatcacggtcagcgttgtctcaggaccggcgtggagcggatatggagaatataaaggaattgcgtcgaactatcttgccgagctgcaagaaggagatacgattacgtgctttatttccacaccgcagtcagaatttacgctgccaaaagaccctgaaacgccgcttatcatggtcggaccgggaacaggcgtcgcgccgtttagaggctttgtgcaggcgcgcaaacagctaaaagaacaaggacagtcacttggagaagcacatttatacttcggctgccgttcacctcatgaagactatctgtatcaagaagagcttgaaaacgcccaaagcgaaggcatcattacgcttcataccgctttttctcgcatgccaaatcagccgaaaacatacgttcagcacgtaatggaacaagacggcaagaaattgattgaacttcttgatcaaggagcgcacttctatatttgcggagacggaagccaaatggcacctgccgttgaagcaacgcttatgaaaagctatgctgacgttcaccaagtgagtgaagcagacgctcgcttatggctgcagcagctagaagaaaaaggccgatacgcaaaagacgtgtggctgggg

SEQ ID NO: 660 - protein, 1049 aa, synthetic construct
  REGION 1..1049: note = variant of P450 oxidase from Bacillus megaterium
MTIKEMPQPKTFGELKNLPLLNTDKPVQALMRIADELGEIFKFEAPGSVTRYLSSQRLIKEACDESRFDKNLSQALKFARDFVGDGLSTSWTHEPNWKKAHNILVPSFSQHAMGRYHAMMVDIAVQLVQKWERLNADEHIEVSEDMTRLTLDTIGLCGFNYRFNSFYRDQPHPFIVSVVRALDEVMNKLQRANPDDPAYDENKRQCQEDIKVMNDYVDKIIADRKARGEQSHDLLTQMLNGKDPETGEPLDDGNIRQQIITFLIAGHQTTSGLLSFALYFLVKNPHVLQKVAEEAARVLVDPVPSYKQVKQLKYVGMVLNEALRLWPVAPMFSLYAKEDTVLGGEYPLTKGDEVMVLVPQLHRDKTIWGDDVEEFRPERFENPSAIPQHAFKPFGNGQRACIGQQFALHEATLVLGMMLKHFDFEDHTNYELVIKESRTLKPEGFVVKAKSKGIPLGGIPSPSTEQSAKKVRKPAENAHNTPLLVLYGSNAGTAEGTARDLADIAMSKGFAPQVATLDSHAGNLPREGAVLIVTASYNGHPPDNAKQFVDWLDQASADEVKGVRYSVFGCGDKNWAGTYQKVPAFIDETLAAKGAENIADRGEADASDDFEGTYEEWRDHMWSDVAAYFNLDIENSEDNKSTLSLQFVDSAADMPLAKMHGAFSTNVVASKELQQPGSARSTRHLEIELPKEASYQEGDHLGVIPRNYEGIVNRVTARFGLSASQQIRLEAEEEKLAHLPLAKTVSVEELLQYVELQDPVTRTQLRAMAAKTVCPPHKVELEALLEKQAYKEQVLAKRLTMLELLEKYPACEMKFSEFIALLPSIRPRYYSISSSPRVDEKQASITVSVVSGPAWSGYGEYKGIASNYLAELQEGDTITCFISTPQSEFTLPKDPETPLIMVGPGTGVAPFRGFVQARKQLKEQGQSLGEAHLYFGCRSPHEDYLYQEELENAQSEGIITLHTAFSRMPNQPKTYVQHVMEQDGKKLIELLDQGAHFYICGDGSQMAPAVEATLMKSYADVHQVSEADARLWLQQLEEKGRYAKDVWLG

SEQ ID NO: 661 - DNA, 3147 bp, synthetic construct
  misc_feature 1..3147: note = variant of P450 oxidase from Bacillus megaterium
  source 1..3147: mol_type = other DNA
atgacaattaaggaaatgcctcagcctaagacgtttggagaacttaaaaatttaccgttattaaacacagataaaccggttcaagctttgatgcgtattgcggatgaattaggagaaatctttaaattcgaggcgcctggtagcgtaacgcgctatttatcaagtcagcgtctaattaaagaagcatgcgatgaatcacgctttgataaaaacttaagtcaagcgcttaaatttgcacgtgattttgttggagacgggctgtctacaagctggacgcatgaaccgaattggaaaaaagcgcataatatcttagttccaagctttagtcagcatgcaatggggcgttatcatgcgatgatggtcgatatcgccgtgcagcttgttcaaaagtgggagcgtctaaatgcagatgagcatattgaagtatcggaagacatgacacgtttaacgcttgatacaattggtctttgcggctttaactatcgctttaacagcttttaccgagatcagcctcatccatttattgtgagtgtggttcgtgcactggatgaagtaatgaacaagctgcagcgagcaaatccagacgacccagcttatgatgaaaacaagcgccagtgtcaagaagatatcaaggtgatgaacgactatgtagataaaattattgcagatcgcaaagcaaggggtgaacaaagtcatgatttattaacgcagatgctaaacggaaaagatccagaaacgggtgagccgcttgatgacgggaacattcgtcagcaaattattacattcttaattgcgggacaccaaacgacaagtggtcttttatcatttgcgctgtatttcttagtgaaaaatccacatgtattacaaaaagtagcagaagaagcagcacgagttctagtagatcctgttccaagctacaaacaagtcaaacagcttaaatatgttggcatggtcttaaacgaagcgctgcgcttatggccagtagcgcctatgttttccctatatgcaaaagaagatacggtgcttggaggagaatatcctttaacgaaaggcgacgaagtaatggttctggtgcctcagcttcaccgtgataaaacaatttggggagacgatgtggaggagttccgtccagagcgttttgaaaatccaagtgcgattccgcagcatgcgtttaaaccgtttggaaacggtcagcgtgcgtgtatcggtcagcagttcgctcttcatgaagcaacgctggtacttggtatgatgctaaaacactttgactttgaagatcatacaaactacgagctcgttattaaagaatcgcggacgttaaaacctgaaggctttgtggtaaaagcaaaatcgaaaggcattccgcttggcggtattccttcacctagcactgaacagtctgctaaaaaagtacgcaaaaaggcagaaaacgctcataatacgccgctgcttgtgctatacggttcaaatgcgggaacagctgaaggaacggcgcgtgatttagcagatattgcaatgagcaaaggatttgcaccgcaggtcgcaacgcttgattcacacgccggtaatcttccgcgcgaaggagctgtattaattgtaacggcgtcttataacggtcatccgcctgataacgcaaagcaatttgtcgactggttagaccaagcgtctgctgatgaagtaaaaggcgttcgctactccgtatttggatgcggcgataaaaattgggcggggacgtatcaaaaagtgcctgcttttatcgatgaaacgcttgccgctaaaggggcagaaaacatcgctgaccgcggtgaagcagatgcaagcgacgactttgaaggcacatatgaagaatggcgtgatcatatgtggagtgacgtagcagcctactttaacctcgacattgaaaacagtgaagataataaatctactctttcacttcaatttgtcgacagcgccgcggatatgccgcttgcgaaaatgcacggtgcgttttcaacgaacgtcgtagcaagcaaagaacttcaacagccacatagtgcacgaagcacgcgacatcttgaaattgaacttccaaaagaagcttcttatcaagaaggagatcatttaggtgttattcctcgcaactatgaaggaatagtaaaccgtgtaacagcaaggttcggcctaagcgcatcacagcaaatccgtctggaagcagaagaagaaaaattagctcatttgccactcgctaaaacagtatccgtagaagagcttctgcaatacgtggagcttcaagatcctgttacgcgcacgcagcttcgcgcaatggctgctaaaacggtctgcccgccgcataaagtagagcttgaagccttgcttgaaaagcaagcctacaaagaacaagtgctggcaaaacgtttaacaatgcttgaactgcttgaaaaatacccggcgtgtgaaatgaaattcagcgaatttatcgcccttctgccaagcatacgcccgcgctattactcgatttcttcatcacctcgtgtcgatgaaaaacaagcaagcatcacggtcagcgttgtctcaggaccggcgtggagcggatatggagaatataaaggaattgcgtcgaactatcttgccgagctgcaagaaggagatacgattacgtgctttatttccacaccgcagtcagaatttacgctgccaaaagaccctgaaacgccgcttatcatggtcggaccgggaacaggcgtcgcgccgtttagaggctttgtgcaggcgcgcaaacagctaaaagaacaaggacagtcacttggagaagcacatttatacttcggctgccgttcacctcatgaagactatctgtatcaagaagagcttgaaaacgcccaaagcgaaggcatcattacgcttcataccgctttttctcgcatgccaaatcagccgaaaacatacgttcagcacgtaatggaacaagacggcaagaaattgattgaacttcttgatcaaggagcgcacttctatatttgcggagacggaagccaaatggcacctgccgttgaagcaacgcttatgaaaagctatgctgacgttcaccaagtgagtgaagcagacgctcgcttatggctgcagcagctagaagaaaaaggccgatacgcaaaagacgtgtggctgggg

SEQ ID NO: 662 - protein, 1049 aa, synthetic construct
  REGION 1..1049: note = variant of P450 oxidase from Bacillus megaterium
MTIKEMPQPKTFGELKNLPLLNTDKPVQALMRIADELGEIFKFEAPGSVTRYLSSQRLIKEACDESRFDKNLSQALKFARDFVGDGLSTSWTHEPNWKKAHNILVPSFSQHAMGRYHAMMVDIAVQLVQKWERLNADEHIEVSEDMTRLTLDTIGLCGFNYRFNSFYRDQPHPFIVSVVRALDEVMNKLQRANPDDPAYDENKRQCQEDIKVMNDYVDKIIADRKARGEQSHDLLTQMLNGKDPETGEPLDDGNIRQQIITFLIAGHQTTSGLLSFALYFLVKNPHVLQKVAEEAARVLVDPVPSYKQVKQLKYVGMVLNEALRLWPVAPMFSLYAKEDTVLGGEYPLTKGDEVMVLVPQLHRDKTIWGDDVEEFRPERFENPSAIPQHAFKPFGNGQRACIGQQFALHEATLVLGMMLKHFDFEDHTNYELVIKESRTLKPEGFVVKAKSKGIPLGGIPSPSTEQSAKKVRKKAENAHNTPLLVLYGSNAGTAEGTARDLADIAMSKGFAPQVATLDSHAGNLPREGAVLIVTASYNGHPPDNAKQFVDWLDQASADEVKGVRYSVFGCGDKNWAGTYQKVPAFIDETLAAKGAENIADRGEADASDDFEGTYEEWRDHMWSDVAAYFNLDIENSEDNKSTLSLQFVDSAADMPLAKMHGAFSTNVVASKELQQPHSARSTRHLEIELPKEASYQEGDHLGVIPRNYEGIVNRVTARFGLSASQQIRLEAEEEKLAHLPLAKTVSVEELLQYVELQDPVTRTQLRAMAAKTVCPPHKVELEALLEKQAYKEQVLAKRLTMLELLEKYPACEMKFSEFIALLPSIRPRYYSISSSPRVDEKQASITVSVVSGPAWSGYGEYKGIASNYLAELQEGDTITCFISTPQSEFTLPKDPETPLIMVGPGTGVAPFRGFVQARKQLKEQGQSLGEAHLYFGCRSPHEDYLYQEELENAQSEGIITLHTAFSRMPNQPKTYVQHVMEQDGKKLIELLDQGAHFYICGDGSQMAPAVEATLMKSYADVHQVSEADARLWLQQLEEKGRYAKDVWLG

SEQ ID NO: 663 - DNA, 3147 bp, synthetic construct
  misc_feature 1..3147: note = variant of P450 oxidase from Bacillus megaterium
  source 1..3147: mol_type = other DNA
atgacaattaaggaaatgcctcagcctaagacgtttggagaacttaaaaatttaccgttattaaacacagataaaccggttcaagctttgatgcgtattgcggatgaattaggagaaatctttaaattcgaggcgcctggtagcgtaacgcgctatttatcaagtcagcgtctaattaaagaagcatgcgatgaatcacgctttgataaaaacttaagtcaagcgcttaaatttgcacgtgattttgttggagacgggctgtctacaagctggacgcatgaaccgaattggaaaaaagcgcataatatcttagttccaagctttagtcagcatgcaatggggcgttatcatgcgatgatggtcgatatcgccgtgcagcttgttcaaaagtgggagcgtctaaatgcagatgagcatattgaagtatcggaagacatgacacgtttaacgcttgatacaattggtctttgcggctttaactatcgctttaacagcttttaccgagatcagcctcatccatttattgtgagtgtggttcgtgcactggatgaagtaatgaacaagctgcagcgagcaaatccagacgacccagcttatgatgaaaacaagcgccagtgtcaagaagatatcaaggtgatgaacgactatgtagataaaattattgcagatcgcaaagcaaggggtgaacaaagtcatgatttattaacgcagatgctaaacggaaaagatccagaaacgggtgagccgcttgatgacgggaacattcgtcagcaaattattacattcttaattgcgggacaccaaacgacaagtggtcttttatcatttgcgctgtatttcttagtgaaaaatccacatgtattacaaaaagtagcagaagaagcagcacgagttctagtagatcctgttccaagctacaaacaagtcaaacagcttaaatatgttggcatggtcttaaacgaagcgctgcgcttatggccagtagcgcctatgttttccctatatgcaaaagaagatacggtgcttggaggagaatatcctttaacgaaaggcgacgaagtaatggttctggtgcctcagcttcaccgtgataaaacaatttggggagacgatgtggaggagttccgtccagagcgttttgaaaatccaagtgcgattccgcagcatgcgtttaaaccgtttggaaacggtcagcgtgcgtgtatcggtcagcagttcgctcttcatgaagcaacgctggtacttggtatgatgctaaaacactttgactttgaagatcatacaaactacgagctcgttattaaagaatcgcggacgttaaaacctgaaggctttgtggtaaaagcaaaatcgaaaggcattccgcttggcggtattccttcacctagcactgaacagtctgctaaaaaagtacgcaaaaaggcagaaaacgctcataatacgccgctgcttgtgctatacggttcaaatgcgggaacagctgaaggaacggcgcgtgatttagcagatattgcaatgagcaaaggatttgcaccgcaggtcgcaacgcttgattcacacgccggtaatcttccgcgcgaaggagctgtattaattgtaacggcgtcttataacggtcatccgcctgataacgcaaagcaatttgtcgactggttagaccaagcgtctgctgatgaagtaaaaggcgttcgctactccgtatttggatgcggcgataaaaattgggcggggacgtatcaaaaagtgcctgcttttatcgatgaaacgcttgccgctaaaggggcagaaaacatcgctgaccgcggtgaagcagatgcaagcgacgactttgaaggcacatatgaagaatggcgtgatcatatgtggagtgacgtagcagcctactttaacctcgacattgaaaacagtgaagataataaatctactctttcacttcaatttgtcgacagcgccgcggatatgccgcttgcgaaaatgcacggtgcgttttcaacgaacgtcgtagcaagcaaagaacttcaacagccaggcagtgcacgaagcacgcgacatcttgaaattgaacttccaaaagaagcttcttatcaagaaggagatcatttaggtgttattcctcgcaactatgaaggaatagtaaaccgtgtaacagcaaggttcggcctaagcgcatcacagcaaatccgtctggaagcagaagaagaaaaattagctcatttgccactcgctaaaacagtatccgtagaagagcttctgcaatacgtggagcttcaagatcctgttacgcgcacgcagcttcgcgcaatggctgctaaaacggtctgcccgccgcataaagtagagcttgaagccttgcttgaaaagcaagcctacaaagaacaagtgctggcaaaacgtttaacaatgcttgaactgcttgaaaaatacccggcgtgtgaaatgaaattcagcgaatttatcgcccttctgccaagcatacgcccgcgctattactcgatttcttcatcacctcgtgtcgatgaaaaacaagcaagcatcacggtcagcgttgtctcaggaccggcgtggagcggatatggagaatataaaggaattgcgtcgaactatcttgccgagctgcaagaaggagatacgattacgtgctttatttccacaccgcagtcagaatttacgctgccaaaagaccctgaaacgccgcttatcatggtcggaccgggaacaggcgtcgcgccgtttagaggctttgtgcaggcgcgcaaacagctaaaagaacaaggacagtcacttggagaagcacatttatacttcggctgccgttcacctcatgaagactatctgtatcaagaagagcttgaaaacgcccaaagcgaaggcatcattggtcttcataccgctttttctcgcatgccaaatcagccgaaaacatacgttcagcacgtaatggaacaagacggcaagaaattgattgaacttcttgatcaaggagcgcacttctatatttgcggagacggaagccaaatggcacctgccgttgaagcaacgcttatgaaaagctatgctgacgttcaccaagtgagtgaagcagacgctcgcttatggctgcagcagctagaagaaaaaggccgatacgcaaaagacgtgtggctgggg

SEQ ID NO: 664 - protein, 1049 aa, synthetic construct
  REGION 1..1049: note = variant of P450 oxidase from Bacillus megaterium
MTIKEMPQPKTFGELKNLPLLNTDKPVQALMRIADELGEIFKFEAPGSVTRYLSSQRLIKEACDESRFDKNLSQALKFARDFVGDGLSTSWTHEPNWKKAHNILVPSFSQHAMGRYHAMMVDIAVQLVQKWERLNADEHIEVSEDMTRLTLDTIGLCGFNYRFNSFYRDQPHPFIVSVVRALDEVMNKLQRANPDDPAYDENKRQCQEDIKVMNDYVDKIIADRKARGEQSHDLLTQMLNGKDPETGEPLDDGNIRQQIITFLIAGHQTTSGLLSFALYFLVKNPHVLQKVAEEAARVLVDPVPSYKQVKQLKYVGMVLNEALRLWPVAPMFSLYAKEDTVLGGEYPLTKGDEVMVLVPQLHRDKTIWGDDVEEFRPERFENPSAIPQHAFKPFGNGQRACIGQQFALHEATLVLGMMLKHFDFEDHTNYELVIKESRTLKPEGFVVKAKSKGIPLGGIPSPSTEQSAKKVRKKAENAHNTPLLVLYGSNAGTAEGTARDLADIAMSKGFAPQVATLDSHAGNLPREGAVLIVTASYNGHPPDNAKQFVDWLDQASADEVKGVRYSVFGCGDKNWAGTYQKVPAFIDETLAAKGAENIADRGEADASDDFEGTYEEWRDHMWSDVAAYFNLDIENSEDNKSTLSLQFVDSAADMPLAKMHGAFSTNVVASKELQQPGSARSTRHLEIELPKEASYQEGDHLGVIPRNYEGIVNRVTARFGLSASQQIRLEAEEEKLAHLPLAKTVSVEELLQYVELQDPVTRTQLRAMAAKTVCPPHKVELEALLEKQAYKEQVLAKRLTMLELLEKYPACEMKFSEFIALLPSIRPRYYSISSSPRVDEKQASITVSVVSGPAWSGYGEYKGIASNYLAELQEGDTITCFISTPQSEFTLPKDPETPLIMVGPGTGVAPFRGFVQARKQLKEQGQSLGEAHLYFGCRSPHEDYLYQEELENAQSEGIIGLHTAFSRMPNQPKTYVQHVMEQDGKKLIELLDQGAHFYICGDGSQMAPAVEATLMKSYADVHQVSEADARLWLQQLEEKGRYAKDVWLG

SEQ ID NO: 665 - DNA, 3147 bp, synthetic construct
  misc_feature 1..3147: note = variant of P450 oxidase from Bacillus megaterium
  source 1..3147: mol_type = other DNA
atgacaattaaggaaatgcctcagcctaagacgtttggagaacttaaaaatttaccgttattaaacacagataaaccggttcaagctttgatgcgtattgcggatgaattaggagaaatctttaaattcgaggcgcctggtagcgtaacgcgctatttatcaagtcagcgtctaattaaagaagcatgcgatgaatcacgctttgataaaaacttaagtcaagcgcttaaatttgcacgtgattttgttggagacgggctgtctacaagctggacgcatgaaccgaattggaaaaaagcgcataatatcttagttccaagctttagtcagcatgcaatggggcgttatcatgcgatgatggtcgatatcgccgtgcagcttgttcaaaagtgggagcgtctaaatgcagatgagcatattgaagtatcggaagacatgacacgtttaacgcttgatacaattggtctttgcggctttaactatcgctttaacagcttttaccgagatcagcctcatccatttattgtgagtgtggttcgtgcactggatgaagtaatgaacaagctgcagcgagcaaatccagacgacccagcttatgatgaaaacaagcgccagtgtcaagaagatatcaaggtgatgaacgactatgtagataaaattattgcagatcgcaaagcaaggggtgaacaaagtcatgatttattaacgcagatgctaaacggaaaagatccagaaacgggtgagccgcttgatgacgggaacattcgtcagcaaattattacattcttaattgcgggacaccaaacgacaagtggtcttttatcatttgcgctgtatttcttagtgaaaaatccacatgtattacaaaaagtagcagaagaagcagcacgagttctagtagatcctgttccaagctacaaacaagtcaaacagcttaaatatgttggcatggtcttaaacgaagcgctgcgcttatggccagtagcgcctatgttttccctatatgcaaaagaagatacggtgcttggaggagaatatcctttaacgaaaggcgacgaagtaatggttctggtgcctcagcttcaccgtgataaaacaatttggggagacgatgtggaggagttccgtccagagcgttttgaaaatccaagtgcgattccgcagcatgcgtttaaaccgtttggaaacggtcagcgtgcgtgtatcggtcagcagttcgctcttcatgaagcaacgctggtacttggtatgatgctaaaacactttgactttgaagatcatacaaactacgagctcgttattaaagaatcgcggacgttaaaacctgaaggctttgtggtaaaagcaaaatcgaaaggcattccgcttggcggtattccttcacctagcactgaacagtctgctaaaaaagtacgcaaaaaggcagaaaacgctcataatacgccgctgcttgtgctatacggttcaaatgcgggaacagctgaaggaacggcgcgtgatttagcagatattgcaatgagcaaaggatttgcaccgcaggtcgcaacgcttgattcacacgccggtaatcttccgcgcgaaggagctgtattaattgtaacggcgtcttataacggtcatccgcctgataacgcaaagcaatttgtcgactggttagaccaagcgtctgctgatgaagtaaaaggcgttcgctactccgtatttggatgcggcgataaaaattgggcggggacgtatcaaaaagtgcctgcttttatcgatgaaacgcttgccgctaaaggggcagaaaacatcgctgaccgcggtgaagcagatgcaagcgacgactttgaaggcacatatgaagaatggcgtgatcatatgtggagtgacgtagcagcctactttaacctcgacattgaaaacagtgaagataataaatctactctttcacttcaatttgtcgacagcgccgcggatatgccgcttgcgaaaatgcacggtgcgttttcaacgaacgtcgtagcaagcaaagaacttcaacagccaggcagtgcacgaagcacgcgacatcttgaaattgaacttccaaaagaagcttcttattgtgaaggagatcatttaggtgttattcctcgcaactatgaaggaatagtaaaccgtgtaacagcaaggttcggcctaagcgcatcacagcaaatccgtctggaagcagaagaagaaaaattagctcatttgccactcgctaaaacagtatccgtagaagagcttctgcaatacgtggagcttcaagatcctgttacgcgcacgcagcttcgcgcaatggctgctaaaacggtctgcccgccgcataaagtagagcttgaagccttgcttgaaaagcaagcctacaaagaacaagtgctggcaaaacgtttaacaatgcttgaactgcttgaaaaatacccggcgtgtgaaatgaaattcagcgaatttatcgcccttctgccaagcatacgcccgcgctattactcgatttcttcatcacctcgtgtcgatgaaaaacaagcaagcatcacggtcagcgttgtctcaggaccggcgtggagcggatatggagaatataaaggaattgcgtcgaactatcttgccgagctgcaagaaggagatacgattacgtgctttatttccacaccgcagtcagaatttacgctgccaaaagaccctgaaacgccgcttatcatggtcggaccgggaacaggcgtcgcgccgtttagaggctttgtgcaggcgcgcaaacagctaaaagaacaaggacagtcacttggagaagcacatttatacttcggctgccgttcacctcatgaagactatctgtatcaagaagagcttgaaaacgcccaaagcgaaggcatcattacgcttcataccgctttttctcgcatgccaaatcagccgaaaacatacgttcagcacgtaatggaacaagacggcaagaaattgattgaacttcttgatcaaggagcgcacttctatatttgcggagacggaagccaaatggcacctgccgttgaagcaacgcttatgaaaagctatgctgacgttcaccaagtgagtgaagcagacgctcgcttatggctgcagcagctagaagaaaaaggccgatacgcaaaagacgtgtggctgggg

SEQ ID NO: 666 - protein, 1049 aa, synthetic construct
  REGION 1..1049: note = variant of P450 oxidase from Bacillus megaterium
MTIKEMPQPKTFGELKNLPLLNTDKPVQALMRIADELGEIFKFEAPGSVTRYLSSQRLIKEACDESRFDKNLSQALKFARDFVGDGLSTSWTHEPNWKKAHNILVPSFSQHAMGRYHAMMVDIAVQLVQKWERLNADEHIEVSEDMTRLTLDTIGLCGFNYRFNSFYRDQPHPFIVSVVRALDEVMNKLQRANPDDPAYDENKRQCQEDIKVMNDYVDKIIADRKARGEQSHDLLTQMLNGKDPETGEPLDDGNIRQQIITFLIAGHQTTSGLLSFALYFLVKNPHVLQKVAEEAARVLVDPVPSYKQVKQLKYVGMVLNEALRLWPVAPMFSLYAKEDTVLGGEYPLTKGDEVMVLVPQLHRDKTIWGDDVEEFRPERFENPSAIPQHAFKPFGNGQRACIGQQFALHEATLVLGMMLKHFDFEDHTNYELVIKESRTLKPEGFVVKAKSKGIPLGGIPSPSTEQSAKKVRKKAENAHNTPLLVLYGSNAGTAEGTARDLADIAMSKGFAPQVATLDSHAGNLPREGAVLIVTASYNGHPPDNAKQFVDWLDQASADEVKGVRYSVFGCGDKNWAGTYQKVPAFIDETLAAKGAENIADRGEADASDDFEGTYEEWRDHMWSDVAAYFNLDIENSEDNKSTLSLQFVDSAADMPLAKMHGAFSTNVVASKELQQPGSARSTRHLEIELPKEASYCEGDHLGVIPRNYEGIVNRVTARFGLSASQQIRLEAEEEKLAHLPLAKTVSVEELLQYVELQDPVTRTQLRAMAAKTVCPPHKVELEALLEKQAYKEQVLAKRLTMLELLEKYPACEMKFSEFIALLPSIRPRYYSISSSPRVDEKQASITVSVVSGPAWSGYGEYKGIASNYLAELQEGDTITCFISTPQSEFTLPKDPETPLIMVGPGTGVAPFRGFVQARKQLKEQGQSLGEAHLYFGCRSPHEDYLYQEELENAQSEGIITLHTAFSRMPNQPKTYVQHVMEQDGKKLIELLDQGAHFYICGDGSQMAPAVEATLMKSYADVHQVSEADARLWLQQLEEKGRYAKDVWLG

SEQ ID NO: 667 - DNA, 3147 bp, synthetic construct
  misc_feature 1..3147: note = variant of P450 oxidase from Bacillus megaterium
  source 1..3147: mol_type = other DNA
atgacaattaaggaaatgcctcagcctaagacgtttggagaacttaaaaatttaccgttattaaacacagataaaccggttcaagctttgatgcgtattgcggatgaattaggagaaatctttaaattcgaggcgcctggtagcgtaacgcgctatttatcaagtcagcgtctaattaaagaagcatgcgatgaatcacgctttgataaaaacttaagtcaagcgcttaaatttgcacgtgattttgttggagacgggctgtctacaagctggacgcatgaaccgaattggaaaaaagcgcataatatcttagttccaagctttagtcagcatgcaatggggcgttatcatgcgatgatggtcgatatcgccgtgcagcttgttcaaaagtgggagcgtctaaatgcagatgagcatattgaagtatcggaagacatgacacgtttaacgcttgatacaattggtctttgcggctttaactatcgctttaacagcttttaccgagatcagcctcatccatttattgtgagtgtggttcgtgcactggatgaagtaatgaacaagctgcagcgagcaaatccagacgacccagcttatgatgaaaacaagcgccagtgtcaagaagatatcaaggtgatgaacgactatgtagataaaattattgcagatcgcaaagcaaggggtgaacaaagtcatgatttattaacgcagatgctaaacggaaaagatccagaaacgggtgagccgcttgatgacgggaacattcgtcagcaaattattacattcttaattgcgggacaccaaacgacaagtggtcttttatcatttgcgctgtatttcttagtgaaaaatccacatgtattacaaaaagtagcagaagaagcagcacgagttctagtagatcctgttccaagctacaaacaagtcaaacagcttaaatatgttggcatggtcttaaacgaagcgctgcgcttatggccagtagcgcctatgttttccctatatgcaaaagaagatacggtgcttggaggagaatatcctttaacgaaaggcgacgaagtaatggttctggtgcctcagcttcaccgtgataaaacaatttggggagacgatgtggaggagttccgtccagagcgttttgaaaatccaagtgcgattccgcagcatgcgtttaaaccgtttggaaacggtcagcgtgcgtgtatcggtcagcagttcgctcttcatgaagcaacgctggtacttggtatgatgctaaaacactttgactttgaagatcatacaaactacgagctcgttattaaagaatcgcggacgttaaaacctgaaggctttgtggtaaaagcaaaatcgaaaggcattccgcttggcggtattccttcacctagcactgaacagtctgctaaaaaagtacgcaaaaaggcagaaaacgctcataatacgccgctgcttgtgctatacggttcaaatgcgggaacagctgaaggaacggcgcgtgatttagcagatattgcaatgagcaaaggatttgcaccgcaggtcgcaacgcttgattcacacgccggtaatcttccgcgcgaaggagctgtattaattgtaacggcgtcttataacggtcatccgcctgataacgcaaagcaatttgtcgactggttagaccaagcgtctgctgatgaagtaaaaggcgttcgctactccgtatttggatgcggcgataaaaattgggcggggacgtatcaaaaagtgcctgcttttatcgatgaaacgcttgccgctaaaggggcagaaaacatcgctgaccgcggtgaagcagatgcaagcgacgactttgaaggcacatatgaagaatggcgtgatcatatgtggagtgacgtagcagcctactttaacctcgacattgaaaacagtgaagataataaatctactctttcacttcaatttgtcgacagcgccgcggatatgccgcttgcgaaaatgcacggtgcgttttcaacgaacgtcgtagcaagcaaagaacttcaacagccaggcagtgcacgaagcacgcgacatcttgaaattgaacttccaaaagaagcttcttatcaagaaggagatcatttaggtgttattcctcgcaactatgaaggaatagtaaaccgtgtaacagcaaggttcggcctaagcgcatcacagcaaatccgtctggaagcagaagaagaaaaattagctcatttgccactcgctaaaacagtatccgtagaagagcttctgcaatacgtggagcttcaagatcctgttacgcgcacgcagcttcgcgcaatggctgctaaaacggtctgcccgccgcataaagtagagcttgaagccttgcttgaaaagcaagcctacaaagaacaagtgctggcaaaacgtttaacaatgcttgaactgcttgaaaaatacccggcgtgtgaaatgaaattcagcgaatttatcgcccttctgccaagcatacgcccgcgctattactcgatttcttcatcacctcgtgtcgatttgaaacaagcaagcatcacggtcagcgttgtctcaggaccggcgtggagcggatatggagaatataaaggaattgcgtcgaactatcttgccgagctgcaagaaggagatacgattacgtgctttatttccacaccgcagtcagaatttacgctgccaaaagaccctgaaacgccgcttatcatggtcggaccgggaacaggcgtcgcgccgtttagaggctttgtgcaggcgcgcaaacagctaaaagaacaaggacagtcacttggagaagcacatttatacttcggctgccgttcacctcatgaagactatctgtatcaagaagagcttgaaaacgcccaaagcgaaggcatcattacgcttcataccgctttttctcgcatgccaaatcagccgaaaacatacgttcagcacgtaatggaacaagacggcaagaaattgattgaacttcttgatcaaggagcgcacttctatatttgcggagacggaagccaaatggcacctgccgttgaagcaacgcttatgaaaagctatgctgacgttcaccaagtgagtgaagcagacgctcgcttatggctgcagcagctagaagaaaaaggccgatacgcaaaagacgtgtggctgggg

SEQ ID NO: 668 - protein, 1049 aa, synthetic construct
  REGION 1..1049: note = variant of P450 oxidase from Bacillus megaterium
MTIKEMPQPKTFGELKNLPLLNTDKPVQALMRIADELGEIFKFEAPGSVTRYLSSQRLIKEACDESRFDKNLSQALKFARDFVGDGLSTSWTHEPNWKKAHNILVPSFSQHAMGRYHAMMVDIAVQLVQKWERLNADEHIEVSEDMTRLTLDTIGLCGFNYRFNSFYRDQPHPFIVSVVRALDEVMNKLQRANPDDPAYDENKRQCQEDIKVMNDYVDKIIADRKARGEQSHDLLTQMLNGKDPETGEPLDDGNIRQQIITFLIAGHQTTSGLLSFALYFLVKNPHVLQKVAEEAARVLVDPVPSYKQVKQLKYVGMVLNEALRLWPVAPMFSLYAKEDTVLGGEYPLTKGDEVMVLVPQLHRDKTIWGDDVEEFRPERFENPSAIPQHAFKPFGNGQRACIGQQFALHEATLVLGMMLKHFDFEDHTNYELVIKESRTLKPEGFVVKAKSKGIPLGGIPSPSTEQSAKKVRKKAENAHNTPLLVLYGSNAGTAEGTARDLADIAMSKGFAPQVATLDSHAGNLPREGAVLIVTASYNGHPPDNAKQFVDWLDQASADEVKGVRYSVFGCGDKNWAGTYQKVPAFIDETLAAKGAENIADRGEADASDDFEGTYEEWRDHMWSDVAAYFNLDIENSEDNKSTLSLQFVDSAADMPLAKMHGAFSTNVVASKELQQPGSARSTRHLEIELPKEASYQEGDHLGVIPRNYEGIVNRVTARFGLSASQQIRLEAEEEKLAHLPLAKTVSVEELLQYVELQDPVTRTQLRAMAAKTVCPPHKVELEALLEKQAYKEQVLAKRLTMLELLEKYPACEMKFSEFIALLPSIRPRYYSISSSPRVDLKQASITVSVVSGPAWSGYGEYKGIASNYLAELQEGDTITCFISTPQSEFTLPKDPETPLIMVGPGTGVAPFRGFVQARKQLKEQGQSLGEAHLYFGCRSPHEDYLYQEELENAQSEGIITLHTAFSRMPNQPKTYVQHVMEQDGKKLIELLDQGAHFYICGDGSQMAPAVEATLMKSYADVHQVSEADARLWLQQLEEKGRYAKDVWLG

SEQ ID NO: 669 - DNA, 3147 bp, synthetic construct
  misc_feature 1..3147: note = variant of P450 oxidase from Bacillus megaterium
  source 1..3147: mol_type = other DNA
atgacaattaaggaaatgcctcagcctaagacgtttggagaacttaaaaatttaccgttattaaacacagataaaccggttcaagctttgatgcgtattgcggatgaattaggagaaatctttaaattcgaggcgcctggtagcgtaacgcactatttatcaagtcagcgtctaattaaagaagcatgcgatgaatcacgctttgataaaaacttaagtcaagcgcttaaatttgcacgtgattttgttggagacgggctgtctacaagctggacgcatgaaccgaattggaaaaaagcgcataatatcttagttccaagctttagtcagcatgcaatggggcgttatcatgcgatgatggtcgatatcgccgtgcagcttgttcaaaagtgggagcgtctaaatgcagatgagcatattgaagtatcggaagacatgacacgtttaacgcttgatacaattggtctttgcggctttaactatcgctttaacagcttttaccgagatcagcctcatccatttattgtgagtgtggttcgtgcactggatgaagtaatgaacaagctgcagcgagcaaatccagacgacccagcttatgatgaaaacaagcgccagtgtcaagaagatatcaaggtgatgaacgactatgtagataaaattattgcagatcgcaaagcaaggggtgaacaaagtcatgatttattaacgcagatgctaaacggaaaagatccagaaacgggtgagccgcttgatgacgggaacattcgtcagcaaattattacattcttaattgcgggacaccaaacgacaagtggtcttttatcatttgcgctgtatttcttagtgaaaaatccacatgtattacaaaaagtagcagaagaagcagcacgagttctagtagatcctgttccaagctacaaacaagtcaaacagcttaaatatgttggcatggtcttaaacgaagcgctgcgcttatggccagtagcgcctatgttttccctatatgcaaaagaagatacggtgcttggaggagaatatcctttaacgaaaggcgacgaagtaatggttctggtgcctcagcttcaccgtgataaaacaatttggggagacgatgtggaggagttccgtccagagcgttttgaaaatccaagtgcgattccgcagcatgcgtttaaaccgtttggaaacggtcagcgtgcgtgtatcggtcagcagttcgctcttcatgaagcaacgctggtacttggtatgatgctaaaacactttgactttgaagatcatacaaactacgagctcgttattaaagaatcgcggacgttaaaacctgaaggctttgtggtaaaagcaaaatcgaaaggcattccgcttggcggtattccttcacctagcactgaacagtctgctaaaaaagtacgcaaaaaggcagaaaacgctcataatacgccgctgcttgtgctatacggttcaaatgcgggaacagctgaaggaacggcgcgtgatttagcagatattgcaatgagcaaaggatttgcaccgcaggtcgcaacgcttgattcacacgccggtaatcttccgcgcgaaggagctgtattaattgtaacggcgtcttataacggtcatccgcctgataacgcaaagcaatttgtcgactggttagaccaagcgtctgctgatgaagtaaaaggcgttcgctactccgtatttggatgcggcgataaaaattgggcggggacgtatcaaaaagtgcctgcttttatcgatgaaacgcttgccgctaaaggggcagaaaacatcgctgaccgcggtgaagcagatgcaagcgacgactttgaaggcacatatgaagaatggcgtgatcatatgtggagtgacgtagcagcctactttaacctcgacattgaaaacagtgaagataataaatctactctttcacttcaatttgtcgacagcgccgcggatatgccgcttgcgaaaatgcacggtgcgttttcaacgaacgtcgtagcaagcaaagaacttcaacagccaggcagtgcacgaagcacgcgacatcttgaaattgaacttccaaaagaagcttcttatcaagaaggagatcatttaggtgttattcctcgcaactatgaaggaatagtaaaccgtgtaacagcaaggttcggcctaagcgcatcacagcaaatccgtctggaagcagaagaagaaaaattagctcatttgccactcgctaaaacagtatccgtagaagagcttctgcaatacgtggagcttcaagatcctgttacgcgcacgcagcttcgcgcaatggctgctaaaacggtctgcccgccgcataaagtagagcttgaagccttgcttgaaaagcaagcctacaaagaacaagtgctggcaaaacgtttaacaatgcttgaactgcttgaaaaatacccggcgtgtgaaatgaaattcagcgaatttatcgcccttctgccaagcatacgcccgcgctattactcgatttcttcatcacctcgtgtcgatgaaaaacaagcaagcatcacggtcagcgttgtccagggaccggcgtggagcggatatggagaatataaaggaattgcgtcgaactatcttgccgagctgcaagaaggagatacgattacgtgctttatttccacaccgcagtcagaatttacgctgccaaaagaccctgaaacgccgcttatcatggtcggaccgggaacaggcgtcgcgccgtttagaggctttgtgcaggcgcgcaaacagctaaaagaacaaggacagtcacttggagaagcacatttatacttcggctgccgttcacctcatgaagactatctgtatcaagaagagcttgaaaacgcccaaagcgaaggcatcattacgcttcataccgctttttctcgcatgccaaatcagccgaaaacatacgttcagcacgtaatggaacaagacggcaagaaattgattgaacttcttgatcaaggagcgcacttctatatttgcggagacggaagccaaatggcacctgccgttgaagcaacgcttatgaaaagctatgctgacgttcaccaagtgagtgaagcagacgctcgcttatggctgcagcagctagaagaaaaaggccgatacgcaaaagacgtgtggctgggg

SEQ ID NO: 670 - protein, 1049 aa, synthetic construct
  REGION 1..1049: note = variant of P450 oxidase from Bacillus megaterium
MTIKEMPQPKTFGELKNLPLLNTDKPVQALMRIADELGEIFKFEAPGSVTHYLSSQRLIKEACDESRFDKNLSQALKFARDFVGDGLSTSWTHEPNWKKAHNILVPSFSQHAMGRYHAMMVDIAVQLVQKWERLNADEHIEVSEDMTRLTLDTIGLCGFNYRFNSFYRDQPHPFIVSVVRALDEVMNKLQRANPDDPAYDENKRQCQEDIKVMNDYVDKIIADRKARGEQSHDLLTQMLNGKDPETGEPLDDGNIRQQIITFLIAGHQTTSGLLSFALYFLVKNPHVLQKVAEEAARVLVDPVPSYKQVKQLKYVGMVLNEALRLWPVAPMFSLYAKEDTVLGGEYPLTKGDEVMVLVPQLHRDKTIWGDDVEEFRPERFENPSAIPQHAFKPFGNGQRACIGQQFALHEATLVLGMMLKHFDFEDHTNYELVIKESRTLKPEGFVVKAKSKGIPLGGIPSPSTEQSAKKVRKKAENAHNTPLLVLYGSNAGTAEGTARDLADIAMSKGFAPQVATLDSHAGNLPREGAVLIVTASYNGHPPDNAKQFVDWLDQASADEVKGVRYSVFGCGDKNWAGTYQKVPAFIDETLAAKGAENIADRGEADASDDFEGTYEEWRDHMWSDVAAYFNLDIENSEDNKSTLSLQFVDSAADMPLAKMHGAFSTNVVASKELQQPGSARSTRHLEIELPKEASYQEGDHLGVIPRNYEGIVNRVTARFGLSASQQIRLEAEEEKLAHLPLAKTVSVEELLQYVELQDPVTRTQLRAMAAKTVCPPHKVELEALLEKQAYKEQVLAKRLTMLELLEKYPACEMKFSEFIALLPSIRPRYYSISSSPRVDEKQASITVSVVQGPAWSGYGEYKGIASNYLAELQEGDTITCFISTPQSEFTLPKDPETPLIMVGPGTGVAPFRGFVQARKQLKEQGQSLGEAHLYFGCRSPHEDYLYQEELENAQSEGIITLHTAFSRMPNQPKTYVQHVMEQDGKKLIELLDQGAHFYICGDGSQMAPAVEATLMKSYADVHQVSEADARLWLQQLEEKGRYAKDVWLG

SEQ ID NO: 671 - DNA, 3147 bp, synthetic construct
  misc_feature 1..3147: note = variant of P450 oxidase from Bacillus megaterium
  source 1..3147: mol_type = other DNA
atgacaattaaggaaatgcctcagcctaagacgtttggagaacttaaaaatttaccgttattaaacacagataaaccggttcaagctttgatgcgtattgcggatgaattaggagaaatctttaaattcgaggcgcctggtagcgtaacgcgctatttatcaagtcagcgtctaattaaagaagcatgcgatgaatcacgctttgataaaaacttaagtcaagcgcttaaatttgcacgtgattttgttggagacgggctgtctacaagctggacgcatgaaccgaattggaaaaaagcgcataatatcttagttccaagctttagtcagcatgcaatggggcgttatcatgcgatgatggtcgatatcgccgtgcagcttgttcaaaagtgggagcgtctaaatgcagatgagcatattgaagtatcggaagacatgacacgtttaacgcttgatacaattggtctttgcggctttaactatcgctttaacagcttttaccgagatcagcctcatccatttattgtgagtgtggttcgtgcactggatgaagtaatgaacaagctgcagcgagcaaatccagacgacccagcttatgatgaaaacaagcgccagtgtcaagaagatatcaaggtgatgaacgactatgtagataaaattattgcagatcgcaaagcaaggggtgaacaaagtcatgatttattaacgcagatgctaaacggaaaagatccagaaacgggtgagccgcttgatgacgggaacattcgtcagcaaattattacattcttaattgcgggacaccaaacgacaagtggtcttttatcatttgcgctgtatttcttagtgaaaaatccacatgtattacaaaaagtagcagaagaagcagcacgagttctagtagatcctgttccaagctacaaacaagtcaaacagcttaaatatgttggcatggtcttaaacgaagcgctgcgcttatggccagtagcgcctatgttttccctatatgcaaaagaagatacggtgcttggaggagaatatcctttaacgaaaggcgacgaagtaatggttctggtgcctcagcttcaccgtgataaaacaatttggggagacgatgtggaggagttccgtccagagcgttttgaaaatccaagtgcgattccgcagcatgcgtttaaaccgtttggaaacggtcagcgtgcgtgtatcggtcagcagttcgctcttcatgaagcaacgctggtacttggtatgatgctaaaacactttgactttgaagatcatacaaactacgagctcgttattaaagaatcgcggacgttaaaacctgaaggctttgtggtaaaagcaaaatcgaaaggcattccgcttggcggtattccttcacctagcactgaacagtctgctaaaaaagtacgcaaaaaggcagaaaacgctcataatacgccgctgcttgtgctatacggttcaaatgcgggaacagctgaaggaacggcgcgtgatttagcagatattgcaatgagcaaaggatttgcaccgcaggtcgcaacgcttgattcacacgccggtaatcttccgcgcgaaggagctgtattaattgtaacggcgtcttataacggtcatccgcctgataacgcaaagcaatttgtcgactggttagaccaagcgtctgctgatgaagtaaaaggcgttcgctactccgtatttggatgcggcgataaaaattgggcggggacgtatcaaaaagtgcctgcttttatcgatgaaacgcttgccgctaaaggggcagaaaacatcgctgaccgcggtgaagcagatgcaagcgacgactttgaaggcacatatgaagaatggcgtgatcatatgtggagtgacgtagcagcctactttaacctcgacattgaaaacagtgaagataataaatctactctttcacttcaatttgtcgacagcgccgcggatatgccgcttgcgaaaatgcacggtgcgttttcaacgaacgtcgtagcaagcaaagaacttcaacagccaggcagtgcacgaagcacgcgacatcttgaaattgaacttccaaaagaagcttcttatcaagaaggagatcatttaggtgttattcctcgcaactatgaaggaatagtaaaccgtgtaacagcaaggttcggcctaagcgcatcacagcaaatccgtctggaagcagaagaagaaaaattagctcatttgccactcgctaaaacagtatccgtagaagagcttctgcaatacgtggagcttcaagatcctgttacgcgcacgcagcttcgcgcaatggctgctaaaacggtctgcccgccgcataaagtagagcttgaagccttgcttgaaaagcaagcctacaaagaacaagtgctggcaaaacgtttaacaatgcttgaactgcttgaaaaatacccggcgtgtgaaatgaaattcagcgaatttatcgcccttctgccaagcatacgcccgcgctattactcgatttcttcatcacctcgtgtcgatgaaaaacaagcaagcatcacggtcagcgttgtctcaggaccggcgtggagcggatatggagaatataaaggaattgcgtcgaactatcttgccgagctgcaagaaggagatacgattacgtgctttatttccacaccgcagtcagaatttacgctgccaaaagaccctgaaacgccgcttatcatggtcggaccgggaacaggcgtcgcgccgtttagaggctttgtgcaggcgcgcaaacagctaaaagaacaaggacagtcacttggagaagcacatttatacttcggctgccgttcacctcataaggactatctgtatcaagaagagcttgaaaacgcccaaagcgaaggcatcattacgcttcataccgctttttctcgcatgccaaatcagccgaaaacatacgttcagcacgtaatggaacaagacggcaagaaattgattgaacttcttgatcaaggagcgcacttctatatttgcggagacggaagccaaatggcacctgccgttgaagcaacgcttatgaaaagctatgctgacgttcaccaagtgagtgaagcagacgctcgcttatggctgcagcagctagaagaaaaaggccgatacgcaaaagacgtgtggctgggg

SEQ ID NO: 672 - protein, 1049 aa, synthetic construct
  REGION 1..1049: note = variant of P450 oxidase from Bacillus megaterium
MTIKEMPQPKTFGELKNLPLLNTDKPVQALMRIADELGEIFKFEAPGSVTRYLSSQRLIKEACDESRFDKNLSQALKFARDFVGDGLSTSWTHEPNWKKAHNILVPSFSQHAMGRYHAMMVDIAVQLVQKWERLNADEHIEVSEDMTRLTLDTIGLCGFNYRFNSFYRDQPHPFIVSVVRALDEVMNKLQRANPDDPAYDENKRQCQEDIKVMNDYVDKIIADRKARGEQSHDLLTQMLNGKDPETGEPLDDGNIRQQIITFLIAGHQTTSGLLSFALYFLVKNPHVLQKVAEEAARVLVDPVPSYKQVKQLKYVGMVLNEALRLWPVAPMFSLYAKEDTVLGGEYPLTKGDEVMVLVPQLHRDKTIWGDDVEEFRPERFENPSAIPQHAFKPFGNGQRACIGQQFALHEATLVLGMMLKHFDFEDHTNYELVIKESRTLKPEGFVVKAKSKGIPLGGIPSPSTEQSAKKVRKKAENAHNTPLLVLYGSNAGTAEGTARDLADIAMSKGFAPQVATLDSHAGNLPREGAVLIVTASYNGHPPDNAKQFVDWLDQASADEVKGVRYSVFGCGDKNWAGTYQKVPAFIDETLAAKGAENIADRGEADASDDFEGTYEEWRDHMWSDVAAYFNLDIENSEDNKSTLSLQFVDSAADMPLAKMHGAFSTNVVASKELQQPGSARSTRHLEIELPKEASYQEGDHLGVIPRNYEGIVNRVTARFGLSASQQIRLEAEEEKLAHLPLAKTVSVEELLQYVELQDPVTRTQLRAMAAKTVCPPHKVELEALLEKQAYKEQVLAKRLTMLELLEKYPACEMKFSEFIALLPSIRPRYYSISSSPRVDEKQASITVSVVSGPAWSGYGEYKGIASNYLAELQEGDTITCFISTPQSEFTLPKDPETPLIMVGPGTGVAPFRGFVQARKQLKEQGQSLGEAHLYFGCRSPHKDYLYQEELENAQSEGIITLHTAFSRMPNQPKTYVQHVMEQDGKKLIELLDQGAHFYICGDGSQMAPAVEATLMKSYADVHQVSEADARLWLQQLEEKGRYAKDVWLG

SEQ ID NO: 673 - DNA, 3147 bp, synthetic construct
  misc_feature 1..3147: note = variant of P450 oxidase from Bacillus megaterium
  source 1..3147: mol_type = other DNA
atgacaattaaggaaatgcctcagcctaagacgtttggagaacttaaaaatttaccgttattaaacacagataaaccggttcaagctttgatgcgtattgcggatgaattaggagaaatctttaaattcgaggcgcctggtagcgtaacgcgctatttatcaagtcagcgtctaattaaagaagcatgcgatgaatcacgctttgataaaaacttaagtcaagcgcttaaatttgcacgtgattttgttggagacgggctgtctacaagctggacgcatgaaccgaattggaaaaaagcgcataatatcttagttccaagctttagtcagcatgcaatggggcgttatcatgcgatgatggtcgatatcgccgtgcagcttgttcaaaagtgggagcgtctaaatgcagatgagcatattgaagtatcggaagacatgacacgtttaacgcttgatacaattggtctttgcggctttaactatcgctttaacagcttttaccgagatcagcctcatccatttattgtgagtgtggttcgtgcactggatgaagtaatgaacaagctgcagcgagcaaatccagacgacccagcttatgatgaaaacaagcgccagtgtcaagaagatatcaaggtgatgaacgactatgtagataaaattattgcagatcgcaaagcaaggggtgaacaaagtcatgatttattaacgcagatgctaaacggaaaagatccagaaacgggtgagccgcttgatgacgggaacattcgtcagcaaattattacattcttaattgcgggacaccaaacgacaagtggtcttttatcatttgcgctgtatttcttagtgaaaaatccacatgtattacaaaaagtagcagaagaagcagcacgagttctagtagatcctgttccaagctacaaacaagtcaaacagcttaaatatgttggcatggtcttaaacgaagcgctgcgcttatggccagtagcgcctatgttttccctatatgcaaaagaagatacggtgcttggaggagaatatcctttaacgaaaggcgacgaagtaatggttctggtgcctcagcttcaccgtgataaaacaatttggggagacgatgtggaggagttccgtccagagcgttttgaaaatccaagtgcgattccgcagcatgcgtttaaaccgtttggaaacggtcagcgtgcgtgtatcggtcagcagttcgctcttcatgaagcaacgctggtacttggtatgatgctaaaacactttgactttgaagatcatacaaactacgagctcgttattaaagaatcgcggacgttaaaacctgaaggctttgtggtaaaagcaaaatcgaaaggcattccgcttggcggtattccttcacctagcactgaacagtctgctaaaaaagtacgcaaaaaggcagaaaacgctcataatacgccgctgcttgtgctatacggttcaaatgcgggaacagctgaaggaacggcgcgtgatttagcagatattgcaatgagcaaaggatttgcaccgcaggtcgcaacgcttgattcacacgccggtaatcttccgcgcgaaggagctgtattaattgtaacggcgtcttataacggtcatccgcctgataacgcaaagcaatttgtcgactggttagaccaagcgtctgctgatgaagtaaaaggcgttcgctactccgtatttggatgcggcgataaaaattgggcggggacgtatcaaaaagtgcctgcttttatcgatgaaacgcttgccgctaaaggggcagaaaacatcgctgaccgcggtgaagcagatgcaagcgacgactttgaaggcacatatgaagaatggcgtgatcatatgtggagtgacgtagcagcctactttaacctcgacattgaaaacagtgaagataataaatctactctttcacttcaatttgtcgacagcgccgcggatatgccgcttgcgaaaatgcacggtgcgtttttgacgaacgtcgtagcaagcaaagaacttcaacagccaggcagtgcacgaagcacgcgacatcttgaaattgaacttccaaaagaagcttcttatcaagaaggagatcatttaggtgttattcctcgcaactatgaaggaatagtaaaccgtgtaacagcaaggttcggcctaagcgcatcacagcaaatccgtctggaagcagaagaagaaaaattagctcatttgccactcgctaaaacagtatccgtagaagagcttctgcaatacgtggagcttcaagatcctgttacgcgcacgcagcttcgcgcaatggctgctaaaacggtctgcccgccgcataaagtagagcttgaagccttgcttgaaaagcaagcctacaaagaacaagtgctggcaaaacgtttaacaatgcttgaactgcttgaaaaatacccggcgtgtgaaatgaaattcagcgaatttatcgcccttctgccaagcatacgcccgcgctattactcgatttcttcatcacctcgtgtcgatgaaaaacaagcaagcatcacggtcagcgttgtctcaggaccggcgtggagcggatatggagaatataaaggaattgcgtcgaactatcttgccgagctgcaagaaggagatacgattacgtgctttatttccacaccgcagtcagaatttacgctgccaaaagaccctgaaacgccgcttatcatggtcggaccgggaacaggcgtcgcgccgtttagaggctttgtgcaggcgcgcaaacagctaaaagaacaaggacagtcacttggagaagcacatttatacttcggctgccgttcacctcatgaagactatctgtatcaagaagagcttgaaaacgcccaaagcgaaggcatcattacgcttcataccgctttttctcgcatgccaaatcagccgaaaacatacgttcagcacgtaatggaacaagacggcaagaaattgattgaacttcttgatcaaggagcgcacttctatatttgcggagacggaagccaaatggcacctgccgttgaagcaacgcttatgaaaagctatgctgacgttcaccaagtgagtgaagcagacgctcgcttatggctgcagcagctagaagaaaaaggccgatacgcaaaagacgtgtggctgggg

SEQ ID NO: 674 - protein, 1049 aa, synthetic construct
  REGION 1..1049: note = variant of P450 oxidase from Bacillus megaterium
MTIKEMPQPKTFGELKNLPLLNTDKPVQALMRIADELGEIFKFEAPGSVTRYLSSQRLIKEACDESRFDKNLSQALKFARDFVGDGLSTSWTHEPNWKKAHNILVPSFSQHAMGRYHAMMVDIAVQLVQKWERLNADEHIEVSEDMTRLTLDTIGLCGFNYRFNSFYRDQPHPFIVSVVRALDEVMNKLQRANPDDPAYDENKRQCQEDIKVMNDYVDKIIADRKARGEQSHDLLTQMLNGKDPETGEPLDDGNIRQQIITFLIAGHQTTSGLLSFALYFLVKNPHVLQKVAEEAARVLVDPVPSYKQVKQLKYVGMVLNEALRLWPVAPMFSLYAKEDTVLGGEYPLTKGDEVMVLVPQLHRDKTIWGDDVEEFRPERFENPSAIPQHAFKPFGNGQRACIGQQFALHEATLVLGMMLKHFDFEDHTNYELVIKESRTLKPEGFVVKAKSKGIPLGGIPSPSTEQSAKKVRKKAENAHNTPLLVLYGSNAGTAEGTARDLADIAMSKGFAPQVATLDSHAGNLPREGAVLIVTASYNGHPPDNAKQFVDWLDQASADEVKGVRYSVFGCGDKNWAGTYQKVPAFIDETLAAKGAENIADRGEADASDDFEGTYEEWRDHMWSDVAAYFNLDIENSEDNKSTLSLQFVDSAADMPLAKMHGAFLTNVVASKELQQPGSARSTRHLEIELPKEASYQEGDHLGVIPRNYEGIVNRVTARFGLSASQQIRLEAEEEKLAHLPLAKTVSVEELLQYVELQDPVTRTQLRAMAAKTVCPPHKVELEALLEKQAYKEQVLAKRLTMLELLEKYPACEMKFSEFIALLPSIRPRYYSISSSPRVDEKQASITVSVVSGPAWSGYGEYKGIASNYLAELQEGDTITCFISTPQSEFTLPKDPETPLIMVGPGTGVAPFRGFVQARKQLKEQGQSLGEAHLYFGCRSPHEDYLYQEELENAQSEGIITLHTAFSRMPNQPKTYVQHVMEQDGKKLIELLDQGAHFYICGDGSQMAPAVEATLMKSYADVHQVSEADARLWLQQLEEKGRYAKDVWLG

SEQ ID NO: 675 - DNA, 3147 bp, synthetic construct
  misc_feature 1..3147: note = variant of P450 oxidase from Bacillus megaterium
  source 1..3147: mol_type = other DNA
atgacaattaaggaaatgcctcagcctaagacgtttggagaacttaaaaatttaccgttattaaacacagataaaccggttcaagctttgatgcgtattgcggatgaattaggagaaatctttaaattcgaggcgcctggtagcgtaacgcgctatttatcaagtcagcgtctaattaaagaagcatgcgatgaatcacgctttgataaaaacttaagtcaagcgcttaaatttgcacgtgattttgttggagacgggctgtctacaagctggacgcatgaaccgaattggaaaaaagcgcataatatcttagttccaagctttagtcagcatgcaatggggcgttatcatgcgatgatggtcgatatcgccgtgcagcttgttcaaaagtgggagcgtctaaatgcagatgagcatattgaagtatcggaagacatgacacgtttaacgcttgatacaattggtctttgcggctttaactatcgctttaacagcttttaccgagatcagcctcatccatttattgtgagtgtggttcgtgcactggatgaagtaatgaacaagctgcagcgagcaaatccagacgacccagcttatgatgaaaacaagcgccagtgtcaagaagatatcaaggtgatgaacgactatgtagataaaattattgcagatcgcaaagcaaggggtgaacaaagtcatgatttattaacgcagatgctaaacggaaaagatccagaaacgggtgagccgcttgatgacgggaacattcgtcagcaaattattacattcttaattgcgggacaccaaacgacaagtggtcttttatcatttgcgctgtatttcttagtgaaaaatccacatgtattacaaaaagtagcagaagaagcagcacgagttctagtagatcctgttccaagctacaaacaagtcaaacagcttaaatatgttggcatggtcttaaacgaagcgctgcgcttatggccagtagcgcctatgttttccctatatgcaaaagaagatacggtgcttggaggagaatatcctttaacgaaaggcgacgaagtaatggttctggtgcctcagcttcaccgtgataaaacaatttggggagacgatgtggaggagttccgtccagagcgttttgaaaatccaagtgcgattccgcagcatgcgtttaaaccgtttggaaacggtcagcgtgcgtgtatcggtcagcagttcgctcttcatgaagcaacgctggtacttggtatgatgctaaaacactttgactttgaagatcatacaaactacgagctcgttattaaagaatcgcggacgttaaaacctgaaggctttgtggtaaaagcaaaatcgaaaggcattccgcttggcggtattccttcacctagcactgaacagtctgctaaaaaagtacgcaaaaaggcagaaaacgctcataatacgccgctgcttgtgctatacggttcaaatgcgggaacagctgaaggaacggcgcgtgatttagcagatattgcaatgagcaaaggatttgcaccgcaggtcgcaacgcttgattcacacgccggtaatcttccgcgcgaaggagctgtattaattgtaacggcgtcttataacggtcatccgcctgataacgcaaagcaatttgtcgactggttagaccaagcgtctgctgatgaagtaaaaggcgttcgctactccgtatttggatgcggcgataaaaattgggcggggacgtatcaaaaagtgcctgcttttatcgatgaaacgcttgccgctaaaggggcagaaaacatcgctgaccgcggtgaagcagatgcaagcgacgactttgaaggcacatatgaagaatggcgtgatcatatgtggagtgacgtagcagcctactttaacctcgacattgaaaacagtgaagataataaatctactctttcacttcaatttgtcgacagcgccgcggatatgccgcttgcgaaaatgcacggtgcgttttcaacgaacgtcgtagcaagcaaagaacttcaacagccaggcagtgcacgaagcacgcgacatcttgaaattgaacttccaaaagaagcttcttatcaagaaggagatcatttaggtgttattcctcgcaactatgaaggaatagtaaaccgtgtaacagcaaggttcggcctaagcgcatcacagcaaatccgtctggaagcagaagaagaaaaattagctcatttgccactcgctaaaacagtatccgtagaagagcttctgcaatacgtggagcttcaagatcctgttacgcgcacgcagcttcgcgcaatggctgctaaaacggtctgcccgccgcataaagtagagcttgaagccttgcttgaaaagcaagcctacaaagaacaagtgctggcaaaacgtttaacaatgcttgaactgcttgaaaaatacccggcgtgtgaaatgaaattcagcgaatttatcgcccttctgccaagcatacgcccgcgctattactcgatttcttcatcacctcgtgtcgatgaaaaacaagcaagcatcacggtcagcgttgtctcaggaccggcgtggagcggatatggagaatataaaggaattgcgtcgaactatcttgccgagctgcaagaaggagatacgattacgtgctttatttccacaccgcagtcagaatttacgctgccaaaagaccctgaaacgccgcttatcatggtcggaccgggaacaggcgtcgcgccgtttagaggctttgtgcaggcgcgcaaacagctaaaagaacaaggacagtcacttggagaagcacatttatacttcggctgccgttcacctcatgaagactatctgtatcaagaagagcttgaaaacgcccaaagcgaaggcatcattacgcttcataccgctttttctcgcatgccaaatcagccgaaaacatacgttcagtctgtaatggaacaagacggcaagaaattgattgaacttcttgatcaaggagcgcacttctatatttgcggagacggaagccaaatggcacctgccgttgaagcaacgcttatgaaaagctatgctgacgttcaccaagtgagtgaagcagacgctcgcttatggctgcagcagctagaagaaaaaggccgatacgcaaaagacgtgtggctgggg

SEQ ID NO: 676 - protein, 1049 aa, synthetic construct
  REGION 1..1049: note = variant of P450 oxidase from Bacillus megaterium
MTIKEMPQPKTFGELKNLPLLNTDKPVQALMRIADELGEIFKFEAPGSVTRYLSSQRLIKEACDESRFDKNLSQALKFARDFVGDGLSTSWTHEPNWKKAHNILVPSFSQHAMGRYHAMMVDIAVQLVQKWERLNADEHIEVSEDMTRLTLDTIGLCGFNYRFNSFYRDQPHPFIVSVVRALDEVMNKLQRANPDDPAYDENKRQCQEDIKVMNDYVDKIIADRKARGEQSHDLLTQMLNGKDPETGEPLDDGNIRQQIITFLIAGHQTTSGLLSFALYFLVKNPHVLQKVAEEAARVLVDPVPSYKQVKQLKYVGMVLNEALRLWPVAPMFSLYAKEDTVLGGEYPLTKGDEVMVLVPQLHRDKTIWGDDVEEFRPERFENPSAIPQHAFKPFGNGQRACIGQQFALHEATLVLGMMLKHFDFEDHTNYELVIKESRTLKPEGFVVKAKSKGIPLGGIPSPSTEQSAKKVRKKAENAHNTPLLVLYGSNAGTAEGTARDLADIAMSKGFAPQVATLDSHAGNLPREGAVLIVTASYNGHPPDNAKQFVDWLDQASADEVKGVRYSVFGCGDKNWAGTYQKVPAFIDETLAAKGAENIADRGEADASDDFEGTYEEWRDHMWSDVAAYFNLDIENSEDNKSTLSLQFVDSAADMPLAKMHGAFSTNVVASKELQQPGSARSTRHLEIELPKEASYQEGDHLGVIPRNYEGIVNRVTARFGLSASQQIRLEAEEEKLAHLPLAKTVSVEELLQYVELQDPVTRTQLRAMAAKTVCPPHKVELEALLEKQAYKEQVLAKRLTMLELLEKYPACEMKFSEFIALLPSIRPRYYSISSSPRVDEKQASITVSVVSGPAWSGYGEYKGIASNYLAELQEGDTITCFISTPQSEFTLPKDPETPLIMVGPGTGVAPFRGFVQARKQLKEQGQSLGEAHLYFGCRSPHEDYLYQEELENAQSEGIITLHTAFSRMPNQPKTYVQSVMEQDGKKLIELLDQGAHFYICGDGSQMAPAVEATLMKSYADVHQVSEADARLWLQQLEEKGRYAKDVWLG

SEQ ID NO: 677 - DNA, 3147 bp, synthetic construct
  misc_feature 1..3147: note = variant of P450 oxidase from Bacillus megaterium
  source 1..3147: mol_type = other DNA
atgacaattaaggaaatgcctcagcctaagacgtttggagaacttaaaaatttaccgttattaaacacagataaaccggttcaagctttgatgcgtattgcggatgaattaggagaaatctttaaattcgaggcgcctggtagcgtaacgcgctatttatcaagtcagcgtctaattaaagaagcatgcgatgaatcacgctttgataaaaacttaagtcaagcgcttaaatttgcacgtgattttgttggagacgggctgtctacaagctggacgcatgaaccgaattggaaaaaagcgcataatatcttagttccaagctttagtcagcatgcaatggggcgttatcatgcgatgatggtcgatatcgccgtgcagcttgttcaaaagtgggagcgtctaaatgcagatgagcatattgaagtatcggaagacatgacacgtttaacgcttgatacaattggtctttgcggctttaactatcgctttaacagcttttaccgagatcagcctcatccatttattgtgagtgtggttcgtgcactggatgaagtaatgaacaagctgcagcgagcaaatccagacgacccagcttatgatgaaaacaagcgccagtgtcaagaagatatcaaggtgatgaacgactatgtagataaaattattgcagatcgcaaagcaaggggtgaacaaagtcatgatttattaacgcagatgctaaacggaaaagatccagaaacgggtgagccgcttgatgacgggaacattcgtcagcaaattattacattcttaattgcgggacaccaaacgacaagtggtcttttatcatttgcgctgtatttcttagtgaaaaatccacatgtattacaaaaagtagcagaagaagcagcacgagttctagtagatcctgttccaagctacaaacaagtcaaacagcttaaatatgttggcatggtcttaaacgaagcgctgcgcttatggccagtagcgcctatgttttccctatatgcaaaagaagatacggtgcttggaggagaatatcctttaacgaaaggcgacgaagtaatggttctggtgcctcagcttcaccgtgataaaacaatttggggagacgatgtggaggagttccgtccagagcgttttgaaaatccaagtgcgattccgcagcatgcgtttaaaccgtttggaaacggtcagcgtgcgtgtatcggtcagcagttcgctcttcatgaagcaacgctggtacttggtatgatgctaaaacactttgactttgaagatcatacaaactacgagctcgttattaaagaatcgcggacgttaaaacctgaaggctttgtggtaaaagcaaaatcgaaaggcattccgcttggcggtattccttcacctagcactgaacagtctgctaaaaaagtacgcaaaaaggcagaaaacgctcataatacgccgctgcttgtgctatacggttcaaatgcgggaacagctgaaggaacggcgcgtgatttagcagatattgcaatgagcaaaggatttgcaccgcaggtcgcaacgcttgattcacacgccggtaatcttccgcgcgaaggagctgtattaattgtaacggcgtcttataacggtcatccgcctgataacgcaaagcaatttgtcgactggttagaccaagcgtctgctgatgaagtaaaaggcgttcgctactccgtatttggatgcggcgataaaaattgggcggggacgtatcaaaaagtgcctgcttttatcgatgaaacgcttgccgctaaaggggcagaaaacatcgctgaccgcggtgaagcagatgcaagcgacgactttgaaggcacatatgaagaatggcgtgatcatatgtggagtgacgtagcagcctactttaacctcgacattgaaaacagtgaagataataaatctactctttcacttcaatttgtcgacagcgccgcggatatgccgcttgcgaaaatgcacggtgcgttttcaacgaacgtcgtagcaagcaaagaacttcaacagccaggcagtgcacgaagcacgcgacatcttgaaattgaacttccaaaagaagcttcttatcaagaaggagatcatttaggtgttattcctcgcaactatgaaggaatagtaaaccgtgtaacagcaaggttcggcctaagcgcatcacagcaaatccgtctggaagcagaagaagaaaaattagctcatttgccactcgctaaaacagtatccgtagaagagcttctgcaatacgtggagcttcaagatcctgttacgcgcacgcagcttcgcgcaatggctgctaaaacggtctgcccgccgcataaagtagagcttgaagccttgcttgaaaagcaagcctacaaagaacaagtgctggcaaaacgtttaacaatgcttgaactgcttgaaaaatacccggcgtgtgaaatgaaattcagcgaatttatcgcccttctgccaagcatacgcccgcgctattactcgatttcttcatcacctcgtgtcgatgaaaaacaagcaagcatcacggtcagcgttgtctcaggaccggcgtggagcggatatggagaatataaaggaattgcgtcgaactatcttgccgagctgcaagaaggagatacgattacgtgctttatttccacaccgcagtcagaatttacgctgccaaaagaccctgaaacgccgcttatcatggtcggaccgggaacaggcgtcgcgccgtttagaggctttgtgcaggcgcgcaaacagctaaaagaacaaggacagtcacttggagaagcacatttatacttcggctgccgttcacctcatgaagactatctgtatcaagaagagcttgaaaacgcccaaagcgaaggcatcattacgcttcataccgctttttctcgcatgccaaatcagccgaaaacatacgttcagcacgtaatggaacaagacggcaagaaattgattgaacttcttgatcaaggagcgcacttctatatttgcggagacggaagccaaatggcacctgccgttgaagcaacgcttatgaaaagctatgctgacgttcaccaactgagtgaagcagacgctcgcttatggctgcagcagctagaagaaaaaggccgatacgcaaaagacgtgtggctgggg

SEQ ID NO: 678 - protein, 1049 aa, synthetic construct
  REGION 1..1049: note = variant of P450 oxidase from Bacillus megaterium
MTIKEMPQPKTFGELKNLPLLNTDKPVQALMRIADELGEIFKFEAPGSVTRYLSSQRLIKEACDESRFDKNLSQALKFARDFVGDGLSTSWTHEPNWKKAHNILVPSFSQHAMGRYHAMMVDIAVQLVQKWERLNADEHIEVSEDMTRLTLDTIGLCGFNYRFNSFYRDQPHPFIVSVVRALDEVMNKLQRANPDDPAYDENKRQCQEDIKVMNDYVDKIIADRKARGEQSHDLLTQMLNGKDPETGEPLDDGNIRQQIITFLIAGHQTTSGLLSFALYFLVKNPHVLQKVAEEAARVLVDPVPSYKQVKQLKYVGMVLNEALRLWPVAPMFSLYAKEDTVLGGEYPLTKGDEVMVLVPQLHRDKTIWGDDVEEFRPERFENPSAIPQHAFKPFGNGQRACIGQQFALHEATLVLGMMLKHFDFEDHTNYELVIKESRTLKPEGFVVKAKSKGIPLGGIPSPSTEQSAKKVRKKAENAHNTPLLVLYGSNAGTAEGTARDLADIAMSKGFAPQVATLDSHAGNLPREGAVLIVTASYNGHPPDNAKQFVDWLDQASADEVKGVRYSVFGCGDKNWAGTYQKVPAFIDETLAAKGAENIADRGEADASDDFEGTYEEWRDHMWSDVAAYFNLDIENSEDNKSTLSLQFVDSAADMPLAKMHGAFSTNVVASKELQQPGSARSTRHLEIELPKEASYQEGDHLGVIPRNYEGIVNRVTARFGLSASQQIRLEAEEEKLAHLPLAKTVSVEELLQYVELQDPVTRTQLRAMAAKTVCPPHKVELEALLEKQAYKEQVLAKRLTMLELLEKYPACEMKFSEFIALLPSIRPRYYSISSSPRVDEKQASITVSVVSGPAWSGYGEYKGIASNYLAELQEGDTITCFISTPQSEFTLPKDPETPLIMVGPGTGVAPFRGFVQARKQLKEQGQSLGEAHLYFGCRSPHEDYLYQEELENAQSEGIITLHTAFSRMPNQPKTYVQHVMEQDGKKLIELLDQGAHFYICGDGSQMAPAVEATLMKSYADVHQLSEADARLWLQQLEEKGRYAKDVWLG

SEQ ID NO: 679 - DNA, 3147 bp, synthetic construct
  misc_feature 1..3147: note = variant of P450 oxidase from Bacillus megaterium
  source 1..3147: mol_type = other DNA
atgacaattaaggaaatgcctcagcctaagacgtttggagaacttaaaaatttaccgttattaaacacagataaaccggttcaagctttgatgcgtattgcggatgaattaggagaaatctttaaattcgaggcgcctggtagcgtaacgcgctatttatcaagtcagcgtctaattaaagaagcatgcgatgaatcacgctttgataaaaacttaagtcaagcgcttaaatttgcacgtgattttgttggagacgggctgtctacaagctggacgcatgaaccgaattggaaaaaagcgcataatatcttagttccaagctttagtcagcatgcaatggggcgttatcatgcgatgatggtcgatatcgccgtgcagcttgttcaaaagtgggagcgtctaaatgcagatgagcatattgaagtatcggaagacatgacacgtttaacgcttgatacaattggtctttgcggctttaactatcgctttaacagcttttaccgagatcagcctcatccatttattgtgagtgtggttcgtgcactggatgaagtaatgaacaagctgcagcgagcaaatccagacgacccagcttatgatgaaaacaagcgccagtgtcaagaagatatcaaggtgatgaacgactatgtagataaaattattgcagatcgcaaagcaaggggtgaacaaagtcatgatttattaacgcagatgctaaacggaaaagatccagaaacgggtgagccgcttgatgacgggaacattcgtcagcaaattattacattcttaattgcgggacaccaaacgacaagtggtcttttatcatttgcgctgtatttcttagtgaaaaatccacatgtattacaaaaagtagcagaagaagcagcacgagttctagtagatcctgttccaagctacaaacaagtcaaacagcttaaatatgttggcatggtcttaaacgaagcgctgcgcttatggccagtagcgcctatgttttccctatatgcaaaagaagatacggtgcttggaggagaatatcctttaacgaaaggcgacgaagtaatggttctggtgcctcagcttcaccgtgataaaacaatttggggagacgatgtggaggagttccgtccagagcgttttgaaaatccaagtgcgattccgcagcatgcgtttaaaccgtttggaaacggtcagcgtgcgtgtatcggtcagcagttcgctcttcatgaagcaacgctggtacttggtatgatgctaaaacactttgactttgaagatcatacaaactacgagctcgttattaaagaatcgcggacgttaaaacctgaaggctttgtggtaaaagcaaaatcgaaaggcattccgcttggcggtattccttcacctagcactgaacagtctgctaaaaaagtacgcaaaaaggcagaaaacgctcataatacgccgctgcttgtgctatacggttcaaatgcgggaacagctgaaggaacggcgcgtgatttagcagatattgcaatgagcaaaggatttgcaccgcaggtcgcaacgcttgattcacacgccggtaatcttccgcgcgaaggagctgtattaattgtaacggcgtcttataacggtcatccgcctgataacgcaaagcaatttgtcgactggttagaccaagcgtctgctgatgaagtaaaaggcgttcgctactccgtatttggatgcggcgataaaaattgggcggggacgtatcaaaaagtgcctgcttttatcgatgaaacgcttgccgctaaaggggcagaaaacatcgctgaccgcggtgaagcagatgcaagcgacgactttgaaggcacatatgaagaatggcgtgatcatatgtggagtgacgtagcagcctactttaacctcgacattgaaaacagtgaagataataaatctactctttcacttcaatttgtcgacagcgccgcggatatgccgcttgcgaaaatgcacggtgcgttttcaacgaacgtcgtagcaagcaaagaacttcaacagccaggcagtgcacgaagcacgcgacatcttgaaattgaacttccaaaagaagcttcttatcaagaaggagatcatttaggtgttattcctcgcaactatgaaggaatagtaaaccgtgtaacagcaaggttcggcctaagcgcatcacagcaaatccgtctggaagcagaagaagaaaaattagctcatttgccactcgctaaaacagtatccgtagaagagcttctgcaatacgtggagcttcaagatcctgttacgcgcacgcagcttcgcgcaatggctgctaaaacggtctgcccgccgcataaagtagagcttgaagccttgcttgaaaagcaagcctacaaagaacaagtgctggcaaaacgtttaacaatgcttgaactgcttgaaaaatacccggcgtgtgaaatgaaattcagcgaatttatcgcccttctgccaagcatacgcccgcgctattactcgatttcttcatcacctcgtgtcgatgaaaaacaagcaagcatcacggtcagcgttgtctcaggaccggcgtggagcggatatggagaatataaaggaattgcgtcgaactatcttgccgagctgcaagaaggagatacgattacgtgctttatttccacaccgcagtcagaatttacgctgccaaaagaccctgaaacgccgcttatcatggtcggaccgggaacaggcgtcgcgccgtttagaggctttgtgcaggcgcgcaaacagctaaaagaacaaggacagtcacttggagaagcacatttatacttcggctgccgttcacctcatgaagactatctgtatcaagaagagcttgaaaacgcccaaagcgaaggcatcattacgcttcataccgctttttctcgcatgccaaatcagccgaaaacatacgttcagcacgtaatggaacaagacggcaagaaattgattgaacttcttgatcaaggagcgcacttctatatttgcggagacggaagccaaatggcatgtgccgttgaagcaacgcttatgaaaagctatgctgacgttcaccaagtgagtgaagcagacgctcgcttatggctgcagcagctagaagaaaaaggccgatacgcaaaagacgtgtggctgggg

SEQ ID NO: 680 - protein, 1049 aa, synthetic construct
  REGION 1..1049: note = variant of P450 oxidase from Bacillus megaterium
MTIKEMPQPKTFGELKNLPLLNTDKPVQALMRIADELGEIFKFEAPGSVTRYLSSQRLIKEACDESRFDKNLSQALKFARDFVGDGLSTSWTHEPNWKKAHNILVPSFSQHAMGRYHAMMVDIAVQLVQKWERLNADEHIEVSEDMTRLTLDTIGLCGFNYRFNSFYRDQPHPFIVSVVRALDEVMNKLQRANPDDPAYDENKRQCQEDIKVMNDYVDKIIADRKARGEQSHDLLTQMLNGKDPETGEPLDDGNIRQQIITFLIAGHQTTSGLLSFALYFLVKNPHVLQKVAEEAARVLVDPVPSYKQVKQLKYVGMVLNEALRLWPVAPMFSLYAKEDTVLGGEYPLTKGDEVMVLVPQLHRDKTIWGDDVEEFRPERFENPSAIPQHAFKPFGNGQRACIGQQFALHEATLVLGMMLKHFDFEDHTNYELVIKESRTLKPEGFVVKAKSKGIPLGGIPSPSTEQSAKKVRKKAENAHNTPLLVLYGSNAGTAEGTARDLADIAMSKGFAPQVATLDSHAGNLPREGAVLIVTASYNGHPPDNAKQFVDWLDQASADEVKGVRYSVFGCGDKNWAGTYQKVPAFIDETLAAKGAENIADRGEADASDDFEGTYEEWRDHMWSDVAAYFNLDIENSEDNKSTLSLQFVDSAADMPLAKMHGAFSTNVVASKELQQPGSARSTRHLEIELPKEASYQEGDHLGVIPRNYEGIVNRVTARFGLSASQQIRLEAEEEKLAHLPLAKTVSVEELLQYVELQDPVTRTQLRAMAAKTVCPPHKVELEALLEKQAYKEQVLAKRLTMLELLEKYPACEMKFSEFIALLPSIRPRYYSISSSPRVDEKQASITVSVVSGPAWSGYGEYKGIASNYLAELQEGDTITCFISTPQSEFTLPKDPETPLIMVGPGTGVAPFRGFVQARKQLKEQGQSLGEAHLYFGCRSPHEDYLYQEELENAQSEGIITLHTAFSRMPNQPKTYVQHVMEQDGKKLIELLDQGAHFYICGDGSQMACAVEATLMKSYADVHQVSEADARLWLQQLEEKGRYAKDVWLG

SEQ ID NO: 681 - DNA, 3147 bp, synthetic construct
  misc_feature 1..3147: note = variant of P450 oxidase from Bacillus megaterium
  source 1..3147: mol_type = other DNA
atgacaattaaggaaatgcctcagcctaagacgtttggagaacttaaaaatttaccgttattaaacacagataaaccggttcaagctttgatgcgtattgcggatgaattaggagaaatctttaaattcgaggcgcctggtagcgtaacgcgctatttatcaagtcagcgtctaattaaagaagcatgcgatgaatcacgctttgataaaaacttaagtcaagcgcttaaatttgcacgtgattttgttggagacgggctgtctacaagctggacgcatgaaccgaattggaaaaaagcgcataatatcttagttccaagctttagtcagcatgcaatggggcgttatcatgcgatgatggtcgatatcgccgtgcagcttgttcaaaagtgggagcgtctaaatgcagatgagcatattgaagtatcggaagacatgacacgtttaacgcttgatacaattggtctttgcggctttaactatcgctttaacagcttttaccgagatcagcctcatccatttattgtgagtgtggttcgtgcactggatgaagtaatgaacaagctgcagcgagcaaatccagacgacccagcttatgatgaaaacaagcgccagtgtcaagaagatatcaaggtgatgaacgactatgtagataaaattattgcagatcgcaaagcaaggggtgaacaaagtcatgatttattaacgcagatgctaaacggaaaagatccagaaacgggtgagccgcttgatgacgggaacattcgtcagcaaattattacattcttaattgcgggacaccaaacgacaagtggtcttttatcatttgcgctgtatttcttagtgaaaaatccacatgtattacaaaaagtagcagaagaagcagcacgagttctagtagatcctgttccaagctacaaacaagtcaaacagcttaaatatgttggcatggtcttaaacgaagcgctgcgcttatggccagtagcgcctatgttttccctatatgcaaaagaagatacggtgcttggaggagaatatcctttaacgaaaggcgacgaagtaatggttctggtgcctcagcttcaccgtgataaaacaatttggggagacgatgtggaggagttccgtccagagcgttttgaaaatccaagtgcgattccgcagcatgcgtttaaaccgtttggaaacggtcagcgtgcgtgtatcggtcagcagttcgctcttcatgaagcaacgctggtacttggtatgatgctaaaacactttgactttgaagatcatacaaactacgagctcgttattaaagaatcgcggacgttaaaacctgaaggctttgtggtaaaagcaaaatcgaaaggcattccgcttggcggtattccttcacctagcactgaacagtctgctaaaaaagtacgcaaaaaggcagaaaacgctcataatacgccgctgcttgtgctatacggttcaaatgcgggaacagctgaaggaacggcgcgtgatttagcagatattgcaatgagcaaaggatttgcaccgcaggtcgcaacgcttgattcacacgccggtaatcttccgcgcgaaggagctgtattaattgtaacggcgtcttataacggtcatccgcctgataacgcaaagcaatttgtcgactggttagaccaagcgtctgctgatgaagtaaaaggcgttcgctactccgtatttggatgcggcgataaaaattgggcggggacgtatcaaaaagtgcctgcttttatcgatgaaacgcttgccgctaaaggggcagaaaacatcgctgaccgcggtgaagcagatgcaagcgacgactttgaaggcacatatgaagaatggcgtgatcatatgtggagtgacgtagcagcctactttaacctcgacattgaaaacagtgaagataataaatctactctttcacttcaatttgtcgacagcgccgcggatatgccgcttgcgaaaatgcacggtgcgttttcaacgaacgtcgtagcaagcaaagaacttcaacagccaggcagtgcacgaagcacgcgacatcttgaaattgaacttccaaaagaagcttcttatcaagaaggagatcatttaggtgttattcctcgcaactatgaaggaatagtaaaccgtgtaacagcaaggttcggcctaagcgcatcacagcaaatccgtctggaagcagaagaagaaaaattagctcatttgccactcgctaaaacagtatccgtagaagagcttctgcaatacgtggagcttcaagatcctgttacgcgcacgcagcttcgcgcaatggctgctaaaacggtctgcccgccgcataaagtagagcttgaagccttgcttgaaaagcaagcctacaaagaacaagtgctggcaaaacgtttaacaatgcttgaactgcttgaaaaatacccggcgtgtgaaatgaaattcagcgaatttatcgcccttctgccaagcatacgcccgcgctattactcgatttcttcatcacctcgtgtcgatgaaaaacaagcaagcatcacggtcagcgttgtctcaggaccggcgtggagcggatatggagaatataaaggaattgcgtcgaactatcttgccgagctgcaagaaggagatacgattacgtgctttatttccacaccgcagtcagaatttacgctgccaaaagaccctgaaacgccgcttatcatggtcggaccgggaacaggcgtcgcgccgtttagaggctttgtgcaggcgcgcaaacagctaaaagaacaaggacagtcacttggagaagcacatttatacttcggctgccgttcacctcatgaagactatctgtattgggaagagcttgaaaacgcccaaagcgaaggcatcattacgcttcataccgctttttctcgcatgccaaatcagccgaaaacatacgttcagcacgtaatggaacaagacggcaagaaattgattgaacttcttgatcaaggagcgcacttctatatttgcggagacggaagccaaatggcacctgccgttgaagcaacgcttatgaaaagctatgctgacgttcaccaagtgagtgaagcagacgctcgcttatggctgcagcagctagaagaaaaaggccgatacgcaaaagacgtgtggctgggg

SEQ ID NO: 682 - protein, 1049 aa, synthetic construct
  REGION 1..1049: note = variant of P450 oxidase from Bacillus megaterium
MTIKEMPQPKTFGELKNLPLLNTDKPVQALMRIADELGEIFKFEAPGSVTRYLSSQRLIKEACDESRFDKNLSQALKFARDFVGDGLSTSWTHEPNWKKAHNILVPSFSQHAMGRYHAMMVDIAVQLVQKWERLNADEHIEVSEDMTRLTLDTIGLCGFNYRFNSFYRDQPHPFIVSVVRALDEVMNKLQRANPDDPAYDENKRQCQEDIKVMNDYVDKIIADRKARGEQSHDLLTQMLNGKDPETGEPLDDGNIRQQIITFLIAGHQTTSGLLSFALYFLVKNPHVLQKVAEEAARVLVDPVPSYKQVKQLKYVGMVLNEALRLWPVAPMFSLYAKEDTVLGGEYPLTKGDEVMVLVPQLHRDKTIWGDDVEEFRPERFENPSAIPQHAFKPFGNGQRACIGQQFALHEATLVLGMMLKHFDFEDHTNYELVIKESRTLKPEGFVVKAKSKGIPLGGIPSPSTEQSAKKVRKKAENAHNTPLLVLYGSNAGTAEGTARDLADIAMSKGFAPQVATLDSHAGNLPREGAVLIVTASYNGHPPDNAKQFVDWLDQASADEVKGVRYSVFGCGDKNWAGTYQKVPAFIDETLAAKGAENIADRGEADASDDFEGTYEEWRDHMWSDVAAYFNLDIENSEDNKSTLSLQFVDSAADMPLAKMHGAFSTNVVASKELQQPGSARSTRHLEIELPKEASYQEGDHLGVIPRNYEGIVNRVTARFGLSASQQIRLEAEEEKLAHLPLAKTVSVEELLQYVELQDPVTRTQLRAMAAKTVCPPHKVELEALLEKQAYKEQVLAKRLTMLELLEKYPACEMKFSEFIALLPSIRPRYYSISSSPRVDEKQASITVSVVSGPAWSGYGEYKGIASNYLAELQEGDTITCFISTPQSEFTLPKDPETPLIMVGPGTGVAPFRGFVQARKQLKEQGQSLGEAHLYFGCRSPHEDYLYWEELENAQSEGIITLHTAFSRMPNQPKTYVQHVMEQDGKKLIELLDQGAHFYICGDGSQMAPAVEATLMKSYADVHQVSEADARLWLQQLEEKGRYAKDVWLG

SEQ ID NO: 683 - DNA, 3147 bp, synthetic construct
  misc_feature 1..3147: note = variant of P450 oxidase from Bacillus megaterium
  source 1..3147: mol_type = other DNA
atgacaattaaggaaatgcctcagcctaagacgtttggagaacttaaaaatttaccgttattaaacacagataaaccggttcaagctttgatgcgtattgcggatgaattaggagaaatctttaaattcgaggcgcctggtagcgtaacgcgctatttatcaagtcagcgtctaattaaagaagcatgcgatgaatcacgctttgataaaaacttaagtcaagcgcttaaatttgcacgtgattttgttggagacgggctgtctacaagctggacgcatgaaccgaattggaaaaaagcgcataatatcttagttccaagctttagtcagcatgcaatggggcgttatcatgcgatgatggtcgatatcgccgtgcagcttgttcaaaagtgggagcgtctaaatgcagatgagcatattgaagtatcggaagacatgacacgtttaacgcttgatacaattggtctttgcggctttaactatcgctttaacagcttttaccgagatcagcctcatccatttattgtgagtgtggttcgtgcactggatgaagtaatgaacaagctgcagcgagcaaatccagacgacccagcttatgatgaaaacaagcgccagtgtcaagaagatatcaaggtgatgaacgactatgtagataaaattattgcagatcgcaaagcaaggggtgaacaaagtcatgatttattaacgcagatgctaaacggaaaagatccagaaacgggtgagccgcttgatgacgggaacattcgtcagcaaattattacattcttaattgcgggacaccaaacgacaagtggtcttttatcatttgcgctgtatttcttagtgaaaaatccacatgtattacaaaaagtagcagaagaagcagcacgagttctagtagatcctgttccaagctacaaacaagtcaaacagcttaaatatgttggcatggtcttaaacgaagcgctgcgcttatggccagtagcgcctatgttttccctatatgcaaaagaagatacggtgcttggaggagaatatcctttaacgaaaggcgacgaagtaatggttctggtgcctcagcttcaccgtgataaaacaatttggggagacgatgtggaggagttccgtccagagcgttttgaaaatccaagtgcgattccgcagcatgcgtttaaaccgtttggaaacggtcagcgtgcgtgtatcggtcagcagttcgctcttcatgaagcaacgctggtacttggtatgatgctaaaacactttgactttgaagatcatacaaactacgagctcgttattaaagaatcgcggacgttaaaacctgaaggctttgtggtaaaagcaaaatcgaaaggcattccgcttggcggtattccttcacctagcactgaacagtctgctaaaaaagtacgcaaaaaggcagaaaacgctcataatacgccgctgcttgtgctatacggttcaaatgcgggaacagctgaaggaacggcgcgtgatttagcagatattgcaatgagcaaaggatttgcaccgcaggtcgcaacgcttgattcacacgccggtaatcttccgcgcgaaggagctgtattaattgtaacggcgtcttataacggtcatccgcctgataacgcaaagcaatttgtcgactggttagaccaagcgtctgctgatgaagtaaaaggcgttcgctactccgtatttggatgcggcgataaaaattgggcggggacgtatcaaaaagtgcctgcttttatcgatgaaacgcttgccgctaaaggggcagaaaacatcgctgaccgcggtgaagcagatgcaagcgacgactttgaaggcacatatgaagaatggcgtgatcatatgtggagtgacgtagcagcctactttaacctcgacattgaaaacagtgaagataataaatctactctttcacttcaatttgtcgacagcgccgcggatatgccgcttgcgaaaatgcacggtgcgttttcaacgaacgtcgtagcaagcaaagaacttcaacagccaggcagtgcacgaagcacgcgacatcttgaaattgaacttccaaaagaagcttcttatcaagaaggagatcatttaggtgttattcctcgcaactatgaaggaatagtaaaccgtgtaacagcaaggttcggcctaagcgcatcacagcaaatccgtctggaagcagaagaagaaaaattagctcatttgccactcgctaaaacagtatccgtagaagagcttctgcaatacgtggagcttcaagatcctgttacgcgcacgcagcttcgcgcaatggctgctaaaacggtctgcccgccgcataaagtagagcttgaagccttgcttgaaaagcaagcctacaaagaacaagtgctggcaaaacgtttaacaatgcttgaactgcttgaaaaatacccggcgtgtgaaatgaaattcagcgaatttatcgcccttctgccaagcatacgcccgcgctattactcgatttcttcatcacctcgtgtcgatgaaaaacaagcaagcatcacggtcagcgttgtctcaggaccggcgtggagcggatatggagaatataaaggaattgcgtcgaactatcttgccgagctgcaagaaggagatacgtcgacgtgctttatttccacaccgcagtcagaatttacgctgccaaaagaccctgaaacgccgcttatcatggtcggaccgggaacaggcgtcgcgccgtttagaggctttgtgcaggcgcgcaaacagctaaaagaacaaggacagtcacttggagaagcacatttatacttcggctgccgttcacctcatgaagactatctgtatcaagaagagcttgaaaacgcccaaagcgaaggcatcattacgcttcataccgctttttctcgcatgccaaatcagccgaaaacatacgttcagcacgtaatggaacaagacggcaagaaattgattgaacttcttgatcaaggagcgcacttctatatttgcggagacggaagccaaatggcacctgccgttgaagcaacgcttatgaaaagctatgctgacgttcaccaagtgagtgaagcagacgctcgcttatggctgcagcagctagaagaaaaaggccgatacgcaaaagacgtgtggctgggg

SEQ ID NO: 684 - protein, 1049 aa, synthetic construct
  REGION 1..1049: note = variant of P450 oxidase from Bacillus megaterium
MTIKEMPQPKTFGELKNLPLLNTDKPVQALMRIADELGEIFKFEAPGSVTRYLSSQRLIKEACDESRFDKNLSQALKFARDFVGDGLSTSWTHEPNWKKAHNILVPSFSQHAMGRYHAMMVDIAVQLVQKWERLNADEHIEVSEDMTRLTLDTIGLCGFNYRFNSFYRDQPHPFIVSVVRALDEVMNKLQRANPDDPAYDENKRQCQEDIKVMNDYVDKIIADRKARGEQSHDLLTQMLNGKDPETGEPLDDGNIRQQIITFLIAGHQTTSGLLSFALYFLVKNPHVLQKVAEEAARVLVDPVPSYKQVKQLKYVGMVLNEALRLWPVAPMFSLYAKEDTVLGGEYPLTKGDEVMVLVPQLHRDKTIWGDDVEEFRPERFENPSAIPQHAFKPFGNGQRACIGQQFALHEATLVLGMMLKHFDFEDHTNYELVIKESRTLKPEGFVVKAKSKGIPLGGIPSPSTEQSAKKVRKKAENAHNTPLLVLYGSNAGTAEGTARDLADIAMSKGFAPQVATLDSHAGNLPREGAVLIVTASYNGHPPDNAKQFVDWLDQASADEVKGVRYSVFGCGDKNWAGTYQKVPAFIDETLAAKGAENIADRGEADASDDFEGTYEEWRDHMWSDVAAYFNLDIENSEDNKSTLSLQFVDSAADMPLAKMHGAFSTNVVASKELQQPGSARSTRHLEIELPKEASYQEGDHLGVIPRNYEGIVNRVTARFGLSASQQIRLEAEEEKLAHLPLAKTVSVEELLQYVELQDPVTRTQLRAMAAKTVCPPHKVELEALLEKQAYKEQVLAKRLTMLELLEKYPACEMKFSEFIALLPSIRPRYYSISSSPRVDEKQASITVSVVSGPAWSGYGEYKGIASNYLAELQEGDTSTCFISTPQSEFTLPKDPETPLIMVGPGTGVAPFRGFVQARKQLKEQGQSLGEAHLYFGCRSPHEDYLYQEELENAQSEGIITLHTAFSRMPNQPKTYVQHVMEQDGKKLIELLDQGAHFYICGDGSQMAPAVEATLMKSYADVHQVSEADARLWLQQLEEKGRYAKDVWLG

SEQ ID NO: 685 - DNA, 3147 bp, synthetic construct
  misc_feature 1..3147: note = variant of P450 oxidase from Bacillus megaterium
  source 1..3147: mol_type = other DNA
atgacaattaaggaaatgcctcagcctaagacgtttggagaacttaaaaatttaccgttattaaacacagataaaccggttcaagctttgatgcgtattgcggatgaattaggagaaatctttaaattcgaggcgcctggtagcgtaacgcgctatttatcaagtcagcgtctaattaaagaagcatgcgatgaatcacgctttgataaaaacttaagtcaagcgcttaaatttgcacgtgattttgttggagacgggctgtctacaagctggacgcatgaaccgaattggaaaaaagcgcataatatcttagttccaagctttagtcagcatgcaatggggcgttatcatgcgatgatggtcgatatcgccgtgcagcttgttcaaaagtgggagcgtctaaatgcagatgagcatattgaagtatcggaagacatgacacgtttaacgcttgatacaattggtctttgcggctttaactatcgctttaacagcttttaccgagatcagcctcatccatttattgtgagtgtggttcgtgcactggatgaagtaatgaacaagctgcagcgagcaaatccagacgacccagcttatgatgaaaacaagcgccagtgtcaagaagatatcaaggtgatgaacgactatgtagataaaattattgcagatcgcaaagcaaggggtgaacaaagtcatgatttattaacgcagatgctaaacggaaaagatccagaaacgggtgagccgcttgatgacgggaacattcgtcagcaaattattacattcttaattgcgggacaccaaacgacaagtggtcttttatcatttgcgctgtatttcttagtgaaaaatccacatgtattacaaaaagtagcagaagaagcagcacgagttctagtagatcctgttccaagctacaaacaagtcaaacagcttaaatatgttggcatggtcttaaacgaagcgctgcgcttatggccagtagcgcctatgttttccctatatgcaaaagaagatacggtgcttggaggagaatatcctttaacgaaaggcgacgaagtaatggttctggtgcctcagcttcaccgtgataaaacaatttggggagacgatgtggaggagttccgtccagagcgttttgaaaatccaagtgcgattccgcagcatgcgtttaaaccgtttggaaacggtcagcgtgcgtgtatcggtcagcagttcgctcttcatgaagcaacgctggtacttggtatgatgctaaaacactttgactttgaagatcatacaaactacgagctcgttattaaagaatcgcggacgttaaaacctgaaggctttgtggtaaaagcaaaatcgaaaggcattccgcttggcggtattccttcacctagcactgaacagtctgctaaaaaagtacgcaaaaaggcagaaaacgctcataatacgccgctgcttgtgctatacggttcaaatgcgggaacagctgaaggaacggcgcgtgatttagcagatattgcaatgagcaaaggatttgcaccgcaggtcgcaacgcttgattcacacgccggtaatcttccgcgcgaaggagctgtattaattgtaacggcgtcttataacggtcatccgcctgataacgcaaagcaatttgtcgactggttagaccaagcgtctgctgatgaagtaaaaggcgttcgctactccgtatttggatgcggcgataaaaattgggcggggacgtatcaaaaagtgcctgcttttatcgatgaaacgcttgccgctaaaggggcagaaaacatcgctgaccgcggtgaagcagatgcaagcgacgactttgaaggcacatatgaagaatggcgtgatcatatgtggagtgacgtagcagcctactttaacctcgacattgaaaacagtgaagataataaatctactctttcacttcaatttgtcgacagcgccgcggatatgccgcttgcgaaaatgcacggtgcgttttcaacgaacgtcgtagcaagcaaagaacttcaacagccaggcagtgcacgaagcacgcgacatcttgaaattgaacttccaaaagaagcttcttatcaagaaggagatcatttaggtgttattcctcgcaactatgaaggaatagtaaaccgtgtaacagcaaggttcggcctaagcgcatcacagcaaatccgtctggaagcagaagaagaaaaattagctcatttgccactcgctaaaacagtatccgtagaagagcttctgcaatacgtggagcttcaagatcctgttacgcgcacgcagcttcgcgcaatggctgctaaaacggtctgcccgccgcataaagtagagcttgaagccttgcttgaaaagcaagcctacaaagaacaagtgctggcaaaacgtttaacaatgcttgaactgcttgaaacttacccggcgtgtgaaatgaaattcagcgaatttatcgcccttctgccaagcatacgcccgcgctattactcgatttcttcatcacctcgtgtcgatgaaaaacaagcaagcatcacggtcagcgttgtctcaggaccggcgtggagcggatatggagaatataaaggaattgcgtcgaactatcttgccgagctgcaagaaggagatacgattacgtgctttatttccacaccgcagtcagaatttacgctgccaaaagaccctgaaacgccgcttatcatggtcggaccgggaacaggcgtcgcgccgtttagaggctttgtgcaggcgcgcaaacagctaaaagaacaaggacagtcacttggagaagcacatttatacttcggctgccgttcacctcatgaagactatctgtatcaagaagagcttgaaaacgcccaaagcgaaggcatcattacgcttcataccgctttttctcgcatgccaaatcagccgaaaacatacgttcagcacgtaatggaacaagacggcaagaaattgattgaacttcttgatcaaggagcgcacttctatatttgcggagacggaagccaaatggcacctgccgttgaagcaacgcttatgaaaagctatgctgacgttcaccaagtgagtgaagcagacgctcgcttatggctgcagcagctagaagaaaaaggccgatacgcaaaagacgtgtggctgggg

SEQ ID NO: 686 - protein, 1049 aa, synthetic construct
  REGION 1..1049: note = variant of P450 oxidase from Bacillus megaterium
MTIKEMPQPKTFGELKNLPLLNTDKPVQALMRIADELGEIFKFEAPGSVTRYLSSQRLIKEACDESRFDKNLSQALKFARDFVGDGLSTSWTHEPNWKKAHNILVPSFSQHAMGRYHAMMVDIAVQLVQKWERLNADEHIEVSEDMTRLTLDTIGLCGFNYRFNSFYRDQPHPFIVSVVRALDEVMNKLQRANPDDPAYDENKRQCQEDIKVMNDYVDKIIADRKARGEQSHDLLTQMLNGKDPETGEPLDDGNIRQQIITFLIAGHQTTSGLLSFALYFLVKNPHVLQKVAEEAARVLVDPVPSYKQVKQLKYVGMVLNEALRLWPVAPMFSLYAKEDTVLGGEYPLTKGDEVMVLVPQLHRDKTIWGDDVEEFRPERFENPSAIPQHAFKPFGNGQRACIGQQFALHEATLVLGMMLKHFDFEDHTNYELVIKESRTLKPEGFVVKAKSKGIPLGGIPSPSTEQSAKKVRKKAENAHNTPLLVLYGSNAGTAEGTARDLADIAMSKGFAPQVATLDSHAGNLPREGAVLIVTASYNGHPPDNAKQFVDWLDQASADEVKGVRYSVFGCGDKNWAGTYQKVPAFIDETLAAKGAENIADRGEADASDDFEGTYEEWRDHMWSDVAAYFNLDIENSEDNKSTLSLQFVDSAADMPLAKMHGAFSTNVVASKELQQPGSARSTRHLEIELPKEASYQEGDHLGVIPRNYEGIVNRVTARFGLSASQQIRLEAEEEKLAHLPLAKTVSVEELLQYVELQDPVTRTQLRAMAAKTVCPPHKVELEALLEKQAYKEQVLAKRLTMLELLETYPACEMKFSEFIALLPSIRPRYYSISSSPRVDEKQASITVSVVSGPAWSGYGEYKGIASNYLAELQEGDTITCFISTPQSEFTLPKDPETPLIMVGPGTGVAPFRGFVQARKQLKEQGQSLGEAHLYFGCRSPHEDYLYQEELENAQSEGIITLHTAFSRMPNQPKTYVQHVMEQDGKKLIELLDQGAHFYICGDGSQMAPAVEATLMKSYADVHQVSEADARLWLQQLEEKGRYAKDVWLG

SEQ ID NO: 687 - DNA, 3147 bp, synthetic construct
  misc_feature 1..3147: note = variant of P450 oxidase from Bacillus megaterium
  source 1..3147: mol_type = other DNA
atgacaattaaggaaatgcctcagcctaagacgtttggagaacttaaaaatttaccgttattaaacacagataaaccggttcaagctttgatgcgtattgcggatgaattaggagaaatctttaaattcgaggcgcctggtagcgtaacgcgctatttatcaagtcagcgtctaattaaagaagcatgcgatgaatcacgctttgataaaaacttaagtcaagcgcttaaatttgcacgtgattttgttggagacgggctgtctacaagctggacgcatgaaccgaattggaaaaaagcgcataatatcttagttccaagctttagtcagcatgcaatggggcgttatcatgcgatgatggtcgatatcgccgtgcagcttgttcaaaagtgggagcgtctaaatgcagatgagcatattgaagtatcggaagacatgacacgtttaacgcttgatacaattggtctttgcggctttaactatcgctttaacagcttttaccgagatcagcctcatccatttattgtgagtgtggttcgtgcactggatgaagtaatgaacaagctgcagcgagcaaatccagacgacccagcttatgatgaaaacaagcgccagtgtcaagaagatatcaaggtgatgaacgactatgtagataaaattattgcagatcgcaaagcaaggggtgaacaaagtcatgatttattaacgcagatgctaaacggaaaagatccagaaacgggtgagccgcttgatgacgggaacattcgtcagcaaattattacattcttaattgcgggacaccaaacgacaagtggtcttttatcatttgcgctgtatttcttagtgaaaaatccacatgtattacaaaaagtagcagaagaagcagcacgagttctagtagatcctgttccaagctacaaacaagtcaaacagcttaaatatgttggcatggtcttaaacgaagcgctgcgcttatggccagtagcgcctatgttttccctatatgcaaaagaagatacggtgcttggaggagaatatcctttaacgaaaggcgacgaagtaatggttctggtgcctcagcttcaccgtgataaaacaatttggggagacgatgtggaggagttccgtccagagcgttttgaaaatccaagtgcgattccgcagcatgcgtttaaaccgtttggaaacggtcagcgtgcgtgtatcggtcagcagttcgctcttcatgaagcaacgctggtacttggtatgatgctaaaacactttgactttgaagatcatacaaactacgagctcgttattaaagaatcgcggacgttaaaacctgaaggctttgtggtaaaagcaaaatcgaaaggcattccgcttggcggtattccttcacctagcactgaacagtctgctaaaaaagtacgcaaaaaggcagaaaacgctcataatacgccgctgcttgtgctatacggttcaaatgcgggaacagctgaaggaacggcgcgtgatttagcagatattgcaatgagcaaaggatttgcaccgcaggtcgcaacgcttgattcacacgccggtaatcttccgcgcgaaggagctgtattaattgtaacggcgtcttataacggtcatccgcctgataacgcaaagcaatttgtcgactggttagaccaagcgtctgctgatgaagtaaaaggcgttcgctactccgtatttggatgcggcgataaaaattgggcggggacgtatcaaaaagtgcctgcttttatcgatgaaacgcttgccgctaaaggggcagaaaacatcgctgaccgcggtgaagcagatgcaagcgacgactttgaaggcacatatgaagaatggcgtgatcatatgtggagtgacgtagcagcctactttaacctcgacattgaaaacagtgaagataataaatctactctttcacttcaatttgtcgacagcgccgcggatatgccgcttgcgaaaatgcacggtgcgttttcaacgaacgtcgtagcaagcaaagaacttcaacagccaaatagtgcacgaagcacgcgacatcttgaaattgaacttccaaaagaagcttcttatcaagaaggagatcatttaggtgttattcctcgcaactatgaaggaatagtaaaccgtgtaacagcaaggttcggcctaagcgcatcacagcaaatccgtctggaagcagaagaagaaaaattagctcatttgccactcgctaaaacagtatccgtagaagagcttctgcaatacgtggagcttcaagatcctgttacgcgcacgcagcttcgcgcaatggctgctaaaacggtctgcccgccgcataaagtagagcttgaagccttgcttgaaaagcaagcctacaaagaacaagtgctggcaaaacgtttaacaatgcttgaactgcttgaaaaatacccggcgtgtgaaatgaaattcagcgaatttatcgcccttctgccaagcatacgcccgcgctattactcgatttcttcatcacctcgtgtcgatgaaaaacaagcaagcatcacggtcagcgttgtctcaggaccggcgtggagcggatatggagaatataaaggaattgcgtcgaactatcttgccgagctgcaagaaggagatacgattacgtgctttatttccacaccgcagtcagaatttacgctgccaaaagaccctgaaacgccgcttatcatggtcggaccgggaacaggcgtcgcgccgtttagaggctttgtgcaggcgcgcaaacagctaaaagaacaaggacagtcacttggagaagcacatttatacttcggctgccgttcacctcatgaagactatctgtatcaagaagagcttgaaaacgcccaaagcgaaggcatcattacgcttcataccgctttttctcgcatgccaaatcagccgaaaacatacgttcagcacgtaatggaacaagacggcaagaaattgattgaacttcttgatcaaggagcgcacttctatatttgcggagacggaagccaaatggcacctgccgttgaagcaacgcttatgaaaagctatgctgacgttcaccaagtgagtgaagcagacgctcgcttatggctgcagcagctagaagaaaaaggccgatacgcaaaagacgtgtggctgggg

SEQ ID NO: 688 - protein, 1049 aa, synthetic construct
  REGION 1..1049: note = variant of P450 oxidase from Bacillus megaterium
MTIKEMPQPKTFGELKNLPLLNTDKPVQALMRIADELGEIFKFEAPGSVTRYLSSQRLIKEACDESRFDKNLSQALKFARDFVGDGLSTSWTHEPNWKKAHNILVPSFSQHAMGRYHAMMVDIAVQLVQKWERLNADEHIEVSEDMTRLTLDTIGLCGFNYRFNSFYRDQPHPFIVSVVRALDEVMNKLQRANPDDPAYDENKRQCQEDIKVMNDYVDKIIADRKARGEQSHDLLTQMLNGKDPETGEPLDDGNIRQQIITFLIAGHQTTSGLLSFALYFLVKNPHVLQKVAEEAARVLVDPVPSYKQVKQLKYVGMVLNEALRLWPVAPMFSLYAKEDTVLGGEYPLTKGDEVMVLVPQLHRDKTIWGDDVEEFRPERFENPSAIPQHAFKPFGNGQRACIGQQFALHEATLVLGMMLKHFDFEDHTNYELVIKESRTLKPEGFVVKAKSKGIPLGGIPSPSTEQSAKKVRKKAENAHNTPLLVLYGSNAGTAEGTARDLADIAMSKGFAPQVATLDSHAGNLPREGAVLIVTASYNGHPPDNAKQFVDWLDQASADEVKGVRYSVFGCGDKNWAGTYQKVPAFIDETLAAKGAENIADRGEADASDDFEGTYEEWRDHMWSDVAAYFNLDIENSEDNKSTLSLQFVDSAADMPLAKMHGAFSTNVVASKELQQPNSARSTRHLEIELPKEASYQEGDHLGVIPRNYEGIVNRVTARFGLSASQQIRLEAEEEKLAHLPLAKTVSVEELLQYVELQDPVTRTQLRAMAAKTVCPPHKVELEALLEKQAYKEQVLAKRLTMLELLEKYPACEMKFSEFIALLPSIRPRYYSISSSPRVDEKQASITVSVVSGPAWSGYGEYKGIASNYLAELQEGDTITCFISTPQSEFTLPKDPETPLIMVGPGTGVAPFRGFVQARKQLKEQGQSLGEAHLYFGCRSPHEDYLYQEELENAQSEGIITLHTAFSRMPNQPKTYVQHVMEQDGKKLIELLDQGAHFYICGDGSQMAPAVEATLMKSYADVHQVSEADARLWLQQLEEKGRYAKDVWLG

SEQ ID NO: 689 - DNA, 3147 bp, synthetic construct
  misc_feature 1..3147: note = variant of P450 oxidase from Bacillus megaterium
  source 1..3147: mol_type = other DNA
atgacaattaaggaaatgcctcagcctaagacgtttggagaacttaaaaatttaccgttattaaacacagataaaccggttcaagctttgatgcgtattgcggatgaattaggagaaatctttaaattcgaggcgcctggtagcgtaacgcgctatttatcaagtcagcgtctaattaaagaagcatgcgatgaatcacgctttgataaaaacttaagtcaagcgcttaaatttgcacgtgattttgttggagacgggctgtctacaagctggacgcatgaaccgaattggaaaaaagcgcataatatcttagttccaagctttagtcagcatgcaatggggcgttatcatgcgatgatggtcgatatcgccgtgcagcttgttcaaaagtgggagcgtctaaatgcagatgagcatattgaagtatcggaagacatgacacgtttaacgcttgatacaattggtctttgcggctttaactatcgctttaacagcttttaccgagatcagcctcatccatttattgtgagtgtggttcgtgcactggatgaagtaatgaacaagctgcagcgagcaaatccagacgacccagcttatgatgaaaacaagcgccagtgtcaagaagatatcaaggtgatgaacgactatgtagataaaattattgcagatcgcaaagcaaggggtgaacaaagtcatgatttattaacgcagatgctaaacggaaaagatccagaaacgggtgagccgcttgatgacgggaacattcgtcagcaaattattacattcttaattgcgggacaccaaacgacaagtggtcttttatcatttgcgctgtatttcttagtgaaaaatccacatgtattacaaaaagtagcagaagaagcagcacgagttctagtagatcctgttccaagctacaaacaagtcaaacagcttaaatatgttggcatggtcttaaacgaagcgctgcgcttatggccagtagcgcctatgttttccctatatgcaaaagaagatacggtgcttggaggagaatatcctttaacgaaaggcgacgaagtaatggttctggtgcctcagcttcaccgtgataaaacaatttggggagacgatgtggaggagttccgtccagagcgttttgaaaatccaagtgcgattccgcagcatgcgtttaaaccgtttggaaacggtcagcgtgcgtgtatcggtcagcagttcgctcttcatgaagcaacgctggtacttggtatgatgctaaaacactttgactttgaagatcatacaaactacgagctcgttattaaagaatcgcggacgttaaaacctgaaggctttgtggtaaaagcaaaatcgaaaggcattccgcttggcggtattccttcacctagcactgaacagtctgctaaaaaagtacgcaaaaaggcagaaaacgctcataatacgccgctgcttgtgctatacggttcaaatgcgggaacagctgaaggaacggcgcgtgatttagcagatattgcaatgagcaaaggatttgcaccgcaggtcgcaacgcttgattcacacgccggtaatcttccgcgcgaaggagctgtattaattgtaacggcgtcttataacggtcatccgcctgataacgcaaagcaatttgtcgactggttagaccaagcgtctgctgatgaagtaaaaggcgttcgctactccgtatttggatgcggcgataaaaattgggcggggacgtatcaaaaagtgcctgcttttatcgatgaaacgcttgccgctaaaggggcagaaaacatcgctgaccgcggtgaagcagatgcaagcgacgactttgaaggcacatatgaagaatggcgtgatcatatgtggagtgacgtagcagcctactttaacctcgacattgaaaacagtgaagataataaatctactctttcacttcaatttgtcgacagcgccgcggatatggcgcttgcgaaaatgcacggtgcgttttcaacgaacgtcgtagcaagcaaagaacttcaacagccaggcagtgcacgaagcacgcgacatcttgaaattgaacttccaaaagaagcttcttatcaagaaggagatcatttaggtgttattcctcgcaactatgaaggaatagtaaaccgtgtaacagcaaggttcggcctaagcgcatcacagcaaatccgtctggaagcagaagaagaaaaattagctcatttgccactcgctaaaacagtatccgtagaagagcttctgcaatacgtggagcttcaagatcctgttacgcgcacgcagcttcgcgcaatggctgctaaaacggtctgcccgccgcataaagtagagcttgaagccttgcttgaaaagcaagcctacaaagaacaagtgctggcaaaacgtttaacaatgcttgaactgcttgaaaaatacccggcgtgtgaaatgaaattcagcgaatttatcgcccttctgccaagcatacgcccgcgctattactcgatttcttcatcacctcgtgtcgatgaaaaacaagcaagcatcacggtcagcgttgtctcaggaccggcgtggagcggatatggagaatataaaggaattgcgtcgaactatcttgccgagctgcaagaaggagatacgattacgtgctttatttccacaccgcagtcagaatttacgctgccaaaagaccctgaaacgccgcttatcatggtcggaccgggaacaggcgtcgcgccgtttagaggctttgtgcaggcgcgcaaacagctaaaagaacaaggacagtcacttggagaagcacatttatacttcggctgccgttcacctcatgaagactatctgtatcaagaagagcttgaaaacgcccaaagcgaaggcatcattacgcttcataccgctttttctcgcatgccaaatcagccgaaaacatacgttcagcacgtaatggaacaagacggcaagaaattgattgaacttcttgatcaaggagcgcacttctatatttgcggagacggaagccaaatggcacctgccgttgaagcaacgcttatgaaaagctatgctgacgttcaccaagtgagtgaagcagacgctcgcttatggctgcagcagctagaagaaaaaggccgatacgcaaaagacgtgtggctgggg

SEQ ID NO: 690 - protein, 1049 aa, synthetic construct
  REGION 1..1049: note = variant of P450 oxidase from Bacillus megaterium
MTIKEMPQPKTFGELKNLPLLNTDKPVQALMRIADELGEIFKFEAPGSVTRYLSSQRLIKEACDESRFDKNLSQALKFARDFVGDGLSTSWTHEPNWKKAHNILVPSFSQHAMGRYHAMMVDIAVQLVQKWERLNADEHIEVSEDMTRLTLDTIGLCGFNYRFNSFYRDQPHPFIVSVVRALDEVMNKLQRANPDDPAYDENKRQCQEDIKVMNDYVDKIIADRKARGEQSHDLLTQMLNGKDPETGEPLDDGNIRQQIITFLIAGHQTTSGLLSFALYFLVKNPHVLQKVAEEAARVLVDPVPSYKQVKQLKYVGMVLNEALRLWPVAPMFSLYAKEDTVLGGEYPLTKGDEVMVLVPQLHRDKTIWGDDVEEFRPERFENPSAIPQHAFKPFGNGQRACIGQQFALHEATLVLGMMLKHFDFEDHTNYELVIKESRTLKPEGFVVKAKSKGIPLGGIPSPSTEQSAKKVRKKAENAHNTPLLVLYGSNAGTAEGTARDLADIAMSKGFAPQVATLDSHAGNLPREGAVLIVTASYNGHPPDNAKQFVDWLDQASADEVKGVRYSVFGCGDKNWAGTYQKVPAFIDETLAAKGAENIADRGEADASDDFEGTYEEWRDHMWSDVAAYFNLDIENSEDNKSTLSLQFVDSAADMALAKMHGAFSTNVVASKELQQPGSARSTRHLEIELPKEASYQEGDHLGVIPRNYEGIVNRVTARFGLSASQQIRLEAEEEKLAHLPLAKTVSVEELLQYVELQDPVTRTQLRAMAAKTVCPPHKVELEALLEKQAYKEQVLAKRLTMLELLEKYPACEMKFSEFIALLPSIRPRYYSISSSPRVDEKQASITVSVVSGPAWSGYGEYKGIASNYLAELQEGDTITCFISTPQSEFTLPKDPETPLIMVGPGTGVAPFRGFVQARKQLKEQGQSLGEAHLYFGCRSPHEDYLYQEELENAQSEGIITLHTAFSRMPNQPKTYVQHVMEQDGKKLIELLDQGAHFYICGDGSQMAPAVEATLMKSYADVHQVSEADARLWLQQLEEKGRYAKDVWLG

SEQ ID NO: 691 - DNA, 3147 bp, synthetic construct
  misc_feature 1..3147: note = variant of P450 oxidase from Bacillus megaterium
  source 1..3147: mol_type = other DNA
atgacaattaaggaaatgcctcagcctaagacgtttggagaacttaaaaatttaccgttattaaacacagataaaccggttcaagctttgatgcgtattgcggatgaattaggagaaatctttaaattcgaggcgcctggtagcgtaacgcgctatttatcaagtcagcgtctaattaaagaagcatgcgatgaatcacgctttgataaaaacttaagtcaagcgcttaaatttgcacgtgattttgttggagacgggctgtctacaagctggacgcatgaaccgaattggaaaaaagcgcataatatcttagttccaagctttagtcagcatgcaatggggcgttatcatgcgatgatggtcgatatcgccgtgcagcttgttcaaaagtgggagcgtctaaatgcagatgagcatattgaagtatcggaagacatgacacgtttaacgcttgatacaattggtctttgcggctttaactatcgctttaacagcttttaccgagatcagcctcatccatttattgtgagtgtggttcgtgcactggatgaagtaatgaacaagctgcagcgagcaaatccagacgacccagcttatgatgaaaacaagcgccagtgtcaagaagatatcaaggtgatgaacgactatgtagataaaattattgcagatcgcaaagcaaggggtgaacaaagtcatgatttattaacgcagatgctaaacggaaaagatccagaaacgggtgagccgcttgatgacgggaacattcgtcagcaaattattacattcttaattgcgggacaccaaacgacaagtggtcttttatcatttgcgctgtatttcttagtgaaaaatccacatgtattacaaaaagtagcagaagaagcagcacgagttctagtagatcctgttccaagctacaaacaagtcaaacagcttaaatatgttggcatggtcttaaacgaagcgctgcgcttatggccagtagcgcctatgttttccctatatgcaaaagaagatacggtgcttggaggagaatatcctttaacgaaaggcgacgaagtaatggttctggtgcctcagcttcaccgtgataaaacaatttggggagacgatgtggaggagttccgtccagagcgttttgaaaatccaagtgcgattccgcagcatgcgtttaaaccgtttggaaacggtcagcgtgcgtgtatcggtcagcagttcgctcttcatgaagcaacgctggtacttggtatgatgctaaaacactttgactttgaagatcatacaaactacgagctcgttattaaagaatcgcggacgttaaaacctgaaggctttgtggtaaaagcaaaatcgaaaggcattccgcttggcggtattccttcacctagcactgaacagtctgctaaaaaagtacgcaaaaaggcagaaaacgctcataatacgccgctgcttgtgctatacggttcaaatgcgggaacagctgaaggaacggcgcgtgatttagcagatattgcaatgagcaaaggatttgcaccgcaggtcgcaacgcttgattcacacgccggtaatcttccgcgcgaaggagctgtattaattgtaacggcgtcttataacggtcatccgcctgataacgcaaagcaatttgtcgactggttagaccaagcgtctgctgatgaagtaaaaggcgttcgctactccgtatttggatgcggcgataaaaattgggcggggacgtatcaaaaagtgcctgcttttatcgatgaaacgcttgccgctaaaggggcagaagttatcgctgaccgcggtgaagcagatgcaagcgacgactttgaaggcacatatgaagaatggcgtgatcatatgtggagtgacgtagcagcctactttaacctcgacattgaaaacagtgaagataataaatctactctttcacttcaatttgtcgacagcgccgcggatatgccgcttgcgaaaatgcacggtgcgttttcaacgaacgtcgtagcaagcaaagaacttcaacagccaggcagtgcacgaagcacgcgacatcttgaaattgaacttccaaaagaagcttcttatcaagaaggagatcatttaggtgttattcctcgcaactatgaaggaatagtaaaccgtgtaacagcaaggttcggcctaagcgcatcacagcaaatccgtctggaagcagaagaagaaaaattagctcatttgccactcgctaaaacagtatccgtagaagagcttctgcaatacgtggagcttcaagatcctgttacgcgcacgcagcttcgcgcaatggctgctaaaacggtctgcccgccgcataaagtagagcttgaagccttgcttgaaaagcaagcctacaaagaacaagtgctggcaaaacgtttaacaatgcttgaactgcttgaaaaatacccggcgtgtgaaatgaaattcagcgaatttatcgcccttctgccaagcatacgcccgcgctattactcgatttcttcatcacctcgtgtcgatgaaaaacaagcaagcatcacggtcagcgttgtctcaggaccggcgtggagcggatatggagaatataaaggaattgcgtcgaactatcttgccgagctgcaagaaggagatacgattacgtgctttatttccacaccgcagtcagaatttacgctgccaaaagaccctgaaacgccgcttatcatggtcggaccgggaacaggcgtcgcgccgtttagaggctttgtgcaggcgcgcaaacagctaaaagaacaaggacagtcacttggagaagcacatttatacttcggctgccgttcacctcatgaagactatctgtatcaagaagagcttgaaaacgcccaaagcgaaggcatcattacgcttcataccgctttttctcgcatgccaaatcagccgaaaacatacgttcagcacgtaatggaacaagacggcaagaaattgattgaacttcttgatcaaggagcgcacttctatatttgcggagacggaagccaaatggcacctgccgttgaagcaacgcttatgaaaagctatgctgacgttcaccaagtgagtgaagcagacgctcgcttatggctgcagcagctagaagaaaaaggccgatacgcaaaagacgtgtggctgggg

SEQ ID NO: 692 - protein, 1049 aa, synthetic construct
  REGION 1..1049: note = variant of P450 oxidase from Bacillus megaterium
MTIKEMPQPKTFGELKNLPLLNTDKPVQALMRIADELGEIFKFEAPGSVTRYLSSQRLIKEACDESRFDKNLSQALKFARDFVGDGLSTSWTHEPNWKKAHNILVPSFSQHAMGRYHAMMVDIAVQLVQKWERLNADEHIEVSEDMTRLTLDTIGLCGFNYRFNSFYRDQPHPFIVSVVRALDEVMNKLQRANPDDPAYDENKRQCQEDIKVMNDYVDKIIADRKARGEQSHDLLTQMLNGKDPETGEPLDDGNIRQQIITFLIAGHQTTSGLLSFALYFLVKNPHVLQKVAEEAARVLVDPVPSYKQVKQLKYVGMVLNEALRLWPVAPMFSLYAKEDTVLGGEYPLTKGDEVMVLVPQLHRDKTIWGDDVEEFRPERFENPSAIPQHAFKPFGNGQRACIGQQFALHEATLVLGMMLKHFDFEDHTNYELVIKESRTLKPEGFVVKAKSKGIPLGGIPSPSTEQSAKKVRKKAENAHNTPLLVLYGSNAGTAEGTARDLADIAMSKGFAPQVATLDSHAGNLPREGAVLIVTASYNGHPPDNAKQFVDWLDQASADEVKGVRYSVFGCGDKNWAGTYQKVPAFIDETLAAKGAEVIADRGEADASDDFEGTYEEWRDHMWSDVAAYFNLDIENSEDNKSTLSLQFVDSAADMPLAKMHGAFSTNVVASKELQQPGSARSTRHLEIELPKEASYQEGDHLGVIPRNYEGIVNRVTARFGLSASQQIRLEAEEEKLAHLPLAKTVSVEELLQYVELQDPVTRTQLRAMAAKTVCPPHKVELEALLEKQAYKEQVLAKRLTMLELLEKYPACEMKFSEFIALLPSIRPRYYSISSSPRVDEKQASITVSVVSGPAWSGYGEYKGIASNYLAELQEGDTITCFISTPQSEFTLPKDPETPLIMVGPGTGVAPFRGFVQARKQLKEQGQSLGEAHLYFGCRSPHEDYLYQEELENAQSEGIITLHTAFSRMPNQPKTYVQHVMEQDGKKLIELLDQGAHFYICGDGSQMAPAVEATLMKSYADVHQVSEADARLWLQQLEEKGRYAKDVWLG

SEQ ID NO: 693 - DNA, 3147 bp, synthetic construct
  misc_feature 1..3147: note = variant of P450 oxidase from Bacillus megaterium
  source 1..3147: mol_type = other DNA
atgacaattaaggaaatgcctcagcctaagacgtttggagaacttaaaaatttaccgttattaaacacagataaaccggttcaagctttgatgcgtattgcggatgaattaggagaaatctttaaattcgaggcgcctggtagcgtaacgcgctatttatcaagtcagcgtctaattaaagaagcatgcgatgaatcacgctttgataaaaacttaagtcaagcgcttaaatttgcacgtgattttgttggagacgggctgtctacaagctggacgcatgaaccgaattggaaaaaagcgcataatatcttagttccaagctttagtcagcatgcaatggggcgttatcatgcgatgatggtcgatatcgccgtgcagcttgttcaaaagtgggagcgtctaaatgcagatgagcatattgaagtatcggaagacatgacacgtttaacgcttgatacaattggtctttgcggctttaactatcgctttaacagcttttaccgagatcagcctcatccatttattgtgagtgtggttcgtgcactggatgaagtaatgaacaagctgcagcgagcaaatccagacgacccagcttatgatgaaaacaagcgccagtgtcaagaagatatcaaggtgatgaacgactatgtagataaaattattgcagatcgcaaagcaaggggtgaacaaagtcatgatttattaacgcagatgctaaacggaaaagatccagaaacgggtgagccgcttgatgacgggaacattcgtcagcaaattattacattcttaattgcgggacaccaaacgacaagtggtcttttatcatttgcgctgtatttcttagtgaaaaatccacatgtattacaaaaagtagcagaagaagcagcacgagttctagtagatcctgttccaagctacaaacaagtcaaacagcttaaatatgttggcatggtcttaaacgaagcgctgcgcttatggccagtagcgcctatgttttccctatatgcaaaagaagatacggtgcttggaggagaatatcctttaacgaaaggcgacgaagtaatggttctggtgcctcagcttcaccgtgataaaacaatttggggagacgatgtggaggagttccgtccagagcgttttgaaaatccaagtgcgattccgcagcatgcgtttaaaccgtttggaaacggtcagcgtgcgtgtatcggtcagcagttcgctcttcatgaagcaacgctggtacttggtatgatgctaaaacactttgactttgaagatcatacaaactacgagctcgttattaaagaatcgcggacgttaaaacctgaaggctttgtggtaaaagcaaaatcgaaaggcattccgcttggcggtattccttcacctagcactgaacagtctgctaaaaaagtacgcaaaaaggcagaaaacgctcataatacgccgctgcttgtgctatacggttcaaatgcgggaacagctgaaggaacggcgcgtgatttagcagatattgcaatgagcaaaggatttgcaccgcaggtcgcaacgcttgattcacacgccggtaatcttccgcgcgaaggagctgtattaattgtaacggcgtcttataacggtcatccgcctgataacgcaaagcaatttgtcgactggttagaccaagcgtctgctgatgaagtaaaaggcgttcgctactccgtatttggatgcggcgataaaaattgggcggggacgtatcaaaaagtgcctgcttttatcgatgaaacgcttgccgctaaaggggcagaaaacatcgctgaccgcggtgaagcagatgcaagcgacgactttgaaggcacatatgaagaatggcgtgatcatatgtggagtgacgtagcagcctactttaacctcgacattgaaaacagtgaatggaataaatctactctttcacttcaatttgtcgacagcgccgcggatatgccgcttgcgaaaatgcacggtgcgttttcaacgaacgtcgtagcaagcaaagaacttcaacagccaggcagtgcacgaagcacgcgacatcttgaaattgaacttccaaaagaagcttcttatcaagaaggagatcatttaggtgttattcctcgcaactatgaaggaatagtaaaccgtgtaacagcaaggttcggcctaagcgcatcacagcaaatccgtctggaagcagaagaagaaaaattagctcatttgccactcgctaaaacagtatccgtagaagagcttctgcaatacgtggagcttcaagatcctgttacgcgcacgcagcttcgcgcaatggctgctaaaacggtctgcccgccgcataaagtagagcttgaagccttgcttgaaaagcaagcctacaaagaacaagtgctggcaaaacgtttaacaatgcttgaactgcttgaaaaatacccggcgtgtgaaatgaaattcagcgaatttatcgcccttctgccaagcatacgcccgcgctattactcgatttcttcatcacctcgtgtcgatgaaaaacaagcaagcatcacggtcagcgttgtctcaggaccggcgtggagcggatatggagaatataaaggaattgcgtcgaactatcttgccgagctgcaagaaggagatacgattacgtgctttatttccacaccgcagtcagaatttacgctgccaaaagaccctgaaacgccgcttatcatggtcggaccgggaacaggcgtcgcgccgtttagaggctttgtgcaggcgcgcaaacagctaaaagaacaaggacagtcacttggagaagcacatttatacttcggctgccgttcacctcatgaagactatctgtatcaagaagagcttgaaaacgcccaaagcgaaggcatcattacgcttcataccgctttttctcgcatgccaaatcagccgaaaacatacgttcagcacgtaatggaacaagacggcaagaaattgattgaacttcttgatcaaggagcgcacttctatatttgcggagacggaagccaaatggcacctgccgttgaagcaacgcttatgaaaagctatgctgacgttcaccaagtgagtgaagcagacgctcgcttatggctgcagcagctagaagaaaaaggccgatacgcaaaagacgtgtggctgggg

SEQ ID NO: 694 - protein, 1049 aa, synthetic construct
  REGION 1..1049: note = variant of P450 oxidase from Bacillus megaterium
MTIKEMPQPKTFGELKNLPLLNTDKPVQALMRIADELGEIFKFEAPGSVTRYLSSQRLIKEACDESRFDKNLSQALKFARDFVGDGLSTSWTHEPNWKKAHNILVPSFSQHAMGRYHAMMVDIAVQLVQKWERLNADEHIEVSEDMTRLTLDTIGLCGFNYRFNSFYRDQPHPFIVSVVRALDEVMNKLQRANPDDPAYDENKRQCQEDIKVMNDYVDKIIADRKARGEQSHDLLTQMLNGKDPETGEPLDDGNIRQQIITFLIAGHQTTSGLLSFALYFLVKNPHVLQKVAEEAARVLVDPVPSYKQVKQLKYVGMVLNEALRLWPVAPMFSLYAKEDTVLGGEYPLTKGDEVMVLVPQLHRDKTIWGDDVEEFRPERFENPSAIPQHAFKPFGNGQRACIGQQFALHEATLVLGMMLKHFDFEDHTNYELVIKESRTLKPEGFVVKAKSKGIPLGGIPSPSTEQSAKKVRKKAENAHNTPLLVLYGSNAGTAEGTARDLADIAMSKGFAPQVATLDSHAGNLPREGAVLIVTASYNGHPPDNAKQFVDWLDQASADEVKGVRYSVFGCGDKNWAGTYQKVPAFIDETLAAKGAENIADRGEADASDDFEGTYEEWRDHMWSDVAAYFNLDIENSEWNKSTLSLQFVDSAADMPLAKMHGAFSTNVVASKELQQPGSARSTRHLEIELPKEASYQEGDHLGVIPRNYEGIVNRVTARFGLSASQQIRLEAEEEKLAHLPLAKTVSVEELLQYVELQDPVTRTQLRAMAAKTVCPPHKVELEALLEKQAYKEQVLAKRLTMLELLEKYPACEMKFSEFIALLPSIRPRYYSISSSPRVDEKQASITVSVVSGPAWSGYGEYKGIASNYLAELQEGDTITCFISTPQSEFTLPKDPETPLIMVGPGTGVAPFRGFVQARKQLKEQGQSLGEAHLYFGCRSPHEDYLYQEELENAQSEGIITLHTAFSRMPNQPKTYVQHVMEQDGKKLIELLDQGAHFYICGDGSQMAPAVEATLMKSYADVHQVSEADARLWLQQLEEKGRYAKDVWLG

SEQ ID NO: 695 - DNA, 3147 bp, synthetic construct
  misc_feature 1..3147: note = variant of P450 oxidase from Bacillus megaterium
  source 1..3147: mol_type = other DNA
atgacaattaaggaaatgcctcagcctaagacgtttggagaacttaaaaatttaccgttattaaacacagataaaccggttcaagctttgatgcgtattgcggatgaattaggagaaatctttaaattcgaggcgcctggtagcgtaacgcgctatttatcaagtcagcgtctaattaaagaagcatgcgatgaatcacgctttgataaaaacttaagtcaagcgcttaaatttgcacgtgattttgttggagacgggctgtctacaagctggacgcatgaaccgaattggaaaaaagcgcataatatcttagttccaagctttagtcagcatgcaatggggcgttatcatgcgatgatggtcgatatcgccgtgcagcttgttcaaaagtgggagcgtctaaatgcagatgagcatattgaagtatcggaagacatgacacgtttaacgcttgatacaattggtctttgcggctttaactatcgctttaacagcttttaccgagatcagcctcatccatttattgtgagtgtggttcgtgcactggatgaagtaatgaacaagctgcagcgagcaaatccagacgacccagcttatgatgaaaacaagcgccagtgtcaagaagatatcaaggtgatgaacgactatgtagataaaattattgcagatcgcaaagcaaggggtgaacaaagtcatgatttattaacgcagatgctaaacggaaaagatccagaaacgggtgagccgcttgatgacgggaacattcgtcagcaaattattacattcttaattgcgggacaccaaacgacaagtggtcttttatcatttgcgctgtatttcttagtgaaaaatccacatgtattacaaaaagtagcagaagaagcagcacgagttctagtagatcctgttccaagctacaaacaagtcaaacagcttaaatatgttggcatggtcttaaacgaagcgctgcgcttatggccagtagcgcctatgttttccctatatgcaaaagaagatacggtgcttggaggagaatatcctttaacgaaaggcgacgaagtaatggttctggtgcctcagcttcaccgtgataaaacaatttggggagacgatgtggaggagttccgtccagagcgttttgaaaatccaagtgcgattccgcagcatgcgtttaaaccgtttggaaacggtcagcgtgcgtgtatcggtcagcagttcgctcttcatgaagcaacgctggtacttggtatgatgctaaaacactttgactttgaagatcatacaaactacgagctcgttattaaagaatcgcggacgttaaaacctgaaggctttgtggtaaaagcaaaatcgaaaggcattccgcttggcggtattccttcacctagcactgaacagtctgctaaaaaagtacgcaaaaaggcagaaaacgctcataatacgccgctgcttgtgctatacggttcaaatgcgggaacagctgaaggaacggcgcgtgatttagcagatattgcaatgagcaaaggatttgcaccgcaggtcgcaacgcttgattcacacgccggtaatcttccgcgcgaaggagctgtattaattgtaacggcgtcttataacggtcatccgcctgataacgcaaagcaatttgtcgactggttagaccaagcgtctgctgatgaagtaaaaggcgttcgctactccgtatttggatgcggcgataaaaattgggcggggacgtatcaaaaagtgcctgcttttatcgatgaaacgcttgccgctaaaggggcagaaaggatcgctgaccgcggtgaagcagatgcaagcgacgactttgaaggcacatatgaagaatggcgtgatcatatgtggagtgacgtagcagcctactttaacctcgacattgaaaacagtgaagataataaatctactctttcacttcaatttgtcgacagcgccgcggatatgccgcttgcgaaaatgcacggtgcgttttcaacgaacgtcgtagcaagcaaagaacttcaacagccaggcagtgcacgaagcacgcgacatcttgaaattgaacttccaaaagaagcttcttatcaagaaggagatcatttaggtgttattcctcgcaactatgaaggaatagtaaaccgtgtaacagcaaggttcggcctaagcgcatcacagcaaatccgtctggaagcagaagaagaaaaattagctcatttgccactcgctaaaacagtatccgtagaagagcttctgcaatacgtggagcttcaagatcctgttacgcgcacgcagcttcgcgcaatggctgctaaaacggtctgcccgccgcataaagtagagcttgaagccttgcttgaaaagcaagcctacaaagaacaagtgctggcaaaacgtttaacaatgcttgaactgcttgaaaaatacccggcgtgtgaaatgaaattcagcgaatttatcgcccttctgccaagcatacgcccgcgctattactcgatttcttcatcacctcgtgtcgatgaaaaacaagcaagcatcacggtcagcgttgtctcaggaccggcgtggagcggatatggagaatataaaggaattgcgtcgaactatcttgccgagctgcaagaaggagatacgattacgtgctttatttccacaccgcagtcagaatttacgctgccaaaagaccctgaaacgccgcttatcatggtcggaccgggaacaggcgtcgcgccgtttagaggctttgtgcaggcgcgcaaacagctaaaagaacaaggacagtcacttggagaagcacatttatacttcggctgccgttcacctcatgaagactatctgtatcaagaagagcttgaaaacgcccaaagcgaaggcatcattacgcttcataccgctttttctcgcatgccaaatcagccgaaaacatacgttcagcacgtaatggaacaagacggcaagaaattgattgaacttcttgatcaaggagcgcacttctatatttgcggagacggaagccaaatggcacctgccgttgaagcaacgcttatgaaaagctatgctgacgttcaccaagtgagtgaagcagacgctcgcttatggctgcagcagctagaagaaaaaggccgatacgcaaaagacgtgtggctgggg

SEQ ID NO: 696 - protein, 1049 aa, synthetic construct
  REGION 1..1049: note = variant of P450 oxidase from Bacillus megaterium
MTIKEMPQPKTFGELKNLPLLNTDKPVQALMRIADELGEIFKFEAPGSVTRYLSSQRLIKEACDESRFDKNLSQALKFARDFVGDGLSTSWTHEPNWKKAHNILVPSFSQHAMGRYHAMMVDIAVQLVQKWERLNADEHIEVSEDMTRLTLDTIGLCGFNYRFNSFYRDQPHPFIVSVVRALDEVMNKLQRANPDDPAYDENKRQCQEDIKVMNDYVDKIIADRKARGEQSHDLLTQMLNGKDPETGEPLDDGNIRQQIITFLIAGHQTTSGLLSFALYFLVKNPHVLQKVAEEAARVLVDPVPSYKQVKQLKYVGMVLNEALRLWPVAPMFSLYAKEDTVLGGEYPLTKGDEVMVLVPQLHRDKTIWGDDVEEFRPERFENPSAIPQHAFKPFGNGQRACIGQQFALHEATLVLGMMLKHFDFEDHTNYELVIKESRTLKPEGFVVKAKSKGIPLGGIPSPSTEQSAKKVRKKAENAHNTPLLVLYGSNAGTAEGTARDLADIAMSKGFAPQVATLDSHAGNLPREGAVLIVTASYNGHPPDNAKQFVDWLDQASADEVKGVRYSVFGCGDKNWAGTYQKVPAFIDETLAAKGAERIADRGEADASDDFEGTYEEWRDHMWSDVAAYFNLDIENSEDNKSTLSLQFVDSAADMPLAKMHGAFSTNVVASKELQQPGSARSTRHLEIELPKEASYQEGDHLGVIPRNYEGIVNRVTARFGLSASQQIRLEAEEEKLAHLPLAKTVSVEELLQYVELQDPVTRTQLRAMAAKTVCPPHKVELEALLEKQAYKEQVLAKRLTMLELLEKYPACEMKFSEFIALLPSIRPRYYSISSSPRVDEKQASITVSVVSGPAWSGYGEYKGIASNYLAELQEGDTITCFISTPQSEFTLPKDPETPLIMVGPGTGVAPFRGFVQARKQLKEQGQSLGEAHLYFGCRSPHEDYLYQEELENAQSEGIITLHTAFSRMPNQPKTYVQHVMEQDGKKLIELLDQGAHFYICGDGSQMAPAVEATLMKSYADVHQVSEADARLWLQQLEEKGRYAKDVWLG

SEQ ID NO: 697 - DNA, 3147 bp, synthetic construct
  misc_feature 1..3147: note = variant of P450 oxidase from Bacillus megaterium
  source 1..3147: mol_type = other DNA
atgacaattaaggaaatgcctcagcctaagacgtttggagaacttaaaaatttaccgttattaaacacagataaaccggttcaagctttgatgcgtattgcggatgaattaggagaaatctttaaattcgaggcgcctggtagcgtaacgcgctatttatcaagtcagcgtctaattaaagaagcatgcgatgaatcacgctttgataaaaacttaagtcaagcgcttaaatttgcacgtgattttgttggagacgggctgtctacaagctggacgcatgaaccgaattggaaaaaagcgcataatatcttagttccaagctttagtcagcatgcaatggggcgttatcatgcgatgatggtcgatatcgccgtgcagcttgttcaaaagtgggagcgtctaaatgcagatgagcatattgaagtatcggaagacatgacacgtttaacgcttgatacaattggtctttgcggctttaactatcgctttaacagcttttaccgagatcagcctcatccatttattgtgagtgtggttcgtgcactggatgaagtaatgaacaagctgcagcgagcaaatccagacgacccagcttatgatgaaaacaagcgccagtgtcaagaagatatcaaggtgatgaacgactatgtagataaaattattgcagatcgcaaagcaaggggtgaacaaagtcatgatttattaacgcagatgctaaacggaaaagatccagaaacgggtgagccgcttgatgacgggaacattcgtcagcaaattattacattcttaattgcgggacaccaaacgacaagtggtcttttatcatttgcgctgtatttcttagtgaaaaatccacatgtattacaaaaagtagcagaagaagcagcacgagttctagtagatcctgttccaagctacaaacaagtcaaacagcttaaatatgttggcatggtcttaaacgaagcgctgcgcttatggccagtagcgcctatgttttccctatatgcaaaagaagatacggtgcttggaggagaatatcctttaacgaaaggcgacgaagtaatggttctggtgcctcagcttcaccgtgataaaacaatttggggagacgatgtggaggagttccgtccagagcgttttgaaaatccaagtgcgattccgcagcatgcgtttaaaccgtttggaaacggtcagcgtgcgtgtatcggtcagcagttcgctcttcatgaagcaacgctggtacttggtatgatgctaaaacactttgactttgaagatcatacaaactacgagctcgttattaaagaatcgcggacgttaaaacctgaaggctttgtggtaaaagcaaaatcgaaaggcattccgcttggcggtattccttcacctagcactgaacagtctgctaaaaaagtacgcaaaaaggcagaaaacgctcataatacgccgctgcttgtgctatacggttcaaatgcgggaacagctgaaggaacggcgcgtgatttagcagatattgcaatgagcaaaggatttgcaccgcaggtcgcaacgcttgattcacacgccggtaatcttccgcgcgaaggagctgtattaattgtaacggcgtcttataacggtcatccgcctgataacgcaaagcaatttgtcgactggttagaccaagcgtctgctgatgaagtaaaaggcgttcgctactccgtatttggatgcggcgataaaaattgggcggggacgtatcaaaaagtgcctgcttttatcgatgaaacgcttgccgctaaaggggcagaaaacatcgctgaccgcggtgaagcagatgcaagcgacgactttgaaggcacatatgaagaatggcgtgatcatatgtggagtgacgtagcagcctactttaacctcgacattgaaaacagtgaagataataaatctactctttcacttcaatttgtcgacagcgccgcggatatgctgcttgcgaaaatgcacggtgcgttttcaacgaacgtcgtagcaagcaaagaacttcaacagccaggcagtgcacgaagcacgcgacatcttgaaattgaacttccaaaagaagcttcttatcaagaaggagatcatttaggtgttattcctcgcaactatgaaggaatagtaaaccgtgtaacagcaaggttcggcctaagcgcatcacagcaaatccgtctggaagcagaagaagaaaaattagctcatttgccactcgctaaaacagtatccgtagaagagcttctgcaatacgtggagcttcaagatcctgttacgcgcacgcagcttcgcgcaatggctgctaaaacggtctgcccgccgcataaagtagagcttgaagccttgcttgaaaagcaagcctacaaagaacaagtgctggcaaaacgtttaacaatgcttgaactgcttgaaaaatacccggcgtgtgaaatgaaattcagcgaatttatcgcccttctgccaagcatacgcccgcgctattactcgatttcttcatcacctcgtgtcgatgaaaaacaagcaagcatcacggtcagcgttgtctcaggaccggcgtggagcggatatggagaatataaaggaattgcgtcgaactatcttgccgagctgcaagaaggagatacgattacgtgctttatttccacaccgcagtcagaatttacgctgccaaaagaccctgaaacgccgcttatcatggtcggaccgggaacaggcgtcgcgccgtttagaggctttgtgcaggcgcgcaaacagctaaaagaacaaggacagtcacttggagaagcacatttatacttcggctgccgttcacctcatgaagactatctgtatcaagaagagcttgaaaacgcccaaagcgaaggcatcattacgcttcataccgctttttctcgcatgccaaatcagccgaaaacatacgttcagcacgtaatggaacaagacggcaagaaattgattgaacttcttgatcaaggagcgcacttctatatttgcggagacggaagccaaatggcacctgccgttgaagcaacgcttatgaaaagctatgctgacgttcaccaagtgagtgaagcagacgctcgcttatggctgcagcagctagaagaaaaaggccgatacgcaaaagacgtgtggctgggg

SEQ ID NO: 698 - protein, 1049 aa, synthetic construct
  REGION 1..1049: note = variant of P450 oxidase from Bacillus megaterium
MTIKEMPQPKTFGELKNLPLLNTDKPVQALMRIADELGEIFKFEAPGSVTRYLSSQRLIKEACDESRFDKNLSQALKFARDFVGDGLSTSWTHEPNWKKAHNILVPSFSQHAMGRYHAMMVDIAVQLVQKWERLNADEHIEVSEDMTRLTLDTIGLCGFNYRFNSFYRDQPHPFIVSVVRALDEVMNKLQRANPDDPAYDENKRQCQEDIKVMNDYVDKIIADRKARGEQSHDLLTQMLNGKDPETGEPLDDGNIRQQIITFLIAGHQTTSGLLSFALYFLVKNPHVLQKVAEEAARVLVDPVPSYKQVKQLKYVGMVLNEALRLWPVAPMFSLYAKEDTVLGGEYPLTKGDEVMVLVPQLHRDKTIWGDDVEEFRPERFENPSAIPQHAFKPFGNGQRACIGQQFALHEATLVLGMMLKHFDFEDHTNYELVIKESRTLKPEGFVVKAKSKGIPLGGIPSPSTEQSAKKVRKKAENAHNTPLLVLYGSNAGTAEGTARDLADIAMSKGFAPQVATLDSHAGNLPREGAVLIVTASYNGHPPDNAKQFVDWLDQASADEVKGVRYSVFGCGDKNWAGTYQKVPAFIDETLAAKGAENIADRGEADASDDFEGTYEEWRDHMWSDVAAYFNLDIENSEDNKSTLSLQFVDSAADMLLAKMHGAFSTNVVASKELQQPGSARSTRHLEIELPKEASYQEGDHLGVIPRNYEGIVNRVTARFGLSASQQIRLEAEEEKLAHLPLAKTVSVEELLQYVELQDPVTRTQLRAMAAKTVCPPHKVELEALLEKQAYKEQVLAKRLTMLELLEKYPACEMKFSEFIALLPSIRPRYYSISSSPRVDEKQASITVSVVSGPAWSGYGEYKGIASNYLAELQEGDTITCFISTPQSEFTLPKDPETPLIMVGPGTGVAPFRGFVQARKQLKEQGQSLGEAHLYFGCRSPHEDYLYQEELENAQSEGIITLHTAFSRMPNQPKTYVQHVMEQDGKKLIELLDQGAHFYICGDGSQMAPAVEATLMKSYADVHQVSEADARLWLQQLEEKGRYAKDVWLG

SEQ ID NO: 699 - DNA, 3147 bp, synthetic construct
  misc_feature 1..3147: note = variant of P450 oxidase from Bacillus megaterium
  source 1..3147: mol_type = other DNA
atgacaattaaggaaatgcctcagcctaagacgtttggagaacttaaaaatttaccgttattaaacacagataaaccggttcaagctttgatgcgtattgcggatgaattaggagaaatctttaaattcgaggcgcctggtagcgtaacgcgctatttatcaagtcagcgtctaattaaagaagcatgcgatgaatcacgctttgataaaaacttaagtcaagcgcttaaatttgcacgtgattttgttggagacgggctgtctacaagctggacgcatgaaccgaattggaaaaaagcgcataatatcttagttccaagctttagtcagcatgcaatggggcgttatcatgcgatgatggtcgatatcgccgtgcagcttgttcaaaagtgggagcgtctaaatgcagatgagcatattgaagtatcggaagacatgacacgtttaacgcttgatacaattggtctttgcggctttaactatcgctttaacagcttttaccgagatcagcctcatccatttattgtgagtgtggttcgtgcactggatgaagtaatgaacaagctgcagcgagcaaatccagacgacccagcttatgatgaaaacaagcgccagtgtcaagaagatatcaaggtgatgaacgactatgtagataaaattattgcagatcgcaaagcaaggggtgaacaaagtcatgatttattaacgcagatgctaaacggaaaagatccagaaacgggtgagccgcttgatgacgggaacattcgtcagcaaattattacattcttaattgcgggacaccaaacgacaagtggtcttttatcatttgcgctgtatttcttagtgaaaaatccacatgtattacaaaaagtagcagaagaagcagcacgagttctagtagatcctgttccaagctacaaacaagtcaaacagcttaaatatgttggcatggtcttaaacgaagcgctgcgcttatggccagtagcgcctatgttttccctatatgcaaaagaagatacggtgcttggaggagaatatcctttaacgaaaggcgacgaagtaatggttctggtgcctcagcttcaccgtgataaaacaatttggggagacgatgtggaggagttccgtccagagcgttttgaaaatccaagtgcgattccgcagcatgcgtttaaaccgtttggaaacggtcagcgtgcgtgtatcggtcagcagttcgctcttcatgaagcaacgctggtacttggtatgatgctaaaacactttgactttgaagatcatacaaactacgagctcgttattaaagaatcgcggacgttaaaacctgaaggctttgtggtaaaagcaaaatcgaaaggcattccgcttggcggtattccttcacctagcactgaacagtctgctaaaaaagtacgcaaaaaggcagaaaacgctcataatacgccgctgcttgtgctatacggttcaaatgcgggaacagctgaaggaacggcgcgtgatttagcagatattgcaatgagcaaaggatttgcaccgcaggtcgcaacgcttgattcacacgccggtaatcttccgcgcgaaggagctgtattaattgtaacggcgtcttataacggtcatccgcctgataacgcaaagcaatttgtcgactggttagaccaagcgtctgctgatgaagtaaaaggcgttcgctactccgtatttggatgcggcgataaaaattgggcggggacgtatcaaaaagtgcctgcttttatcgatgaaacgcttgccgctaaaggggcagaaaacatcgctgaccgcggtgaagcagatgcaagcgacgactttgaaggcacatatgaagaatggcgtgatcatatgtggagtgacgtagcagcctactttaacctcgacattgaaaacagtgaagataataaatctactctttcacttcaatttgtcgacagcgccgcggatatgccgcttgcgaaaatgcacggtgcgttttcaacgaacgtcgtagcaagcaaagaacttcaacagccaggcagtgcacgaagcacgcgacatcttgaaattgaacttccaaaagaagcttcttatcaagaaggagatcatttaggtgttattcctcgcaactatgaaggaatagtaaaccgtgtaacagcaaggttcggcctaagcgcatcacagcaaatccgtctggaagcagaagaagaaaaattagctcatttgccactcgctaaaacagtatccgtagaagagcttctgcaatacgtggagcttcaagatcctgttacgcgcacgcagcttcgcgcaatggctgctaaaacggtctgcccgccgcataaagtagagcttgaagccttgcttgaaaagcaagcctacaaagaacaagtgctggcaaaacgtttaacaatgcttgaactgcttgaaaaatacccggcgtgtgaaatgaaattcagcgaatttatcgcccttctgccaagcatacgcccgcgctattactcgatttcttcatcacctcgtgtcgatgaaaaacaagcaagcatcacggtcagcgttgtctcaggaccggcgtggagcggatatggagaatataaaggaattgcgtcgaactatcttgccgagctgcaagaaggagatacgattacgtgctttatttccacaccgcagtcagaatttacgctgccaaaagaccctgaaacgccgcttatcatggtcggaccgggaacaggcgtcgcgccgtttagaggctttgtgcaggcgcgcaaacagctaaaagaacaaggacagtcacttggagaagcacatttatacttcggctgccgttcacctcatgaagactatctgtatcaagaagagcttgaaaacgcccaaagcgaaggcatcattaagcttcataccgctttttctcgcatgccaaatcagccgaaaacatacgttcagcacgtaatggaacaagacggcaagaaattgattgaacttcttgatcaaggagcgcacttctatatttgcggagacggaagccaaatggcacctgccgttgaagcaacgcttatgaaaagctatgctgacgttcaccaagtgagtgaagcagacgctcgcttatggctgcagcagctagaagaaaaaggccgatacgcaaaagacgtgtggctgggg

SEQ ID NO: 700 - protein, 1049 aa, synthetic construct
  REGION 1..1049: note = variant of P450 oxidase from Bacillus megaterium
MTIKEMPQPKTFGELKNLPLLNTDKPVQALMRIADELGEIFKFEAPGSVTRYLSSQRLIKEACDESRFDKNLSQALKFARDFVGDGLSTSWTHEPNWKKAHNILVPSFSQHAMGRYHAMMVDIAVQLVQKWERLNADEHIEVSEDMTRLTLDTIGLCGFNYRFNSFYRDQPHPFIVSVVRALDEVMNKLQRANPDDPAYDENKRQCQEDIKVMNDYVDKIIADRKARGEQSHDLLTQMLNGKDPETGEPLDDGNIRQQIITFLIAGHQTTSGLLSFALYFLVKNPHVLQKVAEEAARVLVDPVPSYKQVKQLKYVGMVLNEALRLWPVAPMFSLYAKEDTVLGGEYPLTKGDEVMVLVPQLHRDKTIWGDDVEEFRPERFENPSAIPQHAFKPFGNGQRACIGQQFALHEATLVLGMMLKHFDFEDHTNYELVIKESRTLKPEGFVVKAKSKGIPLGGIPSPSTEQSAKKVRKKAENAHNTPLLVLYGSNAGTAEGTARDLADIAMSKGFAPQVATLDSHAGNLPREGAVLIVTASYNGHPPDNAKQFVDWLDQASADEVKGVRYSVFGCGDKNWAGTYQKVPAFIDETLAAKGAENIADRGEADASDDFEGTYEEWRDHMWSDVAAYFNLDIENSEDNKSTLSLQFVDSAADMPLAKMHGAFSTNVVASKELQQPGSARSTRHLEIELPKEASYQEGDHLGVIPRNYEGIVNRVTARFGLSASQQIRLEAEEEKLAHLPLAKTVSVEELLQYVELQDPVTRTQLRAMAAKTVCPPHKVELEALLEKQAYKEQVLAKRLTMLELLEKYPACEMKFSEFIALLPSIRPRYYSISSSPRVDEKQASITVSVVSGPAWSGYGEYKGIASNYLAELQEGDTITCFISTPQSEFTLPKDPETPLIMVGPGTGVAPFRGFVQARKQLKEQGQSLGEAHLYFGCRSPHEDYLYQEELENAQSEGIIKLHTAFSRMPNQPKTYVQHVMEQDGKKLIELLDQGAHFYICGDGSQMAPAVEATLMKSYADVHQVSEADARLWLQQLEEKGRYAKDVWLG

SEQ ID NO: 701 - DNA, 3147 bp, synthetic construct
  misc_feature 1..3147: note = variant of P450 oxidase from Bacillus megaterium
  source 1..3147: mol_type = other DNA
atgacaattaaggaaatgcctcagcctaagacgtttggagaacttaaaaatttaccgttattaaacacagataaaccggttcaagctttgatgcgtattgcggatgaattaggagaaatctttaaattcgaggcgcctggtagcgtaacgcgctatttatcaagtcagcgtctaattaaagaagcatgcgatgaatcacgctttgataaaaacttaagtcaagcgcttaaatttgcacgtgattttgttggagacgggctgtctacaagctggacgcatgaaccgaattggaaaaaagcgcataatatcttagttccaagctttagtcagcatgcaatggggcgttatcatgcgatgatggtcgatatcgccgtgcagcttgttcaaaagtgggagcgtctaaatgcagatgagcatattgaagtatcggaagacatgacacgtttaacgcttgatacaattggtctttgcggctttaactatcgctttaacagcttttaccgagatcagcctcatccatttattgtgagtgtggttcgtgcactggatgaagtaatgaacaagctgcagcgagcaaatccagacgacccagcttatgatgaaaacaagcgccagtgtcaagaagatatcaaggtgatgaacgactatgtagataaaattattgcagatcgcaaagcaaggggtgaacaaagtcatgatttattaacgcagatgctaaacggaaaagatccagaaacgggtgagccgcttgatgacgggaacattcgtcagcaaattattacattcttaattgcgggacaccaaacgacaagtggtcttttatcatttgcgctgtatttcttagtgaaaaatccacatgtattacaaaaagtagcagaagaagcagcacgagttctagtagatcctgttccaagctacaaacaagtcaaacagcttaaatatgttggcatggtcttaaacgaagcgctgcgcttatggccagtagcgcctatgttttccctatatgcaaaagaagatacggtgcttggaggagaatatcctttaacgaaaggcgacgaagtaatggttctggtgcctcagcttcaccgtgataaaacaatttggggagacgatgtggaggagttccgtccagagcgttttgaaaatccaagtgcgattccgcagcatgcgtttaaaccgtttggaaacggtcagcgtgcgtgtatcggtcagcagttcgctcttcatgaagcaacgctggtacttggtatgatgctaaaacactttgactttgaagatcatacaaactacgagctcgttattaaagaatcgcggacgttaaaacctgaaggctttgtggtaaaagcaaaatcgaaaggcattccgcttggcggtattaggtcacctagcactgaacagtctgctaaaaaagtacgcaaaaaggcagaaaacgctcataatacgccgctgcttgtgctatacggttcaaatgcgggaacagctgaaggaacggcgcgtgatttagcagatattgcaatgagcaaaggatttgcaccgcaggtcgcaacgcttgattcacacgccggtaatcttccgcgcgaaggagctgtattaattgtaacggcgtcttataacggtcatccgcctgataacgcaaagcaatttgtcgactggttagaccaagcgtctgctgatgaagtaaaaggcgttcgctactccgtatttggatgcggcgataaaaattgggcggggacgtatcaaaaagtgcctgcttttatcgatgaaacgcttgccgctaaaggggcagaaaacatcgctgaccgcggtgaagcagatgcaagcgacgactttgaaggcacatatgaagaatggcgtgatcatatgtggagtgacgtagcagcctactttaacctcgacattgaaaacagtgaagataataaatctactctttcacttcaatttgtcgacagcgccgcggatatgccgcttgcgaaaatgcacggtgcgttttcaacgaacgtcgtagcaagcaaagaacttcaacagccaggcagtgcacgaagcacgcgacatcttgaaattgaacttccaaaagaagcttcttatcaagaaggagatcatttaggtgttattcctcgcaactatgaaggaatagtaaaccgtgtaacagcaaggttcggcctaagcgcatcacagcaaatccgtctggaagcagaagaagaaaaattagctcatttgccactcgctaaaacagtatccgtagaagagcttctgcaatacgtggagcttcaagatcctgttacgcgcacgcagcttcgcgcaatggctgctaaaacggtctgcccgccgcataaagtagagcttgaagccttgcttgaaaagcaagcctacaaagaacaagtgctggcaaaacgtttaacaatgcttgaactgcttgaaaaatacccggcgtgtgaaatgaaattcagcgaatttatcgcccttctgccaagcatacgcccgcgctattactcgatttcttcatcacctcgtgtcgatgaaaaacaagcaagcatcacggtcagcgttgtctcaggaccggcgtggagcggatatggagaatataaaggaattgcgtcgaactatcttgccgagctgcaagaaggagatacgattacgtgctttatttccacaccgcagtcagaatttacgctgccaaaagaccctgaaacgccgcttatcatggtcggaccgggaacaggcgtcgcgccgtttagaggctttgtgcaggcgcgcaaacagctaaaagaacaaggacagtcacttggagaagcacatttatacttcggctgccgttcacctcatgaagactatctgtatcaagaagagcttgaaaacgcccaaagcgaaggcatcattacgcttcataccgctttttctcgcatgccaaatcagccgaaaacatacgttcagcacgtaatggaacaagacggcaagaaattgattgaacttcttgatcaaggagcgcacttctatatttgcggagacggaagccaaatggcacctgccgttgaagcaacgcttatgaaaagctatgctgacgttcaccaagtgagtgaagcagacgctcgcttatggctgcagcagctagaagaaaaaggccgatacgcaaaagacgtgtggctgggg

SEQ ID NO: 702 - protein, 1049 aa, synthetic construct
  REGION 1..1049: note = variant of P450 oxidase from Bacillus megaterium
MTIKEMPQPKTFGELKNLPLLNTDKPVQALMRIADELGEIFKFEAPGSVTRYLSSQRLIKEACDESRFDKNLSQALKFARDFVGDGLSTSWTHEPNWKKAHNILVPSFSQHAMGRYHAMMVDIAVQLVQKWERLNADEHIEVSEDMTRLTLDTIGLCGFNYRFNSFYRDQPHPFIVSVVRALDEVMNKLQRANPDDPAYDENKRQCQEDIKVMNDYVDKIIADRKARGEQSHDLLTQMLNGKDPETGEPLDDGNIRQQIITFLIAGHQTTSGLLSFALYFLVKNPHVLQKVAEEAARVLVDPVPSYKQVKQLKYVGMVLNEALRLWPVAPMFSLYAKEDTVLGGEYPLTKGDEVMVLVPQLHRDKTIWGDDVEEFRPERFENPSAIPQHAFKPFGNGQRACIGQQFALHEATLVLGMMLKHFDFEDHTNYELVIKESRTLKPEGFVVKAKSKGIPLGGIRSPSTEQSAKKVRKKAENAHNTPLLVLYGSNAGTAEGTARDLADIAMSKGFAPQVATLDSHAGNLPREGAVLIVTASYNGHPPDNAKQFVDWLDQASADEVKGVRYSVFGCGDKNWAGTYQKVPAFIDETLAAKGAENIADRGEADASDDFEGTYEEWRDHMWSDVAAYFNLDIENSEDNKSTLSLQFVDSAADMPLAKMHGAFSTNVVASKELQQPGSARSTRHLEIELPKEASYQEGDHLGVIPRNYEGIVNRVTARFGLSASQQIRLEAEEEKLAHLPLAKTVSVEELLQYVELQDPVTRTQLRAMAAKTVCPPHKVELEALLEKQAYKEQVLAKRLTMLELLEKYPACEMKFSEFIALLPSIRPRYYSISSSPRVDEKQASITVSVVSGPAWSGYGEYKGIASNYLAELQEGDTITCFISTPQSEFTLPKDPETPLIMVGPGTGVAPFRGFVQARKQLKEQGQSLGEAHLYFGCRSPHEDYLYQEELENAQSEGIITLHTAFSRMPNQPKTYVQHVMEQDGKKLIELLDQGAHFYICGDGSQMAPAVEATLMKSYADVHQVSEADARLWLQQLEEKGRYAKDVWLG

SEQ ID NO: 703 - DNA, 3147 bp, synthetic construct
  misc_feature 1..3147: note = variant of P450 oxidase from Bacillus megaterium
  source 1..3147: mol_type = other DNA
atgacaattaaggaaatgcctcagcctaagacgtttggagaacttaaaaatttaccgttattaaacacagataaaccggttcaagctttgatgcgtattgcggatgaattaggagaaatctttaaattcgaggcgcctggtagcgtaacgcgctatttatcaagtcagcgtctaattaaagaagcatgcgatgaatcacgctttgataaaaacttaagtcaagcgcttaaatttgcacgtgattttgttggagacgggctgtctacaagctggacgcatgaaccgaattggaaaaaagcgcataatatcttagttccaagctttagtcagcatgcaatggggcgttatcatgcgatgatggtcgatatcgccgtgcagcttgttcaaaagtgggagcgtctaaatgcagatgagcatattgaagtatcggaagacatgacacgtttaacgcttgatacaattggtctttgcggctttaactatcgctttaacagcttttaccgagatcagcctcatccatttattgtgagtgtggttcgtgcactggatgaagtaatgaacaagctgcagcgagcaaatccagacgacccagcttatgatgaaaacaagcgccagtgtcaagaagatatcaaggtgatgaacgactatgtagataaaattattgcagatcgcaaagcaaggggtgaacaaagtcatgatttattaacgcagatgctaaacggaaaagatccagaaacgggtgagccgcttgatgacgggaacattcgtcagcaaattattacattcttaattgcgggacaccaaacgacaagtggtcttttatcatttgcgctgtatttcttagtgaaaaatccacatgtattacaaaaagtagcagaagaagcagcacgagttctagtagatcctgttccaagctacaaacaagtcaaacagcttaaatatgttggcatggtcttaaacgaagcgctgcgcttatggccagtagcgcctatgttttccctatatgcaaaagaagatacggtgcttggaggagaatatcctttaacgaaaggcgacgaagtaatggttctggtgcctcagcttcaccgtgataaaacaatttggggagacgatgtggaggagttccgtccagagcgttttgaaaatccaagtgcgattccgcagcatgcgtttaaaccgtttggaaacggtcagcgtgcgtgtatcggtcagcagttcgctcttcatgaagcaacgctggtacttggtatgatgctaaaacactttgactttgaagatcatacaaactacgagctcgttattaaagaatcgcggacgttaaaacctgaaggctttgtggtaaaagcaaaatcgaaaggcattccgcttggcggtattccttcacctagcactgaacagtctgctaaaaaagtacgcaaaaaggcagaaaacgctcataatacgccgctgcttgtgctatacggttcaaatgcgggaacagctgaaggaacggcgcgtgatttagcagatattgcaatgagcaaaggatttgcaccgcaggtcgcaacgcttgattcacacgccggtaatcttccgcgcgaaggagctgtattaattgtaacggcgtcttataacggtcatccgcctgataacgcaaagcaatttgtcgactggttagaccaagcgtctgctgatgaagtaaaaggcgttcgctactccgtatttggatgcggcgataaaaattgggcggggacgtatcaaaaagtgcctgcttttatcgatgaaacgcttgccgctaaaggggcagaaaacatcgctgaccgcggtgaagcagatgcaagcgacgactttgaaggcacatatgaagaatggcgtgatcatatgtggagtgacgtagcagcctactttaacctcgacattgaaaacagtgaagataataaatctactctttcacttcaatttgtcgacagcgccgcggatatgccgcttgcgaaaatgcacggtgcgttttcaacgaacgtcgtagcaagcaaagaacttcaacagccaggcagtgcacgaagcacgcgacatcttgaaattgaacttccaaaagaagcttcttatcaagaaggagatcatttaggtgttattcctcgcaactatgaaggaatagtaaaccgtgtaacagcaaggttcggcctaagcgcatcacagcaaatccgtctggaagcagaagaagaaaaattagctcatttgccactcgctaaaacagtatccgtagaagagcttctgcaatacgtggagcttcaagatcctgttacgcgcacgcagcttcgcgcaatggctgctaaaacggtctgcccgccgcataaagtagagcttgaaaagttgcttgaaaagcaagcctacaaagaacaagtgctggcaaaacgtttaacaatgcttgaactgcttgaaaaatacccggcgtgtgaaatgaaattcagcgaatttatcgcccttctgccaagcatacgcccgcgctattactcgatttcttcatcacctcgtgtcgatgaaaaacaagcaagcatcacggtcagcgttgtctcaggaccggcgtggagcggatatggagaatataaaggaattgcgtcgaactatcttgccgagctgcaagaaggagatacgattacgtgctttatttccacaccgcagtcagaatttacgctgccaaaagaccctgaaacgccgcttatcatggtcggaccgggaacaggcgtcgcgccgtttagaggctttgtgcaggcgcgcaaacagctaaaagaacaaggacagtcacttggagaagcacatttatacttcggctgccgttcacctcatgaagactatctgtatcaagaagagcttgaaaacgcccaaagcgaaggcatcattacgcttcataccgctttttctcgcatgccaaatcagccgaaaacatacgttcagcacgtaatggaacaagacggcaagaaattgattgaacttcttgatcaaggagcgcacttctatatttgcggagacggaagccaaatggcacctgccgttgaagcaacgcttatgaaaagctatgctgacgttcaccaagtgagtgaagcagacgctcgcttatggctgcagcagctagaagaaaaaggccgatacgcaaaagacgtgtggctgggg

SEQ ID NO: 704 - protein, 1049 aa, synthetic construct
  REGION 1..1049: note = variant of P450 oxidase from Bacillus megaterium
MTIKEMPQPKTFGELKNLPLLNTDKPVQALMRIADELGEIFKFEAPGSVTRYLSSQRLIKEACDESRFDKNLSQALKFARDFVGDGLSTSWTHEPNWKKAHNILVPSFSQHAMGRYHAMMVDIAVQLVQKWERLNADEHIEVSEDMTRLTLDTIGLCGFNYRFNSFYRDQPHPFIVSVVRALDEVMNKLQRANPDDPAYDENKRQCQEDIKVMNDYVDKIIADRKARGEQSHDLLTQMLNGKDPETGEPLDDGNIRQQIITFLIAGHQTTSGLLSFALYFLVKNPHVLQKVAEEAARVLVDPVPSYKQVKQLKYVGMVLNEALRLWPVAPMFSLYAKEDTVLGGEYPLTKGDEVMVLVPQLHRDKTIWGDDVEEFRPERFENPSAIPQHAFKPFGNGQRACIGQQFALHEATLVLGMMLKHFDFEDHTNYELVIKESRTLKPEGFVVKAKSKGIPLGGIPSPSTEQSAKKVRKKAENAHNTPLLVLYGSNAGTAEGTARDLADIAMSKGFAPQVATLDSHAGNLPREGAVLIVTASYNGHPPDNAKQFVDWLDQASADEVKGVRYSVFGCGDKNWAGTYQKVPAFIDETLAAKGAENIADRGEADASDDFEGTYEEWRDHMWSDVAAYFNLDIENSEDNKSTLSLQFVDSAADMPLAKMHGAFSTNVVASKELQQPGSARSTRHLEIELPKEASYQEGDHLGVIPRNYEGIVNRVTARFGLSASQQIRLEAEEEKLAHLPLAKTVSVEELLQYVELQDPVTRTQLRAMAAKTVCPPHKVELEKLLEKQAYKEQVLAKRLTMLELLEKYPACEMKFSEFIALLPSIRPRYYSISSSPRVDEKQASITVSVVSGPAWSGYGEYKGIASNYLAELQEGDTITCFISTPQSEFTLPKDPETPLIMVGPGTGVAPFRGFVQARKQLKEQGQSLGEAHLYFGCRSPHEDYLYQEELENAQSEGIITLHTAFSRMPNQPKTYVQHVMEQDGKKLIELLDQGAHFYICGDGSQMAPAVEATLMKSYADVHQVSEADARLWLQQLEEKGRYAKDVWLG

SEQ ID NO: 705 - DNA, 3147 bp, synthetic construct
  misc_feature 1..3147: note = variant of P450 oxidase from Bacillus megaterium
  source 1..3147: mol_type = other DNA
atgacaattaaggaaatgcctcagcctaagacgtttggagaacttaaaaatttaccgttattaaacacagataaaccggttcaagctttgatgcgtattgcggatgaattaggagaaatctttaaattcgaggcgcctggtagcgtaacgcgctatttatcaagtcagcgtctaattaaagaagcatgcgatgaatcacgctttgataaaaacttaagtcaagcgcttaaatttgcacgtgattttgttggagacgggctgtctacaagctggacgcatgaaccgaattggaaaaaagcgcataatatcttagttccaagctttagtcagcatgcaatggggcgttatcatgcgatgatggtcgatatcgccgtgcagcttgttcaaaagtgggagcgtctaaatgcagatgagcatattgaagtatcggaagacatgacacgtttaacgcttgatacaattggtctttgcggctttaactatcgctttaacagcttttaccgagatcagcctcatccatttattgtgagtgtggttcgtgcactggatgaagtaatgaacaagctgcagcgagcaaatccagacgacccagcttatgatgaaaacaagcgccagtgtcaagaagatatcaaggtgatgaacgactatgtagataaaattattgcagatcgcaaagcaaggggtgaacaaagtcatgatttattaacgcagatgctaaacggaaaagatccagaaacgggtgagccgcttgatgacgggaacattcgtcagcaaattattacattcttaattgcgggacaccaaacgacaagtggtcttttatcatttgcgctgtatttcttagtgaaaaatccacatgtattacaaaaagtagcagaagaagcagcacgagttctagtagatcctgttccaagctacaaacaagtcaaacagcttaaatatgttggcatggtcttaaacgaagcgctgcgcttatggccagtagcgcctatgttttccctatatgcaaaagaagatacggtgcttggaggagaatatcctttaacgaaaggcgacgaagtaatggttctggtgcctcagcttcaccgtgataaaacaatttggggagacgatgtggaggagttccgtccagagcgttttgaaaatccaagtgcgattccgcagcatgcgtttaaaccgtttggaaacggtcagcgtgcgtgtatcggtcagcagttcgctcttcatgaagcaacgctggtacttggtatgatgctaaaacactttgactttgaagatcatacaaactacgagctcgttattaaagaatcgcggacgttaaaacctgaaggctttgtggtaaaagcaaaatcgaaaggcattccgcttggcggtattccttcacctagcactgaacagtctgctaaaaaagtacgcaaaaaggcagaaaacgctcataatacgccgctgcttgtgctatacggttcaaatgcgggaacagctgaaggaacggcgcgtgatttagcagatattgcaatgagcaaaggatttgcaccgcaggtcgcaacgcttgattcacacgccggtaatcttccgcgcgaaggagctgtattaattgtaacggcgtcttataacggtcatccgcctgataacgcaaagcaatttgtcgactggttagaccaagcgtctgctgatgaagtaaaaggcgttcgctactccgtatttggatgcggcgataaaaattgggcggggacgtatcaaaaagtgcctgcttttatcgatgaaacgcttgccgctaaaggggcagaaaacatcgctgaccgcggtgaagcagatgcaagcgacgactttgaaggcacatatgaagaatggcgtgatcatatgtggagtgacgtagcagcctactttaacctcgacattgaaaacagtgaagataataaatctactctttcacttcaatttgtcgacagcgccgcggatatgccgcttgcgaaaatgcacggtgcgttttcaacgaacgtcgtagcaagcaaagaacttcaacagccaggcagtgcacgaagcacgcgacatcttgaaattgaacttccaaaagaagcttcttatcaagaaggagatcatttaggtgttattcctcgcaactatgaaggaatagtaaaccgtgtaacagcaaggttcggcctaagcgcatcacagcaaatccgtctggaagcagaagaagaaaaattagctcatttgccactcgctaaaacagtatccgtagaagagcttctgcaatacgtggagcttcaagatcctgttacgcgcacgcagcttcgcgcaatggctgctaaaacggtctgcccgccgcataaagtagagcttgaagccttgcttgaaaagcaagcctacaaagaacaagtgctggcaaaacgtttaacaatgcttgaactgcttgaaaaatacccggcgtgtgaaatgaaattcagcgaatttatcgcccttctgccaagcatacgcccgcgctattactcgatttcttcatcacctcgtgtcgatgaaaaacaagcaagcatcacggtcagcgttgtctcaggaccggcgtggagcggatatggagaatataaaggaattgcgtcgaactatcttgccgagctgcaagaaggagatacgattacgtgctttatttccacaccgcagtcagaatttacgctgccaaaagaccctgaaacgccgcttatcatggtcggaccgggaacaggcgtcgcgccgtttagaggctttgtgcaggcgcgcaaacagctaaaagaacaaggacagtcacttggagaagcacatttatacttcggctgccgttcacctcatgaagactatctgtatcaagaagagcttgaaaacgcccaaagcgaaggcatcattacgcttcataccgctttttctcgcatgccaaatcagccgaaaacatacgttcagcacgtaatggaacaagacggcaagaaattgattgaacttctttttcaaggagcgcacttctatatttgcggagacggaagccaaatggcacctgccgttgaagcaacgcttatgaaaagctatgctgacgttcaccaagtgagtgaagcagacgctcgcttatggctgcagcagctagaagaaaaaggccgatacgcaaaagacgtgtggctgggg

SEQ ID NO: 706 - protein, 1049 aa, synthetic construct
  REGION 1..1049: note = variant of P450 oxidase from Bacillus megaterium
MTIKEMPQPKTFGELKNLPLLNTDKPVQALMRIADELGEIFKFEAPGSVTRYLSSQRLIKEACDESRFDKNLSQALKFARDFVGDGLSTSWTHEPNWKKAHNILVPSFSQHAMGRYHAMMVDIAVQLVQKWERLNADEHIEVSEDMTRLTLDTIGLCGFNYRFNSFYRDQPHPFIVSVVRALDEVMNKLQRANPDDPAYDENKRQCQEDIKVMNDYVDKIIADRKARGEQSHDLLTQMLNGKDPETGEPLDDGNIRQQIITFLIAGHQTTSGLLSFALYFLVKNPHVLQKVAEEAARVLVDPVPSYKQVKQLKYVGMVLNEALRLWPVAPMFSLYAKEDTVLGGEYPLTKGDEVMVLVPQLHRDKTIWGDDVEEFRPERFENPSAIPQHAFKPFGNGQRACIGQQFALHEATLVLGMMLKHFDFEDHTNYELVIKESRTLKPEGFVVKAKSKGIPLGGIPSPSTEQSAKKVRKKAENAHNTPLLVLYGSNAGTAEGTARDLADIAMSKGFAPQVATLDSHAGNLPREGAVLIVTASYNGHPPDNAKQFVDWLDQASADEVKGVRYSVFGCGDKNWAGTYQKVPAFIDETLAAKGAENIADRGEADASDDFEGTYEEWRDHMWSDVAAYFNLDIENSEDNKSTLSLQFVDSAADMPLAKMHGAFSTNVVASKELQQPGSARSTRHLEIELPKEASYQEGDHLGVIPRNYEGIVNRVTARFGLSASQQIRLEAEEEKLAHLPLAKTVSVEELLQYVELQDPVTRTQLRAMAAKTVCPPHKVELEALLEKQAYKEQVLAKRLTMLELLEKYPACEMKFSEFIALLPSIRPRYYSISSSPRVDEKQASITVSVVSGPAWSGYGEYKGIASNYLAELQEGDTITCFISTPQSEFTLPKDPETPLIMVGPGTGVAPFRGFVQARKQLKEQGQSLGEAHLYFGCRSPHEDYLYQEELENAQSEGIITLHTAFSRMPNQPKTYVQHVMEQDGKKLIELLFQGAHFYICGDGSQMAPAVEATLMKSYADVHQVSEADARLWLQQLEEKGRYAKDVWLG

SEQ ID NO: 707 - DNA, 3147 bp, synthetic construct
  misc_feature 1..3147: note = variant of P450 oxidase from Bacillus megaterium
  source 1..3147: mol_type = other DNA
atgacaattaaggaaatgcctcagcctaagacgtttggagaacttaaaaatttaccgttattaaacacagataaaccggttcaagctttgatgcgtattgcggatgaattaggagaaatctttaaattcgaggcgcctggtagcgtaacgcgctatttatcaagtcagcgtctaattaaagaagcatgcgatgaatcacgctttgataaaaacttaagtcaagcgcttaaatttgcacgtgattttgttggagacgggctgtctacaagctggacgcatgaaccgaattggaaaaaagcgcataatatcttagttccaagctttagtcagcatgcaatggggcgttatcatgcgatgatggtcgatatcgccgtgcagcttgttcaaaagtgggagcgtctaaatgcagatgagcatattgaagtatcggaagacatgacacgtttaacgcttgatacaattggtctttgcggctttaactatcgctttaacagcttttaccgagatcagcctcatccatttattgtgagtgtggttcgtgcactggatgaagtaatgaacaagctgcagcgagcaaatccagacgacccagcttatgatgaaaacaagcgccagtgtcaagaagatatcaaggtgatgaacgactatgtagataaaattattgcagatcgcaaagcaaggggtgaacaaagtcatgatttattaacgcagatgctaaacggaaaagatccagaaacgggtgagccgcttgatgacgggaacattcgtcagcaaattattacattcttaattgcgggacaccaaacgacaagtggtcttttatcatttgcgctgtatttcttagtgaaaaatccacatgtattacaaaaagtagcagaagaagcagcacgagttctagtagatcctgttccaagctacaaacaagtcaaacagcttaaatatgttggcatggtcttaaacgaagcgctgcgcttatggccagtagcgcctatgttttccctatatgcaaaagaagatacggtgcttggaggagaatatcctttaacgaaaggcgacgaagtaatggttctggtgcctcagcttcaccgtgataaaacaatttggggagacgatgtggaggagttccgtccagagcgttttgaaaatccaagtgcgattccgcagcatgcgtttaaaccgtttggaaacggtcagcgtgcgtgtatcggtcagcagttcgctcttcatgaagcaacgctggtacttggtatgatgctaaaacactttgactttgaagatcatacaaactacgagctcgttattaaagaatcgcggacgttaaaacctgaaggctttgtggtaaaagcaaaatcgaaaggcattccgcttggcggtattccttcacctagcactgaacagtctgctaaaaaagtacgcaaaaaggcagaaaacgctcataatacgccgctgcttgtgctatacggttcaaatgcgggaacagctgaaggaacggcgcgtgatttagcagatattgcaatgagcaaaggatttgcaccgcaggtcgcaacgcttgattcacacgccggtaatcttccgcgcgaaggagctgtattaattgtaacggcgtcttataacggtcatccgcctgataacgcaaagcaatttgtcgactggttagaccaagcgtctgctgatgaagtaaaaggcgttcgctactccgtatttggatgcggcgataaaaattgggcggggacgtatcaaaaagtgcctgcttttatcgatgaaacgcttgccgctaaaggggcagaaaacatcgctgaccgcggtgaagcagatgcaagcgacgactttgaaggcacatatgaagaatggcgtgatcatatgtggagtgacgtagcagcctactttaacctcgacattgaaaacagtgaagataataaatctactctttcacttcaatttgtcgacagcgccgcggatatgccgcttgcgaaaatgcacggtgcgttttcaacgaacgtcgtagcaagcaaagaacttcaacagccaggcagtgcacgaagcacgcgacatcttgaaattgaacttccaaaagaagcttcttatcaagaaggagatcatttaggtgttattcctcgcaactatgaaggaatagtaaaccgtgtaacagcaaggttcggcctaagcgcatcacagcaaatccgtctggaagcagaagaagaaaaattagctcatttgccactcgctaaaacagtatccgtagaagagcttctgcaatacgtggagcttcaagatcctgttacgcgcacgcagcttcgcgcaatggctgctaaaacggtctgcccgccgcataaagtagagcttgaagccttgcttgaaaagcaagcctacaaagaacaagtgctggcaaaacgtttaacaatgcttgaactgcttgaaaaatacccggcgtgtgaaatgaaattcagcgaatttatcgcccttctgccaagcatacgcccgcgctattactcgatttcttcatcacctcgtgtcgatgaaaaacaagcaagcatcacggtcagcgttgtctcaggaccggcgtggagcggatatggagaatataaaggaattgcgtcgaactatcttgccgagctgcaagaaggagatacgattacgtgctttatttccacaccgcagtcagaatttacgctgccaaaagaccctgaaacgccgcttatcatggtcggaccgggaacaggcgtcgcgccgtttagaggctttgtgcaggcgcgcaaacagctaaaagaacaaggacagtcacttggagaagcacatttatacttcggctgccgttcacctcatgaagactatctgtatcaagaagagcttgaaaacgcccaaagcgaaggcatcattacgcttcataccgctttttctcgcatgccaaatcagccgaaaacatacgttcagcacgtaatggaacaagacggcaagaaattgattgaacttcttgatcaaggagcgcacttctatatttgcggagacggaagccaaatggcacctgccgttgaaatgacgcttatgaaaagctatgctgacgttcaccaagtgagtgaagcagacgctcgcttatggctgcagcagctagaagaaaaaggccgatacgcaaaagacgtgtggctgggg

SEQ ID NO: 708 - protein, 1049 aa, synthetic construct
  REGION 1..1049: note = variant of P450 oxidase from Bacillus megaterium
MTIKEMPQPKTFGELKNLPLLNTDKPVQALMRIADELGEIFKFEAPGSVTRYLSSQRLIKEACDESRFDKNLSQALKFARDFVGDGLSTSWTHEPNWKKAHNILVPSFSQHAMGRYHAMMVDIAVQLVQKWERLNADEHIEVSEDMTRLTLDTIGLCGFNYRFNSFYRDQPHPFIVSVVRALDEVMNKLQRANPDDPAYDENKRQCQEDIKVMNDYVDKIIADRKARGEQSHDLLTQMLNGKDPETGEPLDDGNIRQQIITFLIAGHQTTSGLLSFALYFLVKNPHVLQKVAEEAARVLVDPVPSYKQVKQLKYVGMVLNEALRLWPVAPMFSLYAKEDTVLGGEYPLTKGDEVMVLVPQLHRDKTIWGDDVEEFRPERFENPSAIPQHAFKPFGNGQRACIGQQFALHEATLVLGMMLKHFDFEDHTNYELVIKESRTLKPEGFVVKAKSKGIPLGGIPSPSTEQSAKKVRKKAENAHNTPLLVLYGSNAGTAEGTARDLADIAMSKGFAPQVATLDSHAGNLPREGAVLIVTASYNGHPPDNAKQFVDWLDQASADEVKGVRYSVFGCGDKNWAGTYQKVPAFIDETLAAKGAENIADRGEADASDDFEGTYEEWRDHMWSDVAAYFNLDIENSEDNKSTLSLQFVDSAADMPLAKMHGAFSTNVVASKELQQPGSARSTRHLEIELPKEASYQEGDHLGVIPRNYEGIVNRVTARFGLSASQQIRLEAEEEKLAHLPLAKTVSVEELLQYVELQDPVTRTQLRAMAAKTVCPPHKVELEALLEKQAYKEQVLAKRLTMLELLEKYPACEMKFSEFIALLPSIRPRYYSISSSPRVDEKQASITVSVVSGPAWSGYGEYKGIASNYLAELQEGDTITCFISTPQSEFTLPKDPETPLIMVGPGTGVAPFRGFVQARKQLKEQGQSLGEAHLYFGCRSPHEDYLYQEELENAQSEGIITLHTAFSRMPNQPKTYVQHVMEQDGKKLIELLDQGAHFYICGDGSQMAPAVEMTLMKSYADVHQVSEADARLWLQQLEEKGRYAKDVWLG

SEQ ID NO: 709 - DNA, 3147 bp, synthetic construct
  misc_feature 1..3147: note = variant of P450 oxidase from Bacillus megaterium
  source 1..3147: mol_type = other DNA
atgacaattaaggaaatgcctcagcctaagacgtttggagaacttaaaaatttaccgttattaaacacagataaaccggttcaagctttgatgcgtattgcggatgaattaggagaaatctttaaattcgaggcgcctggtagcgtaacgcgctatttatcaagtcagcgtctaattaaagaagcatgcgatgaatcacgctttgataaaaacttaagtcaagcgcttaaatttgcacgtgattttgttggagacgggctgtctacaagctggacgcatgaaccgaattggaaaaaagcgcataatatcttagttccaagctttagtcagcatgcaatggggcgttatcatgcgatgatggtcgatatcgccgtgcagcttgttcaaaagtgggagcgtctaaatgcagatgagcatattgaagtatcggaagacatgacacgtttaacgcttgatacaattggtctttgcggctttaactatcgctttaacagcttttaccgagatcagcctcatccatttattgtgagtgtggttcgtgcactggatgaagtaatgaacaagctgcagcgagcaaatccagacgacccagcttatgatgaaaacaagcgccagtgtcaagaagatatcaaggtgatgaacgactatgtagataaaattattgcagatcgcaaagcaaggggtgaacaaagtcatgatttattaacgcagatgctaaacggaaaagatccagaaacgggtgagccgcttgatgacgggaacattcgtcagcaaattattacattcttaattgcgggacaccaaacgacaagtggtcttttatcatttgcgctgtatttcttagtgaaaaatccacatgtattacaaaaagtagcagaagaagcagcacgagttctagtagatcctgttccaagctacaaacaagtcaaacagcttaaatatgttggcatggtcttaaacgaagcgctgcgcttatggccagtagcgcctatgttttccctatatgcaaaagaagatacggtgcttggaggagaatatcctttaacgaaaggcgacgaagtaatggttctggtgcctcagcttcaccgtgataaaacaatttggggagacgatgtggaggagttccgtccagagcgttttgaaaatccaagtgcgattccgcagcatgcgtttaaaccgtttggaaacggtcagcgtgcgtgtatcggtcagcagttcgctcttcatgaagcaacgctggtacttggtatgatgctaaaacactttgactttgaagatcatacaaactacgagctcgttattaaagaatcgcggacgttaaaacctgaaggctttgtggtaaaagcaaaatcgaaaggcattccgcttggcggtattccttcacctagcactgaacagtctgctaaaaaagtacgcaaatttgcagaaaacgctcataatacgccgctgcttgtgctatacggttcaaatgcgggaacagctgaaggaacggcgcgtgatttagcagatattgcaatgagcaaaggatttgcaccgcaggtcgcaacgcttgattcacacgccggtaatcttccgcgcgaaggagctgtattaattgtaacggcgtcttataacggtcatccgcctgataacgcaaagcaatttgtcgactggttagaccaagcgtctgctgatgaagtaaaaggcgttcgctactccgtatttggatgcggcgataaaaattgggcggggacgtatcaaaaagtgcctgcttttatcgatgaaacgcttgccgctaaaggggcagaaaacatcgctgaccgcggtgaagcagatgcaagcgacgactttgaaggcacatatgaagaatggcgtgatcatatgtggagtgacgtagcagcctactttaacctcgacattgaaaacagtgaagataataaatctactctttcacttcaatttgtcgacagcgccgcggatatgccgcttgcgaaaatgcacggtgcgttttcaacgaacgtcgtagcaagcaaagaacttcaacagccaggcagtgcacgaagcacgcgacatcttgaaattgaacttccaaaagaagcttcttatcaagaaggagatcatttaggtgttattcctcgcaactatgaaggaatagtaaaccgtgtaacagcaaggttcggcctaagcgcatcacagcaaatccgtctggaagcagaagaagaaaaattagctcatttgccactcgctaaaacagtatccgtagaagagcttctgcaatacgtggagcttcaagatcctgttacgcgcacgcagcttcgcgcaatggctgctaaaacggtctgcccgccgcataaagtagagcttgaagccttgcttgaaaagcaagcctacaaagaacaagtgctggcaaaacgtttaacaatgcttgaactgcttgaaaaatacccggcgtgtgaaatgaaattcagcgaatttatcgcccttctgccaagcatacgcccgcgctattactcgatttcttcatcacctcgtgtcgatgaaaaacaagcaagcatcacggtcagcgttgtctcaggaccggcgtggagcggatatggagaatataaaggaattgcgtcgaactatcttgccgagctgcaagaaggagatacgattacgtgctttatttccacaccgcagtcagaatttacgctgccaaaagaccctgaaacgccgcttatcatggtcggaccgggaacaggcgtcgcgccgtttagaggctttgtgcaggcgcgcaaacagctaaaagaacaaggacagtcacttggagaagcacatttatacttcggctgccgttcacctcatgaagactatctgtatcaagaagagcttgaaaacgcccaaagcgaaggcatcattacgcttcataccgctttttctcgcatgccaaatcagccgaaaacatacgttcagcacgtaatggaacaagacggcaagaaattgattgaacttcttgatcaaggagcgcacttctatatttgcggagacggaagccaaatggcacctgccgttgaagcaacgcttatgaaaagctatgctgacgttcaccaagtgagtgaagcagacgctcgcttatggctgcagcagctagaagaaaaaggccgatacgcaaaagacgtgtggctgggg

SEQ ID NO: 710 - protein, 1049 aa, synthetic construct
  REGION 1..1049: note = variant of P450 oxidase from Bacillus megaterium
MTIKEMPQPKTFGELKNLPLLNTDKPVQALMRIADELGEIFKFEAPGSVTRYLSSQRLIKEACDESRFDKNLSQALKFARDFVGDGLSTSWTHEPNWKKAHNILVPSFSQHAMGRYHAMMVDIAVQLVQKWERLNADEHIEVSEDMTRLTLDTIGLCGFNYRFNSFYRDQPHPFIVSVVRALDEVMNKLQRANPDDPAYDENKRQCQEDIKVMNDYVDKIIADRKARGEQSHDLLTQMLNGKDPETGEPLDDGNIRQQIITFLIAGHQTTSGLLSFALYFLVKNPHVLQKVAEEAARVLVDPVPSYKQVKQLKYVGMVLNEALRLWPVAPMFSLYAKEDTVLGGEYPLTKGDEVMVLVPQLHRDKTIWGDDVEEFRPERFENPSAIPQHAFKPFGNGQRACIGQQFALHEATLVLGMMLKHFDFEDHTNYELVIKESRTLKPEGFVVKAKSKGIPLGGIPSPSTEQSAKKVRKFAENAHNTPLLVLYGSNAGTAEGTARDLADIAMSKGFAPQVATLDSHAGNLPREGAVLIVTASYNGHPPDNAKQFVDWLDQASADEVKGVRYSVFGCGDKNWAGTYQKVPAFIDETLAAKGAENIADRGEADASDDFEGTYEEWRDHMWSDVAAYFNLDIENSEDNKSTLSLQFVDSAADMPLAKMHGAFSTNVVASKELQQPGSARSTRHLEIELPKEASYQEGDHLGVIPRNYEGIVNRVTARFGLSASQQIRLEAEEEKLAHLPLAKTVSVEELLQYVELQDPVTRTQLRAMAAKTVCPPHKVELEALLEKQAYKEQVLAKRLTMLELLEKYPACEMKFSEFIALLPSIRPRYYSISSSPRVDEKQASITVSVVSGPAWSGYGEYKGIASNYLAELQEGDTITCFISTPQSEFTLPKDPETPLIMVGPGTGVAPFRGFVQARKQLKEQGQSLGEAHLYFGCRSPHEDYLYQEELENAQSEGIITLHTAFSRMPNQPKTYVQHVMEQDGKKLIELLDQGAHFYICGDGSQMAPAVEATLMKSYADVHQVSEADARLWLQQLEEKGRYAKDVWLG

SEQ ID NO: 711 - DNA, 3147 bp, synthetic construct
  misc_feature 1..3147: note = variant of P450 oxidase from Bacillus megaterium
  source 1..3147: mol_type = other DNA
atgacaattaaggaaatgcctcagcctaagacgtttggagaacttaaaaatttaccgttattaaacacagataaaccggttcaagctttgatgcgtattgcggatgaattaggagaaatctttaaattcgaggcgcctggtagcgtaacgcgctatttatcaagtcagcgtctaattaaagaagcatgcgatgaatcacgctttgataaaaacttaagtcaagcgcttaaatttgcacgtgattttgttggagacgggctgtctacaagctggacgcatgaaccgaattggaaaaaagcgcataatatcttagttccaagctttagtcagcatgcaatggggcgttatcatgcgatgatggtcgatatcgccgtgcagcttgttcaaaagtgggagcgtctaaatgcagatgagcatattgaagtatcggaagacatgacacgtttaacgcttgatacaattggtctttgcggctttaactatcgctttaacagcttttaccgagatcagcctcatccatttattgtgagtgtggttcgtgcactggatgaagtaatgaacaagctgcagcgagcaaatccagacgacccagcttatgatgaaaacaagcgccagtgtcaagaagatatcaaggtgatgaacgactatgtagataaaattattgcagatcgcaaagcaaggggtgaacaaagtcatgatttattaacgcagatgctaaacggaaaagatccagaaacgggtgagccgcttgatgacgggaacattcgtcagcaaattattacattcttaattgcgggacaccaaacgacaagtggtcttttatcatttgcgctgtatttcttagtgaaaaatccacatgtattacaaaaagtagcagaagaagcagcacgagttctagtagatcctgttccaagctacaaacaagtcaaacagcttaaatatgttggcatggtcttaaacgaagcgctgcgcttatggccagtagcgcctatgttttccctatatgcaaaagaagatacggtgcttggaggagaatatcctttaacgaaaggcgacgaagtaatggttctggtgcctcagcttcaccgtgataaaacaatttggggagacgatgtggaggagttccgtccagagcgttttgaaaatccaagtgcgattccgcagcatgcgtttaaaccgtttggaaacggtcagcgtgcgtgtatcggtcagcagttcgctcttcatgaagcaacgctggtacttggtatgatgctaaaacactttgactttgaagatcatacaaactacgagctcgttattaaagaatcgcggacgttaaaacctgaaggctttgtggtaaaagcaaaatcgaaaggcattccgcttggcggtattccttcacctagcactgaacagtctgctaaaaaagtacgcaaaaaggcagaaaacgctcataatacgccgctgcttgtgctatacggttcaaatgcgggaacagctgaaggaacggcgcgtgatttagcagatattgcaatgagcaaaggatttgcaccgcaggtcgcaacgcttgattcacacgccggtaatcttccgcgcgaaggagctgtattaattgtaacggcgtcttataacggtcatccgcctgataacgcaaagcaatttgtcgactggttagaccaagcgtctgctgatgaagtaaaaggcgttcgctactccgtatttggatgcggcgataaaaattgggcggggacgtatcaaaaagtgcctgcttttatcgatgaaacgcttgccgctaaaggggcagaaaacatcgctgaccgcggtgaagcagatgcaagcgacgactttgaaggcacatatgaagaatggcgtgatcatatgtggagtgacgtagcagcctactttaacctcgacattgaaaacagtgaagataataaatctactctttcacttcaatttgtcgacagcgccgcggatatgccgcttgcgaaaatgcacggtgcgttttcaacgaacgtcgtagcaagcaaagaacttcaacagccaggcagtgcacgaagcacgcgacatcttgaaattgaacttccaaaagaagctccttatcaagaaggagatcatttaggtgttattcctcgcaactatgaaggaatagtaaaccgtgtaacagcaaggttcggcctaagcgcatcacagcaaatccgtctggaagcagaagaagaaaaattagctcatttgccactcgctaaaacagtatccgtagaagagcttctgcaatacgtggagcttcaagatcctgttacgcgcacgcagcttcgcgcaatggctgctaaaacggtctgcccgccgcataaagtagagcttgaagccttgcttgaaaagcaagcctacaaagaacaagtgctggcaaaacgtttaacaatgcttgaactgcttgaaaaatacccggcgtgtgaaatgaaattcagcgaatttatcgcccttctgccaagcatacgcccgcgctattactcgatttcttcatcacctcgtgtcgatgaaaaacaagcaagcatcacggtcagcgttgtctcaggaccggcgtggagcggatatggagaatataaaggaattgcgtcgaactatcttgccgagctgcaagaaggagatacgattacgtgctttatttccacaccgcagtcagaatttacgctgccaaaagaccctgaaacgccgcttatcatggtcggaccgggaacaggcgtcgcgccgtttagaggctttgtgcaggcgcgcaaacagctaaaagaacaaggacagtcacttggagaagcacatttatacttcggctgccgttcacctcatgaagactatctgtatcaagaagagcttgaaaacgcccaaagcgaaggcatcattacgcttcataccgctttttctcgcatgccaaatcagccgaaaacatacgttcagcacgtaatggaacaagacggcaagaaattgattgaacttcttgatcaaggagcgcacttctatatttgcggagacggaagccaaatggcacctgccgttgaagcaacgcttatgaaaagctatgctgacgttcaccaagtgagtgaagcagacgctcgcttatggctgcagcagctagaagaaaaaggccgatacgcaaaagacgtgtggctgggg

SEQ ID NO: 712 - protein, 1049 aa, synthetic construct
  REGION 1..1049: note = variant of P450 oxidase from Bacillus megaterium
MTIKEMPQPKTFGELKNLPLLNTDKPVQALMRIADELGEIFKFEAPGSVTRYLSSQRLIKEACDESRFDKNLSQALKFARDFVGDGLSTSWTHEPNWKKAHNILVPSFSQHAMGRYHAMMVDIAVQLVQKWERLNADEHIEVSEDMTRLTLDTIGLCGFNYRFNSFYRDQPHPFIVSVVRALDEVMNKLQRANPDDPAYDENKRQCQEDIKVMNDYVDKIIADRKARGEQSHDLLTQMLNGKDPETGEPLDDGNIRQQIITFLIAGHQTTSGLLSFALYFLVKNPHVLQKVAEEAARVLVDPVPSYKQVKQLKYVGMVLNEALRLWPVAPMFSLYAKEDTVLGGEYPLTKGDEVMVLVPQLHRDKTIWGDDVEEFRPERFENPSAIPQHAFKPFGNGQRACIGQQFALHEATLVLGMMLKHFDFEDHTNYELVIKESRTLKPEGFVVKAKSKGIPLGGIPSPSTEQSAKKVRKKAENAHNTPLLVLYGSNAGTAEGTARDLADIAMSKGFAPQVATLDSHAGNLPREGAVLIVTASYNGHPPDNAKQFVDWLDQASADEVKGVRYSVFGCGDKNWAGTYQKVPAFIDETLAAKGAENIADRGEADASDDFEGTYEEWRDHMWSDVAAYFNLDIENSEDNKSTLSLQFVDSAADMPLAKMHGAFSTNVVASKELQQPGSARSTRHLEIELPKEAPYQEGDHLGVIPRNYEGIVNRVTARFGLSASQQIRLEAEEEKLAHLPLAKTVSVEELLQYVELQDPVTRTQLRAMAAKTVCPPHKVELEALLEKQAYKEQVLAKRLTMLELLEKYPACEMKFSEFIALLPSIRPRYYSISSSPRVDEKQASITVSVVSGPAWSGYGEYKGIASNYLAELQEGDTITCFISTPQSEFTLPKDPETPLIMVGPGTGVAPFRGFVQARKQLKEQGQSLGEAHLYFGCRSPHEDYLYQEELENAQSEGIITLHTAFSRMPNQPKTYVQHVMEQDGKKLIELLDQGAHFYICGDGSQMAPAVEATLMKSYADVHQVSEADARLWLQQLEEKGRYAKDVWLG

SEQ ID NO: 713 - DNA, 3147 bp, synthetic construct
  misc_feature 1..3147: note = variant of P450 oxidase from Bacillus megaterium
  source 1..3147: mol_type = other DNA
atgacaattaaggaaatgcctcagcctaagacgtttggagaacttaaaaatttaccgttattaaacacagataaaccggttcaagctttgatgcgtattgcggatgaattaggagaaatctttaaattcgaggcgcctggtagcgtaacgcgctatttatcaagtcagcgtctaattaaagaagcatgcgatgaatcacgctttgataaaaacttaagtcaagcgcttaaatttgcacgtgattttgttggagacgggctgtctacaagctggacgcatgaaccgaattggaaaaaagcgcataatatcttagttccaagctttagtcagcatgcaatggggcgttatcatgcgatgatggtcgatatcgccgtgcagcttgttcaaaagtgggagcgtctaaatgcagatgagcatattgaagtatcggaagacatgacacgtttaacgcttgatacaattggtctttgcggctttaactatcgctttaacagcttttaccgagatcagcctcatccatttattgtgagtgtggttcgtgcactggatgaagtaatgaacaagctgcagcgagcaaatccagacgacccagcttatgatgaaaacaagcgccagtgtcaagaagatatcaaggtgatgaacgactatgtagataaaattattgcagatcgcaaagcaaggggtgaacaaagtcatgatttattaacgcagatgctaaacggaaaagatccagaaacgggtgagccgcttgatgacgggaacattcgtcagcaaattattacattcttaattgcgggacaccaaacgacaagtggtcttttatcatttgcgctgtatttcttagtgaaaaatccacatgtattacaaaaagtagcagaagaagcagcacgagttctagtagatcctgttccaagctacaaacaagtcaaacagcttaaatatgttggcatggtcttaaacgaagcgctgcgcttatggccagtagcgcctatgttttccctatatgcaaaagaagatacggtgcttggaggagaatatcctttaacgaaaggcgacgaagtaatggttctggtgcctcagcttcaccgtgataaaacaatttggggagacgatgtggaggagttccgtccagagcgttttgaaaatccaagtgcgattccgcagcatgcgtttaaaccgtttggaaacggtcagcgtgcgtgtatcggtcagcagttcgctcttcatgaagcaacgctggtacttggtatgatgctaaaacactttgactttgaagatcatacaaactacgagctcgttattaaagaatcgcggacgttaaaacctgaaggctttgtggtaaaagcaaaatcgaaaggcattccgcttggcggtattccttcacctagcactgaatgttctgctaaaaaagtacgcaaaaaggcagaaaacgctcataatacgccgctgcttgtgctatacggttcaaatgcgggaacagctgaaggaacggcgcgtgatttagcagatattgcaatgagcaaaggatttgcaccgcaggtcgcaacgcttgattcacacgccggtaatcttccgcgcgaaggagctgtattaattgtaacggcgtcttataacggtcatccgcctgataacgcaaagcaatttgtcgactggttagaccaagcgtctgctgatgaagtaaaaggcgttcgctactccgtatttggatgcggcgataaaaattgggcggggacgtatcaaaaagtgcctgcttttatcgatgaaacgcttgccgctaaaggggcagaaaacatcgctgaccgcggtgaagcagatgcaagcgacgactttgaaggcacatatgaagaatggcgtgatcatatgtggagtgacgtagcagcctactttaacctcgacattgaaaacagtgaagataataaatctactctttcacttcaatttgtcgacagcgccgcggatatgccgcttgcgaaaatgcacggtgcgttttcaacgaacgtcgtagcaagcaaagaacttcaacagccaggcagtgcacgaagcacgcgacatcttgaaattgaacttccaaaagaagcttcttatcaagaaggagatcatttaggtgttattcctcgcaactatgaaggaatagtaaaccgtgtaacagcaaggttcggcctaagcgcatcacagcaaatccgtctggaagcagaagaagaaaaattagctcatttgccactcgctaaaacagtatccgtagaagagcttctgcaatacgtggagcttcaagatcctgttacgcgcacgcagcttcgcgcaatggctgctaaaacggtctgcccgccgcataaagtagagcttgaagccttgcttgaaaagcaagcctacaaagaacaagtgctggcaaaacgtttaacaatgcttgaactgcttgaaaaatacccggcgtgtgaaatgaaattcagcgaatttatcgcccttctgccaagcatacgcccgcgctattactcgatttcttcatcacctcgtgtcgatgaaaaacaagcaagcatcacggtcagcgttgtctcaggaccggcgtggagcggatatggagaatataaaggaattgcgtcgaactatcttgccgagctgcaagaaggagatacgattacgtgctttatttccacaccgcagtcagaatttacgctgccaaaagaccctgaaacgccgcttatcatggtcggaccgggaacaggcgtcgcgccgtttagaggctttgtgcaggcgcgcaaacagctaaaagaacaaggacagtcacttggagaagcacatttatacttcggctgccgttcacctcatgaagactatctgtatcaagaagagcttgaaaacgcccaaagcgaaggcatcattacgcttcataccgctttttctcgcatgccaaatcagccgaaaacatacgttcagcacgtaatggaacaagacggcaagaaattgattgaacttcttgatcaaggagcgcacttctatatttgcggagacggaagccaaatggcacctgccgttgaagcaacgcttatgaaaagctatgctgacgttcaccaagtgagtgaagcagacgctcgcttatggctgcagcagctagaagaaaaaggccgatacgcaaaagacgtgtggctgggg

SEQ ID NO: 714 - protein, 1049 aa, synthetic construct
  REGION 1..1049: note = variant of P450 oxidase from Bacillus megaterium
MTIKEMPQPKTFGELKNLPLLNTDKPVQALMRIADELGEIFKFEAPGSVTRYLSSQRLIKEACDESRFDKNLSQALKFARDFVGDGLSTSWTHEPNWKKAHNILVPSFSQHAMGRYHAMMVDIAVQLVQKWERLNADEHIEVSEDMTRLTLDTIGLCGFNYRFNSFYRDQPHPFIVSVVRALDEVMNKLQRANPDDPAYDENKRQCQEDIKVMNDYVDKIIADRKARGEQSHDLLTQMLNGKDPETGEPLDDGNIRQQIITFLIAGHQTTSGLLSFALYFLVKNPHVLQKVAEEAARVLVDPVPSYKQVKQLKYVGMVLNEALRLWPVAPMFSLYAKEDTVLGGEYPLTKGDEVMVLVPQLHRDKTIWGDDVEEFRPERFENPSAIPQHAFKPFGNGQRACIGQQFALHEATLVLGMMLKHFDFEDHTNYELVIKESRTLKPEGFVVKAKSKGIPLGGIPSPSTECSAKKVRKKAENAHNTPLLVLYGSNAGTAEGTARDLADIAMSKGFAPQVATLDSHAGNLPREGAVLIVTASYNGHPPDNAKQFVDWLDQASADEVKGVRYSVFGCGDKNWAGTYQKVPAFIDETLAAKGAENIADRGEADASDDFEGTYEEWRDHMWSDVAAYFNLDIENSEDNKSTLSLQFVDSAADMPLAKMHGAFSTNVVASKELQQPGSARSTRHLEIELPKEASYQEGDHLGVIPRNYEGIVNRVTARFGLSASQQIRLEAEEEKLAHLPLAKTVSVEELLQYVELQDPVTRTQLRAMAAKTVCPPHKVELEALLEKQAYKEQVLAKRLTMLELLEKYPACEMKFSEFIALLPSIRPRYYSISSSPRVDEKQASITVSVVSGPAWSGYGEYKGIASNYLAELQEGDTITCFISTPQSEFTLPKDPETPLIMVGPGTGVAPFRGFVQARKQLKEQGQSLGEAHLYFGCRSPHEDYLYQEELENAQSEGIITLHTAFSRMPNQPKTYVQHVMEQDGKKLIELLDQGAHFYICGDGSQMAPAVEATLMKSYADVHQVSEADARLWLQQLEEKGRYAKDVWLG

SEQ ID NO: 715 - DNA, 3147 bp, synthetic construct
  misc_feature 1..3147: note = variant of P450 oxidase from Bacillus megaterium
  source 1..3147: mol_type = other DNA
atgacaattaaggaaatgcctcagcctaagacgtttggagaacttaaaaatttaccgttattaaacacagataaaccggttcaagctttgatgcgtattgcggatgaattaggagaaatctttaaattcgaggcgcctggtagcgtaacgcgctatttatcaagtcagcgtctaattaaagaagcatgcgatgaatcacgctttgataaaaacttaagtcaagcgcttaaatttgcacgtgattttgttggagacgggctgtctacaagctggacgcatgaaccgaattggaaaaaagcgcataatatcttagttccaagctttagtcagcatgcaatggggcgttatcatgcgatgatggtcgatatcgccgtgcagcttgttcaaaagtgggagcgtctaaatgcagatgagcatattgaagtatcggaagacatgacacgtttaacgcttgatacaattggtctttgcggctttaactatcgctttaacagcttttaccgagatcagcctcatccatttattgtgagtgtggttcgtgcactggatgaagtaatgaacaagctgcagcgagcaaatccagacgacccagcttatgatgaaaacaagcgccagtgtcaagaagatatcaaggtgatgaacgactatgtagataaaattattgcagatcgcaaagcaaggggtgaacaaagtcatgatttattaacgcagatgctaaacggaaaagatccagaaacgggtgagccgcttgatgacgggaacattcgtcagcaaattattacattcttaattgcgggacaccaaacgacaagtggtcttttatcatttgcgctgtatttcttagtgaaaaatccacatgtattacaaaaagtagcagaagaagcagcacgagttctagtagatcctgttccaagctacaaacaagtcaaacagcttaaatatgttggcatggtcttaaacgaagcgctgcgcttatggccagtagcgcctatgttttccctatatgcaaaagaagatacggtgcttggaggagaatatcctttaacgaaaggcgacgaagtaatggttctggtgcctcagcttcaccgtgataaaacaatttggggagacgatgtggaggagttccgtccagagcgttttgaaaatccaagtgcgattccgcagcatgcgtttaaaccgtttggaaacggtcagcgtgcgtgtatcggtcagcagttcgctcttcatgaagcaacgctggtacttggtatgatgctaaaacactttgactttgaagatcatacaaactacgagctcgttattaaagaatcgcggacgttaaaacctgaaggctttgtggtaaaagcaaaatcgaaaggcattccgcttggcggtattccttcacctagcactgaacagtctgctaaaaaagtacgcaaaaaggcagaaaacgctcataatacgccgctgcttgtgctatacggttcaaatgcgggaacagctgaaggaacggcgcgtgatttagcagatattgcaatgagcaaaggatttgcaccgcaggtcgcaacgcttgattcacacgccggtaatcttccgcgcgaaggagctgtattaattgtaacggcgtcttataacggtcatccgcctgataacgcaaagcaatttgtcgactggttagaccaagcgtctgctgatgaagtaaaaggcgttcgctactccgtatttggatgcggcgataaaaattgggcggggacgtatcaaaaagtgcctgcttttatcgatgaaacgcttgccgctaaaggggcagaaaacatcgctgaccgcggtgaagcagatgcaagcgacgactttgaaggcacatatgaagaatggcgtgatcatatgtggagtgacgtagcagcctactttaacctcgacattgaaaacagtgaagataataaatctactctttcacttcaatttgtcgacagcgccgcggatatgccgcttgcgaaaatgcacggtgcgttttcaacgaacgtcgtagcaagcaaagaacttcaacagccaggcagtgcacgaagcacgcgacatcttgaaattgaacttccaaaagaagcttcttatcaagaaggagatcatttaggtgttattcctcgcaactatgaaggaatagtaaaccgtgtaacagcaaggttcggcctaagcgcatcacagcaaatccgtctggaagcagaagaagaaaaattagctcatttgccactcgctaaaacagtatccgtagaagagcttctgcaatacgtggagcttcaagatcctgttacgcgcacgcagcttcgcgcaatggctgctaaaacggtctgcccgccgcataaagtagagcttgaagccttgcttgaaaagcaagcctacaaagaacaagtgctggcaaaacgtttaacaatgcttgaactgcttgaaaaatacccggcgtgtgaaatgaaattcagcgaatttatcgcccttctgccaagcatacgcccgcgctattactcgatttcttcatcacctcgtgtcgatgaaaaacaagcaagcatcacggtcagcgttgtctcaggaccggcgtggagcggatatggagaatataaaggaattgcgtcgaactatcttgccgagctgcaagaaggagatacgattacgtgctttatttccacaccgcagtcagaatttacgctgccaaaagaccctgaaacgccgcttatcatggtcggaccgggaacaggcgtcgcgccgtttagaggctttgtgcaggcgcgcaaacagctaaaagaacaaggacagtcacttggagaagcacatttatacttcggctgccgttcacctcatgaagactatctgtatcaagaagagcttgaaaacgcccaaagcgaaggcatcattacgcttcataccgctttttctcgcatgccaaatcagccgaaaacatacgttcagcacgtaatggaacaagacggcaagaaattgattgaacttcttgatcaaggagcgcacttctatatttgcggagacggaagccaaatggcacctgccgttgaagggacgcttatgaaaagctatgctgacgttcaccaagtgagtgaagcagacgctcgcttatggctgcagcagctagaagaaaaaggccgatacgcaaaagacgtgtggctgggg

SEQ ID NO: 716 - protein, 1049 aa, synthetic construct
  REGION 1..1049: note = variant of P450 oxidase from Bacillus megaterium
MTIKEMPQPKTFGELKNLPLLNTDKPVQALMRIADELGEIFKFEAPGSVTRYLSSQRLIKEACDESRFDKNLSQALKFARDFVGDGLSTSWTHEPNWKKAHNILVPSFSQHAMGRYHAMMVDIAVQLVQKWERLNADEHIEVSEDMTRLTLDTIGLCGFNYRFNSFYRDQPHPFIVSVVRALDEVMNKLQRANPDDPAYDENKRQCQEDIKVMNDYVDKIIADRKARGEQSHDLLTQMLNGKDPETGEPLDDGNIRQQIITFLIAGHQTTSGLLSFALYFLVKNPHVLQKVAEEAARVLVDPVPSYKQVKQLKYVGMVLNEALRLWPVAPMFSLYAKEDTVLGGEYPLTKGDEVMVLVPQLHRDKTIWGDDVEEFRPERFENPSAIPQHAFKPFGNGQRACIGQQFALHEATLVLGMMLKHFDFEDHTNYELVIKESRTLKPEGFVVKAKSKGIPLGGIPSPSTEQSAKKVRKKAENAHNTPLLVLYGSNAGTAEGTARDLADIAMSKGFAPQVATLDSHAGNLPREGAVLIVTASYNGHPPDNAKQFVDWLDQASADEVKGVRYSVFGCGDKNWAGTYQKVPAFIDETLAAKGAENIADRGEADASDDFEGTYEEWRDHMWSDVAAYFNLDIENSEDNKSTLSLQFVDSAADMPLAKMHGAFSTNVVASKELQQPGSARSTRHLEIELPKEASYQEGDHLGVIPRNYEGIVNRVTARFGLSASQQIRLEAEEEKLAHLPLAKTVSVEELLQYVELQDPVTRTQLRAMAAKTVCPPHKVELEALLEKQAYKEQVLAKRLTMLELLEKYPACEMKFSEFIALLPSIRPRYYSISSSPRVDEKQASITVSVVSGPAWSGYGEYKGIASNYLAELQEGDTITCFISTPQSEFTLPKDPETPLIMVGPGTGVAPFRGFVQARKQLKEQGQSLGEAHLYFGCRSPHEDYLYQEELENAQSEGIITLHTAFSRMPNQPKTYVQHVMEQDGKKLIELLDQGAHFYICGDGSQMAPAVEGTLMKSYADVHQVSEADARLWLQQLEEKGRYAKDVWLG

SEQ ID NO: 717 - DNA, 3147 bp, synthetic construct
  misc_feature 1..3147: note = variant of P450 oxidase from Bacillus megaterium
  source 1..3147: mol_type = other DNA
atgacaattaaggaaatgcctcagcctaagacgtttggagaacttaaaaatttaccgttattaaacacagataaaccggttcaagctttgatgcgtattgcggatgaattaggagaaatctttaaattcgaggcgcctggtagcgtaacgcgctatttatcaagtcagcgtctaattaaagaagcatgcgatgaatcacgctttgataaaaacttaagtcaagcgcttaaatttgcacgtgattttgttggagacgggctgtctacaagctggacgcatgaaccgaattggaaaaaagcgcataatatcttagttccaagctttagtcagcatgcaatggggcgttatcatgcgatgatggtcgatatcgccgtgcagcttgttcaaaagtgggagcgtctaaatgcagatgagcatattgaagtatcggaagacatgacacgtttaacgcttgatacaattggtctttgcggctttaactatcgctttaacagcttttaccgagatcagcctcatccatttattgtgagtgtggttcgtgcactggatgaagtaatgaacaagctgcagcgagcaaatccagacgacccagcttatgatgaaaacaagcgccagtgtcaagaagatatcaaggtgatgaacgactatgtagataaaattattgcagatcgcaaagcaaggggtgaacaaagtcatgatttattaacgcagatgctaaacggaaaagatccagaaacgggtgagccgcttgatgacgggaacattcgtcagcaaattattacattcttaattgcgggacaccaaacgacaagtggtcttttatcatttgcgctgtatttcttagtgaaaaatccacatgtattacaaaaagtagcagaagaagcagcacgagttctagtagatcctgttccaagctacaaacaagtcaaacagcttaaatatgttggcatggtcttaaacgaagcgctgcgcttatggccagtagcgcctatgttttccctatatgcaaaagaagatacggtgcttggaggagaatatcctttaacgaaaggcgacgaagtaatggttctggtgcctcagcttcaccgtgataaaacaatttggggagacgatgtggaggagttccgtccagagcgttttgaaaatccaagtgcgattccgcagcatgcgtttaaaccgtttggaaacggtcagcgtgcgtgtatcggtcagcagttcgctcttcatgaagcaacgctggtacttggtatgatgctaaaacactttgactttgaagatcatacaaactacgagctcgttattaaagaatcgcggacgttaaaacctgaaggctttgtggtaaaagcaaaatcgaaaggcattccgcttggcggtattccttcacctagcactgaacagtctgctaaaaaagtacgcaaaaaggcagaaaacgctcataatacgccgctgcttgtgctatacggttcaaatgcgggaacagctgaaggaacggcgcgtgatttagcagatattgcaatgagcaaaggatttgcaccgcaggtcgcaacgcttgattcacacgccggtaatcttccgcgcgaaggagctgtattaattgtaacggcgtcttataacggtcatccgcctgataacgcaaagcaatttgtcgactggttagaccaagcgtctgctgatgaagtaaaaggcgttcgctactccgtatttggatgcggcgataaaaattgggcggggacgtatcaaaaagtgcctgcttttatcgatgaaacgcttgccgctaaaggggcagaaaacatcgctgaccgcggtgaagcagatgcaagcgacgactttgaaggcacatatgaagaatggcgtgatcatatgtggagtgacgtagcagcctactttaacctcgacattgaaaacagtgaagagaataaatctactctttcacttcaatttgtcgacagcgccgcggatatgccgcttgcgaaaatgcacggtgcgttttcaacgaacgtcgtagcaagcaaagaacttcaacagccaggcagtgcacgaagcacgcgacatcttgaaattgaacttccaaaagaagcttcttatcaagaaggagatcatttaggtgttattcctcgcaactatgaaggaatagtaaaccgtgtaacagcaaggttcggcctaagcgcatcacagcaaatccgtctggaagcagaagaagaaaaattagctcatttgccactcgctaaaacagtatccgtagaagagcttctgcaatacgtggagcttcaagatcctgttacgcgcacgcagcttcgcgcaatggctgctaaaacggtctgcccgccgcataaagtagagcttgaagccttgcttgaaaagcaagcctacaaagaacaagtgctggcaaaacgtttaacaatgcttgaactgcttgaaaaatacccggcgtgtgaaatgaaattcagcgaatttatcgcccttctgccaagcatacgcccgcgctattactcgatttcttcatcacctcgtgtcgatgaaaaacaagcaagcatcacggtcagcgttgtctcaggaccggcgtggagcggatatggagaatataaaggaattgcgtcgaactatcttgccgagctgcaagaaggagatacgattacgtgctttatttccacaccgcagtcagaatttacgctgccaaaagaccctgaaacgccgcttatcatggtcggaccgggaacaggcgtcgcgccgtttagaggctttgtgcaggcgcgcaaacagctaaaagaacaaggacagtcacttggagaagcacatttatacttcggctgccgttcacctcatgaagactatctgtatcaagaagagcttgaaaacgcccaaagcgaaggcatcattacgcttcataccgctttttctcgcatgccaaatcagccgaaaacatacgttcagcacgtaatggaacaagacggcaagaaattgattgaacttcttgatcaaggagcgcacttctatatttgcggagacggaagccaaatggcacctgccgttgaagcaacgcttatgaaaagctatgctgacgttcaccaagtgagtgaagcagacgctcgcttatggctgcagcagctagaagaaaaaggccgatacgcaaaagacgtgtggctgggg

SEQ ID NO: 718 - protein, 1049 aa, synthetic construct
  REGION 1..1049: note = variant of P450 oxidase from Bacillus megaterium
MTIKEMPQPKTFGELKNLPLLNTDKPVQALMRIADELGEIFKFEAPGSVTRYLSSQRLIKEACDESRFDKNLSQALKFARDFVGDGLSTSWTHEPNWKKAHNILVPSFSQHAMGRYHAMMVDIAVQLVQKWERLNADEHIEVSEDMTRLTLDTIGLCGFNYRFNSFYRDQPHPFIVSVVRALDEVMNKLQRANPDDPAYDENKRQCQEDIKVMNDYVDKIIADRKARGEQSHDLLTQMLNGKDPETGEPLDDGNIRQQIITFLIAGHQTTSGLLSFALYFLVKNPHVLQKVAEEAARVLVDPVPSYKQVKQLKYVGMVLNEALRLWPVAPMFSLYAKEDTVLGGEYPLTKGDEVMVLVPQLHRDKTIWGDDVEEFRPERFENPSAIPQHAFKPFGNGQRACIGQQFALHEATLVLGMMLKHFDFEDHTNYELVIKESRTLKPEGFVVKAKSKGIPLGGIPSPSTEQSAKKVRKKAENAHNTPLLVLYGSNAGTAEGTARDLADIAMSKGFAPQVATLDSHAGNLPREGAVLIVTASYNGHPPDNAKQFVDWLDQASADEVKGVRYSVFGCGDKNWAGTYQKVPAFIDETLAAKGAENIADRGEADASDDFEGTYEEWRDHMWSDVAAYFNLDIENSEENKSTLSLQFVDSAADMPLAKMHGAFSTNVVASKELQQPGSARSTRHLEIELPKEASYQEGDHLGVIPRNYEGIVNRVTARFGLSASQQIRLEAEEEKLAHLPLAKTVSVEELLQYVELQDPVTRTQLRAMAAKTVCPPHKVELEALLEKQAYKEQVLAKRLTMLELLEKYPACEMKFSEFIALLPSIRPRYYSISSSPRVDEKQASITVSVVSGPAWSGYGEYKGIASNYLAELQEGDTITCFISTPQSEFTLPKDPETPLIMVGPGTGVAPFRGFVQARKQLKEQGQSLGEAHLYFGCRSPHEDYLYQEELENAQSEGIITLHTAFSRMPNQPKTYVQHVMEQDGKKLIELLDQGAHFYICGDGSQMAPAVEATLMKSYADVHQVSEADARLWLQQLEEKGRYAKDVWLG

SEQ ID NO: 719 - DNA, 3147 bp, synthetic construct
  misc_feature 1..3147: note = variant of P450 oxidase from Bacillus megaterium
  source 1..3147: mol_type = other DNA
atgacaattaaggaaatgcctcagcctaagacgtttggagaacttaaaaatttaccgttattaaacacagataaaccggttcaagctttgatgcgtattgcggatgaattaggagaaatctttaaattcgaggcgcctggtagcgtaacgcgctatttatcaagtcagcgtctaattaaagaagcatgcgatgaatcacgctttgataaaaacttaagtcaagcgcttaaatttgcacgtgattttgttggagacgggctgtctacaagctggacgcatgaaccgaattggaaaaaagcgcataatatcttagttccaagctttagtcagcatgcaatggggcgttatcatgcgatgatggtcgatatcgccgtgcagcttgttcaaaagtgggagcgtctaaatgcagatgagcatattgaagtatcggaagacatgacacgtttaacgcttgatacaattggtctttgcggctttaactatcgctttaacagcttttaccgagatcagcctcatccatttattgtgagtgtggttcgtgcactggatgaagtaatgaacaagctgcagcgagcaaatccagacgacccagcttatgatgaaaacaagcgccagtgtcaagaagatatcaaggtgatgaacgactatgtagataaaattattgcagatcgcaaagcaaggggtgaacaaagtcatgatttattaacgcagatgctaaacggaaaagatccagaaacgggtgagccgcttgatgacgggaacattcgtcagcaaattattacattcttaattgcgggacaccaaacgacaagtggtcttttatcatttgcgctgtatttcttagtgaaaaatccacatgtattacaaaaagtagcagaagaagcagcacgagttctagtagatcctgttccaagctacaaacaagtcaaacagcttaaatatgttggcatggtcttaaacgaagcgctgcgcttatggccagtagcgcctatgttttccctatatgcaaaagaagatacggtgcttggaggagaatatcctttaacgaaaggcgacgaagtaatggttctggtgcctcagcttcaccgtgataaaacaatttggggagacgatgtggaggagttccgtccagagcgttttgaaaatccaagtgcgattccgcagcatgcgtttaaaccgtttggaaacggtcagcgtgcgtgtatcggtcagcagttcgctcttcatgaagcaacgctggtacttggtatgatgctaaaacactttgactttgaagatcatacaaactacgagctcgttattaaagaatcgcggacgttaaaacctgaaggctttgtggtaaaagcaaaatcgaaaggcattccgcttggcggtattccttcacctagcactgaacagtctgctaaaaaagtacgcaaaaaggcagaaaacgctcataatacgccgctgcttgtgctatacggttcaaatgcgggaacagctgaaggaacggcgcgtgatttagcagatattgcaatgagcaaaggatttgcaccgcaggtcgcaacgcttgattcacacgccggtaatcttccgcgcgaaggagctgtattaattgtaacggcgtcttataacggtcatccgcctgataacgcaaagcaatttgtcgactggttagaccaagcgtctgctgatgaagtaaaaggcgttcgctactccgtatttggatgcggcgataaaaattgggcggggacgtatcaaaaagtgcctgcttttatcgatgaaacgcttgccgctaaaggggcagaaaacatcgctgaccgcggtgaagcagatgcaagcgacgactttgaaggcacatatgaagaatggcgtgatcatatgtggagtgacgtagcagcctactttaacctcgacattgaaaacagtgaagataataaatctactctttcacttcaatttgtcgacagcgccgcggatatgccgcttgcgaaaatgcacggtgcgttttcaacgaacgtcgtagcaagcaaagaacttcaacagccaggcagtgcacgaagcacgcgacatcttgaaattgaacttccaaaagaagcttcttatcaagaaggagatcatttaggtgttattcctcgcaactatgaaggaatagtaaaccgtgtaacagcaaggttcggcctaagcgcatcacagcaaatccgtctggaagcagaagaagaaaaattagctcatttgccactcgctaaaacagtatccgtagaagagcttctgcaatacgtggagcttcaagatcctgttacgcgcacgcagcttcgcgcaatggctgctaaaacggtctgcccgccgcataaagtagagcttgaagccttgcttgaaaagcaagcctacaaagaacaagtgctggcaaaacgtttaacaatgcttgaactgcttgaaaaatacccggcgtgtgaaatgaaattcagcgaatttatcgcccttctgccaagcatacgcccgcgctattactcgatttcttcatcacctcgtgtcgatgaaaaacaagcaagcatcacggtcagcgttgtctcaggaccggcgtggagcttttatggagaatataaaggaattgcgtcgaactatcttgccgagctgcaagaaggagatacgattacgtgctttatttccacaccgcagtcagaatttacgctgccaaaagaccctgaaacgccgcttatcatggtcggaccgggaacaggcgtcgcgccgtttagaggctttgtgcaggcgcgcaaacagctaaaagaacaaggacagtcacttggagaagcacatttatacttcggctgccgttcacctcatgaagactatctgtatcaagaagagcttgaaaacgcccaaagcgaaggcatcattacgcttcataccgctttttctcgcatgccaaatcagccgaaaacatacgttcagcacgtaatggaacaagacggcaagaaattgattgaacttcttgatcaaggagcgcacttctatatttgcggagacggaagccaaatggcacctgccgttgaagcaacgcttatgaaaagctatgctgacgttcaccaagtgagtgaagcagacgctcgcttatggctgcagcagctagaagaaaaaggccgatacgcaaaagacgtgtggctgggg

SEQ ID NO: 720 - protein, 1049 aa, synthetic construct
  REGION 1..1049: note = variant of P450 oxidase from Bacillus megaterium
MTIKEMPQPKTFGELKNLPLLNTDKPVQALMRIADELGEIFKFEAPGSVTRYLSSQRLIKEACDESRFDKNLSQALKFARDFVGDGLSTSWTHEPNWKKAHNILVPSFSQHAMGRYHAMMVDIAVQLVQKWERLNADEHIEVSEDMTRLTLDTIGLCGFNYRFNSFYRDQPHPFIVSVVRALDEVMNKLQRANPDDPAYDENKRQCQEDIKVMNDYVDKIIADRKARGEQSHDLLTQMLNGKDPETGEPLDDGNIRQQIITFLIAGHQTTSGLLSFALYFLVKNPHVLQKVAEEAARVLVDPVPSYKQVKQLKYVGMVLNEALRLWPVAPMFSLYAKEDTVLGGEYPLTKGDEVMVLVPQLHRDKTIWGDDVEEFRPERFENPSAIPQHAFKPFGNGQRACIGQQFALHEATLVLGMMLKHFDFEDHTNYELVIKESRTLKPEGFVVKAKSKGIPLGGIPSPSTEQSAKKVRKKAENAHNTPLLVLYGSNAGTAEGTARDLADIAMSKGFAPQVATLDSHAGNLPREGAVLIVTASYNGHPPDNAKQFVDWLDQASADEVKGVRYSVFGCGDKNWAGTYQKVPAFIDETLAAKGAENIADRGEADASDDFEGTYEEWRDHMWSDVAAYFNLDIENSEDNKSTLSLQFVDSAADMPLAKMHGAFSTNVVASKELQQPGSARSTRHLEIELPKEASYQEGDHLGVIPRNYEGIVNRVTARFGLSASQQIRLEAEEEKLAHLPLAKTVSVEELLQYVELQDPVTRTQLRAMAAKTVCPPHKVELEALLEKQAYKEQVLAKRLTMLELLEKYPACEMKFSEFIALLPSIRPRYYSISSSPRVDEKQASITVSVVSGPAWSFYGEYKGIASNYLAELQEGDTITCFISTPQSEFTLPKDPETPLIMVGPGTGVAPFRGFVQARKQLKEQGQSLGEAHLYFGCRSPHEDYLYQEELENAQSEGIITLHTAFSRMPNQPKTYVQHVMEQDGKKLIELLDQGAHFYICGDGSQMAPAVEATLMKSYADVHQVSEADARLWLQQLEEKGRYAKDVWLG

SEQ ID NO: 721 - DNA, 3147 bp, synthetic construct
  misc_feature 1..3147: note = variant of P450 oxidase from Bacillus megaterium
  source 1..3147: mol_type = other DNA
atgacaattaaggaaatgcctcagcctaagacgtttggagaacttaaaaatttaccgttattaaacacagataaaccggttcaagctttgatgcgtattgcggatgaattaggagaaatctttaaattcgaggcgcctggtagcgtaacgcgctatttatcaagtcagcgtctaattaaagaagcatgcgatgaatcacgctttgataaaaacttaagtcaagcgcttaaatttgcacgtgattttgttggagacgggctgtctacaagctggacgcatgaaccgaattggaaaaaagcgcataatatcttagttccaagctttagtcagcatgcaatggggcgttatcatgcgatgatggtcgatatcgccgtgcagcttgttcaaaagtgggagcgtctaaatgcagatgagcatattgaagtatcggaagacatgacacgtttaacgcttgatacaattggtctttgcggctttaactatcgctttaacagcttttaccgagatcagcctcatccatttattgtgagtgtggttcgtgcactggatgaagtaatgaacaagctgcagcgagcaaatccagacgacccagcttatgatgaaaacaagcgccagtgtcaagaagatatcaaggtgatgaacgactatgtagataaaattattgcagatcgcaaagcaaggggtgaacaaagtcatgatttattaacgcagatgctaaacggaaaagatccagaaacgggtgagccgcttgatgacgggaacattcgtcagcaaattattacattcttaattgcgggacaccaaacgacaagtggtcttttatcatttgcgctgtatttcttagtgaaaaatccacatgtattacaaaaagtagcagaagaagcagcacgagttctagtagatcctgttccaagctacaaacaagtcaaacagcttaaatatgttggcatggtcttaaacgaagcgctgcgcttatggccagtagcgcctatgttttccctatatgcaaaagaagatacggtgcttggaggagaatatcctttaacgaaaggcgacgaagtaatggttctggtgcctcagcttcaccgtgataaaacaatttggggagacgatgtggaggagttccgtccagagcgttttgaaaatccaagtgcgattccgcagcatgcgtttaaaccgtttggaaacggtcagcgtgcgtgtatcggtcagcagttcgctcttcatgaagcaacgctggtacttggtatgatgctaaaacactttgactttgaagatcatacaaactacgagctcgttattaaagaatcgcggacgttaaaacctgaaggctttgtggtaaaagcaaaatcgaaaggcattccgcttggcggtattccttcacctagcactgaacagtctgctaaaaaagtacgcaaaaaggcagaaaacgctcataatacgccgctgcttgtgctatacggttcaaatgcgggaacagctgaaggaacggcgcgtgatttagcagatattgcaatgagcaaaggatttgcaccgcaggtcgcaacgcttgattcacacgccggtaatcttccgcgcgaaggagctgtattaattgtaacggcgtcttataacggtcatccgcctgataacgcaaagcaatttgtcgactggttagaccaagcgtctgctgatgaagtaaaaggcgttcgctactccgtatttggatgcggcgataaaaattgggcggggacgtatcaaaaagtgcctgcttttatcgatgaaacgcttgccgctaaaggggcagaaaacatcgctgaccgcggtgaagcagatgcaagcgacgactttgaaggcacatatgaagaatggcgtgatcatatgtggagtgacgtagcagcctactttaacctcgacattgaaaacagtgaagataataaatctactctttcacttcaatttgtcgacagcgccgcggatatgccgcttgcgaaaatgcacggtgcgttttcaacgaacgtcgtagcaagcaaagaacttcaacagccaggcagtgcacgaagcacgcgacatcttgaaattgaacttccaaaagaagcttcttatcaagaaggagatcatttaggtgttattcctcgcaactatgaaggaatagtaaaccgtgtaacagcaaggttcggcctaagcgcatcacagcaaatccgtctggaagcagaagaagaaaaattagctcatttgccactcgctaaaacagtatccgtagaagagcttctgcaatacgtggagcttcaagatcctgttacgcgcacgcagcttcgcgcaatggctgctaaaacggtctgcccgccgcataaagtagagcttgaagccttgcttgaaaagcaaggttacaaagaacaagtgctggcaaaacgtttaacaatgcttgaactgcttgaaaaatacccggcgtgtgaaatgaaattcagcgaatttatcgcccttctgccaagcatacgcccgcgctattactcgatttcttcatcacctcgtgtcgatgaaaaacaagcaagcatcacggtcagcgttgtctcaggaccggcgtggagcggatatggagaatataaaggaattgcgtcgaactatcttgccgagctgcaagaaggagatacgattacgtgctttatttccacaccgcagtcagaatttacgctgccaaaagaccctgaaacgccgcttatcatggtcggaccgggaacaggcgtcgcgccgtttagaggctttgtgcaggcgcgcaaacagctaaaagaacaaggacagtcacttggagaagcacatttatacttcggctgccgttcacctcatgaagactatctgtatcaagaagagcttgaaaacgcccaaagcgaaggcatcattacgcttcataccgctttttctcgcatgccaaatcagccgaaaacatacgttcagcacgtaatggaacaagacggcaagaaattgattgaacttcttgatcaaggagcgcacttctatatttgcggagacggaagccaaatggcacctgccgttgaagcaacgcttatgaaaagctatgctgacgttcaccaagtgagtgaagcagacgctcgcttatggctgcagcagctagaagaaaaaggccgatacgcaaaagacgtgtggctgggg

SEQ ID NO: 722 - protein, 1049 aa, synthetic construct
  REGION 1..1049: note = variant of P450 oxidase from Bacillus megaterium
MTIKEMPQPKTFGELKNLPLLNTDKPVQALMRIADELGEIFKFEAPGSVTRYLSSQRLIKEACDESRFDKNLSQALKFARDFVGDGLSTSWTHEPNWKKAHNILVPSFSQHAMGRYHAMMVDIAVQLVQKWERLNADEHIEVSEDMTRLTLDTIGLCGFNYRFNSFYRDQPHPFIVSVVRALDEVMNKLQRANPDDPAYDENKRQCQEDIKVMNDYVDKIIADRKARGEQSHDLLTQMLNGKDPETGEPLDDGNIRQQIITFLIAGHQTTSGLLSFALYFLVKNPHVLQKVAEEAARVLVDPVPSYKQVKQLKYVGMVLNEALRLWPVAPMFSLYAKEDTVLGGEYPLTKGDEVMVLVPQLHRDKTIWGDDVEEFRPERFENPSAIPQHAFKPFGNGQRACIGQQFALHEATLVLGMMLKHFDFEDHTNYELVIKESRTLKPEGFVVKAKSKGIPLGGIPSPSTEQSAKKVRKKAENAHNTPLLVLYGSNAGTAEGTARDLADIAMSKGFAPQVATLDSHAGNLPREGAVLIVTASYNGHPPDNAKQFVDWLDQASADEVKGVRYSVFGCGDKNWAGTYQKVPAFIDETLAAKGAENIADRGEADASDDFEGTYEEWRDHMWSDVAAYFNLDIENSEDNKSTLSLQFVDSAADMPLAKMHGAFSTNVVASKELQQPGSARSTRHLEIELPKEASYQEGDHLGVIPRNYEGIVNRVTARFGLSASQQIRLEAEEEKLAHLPLAKTVSVEELLQYVELQDPVTRTQLRAMAAKTVCPPHKVELEALLEKQGYKEQVLAKRLTMLELLEKYPACEMKFSEFIALLPSIRPRYYSISSSPRVDEKQASITVSVVSGPAWSGYGEYKGIASNYLAELQEGDTITCFISTPQSEFTLPKDPETPLIMVGPGTGVAPFRGFVQARKQLKEQGQSLGEAHLYFGCRSPHEDYLYQEELENAQSEGIITLHTAFSRMPNQPKTYVQHVMEQDGKKLIELLDQGAHFYICGDGSQMAPAVEATLMKSYADVHQVSEADARLWLQQLEEKGRYAKDVWLG

SEQ ID NO: 723 - DNA, 3147 bp, synthetic construct
  misc_feature 1..3147: note = variant of P450 oxidase from Bacillus megaterium
  source 1..3147: mol_type = other DNA
atgacaattaaggaaatgcctcagcctaagacgtttggagaacttaaaaatttaccgttattaaacacagataaaccggttcaagctttgatgcgtattgcggatgaattaggagaaatctttaaattcgaggcgcctggtagcgtaacgcgctatttatcaagtcagcgtctaattaaagaagcatgcgatgaatcacgctttgataaaaacttaagtcaagcgcttaaatttgcacgtgattttgttggagacgggctgtctacaagctggacgcatgaaccgaattggaaaaaagcgcataatatcttagttccaagctttagtcagcatgcaatggggcgttatcatgcgatgatggtcgatatcgccgtgcagcttgttcaaaagtgggagcgtctaaatgcagatgagcatattgaagtatcggaagacatgacacgtttaacgcttgatacaattggtctttgcctgtttaactatcgctttaacagcttttaccgagatacgcctcatccatttattgtgagtgtggttcgtgcactggatgaagtaatgaacaagctgcagcgagcaaatccagacgacccagcttatgatgaaaacaagcgccagtgtcaagaagatatcaaggtgatgaacgactatgtagataaaattattgcagatcgcaaagcaaggggtgaacaaagtcatgatttattaacgcagatgctaaacggaaaagatccagaaacgggtgagccgcttgatgacgggaacattcgtcagcaaattattacattcttaattgcgggacaccaaacgacaagtggtcttttatcatttgcgctgtatttcttagtgaaaaatccacatgtattacaaaaagtagcagaagaagcagcacgagttctagtagatcctgttccaagctacaaacaagtcaaacagcttaaatatgttggcatggtcttaaacgaagcgctgcgcttatggccagtagcgcctatgttttccctatatgcaaaagaagatacggtgcttggaggagaatatcctttaacgaaaggcgacgaagtaatggttctggtgcctcagcttcaccgtgataaaacaatttggggagacgatgtggaggagttccgtccagagcgttttgaaaatccaagtgcgattccgcagcatgcgtttaaaccgtttggaaacggtcagcgtgcgtgtatcggtcagcagttcgctcttcatagtgcaacgctggtacttggtatgatgctaaaacactttgactttgaagatcatacaaactacgagctcgttattaaagaatcgcggacgttaaaacctgaaggctttgtggtaaaagcaaaatcgaaaggcattccgcttggcggtattccttcacctagcactgaacagtctgctaaaaaagtacgcaaaaaggcagaaaacgctcataatacgccgctgcttgtgctatacggttcaaatgcgggaacagctgaaggaacggcgcgtgatttagcagatattgcaatgagcaaaggatttgcaccgcaggtcgcaacgcttgattcacacgccggtaatcttccgcgcgaaggagctgtattaattgtaacggcgtcttataacggtcatccgcctgataacgcaaagcaatttgtcgactggttagaccaagcgtctccggatgaagtaaaaggcgttcgctactccgtatttggatgcggcgataaaaattgggcggggacgtatcaaaaagtgcctgcttttatcgatgaaacgcttgccgctaaaggggcagaaaacatcgctgaccgcggtgaagcagatgcaagcgacgactttgaaggcacatatgaagaatggcgtgatcatatgtggagtgacgtagcagcctactttggtctcgacattgaaaacagtgaagataataaatctactctttcacttcaatttgtcgacagcgccgcggatatgccgcttgcgaaaatgcacggtgcgttttcaacgaacgtcgtagcaagcaaagaacttcaacagccaggcagtgcacgaagcacgcgacatcttgaaattgaacttccaaaagtagcttcttatcaagaaggagatcatttaggtgttattcctcgcaactatgaaggaatagtaaaccgtgtaacagcaaggttcggcctaagcgcatcacagctgatccgtctggaagcagaagaagaaaaattagctcatttgccactcgctaaaacagtatccgtagaagagcttctgcaatacgtggagcttcaagatcctgttacgcgcacgcagcttcgcgcaatggctgctaaaacggtctgcccgccgcataaagtagagcttgaagccttgcttggcaagcaagcctacaaagaacaagtgctggcaaaacgtttaacaatgcttgaactgcttgaaaaatacccggcgtgtgaaatgagtttcagcgaatttatcgcccttctgccaagcatacgcccgcgctattactcgatttcttcatcacctcgtgtcgatgaaaaacaagcaagcatcacggtcagcgttgtctcaggaccggcgtggagcggatatggagaatataaaggaattgcgtcgaactatcttgccgagctgcaagaaggagatacgattacgtgctttatttccacaccgcagtcagagtttacgctgccaaaagaccctgaaacgccgcttatcatggtcggaccgggaacaggcgtcgcgccgtttagaggctttgtgcaggcgcgcaaacagctaaaagaacaaggacagtcacttggagaagcacatttatacttcggctgccgttcacctcatgaagactatctgtatcaagaagagcttgaaaacgcccaaagcgaaggcatcattacgcttcataccgctttttctcgcatgccgaatcagccgaaaacatacgttcagcacgtaatggaacaagacggcaagaaattgattgaacttcttgatcaaggagcgcacttctatatttgcggagacggaagccaaatggcacctgccgttgaagcaacgcttatgaaaagctatgctgacgttcaccaagtgagtgaagcagacgctcgcttatggctgcagcagctagaagaaaaaggccgatacgcaaaagacgtgtggctgggg

SEQ ID NO: 724 - protein, 1049 aa, synthetic construct
  REGION 1..1049: note = variant of P450 oxidase from Bacillus megaterium
MTIKEMPQPKTFGELKNLPLLNTDKPVQALMRIADELGEIFKFEAPGSVTRYLSSQRLIKEACDESRFDKNLSQALKFARDFVGDGLSTSWTHEPNWKKAHNILVPSFSQHAMGRYHAMMVDIAVQLVQKWERLNADEHIEVSEDMTRLTLDTIGLCLFNYRFNSFYRDTPHPFIVSVVRALDEVMNKLQRANPDDPAYDENKRQCQEDIKVMNDYVDKIIADRKARGEQSHDLLTQMLNGKDPETGEPLDDGNIRQQIITFLIAGHQTTSGLLSFALYFLVKNPHVLQKVAEEAARVLVDPVPSYKQVKQLKYVGMVLNEALRLWPVAPMFSLYAKEDTVLGGEYPLTKGDEVMVLVPQLHRDKTIWGDDVEEFRPERFENPSAIPQHAFKPFGNGQRACIGQQFALHSATLVLGMMLKHFDFEDHTNYELVIKESRTLKPEGFVVKAKSKGIPLGGIPSPSTEQSAKKVRKKAENAHNTPLLVLYGSNAGTAEGTARDLADIAMSKGFAPQVATLDSHAGNLPREGAVLIVTASYNGHPPDNAKQFVDWLDQASPDEVKGVRYSVFGCGDKNWAGTYQKVPAFIDETLAAKGAENIADRGEADASDDFEGTYEEWRDHMWSDVAAYFGLDIENSEDNKSTLSLQFVDSAADMPLAKMHGAFSTNVVASKELQQPGSARSTRHLEIELPKVASYQEGDHLGVIPRNYEGIVNRVTARFGLSASQLIRLEAEEEKLAHLPLAKTVSVEELLQYVELQDPVTRTQLRAMAAKTVCPPHKVELEALLGKQAYKEQVLAKRLTMLELLEKYPACEMSFSEFIALLPSIRPRYYSISSSPRVDEKQASITVSVVSGPAWSGYGEYKGIASNYLAELQEGDTITCFISTPQSEFTLPKDPETPLIMVGPGTGVAPFRGFVQARKQLKEQGQSLGEAHLYFGCRSPHEDYLYQEELENAQSEGIITLHTAFSRMPNQPKTYVQHVMEQDGKKLIELLDQGAHFYICGDGSQMAPAVEATLMKSYADVHQVSEADARLWLQQLEEKGRYAKDVWLG

SEQ ID NO: 725 - DNA, 3147 bp, synthetic construct
  misc_feature 1..3147: note = variant of P450 oxidase from Bacillus megaterium
  source 1..3147: mol_type = other DNA
atgacaattaaggaaatgcctcagcctaagacgtttggagaacttaaaaatttaccgttattaaacacagataaaccggttcaagctttgatgcgtattgcggatgaattaggagaaatctttaaattcgaggcgcctggtagcgtaacgcgctatttatcaagtcagcgtctaattaaagaagcatgcgatgaatcacgctttgataaaaacttaagtcaagcgcttaaatttgcacgtgattttgttggagacgggctgtctacaagctggacgcatgaaccgaattggaaaaaagcgcataatatcttagttccaagctttagtcagcatgcaatggggcgttatcatgcgatgatggtcgatatcgccgtgcagcttgttcaaaagtgggagcgtctaaatgcagatgagcatattgaagtatcggaagacatgacacgtttaacgcttgatacaattggtctttgcctgtttaactatcgctttaacagcttttaccgagatacgcctcatccatttattgtgagtgtggttcgtgcactggatgaagtaatgaacaagctgcagcgagcaaatccagacgacccagcttatgatgaaaacaagcgccagtgtcaagaagatatcaaggtgatgaacgactatgtagataaaattattgcagatcgcaaagcaaggggtgaacaaagtcatgatttattaacgcagatgctaaacggaaaagatccagaaacgggtgagccgcttgatgacgggaacattcgtcagcaaattattacattcttaattgcgggacaccaaacgacaagtggtcttttatcatttgcgctgtatttcttagtgaaaaatccacgtgtattacaaaaagtagcagaagaagcagcacgagttctagtagatcctgttccaagctacaaacaagtcaaacagcttaaatatgttggcatggtcttaaacgaagcgctgcgcttatggccagtagcgcctatgttttccctatatgcaaaagaagatacggtgcttggaggagaatatcctttaacgaaaggcgacgaagtaatggttctggtgcctcagcttcaccgtgataaaacaatttggggagacgatgtggaggagttccgtccagagcgttttgaaaatccaagtgcgattccgcagcatgcgtttaaaccgtttggaaacggtcagcgtgcgtgtatcggtcagcagttcgctcttcatagtgcaacgctggtacttggtatgatgctaaaacactttgactttgaagatcatacaaactacgagctcgttattaaagaatcgcggacgttaaaacctgaaggctttgtggtaaaagcaaaatcgaaaggcattccgcttggcggtattccttcacctagcactgaacagtctgctaaaaaagtacgcaaaaaggcagaaaacgctcataatacgccgctgcttgtgctatacggttcaaatgcgggaacagctgaaggaacggcgcgtgatttagcagatattgcaatgagcaaaggatttgcaccgcaggtcgcaacgcttgattcacacgccggtaatcttccgcgcgaaggagctgtattaattgtaacggcgtcttataacggtcatccgcctgataacgcaaagcaatttgtcgactggttagaccaagcgtctgcggatgaagtaaaaggcgttcgctactccgtatttggatgcggcgataaaaattgggcggggacgtatcaaaaagtgcctgcttttatcgatgaaacgcttgccgctaaaggggcagaaaacatcgctgaccgcggtgaagcagatgcaagcgacgactttgaaggcacatatgaagaatggcgtgatcatatgtggagtgacgtagcagcctactttggtctcgacattgaaaacagtgaagataataaatctactctttcacttcaatttgtcgacagctcggcggatatgccgcttgcgaaaatgcacggtgcgttttcaacgaacgtcgtagcaagcaaagaacttcaacagaaaggcagtgcacgaagcacgcgacatcttgaaattgaacttccaaaagaagcttcttatcaagaaggagatcatttaggtgttattcctcgcaactatgaaggaatagtaaaccgtgtaacagcaaggttcggcctaagcgcatcacagctgatccgtctggaagcagaagaagaaaaattagctcatttgccactcgctaaaacagtatccgtagaagagcttctgcaatacgtggagcttcaagatcctgttacgcgcacgcagcttcgcgcaatggctgctaaaacggtctgcccgccgcataaagtagagcttgaagccttgcttgggaaaccggcctacaaagaacaagtgctggcaaaacgtttaacaatgcttgaactgcttgaaaaatacccggcgtgtgaaatgagtttcagcgaatttatcgcccttctgccaagcatacgcccgcgctattactcgatttcttcatcacctcgtgtcgatgaaaaacaagcaagcatcacggtcagcgttgtctcaggaccggcgtggagcggatatggagaatataaaggaattgcgtcgaactatcttgccgagctgcaagaaggagatacgattacgtgctttatttccacaccgcagtcagagtttacgctgccaaaagaccctgaaacgccgcttatcatggtcggaccgggaacaggcgtcgcgccgtttagaggctttgtgcaggcgcgcaaacagctaaaagaacaaggacagtcacttggagaagcacatttatacttcggctgccgttcacctcatgaagactatctgtatcaagaagagcttgaaaacgcccaaagcgaaggcatcattacgcttcataccgctttttctcgcatgccgaatcagccgaaaacatacgttcagcacgtaatggaacaagacggcaagaaattgattgaacttcttgatcaaggagcgcacttctatatttgcggagacggaagccaaatggcacctgccgttgaagcaacgcttatgaaaagctatgctgacgttcaccaagtgagtgaagcagacgctcgcttatggctgcagcagctagaagaaaaaggccgatacgcaaaagacgtgtggctgggg

SEQ ID NO: 726 - protein, 1049 aa, synthetic construct
  REGION 1..1049: note = variant of P450 oxidase from Bacillus megaterium
MTIKEMPQPKTFGELKNLPLLNTDKPVQALMRIADELGEIFKFEAPGSVTRYLSSQRLIKEACDESRFDKNLSQALKFARDFVGDGLSTSWTHEPNWKKAHNILVPSFSQHAMGRYHAMMVDIAVQLVQKWERLNADEHIEVSEDMTRLTLDTIGLCLFNYRFNSFYRDTPHPFIVSVVRALDEVMNKLQRANPDDPAYDENKRQCQEDIKVMNDYVDKIIADRKARGEQSHDLLTQMLNGKDPETGEPLDDGNIRQQIITFLIAGHQTTSGLLSFALYFLVKNPRVLQKVAEEAARVLVDPVPSYKQVKQLKYVGMVLNEALRLWPVAPMFSLYAKEDTVLGGEYPLTKGDEVMVLVPQLHRDKTIWGDDVEEFRPERFENPSAIPQHAFKPFGNGQRACIGQQFALHSATLVLGMMLKHFDFEDHTNYELVIKESRTLKPEGFVVKAKSKGIPLGGIPSPSTEQSAKKVRKKAENAHNTPLLVLYGSNAGTAEGTARDLADIAMSKGFAPQVATLDSHAGNLPREGAVLIVTASYNGHPPDNAKQFVDWLDQASADEVKGVRYSVFGCGDKNWAGTYQKVPAFIDETLAAKGAENIADRGEADASDDFEGTYEEWRDHMWSDVAAYFGLDIENSEDNKSTLSLQFVDSSADMPLAKMHGAFSTNVVASKELQQKGSARSTRHLEIELPKEASYQEGDHLGVIPRNYEGIVNRVTARFGLSASQLIRLEAEEEKLAHLPLAKTVSVEELLQYVELQDPVTRTQLRAMAAKTVCPPHKVELEALLGKPAYKEQVLAKRLTMLELLEKYPACEMSFSEFIALLPSIRPRYYSISSSPRVDEKQASITVSVVSGPAWSGYGEYKGIASNYLAELQEGDTITCFISTPQSEFTLPKDPETPLIMVGPGTGVAPFRGFVQARKQLKEQGQSLGEAHLYFGCRSPHEDYLYQEELENAQSEGIITLHTAFSRMPNQPKTYVQHVMEQDGKKLIELLDQGAHFYICGDGSQMAPAVEATLMKSYADVHQVSEADARLWLQQLEEKGRYAKDVWLG

SEQ ID NO: 727 - DNA, 3147 bp, synthetic construct
  misc_feature 1..3147: note = variant of P450 oxidase from Bacillus megaterium
  source 1..3147: mol_type = other DNA
atgacaattaaggaaatgcctcagcctaagacgtttggagaacttaaaaatttaccgttattaaacacagataaaccggttcaagctttgatgcgtattgcggatgaattaggagaaatctttaaattcgaggcgcctggtagcgtaacgcgctatttatcaagtcagcgtctaattaaagaagcatgcgatgaatcacgctttgataaaaacttaagtcaagcgcttaaatttgcacgtgattttgttggagacgggctgtctacaagctggacgcatgaaccgaattggaaaaaagcgcataatatcttagttccaagctttagtcagcatgcaatggggcgttatcatgcgatgatggtcgatatcgccgtgcagcttgttcaaaagtgggagcgtctaaatgcagatgagcatattgaagtatcggaagacatgacacgtttaacgcttgatacaattggtctttgcctgtttaactatcgctttaacagcttttaccgagatacgcctcatccatttattgtgagtgtggttcgtgcactggatgaagtaatgaacaagctgcagcgagcaaatccagacgacccagcttatgatgaaaacaagcgccagtgtcaagaagatatcaaggtgatgaacgactatgtagataaaattattgcagatcgcaaagcaaggggtgaacaaagtcatgatttattaacgcagatgctaaacggaaaagatccagaaacgggtgagccgcttgatgacgggaacattcgtcagcaaattattacattcttaattgcgggacaccaaacgacaagtggtcttttatcatttgcgctgtatttcttagtgaaaaatccacgtgtattacaaaaagtagcagaagaagcagcacgagttctagtagatcctgttccaagctacaaacaagtcaaacagcttaaatatgttggcatggtcttaaacgaagcgctgcgcttatggccagtagcgcctatgttttccctatatgcaaaagaagatacggtgcttggaggagaatatcctttaacgaaaggcgacgaagtaatggttctggtgcctcagcttcaccgtgataaaacaatttggggagacgatgtggaggagttccgtccagagcgttttgaaaatccaagtgcgattccgcagcatgcgtttaaaccgtttggaaacggtcagcgtgcgtgtatcggtcagcagttcgctcttcatgaagcaacgctggtacttggtatgatgctaaaacactttgactttgaagatcatacaaactacgagctcgttattaaagaatcgcggacgttaaaacctgaaggctttgtggtaaaagcaaaatcgaaaggcattccgcttggcggtattccttcacctagcactgaacagtctgctaaaaaagtacgcaaaaaggcagaaaacgctcataatacgccgctgcttgtgctatacggttcaaatgcgggaacagctgaaggaacggcgcgtgatttagcagatattgcaatgagcaaaggatttgcaccgcaggtcgcaacgcttgattcacacgccggtaatcttccgcgcgaaggagctgtattaattgtaacggcgtcttataacggtcatccgcctgataacgcaaagcaatttgtcgactggttagaccaagcgtctgctgatgaagtaaaaggcgttcgctactccgtatttggatgcggcgataaaaattgggcggggacgtatcaaaaagtgcctgcttttatcgatgaaacgcttgccgctaaaggggcagaaaacatcgctgaccgcggtgaagcagatgcaagcgacgactttgaaggcacatatgaagaatggcgtgatcatatgtggagtgacgtagcagcctactttggtctcgacattgaaaacagtgaagataataaatctactctttcacttcaatttgtcgacagcgccgcggatatgccgcttgcgaaaatgcacggtgcgttttcaacgaacgtcgtagcaagcaaagaacttcaacagcctggcagtgcacgaagcacgcgacatcttgaaattgaacttccaaaagtagcttcttatcaagaaggagatcatttaggtgttattcctcgcaattatgaaggaatagtaaaccgtgtaacagcaaggttcggcctaagcgcatcacagctgatccgtctggaagcagaagaagaaaaattagctcatttgccactcgctaaaacagtatccgtagaagagcttctgcaatacgtggagcttcaagatcctgttacgcgcacgcagcttcgcgcaatggctgctaaaacggtctgcccgccgcataaagtagagcttgaagccttgcttcgcaagcaagcctacaaagaacaagtgctggcaaaacgtttaacaatgcttgaactgcttgaaaaatacccggcgtgtgaaatgagtttcagcgaatttatcgcccttctgccaagcatacgcccgcgctattactcgatttcttcatcacctcgtgtcgatgaaaaacaagcaagcatcacggtcagcgttgtctcaggaccggcgtggagcggatatggagaatataaaggaattgcgtcgaactatcttgccgagctgcaagaaggagatacgattacgtgctttatttccacaccgcagtcagagtttacgctgccaaaagaccctgaaacgccgcttatcatggtcggaccgggaacaggcgtcgcgccgtttagaggctttgtgcaggcgcgcaaacagctaaaagaacaaggacagtcacttggagaagcacatttatacttcggctgccgttcacctcatgaagactatctgtatcaagaagagcttgaaaacgcccaaagcgaaggcatcattacgcttcataccgctttttctcgcatgccgaatcagccgaaaacatacgttcagcacgtaatggaacaagacggcaagaaattgattgaacttcttgatcaaggagcgcacttctatatttgcggagacggaagccaaatggcacctgccgttgaagcaacgcttatgaaaagctatgctgacgttcaccaagtgagtgaagcagacgctcgcttatggctgcagcagctagaagaaaaaggccgatacgcaaaagacgtgtggctgggg

SEQ ID NO: 728 - protein, 1049 aa, synthetic construct
  REGION 1..1049: note = variant of P450 oxidase from Bacillus megaterium
MTIKEMPQPKTFGELKNLPLLNTDKPVQALMRIADELGEIFKFEAPGSVTRYLSSQRLIKEACDESRFDKNLSQALKFARDFVGDGLSTSWTHEPNWKKAHNILVPSFSQHAMGRYHAMMVDIAVQLVQKWERLNADEHIEVSEDMTRLTLDTIGLCLFNYRFNSFYRDTPHPFIVSVVRALDEVMNKLQRANPDDPAYDENKRQCQEDIKVMNDYVDKIIADRKARGEQSHDLLTQMLNGKDPETGEPLDDGNIRQQIITFLIAGHQTTSGLLSFALYFLVKNPRVLQKVAEEAARVLVDPVPSYKQVKQLKYVGMVLNEALRLWPVAPMFSLYAKEDTVLGGEYPLTKGDEVMVLVPQLHRDKTIWGDDVEEFRPERFENPSAIPQHAFKPFGNGQRACIGQQFALHEATLVLGMMLKHFDFEDHTNYELVIKESRTLKPEGFVVKAKSKGIPLGGIPSPSTEQSAKKVRKKAENAHNTPLLVLYGSNAGTAEGTARDLADIAMSKGFAPQVATLDSHAGNLPREGAVLIVTASYNGHPPDNAKQFVDWLDQASADEVKGVRYSVFGCGDKNWAGTYQKVPAFIDETLAAKGAENIADRGEADASDDFEGTYEEWRDHMWSDVAAYFGLDIENSEDNKSTLSLQFVDSAADMPLAKMHGAFSTNVVASKELQQPGSARSTRHLEIELPKVASYQEGDHLGVIPRNYEGIVNRVTARFGLSASQLIRLEAEEEKLAHLPLAKTVSVEELLQYVELQDPVTRTQLRAMAAKTVCPPHKVELEALLRKQAYKEQVLAKRLTMLELLEKYPACEMSFSEFIALLPSIRPRYYSISSSPRVDEKQASITVSVVSGPAWSGYGEYKGIASNYLAELQEGDTITCFISTPQSEFTLPKDPETPLIMVGPGTGVAPFRGFVQARKQLKEQGQSLGEAHLYFGCRSPHEDYLYQEELENAQSEGIITLHTAFSRMPNQPKTYVQHVMEQDGKKLIELLDQGAHFYICGDGSQMAPAVEATLMKSYADVHQVSEADARLWLQQLEEKGRYAKDVWLG

SEQ ID NO: 729 - DNA, 3147 bp, synthetic construct
  misc_feature 1..3147: note = variant of P450 oxidase from Bacillus megaterium
  source 1..3147: mol_type = other DNA
atgacaattaaggaaatgcctcagcctaagacgtttggagaacttaaaaatttaccgttattaaacacagataaaccggttcaagctttgatgcgtattgcggatgaattaggagaaatctttaaattcgaggcgcctggtagcgtaacgcgctatttatcaagtcagcgtctaattaaagaagcatgcgatgaatcacgctttgataaaaacttaagtcaagcgcttaaatttgcacgtgattttgttggagacgggctgtctacaagctggacgcatgaaccgaattggaaaaaagcgcataatatcttagttccaagctttagtcagcatgcaatggggcgttatcatgcgatgatggtcgatatcgccgtgcagcttgttcaaaagtgggagcgtctaaatgcagatgagcatattgaagtatcggaagacatgacacgtttaacgcttgatacaattggtctttgcctgtttaactatcgctttaacagcttttaccgagatacgcctcatccatttattgtgagtgtggttcgtgcactggatgaagtaatgaacaagctgcagcgagcaaatccagacgacccagcttatgatgaaaacaagcgccagtgtcaagaagatatcaaggtgatgaacgactatgtagataaaattattgcagatcgcaaagcaaggggtgaacaaagtcatgatttattaacgcagatgctaaacggaaaagatccagaaacgggtgagccgcttgatgacgggaacattcgtcagcaaattattacattcttaattgcgggacaccaaacgacaagtggtcttttatcatttgcgctgtatttcttagtgaaaaatccacatgtattacaaaaagtagcagaagaagcagcacgagttctagtagatcctgttccaagctacaaacaagtcaaacagcttaaatatgttggcatggtcttaaacgaagcgctgcgcttatggccagtagcgcctatgttttccctatatgcaaaagaagatacggtgcttggaggagaatatcctttaacgaaaggcgacgaagtaatggttctggtgcctcagcttcaccgtgataaaacaatttggggagacgatgtggaggagttccgtccagagcgttttgaaaatccaagtgcgattccgcagcatgcgtttaaaccgtttggaaacggtcagcgtgcgtgtatcggtcagcagttcgctcttcatagtgcaacgctggtacttggtatgatgctaaaacactttgactttgaagatcatacaaactacgagctcgttattaaagaatcgcggacgttaaaacctgaaggctttgtggtaaaagcaaaatcgaaaggcattccgcttggcggtattccttcacctagcactgaacagtctgctaaaaaagtacgcaaaaaggcagaaaacgctcataatacgccgctgcttgtgctatacggttcaaatgcgggaacagctgaaggaacggcgcgtgatttagcagatattgcaatgagcaaaggatttgcaccgcaggtcgcaacgcttgattcacacgccggtaatcttccgcgcgaaggagctgtattaattgtaacggcgtcttataacggtcatccgcctgataacgcaaagcaatttgtcgactggttagaccaagcgtctccggatgaagtaaaaggcgttcgctactccgtatttggatgcggcgataaaaattgggcggggacgtatcaaaaagtgcctgcttttatcgatgaaacgcttgccgctaaaggggcagaaaacatcgctgaccgcggtgaagcagatgcaagcgacgactttgaaggcacatatgaagaatggcgtgatcatatgtggagtgacgtagcagcctactttggtctcgacattgaaaacagtgaagataataaatctactctttcacttcaatttgtcgacagcgccgcggatatgccgcttgcgaaaatgcacggtgcgttttcaacgaacgtcgtagcaagcaaagaacttcaacagaaaggcagtgcacgaagcacgcgacatcttgaaattgaacttccaaaagaagcttcttatcaagaaggagatcatttaggtgttattcctcgcaactatgaaggaatagtaaaccgtgtaacagcaaggttcggcctaagcgcatcacagctgatccgtctggaagcagaagaagaaaaattagctcatttgccactcgctaaaacagtatccgtagaagagcttctgcaatacgtggagcttcaagatcctgttacgcgcacgcagcttcgcgcaatggctgctaaaacggtctgcccgccgcataaagtagagcttgaagccttgcttggcaagcaagcctacaaagaacaagtgctggcaaaacgtttaacaatgcttgaactgcttgaaaaatacccggcgtgtgaaatgagtttcagcgaatttatcgcccttctgccaagcatacgcccgcgctattactcgatttcttcatcacctcgtgtcgatgaaaaacaagcaagcatcacggtcagcgttgtctcaggaccggcgtggagcggatatggagaatataaaggaattgcgtcgaactatcttgccgagctgcaagaaggagatacgattacgtgctttatttccacaccgcagtcagggtttacgctgccaaaagaccctgaaacgccgcttatcatggtcggaccgggaacaggcgtcgcgccgtttagaggctttgtgcaggcgcgcaaacagctaaaagaaaacggacagtcacttggagaagcacatttatacttcggctgccgttcacctcatgaagactatctgtatcaagaagagcttgaaaacgcccaaagcgaaggcatcattacgcttcataccgctttttctcgcatgccgaatcagccgaaaacatacgttcagcacgtaatggaacaagacggcaagaaattgattgaacttcttgattcgggagcgcacttctatatttgcggagacggaagccaaatggcacctgccgttgaagcaacgcttatgaaaagctatgctgacgttcaccaagtgagtgaagcagacgctcgcttatggctgcagcagctagaagaaaaaggccgatacgcaaaagacgtgtggctgggg

SEQ ID NO: 730 - protein, 1049 aa, synthetic construct
  REGION 1..1049: note = variant of P450 oxidase from Bacillus megaterium
MTIKEMPQPKTFGELKNLPLLNTDKPVQALMRIADELGEIFKFEAPGSVTRYLSSQRLIKEACDESRFDKNLSQALKFARDFVGDGLSTSWTHEPNWKKAHNILVPSFSQHAMGRYHAMMVDIAVQLVQKWERLNADEHIEVSEDMTRLTLDTIGLCLFNYRFNSFYRDTPHPFIVSVVRALDEVMNKLQRANPDDPAYDENKRQCQEDIKVMNDYVDKIIADRKARGEQSHDLLTQMLNGKDPETGEPLDDGNIRQQIITFLIAGHQTTSGLLSFALYFLVKNPHVLQKVAEEAARVLVDPVPSYKQVKQLKYVGMVLNEALRLWPVAPMFSLYAKEDTVLGGEYPLTKGDEVMVLVPQLHRDKTIWGDDVEEFRPERFENPSAIPQHAFKPFGNGQRACIGQQFALHSATLVLGMMLKHFDFEDHTNYELVIKESRTLKPEGFVVKAKSKGIPLGGIPSPSTEQSAKKVRKKAENAHNTPLLVLYGSNAGTAEGTARDLADIAMSKGFAPQVATLDSHAGNLPREGAVLIVTASYNGHPPDNAKQFVDWLDQASPDEVKGVRYSVFGCGDKNWAGTYQKVPAFIDETLAAKGAENIADRGEADASDDFEGTYEEWRDHMWSDVAAYFGLDIENSEDNKSTLSLQFVDSAADMPLAKMHGAFSTNVVASKELQQKGSARSTRHLEIELPKEASYQEGDHLGVIPRNYEGIVNRVTARFGLSASQLIRLEAEEEKLAHLPLAKTVSVEELLQYVELQDPVTRTQLRAMAAKTVCPPHKVELEALLGKQAYKEQVLAKRLTMLELLEKYPACEMSFSEFIALLPSIRPRYYSISSSPRVDEKQASITVSVVSGPAWSGYGEYKGIASNYLAELQEGDTITCFISTPQSGFTLPKDPETPLIMVGPGTGVAPFRGFVQARKQLKENGQSLGEAHLYFGCRSPHEDYLYQEELENAQSEGIITLHTAFSRMPNQPKTYVQHVMEQDGKKLIELLDSGAHFYICGDGSQMAPAVEATLMKSYADVHQVSEADARLWLQQLEEKGRYAKDVWLG

SEQ ID NO: 731 - DNA, 3147 bp, synthetic construct
  misc_feature 1..3147: note = variant of P450 oxidase from Bacillus megaterium
  source 1..3147: mol_type = other DNA
atgacaattaaggaaatgcctcagcctaagacgtttggagaacttaaaaatttaccgttattaaacacagataaaccggttcaagctttgatgcgtattgcggatgaattaggagaaatctttaaattcgaggcgcctggtagcgtaacgcgctatttatcaagtcagcgtctaattaaagaagcatgcgatgaatcacgctttgataaaaacttaagtcaagcgcttaaatttgcacgtgattttgttggagacgggctgtctacaagctggacgcatgaaccgaattggaaaaaagcgcataatatcttagttccaagctttagtcagcatgcaatggggcgttatcatgcgatgatggtcgatatcgccgtgcagcttgttcaaaagtgggagcgtctaaatgcagatgagcatattgaagtatcggaagacatgacacgtttaacgcttgatacaattggtctttgcctgtttaactatcgctttaacagcttttaccgagatacgcctcatccatttattgtgagtgtggttcgtgcactggatgaagtaatgaacaagctgcagcgagcaaatccagacgacccagcttatgatgaaaacaagcgccagtgtcaagaagatatcaaggtgatgaacgactatgtagataaaattattgcagatcgcaaagcaaggggtgaacaaagtcatgatttattaacgcagatgctaaacggaaaagatccagaaacgggtgagccgcttgatgacgggaacattcgtcagcaaattattacattcttaattgcgggacaccaaacgacaagtggtcttttatcatttgcgctgtatttcttagtgaaaaatccacatgtattacaaaaagtagcagaagaagcagcacgagttctagtagatcctgttccaagctacaaacaagtcaaacagcttaaatatgttggcatggtcttaaacgaagcgctgcgcttatggccagtagcgcctatgttttccctatatgcaaaagaagatacggtgcttggaggagaatatcctttaacgaaaggcgacgaagtaatggttctggtgcctcagcttcaccgtgataaaacaatttggggagacgatgtggaggagttccgtccagagcgttttgaaaatccaagtgcgattccgcagcatgcgtttaaaccgtttggaaacggtcagcgtgcgtgtatcggtcagcagttcgctcttcatagtgcaacgctggtacttggtatgatgctaaaacactttgactttgaagatcatacaaactacgagctcgttattaaagaatcgcggacgttaaaacctgaaggctttgtggtaaaagcaaaatcgaaaggcattccgcttggcggtattccttcacctagcactgaacagtctgctaaaaaagtacgcaaaaaggcagaaaacgctcataatacgccgctgcttgtgctatacggttcaaatgcgggaacagctgaaggaacggcgcgtgatttagcagatattgcaatgagcaaaggatttgcaccgcaggtcgcaacgcttgattcacacgccggtaatcttccgcgcgaaggagctgtattaattgtaacggcgtcttataacggtcatccgcctgataacgcaaagcaatttgtcgactggttagaccaagcgtctgcggatgaagtaaaaggcgttcgctactccgtatttggatgcggcgataaaaattgggcggggacgtatcaaaaagtgcctgcttttatcgatgaaacgcttgccgctaaaggggcagaaaacatcgctgaccgcggtgaagcagatgcaagcgacgactttgaaggcacatatgaagaatggcgtgatcatatgtggagtgacgtagcagcctactttggtctcgacattgaaaacagtgaagataataaatctactctttcacttttttttgtcgacagctcggcggatatgccgcttgcgaaaatgcacggtgcgttttcaacgaacgtcgtagcaagcaaagaacttcaacagccaggcagtgcacgaagcacgcgacatcttgaaattgaacttccaaaagaagcttcttatcaagaaggagatcatttaggtgttattcctcgcaactatgaaggaatagtaaaccgtgtaacagcaaggttcggcctaagcgcatcacagctgatccgtctggaagcagaagaagaaaaattagctcatttgccactcgctaaaacagtatccgtagaagagcttctgcaatacgtggagcttcaagatcctgttacgcgcacgcagcttcgcgcaatggctgctaaaacggtctgcccgccgcataaagtagagcttgaagccttgcttggcaagcaagcctacaaagaacaagtgctggcaaaacgtttaacaatgcttgaactgcttgaaaaatacccggcgtgtgaaatgagtttcagcgaatttatcgcccttctgccaagcatacgcccgcgctattactcgatttcttcatcacctcgtgtcgatgaaaaacaagcaagcatcacggtcagcgttgtctcaggaccggcgtggagcggatatggagaatataaaggaattgcgtcgaactatcttgccgagctgcaagaaggagatacgattacgtgctttatttccacaccgcagtcagagtttacgctgccaaaagaccctgaaacgccgcttatcatggtcggaccgggaacaggcgtcgcgccgtttagaggctttgtgcaggcgcgcaaacagctaaaagaacaaggacagtcacttggagaagcacatttatacttcggctgccgttcacctcatgaagactatctgtatcaagaagagcttgaaaacgcccaaagcgaaggcatcattacgcttcataccgctttttctcgcatgccgaatcagccgaaaacatacgttcagcacgtaatggaacaagacggcaagaaattgattgaacttcttgatcaaggagcgcacttctatatttgcggagacggaagccaaatggcacctgccgttgaagcaacgcttatgaaaagctatgctgacgttcaccaagtgagtgaagcagacgctcgcttatggctgcagcagctagaagaaaaaggccgatacgcaaaagacgtgtggctgggg

SEQ ID NO: 732 - protein, 1049 aa, synthetic construct
  REGION 1..1049: note = variant of P450 oxidase from Bacillus megaterium
MTIKEMPQPKTFGELKNLPLLNTDKPVQALMRIADELGEIFKFEAPGSVTRYLSSQRLIKEACDESRFDKNLSQALKFARDFVGDGLSTSWTHEPNWKKAHNILVPSFSQHAMGRYHAMMVDIAVQLVQKWERLNADEHIEVSEDMTRLTLDTIGLCLFNYRFNSFYRDTPHPFIVSVVRALDEVMNKLQRANPDDPAYDENKRQCQEDIKVMNDYVDKIIADRKARGEQSHDLLTQMLNGKDPETGEPLDDGNIRQQIITFLIAGHQTTSGLLSFALYFLVKNPHVLQKVAEEAARVLVDPVPSYKQVKQLKYVGMVLNEALRLWPVAPMFSLYAKEDTVLGGEYPLTKGDEVMVLVPQLHRDKTIWGDDVEEFRPERFENPSAIPQHAFKPFGNGQRACIGQQFALHSATLVLGMMLKHFDFEDHTNYELVIKESRTLKPEGFVVKAKSKGIPLGGIPSPSTEQSAKKVRKKAENAHNTPLLVLYGSNAGTAEGTARDLADIAMSKGFAPQVATLDSHAGNLPREGAVLIVTASYNGHPPDNAKQFVDWLDQASADEVKGVRYSVFGCGDKNWAGTYQKVPAFIDETLAAKGAENIADRGEADASDDFEGTYEEWRDHMWSDVAAYFGLDIENSEDNKSTLSLFFVDSSADMPLAKMHGAFSTNVVASKELQQPGSARSTRHLEIELPKEASYQEGDHLGVIPRNYEGIVNRVTARFGLSASQLIRLEAEEEKLAHLPLAKTVSVEELLQYVELQDPVTRTQLRAMAAKTVCPPHKVELEALLGKQAYKEQVLAKRLTMLELLEKYPACEMSFSEFIALLPSIRPRYYSISSSPRVDEKQASITVSVVSGPAWSGYGEYKGIASNYLAELQEGDTITCFISTPQSEFTLPKDPETPLIMVGPGTGVAPFRGFVQARKQLKEQGQSLGEAHLYFGCRSPHEDYLYQEELENAQSEGIITLHTAFSRMPNQPKTYVQHVMEQDGKKLIELLDQGAHFYICGDGSQMAPAVEATLMKSYADVHQVSEADARLWLQQLEEKGRYAKDVWLG

SEQ ID NO: 733 - DNA, 3147 bp, synthetic construct
  misc_feature 1..3147: note = variant of P450 oxidase from Bacillus megaterium
  source 1..3147: mol_type = other DNA
atgacaattaaggaaatgcctcagcctaagacgtttggagaacttaaaaatttaccgttattaaacacagataaaccggttcaagctttgatgcgtattgcggatgaattaggagaaatctttaaattcgaggcgcctggtagcgtaacgcgctatttatcaagtcagcgtctaattaaagaagcatgcgatgaatcacgctttgataaaaacttaagtcaagcgcttaaatttgcacgtgattttgttggagacgggctgtctacaagctggacgcatgaaccgaattggaaaaaagcgcataatatcttagttccaagctttagtcagcatgcaatggggcgttatcatgcgatgatggtcgatatcgccgtgcagcttgttcaaaagtgggagcgtctaaatgcagatgagcatattgaagtatcggaagacatgacacgtttaacgcttgatacaattggtctttgcctgtttaactatcgctttaacagcttttaccgagatacgcctcatccatttattgtgagtgtggttcgtgcactggatgaagtaatgaacaagctgcagcgagcaaatccagacgacccagcttatgatgaaaacaagcgccagtgtcaagaagatatcaaggtgatgaacgactatgtagataaaattattgcagatcgcaaagcaaggggtgaacaaagtcatgatttattaacgcagatgctaaacggaaaagatccagaaacgggtgagccgcttgatgacgggaacattcgtcagcaaattattacattcttaattgcgggacaccaaacgacaagtggtcttttatcatttgcgctgtatttcttagtgaaaaatccacgtgtattacaaaaagtagcagaagaagcagcacgagttctagtagatcctgttccaagctacaaacaagtcaaacagcttaaatatgttggcatggtcttaaacgaagcgctgcgcttatggccagtagcgcctatgttttccctatatgcaaaagaagatacggtgcttggaggagaatatcctttaacgaaaggcgacgaagtaatggttctggtgcctcagcttcaccgtgataaaacaatttggggagacgatgtggaggagttccgtccagagcgttttgaaaatccaagtgcgattccgcagcatgcgtttaaaccgtttggaaacggtcagcgtgcgtgtatcggtcagcagttcgctcttcatagtgcaacgctggtacttggtatgatgctaaaacactttgactttgaagatcatacaaactacgagctcgttattaaagaatcgcggacgttaaaacctgaaggctttgtggtaaaagcaaaatcgaaaggcattccgcttggcggtattccttcacctagcactgaacagtctgctaaaaaagtacgcaaaaaggcagaaaacgctcataatacgccgctgcttgtgctatacggttcaaatgcgggaacagctgaaggaacggcgcgtgatttagcagatattgcaatgagcaaaggatttgcaccgcaggtcgcaacgcttgattcacacgccggtaatcttccgcgcgaaggagctgtattaattgtaacggcgtcttataacggtcatccgcctgataacgcaaagcaatttgtcgactggttagaccaagcgtctgcggatgaagtaaaaggcgttcgctactccgtatttggatgcggcgataaaaattgggcggggacgtatcaaaaagtgcctgcttttatcgatgaaacgcttgccgctaaaggggcagaaaacatcgctgaccgcggtgaagcagatgcaagcgacgactttgaaggcacatatgaagaatggcgtgatcatatgtggagtgacgtagcagcctactttggtctcgacattgaaaacagtgaagataataaatctactctttcacttcaatttgtcgacagcgcggcggatatgccgcttgcgaaaatgcacggtgcgttttcaacgaacgtcgtagcaagcaaagaacttcaacagcctggcagtgcacgaagcacgcgacatcttgaaattgaacttccaaaagaagcttcttatcaagaaggagatcatttaggtgttattcctcgctattatgaaggaatagtaaaccgtgtaacagcaaggttcggcctaagcgcatcacagctgatccgtctggaagcagaagaagaaaaattagctcatttgccactcgctaaaacagtatccgtagaagagcttctgcaatacgtggagcttcaagatcctgttacgcgcacgcagcttcgcgcaatggctgctaaaacggtctgcccgccgcataaagtagagcttgaagccttgcttggcaagcaagcctacaaagaacaagtgctggcaaaacgtttaacaatgcttgaactgcttgaaaaatacccggcgtgtgaaatgagtttcagcgaatttatcgcccttctgccaagcatacgcccgcgctattactcgatttcttcatcacctcgtgtcgatgaaaaacaagcaagcatcacggtcagcgttgtctcaggaccggcgtggagcggatatggagaatataaaggaattgcgtcgaactatcttgccgagctgcaagaaggagatacgattacgtgctttatttccacaccgcagtcagagtttacgctgccaaaagaccctgaaacgccgcttatcatggtcggaccgggaacaggcgtcgcgccgtttagaggctttgtgcaggcgcgcaaacagctaaaagaacaaggacagtcacttggagaagcacatttatacttcggctgccgttcacctcatgaagactatctgtatcaagaagagcttgaaaacgcccaaagcgaaggcatcattacgcttcataccgctttttctcgcatgccgaatcagccgaaaacatacgttcagcacgtaatggaacaagacggcaagaaattgattgaacttcttgatcaaggagcgcacttctatatttgcggagacggaagccaaatggcacctgccgttgaagcaacgcttatgaaaagctatgctgacgttcaccaagtgagtgaagcagacgctcgcttatggctgcagcagctagaagaaaaaggccgatacgcaaaagacgtgtggctgggg

SEQ ID NO: 734 - protein, 1049 aa, synthetic construct
  REGION 1..1049: note = variant of P450 oxidase from Bacillus megaterium
MTIKEMPQPKTFGELKNLPLLNTDKPVQALMRIADELGEIFKFEAPGSVTRYLSSQRLIKEACDESRFDKNLSQALKFARDFVGDGLSTSWTHEPNWKKAHNILVPSFSQHAMGRYHAMMVDIAVQLVQKWERLNADEHIEVSEDMTRLTLDTIGLCLFNYRFNSFYRDTPHPFIVSVVRALDEVMNKLQRANPDDPAYDENKRQCQEDIKVMNDYVDKIIADRKARGEQSHDLLTQMLNGKDPETGEPLDDGNIRQQIITFLIAGHQTTSGLLSFALYFLVKNPRVLQKVAEEAARVLVDPVPSYKQVKQLKYVGMVLNEALRLWPVAPMFSLYAKEDTVLGGEYPLTKGDEVMVLVPQLHRDKTIWGDDVEEFRPERFENPSAIPQHAFKPFGNGQRACIGQQFALHSATLVLGMMLKHFDFEDHTNYELVIKESRTLKPEGFVVKAKSKGIPLGGIPSPSTEQSAKKVRKKAENAHNTPLLVLYGSNAGTAEGTARDLADIAMSKGFAPQVATLDSHAGNLPREGAVLIVTASYNGHPPDNAKQFVDWLDQASADEVKGVRYSVFGCGDKNWAGTYQKVPAFIDETLAAKGAENIADRGEADASDDFEGTYEEWRDHMWSDVAAYFGLDIENSEDNKSTLSLQFVDSAADMPLAKMHGAFSTNVVASKELQQPGSARSTRHLEIELPKEASYQEGDHLGVIPRYYEGIVNRVTARFGLSASQLIRLEAEEEKLAHLPLAKTVSVEELLQYVELQDPVTRTQLRAMAAKTVCPPHKVELEALLGKQAYKEQVLAKRLTMLELLEKYPACEMSFSEFIALLPSIRPRYYSISSSPRVDEKQASITVSVVSGPAWSGYGEYKGIASNYLAELQEGDTITCFISTPQSEFTLPKDPETPLIMVGPGTGVAPFRGFVQARKQLKEQGQSLGEAHLYFGCRSPHEDYLYQEELENAQSEGIITLHTAFSRMPNQPKTYVQHVMEQDGKKLIELLDQGAHFYICGDGSQMAPAVEATLMKSYADVHQVSEADARLWLQQLEEKGRYAKDVWLG

SEQ ID NO: 735 - DNA, 3147 bp, synthetic construct
  misc_feature 1..3147: note = variant of P450 oxidase from Bacillus megaterium
  source 1..3147: mol_type = other DNA
atgacaattaaggaaatgcctcagcctaagacgtttggagaacttaaaaatttaccgttattaaacacagataaaccggttcaagctttgatgcgtattgcggatgaattaggagaaatctttaaattcgaggcgcctggtagcgtaacgcgctatttatcaagtcagcgtctaattaaagaagcatgcgatgaatcacgctttgataaaaacttaagtcaagcgcttctgtttgcacgtgattttgttggagacgggctgtctacaagctggacgcatgaaccgaattggaaaaaagcgcataatatcttagttccaagctttagtcagcatgcaatggggcgttatcatgcgatgatggtcgatatcgccgtgcagcttgttcaaaagtgggagcgtctaaatgcagatgagcatattgaagtatcggaagacatgacacgtttaacgcttgatacaattggtctttgcctgtttaactatcgctttaacagcttttaccgagatacgcctcatccatttattgtgagtgtggttcgtgcactggatgaagtaatgaacaagctgcagcgagcaaatccagacgacccagcttatgatgaaaacaagcgccagtgtcaagaagatatcaaggtgatgaacgactatgtagataaaattattgcagatcgcaaagcaaggggtgaacaaagtcatgatttattaacgcagatgctaaacggaaaagatccagaaacgggtgagccgcttgatgacgggaacattcgtcagcaaattattacattcttaattgcgggacaccaaacgacaagtggtcttttatcatttgcgctgtatttcttagtgaaaaatccacatgtattacaaaaagtagcagaagaagcagcacgagttctagtagatcctgttccaagctacaaacaagtcaaacagcttaaatatgttggcatggtcttaaacgaagcgctgcgcttatggccagtagcgcctatgttttccctatatgcaaaagaagatacggtgcttggaggagaatatcctttaacgaaaggcgacgaagtaatggttctggtgcctcagcttcaccgtgataaaacaatttggggagacgatgtggaggagttccgtccagagcgttttgaaaatccaagtgcgattccgcagcatgcgtttaaaccgtttggaaacggtcagcgtgcgtgtatcggtcagcagttcgctcttcatagtgcaacgctggtacttggtatgatgctaaaacactttgactttgaagatcatacaaactacgagctcgttattaaagaatcgcggacgttaaaacctgaaggctttgtggtaaaagcaaaatcgaaaggcattccgcttggcggtattccttcacctagcactgaacagtctgctaaaaaagtacgcaaaaaggcagaaaacgctcataatacgccgctgcttgtgctatacggttcaaatgcgggaacagctgaaggaacggcgcgtgatttagcagatattgcaatgagcaaaggatttgcaccgcaggtcgcaacgcttgattcacacgccggtaatcttccgcgcgaaggagctgtattaattgtaacggcgtcttataacggtcatccgcctgataacgcaaagcaatttgtcgactggttagaccaagcgtctgctgatgaagtaaaaggcgttcgctactccgtatttggatgcggcgataaaaattgggcggggacgtatcaaaaagtgcctgcttttatcgatgaaacgcttgccgctaaaggggcagaaaacatcgctgaccgcggtgaagcagatgcaagcgacgactttgaaggcacatatgaagaatggcgtgatcatatgtggagtgacgtagcagcctactttggtctcgacattgaaaacagtgaagataataaatctactctttcacttcaatttgtcgacagcgccgcggatatgccgcttgcgaaaatgcacggtgcgttttcaacgaacgtcgtagcaagcaaagaacttcaacagaaaggcagtgcacgaagcacgcgacatcttgaaattgaacttccaaaagaagcttcttatcaagaaggagatcatttaggtgttattcctcgcaactatgaaggaatagtaaaccgtgtaacagcaaggttcggcctaagcgcatcacagctgatccgtctggaagcagaagaagaaaaattagctcatttgccactcgctaaaacagtatccgtagaagagcttctgcaatacgtggagcttcaagatcctgttacgcgcacgcagcttcgcgcaatggctgctaaaacggtctgcccgccgcataaagtagagcttgaagccttgcttggcaagcaagcctacaaagaacaagtgctggcaaaacgtttaacaatgcttgaactgcttgaaaaatacccggcgtgtgaaatgagtttcagcgaatttatcgcccttctgccaagcatacgcccgcgctattactcgatttcttcatcacctcgtgtcgatgaaaaacaagcaagcatcacggtcagcgttgtctcaggaccggcgtggagcggatatggagaatataaaggaattgcgtcgaactatcttgccgagctgcaagaaggagatacgattacgtgctttatttccacaccgcagtcagaatttacgctgccaaaagaccctgaaacgccgcttatcatggtcggaccgggaacaggcgtcgcgccgtttagaggctttgtgcaggcgcgcaaacagctaaaagaaaacggacagtcacttggagaagcacatttatacttcggctgccgttcacctcatgaagactatctgtatcaagaagagcttgaaaacgcccaaagcgaaggcatcattacgcttcataccgctttttctcgcatgccgaatcagccgaaaacatacgttcagcacgtaatggaacaagacggcaagaaattgattgaacttcttgatcaaggagcgcacttctatatttgcggagacggaagccaaatggcacctgccgttgaagcaacgcttatgaaaagctatgctgacgttcaccaagtgagtgaagcagacgctcgcttatggctgcagcagctagaagaaaaaggccgatacgcaaaagacgtgtggctgggg

SEQ ID NO: 736 - protein, 1049 aa, synthetic construct
  REGION 1..1049: note = variant of P450 oxidase from Bacillus megaterium
MTIKEMPQPKTFGELKNLPLLNTDKPVQALMRIADELGEIFKFEAPGSVTRYLSSQRLIKEACDESRFDKNLSQALLFARDFVGDGLSTSWTHEPNWKKAHNILVPSFSQHAMGRYHAMMVDIAVQLVQKWERLNADEHIEVSEDMTRLTLDTIGLCLFNYRFNSFYRDTPHPFIVSVVRALDEVMNKLQRANPDDPAYDENKRQCQEDIKVMNDYVDKIIADRKARGEQSHDLLTQMLNGKDPETGEPLDDGNIRQQIITFLIAGHQTTSGLLSFALYFLVKNPHVLQKVAEEAARVLVDPVPSYKQVKQLKYVGMVLNEALRLWPVAPMFSLYAKEDTVLGGEYPLTKGDEVMVLVPQLHRDKTIWGDDVEEFRPERFENPSAIPQHAFKPFGNGQRACIGQQFALHSATLVLGMMLKHFDFEDHTNYELVIKESRTLKPEGFVVKAKSKGIPLGGIPSPSTEQSAKKVRKKAENAHNTPLLVLYGSNAGTAEGTARDLADIAMSKGFAPQVATLDSHAGNLPREGAVLIVTASYNGHPPDNAKQFVDWLDQASADEVKGVRYSVFGCGDKNWAGTYQKVPAFIDETLAAKGAENIADRGEADASDDFEGTYEEWRDHMWSDVAAYFGLDIENSEDNKSTLSLQFVDSAADMPLAKMHGAFSTNVVASKELQQKGSARSTRHLEIELPKEASYQEGDHLGVIPRNYEGIVNRVTARFGLSASQLIRLEAEEEKLAHLPLAKTVSVEELLQYVELQDPVTRTQLRAMAAKTVCPPHKVELEALLGKQAYKEQVLAKRLTMLELLEKYPACEMSFSEFIALLPSIRPRYYSISSSPRVDEKQASITVSVVSGPAWSGYGEYKGIASNYLAELQEGDTITCFISTPQSEFTLPKDPETPLIMVGPGTGVAPFRGFVQARKQLKENGQSLGEAHLYFGCRSPHEDYLYQEELENAQSEGIITLHTAFSRMPNQPKTYVQHVMEQDGKKLIELLDQGAHFYICGDGSQMAPAVEATLMKSYADVHQVSEADARLWLQQLEEKGRYAKDVWLG

SEQ ID NO: 737 - DNA, 3147 bp, synthetic construct
  misc_feature 1..3147: note = variant of P450 oxidase from Bacillus megaterium
  source 1..3147: mol_type = other DNA
atgacaattaaggaaatgcctcagcctaagacgtttggagaacttaaaaatttaccgttattaaacacagataaaccggttcaagctttgatgcgtattgcggatgaattaggagaaatctttaaattcgaggcgcctggtagcgtaacgcgctatttatcaagtcagcgtctaattaaagaagcatgcgatgaatcacgctttgataaaaacttaagtcaagcgcttctgtttgcacgtgattttgttggagacgggctgtctacaagctggacgcatgaaccgaattggaaaaaagcgcataatatcttagttccaagctttagtcagcatgcaatggggcgttatcatgcgatgatggtcgatatcgccgtgcagcttgttcaaaagtgggagcgtctaaatgcagatgagcatattgaagtatcggaagacatgacacgtttaacgcttgatacaattggtctttgcctgtttaactatcgctttaacagcttttaccgagatacgcctcatccatttattgtgagtgtggttcgtgcactggatgaagtaatgaacaagctgcagcgagcaaatccagacgacccagcttatgatgaaaacaagcgccagtgtcaagaagatatcaaggtgatgaacgactatgtagataaaattattgcagatcgcaaagcaaggggtgaacaaagtcatgatttattaacgcagatgctaaacggaaaagatccagaaacgggtgagccgcttgatgacgggaacattcgtcagcaaattattacattcttaattgcgggacaccaaacgacaagtggtcttttatcatttgcgctgtatttcttagtgaaaaatccacatgtattacaaaaagtagcagaagaagcagcacgagttctagtagatcctgttccaagctacaaacaagtcaaacagcttaaatatgttggcatggtcttaaacgaagcgctgcgcttatggccagtagcgcctatgttttccctatatgcaaaagaagatacggtgcttggaggagaatatcctttaacgaaaggcgacgaagtaatggttctggtgcctcagcttcaccgtgataaaacaatttggggagacgatgtggaggagttccgtccagagcgttttgaaaatccaagtgcgattccgcagcatgcgtttaaaccgtttggaaacggtcagcgtgcgtgtatcggtcagcagttcgctcttcatgaagcaacgctggtacttggtatgatgctaaaacactttgactttgaagatcatacaaactacgagctcgttattaaagaatcgcggacgttaaaacctgaaggctttgtggtaaaagcaaaatcgaaaggcattccgcttggcggtattccttcacctagcactgaacagtctgctaaaaaagtacgcaaaaaggcagaaaacgctcataatacgccgctgcttgtgctatacggttcaaatgcgggaacagctgaaggaacggcgcgtgatttagcagatattgcaatgagcaaaggatttgcaccgcaggtcgcaacgcttgattcacacgccggtaatcttccgcgcgaaggagctgtattaattgtaacggcgtcttataacggtcatccgcctgataacgcaaagcaatttgtcgactggttagaccaagcgtctccggatgaagtaaaaggcgttcgctactccgtatttggatgcggcgataaaaattgggcggggacgtatcaaaaagtgcctgcttttatcgatgaaacgcttgccgctaaaggggcagaaaacatcgctgaccgcggtgaagcagatgcaagcgacgactttgaaggcacatatgaagaatggcgtgatcatatgtggagtgacgtagcagcctactttggtctcgacattgaaaacagtgaagataataaatctactctttcacttcaatttgtcgacagcgccgcggatatgccgcttgcgaaaatgcacggtgcgttttcaacgaacgtcgtagcaagcaaagaacttcaacagccaggcagtgcacgaagcacgcgacatcttgaaattgaacttccaaaagaagcttcttatcaagaaggagatcatttaggtgttattcctcgctattatgaaggaatagtaaaccgtgtaacagcaaggttcggcctaagcgcatcacagctgatccgtctggaagcagaagaagaaaaattagctcatttgccactcgctaaaacagtatccgtagaagagcttctgcaatacgtggagcttcaagatcctgttacgcgcacgcagcttcgcgcaatggctgctaaaacggtctgcccgccgcataaagtagagcttgaagccttgcttgggaaaccggcctacaaagaacaagtgctggcaaaacgtttaacaatgcttgaactgcttgaaaaatacccggcgtgtgaaatgagtttcagcgaatttatcgcccttctgccaagcatacgcccgcgctattactcgatttcttcatcacctcgtgtcgatgaaaaacaagcaagcatcacggtcagcgttgtctcaggaccggcgtggagcggatatggagaatataaaggaattgcgtcgaactatcttgccgagctgcaagaaggagatacgattacgtgctttatttccacaccgcagtcagggtttacgctgccaaaagaccctgaaacgccgcttatcatggtcggaccgggaacaggcgtcgcgccgtttagaggctttgtgcaggcgcgcaaacagctaaaagaacaaggacagtcacttggagaagcacatttatacttcggctgccgttcacctcatgaagactatctgtatcaagaagagcttgaaaacgcccaaagcgaaggcatcattacgcttcataccgctttttctcgcatgccgaatcagccgaaaacatacgttcagcacgtaatggaacaagacggcaagaaattgattgaacttcttgatcaaggagcgcacttctatatttgcggagacggaagccaaatggcacctgccgttgaagcaacgcttatgaaaagctatgctgacgttcaccaagtgagtgaagcagacgctcgcttatggctgcagcagctagaagaaaaaggccgatacgcaaaagacgtgtggctgggg

SEQ ID NO: 738 - protein, 1049 aa, synthetic construct
  REGION 1..1049: note = variant of P450 oxidase from Bacillus megaterium
MTIKEMPQPKTFGELKNLPLLNTDKPVQALMRIADELGEIFKFEAPGSVTRYLSSQRLIKEACDESRFDKNLSQALLFARDFVGDGLSTSWTHEPNWKKAHNILVPSFSQHAMGRYHAMMVDIAVQLVQKWERLNADEHIEVSEDMTRLTLDTIGLCLFNYRFNSFYRDTPHPFIVSVVRALDEVMNKLQRANPDDPAYDENKRQCQEDIKVMNDYVDKIIADRKARGEQSHDLLTQMLNGKDPETGEPLDDGNIRQQIITFLIAGHQTTSGLLSFALYFLVKNPHVLQKVAEEAARVLVDPVPSYKQVKQLKYVGMVLNEALRLWPVAPMFSLYAKEDTVLGGEYPLTKGDEVMVLVPQLHRDKTIWGDDVEEFRPERFENPSAIPQHAFKPFGNGQRACIGQQFALHEATLVLGMMLKHFDFEDHTNYELVIKESRTLKPEGFVVKAKSKGIPLGGIPSPSTEQSAKKVRKKAENAHNTPLLVLYGSNAGTAEGTARDLADIAMSKGFAPQVATLDSHAGNLPREGAVLIVTASYNGHPPDNAKQFVDWLDQASPDEVKGVRYSVFGCGDKNWAGTYQKVPAFIDETLAAKGAENIADRGEADASDDFEGTYEEWRDHMWSDVAAYFGLDIENSEDNKSTLSLQFVDSAADMPLAKMHGAFSTNVVASKELQQPGSARSTRHLEIELPKEASYQEGDHLGVIPRYYEGIVNRVTARFGLSASQLIRLEAEEEKLAHLPLAKTVSVEELLQYVELQDPVTRTQLRAMAAKTVCPPHKVELEALLGKPAYKEQVLAKRLTMLELLEKYPACEMSFSEFIALLPSIRPRYYSISSSPRVDEKQASITVSVVSGPAWSGYGEYKGIASNYLAELQEGDTITCFISTPQSGFTLPKDPETPLIMVGPGTGVAPFRGFVQARKQLKEQGQSLGEAHLYFGCRSPHEDYLYQEELENAQSEGIITLHTAFSRMPNQPKTYVQHVMEQDGKKLIELLDQGAHFYICGDGSQMAPAVEATLMKSYADVHQVSEADARLWLQQLEEKGRYAKDVWLG

SEQ ID NO: 739 - DNA, 3147 bp, synthetic construct
  misc_feature 1..3147: note = variant of P450 oxidase from Bacillus megaterium
  source 1..3147: mol_type = other DNA
atgacaattaaggaaatgcctcagcctaagacgtttggagaacttaaaaatttaccgttattaaacacagataaaccggttcaagctttgatgcgtattgcggatgaattaggagaaatctttaaattcgaggcgcctggtagcgtaacgcgctatttatcaagtcagcgtctaattaaagaagcatgcgatgaatcacgctttgataaaaacttaagtcaagcgcttaaatttgcacgtgattttgttggagacgggctgtctacaagctggacgcatgaaccgaattggaaaaaagcgcataatatcttagttccaagctttagtcagcatgcaatggggcgttatcatgcgatgatggtcgatatcgccgtgcagcttgttcaaaagtgggagcgtctaaatgcagatgagcatattgaagtatcggaagacatgacacgtttaacgcttgatacaattggtctttgcctgtttaactatcgctttaacagcttttaccgagatacgcctcatccatttattgtgagtgtggttcgtgcactggatgaagtaatgaacaagctgcagcgagcaaatccagacgacccagcttatgatgaaaacaagcgccagtgtcaagaagatatcaaggtgatgaacgactatgtagataaaattattgcagatcgcaaagcaaggggtgaacaaagtcatgatttattaacgcagatgctaaacggaaaagatccagaaacgggtgagccgcttgatgacgggaacattcgtcagcaaattattacattcttaattgcgggacaccaaacgacaagtggtcttttatcatttgcgctgtatttcttagtgaaaaatccacatgtattacaaaaagtagcagaagaagcagcacgagttctagtagatcctgttccaagctacaaacaagtcaaacagcttaaatatgttggcatggtcttaaacgaagcgctgcgcttatggccagtagcgcctatgttttccctatatgcaaaagaagatacggtgcttggaggagaatatcctttaacgaaaggcgacgaagtaatggttctggtgcctcagcttcaccgtgataaaacaatttggggagacgatgtggaggagttccgtccagagcgttttgaaaatccaagtgcgattccgcagcatgcgtttaaaccgtttggaaacggtcagcgtgcgtgtatcggtcagcagttcgctcttcatagtgcaacgctggtacttggtatgatgctaaaacactttgactttgaagatcatacaaactacgagctcgttattaaagaatcgcggacgttaaaacctgaaggctttgtggtaaaagcaaaatcgaaaggcattccgcttggcggtattccttcacctagcactgaacagtctgctaaaaaagtacgcaaaaaggcagaaaacgctcataatacgccgctgcttgtgctatacggttcaaatgcgggaacagctgaaggaacggcgcgtgatttagcagatattgcaatgagcaaaggatttgcaccgcaggtcgcaacgcttgattcacacgccggtaatcttccgcgcgaaggagctgtattaattgtaacggcgtcttataacggtcatccgcctgataacgcaaagcaatttgtcgactggttagaccaagcgtctgctgatgaagtaaaaggcgttcgctactccgtatttggatgcggcgataaaaattgggcggggacgtatcaaaaagtgcctgcttttatcgatgaaacgcttgccgctaaaggggcagaaaacatcgctgaccgcggtgaagcagatgcaagcgacgactttgaaggcacatatgaagaatggcgtgatcatatgtggagtgacgtagcagcctactttggtctcgacattgaaaacagtgaagataataaatctactctttcacttcaatttgtcgacagcgcggcggatatgccgcttgcgaaaatgcacggtgcgttttcaacgaacgtcgtagcaagcaaagaacttcaacagccaggcagtgcacgaagcacgcgacatcttgaaattgaacttccaaaagaagcttcttatcaagaaggagatcatttaggtgttattcctcgcaactatgaaggaatagtaaaccgtgtaacagcaaggttcggcctaagcgcatcacagctgatccgtctggaagcagaagaagaaaaattagctcatttgccactcgctaaaacagtatccgtagaagagcttctgcaatacgtggagcttcaagatcctgttacgcgcacgcagcttcgcgcaatggctgctaaaacggtctgcccgccgcataaagtagagcttgaagccttgcttgggaaaccggcctacaaagaacaagtgctggcaaaacgtttaacaatgcttgaactgcttgaaaaatacccggcgtgtgaaatgagtttcagcgaatttatcgcccttctgccaagcatacgcccgcgctattactcgatttcttcatcacctcgtgtcgatgaaaaacaagcaagcatcacggtcagcgttgtctcaggaccggcgtggagcggatatggagaatataaaggaattgcgtcgaactatcttgccgagctgcaagaaggagatacgattacgtgctttatttccacaccgcagtcagaatttacgctgccaaaagaccctgaaacgccgcttatcatggtcggaccgggaacaggcgtcgcgccgtttagaggctttgtgcaggcgcgcaaacagctaaaagaacaaggacagtcacttggagaagcacatttatacttcggctgccgttcacctcatgaagactatctgtatcaagaagagcttgaaaacgcccaaagcgaaggcatcattacgcttcataccgctttttctcgcatgccgaatcagccgaaaacatacgttcagcacgtaatggaacaagacggcaagaaattgattgaacttcttgatcaaggagcgcacttctatatttgcggagacggaagccaaatggcacctgccgttgaagcaacgcttatgaaaagctatgctgacgttcaccaagtgagtgaagcagacgctcgcttatggctgcagcagctagaagaaaaaggccgatacgcaaaagacgtgtggctgggg

SEQ ID NO: 740 - protein, 1049 aa, synthetic construct
  REGION 1..1049: note = variant of P450 oxidase from Bacillus megaterium
MTIKEMPQPKTFGELKNLPLLNTDKPVQALMRIADELGEIFKFEAPGSVTRYLSSQRLIKEACDESRFDKNLSQALKFARDFVGDGLSTSWTHEPNWKKAHNILVPSFSQHAMGRYHAMMVDIAVQLVQKWERLNADEHIEVSEDMTRLTLDTIGLCLFNYRFNSFYRDTPHPFIVSVVRALDEVMNKLQRANPDDPAYDENKRQCQEDIKVMNDYVDKIIADRKARGEQSHDLLTQMLNGKDPETGEPLDDGNIRQQIITFLIAGHQTTSGLLSFALYFLVKNPHVLQKVAEEAARVLVDPVPSYKQVKQLKYVGMVLNEALRLWPVAPMFSLYAKEDTVLGGEYPLTKGDEVMVLVPQLHRDKTIWGDDVEEFRPERFENPSAIPQHAFKPFGNGQRACIGQQFALHSATLVLGMMLKHFDFEDHTNYELVIKESRTLKPEGFVVKAKSKGIPLGGIPSPSTEQSAKKVRKKAENAHNTPLLVLYGSNAGTAEGTARDLADIAMSKGFAPQVATLDSHAGNLPREGAVLIVTASYNGHPPDNAKQFVDWLDQASADEVKGVRYSVFGCGDKNWAGTYQKVPAFIDETLAAKGAENIADRGEADASDDFEGTYEEWRDHMWSDVAAYFGLDIENSEDNKSTLSLQFVDSAADMPLAKMHGAFSTNVVASKELQQPGSARSTRHLEIELPKEASYQEGDHLGVIPRNYEGIVNRVTARFGLSASQLIRLEAEEEKLAHLPLAKTVSVEELLQYVELQDPVTRTQLRAMAAKTVCPPHKVELEALLGKPAYKEQVLAKRLTMLELLEKYPACEMSFSEFIALLPSIRPRYYSISSSPRVDEKQASITVSVVSGPAWSGYGEYKGIASNYLAELQEGDTITCFISTPQSEFTLPKDPETPLIMVGPGTGVAPFRGFVQARKQLKEQGQSLGEAHLYFGCRSPHEDYLYQEELENAQSEGIITLHTAFSRMPNQPKTYVQHVMEQDGKKLIELLDQGAHFYICGDGSQMAPAVEATLMKSYADVHQVSEADARLWLQQLEEKGRYAKDVWLG

SEQ ID NO: 741 - DNA, 3147 bp, synthetic construct
  misc_feature 1..3147: note = variant of P450 oxidase from Bacillus megaterium
  source 1..3147: mol_type = other DNA
atgacaattaaggaaatgcctcagcctaagacgtttggagaacttaaaaatttaccgttattaaacacagataaaccggttcaagctttgatgcgtattgcggatgaattaggagaaatctttaaattcgaggcgcctggtagcgtaacgcgctatttatcaagtcagcgtctaattaaagaagcatgcgatgaatcacgctttgataaaaacttaagtcaagcgcttaaatttgcacgtgattttgttggagacgggctgtctacaagctggacgcatgaaccgaattggaaaaaagcgcataatatcttagttccaagctttagtcagcatgcaatggggcgttatcatgcgatgatggtcgatatcgccgtgcagcttgttcaaaagtgggagcgtctaaatgcagatgagcatattgaagtatcggaagacatgacacgtttaacgcttgatacaattggtctttgcctgtttaactatcgctttaacagcttttaccgagatacgcctcatccatttattgtgagtgtggttcgtgcactggatgaagtaatgaacaagctgcagcgagcaaatccagacgacccagcttatgatgaaaacaagcgccagtgtcaagaagatatcaaggtgatgaacgactatgtagataaaattattgcagatcgcaaagcaaggggtgaacaaagtcatgatttattaacgcagatgctaaacggaaaagatccagaaacgggtgagccgcttgatgacgggaacattcgtcagcaaattattacattcttaattgcgggacaccaaacgacaagtggtcttttatcatttgcgctgtatttcttagtgaaaaatccacgtgtattacaaaaagtagcagaagaagcagcacgagttctagtagatcctgttccaagctacaaacaagtcaaacagcttaaatatgttggcatggtcttaaacgaagcgctgcgcttatggccagtagcgcctatgttttccctatatgcaaaagaagatacggtgcttggaggagaatatcctttaacgaaaggcgacgaagtaatggttctggtgcctcagcttcaccgtgataaaacaatttggggagacgatgtggaggagttccgtccagagcgttttgaaaatccaagtgcgattccgcagcatgcgtttaaaccgtttggaaacggtcagcgtgcgtgtatcggtcagcagttcgctcttcatagtgcaacgctggtacttggtatgatgctaaaacactttgactttgaagatcatacaaactacgagctcgttattaaagaatcgcggacgttaaaacctgaaggctttgtggtaaaagcaaaatcgaaaggcattccgcttggcggtattccttcacctagcactgaacagtctgctaaaaaagtacgcaaaaaggcagaaaacgctcataatacgccgctgcttgtgctatacggttcaaatgcgggaacagctgaaggaacggcgcgtgatttagcagatattgcaatgagcaaaggatttgcaccgcaggtcgcaacgcttgattcacacgccggtaatcttccgcgcgaaggagctgtattaattgtaacggcgtcttataacggtcatccgcctgataacgcaaagcaatttgtcgactggttagaccaagcgtctgctgatgaagtaaaaggcgttcgctactccgtatttggatgcggcgataaaaattgggcggggacgtatcaaaaagtgcctgcttttatcgatgaaacgcttgccgctaaaggggcagaaaacatcgctgaccgcggtgaagcagatgcaagcgacgactttgaaggcacatatgaagaatggcgtgatcatatgtggagtgacgtagcagcctactttggtctcgacattgaaaacagtgaagataataaatctactctttcacttcaatttgtcgacagcgccgcggatatgccgcttgcgaaaatgcacggtgcgttttcaacgaacgtcgtagcaagcaaagaacttcaacagccaggcagtgcacgaagcacgcgacatcttgaaattgaacttccaaaagaagcttcttatcaagaaggagatcatttaggtgttattcctcgcaactatgaaggaatagtaaaccgtgtaacagcaaggttcggcctaagcgcatcacagctgatccgtctggaagcagaagaagaaaaattagctcatttgccactcgctaaaacagtatccgtagaagagcttctgcaatacgtggagcttcaagatcctgttacgcgcacgcagcttcgcgcaatggctgctaaaacggtctgcccgccgcataaagtagagcttgaagccttgcttgggaaaccggcctacaaagaacaagtgctggcaaaacgtttaacaatgcttgaactgcttgaaaaatacccggcgtgtgaaatgagtttcagcgaatttatcgcccttctgccaagcatacgcccgcgctattactcgatttcttcatcacctcgtgtcgatgaaaaacaagcaagcatcacggtcagcgttgtctcaggaccggcgtggagcggatatggagaatataaaggaattgcgtcgaactatcttgccgagctgcaagaaggagatacgattacgtgctttatttccacaccgcagtcagggtttacgctgccaaaagaccctgaaacgccgcttatcatggtcggaccgggaacaggcgtcgcgccgtttagaggctttgtgcaggcgcgcaaacagctaaaagaacaaggacagtcacttggagaagcacatttatacttcggctgccgttcacctcatgaagactatctgtatcaagaagagcttgaaaacgcccaaagcgaaggcatcattacgcttcataccgctttttctcgcatgccgaatcagccgaaaacatacgttcagcacgtaatggaacaagacggcaagaaattgattgaacttcttgatcaaggagcgcacttctatatttgcggagacggaagccaaatggcacctgccgttgaagcaacgcttatgaaaagctatgctgacgttcaccaagtgagtgaagcagacgctcgcttatggctgcagcagctagaagaaaaaggccgatacgcaaaagacgtgtggctgggg

SEQ ID NO: 742 - protein, 1049 aa, synthetic construct
  REGION 1..1049: note = variant of P450 oxidase from Bacillus megaterium
MTIKEMPQPKTFGELKNLPLLNTDKPVQALMRIADELGEIFKFEAPGSVTRYLSSQRLIKEACDESRFDKNLSQALKFARDFVGDGLSTSWTHEPNWKKAHNILVPSFSQHAMGRYHAMMVDIAVQLVQKWERLNADEHIEVSEDMTRLTLDTIGLCLFNYRFNSFYRDTPHPFIVSVVRALDEVMNKLQRANPDDPAYDENKRQCQEDIKVMNDYVDKIIADRKARGEQSHDLLTQMLNGKDPETGEPLDDGNIRQQIITFLIAGHQTTSGLLSFALYFLVKNPRVLQKVAEEAARVLVDPVPSYKQVKQLKYVGMVLNEALRLWPVAPMFSLYAKEDTVLGGEYPLTKGDEVMVLVPQLHRDKTIWGDDVEEFRPERFENPSAIPQHAFKPFGNGQRACIGQQFALHSATLVLGMMLKHFDFEDHTNYELVIKESRTLKPEGFVVKAKSKGIPLGGIPSPSTEQSAKKVRKKAENAHNTPLLVLYGSNAGTAEGTARDLADIAMSKGFAPQVATLDSHAGNLPREGAVLIVTASYNGHPPDNAKQFVDWLDQASADEVKGVRYSVFGCGDKNWAGTYQKVPAFIDETLAAKGAENIADRGEADASDDFEGTYEEWRDHMWSDVAAYFGLDIENSEDNKSTLSLQFVDSAADMPLAKMHGAFSTNVVASKELQQPGSARSTRHLEIELPKEASYQEGDHLGVIPRNYEGIVNRVTARFGLSASQLIRLEAEEEKLAHLPLAKTVSVEELLQYVELQDPVTRTQLRAMAAKTVCPPHKVELEALLGKPAYKEQVLAKRLTMLELLEKYPACEMSFSEFIALLPSIRPRYYSISSSPRVDEKQASITVSVVSGPAWSGYGEYKGIASNYLAELQEGDTITCFISTPQSGFTLPKDPETPLIMVGPGTGVAPFRGFVQARKQLKEQGQSLGEAHLYFGCRSPHEDYLYQEELENAQSEGIITLHTAFSRMPNQPKTYVQHVMEQDGKKLIELLDQGAHFYICGDGSQMAPAVEATLMKSYADVHQVSEADARLWLQQLEEKGRYAKDVWLG

SEQ ID NO: 743 - DNA, 3147 bp, synthetic construct
  misc_feature 1..3147: note = variant of P450 oxidase from Bacillus megaterium
  source 1..3147: mol_type = other DNA
atgacaattaaggaaatgcctcagcctaagacgtttggagaacttaaaaatttaccgttattaaacacagataaaccggttcaagctttgatgcgtattgcggatgaattaggagaaatctttaaattcgaggcgcctggtagcgtaacgcgctatttatcaagtcagcgtctaattaaagaagcatgcgatgaatcacgctttgataaaaacttaagtcaagcgcttctgtttgcacgtgattttgttggagacgggctgtctacaagctggacgcatgaaccgaattggaaaaaagcgcataatatcttagttccaagctttagtcagcatgcaatggggcgttatcatgcgatgatggtcgatatcgccgtgcagcttgttcaaaagtgggagcgtctaaatgcagatgagcatattgaagtatcggaagacatgacacgtttaacgcttgatacaattggtctttgcctgtttaactatcgctttaacagcttttaccgagatacgcctcatccatttattgtgagtgtgcttcgtgcactggatgaagtaatgaacaagctgcagcgagcaaatccagacgacccagcttatgatgaaaacaagcgccagtgtcaagaagatatcaaggtgatgaacgactatgtagataaaattattgcagatcgcaaagcaaggggtgaacaaagtcatgatttattaacgcagatgctaaacggaaaagatccagaaacgggtgagccgcttgatgacgggaacattcgtcagcaaattattacattcttaattgcgggacaccaaacgacaagtggtcttttatcatttgcgctgtatttcttagtgaaaaatccacgtgtattacaaaaagtagcagaagaagcagcacgagttctagtagatcctgttccaagctacaaacaagtcaaacagcttaaatatgttggcatggtcttaaacgaagcgctgcgcttatggccagtagcgcctatgttttccctatatgcaaaagaagatacggtgcttggaggagaatatcctttaacgaaaggcgacgaagtaatggttctggtgcctcagcttcaccgtgataaaacaatttggggagacgatgtggaggagttccgtccagagcgttttgaaaatccaagtgcgattccgcagcatgcgtttaaaccgtttggaaacggtcagcgtgcgtgtatcggtcagcagttcgctcttcatagtgcaacgctggtacttggtatgatgctaaaacactttgactttgaagatcatacaaactacgagctcgttattaaagaatcgcggacgttaaaacctgaaggctttgtggtaaaagcaaaatcgaaaggcattccgcttggcggtattccttcacctagcactgaacagtctgctaaaaaagtacgcaaaaaggcagaaaacgctcataatacgccgctgcttgtgctatacggttcaaatgcgggaacagctgaaggaacggcgcgtgatttagcagatattgcaatgagcaaaggatttgcaccgcaggtcgcaacgcttgattcacacgccggtaatcttccgcgcgaaggagctgtattaattgtaacggcgtcttataacggtcatccgcctgataacgcaaagcaatttgtcgactggttagaccaagcgtctgcggatgaagtaaaaggcgttcgctactccgtatttggatgcggcgataaaaattgggcggggacgtatcaaaaagtgcctgcttttatcgatgaaacgcttgccgctaaaggggcagaaaacatcgctgaccgcggtgaagcagatgcaagcgacgactttgaaggcacatatgaagaatggcgtgatcatatgtggagtgacgtagcagcctactttggtctcgacattgaaaacagtgaagataataaatctactctttcacttcaatttgtcgacagcgccgcggatatgccgcttgcgaaaatgcacggtgcgttttcaacgaacgtcgtagcaagcaaagaacttcaacagcctggcagtgcacgaagcacgcgacatcttgaaattgaacttccaaaagaagcttcttatcaagaaggagatcatttaggtgttattcctcgcaactatgaaggaatagtaaaccgtgtaacagcaaggttcggcctaagcgcatcacagctgatccgtctggaagcagaagaagaaaaattagctcatttgccactcgctaaaacagtatccgtagaagagcttctgcaatacgtggagcttcaagatcctgttacgcgcacgcagcttcgcgcaatggctgctaaaacggtctgcccgccgcataaagtagagcttgaagccttgcttggcaagcaagcctacaaagaacaagtgctggcaaaacgtttaacaatgcttgaactgcttgaaaaatacccggcgtgtgaaatgagtttcagcgaatttatcgcccttctgccaagcatacgcccgcgctattactcgatttcttcatcacctcgtgtcgatgaaaaacaagcaagcatcacggtcagcgttgtctcaggaccggcgtggagcggatatggagaatataaaggaattgcgtcgaactatcttgccgagctgcaagaaggagatacgattacgtgctttatttccacaccgcagtcagggtttacgctgccaaaagaccctgaaacgccgcttatcatggtcggaccgggaacaggcgtcgcgccgtttagaggctttgtgcaggcgcgcaaacagctaaaagaacaaggacagtcacttggagaagcacatttatacttcggctgccgttcacctcatgaagactatctgtatcaagaagagcttgaaaacgcccaaagcgaaggcatcattacgcttcataccgctttttctcgcatgccgaatcagccgaaaacatacgttcagcacgtaatggaacaagacggcaagaaattgattgaacttcttgatcaaggagcgcacttctatatttgcggagacggaagccaaatggcacctgccgttgaagcaacgcttatgaaaagctatgctgacgttcaccaagtgagtgaagcagacgctcgcttatggctgcagcagctagaagaaaaaggccgatacgcaaaagacgtgtggctgggg

SEQ ID NO: 744 - protein, 1049 aa, synthetic construct
  REGION 1..1049: note = variant of P450 oxidase from Bacillus megaterium
MTIKEMPQPKTFGELKNLPLLNTDKPVQALMRIADELGEIFKFEAPGSVTRYLSSQRLIKEACDESRFDKNLSQALLFARDFVGDGLSTSWTHEPNWKKAHNILVPSFSQHAMGRYHAMMVDIAVQLVQKWERLNADEHIEVSEDMTRLTLDTIGLCLFNYRFNSFYRDTPHPFIVSVLRALDEVMNKLQRANPDDPAYDENKRQCQEDIKVMNDYVDKIIADRKARGEQSHDLLTQMLNGKDPETGEPLDDGNIRQQIITFLIAGHQTTSGLLSFALYFLVKNPRVLQKVAEEAARVLVDPVPSYKQVKQLKYVGMVLNEALRLWPVAPMFSLYAKEDTVLGGEYPLTKGDEVMVLVPQLHRDKTIWGDDVEEFRPERFENPSAIPQHAFKPFGNGQRACIGQQFALHSATLVLGMMLKHFDFEDHTNYELVIKESRTLKPEGFVVKAKSKGIPLGGIPSPSTEQSAKKVRKKAENAHNTPLLVLYGSNAGTAEGTARDLADIAMSKGFAPQVATLDSHAGNLPREGAVLIVTASYNGHPPDNAKQFVDWLDQASADEVKGVRYSVFGCGDKNWAGTYQKVPAFIDETLAAKGAENIADRGEADASDDFEGTYEEWRDHMWSDVAAYFGLDIENSEDNKSTLSLQFVDSAADMPLAKMHGAFSTNVVASKELQQPGSARSTRHLEIELPKEASYQEGDHLGVIPRNYEGIVNRVTARFGLSASQLIRLEAEEEKLAHLPLAKTVSVEELLQYVELQDPVTRTQLRAMAAKTVCPPHKVELEALLGKQAYKEQVLAKRLTMLELLEKYPACEMSFSEFIALLPSIRPRYYSISSSPRVDEKQASITVSVVSGPAWSGYGEYKGIASNYLAELQEGDTITCFISTPQSGFTLPKDPETPLIMVGPGTGVAPFRGFVQARKQLKEQGQSLGEAHLYFGCRSPHEDYLYQEELENAQSEGIITLHTAFSRMPNQPKTYVQHVMEQDGKKLIELLDQGAHFYICGDGSQMAPAVEATLMKSYADVHQVSEADARLWLQQLEEKGRYAKDVWLG

SEQ ID NO: 745 - DNA, 3147 bp, synthetic construct
  misc_feature 1..3147: note = variant of P450 oxidase from Bacillus megaterium
  source 1..3147: mol_type = other DNA
atgacaattaaggaaatgcctcagcctaagacgtttggagaacttaaaaatttaccgttattaaacacagataaaccggttcaagctttgatgcgtattgcggatgaattaggagaaatctttaaattcgaggcgcctggtagcgtaacgcgctatttatcaagtcagcgtctaattaaagaagcatgcgatgaatcacgctttgataaaaacttaagtcaagcgcttaaatttgcacgtgattttgttggagacgggctgacgacaagctggacgcatgaaccgaattggaaaaaagcgcataatatcttagttccaagctttagtcagcatgcaatggggcgttatcatgcgatgatggtcgatatcgccgtgcagcttgttcaaaagtgggagcgtctaaatgcagatgagcatattgaagtatcggaagacatgacacgtttaacgcttgatacaattggtctttgcctgtttaactatcgctttaacagcttttaccgagatacgcctcatccatttattgtgagtgtggttcgtgcactggatgaagtaatgaacaagctgcagcgagcaaatccagacgacccagcttatgatgaaaacaagcgccagtgtcaagaagatatcaaggtgatgaacgactatgtagataaaattattgcagatcgcaaagcaaggggtgaacaaagtcatgatttattaacgcagatgctaaacggaaaagatccagaaacgggtgagccgcttgatgacgggaacattcgtcagcaaattattacattcttaattgcgggacaccaaacgacaagtggtcttttatcatttgcgctgtatttcttagtgaaaaatccacgtgtattacaaaaagtagcagaagaagcagcacgagttctagtagatcctgttccaagctacaaacaagtcaaacagcttaaatatgttggcatggtcttaaacgaagcgctgcgcttatggccagtagcgcctatgttttccctatatgcaaaagaagatacggtgcttggaggagaatatcctttaacgaaaggcgacgaagtaatggttctggtgcctcagcttcaccgtgataaaacaatttggggagacgatgtggaggagttccgtccagagcgttttgaaaatccaagtgcgattccgcagcatgcgtttaaaccgtttggaaacggtcagcgtgcgtgtatcggtcagcagttcgctcttcatagtgcaacgctggtacttggtatgatgctaaaacactttgactttgaagatcatacaaactacgagctcgttattaaagaatcgcggacgttaaaacctgaaggctttgtggtaaaagcaaaatcgaaaggcattccgcttggcggtattccttcacctagcactgaacagtctgctaaaaaagtacgcaaaaaggcagaaaacgctcataatacgccgctgcttgtgctatacggttcaaatgcgggaacagctgaaggaacggcgcgtgatttagcagatattgcaatgagcaaaggatttgcaccgcaggtcgcaacgcttgattcacacgccggtaatcttccgcgcgaaggagctgtattaattgtaacggcgtcttataacggtcatccgcctgataacgcaaagcaatttgtcgactggttagaccaagcgtctgcggatgaagtaaaaggcgttcgctactccgtatttggatgcggcgataaaaattgggcggggacgtatcaaaaagtgcctgcttttatcgatgaaacgcttgccgctaaaggggcagaaaacatcgctgaccgcggtgaagcagatgcaagcgacgactttgaaggcacatatgaagaatggcgtgatcatatgtggagtgacgtagcagcctactttggtctcgacattgaaaacagtgaagataataaatctactctttcacttcaatttgtcgacagcgcggcggatatgccgcttgcgaaaatgcacggtgcgttttcaacgaacgtcgtagcaagcaaagaacttcaacagcctggcagtgcacgaagcacgcgacatcttgaaattgaacttccaaaagaagcttcttatcaagaaggagatcatttaggtgttattcctcgctattatgaaggaatagtaaaccgtgtaacagcaaggttcggcctaagcgcatcacagctgatccgtctggaagcagaagaagaaaaattagctcatttgccactcgctaaaacagtatccgtagaagagcttctgcaatacgtggagcttcaagatcctgttacgcgcacgcagcttcgcgcaatggctgctaaaacggtctgcccgccgcataaagtagagcttgaagccttgcttggcaagcaagcctacaaagaacaagtgctggcaaaacgtttaacaatgcttgaactgcttgaaaaatacccggcgtgtgaaatgagtttcagcgaatttatcgcccttctgccaagcatacgcccgcgctattactcgatttcttcatcacctcgtgtcgatgaaaaacaagcaagcatcacggtcagcgttgtctcaggaccggcgtggagcggatatggagaatataaaggaattgcgtcgaactatcttgccgagctgcaagaaggagatacgattacgtgctttatttccacaccgcagtcagagtttacgctgccaaaagaccctgaaacgccgcttatcatggtcggaccgggaacaggcgtcgcgccgtttagaggctttgtgcaggcgcgcaaacagctaaaagaacaaggacagtcacttggagaagcacatttatacttcggctgccgttcacctcatgaagactatctgtatcaagaagagcttgaaaacgcccaaagcgaaggcatcattacgcttcataccgctttttctcgcatgccgaatcagccgaaaacatacgttcagcacgtaatggaacaagacggcaagaaattgattgaacttcttgatcaaggagcgcacttctatatttgcggagacggaagccaaatggcacctgccgttgaagcaacgcttatgaaaagctatgctgacgttcaccaagtgagtgaagcagacgctcgcttatggctgcagcagctagaagaaaaaggccgatacgcaaaagacgtgtggctgggg

SEQ ID NO: 746 - protein, 1049 aa, synthetic construct
  REGION 1..1049: note = variant of P450 oxidase from Bacillus megaterium
MTIKEMPQPKTFGELKNLPLLNTDKPVQALMRIADELGEIFKFEAPGSVTRYLSSQRLIKEACDESRFDKNLSQALKFARDFVGDGLTTSWTHEPNWKKAHNILVPSFSQHAMGRYHAMMVDIAVQLVQKWERLNADEHIEVSEDMTRLTLDTIGLCLFNYRFNSFYRDTPHPFIVSVVRALDEVMNKLQRANPDDPAYDENKRQCQEDIKVMNDYVDKIIADRKARGEQSHDLLTQMLNGKDPETGEPLDDGNIRQQIITFLIAGHQTTSGLLSFALYFLVKNPRVLQKVAEEAARVLVDPVPSYKQVKQLKYVGMVLNEALRLWPVAPMFSLYAKEDTVLGGEYPLTKGDEVMVLVPQLHRDKTIWGDDVEEFRPERFENPSAIPQHAFKPFGNGQRACIGQQFALHSATLVLGMMLKHFDFEDHTNYELVIKESRTLKPEGFVVKAKSKGIPLGGIPSPSTEQSAKKVRKKAENAHNTPLLVLYGSNAGTAEGTARDLADIAMSKGFAPQVATLDSHAGNLPREGAVLIVTASYNGHPPDNAKQFVDWLDQASADEVKGVRYSVFGCGDKNWAGTYQKVPAFIDETLAAKGAENIADRGEADASDDFEGTYEEWRDHMWSDVAAYFGLDIENSEDNKSTLSLQFVDSAADMPLAKMHGAFSTNVVASKELQQPGSARSTRHLEIELPKEASYQEGDHLGVIPRYYEGIVNRVTARFGLSASQLIRLEAEEEKLAHLPLAKTVSVEELLQYVELQDPVTRTQLRAMAAKTVCPPHKVELEALLGKQAYKEQVLAKRLTMLELLEKYPACEMSFSEFIALLPSIRPRYYSISSSPRVDEKQASITVSVVSGPAWSGYGEYKGIASNYLAELQEGDTITCFISTPQSEFTLPKDPETPLIMVGPGTGVAPFRGFVQARKQLKEQGQSLGEAHLYFGCRSPHEDYLYQEELENAQSEGIITLHTAFSRMPNQPKTYVQHVMEQDGKKLIELLDQGAHFYICGDGSQMAPAVEATLMKSYADVHQVSEADARLWLQQLEEKGRYAKDVWLG

SEQ ID NO: 747 - DNA, 3147 bp, synthetic construct
  misc_feature 1..3147: note = variant of P450 oxidase from Bacillus megaterium
  source 1..3147: mol_type = other DNA
atgacaattaaggaaatgcctcagcctaagacgtttggagaacttaaaaatttaccgttattaaacacagataaaccggttcaagctttgatgcgtattgcggatgaattaggagaaatctttaaattcgaggcgcctggtagcgtaacgcgctatttatcaagtcagcgtctaattaaagaagcatgcgatgaatcacgctttgataaaaacttaagtcaagcgcttaaatttgcacgtgattttgttggagacgggctggttacaagctggacgcatgaaccgaattggaaaaaagcgcataatatcttagttccaagctttagtcagcatgcaatggggcgttatcatgcgatgatggtcgatatcgccgtgcagcttgttcaaaagtgggagcgtctaaatgcagatgagcatattgaagtatcggaagacatgacacgtttaacgcttgatacaattggtctttgcctgtttaactatcgctttaacagcttttaccgagatacgcctcatccatttattgtgagtgtggttcgtgcactggatgaagtaatgaacaagctgcagcgagcaaatccagacgacccagcttatgatgaaaacaagcgccagtgtcaagaagatatcaaggtgatgaacgactatgtagataaaattattgcagatcgcaaagcaaggggtgaacaaagtcatgatttattaacgcagatgctaaacggaaaagatccagaaacgggtgagccgcttgatgacgggaacattcgtcagcaaattattacattcttaattgcgggacaccaaacgacaagtggtcttttatcatttgcgctgtatttcttagtgaaaaatccacgtgtattacaaaaagtagcagaagaagcagcacgagttctagtagatcctgttccaagctacaaacaagtcaaacagcttaaatatgttggcatggtcttaaacgaagcgctgcgcttatggccagtagcgcctatgttttccctatatgcaaaagaagatacggtgcttggaggagaatatcctttaacgaaaggcgacgaagtaatggttctggtgcctcagcttcaccgtgataaaacaatttggggagacgatgtggaggagttccgtccagagcgttttgaaaatccaagtgcgattccgcagcatgcgtttaaaccgtttggaaacggtcagcgtgcgtgtatcggtcagcagttcgctcttcatagtgcaacgctggtacttggtatgatgctaaaacactttgactttgaagatcatacaaactacgagctcgttattaaagaatcgcggacgttaaaacctgaaggctttgtggtaaaagcaaaatcgaaaggcattccgcttggcggtattccttcacctagcactgaacagtctgctaaaaaagtacgcaaaaaggcagaaaacgctcataatacgccgctgcttgtgctatacggttcaaatgcgggaacagctgaaggaacggcgcgtgatttagcagatattgcaatgagcaaaggatttgcaccgcaggtcgcaacgcttgattcacacgccggtaatcttccgcgcgaaggagctgtattaattgtaacggcgtcttataacggtcatccgcctgataacgcaaagcaatttgtcgactggttagaccaagcgtctgcggatgaagtaaaaggcgttcgctactccgtatttggatgcggcgataaaaattgggcggggacgtatcaaaaagtgcctgcttttatcgatgaaacgcttgccgctaaaggggcagaaaacatcgctgaccgcggtgaagcagatgcaagcgacgactttgaaggcacatatgaagaatggcgtgatcatatgtggagtgacgtagcagcctactttggtctcgacattgaaaacagtgaagataataaatctactctttcacttcaatttgtcgacagcgcggcggatatgccgcttgcgaaaatgcacggtgcgttttcaacgaacgtcgtagcaagcaaagaacttcaacagcctggcagtgcacgaagcacgcgacatcttgaaattgaacttccaaaagaagcttcttatcaagaaggagatcatttaggtgttattcctcgctattatgaaggaatagtaaaccgtgtaacagcaaggttcggcctaagcgcatcacagctgatccgtctggaagcagaagaagaaaaattagctcatttgccactcgctaaaacagtatccgtagaagagcttctgcaatacgtggagcttcaagatcctgttacgcgcacgcagcttcgcgcaatggctgctaaaacggtctgcccgccgcataaagtagagcttgaagccttgcttggcaagcaagcctacaaagaacaagtgctggcaaaacgtttaacaatgcttgaactgcttgaaaaatacccggcgtgtgaaatgagtttcagcgaatttatcgcccttctgccaagcatacgcccgcgctattactcgatttcttcatcacctcgtgtcgatgaaaaacaagcaagcatcacggtcagcgttgtctcaggaccggcgtggagcggatatggagaatataaaggaattgcgtcgaactatcttgccgagctgcaagaaggagatacgattacgtgctttatttccacaccgcagtcagagtttacgctgccaaaagaccctgaaacgccgcttatcatggtcggaccgggaacaggcgtcgcgccgtttagaggctttgtgcaggcgcgcaaacagctaaaagaacaaggacagtcacttggagaagcacatttatacttcggctgccgttcacctcatgaagactatctgtatcaagaagagcttgaaaacgcccaaagcgaaggcatcattacgcttcataccgctttttctcgcatgccgaatcagccgaaaacatacgttcagcacgtaatggaacaagacggcaagaaattgattgaacttcttgatcaaggagcgcacttctatatttgcggagacggaagccaaatggcacctgccgttgaagcaacgcttatgaaaagctatgctgacgttcaccaagtgagtgaagcagacgctcgcttatggctgcagcagctagaagaaaaaggccgatacgcaaaagacgtgtggctgggg

SEQ ID NO: 748 - protein, 1049 aa, synthetic construct
  REGION 1..1049: note = variant of P450 oxidase from Bacillus megaterium
MTIKEMPQPKTFGELKNLPLLNTDKPVQALMRIADELGEIFKFEAPGSVTRYLSSQRLIKEACDESRFDKNLSQALKFARDFVGDGLVTSWTHEPNWKKAHNILVPSFSQHAMGRYHAMMVDIAVQLVQKWERLNADEHIEVSEDMTRLTLDTIGLCLFNYRFNSFYRDTPHPFIVSVVRALDEVMNKLQRANPDDPAYDENKRQCQEDIKVMNDYVDKIIADRKARGEQSHDLLTQMLNGKDPETGEPLDDGNIRQQIITFLIAGHQTTSGLLSFALYFLVKNPRVLQKVAEEAARVLVDPVPSYKQVKQLKYVGMVLNEALRLWPVAPMFSLYAKEDTVLGGEYPLTKGDEVMVLVPQLHRDKTIWGDDVEEFRPERFENPSAIPQHAFKPFGNGQRACIGQQFALHSATLVLGMMLKHFDFEDHTNYELVIKESRTLKPEGFVVKAKSKGIPLGGIPSPSTEQSAKKVRKKAENAHNTPLLVLYGSNAGTAEGTARDLADIAMSKGFAPQVATLDSHAGNLPREGAVLIVTASYNGHPPDNAKQFVDWLDQASADEVKGVRYSVFGCGDKNWAGTYQKVPAFIDETLAAKGAENIADRGEADASDDFEGTYEEWRDHMWSDVAAYFGLDIENSEDNKSTLSLQFVDSAADMPLAKMHGAFSTNVVASKELQQPGSARSTRHLEIELPKEASYQEGDHLGVIPRYYEGIVNRVTARFGLSASQLIRLEAEEEKLAHLPLAKTVSVEELLQYVELQDPVTRTQLRAMAAKTVCPPHKVELEALLGKQAYKEQVLAKRLTMLELLEKYPACEMSFSEFIALLPSIRPRYYSISSSPRVDEKQASITVSVVSGPAWSGYGEYKGIASNYLAELQEGDTITCFISTPQSEFTLPKDPETPLIMVGPGTGVAPFRGFVQARKQLKEQGQSLGEAHLYFGCRSPHEDYLYQEELENAQSEGIITLHTAFSRMPNQPKTYVQHVMEQDGKKLIELLDQGAHFYICGDGSQMAPAVEATLMKSYADVHQVSEADARLWLQQLEEKGRYAKDVWLG

SEQ ID NO: 749 - DNA, 3147 bp, synthetic construct
  misc_feature 1..3147: note = variant of P450 oxidase from Bacillus megaterium
  source 1..3147: mol_type = other DNA
atgacaattaaggaaatgcctcagcctaagacgtttggagaacttaaaaatttaccgttattaaacacagataaaccggttcaagctttgatgcgtattgcggatgaattaggagaaatctttaaattcgaggcgcctggtagcgtaacgcgctatttatcaagtcagcgtctaattaaagaagcatgcgatgaatcacgctttgataaaaacttaagtcaagcgcttaaatttgcacgtgattttgttggagacgggctggggacaagctggacgcatgaaccgaattggaaaaaagcgcataatatcttagttccaagctttagtcagcatgcaatggggcgttatcatgcgatgatggtcgatatcgccgtgcagcttgttcaaaagtgggagcgtctaaatgcagatgagcatattgaagtatcggaagacatgacacgtttaacgcttgatacaattggtctttgcctgtttaactatcgctttaacagcttttaccgagatacgcctcatccatttattgtgagtgtggttcgtgcactggatgaagtaatgaacaagctgcagcgagcaaatccagacgacccagcttatgatgaaaacaagcgccagtgtcaagaagatatcaaggtgatgaacgactatgtagataaaattattgcagatcgcaaagcaaggggtgaacaaagtcatgatttattaacgcagatgctaaacggaaaagatccagaaacgggtgagccgcttgatgacgggaacattcgtcagcaaattattacattcttaattgcgggacaccaaacgacaagtggtcttttatcatttgcgctgtatttcttagtgaaaaatccacgtgtattacaaaaagtagcagaagaagcagcacgagttctagtagatcctgttccaagctacaaacaagtcaaacagcttaaatatgttggcatggtcttaaacgaagcgctgcgcttatggccagtagcgcctatgttttccctatatgcaaaagaagatacggtgcttggaggagaatatcctttaacgaaaggcgacgaagtaatggttctggtgcctcagcttcaccgtgataaaacaatttggggagacgatgtggaggagttccgtccagagcgttttgaaaatccaagtgcgattccgcagcatgcgtttaaaccgtttggaaacggtcagcgtgcgtgtatcggtcagcagttcgctcttcatagtgcaacgctggtacttggtatgatgctaaaacactttgactttgaagatcatacaaactacgagctcgttattaaagaatcgcggacgttaaaacctgaaggctttgtggtaaaagcaaaatcgaaaggcattccgcttggcggtattccttcacctagcactgaacagtctgctaaaaaagtacgcaaaaaggcagaaaacgctcataatacgccgctgcttgtgctatacggttcaaatgcgggaacagctgaaggaacggcgcgtgatttagcagatattgcaatgagcaaaggatttgcaccgcaggtcgcaacgcttgattcacacgccggtaatcttccgcgcgaaggagctgtattaattgtaacggcgtcttataacggtcatccgcctgataacgcaaagcaatttgtcgactggttagaccaagcgtctgcggatgaagtaaaaggcgttcgctactccgtatttggatgcggcgataaaaattgggcggggacgtatcaaaaagtgcctgcttttatcgatgaaacgcttgccgctaaaggggcagaaaacatcgctgaccgcggtgaagcagatgcaagcgacgactttgaaggcacatatgaagaatggcgtgatcatatgtggagtgacgtagcagcctactttggtctcgacattgaaaacagtgaagataataaatctactctttcacttcaatttgtcgacagcgcggcggatatgccgcttgcgaaaatgcacggtgcgttttcaacgaacgtcgtagcaagcaaagaacttcaacagcctggcagtgcacgaagcacgcgacatcttgaaattgaacttccaaaagaagcttcttatcaagaaggagatcatttaggtgttattcctcgctattatgaaggaatagtaaaccgtgtaacagcaaggttcggcctaagcgcatcacagctgatccgtctggaagcagaagaagaaaaattagctcatttgccactcgctaaaacagtatccgtagaagagcttctgcaatacgtggagcttcaagatcctgttacgcgcacgcagcttcgcgcaatggctgctaaaacggtctgcccgccgcataaagtagagcttgaagccttgcttggcaagcaagcctacaaagaacaagtgctggcaaaacgtttaacaatgcttgaactgcttgaaaaatacccggcgtgtgaaatgagtttcagcgaatttatcgcccttctgccaagcatacgcccgcgctattactcgatttcttcatcacctcgtgtcgatgaaaaacaagcaagcatcacggtcagcgttgtctcaggaccggcgtggagcggatatggagaatataaaggaattgcgtcgaactatcttgccgagctgcaagaaggagatacgattacgtgctttatttccacaccgcagtcagagtttacgctgccaaaagaccctgaaacgccgcttatcatggtcggaccgggaacaggcgtcgcgccgtttagaggctttgtgcaggcgcgcaaacagctaaaagaacaaggacagtcacttggagaagcacatttatacttcggctgccgttcacctcatgaagactatctgtatcaagaagagcttgaaaacgcccaaagcgaaggcatcattacgcttcataccgctttttctcgcatgccgaatcagccgaaaacatacgttcagcacgtaatggaacaagacggcaagaaattgattgaacttcttgatcaaggagcgcacttctatatttgcggagacggaagccaaatggcacctgccgttgaagcaacgcttatgaaaagctatgctgacgttcaccaagtgagtgaagcagacgctcgcttatggctgcagcagctagaagaaaaaggccgatacgcaaaagacgtgtggctgggg

SEQ ID NO: 750 - protein, 1049 aa, synthetic construct
  REGION 1..1049: note = variant of P450 oxidase from Bacillus megaterium
MTIKEMPQPKTFGELKNLPLLNTDKPVQALMRIADELGEIFKFEAPGSVTRYLSSQRLIKEACDESRFDKNLSQALKFARDFVGDGLGTSWTHEPNWKKAHNILVPSFSQHAMGRYHAMMVDIAVQLVQKWERLNADEHIEVSEDMTRLTLDTIGLCLFNYRFNSFYRDTPHPFIVSVVRALDEVMNKLQRANPDDPAYDENKRQCQEDIKVMNDYVDKIIADRKARGEQSHDLLTQMLNGKDPETGEPLDDGNIRQQIITFLIAGHQTTSGLLSFALYFLVKNPRVLQKVAEEAARVLVDPVPSYKQVKQLKYVGMVLNEALRLWPVAPMFSLYAKEDTVLGGEYPLTKGDEVMVLVPQLHRDKTIWGDDVEEFRPERFENPSAIPQHAFKPFGNGQRACIGQQFALHSATLVLGMMLKHFDFEDHTNYELVIKESRTLKPEGFVVKAKSKGIPLGGIPSPSTEQSAKKVRKKAENAHNTPLLVLYGSNAGTAEGTARDLADIAMSKGFAPQVATLDSHAGNLPREGAVLIVTASYNGHPPDNAKQFVDWLDQASADEVKGVRYSVFGCGDKNWAGTYQKVPAFIDETLAAKGAENIADRGEADASDDFEGTYEEWRDHMWSDVAAYFGLDIENSEDNKSTLSLQFVDSAADMPLAKMHGAFSTNVVASKELQQPGSARSTRHLEIELPKEASYQEGDHLGVIPRYYEGIVNRVTARFGLSASQLIRLEAEEEKLAHLPLAKTVSVEELLQYVELQDPVTRTQLRAMAAKTVCPPHKVELEALLGKQAYKEQVLAKRLTMLELLEKYPACEMSFSEFIALLPSIRPRYYSISSSPRVDEKQASITVSVVSGPAWSGYGEYKGIASNYLAELQEGDTITCFISTPQSEFTLPKDPETPLIMVGPGTGVAPFRGFVQARKQLKEQGQSLGEAHLYFGCRSPHEDYLYQEELENAQSEGIITLHTAFSRMPNQPKTYVQHVMEQDGKKLIELLDQGAHFYICGDGSQMAPAVEATLMKSYADVHQVSEADARLWLQQLEEKGRYAKDVWLG

SEQ ID NO: 751 - DNA, 3147 bp, synthetic construct
  misc_feature 1..3147: note = variant of P450 oxidase from Bacillus megaterium
  source 1..3147: mol_type = other DNA
atgacaattaaggaaatgcctcagcctaagacgtttggagaacttaaaaatttaccgttattaaacacagataaaccggttcaagctttgatgcgtattgcggatgaattaggagaaatctttaaattcgaggcgcctggtagcgtaacgcgctatttatcaagtcagcgtctaattaaagaagcatgcgatgaatcacgctttgataaaaacttaagtcaagcgcttaaatttgcacgtgattttgttggagacgggctgtctacaagctggacgcatgaaccgaattggaaaaaagcgcataatatcttagttccaagctttagtcagcatgcaatggggcgttatcatgcgatgatggtcgatatcgccgtgcagcttgttcaaaagtgggagcgtctaaatgcagatgagcatattgaagtatcggaagacatgacacgtttaacgcttgatacaattggtctttgcctgtttaactatcgctttaacagcttttaccgagatacgcctcatccatttattgtgagtgtggttcgtgcactggatgaagtaatgaacaagctgcagcgagcaaatccagacgacccagcttatgatgaaaacaagcgccagtgtcaagaagatatcaaggtgatgaacgactatgtagataaaattattgcagatcgcaaagcaaggggtgaacaaagtcatgatttattaacgcagatgctaaacggaaaagatccagaaacgggtgagccgcttgatgacgggaacattcgtcagcaaattattacattcttaattgcgggacaccaaacgacaagtggtcttttatcatttgcgctgtatttcttagtgaaaaatccacgtgtattacaaaaagtagcagaagaagcagcacgagttctagtagatcctgttccaagctacaaacaagtcaaacagcttaaatatgttggcatggtcttaaacgaagcgctgcgcttatggccagtagcgcctatgttttccctatatgcaaaagaagatacggtgcttggaggagaatatcctttaacgaaaggcgacgaagtaatggttctggtgcctcagcttcaccgtgataaaacaatttggggagacgatgtggaggagttccgtccagagcgttttgaaaatccaagtgcgattccgcagcatgcgtttaaaccgtttggaaacggtcagcgtgcgtgtatcggtcagcagttcgctcttcatgaagcaacgctggtacttggtatgatgctaaaacactttgactttgaagatcatacaaactacgagctcgttattaaagaatcgcggacgttaaaacctgaaggctttgtggtaaaagcaaaatcgaaaggcattccgcttggcggtattccttcacctagcactgaacagtctgctaaaaaagtacgcaaaaaggcagaaaacgctcataatacgccgctgcttgtgctatacggttcaaatgcgggaacagctgaaggaacggcgcgtgatttagcagatattgcaatgagcaaaggatttgcaccgcaggtcgcaacgcttgattcacacgccggtaatcttccgcgcgaaggagctgtattaattgtaacggcgtcttataacggtcatccgcctgataacgcaaagcaatttgtcgactggttagaccaagcgtctccggatgaagtaaaaggcgttcgctactccgtatttggatgcggcgataaaaattgggcggggacgtatcaaaaagtgcctgcttttatcgatgaaacgcttgccgctaaaggggcagaaaacatcgctgaccgcggtgaagcagatgcaagcgacgactttgaaggcacatatgaagaatggcgtgatcatatgtggagtgacgtagcagcctactttggtctcgacattgaaaacagtgaagataataaatctactctttcacttcaatttgtcgacagcgcggcggatatgccgcttgcgaaaatgcacggtgcgttttcaacgaacgtcgtagcaagcaaagaacttcaacagcctggcagtgcacgaagcacgcgacatcttgaaattgaacttccaaaagaagcttcttatcaagaaggagatcatttaggtgttattcctcgctattatgaaggaatagtaaaccgtgtaacagcaaggttcggcctaagcgcatcacagctgatccgtctggaagcagaagaagaaaaattagctcatttgccactcgctaaaacagtatccgtagaagagcttctgcaatacgtggagcttcaagatcctgttacgcgcacgcagcttcgcgcaatggctgctaaaacggtctgcccgccgcataaagtagagcttgaagccttgcttgggaagcaagcctacaaagaacaagtgctggcaaaacgtttaacaatgcttgaactgcttgaaaaatacccggcgtgtgaaatgagtttcagcgaatttatcgcccttctgccaagcatacgcccgcgctattactcgatttcttcatcacctcgtgtcgatgaaaaacaagcaagcatcacggtcagcgttgtctcaggaccggcgtggagcggatatggagaatataaaggaattgcgtcgaactatcttgccgagctgcaagaaggagatacgattacgtgctttatttccacaccgcagtcagagtttacgctgccaaaagaccctgaaacgccgcttatcatggtcggaccgggaacaggcgtcgcgccgtttagaggctttgtgcaggcgcgcaaacagctaaaagaaggtggacagtcacttggagaagcacatttatacttcggctgccgttcacctcatgaagactatctgtatcaagaagagcttgaaaacgcccaaagcgaaggcatcattacgcttcataccgctttttctcgcatgccgaatcagccgaaaacatacgttcagcacgtaatggaacaagacggcaagaaattgattgaacttcttgatcaaggagcgcacttctatatttgcggagacggaagccaaatggcacctgccgttgaagcaacgcttatgaaaagctatgctgacgttcaccaagtgagtgaagcagacgctcgcttatggctgcagcagctagaagaaaaaggccgatacgcaaaagacgtgtggctgggg

SEQ ID NO: 752 - protein, 1049 aa, synthetic construct
  REGION 1..1049: note = variant of P450 oxidase from Bacillus megaterium
MTIKEMPQPKTFGELKNLPLLNTDKPVQALMRIADELGEIFKFEAPGSVTRYLSSQRLIKEACDESRFDKNLSQALKFARDFVGDGLSTSWTHEPNWKKAHNILVPSFSQHAMGRYHAMMVDIAVQLVQKWERLNADEHIEVSEDMTRLTLDTIGLCLFNYRFNSFYRDTPHPFIVSVVRALDEVMNKLQRANPDDPAYDENKRQCQEDIKVMNDYVDKIIADRKARGEQSHDLLTQMLNGKDPETGEPLDDGNIRQQIITFLIAGHQTTSGLLSFALYFLVKNPRVLQKVAEEAARVLVDPVPSYKQVKQLKYVGMVLNEALRLWPVAPMFSLYAKEDTVLGGEYPLTKGDEVMVLVPQLHRDKTIWGDDVEEFRPERFENPSAIPQHAFKPFGNGQRACIGQQFALHEATLVLGMMLKHFDFEDHTNYELVIKESRTLKPEGFVVKAKSKGIPLGGIPSPSTEQSAKKVRKKAENAHNTPLLVLYGSNAGTAEGTARDLADIAMSKGFAPQVATLDSHAGNLPREGAVLIVTASYNGHPPDNAKQFVDWLDQASPDEVKGVRYSVFGCGDKNWAGTYQKVPAFIDETLAAKGAENIADRGEADASDDFEGTYEEWRDHMWSDVAAYFGLDIENSEDNKSTLSLQFVDSAADMPLAKMHGAFSTNVVASKELQQPGSARSTRHLEIELPKEASYQEGDHLGVIPRYYEGIVNRVTARFGLSASQLIRLEAEEEKLAHLPLAKTVSVEELLQYVELQDPVTRTQLRAMAAKTVCPPHKVELEALLGKQAYKEQVLAKRLTMLELLEKYPACEMSFSEFIALLPSIRPRYYSISSSPRVDEKQASITVSVVSGPAWSGYGEYKGIASNYLAELQEGDTITCFISTPQSEFTLPKDPETPLIMVGPGTGVAPFRGFVQARKQLKEGGQSLGEAHLYFGCRSPHEDYLYQEELENAQSEGIITLHTAFSRMPNQPKTYVQHVMEQDGKKLIELLDQGAHFYICGDGSQMAPAVEATLMKSYADVHQVSEADARLWLQQLEEKGRYAKDVWLG

SEQ ID NO: 753 - DNA, 3147 bp, synthetic construct
  misc_feature 1..3147: note = variant of P450 oxidase from Bacillus megaterium
  source 1..3147: mol_type = other DNA
atgacaattaaggaaatgcctcagcctaagacgtttggagaacttaaaaatttaccgttattaaacacagataaaccggttcaagctttgatgcgtattgcggatgaattaggagaaatctttaaattcgaggcgcctggtagcgtaacgcgctatttatcaagtcagcgtctaattaaagaagcatgcgatgaatcacgctttgataaaaacttaagtcaagcgcttaaatttgcacgtgattttgttggagacgggttatcgacaagctggacgcatgaaccgaattggaaaaaagcgcataatatcttagttccaagctttagtcagcatgcaatggggcgttatcatgcgatgatggtcgatatcgccgtgcagcttgttcaaaagtgggagcgtctaaatgcagatgagcatattgaagtatcggaagacatgacacgtttaacgcttgatacaattggtctttgcctgtttaactatcgctttaacagcttttaccgagatacgcctcatccatttattgtgagtgtggttcgtgcactggatgaagtaatgaacaagctgcagcgagcaaatccagacgacccagcttatgatgaaaacaagcgccagtgtcaagaagatatcaaggtgatgaacgactatgtagataaaattattgcagatcgcaaagcaaggggtgaacaaagtcatgatttattaacgcagatgctaaacggaaaagatccagaaacgggtgagccgcttgatgacgggaacattcgtcagcaaattattacattcttaattgcgggacaccaaacgacaagtggtcttttatcatttgcgctgtatttcttagtgaaaaatccacgtgtattacaaaaagtagcagaagaagcagcacgagttctagtagatcctgttccaagctacaaacaagtcaaacagcttaaatatgttggcatggtcttaaacgaagcgctgcgcttatggccagtagcgcctatgttttccctatatgcaaaagaagatacggtgcttggaggagaatatcctttaacgaaaggcgacgaagtaatggttctggtgcctcagcttcaccgtgataaaacaatttggggagacgatgtggaggagttccgtccagagcgttttgaaaatccaagtgcgattccgcagcatgcgtttaaaccgtttggaaacggtcagcgtgcgtgtatcggtcagcagttcgctcttcatagtgcaacgctggtacttggtatgatgctaaaacactttgactttgaagatcatacaaactacgagctcgttattaaagaatcgcggacgttaaaacctgaaggctttgtggtaaaagcaaaatcgaaaggcattccgcttggcggtattccttcacctagcactgaacagtctgctaaaaaagtacgcaaaaaggcagaaaacgctcataatacgccgctgcttgtgctatacggttcaaatgcgggaacggctgaaggagctgcgcgtgatttagcagatattgcaatgagcaaaggatttgcaccgcaggtcgcaacgcttgattcacacgccggtaatcttccgcgcgaaggagctgtattaattgtaacggcgtcttataacggtcatccgcctgataacgcaaagcaatttgtcgactggttagaccaagcgtctccggatgaagtaaaaggcgttcgctactccgtatttggatgcggcgataaaaattgggcggggacgtatcaaaaagtgcctgcttttatcgatgaaacgcttgccgctaaaggggcagaaaacatcgctgaccgcggtgaagcagatgcaagcgacgactttgaaggcacatatgaagaatggcgtgatcatatgtggagtgacgtagcagcctactttggtctcgacattgaaaacagtgaagataataaatctactctttcacttcaatttgtcgacagcgcggcggatatgccgcttgcgaaaatgcacggtgcgttttcaacgaacgtcgtagcaagcaaagaacttcaacagcctggcagtgcacgaagcacgcgacatcttgaaattgaacttccaaaagaagcttcttatcaagaaggagatcatttaggtgttattcctcgctattatgaaggaatagtaaaccgtgtaacagcaaggttcggcctaagcgcatcacagctgatccgtctggaagcagaagaagaaaaattagctcatttgccactcgctaaaacagtatccgtagaagagcttctgcaatacgtggagcttcaagatcctgttacgcgcacgcagcttcgcgcaatggctgctaaaacggtctgcccgccgcataaagtagagcttgaagccttgcttggcaagcaagcctacaaagaacaagtgctggcaaaacgtttaacaatgcttgaactgcttgaaaaatacccggcgtgtgaaatgagtttcagcgaatttatcgcccttctgccaagcatacgcccgcgctattactcgatttcttcatcacctcgtgtcgatgaaaaacaagcaagcatcacggtcagcgttgtctcaggaccggcgtggagcggatatggagaatataaaggaattgcgtcgaactatcttgccgagctgcaagaaggagatacgattacgtgctttatttccacaccgcagtcagagtttacgctgccaaaagaccctgaaacgccgcttatcatggtcggaccgggaacaggcgtcgcgccgtttagaggctttgtgcaggcgcgcaaacagctaaaagaacaaggacagtcacttggagaagcacatttatacttcggctgccgttcacctcatgaagactatctgtatcaagaagagcttgaaaacgcccaaagcgaaggcatcattacgcttcataccgctttttctcgcatgccgaatcagccgaaaacatacgttcagcacgtaatggaacaagacggcaagaaattgattgaacttcttgatcaaggagcgcacttctatatttgcggagacggaagccaaatggcacctgccgttgaagcaacgcttatgaaaagctatgctgacgttcaccaagtgagtgaagcagacgctcgcttatggctgcagcagctagaagaaaaaggccgatacgcaaaagacgtgtggctgggg

SEQ ID NO: 754 - protein, 1049 aa, synthetic construct
  REGION 1..1049: note = variant of P450 oxidase from Bacillus megaterium
MTIKEMPQPKTFGELKNLPLLNTDKPVQALMRIADELGEIFKFEAPGSVTRYLSSQRLIKEACDESRFDKNLSQALKFARDFVGDGLSTSWTHEPNWKKAHNILVPSFSQHAMGRYHAMMVDIAVQLVQKWERLNADEHIEVSEDMTRLTLDTIGLCLFNYRFNSFYRDTPHPFIVSVVRALDEVMNKLQRANPDDPAYDENKRQCQEDIKVMNDYVDKIIADRKARGEQSHDLLTQMLNGKDPETGEPLDDGNIRQQIITFLIAGHQTTSGLLSFALYFLVKNPRVLQKVAEEAARVLVDPVPSYKQVKQLKYVGMVLNEALRLWPVAPMFSLYAKEDTVLGGEYPLTKGDEVMVLVPQLHRDKTIWGDDVEEFRPERFENPSAIPQHAFKPFGNGQRACIGQQFALHSATLVLGMMLKHFDFEDHTNYELVIKESRTLKPEGFVVKAKSKGIPLGGIPSPSTEQSAKKVRKKAENAHNTPLLVLYGSNAGTAEGAARDLADIAMSKGFAPQVATLDSHAGNLPREGAVLIVTASYNGHPPDNAKQFVDWLDQASPDEVKGVRYSVFGCGDKNWAGTYQKVPAFIDETLAAKGAENIADRGEADASDDFEGTYEEWRDHMWSDVAAYFGLDIENSEDNKSTLSLQFVDSAADMPLAKMHGAFSTNVVASKELQQPGSARSTRHLEIELPKEASYQEGDHLGVIPRYYEGIVNRVTARFGLSASQLIRLEAEEEKLAHLPLAKTVSVEELLQYVELQDPVTRTQLRAMAAKTVCPPHKVELEALLGKQAYKEQVLAKRLTMLELLEKYPACEMSFSEFIALLPSIRPRYYSISSSPRVDEKQASITVSVVSGPAWSGYGEYKGIASNYLAELQEGDTITCFISTPQSEFTLPKDPETPLIMVGPGTGVAPFRGFVQARKQLKEQGQSLGEAHLYFGCRSPHEDYLYQEELENAQSEGIITLHTAFSRMPNQPKTYVQHVMEQDGKKLIELLDQGAHFYICGDGSQMAPAVEATLMKSYADVHQVSEADARLWLQQLEEKGRYAKDVWLG

SEQ ID NO: 755 - DNA, 3147 bp, synthetic construct
  misc_feature 1..3147: note = variant of P450 oxidase from Bacillus megaterium
  source 1..3147: mol_type = other DNA
atgacaattaaggaaatgcctcagcctaagacgtttggagaacttaaaaatttaccgttattaaacacagataaaccggttcaagctttgatgcgtattgcggatgaattaggagaaatctttaaattcgaggcgcctggtagcgtaacgcgctatttatcaagtcagcgtctaattaaagaagcatgcgatgaatcacgctttgataaaaacttaagtcaagcgcttaaatttgcacgtgattttgttggagacgggttatcgacaagctggacgcatgaaccgaattggaaaaaagcgcataatatcttagttccaagctttagtcagcatgcaatggggcgttatcatgcgatgatggtcgatatcgccgtgcagcttgttcaaaagtgggagcgtctaaatgcagatgagcatattgaagtatcggaagacatgacacgtttaacgcttgatacaattggtctttgcctgtttaactatcgctttaacagcttttaccgagatacgcctcatccatttattgtgagtgtggttcgtgcactggatgaagtaatgaacaagctgcagcgagcaaatccagacgacccagcttatgatgaaaacaagcgccagtgtcaagaagatatcaaggtgatgaacgactatgtagataaaattattgcagatcgcaaagcaaggggtgaacaaagtcatgatttattaacgcagatgctaaacggaaaagatccagaaacgggtgagccgcttgatgacgggaacattcgtcagcaaattattacattcttaattgcgggacaccaaacgacaagtggtcttttatcatttgcgctgtatttcttagtgaaaaatccacgtgtattacaaaaagtagcagaagaagcagcacgagttctagtagatcctgttccaagctacaaacaagtcaaacagcttaaatatgttggcatggtcttaaacgaagcgctgcgcttatggccagtagcgcctatgttttccctatatgcaaaagaagatacggtgcttggaggagaatatcctttaacgaaaggcgacgaagtaatggttctggtgcctcagcttcaccgtgataaaacaatttggggagacgatgtggaggagttccgtccagagcgttttgaaaatccaagtgcgattccgcagcatgcgtttaaaccgtttggaaacggtcagcgtgcgtgtatcggtcagcagttcgctcttcatgaagcaacgctggtacttggtatgatgctaaaacactttgactttgaagatcatacaaactacgagctcgttattaaagaatcgcggacgttaaaacctgaaggctttgtggtaaaagcaaaatcgaaaggcattccgcttggcggtattccttcacctagcactgaacagtctgctaaaaaagtacgcaaaaaggcagaaaacgctcataatacgccgctgcttgtgctatacggttcaaatgcgggaacggctgaaggagctgcgcgtgatttagcagatattgcaatgagcaaaggatttgcaccgcaggtcgcaacgcttgattcacacgccggtaatcttccgcgcgaaggagctgtattaattgtaacggcgtcttataacggtcatccgcctgataacgcaaagcaatttgtcgactggttagaccaagcgtctgcggatgaagtaaaaggcgttcgctactccgtatttggatgcggcgataaaaattgggcggggacgtatcaaaaagtgcctgcttttatcgatgaaacgcttgccgctaaaggggcagaaaacatcgctgaccgcggtgaagcagatgcaagcgacgactttgaaggcacatatgaagaatggcgtgatcatatgtggagtgacgtagcagcctactttggtctcgacattgaaaacagtgaagataataaatctactctttcacttcaatttgtcgacagcgcggcggatatgccgcttgcgaaaatgcacggtgcgttttcaacgaacgtcgtagcaagcaaagaacttcaacagcctggcagtgcacgaagcacgcgacatcttgaaattgaacttccaaaagaagcttcttatcaagaaggagatcatttaggtgttattcctcgctattatgaaggaatagtaaaccgtgtaacagcaaggttcggcctaagcgcatcacagctgatccgtctggaagcagaagaagaaaaattagctcatttgccactcgctaaaacagtatccgtagaagagcttctgcaatacgtggagcttcaagatcctgttacgcgcacgcagcttcgcgcaatggctgctaaaacggtctgcccgccgcataaagtagagcttgaagccttgcttggcaagcaagcctacaaagaacaagtgctggcaaaacgtttaacaatgcttgaactgcttgaaaaatacccggcgtgtgaaatgaagttcagcgaatttatcgcccttctgccaagcatacgcccgcgctattactcgatttcttcatcacctcgtgtcgatgaaaaacaagcaagcatcacggtcagcgttgtctcaggaccggcgtggagcggatatggagaatataaaggaattgcgtcgaactatcttgccgagctgcaagaaggagatacgattacgtgctttatttccacaccgcagtcagagtttacgctgccaaaagaccctgaaacgccgcttatcatggtcggaccgggaacaggcgtcgcgccgtttagaggctttgtgcaggcgcgcaaacagctaaaagaacaaggacagtcacttggagaagcacatttatacttcggctgccgttcacctcatgaagactatctgtatcaagaagagcttgaaaacgcccaaagcgaaggcatcattacgcttcataccgctttttctcgcatgccgaatcagccgaaaacatacgttcagcacgtaatggaacaagacggcaagaaattgattgaacttcttgatcaaggagcgcacttctatatttgcggagacggaagccaaatggcacctgccgttgaagcaacgcttatgaaaagctatgctgacgttcaccaagtgagtgaagcagacgctcgcttatggctgcagcagctagaagaaaaaggccgatacgcaaaagacgtgtggctgggg

SEQ ID NO: 756 - protein, 1049 aa, synthetic construct
  REGION 1..1049: note = variant of P450 oxidase from Bacillus megaterium
MTIKEMPQPKTFGELKNLPLLNTDKPVQALMRIADELGEIFKFEAPGSVTRYLSSQRLIKEACDESRFDKNLSQALKFARDFVGDGLSTSWTHEPNWKKAHNILVPSFSQHAMGRYHAMMVDIAVQLVQKWERLNADEHIEVSEDMTRLTLDTIGLCLFNYRFNSFYRDTPHPFIVSVVRALDEVMNKLQRANPDDPAYDENKRQCQEDIKVMNDYVDKIIADRKARGEQSHDLLTQMLNGKDPETGEPLDDGNIRQQIITFLIAGHQTTSGLLSFALYFLVKNPRVLQKVAEEAARVLVDPVPSYKQVKQLKYVGMVLNEALRLWPVAPMFSLYAKEDTVLGGEYPLTKGDEVMVLVPQLHRDKTIWGDDVEEFRPERFENPSAIPQHAFKPFGNGQRACIGQQFALHEATLVLGMMLKHFDFEDHTNYELVIKESRTLKPEGFVVKAKSKGIPLGGIPSPSTEQSAKKVRKKAENAHNTPLLVLYGSNAGTAEGAARDLADIAMSKGFAPQVATLDSHAGNLPREGAVLIVTASYNGHPPDNAKQFVDWLDQASADEVKGVRYSVFGCGDKNWAGTYQKVPAFIDETLAAKGAENIADRGEADASDDFEGTYEEWRDHMWSDVAAYFGLDIENSEDNKSTLSLQFVDSAADMPLAKMHGAFSTNVVASKELQQPGSARSTRHLEIELPKEASYQEGDHLGVIPRYYEGIVNRVTARFGLSASQLIRLEAEEEKLAHLPLAKTVSVEELLQYVELQDPVTRTQLRAMAAKTVCPPHKVELEALLGKQAYKEQVLAKRLTMLELLEKYPACEMKFSEFIALLPSIRPRYYSISSSPRVDEKQASITVSVVSGPAWSGYGEYKGIASNYLAELQEGDTITCFISTPQSEFTLPKDPETPLIMVGPGTGVAPFRGFVQARKQLKEQGQSLGEAHLYFGCRSPHEDYLYQEELENAQSEGIITLHTAFSRMPNQPKTYVQHVMEQDGKKLIELLDQGAHFYICGDGSQMAPAVEATLMKSYADVHQVSEADARLWLQQLEEKGRYAKDVWLG

SEQ ID NO: 757 - DNA, 3147 bp, synthetic construct
  misc_feature 1..3147: note = variant of P450 oxidase from Bacillus megaterium
  source 1..3147: mol_type = other DNA
atgacaattaaggaaatgcctcagcctaagacgtttggagaacttaaaaatttaccgttattaaacacagataaaccggttcaagctttgatgcgtattgcggatgaattaggagaaatctttaaattcgaggcgcctggtagcgtaacgcgctatttatcaagtcagcgtctaattaaagaagcatgcgatgaatcacgctttgataaaaacttaagtcaagcgcttaaatttgcacgtgattttgttggagacgggctgtctacaagctggacgcatgaaccgaattggaaaaaagcgcataatatcttagttccaagctttagtcagcatgcaatggggcgttatcatgcgatgatggtcgatatcgccgtgcagcttgttcaaaagtgggagcgtctaaatgcagatgagcatattgaagtatcggaagacatgacacgtttaacgcttgatacaattggtctttgcctgtttaactatcgctttaacagcttttaccgagatacgcctcatccatttattgtgagtgtggttcgtgcactggatgaagtaatgaacaagctgcagcgagcaaatccagacgacccagcttatgatgaaaacaagcgccagtgtcaagaagatatcaaggtgatgaacgactatgtagataaaattattgcagatcgcaaagcaaggggtgaacaaagtcatgatttattaacgcagatgctaaacggaaaagatccagaaacgggtgagccgcttgatgacgggaacattcgtcagcaaattattacattcttaattgcgggacaccaaacgacaagtggtcttttatcatttgcgctgtatttcttagtgaaaaatccacgtgtattacaaaaagtagcagaagaagcagcacgagttctagtagatcctgttccaagctacaaacaagtcaaacagcttaaatatgttggcatggtcttaaacgaagcgctgcgcttatggccagtagcgcctatgttttccctatatgcaaaagaagatacggtgcttggaggagaatatcctttaacgaaaggcgacgaagtaatggttctggtgcctcagcttcaccgtgataaaacaatttggggagacgatgtggaggagttccgtccagagcgttttgaaaatccaagtgcgattccgcagcatgcgtttaaaccgtttggaaacggtcagcgtgcgtgtatcggtcagcagttcgctcttcatgaagcaacgctggtacttggtatgatgctaaaacactttgactttgaagatcatacaaactacgagctcgttattaaagaatcgcggacgttaaaacctgaaggctttgtggtaaaagcaaaatcgaaaggcattccgcttggcggtattccttcacctagcactgaacagtctgctaaaaaagtacgcaaaaaggcagaaaacgctcataatacgccgctgcttgtgctatacggttcaaatgcgggaacggctgaaggagctgcgcgtgatttagcagatattgcaatgagcaaaggatttgcaccgcaggtcgcaacgcttgattcacacgccggtaatcttccgcgcgaaggagctgtattaattgtaacggcgtcttataacggtcatccgcctgataacgcaaagcaatttgtcgactggttagaccaagcgtctccggatgaagtaaaaggcgttcgctactccgtatttggatgcggcgataaaaattgggtggggacgtatcaaaaagtgcctgcttttatcgatgaaacgcttgccgctaaaggggcagaaaacatcgctgaccgcggtgaagcagatgcaagcgacgactttgaaggcacatatgaagaatggcgtgatcatatgtggagtgacgtagcagcctactttggtctcgacattgaaaacagtgaagataataaatctactctttcacttcaatttgtcgacagcgcggcggatatgccgcttgcgaaaatgcacggtgcgttttcaacgaacgtcgtagcaagcaaagaacttcaacagcctggcagtgcacgaagcacgcgacatcttgaaattgaacttccaaaagaagcttcttatcaagaaggagatcatttaggtgttattcctcgctattatgaaggaatagtaaaccgtgtaacagcaaggttcggcctaagcgcatcacagctgatccgtctggaagcagaagaagaaaaattagctcatttgccactcgctaaaacagtatccgtagaagagcttctgcaatacgtggagcttcaagatcctgttacgcgcacgcagcttcgcgcaatggctgctaaaacggtctgcccgccgcataaagtagagcttgaagccttgcttggcaagcaagcctacaaagaacaagtgctggcaaaacgtttaacaatgcttgaactgcttgaaaaatacccggcgtgtgaaatgaagttcagcgaatttatcgcccttctgccaagcatacgcccgcgctattactcgatttcttcatcacctcgtgtcgatgaaaaacaagcaagcatcacggtcagcgttgtctcaggaccggcgtggagcggatatggagaatataaaggaattgcgtcgaactatcttgccgagctgcaagaaggagatacgattacgtgctttatttccacaccgcagtcagagtttacgctgccaaaagaccctgaaacgccgcttatcatggtcggaccgggaacaggcgtcgcgccgtttagaggctttgtgcaggcgcgcaaacagctaaaagaacaaggacagtcacttggagaagcacatttatacttcggctgccgttcacctcatgaagactatctgtatcaagaagagcttgaaaacgcccaaagcgaaggcatcattacgcttcataccgctttttctcgcatgccgaatcagccgaaaacatacgttcagcacgtaatggaacaagacggcaagaaattgattgaacttcttgatcaaggagcgcacttctatatttgcggagacggaagccaaatggcacctgccgttgaagcaacgcttatgaaaagctatgctgacgttcaccaagtgagtgaagcagacgctcgcttatggctgcagcagctagaagaaaaaggccgatacgcaaaagacgtgtggctgggg

SEQ ID NO: 758 - protein, 1049 aa, synthetic construct
  REGION 1..1049: note = variant of P450 oxidase from Bacillus megaterium
MTIKEMPQPKTFGELKNLPLLNTDKPVQALMRIADELGEIFKFEAPGSVTRYLSSQRLIKEACDESRFDKNLSQALKFARDFVGDGLSTSWTHEPNWKKAHNILVPSFSQHAMGRYHAMMVDIAVQLVQKWERLNADEHIEVSEDMTRLTLDTIGLCLFNYRFNSFYRDTPHPFIVSVVRALDEVMNKLQRANPDDPAYDENKRQCQEDIKVMNDYVDKIIADRKARGEQSHDLLTQMLNGKDPETGEPLDDGNIRQQIITFLIAGHQTTSGLLSFALYFLVKNPRVLQKVAEEAARVLVDPVPSYKQVKQLKYVGMVLNEALRLWPVAPMFSLYAKEDTVLGGEYPLTKGDEVMVLVPQLHRDKTIWGDDVEEFRPERFENPSAIPQHAFKPFGNGQRACIGQQFALHEATLVLGMMLKHFDFEDHTNYELVIKESRTLKPEGFVVKAKSKGIPLGGIPSPSTEQSAKKVRKKAENAHNTPLLVLYGSNAGTAEGAARDLADIAMSKGFAPQVATLDSHAGNLPREGAVLIVTASYNGHPPDNAKQFVDWLDQASPDEVKGVRYSVFGCGDKNWVGTYQKVPAFIDETLAAKGAENIADRGEADASDDFEGTYEEWRDHMWSDVAAYFGLDIENSEDNKSTLSLQFVDSAADMPLAKMHGAFSTNVVASKELQQPGSARSTRHLEIELPKEASYQEGDHLGVIPRYYEGIVNRVTARFGLSASQLIRLEAEEEKLAHLPLAKTVSVEELLQYVELQDPVTRTQLRAMAAKTVCPPHKVELEALLGKQAYKEQVLAKRLTMLELLEKYPACEMKFSEFIALLPSIRPRYYSISSSPRVDEKQASITVSVVSGPAWSGYGEYKGIASNYLAELQEGDTITCFISTPQSEFTLPKDPETPLIMVGPGTGVAPFRGFVQARKQLKEQGQSLGEAHLYFGCRSPHEDYLYQEELENAQSEGIITLHTAFSRMPNQPKTYVQHVMEQDGKKLIELLDQGAHFYICGDGSQMAPAVEATLMKSYADVHQVSEADARLWLQQLEEKGRYAKDVWLG

SEQ ID NO: 759 - DNA, 3147 bp, synthetic construct
  misc_feature 1..3147: note = variant of P450 oxidase from Bacillus megaterium
  source 1..3147: mol_type = other DNA
atgacaattaaggaaatgcctcagcctaagacgtttggagaacttaaaaatttaccgttattaaacacagataaaccggttcaagctttgatgcgtattgcggatgaattaggagaaatctttaaattcgaggcgcctggtagcgtaacgcgctatttatcaagtcagcgtctaattaaagaagcatgcgatgaatcacgctttgataaaaacttaagtcaagcgcttaaatttgcacgtgattttgttggagacgggctgtctacaagctggacgcatgaaccgaattggaaaaaagcgcataatatcttagttccaagctttagtcagcatgcaatggggcgttatcatgcgatgatggtcgatatcgccgtgcagcttgttcaaaagtgggagcgtctaaatgcagatgagcatattgaagtatcggaagacatgacacgtttaacgcttgatacaattggtctttgcctgtttaactatcgctttaacagcttttaccgagatacgcctcatccatttattgtgagtgtggttcgtgcactggatgaagtaatgaacaagctgcagcgagcaaatccagacgacccagcttatgatgaaaacaagcgccagtgtcaagaagatatcaaggtgatgaacgactatgtagataaaattattgcagatcgcaaagcaaggggtgaacaaagtcatgatttattaacgcagatgctaaacggaaaagatccagaaacgggtgagccgcttgatgacgggaacattcgtcagcaaattattacattcttaattgcgggacaccaaacgacaagtggtcttttatcatttgcgctgtatttcttagtgaaaaatccacgtgtattacaaaaagtagcagaagaagcagcacgagttctagtagatcctgttccaagctacaaacaagtcaaacagcttaaatatgttggcatggtcttaaacgaagcgctgcgcttatggccagtagcgcctatgttttccctatatgcaaaagaagatacggtgcttggaggagaatatcctttaacgaaaggcgacgaagtaatggttctggtgcctcagcttcaccgtgataaaacaatttggggagacgatgtggaggagttccgtccagagcgttttgaaaatccaagtgcgattccgcagcatgcgtttaaaccgtttggaaacggtcagcgtgcgtgtatcggtcagcagttcgctcttcatgaagcaacgctggtacttggtatgatgctaaaacactttgactttgaagatcatacaaactacgagctcgttattaaagaatcgcggacgttaaaacctgaaggctttgtggtaaaagcaaaatcgaaaggcattccgcttggcggtattccttcacctagcactgaacagtctgctaaaaaagtacgcaaaaaggcagaaaacgctcataatacgccgctgcttgtgctatacggttcaaatgcgggaacggctgaaggagctgcgcgtgatttagcagatattgcaatgagcaaaggatttgcaccgcaggtcgcaacgcttgattcacacgccggtaatcttccgcgcgaaggagctgtattaattgtaacggcgtcttataacggtcatccgcctgataacgcaaagcaatttgtcgactggttagaccaagcgtctgcggatgaagtaaaaggcgttcgctactccgtatttggatgcggcgatagcaattgggtggggacgtatcaaaaagtgcctgcttttatcgatgaaacgcttgccgctaaaggggcagaaaacatcgctgaccgcggtgaagcagatgcaagcgacgactttgaaggcacatatgaagaatggcgtgatcatatgtggagtgacgtagcagcctactttggtctcgacattgaaaacagtgaagataataaatctactctttcacttcaatttgtcgacagcgcggcggatatgccgcttgcgaaaatgcacggtgcgttttcaacgaacgtcgtagcaagcaaagaacttcaacagcctggcagtgcacgaagcacgcgacatcttgaaattgaacttccaaaagaagcttcttatcaagaaggagatcatttaggtgttattcctcgctattatgaaggaatagtaaaccgtgtaacagcaaggttcggcctaagcgcatcacagctgatccgtctggaagcagaagaagaaaaattagctcatttgccactcgctaaaacagtatccgtagaagagcttctgcaatacgtggagcttcaagatcctgttacgcgcacgcagcttcgcgcaatggctgctaaaacggtctgcccgccgcataaagtagagcttgaagccttgcttgggaagcaagcctacaaagaacaagtgctggcaaaacgtttaacaatgcttgaactgcttgaaaaatacccggcgtgtgaaatgagtttcagcgaatttatcgcccttctgccaagcatacgcccgcgctattactcgatttcttcatcacctcgtgtcgatgaaaaacaagcaagcatcacggtcagcgttgtctcaggaccggcgtggagcggatatggagaatataaaggaattgcgtcgaactatcttgccgagctgcaagaaggagatacgattacgtgctttatttccacaccgcagtcagagtttacgctgccaaaagaccctgaaacgccgcttatcatggtcggaccgggaacaggcgtcgcgccgtttagaggctttgtgcaggcgcgcaaacagctaaaagaacaaggacagtcacttggagaagcacatttatacttcggctgccgttcacctcatgaagactatctgtatcaagaagagcttgaaaacgcccaaagcgaaggcatcattacgcttcataccgctttttctcgcatgccgaatcagccgaaaacatacgttcagcacgtaatggaacaagacggcaagaaattgattgaacttcttgatcaaggagcgcacttctatatttgcggagacggaagccaaatggcacctgccgttgaagcaacgcttatgaaaagctatgctgacgttcaccaagtgagtgaagcagacgctcgcttatggctgcagcagctagaagaaaaaggccgatacgcaaaagacgtgtggctgggg

SEQ ID NO: 760 - protein, 1049 aa, synthetic construct
  REGION 1..1049: note = variant of P450 oxidase from Bacillus megaterium
MTIKEMPQPKTFGELKNLPLLNTDKPVQALMRIADELGEIFKFEAPGSVTRYLSSQRLIKEACDESRFDKNLSQALKFARDFVGDGLSTSWTHEPNWKKAHNILVPSFSQHAMGRYHAMMVDIAVQLVQKWERLNADEHIEVSEDMTRLTLDTIGLCLFNYRFNSFYRDTPHPFIVSVVRALDEVMNKLQRANPDDPAYDENKRQCQEDIKVMNDYVDKIIADRKARGEQSHDLLTQMLNGKDPETGEPLDDGNIRQQIITFLIAGHQTTSGLLSFALYFLVKNPRVLQKVAEEAARVLVDPVPSYKQVKQLKYVGMVLNEALRLWPVAPMFSLYAKEDTVLGGEYPLTKGDEVMVLVPQLHRDKTIWGDDVEEFRPERFENPSAIPQHAFKPFGNGQRACIGQQFALHEATLVLGMMLKHFDFEDHTNYELVIKESRTLKPEGFVVKAKSKGIPLGGIPSPSTEQSAKKVRKKAENAHNTPLLVLYGSNAGTAEGAARDLADIAMSKGFAPQVATLDSHAGNLPREGAVLIVTASYNGHPPDNAKQFVDWLDQASADEVKGVRYSVFGCGDSNWVGTYQKVPAFIDETLAAKGAENIADRGEADASDDFEGTYEEWRDHMWSDVAAYFGLDIENSEDNKSTLSLQFVDSAADMPLAKMHGAFSTNVVASKELQQPGSARSTRHLEIELPKEASYQEGDHLGVIPRYYEGIVNRVTARFGLSASQLIRLEAEEEKLAHLPLAKTVSVEELLQYVELQDPVTRTQLRAMAAKTVCPPHKVELEALLGKQAYKEQVLAKRLTMLELLEKYPACEMSFSEFIALLPSIRPRYYSISSSPRVDEKQASITVSVVSGPAWSGYGEYKGIASNYLAELQEGDTITCFISTPQSEFTLPKDPETPLIMVGPGTGVAPFRGFVQARKQLKEQGQSLGEAHLYFGCRSPHEDYLYQEELENAQSEGIITLHTAFSRMPNQPKTYVQHVMEQDGKKLIELLDQGAHFYICGDGSQMAPAVEATLMKSYADVHQVSEADARLWLQQLEEKGRYAKDVWLG

SEQ ID NO: 761 - DNA, 3147 bp, synthetic construct
  misc_feature 1..3147: note = variant of P450 oxidase from Bacillus megaterium
  source 1..3147: mol_type = other DNA
atgacaattaaggaaatgcctcagcctaagacgtttggagaacttaaaaatttaccgttattaaacacagataaaccggttcaagctttgatgcgtattgcggatgaattaggagaaatctttaaattcgaggcgcctggtagcgtaacgcgctatttatcaagtcagcgtctaattaaagaagcatgcgatgaatcacgctttgataaaaacttaagtcaagcgcttaaatttgcacgtgattttgttggagacgggctgtctacaagctggacgcatgaaccgaattggaaaaaagcgcataatatcttagttccaagctttagtcagcatgcaatggggcgttatcatgcgatgatggtcgatatcgccgtgcagcttgttcaaaagtgggagcgtctaaatgcagatgagcatattgaagtatcggaagacatgacacgtttaacgcttgatacaattggtctttgcctgtttaactatcgctttaacagcttttaccgagatacgcctcatccatttattgtgagtgtggttcgtgcactggatgaagtaatgaacaagctgcagcgagcaaatccagacgacccagcttatgatgaaaacaagcgccagtgtcaagaagatatcaaggtgatgaacgactatgtagataaaattattgcagatcgcaaagcaaggggtgaacaaagtcatgatttattaacgcagatgctaaacggaaaagatccagaaacgggtgagccgcttgatgacgggaacattcgtcagcaaattattacattcttaattgcgggacaccaaacgattagtggtcttttatcatttgcgctgtatttcttagtgaaaaatccacgtgtattacaaaaagtagcagaagaagcagcacgagttctagtagatcctgttccaagctacaaacaagtcaaacagcttaaatatgttggcatggtcttaaacgaagcgctgcgcttatggccagtagcgcctatgttttccctatatgcaaaagaagatacggtgcttggaggagaatatcctttaacgaaaggcgacgaagtaatggttctggtgcctcagcttcaccgtgataaaacaatttggggagacgatgtggaggagttccgtccagagcgttttgaaaatccaagtgcgattccgcagcatgcgtttaaaccgtttggaaacggtcagcgtgcgtgtatcggtcagcagttcgctcttcatagtgcaacgctggtacttggtatgatgctaaaacactttgactttgaagatcatacaaactacgagctcgttattaaagaatcgcggacgttaaaacctgaaggctttgtggtaaaagcaaaatcgaaaggcattccgcttggcggtattccttcacctagcactgaacagtctgctaaaaaagtacgcaaaaaggcagaaaacgctcataatacgccgctgcttgtgctatacggttcaaatgcgggaacagctgaaggaacggcgcgtgatttagcagatattgcaatgagcaaaggatttgcaccgcaggtcgcaacgcttgattcacacgccggtaatcttccgcgcgaaggagctgtattaattgtaacggcgtcttataacggtcatccgcctgataacgcaaagcaatttgtcgactggttagaccaagcgtctgcggatgaagtaaaaggcgttcgctactccgtatttggatgcggcgataaaaattgggcggggacgtatcaaaaagtgcctgcttttatcgatgaaacgcttgccgctaaaggggcagaaaacatcgctgaccgcggtgaagcagatgcaagcgacgactttgaaggcacatatgaagaatggcgtgatcatatgtggagtgacgtagcagcctactttggtctcgacattgaaaacagtgaagataataaatctactctttcacttcaatttgtcgacagcgcggcggatatgccgcttgcgaaaatgcacggtgcgttttcaacgaacgtcgtagcaagcaaagaacttcaacagcctggcagtgcacgaagcacgcgacatcttgaaattgaacttccaaaagaagcttcttatcaagaaggagatcatttaggtgttattcctcgctattatgaaggaatagtaaaccgtgtaacagcaaggttcggcctaagcgcatcacagctgatccgtctggaagcagaagaagaaaaattagctcatttgccactcgctaaaacagtatccgtagaagagcttctgcaatacgtggagcttcaagatcctgttacgcgcacgcagcttcgcgcaatggctgctaaaacggtctgcccgccgcataaagtagagcttgaagccttgcttggcaagcaagcctacaaagaacaagtgctggcaaaacgtttaacaatgcttgaactgcttgaaaaatacccggcgtgtgaaatgagtttcagcgaatttatcgcccttctgccaagcatacgcccgcgctattactcgatttcttcatcacctcgtgtcgatgaaaagcaagcaagcatcacggtcagcgttgtctcaggaccggcgtggagcggatatggagaatataaaggaattgcgtcgaactatcttgccgagctgcaagaaggagatacgattacgtgctttatttccacaccgcagtcagagtttacgctgccaaaagaccctgaaacgccgcttatcatggtcggaccgggaacaggcgtcgcgccgtttagaggctttgtgcaggcgcgcaaacagctaaaagaacaaggacagtcacttggagaagcacatttatacttcggctgccgttcacctcatgaagactatctgtatcaagaagagcttgaaaacgcccaaagcgaaggcatcattacgcttcataccgctttttctcgcatgccgaatcagccgaaaacatacgttcagcacgtaatggaacaagacggcaagaaattgattgaacttcttgatcaaggagcgcacttctatatttgcggagacggaagccaaatggcacctgccgttgaagcaacgcttatgaaaagctatgctgacgttcaccaagtgagtgaagcagacgctcgcttatggctgcagcagctagaagaaaaaggccgatacgcaaaagacgtgtggctgggg

SEQ ID NO: 762 - protein, 1049 aa, synthetic construct
  REGION 1..1049: note = variant of P450 oxidase from Bacillus megaterium
MTIKEMPQPKTFGELKNLPLLNTDKPVQALMRIADELGEIFKFEAPGSVTRYLSSQRLIKEACDESRFDKNLSQALKFARDFVGDGLSTSWTHEPNWKKAHNILVPSFSQHAMGRYHAMMVDIAVQLVQKWERLNADEHIEVSEDMTRLTLDTIGLCLFNYRFNSFYRDTPHPFIVSVVRALDEVMNKLQRANPDDPAYDENKRQCQEDIKVMNDYVDKIIADRKARGEQSHDLLTQMLNGKDPETGEPLDDGNIRQQIITFLIAGHQTISGLLSFALYFLVKNPRVLQKVAEEAARVLVDPVPSYKQVKQLKYVGMVLNEALRLWPVAPMFSLYAKEDTVLGGEYPLTKGDEVMVLVPQLHRDKTIWGDDVEEFRPERFENPSAIPQHAFKPFGNGQRACIGQQFALHSATLVLGMMLKHFDFEDHTNYELVIKESRTLKPEGFVVKAKSKGIPLGGIPSPSTEQSAKKVRKKAENAHNTPLLVLYGSNAGTAEGTARDLADIAMSKGFAPQVATLDSHAGNLPREGAVLIVTASYNGHPPDNAKQFVDWLDQASADEVKGVRYSVFGCGDKNWAGTYQKVPAFIDETLAAKGAENIADRGEADASDDFEGTYEEWRDHMWSDVAAYFGLDIENSEDNKSTLSLQFVDSAADMPLAKMHGAFSTNVVASKELQQPGSARSTRHLEIELPKEASYQEGDHLGVIPRYYEGIVNRVTARFGLSASQLIRLEAEEEKLAHLPLAKTVSVEELLQYVELQDPVTRTQLRAMAAKTVCPPHKVELEALLGKQAYKEQVLAKRLTMLELLEKYPACEMSFSEFIALLPSIRPRYYSISSSPRVDEKQASITVSVVSGPAWSGYGEYKGIASNYLAELQEGDTITCFISTPQSEFTLPKDPETPLIMVGPGTGVAPFRGFVQARKQLKEQGQSLGEAHLYFGCRSPHEDYLYQEELENAQSEGIITLHTAFSRMPNQPKTYVQHVMEQDGKKLIELLDQGAHFYICGDGSQMAPAVEATLMKSYADVHQVSEADARLWLQQLEEKGRYAKDVWLG

SEQ ID NO: 763 - DNA, 3147 bp, synthetic construct
  misc_feature 1..3147: note = variant of P450 oxidase from Bacillus megaterium
  source 1..3147: mol_type = other DNA
atgacaattaaggaaatgcctcagcctaagacgtttggagaacttaaaaatttaccgttattaaacacagataaaccggttcaagctttgatgcgtattgcggatgaattaggagaaatctttaaattcgaggcgcctggtagcgtaacgcgctatttatcaagtcagcgtctaattaaagaagcatgcgatgaatcacgctttgataaaaacttaagtcaagcgcttaaatttgcacgtgattttgttggagacgggctgtctacaagctggacgcatgaaccgaattggaaaaaagcgcataatatcttagttccaagctttagtcagcatgcaatggggcgttatcatgcgatgatggtcgatatcgccgtgcagcttgttcaaaagtgggagcgtctaaatgcagatgagcatattgaagtatcggaagacatgacacgtttaacgcttgatacaattggtctttgcctgtttaactatcgctttaacagcttttaccgagatacgcctcatccatttattgtgagtgtggttcgtgcactggatgaagtaatgaacaagctgcagcgagcaaatccagacgacccagcttatgatgaaaacaagcgccagtgtcaagaagatatcaaggtgatgaacgactatgtagataaaattattgcagatcgcaaagcaaggggtgaacaaagtcatgatttattaacgcagatgctaaacggaaaagatccagaaacgggtgagccgcttgatgacgggaacattcgtcagcaaattattacattcttaattgcgggacaccaaacgacaagtggtcttttatcatttgcgctgtatttcttagtgaaaaatccacgtgtattacaaaaagtagcagaagaagcagcacgagttctagtagatcctgttccaagctacaaacaagtcaaacagcttaaatatgttggcatggtcttaaacgaagcgctgcgcttatggccagtagcgcctatgttttccctatatgcaaaagaagatacggtgcttggaggagaatatcctttaacgaaaggcgacgaagtaatggttctggtgcctcagcttcaccgtgataaaacaatttggggagacgatgtggaggagttccgtccagagcgttttgaaaatccaagtgcgattccgcagcatgcgtttaaaccgtttggaaacggtcagcgtgcgtgtatcggtcagcagttcgctcttcatagtgcaacgctggtacttggtatgatgctaaaacactttgactttgaagatcatacaaactacgagctcgttattaaagaaaatcggacgttaaaacctgaaggctttgtggtaaaagcaaaatcgaaaggcattccgcttggcggtattccttcacctagcactgaacagtctgctaaaaaagtacgcaaaaaggcagaaaacgctcataatacgccgctgcttgtgctatacggttcaaatgcgggaacagctgaaggaacggcgcgtgatttagcagatattgcaatgagcaaaggatttgcaccgcaggtcgcaacgcttgattcacacgccggtaatcttccgcgcgaaggagctgtattaattgtaacggcgtcttataacggtcatccgcctgataacgcaaagcaatttgtcgactggttagaccaagcgtctgcggatgaagtaaaaggcgttcgctactccgtatttggatgcggcgataaaaattgggcggggacgtatcaaaaagtgcctgcttttatcgatgaaacgcttgccgctaaaggggcagaaaacatcgctgaccgcggtgaagcagatgcaagcgacgactttgaaggcacatatgaagaatggcgtgatcatatgtggagtgacgtagcagcctactttggtctcgacattgaaaacagtgaagataataaatctactctttcacttcaatttgtcgacagcgcggcggatatgccgcttgcgaaaatgcacggtgcgttttcaacgaacgtcgtagcaagcaaagaacttcaacagcctggcagtgcacgaagcacgcgacatcttgaaattgaacttccaaaagaagcttcttatcaagaaggagatcatttaggtgttattcctcgctattatgaaggaatagtaaaccgtgtaacagcaaggttcggcctaagcgcatcacagctgatccgtctggaagcagaagaagaaaaattagctcatttgccactcgctaaaacagtatccgtagaagagcttctgcaatacgtggagcttcaagatcctgttacgcgcacgcagcttcgcgcaatggctgctaaaacggtctgcccgccgcataaagtagagcttgaagccttgcttggcaagcaagcctacaaagaacaagtgctggcaaaacgtttaacaatgcttgaactgcttgaaaaatacccggcgtgtgaaatgagtttcagcgaatttatcgcccttctgccaagcatacgcccgcgctattactcgatttcttcatcacctcgtgtcgatgaaaaacaagcaagcatcacggtcagcgttgtctcaggaccggcgtggagcggatatggagaatataaaggaattgcgtcgaactatcttgccgagctgcaagaaggagatacgattacgtgctttatttccacaccgcagtcagagtttacgctgccaaaagaccctgaaacgccgcttatcatggtcggaccgggaacaggcgtcgcgccgtttagaggctttgtgcaggcgcgcaaacagctaaaagaacaaggacagtcacttggagaagcacatttatacttcggctgccgttcacctcatgaagactatctgtatcaagaagagcttgaaaacgcccaaagcgaaggcatcattacgcttcataccgctttttctcgcatgccgaatcagccgaaaacatacgttcagcacgtaatggaacaagacggcaagaaattgattgaacttcttgatcaaggagcgcacttctatatttgcggagacggaagccaaatggcacctgccgttgaagcaacgcttatgaaaagctatgctgacgttcaccaagtgagtgaagcagacgctcgcttatggctgcagcagctagaagaaaaaggccgatacgcaaaagacgtgtggctgggg

SEQ ID NO: 764 - protein, 1049 aa, synthetic construct
  REGION 1..1049: note = variant of P450 oxidase from Bacillus megaterium
MTIKEMPQPKTFGELKNLPLLNTDKPVQALMRIADELGEIFKFEAPGSVTRYLSSQRLIKEACDESRFDKNLSQALKFARDFVGDGLSTSWTHEPNWKKAHNILVPSFSQHAMGRYHAMMVDIAVQLVQKWERLNADEHIEVSEDMTRLTLDTIGLCLFNYRFNSFYRDTPHPFIVSVVRALDEVMNKLQRANPDDPAYDENKRQCQEDIKVMNDYVDKIIADRKARGEQSHDLLTQMLNGKDPETGEPLDDGNIRQQIITFLIAGHQTTSGLLSFALYFLVKNPRVLQKVAEEAARVLVDPVPSYKQVKQLKYVGMVLNEALRLWPVAPMFSLYAKEDTVLGGEYPLTKGDEVMVLVPQLHRDKTIWGDDVEEFRPERFENPSAIPQHAFKPFGNGQRACIGQQFALHSATLVLGMMLKHFDFEDHTNYELVIKENRTLKPEGFVVKAKSKGIPLGGIPSPSTEQSAKKVRKKAENAHNTPLLVLYGSNAGTAEGTARDLADIAMSKGFAPQVATLDSHAGNLPREGAVLIVTASYNGHPPDNAKQFVDWLDQASADEVKGVRYSVFGCGDKNWAGTYQKVPAFIDETLAAKGAENIADRGEADASDDFEGTYEEWRDHMWSDVAAYFGLDIENSEDNKSTLSLQFVDSAADMPLAKMHGAFSTNVVASKELQQPGSARSTRHLEIELPKEASYQEGDHLGVIPRYYEGIVNRVTARFGLSASQLIRLEAEEEKLAHLPLAKTVSVEELLQYVELQDPVTRTQLRAMAAKTVCPPHKVELEALLGKQAYKEQVLAKRLTMLELLEKYPACEMSFSEFIALLPSIRPRYYSISSSPRVDEKQASITVSVVSGPAWSGYGEYKGIASNYLAELQEGDTITCFISTPQSEFTLPKDPETPLIMVGPGTGVAPFRGFVQARKQLKEQGQSLGEAHLYFGCRSPHEDYLYQEELENAQSEGIITLHTAFSRMPNQPKTYVQHVMEQDGKKLIELLDQGAHFYICGDGSQMAPAVEATLMKSYADVHQVSEADARLWLQQLEEKGRYAKDVWLG

SEQ ID NO: 765 - DNA, 3147 bp, synthetic construct
  misc_feature 1..3147: note = variant of P450 oxidase from Bacillus megaterium
  source 1..3147: mol_type = other DNA
atgacaattaaggaaatgcctcagcctaagacgtttggagaacttaaaaatttaccgttattaaacacagataaaccggttcaagctttgatgcgtattgcggatgaattaggagaaatctttaaattcgaggcgcctggtagcgtaacgcgctatttatcaagtcagcgtctaattaaagaagcatgcgatgaatcacgctttgataaaaacttaagtcaagcgcttaaatttgcacgtgattttgttggagacgggctgtctacaagctggacgcatgaaccgaattggaaaaaagcgcataatatcttagttccaagctttagtcagcatgcaatggggcgttatcatgcgatgatggtcgatatcgccgtgcagcttgttcaaaagtgggagcgtctaaatgcagatgagcatattgaagtatcggaagacatgacacgtttaacgcttgatacaattggtctttgcctgtttaactatcgctttaacagcttttaccgagatacgcctcatccatttattgtgagtgtggttcgtgcactggatgaagtaatgaacaagctgcagcgagcaaatccagacgacccagcttatgatgaaaacaagcgccagtgtcaagaagatatcaaggtgatgaacgactatgtagataaaattattgcagatcgcaaagcaaggggtgaacaaagtcatgatttattaacgcagatgctaaacggaaaagatccagaaacgggtgagccgcttgatgacgggaacattcgtcagcaaattattacattcttaattgcgggacaccaaacgacaagtggtcttttatcatttgcgctgtatttcttagtgaaaaatccacgtgtattacaaaaagtagcagaagaagcagcacgagttctagtagatcctgttccaagctacaaacaagtcaaacagcttaaatatgttggcatggtcttaaacgaagcgctgcgcttatggccagtagcgcctatgttttccctatatgcaaaagaagatacggtgcttggaggagaatatcctttaacgaaaggcgacgaagtaatggttctggtgcctcagcttcaccgtgataaaacaatttggggagacgatgtggaggagttccgtccagagcgttttgaaaatccaagtgcgattccgcagcatgcgtttaaaccgtttggaaacggtcagcgtgcgtgtatcggtcagcagttcgctcttcatagtgcaacgctggtacttggtatgatgctaaaacactttgactttgaagatcatacaaactacgagctcgttattaaagaagtgcggacgttaaaacctgaaggctttgtggtaaaagcaaaatcgaaaggcattccgcttggcggtattccttcacctagcactgaacagtctgctaaaaaagtacgcaaaaaggcagaaaacgctcataatacgccgctgcttgtgctatacggttcaaatgcgggaacagctgaaggaacggcgcgtgatttagcagatattgcaatgagcaaaggatttgcaccgcaggtcgcaacgcttgattcacacgccggtaatcttccgcgcgaaggagctgtattaattgtaacggcgtcttataacggtcatccgcctgataacgcaaagcaatttgtcgactggttagaccaagcgtctgcggatgaagtaaaaggcgttcgctactccgtatttggatgcggcgataaaaattgggcggggacgtatcaaaaagtgcctgcttttatcgatgaaacgcttgccgctaaaggggcagaaaacatcgctgaccgcggtgaagcagatgcaagcgacgactttgaaggcacatatgaagaatggcgtgatcatatgtggagtgacgtagcagcctactttggtctcgacattgaaaacagtgaagataataaatctactctttcacttcaatttgtcgacagcgcggcggatatgccgcttgcgaaaatgcacggtgcgttttcaacgaacgtcgtagcaagcaaagaacttcaacagcctggcagtgcacgaagcacgcgacatcttgaaattgaacttccaaaagaagcttcttatcaagaaggagatcatttaggtgttattcctcgctattatgaaggaatagtaaaccgtgtaacagcaaggttcggcctaagcgcatcacagctgatccgtctggaagcagaagaagaaaaattagctcatttgccactcgctaaaacagtatccgtagaagagcttctgcaatacgtggagcttcaagatcctgttacgcgcacgcagcttcgcgcaatggctgctaaaacggtctgcccgccgcataaagtagagcttgaagccttgcttggcaagcaagcctacaaagaacaagtgctggcaaaacgtttaacaatgcttgaactgcttgaaaaatacccggcgtgtgaaatgagtttcagcgaatttatcgcccttctgccaagcatacgcccgcgctattactcgatttcttcatcacctcgtgtcgatgaaaaacaagcaagcatcacggtcagcgttgtctcaggaccggcgtggagcggatatggagaatataaaggaattgcgtcgaactatcttgccgagctgcaagaaggagatacgattacgtgctttatttccacaccgcagtcagagtttacgctgccaaaagaccctgaaacgccgcttatcatggtcggaccgggaacaggcgtcgcgccgtttagaggctttgtgcaggcgcgcaaacagctaaaagaacaaggacagtcacttggagaagcacatttatacttcggctgccgttcacctcatgaagactatctgtatcaagaagagcttgaaaacgcccaaagcgaaggcatcattacgcttcataccgctttttctcgcatgccgaatcagccgaaaacatacgttcagcacgtaatggaacaagacggcaagaaattgattgaacttcttgatcaaggagcgcacttctatatttgcggagacggaagccaaatggcacctgccgttgaagcaacgcttatgaaaagctatgctgacgttcaccaagtgagtgaagcagacgctcgcttatggctgcagcagctagaagaaaaaggccgatacgcaaaagacgtgtggctgggg

SEQ ID NO: 766 - protein, 1049 aa, synthetic construct
  REGION 1..1049: note = variant of P450 oxidase from Bacillus megaterium
MTIKEMPQPKTFGELKNLPLLNTDKPVQALMRIADELGEIFKFEAPGSVTRYLSSQRLIKEACDESRFDKNLSQALKFARDFVGDGLSTSWTHEPNWKKAHNILVPSFSQHAMGRYHAMMVDIAVQLVQKWERLNADEHIEVSEDMTRLTLDTIGLCLFNYRFNSFYRDTPHPFIVSVVRALDEVMNKLQRANPDDPAYDENKRQCQEDIKVMNDYVDKIIADRKARGEQSHDLLTQMLNGKDPETGEPLDDGNIRQQIITFLIAGHQTTSGLLSFALYFLVKNPRVLQKVAEEAARVLVDPVPSYKQVKQLKYVGMVLNEALRLWPVAPMFSLYAKEDTVLGGEYPLTKGDEVMVLVPQLHRDKTIWGDDVEEFRPERFENPSAIPQHAFKPFGNGQRACIGQQFALHSATLVLGMMLKHFDFEDHTNYELVIKEVRTLKPEGFVVKAKSKGIPLGGIPSPSTEQSAKKVRKKAENAHNTPLLVLYGSNAGTAEGTARDLADIAMSKGFAPQVATLDSHAGNLPREGAVLIVTASYNGHPPDNAKQFVDWLDQASADEVKGVRYSVFGCGDKNWAGTYQKVPAFIDETLAAKGAENIADRGEADASDDFEGTYEEWRDHMWSDVAAYFGLDIENSEDNKSTLSLQFVDSAADMPLAKMHGAFSTNVVASKELQQPGSARSTRHLEIELPKEASYQEGDHLGVIPRYYEGIVNRVTARFGLSASQLIRLEAEEEKLAHLPLAKTVSVEELLQYVELQDPVTRTQLRAMAAKTVCPPHKVELEALLGKQAYKEQVLAKRLTMLELLEKYPACEMSFSEFIALLPSIRPRYYSISSSPRVDEKQASITVSVVSGPAWSGYGEYKGIASNYLAELQEGDTITCFISTPQSEFTLPKDPETPLIMVGPGTGVAPFRGFVQARKQLKEQGQSLGEAHLYFGCRSPHEDYLYQEELENAQSEGIITLHTAFSRMPNQPKTYVQHVMEQDGKKLIELLDQGAHFYICGDGSQMAPAVEATLMKSYADVHQVSEADARLWLQQLEEKGRYAKDVWLG

SEQ ID NO: 767 - DNA, 3147 bp, synthetic construct
  misc_feature 1..3147: note = variant of P450 oxidase from Bacillus megaterium
  source 1..3147: mol_type = other DNA
atgacaattaaggaaatgcctcagcctaagacgtttggagaacttaaaaatttaccgttattaaacacagataaaccggttcaagctttgatgcgtattgcggatgaattaggagaaatctttaaattcgaggcgcctggtagcgtaacgcgctatttatcaagtcagcgtctaattaaagaagcatgcgatgaatcacgctttgataaaaacttaagtcaagcgcttaaatttgcacgtgattttgttggagacgggctgtctacaagctggacgcatgaaccgaattggaaaaaagcgcataatatcttagttccaagctttagtcagcatgcaatggggcgttatcatgcgatgatggtcgatatcgccgtgcagcttgttcaaaagtgggagcgtctaaatgcagatgagcatattgaagtatcggaagacatgacacgtttaacgcttgatacaattggtctttgcctgtttaactatcgctttaacagcttttaccgagatacgcctcatccatttattgtgagtgtggttcgtgcactggatgaagtaatgaacaagctgcagcgagcaaatccagacgacccagcttatgatgaaaacaagcgccagtgtcaagaagatatcaaggtgatgaacgactatgtagataaaattattgcagatcgcaaagcaaggggtgaacaaagtcatgatttattaacgcagatgctaaacggaaaagatccagaaacgggtgagccgcttgatgacgggaacattcgtcagcaaattattacattcttaattgcgggacaccaaacggtgagtggtcttttatcatttgcgctgtatttcttagtgaaaaatccacgtgtattacaaaaagtagcagaagaagcagcacgagttctagtagatcctgttccaagctacaaacaagtcaaacagcttaaatatgttggcatggtcttaaacgaagcgctgcgcttatggccagtagcgcctatgttttccctatatgcaaaagaagatacggtgcttggaggagaatatcctttaacgaaaggcgacgaagtaatggttctggtgcctcagcttcaccgtgataaaacaatttggggagacgatgtggaggagttccgtccagagcgttttgaaaatccaagtgcgattccgcagcatgcgtttaaaccgtttggaaacggtcagcgtgcgtgtatcggtcagcagttcgctcttcatagtgcaacgctggtacttggtatgatgctaaaacactttgactttgaagatcatacaaactacgagctcgttattaaagaatcgcggacgttaaaacctgaaggctttgtggtaaaagcaaaatcgaaaggcattccgcttggcggtattccttcacctagcactgaacagtctgctaaaaaagtacgcaaaaaggcagaaaacgctcataatacgccgctgcttgtgctatacggttcaaatgcgggaacagctgaaggaacggcgcgtgatttagcagatattgcaatgagcaaaggatttgcaccgcaggtcgcaacgcttgattcacacgccggtaatcttccgcgcgaaggagctgtattaattgtaacggcgtcttataacggtcatccgcctgataacgcaaagcaatttgtcgactggttagaccaagcgtctgcggatgaagtaaaaggcgttcgctactccgtatttggatgcggcgataaaaattgggcggggacgtatcaaaaagtgcctgcttttatcgatgaaacgcttgccgctaaaggggcagaaaacatcgctgaccgcggtgaagcagatgcaagcgacgactttgaaggcacatatgaagaatggcgtgatcatatgtggagtgacgtagcagcctactttggtctcgacattgaaaacagtgaagataataaatctactctttcacttcaatttgtcgacagcgcggcggatatgccgcttgcgaaaatgcacggtgcgttttcaacgaacgtcgtagcaagcaaagaacttcaacagcctggcagtgcacgaagcacgcgacatcttgaaattgaacttccaaaagaagcttcttatcaagaaggagatcatttaggtgttattcctcgctattatgaaggaatagtaaaccgtgtaacagcaaggttcggcctaagcgcatcacagctgatccgtctggaagcagaagaagaaaaattagctcatttgccactcgctaaaacagtatccgtagaagagcttctgcaatacgtggagcttcaagatcctgttacgcgcacgcagcttcgcgcaatggctgctaaaacggtctgcccgccgcataaagtagagcttgaagccttgcttggcaagcaagcctacaaagaacaagtgctggcaaaacgtttaacaatgcttgaactgcttgaaaaatacccggcgtgtgaaatgagtttcagcgaatttatcgcccttctgccaagcatacgcccgcgctattactcgatttcttcatcacctcgtgtcgatgaaaaacaagcaagcatcacggtcagcgttgtctcaggaccggcgtggagcggatatggagaatataaaggaattgcgtcgaactatcttgccgagctgcaagaaggagatacgattacgtgctttatttccacaccgcagtcagagtttacgctgccaaaagaccctgaaacgccgcttatcatggtcggaccgggaacaggcgtcgcgccgtttagaggctttgtgcaggcgcgcaaacagctaaaagaacaaggacagtcacttggagaagcacatttatacttcggctgccgttcacctcatgaagactatctgtatcaagaagagcttgaaaacgcccaaagcgaaggcatcattacgcttcataccgctttttctcgcatgccgaatcagccgaaaacatacgttcagcacgtaatggaacaagacggcaagaaattgattgaacttcttgatcaaggagcgcacttctatatttgcggagacggaagccaaatggcacctgccgttgaagcaacgcttatgaaaagctatgctgacgttcaccaagtgagtgaagcagacgcccgcttatggctgcagcagctagaagaaaaaggccgatacgcaaaagacgtgtggctgggg

SEQ ID NO: 768 - protein, 1049 aa, synthetic construct
  REGION 1..1049: note = variant of P450 oxidase from Bacillus megaterium
MTIKEMPQPKTFGELKNLPLLNTDKPVQALMRIADELGEIFKFEAPGSVTRYLSSQRLIKEACDESRFDKNLSQALKFARDFVGDGLSTSWTHEPNWKKAHNILVPSFSQHAMGRYHAMMVDIAVQLVQKWERLNADEHIEVSEDMTRLTLDTIGLCLFNYRFNSFYRDTPHPFIVSVVRALDEVMNKLQRANPDDPAYDENKRQCQEDIKVMNDYVDKIIADRKARGEQSHDLLTQMLNGKDPETGEPLDDGNIRQQIITFLIAGHQTVSGLLSFALYFLVKNPRVLQKVAEEAARVLVDPVPSYKQVKQLKYVGMVLNEALRLWPVAPMFSLYAKEDTVLGGEYPLTKGDEVMVLVPQLHRDKTIWGDDVEEFRPERFENPSAIPQHAFKPFGNGQRACIGQQFALHSATLVLGMMLKHFDFEDHTNYELVIKESRTLKPEGFVVKAKSKGIPLGGIPSPSTEQSAKKVRKKAENAHNTPLLVLYGSNAGTAEGTARDLADIAMSKGFAPQVATLDSHAGNLPREGAVLIVTASYNGHPPDNAKQFVDWLDQASADEVKGVRYSVFGCGDKNWAGTYQKVPAFIDETLAAKGAENIADRGEADASDDFEGTYEEWRDHMWSDVAAYFGLDIENSEDNKSTLSLQFVDSAADMPLAKMHGAFSTNVVASKELQQPGSARSTRHLEIELPKEASYQEGDHLGVIPRYYEGIVNRVTARFGLSASQLIRLEAEEEKLAHLPLAKTVSVEELLQYVELQDPVTRTQLRAMAAKTVCPPHKVELEALLGKQAYKEQVLAKRLTMLELLEKYPACEMSFSEFIALLPSIRPRYYSISSSPRVDEKQASITVSVVSGPAWSGYGEYKGIASNYLAELQEGDTITCFISTPQSEFTLPKDPETPLIMVGPGTGVAPFRGFVQARKQLKEQGQSLGEAHLYFGCRSPHEDYLYQEELENAQSEGIITLHTAFSRMPNQPKTYVQHVMEQDGKKLIELLDQGAHFYICGDGSQMAPAVEATLMKSYADVHQVSEADARLWLQQLEEKGRYAKDVWLG

SEQ ID NO: 769 - DNA, 3147 bp, synthetic construct
  misc_feature 1..3147: note = variant of P450 oxidase from Bacillus megaterium
  source 1..3147: mol_type = other DNA
atgacaattaaggaaatgcctcagcctaagacgtttggagaacttaaaaatttaccgttattaaacacaaggaaaccggttcaagctttgatgcgtattgcggatgaattaggagaaatctttaaattcgaggcgcctggtagcgtaacgcgctatttatcaagtcagcgtctaattaaagaagcatgcgatgaatcacgctttgataaaaacttaagtcaagcgcttaaatttgcacgtgattttgttggagacgggctgtctacaagctggacgcatgaaccgaattggaaaaaagcgcataatatcttagttccaagctttagtcagcatgcaatggggcgttatcatgcgatgatggtcgatatcgccgtgcagcttgttcaaaagtgggagcgtctaaatgcagatgagcatattgaagtatcggaagacatgacacgtttaacgcttgatacaattggtctttgcctgtttaactatcgctttaacagcttttaccgagatacgcctcatccatttattgtgagtgtggttcgtgcactggatgaagtaatgaacaagctgcagcgagcaaatccagacgacccagcttatgatgaaaacaagcgccagtgtcaagaagatatcaaggtgatgaacgactatgtagataaaattattgcagatcgcaaagcaaggggtgaacaaagtcatgatttattaacgcagatgctaaacggaaaagatccagaaacgggtgagccgcttgatgacgggaacattcgtcagcaaattattacattcttaattgcgggacaccaaacgacaagtggtcttttatcatttgcgctgtatttcttagtgaaaaatccacgtgtattacaaaaagtagcagaagaagcagcacgagttctagtagatcctgttccaagctacaaacaagtcaaacagcttaaatatgttggcatggtcttaaacgaagcgctgcgcttatggccagtagcgcctatgttttccctatatgcaaaagaagatacggtgcttggaggagaatatcctttaacgaaaggcgacgaagtaatggttctggtgcctcagcttcaccgtgataaaacaatttggggagacgatgtggaggagttccgtccagagcgttttgaaaatccaagtgcgattccgcagcatgcgtttaaaccgtttggaaacggtcagcgtgcgtgtatcggtcagcagttcgctcttcatagtgcaacgctggtacttggtatgatgctaaaacactttgactttgaagatcatacaaactacgagctcgttattaaagaatcgcggacgttaaaacctgaaggctttgtggtaaaagcaaaatcgaaaggcattccgcttggcggtattccttcacctagcactgaacagtctgctaaaaaagtacgcaaaaaggcagaaaacgctcataatacgccgctgcttgtgctatacggttcaaatgcgggaacagctgaaggaacggcgcgtgatttagcagatattgcaatgagcaaaggatttgcaccgcaggtcgcaacgcttgattcacacgccggtaatcttccgcgcgaaggagctgtattaattgtaacggcgtcttataacggtcatccgcctgataacgcaaagcaatttgtcgactggttagaccaagcgtctgcggatgaagtaaaaggcgttcgctactccgtatttggatgcggcgataaaaattgggcggggacgtatcaaaaagtgcctgcttttatcgatgaaacgcttgccgctaaaggggcagaaaacatcgctgaccgcggtgaagcagatgcaagcgacgactttgaaggcacatatgaagaatggcgtgatcatatgtggagtgacgtagcagcctactttggtctcgacattgaaaacagtgaagataataaatctactctttcacttcaatttgtcgacagcgcggcggatatgccgcttgcgaaaatgcacggtgcgttttcaacgaacgtcgtagcaagcaaagaacttcaacagcctggcagtgcacgaagcacgcgacatcttgaaattgaacttccaaaagaagcttcttatcaagaaggagatcatttaggtgttattcctcgctattatgaaggaatagtaaaccgtgtaacagcaaggttcggcctaagcgcatcacagctgatccgtctggaagcagaagaagaaaaattagctcatttgccactcgctaaaacagtatccgtagaagagcttctgcaatacgtggagcttcaagatcctgttacgcgcacgcagcttcgcgcaatggctgctaaaacggtctgcccgccgcataaagtagagcttgaagccttgcttggcaagcaagcctacaaagaacaagtgctggcaaaacgtttaacaatgcttgaactgcttgaaaaatacccggcgtgtgaaatgagtttcagcgaatttatcgcccttctgccaagcatacgcccgcgctattactcgatttcttcatcacctcgtgtcgatgaaaaacaagcaagcatcacggtcagcgttgtctcaggaccggcgtggagcggatatggagaatataaaggaattgcgtcgaactatcttgccgagctgcaagaaggagatacgattacgtgctttatttccacaccgcagtcagagtttacgctgccaaaagaccctgaaacgccgcttatcatggtcggaccgggaacaggcgtcgcgccgtttagaggctttgtgcaggcgcgcaaacagctaaaagaacaaggacagtcacttggagaagcacatttatacttcggctgccgttcacctcatgaagactatctgtatcaagaagagcttgaaaacgcccaaagcgaaggcatcattacgcttcataccgctttttctcgcatgccgaatcagccgaaaacatacgttcagcacgtaatggaacaagacggcaagaaattgattgaacttcttgatcaaggagcgcacttctatatttgcggagacggaagccaaatggcacctgccgttgaagcaacgcttatgaaaagctatgctgacgttcaccaagtgagtgaagcagacgctcgcttatggctgcagcagctagaagaaaaaggccgatacgcaaaagacgtgtggctgggg

SEQ ID NO: 770 - protein, 1049 aa, synthetic construct
  REGION 1..1049: note = variant of P450 oxidase from Bacillus megaterium
MTIKEMPQPKTFGELKNLPLLNTRKPVQALMRIADELGEIFKFEAPGSVTRYLSSQRLIKEACDESRFDKNLSQALKFARDFVGDGLSTSWTHEPNWKKAHNILVPSFSQHAMGRYHAMMVDIAVQLVQKWERLNADEHIEVSEDMTRLTLDTIGLCLFNYRFNSFYRDTPHPFIVSVVRALDEVMNKLQRANPDDPAYDENKRQCQEDIKVMNDYVDKIIADRKARGEQSHDLLTQMLNGKDPETGEPLDDGNIRQQIITFLIAGHQTTSGLLSFALYFLVKNPRVLQKVAEEAARVLVDPVPSYKQVKQLKYVGMVLNEALRLWPVAPMFSLYAKEDTVLGGEYPLTKGDEVMVLVPQLHRDKTIWGDDVEEFRPERFENPSAIPQHAFKPFGNGQRACIGQQFALHSATLVLGMMLKHFDFEDHTNYELVIKESRTLKPEGFVVKAKSKGIPLGGIPSPSTEQSAKKVRKKAENAHNTPLLVLYGSNAGTAEGTARDLADIAMSKGFAPQVATLDSHAGNLPREGAVLIVTASYNGHPPDNAKQFVDWLDQASADEVKGVRYSVFGCGDKNWAGTYQKVPAFIDETLAAKGAENIADRGEADASDDFEGTYEEWRDHMWSDVAAYFGLDIENSEDNKSTLSLQFVDSAADMPLAKMHGAFSTNVVASKELQQPGSARSTRHLEIELPKEASYQEGDHLGVIPRYYEGIVNRVTARFGLSASQLIRLEAEEEKLAHLPLAKTVSVEELLQYVELQDPVTRTQLRAMAAKTVCPPHKVELEALLGKQAYKEQVLAKRLTMLELLEKYPACEMSFSEFIALLPSIRPRYYSISSSPRVDEKQASITVSVVSGPAWSGYGEYKGIASNYLAELQEGDTITCFISTPQSEFTLPKDPETPLIMVGPGTGVAPFRGFVQARKQLKEQGQSLGEAHLYFGCRSPHEDYLYQEELENAQSEGIITLHTAFSRMPNQPKTYVQHVMEQDGKKLIELLDQGAHFYICGDGSQMAPAVEATLMKSYADVHQVSEADARLWLQQLEEKGRYAKDVWLG

SEQ ID NO: 771 - DNA, 3147 bp, synthetic construct
  misc_feature 1..3147: note = variant of P450 oxidase from Bacillus megaterium
  source 1..3147: mol_type = other DNA
atgacaattaaggaaatgcctcagcctaagacgtttggagaacttaaaaatttaccgttattaaacacagataaaccggttcaagctttgatgcgtattgcggatgaattaggagaaatctttaaattcgaggcgcctggtagcgtaacgcgctatttatcaagtcagcgtctaattaaagaagcatgcgatgaatcacgctttgataaaaacttaagtcaagcgcttaaatttgcacgtgattttgttggagacgggctgtctacaagctggacgcatgaaccgaattggaaaaaagcgcataatatcttagttccaagctttagtcagcatgcaatggggcgttatcatgcgatgatggtcgatatcgccgtgcagcttgttcaaaagtgggagcgtctaaatgcagatgagcatattgaagtatcggaagacatgacacgtttaacgcttgatacaattggtctttgcctgtttaactatcgctttaacagcttttaccgagatacgcctcatccatttattgtgagtgtggttcgtgcactggatgaagtaatgaacaagctgcagcgagcaaatccagacgacccagcttatgatgaaaacaagcgccagtgtcaagaagatatcaaggtgatgaacgactatgtagataaaattattgcagatcgcaaagcaaggggtgaacaaagtcatgatttattaacgcagatgctaaacggaaaagatccagaaacgggtgagccgcttgatgacgggaacattcgtgggcaaattattacattcttaattgcgggacaccaaacgacaagtggtcttttatcatttgcgctgtatttcttagtgaaaaatccacgtgtattacaaaaagtagcagaagaagcagcacgagttctagtagatcctgttccaagctacaaacaagtcaaacagcttaaatatgttggcatggtcttaaacgaagcgctgcgcttatggccagtagcgcctatgttttccctatatgcaaaagaagatacggtgcttggaggagaatatcctttaacgaaaggcgacgaagtaatggttctggtgcctcagcttcaccgtgataaaacaatttggggagacgatgtggaggagttccgtccagagcgttttgaaaatccaagtgcgattccgcagcatgcgtttaaaccgtttggaaacggtcagcgtgcgtgtatcggtcagcagttcgctcttcatagtgcaacgctggtacttggtatgatgctaaaacactttgactttgaagatcatacaaactacgagctcgttattaaagaatcgcggacgttaaaacctgaaggctttgtggtaaaagcaaaatcgaaaggcattccgcttggcggtattccttcacctagcactgaacagtctgctaaaaaagtacgcaaaaaggcagaaaacgctcataatacgccgctgcttgtgctatacggttcaaatgcgggaacagctgaaggaacggcgcgtgatttagcagatattgcaatgagcaaaggatttgcaccgcaggtcgcaacgcttgattcacacgccggtaatcttccgcgcgaaggagctgtattaattgtaacggcgtcttataacggtcatccgcctgataacgcaaagcaatttgtcgactggttagaccaagcgtctgcggatgaagtaaaaggcgttcgctactccgtatttggatgcggcgataaaaattgggcggggacgtatcaaaaagtgcctgcttttatcgatgaaacgcttgccgctaaaggggcagaaaacatcgctgaccgcggtgaagcagatgcaagcgacgactttgaaggcacatatgaagaatggcgtgatcatatgtggagtgacgtagcagcctactttggtctcgacattgaaaacagtgaagataataaatctactctttcacttcaatttgtcgacagcgcggcggatatgccgcttgcgaaaatgcacggtgcgttttcaacgaacgtcgtagcaagcaaagaacttcaacagcctggcagtgcacgaagcacgcgacatcttgaaattgaacttccaaaagaagcttcttatcaagaaggagatcatttaggtgttattcctcgctattatgaaggaatagtaaaccgtgtaacagcaaggttcggcctaagcgcatcacagctgatccgtctggaagcagaagaagaaaaattagctcatttgccactcgctaaaacagtatccgtagaagagcttctgcaatacgtggagcttcaagatcctgttacgcgcacgcagcttcgcgcaatggctgctaaaacggtctgcccgccgcataaagtagagcttgaagccttgcttggcaagcaagcctacaaagaacaagtgctggcaaaacgtttaacaatgcttgaactgcttgaaaaatacccggcgtgtgaaatgagtttcagcgaatttatcgcccttctgccaagcatacgcccgcgctattactcgatttcttcatcacctcgtgtcgatgaaaaacaagcaagcatcacggtcagcgttgtctcaggaccggcgtggagcggatatggagaatataaaggaattgcgtcgaactatcttgccgagctgcaagaaggagatacgattacgtgctttatttccacaccgcagtcagagtttacgctgccaaaagaccctgaaacgccgcttatcatggtcggaccgggaacaggcgtcgcgccgtttagaggctttgtgcaggcgcgcaaacagctaaaagaacaaggacagtcacttggagaagcacatttatacttcggctgccgttcacctcatgaagactatctgtatcaagaagagcttgaaaacgcccaaagcgaaggcatcattacgcttcataccgctttttctcgcatgccgaatcagccgaaaacatacgttcagcacgtaatggaacaagacggcaagaaattgattgaacttcttgatcaaggagcgcacttctatatttgcggagacggaagccaaatggcacctgccgttgaagcaacgcttatgaaaagctatgctgacgttcaccaagtgagtgaagcagacgctcgcttatggctgcagcagctagaagaaaaaggccgatacgcaaaagacgtgtggctgggg

SEQ ID NO: 772 - protein, 1049 aa, synthetic construct
  REGION 1..1049: note = variant of P450 oxidase from Bacillus megaterium
MTIKEMPQPKTFGELKNLPLLNTDKPVQALMRIADELGEIFKFEAPGSVTRYLSSQRLIKEACDESRFDKNLSQALKFARDFVGDGLSTSWTHEPNWKKAHNILVPSFSQHAMGRYHAMMVDIAVQLVQKWERLNADEHIEVSEDMTRLTLDTIGLCLFNYRFNSFYRDTPHPFIVSVVRALDEVMNKLQRANPDDPAYDENKRQCQEDIKVMNDYVDKIIADRKARGEQSHDLLTQMLNGKDPETGEPLDDGNIRGQIITFLIAGHQTTSGLLSFALYFLVKNPRVLQKVAEEAARVLVDPVPSYKQVKQLKYVGMVLNEALRLWPVAPMFSLYAKEDTVLGGEYPLTKGDEVMVLVPQLHRDKTIWGDDVEEFRPERFENPSAIPQHAFKPFGNGQRACIGQQFALHSATLVLGMMLKHFDFEDHTNYELVIKESRTLKPEGFVVKAKSKGIPLGGIPSPSTEQSAKKVRKKAENAHNTPLLVLYGSNAGTAEGTARDLADIAMSKGFAPQVATLDSHAGNLPREGAVLIVTASYNGHPPDNAKQFVDWLDQASADEVKGVRYSVFGCGDKNWAGTYQKVPAFIDETLAAKGAENIADRGEADASDDFEGTYEEWRDHMWSDVAAYFGLDIENSEDNKSTLSLQFVDSAADMPLAKMHGAFSTNVVASKELQQPGSARSTRHLEIELPKEASYQEGDHLGVIPRYYEGIVNRVTARFGLSASQLIRLEAEEEKLAHLPLAKTVSVEELLQYVELQDPVTRTQLRAMAAKTVCPPHKVELEALLGKQAYKEQVLAKRLTMLELLEKYPACEMSFSEFIALLPSIRPRYYSISSSPRVDEKQASITVSVVSGPAWSGYGEYKGIASNYLAELQEGDTITCFISTPQSEFTLPKDPETPLIMVGPGTGVAPFRGFVQARKQLKEQGQSLGEAHLYFGCRSPHEDYLYQEELENAQSEGIITLHTAFSRMPNQPKTYVQHVMEQDGKKLIELLDQGAHFYICGDGSQMAPAVEATLMKSYADVHQVSEADARLWLQQLEEKGRYAKDVWLG

SEQ ID NO: 773 - DNA, 3147 bp, synthetic construct
  misc_feature 1..3147: note = variant of P450 oxidase from Bacillus megaterium
  source 1..3147: mol_type = other DNA
atgacaattaaggaaatgcctcagcctaagacgtttggagaacttaaaaatttaccgttattaaacacagataaaccggttcaagctttgatgcgtattgcggatgaattaggagaaatctttaaattcgaggcgcctggtagcgtaacgcgctatttatcaagtcagcgtctaattaaagaagcatgcgatgaatcacgctttgataaaaacttaagtcaagcgcttaaatttgcacgtgattttgttggagacgggctgtctacaagctggacgcatgaaccgaattggaaaaaagcgcataatatcttagttccaagctttagtcagcatgcaatggggcgttatcatgcgatgatggtcgatatcgccgtgcagcttgttcaaaagtgggagcgtctaaatgcagatgagcatattgaagtatcggaagacatgacacgtttaacgcttgatacaattggtctttgcctgtttaactatcgctttaacagcttttaccgagatacgcctcatccatttattgtgagtgtggttcgtgcactggatgaagtaatgaacaagctgcagcgagcaaatccagacgacccagcttatgatgaaaacaagcgccagtgtcaagaagatatcaaggtgatgaacgactatgtagataaaattattgcagatcgcaaagcaaggggtgaacaaagtcatgatttattaacgcagatgctaaacggaaaagatccagaaacgggtgagccgcttgatgacgggaacattcgtaatcaaattattacattcttaattgcgggacaccaaacgacaagtggtcttttatcatttgcgctgtatttcttagtgaaaaatccacgtgtattacaaaaagtagcagaagaagcagcacgagttctagtagatcctgttccaagctacaaacaagtcaaacagcttaaatatgttggcatggtcttaaacgaagcgctgcgcttatggccagtagcgcctatgttttccctatatgcaaaagaagatacggtgcttggaggagaatatcctttaacgaaaggcgacgaagtaatggttctggtgcctcagcttcaccgtgataaaacaatttggggagacgatgtggaggagttccgtccagagcgttttgaaaatccaagtgcgattccgcagcatgcgtttaaaccgtttggaaacggtcagcgtgcgtgtatcggtcagcagttcgctcttcatagtgcaacgctggtacttggtatgatgctaaaacactttgactttgaagatcatacaaactacgagctcgttattaaagaatcgcggacgttaaaacctgaaggctttgtggtaaaagcaaaatcgaaaggcattccgcttggcggtattccttcacctagcactgaacagtctgctaaaaaagtacgcaaaaaggcagaaaacgctcataatacgccgctgcttgtgctatacggttcaaatgcgggaacagctgaaggaacggcgcgtgatttagcagatattgcaatgagcaaaggatttgcaccgcaggtcgcaacgcttgattcacacgccggtaatcttccgcgcgaaggagctgtattaattgtaacggcgtcttataacggtcatccgcctgataacgcaaagcaatttgtcgactggttagaccaagcgtctgcggatgaagtaaaaggcgttcgctactccgtatttggatgcggcgataaaaattgggcggggacgtatcaaaaagtgcctgcttttatcgatgaaacgcttgccgctaaaggggcagaaaacatcgctgaccgcggtgaagcagatgcaagcgacgactttgaaggcacatatgaagaatggcgtgatcatatgtggagtgacgtagcagcctactttggtctcgacattgaaaacagtgaagataataaatctactctttcacttcaatttgtcgacagcgcggcggatatgccgcttgcgaaaatgcacggtgcgttttcaacgaacgtcgtagcaagcaaagaacttcaacagcctggcagtgcacgaagcacgcgacatcttgaaattgaacttccaaaagaagcttcttatcaagaaggagatcatttaggtgttattcctcgctattatgaaggaatagtaaaccgtgtaacagcaaggttcggcctaagcgcatcacagctgatccgtctggaagcagaagaagaaaaattagctcatttgccactcgctaaaacagtatccgtagaagagcttctgcaatacgtggagcttcaagatcctgttacgcgcacgcagcttcgcgcaatggctgctaaaacggtctgcccgccgcataaagtagagcttgaagccttgcttggcaagcaagcctacaaagaacaagtgctggcaaaacgtttaacaatgcttgaactgcttgaaaaatacccggcgtgtgaaatgagtttcagcgaatttatcgcccttctgccaagcatacgcccgcgctattactcgatttcttcatcacctcgtgtcgatgaaaaacaagcaagcatcacggtcagcgttgtctcaggaccggcgtggagcggatatggagaatataaaggaattgcgtcgaactatcttgccgagctgcaagaaggagatacgattacgtgctttatttccacaccgcagtcagagtttacgctgccaaaagaccctgaaacgccgcttatcatggtcggaccgggaacaggcgtcgcgccgtttagaggctttgtgcaggcgcgcaaacagctaaaagaacaaggacagtcacttggagaagcacatttatacttcggctgccgttcacctcatgaagactatctgtatcaagaagagcttgaaaacgcccaaagcgaaggcatcattacgcttcataccgctttttctcgcatgccgaatcagccgaaaacatacgttcagcacgtaatggaacaagacggcaagaaattgattgaacttcttgatcaaggagcgcacttctatatttgcggagacggaagccaaatggcacctgccgttgaagcaacgcttatgaaaagctatgctgacgttcaccaagtgagtgaagcagacgctcgcttatggctgcagcagctagaagaaaaaggccgatacgcaaaagacgtgtggctgggg

SEQ ID NO: 774 - protein, 1049 aa, synthetic construct
  REGION 1..1049: note = variant of P450 oxidase from Bacillus megaterium
MTIKEMPQPKTFGELKNLPLLNTDKPVQALMRIADELGEIFKFEAPGSVTRYLSSQRLIKEACDESRFDKNLSQALKFARDFVGDGLSTSWTHEPNWKKAHNILVPSFSQHAMGRYHAMMVDIAVQLVQKWERLNADEHIEVSEDMTRLTLDTIGLCLFNYRFNSFYRDTPHPFIVSVVRALDEVMNKLQRANPDDPAYDENKRQCQEDIKVMNDYVDKIIADRKARGEQSHDLLTQMLNGKDPETGEPLDDGNIRNQIITFLIAGHQTTSGLLSFALYFLVKNPRVLQKVAEEAARVLVDPVPSYKQVKQLKYVGMVLNEALRLWPVAPMFSLYAKEDTVLGGEYPLTKGDEVMVLVPQLHRDKTIWGDDVEEFRPERFENPSAIPQHAFKPFGNGQRACIGQQFALHSATLVLGMMLKHFDFEDHTNYELVIKESRTLKPEGFVVKAKSKGIPLGGIPSPSTEQSAKKVRKKAENAHNTPLLVLYGSNAGTAEGTARDLADIAMSKGFAPQVATLDSHAGNLPREGAVLIVTASYNGHPPDNAKQFVDWLDQASADEVKGVRYSVFGCGDKNWAGTYQKVPAFIDETLAAKGAENIADRGEADASDDFEGTYEEWRDHMWSDVAAYFGLDIENSEDNKSTLSLQFVDSAADMPLAKMHGAFSTNVVASKELQQPGSARSTRHLEIELPKEASYQEGDHLGVIPRYYEGIVNRVTARFGLSASQLIRLEAEEEKLAHLPLAKTVSVEELLQYVELQDPVTRTQLRAMAAKTVCPPHKVELEALLGKQAYKEQVLAKRLTMLELLEKYPACEMSFSEFIALLPSIRPRYYSISSSPRVDEKQASITVSVVSGPAWSGYGEYKGIASNYLAELQEGDTITCFISTPQSEFTLPKDPETPLIMVGPGTGVAPFRGFVQARKQLKEQGQSLGEAHLYFGCRSPHEDYLYQEELENAQSEGIITLHTAFSRMPNQPKTYVQHVMEQDGKKLIELLDQGAHFYICGDGSQMAPAVEATLMKSYADVHQVSEADARLWLQQLEEKGRYAKDVWLG

SEQ ID NO: 775 - DNA, 3147 bp, synthetic construct
  misc_feature 1..3147: note = variant of P450 oxidase from Bacillus megaterium
  source 1..3147: mol_type = other DNA
atgacaattaaggaaatgcctcagcctaagacgtttggagaacttaaaaatttaccgttattaaacacagataaaccggttcaagctttgatgcgtattgcggatgaattaggagaaatctttaaattcgaggcgcctggtagcgtaacgcgctatttatcaagtcagcgtctaattaaagaagcatgcgatgaatcacgctttgataaaaacttaagtcaagcgcttaaagaggcacgtgattttgttggagacgggctgtctacaagctggacgcatgaaccgaattggaaaaaagcgcataatatcttagttccaagctttagtcagcatgcaatggggcgttatcatgcgatgatggtcgatatcgccgtgcagcttgttcaaaagtgggagcgtctaaatgcagatgagcatattgaagtatcggaagacatgacacgtttaacgcttgatacaattggtctttgcctgtttaactatcgctttaacagcttttaccgagatacgcctcatccatttattgtgagtgtggttcgtgcactggatgaagtaatgaacaagctgcagcgagcaaatccagacgacccagcttatgatgaaaacaagcgccagtgtcaagaagatatcaaggtgatgaacgactatgtagataaaattattgcagatcgcaaagcaaggggtgaacaaagtcatgatttattaacgcagatgctaaacggaaaagatccagaaacgggtgagccgcttgatgacgggaacattcgtcagcaaattattacattcttaattgcgggacaccaaacgacaagtggtcttttatcatttgcgctgtatttcttagtgaaaaatccacgtgtattacaaaaagtagcagaagaagcagcacgagttctagtagatcctgttccaagctacaaacaagtcaaacagcttaaatatgttggcatggtcttaaacgaagcgctgcgcttatggccagtagcgcctatgttttccctatatgcaaaagaagatacggtgcttggaggagaatatcctttaacgaaaggcgacgaagtaatggttctggtgcctcagcttcaccgtgataaaacaatttggggagacgatgtggaggagttccgtccagagcgttttgaaaatccaagtgcgattccgcagcatgcgtttaaaccgtttggaaacggtcagcgtgcgtgtatcggtcagcagttcgctcttcatagtgcaacgctggtacttggtatgatgctaaaacactttgactttgaagatcatacaaactacgagctcgttattaaagaatcgcggacgttaaaacctgaaggctttgtggtaaaagcaaaatcgaaaggcattccgcttggcggtattccttcacctagcactgaacagtctgctaaaaaagtacgcaaaaaggcagaaaacgctcataatacgccgctgcttgtgctatacggttcaaatgcgggaacagctgaaggaacggcgcgtgatttagcagatattgcaatgagcaaaggatttgcaccgcaggtcgcaacgcttgattcacacgccggtaatcttccgcgcgaaggagctgtattaattgtaacggcgtcttataacggtcatccgcctgataacgcaaagcaatttgtcgactggttagaccaagcgtctgcggatgaagtaaaaggcgttcgctactccgtatttggatgcggcgataaaaattgggcggggacgtatcaaaaagtgcctgcttttatcgatgaaacgcttgccgctaaaggggcagaaaacatcgctgaccgcggtgaagcagatgcaagcgacgactttgaaggcacatatgaagaatggcgtgatcatatgtggagtgacgtagcagcctactttggtctcgacattgaaaacagtgaagataataaatctactctttcacttcaatttgtcgacagcgcggcggatatgccgcttgcgaaaatgcacggtgcgttttcaacgaacgtcgtagcaagcaaagaacttcaacagcctggcagtgcacgaagcacgcgacatcttgaaattgaacttccaaaagaagcttcttatcaagaaggagatcatttaggtgttattcctcgctattatgaaggaatagtaaaccgtgtaacagcaaggttcggcctaagcgcatcacagctgatccgtctggaagcagaagaagaaaaattagctcatttgccactcgctaaaacagtatccgtagaagagcttctgcaatacgtggagcttcaagatcctgttacgcgcacgcagcttcgcgcaatggctgctaaaacggtctgcccgccgcataaagtagagcttgaagccttgcttggcaagcaagcctacaaagaacaagtgctggcaaaacgtttaacaatgcttgaactgcttgaaaaatacccggcgtgtgaaatgagtttcagcgaatttatcgcccttctgccaagcatacgcccgcgctattactcgatttcttcatcacctcgtgtcgatgaaaaacaagcaagcatcacggtcagcgttgtctcaggaccggcgtggagcggatatggagaatataaaggaattgcgtcgaactatcttgccgagctgcaagaaggagatacgattacgtgctttatttccacaccgcagtcagagtttacgctgccaaaagaccctgaaacgccgcttatcatggtcggaccgggaacaggcgtcgcgccgtttagaggctttgtgcaggcgcgcaaacagctaaaagaacaaggacagtcacttggagaagcacatttatacttcggctgccgttcacctcatgaagactatctgtatcaagaagagcttgaaaacgcccaaagcgaaggcatcattacgcttcataccgctttttctcgcatgccgaatcagccgaaaacatacgttcagcacgtaatggaacaagacggcaagaaattgattgaacttcttgatcaaggagcgcacttctatatttgcggagacggaagccaaatggcacctgccgttgaagcaacgcttatgaaaagctatgctgacgttcaccaagtgagtgaagcagacgctcgcttatggctgcagcagctagaagaaaaaggccgatacgcaaaagacgtgtggctgggg

SEQ ID NO: 776 - protein, 1049 aa, synthetic construct
  REGION 1..1049: note = variant of P450 oxidase from Bacillus megaterium
MTIKEMPQPKTFGELKNLPLLNTDKPVQALMRIADELGEIFKFEAPGSVTRYLSSQRLIKEACDESRFDKNLSQALKEARDFVGDGLSTSWTHEPNWKKAHNILVPSFSQHAMGRYHAMMVDIAVQLVQKWERLNADEHIEVSEDMTRLTLDTIGLCLFNYRFNSFYRDTPHPFIVSVVRALDEVMNKLQRANPDDPAYDENKRQCQEDIKVMNDYVDKIIADRKARGEQSHDLLTQMLNGKDPETGEPLDDGNIRQQIITFLIAGHQTTSGLLSFALYFLVKNPRVLQKVAEEAARVLVDPVPSYKQVKQLKYVGMVLNEALRLWPVAPMFSLYAKEDTVLGGEYPLTKGDEVMVLVPQLHRDKTIWGDDVEEFRPERFENPSAIPQHAFKPFGNGQRACIGQQFALHSATLVLGMMLKHFDFEDHTNYELVIKESRTLKPEGFVVKAKSKGIPLGGIPSPSTEQSAKKVRKKAENAHNTPLLVLYGSNAGTAEGTARDLADIAMSKGFAPQVATLDSHAGNLPREGAVLIVTASYNGHPPDNAKQFVDWLDQASADEVKGVRYSVFGCGDKNWAGTYQKVPAFIDETLAAKGAENIADRGEADASDDFEGTYEEWRDHMWSDVAAYFGLDIENSEDNKSTLSLQFVDSAADMPLAKMHGAFSTNVVASKELQQPGSARSTRHLEIELPKEASYQEGDHLGVIPRYYEGIVNRVTARFGLSASQLIRLEAEEEKLAHLPLAKTVSVEELLQYVELQDPVTRTQLRAMAAKTVCPPHKVELEALLGKQAYKEQVLAKRLTMLELLEKYPACEMSFSEFIALLPSIRPRYYSISSSPRVDEKQASITVSVVSGPAWSGYGEYKGIASNYLAELQEGDTITCFISTPQSEFTLPKDPETPLIMVGPGTGVAPFRGFVQARKQLKEQGQSLGEAHLYFGCRSPHEDYLYQEELENAQSEGIITLHTAFSRMPNQPKTYVQHVMEQDGKKLIELLDQGAHFYICGDGSQMAPAVEATLMKSYADVHQVSEADARLWLQQLEEKGRYAKDVWLG

SEQ ID NO: 777 - DNA, 3147 bp, synthetic construct
  misc_feature 1..3147: note = variant of P450 oxidase from Bacillus megaterium
  source 1..3147: mol_type = other DNA
atgacaattaaggaaatgcctcagcctaagacgtttggagaacttaaaaatttaccgttattaaacacaagtaaaccggttcaagctttgatgcgtattgcggatgaattaggagaaatctttaaattcgaggcgcctggtagcgtaacgcgctatttatcaagtcagcgtctaattaaagaagcatgcgatgaatcacgctttgataaaaacttaagtcaagcgcttaaatttgcacgtgattttgttggagacgggctgtctacaagctggacgcatgaaccgaattggaaaaaagcgcataatatcttagttccaagctttagtcagcatgcaatggggcgttatcatgcgatgatggtcgatatcgccgtgcagcttgttcaaaagtgggagcgtctaaatgcagatgagcatattgaagtatcggaagacatgacacgtttaacgcttgatacaattggtctttgcctgtttaactatcgctttaacagcttttaccgagatacgcctcatccatttattgtgagtgtggttcgtgcactggatgaagtaatgaacaagctgcagcgagcaaatccagacgacccagcttatgatgaaaacaagcgccagtgtcaagaagatatcaaggtgatgaacgactatgtagataaaattattgcagatcgcaaagcaaggggtgaacaaagtcatgatttattaacgcagatgctaaacggaaaagatccagaaacgggtgagccgcttgatgacgggaacattcgtcagcaaattattacattcttaattgcgggacaccaaacgacaagtggtcttttatcatttgcgctgtatttcttagtgaaaaatccacgtgtattacaaaaagtagcagaagaagcagcacgagttctagtagatcctgttccaagctacaaacaagtcaaacagcttaaatatgttggcatggtcttaaacgaagcgctgcgcttatggccagtagcgcctatgttttccctatatgcaaaagaagatacggtgcttggaggagaatatcctttaacgaaaggcgacgaagtaatggttctggtgcctcagcttcaccgtgataaaacaatttggggagacgatgtggaggagttccgtccagagcgttttgaaaatccaagtgcgattccgcagcatgcgtttaaaccgtttggaaacggtcagcgtgcgtgtatcggtcagcagttcgctcttcatagtgcaacgctggtacttggtatgatgctaaaacactttgactttgaagatcatacaaactacgagctcgttattaaagaatcgcggacgttaaaacctgaaggctttgtggtaaaagcaaaatcgaaaggcattccgcttggcggtattccttcacctagcactgaacagtctgctaaaaaagtacgcaaaaaggcagaaaacgctcataatacgccgctgcttgtgctatacggttcaaatgcgggaacagctgaaggaacggcgcgtgatttagcagatattgcaatgagcaaaggatttgcaccgcaggtcgcaacgcttgattcacacgccggtaatcttccgcgcgaaggagctgtattaattgtaacggcgtcttataacggtcatccgcctgataacgcaaagcaatttgtcgactggttagaccaagcgtctgcggatgaagtaaaaggcgttcgctactccgtatttggatgcggcgataaaaattgggcggggacgtatcaaaaagtgcctgcttttatcgatgaaacgcttgccgctaaaggggcagaaaacatcgctgaccgcggtgaagcagatgcaagcgacgactttgaaggcacatatgaagaatggcgtgatcatatgtggagtgacgtagcagcctactttggtctcgacattgaaaacagtgaagataataaatctactctttcacttcaatttgtcgacagcgcggcggatatgccgcttgcgaaaatgcacggtgcgttttcaacgaacgtcgtagcaagcaaagaacttcaacagcctggcagtgcacgaagcacgcgacatcttgaaattgaacttccaaaagaagcttcttatcaagaaggagatcatttaggtgttattcctcgctattatgaaggaatagtaaaccgtgtaacagcaaggttcggcctaagcgcatcacagctgatccgtctggaagcagaagaagaaaaattagctcatttgccactcgctaaaacagtatccgtagaagagcttctgcaatacgtggagcttcaagatcctgttacgcgcacgcagcttcgcgcaatggctgctaaaacggtctgcccgccgcataaagtagagcttgaagccttgcttggcaagcaagcctacaaagaacaagtgctggcaaaacgtttaacaatgcttgaactgcttgaaaaatacccggcgtgtgaaatgagtttcagcgaatttatcgcccttctgccaagcatacgcccgcgctattactcgatttcttcatcacctcgtgtcgatgaaaaacaagcaagcatcacggtcagcgttgtctcaggaccggcgtggagcggatatggagaatataaaggaattgcgtcgaactatcttgccgagctgcaagaaggagatacgattacgtgctttatttccacaccgcagtcagagtttacgctgccaaaagaccctgaaacgccgcttatcatggtcggaccgggaacaggcgtcgcgccgtttagaggctttgtgcaggcgcgcaaacagctaaaagaacaaggacagtcacttggagaagcacatttatacttcggctgccgttcacctcatgaagactatctgtatcaagaagagcttgaaaacgcccaaagcgaaggcatcattacgcttcataccgctttttctcgcatgccgaatcagccgaaaacatacgttcagcacgtaatggaacaagacggcaagaaattgattgaacttcttgatcaaggagcgcacttctatatttgcggagacggaagccaaatggcacctgccgttgaagcaacgcttatgaaaagctatgctgacgttcaccaagtgagtgaagcagacgctcgcttatggctgcagcagctagaagaaaaaggccgatacgcaaaagacgtgtggctgggg

SEQ ID NO: 778 - protein, 1049 aa, synthetic construct
  REGION 1..1049: note = variant of P450 oxidase from Bacillus megaterium
MTIKEMPQPKTFGELKNLPLLNTSKPVQALMRIADELGEIFKFEAPGSVTRYLSSQRLIKEACDESRFDKNLSQALKFARDFVGDGLSTSWTHEPNWKKAHNILVPSFSQHAMGRYHAMMVDIAVQLVQKWERLNADEHIEVSEDMTRLTLDTIGLCLFNYRFNSFYRDTPHPFIVSVVRALDEVMNKLQRANPDDPAYDENKRQCQEDIKVMNDYVDKIIADRKARGEQSHDLLTQMLNGKDPETGEPLDDGNIRQQIITFLIAGHQTTSGLLSFALYFLVKNPRVLQKVAEEAARVLVDPVPSYKQVKQLKYVGMVLNEALRLWPVAPMFSLYAKEDTVLGGEYPLTKGDEVMVLVPQLHRDKTIWGDDVEEFRPERFENPSAIPQHAFKPFGNGQRACIGQQFALHSATLVLGMMLKHFDFEDHTNYELVIKESRTLKPEGFVVKAKSKGIPLGGIPSPSTEQSAKKVRKKAENAHNTPLLVLYGSNAGTAEGTARDLADIAMSKGFAPQVATLDSHAGNLPREGAVLIVTASYNGHPPDNAKQFVDWLDQASADEVKGVRYSVFGCGDKNWAGTYQKVPAFIDETLAAKGAENIADRGEADASDDFEGTYEEWRDHMWSDVAAYFGLDIENSEDNKSTLSLQFVDSAADMPLAKMHGAFSTNVVASKELQQPGSARSTRHLEIELPKEASYQEGDHLGVIPRYYEGIVNRVTARFGLSASQLIRLEAEEEKLAHLPLAKTVSVEELLQYVELQDPVTRTQLRAMAAKTVCPPHKVELEALLGKQAYKEQVLAKRLTMLELLEKYPACEMSFSEFIALLPSIRPRYYSISSSPRVDEKQASITVSVVSGPAWSGYGEYKGIASNYLAELQEGDTITCFISTPQSEFTLPKDPETPLIMVGPGTGVAPFRGFVQARKQLKEQGQSLGEAHLYFGCRSPHEDYLYQEELENAQSEGIITLHTAFSRMPNQPKTYVQHVMEQDGKKLIELLDQGAHFYICGDGSQMAPAVEATLMKSYADVHQVSEADARLWLQQLEEKGRYAKDVWLG

SEQ ID NO: 779 - DNA, 3147 bp, synthetic construct
  misc_feature 1..3147: note = variant of P450 oxidase from Bacillus megaterium
  source 1..3147: mol_type = other DNA
atgacaattaaggaaatgcctcagcctaagacgtttggagaacttaaaaatttaccgttattaaacacagataaaccggttcaagctttgatgcgtattgcggatgaattaggagaaatctttaaattcgaggcgcctggtagcgtaacgcgctatttatcaagtcagcgtctaattaaagaagcatgcgatgaatcacgctttgataaaaacttaagtcaagcgcttaaatttgcacgtgattttgttggagacgggctgtctacaagctggacgcatgaaccgaattggaaaaaagcgcataatatcttagttccaagctttagtcagcatgcaatggggcgttatcatgcgatgatggtcgatatcgccgtgcagcttgttcaaaagtgggagcgtctaaatgcagatgagcatattgaagtatcggaagacatgacacgtttaacgcttgatacaattggtctttgcctgtttaactatcgctttaacagcttttaccgagatacgcctcatccatttattgtgagtgtggttcgtgcactggatgaagtaatgaacaagctgcagcgagcaaatccagacgacccagcttatgatgaaaacaagcgccagtgtcaagaagatatcaaggtgatgaacgactatgtagataaaattattgcagatcgcaaagcaaggggtgaacaaagtcatgatttattaacgcagatgctaaacggaaaagatccagaaacgggtgagccgcttgatgacgggaacattcgtcatcaaattattacattcttaattgcgggacaccaaacgacaagtggtcttttatcatttgcgctgtatttcttagtgaaaaatccacgtgtattacaaaaagtagcagaagaagcagcacgagttctagtagatcctgttccaagctacaaacaagtcaaacagcttaaatatgttggcatggtcttaaacgaagcgctgcgcttatggccagtagcgcctatgttttccctatatgcaaaagaagatacggtgcttggaggagaatatcctttaacgaaaggcgacgaagtaatggttctggtgcctcagcttcaccgtgataaaacaatttggggagacgatgtggaggagttccgtccagagcgttttgaaaatccaagtgcgattccgcagcatgcgtttaaaccgtttggaaacggtcagcgtgcgtgtatcggtcagcagttcgctcttcatagtgcaacgctggtacttggtatgatgctaaaacactttgactttgaagatcatacaaactacgagctcgttattaaagaatcgcggacgttaaaacctgaaggctttgtggtaaaagcaaaatcgaaaggcattccgcttggcggtattccttcacctagcactgaacagtctgctaaaaaagtacgcaaaaaggcagaaaacgctcataatacgccgctgcttgtgctatacggttcaaatgcgggaacagctgaaggaacggcgcgtgatttagcagatattgcaatgagcaaaggatttgcaccgcaggtcgcaacgcttgattcacacgccggtaatcttccgcgcgaaggagctgtattaattgtaacggcgtcttataacggtcatccgcctgataacgcaaagcaatttgtcgactggttagaccaagcgtctgcggatgaagtaaaaggcgttcgctactccgtatttggatgcggcgataaaaattgggcggggacgtatcaaaaagtgcctgcttttatcgatgaaacgcttgccgctaaaggggcagaaaacatcgctgaccgcggtgaagcagatgcaagcgacgactttgaaggcacatatgaagaatggcgtgatcatatgtggagtgacgtagcagcctactttggtctcgacattgaaaacagtgaagataataaatctactctttcacttcaatttgtcgacagcgcggcggatatgccgcttgcgaaaatgcacggtgcgttttcaacgaacgtcgtagcaagcaaagaacttcaacagcctggcagtgcacgaagcacgcgacatcttgaaattgaacttccaaaagaagcttcttatcaagaaggagatcatttaggtgttattcctcgctattatgaaggaatagtaaaccgtgtaacagcaaggttcggcctaagcgcatcacagctgatccgtctggaagcagaagaagaaaaattagctcatttgccactcgctaaaacagtatccgtagaagagcttctgcaatacgtggagcttcaagatcctgttacgcgcacgcagcttcgcgcaatggctgctaaaacggtctgcccgccgcataaagtagagcttgaagccttgcttggcaagcaagcctacaaagaacaagtgctggcaaaacgtttaacaatgcttgaactgcttgaaaaatacccggcgtgtgaaatgagtttcagcgaatttatcgcccttctgccaagcatacgcccgcgctattactcgatttcttcatcacctcgtgtcgatgaaaaacaagcaagcatcacggtcagcgttgtctcaggaccggcgtggagcggatatggagaatataaaggaattgcgtcgaactatcttgccgagctgcaagaaggagatacgattacgtgctttatttccacaccgcagtcagagtttacgctgccaaaagaccctgaaacgccgcttatcatggtcggaccgggaacaggcgtcgcgccgtttagaggctttgtgcaggcgcgcaaacagctaaaagaacaaggacagtcacttggagaagcacatttatacttcggctgccgttcacctcatgaagactatctgtatcaagaagagcttgaaaacgcccaaagcgaaggcatcattacgcttcataccgctttttctcgcatgccgaatcagccgaaaacatacgttcagcacgtaatggaacaagacggcaagaaattgattgaacttcttgatcaaggagcgcacttctatatttgcggagacggaagccaaatggcacctgccgttgaagcaacgcttatgaaaagctatgctgacgttcaccaagtgagtgaagcagacgctcgcttatggctgcagcagctagaagaaaaaggccgatacgcaaaagacgtgtggctgggg

SEQ ID NO: 780 - protein, 1049 aa, synthetic construct
  REGION 1..1049: note = variant of P450 oxidase from Bacillus megaterium
MTIKEMPQPKTFGELKNLPLLNTDKPVQALMRIADELGEIFKFEAPGSVTRYLSSQRLIKEACDESRFDKNLSQALKFARDFVGDGLSTSWTHEPNWKKAHNILVPSFSQHAMGRYHAMMVDIAVQLVQKWERLNADEHIEVSEDMTRLTLDTIGLCLFNYRFNSFYRDTPHPFIVSVVRALDEVMNKLQRANPDDPAYDENKRQCQEDIKVMNDYVDKIIADRKARGEQSHDLLTQMLNGKDPETGEPLDDGNIRHQIITFLIAGHQTTSGLLSFALYFLVKNPRVLQKVAEEAARVLVDPVPSYKQVKQLKYVGMVLNEALRLWPVAPMFSLYAKEDTVLGGEYPLTKGDEVMVLVPQLHRDKTIWGDDVEEFRPERFENPSAIPQHAFKPFGNGQRACIGQQFALHSATLVLGMMLKHFDFEDHTNYELVIKESRTLKPEGFVVKAKSKGIPLGGIPSPSTEQSAKKVRKKAENAHNTPLLVLYGSNAGTAEGTARDLADIAMSKGFAPQVATLDSHAGNLPREGAVLIVTASYNGHPPDNAKQFVDWLDQASADEVKGVRYSVFGCGDKNWAGTYQKVPAFIDETLAAKGAENIADRGEADASDDFEGTYEEWRDHMWSDVAAYFGLDIENSEDNKSTLSLQFVDSAADMPLAKMHGAFSTNVVASKELQQPGSARSTRHLEIELPKEASYQEGDHLGVIPRYYEGIVNRVTARFGLSASQLIRLEAEEEKLAHLPLAKTVSVEELLQYVELQDPVTRTQLRAMAAKTVCPPHKVELEALLGKQAYKEQVLAKRLTMLELLEKYPACEMSFSEFIALLPSIRPRYYSISSSPRVDEKQASITVSVVSGPAWSGYGEYKGIASNYLAELQEGDTITCFISTPQSEFTLPKDPETPLIMVGPGTGVAPFRGFVQARKQLKEQGQSLGEAHLYFGCRSPHEDYLYQEELENAQSEGIITLHTAFSRMPNQPKTYVQHVMEQDGKKLIELLDQGAHFYICGDGSQMAPAVEATLMKSYADVHQVSEADARLWLQQLEEKGRYAKDVWLG

SEQ ID NO: 781 - DNA, 3147 bp, synthetic construct
  misc_feature 1..3147: note = variant of P450 oxidase from Bacillus megaterium
  source 1..3147: mol_type = other DNA
atgacaattaaggaaatgcctcagcctaagacgtttggagaacttaaaaatttaccgttattaaacacagataaaccggttcaagctttgatgcgtattgcggatgaattaggagaaatctttaaattcgaggcgcctggtagcgtaacgcgctatgtttcaagtcagcgtctaattaaagaagcatgcgatgaatcacgctttgataaaaacttaagtcaagcgcttaaatttgcacgtgattttgttggagacgggctgtctacaagctggacgcatgaaccgaattggaaaaaagcgcataatatcttagttccaagctttagtcagcatgcaatggggcgttatcatgcgatgatggtcgatatcgccgtgcagcttgttcaaaagtgggagcgtctaaatgcagatgagcatattgaagtatcggaagacatgacacgtttaacgcttgatacaattggtctttgcctgtttaactatcgctttaacagcttttaccgagatacgcctcatccatttattgtgagtgtggttcgtgcactggatgaagtaatgaacaagctgcagcgagcaaatccagacgacccagcttatgatgaaaacaagcgccagtgtcaagaagatatcaaggtgatgaacgactatgtagataaaattattgcagatcgcaaagcaaggggtgaacaaagtcatgatttattaacgcagatgctaaacggaaaagatccagaaacgggtgagccgcttgatgacgggaacattcgtcagcaaattattacattcttaattgcgggacaccaaacgacaagtggtcttttatcatttgcgctgtatttcttagtgaaaaatccacgtgtattacaaaaagtagcagaagaagcagcacgagttctagtagatcctgttccaagctacaaacaagtcaaacagcttaaatatgttggcatggtcttaaacgaagcgctgcgcttatggccagtagcgcctatgttttccctatatgcaaaagaagatacggtgcttggaggagaatatcctttaacgaaaggcgacgaagtaatggttctggtgcctcagcttcaccgtgataaaacaatttggggagacgatgtggaggagttccgtccagagcgttttgaaaatccaagtgcgattccgcagcatgcgtttaaaccgtttggaaacggtcagcgtgcgtgtatcggtcagcagttcgctcttcatagtgcaacgctggtacttggtatgatgctaaaacactttgactttgaagatcatacaaactacgagctcgttattaaagaatcgcggacgttaaaacctgaaggctttgtggtaaaagcaaaatcgaaaggcattccgcttggcggtattccttcacctagcactgaacagtctgctaaaaaagtacgcaaaaaggcagaaaacgctcataatacgccgctgcttgtgctatacggttcaaatgcgggaacagctgaaggaacggcgcgtgatttagcagatattgcaatgagcaaaggatttgcaccgcaggtcgcaacgcttgattcacacgccggtaatcttccgcgcgaaggagctgtattaattgtaacggcgtcttataacggtcatccgcctgataacgcaaagcaatttgtcgactggttagaccaagcgtctgcggatgaagtaaaaggcgttcgctactccgtatttggatgcggcgataaaaattgggcggggacgtatcaaaaagtgcctgcttttatcgatgaaacgcttgccgctaaaggggcagaaaacatcgctgaccgcggtgaagcagatgcaagcgacgactttgaaggcacatatgaagaatggcgtgatcatatgtggagtgacgtagcagcctactttggtctcgacattgaaaacagtgaagataataaatctactctttcacttcaatttgtcgacagcgcggcggatatgccgcttgcgaaaatgcacggtgcgttttcaacgaacgtcgtagcaagcaaagaacttcaacagcctggcagtgcacgaagcacgcgacatcttgaaattgaacttccaaaagaagcttcttatcaagaaggagatcatttaggtgttattcctcgctattatgaaggaatagtaaaccgtgtaacagcaaggttcggcctaagcgcatcacagctgatccgtctggaagcagaagaagaaaaattagctcatttgccactcgctaaaacagtatccgtagaagagcttctgcaatacgtggagcttcaagatcctgttacgcgcacgcagcttcgcgcaatggctgctaaaacggtctgcccgccgcataaagtagagcttgaagccttgcttggcaagcaagcctacaaagaacaagtgctggcaaaacgtttaacaatgcttgaactgcttgaaaaatacccggcgtgtgaaatgagtttcagcgaatttatcgcccttctgccaagcatacgcccgcgctattactcgatttcttcatcacctcgtgtcgatgaaaaacaagcaagcatcacggtcagcgttgtctcaggaccggcgtggagcggatatggagaatataaaggaattgcgtcgaactatcttgccgagctgcaagaaggagatacgattacgtgctttatttccacaccgcagtcagagtttacgctgccaaaagaccctgaaacgccgcttatcatggtcggaccgggaacaggcgtcgcgccgtttagaggctttgtgcaggcgcgcaaacagctaaaagaacaaggacagtcacttggagaagcacatttatacttcggctgccgttcacctcatgaagactatctgtatcaagaagagcttgaaaacgcccaaagcgaaggcatcattacgcttcataccgctttttctcgcatgccgaatcagccgaaaacatacgttcagcacgtaatggaacaagacggcaagaaattgattgaacttcttgatcaaggagcgcacttctatatttgcggagacggaagccaaatggcacctgccgttgaagcaacgcttatgaaaagctatgctgacgttcaccaagtgagtgaagcagacgctcgcttatggctgcagcagctagaagaaaaaggccgatacgcaaaagacgtgtggctgggg

SEQ ID NO: 782 - protein, 1049 aa, synthetic construct
  REGION 1..1049: note = variant of P450 oxidase from Bacillus megaterium
MTIKEMPQPKTFGELKNLPLLNTDKPVQALMRIADELGEIFKFEAPGSVTRYVSSQRLIKEACDESRFDKNLSQALKFARDFVGDGLSTSWTHEPNWKKAHNILVPSFSQHAMGRYHAMMVDIAVQLVQKWERLNADEHIEVSEDMTRLTLDTIGLCLFNYRFNSFYRDTPHPFIVSVVRALDEVMNKLQRANPDDPAYDENKRQCQEDIKVMNDYVDKIIADRKARGEQSHDLLTQMLNGKDPETGEPLDDGNIRQQIITFLIAGHQTTSGLLSFALYFLVKNPRVLQKVAEEAARVLVDPVPSYKQVKQLKYVGMVLNEALRLWPVAPMFSLYAKEDTVLGGEYPLTKGDEVMVLVPQLHRDKTIWGDDVEEFRPERFENPSAIPQHAFKPFGNGQRACIGQQFALHSATLVLGMMLKHFDFEDHTNYELVIKESRTLKPEGFVVKAKSKGIPLGGIPSPSTEQSAKKVRKKAENAHNTPLLVLYGSNAGTAEGTARDLADIAMSKGFAPQVATLDSHAGNLPREGAVLIVTASYNGHPPDNAKQFVDWLDQASADEVKGVRYSVFGCGDKNWAGTYQKVPAFIDETLAAKGAENIADRGEADASDDFEGTYEEWRDHMWSDVAAYFGLDIENSEDNKSTLSLQFVDSAADMPLAKMHGAFSTNVVASKELQQPGSARSTRHLEIELPKEASYQEGDHLGVIPRYYEGIVNRVTARFGLSASQLIRLEAEEEKLAHLPLAKTVSVEELLQYVELQDPVTRTQLRAMAAKTVCPPHKVELEALLGKQAYKEQVLAKRLTMLELLEKYPACEMSFSEFIALLPSIRPRYYSISSSPRVDEKQASITVSVVSGPAWSGYGEYKGIASNYLAELQEGDTITCFISTPQSEFTLPKDPETPLIMVGPGTGVAPFRGFVQARKQLKEQGQSLGEAHLYFGCRSPHEDYLYQEELENAQSEGIITLHTAFSRMPNQPKTYVQHVMEQDGKKLIELLDQGAHFYICGDGSQMAPAVEATLMKSYADVHQVSEADARLWLQQLEEKGRYAKDVWLG

SEQ ID NO: 783 - DNA, 3147 bp, synthetic construct
  misc_feature 1..3147: note = variant of P450 oxidase from Bacillus megaterium
  source 1..3147: mol_type = other DNA
atgacaattaaggaaatgcctcagcctaagacgtttggagaacttaaaaatttaccgttattaaacacagataaaccggttcaagctttgatgcgtattgcggatgaattaggagaaatctttaaattcgaggcgcctggtagcgtaacgcgctatttatcaagtcagcgtctaattaaagaagcatgcgatgaatcacgctttgataaaaacttaagtcaagcgcttaaatttgcacgtgattttgttggagacgggctgtctacaagctggacgcatgaaccgaattggaaaaaagcgcataatatcttagttccaagctttagtcagcatgcaatggggcgttatcatgcgatgatggtcgatatcgccgtgcagcttgttcaaaagtgggagcgtctaaatgcagatgagcatattgaagtatcggaagacatgacacgtttaacgcttgatacaattggtctttgcctgtttaactatcgctttaacagcttttaccgagatacgcctcatccatttattgtgagtgtggttggggcactggatgaagtaatgaacaagctgcagcgagcaaatccagacgacccagcttatgatgaaaacaagcgccagtgtcaagaagatatcaaggtgatgaacgactatgtagataaaattattgcagatcgcaaagcaaggggtgaacaaagtcatgatttattaacgcagatgctaaacggaaaagatccagaaacgggtgagccgcttgatgacgggaacattcgtcagcaaattattacattcttaattgcgggacaccaaacgacaagtggtcttttatcatttgcgctgtatttcttagtgaaaaatccacgtgtattacaaaaagtagcagaagaagcagcacgagttctagtagatcctgttccaagctacaaacaagtcaaacagcttaaatatgttggcatggtcttaaacgaagcgctgcgcttatggccagtagcgcctatgttttccctatatgcaaaagaagatacggtgcttggaggagaatatcctttaacgaaaggcgacgaagtaatggttctggtgcctcagcttcaccgtgataaaacaatttggggagacgatgtggaggagttccgtccagagcgttttgaaaatccaagtgcgattccgcagcatgcgtttaaaccgtttggaaacggtcagcgtgcgtgtatcggtcagcagttcgctcttcatagtgcaacgctggtacttggtatgatgctaaaacactttgactttgaagatcatacaaactacgagctcgttattaaagaatcgcggacgttaaaacctgaaggctttgtggtaaaagcaaaatcgaaaggcattccgcttggcggtattccttcacctagcactgaacagtctgctaaaaaagtacgcaaaaaggcagaaaacgctcataatacgccgctgcttgtgctatacggttcaaatgcgggaacagctgaaggaacggcgcgtgatttagcagatattgcaatgagcaaaggatttgcaccgcaggtcgcaacgcttgattcacacgccggtaatcttccgcgcgaaggagctgtattaattgtaacggcgtcttataacggtcatccgcctgataacgcaaagcaatttgtcgactggttagaccaagcgtctgcggatgaagtaaaaggcgttcgctactccgtatttggatgcggcgataaaaattgggcggggacgtatcaaaaagtgcctgcttttatcgatgaaacgcttgccgctaaaggggcagaaaacatcgctgaccgcggtgaagcagatgcaagcgacgactttgaaggcacatatgaagaatggcgtgatcatatgtggagtgacgtagcagcctactttggtctcgacattgaaaacagtgaagataataaatctactctttcacttcaatttgtcgacagcgcggcggatatgccgcttgcgaaaatgcacggtgcgttttcaacgaacgtcgtagcaagcaaagaacttcaacagcctggcagtgcacgaagcacgcgacatcttgaaattgaacttccaaaagaagcttcttatcaagaaggagatcatttaggtgttattcctcgctattatgaaggaatagtaaaccgtgtaacagcaaggttcggcctaagcgcatcacagctgatccgtctggaagcagaagaagaaaaattagctcatttgccactcgctaaaacagtatccgtagaagagcttctgcaatacgtggagcttcaagatcctgttacgcgcacgcagcttcgcgcaatggctgctaaaacggtctgcccgccgcataaagtagagcttgaagccttgcttggcaagcaagcctacaaagaacaagtgctggcaaaacgtttaacaatgcttgaactgcttgaaaaatacccggcgtgtgaaatgagtttcagcgaatttatcgcccttctgccaagcatacgcccgcgctattactcgatttcttcatcacctcgtgtcgatgaaaaacaagcaagcatcacggtcagcgttgtctcaggaccggcgtggagcggatatggagaatataaaggaattgcgtcgaactatcttgccgagctgcaagaaggagatacgattacgtgctttatttccacaccgcagtcagagtttacgctgccaaaagaccctgaaacgccgcttatcatggtcggaccgggaacaggcgtcgcgccgtttagaggctttgtgcaggcgcgcaaacagctaaaagaacaaggacagtcacttggagaagcacatttatacttcggctgccgttcacctcatgaagactatctgtatcaagaagagcttgaaaacgcccaaagcgaaggcatcattacgcttcataccgctttttctcgcatgccgaatcagccgaaaacatacgttcagcacgtaatggaacaagacggcaagaaattgattgaacttcttgatcaaggagcgcacttctatatttgcggagacggaagccaaatggcacctgccgttgaagcaacgcttatgaaaagctatgctgacgttcaccaagtgagtgaagcagacgctcgcttatggctgcagcagctagaagaaaaaggccgatacgcaaaagacgtgtggctgggg

SEQ ID NO: 784 - protein, 1049 aa, synthetic construct
  REGION 1..1049: note = variant of P450 oxidase from Bacillus megaterium
MTIKEMPQPKTFGELKNLPLLNTDKPVQALMRIADELGEIFKFEAPGSVTRYLSSQRLIKEACDESRFDKNLSQALKFARDFVGDGLSTSWTHEPNWKKAHNILVPSFSQHAMGRYHAMMVDIAVQLVQKWERLNADEHIEVSEDMTRLTLDTIGLCLFNYRFNSFYRDTPHPFIVSVVGALDEVMNKLQRANPDDPAYDENKRQCQEDIKVMNDYVDKIIADRKARGEQSHDLLTQMLNGKDPETGEPLDDGNIRQQIITFLIAGHQTTSGLLSFALYFLVKNPRVLQKVAEEAARVLVDPVPSYKQVKQLKYVGMVLNEALRLWPVAPMFSLYAKEDTVLGGEYPLTKGDEVMVLVPQLHRDKTIWGDDVEEFRPERFENPSAIPQHAFKPFGNGQRACIGQQFALHSATLVLGMMLKHFDFEDHTNYELVIKESRTLKPEGFVVKAKSKGIPLGGIPSPSTEQSAKKVRKKAENAHNTPLLVLYGSNAGTAEGTARDLADIAMSKGFAPQVATLDSHAGNLPREGAVLIVTASYNGHPPDNAKQFVDWLDQASADEVKGVRYSVFGCGDKNWAGTYQKVPAFIDETLAAKGAENIADRGEADASDDFEGTYEEWRDHMWSDVAAYFGLDIENSEDNKSTLSLQFVDSAADMPLAKMHGAFSTNVVASKELQQPGSARSTRHLEIELPKEASYQEGDHLGVIPRYYEGIVNRVTARFGLSASQLIRLEAEEEKLAHLPLAKTVSVEELLQYVELQDPVTRTQLRAMAAKTVCPPHKVELEALLGKQAYKEQVLAKRLTMLELLEKYPACEMSFSEFIALLPSIRPRYYSISSSPRVDEKQASITVSVVSGPAWSGYGEYKGIASNYLAELQEGDTITCFISTPQSEFTLPKDPETPLIMVGPGTGVAPFRGFVQARKQLKEQGQSLGEAHLYFGCRSPHEDYLYQEELENAQSEGIITLHTAFSRMPNQPKTYVQHVMEQDGKKLIELLDQGAHFYICGDGSQMAPAVEATLMKSYADVHQVSEADARLWLQQLEEKGRYAKDVWLG

SEQ ID NO: 785 - DNA, 3147 bp, synthetic construct
  misc_feature 1..3147: note = variant of P450 oxidase from Bacillus megaterium
  source 1..3147: mol_type = other DNA
atgacaattaaggaaatgcctcagcctaagacgtttggagaacttaaaaatttaccgttattaaacacagataaaccggttcaagctttgatgcgtattgcggatgaattaggagaaatctttaaattcgaggcgcctggtagcgtaacgcgctatttatcaagtcagcgtctaattaaagaagcatgcgatgaatcacgctttgataaaaacttaagtcaagcgcttaaatttgcacgtgattttgttggagacgggctgtctacaagctggacgcatgaaccgaattggaaaaaagcgcataatatcttagttccaagctttagtcagcatgcaatggggcgttatcatgcgatgatggtcgatatcgccgtgcagcttgttcaaaagtgggagcgtctaaatgcagatgagcatattgaagtatcggaagacatgacacgtttaacgcttgatacaattggtctttgcctgtttaactatcgctttaacagcttttaccgagatacgcctcatccatttattgtgagtgtggttcgtgcactggatgaagtaatgaacaagctgcagcgagcaaatccagacgacccagcttatgatgaaaacaagcgccagtgtcaagaagatatcaaggtgatgaacgactatgtagataaaattattgcagatcgcaaagcaaggggtgaacaaagtcatgatttattaacgcagatgctaaacggaaaagatccagaaacgggtgagccgcttgatgacgggaacattcgttggcaaattattacattcttaattgcgggacaccaaacgacaagtggtcttttatcatttgcgctgtatttcttagtgaaaaatccacgtgtattacaaaaagtagcagaagaagcagcacgagttctagtagatcctgttccaagctacaaacaagtcaaacagcttaaatatgttggcatggtcttaaacgaagcgctgcgcttatggccagtagcgcctatgttttccctatatgcaaaagaagatacggtgcttggaggagaatatcctttaacgaaaggcgacgaagtaatggttctggtgcctcagcttcaccgtgataaaacaatttggggagacgatgtggaggagttccgtccagagcgttttgaaaatccaagtgcgattccgcagcatgcgtttaaaccgtttggaaacggtcagcgtgcgtgtatcggtcagcagttcgctcttcatagtgcaacgctggtacttggtatgatgctaaaacactttgactttgaagatcatacaaactacgagctcgttattaaagaatcgcggacgttaaaacctgaaggctttgtggtaaaagcaaaatcgaaaggcattccgcttggcggtattccttcacctagcactgaacagtctgctaaaaaagtacgcaaaaaggcagaaaacgctcataatacgccgctgcttgtgctatacggttcaaatgcgggaacagctgaaggaacggcgcgtgatttagcagatattgcaatgagcaaaggatttgcaccgcaggtcgcaacgcttgattcacacgccggtaatcttccgcgcgaaggagctgtattaattgtaacggcgtcttataacggtcatccgcctgataacgcaaagcaatttgtcgactggttagaccaagcgtctgcggatgaagtaaaaggcgttcgctactccgtatttggatgcggcgataaaaattgggcggggacgtatcaaaaagtgcctgcttttatcgatgaaacgcttgccgctaaaggggcagaaaacatcgctgaccgcggtgaagcagatgcaagcgacgactttgaaggcacatatgaagaatggcgtgatcatatgtggagtgacgtagcagcctactttggtctcgacattgaaaacagtgaagataataaatctactctttcacttcaatttgtcgacagcgcggcggatatgccgcttgcgaaaatgcacggtgcgttttcaacgaacgtcgtagcaagcaaagaacttcaacagcctggcagtgcacgaagcacgcgacatcttgaaattgaacttccaaaagaagcttcttatcaagaaggagatcatttaggtgttattcctcgctattatgaaggaatagtaaaccgtgtaacagcaaggttcggcctaagcgcatcacagctgatccgtctggaagcagaagaagaaaaattagctcatttgccactcgctaaaacagtatccgtagaagagcttctgcaatacgtggagcttcaagatcctgttacgcgcacgcagcttcgcgcaatggctgctaaaacggtctgcccgccgcataaagtagagcttgaagccttgcttggcaagcaagcctacaaagaacaagtgctggcaaaacgtttaacaatgcttgaactgcttgaaaaatacccggcgtgtgaaatgagtttcagcgaatttatcgcccttctgccaagcatacgcccgcgctattactcgatttcttcatcacctcgtgtcgatgaaaaacaagcaagcatcacggtcagcgttgtctcaggaccggcgtggagcggatatggagaatataaaggaattgcgtcgaactatcttgccgagctgcaagaaggagatacgattacgtgctttatttccacaccgcagtcagagtttacgctgccaaaagaccctgaaacgccgcttatcatggtcggaccgggaacaggcgtcgcgccgtttagaggctttgtgcaggcgcgcaaacagctaaaagaacaaggacagtcacttggagaagcacatttatacttcggctgccgttcacctcatgaagactatctgtatcaagaagagcttgaaaacgcccaaagcgaaggcatcattacgcttcataccgctttttctcgcatgccgaatcagccgaaaacatacgttcagcacgtaatggaacaagacggcaagaaattgattgaacttcttgatcaaggagcgcacttctatatttgcggagacggaagccaaatggcacctgccgttgaagcaacgcttatgaaaagctatgctgacgttcaccaagtgagtgaagcagacgctcgcttatggctgcagcagctagaagaaaaaggccgatacgcaaaagacgtgtggctgggg

SEQ ID NO: 786 - protein, 1049 aa, synthetic construct
  REGION 1..1049: note = variant of P450 oxidase from Bacillus megaterium
MTIKEMPQPKTFGELKNLPLLNTDKPVQALMRIADELGEIFKFEAPGSVTRYLSSQRLIKEACDESRFDKNLSQALKFARDFVGDGLSTSWTHEPNWKKAHNILVPSFSQHAMGRYHAMMVDIAVQLVQKWERLNADEHIEVSEDMTRLTLDTIGLCLFNYRFNSFYRDTPHPFIVSVVRALDEVMNKLQRANPDDPAYDENKRQCQEDIKVMNDYVDKIIADRKARGEQSHDLLTQMLNGKDPETGEPLDDGNIRWQIITFLIAGHQTTSGLLSFALYFLVKNPRVLQKVAEEAARVLVDPVPSYKQVKQLKYVGMVLNEALRLWPVAPMFSLYAKEDTVLGGEYPLTKGDEVMVLVPQLHRDKTIWGDDVEEFRPERFENPSAIPQHAFKPFGNGQRACIGQQFALHSATLVLGMMLKHFDFEDHTNYELVIKESRTLKPEGFVVKAKSKGIPLGGIPSPSTEQSAKKVRKKAENAHNTPLLVLYGSNAGTAEGTARDLADIAMSKGFAPQVATLDSHAGNLPREGAVLIVTASYNGHPPDNAKQFVDWLDQASADEVKGVRYSVFGCGDKNWAGTYQKVPAFIDETLAAKGAENIADRGEADASDDFEGTYEEWRDHMWSDVAAYFGLDIENSEDNKSTLSLQFVDSAADMPLAKMHGAFSTNVVASKELQQPGSARSTRHLEIELPKEASYQEGDHLGVIPRYYEGIVNRVTARFGLSASQLIRLEAEEEKLAHLPLAKTVSVEELLQYVELQDPVTRTQLRAMAAKTVCPPHKVELEALLGKQAYKEQVLAKRLTMLELLEKYPACEMSFSEFIALLPSIRPRYYSISSSPRVDEKQASITVSVVSGPAWSGYGEYKGIASNYLAELQEGDTITCFISTPQSEFTLPKDPETPLIMVGPGTGVAPFRGFVQARKQLKEQGQSLGEAHLYFGCRSPHEDYLYQEELENAQSEGIITLHTAFSRMPNQPKTYVQHVMEQDGKKLIELLDQGAHFYICGDGSQMAPAVEATLMKSYADVHQVSEADARLWLQQLEEKGRYAKDVWLG

SEQ ID NO: 787 - DNA, 3147 bp, synthetic construct
  misc_feature 1..3147: note = variant of P450 oxidase from Bacillus megaterium
  source 1..3147: mol_type = other DNA
atgacaattaaggaaatgcctcagcctaagacgtttggagaacttaaaaatttaccgttattaaacacagataaaccggttcaagctttgatgcgtattgcggatgaattaggagaaatctttaaattcgaggcgcctggtagcgtaacgcgctatttatcaagtcagcgtctaattaaagaagcatgcgatgaatcacgctttgataaaaacttaagtcaagcgcttaaatttgcacgtgatattgttggagacgggctgtctacaagctggacgcatgaaccgaattggaaaaaagcgcataatatcttagttccaagctttagtcagcatgcaatggggcgttatcatgcgatgatggtcgatatcgccgtgcagcttgttcaaaagtgggagcgtctaaatgcagatgagcatattgaagtatcggaagacatgacacgtttaacgcttgatacaattggtctttgcctgtttaactatcgctttaacagcttttaccgagatacgcctcatccatttattgtgagtgtggttcgtgcactggatgaagtaatgaacaagctgcagcgagcaaatccagacgacccagcttatgatgaaaacaagcgccagtgtcaagaagatatcaaggtgatgaacgactatgtagataaaattattgcagatcgcaaagcaaggggtgaacaaagtcatgatttattaacgcagatgctaaacggaaaagatccagaaacgggtgagccgcttgatgacgggaacattcgtcagcaaattattacattcttaattgcgggacaccaaacgacaagtggtcttttatcatttgcgctgtatttcttagtgaaaaatccacgtgtattacaaaaagtagcagaagaagcagcacgagttctagtagatcctgttccaagctacaaacaagtcaaacagcttaaatatgttggcatggtcttaaacgaagcgctgcgcttatggccagtagcgcctatgttttccctatatgcaaaagaagatacggtgcttggaggagaatatcctttaacgaaaggcgacgaagtaatggttctggtgcctcagcttcaccgtgataaaacaatttggggagacgatgtggaggagttccgtccagagcgttttgaaaatccaagtgcgattccgcagcatgcgtttaaaccgtttggaaacggtcagcgtgcgtgtatcggtcagcagttcgctcttcatagtgcaacgctggtacttggtatgatgctaaaacactttgactttgaagatcatacaaactacgagctcgttattaaagaatcgcggacgttaaaacctgaaggctttgtggtaaaagcaaaatcgaaaggcattccgcttggcggtattccttcacctagcactgaacagtctgctaaaaaagtacgcaaaaaggcagaaaacgctcataatacgccgctgcttgtgctatacggttcaaatgcgggaacagctgaaggaacggcgcgtgatttagcagatattgcaatgagcaaaggatttgcaccgcaggtcgcaacgcttgattcacacgccggtaatcttccgcgcgaaggagctgtattaattgtaacggcgtcttataacggtcatccgcctgataacgcaaagcaatttgtcgactggttagaccaagcgtctgcggatgaagtaaaaggcgttcgctactccgtatttggatgcggcgataaaaattgggcggggacgtatcaaaaagtgcctgcttttatcgatgaaacgcttgccgctaaaggggcagaaaacatcgctgaccgcggtgaagcagatgcaagcgacgactttgaaggcacatatgaagaatggcgtgatcatatgtggagtgacgtagcagcctactttggtctcgacattgaaaacagtgaagataataaatctactctttcacttcaatttgtcgacagcgcggcggatatgccgcttgcgaaaatgcacggtgcgttttcaacgaacgtcgtagcaagcaaagaacttcaacagcctggcagtgcacgaagcacgcgacatcttgaaattgaacttccaaaagaagcttcttatcaagaaggagatcatttaggtgttattcctcgctattatgaaggaatagtaaaccgtgtaacagcaaggttcggcctaagcgcatcacagctgatccgtctggaagcagaagaagaaaaattagctcatttgccactcgctaaaacagtatccgtagaagagcttctgcaatacgtggagcttcaagatcctgttacgcgcacgcagcttcgcgcaatggctgctaaaacggtctgcccgccgcataaagtagagcttgaagccttgcttggcaagcaagcctacaaagaacaagtgctggcaaaacgtttaacaatgcttgaactgcttgaaaaatacccggcgtgtgaaatgagtttcagcgaatttatcgcccttctgccaagcatacgcccgcgctattactcgatttcttcatcacctcgtgtcgatgaaaaacaagcaagcatcacggtcagcgttgtctcaggaccggcgtggagcggatatggagaatataaaggaattgcgtcgaactatcttgccgagctgcaagaaggagatacgattacgtgctttatttccacaccgcagtcagagtttacgctgccaaaagaccctgaaacgccgcttatcatggtcggaccgggaacaggcgtcgcgccgtttagaggctttgtgcaggcgcgcaaacagctaaaagaacaaggacagtcacttggagaagcacatttatacttcggctgccgttcacctcatgaagactatctgtatcaagaagagcttgaaaacgcccaaagcgaaggcatcattacgcttcataccgctttttctcgcatgccgaatcagccgaaaacatacgttcagcacgtaatggaacaagacggcaagaaattgattgaacttcttgatcaaggagcgcacttctatatttgcggagacggaagccaaatggcacctgccgttgaagcaacgcttatgaaaagctatgctgacgttcaccaagtgagtgaagcagacgctcgcttatggctgcagcagctagaagaaaaaggccgatacgcaaaagacgtgtggctgggg

SEQ ID NO: 788 - protein, 1049 aa, synthetic construct
  REGION 1..1049: note = variant of P450 oxidase from Bacillus megaterium
MTIKEMPQPKTFGELKNLPLLNTDKPVQALMRIADELGEIFKFEAPGSVTRYLSSQRLIKEACDESRFDKNLSQALKFARDIVGDGLSTSWTHEPNWKKAHNILVPSFSQHAMGRYHAMMVDIAVQLVQKWERLNADEHIEVSEDMTRLTLDTIGLCLFNYRFNSFYRDTPHPFIVSVVRALDEVMNKLQRANPDDPAYDENKRQCQEDIKVMNDYVDKIIADRKARGEQSHDLLTQMLNGKDPETGEPLDDGNIRQQIITFLIAGHQTTSGLLSFALYFLVKNPRVLQKVAEEAARVLVDPVPSYKQVKQLKYVGMVLNEALRLWPVAPMFSLYAKEDTVLGGEYPLTKGDEVMVLVPQLHRDKTIWGDDVEEFRPERFENPSAIPQHAFKPFGNGQRACIGQQFALHSATLVLGMMLKHFDFEDHTNYELVIKESRTLKPEGFVVKAKSKGIPLGGIPSPSTEQSAKKVRKKAENAHNTPLLVLYGSNAGTAEGTARDLADIAMSKGFAPQVATLDSHAGNLPREGAVLIVTASYNGHPPDNAKQFVDWLDQASADEVKGVRYSVFGCGDKNWAGTYQKVPAFIDETLAAKGAENIADRGEADASDDFEGTYEEWRDHMWSDVAAYFGLDIENSEDNKSTLSLQFVDSAADMPLAKMHGAFSTNVVASKELQQPGSARSTRHLEIELPKEASYQEGDHLGVIPRYYEGIVNRVTARFGLSASQLIRLEAEEEKLAHLPLAKTVSVEELLQYVELQDPVTRTQLRAMAAKTVCPPHKVELEALLGKQAYKEQVLAKRLTMLELLEKYPACEMSFSEFIALLPSIRPRYYSISSSPRVDEKQASITVSVVSGPAWSGYGEYKGIASNYLAELQEGDTITCFISTPQSEFTLPKDPETPLIMVGPGTGVAPFRGFVQARKQLKEQGQSLGEAHLYFGCRSPHEDYLYQEELENAQSEGIITLHTAFSRMPNQPKTYVQHVMEQDGKKLIELLDQGAHFYICGDGSQMAPAVEATLMKSYADVHQVSEADARLWLQQLEEKGRYAKDVWLG

SEQ ID NO: 789 - DNA, 3147 bp, synthetic construct
  misc_feature 1..3147: note = variant of P450 oxidase from Bacillus megaterium
  source 1..3147: mol_type = other DNA
atgacaattaaggaaatgcctcagcctaagacgtttggagaacttaaaaatttaccgttattaaacacagataaaccggttcaagctttgatgcgtattgcggatgaattaggagaaatctttaaattcgaggcgcctggtagcgtaacgcgctatttatcaagtcagcgtctaattaaagaagcatgcgatgaatcacgctttgataaaaacttaagtcaagcgcttaaatttgcacgtgattttgttggagacgggctgtctacaagctggacgcatgaaccgaattggaaaaaagcgcataatatcttagttccaagctttagtcagcatgcaatggggcgttatcatgcgatgatggtcgatatcgccgtgcagcttgttcaaaagtgggagcgtctaaatgcagatgagcatattgaagtatcggaagacatgacacgtttaggtcttgatacaattggtctttgcctgtttaactatcgctttaacagcttttaccgagatacgcctcatccatttattgtgagtgtggttcgtgcactggatgaagtaatgaacaagctgcagcgagcaaatccagacgacccagcttatgatgaaaacaagcgccagtgtcaagaagatatcaaggtgatgaacgactatgtagataaaattattgcagatcgcaaagcaaggggtgaacaaagtcatgatttattaacgcagatgctaaacggaaaagatccagaaacgggtgagccgcttgatgacgggaacattcgtcagcaaattattacattcttaattgcgggacaccaaacgacaagtggtcttttatcatttgcgctgtatttcttagtgaaaaatccacgtgtattacaaaaagtagcagaagaagcagcacgagttctagtagatcctgttccaagctacaaacaagtcaaacagcttaaatatgttggcatggtcttaaacgaagcgctgcgcttatggccagtagcgcctatgttttccctatatgcaaaagaagatacggtgcttggaggagaatatcctttaacgaaaggcgacgaagtaatggttctggtgcctcagcttcaccgtgataaaacaatttggggagacgatgtggaggagttccgtccagagcgttttgaaaatccaagtgcgattccgcagcatgcgtttaaaccgtttggaaacggtcagcgtgcgtgtatcggtcagcagttcgctcttcatagtgcaacgctggtacttggtatgatgctaaaacactttgactttgaagatcatacaaactacgagctcgttattaaagaatcgcggacgttaaaacctgaaggctttgtggtaaaagcaaaatcgaaaggcattccgcttggcggtattccttcacctagcactgaacagtctgctaaaaaagtacgcaaaaaggcagaaaacgctcataatacgccgctgcttgtgctatacggttcaaatgcgggaacagctgaaggaacggcgcgtgatttagcagatattgcaatgagcaaaggatttgcaccgcaggtcgcaacgcttgattcacacgccggtaatcttccgcgcgaaggagctgtattaattgtaacggcgtcttataacggtcatccgcctgataacgcaaagcaatttgtcgactggttagaccaagcgtctgcggatgaagtaaaaggcgttcgctactccgtatttggatgcggcgataaaaattgggcggggacgtatcaaaaagtgcctgcttttatcgatgaaacgcttgccgctaaaggggcagaaaacatcgctgaccgcggtgaagcagatgcaagcgacgactttgaaggcacatatgaagaatggcgtgatcatatgtggagtgacgtagcagcctactttggtctcgacattgaaaacagtgaagataataaatctactctttcacttcaatttgtcgacagcgcggcggatatgccgcttgcgaaaatgcacggtgcgttttcaacgaacgtcgtagcaagcaaagaacttcaacagcctggcagtgcacgaagcacgcgacatcttgaaattgaacttccaaaagaagcttcttatcaagaaggagatcatttaggtgttattcctcgctattatgaaggaatagtaaaccgtgtaacagcaaggttcggcctaagcgcatcacagctgatccgtctggaagcagaagaagaaaaattagctcatttgccactcgctaaaacagtatccgtagaagagcttctgcaatacgtggagcttcaagatcctgttacgcgcacgcagcttcgcgcaatggctgctaaaacggtctgcccgccgcataaagtagagcttgaagccttgcttggcaagcaagcctacaaagaacaagtgctggcaaaacgtttaacaatgcttgaactgcttgaaaaatacccggcgtgtgaaatgagtttcagcgaatttatcgcccttctgccaagcatacgcccgcgctattactcgatttcttcatcacctcgtgtcgatgaaaaacaagcaagcatcacggtcagcgttgtctcaggaccggcgtggagcggatatggagaatataaaggaattgcgtcgaactatcttgccgagctgcaagaaggagatacgattacgtgctttatttccacaccgcagtcagagtttacgctgccaaaagaccctgaaacgccgcttatcatggtcggaccgggaacaggcgtcgcgccgtttagaggctttgtgcaggcgcgcaaacagctaaaagaacaaggacagtcacttggagaagcacatttatacttcggctgccgttcacctcatgaagactatctgtatcaagaagagcttgaaaacgcccaaagcgaaggcatcattacgcttcataccgctttttctcgcatgccgaatcagccgaaaacatacgttcagcacgtaatggaacaagacggcaagaaattgattgaacttcttgatcaaggagcgcacttctatatttgcggagacggaagccaaatggcacctgccgttgaagcaacgcttatgaaaagctatgctgacgttcaccaagtgagtgaagcagacgctcgcttatggctgcagcagctagaagaaaaaggccgatacgcaaaagacgtgtggctgggg

SEQ ID NO: 790 - protein, 1049 aa, synthetic construct
  REGION 1..1049: note = variant of P450 oxidase from Bacillus megaterium
MTIKEMPQPKTFGELKNLPLLNTDKPVQALMRIADELGEIFKFEAPGSVTRYLSSQRLIKEACDESRFDKNLSQALKFARDFVGDGLSTSWTHEPNWKKAHNILVPSFSQHAMGRYHAMMVDIAVQLVQKWERLNADEHIEVSEDMTRLGLDTIGLCLFNYRFNSFYRDTPHPFIVSVVRALDEVMNKLQRANPDDPAYDENKRQCQEDIKVMNDYVDKIIADRKARGEQSHDLLTQMLNGKDPETGEPLDDGNIRQQIITFLIAGHQTTSGLLSFALYFLVKNPRVLQKVAEEAARVLVDPVPSYKQVKQLKYVGMVLNEALRLWPVAPMFSLYAKEDTVLGGEYPLTKGDEVMVLVPQLHRDKTIWGDDVEEFRPERFENPSAIPQHAFKPFGNGQRACIGQQFALHSATLVLGMMLKHFDFEDHTNYELVIKESRTLKPEGFVVKAKSKGIPLGGIPSPSTEQSAKKVRKKAENAHNTPLLVLYGSNAGTAEGTARDLADIAMSKGFAPQVATLDSHAGNLPREGAVLIVTASYNGHPPDNAKQFVDWLDQASADEVKGVRYSVFGCGDKNWAGTYQKVPAFIDETLAAKGAENIADRGEADASDDFEGTYEEWRDHMWSDVAAYFGLDIENSEDNKSTLSLQFVDSAADMPLAKMHGAFSTNVVASKELQQPGSARSTRHLEIELPKEASYQEGDHLGVIPRYYEGIVNRVTARFGLSASQLIRLEAEEEKLAHLPLAKTVSVEELLQYVELQDPVTRTQLRAMAAKTVCPPHKVELEALLGKQAYKEQVLAKRLTMLELLEKYPACEMSFSEFIALLPSIRPRYYSISSSPRVDEKQASITVSVVSGPAWSGYGEYKGIASNYLAELQEGDTITCFISTPQSEFTLPKDPETPLIMVGPGTGVAPFRGFVQARKQLKEQGQSLGEAHLYFGCRSPHEDYLYQEELENAQSEGIITLHTAFSRMPNQPKTYVQHVMEQDGKKLIELLDQGAHFYICGDGSQMAPAVEATLMKSYADVHQVSEADARLWLQQLEEKGRYAKDVWLG

SEQ ID NO: 791 - DNA, 3147 bp, synthetic construct
  misc_feature 1..3147: note = variant of P450 oxidase from Bacillus megaterium
  source 1..3147: mol_type = other DNA
atgacaattaaggaaatgcctcagcctaagacgtttggagaacttaaaaatttaccgttattaaacacagataaaccggttcaagctttgatgcgtattgcggatgaattaggagaaatctttaaattcgaggcgcctggtagcgtaacgcgctatttatcaagtcagcgtctaattaaagaagcatgcgatgaatcacgctttgataaaaacttaagtcaagcgcttaaatttgcacgtgattttgttggagacgggctgtctacaagctggacgcatgaaccgaattggaaaaaagcgcataatatcttagttccaagctttagtcagcatgcaatggggcgttatcatgcgatgatggtcgatatcgccgtgcagcttgttcaaaagtgggagcgtctaaatgcagatgagcatattgaagtatcggaagacatgacacgtttaacgcttgatacaattggtctttgcctgtttaactatcgctttaacagcttttaccgagatacgcctcatccatttattgtgagtgtggttcgtgcactgtctgaagtaatgaacaagctgcagcgagcaaatccagacgacccagcttatgatgaaaacaagcgccagtgtcaagaagatatcaaggtgatgaacgactatgtagataaaattattgcagatcgcaaagcaaggggtgaacaaagtcatgatttattaacgcagatgctaaacggaaaagatccagaaacgggtgagccgcttgatgacgggaacattcgtcagcaaattattacattcttaattgcgggacaccaaacgacaagtggtcttttatcatttgcgctgtatttcttagtgaaaaatccacgtgtattacaaaaagtagcagaagaagcagcacgagttctagtagatcctgttccaagctacaaacaagtcaaacagcttaaatatgttggcatggtcttaaacgaagcgctgcgcttatggccagtagcgcctatgttttccctatatgcaaaagaagatacggtgcttggaggagaatatcctttaacgaaaggcgacgaagtaatggttctggtgcctcagcttcaccgtgataaaacaatttggggagacgatgtggaggagttccgtccagagcgttttgaaaatccaagtgcgattccgcagcatgcgtttaaaccgtttggaaacggtcagcgtgcgtgtatcggtcagcagttcgctcttcatagtgcaacgctggtacttggtatgatgctaaaacactttgactttgaagatcatacaaactacgagctcgttattaaagaatcgcggacgttaaaacctgaaggctttgtggtaaaagcaaaatcgaaaggcattccgcttggcggtattccttcacctagcactgaacagtctgctaaaaaagtacgcaaaaaggcagaaaacgctcataatacgccgctgcttgtgctatacggttcaaatgcgggaacagctgaaggaacggcgcgtgatttagcagatattgcaatgagcaaaggatttgcaccgcaggtcgcaacgcttgattcacacgccggtaatcttccgcgcgaaggagctgtattaattgtaacggcgtcttataacggtcatccgcctgataacgcaaagcaatttgtcgactggttagaccaagcgtctgcggatgaagtaaaaggcgttcgctactccgtatttggatgcggcgataaaaattgggcggggacgtatcaaaaagtgcctgcttttatcgatgaaacgcttgccgctaaaggggcagaaaacatcgctgaccgcggtgaagcagatgcaagcgacgactttgaaggcacatatgaagaatggcgtgatcatatgtggagtgacgtagcagcctactttggtctcgacattgaaaacagtgaagataataaatctactctttcacttcaatttgtcgacagcgcggcggatatgccgcttgcgaaaatgcacggtgcgttttcaacgaacgtcgtagcaagcaaagaacttcaacagcctggcagtgcacgaagcacgcgacatcttgaaattgaacttccaaaagaagcttcttatcaagaaggagatcatttaggtgttattcctcgctattatgaaggaatagtaaaccgtgtaacagcaaggttcggcctaagcgcatcacagctgatccgtctggaagcagaagaagaaaaattagctcatttgccactcgctaaaacagtatccgtagaagagcttctgcaatacgtggagcttcaagatcctgttacgcgcacgcagcttcgcgcaatggctgctaaaacggtctgcccgccgcataaagtagagcttgaagccttgcttggcaagcaagcctacaaagaacaagtgctggcaaaacgtttaacaatgcttgaactgcttgaaaaatacccggcgtgtgaaatgagtttcagcgaatttatcgcccttctgccaagcatacgcccgcgctattactcgatttcttcatcacctcgtgtcgatgaaaaacaagcaagcatcacggtcagcgttgtctcaggaccggcgtggagcggatatggagaatataaaggaattgcgtcgaactatcttgccgagctgcaagaaggagatacgattacgtgctttatttccacaccgcagtcagagtttacgctgccaaaagaccctgaaacgccgcttatcatggtcggaccgggaacaggcgtcgcgccgtttagaggctttgtgcaggcgcgcaaacagctaaaagaacaaggacagtcacttggagaagcacatttatacttcggctgccgttcacctcatgaagactatctgtatcaagaagagcttgaaaacgcccaaagcgaaggcatcattacgcttcataccgctttttctcgcatgccgaatcagccgaaaacatacgttcagcacgtaatggaacaagacggcaagaaattgattgaacttcttgatcaaggagcgcacttctatatttgcggagacggaagccaaatggcacctgccgttgaagcaacgcttatgaaaagctatgctgacgttcaccaagtgagtgaagcagacgctcgcttatggctgcagcagctagaagaaaaaggccgatacgcaaaagacgtgtggctgggg

SEQ ID NO: 792 - protein, 1049 aa, synthetic construct
  REGION 1..1049: note = variant of P450 oxidase from Bacillus megaterium
MTIKEMPQPKTFGELKNLPLLNTDKPVQALMRIADELGEIFKFEAPGSVTRYLSSQRLIKEACDESRFDKNLSQALKFARDFVGDGLSTSWTHEPNWKKAHNILVPSFSQHAMGRYHAMMVDIAVQLVQKWERLNADEHIEVSEDMTRLTLDTIGLCLFNYRFNSFYRDTPHPFIVSVVRALSEVMNKLQRANPDDPAYDENKRQCQEDIKVMNDYVDKIIADRKARGEQSHDLLTQMLNGKDPETGEPLDDGNIRQQIITFLIAGHQTTSGLLSFALYFLVKNPRVLQKVAEEAARVLVDPVPSYKQVKQLKYVGMVLNEALRLWPVAPMFSLYAKEDTVLGGEYPLTKGDEVMVLVPQLHRDKTIWGDDVEEFRPERFENPSAIPQHAFKPFGNGQRACIGQQFALHSATLVLGMMLKHFDFEDHTNYELVIKESRTLKPEGFVVKAKSKGIPLGGIPSPSTEQSAKKVRKKAENAHNTPLLVLYGSNAGTAEGTARDLADIAMSKGFAPQVATLDSHAGNLPREGAVLIVTASYNGHPPDNAKQFVDWLDQASADEVKGVRYSVFGCGDKNWAGTYQKVPAFIDETLAAKGAENIADRGEADASDDFEGTYEEWRDHMWSDVAAYFGLDIENSEDNKSTLSLQFVDSAADMPLAKMHGAFSTNVVASKELQQPGSARSTRHLEIELPKEASYQEGDHLGVIPRYYEGIVNRVTARFGLSASQLIRLEAEEEKLAHLPLAKTVSVEELLQYVELQDPVTRTQLRAMAAKTVCPPHKVELEALLGKQAYKEQVLAKRLTMLELLEKYPACEMSFSEFIALLPSIRPRYYSISSSPRVDEKQASITVSVVSGPAWSGYGEYKGIASNYLAELQEGDTITCFISTPQSEFTLPKDPETPLIMVGPGTGVAPFRGFVQARKQLKEQGQSLGEAHLYFGCRSPHEDYLYQEELENAQSEGIITLHTAFSRMPNQPKTYVQHVMEQDGKKLIELLDQGAHFYICGDGSQMAPAVEATLMKSYADVHQVSEADARLWLQQLEEKGRYAKDVWLG

SEQ ID NO: 793 - DNA, 3147 bp, synthetic construct
  misc_feature 1..3147: note = variant of P450 oxidase from Bacillus megaterium
  source 1..3147: mol_type = other DNA
atgacaattaaggaaatgcctcagcctaagacgtttggagaacttaaaaatttaccgttattaaacacagataaaccggttcaagctttgatgcgtattgcggatgaattaggagaaatctttaaattcgaggcgcctggtagcgtaacgcgctatttatcaagtcagcgtctaattaaagaagcatgcgatgaatcacgctttgataaaaacttaagtcaaggtcttaaatttgcacgtgattttgttggagacgggctgtctacaagctggacgcatgaaccgaattggaaaaaagcgcataatatcttagttccaagctttagtcagcatgcaatggggcgttatcatgcgatgatggtcgatatcgccgtgcagcttgttcaaaagtgggagcgtctaaatgcagatgagcatattgaagtatcggaagacatgacacgtttaacgcttgatacaattggtctttgcctgtttaactatcgctttaacagcttttaccgagatacgcctcatccatttattgtgagtgtggttcgtgcactggatgaagtaatgaacaagctgcagcgagcaaatccagacgacccagcttatgatgaaaacaagcgccagtgtcaagaagatatcaaggtgatgaacgactatgtagataaaattattgcagatcgcaaagcaaggggtgaacaaagtcatgatttattaacgcagatgctaaacggaaaagatccagaaacgggtgagccgcttgatgacgggaacattcgtcagcaaattattacattcttaattgcgggacaccaaacgacaagtggtcttttatcatttgcgctgtatttcttagtgaaaaatccacgtgtattacaaaaagtagcagaagaagcagcacgagttctagtagatcctgttccaagctacaaacaagtcaaacagcttaaatatgttggcatggtcttaaacgaagcgctgcgcttatggccagtagcgcctatgttttccctatatgcaaaagaagatacggtgcttggaggagaatatcctttaacgaaaggcgacgaagtaatggttctggtgcctcagcttcaccgtgataaaacaatttggggagacgatgtggaggagttccgtccagagcgttttgaaaatccaagtgcgattccgcagcatgcgtttaaaccgtttggaaacggtcagcgtgcgtgtatcggtcagcagttcgctcttcatagtgcaacgctggtacttggtatgatgctaaaacactttgactttgaagatcatacaaactacgagctcgttattaaagaatcgcggacgttaaaacctgaaggctttgtggtaaaagcaaaatcgaaaggcattccgcttggcggtattccttcacctagcactgaacagtctgctaaaaaagtacgcaaaaaggcagaaaacgctcataatacgccgctgcttgtgctatacggttcaaatgcgggaacagctgaaggaacggcgcgtgatttagcagatattgcaatgagcaaaggatttgcaccgcaggtcgcaacgcttgattcacacgccggtaatcttccgcgcgaaggagctgtattaattgtaacggcgtcttataacggtcatccgcctgataacgcaaagcaatttgtcgactggttagaccaagcgtctgcggatgaagtaaaaggcgttcgctactccgtatttggatgcggcgataaaaattgggcggggacgtatcaaaaagtgcctgcttttatcgatgaaacgcttgccgctaaaggggcagaaaacatcgctgaccgcggtgaagcagatgcaagcgacgactttgaaggcacatatgaagaatggcgtgatcatatgtggagtgacgtagcagcctactttggtctcgacattgaaaacagtgaagataataaatctactctttcacttcaatttgtcgacagcgcggcggatatgccgcttgcgaaaatgcacggtgcgttttcaacgaacgtcgtagcaagcaaagaacttcaacagcctggcagtgcacgaagcacgcgacatcttgaaattgaacttccaaaagaagcttcttatcaagaaggagatcatttaggtgttattcctcgctattatgaaggaatagtaaaccgtgtaacagcaaggttcggcctaagcgcatcacagctgatccgtctggaagcagaagaagaaaaattagctcatttgccactcgctaaaacagtatccgtagaagagcttctgcaatacgtggagcttcaagatcctgttacgcgcacgcagcttcgcgcaatggctgctaaaacggtctgcccgccgcataaagtagagcttgaagccttgcttggcaagcaagcctacaaagaacaagtgctggcaaaacgtttaacaatgcttgaactgcttgaaaaatacccggcgtgtgaaatgagtttcagcgaatttatcgcccttctgccaagcatacgcccgcgctattactcgatttcttcatcacctcgtgtcgatgaaaaacaagcaagcatcacggtcagcgttgtctcaggaccggcgtggagcggatatggagaatataaaggaattgcgtcgaactatcttgccgagctgcaagaaggagatacgattacgtgctttatttccacaccgcagtcagagtttacgctgccaaaagaccctgaaacgccgcttatcatggtcggaccgggaacaggcgtcgcgccgtttagaggctttgtgcaggcgcgcaaacagctaaaagaacaaggacagtcacttggagaagcacatttatacttcggctgccgttcacctcatgaagactatctgtatcaagaagagcttgaaaacgcccaaagcgaaggcatcattacgcttcataccgctttttctcgcatgccgaatcagccgaaaacatacgttcagcacgtaatggaacaagacggcaagaaattgattgaacttcttgatcaaggagcgcacttctatatttgcggagacggaagccaaatggcacctgccgttgaagcaacgcttatgaaaagctatgctgacgttcaccaagtgagtgaagcagacgctcgcttatggctgcagcagctagaagaaaaaggccgatacgcaaaagacgtgtggctgggg

SEQ ID NO: 794 - protein, 1049 aa, synthetic construct
  REGION 1..1049: note = variant of P450 oxidase from Bacillus megaterium
MTIKEMPQPKTFGELKNLPLLNTDKPVQALMRIADELGEIFKFEAPGSVTRYLSSQRLIKEACDESRFDKNLSQGLKFARDFVGDGLSTSWTHEPNWKKAHNILVPSFSQHAMGRYHAMMVDIAVQLVQKWERLNADEHIEVSEDMTRLTLDTIGLCLFNYRFNSFYRDTPHPFIVSVVRALDEVMNKLQRANPDDPAYDENKRQCQEDIKVMNDYVDKIIADRKARGEQSHDLLTQMLNGKDPETGEPLDDGNIRQQIITFLIAGHQTTSGLLSFALYFLVKNPRVLQKVAEEAARVLVDPVPSYKQVKQLKYVGMVLNEALRLWPVAPMFSLYAKEDTVLGGEYPLTKGDEVMVLVPQLHRDKTIWGDDVEEFRPERFENPSAIPQHAFKPFGNGQRACIGQQFALHSATLVLGMMLKHFDFEDHTNYELVIKESRTLKPEGFVVKAKSKGIPLGGIPSPSTEQSAKKVRKKAENAHNTPLLVLYGSNAGTAEGTARDLADIAMSKGFAPQVATLDSHAGNLPREGAVLIVTASYNGHPPDNAKQFVDWLDQASADEVKGVRYSVFGCGDKNWAGTYQKVPAFIDETLAAKGAENIADRGEADASDDFEGTYEEWRDHMWSDVAAYFGLDIENSEDNKSTLSLQFVDSAADMPLAKMHGAFSTNVVASKELQQPGSARSTRHLEIELPKEASYQEGDHLGVIPRYYEGIVNRVTARFGLSASQLIRLEAEEEKLAHLPLAKTVSVEELLQYVELQDPVTRTQLRAMAAKTVCPPHKVELEALLGKQAYKEQVLAKRLTMLELLEKYPACEMSFSEFIALLPSIRPRYYSISSSPRVDEKQASITVSVVSGPAWSGYGEYKGIASNYLAELQEGDTITCFISTPQSEFTLPKDPETPLIMVGPGTGVAPFRGFVQARKQLKEQGQSLGEAHLYFGCRSPHEDYLYQEELENAQSEGIITLHTAFSRMPNQPKTYVQHVMEQDGKKLIELLDQGAHFYICGDGSQMAPAVEATLMKSYADVHQVSEADARLWLQQLEEKGRYAKDVWLG

SEQ ID NO: 795 - DNA, 3147 bp, synthetic construct
  misc_feature 1..3147: note = variant of P450 oxidase from Bacillus megaterium
  source 1..3147: mol_type = other DNA
atgacaattaaggaaatgcctcagcctaagacgtttggagaacttaaaaatttaccgttattaaacacagataaaccggttcaagctttgatgcgtattgcggatgaattaggagaaatctttaaattcgaggcgcctggtagcgtaacgcgctatttatcaagtcagcgtctaattaaagaagcatgcgatgaatcacgctttgataaaaacttaagtcaagggcttaaatttgcacgtgatttcgttggagacgggctggttacaagctggacgcatgaaccgaattggaaaaaagcgcataatatcttagttccaagctttagtcagcatgcaatggggcgttatcatgcgatgatggtcgatatcgccgtgcagcttgttcaaaagtgggagcgtctaaatgcagatgagcatattgaagtatcggaagacatgacacgtttaacgcttgatacaattggtctttgcctgtttaactatcgctttaacagcttttaccgagatacgcctcatccatttattgtgagtgtggttcgtgcactggatgaagtaatgaacaagctgcagcgagcaaatccagacgacccagcttatgatgaaaacaagcgccagtgtcaagaagatatcaaggtgatgaacgactatgtagataaaattattgcagatcgcaaagcaaggggtgaacaaagtcatgatttattaacgcagatgctaaacggaaaagatccagaaacgggtgagccgcttgatgacgggaacattcgtaatcaaattattacattcttaattgcgggacaccaaacgacaagtggtcttttatcatttgcgctgtatttcttagtgaaaaatccacgtgtattacaaaaagtagcagaagaagcagcacgagttctagtagatcctgttccaagctacaaacaagtcaaacagcttaaatatgttggcatggtcttaaacgaagcgctgcgcttatggccagtagcgcctatgttttccctatatgcaaaagaagatacggtgcttggaggagaatatcctttaacgaaaggcgacgaagtaatggttctggtgcctcagcttcaccgtgataaaacaatttggggagacgatgtggaggagttccgtccagagcgttttgaaaatccaagtgcgattccgcagcatgcgtttaaaccgtttggaaacggtcagcgtgcgtgtatcggtcagcagttcgctcttcatagtgcaacgctggtacttggtatgatgctaaaacactttgactttgaagatcatacaaactacgagctcgttattaaagaatcgcggacgttaaaacctgaaggctttgtggtaaaagcaaaatcgaaaggcattccgcttggcggtattccttcacctagcactgaacagtctgctaaaaaagtacgcaaaaaggcagaaaacgctcataatacgccgctgcttgtgctatacggttcaaatgcgggaacagctgaaggaacggcgcgtgatttagcagatattgcaatgagcaaaggatttgcaccgcaggtcgcaacgcttgattcacacgccggtaatcttccgcgcgaaggagctgtattaattgtaacggcgtcttataacggtcatccgcctgataacgcaaagcaatttgtcgactggttagaccaagcgtctgcggatgaagtaaaaggcgttcgctactccgtatttggatgcggcgataaaaattgggcggggacgtatcaaaaagtgcctgcttttatcgatgaaacgcttgccgctaaaggggcagaaaacatcgctgaccgcggtgaagcagatgcaagcgacgactttgaaggcgcgtatgaagaatggcgtgatcatatgtggagtgacgtagcagcctactttggtctcgacattgaaaacagtgaagataataaatctactctttcacttcaatttgtcgacagcgcggcggatatgccgcttgcgaaaatgcacggtgcgttttcaacgaacgtcgtagcaagcaaagaacttcaacagcctggcagtgcacgaagcacgcgacatcttgaaattgaacttccaaaagaagcttcttatcaagaaggagatcatttaggtgttattcctcgctattatgaaggaatagtaaaccgtgtaacagcaaggttcggcctaagcgcatcacagctgatccgtctggaagcagaagaagaaaaattagctcatttgccactcgctaaaacagtatccgtagaagagcttctgcaatacgtggagcttcaagatcctgttacgcgcacgcagcttcgcgcaatggctgctaaaacggtctgcccgccgcataaagtagagcttgaagccttgcttggcaagcaagcctacaaagaacaagtgctggcaaaacgtttaacaatgcttgaactgcttgaaaaatacccggcgtgtgaaatgagtttcagcgaatttatcgcccttctgccaagcatacgcccgcgctattactcgatttcttcatcacctcgtgtcgatgaaaaacaagcaagcatcacggtcagcgttgtctcaggaccggcgtggagcggatatggagaatataaaggaattgcgtcgaactatcttgccgagctgcaagaaggagatacgattacgtgctttatttccacaccgcagtcagagtttacgctgccaaaagaccctgaaacgccgcttatcatggtcggaccgggaacaggcgtcgcgccgtttagaggctttgtgcaggcgcgcaaacagctaaaagaacaaggacagtcacttggagaagcacatttatacttcggctgccgttcacctcatgaagactatctgtatcaagaagagcttgaaaacgcccaaagcgaaggcatcattacgcttcataccgctttttctcgcatgccgaatcagccgaaaacatacgttcagcacgtaatggaacaagacggcaagaaattgattgaacttcttgatcaaggagcgcacttctatatttgcggagacggaagccaaatggcacctgccgttgaagcaacgcttatgaaaagctatgctgacgttcaccaagtgagtgaagcagacgctcgcttatggctgcagcagctagaagaaaaaggccgatacgcaaaagacgtgtggctgggg

SEQ ID NO: 796 - protein, 1049 aa, synthetic construct
  REGION 1..1049: note = variant of P450 oxidase from Bacillus megaterium
MTIKEMPQPKTFGELKNLPLLNTDKPVQALMRIADELGEIFKFEAPGSVTRYLSSQRLIKEACDESRFDKNLSQGLKFARDFVGDGLVTSWTHEPNWKKAHNILVPSFSQHAMGRYHAMMVDIAVQLVQKWERLNADEHIEVSEDMTRLTLDTIGLCLFNYRFNSFYRDTPHPFIVSVVRALDEVMNKLQRANPDDPAYDENKRQCQEDIKVMNDYVDKIIADRKARGEQSHDLLTQMLNGKDPETGEPLDDGNIRNQIITFLIAGHQTTSGLLSFALYFLVKNPRVLQKVAEEAARVLVDPVPSYKQVKQLKYVGMVLNEALRLWPVAPMFSLYAKEDTVLGGEYPLTKGDEVMVLVPQLHRDKTIWGDDVEEFRPERFENPSAIPQHAFKPFGNGQRACIGQQFALHSATLVLGMMLKHFDFEDHTNYELVIKESRTLKPEGFVVKAKSKGIPLGGIPSPSTEQSAKKVRKKAENAHNTPLLVLYGSNAGTAEGTARDLADIAMSKGFAPQVATLDSHAGNLPREGAVLIVTASYNGHPPDNAKQFVDWLDQASADEVKGVRYSVFGCGDKNWAGTYQKVPAFIDETLAAKGAENIADRGEADASDDFEGAYEEWRDHMWSDVAAYFGLDIENSEDNKSTLSLQFVDSAADMPLAKMHGAFSTNVVASKELQQPGSARSTRHLEIELPKEASYQEGDHLGVIPRYYEGIVNRVTARFGLSASQLIRLEAEEEKLAHLPLAKTVSVEELLQYVELQDPVTRTQLRAMAAKTVCPPHKVELEALLGKQAYKEQVLAKRLTMLELLEKYPACEMSFSEFIALLPSIRPRYYSISSSPRVDEKQASITVSVVSGPAWSGYGEYKGIASNYLAELQEGDTITCFISTPQSEFTLPKDPETPLIMVGPGTGVAPFRGFVQARKQLKEQGQSLGEAHLYFGCRSPHEDYLYQEELENAQSEGIITLHTAFSRMPNQPKTYVQHVMEQDGKKLIELLDQGAHFYICGDGSQMAPAVEATLMKSYADVHQVSEADARLWLQQLEEKGRYAKDVWLG

SEQ ID NO: 797 - DNA, 3147 bp, synthetic construct
  misc_feature 1..3147: note = variant of P450 oxidase from Bacillus megaterium
  source 1..3147: mol_type = other DNA
atgacaattaaggaaatgcctcagcctaagacgtttggagaacttaaaaatttaccgttattaaacacagataaaccggttcaagctttgatgcgtattgcggatgaattaggagaaatctttaaattcgaggcgcctggtagcgtaacgcgctatttatcaagtcagcgtctaattaaagaagcatgcgatgaatcacgctttgataaaaacttaagtcaagcgcttaaatttgcacgtgattttgttggagacgggctggttacaagctggacgcatgaaccgaattggaaaaaagcgcataatatcttagttccaagctttagtcagcatgcaatggggcgttatcatgcgatgatggtcgatatcgccgtgcagcttgttcaaaagtgggagcgtctaaatgcagatgagcatattgaagtatcggaagacatgacacgtttaacgcttgatacaattggtctttgcctgtttaactatcgctttaacagcttttaccgagatacgcctcatccatttattgtgagtgtggttggtgcactggatgaagtaatgaacaagctgcagcgagcaaatccagacgacccagcttatgatgaaaacaagcgccagtgtcaagaagatatcaaggtgatgaacgactatgtagataaaattattgcagatcgcaaagcaaggggtgaacaaagtcatgatttattaacgcagatgctaaacggaaaagatccagaaacgggtgagccgcttgatgacgggaacattcgtcagcaaattattacattcttaattgcgggacaccaaacgaccagtggtcttttatcatttgcgctgtatttcttagtgaaaaatccacgtgtattacaaaaagtagcagaagaagcagcacgagttctagtagatcctgttccaagctacaaacaagtcaaacagcttaaatatgttggcatggtcttaaacgaagcgctgcgcttatggccagtagcgcctatgttttccctatatgcaaaagaagatacggtgcttggaggagaatatcctttaacgaaaggcgacgaagtaatggttctggtgcctcagcttcaccgtgataaaacaatttggggagacgatgtggaggagttccgtccagagcgttttgaaaatccaagtgcgattccgcagcatgcgtttaaaccgtttggaaacggtcagcgtgcgtgtatcggtcagcagttcgctcttcatagtgcaacgctggtacttggtatgatgctaaaacactttgactttgaagatcatacaaactacgagctcgttattaaagaaaaccggacgttaaaacctgaaggctttgtggtaaaagcaaaatcgaaaggcattccgcttggcggtattccttcacctagcactgaacagtctgctaaaaaagtacgcaaaaaggcagaaaacgctcataatacgccgctgcttgtgctatacggttcaaatgcgggaacagctgaaggaacggcgcgtgatttagcagatattgcaatgagcaaaggatttgcaccgcaggtcgcaacgcttgattcacacgccggtaatcttccgcgcgaaggagctgtattaattgtaacggcgtcttataacggtcatccgcctgataacgcaaagcaatttgtcgactggttagaccaagcgtctgcggatgaagtaaaaggcgttcgctactccgtatttggatgcggcgataaaaattgggcggggacgtatcaaaaagtgcctgcttttatcgatgaaacgcttgccgctaaaggggcagaaaacatcgctgaccgcggtgaagcagatgcaagcgacgactttgaaggcacatatgaagaatggcgtgatcatatgtggagtgacgtagcagcctactttggtctcgacattgaaaacagtgaagataataaatctactctttcacttcaatttgtcgacagcgcggcggatatgccgcttgcgaaaatgcacggtgcgttttcaacgaacgtcgtagcaagcaaagaacttcaacagcctggcagtgcacgaagcacgcgacatcttgaaattgaacttccaaaagaagcttcttatcaagaaggagatcatttaggtgttattcctcgctattatgaaggaatagtaaaccgtgtaacagcaaggttcggcctaagcgcatcacagctgatccgtctggaagcagaagaagaaaaattagctcatttgccactcgctaaaacagtatccgtagaagagcttctgcaatacgtggagcttcaagatcctgttacgcgcacgcagcttcgcgcaatggctgctaaaacggcctgcccgccgcataaagtagagcttgaagccttgcttggcaagcaagcctacaaagaacaagtggctgcaaaacgtttaacaatgcttgaactgcttgaaaaatacccggcgtgtgaaatgagtttcagcgaatttatcgcccttctgccaagcatacgcccgcgctattactcgatttcttcatcacctcgtgtcgatgaaaaacaagcaagcatcacggtcagcgttgtctcaggaccggcgtggagcggatatggagaatataaaggaattgcgtcgaactatcttgccgagctgcaagaaggagatacgattacgtgctttatttccacaccgcagtcagagtttacgctgccaaaagaccctgaaacgccgcttatcatggtcggaccgggaacaggcgtcgcgccgtttagaggctttgtgcaggcgcgcaaacagctaaaagagcaaggacagtcacttggagaagcacatttatacttcggctgccgttcacctcatgaagactatctgtatcaagaagagcttgaaaacgcccaaagcgaaggcatcattacgcttcataccgctttttctcgcatgccgaatcagccgaaaacatacgttcagcacgtaatggaacaagacggcaagaaattgattgaacttcttgatcaaggagcgcacttctatatttgcggagacggaagccaaatggcacctgccgttgaagcaacgcttatgaaaagctatgctgacgttcaccaagtgagtgaagcagacgctcgcttatggctgcagcagctagaagaaaaaggccgatacgcaaaagacgtgtggctgggg

SEQ ID NO: 798 - protein, 1049 aa, synthetic construct
  REGION 1..1049: note = variant of P450 oxidase from Bacillus megaterium
MTIKEMPQPKTFGELKNLPLLNTDKPVQALMRIADELGEIFKFEAPGSVTRYLSSQRLIKEACDESRFDKNLSQALKFARDFVGDGLVTSWTHEPNWKKAHNILVPSFSQHAMGRYHAMMVDIAVQLVQKWERLNADEHIEVSEDMTRLTLDTIGLCLFNYRFNSFYRDTPHPFIVSVVGALDEVMNKLQRANPDDPAYDENKRQCQEDIKVMNDYVDKIIADRKARGEQSHDLLTQMLNGKDPETGEPLDDGNIRQQIITFLIAGHQTTSGLLSFALYFLVKNPRVLQKVAEEAARVLVDPVPSYKQVKQLKYVGMVLNEALRLWPVAPMFSLYAKEDTVLGGEYPLTKGDEVMVLVPQLHRDKTIWGDDVEEFRPERFENPSAIPQHAFKPFGNGQRACIGQQFALHSATLVLGMMLKHFDFEDHTNYELVIKENRTLKPEGFVVKAKSKGIPLGGIPSPSTEQSAKKVRKKAENAHNTPLLVLYGSNAGTAEGTARDLADIAMSKGFAPQVATLDSHAGNLPREGAVLIVTASYNGHPPDNAKQFVDWLDQASADEVKGVRYSVFGCGDKNWAGTYQKVPAFIDETLAAKGAENIADRGEADASDDFEGTYEEWRDHMWSDVAAYFGLDIENSEDNKSTLSLQFVDSAADMPLAKMHGAFSTNVVASKELQQPGSARSTRHLEIELPKEASYQEGDHLGVIPRYYEGIVNRVTARFGLSASQLIRLEAEEEKLAHLPLAKTVSVEELLQYVELQDPVTRTQLRAMAAKTACPPHKVELEALLGKQAYKEQVAAKRLTMLELLEKYPACEMSFSEFIALLPSIRPRYYSISSSPRVDEKQASITVSVVSGPAWSGYGEYKGIASNYLAELQEGDTITCFISTPQSEFTLPKDPETPLIMVGPGTGVAPFRGFVQARKQLKEQGQSLGEAHLYFGCRSPHEDYLYQEELENAQSEGIITLHTAFSRMPNQPKTYVQHVMEQDGKKLIELLDQGAHFYICGDGSQMAPAVEATLMKSYADVHQVSEADARLWLQQLEEKGRYAKDVWLG

SEQ ID NO: 799 - DNA, 3147 bp, synthetic construct
  misc_feature 1..3147: note = variant of P450 oxidase from Bacillus megaterium
  source 1..3147: mol_type = other DNA
atgacaattaaggaaatgcctcagcctaagacgtttggagaacttaaaaatttaccgttattaaacacagataaaccggttcaagctttgatgcgtattgcggatgaattaggagaaatctttaaattcgaggcgcctggtagcgtaacgcgctatttatcaagtcagcgtctaattaaagaagcatgcgatgaatcacgctttgataaaaacttaagtcaagcgcttaaatttgcacgtgattttgttggagacgggctggttacaagctggacgcatgaaccgaattggaaaaaagcgcataatatcttagttccaagctttagtcagcatgcaatggggcgttatcatgcgatgatggtcgatatcgccgtgcagcttgttcaaaagtgggagcgtctaaatgcagatgagcatattgaagtatcggaagacatgacacgtttaacgcttgatacaattggtctttgcctgtttaactatcgctttaacagcttttaccgagatacgcctcatccatttattgtgagtgtggttcgtgcactggatgaagtaatgaacaagctgcagcgagcaaatccagacgacccagcttatgatgaaaacaagcgccagtgtcaagaagatatcaaggtgatgaacgactatgtagataaaattattgcagatcgcaaagcaaggggtgaacaaagtcatgatttattaacgcagatgctaaacggaaaagatccagaaacgggtgagccgcttgatgacgggaacattcgtcatcaaattattacattcttaattgcgggacaccaaacgacaagtggtcttttatcatttgcgctgtatttcttagtgaaaaatccacgtgtattacaaaaagtagcagaagaagcagcacgagttctagtagatcctgttccaagctacaaacaagtcaaacagcttaaatatgttggcatggtcttaaacgaagcgctgcgcttatggccagtagcgcctatgttttccctatatgcaaaagaagatacggtgcttggaggagaatatcctttaacgaaaggcgacgaagtaatggttctggtgcctcagcttcaccgtgataaaacaatttggggagacgatgtggaggagttccgtccagagcgttttgaaaatccaagtgcgattccgcagcatgcgtttaaaccgtttggaaacggtcagcgtgcgtgtatcggtcagcagttcgctcttcatagtgcaacgctggtacttggtatgatgctaaaacactttgactttgaagatcatacaaactacgagctcgttattaaagaatcgcggacgttaaaacctgaaggctttgtggtaaaagcaaaatcgaaaggcattccgcttggcggtattccttcacctagcactgaacagtctgctaaaaaagtacgcaaaaaggcagaaaacgctcataatacgccgctgcttgtgctatacggttcaaatgcgggaacagctgaaggaacggcgcgtgatttagcagatattgcaatgagcaaaggatttgcaccgcaggtcgcaacgcttgattcacacgccggtaatcttccgcgcgaaggagctgtattaattgtaacggcgtcttataacggtcatccgcctgataacgcaaagcaatttgtcgactggttagaccaagcgtctgcggatgaagtaaaaggcgttcgctactccgtatttggatgcggcgataaaaattgggcggggacgtatcaaaaagtgcctgcttttatcgatgaaacgcttgccgctaaaggggcagaaaacatcgctgaccgcggtgaagcagatgcaagcgacgactttgaaggcgcgtatgaagaatggcgtgatcatatgtggagtgacgtagcagcctactttggtctcgacattgaaaacagtgaagataataaatctactctttcacttcaatttgtcgacagcgcggcggatatgccgcttgcgaaaatgcacggtgcgttttcaacgaacgtcgtagcaagcaaagaacttcaacagcctggcagtgcacgaagcacgcgacatcttgaaattgaacttccaaaagaagcttcttatcaagaaggagatcatttaggtgttattcctcgctattatgaaggaatagtaaaccgtgtaacagcaaggttcggcctaagcgcatcacagctgatccgtctggaagcagaagaagaaaaattagctcatttgccactcgctaaaacagtatccgtagaagagcttctgcaatacgtggagcttcaagatcctgttacgcgcacgcagcttcgcgcaatggctgctaaaacggcctgcccgccgcataaagtagagcttgaagccttgcttggcaagcaagcctacaaagaacaagtggctgcaaaacgtttaacaatgcttgaactgcttgaaaaatacccggcgtgtgaaatgagtttcagcgaatttatcgcccttctgccaagcatacgcccgcgctattactcgatttcttcatcacctcgtgtcgatgaaaaacaagcaagcatcacggtcagcgttgtctcaggaccggcgtggagcggatatggagaatataaaggaattgcgtcgaactatcttgccgagctgcaagaaggagatacgattacgtgctttatttccacaccgcagtcagagtttacgctgccaaaagaccctgaaacgccgcttatcatggtcggaccgggaacaggcgtcgcgccgtttagaggctttgtgcaggcgcgcaaacagctaaaagagcaaggacagtcacttggagaagcacatttatacttcggctgccgttcacctcatgaagactatctgtatcaagaagagcttgaaaacgcccaaagcgaaggcatcattacgcttcataccgctttttctcgcatgccgaatcagccgaaaacatacgttcagcacgtaatggaacaagacggcaagaaattgattgaacttcttgatcaaggagcgcacttctatatttgcggagacggaagccaaatggcacctgccgttgaagcaacgcttatgaaaagctatgctgacgttcaccaagtgagtgaagcagacgctcgcttatggctgcagcagctagaagaaaaaggccgatacgcaaaagacgtgtggctgggg

SEQ ID NO: 800 - protein, 1049 aa, synthetic construct
  REGION 1..1049: note = variant of P450 oxidase from Bacillus megaterium
MTIKEMPQPKTFGELKNLPLLNTDKPVQALMRIADELGEIFKFEAPGSVTRYLSSQRLIKEACDESRFDKNLSQALKFARDFVGDGLVTSWTHEPNWKKAHNILVPSFSQHAMGRYHAMMVDIAVQLVQKWERLNADEHIEVSEDMTRLTLDTIGLCLFNYRFNSFYRDTPHPFIVSVVRALDEVMNKLQRANPDDPAYDENKRQCQEDIKVMNDYVDKIIADRKARGEQSHDLLTQMLNGKDPETGEPLDDGNIRHQIITFLIAGHQTTSGLLSFALYFLVKNPRVLQKVAEEAARVLVDPVPSYKQVKQLKYVGMVLNEALRLWPVAPMFSLYAKEDTVLGGEYPLTKGDEVMVLVPQLHRDKTIWGDDVEEFRPERFENPSAIPQHAFKPFGNGQRACIGQQFALHSATLVLGMMLKHFDFEDHTNYELVIKESRTLKPEGFVVKAKSKGIPLGGIPSPSTEQSAKKVRKKAENAHNTPLLVLYGSNAGTAEGTARDLADIAMSKGFAPQVATLDSHAGNLPREGAVLIVTASYNGHPPDNAKQFVDWLDQASADEVKGVRYSVFGCGDKNWAGTYQKVPAFIDETLAAKGAENIADRGEADASDDFEGAYEEWRDHMWSDVAAYFGLDIENSEDNKSTLSLQFVDSAADMPLAKMHGAFSTNVVASKELQQPGSARSTRHLEIELPKEASYQEGDHLGVIPRYYEGIVNRVTARFGLSASQLIRLEAEEEKLAHLPLAKTVSVEELLQYVELQDPVTRTQLRAMAAKTACPPHKVELEALLGKQAYKEQVAAKRLTMLELLEKYPACEMSFSEFIALLPSIRPRYYSISSSPRVDEKQASITVSVVSGPAWSGYGEYKGIASNYLAELQEGDTITCFISTPQSEFTLPKDPETPLIMVGPGTGVAPFRGFVQARKQLKEQGQSLGEAHLYFGCRSPHEDYLYQEELENAQSEGIITLHTAFSRMPNQPKTYVQHVMEQDGKKLIELLDQGAHFYICGDGSQMAPAVEATLMKSYADVHQVSEADARLWLQQLEEKGRYAKDVWLG

SEQ ID NO: 801 - DNA, 3147 bp, synthetic construct
  misc_feature 1..3147: note = variant of P450 oxidase from Bacillus megaterium
  source 1..3147: mol_type = other DNA
atgacaattaaggaaatgcctcagcctaagacgtttggagaacttaaaaatttaccgttattaaacacagataaaccggttcaagctttgatgcgtattgcggatgaattaggagaaatctttaaattcgaggcgcctggtagcgtaacgcgctatttatcaagtcagcgtctaattaaagaagcatgcgatgaatcacgctttgataaaaacttaagtcaagggcttaaatttgcacgtgatatcgttggagacgggctggttacaagctggacgcatgaaccgaattggaaaaaagcgcataatatcttagttccaagctttagtcagcatgcaatggggcgttatcatgcgatgatggtcgatatcgccgtgcagcttgttcaaaagtgggagcgtctaaatgcagatgagcatattgaagtatcggaagacatgacacgtttaacgcttgatacaattggtctttgcctgtttaactatcgctttaacagcttttaccgagatacgcctcatccatttattgtgagtgtggttcgtgcactggatgaagtaatgaacaagctgcagcgagcaaatccagacgacccagcttatgatgaaaacaagcgccagtgtcaagaagatatcaaggtgatgaacgactatgtagataaaattattgcagatcgcaaagcaaggggtgaacaaagtcatgatttattaacgcagatgctaaacggaaaagatccagaaacgggtgagccgcttgatgacgggaacattcgtgggcaaattattacattcttaattgcgggacacactacgaccagtggtcttttatcatttgcgctgtatttcttagtgaaaaatccacgtgtattacaaaaagtagcagaagaagcagcacgagttctagtagatcctgttccaagctacaaacaagtcaaacagcttaaatatgttggcatggtcttaaacgaagcgctgcgcttatggccagtagcgcctatgttttccctatatgcaaaagaagatacggtgcttggaggagaatatcctttaacgaaaggcgacgaagtaatggttctggtgcctcagcttcaccgtgataaaacaatttggggagacgatgtggaggagttccgtccagagcgttttgaaaatccaagtgcgattccgcagcatgcgtttaaaccgtttggaaacggtcagcgtgcgtgtatcggtcagcagttcgctcttcatagtgcaacgctggtacttggtatgatgctaaaacactttgactttgaagatcatacaaactacgagctcgttattaaagaatcgcggacgttaaaacctgaaggctttgtggtaaaagcaaaatcgaaaggcattccgcttggcggtattccttcacctagcactgaacagtctgctaaaaaagtacgcaaaaaggcagaaaacgctcataatacgccgctgcttgtgctatacggttcaaatgcgggaacagctgaaggaacggcgcgtgatttagcagatattgcaatgagcaaaggatttgcaccgcaggtcgcaacgcttgattcacacgccggtaatcttccgcgcgaaggagctgtattaattgtaacggcgtcttataacggtcatccgcctgataacgcaaagcaatttgtcgactggttagaccaagcgtctgcggatgaagtaaaaggcgttcgctactccgtatttggatgcggcgataaaaactgggcggggacgtatcaaaaagtgcctgcttttatcgatgaaacgcttgccgctaaaggggcagaaaacatcgctgaccgcggtgaagcagatgcaagcgacgactttgaaggcacgtatgaagaatggcgtgatcatatgtggagtgacgtagcagcctactttggtctcgacattgaaaacagtgaagataataaatctactctttcacttcaatttgtcgacagcgcggcggatatgccgcttgcgaaaatgcacggtgcgttttcaacgaacgtcgtagcaagcaaagaacttcaacagcctggcagtgcacgaagcacgcgacatcttgaaattgaacttccaaaagaagcttcttatcaagaaggagatcatttaggtgttattcctcgctattatgaaggaatagtaaaccgtgtaacagcaaggttcggcctaagcgcatcacagctgatccgtctggaagcagaagaagaaaaattagctcatttgccactcgctaaaacagtatccgtagaagagcttctgcaatacgtggagcttcaagatcctgttacgcgcacgcagcttcgcgcaatggctgctaaaacggtctgcccgccgcataaagtagagcttgaagccttgcttggcaagcaagcctacaaagaacaagtgctggcaaaacgtttaacaatgcttgaactgcttgaaaaatacccggcgtgtgaaatgagtttcagcgaatttatcgcccttctgccaagcatacgcccgcgctattactcgatttcttcatcacctcgtgtcgatgaaaaacaagcaagcatcacggtcagcgttgtctcaggaccggcgtggagcggatatggagaatataaaggaattgcgtcgaactatcttgccgagctgcaagaaggagatacgattacgtgctttatttccacaccgcagtcagagtttacgctgccaaaagaccctgaaacgccgcttatcatggtcggaccgggaacaggcgtcgcgccgtttagaggctttgtgcaggcgcgcaaacagctaaaagaacaaggacagtcacttggagaagcacatttatacttcggctgccgttcacctcatgaagactatctgtatcaagaagagcttgaaaacgcccaaagcgaaggcatcattacgcttcataccgctttttctcgcatgccgaatcagccgaaaacatacgttcagcacgtaatggaacaagacggcaagaaattgattgaacttcttgatcaaggagcgcacttctatatttgcggagacggaagccaaatggcacctgccgttgaagcaacgcttatgaaaagctatgctgacgttcaccaagtgagtgaagcagacgctcgcttatggctgcagcagctagaagaaaaaggccgatacgcaaaagacgtgtggctgggg

SEQ ID NO: 802 - protein, 1049 aa, synthetic construct
  REGION 1..1049: note = variant of P450 oxidase from Bacillus megaterium
MTIKEMPQPKTFGELKNLPLLNTDKPVQALMRIADELGEIFKFEAPGSVTRYLSSQRLIKEACDESRFDKNLSQGLKFARDIVGDGLVTSWTHEPNWKKAHNILVPSFSQHAMGRYHAMMVDIAVQLVQKWERLNADEHIEVSEDMTRLTLDTIGLCLFNYRFNSFYRDTPHPFIVSVVRALDEVMNKLQRANPDDPAYDENKRQCQEDIKVMNDYVDKIIADRKARGEQSHDLLTQMLNGKDPETGEPLDDGNIRGQIITFLIAGHTTTSGLLSFALYFLVKNPRVLQKVAEEAARVLVDPVPSYKQVKQLKYVGMVLNEALRLWPVAPMFSLYAKEDTVLGGEYPLTKGDEVMVLVPQLHRDKTIWGDDVEEFRPERFENPSAIPQHAFKPFGNGQRACIGQQFALHSATLVLGMMLKHFDFEDHTNYELVIKESRTLKPEGFVVKAKSKGIPLGGIPSPSTEQSAKKVRKKAENAHNTPLLVLYGSNAGTAEGTARDLADIAMSKGFAPQVATLDSHAGNLPREGAVLIVTASYNGHPPDNAKQFVDWLDQASADEVKGVRYSVFGCGDKNWAGTYQKVPAFIDETLAAKGAENIADRGEADASDDFEGTYEEWRDHMWSDVAAYFGLDIENSEDNKSTLSLQFVDSAADMPLAKMHGAFSTNVVASKELQQPGSARSTRHLEIELPKEASYQEGDHLGVIPRYYEGIVNRVTARFGLSASQLIRLEAEEEKLAHLPLAKTVSVEELLQYVELQDPVTRTQLRAMAAKTVCPPHKVELEALLGKQAYKEQVLAKRLTMLELLEKYPACEMSFSEFIALLPSIRPRYYSISSSPRVDEKQASITVSVVSGPAWSGYGEYKGIASNYLAELQEGDTITCFISTPQSEFTLPKDPETPLIMVGPGTGVAPFRGFVQARKQLKEQGQSLGEAHLYFGCRSPHEDYLYQEELENAQSEGIITLHTAFSRMPNQPKTYVQHVMEQDGKKLIELLDQGAHFYICGDGSQMAPAVEATLMKSYADVHQVSEADARLWLQQLEEKGRYAKDVWLG

SEQ ID NO: 803 - DNA, 3147 bp, synthetic construct
  misc_feature 1..3147: note = variant of P450 oxidase from Bacillus megaterium
  source 1..3147: mol_type = other DNA
atgacaattaaggaaatgcctcagcctaagacgtttggagaacttaaaaatttaccgttattaaacacagataaaccggttcaagctttgatgcgtattgcggatgaattaggagaaatctttaaattcgaggcgcctggtagcgtaacgcgctatttatcaagtcagcgtctaattaaagaagcatgcgatgaatcacgctttgataaaaacttaagtcaagggcttaaatttgcacgtgattttgttggagacgggctggttacaagctggacgcatgaaccgaattggaaaaaagcgcataatatcttagttccaagctttagtcagcatgcaatggggcgttatcatgcgatgatggtcgatatcgccgtgcagcttgttcaaaagtgggagcgtctaaatgcagatgagcatattgaagtatcggaagacatgacacgtttaacgcttgatacaattggtctttgcctgtttaactatcgctttaacagcttttaccgagatacgcctcatccatttattgtgagtgtggttcgtgcactggatgaagtaatgaacaagctgcagcgagcaaatccagacgacccagcttatgatgaaaacaagcgccagtgtcaagaagatatcaaggtgatgaacgactatgtagataaaattattgcagatcgcaaagcaaggggtgaacaaagtcatgatttattaacgcagatgctaaacggaaaagatccagaaacgggtgagccgcttgatgacgggaacattcgtaatcaaattattacattcttaattgcgggacaccaaacgacaagtggtcttttatcatttgcgctgtatttcttagtgaaaaatccacgtgtattacaaaaagtagcagaagaagcagcacgagttctagtagatcctgttccaagctacaaacaagtcaaacagcttaaatatgttggcatggtcttaaacgaagcgctgcgcttatggccagtagcgcctatgttttccctatatgcaaaagaagatacggtgcttggaggagaatatcctttaacgaaaggcgacgaagtaatggttctggtgcctcagcttcaccgtgataaaacaatttggggagacgatgtggaggagttccgtccagagcgttttgaaaatccaagtgcgattccgcagcatgcgtttaaaccgtttggaaacggtcagcgtgcgtgtatcggtcagcagttcgctcttcatagtgcaacgctggtacttggtatgatgctaaaacactttgactttgaagatcatacaaactacgagctcgttattaaagaatcgcggacgttaaaacctgaaggctttgtggtaaaagcaaaatcgaaaggcattccgcttggcggtattccttcacctagcactgaacagtctgctaaaaaagtacgcaaaaaggcagaaaacgctcataatacgccgctgcttgtgctatacggttcaaatgcgggaacagctgaaggaacggcgcgtgatttagcagatattgcaatgagcaaaggatttgcaccgcaggtcgcaacgcttgattcacacgccggtaatcttccgcgcgaaggagctgtattaattgtaacggcgtcttataacggtcatccgcctgataacgcaaagcaatttgtcgactggttagaccaagcgtctgcggatgaagtaaaaggcgttcgctactccgtatttggatgcggcgataaaaattgggcggggacgtatcaaaaagtgcctgcttttatcgatgaaacgcttgccgctaaaggggcagaaaacatcgctgaccgcggtgaagcagatgcaagcgacgactttgaaggcacatatgaagaatggcgtgatcatatgtggagtgacgtagcagcctactttggtctcgacattgaaaacagtgaagataattggtctactctttcacttcaatttgtcgacagcgcggcggatatgccgcttgcgaaaatgcacggtgcgttttcaacgaacgtcgtagcaagcaaagaacttcaacagcctggcagtgcacgaagcacgcgacatcttgaaattgaacttccaaaagaagcttcttatcaagaaggagatcatttaggtgttattcctcgctattatgaaggaatagtaaaccgtgtaacagcaaggttcggcctaagcgcatcacagctgatccgtctggaagcagaagaagaaaaattagctcatttgccactcgctaaaacagtatccgtagaagagcttctgcaatacgtggagcttcaagatcctgttacgcgcacgcagcttcgcgcaatggctgctaaaacggtctgcccgccgcataaagtagagcttgaagccttgcttggcaagcaagcctacaaagaacaagtgctggcaaaacgtttaacaatgcttgaactgcttgaaaaatacccggcgtgtgaaatgagtttcagcgaatttatcgcccttctgccaagcatacgcccgcgctattactcgatttcttcatcacctcgtgtcgatgaaaaacaagcaagcatcacggtcagcgttgtctcaggaccggcgtggagcggatatggagaatataaaggaattgcgtcgaactatcttgccgagctgcaagaaggagatacgattacgtgctttatttccacaccgcagtcagagtttacgctgccaaaagaccctgaaacgccgcttatcatggtcggaccgggaacaggcgtcgcgccgtttagaggctttgtgcaggcgcgcaaacagctaaaagaacaaggacagtcacttggagaagcacatttatacttcggctgccgttcacctcatgaagactatctgtatcaagaagagcttgaaaacgcccaaagcgaaggcatcattacgcttcataccgctttttctcgcatgccgaatcagccgaaaacatacgttcagcacgtaatggaacaagacggcaagaaattgattgaacttcttgatcaaggagcgcacttctatatttgcggagacggaagccaaatggcacctgccgttgaagcaacgcttatgaaaagctatgctgacgttcaccaagtgagtgaagcagacgctcgcttatggctgcagcagctagaagaaaaaggccgatacgcaaaagacgtgtggctgggg

SEQ ID NO: 804 - protein, 1049 aa, synthetic construct
  REGION 1..1049: note = variant of P450 oxidase from Bacillus megaterium
MTIKEMPQPKTFGELKNLPLLNTDKPVQALMRIADELGEIFKFEAPGSVTRYLSSQRLIKEACDESRFDKNLSQGLKFARDFVGDGLVTSWTHEPNWKKAHNILVPSFSQHAMGRYHAMMVDIAVQLVQKWERLNADEHIEVSEDMTRLTLDTIGLCLFNYRFNSFYRDTPHPFIVSVVRALDEVMNKLQRANPDDPAYDENKRQCQEDIKVMNDYVDKIIADRKARGEQSHDLLTQMLNGKDPETGEPLDDGNIRNQIITFLIAGHQTTSGLLSFALYFLVKNPRVLQKVAEEAARVLVDPVPSYKQVKQLKYVGMVLNEALRLWPVAPMFSLYAKEDTVLGGEYPLTKGDEVMVLVPQLHRDKTIWGDDVEEFRPERFENPSAIPQHAFKPFGNGQRACIGQQFALHSATLVLGMMLKHFDFEDHTNYELVIKESRTLKPEGFVVKAKSKGIPLGGIPSPSTEQSAKKVRKKAENAHNTPLLVLYGSNAGTAEGTARDLADIAMSKGFAPQVATLDSHAGNLPREGAVLIVTASYNGHPPDNAKQFVDWLDQASADEVKGVRYSVFGCGDKNWAGTYQKVPAFIDETLAAKGAENIADRGEADASDDFEGTYEEWRDHMWSDVAAYFGLDIENSEDNWSTLSLQFVDSAADMPLAKMHGAFSTNVVASKELQQPGSARSTRHLEIELPKEASYQEGDHLGVIPRYYEGIVNRVTARFGLSASQLIRLEAEEEKLAHLPLAKTVSVEELLQYVELQDPVTRTQLRAMAAKTVCPPHKVELEALLGKQAYKEQVLAKRLTMLELLEKYPACEMSFSEFIALLPSIRPRYYSISSSPRVDEKQASITVSVVSGPAWSGYGEYKGIASNYLAELQEGDTITCFISTPQSEFTLPKDPETPLIMVGPGTGVAPFRGFVQARKQLKEQGQSLGEAHLYFGCRSPHEDYLYQEELENAQSEGIITLHTAFSRMPNQPKTYVQHVMEQDGKKLIELLDQGAHFYICGDGSQMAPAVEATLMKSYADVHQVSEADARLWLQQLEEKGRYAKDVWLG

SEQ ID NO: 805 - DNA, 3147 bp, synthetic construct
  misc_feature 1..3147: note = variant of P450 oxidase from Bacillus megaterium
  source 1..3147: mol_type = other DNA
atgacaattaaggaaatgcctcagcctaagacgtttggagaacttaaaaatttaccgttattaaacacagataaaccggttcaagctttgatgcgtattgcggatgaattaggagaaatctttaaattcgaggcgcctggtagcgtaacgcgctatttatcaagtcagcgtctaattaaagaagcatgcgatgaatcacgctttgataaaaacttaagtcaagggcttaaatttgcacgtgattttgttggagacgggctggttacaagctggacgcatgaaccgaattggaaaaaagcgcataatatcttagttccaagctttagtcagcatgcaatggggcgttatcatgcgatgatggtcgatatcgccgtgcagcttgttcaaaagtgggagcgtctaaatgcagatgagcatattgaagtatcggaagacatgacacgtttaacgcttgatacaattggtctttgcctgtttaactatcgctttaacagcttttaccgagatacgcctcatccatttattgtgagtgtggttggtgcactgagtgaagtaatgaacaagctgcagcgagcaaatccagacgacccagcttatgatgaaaacaagcgccagtgtcaagaagatatcaaggtgatgaacgactatgtagataaaattattgcagatcgcaaagcaaggggtgaacaaagtcatgatttattaacgcagatgctaaacggaaaagatccagaaacgggtgagccgcttgatgacgggaacattcgtaatcaaattattacattcttaattgcgggacacactacgatcagtggtcttttatcatttgcgctgtatttcttagtgaaaaatccacgtgtattacaaaaagtagcagaagaagcagcacgagttctagtagatcctgttccaagctacaaacaagtcaaacagcttaaatatgttggcatggtcttaaacgaagcgctgcgcttatggccagtagcgcctatgttttccctatatgcaaaagaagatacggtgcttggaggagaatatcctttaacgaaaggcgacgaagtaatggttctggtgcctcagcttcaccgtgataaaacaatttggggagacgatgtggaggagttccgtccagagcgttttgaaaatccaagtcgcattccgcagcatgcgtttaaaccgtttggaaacggtcagcgtgcgtgtatcggtcagcagttcgctcttcatagtgcaacgctggtacttggtatgatgctaaaacactttgactttgaagatcatacaaactacgagctcgttattaaagaaaaccggacgttaaaacctgaaggctttgtggtaaaagcaaaatcgaaaggcattccgcttggcggtattccttcacctagcactgaacagtctgctaaaaaagtacgcaaaaaggcagaaaacgctcataatacgccgctgcttgtgctatacggttcaaatgcgggaacagctgaaggaacggcgcgtgatttagcagatattgcaatgagcaaaggatttgcaccgcaggtcgcaacgcttgattcacacgccggtaatcttccgcgcgaaggagctgtattaattgtaacggcgtcttataacggtcatccgcctgataacgcaaagcaatttgtcgactggttagaccaagcgggtgcggatgaagtaaaaggcgttcgctactccgtatttggatgcggcgataaaaactgggcggggacgtatcaaaaagtgcctgcttttatcgatgaaacgcttgccgctaaaggggcagaaaacatcgctgaccgcggtgaagcagatgcaagcgacgactttgaaggcgcgtatgaagaatggcgtgatcatatgtggagtgacgtagcagcctactttggtctcgacattgaaaacagtgaagataataaatctactctttcacttcaatttgtcgacagcgcgtcggatatgccgcttgcgaaaatgcacggtgcgttttcaacgaacgtcgtagcaagcaaagaacttcaacagcctggcagtgcacgaagcacgcgacatcttgaaattgaacttccaaaagaagcttcttatcaagaaggagatcatttaggtgttattcctcgctattatgaaggaatagtaaaccgtgtaacagcaaggttcggcctaagcgcatcacagctgatccgtctggaagcagaagaagaaaaattagctcatttgccactcgctaaaacagtatccgtagaagagcttctgcaatacgtggagcttcaagatcctgttacgcgcacgcagcttcgcgcaatggctgctaaaacggtctgcccgccgcataaagtagagcttgaagccttgcttggcaagcaagcctacaaagaacaagtgctggcaaaacgtttaacaatgcttgaactgcttgaaaaatacccggcgtgtgaaatgagtttcagcgaatttatcgcccttctgccaagcatacgcccgcgctattactcgatttcttcatcacctcgtgtcgatgaaaaacaagcaagcatcacggtcagcgttgtctcaggaccggcgtggagcggatatggagaatataaaggaattgcgtcgaactatcttgccgagctgcaagaaggagatacgattacgtgctttatttccacaccgcagtcagagtttacgctgccaaaagaccctgaaacgccgcttatcatggtcggaccgggaacaggcgtcgcgccgtttagaggctttgtgcaggcgcgcaaacagctaaaagcgcaaggacagtcacttggagaagcacatttatacttcggctgccgttcacctcatgaagactatctgtatcaagaagagcttgaaaacgcccaaagcgaaggcatcattacgcttcataccgctttttctcgcatgccgaatcagccgaaaacatacgttcagcacgtaatggaacaagacggcaagaaattgattgaacttcttgatcaaggagcgcacttctatatttgcggagacggaagccaaatggcacctgccgttgaagcaacgcttatgaaaagctatgctgacgttcaccaagtgagtgaagcagacgctcgcttatggctgcagcagctagaagaaaaaggccgatacgcaaaagacgtgtggctgggg

SEQ ID NO: 806 - protein, 1049 aa, synthetic construct
  REGION 1..1049: note = variant of P450 oxidase from Bacillus megaterium
MTIKEMPQPKTFGELKNLPLLNTDKPVQALMRIADELGEIFKFEAPGSVTRYLSSQRLIKEACDESRFDKNLSQGLKFARDFVGDGLVTSWTHEPNWKKAHNILVPSFSQHAMGRYHAMMVDIAVQLVQKWERLNADEHIEVSEDMTRLTLDTIGLCLFNYRFNSFYRDTPHPFIVSVVGALSEVMNKLQRANPDDPAYDENKRQCQEDIKVMNDYVDKIIADRKARGEQSHDLLTQMLNGKDPETGEPLDDGNIRNQIITFLIAGHTTISGLLSFALYFLVKNPRVLQKVAEEAARVLVDPVPSYKQVKQLKYVGMVLNEALRLWPVAPMFSLYAKEDTVLGGEYPLTKGDEVMVLVPQLHRDKTIWGDDVEEFRPERFENPSRIPQHAFKPFGNGQRACIGQQFALHSATLVLGMMLKHFDFEDHTNYELVIKENRTLKPEGFVVKAKSKGIPLGGIPSPSTEQSAKKVRKKAENAHNTPLLVLYGSNAGTAEGTARDLADIAMSKGFAPQVATLDSHAGNLPREGAVLIVTASYNGHPPDNAKQFVDWLDQAGADEVKGVRYSVFGCGDKNWAGTYQKVPAFIDETLAAKGAENIADRGEADASDDFEGAYEEWRDHMWSDVAAYFGLDIENSEDNKSTLSLQFVDSASDMPLAKMHGAFSTNVVASKELQQPGSARSTRHLEIELPKEASYQEGDHLGVIPRYYEGIVNRVTARFGLSASQLIRLEAEEEKLAHLPLAKTVSVEELLQYVELQDPVTRTQLRAMAAKTVCPPHKVELEALLGKQAYKEQVLAKRLTMLELLEKYPACEMSFSEFIALLPSIRPRYYSISSSPRVDEKQASITVSVVSGPAWSGYGEYKGIASNYLAELQEGDTITCFISTPQSEFTLPKDPETPLIMVGPGTGVAPFRGFVQARKQLKAQGQSLGEAHLYFGCRSPHEDYLYQEELENAQSEGIITLHTAFSRMPNQPKTYVQHVMEQDGKKLIELLDQGAHFYICGDGSQMAPAVEATLMKSYADVHQVSEADARLWLQQLEEKGRYAKDVWLG

SEQ ID NO: 807 - DNA, 3147 bp, synthetic construct
  misc_feature 1..3147: note = variant of P450 oxidase from Bacillus megaterium
  source 1..3147: mol_type = other DNA
atgacaattaaggaaatgcctcagcctaagacgtttggagaacttaaaaatttaccgttattaaacacagataaaccggttcaagctttgatgcgtattgcggatgaattaggagaaatctttaaattcgaggcgcctggtagcgtaacgcgctatttatcaagtcagcgtctaattaaagaagcatgcgatgaatcacgctttgataaaaacttaagtcaagggcttaaatttgcacgtgatatcgttggagacgggctggttacaagctggacgcatgaaccgaattggaaaaaagcgcataatatcttagttccaagctttagtcagcatgcaatggggcgttatcatgcgatgatggtcgatatcgccgtgcagcttgttcaaaagtgggagcgtctaaatgcagatgagcatattgaagtatcggaagacatgacacgtttaacgcttgatacaattggtctttgcctgtttaactatcgctttaacagcttttaccgagatacgcctcatccatttattgtgagtgtggttggtgcactggatgaagtaatgaacaagctgcagcgagcaaatccagacgacccagcttatgatgaaaacaagcgccagtgtcaagaagatatcaaggtgatgaacgactatgtagataaaattattgcagatcgcaaagcaaggggtgaacaaagtcatgatttattaacgcagatgctaaacggaaaagatccagaaacgggtgagccgcttgatgacgggaacattcgtgggcaaattattacattcttaattgcgggacaccaaacgacaagtggtcttttatcatttgcgctgtatttcttagtgaaaaatccacgtgtattacaaaaagtagcagaagaagcagcacgagttctagtagatcctgttccaagctacaaacaagtcaaacagcttaaatatgttggcatggtcttaaacgaagcgctgcgcttatggccagtagcgcctatgttttccctatatgcaaaagaagatacggtgcttggaggagaatatcctttaacgaaaggcgacgaagtaatggttctggtgcctcagcttcaccgtgataaaacaatttggggagacgatgtggaggagttccgtccagagcgttttgaaaatccaagtgcgattccgcagcatgcgtttaaaccgtttggaaacggtcagcgtgcgtgtatcggtcagcagttcgctcttcatagtgcaacgctggtacttggtatgatgctaaaacactttgactttgaagatcatacaaactacgagctcgttattaaagaaaaccggacgttaaaacctgaaggctttgtggtaaaagcaaaatcgaaaggcattccgcttggcggtattccttcacctagcactgaacagtctgctaaaaaagtacgcaaaaaggcagaaaacgctcataatacgccgctgcttgtgctatacggttcaaatgcgggaacagctgaaggaacggcgcgtgatttagcagatattgcaatgagcaaaggatttgcaccgcaggtcgcaacgcttgattcacacgccggtaatcttccgcgcgaaggagctgtattaattgtaacggcgtcttataacggtcatccgcctgataacgcaaagcaatttgtcgactggttagaccaagcgagtgcggatgaagtaaaaggcgttcgctactccgtatttggatgcggcgataaaaattgggcggggacgtatcaaaaagtgcctgcttttatcgatgaaacgcttgccgctaaaggggcagaaaacatcgctgaccgcggtgaagcagatgcaagcgacgactttgaaggcacgtatgaagaatggcgtgatcatatgtggagtgacgtagcagcctactttggtctcgacattgaaaacagtgaagataataaatctactctttcacttcaatttgtcgacagcgcggcggatatgccgcttgcgaaaatgcacggtgcgttttcaacgaacgtcgtagcaagcaaagaacttcaacagcctggcagtgcacgaagcacgcgacatcttgaaattgaacttccaaaagaagcttcttatcaagaaggagatcatttaggtgttattcctcgctattatgaaggaatagtaaaccgtgtaacagcaaggttcggcctaagcgcatcacagctgatccgtctggaagcagaagaagaaaaattagctcatttgccactcgctaaaacagtatccgtagaagagcttctgcaatacgtggagcttcaagatcctgttacgcgcacgcagcttcgcgcaatggctgctaaaacggtctgcccgccgcataaagtagagcttgaagccttgcttggcaagcaagcctacaaagaacaagtgctggcaaaacgtttaacaatgcttgaactgcttgaaaaatacccggcgtgtgaaatgagtttcagcgaatttatcgcccttctgccaagcatacgcccgcgctattactcgatttcttcatcacctcgtgtcgatgaaaaacaagcaagcatcacggtcagcgttgtctcaggaccggcgtggagcggatatggagaatataaaggaattgcgtcgaactatcttgccgagctgcaagaaggagatacgattacgtgctttatttccacaccgcagtcagagtttacgctgccaaaagaccctgaaacgccgcttatcatggtcggaccgggaacaggcgtcgcgccgtttagaggctttgtgcaggcgcgcaaacagctaaaagagcaaggacagtcacttggagaagcacatttatacttcggctgccgttcacctcatgaagactatctgtatcaagaagagcttgaaaacgcccaaagcgaaggcatcattacgcttcataccgctttttctcgcatgccgaatcagccgaaaacatacgttcagcacgtaatggaacaagacggcaagaaattgattgaacttcttgatcaaggagcgcacttctatatttgcggagacggaagccaaatggcacctgccgttgaagcaacgcttatgaaaagctatgctgacgttcaccaagtgagtgaagcagacgctcgcttatggctgcagcagctagaagaaaaaggccgatacgcaaaagacgtgtggctgggg

SEQ ID NO: 808 - protein, 1049 aa, synthetic construct
  REGION 1..1049: note = variant of P450 oxidase from Bacillus megaterium
MTIKEMPQPKTFGELKNLPLLNTDKPVQALMRIADELGEIFKFEAPGSVTRYLSSQRLIKEACDESRFDKNLSQGLKFARDIVGDGLVTSWTHEPNWKKAHNILVPSFSQHAMGRYHAMMVDIAVQLVQKWERLNADEHIEVSEDMTRLTLDTIGLCLFNYRFNSFYRDTPHPFIVSVVGALDEVMNKLQRANPDDPAYDENKRQCQEDIKVMNDYVDKIIADRKARGEQSHDLLTQMLNGKDPETGEPLDDGNIRGQIITFLIAGHQTTSGLLSFALYFLVKNPRVLQKVAEEAARVLVDPVPSYKQVKQLKYVGMVLNEALRLWPVAPMFSLYAKEDTVLGGEYPLTKGDEVMVLVPQLHRDKTIWGDDVEEFRPERFENPSAIPQHAFKPFGNGQRACIGQQFALHSATLVLGMMLKHFDFEDHTNYELVIKENRTLKPEGFVVKAKSKGIPLGGIPSPSTEQSAKKVRKKAENAHNTPLLVLYGSNAGTAEGTARDLADIAMSKGFAPQVATLDSHAGNLPREGAVLIVTASYNGHPPDNAKQFVDWLDQASADEVKGVRYSVFGCGDKNWAGTYQKVPAFIDETLAAKGAENIADRGEADASDDFEGTYEEWRDHMWSDVAAYFGLDIENSEDNKSTLSLQFVDSAADMPLAKMHGAFSTNVVASKELQQPGSARSTRHLEIELPKEASYQEGDHLGVIPRYYEGIVNRVTARFGLSASQLIRLEAEEEKLAHLPLAKTVSVEELLQYVELQDPVTRTQLRAMAAKTVCPPHKVELEALLGKQAYKEQVLAKRLTMLELLEKYPACEMSFSEFIALLPSIRPRYYSISSSPRVDEKQASITVSVVSGPAWSGYGEYKGIASNYLAELQEGDTITCFISTPQSEFTLPKDPETPLIMVGPGTGVAPFRGFVQARKQLKEQGQSLGEAHLYFGCRSPHEDYLYQEELENAQSEGIITLHTAFSRMPNQPKTYVQHVMEQDGKKLIELLDQGAHFYICGDGSQMAPAVEATLMKSYADVHQVSEADARLWLQQLEEKGRYAKDVWLG

SEQ ID NO: 809 - DNA, 3147 bp, synthetic construct
  misc_feature 1..3147: note = variant of P450 oxidase from Bacillus megaterium
  source 1..3147: mol_type = other DNA
atgacaattaaggaaatgcctcagcctaagacgtttggagaacttaaaaatttaccgttattaaacacagataaaccggttcaagctttgatgcgtattgcggatgaattaggagaaatctttaaattcgaggcgcctggtagcgtaacgcgctatttatcaagtcagcgtctaattaaagaagcatgcgatgaatcacgctttgataaaaacttaagtcaagggcttaaatttgcacgtgattttgttggagacgggctggttacaagctggacgcatgaaccgaattggaaaaaagcgcataatatcttagttccaagctttagtcagcatgcaatggggcgttatcatgcgatgatggtcgatatcgccgtgcagcttgttcaaaagtgggagcgtctaaatgcagatgagcatattgaagtatcggaagacatgacacgtttaacgcttgatacaattggtctttgcctgtttaactatcgctttaacagcttttaccgagatacgcctcatccatttattgtgagtgtggttcgtgcactggatgaagtaatgaacaagctgcagcgagcaaatccagacgacccagcttatgatgaaaacaagcgccagtgtcaagaagatatcaaggtgatgaacgactatgtagataaaattattgcagatcgcaaagcaaggggtgaacaaagtcatgatttattaacgcagatgctaaacggaaaagatccagaaacgggtgagccgcttgatgacgggaacattcgtcagcaaattattacattcttaattgcgggacaccaaacgaccagtggtcttttatcatttgcgctgtatttcttagtgaaaaatccacgtgtattacaaaaagtagcagaagaagcagcacgagttctagtagatcctgttccaagctacaaacaagtcaaacagcttaaatatgttggcatggtcttaaacgaagcgctgcgcttatggccagtagcgcctatgttttccctatatgcaaaagaagatacggtgcttggaggagaatatcctttaacgaaaggcgacgaagtaatggttctggtgcctcagcttcaccgtgataaaacaatttggggagacgatgtggaggagttccgtccagagcgttttgaaaatccaagtgcgattccgcagcatgcgtttaaaccgtttggaaacggtcagcgtgcgtgtatcggtcagcagttcgctcttcatagtgcaacgctggtacttggtatgatgctaaaacactttgactttgaagatcatacaaactacgagctcgttattaaagaaagccggacgttaaaacctgaaggctttgtggtaaaagcaaaatcgaaaggcattccgcttggcggtattccttcacctagcactgaacagtctgctaaaaaagtacgcaaaaaggcagaaaacgctcataatacgccgctgcttgtgctatacggttcaaatgcgggaacagctgaaggaacggcgcgtgatttagcagatattgcaatgagcaaaggatttgcaccgcaggtcgcaacgcttgattcacacgccggtaatcttccgcgcgaaggagctgtattaattgtaacggcgtcttataacggtcatccgcctgataacgcaaagcaatttgtcgactggttagaccaagcgtctgcggatgaagtaaaaggcgttcgctactccgtatttggatgcggcgataaaaactgggcggggacgtatcaaaaagtgcctgcttttatcgatgaaacgcttgccgctaaaggggcagaaaacatcgctgaccgcggtgaagcagatgcaagcgacgactttgaaggcacatatgaagaatggcgtgatcatatgtggagtgacgtagcagcctactttggtctcgacattgaaaacagtgaagataataaatctactctttcacttcaatttgtcgacagcgcggcggatatgccgcttgcgaaaatgcacggtgcgttttcaacgaacgtcgtagcaagcaaagaacttcaacagcctggcagtgcacgaagcacgcgacatcttgaaattgaacttccaaaagaagcttcttatcaagaaggagatcatttaggtgttattcctcgctattatgaaggaatagtaaaccgtgtaacagcaaggttcggcctaagcgcatcacagctgatccgtctggaagcagaagaagaaaaattagctcatttgccactcgctaaaacagtatccgtagaagagcttctgcaatacgtggagcttcaagatcctgttacgcgcacgcagcttcgcgcaatggctgctaaaacggtctgcccgccgcataaagtagagcttgaagccttgcttggcaagcaagcctacaaagaacaagtgctggcaaaacgtttaacaatgcttgaactgcttgaaaaatacccggcgtgtgaaatgagtttcagcgaatttatcgcccttctgccaagcatacgcccgcgctattactcgatttcttcatcacctcgtgtcgatgaaaaacaagcaagcatcacggtcagcgttgtctcaggaccggcgtggagcggatatggagaatataaaggaattgcgtcgaactatcttgccgagctgcaagaaggagatacgattacgtgctttatttccacaccgcagtcagagtttacgctgccaaaagaccctgaaacgccgcttatcatggtcggaccgggaacaggcgtcgcgccgtttagaggctttgtgcaggcgcgcaaacagctaaaagaacaaggacagtcacttggagaagcacatttatacttcggctgccgttcacctcatgaagactatctgtatcaagaagagcttgaaaacgcccaaagcgaaggcatcattacgcttcataccgctttttctcgcatgccgaatcagccgaaaacatacgttcagcacgtaatggaacaagacggcaagaaattgattgaacttcttgatcaaggagcgcacttctatatttgcggagacggaagccaaatggcacctgccgttgaagcaacgcttatgaaaagctatgctgacgttcaccaagtgagtgaagcagacgctcgcttatggctgcagcagctagaagaaaaaggccgatacgcaaaagacgtgtggctgggg

SEQ ID NO: 810 - protein, 1049 aa, synthetic construct
  REGION 1..1049: note = variant of P450 oxidase from Bacillus megaterium
MTIKEMPQPKTFGELKNLPLLNTDKPVQALMRIADELGEIFKFEAPGSVTRYLSSQRLIKEACDESRFDKNLSQGLKFARDFVGDGLVTSWTHEPNWKKAHNILVPSFSQHAMGRYHAMMVDIAVQLVQKWERLNADEHIEVSEDMTRLTLDTIGLCLFNYRFNSFYRDTPHPFIVSVVRALDEVMNKLQRANPDDPAYDENKRQCQEDIKVMNDYVDKIIADRKARGEQSHDLLTQMLNGKDPETGEPLDDGNIRQQIITFLIAGHQTTSGLLSFALYFLVKNPRVLQKVAEEAARVLVDPVPSYKQVKQLKYVGMVLNEALRLWPVAPMFSLYAKEDTVLGGEYPLTKGDEVMVLVPQLHRDKTIWGDDVEEFRPERFENPSAIPQHAFKPFGNGQRACIGQQFALHSATLVLGMMLKHFDFEDHTNYELVIKESRTLKPEGFVVKAKSKGIPLGGIPSPSTEQSAKKVRKKAENAHNTPLLVLYGSNAGTAEGTARDLADIAMSKGFAPQVATLDSHAGNLPREGAVLIVTASYNGHPPDNAKQFVDWLDQASADEVKGVRYSVFGCGDKNWAGTYQKVPAFIDETLAAKGAENIADRGEADASDDFEGTYEEWRDHMWSDVAAYFGLDIENSEDNKSTLSLQFVDSAADMPLAKMHGAFSTNVVASKELQQPGSARSTRHLEIELPKEASYQEGDHLGVIPRYYEGIVNRVTARFGLSASQLIRLEAEEEKLAHLPLAKTVSVEELLQYVELQDPVTRTQLRAMAAKTVCPPHKVELEALLGKQAYKEQVLAKRLTMLELLEKYPACEMSFSEFIALLPSIRPRYYSISSSPRVDEKQASITVSVVSGPAWSGYGEYKGIASNYLAELQEGDTITCFISTPQSEFTLPKDPETPLIMVGPGTGVAPFRGFVQARKQLKEQGQSLGEAHLYFGCRSPHEDYLYQEELENAQSEGIITLHTAFSRMPNQPKTYVQHVMEQDGKKLIELLDQGAHFYICGDGSQMAPAVEATLMKSYADVHQVSEADARLWLQQLEEKGRYAKDVWLG

SEQ ID NO: 811 - DNA, 3147 bp, synthetic construct
  misc_feature 1..3147: note = variant of P450 oxidase from Bacillus megaterium
  source 1..3147: mol_type = other DNA
atgacaattaaggaaatgcctcagcctaagacgtttggagaacttaaaaatttaccgttattaaacacagataaaccggttcaagctttgatgcgtattgcggatgaattaggagaaatctttaaattcgaggcgcctggtagcgtaacgcgctatttatcaagtcagcgtctaattaaagaagcatgcgatgaatcacgctttgataaaaacttaagtcaagggcttaaatttgcacgtgatatcgttggagacgggctggttacaagctggacgcatgaaccgaattggaaaaaagcgcataatatcttagttccaagctttagtcagcatgcaatggggcgttatcatgcgatgatggtcgatatcgccgtgcagcttgttcaaaagtgggagcgtctaaatgcagatgagcatattgaagtatcggaagacatgacacgtttaacgcttgatacaattggtctttgcctgtttaactatcgctttaacagcttttaccgagatacgcctcatccatttattgtgagtgtggttcgtgcactggatgaagtaatgaacaagctgcagcgagcaaatccagacgacccagcttatgatgaaaacaagcgccagtgtcaagaagatatcaaggtgatgaacgactatgtagataaaattattgcagatcgcaaagcaaggggtgaacaaagtcatgatttattaacgcagatgctaaacggaaaagatccagaaacgggtgagccgcttgatgacgggaacattcgtaatcaaattattacattcttaattgcgggacaccaaacgacaagtggtcttttatcatttgcgctgtatttcttagtgaaaaatccacgtgtattacaaaaagtagcagaagaagcagcacgagttctagtagatcctgttccaagctacaaacaagtcaaacagcttaaatatgttggcatggtcttaaacgaagcgctgcgcttatggccagtagcgcctatgttttccctatatgcaaaagaagatacggtgcttggaggagaatatcctttaacgaaaggcgacgaagtaatggttctggtgcctcagcttcaccgtgataaaacaatttggggagacgatgtggaggagttccgtccagagcgttttgaaaatccaagtgcgattccgcagcatgcgtttaaaccgtttggaaacggtcagcgtgcgtgtatcggtcagcagttcgctcttcatagtgcaacgctggtacttggtatgatgctaaaacactttgactttgaagatcatacaaactacgagctcgttattaaagaatcgcggacgttaaaacctgaaggctttgtggtaaaagcaaaatcgaaaggcattccgcttggcggtattccttcacctagcactgaacagtctgctaaaaaagtacgcaaaaaggcagaaaacgctcataatacgccgctgcttgtgctatacggttcaaatgcgggaacagctgaaggaacggcgcgtgatttagcagatattgcaatgagcaaaggatttgcaccgcaggtcgcaacgcttgattcacacgccggtaatcttccgcgcgaaggagctgtattaattgtaacggcgtcttataacggtcatccgcctgataacgcaaagcaatttgtcgactggttagaccaagcgggtgcggatgaagtaaaaggcgttcgctactccgtatttggatgcggcgataaaaattgggcggggacgtatcaaaaagtgcctgcttttatcgatgaaacgcttgccgctaaaggggcagaaaacatcgctgaccgcggtgaagcagatgcaagcgacgactttgaaggcacgtatgaagaatggcgtgatcatatgtggagtgacgtagcagcctactttggtctcgacattgaaaacagtgaagataatgggtctactctttcacttcaatttgtcgacagcgcggcggatatgccgcttgcgaaaatgcacggtgcgttttcaacgaacgtcgtagcaagcaaagaacttcaacagcctggcagtgcacgaagcacgcgacatcttgaaattgaacttccaaaagaagcttcttatcaagaaggagatcatttaggtgttattcctcgctattatgaaggaatagtaaaccgtgtaacagcaaggttcggcctaagcgcatcacagctgatccgtctggaagcagaagaagaaaaattagctcatttgccactcgctaaaacagtatccgtagaagagcttctgcaatacgtggagcttcaagatcctgttacgcgcacgcagcttcgcgcaatggctgctaaaacggtctgcccgccgcataaagtagagcttgaagccttgcttggcaagcaagcctacaaagaacaagtgctggcaaaacgtttaacaatgcttgaactgcttgaaaaatacccggcgtgtgaaatgagtttcagcgaatttatcgcccttctgccaagcatacgcccgcgctattactcgatttcttcatcacctcgtgtcgatgaaaaacaagcaagcatcacggtcagcgttgtctcaggaccggcgtggagcggatatggagaatataaaggaattgcgtcgaactatcttgccgagctgcaagaaggagatacgattacgtgctttatttccacaccgcagtcagagtttacgctgccaaaagaccctgaaacgccgcttatcatggtcggaccgggaacaggcgtcgcgccgtttagaggctttgtgcaggcgcgcaaacagctaaaagaacaaggacagtcacttggagaagcacatttatacttcggctgccgttcacctcatgaagactatctgtatcaagaagagcttgaaaacgcccaaagcgaaggcatcattacgcttcataccgctttttctcgcatgccgaatcagccgaaaacatacgttcagcacgtaatggaacaagacggcaagaaattgattgaacttcttgatcaaggagcgcacttctatatttgcggagacggaagccaaatggcacctgccgttgaagcaacgcttatgaaaagctatgctgacgttcaccaagtgagtgaagcagacgctcgcttatggctgcagcagctagaagaaaaaggccgatacgcaaaagacgtgtggctgggg

SEQ ID NO: 812 - protein, 1049 aa, synthetic construct
  REGION 1..1049: note = variant of P450 oxidase from Bacillus megaterium
MTIKEMPQPKTFGELKNLPLLNTDKPVQALMRIADELGEIFKFEAPGSVTRYLSSQRLIKEACDESRFDKNLSQGLKFARDIVGDGLVTSWTHEPNWKKAHNILVPSFSQHAMGRYHAMMVDIAVQLVQKWERLNADEHIEVSEDMTRLTLDTIGLCLFNYRFNSFYRDTPHPFIVSVVRALDEVMNKLQRANPDDPAYDENKRQCQEDIKVMNDYVDKIIADRKARGEQSHDLLTQMLNGKDPETGEPLDDGNIRNQIITFLIAGHQTTSGLLSFALYFLVKNPRVLQKVAEEAARVLVDPVPSYKQVKQLKYVGMVLNEALRLWPVAPMFSLYAKEDTVLGGEYPLTKGDEVMVLVPQLHRDKTIWGDDVEEFRPERFENPSAIPQHAFKPFGNGQRACIGQQFALHSATLVLGMMLKHFDFEDHTNYELVIKESRTLKPEGFVVKAKSKGIPLGGIPSPSTEQSAKKVRKKAENAHNTPLLVLYGSNAGTAEGTARDLADIAMSKGFAPQVATLDSHAGNLPREGAVLIVTASYNGHPPDNAKQFVDWLDQAGADEVKGVRYSVFGCGDKNWAGTYQKVPAFIDETLAAKGAENIADRGEADASDDFEGTYEEWRDHMWSDVAAYFGLDIENSEDNGSTLSLQFVDSAADMPLAKMHGAFSTNVVASKELQQPGSARSTRHLEIELPKEASYQEGDHLGVIPRYYEGIVNRVTARFGLSASQLIRLEAEEEKLAHLPLAKTVSVEELLQYVELQDPVTRTQLRAMAAKTVCPPHKVELEALLGKQAYKEQVLAKRLTMLELLEKYPACEMSFSEFIALLPSIRPRYYSISSSPRVDEKQASITVSVVSGPAWSGYGEYKGIASNYLAELQEGDTITCFISTPQSEFTLPKDPETPLIMVGPGTGVAPFRGFVQARKQLKEQGQSLGEAHLYFGCRSPHEDYLYQEELENAQSEGIITLHTAFSRMPNQPKTYVQHVMEQDGKKLIELLDQGAHFYICGDGSQMAPAVEATLMKSYADVHQVSEADARLWLQQLEEKGRYAKDVWLG

SEQ ID NO: 813 - DNA, 3147 bp, synthetic construct
  misc_feature 1..3147: note = variant of P450 oxidase from Bacillus megaterium
  source 1..3147: mol_type = other DNA
atgacaattaaggaaatgcctcagcctaagacgtttggagaacttaaaaatttaccgttattaaacacagataaaccggttcaagctttgatgcgtattgcggatgaattaggagaaatctttaaattcgaggcgcctggtagcgtaacgcgctatttatcaagtcagcgtctaattaaagaagcatgcgatgaatcacgctttgataaaaacttaagtcaagggcttaaatttgcacgtgattttgttggagacgggctggttacaagctggacgcatgaaccgaattggaaaaaagcgcataatatcttagttccaagctttagtcagcatgcaatggggcgttatcatgcgatgatggtcgatatcgccgtgcagcttgttcaaaagtgggagcgtctaaatgcagatgagcatattgaagtatcggaagacatgacacgtttaacgcttgatacaattggtctttgcctgtttaactatcgctttaacagcttttaccgagatacgcctcatccatttattgtgagtgtggttcgtgcactggatgaagtaatgaacaagctgcagcgagcaaatccagacgacccagcttatgatgaaaacaagcgccagtgtcaagaagatatcaaggtgatgaacgactatgtagataaaattattgcagatcgcaaagcaaggggtgaacaaagtcatgatttattaacgcagatgctaaacggaaaagatccagaaacgggtgagccgcttgatgacgggaacattcgtcaacaaattattacattcttaattgcgggacaccaaacgacaagtggtcttttatcatttgcgctgtatttcttagtgaaaaatccacgtgtattacaaaaagtagcagaagaagcagcacgagttctagtagatcctgttccaagctacaaacaagtcaaacagcttaaatatgttggcatggtcttaaacgaagcgctgcgcttatggccagtagcgcctatgttttccctatatgcaaaagaagatacggtgcttggaggagaatatcctttaacgaaaggcgacgaagtaatggttctggtgcctcagcttcaccgtgataaaacaatttggggagacgatgtggaggagttccgtccagagcgttttgaaaatccaagtgcgattccgcagcatgcgtttaaaccgtttggaaacggtcagcgtgcgtgtatcggtcagcagttcgctcttcatagtgcaacgctggtacttggtatgatgctaaaacactttgactttgaagatcatacaaactacgagctcgttattaaagaatcgcggacgttaaaacctgaaggctttgtggtaaaagcaaaatcgaaaggcattccgcttggcggtattccttcacctagcactgaacagtctgctaaaaaagtacgcaaaaaggcagaaaacgctcataatacgccgctgcttgtgctatacggttcaaatgcgggaacagctgaaggaacggcgcgtgatttagcagatattgcaatgagcaaaggatttgcaccgcaggtcgcaacgcttgattcacacgccggtaatcttccgcgcgaaggagctgtattaattgtaacggcgtcttataacggtcatccgcctgataacgcaaagcaatttgtcgactggttagaccaagcgggtgcggatgaagtaaaaggcgttcgctactccgtatttggatgcggcgataaaaactgggcggggacgtatcaaaaagtgcctgcttttatcgatgaaacgcttgccgctaaaggggcagaaaacatcgctgaccgcggtgaagcagatgcaagcgacgactttgaaggcacatatgaagaatggcgtgatcatatgtggagtgacgtagcagcctactttggtctcgacattgaaaacagtgaagataataaatctactctttcactgcaatttgtcgacagcgcggcggatatgccgcttgcgaaaatgcacggtgcgttttcaacgaacgtcgtagcaagcaaagaacttcaacagcctggcagtgcacgaagcacgcgacatcttgaaattgaacttccaaaagaagcttcttatcaagaaggagatcatttaggtgttattcctcgctattatgaaggaatagtaaaccgtgtaacagcaaggttcggcctaagcgcatcacagctgatccgtctggaagcagaagaagaaaaattagctcatttgccactcgctaaaacagtatccgtagaagagcttctgcaatacgtggagcttcaagatcctgttacgcgcacgcagcttcgcgcaatggctgctaaaacggcctgcccgccgcataaagtagagcttgaagccttgcttggcaagcaagcctacaaagaacaagtgctggcaaaacgtttaacaatgcttgaactgcttgaaaaatacccggcgtgtgaaatgagtttcagcgaatttatcgcccttctgccaagcatacgcccgcgctattactcgatttcttcatcacctcgtgtcgatgaaaaacaagcaagcatcacggtcagcgttgtctcaggaccggcgtggagcggatatggagaatataaaggaattgcgtcgaactatcttgccgagctgcaagaaggagatacgattacgtgctttatttccacaccgcagtcagagtttacgctgccaaaagaccctgaaacgccgcttatcatggtcggaccgggaacaggcgtcgcgccgtttagaggctttgtgcaggcgcgcaaacagctaaaagagcaaggacagtcacttggagaagcacatttatacttcggctgccgttcacctcatgaagactatctgtatcaagaagagcttgaaaacgcccaaagcgaaggcatcattacgcttcataccgctttttctcgcatgccgaatcagccgaaaacatacgttcagcacgtaatggaacaagacggcaagaaattgattgaacttcttgatcaaggagcgcacttctatatttgcggagacggaagccaaatggcacctgccgttgaagcaacgcttatgaaaagctatgctgacgttcaccaagtgagtgaagcagacgctcgcttatggctgcagcagctagaagaaaaaggccgatacgcaaaagacgtgtggctgggg

SEQ ID NO: 814 - protein, 1049 aa, synthetic construct
  REGION 1..1049: note = variant of P450 oxidase from Bacillus megaterium
MTIKEMPQPKTFGELKNLPLLNTDKPVQALMRIADELGEIFKFEAPGSVTRYLSSQRLIKEACDESRFDKNLSQGLKFARDFVGDGLVTSWTHEPNWKKAHNILVPSFSQHAMGRYHAMMVDIAVQLVQKWERLNADEHIEVSEDMTRLTLDTIGLCLFNYRFNSFYRDTPHPFIVSVVRALDEVMNKLQRANPDDPAYDENKRQCQEDIKVMNDYVDKIIADRKARGEQSHDLLTQMLNGKDPETGEPLDDGNIRQQIITFLIAGHQTTSGLLSFALYFLVKNPRVLQKVAEEAARVLVDPVPSYKQVKQLKYVGMVLNEALRLWPVAPMFSLYAKEDTVLGGEYPLTKGDEVMVLVPQLHRDKTIWGDDVEEFRPERFENPSAIPQHAFKPFGNGQRACIGQQFALHSATLVLGMMLKHFDFEDHTNYELVIKESRTLKPEGFVVKAKSKGIPLGGIPSPSTEQSAKKVRKKAENAHNTPLLVLYGSNAGTAEGTARDLADIAMSKGFAPQVATLDSHAGNLPREGAVLIVTASYNGHPPDNAKQFVDWLDQAGADEVKGVRYSVFGCGDKNWAGTYQKVPAFIDETLAAKGAENIADRGEADASDDFEGTYEEWRDHMWSDVAAYFGLDIENSEDNKSTLSLQFVDSAADMPLAKMHGAFSTNVVASKELQQPGSARSTRHLEIELPKEASYQEGDHLGVIPRYYEGIVNRVTARFGLSASQLIRLEAEEEKLAHLPLAKTVSVEELLQYVELQDPVTRTQLRAMAAKTACPPHKVELEALLGKQAYKEQVLAKRLTMLELLEKYPACEMSFSEFIALLPSIRPRYYSISSSPRVDEKQASITVSVVSGPAWSGYGEYKGIASNYLAELQEGDTITCFISTPQSEFTLPKDPETPLIMVGPGTGVAPFRGFVQARKQLKEQGQSLGEAHLYFGCRSPHEDYLYQEELENAQSEGIITLHTAFSRMPNQPKTYVQHVMEQDGKKLIELLDQGAHFYICGDGSQMAPAVEATLMKSYADVHQVSEADARLWLQQLEEKGRYAKDVWLG

SEQ ID NO: 815 - DNA, 3147 bp, synthetic construct
  misc_feature 1..3147: note = variant of P450 oxidase from Bacillus megaterium
  source 1..3147: mol_type = other DNA
atgacaattaaggaaatgcctcagcctaagacgtttggagaacttaaaaatttaccgttattaaacacagataaaccggttcaagctttgatgcgtattgcggatgaattaggagaaatctttaaattcgaggcgcctggtagcgtaacgcgctatttatcaagtcagcgtctaattaaagaagcatgcgatgaatcacgctttgataaaaacttaagtcaagggcttaaatttgcacgtgatttcgttggagacgggctggttacaagctggacgcatgaaccgaattggaaaaaagcgcataatatcttagttccaagctttagtcagcatgcaatggggcgttatcatgcgatgatggtcgatatcgccgtgcagcttgttcaaaagtgggagcgtctaaatgcagatgagcatattgaagtatcggaagacatgacacgtttaacgcttgatacaattggtctttgcctgtttaactatcgctttaacagcttttaccgagatacgcctcatccatttattgtgagtgtggttggtgcactggatgaagtaatgaacaagctgcagcgagcaaatccagacgacccagcttatgatgaaaacaagcgccagtgtcaagaagatatcaaggtgatgaacgactatgtagataaaattattgcagatcgcaaagcaaggggtgaacaaagtcatgatttattaacgcagatgctaaacggaaaagatccagaaacgggtgagccgcttgatgacgggaacattcgtaatcaaattattacattcttaattgcgggacacactacgatcagtggtcttttatcatttgcgctgtatttcttagtgaaaaatccacgtgtattacaaaaagtagcagaagaagcagcacgagttctagtagatcctgttccaagctacaaacaagtcaaacagcttaaatatgttggcatggtcttaaacgaagcgctgcgcttatggccagtagcgcctatgttttccctatatgcaaaagaagatacggtgcttggaggagaatatcctttaacgaaaggcgacgaagtaatggttctggtgcctcagctccaccgtgataaaacaatttggggagacgatgtggaggagttccgtccagagcgttttgaaaatccaagtgcgattccgcagcatgcgtttaaaccgtttggaaacggtcagcgtgcgtgtatcggtcagcagttcgctcttcatagtgcaacgctggtacttggtatgatgctaaaacactttgactttgaagatcatacaaactacgagctcgttattaaagaagtacggacgttaaaacctgaaggctttgtggtaaaagcaaaatcgaaaggcattccgcttggcggtattccttcacctagcactgaacagtctgctaaaaaagtacgcaaaaaggcagaaaacgctcataatacgccgctgcttgtgctatacggttcaaatgcgggaacagctgaaggaacggcgcgtgatttagcagatattgcaatgagcaaaggatttgcaccgcaggtcgcaacgcttgattcacacgccggtaatcttccgcgcgaaggagctgtattaattgtaacggcgtcttataacggtcatccgcctgataacgcaaagcaatttgtcgactggttagaccaagcgggtgcggatgaagtaaaaggcgttcgctactccgtatttggatgcggcgataaaagctgggcggggacgtatcaaaaagtgcctgcttttatcgatgaaacgcttgccgctaaaggggcagaaaacatcgctgaccgcggtgaagcagatgcaagcgacgactttgaaggcacatatgaagaatggcgtgatcatatgtggagtgacgtagcagcctactttggtctcgacattgaaaacagtgaagataataaatctactctttcactgcaatttgtcgacagcgcgtcggatatgccgcttgcgaaaatgcacggtgcgttttcaacgaacgtcgtagcaagcaaagaacttcaacagcctggcagtgcacgaagcacgcgacatcttgaaattgaacttccaaaagaagcttcttatcaagaaggagatcatttaggtgttattcctcgctattatgaaggaatagtaaaccgtgtaacagcaaggttcggcctaagcgcatcacagctgatccgtctggaagcagaagaagaaaaattagctcatttgccactcgctaaaacagtatccgtagaagagcttctgcaatacgtggagcttcaagatcctgttacgcgcacgcagcttcgcgcaatggctgctaaaacggtctgcccgccgcataaagtagagcttgaagccttgcttggcaagcaagcctacaaagaacaagtgctggcaaaacgtttaacaatgcttgaactgcttgaaaaatacccggcgtgtgaaatgagtttcagcgaatttatcgcccttctgccaagcatacgcccgcgctattactcgatttcttcatcacctcgtgtcgatgaaaaacaagcaagcatcacggtcagcgttgtctcaggaccggcgtggagcggatatggagaatataaaggaattgcgtcgaactatcttgccgagctgcaagaaggagatacgattacgtgctttatttccacaccgcagtcagagtttacgctgccaaaagaccctgaaacgccgcttatcatggtcggaccgggaacaggcgtcgcgccgtttagaggctttgtgcaggcgcgcaaacagctaaaagagcaaggacagtcacttggagaagcacatttatacttcggctgccgttcacctcatgaagactatctgtatcaagaagagcttgaaaacgcccaaagcgaaggcatcattacgcttcataccgctttttctcgcatgccgaatcagccgaaaacatacgttcagcacgtaatggaacaagacggcaagaaattgattgaacttcttgatcaaggagcgcacttctatatttgcggagacggaagccaaatggcacctgccgttgaagcaacgcttatgaaaagctatgctgacgttcaccaagtgagtgaagcagacgctcgcttatggctgcagcagctagaagaaaaaggccgatacgcaaaagacgtgtggctgggg

SEQ ID NO: 816 - protein, 1049 aa, synthetic construct
  REGION 1..1049: note = variant of P450 oxidase from Bacillus megaterium
MTIKEMPQPKTFGELKNLPLLNTDKPVQALMRIADELGEIFKFEAPGSVTRYLSSQRLIKEACDESRFDKNLSQGLKFARDFVGDGLVTSWTHEPNWKKAHNILVPSFSQHAMGRYHAMMVDIAVQLVQKWERLNADEHIEVSEDMTRLTLDTIGLCLFNYRFNSFYRDTPHPFIVSVVGALDEVMNKLQRANPDDPAYDENKRQCQEDIKVMNDYVDKIIADRKARGEQSHDLLTQMLNGKDPETGEPLDDGNIRNQIITFLIAGHTTISGLLSFALYFLVKNPRVLQKVAEEAARVLVDPVPSYKQVKQLKYVGMVLNEALRLWPVAPMFSLYAKEDTVLGGEYPLTKGDEVMVLVPQLHRDKTIWGDDVEEFRPERFENPSAIPQHAFKPFGNGQRACIGQQFALHSATLVLGMMLKHFDFEDHTNYELVIKEVRTLKPEGFVVKAKSKGIPLGGIPSPSTEQSAKKVRKKAENAHNTPLLVLYGSNAGTAEGTARDLADIAMSKGFAPQVATLDSHAGNLPREGAVLIVTASYNGHPPDNAKQFVDWLDQAGADEVKGVRYSVFGCGDKSWAGTYQKVPAFIDETLAAKGAENIADRGEADASDDFEGTYEEWRDHMWSDVAAYFGLDIENSEDNKSTLSLQFVDSASDMPLAKMHGAFSTNVVASKELQQPGSARSTRHLEIELPKEASYQEGDHLGVIPRYYEGIVNRVTARFGLSASQLIRLEAEEEKLAHLPLAKTVSVEELLQYVELQDPVTRTQLRAMAAKTVCPPHKVELEALLGKQAYKEQVLAKRLTMLELLEKYPACEMSFSEFIALLPSIRPRYYSISSSPRVDEKQASITVSVVSGPAWSGYGEYKGIASNYLAELQEGDTITCFISTPQSEFTLPKDPETPLIMVGPGTGVAPFRGFVQARKQLKEQGQSLGEAHLYFGCRSPHEDYLYQEELENAQSEGIITLHTAFSRMPNQPKTYVQHVMEQDGKKLIELLDQGAHFYICGDGSQMAPAVEATLMKSYADVHQVSEADARLWLQQLEEKGRYAKDVWLG

SEQ ID NO: 817 - DNA, 3147 bp, synthetic construct
  misc_feature 1..3147: note = variant of P450 oxidase from Bacillus megaterium
  source 1..3147: mol_type = other DNA
atgacaattaaggaaatgcctcagcctaagacgtttggagaacttaaaaatttaccgttattaaacacagataaaccggttcaagctttgatgcgtattgcggatgaattaggagaaatctttaaattcgaggcgcctggtagcgtaacgcgctatttatcaagtcagcgtctaattaaagaagcatgcgatgaatcacgctttgataaaaacttaagtcaagggcttaaatttgcacgtgatatcgttggagacgggctggttacaagctggacgcatgaaccgaattggaaaaaagcgcataatatcttagttccaagctttagtcagcatgcaatggggcgttatcatgcgatgatggtcgatatcgccgtgcagcttgttcaaaagtgggagcgtctaaatgcagatgagcatattgaagtatcggaagacatgacacgtttaacgcttgatacaattggtctttgcctgtttaactatcgctttaacagcttttaccgagatacgcctcatccatttattgtgagtgtggttcgtgcactggatgaagtaatgaacaagctgcagcgagcaaatccagacgacccagcttatgatgaaaacaagcgccagtgtcaagaagatatcaaggtgatgaacgactatgtagataaaattattgcagatcgcaaagcaaggggtgaacaaagtcatgatttattaacgcagatgctaaacggaaaagatccagaaacgggtgagccgcttgatgacgggaacattcgtcaacaaattattacattcttaattgcgggacaccaaacgacaagtggtcttttatcatttgcgctgtatttcttagtgaaaaatccacgtgtattacaaaaagtagcagaagaagcagcacgagttctagtagatcctgttccaagctacaaacaagtcaaacagcttaaatatgttggcatggtcttaaacgaagcgctgcgcttatggccagtagcgcctatgttttccctatatgcaaaagaagatacggtgcttggaggagaatatcctttaacgaaaggcgacgaagtaatggttctggtgcctcagcttcaccgtgataaaacaatttggggagacgatgtggaggagttccgtccagagcgttttgaaaatccaagtgcgattccgcagcatgcgtttaaaccgtttggaaacggtcagcgtgcgtgtatcggtcagcagttcgctcttcatagtgcaacgctggtacttggtatgatgctaaaacactttgactttgaagatcatacaaactacgagctcgttattaaagaaaaccggacgttaaaacctgaaggctttgtggtaaaagcaaaatcgaaaggcattccgcttggcggtattccttcacctagcactgaacagtctgctaaaaaagtacgcaaaaaggcagaaaacgctcataatacgccgctgcttgtgctatacggttcaaatgcgggaacagctgaaggaacggcgcgtgatttagcagatattgcaatgagcaaaggatttgcaccgcaggtcgcaacgcttgattcacacgccggtaatcttccgcgcgaaggagctgtattaattgtaacggcgtcttataacggtcatccgcctgataacgcaaagcaatttgtcgactggttagaccaagcgtctgcggatgaagtaaaaggcgttcgctactccgtatttggatgcggcgataaaaattgggcggggacgtatcaaaaagtgcctgcttttatcgatgaaacgcttgccgctaaaggggcagaaaacatcgctgaccgcggtgaagcagatgcaagcgacgactttgaaggcacatatgaagaatggcgtgatcatatgtggagtgacgtagcagcctactttggtctcgacattgaaaacagtgaagataataaatctactctttcacttcaatttgtcgacagcgcggcggatatgccgcttgcgaaaatgcacggtgcgttttcaacgaacgtcgtagcaagcaaagaacttcaacagcctggcagtgcacgaagcacgcgacatcttgaaattgaacttccaaaagaagcttcttatcaagaaggagatcatttaggtgttattcctcgctattatgaaggaatagtaaaccgtgtaacagcaaggttcggcctaagcgcatcacagctgatccgtctggaagcagaagaagaaaaattagctcatttgccactcgctaaaacagtatccgtagaagagcttctgcaatacgtggagcttcaagatcctgttacgcgcacgcagcttcgcgcaatggctgctaaaacggtctgcccgccgcataaagtagagcttgaagccttgcttggcaagcaagcctacaaagaacaagtgctggcaaaacgtttaacaatgcttgaactgcttgaaaaatacccggcgtgtgaaatgagtttcagcgaatttatcgcccttctgccaagcatacgcccgcgctattactcgatttcttcatcacctcgtgtcgatgaaaaacaagcaagcatcacggtcagcgttgtctcaggaccggcgtggagcggatatggagaatataaaggaattgcgtcgaactatcttgccgagctgcaagaaggagatacgattacgtgctttatttccacaccgcagtcagagtttacgctgccaaaagaccctgaaacgccgcttatcatggtcggaccgggaacaggcgtcgcgccgtttagaggctttgtgcaggcgcgcaaacagctaaaagaacaaggacagtcacttggagaagcacatttatacttcggctgccgttcacctcatgaagactatctgtatcaagaagagcttgaaaacgcccaaagcgaaggcatcattacgcttcataccgctttttctcgcatgccgaatcagccgaaaacatacgttcagcacgtaatggaacaagacggcaagaaattgattgaacttcttgatcaaggagcgcacttctatatttgcggagacggaagccaaatggcacctgccgttgaagcaacgcttatgaaaagctatgctgacgttcaccaagtgagtgaagcagacgctcgcttatggctgcagcagctagaagaaaaaggccgatacgcaaaagacgtgtggctgggg

SEQ ID NO: 818 - protein, 1049 aa, synthetic construct
  REGION 1..1049: note = variant of P450 oxidase from Bacillus megaterium
MTIKEMPQPKTFGELKNLPLLNTDKPVQALMRIADELGEIFKFEAPGSVTRYLSSQRLIKEACDESRFDKNLSQGLKFARDIVGDGLVTSWTHEPNWKKAHNILVPSFSQHAMGRYHAMMVDIAVQLVQKWERLNADEHIEVSEDMTRLTLDTIGLCLFNYRFNSFYRDTPHPFIVSVVRALDEVMNKLQRANPDDPAYDENKRQCQEDIKVMNDYVDKIIADRKARGEQSHDLLTQMLNGKDPETGEPLDDGNIRQQIITFLIAGHQTTSGLLSFALYFLVKNPRVLQKVAEEAARVLVDPVPSYKQVKQLKYVGMVLNEALRLWPVAPMFSLYAKEDTVLGGEYPLTKGDEVMVLVPQLHRDKTIWGDDVEEFRPERFENPSAIPQHAFKPFGNGQRACIGQQFALHSATLVLGMMLKHFDFEDHTNYELVIKENRTLKPEGFVVKAKSKGIPLGGIPSPSTEQSAKKVRKKAENAHNTPLLVLYGSNAGTAEGTARDLADIAMSKGFAPQVATLDSHAGNLPREGAVLIVTASYNGHPPDNAKQFVDWLDQASADEVKGVRYSVFGCGDKNWAGTYQKVPAFIDETLAAKGAENIADRGEADASDDFEGTYEEWRDHMWSDVAAYFGLDIENSEDNKSTLSLQFVDSAADMPLAKMHGAFSTNVVASKELQQPGSARSTRHLEIELPKEASYQEGDHLGVIPRYYEGIVNRVTARFGLSASQLIRLEAEEEKLAHLPLAKTVSVEELLQYVELQDPVTRTQLRAMAAKTVCPPHKVELEALLGKQAYKEQVLAKRLTMLELLEKYPACEMSFSEFIALLPSIRPRYYSISSSPRVDEKQASITVSVVSGPAWSGYGEYKGIASNYLAELQEGDTITCFISTPQSEFTLPKDPETPLIMVGPGTGVAPFRGFVQARKQLKEQGQSLGEAHLYFGCRSPHEDYLYQEELENAQSEGIITLHTAFSRMPNQPKTYVQHVMEQDGKKLIELLDQGAHFYICGDGSQMAPAVEATLMKSYADVHQVSEADARLWLQQLEEKGRYAKDVWLG

SEQ ID NO: 819 - DNA, 3147 bp, synthetic construct
  misc_feature 1..3147: note = variant of P450 oxidase from Bacillus megaterium
  source 1..3147: mol_type = other DNA
atgacaattaaggaaatgcctcagcctaagacgtttggagaacttaaaaatttaccgttattaaacacagataaaccggttcaagctttgatgcgtattgcggatgaattaggagaaatctttaaattcgaggcgcctggtagcgtaacgcgctatttatcaagtcagcgtctaattaaagaagcatgcgatgaatcacgctttgataaaaacttaagtcaagggcttaaatttgcacgtgattttgttggagacgggctggttacaagctggacgcatgaaccgaattggaaaaaagcgcataatatcttagttccaagctttagtcagcatgcaatggggcgttatcatgcgatgatggtcgatatcgccgtgcagcttgttcaaaagtgggagcgtctaaatgcagatgagcatattgaagtatcggaagacatgacacgtttaacgcttgatacaattggtctttgcctgtttaactatcgctttaacagcttttaccgagatacgcctcatccatttattgtgagtgtggttcgtgcactggatgaagtaatgaacaagctgcagcgagcaaatccagacgacccagcttatgatgaaaacaagcgccagtgtcaagaagatatcaaggtgatgaacgactatgtagataaaattattgcagatcgcaaagcaaggggtgaacaaagtcatgatttattaacgcagatgctaaacggaaaagatccagaaacgggtgagccgcttgatgacgggaacattcgtcagcaaattattacattcttaattgcgggacaccaaacgacaagtggtcttttatcatttgcgctgtatttcttagtgaaaaatccacgtgtattacaaaaagtagcagaagaagcagcacgagttctagtagatcctgttccaagctacaaacaagtcaaacagcttaaatatgttggcatggtcttaaacgaagcgctgcgcttatggccagtagcgcctatgttttccctatatgcaaaagaagatacggtgcttggaggagaatatcctttaacgaaaggcgacgaagtaatggttctggtgcctcagcttcaccgtgataaaacaatttggggagacgatgtggaggagttccgtccagagcgttttgaaaatccaagtgcgattccgcagcatgcgtttaaaccgtttggaaacggtcagcgtgcgtgtatcggtcagcagttcgctcttcatagtgcaacgctggtacttggtatgatgctaaaacactttgactttgaagatcatacaaactacgagctcgttattaaagaatcgcggacgttaaaacctgaaggctttgtggtaaaagcaaaatcgaaaggcattccgcttggcggtattccttcacctagcactgaacagtctgctaaaaaagtacgcaaaaaggcagaaaacgctcataatacgccgctgcttgtgctatacggttcaaatgcgggaacagctgaaggaacggcgcgtgatttagcagatattgcaatgagcaaaggatttgcaccgcaggtcgcaacgcttgattcacacgccggtaatcttccgcgcgaaggagctgtattaattgtaacggcgtcttataacggtcatccgcctgataacgcaaagcaatttgtcgactggttagaccaagcgagtgcggatgaagtaaaaggcgttcgctactccgtatttggatgcggcgataaaagctgggcggggacgtatcaaaaagtgcctgcttttatcgatgaaacgcttgccgctaaaggggcagaaaacatcgctgaccgcggtgaagcagatgcaagcgacgactttgaaggcacatatgaagaatggcgtgatcatatgtggagtgacgtagcagcctactttggtctcgacattgaaaacagtgaagataataaatctactctttcacttcaatttgtcgacagcgcggcggatatgccgcttgcgaaaatgcacggtgcgttttcaacgaacgtcgtagcaagcaaagaacttcaacagcctggcagtgcacgaagcacgcgacatcttgaaattgaacttccaaaagaagcttcttatcaagaaggagatcatttaggtgttattcctcgctattatgaaggaatagtaaaccgtgtaacagcaaggttcggcctaagcgcatcacagctgatccgtctggaagcagaagaagaaaaattagctcatttgccactcgctaaaacagtatccgtagaagagcttctgcaatacgtggagcttcaagatcctgttacgcgcacgcagcttcgcgcaatggctgctaaaacggtctgcccgccgcataaagtagagcttgaagccttgcttggcaagcaagcctacaaagaacaagtgctggcaaaacgtttaacaatgcttgaactgcttgaaaaatacccggcgtgtgaaatgagtttcagcgaatttatcgcccttctgccaagcatacgcccgcgctattactcgatttcttcatcacctcgtgtcgatgaaaaacaagcaagcatcacggtcagcgttgtctcaggaccggcgtggagcggatatggagaatataaaggaattgcgtcgaactatcttgccgagctgcaagaaggagatacgattacgtgctttatttccacaccgcagtcagagtttacgctgccaaaagaccctgaaacgccgcttatcatggtcggaccgggaacaggcgtcgcgccgtttagaggctttgtgcaggcgcgcaaacagctaaaagagcaaggacagtcacttggagaagcacatttatacttcggctgccgttcacctcatgaagactatctgtatcaagaagagcttgaaaacgcccaaagcgaaggcatcattacgcttcataccgctttttctcgcatgccgaatcagccgaaaacatacgttcagcacgtaatggaacaagacggcaagaaattgattgaacttcttgatcaaggagcgcacttctatatttgcggagacggaagccaaatggcacctgccgttgaagcaacgcttatgaaaagctatgctgacgttcaccaagtgagtgaagcagacgctcgcttatggctgcagcagctagaagaaaaaggccgatacgcaaaagacgtgtggctgggg

SEQ ID NO: 820 - protein, 1049 aa, synthetic construct
  REGION 1..1049: note = variant of P450 oxidase from Bacillus megaterium
MTIKEMPQPKTFGELKNLPLLNTDKPVQALMRIADELGEIFKFEAPGSVTRYLSSQRLIKEACDESRFDKNLSQGLKFARDFVGDGLVTSWTHEPNWKKAHNILVPSFSQHAMGRYHAMMVDIAVQLVQKWERLNADEHIEVSEDMTRLTLDTIGLCLFNYRFNSFYRDTPHPFIVSVVRALDEVMNKLQRANPDDPAYDENKRQCQEDIKVMNDYVDKIIADRKARGEQSHDLLTQMLNGKDPETGEPLDDGNIRQQIITFLIAGHQTTSGLLSFALYFLVKNPRVLQKVAEEAARVLVDPVPSYKQVKQLKYVGMVLNEALRLWPVAPMFSLYAKEDTVLGGEYPLTKGDEVMVLVPQLHRDKTIWGDDVEEFRPERFENPSAIPQHAFKPFGNGQRACIGQQFALHSATLVLGMMLKHFDFEDHTNYELVIKESRTLKPEGFVVKAKSKGIPLGGIPSPSTEQSAKKVRKKAENAHNTPLLVLYGSNAGTAEGTARDLADIAMSKGFAPQVATLDSHAGNLPREGAVLIVTASYNGHPPDNAKQFVDWLDQASADEVKGVRYSVFGCGDKSWAGTYQKVPAFIDETLAAKGAENIADRGEADASDDFEGTYEEWRDHMWSDVAAYFGLDIENSEDNKSTLSLQFVDSAADMPLAKMHGAFSTNVVASKELQQPGSARSTRHLEIELPKEASYQEGDHLGVIPRYYEGIVNRVTARFGLSASQLIRLEAEEEKLAHLPLAKTVSVEELLQYVELQDPVTRTQLRAMAAKTVCPPHKVELEALLGKQAYKEQVLAKRLTMLELLEKYPACEMSFSEFIALLPSIRPRYYSISSSPRVDEKQASITVSVVSGPAWSGYGEYKGIASNYLAELQEGDTITCFISTPQSEFTLPKDPETPLIMVGPGTGVAPFRGFVQARKQLKEQGQSLGEAHLYFGCRSPHEDYLYQEELENAQSEGIITLHTAFSRMPNQPKTYVQHVMEQDGKKLIELLDQGAHFYICGDGSQMAPAVEATLMKSYADVHQVSEADARLWLQQLEEKGRYAKDVWLG

SEQ ID NO: 821 - DNA, 3147 bp, synthetic construct
  misc_feature 1..3147: note = variant of P450 oxidase from Bacillus megaterium
  source 1..3147: mol_type = other DNA
atgacaattaaggaaatgcctcagcctaagacgtttggagaacttaaaaatttaccgttattaaacacagataaaccggttcaagctttgatgcgtattgcggatgaattaggagaaatctttaaattcgaggcgcctggtagcgtaacgcgctatttatcaagtcagcgtctaattaaagaagcatgcgatgaatcacgctttgataaaaacttaagtcaagcgcttaaatttgcacgtgatatcgttggagacgggctggttacaagctggacgcatgaaccgaattggaaaaaagcgcataatatcttagttccaagctttagtcagcatgcaatggggcgttatcatgcgatgatggtcgatatcgccgtgcagcttgttcaaaagtgggagcgtctaaatgcagatgagcatattgaagtatcggaagacatgacacgtttaacgcttgatacaattggtctttgcctgtttaactatcgctttaacagcttttaccgagatacgcctcatccatttattgtgagtgtggttcgtgcactggatgaagtaatgaacaagctgcagcgagcaaatccagacgacccagcttatgatgaaaacaagcgccagtgtcaagaagatatcaaggtgatgaacgactatgtagataaaattattgcagatcgcaaagcaaggggtgaacaaagtcatgatttattaacgcagatgctaaacggaaaagatccagaaacgggtgagccgcttgatgacgggaacattcgtcagcaaattattacattcttaattgcgggacaccaaacgacaagtggtcttttatcatttgcgctgtatttcttagtgaaaaatccacgtgtattacaaaaagtagcagaagaagcagcacgagttctagtagatcctgttccaagctacaaacaagtcaaacagcttaaatatgttggcatggtcttaaacgaagcgctgcgcttatggccagtagcgcctatgttttccctatatgcaaaagaagatacggtgcttggaggagaatatcctttaacgaaaggcgacgaagtaatggttctggtgcctcagcttcaccgtgataaaacaatttggggagacgatgtggaggagttccgtccagagcgttttgaaaatccaagtgcgattccgcagcatgcgtttaaaccgtttggaaacggtcagcgtgcgtgtatcggtcagcagttcgctcttcatagtgcaacgctggtacttggtatgatgctaaaacactttgactttgaagatcatacaaactacgagctcgttattaaagaatcgcggacgttaaaacctgaaggctttgtggtaaaagcaaaatcgaaaggcattccgcttggcggtattccttcacctagcactgaacagtctgctaaaaaagtacgcaaaaaggcagaaaacgctcataatacgccgctgcttgtgctatacggttcaaatgcgggaacagctgaaggaacggcgcgtgatttagcagatattgcaatgagcaaaggatttgcaccgcaggtcgcaacgcttgattcacacgccggtaatcttccgcgcgaaggagctgtattaattgtaacggcgtcttataacggtcatccgcctgataacgcaaagcaatttgtcgactggttagaccaagcgtctgcggatgaagtaaaaggcgttcgctactccgtatttggatgcggcgataaaaattgggcggggacgtatcaaaaagtgcctgcttttatcgatgaaacgcttgccgctaaaggggcagaaaacatcgctgaccgcggtgaagcagatgcaagcgacgactttgaaggcgcgtatgaagaatggcgtgatcatatgtggagtgacgtagcagcctactttggtctcgacattgaaaacagtgaagataataaatctactctttcacttcaatttgtcgacagcgcggcggatatgccgcttgcgaaaatgcacggtgcgttttcaacgaacgtcgtagcaagcaaagaacttcaacagcctggcagtgcacgaagcacgcgacatcttgaaattgaacttccaaaagaagcttcttatcaagaaggagatcatttaggtgttattcctcgctattatgaaggaatagtaaaccgtgtaacagcaaggttcggcctaagcgcatcacagctgatccgtctggaagcagaagaagaaaaattagctcatttgccactcgctaaaacagtatccgtagaagagcttctgcaatacgtggagcttcaagatcctgttacgcgcacgcagcttcgcgcaatggctgctaaaacggtctgcccgccgcataaagtagagcttgaagccttgcttggcaagcaagcctacaaagaacaagtgctggcaaaacgtttaacaatgcttgaactgcttgaaaaatacccggcgtgtgaaatgagtttcagcgaatttatcgcccttctgccaagcatacgcccgcgctattactcgatttcttcatcacctcgtgtcgatgaaaaacaagcaagcatcacggtcagcgttgtctcaggaccggcgtggagcggatatggagaatataaaggaattgcgtcgaactatcttgccgagctgcaagaaggagatacgattacgtgctttatttccacaccgcagtcagagtttacgctgccaaaagaccctgaaacgccgcttatcatggtcggaccgggaacaggcgtcgcgccgtttagaggctttgtgcaggcgcgcaaacagctaaaagaacaaggacagtcacttggagaagcacatttatacttcggctgccgttcacctcatgaagactatctgtatcaagaagagcttgaaaacgcccaaagcgaaggcatcattacgcttcataccgctttttctcgcatgccgaatcagccgaaaacatacgttcagcacgtaatggaacaagacggcaagaaattgattgaacttcttgatcaaggagcgcacttctatatttgcggagacggaagccaaatggcacctgccgttgaagcaacgcttatgaaaagctatgctgacgttcaccaagtgagtgaagcagacgctcgcttatggctgcagcagctagaagaaaaaggccgatacgcaaaagacgtgtggctgggg

SEQ ID NO: 822 - protein, 1049 aa, synthetic construct
  REGION 1..1049: note = variant of P450 oxidase from Bacillus megaterium
MTIKEMPQPKTFGELKNLPLLNTDKPVQALMRIADELGEIFKFEAPGSVTRYLSSQRLIKEACDESRFDKNLSQALKFARDIVGDGLVTSWTHEPNWKKAHNILVPSFSQHAMGRYHAMMVDIAVQLVQKWERLNADEHIEVSEDMTRLTLDTIGLCLFNYRFNSFYRDTPHPFIVSVVRALDEVMNKLQRANPDDPAYDENKRQCQEDIKVMNDYVDKIIADRKARGEQSHDLLTQMLNGKDPETGEPLDDGNIRQQIITFLIAGHQTTSGLLSFALYFLVKNPRVLQKVAEEAARVLVDPVPSYKQVKQLKYVGMVLNEALRLWPVAPMFSLYAKEDTVLGGEYPLTKGDEVMVLVPQLHRDKTIWGDDVEEFRPERFENPSAIPQHAFKPFGNGQRACIGQQFALHSATLVLGMMLKHFDFEDHTNYELVIKESRTLKPEGFVVKAKSKGIPLGGIPSPSTEQSAKKVRKKAENAHNTPLLVLYGSNAGTAEGTARDLADIAMSKGFAPQVATLDSHAGNLPREGAVLIVTASYNGHPPDNAKQFVDWLDQASADEVKGVRYSVFGCGDKNWAGTYQKVPAFIDETLAAKGAENIADRGEADASDDFEGAYEEWRDHMWSDVAAYFGLDIENSEDNKSTLSLQFVDSAADMPLAKMHGAFSTNVVASKELQQPGSARSTRHLEIELPKEASYQEGDHLGVIPRYYEGIVNRVTARFGLSASQLIRLEAEEEKLAHLPLAKTVSVEELLQYVELQDPVTRTQLRAMAAKTVCPPHKVELEALLGKQAYKEQVLAKRLTMLELLEKYPACEMSFSEFIALLPSIRPRYYSISSSPRVDEKQASITVSVVSGPAWSGYGEYKGIASNYLAELQEGDTITCFISTPQSEFTLPKDPETPLIMVGPGTGVAPFRGFVQARKQLKEQGQSLGEAHLYFGCRSPHEDYLYQEELENAQSEGIITLHTAFSRMPNQPKTYVQHVMEQDGKKLIELLDQGAHFYICGDGSQMAPAVEATLMKSYADVHQVSEADARLWLQQLEEKGRYAKDVWLG

SEQ ID NO: 823 - DNA, 3147 bp, synthetic construct
  misc_feature 1..3147: note = variant of P450 oxidase from Bacillus megaterium
  source 1..3147: mol_type = other DNA
atgacaattaaggaaatgcctcagcctaagacgtttggagaacttaaaaatttaccgttattaaacacagataaaccggttcaagctttgatgcgtattgcggatgaattaggagaaatctttaaattcgaggcgcctggtagcgtaacgcgctatttatcaagtcagcgtctaattaaagaagcatgcgatgaatcacgctttgataaaaacttaagtcaagggcttaaatttgcacgtgatatcgttggagacgggctggttacaagctggacgcatgaaccgaattggaaaaaagcgcataatatcttagttccaagctttagtcagcatgcaatggggcgttatcatgcgatgatggtcgatatcgccgtgcagcttgttcaaaagtgggagcgtctaaatgcagatgagcatattgaagtatcggaagacatgacacgtttaacgcttgatacaattggtctttgcctgtttaactatcgctttaacagcttttaccgagatacgcctcatccatttattgtgagtgtggttcgtgcactggatgaagtaatgaacaagctgcagcgagcaaatccagacgacccagcttatgatgaaaacaagcgccagtgtcaagaagatatcaaggtgatgaacgactatgtagataaaattattgcagatcgcaaagcaaggggtgaacaaagtcatgatttattaacgcagatgctaaacggaaaagatccagaaacgggtgagccgcttgatgacgggaacattcgtcatcaaattattacattcttaattgcgggacaccaaacgacaagtggtcttttatcatttgcgctgtatttcttagtgaaaaatccacgtgtattacaaaaagtagcagaagaagcagcacgagttctagtagatcctgttccaagctacaaacaagtcaaacagcttaaatatgttggcatggtcttaaacgaagcgctgcgcttatggccagtagcgcctatgttttccctatatgcaaaagaagatacggtgcttggaggagaatatcctttaacgaaaggcgacgaagtaatggttctggtgcctcagcttcaccgtgataaaacaatttggggagacgatgtggaggagttccgtccagagcgttttgaaaatccaagtgcgattccgcagcatgcgtttaaaccgtttggaaacggtcagcgtgcgtgtatcggtcagcagttcgctcttcatagtgcaacgctggtacttggtatgatgctaaaacactttgactttgaagatcatacaaactacgagctcgttattaaagaatcgcggacgttaaaacctgaaggctttgtggtaaaagcaaaatcgaaaggcattccgcttggcggtattccttcacctagcactgaacagtctgctaaaaaagtacgcaaaaaggcagaaaacgctcataatacgccgctgcttgtgctatacggttcaaatgcgggaacagctgaaggaacggcgcgtgatttagcagatattgcaatgagcaaaggatttgcaccgcaggtcgcaacgcttgattcacacgccggtaatcttccgcgcgaaggagctgtattaattgtaacggcgtcttataacggtcatccgcctgataacgcaaagcaatttgtcgactggttagaccaagcgtctgcggatgaagtaaaaggcgttcgctactccgtatttggatgcggcgataaaaattgggcggggacgtatcaaaaagtgcctgcttttatcgatgaaacgcttgccgctaaaggggcagaaaacatcgctgaccgcggtgaagcagatgcaagcgacgactttgaaggcacgtatgaagaatggcgtgatcatatgtggagtgacgtagcagcctactttggtctcgacattgaaaacagtgaagataataaatctactctttcacttcaatttgtcgacagcgcggcggatatgccgcttgcgaaaatgcacggtgcgttttcaacgaacgtcgtagcaagcaaagaacttcaacagcctggcagtgcacgaagcacgcgacatcttgaaattgaacttccaaaagaagcttcttatcaagaaggagatcatttaggtgttattcctcgctattatgaaggaatagtaaaccgtgtaacagcaaggttcggcctaagcgcatcacagctgatccgtctggaagcagaagaagaaaaattagctcatttgccactcgctaaaacagtatccgtagaagagcttctgcaatacgtggagcttcaagatcctgttacgcgcacgcagcttcgcgcaatggctgctaaaacggcctgcccgccgcataaagtagagcttgaagccttgcttggcaagcaagcctacaaagaacaagtgctggcaaaacgtttaacaatgcttgaactgcttgaaaaatacccggcgtgtgaaatgagtttcagcgaatttatcgcccttctgccaagcatacgcccgcgctattactcgatttcttcatcacctcgtgtcgatgaaaaacaagcaagcatcacggtcagcgttgtctcaggaccggcgtggagcggatatggagaatataaaggaattgcgtcgaactatcttgccgagctgcaagaaggagatacgattacgtgctttatttccacaccgcagtcagagtttacgctgccaaaagaccctgaaacgccgcttatcatggtcggaccgggaacaggcgtcgcgccgtttagaggctttgtgcaggcgcgcaaacagctaaaagaacaaggacagtcacttggagaagcacatttatacttcggctgccgttcacctcatgaagactatctgtatcaagaagagcttgaaaacgcccaaagcgaaggcatcattacgcttcataccgctttttctcgcatgccgaatcagccgaaaacatacgttcagcacgtaatggaacaagacggcaagaaattgattgaacttcttgatcaaggagcgcacttctatatttgcggagacggaagccaaatggcacctgccgttgaagcaacgcttatgaaaagctatgctgacgttcaccaagtgagtgaagcagacgctcgcttatggctgcagcagctagaagaaaaaggccgatacgcaaaagacgtgtggctgggg

SEQ ID NO: 824 - protein, 1049 aa, synthetic construct
  REGION 1..1049: note = variant of P450 oxidase from Bacillus megaterium
MTIKEMPQPKTFGELKNLPLLNTDKPVQALMRIADELGEIFKFEAPGSVTRYLSSQRLIKEACDESRFDKNLSQGLKFARDIVGDGLVTSWTHEPNWKKAHNILVPSFSQHAMGRYHAMMVDIAVQLVQKWERLNADEHIEVSEDMTRLTLDTIGLCLFNYRFNSFYRDTPHPFIVSVVRALDEVMNKLQRANPDDPAYDENKRQCQEDIKVMNDYVDKIIADRKARGEQSHDLLTQMLNGKDPETGEPLDDGNIRHQIITFLIAGHQTTSGLLSFALYFLVKNPRVLQKVAEEAARVLVDPVPSYKQVKQLKYVGMVLNEALRLWPVAPMFSLYAKEDTVLGGEYPLTKGDEVMVLVPQLHRDKTIWGDDVEEFRPERFENPSAIPQHAFKPFGNGQRACIGQQFALHSATLVLGMMLKHFDFEDHTNYELVIKESRTLKPEGFVVKAKSKGIPLGGIPSPSTEQSAKKVRKKAENAHNTPLLVLYGSNAGTAEGTARDLADIAMSKGFAPQVATLDSHAGNLPREGAVLIVTASYNGHPPDNAKQFVDWLDQASADEVKGVRYSVFGCGDKNWAGTYQKVPAFIDETLAAKGAENIADRGEADASDDFEGTYEEWRDHMWSDVAAYFGLDIENSEDNKSTLSLQFVDSAADMPLAKMHGAFSTNVVASKELQQPGSARSTRHLEIELPKEASYQEGDHLGVIPRYYEGIVNRVTARFGLSASQLIRLEAEEEKLAHLPLAKTVSVEELLQYVELQDPVTRTQLRAMAAKTACPPHKVELEALLGKQAYKEQVLAKRLTMLELLEKYPACEMSFSEFIALLPSIRPRYYSISSSPRVDEKQASITVSVVSGPAWSGYGEYKGIASNYLAELQEGDTITCFISTPQSEFTLPKDPETPLIMVGPGTGVAPFRGFVQARKQLKEQGQSLGEAHLYFGCRSPHEDYLYQEELENAQSEGIITLHTAFSRMPNQPKTYVQHVMEQDGKKLIELLDQGAHFYICGDGSQMAPAVEATLMKSYADVHQVSEADARLWLQQLEEKGRYAKDVWLG

SEQ ID NO: 825 - DNA, 3147 bp, synthetic construct
  misc_feature 1..3147: note = variant of P450 oxidase from Bacillus megaterium
  source 1..3147: mol_type = other DNA
atgacaattaaggaaatgcctcagcctaagacgtttggagaacttaaaaatttaccgttattaaacacagataaaccggttcaagctttgatgcgtattgcggatgaattaggagaaatctttaaattcgaggcgcctggtagcgtaacgcgctatttatcaagtcagcgtctaattaaagaagcatgcgatgaatcacgctttgataaaaacttaagtcaagggcttaaatttgcacgtgattttgttggagacgggctggttacaagctggacgcatgaaccgaattggaaaaaagcgcataatatcttagttccaagctttagtcagcatgcaatggggcgttatcatgcgatgatggtcgatatcgccgtgcagcttgttcaaaagtgggagcgtctaaatgcagatgagcatattgaagtatcggaagacatgacacgtttaacgcttgatacaattggtctttgcctgtttaactatcgctttaacagcttttaccgagatacgcctcatccatttattgtgagtgtggttggtgcactggatgaagtaatgaacaagctgcagcgagcaaatccagacgacccagcttatgatgaaaacaagcgccagtgtcaagaagatatcaaggtgatgaacgactatgtagataaaattattgcagatcgcaaagcaaggggtgaacaaagtcatgatttattaacgcagatgctaaacggaaaagatccagaaacgggtgagccgcttgatgacgggaacattcgtcaacaaattattacattcttaattgcgggacaccaaacgacaagtggtcttttatcatttgcgctgtatttcttagtgaaaaatccacgtgtattacaaaaagtagcagaagaagcagcacgagttctagtagatcctgttccaagctacaaacaagtcaaacagcttaaatatgttggcatggtcttaaacgaagcgctgcgcttatggccagtagcgcctatgttttccctatatgcaaaagaagatacggtgcttggaggagaatatcctttaacgaaaggcgacgaagtaatggttctggtgcctcagcttcaccgtgataaaacaatttggggagacgatgtggaggagttccgtccagagcgttttgaaaatccaagtgcgattccgcagcatgcgtttaaaccgtttggaaacggtcagcgtgcgtgtatcggtcagcagttcgctcttcatagtgcaacgctggtacttggtatgatgctaaaacactttgactttgaagatcatacaaactacgagctcgttattaaagaatcgcggacgttaaaacctgaaggctttgtggtaaaagcaaaatcgaaaggcattccgcttggcggtattccttcacctagcactgaacagtctgctaaaaaagtacgcaaaaaggcagaaaacgctcataatacgccgctgcttgtgctatacggttcaaatgcgggaacagctgaaggaacggcgcgtgatttagcagatattgcaatgagcaaaggatttgcaccgcaggtcgcaacgcttgattcacacgccggtaatcttccgcgcgaaggagctgtattaattgtaacggcgtcttataacggtcatccgcctgataacgcaaagcaatttgtcgactggttagaccaagcgtctgcggatgaagtaaaaggcgttcgctactccgtatttggatgcggcgataaaagctgggcggggacgtatcaaaaagtgcctgcttttatcgatgaaacgcttgccgctaaaggggcagaaaacatcgctgaccgcggtgaagcagatgcaagcgacgactttgaaggcacgtatgaagaatggcgtgatcatatgtggagtgacgtagcagcctactttggtctcgacattgaaaacagtgaagataataaatctactctttcacttcaatttgtcgacagcgcggcggatatgccgcttgcgaaaatgcacggtgcgttttcaacgaacgtcgtagcaagcaaagaacttcaacagcctggcagtgcacgaagcacgcgacatcttgaaattgaacttccaaaagaagcttcttatcaagaaggagatcatttaggtgttattcctcgctattatgaaggaatagtaaaccgtgtaacagcaaggttcggcctaagcgcatcacagctgatccgtctggaagcagaagaagaaaaattagctcatttgccactcgctaaaacagtatccgtagaagagcttctgcaatacgtggagcttcaagatcctgttacgcgcacgcagcttcgcgcaatggctgctaaaacggtctgcccgccgcataaagtagagcttgaagccttgcttggcaagcaagcctacaaagaacaagtggctgcaaaacgtttaacaatgcttgaactgcttgaaaaatacccggcgtgtgaaatgagtttcagcgaatttatcgcccttctgccaagcatacgcccgcgctattactcgatttcttcatcacctcgtgtcgatgaaaaacaagcaagcatcacggtcagcgttgtctcaggaccggcgtggagcggatatggagaatataaaggaattgcgtcgaactatcttgccgagctgcaagaaggagatacgattacgtgctttatttccacaccgcagtcagagtttacgctgccaaaagaccctgaaacgccgcttatcatggtcggaccgggaacaggcgtcgcgccgtttagaggctttgtgcaggcgcgcaaacagctaaaagagcaaggacagtcacttggagaagcacatttatacttcggctgccgttcacctcatgaagactatctgtatcaagaagagcttgaaaacgcccaaagcgaaggcatcattacgcttcataccgctttttctcgcatgccgaatcagccgaaaacatacgttcagcacgtaatggaacaagacggcaagaaattgattgaacttcttgatcaaggagcgcacttctatatttgcggagacggaagccaaatggcacctgccgttgaagcaacgcttatgaaaagctatgctgacgttcaccaagtgagtgaagcagacgctcgcttatggctgcagcagctagaagaaaaaggccgatacgcaaaagacgtgtggctgggg

SEQ ID NO: 826 - protein, 1049 aa, synthetic construct
  REGION 1..1049: note = variant of P450 oxidase from Bacillus megaterium
MTIKEMPQPKTFGELKNLPLLNTDKPVQALMRIADELGEIFKFEAPGSVTRYLSSQRLIKEACDESRFDKNLSQGLKFARDFVGDGLVTSWTHEPNWKKAHNILVPSFSQHAMGRYHAMMVDIAVQLVQKWERLNADEHIEVSEDMTRLTLDTIGLCLFNYRFNSFYRDTPHPFIVSVVGALDEVMNKLQRANPDDPAYDENKRQCQEDIKVMNDYVDKIIADRKARGEQSHDLLTQMLNGKDPETGEPLDDGNIRQQIITFLIAGHQTTSGLLSFALYFLVKNPRVLQKVAEEAARVLVDPVPSYKQVKQLKYVGMVLNEALRLWPVAPMFSLYAKEDTVLGGEYPLTKGDEVMVLVPQLHRDKTIWGDDVEEFRPERFENPSAIPQHAFKPFGNGQRACIGQQFALHSATLVLGMMLKHFDFEDHTNYELVIKESRTLKPEGFVVKAKSKGIPLGGIPSPSTEQSAKKVRKKAENAHNTPLLVLYGSNAGTAEGTARDLADIAMSKGFAPQVATLDSHAGNLPREGAVLIVTASYNGHPPDNAKQFVDWLDQASADEVKGVRYSVFGCGDKSWAGTYQKVPAFIDETLAAKGAENIADRGEADASDDFEGTYEEWRDHMWSDVAAYFGLDIENSEDNKSTLSLQFVDSAADMPLAKMHGAFSTNVVASKELQQPGSARSTRHLEIELPKEASYQEGDHLGVIPRYYEGIVNRVTARFGLSASQLIRLEAEEEKLAHLPLAKTVSVEELLQYVELQDPVTRTQLRAMAAKTVCPPHKVELEALLGKQAYKEQVAAKRLTMLELLEKYPACEMSFSEFIALLPSIRPRYYSISSSPRVDEKQASITVSVVSGPAWSGYGEYKGIASNYLAELQEGDTITCFISTPQSEFTLPKDPETPLIMVGPGTGVAPFRGFVQARKQLKEQGQSLGEAHLYFGCRSPHEDYLYQEELENAQSEGIITLHTAFSRMPNQPKTYVQHVMEQDGKKLIELLDQGAHFYICGDGSQMAPAVEATLMKSYADVHQVSEADARLWLQQLEEKGRYAKDVWLG

SEQ ID NO: 827 - DNA, 3147 bp, synthetic construct
  misc_feature 1..3147: note = variant of P450 oxidase from Bacillus megaterium
  source 1..3147: mol_type = other DNA
atgacaattaaggaaatgcctcagcctaagacgtttggagaacttaaaaatttaccgttattaaacacagataaaccggttcaagctttgatgcgtattgcggatgaattaggagaaatctttaaattcgaggcgcctggtagcgtaacgcgctatttatcaagtcagcgtctaattaaagaagcatgcgatgaatcacgctttgataaaaacttaagtcaagggcttaaatttgcacgtgattttgttggagacgggctggttacaagctggacgcatgaaccgaattggaaaaaagcgcataatatcttagttccaagctttagtcagcatgcaatggggcgttatcatgcgatgatggtcgatatcgccgtgcagcttgttcaaaagtgggagcgtctaaatgcagatgagcatattgaagtatcggaagacatgacacgtttaacgcttgatacaattggtctttgcctgtttaactatcgctttaacagcttttaccgagatacgcctcatccatttattgtgagtgtggttcgtgcactggatgaagtaatgaacaagctgcagcgagcaaatccagacgacccagcttatgatgaaaacaagcgccagtgtcaagaagatatcaaggtgatgaacgactatgtagataaaattattgcagatcgcaaagcaaggggtgaacaaagtcatgatttattaacgcagatgctaaacggaaaagatccagaaacgggtgagccgcttgatgacgggaacattcgtcagcaaattattacattcttaattgcgggacaccaaacgacaagtggtcttttatcatttgcgctgtatttcttagtgaaaaatccacgtgtattacaaaaagtagcagaagaagcagcacgagttctagtagatcctgttccaagctacaaacaagtcaaacagcttaaatatgttggcatggtcttaaacgaagcgctgcgcttatggccagtagcgcctatgttttccctatatgcaaaagaagatacggtgcttggaggagaatatcctttaacgaaaggcgacgaagtaatggttctggtgcctcagcttcaccgtgataaaacaatttggggagacgatgtggaggagttccgtccagagcgttttgaaaatccaagtgcgattccgcagcatgcgtttaaaccgtttggaaacggtcagcgtgcgtgtatcggtcagcagttcgctcttcatagtgcaacgctggtacttggtatgatgctaaaacactttgactttgaagatcatacaaactacgagctcgttattaaagaatcgcggacgttaaaacctgaaggctttgtggtaaaagcaaaatcgaaaggcattccgcttggcggtattccttcacctagcactgaacagtctgctaaaaaagtacgcaaaaaggcagaaaacgctcataatacgccgctgcttgtgctatacggttcaaatgcgggaacagctgaaggaacggcgcgtgatttagcagatattgcaatgagcaaaggatttgcaccgcaggtcgcaacgcttgattcacacgccggtaatcttccgcgcgaaggagctgtattaattgtaacggcgtcttataacggtcatccgcctgataacgcaaagcaatttgtcgactggttagaccaagcgtctgcggatgaagtaaaaggcgttcgctactccgtatttggatgcggcgataaaaattgggcggggacgtatcaaaaagtgcctgcttttatcgatgaaacgcttgccgctaaaggggcagaaaacatcgctgaccgcggtgaagcagatgcaagcgacgactttgaaggcgcgtatgaagaatggcgtgatcatatgtggagtgacgtagcagcctactttggtctcgacattgaaaacagtgaagataataaatctactctttcacttcaatttgtcgacagcgcggcggatatgccgcttgcgaaaatgcacggtgcgttttcaacgaacgtcgtagcaagcaaagaacttcaacagcctggcagtgcacgaagcacgcgacatcttgaaattgaacttccaaaagaagcttcttatcaagaaggagatcatttaggtgttattcctcgctattatgaaggaatagtaaaccgtgtaacagcaaggttcggcctaagcgcatcacagctgatccgtctggaagcagaagaagaaaaattagctcatttgccactcgctaaaacagtatccgtagaagagcttctgcaatacgtggagcttcaagatcctgttacgcgcacgcagcttcgcgcaatggctgctaaaacggtctgcccgccgcataaagtagagcttgaagccttgcttggcaagcaagcctacaaagaacaagtgctggcaaaacgtttaacaatgcttgaactgcttgaaaaatacccggcgtgtgaaatgagtttcagcgaatttatcgcccttctgccaagcatacgcccgcgctattactcgatttcttcatcacctcgtgtcgatgaaaaacaagcaagcatcacggtcagcgttgtctcaggaccggcgtggagcggatatggagaatataaaggaattgcgtcgaactatcttgccgagctgcaagaaggagatacgattacgtgctttatttccacaccgcagtcagagtttacgctgccaaaagaccctgaaacgccgcttatcatggtcggaccgggaacaggcgtcgcgccgtttagaggctttgtgcaggcgcgcaaacagctaaaagaacaaggacagtcacttggagaagcacatttatacttcggctgccgttcacctcatgaagactatctgtatcaagaagagcttgaaaacgcccaaagcgaaggcatcattacgcttcataccgctttttctcgcatgccgaatcagccgaaaacatacgttcagcacgtaatggaacaagacggcaagaaattgattgaacttcttgatcaaggagcgcacttctatatttgcggagacggaagccaaatggcacctgccgttgaagcaacgcttatgaaaagctatgctgacgttcaccaagtgagtgaagcagacgctcgcttatggctgcagcagctagaagaaaaaggccgatacgcaaaagacgtgtggctgggg

SEQ ID NO: 828 - protein, 1049 aa, synthetic construct
  REGION 1..1049: note = variant of P450 oxidase from Bacillus megaterium
MTIKEMPQPKTFGELKNLPLLNTDKPVQALMRIADELGEIFKFEAPGSVTRYLSSQRLIKEACDESRFDKNLSQGLKFARDFVGDGLVTSWTHEPNWKKAHNILVPSFSQHAMGRYHAMMVDIAVQLVQKWERLNADEHIEVSEDMTRLTLDTIGLCLFNYRFNSFYRDTPHPFIVSVVRALDEVMNKLQRANPDDPAYDENKRQCQEDIKVMNDYVDKIIADRKARGEQSHDLLTQMLNGKDPETGEPLDDGNIRQQIITFLIAGHQTTSGLLSFALYFLVKNPRVLQKVAEEAARVLVDPVPSYKQVKQLKYVGMVLNEALRLWPVAPMFSLYAKEDTVLGGEYPLTKGDEVMVLVPQLHRDKTIWGDDVEEFRPERFENPSAIPQHAFKPFGNGQRACIGQQFALHSATLVLGMMLKHFDFEDHTNYELVIKESRTLKPEGFVVKAKSKGIPLGGIPSPSTEQSAKKVRKKAENAHNTPLLVLYGSNAGTAEGTARDLADIAMSKGFAPQVATLDSHAGNLPREGAVLIVTASYNGHPPDNAKQFVDWLDQASADEVKGVRYSVFGCGDKNWAGTYQKVPAFIDETLAAKGAENIADRGEADASDDFEGAYEEWRDHMWSDVAAYFGLDIENSEDNKSTLSLQFVDSAADMPLAKMHGAFSTNVVASKELQQPGSARSTRHLEIELPKEASYQEGDHLGVIPRYYEGIVNRVTARFGLSASQLIRLEAEEEKLAHLPLAKTVSVEELLQYVELQDPVTRTQLRAMAAKTVCPPHKVELEALLGKQAYKEQVLAKRLTMLELLEKYPACEMSFSEFIALLPSIRPRYYSISSSPRVDEKQASITVSVVSGPAWSGYGEYKGIASNYLAELQEGDTITCFISTPQSEFTLPKDPETPLIMVGPGTGVAPFRGFVQARKQLKEQGQSLGEAHLYFGCRSPHEDYLYQEELENAQSEGIITLHTAFSRMPNQPKTYVQHVMEQDGKKLIELLDQGAHFYICGDGSQMAPAVEATLMKSYADVHQVSEADARLWLQQLEEKGRYAKDVWLG

SEQ ID NO: 829 - DNA, 3147 bp, synthetic construct
  misc_feature 1..3147: note = variant of P450 oxidase from Bacillus megaterium
  source 1..3147: mol_type = other DNA
atgacaattaaggaaatgcctcagcctaagacgtttggagaacttaaaaatttaccgttattaaacacagataaaccggttcaagctttgatgcgtattgcggatgaattaggagaaatctttaaattcgaggcgcctggtagcgtaacgcgctatttatcaagtcagcgtctaattaaagaagcatgcgatgaatcacgctttgataaaaacttaagtcaagcgcttaaatttgcacgtgattttgttggagacgggctggttacaagctggacgcatgaaccgaattggaaaaaagcgcataatatcttagttccaagctttagtcagcatgcaatggggcgttatcatgcgatgatggtcgatatcgccgtgcagcttgttcaaaagtgggagcgtctaaatgcagatgagcatattgaagtatcggaagacatgacacgtttaacgcttgatacaattggtctttgcctgtttaactatcgctttaacagcttttaccgagatacgcctcatccatttattgtgagtgtggttcgtgcactggatgaagtaatgaacaagctgcagcgagcaaatccagacgacccagcttatgatgaaaacaagcgccagtgtcaagaagatatcaaggtgatgaacgactatgtagataaaattattgcagatcgcaaagcaaggggtgaacaaagtcatgatttattaacgaatatgctaaacggaaaagatccagaaacgggtgagccgcttgatgacgggaacattcgtcagcaaattattacattcttaattgcgggacaccaaacgacaagtggtcttttatcatttgcgctgtatttcttagtgaaaaatccacgtgtattacaaaaagtagcagaagaagcagcacgagttctagtagatcctgttccaagctacaaacaagtcaaacagcttaaatatgttggcatggtcttaaacgaagcgctgcgcttatggccagtagcgcctatgttttccctatatgcaaaagaagatacggtgcttggaggagaatatcctttaacgaaaggcgacgaagtaatggttctggtgcctcagcttcaccgtgataaaacaatttggggagacgatgtggaggagttccgtccagagcgttttgaaaatccaagtgcgattccgcagcatgcgtttaaaccgtttggaaacggtcagcgtgcgtgtatcggtcagcagttcgctcttcatagtgcaacgctggtacttggtatgatgctaaaacactttgactttgaagatcatacaaactacgagctcgttattaaagaatcgcggacgttaaaacctgaaggctttgtggtaaaagcaaaatcgaaaggcattccgcttggcggtattccttcacctagcactgaacagtctgctaaaaaagtacgcaaaaaggcagaaaacgctcataatacgccgctgcttgtgctatacggttcaaatgcgggaacagctgaaggaacggcgcgtgatttagcagatattgcaatgagcaaaggatttgcaccgcaggtcgcaacgcttgattcacacgccggtaatcttccgcgcgaaggagctgtattaattgtaacggcgtcttataacggtcatccgcctgataacgcaaagcaatttgtcgactggttagaccaagcgtctgcggatgaagtaaaaggcgttcgctactccgtatttggatgcggcgataaaaattgggcggggacgtatcaaaaagtgcctgcttttatcgatgaaacgcttgccgctaaaggggcagaaaacatcgctgaccgcggtgaagcagatgcaagcgacgactttgaaggcacatatgaagaatggcgtgatcatatgtggagtgacgtagcagcctactttggtctcgacattgaaaacagtgaagataataaatctactctttcacttcaatttgtcgacagcgcggcggatatgccgcttgcgaaaatgcacggtgcgttttcaacgaacgtcgtagcaagcaaagaacttcaacagcctggcagtgcacgaagcacgcgacatcttgaaattgaacttccaaaagaagcttcttatcaagaaggagatcatttaggtgttattcctcgctattatgaaggaatagtaaaccgtgtaacagcaaggttcggcctaagcgcatcacagctgatccgtctggaagcagaagaagaaaaattagctcatttgccactcgctaaaacagtatccgtagaagagcttctgcaatacgtggagcttcaagatcctgttacgcgcacgcagcttcgcgcaatggctgctaaaacggtctgcccgccgcataaagtagagcttgaagccttgcttggcaagcaagcctacaaagaacaagtgctggcaaaacgtttaacaatgcttgaactgcttgaaaaatacccggcgtgtgaaatgagtttcagcgaatttatcgcccttctgccaagcatacgcccgcgctattactcgatttcttcatcacctcgtgtcgatgaaaaacaagcaagcatcacggtcagcgttgtctcaggaccggcgtggagcggatatggagaatataaaggaattgcgtcgaactatcttgccgagctgcaagaaggagatacgattacgtgctttatttccacaccgcagtcagagtttacgctgccaaaagaccctgaaacgccgcttatcatggtcggaccgggaacaggcgtcgcgccgtttagaggctttgtgcaggcgcgcaaacagctaaaagaacaaggacagtcacttggagaagcacatttatacttcggctgccgttcacctcatgaagactatctgtatcaagaagagcttgaaaacgcccaaagcgaaggcatcattacgcttcataccgctttttctcgcatgccgaatcagccgaaaacatacgttcagcacgtaatggaacaagacggcaagaaattgattgaacttcttgatcaaggagcgcacttctatatttgcggagacggaagccaaatggcacctgccgttgaagcaacgcttatgaaaagctatgctgacgttcaccaagtgagtgaagcagacgctcgcttatggctgcagcagctagaagaaaaaggccgatacgcaaaagacgtgtggctgggg

SEQ ID NO: 830 - protein, 1049 aa, synthetic construct
  REGION 1..1049: note = variant of P450 oxidase from Bacillus megaterium
MTIKEMPQPKTFGELKNLPLLNTDKPVQALMRIADELGEIFKFEAPGSVTRYLSSQRLIKEACDESRFDKNLSQALKFARDFVGDGLVTSWTHEPNWKKAHNILVPSFSQHAMGRYHAMMVDIAVQLVQKWERLNADEHIEVSEDMTRLTLDTIGLCLFNYRFNSFYRDTPHPFIVSVVRALDEVMNKLQRANPDDPAYDENKRQCQEDIKVMNDYVDKIIADRKARGEQSHDLLTNMLNGKDPETGEPLDDGNIRQQIITFLIAGHQTTSGLLSFALYFLVKNPRVLQKVAEEAARVLVDPVPSYKQVKQLKYVGMVLNEALRLWPVAPMFSLYAKEDTVLGGEYPLTKGDEVMVLVPQLHRDKTIWGDDVEEFRPERFENPSAIPQHAFKPFGNGQRACIGQQFALHSATLVLGMMLKHFDFEDHTNYELVIKESRTLKPEGFVVKAKSKGIPLGGIPSPSTEQSAKKVRKKAENAHNTPLLVLYGSNAGTAEGTARDLADIAMSKGFAPQVATLDSHAGNLPREGAVLIVTASYNGHPPDNAKQFVDWLDQASADEVKGVRYSVFGCGDKNWAGTYQKVPAFIDETLAAKGAENIADRGEADASDDFEGTYEEWRDHMWSDVAAYFGLDIENSEDNKSTLSLQFVDSAADMPLAKMHGAFSTNVVASKELQQPGSARSTRHLEIELPKEASYQEGDHLGVIPRYYEGIVNRVTARFGLSASQLIRLEAEEEKLAHLPLAKTVSVEELLQYVELQDPVTRTQLRAMAAKTVCPPHKVELEALLGKQAYKEQVLAKRLTMLELLEKYPACEMSFSEFIALLPSIRPRYYSISSSPRVDEKQASITVSVVSGPAWSGYGEYKGIASNYLAELQEGDTITCFISTPQSEFTLPKDPETPLIMVGPGTGVAPFRGFVQARKQLKEQGQSLGEAHLYFGCRSPHEDYLYQEELENAQSEGIITLHTAFSRMPNQPKTYVQHVMEQDGKKLIELLDQGAHFYICGDGSQMAPAVEATLMKSYADVHQVSEADARLWLQQLEEKGRYAKDVWLG

SEQ ID NO: 831 - DNA, 3147 bp, synthetic construct
  misc_feature 1..3147: note = variant of P450 oxidase from Bacillus megaterium
  source 1..3147: mol_type = other DNA
atgacaattaaggaaatgcctcagcctaagacgtttggagaacttaaaaatttaccgttattaaacacagataaaccggttcaagctttgatgcgtattgcggatgaattaggagaaatctttaaattcgaggcgcctggtagcgtaacgcgctatttatcaagtcagcgtctaattaaagaagcatgcgatgaatcacgctttgataaaaacttaagtcaagcgcttaaatttgcacgtgattttgttggagacgggctggttacaagctggacgcatgaaccgaattggaaaaaagcgcataatatcttagttccaagctttagtcagcatgcaatggggcgttatcatgcgatgatggtcgatatcgccgtgcagcttgttcaaaagtgggagcgtctaaatgcagatgagcatattgaagtatcggaagacatgacacgtttaacgcttgatacaattggtctttgcctgtttaactatcgctttaacagcttttaccgagatacgcctcatccatttattgtgagtgtggttcgtgcactggatgaagtaatgaacaagctgcagcgagcaaatccagacgacccagcttatgatgaaaacaagcgccagtgtcaagaagatatcaaggtgatgaacgactatgtagataaaattattgcagatcgcaaagcaaggggtgaacaaagtcatgatttattaacgcagatgctaaacggaaaagatggtgaaacgggtgagccgcttgatgacgggaacattcgtcagcaaattattacattcttaattgcgggacaccaaacgacaagtggtcttttatcatttgcgctgtatttcttagtgaaaaatccacgtgtattacaaaaagtagcagaagaagcagcacgagttctagtagatcctgttccaagctacaaacaagtcaaacagcttaaatatgttggcatggtcttaaacgaagcgctgcgcttatggccagtagcgcctatgttttccctatatgcaaaagaagatacggtgcttggaggagaatatcctttaacgaaaggcgacgaagtaatggttctggtgcctcagcttcaccgtgataaaacaatttggggagacgatgtggaggagttccgtccagagcgttttgaaaatccaagtgcgattccgcagcatgcgtttaaaccgtttggaaacggtcagcgtgcgtgtatcggtcagcagttcgctcttcatagtgcaacgctggtacttggtatgatgctaaaacactttgactttgaagatcatacaaactacgagctcgttattaaagaatcgcggacgttaaaacctgaaggctttgtggtaaaagcaaaatcgaaaggcattccgcttggcggtattccttcacctagcactgaacagtctgctaaaaaagtacgcaaaaaggcagaaaacgctcataatacgccgctgcttgtgctatacggttcaaatgcgggaacagctgaaggaacggcgcgtgatttagcagatattgcaatgagcaaaggatttgcaccgcaggtcgcaacgcttgattcacacgccggtaatcttccgcgcgaaggagctgtattaattgtaacggcgtcttataacggtcatccgcctgataacgcaaagcaatttgtcgactggttagaccaagcgtctgcggatgaagtaaaaggcgttcgctactccgtatttggatgcggcgataaaaattgggcggggacgtatcaaaaagtgcctgcttttatcgatgaaacgcttgccgctaaaggggcagaaaacatcgctgaccgcggtgaagcagatgcaagcgacgactttgaaggcacatatgaagaatggcgtgatcatatgtggagtgacgtagcagcctactttggtctcgacattgaaaacagtgaagataataaatctactctttcacttcaatttgtcgacagcgcggcggatatgccgcttgcgaaaatgcacggtgcgttttcaacgaacgtcgtagcaagcaaagaacttcaacagcctggcagtgcacgaagcacgcgacatcttgaaattgaacttccaaaagaagcttcttatcaagaaggagatcatttaggtgttattcctcgctattatgaaggaatagtaaaccgtgtaacagcaaggttcggcctaagcgcatcacagctgatccgtctggaagcagaagaagaaaaattagctcatttgccactcgctaaaacagtatccgtagaagagcttctgcaatacgtggagcttcaagatcctgttacgcgcacgcagcttcgcgcaatggctgctaaaacggtctgcccgccgcataaagtagagcttgaagccttgcttggcaagcaagcctacaaagaacaagtgctggcaaaacgtttaacaatgcttgaactgcttgaaaaatacccggcgtgtgaaatgagtttcagcgaatttatcgcccttctgccaagcatacgcccgcgctattactcgatttcttcatcacctcgtgtcgatgaaaaacaagcaagcatcacggtcagcgttgtctcaggaccggcgtggagcggatatggagaatataaaggaattgcgtcgaactatcttgccgagctgcaagaaggagatacgattacgtgctttatttccacaccgcagtcagagtttacgctgccaaaagaccctgaaacgccgcttatcatggtcggaccgggaacaggcgtcgcgccgtttagaggctttgtgcaggcgcgcaaacagctaaaagaacaaggacagtcacttggagaagcacatttatacttcggctgccgttcacctcatgaagactatctgtatcaagaagagcttgaaaacgcccaaagcgaaggcatcattacgcttcataccgctttttctcgcatgccgaatcagccgaaaacatacgttcagcacgtaatggaacaagacggcaagaaattgattgaacttcttgatcaaggagcgcacttctatatttgcggagacggaagccaaatggcacctgccgttgaagcaacgcttatgaaaagctatgctgacgttcaccaagtgagtgaagcagacgctcgcttatggctgcagcagctagaagaaaaaggccgatacgcaaaagacgtgtggctgggg

SEQ ID NO: 832 - protein, 1049 aa, synthetic construct
  REGION 1..1049: note = variant of P450 oxidase from Bacillus megaterium
MTIKEMPQPKTFGELKNLPLLNTDKPVQALMRIADELGEIFKFEAPGSVTRYLSSQRLIKEACDESRFDKNLSQALKFARDFVGDGLVTSWTHEPNWKKAHNILVPSFSQHAMGRYHAMMVDIAVQLVQKWERLNADEHIEVSEDMTRLTLDTIGLCLFNYRFNSFYRDTPHPFIVSVVRALDEVMNKLQRANPDDPAYDENKRQCQEDIKVMNDYVDKIIADRKARGEQSHDLLTQMLNGKDGETGEPLDDGNIRQQIITFLIAGHQTTSGLLSFALYFLVKNPRVLQKVAEEAARVLVDPVPSYKQVKQLKYVGMVLNEALRLWPVAPMFSLYAKEDTVLGGEYPLTKGDEVMVLVPQLHRDKTIWGDDVEEFRPERFENPSAIPQHAFKPFGNGQRACIGQQFALHSATLVLGMMLKHFDFEDHTNYELVIKESRTLKPEGFVVKAKSKGIPLGGIPSPSTEQSAKKVRKKAENAHNTPLLVLYGSNAGTAEGTARDLADIAMSKGFAPQVATLDSHAGNLPREGAVLIVTASYNGHPPDNAKQFVDWLDQASADEVKGVRYSVFGCGDKNWAGTYQKVPAFIDETLAAKGAENIADRGEADASDDFEGTYEEWRDHMWSDVAAYFGLDIENSEDNKSTLSLQFVDSAADMPLAKMHGAFSTNVVASKELQQPGSARSTRHLEIELPKEASYQEGDHLGVIPRYYEGIVNRVTARFGLSASQLIRLEAEEEKLAHLPLAKTVSVEELLQYVELQDPVTRTQLRAMAAKTVCPPHKVELEALLGKQAYKEQVLAKRLTMLELLEKYPACEMSFSEFIALLPSIRPRYYSISSSPRVDEKQASITVSVVSGPAWSGYGEYKGIASNYLAELQEGDTITCFISTPQSEFTLPKDPETPLIMVGPGTGVAPFRGFVQARKQLKEQGQSLGEAHLYFGCRSPHEDYLYQEELENAQSEGIITLHTAFSRMPNQPKTYVQHVMEQDGKKLIELLDQGAHFYICGDGSQMAPAVEATLMKSYADVHQVSEADARLWLQQLEEKGRYAKDVWLG

SEQ ID NO: 833 - DNA, 3147 bp, synthetic construct
  misc_feature 1..3147: note = variant of P450 oxidase from Bacillus megaterium
  source 1..3147: mol_type = other DNA
atgacaattaaggaaatgcctcagcctaagacgtttggagaacttaaaaatttaccgttattaaacacagataaaccggttcaagctttgatgcgtattgcggatgaattaggagaaatctttaaattcgaggcgcctggtagcgtaacgcgctatttatcaagtcagcgtctaattaaagaagcatgcgatgaatcacgctttgataaaaacttaagtcaagcgcttaaatttgcacgtgattttgttggagacgggctggttacaagctggacgcatgaaccgaattggaaaaaagcgcataatatcttagttccaagctttagtcagcatgcaatgatgcgttatcatgcgatgatggtcgatatcgccgtgcagcttgttcaaaagtgggagcgtctaaatgcagatgagcatattgaagtatcggaagacatgacacgtttaacgcttgatacaattggtctttgcctgtttaactatcgctttaacagcttttaccgagatacgcctcatccatttattgtgagtgtggttcgtgcactggatgaagtaatgaacaagctgcagcgagcaaatccagacgacccagcttatgatgaaaacaagcgccagtgtcaagaagatatcaaggtgatgaacgactatgtagataaaattattgcagatcgcaaagcaaggggtgaacaaagtcatgatttattaacgcagatgctaaacggaaaagatccagaaacgggtgagccgcttgatgacgggaacattcgtcagcaaattattacattcttaattgcgggacaccaaacgacaagtggtcttttatcatttgcgctgtatttcttagtgaaaaatccacgtgtattacaaaaagtagcagaagaagcagcacgagttctagtagatcctgttccaagctacaaacaagtcaaacagcttaaatatgttggcatggtcttaaacgaagcgctgcgcttatggccagtagcgcctatgttttccctatatgcaaaagaagatacggtgcttggaggagaatatcctttaacgaaaggcgacgaagtaatggttctggtgcctcagcttcaccgtgataaaacaatttggggagacgatgtggaggagttccgtccagagcgttttgaaaatccaagtgcgattccgcagcatgcgtttaaaccgtttggaaacggtcagcgtgcgtgtatcggtcagcagttcgctcttcatagtgcaacgctggtacttggtatgatgctaaaacactttgactttgaagatcatacaaactacgagctcgttattaaagaatcgcggacgttaaaacctgaaggctttgtggtaaaagcaaaatcgaaaggcattccgcttggcggtattccttcacctagcactgaacagtctgctaaaaaagtacgcaaaaaggcagaaaacgctcataatacgccgctgcttgtgctatacggttcaaatgcgggaacagctgaaggaacggcgcgtgatttagcagatattgcaatgagcaaaggatttgcaccgcaggtcgcaacgcttgattcacacgccggtaatcttccgcgcgaaggagctgtattaattgtaacggcgtcttataacggtcatccgcctgataacgcaaagcaatttgtcgactggttagaccaagcgtctgcggatgaagtaaaaggcgttcgctactccgtatttggatgcggcgataaaaattgggcggggacgtatcaaaaagtgcctgcttttatcgatgaaacgcttgccgctaaaggggcagaaaacatcgctgaccgcggtgaagcagatgcaagcgacgactttgaaggcacatatgaagaatggcgtgatcatatgtggagtgacgtagcagcctactttggtctcgacattgaaaacagtgaagataataaatctactctttcacttcaatttgtcgacagcgcggcggatatgccgcttgcgaaaatgcacggtgcgttttcaacgaacgtcgtagcaagcaaagaacttcaacagcctggcagtgcacgaagcacgcgacatcttgaaattgaacttccaaaagaagcttcttatcaagaaggagatcatttaggtgttattcctcgctattatgaaggaatagtaaaccgtgtaacagcaaggttcggcctaagcgcatcacagctgatccgtctggaagcagaagaagaaaaattagctcatttgccactcgctaaaacagtatccgtagaagagcttctgcaatacgtggagcttcaagatcctgttacgcgcacgcagcttcgcgcaatggctgctaaaacggtctgcccgccgcataaagtagagcttgaagccttgcttggcaagcaagcctacaaagaacaagtgctggcaaaacgtttaacaatgcttgaactgcttgaaaaatacccggcgtgtgaaatgagtttcagcgaatttatcgcccttctgccaagcatacgcccgcgctattactcgatttcttcatcacctcgtgtcgatgaaaaacaagcaagcatcacggtcagcgttgtctcaggaccggcgtggagcggatatggagaatataaaggaattgcgtcgaactatcttgccgagctgcaagaaggagatacgattacgtgctttatttccacaccgcagtcagagtttacgctgccaaaagaccctgaaacgccgcttatcatggtcggaccgggaacaggcgtcgcgccgtttagaggctttgtgcaggcgcgcaaacagctaaaagaacaaggacagtcacttggagaagcacatttatacttcggctgccgttcacctcatgaagactatctgtatcaagaagagcttgaaaacgcccaaagcgaaggcatcattacgcttcataccgctttttctcgcatgccgaatcagccgaaaacatacgttcagcacgtaatggaacaagacggcaagaaattgattgaacttcttgatcaaggagcgcacttctatatttgcggagacggaagccaaatggcacctgccgttgaagcaacgcttatgaaaagctatgctgacgttcaccaagtgagtgaagcagacgctcgcttatggctgcagcagctagaagaaaaaggccgatacgcaaaagacgtgtggctgggg

SEQ ID NO: 834 - protein, 1049 aa, synthetic construct
  REGION 1..1049: note = variant of P450 oxidase from Bacillus megaterium
MTIKEMPQPKTFGELKNLPLLNTDKPVQALMRIADELGEIFKFEAPGSVTRYLSSQRLIKEACDESRFDKNLSQALKFARDFVGDGLVTSWTHEPNWKKAHNILVPSFSQHAMMRYHAMMVDIAVQLVQKWERLNADEHIEVSEDMTRLTLDTIGLCLFNYRFNSFYRDTPHPFIVSVVRALDEVMNKLQRANPDDPAYDENKRQCQEDIKVMNDYVDKIIADRKARGEQSHDLLTQMLNGKDPETGEPLDDGNIRQQIITFLIAGHQTTSGLLSFALYFLVKNPRVLQKVAEEAARVLVDPVPSYKQVKQLKYVGMVLNEALRLWPVAPMFSLYAKEDTVLGGEYPLTKGDEVMVLVPQLHRDKTIWGDDVEEFRPERFENPSAIPQHAFKPFGNGQRACIGQQFALHSATLVLGMMLKHFDFEDHTNYELVIKESRTLKPEGFVVKAKSKGIPLGGIPSPSTEQSAKKVRKKAENAHNTPLLVLYGSNAGTAEGTARDLADIAMSKGFAPQVATLDSHAGNLPREGAVLIVTASYNGHPPDNAKQFVDWLDQASADEVKGVRYSVFGCGDKNWAGTYQKVPAFIDETLAAKGAENIADRGEADASDDFEGTYEEWRDHMWSDVAAYFGLDIENSEDNKSTLSLQFVDSAADMPLAKMHGAFSTNVVASKELQQPGSARSTRHLEIELPKEASYQEGDHLGVIPRYYEGIVNRVTARFGLSASQLIRLEAEEEKLAHLPLAKTVSVEELLQYVELQDPVTRTQLRAMAAKTVCPPHKVELEALLGKQAYKEQVLAKRLTMLELLEKYPACEMSFSEFIALLPSIRPRYYSISSSPRVDEKQASITVSVVSGPAWSGYGEYKGIASNYLAELQEGDTITCFISTPQSEFTLPKDPETPLIMVGPGTGVAPFRGFVQARKQLKEQGQSLGEAHLYFGCRSPHEDYLYQEELENAQSEGIITLHTAFSRMPNQPKTYVQHVMEQDGKKLIELLDQGAHFYICGDGSQMAPAVEATLMKSYADVHQVSEADARLWLQQLEEKGRYAKDVWLG

SEQ ID NO: 835 - DNA, 3147 bp, synthetic construct
  misc_feature 1..3147: note = variant of P450 oxidase from Bacillus megaterium
  source 1..3147: mol_type = other DNA
atgacaattaaggaaatgcctcagcctaagacgtttggagaacttaaaaatttaccgttattaaacacagataaaccggttcaagctttgatgcgtattgcggatgaattaggagaaatctttaaattcgaggcgcctggtagcgtaacgcgctatttatcaagtcagcgtctaattaaagaagcatgcgatgaatcacgctttgataaaaacttaagtcaagcgcttaaatttgcacgtgattttgttggagacgggctggttacaagctggacgcatgaaccgaattggaaaaaagcgcataatatcttagttccaagctttagtgtgcatgcaatggggcgttatcatgcgatgatggtcgatatcgccgtgcagcttgttcaaaagtgggagcgtctaaatgcagatgagcatattgaagtatcggaagacatgacacgtttaacgcttgatacaattggtctttgcctgtttaactatcgctttaacagcttttaccgagatacgcctcatccatttattgtgagtgtggttcgtgcactggatgaagtaatgaacaagctgcagcgagcaaatccagacgacccagcttatgatgaaaacaagcgccagtgtcaagaagatatcaaggtgatgaacgactatgtagataaaattattgcagatcgcaaagcaaggggtgaacaaagtcatgatttattaacgcagatgctaaacggaaaagatccagaaacgggtgagccgcttgatgacgggaacattcgtcagcaaattattacattcttaattgcgggacaccaaacgacaagtggtcttttatcatttgcgctgtatttcttagtgaaaaatccacgtgtattacaaaaagtagcagaagaagcagcacgagttctagtagatcctgttccaagctacaaacaagtcaaacagcttaaatatgttggcatggtcttaaacgaagcgctgcgcttatggccagtagcgcctatgttttccctatatgcaaaagaagatacggtgcttggaggagaatatcctttaacgaaaggcgacgaagtaatggttctggtgcctcagcttcaccgtgataaaacaatttggggagacgatgtggaggagttccgtccagagcgttttgaaaatccaagtgcgattccgcagcatgcgtttaaaccgtttggaaacggtcagcgtgcgtgtatcggtcagcagttcgctcttcatagtgcaacgctggtacttggtatgatgctaaaacactttgactttgaagatcatacaaactacgagctcgttattaaagaatcgcggacgttaaaacctgaaggctttgtggtaaaagcaaaatcgaaaggcattccgcttggcggtattccttcacctagcactgaacagtctgctaaaaaagtacgcaaaaaggcagaaaacgctcataatacgccgctgcttgtgctatacggttcaaatgcgggaacagctgaaggaacggcgcgtgatttagcagatattgcaatgagcaaaggatttgcaccgcaggtcgcaacgcttgattcacacgccggtaatcttccgcgcgaaggagctgtattaattgtaacggcgtcttataacggtcatccgcctgataacgcaaagcaatttgtcgactggttagaccaagcgtctgcggatgaagtaaaaggcgttcgctactccgtatttggatgcggcgataaaaattgggcggggacgtatcaaaaagtgcctgcttttatcgatgaaacgcttgccgctaaaggggcagaaaacatcgctgaccgcggtgaagcagatgcaagcgacgactttgaaggcacatatgaagaatggcgtgatcatatgtggagtgacgtagcagcctactttggtctcgacattgaaaacagtgaagataataaatctactctttcacttcaatttgtcgacagcgcggcggatatgccgcttgcgaaaatgcacggtgcgttttcaacgaacgtcgtagcaagcaaagaacttcaacagcctggcagtgcacgaagcacgcgacatcttgaaattgaacttccaaaagaagcttcttatcaagaaggagatcatttaggtgttattcctcgctattatgaaggaatagtaaaccgtgtaacagcaaggttcggcctaagcgcatcacagctgatccgtctggaagcagaagaagaaaaattagctcatttgccactcgctaaaacagtatccgtagaagagcttctgcaatacgtggagcttcaagatcctgttacgcgcacgcagcttcgcgcaatggctgctaaaacggtctgcccgccgcataaagtagagcttgaagccttgcttggcaagcaagcctacaaagaacaagtgctggcaaaacgtttaacaatgcttgaactgcttgaaaaatacccggcgtgtgaaatgagtttcagcgaatttatcgcccttctgccaagcatacgcccgcgctattactcgatttcttcatcacctcgtgtcgatgaaaaacaagcaagcatcacggtcagcgttgtctcaggaccggcgtggagcggatatggagaatataaaggaattgcgtcgaactatcttgccgagctgcaagaaggagatacgattacgtgctttatttccacaccgcagtcagagtttacgctgccaaaagaccctgaaacgccgcttatcatggtcggaccgggaacaggcgtcgcgccgtttagaggctttgtgcaggcgcgcaaacagctaaaagaacaaggacagtcacttggagaagcacatttatacttcggctgccgttcacctcatgaagactatctgtatcaagaagagcttgaaaacgcccaaagcgaaggcatcattacgcttcataccgctttttctcgcatgccgaatcagccgaaaacatacgttcagcacgtaatggaacaagacggcaagaaattgattgaacttcttgatcaaggagcgcacttctatatttgcggagacggaagccaaatggcacctgccgttgaagcaacgcttatgaaaagctatgctgacgttcaccaagtgagtgaagcagacgctcgcttatggctgcagcagctagaagaaaaaggccgatacgcaaaagacgtgtggctgggg

SEQ ID NO: 836 - protein, 1049 aa, synthetic construct
  REGION 1..1049: note = variant of P450 oxidase from Bacillus megaterium
MTIKEMPQPKTFGELKNLPLLNTDKPVQALMRIADELGEIFKFEAPGSVTRYLSSQRLIKEACDESRFDKNLSQALKFARDFVGDGLVTSWTHEPNWKKAHNILVPSFSVHAMGRYHAMMVDIAVQLVQKWERLNADEHIEVSEDMTRLTLDTIGLCLFNYRFNSFYRDTPHPFIVSVVRALDEVMNKLQRANPDDPAYDENKRQCQEDIKVMNDYVDKIIADRKARGEQSHDLLTQMLNGKDPETGEPLDDGNIRQQIITFLIAGHQTTSGLLSFALYFLVKNPRVLQKVAEEAARVLVDPVPSYKQVKQLKYVGMVLNEALRLWPVAPMFSLYAKEDTVLGGEYPLTKGDEVMVLVPQLHRDKTIWGDDVEEFRPERFENPSAIPQHAFKPFGNGQRACIGQQFALHSATLVLGMMLKHFDFEDHTNYELVIKESRTLKPEGFVVKAKSKGIPLGGIPSPSTEQSAKKVRKKAENAHNTPLLVLYGSNAGTAEGTARDLADIAMSKGFAPQVATLDSHAGNLPREGAVLIVTASYNGHPPDNAKQFVDWLDQASADEVKGVRYSVFGCGDKNWAGTYQKVPAFIDETLAAKGAENIADRGEADASDDFEGTYEEWRDHMWSDVAAYFGLDIENSEDNKSTLSLQFVDSAADMPLAKMHGAFSTNVVASKELQQPGSARSTRHLEIELPKEASYQEGDHLGVIPRYYEGIVNRVTARFGLSASQLIRLEAEEEKLAHLPLAKTVSVEELLQYVELQDPVTRTQLRAMAAKTVCPPHKVELEALLGKQAYKEQVLAKRLTMLELLEKYPACEMSFSEFIALLPSIRPRYYSISSSPRVDEKQASITVSVVSGPAWSGYGEYKGIASNYLAELQEGDTITCFISTPQSEFTLPKDPETPLIMVGPGTGVAPFRGFVQARKQLKEQGQSLGEAHLYFGCRSPHEDYLYQEELENAQSEGIITLHTAFSRMPNQPKTYVQHVMEQDGKKLIELLDQGAHFYICGDGSQMAPAVEATLMKSYADVHQVSEADARLWLQQLEEKGRYAKDVWLG

SEQ ID NO: 837 - DNA, 3147 bp, synthetic construct
  misc_feature 1..3147: note = variant of P450 oxidase from Bacillus megaterium
  source 1..3147: mol_type = other DNA
atgacaattaaggaaatgcctcagcctaagacgtttggagaacttaaaaatttaccgttattaaacacagataaaccggttcaagctttgatgcgtattgcggatgaattaggagaaatctttaaattcgaggcgcctggtagcgtaacgcgctatttatcaagtcagcgtctaattaaagaagcatgcgatgaatcacgctttgataaaaacttaagtcaagcgcttaaatttgcacgtgattttgttggagacgggctggttacaagctggacgcatgaaccgaattggaaaaaagcgcataatatcttagttccaagctttagtcagcatgcaatggggcgttatcatgcgatgatggtcgatatcgccgtgcagcttgttcaaaagtgggagcgtctaaatgcagatgagcatattgaagtatcggaagacatgacacgtttaacgcttgatacaattggtctttgcctgtttaactatcgctttaacagcttttaccgagatacgcctcatccatttattgtgagtgtggttcgtgcactggatgaagtaatgaacaagctgcagcgagcaaatccagacgacccagcttatgatgaaaacaagcgccagtgtcaagaagatatcaaggtgatgaacgactatgtagataaaattattgcagatcgcaaagcaaggggtgaacaaagtcatgatttattaacgcagatgctaaacggaaaagatccagaaacgggtatgccgcttgatgacgggaacattcgtcagcaaattattacattcttaattgcgggacaccaaacgacaagtggtcttttatcatttgcgctgtatttcttagtgaaaaatccacgtgtattacaaaaagtagcagaagaagcagcacgagttctagtagatcctgttccaagctacaaacaagtcaaacagcttaaatatgttggcatggtcttaaacgaagcgctgcgcttatggccagtagcgcctatgttttccctatatgcaaaagaagatacggtgcttggaggagaatatcctttaacgaaaggcgacgaagtaatggttctggtgcctcagcttcaccgtgataaaacaatttggggagacgatgtggaggagttccgtccagagcgttttgaaaatccaagtgcgattccgcagcatgcgtttaaaccgtttggaaacggtcagcgtgcgtgtatcggtcagcagttcgctcttcatagtgcaacgctggtacttggtatgatgctaaaacactttgactttgaagatcatacaaactacgagctcgttattaaagaatcgcggacgttaaaacctgaaggctttgtggtaaaagcaaaatcgaaaggcattccgcttggcggtattccttcacctagcactgaacagtctgctaaaaaagtacgcaaaaaggcagaaaacgctcataatacgccgctgcttgtgctatacggttcaaatgcgggaacagctgaaggaacggcgcgtgatttagcagatattgcaatgagcaaaggatttgcaccgcaggtcgcaacgcttgattcacacgccggtaatcttccgcgcgaaggagctgtattaattgtaacggcgtcttataacggtcatccgcctgataacgcaaagcaatttgtcgactggttagaccaagcgtctgcggatgaagtaaaaggcgttcgctactccgtatttggatgcggcgataaaaattgggcggggacgtatcaaaaagtgcctgcttttatcgatgaaacgcttgccgctaaaggggcagaaaacatcgctgaccgcggtgaagcagatgcaagcgacgactttgaaggcacatatgaagaatggcgtgatcatatgtggagtgacgtagcagcctactttggtctcgacattgaaaacagtgaagataataaatctactctttcacttcaatttgtcgacagcgcggcggatatgccgcttgcgaaaatgcacggtgcgttttcaacgaacgtcgtagcaagcaaagaacttcaacagcctggcagtgcacgaagcacgcgacatcttgaaattgaacttccaaaagaagcttcttatcaagaaggagatcatttaggtgttattcctcgctattatgaaggaatagtaaaccgtgtaacagcaaggttcggcctaagcgcatcacagctgatccgtctggaagcagaagaagaaaaattagctcatttgccactcgctaaaacagtatccgtagaagagcttctgcaatacgtggagcttcaagatcctgttacgcgcacgcagcttcgcgcaatggctgctaaaacggtctgcccgccgcataaagtagagcttgaagccttgcttggcaagcaagcctacaaagaacaagtgctggcaaaacgtttaacaatgcttgaactgcttgaaaaatacccggcgtgtgaaatgagtttcagcgaatttatcgcccttctgccaagcatacgcccgcgctattactcgatttcttcatcacctcgtgtcgatgaaaaacaagcaagcatcacggtcagcgttgtctcaggaccggcgtggagcggatatggagaatataaaggaattgcgtcgaactatcttgccgagctgcaagaaggagatacgattacgtgctttatttccacaccgcagtcagagtttacgctgccaaaagaccctgaaacgccgcttatcatggtcggaccgggaacaggcgtcgcgccgtttagaggctttgtgcaggcgcgcaaacagctaaaagaacaaggacagtcacttggagaagcacatttatacttcggctgccgttcacctcatgaagactatctgtatcaagaagagcttgaaaacgcccaaagcgaaggcatcattacgcttcataccgctttttctcgcatgccgaatcagccgaaaacatacgttcagcacgtaatggaacaagacggcaagaaattgattgaacttcttgatcaaggagcgcacttctatatttgcggagacggaagccaaatggcacctgccgttgaagcaacgcttatgaaaagctatgctgacgttcaccaagtgagtgaagcagacgctcgcttatggctgcagcagctagaagaaaaaggccgatacgcaaaagacgtgtggctgggg

SEQ ID NO: 838 - protein, 1049 aa, synthetic construct
  REGION 1..1049: note = variant of P450 oxidase from Bacillus megaterium
MTIKEMPQPKTFGELKNLPLLNTDKPVQALMRIADELGEIFKFEAPGSVTRYLSSQRLIKEACDESRFDKNLSQALKFARDFVGDGLVTSWTHEPNWKKAHNILVPSFSQHAMGRYHAMMVDIAVQLVQKWERLNADEHIEVSEDMTRLTLDTIGLCLFNYRFNSFYRDTPHPFIVSVVRALDEVMNKLQRANPDDPAYDENKRQCQEDIKVMNDYVDKIIADRKARGEQSHDLLTQMLNGKDPETGMPLDDGNIRQQIITFLIAGHQTTSGLLSFALYFLVKNPRVLQKVAEEAARVLVDPVPSYKQVKQLKYVGMVLNEALRLWPVAPMFSLYAKEDTVLGGEYPLTKGDEVMVLVPQLHRDKTIWGDDVEEFRPERFENPSAIPQHAFKPFGNGQRACIGQQFALHSATLVLGMMLKHFDFEDHTNYELVIKESRTLKPEGFVVKAKSKGIPLGGIPSPSTEQSAKKVRKKAENAHNTPLLVLYGSNAGTAEGTARDLADIAMSKGFAPQVATLDSHAGNLPREGAVLIVTASYNGHPPDNAKQFVDWLDQASADEVKGVRYSVFGCGDKNWAGTYQKVPAFIDETLAAKGAENIADRGEADASDDFEGTYEEWRDHMWSDVAAYFGLDIENSEDNKSTLSLQFVDSAADMPLAKMHGAFSTNVVASKELQQPGSARSTRHLEIELPKEASYQEGDHLGVIPRYYEGIVNRVTARFGLSASQLIRLEAEEEKLAHLPLAKTVSVEELLQYVELQDPVTRTQLRAMAAKTVCPPHKVELEALLGKQAYKEQVLAKRLTMLELLEKYPACEMSFSEFIALLPSIRPRYYSISSSPRVDEKQASITVSVVSGPAWSGYGEYKGIASNYLAELQEGDTITCFISTPQSEFTLPKDPETPLIMVGPGTGVAPFRGFVQARKQLKEQGQSLGEAHLYFGCRSPHEDYLYQEELENAQSEGIITLHTAFSRMPNQPKTYVQHVMEQDGKKLIELLDQGAHFYICGDGSQMAPAVEATLMKSYADVHQVSEADARLWLQQLEEKGRYAKDVWLG

SEQ ID NO: 839 - DNA, 3147 bp, synthetic construct
  misc_feature 1..3147: note = variant of P450 oxidase from Bacillus megaterium
  source 1..3147: mol_type = other DNA
atgacaattaaggaaatgcctcagcctaagacgtttggagaacttaaaaatttaccgttattaaacacagataaaccggttcaagctttgatgcgtattgcggatgaattaggagaaatctttaaattcgaggcgcctggtagcgtaacgcgctatttatcaagtcagcgtctaattaaagaagcatgcgatgaatcacgctttgataaaaacttaagtcaagcgcttaaatttgcacgtgattttgttggagacgggctggttacaagctggacgcatgaaccgaattggaaaaaagcgcatgctatcttagttccaagctttagtcagcatgcaatggggcgttatcatgcgatgatggtcgatatcgccgtgcagcttgttcaaaagtgggagcgtctaaatgcagatgagcatattgaagtatcggaagacatgacacgtttaacgcttgatacaattggtctttgcctgtttaactatcgctttaacagcttttaccgagatacgcctcatccatttattgtgagtgtggttcgtgcactggatgaagtaatgaacaagctgcagcgagcaaatccagacgacccagcttatgatgaaaacaagcgccagtgtcaagaagatatcaaggtgatgaacgactatgtagataaaattattgcagatcgcaaagcaaggggtgaacaaagtcatgatttattaacgcagatgctaaacggaaaagatccagaaacgggtgagccgcttgatgacgggaacattcgtcagcaaattattacattcttaattgcgggacaccaaacgacaagtggtcttttatcatttgcgctgtatttcttagtgaaaaatccacgtgtattacaaaaagtagcagaagaagcagcacgagttctagtagatcctgttccaagctacaaacaagtcaaacagcttaaatatgttggcatggtcttaaacgaagcgctgcgcttatggccagtagcgcctatgttttccctatatgcaaaagaagatacggtgcttggaggagaatatcctttaacgaaaggcgacgaagtaatggttctggtgcctcagcttcaccgtgataaaacaatttggggagacgatgtggaggagttccgtccagagcgttttgaaaatccaagtgcgattccgcagcatgcgtttaaaccgtttggaaacggtcagcgtgcgtgtatcggtcagcagttcgctcttcatagtgcaacgctggtacttggtatgatgctaaaacactttgactttgaagatcatacaaactacgagctcgttattaaagaatcgcggacgttaaaacctgaaggctttgtggtaaaagcaaaatcgaaaggcattccgcttggcggtattccttcacctagcactgaacagtctgctaaaaaagtacgcaaaaaggcagaaaacgctcataatacgccgctgcttgtgctatacggttcaaatgcgggaacagctgaaggaacggcgcgtgatttagcagatattgcaatgagcaaaggatttgcaccgcaggtcgcaacgcttgattcacacgccggtaatcttccgcgcgaaggagctgtattaattgtaacggcgtcttataacggtcatccgcctgataacgcaaagcaatttgtcgactggttagaccaagcgtctgcggatgaagtaaaaggcgttcgctactccgtatttggatgcggcgataaaaattgggcggggacgtatcaaaaagtgcctgcttttatcgatgaaacgcttgccgctaaaggggcagaaaacatcgctgaccgcggtgaagcagatgcaagcgacgactttgaaggcacatatgaagaatggcgtgatcatatgtggagtgacgtagcagcctactttggtctcgacattgaaaacagtgaagataataaatctactctttcacttcaatttgtcgacagcgcggcggatatgccgcttgcgaaaatgcacggtgcgttttcaacgaacgtcgtagcaagcaaagaacttcaacagcctggcagtgcacgaagcacgcgacatcttgaaattgaacttccaaaagaagcttcttatcaagaaggagatcatttaggtgttattcctcgctattatgaaggaatagtaaaccgtgtaacagcaaggttcggcctaagcgcatcacagctgatccgtctggaagcagaagaagaaaaattagctcatttgccactcgctaaaacagtatccgtagaagagcttctgcaatacgtggagcttcaagatcctgttacgcgcacgcagcttcgcgcaatggctgctaaaacggtctgcccgccgcataaagtagagcttgaagccttgcttggcaagcaagcctacaaagaacaagtgctggcaaaacgtttaacaatgcttgaactgcttgaaaaatacccggcgtgtgaaatgagtttcagcgaatttatcgcccttctgccaagcatacgcccgcgctattactcgatttcttcatcacctcgtgtcgatgaaaaacaagcaagcatcacggtcagcgttgtctcaggaccggcgtggagcggatatggagaatataaaggaattgcgtcgaactatcttgccgagctgcaagaaggagatacgattacgtgctttatttccacaccgcagtcagagtttacgctgccaaaagaccctgaaacgccgcttatcatggtcggaccgggaacaggcgtcgcgccgtttagaggctttgtgcaggcgcgcaaacagctaaaagaacaaggacagtcacttggagaagcacatttatacttcggctgccgttcacctcatgaagactatctgtatcaagaagagcttgaaaacgcccaaagcgaaggcatcattacgcttcataccgctttttctcgcatgccgaatcagccgaaaacatacgttcagcacgtaatggaacaagacggcaagaaattgattgaacttcttgatcaaggagcgcacttctatatttgcggagacggaagccaaatggcacctgccgttgaagcaacgcttatgaaaagctatgctgacgttcaccaagtgagtgaagcagacgctcgcttatggctgcagcagctagaagaaaaaggccgatacgcaaaagacgtgtggctgggg

SEQ ID NO: 840 - protein, 1049 aa, synthetic construct
  REGION 1..1049: note = variant of P450 oxidase from Bacillus megaterium
MTIKEMPQPKTFGELKNLPLLNTDKPVQALMRIADELGEIFKFEAPGSVTRYLSSQRLIKEACDESRFDKNLSQALKFARDFVGDGLVTSWTHEPNWKKAHAILVPSFSQHAMGRYHAMMVDIAVQLVQKWERLNADEHIEVSEDMTRLTLDTIGLCLFNYRFNSFYRDTPHPFIVSVVRALDEVMNKLQRANPDDPAYDENKRQCQEDIKVMNDYVDKIIADRKARGEQSHDLLTQMLNGKDPETGEPLDDGNIRQQIITFLIAGHQTTSGLLSFALYFLVKNPRVLQKVAEEAARVLVDPVPSYKQVKQLKYVGMVLNEALRLWPVAPMFSLYAKEDTVLGGEYPLTKGDEVMVLVPQLHRDKTIWGDDVEEFRPERFENPSAIPQHAFKPFGNGQRACIGQQFALHSATLVLGMMLKHFDFEDHTNYELVIKESRTLKPEGFVVKAKSKGIPLGGIPSPSTEQSAKKVRKKAENAHNTPLLVLYGSNAGTAEGTARDLADIAMSKGFAPQVATLDSHAGNLPREGAVLIVTASYNGHPPDNAKQFVDWLDQASADEVKGVRYSVFGCGDKNWAGTYQKVPAFIDETLAAKGAENIADRGEADASDDFEGTYEEWRDHMWSDVAAYFGLDIENSEDNKSTLSLQFVDSAADMPLAKMHGAFSTNVVASKELQQPGSARSTRHLEIELPKEASYQEGDHLGVIPRYYEGIVNRVTARFGLSASQLIRLEAEEEKLAHLPLAKTVSVEELLQYVELQDPVTRTQLRAMAAKTVCPPHKVELEALLGKQAYKEQVLAKRLTMLELLEKYPACEMSFSEFIALLPSIRPRYYSISSSPRVDEKQASITVSVVSGPAWSGYGEYKGIASNYLAELQEGDTITCFISTPQSEFTLPKDPETPLIMVGPGTGVAPFRGFVQARKQLKEQGQSLGEAHLYFGCRSPHEDYLYQEELENAQSEGIITLHTAFSRMPNQPKTYVQHVMEQDGKKLIELLDQGAHFYICGDGSQMAPAVEATLMKSYADVHQVSEADARLWLQQLEEKGRYAKDVWLG

SEQ ID NO: 841 - DNA, 3147 bp, synthetic construct
  misc_feature 1..3147: note = variant of P450 oxidase from Bacillus megaterium
  source 1..3147: mol_type = other DNA
atgacaattaaggaaatgcctcagcctaagacgtttggagaacttaaaaatttaccgttattaaacacagataaaccggttcaagctttgatgcgtattgcggatgaattaggagaaatctttaaattcgaggcgcctggtagcgtaacgcgctatttatcaagtcagcgtctaattaaagaagcatgcgatgaatcacgctttgataaaaacttaagtcaagcgcttaaatttgcacgtgattttgttggagacgggctggttacaagctggacgcatgaaccgaattggaaaaaagcgcataatatcttagttccaagctttagtcagcatgcaatggggcgttatcatgcgatgatggtcgatatcgccgtgcagcttgttcaaaagtgggagcgtctaaatgcagatgagcatattgaagtatcggaagacatgacacgtttaacgcttgatacaattggtctttgcctgtttaactatcgctttaacagcttttaccgagatacgcctcatccatttattgtgagtgtggttcgtgcactggatgaagtaatgaacaagctgcagcgagcaaatccagacgacccagcttatgatgaaaacaagcgccagtgtcaagaagatatcaaggtgatgaacgactatgtagataaaattattgcagatcgcaaagcaaggggtgaacaaagtcatgatttattaacgcagatgctaaacggaaaagatccagaaacgggtgagccgcttgatgacgggaacattcgtcagcaaattattacattcttaattgcgggacaccaaacgacaagtggtcttttatcatttgcgctgtatttcttagtgaaaaatccacgtgtattacaaaaagtagcagaagaagcagcacgagttctagtagatcctgttccaagctacaaacaagtcaaacagcttaaatatgttggcatggtcttaaacgaagcgctgcgcttatggccagtagcgcctatgttttccctatatgcaaaagaagatacggtgcttggaggagaatatgagttaacgaaaggcgacgaagtaatggttctggtgcctcagcttcaccgtgataaaacaatttggggagacgatgtggaggagttccgtccagagcgttttgaaaatccaagtgcgattccgcagcatgcgtttaaaccgtttggaaacggtcagcgtgcgtgtatcggtcagcagttcgctcttcatagtgcaacgctggtacttggtatgatgctaaaacactttgactttgaagatcatacaaactacgagctcgttattaaagaatcgcggacgttaaaacctgaaggctttgtggtaaaagcaaaatcgaaaggcattccgcttggcggtattccttcacctagcactgaacagtctgctaaaaaagtacgcaaaaaggcagaaaacgctcataatacgccgctgcttgtgctatacggttcaaatgcgggaacagctgaaggaacggcgcgtgatttagcagatattgcaatgagcaaaggatttgcaccgcaggtcgcaacgcttgattcacacgccggtaatcttccgcgcgaaggagctgtattaattgtaacggcgtcttataacggtcatccgcctgataacgcaaagcaatttgtcgactggttagaccaagcgtctgcggatgaagtaaaaggcgttcgctactccgtatttggatgcggcgataaaaattgggcggggacgtatcaaaaagtgcctgcttttatcgatgaaacgcttgccgctaaaggggcagaaaacatcgctgaccgcggtgaagcagatgcaagcgacgactttgaaggcacatatgaagaatggcgtgatcatatgtggagtgacgtagcagcctactttggtctcgacattgaaaacagtgaagataataaatctactctttcacttcaatttgtcgacagcgcggcggatatgccgcttgcgaaaatgcacggtgcgttttcaacgaacgtcgtagcaagcaaagaacttcaacagcctggcagtgcacgaagcacgcgacatcttgaaattgaacttccaaaagaagcttcttatcaagaaggagatcatttaggtgttattcctcgctattatgaaggaatagtaaaccgtgtaacagcaaggttcggcctaagcgcatcacagctgatccgtctggaagcagaagaagaaaaattagctcatttgccactcgctaaaacagtatccgtagaagagcttctgcaatacgtggagcttcaagatcctgttacgcgcacgcagcttcgcgcaatggctgctaaaacggtctgcccgccgcataaagtagagcttgaagccttgcttggcaagcaagcctacaaagaacaagtgctggcaaaacgtttaacaatgcttgaactgcttgaaaaatacccggcgtgtgaaatgagtttcagcgaatttatcgcccttctgccaagcatacgcccgcgctattactcgatttcttcatcacctcgtgtcgatgaaaaacaagcaagcatcacggtcagcgttgtctcaggaccggcgtggagcggatatggagaatataaaggaattgcgtcgaactatcttgccgagctgcaagaaggagatacgattacgtgctttatttccacaccgcagtcagagtttacgctgccaaaagaccctgaaacgccgcttatcatggtcggaccgggaacaggcgtcgcgccgtttagaggctttgtgcaggcgcgcaaacagctaaaagaacaaggacagtcacttggagaagcacatttatacttcggctgccgttcacctcatgaagactatctgtatcaagaagagcttgaaaacgcccaaagcgaaggcatcattacgcttcataccgctttttctcgcatgccgaatcagccgaaaacatacgttcagcacgtaatggaacaagacggcaagaaattgattgaacttcttgatcaaggagcgcacttctatatttgcggagacggaagccaaatggcacctgccgttgaagcaacgcttatgaaaagctatgctgacgttcaccaagtgagtgaagcagacgctcgcttatggctgcagcagctagaagaaaaaggccgatacgcaaaagacgtgtggctgggg

SEQ ID NO: 842 - protein, 1049 aa, synthetic construct
  REGION 1..1049: note = variant of P450 oxidase from Bacillus megaterium
MTIKEMPQPKTFGELKNLPLLNTDKPVQALMRIADELGEIFKFEAPGSVTRYLSSQRLIKEACDESRFDKNLSQALKFARDFVGDGLVTSWTHEPNWKKAHNILVPSFSQHAMGRYHAMMVDIAVQLVQKWERLNADEHIEVSEDMTRLTLDTIGLCLFNYRFNSFYRDTPHPFIVSVVRALDEVMNKLQRANPDDPAYDENKRQCQEDIKVMNDYVDKIIADRKARGEQSHDLLTQMLNGKDPETGEPLDDGNIRQQIITFLIAGHQTTSGLLSFALYFLVKNPRVLQKVAEEAARVLVDPVPSYKQVKQLKYVGMVLNEALRLWPVAPMFSLYAKEDTVLGGEYELTKGDEVMVLVPQLHRDKTIWGDDVEEFRPERFENPSAIPQHAFKPFGNGQRACIGQQFALHSATLVLGMMLKHFDFEDHTNYELVIKESRTLKPEGFVVKAKSKGIPLGGIPSPSTEQSAKKVRKKAENAHNTPLLVLYGSNAGTAEGTARDLADIAMSKGFAPQVATLDSHAGNLPREGAVLIVTASYNGHPPDNAKQFVDWLDQASADEVKGVRYSVFGCGDKNWAGTYQKVPAFIDETLAAKGAENIADRGEADASDDFEGTYEEWRDHMWSDVAAYFGLDIENSEDNKSTLSLQFVDSAADMPLAKMHGAFSTNVVASKELQQPGSARSTRHLEIELPKEASYQEGDHLGVIPRYYEGIVNRVTARFGLSASQLIRLEAEEEKLAHLPLAKTVSVEELLQYVELQDPVTRTQLRAMAAKTVCPPHKVELEALLGKQAYKEQVLAKRLTMLELLEKYPACEMSFSEFIALLPSIRPRYYSISSSPRVDEKQASITVSVVSGPAWSGYGEYKGIASNYLAELQEGDTITCFISTPQSEFTLPKDPETPLIMVGPGTGVAPFRGFVQARKQLKEQGQSLGEAHLYFGCRSPHEDYLYQEELENAQSEGIITLHTAFSRMPNQPKTYVQHVMEQDGKKLIELLDQGAHFYICGDGSQMAPAVEATLMKSYADVHQVSEADARLWLQQLEEKGRYAKDVWLG

SEQ ID NO: 843 - DNA, 3147 bp, synthetic construct
  misc_feature 1..3147: note = variant of P450 oxidase from Bacillus megaterium
  source 1..3147: mol_type = other DNA
atgacaattaaggaaatgcctcagcctaagacgtttggagaacttaaaaatttaccgttattaaacacagataaaccggttcaagctttgatgcgtattgcggatgaattaggagaaatctttaaattcgaggcgcctggtagcgtaacgcgctatttatcaagtcagcgtctaattaaagaagcatgcgatgaatcacgctttgataaaaacttaagtcaagcgcttaaatttgcacgtgattttgttggagacgggctggttacaagctggacgcatgaaccgaattggaaaaaagcgcataatatcttagttccaagctttagtcagcatgcaatggggcgttatcatgcgatgatggtcgatatcgccgtgcagcttgttcaaaagtgggagcgtctaaatgcagatgagcatattgaagtatcggaagacatgacacgtttaacgcttgatacaattggtctttgcctgtttaactatcgctttaacagcttttaccgagatacgcctcatccatttattgtgagtgtggttcgtgcactggatgaagtaatgaacaagctgcagcgagcaaatccagacgacccagcttatgatgaaaacaagcgccagtgtcaagaagatatcaaggtgatgaacgactatgtagataaaattattgcagatcgcaaagcaaggggtgaacaaagtcatgatttattaacgcagatgctaaacggaaaagatccagaaacgggtgagccgcttgatgacgggaacattcgtcagcaaattattacattcttaattgcgggacaccaaacgacaagtggtcttttatcatttgcgctgtatttcttagtgaaaaatccacgtgtattacaaaaagtagcagaagaagcagcacgagttctagtagatcctgttccaagctacaaacaagtcaaacagcttaaatatgttggcatggtcttaaacgaagcgctgcgcttatggccagtagcgcctatgttttccctatatgcaaaagaagatacggtgcttggaggagaatatagtttaacgaaaggcgacgaagtaatggttctggtgcctcagcttcaccgtgataaaacaatttggggagacgatgtggaggagttccgtccagagcgttttgaaaatccaagtgcgattccgcagcatgcgtttaaaccgtttggaaacggtcagcgtgcgtgtatcggtcagcagttcgctcttcatagtgcaacgctggtacttggtatgatgctaaaacactttgactttgaagatcatacaaactacgagctcgttattaaagaatcgcggacgttaaaacctgaaggctttgtggtaaaagcaaaatcgaaaggcattccgcttggcggtattccttcacctagcactgaacagtctgctaaaaaagtacgcaaaaaggcagaaaacgctcataatacgccgctgcttgtgctatacggttcaaatgcgggaacagctgaaggaacggcgcgtgatttagcagatattgcaatgagcaaaggatttgcaccgcaggtcgcaacgcttgattcacacgccggtaatcttccgcgcgaaggagctgtattaattgtaacggcgtcttataacggtcatccgcctgataacgcaaagcaatttgtcgactggttagaccaagcgtctgcggatgaagtaaaaggcgttcgctactccgtatttggatgcggcgataaaaattgggcggggacgtatcaaaaagtgcctgcttttatcgatgaaacgcttgccgctaaaggggcagaaaacatcgctgaccgcggtgaagcagatgcaagcgacgactttgaaggcacatatgaagaatggcgtgatcatatgtggagtgacgtagcagcctactttggtctcgacattgaaaacagtgaagataataaatctactctttcacttcaatttgtcgacagcgcggcggatatgccgcttgcgaaaatgcacggtgcgttttcaacgaacgtcgtagcaagcaaagaacttcaacagcctggcagtgcacgaagcacgcgacatcttgaaattgaacttccaaaagaagcttcttatcaagaaggagatcatttaggtgttattcctcgctattatgaaggaatagtaaaccgtgtaacagcaaggttcggcctaagcgcatcacagctgatccgtctggaagcagaagaagaaaaattagctcatttgccactcgctaaaacagtatccgtagaagagcttctgcaatacgtggagcttcaagatcctgttacgcgcacgcagcttcgcgcaatggctgctaaaacggtctgcccgccgcataaagtagagcttgaagccttgcttggcaagcaagcctacaaagaacaagtgctggcaaaacgtttaacaatgcttgaactgcttgaaaaatacccggcgtgtgaaatgagtttcagcgaatttatcgcccttctgccaagcatacgcccgcgctattactcgatttcttcatcacctcgtgtcgatgaaaaacaagcaagcatcacggtcagcgttgtctcaggaccggcgtggagcggatatggagaatataaaggaattgcgtcgaactatcttgccgagctgcaagaaggagatacgattacgtgctttatttccacaccgcagtcagagtttacgctgccaaaagaccctgaaacgccgcttatcatggtcggaccgggaacaggcgtcgcgccgtttagaggctttgtgcaggcgcgcaaacagctaaaagaacaaggacagtcacttggagaagcacatttatacttcggctgccgttcacctcatgaagactatctgtatcaagaagagcttgaaaacgcccaaagcgaaggcatcattacgcttcataccgctttttctcgcatgccgaatcagccgaaaacatacgttcagcacgtaatggaacaagacggcaagaaattgattgaacttcttgatcaaggagcgcacttctatatttgcggagacggaagccaaatggcacctgccgttgaagcaacgcttatgaaaagctatgctgacgttcaccaagtgagtgaagcagacgctcgcttatggctgcagcagctagaagaaaaaggccgatacgcaaaagacgtgtggctgggg

SEQ ID NO: 844 - protein, 1049 aa, synthetic construct
  REGION 1..1049: note = variant of P450 oxidase from Bacillus megaterium
MTIKEMPQPKTFGELKNLPLLNTDKPVQALMRIADELGEIFKFEAPGSVTRYLSSQRLIKEACDESRFDKNLSQALKFARDFVGDGLVTSWTHEPNWKKAHNILVPSFSQHAMGRYHAMMVDIAVQLVQKWERLNADEHIEVSEDMTRLTLDTIGLCLFNYRFNSFYRDTPHPFIVSVVRALDEVMNKLQRANPDDPAYDENKRQCQEDIKVMNDYVDKIIADRKARGEQSHDLLTQMLNGKDPETGEPLDDGNIRQQIITFLIAGHQTTSGLLSFALYFLVKNPRVLQKVAEEAARVLVDPVPSYKQVKQLKYVGMVLNEALRLWPVAPMFSLYAKEDTVLGGEYSLTKGDEVMVLVPQLHRDKTIWGDDVEEFRPERFENPSAIPQHAFKPFGNGQRACIGQQFALHSATLVLGMMLKHFDFEDHTNYELVIKESRTLKPEGFVVKAKSKGIPLGGIPSPSTEQSAKKVRKKAENAHNTPLLVLYGSNAGTAEGTARDLADIAMSKGFAPQVATLDSHAGNLPREGAVLIVTASYNGHPPDNAKQFVDWLDQASADEVKGVRYSVFGCGDKNWAGTYQKVPAFIDETLAAKGAENIADRGEADASDDFEGTYEEWRDHMWSDVAAYFGLDIENSEDNKSTLSLQFVDSAADMPLAKMHGAFSTNVVASKELQQPGSARSTRHLEIELPKEASYQEGDHLGVIPRYYEGIVNRVTARFGLSASQLIRLEAEEEKLAHLPLAKTVSVEELLQYVELQDPVTRTQLRAMAAKTVCPPHKVELEALLGKQAYKEQVLAKRLTMLELLEKYPACEMSFSEFIALLPSIRPRYYSISSSPRVDEKQASITVSVVSGPAWSGYGEYKGIASNYLAELQEGDTITCFISTPQSEFTLPKDPETPLIMVGPGTGVAPFRGFVQARKQLKEQGQSLGEAHLYFGCRSPHEDYLYQEELENAQSEGIITLHTAFSRMPNQPKTYVQHVMEQDGKKLIELLDQGAHFYICGDGSQMAPAVEATLMKSYADVHQVSEADARLWLQQLEEKGRYAKDVWLG

SEQ ID NO: 845 - DNA, 3147 bp, synthetic construct
  misc_feature 1..3147: note = variant of P450 oxidase from Bacillus megaterium
  source 1..3147: mol_type = other DNA
atgacaattaaggaaatgcctcagcctaagacgtttggagaacttaaaaatttaccgttattaaacacagataaaccggttcaagctttgatgcgtattgcggatgaattaggagaaatctttaaattcgaggcgcctggtagcgtaacgcgctatttatcaagtcagcgtctaattaaagaagcatgcgatgaatcacgctttgataaaaacttaagtcaagcgcttaaatttgcacgtgattttgttggagacgggctggttacaagctggacgcatgaaccgaattggaaaaaagcgcataatatcttagttccaagctttagtcagcatgcaatggggcgttatcatgcgatgatggtcgatatcgccgtgcagcttgttcaaaagtgggagcgtctaaatgcagatgagcatattgaagtatcggaagacatgacacgtttaacgcttgatacaattggtctttgcctgtttaactatcgctttaacagcttttaccgagatacgcctcatccatttattgtgagtgtggttcgtgcactggatgaagtaatgaacaagctgcagcgagcaaatccagacgacccagcttatgatgaaaacaagcgccagaggcaagaagatatcaaggtgatgaacgactatgtagataaaattattgcagatcgcaaagcaaggggtgaacaaagtcatgatttattaacgcagatgctaaacggaaaagatccagaaacgggtgagccgcttgatgacgggaacattcgtcagcaaattattacattcttaattgcgggacaccaaacgacaagtggtcttttatcatttgcgctgtatttcttagtgaaaaatccacgtgtattacaaaaagtagcagaagaagcagcacgagttctagtagatcctgttccaagctacaaacaagtcaaacagcttaaatatgttggcatggtcttaaacgaagcgctgcgcttatggccagtagcgcctatgttttccctatatgcaaaagaagatacggtgcttggaggagaatatcctttaacgaaaggcgacgaagtaatggttctggtgcctcagcttcaccgtgataaaacaatttggggagacgatgtggaggagttccgtccagagcgttttgaaaatccaagtgcgattccgcagcatgcgtttaaaccgtttggaaacggtcagcgtgcgtgtatcggtcagcagttcgctcttcatagtgcaacgctggtacttggtatgatgctaaaacactttgactttgaagatcatacaaactacgagctcgttattaaagaatcgcggacgttaaaacctgaaggctttgtggtaaaagcaaaatcgaaaggcattccgcttggcggtattccttcacctagcactgaacagtctgctaaaaaagtacgcaaaaaggcagaaaacgctcataatacgccgctgcttgtgctatacggttcaaatgcgggaacagctgaaggaacggcgcgtgatttagcagatattgcaatgagcaaaggatttgcaccgcaggtcgcaacgcttgattcacacgccggtaatcttccgcgcgaaggagctgtattaattgtaacggcgtcttataacggtcatccgcctgataacgcaaagcaatttgtcgactggttagaccaagcgtctgcggatgaagtaaaaggcgttcgctactccgtatttggatgcggcgataaaaattgggcggggacgtatcaaaaagtgcctgcttttatcgatgaaacgcttgccgctaaaggggcagaaaacatcgctgaccgcggtgaagcagatgcaagcgacgactttgaaggcacatatgaagaatggcgtgatcatatgtggagtgacgtagcagcctactttggtctcgacattgaaaacagtgaagataataaatctactctttcacttcaatttgtcgacagcgcggcggatatgccgcttgcgaaaatgcacggtgcgttttcaacgaacgtcgtagcaagcaaagaacttcaacagcctggcagtgcacgaagcacgcgacatcttgaaattgaacttccaaaagaagcttcttatcaagaaggagatcatttaggtgttattcctcgctattatgaaggaatagtaaaccgtgtaacagcaaggttcggcctaagcgcatcacagctgatccgtctggaagcagaagaagaaaaattagctcatttgccactcgctaaaacagtatccgtagaagagcttctgcaatacgtggagcttcaagatcctgttacgcgcacgcagcttcgcgcaatggctgctaaaacggtctgcccgccgcataaagtagagcttgaagccttgcttggcaagcaagcctacaaagaacaagtgctggcaaaacgtttaacaatgcttgaactgcttgaaaaatacccggcgtgtgaaatgagtttcagcgaatttatcgcccttctgccaagcatacgcccgcgctattactcgatttcttcatcacctcgtgtcgatgaaaaacaagcaagcatcacggtcagcgttgtctcaggaccggcgtggagcggatatggagaatataaaggaattgcgtcgaactatcttgccgagctgcaagaaggagatacgattacgtgctttatttccacaccgcagtcagagtttacgctgccaaaagaccctgaaacgccgcttatcatggtcggaccgggaacaggcgtcgcgccgtttagaggctttgtgcaggcgcgcaaacagctaaaagaacaaggacagtcacttggagaagcacatttatacttcggctgccgttcacctcatgaagactatctgtatcaagaagagcttgaaaacgcccaaagcgaaggcatcattacgcttcataccgctttttctcgcatgccgaatcagccgaaaacatacgttcagcacgtaatggaacaagacggcaagaaattgattgaacttcttgatcaaggagcgcacttctatatttgcggagacggaagccaaatggcacctgccgttgaagcaacgcttatgaaaagctatgctgacgttcaccaagtgagtgaagcagacgctcgcttatggctgcagcagctagaagaaaaaggccgatacgcaaaagacgtgtggctgggg

SEQ ID NO: 846 - protein, 1049 aa, synthetic construct
  REGION 1..1049: note = variant of P450 oxidase from Bacillus megaterium
MTIKEMPQPKTFGELKNLPLLNTDKPVQALMRIADELGEIFKFEAPGSVTRYLSSQRLIKEACDESRFDKNLSQALKFARDFVGDGLVTSWTHEPNWKKAHNILVPSFSQHAMGRYHAMMVDIAVQLVQKWERLNADEHIEVSEDMTRLTLDTIGLCLFNYRFNSFYRDTPHPFIVSVVRALDEVMNKLQRANPDDPAYDENKRQRQEDIKVMNDYVDKIIADRKARGEQSHDLLTQMLNGKDPETGEPLDDGNIRQQIITFLIAGHQTTSGLLSFALYFLVKNPRVLQKVAEEAARVLVDPVPSYKQVKQLKYVGMVLNEALRLWPVAPMFSLYAKEDTVLGGEYPLTKGDEVMVLVPQLHRDKTIWGDDVEEFRPERFENPSAIPQHAFKPFGNGQRACIGQQFALHSATLVLGMMLKHFDFEDHTNYELVIKESRTLKPEGFVVKAKSKGIPLGGIPSPSTEQSAKKVRKKAENAHNTPLLVLYGSNAGTAEGTARDLADIAMSKGFAPQVATLDSHAGNLPREGAVLIVTASYNGHPPDNAKQFVDWLDQASADEVKGVRYSVFGCGDKNWAGTYQKVPAFIDETLAAKGAENIADRGEADASDDFEGTYEEWRDHMWSDVAAYFGLDIENSEDNKSTLSLQFVDSAADMPLAKMHGAFSTNVVASKELQQPGSARSTRHLEIELPKEASYQEGDHLGVIPRYYEGIVNRVTARFGLSASQLIRLEAEEEKLAHLPLAKTVSVEELLQYVELQDPVTRTQLRAMAAKTVCPPHKVELEALLGKQAYKEQVLAKRLTMLELLEKYPACEMSFSEFIALLPSIRPRYYSISSSPRVDEKQASITVSVVSGPAWSGYGEYKGIASNYLAELQEGDTITCFISTPQSEFTLPKDPETPLIMVGPGTGVAPFRGFVQARKQLKEQGQSLGEAHLYFGCRSPHEDYLYQEELENAQSEGIITLHTAFSRMPNQPKTYVQHVMEQDGKKLIELLDQGAHFYICGDGSQMAPAVEATLMKSYADVHQVSEADARLWLQQLEEKGRYAKDVWLG

SEQ ID NO: 847 - DNA, 3147 bp, synthetic construct
  misc_feature 1..3147: note = variant of P450 oxidase from Bacillus megaterium
  source 1..3147: mol_type = other DNA
atgacaattaaggaaatgcctcagcctaagacgtttggagaacttaaaaatttaccgttattaaacacagataaaccggttcaagctttgatgcgtattgcggatgaattaggagaaatctttaaattcgaggcgcctggtagcgtaacgcgctatttatcaagtcagcgtctaattaaagaagcatgcgatgaatcacgctttgataaaaacttaagtcaagcgcttaaatttgcacgtgattttgttggagacgggctggttacaagctggacgcatgaaccgaattggaaaaaagcgcataatatcttagttgtgagctttagtcagcatgcaatggggcgttatcatgcgatgatggtcgatatcgccgtgcagcttgttcaaaagtgggagcgtctaaatgcagatgagcatattgaagtatcggaagacatgacacgtttaacgcttgatacaattggtctttgcctgtttaactatcgctttaacagcttttaccgagatacgcctcatccatttattgtgagtgtggttcgtgcactggatgaagtaatgaacaagctgcagcgagcaaatccagacgacccagcttatgatgaaaacaagcgccagtgtcaagaagatatcaaggtgatgaacgactatgtagataaaattattgcagatcgcaaagcaaggggtgaacaaagtcatgatttattaacgcagatgctaaacggaaaagatccagaaacgggtgagccgcttgatgacgggaacattcgtcagcaaattattacattcttaattgcgggacaccaaacgacaagtggtcttttatcatttgcgctgtatttcttagtgaaaaatccacgtgtattacaaaaagtagcagaagaagcagcacgagttctagtagatcctgttccaagctacaaacaagtcaaacagcttaaatatgttggcatggtcttaaacgaagcgctgcgcttatggccagtagcgcctatgttttccctatatgcaaaagaagatacggtgcttggaggagaatatcctttaacgaaaggcgacgaagtaatggttctggtgcctcagcttcaccgtgataaaacaatttggggagacgatgtggaggagttccgtccagagcgttttgaaaatccaagtgcgattccgcagcatgcgtttaaaccgtttggaaacggtcagcgtgcgtgtatcggtcagcagttcgctcttcatagtgcaacgctggtacttggtatgatgctaaaacactttgactttgaagatcatacaaactacgagctcgttattaaagaatcgcggacgttaaaacctgaaggctttgtggtaaaagcaaaatcgaaaggcattccgcttggcggtattccttcacctagcactgaacagtctgctaaaaaagtacgcaaaaaggcagaaaacgctcataatacgccgctgcttgtgctatacggttcaaatgcgggaacagctgaaggaacggcgcgtgatttagcagatattgcaatgagcaaaggatttgcaccgcaggtcgcaacgcttgattcacacgccggtaatcttccgcgcgaaggagctgtattaattgtaacggcgtcttataacggtcatccgcctgataacgcaaagcaatttgtcgactggttagaccaagcgtctgcggatgaagtaaaaggcgttcgctactccgtatttggatgcggcgataaaaattgggcggggacgtatcaaaaagtgcctgcttttatcgatgaaacgcttgccgctaaaggggcagaaaacatcgctgaccgcggtgaagcagatgcaagcgacgactttgaaggcacatatgaagaatggcgtgatcatatgtggagtgacgtagcagcctactttggtctcgacattgaaaacagtgaagataataaatctactctttcacttcaatttgtcgacagcgcggcggatatgccgcttgcgaaaatgcacggtgcgttttcaacgaacgtcgtagcaagcaaagaacttcaacagcctggcagtgcacgaagcacgcgacatcttgaaattgaacttccaaaagaagcttcttatcaagaaggagatcatttaggtgttattcctcgctattatgaaggaatagtaaaccgtgtaacagcaaggttcggcctaagcgcatcacagctgatccgtctggaagcagaagaagaaaaattagctcatttgccactcgctaaaacagtatccgtagaagagcttctgcaatacgtggagcttcaagatcctgttacgcgcacgcagcttcgcgcaatggctgctaaaacggtctgcccgccgcataaagtagagcttgaagccttgcttggcaagcaagcctacaaagaacaagtgctggcaaaacgtttaacaatgcttgaactgcttgaaaaatacccggcgtgtgaaatgagtttcagcgaatttatcgcccttctgccaagcatacgcccgcgctattactcgatttcttcatcacctcgtgtcgatgaaaaacaagcaagcatcacggtcagcgttgtctcaggaccggcgtggagcggatatggagaatataaaggaattgcgtcgaactatcttgccgagctgcaagaaggagatacgattacgtgctttatttccacaccgcagtcagagtttacgctgccaaaagaccctgaaacgccgcttatcatggtcggaccgggaacaggcgtcgcgccgtttagaggctttgtgcaggcgcgcaaacagctaaaagaacaaggacagtcacttggagaagcacatttatacttcggctgccgttcacctcatgaagactatctgtatcaagaagagcttgaaaacgcccaaagcgaaggcatcattacgcttcataccgctttttctcgcatgccgaatcagccgaaaacatacgttcagcacgtaatggaacaagacggcaagaaattgattgaacttcttgatcaaggagcgcacttctatatttgcggagacggaagccaaatggcacctgccgttgaagcaacgcttatgaaaagctatgctgacgttcaccaagtgagtgaagcagacgctcgcttatggctgcagcagctagaagaaaaaggccgatacgcaaaagacgtgtggctgggg

SEQ ID NO: 848 - protein, 1049 aa, synthetic construct
  REGION 1..1049: note = variant of P450 oxidase from Bacillus megaterium
MTIKEMPQPKTFGELKNLPLLNTDKPVQALMRIADELGEIFKFEAPGSVTRYLSSQRLIKEACDESRFDKNLSQALKFARDFVGDGLVTSWTHEPNWKKAHNILVVSFSQHAMGRYHAMMVDIAVQLVQKWERLNADEHIEVSEDMTRLTLDTIGLCLFNYRFNSFYRDTPHPFIVSVVRALDEVMNKLQRANPDDPAYDENKRQCQEDIKVMNDYVDKIIADRKARGEQSHDLLTQMLNGKDPETGEPLDDGNIRQQIITFLIAGHQTTSGLLSFALYFLVKNPRVLQKVAEEAARVLVDPVPSYKQVKQLKYVGMVLNEALRLWPVAPMFSLYAKEDTVLGGEYPLTKGDEVMVLVPQLHRDKTIWGDDVEEFRPERFENPSAIPQHAFKPFGNGQRACIGQQFALHSATLVLGMMLKHFDFEDHTNYELVIKESRTLKPEGFVVKAKSKGIPLGGIPSPSTEQSAKKVRKKAENAHNTPLLVLYGSNAGTAEGTARDLADIAMSKGFAPQVATLDSHAGNLPREGAVLIVTASYNGHPPDNAKQFVDWLDQASADEVKGVRYSVFGCGDKNWAGTYQKVPAFIDETLAAKGAENIADRGEADASDDFEGTYEEWRDHMWSDVAAYFGLDIENSEDNKSTLSLQFVDSAADMPLAKMHGAFSTNVVASKELQQPGSARSTRHLEIELPKEASYQEGDHLGVIPRYYEGIVNRVTARFGLSASQLIRLEAEEEKLAHLPLAKTVSVEELLQYVELQDPVTRTQLRAMAAKTVCPPHKVELEALLGKQAYKEQVLAKRLTMLELLEKYPACEMSFSEFIALLPSIRPRYYSISSSPRVDEKQASITVSVVSGPAWSGYGEYKGIASNYLAELQEGDTITCFISTPQSEFTLPKDPETPLIMVGPGTGVAPFRGFVQARKQLKEQGQSLGEAHLYFGCRSPHEDYLYQEELENAQSEGIITLHTAFSRMPNQPKTYVQHVMEQDGKKLIELLDQGAHFYICGDGSQMAPAVEATLMKSYADVHQVSEADARLWLQQLEEKGRYAKDVWLG

SEQ ID NO: 849 - DNA, 3147 bp, synthetic construct
  misc_feature 1..3147: note = variant of P450 oxidase from Bacillus megaterium
  source 1..3147: mol_type = other DNA
atgacaattaaggaaatgcctcagcctaagacgtttggagaacttaaaaatttaccgttattaaacacagataaaccggttcaagctttgatgcgtattgcggatgaattaggagaaatctttaaattcgaggcgcctggtagcgtaacgcgctatttatcaagtcagcgtctaattaaagaagcatgcgatgaatcacgctttgataaaaacttaagtcaagcgcttaaatttgcacgtgattttgttggagacgggctggttacaagctggacgcatgaaccgaattggaaaaaagcgcatctgatcttagttccaagctttagtcagcatgcaatggggcgttatcatgcgatgatggtcgatatcgccgtgcagcttgttcaaaagtgggagcgtctaaatgcagatgagcatattgaagtatcggaagacatgacacgtttaacgcttgatacaattggtctttgcctgtttaactatcgctttaacagcttttaccgagatacgcctcatccatttattgtgagtgtggttcgtgcactggatgaagtaatgaacaagctgcagcgagcaaatccagacgacccagcttatgatgaaaacaagcgccagtgtcaagaagatatcaaggtgatgaacgactatgtagataaaattattgcagatcgcaaagcaaggggtgaacaaagtcatgatttattaacgcagatgctaaacggaaaagatccagaaacgggtgagccgcttgatgacgggaacattcgtcagcaaattattacattcttaattgcgggacaccaaacgacaagtggtcttttatcatttgcgctgtatttcttagtgaaaaatccacgtgtattacaaaaagtagcagaagaagcagcacgagttctagtagatcctgttccaagctacaaacaagtcaaacagcttaaatatgttggcatggtcttaaacgaagcgctgcgcttatggccagtagcgcctatgttttccctatatgcaaaagaagatacggtgcttggaggagaatatcctttaacgaaaggcgacgaagtaatggttctggtgcctcagcttcaccgtgataaaacaatttggggagacgatgtggaggagttccgtccagagcgttttgaaaatccaagtgcgattccgcagcatgcgtttaaaccgtttggaaacggtcagcgtgcgtgtatcggtcagcagttcgctcttcatagtgcaacgctggtacttggtatgatgctaaaacactttgactttgaagatcatacaaactacgagctcgttattaaagaatcgcggacgttaaaacctgaaggctttgtggtaaaagcaaaatcgaaaggcattccgcttggcggtattccttcacctagcactgaacagtctgctaaaaaagtacgcaaaaaggcagaaaacgctcataatacgccgctgcttgtgctatacggttcaaatgcgggaacagctgaaggaacggcgcgtgatttagcagatattgcaatgagcaaaggatttgcaccgcaggtcgcaacgcttgattcacacgccggtaatcttccgcgcgaaggagctgtattaattgtaacggcgtcttataacggtcatccgcctgataacgcaaagcaatttgtcgactggttagaccaagcgtctgcggatgaagtaaaaggcgttcgctactccgtatttggatgcggcgataaaaattgggcggggacgtatcaaaaagtgcctgcttttatcgatgaaacgcttgccgctaaaggggcagaaaacatcgctgaccgcggtgaagcagatgcaagcgacgactttgaaggcacatatgaagaatggcgtgatcatatgtggagtgacgtagcagcctactttggtctcgacattgaaaacagtgaagataataaatctactctttcacttcaatttgtcgacagcgcggcggatatgccgcttgcgaaaatgcacggtgcgttttcaacgaacgtcgtagcaagcaaagaacttcaacagcctggcagtgcacgaagcacgcgacatcttgaaattgaacttccaaaagaagcttcttatcaagaaggagatcatttaggtgttattcctcgctattatgaaggaatagtaaaccgtgtaacagcaaggttcggcctaagcgcatcacagctgatccgtctggaagcagaagaagaaaaattagctcatttgccactcgctaaaacagtatccgtagaagagcttctgcaatacgtggagcttcaagatcctgttacgcgcacgcagcttcgcgcaatggctgctaaaacggtctgcccgccgcataaagtagagcttgaagccttgcttggcaagcaagcctacaaagaacaagtgctggcaaaacgtttaacaatgcttgaactgcttgaaaaatacccggcgtgtgaaatgagtttcagcgaatttatcgcccttctgccaagcatacgcccgcgctattactcgatttcttcatcacctcgtgtcgatgaaaaacaagcaagcatcacggtcagcgttgtctcaggaccggcgtggagcggatatggagaatataaaggaattgcgtcgaactatcttgccgagctgcaagaaggagatacgattacgtgctttatttccacaccgcagtcagagtttacgctgccaaaagaccctgaaacgccgcttatcatggtcggaccgggaacaggcgtcgcgccgtttagaggctttgtgcaggcgcgcaaacagctaaaagaacaaggacagtcacttggagaagcacatttatacttcggctgccgttcacctcatgaagactatctgtatcaagaagagcttgaaaacgcccaaagcgaaggcatcattacgcttcataccgctttttctcgcatgccgaatcagccgaaaacatacgttcagcacgtaatggaacaagacggcaagaaattgattgaacttcttgatcaaggagcgcacttctatatttgcggagacggaagccaaatggcacctgccgttgaagcaacgcttatgaaaagctatgctgacgttcaccaagtgagtgaagcagacgctcgcttatggctgcagcagctagaagaaaaaggccgatacgcaaaagacgtgtggctgggg

SEQ ID NO: 850 - protein, 1049 aa, synthetic construct
  REGION 1..1049: note = variant of P450 oxidase from Bacillus megaterium
MTIKEMPQPKTFGELKNLPLLNTDKPVQALMRIADELGEIFKFEAPGSVTRYLSSQRLIKEACDESRFDKNLSQALKFARDFVGDGLVTSWTHEPNWKKAHLILVPSFSQHAMGRYHAMMVDIAVQLVQKWERLNADEHIEVSEDMTRLTLDTIGLCLFNYRFNSFYRDTPHPFIVSVVRALDEVMNKLQRANPDDPAYDENKRQCQEDIKVMNDYVDKIIADRKARGEQSHDLLTQMLNGKDPETGEPLDDGNIRQQIITFLIAGHQTTSGLLSFALYFLVKNPRVLQKVAEEAARVLVDPVPSYKQVKQLKYVGMVLNEALRLWPVAPMFSLYAKEDTVLGGEYPLTKGDEVMVLVPQLHRDKTIWGDDVEEFRPERFENPSAIPQHAFKPFGNGQRACIGQQFALHSATLVLGMMLKHFDFEDHTNYELVIKESRTLKPEGFVVKAKSKGIPLGGIPSPSTEQSAKKVRKKAENAHNTPLLVLYGSNAGTAEGTARDLADIAMSKGFAPQVATLDSHAGNLPREGAVLIVTASYNGHPPDNAKQFVDWLDQASADEVKGVRYSVFGCGDKNWAGTYQKVPAFIDETLAAKGAENIADRGEADASDDFEGTYEEWRDHMWSDVAAYFGLDIENSEDNKSTLSLQFVDSAADMPLAKMHGAFSTNVVASKELQQPGSARSTRHLEIELPKEASYQEGDHLGVIPRYYEGIVNRVTARFGLSASQLIRLEAEEEKLAHLPLAKTVSVEELLQYVELQDPVTRTQLRAMAAKTVCPPHKVELEALLGKQAYKEQVLAKRLTMLELLEKYPACEMSFSEFIALLPSIRPRYYSISSSPRVDEKQASITVSVVSGPAWSGYGEYKGIASNYLAELQEGDTITCFISTPQSEFTLPKDPETPLIMVGPGTGVAPFRGFVQARKQLKEQGQSLGEAHLYFGCRSPHEDYLYQEELENAQSEGIITLHTAFSRMPNQPKTYVQHVMEQDGKKLIELLDQGAHFYICGDGSQMAPAVEATLMKSYADVHQVSEADARLWLQQLEEKGRYAKDVWLG

SEQ ID NO: 851 - DNA, 3147 bp, synthetic construct
  misc_feature 1..3147: note = variant of P450 oxidase from Bacillus megaterium
  source 1..3147: mol_type = other DNA
atgacaattaaggaaatgcctcagcctaagacgtttggagaacttaaaaatttaccgttattaaacacagataaaccggttcaagctttgatgcgtattgcggatgaattaggagaaatctttaaattcgaggcgcctggtagcgtaacgcgctatttatcaagtcagcgtctaattaaagaagcatgcgatgaatcacgctttgataaaaacttaagtcaagcgcttaaatttgcacgtgattttgttggagacgggctggttacaagctggacgcatgaaccgaattggaaaaaagcgcataatatcttagttccaagctttagtcagcatgcaatggggcgttatcatgcgatgatggtcgatatcgccgtgcagcttgttcaaaagtgggagcgtctaaatgcagatgagcatattgaagtatcggaagacatgacacgtttaacgcttgatacaattggtctttgcctgtttaactatcgctttaacagcttttaccgagatacgcctcatccatttattgtgagtgtggttcgtgcactggatgaagtaatgaacaagctgcagcgagcaaatccagaccagccagcttatgatgaaaacaagcgccagtgtcaagaagatatcaaggtgatgaacgactatgtagataaaattattgcagatcgcaaagcaaggggtgaacaaagtcatgatttattaacgcagatgctaaacggaaaagatccagaaacgggtgagccgcttgatgacgggaacattcgtcagcaaattattacattcttaattgcgggacaccaaacgacaagtggtcttttatcatttgcgctgtatttcttagtgaaaaatccacgtgtattacaaaaagtagcagaagaagcagcacgagttctagtagatcctgttccaagctacaaacaagtcaaacagcttaaatatgttggcatggtcttaaacgaagcgctgcgcttatggccagtagcgcctatgttttccctatatgcaaaagaagatacggtgcttggaggagaatatcctttaacgaaaggcgacgaagtaatggttctggtgcctcagcttcaccgtgataaaacaatttggggagacgatgtggaggagttccgtccagagcgttttgaaaatccaagtgcgattccgcagcatgcgtttaaaccgtttggaaacggtcagcgtgcgtgtatcggtcagcagttcgctcttcatagtgcaacgctggtacttggtatgatgctaaaacactttgactttgaagatcatacaaactacgagctcgttattaaagaatcgcggacgttaaaacctgaaggctttgtggtaaaagcaaaatcgaaaggcattccgcttggcggtattccttcacctagcactgaacagtctgctaaaaaagtacgcaaaaaggcagaaaacgctcataatacgccgctgcttgtgctatacggttcaaatgcgggaacagctgaaggaacggcgcgtgatttagcagatattgcaatgagcaaaggatttgcaccgcaggtcgcaacgcttgattcacacgccggtaatcttccgcgcgaaggagctgtattaattgtaacggcgtcttataacggtcatccgcctgataacgcaaagcaatttgtcgactggttagaccaagcgtctgcggatgaagtaaaaggcgttcgctactccgtatttggatgcggcgataaaaattgggcggggacgtatcaaaaagtgcctgcttttatcgatgaaacgcttgccgctaaaggggcagaaaacatcgctgaccgcggtgaagcagatgcaagcgacgactttgaaggcacatatgaagaatggcgtgatcatatgtggagtgacgtagcagcctactttggtctcgacattgaaaacagtgaagataataaatctactctttcacttcaatttgtcgacagcgcggcggatatgccgcttgcgaaaatgcacggtgcgttttcaacgaacgtcgtagcaagcaaagaacttcaacagcctggcagtgcacgaagcacgcgacatcttgaaattgaacttccaaaagaagcttcttatcaagaaggagatcatttaggtgttattcctcgctattatgaaggaatagtaaaccgtgtaacagcaaggttcggcctaagcgcatcacagctgatccgtctggaagcagaagaagaaaaattagctcatttgccactcgctaaaacagtatccgtagaagagcttctgcaatacgtggagcttcaagatcctgttacgcgcacgcagcttcgcgcaatggctgctaaaacggtctgcccgccgcataaagtagagcttgaagccttgcttggcaagcaagcctacaaagaacaagtgctggcaaaacgtttaacaatgcttgaactgcttgaaaaatacccggcgtgtgaaatgagtttcagcgaatttatcgcccttctgccaagcatacgcccgcgctattactcgatttcttcatcacctcgtgtcgatgaaaaacaagcaagcatcacggtcagcgttgtctcaggactggcgtggagcggatatggagaatataaaggaattgcgtcgaactatcttgccgagctgcaagaaggagatacgattacgtgctttatttccacaccgcagtcagagtttacgctgccaaaagaccctgaaacgccgcttatcatggtcggaccgggaacaggcgtcgcgccgtttagaggctttgtgcaggcgcgcaaacagctaaaagaacaaggacagtcacttggagaagcacatttatacttcggctgccgttcacctcatgaagactatctgtatcaagaagagcttgaaaacgcccaaagcgaaggcatcattacgcttcataccgctttttctcgcatgccgaatcagccgaaaacatacgttcagcacgtaatggaacaagacggcaagaaattgattgaacttcttgatcaaggagcgcacttctatatttgcggagacggaagccaaatggcacctgccgttgaagcaacgcttatgaaaagctatgctgacgttcaccaagtgagtgaagcagacgctcgcttatggctgcagcagctagaagaaaaaggccgatacgcaaaagacgtgtggctgggg

SEQ ID NO: 852 - protein, 1049 aa, synthetic construct
  REGION 1..1049: note = variant of P450 oxidase from Bacillus megaterium
MTIKEMPQPKTFGELKNLPLLNTDKPVQALMRIADELGEIFKFEAPGSVTRYLSSQRLIKEACDESRFDKNLSQALKFARDFVGDGLVTSWTHEPNWKKAHNILVPSFSQHAMGRYHAMMVDIAVQLVQKWERLNADEHIEVSEDMTRLTLDTIGLCLFNYRFNSFYRDTPHPFIVSVVRALDEVMNKLQRANPDQPAYDENKRQCQEDIKVMNDYVDKIIADRKARGEQSHDLLTQMLNGKDPETGEPLDDGNIRQQIITFLIAGHQTTSGLLSFALYFLVKNPRVLQKVAEEAARVLVDPVPSYKQVKQLKYVGMVLNEALRLWPVAPMFSLYAKEDTVLGGEYPLTKGDEVMVLVPQLHRDKTIWGDDVEEFRPERFENPSAIPQHAFKPFGNGQRACIGQQFALHSATLVLGMMLKHFDFEDHTNYELVIKESRTLKPEGFVVKAKSKGIPLGGIPSPSTEQSAKKVRKKAENAHNTPLLVLYGSNAGTAEGTARDLADIAMSKGFAPQVATLDSHAGNLPREGAVLIVTASYNGHPPDNAKQFVDWLDQASADEVKGVRYSVFGCGDKNWAGTYQKVPAFIDETLAAKGAENIADRGEADASDDFEGTYEEWRDHMWSDVAAYFGLDIENSEDNKSTLSLQFVDSAADMPLAKMHGAFSTNVVASKELQQPGSARSTRHLEIELPKEASYQEGDHLGVIPRYYEGIVNRVTARFGLSASQLIRLEAEEEKLAHLPLAKTVSVEELLQYVELQDPVTRTQLRAMAAKTVCPPHKVELEALLGKQAYKEQVLAKRLTMLELLEKYPACEMSFSEFIALLPSIRPRYYSISSSPRVDEKQASITVSVVSGLAWSGYGEYKGIASNYLAELQEGDTITCFISTPQSEFTLPKDPETPLIMVGPGTGVAPFRGFVQARKQLKEQGQSLGEAHLYFGCRSPHEDYLYQEELENAQSEGIITLHTAFSRMPNQPKTYVQHVMEQDGKKLIELLDQGAHFYICGDGSQMAPAVEATLMKSYADVHQVSEADARLWLQQLEEKGRYAKDVWLG

SEQ ID NO: 853 - DNA, 3147 bp, synthetic construct
  misc_feature 1..3147: note = variant of P450 oxidase from Bacillus megaterium
  source 1..3147: mol_type = other DNA
atgacaattaaggaaatgcctcagcctaagacgtttggagaacttaaaaatttaccgttattaaacacagataaaccggttcaagctttgatgcgtattgcggatgaattaggagaaatctttaaattcgaggcgcctggtagcgtaacgcgctatttatcaagtcagcgtctaattaaagaagcatgcgatgaatcacgctttgataaaaacttaagtcaagcgcttaaatttgcacgtgattttgttggagacgggctggttacaagctggacgcatgaaccgaattggaaaaaagcgcataatatcttagttccaagctttagtcagcatgcaatggggcgttatcatgcgatgatggtcgatatcgccgtgcagcttgttcaaaagtgggagcgtctaaatgcagatgagcatattgaagtatcggaagacatgacacgtttaacgcttgatacaattggtctttgcctgtttaactatcgctttaacagcttttaccgagatacgcctcatccatttattgtgagtgtggttcgtgcactggatgaagtaatgaacaagctgcagcgagcaaatccagacgacccagcttatgatgaaaacaagcgccagtgtcaagaagatatcaaggtgatgaacgactatgtagataaaattattgcagatcgcaaagcaaggggtgaacaaagtcatgatttattaacgcagatgctaaacggaaaagatccagctacgggtgagccgcttgatgacgggaacattcgtcagcaaattattacattcttaattgcgggacaccaaacgacaagtggtcttttatcatttgcgctgtatttcttagtgaaaaatccacgtgtattacaaaaagtagcagaagaagcagcacgagttctagtagatcctgttccaagctacaaacaagtcaaacagcttaaatatgttggcatggtcttaaacgaagcgctgcgcttatggccagtagcgcctatgttttccctatatgcaaaagaagatacggtgcttggaggagaatatcctttaacgaaaggcgacgaagtaatggttctggtgcctcagcttcaccgtgataaaacaatttggggagacgatgtggaggagttccgtccagagcgttttgaaaatccaagtgcgattccgcagcatgcgtttaaaccgtttggaaacggtcagcgtgcgtgtatcggtcagcagttcgctcttcatagtgcaacgctggtacttggtatgatgctaaaacactttgactttgaagatcatacaaactacgagctcgttattaaagaatcgcggacgttaaaacctgaaggctttgtggtaaaagcaaaatcgaaaggcattccgcttggcggtattccttcacctagcactgaacagtctgctaaaaaagtacgcaaaaaggcagaaaacgctcataatacgccgctgcttgtgctatacggttcaaatgcgggaacagctgaaggaacggcgcgtgatttagcagatattgcaatgagcaaaggatttgcaccgcaggtcgcaacgcttgattcacacgccggtaatcttccgcgcgaaggagctgtattaattgtaacggcgtcttataacggtcatccgcctgataacgcaaagcaatttgtcgactggttagaccaagcgtctgcggatgaagtaaaaggcgttcgctactccgtatttggatgcggcgataaaaattgggcggggacgtatcaaaaagtgcctgcttttatcgatgaaacgcttgccgctaaaggggcagaaaacatcgctgaccgcggtgaagcagatgcaagcgacgactttgaaggcacatatgaagaatggcgtgatcatatgtggagtgacgtagcagcctactttggtctcgacattgaaaacagtgaagataataaatctactctttcacttcaatttgtcgacagcgcggcggatatgccgcttgcgaaaatgcacggtgcgttttcaacgaacgtcgtagcaagcaaagaacttcaacagcctggcagtgcacgaagcacgcgacatcttgaaattgaacttccaaaagaagcttcttatcaagaaggagatcatttaggtgttattcctcgctattatgaaggaatagtaaaccgtgtaacagcaaggttcggcctaagcgcatcacagctgatccgtctggaagcagaagaagaaaaattagctcatttgccactcgctaaaacagtatccgtagaagagcttctgcaatacgtggagcttcaagatcctgttacgcgcacgcagcttcgcgcaatggctgctaaaacggtctgcccgccgcataaagtagagcttgaagccttgcttggcaagcaagcctacaaagaacaagtgctggcaaaacgtttaacaatgcttgaactgcttgaaaaatacccggcgtgtgaaatgagtttcagcgaatttatcgcccttctgccaagcatacgcccgcgctattactcgatttcttcatcacctcgtgtcgatgaaaaacaagcaagcatcacggtcagcgttgtctcaggaccggcgtggagcggatatggagaatataaaggaattgcgtcgaactatcttgccgagctgcaagaaggagatacgattacgtgctttatttccacaccgcagtcagagtttacgctgccaaaagaccctgaaacgccgcttatcatggtcggaccgggaacaggcgtcgcgccgtttagaggctttgtgcaggcgcgcaaacagctaaaagaacaaggacagtcacttggagaagcacatttatacttcggctgccgttcacctcatgaagactatctgtatcaagaagagcttgaaaacgcccaaagcgaaggcatcattacgcttcataccgctttttctcgcatgccgaatcagccgaaaacatacgttcagcacgtaatggaacaagacggcaagaaattgattgaacttcttgatcaaggagcgcacttctatatttgcggagacggaagccaaatggcacctgccgttgaagcaacgcttatgaaaagctatgctgacgttcaccaagtgagtgaagcagacgctcgcttatggctgcagcagctagaagaaaaaggccgatacgcaaaagacgtgtggctgggg

SEQ ID NO: 854 - protein, 1049 aa, synthetic construct
  REGION 1..1049: note = variant of P450 oxidase from Bacillus megaterium
MTIKEMPQPKTFGELKNLPLLNTDKPVQALMRIADELGEIFKFEAPGSVTRYLSSQRLIKEACDESRFDKNLSQALKFARDFVGDGLVTSWTHEPNWKKAHNILVPSFSQHAMGRYHAMMVDIAVQLVQKWERLNADEHIEVSEDMTRLTLDTIGLCLFNYRFNSFYRDTPHPFIVSVVRALDEVMNKLQRANPDDPAYDENKRQCQEDIKVMNDYVDKIIADRKARGEQSHDLLTQMLNGKDPATGEPLDDGNIRQQIITFLIAGHQTTSGLLSFALYFLVKNPRVLQKVAEEAARVLVDPVPSYKQVKQLKYVGMVLNEALRLWPVAPMFSLYAKEDTVLGGEYPLTKGDEVMVLVPQLHRDKTIWGDDVEEFRPERFENPSAIPQHAFKPFGNGQRACIGQQFALHSATLVLGMMLKHFDFEDHTNYELVIKESRTLKPEGFVVKAKSKGIPLGGIPSPSTEQSAKKVRKKAENAHNTPLLVLYGSNAGTAEGTARDLADIAMSKGFAPQVATLDSHAGNLPREGAVLIVTASYNGHPPDNAKQFVDWLDQASADEVKGVRYSVFGCGDKNWAGTYQKVPAFIDETLAAKGAENIADRGEADASDDFEGTYEEWRDHMWSDVAAYFGLDIENSEDNKSTLSLQFVDSAADMPLAKMHGAFSTNVVASKELQQPGSARSTRHLEIELPKEASYQEGDHLGVIPRYYEGIVNRVTARFGLSASQLIRLEAEEEKLAHLPLAKTVSVEELLQYVELQDPVTRTQLRAMAAKTVCPPHKVELEALLGKQAYKEQVLAKRLTMLELLEKYPACEMSFSEFIALLPSIRPRYYSISSSPRVDEKQASITVSVVSGPAWSGYGEYKGIASNYLAELQEGDTITCFISTPQSEFTLPKDPETPLIMVGPGTGVAPFRGFVQARKQLKEQGQSLGEAHLYFGCRSPHEDYLYQEELENAQSEGIITLHTAFSRMPNQPKTYVQHVMEQDGKKLIELLDQGAHFYICGDGSQMAPAVEATLMKSYADVHQVSEADARLWLQQLEEKGRYAKDVWLG

SEQ ID NO: 855 - DNA, 3147 bp, synthetic construct
  misc_feature 1..3147: note = variant of P450 oxidase from Bacillus megaterium
  source 1..3147: mol_type = other DNA
atgacaattaaggaaatgcctcagcctaagacgtttggagaacttaaaaatttaccgttattaaacacagataaaccggttcaagctttgatgcgtattgcggatgaattaggagaaatctttaaattcgaggcgcctggtagcgtaacgcgctatttatcaagtcagcgtctaattaaagaagcatgcgatgaatcacgctttgataaaaacttaagtcaagcgcttaaatttgcacgtgattttgttggagacgggctggttacaagctggacgcatgaaccgaattggaaaaaagcgcataatatcttagttccaagctttagtcagcatgcaatggggcgttatcatgcgatgatggtcgatatcgccgtgcagcttgttcaaaagtgggagcgtctaaatgcagatgagcatattgaagtatcggaagacatgacacgtttaacgcttgatacaattggtctttgcctgtttaactatcgctttaacagcttttaccgagatacgcctcatccatttattgtgagtgtggttcgtgcactggatgaagtaatgaacaagctgcagcgagcaaatccagacgacccagcttatgatgaaaacaagcgccagtgtcaagaagatatcaaggtgatgaacgactatgtagataaaattattgcagatcgcaaagcaaggggtgaacaaagtcatgatttattaacgcagatgctaaacggaaaagatccaatgacgggtgagccgcttgatgacgggaacattcgtcagcaaattattacattcttaattgcgggacaccaaacgacaagtggtcttttatcatttgcgctgtatttcttagtgaaaaatccacgtgtattacaaaaagtagcagaagaagcagcacgagttctagtagatcctgttccaagctacaaacaagtcaaacagcttaaatatgttggcatggtcttaaacgaagcgctgcgcttatggccagtagcgcctatgttttccctatatgcaaaagaagatacggtgcttggaggagaatatcctttaacgaaaggcgacgaagtaatggttctggtgcctcagcttcaccgtgataaaacaatttggggagacgatgtggaggagttccgtccagagcgttttgaaaatccaagtgcgattccgcagcatgcgtttaaaccgtttggaaacggtcagcgtgcgtgtatcggtcagcagttcgctcttcatagtgcaacgctggtacttggtatgatgctaaaacactttgactttgaagatcatacaaactacgagctcgttattaaagaatcgcggacgttaaaacctgaaggctttgtggtaaaagcaaaatcgaaaggcattccgcttggcggtattccttcacctagcactgaacagtctgctaaaaaagtacgcaaaaaggcagaaaacgctcataatacgccgctgcttgtgctatacggttcaaatgcgggaacagctgaaggaacggcgcgtgatttagcagatattgcaatgagcaaaggatttgcaccgcaggtcgcaacgcttgattcacacgccggtaatcttccgcgcgaaggagctgtattaattgtaacggcgtcttataacggtcatccgcctgataacgcaaagcaatttgtcgactggttagaccaagcgtctgcggatgaagtaaaaggcgttcgctactccgtatttggatgcggcgataaaaattgggcggggacgtatcaaaaagtgcctgcttttatcgatgaaacgcttgccgctaaaggggcagaaaacatcgctgaccgcggtgaagcagatgcaagcgacgactttgaaggcacatatgaagaatggcgtgatcatatgtggagtgacgtagcagcctactttggtctcgacattgaaaacagtgaagataataaatctactctttcacttcaatttgtcgacagcgcggcggatatgccgcttgcgaaaatgcacggtgcgttttcaacgaacgtcgtagcaagcaaagaacttcaacagcctggcagtgcacgaagcacgcgacatcttgaaattgaacttccaaaagaagcttcttatcaagaaggagatcatttaggtgttattcctcgctattatgaaggaatagtaaaccgtgtaacagcaaggttcggcctaagcgcatcacagctgatccgtctggaagcagaagaagaaaaattagctcatttgccactcgctaaaacagtatccgtagaagagcttctgcaatacgtggagcttcaagatcctgttacgcgcacgcagcttcgcgcaatggctgctaaaacggtctgcccgccgcataaagtagagcttgaagccttgcttggcaagcaagcctacaaagaacaagtgctggcaaaacgtttaacaatgcttgaactgcttgaaaaatacccggcgtgtgaaatgagtttcagcgaatttatcgcccttctgccaagcatacgcccgcgctattactcgatttcttcatcacctcgtgtcgatgaaaaacaagcaagcatcacggtcagcgttgtctcaggaccggcgtggagcggatatggagaatataaaggaattgcgtcgaactatcttgccgagctgcaagaaggagatacgattacgtgctttatttccacaccgcagtcagagtttacgctgccaaaagaccctgaaacgccgcttatcatggtcggaccgggaacaggcgtcgcgccgtttagaggctttgtgcaggcgcgcaaacagctaaaagaacaaggacagtcacttggagaagcacatttatacttcggctgccgttcacctcatgaagactatctgtatcaagaagagcttgaaaacgcccaaagcgaaggcatcattacgcttcataccgctttttctcgcatgccgaatcagccgaaaacatacgttcagcacgtaatggaacaagacggcaagaaattgattgaacttcttgatcaaggagcgcacttctatatttgcggagacggaagccaaatggcacctgccgttgaagcaacgcttatgaaaagctatgctgacgttcaccaagtgagtgaagcagacgctcgcttatggctgcagcagctagaagaaaaaggccgatacgcaaaagacgtgtggctgggg

SEQ ID NO: 856 - protein, 1049 aa, synthetic construct
  REGION 1..1049: note = variant of P450 oxidase from Bacillus megaterium
MTIKEMPQPKTFGELKNLPLLNTDKPVQALMRIADELGEIFKFEAPGSVTRYLSSQRLIKEACDESRFDKNLSQALKFARDFVGDGLVTSWTHEPNWKKAHNILVPSFSQHAMGRYHAMMVDIAVQLVQKWERLNADEHIEVSEDMTRLTLDTIGLCLFNYRFNSFYRDTPHPFIVSVVRALDEVMNKLQRANPDDPAYDENKRQCQEDIKVMNDYVDKIIADRKARGEQSHDLLTQMLNGKDPMTGEPLDDGNIRQQIITFLIAGHQTTSGLLSFALYFLVKNPRVLQKVAEEAARVLVDPVPSYKQVKQLKYVGMVLNEALRLWPVAPMFSLYAKEDTVLGGEYPLTKGDEVMVLVPQLHRDKTIWGDDVEEFRPERFENPSAIPQHAFKPFGNGQRACIGQQFALHSATLVLGMMLKHFDFEDHTNYELVIKESRTLKPEGFVVKAKSKGIPLGGIPSPSTEQSAKKVRKKAENAHNTPLLVLYGSNAGTAEGTARDLADIAMSKGFAPQVATLDSHAGNLPREGAVLIVTASYNGHPPDNAKQFVDWLDQASADEVKGVRYSVFGCGDKNWAGTYQKVPAFIDETLAAKGAENIADRGEADASDDFEGTYEEWRDHMWSDVAAYFGLDIENSEDNKSTLSLQFVDSAADMPLAKMHGAFSTNVVASKELQQPGSARSTRHLEIELPKEASYQEGDHLGVIPRYYEGIVNRVTARFGLSASQLIRLEAEEEKLAHLPLAKTVSVEELLQYVELQDPVTRTQLRAMAAKTVCPPHKVELEALLGKQAYKEQVLAKRLTMLELLEKYPACEMSFSEFIALLPSIRPRYYSISSSPRVDEKQASITVSVVSGPAWSGYGEYKGIASNYLAELQEGDTITCFISTPQSEFTLPKDPETPLIMVGPGTGVAPFRGFVQARKQLKEQGQSLGEAHLYFGCRSPHEDYLYQEELENAQSEGIITLHTAFSRMPNQPKTYVQHVMEQDGKKLIELLDQGAHFYICGDGSQMAPAVEATLMKSYADVHQVSEADARLWLQQLEEKGRYAKDVWLG

SEQ ID NO: 857 - DNA, 3147 bp, synthetic construct
  misc_feature 1..3147: note = variant of P450 oxidase from Bacillus megaterium
  source 1..3147: mol_type = other DNA
atgacaattaaggaaatgcctcagcctaagacgtttggagaacttaaaaatttaccgttattaaacacagataaaccggttcaagctttgatgcgtattgcggatgaattaggagaaatctttaaattcgaggcgcctggtagcgtaacgcgctatttatcaagtcagcgtctaattaaagaagcatgcgatgaatcacgctttgataaaaacttaagtcaagcgcttaaatttgcacgtgattttgttggagacgggctggttacaagctggacgcatgaaccgaattggaaaaaagcgcataatatcttagttccaagctttagtcagcatgcaatggggcgttatcatgcgatgatggtcgatatcgccgtgcagcttgttcaaaagtgggagcgtctaaatgcagatgagcatattgaagtatcggaagacatgacacgtttaacgcttgatacaattggtctttgcctgtttaactatcgctttaacagcttttaccgagatacgcctcatccatttattgtgagtgtggttcgtgcactggatgaagtaatgaacaagctgcagcgagcaaatccagacgacccagcttatgatgaaaacaagcgccagtgtcaagaagatatcaaggtgatgaacgactatgtagataaaattattgcagatcgcaaagcaaggggtgaacaaagtcatgatttattaacgcagatgctaaacggaaaagatcgggaaacgggtgagccgcttgatgacgggaacattcgtcagcaaattattacattcttaattgcgggacaccaaacgacaagtggtcttttatcatttgcgctgtatttcttagtgaaaaatccacgtgtattacaaaaagtagcagaagaagcagcacgagttctagtagatcctgttccaagctacaaacaagtcaaacagcttaaatatgttggcatggtcttaaacgaagcgctgcgcttatggccagtagcgcctatgttttccctatatgcaaaagaagatacggtgcttggaggagaatatcctttaacgaaaggcgacgaagtaatggttctggtgcctcagcttcaccgtgataaaacaatttggggagacgatgtggaggagttccgtccagagcgttttgaaaatccaagtgcgattccgcagcatgcgtttaaaccgtttggaaacggtcagcgtgcgtgtatcggtcagcagttcgctcttcatagtgcaacgctggtacttggtatgatgctaaaacactttgactttgaagatcatacaaactacgagctcgttattaaagaatcgcggacgttaaaacctgaaggctttgtggtaaaagcaaaatcgaaaggcattccgcttggcggtattccttcacctagcactgaacagtctgctaaaaaagtacgcaaaaaggcagaaaacgctcataatacgccgctgcttgtgctatacggttcaaatgcgggaacagctgaaggaacggcgcgtgatttagcagatattgcaatgagcaaaggatttgcaccgcaggtcgcaacgcttgattcacacgccggtaatcttccgcgcgaaggagctgtattaattgtaacggcgtcttataacggtcatccgcctgataacgcaaagcaatttgtcgactggttagaccaagcgtctgcggatgaagtaaaaggcgttcgctactccgtatttggatgcggcgataaaaattgggcggggacgtatcaaaaagtgcctgcttttatcgatgaaacgcttgccgctaaaggggcagaaaacatcgctgaccgcggtgaagcagatgcaagcgacgactttgaaggcacatatgaagaatggcgtgatcatatgtggagtgacgtagcagcctactttggtctcgacattgaaaacagtgaagataataaatctactctttcacttcaatttgtcgacagcgcggcggatatgccgcttgcgaaaatgcacggtgcgttttcaacgaacgtcgtagcaagcaaagaacttcaacagcctggcagtgcacgaagcacgcgacatcttgaaattgaacttccaaaagaagcttcttatcaagaaggagatcatttaggtgttattcctcgctattatgaaggaatagtaaaccgtgtaacagcaaggttcggcctaagcgcatcacagctgatccgtctggaagcagaagaagaaaaattagctcatttgccactcgctaaaacagtatccgtagaagagcttctgcaatacgtggagcttcaagatcctgttacgcgcacgcagcttcgcgcaatggctgctaaaacggtctgcccgccgcataaagtagagcttgaagccttgcttggcaagcaagcctacaaagaacaagtgctggcaaaacgtttaacaatgcttgaactgcttgaaaaatacccggcgtgtgaaatgagtttcagcgaatttatcgcccttctgccaagcatacgcccgcgctattactcgatttcttcatcacctcgtgtcgatgaaaaacaagcaagcatcacggtcagcgttgtctcaggaccggcgtggagcggatatggagaatataaaggaattgcgtcgaactatcttgccgagctgcaagaaggagatacgattacgtgctttatttccacaccgcagtcagagtttacgctgccaaaagaccctgaaacgccgcttatcatggtcggaccgggaacaggcgtcgcgccgtttagaggctttgtgcaggcgcgcaaacagctaaaagaacaaggacagtcacttggagaagcacatttatacttcggctgccgttcacctcatgaagactatctgtatcaagaagagcttgaaaacgcccaaagcgaaggcatcattacgcttcataccgctttttctcgcatgccgaatcagccgaaaacatacgttcagcacgtaatggaacaagacggcaagaaattgattgaacttcttgatcaaggagcgcacttctatatttgcggagacggaagccaaatggcacctgccgttgaagcaacgcttatgaaaagctatgctgacgttcaccaagtgagtgaagcagacgctcgcttatggctgcagcagctagaagaaaaaggccgatacgcaaaagacgtgtggctgggg

SEQ ID NO: 858 - protein, 1049 aa, synthetic construct
  REGION 1..1049: note = variant of P450 oxidase from Bacillus megaterium
MTIKEMPQPKTFGELKNLPLLNTDKPVQALMRIADELGEIFKFEAPGSVTRYLSSQRLIKEACDESRFDKNLSQALKFARDFVGDGLVTSWTHEPNWKKAHNILVPSFSQHAMGRYHAMMVDIAVQLVQKWERLNADEHIEVSEDMTRLTLDTIGLCLFNYRFNSFYRDTPHPFIVSVVRALDEVMNKLQRANPDDPAYDENKRQCQEDIKVMNDYVDKIIADRKARGEQSHDLLTQMLNGKDRETGEPLDDGNIRQQIITFLIAGHQTTSGLLSFALYFLVKNPRVLQKVAEEAARVLVDPVPSYKQVKQLKYVGMVLNEALRLWPVAPMFSLYAKEDTVLGGEYPLTKGDEVMVLVPQLHRDKTIWGDDVEEFRPERFENPSAIPQHAFKPFGNGQRACIGQQFALHSATLVLGMMLKHFDFEDHTNYELVIKESRTLKPEGFVVKAKSKGIPLGGIPSPSTEQSAKKVRKKAENAHNTPLLVLYGSNAGTAEGTARDLADIAMSKGFAPQVATLDSHAGNLPREGAVLIVTASYNGHPPDNAKQFVDWLDQASADEVKGVRYSVFGCGDKNWAGTYQKVPAFIDETLAAKGAENIADRGEADASDDFEGTYEEWRDHMWSDVAAYFGLDIENSEDNKSTLSLQFVDSAADMPLAKMHGAFSTNVVASKELQQPGSARSTRHLEIELPKEASYQEGDHLGVIPRYYEGIVNRVTARFGLSASQLIRLEAEEEKLAHLPLAKTVSVEELLQYVELQDPVTRTQLRAMAAKTVCPPHKVELEALLGKQAYKEQVLAKRLTMLELLEKYPACEMSFSEFIALLPSIRPRYYSISSSPRVDEKQASITVSVVSGPAWSGYGEYKGIASNYLAELQEGDTITCFISTPQSEFTLPKDPETPLIMVGPGTGVAPFRGFVQARKQLKEQGQSLGEAHLYFGCRSPHEDYLYQEELENAQSEGIITLHTAFSRMPNQPKTYVQHVMEQDGKKLIELLDQGAHFYICGDGSQMAPAVEATLMKSYADVHQVSEADARLWLQQLEEKGRYAKDVWLG

SEQ ID NO: 859 - DNA, 3147 bp, synthetic construct
  misc_feature 1..3147: note = variant of P450 oxidase from Bacillus megaterium
  source 1..3147: mol_type = other DNA
atgacaattaaggaaatgcctcagcctaagacgtttggagaacttaaaaatttaccgttattaaacacagataaaccggttcaagctttgatgcgtattgcggatgaattaggagaaatctttaaattcgaggcgcctggtagcgtaacgcgctatttatcaagtcagcgtctaattaaagaagcatgcgatgaatcacgctttgataaaaacttaagtcaagcgcttaaatttgcacgtgattttgttggagacgggctggttacaagctggacgcatgaaccgaattggaaaaaagcgcataatatcttagttccaagctttagtcagcatgcaatggggcgttatcatgcgatgatggtcgatatcgccgtgcagcttgttcaaaagtgggagcgtctaaatgcagatgagcatattgaagtatcggaagacatgacacgtttaacgcttgatacaattggtctttgcctgtttaactatcgctttaacagcttttaccgagatacgcctcatccatttattgtgagtgtggttcgtgcactggatgaagtaatgaacaagctgcagcgagcaaatccagacgacccagcttatgatgaaaacaagcgccagtgtcaagaagatatcaaggtgatgaacgactatgtagataaaattattgcagatcgcaaagcaaggggtgaacaaagtcatgatttattaacgcagatgctaaacggaaaagatccaagtacgggtgagccgcttgatgacgggaacattcgtcagcaaattattacattcttaattgcgggacaccaaacgacaagtggtcttttatcatttgcgctgtatttcttagtgaaaaatccacgtgtattacaaaaagtagcagaagaagcagcacgagttctagtagatcctgttccaagctacaaacaagtcaaacagcttaaatatgttggcatggtcttaaacgaagcgctgcgcttatggccagtagcgcctatgttttccctatatgcaaaagaagatacggtgcttggaggagaatatcctttaacgaaaggcgacgaagtaatggttctggtgcctcagcttcaccgtgataaaacaatttggggagacgatgtggaggagttccgtccagagcgttttgaaaatccaagtgcgattccgcagcatgcgtttaaaccgtttggaaacggtcagcgtgcgtgtatcggtcagcagttcgctcttcatagtgcaacgctggtacttggtatgatgctaaaacactttgactttgaagatcatacaaactacgagctcgttattaaagaatcgcggacgttaaaacctgaaggctttgtggtaaaagcaaaatcgaaaggcattccgcttggcggtattccttcacctagcactgaacagtctgctaaaaaagtacgcaaaaaggcagaaaacgctcataatacgccgctgcttgtgctatacggttcaaatgcgggaacagctgaaggaacggcgcgtgatttagcagatattgcaatgagcaaaggatttgcaccgcaggtcgcaacgcttgattcacacgccggtaatcttccgcgcgaaggagctgtattaattgtaacggcgtcttataacggtcatccgcctgataacgcaaagcaatttgtcgactggttagaccaagcgtctgcggatgaagtaaaaggcgttcgctactccgtatttggatgcggcgataaaaattgggcggggacgtatcaaaaagtgcctgcttttatcgatgaaacgcttgccgctaaaggggcagaaaacatcgctgaccgcggtgaagcagatgcaagcgacgactttgaaggcacatatgaagaatggcgtgatcatatgtggagtgacgtagcagcctactttggtctcgacattgaaaacagtgaagataataaatctactctttcacttcaatttgtcgacagcgcggcggatatgccgcttgcgaaaatgcacggtgcgttttcaacgaacgtcgtagcaagcaaagaacttcaacagcctggcagtgcacgaagcacgcgacatcttgaaattgaacttccaaaagaagcttcttatcaagaaggagatcatttaggtgttattcctcgctattatgaaggaatagtaaaccgtgtaacagcaaggttcggcctaagcgcatcacagctgatccgtctggaagcagaagaagaaaaattagctcatttgccactcgctaaaacagtatccgtagaagagcttctgcaatacgtggagcttcaagatcctgttacgcgcacgcagcttcgcgcaatggctgctaaaacggtctgcccgccgcataaagtagagcttgaagccttgcttggcaagcaagcctacaaagaacaagtgctggcaaaacgtttaacaatgcttgaactgcttgaaaaatacccggcgtgtgaaatgagtttcagcgaatttatcgcccttctgccaagcatacgcccgcgctattactcgatttcttcatcacctcgtgtcgatgaaaaacaagcaagcatcacggtcagcgttgtctcaggaccggcgtggagcggatatggagaatataaaggaattgcgtcgaactatcttgccgagctgcaagaaggagatacgattacgtgctttatttccacaccgcagtcagagtttacgctgccaaaagaccctgaaacgccgcttatcatggtcggaccgggaacaggcgtcgcgccgtttagaggctttgtgcaggcgcgcaaacagctaaaagaacaaggacagtcacttggagaagcacatttatacttcggctgccgttcacctcatgaagactatctgtatcaagaagagcttgaaaacgcccaaagcgaaggcatcattacgcttcataccgctttttctcgcatgccgaatcagccgaaaacatacgttcagcacgtaatggaacaagacggcaagaaattgattgaacttcttgatcaaggagcgcacttctatatttgcggagacggaagccaaatggcacctgccgttgaagcaacgcttatgaaaagctatgctgacgttcaccaagtgagtgaagcagacgctcgcttatggctgcagcagctagaagaaaaaggccgatacgcaaaagacgtgtggctgggg

SEQ ID NO: 860 - protein, 1049 aa, synthetic construct
  REGION 1..1049: note = variant of P450 oxidase from Bacillus megaterium
MTIKEMPQPKTFGELKNLPLLNTDKPVQALMRIADELGEIFKFEAPGSVTRYLSSQRLIKEACDESRFDKNLSQALKFARDFVGDGLVTSWTHEPNWKKAHNILVPSFSQHAMGRYHAMMVDIAVQLVQKWERLNADEHIEVSEDMTRLTLDTIGLCLFNYRFNSFYRDTPHPFIVSVVRALDEVMNKLQRANPDDPAYDENKRQCQEDIKVMNDYVDKIIADRKARGEQSHDLLTQMLNGKDPSTGEPLDDGNIRQQIITFLIAGHQTTSGLLSFALYFLVKNPRVLQKVAEEAARVLVDPVPSYKQVKQLKYVGMVLNEALRLWPVAPMFSLYAKEDTVLGGEYPLTKGDEVMVLVPQLHRDKTIWGDDVEEFRPERFENPSAIPQHAFKPFGNGQRACIGQQFALHSATLVLGMMLKHFDFEDHTNYELVIKESRTLKPEGFVVKAKSKGIPLGGIPSPSTEQSAKKVRKKAENAHNTPLLVLYGSNAGTAEGTARDLADIAMSKGFAPQVATLDSHAGNLPREGAVLIVTASYNGHPPDNAKQFVDWLDQASADEVKGVRYSVFGCGDKNWAGTYQKVPAFIDETLAAKGAENIADRGEADASDDFEGTYEEWRDHMWSDVAAYFGLDIENSEDNKSTLSLQFVDSAADMPLAKMHGAFSTNVVASKELQQPGSARSTRHLEIELPKEASYQEGDHLGVIPRYYEGIVNRVTARFGLSASQLIRLEAEEEKLAHLPLAKTVSVEELLQYVELQDPVTRTQLRAMAAKTVCPPHKVELEALLGKQAYKEQVLAKRLTMLELLEKYPACEMSFSEFIALLPSIRPRYYSISSSPRVDEKQASITVSVVSGPAWSGYGEYKGIASNYLAELQEGDTITCFISTPQSEFTLPKDPETPLIMVGPGTGVAPFRGFVQARKQLKEQGQSLGEAHLYFGCRSPHEDYLYQEELENAQSEGIITLHTAFSRMPNQPKTYVQHVMEQDGKKLIELLDQGAHFYICGDGSQMAPAVEATLMKSYADVHQVSEADARLWLQQLEEKGRYAKDVWLG

SEQ ID NO: 861 - DNA, 3147 bp, synthetic construct
  misc_feature 1..3147: note = variant of P450 oxidase from Bacillus megaterium
  source 1..3147: mol_type = other DNA
atgacaattaaggaaatgcctcagcctaagacgtttggagaacttaaaaatttaccgttattaaacacagataaaccggttcaagctttgatgcgtattgcggatgaattaggagaaatctttaaattcgaggcgcctggtagcgtaacgcgctatttatcaagtcagcgtctaattaaagaagcatgcgatgaatcacgctttgataaaaacttaagtcaagcgcttaaatttgcacgtgattttgttggagacgggctggttacaagctggacgcatgaaccgaattggaaaaaagcgcataatatcttagttccaagctttagtcagcatgcaatggggcgttatcatgcgatgatggtcgatatcgccgtgcagatggttcaaaagtgggagcgtctaaatgcagatgagcatattgaagtatcggaagacatgacacgtttaacgcttgatacaattggtctttgcctgtttaactatcgctttaacagcttttaccgagatacgcctcatccatttattgtgagtgtggttcgtgcactggatgaagtaatgaacaagctgcagcgagcaaatccagacgacccagcttatgatgaaaacaagcgccagtgtcaagaagatatcaaggtgatgaacgactatgtagataaaattattgcagatcgcaaagcaaggggtgaacaaagtcatgatttattaacgcagatgctaaacggaaaagatccagaaacgggtgagccgcttgatgacgggaacattcgtcagcaaattattacattcttaattgcgggacaccaaacgacaagtggtcttttatcatttgcgctgtatttcttagtgaaaaatccacgtgtattacaaaaagtagcagaagaagcagcacgagttctagtagatcctgttccaagctacaaacaagtcaaacagcttaaatatgttggcatggtcttaaacgaagcgctgcgcttatggccagtagcgcctatgttttccctatatgcaaaagaagatacggtgcttggaggagaatatcctttaacgaaaggcgacgaagtaatggttctggtgcctcagcttcaccgtgataaaacaatttggggagacgatgtggaggagttccgtccagagcgttttgaaaatccaagtgcgattccgcagcatgcgtttaaaccgtttggaaacggtcagcgtgcgtgtatcggtcagcagttcgctcttcatagtgcaacgctggtacttggtatgatgctaaaacactttgactttgaagatcatacaaactacgagctcgttattaaagaatcgcggacgttaaaacctgaaggctttgtggtaaaagcaaaatcgaaaggcattccgcttggcggtattccttcacctagcactgaacagtctgctaaaaaagtacgcaaaaaggcagaaaacgctcataatacgccgctgcttgtgctatacggttcaaatgcgggaacagctgaaggaacggcgcgtgatttagcagatattgcaatgagcaaaggatttgcaccgcaggtcgcaacgcttgattcacacgccggtaatcttccgcgcgaaggagctgtattaattgtaacggcgtcttataacggtcatccgcctgataacgcaaagcaatttgtcgactggttagaccaagcgtctgcggatgaagtaaaaggcgttcgctactccgtatttggatgcggcgataaaaattgggcggggacgtatcaaaaagtgcctgcttttatcgatgaaacgcttgccgctaaaggggcagaaaacatcgctgaccgcggtgaagcagatgcaagcgacgactttgaaggcacatatgaagaatggcgtgatcatatgtggagtgacgtagcagcctactttggtctcgacattgaaaacagtgaagataataaatctactctttcacttcaatttgtcgacagcgcggcggatatgccgcttgcgaaaatgcacggtgcgttttcaacgaacgtcgtagcaagcaaagaacttcaacagcctggcagtgcacgaagcacgcgacatcttgaaattgaacttccaaaagaagcttcttatcaagaaggagatcatttaggtgttattcctcgctattatgaaggaatagtaaaccgtgtaacagcaaggttcggcctaagcgcatcacagctgatccgtctggaagcagaagaagaaaaattagctcatttgccactcgctaaaacagtatccgtagaagagcttctgcaatacgtggagcttcaagatcctgttacgcgcacgcagcttcgcgcaatggctgctaaaacggtctgcccgccgcataaagtagagcttgaagccttgcttggcaagcaagcctacaaagaacaagtgctggcaaaacgtttaacaatgcttgaactgcttgaaaaatacccggcgtgtgaaatgagtttcagcgaatttatcgcccttctgccaagcatacgcccgcgctattactcgatttcttcatcacctcgtgtcgatgaaaaacaagcaagcatcacggtcagcgttgtctcaggaccggcgtggagcggatatggagaatataaaggaattgcgtcgaactatcttgccgagctgcaagaaggagatacgattacgtgctttatttccacaccgcagtcagagtttacgctgccaaaagaccctgaaacgccgcttatcatggtcggaccgggaacaggcgtcgcgccgtttagaggctttgtgcaggcgcgcaaacagctaaaagaacaaggacagtcacttggagaagcacatttatacttcggctgccgttcacctcatgaagactatctgtatcaagaagagcttgaaaacgcccaaagcgaaggcatcattacgcttcataccgctttttctcgcatgccgaatcagccgaaaacatacgttcagcacgtaatggaacaagacggcaagaaattgattgaacttcttgatcaaggagcgcacttctatatttgcggagacggaagccaaatggcacctgccgttgaagcaacgcttatgaaaagctatgctgacgttcaccaagtgagtgaagcagacgctcgcttatggctgcagcagctagaagaaaaaggccgatacgcaaaagacgtgtggctgggg

SEQ ID NO: 862 - protein, 1049 aa, synthetic construct
  REGION 1..1049: note = variant of P450 oxidase from Bacillus megaterium
MTIKEMPQPKTFGELKNLPLLNTDKPVQALMRIADELGEIFKFEAPGSVTRYLSSQRLIKEACDESRFDKNLSQALKFARDFVGDGLVTSWTHEPNWKKAHNILVPSFSQHAMGRYHAMMVDIAVQMVQKWERLNADEHIEVSEDMTRLTLDTIGLCLFNYRFNSFYRDTPHPFIVSVVRALDEVMNKLQRANPDDPAYDENKRQCQEDIKVMNDYVDKIIADRKARGEQSHDLLTQMLNGKDPETGEPLDDGNIRQQIITFLIAGHQTTSGLLSFALYFLVKNPRVLQKVAEEAARVLVDPVPSYKQVKQLKYVGMVLNEALRLWPVAPMFSLYAKEDTVLGGEYPLTKGDEVMVLVPQLHRDKTIWGDDVEEFRPERFENPSAIPQHAFKPFGNGQRACIGQQFALHSATLVLGMMLKHFDFEDHTNYELVIKESRTLKPEGFVVKAKSKGIPLGGIPSPSTEQSAKKVRKKAENAHNTPLLVLYGSNAGTAEGTARDLADIAMSKGFAPQVATLDSHAGNLPREGAVLIVTASYNGHPPDNAKQFVDWLDQASADEVKGVRYSVFGCGDKNWAGTYQKVPAFIDETLAAKGAENIADRGEADASDDFEGTYEEWRDHMWSDVAAYFGLDIENSEDNKSTLSLQFVDSAADMPLAKMHGAFSTNVVASKELQQPGSARSTRHLEIELPKEASYQEGDHLGVIPRYYEGIVNRVTARFGLSASQLIRLEAEEEKLAHLPLAKTVSVEELLQYVELQDPVTRTQLRAMAAKTVCPPHKVELEALLGKQAYKEQVLAKRLTMLELLEKYPACEMSFSEFIALLPSIRPRYYSISSSPRVDEKQASITVSVVSGPAWSGYGEYKGIASNYLAELQEGDTITCFISTPQSEFTLPKDPETPLIMVGPGTGVAPFRGFVQARKQLKEQGQSLGEAHLYFGCRSPHEDYLYQEELENAQSEGIITLHTAFSRMPNQPKTYVQHVMEQDGKKLIELLDQGAHFYICGDGSQMAPAVEATLMKSYADVHQVSEADARLWLQQLEEKGRYAKDVWLG

SEQ ID NO: 863 - DNA, 3147 bp, synthetic construct
  misc_feature 1..3147: note = variant of P450 oxidase from Bacillus megaterium
  source 1..3147: mol_type = other DNA
atgacaattaaggaaatgcctcagcctaagacgtttggagaacttaaaaatttaccgttattaaacacagataaaccggttcaagctttgatgcgtattgcggatgaattaggagaaatctttaaattcgaggcgcctggtagcgtaacgcgctatttatcaagtcagcgtctaattaaagaagcatgcgatgaatcacgctttgataaaaacttaagtcaagcgcttaaatttgcacgtgattttgttggagacgggctggttacaagctggacgcatgaaccgaattggaaaaaagcgcataatatcttagttccaagctttagtcagcatgcaatggggcgttatcatgcgatgatggtcgatatcgccgtgcagcttgttcaaaagtgggagcgtctaaatgcagatgagcatattgaagtatcggaagacatgacacgtttaacgcttgatacaattggtctttgcctgtttaactatcgctttaacagcttttaccgagatacgcctcatccatttattgtgagtgtggttcgtgcactggatgaagtaatgaacaagctgcagcgagcaaatacggacgacccagcttatgatgaaaacaagcgccagtgtcaagaagatatcaaggtgatgaacgactatgtagataaaattattgcagatcgcaaagcaaggggtgaacaaagtcatgatttattaacgcagatgctaaacggaaaagatccagaaacgggtgagccgcttgatgacgggaacattcgtcagcaaattattacattcttaattgcgggacaccaaacgacaagtggtcttttatcatttgcgctgtatttcttagtgaaaaatccacgtgtattacaaaaagtagcagaagaagcagcacgagttctagtagatcctgttccaagctacaaacaagtcaaacagcttaaatatgttggcatggtcttaaacgaagcgctgcgcttatggccagtagcgcctatgttttccctatatgcaaaagaagatacggtgcttggaggagaatatcctttaacgaaaggcgacgaagtaatggttctggtgcctcagcttcaccgtgataaaacaatttggggagacgatgtggaggagttccgtccagagcgttttgaaaatccaagtgcgattccgcagcatgcgtttaaaccgtttggaaacggtcagcgtgcgtgtatcggtcagcagttcgctcttcatagtgcaacgctggtacttggtatgatgctaaaacactttgactttgaagatcatacaaactacgagctcgttattaaagaatcgcggacgttaaaacctgaaggctttgtggtaaaagcaaaatcgaaaggcattccgcttggcggtattccttcacctagcactgaacagtctgctaaaaaagtacgcaaaaaggcagaaaacgctcataatacgccgctgcttgtgctatacggttcaaatgcgggaacagctgaaggaacggcgcgtgatttagcagatattgcaatgagcaaaggatttgcaccgcaggtcgcaacgcttgattcacacgccggtaatcttccgcgcgaaggagctgtattaattgtaacggcgtcttataacggtcatccgcctgataacgcaaagcaatttgtcgactggttagaccaagcgtctgcggatgaagtaaaaggcgttcgctactccgtatttggatgcggcgataaaaattgggcggggacgtatcaaaaagtgcctgcttttatcgatgaaacgcttgccgctaaaggggcagaaaacatcgctgaccgcggtgaagcagatgcaagcgacgactttgaaggcacatatgaagaatggcgtgatcatatgtggagtgacgtagcagcctactttggtctcgacattgaaaacagtgaagataataaatctactctttcacttcaatttgtcgacagcgcggcggatatgccgcttgcgaaaatgcacggtgcgttttcaacgaacgtcgtagcaagcaaagaacttcaacagcctggcagtgcacgaagcacgcgacatcttgaaattgaacttccaaaagaagcttcttatcaagaaggagatcatttaggtgttattcctcgctattatgaaggaatagtaaaccgtgtaacagcaaggttcggcctaagcgcatcacagctgatccgtctggaagcagaagaagaaaaattagctcatttgccactcgctaaaacagtatccgtagaagagcttctgcaatacgtggagcttcaagatcctgttacgcgcacgcagcttcgcgcaatggctgctaaaacggtctgcccgccgcataaagtagagcttgaagccttgcttggcaagcaagcctacaaagaacaagtgctggcaaaacgtttaacaatgcttgaactgcttgaaaaatacccggcgtgtgaaatgagtttcagcgaatttatcgcccttctgccaagcatacgcccgcgctattactcgatttcttcatcacctcgtgtcgatgaaaaacaagcaagcatcacggtcagcgttgtctcaggaccggcgtggagcggatatggagaatataaaggaattgcgtcgaactatcttgccgagctgcaagaaggagatacgattacgtgctttatttccacaccgcagtcagagtttacgctgccaaaagaccctgaaacgccgcttatcatggtcggaccgggaacaggcgtcgcgccgtttagaggctttgtgcaggcgcgcaaacagctaaaagaacaaggacagtcacttggagaagcacatttatacttcggctgccgttcacctcatgaagactatctgtatcaagaagagcttgaaaacgcccaaagcgaaggcatcattacgcttcataccgctttttctcgcatgccgaatcagccgaaaacatacgttcagcacgtaatggaacaagacggcaagaaattgattgaacttcttgatcaaggagcgcacttctatatttgcggagacggaagccaaatggcacctgccgttgaagcaacgcttatgaaaagctatgctgacgttcaccaagtgagtgaagcagacgctcgcttatggctgcagcagctagaagaaaaaggccgatacgcaaaagacgtgtggctgggg

SEQ ID NO: 864 - protein, 1049 aa, synthetic construct
  REGION 1..1049: note = variant of P450 oxidase from Bacillus megaterium
MTIKEMPQPKTFGELKNLPLLNTDKPVQALMRIADELGEIFKFEAPGSVTRYLSSQRLIKEACDESRFDKNLSQALKFARDFVGDGLVTSWTHEPNWKKAHNILVPSFSQHAMGRYHAMMVDIAVQLVQKWERLNADEHIEVSEDMTRLTLDTIGLCLFNYRFNSFYRDTPHPFIVSVVRALDEVMNKLQRANTDDPAYDENKRQCQEDIKVMNDYVDKIIADRKARGEQSHDLLTQMLNGKDPETGEPLDDGNIRQQIITFLIAGHQTTSGLLSFALYFLVKNPRVLQKVAEEAARVLVDPVPSYKQVKQLKYVGMVLNEALRLWPVAPMFSLYAKEDTVLGGEYPLTKGDEVMVLVPQLHRDKTIWGDDVEEFRPERFENPSAIPQHAFKPFGNGQRACIGQQFALHSATLVLGMMLKHFDFEDHTNYELVIKESRTLKPEGFVVKAKSKGIPLGGIPSPSTEQSAKKVRKKAENAHNTPLLVLYGSNAGTAEGTARDLADIAMSKGFAPQVATLDSHAGNLPREGAVLIVTASYNGHPPDNAKQFVDWLDQASADEVKGVRYSVFGCGDKNWAGTYQKVPAFIDETLAAKGAENIADRGEADASDDFEGTYEEWRDHMWSDVAAYFGLDIENSEDNKSTLSLQFVDSAADMPLAKMHGAFSTNVVASKELQQPGSARSTRHLEIELPKEASYQEGDHLGVIPRYYEGIVNRVTARFGLSASQLIRLEAEEEKLAHLPLAKTVSVEELLQYVELQDPVTRTQLRAMAAKTVCPPHKVELEALLGKQAYKEQVLAKRLTMLELLEKYPACEMSFSEFIALLPSIRPRYYSISSSPRVDEKQASITVSVVSGPAWSGYGEYKGIASNYLAELQEGDTITCFISTPQSEFTLPKDPETPLIMVGPGTGVAPFRGFVQARKQLKEQGQSLGEAHLYFGCRSPHEDYLYQEELENAQSEGIITLHTAFSRMPNQPKTYVQHVMEQDGKKLIELLDQGAHFYICGDGSQMAPAVEATLMKSYADVHQVSEADARLWLQQLEEKGRYAKDVWLG

SEQ ID NO: 865 - DNA, 3147 bp, synthetic construct
  misc_feature 1..3147: note = variant of P450 oxidase from Bacillus megaterium
  source 1..3147: mol_type = other DNA
atgacaattaaggaaatgcctcagcctaagacgtttggagaacttaaaaatttaccgttattaaacacagataaaccggttcaagctttgatgcgtattgcggatgaattaggagaaatctttaaattcgaggcgcctggtagcgtaacgcgctatttatcaagtcagcgtctaattaaagaagcatgcgatgaatcacgctttgataaaaacttaagtcaagcgcttaaatttgcacgtgattttgttggagacgggctggttacaagctggacgcatgaaccgaattggaaaaaagcgcataatatcttagttccaagctttagtcagcatgcaatggggcgttatcatgcgatgatggtcgatatcgccgtgcagcttgttcaaaagtgggagcgtctaaatgcagatgagcatattgaagtatcggaagacatgacacgtttaacgcttgatacaattggtctttgcctgtttaactatcgctttaacagcttttaccgagatacgcctcatccatttattgtgagtgtggttcgtgcactggatgaagtaatgaacaagctgcagagtgcaaatccagacgacccagcttatgatgaaaacaagcgccagtgtcaagaagatatcaaggtgatgaacgactatgtagataaaattattgcagatcgcaaagcaaggggtgaacaaagtcatgatttattaacgcagatgctaaacggaaaagatccagaaacgggtgagccgcttgatgacgggaacattcgtcagcaaattattacattcttaattgcgggacaccaaacgacaagtggtcttttatcatttgcgctgtatttcttagtgaaaaatccacgtgtattacaaaaagtagcagaagaagcagcacgagttctagtagatcctgttccaagctacaaacaagtcaaacagcttaaatatgttggcatggtcttaaacgaagcgctgcgcttatggccagtagcgcctatgttttccctatatgcaaaagaagatacggtgcttggaggagaatatcctttaacgaaaggcgacgaagtaatggttctggtgcctcagcttcaccgtgataaaacaatttggggagacgatgtggaggagttccgtccagagcgttttgaaaatccaagtgcgattccgcagcatgcgtttaaaccgtttggaaacggtcagcgtgcgtgtatcggtcagcagttcgctcttcatagtgcaacgctggtacttggtatgatgctaaaacactttgactttgaagatcatacaaactacgagctcgttattaaagaatcgcggacgttaaaacctgaaggctttgtggtaaaagcaaaatcgaaaggcattccgcttggcggtattccttcacctagcactgaacagtctgctaaaaaagtacgcaaaaaggcagaaaacgctcataatacgccgctgcttgtgctatacggttcaaatgcgggaacagctgaaggaacggcgcgtgatttagcagatattgcaatgagcaaaggatttgcaccgcaggtcgcaacgcttgattcacacgccggtaatcttccgcgcgaaggagctgtattaattgtaacggcgtcttataacggtcatccgcctgataacgcaaagcaatttgtcgactggttagaccaagcgtctgcggatgaagtaaaaggcgttcgctactccgtatttggatgcggcgataaaaattgggcggggacgtatcaaaaagtgcctgcttttatcgatgaaacgcttgccgctaaaggggcagaaaacatcgctgaccgcggtgaagcagatgcaagcgacgactttgaaggcacatatgaagaatggcgtgatcatatgtggagtgacgtagcagcctactttggtctcgacattgaaaacagtgaagataataaatctactctttcacttcaatttgtcgacagcgcggcggatatgccgcttgcgaaaatgcacggtgcgttttcaacgaacgtcgtagcaagcaaagaacttcaacagcctggcagtgcacgaagcacgcgacatcttgaaattgaacttccaaaagaagcttcttatcaagaaggagatcatttaggtgttattcctcgctattatgaaggaatagtaaaccgtgtaacagcaaggttcggcctaagcgcatcacagctgatccgtctggaagcagaagaagaaaaattagctcatttgccactcgctaaaacagtatccgtagaagagcttctgcaatacgtggagcttcaagatcctgttacgcgcacgcagcttcgcgcaatggctgctaaaacggtctgcccgccgcataaagtagagcttgaagccttgcttggcaagcaagcctacaaagaacaagtgctggcaaaacgtttaacaatgcttgaactgcttgaaaaatacccggcgtgtgaaatgagtttcagcgaatttatcgcccttctgccaagcatacgcccgcgctattactcgatttcttcatcacctcgtgtcgatgaaaaacaagcaagcatcacggtcagcgttgtctcaggaccggcgtggagcggatatggagaatataaaggaattgcgtcgaactatcttgccgagctgcaagaaggagatacgattacgtgctttatttccacaccgcagtcagagtttacgctgccaaaagaccctgaaacgccgcttatcatggtcggaccgggaacaggcgtcgcgccgtttagaggctttgtgcaggcgcgcaaacagctaaaagaacaaggacagtcacttggagaagcacatttatacttcggctgccgttcacctcatgaagactatctgtatcaagaagagcttgaaaacgcccaaagcgaaggcatcattacgcttcataccgctttttctcgcatgccgaatcagccgaaaacatacgttcagcacgtaatggaacaagacggcaagaaattgattgaacttcttgatcaaggagcgcacttctatatttgcggagacggaagccaaatggcacctgccgttgaagcaacgcttatgaaaagctatgctgacgttcaccaagtgagtgaagcagacgctcgcttatggctgcagcagctagaagaaaaaggccgatacgcaaaagacgtgtggctgggg

SEQ ID NO: 866 - protein, 1049 aa, synthetic construct
  REGION 1..1049: note = variant of P450 oxidase from Bacillus megaterium
MTIKEMPQPKTFGELKNLPLLNTDKPVQALMRIADELGEIFKFEAPGSVTRYLSSQRLIKEACDESRFDKNLSQALKFARDFVGDGLVTSWTHEPNWKKAHNILVPSFSQHAMGRYHAMMVDIAVQLVQKWERLNADEHIEVSEDMTRLTLDTIGLCLFNYRFNSFYRDTPHPFIVSVVRALDEVMNKLQSANPDDPAYDENKRQCQEDIKVMNDYVDKIIADRKARGEQSHDLLTQMLNGKDPETGEPLDDGNIRQQIITFLIAGHQTTSGLLSFALYFLVKNPRVLQKVAEEAARVLVDPVPSYKQVKQLKYVGMVLNEALRLWPVAPMFSLYAKEDTVLGGEYPLTKGDEVMVLVPQLHRDKTIWGDDVEEFRPERFENPSAIPQHAFKPFGNGQRACIGQQFALHSATLVLGMMLKHFDFEDHTNYELVIKESRTLKPEGFVVKAKSKGIPLGGIPSPSTEQSAKKVRKKAENAHNTPLLVLYGSNAGTAEGTARDLADIAMSKGFAPQVATLDSHAGNLPREGAVLIVTASYNGHPPDNAKQFVDWLDQASADEVKGVRYSVFGCGDKNWAGTYQKVPAFIDETLAAKGAENIADRGEADASDDFEGTYEEWRDHMWSDVAAYFGLDIENSEDNKSTLSLQFVDSAADMPLAKMHGAFSTNVVASKELQQPGSARSTRHLEIELPKEASYQEGDHLGVIPRYYEGIVNRVTARFGLSASQLIRLEAEEEKLAHLPLAKTVSVEELLQYVELQDPVTRTQLRAMAAKTVCPPHKVELEALLGKQAYKEQVLAKRLTMLELLEKYPACEMSFSEFIALLPSIRPRYYSISSSPRVDEKQASITVSVVSGPAWSGYGEYKGIASNYLAELQEGDTITCFISTPQSEFTLPKDPETPLIMVGPGTGVAPFRGFVQARKQLKEQGQSLGEAHLYFGCRSPHEDYLYQEELENAQSEGIITLHTAFSRMPNQPKTYVQHVMEQDGKKLIELLDQGAHFYICGDGSQMAPAVEATLMKSYADVHQVSEADARLWLQQLEEKGRYAKDVWLG

SEQ ID NO: 867 - DNA, 3147 bp, synthetic construct
  misc_feature 1..3147: note = variant of P450 oxidase from Bacillus megaterium
  source 1..3147: mol_type = other DNA
atgacaattaaggaaatgcctcagcctaagacgtttggagaacttaaaaatttaccgttattaaacacagataaaccggttcaagctttgatgcgtattgcggatgaattaggagaaatctttaaattcgaggcgcctggtagcgtaacgcgctatttatcaagtcagcgtctaattaaagaagcatgcgatgaatcacgctttgataaaaacttaagtcaagcgcttaaatttgcacgtgattttgttggagacgggctggttacaagctggacgcatgaaccgaattggaaaaaagcgcataatatcttagttccaagctttagtcagcatgcaatggggcgttatcatgcgatgatggtcgatatcgccgtgcagcttgttcaaaagtgggagcgtctaaatgcagatgagcatattgaagtatcggaagacatgacacgtttaacgcttgatacaattggtctttgcctgtttaactatcgctttaacagcttttaccgagatacgcctcatccatttattgtgagtgtggttcgtgcactggatgaagtaatgaacaagctgcagcgagcaaatccagacgacccagcttatgatgaaaacaagcgccagtgtcaagaagatatcaaggtgatgaacgactatgtagataaaattattgcagatcgcaaagcaaggggtgaacaaagtcatgatttattagggcagatgctaaacggaaaagatccagaaacgggtgagccgcttgatgacgggaacattcgtcagcaaattattacattcttaattgcgggacaccaaacgacaagtggtcttttatcatttgcgctgtatttcttagtgaaaaatccacgtgtattacaaaaagtagcagaagaagcagcacgagttctagtagatcctgttccaagctacaaacaagtcaaacagcttaaatatgttggcatggtcttaaacgaagcgctgcgcttatggccagtagcgcctatgttttccctatatgcaaaagaagatacggtgcttggaggagaatatcctttaacgaaaggcgacgaagtaatggttctggtgcctcagcttcaccgtgataaaacaatttggggagacgatgtggaggagttccgtccagagcgttttgaaaatccaagtgcgattccgcagcatgcgtttaaaccgtttggaaacggtcagcgtgcgtgtatcggtcagcagttcgctcttcatagtgcaacgctggtacttggtatgatgctaaaacactttgactttgaagatcatacaaactacgagctcgttattaaagaatcgcggacgttaaaacctgaaggctttgtggtaaaagcaaaatcgaaaggcattccgcttggcggtattccttcacctagcactgaacagtctgctaaaaaagtacgcaaaaaggcagaaaacgctcataatacgccgctgcttgtgctatacggttcaaatgcgggaacagctgaaggaacggcgcgtgatttagcagatattgcaatgagcaaaggatttgcaccgcaggtcgcaacgcttgattcacacgccggtaatcttccgcgcgaaggagctgtattaattgtaacggcgtcttataacggtcatccgcctgataacgcaaagcaatttgtcgactggttagaccaagcgtctgcggatgaagtaaaaggcgttcgctactccgtatttggatgcggcgataaaaattgggcggggacgtatcaaaaagtgcctgcttttatcgatgaaacgcttgccgctaaaggggcagaaaacatcgctgaccgcggtgaagcagatgcaagcgacgactttgaaggcacatatgaagaatggcgtgatcatatgtggagtgacgtagcagcctactttggtctcgacattgaaaacagtgaagataataaatctactctttcacttcaatttgtcgacagcgcggcggatatgccgcttgcgaaaatgcacggtgcgttttcaacgaacgtcgtagcaagcaaagaacttcaacagcctggcagtgcacgaagcacgcgacatcttgaaattgaacttccaaaagaagcttcttatcaagaaggagatcatttaggtgttattcctcgctattatgaaggaatagtaaaccgtgtaacagcaaggttcggcctaagcgcatcacagctgatccgtctggaagcagaagaagaaaaattagctcatttgccactcgctaaaacagtatccgtagaagagcttctgcaatacgtggagcttcaagatcctgttacgcgcacgcagcttcgcgcaatggctgctaaaacggtctgcccgccgcataaagtagagcttgaagccttgcttggcaagcaagcctacaaagaacaagtgctggcaaaacgtttaacaatgcttgaactgcttgaaaaatacccggcgtgtgaaatgagtttcagcgaatttatcgcccttctgccaagcatacgcccgcgctattactcgatttcttcatcacctcgtgtcgatgaaaaacaagcaagcatcacggtcagcgttgtctcaggaccggcgtggagcggatatggagaatataaaggaattgcgtcgaactatcttgccgagctgcaagaaggagatacgattacgtgctttatttccacaccgcagtcagagtttacgctgccaaaagaccctgaaacgccgcttatcatggtcggaccgggaacaggcgtcgcgccgtttagaggctttgtgcaggcgcgcaaacagctaaaagaacaaggacagtcacttggagaagcacatttatacttcggctgccgttcacctcatgaagactatctgtatcaagaagagcttgaaaacgcccaaagcgaaggcatcattacgcttcataccgctttttctcgcatgccgaatcagccgaaaacatacgttcagcacgtaatggaacaagacggcaagaaattgattgaacttcttgatcaaggagcgcacttctatatttgcggagacggaagccaaatggcacctgccgttgaagcaacgcttatgaaaagctatgctgacgttcaccaagtgagtgaagcagacgctcgcttatggctgcagcagctagaagaaaaaggccgatacgcaaaagacgtgtggctgggg

SEQ ID NO: 868 - protein, 1049 aa, synthetic construct
  REGION 1..1049: note = variant of P450 oxidase from Bacillus megaterium
MTIKEMPQPKTFGELKNLPLLNTDKPVQALMRIADELGEIFKFEAPGSVTRYLSSQRLIKEACDESRFDKNLSQALKFARDFVGDGLVTSWTHEPNWKKAHNILVPSFSQHAMGRYHAMMVDIAVQLVQKWERLNADEHIEVSEDMTRLTLDTIGLCLFNYRFNSFYRDTPHPFIVSVVRALDEVMNKLQRANPDDPAYDENKRQCQEDIKVMNDYVDKIIADRKARGEQSHDLLGQMLNGKDPETGEPLDDGNIRQQIITFLIAGHQTTSGLLSFALYFLVKNPRVLQKVAEEAARVLVDPVPSYKQVKQLKYVGMVLNEALRLWPVAPMFSLYAKEDTVLGGEYPLTKGDEVMVLVPQLHRDKTIWGDDVEEFRPERFENPSAIPQHAFKPFGNGQRACIGQQFALHSATLVLGMMLKHFDFEDHTNYELVIKESRTLKPEGFVVKAKSKGIPLGGIPSPSTEQSAKKVRKKAENAHNTPLLVLYGSNAGTAEGTARDLADIAMSKGFAPQVATLDSHAGNLPREGAVLIVTASYNGHPPDNAKQFVDWLDQASADEVKGVRYSVFGCGDKNWAGTYQKVPAFIDETLAAKGAENIADRGEADASDDFEGTYEEWRDHMWSDVAAYFGLDIENSEDNKSTLSLQFVDSAADMPLAKMHGAFSTNVVASKELQQPGSARSTRHLEIELPKEASYQEGDHLGVIPRYYEGIVNRVTARFGLSASQLIRLEAEEEKLAHLPLAKTVSVEELLQYVELQDPVTRTQLRAMAAKTVCPPHKVELEALLGKQAYKEQVLAKRLTMLELLEKYPACEMSFSEFIALLPSIRPRYYSISSSPRVDEKQASITVSVVSGPAWSGYGEYKGIASNYLAELQEGDTITCFISTPQSEFTLPKDPETPLIMVGPGTGVAPFRGFVQARKQLKEQGQSLGEAHLYFGCRSPHEDYLYQEELENAQSEGIITLHTAFSRMPNQPKTYVQHVMEQDGKKLIELLDQGAHFYICGDGSQMAPAVEATLMKSYADVHQVSEADARLWLQQLEEKGRYAKDVWLG

SEQ ID NO: 869 - DNA, 3147 bp, synthetic construct
  misc_feature 1..3147: note = variant of P450 oxidase from Bacillus megaterium
  source 1..3147: mol_type = other DNA
atgacaattaaggaaatgcctcagcctaagacgtttggagaacttaaaaatttaccgttattaaacacagataaaccggttcaagctttgatgcgtattgcggatgaattaggagaaatctttaaattcgaggcgcctggtagcgtaacgcgctatttatcaagtcagcgtctaattaaagaagcatgcgatgaatcacgctttgataaaaacttaagtcaagcgcttaaatttgcacgtgattttgttggagacgggctggttacaagctggacgcatgaaccgaattggaaaaaagcgcataatatcttagttccaagctttagtcagcatgcaatggggcgttatcatgcgatgatggtcgatatcgccgtgcagcttgttcaaaagtgggagcgtctaaatgcagatgagcatattgaagtatcggaagacatgacacgtttaacgcttgatacaattggtctttgcctgtttaactatcgctttaacagcttttaccgagatacgcctcatccatttattgtgagtgtggttcgtgcactggatgaagtaatgaacaagctgcagcgagcaaatccagacgacccagcttatgatgaaaacaagcgccagtgtcaagaagatatcaaggtgatgaacgactatgtagataaaattattgcagatcgcaaagcaaggggtgaacaaagtcatgatttattaacgcagatgctaaacggaaaagatccagggacgggtgagccgcttgatgacgggaacattcgtcagcaaattattacattcttaattgcgggacaccaaacgacaagtggtcttttatcatttgcgctgtatttcttagtgaaaaatccacgtgtattacaaaaagtagcagaagaagcagcacgagttctagtagatcctgttccaagctacaaacaagtcaaacagcttaaatatgttggcatggtcttaaacgaagcgctgcgcttatggccagtagcgcctatgttttccctatatgcaaaagaagatacggtgcttggaggagaatatcctttaacgaaaggcgacgaagtaatggttctggtgcctcagcttcaccgtgataaaacaatttggggagacgatgtggaggagttccgtccagagcgttttgaaaatccaagtgcgattccgcagcatgcgtttaaaccgtttggaaacggtcagcgtgcgtgtatcggtcagcagttcgctcttcatagtgcaacgctggtacttggtatgatgctaaaacactttgactttgaagatcatacaaactacgagctcgttattaaagaatcgcggacgttaaaacctgaaggctttgtggtaaaagcaaaatcgaaaggcattccgcttggcggtattccttcacctagcactgaacagtctgctaaaaaagtacgcaaaaaggcagaaaacgctcataatacgccgctgcttgtgctatacggttcaaatgcgggaacagctgaaggaacggcgcgtgatttagcagatattgcaatgagcaaaggatttgcaccgcaggtcgcaacgcttgattcacacgccggtaatcttccgcgcgaaggagctgtattaattgtaacggcgtcttataacggtcatccgcctgataacgcaaagcaatttgtcgactggttagaccaagcgtctgcggatgaagtaaaaggcgttcgctactccgtatttggatgcggcgataaaaattgggcggggacgtatcaaaaagtgcctgcttttatcgatgaaacgcttgccgctaaaggggcagaaaacatcgctgaccgcggtgaagcagatgcaagcgacgactttgaaggcacatatgaagaatggcgtgatcatatgtggagtgacgtagcagcctactttggtctcgacattgaaaacagtgaagataataaatctactctttcacttcaatttgtcgacagcgcggcggatatgccgcttgcgaaaatgcacggtgcgttttcaacgaacgtcgtagcaagcaaagaacttcaacagcctggcagtgcacgaagcacgcgacatcttgaaattgaacttccaaaagaagcttcttatcaagaaggagatcatttaggtgttattcctcgctattatgaaggaatagtaaaccgtgtaacagcaaggttcggcctaagcgcatcacagctgatccgtctggaagcagaagaagaaaaattagctcatttgccactcgctaaaacagtatccgtagaagagcttctgcaatacgtggagcttcaagatcctgttacgcgcacgcagcttcgcgcaatggctgctaaaacggtctgcccgccgcataaagtagagcttgaagccttgcttggcaagcaagcctacaaagaacaagtgctggcaaaacgtttaacaatgcttgaactgcttgaaaaatacccggcgtgtgaaatgagtttcagcgaatttatcgcccttctgccaagcatacgcccgcgctattactcgatttcttcatcacctcgtgtcgatgaaaaacaagcaagcatcacggtcagcgttgtctcaggaccggcgtggagcggatatggagaatataaaggaattgcgtcgaactatcttgccgagctgcaagaaggagatacgattacgtgctttatttccacaccgcagtcagagtttacgctgccaaaagaccctgaaacgccgcttatcatggtcggaccgggaacaggcgtcgcgccgtttagaggctttgtgcaggcgcgcaaacagctaaaagaacaaggacagtcacttggagaagcacatttatacttcggctgccgttcacctcatgaagactatctgtatcaagaagagcttgaaaacgcccaaagcgaaggcatcattacgcttcataccgctttttctcgcatgccgaatcagccgaaaacatacgttcagcacgtaatggaacaagacggcaagaaattgattgaacttcttgatcaaggagcgcacttctatatttgcggagacggaagccaaatggcacctgccgttgaagcaacgcttatgaaaagctatgctgacgttcaccaagtgagtgaagcagacgctcgcttatggctgcagcagctagaagaaaaaggccgatacgcaaaagacgtgtggctgggg

SEQ ID NO: 870 - protein, 1049 aa, synthetic construct
  REGION 1..1049: note = variant of P450 oxidase from Bacillus megaterium
MTIKEMPQPKTFGELKNLPLLNTDKPVQALMRIADELGEIFKFEAPGSVTRYLSSQRLIKEACDESRFDKNLSQALKFARDFVGDGLVTSWTHEPNWKKAHNILVPSFSQHAMGRYHAMMVDIAVQLVQKWERLNADEHIEVSEDMTRLTLDTIGLCLFNYRFNSFYRDTPHPFIVSVVRALDEVMNKLQRANPDDPAYDENKRQCQEDIKVMNDYVDKIIADRKARGEQSHDLLTQMLNGKDPGTGEPLDDGNIRQQIITFLIAGHQTTSGLLSFALYFLVKNPRVLQKVAEEAARVLVDPVPSYKQVKQLKYVGMVLNEALRLWPVAPMFSLYAKEDTVLGGEYPLTKGDEVMVLVPQLHRDKTIWGDDVEEFRPERFENPSAIPQHAFKPFGNGQRACIGQQFALHSATLVLGMMLKHFDFEDHTNYELVIKESRTLKPEGFVVKAKSKGIPLGGIPSPSTEQSAKKVRKKAENAHNTPLLVLYGSNAGTAEGTARDLADIAMSKGFAPQVATLDSHAGNLPREGAVLIVTASYNGHPPDNAKQFVDWLDQASADEVKGVRYSVFGCGDKNWAGTYQKVPAFIDETLAAKGAENIADRGEADASDDFEGTYEEWRDHMWSDVAAYFGLDIENSEDNKSTLSLQFVDSAADMPLAKMHGAFSTNVVASKELQQPGSARSTRHLEIELPKEASYQEGDHLGVIPRYYEGIVNRVTARFGLSASQLIRLEAEEEKLAHLPLAKTVSVEELLQYVELQDPVTRTQLRAMAAKTVCPPHKVELEALLGKQAYKEQVLAKRLTMLELLEKYPACEMSFSEFIALLPSIRPRYYSISSSPRVDEKQASITVSVVSGPAWSGYGEYKGIASNYLAELQEGDTITCFISTPQSEFTLPKDPETPLIMVGPGTGVAPFRGFVQARKQLKEQGQSLGEAHLYFGCRSPHEDYLYQEELENAQSEGIITLHTAFSRMPNQPKTYVQHVMEQDGKKLIELLDQGAHFYICGDGSQMAPAVEATLMKSYADVHQVSEADARLWLQQLEEKGRYAKDVWLG

SEQ ID NO: 871 - DNA, 3147 bp, synthetic construct
  misc_feature 1..3147: note = variant of P450 oxidase from Bacillus megaterium
  source 1..3147: mol_type = other DNA
atgacaattaaggaaatgcctcagcctaagacgtttggagaacttaaaaatttaccgttattaaacacagataaaccggttcaagctttgatgcgtattgcggatgaattaggagaaatctttaaattcgaggcgcctggtagcgtaacgcgctatttatcaagtcagcgtctaattaaagaagcatgcgatgaatcacgctttgataaaaacttaagtcaagcgcttaaatttgcacgtgattttgttggagacgggctggttacaagctggacgcatgaaccgaattggaaaaaagcgcataatatcttagttccaagctttagtcagcatgcaatgcgtcgttatcatgcgatgatggtcgatatcgccgtgcagcttgttcaaaagtgggagcgtctaaatgcagatgagcatattgaagtatcggaagacatgacacgtttaacgcttgatacaattggtctttgcctgtttaactatcgctttaacagcttttaccgagatacgcctcatccatttattgtgagtgtggttcgtgcactggatgaagtaatgaacaagctgcagcgagcaaatccagacgacccagcttatgatgaaaacaagcgccagtgtcaagaagatatcaaggtgatgaacgactatgtagataaaattattgcagatcgcaaagcaaggggtgaacaaagtcatgatttattaacgcagatgctaaacggaaaagatccagaaacgggtgagccgcttgatgacgggaacattcgtcagcaaattattacattcttaattgcgggacaccaaacgacaagtggtcttttatcatttgcgctgtatttcttagtgaaaaatccacgtgtattacaaaaagtagcagaagaagcagcacgagttctagtagatcctgttccaagctacaaacaagtcaaacagcttaaatatgttggcatggtcttaaacgaagcgctgcgcttatggccagtagcgcctatgttttccctatatgcaaaagaagatacggtgcttggaggagaatatcctttaacgaaaggcgacgaagtaatggttctggtgcctcagcttcaccgtgataaaacaatttggggagacgatgtggaggagttccgtccagagcgttttgaaaatccaagtgcgattccgcagcatgcgtttaaaccgtttggaaacggtcagcgtgcgtgtatcggtcagcagttcgctcttcatagtgcaacgctggtacttggtatgatgctaaaacactttgactttgaagatcatacaaactacgagctcgttattaaagaatcgcggacgttaaaacctgaaggctttgtggtaaaagcaaaatcgaaaggcattccgcttggcggtattccttcacctagcactgaacagtctgctaaaaaagtacgcaaaaaggcagaaaacgctcataatacgccgctgcttgtgctatacggttcaaatgcgggaacagctgaaggaacggcgcgtgatttagcagatattgcaatgagcaaaggatttgcaccgcaggtcgcaacgcttgattcacacgccggtaatcttccgcgcgaaggagctgtattaattgtaacggcgtcttataacggtcatccgcctgataacgcaaagcaatttgtcgactggttagaccaagcgtctgcggatgaagtaaaaggcgttcgctactccgtatttggatgcggcgataaaaattgggcggggacgtatcaaaaagtgcctgcttttatcgatgaaacgcttgccgctaaaggggcagaaaacatcgctgaccgcggtgaagcagatgcaagcgacgactttgaaggcacatatgaagaatggcgtgatcatatgtggagtgacgtagcagcctactttggtctcgacattgaaaacagtgaagataataaatctactctttcacttcaatttgtcgacagcgcggcggatatgccgcttgcgaaaatgcacggtgcgttttcaacgaacgtcgtagcaagcaaagaacttcaacagcctggcagtgcacgaagcacgcgacatcttgaaattgaacttccaaaagaagcttcttatcaagaaggagatcatttaggtgttattcctcgctattatgaaggaatagtaaaccgtgtaacagcaaggttcggcctaagcgcatcacagctgatccgtctggaagcagaagaagaaaaattagctcatttgccactcgctaaaacagtatccgtagaagagcttctgcaatacgtggagcttcaagatcctgttacgcgcacgcagcttcgcgcaatggctgctaaaacggtctgcccgccgcataaagtagagcttgaagccttgcttggcaagcaagcctacaaagaacaagtgctggcaaaacgtttaacaatgcttgaactgcttgaaaaatacccggcgtgtgaaatgagtttcagcgaatttatcgcccttctgccaagcatacgcccgcgctattactcgatttcttcatcacctcgtgtcgatgaaaaacaagcaagcatcacggtcagcgttgtctcaggaccggcgtggagcggatatggagaatataaaggaattgcgtcgaactatcttgccgagctgcaagaaggagatacgattacgtgctttatttccacaccgcagtcagagtttacgctgccaaaagaccctgaaacgccgcttatcatggtcggaccgggaacaggcgtcgcgccgtttagaggctttgtgcaggcgcgcaaacagctaaaagaacaaggacagtcacttggagaagcacatttatacttcggctgccgttcacctcatgaagactatctgtatcaagaagagcttgaaaacgcccaaagcgaaggcatcattacgcttcataccgctttttctcgcatgccgaatcagccgaaaacatacgttcagcacgtaatggaacaagacggcaagaaattgattgaacttcttgatcaaggagcgcacttctatatttgcggagacggaagccaaatggcacctgccgttgaagcaacgcttatgaaaagctatgctgacgttcaccaagtgagtgaagcagacgctcgcttatggctgcagcagctagaagaaaaaggccgatacgcaaaagacgtgtggctgggg

SEQ ID NO: 872 - protein, 1049 aa, synthetic construct
  REGION 1..1049: note = variant of P450 oxidase from Bacillus megaterium
MTIKEMPQPKTFGELKNLPLLNTDKPVQALMRIADELGEIFKFEAPGSVTRYLSSQRLIKEACDESRFDKNLSQALKFARDFVGDGLVTSWTHEPNWKKAHNILVPSFSQHAMRRYHAMMVDIAVQLVQKWERLNADEHIEVSEDMTRLTLDTIGLCLFNYRFNSFYRDTPHPFIVSVVRALDEVMNKLQRANPDDPAYDENKRQCQEDIKVMNDYVDKIIADRKARGEQSHDLLTQMLNGKDPETGEPLDDGNIRQQIITFLIAGHQTTSGLLSFALYFLVKNPRVLQKVAEEAARVLVDPVPSYKQVKQLKYVGMVLNEALRLWPVAPMFSLYAKEDTVLGGEYPLTKGDEVMVLVPQLHRDKTIWGDDVEEFRPERFENPSAIPQHAFKPFGNGQRACIGQQFALHSATLVLGMMLKHFDFEDHTNYELVIKESRTLKPEGFVVKAKSKGIPLGGIPSPSTEQSAKKVRKKAENAHNTPLLVLYGSNAGTAEGTARDLADIAMSKGFAPQVATLDSHAGNLPREGAVLIVTASYNGHPPDNAKQFVDWLDQASADEVKGVRYSVFGCGDKNWAGTYQKVPAFIDETLAAKGAENIADRGEADASDDFEGTYEEWRDHMWSDVAAYFGLDIENSEDNKSTLSLQFVDSAADMPLAKMHGAFSTNVVASKELQQPGSARSTRHLEIELPKEASYQEGDHLGVIPRYYEGIVNRVTARFGLSASQLIRLEAEEEKLAHLPLAKTVSVEELLQYVELQDPVTRTQLRAMAAKTVCPPHKVELEALLGKQAYKEQVLAKRLTMLELLEKYPACEMSFSEFIALLPSIRPRYYSISSSPRVDEKQASITVSVVSGPAWSGYGEYKGIASNYLAELQEGDTITCFISTPQSEFTLPKDPETPLIMVGPGTGVAPFRGFVQARKQLKEQGQSLGEAHLYFGCRSPHEDYLYQEELENAQSEGIITLHTAFSRMPNQPKTYVQHVMEQDGKKLIELLDQGAHFYICGDGSQMAPAVEATLMKSYADVHQVSEADARLWLQQLEEKGRYAKDVWLG

SEQ ID NO: 873 - DNA, 3147 bp, synthetic construct
  misc_feature 1..3147: note = variant of P450 oxidase from Bacillus megaterium
  source 1..3147: mol_type = other DNA
atgacaattaaggaaatgcctcagcctaagacgtttggagaacttaaaaatttaccgttattaaacacagataaaccggttcaagctttgatgcgtattgcggatgaattaggagaaatctttaaattcgaggcgcctggtagcgtaacgcgctatttatcaagtcagcgtctaattaaagaagcatgcgatgaatcacgctttgataaaaacttaagtcaagcgcttaaatttgcacgtgattttgttggagacgggctggttacaagctggacgcatgaaccgaattggaaaaaagcgcataatatcttagttccaagctttagtcagcatgcaatggggcgttatcatgcgatgatggtcgatatcgccgtgcagcttgttcaaaagtgggagcgtctaaatgcagatgagcatattgaagtatcggaagacatgacacgtttaacgcttgatacaattggtctttgcctgtttaactatcgctttaacagcttttaccgagatacgcctcatccatttattgtgagtgtggttcgtgcactggatgaagtaatgaacaagctgcagcgagcaaatccagacgacccagcttatgatgaaaacaagcgccagtgtcaagaagatatcaaggtgatgaacgactatgtagataaaattattgcagatcgcaaagcaaggggtgaacaaagtcgggatttattaacgcagatgctaaacggaaaagatccagaaacgggtgagccgcttgatgacgggaacattcgtcagcaaattattacattcttaattgcgggacaccaaacgacaagtggtcttttatcatttgcgctgtatttcttagtgaaaaatccacgtgtattacaaaaagtagcagaagaagcagcacgagttctagtagatcctgttccaagctacaaacaagtcaaacagcttaaatatgttggcatggtcttaaacgaagcgctgcgcttatggccagtagcgcctatgttttccctatatgcaaaagaagatacggtgcttggaggagaatatcctttaacgaaaggcgacgaagtaatggttctggtgcctcagcttcaccgtgataaaacaatttggggagacgatgtggaggagttccgtccagagcgttttgaaaatccaagtgcgattccgcagcatgcgtttaaaccgtttggaaacggtcagcgtgcgtgtatcggtcagcagttcgctcttcatagtgcaacgctggtacttggtatgatgctaaaacactttgactttgaagatcatacaaactacgagctcgttattaaagaatcgcggacgttaaaacctgaaggctttgtggtaaaagcaaaatcgaaaggcattccgcttggcggtattccttcacctagcactgaacagtctgctaaaaaagtacgcaaaaaggcagaaaacgctcataatacgccgctgcttgtgctatacggttcaaatgcgggaacagctgaaggaacggcgcgtgatttagcagatattgcaatgagcaaaggatttgcaccgcaggtcgcaacgcttgattcacacgccggtaatcttccgcgcgaaggagctgtattaattgtaacggcgtcttataacggtcatccgcctgataacgcaaagcaatttgtcgactggttagaccaagcgtctgcggatgaagtaaaaggcgttcgctactccgtatttggatgcggcgataaaaattgggcggggacgtatcaaaaagtgcctgcttttatcgatgaaacgcttgccgctaaaggggcagaaaacatcgctgaccgcggtgaagcagatgcaagcgacgactttgaaggcacatatgaagaatggcgtgatcatatgtggagtgacgtagcagcctactttggtctcgacattgaaaacagtgaagataataaatctactctttcacttcaatttgtcgacagcgcggcggatatgccgcttgcgaaaatgcacggtgcgttttcaacgaacgtcgtagcaagcaaagaacttcaacagcctggcagtgcacgaagcacgcgacatcttgaaattgaacttccaaaagaagcttcttatcaagaaggagatcatttaggtgttattcctcgctattatgaaggaatagtaaaccgtgtaacagcaaggttcggcctaagcgcatcacagctgatccgtctggaagcagaagaagaaaaattagctcatttgccactcgctaaaacagtatccgtagaagagcttctgcaatacgtggagcttcaagatcctgttacgcgcacgcagcttcgcgcaatggctgctaaaacggtctgcccgccgcataaagtagagcttgaagccttgcttggcaagcaagcctacaaagaacaagtgctggcaaaacgtttaacaatgcttgaactgcttgaaaaatacccggcgtgtgaaatgagtttcagcgaatttatcgcccttctgccaagcatacgcccgcgctattactcgatttcttcatcacctcgtgtcgatgaaaaacaagcaagcatcacggtcagcgttgtctcaggaccggcgtggagcggatatggagaatataaaggaattgcgtcgaactatcttgccgagctgcaagaaggagatacgattacgtgctttatttccacaccgcagtcagagtttacgctgccaaaagaccctgaaacgccgcttatcatggtcggaccgggaacaggcgtcgcgccgtttagaggctttgtgcaggcgcgcaaacagctaaaagaacaaggacagtcacttggagaagcacatttatacttcggctgccgttcacctcatgaagactatctgtatcaagaagagcttgaaaacgcccaaagcgaaggcatcattacgcttcataccgctttttctcgcatgccgaatcagccgaaaacatacgttcagcacgtaatggaacaagacggcaagaaattgattgaacttcttgatcaaggagcgcacttctatatttgcggagacggaagccaaatggcacctgccgttgaagcaacgcttatgaaaagctatgctgacgttcaccaagtgagtgaagcagacgctcgcttatggctgcagcagctagaagaaaaaggccgatacgcaaaagacgtgtggctgggg

SEQ ID NO: 874 - protein, 1049 aa, synthetic construct
  REGION 1..1049: note = variant of P450 oxidase from Bacillus megaterium
MTIKEMPQPKTFGELKNLPLLNTDKPVQALMRIADELGEIFKFEAPGSVTRYLSSQRLIKEACDESRFDKNLSQALKFARDFVGDGLVTSWTHEPNWKKAHNILVPSFSQHAMGRYHAMMVDIAVQLVQKWERLNADEHIEVSEDMTRLTLDTIGLCLFNYRFNSFYRDTPHPFIVSVVRALDEVMNKLQRANPDDPAYDENKRQCQEDIKVMNDYVDKIIADRKARGEQSRDLLTQMLNGKDPETGEPLDDGNIRQQIITFLIAGHQTTSGLLSFALYFLVKNPRVLQKVAEEAARVLVDPVPSYKQVKQLKYVGMVLNEALRLWPVAPMFSLYAKEDTVLGGEYPLTKGDEVMVLVPQLHRDKTIWGDDVEEFRPERFENPSAIPQHAFKPFGNGQRACIGQQFALHSATLVLGMMLKHFDFEDHTNYELVIKESRTLKPEGFVVKAKSKGIPLGGIPSPSTEQSAKKVRKKAENAHNTPLLVLYGSNAGTAEGTARDLADIAMSKGFAPQVATLDSHAGNLPREGAVLIVTASYNGHPPDNAKQFVDWLDQASADEVKGVRYSVFGCGDKNWAGTYQKVPAFIDETLAAKGAENIADRGEADASDDFEGTYEEWRDHMWSDVAAYFGLDIENSEDNKSTLSLQFVDSAADMPLAKMHGAFSTNVVASKELQQPGSARSTRHLEIELPKEASYQEGDHLGVIPRYYEGIVNRVTARFGLSASQLIRLEAEEEKLAHLPLAKTVSVEELLQYVELQDPVTRTQLRAMAAKTVCPPHKVELEALLGKQAYKEQVLAKRLTMLELLEKYPACEMSFSEFIALLPSIRPRYYSISSSPRVDEKQASITVSVVSGPAWSGYGEYKGIASNYLAELQEGDTITCFISTPQSEFTLPKDPETPLIMVGPGTGVAPFRGFVQARKQLKEQGQSLGEAHLYFGCRSPHEDYLYQEELENAQSEGIITLHTAFSRMPNQPKTYVQHVMEQDGKKLIELLDQGAHFYICGDGSQMAPAVEATLMKSYADVHQVSEADARLWLQQLEEKGRYAKDVWLG

SEQ ID NO: 875 - DNA, 3147 bp, synthetic construct
  misc_feature 1..3147: note = variant of P450 oxidase from Bacillus megaterium
  source 1..3147: mol_type = other DNA
atgacaattaaggaaatgcctcagcctaagacgtttggagaacttaaaaatttaccgttattaaacacagataaaccggttcaagctttgatgcgtattgcggatgaattaggagaaatctttaaattcgaggcgcctggtagcgtaacgcgctatttatcaagtcagcgtctaattaaagaagcatgcgatgaatcacgctttgataaaaacttaagtcaagcgcttaaatttgcacgtgattttgttggagacgggctggttacaagctggacgcatgaaccgaattggaaaaaagcgcataatatcttagttccaagctttagtcagcatgcaatggggcgttatcatgcgatgatggtcgatatcgccgtgcagcttgttcaaaagtgggagcgtctaaatgcagatgagcatattgaagtatcggaagacatgacacgtttaacgcttgatacaattggtctttgcctgtttaactatcgctttaacagcttttaccgagatacgcctcatccatttattgtgagtgtggttcgtgcactggatgaagtaatgaacaagctgcagcgagcaaatccagacgacccagcttatgatgaaaacaagcgccagtgtcaagaagatacgaaggtgatgaacgactatgtagataaaattattgcagatcgcaaagcaaggggtgaacaaagtcatgatttattaacgcagatgctaaacggaaaagatccagaaacgggtgagccgcttgatgacgggaacattcgtcagcaaattattacattcttaattgcgggacaccaaacgacaagtggtcttttatcatttgcgctgtatttcttagtgaaaaatccacgtgtattacaaaaagtagcagaagaagcagcacgagttctagtagatcctgttccaagctacaaacaagtcaaacagcttaaatatgttggcatggtcttaaacgaagcgctgcgcttatggccagtagcgcctatgttttccctatatgcaaaagaagatacggtgcttggaggagaatatcctttaacgaaaggcgacgaagtaatggttctggtgcctcagcttcaccgtgataaaacaatttggggagacgatgtggaggagttccgtccagagcgttttgaaaatccaagtgcgattccgcagcatgcgtttaaaccgtttggaaacggtcagcgtgcgtgtatcggtcagcagttcgctcttcatagtgcaacgctggtacttggtatgatgctaaaacactttgactttgaagatcatacaaactacgagctcgttattaaagaatcgcggacgttaaaacctgaaggctttgtggtaaaagcaaaatcgaaaggcattccgcttggcggtattccttcacctagcactgaacagtctgctaaaaaagtacgcaaaaaggcagaaaacgctcataatacgccgctgcttgtgctatacggttcaaatgcgggaacagctgaaggaacggcgcgtgatttagcagatattgcaatgagcaaaggatttgcaccgcaggtcgcaacgcttgattcacacgccggtaatcttccgcgcgaaggagctgtattaattgtaacggcgtcttataacggtcatccgcctgataacgcaaagcaatttgtcgactggttagaccaagcgtctgcggatgaagtaaaaggcgttcgctactccgtatttggatgcggcgataaaaattgggcggggacgtatcaaaaagtgcctgcttttatcgatgaaacgcttgccgctaaaggggcagaaaacatcgctgaccgcggtgaagcagatgcaagcgacgactttgaaggcacatatgaagaatggcgtgatcatatgtggagtgacgtagcagcctactttggtctcgacattgaaaacagtgaagataataaatctactctttcacttcaatttgtcgacagcgcggcggatatgccgcttgcgaaaatgcacggtgcgttttcaacgaacgtcgtagcaagcaaagaacttcaacagcctggcagtgcacgaagcacgcgacatcttgaaattgaacttccaaaagaagcttcttatcaagaaggagatcatttaggtgttattcctcgctattatgaaggaatagtaaaccgtgtaacagcaaggttcggcctaagcgcatcacagctgatccgtctggaagcagaagaagaaaaattagctcatttgccactcgctaaaacagtatccgtagaagagcttctgcaatacgtggagcttcaagatcctgttacgcgcacgcagcttcgcgcaatggctgctaaaacggtctgcccgccgcataaagtagagcttgaagccttgcttggcaagcaagcctacaaagaacaagtgctggcaaaacgtttaacaatgcttgaactgcttgaaaaatacccggcgtgtgaaatgagtttcagcgaatttatcgcccttctgccaagcatacgcccgcgctattactcgatttcttcatcacctcgtgtcgatgaaaaacaagcaagcatcacggtcagcgttgtctcaggaccggcgtggagcggatatggagaatataaaggaattgcgtcgaactatcttgccgagctgcaagaaggagatacgattacgtgctttatttccacaccgcagtcagagtttacgctgccaaaagaccctgaaacgccgcttatcatggtcggaccgggaacaggcgtcgcgccgtttagaggctttgtgcaggcgcgcaaacagctaaaagaacaaggacagtcacttggagaagcacatttatacttcggctgccgttcacctcatgaagactatctgtatcaagaagagcttgaaaacgcccaaagcgaaggcatcattacgcttcataccgctttttctcgcatgccgaatcagccgaaaacatacgttcagcacgtaatggaacaagacggcaagaaattgattgaacttcttgatcaaggagcgcacttctatatttgcggagacggaagccaaatggcacctgccgttgaagcaacgcttatgaaaagctatgctgacgttcaccaagtgagtgaagcagacgctcgcttatggctgcagcagctagaagaaaaaggccgatacgcaaaagacgtgtggctgggg

SEQ ID NO: 876 - protein, 1049 aa, synthetic construct
  REGION 1..1049: note = variant of P450 oxidase from Bacillus megaterium
MTIKEMPQPKTFGELKNLPLLNTDKPVQALMRIADELGEIFKFEAPGSVTRYLSSQRLIKEACDESRFDKNLSQALKFARDFVGDGLVTSWTHEPNWKKAHNILVPSFSQHAMGRYHAMMVDIAVQLVQKWERLNADEHIEVSEDMTRLTLDTIGLCLFNYRFNSFYRDTPHPFIVSVVRALDEVMNKLQRANPDDPAYDENKRQCQEDTKVMNDYVDKIIADRKARGEQSHDLLTQMLNGKDPETGEPLDDGNIRQQIITFLIAGHQTTSGLLSFALYFLVKNPRVLQKVAEEAARVLVDPVPSYKQVKQLKYVGMVLNEALRLWPVAPMFSLYAKEDTVLGGEYPLTKGDEVMVLVPQLHRDKTIWGDDVEEFRPERFENPSAIPQHAFKPFGNGQRACIGQQFALHSATLVLGMMLKHFDFEDHTNYELVIKESRTLKPEGFVVKAKSKGIPLGGIPSPSTEQSAKKVRKKAENAHNTPLLVLYGSNAGTAEGTARDLADIAMSKGFAPQVATLDSHAGNLPREGAVLIVTASYNGHPPDNAKQFVDWLDQASADEVKGVRYSVFGCGDKNWAGTYQKVPAFIDETLAAKGAENIADRGEADASDDFEGTYEEWRDHMWSDVAAYFGLDIENSEDNKSTLSLQFVDSAADMPLAKMHGAFSTNVVASKELQQPGSARSTRHLEIELPKEASYQEGDHLGVIPRYYEGIVNRVTARFGLSASQLIRLEAEEEKLAHLPLAKTVSVEELLQYVELQDPVTRTQLRAMAAKTVCPPHKVELEALLGKQAYKEQVLAKRLTMLELLEKYPACEMSFSEFIALLPSIRPRYYSISSSPRVDEKQASITVSVVSGPAWSGYGEYKGIASNYLAELQEGDTITCFISTPQSEFTLPKDPETPLIMVGPGTGVAPFRGFVQARKQLKEQGQSLGEAHLYFGCRSPHEDYLYQEELENAQSEGIITLHTAFSRMPNQPKTYVQHVMEQDGKKLIELLDQGAHFYICGDGSQMAPAVEATLMKSYADVHQVSEADARLWLQQLEEKGRYAKDVWLG

SEQ ID NO: 877 - DNA, 3147 bp, synthetic construct
  misc_feature 1..3147: note = variant of P450 oxidase from Bacillus megaterium
  source 1..3147: mol_type = other DNA
atgacaattaaggaaatgcctcagcctaagacgtttggagaacttaaaaatttaccgttattaaacacagataaaccggttcaagctttgatgcgtattgcggatgaattaggagaaatctttaaattcgaggcgcctggtagcgtaacgcgctatttatcaagtcagcgtctaattaaagaagcatgcgatgaatcacgctttgataaaaacttaagtcaagcgcttaaatttgcacgtgattttgttggagacgggctggttacaagctggacgcatgaaccgaattggaaaaaagcgcataatatcttagttccaagctttagtcagcatgcaatggggcgttatcatgcgatgatggtcgatatcgccgtgcagcttgttcaaaagtgggagcgtctaaatgcagatgagcatattgaagtatcggaagacatgacacgtttaacgcttgatacaattggtctttgcctgtttaactatcgctttaacagcttttaccgagatacgcctcatccatttattgtgagtgtggttcgtgcactggatgaagtaatgaacaagctgcagcgagcaaatccagacgacccagcttatgatgaaaacaagcgccagtgtcaagaagatatcaaggtgatgaacgactatgtagataaaattattgcagatcgcaaagcaaggggtgaacaaagtcatgatttattaacgcagatgctaaacggaaaagatccaaatacgggtgagccgcttgatgacgggaacattcgtcagcaaattattacattcttaattgcgggacaccaaacgacaagtggtcttttatcatttgcgctgtatttcttagtgaaaaatccacgtgtattacaaaaagtagcagaagaagcagcacgagttctagtagatcctgttccaagctacaaacaagtcaaacagcttaaatatgttggcatggtcttaaacgaagcgctgcgcttatggccagtagcgcctatgttttccctatatgcaaaagaagatacggtgcttggaggagaatatcctttaacgaaaggcgacgaagtaatggttctggtgcctcagcttcaccgtgataaaacaatttggggagacgatgtggaggagttccgtccagagcgttttgaaaatccaagtgcgattccgcagcatgcgtttaaaccgtttggaaacggtcagcgtgcgtgtatcggtcagcagttcgctcttcatagtgcaacgctggtacttggtatgatgctaaaacactttgactttgaagatcatacaaactacgagctcgttattaaagaatcgcggacgttaaaacctgaaggctttgtggtaaaagcaaaatcgaaaggcattccgcttggcggtattccttcacctagcactgaacagtctgctaaaaaagtacgcaaaaaggcagaaaacgctcataatacgccgctgcttgtgctatacggttcaaatgcgggaacagctgaaggaacggcgcgtgatttagcagatattgcaatgagcaaaggatttgcaccgcaggtcgcaacgcttgattcacacgccggtaatcttccgcgcgaaggagctgtattaattgtaacggcgtcttataacggtcatccgcctgataacgcaaagcaatttgtcgactggttagaccaagcgtctgcggatgaagtaaaaggcgttcgctactccgtatttggatgcggcgataaaaattgggcggggacgtatcaaaaagtgcctgcttttatcgatgaaacgcttgccgctaaaggggcagaaaacatcgctgaccgcggtgaagcagatgcaagcgacgactttgaaggcacatatgaagaatggcgtgatcatatgtggagtgacgtagcagcctactttggtctcgacattgaaaacagtgaagataataaatctactctttcacttcaatttgtcgacagcgcggcggatatgccgcttgcgaaaatgcacggtgcgttttcaacgaacgtcgtagcaagcaaagaacttcaacagcctggcagtgcacgaagcacgcgacatcttgaaattgaacttccaaaagaagcttcttatcaagaaggagatcatttaggtgttattcctcgctattatgaaggaatagtaaaccgtgtaacagcaaggttcggcctaagcgcatcacagctgatccgtctggaagcagaagaagaaaaattagctcatttgccactcgctaaaacagtatccgtagaagagcttctgcaatacgtggagcttcaagatcctgttacgcgcacgcagcttcgcgcaatggctgctaaaacggtctgcccgccgcataaagtagagcttgaagccttgcttggcaagcaagcctacaaagaacaagtgctggcaaaacgtttaacaatgcttgaactgcttgaaaaatacccggcgtgtgaaatgagtttcagcgaatttatcgcccttctgccaagcatacgcccgcgctattactcgatttcttcatcacctcgtgtcgatgaaaaacaagcaagcatcacggtcagcgttgtctcaggaccggcgtggagcggatatggagaatataaaggaattgcgtcgaactatcttgccgagctgcaagaaggagatacgattacgtgctttatttccacaccgcagtcagagtttacgctgccaaaagaccctgaaacgccgcttatcatggtcggaccgggaacaggcgtcgcgccgtttagaggctttgtgcaggcgcgcaaacagctaaaagaacaaggacagtcacttggagaagcacatttatacttcggctgccgttcacctcatgaagactatctgtatcaagaagagcttgaaaacgcccaaagcgaaggcatcattacgcttcataccgctttttctcgcatgccgaatcagccgaaaacatacgttcagcacgtaatggaacaagacggcaagaaattgattgaacttcttgatcaaggagcgcacttctatatttgcggagacggaagccaaatggcacctgccgttgaagcaacgcttatgaaaagctatgctgacgttcaccaagtgagtgaagcagacgctcgcttatggctgcagcagctagaagaaaaaggccgatacgcaaaagacgtgtggctgggg

SEQ ID NO: 878 - protein, 1049 aa, synthetic construct
  REGION 1..1049: note = variant of P450 oxidase from Bacillus megaterium
MTIKEMPQPKTFGELKNLPLLNTDKPVQALMRIADELGEIFKFEAPGSVTRYLSSQRLIKEACDESRFDKNLSQALKFARDFVGDGLVTSWTHEPNWKKAHNILVPSFSQHAMGRYHAMMVDIAVQLVQKWERLNADEHIEVSEDMTRLTLDTIGLCLFNYRFNSFYRDTPHPFIVSVVRALDEVMNKLQRANPDDPAYDENKRQCQEDIKVMNDYVDKIIADRKARGEQSHDLLTQMLNGKDPNTGEPLDDGNIRQQIITFLIAGHQTTSGLLSFALYFLVKNPRVLQKVAEEAARVLVDPVPSYKQVKQLKYVGMVLNEALRLWPVAPMFSLYAKEDTVLGGEYPLTKGDEVMVLVPQLHRDKTIWGDDVEEFRPERFENPSAIPQHAFKPFGNGQRACIGQQFALHSATLVLGMMLKHFDFEDHTNYELVIKESRTLKPEGFVVKAKSKGIPLGGIPSPSTEQSAKKVRKKAENAHNTPLLVLYGSNAGTAEGTARDLADIAMSKGFAPQVATLDSHAGNLPREGAVLIVTASYNGHPPDNAKQFVDWLDQASADEVKGVRYSVFGCGDKNWAGTYQKVPAFIDETLAAKGAENIADRGEADASDDFEGTYEEWRDHMWSDVAAYFGLDIENSEDNKSTLSLQFVDSAADMPLAKMHGAFSTNVVASKELQQPGSARSTRHLEIELPKEASYQEGDHLGVIPRYYEGIVNRVTARFGLSASQLIRLEAEEEKLAHLPLAKTVSVEELLQYVELQDPVTRTQLRAMAAKTVCPPHKVELEALLGKQAYKEQVLAKRLTMLELLEKYPACEMSFSEFIALLPSIRPRYYSISSSPRVDEKQASITVSVVSGPAWSGYGEYKGIASNYLAELQEGDTITCFISTPQSEFTLPKDPETPLIMVGPGTGVAPFRGFVQARKQLKEQGQSLGEAHLYFGCRSPHEDYLYQEELENAQSEGIITLHTAFSRMPNQPKTYVQHVMEQDGKKLIELLDQGAHFYICGDGSQMAPAVEATLMKSYADVHQVSEADARLWLQQLEEKGRYAKDVWLG

SEQ ID NO: 879 - DNA, 3147 bp, synthetic construct
  misc_feature 1..3147: note = variant of P450 oxidase from Bacillus megaterium
  source 1..3147: mol_type = other DNA
atgacaattaaggaaatgcctcagcctaagacgtttggagaacttaaaaatttaccgttattaaacacagataaaccggttcaagctttgatgcgtattgcggatgaattaggagaaatctttaaattcgaggcgcctggtagcgtaacgcgctatttatcaagtcagcgtctaattaaagaagcatgcgatgaatcacgctttgataaaaacttaagtcaagcgcttaaatttgcacgtgattttgttggagacgggctggttacaagctggacgcatgaaccgaattggaaaaaagcgcataatatcttagttccaagctttagtcagcatgcaatggggcgttatcatgcgatgatggtcgatatcgccgtgcagcttgttcaaaagtgggagcgtctaaatgcagatgagcatattgaagtatcggaagacatgacacgtttaacgcttgatacaattggtctttgcctgtttaactatcgctttaacagcttttaccgagatacgcctcatccatttattgtgagtgtggttcgtgcactggatgaagtaatgaacaagctgcagcgagcaaagccagacgacccagcttatgatgaaaacaagcgccagtgtcaagaagatatcaaggtgatgaacgactatgtagataaaattattgcagatcgcaaagcaaggggtgaacaaagtcatgatttattaacgcagatgctaaacggaaaagatccagaaacgggtgagccgcttgatgacgggaacattcgtcagcaaattattacattcttaattgcgggacaccaaacgacaagtggtcttttatcatttgcgctgtatttcttagtgaaaaatccacgtgtattacaaaaagtagcagaagaagcagcacgagttctagtagatcctgttccaagctacaaacaagtcaaacagcttaaatatgttggcatggtcttaaacgaagcgctgcgcttatggccagtagcgcctatgttttccctatatgcaaaagaagatacggtgcttggaggagaatatcctttaacgaaaggcgacgaagtaatggttctggtgcctcagcttcaccgtgataaaacaatttggggagacgatgtggaggagttccgtccagagcgttttgaaaatccaagtgcgattccgcagcatgcgtttaaaccgtttggaaacggtcagcgtgcgtgtatcggtcaacagttcgctcttcatagtgcaacgctggtacttggtatgatgctaaaacactttgactttgaagatcatacaaactacgagctcgttattaaagaatcgcggacgttaaaacctgaaggctttgtggtaaaagcaaaatcgaaaggcattccgcttggcggtattccttcacctagcactgaacagtctgctaaaaaagtacgcaaaaaggcagaaaacgctcataatacgccgctgcttgtgctatacggttcaaatgcgggaacagctgaaggaacggcgcgtgatttagcagatattgcaatgagcaaaggatttgcaccgcaggtcgcaacgcttgattcacacgccggtaatcttccgcgcgaaggagctgtattaattgtaacggcgtcttataacggtcatccgcctgataacgcaaagcaatttgtcgactggttagaccaagcgtctgcggatgaagtaaaaggcgttcgctactccgtatttggatgcggcgataaaaattgggcggggacgtatcaaaaagtgcctgcttttatcgatgaaacgcttgccgctaaaggggcagaaaacatcgctgaccgcggtgaagcagatgcaagcgacgactttgaaggcacatatgaagaatggcgtgatcatatgtggagtgacgtagcagcctactttggtctcgacattgaaaacagtgaagataataaatctactctttcacttcaatttgtcgacagcgcggcggatatgccgcttgcgaaaatgcacggtgcgttttcaacgaacgtcgtagcaagcaaagaacttcaacagcctggcagtgcacgaagcacgcgacatcttgaaattgaacttccaaaagaagcttcttatcaagaaggagatcatttaggtgttattcctcgctattatgaaggaatagtaaaccgtgtaacagcaaggttcggcctaagcgcatcacagctgatccgtctggaagcagaagaagaaaaattagctcatttgccactcgctaaaacagtatccgtagaagagcttctgcaatacgtggagcttcaagatcctgttacgcgcacgcagcttcgcgcaatggctgctaaaacggtctgcccgccgcataaagtagagcttgaagccttgcttggcaagcaagcctacaaagaacaagtgctggcaaaacgtttaacaatgcttgaactgcttgaaaaatacccggcgtgtgaaatgagtttcagcgaatttatcgcccttctgccaagcatacgcccgcgctattactcgatttcttcatcacctcgtgtcgatgaaaaacaagcaagcatcacggtcagcgttgtctcaggaccggcgtggagcggatatggagaatataaaggaattgcgtcgaactatcttgccgagctgcaagaaggagatacgattacgtgctttatttccacaccgcagtcagagtttacgctgccaaaagaccctgaaacgccgcttatcatggtcggaccgggaacaggcgtcgcgccgtttagaggctttgtgcaggcgcgcaaacagctaaaagaacaaggacagtcacttggagaagcacatttatacttcggctgccgttcacctcatgaagactatctgtatcaagaagagcttgaaaacgcccaaagcgaaggcatcattacgcttcataccgctttttctcgcatgccgaatcagccgaaaacatacgttcagcacgtaatggaacaagacggcaagaaattgattgaacttcttgatcaaggagcgcacttctatatttgcggagacggaagccaaatggcacctgccgttgaagcaacgcttatgaaaagctatgctgacgttcaccaagtgagtgaagcagacgctcgcttatggctgcagcagctagaagaaaaaggccgatacgcaaaagacgtgtggctgggg

SEQ ID NO: 880 - protein, 1049 aa, synthetic construct
  REGION 1..1049: note = variant of P450 oxidase from Bacillus megaterium
MTIKEMPQPKTFGELKNLPLLNTDKPVQALMRIADELGEIFKFEAPGSVTRYLSSQRLIKEACDESRFDKNLSQALKFARDFVGDGLVTSWTHEPNWKKAHNILVPSFSQHAMGRYHAMMVDIAVQLVQKWERLNADEHIEVSEDMTRLTLDTIGLCLFNYRFNSFYRDTPHPFIVSVVRALDEVMNKLQRAKPDDPAYDENKRQCQEDIKVMNDYVDKIIADRKARGEQSHDLLTQMLNGKDPETGEPLDDGNIRQQIITFLIAGHQTTSGLLSFALYFLVKNPRVLQKVAEEAARVLVDPVPSYKQVKQLKYVGMVLNEALRLWPVAPMFSLYAKEDTVLGGEYPLTKGDEVMVLVPQLHRDKTIWGDDVEEFRPERFENPSAIPQHAFKPFGNGQRACIGQQFALHSATLVLGMMLKHFDFEDHTNYELVIKESRTLKPEGFVVKAKSKGIPLGGIPSPSTEQSAKKVRKKAENAHNTPLLVLYGSNAGTAEGTARDLADIAMSKGFAPQVATLDSHAGNLPREGAVLIVTASYNGHPPDNAKQFVDWLDQASADEVKGVRYSVFGCGDKNWAGTYQKVPAFIDETLAAKGAENIADRGEADASDDFEGTYEEWRDHMWSDVAAYFGLDIENSEDNKSTLSLQFVDSAADMPLAKMHGAFSTNVVASKELQQPGSARSTRHLEIELPKEASYQEGDHLGVIPRYYEGIVNRVTARFGLSASQLIRLEAEEEKLAHLPLAKTVSVEELLQYVELQDPVTRTQLRAMAAKTVCPPHKVELEALLGKQAYKEQVLAKRLTMLELLEKYPACEMSFSEFIALLPSIRPRYYSISSSPRVDEKQASITVSVVSGPAWSGYGEYKGIASNYLAELQEGDTITCFISTPQSEFTLPKDPETPLIMVGPGTGVAPFRGFVQARKQLKEQGQSLGEAHLYFGCRSPHEDYLYQEELENAQSEGIITLHTAFSRMPNQPKTYVQHVMEQDGKKLIELLDQGAHFYICGDGSQMAPAVEATLMKSYADVHQVSEADARLWLQQLEEKGRYAKDVWLG

SEQ ID NO: 881 - DNA, 3147 bp, synthetic construct
  misc_feature 1..3147: note = variant of P450 oxidase from Bacillus megaterium
  source 1..3147: mol_type = other DNA
atgacaattaaggaaatgcctcagcctaagacgtttggagaacttaaaaatttaccgttattaaacacagataaaccggttcaagctttgatgcgtattgcggatgaattaggagaaatctttaaattcgaggagcctggtagcgtaacgcgctatttatcaagtcagcgtctaattaaagaagcatgcgatgaatcacgctttgataaaaacttaagtcaagcgcttaaatttgcacgtgattttgttggagacgggctggttacaagctggacgcatgaaccgaattggaaaaaagcgcataatatcttagttccaagctttagtcagcatgcaatggggcgttatcatgcgatgatggtcgatatcgccgtgcagcttgttcaaaagtgggagcgtctaaatgcagatgagcatattgaagtatcggaagacatgacacgtttaacgcttgatacaattggtctttgcctgtttaactatcgctttaacagcttttaccgagatacgcctcatccatttattgtgagtgtggttcgtgcactggatgaagtaatgaacaagctgcagcgagcaaatccagacgacccagcttatgatgaaaacaagcgccagtgtcaagaagatatcaaggtgatgaacgactatgtagataaaattattgcagatcgcaaagcaaggggtgaacaaagtcatgatttattaacgcagatgctaaacggaaaagatccagaaacgggtgagccgcttgatgacgggaacattcgtcagcaaattattacattcttaattgcgggacaccaaacgacaagtggtcttttatcatttgcgctgtatttcttagtgaaaaatccacgtgtattacaaaaagtagcagaagaagcagcacgagttctagtagatcctgttccaagctacaaacaagtcaaacagcttaaatatgttggcatggtcttaaacgaagcgctgcgcttatggccagtagcgcctatgttttccctatatgcaaaagaagatacggtgcttggaggagaatatcctttaacgaaaggcgacgaagtaatggttctggtgcctcagcttcaccgtgataaaacaatttggggagacgatgtggaggagttccgtccagagcgttttgaaaatccaagtgcgattccgcagcatgcgtttaaaccgtttggaaacggtcagcgtgcgtgtatcggtcagcagttcgctcttcatagtgcaacgctggtacttggtatgatgctaaaacactttgactttgaagatcatacaaactacgagctcgttattaaagaatcgcggacgttaaaacctgaaggctttgtggtaaaagcaaaatcgaaaggcattccgcttggcggtattccttcacctagcactgaacagtctgctaaaaaagtacgcaaaaaggcagaaaacgctcataatacgccgctgcttgtgctatacggttcaaatgcgggaacagctgaaggaacggcgcgtgatttagcagatattgcaatgagcaaaggatttgcaccgcaggtcgcaacgcttgattcacacgccggtaatcttccgcgcgaaggagctgtattaattgtaacggcgtcttataacggtcatccgcctgataacgcaaagcaatttgtcgactggttagaccaagcgtctgcggatgaagtaaaaggcgttcgctactccgtatttggatgcggcgataaaaattgggcggggacgtatcaaaaagtgcctgcttttatcgatgaaacgcttgccgctaaaggggcagaaaacatcgctgaccgcggtgaagcagatgcaagcgacgactttgaaggcacatatgaagaatggcgtgatcatatgtggagtgacgtagcagcctactttggtctcgacattgaaaacagtgaagataataaatctactctttcacttcaatttgtcgacagcgcggcggatatgccgcttgcgaaaatgcacggtgcgttttcaacgaacgtcgtagcaagcaaagaacttcaacagcctggcagtgcacgaagcacgcgacatcttgaaattgaacttccaaaagaagcttcttatcaagaaggagatcatttaggtgttattcctcgctattatgaaggaatagtaaaccgtgtaacagcaaggttcggcctaagcgcatcacagctgatccgtctggaagcagaagaagaaaaattagctcatttgccactcgctaaaacagtatccgtagaagagcttctgcaatacgtggagcttcaagatcctgttacgcgcacgcagcttcgcgcaatggctgctaaaacggtctgcccgccgcataaagtagagcttgaagccttgcttggcaagcaagcctacaaagaacaagtgctggcaaaacgtttaacaatgcttgaactgcttgaaaaatacccggcgtgtgaaatgagtttcagcgaatttatcgcccttctgccaagcatacgcccgcgctattactcgatttcttcatcacctcgtgtcgatgaaaaacaagcaagcatcacggtcagcgttgtctcaggaccggcgtggagcggatatggagaatataaaggaattgcgtcgaactatcttgccgagctgcaagaaggagatacgattacgtgctttatttccacaccgcagtcagagtttacgctgccaaaagaccctgaaacgccgcttatcatggtcggaccgggaacaggcgtcgcgccgtttagaggctttgtgcaggcgcgcaaacagctaaaagaacaaggacagtcacttggagaagcacatttatacttcggctgccgttcacctcatgaagactatctgtatcaagaagagcttgaaaacgcccaaagcgaaggcatcattacgcttcataccgctttttctcgcatgccgaatcagccgaaaacatacgttcagcacgtaatggaacaagacggcaagaaattgattgaacttcttgatcaaggagcgcacttctatatttgcggagacggaagccaaatggcacctgccgttgaagcaacgcttatgaaaagctatgctgacgttcaccaagtgagtgaagcagacgctcgcttatggctgcagcagctagaagaaaaaggccgatacgcaaaagacgtgtggctgggg

SEQ ID NO: 882 - protein, 1049 aa, synthetic construct
  REGION 1..1049: note = variant of P450 oxidase from Bacillus megaterium
MTIKEMPQPKTFGELKNLPLLNTDKPVQALMRIADELGEIFKFEEPGSVTRYLSSQRLIKEACDESRFDKNLSQALKFARDFVGDGLVTSWTHEPNWKKAHNILVPSFSQHAMGRYHAMMVDIAVQLVQKWERLNADEHIEVSEDMTRLTLDTIGLCLFNYRFNSFYRDTPHPFIVSVVRALDEVMNKLQRANPDDPAYDENKRQCQEDIKVMNDYVDKIIADRKARGEQSHDLLTQMLNGKDPETGEPLDDGNIRQQIITFLIAGHQTTSGLLSFALYFLVKNPRVLQKVAEEAARVLVDPVPSYKQVKQLKYVGMVLNEALRLWPVAPMFSLYAKEDTVLGGEYPLTKGDEVMVLVPQLHRDKTIWGDDVEEFRPERFENPSAIPQHAFKPFGNGQRACIGQQFALHSATLVLGMMLKHFDFEDHTNYELVIKESRTLKPEGFVVKAKSKGIPLGGIPSPSTEQSAKKVRKKAENAHNTPLLVLYGSNAGTAEGTARDLADIAMSKGFAPQVATLDSHAGNLPREGAVLIVTASYNGHPPDNAKQFVDWLDQASADEVKGVRYSVFGCGDKNWAGTYQKVPAFIDETLAAKGAENIADRGEADASDDFEGTYEEWRDHMWSDVAAYFGLDIENSEDNKSTLSLQFVDSAADMPLAKMHGAFSTNVVASKELQQPGSARSTRHLEIELPKEASYQEGDHLGVIPRYYEGIVNRVTARFGLSASQLIRLEAEEEKLAHLPLAKTVSVEELLQYVELQDPVTRTQLRAMAAKTVCPPHKVELEALLGKQAYKEQVLAKRLTMLELLEKYPACEMSFSEFIALLPSIRPRYYSISSSPRVDEKQASITVSVVSGPAWSGYGEYKGIASNYLAELQEGDTITCFISTPQSEFTLPKDPETPLIMVGPGTGVAPFRGFVQARKQLKEQGQSLGEAHLYFGCRSPHEDYLYQEELENAQSEGIITLHTAFSRMPNQPKTYVQHVMEQDGKKLIELLDQGAHFYICGDGSQMAPAVEATLMKSYADVHQVSEADARLWLQQLEEKGRYAKDVWLG

SEQ ID NO: 883 - DNA, 3147 bp, synthetic construct
  misc_feature 1..3147: note = variant of P450 oxidase from Bacillus megaterium
  source 1..3147: mol_type = other DNA
atgacaattaaggaaatgcctcagcctaagacgtttggagaacttaaaaatttaccgttattaaacacagataaaccggttcaagctttgatgcgtattgcggatgaattaggagaaatctttaaattcgaggcgcctggtagcgtaacgcgctatttatcaagtcagcgtctaattaaagaagcatgcgatgaatcacgctttgataaaaacttaagtcaagcgcttaaatttgcacgtgattttgttggagacgggctggttacaagctggacgcatgaaccgaattggaaaaaagcgcataatatcttagttccaagctttagtcagcatgcaatggggcgttatcatgcgatgatggtcgatatcgccgtgcagcttgttcaaaagtgggagcgtctaaatgcagatgagcatattgaagtatcggaagacatgacacgtttaacgcttgatacaattggtctttgcctgtttaactatcgctttaacagcttttaccgagatacgcctcatccatttattgtgagtgtggttcgtgcactggatgaagtaatgaacaagctgcagcgagcaaatccagacgacccagcttatgatgaaaacgggcgccagtgtcaagaagatatcaaggtgatgaacgactatgtagataaaattattgcagatcgcaaagcaaggggtgaacaaagtcatgatttattaacgcagatgctaaacggaaaagatccagaaacgggtgagccgcttgatgacgggaacattcgtcagcaaattattacattcttaattgcgggacaccaaacgacaagtggtcttttatcatttgcgctgtatttcttagtgaaaaatccacgtgtattacaaaaagtagcagaagaagcagcacgagttctagtagatcctgttccaagctacaaacaagtcaaacagcttaaatatgttggcatggtcttaaacgaagcgctgcgcttatggccagtagcgcctatgttttccctatatgcaaaagaagatacggtgcttggaggagaatatcctttaacgaaaggcgacgaagtaatggttctggtgcctcagcttcaccgtgataaaacaatttggggagacgatgtggaggagttccgtccagagcgttttgaaaatccaagtgcgattccgcagcatgcgtttaaaccgtttggaaacggtcagcgtgcgtgtatcggtcagcagttcgctcttcatagtgcaacgctggtacttggtatgatgctaaaacactttgactttgaagatcatacaaactacgagctcgttattaaagaatcgcggacgttaaaacctgaaggctttgtggtaaaagcaaaatcgaaaggcattccgcttggcggtattccttcacctagcactgaacagtctgctaaaaaagtacgcaaaaaggcagaaaacgctcataatacgccgctgcttgtgctatacggttcaaatgcgggaacagctgaaggaacggcgcgtgatttagcagatattgcaatgagcaaaggatttgcaccgcaggtcgcaacgcttgattcacacgccggtaatcttccgcgcgaaggagctgtattaattgtaacggcgtcttataacggtcatccgcctgataacgcaaagcaatttgtcgactggttagaccaagcgtctgcggatgaagtaaaaggcgttcgctactccgtatttggatgcggcgataaaaattgggcggggacgtatcaaaaagtgcctgcttttatcgatgaaacgcttgccgctaaaggggcagaaaacatcgctgaccgcggtgaagcagatgcaagcgacgactttgaaggcacatatgaagaatggcgtgatcatatgtggagtgacgtagcagcctactttggtctcgacattgaaaacagtgaagataataaatctactctttcacttcaatttgtcgacagcgcggcggatatgccgcttgcgaaaatgcacggtgcgttttcaacgaacgtcgtagcaagcaaagaacttcaacagcctggcagtgcacgaagcacgcgacatcttgaaattgaacttccaaaagaagcttcttatcaagaaggagatcatttaggtgttattcctcgctattatgaaggaatagtaaaccgtgtaacagcaaggttcggcctaagcgcatcacagctgatccgtctggaagcagaagaagaaaaattagctcatttgccactcgctaaaacagtatccgtagaagagcttctgcaatacgtggagcttcaagatcctgttacgcgcacgcagcttcgcgcaatggctgctaaaacggtctgcccgccgcataaagtagagcttgaagccttgcttggcaagcaagcctacaaagaacaagtgctggcaaaacgtttaacaatgcttgaactgcttgaaaaatacccggcgtgtgaaatgagtttcagcgaatttatcgcccttctgccaagcatacgcccgcgctattactcgatttcttcatcacctcgtgtcgatgaaaaacaagcaagcatcacggtcagcgttgtctcaggaccggcgtggagcggatatggagaatataaaggaattgcgtcgaactatcttgccgagctgcaagaaggagatacgattacgtgctttatttccacaccgcagtcagagtttacgctgccaaaagaccctgaaacgccgcttatcatggtcggaccgggaacaggcgtcgcgccgtttagaggctttgtgcaggcgcgcaaacagctaaaagaacaaggacagtcacttggagaagcacatttatacttcggctgccgttcacctcatgaagactatctgtatcaagaagagcttgaaaacgcccaaagcgaaggcatcattacgcttcataccgctttttctcgcatgccgaatcagccgaaaacatacgttcagcacgtaatggaacaagacggcaagaaattgattgaacttcttgatcaaggagcgcacttctatatttgcggagacggaagccaaatggcacctgccgttgaagcaacgcttatgaaaagctatgctgacgttcaccaagtgagtgaagcagacgctcgcttatggctgcagcagctagaagaaaaaggccgatacgcaaaagacgtgtggctgggg

SEQ ID NO: 884 - protein, 1049 aa, synthetic construct
  REGION 1..1049: note = variant of P450 oxidase from Bacillus megaterium
MTIKEMPQPKTFGELKNLPLLNTDKPVQALMRIADELGEIFKFEAPGSVTRYLSSQRLIKEACDESRFDKNLSQALKFARDFVGDGLVTSWTHEPNWKKAHNILVPSFSQHAMGRYHAMMVDIAVQLVQKWERLNADEHIEVSEDMTRLTLDTIGLCLFNYRFNSFYRDTPHPFIVSVVRALDEVMNKLQRANPDDPAYDENGRQCQEDIKVMNDYVDKIIADRKARGEQSHDLLTQMLNGKDPETGEPLDDGNIRQQIITFLIAGHQTTSGLLSFALYFLVKNPRVLQKVAEEAARVLVDPVPSYKQVKQLKYVGMVLNEALRLWPVAPMFSLYAKEDTVLGGEYPLTKGDEVMVLVPQLHRDKTIWGDDVEEFRPERFENPSAIPQHAFKPFGNGQRACIGQQFALHSATLVLGMMLKHFDFEDHTNYELVIKESRTLKPEGFVVKAKSKGIPLGGIPSPSTEQSAKKVRKKAENAHNTPLLVLYGSNAGTAEGTARDLADIAMSKGFAPQVATLDSHAGNLPREGAVLIVTASYNGHPPDNAKQFVDWLDQASADEVKGVRYSVFGCGDKNWAGTYQKVPAFIDETLAAKGAENIADRGEADASDDFEGTYEEWRDHMWSDVAAYFGLDIENSEDNKSTLSLQFVDSAADMPLAKMHGAFSTNVVASKELQQPGSARSTRHLEIELPKEASYQEGDHLGVIPRYYEGIVNRVTARFGLSASQLIRLEAEEEKLAHLPLAKTVSVEELLQYVELQDPVTRTQLRAMAAKTVCPPHKVELEALLGKQAYKEQVLAKRLTMLELLEKYPACEMSFSEFIALLPSIRPRYYSISSSPRVDEKQASITVSVVSGPAWSGYGEYKGIASNYLAELQEGDTITCFISTPQSEFTLPKDPETPLIMVGPGTGVAPFRGFVQARKQLKEQGQSLGEAHLYFGCRSPHEDYLYQEELENAQSEGIITLHTAFSRMPNQPKTYVQHVMEQDGKKLIELLDQGAHFYICGDGSQMAPAVEATLMKSYADVHQVSEADARLWLQQLEEKGRYAKDVWLG

SEQ ID NO: 885 - DNA, 3147 bp, synthetic construct
  misc_feature 1..3147: note = variant of P450 oxidase from Bacillus megaterium
  source 1..3147: mol_type = other DNA
atgacaattaaggaaatgcctcagcctaagacgtttggagaacttaaaaatttaccgttattaaacacagataaaccggttcaagctttgatgcgtattgcggatgaattaggagaaatctttaaattcgaggcgcctggtagcgtaacgcgctatttatcaagtcagcgtctaattaaagaagcatgcgatgaatcacgctttgataaaaacttaagtcaagcgcttaaatttgcacgtgattttgttggagacgggctggttacaagctggacgcatgaaccgaattggaaaaaagcgcataatatcttagttccaagctttagtctgcatgcaatggggcgttatcatgcgatgatggtcgatatcgccgtgcagcttgttcaaaagtgggagcgtctaaatgcagatgagcatattgaagtatcggaagacatgacacgtttaacgcttgatacaattggtctttgcctgtttaactatcgctttaacagcttttaccgagatacgcctcatccatttattgtgagtgtggttcgtgcactggatgaagtaatgaacaagctgcagcgagcaaatccagacgacccagcttatgatgaaaacaagcgccagtgtcaagaagatatcaaggtgatgaacgactatgtagataaaattattgcagatcgcaaagcaaggggtgaacaaagtcatgatttattaacgcagatgctaaacggaaaagatccagaaacgggtgagccgcttgatgacgggaacattcgtcagcaaattattacattcttaattgcgggacaccaaacgacaagtggtcttttatcatttgcgctgtatttcttagtgaaaaatccacgtgtattacaaaaagtagcagaagaagcagcacgagttctagtagatcctgttccaagctacaaacaagtcaaacagcttaaatatgttggcatggtcttaaacgaagcgctgcgcttatggccagtagcgcctatgttttccctatatgcaaaagaagatacggtgcttggaggagaatatcctttaacgaaaggcgacgaagtaatggttctggtgcctcagcttcaccgtgataaaacaatttggggagacgatgtggaggagttccgtccagagcgttttgaaaatccaagtgcgattccgcagcatgcgtttaaaccgtttggaaacggtcagcgtgcgtgtatcggtcagcagttcgctcttcatagtgcaacgctggtacttggtatgatgctaaaacactttgactttgaagatcatacaaactacgagctcgttattaaagaatcgcggacgttaaaacctgaaggctttgtggtaaaagcaaaatcgaaaggcattccgcttggcggtattccttcacctagcactgaacagtctgctaaaaaagtacgcaaaaaggcagaaaacgctcataatacgccgctgcttgtgctatacggttcaaatgcgggaacagctgaaggaacggcgcgtgatttagcagatattgcaatgagcaaaggatttgcaccgcaggtcgcaacgcttgattcacacgccggtaatcttccgcgcgaaggagctgtattaattgtaacggcgtcttataacggtcatccgcctgataacgcaaagcaatttgtcgactggttagaccaagcgtctgcggatgaagtaaaaggcgttcgctactccgtatttggatgcggcgataaaaattgggcggggacgtatcaaaaagtgcctgcttttatcgatgaaacgcttgccgctaaaggggcagaaaacatcgctgaccgcggtgaagcagatgcaagcgacgactttgaaggcacatatgaagaatggcgtgatcatatgtggagtgacgtagcagcctactttggtctcgacattgaaaacagtgaagataataaatctactctttcacttcaatttgtcgacagcgcggcggatatgccgcttgcgaaaatgcacggtgcgttttcaacgaacgtcgtagcaagcaaagaacttcaacagcctggcagtgcacgaagcacgcgacatcttgaaattgaacttccaaaagaagcttcttatcaagaaggagatcatttaggtgttattcctcgctattatgaaggaatagtaaaccgtgtaacagcaaggttcggcctaagcgcatcacagctgatccgtctggaagcagaagaagaaaaattagctcatttgccactcgctaaaacagtatccgtagaagagcttctgcaatacgtggagcttcaagatcctgttacgcgcacgcagcttcgcgcaatggctgctaaaacggtctgcccgccgcataaagtagagcttgaagccttgcttggcaagcaagcctacaaagaacaagtgctggcaaaacgtttaacaatgcttgaactgcttgaaaaatacccggcgtgtgaaatgagtttcagcgaatttatcgcccttctgccaagcatacgcccgcgctattactcgatttcttcatcacctcgtgtcgatgaaaaacaagcaagcatcacggtcagcgttgtctcaggaccggcgtggagcggatatggagaatataaaggaattgcgtcgaactatcttgccgagctgcaagaaggagatacgattacgtgctttatttccacaccgcagtcagagtttacgctgccaaaagaccctgaaacgccgcttatcatggtcggaccgggaacaggcgtcgcgccgtttagaggctttgtgcaggcgcgcaaacagctaaaagaacaaggacagtcacttggagaagcacatttatacttcggctgccgttcacctcatgaagactatctgtatcaagaagagcttgaaaacgcccaaagcgaaggcatcattacgcttcataccgctttttctcgcatgccgaatcagccgaaaacatacgttcagcacgtaatggaacaagacggcaagaaattgattgaacttcttgatcaaggagcgcacttctatatttgcggagacggaagccaaatggcacctgccgttgaagcaacgcttatgaaaagctatgctgacgttcaccaagtgagtgaagcagacgctcgcttatggctgcagcagctagaagaaaaaggccgatacgcaaaagacgtgtggctgggg

SEQ ID NO: 886 - protein, 1049 aa, synthetic construct
  REGION 1..1049: note = variant of P450 oxidase from Bacillus megaterium
MTIKEMPQPKTFGELKNLPLLNTDKPVQALMRIADELGEIFKFEAPGSVTRYLSSQRLIKEACDESRFDKNLSQALKFARDFVGDGLVTSWTHEPNWKKAHNILVPSFSLHAMGRYHAMMVDIAVQLVQKWERLNADEHIEVSEDMTRLTLDTIGLCLFNYRFNSFYRDTPHPFIVSVVRALDEVMNKLQRANPDDPAYDENKRQCQEDIKVMNDYVDKIIADRKARGEQSHDLLTQMLNGKDPETGEPLDDGNIRQQIITFLIAGHQTTSGLLSFALYFLVKNPRVLQKVAEEAARVLVDPVPSYKQVKQLKYVGMVLNEALRLWPVAPMFSLYAKEDTVLGGEYPLTKGDEVMVLVPQLHRDKTIWGDDVEEFRPERFENPSAIPQHAFKPFGNGQRACIGQQFALHSATLVLGMMLKHFDFEDHTNYELVIKESRTLKPEGFVVKAKSKGIPLGGIPSPSTEQSAKKVRKKAENAHNTPLLVLYGSNAGTAEGTARDLADIAMSKGFAPQVATLDSHAGNLPREGAVLIVTASYNGHPPDNAKQFVDWLDQASADEVKGVRYSVFGCGDKNWAGTYQKVPAFIDETLAAKGAENIADRGEADASDDFEGTYEEWRDHMWSDVAAYFGLDIENSEDNKSTLSLQFVDSAADMPLAKMHGAFSTNVVASKELQQPGSARSTRHLEIELPKEASYQEGDHLGVIPRYYEGIVNRVTARFGLSASQLIRLEAEEEKLAHLPLAKTVSVEELLQYVELQDPVTRTQLRAMAAKTVCPPHKVELEALLGKQAYKEQVLAKRLTMLELLEKYPACEMSFSEFIALLPSIRPRYYSISSSPRVDEKQASITVSVVSGPAWSGYGEYKGIASNYLAELQEGDTITCFISTPQSEFTLPKDPETPLIMVGPGTGVAPFRGFVQARKQLKEQGQSLGEAHLYFGCRSPHEDYLYQEELENAQSEGIITLHTAFSRMPNQPKTYVQHVMEQDGKKLIELLDQGAHFYICGDGSQMAPAVEATLMKSYADVHQVSEADARLWLQQLEEKGRYAKDVWLG

SEQ ID NO: 887 - DNA, 3147 bp, synthetic construct
  misc_feature 1..3147: note = variant of P450 oxidase from Bacillus megaterium
  source 1..3147: mol_type = other DNA
atgacaattaaggaaatgcctcagcctaagacgtttggagaacttaaaaatttaccgttattaaacacagataaaccggttcaagctttgatgcgtattgcggatgaattaggagaaatctttaaattcgaggcgcctggtagcgtaacgcgctatttatcaagtcagcgtctaattaaagaagcatgcgatgaatcacgctttgataaaaacttaagtcaagcgcttaaatttgcacgtgattttgttggagacgggctggttacaagctggacgcatgaaccgaattggaaaaaagcgcataatatcttagttccaagctttagtcagcatgcaatggggcgttatcatgcgatgatggtcgatatcgccgtgcagcttgttcaaaagtgggagcgtctaaatgcagatgagcatattgaagtatcggaagacatgacacgtttaacgcttgatacaattggtctttgcctgtttaactatcgctttaacagcttttaccgagatacgcctcatccatttattgtgagtgtggttcgtgcactggatgaagtaatgaacaagctgcagcgagcaaatccagacgacccagcttatgatgaaaacaagcgccagtgtcaagaagatatcaaggtgatgaacgactatgtagataaaattattgcagatcgcaaagcaaggggtgaacaaagtcatgatttattaacgcagatgctaaacggaaaagatccacgtacgggtgagccgcttgatgacgggaacattcgtcagcaaattattacattcttaattgcgggacaccaaacgacaagtggtcttttatcatttgcgctgtatttcttagtgaaaaatccacgtgtattacaaaaagtagcagaagaagcagcacgagttctagtagatcctgttccaagctacaaacaagtcaaacagcttaaatatgttggcatggtcttaaacgaagcgctgcgcttatggccagtagcgcctatgttttccctatatgcaaaagaagatacggtgcttggaggagaatatcctttaacgaaaggcgacgaagtaatggttctggtgcctcagcttcaccgtgataaaacaatttggggagacgatgtggaggagttccgtccagagcgttttgaaaatccaagtgcgattccgcagcatgcgtttaaaccgtttggaaacggtcagcgtgcgtgtatcggtcagcagttcgctcttcatagtgcaacgctggtacttggtatgatgctaaaacactttgactttgaagatcatacaaactacgagctcgttattaaagaatcgcggacgttaaaacctgaaggctttgtggtaaaagcaaaatcgaaaggcattccgcttggcggtattccttcacctagcactgaacagtctgctaaaaaagtacgcaaaaaggcagaaaacgctcataatacgccgctgcttgtgctatacggttcaaatgcgggaacagctgaaggaacggcgcgtgatttagcagatattgcaatgagcaaaggatttgcaccgcaggtcgcaacgcttgattcacacgccggtaatcttccgcgcgaaggagctgtattaattgtaacggcgtcttataacggtcatccgcctgataacgcaaagcaatttgtcgactggttagaccaagcgtctgcggatgaagtaaaaggcgttcgctactccgtatttggatgcggcgataaaaattgggcggggacgtatcaaaaagtgcctgcttttatcgatgaaacgcttgccgctaaaggggcagaaaacatcgctgaccgcggtgaagcagatgcaagcgacgactttgaaggcacatatgaagaatggcgtgatcatatgtggagtgacgtagcagcctactttggtctcgacattgaaaacagtgaagataataaatctactctttcacttcaatttgtcgacagcgcggcggatatgccgcttgcgaaaatgcacggtgcgttttcaacgaacgtcgtagcaagcaaagaacttcaacagcctggcagtgcacgaagcacgcgacatcttgaaattgaacttccaaaagaagcttcttatcaagaaggagatcatttaggtgttattcctcgctattatgaaggaatagtaaaccgtgtaacagcaaggttcggcctaagcgcatcacagctgatccgtctggaagcagaagaagaaaaattagctcatttgccactcgctaaaacagtatccgtagaagagcttctgcaatacgtggagcttcaagatcctgttacgcgcacgcagcttcgcgcaatggctgctaaaacggtctgcccgccgcataaagtagagcttgaagccttgcttggcaagcaagcctacaaagaacaagtgctggcaaaacgtttaacaatgcttgaactgcttgaaaaatacccggcgtgtgaaatgagtttcagcgaatttatcgcccttctgccaagcatacgcccgcgctattactcgatttcttcatcacctcgtgtcgatgaaaaacaagcaagcatcacggtcagcgttgtctcaggaccggcgtggagcggatatggagaatataaaggaattgcgtcgaactatcttgccgagctgcaagaaggagatacgattacgtgctttatttccacaccgcagtcagagtttacgctgccaaaagaccctgaaacgccgcttatcatggtcggaccgggaacaggcgtcgcgccgtttagaggctttgtgcaggcgcgcaaacagctaaaagaacaaggacagtcacttggagaagcacatttatacttcggctgccgttcacctcatgaagactatctgtatcaagaagagcttgaaaacgcccaaagcgaaggcatcattacgcttcataccgctttttctcgcatgccgaatcagccgaaaacatacgttcagcacgtaatggaacaagacggcaagaaattgattgaacttcttgatcaaggagcgcacttctatatttgcggagacggaagccaaatggcacctgccgttgaagcaacgcttatgaaaagctatgctgacgttcaccaagtgagtgaagcagacgctcgcttatggctgcagcagctagaagaaaaaggccgatacgcaaaagacgtgtggctgggg

SEQ ID NO: 888 - protein, 1049 aa, synthetic construct
  REGION 1..1049: note = variant of P450 oxidase from Bacillus megaterium
MTIKEMPQPKTFGELKNLPLLNTDKPVQALMRIADELGEIFKFEAPGSVTRYLSSQRLIKEACDESRFDKNLSQALKFARDFVGDGLVTSWTHEPNWKKAHNILVPSFSQHAMGRYHAMMVDIAVQLVQKWERLNADEHIEVSEDMTRLTLDTIGLCLFNYRFNSFYRDTPHPFIVSVVRALDEVMNKLQRANPDDPAYDENKRQCQEDIKVMNDYVDKIIADRKARGEQSHDLLTQMLNGKDPRTGEPLDDGNIRQQIITFLIAGHQTTSGLLSFALYFLVKNPRVLQKVAEEAARVLVDPVPSYKQVKQLKYVGMVLNEALRLWPVAPMFSLYAKEDTVLGGEYPLTKGDEVMVLVPQLHRDKTIWGDDVEEFRPERFENPSAIPQHAFKPFGNGQRACIGQQFALHSATLVLGMMLKHFDFEDHTNYELVIKESRTLKPEGFVVKAKSKGIPLGGIPSPSTEQSAKKVRKKAENAHNTPLLVLYGSNAGTAEGTARDLADIAMSKGFAPQVATLDSHAGNLPREGAVLIVTASYNGHPPDNAKQFVDWLDQASADEVKGVRYSVFGCGDKNWAGTYQKVPAFIDETLAAKGAENIADRGEADASDDFEGTYEEWRDHMWSDVAAYFGLDIENSEDNKSTLSLQFVDSAADMPLAKMHGAFSTNVVASKELQQPGSARSTRHLEIELPKEASYQEGDHLGVIPRYYEGIVNRVTARFGLSASQLIRLEAEEEKLAHLPLAKTVSVEELLQYVELQDPVTRTQLRAMAAKTVCPPHKVELEALLGKQAYKEQVLAKRLTMLELLEKYPACEMSFSEFIALLPSIRPRYYSISSSPRVDEKQASITVSVVSGPAWSGYGEYKGIASNYLAELQEGDTITCFISTPQSEFTLPKDPETPLIMVGPGTGVAPFRGFVQARKQLKEQGQSLGEAHLYFGCRSPHEDYLYQEELENAQSEGIITLHTAFSRMPNQPKTYVQHVMEQDGKKLIELLDQGAHFYICGDGSQMAPAVEATLMKSYADVHQVSEADARLWLQQLEEKGRYAKDVWLG

SEQ ID NO: 889 - DNA, 3147 bp, synthetic construct
  misc_feature 1..3147: note = variant of P450 oxidase from Bacillus megaterium
  source 1..3147: mol_type = other DNA
atgacaattaaggaaatgcctcagcctaagacgtttggagaacttaaaaatttaccgttattaaacacagataaaccggttcaagctttgatgcgtattgcggatgaattaggagaaatctttaaattcgaggcgcctggtagcgtaacgcgctatttatcaagtcagcgtctaattaaagaagcatgcgatgaatcacgctttgataaaaacttaagtcaagcgcttaaatttgcacgtgattttgttggagacgggctggttacaagctggacgcatgaaccgaattggaaaaaagcgcataatatcttagttccaagctttagtcagcatgcaatggggcgttatcatgcgatgatggtcgatatcgccgtgcagcttgttcaaaagtgggagcgtctaaatgcagatgagcatattgaagtatcggaagacatgacacgtttaacgcttgatacaattggtctttgcctgtttaactatcgctttaacagcttttaccgagatacgcctcatccatttattgtgagtgtggttcgtgcactggatgaagtaatgaacaagctgcagcgagcaaatccagacgacccagcttatgatgaaaacaagcgccagtgtcaagaagatatcaaggtgatgaacgactatgtagataaaattattgcagatcgcaaagcaaggggtgaacaaagtcatgatttattaacgcagatgctaaacggaaaagatccaacgacgggtgagccgcttgatgacgggaacattcgtcagcaaattattacattcttaattgcgggacaccaaacgacaagtggtcttttatcatttgcgctgtatttcttagtgaaaaatccacgtgtattacaaaaagtagcagaagaagcagcacgagttctagtagatcctgttccaagctacaaacaagtcaaacagcttaaatatgttggcatggtcttaaacgaagcgctgcgcttatggccagtagcgcctatgttttccctatatgcaaaagaagatacggtgcttggaggagaatatcctttaacgaaaggcgacgaagtaatggttctggtgcctcagcttcaccgtgataaaacaatttggggagacgatgtggaggagttccgtccagagcgttttgaaaatccaagtgcgattccgcagcatgcgtttaaaccgtttggaaacggtcagcgtgcgtgtatcggtcagcagttcgctcttcatagtgcaacgctggtacttggtatgatgctaaaacactttgactttgaagatcatacaaactacgagctcgttattaaagaatcgcggacgttaaaacctgaaggctttgtggtaaaagcaaaatcgaaaggcattccgcttggcggtattccttcacctagcactgaacagtctgctaaaaaagtacgcaaaaaggcagaaaacgctcataatacgccgctgcttgtgctatacggttcaaatgcgggaacagctgaaggaacggcgcgtgatttagcagatattgcaatgagcaaaggatttgcaccgcaggtcgcaacgcttgattcacacgccggtaatcttccgcgcgaaggagctgtattaattgtaacggcgtcttataacggtcatccgcctgataacgcaaagcaatttgtcgactggttagaccaagcgtctgcggatgaagtaaaaggcgttcgctactccgtatttggatgcggcgataaaaattgggcggggacgtatcaaaaagtgcctgcttttatcgatgaaacgcttgccgctaaaggggcagaaaacatcgctgaccgcggtgaagcagatgcaagcgacgactttgaaggcacatatgaagaatggcgtgatcatatgtggagtgacgtagcagcctactttggtctcgacattgaaaacagtgaagataataaatctactctttcacttcaatttgtcgacagcgcggcggatatgccgcttgcgaaaatgcacggtgcgttttcaacgaacgtcgtagcaagcaaagaacttcaacagcctggcagtgcacgaagcacgcgacatcttgaaattgaacttccaaaagaagcttcttatcaagaaggagatcatttaggtgttattcctcgctattatgaaggaatagtaaaccgtgtaacagcaaggttcggcctaagcgcatcacagctgatccgtctggaagcagaagaagaaaaattagctcatttgccactcgctaaaacagtatccgtagaagagcttctgcaatacgtggagcttcaagatcctgttacgcgcacgcagcttcgcgcaatggctgctaaaacggtctgcccgccgcataaagtagagcttgaagccttgcttggcaagcaagcctacaaagaacaagtgctggcaaaacgtttaacaatgcttgaactgcttgaaaaatacccggcgtgtgaaatgagtttcagcgaatttatcgcccttctgccaagcatacgcccgcgctattactcgatttcttcatcacctcgtgtcgatgaaaaacaagcaagcatcacggtcagcgttgtctcaggaccggcgtggagcggatatggagaatataaaggaattgcgtcgaactatcttgccgagctgcaagaaggagatacgattacgtgctttatttccacaccgcagtcagagtttacgctgccaaaagaccctgaaacgccgcttatcatggtcggaccgggaacaggcgtcgcgccgtttagaggctttgtgcaggcgcgcaaacagctaaaagaacaaggacagtcacttggagaagcacatttatacttcggctgccgttcacctcatgaagactatctgtatcaagaagagcttgaaaacgcccaaagcgaaggcatcattacgcttcataccgctttttctcgcatgccgaatcagccgaaaacatacgttcagcacgtaatggaacaagacggcaagaaattgattgaacttcttgatcaaggagcgcacttctatatttgcggagacggaagccaaatggcacctgccgttgaagcaacgcttatgaaaagctatgctgacgttcaccaagtgagtgaagcagacgctcgcttatggctgcagcagctagaagaaaaaggccgatacgcaaaagacgtgtggctgggg

SEQ ID NO: 890 - protein, 1049 aa, synthetic construct
  REGION 1..1049: note = variant of P450 oxidase from Bacillus megaterium
MTIKEMPQPKTFGELKNLPLLNTDKPVQALMRIADELGEIFKFEAPGSVTRYLSSQRLIKEACDESRFDKNLSQALKFARDFVGDGLVTSWTHEPNWKKAHNILVPSFSQHAMGRYHAMMVDIAVQLVQKWERLNADEHIEVSEDMTRLTLDTIGLCLFNYRFNSFYRDTPHPFIVSVVRALDEVMNKLQRANPDDPAYDENKRQCQEDIKVMNDYVDKIIADRKARGEQSHDLLTQMLNGKDPTTGEPLDDGNIRQQIITFLIAGHQTTSGLLSFALYFLVKNPRVLQKVAEEAARVLVDPVPSYKQVKQLKYVGMVLNEALRLWPVAPMFSLYAKEDTVLGGEYPLTKGDEVMVLVPQLHRDKTIWGDDVEEFRPERFENPSAIPQHAFKPFGNGQRACIGQQFALHSATLVLGMMLKHFDFEDHTNYELVIKESRTLKPEGFVVKAKSKGIPLGGIPSPSTEQSAKKVRKKAENAHNTPLLVLYGSNAGTAEGTARDLADIAMSKGFAPQVATLDSHAGNLPREGAVLIVTASYNGHPPDNAKQFVDWLDQASADEVKGVRYSVFGCGDKNWAGTYQKVPAFIDETLAAKGAENIADRGEADASDDFEGTYEEWRDHMWSDVAAYFGLDIENSEDNKSTLSLQFVDSAADMPLAKMHGAFSTNVVASKELQQPGSARSTRHLEIELPKEASYQEGDHLGVIPRYYEGIVNRVTARFGLSASQLIRLEAEEEKLAHLPLAKTVSVEELLQYVELQDPVTRTQLRAMAAKTVCPPHKVELEALLGKQAYKEQVLAKRLTMLELLEKYPACEMSFSEFIALLPSIRPRYYSISSSPRVDEKQASITVSVVSGPAWSGYGEYKGIASNYLAELQEGDTITCFISTPQSEFTLPKDPETPLIMVGPGTGVAPFRGFVQARKQLKEQGQSLGEAHLYFGCRSPHEDYLYQEELENAQSEGIITLHTAFSRMPNQPKTYVQHVMEQDGKKLIELLDQGAHFYICGDGSQMAPAVEATLMKSYADVHQVSEADARLWLQQLEEKGRYAKDVWLG

SEQ ID NO: 891 - DNA, 3147 bp, synthetic construct
  misc_feature 1..3147: note = variant of P450 oxidase from Bacillus megaterium
  source 1..3147: mol_type = other DNA
atgacaattaaggaaatgcctcaacctaagacgtttggagaacttaaaaatttaccgttattaaacacagataaaccggttcaagctttgatgcgtattgcggatgaattaggagaaatctttaaattcgaggcgcctggtagcgtaacgcgctatttatcaagtcagcgtctaattaaagaagcatgcgatgaatcacgctttgataaaaacttaagtcaagcgcttaaatttgcacgtgattttgttggagacgggctggttacaagctggacgcatgaaccgaattggaaaaaagcgcataatatcttagttccaagctttagtcagcatgcaatggggcgttatcatgcgatgatggtcgatatcgccgtgcagcttgttcaaaagtgggagcgtctaaatgcagatgagcatattgaagtatcggaagacatgacacgtttaacgcttgatacaattggtctttgcctgtttaactatcgctttaacagcttttaccgagatacgcctcatccatttattgtgagtgtggttcgtgcactggatgaagtaatgaacaagctgcagcgagcaaatccagacgacccagcttatgatgaaaacaagcgccagtgtcaagaagatatcaaggtgatgaacgactatgtagataaaattattgcagatcgcaaagcaaggggtgaacaaagtcatgatttattaacgcggatgctaaacggaaaagatccagaaacgggtgagccgcttgatgacgggaacattcgtcagcaaattattacattcttaattgcgggacaccaaacgacaagtggtcttttatcatttgcgctgtatttcttagtgaaaaatccacgtgtattacaaaaagtagcagaagaagcagcacgagttctagtagatcctgttccaagctacaaacaagtcaaacagcttaaatatgttggcatggtcttaaacgaagcgctgcgcttatggccagtagcgcctatgttttccctatatgcaaaagaagatacggtgcttggaggagaatatcctttaacgaaaggcgacgaagtaatggttctggtgcctcagcttcaccgtgataaaacaatttggggagacgatgtggaggagttccgtccagagcgttttgaaaatccaagtgcgattccgcagcatgcgtttaaaccgtttggaaacggtcagcgtgcgtgtatcggtcagcagttcgctcttcatagtgcaacgctggtacttggtatgatgctaaaacactttgactttgaagatcatacaaactacgagctcgttattaaagaatcgcggacgttaaaacctgaaggctttgtggtaaaagcaaaatcgaaaggcattccgcttggcggtattccttcacctagcactgaacagtctgctaaaaaagtacgcaaaaaggcagaaaacgctcataatacgccgctgcttgtgctatacggttcaaatgcgggaacagctgaaggaacggcgcgtgatttagcagatattgcaatgagcaaaggatttgcaccgcaggtcgcaacgcttgattcacacgccggtaatcttccgcgcgaaggagctgtattaattgtaacggcgtcttataacggtcatccgcctgataacgcaaagcaatttgtcgactggttagaccaagcgtctgcggatgaagtaaaaggcgttcgctactccgtatttggatgcggcgataaaaattgggcggggacgtatcaaaaagtgcctgcttttatcgatgaaacgcttgccgctaaaggggcagaaaacatcgctgaccgcggtgaagcagatgcaagcgacgactttgaaggcacatatgaagaatggcgtgatcatatgtggagtgacgtagcagcctactttggtctcgacattgaaaacagtgaagataataaatctactctttcacttcaatttgtcgacagcgcggcggatatgccgcttgcgaaaatgcacggtgcgttttcaacgaacgtcgtagcaagcaaagaacttcaacagcctggcagtgcacgaagcacgcgacatcttgaaattgaacttccaaaagaagcttcttatcaagaaggagatcatttaggtgttattcctcgctattatgaaggaatagtaaaccgtgtaacagcaaggttcggcctaagcgcatcacagctgatccgtctggaagcagaagaagaaaaattagctcatttgccactcgctaaaacagtatccgtagaagagcttctgcaatacgtggagcttcaagatcctgttacgcgcacgcagcttcgcgcaatggctgctaaaacggtctgcccgccgcataaagtagagcttgaagccttgcttggcaagcaagcctacaaagaacaagtgctggcaaaacgtttaacaatgcttgaactgcttgaaaaatacccggcgtgtgaaatgagtttcagcgaatttatcgcccttctgccaagcatacgcccgcgctattactcgatttcttcatcacctcgtgtcgatgaaaaacaagcaagcatcacggtcagcgttgtctcaggaccggcgtggagcggatatggagaatataaaggaattgcgtcgaactatcttgccgagctgcaagaaggagatacgattacgtgctttatttccacaccgcagtcagagtttacgctgccaaaagaccctgaaacgccgcttatcatggtcggaccgggaacaggcgtcgcgccgtttagaggctttgtgcaggcgcgcaaacagctaaaagaacaaggacagtcacttggagaagcacatttatacttcggctgccgttcacctcatgaagactatctgtatcaagaagagcttgaaaacgcccaaagcgaaggcatcattacgcttcataccgctttttctcgcatgccgaatcagccgaaaacatacgttcagcacgtaatggaacaagacggcaagaaattgattgaacttcttgatcaaggagcgcacttctatatttgcggagacggaagccaaatggcacctgccgttgaagcaacgcttatgaaaagctatgctgacgttcaccaagtgagtgaagcagacgctcgcttatggctgcagcagctagaagaaaaaggccgatacgcaaaagacgtgtggctgggg

SEQ ID NO: 892 - protein, 1049 aa, synthetic construct
  REGION 1..1049: note = variant of P450 oxidase from Bacillus megaterium
MTIKEMPQPKTFGELKNLPLLNTDKPVQALMRIADELGEIFKFEAPGSVTRYLSSQRLIKEACDESRFDKNLSQALKFARDFVGDGLVTSWTHEPNWKKAHNILVPSFSQHAMGRYHAMMVDIAVQLVQKWERLNADEHIEVSEDMTRLTLDTIGLCLFNYRFNSFYRDTPHPFIVSVVRALDEVMNKLQRANPDDPAYDENKRQCQEDIKVMNDYVDKIIADRKARGEQSHDLLTRMLNGKDPETGEPLDDGNIRQQIITFLIAGHQTTSGLLSFALYFLVKNPRVLQKVAEEAARVLVDPVPSYKQVKQLKYVGMVLNEALRLWPVAPMFSLYAKEDTVLGGEYPLTKGDEVMVLVPQLHRDKTIWGDDVEEFRPERFENPSAIPQHAFKPFGNGQRACIGQQFALHSATLVLGMMLKHFDFEDHTNYELVIKESRTLKPEGFVVKAKSKGIPLGGIPSPSTEQSAKKVRKKAENAHNTPLLVLYGSNAGTAEGTARDLADIAMSKGFAPQVATLDSHAGNLPREGAVLIVTASYNGHPPDNAKQFVDWLDQASADEVKGVRYSVFGCGDKNWAGTYQKVPAFIDETLAAKGAENIADRGEADASDDFEGTYEEWRDHMWSDVAAYFGLDIENSEDNKSTLSLQFVDSAADMPLAKMHGAFSTNVVASKELQQPGSARSTRHLEIELPKEASYQEGDHLGVIPRYYEGIVNRVTARFGLSASQLIRLEAEEEKLAHLPLAKTVSVEELLQYVELQDPVTRTQLRAMAAKTVCPPHKVELEALLGKQAYKEQVLAKRLTMLELLEKYPACEMSFSEFIALLPSIRPRYYSISSSPRVDEKQASITVSVVSGPAWSGYGEYKGIASNYLAELQEGDTITCFISTPQSEFTLPKDPETPLIMVGPGTGVAPFRGFVQARKQLKEQGQSLGEAHLYFGCRSPHEDYLYQEELENAQSEGIITLHTAFSRMPNQPKTYVQHVMEQDGKKLIELLDQGAHFYICGDGSQMAPAVEATLMKSYADVHQVSEADARLWLQQLEEKGRYAKDVWLG

SEQ ID NO: 893 - DNA, 3147 bp, synthetic construct
  misc_feature 1..3147: note = variant of P450 oxidase from Bacillus megaterium
  source 1..3147: mol_type = other DNA
atgacaattaaggaaatgcctcagcctaagacgtttggagaacttaaaaatttaccgttattaaacacagataaaccggttcaagctttgatgcgtattgcggatgaattaggagaaatctttaaattcgaggcgcctggtagcgtaacgcgctatttatcaagtcagcgtctaattaaagaagcatgcgatgaatcacgctttgataaaaacttaagtcaagcgcttaaatttgcacgtgattttgttggagacgggctggttacaagctggacgcatgaaccgaattggaaaaaagcgcataatatcttagttccaagctttagtcagcatgcaatggggcgttatcatgcgatgatggtcgatatcgccgtgcagcttgttcaaaagtgggagcgtctaaatgcagatgagcatattgaagtatcggaagacatgacacgtttaacgcttgatacaattggtctttgcctgtttaactatcgctttaacagcttttaccgagatacgcctcatccatttattgtgagtgtggttcgtgcactggatgaagtaatgaacaagctgcagcgagcaaatccagacgacccagcttatgatgaaaacaagcgccagtgtcaagaagatatcaaggtgatgaacgactatgtagataaaattattgcagatcgcaaagcaaggggtgaacaaagtcatgatttattaacgcagatgctaaacggaaaagatccacagacgggtgagccgcttgatgacgggaacattcgtcagcaaattattacattcttaattgcgggacaccaaacgacaagtggtcttttatcatttgcgctgtatttcttagtgaaaaatccacgtgtattacaaaaagtagcagaagaagcagcacgagttctagtagatcctgttccaagctacaaacaagtcaaacagcttaaatatgttggcatggtcttaaacgaagcgctgcgcttatggccagtagcgcctatgttttccctatatgcaaaagaagatacggtgcttggaggagaatatcctttaacgaaaggcgacgaagtaatggttctggtgcctcagcttcaccgtgataaaacaatttggggagacgatgtggaggagttccgtccagagcgttttgaaaatccaagtgcgattccgcagcatgcgtttaaaccgtttggaaacggtcagcgtgcgtgtatcggtcagcagttcgctcttcatagtgcaacgctggtacttggtatgatgctaaaacactttgactttgaagatcatacaaactacgagctcgttattaaagaatcgcggacgttaaaacctgaaggctttgtggtaaaagcaaaatcgaaaggcattccgcttggcggtattccttcacctagcactgaacagtctgctaaaaaagtacgcaaaaaggcagaaaacgctcataatacgccgctgcttgtgctatacggttcaaatgcgggaacagctgaaggaacggcgcgtgatttagcagatattgcaatgagcaaaggatttgcaccgcaggtcgcaacgcttgattcacacgccggtaatcttccgcgcgaaggagctgtattaattgtaacggcgtcttataacggtcatccgcctgataacgcaaagcaatttgtcgactggttagaccaagcgtctgcggatgaagtaaaaggcgttcgctactccgtatttggatgcggcgataaaaattgggcggggacgtatcaaaaagtgcctgcttttatcgatgaaacgcttgccgctaaaggggcagaaaacatcgctgaccgcggtgaagcagatgcaagcgacgactttgaaggcacatatgaagaatggcgtgatcatatgtggagtgacgtagcagcctactttggtctcgacattgaaaacagtgaagataataaatctactctttcacttcaatttgtcgacagcgcggcggatatgccgcttgcgaaaatgcacggtgcgttttcaacgaacgtcgtagcaagcaaagaacttcaacagcctggcagtgcacgaagcacgcgacatcttgaaattgaacttccaaaagaagcttcttatcaagaaggagatcatttaggtgttattcctcgctattatgaaggaatagtaaaccgtgtaacagcaaggttcggcctaagcgcatcacagctgatccgtctggaagcagaagaagaaaaattagctcatttgccactcgctaaaacagtatccgtagaagagcttctgcaatacgtggagcttcaagatcctgttacgcgcacgcagcttcgcgcaatggctgctaaaacggtctgcccgccgcataaagtagagcttgaagccttgcttggcaagcaagcctacaaagaacaagtgctggcaaaacgtttaacaatgcttgaactgcttgaaaaatacccggcgtgtgaaatgagtttcagcgaatttatcgcccttctgccaagcatacgcccgcgctattactcgatttcttcatcacctcgtgtcgatgaaaaacaagcaagcatcacggtcagcgttgtctcaggaccggcgtggagcggatatggagaatataaaggaattgcgtcgaactatcttgccgagctgcaagaaggagatacgattacgtgctttatttccacaccgcagtcagagtttacgctgccaaaagaccctgaaacgccgcttatcatggtcggaccgggaacaggcgtcgcgccgtttagaggctttgtgcaggcgcgcaaacagctaaaagaacaaggacagtcacttggagaagcacatttatacttcggctgccgttcacctcatgaagactatctgtatcaagaagagcttgaaaacgcccaaagcgaaggcatcattacgcttcataccgctttttctcgcatgccgaatcagccgaaaacatacgttcagcacgtaatggaacaagacggcaagaaattgattgaacttcttgatcaaggagcgcacttctatatttgcggagacggaagccaaatggcacctgccgttgaagcaacgcttatgaaaagctatgctgacgttcaccaagtgagtgaagcagacgctcgcttatggctgcagcagctagaagaaaaaggccgatacgcaaaagacgtgtggctgggg

SEQ ID NO: 894 - protein, 1049 aa, synthetic construct
  REGION 1..1049: note = variant of P450 oxidase from Bacillus megaterium
MTIKEMPQPKTFGELKNLPLLNTDKPVQALMRIADELGEIFKFEAPGSVTRYLSSQRLIKEACDESRFDKNLSQALKFARDFVGDGLVTSWTHEPNWKKAHNILVPSFSQHAMGRYHAMMVDIAVQLVQKWERLNADEHIEVSEDMTRLTLDTIGLCLFNYRFNSFYRDTPHPFIVSVVRALDEVMNKLQRANPDDPAYDENKRQCQEDIKVMNDYVDKIIADRKARGEQSHDLLTQMLNGKDPQTGEPLDDGNIRQQIITFLIAGHQTTSGLLSFALYFLVKNPRVLQKVAEEAARVLVDPVPSYKQVKQLKYVGMVLNEALRLWPVAPMFSLYAKEDTVLGGEYPLTKGDEVMVLVPQLHRDKTIWGDDVEEFRPERFENPSAIPQHAFKPFGNGQRACIGQQFALHSATLVLGMMLKHFDFEDHTNYELVIKESRTLKPEGFVVKAKSKGIPLGGIPSPSTEQSAKKVRKKAENAHNTPLLVLYGSNAGTAEGTARDLADIAMSKGFAPQVATLDSHAGNLPREGAVLIVTASYNGHPPDNAKQFVDWLDQASADEVKGVRYSVFGCGDKNWAGTYQKVPAFIDETLAAKGAENIADRGEADASDDFEGTYEEWRDHMWSDVAAYFGLDIENSEDNKSTLSLQFVDSAADMPLAKMHGAFSTNVVASKELQQPGSARSTRHLEIELPKEASYQEGDHLGVIPRYYEGIVNRVTARFGLSASQLIRLEAEEEKLAHLPLAKTVSVEELLQYVELQDPVTRTQLRAMAAKTVCPPHKVELEALLGKQAYKEQVLAKRLTMLELLEKYPACEMSFSEFIALLPSIRPRYYSISSSPRVDEKQASITVSVVSGPAWSGYGEYKGIASNYLAELQEGDTITCFISTPQSEFTLPKDPETPLIMVGPGTGVAPFRGFVQARKQLKEQGQSLGEAHLYFGCRSPHEDYLYQEELENAQSEGIITLHTAFSRMPNQPKTYVQHVMEQDGKKLIELLDQGAHFYICGDGSQMAPAVEATLMKSYADVHQVSEADARLWLQQLEEKGRYAKDVWLG

SEQ ID NO: 895 - DNA, 3147 bp, synthetic construct
  misc_feature 1..3147: note = variant of P450 oxidase from Bacillus megaterium
  source 1..3147: mol_type = other DNA
atgacaattaaggaaatgcctcagcctaagacgtttggagaacttaaaaatttaccgttattaaacacagataaaccggttcaagctttgatgcgtattgcggatgaattaggagaaatctttaaattcgaggcgcctggtagcgtaacgcgctatttatcaagtcagcgtctaattaaagaagcatgcgatgaatcacgctttgataaaaacttaagtcaagcgcttaaatttgcacgtgattttgttggagacgggctggttacaagctggacgcatgaaccgaattggaaaaaagcgcataatatcttagttccaagctttagtcagcatgcaatggggcgttatcatgcgatgatggtcgatatcgccgtgcagcttgttcaaaagtgggagcgtctaaatgcagatgagcatattgaagtatcggaagacatgacacgtttaacgcttgatacaattggtctttgcctgtttaactatcgctttaacagcttttaccgagatacgcctcatccatttattgtgagtgtggttcgtgcactggatgaagtaatgaacaagctgcagcgagcaaatccagacgacccagcttatgatgaaaacaagcgccagtgtcaagaagatatcaaggtgatgaacgactatgtagataaaattattgcagatcgcaaagcaaggggtgaacaaagtcatgatttattaacgcagatgctaaacggaaaagatccagaaacgggtaggccgcttgatgacgggaacattcgtcagcaaattattacattcttaattgcgggacaccaaacgacaagtggtcttttatcatttgcgctgtatttcttagtgaaaaatccacgtgtattacaaaaagtagcagaagaagcagcacgagttctagtagatcctgttccaagctacaaacaagtcaaacagcttaaatatgttggcatggtcttaaacgaagcgctgcgcttatggccagtagcgcctatgttttccctatatgcaaaagaagatacggtgcttggaggagaatatcctttaacgaaaggcgacgaagtaatggttctggtgcctcagcttcaccgtgataaaacaatttggggagacgatgtggaggagttccgtccagagcgttttgaaaatccaagtgcgattccgcagcatgcgtttaaaccgtttggaaacggtcagcgtgcgtgtatcggtcagcagttcgctcttcatagtgcaacgctggtacttggtatgatgctaaaacactttgactttgaagatcatacaaactacgagctcgttattaaagaatcgcggacgttaaaacctgaaggctttgtggtaaaagcaaaatcgaaaggcattccgcttggcggtattccttcacctagcactgaacagtctgctaaaaaagtacgcaaaaaggcagaaaacgctcataatacgccgctgcttgtgctatacggttcaaatgcgggaacagctgaaggaacggcgcgtgatttagcagatattgcaatgagcaaaggatttgcaccgcaggtcgcaacgcttgattcacacgccggtaatcttccgcgcgaaggagctgtattaattgtaacggcgtcttataacggtcatccgcctgataacgcaaagcaatttgtcgactggttagaccaagcgtctgcggatgaagtaaaaggcgttcgctactccgtatttggatgcggcgataaaaattgggcggggacgtatcaaaaagtgcctgcttttatcgatgaaacgcttgccgctaaaggggcagaaaacatcgctgaccgcggtgaagcagatgcaagcgacgactttgaaggcacatatgaagaatggcgtgatcatatgtggagtgacgtagcagcctactttggtctcgacattgaaaacagtgaagataataaatctactctttcacttcaatttgtcgacagcgcggcggatatgccgcttgcgaaaatgcacggtgcgttttcaacgaacgtcgtagcaagcaaagaacttcaacagcctggcagtgcacgaagcacgcgacatcttgaaattgaacttccaaaagaagcttcttatcaagaaggagatcatttaggtgttattcctcgctattatgaaggaatagtaaaccgtgtaacagcaaggttcggcctaagcgcatcacagctgatccgtctggaagcagaagaagaaaaattagctcatttgccactcgctaaaacagtatccgtagaagagcttctgcaatacgtggagcttcaagatcctgttacgcgcacgcagcttcgcgcaatggctgctaaaacggtctgcccgccgcataaagtagagcttgaagccttgcttggcaagcaagcctacaaagaacaagtgctggcaaaacgtttaacaatgcttgaactgcttgaaaaatacccggcgtgtgaaatgagtttcagcgaatttatcgcccttctgccaagcatacgcccgcgctattactcgatttcttcatcacctcgtgtcgatgaaaaacaagcaagcatcacggtcagcgttgtctcaggaccggcgtggagcggatatggagaatataaaggaattgcgtcgaactatcttgccgagctgcaagaaggagatacgattacgtgctttatttccacaccgcagtcagagtttacgctgccaaaagaccctgaaacgccgcttatcatggtcggaccgggaacaggcgtcgcgccgtttagaggctttgtgcaggcgcgcaaacagctaaaagaacaaggacagtcacttggagaagcacatttatacttcggctgccgttcacctcatgaagactatctgtatcaagaagagcttgaaaacgcccaaagcgaaggcatcattacgcttcataccgctttttctcgcatgccgaatcagccgaaaacatacgttcagcacgtaatggaacaagacggcaagaaattgattgaacttcttgatcaaggagcgcacttctatatttgcggagacggaagccaaatggcacctgccgttgaagcaacgcttatgaaaagctatgctgacgttcaccaagtgagtgaagcagacgctcgcttatggctgcagcagctagaagaaaaaggccgatacgcaaaagacgtgtggctgggg

SEQ ID NO: 896 - protein, 1049 aa, synthetic construct
  REGION 1..1049: note = variant of P450 oxidase from Bacillus megaterium
MTIKEMPQPKTFGELKNLPLLNTDKPVQALMRIADELGEIFKFEAPGSVTRYLSSQRLIKEACDESRFDKNLSQALKFARDFVGDGLVTSWTHEPNWKKAHNILVPSFSQHAMGRYHAMMVDIAVQLVQKWERLNADEHIEVSEDMTRLTLDTIGLCLFNYRFNSFYRDTPHPFIVSVVRALDEVMNKLQRANPDDPAYDENKRQCQEDIKVMNDYVDKIIADRKARGEQSHDLLTQMLNGKDPETGRPLDDGNIRQQIITFLIAGHQTTSGLLSFALYFLVKNPRVLQKVAEEAARVLVDPVPSYKQVKQLKYVGMVLNEALRLWPVAPMFSLYAKEDTVLGGEYPLTKGDEVMVLVPQLHRDKTIWGDDVEEFRPERFENPSAIPQHAFKPFGNGQRACIGQQFALHSATLVLGMMLKHFDFEDHTNYELVIKESRTLKPEGFVVKAKSKGIPLGGIPSPSTEQSAKKVRKKAENAHNTPLLVLYGSNAGTAEGTARDLADIAMSKGFAPQVATLDSHAGNLPREGAVLIVTASYNGHPPDNAKQFVDWLDQASADEVKGVRYSVFGCGDKNWAGTYQKVPAFIDETLAAKGAENIADRGEADASDDFEGTYEEWRDHMWSDVAAYFGLDIENSEDNKSTLSLQFVDSAADMPLAKMHGAFSTNVVASKELQQPGSARSTRHLEIELPKEASYQEGDHLGVIPRYYEGIVNRVTARFGLSASQLIRLEAEEEKLAHLPLAKTVSVEELLQYVELQDPVTRTQLRAMAAKTVCPPHKVELEALLGKQAYKEQVLAKRLTMLELLEKYPACEMSFSEFIALLPSIRPRYYSISSSPRVDEKQASITVSVVSGPAWSGYGEYKGIASNYLAELQEGDTITCFISTPQSEFTLPKDPETPLIMVGPGTGVAPFRGFVQARKQLKEQGQSLGEAHLYFGCRSPHEDYLYQEELENAQSEGIITLHTAFSRMPNQPKTYVQHVMEQDGKKLIELLDQGAHFYICGDGSQMAPAVEATLMKSYADVHQVSEADARLWLQQLEEKGRYAKDVWLG

SEQ ID NO: 897 - DNA, 3147 bp, synthetic construct
  misc_feature 1..3147: note = variant of P450 oxidase from Bacillus megaterium
  source 1..3147: mol_type = other DNA
atgacaattaaggaaatgcctcagcctaagacgtttggagaacttaaaaatttaccgttattaaacacagataaaccggttcaagctttgatgcgtattgcggatgaattaggagaaatctttaaattcgaggcgcctggtagcgtaacgcgctatttatcaagtcagcgtctaattaaagaagcatgcgatgaatcacgctttgataaaaacttaagtcaagcgcttaaatttgcacgtgattttgttggagacgggctggttacaagctggacgcatgaaccgaattggaaaaaagcgcataatatcttagttccaagctttagtcagcatgcaatggggcgttatcatgcgatgatggtcgatatcgccgtgcagcttgttcaaaagtgggagcgtctaaatgcagatgagcatattgaagtatcggaagacatgacacgtttaacgcttgatacaattggtctttgcctgtttaactatcgctttaacagcttttaccgagatacgcctcatccatttattgtgagtgtggttcgtgcactggatgaagtaatgaacaagctgcagcgagcaaatccagacgacccagcttatgatgaaaacaagcgccagtgtcaagaagatatcaaggtgatgaacgactatgtagataaaattattgcagatcgcaaagcaaggggtgaacaaagtcatgatttattaacgcagatgctaaacggaaaagatccatggacgggtgagccgcttgatgacgggaacattcgtcagcaaattattacattcttaattgcgggacaccaaacgacaagtggtcttttatcatttgcgctgtatttcttagtgaaaaatccacgtgtattacaaaaagtagcagaagaagcagcacgagttctagtagatcctgttccaagctacaaacaagtcaaacagcttaaatatgttggcatggtcttaaacgaagcgctgcgcttatggccagtagcgcctatgttttccctatatgcaaaagaagatacggtgcttggaggagaatatcctttaacgaaaggcgacgaagtaatggttctggtgcctcagcttcaccgtgataaaacaatttggggagacgatgtggaggagttccgtccagagcgttttgaaaatccaagtgcgattccgcagcatgcgtttaaaccgtttggaaacggtcagcgtgcgtgtatcggtcagcagttcgctcttcatagtgcaacgctggtacttggtatgatgctaaaacactttgactttgaagatcatacaaactacgagctcgttattaaagaatcgcggacgttaaaacctgaaggctttgtggtaaaagcaaaatcgaaaggcattccgcttggcggtattccttcacctagcactgaacagtctgctaaaaaagtacgcaaaaaggcagaaaacgctcataatacgccgctgcttgtgctatacggttcaaatgcgggaacagctgaaggaacggcgcgtgatttagcagatattgcaatgagcaaaggatttgcaccgcaggtcgcaacgcttgattcacacgccggtaatcttccgcgcgaaggagctgtattaattgtaacggcgtcttataacggtcatccgcctgataacgcaaagcaatttgtcgactggttagaccaagcgtctgcggatgaagtaaaaggcgttcgctactccgtatttggatgcggcgataaaaattgggcggggacgtatcaaaaagtgcctgcttttatcgatgaaacgcttgccgctaaaggggcagaaaacatcgctgaccgcggtgaagcagatgcaagcgacgactttgaaggcacatatgaagaatggcgtgatcatatgtggagtgacgtagcagcctactttggtctcgacattgaaaacagtgaagataataaatctactctttcacttcaatttgtcgacagcgcggcggatatgccgcttgcgaaaatgcacggtgcgttttcaacgaacgtcgtagcaagcaaagaacttcaacagcctggcagtgcacgaagcacgcgacatcttgaaattgaacttccaaaagaagcttcttatcaagaaggagatcatttaggtgttattcctcgctattatgaaggaatagtaaaccgtgtaacagcaaggttcggcctaagcgcatcacagctgatccgtctggaagcagaagaagaaaaattagctcatttgccactcgctaaaacagtatccgtagaagagcttctgcaatacgtggagcttcaagatcctgttacgcgcacgcagcttcgcgcaatggctgctaaaacggtctgcccgccgcataaagtagagcttgaagccttgcttggcaagcaagcctacaaagaacaagtgctggcaaaacgtttaacaatgcttgaactgcttgaaaaatacccggcgtgtgaaatgagtttcagcgaatttatcgcccttctgccaagcatacgcccgcgctattactcgatttcttcatcacctcgtgtcgatgaaaaacaagcaagcatcacggtcagcgttgtctcaggaccggcgtggagcggatatggagaatataaaggaattgcgtcgaactatcttgccgagctgcaagaaggagatacgattacgtgctttatttccacaccgcagtcagagtttacgctgccaaaagaccctgaaacgccgcttatcatggtcggaccgggaacaggcgtcgcgccgtttagaggctttgtgcaggcgcgcaaacagctaaaagaacaaggacagtcacttggagaagcacatttatacttcggctgccgttcacctcatgaagactatctgtatcaagaagagcttgaaaacgcccaaagcgaaggcatcattacgcttcataccgctttttctcgcatgccgaatcagccgaaaacatacgttcagcacgtaatggaacaagacggcaagaaattgattgaacttcttgatcaaggagcgcacttctatatttgcggagacggaagccaaatggcacctgccgttgaagcaacgcttatgaaaagctatgctgacgttcaccaagtgagtgaagcagacgctcgcttatggctgcagcagctagaagaaaaaggccgatacgcaaaagacgtgtggctgggg

SEQ ID NO: 898 - protein, 1049 aa, synthetic construct
  REGION 1..1049: note = variant of P450 oxidase from Bacillus megaterium
MTIKEMPQPKTFGELKNLPLLNTDKPVQALMRIADELGEIFKFEAPGSVTRYLSSQRLIKEACDESRFDKNLSQALKFARDFVGDGLVTSWTHEPNWKKAHNILVPSFSQHAMGRYHAMMVDIAVQLVQKWERLNADEHIEVSEDMTRLTLDTIGLCLFNYRFNSFYRDTPHPFIVSVVRALDEVMNKLQRANPDDPAYDENKRQCQEDIKVMNDYVDKIIADRKARGEQSHDLLTQMLNGKDPWTGEPLDDGNIRQQIITFLIAGHQTTSGLLSFALYFLVKNPRVLQKVAEEAARVLVDPVPSYKQVKQLKYVGMVLNEALRLWPVAPMFSLYAKEDTVLGGEYPLTKGDEVMVLVPQLHRDKTIWGDDVEEFRPERFENPSAIPQHAFKPFGNGQRACIGQQFALHSATLVLGMMLKHFDFEDHTNYELVIKESRTLKPEGFVVKAKSKGIPLGGIPSPSTEQSAKKVRKKAENAHNTPLLVLYGSNAGTAEGTARDLADIAMSKGFAPQVATLDSHAGNLPREGAVLIVTASYNGHPPDNAKQFVDWLDQASADEVKGVRYSVFGCGDKNWAGTYQKVPAFIDETLAAKGAENIADRGEADASDDFEGTYEEWRDHMWSDVAAYFGLDIENSEDNKSTLSLQFVDSAADMPLAKMHGAFSTNVVASKELQQPGSARSTRHLEIELPKEASYQEGDHLGVIPRYYEGIVNRVTARFGLSASQLIRLEAEEEKLAHLPLAKTVSVEELLQYVELQDPVTRTQLRAMAAKTVCPPHKVELEALLGKQAYKEQVLAKRLTMLELLEKYPACEMSFSEFIALLPSIRPRYYSISSSPRVDEKQASITVSVVSGPAWSGYGEYKGIASNYLAELQEGDTITCFISTPQSEFTLPKDPETPLIMVGPGTGVAPFRGFVQARKQLKEQGQSLGEAHLYFGCRSPHEDYLYQEELENAQSEGIITLHTAFSRMPNQPKTYVQHVMEQDGKKLIELLDQGAHFYICGDGSQMAPAVEATLMKSYADVHQVSEADARLWLQQLEEKGRYAKDVWLG

SEQ ID NO: 899 - DNA, 3147 bp, synthetic construct
  misc_feature 1..3147: note = variant of P450 oxidase from Bacillus megaterium
  source 1..3147: mol_type = other DNA
atgacaattaaggaaatgcctcagcctaagacgtttggagaacttaaaaatttaccgttattaaacacagataaaccggttcaagctttgatgcgtattgcggatgaattaggagaaatctttaaattcgaggcgcctggtagcgtaacgcgctatttatcaagtcagcgtctaattaaagaagcatgcgatgaatcacgctttgataaaaacttaagtcaagcgcttaaatttgcacgtgattttgttggagacgggctggttacaagctggacgcatgaaccgaattggaaaaaagcgcataatatcttagttccaagctttagtcagcatgcaatggggcgttatcatgcgatgatggtcgatatcgccgtgcagcttgttcaaaagtgggagcgtctaaatgcagatgagcatattgaagtatcggaagacatgacacgtttaacgcttgatacaattggtctttgcctgtttaactatcgctttaacagcttttaccgagatacgcctcatccatttattgtgagtgtggttcgtgcactggatgaagtaatgaacaagctgcagcgagcaaatccagacgacccagcttatgatgaaaacaagcgccagtgtcaagaagatatcaaggtgatgaacgactatgtagataaaattattgcagatcgcaaagcaaggggtgaacaaagtcatgatttattaacgcagatgctaaacggaaaagatccagaaacgggtgagccgcttgatgacgggaacattaagcagcaaattattacattcttaattgcgggacaccaaacgacaagtggtcttttatcatttgcgctgtatttcttagtgaaaaatccacgtgtattacaaaaagtagcagaagaagcagcacgagttctagtagatcctgttccaagctacaaacaagtcaaacagcttaaatatgttggcatggtcttaaacgaagcgctgcgcttatggccagtagcgcctatgttttccctatatgcaaaagaagatacggtgcttggaggagaatatcctttaacgaaaggcgacgaagtaatggttctggtgcctcagcttcaccgtgataaaacaatttggggagacgatgtggaggagttccgtccagagcgttttgaaaatccaagtgcgattccgcagcatgcgtttaaaccgtttggaaacggtcagcgtgcgtgtatcggtcagcagttcgctcttcatagtgcaacgctggtacttggtatgatgctaaaacactttgactttgaagatcatacaaactacgagctcgttattaaagaatcgcggacgttaaaacctgaaggctttgtggtaaaagcaaaatcgaaaggcattccgcttggcggtattccttcacctagcactgaacagtctgctaaaaaagtacgcaaaaaggcagaaaacgctcataatacgccgctgcttgtgctatacggttcaaatgcgggaacagctgaaggaacggcgcgtgatttagcagatattgcaatgagcaaaggatttgcaccgcaggtcgcaacgcttgattcacacgccggtaatcttccgcgcgaaggagctgtattaattgtaacggcgtcttataacggtcatccgcctgataacgcaaagcaatttgtcgactggttagaccaagcgtctgcggatgaagtaaaaggcgttcgctactccgtatttggatgcggcgataaaaattgggcggggacgtatcaaaaagtgcctgcttttatcgatgaaacgcttgccgctaaaggggcagaaaacatcgctgaccgcggtgaagcagatgcaagcgacgactttgaaggcacatatgaagaatggcgtgatcatatgtggagtgacgtagcagcctactttggtctcgacattgaaaacagtgaagataataaatctactctttcacttcaatttgtcgacagcgcggcggatatgccgcttgcgaaaatgcacggtgcgttttcaacgaacgtcgtagcaagcaaagaacttcaacagcctggcagtgcacgaagcacgcgacatcttgaaattgaacttccaaaagaagcttcttatcaagaaggagatcatttaggtgttattcctcgctattatgaaggaatagtaaaccgtgtaacagcaaggttcggcctaagcgcatcacagctgatccgtctggaagcagaagaagaaaaattagctcatttgccactcgctaaaacagtatccgtagaagagcttctgcaatacgtggagcttcaagatcctgttacgcgcacgcagcttcgcgcaatggctgctaaaacggtctgcccgccgcataaagtagagcttgaagccttgcttggcaagcaagcctacaaagaacaagtgctggcaaaacgtttaacaatgcttgaactgcttgaaaaatacccggcgtgtgaaatgagtttcagcgaatttatcgcccttctgccaagcatacgcccgcgctattactcgatttcttcatcacctcgtgtcgatgaaaaacaagcaagcatcacggtcagcgttgtctcaggaccggcgtggagcggatatggagaatataaaggaattgcgtcgaactatcttgccgagctgcaagaaggagatacgattacgtgctttatttccacaccgcagtcagagtttacgctgccaaaagaccctgaaacgccgcttatcatggtcggaccgggaacaggcgtcgcgccgtttagaggctttgtgcaggcgcgcaaacagctaaaagaacaaggacagtcacttggagaagcacatttatacttcggctgccgttcacctcatgaagactatctgtatcaagaagagcttgaaaacgcccaaagcgaaggcatcattacgcttcataccgctttttctcgcatgccgaatcagccgaaaacatacgttcagcacgtaatggaacaagacggcaagaaattgattgaacttcttgatcaaggagcgcacttctatatttgcggagacggaagccaaatggcacctgccgttgaagcaacgcttatgaaaagctatgctgacgttcaccaagtgagtgaagcagacgctcgcttatggctgcagcagctagaagaaaaaggccgatacgcaaaagacgtgtggctgggg

SEQ ID NO: 900 - protein, 1049 aa, synthetic construct
  REGION 1..1049: note = variant of P450 oxidase from Bacillus megaterium
MTIKEMPQPKTFGELKNLPLLNTDKPVQALMRIADELGEIFKFEAPGSVTRYLSSQRLIKEACDESRFDKNLSQALKFARDFVGDGLVTSWTHEPNWKKAHNILVPSFSQHAMGRYHAMMVDIAVQLVQKWERLNADEHIEVSEDMTRLTLDTIGLCLFNYRFNSFYRDTPHPFIVSVVRALDEVMNKLQRANPDDPAYDENKRQCQEDIKVMNDYVDKIIADRKARGEQSHDLLTQMLNGKDPETGEPLDDGNIKQQIITFLIAGHQTTSGLLSFALYFLVKNPRVLQKVAEEAARVLVDPVPSYKQVKQLKYVGMVLNEALRLWPVAPMFSLYAKEDTVLGGEYPLTKGDEVMVLVPQLHRDKTIWGDDVEEFRPERFENPSAIPQHAFKPFGNGQRACIGQQFALHSATLVLGMMLKHFDFEDHTNYELVIKESRTLKPEGFVVKAKSKGIPLGGIPSPSTEQSAKKVRKKAENAHNTPLLVLYGSNAGTAEGTARDLADIAMSKGFAPQVATLDSHAGNLPREGAVLIVTASYNGHPPDNAKQFVDWLDQASADEVKGVRYSVFGCGDKNWAGTYQKVPAFIDETLAAKGAENIADRGEADASDDFEGTYEEWRDHMWSDVAAYFGLDIENSEDNKSTLSLQFVDSAADMPLAKMHGAFSTNVVASKELQQPGSARSTRHLEIELPKEASYQEGDHLGVIPRYYEGIVNRVTARFGLSASQLIRLEAEEEKLAHLPLAKTVSVEELLQYVELQDPVTRTQLRAMAAKTVCPPHKVELEALLGKQAYKEQVLAKRLTMLELLEKYPACEMSFSEFIALLPSIRPRYYSISSSPRVDEKQASITVSVVSGPAWSGYGEYKGIASNYLAELQEGDTITCFISTPQSEFTLPKDPETPLIMVGPGTGVAPFRGFVQARKQLKEQGQSLGEAHLYFGCRSPHEDYLYQEELENAQSEGIITLHTAFSRMPNQPKTYVQHVMEQDGKKLIELLDQGAHFYICGDGSQMAPAVEATLMKSYADVHQVSEADARLWLQQLEEKGRYAKDVWLG

SEQ ID NO: 901 - DNA, 3147 bp, synthetic construct
  misc_feature 1..3147: note = variant of P450 oxidase from Bacillus megaterium
  source 1..3147: mol_type = other DNA
atgacaattaaggaaatgcctcagcctaagacgtttggagaacttaaaaatttaccgttattaaacacagataaaccggttcaagctttgatgcgtattgcggatgaattaggagaaatctttaaattcgaggcgcctggtagcgtaacgcgctatttatcaagtcagcgtctaattaaagaagcatgcgatgaatcacgctttgataaaaacttaagtcaagcgcttaaatttgcacgtgattttgttggagacgggctggttacaagctggacgcatgaaccgaattggaaaaaagcgcataatatcttagttccaagctttagtcagcatgcaatgcatcgttatcatgcgatgatggtcgatatcgccgtgcagcttgttcaaaagtgggagcgtctaaatgcagatgagcatattgaagtatcggaagacatgacacgtttaacgcttgatacaattggtctttgcctgtttaactatcgctttaacagcttttaccgagatacgcctcatccatttattgtgagtgtggttcgtgcactggatgaagtaatgaacaagctgcagcgagcaaatccagacgacccagcttatgatgaaaacaagcgccagtgtcaagaagatatcaaggtgatgaacgactatgtagataaaattattgcagatcgcaaagcaaggggtgaacaaagtcatgatttattaacgcagatgctaaacggaaaagatccagaaacgggtgagccgcttgatgacgggaacattcgtcagcaaattattacattcttaattgcgggacaccaaacgacaagtggtcttttatcatttgcgctgtatttcttagtgaaaaatccacgtgtattacaaaaagtagcagaagaagcagcacgagttctagtagatcctgttccaagctacaaacaagtcaaacagcttaaatatgttggcatggtcttaaacgaagcgctgcgcttatggccagtagcgcctatgttttccctatatgcaaaagaagatacggtgcttggaggagaatatcctttaacgaaaggcgacgaagtaatggttctggtgcctcagcttcaccgtgataaaacaatttggggagacgatgtggaggagttccgtccagagcgttttgaaaatccaagtgcgattccgcagcatgcgtttaaaccgtttggaaacggtcagcgtgcgtgtatcggtcagcagttcgctcttcatagtgcaacgctggtacttggtatgatgctaaaacactttgactttgaagatcatacaaactacgagctcgttattaaagaatcgcggacgttaaaacctgaaggctttgtggtaaaagcaaaatcgaaaggcattccgcttggcggtattccttcacctagcactgaacagtctgctaaaaaagtacgcaaaaaggcagaaaacgctcataatacgccgctgcttgtgctatacggttcaaatgcgggaacagctgaaggaacggcgcgtgatttagcagatattgcaatgagcaaaggatttgcaccgcaggtcgcaacgcttgattcacacgccggtaatcttccgcgcgaaggagctgtattaattgtaacggcgtcttataacggtcatccgcctgataacgcaaagcaatttgtcgactggttagaccaagcgtctgcggatgaagtaaaaggcgttcgctactccgtatttggatgcggcgataaaaattgggcggggacgtatcaaaaagtgcctgcttttatcgatgaaacgcttgccgctaaaggggcagaaaacatcgctgaccgcggtgaagcagatgcaagcgacgactttgaaggcacatatgaagaatggcgtgatcatatgtggagtgacgtagcagcctactttggtctcgacattgaaaacagtgaagataataaatctactctttcacttcaatttgtcgacagcgcggcggatatgccgcttgcgaaaatgcacggtgcgttttcaacgaacgtcgtagcaagcaaagaacttcaacagcctggcagtgcacgaagcacgcgacatcttgaaattgaacttccaaaagaagcttcttatcaagaaggagatcatttaggtgttattcctcgctattatgaaggaatagtaaaccgtgtaacagcaaggttcggcctaagcgcatcacagctgatccgtctggaagcagaagaagaaaaattagctcatttgccactcgctaaaacagtatccgtagaagagcttctgcaatacgtggagcttcaagatcctgttacgcgcacgcagcttcgcgcaatggctgctaaaacggtctgcccgccgcataaagtagagcttgaagccttgcttggcaagcaagcctacaaagaacaagtgctggcaaaacgtttaacaatgcttgaactgcttgaaaaatacccggcgtgtgaaatgagtttcagcgaatttatcgcccttctgccaagcatacgcccgcgctattactcgatttcttcatcacctcgtgtcgatgaaaaacaagcaagcatcacggtcagcgttgtctcaggaccggcgtggagcggatatggagaatataaaggaattgcgtcgaactatcttgccgagctgcaagaaggagatacgattacgtgctttatttccacaccgcagtcagagtttacgctgccaaaagaccctgaaacgccgcttatcatggtcggaccgggaacaggcgtcgcgccgtttagaggctttgtgcaggcgcgcaaacagctaaaagaacaaggacagtcacttggagaagcacatttatacttcggctgccgttcacctcatgaagactatctgtatcaagaagagcttgaaaacgcccaaagcgaaggcatcattacgcttcataccgctttttctcgcatgccgaatcagccgaaaacatacgttcagcacgtaatggaacaagacggcaagaaattgattgaacttcttgatcaaggagcgcacttctatatttgcggagacggaagccaaatggcacctgccgttgaagcaacgcttatgaaaagctatgctgacgttcaccaagtgagtgaagcagacgctcgcttatggctgcagcagctagaagaaaaaggccgatacgcaaaagacgtgtggctgggg

SEQ ID NO: 902 - protein, 1049 aa, synthetic construct
  REGION 1..1049: note = variant of P450 oxidase from Bacillus megaterium
MTIKEMPQPKTFGELKNLPLLNTDKPVQALMRIADELGEIFKFEAPGSVTRYLSSQRLIKEACDESRFDKNLSQALKFARDFVGDGLVTSWTHEPNWKKAHNILVPSFSQHAMHRYHAMMVDIAVQLVQKWERLNADEHIEVSEDMTRLTLDTIGLCLFNYRFNSFYRDTPHPFIVSVVRALDEVMNKLQRANPDDPAYDENKRQCQEDIKVMNDYVDKIIADRKARGEQSHDLLTQMLNGKDPETGEPLDDGNIRQQIITFLIAGHQTTSGLLSFALYFLVKNPRVLQKVAEEAARVLVDPVPSYKQVKQLKYVGMVLNEALRLWPVAPMFSLYAKEDTVLGGEYPLTKGDEVMVLVPQLHRDKTIWGDDVEEFRPERFENPSAIPQHAFKPFGNGQRACIGQQFALHSATLVLGMMLKHFDFEDHTNYELVIKESRTLKPEGFVVKAKSKGIPLGGIPSPSTEQSAKKVRKKAENAHNTPLLVLYGSNAGTAEGTARDLADIAMSKGFAPQVATLDSHAGNLPREGAVLIVTASYNGHPPDNAKQFVDWLDQASADEVKGVRYSVFGCGDKNWAGTYQKVPAFIDETLAAKGAENIADRGEADASDDFEGTYEEWRDHMWSDVAAYFGLDIENSEDNKSTLSLQFVDSAADMPLAKMHGAFSTNVVASKELQQPGSARSTRHLEIELPKEASYQEGDHLGVIPRYYEGIVNRVTARFGLSASQLIRLEAEEEKLAHLPLAKTVSVEELLQYVELQDPVTRTQLRAMAAKTVCPPHKVELEALLGKQAYKEQVLAKRLTMLELLEKYPACEMSFSEFIALLPSIRPRYYSISSSPRVDEKQASITVSVVSGPAWSGYGEYKGIASNYLAELQEGDTITCFISTPQSEFTLPKDPETPLIMVGPGTGVAPFRGFVQARKQLKEQGQSLGEAHLYFGCRSPHEDYLYQEELENAQSEGIITLHTAFSRMPNQPKTYVQHVMEQDGKKLIELLDQGAHFYICGDGSQMAPAVEATLMKSYADVHQVSEADARLWLQQLEEKGRYAKDVWLG

SEQ ID NO: 903 - DNA, 3147 bp, synthetic construct
  misc_feature 1..3147: note = variant of P450 oxidase from Bacillus megaterium
  source 1..3147: mol_type = other DNA
atgacaattaaggaaatgcctcagcctaagacgtttggagaacttaaaaatttaccgttattaaacacagataaaccggttcaagctttgatgcgtattgcggatgaattaggagaaatctttaaattcgaggcgcctggtagcgtaacgcgctatttatcaagtcagcgtctaattaaagaagcatgcgatgaatcacgctttgataaaaacttaagtcaagcgcttaaatttgcacgtgattttgttggagacgggctggttacaagctggacgcatgaaccgaattggaaaaaagcgcataatatcttagttccaagctttagttttcatgcaatggggcgttatcatgcgatgatggtcgatatcgccgtgcagcttgttcaaaagtgggagcgtctaaatgcagatgagcatattgaagtatcggaagacatgacacgtttaacgcttgatacaattggtctttgcctgtttaactatcgctttaacagcttttaccgagatacgcctcatccatttattgtgagtgtggttcgtgcactggatgaagtaatgaacaagctgcagcgagcaaatccagacgacccagcttatgatgaaaacaagcgccagtgtcaagaagatatcaaggtgatgaacgactatgtagataaaattattgcagatcgcaaagcaaggggtgaacaaagtcatgatttattaacgcagatgctaaacggaaaagatccagaaacgggtgagccgcttgatgacgggaacattcgtcagcaaattattacattcttaattgcgggacaccaaacgacaagtggtcttttatcatttgcgctgtatttcttagtgaaaaatccacgtgtattacaaaaagtagcagaagaagcagcacgagttctagtagatcctgttccaagctacaaacaagtcaaacagcttaaatatgttggcatggtcttaaacgaagcgctgcgcttatggccagtagcgcctatgttttccctatatgcaaaagaagatacggtgcttggaggagaatatcctttaacgaaaggcgacgaagtaatggttctggtgcctcagcttcaccgtgataaaacaatttggggagacgatgtggaggagttccgtccagagcgttttgaaaatccaagtgcgattccgcagcatgcgtttaaaccgtttggaaacggtcagcgtgcgtgtatcggtcagcagttcgctcttcatagtgcaacgctggtacttggtatgatgctaaaacactttgactttgaagatcatacaaactacgagctcgttattaaagaatcgcggacgttaaaacctgaaggctttgtggtaaaagcaaaatcgaaaggcattccgcttggcggtattccttcacctagcactgaacagtctgctaaaaaagtacgcaaaaaggcagaaaacgctcataatacgccgctgcttgtgctatacggttcaaatgcgggaacagctgaaggaacggcgcgtgatttagcagatattgcaatgagcaaaggatttgcaccgcaggtcgcaacgcttgattcacacgccggtaatcttccgcgcgaaggagctgtattaattgtaacggcgtcttataacggtcatccgcctgataacgcaaagcaatttgtcgactggttagaccaagcgtctgcggatgaagtaaaaggcgttcgctactccgtatttggatgcggcgataaaaattgggcggggacgtatcaaaaagtgcctgcttttatcgatgaaacgcttgccgctaaaggggcagaaaacatcgctgaccgcggtgaagcagatgcaagcgacgactttgaaggcacatatgaagaatggcgtgatcatatgtggagtgacgtagcagcctactttggtctcgacattgaaaacagtgaagataataaatctactctttcacttcaatttgtcgacagcgcggcggatatgccgcttgcgaaaatgcacggtgcgttttcaacgaacgtcgtagcaagcaaagaacttcaacagcctggcagtgcacgaagcacgcgacatcttgaaattgaacttccaaaagaagcttcttatcaagaaggagatcatttaggtgttattcctcgctattatgaaggaatagtaaaccgtgtaacagcaaggttcggcctaagcgcatcacagctgatccgtctggaagcagaagaagaaaaattagctcatttgccactcgctaaaacagtatccgtagaagagcttctgcaatacgtggagcttcaagatcctgttacgcgcacgcagcttcgcgcaatggctgctaaaacggtctgcccgccgcataaagtagagcttgaagccttgcttggcaagcaagcctacaaagaacaagtgctggcaaaacgtttaacaatgcttgaactgcttgaaaaatacccggcgtgtgaaatgagtttcagcgaatttatcgcccttctgccaagcatacgcccgcgctattactcgatttcttcatcacctcgtgtcgatgaaaaacaagcaagcatcacggtcagcgttgtctcaggaccggcgtggagcggatatggagaatataaaggaattgcgtcgaactatcttgccgagctgcaagaaggagatacgattacgtgctttatttccacaccgcagtcagagtttacgctgccaaaagaccctgaaacgccgcttatcatggtcggaccgggaacaggcgtcgcgccgtttagaggctttgtgcaggcgcgcaaacagctaaaagaacaaggacagtcacttggagaagcacatttatacttcggctgccgttcacctcatgaagactatctgtatcaagaagagcttgaaaacgcccaaagcgaaggcatcattacgcttcataccgctttttctcgcatgccgaatcagccgaaaacatacgttcagcacgtaatggaacaagacggcaagaaattgattgaacttcttgatcaaggagcgcacttctatatttgcggagacggaagccaaatggcacctgccgttgaagcaacgcttatgaaaagctatgctgacgttcaccaagtgagtgaagcagacgctcgcttatggctgcagcagctagaagaaaaaggccgatacgcaaaagacgtgtggctgggg

SEQ ID NO: 904 - protein, 1049 aa, synthetic construct
  REGION 1..1049: note = variant of P450 oxidase from Bacillus megaterium
MTIKEMPQPKTFGELKNLPLLNTDKPVQALMRIADELGEIFKFEAPGSVTRYLSSQRLIKEACDESRFDKNLSQALKFARDFVGDGLVTSWTHEPNWKKAHNILVPSFSFHAMGRYHAMMVDIAVQLVQKWERLNADEHIEVSEDMTRLTLDTIGLCLFNYRFNSFYRDTPHPFIVSVVRALDEVMNKLQRANPDDPAYDENKRQCQEDIKVMNDYVDKIIADRKARGEQSHDLLTQMLNGKDPETGEPLDDGNIRQQIITFLIAGHQTTSGLLSFALYFLVKNPRVLQKVAEEAARVLVDPVPSYKQVKQLKYVGMVLNEALRLWPVAPMFSLYAKEDTVLGGEYPLTKGDEVMVLVPQLHRDKTIWGDDVEEFRPERFENPSAIPQHAFKPFGNGQRACIGQQFALHSATLVLGMMLKHFDFEDHTNYELVIKESRTLKPEGFVVKAKSKGIPLGGIPSPSTEQSAKKVRKKAENAHNTPLLVLYGSNAGTAEGTARDLADIAMSKGFAPQVATLDSHAGNLPREGAVLIVTASYNGHPPDNAKQFVDWLDQASADEVKGVRYSVFGCGDKNWAGTYQKVPAFIDETLAAKGAENIADRGEADASDDFEGTYEEWRDHMWSDVAAYFGLDIENSEDNKSTLSLQFVDSAADMPLAKMHGAFSTNVVASKELQQPGSARSTRHLEIELPKEASYQEGDHLGVIPRYYEGIVNRVTARFGLSASQLIRLEAEEEKLAHLPLAKTVSVEELLQYVELQDPVTRTQLRAMAAKTVCPPHKVELEALLGKQAYKEQVLAKRLTMLELLEKYPACEMSFSEFIALLPSIRPRYYSISSSPRVDEKQASITVSVVSGPAWSGYGEYKGIASNYLAELQEGDTITCFISTPQSEFTLPKDPETPLIMVGPGTGVAPFRGFVQARKQLKEQGQSLGEAHLYFGCRSPHEDYLYQEELENAQSEGIITLHTAFSRMPNQPKTYVQHVMEQDGKKLIELLDQGAHFYICGDGSQMAPAVEATLMKSYADVHQVSEADARLWLQQLEEKGRYAKDVWLG

SEQ ID NO: 905 - DNA, 3147 bp, synthetic construct
  misc_feature 1..3147: note = variant of P450 oxidase from Bacillus megaterium
  source 1..3147: mol_type = other DNA
atgacaattaaggaaatgcctcagcctaagacgtttggagaacttaaaaatttaccgttattaaacacagataaaccggttcaagctttgatgcgtattgcggatgaattaggagaaatctttaaattcgaggcgcctggtagcgtaacgcgctatttatcaagtcagcgtctaattaaagaagcatgcgatgaatcacgctttgataaaaacttaagtcaagcgcttaaatttgcacgtgattttgttggagacgggctggttacaagctggacgcatgaaccgaattggaaaaaagcgcataatatcttagttccaagctttagtcagcatgcaatggggcgttatcatgcgatgatggtcgatatcgccgtgcagcttgttcaaaagtgggagcgtctaaatgcagatgagcatattgaagtatcggaagacatgacacgtttaacgcttgatacaattggtctttgcctgtttaactatcgctttaacagcttttaccgagatacgcctcatccatttattgtgagtgtggttcgtgcactggatgaagtaatgaacaagctgcagcgagcaaatccagacgacccagcttatgatgaaaacaagcgccagtgtcaagaagatatcaaggtgatgaacgactatgtagataaaattattgcagatcgcaaagcaaggggtgaacaaagtcatgatttattaacgcagatgctaaacggaaaagatccagaaacgggtgagccgcttgatgacgggaacattcgtcagcaaattattacattcttaattgcgggacaccaaacgacaagtggtcttttatcatttgcgctgtatttcttagtgaaaaatccacgtgtattacaaaaagtagcagaagaagcagcacgagttctagtagatcctgttccaagctacaaacaagtcaaacagcttaaatatgttggcatggtcttaaacgaagcgctgcgcttatggccagtagcgcctatgttttccctatatgcaaaagaagatacggtgcttggaggagaatataagttaacgaaaggcgacgaagtaatggttctggtgcctcagcttcaccgtgataaaacaatttggggagacgatgtggaggagttccgtccagagcgttttgaaaatccaagtgcgattccgcagcatgcgtttaaaccgtttggaaacggtcagcgtgcgtgtatcggtcagcagttcgctcttcatagtgcaacgctggtacttggtatgatgctaaaacactttgactttgaagatcatacaaactacgagctcgttattaaagaatcgcggacgttaaaacctgaaggctttgtggtaaaagcaaaatcgaaaggcattccgcttggcggtattccttcacctagcactgaacagtctgctaaaaaagtacgcaaaaaggcagaaaacgctcataatacgccgctgcttgtgctatacggttcaaatgcgggaacagctgaaggaacggcgcgtgatttagcagatattgcaatgagcaaaggatttgcaccgcaggtcgcaacgcttgattcacacgccggtaatcttccgcgcgaaggagctgtattaattgtaacggcgtcttataacggtcatccgcctgataacgcaaagcaatttgtcgactggttagaccaagcgtctgcggatgaagtaaaaggcgttcgctactccgtatttggatgcggcgataaaaattgggcggggacgtatcaaaaagtgcctgcttttatcgatgaaacgcttgccgctaaaggggcagaaaacatcgctgaccgcggtgaagcagatgcaagcgacgactttgaaggcacatatgaagaatggcgtgatcatatgtggagtgacgtagcagcctactttggtctcgacattgaaaacagtgaagataataaatctactctttcacttcaatttgtcgacagcgcggcggatatgccgcttgcgaaaatgcacggtgcgttttcaacgaacgtcgtagcaagcaaagaacttcaacagcctggcagtgcacgaagcacgcgacatcttgaaattgaacttccaaaagaagcttcttatcaagaaggagatcatttaggtgttattcctcgctattatgaaggaatagtaaaccgtgtaacagcaaggttcggcctaagcgcatcacagctgatccgtctggaagcagaagaagaaaaattagctcatttgccactcgctaaaacagtatccgtagaagagcttctgcaatacgtggagcttcaagatcctgttacgcgcacgcagcttcgcgcaatggctgctaaaacggtctgcccgccgcataaagtagagcttgaagccttgcttggcaagcaagcctacaaagaacaagtgctggcaaaacgtttaacaatgcttgaactgcttgaaaaatacccggcgtgtgaaatgagtttcagcgaatttatcgcccttctgccaagcatacgcccgcgctattactcgatttcttcatcacctcgtgtcgatgaaaaacaagcaagcatcacggtcagcgttgtctcaggaccggcgtggagcggatatggagaatataaaggaattgcgtcgaactatcttgccgagctgcaagaaggagatacgattacgtgctttatttccacaccgcagtcagagtttacgctgccaaaagaccctgaaacgccgcttatcatggtcggaccgggaacaggcgtcgcgccgtttagaggctttgtgcaggcgcgcaaacagctaaaagaacaaggacagtcacttggagaagcacatttatacttcggctgccgttcacctcatgaagactatctgtatcaagaagagcttgaaaacgcccaaagcgaaggcatcattacgcttcataccgctttttctcgcatgccgaatcagccgaaaacatacgttcagcacgtaatggaacaagacggcaagaaattgattgaacttcttgatcaaggagcgcacttctatatttgcggagacggaagccaaatggcacctgccgttgaagcaacgcttatgaaaagctatgctgacgttcaccaagtgagtgaagcagacgctcgcttatggctgcagcagctagaagaaaaaggccgatacgcaaaagacgtgtggctgggg

SEQ ID NO: 906 - protein, 1049 aa, synthetic construct
  REGION 1..1049: note = variant of P450 oxidase from Bacillus megaterium
MTIKEMPQPKTFGELKNLPLLNTDKPVQALMRIADELGEIFKFEAPGSVTRYLSSQRLIKEACDESRFDKNLSQALKFARDFVGDGLVTSWTHEPNWKKAHNILVPSFSQHAMGRYHAMMVDIAVQLVQKWERLNADEHIEVSEDMTRLTLDTIGLCLFNYRFNSFYRDTPHPFIVSVVRALDEVMNKLQRANPDDPAYDENKRQCQEDIKVMNDYVDKIIADRKARGEQSHDLLTQMLNGKDPETGEPLDDGNIRQQIITFLIAGHQTTSGLLSFALYFLVKNPRVLQKVAEEAARVLVDPVPSYKQVKQLKYVGMVLNEALRLWPVAPMFSLYAKEDTVLGGEYKLTKGDEVMVLVPQLHRDKTIWGDDVEEFRPERFENPSAIPQHAFKPFGNGQRACIGQQFALHSATLVLGMMLKHFDFEDHTNYELVIKESRTLKPEGFVVKAKSKGIPLGGIPSPSTEQSAKKVRKKAENAHNTPLLVLYGSNAGTAEGTARDLADIAMSKGFAPQVATLDSHAGNLPREGAVLIVTASYNGHPPDNAKQFVDWLDQASADEVKGVRYSVFGCGDKNWAGTYQKVPAFIDETLAAKGAENIADRGEADASDDFEGTYEEWRDHMWSDVAAYFGLDIENSEDNKSTLSLQFVDSAADMPLAKMHGAFSTNVVASKELQQPGSARSTRHLEIELPKEASYQEGDHLGVIPRYYEGIVNRVTARFGLSASQLIRLEAEEEKLAHLPLAKTVSVEELLQYVELQDPVTRTQLRAMAAKTVCPPHKVELEALLGKQAYKEQVLAKRLTMLELLEKYPACEMSFSEFIALLPSIRPRYYSISSSPRVDEKQASITVSVVSGPAWSGYGEYKGIASNYLAELQEGDTITCFISTPQSEFTLPKDPETPLIMVGPGTGVAPFRGFVQARKQLKEQGQSLGEAHLYFGCRSPHEDYLYQEELENAQSEGIITLHTAFSRMPNQPKTYVQHVMEQDGKKLIELLDQGAHFYICGDGSQMAPAVEATLMKSYADVHQVSEADARLWLQQLEEKGRYAKDVWLG

SEQ ID NO: 907 - DNA, 3147 bp, synthetic construct
  misc_feature 1..3147: note = variant of P450 oxidase from Bacillus megaterium
  source 1..3147: mol_type = other DNA
atgacaattaaggaaatgcctcagcctaagacgtttggagaacttaaaaatttaccgttattaaacacagataaaccggttcaagctttgatgcgtattgcggatgaattaggagaaatctttaaattcgaggcgcctggtagcgtaacgcgctatttatcaagtcagcgtctaattaaagaagcatgcgatgaatcacgctttgataaaaacttaagtcaagcgcttaaatttgcacgtgattttgttggagacgggctggttacaagctggacgcatgaaccgaattggaaaaaagcgcataatatcttagttccaagctttagtcagcatgcaatggggcgttatcatgcgatgatggtcgatatcgccgtgcagcttgttcaaaagtgggagcgtctaaatgcagatgagcatattgaagtatcggaagacatgacacgtttaacgcttgatacaattggtctttgcctgtttaactatcgctttaacagcttttaccgagatacgcctcatccatttattgtgagtgtggttcgtgcactggatgaagtaatgaacaagctgcagcgagcaaatccagacgacccagcttatgatgaaaacaagcgccagtgtcaagaagatatcaaggtgatgaacgactatgtagataaaattattgcagatcgcaaaaataggggtgaacaaagtcatgatttattaacgcagatgctaaacggaaaagatccagaaacgggtgagccgcttgatgacgggaacattcgtcagcaaattattacattcttaattgcgggacaccaaacgacaagtggtcttttatcatttgcgctgtatttcttagtgaaaaatccacgtgtattacaaaaagtagcagaagaagcagcacgagttctagtagatcctgttccaagctacaaacaagtcaaacagcttaaatatgttggcatggtcttaaacgaagcgctgcgcttatggccagtagcgcctatgttttccctatatgcaaaagaagatacggtgcttggaggagaatatcctttaacgaaaggcgacgaagtaatggttctggtgcctcagcttcaccgtgataaaacaatttggggagacgatgtggaggagttccgtccagagcgttttgaaaatccaagtgcgattccgcagcatgcgtttaaaccgtttggaaacggtcagcgtgcgtgtatcggtcagcagttcgctcttcatagtgcaacgctggtacttggtatgatgctaaaacactttgactttgaagatcatacaaactacgagctcgttattaaagaatcgcggacgttaaaacctgaaggctttgtggtaaaagcaaaatcgaaaggcattccgcttggcggtattccttcacctagcactgaacagtctgctaaaaaagtacgcaaaaaggcagaaaacgctcataatacgccgctgcttgtgctatacggttcaaatgcgggaacagctgaaggaacggcgcgtgatttagcagatattgcaatgagcaaaggatttgcaccgcaggtcgcaacgcttgattcacacgccggtaatcttccgcgcgaaggagctgtattaattgtaacggcgtcttataacggtcatccgcctgataacgcaaagcaatttgtcgactggttagaccaagcgtctgcggatgaagtaaaaggcgttcgctactccgtatttggatgcggcgataaaaattgggcggggacgtatcaaaaagtgcctgcttttatcgatgaaacgcttgccgctaaaggggcagaaaacatcgctgaccgcggtgaagcagatgcaagcgacgactttgaaggcacatatgaagaatggcgtgatcatatgtggagtgacgtagcagcctactttggtctcgacattgaaaacagtgaagataataaatctactctttcacttcaatttgtcgacagcgcggcggatatgccgcttgcgaaaatgcacggtgcgttttcaacgaacgtcgtagcaagcaaagaacttcaacagcctggcagtgcacgaagcacgcgacatcttgaaattgaacttccaaaagaagcttcttatcaagaaggagatcatttaggtgttattcctcgctattatgaaggaatagtaaaccgtgtaacagcaaggttcggcctaagcgcatcacagctgatccgtctggaagcagaagaagaaaaattagctcatttgccactcgctaaaacagtatccgtagaagagcttctgcaatacgtggagcttcaagatcctgttacgcgcacgcagcttcgcgcaatggctgctaaaacggtctgcccgccgcataaagtagagcttgaagccttgcttggcaagcaagcctacaaagaacaagtgctggcaaaacgtttaacaatgcttgaactgcttgaaaaatacccggcgtgtgaaatgagtttcagcgaatttatcgcccttctgccaagcatacgcccgcgctattactcgatttcttcatcacctcgtgtcgatgaaaaacaagcaagcatcacggtcagcgttgtctcaggaccggcgtggagcggatatggagaatataaaggaattgcgtcgaactatcttgccgagctgcaagaaggagatacgattacgtgctttatttccacaccgcagtcagagtttacgctgccaaaagaccctgaaacgccgcttatcatggtcggaccgggaacaggcgtcgcgccgtttagaggctttgtgcaggcgcgcaaacagctaaaagaacaaggacagtcacttggagaagcacatttatacttcggctgccgttcacctcatgaagactatctgtatcaagaagagcttgaaaacgcccaaagcgaaggcatcattacgcttcataccgctttttctcgcatgccgaatcagccgaaaacatacgttcagcacgtaatggaacaagacggcaagaaattgattgaacttcttgatcaaggagcgcacttctatatttgcggagacggaagccaaatggcacctgccgttgaagcaacgcttatgaaaagctatgctgacgttcaccaagtgagtgaagcagacgctcgcttatggctgcagcagctagaagaaaaaggccgatacgcaaaagacgtgtggctgggg

SEQ ID NO: 908 - protein, 1049 aa, synthetic construct
  REGION 1..1049: note = variant of P450 oxidase from Bacillus megaterium
MTIKEMPQPKTFGELKNLPLLNTDKPVQALMRIADELGEIFKFEAPGSVTRYLSSQRLIKEACDESRFDKNLSQALKFARDFVGDGLVTSWTHEPNWKKAHNILVPSFSQHAMGRYHAMMVDIAVQLVQKWERLNADEHIEVSEDMTRLTLDTIGLCLFNYRFNSFYRDTPHPFIVSVVRALDEVMNKLQRANPDDPAYDENKRQCQEDIKVMNDYVDKIIADRKNRGEQSHDLLTQMLNGKDPETGEPLDDGNIRQQIITFLIAGHQTTSGLLSFALYFLVKNPRVLQKVAEEAARVLVDPVPSYKQVKQLKYVGMVLNEALRLWPVAPMFSLYAKEDTVLGGEYPLTKGDEVMVLVPQLHRDKTIWGDDVEEFRPERFENPSAIPQHAFKPFGNGQRACIGQQFALHSATLVLGMMLKHFDFEDHTNYELVIKESRTLKPEGFVVKAKSKGIPLGGIPSPSTEQSAKKVRKKAENAHNTPLLVLYGSNAGTAEGTARDLADIAMSKGFAPQVATLDSHAGNLPREGAVLIVTASYNGHPPDNAKQFVDWLDQASADEVKGVRYSVFGCGDKNWAGTYQKVPAFIDETLAAKGAENIADRGEADASDDFEGTYEEWRDHMWSDVAAYFGLDIENSEDNKSTLSLQFVDSAADMPLAKMHGAFSTNVVASKELQQPGSARSTRHLEIELPKEASYQEGDHLGVIPRYYEGIVNRVTARFGLSASQLIRLEAEEEKLAHLPLAKTVSVEELLQYVELQDPVTRTQLRAMAAKTVCPPHKVELEALLGKQAYKEQVLAKRLTMLELLEKYPACEMSFSEFIALLPSIRPRYYSISSSPRVDEKQASITVSVVSGPAWSGYGEYKGIASNYLAELQEGDTITCFISTPQSEFTLPKDPETPLIMVGPGTGVAPFRGFVQARKQLKEQGQSLGEAHLYFGCRSPHEDYLYQEELENAQSEGIITLHTAFSRMPNQPKTYVQHVMEQDGKKLIELLDQGAHFYICGDGSQMAPAVEATLMKSYADVHQVSEADARLWLQQLEEKGRYAKDVWLG

SEQ ID NO: 909 - DNA, 3147 bp, synthetic construct
  misc_feature 1..3147: note = variant of P450 oxidase from Bacillus megaterium
  source 1..3147: mol_type = other DNA
atgacaattaaggaaatgcctcagcctaagacgtttggagaacttaaaaatttaccgttattaaacacagataaaccggttcaagctttgatgcgtattgcggatgaattaggagaaatctttaaattcgaggcgcctggtagcgtaacgcgctatttatcaagtcagcgtctaattaaagaagcatgcgatgaatcacgctttgataaaaacttaagtcaagcgcttaaatttgcacgtgattttgttggagacgggctggttacaagctggacgcatgaaccgaattggaaaaaagcgcataatatcttagttccaagctttagtcagcatgcaatggggcgttatcatgcgatgatggtcgatatcgccgtgcagcttgttcaaaagtgggagcgtctaaatgcagatgagcatattgaagtatcggaagacatgacacgtttaacgcttgatacaattggtctttgcctgtttaactatcgctttaacagcttttaccgagatacgcctcatccatttattgtgagtgtggttcgtgcactggatgaagtaatgaacaagctgcagcgagcaaatccagacgacccagcttatgatgaaaacaagcgccagtgtcaagaagatatcaaggtgatgaacgactatgtagataaaattattgcagatcgcaaagcaaggggtgaacaaagtcatgatttattaacgcagatgctaaacggaaaagatccagaaacgggtgagccgcttgatgacgggttgattcgtcagcaaattattacattcttaattgcgggacaccaaacgacaagtggtcttttatcatttgcgctgtatttcttagtgaaaaatccacgtgtattacaaaaagtagcagaagaagcagcacgagttctagtagatcctgttccaagctacaaacaagtcaaacagcttaaatatgttggcatggtcttaaacgaagcgctgcgcttatggccagtagcgcctatgttttccctatatgcaaaagaagatacggtgcttggaggagaatatcctttaacgaaaggcgacgaagtaatggttctggtgcctcagcttcaccgtgataaaacaatttggggagacgatgtggaggagttccgtccagagcgttttgaaaatccaagtgcgattccgcagcatgcgtttaaaccgtttggaaacggtcagcgtgcgtgtatcggtcagcagttcgctcttcatagtgcaacgctggtacttggtatgatgctaaaacactttgactttgaagatcatacaaactacgagctcgttattaaagaatcgcggacgttaaaacctgaaggctttgtggtaaaagcaaaatcgaaaggcattccgcttggcggtattccttcacctagcactgaacagtctgctaaaaaagtacgcaaaaaggcagaaaacgctcataatacgccgctgcttgtgctatacggttcaaatgcgggaacagctgaaggaacggcgcgtgatttagcagatattgcaatgagcaaaggatttgcaccgcaggtcgcaacgcttgattcacacgccggtaatcttccgcgcgaaggagctgtattaattgtaacggcgtcttataacggtcatccgcctgataacgcaaagcaatttgtcgactggttagaccaagcgtctgcggatgaagtaaaaggcgttcgctactccgtatttggatgcggcgataaaaattgggcggggacgtatcaaaaagtgcctgcttttatcgatgaaacgcttgccgctaaaggggcagaaaacatcgctgaccgcggtgaagcagatgcaagcgacgactttgaaggcacatatgaagaatggcgtgatcatatgtggagtgacgtagcagcctactttggtctcgacattgaaaacagtgaagataataaatctactctttcacttcaatttgtcgacagcgcggcggatatgccgcttgcgaaaatgcacggtgcgttttcaacgaacgtcgtagcaagcaaagaacttcaacagcctggcagtgcacgaagcacgcgacatcttgaaattgaacttccaaaagaagcttcttatcaagaaggagatcatttaggtgttattcctcgctattatgaaggaatagtaaaccgtgtaacagcaaggttcggcctaagcgcatcacagctgatccgtctggaagcagaagaagaaaaattagctcatttgccactcgctaaaacagtatccgtagaagagcttctgcaatacgtggagcttcaagatcctgttacgcgcacgcagcttcgcgcaatggctgctaaaacggtctgcccgccgcataaagtagagcttgaagccttgcttggcaagcaagcctacaaagaacaagtgctggcaaaacgtttaacaatgcttgaactgcttgaaaaatacccggcgtgtgaaatgagtttcagcgaatttatcgcccttctgccaagcatacgcccgcgctattactcgatttcttcatcacctcgtgtcgatgaaaaacaagcaagcatcacggtcagcgttgtctcaggaccggcgtggagcggatatggagaatataaaggaattgcgtcgaactatcttgccgagctgcaagaaggagatacgattacgtgctttatttccacaccgcagtcagagtttacgctgccaaaagaccctgaaacgccgcttatcatggtcggaccgggaacaggcgtcgcgccgtttagaggctttgtgcaggcgcgcaaacagctaaaagaacaaggacagtcacttggagaagcacatttatacttcggctgccgttcacctcatgaagactatctgtatcaagaagagcttgaaaacgcccaaagcgaaggcatcattacgcttcataccgctttttctcgcatgccgaatcagccgaaaacatacgttcagcacgtaatggaacaagacggcaagaaattgattgaacttcttgatcaaggagcgcacttctatatttgcggagacggaagccaaatggcacctgccgttgaagcaacgcttatgaaaagctatgctgacgttcaccaagtgagtgaagcagacgctcgcttatggctgcagcagctagaagaaaaaggccgatacgcaaaagacgtgtggctgggg

SEQ ID NO: 910 - protein, 1049 aa, synthetic construct
  REGION 1..1049: note = variant of P450 oxidase from Bacillus megaterium
MTIKEMPQPKTFGELKNLPLLNTDKPVQALMRIADELGEIFKFEAPGSVTRYLSSQRLIKEACDESRFDKNLSQALKFARDFVGDGLVTSWTHEPNWKKAHNILVPSFSQHAMGRYHAMMVDIAVQLVQKWERLNADEHIEVSEDMTRLTLDTIGLCLFNYRFNSFYRDTPHPFIVSVVRALDEVMNKLQRANPDDPAYDENKRQCQEDIKVMNDYVDKIIADRKARGEQSHDLLTQMLNGKDPETGEPLDDGLIRQQIITFLIAGHQTTSGLLSFALYFLVKNPRVLQKVAEEAARVLVDPVPSYKQVKQLKYVGMVLNEALRLWPVAPMFSLYAKEDTVLGGEYPLTKGDEVMVLVPQLHRDKTIWGDDVEEFRPERFENPSAIPQHAFKPFGNGQRACIGQQFALHSATLVLGMMLKHFDFEDHTNYELVIKESRTLKPEGFVVKAKSKGIPLGGIPSPSTEQSAKKVRKKAENAHNTPLLVLYGSNAGTAEGTARDLADIAMSKGFAPQVATLDSHAGNLPREGAVLIVTASYNGHPPDNAKQFVDWLDQASADEVKGVRYSVFGCGDKNWAGTYQKVPAFIDETLAAKGAENIADRGEADASDDFEGTYEEWRDHMWSDVAAYFGLDIENSEDNKSTLSLQFVDSAADMPLAKMHGAFSTNVVASKELQQPGSARSTRHLEIELPKEASYQEGDHLGVIPRYYEGIVNRVTARFGLSASQLIRLEAEEEKLAHLPLAKTVSVEELLQYVELQDPVTRTQLRAMAAKTVCPPHKVELEALLGKQAYKEQVLAKRLTMLELLEKYPACEMSFSEFIALLPSIRPRYYSISSSPRVDEKQASITVSVVSGPAWSGYGEYKGIASNYLAELQEGDTITCFISTPQSEFTLPKDPETPLIMVGPGTGVAPFRGFVQARKQLKEQGQSLGEAHLYFGCRSPHEDYLYQEELENAQSEGIITLHTAFSRMPNQPKTYVQHVMEQDGKKLIELLDQGAHFYICGDGSQMAPAVEATLMKSYADVHQVSEADARLWLQQLEEKGRYAKDVWLG

SEQ ID NO: 911 - DNA, 3147 bp, synthetic construct
  misc_feature 1..3147: note = variant of P450 oxidase from Bacillus megaterium
  source 1..3147: mol_type = other DNA
atgacaattaaggaaatgcctcagcctaagacgtttggagaacttaaaaatttaccgttattaaacacagataaaccggttcaagctttgatgcgtattgcggatgaattaggagaaatctttaaattcgaggcgcctggtagcgtaacgcgctatttatcaagtcagcgtctaattaaagaagcatgcgatgaatcacgctttgataaaaacttaagtcaagcgcttaaatttgcacgtgattttgttggagacgggctggttacaagctggacgcatgaaccgaattggaaaaaagcgcataatatcttagttccaagctttagtcagcatgcaatggggcgttatcatgcgatgatggtcgatatcgccgtgcagcttgttcaaaagtgggagcgtctaaatgcagatgagcatattgaagtatcggaagacatgacacgtttaacgcttgatacaattggtctttgcctgtttaactatcgctttaacagcttttaccgagatacgcctcatccatttattgtgagtgtggttcgtgcactggatgaagtaatgaacaagctgcagcgagcaaatccagacgacccagcttatgatgaaaacaagcgccagtgtcaagaagatatcaaggtgatgaacgactatgtagataaaattattgcagatcgcaaagcaaggggtgaacaaagtcatgatttattatcgcagatgctaaacggaaaagatccagaaacgggtgagccgcttgatgacgggaacattcgtcagcaaattattacattcttaattgcgggacaccaaacgacaagtggtcttttatcatttgcgctgtatttcttagtgaaaaatccacgtgtattacaaaaagtagcagaagaagcagcacgagttctagtagatcctgttccaagctacaaacaagtcaaacagcttaaatatgttggcatggtcttaaacgaagcgctgcgcttatggccagtagcgcctatgttttccctatatgcaaaagaagatacggtgcttggaggagaatatcctttaacgaaaggcgacgaagtaatggttctggtgcctcagcttcaccgtgataaaacaatttggggagacgatgtggaggagttccgtccagagcgttttgaaaatccaagtgcgattccgcagcatgcgtttaaaccgtttggaaacggtcagcgtgcgtgtatcggtcagcagttcgctcttcatagtgcaacgctggtacttggtatgatgctaaaacactttgactttgaagatcatacaaactacgagctcgttattaaagaatcgcggacgttaaaacctgaaggctttgtggtaaaagcaaaatcgaaaggcattccgcttggcggtattccttcacctagcactgaacagtctgctaaaaaagtacgcaaaaaggcagaaaacgctcataatacgccgctgcttgtgctatacggttcaaatgcgggaacagctgaaggaacggcgcgtgatttagcagatattgcaatgagcaaaggatttgcaccgcaggtcgcaacgcttgattcacacgccggtaatcttccgcgcgaaggagctgtattaattgtaacggcgtcttataacggtcatccgcctgataacgcaaagcaatttgtcgactggttagaccaagcgtctgcggatgaagtaaaaggcgttcgctactccgtatttggatgcggcgataaaaattgggcggggacgtatcaaaaagtgcctgcttttatcgatgaaacgcttgccgctaaaggggcagaaaacatcgctgaccgcggtgaagcagatgcaagcgacgactttgaaggcacatatgaagaatggcgtgatcatatgtggagtgacgtagcagcctactttggtctcgacattgaaaacagtgaagataataaatctactctttcacttcaatttgtcgacagcgcggcggatatgccgcttgcgaaaatgcacggtgcgttttcaacgaacgtcgtagcaagcaaagaacttcaacagcctggcagtgcacgaagcacgcgacatcttgaaattgaacttccaaaagaagcttcttatcaagaaggagatcatttaggtgttattcctcgctattatgaaggaatagtaaaccgtgtaacagcaaggttcggcctaagcgcatcacagctgatccgtctggaagcagaagaagaaaaattagctcatttgccactcgctaaaacagtatccgtagaagagcttctgcaatacgtggagcttcaagatcctgttacgcgcacgcagcttcgcgcaatggctgctaaaacggtctgcccgccgcataaagtagagcttgaagccttgcttggcaagcaagcctacaaagaacaagtgctggcaaaacgtttaacaatgcttgaactgcttgaaaaatacccggcgtgtgaaatgagtttcagcgaatttatcgcccttctgccaagcatacgcccgcgctattactcgatttcttcatcacctcgtgtcgatgaaaaacaagcaagcatcacggtcagcgttgtctcaggaccggcgtggagcggatatggagaatataaaggaattgcgtcgaactatcttgccgagctgcaagaaggagatacgattacgtgctttatttccacaccgcagtcagagtttacgctgccaaaagaccctgaaacgccgcttatcatggtcggaccgggaacaggcgtcgcgccgtttagaggctttgtgcaggcgcgcaaacagctaaaagaacaaggacagtcacttggagaagcacatttatacttcggctgccgttcacctcatgaagactatctgtatcaagaagagcttgaaaacgcccaaagcgaaggcatcattacgcttcataccgctttttctcgcatgccgaatcagccgaaaacatacgttcagcacgtaatggaacaagacggcaagaaattgattgaacttcttgatcaaggagcgcacttctatatttgcggagacggaagccaaatggcacctgccgttgaagcaacgcttatgaaaagctatgctgacgttcaccaagtgagtgaagcagacgctcgcttatggctgcagcagctagaagaaaaaggccgatacgcaaaagacgtgtggctgggg

SEQ ID NO: 912 - protein, 1049 aa, synthetic construct
  REGION 1..1049: note = variant of P450 oxidase from Bacillus megaterium
MTIKEMPQPKTFGELKNLPLLNTDKPVQALMRIADELGEIFKFEAPGSVTRYLSSQRLIKEACDESRFDKNLSQALKFARDFVGDGLVTSWTHEPNWKKAHNILVPSFSQHAMGRYHAMMVDIAVQLVQKWERLNADEHIEVSEDMTRLTLDTIGLCLFNYRFNSFYRDTPHPFIVSVVRALDEVMNKLQRANPDDPAYDENKRQCQEDIKVMNDYVDKIIADRKARGEQSHDLLSQMLNGKDPETGEPLDDGNIRQQIITFLIAGHQTTSGLLSFALYFLVKNPRVLQKVAEEAARVLVDPVPSYKQVKQLKYVGMVLNEALRLWPVAPMFSLYAKEDTVLGGEYPLTKGDEVMVLVPQLHRDKTIWGDDVEEFRPERFENPSAIPQHAFKPFGNGQRACIGQQFALHSATLVLGMMLKHFDFEDHTNYELVIKESRTLKPEGFVVKAKSKGIPLGGIPSPSTEQSAKKVRKKAENAHNTPLLVLYGSNAGTAEGTARDLADIAMSKGFAPQVATLDSHAGNLPREGAVLIVTASYNGHPPDNAKQFVDWLDQASADEVKGVRYSVFGCGDKNWAGTYQKVPAFIDETLAAKGAENIADRGEADASDDFEGTYEEWRDHMWSDVAAYFGLDIENSEDNKSTLSLQFVDSAADMPLAKMHGAFSTNVVASKELQQPGSARSTRHLEIELPKEASYQEGDHLGVIPRYYEGIVNRVTARFGLSASQLIRLEAEEEKLAHLPLAKTVSVEELLQYVELQDPVTRTQLRAMAAKTVCPPHKVELEALLGKQAYKEQVLAKRLTMLELLEKYPACEMSFSEFIALLPSIRPRYYSISSSPRVDEKQASITVSVVSGPAWSGYGEYKGIASNYLAELQEGDTITCFISTPQSEFTLPKDPETPLIMVGPGTGVAPFRGFVQARKQLKEQGQSLGEAHLYFGCRSPHEDYLYQEELENAQSEGIITLHTAFSRMPNQPKTYVQHVMEQDGKKLIELLDQGAHFYICGDGSQMAPAVEATLMKSYADVHQVSEADARLWLQQLEEKGRYAKDVWLG

SEQ ID NO: 913 - DNA, 3147 bp, synthetic construct
  misc_feature 1..3147: note = variant of P450 oxidase from Bacillus megaterium
  source 1..3147: mol_type = other DNA
atgacaattaaggaaatgcctcagcctaagacgtttggagaacttaaaaatttaccgttattaaacacagataaaccggttcaagctttgatgcgtattgcggatgaattaggagaaatctttaaattcgaggcgcctggtagcgtaacgcgctatttatcaagtcagcgtctaattaaagaagcatgcgatgaatcacgctttgataaaaacttaagtcaagcgcttaaatttgcacgtgattttgttggagacgggctggttacaagctggacgcatgaaccgaattggaaaaaagcgcataatatcttagttccaagctttagtcagcatgcaatggggcgttatcatgcgatgatggtcgatatcgccgtgcagcttgttcaaaagtgggagcgtctaaatgcagatgagcatattgaagtatcggaagacatgacacgtttaacgcttgatacaattggtctttgcctgtttaactatcgctttaacagcttttaccgagatacgcctcatccatttattgtgagtgtggttcgtgcactggatgaagtaatgaacaagctgcagcgagcaaatccagacgacccagcttatgatgaaaacaagcgccagtgtcaagaagatatcaaggtgatgaacgactatgtagataaaattattgcagatcgcaaagcaaggggtgaacaaagtcatgatttattaacgcagatgctaaacggaaaagattatgaaacgggtgagccgcttgatgacgggaacattcgtcagcaaattattacattcttaattgcgggacaccaaacgacaagtggtcttttatcatttgcgctgtatttcttagtgaaaaatccacgtgtattacaaaaagtagcagaagaagcagcacgagttctagtagatcctgttccaagctacaaacaagtcaaacagcttaaatatgttggcatggtcttaaacgaagcgctgcgcttatggccagtagcgcctatgttttccctatatgcaaaagaagatacggtgcttggaggagaatatcctttaacgaaaggcgacgaagtaatggttctggtgcctcagcttcaccgtgataaaacaatttggggagacgatgtggaggagttccgtccagagcgttttgaaaatccaagtgcgattccgcagcatgcgtttaaaccgtttggaaacggtcagcgtgcgtgtatcggtcagcagttcgctcttcatagtgcaacgctggtacttggtatgatgctaaaacactttgactttgaagatcatacaaactacgagctcgttattaaagaatcgcggacgttaaaacctgaaggctttgtggtaaaagcaaaatcgaaaggcattccgcttggcggtattccttcacctagcactgaacagtctgctaaaaaagtacgcaaaaaggcagaaaacgctcataatacgccgctgcttgtgctatacggttcaaatgcgggaacagctgaaggaacggcgcgtgatttagcagatattgcaatgagcaaaggatttgcaccgcaggtcgcaacgcttgattcacacgccggtaatcttccgcgcgaaggagctgtattaattgtaacggcgtcttataacggtcatccgcctgataacgcaaagcaatttgtcgactggttagaccaagcgtctgcggatgaagtaaaaggcgttcgctactccgtatttggatgcggcgataaaaattgggcggggacgtatcaaaaagtgcctgcttttatcgatgaaacgcttgccgctaaaggggcagaaaacatcgctgaccgcggtgaagcagatgcaagcgacgactttgaaggcacatatgaagaatggcgtgatcatatgtggagtgacgtagcagcctactttggtctcgacattgaaaacagtgaagataataaatctactctttcacttcaatttgtcgacagcgcggcggatatgccgcttgcgaaaatgcacggtgcgttttcaacgaacgtcgtagcaagcaaagaacttcaacagcctggcagtgcacgaagcacgcgacatcttgaaattgaacttccaaaagaagcttcttatcaagaaggagatcatttaggtgttattcctcgctattatgaaggaatagtaaaccgtgtaacagcaaggttcggcctaagcgcatcacagctgatccgtctggaagcagaagaagaaaaattagctcatttgccactcgctaaaacagtatccgtagaagagcttctgcaatacgtggagcttcaagatcctgttacgcgcacgcagcttcgcgcaatggctgctaaaacggtctgcccgccgcataaagtagagcttgaagccttgcttggcaagcaagcctacaaagaacaagtgctggcaaaacgtttaacaatgcttgaactgcttgaaaaatacccggcgtgtgaaatgagtttcagcgaatttatcgcccttctgccaagcatacgcccgcgctattactcgatttcttcatcacctcgtgtcgatgaaaaacaagcaagcatcacggtcagcgttgtctcaggaccggcgtggagcggatatggagaatataaaggaattgcgtcgaactatcttgccgagctgcaagaaggagatacgattacgtgctttatttccacaccgcagtcagagtttacgctgccaaaagaccctgaaacgccgcttatcatggtcggaccgggaacaggcgtcgcgccgtttagaggctttgtgcaggcgcgcaaacagctaaaagaacaaggacagtcacttggagaagcacatttatacttcggctgccgttcacctcatgaagactatctgtatcaagaagagcttgaaaacgcccaaagcgaaggcatcattacgcttcataccgctttttctcgcatgccgaatcagccgaaaacatacgttcagcacgtaatggaacaagacggcaagaaattgattgaacttcttgatcaaggagcgcacttctatatttgcggagacggaagccaaatggcacctgccgttgaagcaacgcttatgaaaagctatgctgacgttcaccaagtgagtgaagcagacgctcgcttatggctgcagcagctagaagaaaaaggccgatacgcaaaagacgtgtggctgggg

SEQ ID NO: 914 - protein, 1049 aa, synthetic construct
  REGION 1..1049: note = variant of P450 oxidase from Bacillus megaterium
MTIKEMPQPKTFGELKNLPLLNTDKPVQALMRIADELGEIFKFEAPGSVTRYLSSQRLIKEACDESRFDKNLSQALKFARDFVGDGLVTSWTHEPNWKKAHNILVPSFSQHAMGRYHAMMVDIAVQLVQKWERLNADEHIEVSEDMTRLTLDTIGLCLFNYRFNSFYRDTPHPFIVSVVRALDEVMNKLQRANPDDPAYDENKRQCQEDIKVMNDYVDKIIADRKARGEQSHDLLTQMLNGKDYETGEPLDDGNIRQQIITFLIAGHQTTSGLLSFALYFLVKNPRVLQKVAEEAARVLVDPVPSYKQVKQLKYVGMVLNEALRLWPVAPMFSLYAKEDTVLGGEYPLTKGDEVMVLVPQLHRDKTIWGDDVEEFRPERFENPSAIPQHAFKPFGNGQRACIGQQFALHSATLVLGMMLKHFDFEDHTNYELVIKESRTLKPEGFVVKAKSKGIPLGGIPSPSTEQSAKKVRKKAENAHNTPLLVLYGSNAGTAEGTARDLADIAMSKGFAPQVATLDSHAGNLPREGAVLIVTASYNGHPPDNAKQFVDWLDQASADEVKGVRYSVFGCGDKNWAGTYQKVPAFIDETLAAKGAENIADRGEADASDDFEGTYEEWRDHMWSDVAAYFGLDIENSEDNKSTLSLQFVDSAADMPLAKMHGAFSTNVVASKELQQPGSARSTRHLEIELPKEASYQEGDHLGVIPRYYEGIVNRVTARFGLSASQLIRLEAEEEKLAHLPLAKTVSVEELLQYVELQDPVTRTQLRAMAAKTVCPPHKVELEALLGKQAYKEQVLAKRLTMLELLEKYPACEMSFSEFIALLPSIRPRYYSISSSPRVDEKQASITVSVVSGPAWSGYGEYKGIASNYLAELQEGDTITCFISTPQSEFTLPKDPETPLIMVGPGTGVAPFRGFVQARKQLKEQGQSLGEAHLYFGCRSPHEDYLYQEELENAQSEGIITLHTAFSRMPNQPKTYVQHVMEQDGKKLIELLDQGAHFYICGDGSQMAPAVEATLMKSYADVHQVSEADARLWLQQLEEKGRYAKDVWLG

SEQ ID NO: 915 - DNA, 3147 bp, synthetic construct
  misc_feature 1..3147: note = variant of P450 oxidase from Bacillus megaterium
  source 1..3147: mol_type = other DNA
atgacaattaaggaaatgcctcagcctaagacgtttggagaacttaaaaatttaccgttattaaacacagataaaccggttcaagctttgatgcgtattgcggatgaattaggagaaatctttaaattcgaggcgcctggtagcgtaacgcgctatttatcaagtcagcgtctaattaaagaagcatgcgatgaatcacgctttgataaaaacttaagtcaagcgcttaaatttgcacgtgattttgttggagacgggctggttacaagctggacgcatgaaccgaattggaaaaaagcgcataatatcttagttccaagctttagtcagcatgcaatggggcgttatcatgcgatgatggtcgatatcgccgtgcagcttgttcaaaagtgggagcgtctaaatgcagatgagcatattgaagtatcggaagacatgacacgtttaacgcttgatacaattggtctttgcctgtttaactatcgctttaacagcttttaccgagatacgcctcatccatttattgtgagtgtggttcgtgcactggatgaagtaatgaacaagctgcagcgagcaaatccagacgacccagcttatgatgaaaacaagcgccagtgtcaagaagataggaaggtgatgaacgactatgtagataaaattattgcagatcgcaaagcaaggggtgaacaaagtcatgatttattaacgcagatgctaaacggaaaagatccagaaacgggtgagccgcttgatgacgggaacattcgtcagcaaattattacattcttaattgcgggacaccaaacgacaagtggtcttttatcatttgcgctgtatttcttagtgaaaaatccacgtgtattacaaaaagtagcagaagaagcagcacgagttctagtagatcctgttccaagctacaaacaagtcaaacagcttaaatatgttggcatggtcttaaacgaagcgctgcgcttatggccagtagcgcctatgttttccctatatgcaaaagaagatacggtgcttggaggagaatatcctttaacgaaaggcgacgaagtaatggttctggtgcctcagcttcaccgtgataaaacaatttggggagacgatgtggaggagttccgtccagagcgttttgaaaatccaagtgcgattccgcagcatgcgtttaaaccgtttggaaacggtcagcgtgcgtgtatcggtcagcagttcgctcttcatagtgcaacgctggtacttggtatgatgctaaaacactttgactttgaagatcatacaaactacgagctcgttattaaagaatcgcggacgttaaaacctgaaggctttgtggtaaaagcaaaatcgaaaggcattccgcttggcggtattccttcacctagcactgaacagtctgctaaaaaagtacgcaaaaaggcagaaaacgctcataatacgccgctgcttgtgctatacggttcaaatgcgggaacagctgaaggaacggcgcgtgatttagcagatattgcaatgagcaaaggatttgcaccgcaggtcgcaacgcttgattcacacgccggtaatcttccgcgcgaaggagctgtattaattgtaacggcgtcttataacggtcatccgcctgataacgcaaagcaatttgtcgactggttagaccaagcgtctgcggatgaagtaaaaggcgttcgctactccgtatttggatgcggcgataaaaattgggcggggacgtatcaaaaagtgcctgcttttatcgatgaaacgcttgccgctaaaggggcagaaaacatcgctgaccgcggtgaagcagatgcaagcgacgactttgaaggcacatatgaagaatggcgtgatcatatgtggagtgacgtagcagcctactttggtctcgacattgaaaacagtgaagataataaatctactctttcacttcaatttgtcgacagcgcggcggatatgccgcttgcgaaaatgcacggtgcgttttcaacgaacgtcgtagcaagcaaagaacttcaacagcctggcagtgcacgaagcacgcgacatcttgaaattgaacttccaaaagaagcttcttatcaagaaggagatcatttaggtgttattcctcgctattatgaaggaatagtaaaccgtgtaacagcaaggttcggcctaagcgcatcacagctgatccgtctggaagcagaagaagaaaaattagctcatttgccactcgctaaaacagtatccgtagaagagcttctgcaatacgtggagcttcaagatcctgttacgcgcacgcagcttcgcgcaatggctgctaaaacggtctgcccgccgcataaagtagagcttgaagccttgcttggcaagcaagcctacaaagaacaagtgctggcaaaacgtttaacaatgcttgaactgcttgaaaaatacccggcgtgtgaaatgagtttcagcgaatttatcgcccttctgccaagcatacgcccgcgctattactcgatttcttcatcacctcgtgtcgatgaaaaacaagcaagcatcacggtcagcgttgtctcaggaccggcgtggagcggatatggagaatataaaggaattgcgtcgaactatcttgccgagctgcaagaaggagatacgattacgtgctttatttccacaccgcagtcagagtttacgctgccaaaagaccctgaaacgccgcttatcatggtcggaccgggaacaggcgtcgcgccgtttagaggctttgtgcaggcgcgcaaacagctaaaagaacaaggacagtcacttggagaagcacatttatacttcggctgccgttcacctcatgaagactatctgtatcaagaagagcttgaaaacgcccaaagcgaaggcatcattacgcttcataccgctttttctcgcatgccgaatcagccgaaaacatacgttcagcacgtaatggaacaagacggcaagaaattgattgaacttcttgatcaaggagcgcacttctatatttgcggagacggaagccaaatggcacctgccgttgaagcaacgcttatgaaaagctatgctgacgttcaccaagtgagtgaagcagacgctcgcttatggctgcagcagctagaagaaaaaggccgatacgcaaaagacgtgtggctgggg

SEQ ID NO: 916 - protein, 1049 aa, synthetic construct
  REGION 1..1049: note = variant of P450 oxidase from Bacillus megaterium
MTIKEMPQPKTFGELKNLPLLNTDKPVQALMRIADELGEIFKFEAPGSVTRYLSSQRLIKEACDESRFDKNLSQALKFARDFVGDGLVTSWTHEPNWKKAHNILVPSFSQHAMGRYHAMMVDIAVQLVQKWERLNADEHIEVSEDMTRLTLDTIGLCLFNYRFNSFYRDTPHPFIVSVVRALDEVMNKLQRANPDDPAYDENKRQCQEDRKVMNDYVDKIIADRKARGEQSHDLLTQMLNGKDPETGEPLDDGNIRQQIITFLIAGHQTTSGLLSFALYFLVKNPRVLQKVAEEAARVLVDPVPSYKQVKQLKYVGMVLNEALRLWPVAPMFSLYAKEDTVLGGEYPLTKGDEVMVLVPQLHRDKTIWGDDVEEFRPERFENPSAIPQHAFKPFGNGQRACIGQQFALHSATLVLGMMLKHFDFEDHTNYELVIKESRTLKPEGFVVKAKSKGIPLGGIPSPSTEQSAKKVRKKAENAHNTPLLVLYGSNAGTAEGTARDLADIAMSKGFAPQVATLDSHAGNLPREGAVLIVTASYNGHPPDNAKQFVDWLDQASADEVKGVRYSVFGCGDKNWAGTYQKVPAFIDETLAAKGAENIADRGEADASDDFEGTYEEWRDHMWSDVAAYFGLDIENSEDNKSTLSLQFVDSAADMPLAKMHGAFSTNVVASKELQQPGSARSTRHLEIELPKEASYQEGDHLGVIPRYYEGIVNRVTARFGLSASQLIRLEAEEEKLAHLPLAKTVSVEELLQYVELQDPVTRTQLRAMAAKTVCPPHKVELEALLGKQAYKEQVLAKRLTMLELLEKYPACEMSFSEFIALLPSIRPRYYSISSSPRVDEKQASITVSVVSGPAWSGYGEYKGIASNYLAELQEGDTITCFISTPQSEFTLPKDPETPLIMVGPGTGVAPFRGFVQARKQLKEQGQSLGEAHLYFGCRSPHEDYLYQEELENAQSEGIITLHTAFSRMPNQPKTYVQHVMEQDGKKLIELLDQGAHFYICGDGSQMAPAVEATLMKSYADVHQVSEADARLWLQQLEEKGRYAKDVWLG

SEQ ID NO: 917 - DNA, 3147 bp, synthetic construct
  misc_feature 1..3147: note = variant of P450 oxidase from Bacillus megaterium
  source 1..3147: mol_type = other DNA
atgacaattaaggaaatgcctcagcctaagacgtttggagaacttaaaaatttaccgttattaaacacagataaaccggttcaagctttgatgcgtattgcggatgaattaggagaaatctttaaattcgaggcgcctggtagcgtaacgcgctatttatcaagtcagcgtctaattaaagaagcatgcgatgaatcacgctttgataaaaacttaagtcaagcgcttaaatttgcacgtgattttgttggagacgggctggttacaagctggacgcatgaaccgaattggaaaaaagcgcataatatcttagttccaagctttagtcagcatgcaatggggcgttatcatgcgatgatggtcgatatcgccgtgcagcttgttcaaaagtgggagcgtctaaatgcagatgagcatattgaagtatcggaagacatgacacgtttaacgcttgatacaattggtctttgcctgtttaactatcgctttaacagcttttaccgagatacgcctcatccatttattgtgagtgtggttcgtgcactggatgaagtaatgaacaagctgcagcgagcaaatccagacgacccagcttatgatgaaaacaagcgccagtgtcaagaagatatcaaggtgatgaacgactatgtagataaaattattgcagatcgcaaagcaaggggtgaacaaagtcatgatttattaacgcagatgctaaacggaaaagatccactgacgggtgagccgcttgatgacgggaacattcgtcagcaaattattacattcttaattgcgggacaccaaacgacaagtggtcttttatcatttgcgctgtatttcttagtgaaaaatccacgtgtattacaaaaagtagcagaagaagcagcacgagttctagtagatcctgttccaagctacaaacaagtcaaacagcttaaatatgttggcatggtcttaaacgaagcgctgcgcttatggccagtagcgcctatgttttccctatatgcaaaagaagatacggtgcttggaggagaatatcctttaacgaaaggcgacgaagtaatggttctggtgcctcagcttcaccgtgataaaacaatttggggagacgatgtggaggagttccgtccagagcgttttgaaaatccaagtgcgattccgcagcatgcgtttaaaccgtttggaaacggtcagcgtgcgtgtatcggtcagcagttcgctcttcatagtgcaacgctggtacttggtatgatgctaaaacactttgactttgaagatcatacaaactacgagctcgttattaaagaatcgcggacgttaaaacctgaaggctttgtggtaaaagcaaaatcgaaaggcattccgcttggcggtattccttcacctagcactgaacagtctgctaaaaaagtacgcaaaaaggcagaaaacgctcataatacgccgctgcttgtgctatacggttcaaatgcgggaacagctgaaggaacggcgcgtgatttagcagatattgcaatgagcaaaggatttgcaccgcaggtcgcaacgcttgattcacacgccggtaatcttccgcgcgaaggagctgtattaattgtaacggcgtcttataacggtcatccgcctgataacgcaaagcaatttgtcgactggttagaccaagcgtctgcggatgaagtaaaaggcgttcgctactccgtatttggatgcggcgataaaaattgggcggggacgtatcaaaaagtgcctgcttttatcgatgaaacgcttgccgctaaaggggcagaaaacatcgctgaccgcggtgaagcagatgcaagcgacgactttgaaggcacatatgaagaatggcgtgatcatatgtggagtgacgtagcagcctactttggtctcgacattgaaaacagtgaagataataaatctactctttcacttcaatttgtcgacagcgcggcggatatgccgcttgcgaaaatgcacggtgcgttttcaacgaacgtcgtagcaagcaaagaacttcaacagcctggcagtgcacgaagcacgcgacatcttgaaattgaacttccaaaagaagcttcttatcaagaaggagatcatttaggtgttattcctcgctattatgaaggaatagtaaaccgtgtaacagcaaggttcggcctaagcgcatcacagctgatccgtctggaagcagaagaagaaaaattagctcatttgccactcgctaaaacagtatccgtagaagagcttctgcaatacgtggagcttcaagatcctgttacgcgcacgcagcttcgcgcaatggctgctaaaacggtctgcccgccgcataaagtagagcttgaagccttgcttggcaagcaagcctacaaagaacaagtgctggcaaaacgtttaacaatgcttgaactgcttgaaaaatacccggcgtgtgaaatgagtttcagcgaatttatcgcccttctgccaagcatacgcccgcgctattactcgatttcttcatcacctcgtgtcgatgaaaaacaagcaagcatcacggtcagcgttgtctcaggaccggcgtggagcggatatggagaatataaaggaattgcgtcgaactatcttgccgagctgcaagaaggagatacgattacgtgctttatttccacaccgcagtcagagtttacgctgccaaaagaccctgaaacgccgcttatcatggtcggaccgggaacaggcgtcgcgccgtttagaggctttgtgcaggcgcgcaaacagctaaaagaacaaggacagtcacttggagaagcacatttatacttcggctgccgttcacctcatgaagactatctgtatcaagaagagcttgaaaacgcccaaagcgaaggcatcattacgcttcataccgctttttctcgcatgccgaatcagccgaaaacatacgttcagcacgtaatggaacaagacggcaagaaattgattgaacttcttgatcaaggagcgcacttctatatttgcggagacggaagccaaatggcacctgccgttgaagcaacgcttatgaaaagctatgctgacgttcaccaagtgagtgaagcagacgctcgcttatggctgcagcagctagaagaaaaaggccgatacgcaaaagacgtgtggctgggg

SEQ ID NO: 918 - protein, 1049 aa, synthetic construct
  REGION 1..1049: note = variant of P450 oxidase from Bacillus megaterium
MTIKEMPQPKTFGELKNLPLLNTDKPVQALMRIADELGEIFKFEAPGSVTRYLSSQRLIKEACDESRFDKNLSQALKFARDFVGDGLVTSWTHEPNWKKAHNILVPSFSQHAMGRYHAMMVDIAVQLVQKWERLNADEHIEVSEDMTRLTLDTIGLCLFNYRFNSFYRDTPHPFIVSVVRALDEVMNKLQRANPDDPAYDENKRQCQEDIKVMNDYVDKIIADRKARGEQSHDLLTQMLNGKDPLTGEPLDDGNIRQQIITFLIAGHQTTSGLLSFALYFLVKNPRVLQKVAEEAARVLVDPVPSYKQVKQLKYVGMVLNEALRLWPVAPMFSLYAKEDTVLGGEYPLTKGDEVMVLVPQLHRDKTIWGDDVEEFRPERFENPSAIPQHAFKPFGNGQRACIGQQFALHSATLVLGMMLKHFDFEDHTNYELVIKESRTLKPEGFVVKAKSKGIPLGGIPSPSTEQSAKKVRKKAENAHNTPLLVLYGSNAGTAEGTARDLADIAMSKGFAPQVATLDSHAGNLPREGAVLIVTASYNGHPPDNAKQFVDWLDQASADEVKGVRYSVFGCGDKNWAGTYQKVPAFIDETLAAKGAENIADRGEADASDDFEGTYEEWRDHMWSDVAAYFGLDIENSEDNKSTLSLQFVDSAADMPLAKMHGAFSTNVVASKELQQPGSARSTRHLEIELPKEASYQEGDHLGVIPRYYEGIVNRVTARFGLSASQLIRLEAEEEKLAHLPLAKTVSVEELLQYVELQDPVTRTQLRAMAAKTVCPPHKVELEALLGKQAYKEQVLAKRLTMLELLEKYPACEMSFSEFIALLPSIRPRYYSISSSPRVDEKQASITVSVVSGPAWSGYGEYKGIASNYLAELQEGDTITCFISTPQSEFTLPKDPETPLIMVGPGTGVAPFRGFVQARKQLKEQGQSLGEAHLYFGCRSPHEDYLYQEELENAQSEGIITLHTAFSRMPNQPKTYVQHVMEQDGKKLIELLDQGAHFYICGDGSQMAPAVEATLMKSYADVHQVSEADARLWLQQLEEKGRYAKDVWLG

SEQ ID NO: 919 - DNA, 3147 bp, synthetic construct
  misc_feature 1..3147: note = variant of P450 oxidase from Bacillus megaterium
  source 1..3147: mol_type = other DNA
atgacaattaaggaaatgcctcagcctaagacgtttggagaacttaaaaatttaccgttattaaacacagataaaccggttcaagctttgatgcgtattgcggatgaattaggagaaatctttaaattcgaggcgcctggtagcgtaacgcgctatttatcaagtcagcgtctaattaaagaagcatgcgatgaatcacgctttgataaaaacttaagtcaagcgcttaaatttgcacgtgattttgttggagacgggctggttacaagctggacgcatgaaccgaattggaaaaaagcgcataatatcttagttccaagctttagtcagcgggcaatggggcgttatcatgcgatgatggtcgatatcgccgtgcagcttgttcaaaagtgggagcgtctaaatgcagatgagcatattgaagtatcggaagacatgacacgtttaacgcttgatacaattggtctttgcctgtttaactatcgctttaacagcttttaccgagatacgcctcatccatttattgtgagtgtggttcgtgcactggatgaagtaatgaacaagctgcagcgagcaaatccagacgacccagcttatgatgaaaacaagcgccagtgtcaagaagatatcaaggtgatgaacgactatgtagataaaattattgcagatcgcaaagcaaggggtgaacaaagtcatgatttattaacgcagatgctaaacggaaaagatccagaaacgggtgagccgcttgatgacgggaacattcgtcagcaaattattacattcttaattgcgggacaccaaacgacaagtggtcttttatcatttgcgctgtatttcttagtgaaaaatccacgtgtattacaaaaagtagcagaagaagcagcacgagttctagtagatcctgttccaagctacaaacaagtcaaacagcttaaatatgttggcatggtcttaaacgaagcgctgcgcttatggccagtagcgcctatgttttccctatatgcaaaagaagatacggtgcttggaggagaatatcctttaacgaaaggcgacgaagtaatggttctggtgcctcagcttcaccgtgataaaacaatttggggagacgatgtggaggagttccgtccagagcgttttgaaaatccaagtgcgattccgcagcatgcgtttaaaccgtttggaaacggtcagcgtgcgtgtatcggtcagcagttcgctcttcatagtgcaacgctggtacttggtatgatgctaaaacactttgactttgaagatcatacaaactacgagctcgttattaaagaatcgcggacgttaaaacctgaaggctttgtggtaaaagcaaaatcgaaaggcattccgcttggcggtattccttcacctagcactgaacagtctgctaaaaaagtacgcaaaaaggcagaaaacgctcataatacgccgctgcttgtgctatacggttcaaatgcgggaacagctgaaggaacggcgcgtgatttagcagatattgcaatgagcaaaggatttgcaccgcaggtcgcaacgcttgattcacacgccggtaatcttccgcgcgaaggagctgtattaattgtaacggcgtcttataacggtcatccgcctgataacgcaaagcaatttgtcgactggttagaccaagcgtctgcggatgaagtaaaaggcgttcgctactccgtatttggatgcggcgataaaaattgggcggggacgtatcaaaaagtgcctgcttttatcgatgaaacgcttgccgctaaaggggcagaaaacatcgctgaccgcggtgaagcagatgcaagcgacgactttgaaggcacatatgaagaatggcgtgatcatatgtggagtgacgtagcagcctactttggtctcgacattgaaaacagtgaagataataaatctactctttcacttcaatttgtcgacagcgcggcggatatgccgcttgcgaaaatgcacggtgcgttttcaacgaacgtcgtagcaagcaaagaacttcaacagcctggcagtgcacgaagcacgcgacatcttgaaattgaacttccaaaagaagcttcttatcaagaaggagatcatttaggtgttattcctcgctattatgaaggaatagtaaaccgtgtaacagcaaggttcggcctaagcgcatcacagctgatccgtctggaagcagaagaagaaaaattagctcatttgccactcgctaaaacagtatccgtagaagagcttctgcaatacgtggagcttcaagatcctgttacgcgcacgcagcttcgcgcaatggctgctaaaacggtctgcccgccgcataaagtagagcttgaagccttgcttggcaagcaagcctacaaagaacaagtgctggcaaaacgtttaacaatgcttgaactgcttgaaaaatacccggcgtgtgaaatgagtttcagcgaatttatcgcccttctgccaagcatacgcccgcgctattactcgatttcttcatcacctcgtgtcgatgaaaaacaagcaagcatcacggtcagcgttgtctcaggaccggcgtggagcggatatggagaatataaaggaattgcgtcgaactatcttgccgagctgcaagaaggagatacgattacgtgctttatttccacaccgcagtcagagtttacgctgccaaaagaccctgaaacgccgcttatcatggtcggaccgggaacaggcgtcgcgccgtttagaggctttgtgcaggcgcgcaaacagctaaaagaacaaggacagtcacttggagaagcacatttatacttcggctgccgttcacctcatgaagactatctgtatcaagaagagcttgaaaacgcccaaagcgaaggcatcattacgcttcataccgctttttctcgcatgccgaatcagccgaaaacatacgttcagcacgtaatggaacaagacggcaagaaattgattgaacttcttgatcaaggagcgcacttctatatttgcggagacggaagccaaatggcacctgccgttgaagcaacgcttatgaaaagctatgctgacgttcaccaagtgagtgaagcagacgctcgcttatggctgcagcagctagaagaaaaaggccgatacgcaaaagacgtgtggctgggg

SEQ ID NO: 920 - protein, 1049 aa, synthetic construct
  REGION 1..1049: note = variant of P450 oxidase from Bacillus megaterium
MTIKEMPQPKTFGELKNLPLLNTDKPVQALMRIADELGEIFKFEAPGSVTRYLSSQRLIKEACDESRFDKNLSQALKFARDFVGDGLVTSWTHEPNWKKAHNILVPSFSQRAMGRYHAMMVDIAVQLVQKWERLNADEHIEVSEDMTRLTLDTIGLCLFNYRFNSFYRDTPHPFIVSVVRALDEVMNKLQRANPDDPAYDENKRQCQEDIKVMNDYVDKIIADRKARGEQSHDLLTQMLNGKDPETGEPLDDGNIRQQIITFLIAGHQTTSGLLSFALYFLVKNPRVLQKVAEEAARVLVDPVPSYKQVKQLKYVGMVLNEALRLWPVAPMFSLYAKEDTVLGGEYPLTKGDEVMVLVPQLHRDKTIWGDDVEEFRPERFENPSAIPQHAFKPFGNGQRACIGQQFALHSATLVLGMMLKHFDFEDHTNYELVIKESRTLKPEGFVVKAKSKGIPLGGIPSPSTEQSAKKVRKKAENAHNTPLLVLYGSNAGTAEGTARDLADIAMSKGFAPQVATLDSHAGNLPREGAVLIVTASYNGHPPDNAKQFVDWLDQASADEVKGVRYSVFGCGDKNWAGTYQKVPAFIDETLAAKGAENIADRGEADASDDFEGTYEEWRDHMWSDVAAYFGLDIENSEDNKSTLSLQFVDSAADMPLAKMHGAFSTNVVASKELQQPGSARSTRHLEIELPKEASYQEGDHLGVIPRYYEGIVNRVTARFGLSASQLIRLEAEEEKLAHLPLAKTVSVEELLQYVELQDPVTRTQLRAMAAKTVCPPHKVELEALLGKQAYKEQVLAKRLTMLELLEKYPACEMSFSEFIALLPSIRPRYYSISSSPRVDEKQASITVSVVSGPAWSGYGEYKGIASNYLAELQEGDTITCFISTPQSEFTLPKDPETPLIMVGPGTGVAPFRGFVQARKQLKEQGQSLGEAHLYFGCRSPHEDYLYQEELENAQSEGIITLHTAFSRMPNQPKTYVQHVMEQDGKKLIELLDQGAHFYICGDGSQMAPAVEATLMKSYADVHQVSEADARLWLQQLEEKGRYAKDVWLG

SEQ ID NO: 921 - DNA, 3147 bp, synthetic construct
  misc_feature 1..3147: note = variant of P450 oxidase from Bacillus megaterium
  source 1..3147: mol_type = other DNA
atgacaattaaggaaatgcctcagcctaagacgtttggagaacttaaaaatttaccgttattaaacacagataaaccggttcaagctttgatgcgtattgcggatgaattaggagaaatctttaaattcgaggcgcctggtagcgtaacgcgctatttatcaagtcagcgtctaattaaagaagcatgcgatgaatcacgctttgataaaaacttaagtcaagcgcttaaatttgcacgtgattttgttggagacgggctggttacaagctggacgcatgaaccgaattggaaaaaagcgcataatatcttagttccaagctttagtcagttggcaatggggcgttatcatgcgatgatggtcgatatcgccgtgcagcttgttcaaaagtgggagcgtctaaatgcagatgagcatattgaagtatcggaagacatgacacgtttaacgcttgatacaattggtctttgcctgtttaactatcgctttaacagcttttaccgagatacgcctcatccatttattgtgagtgtggttcgtgcactggatgaagtaatgaacaagctgcagcgagcaaatccagacgacccagcttatgatgaaaacaagcgccagtgtcaagaagatatcaaggtgatgaacgactatgtagataaaattattgcagatcgcaaagcaaggggtgaacaaagtcatgatttattaacgcagatgctaaacggaaaagatccagaaacgggtgagccgcttgatgacgggaacattcgtcagcaaattattacattcttaattgcgggacaccaaacgacaagtggtcttttatcatttgcgctgtatttcttagtgaaaaatccacgtgtattacaaaaagtagcagaagaagcagcacgagttctagtagatcctgttccaagctacaaacaagtcaaacagcttaaatatgttggcatggtcttaaacgaagcgctgcgcttatggccagtagcgcctatgttttccctatatgcaaaagaagatacggtgcttggaggagaatatcctttaacgaaaggcgacgaagtaatggttctggtgcctcagcttcaccgtgataaaacaatttggggagacgatgtggaggagttccgtccagagcgttttgaaaatccaagtgcgattccgcagcatgcgtttaaaccgtttggaaacggtcagcgtgcgtgtatcggtcagcagttcgctcttcatagtgcaacgctggtacttggtatgatgctaaaacactttgactttgaagatcatacaaactacgagctcgttattaaagaatcgcggacgttaaaacctgaaggctttgtggtaaaagcaaaatcgaaaggcattccgcttggcggtattccttcacctagcactgaacagtctgctaaaaaagtacgcaaaaaggcagaaaacgctcataatacgccgctgcttgtgctatacggttcaaatgcgggaacagctgaaggaacggcgcgtgatttagcagatattgcaatgagcaaaggatttgcaccgcaggtcgcaacgcttgattcacacgccggtaatcttccgcgcgaaggagctgtattaattgtaacggcgtcttataacggtcatccgcctgataacgcaaagcaatttgtcgactggttagaccaagcgtctgcggatgaagtaaaaggcgttcgctactccgtatttggatgcggcgataaaaattgggcggggacgtatcaaaaagtgcctgcttttatcgatgaaacgcttgccgctaaaggggcagaaaacatcgctgaccgcggtgaagcagatgcaagcgacgactttgaaggcacatatgaagaatggcgtgatcatatgtggagtgacgtagcagcctactttggtctcgacattgaaaacagtgaagataataaatctactctttcacttcaatttgtcgacagcgcggcggatatgccgcttgcgaaaatgcacggtgcgttttcaacgaacgtcgtagcaagcaaagaacttcaacagcctggcagtgcacgaagcacgcgacatcttgaaattgaacttccaaaagaagcttcttatcaagaaggagatcatttaggtgttattcctcgctattatgaaggaatagtaaaccgtgtaacagcaaggttcggcctaagcgcatcacagctgatccgtctggaagcagaagaagaaaaattagctcatttgccactcgctaaaacagtatccgtagaagagcttctgcaatacgtggagcttcaagatcctgttacgcgcacgcagcttcgcgcaatggctgctaaaacggtctgcccgccgcataaagtagagcttgaagccttgcttggcaagcaagcctacaaagaacaagtgctggcaaaacgtttaacaatgcttgaactgcttgaaaaatacccggcgtgtgaaatgagtttcagcgaatttatcgcccttctgccaagcatacgcccgcgctattactcgatttcttcatcacctcgtgtcgatgaaaaacaagcaagcatcacggtcagcgttgtctcaggaccggcgtggagcggatatggagaatataaaggaattgcgtcgaactatcttgccgagctgcaagaaggagatacgattacgtgctttatttccacaccgcagtcagagtttacgctgccaaaagaccctgaaacgccgcttatcatggtcggaccgggaacaggcgtcgcgccgtttagaggctttgtgcaggcgcgcaaacagctaaaagaacaaggacagtcacttggagaagcacatttatacttcggctgccgttcacctcatgaagactatctgtatcaagaagagcttgaaaacgcccaaagcgaaggcatcattacgcttcataccgctttttctcgcatgccgaatcagccgaaaacatacgttcagcacgtaatggaacaagacggcaagaaattgattgaacttcttgatcaaggagcgcacttctatatttgcggagacggaagccaaatggcacctgccgttgaagcaacgcttatgaaaagctatgctgacgttcaccaagtgagtgaagcagacgctcgcttatggctgcagcagctagaagaaaaaggccgatacgcaaaagacgtgtggctgggg

SEQ ID NO: 922 - protein, 1049 aa, synthetic construct
  REGION 1..1049: note = variant of P450 oxidase from Bacillus megaterium
MTIKEMPQPKTFGELKNLPLLNTDKPVQALMRIADELGEIFKFEAPGSVTRYLSSQRLIKEACDESRFDKNLSQALKFARDFVGDGLVTSWTHEPNWKKAHNILVPSFSQLAMGRYHAMMVDIAVQLVQKWERLNADEHIEVSEDMTRLTLDTIGLCLFNYRFNSFYRDTPHPFIVSVVRALDEVMNKLQRANPDDPAYDENKRQCQEDIKVMNDYVDKIIADRKARGEQSHDLLTQMLNGKDPETGEPLDDGNIRQQIITFLIAGHQTTSGLLSFALYFLVKNPRVLQKVAEEAARVLVDPVPSYKQVKQLKYVGMVLNEALRLWPVAPMFSLYAKEDTVLGGEYPLTKGDEVMVLVPQLHRDKTIWGDDVEEFRPERFENPSAIPQHAFKPFGNGQRACIGQQFALHSATLVLGMMLKHFDFEDHTNYELVIKESRTLKPEGFVVKAKSKGIPLGGIPSPSTEQSAKKVRKKAENAHNTPLLVLYGSNAGTAEGTARDLADIAMSKGFAPQVATLDSHAGNLPREGAVLIVTASYNGHPPDNAKQFVDWLDQASADEVKGVRYSVFGCGDKNWAGTYQKVPAFIDETLAAKGAENIADRGEADASDDFEGTYEEWRDHMWSDVAAYFGLDIENSEDNKSTLSLQFVDSAADMPLAKMHGAFSTNVVASKELQQPGSARSTRHLEIELPKEASYQEGDHLGVIPRYYEGIVNRVTARFGLSASQLIRLEAEEEKLAHLPLAKTVSVEELLQYVELQDPVTRTQLRAMAAKTVCPPHKVELEALLGKQAYKEQVLAKRLTMLELLEKYPACEMSFSEFIALLPSIRPRYYSISSSPRVDEKQASITVSVVSGPAWSGYGEYKGIASNYLAELQEGDTITCFISTPQSEFTLPKDPETPLIMVGPGTGVAPFRGFVQARKQLKEQGQSLGEAHLYFGCRSPHEDYLYQEELENAQSEGIITLHTAFSRMPNQPKTYVQHVMEQDGKKLIELLDQGAHFYICGDGSQMAPAVEATLMKSYADVHQVSEADARLWLQQLEEKGRYAKDVWLG

SEQ ID NO: 923 - DNA, 3147 bp, synthetic construct
  misc_feature 1..3147: note = variant of P450 oxidase from Bacillus megaterium
  source 1..3147: mol_type = other DNA
atgacaattaaggaaatgcctcagcctaagacgtttggagaacttaaaaatttaccgttattaaacacagataaaccggttcaagctttgatgcgtattgcggatgaattaggagaaatctttaaattcgaggcgcctggtagcgtaacgcgctatttatcaagtcagcgtctaattaaagaagcatgcgatgaatcacgctttgataaaaacttaagtcaagcgcttaaatttgcacgtgattttgttggagacgggctggttacaagctggacgcatgaaccgaattggaaaaaagcgcataatatcttagttccaagctttagtcagcatgcaatggggcgttatcatgcgatgatggtcgatatcgccgtgcagcttgttcaaaagtgggagcgtctaaatgcagatgagcatattgaagtatcggaagacatgacacgtttaacgcttgatacaattggtctttgcctgtttaactatcgctttaacagcttttaccgagatacgcctcatccatttattgtgagtgtggttcgtgcactggatgaagtaatgaacaagctgcagcgagcaaatccagacgacccagcttatgatgaaaacaagcgccagtgtcaagaagatatcaaggtgatgaacgactatgtagataaaattattgcagatcgcaaagcaaggggtgaacaaagtcatgatttattaacgcagatgctaaacggaaaagatccagtgacgggtgagccgcttgatgacgggaacattcgtcagcaaattattacattcttaattgcgggacaccaaacgacaagtggtcttttatcatttgcgctgtatttcttagtgaaaaatccacgtgtattacaaaaagtagcagaagaagcagcacgagttctagtagatcctgttccaagctacaaacaagtcaaacagcttaaatatgttggcatggtcttaaacgaagcgctgcgcttatggccagtagcgcctatgttttccctatatgcaaaagaagatacggtgcttggaggagaatatcctttaacgaaaggcgacgaagtaatggttctggtgcctcagcttcaccgtgataaaacaatttggggagacgatgtggaggagttccgtccagagcgttttgaaaatccaagtgcgattccgcagcatgcgtttaaaccgtttggaaacggtcagcgtgcgtgtatcggtcagcagttcgctcttcatagtgcaacgctggtacttggtatgatgctaaaacactttgactttgaagatcatacaaactacgagctcgttattaaagaatcgcggacgttaaaacctgaaggctttgtggtaaaagcaaaatcgaaaggcattccgcttggcggtattccttcacctagcactgaacagtctgctaaaaaagtacgcaaaaaggcagaaaacgctcataatacgccgctgcttgtgctatacggttcaaatgcgggaacagctgaaggaacggcgcgtgatttagcagatattgcaatgagcaaaggatttgcaccgcaggtcgcaacgcttgattcacacgccggtaatcttccgcgcgaaggagctgtattaattgtaacggcgtcttataacggtcatccgcctgataacgcaaagcaatttgtcgactggttagaccaagcgtctgcggatgaagtaaaaggcgttcgctactccgtatttggatgcggcgataaaaattgggcggggacgtatcaaaaagtgcctgcttttatcgatgaaacgcttgccgctaaaggggcagaaaacatcgctgaccgcggtgaagcagatgcaagcgacgactttgaaggcacatatgaagaatggcgtgatcatatgtggagtgacgtagcagcctactttggtctcgacattgaaaacagtgaagataataaatctactctttcacttcaatttgtcgacagcgcggcggatatgccgcttgcgaaaatgcacggtgcgttttcaacgaacgtcgtagcaagcaaagaacttcaacagcctggcagtgcacgaagcacgcgacatcttgaaattgaacttccaaaagaagcttcttatcaagaaggagatcatttaggtgttattcctcgctattatgaaggaatagtaaaccgtgtaacagcaaggttcggcctaagcgcatcacagctgatccgtctggaagcagaagaagaaaaattagctcatttgccactcgctaaaacagtatccgtagaagagcttctgcaatacgtggagcttcaagatcctgttacgcgcacgcagcttcgcgcaatggctgctaaaacggtctgcccgccgcataaagtagagcttgaagccttgcttggcaagcaagcctacaaagaacaagtgctggcaaaacgtttaacaatgcttgaactgcttgaaaaatacccggcgtgtgaaatgagtttcagcgaatttatcgcccttctgccaagcatacgcccgcgctattactcgatttcttcatcacctcgtgtcgatgaaaaacaagcaagcatcacggtcagcgttgtctcaggaccggcgtggagcggatatggagaatataaaggaattgcgtcgaactatcttgccgagctgcaagaaggagatacgattacgtgctttatttccacaccgcagtcagagtttacgctgccaaaagaccctgaaacgccgcttatcatggtcggaccgggaacaggcgtcgcgccgtttagaggctttgtgcaggcgcgcaaacagctaaaagaacaaggacagtcacttggagaagcacatttatacttcggctgccgttcacctcatgaagactatctgtatcaagaagagcttgaaaacgcccaaagcgaaggcatcattacgcttcataccgctttttctcgcatgccgaatcagccgaaaacatacgttcagcacgtaatggaacaagacggcaagaaattgattgaacttcttgatcaaggagcgcacttctatatttgcggagacggaagccaaatggcacctgccgttgaagcaacgcttatgaaaagctatgctgacgttcaccaagtgagtgaagcagacgctcgcttatggctgcagcagctagaagaaaaaggccgatacgcaaaagacgtgtggctgggg

SEQ ID NO: 924 - protein, 1049 aa, synthetic construct
  REGION 1..1049: note = variant of P450 oxidase from Bacillus megaterium
MTIKEMPQPKTFGELKNLPLLNTDKPVQALMRIADELGEIFKFEAPGSVTRYLSSQRLIKEACDESRFDKNLSQALKFARDFVGDGLVTSWTHEPNWKKAHNILVPSFSQHAMGRYHAMMVDIAVQLVQKWERLNADEHIEVSEDMTRLTLDTIGLCLFNYRFNSFYRDTPHPFIVSVVRALDEVMNKLQRANPDDPAYDENKRQCQEDIKVMNDYVDKIIADRKARGEQSHDLLTQMLNGKDPVTGEPLDDGNIRQQIITFLIAGHQTTSGLLSFALYFLVKNPRVLQKVAEEAARVLVDPVPSYKQVKQLKYVGMVLNEALRLWPVAPMFSLYAKEDTVLGGEYPLTKGDEVMVLVPQLHRDKTIWGDDVEEFRPERFENPSAIPQHAFKPFGNGQRACIGQQFALHSATLVLGMMLKHFDFEDHTNYELVIKESRTLKPEGFVVKAKSKGIPLGGIPSPSTEQSAKKVRKKAENAHNTPLLVLYGSNAGTAEGTARDLADIAMSKGFAPQVATLDSHAGNLPREGAVLIVTASYNGHPPDNAKQFVDWLDQASADEVKGVRYSVFGCGDKNWAGTYQKVPAFIDETLAAKGAENIADRGEADASDDFEGTYEEWRDHMWSDVAAYFGLDIENSEDNKSTLSLQFVDSAADMPLAKMHGAFSTNVVASKELQQPGSARSTRHLEIELPKEASYQEGDHLGVIPRYYEGIVNRVTARFGLSASQLIRLEAEEEKLAHLPLAKTVSVEELLQYVELQDPVTRTQLRAMAAKTVCPPHKVELEALLGKQAYKEQVLAKRLTMLELLEKYPACEMSFSEFIALLPSIRPRYYSISSSPRVDEKQASITVSVVSGPAWSGYGEYKGIASNYLAELQEGDTITCFISTPQSEFTLPKDPETPLIMVGPGTGVAPFRGFVQARKQLKEQGQSLGEAHLYFGCRSPHEDYLYQEELENAQSEGIITLHTAFSRMPNQPKTYVQHVMEQDGKKLIELLDQGAHFYICGDGSQMAPAVEATLMKSYADVHQVSEADARLWLQQLEEKGRYAKDVWLG

SEQ ID NO: 925 - DNA, 3147 bp, synthetic construct
  misc_feature 1..3147: note = variant of P450 oxidase from Bacillus megaterium
  source 1..3147: mol_type = other DNA
atgacaattaaggaaatgcctcagcctaagacgtttggagaacttaaaaatttaccgttattaaacacagataaaccggttcaagctttgatgcgtattgcggatgaattaggagaaatctttaaattcgaggcgcctggtagcgtaacgcgctatttatcaagtcagcgtctaattaaagaagcatgcgatgaatcacgctttgataaaaacttaagtcaagcgcttaaatttgcacgtgattttgttggagacgggctggttacaagctggacgcatgaaccgaattggaaaaaagcgcataatatcttagttccaagctttagtcagcatgcaatgcagcgttatcatgcgatgatggtcgatatcgccgtgcagcttgttcaaaagtgggagcgtctaaatgcagatgagcatattgaagtatcggaagacatgacacgtttaacgcttgatacaattggtctttgcctgtttaactatcgctttaacagcttttaccgagatacgcctcatccatttattgtgagtgtggttcgtgcactggatgaagtaatgaacaagctgcagcgagcaaatccagacgacccagcttatgatgaaaacaagcgccagtgtcaagaagatatcaaggtgatgaacgactatgtagataaaattattgcagatcgcaaagcaaggggtgaacaaagtcatgatttattaacgcagatgctaaacggaaaagatccagaaacgggtgagccgcttgatgacgggaacattcgtcagcaaattattacattcttaattgcgggacaccaaacgacaagtggtcttttatcatttgcgctgtatttcttagtgaaaaatccacgtgtattacaaaaagtagcagaagaagcagcacgagttctagtagatcctgttccaagctacaaacaagtcaaacagcttaaatatgttggcatggtcttaaacgaagcgctgcgcttatggccagtagcgcctatgttttccctatatgcaaaagaagatacggtgcttggaggagaatatcctttaacgaaaggcgacgaagtaatggttctggtgcctcagcttcaccgtgataaaacaatttggggagacgatgtggaggagttccgtccagagcgttttgaaaatccaagtgcgattccgcagcatgcgtttaaaccgtttggaaacggtcagcgtgcgtgtatcggtcagcagttcgctcttcatagtgcaacgctggtacttggtatgatgctaaaacactttgactttgaagatcatacaaactacgagctcgttattaaagaatcgcggacgttaaaacctgaaggctttgtggtaaaagcaaaatcgaaaggcattccgcttggcggtattccttcacctagcactgaacagtctgctaaaaaagtacgcaaaaaggcagaaaacgctcataatacgccgctgcttgtgctatacggttcaaatgcgggaacagctgaaggaacggcgcgtgatttagcagatattgcaatgagcaaaggatttgcaccgcaggtcgcaacgcttgattcacacgccggtaatcttccgcgcgaaggagctgtattaattgtaacggcgtcttataacggtcatccgcctgataacgcaaagcaatttgtcgactggttagaccaagcgtctgcggatgaagtaaaaggcgttcgctactccgtatttggatgcggcgataaaaattgggcggggacgtatcaaaaagtgcctgcttttatcgatgaaacgcttgccgctaaaggggcagaaaacatcgctgaccgcggtgaagcagatgcaagcgacgactttgaaggcacatatgaagaatggcgtgatcatatgtggagtgacgtagcagcctactttggtctcgacattgaaaacagtgaagataataaatctactctttcacttcaatttgtcgacagcgcggcggatatgccgcttgcgaaaatgcacggtgcgttttcaacgaacgtcgtagcaagcaaagaacttcaacagcctggcagtgcacgaagcacgcgacatcttgaaattgaacttccaaaagaagcttcttatcaagaaggagatcatttaggtgttattcctcgctattatgaaggaatagtaaaccgtgtaacagcaaggttcggcctaagcgcatcacagctgatccgtctggaagcagaagaagaaaaattagctcatttgccactcgctaaaacagtatccgtagaagagcttctgcaatacgtggagcttcaagatcctgttacgcgcacgcagcttcgcgcaatggctgctaaaacggtctgcccgccgcataaagtagagcttgaagccttgcttggcaagcaagcctacaaagaacaagtgctggcaaaacgtttaacaatgcttgaactgcttgaaaaatacccggcgtgtgaaatgagtttcagcgaatttatcgcccttctgccaagcatacgcccgcgctattactcgatttcttcatcacctcgtgtcgatgaaaaacaagcaagcatcacggtcagcgttgtctcaggaccggcgtggagcggatatggagaatataaaggaattgcgtcgaactatcttgccgagctgcaagaaggagatacgattacgtgctttatttccacaccgcagtcagagtttacgctgccaaaagaccctgaaacgccgcttatcatggtcggaccgggaacaggcgtcgcgccgtttagaggctttgtgcaggcgcgcaaacagctaaaagaacaaggacagtcacttggagaagcacatttatacttcggctgccgttcacctcatgaagactatctgtatcaagaagagcttgaaaacgcccaaagcgaaggcatcattacgcttcataccgctttttctcgcatgccgaatcagccgaaaacatacgttcagcacgtaatggaacaagacggcaagaaattgattgaacttcttgatcaaggagcgcacttctatatttgcggagacggaagccaaatggcacctgccgttgaagcaacgcttatgaaaagctatgctgacgttcaccaagtgagtgaagcagacgctcgcttatggctgcagcagctagaagaaaaaggccgatacgcaaaagacgtgtggctgggg

SEQ ID NO: 926 - protein, 1049 aa, synthetic construct
  REGION 1..1049: note = variant of P450 oxidase from Bacillus megaterium
MTIKEMPQPKTFGELKNLPLLNTDKPVQALMRIADELGEIFKFEAPGSVTRYLSSQRLIKEACDESRFDKNLSQALKFARDFVGDGLVTSWTHEPNWKKAHNILVPSFSQHAMQRYHAMMVDIAVQLVQKWERLNADEHIEVSEDMTRLTLDTIGLCLFNYRFNSFYRDTPHPFIVSVVRALDEVMNKLQRANPDDPAYDENKRQCQEDIKVMNDYVDKIIADRKARGEQSHDLLTQMLNGKDPETGEPLDDGNIRQQIITFLIAGHQTTSGLLSFALYFLVKNPRVLQKVAEEAARVLVDPVPSYKQVKQLKYVGMVLNEALRLWPVAPMFSLYAKEDTVLGGEYPLTKGDEVMVLVPQLHRDKTIWGDDVEEFRPERFENPSAIPQHAFKPFGNGQRACIGQQFALHSATLVLGMMLKHFDFEDHTNYELVIKESRTLKPEGFVVKAKSKGIPLGGIPSPSTEQSAKKVRKKAENAHNTPLLVLYGSNAGTAEGTARDLADIAMSKGFAPQVATLDSHAGNLPREGAVLIVTASYNGHPPDNAKQFVDWLDQASADEVKGVRYSVFGCGDKNWAGTYQKVPAFIDETLAAKGAENIADRGEADASDDFEGTYEEWRDHMWSDVAAYFGLDIENSEDNKSTLSLQFVDSAADMPLAKMHGAFSTNVVASKELQQPGSARSTRHLEIELPKEASYQEGDHLGVIPRYYEGIVNRVTARFGLSASQLIRLEAEEEKLAHLPLAKTVSVEELLQYVELQDPVTRTQLRAMAAKTVCPPHKVELEALLGKQAYKEQVLAKRLTMLELLEKYPACEMSFSEFIALLPSIRPRYYSISSSPRVDEKQASITVSVVSGPAWSGYGEYKGIASNYLAELQEGDTITCFISTPQSEFTLPKDPETPLIMVGPGTGVAPFRGFVQARKQLKEQGQSLGEAHLYFGCRSPHEDYLYQEELENAQSEGIITLHTAFSRMPNQPKTYVQHVMEQDGKKLIELLDQGAHFYICGDGSQMAPAVEATLMKSYADVHQVSEADARLWLQQLEEKGRYAKDVWLG

SEQ ID NO: 927 - DNA, 3147 bp, synthetic construct
  misc_feature 1..3147: note = variant of P450 oxidase from Bacillus megaterium
  source 1..3147: mol_type = other DNA
atgacaattaaggaaatgcctcagcctaagacgtttggagaacttaaaaatttaccgttattaaacacagataaaccggttcaagctttgatgcgtattgcggatgaattaggagaaatctttaaattcgaggcgcctggtagcgtaacgcgctatttatcaagtcagcgtctaattaaagaagcatgcgatgaatcacgctttgataaaaacttaagtcaagcgcttaaatttgcacgtgattttgttggagacgggctggttacaagctggacgcatgaaccgaattggaaaaaagcgcataatatcttagttccaagctttagtcagtgggcaatggggcgttatcatgcgatgatggtcgatatcgccgtgcagcttgttcaaaagtgggagcgtctaaatgcagatgagcatattgaagtatcggaagacatgacacgtttaacgcttgatacaattggtctttgcctgtttaactatcgctttaacagcttttaccgagatacgcctcatccatttattgtgagtgtggttcgtgcactggatgaagtaatgaacaagctgcagcgagcaaatccagacgacccagcttatgatgaaaacaagcgccagtgtcaagaagatatcaaggtgatgaacgactatgtagataaaattattgcagatcgcaaagcaaggggtgaacaaagtcatgatttattaacgcagatgctaaacggaaaagatccagaaacgggtgagccgcttgatgacgggaacattcgtcagcaaattattacattcttaattgcgggacaccaaacgacaagtggtcttttatcatttgcgctgtatttcttagtgaaaaatccacgtgtattacaaaaagtagcagaagaagcagcacgagttctagtagatcctgttccaagctacaaacaagtcaaacagcttaaatatgttggcatggtcttaaacgaagcgctgcgcttatggccagtagcgcctatgttttccctatatgcaaaagaagatacggtgcttggaggagaatatcctttaacgaaaggcgacgaagtaatggttctggtgcctcagcttcaccgtgataaaacaatttggggagacgatgtggaggagttccgtccagagcgttttgaaaatccaagtgcgattccgcagcatgcgtttaaaccgtttggaaacggtcagcgtgcgtgtatcggtcagcagttcgctcttcatagtgcaacgctggtacttggtatgatgctaaaacactttgactttgaagatcatacaaactacgagctcgttattaaagaatcgcggacgttaaaacctgaaggctttgtggtaaaagcaaaatcgaaaggcattccgcttggcggtattccttcacctagcactgaacagtctgctaaaaaagtacgcaaaaaggcagaaaacgctcataatacgccgctgcttgtgctatacggttcaaatgcgggaacagctgaaggaacggcgcgtgatttagcagatattgcaatgagcaaaggatttgcaccgcaggtcgcaacgcttgattcacacgccggtaatcttccgcgcgaaggagctgtattaattgtaacggcgtcttataacggtcatccgcctgataacgcaaagcaatttgtcgactggttagaccaagcgtctgcggatgaagtaaaaggcgttcgctactccgtatttggatgcggcgataaaaattgggcggggacgtatcaaaaagtgcctgcttttatcgatgaaacgcttgccgctaaaggggcagaaaacatcgctgaccgcggtgaagcagatgcaagcgacgactttgaaggcacatatgaagaatggcgtgatcatatgtggagtgacgtagcagcctactttggtctcgacattgaaaacagtgaagataataaatctactctttcacttcaatttgtcgacagcgcggcggatatgccgcttgcgaaaatgcacggtgcgttttcaacgaacgtcgtagcaagcaaagaacttcaacagcctggcagtgcacgaagcacgcgacatcttgaaattgaacttccaaaagaagcttcttatcaagaaggagatcatttaggtgttattcctcgctattatgaaggaatagtaaaccgtgtaacagcaaggttcggcctaagcgcatcacagctgatccgtctggaagcagaagaagaaaaattagctcatttgccactcgctaaaacagtatccgtagaagagcttctgcaatacgtggagcttcaagatcctgttacgcgcacgcagcttcgcgcaatggctgctaaaacggtctgcccgccgcataaagtagagcttgaagccttgcttggcaagcaagcctacaaagaacaagtgctggcaaaacgtttaacaatgcttgaactgcttgaaaaatacccggcgtgtgaaatgagtttcagcgaatttatcgcccttctgccaagcatacgcccgcgctattactcgatttcttcatcacctcgtgtcgatgaaaaacaagcaagcatcacggtcagcgttgtctcaggaccggcgtggagcggatatggagaatataaaggaattgcgtcgaactatcttgccgagctgcaagaaggagatacgattacgtgctttatttccacaccgcagtcagagtttacgctgccaaaagaccctgaaacgccgcttatcatggtcggaccgggaacaggcgtcgcgccgtttagaggctttgtgcaggcgcgcaaacagctaaaagaacaaggacagtcacttggagaagcacatttatacttcggctgccgttcacctcatgaagactatctgtatcaagaagagcttgaaaacgcccaaagcgaaggcatcattacgcttcataccgctttttctcgcatgccgaatcagccgaaaacatacgttcagcacgtaatggaacaagacggcaagaaattgattgaacttcttgatcaaggagcgcacttctatatttgcggagacggaagccaaatggcacctgccgttgaagcaacgcttatgaaaagctatgctgacgttcaccaagtgagtgaagcagacgctcgcttatggctgcagcagctagaagaaaaaggccgatacgcaaaagacgtgtggctgggg

SEQ ID NO: 928 - protein, 1049 aa, synthetic construct
  REGION 1..1049: note = variant of P450 oxidase from Bacillus megaterium
MTIKEMPQPKTFGELKNLPLLNTDKPVQALMRIADELGEIFKFEAPGSVTRYLSSQRLIKEACDESRFDKNLSQALKFARDFVGDGLVTSWTHEPNWKKAHNILVPSFSQWAMGRYHAMMVDIAVQLVQKWERLNADEHIEVSEDMTRLTLDTIGLCLFNYRFNSFYRDTPHPFIVSVVRALDEVMNKLQRANPDDPAYDENKRQCQEDIKVMNDYVDKIIADRKARGEQSHDLLTQMLNGKDPETGEPLDDGNIRQQIITFLIAGHQTTSGLLSFALYFLVKNPRVLQKVAEEAARVLVDPVPSYKQVKQLKYVGMVLNEALRLWPVAPMFSLYAKEDTVLGGEYPLTKGDEVMVLVPQLHRDKTIWGDDVEEFRPERFENPSAIPQHAFKPFGNGQRACIGQQFALHSATLVLGMMLKHFDFEDHTNYELVIKESRTLKPEGFVVKAKSKGIPLGGIPSPSTEQSAKKVRKKAENAHNTPLLVLYGSNAGTAEGTARDLADIAMSKGFAPQVATLDSHAGNLPREGAVLIVTASYNGHPPDNAKQFVDWLDQASADEVKGVRYSVFGCGDKNWAGTYQKVPAFIDETLAAKGAENIADRGEADASDDFEGTYEEWRDHMWSDVAAYFGLDIENSEDNKSTLSLQFVDSAADMPLAKMHGAFSTNVVASKELQQPGSARSTRHLEIELPKEASYQEGDHLGVIPRYYEGIVNRVTARFGLSASQLIRLEAEEEKLAHLPLAKTVSVEELLQYVELQDPVTRTQLRAMAAKTVCPPHKVELEALLGKQAYKEQVLAKRLTMLELLEKYPACEMSFSEFIALLPSIRPRYYSISSSPRVDEKQASITVSVVSGPAWSGYGEYKGIASNYLAELQEGDTITCFISTPQSEFTLPKDPETPLIMVGPGTGVAPFRGFVQARKQLKEQGQSLGEAHLYFGCRSPHEDYLYQEELENAQSEGIITLHTAFSRMPNQPKTYVQHVMEQDGKKLIELLDQGAHFYICGDGSQMAPAVEATLMKSYADVHQVSEADARLWLQQLEEKGRYAKDVWLG

SEQ ID NO: 929 - DNA, 3147 bp, synthetic construct
  misc_feature 1..3147: note = variant of P450 oxidase from Bacillus megaterium
  source 1..3147: mol_type = other DNA
atgacaattaaggaaatgcctcagcctaagacgtttggagaacttaaaaatttaccgttattaaacacagataaaccggttcaagctttgatgcgtattgcggatgaattaggagaaatctttaaattcgaggcgcctggtagcgtaacgcgctatttatcaagtcagcgtctaattaaagaagcatgcgatgaatcacgctttgataaaaacttaagtcaagcgcttaaatttgcacgtgattttgttggagacgggctggttacaagctggacgcatgaaccgaattggaaaaaagcgcataatatcttagttccaagctttagtcagcatgcaatggggcgttatcatgcgatgatggtcgatatcgccgtgcagcttgttcaaaagtgggagcgtctaaatgcagatgagcatattgaagtatcggaagacatgacacgtttaacgcttgatacaattggtctttgcctgtttaactatcgctttaacagcttttaccgagatacgcctcatccatttattgtgagtgtggttcgtgcactggatgaagtaatgaacaagctgcagcgagcaaatccagactggccagcttatgatgaaaacaagcgccagtgtcaagaagatatcaaggtgatgaacgactatgtagataaaattattgcagatcgcaaagcaaggggtgaacaaagtcatgatttattaacgcagatgctaaacggaaaagatccagaaacgggtgagccgcttgatgacgggaacattcgtcagcaaattattacattcttaattgcgggacaccaaacgacaagtggtcttttatcatttgcgctgtatttcttagtgaaaaatccacgtgtattacaaaaagtagcagaagaagcagcacgagttctagtagatcctgttccaagctacaaacaagtcaaacagcttaaatatgttggcatggtcttaaacgaagcgctgcgcttatggccagtagcgcctatgttttccctatatgcaaaagaagatacggtgcttggaggagaatatcctttaacgaaaggcgacgaagtaatggttctggtgcctcagcttcaccgtgataaaacaatttggggagacgatgtggaggagttccgtccagagcgttttgaaaatccaagtgcgattccgcagcatgcgtttaaaccgtttggaaacggtcagcgtgcgtgtatcggtcagcagttcgctcttcatagtgcaacgctggtacttggtatgatgctaaaacactttgactttgaagatcatacaaactacgagctcgttattaaagaatcgcggacgttaaaacctgaaggctttgtggtaaaagcaaaatcgaaaggcattccgcttggcggtattccttcacctagcactgaacagtctgctaaaaaagtacgcaaaaaggcagaaaacgctcataatacgccgctgcttgtgctatacggttcaaatgcgggaacagctgaaggaacggcgcgtgatttagcagatattgcaatgagcaaaggatttgcaccgcaggtcgcaacgcttgattcacacgccggtaatcttccgcgcgaaggagctgtattaattgtaacggcgtcttataacggtcatccgcctgataacgcaaagcaatttgtcgactggttagaccaagcgtctgcggatgaagtaaaaggcgttcgctactccgtatttggatgcggcgataaaaattgggcggggacgtatcaaaaagtgcctgcttttatcgatgaaacgcttgccgctaaaggggcagaaaacatcgctgaccgcggtgaagcagatgcaagcgacgactttgaaggcacatatgaagaatggcgtgatcatatgtggagtgacgtagcagcctactttggtctcgacattgaaaacagtgaagataataaatctactctttcacttcaatttgtcgacagcgcggcggatatgccgcttgcgaaaatgcacggtgcgttttcaacgaacgtcgtagcaagcaaagaacttcaacagcctggcagtgcacgaagcacgcgacatcttgaaattgaacttccaaaagaagcttcttatcaagaaggagatcatttaggtgttattcctcgctattatgaaggaatagtaaaccgtgtaacagcaaggttcggcctaagcgcatcacagctgatccgtctggaagcagaagaagaaaaattagctcatttgccactcgctaaaacagtatccgtagaagagcttctgcaatacgtggagcttcaagatcctgttacgcgcacgcagcttcgcgcaatggctgctaaaacggtctgcccgccgcataaagtagagcttgaagccttgcttggcaagcaagcctacaaagaacaagtgctggcaaaacgtttaacaatgcttgaactgcttgaaaaatacccggcgtgtgaaatgagtttcagcgaatttatcgcccttctgccaagcatacgcccgcgctattactcgatttcttcatcacctcgtgtcgatgaaaaacaagcaagcatcacggtcagcgttgtctcaggaccggcgtggagcggatatggagaatataaaggaattgcgtcgaactatcttgccgagctgcaagaaggagatacgattacgtgctttatttccacaccgcagtcagagtttacgctgccaaaagaccctgaaacgccgcttatcatggtcggaccgggaacaggcgtcgcgccgtttagaggctttgtgcaggcgcgcaaacagctaaaagaacaaggacagtcacttggagaagcacatttatacttcggctgccgttcacctcatgaagactatctgtatcaagaagagcttgaaaacgcccaaagcgaaggcatcattacgcttcataccgctttttctcgcatgccgaatcagccgaaaacatacgttcagcacgtaatggaacaagacggcaagaaattgattgaacttcttgatcaaggagcgcacttctatatttgcggagacggaagccaaatggcacctgccgttgaagcaacgcttatgaaaagctatgctgacgttcaccaagtgagtgaagcagacgctcgcttatggctgcagcagctagaagaaaaaggccgatacgcaaaagacgtgtggctgggg

SEQ ID NO: 930 - protein, 1049 aa, synthetic construct
  REGION 1..1049: note = variant of P450 oxidase from Bacillus megaterium
MTIKEMPQPKTFGELKNLPLLNTDKPVQALMRIADELGEIFKFEAPGSVTRYLSSQRLIKEACDESRFDKNLSQALKFARDFVGDGLVTSWTHEPNWKKAHNILVPSFSQHAMGRYHAMMVDIAVQLVQKWERLNADEHIEVSEDMTRLTLDTIGLCLFNYRFNSFYRDTPHPFIVSVVRALDEVMNKLQRANPDWPAYDENKRQCQEDIKVMNDYVDKIIADRKARGEQSHDLLTQMLNGKDPETGEPLDDGNIRQQIITFLIAGHQTTSGLLSFALYFLVKNPRVLQKVAEEAARVLVDPVPSYKQVKQLKYVGMVLNEALRLWPVAPMFSLYAKEDTVLGGEYPLTKGDEVMVLVPQLHRDKTIWGDDVEEFRPERFENPSAIPQHAFKPFGNGQRACIGQQFALHSATLVLGMMLKHFDFEDHTNYELVIKESRTLKPEGFVVKAKSKGIPLGGIPSPSTEQSAKKVRKKAENAHNTPLLVLYGSNAGTAEGTARDLADIAMSKGFAPQVATLDSHAGNLPREGAVLIVTASYNGHPPDNAKQFVDWLDQASADEVKGVRYSVFGCGDKNWAGTYQKVPAFIDETLAAKGAENIADRGEADASDDFEGTYEEWRDHMWSDVAAYFGLDIENSEDNKSTLSLQFVDSAADMPLAKMHGAFSTNVVASKELQQPGSARSTRHLEIELPKEASYQEGDHLGVIPRYYEGIVNRVTARFGLSASQLIRLEAEEEKLAHLPLAKTVSVEELLQYVELQDPVTRTQLRAMAAKTVCPPHKVELEALLGKQAYKEQVLAKRLTMLELLEKYPACEMSFSEFIALLPSIRPRYYSISSSPRVDEKQASITVSVVSGPAWSGYGEYKGIASNYLAELQEGDTITCFISTPQSEFTLPKDPETPLIMVGPGTGVAPFRGFVQARKQLKEQGQSLGEAHLYFGCRSPHEDYLYQEELENAQSEGIITLHTAFSRMPNQPKTYVQHVMEQDGKKLIELLDQGAHFYICGDGSQMAPAVEATLMKSYADVHQVSEADARLWLQQLEEKGRYAKDVWLG

SEQ ID NO: 931 - DNA, 3147 bp, synthetic construct
  misc_feature 1..3147: note = variant of P450 oxidase from Bacillus megaterium
  source 1..3147: mol_type = other DNA
atgacaattaaggaaatgcctcagcctaagacgtttggagaacttaaaaatttaccgttattaaacacagataaaccggttcaagctttgatgcgtattgcggatgaattaggagaaatctttaaattcgaggcgcctggtagcgtaacgcgctatttatcaagtcagcgtctaattaaagaagcatgcgatgaatcacgctttgataaaaacttaagtcaagcgcttaaatttgcacgtgattttgttggagacgggctggttacaagctggacgcatgaaccgaattggaaaaaagcgcataatatcttagttccaagctttagtcagcatgcaatggggcgttatcatgcgatgatggtcgatatcgccgtgcagcttgttcaaaagtgggagcgtctaaatgcagatgagcatattgaagtatcggaagacatgacacgtttaacgcttgatacaattggtctttgcctgtttaactatcgctttaacagcttttaccgagatacgcctcatccatttattgtgagtgtggttcgtgcactggatgaagtaatgaacaagctgcagcgagcaaatccagacgacccaagttatgatgaaaacaagcgccagtgtcaagaagatatcaaggtgatgaacgactatgtagataaaattattgcagatcgcaaagcaaggggtgaacaaagtcatgatttattaacgcagatgctaaacggaaaagatccagaaacgggtgagccgcttgatgacgggaacattcgtcagcaaattattacattcttaattgcgggacaccaaacgacaagtggtcttttatcatttgcgctgtatttcttagtgaaaaatccacgtgtattacaaaaagtagcagaagaagcagcacgagttctagtagatcctgttccaagctacaaacaagtcaaacagcttaaatatgttggcatggtcttaaacgaagcgctgcgcttatggccagtagcgcctatgttttccctatatgcaaaagaagatacggtgcttggaggagaatatcctttaacgaaaggcgacgaagtaatggttctggtgcctcagcttcaccgtgataaaacaatttggggagacgatgtggaggagttccgtccagagcgttttgaaaatccaagtgcgattccgcagcatgcgtttaaaccgtttggaaacggtcagcgtgcgtgtatcggtcagcagttcgctcttcatagtgcaacgctggtacttggtatgatgctaaaacactttgactttgaagatcatacaaactacgagctcgttattaaagaatcgcggacgttaaaacctgaaggctttgtggtaaaagcaaaatcgaaaggcattccgcttggcggtattccttcacctagcactgaacagtctgctaaaaaagtacgcaaaaaggcagaaaacgctcataatacgccgctgcttgtgctatacggttcaaatgcgggaacagctgaaggaacggcgcgtgatttagcagatattgcaatgagcaaaggatttgcaccgcaggtcgcaacgcttgattcacacgccggtaatcttccgcgcgaaggagctgtattaattgtaacggcgtcttataacggtcatccgcctgataacgcaaagcaatttgtcgactggttagaccaagcgtctgcggatgaagtaaaaggcgttcgctactccgtatttggatgcggcgataaaaattgggcggggacgtatcaaaaagtgcctgcttttatcgatgaaacgcttgccgctaaaggggcagaaaacatcgctgaccgcggtgaagcagatgcaagcgacgactttgaaggcacatatgaagaatggcgtgatcatatgtggagtgacgtagcagcctactttggtctcgacattgaaaacagtgaagataataaatctactctttcacttcaatttgtcgacagcgcggcggatatgccgcttgcgaaaatgcacggtgcgttttcaacgaacgtcgtagcaagcaaagaacttcaacagcctggcagtgcacgaagcacgcgacatcttgaaattgaacttccaaaagaagcttcttatcaagaaggagatcatttaggtgttattcctcgctattatgaaggaatagtaaaccgtgtaacagcaaggttcggcctaagcgcatcacagctgatccgtctggaagcagaagaagaaaaattagctcatttgccactcgctaaaacagtatccgtagaagagcttctgcaatacgtggagcttcaagatcctgttacgcgcacgcagcttcgcgcaatggctgctaaaacggtctgcccgccgcataaagtagagcttgaagccttgcttggcaagcaagcctacaaagaacaagtgctggcaaaacgtttaacaatgcttgaactgcttgaaaaatacccggcgtgtgaaatgagtttcagcgaatttatcgcccttctgccaagcatacgcccgcgctattactcgatttcttcatcacctcgtgtcgatgaaaaacaagcaagcatcacggtcagcgttgtctcaggaccggcgtggagcggatatggagaatataaaggaattgcgtcgaactatcttgccgagctgcaagaaggagatacgattacgtgctttatttccacaccgcagtcagagtttacgctgccaaaagaccctgaaacgccgcttatcatggtcggaccgggaacaggcgtcgcgccgtttagaggctttgtgcaggcgcgcaaacagctaaaagaacaaggacagtcacttggagaagcacatttatacttcggctgccgttcacctcatgaagactatctgtatcaagaagagcttgaaaacgcccaaagcgaaggcatcattacgcttcataccgctttttctcgcatgccgaatcagccgaaaacatacgttcagcacgtaatggaacaagacggcaagaaattgattgaacttcttgatcaaggagcgcacttctatatttgcggagacggaagccaaatggcacctgccgttgaagcaacgcttatgaaaagctatgctgacgttcaccaagtgagtgaagcagacgctcgcttatggctgcagcagctagaagaaaaaggccgatacgcaaaagacgtgtggctgggg

SEQ ID NO: 932 - protein, 1049 aa, synthetic construct
  REGION 1..1049: note = variant of P450 oxidase from Bacillus megaterium
MTIKEMPQPKTFGELKNLPLLNTDKPVQALMRIADELGEIFKFEAPGSVTRYLSSQRLIKEACDESRFDKNLSQALKFARDFVGDGLVTSWTHEPNWKKAHNILVPSFSQHAMGRYHAMMVDIAVQLVQKWERLNADEHIEVSEDMTRLTLDTIGLCLFNYRFNSFYRDTPHPFIVSVVRALDEVMNKLQRANPDDPSYDENKRQCQEDIKVMNDYVDKIIADRKARGEQSHDLLTQMLNGKDPETGEPLDDGNIRQQIITFLIAGHQTTSGLLSFALYFLVKNPRVLQKVAEEAARVLVDPVPSYKQVKQLKYVGMVLNEALRLWPVAPMFSLYAKEDTVLGGEYPLTKGDEVMVLVPQLHRDKTIWGDDVEEFRPERFENPSAIPQHAFKPFGNGQRACIGQQFALHSATLVLGMMLKHFDFEDHTNYELVIKESRTLKPEGFVVKAKSKGIPLGGIPSPSTEQSAKKVRKKAENAHNTPLLVLYGSNAGTAEGTARDLADIAMSKGFAPQVATLDSHAGNLPREGAVLIVTASYNGHPPDNAKQFVDWLDQASADEVKGVRYSVFGCGDKNWAGTYQKVPAFIDETLAAKGAENIADRGEADASDDFEGTYEEWRDHMWSDVAAYFGLDIENSEDNKSTLSLQFVDSAADMPLAKMHGAFSTNVVASKELQQPGSARSTRHLEIELPKEASYQEGDHLGVIPRYYEGIVNRVTARFGLSASQLIRLEAEEEKLAHLPLAKTVSVEELLQYVELQDPVTRTQLRAMAAKTVCPPHKVELEALLGKQAYKEQVLAKRLTMLELLEKYPACEMSFSEFIALLPSIRPRYYSISSSPRVDEKQASITVSVVSGPAWSGYGEYKGIASNYLAELQEGDTITCFISTPQSEFTLPKDPETPLIMVGPGTGVAPFRGFVQARKQLKEQGQSLGEAHLYFGCRSPHEDYLYQEELENAQSEGIITLHTAFSRMPNQPKTYVQHVMEQDGKKLIELLDQGAHFYICGDGSQMAPAVEATLMKSYADVHQVSEADARLWLQQLEEKGRYAKDVWLG

SEQ ID NO: 933 - DNA, 3147 bp, synthetic construct
  misc_feature 1..3147: note = variant of P450 oxidase from Bacillus megaterium
  source 1..3147: mol_type = other DNA
atgacaattaaggaaatgcctcagcctaagacgtttggagaacttaaaaatttaccgttattaaacacagataaaccggttcaagctttgatgcgtattgcggatgaattaggagaaatctttaaattcgaggcgcctggtagcgtaacgcgctatttatcaagtcagcgtctaattaaagaagcatgcgatgaatcacgctttgataaaaacttaagtcaagcgcttaaatttgcacgtgattttgttggagacgggctggttacaagctggacgcatgaaccgaattggaaaaaagcgcataatatcttagttccaagctttagtcagcatgcaatggggcgttatcatgcgatgatggtcgatatcgccgtgcagcttgttcaaaagtgggagcgtctaaatgcagatgagcatattgaagtatcggaagacatgacacgtttaacgcttgatacaattggtctttgcctgtttaactatcgctttaacagcttttaccgagatacgcctcatccatttattgtgagtgtggttcgtgcactggatgaagtaatgaacaagctgcagcgagcaaatccagacgacccagcttatgatgaacagaagcgccagtgtcaagaagatatcaaggtgatgaacgactatgtagataaaattattgcagatcgcaaagcaaggggtgaacaaagtcatgatttattaacgcagatgctaaacggaaaagatccagaaacgggtgagccgcttgatgacgggaacattcgtcagcaaattattacattcttaattgcgggacaccaaacgacaagtggtcttttatcatttgcgctgtatttcttagtgaaaaatccacgtgtattacaaaaagtagcagaagaagcagcacgagttctagtagatcctgttccaagctacaaacaagtcaaacagcttaaatatgttggcatggtcttaaacgaagcgctgcgcttatggccagtagcgcctatgttttccctatatgcaaaagaagatacggtgcttggaggagaatatcctttaacgaaaggcgacgaagtaatggttctggtgcctcagcttcaccgtgataaaacaatttggggagacgatgtggaggagttccgtccagagcgttttgaaaatccaagtgcgattccgcagcatgcgtttaaaccgtttggaaacggtcagcgtgcgtgtatcggtcagcagttcgctcttcatagtgcaacgctggtacttggtatgatgctaaaacactttgactttgaagatcatacaaactacgagctcgttattaaagaatcgcggacgttaaaacctgaaggctttgtggtaaaagcaaaatcgaaaggcattccgcttggcggtattccttcacctagcactgaacagtctgctaaaaaagtacgcaaaaaggcagaaaacgctcataatacgccgctgcttgtgctatacggttcaaatgcgggaacagctgaaggaacggcgcgtgatttagcagatattgcaatgagcaaaggatttgcaccgcaggtcgcaacgcttgattcacacgccggtaatcttccgcgcgaaggagctgtattaattgtaacggcgtcttataacggtcatccgcctgataacgcaaagcaatttgtcgactggttagaccaagcgtctgcggatgaagtaaaaggcgttcgctactccgtatttggatgcggcgataaaaattgggcggggacgtatcaaaaagtgcctgcttttatcgatgaaacgcttgccgctaaaggggcagaaaacatcgctgaccgcggtgaagcagatgcaagcgacgactttgaaggcacatatgaagaatggcgtgatcatatgtggagtgacgtagcagcctactttggtctcgacattgaaaacagtgaagataataaatctactctttcacttcaatttgtcgacagcgcggcggatatgccgcttgcgaaaatgcacggtgcgttttcaacgaacgtcgtagcaagcaaagaacttcaacagcctggcagtgcacgaagcacgcgacatcttgaaattgaacttccaaaagaagcttcttatcaagaaggagatcatttaggtgttattcctcgctattatgaaggaatagtaaaccgtgtaacagcaaggttcggcctaagcgcatcacagctgatccgtctggaagcagaagaagaaaaattagctcatttgccactcgctaaaacagtatccgtagaagagcttctgcaatacgtggagcttcaagatcctgttacgcgcacgcagcttcgcgcaatggctgctaaaacggtctgcccgccgcataaagtagagcttgaagccttgcttggcaagcaagcctacaaagaacaagtgctggcaaaacgtttaacaatgcttgaactgcttgaaaaatacccggcgtgtgaaatgagtttcagcgaatttatcgcccttctgccaagcatacgcccgcgctattactcgatttcttcatcacctcgtgtcgatgaaaaacaagcaagcatcacggtcagcgttgtctcaggaccggcgtggagcggatatggagaatataaaggaattgcgtcgaactatcttgccgagctgcaagaaggagatacgattacgtgctttatttccacaccgcagtcagagtttacgctgccaaaagaccctgaaacgccgcttatcatggtcggaccgggaacaggcgtcgcgccgtttagaggctttgtgcaggcgcgcaaacagctaaaagaacaaggacagtcacttggagaagcacatttatacttcggctgccgttcacctcatgaagactatctgtatcaagaagagcttgaaaacgcccaaagcgaaggcatcattacgcttcataccgctttttctcgcatgccgaatcagccgaaaacatacgttcagcacgtaatggaacaagacggcaagaaattgattgaacttcttgatcaaggagcgcacttctatatttgcggagacggaagccaaatggcacctgccgttgaagcaacgcttatgaaaagctatgctgacgttcaccaagtgagtgaagcagacgctcgcttatggctgcagcagctagaagaaaaaggccgatacgcaaaagacgtgtggctgggg

SEQ ID NO: 934 - protein, 1049 aa, synthetic construct
  REGION 1..1049: note = variant of P450 oxidase from Bacillus megaterium
MTIKEMPQPKTFGELKNLPLLNTDKPVQALMRIADELGEIFKFEAPGSVTRYLSSQRLIKEACDESRFDKNLSQALKFARDFVGDGLVTSWTHEPNWKKAHNILVPSFSQHAMGRYHAMMVDIAVQLVQKWERLNADEHIEVSEDMTRLTLDTIGLCLFNYRFNSFYRDTPHPFIVSVVRALDEVMNKLQRANPDDPAYDEQKRQCQEDIKVMNDYVDKIIADRKARGEQSHDLLTQMLNGKDPETGEPLDDGNIRQQIITFLIAGHQTTSGLLSFALYFLVKNPRVLQKVAEEAARVLVDPVPSYKQVKQLKYVGMVLNEALRLWPVAPMFSLYAKEDTVLGGEYPLTKGDEVMVLVPQLHRDKTIWGDDVEEFRPERFENPSAIPQHAFKPFGNGQRACIGQQFALHSATLVLGMMLKHFDFEDHTNYELVIKESRTLKPEGFVVKAKSKGIPLGGIPSPSTEQSAKKVRKKAENAHNTPLLVLYGSNAGTAEGTARDLADIAMSKGFAPQVATLDSHAGNLPREGAVLIVTASYNGHPPDNAKQFVDWLDQASADEVKGVRYSVFGCGDKNWAGTYQKVPAFIDETLAAKGAENIADRGEADASDDFEGTYEEWRDHMWSDVAAYFGLDIENSEDNKSTLSLQFVDSAADMPLAKMHGAFSTNVVASKELQQPGSARSTRHLEIELPKEASYQEGDHLGVIPRYYEGIVNRVTARFGLSASQLIRLEAEEEKLAHLPLAKTVSVEELLQYVELQDPVTRTQLRAMAAKTVCPPHKVELEALLGKQAYKEQVLAKRLTMLELLEKYPACEMSFSEFIALLPSIRPRYYSISSSPRVDEKQASITVSVVSGPAWSGYGEYKGIASNYLAELQEGDTITCFISTPQSEFTLPKDPETPLIMVGPGTGVAPFRGFVQARKQLKEQGQSLGEAHLYFGCRSPHEDYLYQEELENAQSEGIITLHTAFSRMPNQPKTYVQHVMEQDGKKLIELLDQGAHFYICGDGSQMAPAVEATLMKSYADVHQVSEADARLWLQQLEEKGRYAKDVWLG

SEQ ID NO: 935 - DNA, 3147 bp, synthetic construct
  misc_feature 1..3147: note = variant of P450 oxidase from Bacillus megaterium
  source 1..3147: mol_type = other DNA
atgacaattaaggaaatgcctcagcctaagacgtttggagaacttaaaaatttaccgttattaaatacagataaaccggttcaagctttgatgcgtattgcggatgaattaggagaaatctttaaattcgaggcgcctggtagcgtaacgcgctatttatcaagtcagcgtctaattaaagaagcatgcgatgaatcacgctttgataaaaacttaagtcaagggcttaaatttgcacgtgattttgttggagacgggctggttacaagctggacgcatgaaccgaattggaaaaaagcgcataatatcttagttccaagctttagtcagcatgcaatggggcgttatcatgcgatgatggtcgatatcgccgtgcagcttgttcaaaagtgggagcgtctaaatgcagatgagcatattgaagtatcggaagacatgacacgtttaacgcttgatacaattggtctttgcctgtttaactatcgctttaacagcttttaccgagatacgcctcatccatttattgtgagtgtggttcgtgcactggatgaagtaatgaacaagctgcagcgagcaaatccagacgacccagcttatgatgaaaacaagcgccagtgtcaagaagatatcaaggtgatgaacgactatgtagataaaattattgcagatcgcaaagcaaggggtgaacaaagtcatgatttattaacgcagatgctaaacggaaaagatccagaaacgggtgagccgcttgatgacgggaacattcgtcagcaaattattacattcttaattgcgggacaccaaacgacaagtggtcttttatcatttgcgctgtatttcttagtgaaaaatccacgtgtattacaaaaagtagcagaagaagcagcacgagttctagtagatcctgttccaagctacaaacaagtcaaacagcttaaatatgttggcatggtcttaaacgaagcgctgcgcttatggccagtagcgcctatgttttccctatatgcaaaagaagatacggtgcttggaggagaatatcctttaacgaaaggcgacgaagtaatggttctggtgcctcagcttcaccgtgataaaacaatttggggagacgatgtggaggagttccgtccagagcgttttgaaaatccaagtgcgattccgcagcatgcgtttaaaccgtttggaaacggtcagcgtgcgtgtatcggtcagcagttcgctcttcatagtgcaacgctggtacttggtatgatgctaaaacactttgactttgaagatcatacaaactacgagctcgttattaaagaatcgcggacgttaaaacctgaaggctttgtggtaaaagcaaaatcgaaaggcattccgcttggcggtattccttcacctagcactgaacagtctgctaaaaaagtacgcaaaaaggcagaaaacgctcataatacgccgctgcttgtgctatacggttcaaatgcgggaacagctgaaggaacggcgcgtgatttagcagatattgcaatgagcaaaggatttgcaccgcaggtcgcaacgcttgattcacacgccggtaatcttccgcgcgaaggagctgtattaattgtaacggcgtcttataacggtcatccgcctgataacgcaaagcaatttgtcgattggttagaccaagcgtctgcggatgaagtaaaaggcgttcgctactccgtatttggatgcggcgataaaaattgggcggggacgtatcaaaaagtgcctgcttttatcgatgaaacgcttgccgctaaaggggcagaaaacatcgctgaccgcggtgaagcagatgcaagcgacgactttgaaggcgcgtatgaagaatggcgtgatcatatgtggagtgacgtagcagcctactttggtctcgacattgaaaacagtgaagataataaatctactctttcacttcaatttgtcgacagcgcggcggatatgccgcttgcgaaaatgcacggtgcgttttcaacgaacgtcgtagcaagcaaagaacttcaacagcctggcagtgcacgaagcacgcgacatcttgaaattgaacttccaaaagaagcttcttatcaagaaggagatcatttaggtgttattcctcgctattatgaaggaatagtaaaccgtgtaacagccaggttcggcctaagcgcatcacagctgatccgtctggaagcagaagaagaaaaattagctcatttgccactcgctaaaacagtatccgtagaagagcttctgcaatacgtggagcttcaagatcctgttacgcgcacgcagcttcgcgcaatggctgctaaaacggtctgcccgccgcataaagttgagcttgaagccttgcttggcaagcaagcctacaaagaacaagtgctggcaaaacgtttaacaatgcttgaactgcttgaaaaatacccggcgtgtgaaatgagtttcagcgaatttatcgcccttctgccaagcataggtccgcgctattactcgatttcttcatcacctcgtgtcgatgaaaaacaagcaagcatcacggtcagcgttgtctcaggaccggcgtggagcggatatggagaatataaaggaattgcgtcgaactatcttgctgagctgcaagaaggagatacgattacgtgctttatttccacaccgcagtcagagtttacgctgccaaaagaccctgaaacgccgcttatcatggtcggaccgggaacaggcgtcgcgccgtttagaggctttgtgcaggcgcgcaaacagctaaaagaacaaggacagtcacttggagaagcacatttatacttcggctgccgttcacctcatgaagactatctgtatcaagaagagcttgaaaacgcccaaagcgaaggcatcattacgcttcataccgctttttctcgcatgccgaatcagccgaaaacatacgttcagcacgtaatggaacaagacggcaagaaattgattgaacttcttgatcaaggagcgcacttctatatttgcggagacggaattcaaatggcacctgccgttgaagcaacgcttatgaaaagctatgctgacgttcaccaagtgagtgaagcagacgctcgcttatggctgcagcagctagaagaaaaaggccgatacgcaaaagacgtgtggctgggg

SEQ ID NO: 936 - protein, 1049 aa, synthetic construct
  REGION 1..1049: note = variant of P450 oxidase from Bacillus megaterium
MTIKEMPQPKTFGELKNLPLLNTDKPVQALMRIADELGEIFKFEAPGSVTRYLSSQRLIKEACDESRFDKNLSQGLKFARDFVGDGLVTSWTHEPNWKKAHNILVPSFSQHAMGRYHAMMVDIAVQLVQKWERLNADEHIEVSEDMTRLTLDTIGLCLFNYRFNSFYRDTPHPFIVSVVRALDEVMNKLQRANPDDPAYDENKRQCQEDIKVMNDYVDKIIADRKARGEQSHDLLTQMLNGKDPETGEPLDDGNIRQQIITFLIAGHQTTSGLLSFALYFLVKNPRVLQKVAEEAARVLVDPVPSYKQVKQLKYVGMVLNEALRLWPVAPMFSLYAKEDTVLGGEYPLTKGDEVMVLVPQLHRDKTIWGDDVEEFRPERFENPSAIPQHAFKPFGNGQRACIGQQFALHSATLVLGMMLKHFDFEDHTNYELVIKESRTLKPEGFVVKAKSKGIPLGGIPSPSTEQSAKKVRKKAENAHNTPLLVLYGSNAGTAEGTARDLADIAMSKGFAPQVATLDSHAGNLPREGAVLIVTASYNGHPPDNAKQFVDWLDQASADEVKGVRYSVFGCGDKNWAGTYQKVPAFIDETLAAKGAENIADRGEADASDDFEGAYEEWRDHMWSDVAAYFGLDIENSEDNKSTLSLQFVDSAADMPLAKMHGAFSTNVVASKELQQPGSARSTRHLEIELPKEASYQEGDHLGVIPRYYEGIVNRVTARFGLSASQLIRLEAEEEKLAHLPLAKTVSVEELLQYVELQDPVTRTQLRAMAAKTVCPPHKVELEALLGKQAYKEQVLAKRLTMLELLEKYPACEMSFSEFIALLPSIGPRYYSISSSPRVDEKQASITVSVVSGPAWSGYGEYKGIASNYLAELQEGDTITCFISTPQSEFTLPKDPETPLIMVGPGTGVAPFRGFVQARKQLKEQGQSLGEAHLYFGCRSPHEDYLYQEELENAQSEGIITLHTAFSRMPNQPKTYVQHVMEQDGKKLIELLDQGAHFYICGDGIQMAPAVEATLMKSYADVHQVSEADARLWLQQLEEKGRYAKDVWLG

SEQ ID NO: 937 - DNA, 3147 bp, synthetic construct
  misc_feature 1..3147: note = variant of P450 oxidase from Bacillus megaterium
  source 1..3147: mol_type = other DNA
atgacaattaaggaaatgcctcagcctaagacgtttggagaacttaaaaatttaccgttattaaacacagataaaccggttcaagctttgatgcgtattgcggatgaattaggagaaatctttaaattcgaggcgcctggtagcgtaacgcgctatttatcaagtcagcgtctaattaaagaagcatgcgatgaatcacgctttgataaaaacttaagtcaagggcttaaatttgcacgtgattttgttggagacgggctggttacaagctggacgcatgaaccgaattggaaaaaagcgcataatatcttagttccaagctttagtcagcatgcaatggggcgttatcatgcgatgatggtcgatatcgccgtgcagcttgttcaaaagtgggagcgtctaaatgcagatgagcatattgaagtatcggaagacatgacacgtttaacgcttgatacaattggtctttgcctgtttaactatcgctttaacagcttttaccgagatacgcctcatccatttattgtgagtgtggttcgtgcactggatgaagtaatgaacaagctgcagcgagcaaatccagacgacccagcttatgatgaaaacaagcgccagtgtcaagaagatatcaaggtgatgaacgactatgtagataaaattattgcagatcgcaaagcaaggggtgaacaaagtcatgatttattaacgcagatgctaaacggaaaagatccagaaacgggtgagccgcttgatgacgggaacattcgtcagcaaattattacattcttaattgcgggacaccaaacgacaagtggtcttttatcatttgcgctgtatttcttagtgaaaaatccacgtgtattacaaaaagtagcagaagaagcagcacgagttctagtagatcctgttccaagctacaaacaagtcaaacagcttaaatatgttggcatggtcttaaacgaagcgctgcgcttatggccagtagcgcctatgttttccctatatgcaaaagaagatacggtgcttggaggagaatatcctttaacgaaaggcgacgaagtaatggttctggtgcctcagcttcaccgtgataaaacaatttggggagacgatgtggaggagttccgtccagagcgttttgaaaatccaagtgcgattccgcagcatgcgtttaaaccgtttggaaacggtcagcgtgcgtgtatcggtcagcagttcgctcttcatagtgcaacgctggtacttggtatgatgctaaaacactttgactttgaagatcatacaaactacgagctcgttattaaagaatcgcggacgttaaaacctgaaggctttgtggtaaaagcaaaatcgaaaggcattccgcttggcggtattccttcacctagcactgaacagtctgctaaaaaagtacgcaaaaaggcagaaaacgctcataatacgccgctgcttgtgctatacggttcaaatgcgggaacagctgaaggaacggcgcgtgatttagcagatattgcaatgagcaaaggatttgcaccgcaggtcgcaacgcttgattcacacgccggtaatcttccgcgcgaaggagctgtattaattgtaacggcgtcttataacggtcatccgcctgataacgcaaagcaatttgtcgattggttagaccaagcgtctgcggatgaagtaaaaggcgttcgctactccgtatttggatgcggcgataaaaattgggcggggacgtatcaaaaagtgcctgcttttatcgatgaaacgcttgccgctaaaggggcagaaaacatcgctgaccgcggtgaagcagatgcaagcgacgactttgaaggcgcgtatgaagaatggcgtgatcatatgtggagtgacgtagcagcctactttggtctcgacattgaaaacagtgaagataataaatctactctttcacttcaatttgtcgacagcgcggcggatatgccgcttgcgaaaatgcacggtgcgttttcaacgaacgtcgtagcaagcaaagaacttcaacagcctggcagtgcacgaagcacgcgacatcttgaaattgaacttccaaaagaagcttcttatcaagaaggagatcatttaggtgttattcctcgctattatgaaggaatagtaaaccgtgtaacagcaaggttcggcctaagcgcatcacagctgatccgtctggaagcagaagaagaaaaattagctcatttgccactcgctaaaacagtatccgtagaagagcttctgcaatacgtggagcttcaagatcctgttacgcgcacgcagcttcgcgcaatggctgctaaaacggtctgcccgccgcataaatttgagcttgaagccttgcttggcaagcaagcctacaaagaacaagtgctggcaaaacgtttaacaatgcttgaactgcttgaaaaatacccggcgtgtgaaatgagtttcagcgaatttatcgcccttctgccaagcatacgtccgcgctattactcgatttcttcatcacctcgtgtcgatgaaaaacaagcaagcatcacggtcagcgttgtctcaggaccggcgtggagcggatatggagaatataaaggaattgcgtcgaactatcttgccgagctgcaagaaggagatacgattacgtgctttatttccacaccgcagtcagagtttacgctgccaaaagaccctgaaacgccgcttatcatggtcggaccgggaacaggcgtcgcgccgtttagaggctttgtgcaggcgcgcaaacagctaaaagaacaaggacagtcacttggagaagcacatttatacttcggctgccgttcacctcatgaagactatctgtatcaagaagagcttgaaaacgcccaaagcgaaggcatcattacgcttcataccgctttttctcgcatgccgaatcagccgaaaacatacgttcagcacgtaatggaacaagacggcaagaaattgattgaacttcttgatcaaggagcgcacttctatatttgcggagacggaattcaaatggcacctgccgttgaagcaacgcttatgaaaagctatgctgacgttcaccaagtgagtgaagcagacgctcgcttatggctgcagcagctagaagaaaaaggccgatacgcaaaagacgtgtggctgggg

SEQ ID NO: 938 - protein, 1049 aa, synthetic construct
  REGION 1..1049: note = variant of P450 oxidase from Bacillus megaterium
MTIKEMPQPKTFGELKNLPLLNTDKPVQALMRIADELGEIFKFEAPGSVTRYLSSQRLIKEACDESRFDKNLSQGLKFARDFVGDGLVTSWTHEPNWKKAHNILVPSFSQHAMGRYHAMMVDIAVQLVQKWERLNADEHIEVSEDMTRLTLDTIGLCLFNYRFNSFYRDTPHPFIVSVVRALDEVMNKLQRANPDDPAYDENKRQCQEDIKVMNDYVDKIIADRKARGEQSHDLLTQMLNGKDPETGEPLDDGNIRQQIITFLIAGHQTTSGLLSFALYFLVKNPRVLQKVAEEAARVLVDPVPSYKQVKQLKYVGMVLNEALRLWPVAPMFSLYAKEDTVLGGEYPLTKGDEVMVLVPQLHRDKTIWGDDVEEFRPERFENPSAIPQHAFKPFGNGQRACIGQQFALHSATLVLGMMLKHFDFEDHTNYELVIKESRTLKPEGFVVKAKSKGIPLGGIPSPSTEQSAKKVRKKAENAHNTPLLVLYGSNAGTAEGTARDLADIAMSKGFAPQVATLDSHAGNLPREGAVLIVTASYNGHPPDNAKQFVDWLDQASADEVKGVRYSVFGCGDKNWAGTYQKVPAFIDETLAAKGAENIADRGEADASDDFEGAYEEWRDHMWSDVAAYFGLDIENSEDNKSTLSLQFVDSAADMPLAKMHGAFSTNVVASKELQQPGSARSTRHLEIELPKEASYQEGDHLGVIPRYYEGIVNRVTARFGLSASQLIRLEAEEEKLAHLPLAKTVSVEELLQYVELQDPVTRTQLRAMAAKTVCPPHKFELEALLGKQAYKEQVLAKRLTMLELLEKYPACEMSFSEFIALLPSIRPRYYSISSSPRVDEKQASITVSVVSGPAWSGYGEYKGIASNYLAELQEGDTITCFISTPQSEFTLPKDPETPLIMVGPGTGVAPFRGFVQARKQLKEQGQSLGEAHLYFGCRSPHEDYLYQEELENAQSEGIITLHTAFSRMPNQPKTYVQHVMEQDGKKLIELLDQGAHFYICGDGIQMAPAVEATLMKSYADVHQVSEADARLWLQQLEEKGRYAKDVWLG

SEQ ID NO: 939 - DNA, 3147 bp, synthetic construct
  misc_feature 1..3147: note = variant of P450 oxidase from Bacillus megaterium
  source 1..3147: mol_type = other DNA
atgacaattaaggaaatgcctcagcctaagacgtttggagaacttaaaaatttaccgttattaaatacagataaaccggttcaagctttgatgcgtattgcggatgaattaggagaaatctttaaattcgaggcgcctggtagcgtaacgcgctatttatcaagtcagcgtctaattaaagaagcatgcgatgaatcacgctttgataaaaacttaagtcaagggcttaaatttgcacgtgattttgttggagacgggctggttacaagctggacgcatgaaccgaattggaaaaaagcgcataatatcttagttccaagctttagtcagcatgcaatggggcgttatcatgcgatgatggtcgatatcgccgtgcagcttgttcaaaagtgggagcgtctaaatgcagatgagcatattgaagtatcggaagacatgacacgtttaacgcttgatacaattggtctttgcctgtttaactatcgctttaacagcttttaccgagatacgcctcatccatttattgtgagtgtggttcgtgcactggatgaagtaatgaacaagctgcagcgagcaaatccagacgacccagcttatgatgaaaacaagcgccagtgtcaagaagatatcaaggtgatgaacgactatgtagataaaattattgcagatcgcaaagcaaggggtgaacaaagtcatgatttattaacgcagatgctaaacggaaaagatccagaaacgggtgagccgcttgatgacgggaacattcgtcagcaaattattacattcttaattgcgggacaccaaacgacaagtggtcttttatcatttgcgctgtatttcttagtgaaaaatccacgtgtattacaaaaagtagcagaagaagcagcacgagttctagtagatcctgttccaagctacaaacaagtcaaacagcttaaatatgttggcatggtcttaaacgaagcgctgcgcttatggccagtagcgcctatgttttccctatatgcaaaagaagatacggtgcttggaggagaatatcctttaacgaaaggcgacgaagtaatggttctggtgcctcagcttcaccgtgataaaacaatttggggagacgatgtggaggagttccgtccagagcgttttgaaaatccaagtgcgattccgcagcatgcgtttaaaccgtttggaaacggtcagcgtgcgtgtatcggtcagcagttcgctcttcatagtgcaacgctggtacttggtatgatgctaaaacactttgactttgaagatcatacaaactacgagctcgttattaaagaatcgcggacgttaaaacctgaaggctttgtggtaaaagcaaaatcgaaaggcattccgcttggcggtattccttcacctagcactgaacagtctgctaaaaaagtacgcaaaaaggcagaaaacgctcataatacgccgctgcttgtgctatacggttcaaatgcgggaacagctgaaggaacggcgcgtgatttagcagatattgcaatgagcaaaggatttgcaccgcaggtcgcaacgcttgattcacacgccggtaatcttccgcgcgaaggagctgtattaattgtaacggcgtcttataacggtcatccgcctgataacgcaaagcaatttgtcacttggttagaccaagcgtctgcggatgaagtaaaaggcgttcgctactccgtatttggatgcggcgataaaaattgggcggggacgtatcaaaaagtgcctgcttttatcgatgaaacgcttgccgctaaaggggcagaaaacatcgctgaccgcggtgaagcagatgcaagcgacgactttgaaggcgcgtatgaactgtggcgtgatcatatgtggagtgacgtagcagcctactttggtctcgacattgaaaacagtgaagataataaatctactctttcacttcaatttgtcgacagcgcggcggatatgccgcttgcgaaaatgcacggtgcgttttcaacgaacgtcgtagcaagcaaagaacttcaacagcctggcagtgcacgaagcacgcgacatcttgaaattgaacttccaaaagaagcttcttatcaagaaggagatcatttaggtgttattcctcgctattatgaaggaatagtaaaccgtgtaacaattaggttcggcctaagcgcatcacagctgatccgtctggaagcagaagaagaaaaattagctcatttgccactcgctaaaacagtatccgtagaagagcttctgcaatacgtggagcttcaagatcctgttacgcgcacgcagcttcgcgcaatggctgctaaaacggtctgcccgccgcataaatttgagcttgaagccttgcttggcaagcaagcctacaaagaacaagtgctggcaaaacgtttaacaatgcttgaactgcttgaaaaatacccggcgtgtgaaatgagtttcagcgaatttatcgcccttctgccaagcatacgtccgcgctattactcgatttcttcatcacctcgtgtcgatgaaaaacaagcaagcatcacggtcagcgttgtctcaggaccggcgtggagcggatatggagaatataaaggaattgcgtcgaactatcttgccgagctgcaagaaggagatacgattacgtgctttatttccacaccgcagtcagagtttacgctgccaaaagaccctgaaacgccgcttatcatggtcggaccgggaacaggcgtcgcgccgtttagaggctttgtgcaggcgcgcaaacagctaaaagaacaaggacagtcacttggagaagcacatttatacttcggctgccgttcacctcatgaagactatctgtatcaagaagagcttgaaaacgcccaaagcgaaggcatcattacgcttcataccgctttttctcgcatgccgaatcagccgaaaacatacgttcagcacgtaatggaacaagacggcaagaaattgattgaacttcttgatcaaggagcgcacttctatatttgcggagacggaagtcaaatggcacctgccgttgaagcaacgcttatgaaaagctatgctgacgttcaccaagtgagtgaagcagacgctcgcttatggctgcagcagctagaagaaaaaggccgatacgcaaaagacgtgtggctgggg

SEQ ID NO: 940 - protein, 1049 aa, synthetic construct
  REGION 1..1049: note = variant of P450 oxidase from Bacillus megaterium
MTIKEMPQPKTFGELKNLPLLNTDKPVQALMRIADELGEIFKFEAPGSVTRYLSSQRLIKEACDESRFDKNLSQGLKFARDFVGDGLVTSWTHEPNWKKAHNILVPSFSQHAMGRYHAMMVDIAVQLVQKWERLNADEHIEVSEDMTRLTLDTIGLCLFNYRFNSFYRDTPHPFIVSVVRALDEVMNKLQRANPDDPAYDENKRQCQEDIKVMNDYVDKIIADRKARGEQSHDLLTQMLNGKDPETGEPLDDGNIRQQIITFLIAGHQTTSGLLSFALYFLVKNPRVLQKVAEEAARVLVDPVPSYKQVKQLKYVGMVLNEALRLWPVAPMFSLYAKEDTVLGGEYPLTKGDEVMVLVPQLHRDKTIWGDDVEEFRPERFENPSAIPQHAFKPFGNGQRACIGQQFALHSATLVLGMMLKHFDFEDHTNYELVIKESRTLKPEGFVVKAKSKGIPLGGIPSPSTEQSAKKVRKKAENAHNTPLLVLYGSNAGTAEGTARDLADIAMSKGFAPQVATLDSHAGNLPREGAVLIVTASYNGHPPDNAKQFVTWLDQASADEVKGVRYSVFGCGDKNWAGTYQKVPAFIDETLAAKGAENIADRGEADASDDFEGAYELWRDHMWSDVAAYFGLDIENSEDNKSTLSLQFVDSAADMPLAKMHGAFSTNVVASKELQQPGSARSTRHLEIELPKEASYQEGDHLGVIPRYYEGIVNRVTIRFGLSASQLIRLEAEEEKLAHLPLAKTVSVEELLQYVELQDPVTRTQLRAMAAKTVCPPHKFELEALLGKQAYKEQVLAKRLTMLELLEKYPACEMSFSEFIALLPSIRPRYYSISSSPRVDEKQASITVSVVSGPAWSGYGEYKGIASNYLAELQEGDTITCFISTPQSEFTLPKDPETPLIMVGPGTGVAPFRGFVQARKQLKEQGQSLGEAHLYFGCRSPHEDYLYQEELENAQSEGIITLHTAFSRMPNQPKTYVQHVMEQDGKKLIELLDQGAHFYICGDGSQMAPAVEATLMKSYADVHQVSEADARLWLQQLEEKGRYAKDVWLG

SEQ ID NO: 941 - DNA, 3147 bp, synthetic construct
  misc_feature 1..3147: note = variant of P450 oxidase from Bacillus megaterium
  source 1..3147: mol_type = other DNA
atgacaattaaggaaatgcctcagcctaagacgtttggagaacttaaaaatttaccgttattagatacagataaaccggttcaagctttgatgcgtattgcggatgaattaggagaaatctttaaattcgaggcgcctggtagcgtaacgcgctatttatcaagtcagcgtctaattaaagaagcatgcgatgaatcacgctttgataaaaacttaagtcaagcgcttaaatttgcacgtgattttgttggagacgggctggttacaagctggacgcatgaaccgaattggaaaaaagcgcataatatcttagttccaagctttagtcagcatgcaatggggcgttatcatgcgatgatggtcgatatcgccgtgcagcttgttcaaaagtgggagcgtctaaatgcagatgagcatattgaagtatcggaagacatgacacgtttaacgcttgatacaattggtctttgcctgtttaactatcgctttaacagcttttaccgagatacgcctcatccatttattgtgagtgtggttcgtgcactggatgaagtaatgaacaagctgcagcgagcaaatccagacgacccagcttatgatgaaaacaagcgccagtgtcaagaagatatcaaggtgatgaacgactatgtagataaaattattgcagatcgcaaagcaaggggtgaacaaagtcatgatttattaacgcagatgctaaacggaaaagatccagaaacgggtgagccgcttgatgacgggaacattcgtcagcaaattattacattcttaattgcgggacaccaaacgacaagtggtcttttatcatttgcgctgtatttcttagtgaaaaatccacgtgtattacaaaaagtagcagaagaagcagcacgagttctagtagatcctgttccaagctacaaacaagtcaaacagcttaaatatgttggcatggtcttaaacgaagcgctgcgcttatggccagtagcgcctatgttttccctatatgcaaaagaagatacggtgcttggaggagaatatcctttaacgaaaggcgacgaagtaatggttctggtgcctcagcttcaccgtgataaaacaatttggggagacgatgtggaggagttccgtccagagcgttttgaaaatccaagtgcgattccgcagcatgcgtttaaaccgtttggaaacggtcagcgtgcgtgtatcggtcagcagttcgctcttcatagtgcaacgctggtacttggtatgatgctaaaacactttgactttgaagatcatacaaactacgagctcgttattaaagaatcgcggacgttaaaacctgaaggctttgtggtaaaagcaaaatcgaaaggcattccgcttggcggtattccttcacctagcactgaacagtctgctaaaaaagtacgcaaaaaggcagaaaacgctcataatacgccgctgcttgtgctatacggttcaaatgcgggaacagctgaaggaacggcgcgtgatttagcagatattgcaatgagcaaaggatttgcaccgcaggtcgcaacgcttgattcacacgccggtaatcttccgcgcgaaggagctgtattaattgtaacggcgtcttataacggtcatccgcctgataacgcaaagcaatttgtcgattggttagaccaagcgtctgcggatgaagtaaaaggcgttcgctactccgtatttggatgcggcgataaaaattgggcggggacgtatcaaaaagtgcctgcttttatcgatgaaacgcttgccgctaaaggggcagaaaacatcgctgaccgcggtgaagcagatgcaagcgacgactttgaaggcgcgtatgaagaatggcgtgatcatatgtggagtgacgtagcagcctactttggtctcgacattgaaaacagtgaagataataaatctactctttcactgcaatttgtcgacagcgcggcggatatgccgcttgcgaaaatgcacggtgcgttttcaacgaacgtcgtagcaagcaaagaacttcaacagcctggcagtgcacgaagcacgcgacatcttgaaattgaacttccaaaagaagcttcttatcaagaaggagatcatttaggtgttatccctcgctattatgaaggaatagtaaaccgtgtaacatgcaggttcctgctaagcgcatcacagctgatccgtctggaagcagaagaagaaaaattagctcatttgccactcgctaaaacagtatccgtagaagagcttctgcaatacgtggagcttcaagatcctgttacgcgcacgcagcttcgcgcaatggctgctaaaacggtctgcccgccgcataaatttgagcttgaagccttgcttggcaagcaagcctacaaagaacaagtgctggcaaaacgtttaacaatgcttgaactgcttgaaaaatacccggcgtgtgaaatgagtttcagcgaatttatcgcccttctgccaagcatacgcccgcgctattactcgatttcttcatcacctcgtgtcgatgaaaaacaagcaagcatcacggtcagcgttgtctcaggaccggcgtggagcggatatggagaatataaaggaattgcgtcgaactatcttgctgagctgcaagaaggagatacgattacgtgctttatttccacaccgcagtcagagtttacgctgccaaaagaccctgaaacgccgcttatcatggtcggaccgggaacaggcgtcgcgccgtttagaggctttgtgcaggcgcgcaaacagctaaaagaacaaggacagtcacttggagaagcacatttatacttcggctgccgttcacctcatgaagactatctgtatcaagaagagcttgaaaacgcccaaagcgaaggcatcattacgcttcataccgctttttctcgcatgccgaatcagccgaaaacatacgttcagcacgtaatggaacaagacggcaagaaattgattgaacttcttgatcaaggagcgcacttctatatttgcggagacggaattcaaatggcacctgccgttgaagcaacgcttatgaaaagctatgctgacgttcaccaagtgagtgaagcagacgctcgcttatggctgcagcagctagaagaaaaaggccgatacgcaaaagacgtgtggctgggg

SEQ ID NO: 942 - protein, 1049 aa, synthetic construct
  REGION 1..1049: note = variant of P450 oxidase from Bacillus megaterium
MTIKEMPQPKTFGELKNLPLLDTDKPVQALMRIADELGEIFKFEAPGSVTRYLSSQRLIKEACDESRFDKNLSQALKFARDFVGDGLVTSWTHEPNWKKAHNILVPSFSQHAMGRYHAMMVDIAVQLVQKWERLNADEHIEVSEDMTRLTLDTIGLCLFNYRFNSFYRDTPHPFIVSVVRALDEVMNKLQRANPDDPAYDENKRQCQEDIKVMNDYVDKIIADRKARGEQSHDLLTQMLNGKDPETGEPLDDGNIRQQIITFLIAGHQTTSGLLSFALYFLVKNPRVLQKVAEEAARVLVDPVPSYKQVKQLKYVGMVLNEALRLWPVAPMFSLYAKEDTVLGGEYPLTKGDEVMVLVPQLHRDKTIWGDDVEEFRPERFENPSAIPQHAFKPFGNGQRACIGQQFALHSATLVLGMMLKHFDFEDHTNYELVIKESRTLKPEGFVVKAKSKGIPLGGIPSPSTEQSAKKVRKKAENAHNTPLLVLYGSNAGTAEGTARDLADIAMSKGFAPQVATLDSHAGNLPREGAVLIVTASYNGHPPDNAKQFVDWLDQASADEVKGVRYSVFGCGDKNWAGTYQKVPAFIDETLAAKGAENIADRGEADASDDFEGAYEEWRDHMWSDVAAYFGLDIENSEDNKSTLSLQFVDSAADMPLAKMHGAFSTNVVASKELQQPGSARSTRHLEIELPKEASYQEGDHLGVIPRYYEGIVNRVTCRFLLSASQLIRLEAEEEKLAHLPLAKTVSVEELLQYVELQDPVTRTQLRAMAAKTVCPPHKFELEALLGKQAYKEQVLAKRLTMLELLEKYPACEMSFSEFIALLPSIRPRYYSISSSPRVDEKQASITVSVVSGPAWSGYGEYKGIASNYLAELQEGDTITCFISTPQSEFTLPKDPETPLIMVGPGTGVAPFRGFVQARKQLKEQGQSLGEAHLYFGCRSPHEDYLYQEELENAQSEGIITLHTAFSRMPNQPKTYVQHVMEQDGKKLIELLDQGAHFYICGDGIQMAPAVEATLMKSYADVHQVSEADARLWLQQLEEKGRYAKDVWLG

SEQ ID NO: 943 - DNA, 3147 bp, synthetic construct
  misc_feature 1..3147: note = variant of P450 oxidase from Bacillus megaterium
  source 1..3147: mol_type = other DNA
atgacaattaaggaaatgcctcagcctaagacgtttggagaacttaaaaatttaccgttattaaacacagataaaccggttcaagctttgatgcgtattgcggatgaattaggagaaatctttaaattcgaggcgcctggtagcgtaacgcgctatttatcaagtcagcgtctaattaaagaagcatgcgatgaatcacgctttgataaaaacttaagtcaagggcttaaatttgcacgtgattttgttggagacgggctggttacaagctggacgcatgaaccgaattggaaaaaagcgcataatatcttagttccaagctttagtcagcatgcaatggggcgttatcatgcgatgatggtcgatatcgccgtgcagcttgttcaaaagtgggagcgtctaaatgcagatgagcatattgaagtatcggaagacatgacacgtttaacgcttgatacaattggtctttgcctgtttaactatcgctttaacagcttttaccgagatacgcctcatccatttattgtgagtgtggttcgtgcactggatgaagtaatgaacaagctgcagcgagcaaatccagacgacccagcttatgatgaaaacaagcgccagtgtcaagaagatatcaaggtgatgaacgactatgtagataaaattattgcagatcgcaaagcaaggggtgaacaaagtcatgatttattaacgcagatgctaaacggaaaagatccagaaacgggtgagccgcttgatgacgggaacattcgtcagcaaattattacattcttaattgcgggacaccaaacgacaagtggtcttttatcatttgcgctgtatttcttagtgaaaaatccacgtgtattacaaaaagtagcagaagaagcagcacgagttctagtagatcctgttccaagctacaaacaagtcaaacagcttaaatatgttggcatggtcttaaacgaagcgctgcgcttatggccagtagcgcctatgttttccctatatgcaaaagaagatacggtgcttggaggagaatatcctttaacgaaaggcgacgaagtaatggttctggtgcctcagcttcaccgtgataaaacaatttggggagacgatgtggaggagttccgtccagagcgttttgaaaatccaagtgcgattccgcagcatgcgtttaaaccgtttggaaacggtcagcgtgcgtgtatcggtcagcagttcgctcttcatagtgcaacgctggtacttggtatgatgctaaaacactttgactttgaagatcatacaaactacgagctcgttattaaagaatcgcggacgttaaaacctgaaggctttgtggtaaaagcaaaatcgaaaggcattccgcttggcggtattccttcacctagcactgaacagtctgctaaaaaagtacgcaaaaaggcagaaaacgctcataatacgccgctgcttgtgctatacggttcaaatgcgggaacagctgaaggaacggcgcgtgatttagcagatattgcaatgagcaaaggatttgcaccgcaggtcgcaacgcttgattcacacgccggtaatcttccgcgcgaaggagctgtattaattgtaacggcgtcttataacggtcatccgcctgataacgcaaagcaatttgtcacttggttagaccaagcgtctgcggatgaagtaaaaggcgttcgctactccgtatttggatgcggcgataaaaattgggcggggacgtatcaaaaagtgcctgcttttatcgatgaaacgcttgccgctaaaggggcagaaaacatcgctgaccgcggtgaagcagatgcaagcgacgactttgaaggcgcgtatgaagaatggcgtgatcatatgtggagtgacgtagcagcctactttggtctcgacattgaaaacagtgaagataataaatctactctttcactgcaatttgtcgacagcgcggcggatatgccgcttgcgaaaatgcacggtgcgttttcaacgaacgtcgtagcaagcaaagaacttcaacagcctggcagtgcacgaagcacgcgacatcttgaaattgaacttccaaaagaagcttcttatcaagaaggagatcatttaggtgttattcctcgctattatgaaggaatagtaaaccgtgtaacatgcaggttcggcctaagcgcatcacagctgatccgtctggaagcagaagaagaaaaattagctcatttgccactcgctaaaacagtatccgtagaagagcttctgcaatacgtggagcttcaagatcctgttacgcgcacgcagcttcgcgcaatggctgctaaaacggtctgcccgccgcataaagtagagcttgaagccttgcttggcaagcaagcctacaaagaacaagtggtggcaaaacgtatctacatgcttgaactgcttgaaaaatacccggcgtgtgaaatgagtttcagcgaatttatcgcccttctgccaagcatacgcccgcgctattactcgatttcttcatcacctcgtgtcgatgaaaaacaagcaagcatcacggtcagcgttgtctcaggaccggcgtggagcggatatggagaatataaaggaattgcgtcgaactatcttgccgagctgcaagaaggagatacgattacgtgctttatttccacaccgcagtcagagtttacgctgccaaaagaccctgaaacgccgcttatcatggtcggaccgggaacaggcgtcgcgccgtttagaggctttgtgcaggcgcgcaaacagctaaaagaacaaggacagtcacttggagaagcacatttatacttcggctgccgttcacctcatgaagactatctgtatcaagaagagcttgaaaacgcccaaagcgaaggcatcattacgcttcataccgctttttctcgcatgccgaatcagccgaaaacatacgttcagcacgtaatggaacaagacggcaagaaattgattgaacttcttgatcaaggagcgcacttctatatttgcggagacggaagccaaatggcacctgccgttgaagcaacgcttatgaaaagctatgctgacgttcaccaagtgagtgaagcagacgctcgcttatggctgcagcagctagaagaaaaaggccgatacgcaaaagacgtgtggctgggg

SEQ ID NO: 944 - protein, 1049 aa, synthetic construct
  REGION 1..1049: note = variant of P450 oxidase from Bacillus megaterium
MTIKEMPQPKTFGELKNLPLLNTDKPVQALMRIADELGEIFKFEAPGSVTRYLSSQRLIKEACDESRFDKNLSQGLKFARDFVGDGLVTSWTHEPNWKKAHNILVPSFSQHAMGRYHAMMVDIAVQLVQKWERLNADEHIEVSEDMTRLTLDTIGLCLFNYRFNSFYRDTPHPFIVSVVRALDEVMNKLQRANPDDPAYDENKRQCQEDIKVMNDYVDKIIADRKARGEQSHDLLTQMLNGKDPETGEPLDDGNIRQQIITFLIAGHQTTSGLLSFALYFLVKNPRVLQKVAEEAARVLVDPVPSYKQVKQLKYVGMVLNEALRLWPVAPMFSLYAKEDTVLGGEYPLTKGDEVMVLVPQLHRDKTIWGDDVEEFRPERFENPSAIPQHAFKPFGNGQRACIGQQFALHSATLVLGMMLKHFDFEDHTNYELVIKESRTLKPEGFVVKAKSKGIPLGGIPSPSTEQSAKKVRKKAENAHNTPLLVLYGSNAGTAEGTARDLADIAMSKGFAPQVATLDSHAGNLPREGAVLIVTASYNGHPPDNAKQFVTWLDQASADEVKGVRYSVFGCGDKNWAGTYQKVPAFIDETLAAKGAENIADRGEADASDDFEGAYEEWRDHMWSDVAAYFGLDIENSEDNKSTLSLQFVDSAADMPLAKMHGAFSTNVVASKELQQPGSARSTRHLEIELPKEASYQEGDHLGVIPRYYEGIVNRVTCRFGLSASQLIRLEAEEEKLAHLPLAKTVSVEELLQYVELQDPVTRTQLRAMAAKTVCPPHKVELEALLGKQAYKEQVVAKRIYMLELLEKYPACEMSFSEFIALLPSIRPRYYSISSSPRVDEKQASITVSVVSGPAWSGYGEYKGIASNYLAELQEGDTITCFISTPQSEFTLPKDPETPLIMVGPGTGVAPFRGFVQARKQLKEQGQSLGEAHLYFGCRSPHEDYLYQEELENAQSEGIITLHTAFSRMPNQPKTYVQHVMEQDGKKLIELLDQGAHFYICGDGSQMAPAVEATLMKSYADVHQVSEADARLWLQQLEEKGRYAKDVWLG

SEQ ID NO: 945 - DNA, 3147 bp, synthetic construct
  misc_feature 1..3147: note = variant of P450 oxidase from Bacillus megaterium
  source 1..3147: mol_type = other DNA
atgacaattaaggaaatgcctcagcctaagacgtttggagaacttaaaaatttaccgttattaaatacagataaaccggttcaagctttgatgcgtattgcggatgaattaggagaaatctttaaattcgaggcgcctggtagcgtaacgcgctatttatcaagtcagcgtctaattaaagaagcatgcgatgaatcacgctttgataaaaacttaagtcaagggcttaaatttgcacgtgattttgttggagacgggctggttacaagctggacgcatgaaccgaattggaaaaaagcgcataatatcttagttccaagctttagtcagcatgcaatggggcgttatcatgcgatgatggtcgatatcgccgtgcagcttgttcaaaagtgggagcgtctaaatgcagatgagcatattgaagtatcggaagacatgacacgtttaacgcttgatacaattggtctttgcctgtttaactatcgctttaacagcttttaccgagatacgcctcatccatttattgtgagtgtggttcgtgcactggatgaagtaatgaacaagctgcagcgagcaaatccagacgacccagcttatgatgaaaacaagcgccagtgtcaagaagatatcaaggtgatgaacgactatgtagataaaattattgcagatcgcaaagcaaggggtgaacaaagtcatgatttattaacgcagatgctaaacggaaaagatccagaaacgggtgagccgcttgatgacgggaacattcgtcagcaaattattacattcttaattgcgggacaccaaacgacaagtggtcttttatcatttgcgctgtatttcttagtgaaaaatccacgtgtattacaaaaagtagcagaagaagcagcacgagttctagtagatcctgttccaagctacaaacaagtcaaacagcttaaatatgttggcatggtcttaaacgaagcgctgcgcttatggccagtagcgcctatgttttccctatatgcaaaagaagatacggtgcttggaggagaatatcctttaacgaaaggcgacgaagtaatggttctggtgcctcagcttcaccgtgataaaacaatttggggagacgatgtggaggagttccgtccagagcgttttgaaaatccaagtgcgattccgcagcatgcgtttaaaccgtttggaaacggtcagcgtgcgtgtatcggtcagcagttcgctcttcatagtgcaacgctggtacttggtatgatgctaaaacactttgactttgaagatcatacaaactacgagctcgttattaaagaatcgcggacgttaaaacctgaaggctttgtggtaaaagcaaaatcgaaaggcattccgcttggcggtattccttcacctagcactgaacagtctgctaaaaaagtacgcaaaaaggcagaaaacgctcataatacgccgctgcttgtgctatacggttcaaatgcgggaacagctgaaggaacggcgcgtgatttagcagatattgcaatgagcaaaggatttgcaccgcaggtcgcaacgcttgattcacacgccggtaatcttccgcgcgaaggagctgtattaattgtaacggcgtcttataacggtcatccgcctgataacgcaaagcaatttgtcgattggttagaccaagcgtctgcggatgaagtaaaaggcgttcgctactccgtatttggatgcggcgataaaaattgggcggggacgtatcaaaaagtgcctgcttttatcgatgaaacgcttgccgctaaaggggcagaaaacatcgctgaccgcggtgaagcagatgcaagcgacgactttgaaggcgcgtatgaactgtggcgtgatcatatgtggagtgacgtagcagcctactttggtctcgacattgaaaacagtgaagataataaatctactctttcactgcaatttgtcgacagcgcggcggatatgccgcttgcgaaaatgcacggtgcgttttcaacgaacgtcgtagcaagcaaagaacttcaacagcctggcagtgcacgaagcacgcgacatcttgaaattgaacttccaaaagaagcttcttatcaagaaggagatcatttaggtgttatccctcgctattatgaaggaatagtaaaccgtgtaacaggcaggttcctgctaagcgcatcacagctgatccgtctggaagcagaagaagaaaaattagctcatttgccactcgctaaaacagtatccgtagaagagcttctgcaatacgtggagcttcaagatcctgttacgcgcacgcagcttcgcgcaatggctgctaaaacggtctgcccgccgcataaagttgagcttgaagccttgcttggcaagcaagcctacaaagaacaagtgctggcaaaacgtatcactatgcttgaactgcttgaaaaatacccggcgtgtgaaatgagtttcagcgaatttatcgcccttctgccaagcatacgcccgcgctattactcgatttcttcatcacctcgtgtcgatgaaaaacaagcaagcatcacggtcagcgttgtctcaggaccggcgtggagcggatatggagaatataaaggaattgcgtcgaactatcttgctgagctgcaagaaggagatacgattacgtgctttatttccacaccgcagtcagagtttacgctgccaaaagaccctgaaacgccgcttatcatggtcggaccgggaacaggcgtcgcgccgtttagaggctttgtgcaggcgcgcaaacagctaaaagaacaaggacagtcacttggagaagcacatttatacttcggctgccgttcacctcatgaagactatctgtatcaagaagagcttgaaaacgcccaaagcgaaggcatcattacgcttcataccgctttttctcgcatgccgaatcagccgaaaacatacgttcagcacgtaatggaacaagacggcaagaaattgattgaacttcttgatcaaggagcgcacttctatatttgcggagacggaagtcaaatggcacctgccgttgaagcaacgcttatgaaaagctatgctgacgttcaccaagtgagtgaagcagacgctcgcttatggctgcagcagctagaagaaaaaggccgatacgcaaaagacgtgtggctgggg

SEQ ID NO: 946 - protein, 1049 aa, synthetic construct
  REGION 1..1049: note = variant of P450 oxidase from Bacillus megaterium
MTIKEMPQPKTFGELKNLPLLNTDKPVQALMRIADELGEIFKFEAPGSVTRYLSSQRLIKEACDESRFDKNLSQGLKFARDFVGDGLVTSWTHEPNWKKAHNILVPSFSQHAMGRYHAMMVDIAVQLVQKWERLNADEHIEVSEDMTRLTLDTIGLCLFNYRFNSFYRDTPHPFIVSVVRALDEVMNKLQRANPDDPAYDENKRQCQEDIKVMNDYVDKIIADRKARGEQSHDLLTQMLNGKDPETGEPLDDGNIRQQIITFLIAGHQTTSGLLSFALYFLVKNPRVLQKVAEEAARVLVDPVPSYKQVKQLKYVGMVLNEALRLWPVAPMFSLYAKEDTVLGGEYPLTKGDEVMVLVPQLHRDKTIWGDDVEEFRPERFENPSAIPQHAFKPFGNGQRACIGQQFALHSATLVLGMMLKHFDFEDHTNYELVIKESRTLKPEGFVVKAKSKGIPLGGIPSPSTEQSAKKVRKKAENAHNTPLLVLYGSNAGTAEGTARDLADIAMSKGFAPQVATLDSHAGNLPREGAVLIVTASYNGHPPDNAKQFVDWLDQASADEVKGVRYSVFGCGDKNWAGTYQKVPAFIDETLAAKGAENIADRGEADASDDFEGAYELWRDHMWSDVAAYFGLDIENSEDNKSTLSLQFVDSAADMPLAKMHGAFSTNVVASKELQQPGSARSTRHLEIELPKEASYQEGDHLGVIPRYYEGIVNRVTGRFLLSASQLIRLEAEEEKLAHLPLAKTVSVEELLQYVELQDPVTRTQLRAMAAKTVCPPHKVELEALLGKQAYKEQVLAKRITMLELLEKYPACEMSFSEFIALLPSIRPRYYSISSSPRVDEKQASITVSVVSGPAWSGYGEYKGIASNYLAELQEGDTITCFISTPQSEFTLPKDPETPLIMVGPGTGVAPFRGFVQARKQLKEQGQSLGEAHLYFGCRSPHEDYLYQEELENAQSEGIITLHTAFSRMPNQPKTYVQHVMEQDGKKLIELLDQGAHFYICGDGSQMAPAVEATLMKSYADVHQVSEADARLWLQQLEEKGRYAKDVWLG

SEQ ID NO: 947 - DNA, 3147 bp, synthetic construct
  misc_feature 1..3147: note = variant of P450 oxidase from Bacillus megaterium
  source 1..3147: mol_type = other DNA
atgacaattaaggaaatgcctcagcctaagacgtttggagaacttaaaaatttaccgttattagatacagataaaccggttcaagctttgatgcgtattgcggatgaattaggagaaatctttaaattcgaggcgcctggtagcgtaacgcgctatttatcaagtcagcgtctaattaaagaagcatgcgatgaatcacgctttgataaaaacttaagtcaagggcttaaatttgcacgtgattttgttggagacgggctggttacaagctggacgcatgaaccgaattggaaaaaagcgcataatatcttagttccaagctttagtcagcatgcaatggggcgttatcatgcgatgatggtcgatatcgccgtgcagcttgttcaaaagtgggagcgtctaaatgcagatgagcatattgaagtatcggaagacatgacacgtttaacgcttgatacaattggtctttgcctgtttaactatcgctttaacagcttttaccgagatacgcctcatccatttattgtgagtgtggttcgtgcactggatgaagtaatgaacaagctgcagcgagcaaatccagacgacccagcttatgatgaaaacaagcgccagtgtcaagaagatatcaaggtgatgaacgactatgtagataaaattattgcagatcgcaaagcaaggggtgaacaaagtcatgatttattaacgcagatgctaaacggaaaagatccagaaacgggtgagccgcttgatgacgggaacattcgtcagcaaattattacattcttaattgcgggacaccaaacgacaagtggtcttttatcatttgcgctgtatttcttagtgaaaaatccacgtgtattacaaaaagtagcagaagaagcagcacgagttctagtagatcctgttccaagctacaaacaagtcaaacagcttaaatatgttggcatggtcttaaacgaagcgctgcgcttatggccagtagcgcctatgttttccctatatgcaaaagaagatacggtgcttggaggagaatatcctttaacgaaaggcgacgaagtaatggttctggtgcctcagcttcaccgtgataaaacaatttggggagacgatgtggaggagttccgtccagagcgttttgaaaatccaagtgcgattccgcagcatgcgtttaaaccgtttggaaacggtcagcgtgcgtgtatcggtcagcagttcgctcttcatagtgcaacgctggtacttggtatgatgctaaaacactttgactttgaagatcatacaaactacgagctcgttattaaagaatcgcggacgttaaaacctgaaggctttgtggtaaaagcaaaatcgaaaggcattccgcttggcggtattccttcacctagcactgaacagtctgctaaaaaagtacgcaaaaaggcagaaaacgctcataatacgccgctgcttgtgctatacggttcaaatgcgggaacagctgaaggaacggcgcgtgatttagcagatattgcaatgagcaaaggatttgcaccgcaggtcgcaacgcttgattcacacgccggtaatcttccgcgcgaaggagctgtattaattgtaacggcgtcttataacggtcatccgcctgataacgcaaagcaatttgtcacttggttagaccaagcgtctgcggatgaagtaaaaggcgttcgctactccgtatttggatgcggcgataaaaattgggcggggacgtatcaaaaagtgcctgcttttatcgatgaaacgcttgccgctaaaggggcagaaaacatcgctgaccgcggtgaagcagatgcaagcgacgactttgaaggcgcgtatgaagaatggcgtgatcatatgtggagtgacgtagcagcctactttggtctcgacattgaaaacagtgaagataataaatctactctttcacttcaatttgtcgacagcgcggcggatatgccgcttgcgaaaatgcacggtgcgttttcaacgaacgtcgtagcaagcaaagaacttcaacagcctggcagtgcacgaagcacgcgacatcttgaaattgaacttccaaaagaagcttcttatcaagaaggagatcatttaggtgttattcctcgctattatgaaggaatagtaaaccgtgtaacagccaggttcggcctaagcgcatcacagctgatccgtctggaagcagaagaagaaaaattagctcatttgccactcgctaaaacagtatccgtagaagagcttctgcaatacgtggagcttcaagatcctgttacgcgcacgcagcttcgcgcaatggctgctaaaacggtctgcccgccgcataaagtagagcttgaagccttgcttggcaagcaagcctacaaagaacaagtgctggcaaaacgtttaacaatgcttgaactgcttgaaaaatacccggcgtgtgaaatgagtttcagcgaatttatcgcccttctgccaagcataggtccgcgctattactcgatttcttcatcacctcgtgtcgatgaaaaacaagcaagcatcacggtcagcgttgtctcaggaccggcgtggagcggatatggagaatataaaggaattgcgtcgaactatcttgccgagctgcaagaaggagatacgattacgtgctttatttccacaccgcagtcagagtttacgctgccaaaagaccctgaaacgccgcttatcatggtcggaccgggaacaggcgtcgcgccgtttagaggctttgtgcaggcgcgcaaacagctaaaagaacaaggacagtcacttggagaagcacatttatacttcggctgccgttcacctcatgaagactatctgtatcaagaagagcttgaaaacgcccaaagcgaaggcatcattacgcttcataccgctttttctcgcatgccgaatcagccgaaaacatacgttcagcacgtaatggaacaagacggcaagaaattgattgaacttcttgatcaaggagcgcacttctatatttgcggagacggaagtcaaatggcacctgccgttgaagcaacgcttatgaaaagctatgctgacgttcaccaagtgagtgaagcagacgctcgcttatggctgcagcagctagaagaaaaaggccgatacgcaaaagacgtgtggctgggg

SEQ ID NO: 948 - protein, 1049 aa, synthetic construct
  REGION 1..1049: note = variant of P450 oxidase from Bacillus megaterium
MTIKEMPQPKTFGELKNLPLLDTDKPVQALMRIADELGEIFKFEAPGSVTRYLSSQRLIKEACDESRFDKNLSQGLKFARDFVGDGLVTSWTHEPNWKKAHNILVPSFSQHAMGRYHAMMVDIAVQLVQKWERLNADEHIEVSEDMTRLTLDTIGLCLFNYRFNSFYRDTPHPFIVSVVRALDEVMNKLQRANPDDPAYDENKRQCQEDIKVMNDYVDKIIADRKARGEQSHDLLTQMLNGKDPETGEPLDDGNIRQQIITFLIAGHQTTSGLLSFALYFLVKNPRVLQKVAEEAARVLVDPVPSYKQVKQLKYVGMVLNEALRLWPVAPMFSLYAKEDTVLGGEYPLTKGDEVMVLVPQLHRDKTIWGDDVEEFRPERFENPSAIPQHAFKPFGNGQRACIGQQFALHSATLVLGMMLKHFDFEDHTNYELVIKESRTLKPEGFVVKAKSKGIPLGGIPSPSTEQSAKKVRKKAENAHNTPLLVLYGSNAGTAEGTARDLADIAMSKGFAPQVATLDSHAGNLPREGAVLIVTASYNGHPPDNAKQFVTWLDQASADEVKGVRYSVFGCGDKNWAGTYQKVPAFIDETLAAKGAENIADRGEADASDDFEGAYEEWRDHMWSDVAAYFGLDIENSEDNKSTLSLQFVDSAADMPLAKMHGAFSTNVVASKELQQPGSARSTRHLEIELPKEASYQEGDHLGVIPRYYEGIVNRVTARFGLSASQLIRLEAEEEKLAHLPLAKTVSVEELLQYVELQDPVTRTQLRAMAAKTVCPPHKVELEALLGKQAYKEQVLAKRLTMLELLEKYPACEMSFSEFIALLPSIGPRYYSISSSPRVDEKQASITVSVVSGPAWSGYGEYKGIASNYLAELQEGDTITCFISTPQSEFTLPKDPETPLIMVGPGTGVAPFRGFVQARKQLKEQGQSLGEAHLYFGCRSPHEDYLYQEELENAQSEGIITLHTAFSRMPNQPKTYVQHVMEQDGKKLIELLDQGAHFYICGDGSQMAPAVEATLMKSYADVHQVSEADARLWLQQLEEKGRYAKDVWLG

SEQ ID NO: 949 - DNA, 3147 bp, synthetic construct
  misc_feature 1..3147: note = variant of P450 oxidase from Bacillus megaterium
  source 1..3147: mol_type = other DNA
atgacaattaaggaaatgcctcagcctaagacgtttggagaacttaaaaatttaccgttattaaatacagataaaccggttcaagctttgatgcgtattgcggatgaattaggagaaatctttaaattcgaggcgcctggtagcgtaacgcgctatttatcaagtcagcgtctaattaaagaagcatgcgatgaatcacgctttgataaaaacttaagtcaagggcttaaatttgcacgtgattttgttggagacgggctggttacaagctggacgcatgaaccgaattggaaaaaagcgcataatatcttagttccaagctttagtcagcatgcaatggggcgttatcatgcgatgatggtcgatatcgccgtgcagcttgttcaaaagtgggagcgtctaaatgcagatgagcatattgaagtatcggaagacatgacacgtttaacgcttgatacaattggtctttgcctgtttaactatcgctttaacagcttttaccgagatacgcctcatccatttattgtgagtgtggttcgtgcactggatgaagtaatgaacaagctgcagcgagcaaatccagacgacccagcttatgatgaaaacaagcgccagtgtcaagaagatatcaaggtgatgaacgactatgtagataaaattattgcagatcgcaaagcaaggggtgaacaaagtcatgatttattaacgcagatgctaaacggaaaagatccagaaacgggtgagccgcttgatgacgggaacattcgtcagcaaattattacattcttaattgcgggacaccaaacgacaagtggtcttttatcatttgcgctgtatttcttagtgaaaaatccacgtgtattacaaaaagtagcagaagaagcagcacgagttctagtagatcctgttccaagctacaaacaagtcaaacagcttaaatatgttggcatggtcttaaacgaagcgctgcgcttatggccagtagcgcctatgttttccctatatgcaaaagaagatacggtgcttggaggagaatatcctttaacgaaaggcgacgaagtaatggttctggtgcctcagcttcaccgtgataaaacaatttggggagacgatgtggaggagttccgtccagagcgttttgaaaatccaagtgcgattccgcagcatgcgtttaaaccgtttggaaacggtcagcgtgcgtgtatcggtcagcagttcgctcttcatagtgcaacgctggtacttggtatgatgctaaaacactttgactttgaagatcatacaaactacgagctcgttattaaagaatcgcggacgttaaaacctgaaggctttgtggtaaaagcaaaatcgaaaggcattccgcttggcggtattccttcacctagcactgaacagtctgctaaaaaagtacgcaaaaaggcagaaaacgctcataatacgccgctgcttgtgctatacggttcaaatgcgggaacagctgaaggaacggcgcgtgatttagcagatattgcaatgagcaaaggatttgcaccgcaggtcgcaacgcttgattcacacgccggtaatcttccgcgcgaaggagctgtattaattgtaacggcgtcttataacggtcatccgcctgataacgcaaagcaatttgtcgattggttagaccaagcgtctgcggatgaagtaaaaggcgttcgctactccgtatttggatgcggcgataaaaattgggcggggacgtatcaaaaagtgcctgcttttatcgatgaaacgcttgccgctaaaggggcagaaaacatcgctgaccgcggtgaagcagatgcaagcgacgactttgaaggcgcgtatgaagaatggcgtgatcatatgtggagtgacgtagcagcctactttggtctcgacattgaaaacagtgaagataataaatctactctttcacttcaatttgtcgacagcgcggcggatatgccgcttgcgaaaatgcacggtgcgttttcaacgaacgtcgtagcaagcaaagaacttcaacagcctggcagtgcacgaagcacgcgacatcttgaaattgaacttccaaaagaagcttcttatcaagaaggagatcatttaggtgttattcctcgctattatgaaggaatagtaaaccgtgtaacaggcaggttcggcctaagcgcatcacagctgatccgtctggaagcagaagaagaaaaattagctcatttgccactcgctaaaacagtatccgtagaagagcttctgcaatacgtggagcttcaagatcctgttacgcgcacgcagcttcgcgcaatggctgctaaaacggtctgcccgccgcataaagtagagcttgaagccttgcttggcaagcaagcctacaaagaacaagtgctggcaaaacgtttaacaatgcttgaactgcttgaaaaatacccggcgtgtgaaatgagtttcagcgaatttatcgcccttctgccaagcatacgcccgcgctattactcgatttcttcatcacctcgtgtcgatgaaaaacaagcaagcatcacggtcagcgttgtctcaggaccggcgtggagcggatatggagaatataaaggaattgcgtcgaactatcttgccgagctgcaagaaggagatacgattacgtgctttatttccacaccgcagtcagagtttacgctgccaaaagaccctgaaacgccgcttatcatggtcggaccgggaacaggcgtcgcgccgtttagaggctttgtgcaggcgcgcaaacagctaaaagaacaaggacagtcacttggagaagcacatttatacttcggctgccgttcacctcatgaagactatctgtatcaagaagagcttgaaaacgcccaaagcgaaggcatcattacgcttcataccgctttttctcgcatgccgaatcagccgaaaacatacgttcagcacgtaatggaacaagacggcaagaaattgattgaacttcttgatcaaggagcgcacttctatatttgcggagacggaattcaaatggcacctgccgttgaagcaacgcttatgaaaagctatgctgacgttcaccaagtgagtgaagcagacgctcgcttatggctgcagcagctagaagaaaaaggccgatacgcaaaagacgtgtggctgggg

SEQ ID NO: 950 - protein, 1049 aa, synthetic construct
  REGION 1..1049: note = variant of P450 oxidase from Bacillus megaterium
MTIKEMPQPKTFGELKNLPLLNTDKPVQALMRIADELGEIFKFEAPGSVTRYLSSQRLIKEACDESRFDKNLSQGLKFARDFVGDGLVTSWTHEPNWKKAHNILVPSFSQHAMGRYHAMMVDIAVQLVQKWERLNADEHIEVSEDMTRLTLDTIGLCLFNYRFNSFYRDTPHPFIVSVVRALDEVMNKLQRANPDDPAYDENKRQCQEDIKVMNDYVDKIIADRKARGEQSHDLLTQMLNGKDPETGEPLDDGNIRQQIITFLIAGHQTTSGLLSFALYFLVKNPRVLQKVAEEAARVLVDPVPSYKQVKQLKYVGMVLNEALRLWPVAPMFSLYAKEDTVLGGEYPLTKGDEVMVLVPQLHRDKTIWGDDVEEFRPERFENPSAIPQHAFKPFGNGQRACIGQQFALHSATLVLGMMLKHFDFEDHTNYELVIKESRTLKPEGFVVKAKSKGIPLGGIPSPSTEQSAKKVRKKAENAHNTPLLVLYGSNAGTAEGTARDLADIAMSKGFAPQVATLDSHAGNLPREGAVLIVTASYNGHPPDNAKQFVDWLDQASADEVKGVRYSVFGCGDKNWAGTYQKVPAFIDETLAAKGAENIADRGEADASDDFEGAYEEWRDHMWSDVAAYFGLDIENSEDNKSTLSLQFVDSAADMPLAKMHGAFSTNVVASKELQQPGSARSTRHLEIELPKEASYQEGDHLGVIPRYYEGIVNRVTGRFGLSASQLIRLEAEEEKLAHLPLAKTVSVEELLQYVELQDPVTRTQLRAMAAKTVCPPHKVELEALLGKQAYKEQVLAKRLTMLELLEKYPACEMSFSEFIALLPSIRPRYYSISSSPRVDEKQASITVSVVSGPAWSGYGEYKGIASNYLAELQEGDTITCFISTPQSEFTLPKDPETPLIMVGPGTGVAPFRGFVQARKQLKEQGQSLGEAHLYFGCRSPHEDYLYQEELENAQSEGIITLHTAFSRMPNQPKTYVQHVMEQDGKKLIELLDQGAHFYICGDGIQMAPAVEATLMKSYADVHQVSEADARLWLQQLEEKGRYAKDVWLG

SEQ ID NO: 951 - DNA, 3147 bp, synthetic construct
  misc_feature 1..3147: note = variant of P450 oxidase from Bacillus megaterium
  source 1..3147: mol_type = other DNA
atgacaattaaggaaatgcctcagcctaagacgtttggagaacttaaaaatttaccgttattaaacacagataaaccggttcaagctttgatgcgtattgcggatgaattaggagaaatctttaaattcgaggcgcctggtagcgtaacgcgctatttatcaagtcagcgtctaattaaagaagcatgcgatgaatcacgctttgataaaaacttaagtcaagggcttaaatttgcacgtgattttgttggagacgggctggttacaagctggacgcatgaaccgaattggaaaaaagcgcataatatcttagttccaagctttagtcagcatgcaatggggcgttatcatgcgatgatggtcgatatcgccgtgcagcttgttcaaaagtgggagcgtctaaatgcagatgagcatattgaagtatcggaagacatgacacgtttaacgcttgatacaattggtctttgcctgtttaactatcgctttaacagcttttaccgagatacgcctcatccatttattgtgagtgtggttcgtgcactggatgaagtaatgaacaagctgcagcgagcaaatccagacgacccagcttatgatgaaaacaagcgccagtgtcaagaagatatcaaggtgatgaacgactatgtagataaaattattgcagatcgcaaagcaaggggtgaacaaagtcatgatttattaacgcagatgctaaacggaaaagatccagaaacgggtgagccgcttgatgacgggaacattcgtcagcaaattattacattcttaattgcgggacaccaaacgacaagtggtcttttatcatttgcgctgtatttcttagtgaaaaatccacgtgtattacaaaaagtagcagaagaagcagcacgagttctagtagatcctgttccaagctacaaacaagtcaaacagcttaaatatgttggcatggtcttaaacgaagcgctgcgcttatggccagtagcgcctatgttttccctatatgcaaaagaagatacggtgcttggaggagaatatcctttaacgaaaggcgacgaagtaatggttctggtgcctcagcttcaccgtgataaaacaatttggggagacgatgtggaggagttccgtccagagcgttttgaaaatccaagtgcgattccgcagcatgcgtttaaaccgtttggaaacggtcagcgtgcgtgtatcggtcagcagttcgctcttcatagtgcaacgctggtacttggtatgatgctaaaacactttgactttgaagatcatacaaactacgagctcgttattaaagaatcgcggacgttaaaacctgaaggctttgtggtaaaagcaaaatcgaaaggcattccgcttggcggtattccttcacctagcactgaacagtctgctaaaaaagtacgcaaaaaggcagaaaacgctcataatacgccgctgcttgtgctatacggttcaaatgcgggaacagctgaaggaacggcgcgtgatttagcagatattgcaatgagcaaaggatttgcaccgcaggtcgcaacgcttgattcacacgccggtaatcttccgcgcgaaggagctgtattaattgtaacggcgtcttataacggtcatccgcctgataacgcaaagcaatttgtcgactggttagaccaagcgtctgcggatgaagtaaaaggcgttcgctactccgtatttggatgcggcgataaaaattgggcggggacgtatcaaaaagtgcctgcttttatcgatgaaacgcttgccgctaaaggggcagaaaacatcgctgaccgcggtgaagcagatgcaagcgacgactttgaaggcgcgtatgaagaatggcgtgatcatatgtggagtgacgtagcagcctactttggtctcgacattgaaaacagtgaagataataaatctactctttcacttcaatttgtcgacagcgcggcggatatgccgcttgcgaaaatgcacggtgcgttttcaacgaacgtcgtagcaagcaaagaacttcaacagcctggcagtgcacgaagcacgcgacatcttgaaattgaacttccaaaagaagcttcttatcaagaaggagatcatttaggtgttattcctcgctattatgaaggaatagtaaaccgtgtaacatgcaggttcggcctaagcgcatcacagctgatccgtctggaagcagaagaagaaaaattagctcatttgccactcgctaaaacagtatccgtagaagagcttctgcaatacgtggagcttcaagatcctgttacgcgcacgcagcttcgcgcaatggctgctaaaacggtctgcccgccgcataaagtagagcttgaagccttgcttggcaagcaagcctacaaagaacaagtgctggcaaaacgtttaacaatgcttgaactgcttgaaaaatacccggcgtgtgaaatgagtttcagcgaatttatcgcccttctgccaagcatacgcccgcgctattactcgatttcttcatcacctcgtgtcgatgaaaaacaagcaagcatcacggtcagcgttgtctcaggaccggcgtggagcggatatggagaatataaaggaattgcgtcgaactatcttgccgagctgcaagaaggagatacgattacgtgctttatttccacaccgcagtcagagtttacgctgccaaaagaccctgaaacgccgcttatcatggtcggaccgggaacaggcgtcgcgccgtttagaggctttgtgcaggcgcgcaaacagctaaaagaacaaggacagtcacttggagaagcacatttatacttcggctgccgttcacctcatgaagactatctgtatcaagaagagcttgaaaacgcccaaagcgaaggcatcattacgcttcataccgctttttctcgcatgccgaatcagccgaaaacatacgttcagcacgtaatggaacaagacggcaagaaattgattgaacttcttgatcaaggagcgcacttctatatttgcggagacggaagccaaatggcacctgccgttgaagcaacgcttatgaaaagctatgctgacgttcaccaagtgagtgaagcagacgctcgcttatggctgcagcagctagaagaaaaaggccgatacgcaaaagacgtgtggctgggg

SEQ ID NO: 952 - protein, 1049 aa, synthetic construct
  REGION 1..1049: note = variant of P450 oxidase from Bacillus megaterium
MTIKEMPQPKTFGELKNLPLLNTDKPVQALMRIADELGEIFKFEAPGSVTRYLSSQRLIKEACDESRFDKNLSQGLKFARDFVGDGLVTSWTHEPNWKKAHNILVPSFSQHAMGRYHAMMVDIAVQLVQKWERLNADEHIEVSEDMTRLTLDTIGLCLFNYRFNSFYRDTPHPFIVSVVRALDEVMNKLQRANPDDPAYDENKRQCQEDIKVMNDYVDKIIADRKARGEQSHDLLTQMLNGKDPETGEPLDDGNIRQQIITFLIAGHQTTSGLLSFALYFLVKNPRVLQKVAEEAARVLVDPVPSYKQVKQLKYVGMVLNEALRLWPVAPMFSLYAKEDTVLGGEYPLTKGDEVMVLVPQLHRDKTIWGDDVEEFRPERFENPSAIPQHAFKPFGNGQRACIGQQFALHSATLVLGMMLKHFDFEDHTNYELVIKESRTLKPEGFVVKAKSKGIPLGGIPSPSTEQSAKKVRKKAENAHNTPLLVLYGSNAGTAEGTARDLADIAMSKGFAPQVATLDSHAGNLPREGAVLIVTASYNGHPPDNAKQFVDWLDQASADEVKGVRYSVFGCGDKNWAGTYQKVPAFIDETLAAKGAENIADRGEADASDDFEGAYEEWRDHMWSDVAAYFGLDIENSEDNKSTLSLQFVDSAADMPLAKMHGAFSTNVVASKELQQPGSARSTRHLEIELPKEASYQEGDHLGVIPRYYEGIVNRVTCRFGLSASQLIRLEAEEEKLAHLPLAKTVSVEELLQYVELQDPVTRTQLRAMAAKTVCPPHKVELEALLGKQAYKEQVLAKRLTMLELLEKYPACEMSFSEFIALLPSIRPRYYSISSSPRVDEKQASITVSVVSGPAWSGYGEYKGIASNYLAELQEGDTITCFISTPQSEFTLPKDPETPLIMVGPGTGVAPFRGFVQARKQLKEQGQSLGEAHLYFGCRSPHEDYLYQEELENAQSEGIITLHTAFSRMPNQPKTYVQHVMEQDGKKLIELLDQGAHFYICGDGSQMAPAVEATLMKSYADVHQVSEADARLWLQQLEEKGRYAKDVWLG

SEQ ID NO: 953 - DNA, 3147 bp, synthetic construct
  misc_feature 1..3147: note = variant of P450 oxidase from Bacillus megaterium
  source 1..3147: mol_type = other DNA
atgacaattaaggaaatgcctcagcctaagacgtttggagaacttaaaaatttaccgttattaaatacagataaaccggttcaagctttgatgcgtattgcggatgaattaggagaaatctttaaattcgaggcgcctggtagcgtaacgcgctatttatcaagtcagcgtctaattaaagaagcatgcgatgaatcacgctttgataaaaacttaagtcaagggcttaaatttgcacgtgattttgttggagacgggctggttacaagctggacgcatgaaccgaattggaaaaaagcgcataatatcttagttccaagctttagtcagcatgcaatggggcgttatcatgcgatgatggtcgatatcgccgtgcagcttgttcaaaagtgggagcgtctaaatgcagatgagcatattgaagtatcggaagacatgacacgtttaacgcttgatacaattggtctttgcctgtttaactatcgctttaacagcttttaccgagatacgcctcatccatttattgtgagtgtggttcgtgcactggatgaagtaatgaacaagctgcagcgagcaaatccagacgacccagcttatgatgaaaacaagcgccagtgtcaagaagatatcaaggtgatgaacgactatgtagataaaattattgcagatcgcaaagcaaggggtgaacaaagtcatgatttattaacgcagatgctaaacggaaaagatccagaaacgggtgagccgcttgatgacgggaacattcgtcagcaaattattacattcttaattgcgggacaccaaacgacaagtggtcttttatcatttgcgctgtatttcttagtgaaaaatccacgtgtattacaaaaagtagcagaagaagcagcacgagttctagtagatcctgttccaagctacaaacaagtcaaacagcttaaatatgttggcatggtcttaaacgaagcgctgcgcttatggccagtagcgcctatgttttccctatatgcaaaagaagatacggtgcttggaggagaatatcctttaacgaaaggcgacgaagtaatggttctggtgcctcagcttcaccgtgataaaacaatttggggagacgatgtggaggagttccgtccagagcgttttgaaaatccaagtgcgattccgcagcatgcgtttaaaccgtttggaaacggtcagcgtgcgtgtatcggtcagcagttcgctcttcatagtgcaacgctggtacttggtatgatgctaaaacactttgactttgaagatcatacaaactacgagctcgttattaaagaatcgcggacgttaaaacctgaaggctttgtggtaaaagcaaaatcgaaaggcattccgcttggcggtattccttcacctagcactgaacagtctgctaaaaaagtacgcaaaaaggcagaaaacgctcataatacgccgctgcttgtgctatacggttcaaatgcgggaacagctgaaggaacggcgcgtgatttagcagatattgcaatgagcaaaggatttgcaccgcaggtcgcaacgcttgattcacacgccggtaatcttccgcgcgaaggagctgtattaattgtaacggcgtcttataacggtcatccgcctgataacgcaaagcaatttgtcgattggttagaccaagcgtctgcggatgaagtaaaaggcgttcgctactccgtatttggatgcggcgataaaaattgggcggggacgtatcaaaaagtgcctgcttttatcgatgaaacgcttgccgctaaaggggcagaaaacatcgctgaccgcggtgaagcagatgcaagcgacgactttgaaggcgcgtatgaagaatggcgtgatcatatgtggagtgacgtagcagcctactttggtctcgacattgaaaacagtgaagataataaatctactctttcactgcaatttgtcgacagcgcggcggatatgccgcttgcgaaaatgcacggtgcgttttcaacgaacgtcgtagcaagcaaagaacttcaacagcctggcagtgcacgaagcacgcgacatcttgaaattgaacttccaaaagaagcttcttatcaagaaggagatcatttaggtgttatccctcgctattatgaaggaatagtaaaccgtgtaacaggcaggttcctgctaagcgcatcacagctgatccgtctggaagcagaagaagaaaaattagctcatttgccactcgctaaaacagtatccgtagaagagcttctgcaatacgtggagcttcaagatcctgttacgcgcacgcagcttcgcgcaatggctgctaaaacggtctgcccgccgcataaatttgagcttgaagccttgcttggcaagcaagcctacaaagaacaagtgctggcaaaacgtttaacaatgcttgaactgcttgaaaaatacccggcgtgtgaaatgagtttcagcgaatttatcgcccttctgccaagcatacgtccgcgctattactcgatttcttcatcacctcgtgtcgatgaaaaacaagcaagcatcacggtcagcgttgtctcaggaccggcgtggagcggatatggagaatataaaggaattgcgtcgaactatcttgccgagctgcaagaaggagatacgattacgtgctttatttccacaccgcagtcagagtttacgctgccaaaagaccctgaaacgccgcttatcatggtcggaccgggaacaggcgtcgcgccgtttagaggctttgtgcaggcgcgcaaacagctaaaagaacaaggacagtcacttggagaagcacatttatacttcggctgccgttcacctcatgaagactatctgtatcaagaagagcttgaaaacgcccaaagcgaaggcatcattacgcttcataccgctttttctcgcatgccgaatcagccgaaaacatacgttcagcacgtaatggaacaagacggcaagaaattgattgaacttcttgatcaaggagcgcacttctatatttgcggagacggaattcaaatggcacctgccgttgaagcaacgcttatgaaaagctatgctgacgttcaccaagtgagtgaagcagacgctcgcttatggctgcagcagctagaagaaaaaggccgatacgcaaaagacgtgtggctgggg

SEQ ID NO: 954 - protein, 1049 aa, synthetic construct
  REGION 1..1049: note = variant of P450 oxidase from Bacillus megaterium
MTIKEMPQPKTFGELKNLPLLNTDKPVQALMRIADELGEIFKFEAPGSVTRYLSSQRLIKEACDESRFDKNLSQGLKFARDFVGDGLVTSWTHEPNWKKAHNILVPSFSQHAMGRYHAMMVDIAVQLVQKWERLNADEHIEVSEDMTRLTLDTIGLCLFNYRFNSFYRDTPHPFIVSVVRALDEVMNKLQRANPDDPAYDENKRQCQEDIKVMNDYVDKIIADRKARGEQSHDLLTQMLNGKDPETGEPLDDGNIRQQIITFLIAGHQTTSGLLSFALYFLVKNPRVLQKVAEEAARVLVDPVPSYKQVKQLKYVGMVLNEALRLWPVAPMFSLYAKEDTVLGGEYPLTKGDEVMVLVPQLHRDKTIWGDDVEEFRPERFENPSAIPQHAFKPFGNGQRACIGQQFALHSATLVLGMMLKHFDFEDHTNYELVIKESRTLKPEGFVVKAKSKGIPLGGIPSPSTEQSAKKVRKKAENAHNTPLLVLYGSNAGTAEGTARDLADIAMSKGFAPQVATLDSHAGNLPREGAVLIVTASYNGHPPDNAKQFVDWLDQASADEVKGVRYSVFGCGDKNWAGTYQKVPAFIDETLAAKGAENIADRGEADASDDFEGAYEEWRDHMWSDVAAYFGLDIENSEDNKSTLSLQFVDSAADMPLAKMHGAFSTNVVASKELQQPGSARSTRHLEIELPKEASYQEGDHLGVIPRYYEGIVNRVTGRFLLSASQLIRLEAEEEKLAHLPLAKTVSVEELLQYVELQDPVTRTQLRAMAAKTVCPPHKFELEALLGKQAYKEQVLAKRLTMLELLEKYPACEMSFSEFIALLPSIRPRYYSISSSPRVDEKQASITVSVVSGPAWSGYGEYKGIASNYLAELQEGDTITCFISTPQSEFTLPKDPETPLIMVGPGTGVAPFRGFVQARKQLKEQGQSLGEAHLYFGCRSPHEDYLYQEELENAQSEGIITLHTAFSRMPNQPKTYVQHVMEQDGKKLIELLDQGAHFYICGDGIQMAPAVEATLMKSYADVHQVSEADARLWLQQLEEKGRYAKDVWLG

SEQ ID NO: 955 - DNA, 3147 bp, synthetic construct
  misc_feature 1..3147: note = variant of P450 oxidase from Bacillus megaterium
  source 1..3147: mol_type = other DNA
atgacaattaaggaaatgcctcagcctaagacgtttggagaacttaaaaatttaccgttattaaatacagataaaccggttcaagctttgatgcgtattgcggatgaattaggagaaatctttaaattcgaggcgcctggtagcgtaacgcgctatttatcaagtcagcgtctaattaaagaagcatgcgatgaatcacgctttgataaaaacttaagtcaagggcttaaatttgcacgtgattttgttggagacgggctggttacaagctggacgcatgaaccgaattggaaaaaagcgcataatatcttagttccaagctttagtcagcatgcaatggggcgttatcatgcgatgatggtcgatatcgccgtgcagcttgttcaaaagtgggagcgtctaaatgcagatgagcatattgaagtatcggaagacatgacacgtttaacgcttgatacaattggtctttgcctgtttaactatcgctttaacagcttttaccgagatacgcctcatccatttattgtgagtgtggttcgtgcactggatgaagtaatgaacaagctgcagcgagcaaatccagacgacccagcttatgatgaaaacaagcgccagtgtcaagaagatatcaaggtgatgaacgactatgtagataaaattattgcagatcgcaaagcaaggggtgaacaaagtcatgatttattaacgcagatgctaaacggaaaagatccagaaacgggtgagccgcttgatgacgggaacattcgtcagcaaattattacattcttaattgcgggacaccaaacgacaagtggtcttttatcatttgcgctgtatttcttagtgaaaaatccacgtgtattacaaaaagtagcagaagaagcagcacgagttctagtagatcctgttccaagctacaaacaagtcaaacagcttaaatatgttggcatggtcttaaacgaagcgctgcgcttatggccagtagcgcctatgttttccctatatgcaaaagaagatacggtgcttggaggagaatatcctttaacgaaaggcgacgaagtaatggttctggtgcctcagcttcaccgtgataaaacaatttggggagacgatgtggaggagttccgtccagagcgttttgaaaatccaagtgcgattccgcagcatgcgtttaaaccgtttggaaacggtcagcgtgcgtgtatcggtcagcagttcgctcttcatagtgcaacgctggtacttggtatgatgctaaaacactttgactttgaagatcatacaaactacgagctcgttattaaagaatcgcggacgttaaaacctgaaggctttgtggtaaaagcaaaatcgaaaggcattccgcttggcggtattccttcacctagcactgaacagtctgctaaaaaagtacgcaaaaaggcagaaaacgctcataatacgccgctgcttgtgctatacggttcaaatgcgggaacagctgaaggaacggcgcgtgatttagcagatattgcaatgagcaaaggatttgcaccgcaggtcgcaacgcttgattcacacgccggtaatcttccgcgcgaaggagctgtattaattgtaacggcgtcttataacggtcatccgcctgataacgcaaagcaatttgtcgattggttagaccaagcgtctgcggatgaagtaaaaggcgttcgctactccgtatttggatgcggcgataaaaattgggcggggacgtatcaaaaagtgcctgcttttatcgatgaaacgcttgccgctaaaggggcagaaaacatcgctgaccgcggtgaagcagatgcaagcgacgactttgaaggcgcgtatgaagaatggcgtgatcatatgtggagtgacgtagcagcctactttggtctcgacattgaaaacagtgaagataataaatctactctttcacttcaatttgtcgacagcgcggcggatatgccgcttgcgaaaatgcacggtgcgttttcaacgaacgtcgtagcaagcaaagaacttcaacagcctggcagtgcacgaagcacgcgacatcttgaaattgaacttccaaaagaagcttcttatcaagaaggagatcatttaggtgttattcctcgctattatgaaggaatagtaaaccgtgtaacacagaggttcggcctaagcgcatcacagctgatccgtctggaagcagaagaagaaaaattagctcatttgccactcgctaaaacagtatccgtagaagagcttctgcaatacgtggagcttcaagatcctgttacgcgcacgcagcttcgcgcaatggctgctaaaacggtctgcccgccgcataaatttgagcttgaagccttgcttggcaagcaagcctacaaagaacaagtgctggcaaaacgtatctacatgcttgaactgcttgaaaaatacccggcgtgtgaaatgagtttcagcgaatttatcgcccttctgccaagcatacgcccgcgctattactcgatttcttcatcacctcgtgtcgatgaaaaacaagcaagcatcacggtcagcgttgtctcaggaccggcgtggagcggatatggagaatataaaggaattgcgtcgaactatcttgccgagctgcaagaaggagatacgattacgtgctttatttccacaccgcagtcagagtttacgctgccaaaagaccctgaaacgccgcttatcatggtcggaccgggaacaggcgtcgcgccgtttagaggctttgtgcaggcgcgcaaacagctaaaagaacaaggacagtcacttggagaagcacatttatacttcggctgccgttcacctcatgaagactatctgtatcaagaagagcttgaaaacgcccaaagcgaaggcatcattacgcttcataccgctttttctcgcatgccgaatcagccgaaaacatacgttcagcacgtaatggaacaagacggcaagaaattgattgaacttcttgatcaaggagcgcacttctatatttgcggagacggaattcaaatggcacctgccgttgaagcaacgcttatgaaaagctatgctgacgttcaccaagtgagtgaagcagacgctcgcttatggctgcagcagctagaagaaaaaggccgatacgcaaaagacgtgtggctgggg

SEQ ID NO: 956 - protein, 1049 aa, synthetic construct
  REGION 1..1049: note = variant of P450 oxidase from Bacillus megaterium
MTIKEMPQPKTFGELKNLPLLNTDKPVQALMRIADELGEIFKFEAPGSVTRYLSSQRLIKEACDESRFDKNLSQGLKFARDFVGDGLVTSWTHEPNWKKAHNILVPSFSQHAMGRYHAMMVDIAVQLVQKWERLNADEHIEVSEDMTRLTLDTIGLCLFNYRFNSFYRDTPHPFIVSVVRALDEVMNKLQRANPDDPAYDENKRQCQEDIKVMNDYVDKIIADRKARGEQSHDLLTQMLNGKDPETGEPLDDGNIRQQIITFLIAGHQTTSGLLSFALYFLVKNPRVLQKVAEEAARVLVDPVPSYKQVKQLKYVGMVLNEALRLWPVAPMFSLYAKEDTVLGGEYPLTKGDEVMVLVPQLHRDKTIWGDDVEEFRPERFENPSAIPQHAFKPFGNGQRACIGQQFALHSATLVLGMMLKHFDFEDHTNYELVIKESRTLKPEGFVVKAKSKGIPLGGIPSPSTEQSAKKVRKKAENAHNTPLLVLYGSNAGTAEGTARDLADIAMSKGFAPQVATLDSHAGNLPREGAVLIVTASYNGHPPDNAKQFVDWLDQASADEVKGVRYSVFGCGDKNWAGTYQKVPAFIDETLAAKGAENIADRGEADASDDFEGAYEEWRDHMWSDVAAYFGLDIENSEDNKSTLSLQFVDSAADMPLAKMHGAFSTNVVASKELQQPGSARSTRHLEIELPKEASYQEGDHLGVIPRYYEGIVNRVTQRFGLSASQLIRLEAEEEKLAHLPLAKTVSVEELLQYVELQDPVTRTQLRAMAAKTVCPPHKFELEALLGKQAYKEQVLAKRIYMLELLEKYPACEMSFSEFIALLPSIRPRYYSISSSPRVDEKQASITVSVVSGPAWSGYGEYKGIASNYLAELQEGDTITCFISTPQSEFTLPKDPETPLIMVGPGTGVAPFRGFVQARKQLKEQGQSLGEAHLYFGCRSPHEDYLYQEELENAQSEGIITLHTAFSRMPNQPKTYVQHVMEQDGKKLIELLDQGAHFYICGDGIQMAPAVEATLMKSYADVHQVSEADARLWLQQLEEKGRYAKDVWLG

SEQ ID NO: 957 - DNA, 3147 bp, synthetic construct
  misc_feature 1..3147: note = variant of P450 oxidase from Bacillus megaterium
  source 1..3147: mol_type = other DNA
atgacaattaaggaaatgcctcagcctaagacgtttggagaacttaaaaatttaccgttattaaatacagataaaccggttcaagctttgatgcgtattgcggatgaattaggagaaatctttaaattcgaggcgcctggtagcgtaacgcgctatttatcaagtcagcgtctaattaaagaagcatgcgatgaatcacgctttgataaaaacttaagtcaagggcttaaatttgcacgtgattttgttggagacgggctggttacaagctggacgcatgaaccgaattggaaaaaagcgcataatatcttagttccaagctttagtcagcatgcaatggggcgttatcatgcgatgatggtcgatatcgccgtgcagcttgttcaaaagtgggagcgtctaaatgcagatgagcatattgaagtatcggaagacatgacacgtttaacgcttgatacaattggtctttgcctgtttaactatcgctttaacagcttttaccgagatacgcctcatccatttattgtgagtgtggttcgtgcactggatgaagtaatgaacaagctgcagcgagcaaatccagacgacccagcttatgatgaaaacaagcgccagtgtcaagaagatatcaaggtgatgaacgactatgtagataaaattattgcagatcgcaaagcaaggggtgaacaaagtcatgatttattaacgcagatgctaaacggaaaagatccagaaacgggtgagccgcttgatgacgggaacattcgtcagcaaattattacattcttaattgcgggacaccaaacgacaagtggtcttttatcatttgcgctgtatttcttagtgaaaaatccacgtgtattacaaaaagtagcagaagaagcagcacgagttctagtagatcctgttccaagctacaaacaagtcaaacagcttaaatatgttggcatggtcttaaacgaagcgctgcgcttatggccagtagcgcctatgttttccctatatgcaaaagaagatacggtgcttggaggagaatatcctttaacgaaaggcgacgaagtaatggttctggtgcctcagcttcaccgtgataaaacaatttggggagacgatgtggaggagttccgtccagagcgttttgaaaatccaagtgcgattccgcagcatgcgtttaaaccgtttggaaacggtcagcgtgcgtgtatcggtcagcagttcgctcttcatagtgcaacgctggtacttggtatgatgctaaaacactttgactttgaagatcatacaaactacgagctcgttattaaagaatcgcggacgttaaaacctgaaggctttgtggtaaaagcaaaatcgaaaggcattccgcttggcggtattccttcacctagcactgaacagtctgctaaaaaagtacgcaaaaaggcagaaaacgctcataatacgccgctgcttgtgctatacggttcaaatgcgggaacagctgaaggaacggcgcgtgatttagcagatattgcaatgagcaaaggatttgcaccgcaggtcgcaacgcttgattcacacgccggtaatcttccgcgcgaaggagctgtattaattgtaacggcgtcttataacggtcatccgcctgataacgcaaagcaatttgtcgattggttagaccaagcgtctgcggatgaagtaaaaggcgttcgctactccgtatttggatgcggcgataaaaattgggcggggacgtatcaaaaagtgcctgcttttatcgatgaaacgcttgccgctaaaggggcagaaaacatcgctgaccgcggtgaagcagatgcaagcgacgactttgaaggcgcgtatgaagaatggcgtgatcatatgtggagtgacgtagcagcctactttggtctcgacattgaaaacagtgaagataataaatctactctttcacttcaatttgtcgacagcgcggcggatatgccgcttgcgaaaatgcacggtgcgttttcaacgaacgtcgtagcaagcaaagaacttcaacagcctggcagtgcacgaagcacgcgacatcttgaaattgaacttccaaaagaagcttcttatcaagaaggagatcatttaggtgttattcctcgctattatgaaggaatagtaaaccgtgtaacagccaggttcctgctaagcgcatcacagctgatccgtctggaagcagaagaagaaaaattagctcatttgccactcgctaaaacagtatccgtagaagagcttctgcaatacgtggagcttcaagatcctgttacgcgcacgcagcttcgcgcaatggctgctaaaacggtctgcccgccgcataaatttgagcttgaagccttgcttggcaagcaagcctacaaagaacaagtgctggcaaaacgtttaacaatgcttgaactgcttgaaaaatacccggcgtgtgaaatgagtttcagcgaatttatcgcccttctgccaagcatacgtccgcgctattactcgatttcttcatcacctcgtgtcgatgaaaaacaagcaagcatcacggtcagcgttgtctcaggaccggcgtggagcggatatggagaatataaaggaattgcgtcgaactatcttgccgagctgcaagaaggagatacgattacgtgctttatttccacaccgcagtcagagtttacgctgccaaaagaccctgaaacgccgcttatcatggtcggaccgggaacaggcgtcgcgccgtttagaggctttgtgcaggcgcgcaaacagctaaaagaacaaggacagtcacttggagaagcacatttatacttcggctgccgttcacctcatgaagactatctgtatcaagaagagcttgaaaacgcccaaagcgaaggcatcattacgcttcataccgctttttctcgcatgccgaatcagccgaaaacatacgttcagcacgtaatggaacaagacggcaagaaattgattgaacttcttgatcaaggagcgcacttctatatttgcggagacggaagccaaatggcacctgccgttgaagcaacgcttatgaaaagctatgctgacgttcaccaagtgagtgaagcagacgctcgcttatggctgcagcagctagaagaaaaaggccgatacgcaaaagacgtgtggctgggg

SEQ ID NO: 958 - protein, 1049 aa, synthetic construct
  REGION 1..1049: note = variant of P450 oxidase from Bacillus megaterium
MTIKEMPQPKTFGELKNLPLLNTDKPVQALMRIADELGEIFKFEAPGSVTRYLSSQRLIKEACDESRFDKNLSQGLKFARDFVGDGLVTSWTHEPNWKKAHNILVPSFSQHAMGRYHAMMVDIAVQLVQKWERLNADEHIEVSEDMTRLTLDTIGLCLFNYRFNSFYRDTPHPFIVSVVRALDEVMNKLQRANPDDPAYDENKRQCQEDIKVMNDYVDKIIADRKARGEQSHDLLTQMLNGKDPETGEPLDDGNIRQQIITFLIAGHQTTSGLLSFALYFLVKNPRVLQKVAEEAARVLVDPVPSYKQVKQLKYVGMVLNEALRLWPVAPMFSLYAKEDTVLGGEYPLTKGDEVMVLVPQLHRDKTIWGDDVEEFRPERFENPSAIPQHAFKPFGNGQRACIGQQFALHSATLVLGMMLKHFDFEDHTNYELVIKESRTLKPEGFVVKAKSKGIPLGGIPSPSTEQSAKKVRKKAENAHNTPLLVLYGSNAGTAEGTARDLADIAMSKGFAPQVATLDSHAGNLPREGAVLIVTASYNGHPPDNAKQFVDWLDQASADEVKGVRYSVFGCGDKNWAGTYQKVPAFIDETLAAKGAENIADRGEADASDDFEGAYEEWRDHMWSDVAAYFGLDIENSEDNKSTLSLQFVDSAADMPLAKMHGAFSTNVVASKELQQPGSARSTRHLEIELPKEASYQEGDHLGVIPRYYEGIVNRVTARFLLSASQLIRLEAEEEKLAHLPLAKTVSVEELLQYVELQDPVTRTQLRAMAAKTVCPPHKFELEALLGKQAYKEQVLAKRLTMLELLEKYPACEMSFSEFIALLPSIRPRYYSISSSPRVDEKQASITVSVVSGPAWSGYGEYKGIASNYLAELQEGDTITCFISTPQSEFTLPKDPETPLIMVGPGTGVAPFRGFVQARKQLKEQGQSLGEAHLYFGCRSPHEDYLYQEELENAQSEGIITLHTAFSRMPNQPKTYVQHVMEQDGKKLIELLDQGAHFYICGDGSQMAPAVEATLMKSYADVHQVSEADARLWLQQLEEKGRYAKDVWLG

SEQ ID NO: 959 - DNA, 3147 bp, synthetic construct
  misc_feature 1..3147: note = variant of P450 oxidase from Bacillus megaterium
  source 1..3147: mol_type = other DNA
atgacaattaaggaaatgcctcagcctaagacgtttggagaacttaaaaatttaccgttattagatacagataaaccggttcaagctttgatgcgtattgcggatgaattaggagaaatctttaaattcgaggcgcctggtagcgtaacgcgctatttatcaagtcagcgtctaattaaagaagcatgcgatgaatcacgctttgataaaaacttaagtcaagggcttaaatttgcacgtgattttgttggagacgggctggttacaagctggacgcatgaaccgaattggaaaaaagcgcataatatcttagttccaagctttagtcagcatgcaatggggcgttatcatgcgatgatggtcgatatcgccgtgcagcttgttcaaaagtgggagcgtctaaatgcagatgagcatattgaagtatcggaagacatgacacgtttaacgcttgatacaattggtctttgcctgtttaactatcgctttaacagcttttaccgagatacgcctcatccatttattgtgagtgtggttcgtgcactggatgaagtaatgaacaagctgcagcgagcaaatccagacgacccagcttatgatgaaaacaagcgccagtgtcaagaagatatcaaggtgatgaacgactatgtagataaaattattgcagatcgcaaagcaaggggtgaacaaagtcatgatttattaacgcagatgctaaacggaaaagatccagaaacgggtgagccgcttgatgacgggaacattcgtcagcaaattattacattcttaattgcgggacaccaaacgacaagtggtcttttatcatttgcgctgtatttcttagtgaaaaatccacgtgtattacaaaaagtagcagaagaagcagcacgagttctagtagatcctgttccaagctacaaacaagtcaaacagcttaaatatgttggcatggtcttaaacgaagcgctgcgcttatggccagtagcgcctatgttttccctatatgcaaaagaagatacggtgcttggaggagaatatcctttaacgaaaggcgacgaagtaatggttctggtgcctcagcttcaccgtgataaaacaatttggggagacgatgtggaggagttccgtccagagcgttttgaaaatccaagtgcgattccgcagcatgcgtttaaaccgtttggaaacggtcagcgtgcgtgtatcggtcagcagttcgctcttcatagtgcaacgctggtacttggtatgatgctaaaacactttgactttgaagatcatacaaactacgagctcgttattaaagaatcgcggacgttaaaacctgaaggctttgtggtaaaagcaaaatcgaaaggcattccgcttggcggtattccttcacctagcactgaacagtctgctaaaaaagtacgcaaaaaggcagaaaacgctcataatacgccgctgcttgtgctatacggttcaaatgcgggaacagctgaaggaacggcgcgtgatttagcagatattgcaatgagcaaaggatttgcaccgcaggtcgcaacgcttgattcacacgccggtaatcttccgcgcgaaggagctgtattaattgtaacggcgtcttataacggtcatccgcctgataacgcaaagcaatttgtcgattggttagaccaagcgtctgcggatgaagtaaaaggcgttcgctactccgtatttggatgcggcgataaaaattgggcggggacgtatcaaaaagtgcctgcttttatcgatgaaacgcttgccgctaaaggggcagaaaacatcgctgaccgcggtgaagcagatgcaagcgacgactttgaaggcgcgtatgaagaatggcgtgatcatatgtggagtgacgtagcagcctactttggtctcgacattgaaaacagtgaagataataaatctactctttcacttcaatttgtcgacagcgcggcggatatgccgcttgcgaaaatgcacggtgcgttttcaacgaacgtcgtagcaagcaaagaacttcaacagcctggcagtgcacgaagcacgcgacatcttgaaattgaacttccaaaagaagcttcttatcaagaaggagatcatttaggtgttattcctcgctattatgaaggaatagtaaaccgtgtaacacagaggttcggcctaagcgcatcacagctgatccgtctggaagcagaagaagaaaaattagctcatttgccactcgctaaaacagtatccgtagaagagcttctgcaatacgtggagcttcaagatcctgttacgcgcacgcagcttcgcgcaatggctgctaaaacggtctgcccgccgcataaagttgagcttgaagccttgcttggcaagcaagcctacaaagaacaagtggtggcaaaacgtatcactatgcttgaactgcttgaaaaatacccggcgtgtgaaatgagtttcagcgaatttatcgcccttctgccaagcataggtccgcgctattactcgatttcttcatcacctcgtgtcgatgaaaaacaagcaagcatcacggtcagcgttgtctcaggaccggcgtggagcggatatggagaatataaaggaattgcgtcgaactatcttgctgagctgcaagaaggagatacgattacgtgctttatttccacaccgcagtcagagtttacgctgccaaaagaccctgaaacgccgcttatcatggtcggaccgggaacaggcgtcgcgccgtttagaggctttgtgcaggcgcgcaaacagctaaaagaacaaggacagtcacttggagaagcacatttatacttcggctgccgttcacctcatgaagactatctgtatcaagaagagcttgaaaacgcccaaagcgaaggcatcattacgcttcataccgctttttctcgcatgccgaatcagccgaaaacatacgttcagcacgtaatggaacaagacggcaagaaattgattgaacttcttgatcaaggagcgcacttctatatttgcggagacggaagtcaaatggcacctgccgttgaagcaacgcttatgaaaagctatgctgacgttcaccaagtgagtgaagcagacgctcgcttatggctgcagcagctagaagaaaaaggccgatacgcaaaagacgtgtggctgggg

SEQ ID NO: 960 - protein, 1049 aa, synthetic construct
  REGION 1..1049: note = variant of P450 oxidase from Bacillus megaterium
MTIKEMPQPKTFGELKNLPLLDTDKPVQALMRIADELGEIFKFEAPGSVTRYLSSQRLIKEACDESRFDKNLSQGLKFARDFVGDGLVTSWTHEPNWKKAHNILVPSFSQHAMGRYHAMMVDIAVQLVQKWERLNADEHIEVSEDMTRLTLDTIGLCLFNYRFNSFYRDTPHPFIVSVVRALDEVMNKLQRANPDDPAYDENKRQCQEDIKVMNDYVDKIIADRKARGEQSHDLLTQMLNGKDPETGEPLDDGNIRQQIITFLIAGHQTTSGLLSFALYFLVKNPRVLQKVAEEAARVLVDPVPSYKQVKQLKYVGMVLNEALRLWPVAPMFSLYAKEDTVLGGEYPLTKGDEVMVLVPQLHRDKTIWGDDVEEFRPERFENPSAIPQHAFKPFGNGQRACIGQQFALHSATLVLGMMLKHFDFEDHTNYELVIKESRTLKPEGFVVKAKSKGIPLGGIPSPSTEQSAKKVRKKAENAHNTPLLVLYGSNAGTAEGTARDLADIAMSKGFAPQVATLDSHAGNLPREGAVLIVTASYNGHPPDNAKQFVDWLDQASADEVKGVRYSVFGCGDKNWAGTYQKVPAFIDETLAAKGAENIADRGEADASDDFEGAYEEWRDHMWSDVAAYFGLDIENSEDNKSTLSLQFVDSAADMPLAKMHGAFSTNVVASKELQQPGSARSTRHLEIELPKEASYQEGDHLGVIPRYYEGIVNRVTQRFGLSASQLIRLEAEEEKLAHLPLAKTVSVEELLQYVELQDPVTRTQLRAMAAKTVCPPHKVELEALLGKQAYKEQVVAKRITMLELLEKYPACEMSFSEFIALLPSIGPRYYSISSSPRVDEKQASITVSVVSGPAWSGYGEYKGIASNYLAELQEGDTITCFISTPQSEFTLPKDPETPLIMVGPGTGVAPFRGFVQARKQLKEQGQSLGEAHLYFGCRSPHEDYLYQEELENAQSEGIITLHTAFSRMPNQPKTYVQHVMEQDGKKLIELLDQGAHFYICGDGSQMAPAVEATLMKSYADVHQVSEADARLWLQQLEEKGRYAKDVWLG

SEQ ID NO: 961 - DNA, 3147 bp, synthetic construct
  misc_feature 1..3147: note = variant of P450 oxidase from Bacillus megaterium
  source 1..3147: mol_type = other DNA
atgacaattaaggaaatgcctcagcctaagacgtttggagaacttaaaaatttaccgttattagatacagataaaccggttcaagctttgatgcgtattgcggatgaattaggagaaatctttaaattcgaggcgcctggtagcgtaacgcgctatttatcaagtcagcgtctaattaaagaagcatgcgatgaatcacgctttgataaaaacttaagtcaagggcttaaatttgcacgtgattttgttggagacgggctggttacaagctggacgcatgaaccgaattggaaaaaagcgcataatatcttagttccaagctttagtcagcatgcaatggggcgttatcatgcgatgatggtcgatatcgccgtgcagcttgttcaaaagtgggagcgtctaaatgcagatgagcatattgaagtatcggaagacatgacacgtttaacgcttgatacaattggtctttgcctgtttaactatcgctttaacagcttttaccgagatacgcctcatccatttattgtgagtgtggttcgtgcactggatgaagtaatgaacaagctgcagcgagcaaatccagacgacccagcttatgatgaaaacaagcgccagtgtcaagaagatatcaaggtgatgaacgactatgtagataaaattattgcagatcgcaaagcaaggggtgaacaaagtcatgatttattaacgcagatgctaaacggaaaagatccagaaacgggtgagccgcttgatgacgggaacattcgtcagcaaattattacattcttaattgcgggacaccaaacgacaagtggtcttttatcatttgcgctgtatttcttagtgaaaaatccacgtgtattacaaaaagtagcagaagaagcagcacgagttctagtagatcctgttccaagctacaaacaagtcaaacagcttaaatatgttggcatggtcttaaacgaagcgctgcgcttatggccagtagcgcctatgttttccctatatgcaaaagaagatacggtgcttggaggagaatatcctttaacgaaaggcgacgaagtaatggttctggtgcctcagcttcaccgtgataaaacaatttggggagacgatgtggaggagttccgtccagagcgttttgaaaatccaagtgcgattccgcagcatgcgtttaaaccgtttggaaacggtcagcgtgcgtgtatcggtcagcagttcgctcttcatagtgcaacgctggtacttggtatgatgctaaaacactttgactttgaagatcatacaaactacgagctcgttattaaagaatcgcggacgttaaaacctgaaggctttgtggtaaaagcaaaatcgaaaggcattccgcttggcggtattccttcacctagcactgaacagtctgctaaaaaagtacgcaaaaaggcagaaaacgctcataatacgccgctgcttgtgctatacggttcaaatgcgggaacagctgaaggaacggcgcgtgatttagcagatattgcaatgagcaaaggatttgcaccgcaggtcgcaacgcttgattcacacgccggtaatcttccgcgcgaaggagctgtattaattgtaacggcgtcttataacggtcatccgcctgataacgcaaagcaatttgtcgattggttagaccaagcgtctgcggatgaagtaaaaggcgttcgctactccgtatttggatgcggcgataaaaattgggcggggacgtatcaaaaagtgcctgcttttatcgatgaaacgcttgccgctaaaggggcagaaaacatcgctgaccgcggtgaagcagatgcaagcgacgactttgaaggcgcgtatgaactgtggcgtgatcatatgtggagtgacgtagcagcctactttggtctcgacattgaaaacagtgaagataataaatctactctttcacttcaatttgtcgacagcgcggcggatatgccgcttgcgaaaatgcacggtgcgttttcaacgaacgtcgtagcaagcaaagaacttcaacagcctggcagtgcacgaagcacgcgacatcttgaaattgaacttccaaaagaagcttcttatcaagaaggagatcatttaggtgttattcctcgctattatgaaggaatagtaaaccgtgtaacaattaggttcggcctaagcgcatcacagctgatccgtctggaagcagaagaagaaaaattagctcatttgccactcgctaaaacagtatccgtagaagagcttctgcaatacgtggagcttcaagatcctgttacgcgcacgcagcttcgcgcaatggctgctaaaacggtctgcccgccgcataaagtagagcttgaagccttgcttggcaagcaagcctacaaagaacaagtgctggcaaaacgtttaacaatgcttgaactgcttgaaaaatacccggcgtgtgaaatgagtttcagcgaatttatcgcccttctgccaagcatacgcccgcgctattactcgatttcttcatcacctcgtgtcgatgaaaaacaagcaagcatcacggtcagcgttgtctcaggaccggcgtggagcggatatggagaatataaaggaattgcgtcgaactatcttgccgagctgcaagaaggagatacgattacgtgctttatttccacaccgcagtcagagtttacgctgccaaaagaccctgaaacgccgcttatcatggtcggaccgggaacaggcgtcgcgccgtttagaggctttgtgcaggcgcgcaaacagctaaaagaacaaggacagtcacttggagaagcacatttatacttcggctgccgttcacctcatgaagactatctgtatcaagaagagcttgaaaacgcccaaagcgaaggcatcattacgcttcataccgctttttctcgcatgccgaatcagccgaaaacatacgttcagcacgtaatggaacaagacggcaagaaattgattgaacttcttgatcaaggagcgcacttctatatttgcggagacggaattcaaatggcacctgccgttgaagcaacgcttatgaaaagctatgctgacgttcaccaagtgagtgaagcagacgctcgcttatggctgcagcagctagaagaaaaaggccgatacgcaaaagacgtgtggctgggg

SEQ ID NO: 962 - protein, 1049 aa, synthetic construct
  REGION 1..1049: note = variant of P450 oxidase from Bacillus megaterium
MTIKEMPQPKTFGELKNLPLLDTDKPVQALMRIADELGEIFKFEAPGSVTRYLSSQRLIKEACDESRFDKNLSQGLKFARDFVGDGLVTSWTHEPNWKKAHNILVPSFSQHAMGRYHAMMVDIAVQLVQKWERLNADEHIEVSEDMTRLTLDTIGLCLFNYRFNSFYRDTPHPFIVSVVRALDEVMNKLQRANPDDPAYDENKRQCQEDIKVMNDYVDKIIADRKARGEQSHDLLTQMLNGKDPETGEPLDDGNIRQQIITFLIAGHQTTSGLLSFALYFLVKNPRVLQKVAEEAARVLVDPVPSYKQVKQLKYVGMVLNEALRLWPVAPMFSLYAKEDTVLGGEYPLTKGDEVMVLVPQLHRDKTIWGDDVEEFRPERFENPSAIPQHAFKPFGNGQRACIGQQFALHSATLVLGMMLKHFDFEDHTNYELVIKESRTLKPEGFVVKAKSKGIPLGGIPSPSTEQSAKKVRKKAENAHNTPLLVLYGSNAGTAEGTARDLADIAMSKGFAPQVATLDSHAGNLPREGAVLIVTASYNGHPPDNAKQFVDWLDQASADEVKGVRYSVFGCGDKNWAGTYQKVPAFIDETLAAKGAENIADRGEADASDDFEGAYELWRDHMWSDVAAYFGLDIENSEDNKSTLSLQFVDSAADMPLAKMHGAFSTNVVASKELQQPGSARSTRHLEIELPKEASYQEGDHLGVIPRYYEGIVNRVTIRFGLSASQLIRLEAEEEKLAHLPLAKTVSVEELLQYVELQDPVTRTQLRAMAAKTVCPPHKVELEALLGKQAYKEQVLAKRLTMLELLEKYPACEMSFSEFIALLPSIRPRYYSISSSPRVDEKQASITVSVVSGPAWSGYGEYKGIASNYLAELQEGDTITCFISTPQSEFTLPKDPETPLIMVGPGTGVAPFRGFVQARKQLKEQGQSLGEAHLYFGCRSPHEDYLYQEELENAQSEGIITLHTAFSRMPNQPKTYVQHVMEQDGKKLIELLDQGAHFYICGDGIQMAPAVEATLMKSYADVHQVSEADARLWLQQLEEKGRYAKDVWLG

SEQ ID NO: 963 - DNA, 3147 bp, synthetic construct
  misc_feature 1..3147: note = variant of P450 oxidase from Bacillus megaterium
  source 1..3147: mol_type = other DNA
atgacaattaaggaaatgcctcagcctaagacgtttggagaacttaaaaatttaccgttattaaatacagataaaccggttcaagctttgatgcgtattgcggatgaattaggagaaatctttaaattcgaggcgcctggtagcgtaacgcgctatttatcaagtcagcgtctaattaaagaagcatgcgatgaatcacgctttgataaaaacttaagtcaagggcttaaatttgcacgtgattttgttggagacgggctggttacaagctggacgcatgaaccgaattggaaaaaagcgcataatatcttagttccaagctttagtcagcatgcaatggggcgttatcatgcgatgatggtcgatatcgccgtgcagcttgttcaaaagtgggagcgtctaaatgcagatgagcatattgaagtatcggaagacatgacacgtttaacgcttgatacaattggtctttgcctgtttaactatcgctttaacagcttttaccgagatacgcctcatccatttattgtgagtgtggttcgtgcactggatgaagtaatgaacaagctgcagcgagcaaatccagacgacccagcttatgatgaaaacaagcgccagtgtcaagaagatatcaaggtgatgaacgactatgtagataaaattattgcagatcgcaaagcaaggggtgaacaaagtcatgatttattaacgcagatgctaaacggaaaagatccagaaacgggtgagccgcttgatgacgggaacattcgtcagcaaattattacattcttaattgcgggacaccaaacgacaagtggtcttttatcatttgcgctgtatttcttagtgaaaaatccacgtgtattacaaaaagtagcagaagaagcagcacgagttctagtagatcctgttccaagctacaaacaagtcaaacagcttaaatatgttggcatggtcttaaacgaagcgctgcgcttatggccagtagcgcctatgttttccctatatgcaaaagaagatacggtgcttggaggagaatatcctttaacgaaaggcgacgaagtaatggttctggtgcctcagcttcaccgtgataaaacaatttggggagacgatgtggaggagttccgtccagagcgttttgaaaatccaagtgcgattccgcagcatgcgtttaaaccgtttggaaacggtcagcgtgcgtgtatcggtcagcagttcgctcttcatagtgcaacgctggtacttggtatgatgctaaaacactttgactttgaagatcatacaaactacgagctcgttattaaagaatcgcggacgttaaaacctgaaggctttgtggtaaaagcaaaatcgaaaggcattccgcttggcggtattccttcacctagcactgaacagtctgctaaaaaagtacgcaaaaaggcagaaaacgctcataatacgccgctgcttgtgctatacggttcaaatgcgggaacagctgaaggaacggcgcgtgatttagcagatattgcaatgagcaaaggatttgcaccgcaggtcgcaacgcttgattcacacgccggtaatcttccgcgcgaaggagctgtattaattgtaacggcgtcttataacggtcatccgcctgataacgcaaagcaatttgtcgactggttagaccaagcgtctgcggatgaagtaaaaggcgttcgctactccgtatttggatgcggcgataaaaattgggcggggacgtatcaaaaagtgcctgcttttatcgatgaaacgcttgccgctaaaggggcagaaaacatcgctgaccgcggtgaagcagatgcaagcgacgactttgaaggcgcgtatgaagaatggcgtgatcatatgtggagtgacgtagcagcctactttggtctcgacattgaaaacagtgaagataataaatctactctttcactgcaatttgtcgacagcgcggcggatatgccgcttgcgaaaatgcacggtgcgttttcaacgaacgtcgtagcaagcaaagaacttcaacagcctggcagtgcacgaagcacgcgacatcttgaaattgaacttccaaaagaagcttcttatcaagaaggagatcatttaggtgttattcctcgctattatgaaggaatagtaaaccgtgtaacagcaaggttcggcctaagcgcatcacagctgatccgtctggaagcagaagaagaaaaattagctcatttgccactcgctaaaacagtatccgtagaagagcttctgcaatacgtggagcttcaagatcctgttacgcgcacgcagcttcgcgcaatggctgctaaaacggtctgcccgccgcataaagtagagcttgaagccttgcttggcaagcaagcctacaaagaacaagtgctggcaaaacgtctgtacatgcttgaactgcttgaaaaatacccggcgtgtgaaatgagtttcagcgaatttatcgcccttctgccaagcatacgcccgcgctattactcgatttcttcatcacctcgtgtcgatgaaaaacaagcaagcatcacggtcagcgttgtctcaggaccggcgtggagcggatatggagaatataaaggaattgcgtcgaactatcttgctgagctgcaagaaggagatacgattacgtgctttatttccacaccgcagtcagagtttacgctgccaaaagaccctgaaacgccgcttatcatggtcggaccgggaacaggcgtcgcgccgtttagaggctttgtgcaggcgcgcaaacagctaaaagaacaaggacagtcacttggagaagcacatttatacttcggctgccgttcacctcatgaagactatctgtatcaagaagagcttgaaaacgcccaaagcgaaggcatcattacgcttcataccgctttttctcgcatgccgaatcagccgaaaacatacgttcagcacgtaatggaacaagacggcaagaaattgattgaacttcttgatcaaggagcgcacttctatatttgcggagacggaattcaaatggcacctgccgttgaagcaacgcttatgaaaagctatgctgacgttcaccaagtgagtgaagcagacgctcgcttatggctgcagcagctagaagaaaaaggccgatacgcaaaagacgtgtggctgggg

SEQ ID NO: 964 - protein, 1049 aa, synthetic construct
  REGION 1..1049: note = variant of P450 oxidase from Bacillus megaterium
MTIKEMPQPKTFGELKNLPLLNTDKPVQALMRIADELGEIFKFEAPGSVTRYLSSQRLIKEACDESRFDKNLSQGLKFARDFVGDGLVTSWTHEPNWKKAHNILVPSFSQHAMGRYHAMMVDIAVQLVQKWERLNADEHIEVSEDMTRLTLDTIGLCLFNYRFNSFYRDTPHPFIVSVVRALDEVMNKLQRANPDDPAYDENKRQCQEDIKVMNDYVDKIIADRKARGEQSHDLLTQMLNGKDPETGEPLDDGNIRQQIITFLIAGHQTTSGLLSFALYFLVKNPRVLQKVAEEAARVLVDPVPSYKQVKQLKYVGMVLNEALRLWPVAPMFSLYAKEDTVLGGEYPLTKGDEVMVLVPQLHRDKTIWGDDVEEFRPERFENPSAIPQHAFKPFGNGQRACIGQQFALHSATLVLGMMLKHFDFEDHTNYELVIKESRTLKPEGFVVKAKSKGIPLGGIPSPSTEQSAKKVRKKAENAHNTPLLVLYGSNAGTAEGTARDLADIAMSKGFAPQVATLDSHAGNLPREGAVLIVTASYNGHPPDNAKQFVDWLDQASADEVKGVRYSVFGCGDKNWAGTYQKVPAFIDETLAAKGAENIADRGEADASDDFEGAYEEWRDHMWSDVAAYFGLDIENSEDNKSTLSLQFVDSAADMPLAKMHGAFSTNVVASKELQQPGSARSTRHLEIELPKEASYQEGDHLGVIPRYYEGIVNRVTARFGLSASQLIRLEAEEEKLAHLPLAKTVSVEELLQYVELQDPVTRTQLRAMAAKTVCPPHKVELEALLGKQAYKEQVLAKRLYMLELLEKYPACEMSFSEFIALLPSIRPRYYSISSSPRVDEKQASITVSVVSGPAWSGYGEYKGIASNYLAELQEGDTITCFISTPQSEFTLPKDPETPLIMVGPGTGVAPFRGFVQARKQLKEQGQSLGEAHLYFGCRSPHEDYLYQEELENAQSEGIITLHTAFSRMPNQPKTYVQHVMEQDGKKLIELLDQGAHFYICGDGIQMAPAVEATLMKSYADVHQVSEADARLWLQQLEEKGRYAKDVWLG

SEQ ID NO: 965 - DNA, 3147 bp, synthetic construct
  misc_feature 1..3147: note = variant of P450 oxidase from Bacillus megaterium
  source 1..3147: mol_type = other DNA
atgacaattaaggaaatgcctcagcctaagacgtttggagaacttaaaaatttaccgttattaaacacagataaaccggttcaagctttgatgcgtattgcggatgaattaggagaaatctttaaattcgaggcgcctggtagcgtaacgcgctatttatcaagtcagcgtctaattaaagaagcatgcgatgaatcacgctttgataaaaacttaagtcaagggcttaaatttgcacgtgattttgttggagacgggctggttacaagctggacgcatgaaccgaattggaaaaaagcgcataatatcttagttccaagctttagtcagcatgcaatggggcgttatcatgcgatgatggtcgatatcgccgtgcagcttgttcaaaagtgggagcgtctaaatgcagatgagcatattgaagtatcggaagacatgacacgtttaacgcttgatacaattggtctttgcctgtttaactatcgctttaacagcttttaccgagatacgcctcatccatttattgtgagtgtggttcgtgcactggatgaagtaatgaacaagctgcagcgagcaaatccagacgacccagcttatgatgaaaacaagcgccagtgtcaagaagatatcaaggtgatgaacgactatgtagataaaattattgcagatcgcaaagcaaggggtgaacaaagtcatgatttattaacgcagatgctaaacggaaaagatccagaaacgggtgagccgcttgatgacgggaacattcgtcagcaaattattacattcttaattgcgggacaccaaacgacaagtggtcttttatcatttgcgctgtatttcttagtgaaaaatccacgtgtattacaaaaagtagcagaagaagcagcacgagttctagtagatcctgttccaagctacaaacaagtcaaacagcttaaatatgttggcatggtcttaaacgaagcgctgcgcttatggccagtagcgcctatgttttccctatatgcaaaagaagatacggtgcttggaggagaatatcctttaacgaaaggcgacgaagtaatggttctggtgcctcagcttcaccgtgataaaacaatttggggagacgatgtggaggagttccgtccagagcgttttgaaaatccaagtgcgattccgcagcatgcgtttaaaccgtttggaaacggtcagcgtgcgtgtatcggtcagcagttcgctcttcatagtgcaacgctggtacttggtatgatgctaaaacactttgactttgaagatcatacaaactacgagctcgttattaaagaatcgcggacgttaaaacctgaaggctttgtggtaaaagcaaaatcgaaaggcattccgcttggcggtattccttcacctagcactgaacagtctgctaaaaaagtacgcaaaaaggcagaaaacgctcataatacgccgctgcttgtgctatacggttcaaatgcgggaacagctgaaggaacggcgcgtgatttagcagatattgcaatgagcaaaggatttgcaccgcaggtcgcaacgcttgattcacacgccggtaatcttccgcgcgaaggagctgtattaattgtaacggcgtcttataacggtcatccgcctgataacgcaaagcaatttgtcgactggttagaccaagcgtctgcggatgaagtaaaaggcgttcgctactccgtatttggatgcggcgataaaaattgggcggggacgtatcaaaaagtgcctgcttttatcgatgaaacgcttgccgctaaaggggcagaaaacatcgctgaccgcggtgaagcagatgcaagcgacgactttgaaggcgcgtatgaagaatggcgtgatcatatgtggagtgacgtagcagcctactttggtctcgacattgaaaacagtgaagataatgtctctactctttcacttcaatttgtcgacagcgcggcggatatgccgcttgcgaaaatgcacggtgcgttttcaacgaacgtcgtagcaagcaaagaacttcaacagcctggcagtgcacgaagcacgcgacatcttgaaattgaacttccaaaagaagcttcttatcaagaaggagatcatttaggtgttattcctcgctattatgaaggaatagtaaaccgtgtaacagcaaggttcggcctaagcgcatcacagctgatccgtctggaagcagaagaagaaaaattagctcatttgccactcgctaaaacagtatccgtagaagagcttctgcaatacgtggagcttcaagatcctgttacgcgcacgcagcttcgcgcaatggctgctaaaacggtctgcccgccgcataaagtagagcttgaagccttgcttggcaagcaagcctacaaagaacaagtgctggcaaaacgtttaacaatgcttgaactgcttgaaaaatacccggcgtgtgaaatgagtttcagcgaatttatcgcccttctgccaagcatacgcccgcgctattactcgatttcttcatcacctcgtgtcgatgaaaaacaagcaagcatcacggtcagcgttgtctcaggaccggcgtggagcggatatggagaatataaaggaattgcgtcgaactatcttgccgagctgcaagaaggagatacgattacgtgctttatttccacaccgcagtcagagtttacgctgccaaaagaccctgaaacgccgcttatcatggtcggaccgggaacaggcgtcgcgccgtttagaggctttgtgcaggcgcgcaaacagctaaaagaacaaggacagtcacttggagaagcacatttatacttcggctgccgttcacctcatgaagactatctgtatcaagaagagcttgaaaacgcccaaagcgaaggcatcattacgcttcataccgctttttctcgcatgccgaatcagccgaaaacatacgttcagcacgtaatggaacaagacggcaagaaattgattgaacttcttgatcaaggagcgcacttctatatttgcggagacggaagccaaatggcacctgccgttgaagcaacgcttatgaaaagctatgctgacgttcaccaagtgagtgaagcagacgctcgcttatggctgcagcagctagaagaaaaaggccgatacgcaaaagacgtgtggctgggg

SEQ ID NO: 966 - protein, 1049 aa, synthetic construct
  REGION 1..1049: note = variant of P450 oxidase from Bacillus megaterium
MTIKEMPQPKTFGELKNLPLLNTDKPVQALMRIADELGEIFKFEAPGSVTRYLSSQRLIKEACDESRFDKNLSQGLKFARDFVGDGLVTSWTHEPNWKKAHNILVPSFSQHAMGRYHAMMVDIAVQLVQKWERLNADEHIEVSEDMTRLTLDTIGLCLFNYRFNSFYRDTPHPFIVSVVRALDEVMNKLQRANPDDPAYDENKRQCQEDIKVMNDYVDKIIADRKARGEQSHDLLTQMLNGKDPETGEPLDDGNIRQQIITFLIAGHQTTSGLLSFALYFLVKNPRVLQKVAEEAARVLVDPVPSYKQVKQLKYVGMVLNEALRLWPVAPMFSLYAKEDTVLGGEYPLTKGDEVMVLVPQLHRDKTIWGDDVEEFRPERFENPSAIPQHAFKPFGNGQRACIGQQFALHSATLVLGMMLKHFDFEDHTNYELVIKESRTLKPEGFVVKAKSKGIPLGGIPSPSTEQSAKKVRKKAENAHNTPLLVLYGSNAGTAEGTARDLADIAMSKGFAPQVATLDSHAGNLPREGAVLIVTASYNGHPPDNAKQFVDWLDQASADEVKGVRYSVFGCGDKNWAGTYQKVPAFIDETLAAKGAENIADRGEADASDDFEGAYEEWRDHMWSDVAAYFGLDIENSEDNVSTLSLQFVDSAADMPLAKMHGAFSTNVVASKELQQPGSARSTRHLEIELPKEASYQEGDHLGVIPRYYEGIVNRVTARFGLSASQLIRLEAEEEKLAHLPLAKTVSVEELLQYVELQDPVTRTQLRAMAAKTVCPPHKVELEALLGKQAYKEQVLAKRLTMLELLEKYPACEMSFSEFIALLPSIRPRYYSISSSPRVDEKQASITVSVVSGPAWSGYGEYKGIASNYLAELQEGDTITCFISTPQSEFTLPKDPETPLIMVGPGTGVAPFRGFVQARKQLKEQGQSLGEAHLYFGCRSPHEDYLYQEELENAQSEGIITLHTAFSRMPNQPKTYVQHVMEQDGKKLIELLDQGAHFYICGDGSQMAPAVEATLMKSYADVHQVSEADARLWLQQLEEKGRYAKDVWLG

SEQ ID NO: 967 - DNA, 3147 bp, synthetic construct
  misc_feature 1..3147: note = variant of P450 oxidase from Bacillus megaterium
  source 1..3147: mol_type = other DNA
atgacaattaaggaaatgcctcagcctaagacgtttggagaacttaaaaatttaccgttattaaatacagataaaccggttcaagctttgatgcgtattgcggatgaattaggagaaatctttaaattcgaggcgcctggtagcgtaacgcgctatttatcaagtcagcgtctaattaaagaagcatgcgatgaatcacgctttgataaaaacttaagtcaagggcttaaatttgcacgtgattttgttggagacgggctggttacaagctggacgcatgaaccgaattggaaaaaagcgcataatatcttagttccaagctttagtcagcatgcaatggggcgttatcatgcgatgatggtcgatatcgccgtgcagcttgttcaaaagtgggagcgtctaaatgcagatgagcatattgaagtatcggaagacatgacacgtttaacgcttgatacaattggtctttgcctgtttaactatcgctttaacagcttttaccgagatacgcctcatccatttattgtgagtgtggttcgtgcactggatgaagtaatgaacaagctgcagcgagcaaatccagacgacccagcttatgatgaaaacaagcgccagtgtcaagaagatatcaaggtgatgaacgactatgtagataaaattattgcagatcgcaaagcaaggggtgaacaaagtcatgatttattaacgcagatgctaaacggaaaagatccagaaacgggtgagccgcttgatgacgggaacattcgtcagcaaattattacattcttaattgcgggacaccaaacgacaagtggtcttttatcatttgcgctgtatttcttagtgaaaaatccacgtgtattacaaaaagtagcagaagaagcagcacgagttctagtagatcctgttccaagctacaaacaagtcaaacagcttaaatatgttggcatggtcttaaacgaagcgctgcgcttatggccagtagcgcctatgttttccctatatgcaaaagaagatacggtgcttggaggagaatatcctttaacgaaaggcgacgaagtaatggttctggtgcctcagcttcaccgtgataaaacaatttggggagacgatgtggaggagttccgtccagagcgttttgaaaatccaagtgcgattccgcagcatgcgtttaaaccgtttggaaacggtcagcgtgcgtgtatcggtcagcagttcgctcttcatagtgcaacgctggtacttggtatgatgctaaaacactttgactttgaagatcatacaaactacgagctcgttattaaagaatcgcggacgttaaaacctgaaggctttgtggtaaaagcaaaatcgaaaggcattccgcttggcggtattccttcacctagcactgaacagtctgctaaaaaagtacgcaaaaaggcagaaaacgctcataatacgccgctgcttgtgctatacggttcaaatgcgggaacagctgaaggaacggcgcgtgatttagcagatattgcaatgagcaaaggatttgcaccgcaggtcgcaacgcttgattcacacgccggtaatcttccgcgcgaaggagctgtattaattgtaacggcgtcttataacggtcatccgcctgataacgcaaagcaatttgtcgattggttagaccaagcgtctgcggatgaagtaaaaggcgttcgctactccgtatttggatgcggcgataaaaattgggcggggacgtatcaaaaagtgcctgcttttatcgatgaaacgcttgccgctaaaggggcagaaaacatcgctgaccgcggtgaagcagatgcaagcgacgactttgaaggcgcgtatgaagaatggcgtgatcatatgtggagtgacgtagcagcctactttggtctcgacattgaaaacagtgaagataataaatctactctttcacttcaatttgtcgacagcgcggcggatatgccgcttgcgaaaatgcacggtgcgttttcaacgaacgtcgtagcaagcaaagaacttcaacagcctggcagtgcacgaagcacgcgacatcttgaaattgaacttccaaaagaagcttcttatcaagaaggagatcatttaggtgttattcctcgctattatgaaggaatagtaaaccgtgtaacacagaggttcggcctaagcgcatcacagctgatccgtctggaagcagaagaagaaaaattagctcatttgccactcgctaaaacagtatccgtagaagagcttctgcaatacgtggagcttcaagatcctgttacgcgcacgcagcttcgcgcaatggctgctaaaacggtctgcccgccgcataaagtagagcttgaagccttgcttggcaagcaagcctacaaagaacaagtgctggcaaaacgtttaacaatgcttgaactgcttgaaaaatacccggcgtgtgaaatgagtttcagcgaatttatcgcccttctgccaagcatacgcccgcgctattactcgatttcttcatcacctcgtgtcgatgaaaaacaagcaagcatcacggtcagcgttgtctcaggaccggcgtggagcggatatggagaatataaaggaattgcgtcgaactatcttgctgagctgcaagaaggagatacgattacgtgctttatttccacaccgcagtcagagtttacgctgccaaaagaccctgaaacgccgcttatcatggtcggaccgggaacaggcgtcgcgccgtttagaggctttgtgcaggcgcgcaaacagctaaaagaacaaggacagtcacttggagaagcacatttatacttcggctgccgttcacctcatgaagactatctgtatcaagaagagcttgaaaacgcccaaagcgaaggcatcattacgcttcataccgctttttctcgcatgccgaatcagccgaaaacatacgttcagcacgtaatggaacaagacggcaagaaattgattgaacttcttgatcaaggagcgcacttctatatttgcggagacggaattcaaatggcacctgccgttgaagcaacgcttatgaaaagctatgctgacgttcaccaagtgagtgaagcagacgctcgcttatggctgcagcagctagaagaaaaaggccgatacgcaaaagacgtgtggctgggg

SEQ ID NO: 968 - protein, 1049 aa, synthetic construct
  REGION 1..1049: note = variant of P450 oxidase from Bacillus megaterium
MTIKEMPQPKTFGELKNLPLLNTDKPVQALMRIADELGEIFKFEAPGSVTRYLSSQRLIKEACDESRFDKNLSQGLKFARDFVGDGLVTSWTHEPNWKKAHNILVPSFSQHAMGRYHAMMVDIAVQLVQKWERLNADEHIEVSEDMTRLTLDTIGLCLFNYRFNSFYRDTPHPFIVSVVRALDEVMNKLQRANPDDPAYDENKRQCQEDIKVMNDYVDKIIADRKARGEQSHDLLTQMLNGKDPETGEPLDDGNIRQQIITFLIAGHQTTSGLLSFALYFLVKNPRVLQKVAEEAARVLVDPVPSYKQVKQLKYVGMVLNEALRLWPVAPMFSLYAKEDTVLGGEYPLTKGDEVMVLVPQLHRDKTIWGDDVEEFRPERFENPSAIPQHAFKPFGNGQRACIGQQFALHSATLVLGMMLKHFDFEDHTNYELVIKESRTLKPEGFVVKAKSKGIPLGGIPSPSTEQSAKKVRKKAENAHNTPLLVLYGSNAGTAEGTARDLADIAMSKGFAPQVATLDSHAGNLPREGAVLIVTASYNGHPPDNAKQFVDWLDQASADEVKGVRYSVFGCGDKNWAGTYQKVPAFIDETLAAKGAENIADRGEADASDDFEGAYEEWRDHMWSDVAAYFGLDIENSEDNKSTLSLQFVDSAADMPLAKMHGAFSTNVVASKELQQPGSARSTRHLEIELPKEASYQEGDHLGVIPRYYEGIVNRVTQRFGLSASQLIRLEAEEEKLAHLPLAKTVSVEELLQYVELQDPVTRTQLRAMAAKTVCPPHKVELEALLGKQAYKEQVLAKRLTMLELLEKYPACEMSFSEFIALLPSIRPRYYSISSSPRVDEKQASITVSVVSGPAWSGYGEYKGIASNYLAELQEGDTITCFISTPQSEFTLPKDPETPLIMVGPGTGVAPFRGFVQARKQLKEQGQSLGEAHLYFGCRSPHEDYLYQEELENAQSEGIITLHTAFSRMPNQPKTYVQHVMEQDGKKLIELLDQGAHFYICGDGIQMAPAVEATLMKSYADVHQVSEADARLWLQQLEEKGRYAKDVWLG

SEQ ID NO: 969 - DNA, 3147 bp, synthetic construct
  misc_feature 1..3147: note = variant of P450 oxidase from Bacillus megaterium
  source 1..3147: mol_type = other DNA
atgacaattaaggaaatgcctcagcctaagacgtttggagaacttaaaaatttaccgttattaaacacagataaaccggttcaagctttgatgcgtattgcggatgaattaggagaaatctttaaattcgaggcgcctggtagcgtaacgcgctatttatcaagtcagcgtctaattaaagaagcatgcgatgaatcacgctttgataaaaacttaagtcaagggcttaaatttgcacgtgattttgttggagacgggctggttacaagctggacgcatgaaccgaattggaaaaaagcgcataatatcttagttccaagctttagtcagcatgcaatggggcgttatcatgcgatgatggtcgatatcgccgtgcagcttgttcaaaagtgggagcgtctaaatgcagatgagcatattgaagtatcggaagacatgacacgtttaacgcttgatacaattggtctttgcctgtttaactatcgctttaacagcttttaccgagatacgcctcatccatttattgtgagtgtggttcgtgcactggatgaagtaatgaacaagctgcagcgagcaaatccagacgacccagcttatgatgaaaacaagcgccagtgtcaagaagatatcaaggtgatgaacgactatgtagataaaattattgcagatcgcaaagcaaggggtgaacaaagtcatgatttattaacgcagatgctaaacggaaaagatccagaaacgggtgagccgcttgatgacgggaacattcgtcagcaaattattacattcttaattgcgggacaccaaacgacaagtggtcttttatcatttgcgctgtatttcttagtgaaaaatccacgtgtattacaaaaagtagcagaagaagcagcacgagttctagtagatcctgttccaagctacaaacaagtcaaacagcttaaatatgttggcatggtcttaaacgaagcgctgcgcttatggccagtagcgcctatgttttccctatatgcaaaagaagatacggtgcttggaggagaatatcctttaacgaaaggcgacgaagtaatggttctggtgcctcagcttcaccgtgataaaacaatttggggagacgatgtggaggagttccgtccagagcgttttgaaaatccaagtgcgattccgcagcatgcgtttaaaccgtttggaaacggtcagcgtgcgtgtatcggtcagcagttcgctcttcatagtgcaacgctggtacttggtatgatgctaaaacactttgactttgaagatcatacaaactacgagctcgttattaaagaatcgcggacgttaaaacctgaaggctttgtggtaaaagcaaaatcgaaaggcattccgcttggcggtattccttcacctagcactgaacagtctgctaaaaaagtacgcaaaaaggcagaaaacgctcataatacgccgctgcttgtgctatacggttcaaatgcgggaacagctgaaggaacggcgcgtgatttagcagatattgcaatgagcaaaggatttgcaccgcaggtcgcaacgcttgattcacacgccggtaatcttccgcgcgaaggagctgtattaattgtaacggcgtcttataacggtcatccgcctgataacgcaaagcaatttgtcacttggttagaccaagcgtctgcggatgaagtaaaaggcgttcgctactccgtatttggatgcggcgataaaaattgggcggggacgtatcaaaaagtgcctgcttttatcgatgaaacgcttgccgctaaaggggcagaaaacatcgctgaccgcggtgaagcagatgcaagcgacgactttgaaggcgcgtatgaagaatggcgtgatcatatgtggagtgacgtagcagcctactttggtctcgacattgaaaacagtgaagataatgactctactctttcacttcaatttgtcgacagcgcggcggatatgccgcttgcgaaaatgcacggtgcgttttcaacgaacgtcgtagcaagcaaagaacttcaacagcctggcagtgcacgaagcacgcgacatcttgaaattgaacttccaaaagaagcttcttatcaagaaggagatcatttaggtgttattcctcgctattatgaaggaatagtaaaccgtgtaacaattaggttcggcctaagcgcatcacagctgatccgtctggaagcagaagaagaaaaattagctcatttgccactcgctaaaacagtatccgtagaagagcttctgcaatacgtggagcttcaagatcctgttacgcgcacgcagcttcgcgcaatggctgctaaaacggtctgcccgccgcataaagtagagcttgaagccttgcttggcaagcaagcctacaaagaacaagtgctggcaaaacgtttaacaatgcttgaactgcttgaaaaatacccggcgtgtgaaatgagtttcagcgaatttatcgcccttctgccaagcatacgcccgcgctattactcgatttcttcatcacctcgtgtcgatgaaaaacaagcaagcatcacggtcagcgttgtctcaggaccggcgtggagcggatatggagaatataaaggaattgcgtcgaactatcttgccgagctgcaagaaggagatacgattacgtgctttatttccacaccgcagtcagagtttacgctgccaaaagaccctgaaacgccgcttatcatggtcggaccgggaacaggcgtcgcgccgtttagaggctttgtgcaggcgcgcaaacagctaaaagaacaaggacagtcacttggagaagcacatttatacttcggctgccgttcacctcatgaagactatctgtatcaagaagagcttgaaaacgcccaaagcgaaggcatcattacgcttcataccgctttttctcgcatgccgaatcagccgaaaacatacgttcagcacgtaatggaacaagacggcaagaaattgattgaacttcttgatcaaggagcgcacttctatatttgcggagacggaagccaaatggcacctgccgttgaagcaacgcttatgaaaagctatgctgacgttcaccaagtgagtgaagcagacgctcgcttatggctgcagcagctagaagaaaaaggccgatacgcaaaagacgtgtggctgggg

SEQ ID NO: 970 - protein, 1049 aa, synthetic construct
  REGION 1..1049: note = variant of P450 oxidase from Bacillus megaterium
MTIKEMPQPKTFGELKNLPLLNTDKPVQALMRIADELGEIFKFEAPGSVTRYLSSQRLIKEACDESRFDKNLSQGLKFARDFVGDGLVTSWTHEPNWKKAHNILVPSFSQHAMGRYHAMMVDIAVQLVQKWERLNADEHIEVSEDMTRLTLDTIGLCLFNYRFNSFYRDTPHPFIVSVVRALDEVMNKLQRANPDDPAYDENKRQCQEDIKVMNDYVDKIIADRKARGEQSHDLLTQMLNGKDPETGEPLDDGNIRQQIITFLIAGHQTTSGLLSFALYFLVKNPRVLQKVAEEAARVLVDPVPSYKQVKQLKYVGMVLNEALRLWPVAPMFSLYAKEDTVLGGEYPLTKGDEVMVLVPQLHRDKTIWGDDVEEFRPERFENPSAIPQHAFKPFGNGQRACIGQQFALHSATLVLGMMLKHFDFEDHTNYELVIKESRTLKPEGFVVKAKSKGIPLGGIPSPSTEQSAKKVRKKAENAHNTPLLVLYGSNAGTAEGTARDLADIAMSKGFAPQVATLDSHAGNLPREGAVLIVTASYNGHPPDNAKQFVTWLDQASADEVKGVRYSVFGCGDKNWAGTYQKVPAFIDETLAAKGAENIADRGEADASDDFEGAYEEWRDHMWSDVAAYFGLDIENSEDNDSTLSLQFVDSAADMPLAKMHGAFSTNVVASKELQQPGSARSTRHLEIELPKEASYQEGDHLGVIPRYYEGIVNRVTIRFGLSASQLIRLEAEEEKLAHLPLAKTVSVEELLQYVELQDPVTRTQLRAMAAKTVCPPHKVELEALLGKQAYKEQVLAKRLTMLELLEKYPACEMSFSEFIALLPSIRPRYYSISSSPRVDEKQASITVSVVSGPAWSGYGEYKGIASNYLAELQEGDTITCFISTPQSEFTLPKDPETPLIMVGPGTGVAPFRGFVQARKQLKEQGQSLGEAHLYFGCRSPHEDYLYQEELENAQSEGIITLHTAFSRMPNQPKTYVQHVMEQDGKKLIELLDQGAHFYICGDGSQMAPAVEATLMKSYADVHQVSEADARLWLQQLEEKGRYAKDVWLG

SEQ ID NO: 971 - DNA, 3147 bp, synthetic construct
  misc_feature 1..3147: note = variant of P450 oxidase from Bacillus megaterium
  source 1..3147: mol_type = other DNA
atgacaattaaggaaatgcctcagcctaagacgtttggagaacttaaaaatttaccgttattaaatacagataaaccggttcaagctttgatgcgtattgcggatgaattaggagaaatctttaaattcgaggcgcctggtagcgtaacgcgctatttatcaagtcagcgtctaattaaagaagcatgcgatgaatcacgctttgataaaaacttaagtcaagggcttaaatttgcacgtgattttgttggagacgggctggttacaagctggacgcatgaaccgaattggaaaaaagcgcataatatcttagttccaagctttagtcagcatgcaatggggcgttatcatgcgatgatggtcgatatcgccgtgcagcttgttcaaaagtgggagcgtctaaatgcagatgagcatattgaagtatcggaagacatgacacgtttaacgcttgatacaattggtctttgcctgtttaactatcgctttaacagcttttaccgagatacgcctcatccatttattgtgagtgtggttcgtgcactggatgaagtaatgaacaagctgcagcgagcaaatccagacgacccagcttatgatgaaaacaagcgccagtgtcaagaagatatcaaggtgatgaacgactatgtagataaaattattgcagatcgcaaagcaaggggtgaacaaagtcatgatttattaacgcagatgctaaacggaaaagatccagaaacgggtgagccgcttgatgacgggaacattcgtcagcaaattattacattcttaattgcgggacaccaaacgacaagtggtcttttatcatttgcgctgtatttcttagtgaaaaatccacgtgtattacaaaaagtagcagaagaagcagcacgagttctagtagatcctgttccaagctacaaacaagtcaaacagcttaaatatgttggcatggtcttaaacgaagcgctgcgcttatggccagtagcgcctatgttttccctatatgcaaaagaagatacggtgcttggaggagaatatcctttaacgaaaggcgacgaagtaatggttctggtgcctcagcttcaccgtgataaaacaatttggggagacgatgtggaggagttccgtccagagcgttttgaaaatccaagtgcgattccgcagcatgcgtttaaaccgtttggaaacggtcagcgtgcgtgtatcggtcagcagttcgctcttcatagtgcaacgctggtacttggtatgatgctaaaacactttgactttgaagatcatacaaactacgagctcgttattaaagaatcgcggacgttaaaacctgaaggctttgtggtaaaagcaaaatcgaaaggcattccgcttggcggtattccttcacctagcactgaacagtctgctaaaaaagtacgcaaaaaggcagaaaacgctcataatacgccgctgcttgtgctatacggttcaaatgcgggaacagctgaaggaacggcgcgtgatttagcagatattgcaatgagcaaaggatttgcaccgcaggtcgcaacgcttgattcacacgccggtaatcttccgcgcgaaggagctgtattaattgtaacggcgtcttataacggtcatccgcctgataacgcaaagcaatttgtcgattggttagaccaagcgtctgcggatgaagtaaaaggcgttcgctactccgtatttggatgcggcgataaaaattgggcggggacgtatcaaaaagtgcctgcttttatcgatgaaacgcttgccgctaaaggggcagaaaacatcgctgaccgcggtgaagcagatgcaagcgacgactttgaaggcgcgtatgaagaatggcgtgatcatatgtggagtgacgtagcagcctactttggtctcgacattgaaaacagtgaagataataaatctactctttcacttcaatttgtcgacagcgcggcggatatgccgcttgcgaaaatgcacggtgcgttttcaacgaacgtcgtagcaagcaaagaacttcaacagcctggcagtgcacgaagcacgcgacatcttgagattgaacttccaaaagaagcttcttatcaagaaggagatcatttaggtgttattcctcgctattatgaaggaatagtaaaccgtgtaacacagaggttcggcctaagcgcatcacagctgatccgtctggaagcagaagaagaaaaattagctcatttgccactcgctaaaacagtatccgtagaagagcttctgcaatacgtggagcttcaagatcctgttacgcgcacgcagcttcgcgcaatggctgctaaaacggtctgcccgccgcataaagtagagcttgaagctttgcttgccaagcaagcctacaaagaacaagtgctggcaaaacgtttaacaatgcttgaactgcttgaaaaatacccggcgtgtgaaatgagtttcagcgaatttatcgcccttctgccaagcatacgcccgcgctattactcgatttcttcatcacctcgtgtcgatagtaaacaagcaagcatcacggtcagcgttgtcagcggaccggcgtggagcggatatggagaatataaaggaattgcgtcgaactatcttgctgagctgcaagaaggagatacgattacgtgctttatttccacaccgcagtcagagtttacgctgccaaaagaccctgaaacgccgcttatcatggtcggaccgggaacaggcgtcgcgccgtttagaggctttgtgcaggcgcgcaaacagctaaaagaacaaggacagtcacttggagaagcacatttatacttcggctgccgttcacctcatgaagactatctgtatcaagaagagcttgaaaacgcccaaagcgaaggcatcattctgcttcataccgctttttctcgcatgccgaatcagccgaaaacatacgttcagcacgtaatggaacaagacggcaagaaattgattgaacttcttgatcaaggagcgcacttctatatttgcggagacggaattcaaatggcacctgccgttgaagcaacgcttatgaaaagctatgctgacgttcaccaagtgagtgaagcagacgctcgcttatggctgcagcagctagaagaaaaaggccgatacgcaaaagacgtgtggctgggg

SEQ ID NO: 972 - protein, 1049 aa, synthetic construct
  REGION 1..1049: note = variant of P450 oxidase from Bacillus megaterium
MTIKEMPQPKTFGELKNLPLLNTDKPVQALMRIADELGEIFKFEAPGSVTRYLSSQRLIKEACDESRFDKNLSQGLKFARDFVGDGLVTSWTHEPNWKKAHNILVPSFSQHAMGRYHAMMVDIAVQLVQKWERLNADEHIEVSEDMTRLTLDTIGLCLFNYRFNSFYRDTPHPFIVSVVRALDEVMNKLQRANPDDPAYDENKRQCQEDIKVMNDYVDKIIADRKARGEQSHDLLTQMLNGKDPETGEPLDDGNIRQQIITFLIAGHQTTSGLLSFALYFLVKNPRVLQKVAEEAARVLVDPVPSYKQVKQLKYVGMVLNEALRLWPVAPMFSLYAKEDTVLGGEYPLTKGDEVMVLVPQLHRDKTIWGDDVEEFRPERFENPSAIPQHAFKPFGNGQRACIGQQFALHSATLVLGMMLKHFDFEDHTNYELVIKESRTLKPEGFVVKAKSKGIPLGGIPSPSTEQSAKKVRKKAENAHNTPLLVLYGSNAGTAEGTARDLADIAMSKGFAPQVATLDSHAGNLPREGAVLIVTASYNGHPPDNAKQFVDWLDQASADEVKGVRYSVFGCGDKNWAGTYQKVPAFIDETLAAKGAENIADRGEADASDDFEGAYEEWRDHMWSDVAAYFGLDIENSEDNKSTLSLQFVDSAADMPLAKMHGAFSTNVVASKELQQPGSARSTRHLEIELPKEASYQEGDHLGVIPRYYEGIVNRVTQRFGLSASQLIRLEAEEEKLAHLPLAKTVSVEELLQYVELQDPVTRTQLRAMAAKTVCPPHKVELEALLAKQAYKEQVLAKRLTMLELLEKYPACEMSFSEFIALLPSIRPRYYSISSSPRVDSKQASITVSVVSGPAWSGYGEYKGIASNYLAELQEGDTITCFISTPQSEFTLPKDPETPLIMVGPGTGVAPFRGFVQARKQLKEQGQSLGEAHLYFGCRSPHEDYLYQEELENAQSEGIILLHTAFSRMPNQPKTYVQHVMEQDGKKLIELLDQGAHFYICGDGIQMAPAVEATLMKSYADVHQVSEADARLWLQQLEEKGRYAKDVWLG

SEQ ID NO: 973 - DNA, 3147 bp, synthetic construct
  misc_feature 1..3147: note = variant of P450 oxidase from Bacillus megaterium
  source 1..3147: mol_type = other DNA
atgacaattaaggaaatgcctcagcctaagacgtttggagaacttaaaaatttaccgttattaaatacagataaaccggttcaagctttgatgcgtattgcggatgaattaggagaaatctttaaattcgaggcgcctggtagcgtaacgcgctatttatcaagtcagcgtctaattaaagaagcatgcgatgaatcacgctttgataaaaacttaagtcaagggcttaaatttgcacgtgattttgttggagacgggctggttacaagctggacgcatgaaccgaattggaaaaaagcgcataatatcttagttccaagctttagtcagcatgcaatggggcgttatcatgcgatgatggtcgatatcgccgtgcagcttgttcaaaagtgggagcgtctaaatgcagatgagcatattgaagtatcggaagacatgacacgtttaacgcttgatacaattggtctttgcctgtttaactatcgctttaacagcttttaccgagatacgcctcatccatttattgtgagtgtggttcgtgcactggatgaagtaatgaacaagctgcagcgagcaaatccagacgacccagcttatgatgaaaacaagcgccagtgtcaagaagatatcaaggtgatgaacgactatgtagataaaattattgcagatcgcaaagcaaggggtgaacaaagtcatgatttattaacgcagatgctaaacggaaaagatccagaaacgggtgagccgcttgatgacgggaacattcgtcagcaaattattacattcttaattgcgggacaccaaacgacaagtggtcttttatcatttgcgctgtatttcttagtgaaaaatccacgtgtattacaaaaagtagcagaagaagcagcacgagttctagtagatcctgttccaagctacaaacaagtcaaacagcttaaatatgttggcatggtcttaaacgaagcgctgcgcttatggccagtagcgcctatgttttccctatatgcaaaagaagatacggtgcttggaggagaatatcctttaacgaaaggcgacgaagtaatggttctggtgcctcagcttcaccgtgataaaacaatttggggagacgatgtggaggagttccgtccagagcgttttgaaaatccaagtgcgattccgcagcatgcgtttaaaccgtttggaaacggtcagcgtgcgtgtatcggtcagcagttcgctcttcatagtgcaacgctggtacttggtatgatgctaaaacactttgactttgaagatcatacaaactacgagctcgttattaaagaatcgcggacgttaaaacctgaaggctttgtggtaaaagcaaaatcgaaaggcattccgcttggcggtattccttcacctagcactgaacagtctgctaaaaaagtacgcaaaaaggcagaaaacgctcataatacgccgctgcttgtgctatacggttcaaatgcgggaacagctgaaggaacggcgcgtgatttagcagatattgcaatgagcaaaggatttgcaccgcaggtcgcaacgcttgattcacacgccggtaatcttccgcgcgaaggagctgtattaattgtaacggcgtcttataacggtcatccgcctgataacgcaaagcaatttgtcgattggttagaccaagcgtctgcggatgaagtaaaaggcgttcgctactccgtatttggatgcggcgataaaaattgggcggggacgtatcaaaaagtgcctgcttttatcgatgaaacgcttgccgctaaaggggcagaaaacatcgctgaccgcggtgaagcagatgcaagcgacgactttgaaggcgcgtatgaagaatggcgtgatcatatgtggagtgacgtagcagcctactttggtctcgacattgaaaacagtgaagataataaatctactctttcacttcaatttgtcgacagcgcggcggatatgccgcttgcgaaaatgcacggtgcgttttcaacgaacgtcgtagcaagcaaagaacttcaacagcctggcagtgcacgaagcacgcgacatcttgaaattgaacttccaaaagaagcttcttatcaagaaggagatcatttaggtgttattcctcgctattatgaaggaatagtaaaccgtgtaacacagaggttcggcctaagcgcatcacagctgatccgtctggaagcagaagaagaaaaattagctcatttgccactcgctaaaacagtatccgtagaagagcttctgcaatacgtggagcttcaagatcctgttacgcgcacgcagcttcgcgcaatggctgctaaaacggtctgcccgccgcataaagtagagcttgaagccttgcttggcaagcaagcctacaaagaacaagtgctggcaaaacgtttaacaatgcttgaactgcttgaaaaatacccggcgtgtgaaatgagtttcagcgaatttatcgcccttctgccaagcatacgcccgcgctattactcgatttcttcatcacctcgtgtcgatgaaaaacaagcaagcatcacggtcagcgttgtctcaggaccggcgtggagcggatatggagaatataaaggaattgcgtcgaactatcttgctgagctgcaagaaggagatacgattacgtgctttatttccacaccgcagtcagagtttacgctgccaaaagaccctgaaacgccgcttatcatggtcggaccgggaacaggcgtcgcgccgtttagaggctttgtgcaggcgcgcaaacagctaaaagaacaaggacagtcacttggagaagcacatttatacttcggctgccgttcacctcatgaagactatctgtatcaagaagagcttgaaaacgcccaaagcgaaggcatcattctgcttcataccgctttttctcgcatgccgaatcagccgaaaacatacgttcagcacgtaatggaacaagacggcaagaaattgattgaacttcttgatcaaggagcgcacttctatatttgcggagacggaattcaaatggcacctgccgttgaagcaacgcttatgaaaagctatgctgacgttcaccaagtgagtgaagcagacgctcgcttatggctgcagcagctagaagaaaaaggccgatacgcaaaagacgtgtggctgggg

SEQ ID NO: 974 - protein, 1049 aa, synthetic construct
  REGION 1..1049: note = variant of P450 oxidase from Bacillus megaterium
MTIKEMPQPKTFGELKNLPLLNTDKPVQALMRIADELGEIFKFEAPGSVTRYLSSQRLIKEACDESRFDKNLSQGLKFARDFVGDGLVTSWTHEPNWKKAHNILVPSFSQHAMGRYHAMMVDIAVQLVQKWERLNADEHIEVSEDMTRLTLDTIGLCLFNYRFNSFYRDTPHPFIVSVVRALDEVMNKLQRANPDDPAYDENKRQCQEDIKVMNDYVDKIIADRKARGEQSHDLLTQMLNGKDPETGEPLDDGNIRQQIITFLIAGHQTTSGLLSFALYFLVKNPRVLQKVAEEAARVLVDPVPSYKQVKQLKYVGMVLNEALRLWPVAPMFSLYAKEDTVLGGEYPLTKGDEVMVLVPQLHRDKTIWGDDVEEFRPERFENPSAIPQHAFKPFGNGQRACIGQQFALHSATLVLGMMLKHFDFEDHTNYELVIKESRTLKPEGFVVKAKSKGIPLGGIPSPSTEQSAKKVRKKAENAHNTPLLVLYGSNAGTAEGTARDLADIAMSKGFAPQVATLDSHAGNLPREGAVLIVTASYNGHPPDNAKQFVDWLDQASADEVKGVRYSVFGCGDKNWAGTYQKVPAFIDETLAAKGAENIADRGEADASDDFEGAYEEWRDHMWSDVAAYFGLDIENSEDNKSTLSLQFVDSAADMPLAKMHGAFSTNVVASKELQQPGSARSTRHLEIELPKEASYQEGDHLGVIPRYYEGIVNRVTQRFGLSASQLIRLEAEEEKLAHLPLAKTVSVEELLQYVELQDPVTRTQLRAMAAKTVCPPHKVELEALLGKQAYKEQVLAKRLTMLELLEKYPACEMSFSEFIALLPSIRPRYYSISSSPRVDEKQASITVSVVSGPAWSGYGEYKGIASNYLAELQEGDTITCFISTPQSEFTLPKDPETPLIMVGPGTGVAPFRGFVQARKQLKEQGQSLGEAHLYFGCRSPHEDYLYQEELENAQSEGIILLHTAFSRMPNQPKTYVQHVMEQDGKKLIELLDQGAHFYICGDGIQMAPAVEATLMKSYADVHQVSEADARLWLQQLEEKGRYAKDVWLG

SEQ ID NO: 975 - DNA, 3147 bp, synthetic construct
  misc_feature 1..3147: note = variant of P450 oxidase from Bacillus megaterium
  source 1..3147: mol_type = other DNA
atgacaattaaggaaatgcctcagcctaagacgtttggagaacttaaaaatttaccgttattaaatacagataaaccggttcaagctttgatgcgtattgcggatgaattaggagaaatctttaaattcgaggcgcctggtagcgtaacgcgctatttatcaagtcagcgtctaattaaagaagcatgcgatgaatcacgctttgataaaaacttaagtcaagggcttaaatttgcacgtgattttgttggagacgggctggttacaagctggacgcatgaaccgaattggaaaaaagcgcataatatcttagttccaagctttagtcagcatgcaatggggcgttatcatgcgatgatggtcgatatcgccgtgcagcttgttcaaaagtgggagcgtctaaatgcagatgagcatattgaagtatcggaagacatgacacgtttaacgcttgatacaattggtctttgcctgtttaactatcgctttaacagcttttaccgagatacgcctcatccatttattgtgagtgtggttcgtgcactggatgaagtaatgaacaagctgcagcgagcaaatccagacgacccagcttatgatgaaaacaagcgccagtgtcaagaagatatcaaggtgatgaacgactatgtagataaaattattgcagatcgcaaagcaaggggtgaacaaagtcatgatttattaacgcagatgctaaacggaaaagatccagaaacgggtgagccgcttgatgacgggaacattcgtcagcaaattattacattcttaattgcgggacaccaaacgacaagtggtcttttatcatttgcgctgtatttcttagtgaaaaatccacgtgtattacaaaaagtagcagaagaagcagcacgagttctagtagatcctgttccaagctacaaacaagtcaaacagcttaaatatgttggcatggtcttaaacgaagcgctgcgcttatggccagtagcgcctatgttttccctatatgcaaaagaagatacggtgcttggaggagaatatcctttaacgaaaggcgacgaagtaatggttctggtgcctcagcttcaccgtgataaaacaatttggggagacgatgtggaggagttccgtccagagcgttttgaaaatccaagtgcgattccgcagcatgcgtttaaaccgtttggaaacggtcagcgtgcgtgtatcggtcagcagttcgctcttcatagtgcaacgctggtacttggtatgatgctaaaacactttgactttgaagatcatacaaactacgagctcgttattaaagaatcgcggacgttaaaacctgaaggctttgtggtaaaagcaaaatcgaaaggcattccgcttggcggtattccttcacctagcactgaacagtctgctaaaaaagtacgcaaaaaggcagaaaacgctcataatacgccgctgcttgtgctatacggttcaaatgcgggaacagctgaaggaacggcgcgtgatttagcagatattgcaatgagcaaaggatttgcaccgcaggtcgcaacgcttgattcacacgccggtaatcttccgcgcgaaggagctgtattaattgtaacggcgtcttataacggtcatccgcctgataacgcaaagcaatttgtcgattggttagaccaagcgtctgcggatgaagtaaaaggcgttcgctactccgtatttggatgcggcgataaaaattgggcggggacgtatcaaaaagtgcctgcttttatcgatgaaacgcttgccgctaaaggggcagaaaacatcgctgaccgcggtgaagcagatgcaagcgacgactttgaaggcgcgtatgaagaatggcgtgatcatatgtggagtgacgtagcagcctactttggtctcgacattgaaaacagtgaaggcaataaatctactctttcacttcaatttgtcgacagcgcggcggatatgccgcttgcgaaaatgcacggtgcgcgctcgacgaacgtcgtagcaagcaaagaacttcaacagcctggcagtgcacgaagcacgcgacatcttgaaattgaacttccaaaagaagcttcttatcaagaaggagatcatttaggtgttattcctcgctattatgaaggaatagtaaaccgtgtaacacagaggttcggcctaagcgcatcacagctgatccgtctggaagcagaagaagaaaaattagctcatttgccactcgctaaaacagtatccgtagaagagcttctgcaatacgtggagcttcaagatcctgttacgcgcacgcagcttcgcgcaatggctgctaaaacggtctgcccgccgcataaagtagagcttgaagccttgcttggcaagcaagcctacaaagaaacggtgctggcaaaacgtttaacaatgcttgaactgcttgaaaaatacccggcgtgtgaaatgagtttcagcgaatttatcgcccttctgccaagcatacgcccgcgctattactcgatttcttcatcacctcgtgtcgatagtaaacaagcaagcatcacggtcagcgttgtctcaggaccggcgtggagcggatatggagaatataaaggaattgcgtcgaactatcttgctgagctgcaagaaggagatacgattacgtgctttatttccacaccgcagtcagagtttacgctgccaaaagaccctgaaacgccgcttatcatggtcggaccgggaacaggcgtcgcgccgtttagaggctttgtgcaggcgcgcaaacagctaaaagaacaaggacagtcacttggagaagcacatttatacttcggctgccgttcacctcatgaagactatctgtatcaagaagagcttgaaaacgcccaaagcgaaggcatcattacccttcataccgctttttctcgcatgccgaatcagccgaaaacatacgttcagcacgtaatggaacaagacggcaagaaattgattgaacttcttgatcaaggagcgcacttctatatttgcggagacggaattcaaatggcacctgccgttgaagcaacgcttatgaaaagctatgctgacgttcaccaagtgagtgaagcagacgctcgcttatggctgcagcagctagaagaaaaaggccgatacgcaaaagacgtgtggctgggg

SEQ ID NO: 976 - protein, 1049 aa, synthetic construct
  REGION 1..1049: note = variant of P450 oxidase from Bacillus megaterium
MTIKEMPQPKTFGELKNLPLLNTDKPVQALMRIADELGEIFKFEAPGSVTRYLSSQRLIKEACDESRFDKNLSQGLKFARDFVGDGLVTSWTHEPNWKKAHNILVPSFSQHAMGRYHAMMVDIAVQLVQKWERLNADEHIEVSEDMTRLTLDTIGLCLFNYRFNSFYRDTPHPFIVSVVRALDEVMNKLQRANPDDPAYDENKRQCQEDIKVMNDYVDKIIADRKARGEQSHDLLTQMLNGKDPETGEPLDDGNIRQQIITFLIAGHQTTSGLLSFALYFLVKNPRVLQKVAEEAARVLVDPVPSYKQVKQLKYVGMVLNEALRLWPVAPMFSLYAKEDTVLGGEYPLTKGDEVMVLVPQLHRDKTIWGDDVEEFRPERFENPSAIPQHAFKPFGNGQRACIGQQFALHSATLVLGMMLKHFDFEDHTNYELVIKESRTLKPEGFVVKAKSKGIPLGGIPSPSTEQSAKKVRKKAENAHNTPLLVLYGSNAGTAEGTARDLADIAMSKGFAPQVATLDSHAGNLPREGAVLIVTASYNGHPPDNAKQFVDWLDQASADEVKGVRYSVFGCGDKNWAGTYQKVPAFIDETLAAKGAENIADRGEADASDDFEGAYEEWRDHMWSDVAAYFGLDIENSEGNKSTLSLQFVDSAADMPLAKMHGARSTNVVASKELQQPGSARSTRHLEIELPKEASYQEGDHLGVIPRYYEGIVNRVTQRFGLSASQLIRLEAEEEKLAHLPLAKTVSVEELLQYVELQDPVTRTQLRAMAAKTVCPPHKVELEALLGKQAYKETVLAKRLTMLELLEKYPACEMSFSEFIALLPSIRPRYYSISSSPRVDSKQASITVSVVSGPAWSGYGEYKGIASNYLAELQEGDTITCFISTPQSEFTLPKDPETPLIMVGPGTGVAPFRGFVQARKQLKEQGQSLGEAHLYFGCRSPHEDYLYQEELENAQSEGIITLHTAFSRMPNQPKTYVQHVMEQDGKKLIELLDQGAHFYICGDGIQMAPAVEATLMKSYADVHQVSEADARLWLQQLEEKGRYAKDVWLG

SEQ ID NO: 977 - DNA, 3147 bp, synthetic construct
  misc_feature 1..3147: note = variant of P450 oxidase from Bacillus megaterium
  source 1..3147: mol_type = other DNA
atgacaattaaggaaatgcctcagcctaagacgtttggagaacttaaaaatttaccgttattaaatacagataaaccggttcaagctttgatgcgtattgcggatgaattaggagaaatctttaaattcgaggcgcctggtagcgtaacgcgctatttatcaagtcagcgtctaattaaagaagcatgcgatgaatcacgctttgataaaaacttaagtcaagggcttaaatttgcacgtgattttgttggagacgggctggttacaagctggacgcatgaaccgaattggaaaaaagcgcataatatcttagttccaagctttagtcagcatgcaatggggcgttatcatgcgatgatggtcgatatcgccgtgcagcttgttcaaaagtgggagcgtctaaatgcagatgagcatattgaagtatcggaagacatgacacgtttaacgcttgatacaattggtctttgcctgtttaactatcgctttaacagcttttaccgagatacgcctcatccatttattgtgagtgtggttcgtgcactggatgaagtaatgaacaagctgcagcgagcaaatccagacgacccagcttatgatgaaaacaagcgccagtgtcaagaagatatcaaggtgatgaacgactatgtagataaaattattgcagatcgcaaagcaaggggtgaacaaagtcatgatttattaacgcagatgctaaacggaaaagatccagaaacgggtgagccgcttgatgacgggaacattcgtcagcaaattattacattcttaattgcgggacaccaaacgacaagtggtcttttatcatttgcgctgtatttcttagtgaaaaatccacgtgtattacaaaaagtagcagaagaagcagcacgagttctagtagatcctgttccaagctacaaacaagtcaaacagcttaaatatgttggcatggtcttaaacgaagcgctgcgcttatggccagtagcgcctatgttttccctatatgcaaaagaagatacggtgcttggaggagaatatcctttaacgaaaggcgacgaagtaatggttctggtgcctcagcttcaccgtgataaaacaatttggggagacgatgtggaggagttccgtccagagcgttttgaaaatccaagtgcgattccgcagcatgcgtttaaaccgtttggaaacggtcagcgtgcgtgtatcggtcagcagttcgctcttcatagtgcaacgctggtacttggtatgatgctaaaacactttgactttgaagatcatacaaactacgagctcgttattaaagaatcgcggacgttaaaacctgaaggctttgtggtaaaagcaaaatcgaaaggcattccgcttggcggtattccttcacctagcactgaacagtctgctaaaaaagtacgcaaaaaggcagaaaacgctcataatacgccgctgcttgtgctatacggttcaaatgcgggaacagctgaaggaacggcgcgtgatttagcagatattgcaatgagcaaaggatttgcaccgcaggtcgcaacgcttgattcacacgccggtaatcttccgcgcgaaggagctgtattaattgtaacggcgtcttataacggtcatccgcctgataacgcaaagcaatttgtcgattggttagaccaagcgtctgcggatgaagtaaaaggcgttcgctactccgtatttggatgcggcgataaaaattgggcggggacgtatcaaaaagtgcctgcttttatcgatgaaacgcttgccgctaaaggggcagaaaacatcgctgaccgcggtgaagcagatgcaagcgacgactttgaaggcgcgtatgaagaatggcgtgatcatatgtggagtgacgtagcagcctactttggtctcgacattgaaagcggtgaagacaataaatctactctttcacttcaatttgtcgacagcgcggcggatatgccgcttgcgaaaatgcacggtgcgttttcaacgaacgtcgtagcaagcaaagaacttcaacagcctggcagtgcacgaagcacgcgacatcttgaaattgaacttccaaaagaagcttcttatcaagaaggagatcatttaggtgttattcctcgctattatgaaggaatagtaaaccgtgtaacacagaggttcggcctaagcgcatcacagctgatccgtctggaagcagaagaagaaaaattagctcatttgccactcgctaaaacagtatccgtagaagagcttctgcaatacgtggagcttcaagatcctgttacgcgcacgcagcttcgcgcaatggctgctaaaacggtctgcccgccgcataaagtagagcttgaagccttgcttggcaagcaagcctacaaagaaacggtgctggcaaaacgtttaacaatgcttgaactgcttgaaaaatacccggcgtgtgaaatgagtttcagcgaatttatcgcccttctgccaagcatacgcccgcgctattactcgatttcttcatcacctcgtgtcgatctgaaacaagcaagcatcacggtcagcgttgtctcaggaccggcgtggagcggatatggagaatataaaggaattgcgtcgaactatcttgctgagctgcaagaaggagatacgattacgtgctttatttccacaccgcagtcagagtttacgctgccaaaagaccctgaaacgccgcttatcatggtcggaccgggaacaggcgtcgcgccgtttagaggctttgtgcaggcgcgcaaacagctaaaagaacaaggacagtcacttggagaagcacatttatacttcggctgccgttcacctcatgaagactatctgtatcaagaagagcttgaaaacgcccaaagcgaaggcatcattacgcttcataccgctttttctcgcatgccgaatcagccgaaaacatacgttcagcacgtaatggaacaagacggcaagaaattgattgaacttcttgatcaaggagcgcacttctatatttgcggagacggaattcaaatggcacctgccgttgaagcaacgcttatgaaaagctatgctgacgttcaccaagtgagtgaagcagacgctcgcttatggctgcagcagctagaagaaaaaggccgatacgcaaaagacgtgtggctgggg

SEQ ID NO: 978 - protein, 1049 aa, synthetic construct
  REGION 1..1049: note = variant of P450 oxidase from Bacillus megaterium
MTIKEMPQPKTFGELKNLPLLNTDKPVQALMRIADELGEIFKFEAPGSVTRYLSSQRLIKEACDESRFDKNLSQGLKFARDFVGDGLVTSWTHEPNWKKAHNILVPSFSQHAMGRYHAMMVDIAVQLVQKWERLNADEHIEVSEDMTRLTLDTIGLCLFNYRFNSFYRDTPHPFIVSVVRALDEVMNKLQRANPDDPAYDENKRQCQEDIKVMNDYVDKIIADRKARGEQSHDLLTQMLNGKDPETGEPLDDGNIRQQIITFLIAGHQTTSGLLSFALYFLVKNPRVLQKVAEEAARVLVDPVPSYKQVKQLKYVGMVLNEALRLWPVAPMFSLYAKEDTVLGGEYPLTKGDEVMVLVPQLHRDKTIWGDDVEEFRPERFENPSAIPQHAFKPFGNGQRACIGQQFALHSATLVLGMMLKHFDFEDHTNYELVIKESRTLKPEGFVVKAKSKGIPLGGIPSPSTEQSAKKVRKKAENAHNTPLLVLYGSNAGTAEGTARDLADIAMSKGFAPQVATLDSHAGNLPREGAVLIVTASYNGHPPDNAKQFVDWLDQASADEVKGVRYSVFGCGDKNWAGTYQKVPAFIDETLAAKGAENIADRGEADASDDFEGAYEEWRDHMWSDVAAYFGLDIESGEDNKSTLSLQFVDSAADMPLAKMHGAFSTNVVASKELQQPGSARSTRHLEIELPKEASYQEGDHLGVIPRYYEGIVNRVTQRFGLSASQLIRLEAEEEKLAHLPLAKTVSVEELLQYVELQDPVTRTQLRAMAAKTVCPPHKVELEALLGKQAYKETVLAKRLTMLELLEKYPACEMSFSEFIALLPSIRPRYYSISSSPRVDLKQASITVSVVSGPAWSGYGEYKGIASNYLAELQEGDTITCFISTPQSEFTLPKDPETPLIMVGPGTGVAPFRGFVQARKQLKEQGQSLGEAHLYFGCRSPHEDYLYQEELENAQSEGIITLHTAFSRMPNQPKTYVQHVMEQDGKKLIELLDQGAHFYICGDGIQMAPAVEATLMKSYADVHQVSEADARLWLQQLEEKGRYAKDVWLG

SEQ ID NO: 979 - DNA, 3147 bp, synthetic construct
  misc_feature 1..3147: note = variant of P450 oxidase from Bacillus megaterium
  source 1..3147: mol_type = other DNA
atgacaattaaggaaatgcctcagcctaagacgtttggagaacttaaaaatttaccgttattaaatacagataaaccggttcaagctttgatgcgtattgcggatgaattaggagaaatctttaaattcgaggcgcctggtagcgtaacgcgctatttatcaagtcagcgtctaattaaagaagcatgcgatgaatcacgctttgataaaaacttaagtcaagggcttaaatttgcacgtgattttgttggagacgggctggttacaagctggacgcatgaaccgaattggaaaaaagcgcataatatcttagttccaagctttagtcagcatgcaatggggcgttatcatgcgatgatggtcgatatcgccgtgcagcttgttcaaaagtgggagcgtctaaatgcagatgagcatattgaagtatcggaagacatgacacgtttaacgcttgatacaattggtctttgcctgtttaactatcgctttaacagcttttaccgagatacgcctcatccatttattgtgagtgtggttcgtgcactggatgaagtaatgaacaagctgcagcgagcaaatccagacgacccagcttatgatgaaaacaagcgccagtgtcaagaagatatcaaggtgatgaacgactatgtagataaaattattgcagatcgcaaagcaaggggtgaacaaagtcatgatttattaacgcagatgctaaacggaaaagatccagaaacgggtgagccgcttgatgacgggaacattcgtcagcaaattattacattcttaattgcgggacaccaaacgacaagtggtcttttatcatttgcgctgtatttcttagtgaaaaatccacgtgtattacaaaaagtagcagaagaagcagcacgagttctagtagatcctgttccaagctacaaacaagtcaaacagcttaaatatgttggcatggtcttaaacgaagcgctgcgcttatggccagtagcgcctatgttttccctatatgcaaaagaagatacggtgcttggaggagaatatcctttaacgaaaggcgacgaagtaatggttctggtgcctcagcttcaccgtgataaaacaatttggggagacgatgtggaggagttccgtccagagcgttttgaaaatccaagtgcgattccgcagcatgcgtttaaaccgtttggaaacggtcagcgtgcgtgtatcggtcagcagttcgctcttcatagtgcaacgctggtacttggtatgatgctaaaacactttgactttgaagatcatacaaactacgagctcgttattaaagaatcgcggacgttaaaacctgaaggctttgtggtaaaagcaaaatcgaaaggcattccgcttggcggtattccttcacctagcactgaacagtctgctaaaaaagtacgcaaaaaggcagaaaacgctcataatacgccgctgcttgtgctatacggttcaaatgcgggaacagctgaaggaacggcgcgtgatttagcagatattgcaatgagcaaaggatttgcaccgcaggtcgcaacgcttgattcacacgccggtaatcttccgcgcgaaggagctgtattaattgtaacggcgtcttataacggtcatccgcctgataacgcaaagcaatttgtcgattggttagaccaagcgtctgcggatgaagtaaaaggcgttcgctactccgtatttggatgcggcgataaaaattgggcggggacgtatcaaaaagtgcctgcttttatcgatgaaacgcttgccgctaaaggggcagaaaacatcgctgaccgcggtgaagcagatgcaagcgacgactttgaaggcgcgtatgaagaatggcgtgatcatatgtggagtgacgtagcagcctactttggtctcgacattgaaaacagtgaagataataaatctactctttcacttcaatttgtcgacagcgcggcggatatgccgcttgcgaaaatgcacggtgcgttttcaacgaacgtcgtagcaagcaaagaacttcaacagcctggcagtgcacgaagcacgcgacatcttgaaattgaacttccaaaagaagcttcttatcaagaaggagatcatttaggtgttattcctcgctattatgaaggaatagtaaaccgtgtaacacagaggttcggcctaagcgcatcacagctgatccgtctggaagcagaagaagaaaaattagctcatttgccactcgctaaaacagtatccgtagaagagcttctgcaatacgtggagcttcaagatcctgttacgcgcacgcagcttcgcgcaatggctgctaaaacggtctgcccgccgcataaagtagagcttgaagccttgcttggcaagcaagcctacaaagaacaagtgctggcaaaacgtttaacaatgcttgaactgcttgaaaaatacccggcgtgtgaaatgagtttcagcgaatttatcgcccttctgccaagcatacgcccgcgctattactcgatttcttcatcacctcgtgtcgatctgaaacaagcaagcatcacggtcagcgttgtctcaggaccggcgtggagcggatatggagaatataaaggaattgcgtcgaactatcttgctgagctgcaagaaggagatacgattacgtgctttatttccacaccgcagtcagagtttacgctgccaaaagaccctgaaacgccgcttatcatggtcggaccgggaacaggcgtcgcgccgtttagaggctttgtgcaggcgcgcaaacagctaaaagaacaaggacagtcacttggagaagcacatttatacttcggctgccgttcacctcatgaagactatctgtatcaagaagagcttgaaaacgcccaaagcgaaggcatcattctgcttcataccgctttttctcgcatgccgaatcagccgaaaacatacgttcagcacgtaatggaacaagacggcaagaaattgattgaacttcttgatcaaggagcgcacttctatatttgcggagacggaattcaaatggcacctgccgttgaagcaacgcttatgaaaagctatgctgacgttcaccaagtgagtgaagcagacgctcgcttatggctgcagcagctagaagaaaaaggccgatacgcaaaagacgtgtggctgggg

SEQ ID NO: 980 - protein, 1049 aa, synthetic construct
  REGION 1..1049: note = variant of P450 oxidase from Bacillus megaterium
MTIKEMPQPKTFGELKNLPLLNTDKPVQALMRIADELGEIFKFEAPGSVTRYLSSQRLIKEACDESRFDKNLSQGLKFARDFVGDGLVTSWTHEPNWKKAHNILVPSFSQHAMGRYHAMMVDIAVQLVQKWERLNADEHIEVSEDMTRLTLDTIGLCLFNYRFNSFYRDTPHPFIVSVVRALDEVMNKLQRANPDDPAYDENKRQCQEDIKVMNDYVDKIIADRKARGEQSHDLLTQMLNGKDPETGEPLDDGNIRQQIITFLIAGHQTTSGLLSFALYFLVKNPRVLQKVAEEAARVLVDPVPSYKQVKQLKYVGMVLNEALRLWPVAPMFSLYAKEDTVLGGEYPLTKGDEVMVLVPQLHRDKTIWGDDVEEFRPERFENPSAIPQHAFKPFGNGQRACIGQQFALHSATLVLGMMLKHFDFEDHTNYELVIKESRTLKPEGFVVKAKSKGIPLGGIPSPSTEQSAKKVRKKAENAHNTPLLVLYGSNAGTAEGTARDLADIAMSKGFAPQVATLDSHAGNLPREGAVLIVTASYNGHPPDNAKQFVDWLDQASADEVKGVRYSVFGCGDKNWAGTYQKVPAFIDETLAAKGAENIADRGEADASDDFEGAYEEWRDHMWSDVAAYFGLDIENSEDNKSTLSLQFVDSAADMPLAKMHGAFSTNVVASKELQQPGSARSTRHLEIELPKEASYQEGDHLGVIPRYYEGIVNRVTQRFGLSASQLIRLEAEEEKLAHLPLAKTVSVEELLQYVELQDPVTRTQLRAMAAKTVCPPHKVELEALLGKQAYKEQVLAKRLTMLELLEKYPACEMSFSEFIALLPSIRPRYYSISSSPRVDLKQASITVSVVSGPAWSGYGEYKGIASNYLAELQEGDTITCFISTPQSEFTLPKDPETPLIMVGPGTGVAPFRGFVQARKQLKEQGQSLGEAHLYFGCRSPHEDYLYQEELENAQSEGIILLHTAFSRMPNQPKTYVQHVMEQDGKKLIELLDQGAHFYICGDGIQMAPAVEATLMKSYADVHQVSEADARLWLQQLEEKGRYAKDVWLG

SEQ ID NO: 981 - DNA, 3147 bp, synthetic construct
  misc_feature 1..3147: note = variant of P450 oxidase from Bacillus megaterium
  source 1..3147: mol_type = other DNA
atgacaattaaggaaatgcctcagcctaagacgtttggagaacttaaaaatttaccgttattaaatacagataaaccggttcaagctttgatgcgtattgcggatgaattaggagaaatctttaaattcgaggcgcctggtagcgtaacgcgctatttatcaagtcagcgtctaattaaagaagcatgcgatgaatcacgctttgataaaaacttaagtcaagggcttaaatttgcacgtgattttgttggagacgggctggttacaagctggacgcatgaaccgaattggaaaaaagcgcataatatcttagttccaagctttagtcagcatgcaatggggcgttatcatgcgatgatggtcgatatcgccgtgcagcttgttcaaaagtgggagcgtctaaatgcagatgagcatattgaagtatcggaagacatgacacgtttaacgcttgatacaattggtctttgcctgtttaactatcgctttaacagcttttaccgagatacgcctcatccatttattgtgagtgtggttcgtgcactggatgaagtaatgaacaagctgcagcgagcaaatccagacgacccagcttatgatgaaaacaagcgccagtgtcaagaagatatcaaggtgatgaacgactatgtagataaaattattgcagatcgcaaagcaaggggtgaacaaagtcatgatttattaacgcagatgctaaacggaaaagatccagaaacgggtgagccgcttgatgacgggaacattcgtcagcaaattattacattcttaattgcgggacaccaaacgacaagtggtcttttatcatttgcgctgtatttcttagtgaaaaatccacgtgtattacaaaaagtagcagaagaagcagcacgagttctagtagatcctgttccaagctacaaacaagtcaaacagcttaaatatgttggcatggtcttaaacgaagcgctgcgcttatggccagtagcgcctatgttttccctatatgcaaaagaagatacggtgcttggaggagaatatcctttaacgaaaggcgacgaagtaatggttctggtgcctcagcttcaccgtgataaaacaatttggggagacgatgtggaggagttccgtccagagcgttttgaaaatccaagtgcgattccgcagcatgcgtttaaaccgtttggaaacggtcagcgtgcgtgtatcggtcagcagttcgctcttcatagtgcaacgctggtacttggtatgatgctaaaacactttgactttgaagatcatacaaactacgagctcgttattaaagaatcgcggacgttaaaacctgaaggctttgtggtaaaagcaaaatcgaaaggcattccgcttggcggtattccttcacctagcactgaacagtctgctaaaaaagtacgcaaaaaggcagaaaacgctcataatacgccgctgcttgtgctatacggttcaaatgcgggaacagctgaaggaacggcgcgtgatttagcagatattgcaatgagcaaaggatttgcaccgcaggtcgcaacgcttgattcacacgccggtaatcttccgcgcgaaggagctgtattaattgtaacggcgtcttataacggtcatccgcctgataacgcaaagcaatttgtcgattggttagaccaagcgtctgcggatgaagtaaaaggcgttcgctactccgtatttggatgcggcgataaaaattgggcggggacgtatcaaaaagtgcctgcttttatcgatgaaacgcttgccgctaaaggggcagaaaacatcgctgaccgcggtgaagcagatgcaagcgacgactttgaaggcgcgtatgaagaatggcgtgatcatatgtggagtgacgtagcagcctactttggtctcgacattgaaagcagtgaaggcaataaatctactctttcacttcaatttgtcgacagcgcggcggatatgcctcttgcgaaaatgcacggtgcgttttcaacgaacgtcgtagcaagcaaagaacttcaacagcctggcagtgcacgaagcacgcgacatcttgaaattgaacttccaaaagaagcttcttatcaagaaggagatcatttaggtgttattcctcgctattatgaaggaatagtaaaccgtgtaacacagaggttcggcctaagcgcatcacagctgatccgtctggaagcagaagaagaaaaattagctcatttgccactcgctaaaacagtatccgtagaagagcttctgcaatacgtggagcttcaagatcctgttacgcgcacgcagcttcgcgcaatggctgctaaaacggtctgcccgccgcataaagtagagcttgaagccttgcttggcaagcaagcctacaaagaaacggtgctggcaaaacgtttaacaatgcttgaactgcttgaaaaatacccggcgtgtgaaatgagtttcagcgaatttatcgcccttctggcaagcatacgcccgcgctattactcgatttcttcatcacctcgtgtcgatgaaaaacaagcaagcatcacggtcagcgttgtctcaggaccggcgtggagcggatatggagaatataaaggaattgcgtcgaactatcttgctgagctgcaagaaggagatacgattacgtgctttatttccacaccgcagtcagagtttacgctgccaaaagaccctgaaacgccgcttatcatggtcggaccgggaacaggcgtcgcgccgtttagaggctttgtgcaggcgcgcaaacagctaaaagaacaaggacagtcacttggagaagcacatttatacttcggctgccgttcacctcatgaagactatctgtatcaagaagagcttgaaaacgcccaaagcgaaggcatcattctgcttcataccgctttttctcgcatgccgaatcagccgaaaacatacgttcagcacgtaatggaacaagacggcaagaaattgattgaacttcttgatcaaggagcgcacttctatatttgcggagacggaattcaaatggcacctgccgttgaagcaacgcttatgaaaagctatgctgacgttcaccaagtgagtgaagcagacgctcgcttatggctgcagcagctagaagaaaaaggccgatacgcaaaagacgtgtggctgggg

SEQ ID NO: 982 - protein, 1049 aa, synthetic construct
  REGION 1..1049: note = variant of P450 oxidase from Bacillus megaterium
MTIKEMPQPKTFGELKNLPLLNTDKPVQALMRIADELGEIFKFEAPGSVTRYLSSQRLIKEACDESRFDKNLSQGLKFARDFVGDGLVTSWTHEPNWKKAHNILVPSFSQHAMGRYHAMMVDIAVQLVQKWERLNADEHIEVSEDMTRLTLDTIGLCLFNYRFNSFYRDTPHPFIVSVVRALDEVMNKLQRANPDDPAYDENKRQCQEDIKVMNDYVDKIIADRKARGEQSHDLLTQMLNGKDPETGEPLDDGNIRQQIITFLIAGHQTTSGLLSFALYFLVKNPRVLQKVAEEAARVLVDPVPSYKQVKQLKYVGMVLNEALRLWPVAPMFSLYAKEDTVLGGEYPLTKGDEVMVLVPQLHRDKTIWGDDVEEFRPERFENPSAIPQHAFKPFGNGQRACIGQQFALHSATLVLGMMLKHFDFEDHTNYELVIKESRTLKPEGFVVKAKSKGIPLGGIPSPSTEQSAKKVRKKAENAHNTPLLVLYGSNAGTAEGTARDLADIAMSKGFAPQVATLDSHAGNLPREGAVLIVTASYNGHPPDNAKQFVDWLDQASADEVKGVRYSVFGCGDKNWAGTYQKVPAFIDETLAAKGAENIADRGEADASDDFEGAYEEWRDHMWSDVAAYFGLDIESSEGNKSTLSLQFVDSAADMPLAKMHGAFSTNVVASKELQQPGSARSTRHLEIELPKEASYQEGDHLGVIPRYYEGIVNRVTQRFGLSASQLIRLEAEEEKLAHLPLAKTVSVEELLQYVELQDPVTRTQLRAMAAKTVCPPHKVELEALLGKQAYKETVLAKRLTMLELLEKYPACEMSFSEFIALLASIRPRYYSISSSPRVDEKQASITVSVVSGPAWSGYGEYKGIASNYLAELQEGDTITCFISTPQSEFTLPKDPETPLIMVGPGTGVAPFRGFVQARKQLKEQGQSLGEAHLYFGCRSPHEDYLYQEELENAQSEGIILLHTAFSRMPNQPKTYVQHVMEQDGKKLIELLDQGAHFYICGDGIQMAPAVEATLMKSYADVHQVSEADARLWLQQLEEKGRYAKDVWLG

SEQ ID NO: 983 - DNA, 3147 bp, synthetic construct
  misc_feature 1..3147: note = variant of P450 oxidase from Bacillus megaterium
  source 1..3147: mol_type = other DNA
atgacaattaaggaaatgcctcagcctaagacgtttggagaacttaaaaatttaccgttattaaatacagataaaccggttcaagctttgatgcgtattgcggatgaattaggagaaatctttaaattcgaggcgcctggtagcgtaacgcgctatttatcaagtcagcgtctaattaaagaagcatgcgatgaatcacgctttgataaaaacttaagtcaagggcttaaatttgcacgtgattttgttggagacgggctggttacaagctggacgcatgaaccgaattggaaaaaagcgcataatatcttagttccaagctttagtcagcatgcaatggggcgttatcatgcgatgatggtcgatatcgccgtgcagcttgttcaaaagtgggagcgtctaaatgcagatgagcatattgaagtatcggaagacatgacacgtttaacgcttgatacaattggtctttgcctgtttaactatcgctttaacagcttttaccgagatacgcctcatccatttattgtgagtgtggttcgtgcactggatgaagtaatgaacaagctgcagcgagcaaatccagacgacccagcttatgatgaaaacaagcgccagtgtcaagaagatatcaaggtgatgaacgactatgtagataaaattattgcagatcgcaaagcaaggggtgaacaaagtcatgatttattaacgcagatgctaaacggaaaagatccagaaacgggtgagccgcttgatgacgggaacattcgtcagcaaattattacattcttaattgcgggacaccaaacgacaagtggtcttttatcatttgcgctgtatttcttagtgaaaaatccacgtgtattacaaaaagtagcagaagaagcagcacgagttctagtagatcctgttccaagctacaaacaagtcaaacagcttaaatatgttggcatggtcttaaacgaagcgctgcgcttatggccagtagcgcctatgttttccctatatgcaaaagaagatacggtgcttggaggagaatatcctttaacgaaaggcgacgaagtaatggttctggtgcctcagcttcaccgtgataaaacaatttggggagacgatgtggaggagttccgtccagagcgttttgaaaatccaagtgcgattccgcagcatgcgtttaaaccgtttggaaacggtcagcgtgcgtgtatcggtcagcagttcgctcttcatagtgcaacgctggtacttggtatgatgctaaaacactttgactttgaagatcatacaaactacgagctcgttattaaagaatcgcggacgttaaaacctgaaggctttgtggtaaaagcaaaatcgaaaggcattccgcttggcggtattccttcacctagcactgaacagtctgctaaaaaagtacgcaaaaaggcagaaaacgctcataatacgccgctgcttgtgctatacggttcaaatgcgggaacagctgaaggaacggcgcgtgatttagcagatattgcaatgagcaaaggatttgcaccgcaggtcgcaacgcttgattcacacgccggtaatcttccgcgcgaaggagctgtattaattgtaacggcgtcttataacggtcatccgcctgataacgcaaagcaatttgtcgattggttagaccaagcgtctgcggatgaagtaaaaggcgttcgctactccgtatttggatgcggcgataaaaattgggcggggacgtatcaaaaagtgcctgcttttatcgatgaaacgcttgccgctaaaggggcagaaaacatcgctaagcgcggtgaagcagatgcaagcgacgactttgaaggcgcgtatgaagaatggcgtgatcatatgtggagtgacgtagcagcctactttggtctcgacattgaaaacagtgaagataataaatctactctttcacttcaatttgtcgacagcgcggcggatatgcctcttgcgaaaatgcacggtgcgttttcaacgaacgtcgtagcaagcaaagaacttcaacagcctggcagtgcacgaagcacgcgacatcttgaaattgaacttccaaaagaagcttcttatcaagaaggagatcatttaggtgttattcctcgctattatgaaggaatagtaaaccgtgtaacacagaggttcggcctaagcgcatcacagctgatccgtctggaagcagaagaagaaaaattagctcatttgccactcgctaaaacagtatccgtagaagagcttctgcaatacgtggagcttcaagatcctgttacgcgcacgcagcttcgcgcaatggctgctaaaacggtctgcccgccgcataaagtagagcttgaagccttgcttggcaagcaagcctacaaagaacaagtgctggcaaaacgtttaacaatgcttgaactgcttgaaaaatacccggcgtgtgaaatgagtttcagcgaatttatcgcccttctgccaagcatacgcccgcgctattactcgatttcttcatcacctcgtgtcgatctgaaacaagcaagcatcacggtcagcgttgtcagcggaccggcgtggagcggatatggagaatataaaggaattgcgtcgaactatcttgctgagctgcaagaaggagatacgattacgtgctttatttccacaccgcagtcagagtttacgctgccaaaagaccctgaaacgccgcttatcatggtcggaccgggaacaggcgtcgcgccgtttagaggctttgtgcaggcgcgcaaacagctaaaagaacaaggacagtcacttggagaagcacatttatacttcggctgccgttcacctcatgaagactatctgtatcaagaagagcttgaaaacgcccaaagcgaaggcatcattctgcttcataccgctttttctcgcatgccgaatcagccgaaaacatacgttcagcacgtaatggaacaagacggcaagaaattgattgaacttcttgatcaaggagcgcacttctatatttgcggagacggaattcaaatggcacctgccgttgaagcaacgcttatgaaaagctatgctgacgttcaccaagtgagtgaagcagacgctcgcttatggctgcagcagctagaagaaaaaggccgatacgcaaaagacgtgtggctgggg

SEQ ID NO: 984 - protein, 1049 aa, synthetic construct
  REGION 1..1049: note = variant of P450 oxidase from Bacillus megaterium
MTIKEMPQPKTFGELKNLPLLNTDKPVQALMRIADELGEIFKFEAPGSVTRYLSSQRLIKEACDESRFDKNLSQGLKFARDFVGDGLVTSWTHEPNWKKAHNILVPSFSQHAMGRYHAMMVDIAVQLVQKWERLNADEHIEVSEDMTRLTLDTIGLCLFNYRFNSFYRDTPHPFIVSVVRALDEVMNKLQRANPDDPAYDENKRQCQEDIKVMNDYVDKIIADRKARGEQSHDLLTQMLNGKDPETGEPLDDGNIRQQIITFLIAGHQTTSGLLSFALYFLVKNPRVLQKVAEEAARVLVDPVPSYKQVKQLKYVGMVLNEALRLWPVAPMFSLYAKEDTVLGGEYPLTKGDEVMVLVPQLHRDKTIWGDDVEEFRPERFENPSAIPQHAFKPFGNGQRACIGQQFALHSATLVLGMMLKHFDFEDHTNYELVIKESRTLKPEGFVVKAKSKGIPLGGIPSPSTEQSAKKVRKKAENAHNTPLLVLYGSNAGTAEGTARDLADIAMSKGFAPQVATLDSHAGNLPREGAVLIVTASYNGHPPDNAKQFVDWLDQASADEVKGVRYSVFGCGDKNWAGTYQKVPAFIDETLAAKGAENIAKRGEADASDDFEGAYEEWRDHMWSDVAAYFGLDIENSEDNKSTLSLQFVDSAADMPLAKMHGAFSTNVVASKELQQPGSARSTRHLEIELPKEASYQEGDHLGVIPRYYEGIVNRVTQRFGLSASQLIRLEAEEEKLAHLPLAKTVSVEELLQYVELQDPVTRTQLRAMAAKTVCPPHKVELEALLGKQAYKEQVLAKRLTMLELLEKYPACEMSFSEFIALLPSIRPRYYSISSSPRVDLKQASITVSVVSGPAWSGYGEYKGIASNYLAELQEGDTITCFISTPQSEFTLPKDPETPLIMVGPGTGVAPFRGFVQARKQLKEQGQSLGEAHLYFGCRSPHEDYLYQEELENAQSEGIILLHTAFSRMPNQPKTYVQHVMEQDGKKLIELLDQGAHFYICGDGIQMAPAVEATLMKSYADVHQVSEADARLWLQQLEEKGRYAKDVWLG

SEQ ID NO: 985 - DNA, 3147 bp, synthetic construct
  misc_feature 1..3147: note = variant of P450 oxidase from Bacillus megaterium
  source 1..3147: mol_type = other DNA
atgacaattaaggaaatgcctcagcctaagacgtttggagaacttaaaaatttaccgttattaaatacagataaaccggttcaagctttgatgcgtattgcggatgaattaggagaaatctttaaattcgaggcgcctggtagcgtaacgcgctatttatcaagtcagcgtctaattaaagaagcatgcgatgaatcacgctttgataaaaacttaagtcaagggcttaaatttgcacgtgattttgttggagacgggctggttacaagctggacgcatgaaccgaattggaaaaaagcgcataatatcttagttccaagctttagtcagcatgcaatggggcgttatcatgcgatgatggtcgatatcgccgtgcagcttgttcaaaagtgggagcgtctaaatgcagatgagcatattgaagtatcggaagacatgacacgtttaacgcttgatacaattggtctttgcctgtttaactatcgctttaacagcttttaccgagatacgcctcatccatttattgtgagtgtggttcgtgcactggatgaagtaatgaacaagctgcagcgagcaaatccagacgacccagcttatgatgaaaacaagcgccagtgtcaagaagatatcaaggtgatgaacgactatgtagataaaattattgcagatcgcaaagcaaggggtgaacaaagtcatgatttattaacgcagatgctaaacggaaaagatccagaaacgggtgagccgcttgatgacgggaacattcgtcagcaaattattacattcttaattgcgggacaccaaacgacaagtggtcttttatcatttgcgctgtatttcttagtgaaaaatccacgtgtattacaaaaagtagcagaagaagcagcacgagttctagtagatcctgttccaagctacaaacaagtcaaacagcttaaatatgttggcatggtcttaaacgaagcgctgcgcttatggccagtagcgcctatgttttccctatatgcaaaagaagatacggtgcttggaggagaatatcctttaacgaaaggcgacgaagtaatggttctggtgcctcagcttcaccgtgataaaacaatttggggagacgatgtggaggagttccgtccagagcgttttgaaaatccaagtgcgattccgcagcatgcgtttaaaccgtttggaaacggtcagcgtgcgtgtatcggtcagcagttcgctcttcatagtgcaacgctggtacttggtatgatgctaaaacactttgactttgaagatcatacaaactacgagctcgttattaaagaatcgcggacgttaaaacctgaaggctttgtggtaaaagcaaaatcgaaaggcattccgcttggcggtattccttcacctagcactgaacagtctgctaaaaaagtacgcaaaaaggcagaaaacgctcataatacgccgctgcttgtgctatacggttcaaatgcgggaacagctgaaggaacggcgcgtgatttagcagatattgcaatgagcaaaggatttgcaccgcaggtcgcaacgcttgattcacacgccggtaatcttccgcgcgaaggagctgtattaattgtaacggcgtcttataacggtcatccgcctgataacgcaaagcaatttgtcgattggttagaccaagcgtctgcggatgaagtaaaaggcgttcgctactccgtatttggatgcggcgataaaaattgggcggggacgtatcaaaaagtgcctgcttttatcgatgaaacgcttgccgctaaaggggcagaaaacatcgctgaccgcggtgaagcagatgcaagcgacgactttgaaggcgcgtatgaagaatggcgtgatcatatgtggagtgacgtagcagcctactttggtctcgacattgaaaacagtgaagataataaatctactctttcacttcaatttgtcgacagcgcggcggatatgccgcttgcgaaaatgcacggtgcgttttcaacgaacgtcgtagcaagcaaagaacttcaacagcctggcagtgcacgaagcacgcgacatcttgaaattgaacttccaaaagaagcttcttatcaagaaggagatcatttaggtgttattcctcgctattatgaaggaatagtaaaccgtgtaacacagaggttcggcctaagcgcatcacagctgatccgtctggaagcagaagaagaaaaattagctcatttgccactcgctaaaacagtatccgtagaagagcttctgcaatacgtggagcttcaagatcctgttacgcgcacgcagcttcgcgcaatggctgctaaaacggtctgcccgccgcataaagtagagcttgaagccttgcttggcaagcaagcctacaaagaaacggtgctggcaaaacgtttaacaatgcttgaactgcttgaaaaatacccggcgtgtgaaatgagtttcagcgaatttatcgcccttctgccaagcatacgcccgcgctattactcgatttcttcatcacctcgtgtcgatctgaaacaagcaagcatcacggtcagcgttgtctcaggaccggcgtggagcggatatggagaatataaaggaattgcgtcgaactatcttgctgagctgcaagaaggagatacgattacgtgctttatttccacaccgcagtcagagtttacgctgccaaaagaccctgaaacgccgcttatcatggtcggaccgggaacaggcgtcgcgccgtttagaggctttgtgcaggcgcgcaaacagctaaaagaacaaggacagtcacttggagaagcacatttatacttcggctgccgttcacctcatgaagactatctgtatcaagaagagcttgaaaacgcccaaagcgaaggcatcattacccttcataccgctttttctcgcatgccgaatcagccgaaaacatacgttcagcacgtaatggaacaagacggcaagaaattgattgaacttcttgatcaaggagcgcacttctatatttgcggagacggaattcaaatggcacctgccgttgaagcaacgcttatgaaaagctatgctgacgttcaccaagtgagtgaagcagacgctcgcttatggctgcagcagctagaagaaaaaggccgatacgcaaaagacgtgtggctgggg

SEQ ID NO: 986 - protein, 1049 aa, synthetic construct
  REGION 1..1049: note = variant of P450 oxidase from Bacillus megaterium
MTIKEMPQPKTFGELKNLPLLNTDKPVQALMRIADELGEIFKFEAPGSVTRYLSSQRLIKEACDESRFDKNLSQGLKFARDFVGDGLVTSWTHEPNWKKAHNILVPSFSQHAMGRYHAMMVDIAVQLVQKWERLNADEHIEVSEDMTRLTLDTIGLCLFNYRFNSFYRDTPHPFIVSVVRALDEVMNKLQRANPDDPAYDENKRQCQEDIKVMNDYVDKIIADRKARGEQSHDLLTQMLNGKDPETGEPLDDGNIRQQIITFLIAGHQTTSGLLSFALYFLVKNPRVLQKVAEEAARVLVDPVPSYKQVKQLKYVGMVLNEALRLWPVAPMFSLYAKEDTVLGGEYPLTKGDEVMVLVPQLHRDKTIWGDDVEEFRPERFENPSAIPQHAFKPFGNGQRACIGQQFALHSATLVLGMMLKHFDFEDHTNYELVIKESRTLKPEGFVVKAKSKGIPLGGIPSPSTEQSAKKVRKKAENAHNTPLLVLYGSNAGTAEGTARDLADIAMSKGFAPQVATLDSHAGNLPREGAVLIVTASYNGHPPDNAKQFVDWLDQASADEVKGVRYSVFGCGDKNWAGTYQKVPAFIDETLAAKGAENIADRGEADASDDFEGAYEEWRDHMWSDVAAYFGLDIENSEDNKSTLSLQFVDSAADMPLAKMHGAFSTNVVASKELQQPGSARSTRHLEIELPKEASYQEGDHLGVIPRYYEGIVNRVTQRFGLSASQLIRLEAEEEKLAHLPLAKTVSVEELLQYVELQDPVTRTQLRAMAAKTVCPPHKVELEALLGKQAYKETVLAKRLTMLELLEKYPACEMSFSEFIALLPSIRPRYYSISSSPRVDLKQASITVSVVSGPAWSGYGEYKGIASNYLAELQEGDTITCFISTPQSEFTLPKDPETPLIMVGPGTGVAPFRGFVQARKQLKEQGQSLGEAHLYFGCRSPHEDYLYQEELENAQSEGIITLHTAFSRMPNQPKTYVQHVMEQDGKKLIELLDQGAHFYICGDGIQMAPAVEATLMKSYADVHQVSEADARLWLQQLEEKGRYAKDVWLG

SEQ ID NO: 987 - DNA, 3147 bp, synthetic construct
  misc_feature 1..3147: note = variant of P450 oxidase from Bacillus megaterium
  source 1..3147: mol_type = other DNA
atgacaattaaggaaatgcctcagcctaagacgtttggagaacttaaaaatttaccgttattaaatacagataaaccggttcaagctttgatgcgtattgcggatgaattaggagaaatctttaaattcgaggcgcctggtagcgtaacgcgctatttatcaagtcagcgtctaattaaagaagcatgcgatgaatcacgctttgataaaaacttaagtcaagggcttaaatttgcacgtgattttgttggagacgggctggttacaagctggacgcatgaaccgaattggaaaaaagcgcataatatcttagttccaagctttagtcagcatgcaatggggcgttatcatgcgatgatggtcgatatcgccgtgcagcttgttcaaaagtgggagcgtctaaatgcagatgagcatattgaagtatcggaagacatgacacgtttaacgcttgatacaattggtctttgcctgtttaactatcgctttaacagcttttaccgagatacgcctcatccatttattgtgagtgtggttcgtgcactggatgaagtaatgaacaagctgcagcgagcaaatccagacgacccagcttatgatgaaaacaagcgccagtgtcaagaagatatcaaggtgatgaacgactatgtagataaaattattgcagatcgcaaagcaaggggtgaacaaagtcatgatttattaacgcagatgctaaacggaaaagatccagaaacgggtgagccgcttgatgacgggaacattcgtcagcaaattattacattcttaattgcgggacaccaaacgacaagtggtcttttatcatttgcgctgtatttcttagtgaaaaatccacgtgtattacaaaaagtagcagaagaagcagcacgagttctagtagatcctgttccaagctacaaacaagtcaaacagcttaaatatgttggcatggtcttaaacgaagcgctgcgcttatggccagtagcgcctatgttttccctatatgcaaaagaagatacggtgcttggaggagaatatcctttaacgaaaggcgacgaagtaatggttctggtgcctcagcttcaccgtgataaaacaatttggggagacgatgtggaggagttccgtccagagcgttttgaaaatccaagtgcgattccgcagcatgcgtttaaaccgtttggaaacggtcagcgtgcgtgtatcggtcagcagttcgctcttcatagtgcaacgctggtacttggtatgatgctaaaacactttgactttgaagatcatacaaactacgagctcgttattaaagaatcgcggacgttaaaacctgaaggctttgtggtaaaagcaaaatcgaaaggcattccgcttggcggtattccttcacctagcactgaacagtctgctaaaaaagtacgcaaaaaggcagaaaacgctcataatacgccgctgcttgtgctatacggttcaaatgcgggaacagctgaaggaacggcgcgtgatttagcagatattgcaatgagcaaaggatttgcaccgcaggtcgcaacgcttgattcacacgccggtaatcttccgcgcgaaggagctgtattaattgtaacggcgtcttataacggtcatccgcctgataacgcaaagcaatttgtcgattggttagaccaagcgtctgcggatgaagtaaaaggcgttcgctactccgtatttggatgcggcgataaaaattgggcggggacgtatcaaaaagtgcctgcttttatcgatgaaacgcttgccgctaaaggggcagaaaacatcgctgaccgcggtgaagcagatgcaagcgacgactttgaaggcgcgtatgaagaatggcgtgatcatatgtggagtgacgtagcagcctactttggtctcgacattgaaaacatggaaggcaataaatctactctttcacttcaatttgtcgacagcgcggcggatatgccgcttgcgaaaatgcacggtgcgttctcgacgaacgtcgtagcaagcaaagaacttcaacagcctggcagtgcacgaagcacgcgacatcttgagattgaacttccaaaagaagcttcttatcaagaaggagatcatttaggtgttattcctcgctattatgaaggaatagtaaaccgtgtaacacagaggttcggcctaagcgcatcacagctgatccgtctggaagcagaagaagaaaaattagctcatttgccactcgctaaaacagtatccgtagaagagcttctgcaatacgtggagcttcaagatcctgttacgcgcacgcagcttcgcgcaatggctgctaaaacggtctgcccgccgcataaagtagagcttgaagctttgcttggcaagcaagcctacaaagaaacggtgctggcaaaacgtttaacaatgcttgaactgcttgaaaaatacccggcgtgtgaaatgagtttcagcgaatttatcgcccttctgccaagcatacgcccgcgctattactcgatttcttcatcacctcgtgtcgatgaaaaacaagcaagcatcacggtcagcgttgtcctgggaccggcgtggagcggatatggagaatataaaggaattgcgtcgaactatcttgctgagctgcaagaaggagatacgattacgtgctttatttccacaccgcagtcagagtttacgctgccaaaagaccctgaaacgccgcttatcatggtcggaccgggaacaggcgtcgcgccgtttagaggctttgtgcaggcgcgcaaacagctaaaagaacaaggacagtcacttggagaagcacatttatacttcggctgccgttcacctcatgaagactatctgtatcaagaagagcttgaaaacgcccaaagcgaaggcatcattacccttcataccgctttttctcgcatgccgaatcagccgaaaacatacgttcagcacgtaatggaacaagacggcaagaaattgattgaacttcttgatcaaggagcgcacttctatatttgcggagacggaattcaaatggcacctgccgttgaagcaacgcttatgaaaagctatgctgacgttcaccaagtgagtgaagcagacgctcgcttatggctgcagcagctagaagaaaaaggccgatacgcaaaagacgtgtggctgggg

SEQ ID NO: 988 - protein, 1049 aa, synthetic construct
  REGION 1..1049: note = variant of P450 oxidase from Bacillus megaterium
MTIKEMPQPKTFGELKNLPLLNTDKPVQALMRIADELGEIFKFEAPGSVTRYLSSQRLIKEACDESRFDKNLSQGLKFARDFVGDGLVTSWTHEPNWKKAHNILVPSFSQHAMGRYHAMMVDIAVQLVQKWERLNADEHIEVSEDMTRLTLDTIGLCLFNYRFNSFYRDTPHPFIVSVVRALDEVMNKLQRANPDDPAYDENKRQCQEDIKVMNDYVDKIIADRKARGEQSHDLLTQMLNGKDPETGEPLDDGNIRQQIITFLIAGHQTTSGLLSFALYFLVKNPRVLQKVAEEAARVLVDPVPSYKQVKQLKYVGMVLNEALRLWPVAPMFSLYAKEDTVLGGEYPLTKGDEVMVLVPQLHRDKTIWGDDVEEFRPERFENPSAIPQHAFKPFGNGQRACIGQQFALHSATLVLGMMLKHFDFEDHTNYELVIKESRTLKPEGFVVKAKSKGIPLGGIPSPSTEQSAKKVRKKAENAHNTPLLVLYGSNAGTAEGTARDLADIAMSKGFAPQVATLDSHAGNLPREGAVLIVTASYNGHPPDNAKQFVDWLDQASADEVKGVRYSVFGCGDKNWAGTYQKVPAFIDETLAAKGAENIADRGEADASDDFEGAYEEWRDHMWSDVAAYFGLDIENMEGNKSTLSLQFVDSAADMPLAKMHGAFSTNVVASKELQQPGSARSTRHLEIELPKEASYQEGDHLGVIPRYYEGIVNRVTQRFGLSASQLIRLEAEEEKLAHLPLAKTVSVEELLQYVELQDPVTRTQLRAMAAKTVCPPHKVELEALLGKQAYKETVLAKRLTMLELLEKYPACEMSFSEFIALLPSIRPRYYSISSSPRVDEKQASITVSVVLGPAWSGYGEYKGIASNYLAELQEGDTITCFISTPQSEFTLPKDPETPLIMVGPGTGVAPFRGFVQARKQLKEQGQSLGEAHLYFGCRSPHEDYLYQEELENAQSEGIITLHTAFSRMPNQPKTYVQHVMEQDGKKLIELLDQGAHFYICGDGIQMAPAVEATLMKSYADVHQVSEADARLWLQQLEEKGRYAKDVWLG

SEQ ID NO: 989 - DNA, 3147 bp, synthetic construct
  misc_feature 1..3147: note = variant of P450 oxidase from Bacillus megaterium
  source 1..3147: mol_type = other DNA
atgacaattaaggaaatgcctcagcctaagacgtttggagaacttaaaaatttaccgttattaaatacagataaaccggttcaagctttgatgcgtattgcggatgaattaggagaaatctttaaattcgaggcgcctggtagcgtaacgcgctatttatcaagtcagcgtctaattaaagaagcatgcgatgaatcacgctttgataaaaacttaagtcaagggcttaaatttgcacgtgattttgttggagacgggctggttacaagctggacgcatgaaccgaattggaaaaaagcgcataatatcttagttccaagctttagtcagcatgcaatggggcgttatcatgcgatgatggtcgatatcgccgtgcagcttgttcaaaagtgggagcgtctaaatgcagatgagcatattgaagtatcggaagacatgacacgtttaacgcttgatacaattggtctttgcctgtttaactatcgctttaacagcttttaccgagatacgcctcatccatttattgtgagtgtggttcgtgcactggatgaagtaatgaacaagctgcagcgagcaaatccagacgacccagcttatgatgaaaacaagcgccagtgtcaagaagatatcaaggtgatgaacgactatgtagataaaattattgcagatcgcaaagcaaggggtgaacaaagtcatgatttattaacgcagatgctaaacggaaaagatccagaaacgggtgagccgcttgatgacgggaacattcgtcagcaaattattacattcttaattgcgggacaccaaacgacaagtggtcttttatcatttgcgctgtatttcttagtgaaaaatccacgtgtattacaaaaagtagcagaagaagcagcacgagttctagtagatcctgttccaagctacaaacaagtcaaacagcttaaatatgttggcatggtcttaaacgaagcgctgcgcttatggccagtagcgcctatgttttccctatatgcaaaagaagatacggtgcttggaggagaatatcctttaacgaaaggcgacgaagtaatggttctggtgcctcagcttcaccgtgataaaacaatttggggagacgatgtggaggagttccgtccagagcgttttgaaaatccaagtgcgattccgcagcatgcgtttaaaccgtttggaaacggtcagcgtgcgtgtatcggtcagcagttcgctcttcatagtgcaacgctggtacttggtatgatgctaaaacactttgactttgaagatcatacaaactacgagctcgttattaaagaatcgcggacgttaaaacctgaaggctttgtggtaaaagcaaaatcgaaaggcattccgcttggcggtattccttcacctagcactgaacagtctgctaaaaaagtacgcaaaaaggcagaaaacgctcataatacgccgctgcttgtgctatacggttcaaatgcgggaacagctgaaggaacggcgcgtgatttagcagatattgcaatgagcaaaggatttgcaccgcaggtcgcaacgcttgattcacacgccggtaatcttccgcgcgaaggagctgtattaattgtaacggcgtcttataacggtcatccgcctgataacgcaaagcaatttgtcgattggttagaccaagcgtctgcggatgaagtaaaaggcgttcgctactccgtatttggatgcggcgataaaaattgggcggggacgtatcaaaaagtgcctgcttttatcgatgaaacgcttgccgctaaaggggcagaaaacatcgctgaccgcggtgaagcagatgcaagcgacgactttgaaggcgcgtatgaagaatggcgtgatcatatgtggagtgacgtagcagcctactttggtctcgacattgaaaacagtgaagataataaatctactctttcacttcaatttgtcgacagcgcggcggatatgccgcttgcgaaaatgcacggtgcgttttcaacgaacgtcgtagcaagcaaagaacttcaacagcctggcagtgcacgaagcacgcgacatcttgaaattgaacttccaaaagaagcttcttatcaagaaggagatcatttaggtgttattcctcgctattatgaaggaatagtaaaccgtgtaacacagaggttcggcctaagcgcatcacagctgatccgtctggaagcagaagaagaaaaattagctcatttgccactcgctaaaacagtatccgtagaagagcttctgcaatacgtggagcttcaagatcctgttacgcgcacgcagcttcgcgcaatggctgctaaaacggtctgcccgccgcataaagtagagcttgaagccttgcttggcaagcaagcctacaaagaacaagtgctggcaaaacgtttaacaatgcttgaactgcttgaaaaatacccggcgtgtgaaatgagtttcagcgaatttatcgcccttctgccaagcatacgcccgcgctattactcgatttcttcatcacctcgtgtcgatgaaaaacaggcaagcatcacggtcagcgttgtcctgggaccggcgtggagcggatatggagaatataaaggaattgcgtcgaactatcttgctgagctgcaagaaggagatacgattacgtgctttatttccacaccgcagtcagagtttacgctgccaaaagatcctgaaacgccgcttatcatggtcggaccgggaacaggcgtcgcgccgtttagaggctttgtgcaggcgcgcaaacagctaaaagaacaaggacagtcacttggagaagcacatttatacttcggctgccgttcacctcatgaagactatctgtatcaagaagagcttgaaaacgcccaaagcgaaggcatcattacgcttcataccgctttttctcgcatgccgaatcagccgaaaacatacgttcagcacgtaatggaacaagacggcaagaaattgattgaacttcttgaccaaggagcgcacttctatatttgcggagacggaattcaaatggcacctgccgttgaagcaacgcttatgaaaagctatgctgacgttcaccaaatcactgaagcagacgctcgcttatggctgcagcagctagaagaaaaaggccgatacgcaaaagacgtgtggctgggg

SEQ ID NO: 990 - protein, 1049 aa, synthetic construct
  REGION 1..1049: note = variant of P450 oxidase from Bacillus megaterium
MTIKEMPQPKTFGELKNLPLLNTDKPVQALMRIADELGEIFKFEAPGSVTRYLSSQRLIKEACDESRFDKNLSQGLKFARDFVGDGLVTSWTHEPNWKKAHNILVPSFSQHAMGRYHAMMVDIAVQLVQKWERLNADEHIEVSEDMTRLTLDTIGLCLFNYRFNSFYRDTPHPFIVSVVRALDEVMNKLQRANPDDPAYDENKRQCQEDIKVMNDYVDKIIADRKARGEQSHDLLTQMLNGKDPETGEPLDDGNIRQQIITFLIAGHQTTSGLLSFALYFLVKNPRVLQKVAEEAARVLVDPVPSYKQVKQLKYVGMVLNEALRLWPVAPMFSLYAKEDTVLGGEYPLTKGDEVMVLVPQLHRDKTIWGDDVEEFRPERFENPSAIPQHAFKPFGNGQRACIGQQFALHSATLVLGMMLKHFDFEDHTNYELVIKESRTLKPEGFVVKAKSKGIPLGGIPSPSTEQSAKKVRKKAENAHNTPLLVLYGSNAGTAEGTARDLADIAMSKGFAPQVATLDSHAGNLPREGAVLIVTASYNGHPPDNAKQFVDWLDQASADEVKGVRYSVFGCGDKNWAGTYQKVPAFIDETLAAKGAENIADRGEADASDDFEGAYEEWRDHMWSDVAAYFGLDIENSEDNKSTLSLQFVDSAADMPLAKMHGAFSTNVVASKELQQPGSARSTRHLEIELPKEASYQEGDHLGVIPRYYEGIVNRVTQRFGLSASQLIRLEAEEEKLAHLPLAKTVSVEELLQYVELQDPVTRTQLRAMAAKTVCPPHKVELEALLGKQAYKEQVLAKRLTMLELLEKYPACEMSFSEFIALLPSIRPRYYSISSSPRVDEKQASITVSVVLGPAWSGYGEYKGIASNYLAELQEGDTITCFISTPQSEFTLPKDPETPLIMVGPGTGVAPFRGFVQARKQLKEQGQSLGEAHLYFGCRSPHEDYLYQEELENAQSEGIITLHTAFSRMPNQPKTYVQHVMEQDGKKLIELLDQGAHFYICGDGIQMAPAVEATLMKSYADVHQITEADARLWLQQLEEKGRYAKDVWLG

SEQ ID NO: 991 - DNA, 3147 bp, synthetic construct
  misc_feature 1..3147: note = variant of P450 oxidase from Bacillus megaterium
  source 1..3147: mol_type = other DNA
atgacaattaaggaaatgcctcagcctaagacgtttggagaacttaaaaatttaccgttattaaatacagataaaccggttcaagctttgatgcgtattgcggatgaattaggagaaatctttaaattcgaggcgcctggtagcgtaacgcgctatttatcaagtcagcgtctaattaaagaagcatgcgatgaatcacgctttgataaaaacttaagtcaagggcttaaatttgcacgtgattttgttggagacgggctggttacaagctggacgcatgaaccgaattggaaaaaagcgcataatatcttagttccaagctttagtcagcatgcaatggggcgttatcatgcgatgatggtcgatatcgccgtgcagcttgttcaaaagtgggagcgtctaaatgcagatgagcatattgaagtatcggaagacatgacacgtttaacgcttgatacaattggtctttgcctgtttaactatcgctttaacagcttttaccgagatacgcctcatccatttattgtgagtgtggttcgtgcactggatgaagtaatgaacaagctgcagcgagcaaatccagacgacccagcttatgatgaaaacaagcgccagtgtcaagaagatatcaaggtgatgaacgactatgtagataaaattattgcagatcgcaaagcaaggggtgaacaaagtcatgatttattaacgcagatgctaaacggaaaagatccagaaacgggtgagccgcttgatgacgggaacattcgtcagcaaattattacattcttaattgcgggacaccaaacgacaagtggtcttttatcatttgcgctgtatttcttagtgaaaaatccacgtgtattacaaaaagtagcagaagaagcagcacgagttctagtagatcctgttccaagctacaaacaagtcaaacagcttaaatatgttggcatggtcttaaacgaagcgctgcgcttatggccagtagcgcctatgttttccctatatgcaaaagaagatacggtgcttggaggagaatatcctttaacgaaaggcgacgaagtaatggttctggtgcctcagcttcaccgtgataaaacaatttggggagacgatgtggaggagttccgtccagagcgttttgaaaatccaagtgcgattccgcagcatgcgtttaaaccgtttggaaacggtcagcgtgcgtgtatcggtcagcagttcgctcttcatagtgcaacgctggtacttggtatgatgctaaaacactttgactttgaagatcatacaaactacgagctcgttattaaagaatcgcggacgttaaaacctgaaggctttgtggtaaaagcaaaatcgaaaggcattccgcttggcggtattccttcacctagcactgaacagtctgctaaaaaagtacgcaaaaaggcagaaaacgctcataatacgccgctgcttgtgctatacggttcaaatgcgggaacagctgaaggaacggcgcgtgatttagcagatattgcaatgagcaaaggatttgcaccgcaggtcgcaacgcttgattcacacgccggtaatcttccgcgcgaaggagctgtattaattgtaacggcgtcttataacggtcatccgcctgataacgcaaagcaatttgtcgattggttagaccaagcgtctgcggatgaagtaaaaggcgttcgctactccgtatttggatgcggcgataaaaattgggcggggacgtatcaaaaagtgcctgcttttatcgatgaaacgcttgccgctaaaggggcagaaaacatcgctgaccgcggtgaagcagatgcaagcgacgactttgaaggcgcgtatgaagaatggcgtgatcatatgtggagtgacgtagcagcctactttggtctcgacattgaaaacagtgaagataataaatctactctttcacttcaatttgtcgacagcgcggcggatatgccgcttgcgaaaatgcacggtgcgttttcaacgaacgtcgtagcaagcaaagaacttcaacagcctggcagtgcacgaagcacgcgacatcttgaaattgaacttccaaaagaagcttcttatcaagaaggagatcatttaggtgttattcctcgctattatgaaggaatagtaaaccgtgtaacacagaggttcggcctaagcgcatcacagctgatccgtctggaagcagaagaagaaaaattagctcatttgccactcgctaaaacagtatccgtagaagagcttctgcaatacgtggagcttcaagatcctgttacgcgcacgcagcttcgcgcaatggctgctaaaacggtctgcccgccgcataaagtagagcttgaagccttgcttggcaagcaagcctacaaagaacaagtgctggcaaaacgtttaacaatgcttgaactgcttgaaaaatacccggcgtgtgaaatgagtttcagcgaatttatcgcccttctgccaagcatacgcccgcgctattactcgatttcttcatcacctcgtgtcgatgaaaaacaagcaagcatcacggtcagcgttgtctcaggaccggcgtggagcggatatggagaatataaaggaattgcgtcgaactatcttgctgagctgcaagaaggagatacgattacgtgctttatttccacaccgcagtcagagtttacgctgccaaaagaccctgaaacgccgcttatcatggtcggaccgggaacaggcgtcgcgccgtttagaggctttgtgcaggcgcgcaaacagctaaaagaacaaggacagtcacttggagaagcacatttatacttcggctgccgttcacctcatgaagactatctgtatcaagaagagcttgaaaacgcccaaagcgaaggcatcattacgcttcataccgctttttctcgcatgccgaatcagccgaaaacatacgttcagcacgtaatggaacaagacggcaagaaattgattgaacttcttgatcaaggagcgcacttctatatttgcggagacggaattcaaatggcacctgccgttgaagcaacgcttatgaaaagctatgctgacgttcaccaagtctgggaagcagacgctcgcttatggctgcagcagctagaagaaaaaggccgatacgcaaaagacgtgtggctgggg

SEQ ID NO: 992 - protein, 1049 aa, synthetic construct
  REGION 1..1049: note = variant of P450 oxidase from Bacillus megaterium
MTIKEMPQPKTFGELKNLPLLNTDKPVQALMRIADELGEIFKFEAPGSVTRYLSSQRLIKEACDESRFDKNLSQGLKFARDFVGDGLVTSWTHEPNWKKAHNILVPSFSQHAMGRYHAMMVDIAVQLVQKWERLNADEHIEVSEDMTRLTLDTIGLCLFNYRFNSFYRDTPHPFIVSVVRALDEVMNKLQRANPDDPAYDENKRQCQEDIKVMNDYVDKIIADRKARGEQSHDLLTQMLNGKDPETGEPLDDGNIRQQIITFLIAGHQTTSGLLSFALYFLVKNPRVLQKVAEEAARVLVDPVPSYKQVKQLKYVGMVLNEALRLWPVAPMFSLYAKEDTVLGGEYPLTKGDEVMVLVPQLHRDKTIWGDDVEEFRPERFENPSAIPQHAFKPFGNGQRACIGQQFALHSATLVLGMMLKHFDFEDHTNYELVIKESRTLKPEGFVVKAKSKGIPLGGIPSPSTEQSAKKVRKKAENAHNTPLLVLYGSNAGTAEGTARDLADIAMSKGFAPQVATLDSHAGNLPREGAVLIVTASYNGHPPDNAKQFVDWLDQASADEVKGVRYSVFGCGDKNWAGTYQKVPAFIDETLAAKGAENIADRGEADASDDFEGAYEEWRDHMWSDVAAYFGLDIENSEDNKSTLSLQFVDSAADMPLAKMHGAFSTNVVASKELQQPGSARSTRHLEIELPKEASYQEGDHLGVIPRYYEGIVNRVTQRFGLSASQLIRLEAEEEKLAHLPLAKTVSVEELLQYVELQDPVTRTQLRAMAAKTVCPPHKVELEALLGKQAYKEQVLAKRLTMLELLEKYPACEMSFSEFIALLPSIRPRYYSISSSPRVDEKQASITVSVVSGPAWSGYGEYKGIASNYLAELQEGDTITCFISTPQSEFTLPKDPETPLIMVGPGTGVAPFRGFVQARKQLKEQGQSLGEAHLYFGCRSPHEDYLYQEELENAQSEGIITLHTAFSRMPNQPKTYVQHVMEQDGKKLIELLDQGAHFYICGDGIQMAPAVEATLMKSYADVHQVWEADARLWLQQLEEKGRYAKDVWLG

SEQ ID NO: 993 - DNA, 3147 bp, synthetic construct
  misc_feature 1..3147: note = variant of P450 oxidase from Bacillus megaterium
  source 1..3147: mol_type = other DNA
atgacaattaaggaaatgcctcagcctaagacgtttggagaacttaaaaatttaccgttattaaatacagataaaccggttcaagctttgatgcgtattgcggatgaattaggagaaatctttaaattcgaggcgcctggtagcgtaacgcgctatttatcaagtcagcgtctaattaaagaagcatgcgatgaatcacgctttgataaaaacttaagtcaagggcttaaatttgcacgtgattttgttggagacgggctggttacaagctggacgcatgaaccgaattggaaaaaagcgcataatatcttagttccaagctttagtcagcatgcaatggggcgttatcatgcgatgatggtcgatatcgccgtgcagcttgttcaaaagtgggagcgtctaaatgcagatgagcatattgaagtatcggaagacatgacacgtttaacgcttgatacaattggtctttgcctgtttaactatcgctttaacagcttttaccgagatacgcctcatccatttattgtgagtgtggttcgtgcactggatgaagtaatgaacaagctgcagcgagcaaatccagacgacccagcttatgatgaaaacaagcgccagtgtcaagaagatatcaaggtgatgaacgactatgtagataaaattattgcagatcgcaaagcaaggggtgaacaaagtcatgatttattaacgcagatgctaaacggaaaagatccagaaacgggtgagccgcttgatgacgggaacattcgtcagcaaattattacattcttaattgcgggacaccaaacgacaagtggtcttttatcatttgcgctgtatttcttagtgaaaaatccacgtgtattacaaaaagtagcagaagaagcagcacgagttctagtagatcctgttccaagctacaaacaagtcaaacagcttaaatatgttggcatggtcttaaacgaagcgctgcgcttatggccagtagcgcctatgttttccctatatgcaaaagaagatacggtgcttggaggagaatatcctttaacgaaaggcgacgaagtaatggttctggtgcctcagcttcaccgtgataaaacaatttggggagacgatgtggaggagttccgtccagagcgttttgaaaatccaagtgcgattccgcagcatgcgtttaaaccgtttggaaacggtcagcgtgcgtgtatcggtcagcagttcgctcttcatagtgcaacgctggtacttggtatgatgctaaaacactttgactttgaagatcatacaaactacgagctcgttattaaagaatcgcggacgttaaaacctgaaggctttgtggtaaaagcaaaatcgaaaggcattccgcttggcggtattccttcacctagcactgaacagtctgctaaaaaagtacgcaaaaaggcagaaaacgctcataatacgccgctgcttgtgctatacggttcaaatgcgggaacagctgaaggaacggcgcgtgatttagcagatattgcaatgagcaaaggatttgcaccgcaggtcgcaacgcttgattcacacgccggtaatcttccgcgcgaaggagctgtattaattgtaacggcgtcttataacggtcatccgcctgataacgcaaagcaatttgtcgattggttagaccaagcgtctgcggatgaagtaaaaggcgttcgctactccgtatttggatgcggcgataaaaattgggcggggacgtatcaaaaagtgcctgcttttatcgatgaaacgcttgccgctaaaggggcagaaaacatcgctgaccgcggtgaagcagatgcaagcgacgactttgaaggcgcgtatgaagaatggcgtgatcatatgtggagtgacgtagcagcctactttggtctcgacattgaaaacagtgaagataataaatctactctttcacttcaatttgtcgacagcgcggcggatatgccgcttgcgaaaatgcacggtgcgttttcaacgaacgtcgtagcaagcaaagaacttcaacagcctggcagtgcacgaagcacgcgacatcttgaaattgaacttccaaaagaagcttcttatcaagaaggagatcatttaggtgttattcctcgctattatgaaggaatagtaaaccgtgtaacacagaggttcggcctaagcgcatcacagctgatccgtctggaagcagaagaagaaaaattagctcatttgccactcgctaaaacagtatccgtagaagagcttctgcaatacgtggagcttcaagatcctgttacgcgcacgcagcttcgcgcaatggctgctaaaacggtctgcccgccgcataaagtagagcttgaagccttgcttggcaagcaagcctacaaagaacaagtgctggcaaaacgtttaacaatgcttgaactgcttgaacgttacccggcgtgtgaaatgagtttcagcgaatttatcgcccttctgccaagcatacgcccgcgctattactcgatttcttcatcacctcgtgtcgatgaaaaacaggcaagcatcacggtcagcgttgtctcaggaccggcgtggagcggatatggagaatataaaggaattgcgtcgaactatcttgctgagctgcaagaaggagatacgattacgtgctttatttccacaccgcagtcagagtttacgctgccaaaagaccctgaaacgccgcttatcatggtcggaccgggaacaggcgtcgcgccgtttagaggctttgtgcaggcgcgcaaacagctaaaagaacaaggacagtcacttggagaagcacatttatacttcggctgccgttcacctcatgaagactatctgtatcaagaagagcttgaaaacgcccaaagcgaaggcatcattacgcttcataccgctttttctcgcatgccgaatcagccgaaaacatacgttcagcacgtaatggaacaagacggcaagaaattgattgaacttcttgatcaaggagcgcacttctatatttgcggagacggaattcaaatggcacctgccgttgaagcaacgcttatgaaaagctatgctgacgttcaccaagtgagtgaagcagacgctcgcttatggctgcagcagctagaagaaaaaggccgatacgcaaaagacgtgtggctgggg

SEQ ID NO: 994 - protein, 1049 aa, synthetic construct
  REGION 1..1049: note = variant of P450 oxidase from Bacillus megaterium
MTIKEMPQPKTFGELKNLPLLNTDKPVQALMRIADELGEIFKFEAPGSVTRYLSSQRLIKEACDESRFDKNLSQGLKFARDFVGDGLVTSWTHEPNWKKAHNILVPSFSQHAMGRYHAMMVDIAVQLVQKWERLNADEHIEVSEDMTRLTLDTIGLCLFNYRFNSFYRDTPHPFIVSVVRALDEVMNKLQRANPDDPAYDENKRQCQEDIKVMNDYVDKIIADRKARGEQSHDLLTQMLNGKDPETGEPLDDGNIRQQIITFLIAGHQTTSGLLSFALYFLVKNPRVLQKVAEEAARVLVDPVPSYKQVKQLKYVGMVLNEALRLWPVAPMFSLYAKEDTVLGGEYPLTKGDEVMVLVPQLHRDKTIWGDDVEEFRPERFENPSAIPQHAFKPFGNGQRACIGQQFALHSATLVLGMMLKHFDFEDHTNYELVIKESRTLKPEGFVVKAKSKGIPLGGIPSPSTEQSAKKVRKKAENAHNTPLLVLYGSNAGTAEGTARDLADIAMSKGFAPQVATLDSHAGNLPREGAVLIVTASYNGHPPDNAKQFVDWLDQASADEVKGVRYSVFGCGDKNWAGTYQKVPAFIDETLAAKGAENIADRGEADASDDFEGAYEEWRDHMWSDVAAYFGLDIENSEDNKSTLSLQFVDSAADMPLAKMHGAFSTNVVASKELQQPGSARSTRHLEIELPKEASYQEGDHLGVIPRYYEGIVNRVTQRFGLSASQLIRLEAEEEKLAHLPLAKTVSVEELLQYVELQDPVTRTQLRAMAAKTVCPPHKVELEALLGKQAYKEQVLAKRLTMLELLERYPACEMSFSEFIALLPSIRPRYYSISSSPRVDEKQASITVSVVSGPAWSGYGEYKGIASNYLAELQEGDTITCFISTPQSEFTLPKDPETPLIMVGPGTGVAPFRGFVQARKQLKEQGQSLGEAHLYFGCRSPHEDYLYQEELENAQSEGIITLHTAFSRMPNQPKTYVQHVMEQDGKKLIELLDQGAHFYICGDGIQMAPAVEATLMKSYADVHQVSEADARLWLQQLEEKGRYAKDVWLG

SEQ ID NO: 995 - DNA, 3147 bp, synthetic construct
  misc_feature 1..3147: note = variant of P450 oxidase from Bacillus megaterium
  source 1..3147: mol_type = other DNA
atgacaattaaggaaatgcctcagcctaagacgtttggagaacttaaaaatttaccgttattaaatacagataaaccggttcaagctttgatgcgtattgcggatgaattaggagaaatctttaaattcgaggcgcctggtagcgtaacgcgctatttatcaagtcagcgtctaattaaagaagcatgcgatgaatcacgctttgataaaaacttaagtcaagggcttaaatttgcacgtgattttgttggagacgggctggttacaagctggacgcatgaaccgaattggaaaaaagcgcataatatcttagttccaagctttagtcagcatgcaatggggcgttatcatgcgatgatggtcgatatcgccgtgcagcttgttcaaaagtgggagcgtctaaatgcagatgagcatattgaagtatcggaagacatgacacgtttaacgcttgatacaattggtctttgcctgtttaactatcgctttaacagcttttaccgagatacgcctcatccatttattgtgagtgtggttcgtgcactggatgaagtaatgaacaagctgcagcgagcaaatccagacgacccagcttatgatgaaaacaagcgccagtgtcaagaagatatcaaggtgatgaacgactatgtagataaaattattgcagatcgcaaagcaaggggtgaacaaagtcatgatttattaacgcagatgctaaacggaaaagatccagaaacgggtgagccgcttgatgacgggaacattcgtcagcaaattattacattcttaattgcgggacaccaaacgacaagtggtcttttatcatttgcgctgtatttcttagtgaaaaatccacgtgtattacaaaaagtagcagaagaagcagcacgagttctagtagatcctgttccaagctacaaacaagtcaaacagcttaaatatgttggcatggtcttaaacgaagcgctgcgcttatggccagtagcgcctatgttttccctatatgcaaaagaagatacggtgcttggaggagaatatcctttaacgaaaggcgacgaagtaatggttctggtgcctcagcttcaccgtgataaaacaatttggggagacgatgtggaggagttccgtccagagcgttttgaaaatccaagtgcgattccgcagcatgcgtttaaaccgtttggaaacggtcagcgtgcgtgtatcggtcagcagttcgctcttcatagtgcaacgctggtacttggtatgatgctaaaacactttgactttgaagatcatacaaactacgagctcgttattaaagaatcgcggacgttaaaacctgaaggctttgtggtaaaagcaaaatcgaaaggcattccgcttggcggtattccttcacctagcactgaacagtctgctaaaaaagtacgcaaaaaggcagaaaacgctcataatacgccgctgcttgtgctatacggttcaaatgcgggaacagctgaaggaacggcgcgtgatttagcagatattgcaatgagcaaaggatttgcaccgcaggtcgcaacgcttgattcacacgccggtaatcttccgcgcgaaggagctgtattaattgtaacggcgtcttataacggtcatccgcctgataacgcaaagcaatttgtcgattggttagaccaagcgtctgcggatgaagtaaaaggcgttcgctactccgtatttggatgcggcgataaaaattgggcggggacgtatcaaaaagtgcctgcttttatcgatgaaacgcttgccgctaaaggggcagaaaacatcgctgaccgcggtgaagcagatgcaagcgacgactttgaaggcgcgtatgaagaatggcgtgatcatatgtggagtgacgtagcagcctactttggtctcgacattgaaaacagtgaagataataaatctactctttcacttcaatttgtcgacagcgcggcggatatgccgcttgcgaaaatgcacggtgcgttttcaacgaacgtcgtagcaagcaaagaacttcaacagcctggcagtgcacgaagcacgcgacatcttgaaattgaacttccaaaagaagcttcttatcaagaaggagatcatttaggtgttattcctcgctattatgaaggaatagtaatgcgtgtaacacagaggttcggcctaagcgcatcacagctgatccgtctggaagcagaagaagaaaaattagctcatttgccactcgctaaaacagtatccgtagaagagcttctgcaatacgtggagcttcaagatcctgttacgcgcacgcagcttcgcgcaatggctgctaaaacggtctgcccgccgcataaagtagagcttgaagccttgcttggcaagcaagcctacaaagaacaagtgctggcaaaacgtttaacaatgcttgaactgcttgaaaaatacccggcgtgtgaaatgagtttcagcgaatttatcgcccttctgccaagcatacgcccgcgctattactcgatttcttcatcacctcgtgtcgatgaaaaacaagcaagcatcacggtcagcgttgtctcaggaccggcgtggagcggatatggagaatataaaggaattgcgtcgaactatcttgctgagctgcaagaaggagatacgattacgtgctttatttccacaccgcagtcagagtttacgctgccaaaagaccctgaaacgccgcttatcatggtcggaccgggaacaggcgtcgcgccgtttagaggctttgtgcaggcgcgcaaacagctaaaagaacaaggacagtcacttggagaagcacatttatacttcggctgccgttcacctcatgaagactatctgtatcaagaagagcttgaaaacgcccaaagcgaaggcatcattacccttcataccgctttttctcgcatgccgaatcagccgaaaacatacgttcagcacgtaatggaacaagacggcaagaaattgattgaacttcttgatcaaggagcgcacttctatatttgcggagacggaattcaaatggcacctgccgttgaagcaacgcttatgaaaagctatgctgacgttcaccaagtgagtgaagcagacgctcgcttatggctgcagcagctagaagaaaaaggccgatacgcaaaagacgtgtggctgggg

SEQ ID NO: 996 - protein, 1049 aa, synthetic construct
  REGION 1..1049: note = variant of P450 oxidase from Bacillus megaterium
MTIKEMPQPKTFGELKNLPLLNTDKPVQALMRIADELGEIFKFEAPGSVTRYLSSQRLIKEACDESRFDKNLSQGLKFARDFVGDGLVTSWTHEPNWKKAHNILVPSFSQHAMGRYHAMMVDIAVQLVQKWERLNADEHIEVSEDMTRLTLDTIGLCLFNYRFNSFYRDTPHPFIVSVVRALDEVMNKLQRANPDDPAYDENKRQCQEDIKVMNDYVDKIIADRKARGEQSHDLLTQMLNGKDPETGEPLDDGNIRQQIITFLIAGHQTTSGLLSFALYFLVKNPRVLQKVAEEAARVLVDPVPSYKQVKQLKYVGMVLNEALRLWPVAPMFSLYAKEDTVLGGEYPLTKGDEVMVLVPQLHRDKTIWGDDVEEFRPERFENPSAIPQHAFKPFGNGQRACIGQQFALHSATLVLGMMLKHFDFEDHTNYELVIKESRTLKPEGFVVKAKSKGIPLGGIPSPSTEQSAKKVRKKAENAHNTPLLVLYGSNAGTAEGTARDLADIAMSKGFAPQVATLDSHAGNLPREGAVLIVTASYNGHPPDNAKQFVDWLDQASADEVKGVRYSVFGCGDKNWAGTYQKVPAFIDETLAAKGAENIADRGEADASDDFEGAYEEWRDHMWSDVAAYFGLDIENSEDNKSTLSLQFVDSAADMPLAKMHGAFSTNVVASKELQQPGSARSTRHLEIELPKEASYQEGDHLGVIPRYYEGIVMRVTQRFGLSASQLIRLEAEEEKLAHLPLAKTVSVEELLQYVELQDPVTRTQLRAMAAKTVCPPHKVELEALLGKQAYKEQVLAKRLTMLELLEKYPACEMSFSEFIALLPSIRPRYYSISSSPRVDEKQASITVSVVSGPAWSGYGEYKGIASNYLAELQEGDTITCFISTPQSEFTLPKDPETPLIMVGPGTGVAPFRGFVQARKQLKEQGQSLGEAHLYFGCRSPHEDYLYQEELENAQSEGIITLHTAFSRMPNQPKTYVQHVMEQDGKKLIELLDQGAHFYICGDGIQMAPAVEATLMKSYADVHQVSEADARLWLQQLEEKGRYAKDVWLG

SEQ ID NO: 997 - DNA, 3147 bp, synthetic construct
  misc_feature 1..3147: note = variant of P450 oxidase from Bacillus megaterium
  source 1..3147: mol_type = other DNA
atgacaattaaggaaatgcctcagcctaagacgtttggagaacttaaaaatttaccgttattaaatacagataaaccggttcaagctttgatgcgtattgcggatgaattaggagaaatctttaaattcgaggcgcctggtagcgtaacgcgctatttatcaagtcagcgtctaattaaagaagcatgcgatgaatcacgctttgataaaaacttaagtcaagggcttaaatttgcacgtgattttgttggagacgggctggttacaagctggacgcatgaaccgaattggaaaaaagcgcataatatcttagttccaagctttagtcagcatgcaatggggcgttatcatgcgatgatggtcgatatcgccgtgcagcttgttcaaaagtgggagcgtctaaatgcagatgagcatattgaagtatcggaagacatgacacgtttaacgcttgatacaattggtctttgcctgtttaactatcgctttaacagcttttaccgagatacgcctcatccatttattgtgagtgtggttcgtgcactggatgaagtaatgaacaagctgcagcgagcaaatccagacgacccagcttatgatgaaaacaagcgccagtgtcaagaagatatcaaggtgatgaacgactatgtagataaaattattgcagatcgcaaagcaaggggtgaacaaagtcatgatttattaacgcagatgctaaacggaaaagatccagaaacgggtgagccgcttgatgacgggaacattcgtcagcaaattattacattcttaattgcgggacaccaaacgacaagtggtcttttatcatttgcgctgtatttcttagtgaaaaatccacgtgtattacaaaaagtagcagaagaagcagcacgagttctagtagatcctgttccaagctacaaacaagtcaaacagcttaaatatgttggcatggtcttaaacgaagcgctgcgcttatggccagtagcgcctatgttttccctatatgcaaaagaagatacggtgcttggaggagaatatcctttaacgaaaggcgacgaagtaatggttctggtgcctcagcttcaccgtgataaaacaatttggggagacgatgtggaggagttccgtccagagcgttttgaaaatccaagtgcgattccgcagcatgcgtttaaaccgtttggaaacggtcagcgtgcgtgtatcggtcagcagttcgctcttcatagtgcaacgctggtacttggtatgatgctaaaacactttgactttgaagatcatacaaactacgagctcgttattaaagaatcgcggacgttaaaacctgaaggctttgtggtaaaagcaaaatcgaaaggcattccgcttggcggtattccttcacctagcactgaacagtctgctaaaaaagtacgcaaaaaggcagaaaacgctcataatacgccgctgcttgtgctatacggttcaaatgcgggaacagctgaaggaacggcgcgtgatttagcagatattgcaatgagcaaaggatttgcaccgcaggtcgcaacgcttgattcacacgccggtaatcttccgcgcgaaggagctgtattaattgtaacggcgtcttataacggtcatccgcctgataacgcaaagcaatttgtcgattggttagaccaagcgtctgcggatgaagtaaaaggcgttcgctactccgtatttggatgcggcgataaaaattgggcggggacgtatcaaaaagtgcctgcttttatcgatgaaacgcttgccgctaaaggggcagaaaacatcgctgaccgcggtgaagcagatgcaagcgacgactttgaaggcgcgtatgaagaatggcgtgatcatatgtggagtgacgtagcagcctactttggtctcgacattgaaaacagtgaagataataaatctactctttcacttcaatttgtcgacagcgcggcggatatgccgcttgcgaaaatgcacggtgcgttttcaacgaacgtcgtagcaagcaaagaacttcaacagcctggcagtgcacgaagcacgcgacatcttgaaattgaacttccaaaagaagcttcttatcaagaaggagatcatttaggtgttattcctcgctattatgaaggaatagtaaaccgtgtaacacagaggttcggcctaagcgcatcacagctgatccgtctggaagcagaagaagaaaaattagctcatttgccactcgctaaaacagtatccgtagaagagcttctgcaatacgtggagcttcaagatcctgttacgcgcacgcagcttcgcgcaatggctgctaaaacggtctgcccgccgcataaagtagagcttgaagccttgcttggcaagcaagcctacaaagaacaagtgctggcaaaacgtttaacaatgcttgaactgcttgaaaaatacccggcgtgtgaaatgagtttcagcgaatttatcgcccttctgccaagcatacgcccgcgctattactcgatttcttcatcacctcgtgtcgatgaaaaacaagcaagcatcacggtcagcgttgtcctgggaccggcgtggagcggatatggagaatataaaggaattgcgtcgaactatcttgctgagctgcaagaaggagatacgattacgtgctttatttccacaccgcagtcagagtttacgctgccaaaagaccctgaaacgccgcttatcatggtcggaccgggaacaggcgtcgcgccgtttagaggctttgtgcaggcgcgcaaacagctaaaagaacaaggacagtcacttggagaagcacatttatacttcggctgccgttcacctcatgaagactatctgtatcaagaagagcttgaaaacgcccaaagcgaaggcatcattacgcttcataccgctttttctcgcatgccgaatcagccgaaaacatacgttcagcacgtaatggaacaagacggcaagaaattgattgaacttcttgatcaaggagcgcacttctatatttgcggagacggaattcaaatggcacctgccgttgaagcaacgcttatgaaaagctatgctgacgttcaccaagtcactgaagcagacgctcgcttatggctgcagcagctagaagaaaaaggccgatacgcaaaagacgtgtggctgggg

SEQ ID NO: 998 - protein, 1049 aa, synthetic construct
  REGION 1..1049: note = variant of P450 oxidase from Bacillus megaterium
MTIKEMPQPKTFGELKNLPLLNTDKPVQALMRIADELGEIFKFEAPGSVTRYLSSQRLIKEACDESRFDKNLSQGLKFARDFVGDGLVTSWTHEPNWKKAHNILVPSFSQHAMGRYHAMMVDIAVQLVQKWERLNADEHIEVSEDMTRLTLDTIGLCLFNYRFNSFYRDTPHPFIVSVVRALDEVMNKLQRANPDDPAYDENKRQCQEDIKVMNDYVDKIIADRKARGEQSHDLLTQMLNGKDPETGEPLDDGNIRQQIITFLIAGHQTTSGLLSFALYFLVKNPRVLQKVAEEAARVLVDPVPSYKQVKQLKYVGMVLNEALRLWPVAPMFSLYAKEDTVLGGEYPLTKGDEVMVLVPQLHRDKTIWGDDVEEFRPERFENPSAIPQHAFKPFGNGQRACIGQQFALHSATLVLGMMLKHFDFEDHTNYELVIKESRTLKPEGFVVKAKSKGIPLGGIPSPSTEQSAKKVRKKAENAHNTPLLVLYGSNAGTAEGTARDLADIAMSKGFAPQVATLDSHAGNLPREGAVLIVTASYNGHPPDNAKQFVDWLDQASADEVKGVRYSVFGCGDKNWAGTYQKVPAFIDETLAAKGAENIADRGEADASDDFEGAYEEWRDHMWSDVAAYFGLDIENSEDNKSTLSLQFVDSAADMPLAKMHGAFSTNVVASKELQQPGSARSTRHLEIELPKEASYQEGDHLGVIPRYYEGIVNRVTQRFGLSASQLIRLEAEEEKLAHLPLAKTVSVEELLQYVELQDPVTRTQLRAMAAKTVCPPHKVELEALLGKQAYKEQVLAKRLTMLELLEKYPACEMSFSEFIALLPSIRPRYYSISSSPRVDEKQASITVSVVLGPAWSGYGEYKGIASNYLAELQEGDTITCFISTPQSEFTLPKDPETPLIMVGPGTGVAPFRGFVQARKQLKEQGQSLGEAHLYFGCRSPHEDYLYQEELENAQSEGIITLHTAFSRMPNQPKTYVQHVMEQDGKKLIELLDQGAHFYICGDGIQMAPAVEATLMKSYADVHQVTEADARLWLQQLEEKGRYAKDVWLG

SEQ ID NO: 999 - DNA, 3147 bp, synthetic construct
  misc_feature 1..3147: note = variant of P450 oxidase from Bacillus megaterium
  source 1..3147: mol_type = other DNA
atgacaattaaggaaatgcctcagcctaagacgtttggagaacttaaaaatttaccgttattaaatacagataaaccggttcaagctttgatgcgtattgcggatgaattaggagaaatctttaaattcgaggcgcctggtagcgtaacgcgctatttatcaagtcagcgtctaattaaagaagcatgcgatgaatcacgctttgataaaaacttaagtcaagggcttaaatttgcacgtgattttgttggagacgggctggttacaagctggacgcatgaaccgaattggaaaaaagcgcataatatcttagttccaagctttagtcagcatgcaatggggcgttatcatgcgatgatggtcgatatcgccgtgcagcttgttcaaaagtgggagcgtctaaatgcagatgagcatattgaagtatcggaagacatgacacgtttaacgcttgatacaattggtctttgcctgtttaactatcgctttaacagcttttaccgagatacgcctcatccatttattgtgagtgtggttcgtgcactggatgaagtaatgaacaagctgcagcgagcaaatccagacgacccagcttatgatgaaaacaagcgccagtgtcaagaagatatcaaggtgatgaacgactatgtagataaaattattgcagatcgcaaagcaaggggtgaacaaagtcatgatttattaacgcagatgctaaacggaaaagatccagaaacgggtgagccgcttgatgacgggaacattcgtcagcaaattattacattcttaattgcgggacaccaaacgacaagtggtcttttatcatttgcgctgtatttcttagtgaaaaatccacgtgtattacaaaaagtagcagaagaagcagcacgagttctagtagatcctgttccaagctacaaacaagtcaaacagcttaaatatgttggcatggtcttaaacgaagcgctgcgcttatggccagtagcgcctatgttttccctatatgcaaaagaagatacggtgcttggaggagaatatcctttaacgaaaggcgacgaagtaatggttctggtgcctcagcttcaccgtgataaaacaatttggggagacgatgtggaggagttccgtccagagcgttttgaaaatccaagtgcgattccgcagcatgcgtttaaaccgtttggaaacggtcagcgtgcgtgtatcggtcagcagttcgctcttcatagtgcaacgctggtacttggtatgatgctaaaacactttgactttgaagatcatacaaactacgagctcgttattaaagaatcgcggacgttaaaacctgaaggctttgtggtaaaagcaaaatcgaaaggcattccgcttggcggtattccttcacctagcactgaacagtctgctaaaaaagtacgcaaaaaggcagaaaacgctcataatacgccgctgcttgtgctatacggttcaaatgcgggaacagctgaaggaacggcgcgtgatttagcagatattgcaatgagcaaaggatttgcaccgcaggtcgcaacgcttgattcacacgccggtaatcttccgcgcgaaggagctgtattaattgtaacggcgtcttataacggtcatccgcctgataacgcaaagcaatttgtcgattggttagaccaagcgtctgcggatgaagtaaaaggcgttcgctactccgtatttggatgcggcgataaaaattgggcggggacgtatcaaaaagtgcctgcttttatcgatgaaacgcttgccgctaaaggggcagaaaacatcgctgaccgcggtgaagcagatgcaagcgacgactttgaaggcgcgtatgaagaatggcgtgatcatatgtggagtgacgtagcagcctactttggtctcgacattgaaaacagtgaagataataaatctactctttcacttcaatttgtcgacagcgcggcggatatgccgcttgcgaaaatgcacggtgcgttttcaacgaacgtcgtagcaagcaaagaacttcaacagcctggcagtgcacgaagcacgcgacatcttgaaattgaacttccaaaagaagcttcttatcaagaaggagatcatttaggtgttattcctcgctattatgaaggaatagtaaaccgtgtaacacagaggttcggcctaagcgcatcacagctgatccgtctggaagcagaagaagaaaaattagctcatttgccactcgctaaaacagtatccgtagaagagcttctgcaatacgtggagcttcaagatcctgttacgcgcacgcagcttcgcgcaatggctgctatcacggtctgcccgccgcataaagtagagcttgaagccttgcttggcaagcaagcctacaaagaacaagtgctggcaaaacgtttaacaatgcttgaactgcttgaaaaatacccggcgtgtgaaatgagtttcagcgaatttatcgcccttctgccaagcatacgcccgcgctattactcgatttcttcatcacctcgtgtcgatgaaaaacaagcaagcatcacggtcagcgttgtctcaggaccggcgtggagcggatatggagaatataaaggaattgcgtcgaactatcttgctgagctgcaagaaggagatacgattacgtgctttatttccacaccgcagtcagagtttacgctgccaaaagaccctgaaacgccgcttatcatggtcggaccgggaacaggcgtcgcgccgtttagaggctttgtgcaggcgcgcaaacagctaaaagaacaaggacagtcacttggagaagcacatttatacttcggctgccgttcacctcatgaagactatctgtatcaagaagagcttgaaaacgcccaaagcgaaggcatcattacgcttcataccgctttttctcgcatgccgaatcagccgaaaacatacgttcagcacgtaatggaacaagacggcaagaaattgattgaacttcttgatcaaggagcgcacttctatatttgcggagacggaattcaaatggcacctgccgttgaagcaacgcttatgaaaagctatgctgacgttcaccaagtgagtgaagcagacgctcgcttatggctgcagcagctagaagaaaaaggccgatacgcaaaagacgtgtggctgggg

SEQ ID NO: 1000 - protein, 1049 aa, synthetic construct
  REGION 1..1049: note = variant of P450 oxidase from Bacillus megaterium
MTIKEMPQPKTFGELKNLPLLNTDKPVQALMRIADELGEIFKFEAPGSVTRYLSSQRLIKEACDESRFDKNLSQGLKFARDFVGDGLVTSWTHEPNWKKAHNILVPSFSQHAMGRYHAMMVDIAVQLVQKWERLNADEHIEVSEDMTRLTLDTIGLCLFNYRFNSFYRDTPHPFIVSVVRALDEVMNKLQRANPDDPAYDENKRQCQEDIKVMNDYVDKIIADRKARGEQSHDLLTQMLNGKDPETGEPLDDGNIRQQIITFLIAGHQTTSGLLSFALYFLVKNPRVLQKVAEEAARVLVDPVPSYKQVKQLKYVGMVLNEALRLWPVAPMFSLYAKEDTVLGGEYPLTKGDEVMVLVPQLHRDKTIWGDDVEEFRPERFENPSAIPQHAFKPFGNGQRACIGQQFALHSATLVLGMMLKHFDFEDHTNYELVIKESRTLKPEGFVVKAKSKGIPLGGIPSPSTEQSAKKVRKKAENAHNTPLLVLYGSNAGTAEGTARDLADIAMSKGFAPQVATLDSHAGNLPREGAVLIVTASYNGHPPDNAKQFVDWLDQASADEVKGVRYSVFGCGDKNWAGTYQKVPAFIDETLAAKGAENIADRGEADASDDFEGAYEEWRDHMWSDVAAYFGLDIENSEDNKSTLSLQFVDSAADMPLAKMHGAFSTNVVASKELQQPGSARSTRHLEIELPKEASYQEGDHLGVIPRYYEGIVNRVTQRFGLSASQLIRLEAEEEKLAHLPLAKTVSVEELLQYVELQDPVTRTQLRAMAAITVCPPHKVELEALLGKQAYKEQVLAKRLTMLELLEKYPACEMSFSEFIALLPSIRPRYYSISSSPRVDEKQASITVSVVSGPAWSGYGEYKGIASNYLAELQEGDTITCFISTPQSEFTLPKDPETPLIMVGPGTGVAPFRGFVQARKQLKEQGQSLGEAHLYFGCRSPHEDYLYQEELENAQSEGIITLHTAFSRMPNQPKTYVQHVMEQDGKKLIELLDQGAHFYICGDGIQMAPAVEATLMKSYADVHQVSEADARLWLQQLEEKGRYAKDVWLG

SEQ ID NO: 1001 - DNA, 3147 bp, synthetic construct
  misc_feature 1..3147: note = variant of P450 oxidase from Bacillus megaterium
  source 1..3147: mol_type = other DNA
atgacaattaaggaaatgcctcagcctaagacgtttggagaacttaaaaatttaccgttattaaatacagataaaccggttcaagctttgatgcgtattgcggatgaattaggagaaatctttaaattcgaggcgcctggtagcgtaacgcgctatttatcaagtcagcgtctaattaaagaagcatgcgatgaatcacgctttgataaaaacttaagtcaagggcttaaatttgcacgtgattttgttggagacgggctggttacaagctggacgcatgaaccgaattggaaaaaagcgcataatatcttagttccaagctttagtcagcatgcaatggggcgttatcatgcgatgatggtcgatatcgccgtgcagcttgttcaaaagtgggagcgtctaaatgcagatgagcatattgaagtatcggaagacatgacacgtttaacgcttgatacaattggtctttgcctgtttaactatcgctttaacagcttttaccgagatacgcctcatccatttattgtgagtgtggttcgtgcactggatgaagtaatgaacaagctgcagcgagcaaatccagacgacccagcttatgatgaaaacaagcgccagtgtcaagaagatatcaaggtgatgaacgactatgtagataaaattattgcagatcgcaaagcaaggggtgaacaaagtcatgatttattaacgcagatgctaaacggaaaagatccagaaacgggtgagccgcttgatgacgggaacattcgtcagcaaattattacattcttaattgcgggacaccaaacgacaagtggtcttttatcatttgcgctgtatttcttagtgaaaaatccacgtgtattacaaaaagtagcagaagaagcagcacgagttctagtagatcctgttccaagctacaaacaagtcaaacagcttaaatatgttggcatggtcttaaacgaagcgctgcgcttatggccagtagcgcctatgttttccctatatgcaaaagaagatacggtgcttggaggagaatatcctttaacgaaaggcgacgaagtaatggttctggtgcctcagcttcaccgtgataaaacaatttggggagacgatgtggaggagttccgtccagagcgttttgaaaatccaagtgcgattccgcagcatgcgtttaaaccgtttggaaacggtcagcgtgcgtgtatcggtcagcagttcgctcttcatagtgcaacgctggtacttggtatgatgctaaaacactttgactttgaagatcatacaaactacgagctcgttattaaagaatcgcggacgttaaaacctgaaggctttgtggtaaaagcaaaatcgaaaggcattccgcttggcggtattccttcacctagcactgaacagtctgctaaaaaagtacgcaaaaaggcagaaaacgctcataatacgccgctgcttgtgctatacggttcaaatgcgggaacagctgaaggaacggcgcgtgatttagcagatattgcaatgagcaaaggatttgcaccgcaggtcgcaacgcttgattcacacgccggtaatcttccgcgcgaaggagctgtattaattgtaacggcgtcttataacggtcatccgcctgataacgcaaagcaatttgtcgattggttagaccaagcgtctgcggatgaagtaaaaggcgttcgctactccgtatttggatgcggcgataaaaattgggcggggacgtatcaaaaagtgcctgcttttatcgatgaaacgcttgccgctaaaggggcagaaaacatcgctgaccgcggtgaagcagatgcaagcgacgactttgaaggcgcgtatgaagaatggcgtgatcatatgtggagtgacgtagcagcctactttggtctcgacattgaaagtagtgaagataataaatctactctttcacttcaatttgtcgacagcgcggcggatatgcctcttgcgaaaatgcacggtgcgttttcaacgaacgtcgtagcaagcaaagaacttcaacagcctggcagtgcacgaagcacgcgacatcttgaaattgaacttccaaaagaagcttcttatcaagaaggagatcatttaggtgttattcctcgctattatgaaggaatagtaatgcgtgtaacacagaggttcggcctaagcgcatcacagctgatccgtctggaagcagaagaagaaaaattagctcatttgccactcgctaaaacagtatccgtagaagagcttctgcaatacgtggagcttcaagatcctgttacgcgcacgcagcttcgcgcaatggctgctaaaacggtctgcccgccgcataaagtagagcttgaagcattgcttggcaagcaagcctacaaagaacaagtgctggcaaaacgtttaacaatgcttgaactgcttgaaaaatacccggcgtgtgaaatgagtttcagcgaatttatcgcccttctgccaagcatacgcccgcgctattactcgatttcttcatcacctcgtgtcgatgaaaaacaggcaagcatcacggtcagcgttgtctcgggaccggcgtggagcggatatggagaatataaaggaattgcgtcgaactatcttgctgagctgcaagaaggagatacgattacgtgctttatttccacaccgcagtcagagtttacgctgccaaaagatcctgaaacgccgcttatcatggtcggaccgggaacaggcgtcgcgccgtttagaggctttgtgcaggcgcgcaaacagctaaaagaacaaggacagtcacttggagaagcacatttatacttcggctgccgttcacctcatgaagactatctgtatcaagaagagcttgaaaacgcccaaagcgaaggcatcattacccttcataccgctttttctcgcatgccgaatcagccgaaaacatacgttcagcacgtaatggaacaagacggcaagaaattgattgaacttcttgatcaaggagcgcacttctatatttgcggagacggaattcaaatggcacctgccgttgaagcaacgcttatgaaaagctatgctgacgttcaccaagtcactgaagcagacgctcgcttatggctgcagcagctagaagaaaaaggccgatacgcaaaagacgtgtggctgggg

SEQ ID NO: 1002 - protein, 1049 aa, synthetic construct
  REGION 1..1049: note = variant of P450 oxidase from Bacillus megaterium
MTIKEMPQPKTFGELKNLPLLNTDKPVQALMRIADELGEIFKFEAPGSVTRYLSSQRLIKEACDESRFDKNLSQGLKFARDFVGDGLVTSWTHEPNWKKAHNILVPSFSQHAMGRYHAMMVDIAVQLVQKWERLNADEHIEVSEDMTRLTLDTIGLCLFNYRFNSFYRDTPHPFIVSVVRALDEVMNKLQRANPDDPAYDENKRQCQEDIKVMNDYVDKIIADRKARGEQSHDLLTQMLNGKDPETGEPLDDGNIRQQIITFLIAGHQTTSGLLSFALYFLVKNPRVLQKVAEEAARVLVDPVPSYKQVKQLKYVGMVLNEALRLWPVAPMFSLYAKEDTVLGGEYPLTKGDEVMVLVPQLHRDKTIWGDDVEEFRPERFENPSAIPQHAFKPFGNGQRACIGQQFALHSATLVLGMMLKHFDFEDHTNYELVIKESRTLKPEGFVVKAKSKGIPLGGIPSPSTEQSAKKVRKKAENAHNTPLLVLYGSNAGTAEGTARDLADIAMSKGFAPQVATLDSHAGNLPREGAVLIVTASYNGHPPDNAKQFVDWLDQASADEVKGVRYSVFGCGDKNWAGTYQKVPAFIDETLAAKGAENIADRGEADASDDFEGAYEEWRDHMWSDVAAYFGLDIESSEDNKSTLSLQFVDSAADMPLAKMHGAFSTNVVASKELQQPGSARSTRHLEIELPKEASYQEGDHLGVIPRYYEGIVMRVTQRFGLSASQLIRLEAEEEKLAHLPLAKTVSVEELLQYVELQDPVTRTQLRAMAAKTVCPPHKVELEALLGKQAYKEQVLAKRLTMLELLEKYPACEMSFSEFIALLPSIRPRYYSISSSPRVDEKQASITVSVVSGPAWSGYGEYKGIASNYLAELQEGDTITCFISTPQSEFTLPKDPETPLIMVGPGTGVAPFRGFVQARKQLKEQGQSLGEAHLYFGCRSPHEDYLYQEELENAQSEGIITLHTAFSRMPNQPKTYVQHVMEQDGKKLIELLDQGAHFYICGDGIQMAPAVEATLMKSYADVHQVTEADARLWLQQLEEKGRYAKDVWLG

SEQ ID NO: 1003 - DNA, 3147 bp, synthetic construct
  misc_feature 1..3147: note = variant of P450 oxidase from Bacillus megaterium
  source 1..3147: mol_type = other DNA
atgacaattaaggaaatgcctcagcctaagacgtttggagaacttaaaaatttaccgttattaaatacagataaaccggttcaagctttgatgcgtattgcggatgaattaggagaaatctttaaattcgaggcgcctggtagcgtaacgcgctatttatcaagtcagcgtctaattaaagaagcatgcgatgaatcacgctttgataaaaacttaagtcaagggcttaaatttgcacgtgattttgttggagacgggctggttacaagctggacgcatgaaccgaattggaaaaaagcgcataatatcttagttccaagctttagtcagcatgcaatggggcgttatcatgcgatgatggtcgatatcgccgtgcagcttgttcaaaagtgggagcgtctaaatgcagatgagcatattgaagtatcggaagacatgacacgtttaacgcttgatacaattggtctttgcctgtttaactatcgctttaacagcttttaccgagatacgcctcatccatttattgtgagtgtggttcgtgcactggatgaagtaatgaacaagctgcagcgagcaaatccagacgacccagcttatgatgaaaacaagcgccagtgtcaagaagatatcaaggtgatgaacgactatgtagataaaattattgcagatcgcaaagcaaggggtgaacaaagtcatgatttattaacgcagatgctaaacggaaaagatccagaaacgggtgagccgcttgatgacgggaacattcgtcagcaaattattacattcttaattgcgggacaccaaacgacaagtggtcttttatcatttgcgctgtatttcttagtgaaaaatccacgtgtattacaaaaagtagcagaagaagcagcacgagttctagtagatcctgttccaagctacaaacaagtcaaacagcttaaatatgttggcatggtcttaaacgaagcgctgcgcttatggccagtagcgcctatgttttccctatatgcaaaagaagatacggtgcttggaggagaatatcctttaacgaaaggcgacgaagtaatggttctggtgcctcagcttcaccgtgataaaacaatttggggagacgatgtggaggagttccgtccagagcgttttgaaaatccaagtgcgattccgcagcatgcgtttaaaccgtttggaaacggtcagcgtgcgtgtatcggtcagcagttcgctcttcatagtgcaacgctggtacttggtatgatgctaaaacactttgactttgaagatcatacaaactacgagctcgttattaaagaatcgcggacgttaaaacctgaaggctttgtggtaaaagcaaaatcgaaaggcattccgcttggcggtattccttcacctagcactgaacagtctgctaaaaaagtacgcaaaaaggcagaaaacgctcataatacgccgctgcttgtgctatacggttcaaatgcgggaacagctgaaggaacggcgcgtgatttagcagatattgcaatgagcaaaggatttgcaccgcaggtcgcaacgcttgattcacacgccggtaatcttccgcgcgaaggagctgtattaattgtaacggcgtcttataacggtcatccgcctgataacgcaaagcaatttgtcgattggttagaccaagcgtctgcggatgaagtaaaaggcgttcgctactccgtatttggatgcggcgataaaaattgggcggggacgtatcaaaaagtgcctgcttttatcgatgaaacgcttgccgctaaaggggcagaaaacatcgctaagcgcggtgaagcagatgcaagcgacgactttgaaggcgcgtatgaagaatggcgtgatcatatgtggagtgacgtagcagcctactttggtctcgacattgaaagtagtgaagataataaatctactctttcacttcaatttgtcgacagcgcggcggatatgcctcttgcgaaaatgcacggtgcgttttcaacgaacgtcgtagcaagcaaagaacttcaacagcctggcagtgcacgaagcacgcgacatcttgaaattgaacttccaaaagaagcttcttatcaagaaggagatcatttaggtgttattcctcgctattatgaaggaatagtaatgcgtgtaacacagaggttcggcctaagcgcatcacagctgatccgtctggaagcagaagaagaaaaattagctcatttgccactcgctaaaacagtatccgtagaagagcttctgcaatacgtggagcttcaagatcctgttacgcgcacgcagcttcgcgcaatggctgctatcacggtctgcccgccgcataaagtagagcttgaagccttgcttggcaagcaagcctacaaagaacaagtgctggcaaaacgtttaacaatgcttgaactgcttgaaaaatacccggcgtgtgaaatgagtttcagcgaatttatcgcccttctgccaagcatacgcccgcgctattactcgatttcttcatcacctcgtgtcgatgaaaaacaggcaagcatcacggtcagcgttgtctcgggaccggcgtggagcggatatggagaatataaaggaattgcgtcgaactatcttgctgagctgcaagaaggagatacgattacgtgctttatttccacaccgcagtcagagtttacgctgccaaaagaccctgaaacgccgcttatcatggtcggaccgggaacaggcgtcgcgccgtttagaggctttgtgcaggcgcgcaaacagctaaaagaacaaggacagtcacttggagaagcacatttatacttcggctgccgttcacctcatgaagactatctgtatcaagaagagcttgaaaacgcccaaagcgaaggcatcattacccttcataccgctttttctcgcatgccgaatcagccgaaaacatacgttcagcacgtaatggaacaagacggcaagaaattgattgaacttcttgaccaaggagcgcacttctatatttgcggagacggaattcaaatggcacctgccgttgaagcaacgcttatgaaaagctatgctgacgttcaccaagtcggcgaagcagacgctcgcttatggctgcagcagctagaagaaaaaggccgatacgcaaaagacgtgtggctgggg

SEQ ID NO: 1004 - protein, 1049 aa, synthetic construct
  REGION 1..1049: note = variant of P450 oxidase from Bacillus megaterium
MTIKEMPQPKTFGELKNLPLLNTDKPVQALMRIADELGEIFKFEAPGSVTRYLSSQRLIKEACDESRFDKNLSQGLKFARDFVGDGLVTSWTHEPNWKKAHNILVPSFSQHAMGRYHAMMVDIAVQLVQKWERLNADEHIEVSEDMTRLTLDTIGLCLFNYRFNSFYRDTPHPFIVSVVRALDEVMNKLQRANPDDPAYDENKRQCQEDIKVMNDYVDKIIADRKARGEQSHDLLTQMLNGKDPETGEPLDDGNIRQQIITFLIAGHQTTSGLLSFALYFLVKNPRVLQKVAEEAARVLVDPVPSYKQVKQLKYVGMVLNEALRLWPVAPMFSLYAKEDTVLGGEYPLTKGDEVMVLVPQLHRDKTIWGDDVEEFRPERFENPSAIPQHAFKPFGNGQRACIGQQFALHSATLVLGMMLKHFDFEDHTNYELVIKESRTLKPEGFVVKAKSKGIPLGGIPSPSTEQSAKKVRKKAENAHNTPLLVLYGSNAGTAEGTARDLADIAMSKGFAPQVATLDSHAGNLPREGAVLIVTASYNGHPPDNAKQFVDWLDQASADEVKGVRYSVFGCGDKNWAGTYQKVPAFIDETLAAKGAENIAKRGEADASDDFEGAYEEWRDHMWSDVAAYFGLDIESSEDNKSTLSLQFVDSAADMPLAKMHGAFSTNVVASKELQQPGSARSTRHLEIELPKEASYQEGDHLGVIPRYYEGIVMRVTQRFGLSASQLIRLEAEEEKLAHLPLAKTVSVEELLQYVELQDPVTRTQLRAMAAITVCPPHKVELEALLGKQAYKEQVLAKRLTMLELLEKYPACEMSFSEFIALLPSIRPRYYSISSSPRVDEKQASITVSVVSGPAWSGYGEYKGIASNYLAELQEGDTITCFISTPQSEFTLPKDPETPLIMVGPGTGVAPFRGFVQARKQLKEQGQSLGEAHLYFGCRSPHEDYLYQEELENAQSEGIITLHTAFSRMPNQPKTYVQHVMEQDGKKLIELLDQGAHFYICGDGIQMAPAVEATLMKSYADVHQVGEADARLWLQQLEEKGRYAKDVWLG

SEQ ID NO: 1005 - DNA, 3147 bp, synthetic construct
  misc_feature 1..3147: note = variant of P450 oxidase from Bacillus megaterium
  source 1..3147: mol_type = other DNA
atgacaattaaggaaatgcctcagcctaagacgtttggagaacttaaaaatttaccgttattaaatacagataaaccggttcaagctttgatgcgtattgcggatgaattaggagaaatctttaaattcgaggcgcctggtagcgtaacgcgctatttatcaagtcagcgtctaattaaagaagcatgcgatgaatcacgctttgataaaaacttaagtcaagggcttaaatttgcacgtgattttgttggagacgggctggttacaagctggacgcatgaaccgaattggaaaaaagcgcataatatcttagttccaagctttagtcagcatgcaatggggcgttatcatgcgatgatggtcgatatcgccgtgcagcttgttcaaaagtgggagcgtctaaatgcagatgagcatattgaagtatcggaagacatgacacgtttaacgcttgatacaattggtctttgcctgtttaactatcgctttaacagcttttaccgagatacgcctcatccatttattgtgagtgtggttcgtgcactggatgaagtaatgaacaagctgcagcgagcaaatccagacgacccagcttatgatgaaaacaagcgccagtgtcaagaagatatcaaggtgatgaacgactatgtagataaaattattgcagatcgcaaagcaaggggtgaacaaagtcatgatttattaacgcagatgctaaacggaaaagatccagaaacgggtgagccgcttgatgacgggaacattcgtcagcaaattattacattcttaattgcgggacaccaaacgacaagtggtcttttatcatttgcgctgtatttcttagtgaaaaatccacgtgtattacaaaaagtagcagaagaagcagcacgagttctagtagatcctgttccaagctacaaacaagtcaaacagcttaaatatgttggcatggtcttaaacgaagcgctgcgcttatggccagtagcgcctatgttttccctatatgcaaaagaagatacggtgcttggaggagaatatcctttaacgaaaggcgacgaagtaatggttctggtgcctcagcttcaccgtgataaaacaatttggggagacgatgtggaggagttccgtccagagcgttttgaaaatccaagtgcgattccgcagcatgcgtttaaaccgtttggaaacggtcagcgtgcgtgtatcggtcagcagttcgctcttcatagtgcaacgctggtacttggtatgatgctaaaacactttgactttgaagatcatacaaactacgagctcgttattaaagaatcgcggacgttaaaacctgaaggctttgtggtaaaagcaaaatcgaaaggcattccgcttggcggtattccttcacctagcactgaacagtctgctaaaaaagtacgcaaaaaggcagaaaacgctcataatacgccgctgcttgtgctatacggttcaaatgcgggaacagctgaaggaacggcgcgtgatttagcagatattgcaatgagcaaaggatttgcaccgcaggtcgcaacgcttgattcacacgccggtaatcttccgcgcgaaggagctgtattaattgtaacggcgtcttataacggtcatccgcctgataacgcaaagcaatttgtcgattggttagaccaagcgtctgcggatgaagtaaaaggcgttcgctactccgtatttggatgcggcgataaaaattgggcggggacgtatcaaaaagtgcctgcttttatcgatgaaacgcttgccgctaaaggggcagaaaacatcgctgaccgcggtgaagcagatgcaagcgacgactttgaaggcgcgtatgaagaatggcgtgatcatatgtggagtgacgtagcagcctactttggtctcgacattgaaaacagtgaagataataaatctactctttcacttcaatttgtcgacagcgcggcggatatgccgcttgcgaaaatgcacggtgcgttttcaacgaacgtcgtagcaagcaaagaacttcaacagcctggcagtgcacgaagcacgcgacatcttgaaattgaacttccaaaagaagcttcttatcaagaaggagatcatttaggtgttattcctcgctattatgaaggaatagtaaaccgtgtaacacagaggttcggcctaagcgcatcacagctgatccgtctggaagcagaagaagaaaaattagctcatttgccactcgctaaaacagtatccgtagaagagcttctgcaatacgtggagcttcaagatcctgttacgcgcacgcagcttcgcgcaatggctgctaaaacggtctgcccgccgcataaagtagagcttgaagccttgcttggcaagcaagcctacaaagaacaagtgctggcaaaacgtttaacaatgcttgaactgcttgaaaaatacccggcgtgtgaaatgagtttcagcgaatttatcgcccttctgccaagcatacgcccgcgctattactcgatttcttcatcacctcgtgtcgatgaaaaacaggcaagcatcacggtcagcgttgtctcgggaccggcgtggagcggatatggagagtataaaggaattgcgtcgaactatcttgctgagctgcaagaaggagatacgattacgtgctttatttccacaccgcagtcagagtttacgctgccaaaagatcctgaaacgccgcttatcatggtcggaccgggaacaggcgtcgcgccgtttagaggctttgtgcaggcgcgcaaacagctaaaagaacaaggacagtcacttggagaagcacatttatacttcggctgccgttcacctcatgaagactatctgtatcaagaagagcttgaaaacgcccaaagcgaaggcatcattacgcttcataccgctttttctcgcatgccgaatcagccgaaaacatacgttcagcacgtaatggaacaagacggcaagaaattgattgaacttcttgatcaaggagcgcacttctatatttgcggagacggaattcaaatggcacctgccgttgaagcaacgcttatgaaaagctatgctgacgttcaccaagtcactgaagcagacgctcgcttatggctgcagcagctagaagaaaaaggccgatacgcaaaagacgtgtggctgggg

SEQ ID NO: 1006 - protein, 1049 aa, synthetic construct
  REGION 1..1049: note = variant of P450 oxidase from Bacillus megaterium
MTIKEMPQPKTFGELKNLPLLNTDKPVQALMRIADELGEIFKFEAPGSVTRYLSSQRLIKEACDESRFDKNLSQGLKFARDFVGDGLVTSWTHEPNWKKAHNILVPSFSQHAMGRYHAMMVDIAVQLVQKWERLNADEHIEVSEDMTRLTLDTIGLCLFNYRFNSFYRDTPHPFIVSVVRALDEVMNKLQRANPDDPAYDENKRQCQEDIKVMNDYVDKIIADRKARGEQSHDLLTQMLNGKDPETGEPLDDGNIRQQIITFLIAGHQTTSGLLSFALYFLVKNPRVLQKVAEEAARVLVDPVPSYKQVKQLKYVGMVLNEALRLWPVAPMFSLYAKEDTVLGGEYPLTKGDEVMVLVPQLHRDKTIWGDDVEEFRPERFENPSAIPQHAFKPFGNGQRACIGQQFALHSATLVLGMMLKHFDFEDHTNYELVIKESRTLKPEGFVVKAKSKGIPLGGIPSPSTEQSAKKVRKKAENAHNTPLLVLYGSNAGTAEGTARDLADIAMSKGFAPQVATLDSHAGNLPREGAVLIVTASYNGHPPDNAKQFVDWLDQASADEVKGVRYSVFGCGDKNWAGTYQKVPAFIDETLAAKGAENIADRGEADASDDFEGAYEEWRDHMWSDVAAYFGLDIENSEDNKSTLSLQFVDSAADMPLAKMHGAFSTNVVASKELQQPGSARSTRHLEIELPKEASYQEGDHLGVIPRYYEGIVNRVTQRFGLSASQLIRLEAEEEKLAHLPLAKTVSVEELLQYVELQDPVTRTQLRAMAAKTVCPPHKVELEALLGKQAYKEQVLAKRLTMLELLEKYPACEMSFSEFIALLPSIRPRYYSISSSPRVDEKQASITVSVVSGPAWSGYGEYKGIASNYLAELQEGDTITCFISTPQSEFTLPKDPETPLIMVGPGTGVAPFRGFVQARKQLKEQGQSLGEAHLYFGCRSPHEDYLYQEELENAQSEGIITLHTAFSRMPNQPKTYVQHVMEQDGKKLIELLDQGAHFYICGDGIQMAPAVEATLMKSYADVHQVTEADARLWLQQLEEKGRYAKDVWLG

SEQ ID NO: 1007 - DNA, 3147 bp, synthetic construct
  misc_feature 1..3147: note = variant of P450 oxidase from Bacillus megaterium
  source 1..3147: mol_type = other DNA
atgacaattaaggaaatgcctcagcctaagacgtttggagaacttaaaaatttaccgttattaaatacagataaaccggttcaagctttgatgcgtattgcggatgaattaggagaaatctttaaattcgaggcgcctggtagcgtaacgcgctatttatcaagtcagcgtctaattaaagaagcatgcgatgaatcacgctttgataaaaacttaagtcaagggcttaaatttgcacgtgattttgttggagacgggctggttacaagctggacgcatgaaccgaattggaaaaaagcgcataatatcttagttccaagctttagtcagcatgcaatggggcgttatcatgcgatgatggtcgatatcgccgtgcagcttgttcaaaagtgggagcgtctaaatgcagatgagcatattgaagtatcggaagacatgacacgtttaacgcttgatacaattggtctttgcctgtttaactatcgctttaacagcttttaccgagatacgcctcatccatttattgtgagtgtggttcgtgcactggatgaagtaatgaacaagctgcagcgagcaaatccagacgacccagcttatgatgaaaacaagcgccagtgtcaagaagatatcaaggtgatgaacgactatgtagataaaattattgcagatcgcaaagcaaggggtgaacaaagtcatgatttattaacgcagatgctaaacggaaaagatccagaaacgggtgagccgcttgatgacgggaacattcgtcagcaaattattacattcttaattgcgggacaccaaacgacaagtggtcttttatcatttgcgctgtatttcttagtgaaaaatccacgtgtattacaaaaagtagcagaagaagcagcacgagttctagtagatcctgttccaagctacaaacaagtcaaacagcttaaatatgttggcatggtcttaaacgaagcgctgcgcttatggccagtagcgcctatgttttccctatatgcaaaagaagatacggtgcttggaggagaatatcctttaacgaaaggcgacgaagtaatggttctggtgcctcagcttcaccgtgataaaacaatttggggagacgatgtggaggagttccgtccagagcgttttgaaaatccaagtgcgattccgcagcatgcgtttaaaccgtttggaaacggtcagcgtgcgtgtatcggtcagcagttcgctcttcatagtgcaacgctggtacttggtatgatgctaaaacactttgactttgaagatcatacaaactacgagctcgttattaaagaatcgcggacgttaaaacctgaaggctttgtggtaaaagcaaaatcgaaaggcattccgcttggcggtattccttcacctagcactgaacagtctgctaaaaaagtacgcaaaaaggcagaaaacgctcataatacgccgctgcttgtgctatacggttcaaatgcgggaacagctgaaggaacggcgcgtgatttagcagatattgcaatgagcaaaggatttgcaccgcaggtcgcaacgcttgattcacacgccggtaatcttccgcgcgaaggagctgtattaattgtaacggcgtcttataacggtcatccgcctgataacgcaaagcaatttgtcgattggttagaccaagcgtctgcggatgaagtaaaaggcgttcgctactccgtatttggatgcggcgataaaaattgggcggggacgtatcaaaaagtgcctgcttttatcgatgaaacgcttgccgctaaaggggcagaaaacatcgctgaccgcggtgaagcagatgcaagcgacgactttgaaggcgcgtatgaagaatggcgtgatcatatgtggagtgacgtagcagcctactttggtctcgacattgaaagtagtgaagataataaatctactctttcacttcaatttgtcgacagcgcggcggatatgccgcttgcgaaaatgcacggtgcgttttcaacgaacgtcgtagcaagcaaagaacttcaacagcctggcagtgcacgaagcacgcgacatcttgaaattgaacttccaaaagaagcttcttatcaagaaggagatcatttaggtgttattcctcgctattatgaaggaatagtaaaccgtgtaacacagaggttcggcctaagcgcatcacagctgatccgtctggaagcagaagaagaaaaattagctcatttgccactcgctaaaacagtatccgtagaagagcttctgcaatacgtggagcttcaagatcctgttacgcgcacgcagcttcgcgcaatggctgctatcacggtctgcccgccgcataaagtagagcttgaagccttgcttggcaagcaagcctacaaagaacaagtgctggcaaaacgtttaacaatgcttgaactgcttgaaaaatacccggcgtgtgaaatgagtttcagcgaatttatcgcccttctgccaagcatacgcccgcgctattactcgatttcttcatcacctcgtgtcgatgaaaaacaagcaagcatcacggtcagcgttgtctcaggaccggcgtggagcggatatggagaatataaaggaattgcgtcgaactatcttgctgagctgcaagaaggagatacgattacgtgctttatttccacaccgcagtcagagtttacgctgccaaaagttcctgaaacgccgcttatcatggtcggaccgggaacaggcgtcgcgccgtttagaggctttgtgcaggcgcgcaaacagctaaaagaacaaggacagtcacttggagaagcacatttatacttcggctgccgttcacctcatgaagactatctgtatcaagaagagcttgaaaacgcccaaagcgaaggcatcattacccttcataccgctttttctcgcatgccgaatcagccgaaaacatacgttcagcacgtaatggaacaagacggcaagaaattgattgaacttcttgaccaaggagcgcacttctatatttgcggagacggaattcaaatggcacctgccgttgaagcaacgcttatgaaaagctatgctgacgttcaccaagtgagtgaagcagacgctcgcttatggctgcagcagctagaagaaaaaggccgatacgcaaaagacgtgtggctgggg

SEQ ID NO: 1008 - protein, 1049 aa, synthetic construct
  REGION 1..1049: note = variant of P450 oxidase from Bacillus megaterium
MTIKEMPQPKTFGELKNLPLLNTDKPVQALMRIADELGEIFKFEAPGSVTRYLSSQRLIKEACDESRFDKNLSQGLKFARDFVGDGLVTSWTHEPNWKKAHNILVPSFSQHAMGRYHAMMVDIAVQLVQKWERLNADEHIEVSEDMTRLTLDTIGLCLFNYRFNSFYRDTPHPFIVSVVRALDEVMNKLQRANPDDPAYDENKRQCQEDIKVMNDYVDKIIADRKARGEQSHDLLTQMLNGKDPETGEPLDDGNIRQQIITFLIAGHQTTSGLLSFALYFLVKNPRVLQKVAEEAARVLVDPVPSYKQVKQLKYVGMVLNEALRLWPVAPMFSLYAKEDTVLGGEYPLTKGDEVMVLVPQLHRDKTIWGDDVEEFRPERFENPSAIPQHAFKPFGNGQRACIGQQFALHSATLVLGMMLKHFDFEDHTNYELVIKESRTLKPEGFVVKAKSKGIPLGGIPSPSTEQSAKKVRKKAENAHNTPLLVLYGSNAGTAEGTARDLADIAMSKGFAPQVATLDSHAGNLPREGAVLIVTASYNGHPPDNAKQFVDWLDQASADEVKGVRYSVFGCGDKNWAGTYQKVPAFIDETLAAKGAENIADRGEADASDDFEGAYEEWRDHMWSDVAAYFGLDIESSEDNKSTLSLQFVDSAADMPLAKMHGAFSTNVVASKELQQPGSARSTRHLEIELPKEASYQEGDHLGVIPRYYEGIVNRVTQRFGLSASQLIRLEAEEEKLAHLPLAKTVSVEELLQYVELQDPVTRTQLRAMAAITVCPPHKVELEALLGKQAYKEQVLAKRLTMLELLEKYPACEMSFSEFIALLPSIRPRYYSISSSPRVDEKQASITVSVVSGPAWSGYGEYKGIASNYLAELQEGDTITCFISTPQSEFTLPKVPETPLIMVGPGTGVAPFRGFVQARKQLKEQGQSLGEAHLYFGCRSPHEDYLYQEELENAQSEGIITLHTAFSRMPNQPKTYVQHVMEQDGKKLIELLDQGAHFYICGDGIQMAPAVEATLMKSYADVHQVSEADARLWLQQLEEKGRYAKDVWLG

SEQ ID NO: 1009 - DNA, 3147 bp, synthetic construct
  misc_feature 1..3147: note = variant of P450 oxidase from Bacillus megaterium
  source 1..3147: mol_type = other DNA
atgacaattaaggaaatgcctcagcctaagacgtttggagaacttaaaaatttaccgttattaaatacagataaaccggttcaagctttgatgcgtattgcggatgaattaggagaaatctttaaattcgaggcgcctggtagcgtaacgcgctatttatcaagtcagcgtctaattaaagaagcatgcgatgaatcacgctttgataaaaacttaagtcaagggcttaaatttgcacgtgattttgttggagacgggctggttacaagctggacgcatgaaccgaattggaaaaaagcgcataatatcttagttccaagctttagtcagcatgcaatggggcgttatcatgcgatgatggtcgatatcgccgtgcagcttgttcaaaagtgggagcgtctaaatgcagatgagcatattgaagtatcggaagacatgacacgtttaacgcttgatacaattggtctttgcctgtttaactatcgctttaacagcttttaccgagatacgcctcatccatttattgtgagtgtggttcgtgcactggatgaagtaatgaacaagctgcagcgagcaaatccagacgacccagcttatgatgaaaacaagcgccagtgtcaagaagatatcaaggtgatgaacgactatgtagataaaattattgcagatcgcaaagcaaggggtgaacaaagtcatgatttattaacgcagatgctaaacggaaaagatccagaaacgggtgagccgcttgatgacgggaacattcgtcagcaaattattacattcttaattgcgggacaccaaacgacaagtggtcttttatcatttgcgctgtatttcttagtgaaaaatccacgtgtattacaaaaagtagcagaagaagcagcacgagttctagtagatcctgttccaagctacaaacaagtcaaacagcttaaatatgttggcatggtcttaaacgaagcgctgcgcttatggccagtagcgcctatgttttccctatatgcaaaagaagatacggtgcttggaggagaatatcctttaacgaaaggcgacgaagtaatggttctggtgcctcagcttcaccgtgataaaacaatttggggagacgatgtggaggagttccgtccagagcgttttgaaaatccaagtgcgattccgcagcatgcgtttaaaccgtttggaaacggtcagcgtgcgtgtatcggtcagcagttcgctcttcatagtgcaacgctggtacttggtatgatgctaaaacactttgactttgaagatcatacaaactacgagctcgttattaaagaatcgcggacgttaaaacctgaaggctttagtgtaaaagcaaaatcgaaaggcattccgcttggcggtattccttcacctagcactgaacagtctgctaaaaaagtacgcaaaaaggcagaaaacgctcataatacgccgctgcttgtgctatacggttcaaatgcgggaacagctgaaggaacggcgcgtgatttagcagatattgcaatgagcaaaggatttgcaccgcaggtcgcaacgcttgattcacacgccggtaatcttccgcgcgaaggagctgtattaattgtaacggcgtcttataacggtcatccgcctgataacgcaaagcaatttgtcgattggttagaccaagcgtctgcggatgaagtaaaaggcgttcgctactccgtatttggatgcggcgataaaaattgggcggggacgtatcaaaaagtgcctgcttttatcgatgaaacgcttgccgctaaaggggcagaaaacatcgctgaccgcggtgaagcagatgcaagcgacgactttgaaggcgcgtatgaagaatggcgtgatcatatgtggagtgacgtagcagcctactttggtctcgacattgaaaacagtgaagataataaatctactctttcacttcaatttgtcgacagcgcggcggatatgccgcttgcgaaaatgcacggtgcgttttcaacgaacgtcgtagcaagcaaagaacttcaacagcctggcagtgcacgaagcacgcgacatcttgaaattgaacttccaaaagaagcttcttatcaagaaggagatcatttaggtgttattcctcgctattatgaaggaatagtaaaccgtgtaacacagaggttcggcctaagcgcatcacagctgatccgtctggaagcagaagaagaaaaattagctcatttgccactcgctaaaacagtatccgtagaagagcttctgcaatacgtggagcttcaagatcctgttacgcgcacgcagcttcgcgcaatggctgctaaaacggtctgcccgccgcataaagtagagcttgaagccttgcttggcaagcaagcctacaaagaacaagtgctggcaaaacgtttaacaatgcttgaactgcttgaaaaatacccggcgtgtgaaatgagtttcagcgaatttatcgcccttctgccaagcatacgcccgcgctattactcgatttcttcatcacctcgtgtcgatgaaaaacaagcaagcatcacggtcagcgttgtctcaggaccggcgtggagcggatatggagaatataaaggaattgcgtcgaactatcttgctgagctgcaagaaggagatacgattacgtgctttatttccacaccgcagtcagagtttacgctgccaaaagaccctgaaacgccgcttatcatggtcggaccgggaacaggcgtcgcgccgtttagaggctttgtgcaggcgcgcaaacagctaaaagaacaaggacagtcacttggagaagcacatttatacttcggctgccgttcacctcatgaagactatctgtatcaagaagagcttgaaaacgcccaaagcgaaggcatcattacgcttcataccgctttttctcgcatgccgaatcagccgaaaacatacgttcagcacgtaatggaacaagacggcaagaaattgattgaacttcttgatcaaggagcgcacttctatatttgcggagacggaattcaaatggcacctgccgttgaagcaacgcttatgaaaagctatgctgacgttcaccaagtgagtgaagcagacgctcgcttatggctgcagcagctagaagaaaaaggccgatacgcaaaagacgtgtggctgggg

SEQ ID NO: 1010 - protein, 1049 aa, synthetic construct
  REGION 1..1049: note = variant of P450 oxidase from Bacillus megaterium
MTIKEMPQPKTFGELKNLPLLNTDKPVQALMRIADELGEIFKFEAPGSVTRYLSSQRLIKEACDESRFDKNLSQGLKFARDFVGDGLVTSWTHEPNWKKAHNILVPSFSQHAMGRYHAMMVDIAVQLVQKWERLNADEHIEVSEDMTRLTLDTIGLCLFNYRFNSFYRDTPHPFIVSVVRALDEVMNKLQRANPDDPAYDENKRQCQEDIKVMNDYVDKIIADRKARGEQSHDLLTQMLNGKDPETGEPLDDGNIRQQIITFLIAGHQTTSGLLSFALYFLVKNPRVLQKVAEEAARVLVDPVPSYKQVKQLKYVGMVLNEALRLWPVAPMFSLYAKEDTVLGGEYPLTKGDEVMVLVPQLHRDKTIWGDDVEEFRPERFENPSAIPQHAFKPFGNGQRACIGQQFALHSATLVLGMMLKHFDFEDHTNYELVIKESRTLKPEGFSVKAKSKGIPLGGIPSPSTEQSAKKVRKKAENAHNTPLLVLYGSNAGTAEGTARDLADIAMSKGFAPQVATLDSHAGNLPREGAVLIVTASYNGHPPDNAKQFVDWLDQASADEVKGVRYSVFGCGDKNWAGTYQKVPAFIDETLAAKGAENIADRGEADASDDFEGAYEEWRDHMWSDVAAYFGLDIENSEDNKSTLSLQFVDSAADMPLAKMHGAFSTNVVASKELQQPGSARSTRHLEIELPKEASYQEGDHLGVIPRYYEGIVNRVTQRFGLSASQLIRLEAEEEKLAHLPLAKTVSVEELLQYVELQDPVTRTQLRAMAAKTVCPPHKVELEALLGKQAYKEQVLAKRLTMLELLEKYPACEMSFSEFIALLPSIRPRYYSISSSPRVDEKQASITVSVVSGPAWSGYGEYKGIASNYLAELQEGDTITCFISTPQSEFTLPKDPETPLIMVGPGTGVAPFRGFVQARKQLKEQGQSLGEAHLYFGCRSPHEDYLYQEELENAQSEGIITLHTAFSRMPNQPKTYVQHVMEQDGKKLIELLDQGAHFYICGDGIQMAPAVEATLMKSYADVHQVSEADARLWLQQLEEKGRYAKDVWLG

SEQ ID NO: 1011 - DNA, 3147 bp, synthetic construct
  misc_feature 1..3147: note = variant of P450 oxidase from Bacillus megaterium
  source 1..3147: mol_type = other DNA
atgacaattaaggaaatgcctcagcctaagacgtttggagaacttaaaaatttaccgttattaaatacagataaaccggttcaagctttgatgcgtattgcggatgaattaggagaaatctttaaattcgaggcgcctggtagcgtaacgcgctatttatcaagtcagcgtctaattaaagaagcatgcgatgaatcacgctttgataaaaacttaagtcaagggcttaaatttgcacgtgattttgttggagacgggctggttacaagctggacgcatgaaccgaattggaaaaaagcgcataatatcttagttccaagctttagtcagcatgcaatggggcgttatcatgcgatgatggtcgatatcgccgtgcagcttgttcaaaagtgggagcgtctaaatgcagatgagcatattgaagtatcggaagacatgacacgtttaacgcttgatacaattggtctttgcctgtttaactatcgctttaacagcttttaccgagatacgcctcatccatttattgtgagtgtggttcgtgcactggatgaagtaatgaacaagctgcagcgagcaaatccagacgacccagcttatgatgaaaacaagcgccagtgtcaagaagatatcaaggtgatgaacgactatgtagataaaattattgcagatcgcaaagcaaggggtgaacaaagtcatgatttattaacgcagatgctaaacggaaaagatccagaaacgggtgagccgcttgatgacgggaacattcgtcagcaaattattacattcttaattgcgggacaccaaacgacaagtggtcttttatcatttgcgctgtatttcttagtgaaaaatccacgtgtattacaaaaagtagcagaagaagcagcacgagttctagtagatcctgttccagggtacaaacaagtcaaacagcttaaatatgttggcatggtcttaaacgaagcgctgcgcttatggccagtagcgcctatgttttccctatatgcaaaagaagatacggtgcttggaggagaatatcctttaacgaaaggcgacgaagtaatggttctggtgcctcagcttcaccgtgataaaacaatttggggagacgatgtggaggagttccgtccagagcgttttgaaaatccaagtgcgattccgcagcatgcgtttaaaccgtttggaaacggtcagcgtgcgtgtatcggtcagcagttcgctcttcatagtgcaacgctggtacttggtatgatgctaaaacactttgactttgaagatcatacaaactacgagctcgttattaaagaatcgcggacgttaaaacctgaaggctttgtggtaaaagcaaaatcgaaaggcattccgcttggcggtattccttcacctagcactgaacagtctgctaaaaaagtacgcaaaaaggcagaaaacgctcataatacgccgctgcttgtgctatacggttcaaatgcgggaacagctgaaggaacggcgcgtgatttagcagatattgcaatgagcaaaggatttgcaccgcaggtcgcaacgcttgattcacacgccggtaatcttccgcgcgaaggagctgtattaattgtaacggcgtcttataacggtcatccgcctgataacgcaaagcaatttgtcgattggttagaccaagcgtctgcggatgaagtaaaaggcgttcgctactccgtatttggatgcggcgataaaaattgggcggggacgtatcaaaaagtgcctgcttttatcgatgaaacgcttgccgctaaaggggcagaaaacatcgctgaccgcggtgaagcagatgcaagcgacgactttgaaggcgcgtatgaagaatggcgtgatcatatgtggagtgacgtagcagcctactttggtctcgacattgaaaacagtgaagataataaatctactctttcacttcaatttgtcgacagcgcggcggatatgccgcttgcgaaaatgcacggtgcgttttcaacgaacgtcgtagcaagcaaagaacttcaacagcctggcagtgcacgaagcacgcgacatcttgaaattgaacttccaaaagaagcttcttatcaagaaggagatcatttaggtgttattcctcgctattatgaaggaatagtaaaccgtgtaacacagaggttcggcctaagcgcatcacagctgatccgtctggaagcagaagaagaaaaattagctcatttgccactcgctaaaacagtatccgtagaagagcttctgcaatacgtggagcttcaagatcctgttacgcgcacgcagcttcgcgcaatggctgctaaaacggtctgcccgccgcataaagtagagcttgaagccttgcttggcaagcaagcctacaaagaacaagtgctggcaaaacgtttaacaatgcttgaactgcttgaaaaatacccggcgtgtgaaatgagtttcagcgaatttatcgcccttctgccaagcatacgcccgcgctattactcgatttcttcatcacctcgtgtcgatgaaaaacaagcaagcatcacggtcagcgttgtctcaggaccggcgtggagcggatatggagaatataaaggaattgcgtcgaactatcttgctgagctgcaagaaggagatacgattacgtgctttatttccacaccgcagtcagagtttacgctgccaaaagaccctgaaacgccgcttatcatggtcggaccgggaacaggcgtcgcgccgtttagaggctttgtgcaggcgcgcaaacagctaaaagaacaaggacagtcacttggagaagcacatttatacttcggctgccgttcacctcatgaagactatctgtatcaagaagagcttgaaaacgcccaaagcgaaggcatcattacgcttcataccgctttttctcgcatgccgaatcagccgaaaacatacgttcagcacgtaatggaacaagacggcaagaaattgattgaacttcttgatcaaggagcgcacttctatatttgcggagacggaattcaaatggcacctgccgttgaagcaacgcttatgaaaagctatgctgacgttcaccaagtgagtgaagcagacgctcgcttatggctgcagcagctagaagaaaaaggccgatacgcaaaagacgtgtggctgggg

SEQ ID NO: 1012 - protein, 1049 aa, synthetic construct
  REGION 1..1049: note = variant of P450 oxidase from Bacillus megaterium
MTIKEMPQPKTFGELKNLPLLNTDKPVQALMRIADELGEIFKFEAPGSVTRYLSSQRLIKEACDESRFDKNLSQGLKFARDFVGDGLVTSWTHEPNWKKAHNILVPSFSQHAMGRYHAMMVDIAVQLVQKWERLNADEHIEVSEDMTRLTLDTIGLCLFNYRFNSFYRDTPHPFIVSVVRALDEVMNKLQRANPDDPAYDENKRQCQEDIKVMNDYVDKIIADRKARGEQSHDLLTQMLNGKDPETGEPLDDGNIRQQIITFLIAGHQTTSGLLSFALYFLVKNPRVLQKVAEEAARVLVDPVPGYKQVKQLKYVGMVLNEALRLWPVAPMFSLYAKEDTVLGGEYPLTKGDEVMVLVPQLHRDKTIWGDDVEEFRPERFENPSAIPQHAFKPFGNGQRACIGQQFALHSATLVLGMMLKHFDFEDHTNYELVIKESRTLKPEGFVVKAKSKGIPLGGIPSPSTEQSAKKVRKKAENAHNTPLLVLYGSNAGTAEGTARDLADIAMSKGFAPQVATLDSHAGNLPREGAVLIVTASYNGHPPDNAKQFVDWLDQASADEVKGVRYSVFGCGDKNWAGTYQKVPAFIDETLAAKGAENIADRGEADASDDFEGAYEEWRDHMWSDVAAYFGLDIENSEDNKSTLSLQFVDSAADMPLAKMHGAFSTNVVASKELQQPGSARSTRHLEIELPKEASYQEGDHLGVIPRYYEGIVNRVTQRFGLSASQLIRLEAEEEKLAHLPLAKTVSVEELLQYVELQDPVTRTQLRAMAAKTVCPPHKVELEALLGKQAYKEQVLAKRLTMLELLEKYPACEMSFSEFIALLPSIRPRYYSISSSPRVDEKQASITVSVVSGPAWSGYGEYKGIASNYLAELQEGDTITCFISTPQSEFTLPKDPETPLIMVGPGTGVAPFRGFVQARKQLKEQGQSLGEAHLYFGCRSPHEDYLYQEELENAQSEGIITLHTAFSRMPNQPKTYVQHVMEQDGKKLIELLDQGAHFYICGDGIQMAPAVEATLMKSYADVHQVSEADARLWLQQLEEKGRYAKDVWLG

SEQ ID NO: 1013 - DNA, 3147 bp, synthetic construct
  misc_feature 1..3147: note = variant of P450 oxidase from Bacillus megaterium
  source 1..3147: mol_type = other DNA
atgacaattaaggaaatgcctcagcctaagacgtttggagaacttaaaaatttaccgttattaaatacagataaaccggttcaagctttgatgcgtattgcggatgaattaggagaaatctttaaattcgaggcgcctggtagcgtaacgcgctatttatcaagtcagcgtctaattaaagaagcatgcgatgaatcacgctttgataaaaacttaagtcaagggcttaaatttgcacgtgattttgttggagacgggctggttacaagctggacgcatgaaccgaattggaaaaaagcgcataatatcttagttccaagctttagtcagcatgcaatggggcgttatcatgcgatgatggtcgatatcgccgtgcagcttgttcaaaagtgggagcgtctaaatgcagatgagcatattgaagtatcggaagacatgacacgtttaacgcttgatacaattggtctttgcctgtttaactatcgctttaacagcttttaccgagatacgcctcatccatttattgtgagtgtggttcgtgcactggatgaagtaatgaacaagctgcagcgagcaaatccagacgacccagcttatgatgaaaacaagcgccagtgtcaagaagatatcaaggtgatgaacgactatgtagataaaattattgcagatcgcaaagcaaggggtgaacaaagtcatgatttattaacgcagatgctaaacggaaaagatccagaaacgggtgagccgcttgatgacgggaacattcgtcagcaaattattacattcttaattgcgggacaccaaacgacaagtggtcttttatcatttgcgctgtatttcttagtgaaaaatccacgtgtattacaaaaagtagcagaagaagcagcacgagttctagtagatcctgttccaaggtacaaacaagtcaaacagcttaaatatgttggcatggtcttaaacgaagcgctgcgcttatggccagtagcgcctatgttttccctatatgcaaaagaagatacggtgcttggaggagaatatcctttaacgaaaggcgacgaagtaatggttctggtgcctcagcttcaccgtgataaaacaatttggggagacgatgtggaggagttccgtccagagcgttttgaaaatccaagtgcgattccgcagcatgcgtttaaaccgtttggaaacggtcagcgtgcgtgtatcggtcagcagttcgctcttcatagtgcaacgctggtacttggtatgatgctaaaacactttgactttgaagatcatacaaactacgagctcgttattaaagaatcgcggacgttaaaacctgaaggctttgtggtaaaagcaaaatcgaaaggcattccgcttggcggtattccttcacctagcactgaacagtctgctaaaaaagtacgcaaaaaggcagaaaacgctcataatacgccgctgcttgtgctatacggttcaaatgcgggaacagctgaaggaacggcgcgtgatttagcagatattgcaatgagcaaaggatttgcaccgcaggtcgcaacgcttgattcacacgccggtaatcttccgcgcgaaggagctgtattaattgtaacggcgtcttataacggtcatccgcctgataacgcaaagcaatttgtcgattggttagaccaagcgtctgcggatgaagtaaaaggcgttcgctactccgtatttggatgcggcgataaaaattgggcggggacgtatcaaaaagtgcctgcttttatcgatgaaacgcttgccgctaaaggggcagaaaacatcgctgaccgcggtgaagcagatgcaagcgacgactttgaaggcgcgtatgaagaatggcgtgatcatatgtggagtgacgtagcagcctactttggtctcgacattgaaaacagtgaagataataaatctactctttcacttcaatttgtcgacagcgcggcggatatgccgcttgcgaaaatgcacggtgcgttttcaacgaacgtcgtagcaagcaaagaacttcaacagcctggcagtgcacgaagcacgcgacatcttgaaattgaacttccaaaagaagcttcttatcaagaaggagatcatttaggtgttattcctcgctattatgaaggaatagtaaaccgtgtaacacagaggttcggcctaagcgcatcacagctgatccgtctggaagcagaagaagaaaaattagctcatttgccactcgctaaaacagtatccgtagaagagcttctgcaatacgtggagcttcaagatcctgttacgcgcacgcagcttcgcgcaatggctgctaaaacggtctgcccgccgcataaagtagagcttgaagccttgcttggcaagcaagcctacaaagaacaagtgctggcaaaacgtttaacaatgcttgaactgcttgaaaaatacccggcgtgtgaaatgagtttcagcgaatttatcgcccttctgccaagcatacgcccgcgctattactcgatttcttcatcacctcgtgtcgatgaaaaacaagcaagcatcacggtcagcgttgtctcaggaccggcgtggagcggatatggagaatataaaggaattgcgtcgaactatcttgctgagctgcaagaaggagatacgattacgtgctttatttccacaccgcagtcagagtttacgctgccaaaagaccctgaaacgccgcttatcatggtcggaccgggaacaggcgtcgcgccgtttagaggctttgtgcaggcgcgcaaacagctaaaagaacaaggacagtcacttggagaagcacatttatacttcggctgccgttcacctcatgaagactatctgtatcaagaagagcttgaaaacgcccaaagcgaaggcatcattacgcttcataccgctttttctcgcatgccgaatcagccgaaaacatacgttcagcacgtaatggaacaagacggcaagaaattgattgaacttcttgatcaaggagcgcacttctatatttgcggagacggaattcaaatggcacctgccgttgaagcaacgcttatgaaaagctatgctgacgttcaccaagtgagtgaagcagacgctcgcttatggctgcagcagctagaagaaaaaggccgatacgcaaaagacgtgtggctgggg

SEQ ID NO: 1014 - protein, 1049 aa, synthetic construct
  REGION 1..1049: note = variant of P450 oxidase from Bacillus megaterium
MTIKEMPQPKTFGELKNLPLLNTDKPVQALMRIADELGEIFKFEAPGSVTRYLSSQRLIKEACDESRFDKNLSQGLKFARDFVGDGLVTSWTHEPNWKKAHNILVPSFSQHAMGRYHAMMVDIAVQLVQKWERLNADEHIEVSEDMTRLTLDTIGLCLFNYRFNSFYRDTPHPFIVSVVRALDEVMNKLQRANPDDPAYDENKRQCQEDIKVMNDYVDKIIADRKARGEQSHDLLTQMLNGKDPETGEPLDDGNIRQQIITFLIAGHQTTSGLLSFALYFLVKNPRVLQKVAEEAARVLVDPVPRYKQVKQLKYVGMVLNEALRLWPVAPMFSLYAKEDTVLGGEYPLTKGDEVMVLVPQLHRDKTIWGDDVEEFRPERFENPSAIPQHAFKPFGNGQRACIGQQFALHSATLVLGMMLKHFDFEDHTNYELVIKESRTLKPEGFVVKAKSKGIPLGGIPSPSTEQSAKKVRKKAENAHNTPLLVLYGSNAGTAEGTARDLADIAMSKGFAPQVATLDSHAGNLPREGAVLIVTASYNGHPPDNAKQFVDWLDQASADEVKGVRYSVFGCGDKNWAGTYQKVPAFIDETLAAKGAENIADRGEADASDDFEGAYEEWRDHMWSDVAAYFGLDIENSEDNKSTLSLQFVDSAADMPLAKMHGAFSTNVVASKELQQPGSARSTRHLEIELPKEASYQEGDHLGVIPRYYEGIVNRVTQRFGLSASQLIRLEAEEEKLAHLPLAKTVSVEELLQYVELQDPVTRTQLRAMAAKTVCPPHKVELEALLGKQAYKEQVLAKRLTMLELLEKYPACEMSFSEFIALLPSIRPRYYSISSSPRVDEKQASITVSVVSGPAWSGYGEYKGIASNYLAELQEGDTITCFISTPQSEFTLPKDPETPLIMVGPGTGVAPFRGFVQARKQLKEQGQSLGEAHLYFGCRSPHEDYLYQEELENAQSEGIITLHTAFSRMPNQPKTYVQHVMEQDGKKLIELLDQGAHFYICGDGIQMAPAVEATLMKSYADVHQVSEADARLWLQQLEEKGRYAKDVWLG

SEQ ID NO: 1015 - DNA, 3147 bp, synthetic construct
  misc_feature 1..3147: note = variant of P450 oxidase from Bacillus megaterium
  source 1..3147: mol_type = other DNA
atgacaattaaggaaatgcctcagcctaagacgtttggagaacttaaaaatttaccgttattaaatacagataaaccggttcaagctttgatgcgtattgcggatgaattaggagaaatctttaaattcgaggcgcctggtagcgtaacgcgctatttatcaagtcagcgtctaattaaagaagcatgcgatgaatcacgctttgataaaaacttaagtcaagggcttaaatttgcacgtgattttgttggagacgggctggttacaagctggacgcatgaaccgaattggaaaaaagcgcataatatcttagttccaagctttagtcagcatgcaatggggcgttatcatgcgatgatggtcgatatcgccgtgcagcttgttcaaaagtgggagcgtctaaatgcagatgagcatattgaagtatcggaagacatgacacgtttaacgcttgatacaattggtctttgcctgtttaactatcgctttaacagcttttaccgagatacgcctcatccatttattgtgagtgtggttcgtgcactggatgaagtaatgaacaagctgcagcgagcaaatccagacgacccagcttatgatgaaaacaagcgccagtgtcaagaagatatcaaggtgatgaacgactatgtagataaaattattgcagatcgcaaagcaaggggtgaacaaagtcatgatttattaacgcagatgctaaacggaaaagatccagaaacgggtgagccgcttgatgacgggaacattcgtcagcaaattattacattcttaattgcgggacaccaaacgacaagtggtcttttatcatttgcgctgtatttcttagtgaaaaatccacgtgtattacaaaaagtagcagaagaagcagcacgagttctagtagatcctgttccaagctacaggcaagtcaaacagcttaaatatgttggcatggtcttaaacgaagcgctgcgcttatggccagtagcgcctatgttttccctatatgcaaaagaagatacggtgcttggaggagaatatcctttaacgaaaggcgacgaagtaatggttctggtgcctcagcttcaccgtgataaaacaatttggggagacgatgtggaggagttccgtccagagcgttttgaaaatccaagtgcgattccgcagcatgcgtttaaaccgtttggaaacggtcagcgtgcgtgtatcggtcagcagttcgctcttcatagtgcaacgctggtacttggtatgatgctaaaacactttgactttgaagatcatacaaactacgagctcgttattaaagaatcgcggacgttaaaacctgaaggctttgtggtaaaagcaaaatcgaaaggcattccgcttggcggtattccttcacctagcactgaacagtctgctaaaaaagtacgcaaaaaggcagaaaacgctcataatacgccgctgcttgtgctatacggttcaaatgcgggaacagctgaaggaacggcgcgtgatttagcagatattgcaatgagcaaaggatttgcaccgcaggtcgcaacgcttgattcacacgccggtaatcttccgcgcgaaggagctgtattaattgtaacggcgtcttataacggtcatccgcctgataacgcaaagcaatttgtcgattggttagaccaagcgtctgcggatgaagtaaaaggcgttcgctactccgtatttggatgcggcgataaaaattgggcggggacgtatcaaaaagtgcctgcttttatcgatgaaacgcttgccgctaaaggggcagaaaacatcgctgaccgcggtgaagcagatgcaagcgacgactttgaaggcgcgtatgaagaatggcgtgatcatatgtggagtgacgtagcagcctactttggtctcgacattgaaaacagtgaagataataaatctactctttcacttcaatttgtcgacagcgcggcggatatgccgcttgcgaaaatgcacggtgcgttttcaacgaacgtcgtagcaagcaaagaacttcaacagcctggcagtgcacgaagcacgcgacatcttgaaattgaacttccaaaagaagcttcttatcaagaaggagatcatttaggtgttattcctcgctattatgaaggaatagtaaaccgtgtaacacagaggttcggcctaagcgcatcacagctgatccgtctggaagcagaagaagaaaaattagctcatttgccactcgctaaaacagtatccgtagaagagcttctgcaatacgtggagcttcaagatcctgttacgcgcacgcagcttcgcgcaatggctgctaaaacggtctgcccgccgcataaagtagagcttgaagccttgcttggcaagcaagcctacaaagaacaagtgctggcaaaacgtttaacaatgcttgaactgcttgaaaaatacccggcgtgtgaaatgagtttcagcgaatttatcgcccttctgccaagcatacgcccgcgctattactcgatttcttcatcacctcgtgtcgatgaaaaacaagcaagcatcacggtcagcgttgtctcaggaccggcgtggagcggatatggagaatataaaggaattgcgtcgaactatcttgctgagctgcaagaaggagatacgattacgtgctttatttccacaccgcagtcagagtttacgctgccaaaagaccctgaaacgccgcttatcatggtcggaccgggaacaggcgtcgcgccgtttagaggctttgtgcaggcgcgcaaacagctaaaagaacaaggacagtcacttggagaagcacatttatacttcggctgccgttcacctcatgaagactatctgtatcaagaagagcttgaaaacgcccaaagcgaaggcatcattacgcttcataccgctttttctcgcatgccgaatcagccgaaaacatacgttcagcacgtaatggaacaagacggcaagaaattgattgaacttcttgatcaaggagcgcacttctatatttgcggagacggaattcaaatggcacctgccgttgaagcaacgcttatgaaaagctatgctgacgttcaccaagtgagtgaagcagacgctcgcttatggctgcagcagctagaagaaaaaggccgatacgcaaaagacgtgtggctgggg

SEQ ID NO: 1016 - protein, 1049 aa, synthetic construct
  REGION 1..1049: note = variant of P450 oxidase from Bacillus megaterium
MTIKEMPQPKTFGELKNLPLLNTDKPVQALMRIADELGEIFKFEAPGSVTRYLSSQRLIKEACDESRFDKNLSQGLKFARDFVGDGLVTSWTHEPNWKKAHNILVPSFSQHAMGRYHAMMVDIAVQLVQKWERLNADEHIEVSEDMTRLTLDTIGLCLFNYRFNSFYRDTPHPFIVSVVRALDEVMNKLQRANPDDPAYDENKRQCQEDIKVMNDYVDKIIADRKARGEQSHDLLTQMLNGKDPETGEPLDDGNIRQQIITFLIAGHQTTSGLLSFALYFLVKNPRVLQKVAEEAARVLVDPVPSYRQVKQLKYVGMVLNEALRLWPVAPMFSLYAKEDTVLGGEYPLTKGDEVMVLVPQLHRDKTIWGDDVEEFRPERFENPSAIPQHAFKPFGNGQRACIGQQFALHSATLVLGMMLKHFDFEDHTNYELVIKESRTLKPEGFVVKAKSKGIPLGGIPSPSTEQSAKKVRKKAENAHNTPLLVLYGSNAGTAEGTARDLADIAMSKGFAPQVATLDSHAGNLPREGAVLIVTASYNGHPPDNAKQFVDWLDQASADEVKGVRYSVFGCGDKNWAGTYQKVPAFIDETLAAKGAENIADRGEADASDDFEGAYEEWRDHMWSDVAAYFGLDIENSEDNKSTLSLQFVDSAADMPLAKMHGAFSTNVVASKELQQPGSARSTRHLEIELPKEASYQEGDHLGVIPRYYEGIVNRVTQRFGLSASQLIRLEAEEEKLAHLPLAKTVSVEELLQYVELQDPVTRTQLRAMAAKTVCPPHKVELEALLGKQAYKEQVLAKRLTMLELLEKYPACEMSFSEFIALLPSIRPRYYSISSSPRVDEKQASITVSVVSGPAWSGYGEYKGIASNYLAELQEGDTITCFISTPQSEFTLPKDPETPLIMVGPGTGVAPFRGFVQARKQLKEQGQSLGEAHLYFGCRSPHEDYLYQEELENAQSEGIITLHTAFSRMPNQPKTYVQHVMEQDGKKLIELLDQGAHFYICGDGIQMAPAVEATLMKSYADVHQVSEADARLWLQQLEEKGRYAKDVWLG

SEQ ID NO: 1017 - DNA, 3147 bp, synthetic construct
  misc_feature 1..3147: note = variant of P450 oxidase from Bacillus megaterium
  source 1..3147: mol_type = other DNA
atgacaattaaggaaatgcctcagcctaagacgtttggagaacttaaaaatttaccgttattaaatacagataaaccggttcaagctttgatgcgtattgcggatgaattaggagaaatctttaaattcgaggcgcctggtagcgtaacgcgctatttatcaagtcagcgtctaattaaagaagcatgcgatgaatcacgctttgataaaaacttaagtcaagggcttaaatttgcacgtgattttgttggagacgggctggttacaagctggacgcatgaaccgaattggaaaaaagcgcataatatcttagttccaagctttagtcagcatgcaatggggcgttatcatgcgatgatggtcgatatcgccgtgcagcttgttcaaaagtgggagcgtctaaatgcagatgagcatattgaagtatcggaagacatgacacgtttaacgcttgatacaattggtctttgcctgtttaactatcgctttaacagcttttaccgagatacgcctcatccatttattgtgagtgtggttcgtgcactggatgaagtaatgaacaagctgcagcgagcaaatccagacgacccagcttatgatgaaaacaagcgccagtgtcaagaagatatcaaggtgatgaacgactatgtagataaaattattgcagatcgcaaagcaaggggtgaacaaagtcatgatttattaacgcagatgctaaacggaaaagatccagaaacgggtgagccgcttgatgacgggaacattcgtcagcaaattattacattcttaattgcgggacaccaaacgacaagtggtcttttatcatttgcgctgtatttcttagtgaaaaatccacgtgtattacaaaaagtagcagaagaagcagcacgagttctaccggatcctgttccaagctacaaacaagtcaaacagcttaaatatgttggcatggtcttaaacgaagcgctgcgcttatggccagtagcgcctatgttttccctatatgcaaaagaagatacggtgcttggaggagaatatcctttaacgaaaggcgacgaagtaatggttctggtgcctcagcttcaccgtgataaaacaatttggggagacgatgtggaggagttccgtccagagcgttttgaaaatccaagtgcgattccgcagcatgcgtttaaaccgtttggaaacggtcagcgtgcgtgtatcggtcagcagttcgctcttcatagtgcaacgctggtacttggtatgatgctaaaacactttgactttgaagatcatacaaactacgagctcgttattaaagaatcgcggacgttaaaacctgaaggctttgtggtaaaagcaaaatcgaaaggcattccgcttggcggtattccttcacctagcactgaacagtctgctaaaaaagtacgcaaaaaggcagaaaacgctcataatacgccgctgcttgtgctatacggttcaaatgcgggaacagctgaaggaacggcgcgtgatttagcagatattgcaatgagcaaaggatttgcaccgcaggtcgcaacgcttgattcacacgccggtaatcttccgcgcgaaggagctgtattaattgtaacggcgtcttataacggtcatccgcctgataacgcaaagcaatttgtcgattggttagaccaagcgtctgcggatgaagtaaaaggcgttcgctactccgtatttggatgcggcgataaaaattgggcggggacgtatcaaaaagtgcctgcttttatcgatgaaacgcttgccgctaaaggggcagaaaacatcgctgaccgcggtgaagcagatgcaagcgacgactttgaaggcgcgtatgaagaatggcgtgatcatatgtggagtgacgtagcagcctactttggtctcgacattgaaaacagtgaagataataaatctactctttcacttcaatttgtcgacagcgcggcggatatgccgcttgcgaaaatgcacggtgcgttttcaacgaacgtcgtagcaagcaaagaacttcaacagcctggcagtgcacgaagcacgcgacatcttgaaattgaacttccaaaagaagcttcttatcaagaaggagatcatttaggtgttattcctcgctattatgaaggaatagtaaaccgtgtaacacagaggttcggcctaagcgcatcacagctgatccgtctggaagcagaagaagaaaaattagctcatttgccactcgctaaaacagtatccgtagaagagcttctgcaatacgtggagcttcaagatcctgttacgcgcacgcagcttcgcgcaatggctgctaaaacggtctgcccgccgcataaagtagagcttgaagccttgcttggcaagcaagcctacaaagaacaagtgctggcaaaacgtttaacaatgcttgaactgcttgaaaaatacccggcgtgtgaaatgagtttcagcgaatttatcgcccttctgccaagcatacgcccgcgctattactcgatttcttcatcacctcgtgtcgatgaaaaacaagcaagcatcacggtcagcgttgtctcaggaccggcgtggagcggatatggagaatataaaggaattgcgtcgaactatcttgctgagctgcaagaaggagatacgattacgtgctttatttccacaccgcagtcagagtttacgctgccaaaagaccctgaaacgccgcttatcatggtcggaccgggaacaggcgtcgcgccgtttagaggctttgtgcaggcgcgcaaacagctaaaagaacaaggacagtcacttggagaagcacatttatacttcggctgccgttcacctcatgaagactatctgtatcaagaagagcttgaaaacgcccaaagcgaaggcatcattacgcttcataccgctttttctcgcatgccgaatcagccgaaaacatacgttcagcacgtaatggaacaagacggcaagaaattgattgaacttcttgatcaaggagcgcacttctatatttgcggagacggaattcaaatggcacctgccgttgaagcaacgcttatgaaaagctatgctgacgttcaccaagtgagtgaagcagacgctcgcttatggctgcagcagctagaagaaaaaggccgatacgcaaaagacgtgtggctgggg

SEQ ID NO: 1018 - protein, 1049 aa, synthetic construct
  REGION 1..1049: note = variant of P450 oxidase from Bacillus megaterium
MTIKEMPQPKTFGELKNLPLLNTDKPVQALMRIADELGEIFKFEAPGSVTRYLSSQRLIKEACDESRFDKNLSQGLKFARDFVGDGLVTSWTHEPNWKKAHNILVPSFSQHAMGRYHAMMVDIAVQLVQKWERLNADEHIEVSEDMTRLTLDTIGLCLFNYRFNSFYRDTPHPFIVSVVRALDEVMNKLQRANPDDPAYDENKRQCQEDIKVMNDYVDKIIADRKARGEQSHDLLTQMLNGKDPETGEPLDDGNIRQQIITFLIAGHQTTSGLLSFALYFLVKNPRVLQKVAEEAARVLPDPVPSYKQVKQLKYVGMVLNEALRLWPVAPMFSLYAKEDTVLGGEYPLTKGDEVMVLVPQLHRDKTIWGDDVEEFRPERFENPSAIPQHAFKPFGNGQRACIGQQFALHSATLVLGMMLKHFDFEDHTNYELVIKESRTLKPEGFVVKAKSKGIPLGGIPSPSTEQSAKKVRKKAENAHNTPLLVLYGSNAGTAEGTARDLADIAMSKGFAPQVATLDSHAGNLPREGAVLIVTASYNGHPPDNAKQFVDWLDQASADEVKGVRYSVFGCGDKNWAGTYQKVPAFIDETLAAKGAENIADRGEADASDDFEGAYEEWRDHMWSDVAAYFGLDIENSEDNKSTLSLQFVDSAADMPLAKMHGAFSTNVVASKELQQPGSARSTRHLEIELPKEASYQEGDHLGVIPRYYEGIVNRVTQRFGLSASQLIRLEAEEEKLAHLPLAKTVSVEELLQYVELQDPVTRTQLRAMAAKTVCPPHKVELEALLGKQAYKEQVLAKRLTMLELLEKYPACEMSFSEFIALLPSIRPRYYSISSSPRVDEKQASITVSVVSGPAWSGYGEYKGIASNYLAELQEGDTITCFISTPQSEFTLPKDPETPLIMVGPGTGVAPFRGFVQARKQLKEQGQSLGEAHLYFGCRSPHEDYLYQEELENAQSEGIITLHTAFSRMPNQPKTYVQHVMEQDGKKLIELLDQGAHFYICGDGIQMAPAVEATLMKSYADVHQVSEADARLWLQQLEEKGRYAKDVWLG

SEQ ID NO: 1019 - DNA, 3147 bp, synthetic construct
  misc_feature 1..3147: note = variant of P450 oxidase from Bacillus megaterium
  source 1..3147: mol_type = other DNA
atgacaattaaggaaatgcctcagcctaagacgtttggagaacttaaaaatttaccgttattaaatacagataaaccggttcaagctttgatgcgtattgcggatgaattaggagaaatctttaaattcgaggcgcctggtagcgtaacgcgctatttatcaagtcagcgtctaattaaagaagcatgcgatgaatcacgctttgataaaaacttaagtcaagggcttaaatttgcacgtgattttgttggagacgggctggttacaagctggacgcatgaaccgaattggaaaaaagcgcataatatcttagttccaagctttagtcagcatgcaatggggcgttatcatgcgatgatggtcgatatcgccgtgcagcttgttcaaaagtgggagcgtctaaatgcagatgagcatattgaagtatcggaagacatgacacgtttaacgcttgatacaattggtctttgcctgtttaactatcgctttaacagcttttaccgagatacgcctcatccatttattgtgagtgtggttcgtgcactggatgaagtaatgaacaagctgcagcgagcaaatccagacgacccagcttatgatgaaaacaagcgccagtgtcaagaagatatcaaggtgatgaacgactatgtagataaaattattgcagatcgcaaagcaaggggtgaacaaagtcatgatttattaacgcagatgctaaacggaaaagatccagaaacgggtgagccgcttgatgacgggaacattcgtcagcaaattattacattcttaattgcgggacaccaaacgacaagtggtcttttatcatttgcgctgtatttcttagtgaaaaatccacgtgtattacaaaaagtagcagaagaagcagcacgagttctagtagatcctgttccaagctacaaacaagtcaaacagcttaaatatgttggcatggtcttaaacgaagcgctgcgcttatggccagtagcgcctatgttttccctatatgcaaaagaagatacggtgcttggaggagaatatcctttaacgaaaggcgacgaagtaatggttctggtgcctcagcttcaccgtgataaaacaatttggggagacgatgtggaggagttccgtccagagcgttttgaaaatccaagtgcgattccgcagcatgcgtttaaaccgtttggaaacggtcagcgtgcgtgtatcggtcagcagttcgctcttcatagtgcaacgctggtacttggtatgatgctaaaacactttgactttgaagatcatacaaactacgagctcgttattaaagaatcgcggacgttaaaacctgaaggctttgtggtaaaagcaaaatcgaaaggcattccgcttggcggtattccttcacctagcactgaacagtcttttaaaaaagtacgcaaaaaggcagaaaacgctcataatacgccgctgcttgtgctatacggttcaaatgcgggaacagctgaaggaacggcgcgtgatttagcagatattgcaatgagcaaaggatttgcaccgcaggtcgcaacgcttgattcacacgccggtaatcttccgcgcgaaggagctgtattaattgtaacggcgtcttataacggtcatccgcctgataacgcaaagcaatttgtcgattggttagaccaagcgtctgcggatgaagtaaagggcgttcgctactccgtatttggatgcggcgataaaaattgggcggggacgtatcaaaaagtgcctgcttttatcgatgaaacgcttgccgctaaaggggcagaaaacatcgctgaccgcggtgaagcagatgcaagcgacgactttgaaggcgcgtatgaagaatggcgtgatcatatgtggagtgacgtagcagcctactttggtctcgacattgaaaacagtgaagataataaatctactctttcacttcaatttgtcgacagcgcggcggatatgccgcttgcgaaaatgcacggtgcgttttcaacgaacgtcgtagcaagcaaagaacttcaacagcctggcagtgcacgaagcacgcgacatcttgaaattgaacttccaaaagaagcttcttatcaagaaggagatcatttaggtgttattcctcgctattatgaaggaatagtaaaccgtgtaacacagaggttcggcctaagcgcatcacagctgatccgtctggaagcagaagaagaaaaattagctcatttgccactcgctaaaacagtatccgtagaagagcttctgcaatacgtggagcttcaagatcctgttacgcgcacgcagcttcgcgcaatggctgctaaaacggtctgcccgccgcataaagtagagcttgaagccttgcttggcaagcaagcctacaaagaacaagtgctggcaaaacgtttaacaatgcttgaactgcttgaaaaatacccggcgtgtgaaatgagtttcagcgaatttatcgcccttctgccaagcatacgcccgcgctattactcgatttcttcatcacctcgtgtcgatgaaaaacaagcaagcatcacggtcagcgttgtctcaggaccggcgtggagcggatatggagaatataaaggaattgcgtcgaactatcttgctgagctgcaagaaggagatacgattacgtgctttatttccacaccgcagtcagagtttacgctgccaaaagaccctgaaacgccgcttatcatggtcggaccgggaacaggcgtcgcgccgtttagaggctttgtgcaggcgcgaaaacagctaaaagaacaaggacagtcacttggagaagcacatttatacttcggctgccgttcacctcatgaagactatctgtatcaagaagagcttgaaaacgcccaaagcgaaggcatcattacgcttcataccgctttttctcgcatgccgaatcagccgaaaacatacgttcagcacgtaatggaacaagacggcaagaaattgattgaacttcttgatcaaggagcgcacttctatatttgcggagacggaattcaaatggcacctgccgttgaagcaacgcttatgaaaagctatgctgacgttcaccaagtgagtgaagcagacgctcgcttatggctgcagcagctagaagaaaaaggccgatacgcaaaagacgtgtggctgggg

SEQ ID NO: 1020 - protein, 1049 aa, synthetic construct
  REGION 1..1049: note = variant of P450 oxidase from Bacillus megaterium
MTIKEMPQPKTFGELKNLPLLNTDKPVQALMRIADELGEIFKFEAPGSVTRYLSSQRLIKEACDESRFDKNLSQGLKFARDFVGDGLVTSWTHEPNWKKAHNILVPSFSQHAMGRYHAMMVDIAVQLVQKWERLNADEHIEVSEDMTRLTLDTIGLCLFNYRFNSFYRDTPHPFIVSVVRALDEVMNKLQRANPDDPAYDENKRQCQEDIKVMNDYVDKIIADRKARGEQSHDLLTQMLNGKDPETGEPLDDGNIRQQIITFLIAGHQTTSGLLSFALYFLVKNPRVLQKVAEEAARVLVDPVPSYKQVKQLKYVGMVLNEALRLWPVAPMFSLYAKEDTVLGGEYPLTKGDEVMVLVPQLHRDKTIWGDDVEEFRPERFENPSAIPQHAFKPFGNGQRACIGQQFALHSATLVLGMMLKHFDFEDHTNYELVIKESRTLKPEGFVVKAKSKGIPLGGIPSPSTEQSFKKVRKKAENAHNTPLLVLYGSNAGTAEGTARDLADIAMSKGFAPQVATLDSHAGNLPREGAVLIVTASYNGHPPDNAKQFVDWLDQASADEVKGVRYSVFGCGDKNWAGTYQKVPAFIDETLAAKGAENIADRGEADASDDFEGAYEEWRDHMWSDVAAYFGLDIENSEDNKSTLSLQFVDSAADMPLAKMHGAFSTNVVASKELQQPGSARSTRHLEIELPKEASYQEGDHLGVIPRYYEGIVNRVTQRFGLSASQLIRLEAEEEKLAHLPLAKTVSVEELLQYVELQDPVTRTQLRAMAAKTVCPPHKVELEALLGKQAYKEQVLAKRLTMLELLEKYPACEMSFSEFIALLPSIRPRYYSISSSPRVDEKQASITVSVVSGPAWSGYGEYKGIASNYLAELQEGDTITCFISTPQSEFTLPKDPETPLIMVGPGTGVAPFRGFVQARKQLKEQGQSLGEAHLYFGCRSPHEDYLYQEELENAQSEGIITLHTAFSRMPNQPKTYVQHVMEQDGKKLIELLDQGAHFYICGDGIQMAPAVEATLMKSYADVHQVSEADARLWLQQLEEKGRYAKDVWLG

SEQ ID NO: 1021 - DNA, 3147 bp, synthetic construct
  misc_feature 1..3147: note = variant of P450 oxidase from Bacillus megaterium
  source 1..3147: mol_type = other DNA
atgacaattaaggaaatgcctcagcctaagacgtttggagaacttaaaaatttaccgttattaaatacagataaaccggttcaagctttgatgcgtattgcggatgaattaggagaaatctttaaattcgaggcgcctggtagcgtaacgcgctatttatcaagtcagcgtctaattaaagaagcatgcgatgaatcacgctttgataaaaacttaagtcaagggcttaaatttgcacgtgattttgttggagacgggctggttacaagctggacgcatgaaccgaattggaaaaaagcgcataatatcttagttccaagctttagtcagcatgcaatggggcgttatcatgcgatgatggtcgatatcgccgtgcagcttgttcaaaagtgggagcgtctaaatgcagatgagcatattgaagtatcggaagacatgacacgtttaacgcttgatacaattggtctttgcctgtttaactatcgctttaacagcttttaccgagatacgcctcatccatttattgtgagtgtggttcgtgcactggatgaagtaatgaacaagctgcagcgagcaaatccagacgacccagcttatgatgaaaacaagcgccagtgtcaagaagatatcaaggtgatgaacgactatgtagataaaattattgcagatcgcaaagcaaggggtgaacaaagtcatgatttattaacgcagatgctaaacggaaaagatccagaaacgggtgagccgcttgatgacgggaacattcgtcagcaaattattacattcttaattgcgggacaccaaacgacaagtggtcttttatcatttgcgctgtatttcttagtgaaaaatccacgtgtattacaaaaagtagcagaagaagcagcacgagttctagtagatcctgttccaagctacaaacaagtcaaacagcttaaatatgttggcatggtcttaaacgaagcgctgcgcttatggccagtagcgcctatgttttccctatatgcaaaagaagatacggtgcttggaggagaatatcctttaacgaaaggcgacgaagtaatggttctggtgcctcagcttcaccgtgataaatcgatttggggagacgatgtggaggagttccgtccagagcgttttgaaaatccaagtgcgattccgcagcatgcgtttaaaccgtttggaaacggtcagcgtgcgtgtatcggtcagcagttcgctcttcatagtgcaacgctggtacttggtatgatgctaaaacactttgactttgaagatcatacaaactacgagctcgttattaaagaatcgcggacgttaaaacctgaaggctttgtggtaaaagcaaaatcgaaaggcattccgcttggcggtattccttcacctagcactgaacagtctgctaaaaaagtacgcaaaaaggcagaaaacgctcataatacgccgctgcttgtgctatacggttcaaatgcgggaacagctgaaggaacggcgcgtgatttagcagatattgcaatgagcaaaggatttgcaccgcaggtcgcaacgcttgattcacacgccggtaatcttccgcgcgaaggagctgtattaattgtaacggcgtcttataacggtcatccgcctgataacgcaaagcaatttgtcgattggttagaccaagcgtctgcggatgaagtaaaaggcgttcgctactccgtatttggatgcggcgataaaaattgggcggggacgtatcaaaaagtgcctgcttttatcgatgaaacgcttgccgctaaaggggcagaaaacatcgctgaccgcggtgaagcagatgcaagcgacgactttgaaggcgcgtatgaagaatggcgtgatcatatgtggagtgacgtagcagcctactttggtctcgacattgaaaacagtgaagataataaatctactctttcacttcaatttgtcgacagcgcggcggatatgccgcttgcgaaaatgcacggtgcgttttcaacgaacgtcgtagcaagcaaagaacttcaacagcctggcagtgcacgaagcacgcgacatcttgaaattgaacttccaaaagaagcttcttatcaagaaggagatcatttaggtgttattcctcgctattatgaaggaatagtaaaccgtgtaacacagaggttcggcctaagcgcatcacagctgatccgtctggaagcagaagaagaaaaattagctcatttgccactcgctaaaacagtatccgtagaagagcttctgcaatacgtggagcttcaagatcctgttacgcgcacgcagcttcgcgcaatggctgctaaaacggtctgcccgccgcataaagtagagcttgaagccttgcttggcaagcaagcctacaaagaacaagtgctggcaaaacgtttaacaatgcttgaactgcttgaaaaatacccggcgtgtgaaatgagtttcagcgaatttatcgcccttctgccaagcatacgcccgcgctattactcgatttcttcatcacctcgtgtcgatgaaaaacaagcaagcatcacggtcagcgttgtctcaggaccggcgtggagcggatatggagaatataaaggaattgcgtcgaactatcttgctgagctgcaagaaggagatacgattacgtgctttatttccacaccgcagtcagagtttacgctgccaaaagaccctgaaacgccgcttatcatggtcggaccgggaacaggcgtcgcgccgtttagaggctttgtgcaggcgcgcaaacagctaaaagaacaaggacagtcacttggagaagcacatttatacttcggctgccgttcacctcatgaagactatctgtatcaagaagagcttgaaaacgcccaaagcgaaggcatcattacgcttcataccgctttttctcgcatgccgaatcagccgaaaacatacgttcagcacgtaatggaacaagacggcaagaaattgattgaacttcttgatcaaggagcgcacttctatatttgcggagacggaattcaaatggcacctgccgttgaagcaacgcttatgaaaagctatgctgacgttcaccaagtgagtgaagcagacgctcgcttatggctgcagcagctagaagaaaaaggccgatacgcaaaagacgtgtggctgggg

SEQ ID NO: 1022 - protein, 1049 aa, synthetic construct
  REGION 1..1049: note = variant of P450 oxidase from Bacillus megaterium
MTIKEMPQPKTFGELKNLPLLNTDKPVQALMRIADELGEIFKFEAPGSVTRYLSSQRLIKEACDESRFDKNLSQGLKFARDFVGDGLVTSWTHEPNWKKAHNILVPSFSQHAMGRYHAMMVDIAVQLVQKWERLNADEHIEVSEDMTRLTLDTIGLCLFNYRFNSFYRDTPHPFIVSVVRALDEVMNKLQRANPDDPAYDENKRQCQEDIKVMNDYVDKIIADRKARGEQSHDLLTQMLNGKDPETGEPLDDGNIRQQIITFLIAGHQTTSGLLSFALYFLVKNPRVLQKVAEEAARVLVDPVPSYKQVKQLKYVGMVLNEALRLWPVAPMFSLYAKEDTVLGGEYPLTKGDEVMVLVPQLHRDKSIWGDDVEEFRPERFENPSAIPQHAFKPFGNGQRACIGQQFALHSATLVLGMMLKHFDFEDHTNYELVIKESRTLKPEGFVVKAKSKGIPLGGIPSPSTEQSAKKVRKKAENAHNTPLLVLYGSNAGTAEGTARDLADIAMSKGFAPQVATLDSHAGNLPREGAVLIVTASYNGHPPDNAKQFVDWLDQASADEVKGVRYSVFGCGDKNWAGTYQKVPAFIDETLAAKGAENIADRGEADASDDFEGAYEEWRDHMWSDVAAYFGLDIENSEDNKSTLSLQFVDSAADMPLAKMHGAFSTNVVASKELQQPGSARSTRHLEIELPKEASYQEGDHLGVIPRYYEGIVNRVTQRFGLSASQLIRLEAEEEKLAHLPLAKTVSVEELLQYVELQDPVTRTQLRAMAAKTVCPPHKVELEALLGKQAYKEQVLAKRLTMLELLEKYPACEMSFSEFIALLPSIRPRYYSISSSPRVDEKQASITVSVVSGPAWSGYGEYKGIASNYLAELQEGDTITCFISTPQSEFTLPKDPETPLIMVGPGTGVAPFRGFVQARKQLKEQGQSLGEAHLYFGCRSPHEDYLYQEELENAQSEGIITLHTAFSRMPNQPKTYVQHVMEQDGKKLIELLDQGAHFYICGDGIQMAPAVEATLMKSYADVHQVSEADARLWLQQLEEKGRYAKDVWLG

SEQ ID NO: 1023 - DNA, 3147 bp, synthetic construct
  misc_feature 1..3147: note = variant of P450 oxidase from Bacillus megaterium
  source 1..3147: mol_type = other DNA
atgacaattaaggaaatgcctcagcctaagacgtttggagaacttaaaaatttaccgttattaaatacagataaaccggttcaagctttgatgcgtattgcggatgaattaggagaaatctttaaattcgaggcgcctggtagcgtaacgcgctatttatcaagtcagcgtctaattaaagaagcatgcgatgaatcacgctttgataaaaacttaagtcaagggcttaaatttgcacgtgattttgttggagacgggctggttacaagctggacgcatgaaccgaattggaaaaaagcgcataatatcttagttccaagctttagtcagcatgcaatggggcgttatcatacgatgatggtcgatatcgccgtgcagcttgttcaaaagtgggagcgtctaaatgcagatgagcatattgaagtatcggaagacatgacacgtttaacgcttgatacaattggtctttgcctgtttaactatcgctttaacagcttttaccgagatacgcctcatccatttattgtgagtgtggttcgtgcactggatgaagtaatgaacaagctgcagcgagcaaatccagacgacccagcttatgatgaaaacaagcgccagtgtcaagaagatatcaaggtgatgaacgactatgtagataaaattattgcagatcgcaaagcaaggggtgaacaaagtcatgatttattaacgcagatgctaaacggaaaagatccagaaacgggtgagccgcttgatgacgggaacattcgtcagcaaattattacattcttaattgcgggacaccaaacgacaagtggtcttttatcatttgcgctgtatttcttagtgaaaaatccacgtgtattacaaaaagtagcagaagaagcagcacgagttctagtagatcctgttccaagctacaaacaagtcaaacagcttaaatatgttggcatggtcttaaacgaagcgctgcgcttatggccagtagcgcctatgttttccctatatgcaaaagaagatacggtgcttggaggagaatatcctttaacgaaaggcgacgaagtaatggttctggtgcctcagcttcaccgtgataaaacaatttggggagacgatgtggaggagttccgtccagagcgttttgaaaatccaagtgcgattccgcagcatgcgtttaaaccgtttggaaacggtcagcgtgcgtgtatcggtcagcagttcgctcttcatagtgcaacgctggtacttggtatgatgctaaaacactttgactttgaagatcatacaaactacgagctcgttattaaagaatcgcggacgttaaaacctgaaggctttttggtaaaagcaaaatcgaaaggcattccgcttggcggtattccttcacctagcactgaacagtctgctaaaaaagtacgcaaaaaggcagaaaacgctcataatacgccgctgcttgtgctatacggttcaaatgcgggaacagctgaaggaacggcgcgtgatttagcagatattgcaatgagcaaaggatttgcaccgcaggtcgcaacgcttgattcacacgccggtaatcttccgcgcgaaggagctgtattaattgtaacggcgtcttataacggtcatccgcctgataacgcaaagcaatttgtcgattggttagaccaagcgtctgcggatgaagtaaaaggcgttcgctactccgtatttggatgcggcgataaaaattgggcggggacgtatcaaaaagtgcctgcttttatcgatgaaacgcttgccgctaaaggggcagaaaacatcgctgaccgcggtgaagcagatgcaagcgacgactttgaaggcgcgtatgaagaatggcgtgatcatatgtggagtgacgtagcagcctactttggtctcgacattgaaaacagtgaagataataaatctactctttcacttcaatttgtcgacagcgcggcggatatgccgcttgcgaaaatgcacggtgcgttttcaacgaacgtcgtagcaagcaaagaacttcaacagcctggcagtgcacgaagcacgcgacatcttgaaattgaacttccaaaagaagcttcttatcaagaaggagatcatttaggtgttattcctcgctattatgaaggaatagtaaaccgtgtaacacagaggttcggcctaagcgcatcacagctgatccgtctggaagcagaagaagaaaaattagctcatttgccactcgctaaaacagtatccgtagaagagcttctgcaatacgtggagcttcaagatcctgttacgcgcacgcagcttcgcgcaatggctgctaaaacggtctgcccgccgcataaagtagagcttgaagccttgcttggcaagcaagcctacaaagaacaagtgctggcaaaacgtttaacaatgcttgaactgcttgaaaaatacccggcgtgtgaaatgagtttcagcgaatttatcgcccttctgccaagcatacgcccgcgctattactcgatttcttcatcacctcgtgtcgatgaaaaacaagcaagcatcacggtcagcgttgtctcaggaccggcgtggagcggatatggagaatataaaggaattgcgtcgaactatcttgctgagctgcaagaaggagatacgattacgtgctttatttccacaccgcagtcagagtttacgctgccaaaagaccctgaaacgccgcttatcatggtcggaccgggaacaggcgtcgcgccgtttagaggctttgtgcaggcgcgcaaacagctaaaagaacaaggacagtcacttggagaagcacatttatacttcggctgccgttcacctcatgaagactatctgtatcaagaagagcttgaaaacgcccaaagcgaaggcatcattacgcttcataccgctttttctcgcatgccgaatcagccgaaaacatacgttcagcacgtaatggaacaagacggcaagaaattgattgaacttcttgatcaaggagcgcacttctatatttgcggagacggaattcaaatggcacctgccgttgaagcaacgcttatgaaaagctatgctgacgttcaccaagtgagtgaagcagacgctcgcttatggctgcagcagctagaagaaaaaggccgatacgcaaaagacgtgtggctgggg

SEQ ID NO: 1024 - protein, 1049 aa, synthetic construct
  REGION 1..1049: note = variant of P450 oxidase from Bacillus megaterium
MTIKEMPQPKTFGELKNLPLLNTDKPVQALMRIADELGEIFKFEAPGSVTRYLSSQRLIKEACDESRFDKNLSQGLKFARDFVGDGLVTSWTHEPNWKKAHNILVPSFSQHAMGRYHTMMVDIAVQLVQKWERLNADEHIEVSEDMTRLTLDTIGLCLFNYRFNSFYRDTPHPFIVSVVRALDEVMNKLQRANPDDPAYDENKRQCQEDIKVMNDYVDKIIADRKARGEQSHDLLTQMLNGKDPETGEPLDDGNIRQQIITFLIAGHQTTSGLLSFALYFLVKNPRVLQKVAEEAARVLVDPVPSYKQVKQLKYVGMVLNEALRLWPVAPMFSLYAKEDTVLGGEYPLTKGDEVMVLVPQLHRDKTIWGDDVEEFRPERFENPSAIPQHAFKPFGNGQRACIGQQFALHSATLVLGMMLKHFDFEDHTNYELVIKESRTLKPEGFLVKAKSKGIPLGGIPSPSTEQSAKKVRKKAENAHNTPLLVLYGSNAGTAEGTARDLADIAMSKGFAPQVATLDSHAGNLPREGAVLIVTASYNGHPPDNAKQFVDWLDQASADEVKGVRYSVFGCGDKNWAGTYQKVPAFIDETLAAKGAENIADRGEADASDDFEGAYEEWRDHMWSDVAAYFGLDIENSEDNKSTLSLQFVDSAADMPLAKMHGAFSTNVVASKELQQPGSARSTRHLEIELPKEASYQEGDHLGVIPRYYEGIVNRVTQRFGLSASQLIRLEAEEEKLAHLPLAKTVSVEELLQYVELQDPVTRTQLRAMAAKTVCPPHKVELEALLGKQAYKEQVLAKRLTMLELLEKYPACEMSFSEFIALLPSIRPRYYSISSSPRVDEKQASITVSVVSGPAWSGYGEYKGIASNYLAELQEGDTITCFISTPQSEFTLPKDPETPLIMVGPGTGVAPFRGFVQARKQLKEQGQSLGEAHLYFGCRSPHEDYLYQEELENAQSEGIITLHTAFSRMPNQPKTYVQHVMEQDGKKLIELLDQGAHFYICGDGIQMAPAVEATLMKSYADVHQVSEADARLWLQQLEEKGRYAKDVWLG

SEQ ID NO: 1025 - DNA, 3147 bp, synthetic construct
  misc_feature 1..3147: note = variant of P450 oxidase from Bacillus megaterium
  source 1..3147: mol_type = other DNA
atgacaattaaggaaatgcctcagcctaagacgtttggagaacttaaaaatttaccgttattaaatacagataaaccggttcaagctttgatgcgtattgcggatgaattaggagaaatctttaaattcgaggcgcctggtagcgtaacgcgctatttatcaagtcagcgtctaattaaagaagcatgcgatgaatcacgctttgataaaaacttaagtcaagggcttaaatttgcacgtgattttgttggagacgggctggttacaagctggacgcatgaaccgaattggaaaaaagcgcataatatcttagttccaagctttagtcagcatgcaatggggcgttatcatgcgatgatggtcgatatcgccgtgcagcttgttcaaaagtgggagcgtctaaatgcagatgagcatattgaagtatcggaagacatgacacgtttaacgcttgatacaattggtctttgcctgtttaactatcgctttaacagcttttaccgagatacgcctcatccatttattgtgagtgtggttcgtgcactggatgaagtaatgaacaagctgcagcgagcaaatccagacgacccagcttatgatgaaaacaagcgccagtgtcaagaagatatcaaggtgatgaacgactatgtagataaaattattgcagatcgcaaagcaaggggtgaacaaagtcatgatttattaacgcagatgctaaacggaaaagatccagaaacgggtgagccgcttgatgacgggaacattcgtcagcaaattattacattcttaattgcgggacaccaaacgacaagtggtcttttatcatttgcgctgtatttcttagtgaaaaatccacgtgtattacaaaaagtagcagaagaagcagcacgagttctagtagatcctgttccaagctacaaacaagtcaaacagcttaaatatgttggcatggtcttaaacgaagcgctgcgcttatggccagtagcgcctatgttttccctatatgcaaaagaagatacggtgcttggaggagaatatcctttaacgaaaggcgacgaagtaatggttctggtgcctcagcttcaccgtgataaaacaatttggggagacgatgtggaggagttccgtccagagcgttttgaaatgccaagtgcgattccgcagcatgcgtttaaaccgtttggaaacggtcagcgtgcgtgtatcggtcagcagttcgctcttcatagtgcaacgctggtacttggtatgatgctaaaacactttgactttgaagatcatacaaactacgagctcgttattaaagaatcgcggacgttaaaacctgaaggctttgtggtaaaagcaaaatcgaaaggcattccgcttggcggtattccttcacctagcactgaacagtctgctaaaaaagtacgcaaaaaggcagaaaacgctcataatacgccgctgcttgtgctatacggttcaaatgcgggaacagctgaaggaacggcgcgtgatttagcagatattgcaatgagcaaaggatttgcaccgcaggtcgcaacgcttgattcacacgccggtaatcttccgcgcgaaggagctgtattaattgtaacggcgtcttataacggtcatccgcctgataacgcaaagcaatttgtcgattggttagaccaagcgtctgcggatgaagtaaaaggcgttcgctactccgtatttggatgcggcgataaaaattgggcggggacgtatcaaaaagtgcctgcttttatcgatgaaacgcttgccgctaaaggggcagaaaacatcgctgaccgcggtgaagcagatgcaagcgacgactttgaaggcgcgtatgaagaatggcgtgatcatatgtggagtgacgtagcagcctactttggtctcgacattgaaaacagtgaagataataaatctactctttcacttcaatttgtcgacagcgcggcggatatgccgcttgcgaaaatgcacggtgcgttttcaacgaacgtcgtagcaagcaaagaacttcaacagcctggcagtgcacgaagcacgcgacatcttgaaattgaacttccaaaagaagcttcttatcaagaaggagatcatttaggtgttattcctcgctattatgaaggaatagtaaaccgtgtaacacagaggttcggcctaagcgcatcacagctgatccgtctggaagcagaagaagaaaaattagctcatttgccactcgctaaaacagtatccgtagaagagcttctgcaatacgtggagcttcaagatcctgttacgcgcacgcagcttcgcgcaatggctgctaaaacggtctgcccgccgcataaagtagagcttgaagccttgcttggcaagcaagcctacaaagaacaagtgctggcaaaacgtttaacaatgcttgaactgcttgaaaaatacccggcgtgtgaaatgagtttcagcgaatttatcgcccttctgccaagcatacgcccgcgctattactcgatttcttcatcacctcgtgtcgatgaaaaacaagcaagcatcacggtcagcgttgtctcaggaccggcgtggagcggatatggagaatataaaggaattgcgtcgaactatcttgctgagctgcaagaaggagatacgattacgtgctttatttccacaccgcagtcagagtttacgctgccaaaagaccctgaaacgccgcttatcatggtcggaccgggaacaggcgtcgcgccgtttagaggctttgtgcaggcgcgcaaacagctaaaagaacaaggacagtcacttggagaagcacatttatacttcggctgccgttcacctcatgaagactatctgtatcaagaagagcttgaaaacgcccaaagcgaaggcatcattacgcttcataccgctttttctcgcatgccgaatcagccgaaaacatacgttcagcacgtaatggaacaagacggcaagaaattgattgaacttcttgatcaaggagcgcacttctatatttgcggagacggaattcaaatggcacctgccgttgaagcaacgcttatgaaaagctatgctgacgttcaccaagtgagtgaagcagacgctcgcttatggctgcagcagctagaagaaaaaggccgatacgcaaaagacgtgtggctgggg

SEQ ID NO: 1026 - protein, 1049 aa, synthetic construct
  REGION 1..1049: note = variant of P450 oxidase from Bacillus megaterium
MTIKEMPQPKTFGELKNLPLLNTDKPVQALMRIADELGEIFKFEAPGSVTRYLSSQRLIKEACDESRFDKNLSQGLKFARDFVGDGLVTSWTHEPNWKKAHNILVPSFSQHAMGRYHAMMVDIAVQLVQKWERLNADEHIEVSEDMTRLTLDTIGLCLFNYRFNSFYRDTPHPFIVSVVRALDEVMNKLQRANPDDPAYDENKRQCQEDIKVMNDYVDKIIADRKARGEQSHDLLTQMLNGKDPETGEPLDDGNIRQQIITFLIAGHQTTSGLLSFALYFLVKNPRVLQKVAEEAARVLVDPVPSYKQVKQLKYVGMVLNEALRLWPVAPMFSLYAKEDTVLGGEYPLTKGDEVMVLVPQLHRDKTIWGDDVEEFRPERFEMPSAIPQHAFKPFGNGQRACIGQQFALHSATLVLGMMLKHFDFEDHTNYELVIKESRTLKPEGFVVKAKSKGIPLGGIPSPSTEQSAKKVRKKAENAHNTPLLVLYGSNAGTAEGTARDLADIAMSKGFAPQVATLDSHAGNLPREGAVLIVTASYNGHPPDNAKQFVDWLDQASADEVKGVRYSVFGCGDKNWAGTYQKVPAFIDETLAAKGAENIADRGEADASDDFEGAYEEWRDHMWSDVAAYFGLDIENSEDNKSTLSLQFVDSAADMPLAKMHGAFSTNVVASKELQQPGSARSTRHLEIELPKEASYQEGDHLGVIPRYYEGIVNRVTQRFGLSASQLIRLEAEEEKLAHLPLAKTVSVEELLQYVELQDPVTRTQLRAMAAKTVCPPHKVELEALLGKQAYKEQVLAKRLTMLELLEKYPACEMSFSEFIALLPSIRPRYYSISSSPRVDEKQASITVSVVSGPAWSGYGEYKGIASNYLAELQEGDTITCFISTPQSEFTLPKDPETPLIMVGPGTGVAPFRGFVQARKQLKEQGQSLGEAHLYFGCRSPHEDYLYQEELENAQSEGIITLHTAFSRMPNQPKTYVQHVMEQDGKKLIELLDQGAHFYICGDGIQMAPAVEATLMKSYADVHQVSEADARLWLQQLEEKGRYAKDVWLG

SEQ ID NO: 1027 - DNA, 3147 bp, synthetic construct
  misc_feature 1..3147: note = variant of P450 oxidase from Bacillus megaterium
  source 1..3147: mol_type = other DNA
atgacaattaaggaaatgcctcagcctaagacgtttggagaacttaaaaatttaccgttattaaatacagataaaccggttcaagctttgatgcgtattgcggatgaattaggagaaatctttaaattcgaggcgcctggtagcgtaacgcgctatttatcaagtcagcgtctaattaaagaagcatgcgatgaatcacgctttgataaaaacttaagtcaagggcttaaatttgcacgtgattttgttggagacgggctggttacaagctggacgcatgaaccgaattggaaaaaagcgcataatatcttagttccaagctttagtcagcatgcaatggggcgttatcatgcgatgatggtcgatatcgccgtgcagcttgttcaaaagtgggttcgtctaaatgcagatgagcatattgaagtatcggaagacatgacacgtttaacgcttgatacaattggtctttgcctgtttaactatcgctttaacagcttttaccgagatacgcctcatccatttattgtgagtgtggttcgtgcactggatgaagtaatgaacaagctgcagcgagcaaatccagacgacccagcttatgatgaaaacaagcgccagtgtcaagaagatatcaaggtgatgaacgactatgtagataaaattattgcagatcgcaaagcaaggggtgaacaaagtcatgatttattaacgcagatgctaaacggaaaagatccagaaacgggtgagccgcttgatgacgggaacattcgtcagcaaattattacattcttaattgcgggacaccaaacgacaagtggtcttttatcatttgcgctgtatttcttagtgaaaaatccacgtgtattacaaaaagtagcagaagaagcagcacgagttctagtagatcctgttccaagctacaaacaagtcaaacagcttaaatatgttggcatggtcttaaacgaagcgctgcgcttatggccagtagcgcctatgttttccctatatgcaaaagaagatacggtgcttggaggagaatatcctttaacgaaaggcgacgaagtaatggttctggtgcctcagcttcaccgtgataaaacaatttggggagacgatgtggaggagttccgtccagagcgttttgaaaatccaagtgcgattccgcagcatgcgtttaaaccgtttggaaacggtcagcgtgcgtgtatcggtcagcagttcgctcttcatagtgcaacgctggtacttggtatgatgctaaaacactttgactttgaagatcatacaaactacgagctcgttattaaagaatcgcggacgttaaaacctgaaggctttgtggtaaaagcaaaatcgaaaggcattccgcttggcggtattccttcacctagcactgaacagtctgctaaaaaagtacgcaaaaaggcagaaaacgctcataatacgccgctgcttgtgctatacggttcaaatgcgggaacagctgaaggaacggcgcgtgatttagcagatattgcaatgagcaaaggatttgcaccgcaggtcgcaacgcttgattcacacgccggtaatcttccgcgcgaaggagctgtattaattgtaacggcgtcttataacggtcatccgcctgataacgcaaagcaatttgtcgattggttagaccaagcgtctgcggatgaagtaaaaggcgttcgctactccgtatttggatgcggcgataaaaattgggcggggacgtatcaaaaagtgcctgcttttatcgatgaaacgcttgccgctaaaggggcagaaaacatcgctgaccgcggtgaagcagatgcaagcgacgactttgaaggcgcgtatgaagaatggcgtgatcatatgtggagtgacgtagcagcctactttggtctcgacattgaaaacagtgaagataataaatctactctttcacttcaatttgtcgacagcgcggcggatatgccgcttgcgaaaatgcacggtgcgttttcaacgaacgtcgtagcaagcaaagaacttcaacagcctggcagtgcacgaagcacgcgacatcttgaaattgaacttccaaaagaagcttcttatcaagaaggagatcatttaggtgttattcctcgctattatgaaggaatagtaaaccgtgtaacacagaggttcggcctaagcgcatcacagctgatccgtctggaagcagaagaagaaaaattagctcatttgccactcgctaaaacagtatccgtagaagagcttctgcaatacgtggagcttcaagatcctgttacgcgcacgcagcttcgcgcaatggctgctaaaacggtctgcccgccgcataaagtagagcttgaagccttgcttggcaagcaagcctacaaagaacaagtgctggcaaaacgtttaacaatgcttgaactgcttgaaaaatacccggcgtgtgaaatgagtttcagcgaatttatcgcccttctgccaagcatacgcccgcgctattactcgatttcttcatcacctcgtgtcgatgaaaaacaagcaagcatcacggtcagcgttgtctcaggaccggcgtggagcggatatggagaatataaaggaattgcgtcgaactatcttgctgagctgcaagaaggagatacgattacgtgctttatttccacaccgcagtcagagtttacgctgccaaaagaccctgaaacgccgcttatcatggtcggaccgggaacaggcgtcgcgccgtttagaggctttgtgcaggcgcgcaaacagctaaaagaacaaggacagtcacttggagaagcacatttatacttcggctgccgttcacctcatgaagactatctgtatcaagaagagcttgaaaacgcccaaagcgaaggcatcattacgcttcataccgctttttctcgcatgccgaatcagccgaaaacatacgttcagcacgtaatggaacaagacggcaagaaattgattgaacttcttgatcaaggagcgcacttctatatttgcggagacggaattcaaatggcacctgccgttgaagcaacgcttatgaaaagctatgctgacgttcaccaagtgagtgaagcagacgctcgcttatggctgcagcagctagaagaaaaaggccgatacgcaaaagacgtgtggctgggg

SEQ ID NO: 1028 - protein, 1049 aa, synthetic construct
  REGION 1..1049: note = variant of P450 oxidase from Bacillus megaterium
MTIKEMPQPKTFGELKNLPLLNTDKPVQALMRIADELGEIFKFEAPGSVTRYLSSQRLIKEACDESRFDKNLSQGLKFARDFVGDGLVTSWTHEPNWKKAHNILVPSFSQHAMGRYHAMMVDIAVQLVQKWVRLNADEHIEVSEDMTRLTLDTIGLCLFNYRFNSFYRDTPHPFIVSVVRALDEVMNKLQRANPDDPAYDENKRQCQEDIKVMNDYVDKIIADRKARGEQSHDLLTQMLNGKDPETGEPLDDGNIRQQIITFLIAGHQTTSGLLSFALYFLVKNPRVLQKVAEEAARVLVDPVPSYKQVKQLKYVGMVLNEALRLWPVAPMFSLYAKEDTVLGGEYPLTKGDEVMVLVPQLHRDKTIWGDDVEEFRPERFENPSAIPQHAFKPFGNGQRACIGQQFALHSATLVLGMMLKHFDFEDHTNYELVIKESRTLKPEGFVVKAKSKGIPLGGIPSPSTEQSAKKVRKKAENAHNTPLLVLYGSNAGTAEGTARDLADIAMSKGFAPQVATLDSHAGNLPREGAVLIVTASYNGHPPDNAKQFVDWLDQASADEVKGVRYSVFGCGDKNWAGTYQKVPAFIDETLAAKGAENIADRGEADASDDFEGAYEEWRDHMWSDVAAYFGLDIENSEDNKSTLSLQFVDSAADMPLAKMHGAFSTNVVASKELQQPGSARSTRHLEIELPKEASYQEGDHLGVIPRYYEGIVNRVTQRFGLSASQLIRLEAEEEKLAHLPLAKTVSVEELLQYVELQDPVTRTQLRAMAAKTVCPPHKVELEALLGKQAYKEQVLAKRLTMLELLEKYPACEMSFSEFIALLPSIRPRYYSISSSPRVDEKQASITVSVVSGPAWSGYGEYKGIASNYLAELQEGDTITCFISTPQSEFTLPKDPETPLIMVGPGTGVAPFRGFVQARKQLKEQGQSLGEAHLYFGCRSPHEDYLYQEELENAQSEGIITLHTAFSRMPNQPKTYVQHVMEQDGKKLIELLDQGAHFYICGDGIQMAPAVEATLMKSYADVHQVSEADARLWLQQLEEKGRYAKDVWLG

SEQ ID NO: 1029 - DNA, 3147 bp, synthetic construct
  misc_feature 1..3147: note = variant of P450 oxidase from Bacillus megaterium
  source 1..3147: mol_type = other DNA
atgacatggaaggaaatgcctcagcctaagacgtttggagaacttaaaaatttaccgttattaaatacagataaaccggttcaagctttgatgcgtattgcggatgaattaggagaaatctttaaattcgaggcgcctggtagcgtaacgcgctatttatcaagtcagcgtctaattaaagaagcatgcgatgaatcacgctttgataaaaacttaagtcaagggcttaaatttgcacgtgattttgttggagacgggctggttacaagctggacgcatgaaccgaattggaaaaaagcgcataatatcttagttccaagctttagtcagcatgcaatggggcgttatcatgcgatgatggtcgatatcgccgtgcagcttgttcaaaagtgggagcgtctaaatgcagatgagcatattgaagtatcggaagacatgacacgtttaacgcttgatacaattggtctttgcctgtttaactatcgctttaacagcttttaccgagatacgcctcatccatttattgtgagtgtggttcgtgcactggatgaagtaatgaacaagctgcagcgagcaaatccagacgacccagcttatgatgaaaacaagcgccagtgtcaagaagatatcaaggtgatgaacgactatgtagataaaattattgcagatcgcaaagcaaggggtgaacaaagtcatgatttattaacgcagatgctaaacggaaaagatccagaaacgggtgagccgcttgatgacgggaacattcgtcagcaaattattacattcttaattgcgggacaccaaacgacaagtggtcttttatcatttgcgctgtatttcttagtgaaaaatccacgtgtattacaaaaagtagcagaagaagcagcacgagttctagtagatcctgttccaagctacaaacaagtcaaacagcttaaatatgttggcatggtcttaaacgaagcgctgcgcttatggccagtagcgcctatgttttccctatatgcaaaagaagatacggtgcttggaggagaatatcctttaacgaaaggcgacgaagtaatggttctggtgcctcagcttcaccgtgataaaacaatttggggagacgatgtggaggagttccgtccagagcgttttgaaaatccaagtgcgattccgcagcatgcgtttaaaccgtttggaaacggtcagcgtgcgtgtatcggtcagcagttcgctcttcatagtgcaacgctggtacttggtatgatgctaaaacactttgactttgaagatcatacaaactacgagctcgttattaaagaatcgcggacgttaaaacctgaaggctttgtggtaaaagcaaaatcgaaaggcattccgcttggcggtattccttcacctagcactgaacagtctgctaaaaaagtacgcaaaaaggcagaaaacgctcataatacgccgctgcttgtgctatacggttcaaatgcgggaacagctgaaggaacggcgcgtgatttagcagatattgcaatgagcaaaggatttgcaccgcaggtcgcaacgcttgattcacacgccggtaatcttccgcgcgaaggagctgtattaattgtaacggcgtcttataacggtcatccgcctgataacgcaaagcaatttgtcgattggttagaccaagcgtctgcggatgaagtaaaaggcgttcgctactccgtatttggatgcggcgataaaaattgggcggggacgtatcaaaaagtgcctgcttttatcgatgaaacgcttgccgctaaaggggcagaaaacatcgctgaccgcggtgaagcagatgcaagcgacgactttgaaggcgcgtatgaagaatggcgtgatcatatgtggagtgacgtagcagcctactttggtctcgacattgaaaacagtgaagataataaatctactctttcacttcaatttgtcgacagcgcggcggatatgccgcttgcgaaaatgcacggtgcgttttcaacgaacgtcgtagcaagcaaagaacttcaacagcctggcagtgcacgaagcacgcgacatcttgaaattgaacttccaaaagaagcttcttatcaagaaggagatcatttaggtgttattcctcgctattatgaaggaatagtaaaccgtgtaacacagaggttcggcctaagcgcatcacagctgatccgtctggaagcagaagaagaaaaattagctcatttgccactcgctaaaacagtatccgtagaagagcttctgcaatacgtggagcttcaagatcctgttacgcgcacgcagcttcgcgcaatggctgctaaaacggtctgcccgccgcataaagtagagcttgaagccttgcttggcaagcaagcctacaaagaacaagtgctggcaaaacgtttaacaatgcttgaactgcttgaaaaatacccggcgtgtgaaatgagtttcagcgaatttatcgcccttctgccaagcatacgcccgcgctattactcgatttcttcatcacctcgtgtcgatgaaaaacaagcaagcatcacggtcagcgttgtctcaggaccggcgtggagcggatatggagaatataaaggaattgcgtcgaactatcttgctgagctgcaagaaggagatacgattacgtgctttatttccacaccgcagtcagagtttacgctgccaaaagaccctgaaacgccgcttatcatggtcggaccgggaacaggcgtcgcgccgtttagaggctttgtgcaggcgcgcaaacagctaaaagaacaaggacagtcacttggagaagcacatttatacttcggctgccgttcacctcatgaagactatctgtatcaagaagagcttgaaaacgcccaaagcgaaggcatcattacgcttcataccgctttttctcgcatgccgaatcagccgaaaacatacgttcagcacgtaatggaacaagacggcaagaaattgattgaacttcttgatcaaggagcgcacttctatatttgcggagacggaattcaaatggcacctgccgttgaagcaacgcttatgaaaagctatgctgacgttcaccaagtgagtgaagcagacgctcgcttatggctgcagcagctagaagaaaaaggccgatacgcaaaagacgtgtggctgggg

SEQ ID NO: 1030 - protein, 1049 aa, synthetic construct
  REGION 1..1049: note = variant of P450 oxidase from Bacillus megaterium
MTWKEMPQPKTFGELKNLPLLNTDKPVQALMRIADELGEIFKFEAPGSVTRYLSSQRLIKEACDESRFDKNLSQGLKFARDFVGDGLVTSWTHEPNWKKAHNILVPSFSQHAMGRYHAMMVDIAVQLVQKWERLNADEHIEVSEDMTRLTLDTIGLCLFNYRFNSFYRDTPHPFIVSVVRALDEVMNKLQRANPDDPAYDENKRQCQEDIKVMNDYVDKIIADRKARGEQSHDLLTQMLNGKDPETGEPLDDGNIRQQIITFLIAGHQTTSGLLSFALYFLVKNPRVLQKVAEEAARVLVDPVPSYKQVKQLKYVGMVLNEALRLWPVAPMFSLYAKEDTVLGGEYPLTKGDEVMVLVPQLHRDKTIWGDDVEEFRPERFENPSAIPQHAFKPFGNGQRACIGQQFALHSATLVLGMMLKHFDFEDHTNYELVIKESRTLKPEGFVVKAKSKGIPLGGIPSPSTEQSAKKVRKKAENAHNTPLLVLYGSNAGTAEGTARDLADIAMSKGFAPQVATLDSHAGNLPREGAVLIVTASYNGHPPDNAKQFVDWLDQASADEVKGVRYSVFGCGDKNWAGTYQKVPAFIDETLAAKGAENIADRGEADASDDFEGAYEEWRDHMWSDVAAYFGLDIENSEDNKSTLSLQFVDSAADMPLAKMHGAFSTNVVASKELQQPGSARSTRHLEIELPKEASYQEGDHLGVIPRYYEGIVNRVTQRFGLSASQLIRLEAEEEKLAHLPLAKTVSVEELLQYVELQDPVTRTQLRAMAAKTVCPPHKVELEALLGKQAYKEQVLAKRLTMLELLEKYPACEMSFSEFIALLPSIRPRYYSISSSPRVDEKQASITVSVVSGPAWSGYGEYKGIASNYLAELQEGDTITCFISTPQSEFTLPKDPETPLIMVGPGTGVAPFRGFVQARKQLKEQGQSLGEAHLYFGCRSPHEDYLYQEELENAQSEGIITLHTAFSRMPNQPKTYVQHVMEQDGKKLIELLDQGAHFYICGDGIQMAPAVEATLMKSYADVHQVSEADARLWLQQLEEKGRYAKDVWLG

SEQ ID NO: 1031 - DNA, 3147 bp, synthetic construct
  misc_feature 1..3147: note = variant of P450 oxidase from Bacillus megaterium
  source 1..3147: mol_type = other DNA
atgacaattaaggaaatgcctcagcctaagacgtttggagaacttaaaaatttaccgttattaaatacagataaaccggttcaagctttgatgcgtattgcggatgaattaggagaaatctttaaattcgaggcgcctggtagcgtaacgcgctatttatcaagtcagcgtctaattaaagaagcatgcgatgaatcacgctttgataaaaacttaagtcaagggcttaaatttgcacgtgattttgttggagacgggctggttacaagctggacgcatgaaccgaattggaaaaaagcgcataatatcttagttccaagctttagtcagcatgcaatggggcgttatcatgcgatgatggtcgatatcgccgtgcagcttgttcaaaagtgggagcgtctaaatgcagatgagcatattgaagtatcggaagacatgacacgtttaacgcttgatacaattggtctttgcctgtttaactatcgctttaacagcttttaccgagatacgcctcatccatttattgtgagtgtggttcgtgcactggatgaagtaatgaacaagctgcagcgagcaaatccagacgacccagcttatgatgaaaacaagcgccagtgtcaagaagatatcaaggtgatgaacgactatgtagataaaattattgcagatcgcaaagcaaggggtgaacaaagtcatgatttattaacgcagatgctaaacggaaaagatccagaaacgggtgagccgcttgatgacgggaacattcgtcagcaaattattacattcttaattgcgggacaccaaacgacaagtggtcttttatcatttgcgctgtatttcttagtgaaaaatccacgtgtattacaaaaagtagcagaagaagcagcacgagttctagtagatcctgttccaagctacaaacaagtcaaacagcttaaatatgttggcatggtcttaaacgaagcgctgcgcttatggccagtagcgcctatgttttccctatatgcaaaagaagatacggtgcttggaggagaatatcctttaacgaaaggcgacgaagtaatggttctggtgcctcagcttcaccgtgataaaacaatttggggagacgatgtggaggagttccgtccagagcgttttgaaaatccaagtgcgattccgcagcatgcgtttaaaccgtttggaaacggtcagcgtgcgtgtatcggtcagcagttcgctcttcatagtgcaacgctggtacttggtatgatgctaaaacactttgactttgaagatcatacaaactacgagctcgttattaaagaatcgcggacgttaaaacctgaaggctttgtggtaaaagcaaaatcgaaaggcattccgcttggcggtattccttcacctagcactgaacagtctgctaaaaaagtacgcttgaaggcagaaaacgctcataatacgccgctgcttgtgctatacggttcaaatgcgggaacagctgaaggaacggcgcgtgatttagcagatattgcaatgagcaaaggatttgcaccgcaggtcgcaacgcttgattcacacgccggtaatcttccgcgcgaaggagctgtattaattgtaacggcgtcttataacggtcatccgcctgataacgcaaagcaatttgtcgattggttagaccaagcgtctgcggatgaagtaaaaggcgttcgctactccgtatttggatgcggcgataaaaattgggcggggacgtatcaaaaagtgcctgcttttatcgatgaaacgcttgccgctaaaggggcagaaaacatcgctgaccgcggtgaagcagatgcaagcgacgactttgaaggcgcgtatgaagaatggcgtgatcatatgtggagtgacgtagcagcctactttggtctcgacattgaaaacagtgaagataataaatctactctttcacttcaatttgtcgacagcgcggcggatatgccgcttgcgaaaatgcacggtgcgttttcaacgaacgtcgtagcaagcaaagaacttcaacagcctggcagtgcacgaagcacgcgacatcttgaaattgaacttccaaaagaagcttcttatcaagaaggagatcatttaggtgttattcctcgctattatgaaggaatagtaaaccgtgtaacacagaggttcggcctaagcgcatcacagctgatccgtctggaagcagaagaagaaaaattagctcatttgccactcgctaaaacagtatccgtagaagagcttctgcaatacgtggagcttcaagatcctgttacgcgcacgcagcttcgcgcaatggctgctaaaacggtctgcccgccgcataaagtagagcttgaagccttgcttggcaagcaagcccacaaagaacaagtgctggcaaaacgtttaacaatgcttgaactgcttgaaaaatacccggcgtgtgaaatgagtttcagcgaatttatcgcccttctgccaagcatacgcccgcgctattactcgatttcttcatcacctcgtgtcgatgaaaaacaagcaagcatcacggtcagcgttgtctcaggaccggcgtggagcggatatggagaatataaaggaattgcgtcgaactatcttgctgagctgcaagaaggagatacgattacgtgctttatttccacaccgcagtcagagtttacgctgccaaaagaccctgaaacgccgcttatcatggtcggaccgggaacaggcgtcgcgccgtttagaggctttgtgcaggcgcgcaaacagctaaaagaacaaggacagtcacttggagaagcacatttatacttcggctgccgttcacctcatgaagactatctgtatcaagaagagcttgaaaacgcccaaagcgaaggcatcattacgcttcataccgctttttctcgcatgccgaatcagccgaaaacatacgttcagcacgtaatggaacaagacggcaagaaattgattgaacttcttgatcaaggagcgcacttctatatttgcggagacggaattcaaatggcacctgccgttgaagcaacgcttatgaaaagctatgctgacgttcaccaagtgagtgaagcagacgctcgcttatggctgcagcagctagaagaaaaaggccgatacgcaaaagacgtgtggctgggg

SEQ ID NO: 1032 - protein, 1049 aa, synthetic construct
  REGION 1..1049: note = variant of P450 oxidase from Bacillus megaterium
MTIKEMPQPKTFGELKNLPLLNTDKPVQALMRIADELGEIFKFEAPGSVTRYLSSQRLIKEACDESRFDKNLSQGLKFARDFVGDGLVTSWTHEPNWKKAHNILVPSFSQHAMGRYHAMMVDIAVQLVQKWERLNADEHIEVSEDMTRLTLDTIGLCLFNYRFNSFYRDTPHPFIVSVVRALDEVMNKLQRANPDDPAYDENKRQCQEDIKVMNDYVDKIIADRKARGEQSHDLLTQMLNGKDPETGEPLDDGNIRQQIITFLIAGHQTTSGLLSFALYFLVKNPRVLQKVAEEAARVLVDPVPSYKQVKQLKYVGMVLNEALRLWPVAPMFSLYAKEDTVLGGEYPLTKGDEVMVLVPQLHRDKTIWGDDVEEFRPERFENPSAIPQHAFKPFGNGQRACIGQQFALHSATLVLGMMLKHFDFEDHTNYELVIKESRTLKPEGFVVKAKSKGIPLGGIPSPSTEQSAKKVRLKAENAHNTPLLVLYGSNAGTAEGTARDLADIAMSKGFAPQVATLDSHAGNLPREGAVLIVTASYNGHPPDNAKQFVDWLDQASADEVKGVRYSVFGCGDKNWAGTYQKVPAFIDETLAAKGAENIADRGEADASDDFEGAYEEWRDHMWSDVAAYFGLDIENSEDNKSTLSLQFVDSAADMPLAKMHGAFSTNVVASKELQQPGSARSTRHLEIELPKEASYQEGDHLGVIPRYYEGIVNRVTQRFGLSASQLIRLEAEEEKLAHLPLAKTVSVEELLQYVELQDPVTRTQLRAMAAKTVCPPHKVELEALLGKQAHKEQVLAKRLTMLELLEKYPACEMSFSEFIALLPSIRPRYYSISSSPRVDEKQASITVSVVSGPAWSGYGEYKGIASNYLAELQEGDTITCFISTPQSEFTLPKDPETPLIMVGPGTGVAPFRGFVQARKQLKEQGQSLGEAHLYFGCRSPHEDYLYQEELENAQSEGIITLHTAFSRMPNQPKTYVQHVMEQDGKKLIELLDQGAHFYICGDGIQMAPAVEATLMKSYADVHQVSEADARLWLQQLEEKGRYAKDVWLG

SEQ ID NO: 1033 - DNA, 3147 bp, synthetic construct
  misc_feature 1..3147: note = variant of P450 oxidase from Bacillus megaterium
  source 1..3147: mol_type = other DNA
atgacaattaaggaaatgcctcagcctaagacgtttggagaacttaaaaatttaccgttattaaatacagataaaccggttcaagctttgatgcgtattgcggatgaattaggagaaatctttaaattcgaggcgcctggtagcgtaacgcgctatttatcaagtcagcgtctaattaaagaagcatgcgatgaatcacgctttgataaaaacttaagtcaagggcttaaatttgcacgtgattttgttggagacgggctggttacaagctggacgcatgaaccgaattggaaaaaagcgcataatatcttagttccaagctttagtcagcatgcaatggggcgttatcatgcgatgatggtcgatatcgccgtgcagcttgttcaaaagtgggagcgtctaaatgcagatgagcatattgaagtatcggaagacatgacacgtttaacgcttgatacaattggtctttgcctgtttaactatcgctttaacagcttttaccgagatacgcctcatccatttattgtgagtgtggttcgtgcactggatgaagtaatgaacaagctgcagcgagcaaatccagacgacccagcttatgatgaaaacaagcgccagtgtcaagaagatatcaaggtgatgaacgactatgtagataaaattattgcagatcgcaaagcaaggggtgaacaaagtcatgatttattaacgcagatgctaaacggaaaagatccagaaacgggtgagccgcttgatgacgggaacattcgtcagcaaattattacattcttaattgcgggacaccaaacgacaagtggtcttttatcatttgcgctgtatttcttagtgaaaaatggtcgtgtattacaaaaagtagcagaagaagcagcacgagttctagtagatcctgttccaagctacaaacaagtcaaacagcttaaatatgttggcatggtcttaaacgaagcgctgcgcttatggccagtagcgcctatgttttccctatatgcaaaagaagatacggtgcttggaggagaatatcctttaacgaaaggcgacgaagtaatggttctggtgcctcagcttcaccgtgataaaacaatttggggagacgatgtggaggagttccgtccagagcgttttgaaaatccaagtgcgattccgcagcatgcgtttaaaccgtttggaaacggtcagcgtgcgtgtatcggtcagcagttcgctcttcatagtgcaacgctggtacttggtatgatgctaaaacactttgactttgaagatcatacaaactacgagctcgttattaaagaatcgcggacgttaaaacctgaaggctttgtggtaaaagcaaaatcgaaaggcattccgcttggcggtattccttcacctagcactgaacagtctgctaaaaaagtacgcaaaaaggcagaaaacgctcataatacgccgctgcttgtgctatacggttcaaatgcgggaacagctgaaggaacggcgcgtgatttagcagatattgcaatgagcaaaggatttgcaccgcaggtcgcaacgcttgattcacacgccggtaatcttccgcgcgaaggagctgtattaattgtaacggcgtcttataacggtcatccgcctgataacgcaaagcaatttgtcgattggttagaccaagcgtctgcggatgaagtaaaaggcgttcgctactccgtatttggatgcggcgataaaaattgggcggggacgtatcaaaaagtgcctgcttttatcgatgaaacgcttgccgctaaaggggcagaaaacatcgctgaccgcggtgaagcagatgcaagcgacgactttgaaggcgcgtatgaagaatggcgtgatcatatgtggagtgacgtagcagcctactttggtctcgacattgaaaacagtgaagataataaatctactctttcacttcaatttgtcgacagcgcggcggatatgccgcttgcgaaaatgcacggtgcgttttcaacgaacgtcgtagcaagcaaagaacttcaacagcctggcagtgcacgaagcacgcgacatcttgaaattgaacttccaaaagaagcttcttatcaagaaggagatcatttaggtgttattcctcgctattatgaaggaatagtaaaccgtgtaacacagaggttcggcctaagcgcatcacagctgatccgtctggaagcagaagaagaaaaattagctcatttgccactcgctaaaacagtatccgtagaagagcttctgcaatacgtggagcttcaagatcctgttacgcgcacgcagcttcgcgcaatggctgctaaaacggtctgcccgccgcataaagtagagcttgaagccttgcttggcaagcaagcctacaaagaacaagtgctggcaaaacgtttaacaatgcttgaactgcttgaaaaatacccggcgtgtgaaatgagtttcagcgaatttatcgcccttctgccaagcatacgcccgcgctattactcgatttcttcatcacctcgtgtcgatgaaaaacaagcaagcatcacggtcagcgttgtctcaggaccggcgtggagcggatatggagaatataaaggaattgcgtcgaactatcttgctgagctgcaagaaggagatacgattacgtgctttatttccacaccgcagtcagagtttacgctgccaaaagaccctgaaacgccgcttatcatggtcggaccgggaacaggcgtcgcgccgtttagaggctttgtgcaggcgcgcaaacagctaaaagaacaaggacagtcacttggagaagcacatttatacttcggctgccgttcacctcatgaagactatctgtatcaagaagagcttgaaaacgcccaaagcgaaggcatcattacgcttcataccgctttttctcgcatgccgaatcagccgaaaacatacgttcagcacgtaatggaacaagacggcaagaaattgattgaacttcttgatcaaggagcgcacttctatatttgcggagacggaattcaaatggcacctgccgttgaagcaacgcttatgaaaagctatgctgacgttcaccaagtgagtgaagcagacgctcgcttatggctgcagcagctagaagaaaaaggccgatacgcaaaagacgtgtggctgggg

SEQ ID NO: 1034 - protein, 1049 aa, synthetic construct
  REGION 1..1049: note = variant of P450 oxidase from Bacillus megaterium
MTIKEMPQPKTFGELKNLPLLNTDKPVQALMRIADELGEIFKFEAPGSVTRYLSSQRLIKEACDESRFDKNLSQGLKFARDFVGDGLVTSWTHEPNWKKAHNILVPSFSQHAMGRYHAMMVDIAVQLVQKWERLNADEHIEVSEDMTRLTLDTIGLCLFNYRFNSFYRDTPHPFIVSVVRALDEVMNKLQRANPDDPAYDENKRQCQEDIKVMNDYVDKIIADRKARGEQSHDLLTQMLNGKDPETGEPLDDGNIRQQIITFLIAGHQTTSGLLSFALYFLVKNGRVLQKVAEEAARVLVDPVPSYKQVKQLKYVGMVLNEALRLWPVAPMFSLYAKEDTVLGGEYPLTKGDEVMVLVPQLHRDKTIWGDDVEEFRPERFENPSAIPQHAFKPFGNGQRACIGQQFALHSATLVLGMMLKHFDFEDHTNYELVIKESRTLKPEGFVVKAKSKGIPLGGIPSPSTEQSAKKVRKKAENAHNTPLLVLYGSNAGTAEGTARDLADIAMSKGFAPQVATLDSHAGNLPREGAVLIVTASYNGHPPDNAKQFVDWLDQASADEVKGVRYSVFGCGDKNWAGTYQKVPAFIDETLAAKGAENIADRGEADASDDFEGAYEEWRDHMWSDVAAYFGLDIENSEDNKSTLSLQFVDSAADMPLAKMHGAFSTNVVASKELQQPGSARSTRHLEIELPKEASYQEGDHLGVIPRYYEGIVNRVTQRFGLSASQLIRLEAEEEKLAHLPLAKTVSVEELLQYVELQDPVTRTQLRAMAAKTVCPPHKVELEALLGKQAYKEQVLAKRLTMLELLEKYPACEMSFSEFIALLPSIRPRYYSISSSPRVDEKQASITVSVVSGPAWSGYGEYKGIASNYLAELQEGDTITCFISTPQSEFTLPKDPETPLIMVGPGTGVAPFRGFVQARKQLKEQGQSLGEAHLYFGCRSPHEDYLYQEELENAQSEGIITLHTAFSRMPNQPKTYVQHVMEQDGKKLIELLDQGAHFYICGDGIQMAPAVEATLMKSYADVHQVSEADARLWLQQLEEKGRYAKDVWLG

SEQ ID NO: 1035 - DNA, 3147 bp, synthetic construct
  misc_feature 1..3147: note = variant of P450 oxidase from Bacillus megaterium
  source 1..3147: mol_type = other DNA
atgacaattaaggaaatgcctcagcctaagacgtttggagaacttaaaaatttaccgttattaaatacagataaaccggttcaagctttgatgcgtattgcggatgaattaggagaaatctttaaattcgaggcgcctggtagcgtaacgcgctatttatcaagtcagcgtctaattaaagaagcatgcgatgaatcacgctttgataaaaacttaagtcaagggcttaaatttgcacgtgattttgttggagacgggctggttacaagctggacgcatgaaccgaattggaaaaaagcgcataatatcttagttccaagctttagtcagcatgcaatggggcgttatcatgcgatgatggtcgatatcgccgtgcagcttgttcaaaagtgggagcgtctaaatgcagatgagcatattgaagtatcggaagacatgacacgtttaacgcttgatacaattggtctttgcctgtttaactatcgctttaacagcttttaccgagatacgcctcatccatttattgtgagtgtggttcgtgcactggatgaagtaatgaacaagctgcagcgagcaaatccagacgacccagcttatgatgaaaacaagcgccagtgtcaagaagatatcaaggtgatgaacgactatgtagataaaattattgcagatcgcaaagcaaggggtgaacaaagtcatgatttattaacgcagatgctaaacggaaaagatccagaaacgggtgagccgcttgatgacgggaacattcgtcagcaaattattacattcttaattgcgggacaccaaacgacaagtggtcttttatcatttgcgctgtatttcttagtgaaaaatccacgtgtattacaaaaagtagcagaagaagcagcacgagttctagtagatcctgttccaagctacaaacaagtcaaacagcttaaatatgttggcatggtcttaaacgaagcgctgcgcttatggccagtagcgcctatgttttccctatatgcaaaagaagatacggtgcttggaggagaatatcctttaacgaaaggcgacgaagtaatggttctggtgcctcagcttcaccgtgataaaacaatttggggagacgatgtggaggagttccgtccagagcgtttttttaatccaagtgcgattccgcagcatgcgtttaaaccgtttggaaacggtcagcgtgcgtgtatcggtcagcagttcgctcttcatagtgcaacgctggtacttggtatgatgctaaaacactttgactttgaagatcatacaaactacgagctcgttattaaagaatcgcggacgttaaaacctgaaggctttgtggtaaaagcaaaatcgaaaggcattccgcttggcggtattccttcacctagcactgaacagtctgctaaaaaagtacgcaaaaaggcagaaaacgctcataatacgccgctgcttgtgctatacggttcaaatgcgggaacagctgaaggaacggcgcgtgatttagcagatattgcaatgagcaaaggatttgcaccgcaggtcgcaacgcttgattcacacgccggtaatcttccgcgcgaaggagctgtattaattgtaacggcgtcttataacggtcatccgcctgataacgcaaagcaatttgtcgattggttagaccaagcgtctgcggatgaagtaaaaggcgttcgctactccgtatttggatgcggcgataaaaattgggcggggacgtatcaaaaagtgcctgcttttatcgatgaaacgcttgccgctaaaggggcagaaaacatcgctgaccgcggtgaagcagatgcaagcgacgactttgaaggcgcgtatgaagaatggcgtgatcatatgtggagtgacgtagcagcctactttggtctcgacattgaaaacagtgaagataataaatctactctttcacttcaatttgtcgacagcgcggcggatatgccgcttgcgaaaatgcacggtgcgttttcaacgaacgtcgtagcaagcaaagaacttcaacagcctggcagtgcacgaagcacgcgacatcttgaaattgaacttccaaaagaagcttcttatcaagaaggagatcatttaggtgttattcctcgctattatgaaggaatagtaaaccgtgtaacacagaggttcggcctaagcgcatcacagctgatccgtctggaagcagaagaagaaaaattagctcatttgccactcgctaaaacagtatccgtagaagagcttctgcaatacgtggagcttcaagatcctgttacgcgcacgcagcttcgcgcaatggctgctaaaacggtctgcccgccgcataaagtagagcttgaagccttgcttggcaagcaagcctacaaagaacaagtgctggcaaaacgtttaacaatgcttgaactgcttgaaaaatacccggcgtgtgaaatgagtttcagcgaatttatcgcccttctgccaagcatacgcccgcgctattactcgatttcttcatcacctcgtgtcgatgaaaaacaagcaagcatcacggtcagcgttgtctcaggaccggcgtggagcggatatggagaatataaaggaattgcgtcgaactatcttgctgagctgcaagaaggagatacgattacgtgctttatttccacaccgcagtcagagtttacgctgccaaaagaccctgaaacgccgcttatcatggtcggaccgggaacaggcgtcgcgccgtttagaggctttgtgcaggcgcgcaaacagctaaaagaacaaggacagtcacttggagaagcacatttatacttcggctgccgttcacctcatgaagactatctgtatcaagaagagcttgaaaacgcccaaagcgaaggcatcattacgcttcataccgctttttctcgcatgccgaatcagccgaaaacatacgttcagcacgtaatggaacaagacggcaagaaattgattgaacttcttgatcaaggagcgcacttctatatttgcggagacggaattcaaatggcacctgccgttgaagcaacgcttatgaaaagctatgctgacgttcaccaagtgagtgaagcagacgctcgcttatggctgcagcagctagaagaaaaaggccgatacgcaaaagacgtgtggctgggg

SEQ ID NO: 1036 - protein, 1049 aa, synthetic construct
  REGION 1..1049: note = variant of P450 oxidase from Bacillus megaterium
MTIKEMPQPKTFGELKNLPLLNTDKPVQALMRIADELGEIFKFEAPGSVTRYLSSQRLIKEACDESRFDKNLSQGLKFARDFVGDGLVTSWTHEPNWKKAHNILVPSFSQHAMGRYHAMMVDIAVQLVQKWERLNADEHIEVSEDMTRLTLDTIGLCLFNYRFNSFYRDTPHPFIVSVVRALDEVMNKLQRANPDDPAYDENKRQCQEDIKVMNDYVDKIIADRKARGEQSHDLLTQMLNGKDPETGEPLDDGNIRQQIITFLIAGHQTTSGLLSFALYFLVKNPRVLQKVAEEAARVLVDPVPSYKQVKQLKYVGMVLNEALRLWPVAPMFSLYAKEDTVLGGEYPLTKGDEVMVLVPQLHRDKTIWGDDVEEFRPERFFNPSAIPQHAFKPFGNGQRACIGQQFALHSATLVLGMMLKHFDFEDHTNYELVIKESRTLKPEGFVVKAKSKGIPLGGIPSPSTEQSAKKVRKKAENAHNTPLLVLYGSNAGTAEGTARDLADIAMSKGFAPQVATLDSHAGNLPREGAVLIVTASYNGHPPDNAKQFVDWLDQASADEVKGVRYSVFGCGDKNWAGTYQKVPAFIDETLAAKGAENIADRGEADASDDFEGAYEEWRDHMWSDVAAYFGLDIENSEDNKSTLSLQFVDSAADMPLAKMHGAFSTNVVASKELQQPGSARSTRHLEIELPKEASYQEGDHLGVIPRYYEGIVNRVTQRFGLSASQLIRLEAEEEKLAHLPLAKTVSVEELLQYVELQDPVTRTQLRAMAAKTVCPPHKVELEALLGKQAYKEQVLAKRLTMLELLEKYPACEMSFSEFIALLPSIRPRYYSISSSPRVDEKQASITVSVVSGPAWSGYGEYKGIASNYLAELQEGDTITCFISTPQSEFTLPKDPETPLIMVGPGTGVAPFRGFVQARKQLKEQGQSLGEAHLYFGCRSPHEDYLYQEELENAQSEGIITLHTAFSRMPNQPKTYVQHVMEQDGKKLIELLDQGAHFYICGDGIQMAPAVEATLMKSYADVHQVSEADARLWLQQLEEKGRYAKDVWLG

SEQ ID NO: 1037 - DNA, 3147 bp, synthetic construct
  misc_feature 1..3147: note = variant of P450 oxidase from Bacillus megaterium
  source 1..3147: mol_type = other DNA
atgacaattaaggaaatgcctcagcctaagacgtttggagaacttaaaaatttaccgttattaaatacagataaaccggttcaagctttgatgcgtattgcggatgaattaggagaaatctttaaattcgaggcgcctggtagcgtaacgcgctatttatcaagtcagcgtctaattaaagaagcatgcgatgaatcacgctttgataaaaacttaagtcaagggcttaaatttgcacgtgattttgttggagacgggctggttacaagctggacgcatgaaccgaattggaaaaaagcgcataatatcttagttccaagctttagtcagcatgcaatggggcgttatcatgcgatgatggtcgatatcgccgtgcagcttgttcaaaagtgggagcgtctaaatgcagatgagcatattgaagtatcggaagacatgacacgtttaacgcttgatacaattggtctttgcctgtttaactatcgctttaacagcttttaccgagatacgcctcatccatttattgtgagtgtggttcgtgcactggatgaagtaatgaacaagctgcagcgagcaaatccagacgacccagcttatgatgaaaacaagcgccagtgtcaagaagatatcaaggtgatgaacgactatgtagataaaattattgcagatcgcaaagcaaggggtgaacaaagtcatgatttattaacgcagatgctaaacggaaaagatccagaaacgggtgagccgcttgatgacgggaacattcgtcagcaaattattacattcttaattgcgggacaccaaacgacaagtggtcttttatcatttgcgctgtatttcttagtgaaaaatccacgtgtattacaaaaagtagcagaagaagcagcacgagttctagtagatcctgttccaagctacaaacaagtcaaacagcttaaatatgttggcatggtcttaaacgaagcgctgcgcttatggccagtagcgcctatgttttccctatatgcaaaagaagatacggtgcttggaggagaatatcctttaacgaaaggcgacgaagtaatggttctggtgcctcagcttcaccgtgataaaacaatttggggagacgatgtggaggagttccgtccagagcgttttgaaaatccaagtgcgattccgcagcatgcgtttaaaccgtttggaaacggtcagcgtgcgtgtatcggtcagcagttcgctcttcatagtgcaacgctggtagtgggtatgatgctaaaacactttgactttgaagatcatacaaactacgagctcgttattaaagaatcgcggacgttaaaacctgaaggctttgtggtaaaagcaaaatcgaaaggcattccgcttggcggtattccttcacctagcactgaacagtctgctaaaaaagtacgcaaaaaggcagaaaacgctcataatacgccgctgcttgtgctatacggttcaaatgcgggaacagctgaaggaacggcgcgtgatttagcagatattgcaatgagcaaaggatttgcaccgcaggtcgcaacgcttgattcacacgccggtaatcttccgcgcgaaggagctgtattaattgtaacggcgtcttataacggtcatccgcctgataacgcaaagcaatttgtcgattggttagaccaagcgtctgcggatgaagtaaaaggcgttcgctactccgtatttggatgcggcgataaaaattgggcggggacgtatcaaaaagtgcctgcttttatcgatgaaacgcttgccgctaaaggggcagaaaacatcgctgaccgcggtgaagcagatgcaagcgacgactttgaaggcgcgtatgaagaatggcgtgatcatatgtggagtgacgtagcagcctactttggtctcgacattgaaaacagtgaagataataaatctactctttcacttcaatttgtcgacagcgcggcggatatgccgcttgcgaaaatgcacggtgcgttttcaacgaacgtcgtagcaagcaaagaacttcaacagcctggcagtgcacgaagcacgcgacatcttgaaattgaacttccaaaagaagcttcttatcaagaaggagatcatttaggtgttattcctcgctattatgaaggaatagtaaaccgtgtaacacagaggttcggcctaagcgcatcacagctgatccgtctggaagcagaagaagaaaaattagctcatttgccactcgctaaaacagtatccgtagaagagcttctgcaatacgtggagcttcaagatcctgttacgcgcacgcagcttcgcgcaatggctgctaaaacggtctgcccgccgcataaagtagagcttgaagccttgcttggcaagcaagcctacaaagaacaagtgctggcaaaacgtttaacaatgcttgaactgcttgaaaaatacccggcgtgtgaaatgagtttcagcgaatttatcgcccttctgccaagcatacgcccgcgctattactcgatttcttcatcacctcgtgtcgatgaaaaacaagcaagcatcacggtcagcgttgtctcaggaccggcgtggagcggatatggagaatataaaggaattgcgtcgaactatcttgctgagctgcaagaaggagatacgattacgtgctttatttccacaccgcagtcagagtttacgctgccaaaagaccctgaaacgccgcttatcatggtcggaccgggaacaggcgtcgcgccgtttagaggctttgtgcaggcgcgcaaacagctaaaagaacaaggacagtcacttggagaagcacatttatacttcggctgccgttcacctcatgaagactatctgtatcaagaagagcttgaaaacgcccaaagcgaaggcatcattacgcttcataccgctttttctcgcatgccgaatcagccgaaaacatacgttcagcacgtaatggaacaagacggcaagaaattgattgaacttcttgatcaaggagcgcacttctatatttgcggagacggaattcaaatggcacctgccgttgaagcaacgcttatgaaaagctatgctgacgttcaccaagtgagtgaagcagacgctcgcttatggctgcagcagctagaagaaaaaggccgatacgcaaaagacgtgtggctgggg

SEQ ID NO: 1038 - protein, 1049 aa, synthetic construct
  REGION 1..1049: note = variant of P450 oxidase from Bacillus megaterium
MTIKEMPQPKTFGELKNLPLLNTDKPVQALMRIADELGEIFKFEAPGSVTRYLSSQRLIKEACDESRFDKNLSQGLKFARDFVGDGLVTSWTHEPNWKKAHNILVPSFSQHAMGRYHAMMVDIAVQLVQKWERLNADEHIEVSEDMTRLTLDTIGLCLFNYRFNSFYRDTPHPFIVSVVRALDEVMNKLQRANPDDPAYDENKRQCQEDIKVMNDYVDKIIADRKARGEQSHDLLTQMLNGKDPETGEPLDDGNIRQQIITFLIAGHQTTSGLLSFALYFLVKNPRVLQKVAEEAARVLVDPVPSYKQVKQLKYVGMVLNEALRLWPVAPMFSLYAKEDTVLGGEYPLTKGDEVMVLVPQLHRDKTIWGDDVEEFRPERFENPSAIPQHAFKPFGNGQRACIGQQFALHSATLVVGMMLKHFDFEDHTNYELVIKESRTLKPEGFVVKAKSKGIPLGGIPSPSTEQSAKKVRKKAENAHNTPLLVLYGSNAGTAEGTARDLADIAMSKGFAPQVATLDSHAGNLPREGAVLIVTASYNGHPPDNAKQFVDWLDQASADEVKGVRYSVFGCGDKNWAGTYQKVPAFIDETLAAKGAENIADRGEADASDDFEGAYEEWRDHMWSDVAAYFGLDIENSEDNKSTLSLQFVDSAADMPLAKMHGAFSTNVVASKELQQPGSARSTRHLEIELPKEASYQEGDHLGVIPRYYEGIVNRVTQRFGLSASQLIRLEAEEEKLAHLPLAKTVSVEELLQYVELQDPVTRTQLRAMAAKTVCPPHKVELEALLGKQAYKEQVLAKRLTMLELLEKYPACEMSFSEFIALLPSIRPRYYSISSSPRVDEKQASITVSVVSGPAWSGYGEYKGIASNYLAELQEGDTITCFISTPQSEFTLPKDPETPLIMVGPGTGVAPFRGFVQARKQLKEQGQSLGEAHLYFGCRSPHEDYLYQEELENAQSEGIITLHTAFSRMPNQPKTYVQHVMEQDGKKLIELLDQGAHFYICGDGIQMAPAVEATLMKSYADVHQVSEADARLWLQQLEEKGRYAKDVWLG

SEQ ID NO: 1039 - DNA, 3147 bp, synthetic construct
  misc_feature 1..3147: note = variant of P450 oxidase from Bacillus megaterium
  source 1..3147: mol_type = other DNA
atgacaattaaggaaatgcctcagcctaagacgtttggagaacttaaaaatttaccgttattaaatacagataaaccggttcaagctttgatgcgtattgcggatgaattaggagaaatctttaaattcgaggcgcctggtagcgtaacgcgctatttatcaagtcagcgtctaattaaagaagcatgcgatgaatcacgctttgataaaaacttaagtcaagggcttaaatttgcacgtgattttgttggagacgggctggttacaagctggacgcatgaaccgaattggaaaaaagcgcataatatcttagttccaagctttagtcagcatgcaatggggcgttatcatgcgatgatggtcgatatcgccgtgcagcttgttcaaaagtgggagcgtctaaatgcagatgagcatattgaagtatcggaagacatgacacgtttaacgcttgatacaattggtctttgcctgtttaactatcgctttaacagcttttaccgagatacgcctcatccatttattgtgagtgtggttcgtgcactggatgaagtaatgaacaagctgcagcgagcaaatccagacgacccagcttatgatgaaaacaagcgccagtgtcaagaagatatcaaggtgatgaacgactatgtagataaaattattgcagatcgcaaagcaaggggtgaacaaagtcatgatttattaacgcagatgctaaacggaaaagatccagaaacgggtgagccgcttgatgacgggaacattcgtcagcaaattattacattcttaattgcgggacaccaaacgacaagtggtcttttatcatttgcgctgtatttcttagtgaaaaatccacgtgtattacaaaaagtagcagaagaagcagcacgagttctagtagatcctgttccaagctacaaacaagtcaaacagcttaaatatgttggcatggtcttaaacgaagcgctgcgcttatggccagtagcgcctatgttttccctatatgcaaaagaagatacggtgcttggaggagaatatcctttaacgaaaggcgacgaagtaatggttctggtgcctcagcttcaccgtgataaaacaatttggggagacgatgtggaggagttccgtccagagcgttttgaaaatccaagtgcgattccgcagcatgcgtttaaaccgtttggaaacggtcagcgtgcgtgtatcggtcagcagttcgctcttcatagtgcaacgctggtacttggtatgatgctaaaacactttgactatgaagatcatacaaactacgagctcgttattaaagaatcgcggacgttaaaacctgaaggctttgtggtaaaagcaaaatcgaaaggcattccgcttggcggtattccttcacctagcactgaacagtctgctaaaaaagtacgcaaaaaggcagaaaacgctcataatacgccgctgcttgtgctatacggttcaaatgcgggaacagctgaaggaacggcgcgtgatttagcagatattgcaatgagcaaaggatttgcaccgcaggtcgcaacgcttgattcacacgccggtaatcttccgcgcgaaggagctgtattaattgtaacggcgtcttataacggtcatccgcctgataacgcaaagcaatttgtcgattggttagaccaagcgtctgcggatgaagtaaaaggcgttcgctactccgtatttggatgcggcgataaaaattgggcggggacgtatcaaaaagtgcctgcttttatcgatgaaacgcttgccgctaaaggggcagaaaacatcgctgaccgcggtgaagcagatgcaagcgacgactttgaaggcgcgtatgaagaatggcgtgatcatatgtggagtgacgtagcagcctactttggtctcgacattgaaaacagtgaagataataaatctactctttcacttcaatttgtcgacagcgcggcggatatgccgcttgcgaaaatgcacggtgcgttttcaacgaacgtcgtagcaagcaaagaacttcaacagcctggcagtgcacgaagcacgcgacatcttgaaattgaacttccaaaagaagcttcttatcaagaaggagatcatttaggtgttattcctcgctattatgaaggaatagtaaaccgtgtaacacagaggttcggcctaagcgcatcacagctgatccgtctggaagcagaagaagaaaaattagctcatttgccactcgctaaaacagtatccgtagaagagcttctgcaatacgtggagcttcaagatcctgttacgcgcacgcagcttcgcgcaatggctgctaaaacggtctgcccgccgcataaagtagagcttgaagccttgcttggcaagcaagcctacaaagaacaagtgctggcaaaacgtttaacaatgcttgaactgcttgaaaaatacccggcgtgtgaaatgagtttcagcgaatttatcgcccttctgccaagcatacgcccgcgctattactcgatttcttcatcacctcgtgtcgatgaaaaacaagcaagcatcacggtcagcgttgtctcaggaccggcgtggagcggatatggagaatataaaggaattgcgtcgaactatcttgctgagctgcaagaaggagatacgattacgtgctttatttccacaccgcagtcagagtttacgctgccaaaagaccctgaaacgccgcttatcatggtcggaccgggaacaggcgtcgcgccgtttagaggctttgtgcaggcgcgcaaacagctaaaagaacaaggacagtcacttggagaagcacatttatacttcggctgccgttcacctcatgaagactatctgtatcaagaagagcttgaaaacgcccaaagcgaaggcatcattacgcttcataccgctttttctcgcatgccgaatcagccgaaaacatacgttcagcacgtaatggaacaagacggcaagaaattgattgaacttcttgatcaaggagcgcacttctatatttgcggagacggaattcaaatggcacctgccgttgaagcaacgcttatgaaaagctatgctgacgttcaccaagtgagtgaagcagacgctcgcttatggctgcagcagctagaagaaaaaggccgatacgcaaaagacgtgtggctgggg

SEQ ID NO: 1040 - protein, 1049 aa, synthetic construct
  REGION 1..1049: note = variant of P450 oxidase from Bacillus megaterium
MTIKEMPQPKTFGELKNLPLLNTDKPVQALMRIADELGEIFKFEAPGSVTRYLSSQRLIKEACDESRFDKNLSQGLKFARDFVGDGLVTSWTHEPNWKKAHNILVPSFSQHAMGRYHAMMVDIAVQLVQKWERLNADEHIEVSEDMTRLTLDTIGLCLFNYRFNSFYRDTPHPFIVSVVRALDEVMNKLQRANPDDPAYDENKRQCQEDIKVMNDYVDKIIADRKARGEQSHDLLTQMLNGKDPETGEPLDDGNIRQQIITFLIAGHQTTSGLLSFALYFLVKNPRVLQKVAEEAARVLVDPVPSYKQVKQLKYVGMVLNEALRLWPVAPMFSLYAKEDTVLGGEYPLTKGDEVMVLVPQLHRDKTIWGDDVEEFRPERFENPSAIPQHAFKPFGNGQRACIGQQFALHSATLVLGMMLKHFDYEDHTNYELVIKESRTLKPEGFVVKAKSKGIPLGGIPSPSTEQSAKKVRKKAENAHNTPLLVLYGSNAGTAEGTARDLADIAMSKGFAPQVATLDSHAGNLPREGAVLIVTASYNGHPPDNAKQFVDWLDQASADEVKGVRYSVFGCGDKNWAGTYQKVPAFIDETLAAKGAENIADRGEADASDDFEGAYEEWRDHMWSDVAAYFGLDIENSEDNKSTLSLQFVDSAADMPLAKMHGAFSTNVVASKELQQPGSARSTRHLEIELPKEASYQEGDHLGVIPRYYEGIVNRVTQRFGLSASQLIRLEAEEEKLAHLPLAKTVSVEELLQYVELQDPVTRTQLRAMAAKTVCPPHKVELEALLGKQAYKEQVLAKRLTMLELLEKYPACEMSFSEFIALLPSIRPRYYSISSSPRVDEKQASITVSVVSGPAWSGYGEYKGIASNYLAELQEGDTITCFISTPQSEFTLPKDPETPLIMVGPGTGVAPFRGFVQARKQLKEQGQSLGEAHLYFGCRSPHEDYLYQEELENAQSEGIITLHTAFSRMPNQPKTYVQHVMEQDGKKLIELLDQGAHFYICGDGIQMAPAVEATLMKSYADVHQVSEADARLWLQQLEEKGRYAKDVWLG

SEQ ID NO: 1041 - DNA, 3147 bp, synthetic construct
  misc_feature 1..3147: note = variant of P450 oxidase from Bacillus megaterium
  source 1..3147: mol_type = other DNA
atgacaattaaggaaatgcctcagcctaagacgtttggagaacttaaaaatttaccgttattaaatacagataaaccggttcaagctttgatgcgtattgcggatgaattaggagaaatctttaaattcgaggcgcctggtagcgtaacgcgctatttatcaagtcagcgtctaattaaagaagcatgcgatgaatcacgctttgataaaaacttaagtcaagggcttaaatttgcacgtgattttgttggagacgggctggttacaagctggacgcatgaaccgaattggaaaaaagcgcataatatcttagttccaagctttagtcagcatgcaatggggcgttatcatgcgatgatggtcgatatcgccgtgcagcttgttcaaaagtggatgcgtctaaatgcagatgagcatattgaagtatcggaagacatgacacgtttaacgcttgatacaattggtctttgcctgtttaactatcgctttaacagcttttaccgagatacgcctcatccatttattgtgagtgtggttcgtgcactggatgaagtaatgaacaagctgcagcgagcaaatccagacgacccagcttatgatgaaaacaagcgccagtgtcaagaagatatcaaggtgatgaacgactatgtagataaaattattgcagatcgcaaagcaaggggtgaacaaagtcatgatttattaacgcagatgctaaacggaaaagatccagaaacgggtgagccgcttgatgacgggaacattcgtcagcaaattattacattcttaattgcgggacaccaaacgacaagtggtcttttatcatttgcgctgtatttcttagtgaaaaatccacgtgtattacaaaaagtagcagaagaagcagcacgagttctagtagatcctgttccaagctacaaacaagtcaaacagcttaaatatgttggcatggtcttaaacgaagcgctgcgcttatggccagtagcgcctatgttttccctatatgcaaaagaagatacggtgcttggaggagaatatcctttaacgaaaggcgacgaagtaatggttctggtgcctcagcttcaccgtgataaaacaatttggggagacgatgtggaggagttccgtccagagcgttttgaaaatccaagtgcgattccgcagcatgcgtttaaaccgtttggaaacggtcagcgtgcgtgtatcggtcagcagttcgctcttcatagtgcaacgctggtacttggtatgatgctaaaacactttgactttgaagatcatacaaactacgagctcgttattaaagaatcgcggacgttaaaacctgaaggctttgtggtaaaagcaaaatcgaaaggcattccgcttggcggtattccttcacctagcactgaacagtctgctaaaaaagtacgcaaaaaggcagaaaacgctcataatacgccgctgcttgtgctatacggttcaaatgcgggaacagctgaaggaacggcgcgtgatttagcagatattgcaatgagcaaaggatttgcaccgcaggtcgcaacgcttgattcacacgccggtaatcttccgcgcgaaggagctgtattaattgtaacggcgtcttataacggtcatccgcctgataacgcaaagcaatttgtcgattggttagaccaagcgtctgcggatgaagtaaaaggcgttcgctactccgtatttggatgcggcgataaaaattgggcggggacgtatcaaaaagtgcctgcttttatcgatgaaacgcttgccgctaaaggggcagaaaacatcgctgaccgcggtgaagcagatgcaagcgacgactttgaaggcgcgtatgaagaatggcgtgatcatatgtggagtgacgtagcagcctactttggtctcgacattgaaaacagtgaagataataaatctactctttcacttcaatttgtcgacagcgcggcggatatgccgcttgcgaaaatgcacggtgcgttttcaacgaacgtcgtagcaagcaaagaacttcaacagcctggcagtgcacgaagcacgcgacatcttgaaattgaacttccaaaagaagcttcttatcaagaaggagatcatttaggtgttattcctcgctattatgaaggaatagtaaaccgtgtaacacagaggttcggcctaagcgcatcacagctgatccgtctggaagcagaagaagaaaaattagctcatttgccactcgctaaaacagtatccgtagaagagcttctgcaatacgtggagcttcaagatcctgttacgcgcacgcagcttcgcgcaatggctgctaaaacggtctgcccgccgcataaagtagagcttgaagccttgcttggcaagcaagcctacaaagaacaagtgctggcaaaacgtttaacaatgcttgaactgcttgaaaaatacccggcgtgtgaaatgagtttcagcgaatttatcgcccttctgccaagcatacgcccgcgctattactcgatttcttcatcacctcgtgtcgatgaaaaacaagcaagcatcacggtcagcgttgtctcaggaccggcgtggagcggatatggagaatataaaggaattgcgtcgaactatcttgctgagctgcaagaaggagatacgattacgtgctttatttccacaccgcagtcagagtttacgctgccaaaagaccctgaaacgccgcttatcatggtcggaccgggaacaggcgtcgcgccgtttagaggctttgtgcaggcgcgcaaacagctaaaagaacaaggacagtcacttggagaagcacatttatacttcggctgccgttcacctcatgaagactatctgtatcaagaagagcttgaaaacgcccaaagcgaaggcatcattacgcttcataccgctttttctcgcatgccgaatcagccgaaaacatacgttcagcacgtaatggaacaagacggcaagaaattgattgaacttcttgatcaaggagcgcacttctatatttgcggagacggaattcaaatggcacctgccgttgaagcaacgcttatgaaaagctatgctgacgttcaccaagtgagtgaagcagacgctcgcttatggctgcagcagctagaagaaaaaggccgatacgcaaaagacgtgtggctgggg

SEQ ID NO: 1042 - protein, 1049 aa, synthetic construct
  REGION 1..1049: note = variant of P450 oxidase from Bacillus megaterium
MTIKEMPQPKTFGELKNLPLLNTDKPVQALMRIADELGEIFKFEAPGSVTRYLSSQRLIKEACDESRFDKNLSQGLKFARDFVGDGLVTSWTHEPNWKKAHNILVPSFSQHAMGRYHAMMVDIAVQLVQKWMRLNADEHIEVSEDMTRLTLDTIGLCLFNYRFNSFYRDTPHPFIVSVVRALDEVMNKLQRANPDDPAYDENKRQCQEDIKVMNDYVDKIIADRKARGEQSHDLLTQMLNGKDPETGEPLDDGNIRQQIITFLIAGHQTTSGLLSFALYFLVKNPRVLQKVAEEAARVLVDPVPSYKQVKQLKYVGMVLNEALRLWPVAPMFSLYAKEDTVLGGEYPLTKGDEVMVLVPQLHRDKTIWGDDVEEFRPERFENPSAIPQHAFKPFGNGQRACIGQQFALHSATLVLGMMLKHFDFEDHTNYELVIKESRTLKPEGFVVKAKSKGIPLGGIPSPSTEQSAKKVRKKAENAHNTPLLVLYGSNAGTAEGTARDLADIAMSKGFAPQVATLDSHAGNLPREGAVLIVTASYNGHPPDNAKQFVDWLDQASADEVKGVRYSVFGCGDKNWAGTYQKVPAFIDETLAAKGAENIADRGEADASDDFEGAYEEWRDHMWSDVAAYFGLDIENSEDNKSTLSLQFVDSAADMPLAKMHGAFSTNVVASKELQQPGSARSTRHLEIELPKEASYQEGDHLGVIPRYYEGIVNRVTQRFGLSASQLIRLEAEEEKLAHLPLAKTVSVEELLQYVELQDPVTRTQLRAMAAKTVCPPHKVELEALLGKQAYKEQVLAKRLTMLELLEKYPACEMSFSEFIALLPSIRPRYYSISSSPRVDEKQASITVSVVSGPAWSGYGEYKGIASNYLAELQEGDTITCFISTPQSEFTLPKDPETPLIMVGPGTGVAPFRGFVQARKQLKEQGQSLGEAHLYFGCRSPHEDYLYQEELENAQSEGIITLHTAFSRMPNQPKTYVQHVMEQDGKKLIELLDQGAHFYICGDGIQMAPAVEATLMKSYADVHQVSEADARLWLQQLEEKGRYAKDVWLG

SEQ ID NO: 1043 - DNA, 3147 bp, synthetic construct
  misc_feature 1..3147: note = variant of P450 oxidase from Bacillus megaterium
  source 1..3147: mol_type = other DNA
atgacaattaaggaaatgcctcagcctaagacgtttggagaacttaaaaatttaccgttattaaatacagataaaccggttcaagctttgatgcgtattgcggatgaattaggagaaatctttaaattcgaggcgcctggtagcgtaacgcgctatttatcaagtcagcgtctaattaaagaagcatgcgatgaatcacgctttgataaaaacttaagtcaagggcttaaatttgcacgtgattttgttggagacgggctggttacaagctggacgcatgaaccgaattggaaaaaagcgcataatatcttagttccaagctttagtcagcatgcaatggggcgttatcatgcgatgatggtcgatatcgccgtgcagcttgttcaaaagtgggagcgtctaaatgcagatgagcatattgaagtatcggaagacatgacacgtttaacgcttgatacaattggtctttgcctgtttaactatcgctttaacagcttttaccgagatacgcctcatccatttattgtgagtgtggttcgtgcactggatgaagtaatgaacaagctgcagcgagcaaatccagacgacccagcttatgatgaaaacaagcgccagtgtcaagaagatatcaaggtgatgaacgactatgtagataaaattattgcagatcgcaaagcaaggggtgaacaaagtcatgatttattaacgcagatgctaaacggaaaagatccagaaacgggtgagccgcttgatgacgggaacattcgtcagcaaattattacattcttaattgcgggacaccaaacgacaagtggtcttttatcatttgcgctgtatttcttagtgaaaaatccacgtgtattacaaaaagtagcagaagaagcagcacgagttctagtagatcctgttccaagctacaaacaagtcaaacagcttaaatatgttggcatggtcttaaacgaagcgctgcgcttatggccagtagcgcctatgttttccctatatgcaaaagaagatacggtgcttggaggagaatatcctttaacgaaaggcgacgaagtaatggttctggtgcctcagcttcaccgtgataaaattatttggggagacgatgtggaggagttccgtccagagcgttttgaaaatccaagtgcgattccgcagcatgcgtttaaaccgtttggaaacggtcagcgtgcgtgtatcggtcagcagttcgctcttcatagtgcaacgctggtacttggtatgatgctaaaacactttgactttgaagatcatacaaactacgagctcgttattaaagaatcgcggacgttaaaacctgaaggctttgtggtaaaagcaaaatcgaaaggcattccgcttggcggtattccttcacctagcactgaacagtctgctaaaaaagtacgcaaaaaggcagaaaacgctcataatacgccgctgcttgtgctatacggttcaaatgcgggaacagctgaaggaacggcgcgtgatttagcagatattgcaatgagcaaaggatttgcaccgcaggtcgcaacgcttgattcacacgccggtaatcttccgcgcgaaggagctgtattaattgtaacggcgtcttataacggtcatccgcctgataacgcaaagcaatttgtcgattggttagaccaagcgtctgcggatgaagtaaaaggcgttcgctactccgtatttggatgcggcgataaaaattgggcggggacgtatcaaaaagtgcctgcttttatcgatgaaacgcttgccgctaaaggggcagaaaacatcgctgaccgcggtgaagcagatgcaagcgacgactttgaaggcgcgtatgaagaatggcgtgatcatatgtggagtgacgtagcagcctactttggtctcgacattgaaaacagtgaagataataaatctactctttcacttcaatttgtcgacagcgcggcggatatgccgcttgcgaaaatgcacggtgcgttttcaacgaacgtcgtagcaagcaaagaacttcaacagcctggcagtgcacgaagcacgcgacatcttgaaattgaacttccaaaagaagcttcttatcaagaaggagatcatttaggtgttattcctcgctattatgaaggaatagtaaaccgtgtaacacagaggttcggcctaagcgcatcacagctgatccgtctggaagcagaagaagaaaaattagctcatttgccactcgctaaaacagtatccgtagaagagcttctgcaatacgtggagcttcaagatcctgttacgcgcacgcagcttcgcgcaatggctgctaaaacggtctgcccgccgcataaagtagagcttgaagccttgcttggcaagcaagcctacaaagaacaagtgctggcaaaacgtttaacaatgcttgaactgcttgaaaaatacccggcgtgtgaaatgagtttcagcgaatttatcgcccttctgccaagcatacgcccgcgctattactcgatttcttcatcacctcgtgtcgatgaaaaacaagcaagcatcacggtcagcgttgtctcaggaccggcgtggagcggatatggagaatataaaggaattgcgtcgaactatcttgctgagctgcaagaaggagatacgattacgtgctttatttccacaccgcagtcagagtttacgctgccaaaagaccctgaaacgccgcttatcatggtcggaccgggaacaggcgtcgcgccgtttagaggctttgtgcaggcgcgcaaacagctaaaagaacaaggacagtcacttggagaagcacatttatacttcggctgccgttcacctcatgaagactatctgtatcaagaagagcttgaaaacgcccaaagcgaaggcatcattacgcttcataccgctttttctcgcatgccgaatcagccgaaaacatacgttcagcacgtaatggaacaagacggcaagaaattgattgaacttcttgatcaaggagcgcacttctatatttgcggagacggaattcaaatggcacctgccgttgaagcaacgcttatgaaaagctatgctgacgttcaccaagtgagtgaagcagacgctcgcttatggctgcagcagctagaagaaaaaggccgatacgcaaaagacgtgtggctgggg

SEQ ID NO: 1044 - protein, 1049 aa, synthetic construct
  REGION 1..1049: note = variant of P450 oxidase from Bacillus megaterium
MTIKEMPQPKTFGELKNLPLLNTDKPVQALMRIADELGEIFKFEAPGSVTRYLSSQRLIKEACDESRFDKNLSQGLKFARDFVGDGLVTSWTHEPNWKKAHNILVPSFSQHAMGRYHAMMVDIAVQLVQKWERLNADEHIEVSEDMTRLTLDTIGLCLFNYRFNSFYRDTPHPFIVSVVRALDEVMNKLQRANPDDPAYDENKRQCQEDIKVMNDYVDKIIADRKARGEQSHDLLTQMLNGKDPETGEPLDDGNIRQQIITFLIAGHQTTSGLLSFALYFLVKNPRVLQKVAEEAARVLVDPVPSYKQVKQLKYVGMVLNEALRLWPVAPMFSLYAKEDTVLGGEYPLTKGDEVMVLVPQLHRDKIIWGDDVEEFRPERFENPSAIPQHAFKPFGNGQRACIGQQFALHSATLVLGMMLKHFDFEDHTNYELVIKESRTLKPEGFVVKAKSKGIPLGGIPSPSTEQSAKKVRKKAENAHNTPLLVLYGSNAGTAEGTARDLADIAMSKGFAPQVATLDSHAGNLPREGAVLIVTASYNGHPPDNAKQFVDWLDQASADEVKGVRYSVFGCGDKNWAGTYQKVPAFIDETLAAKGAENIADRGEADASDDFEGAYEEWRDHMWSDVAAYFGLDIENSEDNKSTLSLQFVDSAADMPLAKMHGAFSTNVVASKELQQPGSARSTRHLEIELPKEASYQEGDHLGVIPRYYEGIVNRVTQRFGLSASQLIRLEAEEEKLAHLPLAKTVSVEELLQYVELQDPVTRTQLRAMAAKTVCPPHKVELEALLGKQAYKEQVLAKRLTMLELLEKYPACEMSFSEFIALLPSIRPRYYSISSSPRVDEKQASITVSVVSGPAWSGYGEYKGIASNYLAELQEGDTITCFISTPQSEFTLPKDPETPLIMVGPGTGVAPFRGFVQARKQLKEQGQSLGEAHLYFGCRSPHEDYLYQEELENAQSEGIITLHTAFSRMPNQPKTYVQHVMEQDGKKLIELLDQGAHFYICGDGIQMAPAVEATLMKSYADVHQVSEADARLWLQQLEEKGRYAKDVWLG

SEQ ID NO: 1045 - DNA, 3147 bp, synthetic construct
  misc_feature 1..3147: note = variant of P450 oxidase from Bacillus megaterium
  source 1..3147: mol_type = other DNA
atgacaattaaggaaatgcctcagcctaagacgtttggagaacttaaaaatttaccgttattaaatacagataaaccggttcaagctttgatgcgtattgcggatgaattaggagaaatctttaaattcgaggcgcctggtagcgtaacgcgctatttatcaagtcagcgtctaattaaagaagcatgcgatgaatcacgctttgataaaaacttaagtcaagggcttaaatttgcacgtgattttgttggagacgggctggttacaagctggacgcatgaaccgaattggaaaaaagcgcataatatcttagttccaagctttagtcagcatgcaatggggcgttatcatgcgatgatggtcgatatcgccgtgcagcttgttcaaaagtgggagcgtctaaatgcagatgagcatattgaagtatcggaagacatgacacgtttaacgcttgatacaattggtctttgcctgtttaactatcgctttaacagcttttaccgagatacgcctcatccatttattgtgagtgtggttcgtgcactggatgaagtaatgaacaagctgcagcgagcaaatccagacgacccagcttatgatgaaaacaagcgccagtgtcaagaagatatcaaggtgatgaacgactatgtagataaaattattgcagatcgcaaagcaaggggtgaacaaagtcatgatttattaacgcagatgctaaacggaaaagatccagaaacgggtgagccgcttgatgacgggaacattcgtcagcaaattattacattcttaattgcgggacaccaaacgacaagtggtcttttatcatttgcgctgtatttcttagtgaaaaatccacgtgtattacaaaaagtagcagaagaagcagcacgagttctagtagatccttggccaagctacaaacaagtcaaacagcttaaatatgttggcatggtcttaaacgaagcgctgcgcttatggccagtagcgcctatgttttccctatatgcaaaagaagatacggtgcttggaggagaatatcctttaacgaaaggcgacgaagtaatggttctggtgcctcagcttcaccgtgataaaacaatttggggagacgatgtggaggagttccgtccagagcgttttgaaaatccaagtgcgattccgcagcatgcgtttaaaccgtttggaaacggtcagcgtgcgtgtatcggtcagcagttcgctcttcatagtgcaacgctggtacttggtatgatgctaaaacactttgactttgaagatcatacaaactacgagctcgttattaaagaatcgcggacgttaaaacctgaaggctttgtggtaaaagcaaaatcgaaaggcattccgcttggcggtattccttcacctagcactgaacagtctgctaaaaaagtacgcaaaaaggcagaaaacgctcataatacgccgctgcttgtgctatacggttcaaatgcgggaacagctgaaggaacggcgcgtgatttagcagatattgcaatgagcaaaggatttgcaccgcaggtcgcaacgcttgattcacacgccggtaatcttccgcgcgaaggagctgtattaattgtaacggcgtcttataacggtcatccgcctgataacgcaaagcaatttgtcgattggttagaccaagcgtctgcggatgaagtaaaaggcgttcgctactccgtatttggatgcggcgataaaaattgggcggggacgtatcaaaaagtgcctgcttttatcgatgaaacgcttgccgctaaaggggcagaaaacatcgctgaccgcggtgaagcagatgcaagcgacgactttgaaggcgcgtatgaagaatggcgtgatcatatgtggagtgacgtagcagcctactttggtctcgacattgaaaacagtgaagataataaatctactctttcacttcaatttgtcgacagcgcggcggatatgccgcttgcgaaaatgcacggtgcgttttcaacgaacgtcgtagcaagcaaagaacttcaacagcctggcagtgcacgaagcacgcgacatcttgaaattgaacttccaaaagaagcttcttatcaagaaggagatcatttaggtgttattcctcgctattatgaaggaatagtaaaccgtgtaacacagaggttcggcctaagcgcatcacagctgatccgtctggaagcagaagaagaaaaattagctcatttgccactcgctaaaacagtatccgtagaagagcttctgcaatacgtggagcttcaagatcctgttacgcgcacgcagcttcgcgcaatggctgctaaaacggtctgcccgccgcataaagtagagcttgaagccttgcttggcaagcaagcctacaaagaacaagtgctggcaaaacgtttaacaatgcttgaactgcttgaaaaatacccggcgtgtgaaatgagtttcagcgaatttatcgcccttctgccaagcatacgcccgcgctattactcgatttcttcatcacctcgtgtcgatgaaaaacaagcaagcatcacggtcagcgttgtctcaggaccggcgtggagcggatatggagaatataaaggaattgcgtcgaactatcttgctgagctgcaagaaggagatacgattacgtgctttatttccacaccgcagtcagagtttacgctgccaaaagaccctgaaacgccgcttatcatggtcggaccgggaacaggcgtcgcgccgtttagaggctttgtgcaggcgcgcaaacagctaaaagaacaaggacagtcacttggagaagcacatttatacttcggctgccgttcacctcatgaagactatctgtatcaagaagagcttgaaaacgcccaaagcgaaggcatcattacgcttcataccgctttttctcgcatgccgaatcagccgaaaacatacgttcagcacgtaatggaacaagacggcaagaaattgattgaacttcttgatcaaggagcgcacttctatatttgcggagacggaattcaaatggcacctgccgttgaagcaacgcttatgaaaagctatgctgacgttcaccaagtgagtgaagcagacgctcgcttatggctgcagcagctagaagaaaaaggccgatacgcaaaagacgtgtggctgggg

SEQ ID NO: 1046 - protein, 1049 aa, synthetic construct
  REGION 1..1049: note = variant of P450 oxidase from Bacillus megaterium
MTIKEMPQPKTFGELKNLPLLNTDKPVQALMRIADELGEIFKFEAPGSVTRYLSSQRLIKEACDESRFDKNLSQGLKFARDFVGDGLVTSWTHEPNWKKAHNILVPSFSQHAMGRYHAMMVDIAVQLVQKWERLNADEHIEVSEDMTRLTLDTIGLCLFNYRFNSFYRDTPHPFIVSVVRALDEVMNKLQRANPDDPAYDENKRQCQEDIKVMNDYVDKIIADRKARGEQSHDLLTQMLNGKDPETGEPLDDGNIRQQIITFLIAGHQTTSGLLSFALYFLVKNPRVLQKVAEEAARVLVDPWPSYKQVKQLKYVGMVLNEALRLWPVAPMFSLYAKEDTVLGGEYPLTKGDEVMVLVPQLHRDKTIWGDDVEEFRPERFENPSAIPQHAFKPFGNGQRACIGQQFALHSATLVLGMMLKHFDFEDHTNYELVIKESRTLKPEGFVVKAKSKGIPLGGIPSPSTEQSAKKVRKKAENAHNTPLLVLYGSNAGTAEGTARDLADIAMSKGFAPQVATLDSHAGNLPREGAVLIVTASYNGHPPDNAKQFVDWLDQASADEVKGVRYSVFGCGDKNWAGTYQKVPAFIDETLAAKGAENIADRGEADASDDFEGAYEEWRDHMWSDVAAYFGLDIENSEDNKSTLSLQFVDSAADMPLAKMHGAFSTNVVASKELQQPGSARSTRHLEIELPKEASYQEGDHLGVIPRYYEGIVNRVTQRFGLSASQLIRLEAEEEKLAHLPLAKTVSVEELLQYVELQDPVTRTQLRAMAAKTVCPPHKVELEALLGKQAYKEQVLAKRLTMLELLEKYPACEMSFSEFIALLPSIRPRYYSISSSPRVDEKQASITVSVVSGPAWSGYGEYKGIASNYLAELQEGDTITCFISTPQSEFTLPKDPETPLIMVGPGTGVAPFRGFVQARKQLKEQGQSLGEAHLYFGCRSPHEDYLYQEELENAQSEGIITLHTAFSRMPNQPKTYVQHVMEQDGKKLIELLDQGAHFYICGDGIQMAPAVEATLMKSYADVHQVSEADARLWLQQLEEKGRYAKDVWLG

SEQ ID NO: 1047 - DNA, 3147 bp, synthetic construct
  misc_feature 1..3147: note = variant of P450 oxidase from Bacillus megaterium
  source 1..3147: mol_type = other DNA
atgacaattaaggaaatgcctcagcctaagacgtttggagaacttaaaaatttaccgttattaaatacagataaaccggttcaagctttgatgcgtattgcggatgaattaggagaaatctttaaattcgaggcgcctggtagcgtaacgcgctatttatcaagtcagcgtctaattaaagaagcatgcgatgaatcacgctttgataaaaacttaagtcaagggcttaaatttgcacgtgattttgttggagacgggctggttacaagctggacgcatgaaccgaattggaaaaaagcgcataatatcttagttccaagctttagtcagcatgcaatggggcgttatcatgcgatgatggtcgatatcgccgtgcagcttgttcaaaagtgggagcgtctaaatgcagatgagcatattgaagtatcggaagacatgacacgtttaacgcttgatacaattggtctttgcctgtttaactatcgctttaacagcttttaccgagatacgcctcatccatttattgtgagtgtggttcgtgcactggatgaagtaatgaacaagctgcagcgagcaaatccagacgacccagcttatgatgaaaacaagcgccagtgtcaagaagatatcaaggtgatgaacgactatgtagataaaattattgcagatcgcaaagcaaggggtgaacaaagtcatgatttattaacgcagatgctaaacggaaaagatccagaaacgggtgagccgcttgatgacgggaacattcgtcagcaaattattacattcttaattgcgggacaccaaacgacaagtggtcttttatcatttgcgctgtatttcttagtgaaaaatccacgtgtattacaaaaagtagcagaagaaagtgcacgagttctagtagatcctgttccaagctacaaacaagtcaaacagcttaaatatgttggcatggtcttaaacgaagcgctgcgcttatggccagtagcgcctatgttttccctatatgcaaaagaagatacggtgcttggaggagaatatcctttaacgaaaggcgacgaagtaatggttctggtgcctcagcttcaccgtgataaaacaatttggggagacgatgtggaggagttccgtccagagcgttttgaaaatccaagtgcgattccgcagcatgcgtttaaaccgtttggaaacggtcagcgtgcgtgtatcggtcagcagttcgctcttcatagtgcaacgctggtacttggtatgatgctaaaacactttgactttgaagatcatacaaactacgagctcgttattaaagaatcgcggacgttaaaacctgaaggctttgtggtaaaagcaaaatcgaaaggcattccgcttggcggtattccttcacctagcactgaacagtctgctaaaaaagtacgcaaaaaggcagaaaacgctcataatacgccgctgcttgtgctatacggttcaaatgcgggaacagctgaaggaacggcgcgtgatttagcagatattgcaatgagcaaaggatttgcaccgcaggtcgcaacgcttgattcacacgccggtaatcttccgcgcgaaggagctgtattaattgtaacggcgtcttataacggtcatccgcctgataacgcaaagcaatttgtcgattggttagaccaagcgtctgcggatgaagtaaaaggcgttcgctactccgtatttggatgcggcgataaaaattgggcggggacgtatcaaaaagtgcctgcttttatcgatgaaacgcttgccgctaaaggggcagaaaacatcgctgaccgcggtgaagcagatgcaagcgacgactttgaaggcgcgtatgaagaatggcgtgatcatatgtggagtgacgtagcagcctactttggtctcgacattgaaaacagtgaagataataaatctactctttcacttcaatttgtcgacagcgcggcggatatgccgcttgcgaaaatgcacggtgcgttttcaacgaacgtcgtagcaagcaaagaacttcaacagcctggcagtgcacgaagcacgcgacatcttgaaattgaacttccaaaagaagcttcttatcaagaaggagatcatttaggtgttattcctcgctattatgaaggaatagtaaaccgtgtaacacagaggttcggcctaagcgcatcacagctgatccgtctggaagcagaagaagaaaaattagctcatttgccactcgctaaaacagtatccgtagaagagcttctgcaatacgtggagcttcaagatcctgttacgcgcacgcagcttcgcgcaatggctgctaaaacggtctgcccgccgcataaagtagagcttgaagccttgcttggcaagcaagcctacaaagaacaagtgctggcaaaacgtttaacaatgcttgaactgcttgaaaaatacccggcgtgtgaaatgagtttcagcgaatttatcgcccttctgccaagcatacgcccgcgctattactcgatttcttcatcacctcgtgtcgatgaaaaacaagcaagcatcacggtcagcgttgtctcaggaccggcgtggagcggatatggagaatataaaggaattgcgtcgaactatcttgctgagctgcaagaaggagatacgattacgtgctttatttccacaccgcagtcagagtttacgctgccaaaagaccctgaaacgccgcttatcatggtcggaccgggaacaggcgtcgcgccgtttagaggctttgtgcaggcgcgcaaacagctaaaagaacaaggacagtcacttggagaagcacatttatacttcggctgccgttcacctcatgaagactatctgtatcaagaagagcttgaaaacgcccaaagcgaaggcatcattacgcttcataccgctttttctcgcatgccgaatcagccgaaaacatacgttcagcacgtaatggaacaagacggcaagaaattgattgaacttcttgatcaaggagcgcacttctatatttgcggagacggaattcaaatggcacctgccgttgaagcaacgcttatgaaaagctatgctgacgttcaccaagtgagtgaagcagacgctcgcttatggctgcagcagctagaagaaaaaggccgatacgcaaaagacgtgtggctgggg

SEQ ID NO: 1048 - protein, 1049 aa, synthetic construct
  REGION 1..1049: note = variant of P450 oxidase from Bacillus megaterium
MTIKEMPQPKTFGELKNLPLLNTDKPVQALMRIADELGEIFKFEAPGSVTRYLSSQRLIKEACDESRFDKNLSQGLKFARDFVGDGLVTSWTHEPNWKKAHNILVPSFSQHAMGRYHAMMVDIAVQLVQKWERLNADEHIEVSEDMTRLTLDTIGLCLFNYRFNSFYRDTPHPFIVSVVRALDEVMNKLQRANPDDPAYDENKRQCQEDIKVMNDYVDKIIADRKARGEQSHDLLTQMLNGKDPETGEPLDDGNIRQQIITFLIAGHQTTSGLLSFALYFLVKNPRVLQKVAEESARVLVDPVPSYKQVKQLKYVGMVLNEALRLWPVAPMFSLYAKEDTVLGGEYPLTKGDEVMVLVPQLHRDKTIWGDDVEEFRPERFENPSAIPQHAFKPFGNGQRACIGQQFALHSATLVLGMMLKHFDFEDHTNYELVIKESRTLKPEGFVVKAKSKGIPLGGIPSPSTEQSAKKVRKKAENAHNTPLLVLYGSNAGTAEGTARDLADIAMSKGFAPQVATLDSHAGNLPREGAVLIVTASYNGHPPDNAKQFVDWLDQASADEVKGVRYSVFGCGDKNWAGTYQKVPAFIDETLAAKGAENIADRGEADASDDFEGAYEEWRDHMWSDVAAYFGLDIENSEDNKSTLSLQFVDSAADMPLAKMHGAFSTNVVASKELQQPGSARSTRHLEIELPKEASYQEGDHLGVIPRYYEGIVNRVTQRFGLSASQLIRLEAEEEKLAHLPLAKTVSVEELLQYVELQDPVTRTQLRAMAAKTVCPPHKVELEALLGKQAYKEQVLAKRLTMLELLEKYPACEMSFSEFIALLPSIRPRYYSISSSPRVDEKQASITVSVVSGPAWSGYGEYKGIASNYLAELQEGDTITCFISTPQSEFTLPKDPETPLIMVGPGTGVAPFRGFVQARKQLKEQGQSLGEAHLYFGCRSPHEDYLYQEELENAQSEGIITLHTAFSRMPNQPKTYVQHVMEQDGKKLIELLDQGAHFYICGDGIQMAPAVEATLMKSYADVHQVSEADARLWLQQLEEKGRYAKDVWLG

SEQ ID NO: 1049 - DNA, 3147 bp, synthetic construct
  misc_feature 1..3147: note = variant of P450 oxidase from Bacillus megaterium
  source 1..3147: mol_type = other DNA
atgacaattaaggaaatgcctcagcctaagacgtttggagaacttaaaaatttaccgttattaaatacagataaaccggttcaagctttgatgcgtattgcggatgaattaggagaaatctttaaattcgaggcgcctggtagcgtaacgcgctatttatcaagtcagcgtctaattaaagaagcatgcgatgaatcacgctttgataaaaacttaagtcaagggcttaaatttgcacgtgattttgttggagacgggctggttacaagctggacgcatgaaccgaattggaaaaaagcgcataatatcttagttccaagctttagtcagcatgcaatggggcgttatcatgcgatgatggtcgatatcgccgtgcagcttgttcaaaagtgggagcgtctaaatgcagatgagcatattgaagtatcggaagacatgacacgtttaacgcttgatacaattggtctttgcctgtttaactatcgctttaacagcttttaccgagatacgcctcatccatttattgtgagtgtggttcgtgcactggatgaagtaatgaacaagctgcagcgagcaaatccagacgacccagcttatgatgaaaacaagcgccagtgtcaagaagatatcaaggtgatgaacgactatgtagataaaattattgcagatcgcaaagcaaggggtgaagatagtcatgatttattaacgcagatgctaaacggaaaagatccagaaacgggtgagccgcttgatgacgggaacattcgtcagcaaattattacattcttaattgcgggacaccaaacgacaagtggtcttttatcatttgcgctgtatttcttagtgaaaaatccacgtgtattacaaaaagtagcagaagaagcagcacgagttctagtagatcctgttccaagctacaaacaagtcaaacagcttaaatatgttggcatggtcttaaacgaagcgctgcgcttatggccagtagcgcctatgttttccctatatgcaaaagaagatacggtgcttggaggagaatatcctttaacgaaaggcgacgaagtaatggttctggtgcctcagcttcaccgtgataaaacaatttggggagacgatgtggaggagttccgtccagagcgttttgaaaatccaagtgcgattccgcagcatgcgtttaaaccgtttggaaacggtcagcgtgcgtgtatcggtcagcagttcgctcttcatagtgcaacgctggtacttggtatgatgctaaaacactttgactttgaagatcatacaaactacgagctcgttattaaagaatcgcggacgttaaaacctgaaggctttgtggtaaaagcaaaatcgaaaggcattccgcttggcggtattccttcacctagcactgaacagtctgctaaaaaagtacgcaaaaaggcagaaaacgctcataatacgccgctgcttgtgctatacggttcaaatgcgggaacagctgaaggaacggcgcgtgatttagcagatattgcaatgagcaaaggatttgcaccgcaggtcgcaacgcttgattcacacgccggtaatcttccgcgcgaaggagctgtattaattgtaacggcgtcttataacggtcatccgcctgataacgcaaagcaatttgtcgattggttagaccaagcgtctgcggatgaagtaaaaggcgttcgctactccgtatttggatgcggcgataaaaattgggcggggacgtatcaaaaagtgcctgcttttatcgatgaaacgcttgccgctaaaggggcagaaaacatcgctgaccgcggtgaagcagatgcaagcgacgactttgaaggcgcgtatgaagaatggcgtgatcatatgtggagtgacgtagcagcctactttggtctcgacattgaaaacagtgaagataataaatctactctttcacttcaatttgtcgacagcgcggcggatatgccgcttgcgaaaatgcacggtgcgttttcaacgaacgtcgtagcaagcaaagaacttcaacagcctggcagtgcacgaagcacgcgacatcttgaaattgaacttccaaaagaagcttcttatcaagaaggagatcatttaggtgttattcctcgctattatgaaggaatagtaaaccgtgtaacacagaggttcggcctaagcgcatcacagctgatccgtctggaagcagaagaagaaaaattagctcatttgccactcgctaaaacagtatccgtagaagagcttctgcaatacgtggagcttcaagatcctgttacgcgcacgcagcttcgcgcaatggctgctaaaacggtctgcccgccgcataaagtagagcttgaagccttgcttggcaagcaagcctacaaagaacaagtgctggcaaaacgtttaacaatgcttgaactgcttgaaaaatacccggcgtgtgaaatgagtttcagcgaatttatcgcccttctgccaagcatacgcccgcgctattactcgatttcttcatcacctcgtgtcgatgaaaaacaagcaagcatcacggtcagcgttgtctcaggaccggcgtggagcggatatggagaatataaaggaattgcgtcgaactatcttgctgagctgcaagaaggagatacgattacgtgctttatttccacaccgcagtcagagtttacgctgccaaaagaccctgaaacgccgcttatcatggtcggaccgggaacaggcgtcgcgccgtttagaggctttgtgcaggcgcgcaaacagctaaaagaacaaggacagtcacttggagaagcacatttatacttcggctgccgttcacctcatgaagactatctgtatcaagaagagcttgaaaacgcccaaagcgaaggcatcattacgcttcataccgctttttctcgcatgccgaatcagccgaaaacatacgttcagcacgtaatggaacaagacggcaagaaattgattgaacttcttgatcaaggagcgcacttctatatttgcggagacggaattcaaatggcacctgccgttgaagcaacgcttatgaaaagctatgctgacgttcaccaagtgagtgaagcagacgctcgcttatggctgcagcagctagaagaaaaaggccgatacgcaaaagacgtgtggctgggg

SEQ ID NO: 1050 - protein, 1049 aa, synthetic construct
  REGION 1..1049: note = variant of P450 oxidase from Bacillus megaterium
MTIKEMPQPKTFGELKNLPLLNTDKPVQALMRIADELGEIFKFEAPGSVTRYLSSQRLIKEACDESRFDKNLSQGLKFARDFVGDGLVTSWTHEPNWKKAHNILVPSFSQHAMGRYHAMMVDIAVQLVQKWERLNADEHIEVSEDMTRLTLDTIGLCLFNYRFNSFYRDTPHPFIVSVVRALDEVMNKLQRANPDDPAYDENKRQCQEDIKVMNDYVDKIIADRKARGEDSHDLLTQMLNGKDPETGEPLDDGNIRQQIITFLIAGHQTTSGLLSFALYFLVKNPRVLQKVAEEAARVLVDPVPSYKQVKQLKYVGMVLNEALRLWPVAPMFSLYAKEDTVLGGEYPLTKGDEVMVLVPQLHRDKTIWGDDVEEFRPERFENPSAIPQHAFKPFGNGQRACIGQQFALHSATLVLGMMLKHFDFEDHTNYELVIKESRTLKPEGFVVKAKSKGIPLGGIPSPSTEQSAKKVRKKAENAHNTPLLVLYGSNAGTAEGTARDLADIAMSKGFAPQVATLDSHAGNLPREGAVLIVTASYNGHPPDNAKQFVDWLDQASADEVKGVRYSVFGCGDKNWAGTYQKVPAFIDETLAAKGAENIADRGEADASDDFEGAYEEWRDHMWSDVAAYFGLDIENSEDNKSTLSLQFVDSAADMPLAKMHGAFSTNVVASKELQQPGSARSTRHLEIELPKEASYQEGDHLGVIPRYYEGIVNRVTQRFGLSASQLIRLEAEEEKLAHLPLAKTVSVEELLQYVELQDPVTRTQLRAMAAKTVCPPHKVELEALLGKQAYKEQVLAKRLTMLELLEKYPACEMSFSEFIALLPSIRPRYYSISSSPRVDEKQASITVSVVSGPAWSGYGEYKGIASNYLAELQEGDTITCFISTPQSEFTLPKDPETPLIMVGPGTGVAPFRGFVQARKQLKEQGQSLGEAHLYFGCRSPHEDYLYQEELENAQSEGIITLHTAFSRMPNQPKTYVQHVMEQDGKKLIELLDQGAHFYICGDGIQMAPAVEATLMKSYADVHQVSEADARLWLQQLEEKGRYAKDVWLG

SEQ ID NO: 1051 - DNA, 3147 bp, synthetic construct
  misc_feature 1..3147: note = variant of P450 oxidase from Bacillus megaterium
  source 1..3147: mol_type = other DNA
atgacaattaaggaaatgcctcagcctaagacgtttggagaacttaaaaatttaccgttattaaatacagataaaccggttcaagctttgatgcgtattgcggatgaattaggagaaatctttaaattcgaggcgcctggtagcgtaacgcgctatttatcaagtcagcgtctaattaaagaagcatgcgatgaatcacgctttgataaaaacttaagtcaagggcttaaatttgcacgtgattttgttggagacgggctggttacaagctggacgcatgaaccgaattggaaaaaagcgcataatatcttagttccaagctttagtcagcatgcaatggggcgttatcatgcgatgatggtcgatatcgccgtgcagcttgttcaaaagtgggagcgtctaaatgcagatgagcatattgaagtatcggaagacatgacacgtttaacgcttgatacaattggtctttgcctgtttaactatcgctttaacagcttttaccgagatacgcctcatccatttattgtgagtgtggttcgtgcactggatgaagtaatgaacaagctgcagcgagcaaatccagacgacccagcttatgatgaaaacaagcgccagtgtcaagaagatatcaaggtgatgaacgactatgtagataaaattattgcagatcgcaaagcaaggggtgaacaaagtcatgatttattaacgcagatgctaaacggaaaagatccagaaacgggtgagccgcttgatgacgggaacattcgtcagcaaattattacattcttaattgcgggacaccaaacgacaagtggtcttttatcatttgcgctgtatttcttagtgaaaaatccacgtgtattacaaaaagtagcagaagaagcagcacgagttctagtagatcctgttccaagctacaaacaagtcaaacagcttaaatatgttggcatggtcttaaacgaagcgctgcgcttatggccagtagcgcctatgttttccctatatgcaaaagaagatacggtgcttggaggagaatatcctttaacgaaaggcgacgaagtaatggttctggtgcctcagcttcaccgtgataaaacaatttggggagacgatgtggaggagttccgtccagagcgttttgaaaatccaagtgcgattccgcagcatgcgtttaaaccgtttggaaacggtcagcgtgcgtgtatcggtcagcagttcgctcttcatagtgcaacgctggtacttggtatgatgctaaaacactttgactttgaagatcatacaaactacgagctcgatattaaagaatcgcggacgttaaaacctgaaggctttgtggtaaaagcaaaatcgaaaggcattccgcttggcggtattccttcacctagcactgaacagtctgctaaaaaagtacgcaaaaaggcagaaaacgctcataatacgccgctgcttgtgctatacggttcaaatgcgggaacagctgaaggaacggcgcgtgatttagcagatattgcaatgagcaaaggatttgcaccgcaggtcgcaacgcttgattcacacgccggtaatcttccgcgcgaaggagctgtattaattgtaacggcgtcttataacggtcatccgcctgataacgcaaagcaatttgtcgattggttagaccaagcgtctgcggatgaagtaaaaggcgttcgctactccgtatttggatgcggcgataaaaattgggcggggacgtatcaaaaagtgcctgcttttatcgatgaaacgcttgccgctaaaggggcagaaaacatcgctgaccgcggtgaagcagatgcaagcgacgactttgaaggcgcgtatgaagaatggcgtgatcatatgtggagtgacgtagcagcctactttggtctcgacattgaaaacagtgaagataataaatctactctttcacttcaatttgtcgacagcgcggcggatatgccgcttgcgaaaatgcacggtgcgttttcaacgaacgtcgtagcaagcaaagaacttcaacagcctggcagtgcacgaagcacgcgacatcttgaaattgaacttccaaaagaagcttcttatcaagaaggagatcatttaggtgttattcctcgctattatgaaggaatagtaaaccgtgtaacacagaggttcggcctaagcgcatcacagctgatccgtctggaagcagaagaagaaaaattagctcatttgccactcgctaaaacagtatccgtagaagagcttctgcaatacgtggagcttcaagatcctgttacgcgcacgcagcttcgcgcaatggctgctaaaacggtctgcccgccgcataaagtagagcttgaagccttgcttggcaagcaagcctacaaagaacaagtgctggcaaaacgtttaacaatgcttgaactgcttgaaaaatacccggcgtgtgaaatgagtttcagcgaatttatcgcccttctgccaagcatacgcccgcgctattactcgatttcttcatcacctcgtgtcgatgaaaaacaagcaagcatcacggtcagcgttgtctcaggaccggcgtggagcggatatggagaatataaaggaattgcgtcgaactatcttgctgagctgcaagaaggagatacgattacgtgctttatttccacaccgcagtcagagtttacgctgccaaaagaccctgaaacgccgcttatcatggtcggaccgggaacaggcgtcgcgccgtttagaggctttgtgcaggcgcgcaaacagctaaaagaacaaggacagtcacttggagaagcacatttatacttcggctgccgttcacctcatgaagactatctgtatcaagaagagcttgaaaacgcccaaagcgaaggcatcattacgcttcataccgctttttctcgcatgccgaatcagccgaaaacatacgttcagcacgtaatggaacaagacggcaagaaattgattgaacttcttgatcaaggagcgcacttctatatttgcggagacggaattcaaatggcacctgccgttgaagcaacgcttatgaaaagctatgctgacgttcaccaagtgagtgaagcagacgctcgcttatggctgcagcagctagaagaaaaaggccgatacgcaaaagacgtgtggctgggg

SEQ ID NO: 1052 - protein, 1049 aa, synthetic construct
  REGION 1..1049: note = variant of P450 oxidase from Bacillus megaterium
MTIKEMPQPKTFGELKNLPLLNTDKPVQALMRIADELGEIFKFEAPGSVTRYLSSQRLIKEACDESRFDKNLSQGLKFARDFVGDGLVTSWTHEPNWKKAHNILVPSFSQHAMGRYHAMMVDIAVQLVQKWERLNADEHIEVSEDMTRLTLDTIGLCLFNYRFNSFYRDTPHPFIVSVVRALDEVMNKLQRANPDDPAYDENKRQCQEDIKVMNDYVDKIIADRKARGEQSHDLLTQMLNGKDPETGEPLDDGNIRQQIITFLIAGHQTTSGLLSFALYFLVKNPRVLQKVAEEAARVLVDPVPSYKQVKQLKYVGMVLNEALRLWPVAPMFSLYAKEDTVLGGEYPLTKGDEVMVLVPQLHRDKTIWGDDVEEFRPERFENPSAIPQHAFKPFGNGQRACIGQQFALHSATLVLGMMLKHFDFEDHTNYELDIKESRTLKPEGFVVKAKSKGIPLGGIPSPSTEQSAKKVRKKAENAHNTPLLVLYGSNAGTAEGTARDLADIAMSKGFAPQVATLDSHAGNLPREGAVLIVTASYNGHPPDNAKQFVDWLDQASADEVKGVRYSVFGCGDKNWAGTYQKVPAFIDETLAAKGAENIADRGEADASDDFEGAYEEWRDHMWSDVAAYFGLDIENSEDNKSTLSLQFVDSAADMPLAKMHGAFSTNVVASKELQQPGSARSTRHLEIELPKEASYQEGDHLGVIPRYYEGIVNRVTQRFGLSASQLIRLEAEEEKLAHLPLAKTVSVEELLQYVELQDPVTRTQLRAMAAKTVCPPHKVELEALLGKQAYKEQVLAKRLTMLELLEKYPACEMSFSEFIALLPSIRPRYYSISSSPRVDEKQASITVSVVSGPAWSGYGEYKGIASNYLAELQEGDTITCFISTPQSEFTLPKDPETPLIMVGPGTGVAPFRGFVQARKQLKEQGQSLGEAHLYFGCRSPHEDYLYQEELENAQSEGIITLHTAFSRMPNQPKTYVQHVMEQDGKKLIELLDQGAHFYICGDGIQMAPAVEATLMKSYADVHQVSEADARLWLQQLEEKGRYAKDVWLG

SEQ ID NO: 1053 - DNA, 3147 bp, synthetic construct
  misc_feature 1..3147: note = variant of P450 oxidase from Bacillus megaterium
  source 1..3147: mol_type = other DNA
atgacaattaaggaaatgcctcagcctaagacgtttggagaacttaaaaatttaccgttattaaatacagataaaccggttcaagctttgatgcgtattgcggatgaattaggagaaatctttaaattcgaggcgcctggtagcgtaacgcgctatttatcaagtcagcgtctaattaaagaagcatgcgatgaatcacgctttgataaaaacttaagtcaagggcttaaatttgcacgtgattttgttggagacgggctggttacaagctggacgcatgaaccgaattggaaaaaagcgcataatatcttagttccaagctttagtcagcatgcaatggggcgttatcatgcgatgatggtcgatatcgccgtgcagcttgttcaaaagtgggagcgtctaaatgcagatgagcatattgaagtatcggaagacatgacacgtttaacgcttgatacaattggtctttgcctgtttaactatcgctttaacagcttttaccgagatacgcctcatccatttattgtgagtgtggttcgtgcactggatgaagtaatgaacaagctgcagcgagcaaatccagacgacccagcttatgatgaaaacaagcgccagtgtcaagaagatatcaaggtgatgaacgactatgtagataaaattattgcagatcgcaaagcaaggggtgaacaaagtcatgatttattaacgcagatgctaaacggaaaagatccagaaacgggtgagccgcttgatgacgggaacattcgtcagcaaattattacattcttaattgcgggacaccaaacgacaagtggtcttttatcatttgcgctgtatttcttagtgaaaaatccacgtgtattacaaaaagtagcagaagaagcagcacgagttctagtagatcctgttccaagctacaaacaagtcaaacagcttaaatatgttggcatggtcttaaacgaagcgctgcgcttatggccagtagcgcctatgttttccctatatgcaaaagaagatacggtgcttggaggagaatatcctttaacgaaaggcgacgaagtaatggttctggtgcctcagcttcaccgtgataaaacaatttggggagacgatgtggaggagttccgtccagagcgttttgaaaatccaagtgcgattccgcagcatgcgtttaaaccgtttggaaacggtcagcgtgcgtgtatcggtcagcagttcgctcttcatagtgcaacgctggtacttggtgtgatgctaaaacactttgactttgaagatcatacaaactacgagctcgttattaaagaatcgcggacgttaaaacctgaaggctttgtggtaaaagcaaaatcgaaaggcattccgcttggcggtattccttcacctagcactgaacagtctgctaaaaaagtacgcaaaaaggcagaaaacgctcataatacgccgctgcttgtgctatacggttcaaatgcgggaacagctgaaggaacggcgcgtgatttagcagatattgcaatgagcaaaggatttgcaccgcaggtcgcaacgcttgattcacacgccggtaatcttccgcgcgaaggagctgtattaattgtaacggcgtcttataacggtcatccgcctgataacgcaaagcaatttgtcgattggttagaccaagcgtctgcggatgaagtaaaaggcgttcgctactccgtatttggatgcggcgataaaaattgggcggggacgtatcaaaaagtgcctgcttttatcgatgaaacgcttgccgctaaaggggcagaaaacatcgctgaccgcggtgaagcagatgcaagcgacgactttgaaggcgcgtatgaagaatggcgtgatcatatgtggagtgacgtagcagcctactttggtctcgacattgaaaacagtgaagataataaatctactctttcacttcaatttgtcgacagcgcggcggatatgccgcttgcgaaaatgcacggtgcgttttcaacgaacgtcgtagcaagcaaagaacttcaacagcctggcagtgcacgaagcacgcgacatcttgaaattgaacttccaaaagaagcttcttatcaagaaggagatcatttaggtgttattcctcgctattatgaaggaatagtaaaccgtgtaacacagaggttcggcctaagcgcatcacagctgatccgtctggaagcagaagaagaaaaattagctcatttgccactcgctaaaacagtatccgtagaagagcttctgcaatacgtggagcttcaagatcctgttacgcgcacgcagcttcgcgcaatggctgctaaaacggtctgcccgccgcataaagtagagcttgaagccttgcttggcaagcaagcctacaaagaacaagtgctggcaaaacgtttaacaatgcttgaactgcttgaaaaatacccggcgtgtgaaatgagtttcagcgaatttatcgcccttctgccaagcatacgcccgcgctattactcgatttcttcatcacctcgtgtcgatgaaaaacaagcaagcatcacggtcagcgttgtctcaggaccggcgtggagcggatatggagaatataaaggaattgcgtcgaactatcttgctgagctgcaagaaggagatacgattacgtgctttatttccacaccgcagtcagagtttacgctgccaaaagaccctgaaacgccgcttatcatggtcggaccgggaacaggcgtcgcgccgtttagaggctttgtgcaggcgcgcaaacagctaaaagaacaaggacagtcacttggagaagcacatttatacttcggctgccgttcacctcatgaagactatctgtatcaagaagagcttgaaaacgcccaaagcgaaggcatcattacgcttcataccgctttttctcgcatgccgaatcagccgaaaacatacgttcagcacgtaatggaacaagacggcaagaaattgattgaacttcttgatcaaggagcgcacttctatatttgcggagacggaattcaaatggcacctgccgttgaagcaacgcttatgaaaagctatgctgacgttcaccaagtgagtgaagcagacgctcgcttatggctgcagcagctagaagaaaaaggccgatacgcaaaagacgtgtggctgggg

SEQ ID NO: 1054 - protein, 1049 aa, synthetic construct
  REGION 1..1049: note = variant of P450 oxidase from Bacillus megaterium
MTIKEMPQPKTFGELKNLPLLNTDKPVQALMRIADELGEIFKFEAPGSVTRYLSSQRLIKEACDESRFDKNLSQGLKFARDFVGDGLVTSWTHEPNWKKAHNILVPSFSQHAMGRYHAMMVDIAVQLVQKWERLNADEHIEVSEDMTRLTLDTIGLCLFNYRFNSFYRDTPHPFIVSVVRALDEVMNKLQRANPDDPAYDENKRQCQEDIKVMNDYVDKIIADRKARGEQSHDLLTQMLNGKDPETGEPLDDGNIRQQIITFLIAGHQTTSGLLSFALYFLVKNPRVLQKVAEEAARVLVDPVPSYKQVKQLKYVGMVLNEALRLWPVAPMFSLYAKEDTVLGGEYPLTKGDEVMVLVPQLHRDKTIWGDDVEEFRPERFENPSAIPQHAFKPFGNGQRACIGQQFALHSATLVLGVMLKHFDFEDHTNYELVIKESRTLKPEGFVVKAKSKGIPLGGIPSPSTEQSAKKVRKKAENAHNTPLLVLYGSNAGTAEGTARDLADIAMSKGFAPQVATLDSHAGNLPREGAVLIVTASYNGHPPDNAKQFVDWLDQASADEVKGVRYSVFGCGDKNWAGTYQKVPAFIDETLAAKGAENIADRGEADASDDFEGAYEEWRDHMWSDVAAYFGLDIENSEDNKSTLSLQFVDSAADMPLAKMHGAFSTNVVASKELQQPGSARSTRHLEIELPKEASYQEGDHLGVIPRYYEGIVNRVTQRFGLSASQLIRLEAEEEKLAHLPLAKTVSVEELLQYVELQDPVTRTQLRAMAAKTVCPPHKVELEALLGKQAYKEQVLAKRLTMLELLEKYPACEMSFSEFIALLPSIRPRYYSISSSPRVDEKQASITVSVVSGPAWSGYGEYKGIASNYLAELQEGDTITCFISTPQSEFTLPKDPETPLIMVGPGTGVAPFRGFVQARKQLKEQGQSLGEAHLYFGCRSPHEDYLYQEELENAQSEGIITLHTAFSRMPNQPKTYVQHVMEQDGKKLIELLDQGAHFYICGDGIQMAPAVEATLMKSYADVHQVSEADARLWLQQLEEKGRYAKDVWLG

SEQ ID NO: 1055 - DNA, 3147 bp, synthetic construct
  misc_feature 1..3147: note = variant of P450 oxidase from Bacillus megaterium
  source 1..3147: mol_type = other DNA
atgacaattaaggaaatgcctcagcctaagacgtttggagaacttaaaaatttaccgttattaaatacagataaaccggttcaagctttgatgcgtattgcggatgaattaggagaaatctttaaattcgaggcgcctggtagcgtaacgcgctatttatcaagtcagcgtctaattaaagaagcatgcgatgaatcacgctttgataaaaacttaagtcaagggcttaaatttgcacgtgattttgttggagacgggctggttacaagctggacgcatgaaccgaattggaaaaaagcgcataatatcttagttccaagctttagtcagcatgcaatggggcgttatcatgcgatgatggtcgatatcgccgtgcagcttgttcaaaagtgggagcgtctaaatgcagatgagcatattgaagtatcggaagacatgacacgtttaacgcttgatacaattggtctttgcctgtttaactatcgctttaacagcttttaccgagatacgcctcatccatttattgtgagtgtggttcgtgcactggatgaagtaatgaacaagctgcagcgagcaaatccagacgacccagcttatgatgaaaacaagcgccagtgtcaagaagatatcaaggtgatgaacgactatgtagataaaattattgcagatcgcaaagcaaggggtgaacaaagtcatgatttattaacgcagatgctaaacggaaaagatccagaaacgggtgagccgcttgatgacgggaacattcgtcagcaaattattacattcttaattgcgggacaccaaacgacaagtggtcttttatcatttgcgctgtatttcttagtgaaaaatccacgtgtattacaaaaagtagcaacggaagcagcacgagttctagtagatcctgttccaagctacaaacaagtcaaacagcttaaatatgttggcatggtcttaaacgaagcgctgcgcttatggccagtagcgcctatgttttccctatatgcaaaagaagatacggtgcttggaggagaatatcctttaacgaaaggcgacgaagtaatggttctggtgcctcagcttcaccgtgataaaacaatttggggagacgatgtggaggagttccgtccagagcgttttgaaaatccaagtgcgattccgcagcatgcgtttaaaccgtttggaaacggtcagcgtgcgtgtatcggtcagcagttcgctcttcatagtgcaacgctggtacttggtatgatgctaaaacactttgactttgaagatcatacaaactacgagctcgttattaaagaatcgcggacgttaaaacctgaaggctttgtggtaaaagcaaaatcgaaaggcattccgcttggcggtattccttcacctagcactgaacagtctgctaaaaaagtacgcaaaaaggcagaaaacgctcataatacgccgctgcttgtgctatacggttcaaatgcgggaacagctgaaggaacggcgcgtgatttagcagatattgcaatgagcaaaggatttgcaccgcaggtcgcaacgcttgattcacacgccggtaatcttccgcgcgaaggagctgtattaattgtaacggcgtcttataacggtcatccgcctgataacgcaaagcaatttgtcgattggttagaccaagcgtctgcggatgaagtaaaaggcgttcgctactccgtatttggatgcggcgataaaaattgggcggggacgtatcaaaaagtgcctgcttttatcgatgaaacgcttgccgctaaaggggcagaaaacatcgctgaccgcggtgaagcagatgcaagcgacgactttgaaggcgcgtatgaagaatggcgtgatcatatgtggagtgacgtagcagcctactttggtctcgacattgaaaacagtgaagataataaatctactctttcacttcaatttgtcgacagcgcggcggatatgccgcttgcgaaaatgcacggtgcgttttcaacgaacgtcgtagcaagcaaagaacttcaacagcctggcagtgcacgaagcacgcgacatcttgaaattgaacttccaaaagaagcttcttatcaagaaggagatcatttaggtgttattcctcgctattatgaaggaatagtaaaccgtgtaacacagaggttcggcctaagcgcatcacagctgatccgtctggaagcagaagaagaaaaattagctcatttgccactcgctaaaacagtatccgtagaagagcttctgcaatacgtggagcttcaagatcctgttacgcgcacgcagcttcgcgcaatggctgctaaaacggtctgcccgccgcataaagtagagcttgaagccttgcttggcaagcaagcctacaaagaacaagtgctggcaaaacgtttaacaatgcttgaactgcttgaaaaatacccggcgtgtgaaatgagtttcagcgaatttatcgcccttctgccaagcatacgcccgcgctattactcgatttcttcatcacctcgtgtcgatgaaaaacaagcaagcatcacggtcagcgttgtctcaggaccggcgtggagcggatatggagaatataaaggaattgcgtcgaactatcttgctgagctgcaagaaggagatacgattacgtgctttatttccacaccgcagtcagagtttacgctgccaaaagaccctgaaacgccgcttatcatggtcggaccgggaacaggcgtcgcgccgtttagaggctttgtgcaggcgcgcaaacagctaaaagaacaaggacagtcacttggagaagcacatttatacttcggctgccgttcacctcatgaagactatctgtatcaagaagagcttgaaaacgcccaaagcgaaggcatcattacgcttcataccgctttttctcgcatgccgaatcagccgaaaacatacgttcagcacgtaatggaacaagacggcaagaaattgattgaacttcttgatcaaggagcgcacttctatatttgcggagacggaattcaaatggcacctgccgttgaagcaacgcttatgaaaagctatgctgacgttcaccaagtgagtgaagcagacgctcgcttatggctgcagcagctagaagaaaaaggccgatacgcaaaagacgtgtggctgggg

SEQ ID NO: 1056 - protein, 1049 aa, synthetic construct
  REGION 1..1049: note = variant of P450 oxidase from Bacillus megaterium
MTIKEMPQPKTFGELKNLPLLNTDKPVQALMRIADELGEIFKFEAPGSVTRYLSSQRLIKEACDESRFDKNLSQGLKFARDFVGDGLVTSWTHEPNWKKAHNILVPSFSQHAMGRYHAMMVDIAVQLVQKWERLNADEHIEVSEDMTRLTLDTIGLCLFNYRFNSFYRDTPHPFIVSVVRALDEVMNKLQRANPDDPAYDENKRQCQEDIKVMNDYVDKIIADRKARGEQSHDLLTQMLNGKDPETGEPLDDGNIRQQIITFLIAGHQTTSGLLSFALYFLVKNPRVLQKVATEAARVLVDPVPSYKQVKQLKYVGMVLNEALRLWPVAPMFSLYAKEDTVLGGEYPLTKGDEVMVLVPQLHRDKTIWGDDVEEFRPERFENPSAIPQHAFKPFGNGQRACIGQQFALHSATLVLGMMLKHFDFEDHTNYELVIKESRTLKPEGFVVKAKSKGIPLGGIPSPSTEQSAKKVRKKAENAHNTPLLVLYGSNAGTAEGTARDLADIAMSKGFAPQVATLDSHAGNLPREGAVLIVTASYNGHPPDNAKQFVDWLDQASADEVKGVRYSVFGCGDKNWAGTYQKVPAFIDETLAAKGAENIADRGEADASDDFEGAYEEWRDHMWSDVAAYFGLDIENSEDNKSTLSLQFVDSAADMPLAKMHGAFSTNVVASKELQQPGSARSTRHLEIELPKEASYQEGDHLGVIPRYYEGIVNRVTQRFGLSASQLIRLEAEEEKLAHLPLAKTVSVEELLQYVELQDPVTRTQLRAMAAKTVCPPHKVELEALLGKQAYKEQVLAKRLTMLELLEKYPACEMSFSEFIALLPSIRPRYYSISSSPRVDEKQASITVSVVSGPAWSGYGEYKGIASNYLAELQEGDTITCFISTPQSEFTLPKDPETPLIMVGPGTGVAPFRGFVQARKQLKEQGQSLGEAHLYFGCRSPHEDYLYQEELENAQSEGIITLHTAFSRMPNQPKTYVQHVMEQDGKKLIELLDQGAHFYICGDGIQMAPAVEATLMKSYADVHQVSEADARLWLQQLEEKGRYAKDVWLG

SEQ ID NO: 1057 - DNA, 3147 bp, synthetic construct
  misc_feature 1..3147: note = variant of P450 oxidase from Bacillus megaterium
  source 1..3147: mol_type = other DNA
atgacaattaaggaaatgcctcagcctaagacgtttggagaacttaaaaatttaccgttattaaatacagataaaccggttcaagctttgatgcgtattgcggatgaattaggagaaatctttaaattcgaggcgcctggtagcgtaacgcgctatttatcaagtcagcgtctaattaaagaagcatgcgatgaatcacgctttgataaaaacttaagtcaagggcttaaatttgcacgtgattttgttggagacgggctggttacaagctggacgcatgaaccgaattggaaaaaagcgcataatatcttagttccaagctttagtcagcatgcaatggggcgttatcatgcgatgatggtcgatatcgccgtgcagcttgttcaaaagtgggagcgtctaaatgcagatgagcatattgaagtatcggaagacatgacacgtttaacgcttgatacaattggtctttgcctgtttaactatcgctttaacagcttttaccgagatacgcctcatccatttattgtgagtgtggttcgtgcactggatgaagtaatgaacaagctgcagcgagcaaatccagacgacccagcttatgatgaaaacaagcgccagtgtcaagaagatatcaaggtgatgaacgactatgtagataaaattattgcagatcgcaaagcaaggggtgaagttagtcatgatttattaacgcagatgctaaacggaaaagatccagaaacgggtgagccgcttgatgacgggaacattcgtcagcaaattattacattcttaattgcgggacaccaaacgacaagtggtcttttatcatttgcgctgtatttcttagtgaaaaatccacgtgtattacaaaaagtagcagaagaagcagcacgagttctagtagatcctgttccaagctacaaacaagtcaaacagcttaaatatgttggcatggtcttaaacgaagcgctgcgcttatggccagtagcgcctatgttttccctatatgcaaaagaagatacggtgcttggaggagaatatcctttaacgaaaggcgacgaagtaatggttctggtgcctcagcttcaccgtgataaaacaatttggggagacgatgtggaggagttccgtccagagcgttttgaaaatccaagtgcgattccgcagcatgcgtttaaaccgtttggaaacggtcagcgtgcgtgtatcggtcagcagttcgctcttcatagtgcaacgctggtacttggtatgatgctaaaacactttgactttgaagatcatacaaactacgagctcgttattaaagaatcgcggacgttaaaacctgaaggctttgtggtaaaagcaaaatcgaaaggcattccgcttggcggtattccttcacctagcactgaacagtctgctaaaaaagtacgcaaaaaggcagaaaacgctcataatacgccgctgcttgtgctatacggttcaaatgcgggaacagctgaaggaacggcgcgtgatttagcagatattgcaatgagcaaaggatttgcaccgcaggtcgcaacgcttgattcacacgccggtaatcttccgcgcgaaggagctgtattaattgtaacggcgtcttataacggtcatccgcctgataacgcaaagcaatttgtcgattggttagaccaagcgtctgcggatgaagtaaaaggcgttcgctactccgtatttggatgcggcgataaaaattgggcggggacgtatcaaaaagtgcctgcttttatcgatgaaacgcttgccgctaaaggggcagaaaacatcgctgaccgcggtgaagcagatgcaagcgacgactttgaaggcgcgtatgaagaatggcgtgatcatatgtggagtgacgtagcagcctactttggtctcgacattgaaaacagtgaagataataaatctactctttcacttcaatttgtcgacagcgcggcggatatgccgcttgcgaaaatgcacggtgcgttttcaacgaacgtcgtagcaagcaaagaacttcaacagcctggcagtgcacgaagcacgcgacatcttgaaattgaacttccaaaagaagcttcttatcaagaaggagatcatttaggtgttattcctcgctattatgaaggaatagtaaaccgtgtaacacagaggttcggcctaagcgcatcacagctgatccgtctggaagcagaagaagaaaaattagctcatttgccactcgctaaaacagtatccgtagaagagcttctgcaatacgtggagcttcaagatcctgttacgcgcacgcagcttcgcgcaatggctgctaaaacggtctgcccgccgcataaagtagagcttgaagccttgcttggcaagcaagcctacaaagaacaagtgctggcaaaacgtttaacaatgcttgaactgcttgaaaaatacccggcgtgtgaaatgagtttcagcgaatttatcgcccttctgccaagcatacgcccgcgctattactcgatttcttcatcacctcgtgtcgatgaaaaacaagcaagcatcacggtcagcgttgtctcaggaccggcgtggagcggatatggagaatataaaggaattgcgtcgaactatcttgctgagctgcaagaaggagatacgattacgtgctttatttccacaccgcagtcagagtttacgctgccaaaagaccctgaaacgccgcttatcatggtcggaccgggaacaggcgtcgcgccgtttagaggctttgtgcaggcgcgcaaacagctaaaagaacaaggacagtcacttggagaagcacatttatacttcggctgccgttcacctcatgaagactatctgtatcaagaagagcttgaaaacgcccaaagcgaaggcatcattacgcttcataccgctttttctcgcatgccgaatcagccgaaaacatacgttcagcacgtaatggaacaagacggcaagaaattgattgaacttcttgatcaaggagcgcacttctatatttgcggagacggaattcaaatggcacctgccgttgaagcaacgcttatgaaaagctatgctgacgttcaccaagtgagtgaagcagacgctcgcttatggctgcagcagctagaagaaaaaggccgatacgcaaaagacgtgtggctgggg

SEQ ID NO: 1058 - protein, 1049 aa, synthetic construct
  REGION 1..1049: note = variant of P450 oxidase from Bacillus megaterium
MTIKEMPQPKTFGELKNLPLLNTDKPVQALMRIADELGEIFKFEAPGSVTRYLSSQRLIKEACDESRFDKNLSQGLKFARDFVGDGLVTSWTHEPNWKKAHNILVPSFSQHAMGRYHAMMVDIAVQLVQKWERLNADEHIEVSEDMTRLTLDTIGLCLFNYRFNSFYRDTPHPFIVSVVRALDEVMNKLQRANPDDPAYDENKRQCQEDIKVMNDYVDKIIADRKARGEVSHDLLTQMLNGKDPETGEPLDDGNIRQQIITFLIAGHQTTSGLLSFALYFLVKNPRVLQKVAEEAARVLVDPVPSYKQVKQLKYVGMVLNEALRLWPVAPMFSLYAKEDTVLGGEYPLTKGDEVMVLVPQLHRDKTIWGDDVEEFRPERFENPSAIPQHAFKPFGNGQRACIGQQFALHSATLVLGMMLKHFDFEDHTNYELVIKESRTLKPEGFVVKAKSKGIPLGGIPSPSTEQSAKKVRKKAENAHNTPLLVLYGSNAGTAEGTARDLADIAMSKGFAPQVATLDSHAGNLPREGAVLIVTASYNGHPPDNAKQFVDWLDQASADEVKGVRYSVFGCGDKNWAGTYQKVPAFIDETLAAKGAENIADRGEADASDDFEGAYEEWRDHMWSDVAAYFGLDIENSEDNKSTLSLQFVDSAADMPLAKMHGAFSTNVVASKELQQPGSARSTRHLEIELPKEASYQEGDHLGVIPRYYEGIVNRVTQRFGLSASQLIRLEAEEEKLAHLPLAKTVSVEELLQYVELQDPVTRTQLRAMAAKTVCPPHKVELEALLGKQAYKEQVLAKRLTMLELLEKYPACEMSFSEFIALLPSIRPRYYSISSSPRVDEKQASITVSVVSGPAWSGYGEYKGIASNYLAELQEGDTITCFISTPQSEFTLPKDPETPLIMVGPGTGVAPFRGFVQARKQLKEQGQSLGEAHLYFGCRSPHEDYLYQEELENAQSEGIITLHTAFSRMPNQPKTYVQHVMEQDGKKLIELLDQGAHFYICGDGIQMAPAVEATLMKSYADVHQVSEADARLWLQQLEEKGRYAKDVWLG

SEQ ID NO: 1059 - DNA, 3147 bp, synthetic construct
  misc_feature 1..3147: note = variant of P450 oxidase from Bacillus megaterium
  source 1..3147: mol_type = other DNA
atgacaattaaggaaatgcctcagcctaagacgtttggagaacttaaaaatttaccgttattaaatacagataaaccggttcaagctttgatgcgtattgcggatgaattaggagaaatctttaaattcgaggcgcctggtagcgtaacgcgctatttatcaagtcagcgtctaattaaagaagcatgcgatgaatcacgctttgataaaaacttaagtcaagggcttaaatttgcacgtgattttgttggagacgggctggttacaagctggacgcatgaaccgaattggaaaaaagcgcataatatcttagttccaagctttagtcagcatgcaatggggcgttatcatgcgatgatggtcgatatcgccgtgcagcttgttcaaaagtgggagcgtctaaatgcagatgagcatattgaagtatcggaagacatgacacgtttaacgcttgatacaattggtctttgcctgtttaactatcgctttaacagcttttaccgagatacgcctcatccatttattgtgagtgtggttcgtgcactggatgaagtaatgaacaagctgcagcgagcaaatccagacgacccagcttatgatgaaaacaagcgccagtgtcaagaagatatcaaggtgatgaacgactatgtagataaaattattgcagatcgcaaagcaaggggtgaacaaagtcatgatttattaacgcagatgctaaacggaaaagatccagaaacgggtgagccgcttgatgacgggaacattcgtcagcaaattattacattcttaattgcgggacaccaaacgacaagtggtcttttatcatttgcgctgtatttcttagtgaaaaatccacgtgtattacaaaaagtagcagaagaagcagcacgagttctagtagatcctcagccaagctacaaacaagtcaaacagcttaaatatgttggcatggtcttaaacgaagcgctgcgcttatggccagtagcgcctatgttttccctatatgcaaaagaagatacggtgcttggaggagaatatcctttaacgaaaggcgacgaagtaatggttctggtgcctcagcttcaccgtgataaaacaatttggggagacgatgtggaggagttccgtccagagcgttttgaaaatccaagtgcgattccgcagcatgcgtttaaaccgtttggaaacggtcagcgtgcgtgtatcggtcagcagttcgctcttcatagtgcaacgctggtacttggtatgatgctaaaacactttgactttgaagatcatacaaactacgagctcgttattaaagaatcgcggacgttaaaacctgaaggctttgtggtaaaagcaaaatcgaaaggcattccgcttggcggtattccttcacctagcactgaacagtctgctaaaaaagtacgcaaaaaggcagaaaacgctcataatacgccgctgcttgtgctatacggttcaaatgcgggaacagctgaaggaacggcgcgtgatttagcagatattgcaatgagcaaaggatttgcaccgcaggtcgcaacgcttgattcacacgccggtaatcttccgcgcgaaggagctgtattaattgtaacggcgtcttataacggtcatccgcctgataacgcaaagcaatttgtcgattggttagaccaagcgtctgcggatgaagtaaaaggcgttcgctactccgtatttggatgcggcgataaaaattgggcggggacgtatcaaaaagtgcctgcttttatcgatgaaacgcttgccgctaaaggggcagaaaacatcgctgaccgcggtgaagcagatgcaagcgacgactttgaaggcgcgtatgaagaatggcgtgatcatatgtggagtgacgtagcagcctactttggtctcgacattgaaaacagtgaagataataaatctactctttcacttcaatttgtcgacagcgcggcggatatgccgcttgcgaaaatgcacggtgcgttttcaacgaacgtcgtagcaagcaaagaacttcaacagcctggcagtgcacgaagcacgcgacatcttgaaattgaacttccaaaagaagcttcttatcaagaaggagatcatttaggtgttattcctcgctattatgaaggaatagtaaaccgtgtaacacagaggttcggcctaagcgcatcacagctgatccgtctggaagcagaagaagaaaaattagctcatttgccactcgctaaaacagtatccgtagaagagcttctgcaatacgtggagcttcaagatcctgttacgcgcacgcagcttcgcgcaatggctgctaaaacggtctgcccgccgcataaagtagagcttgaagccttgcttggcaagcaagcctacaaagaacaagtgctggcaaaacgtttaacaatgcttgaactgcttgaaaaatacccggcgtgtgaaatgagtttcagcgaatttatcgcccttctgccaagcatacgcccgcgctattactcgatttcttcatcacctcgtgtcgatgaaaaacaagcaagcatcacggtcagcgttgtctcaggaccggcgtggagcggatatggagaatataaaggaattgcgtcgaactatcttgctgagctgcaagaaggagatacgattacgtgctttatttccacaccgcagtcagagtttacgctgccaaaagaccctgaaacgccgcttatcatggtcggaccgggaacaggcgtcgcgccgtttagaggctttgtgcaggcgcgcaaacagctaaaagaacaaggacagtcacttggagaagcacatttatacttcggctgccgttcacctcatgaagactatctgtatcaagaagagcttgaaaacgcccaaagcgaaggcatcattacgcttcataccgctttttctcgcatgccgaatcagccgaaaacatacgttcagcacgtaatggaacaagacggcaagaaattgattgaacttcttgatcaaggagcgcacttctatatttgcggagacggaattcaaatggcacctgccgttgaagcaacgcttatgaaaagctatgctgacgttcaccaagtgagtgaagcagacgctcgcttatggctgcagcagctagaagaaaaaggccgatacgcaaaagacgtgtggctgggg

SEQ ID NO: 1060 - protein, 1049 aa, synthetic construct
  REGION 1..1049: note = variant of P450 oxidase from Bacillus megaterium
MTIKEMPQPKTFGELKNLPLLNTDKPVQALMRIADELGEIFKFEAPGSVTRYLSSQRLIKEACDESRFDKNLSQGLKFARDFVGDGLVTSWTHEPNWKKAHNILVPSFSQHAMGRYHAMMVDIAVQLVQKWERLNADEHIEVSEDMTRLTLDTIGLCLFNYRFNSFYRDTPHPFIVSVVRALDEVMNKLQRANPDDPAYDENKRQCQEDIKVMNDYVDKIIADRKARGEQSHDLLTQMLNGKDPETGEPLDDGNIRQQIITFLIAGHQTTSGLLSFALYFLVKNPRVLQKVAEEAARVLVDPQPSYKQVKQLKYVGMVLNEALRLWPVAPMFSLYAKEDTVLGGEYPLTKGDEVMVLVPQLHRDKTIWGDDVEEFRPERFENPSAIPQHAFKPFGNGQRACIGQQFALHSATLVLGMMLKHFDFEDHTNYELVIKESRTLKPEGFVVKAKSKGIPLGGIPSPSTEQSAKKVRKKAENAHNTPLLVLYGSNAGTAEGTARDLADIAMSKGFAPQVATLDSHAGNLPREGAVLIVTASYNGHPPDNAKQFVDWLDQASADEVKGVRYSVFGCGDKNWAGTYQKVPAFIDETLAAKGAENIADRGEADASDDFEGAYEEWRDHMWSDVAAYFGLDIENSEDNKSTLSLQFVDSAADMPLAKMHGAFSTNVVASKELQQPGSARSTRHLEIELPKEASYQEGDHLGVIPRYYEGIVNRVTQRFGLSASQLIRLEAEEEKLAHLPLAKTVSVEELLQYVELQDPVTRTQLRAMAAKTVCPPHKVELEALLGKQAYKEQVLAKRLTMLELLEKYPACEMSFSEFIALLPSIRPRYYSISSSPRVDEKQASITVSVVSGPAWSGYGEYKGIASNYLAELQEGDTITCFISTPQSEFTLPKDPETPLIMVGPGTGVAPFRGFVQARKQLKEQGQSLGEAHLYFGCRSPHEDYLYQEELENAQSEGIITLHTAFSRMPNQPKTYVQHVMEQDGKKLIELLDQGAHFYICGDGIQMAPAVEATLMKSYADVHQVSEADARLWLQQLEEKGRYAKDVWLG

SEQ ID NO: 1061 - DNA, 3147 bp, synthetic construct
  misc_feature 1..3147: note = variant of P450 oxidase from Bacillus megaterium
  source 1..3147: mol_type = other DNA
atgacaattaaggaaatgcctcagcctaagacgtttggagaacttaaaaatttaccgttattaaatacagataaaccggttcaagctttgatgcgtattgcggatgaattaggagaaatctttaaattcgaggcgcctggtagcgtaacgcgctatttatcaagtcagcgtctaattaaagaagcatgcgatgaatcacgctttgataaaaacttaagtcaagggcttaaatttgcacgtgattttgttggagacgggctggttacaagctggacgcatgaaccgaattggaaaaaagcgcataatatcttagttccaagctttagtcagcatgcaatggggcgttatcatgcgatgatggtcgatatcgccgtgcagcttgttcaaaagtgggagcgtctaaatgcagatgagcatattgaagtatcggaagacatgacacgtttaacgcttgatacaattggtctttgcctgtttaactatcgctttaacagcttttaccgagatacgcctcatccatttattgtgagtgtggttcgtgcactggatgaagtaatgaacaagctgcagcgagcaaatccagacgacccagcttatgatgaaaacaagcgccagtgtcaagaagatatcaaggtgatgaacgactatgtagataaaattattgcagatcgcaaagcaaggggtgaacaaagtcatgatttattaacgcagatgctaaacggaaaagatccagaaacgggtgagccgcttgatgacgggaacattcgtcagcaaattattacattcttaattgcgggacaccaaacgacaagtggtcttttatcatttgcgctgtatttcttagtgaaaaatccacgtgtattacaaagtgtagcagaagaagcagcacgagttctagtagatcctgttccaagctacaaacaagtcaaacagcttaaatatgttggcatggtcttaaacgaagcgctgcgcttatggccagtagcgcctatgttttccctatatgcaaaagaagatacggtgcttggaggagaatatcctttaacgaaaggcgacgaagtaatggttctggtgcctcagcttcaccgtgataaaacaatttggggagacgatgtggaggagttccgtccagagcgttttgaaaatccaagtgcgattccgcagcatgcgtttaaaccgtttggaaacggtcagcgtgcgtgtatcggtcagcagttcgctcttcatagtgcaacgctggtacttggtatgatgctaaaacactttgactttgaagatcatacaaactacgagctcgttattaaagaatcgcggacgttaaaacctgaaggctttgtggtaaaagcaaaatcgaaaggcattccgcttggcggtattccttcacctagcactgaacagtctgctaaaaaagtacgcaaaaaggcagaaaacgctcataatacgccgctgcttgtgctatacggttcaaatgcgggaacagctgaaggaacggcgcgtgatttagcagatattgcaatgagcaaaggatttgcaccgcaggtcgcaacgcttgattcacacgccggtaatcttccgcgcgaaggagctgtattaattgtaacggcgtcttataacggtcatccgcctgataacgcaaagcaatttgtcgattggttagaccaagcgtctgcggatgaagtaaaaggcgttcgctactccgtatttggatgcggcgataaaaattgggcggggacgtatcaaaaagtgcctgcttttatcgatgaaacgcttgccgctaaaggggcagaaaacatcgctgaccgcggtgaagcagatgcaagcgacgactttgaaggcgcgtatgaagaatggcgtgatcatatgtggagtgacgtagcagcctactttggtctcgacattgaaaacagtgaagataataaatctactctttcacttcaatttgtcgacagcgcggcggatatgccgcttgcgaaaatgcacggtgcgttttcaacgaacgtcgtagcaagcaaagaacttcaacagcctggcagtgcacgaagcacgcgacatcttgaaattgaacttccaaaagaagcttcttatcaagaaggagatcatttaggtgttattcctcgctattatgaaggaatagtaaaccgtgtaacacagaggttcggcctaagcgcatcacagctgatccgtctggaagcagaagaagaaaaattagctcatttgccactcgctaaaacagtatccgtagaagagcttctgcaatacgtggagcttcaagatcctgttacgcgcacgcagcttcgcgcaatggctgctaaaacggtctgcccgccgcataaagtagagcttgaagccttgcttggcaagcaagcctacaaagaacaagtgctggcaaaacgtttaacaatgcttgaactgcttgaaaaatacccggcgtgtgaaatgagtttcagcgaatttatcgcccttctgccaagcatacgcccgcgctattactcgatttcttcatcacctcgtgtcgatgaaaaacaagcaagcatcacggtcagcgttgtctcaggaccggcgtggagcggatatggagaatataaaggaattgcgtcgaactatcttgctgagctgcaagaaggagatacgattacgtgctttatttccacaccgcagtcagagtttacgctgccaaaagaccctgaaacgccgcttatcatggtcggaccgggaacaggcgtcgcgccgtttagaggctttgtgcaggcgcgcaaacagctaaaagaacaaggacagtcacttggagaagcacatttatacttcggctgccgttcacctcatgaagactatctgtatcaagaagagcttgaaaacgcccaaagcgaaggcatcattacgcttcataccgctttttctcgcatgccgaatcagccgaaaacatacgttcagcacgtaatggaacaagacggcaagaaattgattgaacttcttgatcaaggagcgcacttctatatttgcggagacggaattcaaatggcacctgccgttgaagcaacgcttatgaaaagctatgctgacgttcaccaagtgagtgaagcagacgctcgcttatggctgcagcagctagaagaaaaaggccgatacgcaaaagacgtgtggctgggg

SEQ ID NO: 1062 - protein, 1049 aa, synthetic construct
  REGION 1..1049: note = variant of P450 oxidase from Bacillus megaterium
MTIKEMPQPKTFGELKNLPLLNTDKPVQALMRIADELGEIFKFEAPGSVTRYLSSQRLIKEACDESRFDKNLSQGLKFARDFVGDGLVTSWTHEPNWKKAHNILVPSFSQHAMGRYHAMMVDIAVQLVQKWERLNADEHIEVSEDMTRLTLDTIGLCLFNYRFNSFYRDTPHPFIVSVVRALDEVMNKLQRANPDDPAYDENKRQCQEDIKVMNDYVDKIIADRKARGEQSHDLLTQMLNGKDPETGEPLDDGNIRQQIITFLIAGHQTTSGLLSFALYFLVKNPRVLQSVAEEAARVLVDPVPSYKQVKQLKYVGMVLNEALRLWPVAPMFSLYAKEDTVLGGEYPLTKGDEVMVLVPQLHRDKTIWGDDVEEFRPERFENPSAIPQHAFKPFGNGQRACIGQQFALHSATLVLGMMLKHFDFEDHTNYELVIKESRTLKPEGFVVKAKSKGIPLGGIPSPSTEQSAKKVRKKAENAHNTPLLVLYGSNAGTAEGTARDLADIAMSKGFAPQVATLDSHAGNLPREGAVLIVTASYNGHPPDNAKQFVDWLDQASADEVKGVRYSVFGCGDKNWAGTYQKVPAFIDETLAAKGAENIADRGEADASDDFEGAYEEWRDHMWSDVAAYFGLDIENSEDNKSTLSLQFVDSAADMPLAKMHGAFSTNVVASKELQQPGSARSTRHLEIELPKEASYQEGDHLGVIPRYYEGIVNRVTQRFGLSASQLIRLEAEEEKLAHLPLAKTVSVEELLQYVELQDPVTRTQLRAMAAKTVCPPHKVELEALLGKQAYKEQVLAKRLTMLELLEKYPACEMSFSEFIALLPSIRPRYYSISSSPRVDEKQASITVSVVSGPAWSGYGEYKGIASNYLAELQEGDTITCFISTPQSEFTLPKDPETPLIMVGPGTGVAPFRGFVQARKQLKEQGQSLGEAHLYFGCRSPHEDYLYQEELENAQSEGIITLHTAFSRMPNQPKTYVQHVMEQDGKKLIELLDQGAHFYICGDGIQMAPAVEATLMKSYADVHQVSEADARLWLQQLEEKGRYAKDVWLG

SEQ ID NO: 1063 - DNA, 3147 bp, synthetic construct
  misc_feature 1..3147: note = variant of P450 oxidase from Bacillus megaterium
  source 1..3147: mol_type = other DNA
atgacaattaaggaaatgcctcagcctaagacgtttggagaacttaaaaatttaccgttattaaatacagataaaccggttcaagctttgatgcgtattgcggatgaattaggagaaatctttaaattcgaggcgcctggtagcgtaacgcgctatttatcaagtcagcgtctaattaaagaagcatgcgatgaatcacgctttgataaaaacttaagtcaagggcttaaatttgcacgtgattttgttggagacgggctggttacaagctggacgcatgaaccgaattggaaaaaagcgcataatatcttagttccaagctttagtcagcatgcaatggggcgttatcatgcgatgatggtcgatatcgccgtgcagcttgttcaaaagtgggagcgtctaaatgcagatgagcatattgaagtatcggaagacatgacacgtttaacgcttgatacaattggtctttgcctgtttaactatcgctttaacagcttttaccgagatacgcctcatccatttattgtgagtgtggttcgtgcactggatgaagtaatgaacaagctgcagcgagcaaatccagacgacccagcttatgatgaaaacaagcgccagtgtcaagaagatatcaaggtgatgaacgactatgtagataaaattattgcagatcgcaaagcaaggggtgaacaaagtcatgatttattaacgcagatgctaaacggaaaagatccagaaacgggtgagccgcttgatgacgggaacattcgtcagcaaattattacattcttaattgcgggacaccaaacgacaagtggtcttttatcatttgcgctgtatttcttagtgaaaaatccacgtgtattacaaaaagtagcagaagaagcaggtcgagttctagtagatcctgttccaagctacaaacaagtcaaacagcttaaatatgttggcatggtcttaaacgaagcgctgcgcttatggccagtagcgcctatgttttccctatatgcaaaagaagatacggtgcttggaggagaatatcctttaacgaaaggcgacgaagtaatggttctggtgcctcagcttcaccgtgataaaacaatttggggagacgatgtggaggagttccgtccagagcgttttgaaaatccaagtgcgattccgcagcatgcgtttaaaccgtttggaaacggtcagcgtgcgtgtatcggtcagcagttcgctcttcatagtgcaacgctggtacttggtatgatgctaaaacactttgactttgaagatcatacaaactacgagctcgttattaaagaatcgcggacgttaaaacctgaaggctttgtggtaaaagcaaaatcgaaaggcattccgcttggcggtattccttcacctagcactgaacagtctgctaaaaaagtacgcaaaaaggcagaaaacgctcataatacgccgctgcttgtgctatacggttcaaatgcgggaacagctgaaggaacggcgcgtgatttagcagatattgcaatgagcaaaggatttgcaccgcaggtcgcaacgcttgattcacacgccggtaatcttccgcgcgaaggagctgtattaattgtaacggcgtcttataacggtcatccgcctgataacgcaaagcaatttgtcgattggttagaccaagcgtctgcggatgaagtaaaaggcgttcgctactccgtatttggatgcggcgataaaaattgggcggggacgtatcaaaaagtgcctgcttttatcgatgaaacgcttgccgctaaaggggcagaaaacatcgctgaccgcggtgaagcagatgcaagcgacgactttgaaggcgcgtatgaagaatggcgtgatcatatgtggagtgacgtagcagcctactttggtctcgacattgaaaacagtgaagataataaatctactctttcacttcaatttgtcgacagcgcggcggatatgccgcttgcgaaaatgcacggtgcgttttcaacgaacgtcgtagcaagcaaagaacttcaacagcctggcagtgcacgaagcacgcgacatcttgaaattgaacttccaaaagaagcttcttatcaagaaggagatcatttaggtgttattcctcgctattatgaaggaatagtaaaccgtgtaacacagaggttcggcctaagcgcatcacagctgatccgtctggaagcagaagaagaaaaattagctcatttgccactcgctaaaacagtatccgtagaagagcttctgcaatacgtggagcttcaagatcctgttacgcgcacgcagcttcgcgcaatggctgctaaaacggtctgcccgccgcataaagtagagcttgaagccttgcttggcaagcaagcctacaaagaacaagtgctggcaaaacgtttaacaatgcttgaactgcttgaaaaatacccggcgtgtgaaatgagtttcagcgaatttatcgcccttctgccaagcatacgcccgcgctattactcgatttcttcatcacctcgtgtcgatgaaaaacaagcaagcatcacggtcagcgttgtctcaggaccggcgtggagcggatatggagaatataaaggaattgcgtcgaactatcttgctgagctgcaagaaggagatacgattacgtgctttatttccacaccgcagtcagagtttacgctgccaaaagaccctgaaacgccgcttatcatggtcggaccgggaacaggcgtcgcgccgtttagaggctttgtgcaggcgcgcaaacagctaaaagaacaaggacagtcacttggagaagcacatttatacttcggctgccgttcacctcatgaagactatctgtatcaagaagagcttgaaaacgcccaaagcgaaggcatcattacgcttcataccgctttttctcgcatgccgaatcagccgaaaacatacgttcagcacgtaatggaacaagacggcaagaaattgattgaacttcttgatcaaggagcgcacttctatatttgcggagacggaattcaaatggcacctgccgttgaagcaacgcttatgaaaagctatgctgacgttcaccaagtgagtgaagcagacgctcgcttatggctgcagcagctagaagaaaaaggccgatacgcaaaagacgtgtggctgggg

SEQ ID NO: 1064 - protein, 1049 aa, synthetic construct
  REGION 1..1049: note = variant of P450 oxidase from Bacillus megaterium
MTIKEMPQPKTFGELKNLPLLNTDKPVQALMRIADELGEIFKFEAPGSVTRYLSSQRLIKEACDESRFDKNLSQGLKFARDFVGDGLVTSWTHEPNWKKAHNILVPSFSQHAMGRYHAMMVDIAVQLVQKWERLNADEHIEVSEDMTRLTLDTIGLCLFNYRFNSFYRDTPHPFIVSVVRALDEVMNKLQRANPDDPAYDENKRQCQEDIKVMNDYVDKIIADRKARGEQSHDLLTQMLNGKDPETGEPLDDGNIRQQIITFLIAGHQTTSGLLSFALYFLVKNPRVLQKVAEEAGRVLVDPVPSYKQVKQLKYVGMVLNEALRLWPVAPMFSLYAKEDTVLGGEYPLTKGDEVMVLVPQLHRDKTIWGDDVEEFRPERFENPSAIPQHAFKPFGNGQRACIGQQFALHSATLVLGMMLKHFDFEDHTNYELVIKESRTLKPEGFVVKAKSKGIPLGGIPSPSTEQSAKKVRKKAENAHNTPLLVLYGSNAGTAEGTARDLADIAMSKGFAPQVATLDSHAGNLPREGAVLIVTASYNGHPPDNAKQFVDWLDQASADEVKGVRYSVFGCGDKNWAGTYQKVPAFIDETLAAKGAENIADRGEADASDDFEGAYEEWRDHMWSDVAAYFGLDIENSEDNKSTLSLQFVDSAADMPLAKMHGAFSTNVVASKELQQPGSARSTRHLEIELPKEASYQEGDHLGVIPRYYEGIVNRVTQRFGLSASQLIRLEAEEEKLAHLPLAKTVSVEELLQYVELQDPVTRTQLRAMAAKTVCPPHKVELEALLGKQAYKEQVLAKRLTMLELLEKYPACEMSFSEFIALLPSIRPRYYSISSSPRVDEKQASITVSVVSGPAWSGYGEYKGIASNYLAELQEGDTITCFISTPQSEFTLPKDPETPLIMVGPGTGVAPFRGFVQARKQLKEQGQSLGEAHLYFGCRSPHEDYLYQEELENAQSEGIITLHTAFSRMPNQPKTYVQHVMEQDGKKLIELLDQGAHFYICGDGIQMAPAVEATLMKSYADVHQVSEADARLWLQQLEEKGRYAKDVWLG

SEQ ID NO: 1065 - DNA, 3147 bp, synthetic construct
  misc_feature 1..3147: note = variant of P450 oxidase from Bacillus megaterium
  source 1..3147: mol_type = other DNA
atgacaattaaggaaatgcctcagcctaagacgtttggagaacttaaaaatttaccgttattaaatacagataaaccggttcaagctttgatgcgtattgcggatgaattaggagaaatctttaaattcgaggcgcctggtagcgtaacgcgctatttatcaagtcagcgtctaattaaagaagcatgcgatgaatcacgctttgataaaaacttaagtcaagggcttaaatttgcacgtgattttgttggagacgggctggttacaagctggacgcatgaaccgaattggaaaaaagcgcataatatcttagttccaagctttagtcagcatgcaatggggcgttatcatgcgatgatggtcgatatcgccgtgcagcttgttcaaaagtgggagcgtctaaatgcagatgagcatattgaagtatcggaagacatgacacgtttaacgcttgatacaattggtctttgcctgtttaactatcgctttaacagcttttaccgagatacgcctcatccatttattgtgagtgtggttcgtgcactggatgaagtaatgaacaagctgcagcgagcaaatccagacgacccagcttatgatgaaaacaagcgccagtgtcaagaagatatcaaggtgatgaacgactatgtagataaaattattgcagatcgcaaagcaaggggtgaacaaagtcatgatttattaacgcagatgctaaacggaaaagatccagaaacgggtgagccgcttgatgacgggaacattcgtcagcaaattattacattcttaattgcgggacaccaaacgacaagtggtcttttatcatttgcgctgtatttcttagtgaaaaatagtcgtgtattacaaaaagtagcagaagaagcagcacgagttctagtagatcctgttccaagctacaaacaagtcaaacagcttaaatatgttggcatggtcttaaacgaagcgctgcgcttatggccagtagcgcctatgttttccctatatgcaaaagaagatacggtgcttggaggagaatatcctttaacgaaaggcgacgaagtaatggttctggtgcctcagcttcaccgtgataaaacaatttggggagacgatgtggaggagttccgtccagagcgttttgaaaatccaagtgcgattccgcagcatgcgtttaaaccgtttggaaacggtcagcgtgcgtgtatcggtcagcagttcgctcttcatagtgcaacgctggtacttggtatgatgctaaaacactttgactttgaagatcatacaaactacgagctcgttattaaagaatcgcggacgttaaaacctgaaggctttgtggtaaaagcaaaatcgaaaggcattccgcttggcggtattccttcacctagcactgaacagtctgctaaaaaagtacgcaaaaaggcagaaaacgctcataatacgccgctgcttgtgctatacggttcaaatgcgggaacagctgaaggaacggcgcgtgatttagcagatattgcaatgagcaaaggatttgcaccgcaggtcgcaacgcttgattcacacgccggtaatcttccgcgcgaaggagctgtattaattgtaacggcgtcttataacggtcatccgcctgataacgcaaagcaatttgtcgattggttagaccaagcgtctgcggatgaagtaaaaggcgttcgctactccgtatttggatgcggcgataaaaattgggcggggacgtatcaaaaagtgcctgcttttatcgatgaaacgcttgccgctaaaggggcagaaaacatcgctgaccgcggtgaagcagatgcaagcgacgactttgaaggcgcgtatgaagaatggcgtgatcatatgtggagtgacgtagcagcctactttggtctcgacattgaaaacagtgaagataataaatctactctttcacttcaatttgtcgacagcgcggcggatatgccgcttgcgaaaatgcacggtgcgttttcaacgaacgtcgtagcaagcaaagaacttcaacagcctggcagtgcacgaagcacgcgacatcttgaaattgaacttccaaaagaagcttcttatcaagaaggagatcatttaggtgttattcctcgctattatgaaggaatagtaaaccgtgtaacacagaggttcggcctaagcgcatcacagctgatccgtctggaagcagaagaagaaaaattagctcatttgccactcgctaaaacagtatccgtagaagagcttctgcaatacgtggagcttcaagatcctgttacgcgcacgcagcttcgcgcaatggctgctaaaacggtctgcccgccgcataaagtagagcttgaagccttgcttggcaagcaagcctacaaagaacaagtgctggcaaaacgtttaacaatgcttgaactgcttgaaaaatacccggcgtgtgaaatgagtttcagcgaatttatcgcccttctgccaagcatacgcccgcgctattactcgatttcttcatcacctcgtgtcgatgaaaaacaagcaagcatcacggtcagcgttgtctcaggaccggcgtggagcggatatggagaatataaaggaattgcgtcgaactatcttgctgagctgcaagaaggagatacgattacgtgctttatttccacaccgcagtcagagtttacgctgccaaaagaccctgaaacgccgcttatcatggtcggaccgggaacaggcgtcgcgccgtttagaggctttgtgcaggcgcgcaaacagctaaaagaacaaggacagtcacttggagaagcacatttatacttcggctgccgttcacctcatgaagactatctgtatcaagaagagcttgaaaacgcccaaagcgaaggcatcattacgcttcataccgctttttctcgcatgccgaatcagccgaaaacatacgttcagcacgtaatggaacaagacggcaagaaattgattgaacttcttgatcaaggagcgcacttctatatttgcggagacggaattcaaatggcacctgccgttgaagcaacgcttatgaaaagctatgctgacgttcaccaagtgagtgaagcagacgctcgcttatggctgcagcagctagaagaaaaaggccgatacgcaaaagacgtgtggctgggg

SEQ ID NO: 1066 - protein, 1049 aa, synthetic construct
  REGION 1..1049: note = variant of P450 oxidase from Bacillus megaterium
MTIKEMPQPKTFGELKNLPLLNTDKPVQALMRIADELGEIFKFEAPGSVTRYLSSQRLIKEACDESRFDKNLSQGLKFARDFVGDGLVTSWTHEPNWKKAHNILVPSFSQHAMGRYHAMMVDIAVQLVQKWERLNADEHIEVSEDMTRLTLDTIGLCLFNYRFNSFYRDTPHPFIVSVVRALDEVMNKLQRANPDDPAYDENKRQCQEDIKVMNDYVDKIIADRKARGEQSHDLLTQMLNGKDPETGEPLDDGNIRQQIITFLIAGHQTTSGLLSFALYFLVKNSRVLQKVAEEAARVLVDPVPSYKQVKQLKYVGMVLNEALRLWPVAPMFSLYAKEDTVLGGEYPLTKGDEVMVLVPQLHRDKTIWGDDVEEFRPERFENPSAIPQHAFKPFGNGQRACIGQQFALHSATLVLGMMLKHFDFEDHTNYELVIKESRTLKPEGFVVKAKSKGIPLGGIPSPSTEQSAKKVRKKAENAHNTPLLVLYGSNAGTAEGTARDLADIAMSKGFAPQVATLDSHAGNLPREGAVLIVTASYNGHPPDNAKQFVDWLDQASADEVKGVRYSVFGCGDKNWAGTYQKVPAFIDETLAAKGAENIADRGEADASDDFEGAYEEWRDHMWSDVAAYFGLDIENSEDNKSTLSLQFVDSAADMPLAKMHGAFSTNVVASKELQQPGSARSTRHLEIELPKEASYQEGDHLGVIPRYYEGIVNRVTQRFGLSASQLIRLEAEEEKLAHLPLAKTVSVEELLQYVELQDPVTRTQLRAMAAKTVCPPHKVELEALLGKQAYKEQVLAKRLTMLELLEKYPACEMSFSEFIALLPSIRPRYYSISSSPRVDEKQASITVSVVSGPAWSGYGEYKGIASNYLAELQEGDTITCFISTPQSEFTLPKDPETPLIMVGPGTGVAPFRGFVQARKQLKEQGQSLGEAHLYFGCRSPHEDYLYQEELENAQSEGIITLHTAFSRMPNQPKTYVQHVMEQDGKKLIELLDQGAHFYICGDGIQMAPAVEATLMKSYADVHQVSEADARLWLQQLEEKGRYAKDVWLG

SEQ ID NO: 1067 - DNA, 3147 bp, synthetic construct
  misc_feature 1..3147: note = variant of P450 oxidase from Bacillus megaterium
  source 1..3147: mol_type = other DNA
atgacaattaaggaaatgcctcagcctaagacgtttggagaacttaaaaatttaccgttattaaatacagataaaccggttcaagctttgatgcgtattgcggatgaattaggagaaatctttaaattcgaggcgcctggtagcgtaacgcgctatttatcaagtcagcgtctaattaaagaagcatgcgatgaatcacgctttgataaaaacttaagtcaagggcttaaatttgcacgtgattttgttggagacgggctggttacaagctggacgcatgaaccgaattggaaaaaagcgcataatatcttagttccaagctttagtcagcatgcaatggggcgttatcatgcgatgatggtcgatatcgccgtgcagcttgttcaaaagtgggagcgtctaaatgcagatgagcatattgaagtatcggaagacatgacacgtttaacgcttgatacaattggtctttgcctgtttaactatcgctttaacagcttttaccgagatacgcctcatccatttattgtgagtgtggttcgtgcactggatgaagtaatgaacaagctgcagcgagcaaatccagacgacccagcttatgatgaaaacaagcgccagtgtcaagaagatatcaaggtgatgaacgactatgtagataaaattattgcagatcgcaaagcaaggggtgaacaaagtcatgatttattaacgcagatgctaaacggaaaagatccagaaacgggtgagccgcttgatgacgggaacattcgtcagcaaattattacattcttaattgcgggacaccaaacgacaagtggtcttttatcatttgcgctgtatttcttagtgaaaaatccacgtgtattacaaaaagtagcagaagaagcagcacgagttctagtagatcctgttccaagctacaaacaagtcaaacagcttaaatatgttggcatggtcttaaacgaagcgctgcgcttatggccagtagcgcctatgttttccctatatgcaaaagaagatacggtgcttggaggagaatatcctttaacgaaaggcgacgaagtaatggttctggtgcctcagcttcaccgtgataaaacaatttggggagacaaggtggaggagttccgtccagagcgttttgaaaatccaagtgcgattccgcagcatgcgtttaaaccgtttggaaacggtcagcgtgcgtgtatcggtcagcagttcgctcttcatagtgcaacgctggtacttggtatgatgctaaaacactttgactttgaagatcatacaaactacgagctcgttattaaagaatcgcggacgttaaaacctgaaggctttgtggtaaaagcaaaatcgaaaggcattccgcttggcggtattccttcacctagcactgaacagtctgctaaaaaagtacgcaaaaaggcagaaaacgctcataatacgccgctgcttgtgctatacggttcaaatgcgggaacagctgaaggaacggcgcgtgatttagcagatattgcaatgagcaaaggatttgcaccgcaggtcgcaacgcttgattcacacgccggtaatcttccgcgcgaaggagctgtattaattgtaacggcgtcttataacggtcatccgcctgataacgcaaagcaatttgtcgattggttagaccaagcgtctgcggatgaagtaaaaggcgttcgctactccgtatttggatgcggcgataaaaattgggcggggacgtatcaaaaagtgcctgcttttatcgatgaaacgcttgccgctaaaggggcagaaaacatcgctgaccgcggtgaagcagatgcaagcgacgactttgaaggcgcgtatgaagaatggcgtgatcatatgtggagtgacgtagcagcctactttggtctcgacattgaaaacagtgaagataataaatctactctttcacttcaatttgtcgacagcgcggcggatatgccgcttgcgaaaatgcacggtgcgttttcaacgaacgtcgtagcaagcaaagaacttcaacagcctggcagtgcacgaagcacgcgacatcttgaaattgaacttccaaaagaagcttcttatcaagaaggagatcatttaggtgttattcctcgctattatgaaggaatagtaaaccgtgtaacacagaggttcggcctaagcgcatcacagctgatccgtctggaagcagaagaagaaaaattagctcatttgccactcgctaaaacagtatccgtagaagagcttctgcaatacgtggagcttcaagatcctgttacgcgcacgcagcttcgcgcaatggctgctaaaacggtctgcccgccgcataaagtagagcttgaagccttgcttggcaagcaagcctacaaagaacaagtgctggcaaaacgtttaacaatgcttgaactgcttgaaaaatacccggcgtgtgaaatgagtttcagcgaatttatcgcccttctgccaagcatacgcccgcgctattactcgatttcttcatcacctcgtgtcgatgaaaaacaagcaagcatcacggtcagcgttgtctcaggaccggcgtggagcggatatggagaatataaaggaattgcgtcgaactatcttgctgagctgcaagaaggagatacgattacgtgctttatttccacaccgcagtcagagtttacgctgccaaaagaccctgaaacgccgcttatcatggtcggaccgggaacaggcgtcgcgccgtttagaggctttgtgcaggcgcgcaaacagctaaaagaacaaggacagtcacttggagaagcacatttatacttcggctgccgttcacctcatgaagactatctgtatcaagaagagcttgaaaacgcccaaagcgaaggcatcattacgcttcataccgctttttctcgcatgccgaatcagccgaaaacatacgttcagcacgtaatggaacaagacggcaagaaattgattgaacttcttgatcaaggagcgcacttctatatttgcggagacggaattcaaatggcacctgccgttgaagcaacgcttatgaaaagctatgctgacgttcaccaagtgagtgaagcagacgctcgcttatggctgcagcagctagaagaaaaaggccgatacgcaaaagacgtgtggctgggg

SEQ ID NO: 1068 - protein, 1049 aa, synthetic construct
  REGION 1..1049: note = variant of P450 oxidase from Bacillus megaterium
MTIKEMPQPKTFGELKNLPLLNTDKPVQALMRIADELGEIFKFEAPGSVTRYLSSQRLIKEACDESRFDKNLSQGLKFARDFVGDGLVTSWTHEPNWKKAHNILVPSFSQHAMGRYHAMMVDIAVQLVQKWERLNADEHIEVSEDMTRLTLDTIGLCLFNYRFNSFYRDTPHPFIVSVVRALDEVMNKLQRANPDDPAYDENKRQCQEDIKVMNDYVDKIIADRKARGEQSHDLLTQMLNGKDPETGEPLDDGNIRQQIITFLIAGHQTTSGLLSFALYFLVKNPRVLQKVAEEAARVLVDPVPSYKQVKQLKYVGMVLNEALRLWPVAPMFSLYAKEDTVLGGEYPLTKGDEVMVLVPQLHRDKTIWGDKVEEFRPERFENPSAIPQHAFKPFGNGQRACIGQQFALHSATLVLGMMLKHFDFEDHTNYELVIKESRTLKPEGFVVKAKSKGIPLGGIPSPSTEQSAKKVRKKAENAHNTPLLVLYGSNAGTAEGTARDLADIAMSKGFAPQVATLDSHAGNLPREGAVLIVTASYNGHPPDNAKQFVDWLDQASADEVKGVRYSVFGCGDKNWAGTYQKVPAFIDETLAAKGAENIADRGEADASDDFEGAYEEWRDHMWSDVAAYFGLDIENSEDNKSTLSLQFVDSAADMPLAKMHGAFSTNVVASKELQQPGSARSTRHLEIELPKEASYQEGDHLGVIPRYYEGIVNRVTQRFGLSASQLIRLEAEEEKLAHLPLAKTVSVEELLQYVELQDPVTRTQLRAMAAKTVCPPHKVELEALLGKQAYKEQVLAKRLTMLELLEKYPACEMSFSEFIALLPSIRPRYYSISSSPRVDEKQASITVSVVSGPAWSGYGEYKGIASNYLAELQEGDTITCFISTPQSEFTLPKDPETPLIMVGPGTGVAPFRGFVQARKQLKEQGQSLGEAHLYFGCRSPHEDYLYQEELENAQSEGIITLHTAFSRMPNQPKTYVQHVMEQDGKKLIELLDQGAHFYICGDGIQMAPAVEATLMKSYADVHQVSEADARLWLQQLEEKGRYAKDVWLG

SEQ ID NO: 1069 - DNA, 3147 bp, synthetic construct
  misc_feature 1..3147: note = variant of P450 oxidase from Bacillus megaterium
  source 1..3147: mol_type = other DNA
atgacaattaaggaaatgcctcagcctaagacgtttggagaacttaaaaatttaccgttattaaatacagataaaccggttcaagctttgatgcgtattgcggatgaattaggagaaatctttaaattcgaggcgcctggtagcgtaacgcgctatttatcaagtcagcgtctaattaaagaagcatgcgatgaatcacgctttgataaaaacttaagtcaagggcttaaatttgcacgtgattttgttggagacgggctggttacaagctggacgcatgaaccgaattggaaaaaagcgcataatatcttagttccaagctttagtcagcatgcaatggggcgttatcatgcgatgatggtcgatatcgccgtgcagcttgttcaaaagtgggagcgtctaaatgcagatgagcatattgaagtatcggaagacatgacacgtttaacgcttgatacaattggtctttgcctgtttaactatcgctttaacagcttttaccgagatacgcctcatccatttattgtgagtgtggttcgtgcactggatgaagtaatgaacaagctgcagcgagcaaatccagacgacccagcttatgatgaaaacaagcgccagtgtcaagaagatatcaaggtgatgaacgactatgtagataaaattattgcagatcgcaaagcaaggggtgaacaaagtcatgatttattaacgcagatgctaaacggaaaagatccagaaacgggtgagccgcttgatgacgggaacattcgtcagcaaattattacattcttaattgcgggacaccaaacgacaagtggtcttttatcatttgcgctgtatttcttagtgaaaaatccacgtgtattacaaaaagtagcagaagaagcagcacgagttctagtagatcctgttccaagctacaaacaagtcaaacagcttaaatatgttggcatggtcttaaacgaagcgctgcgcttatggccagtagcgcctatgttttccctatatgcaaaagaagatacggtgcttggaggagaatatcctttaacgaaaggcgacgaagtaatggttctggtgcctcagcttcaccgtgataaaacaatttggggagacgatgtggaggagttccgtccagagcgttttgaaaatccaagtgcgattccgcagcatgcgtttaaaccgtttggaaacggtcagcgtgcgtgtatcggtcagcagttcgctcttcatagtgcaacgctggtacttggtatgatgctaaaacactttgactttgaagatcatacaaactacgagctcgttattaaagaatcgcggacgttaaaacctgaaggctttgtggtaaaagcaaaatcgaaaggcattccgcttggcggtattccttcacctagcactgaacagtctgctaaaaaagtacgcaaaaaggcagaaaacgctcataatttgccgctgcttgtgctatacggttcaaatgcgggaacagctgaaggaacggcgcgtgatttagcagatattgcaatgagcaaaggatttgcaccgcaggtcgcaacgcttgattcacacgccggtaatcttccgcgcgaaggagctgtattaattgtaacggcgtcttataacggtcatccgcctgataacgcaaagcaatttgtcgattggttagaccaagcgtctgcggatgaagtaaaaggcgttcgctactccgtatttggatgcggcgataaaaattgggcggggacgtatcaaaaagtgcctgcttttatcgatgaaacgcttgccgctaaaggggcagaaaacatcgctgaccgcggtgaagcagatgcaagcgacgactttgaaggcgcgtatgaagaatggcgtgatcatatgtggagtgacgtagcagcctactttggtctcgacattgaaaacagtgaagataataaatctactctttcacttcaatttgtcgacagcgcggcggatatgccgcttgcgaaaatgcacggtgcgttttcaacgaacgtcgtagcaagcaaagaacttcaacagcctggcagtgcacgaagcacgcgacatcttgaaattgaacttccaaaagaagcttcttatcaagaaggagatcatttaggtgttattcctcgctattatgaaggaatagtaaaccgtgtaacacagaggttcggcctaagcgcatcacagctgatccgtctggaagcagaagaagaaaaattagctcatttgccactcgctaaaacagtatccgtagaagagcttctgcaatacgtggagcttcaagatcctgttacgcgcacgcagcttcgcgcaatggctgctaaaacggtctgcccgccgcataaagtagagcttgaagccttgcttggcaagcaagcctacaaagaacaagtgctggcaaaacgtttaacaatgcttgaactgcttgaaaaatacccggcgtgtgaaatgagtttcagcgaatttatcgcccttctgccaagcatacgcccgcgctattactcgatttcttcatcacctcgtgtcgatgaaaaacaagcaagcatcacggtcagcgttgtctcaggaccggcgtggagcggatatggagaatataaaggaattgcgtcgaactatcttgctgagctgcaagaaggagatacgattacgtgctttatttccacaccgcagtcagagtttacgctgccaaaagaccctgaaacgccgcttatcatggtcggaccgggaacaggcgtcgcgccgtttagaggctttgtgcaggcgcgcaaacagctaaaagaacaaggacagtcacttggagaagcacatttatacttcggctgccgttcacctcatgaagactatctgtatcaagaagagcttgaaaacgcccaaagcgaaggcatcattacgcttcataccgctttttctcgcatgccgaatcagccgaaaacatacgttcagcacgtaatggaacaagacggcaagaaattgattgaacttcttgatcaaggagcgcacttctatatttgcggagacggaattcaaatggcacctgccgttgaagcaacgcttatgaaaagctatgctgacgttcaccaagtgagtgaagcagacgctcgcttatggctgcagcagctagaagaaaaaggccgatacgcaaaagacgtgtggctgggg

SEQ ID NO: 1070 - protein, 1049 aa, synthetic construct
  REGION 1..1049: note = variant of P450 oxidase from Bacillus megaterium
MTIKEMPQPKTFGELKNLPLLNTDKPVQALMRIADELGEIFKFEAPGSVTRYLSSQRLIKEACDESRFDKNLSQGLKFARDFVGDGLVTSWTHEPNWKKAHNILVPSFSQHAMGRYHAMMVDIAVQLVQKWERLNADEHIEVSEDMTRLTLDTIGLCLFNYRFNSFYRDTPHPFIVSVVRALDEVMNKLQRANPDDPAYDENKRQCQEDIKVMNDYVDKIIADRKARGEQSHDLLTQMLNGKDPETGEPLDDGNIRQQIITFLIAGHQTTSGLLSFALYFLVKNPRVLQKVAEEAARVLVDPVPSYKQVKQLKYVGMVLNEALRLWPVAPMFSLYAKEDTVLGGEYPLTKGDEVMVLVPQLHRDKTIWGDDVEEFRPERFENPSAIPQHAFKPFGNGQRACIGQQFALHSATLVLGMMLKHFDFEDHTNYELVIKESRTLKPEGFVVKAKSKGIPLGGIPSPSTEQSAKKVRKKAENAHNLPLLVLYGSNAGTAEGTARDLADIAMSKGFAPQVATLDSHAGNLPREGAVLIVTASYNGHPPDNAKQFVDWLDQASADEVKGVRYSVFGCGDKNWAGTYQKVPAFIDETLAAKGAENIADRGEADASDDFEGAYEEWRDHMWSDVAAYFGLDIENSEDNKSTLSLQFVDSAADMPLAKMHGAFSTNVVASKELQQPGSARSTRHLEIELPKEASYQEGDHLGVIPRYYEGIVNRVTQRFGLSASQLIRLEAEEEKLAHLPLAKTVSVEELLQYVELQDPVTRTQLRAMAAKTVCPPHKVELEALLGKQAYKEQVLAKRLTMLELLEKYPACEMSFSEFIALLPSIRPRYYSISSSPRVDEKQASITVSVVSGPAWSGYGEYKGIASNYLAELQEGDTITCFISTPQSEFTLPKDPETPLIMVGPGTGVAPFRGFVQARKQLKEQGQSLGEAHLYFGCRSPHEDYLYQEELENAQSEGIITLHTAFSRMPNQPKTYVQHVMEQDGKKLIELLDQGAHFYICGDGIQMAPAVEATLMKSYADVHQVSEADARLWLQQLEEKGRYAKDVWLG

SEQ ID NO: 1071 - DNA, 3147 bp, synthetic construct
  misc_feature 1..3147: note = variant of P450 oxidase from Bacillus megaterium
  source 1..3147: mol_type = other DNA
atgacaattaaggaaatgcctcagcctaagacgtttggagaacttaaaaatttaccgttattaaatacagataaaccggttcaagctttgatgcgtattgcggatgaattaggagaaatctttaaattcgaggcgcctggtagcgtaacgcgctatttatcaagtcagcgtctaattaaagaagcatgcgatgaatcacgctttgataaaaacttaagtcaagggcttaaatttgcacgtgattttgttggagacgggctggttacaagctggacgcatgaaccgaattggaaaaaagcgcataatatcttagttccaagctttagtcagcatgcaatggggcgttatcatgcgatgatggtcgatatcgccgtgcagcttgttcaaaagtgggagcgtctaaatgcagatgagcatattgaagtatcggaagacatgacacgtttaacgcttgatacaattggtctttgcctgtttaactatcgctttaacagcttttaccgagatacgcctcatccatttattgtgagtgtggttcgtgcactggatgaagtaatgaacaagctgcagcgagcaaatccagacgacccagcttatgatgaaaacaagcgccagtgtcaagaagatatcaaggtgatgaacgactatgtagataaaattattgcagatcgcaaagcaaggggtgaacaaagtcatgatttattaacgcagatgctaaacggaaaagatccagaaacgggtgagccgcttgatgacgggaacattcgtcagcaaattattacattcttaattgcgggacaccaaacgacaagtggtcttttatcatttgcgctgtatttcttagtgaaaaatccacgtgtattacaaaaagtaagtgaagaagcagcacgagttctagtagatcctgttccaagctacaaacaagtcaaacagcttaaatatgttggcatggtcttaaacgaagcgctgcgcttatggccagtagcgcctatgttttccctatatgcaaaagaagatacggtgcttggaggagaatatcctttaacgaaaggcgacgaagtaatggttctggtgcctcagcttcaccgtgataaaacaatttggggagacgatgtggaggagttccgtccagagcgttttgaaaatccaagtgcgattccgcagcatgcgtttaaaccgtttggaaacggtcagcgtgcgtgtatcggtcagcagttcgctcttcatagtgcaacgctggtacttggtatgatgctaaaacactttgactttgaagatcatacaaactacgagctcgttattaaagaatcgcggacgttaaaacctgaaggctttgtggtaaaagcaaaatcgaaaggcattccgcttggcggtattccttcacctagcactgaacagtctgctaaaaaagtacgcaaaaaggcagaaaacgctcataatacgccgctgcttgtgctatacggttcaaatgcgggaacagctgaaggaacggcgcgtgatttagcagatattgcaatgagcaaaggatttgcaccgcaggtcgcaacgcttgattcacacgccggtaatcttccgcgcgaaggagctgtattaattgtaacggcgtcttataacggtcatccgcctgataacgcaaagcaatttgtcgattggttagaccaagcgtctgcggatgaagtaaaaggcgttcgctactccgtatttggatgcggcgataaaaattgggcggggacgtatcaaaaagtgcctgcttttatcgatgaaacgcttgccgctaaaggggcagaaaacatcgctgaccgcggtgaagcagatgcaagcgacgactttgaaggcgcgtatgaagaatggcgtgatcatatgtggagtgacgtagcagcctactttggtctcgacattgaaaacagtgaagataataaatctactctttcacttcaatttgtcgacagcgcggcggatatgccgcttgcgaaaatgcacggtgcgttttcaacgaacgtcgtagcaagcaaagaacttcaacagcctggcagtgcacgaagcacgcgacatcttgaaattgaacttccaaaagaagcttcttatcaagaaggagatcatttaggtgttattcctcgctattatgaaggaatagtaaaccgtgtaacacagaggttcggcctaagcgcatcacagctgatccgtctggaagcagaagaagaaaaattagctcatttgccactcgctaaaacagtatccgtagaagagcttctgcaatacgtggagcttcaagatcctgttacgcgcacgcagcttcgcgcaatggctgctaaaacggtctgcccgccgcataaagtagagcttgaagccttgcttggcaagcaagcctacaaagaacaagtgctggcaaaacgtttaacaatgcttgaactgcttgaaaaatacccggcgtgtgaaatgagtttcagcgaatttatcgcccttctgccaagcatacgcccgcgctattactcgatttcttcatcacctcgtgtcgatgaaaaacaagcaagcatcacggtcagcgttgtctcaggaccggcgtggagcggatatggagaatataaaggaattgcgtcgaactatcttgctgagctgcaagaaggagatacgattacgtgctttatttccacaccgcagtcagagtttacgctgccaaaagaccctgaaacgccgcttatcatggtcggaccgggaacaggcgtcgcgccgtttagaggctttgtgcaggcgcgcaaacagctaaaagaacaaggacagtcacttggagaagcacatttatacttcggctgccgttcacctcatgaagactatctgtatcaagaagagcttgaaaacgcccaaagcgaaggcatcattacgcttcataccgctttttctcgcatgccgaatcagccgaaaacatacgttcagcacgtaatggaacaagacggcaagaaattgattgaacttcttgatcaaggagcgcacttctatatttgcggagacggaattcaaatggcacctgccgttgaagcaacgcttatgaaaagctatgctgacgttcaccaagtgagtgaagcagacgctcgcttatggctgcagcagctagaagaaaaaggccgatacgcaaaagacgtgtggctgggg

SEQ ID NO: 1072 - protein, 1049 aa, synthetic construct
  REGION 1..1049: note = variant of P450 oxidase from Bacillus megaterium
MTIKEMPQPKTFGELKNLPLLNTDKPVQALMRIADELGEIFKFEAPGSVTRYLSSQRLIKEACDESRFDKNLSQGLKFARDFVGDGLVTSWTHEPNWKKAHNILVPSFSQHAMGRYHAMMVDIAVQLVQKWERLNADEHIEVSEDMTRLTLDTIGLCLFNYRFNSFYRDTPHPFIVSVVRALDEVMNKLQRANPDDPAYDENKRQCQEDIKVMNDYVDKIIADRKARGEQSHDLLTQMLNGKDPETGEPLDDGNIRQQIITFLIAGHQTTSGLLSFALYFLVKNPRVLQKVSEEAARVLVDPVPSYKQVKQLKYVGMVLNEALRLWPVAPMFSLYAKEDTVLGGEYPLTKGDEVMVLVPQLHRDKTIWGDDVEEFRPERFENPSAIPQHAFKPFGNGQRACIGQQFALHSATLVLGMMLKHFDFEDHTNYELVIKESRTLKPEGFVVKAKSKGIPLGGIPSPSTEQSAKKVRKKAENAHNTPLLVLYGSNAGTAEGTARDLADIAMSKGFAPQVATLDSHAGNLPREGAVLIVTASYNGHPPDNAKQFVDWLDQASADEVKGVRYSVFGCGDKNWAGTYQKVPAFIDETLAAKGAENIADRGEADASDDFEGAYEEWRDHMWSDVAAYFGLDIENSEDNKSTLSLQFVDSAADMPLAKMHGAFSTNVVASKELQQPGSARSTRHLEIELPKEASYQEGDHLGVIPRYYEGIVNRVTQRFGLSASQLIRLEAEEEKLAHLPLAKTVSVEELLQYVELQDPVTRTQLRAMAAKTVCPPHKVELEALLGKQAYKEQVLAKRLTMLELLEKYPACEMSFSEFIALLPSIRPRYYSISSSPRVDEKQASITVSVVSGPAWSGYGEYKGIASNYLAELQEGDTITCFISTPQSEFTLPKDPETPLIMVGPGTGVAPFRGFVQARKQLKEQGQSLGEAHLYFGCRSPHEDYLYQEELENAQSEGIITLHTAFSRMPNQPKTYVQHVMEQDGKKLIELLDQGAHFYICGDGIQMAPAVEATLMKSYADVHQVSEADARLWLQQLEEKGRYAKDVWLG

SEQ ID NO: 1073 - DNA, 3147 bp, synthetic construct
  misc_feature 1..3147: note = variant of P450 oxidase from Bacillus megaterium
  source 1..3147: mol_type = other DNA
atgacaattaaggaaatgcctcagcctaagacgtttggagaacttaaaaatttaccgttattaaatacagataaaccggttcaagctttgatgcgtattgcggatgaattaggagaaatctttaaattcgaggcgcctggtagcgtaacgcgctatttatcaagtcagcgtctaattaaagaagcatgcgatgaatcacgctttgataaaaacttaagtcaagggcttaaatttgcacgtgattttgttggagacgggctggttacaagctggacgcatgaaccgaattggaaaaaagcgcataatatcttagttccaagctttagtcagcatgcaatggggcgttatcatgcgatgatggtcgatatcgccgtgcagcttgttcaaaagtgggagcgtctaaatgcagatgagcatattgaagtatcggaagacatgacacgtttaacgcttgatacaattggtctttgcctgtttaactatcgctttaacagcttttaccgagatacgcctcatccatttattgtgagtgtggttcgtgcactggatgaagtaatgaacaagctgcagcgagcaaatccagacgacccagcttatgatgaaaacaagcgccagtgtcaagaagatatcaaggtgatgaacgactatgtagataaaattattgcagatcgcaaagcaaggggtgaacaaagtcatgatttattaacgcagatgctaaacggaaaagatccagaaacgggtgagccgcttgatgacgggaacattcgtcagcaaattattacattcttaattgcgggacaccaaacgacaagtggtcttttatcatttgcgctgtatttcttagtgaaaaatccacgtgtattacaaaaagtagcagaagaagcacagcgagttctagtagatcctgttccaagctacaaacaagtcaaacagcttaaatatgttggcatggtcttaaacgaagcgctgcgcttatggccagtagcgcctatgttttccctatatgcaaaagaagatacggtgcttggaggagaatatcctttaacgaaaggcgacgaagtaatggttctggtgcctcagcttcaccgtgataaaacaatttggggagacgatgtggaggagttccgtccagagcgttttgaaaatccaagtgcgattccgcagcatgcgtttaaaccgtttggaaacggtcagcgtgcgtgtatcggtcagcagttcgctcttcatagtgcaacgctggtacttggtatgatgctaaaacactttgactttgaagatcatacaaactacgagctcgttattaaagaatcgcggacgttaaaacctgaaggctttgtggtaaaagcaaaatcgaaaggcattccgcttggcggtattccttcacctagcactgaacagtctgctaaaaaagtacgcaaaaaggcagaaaacgctcataatacgccgctgcttgtgctatacggttcaaatgcgggaacagctgaaggaacggcgcgtgatttagcagatattgcaatgagcaaaggatttgcaccgcaggtcgcaacgcttgattcacacgccggtaatcttccgcgcgaaggagctgtattaattgtaacggcgtcttataacggtcatccgcctgataacgcaaagcaatttgtcgattggttagaccaagcgtctgcggatgaagtaaaaggcgttcgctactccgtatttggatgcggcgataaaaattgggcggggacgtatcaaaaagtgcctgcttttatcgatgaaacgcttgccgctaaaggggcagaaaacatcgctgaccgcggtgaagcagatgcaagcgacgactttgaaggcgcgtatgaagaatggcgtgatcatatgtggagtgacgtagcagcctactttggtctcgacattgaaaacagtgaagataataaatctactctttcacttcaatttgtcgacagcgcggcggatatgccgcttgcgaaaatgcacggtgcgttttcaacgaacgtcgtagcaagcaaagaacttcaacagcctggcagtgcacgaagcacgcgacatcttgaaattgaacttccaaaagaagcttcttatcaagaaggagatcatttaggtgttattcctcgctattatgaaggaatagtaaaccgtgtaacacagaggttcggcctaagcgcatcacagctgatccgtctggaagcagaagaagaaaaattagctcatttgccactcgctaaaacagtatccgtagaagagcttctgcaatacgtggagcttcaagatcctgttacgcgcacgcagcttcgcgcaatggctgctaaaacggtctgcccgccgcataaagtagagcttgaagccttgcttggcaagcaagcctacaaagaacaagtgctggcaaaacgtttaacaatgcttgaactgcttgaaaaatacccggcgtgtgaaatgagtttcagcgaatttatcgcccttctgccaagcatacgcccgcgctattactcgatttcttcatcacctcgtgtcgatgaaaaacaagcaagcatcacggtcagcgttgtctcaggaccggcgtggagcggatatggagaatataaaggaattgcgtcgaactatcttgctgagctgcaagaaggagatacgattacgtgctttatttccacaccgcagtcagagtttacgctgccaaaagaccctgaaacgccgcttatcatggtcggaccgggaacaggcgtcgcgccgtttagaggctttgtgcaggcgcgcaaacagctaaaagaacaaggacagtcacttggagaagcacatttatacttcggctgccgttcacctcatgaagactatctgtatcaagaagagcttgaaaacgcccaaagcgaaggcatcattacgcttcataccgctttttctcgcatgccgaatcagccgaaaacatacgttcagcacgtaatggaacaagacggcaagaaattgattgaacttcttgatcaaggagcgcacttctatatttgcggagacggaattcaaatggcacctgccgttgaagcaacgcttatgaaaagctatgctgacgttcaccaagtgagtgaagcagacgctcgcttatggctgcagcagctagaagaaaaaggccgatacgcaaaagacgtgtggctgggg

SEQ ID NO: 1074 - protein, 1049 aa, synthetic construct
  REGION 1..1049: note = variant of P450 oxidase from Bacillus megaterium
MTIKEMPQPKTFGELKNLPLLNTDKPVQALMRIADELGEIFKFEAPGSVTRYLSSQRLIKEACDESRFDKNLSQGLKFARDFVGDGLVTSWTHEPNWKKAHNILVPSFSQHAMGRYHAMMVDIAVQLVQKWERLNADEHIEVSEDMTRLTLDTIGLCLFNYRFNSFYRDTPHPFIVSVVRALDEVMNKLQRANPDDPAYDENKRQCQEDIKVMNDYVDKIIADRKARGEQSHDLLTQMLNGKDPETGEPLDDGNIRQQIITFLIAGHQTTSGLLSFALYFLVKNPRVLQKVAEEAQRVLVDPVPSYKQVKQLKYVGMVLNEALRLWPVAPMFSLYAKEDTVLGGEYPLTKGDEVMVLVPQLHRDKTIWGDDVEEFRPERFENPSAIPQHAFKPFGNGQRACIGQQFALHSATLVLGMMLKHFDFEDHTNYELVIKESRTLKPEGFVVKAKSKGIPLGGIPSPSTEQSAKKVRKKAENAHNTPLLVLYGSNAGTAEGTARDLADIAMSKGFAPQVATLDSHAGNLPREGAVLIVTASYNGHPPDNAKQFVDWLDQASADEVKGVRYSVFGCGDKNWAGTYQKVPAFIDETLAAKGAENIADRGEADASDDFEGAYEEWRDHMWSDVAAYFGLDIENSEDNKSTLSLQFVDSAADMPLAKMHGAFSTNVVASKELQQPGSARSTRHLEIELPKEASYQEGDHLGVIPRYYEGIVNRVTQRFGLSASQLIRLEAEEEKLAHLPLAKTVSVEELLQYVELQDPVTRTQLRAMAAKTVCPPHKVELEALLGKQAYKEQVLAKRLTMLELLEKYPACEMSFSEFIALLPSIRPRYYSISSSPRVDEKQASITVSVVSGPAWSGYGEYKGIASNYLAELQEGDTITCFISTPQSEFTLPKDPETPLIMVGPGTGVAPFRGFVQARKQLKEQGQSLGEAHLYFGCRSPHEDYLYQEELENAQSEGIITLHTAFSRMPNQPKTYVQHVMEQDGKKLIELLDQGAHFYICGDGIQMAPAVEATLMKSYADVHQVSEADARLWLQQLEEKGRYAKDVWLG

SEQ ID NO: 1075 - DNA, 3147 bp, synthetic construct
  misc_feature 1..3147: note = variant of P450 oxidase from Bacillus megaterium
  source 1..3147: mol_type = other DNA
atgacaattaaggaaatgcctcagcctaagacgtttggagaacttaaaaatttaccgttattaaatacagataaaccggttcaagctttgatgcgtattgcggatgaattaggagaaatctttaaattcgaggcgcctggtagcgtaacgcgctatttatcaagtcagcgtctaattaaagaagcatgcgatgaatcacgctttgataaaaacttaagtcaagggcttaaatttgcacgtgattttgttggagacgggctggttacaagctggacgcatgaaccgaattggaaaaaagcgcataatatcttagttccaagctttagtcagcatgcaatggggcgttatcatgcgatgatggtcgatatcgccgtgcagcttgttcaaaagtgggagcgtctaaatgcagatgagcatattgaagtatcggaagacatgacacgtttaacgcttgatacaattggtctttgcctgtttaactatcgctttaacagcttttaccgagatacgcctcatccatttattgtgagtgtggttcgtgcactggatgaagtaatgaacaagctgcagcgagcaaatccagacgacccagcttatgatgaaaacaagcgccagtgtcaagaagatatcaaggtgatgaacgactatgtagataaaattattgcagatcgcaaagcaaggggtgaacaaagtcatgatttattaacgcagatgctaaacggaaaagatccagaaacgggtgagccgcttgatgacgggaacattcgtcagcaaattattacattcttaattgcgggacaccaaacgacaagtggtcttttatcatttgcgctgtatttcttagtgaaaaatccacgtgtattacaaaaagtagcagaagaagcagcacgagttctagtagatcctgttccaagctacaaacaagtcaaacagcttaaatatgttggcatggtcttaaacgaagcgctgcgcttatggccagtagcgcctatgttttccctatatgcaaaagaagatacggtgcttggaggagaatatcctttaacgaaaggcgacgaagtaatggttctggtgcctcagcttcaccgtgataaaacaatttggggagacgatgtggaggagttccgtccagagcgttttgaaaatccaagtgcgattccgcagcatgcgtttaaaccgtttggaaacggtcagcgtgcgtgtatcggtcagcagttcgctcttcatagtgcaacgctggtacttggtatgatgctaaaacactttgactttgaagatcatacaaactacgagctcgttattaaagaatcgcggacgttaaaacctgaaggctttgtggtaaaagcaaaatcgaaaggcattccgcttggcggtattccttcacctgtgactgaacagtctgctaaaaaagtacgcaaaaaggcagaaaacgctcataatacgccgctgcttgtgctatacggttcaaatgcgggaacagctgaaggaacggcgcgtgatttagcagatattgcaatgagcaaaggatttgcaccgcaggtcgcaacgcttgattcacacgccggtaatcttccgcgcgaaggagctgtattaattgtaacggcgtcttataacggtcatccgcctgataacgcaaagcaatttgtcgattggttagaccaagcgtctgcggatgaagtaaaaggcgttcgctactccgtatttggatgcggcgataaaaattgggcggggacgtatcaaaaagtgcctgcttttatcgatgaaacgcttgccgctaaaggggcagaaaacatcgctgaccgcggtgaagcagatgcaagcgacgactttgaaggcgcgtatgaagaatggcgtgatcatatgtggagtgacgtagcagcctactttggtctcgacattgaaaacagtgaagataataaatctactctttcacttcaatttgtcgacagcgcggcggatatgccgcttgcgaaaatgcacggtgcgttttcaacgaacgtcgtagcaagcaaagaacttcaacagcctggcagtgcacgaagcacgcgacatcttgaaattgaacttccaaaagaagcttcttatcaagaaggagatcatttaggtgttattcctcgctattatgaaggaatagtaaaccgtgtaacacagaggttcggcctaagcgcatcacagctgatccgtctggaagcagaagaagaaaaattagctcatttgccactcgctaaaacagtatccgtagaagagcttctgcaatacgtggagcttcaagatcctgttacgcgcacgcagcttcgcgcaatggctgctaaaacggtctgcccgccgcataaagtagagcttgaagccttgcttggcaagcaagcctacaaagaacaagtgctggcaaaacgtttaacaatgcttgaactgcttgaaaaatacccggcgtgtgaaatgagtttcagcgaatttatcgcccttctgccaagcatacgcccgcgctattactcgatttcttcatcacctcgtgtcgatgaaaaacaagcaagcatcacggtcagcgttgtctcaggaccggcgtggagcggatatggagaatataaaggaattgcgtcgaactatcttgctgagctgcaagaaggagatacgattacgtgctttatttccacaccgcagtcagagtttacgctgccaaaagaccctgaaacgccgcttatcatggtcggaccgggaacaggcgtcgcgccgtttagaggctttgtgcaggcgcgcaaacagctaaaagaacaaggacagtcacttggagaagcacatttatacttcggctgccgttcacctcatgaagactatctgtatcaagaagagcttgaaaacgcccaaagcgaaggcatcattacgcttcataccgctttttctcgcatgccgaatcagccgaaaacatacgttcagcacgtaatggaacaagacggcaagaaattgattgaacttcttgatcaaggagcgcacttctatatttgcggagacggaattcaaatggcacctgccgttgaagcaacgcttatgaaaagctatgctgacgttcaccaagtgagtgaagcagacgctcgcttatggctgcagcagctagaagaaaaaggccgatacgcaaaagacgtgtggctgggg

SEQ ID NO: 1076 - protein, 1049 aa, synthetic construct
  REGION 1..1049: note = variant of P450 oxidase from Bacillus megaterium
MTIKEMPQPKTFGELKNLPLLNTDKPVQALMRIADELGEIFKFEAPGSVTRYLSSQRLIKEACDESRFDKNLSQGLKFARDFVGDGLVTSWTHEPNWKKAHNILVPSFSQHAMGRYHAMMVDIAVQLVQKWERLNADEHIEVSEDMTRLTLDTIGLCLFNYRFNSFYRDTPHPFIVSVVRALDEVMNKLQRANPDDPAYDENKRQCQEDIKVMNDYVDKIIADRKARGEQSHDLLTQMLNGKDPETGEPLDDGNIRQQIITFLIAGHQTTSGLLSFALYFLVKNPRVLQKVAEEAARVLVDPVPSYKQVKQLKYVGMVLNEALRLWPVAPMFSLYAKEDTVLGGEYPLTKGDEVMVLVPQLHRDKTIWGDDVEEFRPERFENPSAIPQHAFKPFGNGQRACIGQQFALHSATLVLGMMLKHFDFEDHTNYELVIKESRTLKPEGFVVKAKSKGIPLGGIPSPVTEQSAKKVRKKAENAHNTPLLVLYGSNAGTAEGTARDLADIAMSKGFAPQVATLDSHAGNLPREGAVLIVTASYNGHPPDNAKQFVDWLDQASADEVKGVRYSVFGCGDKNWAGTYQKVPAFIDETLAAKGAENIADRGEADASDDFEGAYEEWRDHMWSDVAAYFGLDIENSEDNKSTLSLQFVDSAADMPLAKMHGAFSTNVVASKELQQPGSARSTRHLEIELPKEASYQEGDHLGVIPRYYEGIVNRVTQRFGLSASQLIRLEAEEEKLAHLPLAKTVSVEELLQYVELQDPVTRTQLRAMAAKTVCPPHKVELEALLGKQAYKEQVLAKRLTMLELLEKYPACEMSFSEFIALLPSIRPRYYSISSSPRVDEKQASITVSVVSGPAWSGYGEYKGIASNYLAELQEGDTITCFISTPQSEFTLPKDPETPLIMVGPGTGVAPFRGFVQARKQLKEQGQSLGEAHLYFGCRSPHEDYLYQEELENAQSEGIITLHTAFSRMPNQPKTYVQHVMEQDGKKLIELLDQGAHFYICGDGIQMAPAVEATLMKSYADVHQVSEADARLWLQQLEEKGRYAKDVWLG

SEQ ID NO: 1077 - DNA, 3147 bp, synthetic construct
  misc_feature 1..3147: note = variant of P450 oxidase from Bacillus megaterium
  source 1..3147: mol_type = other DNA
atgacaattaaggaaatgcctcagcctaagacgtttggagaacttaaaaatttaccgttattaaatacagataaaccggttcaagctttgatgcgtattgcggatgaattaggagaaatctttaaattcgaggcgcctggtagcgtaacgcgctatttatcaagtcagcgtctaattaaagaagcatgcgatgaatcacgctttgataaaaacttaagtcaagggcttaaatttgcacgtgattttgttggagacgggctggttacaagctggacgcatgaaccgaattggaaaaaagcgcataatatcttagttccaagctttagtcagcatgcaatggggcgttatcatgcgatgatggtcgatatcgccgtgcagcttgttcaaaagtgggagcgtctaaatgcagatgagcatattgaagtatcggaagacatgacacgtttaacgcttgatacaattggtctttgcctgtttaactatcgctttaacagcttttaccgagatacgcctcatccatttattgtgagtgtggttcgtgcactggatgaagtaatgaacaagctgcagcgagcaaatccagacgacccagcttatgatgaaaacaagcgccagtgtcaagaagatatcaaggtgatgaacgactatgtagataaaattattgcagatcgcaaagcaaggggtgaacaaagtcatgatttattaacgcagatgctaaacggaaaagatccagaaacgggtgagccgcttgatgacgggaacattcgtcagcaaattattacattcttaattgcgggacaccaaacgacaagtggtcttttatcatttgcgctgtatttcttagtgaaaaatccacgtgtattacaaaaagtagcagaagaagcagcacgagttctagtagatcctgttccaagctacaaacaagtcaaacagcttaaatatgttggcatggtcttaaacgaagcgctgcgcttatggccagtagcgcctatgttttccctatatgcaaaagaagatacggtgcttggaggagaatatcctttaacgaaaggcgacgaagtaatggttctggtgcctcagcttcaccgtgataaaacaatttggggagacgatgtggaggagttccgtccagagcgttttgaaaatccaagtgcgattccgcagcatgcgtttaaaccgtttggaaacggtcagcgtgcgtgtatcggtcagcagttcgctcttcatagtgcaacgctggtacttggtatgatgctaaaacactttgactttgaagatcatacaaactacgagctcgttattaaagaatcgcggacgttaaaacctgaaggctttgtggtaaaagcaaaatcgaaaggcattccgcttggcggtattccttcacctagcactgaacagtctgctaaaaaagtacgcaaaaaggcagaaaactcgcataatacgccgctgcttgtgctatacggttcaaatgcgggaacagctgaaggaacggcgcgtgatttagcagatattgcaatgagcaaaggatttgcaccgcaggtcgcaacgcttgattcacacgccggtaatcttccgcgcgaaggagctgtattaattgtaacggcgtcttataacggtcatccgcctgataacgcaaagcaatttgtcgattggttagaccaagcgtctgcggatgaagtaaaaggcgttcgctactccgtatttggatgcggcgataaaaattgggcggggacgtatcaaaaagtgcctgcttttatcgatgaaacgcttgccgctaaaggggcagaaaacatcgctgaccgcggtgaagcagatgcaagcgacgactttgaaggcgcgtatgaagaatggcgtgatcatatgtggagtgacgtagcagcctactttggtctcgacattgaaaacagtgaagataataaatctactctttcacttcaatttgtcgacagcgcggcggatatgccgcttgcgaaaatgcacggtgcgttttcaacgaacgtcgtagcaagcaaagaacttcaacagcctggcagtgcacgaagcacgcgacatcttgaaattgaacttccaaaagaagcttcttatcaagaaggagatcatttaggtgttattcctcgctattatgaaggaatagtaaaccgtgtaacacagaggttcggcctaagcgcatcacagctgatccgtctggaagcagaagaagaaaaattagctcatttgccactcgctaaaacagtatccgtagaagagcttctgcaatacgtggagcttcaagatcctgttacgcgcacgcagcttcgcgcaatggctgctaaaacggtctgcccgccgcataaagtagagcttgaagccttgcttggcaagcaagcctacaaagaacaagtgctggcaaaacgtttaacaatgcttgaactgcttgaaaaatacccggcgtgtgaaatgagtttcagcgaatttatcgcccttctgccaagcatacgcccgcgctattactcgatttcttcatcacctcgtgtcgatgaaaaacaagcaagcatcacggtcagcgttgtctcaggaccggcgtggagcggatatggagaatataaaggaattgcgtcgaactatcttgctgagctgcaagaaggagatacgattacgtgctttatttccacaccgcagtcagagtttacgctgccaaaagaccctgaaacgccgcttatcatggtcggaccgggaacaggcgtcgcgccgtttagaggctttgtgcaggcgcgcaaacagctaaaagaacaaggacagtcacttggagaagcacatttatacttcggctgccgttcacctcatgaagactatctgtatcaagaagagcttgaaaacgcccaaagcgaaggcatcattacgcttcataccgctttttctcgcatgccgaatcagccgaaaacatacgttcagcacgtaatggaacaagacggcaagaaattgattgaacttcttgatcaaggagcgcacttctatatttgcggagacggaattcaaatggcacctgccgttgaagcaacgcttatgaaaagctatgctgacgttcaccaagtgagtgaagcagacgctcgcttatggctgcagcagctagaagaaaaaggccgatacgcaaaagacgtgtggctgggg

SEQ ID NO: 1078 - protein, 1049 aa, synthetic construct
  REGION 1..1049: note = variant of P450 oxidase from Bacillus megaterium
MTIKEMPQPKTFGELKNLPLLNTDKPVQALMRIADELGEIFKFEAPGSVTRYLSSQRLIKEACDESRFDKNLSQGLKFARDFVGDGLVTSWTHEPNWKKAHNILVPSFSQHAMGRYHAMMVDIAVQLVQKWERLNADEHIEVSEDMTRLTLDTIGLCLFNYRFNSFYRDTPHPFIVSVVRALDEVMNKLQRANPDDPAYDENKRQCQEDIKVMNDYVDKIIADRKARGEQSHDLLTQMLNGKDPETGEPLDDGNIRQQIITFLIAGHQTTSGLLSFALYFLVKNPRVLQKVAEEAARVLVDPVPSYKQVKQLKYVGMVLNEALRLWPVAPMFSLYAKEDTVLGGEYPLTKGDEVMVLVPQLHRDKTIWGDDVEEFRPERFENPSAIPQHAFKPFGNGQRACIGQQFALHSATLVLGMMLKHFDFEDHTNYELVIKESRTLKPEGFVVKAKSKGIPLGGIPSPSTEQSAKKVRKKAENSHNTPLLVLYGSNAGTAEGTARDLADIAMSKGFAPQVATLDSHAGNLPREGAVLIVTASYNGHPPDNAKQFVDWLDQASADEVKGVRYSVFGCGDKNWAGTYQKVPAFIDETLAAKGAENIADRGEADASDDFEGAYEEWRDHMWSDVAAYFGLDIENSEDNKSTLSLQFVDSAADMPLAKMHGAFSTNVVASKELQQPGSARSTRHLEIELPKEASYQEGDHLGVIPRYYEGIVNRVTQRFGLSASQLIRLEAEEEKLAHLPLAKTVSVEELLQYVELQDPVTRTQLRAMAAKTVCPPHKVELEALLGKQAYKEQVLAKRLTMLELLEKYPACEMSFSEFIALLPSIRPRYYSISSSPRVDEKQASITVSVVSGPAWSGYGEYKGIASNYLAELQEGDTITCFISTPQSEFTLPKDPETPLIMVGPGTGVAPFRGFVQARKQLKEQGQSLGEAHLYFGCRSPHEDYLYQEELENAQSEGIITLHTAFSRMPNQPKTYVQHVMEQDGKKLIELLDQGAHFYICGDGIQMAPAVEATLMKSYADVHQVSEADARLWLQQLEEKGRYAKDVWLG

SEQ ID NO: 1079 - DNA, 3147 bp, synthetic construct
  misc_feature 1..3147: note = variant of P450 oxidase from Bacillus megaterium
  source 1..3147: mol_type = other DNA
atgacaattaaggaaatgcctcagcctaagacgtttggagaacttaaaaatttaccgttattaaatacagataaaccggttcaagctttgatgcgtattgcggatgaattaggagaaatctttaaattcgaggcgcctggtagcgtaacgcgctatttatcaagtcagcgtctaattaaagaagcatgcgatgaatcacgctttgataaaaacttaagtcaagggcttaaatttgcacgtgattttgttggagacgggctggttacaagctggacgcatgaaccgaattggaaaaaagcgcataatatcttagttccaagctttagtcagcatgcaatggggcgttatcatgcgatgatggtcgatatcgccgtgcagcttgttcaaaagtgggagcgtctaaatgcagatgagcatattgaagtatcggaagacatgacacgtttaacgcttgatacaattggtctttgcctgtttaactatcgctttaacagcttttaccgagatacgcctcatccatttattgtgagtgtggttcgtgcactggatgaagtaatgaacaagctgcagcgagcaaatccagacgacccagcttatgatgaaaacaagcgccagtgtcaagaagatatcaaggtgatgaacgactatgtagataaaattattgcagatcgcaaagcaaggggtgaacaaagtcatgatttattaacgcagatgctaaacggaaaagatccagaaacgggtgagccgcttgatgacgggaacattcgtcagcaaattattacattcttaattgcgggacaccaaacgacaagtggtcttttatcatttgcgctgtatttcttagtgaaaaatccacgtgtattacaaaaagtagcagaagaagcagcacgagttctagtagatcctgttccaagctacaaacaagtcaaacagcttaaatatgttggcatggtcttaaacgaagcgctgcgcttatggccagtagcgcctatgttttccctatatgcaaaagaagatacggtgcttggaggagaatatcctttaacgaaaggcgacgaagtaatggttctggtgcctcagcttcaccgtgataaaacaatttggggagacgatgtggaggagttccgtccagagcgttttgaaaatccaagtgcgattccgcagcatgcgtttaaaccgtttggaaacggtcagcgtgcgtgtatcggtcagcagttcgctcttcatagtgcaacgctggtacttggtatgatgctaaaacactttgactttgaagatcatacaaactacgagctcgttattaaagaatcgcggacgttaaaacctgaaggctttgtggtaaaagcaaaatcgaaaggcattccgcttggcggtattccttcacctgcgactgaacagtctgctaaaaaagtacgcaaaaaggcagaaaacgctcataatacgccgctgcttgtgctatacggttcaaatgcgggaacagctgaaggaacggcgcgtgatttagcagatattgcaatgagcaaaggatttgcaccgcaggtcgcaacgcttgattcacacgccggtaatcttccgcgcgaaggagctgtattaattgtaacggcgtcttataacggtcatccgcctgataacgcaaagcaatttgtcgattggttagaccaagcgtctgcggatgaagtaaaaggcgttcgctactccgtatttggatgcggcgataaaaattgggcggggacgtatcaaaaagtgcctgcttttatcgatgaaacgcttgccgctaaaggggcagaaaacatcgctgaccgcggtgaagcagatgcaagcgacgactttgaaggcgcgtatgaagaatggcgtgatcatatgtggagtgacgtagcagcctactttggtctcgacattgaaaacagtgaagataataaatctactctttcacttcaatttgtcgacagcgcggcggatatgccgcttgcgaaaatgcacggtgcgttttcaacgaacgtcgtagcaagcaaagaacttcaacagcctggcagtgcacgaagcacgcgacatcttgaaattgaacttccaaaagaagcttcttatcaagaaggagatcatttaggtgttattcctcgctattatgaaggaatagtaaaccgtgtaacacagaggttcggcctaagcgcatcacagctgatccgtctggaagcagaagaagaaaaattagctcatttgccactcgctaaaacagtatccgtagaagagcttctgcaatacgtggagcttcaagatcctgttacgcgcacgcagcttcgcgcaatggctgctaaaacggtctgcccgccgcataaagtagagcttgaagccttgcttggcaagcaagcctacaaagaacaagtgctggcaaaacgtttaacaatgcttgaactgcttgaaaaatacccggcgtgtgaaatgagtttcagcgaatttatcgcccttctgccaagcatacgcccgcgctattactcgatttcttcatcacctcgtgtcgatgaaaaacaagcaagcatcacggtcagcgttgtctcaggaccggcgtggagcggatatggagaatataaaggaattgcgtcgaactatcttgctgagctgcaagaaggagatacgattacgtgctttatttccacaccgcagtcagagtttacgctgccaaaagaccctgaaacgccgcttatcatggtcggaccgggaacaggcgtcgcgccgtttagaggctttgtgcaggcgcgcaaacagctaaaagaacaaggacagtcacttggagaagcacatttatacttcggctgccgttcacctcatgaagactatctgtatcaagaagagcttgaaaacgcccaaagcgaaggcatcattacgcttcataccgctttttctcgcatgccgaatcagccgaaaacatacgttcagcacgtaatggaacaagacggcaagaaattgattgaacttcttgatcaaggagcgcacttctatatttgcggagacggaattcaaatggcacctgccgttgaagcaacgcttatgaaaagctatgctgacgttcaccaagtgagtgaagcagacgctcgcttatggctgcagcagctagaagaaaaaggccgatacgcaaaagacgtgtggctgggg

SEQ ID NO: 1080 - protein, 1049 aa, synthetic construct
  REGION 1..1049: note = variant of P450 oxidase from Bacillus megaterium
MTIKEMPQPKTFGELKNLPLLNTDKPVQALMRIADELGEIFKFEAPGSVTRYLSSQRLIKEACDESRFDKNLSQGLKFARDFVGDGLVTSWTHEPNWKKAHNILVPSFSQHAMGRYHAMMVDIAVQLVQKWERLNADEHIEVSEDMTRLTLDTIGLCLFNYRFNSFYRDTPHPFIVSVVRALDEVMNKLQRANPDDPAYDENKRQCQEDIKVMNDYVDKIIADRKARGEQSHDLLTQMLNGKDPETGEPLDDGNIRQQIITFLIAGHQTTSGLLSFALYFLVKNPRVLQKVAEEAARVLVDPVPSYKQVKQLKYVGMVLNEALRLWPVAPMFSLYAKEDTVLGGEYPLTKGDEVMVLVPQLHRDKTIWGDDVEEFRPERFENPSAIPQHAFKPFGNGQRACIGQQFALHSATLVLGMMLKHFDFEDHTNYELVIKESRTLKPEGFVVKAKSKGIPLGGIPSPATEQSAKKVRKKAENAHNTPLLVLYGSNAGTAEGTARDLADIAMSKGFAPQVATLDSHAGNLPREGAVLIVTASYNGHPPDNAKQFVDWLDQASADEVKGVRYSVFGCGDKNWAGTYQKVPAFIDETLAAKGAENIADRGEADASDDFEGAYEEWRDHMWSDVAAYFGLDIENSEDNKSTLSLQFVDSAADMPLAKMHGAFSTNVVASKELQQPGSARSTRHLEIELPKEASYQEGDHLGVIPRYYEGIVNRVTQRFGLSASQLIRLEAEEEKLAHLPLAKTVSVEELLQYVELQDPVTRTQLRAMAAKTVCPPHKVELEALLGKQAYKEQVLAKRLTMLELLEKYPACEMSFSEFIALLPSIRPRYYSISSSPRVDEKQASITVSVVSGPAWSGYGEYKGIASNYLAELQEGDTITCFISTPQSEFTLPKDPETPLIMVGPGTGVAPFRGFVQARKQLKEQGQSLGEAHLYFGCRSPHEDYLYQEELENAQSEGIITLHTAFSRMPNQPKTYVQHVMEQDGKKLIELLDQGAHFYICGDGIQMAPAVEATLMKSYADVHQVSEADARLWLQQLEEKGRYAKDVWLG

SEQ ID NO: 1081 - DNA, 3147 bp, synthetic construct
  misc_feature 1..3147: note = variant of P450 oxidase from Bacillus megaterium
  source 1..3147: mol_type = other DNA
atgacaattaaggaaatgcctcagcctaagacgtttggagaacttaaaaatttaccgttattaaatacagataaaccggttcaagctttgatgcgtattgcggatgaattaggagaaatctttaaattcgaggcgcctggtagcgtaacgcgctatttatcaagtcagcgtctaattaaagaagcatgcgatgaatcacgctttgataaaaacttaagtcaagggcttaaatttgcacgtgattttgttggagacgggctggttacaagctggacgcatgaaccgaattggaaaaaagcgcataatatcttagttccaagctttagtcagcatgcaatggggcgttatcatgcgatgatggtcgatatcgccgtgcagcttgttcaaaagtgggagcgtctaaatgcagatgagcatattgaagtatcggaagacatgacacgtttaacgcttgatacaattggtctttgcctgtttaactatcgctttaacagcttttaccgagatacgcctcatccatttattgtgagtgtggttcgtgcactggatgaagtaatgaacaagctgcagcgagcaaatccagacgacccagcttatgatgaaaacaagcgccagtgtcaagaagatatcaaggtgatgaacgactatgtagataaaattattgcagatcgcaaagcaaggggtgaacaaagtcatgatttattaacgcagatgctaaacggaaaagatccagaaacgggtgagccgcttgatgacgggaacattcgtcagcaaattattacattcttaattgcgggacaccaaacgacaagtggtcttttatcatttgcgctgtatttcttagtgaaaaatccacgtgtattacaaaaagtagcagaagaagcagcacgagttctagtagatcctgttccaagctacaaacaagtcaaacagcttaaatatgttggcatggtcttaaacgaagcgctgcgcttatggccagtagcgcctatgttttccctatatgcaaaagaagatacggtgcttggaggagaatatcctttaacgaaaggcgacgaagtaatggttctggtgcctcagcttcaccgtgataaaacaatttggggagacgatgtggaggagttccgtccagagcgttttgaaaatccaagtgcgattccgcagcatgcgtttaaaccgtttggaaacggtcagcgtgcgtgtatcggtcagcagttcgctcttcatagtgcaacgctggtacttggtatgatgctaaaacactttgactttgaagatcatacaaactacgagctcgttattaaagaatcgcggacgttaaaacctgaaggctttgtggtaaaagcaaaatcgaaaggcattaggcttggcggtattccttcacctagcactgaacagtctgctaaaaaagtacgcaaaaaggcagaaaacgctcataatacgccgctgcttgtgctatacggttcaaatgcgggaacagctgaaggaacggcgcgtgatttagcagatattgcaatgagcaaaggatttgcaccgcaggtcgcaacgcttgattcacacgccggtaatcttccgcgcgaaggagctgtattaattgtaacggcgtcttataacggtcatccgcctgataacgcaaagcaatttgtcgattggttagaccaagcgtctgcggatgaagtaaaaggcgttcgctactccgtatttggatgcggcgataaaaattgggcggggacgtatcaaaaagtgcctgcttttatcgatgaaacgcttgccgctaaaggggcagaaaacatcgctgaccgcggtgaagcagatgcaagcgacgactttgaaggcgcgtatgaagaatggcgtgatcatatgtggagtgacgtagcagcctactttggtctcgacattgaaaacagtgaagataataaatctactctttcacttcaatttgtcgacagcgcggcggatatgccgcttgcgaaaatgcacggtgcgttttcaacgaacgtcgtagcaagcaaagaacttcaacagcctggcagtgcacgaagcacgcgacatcttgaaattgaacttccaaaagaagcttcttatcaagaaggagatcatttaggtgttattcctcgctattatgaaggaatagtaaaccgtgtaacacagaggttcggcctaagcgcatcacagctgatccgtctggaagcagaagaagaaaaattagctcatttgccactcgctaaaacagtatccgtagaagagcttctgcaatacgtggagcttcaagatcctgttacgcgcacgcagcttcgcgcaatggctgctaaaacggtctgcccgccgcataaagtagagcttgaagccttgcttggcaagcaagcctacaaagaacaagtgctggcaaaacgtttaacaatgcttgaactgcttgaaaaatacccggcgtgtgaaatgagtttcagcgaatttatcgcccttctgccaagcatacgcccgcgctattactcgatttcttcatcacctcgtgtcgatgaaaaacaagcaagcatcacggtcagcgttgtctcaggaccggcgtggagcggatatggagaatataaaggaattgcgtcgaactatcttgctgagctgcaagaaggagatacgattacgtgctttatttccacaccgcagtcagagtttacgctgccaaaagaccctgaaacgccgcttatcatggtcggaccgggaacaggcgtcgcgccgtttagaggctttgtgcaggcgcgcaaacagctaaaagaacaaggacagtcacttggagaagcacatttatacttcggctgccgttcacctcatgaagactatctgtatcaagaagagcttgaaaacgcccaaagcgaaggcatcattacgcttcataccgctttttctcgcatgccgaatcagccgaaaacatacgttcagcacgtaatggaacaagacggcaagaaattgattgaacttcttgatcaaggagcgcacttctatatttgcggagacggaattcaaatggcacctgccgttgaagcaacgcttatgaaaagctatgctgacgttcaccaagtgagtgaagcagacgctcgcttatggctgcagcagctagaagaaaaaggccgatacgcaaaagacgtgtggctgggg

SEQ ID NO: 1082 - protein, 1049 aa, synthetic construct
  REGION 1..1049: note = variant of P450 oxidase from Bacillus megaterium
MTIKEMPQPKTFGELKNLPLLNTDKPVQALMRIADELGEIFKFEAPGSVTRYLSSQRLIKEACDESRFDKNLSQGLKFARDFVGDGLVTSWTHEPNWKKAHNILVPSFSQHAMGRYHAMMVDIAVQLVQKWERLNADEHIEVSEDMTRLTLDTIGLCLFNYRFNSFYRDTPHPFIVSVVRALDEVMNKLQRANPDDPAYDENKRQCQEDIKVMNDYVDKIIADRKARGEQSHDLLTQMLNGKDPETGEPLDDGNIRQQIITFLIAGHQTTSGLLSFALYFLVKNPRVLQKVAEEAARVLVDPVPSYKQVKQLKYVGMVLNEALRLWPVAPMFSLYAKEDTVLGGEYPLTKGDEVMVLVPQLHRDKTIWGDDVEEFRPERFENPSAIPQHAFKPFGNGQRACIGQQFALHSATLVLGMMLKHFDFEDHTNYELVIKESRTLKPEGFVVKAKSKGIRLGGIPSPSTEQSAKKVRKKAENAHNTPLLVLYGSNAGTAEGTARDLADIAMSKGFAPQVATLDSHAGNLPREGAVLIVTASYNGHPPDNAKQFVDWLDQASADEVKGVRYSVFGCGDKNWAGTYQKVPAFIDETLAAKGAENIADRGEADASDDFEGAYEEWRDHMWSDVAAYFGLDIENSEDNKSTLSLQFVDSAADMPLAKMHGAFSTNVVASKELQQPGSARSTRHLEIELPKEASYQEGDHLGVIPRYYEGIVNRVTQRFGLSASQLIRLEAEEEKLAHLPLAKTVSVEELLQYVELQDPVTRTQLRAMAAKTVCPPHKVELEALLGKQAYKEQVLAKRLTMLELLEKYPACEMSFSEFIALLPSIRPRYYSISSSPRVDEKQASITVSVVSGPAWSGYGEYKGIASNYLAELQEGDTITCFISTPQSEFTLPKDPETPLIMVGPGTGVAPFRGFVQARKQLKEQGQSLGEAHLYFGCRSPHEDYLYQEELENAQSEGIITLHTAFSRMPNQPKTYVQHVMEQDGKKLIELLDQGAHFYICGDGIQMAPAVEATLMKSYADVHQVSEADARLWLQQLEEKGRYAKDVWLG

SEQ ID NO: 1083 - DNA, 3147 bp, synthetic construct
  misc_feature 1..3147: note = variant of P450 oxidase from Bacillus megaterium
  source 1..3147: mol_type = other DNA
atgacaattaaggaaatgcctcagcctaagacgtttggagaacttaaaaatttaccgttattaaatacagataaaccggttcaagctttgatgcgtattgcggatgaattaggagaaatctttaaattcgaggcgcctggtagcgtaacgcgctatttatcaagtcagcgtctaattaaagaagcatgcgatgaatcacgctttgataaaaacttaagtcaagggcttaaatttgcacgtgattttgttggagacgggctggttacaagctggacgcatgaaccgaattggaaaaaagcgcataatatcttagttccaagctttagtcagcatgcaatggggcgttatcatgcgatgatggtcgatatcgccgtgcagcttgttcaaaagtgggagcgtctaaatgcagatgagcatattgaagtatcggaagacatgacacgtttaacgcttgatacaattggtctttgcctgtttaactatcgctttaacagcttttaccgagatacgcctcatccatttattgtgagtgtggttcgtgcactggatgaagtaatgaacaagctgcagcgagcaaatccagacgacccagcttatgatgaaaacaagcgccagtgtcaagaagatatcaaggtgatgaacgactatgtagataaaattattgcagatcgcaaagcaaggggtgaacaaagtcatgatttattaacgcagatgctaaacggaaaagatccagaaacgggtgagccgcttgatgacgggaacattcgtcagcaaattattacattcttaattgcgggacaccaaacgacaagtggtcttttatcatttgcgctgtatttcttagtgaaaaatccacgtgtattacaaaaagtagcagaagaagcagcacgagttctagtagatcctgttccaagctacaaacaagtcaaacagcttaaatatgttggcatggtcttaaacgaagcgctgcgcttatggccagtagcgcctatgttttccctatatgcaaaagaagatacggtgcttggaggagaatatcctttaacgaaaggcgacgaagtaatggttctggtgcctcagcttcaccgtgataaaacaatttggggagacgatgtggaggagttccgtccagagcgttttgaaaatccaagtgcgattccgcagcatgcgtttaaaccgtttggaaacggtcagcgtgcgtgtatcggtcagcagttcgctcttcatagtgcaacgctggtacttggtatgatgctaaaacactttgactttgaagatcatacaaactacgagctcgttattaaagaatcgcggacgttaaaacctgaaggctttgtggtaaaagcaaaatcgaaaggcattccgcttggcggtattccttcacctagcactgaacagtctgctaaaaaagtacgcaaaaaggcagaaaacgctcataatacgccgctgcttgtgctatacggttcaaatgcgggaacagctgaaggaacggcgcgtgatttagcagatattgcagttagcaaaggatttgcaccgcaggtcgcaacgcttgattcacacgccggtaatcttccgcgcgaaggagctgtattaattgtaacggcgtcttataacggtcatccgcctgataacgcaaagcaatttgtcgattggttagaccaagcgtctgcggatgaagtaaaaggcgttcgctactccgtatttggatgcggcgataaaaattgggcggggacgtatcaaaaagtgcctgcttttatcgatgaaacgcttgccgctaaaggggcagaaaacatcgctgaccgcggtgaagcagatgcaagcgacgactttgaaggcgcgtatgaagaatggcgtgatcatatgtggagtgacgtagcagcctactttggtctcgacattgaaaacagtgaagataataaatctactctttcacttcaatttgtcgacagcgcggcggatatgccgcttgcgaaaatgcacggtgcgttttcaacgaacgtcgtagcaagcaaagaacttcaacagcctggcagtgcacgaagcacgcgacatcttgaaattgaacttccaaaagaagcttcttatcaagaaggagatcatttaggtgttattcctcgctattatgaaggaatagtaaaccgtgtaacacagaggttcggcctaagcgcatcacagctgatccgtctggaagcagaagaagaaaaattagctcatttgccactcgctaaaacagtatccgtagaagagcttctgcaatacgtggagcttcaagatcctgttacgcgcacgcagcttcgcgcaatggctgctaaaacggtctgcccgccgcataaagtagagcttgaagccttgcttggcaagcaagcctacaaagaacaagtgctggcaaaacgtttaacaatgcttgaactgcttgaaaaatacccggcgtgtgaaatgagtttcagcgaatttatcgcccttctgccaagcatacgcccgcgctattactcgatttcttcatcacctcgtgtcgatgaaaaacaagcaagcatcacggtcagcgttgtctcaggaccggcgtggagcggatatggagaatataaaggaattgcgtcgaactatcttgctgagctgcaagaaggagatacgattacgtgctttatttccacaccgcagtcagagtttacgctgccaaaagaccctgaaacgccgcttatcatggtcggaccgggaacaggcgtcgcgccgtttagaggctttgtgcaggcgcgcaaacagctaaaagaacaaggacagtcacttggagaagcacatttatacttcggctgccgttcacctcatgaagactatctgtatcaagaagagcttgaaaacgcccaaagcgaaggcatcattacgcttcataccgctttttctcgcatgccgaatcagccgaaaacatacgttcagcacgtaatggaacaagacggcaagaaattgattgaacttcttgatcaaggagcgcacttctatatttgcggagacggaattcaaatggcacctgccgttgaagcaacgcttatgaaaagctatgctgacgttcaccaagtgagtgaagcagacgctcgcttatggctgcagcagctagaagaaaaaggccgatacgcaaaagacgtgtggctgggg

SEQ ID NO: 1084 - protein, 1049 aa, synthetic construct
  REGION 1..1049: note = variant of P450 oxidase from Bacillus megaterium
MTIKEMPQPKTFGELKNLPLLNTDKPVQALMRIADELGEIFKFEAPGSVTRYLSSQRLIKEACDESRFDKNLSQGLKFARDFVGDGLVTSWTHEPNWKKAHNILVPSFSQHAMGRYHAMMVDIAVQLVQKWERLNADEHIEVSEDMTRLTLDTIGLCLFNYRFNSFYRDTPHPFIVSVVRALDEVMNKLQRANPDDPAYDENKRQCQEDIKVMNDYVDKIIADRKARGEQSHDLLTQMLNGKDPETGEPLDDGNIRQQIITFLIAGHQTTSGLLSFALYFLVKNPRVLQKVAEEAARVLVDPVPSYKQVKQLKYVGMVLNEALRLWPVAPMFSLYAKEDTVLGGEYPLTKGDEVMVLVPQLHRDKTIWGDDVEEFRPERFENPSAIPQHAFKPFGNGQRACIGQQFALHSATLVLGMMLKHFDFEDHTNYELVIKESRTLKPEGFVVKAKSKGIPLGGIPSPSTEQSAKKVRKKAENAHNTPLLVLYGSNAGTAEGTARDLADIAVSKGFAPQVATLDSHAGNLPREGAVLIVTASYNGHPPDNAKQFVDWLDQASADEVKGVRYSVFGCGDKNWAGTYQKVPAFIDETLAAKGAENIADRGEADASDDFEGAYEEWRDHMWSDVAAYFGLDIENSEDNKSTLSLQFVDSAADMPLAKMHGAFSTNVVASKELQQPGSARSTRHLEIELPKEASYQEGDHLGVIPRYYEGIVNRVTQRFGLSASQLIRLEAEEEKLAHLPLAKTVSVEELLQYVELQDPVTRTQLRAMAAKTVCPPHKVELEALLGKQAYKEQVLAKRLTMLELLEKYPACEMSFSEFIALLPSIRPRYYSISSSPRVDEKQASITVSVVSGPAWSGYGEYKGIASNYLAELQEGDTITCFISTPQSEFTLPKDPETPLIMVGPGTGVAPFRGFVQARKQLKEQGQSLGEAHLYFGCRSPHEDYLYQEELENAQSEGIITLHTAFSRMPNQPKTYVQHVMEQDGKKLIELLDQGAHFYICGDGIQMAPAVEATLMKSYADVHQVSEADARLWLQQLEEKGRYAKDVWLG

SEQ ID NO: 1085 - DNA, 3147 bp, synthetic construct
  misc_feature 1..3147: note = variant of P450 oxidase from Bacillus megaterium
  source 1..3147: mol_type = other DNA
atgacaattaaggaaatgcctcagcctaagacgtttggagaacttaaaaatttaccgttattaaatacagataaaccggttcaagctttgatgcgtattgcggatgaattaggagaaatctttaaattcgaggcgcctggtagcgtaacgcgctatttatcaagtcagcgtctaattaaagaagcatgcgatgaatcacgctttgataaaaacttaagtcaagggcttaaatttgcacgtgattttgttggagacgggctggttacaagctggacgcatgaaccgaattggaaaaaagcgcataatatcttagttccaagctttagtcagcatgcaatggggcgttatcatgcgatgatggtcgatatcgccgtgcagcttgttcaaaagtgggagcgtctaaatgcagatgagcatattgaagtatcggaagacatgacacgtttaacgcttgatacaattggtctttgcctgtttaactatcgctttaacagcttttaccgagatacgcctcatccatttattgtgagtgtggttcgtgcactggatgaagtaatgaacaagctgcagcgagcaaatccagacgacccagcttatgatgaaaacaagcgccagtgtcaagaagatatcaaggtgatgaacgactatgtagataaaattattgcagatcgcaaagcaaggggtgaacaaagtcatgatttattaacgcagatgctaaacggaaaagatccagaaacgggtgagccgcttgatgacgggaacattcgtcagcaaattattacattcttaattgcgggacaccaaacgacaagtggtcttttatcatttgcgctgtatttcttagtgaaaaatccacgtgtattacaaaaagtagcagaagaagcagcacgagttctagtagatcctgttccaagctacaaacaagtcaaacagcttaaatatgttggcatggtcttaaacgaagcgctgcgcttatggccagtagcgcctatgttttccctatatgcaaaagaagatacggtgcttggaggagaatatcctttaacgaaaggcgacgaagtaatggttctggtgcctcagcttcaccgtgataaaacaatttggggagacgatgtggaggagttccgtccagagcgttttgaaaatccaagtgcgattccgcagcatgcgtttaaaccgtttggaaacggtcagcgtgcgtgtatcggtcagcagttcgctcttcatagtgcaacgctggtacttggtatgatgctaaaacactttgacgtggaagatcatacaaactacgagctcgttattaaagaatcgcggacgttaaaacctgaaggctttgtggtaaaagcaaaatcgaaaggcattccgcttggcggtattccttcacctagcactgaacagtctgctaaaaaagtacgcaaaaaggcagaaaacgctcataatacgccgctgcttgtgctatacggttcaaatgcgggaacagctgaaggaacggcgcgtgatttagcagatattgcaatgagcaaaggatttgcaccgcaggtcgcaacgcttgattcacacgccggtaatcttccgcgcgaaggagctgtattaattgtaacggcgtcttataacggtcatccgcctgataacgcaaagcaatttgtcgattggttagaccaagcgtctgcggatgaagtaaaaggcgttcgctactccgtatttggatgcggcgataaaaattgggcggggacgtatcaaaaagtgcctgcttttatcgatgaaacgcttgccgctaaaggggcagaaaacatcgctgaccgcggtgaagcagatgcaagcgacgactttgaaggcgcgtatgaagaatggcgtgatcatatgtggagtgacgtagcagcctactttggtctcgacattgaaaacagtgaagataataaatctactctttcacttcaatttgtcgacagcgcggcggatatgccgcttgcgaaaatgcacggtgcgttttcaacgaacgtcgtagcaagcaaagaacttcaacagcctggcagtgcacgaagcacgcgacatcttgaaattgaacttccaaaagaagcttcttatcaagaaggagatcatttaggtgttattcctcgctattatgaaggaatagtaaaccgtgtaacacagaggttcggcctaagcgcatcacagctgatccgtctggaagcagaagaagaaaaattagctcatttgccactcgctaaaacagtatccgtagaagagcttctgcaatacgtggagcttcaagatcctgttacgcgcacgcagcttcgcgcaatggctgctaaaacggtctgcccgccgcataaagtagagcttgaagccttgcttggcaagcaagcctacaaagaacaagtgctggcaaaacgtttaacaatgcttgaactgcttgaaaaatacccggcgtgtgaaatgagtttcagcgaatttatcgcccttctgccaagcatacgcccgcgctattactcgatttcttcatcacctcgtgtcgatgaaaaacaagcaagcatcacggtcagcgttgtctcaggaccggcgtggagcggatatggagaatataaaggaattgcgtcgaactatcttgctgagctgcaagaaggagatacgattacgtgctttatttccacaccgcagtcagagtttacgctgccaaaagaccctgaaacgccgcttatcatggtcggaccgggaacaggcgtcgcgccgtttagaggctttgtgcaggcgcgcaaacagctaaaagaacaaggacagtcacttggagaagcacatttatacttcggctgccgttcacctcatgaagactatctgtatcaagaagagcttgaaaacgcccaaagcgaaggcatcattacgcttcataccgctttttctcgcatgccgaatcagccgaaaacatacgttcagcacgtaatggaacaagacggcaagaaattgattgaacttcttgatcaaggagcgcacttctatatttgcggagacggaattcaaatggcacctgccgttgaagcaacgcttatgaaaagctatgctgacgttcaccaagtgagtgaagcagacgctcgcttatggctgcagcagctagaagaaaaaggccgatacgcaaaagacgtgtggctgggg

SEQ ID NO: 1086 - protein, 1049 aa, synthetic construct
  REGION 1..1049: note = variant of P450 oxidase from Bacillus megaterium
MTIKEMPQPKTFGELKNLPLLNTDKPVQALMRIADELGEIFKFEAPGSVTRYLSSQRLIKEACDESRFDKNLSQGLKFARDFVGDGLVTSWTHEPNWKKAHNILVPSFSQHAMGRYHAMMVDIAVQLVQKWERLNADEHIEVSEDMTRLTLDTIGLCLFNYRFNSFYRDTPHPFIVSVVRALDEVMNKLQRANPDDPAYDENKRQCQEDIKVMNDYVDKIIADRKARGEQSHDLLTQMLNGKDPETGEPLDDGNIRQQIITFLIAGHQTTSGLLSFALYFLVKNPRVLQKVAEEAARVLVDPVPSYKQVKQLKYVGMVLNEALRLWPVAPMFSLYAKEDTVLGGEYPLTKGDEVMVLVPQLHRDKTIWGDDVEEFRPERFENPSAIPQHAFKPFGNGQRACIGQQFALHSATLVLGMMLKHFDVEDHTNYELVIKESRTLKPEGFVVKAKSKGIPLGGIPSPSTEQSAKKVRKKAENAHNTPLLVLYGSNAGTAEGTARDLADIAMSKGFAPQVATLDSHAGNLPREGAVLIVTASYNGHPPDNAKQFVDWLDQASADEVKGVRYSVFGCGDKNWAGTYQKVPAFIDETLAAKGAENIADRGEADASDDFEGAYEEWRDHMWSDVAAYFGLDIENSEDNKSTLSLQFVDSAADMPLAKMHGAFSTNVVASKELQQPGSARSTRHLEIELPKEASYQEGDHLGVIPRYYEGIVNRVTQRFGLSASQLIRLEAEEEKLAHLPLAKTVSVEELLQYVELQDPVTRTQLRAMAAKTVCPPHKVELEALLGKQAYKEQVLAKRLTMLELLEKYPACEMSFSEFIALLPSIRPRYYSISSSPRVDEKQASITVSVVSGPAWSGYGEYKGIASNYLAELQEGDTITCFISTPQSEFTLPKDPETPLIMVGPGTGVAPFRGFVQARKQLKEQGQSLGEAHLYFGCRSPHEDYLYQEELENAQSEGIITLHTAFSRMPNQPKTYVQHVMEQDGKKLIELLDQGAHFYICGDGIQMAPAVEATLMKSYADVHQVSEADARLWLQQLEEKGRYAKDVWLG

SEQ ID NO: 1087 - DNA, 3147 bp, synthetic construct
  misc_feature 1..3147: note = variant of P450 oxidase from Bacillus megaterium
  source 1..3147: mol_type = other DNA
atgacaattaaggaaatgcctcagcctaagacgtttggagaacttaaaaatttaccgttattaaatacagataaaccggttcaagctttgatgcgtattgcggatgaattaggagaaatctttaaattcgaggcgcctggtagcgtaacgcgctatttatcaagtcagcgtctaattaaagaagcatgcgatgaatcacgctttgataaaaacttaagtcaagggcttaaatttgcacgtgattttgttggagacgggctggttacaagctggacgcatgaaccgaattggaaaaaagcgcataatatcttagttccaagctttagtcagcatgcaatggggcgttatcatgcgatgatggtcgatatcgccgtgcagcttgttcaaaagtgggagcgtctaaatgcagatgagcatattgaagtatcggaagacatgacacgtttaacgcttgatacaattggtctttgcctgtttaactatcgctttaacagcttttaccgagatacgcctcatccatttattgtgagtgtggttcgtgcactggatgaagtaatgaacaagctgcagcgagcaaatccagacgacccagcttatgatgaaaacaagcgccagtgtcaagaagatatcaaggtgatgaacgactatgtagataaaattattgcagatcgcaaagcaaggggtgaacaaagtcatgatttattaacgcagatgctaaacggaaaagatccagaaacgggtgagccgcttgatgacgggaacattcgtcagcaaattattacattcttaattgcgggacaccaaacgacaagtggtcttttatcatttgcgctgtatttcttagtgaaaaatccacgtgtattacaaaaagtagcagaagaagcagcacgagttctagtagatcctgttccaagctacaaacaagtcaaacagcttaaatatgttggcatggtcttaaacgaagcgctgcgcttatggccagtagcgcctatgttttccctatatgcaaaagaagatacggtgcttggaggagaatatcctttaacgaaaggcgacgaagtaatggttctggtgcctcagcttcaccgtgataaaacaatttggggagacgatgtggaggagttccgtccagagcgttttgaaaatccaagtgcgattccgcagcatgcgtttaaaccgtttggaaacggtcagcgtgcgtgtatcggtcagcagttcgctcttcatagtgcaacgctggtacttggtatgatgctaaaacactttgactttgaagatcatacaaactacgagctcaagattaaagaatcgcggacgttaaaacctgaaggctttgtggtaaaagcaaaatcgaaaggcattccgcttggcggtattccttcacctagcactgaacagtctgctaaaaaagtacgcaaaaaggcagaaaacgctcataatacgccgctgcttgtgctatacggttcaaatgcgggaacagctgaaggaacggcgcgtgatttagcagatattgcaatgagcaaaggatttgcaccgcaggtcgcaacgcttgattcacacgccggtaatcttccgcgcgaaggagctgtattaattgtaacggcgtcttataacggtcatccgcctgataacgcaaagcaatttgtcgattggttagaccaagcgtctgcggatgaagtaaaaggcgttcgctactccgtatttggatgcggcgataaaaattgggcggggacgtatcaaaaagtgcctgcttttatcgatgaaacgcttgccgctaaaggggcagaaaacatcgctgaccgcggtgaagcagatgcaagcgacgactttgaaggcgcgtatgaagaatggcgtgatcatatgtggagtgacgtagcagcctactttggtctcgacattgaaaacagtgaagataataaatctactctttcacttcaatttgtcgacagcgcggcggatatgccgcttgcgaaaatgcacggtgcgttttcaacgaacgtcgtagcaagcaaagaacttcaacagcctggcagtgcacgaagcacgcgacatcttgaaattgaacttccaaaagaagcttcttatcaagaaggagatcatttaggtgttattcctcgctattatgaaggaatagtaaaccgtgtaacacagaggttcggcctaagcgcatcacagctgatccgtctggaagcagaagaagaaaaattagctcatttgccactcgctaaaacagtatccgtagaagagcttctgcaatacgtggagcttcaagatcctgttacgcgcacgcagcttcgcgcaatggctgctaaaacggtctgcccgccgcataaagtagagcttgaagccttgcttggcaagcaagcctacaaagaacaagtgctggcaaaacgtttaacaatgcttgaactgcttgaaaaatacccggcgtgtgaaatgagtttcagcgaatttatcgcccttctgccaagcatacgcccgcgctattactcgatttcttcatcacctcgtgtcgatgaaaaacaagcaagcatcacggtcagcgttgtctcaggaccggcgtggagcggatatggagaatataaaggaattgcgtcgaactatcttgctgagctgcaagaaggagatacgattacgtgctttatttccacaccgcagtcagagtttacgctgccaaaagaccctgaaacgccgcttatcatggtcggaccgggaacaggcgtcgcgccgtttagaggctttgtgcaggcgcgcaaacagctaaaagaacaaggacagtcacttggagaagcacatttatacttcggctgccgttcacctcatgaagactatctgtatcaagaagagcttgaaaacgcccaaagcgaaggcatcattacgcttcataccgctttttctcgcatgccgaatcagccgaaaacatacgttcagcacgtaatggaacaagacggcaagaaattgattgaacttcttgatcaaggagcgcacttctatatttgcggagacggaattcaaatggcacctgccgttgaagcaacgcttatgaaaagctatgctgacgttcaccaagtgagtgaagcagacgctcgcttatggctgcagcagctagaagaaaaaggccgatacgcaaaagacgtgtggctgggg

SEQ ID NO: 1088 - protein, 1049 aa, synthetic construct
  REGION 1..1049: note = variant of P450 oxidase from Bacillus megaterium
MTIKEMPQPKTFGELKNLPLLNTDKPVQALMRIADELGEIFKFEAPGSVTRYLSSQRLIKEACDESRFDKNLSQGLKFARDFVGDGLVTSWTHEPNWKKAHNILVPSFSQHAMGRYHAMMVDIAVQLVQKWERLNADEHIEVSEDMTRLTLDTIGLCLFNYRFNSFYRDTPHPFIVSVVRALDEVMNKLQRANPDDPAYDENKRQCQEDIKVMNDYVDKIIADRKARGEQSHDLLTQMLNGKDPETGEPLDDGNIRQQIITFLIAGHQTTSGLLSFALYFLVKNPRVLQKVAEEAARVLVDPVPSYKQVKQLKYVGMVLNEALRLWPVAPMFSLYAKEDTVLGGEYPLTKGDEVMVLVPQLHRDKTIWGDDVEEFRPERFENPSAIPQHAFKPFGNGQRACIGQQFALHSATLVLGMMLKHFDFEDHTNYELKIKESRTLKPEGFVVKAKSKGIPLGGIPSPSTEQSAKKVRKKAENAHNTPLLVLYGSNAGTAEGTARDLADIAMSKGFAPQVATLDSHAGNLPREGAVLIVTASYNGHPPDNAKQFVDWLDQASADEVKGVRYSVFGCGDKNWAGTYQKVPAFIDETLAAKGAENIADRGEADASDDFEGAYEEWRDHMWSDVAAYFGLDIENSEDNKSTLSLQFVDSAADMPLAKMHGAFSTNVVASKELQQPGSARSTRHLEIELPKEASYQEGDHLGVIPRYYEGIVNRVTQRFGLSASQLIRLEAEEEKLAHLPLAKTVSVEELLQYVELQDPVTRTQLRAMAAKTVCPPHKVELEALLGKQAYKEQVLAKRLTMLELLEKYPACEMSFSEFIALLPSIRPRYYSISSSPRVDEKQASITVSVVSGPAWSGYGEYKGIASNYLAELQEGDTITCFISTPQSEFTLPKDPETPLIMVGPGTGVAPFRGFVQARKQLKEQGQSLGEAHLYFGCRSPHEDYLYQEELENAQSEGIITLHTAFSRMPNQPKTYVQHVMEQDGKKLIELLDQGAHFYICGDGIQMAPAVEATLMKSYADVHQVSEADARLWLQQLEEKGRYAKDVWLG

SEQ ID NO: 1089 - DNA, 3147 bp, synthetic construct
  misc_feature 1..3147: note = variant of P450 oxidase from Bacillus megaterium
  source 1..3147: mol_type = other DNA
atgacaattaaggaaatgcctcagcctaagacgtttggagaacttaaaaatttaccgttattaaatacagataaaccggttcaagctttgatgcgtattgcggatgaattaggagaaatctttaaattcgaggcgcctggtagcgtaacgcgctatttatcaagtcagcgtctaattaaagaagcatgcgatgaatcacgctttgataaaaacttaagtcaagggcttaaatttgcacgtgattttgttggagacgggctggttacaagctggacgcatgaaccgaattggaaaaaagcgcataatatcttagttccaagctttagtcagcatgcaatggggcgttatcatgcgatgatggtcgatatcgccgtgcagcttgttcaaaagtgggagcgtctaaatgcagatgagcatattgaagtatcggaagacatgacacgtttaacgcttgatacaattggtctttgcctgtttaactatcgctttaacagcttttaccgagatacgcctcatccatttattgtgagtgtggttcgtgcactggatgaagtaatgaacaagctgcagcgagcaaatccagacgacccagcttatgatgaaaacaagcgccagtgtcaagaagatatcaaggtgatgaacgactatgtagataaaattattgcagatcgcaaagcaaggggtgaacaaagtcatgatttattaacgcagatgctaaacggaaaagatccagaaacgggtgagccgcttgatgacgggaacattcgtcagcaaattattacattcttaattgcgggacaccaaacgacaagtggtcttttatcatttgcgctgtatttcttagtgaaaaatccacgtgtattacaaaaagtagcacgggaagcagcacgagttctagtagatcctgttccaagctacaaacaagtcaaacagcttaaatatgttggcatggtcttaaacgaagcgctgcgcttatggccagtagcgcctatgttttccctatatgcaaaagaagatacggtgcttggaggagaatatcctttaacgaaaggcgacgaagtaatggttctggtgcctcagcttcaccgtgataaaacaatttggggagacgatgtggaggagttccgtccagagcgttttgaaaatccaagtgcgattccgcagcatgcgtttaaaccgtttggaaacggtcagcgtgcgtgtatcggtcagcagttcgctcttcatagtgcaacgctggtacttggtatgatgctaaaacactttgactttgaagatcatacaaactacgagctcgttattaaagaatcgcggacgttaaaacctgaaggctttgtggtaaaagcaaaatcgaaaggcattccgcttggcggtattccttcacctagcactgaacagtctgctaaaaaagtacgcaaaaaggcagaaaacgctcataatacgccgctgcttgtgctatacggttcaaatgcgggaacagctgaaggaacggcgcgtgatttagcagatattgcaatgagcaaaggatttgcaccgcaggtcgcaacgcttgattcacacgccggtaatcttccgcgcgaaggagctgtattaattgtaacggcgtcttataacggtcatccgcctgataacgcaaagcaatttgtcgattggttagaccaagcgtctgcggatgaagtaaaaggcgttcgctactccgtatttggatgcggcgataaaaattgggcggggacgtatcaaaaagtgcctgcttttatcgatgaaacgcttgccgctaaaggggcagaaaacatcgctgaccgcggtgaagcagatgcaagcgacgactttgaaggcgcgtatgaagaatggcgtgatcatatgtggagtgacgtagcagcctactttggtctcgacattgaaaacagtgaagataataaatctactctttcacttcaatttgtcgacagcgcggcggatatgccgcttgcgaaaatgcacggtgcgttttcaacgaacgtcgtagcaagcaaagaacttcaacagcctggcagtgcacgaagcacgcgacatcttgaaattgaacttccaaaagaagcttcttatcaagaaggagatcatttaggtgttattcctcgctattatgaaggaatagtaaaccgtgtaacacagaggttcggcctaagcgcatcacagctgatccgtctggaagcagaagaagaaaaattagctcatttgccactcgctaaaacagtatccgtagaagagcttctgcaatacgtggagcttcaagatcctgttacgcgcacgcagcttcgcgcaatggctgctaaaacggtctgcccgccgcataaagtagagcttgaagccttgcttggcaagcaagcctacaaagaacaagtgctggcaaaacgtttaacaatgcttgaactgcttgaaaaatacccggcgtgtgaaatgagtttcagcgaatttatcgcccttctgccaagcatacgcccgcgctattactcgatttcttcatcacctcgtgtcgatgaaaaacaagcaagcatcacggtcagcgttgtctcaggaccggcgtggagcggatatggagaatataaaggaattgcgtcgaactatcttgctgagctgcaagaaggagatacgattacgtgctttatttccacaccgcagtcagagtttacgctgccaaaagaccctgaaacgccgcttatcatggtcggaccgggaacaggcgtcgcgccgtttagaggctttgtgcaggcgcgcaaacagctaaaagaacaaggacagtcacttggagaagcacatttatacttcggctgccgttcacctcatgaagactatctgtatcaagaagagcttgaaaacgcccaaagcgaaggcatcattacgcttcataccgctttttctcgcatgccgaatcagccgaaaacatacgttcagcacgtaatggaacaagacggcaagaaattgattgaacttcttgatcaaggagcgcacttctatatttgcggagacggaattcaaatggcacctgccgttgaagcaacgcttatgaaaagctatgctgacgttcaccaagtgagtgaagcagacgctcgcttatggctgcagcagctagaagaaaaaggccgatacgcaaaagacgtgtggctgggg

SEQ ID NO: 1090 - protein, 1049 aa, synthetic construct
  REGION 1..1049: note = variant of P450 oxidase from Bacillus megaterium
MTIKEMPQPKTFGELKNLPLLNTDKPVQALMRIADELGEIFKFEAPGSVTRYLSSQRLIKEACDESRFDKNLSQGLKFARDFVGDGLVTSWTHEPNWKKAHNILVPSFSQHAMGRYHAMMVDIAVQLVQKWERLNADEHIEVSEDMTRLTLDTIGLCLFNYRFNSFYRDTPHPFIVSVVRALDEVMNKLQRANPDDPAYDENKRQCQEDIKVMNDYVDKIIADRKARGEQSHDLLTQMLNGKDPETGEPLDDGNIRQQIITFLIAGHQTTSGLLSFALYFLVKNPRVLQKVAREAARVLVDPVPSYKQVKQLKYVGMVLNEALRLWPVAPMFSLYAKEDTVLGGEYPLTKGDEVMVLVPQLHRDKTIWGDDVEEFRPERFENPSAIPQHAFKPFGNGQRACIGQQFALHSATLVLGMMLKHFDFEDHTNYELVIKESRTLKPEGFVVKAKSKGIPLGGIPSPSTEQSAKKVRKKAENAHNTPLLVLYGSNAGTAEGTARDLADIAMSKGFAPQVATLDSHAGNLPREGAVLIVTASYNGHPPDNAKQFVDWLDQASADEVKGVRYSVFGCGDKNWAGTYQKVPAFIDETLAAKGAENIADRGEADASDDFEGAYEEWRDHMWSDVAAYFGLDIENSEDNKSTLSLQFVDSAADMPLAKMHGAFSTNVVASKELQQPGSARSTRHLEIELPKEASYQEGDHLGVIPRYYEGIVNRVTQRFGLSASQLIRLEAEEEKLAHLPLAKTVSVEELLQYVELQDPVTRTQLRAMAAKTVCPPHKVELEALLGKQAYKEQVLAKRLTMLELLEKYPACEMSFSEFIALLPSIRPRYYSISSSPRVDEKQASITVSVVSGPAWSGYGEYKGIASNYLAELQEGDTITCFISTPQSEFTLPKDPETPLIMVGPGTGVAPFRGFVQARKQLKEQGQSLGEAHLYFGCRSPHEDYLYQEELENAQSEGIITLHTAFSRMPNQPKTYVQHVMEQDGKKLIELLDQGAHFYICGDGIQMAPAVEATLMKSYADVHQVSEADARLWLQQLEEKGRYAKDVWLG

SEQ ID NO: 1091 - DNA, 3147 bp, synthetic construct
  misc_feature 1..3147: note = variant of P450 oxidase from Bacillus megaterium
  source 1..3147: mol_type = other DNA
atgacaattaaggaaatgcctcagcctaagacgtttggagaacttaaaaatttaccgttattaaatacagataaaccggttcaagctttgatgcgtattgcggatgaattaggagaaatctttaaattcgaggcgcctggtagcgtaacgcgctatttatcaagtcagcgtctaattaaagaagcatgcgatgaatcacgctttgataaaaacttaagtcaagggcttaaatttgcacgtgattttgttggagacgggctggttacaagctggacgcatgaaccgaattggaaaaaagcgcataatatcttagttccaagctttagtcagcatgcaatggggcgttatcatgcgatgatggtcgatatcgccgtgcagcttgttcaaaagtgggagcgtctaaatgcagatgagcatattgaagtatcggaagacatgacacgtttaacgcttgatacaattggtctttgcctgtttaactatcgctttaacagcttttaccgagatacgcctcatccatttattgtgagtgtggttcgtgcactggatgaagtaatgaacaagctgcagcgagcaaatccagacgacccagcttatgatgaaaacaagcgccagtgtcaagaagatatcaaggtgatgaacgactatgtagataaaattattgcagatcgcaaagcaaggggtgaacaaagtcatgatttattaacgcagatgctaaacggaaaagatccagaaacgggtgagccgcttgatgacgggaacattcgtcagcaaattattacattcttaattgcgggacaccaaacgacaagtggtcttttatcatttgcgctgtatttcttagtgaaaaatccacgtgtattacaaaaagtagcagaagaagcagcacgagttctagtagatcctgttccaagctacaaacaagtcaaacagcttaaatatgttggcatggtcttaaacgaagcgctgcgcttatggccagtagcgcctatgttttccctatatgcaaaagaagatacggtgcttggaggagaatatcctttaacgaaaggcgacgaagtaatggttctggtgcctcagcttcaccgtgataaaacaatttggggagacgatgtggaggagttccgtccagagcgttttgaaaatccaagtgcgattccgcagcatgcgtttaaaccgtttggaaacggtcagcgtgcgtgtatcggtcagcagttcgctcttcatagtgcaacgctggtacttggtatggtgctaaaacactttgactttgaagatcatacaaactacgagctcgttattaaagaatcgcggacgttaaaacctgaaggctttgtggtaaaagcaaaatcgaaaggcattccgcttggcggtattccttcacctagcactgaacagtctgctaaaaaagtacgcaaaaaggcagaaaacgctcataatacgccgctgcttgtgctatacggttcaaatgcgggaacagctgaaggaacggcgcgtgatttagcagatattgcaatgagcaaaggatttgcaccgcaggtcgcaacgcttgattcacacgccggtaatcttccgcgcgaaggagctgtattaattgtaacggcgtcttataacggtcatccgcctgataacgcaaagcaatttgtcgattggttagaccaagcgtctgcggatgaagtaaaaggcgttcgctactccgtatttggatgcggcgataaaaattgggcggggacgtatcaaaaagtgcctgcttttatcgatgaaacgcttgccgctaaaggggcagaaaacatcgctgaccgcggtgaagcagatgcaagcgacgactttgaaggcgcgtatgaagaatggcgtgatcatatgtggagtgacgtagcagcctactttggtctcgacattgaaaacagtgaagataataaatctactctttcacttcaatttgtcgacagcgcggcggatatgccgcttgcgaaaatgcacggtgcgttttcaacgaacgtcgtagcaagcaaagaacttcaacagcctggcagtgcacgaagcacgcgacatcttgaaattgaacttccaaaagaagcttcttatcaagaaggagatcatttaggtgttattcctcgctattatgaaggaatagtaaaccgtgtaacacagaggttcggcctaagcgcatcacagctgatccgtctggaagcagaagaagaaaaattagctcatttgccactcgctaaaacagtatccgtagaagagcttctgcaatacgtggagcttcaagatcctgttacgcgcacgcagcttcgcgcaatggctgctaaaacggtctgcccgccgcataaagtagagcttgaagccttgcttggcaagcaagcctacaaagaacaagtgctggcaaaacgtttaacaatgcttgaactgcttgaaaaatacccggcgtgtgaaatgagtttcagcgaatttatcgcccttctgccaagcatacgcccgcgctattactcgatttcttcatcacctcgtgtcgatgaaaaacaagcaagcatcacggtcagcgttgtctcaggaccggcgtggagcggatatggagaatataaaggaattgcgtcgaactatcttgctgagctgcaagaaggagatacgattacgtgctttatttccacaccgcagtcagagtttacgctgccaaaagaccctgaaacgccgcttatcatggtcggaccgggaacaggcgtcgcgccgtttagaggctttgtgcaggcgcgcaaacagctaaaagaacaaggacagtcacttggagaagcacatttatacttcggctgccgttcacctcatgaagactatctgtatcaagaagagcttgaaaacgcccaaagcgaaggcatcattacgcttcataccgctttttctcgcatgccgaatcagccgaaaacatacgttcagcacgtaatggaacaagacggcaagaaattgattgaacttcttgatcaaggagcgcacttctatatttgcggagacggaattcaaatggcacctgccgttgaagcaacgcttatgaaaagctatgctgacgttcaccaagtgagtgaagcagacgctcgcttatggctgcagcagctagaagaaaaaggccgatacgcaaaagacgtgtggctgggg

SEQ ID NO: 1092 - protein, 1049 aa, synthetic construct
  REGION 1..1049: note = variant of P450 oxidase from Bacillus megaterium
MTIKEMPQPKTFGELKNLPLLNTDKPVQALMRIADELGEIFKFEAPGSVTRYLSSQRLIKEACDESRFDKNLSQGLKFARDFVGDGLVTSWTHEPNWKKAHNILVPSFSQHAMGRYHAMMVDIAVQLVQKWERLNADEHIEVSEDMTRLTLDTIGLCLFNYRFNSFYRDTPHPFIVSVVRALDEVMNKLQRANPDDPAYDENKRQCQEDIKVMNDYVDKIIADRKARGEQSHDLLTQMLNGKDPETGEPLDDGNIRQQIITFLIAGHQTTSGLLSFALYFLVKNPRVLQKVAEEAARVLVDPVPSYKQVKQLKYVGMVLNEALRLWPVAPMFSLYAKEDTVLGGEYPLTKGDEVMVLVPQLHRDKTIWGDDVEEFRPERFENPSAIPQHAFKPFGNGQRACIGQQFALHSATLVLGMVLKHFDFEDHTNYELVIKESRTLKPEGFVVKAKSKGIPLGGIPSPSTEQSAKKVRKKAENAHNTPLLVLYGSNAGTAEGTARDLADIAMSKGFAPQVATLDSHAGNLPREGAVLIVTASYNGHPPDNAKQFVDWLDQASADEVKGVRYSVFGCGDKNWAGTYQKVPAFIDETLAAKGAENIADRGEADASDDFEGAYEEWRDHMWSDVAAYFGLDIENSEDNKSTLSLQFVDSAADMPLAKMHGAFSTNVVASKELQQPGSARSTRHLEIELPKEASYQEGDHLGVIPRYYEGIVNRVTQRFGLSASQLIRLEAEEEKLAHLPLAKTVSVEELLQYVELQDPVTRTQLRAMAAKTVCPPHKVELEALLGKQAYKEQVLAKRLTMLELLEKYPACEMSFSEFIALLPSIRPRYYSISSSPRVDEKQASITVSVVSGPAWSGYGEYKGIASNYLAELQEGDTITCFISTPQSEFTLPKDPETPLIMVGPGTGVAPFRGFVQARKQLKEQGQSLGEAHLYFGCRSPHEDYLYQEELENAQSEGIITLHTAFSRMPNQPKTYVQHVMEQDGKKLIELLDQGAHFYICGDGIQMAPAVEATLMKSYADVHQVSEADARLWLQQLEEKGRYAKDVWLG

SEQ ID NO: 1093 - DNA, 3147 bp, synthetic construct
  misc_feature 1..3147: note = variant of P450 oxidase from Bacillus megaterium
  source 1..3147: mol_type = other DNA
atgacaattaaggaaatgcctcagcctaagacgtttggagaacttaaaaatttaccgttattaaatacagataaaccggttcaagctttgatgcgtattgcggatgaattaggagaaatctttaaattcgaggcgcctggtagcgtaacgcgctatttatcaagtcagcgtctaattaaagaagcatgcgatgaatcacgctttgataaaaacttaagtcaagggcttaaatttgcacgtgattttgttggagacgggctggttacaagctggacgcatgaaccgaattggaaaaaagcgcataatatcttagttccaagctttagtcagcatgcaatggggcgttatcatgcgatgatggtcgatatcgccgtgcagcttgttcaaaagtgggagcgtctaaatgcagatgagcatattgaagtatcggaagacatgacacgtttaacgcttgatacaattggtctttgcctgtttaactatcgctttaacagcttttaccgagatacgcctcatccatttattgtgagtgtggttcgtgcactggatgaagtaatgaacaagctgcagcgagcaaatccagacgacccagcttatgatgaaaacaagcgccagtgtcaagaagatatcaaggtgatgaacgactatgtagataaaattattgcagatcgcaaagcaaggggtgaacaaagtcatgatttattaacgcagatgctaaacggaaaagatccagaaacgggtgagccgcttgatgacgggaacattcgtcagcaaattattacattcttaattgcgggacaccaaacgacaagtggtcttttatcatttgcgctgtatttcttagtgaaaaatccacgtgtattacaaaaagtagcagaagaagcagcacgagttctagtagatcctgttccaagctacaaacaagtcaaacagcttaaatatgttggcatggtcttaaacgaagcgctgcgcttatggccagtagcgcctatgttttccctatatgcaaaagaagatacggtgcttggaggagaatatcctttaacgaaaggcgacgaagtaatggttctggtgcctcagcttcaccgtgataaaacaatttggggagacgatgtggaggagttccgtccagagcgttttgaaacgccaagtgcgattccgcagcatgcgtttaaaccgtttggaaacggtcagcgtgcgtgtatcggtcagcagttcgctcttcatagtgcaacgctggtacttggtatgatgctaaaacactttgactttgaagatcatacaaactacgagctcgttattaaagaatcgcggacgttaaaacctgaaggctttgtggtaaaagcaaaatcgaaaggcattccgcttggcggtattccttcacctagcactgaacagtctgctaaaaaagtacgcaaaaaggcagaaaacgctcataatacgccgctgcttgtgctatacggttcaaatgcgggaacagctgaaggaacggcgcgtgatttagcagatattgcaatgagcaaaggatttgcaccgcaggtcgcaacgcttgattcacacgccggtaatcttccgcgcgaaggagctgtattaattgtaacggcgtcttataacggtcatccgcctgataacgcaaagcaatttgtcgattggttagaccaagcgtctgcggatgaagtaaaaggcgttcgctactccgtatttggatgcggcgataaaaattgggcggggacgtatcaaaaagtgcctgcttttatcgatgaaacgcttgccgctaaaggggcagaaaacatcgctgaccgcggtgaagcagatgcaagcgacgactttgaaggcgcgtatgaagaatggcgtgatcatatgtggagtgacgtagcagcctactttggtctcgacattgaaaacagtgaagataataaatctactctttcacttcaatttgtcgacagcgcggcggatatgccgcttgcgaaaatgcacggtgcgttttcaacgaacgtcgtagcaagcaaagaacttcaacagcctggcagtgcacgaagcacgcgacatcttgaaattgaacttccaaaagaagcttcttatcaagaaggagatcatttaggtgttattcctcgctattatgaaggaatagtaaaccgtgtaacacagaggttcggcctaagcgcatcacagctgatccgtctggaagcagaagaagaaaaattagctcatttgccactcgctaaaacagtatccgtagaagagcttctgcaatacgtggagcttcaagatcctgttacgcgcacgcagcttcgcgcaatggctgctaaaacggtctgcccgccgcataaagtagagcttgaagccttgcttggcaagcaagcctacaaagaacaagtgctggcaaaacgtttaacaatgcttgaactgcttgaaaaatacccggcgtgtgaaatgagtttcagcgaatttatcgcccttctgccaagcatacgcccgcgctattactcgatttcttcatcacctcgtgtcgatgaaaaacaagcaagcatcacggtcagcgttgtctcaggaccggcgtggagcggatatggagaatataaaggaattgcgtcgaactatcttgctgagctgcaagaaggagatacgattacgtgctttatttccacaccgcagtcagagtttacgctgccaaaagaccctgaaacgccgcttatcatggtcggaccgggaacaggcgtcgcgccgtttagaggctttgtgcaggcgcgcaaacagctaaaagaacaaggacagtcacttggagaagcacatttatacttcggctgccgttcacctcatgaagactatctgtatcaagaagagcttgaaaacgcccaaagcgaaggcatcattacgcttcataccgctttttctcgcatgccgaatcagccgaaaacatacgttcagcacgtaatggaacaagacggcaagaaattgattgaacttcttgatcaaggagcgcacttctatatttgcggagacggaattcaaatggcacctgccgttgaagcaacgcttatgaaaagctatgctgacgttcaccaagtgagtgaagcagacgctcgcttatggctgcagcagctagaagaaaaaggccgatacgcaaaagacgtgtggctgggg

SEQ ID NO: 1094 - protein, 1049 aa, synthetic construct
  REGION 1..1049: note = variant of P450 oxidase from Bacillus megaterium
MTIKEMPQPKTFGELKNLPLLNTDKPVQALMRIADELGEIFKFEAPGSVTRYLSSQRLIKEACDESRFDKNLSQGLKFARDFVGDGLVTSWTHEPNWKKAHNILVPSFSQHAMGRYHAMMVDIAVQLVQKWERLNADEHIEVSEDMTRLTLDTIGLCLFNYRFNSFYRDTPHPFIVSVVRALDEVMNKLQRANPDDPAYDENKRQCQEDIKVMNDYVDKIIADRKARGEQSHDLLTQMLNGKDPETGEPLDDGNIRQQIITFLIAGHQTTSGLLSFALYFLVKNPRVLQKVAEEAARVLVDPVPSYKQVKQLKYVGMVLNEALRLWPVAPMFSLYAKEDTVLGGEYPLTKGDEVMVLVPQLHRDKTIWGDDVEEFRPERFETPSAIPQHAFKPFGNGQRACIGQQFALHSATLVLGMMLKHFDFEDHTNYELVIKESRTLKPEGFVVKAKSKGIPLGGIPSPSTEQSAKKVRKKAENAHNTPLLVLYGSNAGTAEGTARDLADIAMSKGFAPQVATLDSHAGNLPREGAVLIVTASYNGHPPDNAKQFVDWLDQASADEVKGVRYSVFGCGDKNWAGTYQKVPAFIDETLAAKGAENIADRGEADASDDFEGAYEEWRDHMWSDVAAYFGLDIENSEDNKSTLSLQFVDSAADMPLAKMHGAFSTNVVASKELQQPGSARSTRHLEIELPKEASYQEGDHLGVIPRYYEGIVNRVTQRFGLSASQLIRLEAEEEKLAHLPLAKTVSVEELLQYVELQDPVTRTQLRAMAAKTVCPPHKVELEALLGKQAYKEQVLAKRLTMLELLEKYPACEMSFSEFIALLPSIRPRYYSISSSPRVDEKQASITVSVVSGPAWSGYGEYKGIASNYLAELQEGDTITCFISTPQSEFTLPKDPETPLIMVGPGTGVAPFRGFVQARKQLKEQGQSLGEAHLYFGCRSPHEDYLYQEELENAQSEGIITLHTAFSRMPNQPKTYVQHVMEQDGKKLIELLDQGAHFYICGDGIQMAPAVEATLMKSYADVHQVSEADARLWLQQLEEKGRYAKDVWLG

SEQ ID NO: 1095 - DNA, 3147 bp, synthetic construct
  misc_feature 1..3147: note = variant of P450 oxidase from Bacillus megaterium
  source 1..3147: mol_type = other DNA
atgacaattaaggaaatgcctcagcctaagacgtttggagaacttaaaaatttaccgttattaaatacagataaaccggttcaagctttgatgcgtattgcggatgaattaggagaaatctttaaattcgaggcgcctggtagcgtaacgcgctatttatcaagtcagcgtctaattaaagaagcatgcgatgaatcacgctttgataaaaacttaagtcaagggcttaaatttgcacgtgattttgttggagacgggctggttacaagctggacgcatgaaccgaattggaaaaaagcgcataatatcttagttccaagctttagtcagcatgcaatggggcgttatcatgcgatgatggtcgatatcgccgtgcagcttgttcaaaagtgggagcgtctaaatgcagatgagcatattgaagtatcggaagacatgacacgtttaacgcttgatacaattggtctttgcctgtttaactatcgctttaacagcttttaccgagatacgcctcatccatttattgtgagtgtggttcgtgcactggatgaagtaatgaacaagctgcagcgagcaaatccagacgacccagcttatgatgaaaacaagcgccagtgtcaagaagatatcaaggtgatgaacgactatgtagataaaattattgcagatcgcaaagcaaggggtgaacaaagtcatgatttattaacgcagatgctaaacggaaaagatccagaaacgggtgagccgcttgatgacgggaacattcgtcagcaaattattacattcttaattgcgggacaccaaacgacaagtggtcttttatcatttgcgctgtatttcttagtgaaaaatccacgtgtattacaaaaagtagcagaagaagcagcacgagttctagtagatcctgttccaagctacaaacaagtcaaacagcttaaatatgttggcatggtcttaaacgaagcgctgcgcttatggccagtagcgcctatgttttccctatatgcaaaagaagatacggtgcttggaggagaatatcctttaacgaaaggcgacgaagtaatggttctggtgcctcagcttcaccgtgataaaacaatttggggagacgatgtggaggagttccgtccagagcgttttgaaaatccaagtgcgattccgcagcatgcgtttaaaccgtttggaaacggtcagcgtgcgtgtatcggtcagcagttcgctcttcatagtgcaacgctggtacttggtatgatgctaaaacactttgactttgaagatcatacaaactacgagctcgttattaaagaatcgcggacgttaaaacctgaaggctttgtggtaaaagcaaaatcgaaaggcattccgcttggcggtattccttcacctagcactcagcagtctgctaaaaaagtacgcaaaaaggcagaaaacgctcataatacgccgctgcttgtgctatacggttcaaatgcgggaacagctgaaggaacggcgcgtgatttagcagatattgcaatgagcaaaggatttgcaccgcaggtcgcaacgcttgattcacacgccggtaatcttccgcgcgaaggagctgtattaattgtaacggcgtcttataacggtcatccgcctgataacgcaaagcaatttgtcgattggttagaccaagcgtctgcggatgaagtaaaaggcgttcgctactccgtatttggatgcggcgataaaaattgggcggggacgtatcaaaaagtgcctgcttttatcgatgaaacgcttgccgctaaaggggcagaaaacatcgctgaccgcggtgaagcagatgcaagcgacgactttgaaggcgcgtatgaagaatggcgtgatcatatgtggagtgacgtagcagcctactttggtctcgacattgaaaacagtgaagataataaatctactctttcacttcaatttgtcgacagcgcggcggatatgccgcttgcgaaaatgcacggtgcgttttcaacgaacgtcgtagcaagcaaagaacttcaacagcctggcagtgcacgaagcacgcgacatcttgaaattgaacttccaaaagaagcttcttatcaagaaggagatcatttaggtgttattcctcgctattatgaaggaatagtaaaccgtgtaacacagaggttcggcctaagcgcatcacagctgatccgtctggaagcagaagaagaaaaattagctcatttgccactcgctaaaacagtatccgtagaagagcttctgcaatacgtggagcttcaagatcctgttacgcgcacgcagcttcgcgcaatggctgctaaaacggtctgcccgccgcataaagtagagcttgaagccttgcttggcaagcaagcctacaaagaacaagtgctggcaaaacgtttaacaatgcttgaactgcttgaaaaatacccggcgtgtgaaatgagtttcagcgaatttatcgcccttctgccaagcatacgcccgcgctattactcgatttcttcatcacctcgtgtcgatgaaaaacaagcaagcatcacggtcagcgttgtctcaggaccggcgtggagcggatatggagaatataaaggaattgcgtcgaactatcttgctgagctgcaagaaggagatacgattacgtgctttatttccacaccgcagtcagagtttacgctgccaaaagaccctgaaacgccgcttatcatggtcggaccgggaacaggcgtcgcgccgtttagaggctttgtgcaggcgcgcaaacagctaaaagaacaaggacagtcacttggagaagcacatttatacttcggctgccgttcacctcatgaagactatctgtatcaagaagagcttgaaaacgcccaaagcgaaggcatcattacgcttcataccgctttttctcgcatgccgaatcagccgaaaacatacgttcagcacgtaatggaacaagacggcaagaaattgattgaacttcttgatcaaggagcgcacttctatatttgcggagacggaattcaaatggcacctgccgttgaagcaacgcttatgaaaagctatgctgacgttcaccaagtgagtgaagcagacgctcgcttatggctgcagcagctggaagaaaaaggccgatacgcaaaagacgtgtggctgggg

SEQ ID NO: 1096 - protein, 1049 aa, synthetic construct
  REGION 1..1049: note = variant of P450 oxidase from Bacillus megaterium
MTIKEMPQPKTFGELKNLPLLNTDKPVQALMRIADELGEIFKFEAPGSVTRYLSSQRLIKEACDESRFDKNLSQGLKFARDFVGDGLVTSWTHEPNWKKAHNILVPSFSQHAMGRYHAMMVDIAVQLVQKWERLNADEHIEVSEDMTRLTLDTIGLCLFNYRFNSFYRDTPHPFIVSVVRALDEVMNKLQRANPDDPAYDENKRQCQEDIKVMNDYVDKIIADRKARGEQSHDLLTQMLNGKDPETGEPLDDGNIRQQIITFLIAGHQTTSGLLSFALYFLVKNPRVLQKVAEEAARVLVDPVPSYKQVKQLKYVGMVLNEALRLWPVAPMFSLYAKEDTVLGGEYPLTKGDEVMVLVPQLHRDKTIWGDDVEEFRPERFENPSAIPQHAFKPFGNGQRACIGQQFALHSATLVLGMMLKHFDFEDHTNYELVIKESRTLKPEGFVVKAKSKGIPLGGIPSPSTQQSAKKVRKKAENAHNTPLLVLYGSNAGTAEGTARDLADIAMSKGFAPQVATLDSHAGNLPREGAVLIVTASYNGHPPDNAKQFVDWLDQASADEVKGVRYSVFGCGDKNWAGTYQKVPAFIDETLAAKGAENIADRGEADASDDFEGAYEEWRDHMWSDVAAYFGLDIENSEDNKSTLSLQFVDSAADMPLAKMHGAFSTNVVASKELQQPGSARSTRHLEIELPKEASYQEGDHLGVIPRYYEGIVNRVTQRFGLSASQLIRLEAEEEKLAHLPLAKTVSVEELLQYVELQDPVTRTQLRAMAAKTVCPPHKVELEALLGKQAYKEQVLAKRLTMLELLEKYPACEMSFSEFIALLPSIRPRYYSISSSPRVDEKQASITVSVVSGPAWSGYGEYKGIASNYLAELQEGDTITCFISTPQSEFTLPKDPETPLIMVGPGTGVAPFRGFVQARKQLKEQGQSLGEAHLYFGCRSPHEDYLYQEELENAQSEGIITLHTAFSRMPNQPKTYVQHVMEQDGKKLIELLDQGAHFYICGDGIQMAPAVEATLMKSYADVHQVSEADARLWLQQLEEKGRYAKDVWLG

SEQ ID NO: 1097 - DNA, 3147 bp, synthetic construct
  misc_feature 1..3147: note = variant of P450 oxidase from Bacillus megaterium
  source 1..3147: mol_type = other DNA
atgacaattaaggaaatgcctcagcctaagacgtttggagaacttaaaaatttaccgttattaaatacagataaaccggttcaagctttgatgcgtattgcggatgaattaggagaaatctttaaattcgaggcgcctggtagcgtaacgcgctatttatcaagtcagcgtctaattaaagaagcatgcgatgaatcacgctttgataaaaacttaagtcaagggcttaaatttgcacgtgattttgttggagacgggctggttacaagctggacgcatgaaccgaattggaaaaaagcgcataatatcttagttccaagctttagtcagcatgcaatggggcgttatcatgcgatgatggtcgatatcgccgtgcagcttgttcaaaagtgggagcgtctaaatgcagatgagcatattgaagtatcggaagacatgacacgtttaacgcttgatacaattggtctttgcctgtttaactatcgctttaacagcttttaccgagatacgcctcatccatttattgtgagtgtggttcgtgcactggatgaagtaatgaacaagctgcagcgagcaaatccagacgacccagcttatgatgaaaacaagcgccagtgtcaagaagatatcaaggtgatgaacgactatgtagataaaattattgcagatcgcaaagcaaggggtgaacaaagtcatgatttattaacgcagatgctaaacggaaaagatccagaaacgggtgagccgcttgatgacgggaacattcgtcagcaaattattacattcttaattgcgggacaccaaacgacaagtggtcttttatcatttgcgctgtatttcttagtgaaaaatccacgtgtattacaaaaagtagcagaagaagcagcacgagttctagtagatcctgttccaagctacaaacaagtcaaacagcttaaatatgttggcatggtcttaaacgaagcgctgcgcttatggccagtagcgcctatgttttccctatatgcaaaagaagatacggtgcttggaggagaatatcctttaacgaaaggcgacgaagtaatggttctggtgcctcagcttcaccgtgataaaacaatttggggagacgattcggaggagttccgtccagagcgttttgaaaatccaagtgcgattccgcagcatgcgtttaaaccgtttggaaacggtcagcgtgcgtgtatcggtcagcagttcgctcttcatagtgcaacgctggtacttggtatgatgctaaaacactttgactttgaagatcatacaaactacgagctcgttattaaagaatcgcggacgttaaaacctgaaggctttgtggtaaaagcaaaatcgaaaggcattccgcttggcggtattccttcacctagcactgaacagtctgctaaaaaagtacgcaaaaaggcagaaaacgctcataatacgccgctgcttgtgctatacggttcaaatgcgggaacagctgaaggaacggcgcgtgatttagcagatattgcaatgagcaaaggatttgcaccgcaggtcgcaacgcttgattcacacgccggtaatcttccgcgcgaaggagctgtattaattgtaacggcgtcttataacggtcatccgcctgataacgcaaagcaatttgtcgattggttagaccaagcgtctgcggatgaagtaaaaggcgttcgctactccgtatttggatgcggcgataaaaattgggcggggacgtatcaaaaagtgcctgcttttatcgatgaaacgcttgccgctaaaggggcagaaaacatcgctgaccgcggtgaagcagatgcaagcgacgactttgaaggcgcgtatgaagaatggcgtgatcatatgtggagtgacgtagcagcctactttggtctcgacattgaaaacagtgaagataataaatctactctttcacttcaatttgtcgacagcgcggcggatatgccgcttgcgaaaatgcacggtgcgttttcaacgaacgtcgtagcaagcaaagaacttcaacagcctggcagtgcacgaagcacgcgacatcttgaaattgaacttccaaaagaagcttcttatcaagaaggagatcatttaggtgttattcctcgctattatgaaggaatagtaaaccgtgtaacacagaggttcggcctaagcgcatcacagctgatccgtctggaagcagaagaagaaaaattagctcatttgccactcgctaaaacagtatccgtagaagagcttctgcaatacgtggagcttcaagatcctgttacgcgcacgcagcttcgcgcaatggctgctaaaacggtctgcccgccgcataaagtagagcttgaagccttgcttggcaagcaagcctacaaagaacaagtgctggcaaaacgtttaacaatgcttgaactgcttgaaaaatacccggcgtgtgaaatgagtttcagcgaatttatcgcccttctgccaagcatacgcccgcgctattactcgatttcttcatcacctcgtgtcgatgaaaaacaagcaagcatcacggtcagcgttgtctcaggaccggcgtggagcggatatggagaatataaaggaattgcgtcgaactatcttgctgagctgcaagaaggagatacgattacgtgctttatttccacaccgcagtcagagtttacgctgccaaaagaccctgaaacgccgcttatcatggtcggaccgggaacaggcgtcgcgccgtttagaggctttgtgcaggcgcgcaaacagctaaaagaacaaggacagtcacttggagaagcacatttatacttcggctgccgttcacctcatgaagactatctgtatcaagaagagcttgaaaacgcccaaagcgaaggcatcattacgcttcataccgctttttctcgcatgccgaatcagccgaaaacatacgttcagcacgtaatggaacaagacggcaagaaattgattgaacttcttgatcaaggagcgcacttctatatttgcggagacggaattcaaatggcacctgccgttgaagcaacgcttatgaaaagctatgctgacgttcaccaagtgagtgaagcagacgctcgcttatggctgcagcagctagaagaaaaaggccgatacgcaaaagacgtgtggctgggg

SEQ ID NO: 1098 - protein, 1049 aa, synthetic construct
  REGION 1..1049: note = variant of P450 oxidase from Bacillus megaterium
MTIKEMPQPKTFGELKNLPLLNTDKPVQALMRIADELGEIFKFEAPGSVTRYLSSQRLIKEACDESRFDKNLSQGLKFARDFVGDGLVTSWTHEPNWKKAHNILVPSFSQHAMGRYHAMMVDIAVQLVQKWERLNADEHIEVSEDMTRLTLDTIGLCLFNYRFNSFYRDTPHPFIVSVVRALDEVMNKLQRANPDDPAYDENKRQCQEDIKVMNDYVDKIIADRKARGEQSHDLLTQMLNGKDPETGEPLDDGNIRQQIITFLIAGHQTTSGLLSFALYFLVKNPRVLQKVAEEAARVLVDPVPSYKQVKQLKYVGMVLNEALRLWPVAPMFSLYAKEDTVLGGEYPLTKGDEVMVLVPQLHRDKTIWGDDSEEFRPERFENPSAIPQHAFKPFGNGQRACIGQQFALHSATLVLGMMLKHFDFEDHTNYELVIKESRTLKPEGFVVKAKSKGIPLGGIPSPSTEQSAKKVRKKAENAHNTPLLVLYGSNAGTAEGTARDLADIAMSKGFAPQVATLDSHAGNLPREGAVLIVTASYNGHPPDNAKQFVDWLDQASADEVKGVRYSVFGCGDKNWAGTYQKVPAFIDETLAAKGAENIADRGEADASDDFEGAYEEWRDHMWSDVAAYFGLDIENSEDNKSTLSLQFVDSAADMPLAKMHGAFSTNVVASKELQQPGSARSTRHLEIELPKEASYQEGDHLGVIPRYYEGIVNRVTQRFGLSASQLIRLEAEEEKLAHLPLAKTVSVEELLQYVELQDPVTRTQLRAMAAKTVCPPHKVELEALLGKQAYKEQVLAKRLTMLELLEKYPACEMSFSEFIALLPSIRPRYYSISSSPRVDEKQASITVSVVSGPAWSGYGEYKGIASNYLAELQEGDTITCFISTPQSEFTLPKDPETPLIMVGPGTGVAPFRGFVQARKQLKEQGQSLGEAHLYFGCRSPHEDYLYQEELENAQSEGIITLHTAFSRMPNQPKTYVQHVMEQDGKKLIELLDQGAHFYICGDGIQMAPAVEATLMKSYADVHQVSEADARLWLQQLEEKGRYAKDVWLG

SEQ ID NO: 1099 - DNA, 3147 bp, synthetic construct
  misc_feature 1..3147: note = variant of P450 oxidase from Bacillus megaterium
  source 1..3147: mol_type = other DNA
atgacaattaaggaaatgcctcagcctaagacgtttggagaacttaaaaatttaccgttattaaatacagataaaccggttcaagctttgatgcgtattgcggatgaattaggagaaatctttaaattcgaggcgcctggtagcgtaacgcgctatttatcaagtcagcgtctaattaaagaagcatgcgatgaatcacgctttgataaaaacttaagtcaagggcttaaatttgcacgtgattttgttggagacgggctggttacaagctggacgcatgaaccgaattggaaaaaagcgcataatatcttagttccaagctttagtcagcatgcaatggggcgttatcatgcgatgatggtcgatatcgccgtgcagcttgttcaaaagtgggagcgtctaaatgcagatgagcatattgaagtatcggaagacatgacacgtttaacgcttgatacaattggtctttgcctgtttaactatcgctttaacagcttttaccgagatacgcctcatccatttattgtgagtgtggttcgtgcactggatgaagtaatgaacaagctgcagcgagcaaatccagacgacccagcttatgatgaaaacaagcgccagtgtcaagaagatatcaaggtgatgaacgactatgtagataaaattattgcagatcgcaaagcaaggggtgaacaaagtcatgatttattaacgcagatgctaaacggaaaagatccagaaacgggtgagccgcttgatgacgggaacattcgtcagcaaattattacattcttaattgcgggacaccaaacgacaagtggtcttttatcatttgcgctgtatttcttagtgaaaaatccacgtgtattacaaaaagtagcagaagaagcagcacgagttctagtagatcctgttccaagctacaaacaagtcaaacagcttaaatatgttggcatggtcttaaacgaagcgctgcgcttatggccagtagcgcctatgttttccctatatgcaaaagaagatacggtgcttggaggagaatatcctttaacgaaaggcgacgaagtaatggttctggtgcctcagcttcaccgtgataaaacaatttggggagacgatgtggaggagttccgtccagagcgttttgaaaatccaagtgcgattccgcagcatgcgtttaaaccgtttggaaacggtcagcgtgcgtgtatcggtcagcagttcgctcttcatagtgcaacgctggtacttggtatgatgctaaaacactttgactttgaagatcatacaaactacgagctcttgattaaagaatcgcggacgttaaaacctgaaggctttgtggtaaaagcaaaatcgaaaggcattccgcttggcggtattccttcacctagcactgaacagtctgctaaaaaagtacgcaaaaaggcagaaaacgctcataatacgccgctgcttgtgctatacggttcaaatgcgggaacagctgaaggaacggcgcgtgatttagcagatattgcaatgagcaaaggatttgcaccgcaggtcgcaacgcttgattcacacgccggtaatcttccgcgcgaaggagctgtattaattgtaacggcgtcttataacggtcatccgcctgataacgcaaagcaatttgtcgattggttagaccaagcgtctgcggatgaagtaaaaggcgttcgctactccgtatttggatgcggcgataaaaattgggcggggacgtatcaaaaagtgcctgcttttatcgatgaaacgcttgccgctaaaggggcagaaaacatcgctgaccgcggtgaagcagatgcaagcgacgactttgaaggcgcgtatgaagaatggcgtgatcatatgtggagtgacgtagcagcctactttggtctcgacattgaaaacagtgaagataataaatctactctttcacttcaatttgtcgacagcgcggcggatatgccgcttgcgaaaatgcacggtgcgttttcaacgaacgtcgtagcaagcaaagaacttcaacagcctggcagtgcacgaagcacgcgacatcttgaaattgaacttccaaaagaagcttcttatcaagaaggagatcatttaggtgttattcctcgctattatgaaggaatagtaaaccgtgtaacacagaggttcggcctaagcgcatcacagctgatccgtctggaagcagaagaagaaaaattagctcatttgccactcgctaaaacagtatccgtagaagagcttctgcaatacgtggagcttcaagatcctgttacgcgcacgcagcttcgcgcaatggctgctaaaacggtctgcccgccgcataaagtagagcttgaagccttgcttggcaagcaagcctacaaagaacaagtgctggcaaaacgtttaacaatgcttgaactgcttgaaaaatacccggcgtgtgaaatgagtttcagcgaatttatcgcccttctgccaagcatacgcccgcgctattactcgatttcttcatcacctcgtgtcgatgaaaaacaagcaagcatcacggtcagcgttgtctcaggaccggcgtggagcggatatggagaatataaaggaattgcgtcgaactatcttgctgagctgcaagaaggagatacgattacgtgctttatttccacaccgcagtcagagtttacgctgccaaaagaccctgaaacgccgcttatcatggtcggaccgggaacaggcgtcgcgccgtttagaggctttgtgcaggcgcgcaaacagctaaaagaacaaggacagtcacttggagaagcacatttatacttcggctgccgttcacctcatgaagactatctgtatcaagaagagcttgaaaacgcccaaagcgaaggcatcattacgcttcataccgctttttctcgcatgccgaatcagccgaaaacatacgttcagcacgtaatggaacaagacggcaagaaattgattgaacttcttgatcaaggagcgcacttctatatttgcggagacggaattcaaatggcacctgccgttgaagcaacgcttatgaaaagctatgctgacgttcaccaagtgagtgaagcagacgctcgcttatggctgcagcagctagaagaaaaaggccgatacgcaaaagacgtgtggctgggg

SEQ ID NO: 1100 - protein, 1049 aa, synthetic construct
  REGION 1..1049: note = variant of P450 oxidase from Bacillus megaterium
MTIKEMPQPKTFGELKNLPLLNTDKPVQALMRIADELGEIFKFEAPGSVTRYLSSQRLIKEACDESRFDKNLSQGLKFARDFVGDGLVTSWTHEPNWKKAHNILVPSFSQHAMGRYHAMMVDIAVQLVQKWERLNADEHIEVSEDMTRLTLDTIGLCLFNYRFNSFYRDTPHPFIVSVVRALDEVMNKLQRANPDDPAYDENKRQCQEDIKVMNDYVDKIIADRKARGEQSHDLLTQMLNGKDPETGEPLDDGNIRQQIITFLIAGHQTTSGLLSFALYFLVKNPRVLQKVAEEAARVLVDPVPSYKQVKQLKYVGMVLNEALRLWPVAPMFSLYAKEDTVLGGEYPLTKGDEVMVLVPQLHRDKTIWGDDVEEFRPERFENPSAIPQHAFKPFGNGQRACIGQQFALHSATLVLGMMLKHFDFEDHTNYELLIKESRTLKPEGFVVKAKSKGIPLGGIPSPSTEQSAKKVRKKAENAHNTPLLVLYGSNAGTAEGTARDLADIAMSKGFAPQVATLDSHAGNLPREGAVLIVTASYNGHPPDNAKQFVDWLDQASADEVKGVRYSVFGCGDKNWAGTYQKVPAFIDETLAAKGAENIADRGEADASDDFEGAYEEWRDHMWSDVAAYFGLDIENSEDNKSTLSLQFVDSAADMPLAKMHGAFSTNVVASKELQQPGSARSTRHLEIELPKEASYQEGDHLGVIPRYYEGIVNRVTQRFGLSASQLIRLEAEEEKLAHLPLAKTVSVEELLQYVELQDPVTRTQLRAMAAKTVCPPHKVELEALLGKQAYKEQVLAKRLTMLELLEKYPACEMSFSEFIALLPSIRPRYYSISSSPRVDEKQASITVSVVSGPAWSGYGEYKGIASNYLAELQEGDTITCFISTPQSEFTLPKDPETPLIMVGPGTGVAPFRGFVQARKQLKEQGQSLGEAHLYFGCRSPHEDYLYQEELENAQSEGIITLHTAFSRMPNQPKTYVQHVMEQDGKKLIELLDQGAHFYICGDGIQMAPAVEATLMKSYADVHQVSEADARLWLQQLEEKGRYAKDVWLG

SEQ ID NO: 1101 - DNA, 3147 bp, synthetic construct
  misc_feature 1..3147: note = variant of P450 oxidase from Bacillus megaterium
  source 1..3147: mol_type = other DNA
atgacaattaaggaaatgcctcagcctaagacgtttggagaacttaaaaatttaccgttattaaatacagataaaccggttcaagctttgatgcgtattgcggatgaattaggagaaatctttaaattcgaggcgcctggtagcgtaacgcgctatttatcaagtcagcgtctaattaaagaagcatgcgatgaatcacgctttgataaaaacttaagtcaagggcttaaatttgcacgtgattttgttggagacgggctggttacaagctggacgcatgaaccgaattggaaaaaagcgcataatatcttagttccaagctttagtcagcatgcaatggggcgttatcatgcgatgatggtcgatatcgccgtgcagcttgttcaaaagtgggagcgtctaaatgcagatgagcatattgaagtatcggaagacatgacacgtttaacgcttgatacaattggtctttgcctgtttaactatcgctttaacagcttttaccgagatacgcctcatccatttattgtgagtgtggttcgtgcactggatgaagtaatgaacaagctgcagcgagcaaatccagacgacccagcttatgatgaaaacaagcgccagtgtcaagaagatatcaaggtgatgaacgactatgtagataaaattattgcagatcgcaaagcaaggggtgaacaaagtcatgatttattaacgcagatgctaaacggaaaagatccagaaacgggtgagccgcttgatgacgggaacattcgtcagcaaattattacattcttaattgcgggacaccaaacgacaagtggtcttttatcatttgcgctgtatttcttagtgaaaaatccacgtgtattacaaaaagtagcagaagaagcagcacgagttctagtagatcctgttccaagctacaaacaagtcaaacagcttaaatatgttggcatggtcttaaacgaagcgctgcgcttatggccagtagcgcctatgttttccctatatgcaaaagaagatacggtgcttggaggagaatatcctttaacgaaaggcgacgaagtaatggttctggtgcctcagcttcaccgtgataaaacaatttggggagacgatgtggaggagttccgtccagagcgttttgaaaatccaagtgcgattccgcagcatgcgtttaaaccgtttggaaacggtcagcgtgcgtgtatcggtcagcagttcgctcttcatagtgcaacgctggtacttggtatgatgctaaaacactttgactttgaagatcatacaaactacgagctcgttattaaagaatcgcggacgttaaaacctgaaggctttgtggtaaaagcaaaatcgaaaggcattccgcttggcggtattccttcacctagcactgaacagtctgctaaaaaagtacgcaaaaaggcagaaaacgctcataatacgccgctgcttgtgctatacggttcaaatgcgggaacagctgaaggaacggcgcgtgatttagcagatattgcagatagcaaaggatttgcaccgcaggtcgcaacgcttgattcacacgccggtaatcttccgcgcgaaggagctgtattaattgtaacggcgtcttataacggtcatccgcctgataacgcaaagcaatttgtcgattggttagaccaagcgtctgcggatgaagtaaaaggcgttcgctactccgtatttggatgcggcgataaaaattgggcggggacgtatcaaaaagtgcctgcttttatcgatgaaacgcttgccgctaaaggggcagaaaacatcgctgaccgcggtgaagcagatgcaagcgacgactttgaaggcgcgtatgaagaatggcgtgatcatatgtggagtgacgtagcagcctactttggtctcgacattgaaaacagtgaagataataaatctactctttcacttcaatttgtcgacagcgcggcggatatgccgcttgcgaaaatgcacggtgcgttttcaacgaacgtcgtagcaagcaaagaacttcaacagcctggcagtgcacgaagcacgcgacatcttgaaattgaacttccaaaagaagcttcttatcaagaaggagatcatttaggtgttattcctcgctattatgaaggaatagtaaaccgtgtaacacagaggttcggcctaagcgcatcacagctgatccgtctggaagcagaagaagaaaaattagctcatttgccactcgctaaaacagtatccgtagaagagcttctgcaatacgtggagcttcaagatcctgttacgcgcacgcagcttcgcgcaatggctgctaaaacggtctgcccgccgcataaagtagagcttgaagccttgcttggcaagcaagcctacaaagaacaagtgctggcaaaacgtttaacaatgcttgaactgcttgaaaaatacccggcgtgtgaaatgagtttcagcgaatttatcgcccttctgccaagcatacgcccgcgctattactcgatttcttcatcacctcgtgtcgatgaaaaacaagcaagcatcacggtcagcgttgtctcaggaccggcgtggagcggatatggagaatataaaggaattgcgtcgaactatcttgctgagctgcaagaaggagatacgattacgtgctttatttccacaccgcagtcagagtttacgctgccaaaagaccctgaaacgccgcttatcatggtcggaccgggaacaggcgtcgcgccgtttagaggctttgtgcaggcgcgcaaacagctaaaagaacaaggacagtcacttggagaagcacatttatacttcggctgccgttcacctcatgaagactatctgtatcaagaagagcttgaaaacgcccaaagcgaaggcatcattacgcttcataccgctttttctcgcatgccgaatcagccgaaaacatacgttcagcacgtaatggaacaagacggcaagaaattgattgaacttcttgatcaaggagcgcacttctatatttgcggagacggaattcaaatggcacctgccgttgaagcaacgcttatgaaaagctatgctgacgttcaccaagtgagtgaagcagacgctcgcttatggctgcagcagctagaagaaaaaggccgatacgcaaaagacgtgtggctgggg

SEQ ID NO: 1102 - protein, 1049 aa, synthetic construct
  REGION 1..1049: note = variant of P450 oxidase from Bacillus megaterium
MTIKEMPQPKTFGELKNLPLLNTDKPVQALMRIADELGEIFKFEAPGSVTRYLSSQRLIKEACDESRFDKNLSQGLKFARDFVGDGLVTSWTHEPNWKKAHNILVPSFSQHAMGRYHAMMVDIAVQLVQKWERLNADEHIEVSEDMTRLTLDTIGLCLFNYRFNSFYRDTPHPFIVSVVRALDEVMNKLQRANPDDPAYDENKRQCQEDIKVMNDYVDKIIADRKARGEQSHDLLTQMLNGKDPETGEPLDDGNIRQQIITFLIAGHQTTSGLLSFALYFLVKNPRVLQKVAEEAARVLVDPVPSYKQVKQLKYVGMVLNEALRLWPVAPMFSLYAKEDTVLGGEYPLTKGDEVMVLVPQLHRDKTIWGDDVEEFRPERFENPSAIPQHAFKPFGNGQRACIGQQFALHSATLVLGMMLKHFDFEDHTNYELVIKESRTLKPEGFVVKAKSKGIPLGGIPSPSTEQSAKKVRKKAENAHNTPLLVLYGSNAGTAEGTARDLADIADSKGFAPQVATLDSHAGNLPREGAVLIVTASYNGHPPDNAKQFVDWLDQASADEVKGVRYSVFGCGDKNWAGTYQKVPAFIDETLAAKGAENIADRGEADASDDFEGAYEEWRDHMWSDVAAYFGLDIENSEDNKSTLSLQFVDSAADMPLAKMHGAFSTNVVASKELQQPGSARSTRHLEIELPKEASYQEGDHLGVIPRYYEGIVNRVTQRFGLSASQLIRLEAEEEKLAHLPLAKTVSVEELLQYVELQDPVTRTQLRAMAAKTVCPPHKVELEALLGKQAYKEQVLAKRLTMLELLEKYPACEMSFSEFIALLPSIRPRYYSISSSPRVDEKQASITVSVVSGPAWSGYGEYKGIASNYLAELQEGDTITCFISTPQSEFTLPKDPETPLIMVGPGTGVAPFRGFVQARKQLKEQGQSLGEAHLYFGCRSPHEDYLYQEELENAQSEGIITLHTAFSRMPNQPKTYVQHVMEQDGKKLIELLDQGAHFYICGDGIQMAPAVEATLMKSYADVHQVSEADARLWLQQLEEKGRYAKDVWLG

SEQ ID NO: 1103 - DNA, 3147 bp, synthetic construct
  misc_feature 1..3147: note = variant of P450 oxidase from Bacillus megaterium
  source 1..3147: mol_type = other DNA
atgacagataaggaaatgcctcagcctaagacgtttggagaacttaaaaatttaccgttattaaatacagataaaccggttcaagctttgatgcgtattgcggatgaattaggagaaatctttaaattcgaggcgcctggtagcgtaacgcgctatttatcaagtcagcgtctaattaaagaagcatgcgatgaatcacgctttgataaaaacttaagtcaagggcttaaatttgcacgtgattttgttggagacgggctggttacaagctggacgcatgaaccgaattggaaaaaagcgcataatatcttagttccaagctttagtcagcatgcaatggggcgttatcatgcgatgatggtcgatatcgccgtgcagcttgttcaaaagtgggagcgtctaaatgcagatgagcatattgaagtatcggaagacatgacacgtttaacgcttgatacaattggtctttgcctgtttaactatcgctttaacagcttttaccgagatacgcctcatccatttattgtgagtgtggttcgtgcactggatgaagtaatgaacaagctgcagcgagcaaatccagacgacccagcttatgatgaaaacaagcgccagtgtcaagaagatatcaaggtgatgaacgactatgtagataaaattattgcagatcgcaaagcaaggggtgaacaaagtcatgatttattaacgcagatgctaaacggaaaagatccagaaacgggtgagccgcttgatgacgggaacattcgtcagcaaattattacattcttaattgcgggacaccaaacgacaagtggtcttttatcatttgcgctgtatttcttagtgaaaaatccacgtgtattacaaaaagtagcagaagaagcagcacgagttctagtagatcctgttccaagctacaaacaagtcaaacagcttaaatatgttggcatggtcttaaacgaagcgctgcgcttatggccagtagcgcctatgttttccctatatgcaaaagaagatacggtgcttggaggagaatatcctttaacgaaaggcgacgaagtaatggttctggtgcctcagcttcaccgtgataaaacaatttggggagacgatgtggaggagttccgtccagagcgttttgaaaatccaagtgcgattccgcagcatgcgtttaaaccgtttggaaacggtcagcgtgcgtgtatcggtcagcagttcgctcttcatagtgcaacgctggtacttggtatgatgctaaaacactttgactttgaagatcatacaaactacgagctcgttattaaagaatcgcggacgttaaaacctgaaggctttgtggtaaaagcaaaatcgaaaggcattccgcttggcggtattccttcacctagcactgaacagtctgctaaaaaagtacgcaaaaaggcagaaaacgctcataatacgccgctgcttgtgctatacggttcaaatgcgggaacagctgaaggaacggcgcgtgatttagcagatattgcaatgagcaaaggatttgcaccgcaggtcgcaacgcttgattcacacgccggtaatcttccgcgcgaaggagctgtattaattgtaacggcgtcttataacggtcatccgcctgataacgcaaagcaatttgtcgattggttagaccaagcgtctgcggatgaagtaaaaggcgttcgctactccgtatttggatgcggcgataaaaattgggcggggacgtatcaaaaagtgcctgcttttatcgatgaaacgcttgccgctaaaggggcagaaaacatcgctgaccgcggtgaagcagatgcaagcgacgactttgaaggcgcgtatgaagaatggcgtgatcatatgtggagtgacgtagcagcctactttggtctcgacattgaaaacagtgaagataataaatctactctttcacttcaatttgtcgacagcgcggcggatatgccgcttgcgaaaatgcacggtgcgttttcaacgaacgtcgtagcaagcaaagaacttcaacagcctggcagtgcacgaagcacgcgacatcttgaaattgaacttccaaaagaagcttcttatcaagaaggagatcatttaggtgttattcctcgctattatgaaggaatagtaaaccgtgtaacacagaggttcggcctaagcgcatcacagctgatccgtctggaagcagaagaagaaaaattagctcatttgccactcgctaaaacagtatccgtagaagagcttctgcaatacgtggagcttcaagatcctgttacgcgcacgcagcttcgcgcaatggctgctaaaacggtctgcccgccgcataaagtagagcttgaagccttgcttggcaagcaagcctacaaagaacaagtgctggcaaaacgtttaacaatgcttgaactgcttgaaaaatacccggcgtgtgaaatgagtttcagcgaatttatcgcccttctgccaagcatacgcccgcgctattactcgatttcttcatcacctcgtgtcgatgaaaaacaagcaagcatcacggtcagcgttgtctcaggaccggcgtggagcggatatggagaatataaaggaattgcgtcgaactatcttgctgagctgcaagaaggagatacgattacgtgctttatttccacaccgcagtcagagtttacgctgccaaaagaccctgaaacgccgcttatcatggtcggaccgggaacaggcgtcgcgccgtttagaggctttgtgcaggcgcgcaaacagctaaaagaacaaggacagtcacttggagaagcacatttatacttcggctgccgttcacctcatgaagactatctgtatcaagaagagcttgaaaacgcccaaagcgaaggcatcattacgcttcataccgctttttctcgcatgccgaatcagccgaaaacatacgttcagcacgtaatggaacaagacggcaagaaattgattgaacttcttgatcaaggagcgcacttctatatttgcggagacggaattcaaatggcacctgccgttgaagcaacgcttatgaaaagctatgctgacgttcaccaagtgagtgaagcagacgctcgcttatggctgcagcagctagaagaaaaaggccgatacgcaaaagacgtgtggctgggg

SEQ ID NO: 1104 - protein, 1049 aa, synthetic construct
  REGION 1..1049: note = variant of P450 oxidase from Bacillus megaterium
MTDKEMPQPKTFGELKNLPLLNTDKPVQALMRIADELGEIFKFEAPGSVTRYLSSQRLIKEACDESRFDKNLSQGLKFARDFVGDGLVTSWTHEPNWKKAHNILVPSFSQHAMGRYHAMMVDIAVQLVQKWERLNADEHIEVSEDMTRLTLDTIGLCLFNYRFNSFYRDTPHPFIVSVVRALDEVMNKLQRANPDDPAYDENKRQCQEDIKVMNDYVDKIIADRKARGEQSHDLLTQMLNGKDPETGEPLDDGNIRQQIITFLIAGHQTTSGLLSFALYFLVKNPRVLQKVAEEAARVLVDPVPSYKQVKQLKYVGMVLNEALRLWPVAPMFSLYAKEDTVLGGEYPLTKGDEVMVLVPQLHRDKTIWGDDVEEFRPERFENPSAIPQHAFKPFGNGQRACIGQQFALHSATLVLGMMLKHFDFEDHTNYELVIKESRTLKPEGFVVKAKSKGIPLGGIPSPSTEQSAKKVRKKAENAHNTPLLVLYGSNAGTAEGTARDLADIAMSKGFAPQVATLDSHAGNLPREGAVLIVTASYNGHPPDNAKQFVDWLDQASADEVKGVRYSVFGCGDKNWAGTYQKVPAFIDETLAAKGAENIADRGEADASDDFEGAYEEWRDHMWSDVAAYFGLDIENSEDNKSTLSLQFVDSAADMPLAKMHGAFSTNVVASKELQQPGSARSTRHLEIELPKEASYQEGDHLGVIPRYYEGIVNRVTQRFGLSASQLIRLEAEEEKLAHLPLAKTVSVEELLQYVELQDPVTRTQLRAMAAKTVCPPHKVELEALLGKQAYKEQVLAKRLTMLELLEKYPACEMSFSEFIALLPSIRPRYYSISSSPRVDEKQASITVSVVSGPAWSGYGEYKGIASNYLAELQEGDTITCFISTPQSEFTLPKDPETPLIMVGPGTGVAPFRGFVQARKQLKEQGQSLGEAHLYFGCRSPHEDYLYQEELENAQSEGIITLHTAFSRMPNQPKTYVQHVMEQDGKKLIELLDQGAHFYICGDGIQMAPAVEATLMKSYADVHQVSEADARLWLQQLEEKGRYAKDVWLG

SEQ ID NO: 1105 - DNA, 3147 bp, synthetic construct
  misc_feature 1..3147: note = variant of P450 oxidase from Bacillus megaterium
  source 1..3147: mol_type = other DNA
atgacaattaaggaaatgcctcagcctaagacgtttggagaacttaaaaatttaccgttattaaatacagataaaccggttcaagctttgatgcgtattgcggatgaattaggagaaatctttaaattcgaggcgcctggtagcgtaacgcgctatttatcaagtcagcgtctaattaaagaagcatgcgatgaatcacgctttgataaaaacttaagtcaagggcttaaatttgcacgtgattttgttggagacgggctggttacaagctggacgcatgaaccgaattggaaaaaagcgcataatatcttagttccaagctttagtcagcatgcaatggggcgttatcatgcgatgatggtcgatatcgccgtgcagcttgttcaaaagtgggagcgtctaaatgcagatgagcatattgaagtatcggaagacatgacacgtttaacgcttgatacaattggtctttgcctgtttaactatcgctttaacagcttttaccgagatacgcctcatccatttattgtgagtgtggttcgtgcactggatgaagtaatgaacaagctgcagcgagcaaatccagacgacccagcttatgatgaaaacaagcgccagtgtcaagaagatatcaaggtgatgaacgactatgtagataaaattattgcagatcgcaaagcaaggggtgaacaaagtcatgatttattaacgcagatgctaaacggaaaagatccagaaacgggtgagccgcttgatgacgggaacattcgtcagcaaattattacattcttaattgcgggacaccaaacgacaagtggtcttttatcatttgcgctgtatttcttagtgaaaaatccacgtgtattacaaaaagtagcagaagaagcagcacgagttctagtagatcctgttccaagctacaaacaagtcaaacagcttaaatatgttggcatggtcttaaacgaagcgctgcgcttatggccagtagcgcctatgttttccctatatgcaaaagaagatacggtgcttggaggagaatatcctttaacgaaaggcgacgaagtaatggttctggtgcctcagcttcaccgtgataaaacaatttggggagacgatgtggaggagttccgtccagagcgttttgaaaatccaagtgcgattccgcagcatgcgtttaaaccgtttggaaacggtcagcgtgcgtgtatcggtcagcagttcgctcttcatagtgcaacgctggtacttggtatgatgctaaaacactttgactttgaagatcatacaaactacgagctcgttattaaagaatcgcggacgttaaaacctgaaggctttgtgttgaaagcaaaatcgaaaggcattccgcttggcggtattccttcacctagcactgaacagtctgctaaaaaagtacgcaaaaaggcagaaaacgctcataatacgccgctgcttgtgctatacggttcaaatgcgggaacagctgaaggaacggcgcgtgatttagcagatattgcaatgagcaaaggatttgcaccgcaggtcgcaacgcttgattcacacgccggtaatcttccgcgcgaaggagctgtattaattgtaacggcgtcttataacggtcatccgcctgataacgcaaagcaatttgtcgattggttagaccaagcgtctgcggatgaagtaaaaggcgttcgctactccgtatttggatgcggcgataaaaattgggcggggacgtatcaaaaagtgcctgcttttatcgatgaaacgcttgccgctaaaggggcagaaaacatcgctgaccgcggtgaagcagatgcaagcgacgactttgaaggcgcgtatgaagaatggcgtgatcatatgtggagtgacgtagcagcctactttggtctcgacattgaaaacagtgaagataataaatctactctttcacttcaatttgtcgacagcgcggcggatatgccgcttgcgaaaatgcacggtgcgttttcaacgaacgtcgtagcaagcaaagaacttcaacagcctggcagtgcacgaagcacgcgacatcttgaaattgaacttccaaaagaagcttcttatcaagaaggagatcatttaggtgttattcctcgctattatgaaggaatagtaaaccgtgtaacacagaggttcggcctaagcgcatcacagctgatccgtctggaagcagaagaagaaaaattagctcatttgccactcgctaaaacagtatccgtagaagagcttctgcaatacgtggagcttcaagatcctgttacgcgcacgcagcttcgcgcaatggctgctaaaacggtctgcccgccgcataaagtagagcttgaagccttgcttggcaagcaagcctacaaagaacaagtgctggcaaaacgtttaacaatgcttgaactgcttgaaaaatacccggcgtgtgaaatgagtttcagcgaatttatcgcccttctgccaagcatacgcccgcgctattactcgatttcttcatcacctcgtgtcgatgaaaaacaagcaagcatcacggtcagcgttgtctcaggaccggcgtggagcggatatggagaatataaaggaattgcgtcgaactatcttgctgagctgcaagaaggagatacgattacgtgctttatttccacaccgcagtcagagtttacgctgccaaaagaccctgaaacgccgcttatcatggtcggaccgggaacaggcgtcgcgccgtttagaggctttgtgcaggcgcgcaaacagctaaaagaacaaggacagtcacttggagaagcacatttatacttcggctgccgttcacctcatgaagactatctgtatcaagaagagcttgaaaacgcccaaagcgaaggcatcattacgcttcataccgctttttctcgcatgccgaatcagccgaaaacatacgttcagcacgtaatggaacaagacggcaagaaattgattgaacttcttgatcaaggagcgcacttctatatttgcggagacggaattcaaatggcacctgccgttgaagcaacgcttatgaaaagctatgctgacgttcaccaagtgagtgaagcagacgctcgcttatggctgcagcagctagaagaaaaaggccgatacgcaaaagacgtgtggctgggg

SEQ ID NO: 1106 - protein, 1049 aa, synthetic construct
  REGION 1..1049: note = variant of P450 oxidase from Bacillus megaterium
MTIKEMPQPKTFGELKNLPLLNTDKPVQALMRIADELGEIFKFEAPGSVTRYLSSQRLIKEACDESRFDKNLSQGLKFARDFVGDGLVTSWTHEPNWKKAHNILVPSFSQHAMGRYHAMMVDIAVQLVQKWERLNADEHIEVSEDMTRLTLDTIGLCLFNYRFNSFYRDTPHPFIVSVVRALDEVMNKLQRANPDDPAYDENKRQCQEDIKVMNDYVDKIIADRKARGEQSHDLLTQMLNGKDPETGEPLDDGNIRQQIITFLIAGHQTTSGLLSFALYFLVKNPRVLQKVAEEAARVLVDPVPSYKQVKQLKYVGMVLNEALRLWPVAPMFSLYAKEDTVLGGEYPLTKGDEVMVLVPQLHRDKTIWGDDVEEFRPERFENPSAIPQHAFKPFGNGQRACIGQQFALHSATLVLGMMLKHFDFEDHTNYELVIKESRTLKPEGFVLKAKSKGIPLGGIPSPSTEQSAKKVRKKAENAHNTPLLVLYGSNAGTAEGTARDLADIAMSKGFAPQVATLDSHAGNLPREGAVLIVTASYNGHPPDNAKQFVDWLDQASADEVKGVRYSVFGCGDKNWAGTYQKVPAFIDETLAAKGAENIADRGEADASDDFEGAYEEWRDHMWSDVAAYFGLDIENSEDNKSTLSLQFVDSAADMPLAKMHGAFSTNVVASKELQQPGSARSTRHLEIELPKEASYQEGDHLGVIPRYYEGIVNRVTQRFGLSASQLIRLEAEEEKLAHLPLAKTVSVEELLQYVELQDPVTRTQLRAMAAKTVCPPHKVELEALLGKQAYKEQVLAKRLTMLELLEKYPACEMSFSEFIALLPSIRPRYYSISSSPRVDEKQASITVSVVSGPAWSGYGEYKGIASNYLAELQEGDTITCFISTPQSEFTLPKDPETPLIMVGPGTGVAPFRGFVQARKQLKEQGQSLGEAHLYFGCRSPHEDYLYQEELENAQSEGIITLHTAFSRMPNQPKTYVQHVMEQDGKKLIELLDQGAHFYICGDGIQMAPAVEATLMKSYADVHQVSEADARLWLQQLEEKGRYAKDVWLG

SEQ ID NO: 1107 - DNA, 3147 bp, synthetic construct
  misc_feature 1..3147: note = variant of P450 oxidase from Bacillus megaterium
  source 1..3147: mol_type = other DNA
atgacaattaaggaaatgcctcagcctaagacgtttggagaacttaaaaatttaccgttattaaatacagataaaccggttcaagctttgatgcgtattgcggatgaattaggagaaatctttaaattcgaggcgcctggtagcgtaacgcgctatttatcaagtcagcgtctaattaaagaagcatgcgatgaatcacgctttgataaaaacttaagtcaagggcttaaatttgcacgtgattttgttggagacgggctggttacaagctggacgcatgaaccgaattggaaaaaagcgcataatatcttagttccaagctttagtcagcatgcaatggggcgttatcatgcgatgatggtcgatatcgccgtgcagcttgttcaaaagtgggagcgtctaaatgcagatgagcatattgaagtatcggaagacatgacacgtttaacgcttgatacaattggtctttgcctgtttaactatcgctttaacagcttttaccgagatacgcctcatccatttattgtgagtgtggttcgtgcactggatgaagtaatgaacaagctgcagcgagcaaatccagacgacccagcttatgatgaaaacaagcgccagtgtcaagaagatatcaaggtgatgaacgactatgtagataaaattattgcagatcgcaaagcaaggggtgaacaaagtcatgatttattaacgcagatgctaaacggaaaagatccagaaacgggtgagccgcttgatgacgggaacattcgtcagcaaattattacattcttaattgcgggacaccaaacgacaagtggtcttttatcatttgcgctgtatttcttagtgaaaaatccacgtgtattacaaaaagtagcagaagaagcagcacgagttctagtagatcctgttccaagctacaaacaagtcaaacagcttaaatatgttggcatggtcttaaacgaagcgctgcgcttatggccagtagcgcctatgttttccctatatgcaaaagaagatacggtgcttggaggagaatatcctttaacgaaaggcgacgaagtaatggttctggtgcctcagcttcaccgtgataaaacaatttggggagacgatgtggaggagttccgtccagagcgttttgaaaatccaagtgcgattccgcagcatgcgtttaaaccgtttggaaacggtcagcgtgcgtgtatcggtcagcagttcgctcttcatagtgcaacgctggtacttggtatgatgctaaaacactttgactttgaagatcatacaaactacgaggttgttattaaagaatcgcggacgttaaaacctgaaggctttgtggtaaaagcaaaatcgaaaggcattccgcttggcggtattccttcacctagcactgaacagtctgctaaaaaagtacgcaaaaaggcagaaaacgctcataatacgccgctgcttgtgctatacggttcaaatgcgggaacagctgaaggaacggcgcgtgatttagcagatattgcaatgagcaaaggatttgcaccgcaggtcgcaacgcttgattcacacgccggtaatcttccgcgcgaaggagctgtattaattgtaacggcgtcttataacggtcatccgcctgataacgcaaagcaatttgtcgattggttagaccaagcgtctgcggatgaagtaaaaggcgttcgctactccgtatttggatgcggcgataaaaattgggcggggacgtatcaaaaagtgcctgcttttatcgatgaaacgcttgccgctaaaggggcagaaaacatcgctgaccgcggtgaagcagatgcaagcgacgactttgaaggcgcgtatgaagaatggcgtgatcatatgtggagtgacgtagcagcctactttggtctcgacattgaaaacagtgaagataataaatctactctttcacttcaatttgtcgacagcgcggcggatatgccgcttgcgaaaatgcacggtgcgttttcaacgaacgtcgtagcaagcaaagaacttcaacagcctggcagtgcacgaagcacgcgacatcttgaaattgaacttccaaaagaagcttcttatcaagaaggagatcatttaggtgttattcctcgctattatgaaggaatagtaaaccgtgtaacacagaggttcggcctaagcgcatcacagctgatccgtctggaagcagaagaagaaaaattagctcatttgccactcgctaaaacagtatccgtagaagagcttctgcaatacgtggagcttcaagatcctgttacgcgcacgcagcttcgcgcaatggctgctaaaacggtctgcccgccgcataaagtagagcttgaagccttgcttggcaagcaagcctacaaagaacaagtgctggcaaaacgtttaacaatgcttgaactgcttgaaaaatacccggcgtgtgaaatgagtttcagcgaatttatcgcccttctgccaagcatacgcccgcgctattactcgatttcttcatcacctcgtgtcgatgaaaaacaagcaagcatcacggtcagcgttgtctcaggaccggcgtggagcggatatggagaatataaaggaattgcgtcgaactatcttgctgagctgcaagaaggagatacgattacgtgctttatttccacaccgcagtcagagtttacgctgccaaaagaccctgaaacgccgcttatcatggtcggaccgggaacaggcgtcgcgccgtttagaggctttgtgcaggcgcgcaaacagctaaaagaacaaggacagtcacttggagaagcacatttatacttcggctgccgttcacctcatgaagactatctgtatcaagaagagcttgaaaacgcccaaagcgaaggcatcattacgcttcataccgctttttctcgcatgccgaatcagccgaaaacatacgttcagcacgtaatggaacaagacggcaagaaattgattgaacttcttgatcaaggagcgcacttctatatttgcggagacggaattcaaatggcacctgccgttgaagcaacgcttatgaaaagctatgctgacgttcaccaagtgagtgaagcagacgctcgcttatggctgcagcagctagaagaaaaaggccgatacgcaaaagacgtgtggctgggg

SEQ ID NO: 1108 - protein, 1049 aa, synthetic construct
  REGION 1..1049: note = variant of P450 oxidase from Bacillus megaterium
MTIKEMPQPKTFGELKNLPLLNTDKPVQALMRIADELGEIFKFEAPGSVTRYLSSQRLIKEACDESRFDKNLSQGLKFARDFVGDGLVTSWTHEPNWKKAHNILVPSFSQHAMGRYHAMMVDIAVQLVQKWERLNADEHIEVSEDMTRLTLDTIGLCLFNYRFNSFYRDTPHPFIVSVVRALDEVMNKLQRANPDDPAYDENKRQCQEDIKVMNDYVDKIIADRKARGEQSHDLLTQMLNGKDPETGEPLDDGNIRQQIITFLIAGHQTTSGLLSFALYFLVKNPRVLQKVAEEAARVLVDPVPSYKQVKQLKYVGMVLNEALRLWPVAPMFSLYAKEDTVLGGEYPLTKGDEVMVLVPQLHRDKTIWGDDVEEFRPERFENPSAIPQHAFKPFGNGQRACIGQQFALHSATLVLGMMLKHFDFEDHTNYEVVIKESRTLKPEGFVVKAKSKGIPLGGIPSPSTEQSAKKVRKKAENAHNTPLLVLYGSNAGTAEGTARDLADIAMSKGFAPQVATLDSHAGNLPREGAVLIVTASYNGHPPDNAKQFVDWLDQASADEVKGVRYSVFGCGDKNWAGTYQKVPAFIDETLAAKGAENIADRGEADASDDFEGAYEEWRDHMWSDVAAYFGLDIENSEDNKSTLSLQFVDSAADMPLAKMHGAFSTNVVASKELQQPGSARSTRHLEIELPKEASYQEGDHLGVIPRYYEGIVNRVTQRFGLSASQLIRLEAEEEKLAHLPLAKTVSVEELLQYVELQDPVTRTQLRAMAAKTVCPPHKVELEALLGKQAYKEQVLAKRLTMLELLEKYPACEMSFSEFIALLPSIRPRYYSISSSPRVDEKQASITVSVVSGPAWSGYGEYKGIASNYLAELQEGDTITCFISTPQSEFTLPKDPETPLIMVGPGTGVAPFRGFVQARKQLKEQGQSLGEAHLYFGCRSPHEDYLYQEELENAQSEGIITLHTAFSRMPNQPKTYVQHVMEQDGKKLIELLDQGAHFYICGDGIQMAPAVEATLMKSYADVHQVSEADARLWLQQLEEKGRYAKDVWLG

SEQ ID NO: 1109 - DNA, 3147 bp, synthetic construct
  misc_feature 1..3147: note = variant of P450 oxidase from Bacillus megaterium
  source 1..3147: mol_type = other DNA
atgacaattaaggaaatgcctcagcctaagacgtttggagaacttaaaaatttaccgttattaaatacagataaaccggttcaagctttgatgcgtattgcggatgaattaggagaaatctttaaattcgaggcgcctggtagcgtaacgcgctatttatcaagtcagcgtctaattaaagaagcatgcgatgaatcacgctttgataaaaacttaagtcaagggcttaaatttgcacgtgattttgttggagacgggctggttacaagctggacgcatgaaccgaattggaaaaaagcgcataatatcttagttccaagctttagtcagcatgcaatggggcgttatcatgcgatgatggtcgatatcgccgtgcagcttgttcaaaagtgggagcgtctaaatgcagatgagcatattgaagtatcggaagacatgacacgtttaacgcttgatacaattggtctttgcctgtttaactatcgctttaacagcttttaccgagatacgcctcatccatttattgtgagtgtggttcgtgcactggatgaagtaatgaacaagctgcagcgagcaaatccagacgacccagcttatgatgaaaacaagcgccagtgtcaagaagatatcaaggtgatgaacgactatgtagataaaattattgcagatcgcaaagcaaggggtgaacaaagtcatgatttattaacgcagatgctaaacggaaaagatccagaaacgggtgagccgcttgatgacgggaacattcgtcagcaaattattacattcttaattgcgggacaccaaacgacaagtggtcttttatcatttgcgctgtatttcttagtgaaaaatccacgtgtattacaaaaagtagcagaagaagcagcacgagttctagtagatcctgttccaagctacaaacaagtcaaacagcttaaatatgttggcatggtcttaaacgaagcgctgcgcttatggccagtagcgcctatgttttccctatatgcaaaagaagatacggtgcttggaggagaatatcctttaacgaaaggcgacgaagtaatggttctggtgcctcagcttcaccgtgataaaacaatttggggagacgatgtggaggagttccgtccagagcgttttgaaaatccaagtgcgattccgcagcatgcgtttaaaccgtttggaaacggtcagcgtgcgtgtatcggtcagcagttcgctcttcatagtgcaacgctggtacttggtatgatgctaaaacactttgactttgaagatcatacaaactacgagctcgttattaaagaatcgcggacgttaaaacctgaaggctttgtggtaaaagcaaaatcgaaaggcattccgcttggcggtattccttcacctagcactgaacagtctgctaaaaaagtacgcaaaaaggcagaaaacgctcattggacgccgctgcttgtgctatacggttcaaatgcgggaacagctgaaggaacggcgcgtgatttagcagatattgcaatgagcaaaggatttgcaccgcaggtcgcaacgcttgattcacacgccggtaatcttccgcgcgaaggagctgtattaattgtaacggcgtcttataacggtcatccgcctgataacgcaaagcaatttgtcgattggttagaccaagcgtctgcggatgaagtaaaaggcgttcgctactccgtatttggatgcggcgataaaaattgggcggggacgtatcaaaaagtgcctgcttttatcgatgaaacgcttgccgctaaaggggcagaaaacatcgctgaccgcggtgaagcagatgcaagcgacgactttgaaggcgcgtatgaagaatggcgtgatcatatgtggagtgacgtagcagcctactttggtctcgacattgaaaacagtgaagataataaatctactctttcacttcaatttgtcgacagcgcggcggatatgccgcttgcgaaaatgcacggtgcgttttcaacgaacgtcgtagcaagcaaagaacttcaacagcctggcagtgcacgaagcacgcgacatcttgaaattgaacttccaaaagaagcttcttatcaagaaggagatcatttaggtgttattcctcgctattatgaaggaatagtaaaccgtgtaacacagaggttcggcctaagcgcatcacagctgatccgtctggaagcagaagaagaaaaattagctcatttgccactcgctaaaacagtatccgtagaagagcttctgcaatacgtggagcttcaagatcctgttacgcgcacgcagcttcgcgcaatggctgctaaaacggtctgcccgccgcataaagtagagcttgaagccttgcttggcaagcaagcctacaaagaacaagtgctggcaaaacgtttaacaatgcttgaactgcttgaaaaatacccggcgtgtgaaatgagtttcagcgaatttatcgcccttctgccaagcatacgcccgcgctattactcgatttcttcatcacctcgtgtcgatgaaaaacaagcaagcatcacggtcagcgttgtctcaggaccggcgtggagcggatatggagaatataaaggaattgcgtcgaactatcttgctgagctgcaagaaggagatacgattacgtgctttatttccacaccgcagtcagagtttacgctgccaaaagaccctgaaacgccgcttatcatggtcggaccgggaacaggcgtcgcgccgtttagaggctttgtgcaggcgcgcaaacagctaaaagaacaaggacagtcacttggagaagcacatttatacttcggctgccgttcacctcatgaagactatctgtatcaagaagagcttgaaaacgcccaaagcgaaggcatcattacgcttcataccgctttttctcgcatgccgaatcagccgaaaacatacgttcagcacgtaatggaacaagacggcaagaaattgattgaacttcttgatcaaggagcgcacttctatatttgcggagacggaattcaaatggcacctgccgttgaagcaacgcttatgaaaagctatgctgacgttcaccaagtgagtgaagcagacgctcgcttatggctgcagcagctagaagaaaaaggccgatacgcaaaagacgtgtggctgggg

SEQ ID NO: 1110 - protein, 1049 aa, synthetic construct
  REGION 1..1049: note = variant of P450 oxidase from Bacillus megaterium
MTIKEMPQPKTFGELKNLPLLNTDKPVQALMRIADELGEIFKFEAPGSVTRYLSSQRLIKEACDESRFDKNLSQGLKFARDFVGDGLVTSWTHEPNWKKAHNILVPSFSQHAMGRYHAMMVDIAVQLVQKWERLNADEHIEVSEDMTRLTLDTIGLCLFNYRFNSFYRDTPHPFIVSVVRALDEVMNKLQRANPDDPAYDENKRQCQEDIKVMNDYVDKIIADRKARGEQSHDLLTQMLNGKDPETGEPLDDGNIRQQIITFLIAGHQTTSGLLSFALYFLVKNPRVLQKVAEEAARVLVDPVPSYKQVKQLKYVGMVLNEALRLWPVAPMFSLYAKEDTVLGGEYPLTKGDEVMVLVPQLHRDKTIWGDDVEEFRPERFENPSAIPQHAFKPFGNGQRACIGQQFALHSATLVLGMMLKHFDFEDHTNYELVIKESRTLKPEGFVVKAKSKGIPLGGIPSPSTEQSAKKVRKKAENAHWTPLLVLYGSNAGTAEGTARDLADIAMSKGFAPQVATLDSHAGNLPREGAVLIVTASYNGHPPDNAKQFVDWLDQASADEVKGVRYSVFGCGDKNWAGTYQKVPAFIDETLAAKGAENIADRGEADASDDFEGAYEEWRDHMWSDVAAYFGLDIENSEDNKSTLSLQFVDSAADMPLAKMHGAFSTNVVASKELQQPGSARSTRHLEIELPKEASYQEGDHLGVIPRYYEGIVNRVTQRFGLSASQLIRLEAEEEKLAHLPLAKTVSVEELLQYVELQDPVTRTQLRAMAAKTVCPPHKVELEALLGKQAYKEQVLAKRLTMLELLEKYPACEMSFSEFIALLPSIRPRYYSISSSPRVDEKQASITVSVVSGPAWSGYGEYKGIASNYLAELQEGDTITCFISTPQSEFTLPKDPETPLIMVGPGTGVAPFRGFVQARKQLKEQGQSLGEAHLYFGCRSPHEDYLYQEELENAQSEGIITLHTAFSRMPNQPKTYVQHVMEQDGKKLIELLDQGAHFYICGDGIQMAPAVEATLMKSYADVHQVSEADARLWLQQLEEKGRYAKDVWLG

SEQ ID NO: 1111 - DNA, 3147 bp, synthetic construct
  misc_feature 1..3147: note = variant of P450 oxidase from Bacillus megaterium
  source 1..3147: mol_type = other DNA
atgacaattaaggaaatgcctcagcctaagacgtttggagaacttaaaaatttaccgttattaaatacagataaaccggttcaagctttgatgcgtattgcggatgaattaggagaaatctttaaattcgaggcgcctggtagcgtaacgcgctatttatcaagtcagcgtctaattaaagaagcatgcgatgaatcacgctttgataaaaacttaagtcaagggcttaaatttgcacgtgattttgttggagacgggctggttacaagctggacgcatgaaccgaattggaaaaaagcgcataatatcttagttccaagctttagtcagcatgcaatggggcgttatcatgcgatgatggtcgatatcgccgtgcagcttgttcaaaagtgggagcgtctaaatgcagatgagcatattgaagtatcggaagacatgacacgtttaacgcttgatacaattggtctttgcctgtttaactatcgctttaacagcttttaccgagatacgcctcatccatttattgtgagtgtggttcgtgcactggatgaagtaatgaacaagctgcagcgagcaaatccagacgacccagcttatgatgaaaacaagcgccagtgtcaagaagatatcaaggtgatgaacgactatgtagataaaattattgcagatcgcaaagcaaggggtgaacaaagtcatgatttattaacgcagatgctaaacggaaaagatccagaaacgggtgagccgcttgatgacgggaacattcgtcagcaaattattacattcttaattgcgggacaccaaacgacaagtggtcttttatcatttgcgctgtatttcttagtgaaaaatccacgtgtattacaaaaagtagcagaagaagcagcacgagttctagtagatcctgttccaagctacaaacaagtcaaacagcttaaatatgttggcatggtcttaaacgaagcgctgcgcttatggccagtagcgcctatgttttccctatatgcaaaagaagatacggtgcttggaggagaatatcctttaacgaaaggcgacgaagtaatggttctggtgcctcagcttcaccgtgataaaacaatttggggagacgatgtggaggagttccgtccagagcgttttgaaaatccaagtgcgattccgcagcatgcgtttaaaccgtttggaaacggtcagcgtgcgtgtatcggtcagcagttcgctcttcatagtgcaacgctggtacttggtatgctgctaaaacactttgactttgaagatcatacaaactacgagctcgttattaaagaatcgcggacgttaaaacctgaaggctttgtggtaaaagcaaaatcgaaaggcattccgcttggcggtattccttcacctagcactgaacagtctgctaaaaaagtacgcaaaaaggcagaaaacgctcataatacgccgctgcttgtgctatacggttcaaatgcgggaacagctgaaggaacggcgcgtgatttagcagatattgcaatgagcaaaggatttgcaccgcaggtcgcaacgcttgattcacacgccggtaatcttccgcgcgaaggagctgtattaattgtaacggcgtcttataacggtcatccgcctgataacgcaaagcaatttgtcgattggttagaccaagcgtctgcggatgaagtaaaaggcgttcgctactccgtatttggatgcggcgataaaaattgggcggggacgtatcaaaaagtgcctgcttttatcgatgaaacgcttgccgctaaaggggcagaaaacatcgctgaccgcggtgaagcagatgcaagcgacgactttgaaggcgcgtatgaagaatggcgtgatcatatgtggagtgacgtagcagcctactttggtctcgacattgaaaacagtgaagataataaatctactctttcacttcaatttgtcgacagcgcggcggatatgccgcttgcgaaaatgcacggtgcgttttcaacgaacgtcgtagcaagcaaagaacttcaacagcctggcagtgcacgaagcacgcgacatcttgaaattgaacttccaaaagaagcttcttatcaagaaggagatcatttaggtgttattcctcgctattatgaaggaatagtaaaccgtgtaacacagaggttcggcctaagcgcatcacagctgatccgtctggaagcagaagaagaaaaattagctcatttgccactcgctaaaacagtatccgtagaagagcttctgcaatacgtggagcttcaagatcctgttacgcgcacgcagcttcgcgcaatggctgctaaaacggtctgcccgccgcataaagtagagcttgaagccttgcttggcaagcaagcctacaaagaacaagtgctggcaaaacgtttaacaatgcttgaactgcttgaaaaatacccggcgtgtgaaatgagtttcagcgaatttatcgcccttctgccaagcatacgcccgcgctattactcgatttcttcatcacctcgtgtcgatgaaaaacaagcaagcatcacggtcagcgttgtctcaggaccggcgtggagcggatatggagaatataaaggaattgcgtcgaactatcttgctgagctgcaagaaggagatacgattacgtgctttatttccacaccgcagtcagagtttacgctgccaaaagaccctgaaacgccgcttatcatggtcggaccgggaacaggcgtcgcgccgtttagaggctttgtgcaggcgcgcaaacagctaaaagaacaaggacagtcacttggagaagcacatttatacttcggctgccgttcacctcatgaagactatctgtatcaagaagagcttgaaaacgcccaaagcgaaggcatcattacgcttcataccgctttttctcgcatgccgaatcagccgaaaacatacgttcagcacgtaatggaacaagacggcaagaaattgattgaacttcttgatcaaggagcgcacttctatatttgcggagacggaattcaaatggcacctgccgttgaagcaacgcttatgaaaagctatgctgacgttcaccaagtgagtgaagcagacgctcgcttatggctgcagcagctagaagaaaaaggccgatacgcaaaagacgtgtggctgggg

SEQ ID NO: 1112 - protein, 1049 aa, synthetic construct
  REGION 1..1049: note = variant of P450 oxidase from Bacillus megaterium
MTIKEMPQPKTFGELKNLPLLNTDKPVQALMRIADELGEIFKFEAPGSVTRYLSSQRLIKEACDESRFDKNLSQGLKFARDFVGDGLVTSWTHEPNWKKAHNILVPSFSQHAMGRYHAMMVDIAVQLVQKWERLNADEHIEVSEDMTRLTLDTIGLCLFNYRFNSFYRDTPHPFIVSVVRALDEVMNKLQRANPDDPAYDENKRQCQEDIKVMNDYVDKIIADRKARGEQSHDLLTQMLNGKDPETGEPLDDGNIRQQIITFLIAGHQTTSGLLSFALYFLVKNPRVLQKVAEEAARVLVDPVPSYKQVKQLKYVGMVLNEALRLWPVAPMFSLYAKEDTVLGGEYPLTKGDEVMVLVPQLHRDKTIWGDDVEEFRPERFENPSAIPQHAFKPFGNGQRACIGQQFALHSATLVLGMLLKHFDFEDHTNYELVIKESRTLKPEGFVVKAKSKGIPLGGIPSPSTEQSAKKVRKKAENAHNTPLLVLYGSNAGTAEGTARDLADIAMSKGFAPQVATLDSHAGNLPREGAVLIVTASYNGHPPDNAKQFVDWLDQASADEVKGVRYSVFGCGDKNWAGTYQKVPAFIDETLAAKGAENIADRGEADASDDFEGAYEEWRDHMWSDVAAYFGLDIENSEDNKSTLSLQFVDSAADMPLAKMHGAFSTNVVASKELQQPGSARSTRHLEIELPKEASYQEGDHLGVIPRYYEGIVNRVTQRFGLSASQLIRLEAEEEKLAHLPLAKTVSVEELLQYVELQDPVTRTQLRAMAAKTVCPPHKVELEALLGKQAYKEQVLAKRLTMLELLEKYPACEMSFSEFIALLPSIRPRYYSISSSPRVDEKQASITVSVVSGPAWSGYGEYKGIASNYLAELQEGDTITCFISTPQSEFTLPKDPETPLIMVGPGTGVAPFRGFVQARKQLKEQGQSLGEAHLYFGCRSPHEDYLYQEELENAQSEGIITLHTAFSRMPNQPKTYVQHVMEQDGKKLIELLDQGAHFYICGDGIQMAPAVEATLMKSYADVHQVSEADARLWLQQLEEKGRYAKDVWLG

SEQ ID NO: 1113 - DNA, 3147 bp, synthetic construct
  misc_feature 1..3147: note = variant of P450 oxidase from Bacillus megaterium
  source 1..3147: mol_type = other DNA
atgacaattaaggaaatgcctcagcctaagacgtttggagaacttaaaaatttaccgttattaaatacagataaaccggttcaagctttgatgcgtattgcggatgaattaggagaaatctttaaattcgaggcgcctggtagcgtaacgcgctatttatcaagtcagcgtctaattaaagaagcatgcgatgaatcacgctttgataaaaacttaagtcaagggcttaaatttgcacgtgattttgttggagacgggctggttacaagctggacgcatgaaccgaattggaaaaaagcacataatatcttagttccaagctttagtcagcatgcaatggggcgttatcatgcgatgatggtcgatatcgccgtgcagcttgttcaaaagtgggagcgtctaaatgcagatgagcatattgaagtatcggaagacatgacacgtttaacgcttgatacaattggtctttgcctgtttaactatcgctttaacagcttttaccgagatacgcctcatccatttattgtgagtgtggttcgtgcactggatgaagtaatgaacaagctgcagcgagcaaatccagacgacccagcttatgatgaaaacaagcgccagtgtcaagaagatatcaaggtgatgaacgactatgtagataaaattattgcagatcgcaaagcaaggggtgaacaaagtcatgatttattaacgcagatgctaaacggaaaagatccagaaacgggtgagccgcttgatgacgggaacattcgtcagcaaattattacattcttaattgcgggacaccaaacgacaagtggtcttttatcatttgcgctgtatttcttagtgaaaaatccacgtgtattacaaaaagtagcagaagaagcagcacgagttctagtagatcctgttccaagctacaaacaagtcaaacagcttaaatatgttggcatggtcttaaacgaagcgctgcgcttatggccagtagcgcctatgttttccctatatgcaaaagaagatacggtgcttggaggagaatatcctttaacgaaaggcgacgaagtaatggttctggtgcctcagcttcaccgtgataaaacaatttggggagacgatgtggaggagttccgtccagagcgttttgaaaatccaagtgcgattccgcagcatgcgtttaaaccgtttggaaacggtcagcgtgcgtgtatcggtcagcagttcgctcttcatagtgcaacgctggtacttggtatgatgctaaaacactttgactttgaagatacgacaaactacgagctcgttattaaagaatcgcggacgttaaaacctgaaggctttgtggtaaaagcaaaatcgaaaggcattccgcttggcggtattccttcacctagcactgaacagtctgctaaaaaagtacgcaaaaaggcagaaaacgctcataatacgccgctgcttgtgctatacggttcaaatgcgggaacagctgaaggaacggcgcgtgatttagcagatattgcaatgagcaaaggatttgcaccgcaggtcgcaacgcttgattcacacgccggtaatcttccgcgcgaaggagctgtattaattgtaacggcgtcttataacggtcatccgcctgataacgcaaagcaatttgtcgattggttagaccaagcgtctgcggatgaagtaaaaggcgttcgctactccgtatttggatgcggcgataaaaattgggcggggacgtatcaaaaagtgcctgcttttatcgatgaaacgcttgccgctaaaggggcagaaaacatcgctgaccgcggtgaagcagatgcaagcgacgactttgaaggcgcgtatgaagaatggcgtgatcatatgtggagtgacgtagcagcctactttggtctcgacattgaaaacagtgaagataataaatctactctttcacttcaatttgtcgacagcgcggcggatatgccgcttgcgaaaatgcacggtgcgttttcaacgaacgtcgtagcaagcaaagaacttcaacagcctggcagtgcacgaagcacgcgacatcttgaaattgaacttccaaaagaagcttcttatcaagaaggagatcatttaggtgttattcctcgctattatgaaggaatagtaaaccgtgtaacacagaggttcggcctaagcgcatcacagctgatccgtctggaagcagaagaagaaaaattagctcatttgccactcgctaaaacagtatccgtagaagagcttctgcaatacgtggagcttcaagatcctgttacgcgcacgcagcttcgcgcaatggctgctaaaacggtctgcccgccgcataaagtagagcttgaagccttgcttggcaagcaagcctacaaagaacaagtgctggcaaaacgtttaacaatgcttgaactgcttgaaaaatacccggcgtgtgaaatgagtttcagcgaatttatcgcccttctgccaagcatacgcccgcgctattactcgatttcttcatcacctcgtgtcgatgaaaaacaagcaagcatcacggtcagcgttgtctcaggaccggcgtggagcggatatggagaatataaaggaattgcgtcgaactatcttgctgagctgcaagaaggagatacgattacgtgctttatttccacaccgcagtcagagtttacgctgccaaaagaccctgaaacgccgcttatcatggtcggaccgggaacaggcgtcgcgccgtttagaggctttgtgcaggcgcgcaaacagctaaaagaacaaggacagtcacttggagaagcacatttatacttcggctgccgttcacctcatgaagactatctgtatcaagaagagcttgaaaacgcccaaagcgaaggcatcattacgcttcataccgctttttctcgcatgccgaatcagccgaaaacatacgttcagcacgtaatggaacaagacggcaagaaattgattgaacttcttgatcaaggagcgcacttctatatttgcggagacggaattcaaatggcacctgccgttgaagcaacgcttatgaaaagctatgctgacgttcaccaagtgagtgaagcagacgctcgcttatggctgcagcagctagaagaaaaaggccgatacgcaaaagacgtgtggctgggg

SEQ ID NO: 1114 - protein, 1049 aa, synthetic construct
  REGION 1..1049: note = variant of P450 oxidase from Bacillus megaterium
MTIKEMPQPKTFGELKNLPLLNTDKPVQALMRIADELGEIFKFEAPGSVTRYLSSQRLIKEACDESRFDKNLSQGLKFARDFVGDGLVTSWTHEPNWKKAHNILVPSFSQHAMGRYHAMMVDIAVQLVQKWERLNADEHIEVSEDMTRLTLDTIGLCLFNYRFNSFYRDTPHPFIVSVVRALDEVMNKLQRANPDDPAYDENKRQCQEDIKVMNDYVDKIIADRKARGEQSHDLLTQMLNGKDPETGEPLDDGNIRQQIITFLIAGHQTTSGLLSFALYFLVKNPRVLQKVAEEAARVLVDPVPSYKQVKQLKYVGMVLNEALRLWPVAPMFSLYAKEDTVLGGEYPLTKGDEVMVLVPQLHRDKTIWGDDVEEFRPERFENPSAIPQHAFKPFGNGQRACIGQQFALHSATLVLGMMLKHFDFEDTTNYELVIKESRTLKPEGFVVKAKSKGIPLGGIPSPSTEQSAKKVRKKAENAHNTPLLVLYGSNAGTAEGTARDLADIAMSKGFAPQVATLDSHAGNLPREGAVLIVTASYNGHPPDNAKQFVDWLDQASADEVKGVRYSVFGCGDKNWAGTYQKVPAFIDETLAAKGAENIADRGEADASDDFEGAYEEWRDHMWSDVAAYFGLDIENSEDNKSTLSLQFVDSAADMPLAKMHGAFSTNVVASKELQQPGSARSTRHLEIELPKEASYQEGDHLGVIPRYYEGIVNRVTQRFGLSASQLIRLEAEEEKLAHLPLAKTVSVEELLQYVELQDPVTRTQLRAMAAKTVCPPHKVELEALLGKQAYKEQVLAKRLTMLELLEKYPACEMSFSEFIALLPSIRPRYYSISSSPRVDEKQASITVSVVSGPAWSGYGEYKGIASNYLAELQEGDTITCFISTPQSEFTLPKDPETPLIMVGPGTGVAPFRGFVQARKQLKEQGQSLGEAHLYFGCRSPHEDYLYQEELENAQSEGIITLHTAFSRMPNQPKTYVQHVMEQDGKKLIELLDQGAHFYICGDGIQMAPAVEATLMKSYADVHQVSEADARLWLQQLEEKGRYAKDVWLG

SEQ ID NO: 1115 - DNA, 3147 bp, synthetic construct
  misc_feature 1..3147: note = variant of P450 oxidase from Bacillus megaterium
  source 1..3147: mol_type = other DNA
atgacaattaaggaaatgcctcagcctaagacgtttggagaacttaaaaatttaccgttattaaatacagataaaccggttcaagctttgatgcgtattgcggatgaattaggagaaatctttaaattcgaggcgcctggtagcgtaacgcgctatttatcaagtcagcgtctaattaaagaagcatgcgatgaatcacgctttgataaaaacttaagtcaagggcttaaatttgcacgtgattttgttggagacgggctggttacaagctggacgcatgaaccgaattggaaaaaagcgcataatatcttagttccaagctttagtcagcatgcaatggggcgttatcatgcgatgatggtcgatatcgccgtgcagcttgttcaaaagtgggagcgtctaaatgcagatgagcatattgaagtatcggaagacatgacacgtttaacgcttgatacaattggtctttgcctgtttaactatcgctttaacagcttttaccgagatacgcctcatccatttattgtgagtgtggttcgtgcactggatgaagtaatgaacaagctgcagcgagcaaatccagacgacccagcttatgatgaaaacaagcgccagtgtcaagaagatatcaaggtgatgaacgactatgtagataaaattattgcagatcgcaaagcaaggggtgaacaaagtcatgatttattaacgcagatgctaaacggaaaagatccagaaacgggtgagccgcttgatgacgggaacattcgtcagcaaattattacattcttaattgcgggacaccaaacgacaagtggtcttttatcatttgcgctgtatttcttagtgaaaaatccacgtgtattacaaaaagtagcagaagaagcagcacgagttctagtagatcctgttccaaattacaaacaagtcaaacagcttaaatatgttggcatggtcttaaacgaagcgctgcgcttatggccagtagcgcctatgttttccctatatgcaaaagaagatacggtgcttggaggagaatatcctttaacgaaaggcgacgaagtaatggttctggtgcctcagcttcaccgtgataaaacaatttggggagacgatgtggaggagttccgtccagagcgttttgaaaatccaagtgcgattccgcagcatgcgtttaaaccgtttggaaacggtcagcgtgcgtgtatcggtcagcagttcgctcttcatagtgcaacgctggtacttggtatgatgctaaaacactttgactttgaagatcatacaaactacgagctcgttattaaagaatcgcggacgttaaaacctgaaggctttgtggtaaaagcaaaatcgaaaggcattccgcttggcggtattccttcacctagcactgaacagtctgctaaaaaagtacgcaaaaaggcagaaaacgctcataatacgccgctgcttgtgctatacggttcaaatgcgggaacagctgaaggaacggcgcgtgatttagcagatattgcaatgagcaaaggatttgcaccgcaggtcgcaacgcttgattcacacgccggtaatcttccgcgcgaaggagctgtattaattgtaacggcgtcttataacggtcatccgcctgataacgcaaagcaatttgtcgattggttagaccaagcgtctgcggatgaagtaaaaggcgttcgctactccgtatttggatgcggcgataaaaattgggcggggacgtatcaaaaagtgcctgcttttatcgatgaaacgcttgccgctaaaggggcagaaaacatcgctgaccgcggtgaagcagatgcaagcgacgactttgaaggcgcgtatgaagaatggcgtgatcatatgtggagtgacgtagcagcctactttggtctcgacattgaaaacagtgaagataataaatctactctttcacttcaatttgtcgacagcgcggcggatatgccgcttgcgaaaatgcacggtgcgttttcaacgaacgtcgtagcaagcaaagaacttcaacagcctggcagtgcacgaagcacgcgacatcttgaaattgaacttccaaaagaagcttcttatcaagaaggagatcatttaggtgttattcctcgctattatgaaggaatagtaaaccgtgtaacacagaggttcggcctaagcgcatcacagctgatccgtctggaagcagaagaagaaaaattagctcatttgccactcgctaaaacagtatccgtagaagagcttctgcaatacgtggagcttcaagatcctgttacgcgcacgcagcttcgcgcaatggctgctaaaacggtctgcccgccgcataaagtagagcttgaagccttgcttggcaagcaagcctacaaagaacaagtgctggcaaaacgtttaacaatgcttgaactgcttgaaaaatacccggcgtgtgaaatgagtttcagcgaatttatcgcccttctgccaagcatacgcccgcgctattactcgatttcttcatcacctcgtgtcgatgaaaaacaagcaagcatcacggtcagcgttgtctcaggaccggcgtggagcggatatggagaatataaaggaattgcgtcgaactatcttgctgagctgcaagaaggagatacgattacgtgctttatttccacaccgcagtcagagtttacgctgccaaaagaccctgaaacgccgcttatcatggtcggaccgggaacaggcgtcgcgccgtttagaggctttgtgcaggcgcgcaaacagctaaaagaacaaggacagtcacttggagaagcacatttatacttcggctgccgttcacctcatgaagactatctgtatcaagaagagcttgaaaacgcccaaagcgaaggcatcattacgcttcataccgctttttctcgcatgccgaatcagccgaaaacatacgttcagcacgtaatggaacaagacggcaagaaattgattgaacttcttgatcaaggagcgcacttctatatttgcggagacggaattcaaatggcacctgccgttgaagcaacgcttatgaaaagctatgctgacgttcaccaagtgagtgaagcagacgctcgcttatggctgcagcagctagaagaaaaaggccgatacgcaaaagacgtgtggctgggg

SEQ ID NO: 1116 - protein, 1049 aa, synthetic construct
  REGION 1..1049: note = variant of P450 oxidase from Bacillus megaterium
MTIKEMPQPKTFGELKNLPLLNTDKPVQALMRIADELGEIFKFEAPGSVTRYLSSQRLIKEACDESRFDKNLSQGLKFARDFVGDGLVTSWTHEPNWKKAHNILVPSFSQHAMGRYHAMMVDIAVQLVQKWERLNADEHIEVSEDMTRLTLDTIGLCLFNYRFNSFYRDTPHPFIVSVVRALDEVMNKLQRANPDDPAYDENKRQCQEDIKVMNDYVDKIIADRKARGEQSHDLLTQMLNGKDPETGEPLDDGNIRQQIITFLIAGHQTTSGLLSFALYFLVKNPRVLQKVAEEAARVLVDPVPNYKQVKQLKYVGMVLNEALRLWPVAPMFSLYAKEDTVLGGEYPLTKGDEVMVLVPQLHRDKTIWGDDVEEFRPERFENPSAIPQHAFKPFGNGQRACIGQQFALHSATLVLGMMLKHFDFEDHTNYELVIKESRTLKPEGFVVKAKSKGIPLGGIPSPSTEQSAKKVRKKAENAHNTPLLVLYGSNAGTAEGTARDLADIAMSKGFAPQVATLDSHAGNLPREGAVLIVTASYNGHPPDNAKQFVDWLDQASADEVKGVRYSVFGCGDKNWAGTYQKVPAFIDETLAAKGAENIADRGEADASDDFEGAYEEWRDHMWSDVAAYFGLDIENSEDNKSTLSLQFVDSAADMPLAKMHGAFSTNVVASKELQQPGSARSTRHLEIELPKEASYQEGDHLGVIPRYYEGIVNRVTQRFGLSASQLIRLEAEEEKLAHLPLAKTVSVEELLQYVELQDPVTRTQLRAMAAKTVCPPHKVELEALLGKQAYKEQVLAKRLTMLELLEKYPACEMSFSEFIALLPSIRPRYYSISSSPRVDEKQASITVSVVSGPAWSGYGEYKGIASNYLAELQEGDTITCFISTPQSEFTLPKDPETPLIMVGPGTGVAPFRGFVQARKQLKEQGQSLGEAHLYFGCRSPHEDYLYQEELENAQSEGIITLHTAFSRMPNQPKTYVQHVMEQDGKKLIELLDQGAHFYICGDGIQMAPAVEATLMKSYADVHQVSEADARLWLQQLEEKGRYAKDVWLG

(The sequence listing continues in the following parts.)
